United States Patent Application Publication US 2025/0313840 A1 - sequence listing, part 6

SEQ ID NO: 146277 - DNA, 17 bp, synthetic construct
  source 1..17: mol_type = other DNA
gaagaggcaggaggaag

SEQ ID NO: 146278 - DNA, 17 bp, synthetic construct
  source 1..17: mol_type = other DNA
aagaggcaggaggaagg

SEQ ID NO: 146279 - DNA, 17 bp, synthetic construct
  source 1..17: mol_type = other DNA
agaggcaggaggaaggg

SEQ ID NO: 146280 - DNA, 17 bp, synthetic construct
  source 1..17: mol_type = other DNA
gaggcaggaggaagggt

SEQ ID NO: 146281 - DNA, 17 bp, synthetic construct
  source 1..17: mol_type = other DNA
aggcaggaggaagggtc

SEQ ID NO: 146282 - DNA, 17 bp, synthetic construct
  source 1..17: mol_type = other DNA
ggcaggaggaagggtca

SEQ ID NO: 146283 - DNA, 17 bp, synthetic construct
  source 1..17: mol_type = other DNA
gcaggaggaagggtcaa

SEQ ID NO: 146284 - DNA, 17 bp, synthetic construct
  source 1..17: mol_type = other DNA
caggaggaagggtcaag

SEQ ID NO: 146285 - DNA, 17 bp, synthetic construct
  source 1..17: mol_type = other DNA
aggaggaagggtcaagg

SEQ ID NO: 146286 - DNA, 17 bp, synthetic construct
  source 1..17: mol_type = other DNA
ggaggaagggtcaaggg

SEQ ID NO: 146287 - DNA, 17 bp, synthetic construct
  source 1..17: mol_type = other DNA
gaggaagggtcaagggc

SEQ ID NO: 146288 - DNA, 17 bp, synthetic construct
  source 1..17: mol_type = other DNA
aggaagggtcaagggct

SEQ ID NO: 146289 - DNA, 17 bp, synthetic construct
  source 1..17: mol_type = other DNA
ggaagggtcaagggctg

SEQ ID NO: 146290 - DNA, 17 bp, synthetic construct
  source 1..17: mol_type = other DNA
gaagggtcaagggctgc

SEQ ID NO: 146291 - DNA, 17 bp, synthetic construct
  source 1..17: mol_type = other DNA
aagggtcaagggctgct

SEQ ID NO: 146292 - DNA, 17 bp, synthetic construct
  source 1..17: mol_type = other DNA
agggtcaagggctgctt

SEQ ID NO: 146293 - DNA, 17 bp, synthetic construct
  source 1..17: mol_type = other DNA
gggtcaagggctgctta

SEQ ID NO: 146294 - DNA, 17 bp, synthetic construct
  source 1..17: mol_type = other DNA
ggtcaagggctgcttag

SEQ ID NO: 146295 - DNA, 17 bp, synthetic construct
  source 1..17: mol_type = other DNA
gtcaagggctgcttagg

SEQ ID NO: 146296 - DNA, 17 bp, synthetic construct
  source 1..17: mol_type = other DNA
tcaagggctgcttaggg

SEQ ID NO: 146297 - DNA, 17 bp, synthetic construct
  source 1..17: mol_type = other DNA
caagggctgcttagggt

SEQ ID NO: 146298 - DNA, 17 bp, synthetic construct
  source 1..17: mol_type = other DNA
aagggctgcttagggtc

SEQ ID NO: 146299 - DNA, 17 bp, synthetic construct
  source 1..17: mol_type = other DNA
agggctgcttagggtca

SEQ ID NO: 146300 - DNA, 17 bp, synthetic construct
  source 1..17: mol_type = other DNA
gggctgcttagggtcag

SEQ ID NO: 146301 - DNA, 17 bp, synthetic construct
  source 1..17: mol_type = other DNA
ggctgcttagggtcagc

SEQ ID NO: 146302 - DNA, 17 bp, synthetic construct
  source 1..17: mol_type = other DNA
gctgcttagggtcagca

SEQ ID NO: 146303 - DNA, 17 bp, synthetic construct
  source 1..17: mol_type = other DNA
ctgcttagggtcagcag

SEQ ID NO: 146304 - DNA, 17 bp, synthetic construct
  source 1..17: mol_type = other DNA
tgcttagggtcagcagg

SEQ ID NO: 146305 - DNA, 17 bp, synthetic construct
  source 1..17: mol_type = other DNA
gcttagggtcagcagga

SEQ ID NO: 146306 - DNA, 17 bp, synthetic construct
  source 1..17: mol_type = other DNA
cttagggtcagcaggat

SEQ ID NO: 146307 - DNA, 17 bp, synthetic construct
  source 1..17: mol_type = other DNA
ttagggtcagcaggatt

SEQ ID NO: 146308 - DNA, 17 bp, synthetic construct
  source 1..17: mol_type = other DNA
tagggtcagcaggattg

SEQ ID NO: 146309 - DNA, 17 bp, synthetic construct
  source 1..17: mol_type = other DNA
agggtcagcaggattgg

SEQ ID NO: 146310 - DNA, 17 bp, synthetic construct
  source 1..17: mol_type = other DNA
gggtcagcaggattgga

SEQ ID NO: 146311 - DNA, 17 bp, synthetic construct
  source 1..17: mol_type = other DNA
ggtcagcaggattggag

SEQ ID NO: 146312 - DNA, 17 bp, synthetic construct
  source 1..17: mol_type = other DNA
gtcagcaggattggagg

SEQ ID NO: 146313 - DNA, 17 bp, synthetic construct
  source 1..17: mol_type = other DNA
tcagcaggattggagga

SEQ ID NO: 146314 - DNA, 17 bp, synthetic construct
  source 1..17: mol_type = other DNA
cagcaggattggaggag

SEQ ID NO: 146315 - DNA, 17 bp, synthetic construct
  source 1..17: mol_type = other DNA
agcaggattggaggagc

SEQ ID NO: 146316 - DNA, 17 bp, synthetic construct
  source 1..17: mol_type = other DNA
gcaggattggaggagct

SEQ ID NO: 146317 - DNA, 17 bp, synthetic construct
  source 1..17: mol_type = other DNA
caggattggaggagctg

SEQ ID NO: 146318 - DNA, 17 bp, synthetic construct
  source 1..17: mol_type = other DNA
aggattggaggagctgg

SEQ ID NO: 146319 - DNA, 17 bp, synthetic construct
  source 1..17: mol_type = other DNA
ggattggaggagctggt

SEQ ID NO: 146320 - DNA, 17 bp, synthetic construct
  source 1..17: mol_type = other DNA
gattggaggagctggtt

SEQ ID NO: 146321 - DNA, 17 bp, synthetic construct
  source 1..17: mol_type = other DNA
attggaggagctggttc

SEQ ID NO: 146322 - DNA, 17 bp, synthetic construct
  source 1..17: mol_type = other DNA
ttggaggagctggttca

SEQ ID NO: 146323 - DNA, 17 bp, synthetic construct
  source 1..17: mol_type = other DNA
tggaggagctggttcag

SEQ ID NO: 146324 - DNA, 17 bp, synthetic construct
  source 1..17: mol_type = other DNA
ggaggagctggttcaga

SEQ ID NO: 146325 - DNA, 17 bp, synthetic construct
  source 1..17: mol_type = other DNA
gaggagctggttcagac

SEQ ID NO: 146326 - DNA, 17 bp, synthetic construct
  source 1..17: mol_type = other DNA
aggagctggttcagaca

SEQ ID NO: 146327 - DNA, 17 bp, synthetic construct
  source 1..17: mol_type = other DNA
ggagctggttcagacag

SEQ ID NO: 146328 - DNA, 17 bp, synthetic construct
  source 1..17: mol_type = other DNA
gagctggttcagacagg

SEQ ID NO: 146329 - DNA, 17 bp, synthetic construct
  source 1..17: mol_type = other DNA
agctggttcagacaggg

SEQ ID NO: 146330 - DNA, 17 bp, synthetic construct
  source 1..17: mol_type = other DNA
gctggttcagacagggg

SEQ ID NO: 146331 - DNA, 17 bp, synthetic construct
  source 1..17: mol_type = other DNA
ctggttcagacagggga

SEQ ID NO: 146332 - DNA, 17 bp, synthetic construct
  source 1..17: mol_type = other DNA
tggttcagacaggggaa

SEQ ID NO: 146333 - DNA, 17 bp, synthetic construct
  source 1..17: mol_type = other DNA
ggttcagacaggggaag

SEQ ID NO: 146334 - DNA, 17 bp, synthetic construct
  source 1..17: mol_type = other DNA
gttcagacaggggaagt

SEQ ID NO: 146335 - DNA, 17 bp, synthetic construct
  source 1..17: mol_type = other DNA
ttcagacaggggaagtg

SEQ ID NO: 146336 - DNA, 17 bp, synthetic construct
  source 1..17: mol_type = other DNA
tcagacaggggaagtgc

SEQ ID NO: 146337 - DNA, 17 bp, synthetic construct
  source 1..17: mol_type = other DNA
cagacaggggaagtgca

SEQ ID NO: 146338 - DNA, 17 bp, synthetic construct
  source 1..17: mol_type = other DNA
agacaggggaagtgcag

SEQ ID NO: 146339 - DNA, 17 bp, synthetic construct
  source 1..17: mol_type = other DNA
gacaggggaagtgcagg

SEQ ID NO: 146340 - DNA, 17 bp, synthetic construct
  source 1..17: mol_type = other DNA
acaggggaagtgcaggc

SEQ ID NO: 146341 - DNA, 17 bp, synthetic construct
  source 1..17: mol_type = other DNA
caggggaagtgcaggcc

SEQ ID NO: 146342 - DNA, 17 bp, synthetic construct
  source 1..17: mol_type = other DNA
aggggaagtgcaggcca

SEQ ID NO: 146343 - DNA, 17 bp, synthetic construct
  source 1..17: mol_type = other DNA
ggggaagtgcaggccac

SEQ ID NO: 146344 - DNA, 17 bp, synthetic construct
  source 1..17: mol_type = other DNA
gggaagtgcaggccaca

SEQ ID NO: 146345 - DNA, 17 bp, synthetic construct
  source 1..17: mol_type = other DNA
ggaagtgcaggccacag

SEQ ID NO: 146346 - DNA, 17 bp, synthetic construct
  source 1..17: mol_type = other DNA
gaagtgcaggccacaga

SEQ ID NO: 146347 - DNA, 17 bp, synthetic construct
  source 1..17: mol_type = other DNA
aagtgcaggccacagaa

SEQ ID NO: 146348 - DNA, 17 bp, synthetic construct
  source 1..17: mol_type = other DNA
agtgcaggccacagaag

SEQ ID NO: 146349 - DNA, 17 bp, synthetic construct
  source 1..17: mol_type = other DNA
gtgcaggccacagaaga

SEQ ID NO: 146350 - DNA, 17 bp, synthetic construct
  source 1..17: mol_type = other DNA
tgcaggccacagaagac

SEQ ID NO: 146351 - DNA, 17 bp, synthetic construct
  source 1..17: mol_type = other DNA
gcaggccacagaagaca

SEQ ID NO: 146352 - DNA, 17 bp, synthetic construct
  source 1..17: mol_type = other DNA
caggccacagaagacag

SEQ ID NO: 146353 - DNA, 17 bp, synthetic construct
  source 1..17: mol_type = other DNA
aggccacagaagacaga

SEQ ID NO: 146354 - DNA, 17 bp, synthetic construct
  source 1..17: mol_type = other DNA
ggccacagaagacagag

SEQ ID NO: 146355 - DNA, 17 bp, synthetic construct
  source 1..17: mol_type = other DNA
gccacagaagacagagc

SEQ ID NO: 146356 - DNA, 17 bp, synthetic construct
  source 1..17: mol_type = other DNA
ccacagaagacagagcc

SEQ ID NO: 146357 - DNA, 17 bp, synthetic construct
  source 1..17: mol_type = other DNA
cacagaagacagagccg

SEQ ID NO: 146358 - DNA, 17 bp, synthetic construct
  source 1..17: mol_type = other DNA
acagaagacagagccgg

SEQ ID NO: 146359 - DNA, 17 bp, synthetic construct
  source 1..17: mol_type = other DNA
cagaagacagagccggg

SEQ ID NO: 146360 - DNA, 17 bp, synthetic construct
  source 1..17: mol_type = other DNA
agaagacagagccggga

SEQ ID NO: 146361 - DNA, 17 bp, synthetic construct
  source 1..17: mol_type = other DNA
gaagacagagccgggag

SEQ ID NO: 146362 - DNA, 17 bp, synthetic construct
  source 1..17: mol_type = other DNA
aagacagagccgggagc

SEQ ID NO: 146363 - DNA, 17 bp, synthetic construct
  source 1..17: mol_type = other DNA
agacagagccgggagcc

SEQ ID NO: 146364 - DNA, 17 bp, synthetic construct
  source 1..17: mol_type = other DNA
gacagagccgggagcca

SEQ ID NO: 146365 - DNA, 17 bp, synthetic construct
  source 1..17: mol_type = other DNA
acagagccgggagccaa

SEQ ID NO: 146366 - DNA, 17 bp, synthetic construct
  source 1..17: mol_type = other DNA
cagagccgggagccaag

SEQ ID NO: 146367 - DNA, 17 bp, synthetic construct
  source 1..17: mol_type = other DNA
agagccgggagccaagg

SEQ ID NO: 146368 - DNA, 17 bp, synthetic construct
  source 1..17: mol_type = other DNA
gagccgggagccaaggg

SEQ ID NO: 146369 - DNA, 17 bp, synthetic construct
  source 1..17: mol_type = other DNA
agccgggagccaaggga

SEQ ID NO: 146370 - DNA, 17 bp, synthetic construct
  source 1..17: mol_type = other DNA
gccgggagccaagggac

SEQ ID NO: 146371 - DNA, 17 bp, synthetic construct
  source 1..17: mol_type = other DNA
ccgggagccaagggacc

SEQ ID NO: 146372 - DNA, 17 bp, synthetic construct
  source 1..17: mol_type = other DNA
cgggagccaagggaccc

SEQ ID NO: 146373 - DNA, 17 bp, synthetic construct
  source 1..17: mol_type = other DNA
gggagccaagggaccct

SEQ ID NO: 146374 - DNA, 17 bp, synthetic construct
  source 1..17: mol_type = other DNA
ggagccaagggaccctg

SEQ ID NO: 146375 - DNA, 17 bp, synthetic construct
  source 1..17: mol_type = other DNA
gagccaagggaccctgg

SEQ ID NO: 146376 - DNA, 17 bp, synthetic construct
  source 1..17: mol_type = other DNA
agccaagggaccctggg

SEQ ID NO: 146377 - DNA, 17 bp, synthetic construct
  source 1..17: mol_type = other DNA
gccaagggaccctgggg

SEQ ID NO: 146378 - DNA, 17 bp, synthetic construct
  source 1..17: mol_type = other DNA
ccaagggaccctggggg

SEQ ID NO: 146379 - DNA, 17 bp, synthetic construct
  source 1..17: mol_type = other DNA
caagggaccctgggggc

SEQ ID NO: 146380 - DNA, 17 bp, synthetic construct
  source 1..17: mol_type = other DNA
aagggaccctgggggcc

SEQ ID NO: 146381 - DNA, 17 bp, synthetic construct
  source 1..17: mol_type = other DNA
agggaccctgggggccc

SEQ ID NO: 146382 - DNA, 17 bp, synthetic construct
  source 1..17: mol_type = other DNA
gggaccctgggggccca

SEQ ID NO: 146383 - DNA, 17 bp, synthetic construct
  source 1..17: mol_type = other DNA
ggaccctgggggcccag

SEQ ID NO: 146384 - DNA, 17 bp, synthetic construct
  source 1..17: mol_type = other DNA
gaccctgggggcccaga

SEQ ID NO: 146385 - DNA, 17 bp, synthetic construct
  source 1..17: mol_type = other DNA
accctgggggcccagag

SEQ ID NO: 146386 - DNA, 17 bp, synthetic construct
  source 1..17: mol_type = other DNA
ccctgggggcccagagc

SEQ ID NO: 146387 - DNA, 17 bp, synthetic construct
  source 1..17: mol_type = other DNA
cctgggggcccagagct

SEQ ID NO: 146388 - DNA, 17 bp, synthetic construct
  source 1..17: mol_type = other DNA
ctgggggcccagagctg

SEQ ID NO: 146389 - DNA, 17 bp, synthetic construct
  source 1..17: mol_type = other DNA
tgggggcccagagctgc

SEQ ID NO: 146390 - DNA, 17 bp, synthetic construct
  source 1..17: mol_type = other DNA
gggggcccagagctgcc

SEQ ID NO: 146391 - DNA, 17 bp, synthetic construct
  source 1..17: mol_type = other DNA
ggggcccagagctgccc

SEQ ID NO: 146392 - DNA, 17 bp, synthetic construct
  source 1..17: mol_type = other DNA
gggcccagagctgcccc

SEQ ID NO: 146393 - DNA, 17 bp, synthetic construct
  source 1..17: mol_type = other DNA
ggcccagagctgcccca

SEQ ID NO: 146394 - DNA, 17 bp, synthetic construct
  source 1..17: mol_type = other DNA
gcccagagctgccccat

SEQ ID NO: 146395 - DNA, 17 bp, synthetic construct
  source 1..17: mol_type = other DNA
cccagagctgccccatc

SEQ ID NO: 146396 - DNA, 17 bp, synthetic construct
  source 1..17: mol_type = other DNA
ccagagctgccccatcc

SEQ ID NO: 146397 - DNA, 17 bp, synthetic construct
  source 1..17: mol_type = other DNA
cagagctgccccatcct

SEQ ID NO: 146398 - DNA, 17 bp, synthetic construct
  source 1..17: mol_type = other DNA
agagctgccccatcctg

SEQ ID NO: 146399 - DNA, 17 bp, synthetic construct
  source 1..17: mol_type = other DNA
gagctgccccatcctga

SEQ ID NO: 146400 - DNA, 17 bp, synthetic construct
  source 1..17: mol_type = other DNA
agctgccccatcctgag

SEQ ID NO: 146401 - DNA, 17 bp, synthetic construct
  source 1..17: mol_type = other DNA
gctgccccatcctgaga

SEQ ID NO: 146402 - DNA, 17 bp, synthetic construct
  source 1..17: mol_type = other DNA
ctgccccatcctgagaa

SEQ ID NO: 146403 - DNA, 17 bp, synthetic construct
  source 1..17: mol_type = other DNA
tgccccatcctgagaag

SEQ ID NO: 146404 - DNA, 17 bp, synthetic construct
  source 1..17: mol_type = other DNA
gccccatcctgagaagg

SEQ ID NO: 146405 - DNA, 17 bp, synthetic construct
  source 1..17: mol_type = other DNA
ccccatcctgagaaggt

SEQ ID NO: 146406 - DNA, 17 bp, synthetic construct
  source 1..17: mol_type = other DNA
cccatcctgagaaggtg

SEQ ID NO: 146407 - DNA, 17 bp, synthetic construct
  source 1..17: mol_type = other DNA
ccatcctgagaaggtga

SEQ ID NO: 146408 - DNA, 17 bp, synthetic construct
  source 1..17: mol_type = other DNA
catcctgagaaggtgaa

SEQ ID NO: 146409 - DNA, 17 bp, synthetic construct
  source 1..17: mol_type = other DNA
atcctgagaaggtgaag

SEQ ID NO: 146410 - DNA, 17 bp, synthetic construct
  source 1..17: mol_type = other DNA
tcctgagaaggtgaagc

SEQ ID NO: 146411 - DNA, 17 bp, synthetic construct
  source 1..17: mol_type = other DNA
cctgagaaggtgaagcc

SEQ ID NO: 146412 - DNA, 17 bp, synthetic construct
  source 1..17: mol_type = other DNA
ctgagaaggtgaagcct

SEQ ID NO: 146413 - DNA, 17 bp, synthetic construct
  source 1..17: mol_type = other DNA
tgagaaggtgaagcctc

SEQ ID NO: 146414 - DNA, 17 bp, synthetic construct
  source 1..17: mol_type = other DNA
gagaaggtgaagcctca

SEQ ID NO: 146415 - DNA, 17 bp, synthetic construct
  source 1..17: mol_type = other DNA
agaaggtgaagcctcac

SEQ ID NO: 146416 - DNA, 17 bp, synthetic construct
  source 1..17: mol_type = other DNA
gaaggtgaagcctcacg

SEQ ID NO: 146417 - DNA, 17 bp, synthetic construct
  source 1..17: mol_type = other DNA
aaggtgaagcctcacgt

SEQ ID NO: 146418 - DNA, 17 bp, synthetic construct
  source 1..17: mol_type = other DNA
aggtgaagcctcacgtg

SEQ ID NO: 146419 - DNA, 17 bp, synthetic construct
  source 1..17: mol_type = other DNA
ggtgaagcctcacgtgc

SEQ ID NO: 146420 - DNA, 17 bp, synthetic construct
  source 1..17: mol_type = other DNA
gtgaagcctcacgtgcc

SEQ ID NO: 146421 - DNA, 17 bp, synthetic construct
  source 1..17: mol_type = other DNA
tgaagcctcacgtgccc

SEQ ID NO: 146422 - DNA, 17 bp, synthetic construct
  source 1..17: mol_type = other DNA
gaagcctcacgtgccca

SEQ ID NO: 146423 - DNA, 17 bp, synthetic construct
  source 1..17: mol_type = other DNA
aagcctcacgtgcccac

SEQ ID NO: 146424 - DNA, 17 bp, synthetic construct
  source 1..17: mol_type = other DNA
agcctcacgtgcccaca

SEQ ID NO: 146425 - DNA, 17 bp, synthetic construct
  source 1..17: mol_type = other DNA
gcctcacgtgcccacag

SEQ ID NO: 146426 - DNA, 17 bp, synthetic construct
  source 1..17: mol_type = other DNA
cctcacgtgcccacaga

SEQ ID NO: 146427 - DNA, 17 bp, synthetic construct
  source 1..17: mol_type = other DNA
ctcacgtgcccacagag

SEQ ID NO: 146428 - DNA, 17 bp, synthetic construct
  source 1..17: mol_type = other DNA
tcacgtgcccacagagc

SEQ ID NO: 146429 - DNA, 17 bp, synthetic construct
  source 1..17: mol_type = other DNA
cacgtgcccacagagca

SEQ ID NO: 146430 - DNA, 17 bp, synthetic construct
  source 1..17: mol_type = other DNA
acgtgcccacagagcag

SEQ ID NO: 146431 - DNA, 17 bp, synthetic construct
  source 1..17: mol_type = other DNA
cgtgcccacagagcagg

SEQ ID NO: 146432 - DNA, 17 bp, synthetic construct
  source 1..17: mol_type = other DNA
gtgcccacagagcaggc

SEQ ID NO: 146433 - DNA, 17 bp, synthetic construct
  source 1..17: mol_type = other DNA
tgcccacagagcaggcc

SEQ ID NO: 146434 - DNA, 17 bp, synthetic construct
  source 1..17: mol_type = other DNA
gcccacagagcaggcca

SEQ ID NO: 146435 - DNA, 17 bp, synthetic construct
  source 1..17: mol_type = other DNA
cccacagagcaggccac

SEQ ID NO: 146436 - DNA, 17 bp, synthetic construct
  source 1..17: mol_type = other DNA
ccacagagcaggccact

SEQ ID NO: 146437 - DNA, 17 bp, synthetic construct
  source 1..17: mol_type = other DNA
cacagagcaggccactg

SEQ ID NO: 146438 - DNA, 17 bp, synthetic construct
  source 1..17: mol_type = other DNA
acagagcaggccactgt

SEQ ID NO: 146439 - DNA, 17 bp, synthetic construct
  source 1..17: mol_type = other DNA
cagagcaggccactgtg

SEQ ID NO: 146440 - DNA, 17 bp, synthetic construct
  source 1..17: mol_type = other DNA
agagcaggccactgtgg

SEQ ID NO: 146441 - DNA, 17 bp, synthetic construct
  source 1..17: mol_type = other DNA
gagcaggccactgtgga

SEQ ID NO: 146442 - DNA, 17 bp, synthetic construct
  source 1..17: mol_type = other DNA
agcaggccactgtggac

SEQ ID NO: 146443 - DNA, 17 bp, synthetic construct
  source 1..17: mol_type = other DNA
gcaggccactgtggaca

SEQ ID NO: 146444 - DNA, 17 bp, synthetic construct
  source 1..17: mol_type = other DNA
caggccactgtggacag

SEQ ID NO: 146445 - DNA, 17 bp, synthetic construct
  source 1..17: mol_type = other DNA
aggccactgtggacaga

SEQ ID NO: 146446 - DNA, 17 bp, synthetic construct
  source 1..17: mol_type = other DNA
ggccactgtggacagaa

SEQ ID NO: 146447 - DNA, 17 bp, synthetic construct
  source 1..17: mol_type = other DNA
gccactgtggacagaag

SEQ ID NO: 146448 - DNA, 17 bp, synthetic construct
  source 1..17: mol_type = other DNA
ccactgtggacagaagg

SEQ ID NO: 146449 - DNA, 17 bp, synthetic construct
  source 1..17: mol_type = other DNA
cactgtggacagaaggg

SEQ ID NO: 146450 - DNA, 17 bp, synthetic construct
  source 1..17: mol_type = other DNA
actgtggacagaagggg

SEQ ID NO: 146451 - DNA, 17 bp, synthetic construct
  source 1..17: mol_type = other DNA
ctgtggacagaaggggg

SEQ ID NO: 146452 - DNA, 17 bp, synthetic construct
  source 1..17: mol_type = other DNA
tgtggacagaagggggc

SEQ ID NO: 146453 - DNA, 17 bp, synthetic construct
  source 1..17: mol_type = other DNA
gtggacagaagggggcg

SEQ ID NO: 146454 - DNA, 17 bp, synthetic construct
  source 1..17: mol_type = other DNA
tggacagaagggggcgg

SEQ ID NO: 146455 - DNA, 17 bp, synthetic construct
  source 1..17: mol_type = other DNA
ggacagaagggggcggc

SEQ ID NO: 146456 - DNA, 17 bp, synthetic construct
  source 1..17: mol_type = other DNA
gacagaagggggcggcc

SEQ ID NO: 146457 - DNA, 17 bp, synthetic construct
  source 1..17: mol_type = other DNA
acagaagggggcggccg

SEQ ID NO: 146458 - DNA, 17 bp, synthetic construct
  source 1..17: mol_type = other DNA
cagaagggggcggccgt

SEQ ID NO: 146459 - DNA, 17 bp, synthetic construct
  source 1..17: mol_type = other DNA
agaagggggcggccgtc

SEQ ID NO: 146460 - DNA, 17 bp, synthetic construct
  source 1..17: mol_type = other DNA
gaagggggcggccgtct

SEQ ID NO: 146461 - DNA, 17 bp, synthetic construct
  source 1..17: mol_type = other DNA
aagggggcggccgtctg

SEQ ID NO: 146462 - DNA, 17 bp, synthetic construct
  source 1..17: mol_type = other DNA
agggggcggccgtctgg

SEQ ID NO: 146463 - DNA, 17 bp, synthetic construct
  source 1..17: mol_type = other DNA
gggggcggccgtctggc

SEQ ID NO: 146464 - DNA, 17 bp, synthetic construct
  source 1..17: mol_type = other DNA
ggggcggccgtctggcc

SEQ ID NO: 146465 - DNA, 17 bp, synthetic construct
  source 1..17: mol_type = other DNA
gggcggccgtctggccc

SEQ ID NO: 146466 - DNA, 17 bp, synthetic construct
  source 1..17: mol_type = other DNA
ggcggccgtctggccca

SEQ ID NO: 146467 - DNA, 17 bp, synthetic construct
  source 1..17: mol_type = other DNA
gcggccgtctggcccag

SEQ ID NO: 146468 - DNA, 17 bp, synthetic construct
  source 1..17: mol_type = other DNA
cggccgtctggcccagg

SEQ ID NO: 146469 - DNA, 17 bp, synthetic construct
  source 1..17: mol_type = other DNA
ggccgtctggcccagga

SEQ ID NO: 146470 - DNA, 17 bp, synthetic construct
  source 1..17: mol_type = other DNA
gccgtctggcccaggac

SEQ ID NO: 146471 - DNA, 17 bp, synthetic construct
  source 1..17: mol_type = other DNA
ccgtctggcccaggacc

SEQ ID NO: 146472 - DNA, 17 bp, synthetic construct
  source 1..17: mol_type = other DNA
cgtctggcccaggaccc

SEQ ID NO: 146473 - DNA, 17 bp, synthetic construct
  source 1..17: mol_type = other DNA
gtctggcccaggacccc

SEQ ID NO: 146474 - DNA, 17 bp, synthetic construct
  source 1..17: mol_type = other DNA
tctggcccaggacccca

SEQ ID NO: 146475 - DNA, 17 bp, synthetic construct
  source 1..17: mol_type = other DNA
ctggcccaggaccccag

SEQ ID NO: 146476 - DNA, 17 bp, synthetic construct
  source 1..17: mol_type = other DNA
tggcccaggaccccaga

SEQ ID NO: 146477 - DNA, 17 bp, synthetic construct
  source 1..17: mol_type = other DNA
ggcccaggaccccagag

SEQ ID NO: 146478 - DNA, 17 bp, synthetic construct
  source 1..17: mol_type = other DNA
gcccaggaccccagagg

SEQ ID NO: 146479 - DNA, 17 bp, synthetic construct
  source 1..17: mol_type = other DNA
cccaggaccccagaggc

SEQ ID NO: 146480 - DNA, 17 bp, synthetic construct
  source 1..17: mol_type = other DNA
ccaggaccccagaggcc

SEQ ID NO: 146481 - DNA, 17 bp, synthetic construct
  source 1..17: mol_type = other DNA
caggaccccagaggccc

SEQ ID NO: 146482 - DNA, 17 bp, synthetic construct
  source 1..17: mol_type = other DNA
aggaccccagaggccca

SEQ ID NO: 146483 - DNA, 17 bp, synthetic construct
  source 1..17: mol_type = other DNA
ggaccccagaggcccat

SEQ ID NO: 146484 - DNA, 17 bp, synthetic construct
  source 1..17: mol_type = other DNA
gaccccagaggcccatg

SEQ ID NO: 146485 - DNA, 17 bp, synthetic construct
  source 1..17: mol_type = other DNA
accccagaggcccatgt

SEQ ID NO: 146486 - DNA, 17 bp, synthetic construct
  source 1..17: mol_type = other DNA
ccccagaggcccatgtg

SEQ ID NO: 146487 - DNA, 17 bp, synthetic construct
  source 1..17: mol_type = other DNA
cccagaggcccatgtgt

SEQ ID NO: 146488 - DNA, 17 bp, synthetic construct
  source 1..17: mol_type = other DNA
ccagaggcccatgtgtc

SEQ ID NO: 146489 - DNA, 17 bp, synthetic construct
  source 1..17: mol_type = other DNA
cagaggcccatgtgtca

SEQ ID NO: 146490 - DNA, 17 bp, synthetic construct
  source 1..17: mol_type = other DNA
agaggcccatgtgtcac

SEQ ID NO: 146491 - DNA, 17 bp, synthetic construct
  source 1..17: mol_type = other DNA
gaggcccatgtgtcacc

SEQ ID NO: 146492 - DNA, 17 bp, synthetic construct
  source 1..17: mol_type = other DNA
aggcccatgtgtcacca

SEQ ID NO: 146493 - DNA, 17 bp, synthetic construct
  source 1..17: mol_type = other DNA
ggcccatgtgtcaccat

SEQ ID NO: 146494 - DNA, 17 bp, synthetic construct
  source 1..17: mol_type = other DNA
gcccatgtgtcaccatg

SEQ ID NO: 146495 - DNA, 17 bp, synthetic construct
  source 1..17: mol_type = other DNA
cccatgtgtcaccatgg

SEQ ID NO: 146496 - DNA, 17 bp, synthetic construct
  source 1..17: mol_type = other DNA
ccatgtgtcaccatggc

SEQ ID NO: 146497 - DNA, 17 bp, synthetic construct
  source 1..17: mol_type = other DNA
catgtgtcaccatggct

SEQ ID NO: 146498 - DNA, 17 bp, synthetic construct
  source 1..17: mol_type = other DNA
atgtgtcaccatggctg

SEQ ID NO: 146499 - DNA, 17 bp, synthetic construct
  source 1..17: mol_type = other DNA
tgtgtcaccatggctgg

SEQ ID NO: 146500 - DNA, 17 bp, synthetic construct
  source 1..17: mol_type = other DNA
gtgtcaccatggctggg

SEQ ID NO: 146501 - DNA, 17 bp, synthetic construct
  source 1..17: mol_type = other DNA
tgtcaccatggctgggc

SEQ ID NO: 146502 - DNA, 17 bp, synthetic construct
  source 1..17: mol_type = other DNA
gtcaccatggctgggca

SEQ ID NO: 146503 - DNA, 17 bp, synthetic construct
  source 1..17: mol_type = other DNA
tcaccatggctgggcag

SEQ ID NO: 146504 - DNA, 17 bp, synthetic construct
  source 1..17: mol_type = other DNA
caccatggctgggcaga

SEQ ID NO: 146505 - DNA, 17 bp, synthetic construct
  source 1..17: mol_type = other DNA
accatggctgggcagag

SEQ ID NO: 146506 - DNA, 17 bp, synthetic construct
  source 1..17: mol_type = other DNA
ccatggctgggcagaga

SEQ ID NO: 146507 - DNA, 17 bp, synthetic construct
  source 1..17: mol_type = other DNA
catggctgggcagagaa

SEQ ID NO: 146508 - DNA, 17 bp, synthetic construct
  source 1..17: mol_type = other DNA
atggctgggcagagaaa

SEQ ID NO: 146509 - DNA, 17 bp, synthetic construct
  source 1..17: mol_type = other DNA
tggctgggcagagaaac

SEQ ID NO: 146510 - DNA, 17 bp, synthetic construct
  source 1..17: mol_type = other DNA
ggctgggcagagaaacg

SEQ ID NO: 146511 - DNA, 17 bp, synthetic construct
  source 1..17: mol_type = other DNA
gctgggcagagaaacgg

SEQ ID NO: 146512 - DNA, 17 bp, synthetic construct
  source 1..17: mol_type = other DNA
ctgggcagagaaacggc

SEQ ID NO: 146513 - DNA, 17 bp, synthetic construct
  source 1..17: mol_type = other DNA
tgggcagagaaacggcg

SEQ ID NO: 146514 - DNA, 17 bp, synthetic construct
  source 1..17: mol_type = other DNA
gggcagagaaacggcgg

SEQ ID NO: 146515 - DNA, 17 bp, synthetic construct
  source 1..17: mol_type = other DNA
ggcagagaaacggcggg

SEQ ID NO: 146516 - DNA, 17 bp, synthetic construct
  source 1..17: mol_type = other DNA
gcagagaaacggcgggg

SEQ ID NO: 146517 - DNA, 17 bp, synthetic construct
  source 1..17: mol_type = other DNA
cagagaaacggcggggc

SEQ ID NO: 146518 - DNA, 17 bp, synthetic construct
  source 1..17: mol_type = other DNA
agagaaacggcggggcc

SEQ ID NO: 146519 - DNA, 17 bp, synthetic construct
  source 1..17: mol_type = other DNA
gagaaacggcggggcca

SEQ ID NO: 146520 - DNA, 17 bp, synthetic construct
  source 1..17: mol_type = other DNA
agaaacggcggggccaa

SEQ ID NO: 146521 - DNA, 17 bp, synthetic construct
  source 1..17: mol_type = other DNA
gaaacggcggggccaag

SEQ ID NO: 146522 - DNA, 17 bp, synthetic construct
  source 1..17: mol_type = other DNA
aaacggcggggccaagg

SEQ ID NO: 146523 - DNA, 17 bp, synthetic construct
  source 1..17: mol_type = other DNA
aacggcggggccaaggt

SEQ ID NO: 146524 - DNA, 17 bp, synthetic construct
  source 1..17: mol_type = other DNA
acggcggggccaaggtg

SEQ ID NO: 146525 - DNA, 17 bp, synthetic construct
  source 1..17: mol_type = other DNA
cggcggggccaaggtgg

SEQ ID NO: 146526 - DNA, 17 bp, synthetic construct
  source 1..17: mol_type = other DNA
ggcggggccaaggtggc

SEQ ID NO: 146527 - DNA, 17 bp, synthetic construct
  source 1..17: mol_type = other DNA
gcggggccaaggtggct

SEQ ID NO: 146528 - DNA, 17 bp, synthetic construct
  source 1..17: mol_type = other DNA
cggggccaaggtggctg

SEQ ID NO: 146529 - DNA, 17 bp, synthetic construct
  source 1..17: mol_type = other DNA
ggggccaaggtggctga

SEQ ID NO: 146530 - DNA, 17 bp, synthetic construct
  source 1..17: mol_type = other DNA
gggccaaggtggctgat

SEQ ID NO: 146531 - DNA, 17 bp, synthetic construct
  source 1..17: mol_type = other DNA
ggccaaggtggctgatg

SEQ ID NO: 146532 - DNA, 17 bp, synthetic construct
  source 1..17: mol_type = other DNA
gccaaggtggctgatgt

SEQ ID NO: 146533 - DNA, 17 bp, synthetic construct
  source 1..17: mol_type = other DNA
ccaaggtggctgatgtg

SEQ ID NO: 146534 - DNA, 17 bp, synthetic construct
  source 1..17: mol_type = other DNA
caaggtggctgatgtga

SEQ ID NO: 146535 - DNA, 17 bp, synthetic construct
  source 1..17: mol_type = other DNA
aaggtggctgatgtgag

SEQ ID NO: 146536 - DNA, 17 bp, synthetic construct
  source 1..17: mol_type = other DNA
aggtggctgatgtgagg

SEQ ID NO: 146537 - DNA, 17 bp, synthetic construct
  source 1..17: mol_type = other DNA
ggtggctgatgtgaggg

SEQ ID NO: 146538 - DNA, 17 bp, synthetic construct
  source 1..17: mol_type = other DNA
gtggctgatgtgagggc

SEQ ID NO: 146539 - DNA, 17 bp, synthetic construct
  source 1..17: mol_type = other DNA
tggctgatgtgagggcc

SEQ ID NO: 146540 - DNA, 17 bp, synthetic construct
  source 1..17: mol_type = other DNA
ggctgatgtgagggcca

SEQ ID NO: 146541 - DNA, 17 bp, synthetic construct
  source 1..17: mol_type = other DNA
gctgatgtgagggccac

SEQ ID NO: 146542 - DNA, 17 bp, synthetic construct
  source 1..17: mol_type = other DNA
ctgatgtgagggccacc

SEQ ID NO: 146543 - DNA, 17 bp, synthetic construct
  source 1..17: mol_type = other DNA
tgatgtgagggccaccc

SEQ ID NO: 146544 - DNA, 17 bp, synthetic construct
  source 1..17: mol_type = other DNA
gatgtgagggccaccct

SEQ ID NO: 146545 - DNA, 17 bp, synthetic construct
  source 1..17: mol_type = other DNA
atgtgagggccaccctg

SEQ ID NO: 146546 - DNA, 17 bp, synthetic construct
  source 1..17: mol_type = other DNA
tgtgagggccaccctgc

SEQ ID NO: 146547 - DNA, 17 bp, synthetic construct
  source 1..17: mol_type = other DNA
gtgagggccaccctgcg

SEQ ID NO: 146548 - DNA, 17 bp, synthetic construct
  source 1..17: mol_type = other DNA
tgagggccaccctgcgt

SEQ ID NO: 146549 - DNA, 17 bp, synthetic construct
  source 1..17: mol_type = other DNA
gagggccaccctgcgtc

SEQ ID NO: 146550 - DNA, 17 bp, synthetic construct
  source 1..17: mol_type = other DNA
agggccaccctgcgtcc

SEQ ID NO: 146551 - DNA, 17 bp, synthetic construct
  source 1..17: mol_type = other DNA
gggccaccctgcgtcca

SEQ ID NO: 146552 - DNA, 17 bp, synthetic construct
  source 1..17: mol_type = other DNA
ggccaccctgcgtccac

SEQ ID NO: 146553 - DNA, 17 bp, synthetic construct
  source 1..17: mol_type = other DNA
gccaccctgcgtccaca

SEQ ID NO: 146554 - DNA, 17 bp, synthetic construct
  source 1..17: mol_type = other DNA
ccaccctgcgtccacag

SEQ ID NO: 146555 - DNA, 17 bp, synthetic construct
  source 1..17: mol_type = other DNA
caccctgcgtccacagg

SEQ ID NO: 146556 - DNA, 17 bp, synthetic construct
  source 1..17: mol_type = other DNA
accctgcgtccacaggt

SEQ ID NO: 146557 - DNA, 17 bp, synthetic construct
  source 1..17: mol_type = other DNA
ccctgcgtccacaggta

SEQ ID NO: 146558 - DNA, 17 bp, synthetic construct
  source 1..17: mol_type = other DNA
cctgcgtccacaggtac

SEQ ID NO: 146559 - DNA, 17 bp, synthetic construct
  source 1..17: mol_type = other DNA
ctgcgtccacaggtact

SEQ ID NO: 146560 - DNA, 17 bp, synthetic construct
  source 1..17: mol_type = other DNA
tgcgtccacaggtactc

SEQ ID NO: 146561 - DNA, 17 bp, synthetic construct
  source 1..17: mol_type = other DNA
gcgtccacaggtactca

SEQ ID NO: 146562 - DNA, 17 bp, synthetic construct
  source 1..17: mol_type = other DNA
cgtccacaggtactcag

SEQ ID NO: 146563 - DNA, 17 bp, synthetic construct
  source 1..17: mol_type = other DNA
gtccacaggtactcagc

SEQ ID NO: 146564 - DNA, 17 bp, synthetic construct
  source 1..17: mol_type = other DNA
tccacaggtactcagca

SEQ ID NO: 146565 - DNA, 17 bp, synthetic construct
  source 1..17: mol_type = other DNA
ccacaggtactcagcag

SEQ ID NO: 146566 - DNA, 17 bp, synthetic construct
  source 1..17: mol_type = other DNA
cacaggtactcagcaga

SEQ ID NO: 146567 - DNA, 17 bp, synthetic construct
  source 1..17: mol_type = other DNA
acaggtactcagcagag

SEQ ID NO: 146568 - DNA, 17 bp, synthetic construct
  source 1..17: mol_type = other DNA
caggtactcagcagagg

SEQ ID NO: 146569 - DNA, 17 bp, synthetic construct
  source 1..17: mol_type = other DNA
aggtactcagcagaggc

SEQ ID NO: 146570 - DNA, 17 bp, synthetic construct
  source 1..17: mol_type = other DNA
ggtactcagcagaggcc

SEQ ID NO: 146571 - DNA, 17 bp, synthetic construct
  source 1..17: mol_type = other DNA
gtactcagcagaggccc

SEQ ID NO: 146572 - DNA, 17 bp, synthetic construct
  source 1..17: mol_type = other DNA
tactcagcagaggccca

SEQ ID NO: 146573 - DNA, 17 bp, synthetic construct
  source 1..17: mol_type = other DNA
actcagcagaggcccag

SEQ ID NO: 146574 - DNA, 17 bp, synthetic construct
  source 1..17: mol_type = other DNA
ctcagcagaggcccagg

SEQ ID NO: 146575 - DNA, 17 bp, synthetic construct
  source 1..17: mol_type = other DNA
tcagcagaggcccaggc

SEQ ID NO: 146576 - DNA, 17 bp, synthetic construct
  source 1..17: mol_type = other DNA
cagcagaggcccaggcc

SEQ ID NO: 146577 - DNA, 17 bp, synthetic construct
  source 1..17: mol_type = other DNA
agcagaggcccaggcca

SEQ ID NO: 146578 - DNA, 17 bp, synthetic construct
  source 1..17: mol_type = other DNA
gcagaggcccaggccat

SEQ ID NO: 146579 - DNA, 17 bp, synthetic construct
  source 1..17: mol_type = other DNA
cagaggcccaggccatg

SEQ ID NO: 146580 - DNA, 17 bp, synthetic construct
  source 1..17: mol_type = other DNA
agaggcccaggccatgc

SEQ ID NO: 146581 - DNA, 17 bp, synthetic construct
  source 1..17: mol_type = other DNA
gaggcccaggccatgca

SEQ ID NO: 146582 - DNA, 17 bp, synthetic construct
  source 1..17: mol_type = other DNA
aggcccaggccatgcag

SEQ ID NO: 146583 - DNA, 17 bp, synthetic construct
  source 1..17: mol_type = other DNA
ggcccaggccatgcagc

SEQ ID NO: 146584 - DNA, 17 bp, synthetic construct
  source 1..17: mol_type = other DNA
gcccaggccatgcagca

SEQ ID NO: 146585 - DNA, 17 bp, synthetic construct
  source 1..17: mol_type = other DNA
cccaggccatgcagcac

SEQ ID NO: 146586 - DNA, 17 bp, synthetic construct
  source 1..17: mol_type = other DNA
ccaggccatgcagcacc

SEQ ID NO: 146587 - DNA, 17 bp, synthetic construct
  source 1..17: mol_type = other DNA
caggccatgcagcacca

SEQ ID NO: 146588 - DNA, 17 bp, synthetic construct
  source 1..17: mol_type = other DNA
aggccatgcagcaccag

SEQ ID NO: 146589 - DNA, 17 bp, synthetic construct
  source 1..17: mol_type = other DNA
ggccatgcagcaccagt

SEQ ID NO: 146590 - DNA, 17 bp, synthetic construct
  source 1..17: mol_type = other DNA
gccatgcagcaccagtg

SEQ ID NO: 146591 - DNA, 17 bp, synthetic construct
  source 1..17: mol_type = other DNA
ccatgcagcaccagtgc

SEQ ID NO: 146592 - DNA, 17 bp, synthetic construct
  source 1..17: mol_type = other DNA
catgcagcaccagtgca

SEQ ID NO: 146593 - DNA, 17 bp, synthetic construct
  source 1..17: mol_type = other DNA
atgcagcaccagtgcac

SEQ ID NO: 146594 - DNA, 17 bp, synthetic construct
  source 1..17: mol_type = other DNA
tgcagcaccagtgcacc

SEQ ID NO: 146595 - DNA, 17 bp, synthetic construct
  source 1..17: mol_type = other DNA
gcagcaccagtgcacct

SEQ ID NO: 146596 - DNA, 17 bp, synthetic construct
  source 1..17: mol_type = other DNA
cagcaccagtgcacctg

SEQ ID NO: 146597 - DNA, 17 bp, synthetic construct
  source 1..17: mol_type = other DNA
agcaccagtgcacctgc

SEQ ID NO: 146598 - DNA, 17 bp, synthetic construct
  source 1..17: mol_type = other DNA
gcaccagtgcacctgct

SEQ ID NO: 146599 - DNA, 17 bp, synthetic construct
  source 1..17: mol_type = other DNA
caccagtgcacctgctg

SEQ ID NO: 146600 - DNA, 17 bp, synthetic construct
  source 1..17: mol_type = other DNA
accagtgcacctgctgc

SEQ ID NO: 146601 - DNA, 17 bp, synthetic construct
  source 1..17: mol_type = other DNA
ccagtgcacctgctgcc

SEQ ID NO: 146602 - DNA, 17 bp, synthetic construct
  source 1..17: mol_type = other DNA
cagtgcacctgctgcca

SEQ ID NO: 146603 - DNA, 17 bp, synthetic construct
  source 1..17: mol_type = other DNA
agtgcacctgctgccag

SEQ ID NO: 146604 - DNA, 17 bp, synthetic construct
  source 1..17: mol_type = other DNA
gtgcacctgctgccagg

SEQ ID NO: 146605 - DNA, 17 bp, synthetic construct
  source 1..17: mol_type = other DNA
tgcacctgctgccagga

SEQ ID NO: 146606 - DNA, 17 bp, synthetic construct
  source 1..17: mol_type = other DNA
gcacctgctgccaggag

SEQ ID NO: 146607 - DNA, 17 bp, synthetic construct
  source 1..17: mol_type = other DNA
cacctgctgccaggaga

SEQ ID NO: 146608 - DNA, 17 bp, synthetic construct
  source 1..17: mol_type = other DNA
acctgctgccaggagag

SEQ ID NO: 146609 - DNA, 17 bp, synthetic construct
  source 1..17: mol_type = other DNA
cctgctgccaggagagg

SEQ ID NO: 146610 - DNA, 17 bp, synthetic construct
  source 1..17: mol_type = other DNA
ctgctgccaggagaggc

SEQ ID NO: 146611 - DNA, 17 bp, synthetic construct
  source 1..17: mol_type = other DNA
tgctgccaggagaggcg

SEQ ID NO: 146612 - DNA, 17 bp, synthetic construct
  source 1..17: mol_type = other DNA
gctgccaggagaggcgg

SEQ ID NO: 146613 - DNA, 17 bp, synthetic construct
  source 1..17: mol_type = other DNA
ctgccaggagaggcggg

SEQ ID NO: 146614 - DNA, 17 bp, synthetic construct
  source 1..17: mol_type = other DNA
tgccaggagaggcgggt

SEQ ID NO: 146615 - DNA, 17 bp, synthetic construct
  source 1..17: mol_type = other DNA
gccaggagaggcgggtc

SEQ ID NO: 146616 - DNA, 17 bp, synthetic construct
  source 1..17: mol_type = other DNA
ccaggagaggcgggtcc

SEQ ID NO: 146617 - DNA, 17 bp, synthetic construct
  source 1..17: mol_type = other DNA
caggagaggcgggtcca

SEQ ID NO: 146618 - DNA, 17 bp, synthetic construct
  source 1..17: mol_type = other DNA
aggagaggcgggtccac

SEQ ID NO: 146619 - DNA, 17 bp, synthetic construct
  source 1..17: mol_type = other DNA
ggagaggcgggtccacg

SEQ ID NO: 146620 - DNA, 17 bp, synthetic construct
  source 1..17: mol_type = other DNA
gagaggcgggtccacga

SEQ ID NO: 146621 - DNA, 17 bp, synthetic construct
  source 1..17: mol_type = other DNA
agaggcgggtccacgag

SEQ ID NO: 146622 - DNA, 17 bp, synthetic construct
  source 1..17: mol_type = other DNA
gaggcgggtccacgagg

SEQ ID NO: 146623 - DNA, 17 bp, synthetic construct
  source 1..17: mol_type = other DNA
aggcgggtccacgagga

SEQ ID NO: 146624 - DNA, 17 bp, synthetic construct
  source 1..17: mol_type = other DNA
ggcgggtccacgaggag

SEQ ID NO: 146625 - DNA, 17 bp, synthetic construct
  source 1..17: mol_type = other DNA
gcgggtccacgaggaga

SEQ ID NO: 146626 - DNA, 17 bp, synthetic construct
  source 1..17: mol_type = other DNA
cgggtccacgaggagac

SEQ ID NO: 146627 - DNA, 17 bp, synthetic construct
  source 1..17: mol_type = other DNA
gggtccacgaggagacg

SEQ ID NO: 146628 - DNA, 17 bp, synthetic construct
  source 1..17: mol_type = other DNA
ggtccacgaggagacgg

SEQ ID NO: 146629 - DNA, 17 bp, synthetic construct
  source 1..17: mol_type = other DNA
gtccacgaggagacggt

SEQ ID NO: 146630 - DNA, 17 bp, synthetic construct
  source 1..17: mol_type = other DNA
tccacgaggagacggtg

SEQ ID NO: 146631 - DNA, 17 bp, synthetic construct
  source 1..17: mol_type = other DNA
ccacgaggagacggtgc

SEQ ID NO: 146632 - DNA, 17 bp, synthetic construct
  source 1..17: mol_type = other DNA
cacgaggagacggtgcc

SEQ ID NO: 146633 - DNA, 17 bp, synthetic construct
  source 1..17: mol_type = other DNA
acgaggagacggtgccc

SEQ ID NO: 146634 - DNA, 17 bp, synthetic construct
  source 1..17: mol_type = other DNA
cgaggagacggtgccct

SEQ ID NO: 146635 - DNA, 17 bp, synthetic construct
  source 1..17: mol_type = other DNA
gaggagacggtgccctt

SEQ ID NO: 146636 - DNA, 17 bp, synthetic construct
  source 1..17: mol_type = other DNA
aggagacggtgcccttg

SEQ ID NO: 146637 - DNA, 17 bp, synthetic construct
  source 1..17: mol_type = other DNA
ggagacggtgcccttgc

SEQ ID NO: 146638 - DNA, 17 bp, synthetic construct
  source 1..17: mol_type = other DNA
gagacggtgcccttgca

SEQ ID NO: 146639 - DNA, 17 bp, synthetic construct
  source 1..17: mol_type = other DNA
agacggtgcccttgcac

SEQ ID NO: 146640 - DNA, 17 bp, synthetic construct
  source 1..17: mol_type = other DNA
gacggtgcccttgcact

SEQ ID NO: 146641 - DNA, 17 bp, synthetic construct
  source 1..17: mol_type = other DNA
acggtgcccttgcactg

SEQ ID NO: 146642 - DNA, 17 bp, synthetic construct
  source 1..17: mol_type = other DNA
cggtgcccttgcactgt

SEQ ID NO: 146643 - DNA, 17 bp, synthetic construct
  source 1..17: mol_type = other DNA
ggtgcccttgcactgtc

SEQ ID NO: 146644 - DNA, 17 bp, synthetic construct
  source 1..17: mol_type = other DNA
gtgcccttgcactgtcc

SEQ ID NO: 146645 - DNA, 17 bp, synthetic construct
  source 1..17: mol_type = other DNA
tgcccttgcactgtcct

SEQ ID NO: 146646 - DNA, 17 bp, synthetic construct
  source 1..17: mol_type = other DNA
gcccttgcactgtccta

SEQ ID NO: 146647 - DNA, 17 bp, synthetic construct
  source 1..17: mol_type = other DNA
cccttgcactgtcctaa

SEQ ID NO: 146648 - DNA, 17 bp, synthetic construct
  source 1..17: mol_type = other DNA
ccttgcactgtcctaac

SEQ ID NO: 146649 - DNA, 17 bp, synthetic construct
  source 1..17: mol_type = other DNA
cttgcactgtcctaacg

SEQ ID NO: 146650 - DNA, 17 bp, synthetic construct
  source 1..17: mol_type = other DNA
ttgcactgtcctaacgg

SEQ ID NO: 146651 - DNA, 17 bp, synthetic construct
  source 1..17: mol_type = other DNA
tgcactgtcctaacggc

SEQ ID NO: 146652 - DNA, 17 bp, synthetic construct
  source 1..17: mol_type = other DNA
gcactgtcctaacggct

SEQ ID NO: 146653 - DNA, 17 bp, synthetic construct
  source 1..17: mol_type = other DNA
cactgtcctaacggctc

SEQ ID NO: 146654 - DNA, 17 bp, synthetic construct
  source 1..17: mol_type = other DNA
actgtcctaacggctca

SEQ ID NO: 146655 - DNA, 17 bp, synthetic construct
  source 1..17: mol_type = other DNA
ctgtcctaacggctcag

SEQ ID NO: 146656 - DNA, 17 bp, synthetic construct
  source 1..17: mol_type = other DNA
tgtcctaacggctcagc

SEQ ID NO: 146657 - DNA, 17 bp, synthetic construct
  source 1..17: mol_type = other DNA
gtcctaacggctcagcc

SEQ ID NO: 146658 - DNA, 17 bp, synthetic construct
  source 1..17: mol_type = other DNA
tcctaacggctcagcca

SEQ ID NO: 146659 - DNA, 17 bp, synthetic construct
  source 1..17: mol_type = other DNA
cctaacggctcagccat

SEQ ID NO: 146660 - DNA, 17 bp, synthetic construct
  source 1..17: mol_type = other DNA
ctaacggctcagccatc

SEQ ID NO: 146661 - DNA, 17 bp, synthetic construct
  source 1..17: mol_type = other DNA
taacggctcagccatcc

SEQ ID NO: 146662 - DNA, 17 bp, synthetic construct
  source 1..17: mol_type = other DNA
aacggctcagccatcct

SEQ ID NO: 146663 - DNA, 17 bp, synthetic construct
  source 1..17: mol_type = other DNA
acggctcagccatcctg

SEQ ID NO: 146664 - DNA, 17 bp, synthetic construct
  source 1..17: mol_type = other DNA
cggctcagccatcctgc

SEQ ID NO: 146665 - DNA, 17 bp, synthetic construct
  source 1..17: mol_type = other DNA
ggctcagccatcctgca

SEQ ID NO: 146666 - DNA, 17 bp, synthetic construct
  source 1..17: mol_type = other DNA
gctcagccatcctgcac

SEQ ID NO: 146667 - DNA, 17 bp, synthetic construct
  source 1..17: mol_type = other DNA
ctcagccatcctgcaca

SEQ ID NO: 146668 - DNA, 17 bp, synthetic construct
  source 1..17: mol_type = other DNA
tcagccatcctgcacac

SEQ ID NO: 146669 - DNA, 17 bp, synthetic construct
  source 1..17: mol_type = other DNA
cagccatcctgcacacc

SEQ ID NO: 146670 - DNA, 17 bp, synthetic construct
  source 1..17: mol_type = other DNA
agccatcctgcacacct

SEQ ID NO: 146671 - DNA, 17 bp, synthetic construct
  source 1..17: mol_type = other DNA
gccatcctgcacaccta

SEQ ID NO: 146672 - DNA, 17 bp, synthetic construct
  source 1..17: mol_type = other DNA
ccatcctgcacacctac

SEQ ID NO: 146673 - DNA, 17 bp, synthetic construct
  source 1..17: mol_type = other DNA
catcctgcacacctaca

SEQ ID NO: 146674 - DNA, 17 bp, synthetic construct
  source 1..17: mol_type = other DNA
atcctgcacacctacac

SEQ ID NO: 146675 - DNA, 17 bp, synthetic construct
  source 1..17: mol_type = other DNA
tcctgcacacctacacc

SEQ ID NO: 146676 - DNA, 17 bp, synthetic construct
  source 1..17: mol_type = other DNA
cctgcacacctacaccc

SEQ ID NO: 146677 - DNA, 17 bp, synthetic construct
  source 1..17: mol_type = other DNA
ctgcacacctacaccca

SEQ ID NO: 146678 - DNA, 17 bp, synthetic construct
  source 1..17: mol_type = other DNA
tgcacacctacacccac

SEQ ID NO: 146679 - DNA, 17 bp, synthetic construct
  source 1..17: mol_type = other DNA
gcacacctacacccacg

SEQ ID NO: 146680 - DNA, 17 bp, synthetic construct
  source 1..17: mol_type = other DNA
cacacctacacccacgt

SEQ ID NO: 146681 - DNA, 17 bp, synthetic construct
  source 1..17: mol_type = other DNA
acacctacacccacgtg

SEQ ID NO: 146682 - DNA, 17 bp, synthetic construct
  source 1..17: mol_type = other DNA
cacctacacccacgtgg

SEQ ID NO: 146683 - DNA, 17 bp, synthetic construct
  source 1..17: mol_type = other DNA
acctacacccacgtgga

SEQ ID NO: 146684 - DNA, 17 bp, synthetic construct
  source 1..17: mol_type = other DNA
cctacacccacgtggat

SEQ ID NO: 146685 - DNA, 17 bp, synthetic construct
  source 1..17: mol_type = other DNA
ctacacccacgtggatg

SEQ ID NO: 146686 - DNA, 17 bp, synthetic construct
  source 1..17: mol_type = other DNA
tacacccacgtggatga

SEQ ID NO: 146687 - DNA, 17 bp, synthetic construct
  source 1..17: mol_type = other DNA
acacccacgtggatgag

SEQ ID NO: 146688 - DNA, 17 bp, synthetic construct
  source 1..17: mol_type = other DNA
cacccacgtggatgagt

SEQ ID NO: 146689 - DNA, 17 bp, synthetic construct
  source 1..17: mol_type = other DNA
acccacgtggatgagtg

SEQ ID NO: 146690 - DNA, 17 bp, synthetic construct
  source 1..17: mol_type = other DNA
cccacgtggatgagtgt

SEQ ID NO: 146691 - DNA, 17 bp, synthetic construct
  source 1..17: mol_type = other DNA
ccacgtggatgagtgtg

SEQ ID NO: 146692 - DNA, 17 bp, synthetic construct
  source 1..17: mol_type = other DNA
cacgtggatgagtgtgg

SEQ ID NO: 146693 - DNA, 17 bp, synthetic construct
  source 1..17: mol_type = other DNA
acgtggatgagtgtggc

SEQ ID NO: 146694 - DNA, 17 bp, synthetic construct
  source 1..17: mol_type = other DNA
cgtggatgagtgtggct

SEQ ID NO: 146695 - DNA, 17 bp, synthetic construct
  source 1..17: mol_type = other DNA
gtggatgagtgtggctg

SEQ ID NO: 146696 - DNA, 17 bp, synthetic construct
  source 1..17: mol_type = other DNA
tggatgagtgtggctgc

SEQ ID NO: 146697 - DNA, 17 bp, synthetic construct
  source 1..17: mol_type = other DNA
ggatgagtgtggctgca

SEQ ID NO: 146698 - DNA, 17 bp, synthetic construct
  source 1..17: mol_type = other DNA
gatgagtgtggctgcac

SEQ ID NO: 146699 - DNA, 17 bp, synthetic construct
  source 1..17: mol_type = other DNA
atgagtgtggctgcacg

SEQ ID NO: 146700 - DNA, 17 bp, synthetic construct
  source 1..17: mol_type = other DNA
tgagtgtggctgcacgc

SEQ ID NO: 146701 - DNA, 17 bp, synthetic construct
  source 1..17: mol_type = other DNA
gagtgtggctgcacgcc

SEQ ID NO: 146702 - DNA, 17 bp, synthetic construct
  source 1..17: mol_type = other DNA
agtgtggctgcacgccc

SEQ ID NO: 146703 - DNA, 17 bp, synthetic construct
  source 1..17: mol_type = other DNA
gtgtggctgcacgccct

SEQ ID NO: 146704 - DNA, 17 bp, synthetic construct
  source 1..17: mol_type = other DNA
tgtggctgcacgccctt

SEQ ID NO: 146705 - DNA, 17 bp, synthetic construct
  source 1..17: mol_type = other DNA
gtggctgcacgcccttc

SEQ ID NO: 146706 - DNA, 17 bp, synthetic construct
  source 1..17: mol_type = other DNA
tggctgcacgcccttct

SEQ ID NO: 146707 - DNA, 17 bp, synthetic construct
  source 1..17: mol_type = other DNA
ggctgcacgcccttctg

SEQ ID NO: 146708 - DNA, 17 bp, synthetic construct
  source 1..17: mol_type = other DNA
gctgcacgcccttctgt

SEQ ID NO: 146709 - DNA, 17 bp, synthetic construct
  source 1..17: mol_type = other DNA
ctgcacgcccttctgtg

SEQ ID NO: 146710 - DNA, 17 bp, synthetic construct
  source 1..17: mol_type = other DNA
tgcacgcccttctgtgt

SEQ ID NO: 146711 - DNA, 17 bp, synthetic construct
  source 1..17: mol_type = other DNA
gcacgcccttctgtgtc

SEQ ID NO: 146712 - DNA, 17 bp, synthetic construct
  source 1..17: mol_type = other DNA
cacgcccttctgtgtcc

SEQ ID NO: 146713 - DNA, 17 bp, synthetic construct
  source 1..17: mol_type = other DNA
acgcccttctgtgtccc

SEQ ID NO: 146714 - DNA, 17 bp, synthetic construct
  source 1..17: mol_type = other DNA
cgcccttctgtgtccct

SEQ ID NO: 146715 - DNA, 17 bp, synthetic construct
  source 1..17: mol_type = other DNA
gcccttctgtgtccctg

SEQ ID NO: 146716 - DNA, 17 bp, synthetic construct
  source 1..17: mol_type = other DNA
cccttctgtgtccctgc

SEQ ID NO: 146717 - DNA, 17 bp, synthetic construct
  source 1..17: mol_type = other DNA
ccttctgtgtccctgcg

SEQ ID NO: 146718 - DNA, 17 bp, synthetic construct
  source 1..17: mol_type = other DNA
cttctgtgtccctgcgc

SEQ ID NO: 146719 - DNA, 17 bp, synthetic construct
  source 1..17: mol_type = other DNA
ttctgtgtccctgcgcc

SEQ ID NO: 146720 - DNA, 17 bp, synthetic construct
  source 1..17: mol_type = other DNA
tctgtgtccctgcgccc

SEQ ID NO: 146721 - DNA, 17 bp, synthetic construct
  source 1..17: mol_type = other DNA
ctgtgtccctgcgccca

SEQ ID NO: 146722 - DNA, 17 bp, synthetic construct
  source 1..17: mol_type = other DNA
tgtgtccctgcgcccat

SEQ ID NO: 146723 - DNA, 17 bp, synthetic construct
  source 1..17: mol_type = other DNA
gtgtccctgcgcccatg

SEQ ID NO: 146724 - DNA, 17 bp, synthetic construct
  source 1..17: mol_type = other DNA
tgtccctgcgcccatgg

SEQ ID NO: 146725 - DNA, 17 bp, synthetic construct
  source 1..17: mol_type = other DNA
gtccctgcgcccatggc

SEQ ID NO: 146726 - DNA, 17 bp, synthetic construct
  source 1..17: mol_type = other DNA
tccctgcgcccatggct

SEQ ID NO: 146727 - DNA, 17 bp, synthetic construct
  source 1..17: mol_type = other DNA
ccctgcgcccatggctc

SEQ ID NO: 146728 - DNA, 17 bp, synthetic construct
  source 1..17: mol_type = other DNA
cctgcgcccatggctcc

SEQ ID NO: 146729 - DNA, 17 bp, synthetic construct
  source 1..17: mol_type = other DNA
ctgcgcccatggctccc

SEQ ID NO: 146730 - DNA, 17 bp, synthetic construct
  source 1..17: mol_type = other DNA
tgcgcccatggctcccc

SEQ ID NO: 146731 - DNA, 17 bp, synthetic construct
  source 1..17: mol_type = other DNA
gcgcccatggctccccc

SEQ ID NO: 146732 - DNA, 17 bp, synthetic construct
  source 1..17: mol_type = other DNA
cgcccatggctccccca

SEQ ID NO: 146733 - DNA, 17 bp, synthetic construct
  source 1..17: mol_type = other DNA
gcccatggctcccccac

SEQ ID NO: 146734 - DNA, 17 bp, synthetic construct
  source 1..17: mol_type = other DNA
cccatggctcccccaca

SEQ ID NO: 146735 - DNA, 17 bp, synthetic construct
  source 1..17: mol_type = other DNA
ccatggctcccccacac

SEQ ID NO: 146736 - DNA, 17 bp, synthetic construct
  source 1..17: mol_type = other DNA
catggctcccccacaca

SEQ ID NO: 146737 - DNA, 17 bp, synthetic construct
  source 1..17: mol_type = other DNA
atggctcccccacacac

SEQ ID NO: 146738 - DNA, 17 bp, synthetic construct
  source 1..17: mol_type = other DNA
tggctcccccacacacc

SEQ ID NO: 146739 - DNA, 17 bp, synthetic construct
  source 1..17: mol_type = other DNA
ggctcccccacacaccc

SEQ ID NO: 146740 - DNA, 17 bp, synthetic construct
  source 1..17: mol_type = other DNA
gctcccccacacacccg

SEQ ID NO: 146741 - DNA, 17 bp, synthetic construct
  source 1..17: mol_type = other DNA
ctcccccacacacccgt

SEQ ID NO: 146742 - DNA, 17 bp, synthetic construct
  source 1..17: mol_type = other DNA
tcccccacacacccgtg

SEQ ID NO: 146743 - DNA, 17 bp, synthetic construct
  source 1..17: mol_type = other DNA
cccccacacacccgtgg

SEQ ID NO: 146744 - DNA, 17 bp, synthetic construct
  source 1..17: mol_type = other DNA
ccccacacacccgtggc

SEQ ID NO: 146745 - DNA, 17 bp, synthetic construct
  source 1..17: mol_type = other DNA
cccacacacccgtggct

SEQ ID NO: 146746 - DNA, 17 bp, synthetic construct
  source 1..17: mol_type = other DNA
ccacacacccgtggctt

SEQ ID NO: 146747 - DNA, 17 bp, synthetic construct
  source 1..17: mol_type = other DNA
cacacacccgtggcttc

SEQ ID NO: 146748 - DNA, 17 bp, synthetic construct
  source 1..17: mol_type = other DNA
acacacccgtggcttcc

SEQ ID NO: 146749 - DNA, 17 bp, synthetic construct
  source 1..17: mol_type = other DNA
cacacccgtggcttccc

SEQ ID NO: 146750 - DNA, 17 bp, synthetic construct
  source 1..17: mol_type = other DNA
acacccgtggcttcccg

SEQ ID NO: 146751 - DNA, 17 bp, synthetic construct
  source 1..17: mol_type = other DNA
cacccgtggcttcccgg

SEQ ID NO: 146752 - DNA, 17 bp, synthetic construct
  source 1..17: mol_type = other DNA
acccgtggcttcccggc

SEQ ID NO: 146753 - DNA, 17 bp, synthetic construct
  source 1..17: mol_type = other DNA
cccgtggcttcccggcc

SEQ ID NO: 146754 - DNA, 17 bp, synthetic construct
  source 1..17: mol_type = other DNA
ccgtggcttcccggccc

SEQ ID NO: 146755 - DNA, 17 bp, synthetic construct
  source 1..17: mol_type = other DNA
cgtggcttcccggccca

SEQ ID NO: 146756 - DNA, 17 bp, synthetic construct
  source 1..17: mol_type = other DNA
gtggcttcccggcccag

SEQ ID NO: 146757 - DNA, 17 bp, synthetic construct
  source 1..17: mol_type = other DNA
tggcttcccggcccagg

SEQ ID NO: 146758 - DNA, 17 bp, synthetic construct
  source 1..17: mol_type = other DNA
ggcttcccggcccagga

SEQ ID NO: 146759 - DNA, 17 bp, synthetic construct
  source 1..17: mol_type = other DNA
gcttcccggcccaggag

SEQ ID NO: 146760 - DNA, 17 bp, synthetic construct
  source 1..17: mol_type = other DNA
cttcccggcccaggagg

SEQ ID NO: 146761 - DNA, 17 bp, synthetic construct
  source 1..17: mol_type = other DNA
ttcccggcccaggaggc

SEQ ID NO: 146762 - DNA, 17 bp, synthetic construct
  source 1..17: mol_type = other DNA
tcccggcccaggaggcc

SEQ ID NO: 146763 - DNA, 17 bp, synthetic construct
  source 1..17: mol_type = other DNA
cccggcccaggaggcca

SEQ ID NO: 146764 - DNA, 17 bp, synthetic construct
  source 1..17: mol_type = other DNA
ccggcccaggaggccac

SEQ ID NO: 146765 - DNA, 17 bp, synthetic construct
  source 1..17: mol_type = other DNA
cggcccaggaggccact

SEQ ID NO: 146766 - DNA, 17 bp, synthetic construct
  source 1..17: mol_type = other DNA
ggcccaggaggccactg

SEQ ID NO: 146767 - DNA, 17 bp, synthetic construct
  source 1..17: mol_type = other DNA
gcccaggaggccactgc

SEQ ID NO: 146768 - DNA, 17 bp, synthetic construct
  source 1..17: mol_type = other DNA
cccaggaggccactgct

SEQ ID NO: 146769 - DNA, 17 bp, synthetic construct
  source 1..17: mol_type = other DNA
ccaggaggccactgctg

SEQ ID NO: 146770 - DNA, 17 bp, synthetic construct
  source 1..17: mol_type = other DNA
caggaggccactgctgt

SEQ ID NO: 146771 - DNA, 17 bp, synthetic construct
  source 1..17: mol_type = other DNA
aggaggccactgctgtc

SEQ ID NO: 146772 - DNA, 17 bp, synthetic construct
  source 1..17: mol_type = other DNA
ggaggccactgctgtct

SEQ ID NO: 146773 - DNA, 17 bp, synthetic construct
  source 1..17: mol_type = other DNA
gaggccactgctgtctg

SEQ ID NO: 146774 - DNA, 17 bp, synthetic construct
  source 1..17: mol_type = other DNA
aggccactgctgtctga

SEQ ID NO: 146775 - DNA, 17 bp, synthetic construct
  source 1..17: mol_type = other DNA
ggccactgctgtctgag

SEQ ID NO: 146776 - DNA, 17 bp, synthetic construct
  source 1..17: mol_type = other DNA
gccactgctgtctgaga

SEQ ID NO: 146777 - DNA, 17 bp, synthetic construct
  source 1..17: mol_type = other DNA
ccactgctgtctgagaa

SEQ ID NO: 146778 - DNA, 17 bp, synthetic construct
  source 1..17: mol_type = other DNA
cactgctgtctgagaac

SEQ ID NO: 146779 - DNA, 17 bp, synthetic construct
  source 1..17: mol_type = other DNA
actgctgtctgagaacg

SEQ ID NO: 146780 - DNA, 17 bp, synthetic construct
  source 1..17: mol_type = other DNA
ctgctgtctgagaacgt

SEQ ID NO: 146781 - DNA, 17 bp, synthetic construct
  source 1..17: mol_type = other DNA
tgctgtctgagaacgtt

SEQ ID NO: 146782 - DNA, 17 bp, synthetic construct
  source 1..17: mol_type = other DNA
gctgtctgagaacgttc

SEQ ID NO: 146783 - DNA, 17 bp, synthetic construct
  source 1..17: mol_type = other DNA
ctgtctgagaacgttct

SEQ ID NO: 146784 - DNA, 17 bp, synthetic construct
  source 1..17: mol_type = other DNA
tgtctgagaacgttctg

SEQ ID NO: 146785 - DNA, 17 bp, synthetic construct
  source 1..17: mol_type = other DNA
gtctgagaacgttctgc

SEQ ID NO: 146786 - DNA, 17 bp, synthetic construct
  source 1..17: mol_type = other DNA
tctgagaacgttctgcc

SEQ ID NO: 146787 - DNA, 17 bp, synthetic construct
  source 1..17: mol_type = other DNA
ctgagaacgttctgcct

SEQ ID NO: 146788 - DNA, 17 bp, synthetic construct
  source 1..17: mol_type = other DNA
tgagaacgttctgcctc

SEQ ID NO: 146789 - DNA, 17 bp, synthetic construct
  source 1..17: mol_type = other DNA
gagaacgttctgcctcc

SEQ ID NO: 146790 - DNA, 17 bp, synthetic construct
  source 1..17: mol_type = other DNA
agaacgttctgcctcca

SEQ ID NO: 146791 - DNA, 17 bp, synthetic construct
  source 1..17: mol_type = other DNA
gaacgttctgcctccat

SEQ ID NO: 146792 - DNA, 17 bp, synthetic construct
  source 1..17: mol_type = other DNA
aacgttctgcctccatc

SEQ ID NO: 146793 - DNA, 17 bp, synthetic construct
  source 1..17: mol_type = other DNA
acgttctgcctccatcc

SEQ ID NO: 146794 - DNA, 17 bp, synthetic construct
  source 1..17: mol_type = other DNA
cgttctgcctccatccc

SEQ ID NO: 146795 - DNA, 17 bp, synthetic construct
  source 1..17: mol_type = other DNA
gttctgcctccatcccc

SEQ ID NO: 146796 - DNA, 17 bp, synthetic construct
  source 1..17: mol_type = other DNA
ttctgcctccatcccca

SEQ ID NO: 146797 - DNA, 17 bp, synthetic construct
  source 1..17: mol_type = other DNA
tctgcctccatccccat

SEQ ID NO: 146798 - DNA, 17 bp, synthetic construct
  source 1..17: mol_type = other DNA
ctgcctccatccccatg

SEQ ID NO: 146799 - DNA, 17 bp, synthetic construct
  source 1..17: mol_type = other DNA
tgcctccatccccatgc

SEQ ID NO: 146800 - DNA, 17 bp, synthetic construct
  source 1..17: mol_type = other DNA
gcctccatccccatgct

SEQ ID NO: 146801 - DNA, 17 bp, synthetic construct
  source 1..17: mol_type = other DNA
cctccatccccatgctc

SEQ ID NO: 146802 - DNA, 17 bp, synthetic construct
  source 1..17: mol_type = other DNA
ctccatccccatgctct

SEQ ID NO: 146803 - DNA, 17 bp, synthetic construct
  source 1..17: mol_type = other DNA
tccatccccatgctctg

SEQ ID NO: 146804 - DNA, 17 bp, synthetic construct
  source 1..17: mol_type = other DNA
ccatccccatgctctgt

SEQ ID NO: 146805 - DNA, 17 bp, synthetic construct
  source 1..17: mol_type = other DNA
catccccatgctctgtc

SEQ ID NO: 146806 - DNA, 17 bp, synthetic construct
  source 1..17: mol_type = other DNA
atccccatgctctgtcc

SEQ ID NO: 146807 - DNA, 17 bp, synthetic construct
  source 1..17: mol_type = other DNA
tccccatgctctgtcca

SEQ ID NO: 146808 - DNA, 17 bp, synthetic construct
  source 1..17: mol_type = other DNA
ccccatgctctgtccac

SEQ ID NO: 146809 - DNA, 17 bp, synthetic construct
  source 1..17: mol_type = other DNA
cccatgctctgtccacc

SEQ ID NO: 146810 - DNA, 17 bp, synthetic construct
  source 1..17: mol_type = other DNA
ccatgctctgtccacct

SEQ ID NO: 146811 - DNA, 17 bp, synthetic construct
  source 1..17: mol_type = other DNA
catgctctgtccacctg

SEQ ID NO: 146812 - DNA, 17 bp, synthetic construct
  source 1..17: mol_type = other DNA
atgctctgtccacctgg

SEQ ID NO: 146813 - DNA, 17 bp, synthetic construct
  source 1..17: mol_type = other DNA
tgctctgtccacctgga

SEQ ID NO: 146814 - DNA, 17 bp, synthetic construct
  source 1..17: mol_type = other DNA
gctctgtccacctggag

SEQ ID NO: 146815 - DNA, 17 bp, synthetic construct
  source 1..17: mol_type = other DNA
ctctgtccacctggagc

SEQ ID NO: 146816 - DNA, 17 bp, synthetic construct
  source 1..17: mol_type = other DNA
tctgtccacctggagcc

SEQ ID NO: 146817 - DNA, 17 bp, synthetic construct
  source 1..17: mol_type = other DNA
ctgtccacctggagcca

SEQ ID NO: 146818 - DNA, 17 bp, synthetic construct
  source 1..17: mol_type = other DNA
tgtccacctggagccag

SEQ ID NO: 146819 - DNA, 17 bp, synthetic construct
  source 1..17: mol_type = other DNA
gtccacctggagccagg

SEQ ID NO: 146820 - DNA, 17 bp, synthetic construct
  source 1..17: mol_type = other DNA
tccacctggagccagga

SEQ ID NO: 146821 - DNA, 17 bp, synthetic construct
  source 1..17: mol_type = other DNA
ccacctggagccaggat

SEQ ID NO: 146822 - DNA, 17 bp, synthetic construct
  source 1..17: mol_type = other DNA
cacctggagccaggatg

SEQ ID NO: 146823 - DNA, 17 bp, synthetic construct
  source 1..17: mol_type = other DNA
acctggagccaggatgt

SEQ ID NO: 146824 - DNA, 17 bp, synthetic construct
  source 1..17: mol_type = other DNA
cctggagccaggatgtg

SEQ ID NO: 146825 - DNA, 17 bp, synthetic construct
  source 1..17: mol_type = other DNA
ctggagccaggatgtgc

SEQ ID NO: 146826 - DNA, 17 bp, synthetic construct
  source 1..17: mol_type = other DNA
tggagccaggatgtgca

SEQ ID NO: 146827 - DNA, 17 bp, synthetic construct
  source 1..17: mol_type = other DNA
ggagccaggatgtgcat

SEQ ID NO: 146828 - DNA, 17 bp, synthetic construct
  source 1..17: mol_type = other DNA
gagccaggatgtgcatt

SEQ ID NO: 146829 - DNA, 17 bp, synthetic construct
  source 1..17: mol_type = other DNA
agccaggatgtgcattg

SEQ ID NO: 146830 - DNA, 17 bp, synthetic construct
  source 1..17: mol_type = other DNA
gccaggatgtgcattgt

SEQ ID NO: 146831 - DNA, 17 bp, synthetic construct
  source 1..17: mol_type = other DNA
ccaggatgtgcattgtc

SEQ ID NO: 146832 - DNA, 17 bp, synthetic construct
  source 1..17: mol_type = other DNA
caggatgtgcattgtct

SEQ ID NO: 146833 - DNA, 17 bp, synthetic construct
  source 1..17: mol_type = other DNA
aggatgtgcattgtctg

SEQ ID NO: 146834 - DNA, 17 bp, synthetic construct
  source 1..17: mol_type = other DNA
ggatgtgcattgtctga

SEQ ID NO: 146835 - DNA, 17 bp, synthetic construct
  source 1..17: mol_type = other DNA
gatgtgcattgtctgat

SEQ ID NO: 146836 - DNA, 17 bp, synthetic construct
  source 1..17: mol_type = other DNA
atgtgcattgtctgatc

SEQ ID NO: 146837 - DNA, 17 bp, synthetic construct
  source 1..17: mol_type = other DNA
tgtgcattgtctgatca

SEQ ID NO: 146838 - DNA, 17 bp, synthetic construct
  source 1..17: mol_type = other DNA
gtgcattgtctgatcat

SEQ ID NO: 146839 - DNA, 17 bp, synthetic construct
  source 1..17: mol_type = other DNA
tgcattgtctgatcatg

SEQ ID NO: 146840 - DNA, 17 bp, synthetic construct
  source 1..17: mol_type = other DNA
gcattgtctgatcatga

SEQ ID NO: 146841 - DNA, 17 bp, synthetic construct
  source 1..17: mol_type = other DNA
cattgtctgatcatgaa

SEQ ID NO: 146842 - DNA, 17 bp, synthetic construct
  source 1..17: mol_type = other DNA
attgtctgatcatgaaa

SEQ ID NO: 146843 - DNA, 17 bp, synthetic construct
  source 1..17: mol_type = other DNA
ttgtctgatcatgaaaa

SEQ ID NO: 146844 - DNA, 17 bp, synthetic construct
  source 1..17: mol_type = other DNA
tgtctgatcatgaaaac

SEQ ID NO: 146845 - DNA, 17 bp, synthetic construct
  source 1..17: mol_type = other DNA
gtctgatcatgaaaacc

SEQ ID NO: 146846 - DNA, 17 bp, synthetic construct
  source 1..17: mol_type = other DNA
tctgatcatgaaaacct

SEQ ID NO: 146847 - DNA, 17 bp, synthetic construct
  source 1..17: mol_type = other DNA
ctgatcatgaaaacctt

SEQ ID NO: 146848 - DNA, 17 bp, synthetic construct
  source 1..17: mol_type = other DNA
tgatcatgaaaaccttg

SEQ ID NO: 146849 - DNA, 17 bp, synthetic construct
  source 1..17: mol_type = other DNA
gatcatgaaaaccttgg

SEQ ID NO: 146850 - DNA, 17 bp, synthetic construct
  source 1..17: mol_type = other DNA
atcatgaaaaccttggg

SEQ ID NO: 146851 - DNA, 17 bp, synthetic construct
  source 1..17: mol_type = other DNA
tcatgaaaaccttgggc

SEQ ID NO: 146852 - DNA, 17 bp, synthetic construct
  source 1..17: mol_type = other DNA
catgaaaaccttgggcc

SEQ ID NO: 146853 - DNA, 17 bp, synthetic construct
  source 1..17: mol_type = other DNA
atgaaaaccttgggcct

SEQ ID NO: 146854 - DNA, 17 bp, synthetic construct
  source 1..17: mol_type = other DNA
tgaaaaccttgggcctc

SEQ ID NO: 146855 - DNA, 17 bp, synthetic construct
  source 1..17: mol_type = other DNA
gaaaaccttgggcctcc

SEQ ID NO: 146856 - DNA, 17 bp, synthetic construct
  source 1..17: mol_type = other DNA
aaaaccttgggcctcct

SEQ ID NO: 146857 - DNA, 17 bp, synthetic construct
  source 1..17: mol_type = other DNA
aaaccttgggcctcctc

SEQ ID NO: 146858 - DNA, 17 bp, synthetic construct
  source 1..17: mol_type = other DNA
aaccttgggcctcctct

SEQ ID NO: 146859 - DNA, 17 bp, synthetic construct
  source 1..17: mol_type = other DNA
accttgggcctcctctg

SEQ ID NO: 146860 - DNA, 17 bp, synthetic construct
  source 1..17: mol_type = other DNA
ccttgggcctcctctgc

SEQ ID NO: 146861 - DNA, 17 bp, synthetic construct
  source 1..17: mol_type = other DNA
cttgggcctcctctgcg

SEQ ID NO: 146862 - DNA, 17 bp, synthetic construct
  source 1..17: mol_type = other DNA
ttgggcctcctctgcgg

SEQ ID NO: 146863 - DNA, 17 bp, synthetic construct
  source 1..17: mol_type = other DNA
tgggcctcctctgcgga

SEQ ID NO: 146864 - DNA, 17 bp, synthetic construct
  source 1..17: mol_type = other DNA
gggcctcctctgcggag

SEQ ID NO: 146865 - DNA, 17 bp, synthetic construct
  source 1..17: mol_type = other DNA
ggcctcctctgcggagc

SEQ ID NO: 146866 - DNA, 17 bp, synthetic construct
  source 1..17: mol_type = other DNA
gcctcctctgcggagcc

SEQ ID NO: 146867 - DNA, 17 bp, synthetic construct
  source 1..17: mol_type = other DNA
cctcctctgcggagccc

SEQ ID NO: 146868 - DNA, 17 bp, synthetic construct
  source 1..17: mol_type = other DNA
ctcctctgcggagcccc

SEQ ID NO: 146869 - DNA, 17 bp, synthetic construct
  source 1..17: mol_type = other DNA
tcctctgcggagccccc

SEQ ID NO: 146870 - DNA, 17 bp, synthetic construct
  source 1..17: mol_type = other DNA
cctctgcggagcccccc

SEQ ID NO: 146871 - DNA, 17 bp, synthetic construct
  source 1..17: mol_type = other DNA
ctctgcggagccccccg

SEQ ID NO: 146872 - DNA, 17 bp, synthetic construct
  source 1..17: mol_type = other DNA
tctgcggagccccccgg

SEQ ID NO: 146873 - DNA, 17 bp, synthetic construct
  source 1..17: mol_type = other DNA
ctgcggagccccccggc

SEQ ID NO: 146874 - DNA, 17 bp, synthetic construct
  source 1..17: mol_type = other DNA
tgcggagccccccggcc

SEQ ID NO: 146875 - DNA, 17 bp, synthetic construct
  source 1..17: mol_type = other DNA
gcggagccccccggcct

SEQ ID NO: 146876 - DNA, 17 bp, synthetic construct
  source 1..17: mol_type = other DNA
cggagccccccggcctg

SEQ ID NO: 146877 - DNA, 17 bp, synthetic construct
  source 1..17: mol_type = other DNA
ggagccccccggcctgt

SEQ ID NO: 146878 - DNA, 17 bp, synthetic construct
  source 1..17: mol_type = other DNA
gagccccccggcctgtg

SEQ ID NO: 146879 - DNA, 17 bp, synthetic construct
  source 1..17: mol_type = other DNA
agccccccggcctgtgt

SEQ ID NO: 146880 - DNA, 17 bp, synthetic construct
  source 1..17: mol_type = other DNA
gccccccggcctgtgtg

SEQ ID NO: 146881 - DNA, 17 bp, synthetic construct
  source 1..17: mol_type = other DNA
ccccccggcctgtgtgt

SEQ ID NO: 146882 - DNA, 17 bp, synthetic construct
  source 1..17: mol_type = other DNA
cccccggcctgtgtgtg

SEQ ID NO: 146883 - DNA, 17 bp, synthetic construct
  source 1..17: mol_type = other DNA
ccccggcctgtgtgtgg

SEQ ID NO: 146884 - DNA, 17 bp, synthetic construct
  source 1..17: mol_type = other DNA
cccggcctgtgtgtggc

SEQ ID NO: 146885 - DNA, 17 bp, synthetic construct
  source 1..17: mol_type = other DNA
ccggcctgtgtgtggca

SEQ ID NO: 146886 - DNA, 17 bp, synthetic construct
  source 1..17: mol_type = other DNA
cggcctgtgtgtggcac

SEQ ID NO: 146887 - DNA, 17 bp, synthetic construct
  source 1..17: mol_type = other DNA
ggcctgtgtgtggcacc

SEQ ID NO: 146888 - DNA, 17 bp, synthetic construct
  source 1..17: mol_type = other DNA
gcctgtgtgtggcaccc

SEQ ID NO: 146889 - DNA, 17 bp, synthetic construct
  source 1..17: mol_type = other DNA
cctgtgtgtggcacccc

SEQ ID NO: 146890 - DNA, 17 bp, synthetic construct
  source 1..17: mol_type = other DNA
ctgtgtgtggcaccccg

SEQ ID NO: 146891 - DNA, 17 bp, synthetic construct
  source 1..17: mol_type = other DNA
tgtgtgtggcaccccgc

SEQ ID NO: 146892 - DNA, 17 bp, synthetic construct
  source 1..17: mol_type = other DNA
gtgtgtggcaccccgcg

SEQ ID NO: 146893 - DNA, 17 bp, synthetic construct
  source 1..17: mol_type = other DNA
tgtgtggcaccccgcgc

SEQ ID NO: 146894 - DNA, 17 bp, synthetic construct
  source 1..17: mol_type = other DNA
gtgtggcaccccgcgct

SEQ ID NO: 146895 - DNA, 17 bp, synthetic construct
  source 1..17: mol_type = other DNA
tgtggcaccccgcgctc

SEQ ID NO: 146896 - DNA, 17 bp, synthetic construct
  source 1..17: mol_type = other DNA
gtggcaccccgcgctcc

SEQ ID NO: 146897 - DNA, 17 bp, synthetic construct
  source 1..17: mol_type = other DNA
tggcaccccgcgctccg

SEQ ID NO: 146898 - DNA, 17 bp, synthetic construct
  source 1..17: mol_type = other DNA
ggcaccccgcgctccgt

SEQ ID NO: 146899 - DNA, 17 bp, synthetic construct
  source 1..17: mol_type = other DNA
gcaccccgcgctccgtg

SEQ ID NO: 146900 - DNA, 17 bp, synthetic construct
  source 1..17: mol_type = other DNA
caccccgcgctccgtgc

SEQ ID NO: 146901 - DNA, 17 bp, synthetic construct
  source 1..17: mol_type = other DNA
accccgcgctccgtgct

SEQ ID NO: 146902 - DNA, 17 bp, synthetic construct
  source 1..17: mol_type = other DNA
ccccgcgctccgtgctc

SEQ ID NO: 146903 - DNA, 17 bp, synthetic construct
  source 1..17: mol_type = other DNA
cccgcgctccgtgctcc

SEQ ID NO: 146904 - DNA, 17 bp, synthetic construct
  source 1..17: mol_type = other DNA
ccgcgctccgtgctcct

SEQ ID NO: 146905 - DNA, 17 bp, synthetic construct
  source 1..17: mol_type = other DNA
cgcgctccgtgctcctg

SEQ ID NO: 146906 - DNA, 17 bp, synthetic construct
  source 1..17: mol_type = other DNA
gcgctccgtgctcctgc

SEQ ID NO: 146907 - DNA, 17 bp, synthetic construct
  source 1..17: mol_type = other DNA
cgctccgtgctcctgct

SEQ ID NO: 146908 - DNA, 17 bp, synthetic construct
  source 1..17: mol_type = other DNA
gctccgtgctcctgctg

SEQ ID NO: 146909 - DNA, 17 bp, synthetic construct
  source 1..17: mol_type = other DNA
ctccgtgctcctgctgc

SEQ ID NO: 146910 - DNA, 17 bp, synthetic construct
  source 1..17: mol_type = other DNA
tccgtgctcctgctgcc

SEQ ID NO: 146911 - DNA, 17 bp, synthetic construct
  source 1..17: mol_type = other DNA
ccgtgctcctgctgccc

SEQ ID NO: 146912 - DNA, 17 bp, synthetic construct
  source 1..17: mol_type = other DNA
cgtgctcctgctgccca

SEQ ID NO: 146913 - DNA, 17 bp, synthetic construct
  source 1..17: mol_type = other DNA
gtgctcctgctgcccac

SEQ ID NO: 146914 - DNA, 17 bp, synthetic construct
  source 1..17: mol_type = other DNA
tgctcctgctgcccacc

SEQ ID NO: 146915 - DNA, 17 bp, synthetic construct
  source 1..17: mol_type = other DNA
gctcctgctgcccaccc

SEQ ID NO: 146916 - DNA, 17 bp, synthetic construct
  source 1..17: mol_type = other DNA
ctcctgctgcccacccc

SEQ ID NO: 146917 - DNA, 17 bp, synthetic construct
  source 1..17: mol_type = other DNA
tcctgctgcccaccccg

SEQ ID NO: 146918 - DNA, 17 bp, synthetic construct
  source 1..17: mol_type = other DNA
cctgctgcccaccccgt

SEQ ID NO: 146919 - DNA, 17 bp, synthetic construct
  source 1..17: mol_type = other DNA
ctgctgcccaccccgtg

SEQ ID NO: 146920 - DNA, 17 bp, synthetic construct
  source 1..17: mol_type = other DNA
tgctgcccaccccgtgg

SEQ ID NO: 146921 - DNA, 17 bp, synthetic construct
  source 1..17: mol_type = other DNA
gctgcccaccccgtggg

SEQ ID NO: 146922 - DNA, 17 bp, synthetic construct
  source 1..17: mol_type = other DNA
ctgcccaccccgtgggt

SEQ ID NO: 146923 - DNA, 17 bp, synthetic construct
  source 1..17: mol_type = other DNA
tgcccaccccgtgggtg

SEQ ID NO: 146924 - DNA, 17 bp, synthetic construct
  source 1..17: mol_type = other DNA
gcccaccccgtgggtga

SEQ ID NO: 146925 - DNA, 17 bp, synthetic construct
  source 1..17: mol_type = other DNA
cccaccccgtgggtgaa

SEQ ID NO: 146926 - DNA, 17 bp, synthetic construct
  source 1..17: mol_type = other DNA
ccaccccgtgggtgaaa

SEQ ID NO: 146927 - DNA, 17 bp, synthetic construct
  source 1..17: mol_type = other DNA
caccccgtgggtgaaac

SEQ ID NO: 146928 - DNA, 17 bp, synthetic construct
  source 1..17: mol_type = other DNA
accccgtgggtgaaacc

SEQ ID NO: 146929 - DNA, 17 bp, synthetic construct
  source 1..17: mol_type = other DNA
ccccgtgggtgaaaccg

SEQ ID NO: 146930 - DNA, 17 bp, synthetic construct
  source 1..17: mol_type = other DNA
cccgtgggtgaaaccgg

SEQ ID NO: 146931 - DNA, 17 bp, synthetic construct
  source 1..17: mol_type = other DNA
ccgtgggtgaaaccggc

SEQ ID NO: 146932 - DNA, 17 bp, synthetic construct
  source 1..17: mol_type = other DNA
cgtgggtgaaaccggcc

SEQ ID NO: 146933 - DNA, 17 bp, synthetic construct
  source 1..17: mol_type = other DNA
gtgggtgaaaccggccc

SEQ ID NO: 146934 - DNA, 17 bp, synthetic construct
  source 1..17: mol_type = other DNA
tgggtgaaaccggcccc

SEQ ID NO: 146935 - DNA, 17 bp, synthetic construct
  source 1..17: mol_type = other DNA
gggtgaaaccggcccca

SEQ ID NO: 146936 - DNA, 17 bp, synthetic construct
  source 1..17: mol_type = other DNA
ggtgaaaccggccccag

SEQ ID NO: 146937 - DNA, 17 bp, synthetic construct
  source 1..17: mol_type = other DNA
gtgaaaccggccccaga

SEQ ID NO: 146938 - DNA, 17 bp, synthetic construct
  source 1..17: mol_type = other DNA
tgaaaccggccccagaa

SEQ ID NO: 146939 - DNA, 17 bp, synthetic construct
  source 1..17: mol_type = other DNA
gaaaccggccccagaag

SEQ ID NO: 146940 - DNA, 17 bp, synthetic construct
  source 1..17: mol_type = other DNA
aaaccggccccagaagg

SEQ ID NO: 146941 - DNA, 17 bp, synthetic construct
  source 1..17: mol_type = other DNA
aaccggccccagaaggg

SEQ ID NO: 146942 - DNA, 17 bp, synthetic construct
  source 1..17: mol_type = other DNA
accggccccagaagggt

SEQ ID NO: 146943 - DNA, 17 bp, synthetic construct
  source 1..17: mol_type = other DNA
ccggccccagaagggtg

SEQ ID NO: 146944 - DNA, 17 bp, synthetic construct
  source 1..17: mol_type = other DNA
cggccccagaagggtga

SEQ ID NO: 146945 - DNA, 17 bp, synthetic construct
  source 1..17: mol_type = other DNA
ggccccagaagggtgag

SEQ ID NO: 146946 - DNA, 17 bp, synthetic construct
  source 1..17: mol_type = other DNA
gccccagaagggtgagg

SEQ ID NO: 146947 - DNA, 17 bp, synthetic construct
  source 1..17: mol_type = other DNA
ccccagaagggtgaggg

SEQ ID NO: 146948 - DNA, 17 bp, synthetic construct
  source 1..17: mol_type = other DNA
cccagaagggtgagggg

SEQ ID NO: 146949 - DNA, 17 bp, synthetic construct
  source 1..17: mol_type = other DNA
ccagaagggtgaggggc

SEQ ID NO: 146950 - DNA, 17 bp, synthetic construct
  source 1..17: mol_type = other DNA
cagaagggtgaggggcc

SEQ ID NO: 146951 - DNA, 17 bp, synthetic construct
  source 1..17: mol_type = other DNA
agaagggtgaggggcca

SEQ ID NO: 146952 - DNA, 17 bp, synthetic construct
  source 1..17: mol_type = other DNA
gaagggtgaggggccag

SEQ ID NO: 146953 - DNA, 17 bp, synthetic construct
  source 1..17: mol_type = other DNA
aagggtgaggggccagc

SEQ ID NO: 146954 - DNA, 17 bp, synthetic construct
  source 1..17: mol_type = other DNA
agggtgaggggccagca

SEQ ID NO: 146955 - DNA, 17 bp, synthetic construct
  source 1..17: mol_type = other DNA
gggtgaggggccagcag

SEQ ID NO: 146956 - DNA, 17 bp, synthetic construct
  source 1..17: mol_type = other DNA
ggtgaggggccagcagg

SEQ ID NO: 146957 - DNA, 17 bp, synthetic construct
  source 1..17: mol_type = other DNA
gtgaggggccagcagga

SEQ ID NO: 146958 - DNA, 17 bp, synthetic construct
  source 1..17: mol_type = other DNA
tgaggggccagcaggac

SEQ ID NO: 146959 - DNA, 17 bp, synthetic construct
  source 1..17: mol_type = other DNA
gaggggccagcaggacc

SEQ ID NO: 146960 - DNA, 17 bp, synthetic construct
  source 1..17: mol_type = other DNA
aggggccagcaggaccc

SEQ ID NO: 146961 - DNA, 17 bp, synthetic construct
  source 1..17: mol_type = other DNA
ggggccagcaggacccc

SEQ ID NO: 146962 - DNA, 17 bp, synthetic construct
  source 1..17: mol_type = other DNA
gggccagcaggacccct

SEQ ID NO: 146963 - DNA, 17 bp, synthetic construct
  source 1..17: mol_type = other DNA
ggccagcaggacccctt

SEQ ID NO: 146964 - DNA, 17 bp, synthetic construct
  source 1..17: mol_type = other DNA
gccagcaggaccccttt

SEQ ID NO: 146965 - DNA, 17 bp, synthetic construct
  source 1..17: mol_type = other DNA
ccagcaggacccctttc

SEQ ID NO: 146966 - DNA, 17 bp, synthetic construct
  source 1..17: mol_type = other DNA
cagcaggacccctttcg

SEQ ID NO: 146967 - DNA, 17 bp, synthetic construct
  source 1..17: mol_type = other DNA
agcaggacccctttcgg

SEQ ID NO: 146968 - DNA, 17 bp, synthetic construct
  source 1..17: mol_type = other DNA
gcaggacccctttcggg

SEQ ID NO: 146969 - DNA, 17 bp, synthetic construct
  source 1..17: mol_type = other DNA
caggacccctttcggga

SEQ ID NO: 146970 - DNA, 17 bp, synthetic construct
  source 1..17: mol_type = other DNA
aggacccctttcgggag

SEQ ID NO: 146971 - DNA, 17 bp, synthetic construct
  source 1..17: mol_type = other DNA
ggacccctttcgggagg

SEQ ID NO: 146972 - DNA, 17 bp, synthetic construct
  source 1..17: mol_type = other DNA
gacccctttcgggaggg

SEQ ID NO: 146973 - DNA, 17 bp, synthetic construct
  source 1..17: mol_type = other DNA
acccctttcgggagggc

SEQ ID NO: 146974 - DNA, 17 bp, synthetic construct
  source 1..17: mol_type = other DNA
cccctttcgggagggcg

SEQ ID NO: 146975 - DNA, 17 bp, synthetic construct
  source 1..17: mol_type = other DNA
ccctttcgggagggcgc

SEQ ID NO: 146976 - DNA, 17 bp, synthetic construct
  source 1..17: mol_type = other DNA
cctttcgggagggcgcc

SEQ ID NO: 146977 - DNA, 17 bp, synthetic construct
  source 1..17: mol_type = other DNA
ctttcgggagggcgcca

SEQ ID NO: 146978 - DNA, 17 bp, synthetic construct
  source 1..17: mol_type = other DNA
tttcgggagggcgccac

SEQ ID NO: 146979 - DNA, 17 bp, synthetic construct
  source 1..17: mol_type = other DNA
ttcgggagggcgccact

SEQ ID NO: 146980 - DNA, 17 bp, synthetic construct
  source 1..17: mol_type = other DNA
tcgggagggcgccactc

SEQ ID NO: 146981 - DNA, 17 bp, synthetic construct
  source 1..17: mol_type = other DNA
cgggagggcgccactca

SEQ ID NO: 146982 - DNA, 17 bp, synthetic construct
  source 1..17: mol_type = other DNA
gggagggcgccactcag

SEQ ID NO: 146983 - DNA, 17 bp, synthetic construct
  source 1..17: mol_type = other DNA
ggagggcgccactcagg

SEQ ID NO: 146984 - DNA, 17 bp, synthetic construct
  source 1..17: mol_type = other DNA
gagggcgccactcagga

SEQ ID NO: 146985 - DNA, 17 bp, synthetic construct
  source 1..17: mol_type = other DNA
agggcgccactcaggag

SEQ ID NO: 146986 - DNA, 17 bp, synthetic construct
  source 1..17: mol_type = other DNA
gggcgccactcaggagt

SEQ ID NO: 146987 - DNA, 17 bp, synthetic construct
  source 1..17: mol_type = other DNA
ggcgccactcaggagtc

SEQ ID NO: 146988 - DNA, 17 bp, synthetic construct
  source 1..17: mol_type = other DNA
gcgccactcaggagtcc

SEQ ID NO: 146989 - DNA, 17 bp, synthetic construct
  source 1..17: mol_type = other DNA
cgccactcaggagtcct

SEQ ID NO: 146990 - DNA, 17 bp, synthetic construct
  source 1..17: mol_type = other DNA
gccactcaggagtccta

SEQ ID NO: 146991 - DNA, 17 bp, synthetic construct
  source 1..17: mol_type = other DNA
ccactcaggagtcctac

SEQ ID NO: 146992 - DNA, 17 bp, synthetic construct
  source 1..17: mol_type = other DNA
cactcaggagtcctacc

SEQ ID NO: 146993 - DNA, 17 bp, synthetic construct
  source 1..17: mol_type = other DNA
actcaggagtcctaccc

SEQ ID NO: 146994 - DNA, 17 bp, synthetic construct
  source 1..17: mol_type = other DNA
ctcaggagtcctaccct

SEQ ID NO: 146995 - DNA, 17 bp, synthetic construct
  source 1..17: mol_type = other DNA
tcaggagtcctaccctg

SEQ ID NO: 146996 - DNA, 17 bp, synthetic construct
  source 1..17: mol_type = other DNA
caggagtcctaccctgg

SEQ ID NO: 146997 - DNA, 17 bp, synthetic construct
  source 1..17: mol_type = other DNA
aggagtcctaccctggg

SEQ ID NO: 146998 - DNA, 17 bp, synthetic construct
  source 1..17: mol_type = other DNA
ggagtcctaccctggga

SEQ ID NO: 146999 - DNA, 17 bp, synthetic construct
  source 1..17: mol_type = other DNA
gagtcctaccctgggag

SEQ ID NO: 147000 - DNA, 17 bp, synthetic construct
  source 1..17: mol_type = other DNA
agtcctaccctgggaga

SEQ ID NO: 147001 - DNA, 17 bp, synthetic construct
  source 1..17: mol_type = other DNA
gtcctaccctgggagag

SEQ ID NO: 147002 - DNA, 17 bp, synthetic construct
  source 1..17: mol_type = other DNA
tcctaccctgggagagc

SEQ ID NO: 147003 - DNA, 17 bp, synthetic construct
  source 1..17: mol_type = other DNA
cctaccctgggagagcc

SEQ ID NO: 147004 - DNA, 17 bp, synthetic construct
  source 1..17: mol_type = other DNA
ctaccctgggagagcct

SEQ ID NO: 147005 - DNA, 17 bp, synthetic construct
  source 1..17: mol_type = other DNA
taccctgggagagcctg

SEQ ID NO: 147006 - DNA, 17 bp, synthetic construct
  source 1..17: mol_type = other DNA
accctgggagagcctgt

SEQ ID NO: 147007 - DNA, 17 bp, synthetic construct
  source 1..17: mol_type = other DNA
ccctgggagagcctgtg

SEQ ID NO: 147008 - DNA, 17 bp, synthetic construct
  source 1..17: mol_type = other DNA
cctgggagagcctgtgg

SEQ ID NO: 147009 - DNA, 17 bp, synthetic construct
  source 1..17: mol_type = other DNA
ctgggagagcctgtggc

SEQ ID NO: 147010 - DNA, 17 bp, synthetic construct
  source 1..17: mol_type = other DNA
tgggagagcctgtggcc

SEQ ID NO: 147011 - DNA, 17 bp, synthetic construct
  source 1..17: mol_type = other DNA
gggagagcctgtggccc

SEQ ID NO: 147012 - DNA, 17 bp, synthetic construct
  source 1..17: mol_type = other DNA
ggagagcctgtggccca

SEQ ID NO: 147013 - DNA, 17 bp, synthetic construct
  source 1..17: mol_type = other DNA
gagagcctgtggcccac

SEQ ID NO: 147014 - DNA, 17 bp, synthetic construct
  source 1..17: mol_type = other DNA
agagcctgtggcccacc

SEQ ID NO: 147015 - DNA, 17 bp, synthetic construct
  source 1..17: mol_type = other DNA
gagcctgtggcccacct

SEQ ID NO: 147016 - DNA, 17 bp, synthetic construct
  source 1..17: mol_type = other DNA
agcctgtggcccacctt

SEQ ID NO: 147017 - DNA, 17 bp, synthetic construct
  source 1..17: mol_type = other DNA
gcctgtggcccaccttg

SEQ ID NO: 147018 - DNA, 17 bp, synthetic construct
  source 1..17: mol_type = other DNA
cctgtggcccaccttgg

SEQ ID NO: 147019 - DNA, 17 bp, synthetic construct
  source 1..17: mol_type = other DNA
ctgtggcccaccttggc

SEQ ID NO: 147020 - DNA, 17 bp, synthetic construct
  source 1..17: mol_type = other DNA
tgtggcccaccttggcc

SEQ ID NO: 147021 - DNA, 17 bp, synthetic construct
  source 1..17: mol_type = other DNA
gtggcccaccttggcct

SEQ ID NO: 147022 - DNA, 17 bp, synthetic construct
  source 1..17: mol_type = other DNA
tggcccaccttggcctt

SEQ ID NO: 147023 - DNA, 17 bp, synthetic construct
  source 1..17: mol_type = other DNA
ggcccaccttggccttg

SEQ ID NO: 147024 - DNA, 17 bp, synthetic construct
  source 1..17: mol_type = other DNA
gcccaccttggccttgc

SEQ ID NO: 147025 - DNA, 17 bp, synthetic construct
  source 1..17: mol_type = other DNA
cccaccttggccttgcc

SEQ ID NO: 147026 - DNA, 17 bp, synthetic construct
  source 1..17: mol_type = other DNA
ccaccttggccttgccc

SEQ ID NO: 147027 - DNA, 17 bp, synthetic construct
  source 1..17: mol_type = other DNA
caccttggccttgcccc

SEQ ID NO: 147028 - DNA, 17 bp, synthetic construct
  source 1..17: mol_type = other DNA
accttggccttgcccct

SEQ ID NO: 147029 - DNA, 17 bp, synthetic construct
  source 1..17: mol_type = other DNA
ccttggccttgcccctc

SEQ ID NO: 147030 - DNA, 17 bp, synthetic construct
  source 1..17: mol_type = other DNA
cttggccttgcccctcc

SEQ ID NO: 147031 - DNA, 17 bp, synthetic construct
  source 1..17: mol_type = other DNA
ttggccttgcccctccc

SEQ ID NO: 147032 - DNA, 17 bp, synthetic construct
  source 1..17: mol_type = other DNA
tggccttgcccctccct

SEQ ID NO: 147033 - DNA, 17 bp, synthetic construct
  source 1..17: mol_type = other DNA
ggccttgcccctccctg

SEQ ID NO: 147034 - DNA, 17 bp, synthetic construct
  source 1..17: mol_type = other DNA
gccttgcccctccctga

SEQ ID NO: 147035 - DNA, 17 bp, synthetic construct
  source 1..17: mol_type = other DNA
ccttgcccctccctgat

SEQ ID NO: 147036 - DNA, 17 bp, synthetic construct
  source 1..17: mol_type = other DNA
cttgcccctccctgatg

SEQ ID NO: 147037 - DNA, 17 bp, synthetic construct
  source 1..17: mol_type = other DNA
ttgcccctccctgatgt

SEQ ID NO: 147038 - DNA, 17 bp, synthetic construct
  source 1..17: mol_type = other DNA
tgcccctccctgatgtc

SEQ ID NO: 147039 - DNA, 17 bp, synthetic construct
  source 1..17: mol_type = other DNA
gcccctccctgatgtca

SEQ ID NO: 147040 - DNA, 17 bp, synthetic construct
  source 1..17: mol_type = other DNA
cccctccctgatgtcac

SEQ ID NO: 147041 - DNA, 17 bp, synthetic construct
  source 1..17: mol_type = other DNA
ccctccctgatgtcact

SEQ ID NO: 147042 - DNA, 17 bp, synthetic construct
  source 1..17: mol_type = other DNA
cctccctgatgtcactg

SEQ ID NO: 147043 - DNA, 17 bp, synthetic construct
  source 1..17: mol_type = other DNA
ctccctgatgtcactgg

SEQ ID NO: 147044 - DNA, 17 bp, synthetic construct
  source 1..17: mol_type = other DNA
tccctgatgtcactggg

SEQ ID NO: 147045 - DNA, 17 bp, synthetic construct
  source 1..17: mol_type = other DNA
ccctgatgtcactggga

SEQ ID NO: 147046 - DNA, 17 bp, synthetic construct
  source 1..17: mol_type = other DNA
cctgatgtcactgggac

SEQ ID NO: 147047 - DNA, 17 bp, synthetic construct
  source 1..17: mol_type = other DNA
ctgatgtcactgggacg

SEQ ID NO: 147048 - DNA, 17 bp, synthetic construct
  source 1..17: mol_type = other DNA
tgatgtcactgggacgc

SEQ ID NO: 147049 - DNA, 17 bp, synthetic construct
  source 1..17: mol_type = other DNA
gatgtcactgggacgcc

SEQ ID NO: 147050 - DNA, 17 bp, synthetic construct
  source 1..17: mol_type = other DNA
atgtcactgggacgccc

SEQ ID NO: 147051 - DNA, 17 bp, synthetic construct
  source 1..17: mol_type = other DNA
tgtcactgggacgccct

SEQ ID NO: 147052 - DNA, 17 bp, synthetic construct
  source 1..17: mol_type = other DNA
gtcactgggacgccctg

SEQ ID NO: 147053 - DNA, 17 bp, synthetic construct
  source 1..17: mol_type = other DNA
tcactgggacgccctgg

SEQ ID NO: 147054 - DNA, 17 bp, synthetic construct
  source 1..17: mol_type = other DNA
cactgggacgccctgga

SEQ ID NO: 147055 - DNA, 17 bp, synthetic construct
  source 1..17: mol_type = other DNA
actgggacgccctggaa

SEQ ID NO: 147056 - DNA, 17 bp, synthetic construct
  source 1..17: mol_type = other DNA
ctgggacgccctggaac

SEQ ID NO: 147057 - DNA, 17 bp, synthetic construct
  source 1..17: mol_type = other DNA
tgggacgccctggaaca

SEQ ID NO: 147058 - DNA, 17 bp, synthetic construct
  source 1..17: mol_type = other DNA
gggacgccctggaacaa

SEQ ID NO: 147059 - DNA, 17 bp, synthetic construct
  source 1..17: mol_type = other DNA
ggacgccctggaacaaa

SEQ ID NO: 147060 - DNA, 17 bp, synthetic construct
  source 1..17: mol_type = other DNA
gacgccctggaacaaac

SEQ ID NO: 147061 - DNA, 17 bp, synthetic construct
  source 1..17: mol_type = other DNA
acgccctggaacaaact

SEQ ID NO: 147062 - DNA, 17 bp, synthetic construct
  source 1..17: mol_type = other DNA
cgccctggaacaaacta

SEQ ID NO: 147063 - DNA, 17 bp, synthetic construct
  source 1..17: mol_type = other DNA
gccctggaacaaactaa

SEQ ID NO: 147064 - DNA, 17 bp, synthetic construct
  source 1..17: mol_type = other DNA
ccctggaacaaactaag

SEQ ID NO: 147065 - DNA, 17 bp, synthetic construct
  source 1..17: mol_type = other DNA
cctggaacaaactaagc

SEQ ID NO: 147066 - DNA, 17 bp, synthetic construct
  source 1..17: mol_type = other DNA
ctggaacaaactaagca

SEQ ID NO: 147067 - DNA, 17 bp, synthetic construct
  source 1..17: mol_type = other DNA
tggaacaaactaagcat

SEQ ID NO: 147068 - DNA, 17 bp, synthetic construct
  source 1..17: mol_type = other DNA
ggaacaaactaagcatg

SEQ ID NO: 147069 - DNA, 17 bp, synthetic construct
  source 1..17: mol_type = other DNA
gaacaaactaagcatgt

SEQ ID NO: 147070 - DNA, 17 bp, synthetic construct
  source 1..17: mol_type = other DNA
aacaaactaagcatgtg

SEQ ID NO: 147071 - DNA, 17 bp, synthetic construct
  source 1..17: mol_type = other DNA
acaaactaagcatgtgc

SEQ ID NO: 147072 - DNA, 17 bp, synthetic construct
  source 1..17: mol_type = other DNA
caaactaagcatgtgcg

SEQ ID NO: 147073 - DNA, 17 bp, synthetic construct
  source 1..17: mol_type = other DNA
aaactaagcatgtgcgg

SEQ ID NO: 147074 - DNA, 17 bp, synthetic construct
  source 1..17: mol_type = other DNA
aactaagcatgtgcggg

SEQ ID NO: 147075 - DNA, 17 bp, synthetic construct
  source 1..17: mol_type = other DNA
actaagcatgtgcgggc

SEQ ID NO: 147076 - DNA, 17 bp, synthetic construct
  source 1..17: mol_type = other DNA
ctaagcatgtgcgggcc

SEQ ID NO: 147077 - DNA, 17 bp, synthetic construct
  source 1..17: mol_type = other DNA
taagcatgtgcgggcct

SEQ ID NO: 147078 - DNA, 17 bp, synthetic construct
  source 1..17: mol_type = other DNA
aagcatgtgcgggccta

SEQ ID NO: 147079 - DNA, 17 bp, synthetic construct
  source 1..17: mol_type = other DNA
agcatgtgcgggcctat

SEQ ID NO: 147080 - DNA, 17 bp, synthetic construct
  source 1..17: mol_type = other DNA
gcatgtgcgggcctatg

SEQ ID NO: 147081 - DNA, 17 bp, synthetic construct
  source 1..17: mol_type = other DNA
catgtgcgggcctatgt

SEQ ID NO: 147082 - DNA, 17 bp, synthetic construct
  source 1..17: mol_type = other DNA
atgtgcgggcctatgtg

SEQ ID NO: 147083 - DNA, 17 bp, synthetic construct
  source 1..17: mol_type = other DNA
tgtgcgggcctatgtgt

SEQ ID NO: 147084 - DNA, 17 bp, synthetic construct
  source 1..17: mol_type = other DNA
gtgcgggcctatgtgtc

SEQ ID NO: 147085 - DNA, 17 bp, synthetic construct
  source 1..17: mol_type = other DNA
tgcgggcctatgtgtcc

SEQ ID NO: 147086 - DNA, 17 bp, synthetic construct
  source 1..17: mol_type = other DNA
gcgggcctatgtgtccc

SEQ ID NO: 147087 - DNA, 17 bp, synthetic construct
  source 1..17: mol_type = other DNA
cgggcctatgtgtccct

SEQ ID NO: 147088 - DNA, 17 bp, synthetic construct
  source 1..17: mol_type = other DNA
gggcctatgtgtccctg

SEQ ID NO: 147089 - DNA, 17 bp, synthetic construct
  source 1..17: mol_type = other DNA
ggcctatgtgtccctgc

SEQ ID NO: 147090 - DNA, 17 bp, synthetic construct
  source 1..17: mol_type = other DNA
gcctatgtgtccctgcc

SEQ ID NO: 147091 - DNA, 17 bp, synthetic construct
  source 1..17: mol_type = other DNA
cctatgtgtccctgcca

SEQ ID NO: 147092 - DNA, 17 bp, synthetic construct
  source 1..17: mol_type = other DNA
ctatgtgtccctgccac

SEQ ID NO: 147093 - DNA, 17 bp, synthetic construct
  source 1..17: mol_type = other DNA
tatgtgtccctgccacg

SEQ ID NO: 147094 - DNA, 17 bp, synthetic construct
  source 1..17: mol_type = other DNA
atgtgtccctgccacgg

SEQ ID NO: 147095 - DNA, 17 bp, synthetic construct
  source 1..17: mol_type = other DNA
tgtgtccctgccacggc

SEQ ID NO: 147096 - DNA, 17 bp, synthetic construct
  source 1..17: mol_type = other DNA
gtgtccctgccacggcc

SEQ ID NO: 147097 - DNA, 17 bp, synthetic construct
  source 1..17: mol_type = other DNA
tgtccctgccacggccg

SEQ ID NO: 147098 - DNA, 17 bp, synthetic construct
  source 1..17: mol_type = other DNA
gtccctgccacggccgg

SEQ ID NO: 147099 - DNA, 17 bp, synthetic construct
  source 1..17: mol_type = other DNA
tccctgccacggccgga

SEQ ID NO: 147100 - DNA, 17 bp, synthetic construct
  source 1..17: mol_type = other DNA
ccctgccacggccggag

SEQ ID NO: 147101 - DNA, 17 bp, synthetic construct
  source 1..17: mol_type = other DNA
cctgccacggccggagc

SEQ ID NO: 147102 - DNA, 17 bp, synthetic construct
  source 1..17: mol_type = other DNA
ctgccacggccggagcg

SEQ ID NO: 147103 - DNA, 17 bp, synthetic construct
  source 1..17: mol_type = other DNA
tgccacggccggagcgc

SEQ ID NO: 147104 - DNA, 17 bp, synthetic construct
  source 1..17: mol_type = other DNA
gccacggccggagcgcc

SEQ ID NO: 147105 - DNA, 17 bp, synthetic construct
  source 1..17: mol_type = other DNA
ccacggccggagcgccc

SEQ ID NO: 147106 - DNA, 17 bp, synthetic construct
  source 1..17: mol_type = other DNA
cacggccggagcgcccg

SEQ ID NO: 147107 - DNA, 17 bp, synthetic construct
  source 1..17: mol_type = other DNA
acggccggagcgcccgc

SEQ ID NO: 147108 - DNA, 17 bp, synthetic construct
  source 1..17: mol_type = other DNA
cggccggagcgcccgcg

SEQ ID NO: 147109 - DNA, 17 bp, synthetic construct
  source 1..17: mol_type = other DNA
ggccggagcgcccgcgc

SEQ ID NO: 147110 - DNA, 17 bp, synthetic construct
  source 1..17: mol_type = other DNA
gccggagcgcccgcgca

SEQ ID NO: 147111 - DNA, 17 bp, synthetic construct
  source 1..17: mol_type = other DNA
ccggagcgcccgcgcag

SEQ ID NO: 147112 - DNA, 17 bp, synthetic construct
  source 1..17: mol_type = other DNA
cggagcgcccgcgcagc

SEQ ID NO: 147113 - DNA, 17 bp, synthetic construct
  source 1..17: mol_type = other DNA
ggagcgcccgcgcagca

SEQ ID NO: 147114 - DNA, 17 bp, synthetic construct
  source 1..17: mol_type = other DNA
gagcgcccgcgcagcac

SEQ ID NO: 147115 - DNA, 17 bp, synthetic construct
  source 1..17: mol_type = other DNA
agcgcccgcgcagcacg

SEQ ID NO: 147116 - DNA, 17 bp, synthetic construct
  source 1..17: mol_type = other DNA
gcgcccgcgcagcacgg

SEQ ID NO: 147117 - DNA, 17 bp, synthetic construct
  source 1..17: mol_type = other DNA
cgcccgcgcagcacgga

SEQ ID NO: 147118 - DNA, 17 bp, synthetic construct
  source 1..17: mol_type = other DNA
gcccgcgcagcacggat

SEQ ID NO: 147119 - DNA, 17 bp, synthetic construct
  source 1..17: mol_type = other DNA
cccgcgcagcacggatt

SEQ ID NO: 147120 - DNA, 17 bp, synthetic construct
  source 1..17: mol_type = other DNA
ccgcgcagcacggattc

SEQ ID NO: 147121 - DNA, 17 bp, synthetic construct
  source 1..17: mol_type = other DNA
cgcgcagcacggattcc

SEQ ID NO: 147122 - DNA, 17 bp, synthetic construct
  source 1..17: mol_type = other DNA
gcgcagcacggattcca

SEQ ID NO: 147123 - DNA, 17 bp, synthetic construct
  source 1..17: mol_type = other DNA
cgcagcacggattccag

SEQ ID NO: 147124 - DNA, 17 bp, synthetic construct
  source 1..17: mol_type = other DNA
gcagcacggattccagc

SEQ ID NO: 147125 - DNA, 17 bp, synthetic construct
  source 1..17: mol_type = other DNA
cagcacggattccagct

SEQ ID NO: 147126 - DNA, 17 bp, synthetic construct
  source 1..17: mol_type = other DNA
agcacggattccagctg

SEQ ID NO: 147127 - DNA, 17 bp, synthetic construct
  source 1..17: mol_type = other DNA
gcacggattccagctgg

SEQ ID NO: 147128 - DNA, 17 bp, synthetic construct
  source 1..17: mol_type = other DNA
cacggattccagctggc

SEQ ID NO: 147129 - DNA, 17 bp, synthetic construct
  source 1..17: mol_type = other DNA
acggattccagctggcc

SEQ ID NO: 147130 - DNA, 17 bp, synthetic construct
  source 1..17: mol_type = other DNA
cggattccagctggcca

SEQ ID NO: 147131 - DNA, 17 bp, synthetic construct
  source 1..17: mol_type = other DNA
ggattccagctggccac

SEQ ID NO: 147132 - DNA, 17 bp, synthetic construct
  source 1..17: mol_type = other DNA
gattccagctggccacg

SEQ ID NO: 147133 - DNA, 17 bp, synthetic construct
  source 1..17: mol_type = other DNA
attccagctggccacgt

SEQ ID NO: 147134 - DNA, 17 bp, synthetic construct
  source 1..17: mol_type = other DNA
ttccagctggccacgtc

SEQ ID NO: 147135 - DNA, 17 bp, synthetic construct
  source 1..17: mol_type = other DNA
tccagctggccacgtcc

SEQ ID NO: 147136 - DNA, 17 bp, synthetic construct
  source 1..17: mol_type = other DNA
ccagctggccacgtccg

SEQ ID NO: 147137 - DNA, 17 bp, synthetic construct
  source 1..17: mol_type = other DNA
cagctggccacgtccgg

SEQ ID NO: 147138 - DNA, 17 bp, synthetic construct
  source 1..17: mol_type = other DNA
agctggccacgtccggc

SEQ ID NO: 147139 - DNA, 17 bp, synthetic construct
  source 1..17: mol_type = other DNA
gctggccacgtccggcc

SEQ ID NO: 147140 - DNA, 17 bp, synthetic construct
  source 1..17: mol_type = other DNA
ctggccacgtccggccg

SEQ ID NO: 147141 - DNA, 17 bp, synthetic construct
  source 1..17: mol_type = other DNA
tggccacgtccggccgc

SEQ ID NO: 147142 - DNA, 17 bp, synthetic construct
  source 1..17: mol_type = other DNA
ggccacgtccggccgct

SEQ ID NO: 147143 - DNA, 17 bp, synthetic construct
  source 1..17: mol_type = other DNA
gccacgtccggccgctg

SEQ ID NO: 147144 - DNA, 17 bp, synthetic construct
  source 1..17: mol_type = other DNA
ccacgtccggccgctgg

SEQ ID NO: 147145 - DNA, 17 bp, synthetic construct
  source 1..17: mol_type = other DNA
cacgtccggccgctggg

SEQ ID NO: 147146 - DNA, 17 bp, synthetic construct
  source 1..17: mol_type = other DNA
acgtccggccgctgggg

SEQ ID NO: 147147 - DNA, 17 bp, synthetic construct
  source 1..17: mol_type = other DNA
cgtccggccgctggggc

SEQ ID NO: 147148 - DNA, 17 bp, synthetic construct
  source 1..17: mol_type = other DNA
gtccggccgctggggca

SEQ ID NO: 147149 - DNA, 17 bp, synthetic construct
  source 1..17: mol_type = other DNA
tccggccgctggggcag

SEQ ID NO: 147150 - DNA, 17 bp, synthetic construct
  source 1..17: mol_type = other DNA
ccggccgctggggcaga

SEQ ID NO: 147151 - DNA, 17 bp, synthetic construct
  source 1..17: mol_type = other DNA
cggccgctggggcagac

SEQ ID NO: 147152 - DNA, 17 bp, synthetic construct
  source 1..17: mol_type = other DNA
ggccgctggggcagaca

SEQ ID NO: 147153 - DNA, 17 bp, synthetic construct
  source 1..17: mol_type = other DNA
gccgctggggcagacag

SEQ ID NO: 147154 - DNA, 17 bp, synthetic construct
  source 1..17: mol_type = other DNA
ccgctggggcagacagg

SEQ ID NO: 147155 - DNA, 17 bp, synthetic construct
  source 1..17: mol_type = other DNA
cgctggggcagacaggc

SEQ ID NO: 147156 - DNA, 17 bp, synthetic construct
  source 1..17: mol_type = other DNA
gctggggcagacaggct

SEQ ID NO: 147157 - DNA, 17 bp, synthetic construct
  source 1..17: mol_type = other DNA
ctggggcagacaggctg

SEQ ID NO: 147158 - DNA, 17 bp, synthetic construct
  source 1..17: mol_type = other DNA
tggggcagacaggctgg

SEQ ID NO: 147159 - DNA, 17 bp, synthetic construct
  source 1..17: mol_type = other DNA
ggggcagacaggctggt

SEQ ID NO: 147160 - DNA, 17 bp, synthetic construct
  source 1..17: mol_type = other DNA
gggcagacaggctggtc

SEQ ID NO: 147161 - DNA, 17 bp, synthetic construct
  source 1..17: mol_type = other DNA
ggcagacaggctggtcc

SEQ ID NO: 147162 - DNA, 17 bp, synthetic construct
  source 1..17: mol_type = other DNA
gcagacaggctggtcca

SEQ ID NO: 147163 - DNA, 17 bp, synthetic construct
  source 1..17: mol_type = other DNA
cagacaggctggtccag

SEQ ID NO: 147164 - DNA, 17 bp, synthetic construct
  source 1..17: mol_type = other DNA
agacaggctggtccagg

SEQ ID NO: 147165 - DNA, 17 bp, synthetic construct
  source 1..17: mol_type = other DNA
gacaggctggtccaggc

SEQ ID NO: 147166 - DNA, 17 bp, synthetic construct
  source 1..17: mol_type = other DNA
acaggctggtccaggca

SEQ ID NO: 147167 - DNA, 17 bp, synthetic construct
  source 1..17: mol_type = other DNA
caggctggtccaggcaa

SEQ ID NO: 147168 - DNA, 17 bp, synthetic construct
  source 1..17: mol_type = other DNA
aggctggtccaggcaag

SEQ ID NO: 147169 - DNA, 17 bp, synthetic construct
  source 1..17: mol_type = other DNA
ggctggtccaggcaagg

SEQ ID NO: 147170 - DNA, 17 bp, synthetic construct
  source 1..17: mol_type = other DNA
gctggtccaggcaaggc

SEQ ID NO: 147171 - DNA, 17 bp, synthetic construct
  source 1..17: mol_type = other DNA
ctggtccaggcaaggcc

SEQ ID NO: 147172 - DNA, 17 bp, synthetic construct
  source 1..17: mol_type = other DNA
tggtccaggcaaggcca

SEQ ID NO: 147173 - DNA, 17 bp, synthetic construct
  source 1..17: mol_type = other DNA
ggtccaggcaaggccag

SEQ ID NO: 147174 - DNA, 17 bp, synthetic construct
  source 1..17: mol_type = other DNA
gtccaggcaaggccagc

SEQ ID NO: 147175 - DNA, 17 bp, synthetic construct
  source 1..17: mol_type = other DNA
tccaggcaaggccagct

SEQ ID NO: 147176 - DNA, 17 bp, synthetic construct
  source 1..17: mol_type = other DNA
ccaggcaaggccagctg

SEQ ID NO: 147177 - DNA, 17 bp, synthetic construct
  source 1..17: mol_type = other DNA
caggcaaggccagctgc

SEQ ID NO: 147178 - DNA, 17 bp, synthetic construct
  source 1..17: mol_type = other DNA
aggcaaggccagctgct

SEQ ID NO: 147179 - DNA, 17 bp, synthetic construct
  source 1..17: mol_type = other DNA
ggcaaggccagctgctg

SEQ ID NO: 147180 - DNA, 17 bp, synthetic construct
  source 1..17: mol_type = other DNA
gcaaggccagctgctgc

SEQ ID NO: 147181 - DNA, 17 bp, synthetic construct
  source 1..17: mol_type = other DNA
caaggccagctgctgcc

SEQ ID NO: 147182 - DNA, 17 bp, synthetic construct
  source 1..17: mol_type = other DNA
aaggccagctgctgcca

SEQ ID NO: 147183 - DNA, 17 bp, synthetic construct
  source 1..17: mol_type = other DNA
aggccagctgctgccag

SEQ ID NO: 147184 - DNA, 17 bp, synthetic construct
  source 1..17: mol_type = other DNA
ggccagctgctgccagg

SEQ ID NO: 147185 - DNA, 17 bp, synthetic construct
  source 1..17: mol_type = other DNA
gccagctgctgccagga

SEQ ID NO: 147186 - DNA, 17 bp, synthetic construct
  source 1..17: mol_type = other DNA
ccagctgctgccaggaa

SEQ ID NO: 147187 - DNA, 17 bp, synthetic construct
  source 1..17: mol_type = other DNA
cagctgctgccaggaag

SEQ ID NO: 147188 - DNA, 17 bp, synthetic construct
  source 1..17: mol_type = other DNA
agctgctgccaggaagc

SEQ ID NO: 147189 - DNA, 17 bp, synthetic construct
  source 1..17: mol_type = other DNA
gctgctgccaggaagct

SEQ ID NO: 147190 - DNA, 17 bp, synthetic construct
  source 1..17: mol_type = other DNA
ctgctgccaggaagctg

SEQ ID NO: 147191 - DNA, 17 bp, synthetic construct
  source 1..17: mol_type = other DNA
tgctgccaggaagctgc

SEQ ID NO: 147192 - DNA, 17 bp, synthetic construct
  source 1..17: mol_type = other DNA
gctgccaggaagctgcg

SEQ ID NO: 147193 - DNA, 17 bp, synthetic construct
  source 1..17: mol_type = other DNA
ctgccaggaagctgcga

SEQ ID NO: 147194 - DNA, 17 bp, synthetic construct
  source 1..17: mol_type = other DNA
tgccaggaagctgcgac

SEQ ID NO: 147195 - DNA, 17 bp, synthetic construct
  source 1..17: mol_type = other DNA
gccaggaagctgcgaca

SEQ ID NO: 147196 - DNA, 17 bp, synthetic construct
  source 1..17: mol_type = other DNA
ccaggaagctgcgacag

SEQ ID NO: 147197 - DNA, 17 bp, synthetic construct
  source 1..17: mol_type = other DNA
caggaagctgcgacagg

SEQ ID NO: 147198 - DNA, 17 bp, synthetic construct
  source 1..17: mol_type = other DNA
aggaagctgcgacaggc

SEQ ID NO: 147199 - DNA, 17 bp, synthetic construct
  source 1..17: mol_type = other DNA
ggaagctgcgacaggca

SEQ ID NO: 147200 - DNA, 17 bp, synthetic construct
  source 1..17: mol_type = other DNA
gaagctgcgacaggcaa

SEQ ID NO: 147201 - DNA, 17 bp, synthetic construct
  source 1..17: mol_type = other DNA
aagctgcgacaggcaag

SEQ ID NO: 147202 - DNA, 17 bp, synthetic construct
  source 1..17: mol_type = other DNA
agctgcgacaggcaagg

SEQ ID NO: 147203 - DNA, 17 bp, synthetic construct
  source 1..17: mol_type = other DNA
gctgcgacaggcaaggc

SEQ ID NO: 147204 - DNA, 17 bp, synthetic construct
  source 1..17: mol_type = other DNA
ctgcgacaggcaaggcg

SEQ ID NO: 147205 - DNA, 17 bp, synthetic construct
  source 1..17: mol_type = other DNA
tgcgacaggcaaggcgg

SEQ ID NO: 147206 - DNA, 17 bp, synthetic construct
  source 1..17: mol_type = other DNA
gcgacaggcaaggcggc

SEQ ID NO: 147207 - DNA, 17 bp, synthetic construct
  source 1..17: mol_type = other DNA
cgacaggcaaggcggcc

SEQ ID NO: 147208 - DNA, 17 bp, synthetic construct
  source 1..17: mol_type = other DNA
gacaggcaaggcggccg

SEQ ID NO: 147209 - DNA, 17 bp, synthetic construct
  source 1..17: mol_type = other DNA
acaggcaaggcggccgc

SEQ ID NO: 147210 - DNA, 17 bp, synthetic construct
  source 1..17: mol_type = other DNA
caggcaaggcggccgcc

SEQ ID NO: 147211 - DNA, 17 bp, synthetic construct
  source 1..17: mol_type = other DNA
aggcaaggcggccgcct

SEQ ID NO: 147212 - DNA, 17 bp, synthetic construct
  source 1..17: mol_type = other DNA
ggcaaggcggccgcctg

SEQ ID NO: 147213 - DNA, 17 bp, synthetic construct
  source 1..17: mol_type = other DNA
gcaaggcggccgcctgt

SEQ ID NO: 147214 - DNA, 17 bp, synthetic construct
  source 1..17: mol_type = other DNA
caaggcggccgcctgtc

SEQ ID NO: 147215 - DNA, 17 bp, synthetic construct
  source 1..17: mol_type = other DNA
aaggcggccgcctgtcc

SEQ ID NO: 147216 - DNA, 17 bp, synthetic construct
  source 1..17: mol_type = other DNA
aggcggccgcctgtcca

SEQ ID NO: 147217 - DNA, 17 bp, synthetic construct
  source 1..17: mol_type = other DNA
ggcggccgcctgtccat

SEQ ID NO: 147218 - DNA, 17 bp, synthetic construct
  source 1..17: mol_type = other DNA
gcggccgcctgtccatg

SEQ ID NO: 147219 - DNA, 17 bp, synthetic construct
  source 1..17: mol_type = other DNA
cggccgcctgtccatgc

SEQ ID NO: 147220 - DNA, 17 bp, synthetic construct
  source 1..17: mol_type = other DNA
ggccgcctgtccatgcc

SEQ ID NO: 147221 - DNA, 17 bp, synthetic construct
  source 1..17: mol_type = other DNA
gccgcctgtccatgcct

SEQ ID NO: 147222 - DNA, 17 bp, synthetic construct
  source 1..17: mol_type = other DNA
ccgcctgtccatgcctg

SEQ ID NO: 147223 - DNA, 17 bp, synthetic construct
  source 1..17: mol_type = other DNA
cgcctgtccatgcctgc

SEQ ID NO: 147224 - DNA, 17 bp, synthetic construct
  source 1..17: mol_type = other DNA
gcctgtccatgcctgct

SEQ ID NO: 147225 - DNA, 17 bp, synthetic construct
  source 1..17: mol_type = other DNA
cctgtccatgcctgctg

SEQ ID NO: 147226 - DNA, 17 bp, synthetic construct
  source 1..17: mol_type = other DNA
ctgtccatgcctgctgc

SEQ ID NO: 147227 - DNA, 17 bp, synthetic construct
  source 1..17: mol_type = other DNA
tgtccatgcctgctgca

SEQ ID NO: 147228 - DNA, 17 bp, synthetic construct
  source 1..17: mol_type = other DNA
gtccatgcctgctgcag

SEQ ID NO: 147229 - DNA, 17 bp, synthetic construct
  source 1..17: mol_type = other DNA
tccatgcctgctgcagg

SEQ ID NO: 147230 - DNA, 17 bp, synthetic construct
  source 1..17: mol_type = other DNA
ccatgcctgctgcaggg

SEQ ID NO: 147231 - DNA, 17 bp, synthetic construct
  source 1..17: mol_type = other DNA
catgcctgctgcagggt

SEQ ID NO: 147232 - DNA, 17 bp, synthetic construct
  source 1..17: mol_type = other DNA
atgcctgctgcagggta

SEQ ID NO: 147233 - DNA, 17 bp, synthetic construct
  source 1..17: mol_type = other DNA
tgcctgctgcagggtaa

SEQ ID NO: 147234 - DNA, 17 bp, synthetic construct
  source 1..17: mol_type = other DNA
gcctgctgcagggtaac

SEQ ID NO: 147235 - DNA, 17 bp, synthetic construct
  source 1..17: mol_type = other DNA
cctgctgcagggtaact

SEQ ID NO: 147236 - DNA, 17 bp, synthetic construct
  source 1..17: mol_type = other DNA
ctgctgcagggtaactc

SEQ ID NO: 147237 - DNA, 17 bp, synthetic construct
  source 1..17: mol_type = other DNA
tgctgcagggtaactca

SEQ ID NO: 147238 - DNA, 17 bp, synthetic construct
  source 1..17: mol_type = other DNA
gctgcagggtaactcag

SEQ ID NO: 147239 - DNA, 17 bp, synthetic construct
  source 1..17: mol_type = other DNA
ctgcagggtaactcagg

SEQ ID NO: 147240 - DNA, 17 bp, synthetic construct
  source 1..17: mol_type = other DNA
tgcagggtaactcaggg

SEQ ID NO: 147241 - DNA, 17 bp, synthetic construct
  source 1..17: mol_type = other DNA
gcagggtaactcagggc

SEQ ID NO: 147242 - DNA, 17 bp, synthetic construct
  source 1..17: mol_type = other DNA
cagggtaactcagggct

SEQ ID NO: 147243 - DNA, 17 bp, synthetic construct
  source 1..17: mol_type = other DNA
agggtaactcagggctg

SEQ ID NO: 147244 - DNA, 17 bp, synthetic construct
  source 1..17: mol_type = other DNA
gggtaactcagggctga

SEQ ID NO: 147245 - DNA, 17 bp, synthetic construct
  source 1..17: mol_type = other DNA
ggtaactcagggctgag

SEQ ID NO: 147246 - DNA, 17 bp, synthetic construct
  source 1..17: mol_type = other DNA
gtaactcagggctgagg

SEQ ID NO: 147247 - DNA, 17 bp, synthetic construct
  source 1..17: mol_type = other DNA
taactcagggctgaggt

SEQ ID NO: 147248 - DNA, 17 bp, synthetic construct
  source 1..17: mol_type = other DNA
aactcagggctgaggtc

SEQ ID NO: 147249 - DNA, 17 bp, synthetic construct
  source 1..17: mol_type = other DNA
actcagggctgaggtcg

SEQ ID NO: 147250 - DNA, 17 bp, synthetic construct
  source 1..17: mol_type = other DNA
ctcagggctgaggtcgc

SEQ ID NO: 147251 - DNA, 17 bp, synthetic construct
  source 1..17: mol_type = other DNA
tcagggctgaggtcgca

SEQ ID NO: 147252 - DNA, 17 bp, synthetic construct
  source 1..17: mol_type = other DNA
cagggctgaggtcgcaa

SEQ ID NO: 147253 - DNA, 17 bp, synthetic construct
  source 1..17: mol_type = other DNA
agggctgaggtcgcaac

SEQ ID NO: 147254 - DNA, 17 bp, synthetic construct
  source 1..17: mol_type = other DNA
gggctgaggtcgcaacg

SEQ ID NO: 147255 - DNA, 17 bp, synthetic construct
  source 1..17: mol_type = other DNA
ggctgaggtcgcaacgg

SEQ ID NO: 147256 - DNA, 17 bp, synthetic construct
  source 1..17: mol_type = other DNA
gctgaggtcgcaacggc

SEQ ID NO: 147257 - DNA, 17 bp, synthetic construct
  source 1..17: mol_type = other DNA
ctgaggtcgcaacggcc

SEQ ID NO: 147258 - DNA, 17 bp, synthetic construct
  source 1..17: mol_type = other DNA
tgaggtcgcaacggcca

SEQ ID NO: 147259 - DNA, 17 bp, synthetic construct
  source 1..17: mol_type = other DNA
gaggtcgcaacggccag

SEQ ID NO: 147260 - DNA, 17 bp, synthetic construct
  source 1..17: mol_type = other DNA
aggtcgcaacggccagg

SEQ ID NO: 147261 - DNA, 17 bp, synthetic construct
  source 1..17: mol_type = other DNA
ggtcgcaacggccaggt

SEQ ID NO: 147262 - DNA, 17 bp, synthetic construct
  source 1..17: mol_type = other DNA
gtcgcaacggccaggtc

SEQ ID NO: 147263 - DNA, 17 bp, synthetic construct
  source 1..17: mol_type = other DNA
tcgcaacggccaggtca

SEQ ID NO: 147264 - DNA, 17 bp, synthetic construct
  source 1..17: mol_type = other DNA
cgcaacggccaggtcag

SEQ ID NO: 147265 - DNA, 17 bp, synthetic construct
  source 1..17: mol_type = other DNA
gcaacggccaggtcaga

SEQ ID NO: 147266 - DNA, 17 bp, synthetic construct
  source 1..17: mol_type = other DNA
caacggccaggtcagag

SEQ ID NO: 147267 - DNA, 17 bp, synthetic construct
  source 1..17: mol_type = other DNA
aacggccaggtcagaga

SEQ ID NO: 147268 - DNA, 17 bp, synthetic construct
  source 1..17: mol_type = other DNA
acggccaggtcagagag

SEQ ID NO: 147269 - DNA, 17 bp, synthetic construct
  source 1..17: mol_type = other DNA
cggccaggtcagagagg

SEQ ID NO: 147270 - DNA, 17 bp, synthetic construct
  source 1..17: mol_type = other DNA
ggccaggtcagagaggg

SEQ ID NO: 147271 - DNA, 17 bp, synthetic construct
  source 1..17: mol_type = other DNA
gccaggtcagagagggg

SEQ ID NO: 147272 - DNA, 17 bp, synthetic construct
  source 1..17: mol_type = other DNA
ccaggtcagagaggggt

SEQ ID NO: 147273 - DNA, 17 bp, synthetic construct
  source 1..17: mol_type = other DNA
caggtcagagaggggtc

SEQ ID NO: 147274 - DNA, 17 bp, synthetic construct
  source 1..17: mol_type = other DNA
aggtcagagaggggtca

SEQ ID NO: 147275 - DNA, 17 bp, synthetic construct
  source 1..17: mol_type = other DNA
ggtcagagaggggtcag

SEQ ID NO: 147276 - DNA, 17 bp, synthetic construct
  source 1..17: mol_type = other DNA
gtcagagaggggtcagc

SEQ ID NO: 147277 - DNA, 17 bp, synthetic construct
  source 1..17: mol_type = other DNA
tcagagaggggtcagca

SEQ ID NO: 147278 - DNA, 17 bp, synthetic construct
  source 1..17: mol_type = other DNA
cagagaggggtcagcat

SEQ ID NO: 147279 - DNA, 17 bp, synthetic construct
  source 1..17: mol_type = other DNA
agagaggggtcagcatc

SEQ ID NO: 147280 - DNA, 17 bp, synthetic construct
  source 1..17: mol_type = other DNA
gagaggggtcagcatcc

SEQ ID NO: 147281 - DNA, 17 bp, synthetic construct
  source 1..17: mol_type = other DNA
agaggggtcagcatccc

SEQ ID NO: 147282 - DNA, 17 bp, synthetic construct
  source 1..17: mol_type = other DNA
gaggggtcagcatccca

SEQ ID NO: 147283 - DNA, 17 bp, synthetic construct
  source 1..17: mol_type = other DNA
aggggtcagcatcccaa

SEQ ID NO: 147284 - DNA, 17 bp, synthetic construct
  source 1..17: mol_type = other DNA
ggggtcagcatcccaaa

SEQ ID NO: 147285 - DNA, 17 bp, synthetic construct
  source 1..17: mol_type = other DNA
gggtcagcatcccaaag

SEQ ID NO: 147286 - DNA, 17 bp, synthetic construct
  source 1..17: mol_type = other DNA
ggtcagcatcccaaagc

SEQ ID NO: 147287 - DNA, 17 bp, synthetic construct
  source 1..17: mol_type = other DNA
gtcagcatcccaaagcc

SEQ ID NO: 147288 - DNA, 17 bp, synthetic construct
  source 1..17: mol_type = other DNA
tcagcatcccaaagccc

SEQ ID NO: 147289 - DNA, 17 bp, synthetic construct
  source 1..17: mol_type = other DNA
cagcatcccaaagcccc

SEQ ID NO: 147290 - DNA, 17 bp, synthetic construct
  source 1..17: mol_type = other DNA
agcatcccaaagccccc

SEQ ID NO: 147291 - DNA, 17 bp, synthetic construct
  source 1..17: mol_type = other DNA
gcatcccaaagccccct

SEQ ID NO: 147292 - DNA, 17 bp, synthetic construct
  source 1..17: mol_type = other DNA
catcccaaagccccctc

SEQ ID NO: 147293 - DNA, 17 bp, synthetic construct
  source 1..17: mol_type = other DNA
atcccaaagccccctct

SEQ ID NO: 147294 - DNA, 17 bp, synthetic construct
  source 1..17: mol_type = other DNA
tcccaaagccccctctg

SEQ ID NO: 147295 - DNA, 17 bp, synthetic construct
  source 1..17: mol_type = other DNA
cccaaagccccctctgc

SEQ ID NO: 147296 - DNA, 17 bp, synthetic construct
  source 1..17: mol_type = other DNA
ccaaagccccctctgct

SEQ ID NO: 147297 - DNA, 17 bp, synthetic construct
  source 1..17: mol_type = other DNA
caaagccccctctgctc

SEQ ID NO: 147298 - DNA, 17 bp, synthetic construct
  source 1..17: mol_type = other DNA
aaagccccctctgctca

SEQ ID NO: 147299 - DNA, 17 bp, synthetic construct
  source 1..17: mol_type = other DNA
aagccccctctgctcaa

SEQ ID NO: 147300 - DNA, 17 bp, synthetic construct
  source 1..17: mol_type = other DNA
agccccctctgctcaac

SEQ ID NO: 147301 - DNA, 17 bp, synthetic construct
  source 1..17: mol_type = other DNA
gccccctctgctcaacc

SEQ ID NO: 147302 - DNA, 17 bp, synthetic construct
  source 1..17: mol_type = other DNA
ccccctctgctcaaccc

SEQ ID NO: 147303 - DNA, 17 bp, synthetic construct
  source 1..17: mol_type = other DNA
cccctctgctcaaccca

SEQ ID NO: 147304 - DNA, 17 bp, synthetic construct
  source 1..17: mol_type = other DNA
ccctctgctcaacccag

SEQ ID NO: 147305 - DNA, 17 bp, synthetic construct
  source 1..17: mol_type = other DNA
cctctgctcaacccagc

SEQ ID NO: 147306 - DNA, 17 bp, synthetic construct
  source 1..17: mol_type = other DNA
ctctgctcaacccagcc

SEQ ID NO: 147307 - DNA, 17 bp, synthetic construct
  source 1..17: mol_type = other DNA
tctgctcaacccagccc

SEQ ID NO: 147308 - DNA, 17 bp, synthetic construct
  source 1..17: mol_type = other DNA
ctgctcaacccagccca

SEQ ID NO: 147309 - DNA, 17 bp, synthetic construct
  source 1..17: mol_type = other DNA
tgctcaacccagcccag

SEQ ID NO: 147310 - DNA, 17 bp, synthetic construct
  source 1..17: mol_type = other DNA
gctcaacccagcccagt

SEQ ID NO: 147311 - DNA, 17 bp, synthetic construct
  source 1..17: mol_type = other DNA
ctcaacccagcccagtt

SEQ ID NO: 147312 - DNA, 17 bp, synthetic construct
  source 1..17: mol_type = other DNA
tcaacccagcccagttt

SEQ ID NO: 147313 - DNA, 17 bp, synthetic construct
  source 1..17: mol_type = other DNA
caacccagcccagtttt

SEQ ID NO: 147314 - DNA, 17 bp, synthetic construct
  source 1..17: mol_type = other DNA
aacccagcccagttttg

SEQ ID NO: 147315 - DNA, 17 bp, synthetic construct
  source 1..17: mol_type = other DNA
acccagcccagttttgc

SEQ ID NO: 147316 - DNA, 17 bp, synthetic construct
  source 1..17: mol_type = other DNA
cccagcccagttttgca

SEQ ID NO: 147317 - DNA, 17 bp, synthetic construct
  source 1..17: mol_type = other DNA
ccagcccagttttgcaa

SEQ ID NO: 147318 - DNA, 17 bp, synthetic construct
  source 1..17: mol_type = other DNA
cagcccagttttgcaaa

SEQ ID NO: 147319 - DNA, 17 bp, synthetic construct
  source 1..17: mol_type = other DNA
agcccagttttgcaaat

SEQ ID NO: 147320 - DNA, 17 bp, synthetic construct
  source 1..17: mol_type = other DNA
gcccagttttgcaaata

SEQ ID NO: 147321 - DNA, 17 bp, synthetic construct
  source 1..17: mol_type = other DNA
cccagttttgcaaataa

SEQ ID NO: 147322 - DNA, 17 bp, synthetic construct
  source 1..17: mol_type = other DNA
ccagttttgcaaataaa

SEQ ID NO: 147323 - DNA, 17 bp, synthetic construct
  source 1..17: mol_type = other DNA
cagttttgcaaataaac

SEQ ID NO: 147324 - DNA, 17 bp, synthetic construct
  source 1..17: mol_type = other DNA
agttttgcaaataaacc

SEQ ID NO: 147325 - DNA, 17 bp, synthetic construct
  source 1..17: mol_type = other DNA
gttttgcaaataaaccc

SEQ ID NO: 147326 - DNA, 17 bp, synthetic construct
  source 1..17: mol_type = other DNA
ttttgcaaataaaccct

SEQ ID NO: 147327 - DNA, 17 bp, synthetic construct
  source 1..17: mol_type = other DNA
tttgcaaataaaccctg

SEQ ID NO: 147328 - DNA, 17 bp, synthetic construct
  source 1..17: mol_type = other DNA
ttgcaaataaaccctga

SEQ ID NO: 147329 - DNA, 17 bp, synthetic construct
  source 1..17: mol_type = other DNA
tgcaaataaaccctgag

SEQ ID NO: 147330 - DNA, 17 bp, synthetic construct
  source 1..17: mol_type = other DNA
gcaaataaaccctgagc

SEQ ID NO: 147331 - DNA, 17 bp, synthetic construct
  source 1..17: mol_type = other DNA
caaataaaccctgagca

SEQ ID NO: 147332 - DNA, 17 bp, synthetic construct
  source 1..17: mol_type = other DNA
aaataaaccctgagcat

SEQ ID NO: 147333 - DNA, 17 bp, synthetic construct
  source 1..17: mol_type = other DNA
aataaaccctgagcatt

SEQ ID NO: 147334 - DNA, 17 bp, synthetic construct
  source 1..17: mol_type = other DNA
ataaaccctgagcattg

SEQ ID NO: 147335 - DNA, 17 bp, synthetic construct
  source 1..17: mol_type = other DNA
taaaccctgagcattga

SEQ ID NO: 147336 - DNA, 17 bp, synthetic construct
  source 1..17: mol_type = other DNA
aaaccctgagcattgag

SEQ ID NO: 147337 - DNA, 17 bp, synthetic construct
  source 1..17: mol_type = other DNA
aaccctgagcattgagt

SEQ ID NO: 147338 - DNA, 17 bp, synthetic construct
  source 1..17: mol_type = other DNA
accctgagcattgagta

SEQ ID NO: 147339 - DNA, 17 bp, synthetic construct
  source 1..17: mol_type = other DNA
agggagccgggccgggt

SEQ ID NO: 147340 - DNA, 17 bp, synthetic construct
  source 1..17: mol_type = other DNA
gagggagccgggccggg

SEQ ID NO: 147341 - DNA, 17 bp, synthetic construct
  source 1..17: mol_type = other DNA
ggagggagccgggccgg

SEQ ID NO: 147342 - DNA, 17 bp, synthetic construct
  source 1..17: mol_type = other DNA
gggagggagccgggccg

SEQ ID NO: 147343 - DNA, 17 bp, synthetic construct
  source 1..17: mol_type = other DNA
agggagggagccgggcc

SEQ ID NO: 147344 - DNA, 17 bp, synthetic construct
  source 1..17: mol_type = other DNA
cagggagggagccgggc

SEQ ID NO: 147345 - DNA, 17 bp, synthetic construct
  source 1..17: mol_type = other DNA
gcagggagggagccggg

SEQ ID NO: 147346 - DNA, 17 bp, synthetic construct
  source 1..17: mol_type = other DNA
ggcagggagggagccgg

SEQ ID NO: 147347 - DNA, 17 bp, synthetic construct
  source 1..17: mol_type = other DNA
gggcagggagggagccg

SEQ ID NO: 147348 - DNA, 17 bp, synthetic construct
  source 1..17: mol_type = other DNA
cgggcagggagggagcc

SEQ ID NO: 147349 - DNA, 17 bp, synthetic construct
  source 1..17: mol_type = other DNA
acgggcagggagggagc

SEQ ID NO: 147350 - DNA, 17 bp, synthetic construct
  source 1..17: mol_type = other DNA
gacgggcagggagggag

SEQ ID NO: 147351 - DNA, 17 bp, synthetic construct
  source 1..17: mol_type = other DNA
ggacgggcagggaggga

SEQ ID NO: 147352 - DNA, 17 bp, synthetic construct
  source 1..17: mol_type = other DNA
gggacgggcagggaggg

SEQ ID NO: 147353 - DNA, 17 bp, synthetic construct
  source 1..17: mol_type = other DNA
ggggacgggcagggagg

SEQ ID NO: 147354 - DNA, 17 bp, synthetic construct
  source 1..17: mol_type = other DNA
cggggacgggcagggag

SEQ ID NO: 147355 - DNA, 17 bp, synthetic construct
  source 1..17: mol_type = other DNA
acggggacgggcaggga

SEQ ID NO: 147356 - DNA, 17 bp, synthetic construct
  source 1..17: mol_type = other DNA
gacggggacgggcaggg

SEQ ID NO: 147357 - DNA, 17 bp, synthetic construct
  source 1..17: mol_type = other DNA
ggacggggacgggcagg

SEQ ID NO: 147358 - DNA, 17 bp, synthetic construct
  source 1..17: mol_type = other DNA
gggacggggacgggcag

SEQ ID NO: 147359 - DNA, 17 bp, synthetic construct
  source 1..17: mol_type = other DNA
ggggacggggacgggca

SEQ ID NO: 147360 - DNA, 17 bp, synthetic construct
  source 1..17: mol_type = other DNA
gggggacggggacgggc

SEQ ID NO: 147361 - DNA, 17 bp, synthetic construct
  source 1..17: mol_type = other DNA
ggggggacggggacggg

SEQ ID NO: 147362 - DNA, 17 bp, synthetic construct
  source 1..17: mol_type = other DNA
tggggggacggggacgg

SEQ ID NO: 147363 - DNA, 17 bp, synthetic construct
  source 1..17: mol_type = other DNA
gtggggggacggggacg

SEQ ID NO: 147364 - DNA, 17 bp, synthetic construct
  source 1..17: mol_type = other DNA
ggtggggggacggggac

SEQ ID NO: 147365 - DNA, 17 bp, synthetic construct
  source 1..17: mol_type = other DNA
gggtggggggacgggga

SEQ ID NO: 147366 - DNA, 17 bp, synthetic construct
  source 1..17: mol_type = other DNA
cgggtggggggacgggg

SEQ ID NO: 147367 - DNA, 17 bp, synthetic construct
  source 1..17: mol_type = other DNA
acgggtggggggacggg

SEQ ID NO: 147368 - DNA, 17 bp, synthetic construct
  source 1..17: mol_type = other DNA
cacgggtggggggacgg

SEQ ID NO: 147369 - DNA, 17 bp, synthetic construct
  source 1..17: mol_type = other DNA
gcacgggtggggggacg

SEQ ID NO: 147370 - DNA, 17 bp, synthetic construct
  source 1..17: mol_type = other DNA
ggcacgggtggggggac

SEQ ID NO: 147371 - DNA, 17 bp, synthetic construct
  source 1..17: mol_type = other DNA
tggcacgggtgggggga

SEQ ID NO: 147372 - DNA, 17 bp, synthetic construct
  source 1..17: mol_type = other DNA
ctggcacgggtgggggg

SEQ ID NO: 147373 - DNA, 17 bp, synthetic construct
  source 1..17: mol_type = other DNA
gctggcacgggtggggg

SEQ ID NO: 147374 - DNA, 17 bp, synthetic construct
  source 1..17: mol_type = other DNA
ggctggcacgggtgggg

SEQ ID NO: 147375 - DNA, 17 bp, synthetic construct
  source 1..17: mol_type = other DNA
gggctggcacgggtggg

SEQ ID NO: 147376 - DNA, 17 bp, synthetic construct
  source 1..17: mol_type = other DNA
ggggctggcacgggtgg

SEQ ID NO: 147377 - DNA, 17 bp, synthetic construct
  source 1..17: mol_type = other DNA
gggggctggcacgggtg

SEQ ID NO: 147378 - DNA, 17 bp, synthetic construct
  source 1..17: mol_type = other DNA
tgggggctggcacgggt

SEQ ID NO: 147379 - DNA, 17 bp, synthetic construct
  source 1..17: mol_type = other DNA
ctgggggctggcacggg

SEQ ID NO: 147380 - DNA, 17 bp, synthetic construct
  source 1..17: mol_type = other DNA
cctgggggctggcacgg

SEQ ID NO: 147381 - DNA, 17 bp, synthetic construct
  source 1..17: mol_type = other DNA
tcctgggggctggcacg

SEQ ID NO: 147382 - DNA, 17 bp, synthetic construct
  source 1..17: mol_type = other DNA
atcctgggggctggcac

SEQ ID NO: 147383 - DNA, 17 bp, synthetic construct
  source 1..17: mol_type = other DNA
catcctgggggctggca

SEQ ID NO: 147384 - DNA, 17 bp, synthetic construct
  source 1..17: mol_type = other DNA
ccatcctgggggctggc

SEQ ID NO: 147385 - DNA, 17 bp, synthetic construct
  source 1..17: mol_type = other DNA
cccatcctgggggctgg

SEQ ID NO: 147386 - DNA, 17 bp, synthetic construct
  source 1..17: mol_type = other DNA
acccatcctgggggctg

SEQ ID NO: 147387 - DNA, 17 bp, synthetic construct
  source 1..17: mol_type = other DNA
cacccatcctgggggct

SEQ ID NO: 147388 - DNA, 17 bp, synthetic construct
  source 1..17: mol_type = other DNA
gcacccatcctgggggc

SEQ ID NO: 147389 - DNA, 17 bp, synthetic construct
  source 1..17: mol_type = other DNA
ggcacccatcctggggg

SEQ ID NO: 147390 - DNA, 17 bp, synthetic construct
  source 1..17: mol_type = other DNA
gggcacccatcctgggg

SEQ ID NO: 147391 - DNA, 17 bp, synthetic construct
  source 1..17: mol_type = other DNA
ggggcacccatcctggg

SEQ ID NO: 147392 - DNA, 17 bp, synthetic construct
  source 1..17: mol_type = other DNA
cggggcacccatcctgg

SEQ ID NO: 147393 - DNA, 17 bp, synthetic construct
  source 1..17: mol_type = other DNA
tcggggcacccatcctg

SEQ ID NO: 147394 - DNA, 17 bp, synthetic construct
  source 1..17: mol_type = other DNA
ctcggggcacccatcct

SEQ ID NO: 147395 - DNA, 17 bp, synthetic construct
  source 1..17: mol_type = other DNA
gctcggggcacccatcc

SEQ ID NO: 147396 - DNA, 17 bp, synthetic construct
  source 1..17: mol_type = other DNA
cgctcggggcacccatc

SEQ ID NO: 147397 - DNA, 17 bp, synthetic construct
  source 1..17: mol_type = other DNA
gcgctcggggcacccat

SEQ ID NO: 147398 - DNA, 17 bp, synthetic construct
  source 1..17: mol_type = other DNA
cgcgctcggggcaccca

SEQ ID NO: 147399 - DNA, 17 bp, synthetic construct
  source 1..17: mol_type = other DNA
acgcgctcggggcaccc

SEQ ID NO: 147400 - DNA, 17 bp, synthetic construct
  source 1..17: mol_type = other DNA
cacgcgctcggggcacc

SEQ ID NO: 147401 - DNA, 17 bp, synthetic construct
  source 1..17: mol_type = other DNA
gcacgcgctcggggcac

SEQ ID NO: 147402 - DNA, 17 bp, synthetic construct
  source 1..17: mol_type = other DNA
ggcacgcgctcggggca

SEQ ID NO: 147403 - DNA, 17 bp, synthetic construct
  source 1..17: mol_type = other DNA
cggcacgcgctcggggc

SEQ ID NO: 147404 - DNA, 17 bp, synthetic construct
  source 1..17: mol_type = other DNA
ccggcacgcgctcgggg

SEQ ID NO: 147405 - DNA, 17 bp, synthetic construct
  source 1..17: mol_type = other DNA
tccggcacgcgctcggg

SEQ ID NO: 147406 - DNA, 17 bp, synthetic construct
  source 1..17: mol_type = other DNA
gtccggcacgcgctcgg

SEQ ID NO: 147407 - DNA, 17 bp, synthetic construct
  source 1..17: mol_type = other DNA
cgtccggcacgcgctcg

SEQ ID NO: 147408 - DNA, 17 bp, synthetic construct
  source 1..17: mol_type = other DNA
gcgtccggcacgcgctc

SEQ ID NO: 147409 - DNA, 17 bp, synthetic construct
  source 1..17: mol_type = other DNA
agcgtccggcacgcgct

SEQ ID NO: 147410 - DNA, 17 bp, synthetic construct
  source 1..17: mol_type = other DNA
cagcgtccggcacgcgc

SEQ ID NO: 147411 - DNA, 17 bp, synthetic construct
  source 1..17: mol_type = other DNA
ccagcgtccggcacgcg

SEQ ID NO: 147412 - DNA, 17 bp, synthetic construct
  source 1..17: mol_type = other DNA
accagcgtccggcacgc

SEQ ID NO: 147413 - DNA, 17 bp, synthetic construct
  source 1..17: mol_type = other DNA
caccagcgtccggcacg

SEQ ID NO: 147414 - DNA, 17 bp, synthetic construct
  source 1..17: mol_type = other DNA
acaccagcgtccggcac

SEQ ID NO: 147415 - DNA, 17 bp, synthetic construct
  source 1..17: mol_type = other DNA
aacaccagcgtccggca

SEQ ID NO: 147416 - DNA, 17 bp, synthetic construct
  source 1..17: mol_type = other DNA
caacaccagcgtccggc

SEQ ID NO: 147417 - DNA, 17 bp, synthetic construct
  source 1..17: mol_type = other DNA
ccaacaccagcgtccgg

SEQ ID NO: 147418 - DNA, 17 bp, synthetic construct
  source 1..17: mol_type = other DNA
gccaacaccagcgtccg

SEQ ID NO: 147419 - DNA, 17 bp, synthetic construct
  source 1..17: mol_type = other DNA
agccaacaccagcgtcc

SEQ ID NO: 147420 - DNA, 17 bp, synthetic construct
  source 1..17: mol_type = other DNA
gagccaacaccagcgtc

SEQ ID NO: 147421 - DNA, 17 bp, synthetic construct
  source 1..17: mol_type = other DNA
agagccaacaccagcgt

SEQ ID NO: 147422 - DNA, 17 bp, synthetic construct
  source 1..17: mol_type = other DNA
cagagccaacaccagcg

SEQ ID NO: 147423 - DNA, 17 bp, synthetic construct
  source 1..17: mol_type = other DNA
ccagagccaacaccagc

SEQ ID NO: 147424 - DNA, 17 bp, synthetic construct
  source 1..17: mol_type = other DNA
gccagagccaacaccag

SEQ ID NO: 147425 - DNA, 17 bp, synthetic construct
  source 1..17: mol_type = other DNA
cgccagagccaacacca

SEQ ID NO: 147426 - DNA, 17 bp, synthetic construct
  source 1..17: mol_type = other DNA
ccgccagagccaacacc

SEQ ID NO: 147427 - DNA, 17 bp, synthetic construct
  source 1..17: mol_type = other DNA
gccgccagagccaacac

SEQ ID NO: 147428 - DNA, 17 bp, synthetic construct
  source 1..17: mol_type = other DNA
ggccgccagagccaaca

SEQ ID NO: 147429 - DNA, 17 bp, synthetic construct
  source 1..17: mol_type = other DNA
tggccgccagagccaac

SEQ ID NO: 147430 - DNA, 17 bp, synthetic construct
  source 1..17: mol_type = other DNA
atggccgccagagccaa

SEQ ID NO: 147431 - DNA, 17 bp, synthetic construct
  source 1..17: mol_type = other DNA
catggccgccagagcca

SEQ ID NO: 147432 - DNA, 17 bp, synthetic construct
  source 1..17: mol_type = other DNA
gcatggccgccagagcc

SEQ ID NO: 147433 - DNA, 17 bp, synthetic construct
  source 1..17: mol_type = other DNA
agcatggccgccagagc

SEQ ID NO: 147434 - DNA, 17 bp, synthetic construct
  source 1..17: mol_type = other DNA
gagcatggccgccagag

SEQ ID NO: 147435 - DNA, 17 bp, synthetic construct
  source 1..17: mol_type = other DNA
cgagcatggccgccaga

SEQ ID NO: 147436 - DNA, 17 bp, synthetic construct
  source 1..17: mol_type = other DNA
acgagcatggccgccag

SEQ ID NO: 147437 - DNA, 17 bp, synthetic construct
  source 1..17: mol_type = other DNA
cacgagcatggccgcca

SEQ ID NO: 147438 - DNA, 17 bp, synthetic construct
  source 1..17: mol_type = other DNA
ccacgagcatggccgcc

SEQ ID NO: 147439 - DNA, 17 bp, synthetic construct
  source 1..17: mol_type = other DNA
accacgagcatggccgc

SEQ ID NO: 147440 - DNA, 17 bp, synthetic construct
  source 1..17: mol_type = other DNA
caccacgagcatggccg

SEQ ID NO: 147441 - DNA, 17 bp, synthetic construct
  source 1..17: mol_type = other DNA
gcaccacgagcatggcc

SEQ ID NO: 147442 - DNA, 17 bp, synthetic construct
  source 1..17: mol_type = other DNA
ggcaccacgagcatggc

SEQ ID NO: 147443 - DNA, 17 bp, synthetic construct
  source 1..17: mol_type = other DNA
cggcaccacgagcatgg

SEQ ID NO: 147444 - DNA, 17 bp, synthetic construct
  source 1..17: mol_type = other DNA
gcggcaccacgagcatg

SEQ ID NO: 147445 - DNA, 17 bp, synthetic construct
  source 1..17: mol_type = other DNA
tgcggcaccacgagcat

SEQ ID NO: 147446 - DNA, 17 bp, synthetic construct
  source 1..17: mol_type = other DNA
ctgcggcaccacgagca

SEQ ID NO: 147447 - DNA, 17 bp, synthetic construct
  source 1..17: mol_type = other DNA
cctgcggcaccacgagc

SEQ ID NO: 147448 - DNA, 17 bp, synthetic construct
  source 1..17: mol_type = other DNA
gcctgcggcaccacgag

SEQ ID NO: 147449 - DNA, 17 bp, synthetic construct
  source 1..17: mol_type = other DNA
tgcctgcggcaccacga

SEQ ID NO: 147450 - DNA, 17 bp, synthetic construct
  source 1..17: mol_type = other DNA
ctgcctgcggcaccacg

SEQ ID NO: 147451 - DNA, 17 bp, synthetic construct
  source 1..17: mol_type = other DNA
cctgcctgcggcaccac

SEQ ID NO: 147452 - DNA, 17 bp, synthetic construct
  source 1..17: mol_type = other DNA
acctgcctgcggcacca

SEQ ID NO: 147453 - DNA, 17 bp, synthetic construct
  source 1..17: mol_type = other DNA
tacctgcctgcggcacc

SEQ ID NO: 147454 - DNA, 17 bp, synthetic construct
  source 1..17: mol_type = other DNA
ttacctgcctgcggcac

SEQ ID NO: 147455 - DNA, 17 bp, synthetic construct
  source 1..17: mol_type = other DNA
cttacctgcctgcggca

SEQ ID NO: 147456 - DNA, 17 bp, synthetic construct
  source 1..17: mol_type = other DNA
tcttacctgcctgcggc

SEQ ID NO: 147457 - DNA, 17 bp, synthetic construct
  source 1..17: mol_type = other DNA
ctcttacctgcctgcgg

SEQ ID NO: 147458 - DNA, 17 bp, synthetic construct
  source 1..17: mol_type = other DNA
gctcttacctgcctgcg

SEQ ID NO: 147459 - DNA, 17 bp, synthetic construct
  source 1..17: mol_type = other DNA
ggctcttacctgcctgc

SEQ ID NO: 147460 - DNA, 17 bp, synthetic construct
  source 1..17: mol_type = other DNA
gggctcttacctgcctg

SEQ ID NO: 147461 - DNA, 17 bp, synthetic construct
  source 1..17: mol_type = other DNA
ggggctcttacctgcct

SEQ ID NO: 147462 - DNA, 17 bp, synthetic construct
  source 1..17: mol_type = other DNA
gggggctcttacctgcc

SEQ ID NO: 147463 - DNA, 17 bp, synthetic construct
  source 1..17: mol_type = other DNA
ggggggctcttacctgc

SEQ ID NO: 147464 - DNA, 17 bp, synthetic construct
  source 1..17: mol_type = other DNA
tggggggctcttacctg

SEQ ID NO: 147465 - DNA, 17 bp, synthetic construct
  source 1..17: mol_type = other DNA
gtggggggctcttacct

SEQ ID NO: 147466 - DNA, 17 bp, synthetic construct
  source 1..17: mol_type = other DNA
agtggggggctcttacc

SEQ ID NO: 147467 - DNA, 17 bp, synthetic construct
  source 1..17: mol_type = other DNA
gagtggggggctcttac

SEQ ID NO: 147468 - DNA, 17 bp, synthetic construct
  source 1..17: mol_type = other DNA
ggagtggggggctctta

SEQ ID NO: 147469 - DNA, 17 bp, synthetic construct
  source 1..17: mol_type = other DNA
cggagtggggggctctt

SEQ ID NO: 147470 - DNA, 17 bp, synthetic construct
  source 1..17: mol_type = other DNA
gcggagtggggggctct

SEQ ID NO: 147471 - DNA, 17 bp, synthetic construct
  source 1..17: mol_type = other DNA
ggcggagtggggggctc

SEQ ID NO: 147472 - DNA, 17 bp, synthetic construct
  source 1..17: mol_type = other DNA
gggcggagtggggggct

SEQ ID NO: 147473 - DNA, 17 bp, synthetic construct
  source 1..17: mol_type = other DNA
ggggcggagtggggggc

SEQ ID NO: 147474 - DNA, 17 bp, synthetic construct
  source 1..17: mol_type = other DNA
gggggcggagtgggggg

SEQ ID NO: 147475 - DNA, 17 bp, synthetic construct
  source 1..17: mol_type = other DNA
agggggcggagtggggg

SEQ ID NO: 147476 - DNA, 17 bp, synthetic construct
  source 1..17: mol_type = other DNA
gagggggcggagtgggg

SEQ ID NO: 147477 - DNA, 17 bp, synthetic construct
  source 1..17: mol_type = other DNA
agagggggcggagtggg

SEQ ID NO: 147478 - DNA, 17 bp, synthetic construct
  source 1..17: mol_type = other DNA
gagagggggcggagtgg

SEQ ID NO: 147479 - DNA, 17 bp, synthetic construct
  source 1..17: mol_type = other DNA
cgagagggggcggagtg

SEQ ID NO: 147480 - DNA, 17 bp, synthetic construct
  source 1..17: mol_type = other DNA
tcgagagggggcggagt

SEQ ID NO: 147481 - DNA, 17 bp, synthetic construct
  source 1..17: mol_type = other DNA
atcgagagggggcggag

SEQ ID NO: 147482 - DNA, 17 bp, synthetic construct
  source 1..17: mol_type = other DNA
catcgagagggggcgga

SEQ ID NO: 147483 - DNA, 17 bp, synthetic construct
  source 1..17: mol_type = other DNA
gcatcgagagggggcgg

SEQ ID NO: 147484 - DNA, 17 bp, synthetic construct
  source 1..17: mol_type = other DNA
agcatcgagagggggcg

SEQ ID NO: 147485 - DNA, 17 bp, synthetic construct
  source 1..17: mol_type = other DNA
cagcatcgagagggggc

SEQ ID NO: 147486 - DNA, 17 bp, synthetic construct
  source 1..17: mol_type = other DNA
acagcatcgagaggggg

SEQ ID NO: 147487 - DNA, 17 bp, synthetic construct
  source 1..17: mol_type = other DNA
gacagcatcgagagggg

SEQ ID NO: 147488 - DNA, 17 bp, synthetic construct
  source 1..17: mol_type = other DNA
agacagcatcgagaggg

SEQ ID NO: 147489 - DNA, 17 bp, synthetic construct
  source 1..17: mol_type = other DNA
aagacagcatcgagagg

SEQ ID NO: 147490 - DNA, 17 bp, synthetic construct
  source 1..17: mol_type = other DNA
gaagacagcatcgagag

SEQ ID NO: 147491 - DNA, 17 bp, synthetic construct
  source 1..17: mol_type = other DNA
tgaagacagcatcgaga

SEQ ID NO: 147492 - DNA, 17 bp, synthetic construct
  source 1..17: mol_type = other DNA
gtgaagacagcatcgag

SEQ ID NO: 147493 - DNA, 17 bp, synthetic construct
  source 1..17: mol_type = other DNA
cgtgaagacagcatcga

SEQ ID NO: 147494 - DNA, 17 bp, synthetic construct
  source 1..17: mol_type = other DNA
ccgtgaagacagcatcg

SEQ ID NO: 147495 - DNA, 17 bp, synthetic construct
  source 1..17: mol_type = other DNA
gccgtgaagacagcatc

SEQ ID NO: 147496 - DNA, 17 bp, synthetic construct
  source 1..17: mol_type = other DNA
cgccgtgaagacagcat

SEQ ID NO: 147497 - DNA, 17 bp, synthetic construct
  source 1..17: mol_type = other DNA
ccgccgtgaagacagca

SEQ ID NO: 147498 - DNA, 17 bp, synthetic construct
  source 1..17: mol_type = other DNA
cccgccgtgaagacagc

SEQ ID NO: 147499 - DNA, 17 bp, synthetic construct
  source 1..17: mol_type = other DNA
ccccgccgtgaagacag

SEQ ID NO: 147500 - DNA, 17 bp, synthetic construct
  source 1..17: mol_type = other DNA
cccccgccgtgaagaca

SEQ ID NO: 147501 - DNA, 17 bp, synthetic construct
  source 1..17: mol_type = other DNA
acccccgccgtgaagac

SEQ ID NO: 147502 - DNA, 17 bp, synthetic construct
  source 1..17: mol_type = other DNA
gacccccgccgtgaaga

SEQ ID NO: 147503 - DNA, 17 bp, synthetic construct
  source 1..17: mol_type = other DNA
agacccccgccgtgaag

SEQ ID NO: 147504 - DNA, 17 bp, synthetic construct
  source 1..17: mol_type = other DNA
gagacccccgccgtgaa

SEQ ID NO: 147505 - DNA, 17 bp, synthetic construct
  source 1..17: mol_type = other DNA
agagacccccgccgtga

SEQ ID NO: 147506 - DNA, 17 bp, synthetic construct
  source 1..17: mol_type = other DNA
cagagacccccgccgtg

SEQ ID NO: 147507 - DNA, 17 bp, synthetic construct
  source 1..17: mol_type = other DNA
gcagagacccccgccgt

SEQ ID NO: 147508 - DNA, 17 bp, synthetic construct
  source 1..17: mol_type = other DNA
tgcagagacccccgccg

SEQ ID NO: 147509 - DNA, 17 bp, synthetic construct
  source 1..17: mol_type = other DNA
ctgcagagacccccgcc

SEQ ID NO: 147510 - DNA, 17 bp, synthetic construct
  source 1..17: mol_type = other DNA
cctgcagagacccccgc

SEQ ID NO: 147511 - DNA, 17 bp, synthetic construct
  source 1..17: mol_type = other DNA
acctgcagagacccccg

SEQ ID NO: 147512 - DNA, 17 bp, synthetic construct
  source 1..17: mol_type = other DNA
gacctgcagagaccccc

SEQ ID NO: 147513 - DNA, 17 bp, synthetic construct
  source 1..17: mol_type = other DNA
cgacctgcagagacccc

SEQ ID NO: 147514 - DNA, 17 bp, synthetic construct
  source 1..17: mol_type = other DNA
gcgacctgcagagaccc

SEQ ID NO: 147515 - DNA, 17 bp, synthetic construct
  source 1..17: mol_type = other DNA
agcgacctgcagagacc

SEQ ID NO: 147516 - DNA, 17 bp, synthetic construct
  source 1..17: mol_type = other DNA
aagcgacctgcagagac

SEQ ID NO: 147517 - DNA, 17 bp, synthetic construct
  source 1..17: mol_type = other DNA
caagcgacctgcagaga

SEQ ID NO: 147518 - DNA, 17 bp, synthetic construct
  source 1..17: mol_type = other DNA
gcaagcgacctgcagag

SEQ ID NO: 147519 - DNA, 17 bp, synthetic construct
  source 1..17: mol_type = other DNA
ggcaagcgacctgcaga

SEQ ID NO: 147520 - DNA, 17 bp, synthetic construct
  source 1..17: mol_type = other DNA
aggcaagcgacctgcag

SEQ ID NO: 147521 - DNA, 17 bp, synthetic construct
  source 1..17: mol_type = other DNA
caggcaagcgacctgca

SEQ ID NO: 147522 - DNA, 17 bp, synthetic construct
  source 1..17: mol_type = other DNA
ccaggcaagcgacctgc

SEQ ID NO: 147523 - DNA, 17 bp, synthetic construct
  source 1..17: mol_type = other DNA
cccaggcaagcgacctg

SEQ ID NO: 147524 - DNA, 17 bp, synthetic construct
  source 1..17: mol_type = other DNA
tcccaggcaagcgacct

SEQ ID NO: 147525 - DNA, 17 bp, synthetic construct
  source 1..17: mol_type = other DNA
ctcccaggcaagcgacc

SEQ ID NO: 147526 - DNA, 17 bp, synthetic construct
  source 1..17: mol_type = other DNA
gctcccaggcaagcgac

SEQ ID NO: 147527 - DNA, 17 bp, synthetic construct
  source 1..17: mol_type = other DNA
agctcccaggcaagcga

SEQ ID NO: 147528 - DNA, 17 bp, synthetic construct
  source 1..17: mol_type = other DNA
aagctcccaggcaagcg

SEQ ID NO: 147529 - DNA, 17 bp, synthetic construct
  source 1..17: mol_type = other DNA
gaagctcccaggcaagc

SEQ ID NO: 147530 - DNA, 17 bp, synthetic construct
  source 1..17: mol_type = other DNA
agaagctcccaggcaag

SEQ ID NO: 147531 - DNA, 17 bp, synthetic construct
  source 1..17: mol_type = other DNA
gagaagctcccaggcaa

SEQ ID NO: 147532 - DNA, 17 bp, synthetic construct
  source 1..17: mol_type = other DNA
ggagaagctcccaggca

SEQ ID NO: 147533 - DNA, 17 bp, synthetic construct
  source 1..17: mol_type = other DNA
aggagaagctcccaggc

SEQ ID NO: 147534 - DNA, 17 bp, synthetic construct
  source 1..17: mol_type = other DNA
caggagaagctcccagg

SEQ ID NO: 147535 - DNA, 17 bp, synthetic construct
  source 1..17: mol_type = other DNA
gcaggagaagctcccag

SEQ ID NO: 147536 - DNA, 17 bp, synthetic construct
  source 1..17: mol_type = other DNA
tgcaggagaagctccca

SEQ ID NO: 147537 - DNA, 17 bp, synthetic construct
  source 1..17: mol_type = other DNA
ctgcaggagaagctccc

SEQ ID NO: 147538 - DNA, 17 bp, synthetic construct
  source 1..17: mol_type = other DNA
tctgcaggagaagctcc

SEQ ID NO: 147539 - DNA, 17 bp, synthetic construct
  source 1..17: mol_type = other DNA
ctctgcaggagaagctc

SEQ ID NO: 147540 - DNA, 17 bp, synthetic construct
  source 1..17: mol_type = other DNA
actctgcaggagaagct

SEQ ID NO: 147541 - DNA, 17 bp, synthetic construct
  source 1..17: mol_type = other DNA
cactctgcaggagaagc

SEQ ID NO: 147542 - DNA, 17 bp, synthetic construct
  source 1..17: mol_type = other DNA
gcactctgcaggagaag

SEQ ID NO: 147543 - DNA, 17 bp, synthetic construct
  source 1..17: mol_type = other DNA
tgcactctgcaggagaa

SEQ ID NO: 147544 - DNA, 17 bp, synthetic construct
  source 1..17: mol_type = other DNA
gtgcactctgcaggaga

SEQ ID NO: 147545 - DNA, 17 bp, synthetic construct
  source 1..17: mol_type = other DNA
cgtgcactctgcaggag

SEQ ID NO: 147546 - DNA, 17 bp, synthetic construct
  source 1..17: mol_type = other DNA
ccgtgcactctgcagga

SEQ ID NO: 147547 - DNA, 17 bp, synthetic construct
  source 1..17: mol_type = other DNA
cccgtgcactctgcagg

SEQ ID NO: 147548 - DNA, 17 bp, synthetic construct
  source 1..17: mol_type = other DNA
gcccgtgcactctgcag

SEQ ID NO: 147549 - DNA, 17 bp, synthetic construct
  source 1..17: mol_type = other DNA
tgcccgtgcactctgca

SEQ ID NO: 147550 - DNA, 17 bp, synthetic construct
  source 1..17: mol_type = other DNA
ctgcccgtgcactctgc

SEQ ID NO: 147551 - DNA, 17 bp, synthetic construct
  source 1..17: mol_type = other DNA
tctgcccgtgcactctg

SEQ ID NO: 147552 - DNA, 17 bp, synthetic construct
  source 1..17: mol_type = other DNA
atctgcccgtgcactct

SEQ ID NO: 147553 - DNA, 17 bp, synthetic construct
  source 1..17: mol_type = other DNA
gatctgcccgtgcactc

SEQ ID NO: 147554 - DNA, 17 bp, synthetic construct
  source 1..17: mol_type = other DNA
ggatctgcccgtgcact

SEQ ID NO: 147555 - DNA, 17 bp, synthetic construct
  source 1..17: mol_type = other DNA
gggatctgcccgtgcac

SEQ ID NO: 147556 - DNA, 17 bp, synthetic construct
  source 1..17: mol_type = other DNA
ggggatctgcccgtgca

SEQ ID NO: 147557 - DNA, 17 bp, synthetic construct
  source 1..17: mol_type = other DNA
gggggatctgcccgtgc

SEQ ID NO: 147558 - DNA, 17 bp, synthetic construct
  source 1..17: mol_type = other DNA
agggggatctgcccgtg

SEQ ID NO: 147559 - DNA, 17 bp, synthetic construct
  source 1..17: mol_type = other DNA
tagggggatctgcccgt

SEQ ID NO: 147560 - DNA, 17 bp, synthetic construct
  source 1..17: mol_type = other DNA
gtagggggatctgcccg

SEQ ID NO: 147561 - DNA, 17 bp, synthetic construct
  source 1..17: mol_type = other DNA
cgtagggggatctgccc

SEQ ID NO: 147562 - DNA, 17 bp, synthetic construct
  source 1..17: mol_type = other DNA
tcgtagggggatctgcc

SEQ ID NO: 147563 - DNA, 17 bp, synthetic construct
  source 1..17: mol_type = other DNA
gtcgtagggggatctgc

SEQ ID NO: 147564 - DNA, 17 bp, synthetic construct
  source 1..17: mol_type = other DNA
agtcgtagggggatctg

SEQ ID NO: 147565 - DNA, 17 bp, synthetic construct
  source 1..17: mol_type = other DNA
gagtcgtagggggatct

SEQ ID NO: 147566 - DNA, 17 bp, synthetic construct
  source 1..17: mol_type = other DNA
ggagtcgtagggggatc

SEQ ID NO: 147567 - DNA, 17 bp, synthetic construct
  source 1..17: mol_type = other DNA
gggagtcgtagggggat

SEQ ID NO: 147568 - DNA, 17 bp, synthetic construct
  source 1..17: mol_type = other DNA
agggagtcgtaggggga

SEQ ID NO: 147569 - DNA, 17 bp, synthetic construct
  source 1..17: mol_type = other DNA
cagggagtcgtaggggg

SEQ ID NO: 147570 - DNA, 17 bp, synthetic construct
  source 1..17: mol_type = other DNA
tcagggagtcgtagggg

SEQ ID NO: 147571 - DNA, 17 bp, synthetic construct
  source 1..17: mol_type = other DNA
ctcagggagtcgtaggg

SEQ ID NO: 147572 - DNA, 17 bp, synthetic construct
  source 1..17: mol_type = other DNA
actcagggagtcgtagg

SEQ ID NO: 147573 - DNA, 17 bp, synthetic construct
  source 1..17: mol_type = other DNA
cactcagggagtcgtag

SEQ ID NO: 147574 - DNA, 17 bp, synthetic construct
  source 1..17: mol_type = other DNA
acactcagggagtcgta

SEQ ID NO: 147575 - DNA, 17 bp, synthetic construct
  source 1..17: mol_type = other DNA
gacactcagggagtcgt

SEQ ID NO: 147576 - DNA, 17 bp, synthetic construct
  source 1..17: mol_type = other DNA
ggacactcagggagtcg

SEQ ID NO: 147577 - DNA, 17 bp, synthetic construct
  source 1..17: mol_type = other DNA
aggacactcagggagtc

SEQ ID NO: 147578 - DNA, 17 bp, synthetic construct
  source 1..17: mol_type = other DNA
caggacactcagggagt

SEQ ID NO: 147579 - DNA, 17 bp, synthetic construct
  source 1..17: mol_type = other DNA
ccaggacactcagggag

SEQ ID NO: 147580 - DNA, 17 bp, synthetic construct
  source 1..17: mol_type = other DNA
tccaggacactcaggga

SEQ ID NO: 147581 - DNA, 17 bp, synthetic construct
  source 1..17: mol_type = other DNA
atccaggacactcaggg

SEQ ID NO: 147582 - DNA, 17 bp, synthetic construct
  source 1..17: mol_type = other DNA
catccaggacactcagg

SEQ ID NO: 147583 - DNA, 17 bp, synthetic construct
  source 1..17: mol_type = other DNA
ccatccaggacactcag

SEQ ID NO: 147584 - DNA, 17 bp, synthetic construct
  source 1..17: mol_type = other DNA
cccatccaggacactca

SEQ ID NO: 147585 - DNA, 17 bp, synthetic construct
  source 1..17: mol_type = other DNA
tcccatccaggacactc

SEQ ID NO: 147586 - DNA, 17 bp, synthetic construct
  source 1..17: mol_type = other DNA
gtcccatccaggacact

SEQ ID NO: 147587 - DNA, 17 bp, synthetic construct
  source 1..17: mol_type = other DNA
ggtcccatccaggacac

SEQ ID NO: 147588 - DNA, 17 bp, synthetic construct
  source 1..17: mol_type = other DNA
gggtcccatccaggaca

SEQ ID NO: 147589 - DNA, 17 bp, synthetic construct
  source 1..17: mol_type = other DNA
agggtcccatccaggac

SEQ ID NO: 147590 - DNA, 17 bp, synthetic construct
  source 1..17: mol_type = other DNA
tagggtcccatccagga

SEQ ID NO: 147591 - DNA, 17 bp, synthetic construct
  source 1..17: mol_type = other DNA
gtagggtcccatccagg

SEQ ID NO: 147592 - DNA, 17 bp, synthetic construct
  source 1..17: mol_type = other DNA
ggtagggtcccatccag

SEQ ID NO: 147593 - DNA, 17 bp, synthetic construct
  source 1..17: mol_type = other DNA
gggtagggtcccatcca

SEQ ID NO: 147594 - DNA, 17 bp, synthetic construct
  source 1..17: mol_type = other DNA
cgggtagggtcccatcc

SEQ ID NO: 147595 - DNA, 17 bp, synthetic construct
  source 1..17: mol_type = other DNA
acgggtagggtcccatc

SEQ ID NO: 147596 - DNA, 17 bp, synthetic construct
  source 1..17: mol_type = other DNA
gacgggtagggtcccat

SEQ ID NO: 147597 - DNA, 17 bp, synthetic construct
  source 1..17: mol_type = other DNA
ggacgggtagggtccca

SEQ ID NO: 147598 - DNA, 17 bp, synthetic construct
  source 1..17: mol_type = other DNA
gggacgggtagggtccc

SEQ ID NO: 147599 - DNA, 17 bp, synthetic construct
  source 1..17: mol_type = other DNA
ggggacgggtagggtcc

SEQ ID NO: 147600 - DNA, 17 bp, synthetic construct
  source 1..17: mol_type = other DNA
tggggacgggtagggtc

SEQ ID NO: 147601 - DNA, 17 bp, synthetic construct
  source 1..17: mol_type = other DNA
ttggggacgggtagggt

SEQ ID NO: 147602 - DNA, 17 bp, synthetic construct
  source 1..17: mol_type = other DNA
gttggggacgggtaggg

SEQ ID NO: 147603 - DNA, 17 bp, synthetic construct
  source 1..17: mol_type = other DNA
tgttggggacgggtagg

SEQ ID NO: 147604 - DNA, 17 bp, synthetic construct
  source 1..17: mol_type = other DNA
gtgttggggacgggtag

SEQ ID NO: 147605 - DNA, 17 bp, synthetic construct
  source 1..17: mol_type = other DNA
tgtgttggggacgggta

SEQ ID NO: 147606 - DNA, 17 bp, synthetic construct
  source 1..17: mol_type = other DNA
ctgtgttggggacgggt

SEQ ID NO: 147607 - DNA, 17 bp, synthetic construct
  source 1..17: mol_type = other DNA
cctgtgttggggacggg

SEQ ID NO: 147608 - DNA, 17 bp, synthetic construct
  source 1..17: mol_type = other DNA
ccctgtgttggggacgg

SEQ ID NO: 147609 - DNA, 17 bp, synthetic construct
  source 1..17: mol_type = other DNA
gccctgtgttggggacg

SEQ ID NO: 147610 - DNA, 17 bp, synthetic construct
  source 1..17: mol_type = other DNA
agccctgtgttggggac

SEQ ID NO: 147611 - DNA, 17 bp, synthetic construct
  source 1..17: mol_type = other DNA
gagccctgtgttgggga

SEQ ID NO: 147612 - DNA, 17 bp, synthetic construct
  source 1..17: mol_type = other DNA
agagccctgtgttgggg

SEQ ID NO: 147613 - DNA, 17 bp, synthetic construct
  source 1..17: mol_type = other DNA
cagagccctgtgttggg

SEQ ID NO: 147614 - DNA, 17 bp, synthetic construct
  source 1..17: mol_type = other DNA
ccagagccctgtgttgg

SEQ ID NO: 147615 - DNA, 17 bp, synthetic construct
  source 1..17: mol_type = other DNA
cccagagccctgtgttg

SEQ ID NO: 147616 - DNA, 17 bp, synthetic construct
  source 1..17: mol_type = other DNA
ccccagagccctgtgtt

SEQ ID NO: 147617 - DNA, 17 bp, synthetic construct
  source 1..17: mol_type = other DNA
gccccagagccctgtgt

SEQ ID NO: 147618 - DNA, 17 bp, synthetic construct
  source 1..17: mol_type = other DNA
ggccccagagccctgtg

SEQ ID NO: 147619 - DNA, 17 bp, synthetic construct
  source 1..17: mol_type = other DNA
gggccccagagccctgt

SEQ ID NO: 147620 - DNA, 17 bp, synthetic construct
  source 1..17: mol_type = other DNA
ggggccccagagccctg

SEQ ID NO: 147621 - DNA, 17 bp, synthetic construct
  source 1..17: mol_type = other DNA
tggggccccagagccct

SEQ ID NO: 147622 - DNA, 17 bp, synthetic construct
  source 1..17: mol_type = other DNA
gtggggccccagagccc

SEQ ID NO: 147623 - DNA, 17 bp, synthetic construct
  source 1..17: mol_type = other DNA
cgtggggccccagagcc

SEQ ID NO: 147624 - DNA, 17 bp, synthetic construct
  source 1..17: mol_type = other DNA
ccgtggggccccagagc

SEQ ID NO: 147625 - DNA, 17 bp, synthetic construct
  source 1..17: mol_type = other DNA
cccgtggggccccagag

SEQ ID NO: 147626 - DNA, 17 bp, synthetic construct
  source 1..17: mol_type = other DNA
gcccgtggggccccaga

SEQ ID NO: 147627 - DNA, 17 bp, synthetic construct
  source 1..17: mol_type = other DNA
agcccgtggggccccag

SEQ ID NO: 147628 - DNA, 17 bp, synthetic construct
  source 1..17: mol_type = other DNA
gagcccgtggggcccca

SEQ ID NO: 147629 - DNA, 17 bp, synthetic construct
  source 1..17: mol_type = other DNA
tgagcccgtggggcccc

SEQ ID NO: 147630 - DNA, 17 bp, synthetic construct
  source 1..17: mol_type = other DNA
gtgagcccgtggggccc

SEQ ID NO: 147631 - DNA, 17 bp, synthetic construct
  source 1..17: mol_type = other DNA
tgtgagcccgtggggcc

SEQ ID NO: 147632 - DNA, 17 bp, synthetic construct
  source 1..17: mol_type = other DNA
ctgtgagcccgtggggc

SEQ ID NO: 147633 - DNA, 17 bp, synthetic construct
  source 1..17: mol_type = other DNA
actgtgagcccgtgggg

SEQ ID NO: 147634 - DNA, 17 bp, synthetic construct
  source 1..17: mol_type = other DNA
cactgtgagcccgtggg

SEQ ID NO: 147635 - DNA, 17 bp, synthetic construct
  source 1..17: mol_type = other DNA
acactgtgagcccgtgg

SEQ ID NO: 147636 - DNA, 17 bp, synthetic construct
  source 1..17: mol_type = other DNA
gacactgtgagcccgtg

SEQ ID NO: 147637 - DNA, 17 bp, synthetic construct
  source 1..17: mol_type = other DNA
tgacactgtgagcccgt

SEQ ID NO: 147638 - DNA, 17 bp, synthetic construct
  source 1..17: mol_type = other DNA
ctgacactgtgagcccg

SEQ ID NO: 147639 - DNA, 17 bp, synthetic construct
  source 1..17: mol_type = other DNA
cctgacactgtgagccc

SEQ ID NO: 147640 - DNA, 17 bp, synthetic construct
  source 1..17: mol_type = other DNA
tcctgacactgtgagcc

SEQ ID NO: 147641 - DNA, 17 bp, synthetic construct
  source 1..17: mol_type = other DNA
ttcctgacactgtgagc

SEQ ID NO: 147642 - DNA, 17 bp, synthetic construct
  source 1..17: mol_type = other DNA
tttcctgacactgtgag

SEQ ID NO: 147643 - DNA, 17 bp, synthetic construct
  source 1..17: mol_type = other DNA
gtttcctgacactgtga

SEQ ID NO: 147644 - DNA, 17 bp, synthetic construct
  source 1..17: mol_type = other DNA
agtttcctgacactgtg

SEQ ID NO: 147645 - DNA, 17 bp, synthetic construct
  source 1..17: mol_type = other DNA
gagtttcctgacactgt

SEQ ID NO: 147646 - DNA, 17 bp, synthetic construct
  source 1..17: mol_type = other DNA
tgagtttcctgacactg

SEQ ID NO: 147647 - DNA, 17 bp, synthetic construct
  source 1..17: mol_type = other DNA
ctgagtttcctgacact

SEQ ID NO: 147648 - DNA, 17 bp, synthetic construct
  source 1..17: mol_type = other DNA
cctgagtttcctgacac

SEQ ID NO: 147649 - DNA, 17 bp, synthetic construct
  source 1..17: mol_type = other DNA
ccctgagtttcctgaca

SEQ ID NO: 147650 - DNA, 17 bp, synthetic construct
  source 1..17: mol_type = other DNA
cccctgagtttcctgac

SEQ ID NO: 147651 - DNA, 17 bp, synthetic construct
  source 1..17: mol_type = other DNA
gcccctgagtttcctga

SEQ ID NO: 147652 - DNA, 17 bp, synthetic construct
  source 1..17: mol_type = other DNA
agcccctgagtttcctg

SEQ ID NO: 147653 - DNA, 17 bp, synthetic construct
  source 1..17: mol_type = other DNA
cagcccctgagtttcct

SEQ ID NO: 147654 - DNA, 17 bp, synthetic construct
  source 1..17: mol_type = other DNA
ccagcccctgagtttcc

SEQ ID NO: 147655 - DNA, 17 bp, synthetic construct
  source 1..17: mol_type = other DNA
gccagcccctgagtttc

SEQ ID NO: 147656 - DNA, 17 bp, synthetic construct
  source 1..17: mol_type = other DNA
agccagcccctgagttt

SEQ ID NO: 147657 - DNA, 17 bp, synthetic construct
  source 1..17: mol_type = other DNA
aagccagcccctgagtt

SEQ ID NO: 147658 - DNA, 17 bp, synthetic construct
  source 1..17: mol_type = other DNA
caagccagcccctgagt

SEQ ID NO: 147659 - DNA, 17 bp, synthetic construct
  source 1..17: mol_type = other DNA
ccaagccagcccctgag

SEQ ID NO: 147660 - DNA, 17 bp, synthetic construct
  source 1..17: mol_type = other DNA
tccaagccagcccctga

SEQ ID NO: 147661 - DNA, 17 bp, synthetic construct
  source 1..17: mol_type = other DNA
atccaagccagcccctg

SEQ ID NO: 147662 - DNA, 17 bp, synthetic construct
  source 1..17: mol_type = other DNA
catccaagccagcccct

SEQ ID NO: 147663 - DNA, 17 bp, synthetic construct
  source 1..17: mol_type = other DNA
ccatccaagccagcccc

SEQ ID NO: 147664 - DNA, 17 bp, synthetic construct
  source 1..17: mol_type = other DNA
cccatccaagccagccc

SEQ ID NO: 147665 - DNA, 17 bp, synthetic construct
  source 1..17: mol_type = other DNA
ccccatccaagccagcc

SEQ ID NO: 147666 - DNA, 17 bp, synthetic construct
  source 1..17: mol_type = other DNA
accccatccaagccagc

SEQ ID NO: 147667 - DNA, 17 bp, synthetic construct
  source 1..17: mol_type = other DNA
caccccatccaagccag

SEQ ID NO: 147668 - DNA, 17 bp, synthetic construct
  source 1..17: mol_type = other DNA
acaccccatccaagcca

SEQ ID NO: 147669 - DNA, 17 bp, synthetic construct
  source 1..17: mol_type = other DNA
gacaccccatccaagcc

SEQ ID NO: 147670 - DNA, 17 bp, synthetic construct
  source 1..17: mol_type = other DNA
ggacaccccatccaagc

SEQ ID NO: 147671 - DNA, 17 bp, synthetic construct
  source 1..17: mol_type = other DNA
tggacaccccatccaag

SEQ ID NO: 147672 - DNA, 17 bp, synthetic construct
  source 1..17: mol_type = other DNA
ctggacaccccatccaa

SEQ ID NO: 147673 - DNA, 17 bp, synthetic construct
  source 1..17: mol_type = other DNA
cctggacaccccatcca

SEQ ID NO: 147674 - DNA, 17 bp, synthetic construct
  source 1..17: mol_type = other DNA
tcctggacaccccatcc

SEQ ID NO: 147675 - DNA, 17 bp, synthetic construct
  source 1..17: mol_type = other DNA
ctcctggacaccccatc

SEQ ID NO: 147676 - DNA, 17 bp, synthetic construct
  source 1..17: mol_type = other DNA
tctcctggacaccccat

SEQ ID NO: 147677 - DNA, 17 bp, synthetic construct
  source 1..17: mol_type = other DNA
ttctcctggacacccca

SEQ ID NO: 147678 - DNA, 17 bp, synthetic construct
  source 1..17: mol_type = other DNA
cttctcctggacacccc

SEQ ID NO: 147679 - DNA, 17 bp, synthetic construct
  source 1..17: mol_type = other DNA
ccttctcctggacaccc

SEQ ID NO: 147680 - DNA, 17 bp, synthetic construct
  source 1..17: mol_type = other DNA
accttctcctggacacc

SEQ ID NO: 147681 - DNA, 17 bp, synthetic construct
  source 1..17: mol_type = other DNA
caccttctcctggacac

SEQ ID NO: 147682 - DNA, 17 bp, synthetic construct
  source 1..17: mol_type = other DNA
ccaccttctcctggaca

SEQ ID NO: 147683 - DNA, 17 bp, synthetic construct
  source 1..17: mol_type = other DNA
cccaccttctcctggac

SEQ ID NO: 147684 - DNA, 17 bp, synthetic construct
  source 1..17: mol_type = other DNA
gcccaccttctcctgga

SEQ ID NO: 147685 - DNA, 17 bp, synthetic construct
  source 1..17: mol_type = other DNA
ggcccaccttctcctgg

SEQ ID NO: 147686 - DNA, 17 bp, synthetic construct
  source 1..17: mol_type = other DNA
gggcccaccttctcctg

SEQ ID NO: 147687 - DNA, 17 bp, synthetic construct
  source 1..17: mol_type = other DNA
ggggcccaccttctcct

SEQ ID NO: 147688 - DNA, 17 bp, synthetic construct
  source 1..17: mol_type = other DNA
aggggcccaccttctcc

SEQ ID NO: 147689 - DNA, 17 bp, synthetic construct
  source 1..17: mol_type = other DNA
caggggcccaccttctc

SEQ ID NO: 147690 - DNA, 17 bp, synthetic construct
  source 1..17: mol_type = other DNA
tcaggggcccaccttct

SEQ ID NO: 147691 - DNA, 17 bp, synthetic construct
  source 1..17: mol_type = other DNA
gtcaggggcccaccttc

SEQ ID NO: 147692 - DNA, 17 bp, synthetic construct
  source 1..17: mol_type = other DNA
ggtcaggggcccacctt

SEQ ID NO: 147693 - DNA, 17 bp, synthetic construct
  source 1..17: mol_type = other DNA
cggtcaggggcccacct

SEQ ID NO: 147694 - DNA, 17 bp, synthetic construct
  source 1..17: mol_type = other DNA
gcggtcaggggcccacc

SEQ ID NO: 147695 - DNA, 17 bp, synthetic construct
  source 1..17: mol_type = other DNA
tgcggtcaggggcccac

SEQ ID NO: 147696 - DNA, 17 bp, synthetic construct
  source 1..17: mol_type = other DNA
ctgcggtcaggggccca

SEQ ID NO: 147697 - DNA, 17 bp, synthetic construct
  source 1..17: mol_type = other DNA
cctgcggtcaggggccc

SEQ ID NO: 147698 - DNA, 17 bp, synthetic construct
  source 1..17: mol_type = other DNA
ccctgcggtcaggggcc

SEQ ID NO: 147699 - DNA, 17 bp, synthetic construct
  source 1..17: mol_type = other DNA
gccctgcggtcaggggc

SEQ ID NO: 147700 - DNA, 17 bp, synthetic construct
  source 1..17: mol_type = other DNA
tgccctgcggtcagggg

SEQ ID NO: 147701 - DNA, 17 bp, synthetic construct
  source 1..17: mol_type = other DNA
ttgccctgcggtcaggg

SEQ ID NO: 147702 - DNA, 17 bp, synthetic construct
  source 1..17: mol_type = other DNA
cttgccctgcggtcagg

SEQ ID NO: 147703 - DNA, 17 bp, synthetic construct
  source 1..17: mol_type = other DNA
ccttgccctgcggtcag

SEQ ID NO: 147704 - DNA, 17 bp, synthetic construct
  source 1..17: mol_type = other DNA
gccttgccctgcggtca

SEQ ID NO: 147705 - DNA, 17 bp, synthetic construct
  source 1..17: mol_type = other DNA
ggccttgccctgcggtc

SEQ ID NO: 147706 - DNA, 17 bp, synthetic construct
  source 1..17: mol_type = other DNA
gggccttgccctgcggt

SEQ ID NO: 147707 - DNA, 17 bp, synthetic construct
  source 1..17: mol_type = other DNA
ggggccttgccctgcgg

SEQ ID NO: 147708 - DNA, 17 bp, synthetic construct
  source 1..17: mol_type = other DNA
aggggccttgccctgcg

SEQ ID NO: 147709 - DNA, 17 bp, synthetic construct
  source 1..17: mol_type = other DNA
caggggccttgccctgc

SEQ ID NO: 147710 - DNA, 17 bp, synthetic construct
  source 1..17: mol_type = other DNA
ccaggggccttgccctg

SEQ ID NO: 147711 - DNA, 17 bp, synthetic construct
  source 1..17: mol_type = other DNA
cccaggggccttgccct

SEQ ID NO: 147712 - DNA, 17 bp, synthetic construct
  source 1..17: mol_type = other DNA
tcccaggggccttgccc

SEQ ID NO: 147713 - DNA, 17 bp, synthetic construct
  source 1..17: mol_type = other DNA
ctcccaggggccttgcc

SEQ ID NO: 147714 - DNA, 17 bp, synthetic construct
  source 1..17: mol_type = other DNA
tctcccaggggccttgc

SEQ ID NO: 147715 - DNA, 17 bp, synthetic construct
  source 1..17: mol_type = other DNA
gtctcccaggggccttg

SEQ ID NO: 147716 - DNA, 17 bp, synthetic construct
  source 1..17: mol_type = other DNA
ggtctcccaggggcctt

SEQ ID NO: 147717 - DNA, 17 bp, synthetic construct
  source 1..17: mol_type = other DNA
tggtctcccaggggcct

SEQ ID NO: 147718 - DNA, 17 bp, synthetic construct
  source 1..17: mol_type = other DNA
gtggtctcccaggggcc

SEQ ID NO: 147719 - DNA, 17 bp, synthetic construct
  source 1..17: mol_type = other DNA
ggtggtctcccaggggc

SEQ ID NO: 147720 - DNA, 17 bp, synthetic construct
  source 1..17: mol_type = other DNA
cggtggtctcccagggg

SEQ ID NO: 147721 - DNA, 17 bp, synthetic construct
  source 1..17: mol_type = other DNA
tcggtggtctcccaggg

SEQ ID NO: 147722 - DNA, 17 bp, synthetic construct
  source 1..17: mol_type = other DNA
ttcggtggtctcccagg

SEQ ID NO: 147723 - DNA, 17 bp, synthetic construct
  source 1..17: mol_type = other DNA
tttcggtggtctcccag

SEQ ID NO: 147724 - DNA, 17 bp, synthetic construct
  source 1..17: mol_type = other DNA
ctttcggtggtctccca

SEQ ID NO: 147725 - DNA, 17 bp, synthetic construct
  source 1..17: mol_type = other DNA
cctttcggtggtctccc

SEQ ID NO: 147726 - DNA, 17 bp, synthetic construct
  source 1..17: mol_type = other DNA
ccctttcggtggtctcc

SEQ ID NO: 147727 - DNA, 17 bp, synthetic construct
  source 1..17: mol_type = other DNA
accctttcggtggtctc

SEQ ID NO: 147728 - DNA, 17 bp, synthetic construct
  source 1..17: mol_type = other DNA
gaccctttcggtggtct

SEQ ID NO: 147729 - DNA, 17 bp, synthetic construct
  source 1..17: mol_type = other DNA
agaccctttcggtggtc

SEQ ID NO: 147730 - DNA, 17 bp, synthetic construct
  source 1..17: mol_type = other DNA
aagaccctttcggtggt

SEQ ID NO: 147731 - DNA, 17 bp, synthetic construct
  source 1..17: mol_type = other DNA
caagaccctttcggtgg

SEQ ID NO: 147732 - DNA, 17 bp, synthetic construct
  source 1..17: mol_type = other DNA
ccaagaccctttcggtg

SEQ ID NO: 147733 - DNA, 17 bp, synthetic construct
  source 1..17: mol_type = other DNA
accaagaccctttcggt

SEQ ID NO: 147734 - DNA, 17 bp, synthetic construct
  source 1..17: mol_type = other DNA
gaccaagaccctttcgg

SEQ ID NO: 147735 - DNA, 17 bp, synthetic construct
  source 1..17: mol_type = other DNA
agaccaagaccctttcg

SEQ ID NO: 147736 - DNA, 17 bp, synthetic construct
  source 1..17: mol_type = other DNA
aagaccaagaccctttc

SEQ ID NO: 147737 - DNA, 17 bp, synthetic construct
  source 1..17: mol_type = other DNA
caagaccaagacccttt

SEQ ID NO: 147738 - DNA, 17 bp, synthetic construct
  source 1..17: mol_type = other DNA
ccaagaccaagaccctt

SEQ ID NO: 147739 - DNA, 17 bp, synthetic construct
  source 1..17: mol_type = other DNA
cccaagaccaagaccct

SEQ ID NO: 147740 - DNA, 17 bp, synthetic construct
  source 1..17: mol_type = other DNA
ccccaagaccaagaccc

SEQ ID NO: 147741 - DNA, 17 bp, synthetic construct
  source 1..17: mol_type = other DNA
cccccaagaccaagacc

SEQ ID NO: 147742 - DNA, 17 bp, synthetic construct
  source 1..17: mol_type = other DNA
acccccaagaccaagac

SEQ ID NO: 147743 - DNA, 17 bp, synthetic construct
  source 1..17: mol_type = other DNA
cacccccaagaccaaga

SEQ ID NO: 147744 - DNA, 17 bp, synthetic construct
  source 1..17: mol_type = other DNA
ccacccccaagaccaag

SEQ ID NO: 147745 - DNA, 17 bp, synthetic construct
  source 1..17: mol_type = other DNA
cccacccccaagaccaa

SEQ ID NO: 147746 - DNA, 17 bp, synthetic construct
  source 1..17: mol_type = other DNA
tcccacccccaagacca

SEQ ID NO: 147747 - DNA, 17 bp, synthetic construct
  source 1..17: mol_type = other DNA
gtcccacccccaagacc

SEQ ID NO: 147748 - DNA, 17 bp, synthetic construct
  source 1..17: mol_type = other DNA
tgtcccacccccaagac

SEQ ID NO: 147749 - DNA, 17 bp, synthetic construct
  source 1..17: mol_type = other DNA
ctgtcccacccccaaga

SEQ ID NO: 147750 - DNA, 17 bp, synthetic construct
  source 1..17: mol_type = other DNA
cctgtcccacccccaag

SEQ ID NO: 147751 - DNA, 17 bp, synthetic construct
  source 1..17: mol_type = other DNA
tcctgtcccacccccaa

SEQ ID NO: 147752 - DNA, 17 bp, synthetic construct
  source 1..17: mol_type = other DNA
ctcctgtcccaccccca

SEQ ID NO: 147753 - DNA, 17 bp, synthetic construct
  source 1..17: mol_type = other DNA
actcctgtcccaccccc

SEQ ID NO: 147754 - DNA, 17 bp, synthetic construct
  source 1..17: mol_type = other DNA
cactcctgtcccacccc

SEQ ID NO: 147755 - DNA, 17 bp, synthetic construct
  source 1..17: mol_type = other DNA
ccactcctgtcccaccc

SEQ ID NO: 147756 - DNA, 17 bp, synthetic construct
  source 1..17: mol_type = other DNA
cccactcctgtcccacc

SEQ ID NO: 147757 - DNA, 17 bp, synthetic construct
  source 1..17: mol_type = other DNA
gcccactcctgtcccac

SEQ ID NO: 147758 - DNA, 17 bp, synthetic construct
  source 1..17: mol_type = other DNA
tgcccactcctgtccca

SEQ ID NO: 147759 - DNA, 17 bp, synthetic construct
  source 1..17: mol_type = other DNA
ttgcccactcctgtccc

SEQ ID NO: 147760 - DNA, 17 bp, synthetic construct
  source 1..17: mol_type = other DNA
attgcccactcctgtcc

SEQ ID NO: 147761 - DNA, 17 bp, synthetic construct
  source 1..17: mol_type = other DNA
cattgcccactcctgtc

SEQ ID NO: 147762 - DNA, 17 bp, synthetic construct
  source 1..17: mol_type = other DNA
ccattgcccactcctgt

SEQ ID NO: 147763 - DNA, 17 bp, synthetic construct
  source 1..17: mol_type = other DNA
cccattgcccactcctg

SEQ ID NO: 147764 - DNA, 17 bp, synthetic construct
  source 1..17: mol_type = other DNA
ccccattgcccactcct

SEQ ID NO: 147765 - DNA, 17 bp, synthetic construct
  source 1..17: mol_type = other DNA
cccccattgcccactcc

SEQ ID NO: 147766 - DNA, 17 bp, synthetic construct
  source 1..17: mol_type = other DNA
tcccccattgcccactc

SEQ ID NO: 147767 - DNA, 17 bp, synthetic construct
  source 1..17: mol_type = other DNA
ctcccccattgcccact

SEQ ID NO: 147768 - DNA, 17 bp, synthetic construct
  source 1..17: mol_type = other DNA
cctcccccattgcccac

SEQ ID NO: 147769 - DNA, 17 bp, synthetic construct
  source 1..17: mol_type = other DNA
ccctcccccattgccca

SEQ ID NO: 147770 - DNA, 17 bp, synthetic construct
  source 1..17: mol_type = other DNA
cccctcccccattgccc

SEQ ID NO: 147771 - DNA, 17 bp, synthetic construct
  source 1..17: mol_type = other DNA
ccccctcccccattgcc

SEQ ID NO: 147772 - DNA, 17 bp, synthetic construct
  source 1..17: mol_type = other DNA
accccctcccccattgc

SEQ ID NO: 147773 - DNA, 17 bp, synthetic construct
  source 1..17: mol_type = other DNA
gaccccctcccccattg

SEQ ID NO: 147774 - DNA, 17 bp, synthetic construct
  source 1..17: mol_type = other DNA
tgaccccctcccccatt

SEQ ID NO: 147775 - DNA, 17 bp, synthetic construct
  source 1..17: mol_type = other DNA
gtgaccccctcccccat

SEQ ID NO: 147776 - DNA, 17 bp, synthetic construct
  source 1..17: mol_type = other DNA
tgtgaccccctccccca

SEQ ID NO: 147777 - DNA, 17 bp, synthetic construct
  source 1..17: mol_type = other DNA
ctgtgaccccctccccc

SEQ ID NO: 147778 - DNA, 17 bp, synthetic construct
  source 1..17: mol_type = other DNA
gctgtgaccccctcccc

SEQ ID NO: 147779 - DNA, 17 bp, synthetic construct
  source 1..17: mol_type = other DNA
agctgtgaccccctccc

SEQ ID NO: 147780 - DNA, 17 bp, synthetic construct
  source 1..17: mol_type = other DNA
cagctgtgaccccctcc

SEQ ID NO: 147781 - DNA, 17 bp, synthetic construct
  source 1..17: mol_type = other DNA
ccagctgtgaccccctc

SEQ ID NO: 147782 - DNA, 17 bp, synthetic construct
  source 1..17: mol_type = other DNA
cccagctgtgaccccct

SEQ ID NO: 147783 - DNA, 17 bp, synthetic construct
  source 1..17: mol_type = other DNA
ccccagctgtgaccccc

SEQ ID NO: 147784 - DNA, 17 bp, synthetic construct
  source 1..17: mol_type = other DNA
cccccagctgtgacccc

SEQ ID NO: 147785 - DNA, 17 bp, synthetic construct
  source 1..17: mol_type = other DNA
acccccagctgtgaccc

SEQ ID NO: 147786 - DNA, 17 bp, synthetic construct
  source 1..17: mol_type = other DNA
gacccccagctgtgacc

SEQ ID NO: 147787 - DNA, 17 bp, synthetic construct
  source 1..17: mol_type = other DNA
agacccccagctgtgac

SEQ ID NO: 147788 - DNA, 17 bp, synthetic construct
  source 1..17: mol_type = other DNA
gagacccccagctgtga

SEQ ID NO: 147789 - DNA, 17 bp, synthetic construct
  source 1..17: mol_type = other DNA
agagacccccagctgtg

SEQ ID NO: 147790 - DNA, 17 bp, synthetic construct
  source 1..17: mol_type = other DNA
gagagacccccagctgt

SEQ ID NO: 147791 - DNA, 17 bp, synthetic construct
  source 1..17: mol_type = other DNA
agagagacccccagctg

SEQ ID NO: 147792 - DNA, 17 bp, synthetic construct
  source 1..17: mol_type = other DNA
cagagagacccccagct

SEQ ID NO: 147793 - DNA, 17 bp, synthetic construct
  source 1..17: mol_type = other DNA
ccagagagacccccagc

SEQ ID NO: 147794 - DNA, 17 bp, synthetic construct
  source 1..17: mol_type = other DNA
tccagagagacccccag

SEQ ID NO: 147795 - DNA, 17 bp, synthetic construct
  source 1..17: mol_type = other DNA
ctccagagagaccccca

SEQ ID NO: 147796 - DNA, 17 bp, synthetic construct
  source 1..17: mol_type = other DNA
gctccagagagaccccc

SEQ ID NO: 147797 - DNA, 17 bp, synthetic construct
  source 1..17: mol_type = other DNA
ggctccagagagacccc

SEQ ID NO: 147798 - DNA, 17 bp, synthetic construct
  source 1..17: mol_type = other DNA
gggctccagagagaccc

SEQ ID NO: 147799 - DNA, 17 bp, synthetic construct
  source 1..17: mol_type = other DNA
ggggctccagagagacc

SEQ ID NO: 147800 - DNA, 17 bp, synthetic construct
  source 1..17: mol_type = other DNA
tggggctccagagagac

SEQ ID NO: 147801 - DNA, 17 bp, synthetic construct
  source 1..17: mol_type = other DNA
atggggctccagagaga

SEQ ID NO: 147802 - DNA, 17 bp, synthetic construct
  source 1..17: mol_type = other DNA
catggggctccagagag

SEQ ID NO: 147803 - DNA, 17 bp, synthetic construct
  source 1..17: mol_type = other DNA
tcatggggctccagaga

SEQ ID NO: 147804 - DNA, 17 bp, synthetic construct
  source 1..17: mol_type = other DNA
ctcatggggctccagag

SEQ ID NO: 147805 - DNA, 17 bp, synthetic construct
  source 1..17: mol_type = other DNA
cctcatggggctccaga

SEQ ID NO: 147806 - DNA, 17 bp, synthetic construct
  source 1..17: mol_type = other DNA
gcctcatggggctccag

SEQ ID NO: 147807 - DNA, 17 bp, synthetic construct
  source 1..17: mol_type = other DNA
ggcctcatggggctcca

SEQ ID NO: 147808 - DNA, 17 bp, synthetic construct
  source 1..17: mol_type = other DNA
gggcctcatggggctcc

SEQ ID NO: 147809 - DNA, 17 bp, synthetic construct
  source 1..17: mol_type = other DNA
tgggcctcatggggctc

SEQ ID NO: 147810 - DNA, 17 bp, synthetic construct
  source 1..17: mol_type = other DNA
ctgggcctcatggggct

SEQ ID NO: 147811 - DNA, 17 bp, synthetic construct
  source 1..17: mol_type = other DNA
cctgggcctcatggggc

SEQ ID NO: 147812 - DNA, 17 bp, synthetic construct
  source 1..17: mol_type = other DNA
gcctgggcctcatgggg

SEQ ID NO: 147813 - DNA, 17 bp, synthetic construct
  source 1..17: mol_type = other DNA
tgcctgggcctcatggg

SEQ ID NO: 147814 - DNA, 17 bp, synthetic construct
  source 1..17: mol_type = other DNA
atgcctgggcctcatgg

SEQ ID NO: 147815 - DNA, 17 bp, synthetic construct
  source 1..17: mol_type = other DNA
gatgcctgggcctcatg

SEQ ID NO: 147816 - DNA, 17 bp, synthetic construct
  source 1..17: mol_type = other DNA
tgatgcctgggcctcat

SEQ ID NO: 147817 - DNA, 17 bp, synthetic construct
  source 1..17: mol_type = other DNA
ctgatgcctgggcctca

SEQ ID NO: 147818 - DNA, 17 bp, synthetic construct
  source 1..17: mol_type = other DNA
tctgatgcctgggcctc

SEQ ID NO: 147819 - DNA, 17 bp, synthetic construct
  source 1..17: mol_type = other DNA
ctctgatgcctgggcct

SEQ ID NO: 147820 - DNA, 17 bp, synthetic construct
  source 1..17: mol_type = other DNA
actctgatgcctgggcc

SEQ ID NO: 147821 - DNA, 17 bp, synthetic construct
  source 1..17: mol_type = other DNA
cactctgatgcctgggc

SEQ ID NO: 147822 - DNA, 17 bp, synthetic construct
  source 1..17: mol_type = other DNA
tcactctgatgcctggg

SEQ ID NO: 147823 - DNA, 17 bp, synthetic construct
  source 1..17: mol_type = other DNA
ctcactctgatgcctgg

SEQ ID NO: 147824 - DNA, 17 bp, synthetic construct
  source 1..17: mol_type = other DNA
gctcactctgatgcctg

SEQ ID NO: 147825 - DNA, 17 bp, synthetic construct
  source 1..17: mol_type = other DNA
tgctcactctgatgcct

SEQ ID NO: 147826 - DNA, 17 bp, synthetic construct
  source 1..17: mol_type = other DNA
ctgctcactctgatgcc

SEQ ID NO: 147827 - DNA, 17 bp, synthetic construct
  source 1..17: mol_type = other DNA
cctgctcactctgatgc

SEQ ID NO: 147828 - DNA, 17 bp, synthetic construct
  source 1..17: mol_type = other DNA
ccctgctcactctgatg

SEQ ID NO: 147829 - DNA, 17 bp, synthetic construct
  source 1..17: mol_type = other DNA
cccctgctcactctgat

SEQ ID NO: 147830 - DNA, 17 bp, synthetic construct
  source 1..17: mol_type = other DNA
gcccctgctcactctga

SEQ ID NO: 147831 - DNA, 17 bp, synthetic construct
  source 1..17: mol_type = other DNA
tgcccctgctcactctg

SEQ ID NO: 147832 - DNA, 17 bp, synthetic construct
  source 1..17: mol_type = other DNA
ctgcccctgctcactct

SEQ ID NO: 147833 - DNA, 17 bp, synthetic construct
  source 1..17: mol_type = other DNA
cctgcccctgctcactc

SEQ ID NO: 147834 - DNA, 17 bp, synthetic construct
  source 1..17: mol_type = other DNA
gcctgcccctgctcact

SEQ ID NO: 147835 - DNA, 17 bp, synthetic construct
  source 1..17: mol_type = other DNA
agcctgcccctgctcac

SEQ ID NO: 147836 - DNA, 17 bp, synthetic construct
  source 1..17: mol_type = other DNA
aagcctgcccctgctca

SEQ ID NO: 147837 - DNA, 17 bp, synthetic construct
  source 1..17: mol_type = other DNA
taagcctgcccctgctc

SEQ ID NO: 147838 - DNA, 17 bp, synthetic construct
  source 1..17: mol_type = other DNA
ctaagcctgcccctgct

SEQ ID NO: 147839 - DNA, 17 bp, synthetic construct
  source 1..17: mol_type = other DNA
gctaagcctgcccctgc

SEQ ID NO: 147840 - DNA, 17 bp, synthetic construct
  source 1..17: mol_type = other DNA
cgctaagcctgcccctg

SEQ ID NO: 147841 - DNA, 17 bp, synthetic construct
  source 1..17: mol_type = other DNA
acgctaagcctgcccct

SEQ ID NO: 147842 - DNA, 17 bp, synthetic construct
  source 1..17: mol_type = other DNA
cacgctaagcctgcccc

SEQ ID NO: 147843 - DNA, 17 bp, synthetic construct
  source 1..17: mol_type = other DNA
ccacgctaagcctgccc

SEQ ID NO: 147844 - DNA, 17 bp, synthetic construct
  source 1..17: mol_type = other DNA
tccacgctaagcctgcc

SEQ ID NO: 147845 - DNA, 17 bp, synthetic construct
  source 1..17: mol_type = other DNA
gtccacgctaagcctgc

SEQ ID NO: 147846 - DNA, 17 bp, synthetic construct
  source 1..17: mol_type = other DNA
ggtccacgctaagcctg

SEQ ID NO: 147847 - DNA, 17 bp, synthetic construct
  source 1..17: mol_type = other DNA
gggtccacgctaagcct

SEQ ID NO: 147848 - DNA, 17 bp, synthetic construct
  source 1..17: mol_type = other DNA
ggggtccacgctaagcc

SEQ ID NO: 147849 - DNA, 17 bp, synthetic construct
  source 1..17: mol_type = other DNA
aggggtccacgctaagc

SEQ ID NO: 147850 - DNA, 17 bp, synthetic construct
  source 1..17: mol_type = other DNA
caggggtccacgctaag

SEQ ID NO: 147851 - DNA, 17 bp, synthetic construct
  source 1..17: mol_type = other DNA
acaggggtccacgctaa

SEQ ID NO: 147852 - DNA, 17 bp, synthetic construct
  source 1..17: mol_type = other DNA
gacaggggtccacgcta

SEQ ID NO: 147853 - DNA, 17 bp, synthetic construct
  source 1..17: mol_type = other DNA
ggacaggggtccacgct

SEQ ID NO: 147854 - DNA, 17 bp, synthetic construct
  source 1..17: mol_type = other DNA
tggacaggggtccacgc

SEQ ID NO: 147855 - DNA, 17 bp, synthetic construct
  source 1..17: mol_type = other DNA
ctggacaggggtccacg

SEQ ID NO: 147856 - DNA, 17 bp, synthetic construct
  source 1..17: mol_type = other DNA
cctggacaggggtccac

SEQ ID NO: 147857 - DNA, 17 bp, synthetic construct
  source 1..17: mol_type = other DNA
tcctggacaggggtcca

SEQ ID NO: 147858 - DNA, 17 bp, synthetic construct
  source 1..17: mol_type = other DNA
gtcctggacaggggtcc

SEQ ID NO: 147859 - DNA, 17 bp, synthetic construct
  source 1..17: mol_type = other DNA
ggtcctggacaggggtc

SEQ ID NO: 147860 - DNA, 17 bp, synthetic construct
  source 1..17: mol_type = other DNA
cggtcctggacaggggt

SEQ ID NO: 147861 - DNA, 17 bp, synthetic construct
  source 1..17: mol_type = other DNA
ccggtcctggacagggg

SEQ ID NO: 147862 - DNA, 17 bp, synthetic construct
  source 1..17: mol_type = other DNA
gccggtcctggacaggg

SEQ ID NO: 147863 - DNA, 17 bp, synthetic construct
  source 1..17: mol_type = other DNA
agccggtcctggacagg

SEQ ID NO: 147864 - DNA, 17 bp, synthetic construct
  source 1..17: mol_type = other DNA
gagccggtcctggacag

SEQ ID NO: 147865 - DNA, 17 bp, synthetic construct
  source 1..17: mol_type = other DNA
agagccggtcctggaca

SEQ ID NO: 147866 - DNA, 17 bp, synthetic construct
  source 1..17: mol_type = other DNA
tagagccggtcctggac

SEQ ID NO: 147867 - DNA, 17 bp, synthetic construct
  source 1..17: mol_type = other DNA
gtagagccggtcctgga

SEQ ID NO: 147868 - DNA, 17 bp, synthetic construct
  source 1..17: mol_type = other DNA
ggtagagccggtcctgg

SEQ ID NO: 147869 - DNA, 17 bp, synthetic construct
  source 1..17: mol_type = other DNA
gggtagagccggtcctg

SEQ ID NO: 147870 - DNA, 17 bp, synthetic construct
  source 1..17: mol_type = other DNA
agggtagagccggtcct

SEQ ID NO: 147871 - DNA, 17 bp, synthetic construct
  source 1..17: mol_type = other DNA
aagggtagagccggtcc

SEQ ID NO: 147872 - DNA, 17 bp, synthetic construct
  source 1..17: mol_type = other DNA
gaagggtagagccggtc

SEQ ID NO: 147873 - DNA, 17 bp, synthetic construct
  source 1..17: mol_type = other DNA
tgaagggtagagccggt

SEQ ID NO: 147874 - DNA, 17 bp, synthetic construct
  source 1..17: mol_type = other DNA
gtgaagggtagagccgg

SEQ ID NO: 147875 - DNA, 17 bp, synthetic construct
  source 1..17: mol_type = other DNA
cgtgaagggtagagccg

SEQ ID NO: 147876 - DNA, 17 bp, synthetic construct
  source 1..17: mol_type = other DNA
tcgtgaagggtagagcc

SEQ ID NO: 147877 - DNA, 17 bp, synthetic construct
  source 1..17: mol_type = other DNA
gtcgtgaagggtagagc

SEQ ID NO: 147878 - DNA, 17 bp, synthetic construct
  source 1..17: mol_type = other DNA
ggtcgtgaagggtagag

SEQ ID NO: 147879 - DNA, 17 bp, synthetic construct
  source 1..17: mol_type = other DNA
aggtcgtgaagggtaga

SEQ ID NO: 147880 - DNA, 17 bp, synthetic construct
  source 1..17: mol_type = other DNA
gaggtcgtgaagggtag

SEQ ID NO: 147881 - DNA, 17 bp, synthetic construct
  source 1..17: mol_type = other DNA
ggaggtcgtgaagggta

SEQ ID NO: 147882 - DNA, 17 bp, synthetic construct
  source 1..17: mol_type = other DNA
gggaggtcgtgaagggt

SEQ ID NO: 147883 - DNA, 17 bp, synthetic construct
  source 1..17: mol_type = other DNA
agggaggtcgtgaaggg

SEQ ID NO: 147884 - DNA, 17 bp, synthetic construct
  source 1..17: mol_type = other DNA
cagggaggtcgtgaagg

SEQ ID NO: 147885 - DNA, 17 bp, synthetic construct
  source 1..17: mol_type = other DNA
ccagggaggtcgtgaag

SEQ ID NO: 147886 - DNA, 17 bp, synthetic construct
  source 1..17: mol_type = other DNA
cccagggaggtcgtgaa

SEQ ID NO: 147887 - DNA, 17 bp, synthetic construct
  source 1..17: mol_type = other DNA
ccccagggaggtcgtga

SEQ ID NO: 147888 - DNA, 17 bp, synthetic construct
  source 1..17: mol_type = other DNA
tccccagggaggtcgtg

SEQ ID NO: 147889 - DNA, 17 bp, synthetic construct
  source 1..17: mol_type = other DNA
atccccagggaggtcgt

SEQ ID NO: 147890 - DNA, 17 bp, synthetic construct
  source 1..17: mol_type = other DNA
gatccccagggaggtcg

SEQ ID NO: 147891 - DNA, 17 bp, synthetic construct
  source 1..17: mol_type = other DNA
tgatccccagggaggtc

SEQ ID NO: 147892 - DNA, 17 bp, synthetic construct
  source 1..17: mol_type = other DNA
gtgatccccagggaggt

SEQ ID NO: 147893 - DNA, 17 bp, synthetic construct
  source 1..17: mol_type = other DNA
tgtgatccccagggagg

SEQ ID NO: 147894 - DNA, 17 bp, synthetic construct
  source 1..17: mol_type = other DNA
ctgtgatccccagggag

SEQ ID NO: 147895 - DNA, 17 bp, synthetic construct
  source 1..17: mol_type = other DNA
gctgtgatccccaggga

SEQ ID NO: 147896 - DNA, 17 bp, synthetic construct
  source 1..17: mol_type = other DNA
agctgtgatccccaggg

SEQ ID NO: 147897 - DNA, 17 bp, synthetic construct
  source 1..17: mol_type = other DNA
cagctgtgatccccagg

SEQ ID NO: 147898 - DNA, 17 bp, synthetic construct
  source 1..17: mol_type = other DNA
ccagctgtgatccccag

SEQ ID NO: 147899 - DNA, 17 bp, synthetic construct
  source 1..17: mol_type = other DNA
gccagctgtgatcccca

SEQ ID NO: 147900 - DNA, 17 bp, synthetic construct
  source 1..17: mol_type = other DNA
tgccagctgtgatcccc

SEQ ID NO: 147901 - DNA, 17 bp, synthetic construct
  source 1..17: mol_type = other DNA
ctgccagctgtgatccc

SEQ ID NO: 147902 - DNA, 17 bp, synthetic construct
  source 1..17: mol_type = other DNA
cctgccagctgtgatcc

SEQ ID NO: 147903 - DNA, 17 bp, synthetic construct
  source 1..17: mol_type = other DNA
ccctgccagctgtgatc

SEQ ID NO: 147904 - DNA, 17 bp, synthetic construct
  source 1..17: mol_type = other DNA
gccctgccagctgtgat

SEQ ID NO: 147905 - DNA, 17 bp, synthetic construct
  source 1..17: mol_type = other DNA
tgccctgccagctgtga

SEQ ID NO: 147906 - DNA, 17 bp, synthetic construct
  source 1..17: mol_type = other DNA
ctgccctgccagctgtg

SEQ ID NO: 147907 - DNA, 17 bp, synthetic construct
  source 1..17: mol_type = other DNA
cctgccctgccagctgt

SEQ ID NO: 147908 - DNA, 17 bp, synthetic construct
  source 1..17: mol_type = other DNA
acctgccctgccagctg

SEQ ID NO: 147909 - DNA, 17 bp, synthetic construct
  source 1..17: mol_type = other DNA
cacctgccctgccagct

SEQ ID NO: 147910 - DNA, 17 bp, synthetic construct
  source 1..17: mol_type = other DNA
tcacctgccctgccagc

SEQ ID NO: 147911 - DNA, 17 bp, synthetic construct
  source 1..17: mol_type = other DNA
ctcacctgccctgccag

SEQ ID NO: 147912 - DNA, 17 bp, synthetic construct
  source 1..17: mol_type = other DNA
cctcacctgccctgcca

SEQ ID NO: 147913 - DNA, 17 bp, synthetic construct
  source 1..17: mol_type = other DNA
ccctcacctgccctgcc

SEQ ID NO: 147914 - DNA, 17 bp, synthetic construct
  source 1..17: mol_type = other DNA
accctcacctgccctgc

SEQ ID NO: 147915 - DNA, 17 bp, synthetic construct
  source 1..17: mol_type = other DNA
taccctcacctgccctg

SEQ ID NO: 147916 - DNA, 17 bp, synthetic construct
  source 1..17: mol_type = other DNA
gtaccctcacctgccct

SEQ ID NO: 147917 - DNA, 17 bp, synthetic construct
  source 1..17: mol_type = other DNA
ggtaccctcacctgccc

SEQ ID NO: 147918 - DNA, 17 bp, synthetic construct
  source 1..17: mol_type = other DNA
tggtaccctcacctgcc

SEQ ID NO: 147919 - DNA, 17 bp, synthetic construct
  source 1..17: mol_type = other DNA
gtggtaccctcacctgc

SEQ ID NO: 147920 - DNA, 17 bp, synthetic construct
  source 1..17: mol_type = other DNA
ggtggtaccctcacctg

SEQ ID NO: 147921 - DNA, 17 bp, synthetic construct
  source 1..17: mol_type = other DNA
gggtggtaccctcacct

SEQ ID NO: 147922 - DNA, 17 bp, synthetic construct
  source 1..17: mol_type = other DNA
agggtggtaccctcacc

SEQ ID NO: 147923 - DNA, 17 bp, synthetic construct
  source 1..17: mol_type = other DNA
gagggtggtaccctcac

SEQ ID NO: 147924 - DNA, 17 bp, synthetic construct
  source 1..17: mol_type = other DNA
tgagggtggtaccctca

SEQ ID NO: 147925 - DNA, 17 bp, synthetic construct
  source 1..17: mol_type = other DNA
ttgagggtggtaccctc

SEQ ID NO: 147926 - DNA, 17 bp, synthetic construct
  source 1..17: mol_type = other DNA
cttgagggtggtaccct

SEQ ID NO: 147927 - DNA, 17 bp, synthetic construct
  source 1..17: mol_type = other DNA
ccttgagggtggtaccc

SEQ ID NO: 147928 - DNA, 17 bp, synthetic construct
  source 1..17: mol_type = other DNA
cccttgagggtggtacc

SEQ ID NO: 147929 - DNA, 17 bp, synthetic construct
  source 1..17: mol_type = other DNA
acccttgagggtggtac

SEQ ID NO: 147930 - DNA, 17 bp, synthetic construct
  source 1..17: mol_type = other DNA
aacccttgagggtggta

SEQ ID NO: 147931 - DNA, 17 bp, synthetic construct
  source 1..17: mol_type = other DNA
caacccttgagggtggt

SEQ ID NO: 147932 - DNA, 17 bp, synthetic construct
  source 1..17: mol_type = other DNA
gcaacccttgagggtgg

SEQ ID NO: 147933 - DNA, 17 bp, synthetic construct
  source 1..17: mol_type = other DNA
tgcaacccttgagggtg

SEQ ID NO: 147934 - DNA, 17 bp, synthetic construct
  source 1..17: mol_type = other DNA
gtgcaacccttgagggt

SEQ ID NO: 147935 - DNA, 17 bp, synthetic construct
  source 1..17: mol_type = other DNA
tgtgcaacccttgaggg

SEQ ID NO: 147936 - DNA, 17 bp, synthetic construct
  source 1..17: mol_type = other DNA
ctgtgcaacccttgagg

SEQ ID NO: 147937 - DNA, 17 bp, synthetic construct
  source 1..17: mol_type = other DNA
gctgtgcaacccttgag

SEQ ID NO: 147938 - DNA, 17 bp, synthetic construct
  source 1..17: mol_type = other DNA
ggctgtgcaacccttga

SEQ ID NO: 147939 - DNA, 17 bp, synthetic construct
  source 1..17: mol_type = other DNA
tggctgtgcaacccttg

SEQ ID NO: 147940 - DNA, 17 bp, synthetic construct
  source 1..17: mol_type = other DNA
ctggctgtgcaaccctt

SEQ ID NO: 147941 - DNA, 17 bp, synthetic construct
  source 1..17: mol_type = other DNA
gctggctgtgcaaccct

SEQ ID NO: 147942 - DNA, 17 bp, synthetic construct
  source 1..17: mol_type = other DNA
ggctggctgtgcaaccc

SEQ ID NO: 147943 - DNA, 17 bp, synthetic construct
  source 1..17: mol_type = other DNA
cggctggctgtgcaacc

SEQ ID NO: 147944 - DNA, 17 bp, synthetic construct
  source 1..17: mol_type = other DNA
gcggctggctgtgcaac

SEQ ID NO: 147945 - DNA, 17 bp, synthetic construct
  source 1..17: mol_type = other DNA
tgcggctggctgtgcaa

SEQ ID NO: 147946 - DNA, 17 bp, synthetic construct
  source 1..17: mol_type = other DNA
ttgcggctggctgtgca

SEQ ID NO: 147947 - DNA, 17 bp, synthetic construct
  source 1..17: mol_type = other DNA
cttgcggctggctgtgc

SEQ ID NO: 147948 - DNA, 17 bp, synthetic construct
  source 1..17: mol_type = other DNA
tcttgcggctggctgtg

SEQ ID NO: 147949 - DNA, 17 bp, synthetic construct
  source 1..17: mol_type = other DNA
ctcttgcggctggctgt

SEQ ID NO: 147950 - DNA, 17 bp, synthetic construct
  source 1..17: mol_type = other DNA
gctcttgcggctggctg

SEQ ID NO: 147951 - DNA, 17 bp, synthetic construct
  source 1..17: mol_type = other DNA
ggctcttgcggctggct

SEQ ID NO: 147952 - DNA, 17 bp, synthetic construct
  source 1..17: mol_type = other DNA
gggctcttgcggctggc

SEQ ID NO: 147953 - DNA, 17 bp, synthetic construct
  source 1..17: mol_type = other DNA
ggggctcttgcggctgg

SEQ ID NO: 147954 - DNA, 17 bp, synthetic construct
  source 1..17: mol_type = other DNA
cggggctcttgcggctg

SEQ ID NO: 147955 - DNA, 17 bp, synthetic construct
  source 1..17: mol_type = other DNA
ccggggctcttgcggct

SEQ ID NO: 147956 - DNA, 17 bp, synthetic construct
  source 1..17: mol_type = other DNA
gccggggctcttgcggc

SEQ ID NO: 147957 - DNA, 17 bp, synthetic construct
  source 1..17: mol_type = other DNA
ggccggggctcttgcgg

SEQ ID NO: 147958 - DNA, 17 bp, synthetic construct
  source 1..17: mol_type = other DNA
aggccggggctcttgcg

SEQ ID NO: 147959 - DNA, 17 bp, synthetic construct
  source 1..17: mol_type = other DNA
gaggccggggctcttgc

SEQ ID NO: 147960 - DNA, 17 bp, synthetic construct
  source 1..17: mol_type = other DNA
tgaggccggggctcttg

SEQ ID NO: 147961 - DNA, 17 bp, synthetic construct
  source 1..17: mol_type = other DNA
ttgaggccggggctctt

SEQ ID NO: 147962 - DNA, 17 bp, synthetic construct
  source 1..17: mol_type = other DNA
gttgaggccggggctct

SEQ ID NO: 147963 - DNA, 17 bp, synthetic construct
  source 1..17: mol_type = other DNA
ggttgaggccggggctc

SEQ ID NO: 147964 - DNA, 17 bp, synthetic construct
  source 1..17: mol_type = other DNA
gggttgaggccggggct

SEQ ID NO: 147965 - DNA, 17 bp, synthetic construct
  source 1..17: mol_type = other DNA
tgggttgaggccggggc

SEQ ID NO: 147966 - DNA, 17 bp, synthetic construct
  source 1..17: mol_type = other DNA
gtgggttgaggccgggg

SEQ ID NO: 147967 - DNA, 17 bp, synthetic construct
  source 1..17: mol_type = other DNA
cgtgggttgaggccggg

SEQ ID NO: 147968 - DNA, 17 bp, synthetic construct
  source 1..17: mol_type = other DNA
gcgtgggttgaggccgg

SEQ ID NO: 147969 - DNA, 17 bp, synthetic construct
  source 1..17: mol_type = other DNA
agcgtgggttgaggccg

SEQ ID NO: 147970 - DNA, 17 bp, synthetic construct
  source 1..17: mol_type = other DNA
gagcgtgggttgaggcc

SEQ ID NO: 147971 - DNA, 17 bp, synthetic construct
  source 1..17: mol_type = other DNA
cgagcgtgggttgaggc

SEQ ID NO: 147972 - DNA, 17 bp, synthetic construct
  source 1..17: mol_type = other DNA
tcgagcgtgggttgagg

SEQ ID NO: 147973 - DNA, 17 bp, synthetic construct
  source 1..17: mol_type = other DNA
gtcgagcgtgggttgag

SEQ ID NO: 147974 - DNA, 17 bp, synthetic construct
  source 1..17: mol_type = other DNA
agtcgagcgtgggttga

SEQ ID NO: 147975 - DNA, 17 bp, synthetic construct
  source 1..17: mol_type = other DNA
gagtcgagcgtgggttg

SEQ ID NO: 147976 - DNA, 17 bp, synthetic construct
  source 1..17: mol_type = other DNA
ggagtcgagcgtgggtt

SEQ ID NO: 147977 - DNA, 17 bp, synthetic construct
  source 1..17: mol_type = other DNA
gggagtcgagcgtgggt

SEQ ID NO: 147978 - DNA, 17 bp, synthetic construct
  source 1..17: mol_type = other DNA
tgggagtcgagcgtggg

SEQ ID NO: 147979 - DNA, 17 bp, synthetic construct
  source 1..17: mol_type = other DNA
gtgggagtcgagcgtgg

SEQ ID NO: 147980 - DNA, 17 bp, synthetic construct
  source 1..17: mol_type = other DNA
cgtgggagtcgagcgtg

SEQ ID NO: 147981 - DNA, 17 bp, synthetic construct
  source 1..17: mol_type = other DNA
ccgtgggagtcgagcgt

SEQ ID NO: 147982 - DNA, 17 bp, synthetic construct
  source 1..17: mol_type = other DNA
gccgtgggagtcgagcg

SEQ ID NO: 147983 - DNA, 17 bp, synthetic construct
  source 1..17: mol_type = other DNA
ggccgtgggagtcgagc

SEQ ID NO: 147984 - DNA, 17 bp, synthetic construct
  source 1..17: mol_type = other DNA
gggccgtgggagtcgag

SEQ ID NO: 147985 - DNA, 17 bp, synthetic construct
  source 1..17: mol_type = other DNA
tgggccgtgggagtcga

SEQ ID NO: 147986 - DNA, 17 bp, synthetic construct
  source 1..17: mol_type = other DNA
atgggccgtgggagtcg

SEQ ID NO: 147987 - DNA, 17 bp, synthetic construct
  source 1..17: mol_type = other DNA
gatgggccgtgggagtc

SEQ ID NO: 147988 - DNA, 17 bp, synthetic construct
  source 1..17: mol_type = other DNA
agatgggccgtgggagt

SEQ ID NO: 147989 - DNA, 17 bp, synthetic construct
  source 1..17: mol_type = other DNA
cagatgggccgtgggag

SEQ ID NO: 147990 - DNA, 17 bp, synthetic construct
  source 1..17: mol_type = other DNA
acagatgggccgtggga

SEQ ID NO: 147991 - DNA, 17 bp, synthetic construct
  source 1..17: mol_type = other DNA
cacagatgggccgtggg

SEQ ID NO: 147992 - DNA, 17 bp, synthetic construct
  source 1..17: mol_type = other DNA
ccacagatgggccgtgg

SEQ ID NO: 147993 - DNA, 17 bp, synthetic construct
  source 1..17: mol_type = other DNA
cccacagatgggccgtg

SEQ ID NO: 147994 - DNA, 17 bp, synthetic construct
  source 1..17: mol_type = other DNA
gcccacagatgggccgt

SEQ ID NO: 147995 - DNA, 17 bp, synthetic construct
  source 1..17: mol_type = other DNA
tgcccacagatgggccg

SEQ ID NO: 147996 - DNA, 17 bp, synthetic construct
  source 1..17: mol_type = other DNA
atgcccacagatgggcc

SEQ ID NO: 147997 - DNA, 17 bp, synthetic construct
  source 1..17: mol_type = other DNA
gatgcccacagatgggc

SEQ ID NO: 147998 - DNA, 17 bp, synthetic construct
  source 1..17: mol_type = other DNA
agatgcccacagatggg

SEQ ID NO: 147999 - DNA, 17 bp, synthetic construct
  source 1..17: mol_type = other DNA
gagatgcccacagatgg

SEQ ID NO: 148000 - DNA, 17 bp, synthetic construct
  source 1..17: mol_type = other DNA
tgagatgcccacagatg

SEQ ID NO: 148001 - DNA, 17 bp, synthetic construct
  source 1..17: mol_type = other DNA
atgagatgcccacagat

SEQ ID NO: 148002 - DNA, 17 bp, synthetic construct
  source 1..17: mol_type = other DNA
catgagatgcccacaga

SEQ ID NO: 148003 - DNA, 17 bp, synthetic construct
  source 1..17: mol_type = other DNA
gcatgagatgcccacag

SEQ ID NO: 148004 - DNA, 17 bp, synthetic construct
  source 1..17: mol_type = other DNA
ggcatgagatgcccaca

SEQ ID NO: 148005 - DNA, 17 bp, synthetic construct
  source 1..17: mol_type = other DNA
cggcatgagatgcccac

SEQ ID NO: 148006 - DNA, 17 bp, synthetic construct
  source 1..17: mol_type = other DNA
gcggcatgagatgccca

SEQ ID NO: 148007 - DNA, 17 bp, synthetic construct
  source 1..17: mol_type = other DNA
tgcggcatgagatgccc

SEQ ID NO: 148008 - DNA, 17 bp, synthetic construct
  source 1..17: mol_type = other DNA
gtgcggcatgagatgcc

SEQ ID NO: 148009 - DNA, 17 bp, synthetic construct
  source 1..17: mol_type = other DNA
cgtgcggcatgagatgc

SEQ ID NO: 148010 - DNA, 17 bp, synthetic construct
  source 1..17: mol_type = other DNA
ccgtgcggcatgagatg

SEQ ID NO: 148011 - DNA, 17 bp, synthetic construct
  source 1..17: mol_type = other DNA
cccgtgcggcatgagat

SEQ ID NO: 148012 - DNA, 17 bp, synthetic construct
  source 1..17: mol_type = other DNA
gcccgtgcggcatgaga

SEQ ID NO: 148013 - DNA, 17 bp, synthetic construct
  source 1..17: mol_type = other DNA
agcccgtgcggcatgag

SEQ ID NO: 148014 - DNA, 17 bp, synthetic construct
  source 1..17: mol_type = other DNA
cagcccgtgcggcatga

SEQ ID NO: 148015 - DNA, 17 bp, synthetic construct
  source 1..17: mol_type = other DNA
gcagcccgtgcggcatg

SEQ ID NO: 148016 - DNA, 17 bp, synthetic construct
  source 1..17: mol_type = other DNA
ggcagcccgtgcggcat

SEQ ID NO: 148017 - DNA, 17 bp, synthetic construct
  source 1..17: mol_type = other DNA
aggcagcccgtgcggca

SEQ ID NO: 148018 - DNA, 17 bp, synthetic construct
  source 1..17: mol_type = other DNA
caggcagcccgtgcggc

SEQ ID NO: 148019 - DNA, 17 bp, synthetic construct
  source 1..17: mol_type = other DNA
ccaggcagcccgtgcgg

SEQ ID NO: 148020 - DNA, 17 bp, synthetic construct
  source 1..17: mol_type = other DNA
gccaggcagcccgtgcg

SEQ ID NO: 148021 - DNA, 17 bp, synthetic construct
  source 1..17: mol_type = other DNA
agccaggcagcccgtgc

SEQ ID NO: 148022 - DNA, 17 bp, synthetic construct
  source 1..17: mol_type = other DNA
gagccaggcagcccgtg

SEQ ID NO: 148023 - DNA, 17 bp, synthetic construct
  source 1..17: mol_type = other DNA
agagccaggcagcccgt

SEQ ID NO: 148024 - DNA, 17 bp, synthetic construct
  source 1..17: mol_type = other DNA
gagagccaggcagcccg

SEQ ID NO: 148025 - DNA, 17 bp, synthetic construct
  source 1..17: mol_type = other DNA
tgagagccaggcagccc

SEQ ID NO: 148026 - DNA, 17 bp, synthetic construct
  source 1..17: mol_type = other DNA
ctgagagccaggcagcc

SEQ ID NO: 148027 - DNA, 17 bp, synthetic construct
  source 1..17: mol_type = other DNA
gctgagagccaggcagc

SEQ ID NO: 148028 - DNA, 17 bp, synthetic construct
  source 1..17: mol_type = other DNA
ggctgagagccaggcag

SEQ ID NO: 148029 - DNA, 17 bp, synthetic construct
  source 1..17: mol_type = other DNA
cggctgagagccaggca

SEQ ID NO: 148030 - DNA, 17 bp, synthetic construct
  source 1..17: mol_type = other DNA
tcggctgagagccaggc

SEQ ID NO: 148031 - DNA, 17 bp, synthetic construct
  source 1..17: mol_type = other DNA
ctcggctgagagccagg

SEQ ID NO: 148032 - DNA, 17 bp, synthetic construct
  source 1..17: mol_type = other DNA
gctcggctgagagccag

SEQ ID NO: 148033 - DNA, 17 bp, synthetic construct
  source 1..17: mol_type = other DNA
cgctcggctgagagcca

SEQ ID NO: 148034 - DNA, 17 bp, synthetic construct
  source 1..17: mol_type = other DNA
acgctcggctgagagcc

SEQ ID NO: 148035 - DNA, 17 bp, synthetic construct
  source 1..17: mol_type = other DNA
aacgctcggctgagagc

SEQ ID NO: 148036 - DNA, 17 bp, synthetic construct
  source 1..17: mol_type = other DNA
aaacgctcggctgagag

SEQ ID NO: 148037 - DNA, 17 bp, synthetic construct
  source 1..17: mol_type = other DNA
aaaacgctcggctgaga

SEQ ID NO: 148038 - DNA, 17 bp, synthetic construct
  source 1..17: mol_type = other DNA
gaaaacgctcggctgag

SEQ ID NO: 148039 - DNA, 17 bp, synthetic construct
  source 1..17: mol_type = other DNA
ggaaaacgctcggctga

SEQ ID NO: 148040 - DNA, 17 bp, synthetic construct
  source 1..17: mol_type = other DNA
gggaaaacgctcggctg

SEQ ID NO: 148041 - DNA, 17 bp, synthetic construct
  source 1..17: mol_type = other DNA
agggaaaacgctcggct

SEQ ID NO: 148042 - DNA, 17 bp, synthetic construct
  source 1..17: mol_type = other DNA
gagggaaaacgctcggc

SEQ ID NO: 148043 - DNA, 17 bp, synthetic construct
  source 1..17: mol_type = other DNA
cgagggaaaacgctcgg

SEQ ID NO: 148044 - DNA, 17 bp, synthetic construct
  source 1..17: mol_type = other DNA
acgagggaaaacgctcg

SEQ ID NO: 148045 - DNA, 17 bp, synthetic construct
  source 1..17: mol_type = other DNA
gacgagggaaaacgctc

SEQ ID NO: 148046 - DNA, 17 bp, synthetic construct
  source 1..17: mol_type = other DNA
agacgagggaaaacgct

SEQ ID NO: 148047 - DNA, 17 bp, synthetic construct
  source 1..17: mol_type = other DNA
cagacgagggaaaacgc

SEQ ID NO: 148048 - DNA, 17 bp, synthetic construct
  source 1..17: mol_type = other DNA
gcagacgagggaaaacg

SEQ ID NO: 148049 - DNA, 17 bp, synthetic construct
  source 1..17: mol_type = other DNA
agcagacgagggaaaac

SEQ ID NO: 148050 - DNA, 17 bp, synthetic construct
  source 1..17: mol_type = other DNA
cagcagacgagggaaaa

SEQ ID NO: 148051 - DNA, 17 bp, synthetic construct
  source 1..17: mol_type = other DNA
acagcagacgagggaaa

SEQ ID NO: 148052 - DNA, 17 bp, synthetic construct
  source 1..17: mol_type = other DNA
gacagcagacgagggaa

SEQ ID NO: 148053 - DNA, 17 bp, synthetic construct
  source 1..17: mol_type = other DNA
agacagcagacgaggga

SEQ ID NO: 148054 - DNA, 17 bp, synthetic construct
  source 1..17: mol_type = other DNA
gagacagcagacgaggg

SEQ ID NO: 148055 - DNA, 17 bp, synthetic construct
  source 1..17: mol_type = other DNA
agagacagcagacgagg

SEQ ID NO: 148056 - DNA, 17 bp, synthetic construct
  source 1..17: mol_type = other DNA
aagagacagcagacgag

SEQ ID NO: 148057 - DNA, 17 bp, synthetic construct
  source 1..17: mol_type = other DNA
caagagacagcagacga

SEQ ID NO: 148058 - DNA, 17 bp, synthetic construct
  source 1..17: mol_type = other DNA
ccaagagacagcagacg

SEQ ID NO: 148059 - DNA, 17 bp, synthetic construct
  source 1..17: mol_type = other DNA
gccaagagacagcagac

SEQ ID NO: 148060 - DNA, 17 bp, synthetic construct
  source 1..17: mol_type = other DNA
ggccaagagacagcaga

SEQ ID NO: 148061 - DNA, 17 bp, synthetic construct
  source 1..17: mol_type = other DNA
tggccaagagacagcag

SEQ ID NO: 148062 - DNA, 17 bp, synthetic construct
  source 1..17: mol_type = other DNA
ctggccaagagacagca

SEQ ID NO: 148063 - DNA, 17 bp, synthetic construct
  source 1..17: mol_type = other DNA
tctggccaagagacagc

SEQ ID NO: 148064 - DNA, 17 bp, synthetic construct
  source 1..17: mol_type = other DNA
ctctggccaagagacag

SEQ ID NO: 148065 - DNA, 17 bp, synthetic construct
  source 1..17: mol_type = other DNA
gctctggccaagagaca

SEQ ID NO: 148066 - DNA, 17 bp, synthetic construct
  source 1..17: mol_type = other DNA
ggctctggccaagagac

SEQ ID NO: 148067 - DNA, 17 bp, synthetic construct
  source 1..17: mol_type = other DNA
cggctctggccaagaga

SEQ ID NO: 148068 - DNA, 17 bp, synthetic construct
  source 1..17: mol_type = other DNA
gcggctctggccaagag

SEQ ID NO: 148069 - DNA, 17 bp, synthetic construct
  source 1..17: mol_type = other DNA
tgcggctctggccaaga

SEQ ID NO: 148070 - DNA, 17 bp, synthetic construct
  source 1..17: mol_type = other DNA
ctgcggctctggccaag

SEQ ID NO: 148071 - DNA, 17 bp, synthetic construct
  source 1..17: mol_type = other DNA
gctgcggctctggccaa

SEQ ID NO: 148072 - DNA, 17 bp, synthetic construct
  source 1..17: mol_type = other DNA
tgctgcggctctggcca

SEQ ID NO: 148073 - DNA, 17 bp, synthetic construct
  source 1..17: mol_type = other DNA
atgctgcggctctggcc

SEQ ID NO: 148074 - DNA, 17 bp, synthetic construct
  source 1..17: mol_type = other DNA
aatgctgcggctctggc

SEQ ID NO: 148075 - DNA, 17 bp, synthetic construct
  source 1..17: mol_type = other DNA
taatgctgcggctctgg

SEQ ID NO: 148076 - DNA, 17 bp, synthetic construct
  source 1..17: mol_type = other DNA
ttaatgctgcggctctg

SEQ ID NO: 148077 - DNA, 17 bp, synthetic construct
  source 1..17: mol_type = other DNA
attaatgctgcggctct

SEQ ID NO: 148078 - DNA, 17 bp, synthetic construct
  source 1..17: mol_type = other DNA
tattaatgctgcggctc

SEQ ID NO: 148079 - DNA, 17 bp, synthetic construct
  source 1..17: mol_type = other DNA
gtattaatgctgcggct

SEQ ID NO: 148080 - DNA, 17 bp, synthetic construct
  source 1..17: mol_type = other DNA
agtattaatgctgcggc

SEQ ID NO: 148081 - DNA, 17 bp, synthetic construct
  source 1..17: mol_type = other DNA
aagtattaatgctgcgg

SEQ ID NO: 148082 - DNA, 17 bp, synthetic construct
  source 1..17: mol_type = other DNA
taagtattaatgctgcg

SEQ ID NO: 148083 - DNA, 17 bp, synthetic construct
  source 1..17: mol_type = other DNA
gtaagtattaatgctgc

SEQ ID NO: 148084 - DNA, 17 bp, synthetic construct
  source 1..17: mol_type = other DNA
agtaagtattaatgctg

SEQ ID NO: 148085 - DNA, 17 bp, synthetic construct
  source 1..17: mol_type = other DNA
cagtaagtattaatgct

SEQ ID NO: 148086 - DNA, 17 bp, synthetic construct
  source 1..17: mol_type = other DNA
acagtaagtattaatgc

SEQ ID NO: 148087 - DNA, 17 bp, synthetic construct
  source 1..17: mol_type = other DNA
gacagtaagtattaatg

SEQ ID NO: 148088 - DNA, 17 bp, synthetic construct
  source 1..17: mol_type = other DNA
tgacagtaagtattaat

SEQ ID NO: 148089 - DNA, 17 bp, synthetic construct
  source 1..17: mol_type = other DNA
ttgacagtaagtattaa

SEQ ID NO: 148090 - DNA, 17 bp, synthetic construct
  source 1..17: mol_type = other DNA
attgacagtaagtatta

SEQ ID NO: 148091 - DNA, 17 bp, synthetic construct
  source 1..17: mol_type = other DNA
tattgacagtaagtatt

SEQ ID NO: 148092 - DNA, 17 bp, synthetic construct
  source 1..17: mol_type = other DNA
ctattgacagtaagtat

SEQ ID NO: 148093 - DNA, 17 bp, synthetic construct
  source 1..17: mol_type = other DNA
tctattgacagtaagta

SEQ ID NO: 148094 - DNA, 17 bp, synthetic construct
  source 1..17: mol_type = other DNA
ctctattgacagtaagt

SEQ ID NO: 148095 - DNA, 17 bp, synthetic construct
  source 1..17: mol_type = other DNA
tctctattgacagtaag

SEQ ID NO: 148096 - DNA, 17 bp, synthetic construct
  source 1..17: mol_type = other DNA
ttctctattgacagtaa

SEQ ID NO: 148097 - DNA, 17 bp, synthetic construct
  source 1..17: mol_type = other DNA
tttctctattgacagta

SEQ ID NO: 148098 - DNA, 17 bp, synthetic construct
  source 1..17: mol_type = other DNA
ctttctctattgacagt

SEQ ID NO: 148099 - DNA, 17 bp, synthetic construct
  source 1..17: mol_type = other DNA
tctttctctattgacag

SEQ ID NO: 148100 - DNA, 17 bp, synthetic construct
  source 1..17: mol_type = other DNA
atctttctctattgaca

SEQ ID NO: 148101 - DNA, 17 bp, synthetic construct
  source 1..17: mol_type = other DNA
catctttctctattgac

SEQ ID NO: 148102 - DNA, 17 bp, synthetic construct
  source 1..17: mol_type = other DNA
gcatctttctctattga

SEQ ID NO: 148103 - DNA, 17 bp, synthetic construct
  source 1..17: mol_type = other DNA
tgcatctttctctattg

SEQ ID NO: 148104 - DNA, 17 bp, synthetic construct
  source 1..17: mol_type = other DNA
ctgcatctttctctatt

SEQ ID NO: 148105 - DNA, 17 bp, synthetic construct
  source 1..17: mol_type = other DNA
gctgcatctttctctat

SEQ ID NO: 148106 - DNA, 17 bp, synthetic construct
  source 1..17: mol_type = other DNA
ggctgcatctttctcta

SEQ ID NO: 148107 - DNA, 17 bp, synthetic construct
  source 1..17: mol_type = other DNA
gggctgcatctttctct

SEQ ID NO: 148108 - DNA, 17 bp, synthetic construct
  source 1..17: mol_type = other DNA
ggggctgcatctttctc

SEQ ID NO: 148109 - DNA, 17 bp, synthetic construct
  source 1..17: mol_type = other DNA
tggggctgcatctttct

SEQ ID NO: 148110 - DNA, 17 bp, synthetic construct
  source 1..17: mol_type = other DNA
ctggggctgcatctttc

SEQ ID NO: 148111 - DNA, 17 bp, synthetic construct
  source 1..17: mol_type = other DNA
cctggggctgcatcttt

SEQ ID NO: 148112 - DNA, 17 bp, synthetic construct
  source 1..17: mol_type = other DNA
ccctggggctgcatctt

SEQ ID NO: 148113 - DNA, 17 bp, synthetic construct
  source 1..17: mol_type = other DNA
cccctggggctgcatct

SEQ ID NO: 148114 - DNA, 17 bp, synthetic construct
  source 1..17: mol_type = other DNA
gcccctggggctgcatc

SEQ ID NO: 148115 - DNA, 17 bp, synthetic construct
  source 1..17: mol_type = other DNA
ggcccctggggctgcat

SEQ ID NO: 148116 - DNA, 17 bp, synthetic construct
  source 1..17: mol_type = other DNA
tggcccctggggctgca

SEQ ID NO: 148117 - DNA, 17 bp, synthetic construct
  source 1..17: mol_type = other DNA
gtggcccctggggctgc

SEQ ID NO: 148118 - DNA, 17 bp, synthetic construct
  source 1..17: mol_type = other DNA
ggtggcccctggggctg

SEQ ID NO: 148119 - DNA, 17 bp, synthetic construct
  source 1..17: mol_type = other DNA
cggtggcccctggggct

SEQ ID NO: 148120 - DNA, 17 bp, synthetic construct
  source 1..17: mol_type = other DNA
ccggtggcccctggggc

SEQ ID NO: 148121 - DNA, 17 bp, synthetic construct
  source 1..17: mol_type = other DNA
cccggtggcccctgggg

SEQ ID NO: 148122 - DNA, 17 bp, synthetic construct
  source 1..17: mol_type = other DNA
tcccggtggcccctggg

SEQ ID NO: 148123 - DNA, 17 bp, synthetic construct
  source 1..17: mol_type = other DNA
ctcccggtggcccctgg

SEQ ID NO: 148124 - DNA, 17 bp, synthetic construct
  source 1..17: mol_type = other DNA
tctcccggtggcccctg

SEQ ID NO: 148125 - DNA, 17 bp, synthetic construct
  source 1..17: mol_type = other DNA
gtctcccggtggcccct

SEQ ID NO: 148126 - DNA, 17 bp, synthetic construct
  source 1..17: mol_type = other DNA
tgtctcccggtggcccc

SEQ ID NO: 148127 - DNA, 17 bp, synthetic construct
  source 1..17: mol_type = other DNA
gtgtctcccggtggccc

SEQ ID NO: 148128 - DNA, 17 bp, synthetic construct
  source 1..17: mol_type = other DNA
ggtgtctcccggtggcc

SEQ ID NO: 148129 - DNA, 17 bp, synthetic construct
  source 1..17: mol_type = other DNA
gggtgtctcccggtggc

SEQ ID NO: 148130 - DNA, 17 bp, synthetic construct
  source 1..17: mol_type = other DNA
tgggtgtctcccggtgg

SEQ ID NO: 148131 - DNA, 17 bp, synthetic construct
  source 1..17: mol_type = other DNA
ctgggtgtctcccggtg

SEQ ID NO: 148132 - DNA, 17 bp, synthetic construct
  source 1..17: mol_type = other DNA
gctgggtgtctcccggt

SEQ ID NO: 148133 - DNA, 17 bp, synthetic construct
  source 1..17: mol_type = other DNA
ggctgggtgtctcccgg

SEQ ID NO: 148134 - DNA, 17 bp, synthetic construct
  source 1..17: mol_type = other DNA
cggctgggtgtctcccg

SEQ ID NO: 148135 - DNA, 17 bp, synthetic construct
  source 1..17: mol_type = other DNA
ccggctgggtgtctccc

SEQ ID NO: 148136 - DNA, 17 bp, synthetic construct
  source 1..17: mol_type = other DNA
cccggctgggtgtctcc

SEQ ID NO: 148137 - DNA, 17 bp, synthetic construct
  source 1..17: mol_type = other DNA
gcccggctgggtgtctc

SEQ ID NO: 148138 - DNA, 17 bp, synthetic construct
  source 1..17: mol_type = other DNA
agcccggctgggtgtct

SEQ ID NO: 148139 - DNA, 17 bp, synthetic construct
  source 1..17: mol_type = other DNA
cagcccggctgggtgtc

SEQ ID NO: 148140 - DNA, 17 bp, synthetic construct
  source 1..17: mol_type = other DNA
ccagcccggctgggtgt

SEQ ID NO: 148141 - DNA, 17 bp, synthetic construct
  source 1..17: mol_type = other DNA
gccagcccggctgggtg

SEQ ID NO: 148142 - DNA, 17 bp, synthetic construct
  source 1..17: mol_type = other DNA
ggccagcccggctgggt

SEQ ID NO: 148143 - DNA, 17 bp, synthetic construct
  source 1..17: mol_type = other DNA
tggccagcccggctggg

SEQ ID NO: 148144 - DNA, 17 bp, synthetic construct
  source 1..17: mol_type = other DNA
atggccagcccggctgg

SEQ ID NO: 148145 - DNA, 17 bp, synthetic construct
  source 1..17: mol_type = other DNA
catggccagcccggctg

SEQ ID NO: 148146 - DNA, 17 bp, synthetic construct
  source 1..17: mol_type = other DNA
tcatggccagcccggct

SEQ ID NO: 148147 - DNA, 17 bp, synthetic construct
  source 1..17: mol_type = other DNA
ctcatggccagcccggc

SEQ ID NO: 148148 - DNA, 17 bp, synthetic construct
  source 1..17: mol_type = other DNA
cctcatggccagcccgg

SEQ ID NO: 148149 - DNA, 17 bp, synthetic construct
  source 1..17: mol_type = other DNA
gcctcatggccagcccg

SEQ ID NO: 148150 - DNA, 17 bp, synthetic construct
  source 1..17: mol_type = other DNA
agcctcatggccagccc

SEQ ID NO: 148151 - DNA, 17 bp, synthetic construct
  source 1..17: mol_type = other DNA
cagcctcatggccagcc

SEQ ID NO: 148152 - DNA, 17 bp, synthetic construct
  source 1..17: mol_type = other DNA
gcagcctcatggccagc

SEQ ID NO: 148153 - DNA, 17 bp, synthetic construct
  source 1..17: mol_type = other DNA
agcagcctcatggccag

SEQ ID NO: 148154 - DNA, 17 bp, synthetic construct
  source 1..17: mol_type = other DNA
cagcagcctcatggcca

SEQ ID NO: 148155 - DNA, 17 bp, synthetic construct
  source 1..17: mol_type = other DNA
gcagcagcctcatggcc

SEQ ID NO: 148156 - DNA, 17 bp, synthetic construct
  source 1..17: mol_type = other DNA
tgcagcagcctcatggc

SEQ ID NO: 148157 - DNA, 17 bp, synthetic construct
  source 1..17: mol_type = other DNA
ctgcagcagcctcatgg

SEQ ID NO: 148158 - DNA, 17 bp, synthetic construct
  source 1..17: mol_type = other DNA
gctgcagcagcctcatg

SEQ ID NO: 148159 - DNA, 17 bp, synthetic construct
  source 1..17: mol_type = other DNA
ggctgcagcagcctcat

SEQ ID NO: 148160 - DNA, 17 bp, synthetic construct
  source 1..17: mol_type = other DNA
gggctgcagcagcctca

SEQ ID NO: 148161 - DNA, 17 bp, synthetic construct
  source 1..17: mol_type = other DNA
ggggctgcagcagcctc

SEQ ID NO: 148162 - DNA, 17 bp, synthetic construct
  source 1..17: mol_type = other DNA
aggggctgcagcagcct

SEQ ID NO: 148163 - DNA, 17 bp, synthetic construct
  source 1..17: mol_type = other DNA
gaggggctgcagcagcc

SEQ ID NO: 148164 - DNA, 17 bp, synthetic construct
  source 1..17: mol_type = other DNA
ggaggggctgcagcagc

SEQ ID NO: 148165 - DNA, 17 bp, synthetic construct
  source 1..17: mol_type = other DNA
gggaggggctgcagcag

SEQ ID NO: 148166 - DNA, 17 bp, synthetic construct
  source 1..17: mol_type = other DNA
agggaggggctgcagca

SEQ ID NO: 148167 - DNA, 17 bp, synthetic construct
  source 1..17: mol_type = other DNA
cagggaggggctgcagc

SEQ ID NO: 148168 - DNA, 17 bp, synthetic construct
  source 1..17: mol_type = other DNA
gcagggaggggctgcag

SEQ ID NO: 148169 - DNA, 17 bp, synthetic construct
  source 1..17: mol_type = other DNA
ggcagggaggggctgca

SEQ ID NO: 148170 - DNA, 17 bp, synthetic construct
  source 1..17: mol_type = other DNA
gggcagggaggggctgc

SEQ ID NO: 148171 - DNA, 17 bp, synthetic construct
  source 1..17: mol_type = other DNA
ggggcagggaggggctg

SEQ ID NO: 148172 - DNA, 17 bp, synthetic construct
  source 1..17: mol_type = other DNA
cggggcagggaggggct

SEQ ID NO: 148173 - DNA, 17 bp, synthetic construct
  source 1..17: mol_type = other DNA
gcggggcagggaggggc

SEQ ID NO: 148174 - DNA, 17 bp, synthetic construct
  source 1..17: mol_type = other DNA
ggcggggcagggagggg

SEQ ID NO: 148175 - DNA, 17 bp, synthetic construct
  source 1..17: mol_type = other DNA
gggcggggcagggaggg

SEQ ID NO: 148176 - DNA, 17 bp, synthetic construct
  source 1..17: mol_type = other DNA
agggcggggcagggagg

SEQ ID NO: 148177 - DNA, 17 bp, synthetic construct
  source 1..17: mol_type = other DNA
gagggcggggcagggag

SEQ ID NO: 148178 - DNA, 17 bp, synthetic construct
  source 1..17: mol_type = other DNA
ggagggcggggcaggga

SEQ ID NO: 148179 - DNA, 17 bp, synthetic construct
  source 1..17: mol_type = other DNA
tggagggcggggcaggg

SEQ ID NO: 148180 - DNA, 17 bp, synthetic construct
  source 1..17: mol_type = other DNA
gtggagggcggggcagg

SEQ ID NO: 148181 - DNA, 17 bp, synthetic construct
  source 1..17: mol_type = other DNA
ggtggagggcggggcag

SEQ ID NO: 148182 - DNA, 17 bp, synthetic construct
  source 1..17: mol_type = other DNA
gggtggagggcggggca

SEQ ID NO: 148183 - DNA, 17 bp, synthetic construct
  source 1..17: mol_type = other DNA
ggggtggagggcggggc

SEQ ID NO: 148184 - DNA, 17 bp, synthetic construct
  source 1..17: mol_type = other DNA
gggggtggagggcgggg

SEQ ID NO: 148185 - DNA, 17 bp, synthetic construct
  source 1..17: mol_type = other DNA
agggggtggagggcggg

SEQ ID NO: 148186 - DNA, 17 bp, synthetic construct
  source 1..17: mol_type = other DNA
gagggggtggagggcgg

SEQ ID NO: 148187 - DNA, 17 bp, synthetic construct
  source 1..17: mol_type = other DNA
ggagggggtggagggcg

SEQ ID NO: 148188 - DNA, 17 bp, synthetic construct
  source 1..17: mol_type = other DNA
gggagggggtggagggc

SEQ ID NO: 148189 - DNA, 17 bp, synthetic construct
  source 1..17: mol_type = other DNA
tgggagggggtggaggg

SEQ ID NO: 148190 - DNA, 17 bp, synthetic construct
  source 1..17: mol_type = other DNA
ttgggagggggtggagg

SEQ ID NO: 148191 - DNA, 17 bp, synthetic construct
  source 1..17: mol_type = other DNA
cttgggagggggtggag

SEQ ID NO: 148192 - DNA, 17 bp, synthetic construct
  source 1..17: mol_type = other DNA
gcttgggagggggtgga

SEQ ID NO: 148193 - DNA, 17 bp, synthetic construct
  source 1..17: mol_type = other DNA
agcttgggagggggtgg

SEQ ID NO: 148194 - DNA, 17 bp, synthetic construct
  source 1..17: mol_type = other DNA
aagcttgggagggggtg

SEQ ID NO: 148195 - DNA, 17 bp, synthetic construct
  source 1..17: mol_type = other DNA
caagcttgggagggggt

SEQ ID NO: 148196 - DNA, 17 bp, synthetic construct
  source 1..17: mol_type = other DNA
ccaagcttgggaggggg

SEQ ID NO: 148197 - DNA, 17 bp, synthetic construct
  source 1..17: mol_type = other DNA
cccaagcttgggagggg

SEQ ID NO: 148198 - DNA, 17 bp, synthetic construct
  source 1..17: mol_type = other DNA
ccccaagcttgggaggg

SEQ ID NO: 148199 - DNA, 17 bp, synthetic construct
  source 1..17: mol_type = other DNA
accccaagcttgggagg

SEQ ID NO: 148200 - DNA, 17 bp, synthetic construct
  source 1..17: mol_type = other DNA
gaccccaagcttgggag

SEQ ID NO: 148201 - DNA, 17 bp, synthetic construct
  source 1..17: mol_type = other DNA
agaccccaagcttggga

SEQ ID NO: 148202 - DNA, 17 bp, synthetic construct
  source 1..17: mol_type = other DNA
cagaccccaagcttggg

SEQ ID NO: 148203 - DNA, 17 bp, synthetic construct
  source 1..17: mol_type = other DNA
ccagaccccaagcttgg

SEQ ID NO: 148204 - DNA, 17 bp, synthetic construct
  source 1..17: mol_type = other DNA
cccagaccccaagcttg

SEQ ID NO: 148205 - DNA, 17 bp, synthetic construct
  source 1..17: mol_type = other DNA
gcccagaccccaagctt

SEQ ID NO: 148206 - DNA, 17 bp, synthetic construct
  source 1..17: mol_type = other DNA
agcccagaccccaagct

SEQ ID NO: 148207 - DNA, 17 bp, synthetic construct
  source 1..17: mol_type = other DNA
cagcccagaccccaagc

SEQ ID NO: 148208 - DNA, 17 bp, synthetic construct
  source 1..17: mol_type = other DNA
ccagcccagaccccaag

SEQ ID NO: 148209 - DNA, 17 bp, synthetic construct
  source 1..17: mol_type = other DNA
cccagcccagaccccaa

SEQ ID NO: 148210 - DNA, 17 bp, synthetic construct
  source 1..17: mol_type = other DNA
gcccagcccagacccca

SEQ ID NO: 148211 - DNA, 17 bp, synthetic construct
  source 1..17: mol_type = other DNA
tgcccagcccagacccc

SEQ ID NO: 148212 - DNA, 17 bp, synthetic construct
  source 1..17: mol_type = other DNA
ctgcccagcccagaccc

SEQ ID NO: 148213 - DNA, 17 bp, synthetic construct
  source 1..17: mol_type = other DNA
cctgcccagcccagacc

SEQ ID NO: 148214 - DNA, 17 bp, synthetic construct
  source 1..17: mol_type = other DNA
acctgcccagcccagac

SEQ ID NO: 148215 - DNA, 17 bp, synthetic construct
  source 1..17: mol_type = other DNA
cacctgcccagcccaga

SEQ ID NO: 148216 - DNA, 17 bp, synthetic construct
  source 1..17: mol_type = other DNA
tcacctgcccagcccag

SEQ ID NO: 148217 - DNA, 17 bp, synthetic construct
  source 1..17: mol_type = other DNA
ctcacctgcccagccca

SEQ ID NO: 148218 - DNA, 17 bp, synthetic construct
  source 1..17: mol_type = other DNA
cctcacctgcccagccc

SEQ ID NO: 148219 - DNA, 17 bp, synthetic construct
  source 1..17: mol_type = other DNA
gcctcacctgcccagcc

SEQ ID NO: 148220 - DNA, 17 bp, synthetic construct
  source 1..17: mol_type = other DNA
agcctcacctgcccagc

SEQ ID NO: 148221 - DNA, 17 bp, synthetic construct
  source 1..17: mol_type = other DNA
gagcctcacctgcccag

SEQ ID NO: 148222 - DNA, 17 bp, synthetic construct
  source 1..17: mol_type = other DNA
ggagcctcacctgccca

SEQ ID NO: 148223 - DNA, 17 bp, synthetic construct
  source 1..17: mol_type = other DNA
gggagcctcacctgccc

SEQ ID NO: 148224 - DNA, 17 bp, synthetic construct
  source 1..17: mol_type = other DNA
agggagcctcacctgcc

SEQ ID NO: 148225 - DNA, 17 bp, synthetic construct
  source 1..17: mol_type = other DNA
cagggagcctcacctgc

SEQ ID NO: 148226 - DNA, 17 bp, synthetic construct
  source 1..17: mol_type = other DNA
ccagggagcctcacctg

SEQ ID NO: 148227 - DNA, 17 bp, synthetic construct
  source 1..17: mol_type = other DNA
cccagggagcctcacct

SEQ ID NO: 148228 - DNA, 17 bp, synthetic construct
  source 1..17: mol_type = other DNA
ccccagggagcctcacc

SEQ ID NO: 148229 - DNA, 17 bp, synthetic construct
  source 1..17: mol_type = other DNA
accccagggagcctcac

SEQ ID NO: 148230 - DNA, 17 bp, synthetic construct
  source 1..17: mol_type = other DNA
gaccccagggagcctca

SEQ ID NO: 148231 - DNA, 17 bp, synthetic construct
  source 1..17: mol_type = other DNA
agaccccagggagcctc

SEQ ID NO: 148232 - DNA, 17 bp, synthetic construct
  source 1..17: mol_type = other DNA
gagaccccagggagcct

SEQ ID NO: 148233 - DNA, 17 bp, synthetic construct
  source 1..17: mol_type = other DNA
agagaccccagggagcc

SEQ ID NO: 148234 - DNA, 17 bp, synthetic construct
  source 1..17: mol_type = other DNA
gagagaccccagggagc

SEQ ID NO: 148235 - DNA, 17 bp, synthetic construct
  source 1..17: mol_type = other DNA
agagagaccccagggag

SEQ ID NO: 148236 - DNA, 17 bp, synthetic construct
  source 1..17: mol_type = other DNA
gagagagaccccaggga

SEQ ID NO: 148237 - DNA, 17 bp, synthetic construct
  source 1..17: mol_type = other DNA
ggagagagaccccaggg

SEQ ID NO: 148238 - DNA, 17 bp, synthetic construct
  source 1..17: mol_type = other DNA
tggagagagaccccagg

SEQ ID NO: 148239 - DNA, 17 bp, synthetic construct
  source 1..17: mol_type = other DNA
atggagagagaccccag

SEQ ID NO: 148240 - DNA, 17 bp, synthetic construct
  source 1..17: mol_type = other DNA
gatggagagagacccca

SEQ ID NO: 148241 - DNA, 17 bp, synthetic construct
  source 1..17: mol_type = other DNA
agatggagagagacccc

SEQ ID NO: 148242 - DNA, 17 bp, synthetic construct
  source 1..17: mol_type = other DNA
cagatggagagagaccc

SEQ ID NO: 148243 - DNA, 17 bp, synthetic construct
  source 1..17: mol_type = other DNA
acagatggagagagacc

SEQ ID NO: 148244 - DNA, 17 bp, synthetic construct
  source 1..17: mol_type = other DNA
cacagatggagagagac

SEQ ID NO: 148245 - DNA, 17 bp, synthetic construct
  source 1..17: mol_type = other DNA
ccacagatggagagaga

SEQ ID NO: 148246 - DNA, 17 bp, synthetic construct
  source 1..17: mol_type = other DNA
tccacagatggagagag

SEQ ID NO: 148247 - DNA, 17 bp, synthetic construct
  source 1..17: mol_type = other DNA
ttccacagatggagaga

SEQ ID NO: 148248 - DNA, 17 bp, synthetic construct
  source 1..17: mol_type = other DNA
cttccacagatggagag

SEQ ID NO: 148249 - DNA, 17 bp, synthetic construct
  source 1..17: mol_type = other DNA
ccttccacagatggaga

SEQ ID NO: 148250 - DNA, 17 bp, synthetic construct
  source 1..17: mol_type = other DNA
cccttccacagatggag

SEQ ID NO: 148251 - DNA, 17 bp, synthetic construct
  source 1..17: mol_type = other DNA
tcccttccacagatgga

SEQ ID NO: 148252 - DNA, 17 bp, synthetic construct
  source 1..17: mol_type = other DNA
ctcccttccacagatgg

SEQ ID NO: 148253 - DNA, 17 bp, synthetic construct
  source 1..17: mol_type = other DNA
cctcccttccacagatg

SEQ ID NO: 148254 - DNA, 17 bp, synthetic construct
  source 1..17: mol_type = other DNA
gcctcccttccacagat

SEQ ID NO: 148255 - DNA, 17 bp, synthetic construct
  source 1..17: mol_type = other DNA
agcctcccttccacaga

SEQ ID NO: 148256 - DNA, 17 bp, synthetic construct
  source 1..17: mol_type = other DNA
cagcctcccttccacag

SEQ ID NO: 148257 - DNA, 17 bp, synthetic construct
  source 1..17: mol_type = other DNA
ccagcctcccttccaca

SEQ ID NO: 148258 - DNA, 17 bp, synthetic construct
  source 1..17: mol_type = other DNA
cccagcctcccttccac

SEQ ID NO: 148259 - DNA, 17 bp, synthetic construct
  source 1..17: mol_type = other DNA
acccagcctcccttcca

SEQ ID NO: 148260 - DNA, 17 bp, synthetic construct
  source 1..17: mol_type = other DNA
cacccagcctcccttcc

SEQ ID NO: 148261 - DNA, 17 bp, synthetic construct
  source 1..17: mol_type = other DNA
ccacccagcctcccttc

SEQ ID NO: 148262 - DNA, 17 bp, synthetic construct
  source 1..17: mol_type = other DNA
accacccagcctccctt

SEQ ID NO: 148263 - DNA, 17 bp, synthetic construct
  source 1..17: mol_type = other DNA
gaccacccagcctccct

SEQ ID NO: 148264 - DNA, 17 bp, synthetic construct
  source 1..17: mol_type = other DNA
tgaccacccagcctccc

SEQ ID NO: 148265 - DNA, 17 bp, synthetic construct
  source 1..17: mol_type = other DNA
ctgaccacccagcctcc

SEQ ID NO: 148266 - DNA, 17 bp, synthetic construct
  source 1..17: mol_type = other DNA
gctgaccacccagcctc

SEQ ID NO: 148267 - DNA, 17 bp, synthetic construct
  source 1..17: mol_type = other DNA
tgctgaccacccagcct

SEQ ID NO: 148268 - DNA, 17 bp, synthetic construct
  source 1..17: mol_type = other DNA
ctgctgaccacccagcc

SEQ ID NO: 148269 - DNA, 17 bp, synthetic construct
  source 1..17: mol_type = other DNA
cctgctgaccacccagc

SEQ ID NO: 148270 - DNA, 17 bp, synthetic construct
  source 1..17: mol_type = other DNA
ccctgctgaccacccag

SEQ ID NO: 148271 - DNA, 17 bp, synthetic construct
  source 1..17: mol_type = other DNA
gccctgctgaccaccca

SEQ ID NO: 148272 - DNA, 17 bp, synthetic construct
  source 1..17: mol_type = other DNA
agccctgctgaccaccc

SEQ ID NO: 148273 - DNA, 17 bp, synthetic construct
  source 1..17: mol_type = other DNA
cagccctgctgaccacc

SEQ ID NO: 148274 - DNA, 17 bp, synthetic construct
  source 1..17: mol_type = other DNA
ccagccctgctgaccac

SEQ ID NO: 148275 - DNA, 17 bp, synthetic construct
  source 1..17: mol_type = other DNA
tccagccctgctgacca

SEQ ID NO: 148276 - DNA, 17 bp, synthetic construct
  source 1..17: mol_type = other DNA
ctccagccctgctgacc

SEQ ID NO: 148277 - DNA, 17 bp, synthetic construct
  source 1..17: mol_type = other DNA
cctccagccctgctgac

SEQ ID NO: 148278 - DNA, 17 bp, synthetic construct
  source 1..17: mol_type = other DNA
gcctccagccctgctga

SEQ ID NO: 148279 - DNA, 17 bp, synthetic construct
  source 1..17: mol_type = other DNA
tgcctccagccctgctg

SEQ ID NO: 148280 - DNA, 17 bp, synthetic construct
  source 1..17: mol_type = other DNA
ctgcctccagccctgct

SEQ ID NO: 148281 - DNA, 17 bp, synthetic construct
  source 1..17: mol_type = other DNA
cctgcctccagccctgc

SEQ ID NO: 148282 - DNA, 17 bp, synthetic construct
  source 1..17: mol_type = other DNA
ccctgcctccagccctg

SEQ ID NO: 148283 - DNA, 17 bp, synthetic construct
  source 1..17: mol_type = other DNA
cccctgcctccagccct

SEQ ID NO: 148284 - DNA, 17 bp, synthetic construct
  source 1..17: mol_type = other DNA
ccccctgcctccagccc

SEQ ID NO: 148285 - DNA, 17 bp, synthetic construct
  source 1..17: mol_type = other DNA
gccccctgcctccagcc

SEQ ID NO: 148286 - DNA, 17 bp, synthetic construct
  source 1..17: mol_type = other DNA
agccccctgcctccagc

SEQ ID NO: 148287 - DNA, 17 bp, synthetic construct
  source 1..17: mol_type = other DNA
aagccccctgcctccag

SEQ ID NO: 148288 - DNA, 17 bp, synthetic construct
  source 1..17: mol_type = other DNA
gaagccccctgcctcca

SEQ ID NO: 148289 - DNA, 17 bp, synthetic construct
  source 1..17: mol_type = other DNA
ggaagccccctgcctcc

SEQ ID NO: 148290 - DNA, 17 bp, synthetic construct
  source 1..17: mol_type = other DNA
gggaagccccctgcctc

SEQ ID NO: 148291 - DNA, 17 bp, synthetic construct
  source 1..17: mol_type = other DNA
ggggaagccccctgcct

SEQ ID NO: 148292 - DNA, 17 bp, synthetic construct
  source 1..17: mol_type = other DNA
gggggaagccccctgcc

SEQ ID NO: 148293 - DNA, 17 bp, synthetic construct
  source 1..17: mol_type = other DNA
tgggggaagccccctgc

SEQ ID NO: 148294 - DNA, 17 bp, synthetic construct
  source 1..17: mol_type = other DNA
ctgggggaagccccctg

SEQ ID NO: 148295 - DNA, 17 bp, synthetic construct
  source 1..17: mol_type = other DNA
actgggggaagccccct

SEQ ID NO: 148296 - DNA, 17 bp, synthetic construct
  source 1..17: mol_type = other DNA
cactgggggaagccccc

SEQ ID NO: 148297 - DNA, 17 bp, synthetic construct
  source 1..17: mol_type = other DNA
ccactgggggaagcccc

SEQ ID NO: 148298 - DNA, 17 bp, synthetic construct
  source 1..17: mol_type = other DNA
gccactgggggaagccc

SEQ ID NO: 148299 - DNA, 17 bp, synthetic construct
  source 1..17: mol_type = other DNA
agccactgggggaagcc

SEQ ID NO: 148300 - DNA, 17 bp, synthetic construct
  source 1..17: mol_type = other DNA
gagccactgggggaagc

SEQ ID NO: 148301 - DNA, 17 bp, synthetic construct
  source 1..17: mol_type = other DNA
ggagccactgggggaag

SEQ ID NO: 148302 - DNA, 17 bp, synthetic construct
  source 1..17: mol_type = other DNA
gggagccactgggggaa

SEQ ID NO: 148303 - DNA, 17 bp, synthetic construct
  source 1..17: mol_type = other DNA
tgggagccactggggga

SEQ ID NO: 148304 - DNA, 17 bp, synthetic construct
  source 1..17: mol_type = other DNA
ctgggagccactggggg

SEQ ID NO: 148305 - DNA, 17 bp, synthetic construct
  source 1..17: mol_type = other DNA
gctgggagccactgggg

SEQ ID NO: 148306 - DNA, 17 bp, synthetic construct
  source 1..17: mol_type = other DNA
ggctgggagccactggg

SEQ ID NO: 148307 - DNA, 17 bp, synthetic construct
  source 1..17: mol_type = other DNA
aggctgggagccactgg

SEQ ID NO: 148308 - DNA, 17 bp, synthetic construct
  source 1..17: mol_type = other DNA
caggctgggagccactg

SEQ ID NO: 148309 - DNA, 17 bp, synthetic construct
  source 1..17: mol_type = other DNA
ccaggctgggagccact

SEQ ID NO: 148310 - DNA, 17 bp, synthetic construct
  source 1..17: mol_type = other DNA
cccaggctgggagccac

SEQ ID NO: 148311 - DNA, 17 bp, synthetic construct
  source 1..17: mol_type = other DNA
gcccaggctgggagcca

SEQ ID NO: 148312 - DNA, 17 bp, synthetic construct
  source 1..17: mol_type = other DNA
ggcccaggctgggagcc

SEQ ID NO: 148313 - DNA, 17 bp, synthetic construct
  source 1..17: mol_type = other DNA
gggcccaggctgggagc

SEQ ID NO: 148314 - DNA, 17 bp, synthetic construct
  source 1..17: mol_type = other DNA
cgggcccaggctgggag

SEQ ID NO: 148315 - DNA, 17 bp, synthetic construct
  source 1..17: mol_type = other DNA
ccgggcccaggctggga

SEQ ID NO: 148316 - DNA, 17 bp, synthetic construct
  source 1..17: mol_type = other DNA
cccgggcccaggctggg

SEQ ID NO: 148317 - DNA, 17 bp, synthetic construct
  source 1..17: mol_type = other DNA
ccccgggcccaggctgg

SEQ ID NO: 148318 - DNA, 17 bp, synthetic construct
  source 1..17: mol_type = other DNA
cccccgggcccaggctg

SEQ ID NO: 148319 - DNA, 17 bp, synthetic construct
  source 1..17: mol_type = other DNA
ccccccgggcccaggct

SEQ ID NO: 148320 - DNA, 17 bp, synthetic construct
  source 1..17: mol_type = other DNA
tccccccgggcccaggc

SEQ ID NO: 148321 - DNA, 17 bp, synthetic construct
  source 1..17: mol_type = other DNA
ctccccccgggcccagg

SEQ ID NO: 148322 - DNA, 17 bp, synthetic construct
  source 1..17: mol_type = other DNA
gctccccccgggcccag

SEQ ID NO: 148323 - DNA, 17 bp, synthetic construct
  source 1..17: mol_type = other DNA
agctccccccgggccca

SEQ ID NO: 148324 - DNA, 17 bp, synthetic construct
  source 1..17: mol_type = other DNA
cagctccccccgggccc

SEQ ID NO: 148325 - DNA, 17 bp, synthetic construct
  source 1..17: mol_type = other DNA
gcagctccccccgggcc

SEQ ID NO: 148326 - DNA, 17 bp, synthetic construct
  source 1..17: mol_type = other DNA
cgcagctccccccgggc

SEQ ID NO: 148327 - DNA, 17 bp, synthetic construct
  source 1..17: mol_type = other DNA
acgcagctccccccggg

SEQ ID NO: 148328 - DNA, 17 bp, synthetic construct
  source 1..17: mol_type = other DNA
gacgcagctccccccgg

SEQ ID NO: 148329 - DNA, 17 bp, synthetic construct
  source 1..17: mol_type = other DNA
agacgcagctccccccg

SEQ ID NO: 148330 - DNA, 17 bp, synthetic construct
  source 1..17: mol_type = other DNA
cagacgcagctcccccc

SEQ ID NO: 148331 - DNA, 17 bp, synthetic construct
  source 1..17: mol_type = other DNA
ccagacgcagctccccc

SEQ ID NO: 148332 - DNA, 17 bp, synthetic construct
  source 1..17: mol_type = other DNA
gccagacgcagctcccc

SEQ ID NO: 148333 - DNA, 17 bp, synthetic construct
  source 1..17: mol_type = other DNA
agccagacgcagctccc

SEQ ID NO: 148334 - DNA, 17 bp, synthetic construct
  source 1..17: mol_type = other DNA
cagccagacgcagctcc

SEQ ID NO: 148335 - DNA, 17 bp, synthetic construct
  source 1..17: mol_type = other DNA
gcagccagacgcagctc

SEQ ID NO: 148336 - DNA, 17 bp, synthetic construct
  source 1..17: mol_type = other DNA
tgcagccagacgcagct

SEQ ID NO: 148337 - DNA, 17 bp, synthetic construct
  source 1..17: mol_type = other DNA
ttgcagccagacgcagc

SEQ ID NO: 148338 - DNA, 17 bp, synthetic construct
  source 1..17: mol_type = other DNA
cttgcagccagacgcag

SEQ ID NO: 148339 - DNA, 17 bp, synthetic construct
  source 1..17: mol_type = other DNA
ccttgcagccagacgca

SEQ ID NO: 148340 - DNA, 17 bp, synthetic construct
  source 1..17: mol_type = other DNA
accttgcagccagacgc

SEQ ID NO: 148341 - DNA, 17 bp, synthetic construct
  source 1..17: mol_type = other DNA
aaccttgcagccagacg

SEQ ID NO: 148342 - DNA, 17 bp, synthetic construct
  source 1..17: mol_type = other DNA
aaaccttgcagccagac

SEQ ID NO: 148343 - DNA, 17 bp, synthetic construct
  source 1..17: mol_type = other DNA
caaaccttgcagccaga

SEQ ID NO: 148344 - DNA, 17 bp, synthetic construct
  source 1..17: mol_type = other DNA
ccaaaccttgcagccag

SEQ ID NO: 148345 - DNA, 17 bp, synthetic construct
  source 1..17: mol_type = other DNA
cccaaaccttgcagcca

SEQ ID NO: 148346 - DNA, 17 bp, synthetic construct
  source 1..17: mol_type = other DNA
ccccaaaccttgcagcc

SEQ ID NO: 148347 - DNA, 17 bp, synthetic construct
  source 1..17: mol_type = other DNA
cccccaaaccttgcagc

SEQ ID NO: 148348 - DNA, 17 bp, synthetic construct
  source 1..17: mol_type = other DNA
gcccccaaaccttgcag

SEQ ID NO: 148349 - DNA, 17 bp, synthetic construct
  source 1..17: mol_type = other DNA
agcccccaaaccttgca

SEQ ID NO: 148350 - DNA, 17 bp, synthetic construct
  source 1..17: mol_type = other DNA
cagcccccaaaccttgc

SEQ ID NO: 148351 - DNA, 17 bp, synthetic construct
  source 1..17: mol_type = other DNA
ccagcccccaaaccttg

SEQ ID NO: 148352 - DNA, 17 bp, synthetic construct
  source 1..17: mol_type = other DNA
accagcccccaaacctt

SEQ ID NO: 148353 - DNA, 17 bp, synthetic construct
  source 1..17: mol_type = other DNA
aaccagcccccaaacct

SEQ ID NO: 148354 - DNA, 17 bp, synthetic construct
  source 1..17: mol_type = other DNA
aaaccagcccccaaacc

SEQ ID NO: 148355 - DNA, 17 bp, synthetic construct
  source 1..17: mol_type = other DNA
caaaccagcccccaaac

SEQ ID NO: 148356 - DNA, 17 bp, synthetic construct
  source 1..17: mol_type = other DNA
tcaaaccagcccccaaa

SEQ ID NO: 148357 - DNA, 17 bp, synthetic construct
  source 1..17: mol_type = other DNA
gtcaaaccagcccccaa

SEQ ID NO: 148358 - DNA, 17 bp, synthetic construct
  source 1..17: mol_type = other DNA
ggtcaaaccagccccca

SEQ ID NO: 148359 - DNA, 17 bp, synthetic construct
  source 1..17: mol_type = other DNA
tggtcaaaccagccccc

SEQ ID NO: 148360 - DNA, 17 bp, synthetic construct
  source 1..17: mol_type = other DNA
ctggtcaaaccagcccc

SEQ ID NO: 148361 - DNA, 17 bp, synthetic construct
  source 1..17: mol_type = other DNA
tctggtcaaaccagccc

SEQ ID NO: 148362 - DNA, 17 bp, synthetic construct
  source 1..17: mol_type = other DNA
ttctggtcaaaccagcc

SEQ ID NO: 148363 - DNA, 17 bp, synthetic construct
  source 1..17: mol_type = other DNA
attctggtcaaaccagc

SEQ ID NO: 148364 - DNA, 17 bp, synthetic construct
  source 1..17: mol_type = other DNA
tattctggtcaaaccag

SEQ ID NO: 148365 - DNA, 17 bp, synthetic construct
  source 1..17: mol_type = other DNA
ctattctggtcaaacca

SEQ ID NO: 148366 - DNA, 17 bp, synthetic construct
  source 1..17: mol_type = other DNA
gctattctggtcaaacc

SEQ ID NO: 148367 - DNA, 17 bp, synthetic construct
  source 1..17: mol_type = other DNA
ggctattctggtcaaac

SEQ ID NO: 148368 - DNA, 17 bp, synthetic construct
  source 1..17: mol_type = other DNA
tggctattctggtcaaa

SEQ ID NO: 148369 - DNA, 17 bp, synthetic construct
  source 1..17: mol_type = other DNA
gtggctattctggtcaa

SEQ ID NO: 148370 - DNA, 17 bp, synthetic construct
  source 1..17: mol_type = other DNA
ggtggctattctggtca

SEQ ID NO: 148371 - DNA, 17 bp, synthetic construct
  source 1..17: mol_type = other DNA
aggtggctattctggtc

SEQ ID NO: 148372 - DNA, 17 bp, synthetic construct
  source 1..17: mol_type = other DNA
gaggtggctattctggt

SEQ ID NO: 148373 - DNA, 17 bp, synthetic construct
  source 1..17: mol_type = other DNA
ggaggtggctattctgg

SEQ ID NO: 148374 - DNA, 17 bp, synthetic construct
  source 1..17: mol_type = other DNA
aggaggtggctattctg

SEQ ID NO: 148375 - DNA, 17 bp, synthetic construct
  source 1..17: mol_type = other DNA
aaggaggtggctattct

SEQ ID NO: 148376 - DNA, 17 bp, synthetic construct
  source 1..17: mol_type = other DNA
caaggaggtggctattc

SEQ ID NO: 148377 - DNA, 17 bp, synthetic construct
  source 1..17: mol_type = other DNA
gcaaggaggtggctatt

SEQ ID NO: 148378 - DNA, 17 bp, synthetic construct
  source 1..17: mol_type = other DNA
tgcaaggaggtggctat

SEQ ID NO: 148379 - DNA, 17 bp, synthetic construct
  source 1..17: mol_type = other DNA
atgcaaggaggtggcta

SEQ ID NO: 148380 - DNA, 17 bp, synthetic construct
  source 1..17: mol_type = other DNA
gatgcaaggaggtggct

SEQ ID NO: 148381 - DNA, 17 bp, synthetic construct
  source 1..17: mol_type = other DNA
agatgcaaggaggtggc

SEQ ID NO: 148382 - DNA, 17 bp, synthetic construct
  source 1..17: mol_type = other DNA
cagatgcaaggaggtgg

SEQ ID NO: 148383 - DNA, 17 bp, synthetic construct
  source 1..17: mol_type = other DNA
tcagatgcaaggaggtg

SEQ ID NO: 148384 - DNA, 17 bp, synthetic construct
  source 1..17: mol_type = other DNA
atcagatgcaaggaggt

SEQ ID NO: 148385 - DNA, 17 bp, synthetic construct
  source 1..17: mol_type = other DNA
aatcagatgcaaggagg

SEQ ID NO: 148386 - DNA, 17 bp, synthetic construct
  source 1..17: mol_type = other DNA
gaatcagatgcaaggag

SEQ ID NO: 148387 - DNA, 17 bp, synthetic construct
  source 1..17: mol_type = other DNA
agaatcagatgcaagga

SEQ ID NO: 148388 - DNA, 17 bp, synthetic construct
  source 1..17: mol_type = other DNA
aagaatcagatgcaagg

SEQ ID NO: 148389 - DNA, 17 bp, synthetic construct
  source 1..17: mol_type = other DNA
gaagaatcagatgcaag

SEQ ID NO: 148390 - DNA, 17 bp, synthetic construct
  source 1..17: mol_type = other DNA
ggaagaatcagatgcaa

SEQ ID NO: 148391 - DNA, 17 bp, synthetic construct
  source 1..17: mol_type = other DNA
cggaagaatcagatgca

SEQ ID NO: 148392 - DNA, 17 bp, synthetic construct
  source 1..17: mol_type = other DNA
ccggaagaatcagatgc

SEQ ID NO: 148393 - DNA, 17 bp, synthetic construct
  source 1..17: mol_type = other DNA
cccggaagaatcagatg

SEQ ID NO: 148394 - DNA, 17 bp, synthetic construct
  source 1..17: mol_type = other DNA
gcccggaagaatcagat

SEQ ID NO: 148395 - DNA, 17 bp, synthetic construct
  source 1..17: mol_type = other DNA
ggcccggaagaatcaga

SEQ ID NO: 148396 - DNA, 17 bp, synthetic construct
  source 1..17: mol_type = other DNA
tggcccggaagaatcag

SEQ ID NO: 148397 - DNA, 17 bp, synthetic construct
  source 1..17: mol_type = other DNA
atggcccggaagaatca

SEQ ID NO: 148398 - DNA, 17 bp, synthetic construct
  source 1..17: mol_type = other DNA
catggcccggaagaatc

SEQ ID NO: 148399 - DNA, 17 bp, synthetic construct
  source 1..17: mol_type = other DNA
gcatggcccggaagaat

SEQ ID NO: 148400 - DNA, 17 bp, synthetic construct
  source 1..17: mol_type = other DNA
tgcatggcccggaagaa

SEQ ID NO: 148401 - DNA, 17 bp, synthetic construct
  source 1..17: mol_type = other DNA
ctgcatggcccggaaga

SEQ ID NO: 148402 - DNA, 17 bp, synthetic construct
  source 1..17: mol_type = other DNA
gctgcatggcccggaag

SEQ ID NO: 148403 - DNA, 17 bp, synthetic construct
  source 1..17: mol_type = other DNA
ggctgcatggcccggaa

SEQ ID NO: 148404 - DNA, 17 bp, synthetic construct
  source 1..17: mol_type = other DNA
aggctgcatggcccgga

SEQ ID NO: 148405 - DNA, 17 bp, synthetic construct
  source 1..17: mol_type = other DNA
aaggctgcatggcccgg

SEQ ID NO: 148406 - DNA, 17 bp, synthetic construct
  source 1..17: mol_type = other DNA
caaggctgcatggcccg

SEQ ID NO: 148407 - DNA, 17 bp, synthetic construct
  source 1..17: mol_type = other DNA
ccaaggctgcatggccc

SEQ ID NO: 148408 - DNA, 17 bp, synthetic construct
  source 1..17: mol_type = other DNA
gccaaggctgcatggcc

SEQ ID NO: 148409 - DNA, 17 bp, synthetic construct
  source 1..17: mol_type = other DNA
agccaaggctgcatggc

SEQ ID NO: 148410 - DNA, 17 bp, synthetic construct
  source 1..17: mol_type = other DNA
gagccaaggctgcatgg

SEQ ID NO: 148411 - DNA, 17 bp, synthetic construct
  source 1..17: mol_type = other DNA
ggagccaaggctgcatg

SEQ ID NO: 148412 - DNA, 17 bp, synthetic construct
  source 1..17: mol_type = other DNA
gggagccaaggctgcat

SEQ ID NO: 148413 - DNA, 17 bp, synthetic construct
  source 1..17: mol_type = other DNA
ggggagccaaggctgca

SEQ ID NO: 148414 - DNA, 17 bp, synthetic construct
  source 1..17: mol_type = other DNA
aggggagccaaggctgc

SEQ ID NO: 148415 - DNA, 17 bp, synthetic construct
  source 1..17: mol_type = other DNA
gaggggagccaaggctg

SEQ ID NO: 148416 - DNA, 17 bp, synthetic construct
  source 1..17: mol_type = other DNA
tgaggggagccaaggct

SEQ ID NO: 148417 - DNA, 17 bp, synthetic construct
  source 1..17: mol_type = other DNA
gtgaggggagccaaggc

SEQ ID NO: 148418 - DNA, 17 bp, synthetic construct
  source 1..17: mol_type = other DNA
ggtgaggggagccaagg

SEQ ID NO: 148419 - DNA, 17 bp, synthetic construct
  source 1..17: mol_type = other DNA
aggtgaggggagccaag

SEQ ID NO: 148420 - DNA, 17 bp, synthetic construct
  source 1..17: mol_type = other DNA
caggtgaggggagccaa

SEQ ID NO: 148421 - DNA, 17 bp, synthetic construct
  source 1..17: mol_type = other DNA
tcaggtgaggggagcca

SEQ ID NO: 148422 - DNA, 17 bp, synthetic construct
  source 1..17: mol_type = other DNA
ctcaggtgaggggagcc

SEQ ID NO: 148423 - DNA, 17 bp, synthetic construct
  source 1..17: mol_type = other DNA
gctcaggtgaggggagc

SEQ ID NO: 148424 - DNA, 17 bp, synthetic construct
  source 1..17: mol_type = other DNA
tgctcaggtgaggggag

SEQ ID NO: 148425 - DNA, 17 bp, synthetic construct
  source 1..17: mol_type = other DNA
ctgctcaggtgagggga

SEQ ID NO: 148426 - DNA, 17 bp, synthetic construct
  source 1..17: mol_type = other DNA
cctgctcaggtgagggg

SEQ ID NO: 148427 - DNA, 17 bp, synthetic construct
  source 1..17: mol_type = other DNA
gcctgctcaggtgaggg

SEQ ID NO: 148428 - DNA, 17 bp, synthetic construct
  source 1..17: mol_type = other DNA
tgcctgctcaggtgagg

SEQ ID NO: 148429 - DNA, 17 bp, synthetic construct
  source 1..17: mol_type = other DNA
ctgcctgctcaggtgag

SEQ ID NO: 148430 - DNA, 17 bp, synthetic construct
  source 1..17: mol_type = other DNA
cctgcctgctcaggtga

SEQ ID NO: 148431 - DNA, 17 bp, synthetic construct
  source 1..17: mol_type = other DNA
ccctgcctgctcaggtg

SEQ ID NO: 148432 - DNA, 17 bp, synthetic construct
  source 1..17: mol_type = other DNA
gccctgcctgctcaggt

SEQ ID NO: 148433 - DNA, 17 bp, synthetic construct
  source 1..17: mol_type = other DNA
ggccctgcctgctcagg

SEQ ID NO: 148434 - DNA, 17 bp, synthetic construct
  source 1..17: mol_type = other DNA
aggccctgcctgctcag

SEQ ID NO: 148435 - DNA, 17 bp, synthetic construct
  source 1..17: mol_type = other DNA
taggccctgcctgctca

SEQ ID NO: 148436 - DNA, 17 bp, synthetic construct
  source 1..17: mol_type = other DNA
ctaggccctgcctgctc

SEQ ID NO: 148437 - DNA, 17 bp, synthetic construct
  source 1..17: mol_type = other DNA
cctaggccctgcctgct

SEQ ID NO: 148438 - DNA, 17 bp, synthetic construct
  source 1..17: mol_type = other DNA
ccctaggccctgcctgc

SEQ ID NO: 148439 - DNA, 17 bp, synthetic construct
  source 1..17: mol_type = other DNA
tccctaggccctgcctg

SEQ ID NO: 148440 - DNA, 17 bp, synthetic construct
  source 1..17: mol_type = other DNA
gtccctaggccctgcct

SEQ ID NO: 148441 - DNA, 17 bp, synthetic construct
  source 1..17: mol_type = other DNA
agtccctaggccctgcc

SEQ ID NO: 148442 - DNA, 17 bp, synthetic construct
  source 1..17: mol_type = other DNA
gagtccctaggccctgc

SEQ ID NO: 148443 - DNA, 17 bp, synthetic construct
  source 1..17: mol_type = other DNA
agagtccctaggccctg

SEQ ID NO: 148444 - DNA, 17 bp, synthetic construct
  source 1..17: mol_type = other DNA
gagagtccctaggccct

SEQ ID NO: 148445 - DNA, 17 bp, synthetic construct
  source 1..17: mol_type = other DNA
tgagagtccctaggccc

SEQ ID NO: 148446 - DNA, 17 bp, synthetic construct
  source 1..17: mol_type = other DNA
ctgagagtccctaggcc

SEQ ID NO: 148447 - DNA, 17 bp, synthetic construct
  source 1..17: mol_type = other DNA
gctgagagtccctaggc

SEQ ID NO: 148448 - DNA, 17 bp, synthetic construct
  source 1..17: mol_type = other DNA
ggctgagagtccctagg

SEQ ID NO: 148449 - DNA, 17 bp, synthetic construct
  source 1..17: mol_type = other DNA
gggctgagagtccctag

SEQ ID NO: 148450 - DNA, 17 bp, synthetic construct
  source 1..17: mol_type = other DNA
tgggctgagagtcccta

SEQ ID NO: 148451 - DNA, 17 bp, synthetic construct
  source 1..17: mol_type = other DNA
gtgggctgagagtccct

SEQ ID NO: 148452 - DNA, 17 bp, synthetic construct
  source 1..17: mol_type = other DNA
ggtgggctgagagtccc

SEQ ID NO: 148453 - DNA, 17 bp, synthetic construct
  source 1..17: mol_type = other DNA
gggtgggctgagagtcc

SEQ ID NO: 148454 - DNA, 17 bp, synthetic construct
  source 1..17: mol_type = other DNA
cgggtgggctgagagtc

SEQ ID NO: 148455 - DNA, 17 bp, synthetic construct
  source 1..17: mol_type = other DNA
acgggtgggctgagagt

SEQ ID NO: 148456 - DNA, 17 bp, synthetic construct
  source 1..17: mol_type = other DNA
gacgggtgggctgagag

SEQ ID NO: 148457 - DNA, 17 bp, synthetic construct
  source 1..17: mol_type = other DNA
ggacgggtgggctgaga

SEQ ID NO: 148458 - DNA, 17 bp, synthetic construct
  source 1..17: mol_type = other DNA
aggacgggtgggctgag

SEQ ID NO: 148459 - DNA, 17 bp, synthetic construct
  source 1..17: mol_type = other DNA
gaggacgggtgggctga

SEQ ID NO: 148460 - DNA, 17 bp, synthetic construct
  source 1..17: mol_type = other DNA
ggaggacgggtgggctg

SEQ ID NO: 148461 - DNA, 17 bp, synthetic construct
  source 1..17: mol_type = other DNA
aggaggacgggtgggct

SEQ ID NO: 148462 - DNA, 17 bp, synthetic construct
  source 1..17: mol_type = other DNA
caggaggacgggtgggc

SEQ ID NO: 148463 - DNA, 17 bp, synthetic construct
  source 1..17: mol_type = other DNA
acaggaggacgggtggg

SEQ ID NO: 148464 - DNA, 17 bp, synthetic construct
  source 1..17: mol_type = other DNA
gacaggaggacgggtgg

SEQ ID NO: 148465 - DNA, 17 bp, synthetic construct
  source 1..17: mol_type = other DNA
ggacaggaggacgggtg

SEQ ID NO: 148466 - DNA, 17 bp, synthetic construct
  source 1..17: mol_type = other DNA
aggacaggaggacgggt

SEQ ID NO: 148467 - DNA, 17 bp, synthetic construct
  source 1..17: mol_type = other DNA
gaggacaggaggacggg

SEQ ID NO: 148468 - DNA, 17 bp, synthetic construct
  source 1..17: mol_type = other DNA
ggaggacaggaggacgg

SEQ ID NO: 148469 - DNA, 17 bp, synthetic construct
  source 1..17: mol_type = other DNA
tggaggacaggaggacg

SEQ ID NO: 148470 - DNA, 17 bp, synthetic construct
  source 1..17: mol_type = other DNA
gtggaggacaggaggac

SEQ ID NO: 148471 - DNA, 17 bp, synthetic construct
  source 1..17: mol_type = other DNA
cgtggaggacaggagga

SEQ ID NO: 148472 - DNA, 17 bp, synthetic construct
  source 1..17: mol_type = other DNA
gcgtggaggacaggagg

SEQ ID NO: 148473 - DNA, 17 bp, synthetic construct
  source 1..17: mol_type = other DNA
tgcgtggaggacaggag

SEQ ID NO: 148474 - DNA, 17 bp, synthetic construct
  source 1..17: mol_type = other DNA
gtgcgtggaggacagga

SEQ ID NO: 148475 - DNA, 17 bp, synthetic construct
  source 1..17: mol_type = other DNA
cgtgcgtggaggacagg

SEQ ID NO: 148476 - DNA, 17 bp, synthetic construct
  source 1..17: mol_type = other DNA
acgtgcgtggaggacag

SEQ ID NO: 148477 - DNA, 17 bp, synthetic construct
  source 1..17: mol_type = other DNA
gacgtgcgtggaggaca

SEQ ID NO: 148478 - DNA, 17 bp, synthetic construct
  source 1..17: mol_type = other DNA
ggacgtgcgtggaggac

SEQ ID NO: 148479 - DNA, 17 bp, synthetic construct
  source 1..17: mol_type = other DNA
tggacgtgcgtggagga

SEQ ID NO: 148480 - DNA, 17 bp, synthetic construct
  source 1..17: mol_type = other DNA
ttggacgtgcgtggagg

SEQ ID NO: 148481 - DNA, 17 bp, synthetic construct
  source 1..17: mol_type = other DNA
cttggacgtgcgtggag

SEQ ID NO: 148482 - DNA, 17 bp, synthetic construct
  source 1..17: mol_type = other DNA
acttggacgtgcgtgga

SEQ ID NO: 148483 - DNA, 17 bp, synthetic construct
  source 1..17: mol_type = other DNA
aacttggacgtgcgtgg

SEQ ID NO: 148484 - DNA, 17 bp, synthetic construct
  source 1..17: mol_type = other DNA
caacttggacgtgcgtg

SEQ ID NO: 148485 - DNA, 17 bp, synthetic construct
  source 1..17: mol_type = other DNA
ccaacttggacgtgcgt

SEQ ID NO: 148486 - DNA, 17 bp, synthetic construct
  source 1..17: mol_type = other DNA
cccaacttggacgtgcg

SEQ ID NO: 148487 - DNA, 17 bp, synthetic construct
  source 1..17: mol_type = other DNA
ccccaacttggacgtgc

SEQ ID NO: 148488 - DNA, 17 bp, synthetic construct
  source 1..17: mol_type = other DNA
tccccaacttggacgtg

SEQ ID NO: 148489 - DNA, 17 bp, synthetic construct
  source 1..17: mol_type = other DNA
ctccccaacttggacgt

SEQ ID NO: 148490 - DNA, 17 bp, synthetic construct
  source 1..17: mol_type = other DNA
tctccccaacttggacg

SEQ ID NO: 148491 - DNA, 17 bp, synthetic construct
  source 1..17: mol_type = other DNA
atctccccaacttggac

SEQ ID NO: 148492 - DNA, 17 bp, synthetic construct
  source 1..17: mol_type = other DNA
gatctccccaacttgga

SEQ ID NO: 148493 - DNA, 17 bp, synthetic construct
  source 1..17: mol_type = other DNA
tgatctccccaacttgg

SEQ ID NO: 148494 - DNA, 17 bp, synthetic construct
  source 1..17: mol_type = other DNA
ttgatctccccaacttg

SEQ ID NO: 148495 - DNA, 17 bp, synthetic construct
  source 1..17: mol_type = other DNA
cttgatctccccaactt

SEQ ID NO: 148496 - DNA, 17 bp, synthetic construct
  source 1..17: mol_type = other DNA
gcttgatctccccaact

SEQ ID NO: 148497 - DNA, 17 bp, synthetic construct
  source 1..17: mol_type = other DNA
ggcttgatctccccaac

SEQ ID NO: 148498 - DNA, 17 bp, synthetic construct
  source 1..17: mol_type = other DNA
gggcttgatctccccaa

SEQ ID NO: 148499 - DNA, 17 bp, synthetic construct
  source 1..17: mol_type = other DNA
agggcttgatctcccca

SEQ ID NO: 148500 - DNA, 17 bp, synthetic construct
  source 1..17: mol_type = other DNA
aagggcttgatctcccc

SEQ ID NO: 148501 - DNA, 17 bp, synthetic construct
  source 1..17: mol_type = other DNA
caagggcttgatctccc

SEQ ID NO: 148502 - DNA, 17 bp, synthetic construct
  source 1..17: mol_type = other DNA
ccaagggcttgatctcc

SEQ ID NO: 148503 - DNA, 17 bp, synthetic construct
  source 1..17: mol_type = other DNA
gccaagggcttgatctc

SEQ ID NO: 148504 - DNA, 17 bp, synthetic construct
  source 1..17: mol_type = other DNA
tgccaagggcttgatct

SEQ ID NO: 148505 - DNA, 17 bp, synthetic construct
  source 1..17: mol_type = other DNA
ctgccaagggcttgatc

SEQ ID NO: 148506 - DNA, 17 bp, synthetic construct
  source 1..17: mol_type = other DNA
cctgccaagggcttgat

SEQ ID NO: 148507 - DNA, 17 bp, synthetic construct
  source 1..17: mol_type = other DNA
ccctgccaagggcttga

SEQ ID NO: 148508 - DNA, 17 bp, synthetic construct
  source 1..17: mol_type = other DNA
tccctgccaagggcttg

SEQ ID NO: 148509 - DNA, 17 bp, synthetic construct
  source 1..17: mol_type = other DNA
gtccctgccaagggctt

SEQ ID NO: 148510 - DNA, 17 bp, synthetic construct
  source 1..17: mol_type = other DNA
agtccctgccaagggct

SEQ ID NO: 148511 - DNA, 17 bp, synthetic construct
  source 1..17: mol_type = other DNA
cagtccctgccaagggc

SEQ ID NO: 148512 - DNA, 17 bp, synthetic construct
  source 1..17: mol_type = other DNA
acagtccctgccaaggg

SEQ ID NO: 148513 - DNA, 17 bp, synthetic construct
  source 1..17: mol_type = other DNA
cacagtccctgccaagg

SEQ ID NO: 148514 - DNA, 17 bp, synthetic construct
  source 1..17: mol_type = other DNA
gcacagtccctgccaag

SEQ ID NO: 148515 - DNA, 17 bp, synthetic construct
  source 1..17: mol_type = other DNA
agcacagtccctgccaa

SEQ ID NO: 148516 - DNA, 17 bp, synthetic construct
  source 1..17: mol_type = other DNA
aagcacagtccctgcca

SEQ ID NO: 148517 - DNA, 17 bp, synthetic construct
  source 1..17: mol_type = other DNA
aaagcacagtccctgcc

SEQ ID NO: 148518 - DNA, 17 bp, synthetic construct
  source 1..17: mol_type = other DNA
taaagcacagtccctgc

SEQ ID NO: 148519 - DNA, 17 bp, synthetic construct
  source 1..17: mol_type = other DNA
ctaaagcacagtccctg

SEQ ID NO: 148520 - DNA, 17 bp, synthetic construct
  source 1..17: mol_type = other DNA
actaaagcacagtccct

SEQ ID NO: 148521 - DNA, 17 bp, synthetic construct
  source 1..17: mol_type = other DNA
gactaaagcacagtccc

SEQ ID NO: 148522 - DNA, 17 bp, synthetic construct
  source 1..17: mol_type = other DNA
tgactaaagcacagtcc

SEQ ID NO: 148523 - DNA, 17 bp, synthetic construct
  source 1..17: mol_type = other DNA
gtgactaaagcacagtc

SEQ ID NO: 148524 - DNA, 17 bp, synthetic construct
  source 1..17: mol_type = other DNA
ggtgactaaagcacagt

SEQ ID NO: 148525 - DNA, 17 bp, synthetic construct
  source 1..17: mol_type = other DNA
tggtgactaaagcacag

SEQ ID NO: 148526 - DNA, 17 bp, synthetic construct
  source 1..17: mol_type = other DNA
ctggtgactaaagcaca

SEQ ID NO: 148527 - DNA, 17 bp, synthetic construct
  source 1..17: mol_type = other DNA
tctggtgactaaagcac

SEQ ID NO: 148528 - DNA, 17 bp, synthetic construct
  source 1..17: mol_type = other DNA
atctggtgactaaagca

SEQ ID NO: 148529 - DNA, 17 bp, synthetic construct
  source 1..17: mol_type = other DNA
catctggtgactaaagc

SEQ ID NO: 148530 - DNA, 17 bp, synthetic construct
  source 1..17: mol_type = other DNA
gcatctggtgactaaag

SEQ ID NO: 148531 - DNA, 17 bp, synthetic construct
  source 1..17: mol_type = other DNA
tgcatctggtgactaaa

SEQ ID NO: 148532 - DNA, 17 bp, synthetic construct
  source 1..17: mol_type = other DNA
gtgcatctggtgactaa

SEQ ID NO: 148533 - DNA, 17 bp, synthetic construct
  source 1..17: mol_type = other DNA
cgtgcatctggtgacta

SEQ ID NO: 148534 - DNA, 17 bp, synthetic construct
  source 1..17: mol_type = other DNA
acgtgcatctggtgact

SEQ ID NO: 148535 - DNA, 17 bp, synthetic construct
  source 1..17: mol_type = other DNA
gacgtgcatctggtgac

SEQ ID NO: 148536 - DNA, 17 bp, synthetic construct
  source 1..17: mol_type = other DNA
ggacgtgcatctggtga

SEQ ID NO: 148537 - DNA, 17 bp, synthetic construct
  source 1..17: mol_type = other DNA
aggacgtgcatctggtg

SEQ ID NO: 148538 - DNA, 17 bp, synthetic construct
  source 1..17: mol_type = other DNA
caggacgtgcatctggt

SEQ ID NO: 148539 - DNA, 17 bp, synthetic construct
  source 1..17: mol_type = other DNA
acaggacgtgcatctgg

SEQ ID NO: 148540 - DNA, 17 bp, synthetic construct
  source 1..17: mol_type = other DNA
cacaggacgtgcatctg

SEQ ID NO: 148541 - DNA, 17 bp, synthetic construct
  source 1..17: mol_type = other DNA
ccacaggacgtgcatct

SEQ ID NO: 148542 - DNA, 17 bp, synthetic construct
  source 1..17: mol_type = other DNA
gccacaggacgtgcatc

SEQ ID NO: 148543 - DNA, 17 bp, synthetic construct
  source 1..17: mol_type = other DNA
ggccacaggacgtgcat

SEQ ID NO: 148544 - DNA, 17 bp, synthetic construct
  source 1..17: mol_type = other DNA
cggccacaggacgtgca

SEQ ID NO: 148545 - DNA, 17 bp, synthetic construct
  source 1..17: mol_type = other DNA
ccggccacaggacgtgc

SEQ ID NO: 148546 - DNA, 17 bp, synthetic construct
  source 1..17: mol_type = other DNA
cccggccacaggacgtg

SEQ ID NO: 148547 - DNA, 17 bp, synthetic construct
  source 1..17: mol_type = other DNA
ccccggccacaggacgt

SEQ ID NO: 148548 - DNA, 17 bp, synthetic construct
  source 1..17: mol_type = other DNA
tccccggccacaggacg

SEQ ID NO: 148549 - DNA, 17 bp, synthetic construct
  source 1..17: mol_type = other DNA
ttccccggccacaggac

SEQ ID NO: 148550 - DNA, 17 bp, synthetic construct
  source 1..17: mol_type = other DNA
cttccccggccacagga

SEQ ID NO: 148551 - DNA, 17 bp, synthetic construct
  source 1..17: mol_type = other DNA
ccttccccggccacagg

SEQ ID NO: 148552 - DNA, 17 bp, synthetic construct
  source 1..17: mol_type = other DNA
gccttccccggccacag

SEQ ID NO: 148553 - DNA, 17 bp, synthetic construct
  source 1..17: mol_type = other DNA
tgccttccccggccaca

SEQ ID NO: 148554 - DNA, 17 bp, synthetic construct
  source 1..17: mol_type = other DNA
ctgccttccccggccac

SEQ ID NO: 148555 - DNA, 17 bp, synthetic construct
  source 1..17: mol_type = other DNA
gctgccttccccggcca

SEQ ID NO: 148556 - DNA, 17 bp, synthetic construct
  source 1..17: mol_type = other DNA
ggctgccttccccggcc

SEQ ID NO: 148557 - DNA, 17 bp, synthetic construct
  source 1..17: mol_type = other DNA
gggctgccttccccggc

SEQ ID NO: 148558 - DNA, 17 bp, synthetic construct
  source 1..17: mol_type = other DNA
agggctgccttccccgg

SEQ ID NO: 148559 - DNA, 17 bp, synthetic construct
  source 1..17: mol_type = other DNA
cagggctgccttccccg

SEQ ID NO: 148560 - DNA, 17 bp, synthetic construct
  source 1..17: mol_type = other DNA
gcagggctgccttcccc

SEQ ID NO: 148561 - DNA, 17 bp, synthetic construct
  source 1..17: mol_type = other DNA
tgcagggctgccttccc

SEQ ID NO: 148562 - DNA, 17 bp, synthetic construct
  source 1..17: mol_type = other DNA
gtgcagggctgccttcc

SEQ ID NO: 148563 - DNA, 17 bp, synthetic construct
  source 1..17: mol_type = other DNA
tgtgcagggctgccttc

SEQ ID NO: 148564 - DNA, 17 bp, synthetic construct
  source 1..17: mol_type = other DNA
ctgtgcagggctgcctt

SEQ ID NO: 148565 - DNA, 17 bp, synthetic construct
  source 1..17: mol_type = other DNA
tctgtgcagggctgcct

SEQ ID NO: 148566 - DNA, 17 bp, synthetic construct
  source 1..17: mol_type = other DNA
ctctgtgcagggctgcc

SEQ ID NO: 148567 - DNA, 17 bp, synthetic construct
  source 1..17: mol_type = other DNA
gctctgtgcagggctgc

SEQ ID NO: 148568 - DNA, 17 bp, synthetic construct
  source 1..17: mol_type = other DNA
tgctctgtgcagggctg

SEQ ID NO: 148569 - DNA, 17 bp, synthetic construct
  source 1..17: mol_type = other DNA
ctgctctgtgcagggct

SEQ ID NO: 148570 - DNA, 17 bp, synthetic construct
  source 1..17: mol_type = other DNA
gctgctctgtgcagggc

SEQ ID NO: 148571 - DNA, 17 bp, synthetic construct
  source 1..17: mol_type = other DNA
agctgctctgtgcaggg

SEQ ID NO: 148572 - DNA, 17 bp, synthetic construct
  source 1..17: mol_type = other DNA
aagctgctctgtgcagg

SEQ ID NO: 148573 - DNA, 17 bp, synthetic construct
  source 1..17: mol_type = other DNA
gaagctgctctgtgcag

SEQ ID NO: 148574 - DNA, 17 bp, synthetic construct
  source 1..17: mol_type = other DNA
tgaagctgctctgtgca

SEQ ID NO: 148575 - DNA, 17 bp, synthetic construct
  source 1..17: mol_type = other DNA
atgaagctgctctgtgc

SEQ ID NO: 148576 - DNA, 17 bp, synthetic construct
  source 1..17: mol_type = other DNA
catgaagctgctctgtg

SEQ ID NO: 148577 - DNA, 17 bp, synthetic construct
  source 1..17: mol_type = other DNA
acatgaagctgctctgt

SEQ ID NO: 148578 - DNA, 17 bp, synthetic construct
  source 1..17: mol_type = other DNA
aacatgaagctgctctg

SEQ ID NO: 148579 - DNA, 17 bp, synthetic construct
  source 1..17: mol_type = other DNA
taacatgaagctgctct

SEQ ID NO: 148580 - DNA, 17 bp, synthetic construct
  source 1..17: mol_type = other DNA
ctaacatgaagctgctc

SEQ ID NO: 148581 - DNA, 17 bp, synthetic construct
  source 1..17: mol_type = other DNA
cctaacatgaagctgct

SEQ ID NO: 148582 - DNA, 17 bp, synthetic construct
  source 1..17: mol_type = other DNA
ccctaacatgaagctgc

SEQ ID NO: 148583 - DNA, 17 bp, synthetic construct
  source 1..17: mol_type = other DNA
cccctaacatgaagctg

SEQ ID NO: 148584 - DNA, 17 bp, synthetic construct
  source 1..17: mol_type = other DNA
tcccctaacatgaagct

SEQ ID NO: 148585 - DNA, 17 bp, synthetic construct
  source 1..17: mol_type = other DNA
gtcccctaacatgaagc

SEQ ID NO: 148586 - DNA, 17 bp, synthetic construct
  source 1..17: mol_type = other DNA
tgtcccctaacatgaag

SEQ ID NO: 148587 - DNA, 17 bp, synthetic construct
  source 1..17: mol_type = other DNA
gtgtcccctaacatgaa

SEQ ID NO: 148588 - DNA, 17 bp, synthetic construct
  source 1..17: mol_type = other DNA
tgtgtcccctaacatga

SEQ ID NO: 148589 - DNA, 17 bp, synthetic construct
  source 1..17: mol_type = other DNA
gtgtgtcccctaacatg

SEQ ID NO: 148590 - DNA, 17 bp, synthetic construct
  source 1..17: mol_type = other DNA
ggtgtgtcccctaacat

SEQ ID NO: 148591 - DNA, 17 bp, synthetic construct
  source 1..17: mol_type = other DNA
gggtgtgtcccctaaca

SEQ ID NO: 148592 - DNA, 17 bp, synthetic construct
  source 1..17: mol_type = other DNA
ggggtgtgtcccctaac

SEQ ID NO: 148593 - DNA, 17 bp, synthetic construct
  source 1..17: mol_type = other DNA
tggggtgtgtcccctaa

SEQ ID NO: 148594 - DNA, 17 bp, synthetic construct
  source 1..17: mol_type = other DNA
ttggggtgtgtccccta

SEQ ID NO: 148595 - DNA, 17 bp, synthetic construct
  source 1..17: mol_type = other DNA
tttggggtgtgtcccct

SEQ ID NO: 148596 - DNA, 17 bp, synthetic construct
  source 1..17: mol_type = other DNA
ctttggggtgtgtcccc

SEQ ID NO: 148597 - DNA, 17 bp, synthetic construct
  source 1..17: mol_type = other DNA
actttggggtgtgtccc

SEQ ID NO: 148598 - DNA, 17 bp, synthetic construct
  source 1..17: mol_type = other DNA
cactttggggtgtgtcc

SEQ ID NO: 148599 - DNA, 17 bp, synthetic construct
  source 1..17: mol_type = other DNA
tcactttggggtgtgtc

SEQ ID NO: 148600 - DNA, 17 bp, synthetic construct
  source 1..17: mol_type = other DNA
atcactttggggtgtgt

SEQ ID NO: 148601 - DNA, 17 bp, synthetic construct
  source 1..17: mol_type = other DNA
catcactttggggtgtg

SEQ ID NO: 148602 - DNA, 17 bp, synthetic construct
  source 1..17: mol_type = other DNA
ccatcactttggggtgt

SEQ ID NO: 148603 - DNA, 17 bp, synthetic construct
  source 1..17: mol_type = other DNA
cccatcactttggggtg

SEQ ID NO: 148604 - DNA, 17 bp, synthetic construct
  source 1..17: mol_type = other DNA
ccccatcactttggggt

SEQ ID NO: 148605 - DNA, 17 bp, synthetic construct
  source 1..17: mol_type = other DNA
accccatcactttgggg

SEQ ID NO: 148606 - DNA, 17 bp, synthetic construct
  source 1..17: mol_type = other DNA
caccccatcactttggg

SEQ ID NO: 148607 - DNA, 17 bp, synthetic construct
  source 1..17: mol_type = other DNA
ccaccccatcactttgg

SEQ ID NO: 148608 - DNA, 17 bp, synthetic construct
  source 1..17: mol_type = other DNA
gccaccccatcactttg

SEQ ID NO: 148609 - DNA, 17 bp, synthetic construct
  source 1..17: mol_type = other DNA
agccaccccatcacttt

SEQ ID NO: 148610 - DNA, 17 bp, synthetic construct
  source 1..17: mol_type = other DNA
cagccaccccatcactt

SEQ ID NO: 148611 - DNA, 17 bp, synthetic construct
  source 1..17: mol_type = other DNA
ccagccaccccatcact

SEQ ID NO: 148612 - DNA, 17 bp, synthetic construct
  source 1..17: mol_type = other DNA
accagccaccccatcac

SEQ ID NO: 148613 - DNA, 17 bp, synthetic construct
  source 1..17: mol_type = other DNA
caccagccaccccatca

SEQ ID NO: 148614 - DNA, 17 bp, synthetic construct
  source 1..17: mol_type = other DNA
ccaccagccaccccatc

SEQ ID NO: 148615 - DNA, 17 bp, synthetic construct
  source 1..17: mol_type = other DNA
accaccagccaccccat

SEQ ID NO: 148616 - DNA, 17 bp, synthetic construct
  source 1..17: mol_type = other DNA
caccaccagccacccca

SEQ ID NO: 148617 - DNA, 17 bp, synthetic construct
  source 1..17: mol_type = other DNA
ccaccaccagccacccc

SEQ ID NO: 148618 - DNA, 17 bp, synthetic construct
  source 1..17: mol_type = other DNA
cccaccaccagccaccc

SEQ ID NO: 148619 - DNA, 17 bp, synthetic construct
  source 1..17: mol_type = other DNA
gcccaccaccagccacc

SEQ ID NO: 148620 - DNA, 17 bp, synthetic construct
  source 1..17: mol_type = other DNA
tgcccaccaccagccac

SEQ ID NO: 148621 - DNA, 17 bp, synthetic construct
  source 1..17: mol_type = other DNA
gtgcccaccaccagcca

SEQ ID NO: 148622 - DNA, 17 bp, synthetic construct
  source 1..17: mol_type = other DNA
agtgcccaccaccagcc

SEQ ID NO: 148623 - DNA, 17 bp, synthetic construct
  source 1..17: mol_type = other DNA
aagtgcccaccaccagc

SEQ ID NO: 148624 - DNA, 17 bp, synthetic construct
  source 1..17: mol_type = other DNA
gaagtgcccaccaccag

SEQ ID NO: 148625 - DNA, 17 bp, synthetic construct
  source 1..17: mol_type = other DNA
agaagtgcccaccacca

SEQ ID NO: 148626 - DNA, 17 bp, synthetic construct
  source 1..17: mol_type = other DNA
gagaagtgcccaccacc

SEQ ID NO: 148627 - DNA, 17 bp, synthetic construct
  source 1..17: mol_type = other DNA
agagaagtgcccaccac

SEQ ID NO: 148628 - DNA, 17 bp, synthetic construct
  source 1..17: mol_type = other DNA
cagagaagtgcccacca

SEQ ID NO: 148629 - DNA, 17 bp, synthetic construct
  source 1..17: mol_type = other DNA
ccagagaagtgcccacc

SEQ ID NO: 148630 - DNA, 17 bp, synthetic construct
  source 1..17: mol_type = other DNA
gccagagaagtgcccac

SEQ ID NO: 148631 - DNA, 17 bp, synthetic construct
  source 1..17: mol_type = other DNA
agccagagaagtgccca

SEQ ID NO: 148632 - DNA, 17 bp, synthetic construct
  source 1..17: mol_type = other DNA
tagccagagaagtgccc

SEQ ID NO: 148633 - DNA, 17 bp, synthetic construct
  source 1..17: mol_type = other DNA
gtagccagagaagtgcc

SEQ ID NO: 148634 - DNA, 17 bp, synthetic construct
  source 1..17: mol_type = other DNA
tgtagccagagaagtgc

SEQ ID NO: 148635 - DNA, 17 bp, synthetic construct
  source 1..17: mol_type = other DNA
ttgtagccagagaagtg

SEQ ID NO: 148636 - DNA, 17 bp, synthetic construct
  source 1..17: mol_type = other DNA
cttgtagccagagaagt

SEQ ID NO: 148637 - DNA, 17 bp, synthetic construct
  source 1..17: mol_type = other DNA
tcttgtagccagagaag

SEQ ID NO: 148638 - DNA, 17 bp, synthetic construct
  source 1..17: mol_type = other DNA
atcttgtagccagagaa

SEQ ID NO: 148639 - DNA, 17 bp, synthetic construct
  source 1..17: mol_type = other DNA
catcttgtagccagaga

SEQ ID NO: 148640 - DNA, 17 bp, synthetic construct
  source 1..17: mol_type = other DNA
ccatcttgtagccagag

SEQ ID NO: 148641 - DNA, 17 bp, synthetic construct
  source 1..17: mol_type = other DNA
tccatcttgtagccaga

SEQ ID NO: 148642 - DNA, 17 bp, synthetic construct
  source 1..17: mol_type = other DNA
ctccatcttgtagccag

SEQ ID NO: 148643 - DNA, 17 bp, synthetic construct
  source 1..17: mol_type = other DNA
cctccatcttgtagcca

SEQ ID NO: 148644 - DNA, 17 bp, synthetic construct
  source 1..17: mol_type = other DNA
gcctccatcttgtagcc

SEQ ID NO: 148645 - DNA, 17 bp, synthetic construct
  source 1..17: mol_type = other DNA
ggcctccatcttgtagc

SEQ ID NO: 148646 - DNA, 17 bp, synthetic construct
  source 1..17: mol_type = other DNA
gggcctccatcttgtag

SEQ ID NO: 148647 - DNA, 17 bp, synthetic construct
  source 1..17: mol_type = other DNA
tgggcctccatcttgta

SEQ ID NO: 148648 - DNA, 17 bp, synthetic construct
  source 1..17: mol_type = other DNA
ctgggcctccatcttgt

SEQ ID NO: 148649 - DNA, 17 bp, synthetic construct
  source 1..17: mol_type = other DNA
cctgggcctccatcttg

SEQ ID NO: 148650 - DNA, 17 bp, synthetic construct
  source 1..17: mol_type = other DNA
acctgggcctccatctt

SEQ ID NO: 148651 - DNA, 17 bp, synthetic construct
  source 1..17: mol_type = other DNA
cacctgggcctccatct

SEQ ID NO: 148652 - DNA, 17 bp, synthetic construct
  source 1..17: mol_type = other DNA
ccacctgggcctccatc

SEQ ID NO: 148653 - DNA, 17 bp, synthetic construct
  source 1..17: mol_type = other DNA
accacctgggcctccat

SEQ ID NO: 148654 - DNA, 17 bp, synthetic construct
  source 1..17: mol_type = other DNA
gaccacctgggcctcca

SEQ ID NO: 148655 - DNA, 17 bp, synthetic construct
  source 1..17: mol_type = other DNA
ggaccacctgggcctcc

SEQ ID NO: 148656 - DNA, 17 bp, synthetic construct
  source 1..17: mol_type = other DNA
tggaccacctgggcctc

SEQ ID NO: 148657 - DNA, 17 bp, synthetic construct
  source 1..17: mol_type = other DNA
ctggaccacctgggcct

SEQ ID NO: 148658 - DNA, 17 bp, synthetic construct
  source 1..17: mol_type = other DNA
gctggaccacctgggcc

SEQ ID NO: 148659 - DNA, 17 bp, synthetic construct
  source 1..17: mol_type = other DNA
ggctggaccacctgggc

SEQ ID NO: 148660 - DNA, 17 bp, synthetic construct
  source 1..17: mol_type = other DNA
gggctggaccacctggg

SEQ ID NO: 148661 - DNA, 17 bp, synthetic construct
  source 1..17: mol_type = other DNA
tgggctggaccacctgg

SEQ ID NO: 148662 - DNA, 17 bp, synthetic construct
  source 1..17: mol_type = other DNA
ttgggctggaccacctg

SEQ ID NO: 148663 - DNA, 17 bp, synthetic construct
  source 1..17: mol_type = other DNA
cttgggctggaccacct

SEQ ID NO: 148664 - DNA, 17 bp, synthetic construct
  source 1..17: mol_type = other DNA
ccttgggctggaccacc

SEQ ID NO: 148665 - DNA, 17 bp, synthetic construct
  source 1..17: mol_type = other DNA
tccttgggctggaccac

SEQ ID NO: 148666 - DNA, 17 bp, synthetic construct
  source 1..17: mol_type = other DNA
ctccttgggctggacca

SEQ ID NO: 148667 - DNA, 17 bp, synthetic construct
  source 1..17: mol_type = other DNA
cctccttgggctggacc

SEQ ID NO: 148668 - DNA, 17 bp, synthetic construct
  source 1..17: mol_type = other DNA
ccctccttgggctggac

SEQ ID NO: 148669 - DNA, 17 bp, synthetic construct
  source 1..17: mol_type = other DNA
gccctccttgggctgga

SEQ ID NO: 148670 - DNA, 17 bp, synthetic construct
  source 1..17: mol_type = other DNA
tgccctccttgggctgg

SEQ ID NO: 148671 - DNA, 17 bp, synthetic construct
  source 1..17: mol_type = other DNA
gtgccctccttgggctg

SEQ ID NO: 148672 - DNA, 17 bp, synthetic construct
  source 1..17: mol_type = other DNA
agtgccctccttgggct

SEQ ID NO: 148673 - DNA, 17 bp, synthetic construct
  source 1..17: mol_type = other DNA
cagtgccctccttgggc

SEQ ID NO: 148674 - DNA, 17 bp, synthetic construct
  source 1..17: mol_type = other DNA
gcagtgccctccttggg

SEQ ID NO: 148675 - DNA, 17 bp, synthetic construct
  source 1..17: mol_type = other DNA
tgcagtgccctccttgg

SEQ ID NO: 148676 - DNA, 17 bp, synthetic construct
  source 1..17: mol_type = other DNA
gtgcagtgccctccttg

SEQ ID NO: 148677 - DNA, 17 bp, synthetic construct
  source 1..17: mol_type = other DNA
cgtgcagtgccctcctt

SEQ ID NO: 148678 - DNA, 17 bp, synthetic construct
  source 1..17: mol_type = other DNA
ccgtgcagtgccctcct

SEQ ID NO: 148679 - DNA, 17 bp, synthetic construct
  source 1..17: mol_type = other DNA
tccgtgcagtgccctcc

SEQ ID NO: 148680 - DNA, 17 bp, synthetic construct
  source 1..17: mol_type = other DNA
ctccgtgcagtgccctc

SEQ ID NO: 148681 - DNA, 17 bp, synthetic construct
  source 1..17: mol_type = other DNA
gctccgtgcagtgccct

SEQ ID NO: 148682 - DNA, 17 bp, synthetic construct
  source 1..17: mol_type = other DNA
tgctccgtgcagtgccc

SEQ ID NO: 148683 - DNA, 17 bp, synthetic construct
  source 1..17: mol_type = other DNA
ctgctccgtgcagtgcc

SEQ ID NO: 148684 - DNA, 17 bp, synthetic construct
  source 1..17: mol_type = other DNA
tctgctccgtgcagtgc

SEQ ID NO: 148685 - DNA, 17 bp, synthetic construct
  source 1..17: mol_type = other DNA
atctgctccgtgcagtg

SEQ ID NO: 148686 - DNA, 17 bp, synthetic construct
  source 1..17: mol_type = other DNA
tatctgctccgtgcagt

SEQ ID NO: 148687 - DNA, 17 bp, synthetic construct
  source 1..17: mol_type = other DNA
ttatctgctccgtgcag

SEQ ID NO: 148688 - DNA, 17 bp, synthetic construct
  source 1..17: mol_type = other DNA
gttatctgctccgtgca

SEQ ID NO: 148689 - DNA, 17 bp, synthetic construct
  source 1..17: mol_type = other DNA
ggttatctgctccgtgc

SEQ ID NO: 148690 - DNA, 17 bp, synthetic construct
  source 1..17: mol_type = other DNA
tggttatctgctccgtg

SEQ ID NO: 148691 - DNA, 17 bp, synthetic construct
  source 1..17: mol_type = other DNA
ttggttatctgctccgt

SEQ ID NO: 148692 - DNA, 17 bp, synthetic construct
  source 1..17: mol_type = other DNA
cttggttatctgctccg

SEQ ID NO: 148693 - DNA, 17 bp, synthetic construct
  source 1..17: mol_type = other DNA
ccttggttatctgctcc

SEQ ID NO: 148694 - DNA, 17 bp, synthetic construct
  source 1..17: mol_type = other DNA
cccttggttatctgctc

SEQ ID NO: 148695 - DNA, 17 bp, synthetic construct
  source 1..17: mol_type = other DNA
gcccttggttatctgct

SEQ ID NO: 148696 - DNA, 17 bp, synthetic construct
  source 1..17: mol_type = other DNA
tgcccttggttatctgc

SEQ ID NO: 148697 - DNA, 17 bp, synthetic construct
  source 1..17: mol_type = other DNA
ctgcccttggttatctg

SEQ ID NO: 148698 - DNA, 17 bp, synthetic construct
  source 1..17: mol_type = other DNA
actgcccttggttatct

SEQ ID NO: 148699 - DNA, 17 bp, synthetic construct
  source 1..17: mol_type = other DNA
gactgcccttggttatc

SEQ ID NO: 148700 - DNA, 17 bp, synthetic construct
  source 1..17: mol_type = other DNA
tgactgcccttggttat

SEQ ID NO: 148701 - DNA, 17 bp, synthetic construct
  source 1..17: mol_type = other DNA
ctgactgcccttggtta

SEQ ID NO: 148702 - DNA, 17 bp, synthetic construct
  source 1..17: mol_type = other DNA
gctgactgcccttggtt

SEQ ID NO: 148703 - DNA, 17 bp, synthetic construct
  source 1..17: mol_type = other DNA
ggctgactgcccttggt

SEQ ID NO: 148704 - DNA, 17 bp, synthetic construct
  source 1..17: mol_type = other DNA
aggctgactgcccttgg

SEQ ID NO: 148705 - DNA, 17 bp, synthetic construct
  source 1..17: mol_type = other DNA
caggctgactgcccttg

SEQ ID NO: 148706 - DNA, 17 bp, synthetic construct
  source 1..17: mol_type = other DNA
ccaggctgactgccctt

SEQ ID NO: 148707 - DNA, 17 bp, synthetic construct
  source 1..17: mol_type = other DNA
cccaggctgactgccct

SEQ ID NO: 148708 - DNA, 17 bp, synthetic construct
  source 1..17: mol_type = other DNA
gcccaggctgactgccc

SEQ ID NO: 148709 - DNA, 17 bp, synthetic construct
  source 1..17: mol_type = other DNA
tgcccaggctgactgcc

SEQ ID NO: 148710 - DNA, 17 bp, synthetic construct
  source 1..17: mol_type = other DNA
ctgcccaggctgactgc

SEQ ID NO: 148711 - DNA, 17 bp, synthetic construct
  source 1..17: mol_type = other DNA
cctgcccaggctgactg

SEQ ID NO: 148712 - DNA, 17 bp, synthetic construct
  source 1..17: mol_type = other DNA
ccctgcccaggctgact

SEQ ID NO: 148713 - DNA, 17 bp, synthetic construct
  source 1..17: mol_type = other DNA
cccctgcccaggctgac

SEQ ID NO: 148714 - DNA, 17 bp, synthetic construct
  source 1..17: mol_type = other DNA
tcccctgcccaggctga

SEQ ID NO: 148715 - DNA, 17 bp, synthetic construct
  source 1..17: mol_type = other DNA
ctcccctgcccaggctg

SEQ ID NO: 148716 - DNA, 17 bp, synthetic construct
  source 1..17: mol_type = other DNA
cctcccctgcccaggct

SEQ ID NO: 148717 - DNA, 17 bp, synthetic construct
  source 1..17: mol_type = other DNA
ccctcccctgcccaggc

SEQ ID NO: 148718 - DNA, 17 bp, synthetic construct
  source 1..17: mol_type = other DNA
cccctcccctgcccagg

SEQ ID NO: 148719 - DNA, 17 bp, synthetic construct
  source 1..17: mol_type = other DNA
gcccctcccctgcccag

SEQ ID NO: 148720 - DNA, 17 bp, synthetic construct
  source 1..17: mol_type = other DNA
agcccctcccctgccca

SEQ ID NO: 148721 - DNA, 17 bp, synthetic construct
  source 1..17: mol_type = other DNA
cagcccctcccctgccc

SEQ ID NO: 148722 - DNA, 17 bp, synthetic construct
  source 1..17: mol_type = other DNA
gcagcccctcccctgcc

SEQ ID NO: 148723 - DNA, 17 bp, synthetic construct
  source 1..17: mol_type = other DNA
ggcagcccctcccctgc

SEQ ID NO: 148724 - DNA, 17 bp, synthetic construct
  source 1..17: mol_type = other DNA
aggcagcccctcccctg

SEQ ID NO: 148725 - DNA, 17 bp, synthetic construct
  source 1..17: mol_type = other DNA
caggcagcccctcccct

SEQ ID NO: 148726 - DNA, 17 bp, synthetic construct
  source 1..17: mol_type = other DNA
ccaggcagcccctcccc

SEQ ID NO: 148727 - DNA, 17 bp, synthetic construct
  source 1..17: mol_type = other DNA
cccaggcagcccctccc

SEQ ID NO: 148728 - DNA, 17 bp, synthetic construct
  source 1..17: mol_type = other DNA
ccccaggcagcccctcc

SEQ ID NO: 148729 - DNA, 17 bp, synthetic construct
  source 1..17: mol_type = other DNA
cccccaggcagcccctc

SEQ ID NO: 148730 - DNA, 17 bp, synthetic construct
  source 1..17: mol_type = other DNA
ccccccaggcagcccct

SEQ ID NO: 148731 - DNA, 17 bp, synthetic construct
  source 1..17: mol_type = other DNA
cccccccaggcagcccc

SEQ ID NO: 148732 - DNA, 17 bp, synthetic construct
  source 1..17: mol_type = other DNA
tcccccccaggcagccc

SEQ ID NO: 148733 - DNA, 17 bp, synthetic construct
  source 1..17: mol_type = other DNA
ctcccccccaggcagcc

SEQ ID NO: 148734 - DNA, 17 bp, synthetic construct
  source 1..17: mol_type = other DNA
cctcccccccaggcagc

SEQ ID NO: 148735 - DNA, 17 bp, synthetic construct
  source 1..17: mol_type = other DNA
ccctcccccccaggcag

SEQ ID NO: 148736 - DNA, 17 bp, synthetic construct
  source 1..17: mol_type = other DNA
cccctcccccccaggca

SEQ ID NO: 148737 - DNA, 17 bp, synthetic construct
  source 1..17: mol_type = other DNA
acccctcccccccaggc

SEQ ID NO: 148738 - DNA, 17 bp, synthetic construct
  source 1..17: mol_type = other DNA
aacccctcccccccagg

SEQ ID NO: 148739 - DNA, 17 bp, synthetic construct
  source 1..17: mol_type = other DNA
caacccctcccccccag

SEQ ID NO: 148740 - DNA, 17 bp, synthetic construct
  source 1..17: mol_type = other DNA
gcaacccctccccccca

SEQ ID NO: 148741 - DNA, 17 bp, synthetic construct
  source 1..17: mol_type = other DNA
ggcaacccctccccccc

SEQ ID NO: 148742 - DNA, 17 bp, synthetic construct
  source 1..17: mol_type = other DNA
aggcaacccctcccccc

SEQ ID NO: 148743 - DNA, 17 bp, synthetic construct
  source 1..17: mol_type = other DNA
caggcaacccctccccc

SEQ ID NO: 148744 - DNA, 17 bp, synthetic construct
  source 1..17: mol_type = other DNA
ccaggcaacccctcccc

SEQ ID NO: 148745 - DNA, 17 bp, synthetic construct
  source 1..17: mol_type = other DNA
cccaggcaacccctccc

SEQ ID NO: 148746 - DNA, 17 bp, synthetic construct
  source 1..17: mol_type = other DNA
acccaggcaacccctcc

SEQ ID NO: 148747 - DNA, 17 bp, synthetic construct
  source 1..17: mol_type = other DNA
aacccaggcaacccctc

SEQ ID NO: 148748 - DNA, 17 bp, synthetic construct
  source 1..17: mol_type = other DNA
caacccaggcaacccct

SEQ ID NO: 148749 - DNA, 17 bp, synthetic construct
  source 1..17: mol_type = other DNA
ccaacccaggcaacccc

SEQ ID NO: 148750 - DNA, 17 bp, synthetic construct
  source 1..17: mol_type = other DNA
cccaacccaggcaaccc

SEQ ID NO: 148751 - DNA, 17 bp, synthetic construct
  source 1..17: mol_type = other DNA
ccccaacccaggcaacc

SEQ ID NO: 148752 - DNA, 17 bp, synthetic construct
  source 1..17: mol_type = other DNA
tccccaacccaggcaac

SEQ ID NO: 148753 - DNA, 17 bp, synthetic construct
  source 1..17: mol_type = other DNA
ctccccaacccaggcaa

SEQ ID NO: 148754 - DNA, 17 bp, synthetic construct
  source 1..17: mol_type = other DNA
cctccccaacccaggca

SEQ ID NO: 148755 - DNA, 17 bp, synthetic construct
  source 1..17: mol_type = other DNA
ccctccccaacccaggc

SEQ ID NO: 148756 - DNA, 17 bp, synthetic construct
  source 1..17: mol_type = other DNA
cccctccccaacccagg

SEQ ID NO: 148757 - DNA, 17 bp, synthetic construct
  source 1..17: mol_type = other DNA
gcccctccccaacccag

SEQ ID NO: 148758 - DNA, 17 bp, synthetic construct
  source 1..17: mol_type = other DNA
agcccctccccaaccca

SEQ ID NO: 148759 - DNA, 17 bp, synthetic construct
  source 1..17: mol_type = other DNA
cagcccctccccaaccc

SEQ ID NO: 148760 - DNA, 17 bp, synthetic construct
  source 1..17: mol_type = other DNA
acagcccctccccaacc

SEQ ID NO: 148761 - DNA, 17 bp, synthetic construct
  source 1..17: mol_type = other DNA
gacagcccctccccaac

SEQ ID NO: 148762 - DNA, 17 bp, synthetic construct
  source 1..17: mol_type = other DNA
agacagcccctccccaa

SEQ ID NO: 148763 - DNA, 17 bp, synthetic construct
  source 1..17: mol_type = other DNA
cagacagcccctcccca

SEQ ID NO: 148764 - DNA, 17 bp, synthetic construct
  source 1..17: mol_type = other DNA
ccagacagcccctcccc

SEQ ID NO: 148765 - DNA, 17 bp, synthetic construct
  source 1..17: mol_type = other DNA
cccagacagcccctccc

SEQ ID NO: 148766 - DNA, 17 bp, synthetic construct
  source 1..17: mol_type = other DNA
ccccagacagcccctcc

SEQ ID NO: 148767 - DNA, 17 bp, synthetic construct
  source 1..17: mol_type = other DNA
gccccagacagcccctc

SEQ ID NO: 148768 - DNA, 17 bp, synthetic construct
  source 1..17: mol_type = other DNA
tgccccagacagcccct

SEQ ID NO: 148769 - DNA, 17 bp, synthetic construct
  source 1..17: mol_type = other DNA
ctgccccagacagcccc

SEQ ID NO: 148770 - DNA, 17 bp, synthetic construct
  source 1..17: mol_type = other DNA
cctgccccagacagccc

SEQ ID NO: 148771 - DNA, 17 bp, synthetic construct
  source 1..17: mol_type = other DNA
ccctgccccagacagcc

SEQ ID NO: 148772 - DNA, 17 bp, synthetic construct
  source 1..17: mol_type = other DNA
cccctgccccagacagc

SEQ ID NO: 148773 - DNA, 17 bp, synthetic construct
  source 1..17: mol_type = other DNA
tcccctgccccagacag

SEQ ID NO: 148774 - DNA, 17 bp, synthetic construct
  source 1..17: mol_type = other DNA
ctcccctgccccagaca

SEQ ID NO: 148775 - DNA, 17 bp, synthetic construct
  source 1..17: mol_type = other DNA
cctcccctgccccagac

SEQ ID NO: 148776 - DNA, 17 bp, synthetic construct
  source 1..17: mol_type = other DNA
tcctcccctgccccaga

SEQ ID NO: 148777 - DNA, 17 bp, synthetic construct
  source 1..17: mol_type = other DNA
ctcctcccctgccccag

SEQ ID NO: 148778 - DNA, 17 bp, synthetic construct
  source 1..17: mol_type = other DNA
gctcctcccctgcccca

SEQ ID NO: 148779 - DNA, 17 bp, synthetic construct
  source 1..17: mol_type = other DNA
agctcctcccctgcccc

SEQ ID NO: 148780 - DNA, 17 bp, synthetic construct
  source 1..17: mol_type = other DNA
cagctcctcccctgccc

SEQ ID NO: 148781 - DNA, 17 bp, synthetic construct
  source 1..17: mol_type = other DNA
gcagctcctcccctgcc

SEQ ID NO: 148782 - DNA, 17 bp, synthetic construct
  source 1..17: mol_type = other DNA
ggcagctcctcccctgc

SEQ ID NO: 148783 - DNA, 17 bp, synthetic construct
  source 1..17: mol_type = other DNA
aggcagctcctcccctg

SEQ ID NO: 148784 - DNA, 17 bp, synthetic construct
  source 1..17: mol_type = other DNA
caggcagctcctcccct

SEQ ID NO: 148785 - DNA, 17 bp, synthetic construct
  source 1..17: mol_type = other DNA
ccaggcagctcctcccc

SEQ ID NO: 148786 - DNA, 17 bp, synthetic construct
  source 1..17: mol_type = other DNA
cccaggcagctcctccc

SEQ ID NO: 148787 - DNA, 17 bp, synthetic construct
  source 1..17: mol_type = other DNA
ccccaggcagctcctcc

SEQ ID NO: 148788 - DNA, 17 bp, synthetic construct
  source 1..17: mol_type = other DNA
gccccaggcagctcctc

SEQ ID NO: 148789 - DNA, 17 bp, synthetic construct
  source 1..17: mol_type = other DNA
cgccccaggcagctcct

SEQ ID NO: 148790 - DNA, 17 bp, synthetic construct
  source 1..17: mol_type = other DNA
ccgccccaggcagctcc

SEQ ID NO: 148791 - DNA, 17 bp, synthetic construct
  source 1..17: mol_type = other DNA
cccgccccaggcagctc

SEQ ID NO: 148792 - DNA, 17 bp, synthetic construct
  source 1..17: mol_type = other DNA
ccccgccccaggcagct

SEQ ID NO: 148793 - DNA, 17 bp, synthetic construct
  source 1..17: mol_type = other DNA
cccccgccccaggcagc

SEQ ID NO: 148794 - DNA, 17 bp, synthetic construct
  source 1..17: mol_type = other DNA
tcccccgccccaggcag

SEQ ID NO: 148795 - DNA, 17 bp, synthetic construct
  source 1..17: mol_type = other DNA
ctcccccgccccaggca

SEQ ID NO: 148796 - DNA, 17 bp, synthetic construct
  source 1..17: mol_type = other DNA
cctcccccgccccaggc

SEQ ID NO: 148797 - DNA, 17 bp, synthetic construct
  source 1..17: mol_type = other DNA
ccctcccccgccccagg

SEQ ID NO: 148798 - DNA, 17 bp, synthetic construct
  source 1..17: mol_type = other DNA
cccctcccccgccccag

SEQ ID NO: 148799 - DNA, 17 bp, synthetic construct
  source 1..17: mol_type = other DNA
gcccctcccccgcccca

SEQ ID NO: 148800 - DNA, 17 bp, synthetic construct
  source 1..17: mol_type = other DNA
agcccctcccccgcccc

SEQ ID NO: 148801 - DNA, 17 bp, synthetic construct
  source 1..17: mol_type = other DNA
cagcccctcccccgccc

SEQ ID NO: 148802 - DNA, 17 bp, synthetic construct
  source 1..17: mol_type = other DNA
acagcccctcccccgcc

SEQ ID NO: 148803 - DNA, 17 bp, synthetic construct
  source 1..17: mol_type = other DNA
tacagcccctcccccgc

SEQ ID NO: 148804 - DNA, 17 bp, synthetic construct
  source 1..17: mol_type = other DNA
ctacagcccctcccccg

SEQ ID NO: 148805 - DNA, 17 bp, synthetic construct
  source 1..17: mol_type = other DNA
cctacagcccctccccc

SEQ ID NO: 148806 - DNA, 17 bp, synthetic construct
  source 1..17: mol_type = other DNA
ccctacagcccctcccc

SEQ ID NO: 148807 - DNA, 17 bp, synthetic construct
  source 1..17: mol_type = other DNA
gccctacagcccctccc

SEQ ID NO: 148808 - DNA, 17 bp, synthetic construct
  source 1..17: mol_type = other DNA
ggccctacagcccctcc

SEQ ID NO: 148809 - DNA, 17 bp, synthetic construct
  source 1..17: mol_type = other DNA
tggccctacagcccctc

SEQ ID NO: 148810 - DNA, 17 bp, synthetic construct
  source 1..17: mol_type = other DNA
ctggccctacagcccct

SEQ ID NO: 148811 - DNA, 17 bp, synthetic construct
  source 1..17: mol_type = other DNA
cctggccctacagcccc

SEQ ID NO: 148812 - DNA, 17 bp, synthetic construct
  source 1..17: mol_type = other DNA
ccctggccctacagccc

SEQ ID NO: 148813 - DNA, 17 bp, synthetic construct
  source 1..17: mol_type = other DNA
tccctggccctacagcc

SEQ ID NO: 148814 - DNA, 17 bp, synthetic construct
  source 1..17: mol_type = other DNA
ctccctggccctacagc

SEQ ID NO: 148815 - DNA, 17 bp, synthetic construct
  source 1..17: mol_type = other DNA
cctccctggccctacag

SEQ ID NO: 148816 - DNA, 17 bp, synthetic construct
  source 1..17: mol_type = other DNA
ccctccctggccctaca

SEQ ID NO: 148817 - DNA, 17 bp, synthetic construct
  source 1..17: mol_type = other DNA
cccctccctggccctac

SEQ ID NO: 148818 - DNA, 17 bp, synthetic construct
  source 1..17: mol_type = other DNA
gcccctccctggcccta

SEQ ID NO: 148819 - DNA, 17 bp, synthetic construct
  source 1..17: mol_type = other DNA
agcccctccctggccct

SEQ ID NO: 148820 - DNA, 17 bp, synthetic construct
  source 1..17: mol_type = other DNA
cagcccctccctggccc

SEQ ID NO: 148821 - DNA, 17 bp, synthetic construct
  source 1..17: mol_type = other DNA
gcagcccctccctggcc

SEQ ID NO: 148822 - DNA, 17 bp, synthetic construct
  source 1..17: mol_type = other DNA
ggcagcccctccctggc

SEQ ID NO: 148823 - DNA, 17 bp, synthetic construct
  source 1..17: mol_type = other DNA
aggcagcccctccctgg

SEQ ID NO: 148824 - DNA, 17 bp, synthetic construct
  source 1..17: mol_type = other DNA
caggcagcccctccctg

SEQ ID NO: 148825 - DNA, 17 bp, synthetic construct
  source 1..17: mol_type = other DNA
ccaggcagcccctccct

SEQ ID NO: 148826 - DNA, 17 bp, synthetic construct
  source 1..17: mol_type = other DNA
cccaggcagcccctccc

SEQ ID NO: 148827 - DNA, 17 bp, synthetic construct
  source 1..17: mol_type = other DNA
ccccaggcagcccctcc

SEQ ID NO: 148828 - DNA, 17 bp, synthetic construct
  source 1..17: mol_type = other DNA
gccccaggcagcccctc

SEQ ID NO: 148829 - DNA, 17 bp, synthetic construct
  source 1..17: mol_type = other DNA
agccccaggcagcccct

SEQ ID NO: 148830 - DNA, 17 bp, synthetic construct
  source 1..17: mol_type = other DNA
cagccccaggcagcccc

SEQ ID NO: 148831 - DNA, 17 bp, synthetic construct
  source 1..17: mol_type = other DNA
ccagccccaggcagccc

SEQ ID NO: 148832 - DNA, 17 bp, synthetic construct
  source 1..17: mol_type = other DNA
cccagccccaggcagcc

SEQ ID NO: 148833 - DNA, 17 bp, synthetic construct
  source 1..17: mol_type = other DNA
ccccagccccaggcagc

SEQ ID NO: 148834 - DNA, 17 bp, synthetic construct
  source 1..17: mol_type = other DNA
tccccagccccaggcag

SEQ ID NO: 148835 - DNA, 17 bp, synthetic construct
  source 1..17: mol_type = other DNA
ctccccagccccaggca

SEQ ID NO: 148836 - DNA, 17 bp, synthetic construct
  source 1..17: mol_type = other DNA
cctccccagccccaggc

SEQ ID NO: 148837 - DNA, 17 bp, synthetic construct
  source 1..17: mol_type = other DNA
ccctccccagccccagg

SEQ ID NO: 148838 - DNA, 17 bp, synthetic construct
  source 1..17: mol_type = other DNA
cccctccccagccccag

SEQ ID NO: 148839 - DNA, 17 bp, synthetic construct
  source 1..17: mol_type = other DNA
gcccctccccagcccca

SEQ ID NO: 148840 - DNA, 17 bp, synthetic construct
  source 1..17: mol_type = other DNA
agcccctccccagcccc

SEQ ID NO: 148841 - DNA, 17 bp, synthetic construct
  source 1..17: mol_type = other DNA
cagcccctccccagccc

SEQ ID NO: 148842 - DNA, 17 bp, synthetic construct
  source 1..17: mol_type = other DNA
gcagcccctccccagcc

SEQ ID NO: 148843 - DNA, 17 bp, synthetic construct
  source 1..17: mol_type = other DNA
agcagcccctccccagc

SEQ ID NO: 148844 - DNA, 17 bp, synthetic construct
  source 1..17: mol_type = other DNA
cagcagcccctccccag

SEQ ID NO: 148845 - DNA, 17 bp, synthetic construct
  source 1..17: mol_type = other DNA
ccagcagcccctcccca

SEQ ID NO: 148846 - DNA, 17 bp, synthetic construct
  source 1..17: mol_type = other DNA
cccagcagcccctcccc

SEQ ID NO: 148847 - DNA, 17 bp, synthetic construct
  source 1..17: mol_type = other DNA
ccccagcagcccctccc

SEQ ID NO: 148848 - DNA, 17 bp, synthetic construct
  source 1..17: mol_type = other DNA
accccagcagcccctcc

SEQ ID NO: 148849 - DNA, 17 bp, synthetic construct
  source 1..17: mol_type = other DNA
caccccagcagcccctc

SEQ ID NO: 148850 - DNA, 17 bp, synthetic construct
  source 1..17: mol_type = other DNA
ccaccccagcagcccct

SEQ ID NO: 148851 - DNA, 17 bp, synthetic construct
  source 1..17: mol_type = other DNA
cccaccccagcagcccc

SEQ ID NO: 148852 - DNA, 17 bp, synthetic construct
  source 1..17: mol_type = other DNA
ccccaccccagcagccc

SEQ ID NO: 148853 - DNA, 17 bp, synthetic construct
  source 1..17: mol_type = other DNA
tccccaccccagcagcc

SEQ ID NO: 148854 - DNA, 17 bp, synthetic construct
  source 1..17: mol_type = other DNA
ctccccaccccagcagc

SEQ ID NO: 148855 - DNA, 17 bp, synthetic construct
  source 1..17: mol_type = other DNA
cctccccaccccagcag

SEQ ID NO: 148856 - DNA, 17 bp, synthetic construct
  source 1..17: mol_type = other DNA
ccctccccaccccagca

SEQ ID NO: 148857 - DNA, 17 bp, synthetic construct
  source 1..17: mol_type = other DNA
cccctccccaccccagc

SEQ ID NO: 148858 - DNA, 17 bp, synthetic construct
  source 1..17: mol_type = other DNA
gcccctccccaccccag

SEQ ID NO: 148859 - DNA, 17 bp, synthetic construct
  source 1..17: mol_type = other DNA
agcccctccccacccca

SEQ ID NO: 148860 - DNA, 17 bp, synthetic construct
  source 1..17: mol_type = other DNA
cagcccctccccacccc

SEQ ID NO: 148861 - DNA, 17 bp, synthetic construct
  source 1..17: mol_type = other DNA
gcagcccctccccaccc

SEQ ID NO: 148862 - DNA, 17 bp, synthetic construct
  source 1..17: mol_type = other DNA
ggcagcccctccccacc

SEQ ID NO: 148863 - DNA, 17 bp, synthetic construct
  source 1..17: mol_type = other DNA
aggcagcccctccccac

SEQ ID NO: 148864 - DNA, 17 bp, synthetic construct
  source 1..17: mol_type = other DNA
caggcagcccctcccca

SEQ ID NO: 148865 - DNA, 17 bp, synthetic construct
  source 1..17: mol_type = other DNA
gcaggcagcccctcccc

SEQ ID NO: 148866 - DNA, 17 bp, synthetic construct
  source 1..17: mol_type = other DNA
cgcaggcagcccctccc

SEQ ID NO: 148867 - DNA, 17 bp, synthetic construct
  source 1..17: mol_type = other DNA
ccgcaggcagcccctcc

SEQ ID NO: 148868 - DNA, 17 bp, synthetic construct
  source 1..17: mol_type = other DNA
gccgcaggcagcccctc

SEQ ID NO: 148869 - DNA, 17 bp, synthetic construct
  source 1..17: mol_type = other DNA
cgccgcaggcagcccct

SEQ ID NO: 148870 - DNA, 17 bp, synthetic construct
  source 1..17: mol_type = other DNA
ccgccgcaggcagcccc

SEQ ID NO: 148871 - DNA, 17 bp, synthetic construct
  source 1..17: mol_type = other DNA
cccgccgcaggcagccc

SEQ ID NO: 148872 - DNA, 17 bp, synthetic construct
  source 1..17: mol_type = other DNA
tcccgccgcaggcagcc

SEQ ID NO: 148873 - DNA, 17 bp, synthetic construct
  source 1..17: mol_type = other DNA
ctcccgccgcaggcagc

SEQ ID NO: 148874 - DNA, 17 bp, synthetic construct
  source 1..17: mol_type = other DNA
gctcccgccgcaggcag

SEQ ID NO: 148875 - DNA, 17 bp, synthetic construct
  source 1..17: mol_type = other DNA
ggctcccgccgcaggca

SEQ ID NO: 148876 - DNA, 17 bp, synthetic construct
  source 1..17: mol_type = other DNA
cggctcccgccgcaggc

SEQ ID NO: 148877 - DNA, 17 bp, synthetic construct
  source 1..17: mol_type = other DNA
ccggctcccgccgcagg

SEQ ID NO: 148878 - DNA, 17 bp, synthetic construct
  source 1..17: mol_type = other DNA
cccggctcccgccgcag

SEQ ID NO: 148879 - DNA, 17 bp, synthetic construct
  source 1..17: mol_type = other DNA
ccccggctcccgccgca

SEQ ID NO: 148880 - DNA, 17 bp, synthetic construct
  source 1..17: mol_type = other DNA
gccccggctcccgccgc

SEQ ID NO: 148881 - DNA, 17 bp, synthetic construct
  source 1..17: mol_type = other DNA
cgccccggctcccgccg

SEQ ID NO: 148882 - DNA, 17 bp, synthetic construct
  source 1..17: mol_type = other DNA
acgccccggctcccgcc

SEQ ID NO: 148883 - DNA, 17 bp, synthetic construct
  source 1..17: mol_type = other DNA
cacgccccggctcccgc

SEQ ID NO: 148884 - DNA, 17 bp, synthetic construct
  source 1..17: mol_type = other DNA
ccacgccccggctcccg

SEQ ID NO: 148885 - DNA, 17 bp, synthetic construct
  source 1..17: mol_type = other DNA
cccacgccccggctccc

SEQ ID NO: 148886 - DNA, 17 bp, synthetic construct
  source 1..17: mol_type = other DNA
tcccacgccccggctcc

SEQ ID NO: 148887 - DNA, 17 bp, synthetic construct
  source 1..17: mol_type = other DNA
ctcccacgccccggctc

SEQ ID NO: 148888 - DNA, 17 bp, synthetic construct
  source 1..17: mol_type = other DNA
actcccacgccccggct

SEQ ID NO: 148889 - DNA, 17 bp, synthetic construct
  source 1..17: mol_type = other DNA
cactcccacgccccggc

SEQ ID NO: 148890 - DNA, 17 bp, synthetic construct
  source 1..17: mol_type = other DNA
ccactcccacgccccgg

SEQ ID NO: 148891 - DNA, 17 bp, synthetic construct
  source 1..17: mol_type = other DNA
gccactcccacgccccg

SEQ ID NO: 148892 - DNA, 17 bp, synthetic construct
  source 1..17: mol_type = other DNA
agccactcccacgcccc

SEQ ID NO: 148893 - DNA, 17 bp, synthetic construct
  source 1..17: mol_type = other DNA
cagccactcccacgccc

SEQ ID NO: 148894 - DNA, 17 bp, synthetic construct
  source 1..17: mol_type = other DNA
ccagccactcccacgcc

SEQ ID NO: 148895 - DNA, 17 bp, synthetic construct
  source 1..17: mol_type = other DNA
accagccactcccacgc

SEQ ID NO: 148896 - DNA, 17 bp, synthetic construct
  source 1..17: mol_type = other DNA
aaccagccactcccacg

SEQ ID NO: 148897 - DNA, 17 bp, synthetic construct
  source 1..17: mol_type = other DNA
caaccagccactcccac

SEQ ID NO: 148898 - DNA, 17 bp, synthetic construct
  source 1..17: mol_type = other DNA
ccaaccagccactccca

SEQ ID NO: 148899 - DNA, 17 bp, synthetic construct
  source 1..17: mol_type = other DNA
cccaaccagccactccc

SEQ ID NO: 148900 - DNA, 17 bp, synthetic construct
  source 1..17: mol_type = other DNA
gcccaaccagccactcc

SEQ ID NO: 148901 - DNA, 17 bp, synthetic construct
  source 1..17: mol_type = other DNA
agcccaaccagccactc

SEQ ID NO: 148902 - DNA, 17 bp, synthetic construct
  source 1..17: mol_type = other DNA
cagcccaaccagccact

SEQ ID NO: 148903 - DNA, 17 bp, synthetic construct
  source 1..17: mol_type = other DNA
ccagcccaaccagccac

SEQ ID NO: 148904 - DNA, 17 bp, synthetic construct
  source 1..17: mol_type = other DNA
gccagcccaaccagcca

SEQ ID NO: 148905 - DNA, 17 bp, synthetic construct
  source 1..17: mol_type = other DNA
tgccagcccaaccagcc

SEQ ID NO: 148906 - DNA, 17 bp, synthetic construct
  source 1..17: mol_type = other DNA
gtgccagcccaaccagc

SEQ ID NO: 148907 - DNA, 17 bp, synthetic construct
  source 1..17: mol_type = other DNA
tgtgccagcccaaccag

SEQ ID NO: 148908 - DNA, 17 bp, synthetic construct
  source 1..17: mol_type = other DNA
gtgtgccagcccaacca

SEQ ID NO: 148909 - DNA, 17 bp, synthetic construct
  source 1..17: mol_type = other DNA
tgtgtgccagcccaacc

SEQ ID NO: 148910 - DNA, 17 bp, synthetic construct
  source 1..17: mol_type = other DNA
ctgtgtgccagcccaac

SEQ ID NO: 148911 - DNA, 17 bp, synthetic construct
  source 1..17: mol_type = other DNA
cctgtgtgccagcccaa

SEQ ID NO: 148912 - DNA, 17 bp, synthetic construct
  source 1..17: mol_type = other DNA
ccctgtgtgccagccca

SEQ ID NO: 148913 - DNA, 17 bp, synthetic construct
  source 1..17: mol_type = other DNA
cccctgtgtgccagccc

SEQ ID NO: 148914 - DNA, 17 bp, synthetic construct
  source 1..17: mol_type = other DNA
gcccctgtgtgccagcc

SEQ ID NO: 148915 - DNA, 17 bp, synthetic construct
  source 1..17: mol_type = other DNA
tgcccctgtgtgccagc

SEQ ID NO: 148916 - DNA, 17 bp, synthetic construct
  source 1..17: mol_type = other DNA
ctgcccctgtgtgccag

SEQ ID NO: 148917 - DNA, 17 bp, synthetic construct
  source 1..17: mol_type = other DNA
cctgcccctgtgtgcca

SEQ ID NO: 148918 - DNA, 17 bp, synthetic construct
  source 1..17: mol_type = other DNA
ccctgcccctgtgtgcc

SEQ ID NO: 148919 - DNA, 17 bp, synthetic construct
  source 1..17: mol_type = other DNA
gccctgcccctgtgtgc

SEQ ID NO: 148920 - DNA, 17 bp, synthetic construct
  source 1..17: mol_type = other DNA
agccctgcccctgtgtg

SEQ ID NO: 148921 - DNA, 17 bp, synthetic construct
  source 1..17: mol_type = other DNA
cagccctgcccctgtgt

SEQ ID NO: 148922 - DNA, 17 bp, synthetic construct
  source 1..17: mol_type = other DNA
acagccctgcccctgtg

SEQ ID NO: 148923 - DNA, 17 bp, synthetic construct
  source 1..17: mol_type = other DNA
cacagccctgcccctgt

SEQ ID NO: 148924 - DNA, 17 bp, synthetic construct
  source 1..17: mol_type = other DNA
tcacagccctgcccctg

SEQ ID NO: 148925 - DNA, 17 bp, synthetic construct
  source 1..17: mol_type = other DNA
ctcacagccctgcccct

SEQ ID NO: 148926 - DNA, 17 bp, synthetic construct
  source 1..17: mol_type = other DNA
gctcacagccctgcccc

SEQ ID NO: 148927 - DNA, 17 bp, synthetic construct
  source 1..17: mol_type = other DNA
agctcacagccctgccc

SEQ ID NO: 148928 - DNA, 17 bp, synthetic construct
  source 1..17: mol_type = other DNA
cagctcacagccctgcc

SEQ ID NO: 148929 - DNA, 17 bp, synthetic construct
  source 1..17: mol_type = other DNA
acagctcacagccctgc

SEQ ID NO: 148930 - DNA, 17 bp, synthetic construct
  source 1..17: mol_type = other DNA
cacagctcacagccctg

SEQ ID NO: 148931 - DNA, 17 bp, synthetic construct
  source 1..17: mol_type = other DNA
ccacagctcacagccct

SEQ ID NO: 148932 - DNA, 17 bp, synthetic construct
  source 1..17: mol_type = other DNA
cccacagctcacagccc

SEQ ID NO: 148933 - DNA, 17 bp, synthetic construct
  source 1..17: mol_type = other DNA
acccacagctcacagcc

SEQ ID NO: 148934 - DNA, 17 bp, synthetic construct
  source 1..17: mol_type = other DNA
gacccacagctcacagc

SEQ ID NO: 148935 - DNA, 17 bp, synthetic construct
  source 1..17: mol_type = other DNA
cgacccacagctcacag

SEQ ID NO: 148936 - DNA, 17 bp, synthetic construct
  source 1..17: mol_type = other DNA
ccgacccacagctcaca

SEQ ID NO: 148937 - DNA, 17 bp, synthetic construct
  source 1..17: mol_type = other DNA
cccgacccacagctcac

SEQ ID NO: 148938 - DNA, 17 bp, synthetic construct
  source 1..17: mol_type = other DNA
ccccgacccacagctca

SEQ ID NO: 148939 - DNA, 17 bp, synthetic construct
  source 1..17: mol_type = other DNA
accccgacccacagctc

SEQ ID NO: 148940 - DNA, 17 bp, synthetic construct
  source 1..17: mol_type = other DNA
caccccgacccacagct

SEQ ID NO: 148941 - DNA, 17 bp, synthetic construct
  source 1..17: mol_type = other DNA
ccaccccgacccacagc

SEQ ID NO: 148942 - DNA, 17 bp, synthetic construct
  source 1..17: mol_type = other DNA
tccaccccgacccacag

SEQ ID NO: 148943 - DNA, 17 bp, synthetic construct
  source 1..17: mol_type = other DNA
ctccaccccgacccaca

SEQ ID NO: 148944 - DNA, 17 bp, synthetic construct
  source 1..17: mol_type = other DNA
cctccaccccgacccac

SEQ ID NO: 148945 - DNA, 17 bp, synthetic construct
  source 1..17: mol_type = other DNA
tcctccaccccgaccca

SEQ ID NO: 148946 - DNA, 17 bp, synthetic construct
  source 1..17: mol_type = other DNA
gtcctccaccccgaccc

SEQ ID NO: 148947 - DNA, 17 bp, synthetic construct
  source 1..17: mol_type = other DNA
agtcctccaccccgacc

SEQ ID NO: 148948 - DNA, 17 bp, synthetic construct
  source 1..17: mol_type = other DNA
gagtcctccaccccgac

SEQ ID NO: 148949 - DNA, 17 bp, synthetic construct
  source 1..17: mol_type = other DNA
tgagtcctccaccccga

SEQ ID NO: 148950 - DNA, 17 bp, synthetic construct
  source 1..17: mol_type = other DNA
ctgagtcctccaccccg

SEQ ID NO: 148951 - DNA, 17 bp, synthetic construct
  source 1..17: mol_type = other DNA
cctgagtcctccacccc

SEQ ID NO: 148952 - DNA, 17 bp, synthetic construct
  source 1..17: mol_type = other DNA
ccctgagtcctccaccc

SEQ ID NO: 148953 - DNA, 17 bp, synthetic construct
  source 1..17: mol_type = other DNA
tccctgagtcctccacc

SEQ ID NO: 148954 - DNA, 17 bp, synthetic construct
  source 1..17: mol_type = other DNA
atccctgagtcctccac

SEQ ID NO: 148955 - DNA, 17 bp, synthetic construct
  source 1..17: mol_type = other DNA
gatccctgagtcctcca

SEQ ID NO: 148956 - DNA, 17 bp, synthetic construct
  source 1..17: mol_type = other DNA
cgatccctgagtcctcc

SEQ ID NO: 148957 - DNA, 17 bp, synthetic construct
  source 1..17: mol_type = other DNA
ccgatccctgagtcctc

SEQ ID NO: 148958 - DNA, 17 bp, synthetic construct
  source 1..17: mol_type = other DNA
gccgatccctgagtcct

SEQ ID NO: 148959 - DNA, 17 bp, synthetic construct
  source 1..17: mol_type = other DNA
agccgatccctgagtcc

SEQ ID NO: 148960 - DNA, 17 bp, synthetic construct
  source 1..17: mol_type = other DNA
cagccgatccctgagtc

SEQ ID NO: 148961 - DNA, 17 bp, synthetic construct
  source 1..17: mol_type = other DNA
ccagccgatccctgagt

SEQ ID NO: 148962 - DNA, 17 bp, synthetic construct
  source 1..17: mol_type = other DNA
gccagccgatccctgag

SEQ ID NO: 148963 - DNA, 17 bp, synthetic construct
  source 1..17: mol_type = other DNA
agccagccgatccctga

SEQ ID NO: 148964 - DNA, 17 bp, synthetic construct
  source 1..17: mol_type = other DNA
aagccagccgatccctg

SEQ ID NO: 148965 - DNA, 17 bp, synthetic construct
  source 1..17: mol_type = other DNA
aaagccagccgatccct

SEQ ID NO: 148966 - DNA, 17 bp, synthetic construct
  source 1..17: mol_type = other DNA
gaaagccagccgatccc

SEQ ID NO: 148967 - DNA, 17 bp, synthetic construct
  source 1..17: mol_type = other DNA
agaaagccagccgatcc

SEQ ID NO: 148968 - DNA, 17 bp, synthetic construct
  source 1..17: mol_type = other DNA
cagaaagccagccgatc

SEQ ID NO: 148969 - DNA, 17 bp, synthetic construct
  source 1..17: mol_type = other DNA
ccagaaagccagccgat

SEQ ID NO: 148970 - DNA, 17 bp, synthetic construct
  source 1..17: mol_type = other DNA
cccagaaagccagccga

SEQ ID NO: 148971 - DNA, 17 bp, synthetic construct
  source 1..17: mol_type = other DNA
tcccagaaagccagccg

SEQ ID NO: 148972 - DNA, 17 bp, synthetic construct
  source 1..17: mol_type = other DNA
ttcccagaaagccagcc

SEQ ID NO: 148973 - DNA, 17 bp, synthetic construct
  source 1..17: mol_type = other DNA
tttcccagaaagccagc

SEQ ID NO: 148974 - DNA, 17 bp, synthetic construct
  source 1..17: mol_type = other DNA
ctttcccagaaagccag

SEQ ID NO: 148975 - DNA, 17 bp, synthetic construct
  source 1..17: mol_type = other DNA
cctttcccagaaagcca

SEQ ID NO: 148976 - DNA, 17 bp, synthetic construct
  source 1..17: mol_type = other DNA
gcctttcccagaaagcc

SEQ ID NO: 148977 - DNA, 17 bp, synthetic construct
  source 1..17: mol_type = other DNA
tgcctttcccagaaagc

SEQ ID NO: 148978 - DNA, 17 bp, synthetic construct
  source 1..17: mol_type = other DNA
ctgcctttcccagaaag

SEQ ID NO: 148979 - DNA, 17 bp, synthetic construct
  source 1..17: mol_type = other DNA
actgcctttcccagaaa

SEQ ID NO: 148980 - DNA, 17 bp, synthetic construct
  source 1..17: mol_type = other DNA
gactgcctttcccagaa

SEQ ID NO: 148981 - DNA, 17 bp, synthetic construct
  source 1..17: mol_type = other DNA
tgactgcctttcccaga

SEQ ID NO: 148982 - DNA, 17 bp, synthetic construct
  source 1..17: mol_type = other DNA
ttgactgcctttcccag

SEQ ID NO: 148983 - DNA, 17 bp, synthetic construct
  source 1..17: mol_type = other DNA
gttgactgcctttccca

SEQ ID NO: 148984 - DNA, 17 bp, synthetic construct
  source 1..17: mol_type = other DNA
ggttgactgcctttccc

SEQ ID NO: 148985 - DNA, 17 bp, synthetic construct
  source 1..17: mol_type = other DNA
aggttgactgcctttcc

SEQ ID NO: 148986 - DNA, 17 bp, synthetic construct
  source 1..17: mol_type = other DNA
caggttgactgcctttc

SEQ ID NO: 148987 - DNA, 17 bp, synthetic construct
  source 1..17: mol_type = other DNA
ccaggttgactgccttt

SEQ ID NO: 148988 - DNA, 17 bp, synthetic construct
  source 1..17: mol_type = other DNA
tccaggttgactgcctt

SEQ ID NO: 148989 - DNA, 17 bp, synthetic construct
  source 1..17: mol_type = other DNA
atccaggttgactgcct

SEQ ID NO: 148990 - DNA, 17 bp, synthetic construct
  source 1..17: mol_type = other DNA
gatccaggttgactgcc

SEQ ID NO: 148991 - DNA, 17 bp, synthetic construct
  source 1..17: mol_type = other DNA
agatccaggttgactgc

SEQ ID NO: 148992 - DNA, 17 bp, synthetic construct
  source 1..17: mol_type = other DNA
gagatccaggttgactg

SEQ ID NO: 148993 - DNA, 17 bp, synthetic construct
  source 1..17: mol_type = other DNA
agagatccaggttgact

SEQ ID NO: 148994 - DNA, 17 bp, synthetic construct
  source 1..17: mol_type = other DNA
cagagatccaggttgac

SEQ ID NO: 148995 - DNA, 17 bp, synthetic construct
  source 1..17: mol_type = other DNA
ccagagatccaggttga

SEQ ID NO: 148996 - DNA, 17 bp, synthetic construct
  source 1..17: mol_type = other DNA
tccagagatccaggttg

SEQ ID NO: 148997 - DNA, 17 bp, synthetic construct
  source 1..17: mol_type = other DNA
ctccagagatccaggtt

SEQ ID NO: 148998 - DNA, 17 bp, synthetic construct
  source 1..17: mol_type = other DNA
cctccagagatccaggt

SEQ ID NO: 148999 - DNA, 17 bp, synthetic construct
  source 1..17: mol_type = other DNA
gcctccagagatccagg

SEQ ID NO: 149000 - DNA, 17 bp, synthetic construct
  source 1..17: mol_type = other DNA
cgcctccagagatccag

SEQ ID NO: 149001 - DNA, 17 bp, synthetic construct
  source 1..17: mol_type = other DNA
ccgcctccagagatcca

SEQ ID NO: 149002 - DNA, 17 bp, synthetic construct
  source 1..17: mol_type = other DNA
gccgcctccagagatcc

SEQ ID NO: 149003 - DNA, 17 bp, synthetic construct
  source 1..17: mol_type = other DNA
ggccgcctccagagatc

SEQ ID NO: 149004 - DNA, 17 bp, synthetic construct
  source 1..17: mol_type = other DNA
gggccgcctccagagat

SEQ ID NO: 149005 - DNA, 17 bp, synthetic construct
  source 1..17: mol_type = other DNA
ggggccgcctccagaga

SEQ ID NO: 149006 - DNA, 17 bp, synthetic construct
  source 1..17: mol_type = other DNA
aggggccgcctccagag

SEQ ID NO: 149007 - DNA, 17 bp, synthetic construct
  source 1..17: mol_type = other DNA
caggggccgcctccaga

SEQ ID NO: 149008 - DNA, 17 bp, synthetic construct
  source 1..17: mol_type = other DNA
acaggggccgcctccag

SEQ ID NO: 149009 - DNA, 17 bp, synthetic construct
  source 1..17: mol_type = other DNA
cacaggggccgcctcca

SEQ ID NO: 149010 - DNA, 17 bp, synthetic construct
  source 1..17: mol_type = other DNA
ccacaggggccgcctcc

SEQ ID NO: 149011 - DNA, 17 bp, synthetic construct
  source 1..17: mol_type = other DNA
accacaggggccgcctc

SEQ ID NO: 149012 - DNA, 17 bp, synthetic construct
  source 1..17: mol_type = other DNA
caccacaggggccgcct

SEQ ID NO: 149013 - DNA, 17 bp, synthetic construct
  source 1..17: mol_type = other DNA
ccaccacaggggccgcc

SEQ ID NO: 149014 - DNA, 17 bp, synthetic construct
  source 1..17: mol_type = other DNA
accaccacaggggccgc

SEQ ID NO: 149015 - DNA, 17 bp, synthetic construct
  source 1..17: mol_type = other DNA
aaccaccacaggggccg

SEQ ID NO: 149016 - DNA, 17 bp, synthetic construct
  source 1..17: mol_type = other DNA
gaaccaccacaggggcc

SEQ ID NO: 149017 - DNA, 17 bp, synthetic construct
  source 1..17: mol_type = other DNA
ggaaccaccacaggggc

SEQ ID NO: 149018 - DNA, 17 bp, synthetic construct
  source 1..17: mol_type = other DNA
gggaaccaccacagggg

SEQ ID NO: 149019 - DNA, 17 bp, synthetic construct
  source 1..17: mol_type = other DNA
tgggaaccaccacaggg

SEQ ID NO: 149020 - DNA, 17 bp, synthetic construct
  source 1..17: mol_type = other DNA
ctgggaaccaccacagg

SEQ ID NO: 149021 - DNA, 17 bp, synthetic construct
  source 1..17: mol_type = other DNA
tctgggaaccaccacag

SEQ ID NO: 149022 - DNA, 17 bp, synthetic construct
  source 1..17: mol_type = other DNA
atctgggaaccaccaca

SEQ ID NO: 149023 - DNA, 17 bp, synthetic construct
  source 1..17: mol_type = other DNA
catctgggaaccaccac

SEQ ID NO: 149024 - DNA, 17 bp, synthetic construct
  source 1..17: mol_type = other DNA
acatctgggaaccacca

SEQ ID NO: 149025 - DNA, 17 bp, synthetic construct
  source 1..17: mol_type = other DNA
gacatctgggaaccacc

SEQ ID NO: 149026 - DNA, 17 bp, synthetic construct
  source 1..17: mol_type = other DNA
tgacatctgggaaccac

SEQ ID NO: 149027 - DNA, 17 bp, synthetic construct
  source 1..17: mol_type = other DNA
ctgacatctgggaacca

SEQ ID NO: 149028 - DNA, 17 bp, synthetic construct
  source 1..17: mol_type = other DNA
gctgacatctgggaacc

SEQ ID NO: 149029 - DNA, 17 bp, synthetic construct
  source 1..17: mol_type = other DNA
tgctgacatctgggaac

SEQ ID NO: 149030 - DNA, 17 bp, synthetic construct
  source 1..17: mol_type = other DNA
ctgctgacatctgggaa

SEQ ID NO: 149031 - DNA, 17 bp, synthetic construct
  source 1..17: mol_type = other DNA
cctgctgacatctggga

SEQ ID NO: 149032 - DNA, 17 bp, synthetic construct
  source 1..17: mol_type = other DNA
tcctgctgacatctggg

SEQ ID NO: 149033 - DNA, 17 bp, synthetic construct
  source 1..17: mol_type = other DNA
gtcctgctgacatctgg

SEQ ID NO: 149034 - DNA, 17 bp, synthetic construct
  source 1..17: mol_type = other DNA
ggtcctgctgacatctg

SEQ ID NO: 149035 - DNA, 17 bp, synthetic construct
  source 1..17: mol_type = other DNA
aggtcctgctgacatct

SEQ ID NO: 149036 - DNA, 17 bp, synthetic construct
  source 1..17: mol_type = other DNA
caggtcctgctgacatc

SEQ ID NO: 149037 - DNA, 17 bp, synthetic construct
  source 1..17: mol_type = other DNA
ccaggtcctgctgacat

SEQ ID NO: 149038 - DNA, 17 bp, synthetic construct
  source 1..17: mol_type = other DNA
gccaggtcctgctgaca

SEQ ID NO: 149039 - DNA, 17 bp, synthetic construct
  source 1..17: mol_type = other DNA
agccaggtcctgctgac

SEQ ID NO: 149040 - DNA, 17 bp, synthetic construct
  source 1..17: mol_type = other DNA
cagccaggtcctgctga

SEQ ID NO: 149041 - DNA, 17 bp, synthetic construct
  source 1..17: mol_type = other DNA
ccagccaggtcctgctg

SEQ ID NO: 149042 - DNA, 17 bp, synthetic construct
  source 1..17: mol_type = other DNA
tccagccaggtcctgct

SEQ ID NO: 149043 - DNA, 17 bp, synthetic construct
  source 1..17: mol_type = other DNA
ttccagccaggtcctgc

SEQ ID NO: 149044 - DNA, 17 bp, synthetic construct
  source 1..17: mol_type = other DNA
tttccagccaggtcctg

SEQ ID NO: 149045 - DNA, 17 bp, synthetic construct
  source 1..17: mol_type = other DNA
ttttccagccaggtcct

SEQ ID NO: 149046 - DNA, 17 bp, synthetic construct
  source 1..17: mol_type = other DNA
cttttccagccaggtcc

SEQ ID NO: 149047 - DNA, 17 bp, synthetic construct
  source 1..17: mol_type = other DNA
gcttttccagccaggtc

SEQ ID NO: 149048 - DNA, 17 bp, synthetic construct
  source 1..17: mol_type = other DNA
ggcttttccagccaggt

SEQ ID NO: 149049 - DNA, 17 bp, synthetic construct
  source 1..17: mol_type = other DNA
tggcttttccagccagg

SEQ ID NO: 149050 - DNA, 17 bp, synthetic construct
  source 1..17: mol_type = other DNA
ctggcttttccagccag

SEQ ID NO: 149051 - DNA, 17 bp, synthetic construct
  source 1..17: mol_type = other DNA
cctggcttttccagcca

SEQ ID NO: 149052 - DNA, 17 bp, synthetic construct
  source 1..17: mol_type = other DNA
gcctggcttttccagcc

SEQ ID NO: 149053 - DNA, 17 bp, synthetic construct
  source 1..17: mol_type = other DNA
tgcctggcttttccagc

SEQ ID NO: 149054 - DNA, 17 bp, synthetic construct
  source 1..17: mol_type = other DNA
ctgcctggcttttccag

SEQ ID NO: 149055 - DNA, 17 bp, synthetic construct
  source 1..17: mol_type = other DNA
cctgcctggcttttcca

SEQ ID NO: 149056 - DNA, 17 bp, synthetic construct
  source 1..17: mol_type = other DNA
ccctgcctggcttttcc

SEQ ID NO: 149057 - DNA, 17 bp, synthetic construct
  source 1..17: mol_type = other DNA
gccctgcctggcttttc

SEQ ID NO: 149058 - DNA, 17 bp, synthetic construct
  source 1..17: mol_type = other DNA
ggccctgcctggctttt

SEQ ID NO: 149059 - DNA, 17 bp, synthetic construct
  source 1..17: mol_type = other DNA
tggccctgcctggcttt

SEQ ID NO: 149060 - DNA, 17 bp, synthetic construct
  source 1..17: mol_type = other DNA
ctggccctgcctggctt

SEQ ID NO: 149061 - DNA, 17 bp, synthetic construct
  source 1..17: mol_type = other DNA
cctggccctgcctggct

SEQ ID NO: 149062 - DNA, 17 bp, synthetic construct
  source 1..17: mol_type = other DNA
gcctggccctgcctggc

SEQ ID NO: 149063 - DNA, 17 bp, synthetic construct
  source 1..17: mol_type = other DNA
ggcctggccctgcctgg

SEQ ID NO: 149064 - DNA, 17 bp, synthetic construct
  source 1..17: mol_type = other DNA
tggcctggccctgcctg

SEQ ID NO: 149065 - DNA, 17 bp, synthetic construct
  source 1..17: mol_type = other DNA
ctggcctggccctgcct

SEQ ID NO: 149066 - DNA, 17 bp, synthetic construct
  source 1..17: mol_type = other DNA
tctggcctggccctgcc

SEQ ID NO: 149067 - DNA, 17 bp, synthetic construct
  source 1..17: mol_type = other DNA
ctctggcctggccctgc

SEQ ID NO: 149068 - DNA, 17 bp, synthetic construct
  source 1..17: mol_type = other DNA
actctggcctggccctg

SEQ ID NO: 149069 - DNA, 17 bp, synthetic construct
  source 1..17: mol_type = other DNA
cactctggcctggccct

SEQ ID NO: 149070 - DNA, 17 bp, synthetic construct
  source 1..17: mol_type = other DNA
gcactctggcctggccc

SEQ ID NO: 149071 - DNA, 17 bp, synthetic construct
  source 1..17: mol_type = other DNA
cgcactctggcctggcc

SEQ ID NO: 149072 - DNA, 17 bp, synthetic construct
  source 1..17: mol_type = other DNA
tcgcactctggcctggc

SEQ ID NO: 149073 - DNA, 17 bp, synthetic construct
  source 1..17: mol_type = other DNA
ttcgcactctggcctgg

SEQ ID NO: 149074 - DNA, 17 bp, synthetic construct
  source 1..17: mol_type = other DNA
gttcgcactctggcctg

SEQ ID NO: 149075 - DNA, 17 bp, synthetic construct
  source 1..17: mol_type = other DNA
ggttcgcactctggcct

SEQ ID NO: 149076 - DNA, 17 bp, synthetic construct
  source 1..17: mol_type = other DNA
tggttcgcactctggcc

SEQ ID NO: 149077 - DNA, 17 bp, synthetic construct
  source 1..17: mol_type = other DNA
gtggttcgcactctggc

SEQ ID NO: 149078 - DNA, 17 bp, synthetic construct
  source 1..17: mol_type = other DNA
tgtggttcgcactctgg

SEQ ID NO: 149079 - DNA, 17 bp, synthetic construct
  source 1..17: mol_type = other DNA
ctgtggttcgcactctg

SEQ ID NO: 149080 - DNA, 17 bp, synthetic construct
  source 1..17: mol_type = other DNA
cctgtggttcgcactct

SEQ ID NO: 149081 - DNA, 17 bp, synthetic construct
  source 1..17: mol_type = other DNA
ccctgtggttcgcactc

SEQ ID NO: 149082 - DNA, 17 bp, synthetic construct
  source 1..17: mol_type = other DNA
gccctgtggttcgcact

SEQ ID NO: 149083 - DNA, 17 bp, synthetic construct
  source 1..17: mol_type = other DNA
ggccctgtggttcgcac

SEQ ID NO: 149084 - DNA, 17 bp, synthetic construct
  source 1..17: mol_type = other DNA
cggccctgtggttcgca

SEQ ID NO: 149085 - DNA, 17 bp, synthetic construct
  source 1..17: mol_type = other DNA
ccggccctgtggttcgc

SEQ ID NO: 149086 - DNA, 17 bp, synthetic construct
  source 1..17: mol_type = other DNA
gccggccctgtggttcg

SEQ ID NO: 149087 - DNA, 17 bp, synthetic construct
  source 1..17: mol_type = other DNA
ggccggccctgtggttc

SEQ ID NO: 149088 - DNA, 17 bp, synthetic construct
  source 1..17: mol_type = other DNA
gggccggccctgtggtt

SEQ ID NO: 149089 - DNA, 17 bp, synthetic construct
  source 1..17: mol_type = other DNA
ggggccggccctgtggt

SEQ ID NO: 149090 - DNA, 17 bp, synthetic construct
  source 1..17: mol_type = other DNA
aggggccggccctgtgg

SEQ ID NO: 149091 - DNA, 17 bp, synthetic construct
  source 1..17: mol_type = other DNA
gaggggccggccctgtg

SEQ ID NO: 149092 - DNA, 17 bp, synthetic construct
  source 1..17: mol_type = other DNA
cgaggggccggccctgt

SEQ ID NO: 149093 - DNA, 17 bp, synthetic construct
  source 1..17: mol_type = other DNA
gcgaggggccggccctg

SEQ ID NO: 149094 - DNA, 17 bp, synthetic construct
  source 1..17: mol_type = other DNA
agcgaggggccggccct

SEQ ID NO: 149095 - DNA, 17 bp, synthetic construct
  source 1..17: mol_type = other DNA
cagcgaggggccggccc

SEQ ID NO: 149096 - DNA, 17 bp, synthetic construct
  source 1..17: mol_type = other DNA
tcagcgaggggccggcc

SEQ ID NO: 149097 - DNA, 17 bp, synthetic construct
  source 1..17: mol_type = other DNA
ctcagcgaggggccggc

SEQ ID NO: 149098 - DNA, 17 bp, synthetic construct
  source 1..17: mol_type = other DNA
gctcagcgaggggccgg

SEQ ID NO: 149099 - DNA, 17 bp, synthetic construct
  source 1..17: mol_type = other DNA
ggctcagcgaggggccg

SEQ ID NO: 149100 - DNA, 17 bp, synthetic construct
  source 1..17: mol_type = other DNA
gggctcagcgaggggcc

SEQ ID NO: 149101 - DNA, 17 bp, synthetic construct
  source 1..17: mol_type = other DNA
agggctcagcgaggggc

SEQ ID NO: 149102 - DNA, 17 bp, synthetic construct
  source 1..17: mol_type = other DNA
cagggctcagcgagggg

SEQ ID NO: 149103 - DNA, 17 bp, synthetic construct
  source 1..17: mol_type = other DNA
tcagggctcagcgaggg

SEQ ID NO: 149104 - DNA, 17 bp, synthetic construct
  source 1..17: mol_type = other DNA
gtcagggctcagcgagg

SEQ ID NO: 149105 - DNA, 17 bp, synthetic construct
  source 1..17: mol_type = other DNA
ggtcagggctcagcgag

SEQ ID NO: 149106 - DNA, 17 bp, synthetic construct
  source 1..17: mol_type = other DNA
tggtcagggctcagcga

SEQ ID NO: 149107 - DNA, 17 bp, synthetic construct
  source 1..17: mol_type = other DNA
atggtcagggctcagcg

SEQ ID NO: 149108 - DNA, 17 bp, synthetic construct
  source 1..17: mol_type = other DNA
catggtcagggctcagc

SEQ ID NO: 149109 - DNA, 17 bp, synthetic construct
  source 1..17: mol_type = other DNA
gcatggtcagggctcag

SEQ ID NO: 149110 - DNA, 17 bp, synthetic construct
  source 1..17: mol_type = other DNA
agcatggtcagggctca

SEQ ID NO: 149111 - DNA, 17 bp, synthetic construct
  source 1..17: mol_type = other DNA
cagcatggtcagggctc

SEQ ID NO: 149112 - DNA, 17 bp, synthetic construct
  source 1..17: mol_type = other DNA
acagcatggtcagggct

SEQ ID NO: 149113 - DNA, 17 bp, synthetic construct
  source 1..17: mol_type = other DNA
cacagcatggtcagggc

SEQ ID NO: 149114 - DNA, 17 bp, synthetic construct
  source 1..17: mol_type = other DNA
ccacagcatggtcaggg

SEQ ID NO: 149115 - DNA, 17 bp, synthetic construct
  source 1..17: mol_type = other DNA
cccacagcatggtcagg

SEQ ID NO: 149116 - DNA, 17 bp, synthetic construct
  source 1..17: mol_type = other DNA
ccccacagcatggtcag

SEQ ID NO: 149117 - DNA, 17 bp, synthetic construct
  source 1..17: mol_type = other DNA
cccccacagcatggtca

SEQ ID NO: 149118 - DNA, 17 bp, synthetic construct
  source 1..17: mol_type = other DNA
gcccccacagcatggtc

SEQ ID NO: 149119 - DNA, 17 bp, synthetic construct
  source 1..17: mol_type = other DNA
agcccccacagcatggt

SEQ ID NO: 149120 - DNA, 17 bp, synthetic construct
  source 1..17: mol_type = other DNA
cagcccccacagcatgg

SEQ ID NO: 149121 - DNA, 17 bp, synthetic construct
  source 1..17: mol_type = other DNA
ccagcccccacagcatg

SEQ ID NO: 149122 - DNA, 17 bp, synthetic construct
  source 1..17: mol_type = other DNA
cccagcccccacagcat

SEQ ID NO: 149123 - DNA, 17 bp, synthetic construct
  source 1..17: mol_type = other DNA
ccccagcccccacagca

SEQ ID NO: 149124 - DNA, 17 bp, synthetic construct
  source 1..17: mol_type = other DNA
gccccagcccccacagc

SEQ ID NO: 149125 - DNA, 17 bp, synthetic construct
  source 1..17: mol_type = other DNA
ggccccagcccccacag

SEQ ID NO: 149126 - DNA, 17 bp, synthetic construct
  source 1..17: mol_type = other DNA
aggccccagcccccaca

SEQ ID NO: 149127 - DNA, 17 bp, synthetic construct
  source 1..17: mol_type = other DNA
gaggccccagcccccac

SEQ ID NO: 149128 - DNA, 17 bp, synthetic construct
  source 1..17: mol_type = other DNA
tgaggccccagccccca

SEQ ID NO: 149129 - DNA, 17 bp, synthetic construct
  source 1..17: mol_type = other DNA
gtgaggccccagccccc

SEQ ID NO: 149130 - DNA, 17 bp, synthetic construct
  source 1..17: mol_type = other DNA
ggtgaggccccagcccc

SEQ ID NO: 149131 - DNA, 17 bp, synthetic construct
  source 1..17: mol_type = other DNA
aggtgaggccccagccc

SEQ ID NO: 149132 - DNA, 17 bp, synthetic construct
  source 1..17: mol_type = other DNA
gaggtgaggccccagcc

SEQ ID NO: 149133 - DNA, 17 bp, synthetic construct
  source 1..17: mol_type = other DNA
ggaggtgaggccccagc

SEQ ID NO: 149134 - DNA, 17 bp, synthetic construct
  source 1..17: mol_type = other DNA
gggaggtgaggccccag

SEQ ID NO: 149135 - DNA, 17 bp, synthetic construct
  source 1..17: mol_type = other DNA
tgggaggtgaggcccca

SEQ ID NO: 149136 - DNA, 17 bp, synthetic construct
  source 1..17: mol_type = other DNA
gtgggaggtgaggcccc

SEQ ID NO: 149137 - DNA, 17 bp, synthetic construct
  source 1..17: mol_type = other DNA
ggtgggaggtgaggccc

SEQ ID NO: 149138 - DNA, 17 bp, synthetic construct
  source 1..17: mol_type = other DNA
aggtgggaggtgaggcc

SEQ ID NO: 149139 - DNA, 17 bp, synthetic construct
  source 1..17: mol_type = other DNA
gaggtgggaggtgaggc

SEQ ID NO: 149140 - DNA, 17 bp, synthetic construct
  source 1..17: mol_type = other DNA
ggaggtgggaggtgagg

SEQ ID NO: 149141 - DNA, 17 bp, synthetic construct
  source 1..17: mol_type = other DNA
gggaggtgggaggtgag

SEQ ID NO: 149142 - DNA, 17 bp, synthetic construct
  source 1..17: mol_type = other DNA
ggggaggtgggaggtga

SEQ ID NO: 149143 - DNA, 17 bp, synthetic construct
  source 1..17: mol_type = other DNA
tggggaggtgggaggtg

SEQ ID NO: 149144 - DNA, 17 bp, synthetic construct
  source 1..17: mol_type = other DNA
gtggggaggtgggaggt

SEQ ID NO: 149145 - DNA, 17 bp, synthetic construct
  source 1..17: mol_type = other DNA
tgtggggaggtgggagg

SEQ ID NO: 149146 - DNA, 17 bp, synthetic construct
  source 1..17: mol_type = other DNA
ctgtggggaggtgggag

SEQ ID NO: 149147 - DNA, 17 bp, synthetic construct
  source 1..17: mol_type = other DNA
tctgtggggaggtggga

SEQ ID NO: 149148 - DNA, 17 bp, synthetic construct
  source 1..17: mol_type = other DNA
ctctgtggggaggtggg

SEQ ID NO: 149149 - DNA, 17 bp, synthetic construct
  source 1..17: mol_type = other DNA
tctctgtggggaggtgg

SEQ ID NO: 149150 - DNA, 17 bp, synthetic construct
  source 1..17: mol_type = other DNA
ctctctgtggggaggtg

SEQ ID NO: 149151 - DNA, 17 bp, synthetic construct
  source 1..17: mol_type = other DNA
actctctgtggggaggt

SEQ ID NO: 149152 - DNA, 17 bp, synthetic construct
  source 1..17: mol_type = other DNA
gactctctgtggggagg

SEQ ID NO: 149153 - DNA, 17 bp, synthetic construct
  source 1..17: mol_type = other DNA
agactctctgtggggag

SEQ ID NO: 149154 - DNA, 17 bp, synthetic construct
  source 1..17: mol_type = other DNA
gagactctctgtgggga

SEQ ID NO: 149155 - DNA, 17 bp, synthetic construct
  source 1..17: mol_type = other DNA
tgagactctctgtgggg

SEQ ID NO: 149156 - DNA, 17 bp, synthetic construct
  source 1..17: mol_type = other DNA
ctgagactctctgtggg

SEQ ID NO: 149157 - DNA, 17 bp, synthetic construct
  source 1..17: mol_type = other DNA
tctgagactctctgtgg

SEQ ID NO: 149158 - DNA, 17 bp, synthetic construct
  source 1..17: mol_type = other DNA
atctgagactctctgtg

SEQ ID NO: 149159 - DNA, 17 bp, synthetic construct
  source 1..17: mol_type = other DNA
gatctgagactctctgt

SEQ ID NO: 149160 - DNA, 17 bp, synthetic construct
  source 1..17: mol_type = other DNA
tgatctgagactctctg

SEQ ID NO: 149161 - DNA, 17 bp, synthetic construct
  source 1..17: mol_type = other DNA
ctgatctgagactctct

SEQ ID NO: 149162 - DNA, 17 bp, synthetic construct
  source 1..17: mol_type = other DNA
cctgatctgagactctc

SEQ ID NO: 149163 - DNA, 17 bp, synthetic construct
  source 1..17: mol_type = other DNA
tcctgatctgagactct

SEQ ID NO: 149164 - DNA, 17 bp, synthetic construct
  source 1..17: mol_type = other DNA
atcctgatctgagactc

SEQ ID NO: 149165 - DNA, 17 bp, synthetic construct
  source 1..17: mol_type = other DNA
gatcctgatctgagact

SEQ ID NO: 149166 - DNA, 17 bp, synthetic construct
  source 1..17: mol_type = other DNA
ggatcctgatctgagac

SEQ ID NO: 149167 - DNA, 17 bp, synthetic construct
  source 1..17: mol_type = other DNA
tggatcctgatctgaga

SEQ ID NO: 149168 - DNA, 17 bp, synthetic construct
  source 1..17: mol_type = other DNA
ctggatcctgatctgag

SEQ ID NO: 149169 - DNA, 17 bp, synthetic construct
  source 1..17: mol_type = other DNA
cctggatcctgatctga

SEQ ID NO: 149170 - DNA, 17 bp, synthetic construct
  source 1..17: mol_type = other DNA
ccctggatcctgatctg

SEQ ID NO: 149171 - DNA, 17 bp, synthetic construct
  source 1..17: mol_type = other DNA
tccctggatcctgatct

SEQ ID NO: 149172 - DNA, 17 bp, synthetic construct
  source 1..17: mol_type = other DNA
ctccctggatcctgatc

SEQ ID NO: 149173 - DNA, 17 bp, synthetic construct
  source 1..17: mol_type = other DNA
cctccctggatcctgat

SEQ ID NO: 149174 - DNA, 17 bp, synthetic construct
  source 1..17: mol_type = other DNA
tcctccctggatcctga

SEQ ID NO: 149175 - DNA, 17 bp, synthetic construct
  source 1..17: mol_type = other DNA
ctcctccctggatcctg

SEQ ID NO: 149176 - DNA, 17 bp, synthetic construct
  source 1..17: mol_type = other DNA
gctcctccctggatcct

SEQ ID NO: 149177 - DNA, 17 bp, synthetic construct
  source 1..17: mol_type = other DNA
agctcctccctggatcc

SEQ ID NO: 149178 - DNA, 17 bp, synthetic construct
  source 1..17: mol_type = other DNA
gagctcctccctggatc

SEQ ID NO: 149179 - DNA, 17 bp, synthetic construct
  source 1..17: mol_type = other DNA
agagctcctccctggat

SEQ ID NO: 149180 - DNA, 17 bp, synthetic construct
  source 1..17: mol_type = other DNA
cagagctcctccctgga

SEQ ID NO: 149181 - DNA, 17 bp, synthetic construct
  source 1..17: mol_type = other DNA
ccagagctcctccctgg

SEQ ID NO: 149182 - DNA, 17 bp, synthetic construct
  source 1..17: mol_type = other DNA
cccagagctcctccctg

SEQ ID NO: 149183 - DNA, 17 bp, synthetic construct
  source 1..17: mol_type = other DNA
ccccagagctcctccct

SEQ ID NO: 149184 - DNA, 17 bp, synthetic construct
  source 1..17: mol_type = other DNA
accccagagctcctccc

SEQ ID NO: 149185 - DNA, 17 bp, synthetic construct
  source 1..17: mol_type = other DNA
gaccccagagctcctcc

SEQ ID NO: 149186 - DNA, 17 bp, synthetic construct
  source 1..17: mol_type = other DNA
ggaccccagagctcctc

SEQ ID NO: 149187 - DNA, 17 bp, synthetic construct
  source 1..17: mol_type = other DNA
aggaccccagagctcct

SEQ ID NO: 149188 - DNA, 17 bp, synthetic construct
  source 1..17: mol_type = other DNA
caggaccccagagctcc

SEQ ID NO: 149189 - DNA, 17 bp, synthetic construct
  source 1..17: mol_type = other DNA
acaggaccccagagctc

SEQ ID NO: 149190 - DNA, 17 bp, synthetic construct
  source 1..17: mol_type = other DNA
cacaggaccccagagct

SEQ ID NO: 149191 - DNA, 17 bp, synthetic construct
  source 1..17: mol_type = other DNA
tcacaggaccccagagc

SEQ ID NO: 149192 - DNA, 17 bp, synthetic construct
  source 1..17: mol_type = other DNA
ttcacaggaccccagag

SEQ ID NO: 149193 - DNA, 17 bp, synthetic construct
  source 1..17: mol_type = other DNA
cttcacaggaccccaga

SEQ ID NO: 149194 - DNA, 17 bp, synthetic construct
  source 1..17: mol_type = other DNA
ccttcacaggaccccag

SEQ ID NO: 149195 - DNA, 17 bp, synthetic construct
  source 1..17: mol_type = other DNA
cccttcacaggacccca

SEQ ID NO: 149196 - DNA, 17 bp, synthetic construct
  source 1..17: mol_type = other DNA
ccccttcacaggacccc

SEQ ID NO: 149197 - DNA, 17 bp, synthetic construct
  source 1..17: mol_type = other DNA
cccccttcacaggaccc

SEQ ID NO: 149198 - DNA, 17 bp, synthetic construct
  source 1..17: mol_type = other DNA
gcccccttcacaggacc

SEQ ID NO: 149199 - DNA, 17 bp, synthetic construct
  source 1..17: mol_type = other DNA
cgcccccttcacaggac

SEQ ID NO: 149200 - DNA, 17 bp, synthetic construct
  source 1..17: mol_type = other DNA
gcgcccccttcacagga

SEQ ID NO: 149201 - DNA, 17 bp, synthetic construct
  source 1..17: mol_type = other DNA
ggcgcccccttcacagg

SEQ ID NO: 149202 - DNA, 17 bp, synthetic construct
  source 1..17: mol_type = other DNA
gggcgcccccttcacag

SEQ ID NO: 149203 - DNA, 17 bp, synthetic construct
  source 1..17: mol_type = other DNA
ggggcgcccccttcaca

SEQ ID NO: 149204 - DNA, 17 bp, synthetic construct
  source 1..17: mol_type = other DNA
tggggcgcccccttcac

SEQ ID NO: 149205 - DNA, 17 bp, synthetic construct
  source 1..17: mol_type = other DNA
ttggggcgcccccttca

SEQ ID NO: 149206 - DNA, 17 bp, synthetic construct
  source 1..17: mol_type = other DNA
gttggggcgcccccttc

SEQ ID NO: 149207 - DNA, 17 bp, synthetic construct
  source 1..17: mol_type = other DNA
ggttggggcgccccctt

SEQ ID NO: 149208 - DNA, 17 bp, synthetic construct
  source 1..17: mol_type = other DNA
gggttggggcgccccct

SEQ ID NO: 149209 - DNA, 17 bp, synthetic construct
  source 1..17: mol_type = other DNA
tgggttggggcgccccc

SEQ ID NO: 149210 - DNA, 17 bp, synthetic construct
  source 1..17: mol_type = other DNA
ttgggttggggcgcccc

SEQ ID NO: 149211 - DNA, 17 bp, synthetic construct
  source 1..17: mol_type = other DNA
tttgggttggggcgccc

SEQ ID NO: 149212 - DNA, 17 bp, synthetic construct
  source 1..17: mol_type = other DNA
gtttgggttggggcgcc

SEQ ID NO: 149213 - DNA, 17 bp, synthetic construct
  source 1..17: mol_type = other DNA
agtttgggttggggcgc

SEQ ID NO: 149214 - DNA, 17 bp, synthetic construct
  source 1..17: mol_type = other DNA
cagtttgggttggggcg

SEQ ID NO: 149215 - DNA, 17 bp, synthetic construct
  source 1..17: mol_type = other DNA
ccagtttgggttggggc

SEQ ID NO: 149216 - DNA, 17 bp, synthetic construct
  source 1..17: mol_type = other DNA
cccagtttgggttgggg

SEQ ID NO: 149217 - DNA, 17 bp, synthetic construct
  source 1..17: mol_type = other DNA
gcccagtttgggttggg

SEQ ID NO: 149218 - DNA, 17 bp, synthetic construct
  source 1..17: mol_type = other DNA
tgcccagtttgggttgg

SEQ ID NO: 149219 - DNA, 17 bp, synthetic construct
  source 1..17: mol_type = other DNA
ctgcccagtttgggttg

SEQ ID NO: 149220 - DNA, 17 bp, synthetic construct
  source 1..17: mol_type = other DNA
tctgcccagtttgggtt

SEQ ID NO: 149221 - DNA, 17 bp, synthetic construct
  source 1..17: mol_type = other DNA
gtctgcccagtttgggt

SEQ ID NO: 149222 - DNA, 17 bp, synthetic construct
  source 1..17: mol_type = other DNA
tgtctgcccagtttggg

SEQ ID NO: 149223 - DNA, 17 bp, synthetic construct
  source 1..17: mol_type = other DNA
ttgtctgcccagtttgg

SEQ ID NO: 149224 - DNA, 17 bp, synthetic construct
  source 1..17: mol_type = other DNA
attgtctgcccagtttg

SEQ ID NO: 149225 - DNA, 17 bp, synthetic construct
  source 1..17: mol_type = other DNA
cattgtctgcccagttt

SEQ ID NO: 149226 - DNA, 17 bp, synthetic construct
  source 1..17: mol_type = other DNA
ccattgtctgcccagtt

SEQ ID NO: 149227 - DNA, 17 bp, synthetic construct
  source 1..17: mol_type = other DNA
gccattgtctgcccagt

SEQ ID NO: 149228 - DNA, 17 bp, synthetic construct
  source 1..17: mol_type = other DNA
ggccattgtctgcccag

SEQ ID NO: 149229 - DNA, 17 bp, synthetic construct
  source 1..17: mol_type = other DNA
cggccattgtctgccca

SEQ ID NO: 149230 - DNA, 17 bp, synthetic construct
  source 1..17: mol_type = other DNA
ccggccattgtctgccc

SEQ ID NO: 149231 - DNA, 17 bp, synthetic construct
  source 1..17: mol_type = other DNA
cccggccattgtctgcc

SEQ ID NO: 149232 - DNA, 17 bp, synthetic construct
  source 1..17: mol_type = other DNA
ccccggccattgtctgc

SEQ ID NO: 149233 - DNA, 17 bp, synthetic construct
  source 1..17: mol_type = other DNA
cccccggccattgtctg

SEQ ID NO: 149234 - DNA, 17 bp, synthetic construct
  source 1..17: mol_type = other DNA
acccccggccattgtct

SEQ ID NO: 149235 - DNA, 17 bp, synthetic construct
  source 1..17: mol_type = other DNA
gacccccggccattgtc

SEQ ID NO: 149236 - DNA, 17 bp, synthetic construct
  source 1..17: mol_type = other DNA
ggacccccggccattgt

SEQ ID NO: 149237 - DNA, 17 bp, synthetic construct
  source 1..17: mol_type = other DNA
aggacccccggccattg

SEQ ID NO: 149238 - DNA, 17 bp, synthetic construct
  source 1..17: mol_type = other DNA
gaggacccccggccatt

SEQ ID NO: 149239 - DNA, 17 bp, synthetic construct
  source 1..17: mol_type = other DNA
tgaggacccccggccat

SEQ ID NO: 149240 - DNA, 17 bp, synthetic construct
  source 1..17: mol_type = other DNA
ctgaggacccccggcca

SEQ ID NO: 149241 - DNA, 17 bp, synthetic construct
  source 1..17: mol_type = other DNA
tctgaggacccccggcc

SEQ ID NO: 149242 - DNA, 17 bp, synthetic construct
  source 1..17: mol_type = other DNA
ctctgaggacccccggc

SEQ ID NO: 149243 - DNA, 17 bp, synthetic construct
  source 1..17: mol_type = other DNA
actctgaggacccccgg

SEQ ID NO: 149244 - DNA, 17 bp, synthetic construct
  source 1..17: mol_type = other DNA
gactctgaggacccccg

SEQ ID NO: 149245 - DNA, 17 bp, synthetic construct
  source 1..17: mol_type = other DNA
ggactctgaggaccccc

SEQ ID NO: 149246 - DNA, 17 bp, synthetic construct
  source 1..17: mol_type = other DNA
aggactctgaggacccc

SEQ ID NO: 149247 - DNA, 17 bp, synthetic construct
  source 1..17: mol_type = other DNA
caggactctgaggaccc

SEQ ID NO: 149248 - DNA, 17 bp, synthetic construct
  source 1..17: mol_type = other DNA
acaggactctgaggacc

SEQ ID NO: 149249 - DNA, 17 bp, synthetic construct
  source 1..17: mol_type = other DNA
cacaggactctgaggac

SEQ ID NO: 149250 - DNA, 17 bp, synthetic construct
  source 1..17: mol_type = other DNA
ccacaggactctgagga

SEQ ID NO: 149251 - DNA, 17 bp, synthetic construct
  source 1..17: mol_type = other DNA
cccacaggactctgagg

SEQ ID NO: 149252 - DNA, 17 bp, synthetic construct
  source 1..17: mol_type = other DNA
acccacaggactctgag

SEQ ID NO: 149253 - DNA, 17 bp, synthetic construct
  source 1..17: mol_type = other DNA
aacccacaggactctga

SEQ ID NO: 149254 - DNA, 17 bp, synthetic construct
  source 1..17: mol_type = other DNA
caacccacaggactctg

SEQ ID NO: 149255 - DNA, 17 bp, synthetic construct
  source 1..17: mol_type = other DNA
ccaacccacaggactct

SEQ ID NO: 149256 - DNA, 17 bp, synthetic construct
  source 1..17: mol_type = other DNA
tccaacccacaggactc

SEQ ID NO: 149257 - DNA, 17 bp, synthetic construct
  source 1..17: mol_type = other DNA
ctccaacccacaggact

SEQ ID NO: 149258 - DNA, 17 bp, synthetic construct
  source 1..17: mol_type = other DNA
gctccaacccacaggac

SEQ ID NO: 149259 - DNA, 17 bp, synthetic construct
  source 1..17: mol_type = other DNA
agctccaacccacagga

SEQ ID NO: 149260 - DNA, 17 bp, synthetic construct
  source 1..17: mol_type = other DNA
cagctccaacccacagg

SEQ ID NO: 149261 - DNA, 17 bp, synthetic construct
  source 1..17: mol_type = other DNA
gcagctccaacccacag

SEQ ID NO: 149262 - DNA, 17 bp, synthetic construct
  source 1..17: mol_type = other DNA
ggcagctccaacccaca

SEQ ID NO: 149263 - DNA, 17 bp, synthetic construct
  source 1..17: mol_type = other DNA
aggcagctccaacccac

SEQ ID NO: 149264 - DNA, 17 bp, synthetic construct
  source 1..17: mol_type = other DNA
gaggcagctccaaccca

SEQ ID NO: 149265 - DNA, 17 bp, synthetic construct
  source 1..17: mol_type = other DNA
ggaggcagctccaaccc

SEQ ID NO: 149266 - DNA, 17 bp, synthetic construct
  source 1..17: mol_type = other DNA
aggaggcagctccaacc

SEQ ID NO: 149267 - DNA, 17 bp, synthetic construct
  source 1..17: mol_type = other DNA
gaggaggcagctccaac

SEQ ID NO: 149268 - DNA, 17 bp, synthetic construct
  source 1..17: mol_type = other DNA
ggaggaggcagctccaa

SEQ ID NO: 149269 - DNA, 17 bp, synthetic construct
  source 1..17: mol_type = other DNA
gggaggaggcagctcca

SEQ ID NO: 149270 - DNA, 17 bp, synthetic construct
  source 1..17: mol_type = other DNA
tgggaggaggcagctcc

SEQ ID NO: 149271 - DNA, 17 bp, synthetic construct
  source 1..17: mol_type = other DNA
ctgggaggaggcagctc

SEQ ID NO: 149272 - DNA, 17 bp, synthetic construct
  source 1..17: mol_type = other DNA
gctgggaggaggcagct

SEQ ID NO: 149273 - DNA, 17 bp, synthetic construct
  source 1..17: mol_type = other DNA
ggctgggaggaggcagc

SEQ ID NO: 149274 - DNA, 17 bp, synthetic construct
  source 1..17: mol_type = other DNA
aggctgggaggaggcag

SEQ ID NO: 149275 - DNA, 17 bp, synthetic construct
  source 1..17: mol_type = other DNA
gaggctgggaggaggca

SEQ ID NO: 149276 - DNA, 17 bp, synthetic construct
  source 1..17: mol_type = other DNA
ggaggctgggaggaggc

SEQ ID NO: 149277 - DNA, 17 bp, synthetic construct
  source 1..17: mol_type = other DNA
tggaggctgggaggagg

SEQ ID NO: 149278 - DNA, 17 bp, synthetic construct
  source 1..17: mol_type = other DNA
atggaggctgggaggag

SEQ ID NO: 149279 - DNA, 17 bp, synthetic construct
  source 1..17: mol_type = other DNA
catggaggctgggagga

SEQ ID NO: 149280 - DNA, 17 bp, synthetic construct
  source 1..17: mol_type = other DNA
ccatggaggctgggagg

SEQ ID NO: 149281 - DNA, 17 bp, synthetic construct
  source 1..17: mol_type = other DNA
cccatggaggctgggag

SEQ ID NO: 149282 - DNA, 17 bp, synthetic construct
  source 1..17: mol_type = other DNA
ccccatggaggctggga

SEQ ID NO: 149283 - DNA, 17 bp, synthetic construct
  source 1..17: mol_type = other DNA
accccatggaggctggg

SEQ ID NO: 149284 - DNA, 17 bp, synthetic construct
  source 1..17: mol_type = other DNA
aaccccatggaggctgg

SEQ ID NO: 149285 - DNA, 17 bp, synthetic construct
  source 1..17: mol_type = other DNA
caaccccatggaggctg

SEQ ID NO: 149286 - DNA, 17 bp, synthetic construct
  source 1..17: mol_type = other DNA
ccaaccccatggaggct

SEQ ID NO: 149287 - DNA, 17 bp, synthetic construct
  source 1..17: mol_type = other DNA
accaaccccatggaggc

SEQ ID NO: 149288 - DNA, 17 bp, synthetic construct
  source 1..17: mol_type = other DNA
caccaaccccatggagg

SEQ ID NO: 149289 - DNA, 17 bp, synthetic construct
  source 1..17: mol_type = other DNA
ccaccaaccccatggag

SEQ ID NO: 149290 - DNA, 17 bp, synthetic construct
  source 1..17: mol_type = other DNA
cccaccaaccccatgga

SEQ ID NO: 149291 - DNA, 17 bp, synthetic construct
  source 1..17: mol_type = other DNA
acccaccaaccccatgg

SEQ ID NO: 149292 - DNA, 17 bp, synthetic construct
  source 1..17: mol_type = other DNA
cacccaccaaccccatg

SEQ ID NO: 149293 - DNA, 17 bp, synthetic construct
  source 1..17: mol_type = other DNA
tcacccaccaaccccat

SEQ ID NO: 149294 - DNA, 17 bp, synthetic construct
  source 1..17: mol_type = other DNA
ctcacccaccaacccca

SEQ ID NO: 149295 - DNA, 17 bp, synthetic construct
  source 1..17: mol_type = other DNA
cctcacccaccaacccc

SEQ ID NO: 149296 - DNA, 17 bp, synthetic construct
  source 1..17: mol_type = other DNA
gcctcacccaccaaccc

SEQ ID NO: 149297 - DNA, 17 bp, synthetic construct
  source 1..17: mol_type = other DNA
ggcctcacccaccaacc

SEQ ID NO: 149298 - DNA, 17 bp, synthetic construct
  source 1..17: mol_type = other DNA
aggcctcacccaccaac

SEQ ID NO: 149299 - DNA, 17 bp, synthetic construct
  source 1..17: mol_type = other DNA
aaggcctcacccaccaa

SEQ ID NO: 149300 - DNA, 17 bp, synthetic construct
  source 1..17: mol_type = other DNA
caaggcctcacccacca

SEQ ID NO: 149301 - DNA, 17 bp, synthetic construct
  source 1..17: mol_type = other DNA
gcaaggcctcacccacc

SEQ ID NO: 149302 - DNA, 17 bp, synthetic construct
  source 1..17: mol_type = other DNA
ggcaaggcctcacccac

SEQ ID NO: 149303 - DNA, 17 bp, synthetic construct
  source 1..17: mol_type = other DNA
gggcaaggcctcaccca

SEQ ID NO: 149304 - DNA, 17 bp, synthetic construct
  source 1..17: mol_type = other DNA
cgggcaaggcctcaccc

SEQ ID NO: 149305 - DNA, 17 bp, synthetic construct
  source 1..17: mol_type = other DNA
ccgggcaaggcctcacc

SEQ ID NO: 149306 - DNA, 17 bp, synthetic construct
  source 1..17: mol_type = other DNA
tccgggcaaggcctcac

SEQ ID NO: 149307 - DNA, 17 bp, synthetic construct
  source 1..17: mol_type = other DNA
ctccgggcaaggcctca

SEQ ID NO: 149308 - DNA, 17 bp, synthetic construct
  source 1..17: mol_type = other DNA
cctccgggcaaggcctc

SEQ ID NO: 149309 - DNA, 17 bp, synthetic construct
  source 1..17: mol_type = other DNA
gcctccgggcaaggcct

SEQ ID NO: 149310 - DNA, 17 bp, synthetic construct
  source 1..17: mol_type = other DNA
cgcctccgggcaaggcc

SEQ ID NO: 149311 - DNA, 17 bp, synthetic construct
  source 1..17: mol_type = other DNA
ccgcctccgggcaaggc

SEQ ID NO: 149312 - DNA, 17 bp, synthetic construct
  source 1..17: mol_type = other DNA
accgcctccgggcaagg

SEQ ID NO: 149313 - DNA, 17 bp, synthetic construct
  source 1..17: mol_type = other DNA
caccgcctccgggcaag

SEQ ID NO: 149314 - DNA, 17 bp, synthetic construct
  source 1..17: mol_type = other DNA
ccaccgcctccgggcaa

SEQ ID NO: 149315 - DNA, 17 bp, synthetic construct
  source 1..17: mol_type = other DNA
accaccgcctccgggca

SEQ ID NO: 149316 - DNA, 17 bp, synthetic construct
  source 1..17: mol_type = other DNA
gaccaccgcctccgggc

SEQ ID NO: 149317 - DNA, 17 bp, synthetic construct
  source 1..17: mol_type = other DNA
tgaccaccgcctccggg

SEQ ID NO: 149318 - DNA, 17 bp, synthetic construct
  source 1..17: mol_type = other DNA
ctgaccaccgcctccgg

SEQ ID NO: 149319 - DNA, 17 bp, synthetic construct
  source 1..17: mol_type = other DNA
gctgaccaccgcctccg

SEQ ID NO: 149320 - DNA, 17 bp, synthetic construct
  source 1..17: mol_type = other DNA
ggctgaccaccgcctcc

SEQ ID NO: 149321 - DNA, 17 bp, synthetic construct
  source 1..17: mol_type = other DNA
aggctgaccaccgcctc

SEQ ID NO: 149322 - DNA, 17 bp, synthetic construct
  source 1..17: mol_type = other DNA
caggctgaccaccgcct

SEQ ID NO: 149323 - DNA, 17 bp, synthetic construct
  source 1..17: mol_type = other DNA
ccaggctgaccaccgcc

SEQ ID NO: 149324 - DNA, 17 bp, synthetic construct
  source 1..17: mol_type = other DNA
cccaggctgaccaccgc

SEQ ID NO: 149325 - DNA, 17 bp, synthetic construct
  source 1..17: mol_type = other DNA
ccccaggctgaccaccg

SEQ ID NO: 149326 - DNA, 17 bp, synthetic construct
  source 1..17: mol_type = other DNA
cccccaggctgaccacc

SEQ ID NO: 149327 - DNA, 17 bp, synthetic construct
  source 1..17: mol_type = other DNA
tcccccaggctgaccac

SEQ ID NO: 149328 - DNA, 17 bp, synthetic construct
  source 1..17: mol_type = other DNA
gtcccccaggctgacca

SEQ ID NO: 149329 - DNA, 17 bp, synthetic construct
  source 1..17: mol_type = other DNA
ggtcccccaggctgacc

SEQ ID NO: 149330 - DNA, 17 bp, synthetic construct
  source 1..17: mol_type = other DNA
aggtcccccaggctgac

SEQ ID NO: 149331 - DNA, 17 bp, synthetic construct
  source 1..17: mol_type = other DNA
aaggtcccccaggctga

SEQ ID NO: 149332 - DNA, 17 bp, synthetic construct
  source 1..17: mol_type = other DNA
caaggtcccccaggctg

SEQ ID NO: 149333 - DNA, 17 bp, synthetic construct
  source 1..17: mol_type = other DNA
ccaaggtcccccaggct

SEQ ID NO: 149334 - DNA, 17 bp, synthetic construct
  source 1..17: mol_type = other DNA
cccaaggtcccccaggc

SEQ ID NO: 149335 - DNA, 17 bp, synthetic construct
  source 1..17: mol_type = other DNA
gcccaaggtcccccagg

SEQ ID NO: 149336 - DNA, 17 bp, synthetic construct
  source 1..17: mol_type = other DNA
cgcccaaggtcccccag

SEQ ID NO: 149337 - DNA, 17 bp, synthetic construct
  source 1..17: mol_type = other DNA
ccgcccaaggtccccca

SEQ ID NO: 149338 - DNA, 17 bp, synthetic construct
  source 1..17: mol_type = other DNA
gccgcccaaggtccccc

SEQ ID NO: 149339 - DNA, 17 bp, synthetic construct
  source 1..17: mol_type = other DNA
ggccgcccaaggtcccc

SEQ ID NO: 149340 - DNA, 17 bp, synthetic construct
  source 1..17: mol_type = other DNA
tggccgcccaaggtccc

SEQ ID NO: 149341 - DNA, 17 bp, synthetic construct
  source 1..17: mol_type = other DNA
atggccgcccaaggtcc

SEQ ID NO: 149342 - DNA, 17 bp, synthetic construct
  source 1..17: mol_type = other DNA
gatggccgcccaaggtc

SEQ ID NO: 149343 - DNA, 17 bp, synthetic construct
  source 1..17: mol_type = other DNA
ggatggccgcccaaggt

SEQ ID NO: 149344 - DNA, 17 bp, synthetic construct
  source 1..17: mol_type = other DNA
gggatggccgcccaagg

SEQ ID NO: 149345 - DNA, 17 bp, synthetic construct
  source 1..17: mol_type = other DNA
tgggatggccgcccaag

SEQ ID NO: 149346 - DNA, 17 bp, synthetic construct
  source 1..17: mol_type = other DNA
ctgggatggccgcccaa

SEQ ID NO: 149347 - DNA, 17 bp, synthetic construct
  source 1..17: mol_type = other DNA
actgggatggccgccca

SEQ ID NO: 149348 - DNA, 17 bp, synthetic construct
  source 1..17: mol_type = other DNA
tactgggatggccgccc

SEQ ID NO: 149349 - DNA, 17 bp, synthetic construct
  source 1..17: mol_type = other DNA
atactgggatggccgcc

SEQ ID NO: 149350 - DNA, 17 bp, synthetic construct
  source 1..17: mol_type = other DNA
gatactgggatggccgc

SEQ ID NO: 149351 - DNA, 17 bp, synthetic construct
  source 1..17: mol_type = other DNA
tgatactgggatggccg

SEQ ID NO: 149352 - DNA, 17 bp, synthetic construct
  source 1..17: mol_type = other DNA
ttgatactgggatggcc

SEQ ID NO: 149353 - DNA, 17 bp, synthetic construct
  source 1..17: mol_type = other DNA
gttgatactgggatggc

SEQ ID NO: 149354 - DNA, 17 bp, synthetic construct
  source 1..17: mol_type = other DNA
cgttgatactgggatgg

SEQ ID NO: 149355 - DNA, 17 bp, synthetic construct
  source 1..17: mol_type = other DNA
ccgttgatactgggatg

SEQ ID NO: 149356 - DNA, 17 bp, synthetic construct
  source 1..17: mol_type = other DNA
gccgttgatactgggat

SEQ ID NO: 149357 - DNA, 17 bp, synthetic construct
  source 1..17: mol_type = other DNA
ggccgttgatactggga

SEQ ID NO: 149358 - DNA, 17 bp, synthetic construct
  source 1..17: mol_type = other DNA
tggccgttgatactggg

SEQ ID NO: 149359 - DNA, 17 bp, synthetic construct
  source 1..17: mol_type = other DNA
gtggccgttgatactgg

SEQ ID NO: 149360 - DNA, 17 bp, synthetic construct
  source 1..17: mol_type = other DNA
tgtggccgttgatactg

SEQ ID NO: 149361 - DNA, 17 bp, synthetic construct
  source 1..17: mol_type = other DNA
gtgtggccgttgatact

SEQ ID NO: 149362 - DNA, 17 bp, synthetic construct
  source 1..17: mol_type = other DNA
tgtgtggccgttgatac

SEQ ID NO: 149363 - DNA, 17 bp, synthetic construct
  source 1..17: mol_type = other DNA
ctgtgtggccgttgata

SEQ ID NO: 149364 - DNA, 17 bp, synthetic construct
  source 1..17: mol_type = other DNA
gctgtgtggccgttgat

SEQ ID NO: 149365 - DNA, 17 bp, synthetic construct
  source 1..17: mol_type = other DNA
agctgtgtggccgttga

SEQ ID NO: 149366 - DNA, 17 bp, synthetic construct
  source 1..17: mol_type = other DNA
aagctgtgtggccgttg

SEQ ID NO: 149367 - DNA, 17 bp, synthetic construct
  source 1..17: mol_type = other DNA
caagctgtgtggccgtt

SEQ ID NO: 149368 - DNA, 17 bp, synthetic construct
  source 1..17: mol_type = other DNA
gcaagctgtgtggccgt

SEQ ID NO: 149369 - DNA, 17 bp, synthetic construct
  source 1..17: mol_type = other DNA
cgcaagctgtgtggccg

SEQ ID NO: 149370 - DNA, 17 bp, synthetic construct
  source 1..17: mol_type = other DNA
gcgcaagctgtgtggcc

SEQ ID NO: 149371 - DNA, 17 bp, synthetic construct
  source 1..17: mol_type = other DNA
cgcgcaagctgtgtggc

SEQ ID NO: 149372 - DNA, 17 bp, synthetic construct
  source 1..17: mol_type = other DNA
ccgcgcaagctgtgtgg

SEQ ID NO: 149373 - DNA, 17 bp, synthetic construct
  source 1..17: mol_type = other DNA
gccgcgcaagctgtgtg

SEQ ID NO: 149374 - DNA, 17 bp, synthetic construct
  source 1..17: mol_type = other DNA
ggccgcgcaagctgtgt

SEQ ID NO: 149375 - DNA, 17 bp, synthetic construct
  source 1..17: mol_type = other DNA
gggccgcgcaagctgtg

SEQ ID NO: 149376 - DNA, 17 bp, synthetic construct
  source 1..17: mol_type = other DNA
tgggccgcgcaagctgt

SEQ ID NO: 149377 - DNA, 17 bp, synthetic construct
  source 1..17: mol_type = other DNA
ctgggccgcgcaagctg

SEQ ID NO: 149378 - DNA, 17 bp, synthetic construct
  source 1..17: mol_type = other DNA
tctgggccgcgcaagct

SEQ ID NO: 149379 - DNA, 17 bp, synthetic construct
  source 1..17: mol_type = other DNA
ctctgggccgcgcaagc

SEQ ID NO: 149380 - DNA, 17 bp, synthetic construct
  source 1..17: mol_type = other DNA
actctgggccgcgcaag

SEQ ID NO: 149381 - DNA, 17 bp, synthetic construct
  source 1..17: mol_type = other DNA
gactctgggccgcgcaa

SEQ ID NO: 149382 - DNA, 17 bp, synthetic construct
  source 1..17: mol_type = other DNA
ggactctgggccgcgca

SEQ ID NO: 149383 - DNA, 17 bp, synthetic construct
  source 1..17: mol_type = other DNA
aggactctgggccgcgc

SEQ ID NO: 149384 - DNA, 17 bp, synthetic construct
  source 1..17: mol_type = other DNA
caggactctgggccgcg

SEQ ID NO: 149385 - DNA, 17 bp, synthetic construct
  source 1..17: mol_type = other DNA
gcaggactctgggccgc

SEQ ID NO: 149386 - DNA, 17 bp, synthetic construct
  source 1..17: mol_type = other DNA
ggcaggactctgggccg

SEQ ID NO: 149387 - DNA, 17 bp, synthetic construct
  source 1..17: mol_type = other DNA
gggcaggactctgggcc

SEQ ID NO: 149388 - DNA, 17 bp, synthetic construct
  source 1..17: mol_type = other DNA
ggggcaggactctgggc

SEQ ID NO: 149389 - DNA, 17 bp, synthetic construct
  source 1..17: mol_type = other DNA
gggggcaggactctggg

SEQ ID NO: 149390 - DNA, 17 bp, synthetic construct
  source 1..17: mol_type = other DNA
tgggggcaggactctgg

SEQ ID NO: 149391 - DNA, 17 bp, synthetic construct
  source 1..17: mol_type = other DNA
ctgggggcaggactctg

SEQ ID NO: 149392 - DNA, 17 bp, synthetic construct
  source 1..17: mol_type = other DNA
gctgggggcaggactct

SEQ ID NO: 149393 - DNA, 17 bp, synthetic construct
  source 1..17: mol_type = other DNA
ggctgggggcaggactc

SEQ ID NO: 149394 - DNA, 17 bp, synthetic construct
  source 1..17: mol_type = other DNA
aggctgggggcaggact

SEQ ID NO: 149395 - DNA, 17 bp, synthetic construct
  source 1..17: mol_type = other DNA
caggctgggggcaggac

SEQ ID NO: 149396 - DNA, 17 bp, synthetic construct
  source 1..17: mol_type = other DNA
gcaggctgggggcagga

SEQ ID NO: 149397 - DNA, 17 bp, synthetic construct
  source 1..17: mol_type = other DNA
ggcaggctgggggcagg

SEQ ID NO: 149398 - DNA, 17 bp, synthetic construct
  source 1..17: mol_type = other DNA
gggcaggctgggggcag

SEQ ID NO: 149399 - DNA, 17 bp, synthetic construct
  source 1..17: mol_type = other DNA
ggggcaggctgggggca

SEQ ID NO: 149400 - DNA, 17 bp, synthetic construct
  source 1..17: mol_type = other DNA
tggggcaggctgggggc

SEQ ID NO: 149401 - DNA, 17 bp, synthetic construct
  source 1..17: mol_type = other DNA
gtggggcaggctggggg

SEQ ID NO: 149402 - DNA, 17 bp, synthetic construct
  source 1..17: mol_type = other DNA
agtggggcaggctgggg

SEQ ID NO: 149403 - DNA, 17 bp, synthetic construct
  source 1..17: mol_type = other DNA
gagtggggcaggctggg

SEQ ID NO: 149404 - DNA, 17 bp, synthetic construct
  source 1..17: mol_type = other DNA
cgagtggggcaggctgg

SEQ ID NO: 149405 - DNA, 17 bp, synthetic construct
  source 1..17: mol_type = other DNA
gcgagtggggcaggctg

SEQ ID NO: 149406 - DNA, 17 bp, synthetic construct
  source 1..17: mol_type = other DNA
ggcgagtggggcaggct

SEQ ID NO: 149407 - DNA, 17 bp, synthetic construct
  source 1..17: mol_type = other DNA
gggcgagtggggcaggc

SEQ ID NO: 149408 - DNA, 17 bp, synthetic construct
  source 1..17: mol_type = other DNA
agggcgagtggggcagg

SEQ ID NO: 149409 - DNA, 17 bp, synthetic construct
  source 1..17: mol_type = other DNA
cagggcgagtggggcag

SEQ ID NO: 149410 - DNA, 17 bp, synthetic construct
  source 1..17: mol_type = other DNA
tcagggcgagtggggca

SEQ ID NO: 149411 - DNA, 17 bp, synthetic construct
  source 1..17: mol_type = other DNA
gtcagggcgagtggggc

SEQ ID NO: 149412 - DNA, 17 bp, synthetic construct
  source 1..17: mol_type = other DNA
agtcagggcgagtgggg

SEQ ID NO: 149413 - DNA, 17 bp, synthetic construct
  source 1..17: mol_type = other DNA
aagtcagggcgagtggg

SEQ ID NO: 149414 - DNA, 17 bp, synthetic construct
  source 1..17: mol_type = other DNA
taagtcagggcgagtgg

SEQ ID NO: 149415 - DNA, 17 bp, synthetic construct
  source 1..17: mol_type = other DNA
ctaagtcagggcgagtg

SEQ ID NO: 149416 - DNA, 17 bp, synthetic construct
  source 1..17: mol_type = other DNA
cctaagtcagggcgagt

SEQ ID NO: 149417 - DNA, 17 bp, synthetic construct
  source 1..17: mol_type = other DNA
tcctaagtcagggcgag

SEQ ID NO: 149418 - DNA, 17 bp, synthetic construct
  source 1..17: mol_type = other DNA
atcctaagtcagggcga

SEQ ID NO: 149419 - DNA, 17 bp, synthetic construct
  source 1..17: mol_type = other DNA
gatcctaagtcagggcg

SEQ ID NO: 149420 - DNA, 17 bp, synthetic construct
  source 1..17: mol_type = other DNA
agatcctaagtcagggc

SEQ ID NO: 149421 - DNA, 17 bp, synthetic construct
  source 1..17: mol_type = other DNA
tagatcctaagtcaggg

SEQ ID NO: 149422 - DNA, 17 bp, synthetic construct
  source 1..17: mol_type = other DNA
ctagatcctaagtcagg

SEQ ID NO: 149423 - DNA, 17 bp, synthetic construct
  source 1..17: mol_type = other DNA
actagatcctaagtcag

SEQ ID NO: 149424 - DNA, 17 bp, synthetic construct
  source 1..17: mol_type = other DNA
aactagatcctaagtca

SEQ ID NO: 149425 - DNA, 17 bp, synthetic construct
  source 1..17: mol_type = other DNA
gaactagatcctaagtc

SEQ ID NO: 149426 - DNA, 17 bp, synthetic construct
  source 1..17: mol_type = other DNA
cgaactagatcctaagt

SEQ ID NO: 149427 - DNA, 17 bp, synthetic construct
  source 1..17: mol_type = other DNA
tcgaactagatcctaag

SEQ ID NO: 149428 - DNA, 17 bp, synthetic construct
  source 1..17: mol_type = other DNA
ttcgaactagatcctaa

SEQ ID NO: 149429 - DNA, 17 bp, synthetic construct
  source 1..17: mol_type = other DNA
tttcgaactagatccta

SEQ ID NO: 149430 - DNA, 17 bp, synthetic construct
  source 1..17: mol_type = other DNA
gtttcgaactagatcct

SEQ ID NO: 149431 - DNA, 17 bp, synthetic construct
  source 1..17: mol_type = other DNA
agtttcgaactagatcc

SEQ ID NO: 149432 - DNA, 17 bp, synthetic construct
  source 1..17: mol_type = other DNA
cagtttcgaactagatc

SEQ ID NO: 149433 - DNA, 17 bp, synthetic construct
  source 1..17: mol_type = other DNA
ccagtttcgaactagat

SEQ ID NO: 149434 - DNA, 17 bp, synthetic construct
  source 1..17: mol_type = other DNA
accagtttcgaactaga

SEQ ID NO: 149435 - DNA, 17 bp, synthetic construct
  source 1..17: mol_type = other DNA
aaccagtttcgaactag

SEQ ID NO: 149436 - DNA, 17 bp, synthetic construct
  source 1..17: mol_type = other DNA
gaaccagtttcgaacta

SEQ ID NO: 149437 - DNA, 17 bp, synthetic construct
  source 1..17: mol_type = other DNA
agaaccagtttcgaact

SEQ ID NO: 149438 - DNA, 17 bp, synthetic construct
  source 1..17: mol_type = other DNA
cagaaccagtttcgaac

SEQ ID NO: 149439 - DNA, 17 bp, synthetic construct
  source 1..17: mol_type = other DNA
acagaaccagtttcgaa

SEQ ID NO: 149440 - DNA, 17 bp, synthetic construct
  source 1..17: mol_type = other DNA
cacagaaccagtttcga

SEQ ID NO: 149441 - DNA, 17 bp, synthetic construct
  source 1..17: mol_type = other DNA
acacagaaccagtttcg

SEQ ID NO: 149442 - DNA, 17 bp, synthetic construct
  source 1..17: mol_type = other DNA
aacacagaaccagtttc

SEQ ID NO: 149443 - DNA, 17 bp, synthetic construct
  source 1..17: mol_type = other DNA
aaacacagaaccagttt

SEQ ID NO: 149444 - DNA, 17 bp, synthetic construct
  source 1..17: mol_type = other DNA
taaacacagaaccagtt

SEQ ID NO: 149445 - DNA, 17 bp, synthetic construct
  source 1..17: mol_type = other DNA
ctaaacacagaaccagt

SEQ ID NO: 149446 - DNA, 17 bp, synthetic construct
  source 1..17: mol_type = other DNA
cctaaacacagaaccag

SEQ ID NO: 149447 - DNA, 17 bp, synthetic construct
  source 1..17: mol_type = other DNA
acctaaacacagaacca

SEQ ID NO: 149448 - DNA, 17 bp, synthetic construct
  source 1..17: mol_type = other DNA
aacctaaacacagaacc

SEQ ID NO: 149449 - DNA, 17 bp, synthetic construct
  source 1..17: mol_type = other DNA
aaacctaaacacagaac

SEQ ID NO: 149450 - DNA, 17 bp, synthetic construct
  source 1..17: mol_type = other DNA
gaaacctaaacacagaa

SEQ ID NO: 149451 - DNA, 17 bp, synthetic construct
  source 1..17: mol_type = other DNA
agaaacctaaacacaga

SEQ ID NO: 149452 - DNA, 17 bp, synthetic construct
  source 1..17: mol_type = other DNA
cagaaacctaaacacag

SEQ ID NO: 149453 - DNA, 17 bp, synthetic construct
  source 1..17: mol_type = other DNA
gcagaaacctaaacaca

SEQ ID NO: 149454 - DNA, 17 bp, synthetic construct
  source 1..17: mol_type = other DNA
agcagaaacctaaacac

SEQ ID NO: 149455 - DNA, 17 bp, synthetic construct
  source 1..17: mol_type = other DNA
tagcagaaacctaaaca

SEQ ID NO: 149456 - DNA, 17 bp, synthetic construct
  source 1..17: mol_type = other DNA
ttagcagaaacctaaac

SEQ ID NO: 149457 - DNA, 17 bp, synthetic construct
  source 1..17: mol_type = other DNA
cttagcagaaacctaaa

SEQ ID NO: 149458 - DNA, 17 bp, synthetic construct
  source 1..17: mol_type = other DNA
acttagcagaaacctaa

SEQ ID NO: 149459 - DNA, 17 bp, synthetic construct
  source 1..17: mol_type = other DNA
gacttagcagaaaccta

SEQ ID NO: 149460 - DNA, 17 bp, synthetic construct
  source 1..17: mol_type = other DNA
tgacttagcagaaacct

SEQ ID NO: 149461 - DNA, 17 bp, synthetic construct
  source 1..17: mol_type = other DNA
gtgacttagcagaaacc

SEQ ID NO: 149462 - DNA, 17 bp, synthetic construct
  source 1..17: mol_type = other DNA
cgtgacttagcagaaac

SEQ ID NO: 149463 - DNA, 17 bp, synthetic construct
  source 1..17: mol_type = other DNA
gcgtgacttagcagaaa

SEQ ID NO: 149464 - DNA, 17 bp, synthetic construct
  source 1..17: mol_type = other DNA
ggcgtgacttagcagaa

SEQ ID NO: 149465 - DNA, 17 bp, synthetic construct
  source 1..17: mol_type = other DNA
aggcgtgacttagcaga

SEQ ID NO: 149466 - DNA, 17 bp, synthetic construct
  source 1..17: mol_type = other DNA
caggcgtgacttagcag

SEQ ID NO: 149467 - DNA, 17 bp, synthetic construct
  source 1..17: mol_type = other DNA
ccaggcgtgacttagca

SEQ ID NO: 149468 - DNA, 17 bp, synthetic construct
  source 1..17: mol_type = other DNA
tccaggcgtgacttagc

SEQ ID NO: 149469 - DNA, 17 bp, synthetic construct
  source 1..17: mol_type = other DNA
ttccaggcgtgacttag

SEQ ID NO: 149470 - DNA, 17 bp, synthetic construct
  source 1..17: mol_type = other DNA
cttccaggcgtgactta

SEQ ID NO: 149471 - DNA, 17 bp, synthetic construct
  source 1..17: mol_type = other DNA
ccttccaggcgtgactt

SEQ ID NO: 149472 - DNA, 17 bp, synthetic construct
  source 1..17: mol_type = other DNA
gccttccaggcgtgact

SEQ ID NO: 149473 - DNA, 17 bp, synthetic construct
  source 1..17: mol_type = other DNA
agccttccaggcgtgac

SEQ ID NO: 149474 - DNA, 17 bp, synthetic construct
  source 1..17: mol_type = other DNA
gagccttccaggcgtga

SEQ ID NO: 149475 - DNA, 17 bp, synthetic construct
  source 1..17: mol_type = other DNA
ggagccttccaggcgtg

SEQ ID NO: 149476 - DNA, 17 bp, synthetic construct
  source 1..17: mol_type = other DNA
tggagccttccaggcgt

SEQ ID NO: 149477 - DNA, 17 bp, synthetic construct
  source 1..17: mol_type = other DNA
ttggagccttccaggcg

SEQ ID NO: 149478 - DNA, 17 bp, synthetic construct
  source 1..17: mol_type = other DNA
cttggagccttccaggc

SEQ ID NO: 149479 - DNA, 17 bp, synthetic construct
  source 1..17: mol_type = other DNA
acttggagccttccagg

SEQ ID NO: 149480 - DNA, 17 bp, synthetic construct
  source 1..17: mol_type = other DNA
cacttggagccttccag

SEQ ID NO: 149481 - DNA, 17 bp, synthetic construct
  source 1..17: mol_type = other DNA
acacttggagccttcca

SEQ ID NO: 149482 - DNA, 17 bp, synthetic construct
  source 1..17: mol_type = other DNA
cacacttggagccttcc

SEQ ID NO: 149483 - DNA, 17 bp, synthetic construct
  source 1..17: mol_type = other DNA
acacacttggagccttc

SEQ ID NO: 149484 - DNA, 17 bp, synthetic construct
  source 1..17: mol_type = other DNA
gacacacttggagcctt

SEQ ID NO: 149485 - DNA, 17 bp, synthetic construct
  source 1..17: mol_type = other DNA
ggacacacttggagcct

SEQ ID NO: 149486 - DNA, 17 bp, synthetic construct
  source 1..17: mol_type = other DNA
aggacacacttggagcc

SEQ ID NO: 149487 - DNA, 17 bp, synthetic construct
  source 1..17: mol_type = other DNA
gaggacacacttggagc

SEQ ID NO: 149488 - DNA, 17 bp, synthetic construct
  source 1..17: mol_type = other DNA
ggaggacacacttggag

SEQ ID NO: 149489 - DNA, 17 bp, synthetic construct
  source 1..17: mol_type = other DNA
aggaggacacacttgga

SEQ ID NO: 149490 - DNA, 17 bp, synthetic construct
  source 1..17: mol_type = other DNA
taggaggacacacttgg

SEQ ID NO: 149491 - DNA, 17 bp, synthetic construct
  source 1..17: mol_type = other DNA
ttaggaggacacacttg

SEQ ID NO: 149492 - DNA, 17 bp, synthetic construct
  source 1..17: mol_type = other DNA
gttaggaggacacactt

SEQ ID NO: 149493 - DNA, 17 bp, synthetic construct
  source 1..17: mol_type = other DNA
tgttaggaggacacact

SEQ ID NO: 149494 - DNA, 17 bp, synthetic construct
  source 1..17: mol_type = other DNA
ttgttaggaggacacac

SEQ ID NO: 149495 - DNA, 17 bp, synthetic construct
  source 1..17: mol_type = other DNA
tttgttaggaggacaca

SEQ ID NO: 149496 - DNA, 17 bp, synthetic construct
  source 1..17: mol_type = other DNA
ctttgttaggaggacac

SEQ ID NO: 149497 - DNA, 17 bp, synthetic construct
  source 1..17: mol_type = other DNA
gctttgttaggaggaca

SEQ ID NO: 149498 - DNA, 17 bp, synthetic construct
  source 1..17: mol_type = other DNA
agctttgttaggaggac

SEQ ID NO: 149499 - DNA, 17 bp, synthetic construct
  source 1..17: mol_type = other DNA
cagctttgttaggagga

SEQ ID NO: 149500 - DNA, 17 bp, synthetic construct
  source 1..17: mol_type = other DNA
ccagctttgttaggagg

SEQ ID NO: 149501 - DNA, 17 bp, synthetic construct
  source 1..17: mol_type = other DNA
accagctttgttaggag

SEQ ID NO: 149502 - DNA, 17 bp, synthetic construct
  source 1..17: mol_type = other DNA
gaccagctttgttagga

SEQ ID NO: 149503 - DNA, 17 bp, synthetic construct
  source 1..17: mol_type = other DNA
agaccagctttgttagg

SEQ ID NO: 149504 - DNA, 17 bp, synthetic construct
  source 1..17: mol_type = other DNA
aagaccagctttgttag

SEQ ID NO: 149505 - DNA, 17 bp, synthetic construct
  source 1..17: mol_type = other DNA
aaagaccagctttgtta

SEQ ID NO: 149506 - DNA, 17 bp, synthetic construct
  source 1..17: mol_type = other DNA
caaagaccagctttgtt

SEQ ID NO: 149507 - DNA, 17 bp, synthetic construct
  source 1..17: mol_type = other DNA
acaaagaccagctttgt

SEQ ID NO: 149508 - DNA, 17 bp, synthetic construct
  source 1..17: mol_type = other DNA
gacaaagaccagctttg

SEQ ID NO: 149509 - DNA, 17 bp, synthetic construct
  source 1..17: mol_type = other DNA
ggacaaagaccagcttt

SEQ ID NO: 149510 - DNA, 17 bp, synthetic construct
  source 1..17: mol_type = other DNA
aggacaaagaccagctt

SEQ ID NO: 149511 - DNA, 17 bp, synthetic construct
  source 1..17: mol_type = other DNA
aaggacaaagaccagct

SEQ ID NO: 149512 - DNA, 17 bp, synthetic construct
  source 1..17: mol_type = other DNA
gaaggacaaagaccagc

SEQ ID NO: 149513 - DNA, 17 bp, synthetic construct
  source 1..17: mol_type = other DNA
agaaggacaaagaccag

SEQ ID NO: 149514 - DNA, 17 bp, synthetic construct
  source 1..17: mol_type = other DNA
gagaaggacaaagacca

SEQ ID NO: 149515 - DNA, 17 bp, synthetic construct
  source 1..17: mol_type = other DNA
ggagaaggacaaagacc

SEQ ID NO: 149516 - DNA, 17 bp, synthetic construct
  source 1..17: mol_type = other DNA
tggagaaggacaaagac

SEQ ID NO: 149517 - DNA, 17 bp, synthetic construct
  source 1..17: mol_type = other DNA
ttggagaaggacaaaga

SEQ ID NO: 149518 - DNA, 17 bp, synthetic construct
  source 1..17: mol_type = other DNA
cttggagaaggacaaag

SEQ ID NO: 149519 - DNA, 17 bp, synthetic construct
  source 1..17: mol_type = other DNA
ccttggagaaggacaaa

SEQ ID NO: 149520 - DNA, 17 bp, synthetic construct
  source 1..17: mol_type = other DNA
cccttggagaaggacaa

SEQ ID NO: 149521 - DNA, 17 bp, synthetic construct
  source 1..17: mol_type = other DNA
tcccttggagaaggaca

SEQ ID NO: 149522 - DNA, 17 bp, synthetic construct
  source 1..17: mol_type = other DNA
atcccttggagaaggac

SEQ ID NO: 149523 - DNA, 17 bp, synthetic construct
  source 1..17: mol_type = other DNA
catcccttggagaagga

SEQ ID NO: 149524 - DNA, 17 bp, synthetic construct
  source 1..17: mol_type = other DNA
acatcccttggagaagg

SEQ ID NO: 149525 - DNA, 17 bp, synthetic construct
  source 1..17: mol_type = other DNA
cacatcccttggagaag

SEQ ID NO: 149526 - DNA, 17 bp, synthetic construct
  source 1..17: mol_type = other DNA
acacatcccttggagaa

SEQ ID NO: 149527 - DNA, 17 bp, synthetic construct
  source 1..17: mol_type = other DNA
cacacatcccttggaga

SEQ ID NO: 149528 - DNA, 17 bp, synthetic construct
  source 1..17: mol_type = other DNA
ccacacatcccttggag

SEQ ID NO: 149529 - DNA, 17 bp, synthetic construct
  source 1..17: mol_type = other DNA
cccacacatcccttgga

SEQ ID NO: 149530 - DNA, 17 bp, synthetic construct
  source 1..17: mol_type = other DNA
tcccacacatcccttgg

SEQ ID NO: 149531 - DNA, 17 bp, synthetic construct
  source 1..17: mol_type = other DNA
atcccacacatcccttg

SEQ ID NO: 149532 - DNA, 17 bp, synthetic construct
  source 1..17: mol_type = other DNA
catcccacacatccctt

SEQ ID NO: 149533 - DNA, 17 bp, synthetic construct
  source 1..17: mol_type = other DNA
ccatcccacacatccct

SEQ ID NO: 149534 - DNA, 17 bp, synthetic construct
  source 1..17: mol_type = other DNA
cccatcccacacatccc

SEQ ID NO: 149535 - DNA, 17 bp, synthetic construct
  source 1..17: mol_type = other DNA
ccccatcccacacatcc

SEQ ID NO: 149536 - DNA, 17 bp, synthetic construct
  source 1..17: mol_type = other DNA
gccccatcccacacatc

SEQ ID NO: 149537 - DNA, 17 bp, synthetic construct
  source 1..17: mol_type = other DNA
cgccccatcccacacat

SEQ ID NO: 149538 - DNA, 17 bp, synthetic construct
  source 1..17: mol_type = other DNA
tcgccccatcccacaca

SEQ ID NO: 149539 - DNA, 17 bp, synthetic construct
  source 1..17: mol_type = other DNA
ttcgccccatcccacac

SEQ ID NO: 149540 - DNA, 17 bp, synthetic construct
  source 1..17: mol_type = other DNA
tttcgccccatcccaca

SEQ ID NO: 149541 - DNA, 17 bp, synthetic construct
  source 1..17: mol_type = other DNA
atttcgccccatcccac

SEQ ID NO: 149542 - DNA, 17 bp, synthetic construct
  source 1..17: mol_type = other DNA
gatttcgccccatccca

SEQ ID NO: 149543 - DNA, 17 bp, synthetic construct
  source 1..17: mol_type = other DNA
ggatttcgccccatccc

SEQ ID NO: 149544 - DNA, 17 bp, synthetic construct
  source 1..17: mol_type = other DNA
gggatttcgccccatcc

SEQ ID NO: 149545 - DNA, 17 bp, synthetic construct
  source 1..17: mol_type = other DNA
ggggatttcgccccatc

SEQ ID NO: 149546 - DNA, 17 bp, synthetic construct
  source 1..17: mol_type = other DNA
gggggatttcgccccat

SEQ ID NO: 149547 - DNA, 17 bp, synthetic construct
  source 1..17: mol_type = other DNA
ggggggatttcgcccca

SEQ ID NO: 149548 - DNA, 17 bp, synthetic construct
  source 1..17: mol_type = other DNA
aggggggatttcgcccc

SEQ ID NO: 149549 - DNA, 17 bp, synthetic construct
  source 1..17: mol_type = other DNA
aaggggggatttcgccc

SEQ ID NO: 149550 - DNA, 17 bp, synthetic construct
  source 1..17: mol_type = other DNA
caaggggggatttcgcc

SEQ ID NO: 149551 - DNA, 17 bp, synthetic construct
  source 1..17: mol_type = other DNA
ccaaggggggatttcgc

SEQ ID NO: 149552 - DNA, 17 bp, synthetic construct
  source 1..17: mol_type = other DNA
cccaaggggggatttcg

SEQ ID NO: 149553 - DNA, 17 bp, synthetic construct
  source 1..17: mol_type = other DNA
ccccaaggggggatttc

SEQ ID NO: 149554 - DNA, 17 bp, synthetic construct
  source 1..17: mol_type = other DNA
gccccaaggggggattt

SEQ ID NO: 149555 - DNA, 17 bp, synthetic construct
  source 1..17: mol_type = other DNA
cgccccaaggggggatt

SEQ ID NO: 149556 - DNA, 17 bp, synthetic construct
  source 1..17: mol_type = other DNA
ccgccccaaggggggat

SEQ ID NO: 149557 - DNA, 17 bp, synthetic construct
  source 1..17: mol_type = other DNA
gccgccccaagggggga

SEQ ID NO: 149558 - DNA, 17 bp, synthetic construct
  source 1..17: mol_type = other DNA
ggccgccccaagggggg

SEQ ID NO: 149559 - DNA, 17 bp, synthetic construct
  source 1..17: mol_type = other DNA
tggccgccccaaggggg

SEQ ID NO: 149560 - DNA, 17 bp, synthetic construct
  source 1..17: mol_type = other DNA
ttggccgccccaagggg

SEQ ID NO: 149561 - DNA, 17 bp, synthetic construct
  source 1..17: mol_type = other DNA
gttggccgccccaaggg

SEQ ID NO: 149562 - DNA, 17 bp, synthetic construct
  source 1..17: mol_type = other DNA
cgttggccgccccaagg

SEQ ID NO: 149563 - DNA, 17 bp, synthetic construct
  source 1..17: mol_type = other DNA
gcgttggccgccccaag

SEQ ID NO: 149564 - DNA, 17 bp, synthetic construct
  source 1..17: mol_type = other DNA
ggcgttggccgccccaa

SEQ ID NO: 149565 - DNA, 17 bp, synthetic construct
  source 1..17: mol_type = other DNA
aggcgttggccgcccca

SEQ ID NO: 149566 - DNA, 17 bp, synthetic construct
  source 1..17: mol_type = other DNA
aaggcgttggccgcccc

SEQ ID NO: 149567 - DNA, 17 bp, synthetic construct
  source 1..17: mol_type = other DNA
aaaggcgttggccgccc

SEQ ID NO: 149568 - DNA, 17 bp, synthetic construct
  source 1..17: mol_type = other DNA
aaaaggcgttggccgcc

SEQ ID NO: 149569 - DNA, 17 bp, synthetic construct
  source 1..17: mol_type = other DNA
gaaaaggcgttggccgc

SEQ ID NO: 149570 - DNA, 17 bp, synthetic construct
  source 1..17: mol_type = other DNA
ggaaaaggcgttggccg

SEQ ID NO: 149571 - DNA, 17 bp, synthetic construct
  source 1..17: mol_type = other DNA
aggaaaaggcgttggcc

SEQ ID NO: 149572 - DNA, 17 bp, synthetic construct
  source 1..17: mol_type = other DNA
caggaaaaggcgttggc

SEQ ID NO: 149573 - DNA, 17 bp, synthetic construct
  source 1..17: mol_type = other DNA
tcaggaaaaggcgttgg

SEQ ID NO: 149574 - DNA, 17 bp, synthetic construct
  source 1..17: mol_type = other DNA
atcaggaaaaggcgttg

SEQ ID NO: 149575 - DNA, 17 bp, synthetic construct
  source 1..17: mol_type = other DNA
aatcaggaaaaggcgtt

SEQ ID NO: 149576 - DNA, 17 bp, synthetic construct
  source 1..17: mol_type = other DNA
gaatcaggaaaaggcgt

SEQ ID NO: 149577 - DNA, 17 bp, synthetic construct
  source 1..17: mol_type = other DNA
ggaatcaggaaaaggcg

SEQ ID NO: 149578 - DNA, 17 bp, synthetic construct
  source 1..17: mol_type = other DNA
tggaatcaggaaaaggc

SEQ ID NO: 149579 - DNA, 17 bp, synthetic construct
  source 1..17: mol_type = other DNA
atggaatcaggaaaagg

SEQ ID NO: 149580 - DNA, 17 bp, synthetic construct
  source 1..17: mol_type = other DNA
aatggaatcaggaaaag

SEQ ID NO: 149581 - DNA, 17 bp, synthetic construct
  source 1..17: mol_type = other DNA
aaatggaatcaggaaaa

SEQ ID NO: 149582 - DNA, 17 bp, synthetic construct
  source 1..17: mol_type = other DNA
aaaatggaatcaggaaa

SEQ ID NO: 149583 - DNA, 17 bp, synthetic construct
  source 1..17: mol_type = other DNA
gaaaatggaatcaggaa

SEQ ID NO: 149584 - DNA, 17 bp, synthetic construct
  source 1..17: mol_type = other DNA
agaaaatggaatcagga

SEQ ID NO: 149585 - DNA, 17 bp, synthetic construct
  source 1..17: mol_type = other DNA
gagaaaatggaatcagg

SEQ ID NO: 149586 - DNA, 17 bp, synthetic construct
  source 1..17: mol_type = other DNA
ggagaaaatggaatcag

SEQ ID NO: 149587 - DNA, 17 bp, synthetic construct
  source 1..17: mol_type = other DNA
gggagaaaatggaatca

SEQ ID NO: 149588 - DNA, 17 bp, synthetic construct
  source 1..17: mol_type = other DNA
ggggagaaaatggaatc

SEQ ID NO: 149589 - DNA, 17 bp, synthetic construct
  source 1..17: mol_type = other DNA
gggggagaaaatggaat

SEQ ID NO: 149590 - DNA, 17 bp, synthetic construct
  source 1..17: mol_type = other DNA
tgggggagaaaatggaa

SEQ ID NO: 149591 - DNA, 17 bp, synthetic construct
  source 1..17: mol_type = other DNA
atgggggagaaaatgga

SEQ ID NO: 149592 - DNA, 17 bp, synthetic construct
  source 1..17: mol_type = other DNA
gatgggggagaaaatgg

SEQ ID NO: 149593 - DNA, 17 bp, synthetic construct
  source 1..17: mol_type = other DNA
ggatgggggagaaaatg

SEQ ID NO: 149594 - DNA, 17 bp, synthetic construct
  source 1..17: mol_type = other DNA
gggatgggggagaaaat

SEQ ID NO: 149595 - DNA, 17 bp, synthetic construct
  source 1..17: mol_type = other DNA
agggatgggggagaaaa

SEQ ID NO: 149596 - DNA, 17 bp, synthetic construct
  source 1..17: mol_type = other DNA
aagggatgggggagaaa

SEQ ID NO: 149597 - DNA, 17 bp, synthetic construct
  source 1..17: mol_type = other DNA
caagggatgggggagaa

SEQ ID NO: 149598 - DNA, 17 bp, synthetic construct
  source 1..17: mol_type = other DNA
tcaagggatgggggaga

SEQ ID NO: 149599 - DNA, 17 bp, synthetic construct
  source 1..17: mol_type = other DNA
ctcaagggatgggggag

SEQ ID NO: 149600 - DNA, 17 bp, synthetic construct
  source 1..17: mol_type = other DNA
tctcaagggatggggga

SEQ ID NO: 149601 - DNA, 17 bp, synthetic construct
  source 1..17: mol_type = other DNA
ttctcaagggatggggg

SEQ ID NO: 149602 - DNA, 17 bp, synthetic construct
  source 1..17: mol_type = other DNA
cttctcaagggatgggg

SEQ ID NO: 149603 - DNA, 17 bp, synthetic construct
  source 1..17: mol_type = other DNA
ccttctcaagggatggg

SEQ ID NO: 149604 - DNA, 17 bp, synthetic construct
  source 1..17: mol_type = other DNA
tccttctcaagggatgg

SEQ ID NO: 149605 - DNA, 17 bp, synthetic construct
  source 1..17: mol_type = other DNA
ctccttctcaagggatg

SEQ ID NO: 149606 - DNA, 17 bp, synthetic construct
  source 1..17: mol_type = other DNA
cctccttctcaagggat

SEQ ID NO: 149607 - DNA, 17 bp, synthetic construct
  source 1..17: mol_type = other DNA
gcctccttctcaaggga

SEQ ID NO: 149608 - DNA, 17 bp, synthetic construct
  source 1..17: mol_type = other DNA
tgcctccttctcaaggg

SEQ ID NO: 149609 - DNA, 17 bp, synthetic construct
  source 1..17: mol_type = other DNA
gtgcctccttctcaagg

SEQ ID NO: 149610 - DNA, 17 bp, synthetic construct
  source 1..17: mol_type = other DNA
ggtgcctccttctcaag

SEQ ID NO: 149611 - DNA, 17 bp, synthetic construct
  source 1..17: mol_type = other DNA
tggtgcctccttctcaa

SEQ ID NO: 149612 - DNA, 17 bp, synthetic construct
  source 1..17: mol_type = other DNA
atggtgcctccttctca

SEQ ID NO: 149613 - DNA, 17 bp, synthetic construct
  source 1..17: mol_type = other DNA
gatggtgcctccttctc

SEQ ID NO: 149614 - DNA, 17 bp, synthetic construct
  source 1..17: mol_type = other DNA
ggatggtgcctccttct

SEQ ID NO: 149615 - DNA, 17 bp, synthetic construct
  source 1..17: mol_type = other DNA
gggatggtgcctccttc

SEQ ID NO: 149616 - DNA, 17 bp, synthetic construct
  source 1..17: mol_type = other DNA
ggggatggtgcctcctt

SEQ ID NO: 149617 - DNA, 17 bp, synthetic construct
  source 1..17: mol_type = other DNA
cggggatggtgcctcct

SEQ ID NO: 149618 - DNA, 17 bp, synthetic construct
  source 1..17: mol_type = other DNA
gcggggatggtgcctcc

SEQ ID NO: 149619 - DNA, 17 bp, synthetic construct
  source 1..17: mol_type = other DNA
ggcggggatggtgcctc

SEQ ID NO: 149620 - DNA, 17 bp, synthetic construct
  source 1..17: mol_type = other DNA
aggcggggatggtgcct

SEQ ID NO: 149621 - DNA, 17 bp, synthetic construct
  source 1..17: mol_type = other DNA
caggcggggatggtgcc

SEQ ID NO: 149622 - DNA, 17 bp, synthetic construct
  source 1..17: mol_type = other DNA
acaggcggggatggtgc

SEQ ID NO: 149623 - DNA, 17 bp, synthetic construct
  source 1..17: mol_type = other DNA
gacaggcggggatggtg

SEQ ID NO: 149624 - DNA, 17 bp, synthetic construct
  source 1..17: mol_type = other DNA
tgacaggcggggatggt

SEQ ID NO: 149625 - DNA, 17 bp, synthetic construct
  source 1..17: mol_type = other DNA
ctgacaggcggggatgg

SEQ ID NO: 149626 - DNA, 17 bp, synthetic construct
  source 1..17: mol_type = other DNA
actgacaggcggggatg

SEQ ID NO: 149627 - DNA, 17 bp, synthetic construct
  source 1..17: mol_type = other DNA
gactgacaggcggggat

SEQ ID NO: 149628 - DNA, 17 bp, synthetic construct
  source 1..17: mol_type = other DNA
cgactgacaggcgggga

SEQ ID NO: 149629 - DNA, 17 bp, synthetic construct
  source 1..17: mol_type = other DNA
ccgactgacaggcgggg

SEQ ID NO: 149630 - DNA, 17 bp, synthetic construct
  source 1..17: mol_type = other DNA
cccgactgacaggcggg

SEQ ID NO: 149631 - DNA, 17 bp, synthetic construct
  source 1..17: mol_type = other DNA
ccccgactgacaggcgg

SEQ ID NO: 149632 - DNA, 17 bp, synthetic construct
  source 1..17: mol_type = other DNA
tccccgactgacaggcg

SEQ ID NO: 149633 - DNA, 17 bp, synthetic construct
  source 1..17: mol_type = other DNA
gtccccgactgacaggc

SEQ ID NO: 149634 - DNA, 17 bp, synthetic construct
  source 1..17: mol_type = other DNA
tgtccccgactgacagg

SEQ ID NO: 149635 - DNA, 17 bp, synthetic construct
  source 1..17: mol_type = other DNA
ctgtccccgactgacag

SEQ ID NO: 149636 - DNA, 17 bp, synthetic construct
  source 1..17: mol_type = other DNA
cctgtccccgactgaca

SEQ ID NO: 149637 - DNA, 17 bp, synthetic construct
  source 1..17: mol_type = other DNA
ccctgtccccgactgac

SEQ ID NO: 149638 - DNA, 17 bp, synthetic construct
  source 1..17: mol_type = other DNA
gccctgtccccgactga

SEQ ID NO: 149639 - DNA, 17 bp, synthetic construct
  source 1..17: mol_type = other DNA
tgccctgtccccgactg

SEQ ID NO: 149640 - DNA, 17 bp, synthetic construct
  source 1..17: mol_type = other DNA
ctgccctgtccccgact

SEQ ID NO: 149641 - DNA, 17 bp, synthetic construct
  source 1..17: mol_type = other DNA
cctgccctgtccccgac

SEQ ID NO: 149642 - DNA, 17 bp, synthetic construct
  source 1..17: mol_type = other DNA
gcctgccctgtccccga

SEQ ID NO: 149643 - DNA, 17 bp, synthetic construct
  source 1..17: mol_type = other DNA
ggcctgccctgtccccg

SEQ ID NO: 149644 - DNA, 17 bp, synthetic construct
  source 1..17: mol_type = other DNA
cggcctgccctgtcccc

SEQ ID NO: 149645 - DNA, 17 bp, synthetic construct
  source 1..17: mol_type = other DNA
acggcctgccctgtccc

SEQ ID NO: 149646 - DNA, 17 bp, synthetic construct
  source 1..17: mol_type = other DNA
cacggcctgccctgtcc

SEQ ID NO: 149647 - DNA, 17 bp, synthetic construct
  source 1..17: mol_type = other DNA
gcacggcctgccctgtc

SEQ ID NO: 149648 - DNA, 17 bp, synthetic construct
  source 1..17: mol_type = other DNA
agcacggcctgccctgt

SEQ ID NO: 149649 - DNA, 17 bp, synthetic construct
  source 1..17: mol_type = other DNA
cagcacggcctgccctg

SEQ ID NO: 149650 - DNA, 17 bp, synthetic construct
  source 1..17: mol_type = other DNA
ccagcacggcctgccct

SEQ ID NO: 149651 - DNA, 17 bp, synthetic construct
  source 1..17: mol_type = other DNA
cccagcacggcctgccc

SEQ ID NO: 149652 - DNA, 17 bp, synthetic construct
  source 1..17: mol_type = other DNA
ccccagcacggcctgcc

SEQ ID NO: 149653 - DNA, 17 bp, synthetic construct
  source 1..17: mol_type = other DNA
cccccagcacggcctgc

SEQ ID NO: 149654 - DNA, 17 bp, synthetic construct
  source 1..17: mol_type = other DNA
gcccccagcacggcctg

SEQ ID NO: 149655 - DNA, 17 bp, synthetic construct
  source 1..17: mol_type = other DNA
tgcccccagcacggcct

SEQ ID NO: 149656 - DNA, 17 bp, synthetic construct
  source 1..17: mol_type = other DNA
ctgcccccagcacggcc

SEQ ID NO: 149657 - DNA, 17 bp, synthetic construct
  source 1..17: mol_type = other DNA
gctgcccccagcacggc

SEQ ID NO: 149658 - DNA, 17 bp, synthetic construct
  source 1..17: mol_type = other DNA
agctgcccccagcacgg

SEQ ID NO: 149659 - DNA, 17 bp, synthetic construct
  source 1..17: mol_type = other DNA
gagctgcccccagcacg

SEQ ID NO: 149660 - DNA, 17 bp, synthetic construct
  source 1..17: mol_type = other DNA
tgagctgcccccagcac

SEQ ID NO: 149661 - DNA, 17 bp, synthetic construct
  source 1..17: mol_type = other DNA
ctgagctgcccccagca

SEQ ID NO: 149662 - DNA, 17 bp, synthetic construct
  source 1..17: mol_type = other DNA
cctgagctgcccccagc

SEQ ID NO: 149663 - DNA, 17 bp, synthetic construct
  source 1..17: mol_type = other DNA
ccctgagctgcccccag

SEQ ID NO: 149664 - DNA, 17 bp, synthetic construct
  source 1..17: mol_type = other DNA
gccctgagctgccccca

SEQ ID NO: 149665 - DNA, 17 bp, synthetic construct
  source 1..17: mol_type = other DNA
agccctgagctgccccc

SEQ ID NO: 149666 - DNA, 17 bp, synthetic construct
  source 1..17: mol_type = other DNA
gagccctgagctgcccc

SEQ ID NO: 149667 - DNA, 17 bp, synthetic construct
  source 1..17: mol_type = other DNA
ggagccctgagctgccc

SEQ ID NO: 149668 - DNA, 17 bp, synthetic construct
  source 1..17: mol_type = other DNA
gggagccctgagctgcc

SEQ ID NO: 149669 - DNA, 17 bp, synthetic construct
  source 1..17: mol_type = other DNA
agggagccctgagctgc

SEQ ID NO: 149670 - DNA, 17 bp, synthetic construct
  source 1..17: mol_type = other DNA
cagggagccctgagctg

SEQ ID NO: 149671 - DNA, 17 bp, synthetic construct
  source 1..17: mol_type = other DNA
gcagggagccctgagct

SEQ ID NO: 149672 - DNA, 17 bp, synthetic construct
  source 1..17: mol_type = other DNA
agcagggagccctgagc

SEQ ID NO: 149673 - DNA, 17 bp, synthetic construct
  source 1..17: mol_type = other DNA
cagcagggagccctgag

SEQ ID NO: 149674 - DNA, 17 bp, synthetic construct
  source 1..17: mol_type = other DNA
ccagcagggagccctga

SEQ ID NO: 149675 - DNA, 17 bp, synthetic construct
  source 1..17: mol_type = other DNA
tccagcagggagccctg

SEQ ID NO: 149676 - DNA, 17 bp, synthetic construct
  source 1..17: mol_type = other DNA
ttccagcagggagccct

SEQ ID NO: 149677 - DNA, 17 bp, synthetic construct
  source 1..17: mol_type = other DNA
cttccagcagggagccc

SEQ ID NO: 149678 - DNA, 17 bp, synthetic construct
  source 1..17: mol_type = other DNA
gcttccagcagggagcc

SEQ ID NO: 149679 - DNA, 17 bp, synthetic construct
  source 1..17: mol_type = other DNA
agcttccagcagggagc

SEQ ID NO: 149680 - DNA, 17 bp, synthetic construct
  source 1..17: mol_type = other DNA
aagcttccagcagggag

SEQ ID NO: 149681 - DNA, 17 bp, synthetic construct
  source 1..17: mol_type = other DNA
gaagcttccagcaggga

SEQ ID NO: 149682 - DNA, 17 bp, synthetic construct
  source 1..17: mol_type = other DNA
ggaagcttccagcaggg

SEQ ID NO: 149683 - DNA, 17 bp, synthetic construct
  source 1..17: mol_type = other DNA
tggaagcttccagcagg

SEQ ID NO: 149684 - DNA, 17 bp, synthetic construct
  source 1..17: mol_type = other DNA
atggaagcttccagcag

SEQ ID NO: 149685 - DNA, 17 bp, synthetic construct
  source 1..17: mol_type = other DNA
gatggaagcttccagca

SEQ ID NO: 149686 - DNA, 17 bp, synthetic construct
  source 1..17: mol_type = other DNA
ggatggaagcttccagc

SEQ ID NO: 149687 - DNA, 17 bp, synthetic construct
  source 1..17: mol_type = other DNA
gggatggaagcttccag

SEQ ID NO: 149688 - DNA, 17 bp, synthetic construct
  source 1..17: mol_type = other DNA
cgggatggaagcttcca

SEQ ID NO: 149689 - DNA, 17 bp, synthetic construct
  source 1..17: mol_type = other DNA
gcgggatggaagcttcc

SEQ ID NO: 149690 - DNA, 17 bp, synthetic construct
  source 1..17: mol_type = other DNA
tgcgggatggaagcttc

SEQ ID NO: 149691 - DNA, 17 bp, synthetic construct
  source 1..17: mol_type = other DNA
ctgcgggatggaagctt

SEQ ID NO: 149692 - DNA, 17 bp, synthetic construct
  source 1..17: mol_type = other DNA
cctgcgggatggaagct

SEQ ID NO: 149693 - DNA, 17 bp, synthetic construct
  source 1..17: mol_type = other DNA
gcctgcgggatggaagc

SEQ ID NO: 149694 - DNA, 17 bp, synthetic construct
  source 1..17: mol_type = other DNA
agcctgcgggatggaag

SEQ ID NO: 149695 - DNA, 17 bp, synthetic construct
  source 1..17: mol_type = other DNA
aagcctgcgggatggaa

SEQ ID NO: 149696 - DNA, 17 bp, synthetic construct
  source 1..17: mol_type = other DNA
aaagcctgcgggatgga

SEQ ID NO: 149697 - DNA, 17 bp, synthetic construct
  source 1..17: mol_type = other DNA
gaaagcctgcgggatgg

SEQ ID NO: 149698 - DNA, 17 bp, synthetic construct
  source 1..17: mol_type = other DNA
ggaaagcctgcgggatg

SEQ ID NO: 149699 - DNA, 17 bp, synthetic construct
  source 1..17: mol_type = other DNA
tggaaagcctgcgggat

SEQ ID NO: 149700 - DNA, 17 bp, synthetic construct
  source 1..17: mol_type = other DNA
atggaaagcctgcggga

SEQ ID NO: 149701 - DNA, 17 bp, synthetic construct
  source 1..17: mol_type = other DNA
tatggaaagcctgcggg

SEQ ID NO: 149702 - DNA, 17 bp, synthetic construct
  source 1..17: mol_type = other DNA
ctatggaaagcctgcgg

SEQ ID NO: 149703 - DNA, 17 bp, synthetic construct
  source 1..17: mol_type = other DNA
gctatggaaagcctgcg

SEQ ID NO: 149704 - DNA, 17 bp, synthetic construct
  source 1..17: mol_type = other DNA
tgctatggaaagcctgc

SEQ ID NO: 149705 - DNA, 17 bp, synthetic construct
  source 1..17: mol_type = other DNA
atgctatggaaagcctg

SEQ ID NO: 149706 - DNA, 17 bp, synthetic construct
  source 1..17: mol_type = other DNA
aatgctatggaaagcct

SEQ ID NO: 149707 - DNA, 17 bp, synthetic construct
  source 1..17: mol_type = other DNA
caatgctatggaaagcc

SEQ ID NO: 149708 - DNA, 17 bp, synthetic construct
  source 1..17: mol_type = other DNA
tcaatgctatggaaagc

SEQ ID NO: 149709 - DNA, 17 bp, synthetic construct
  source 1..17: mol_type = other DNA
ctcaatgctatggaaag

SEQ ID NO: 149710 - DNA, 17 bp, synthetic construct
  source 1..17: mol_type = other DNA
gctcaatgctatggaaa

SEQ ID NO: 149711 - DNA, 17 bp, synthetic construct
  source 1..17: mol_type = other DNA
tgctcaatgctatggaa

SEQ ID NO: 149712 - DNA, 17 bp, synthetic construct
  source 1..17: mol_type = other DNA
ctgctcaatgctatgga

SEQ ID NO: 149713 - DNA, 17 bp, synthetic construct
  source 1..17: mol_type = other DNA
cctgctcaatgctatgg

SEQ ID NO: 149714 - DNA, 17 bp, synthetic construct
  source 1..17: mol_type = other DNA
tcctgctcaatgctatg

SEQ ID NO: 149715 - DNA, 17 bp, synthetic construct
  source 1..17: mol_type = other DNA
ctcctgctcaatgctat

SEQ ID NO: 149716 - DNA, 17 bp, synthetic construct
  source 1..17: mol_type = other DNA
gctcctgctcaatgcta

SEQ ID NO: 149717 - DNA, 17 bp, synthetic construct
  source 1..17: mol_type = other DNA
cgctcctgctcaatgct

SEQ ID NO: 149718 - DNA, 17 bp, synthetic construct
  source 1..17: mol_type = other DNA
ccgctcctgctcaatgc

SEQ ID NO: 149719 - DNA, 17 bp, synthetic construct
  source 1..17: mol_type = other DNA
tccgctcctgctcaatg

SEQ ID NO: 149720 - DNA, 17 bp, synthetic construct
  source 1..17: mol_type = other DNA
ctccgctcctgctcaat

SEQ ID NO: 149721 - DNA, 17 bp, synthetic construct
  source 1..17: mol_type = other DNA
cctccgctcctgctcaa

SEQ ID NO: 149722 - DNA, 17 bp, synthetic construct
  source 1..17: mol_type = other DNA
gcctccgctcctgctca

SEQ ID NO: 149723 - DNA, 17 bp, synthetic construct
  source 1..17: mol_type = other DNA
tgcctccgctcctgctc

SEQ ID NO: 149724 - DNA, 17 bp, synthetic construct
  source 1..17: mol_type = other DNA
atgcctccgctcctgct

SEQ ID NO: 149725 - DNA, 17 bp, synthetic construct
  source 1..17: mol_type = other DNA
gatgcctccgctcctgc

SEQ ID NO: 149726 - DNA, 17 bp, synthetic construct
  source 1..17: mol_type = other DNA
agatgcctccgctcctg

SEQ ID NO: 149727 - DNA, 17 bp, synthetic construct
  source 1..17: mol_type = other DNA
cagatgcctccgctcct

SEQ ID NO: 149728 - DNA, 17 bp, synthetic construct
  source 1..17: mol_type = other DNA
gcagatgcctccgctcc

SEQ ID NO: 149729 - DNA, 17 bp, synthetic construct
  source 1..17: mol_type = other DNA
cgcagatgcctccgctc

SEQ ID NO: 149730 - DNA, 17 bp, synthetic construct
  source 1..17: mol_type = other DNA
ccgcagatgcctccgct

SEQ ID NO: 149731 - DNA, 17 bp, synthetic construct
  source 1..17: mol_type = other DNA
gccgcagatgcctccgc

SEQ ID NO: 149732 - DNA, 17 bp, synthetic construct
  source 1..17: mol_type = other DNA
agccgcagatgcctccg

SEQ ID NO: 149733 - DNA, 17 bp, synthetic construct
  source 1..17: mol_type = other DNA
cagccgcagatgcctcc

SEQ ID NO: 149734 - DNA, 17 bp, synthetic construct
  source 1..17: mol_type = other DNA
tcagccgcagatgcctc

SEQ ID NO: 149735 - DNA, 17 bp, synthetic construct
  source 1..17: mol_type = other DNA
gtcagccgcagatgcct

SEQ ID NO: 149736 - DNA, 17 bp, synthetic construct
  source 1..17: mol_type = other DNA
cgtcagccgcagatgcc

SEQ ID NO: 149737 - DNA, 17 bp, synthetic construct
  source 1..17: mol_type = other DNA
ccgtcagccgcagatgc

SEQ ID NO: 149738 - DNA, 17 bp, synthetic construct
  source 1..17: mol_type = other DNA
accgtcagccgcagatg

SEQ ID NO: 149739 - DNA, 17 bp, synthetic construct
  source 1..17: mol_type = other DNA
aaccgtcagccgcagat

SEQ ID NO: 149740 - DNA, 17 bp, synthetic construct
  source 1..17: mol_type = other DNA
caaccgtcagccgcaga

SEQ ID NO: 149741 - DNA, 17 bp, synthetic construct
  source 1..17: mol_type = other DNA
ccaaccgtcagccgcag

SEQ ID NO: 149742 - DNA, 17 bp, synthetic construct
  source 1..17: mol_type = other DNA
cccaaccgtcagccgca

SEQ ID NO: 149743 - DNA, 17 bp, synthetic construct
  source 1..17: mol_type = other DNA
ccccaaccgtcagccgc

SEQ ID NO: 149744 - DNA, 17 bp, synthetic construct
  source 1..17: mol_type = other DNA
accccaaccgtcagccg

SEQ ID NO: 149745 - DNA, 17 bp, synthetic construct
  source 1..17: mol_type = other DNA
caccccaaccgtcagcc

SEQ ID NO: 149746 - DNA, 17 bp, synthetic construct
  source 1..17: mol_type = other DNA
ccaccccaaccgtcagc

SEQ ID NO: 149747 - DNA, 17 bp, synthetic construct
  source 1..17: mol_type = other DNA
gccaccccaaccgtcag

SEQ ID NO: 149748 - DNA, 17 bp, synthetic construct
  source 1..17: mol_type = other DNA
ggccaccccaaccgtca

SEQ ID NO: 149749 - DNA, 17 bp, synthetic construct
  source 1..17: mol_type = other DNA
aggccaccccaaccgtc

SEQ ID NO: 149750 - DNA, 17 bp, synthetic construct
  source 1..17: mol_type = other DNA
caggccaccccaaccgt

SEQ ID NO: 149751 - DNA, 17 bp, synthetic construct
  source 1..17: mol_type = other DNA
tcaggccaccccaaccg

SEQ ID NO: 149752 - DNA, 17 bp, synthetic construct
  source 1..17: mol_type = other DNA
ctcaggccaccccaacc

SEQ ID NO: 149753 - DNA, 17 bp, synthetic construct
  source 1..17: mol_type = other DNA
gctcaggccaccccaac

SEQ ID NO: 149754 - DNA, 17 bp, synthetic construct
  source 1..17: mol_type = other DNA
cgctcaggccaccccaa

SEQ ID NO: 149755 - DNA, 17 bp, synthetic construct
  source 1..17: mol_type = other DNA
ccgctcaggccacccca

SEQ ID NO: 149756 - DNA, 17 bp, synthetic construct
  source 1..17: mol_type = other DNA
gccgctcaggccacccc

SEQ ID NO: 149757 - DNA, 17 bp, synthetic construct
  source 1..17: mol_type = other DNA
agccgctcaggccaccc

SEQ ID NO: 149758 - DNA, 17 bp, synthetic construct
  source 1..17: mol_type = other DNA
cagccgctcaggccacc

SEQ ID NO: 149759 - DNA, 17 bp, synthetic construct
  source 1..17: mol_type = other DNA
ccagccgctcaggccac

SEQ ID NO: 149760 - DNA, 17 bp, synthetic construct
  source 1..17: mol_type = other DNA
cccagccgctcaggcca

SEQ ID NO: 149761 - DNA, 17 bp, synthetic construct
  source 1..17: mol_type = other DNA
ccccagccgctcaggcc

SEQ ID NO: 149762 - DNA, 17 bp, synthetic construct
  source 1..17: mol_type = other DNA
tccccagccgctcaggc

SEQ ID NO: 149763 - DNA, 17 bp, synthetic construct
  source 1..17: mol_type = other DNA
ctccccagccgctcagg

SEQ ID NO: 149764 - DNA, 17 bp, synthetic construct
  source 1..17: mol_type = other DNA
cctccccagccgctcag

SEQ ID NO: 149765 - DNA, 17 bp, synthetic construct
  source 1..17: mol_type = other DNA
tcctccccagccgctca

SEQ ID NO: 149766 - DNA, 17 bp, synthetic construct
  source 1..17: mol_type = other DNA
ctcctccccagccgctc

SEQ ID NO: 149767 - DNA, 17 bp, synthetic construct
  source 1..17: mol_type = other DNA
actcctccccagccgct

SEQ ID NO: 149768 - DNA, 17 bp, synthetic construct
  source 1..17: mol_type = other DNA
gactcctccccagccgc

SEQ ID NO: 149769 - DNA, 17 bp, synthetic construct
  source 1..17: mol_type = other DNA
ggactcctccccagccg

SEQ ID NO: 149770 - DNA, 17 bp, synthetic construct
  source 1..17: mol_type = other DNA
gggactcctccccagcc

SEQ ID NO: 149771 - DNA, 17 bp, synthetic construct
  source 1..17: mol_type = other DNA
cgggactcctccccagc

SEQ ID NO: 149772 - DNA, 17 bp, synthetic construct
  source 1..17: mol_type = other DNA
ccgggactcctccccag

SEQ ID NO: 149773 - DNA, 17 bp, synthetic construct
  source 1..17: mol_type = other DNA
gccgggactcctcccca

SEQ ID NO: 149774 - DNA, 17 bp, synthetic construct
  source 1..17: mol_type = other DNA
ggccgggactcctcccc

SEQ ID NO: 149775 - DNA, 17 bp, synthetic construct
  source 1..17: mol_type = other DNA
aggccgggactcctccc

SEQ ID NO: 149776 - DNA, 17 bp, synthetic construct
  source 1..17: mol_type = other DNA
aaggccgggactcctcc

SEQ ID NO: 149777 - DNA, 17 bp, synthetic construct
  source 1..17: mol_type = other DNA
caaggccgggactcctc

SEQ ID NO: 149778 - DNA, 17 bp, synthetic construct
  source 1..17: mol_type = other DNA
ccaaggccgggactcct

SEQ ID NO: 149779 - DNA, 17 bp, synthetic construct
  source 1..17: mol_type = other DNA
gccaaggccgggactcc

SEQ ID NO: 149780 - DNA, 17 bp, synthetic construct
  source 1..17: mol_type = other DNA
ggccaaggccgggactc

SEQ ID NO: 149781 - DNA, 17 bp, synthetic construct
  source 1..17: mol_type = other DNA
tggccaaggccgggact

SEQ ID NO: 149782 - DNA, 17 bp, synthetic construct
  source 1..17: mol_type = other DNA
gtggccaaggccgggac

SEQ ID NO: 149783 - DNA, 17 bp, synthetic construct
  source 1..17: mol_type = other DNA
tgtggccaaggccggga

SEQ ID NO: 149784 - DNA, 17 bp, synthetic construct
  source 1..17: mol_type = other DNA
ctgtggccaaggccggg

SEQ ID NO: 149785 - DNA, 17 bp, synthetic construct
  source 1..17: mol_type = other DNA
actgtggccaaggccgg

SEQ ID NO: 149786 - DNA, 17 bp, synthetic construct
  source 1..17: mol_type = other DNA
cactgtggccaaggccg

SEQ ID NO: 149787 - DNA, 17 bp, synthetic construct
  source 1..17: mol_type = other DNA
acactgtggccaaggcc

SEQ ID NO: 149788 - DNA, 17 bp, synthetic construct
  source 1..17: mol_type = other DNA
cacactgtggccaaggc

SEQ ID NO: 149789 - DNA, 17 bp, synthetic construct
  source 1..17: mol_type = other DNA
acacactgtggccaagg

SEQ ID NO: 149790 - DNA, 17 bp, synthetic construct
  source 1..17: mol_type = other DNA
gacacactgtggccaag

SEQ ID NO: 149791 - DNA, 17 bp, synthetic construct
  source 1..17: mol_type = other DNA
cgacacactgtggccaa

SEQ ID NO: 149792 - DNA, 17 bp, synthetic construct
  source 1..17: mol_type = other DNA
acgacacactgtggcca

SEQ ID NO: 149793 - DNA, 17 bp, synthetic construct
  source 1..17: mol_type = other DNA
cacgacacactgtggcc

SEQ ID NO: 149794 - DNA, 17 bp, synthetic construct
  source 1..17: mol_type = other DNA
tcacgacacactgtggc

SEQ ID NO: 149795 - DNA, 17 bp, synthetic construct
  source 1..17: mol_type = other DNA
ctcacgacacactgtgg

SEQ ID NO: 149796 - DNA, 17 bp, synthetic construct
  source 1..17: mol_type = other DNA
cctcacgacacactgtg

SEQ ID NO: 149797 - DNA, 17 bp, synthetic construct
  source 1..17: mol_type = other DNA
ccctcacgacacactgt

SEQ ID NO: 149798 - DNA, 17 bp, synthetic construct
  source 1..17: mol_type = other DNA
accctcacgacacactg

SEQ ID NO: 149799 - DNA, 17 bp, synthetic construct
  source 1..17: mol_type = other DNA
caccctcacgacacact

SEQ ID NO: 149800 - DNA, 17 bp, synthetic construct
  source 1..17: mol_type = other DNA
tcaccctcacgacacac

SEQ ID NO: 149801 - DNA, 17 bp, synthetic construct
  source 1..17: mol_type = other DNA
ttcaccctcacgacaca

SEQ ID NO: 149802 - DNA, 17 bp, synthetic construct
  source 1..17: mol_type = other DNA
gttcaccctcacgacac

SEQ ID NO: 149803 - DNA, 17 bp, synthetic construct
  source 1..17: mol_type = other DNA
ggttcaccctcacgaca

SEQ ID NO: 149804 - DNA, 17 bp, synthetic construct
  source 1..17: mol_type = other DNA
aggttcaccctcacgac

SEQ ID NO: 149805 - DNA, 17 bp, synthetic construct
  source 1..17: mol_type = other DNA
caggttcaccctcacga

SEQ ID NO: 149806 - DNA, 17 bp, synthetic construct
  source 1..17: mol_type = other DNA
gcaggttcaccctcacg

SEQ ID NO: 149807 - DNA, 17 bp, synthetic construct
  source 1..17: mol_type = other DNA
tgcaggttcaccctcac

SEQ ID NO: 149808 - DNA, 17 bp, synthetic construct
  source 1..17: mol_type = other DNA
ctgcaggttcaccctca

SEQ ID NO: 149809 - DNA, 17 bp, synthetic construct
  source 1..17: mol_type = other DNA
cctgcaggttcaccctc

SEQ ID NO: 149810 - DNA, 17 bp, synthetic construct
  source 1..17: mol_type = other DNA
ccctgcaggttcaccct

SEQ ID NO: 149811 - DNA, 17 bp, synthetic construct
  source 1..17: mol_type = other DNA
gccctgcaggttcaccc

SEQ ID NO: 149812 - DNA, 17 bp, synthetic construct
  source 1..17: mol_type = other DNA
tgccctgcaggttcacc

SEQ ID NO: 149813 - DNA, 17 bp, synthetic construct
  source 1..17: mol_type = other DNA
atgccctgcaggttcac

SEQ ID NO: 149814 - DNA, 17 bp, synthetic construct
  source 1..17: mol_type = other DNA
catgccctgcaggttca

SEQ ID NO: 149815 - DNA, 17 bp, synthetic construct
  source 1..17: mol_type = other DNA
ccatgccctgcaggttc

SEQ ID NO: 149816 - DNA, 17 bp, synthetic construct
  source 1..17: mol_type = other DNA
tccatgccctgcaggtt

SEQ ID NO: 149817 - DNA, 17 bp, synthetic construct
  source 1..17: mol_type = other DNA
ctccatgccctgcaggt

SEQ ID NO: 149818 - DNA, 17 bp, synthetic construct
  source 1..17: mol_type = other DNA
tctccatgccctgcagg

SEQ ID NO: 149819 - DNA, 17 bp, synthetic construct
  source 1..17: mol_type = other DNA
gtctccatgccctgcag

SEQ ID NO: 149820 - DNA, 17 bp, synthetic construct
  source 1..17: mol_type = other DNA
ggtctccatgccctgca

SEQ ID NO: 149821 - DNA, 17 bp, synthetic construct
  source 1..17: mol_type = other DNA
cggtctccatgccctgc

SEQ ID NO: 149822 - DNA, 17 bp, synthetic construct
  source 1..17: mol_type = other DNA
gcggtctccatgccctg

SEQ ID NO: 149823 - DNA, 17 bp, synthetic construct
  source 1..17: mol_type = other DNA
ggcggtctccatgccct

SEQ ID NO: 149824 - DNA, 17 bp, synthetic construct
  source 1..17: mol_type = other DNA
tggcggtctccatgccc

SEQ ID NO: 149825 - DNA, 17 bp, synthetic construct
  source 1..17: mol_type = other DNA
gtggcggtctccatgcc

SEQ ID NO: 149826 - DNA, 17 bp, synthetic construct
  source 1..17: mol_type = other DNA
ggtggcggtctccatgc

SEQ ID NO: 149827 - DNA, 17 bp, synthetic construct
  source 1..17: mol_type = other DNA
tggtggcggtctccatg

SEQ ID NO: 149828 - DNA, 17 bp, synthetic construct
  source 1..17: mol_type = other DNA
ttggtggcggtctccat

SEQ ID NO: 149829 - DNA, 17 bp, synthetic construct
  source 1..17: mol_type = other DNA
cttggtggcggtctcca

SEQ ID NO: 149830 - DNA, 17 bp, synthetic construct
  source 1..17: mol_type = other DNA
ccttggtggcggtctcc

SEQ ID NO: 149831 - DNA, 17 bp, synthetic construct
  source 1..17: mol_type = other DNA
tccttggtggcggtctc

SEQ ID NO: 149832 - DNA, 17 bp, synthetic construct
  source 1..17: mol_type = other DNA
gtccttggtggcggtct

SEQ ID NO: 149833 - DNA, 17 bp, synthetic construct
  source 1..17: mol_type = other DNA
ggtccttggtggcggtc

SEQ ID NO: 149834 - DNA, 17 bp, synthetic construct
  source 1..17: mol_type = other DNA
gggtccttggtggcggt

SEQ ID NO: 149835 - DNA, 17 bp, synthetic construct
  source 1..17: mol_type = other DNA
ggggtccttggtggcgg

SEQ ID NO: 149836 - DNA, 17 bp, synthetic construct
  source 1..17: mol_type = other DNA
tggggtccttggtggcg

SEQ ID NO: 149837 - DNA, 17 bp, synthetic construct
  source 1..17: mol_type = other DNA
gtggggtccttggtggc

SEQ ID NO: 149838 - DNA, 17 bp, synthetic construct
  source 1..17: mol_type = other DNA
tgtggggtccttggtgg

SEQ ID NO: 149839 - DNA, 17 bp, synthetic construct
  source 1..17: mol_type = other DNA
atgtggggtccttggtg

SEQ ID NO: 149840 - DNA, 17 bp, synthetic construct
  source 1..17: mol_type = other DNA
catgtggggtccttggt

SEQ ID NO: 149841 - DNA, 17 bp, synthetic construct
  source 1..17: mol_type = other DNA
gcatgtggggtccttgg

SEQ ID NO: 149842 - DNA, 17 bp, synthetic construct
  source 1..17: mol_type = other DNA
cgcatgtggggtccttg

SEQ ID NO: 149843 - DNA, 17 bp, synthetic construct
  source 1..17: mol_type = other DNA
ccgcatgtggggtcctt

SEQ ID NO: 149844 - DNA, 17 bp, synthetic construct
  source 1..17: mol_type = other DNA
gccgcatgtggggtcct

SEQ ID NO: 149845 - DNA, 17 bp, synthetic construct
  source 1..17: mol_type = other DNA
agccgcatgtggggtcc

SEQ ID NO: 149846 - DNA, 17 bp, synthetic construct
  source 1..17: mol_type = other DNA
cagccgcatgtggggtc

SEQ ID NO: 149847 - DNA, 17 bp, synthetic construct
  source 1..17: mol_type = other DNA
gcagccgcatgtggggt

SEQ ID NO: 149848 - DNA, 17 bp, synthetic construct
  source 1..17: mol_type = other DNA
ggcagccgcatgtgggg

SEQ ID NO: 149849 - DNA, 17 bp, synthetic construct
  source 1..17: mol_type = other DNA
cggcagccgcatgtggg

SEQ ID NO: 149850 - DNA, 17 bp, synthetic construct
  source 1..17: mol_type = other DNA
gcggcagccgcatgtgg

SEQ ID NO: 149851 - DNA, 17 bp, synthetic construct
  source 1..17: mol_type = other DNA
tgcggcagccgcatgtg

SEQ ID NO: 149852 - DNA, 17 bp, synthetic construct
  source 1..17: mol_type = other DNA
gtgcggcagccgcatgt

SEQ ID NO: 149853 - DNA, 17 bp, synthetic construct
  source 1..17: mol_type = other DNA
ggtgcggcagccgcatg

SEQ ID NO: 149854 - DNA, 17 bp, synthetic construct
  source 1..17: mol_type = other DNA
tggtgcggcagccgcat

SEQ ID NO: 149855 - DNA, 17 bp, synthetic construct
  source 1..17: mol_type = other DNA
ctggtgcggcagccgca

SEQ ID NO: 149856 - DNA, 17 bp, synthetic construct
  source 1..17: mol_type = other DNA
cctggtgcggcagccgc

SEQ ID NO: 149857 - DNA, 17 bp, synthetic construct
  source 1..17: mol_type = other DNA
ccctggtgcggcagccg

SEQ ID NO: 149858 - DNA, 17 bp, synthetic construct
  source 1..17: mol_type = other DNA
tccctggtgcggcagcc

SEQ ID NO: 149859 - DNA, 17 bp, synthetic construct
  source 1..17: mol_type = other DNA
atccctggtgcggcagc

SEQ ID NO: 149860 - DNA, 17 bp, synthetic construct
  source 1..17: mol_type = other DNA
catccctggtgcggcag

SEQ ID NO: 149861 - DNA, 17 bp, synthetic construct
  source 1..17: mol_type = other DNA
acatccctggtgcggca

SEQ ID NO: 149862 - DNA, 17 bp, synthetic construct
  source 1..17: mol_type = other DNA
cacatccctggtgcggc

SEQ ID NO: 149863 - DNA, 17 bp, synthetic construct
  source 1..17: mol_type = other DNA
ccacatccctggtgcgg

SEQ ID NO: 149864 - DNA, 17 bp, synthetic construct
  source 1..17: mol_type = other DNA
gccacatccctggtgcg

SEQ ID NO: 149865 - DNA, 17 bp, synthetic construct
  source 1..17: mol_type = other DNA
ggccacatccctggtgc

SEQ ID NO: 149866 - DNA, 17 bp, synthetic construct
  source 1..17: mol_type = other DNA
tggccacatccctggtg

SEQ ID NO: 149867 - DNA, 17 bp, synthetic construct
  source 1..17: mol_type = other DNA
ctggccacatccctggt

SEQ ID NO: 149868 - DNA, 17 bp, synthetic construct
  source 1..17: mol_type = other DNA
cctggccacatccctgg

SEQ ID NO: 149869 - DNA, 17 bp, synthetic construct
  source 1..17: mol_type = other DNA
acctggccacatccctg

SEQ ID NO: 149870 - DNA, 17 bp, synthetic construct
  source 1..17: mol_type = other DNA
gacctggccacatccct

SEQ ID NO: 149871 - DNA, 17 bp, synthetic construct
  source 1..17: mol_type = other DNA
ggacctggccacatccc

SEQ ID NO: 149872 - DNA, 17 bp, synthetic construct
  source 1..17: mol_type = other DNA
cggacctggccacatcc

SEQ ID NO: 149873 - DNA, 17 bp, synthetic construct
  source 1..17: mol_type = other DNA
acggacctggccacatc

SEQ ID NO: 149874 - DNA, 17 bp, synthetic construct
  source 1..17: mol_type = other DNA
cacggacctggccacat

SEQ ID NO: 149875 - DNA, 17 bp, synthetic construct
  source 1..17: mol_type = other DNA
ccacggacctggccaca

SEQ ID NO: 149876 - DNA, 17 bp, synthetic construct
  source 1..17: mol_type = other DNA
accacggacctggccac

SEQ ID NO: 149877 - DNA, 17 bp, synthetic construct
  source 1..17: mol_type = other DNA
aaccacggacctggcca

SEQ ID NO: 149878 - DNA, 17 bp, synthetic construct
  source 1..17: mol_type = other DNA
caaccacggacctggcc

SEQ ID NO: 149879 - DNA, 17 bp, synthetic construct
  source 1..17: mol_type = other DNA
ccaaccacggacctggc

SEQ ID NO: 149880 - DNA, 17 bp, synthetic construct
  source 1..17: mol_type = other DNA
cccaaccacggacctgg

SEQ ID NO: 149881 - DNA, 17 bp, synthetic construct
  source 1..17: mol_type = other DNA
acccaaccacggacctg

SEQ ID NO: 149882 - DNA, 17 bp, synthetic construct
  source 1..17: mol_type = other DNA
aacccaaccacggacct

SEQ ID NO: 149883 - DNA, 17 bp, synthetic construct
  source 1..17: mol_type = other DNA
gaacccaaccacggacc

SEQ ID NO: 149884 - DNA, 17 bp, synthetic construct
  source 1..17: mol_type = other DNA
cgaacccaaccacggac

SEQ ID NO: 149885 - DNA, 17 bp, synthetic construct
  source 1..17: mol_type = other DNA
acgaacccaaccacgga

SEQ ID NO: 149886 - DNA, 17 bp, synthetic construct
  source 1..17: mol_type = other DNA
cacgaacccaaccacgg

SEQ ID NO: 149887 - DNA, 17 bp, synthetic construct
  source 1..17: mol_type = other DNA
ccacgaacccaaccacg

SEQ ID NO: 149888 - DNA, 17 bp, synthetic construct
  source 1..17: mol_type = other DNA
gccacgaacccaaccac

SEQ ID NO: 149889 - DNA, 17 bp, synthetic construct
  source 1..17: mol_type = other DNA
agccacgaacccaacca

SEQ ID NO: 149890 - DNA, 17 bp, synthetic construct
  source 1..17: mol_type = other DNA
cagccacgaacccaacc

SEQ ID NO: 149891 - DNA, 17 bp, synthetic construct
  source 1..17: mol_type = other DNA
ccagccacgaacccaac

SEQ ID NO: 149892 - DNA, 17 bp, synthetic construct
  source 1..17: mol_type = other DNA
gccagccacgaacccaa

SEQ ID NO: 149893 - DNA, 17 bp, synthetic construct
  source 1..17: mol_type = other DNA
tgccagccacgaaccca

SEQ ID NO: 149894 - DNA, 17 bp, synthetic construct
  source 1..17: mol_type = other DNA
ctgccagccacgaaccc

SEQ ID NO: 149895 - DNA, 17 bp, synthetic construct
  source 1..17: mol_type = other DNA
gctgccagccacgaacc

SEQ ID NO: 149896 - DNA, 17 bp, synthetic construct
  source 1..17: mol_type = other DNA
ggctgccagccacgaac

SEQ ID NO: 149897 - DNA, 17 bp, synthetic construct
  source 1..17: mol_type = other DNA
tggctgccagccacgaa

SEQ ID NO: 149898 - DNA, 17 bp, synthetic construct
  source 1..17: mol_type = other DNA
gtggctgccagccacga

SEQ ID NO: 149899 - DNA, 17 bp, synthetic construct
  source 1..17: mol_type = other DNA
tgtggctgccagccacg

SEQ ID NO: 149900 - DNA, 17 bp, synthetic construct
  source 1..17: mol_type = other DNA
atgtggctgccagccac

SEQ ID NO: 149901 - DNA, 17 bp, synthetic construct
  source 1..17: mol_type = other DNA
gatgtggctgccagcca

SEQ ID NO: 149902 - DNA, 17 bp, synthetic construct
  source 1..17: mol_type = other DNA
agatgtggctgccagcc

SEQ ID NO: 149903 - DNA, 17 bp, synthetic construct
  source 1..17: mol_type = other DNA
tagatgtggctgccagc

SEQ ID NO: 149904 - DNA, 17 bp, synthetic construct
  source 1..17: mol_type = other DNA
ctagatgtggctgccag

SEQ ID NO: 149905 - DNA, 17 bp, synthetic construct
  source 1..17: mol_type = other DNA
actagatgtggctgcca

SEQ ID NO: 149906 - DNA, 17 bp, synthetic construct
  source 1..17: mol_type = other DNA
aactagatgtggctgcc

SEQ ID NO: 149907 - DNA, 17 bp, synthetic construct
  source 1..17: mol_type = other DNA
gaactagatgtggctgc

SEQ ID NO: 149908 - DNA, 17 bp, synthetic construct
  source 1..17: mol_type = other DNA
ggaactagatgtggctg

SEQ ID NO: 149909 - DNA, 17 bp, synthetic construct
  source 1..17: mol_type = other DNA
aggaactagatgtggct

SEQ ID NO: 149910 - DNA, 17 bp, synthetic construct
  source 1..17: mol_type = other DNA
gaggaactagatgtggc

SEQ ID NO: 149911 - DNA, 17 bp, synthetic construct
  source 1..17: mol_type = other DNA
tgaggaactagatgtgg

SEQ ID NO: 149912 - DNA, 17 bp, synthetic construct
  source 1..17: mol_type = other DNA
gtgaggaactagatgtg

SEQ ID NO: 149913 - DNA, 17 bp, synthetic construct
  source 1..17: mol_type = other DNA
agtgaggaactagatgt

SEQ ID NO: 149914 - DNA, 17 bp, synthetic construct
  source 1..17: mol_type = other DNA
cagtgaggaactagatg

SEQ ID NO: 149915 - DNA, 17 bp, synthetic construct
  source 1..17: mol_type = other DNA
tcagtgaggaactagat

SEQ ID NO: 149916 - DNA, 17 bp, synthetic construct
  source 1..17: mol_type = other DNA
gtcagtgaggaactaga

SEQ ID NO: 149917 - DNA, 17 bp, synthetic construct
  source 1..17: mol_type = other DNA
agtcagtgaggaactag

SEQ ID NO: 149918 - DNA, 17 bp, synthetic construct
  source 1..17: mol_type = other DNA
gagtcagtgaggaacta

SEQ ID NO: 149919 - DNA, 17 bp, synthetic construct
  source 1..17: mol_type = other DNA
ggagtcagtgaggaact

SEQ ID NO: 149920 - DNA, 17 bp, synthetic construct
  source 1..17: mol_type = other DNA
gggagtcagtgaggaac

SEQ ID NO: 149921 - DNA, 17 bp, synthetic construct
  source 1..17: mol_type = other DNA
tgggagtcagtgaggaa

SEQ ID NO: 149922 - DNA, 17 bp, synthetic construct
  source 1..17: mol_type = other DNA
atgggagtcagtgagga

SEQ ID NO: 149923 - DNA, 17 bp, synthetic construct
  source 1..17: mol_type = other DNA
aatgggagtcagtgagg

SEQ ID NO: 149924 - DNA, 17 bp, synthetic construct
  source 1..17: mol_type = other DNA
gaatgggagtcagtgag

SEQ ID NO: 149925 - DNA, 17 bp, synthetic construct
  source 1..17: mol_type = other DNA
ggaatgggagtcagtga

SEQ ID NO: 149926 - DNA, 17 bp, synthetic construct
  source 1..17: mol_type = other DNA
gggaatgggagtcagtg

SEQ ID NO: 149927 - DNA, 17 bp, synthetic construct
  source 1..17: mol_type = other DNA
agggaatgggagtcagt

SEQ ID NO: 149928 - DNA, 17 bp, synthetic construct
  source 1..17: mol_type = other DNA
gagggaatgggagtcag

SEQ ID NO: 149929 - DNA, 17 bp, synthetic construct
  source 1..17: mol_type = other DNA
agagggaatgggagtca

SEQ ID NO: 149930 - DNA, 17 bp, synthetic construct
  source 1..17: mol_type = other DNA
aagagggaatgggagtc

SEQ ID NO: 149931 - DNA, 17 bp, synthetic construct
  source 1..17: mol_type = other DNA
gaagagggaatgggagt

SEQ ID NO: 149932 - DNA, 17 bp, synthetic construct
  source 1..17: mol_type = other DNA
ggaagagggaatgggag

SEQ ID NO: 149933 - DNA, 17 bp, synthetic construct
  source 1..17: mol_type = other DNA
gggaagagggaatggga

SEQ ID NO: 149934 - DNA, 17 bp, synthetic construct
  source 1..17: mol_type = other DNA
tgggaagagggaatggg

SEQ ID NO: 149935 - DNA, 17 bp, synthetic construct
  source 1..17: mol_type = other DNA
gtgggaagagggaatgg

SEQ ID NO: 149936 - DNA, 17 bp, synthetic construct
  source 1..17: mol_type = other DNA
tgtgggaagagggaatg

SEQ ID NO: 149937 - DNA, 17 bp, synthetic construct
  source 1..17: mol_type = other DNA
ctgtgggaagagggaat

SEQ ID NO: 149938 - DNA, 17 bp, synthetic construct
  source 1..17: mol_type = other DNA
tctgtgggaagagggaa

SEQ ID NO: 149939 - DNA, 17 bp, synthetic construct
  source 1..17: mol_type = other DNA
ctctgtgggaagaggga

SEQ ID NO: 149940 - DNA, 17 bp, synthetic construct
  source 1..17: mol_type = other DNA
tctctgtgggaagaggg

SEQ ID NO: 149941 - DNA, 17 bp, synthetic construct
  source 1..17: mol_type = other DNA
gtctctgtgggaagagg

SEQ ID NO: 149942 - DNA, 17 bp, synthetic construct
  source 1..17: mol_type = other DNA
ggtctctgtgggaagag

SEQ ID NO: 149943 - DNA, 17 bp, synthetic construct
  source 1..17: mol_type = other DNA
gggtctctgtgggaaga

SEQ ID NO: 149944 - DNA, 17 bp, synthetic construct
  source 1..17: mol_type = other DNA
tgggtctctgtgggaag

SEQ ID NO: 149945 - DNA, 17 bp, synthetic construct
  source 1..17: mol_type = other DNA
ctgggtctctgtgggaa

SEQ ID NO: 149946 - DNA, 17 bp, synthetic construct
  source 1..17: mol_type = other DNA
cctgggtctctgtggga

SEQ ID NO: 149947 - DNA, 17 bp, synthetic construct
  source 1..17: mol_type = other DNA
ccctgggtctctgtggg

SEQ ID NO: 149948 - DNA, 17 bp, synthetic construct
  source 1..17: mol_type = other DNA
gccctgggtctctgtgg

SEQ ID NO: 149949 - DNA, 17 bp, synthetic construct
  source 1..17: mol_type = other DNA
ggccctgggtctctgtg

SEQ ID NO: 149950 - DNA, 17 bp, synthetic construct
  source 1..17: mol_type = other DNA
gggccctgggtctctgt

SEQ ID NO: 149951 - DNA, 17 bp, synthetic construct
  source 1..17: mol_type = other DNA
agggccctgggtctctg

SEQ ID NO: 149952 - DNA, 17 bp, synthetic construct
  source 1..17: mol_type = other DNA
cagggccctgggtctct

SEQ ID NO: 149953 - DNA, 17 bp, synthetic construct
  source 1..17: mol_type = other DNA
acagggccctgggtctc

SEQ ID NO: 149954 - DNA, 17 bp, synthetic construct
  source 1..17: mol_type = other DNA
cacagggccctgggtct

SEQ ID NO: 149955 - DNA, 17 bp, synthetic construct
  source 1..17: mol_type = other DNA
ccacagggccctgggtc

SEQ ID NO: 149956 - DNA, 17 bp, synthetic construct
  source 1..17: mol_type = other DNA
tccacagggccctgggt

SEQ ID NO: 149957 - DNA, 17 bp, synthetic construct
  source 1..17: mol_type = other DNA
ctccacagggccctggg

SEQ ID NO: 149958 - DNA, 17 bp, synthetic construct
  source 1..17: mol_type = other DNA
gctccacagggccctgg

SEQ ID NO: 149959 - DNA, 17 bp, synthetic construct
  source 1..17: mol_type = other DNA
ggctccacagggccctg

SEQ ID NO: 149960 - DNA, 17 bp, synthetic construct
  source 1..17: mol_type = other DNA
cggctccacagggccct

SEQ ID NO: 149961 - DNA, 17 bp, synthetic construct
  source 1..17: mol_type = other DNA
tcggctccacagggccc

SEQ ID NO: 149962 - DNA, 17 bp, synthetic construct
  source 1..17: mol_type = other DNA
ctcggctccacagggcc

SEQ ID NO: 149963 - DNA, 17 bp, synthetic construct
  source 1..17: mol_type = other DNA
gctcggctccacagggc

SEQ ID NO: 149964 - DNA, 17 bp, synthetic construct
  source 1..17: mol_type = other DNA
agctcggctccacaggg

SEQ ID NO: 149965 - DNA, 17 bp, synthetic construct
  source 1..17: mol_type = other DNA
cagctcggctccacagg

SEQ ID NO: 149966 - DNA, 17 bp, synthetic construct
  source 1..17: mol_type = other DNA
ccagctcggctccacag

SEQ ID NO: 149967 - DNA, 17 bp, synthetic construct
  source 1..17: mol_type = other DNA
cccagctcggctccaca

SEQ ID NO: 149968 - DNA, 17 bp, synthetic construct
  source 1..17: mol_type = other DNA
tcccagctcggctccac

SEQ ID NO: 149969 - DNA, 17 bp, synthetic construct
  source 1..17: mol_type = other DNA
ctcccagctcggctcca

SEQ ID NO: 149970 - DNA, 17 bp, synthetic construct
  source 1..17: mol_type = other DNA
tctcccagctcggctcc

SEQ ID NO: 149971 - DNA, 17 bp, synthetic construct
  source 1..17: mol_type = other DNA
ttctcccagctcggctc

SEQ ID NO: 149972 - DNA, 17 bp, synthetic construct
  source 1..17: mol_type = other DNA
attctcccagctcggct

SEQ ID NO: 149973 - DNA, 17 bp, synthetic construct
  source 1..17: mol_type = other DNA
cattctcccagctcggc

SEQ ID NO: 149974 - DNA, 17 bp, synthetic construct
  source 1..17: mol_type = other DNA
gcattctcccagctcgg

SEQ ID NO: 149975 - DNA, 17 bp, synthetic construct
  source 1..17: mol_type = other DNA
tgcattctcccagctcg

SEQ ID NO: 149976 - DNA, 17 bp, synthetic construct
  source 1..17: mol_type = other DNA
ctgcattctcccagctc

SEQ ID NO: 149977 - DNA, 17 bp, synthetic construct
  source 1..17: mol_type = other DNA
cctgcattctcccagct

SEQ ID NO: 149978 - DNA, 17 bp, synthetic construct
  source 1..17: mol_type = other DNA
ccctgcattctcccagc

SEQ ID NO: 149979 - DNA, 17 bp, synthetic construct
  source 1..17: mol_type = other DNA
gccctgcattctcccag

SEQ ID NO: 149980 - DNA, 17 bp, synthetic construct
  source 1..17: mol_type = other DNA
tgccctgcattctccca

SEQ ID NO: 149981 - DNA, 17 bp, synthetic construct
  source 1..17: mol_type = other DNA
gtgccctgcattctccc

SEQ ID NO: 149982 - DNA, 17 bp, synthetic construct
  source 1..17: mol_type = other DNA
tgtgccctgcattctcc

SEQ ID NO: 149983 - DNA, 17 bp, synthetic construct
  source 1..17: mol_type = other DNA
gtgtgccctgcattctc

SEQ ID NO: 149984 - DNA, 17 bp, synthetic construct
  source 1..17: mol_type = other DNA
ggtgtgccctgcattct

SEQ ID NO: 149985 - DNA, 17 bp, synthetic construct
  source 1..17: mol_type = other DNA
tggtgtgccctgcattc

SEQ ID NO: 149986 - DNA, 17 bp, synthetic construct
  source 1..17: mol_type = other DNA
atggtgtgccctgcatt

SEQ ID NO: 149987 - DNA, 17 bp, synthetic construct
  source 1..17: mol_type = other DNA
catggtgtgccctgcat

SEQ ID NO: 149988 - DNA, 17 bp, synthetic construct
  source 1..17: mol_type = other DNA
ccatggtgtgccctgca

SEQ ID NO: 149989 - DNA, 17 bp, synthetic construct
  source 1..17: mol_type = other DNA
tccatggtgtgccctgc

SEQ ID NO: 149990 - DNA, 17 bp, synthetic construct
  source 1..17: mol_type = other DNA
atccatggtgtgccctg

SEQ ID NO: 149991 - DNA, 17 bp, synthetic construct
  source 1..17: mol_type = other DNA
catccatggtgtgccct

SEQ ID NO: 149992 - DNA, 17 bp, synthetic construct
  source 1..17: mol_type = other DNA
ccatccatggtgtgccc

SEQ ID NO: 149993 - DNA, 17 bp, synthetic construct
  source 1..17: mol_type = other DNA
gccatccatggtgtgcc

SEQ ID NO: 149994 - DNA, 17 bp, synthetic construct
  source 1..17: mol_type = other DNA
cgccatccatggtgtgc

SEQ ID NO: 149995 - DNA, 17 bp, synthetic construct
  source 1..17: mol_type = other DNA
ccgccatccatggtgtg

SEQ ID NO: 149996 - DNA, 17 bp, synthetic construct
  source 1..17: mol_type = other DNA
accgccatccatggtgt

SEQ ID NO: 149997 - DNA, 17 bp, synthetic construct
  source 1..17: mol_type = other DNA
taccgccatccatggtg

SEQ ID NO: 149998 - DNA, 17 bp, synthetic construct
  source 1..17: mol_type = other DNA
ataccgccatccatggt

SEQ ID NO: 149999 - DNA, 17 bp, synthetic construct
  source 1..17: mol_type = other DNA
cataccgccatccatgg

SEQ ID NO: 150000 - DNA, 17 bp, synthetic construct
  source 1..17: mol_type = other DNA
acataccgccatccatg

SEQ ID NO: 150001 - DNA, 17 bp, synthetic construct
  source 1..17: mol_type = other DNA
cacataccgccatccat

SEQ ID NO: 150002 - DNA, 17 bp, synthetic construct
  source 1..17: mol_type = other DNA
ccacataccgccatcca

SEQ ID NO: 150003 - DNA, 17 bp, synthetic construct
  source 1..17: mol_type = other DNA
gccacataccgccatcc

SEQ ID NO: 150004 - DNA, 17 bp, synthetic construct
  source 1..17: mol_type = other DNA
ggccacataccgccatc

SEQ ID NO: 150005 - DNA, 17 bp, synthetic construct
  source 1..17: mol_type = other DNA
tggccacataccgccat

SEQ ID NO: 150006 - DNA, 17 bp, synthetic construct
  source 1..17: mol_type = other DNA
ctggccacataccgcca

SEQ ID NO: 150007 - DNA, 17 bp, synthetic construct
  source 1..17: mol_type = other DNA
cctggccacataccgcc

SEQ ID NO: 150008 - DNA, 17 bp, synthetic construct
  source 1..17: mol_type = other DNA
acctggccacataccgc

SEQ ID NO: 150009 - DNA, 17 bp, synthetic construct
  source 1..17: mol_type = other DNA
aacctggccacataccg

SEQ ID NO: 150010 - DNA, 17 bp, synthetic construct
  source 1..17: mol_type = other DNA
gaacctggccacatacc

SEQ ID NO: 150011 - DNA, 17 bp, synthetic construct
  source 1..17: mol_type = other DNA
cgaacctggccacatac

SEQ ID NO: 150012 - DNA, 17 bp, synthetic construct
  source 1..17: mol_type = other DNA
ccgaacctggccacata

SEQ ID NO: 150013 - DNA, 17 bp, synthetic construct
  source 1..17: mol_type = other DNA
cccgaacctggccacat

SEQ ID NO: 150014 - DNA, 17 bp, synthetic construct
  source 1..17: mol_type = other DNA
ccccgaacctggccaca

SEQ ID NO: 150015 - DNA, 17 bp, synthetic construct
  source 1..17: mol_type = other DNA
cccccgaacctggccac

SEQ ID NO: 150016 - DNA, 17 bp, synthetic construct
  source 1..17: mol_type = other DNA
acccccgaacctggcca

SEQ ID NO: 150017 - DNA, 17 bp, synthetic construct
  source 1..17: mol_type = other DNA
cacccccgaacctggcc

SEQ ID NO: 150018 - DNA, 17 bp, synthetic construct
  source 1..17: mol_type = other DNA
ccacccccgaacctggc

SEQ ID NO: 150019 - DNA, 17 bp, synthetic construct
  source 1..17: mol_type = other DNA
cccacccccgaacctgg

SEQ ID NO: 150020 - DNA, 17 bp, synthetic construct
  source 1..17: mol_type = other DNA
ccccacccccgaacctg

SEQ ID NO: 150021 - DNA, 17 bp, synthetic construct
  source 1..17: mol_type = other DNA
cccccacccccgaacct

SEQ ID NO: 150022 - DNA, 17 bp, synthetic construct
  source 1..17: mol_type = other DNA
ccccccacccccgaacc

SEQ ID NO: 150023 - DNA, 17 bp, synthetic construct
  source 1..17: mol_type = other DNA
accccccacccccgaac

SEQ ID NO: 150024 - DNA, 17 bp, synthetic construct
  source 1..17: mol_type = other DNA
aaccccccacccccgaa

SEQ ID NO: 150025 - DNA, 17 bp, synthetic construct
  source 1..17: mol_type = other DNA
gaaccccccacccccga

SEQ ID NO: 150026 - DNA, 17 bp, synthetic construct
  source 1..17: mol_type = other DNA
ggaaccccccacccccg

SEQ ID NO: 150027 - DNA, 17 bp, synthetic construct
  source 1..17: mol_type = other DNA
aggaaccccccaccccc

SEQ ID NO: 150028 - DNA, 17 bp, synthetic construct
  source 1..17: mol_type = other DNA
caggaaccccccacccc

SEQ ID NO: 150029 - DNA, 17 bp, synthetic construct
  source 1..17: mol_type = other DNA
tcaggaaccccccaccc

SEQ ID NO: 150030 - DNA, 17 bp, synthetic construct
  source 1..17: mol_type = other DNA
gtcaggaaccccccacc

SEQ ID NO: 150031 - DNA, 17 bp, synthetic construct
  source 1..17: mol_type = other DNA
ggtcaggaaccccccac

SEQ ID NO: 150032 - DNA, 17 bp, synthetic construct
  source 1..17: mol_type = other DNA
tggtcaggaacccccca

SEQ ID NO: 150033 - DNA, 17 bp, synthetic construct
  source 1..17: mol_type = other DNA
ctggtcaggaacccccc

SEQ ID NO: 150034 - DNA, 17 bp, synthetic construct
  source 1..17: mol_type = other DNA
cctggtcaggaaccccc

SEQ ID NO: 150035 - DNA, 17 bp, synthetic construct
  source 1..17: mol_type = other DNA
gcctggtcaggaacccc

SEQ ID NO: 150036 - DNA, 17 bp, synthetic construct
  source 1..17: mol_type = other DNA
agcctggtcaggaaccc

SEQ ID NO: 150037 - DNA, 17 bp, synthetic construct
  source 1..17: mol_type = other DNA
cagcctggtcaggaacc

SEQ ID NO: 150038 - DNA, 17 bp, synthetic construct
  source 1..17: mol_type = other DNA
ccagcctggtcaggaac

SEQ ID NO: 150039 - DNA, 17 bp, synthetic construct
  source 1..17: mol_type = other DNA
tccagcctggtcaggaa

SEQ ID NO: 150040 - DNA, 17 bp, synthetic construct
  source 1..17: mol_type = other DNA
ctccagcctggtcagga

SEQ ID NO: 150041 - DNA, 17 bp, synthetic construct
  source 1..17: mol_type = other DNA
cctccagcctggtcagg

SEQ ID NO: 150042 - DNA, 17 bp, synthetic construct
  source 1..17: mol_type = other DNA
ccctccagcctggtcag

SEQ ID NO: 150043 - DNA, 17 bp, synthetic construct
  source 1..17: mol_type = other DNA
cccctccagcctggtca

SEQ ID NO: 150044 - DNA, 17 bp, synthetic construct
  source 1..17: mol_type = other DNA
gcccctccagcctggtc

SEQ ID NO: 150045 - DNA, 17 bp, synthetic construct
  source 1..17: mol_type = other DNA
agcccctccagcctggt

SEQ ID NO: 150046 - DNA, 17 bp, synthetic construct
  source 1..17: mol_type = other DNA
cagcccctccagcctgg

SEQ ID NO: 150047 - DNA, 17 bp, synthetic construct
  source 1..17: mol_type = other DNA
ccagcccctccagcctg

SEQ ID NO: 150048 - DNA, 17 bp, synthetic construct
  source 1..17: mol_type = other DNA
tccagcccctccagcct

SEQ ID NO: 150049 - DNA, 17 bp, synthetic construct
  source 1..17: mol_type = other DNA
ttccagcccctccagcc

SEQ ID NO: 150050 - DNA, 17 bp, synthetic construct
  source 1..17: mol_type = other DNA
attccagcccctccagc

SEQ ID NO: 150051 - DNA, 17 bp, synthetic construct
  source 1..17: mol_type = other DNA
aattccagcccctccag

SEQ ID NO: 150052 - DNA, 17 bp, synthetic construct
  source 1..17: mol_type = other DNA
aaattccagcccctcca

SEQ ID NO: 150053 - DNA, 17 bp, synthetic construct
  source 1..17: mol_type = other DNA
caaattccagcccctcc

SEQ ID NO: 150054 - DNA, 17 bp, synthetic construct
  source 1..17: mol_type = other DNA
ccaaattccagcccctc

SEQ ID NO: 150055 - DNA, 17 bp, synthetic construct
  source 1..17: mol_type = other DNA
cccaaattccagcccct

SEQ ID NO: 150056 - DNA, 17 bp, synthetic construct
  source 1..17: mol_type = other DNA
gcccaaattccagcccc

SEQ ID NO: 150057 - DNA, 17 bp, synthetic construct
  source 1..17: mol_type = other DNA
agcccaaattccagccc

SEQ ID NO: 150058 - DNA, 17 bp, synthetic construct
  source 1..17: mol_type = other DNA
cagcccaaattccagcc

SEQ ID NO: 150059 - DNA, 17 bp, synthetic construct
  source 1..17: mol_type = other DNA
ccagcccaaattccagc

SEQ ID NO: 150060 - DNA, 17 bp, synthetic construct
  source 1..17: mol_type = other DNA
cccagcccaaattccag

SEQ ID NO: 150061 - DNA, 17 bp, synthetic construct
  source 1..17: mol_type = other DNA
ccccagcccaaattcca

SEQ ID NO: 150062 - DNA, 17 bp, synthetic construct
  source 1..17: mol_type = other DNA
gccccagcccaaattcc

SEQ ID NO: 150063 - DNA, 17 bp, synthetic construct
  source 1..17: mol_type = other DNA
tgccccagcccaaattc

SEQ ID NO: 150064 - DNA, 17 bp, synthetic construct
  source 1..17: mol_type = other DNA
ctgccccagcccaaatt

SEQ ID NO: 150065 - DNA, 17 bp, synthetic construct
  source 1..17: mol_type = other DNA
cctgccccagcccaaat

SEQ ID NO: 150066 - DNA, 17 bp, synthetic construct
  source 1..17: mol_type = other DNA
gcctgccccagcccaaa

SEQ ID NO: 150067 - DNA, 17 bp, synthetic construct
  source 1..17: mol_type = other DNA
tgcctgccccagcccaa

SEQ ID NO: 150068 - DNA, 17 bp, synthetic construct
  source 1..17: mol_type = other DNA
ctgcctgccccagccca

SEQ ID NO: 150069 - DNA, 17 bp, synthetic construct
  source 1..17: mol_type = other DNA
tctgcctgccccagccc

SEQ ID NO: 150070 - DNA, 17 bp, synthetic construct
  source 1..17: mol_type = other DNA
gtctgcctgccccagcc

SEQ ID NO: 150071 - DNA, 17 bp, synthetic construct
  source 1..17: mol_type = other DNA
cgtctgcctgccccagc

SEQ ID NO: 150072 - DNA, 17 bp, synthetic construct
  source 1..17: mol_type = other DNA
gcgtctgcctgccccag

SEQ ID NO: 150073 - DNA, 17 bp, synthetic construct
  source 1..17: mol_type = other DNA
ggcgtctgcctgcccca

SEQ ID NO: 150074 - DNA, 17 bp, synthetic construct
  source 1..17: mol_type = other DNA
aggcgtctgcctgcccc

SEQ ID NO: 150075 - DNA, 17 bp, synthetic construct
  source 1..17: mol_type = other DNA
gaggcgtctgcctgccc

SEQ ID NO: 150076 - DNA, 17 bp, synthetic construct
  source 1..17: mol_type = other DNA
agaggcgtctgcctgcc

SEQ ID NO: 150077 - DNA, 17 bp, synthetic construct
  source 1..17: mol_type = other DNA
gagaggcgtctgcctgc

SEQ ID NO: 150078 - DNA, 17 bp, synthetic construct
  source 1..17: mol_type = other DNA
ggagaggcgtctgcctg

SEQ ID NO: 150079 - DNA, 17 bp, synthetic construct
  source 1..17: mol_type = other DNA
tggagaggcgtctgcct

SEQ ID NO: 150080 - DNA, 17 bp, synthetic construct
  source 1..17: mol_type = other DNA
ttggagaggcgtctgcc

SEQ ID NO: 150081 - DNA, 17 bp, synthetic construct
  source 1..17: mol_type = other DNA
cttggagaggcgtctgc

SEQ ID NO: 150082 - DNA, 17 bp, synthetic construct
  source 1..17: mol_type = other DNA
gcttggagaggcgtctg

SEQ ID NO: 150083 - DNA, 17 bp, synthetic construct
  source 1..17: mol_type = other DNA
tgcttggagaggcgtct

SEQ ID NO: 150084 - DNA, 17 bp, synthetic construct
  source 1..17: mol_type = other DNA
ctgcttggagaggcgtc

SEQ ID NO: 150085 - DNA, 17 bp, synthetic construct
  source 1..17: mol_type = other DNA
gctgcttggagaggcgt

SEQ ID NO: 150086 - DNA, 17 bp, synthetic construct
  source 1..17: mol_type = other DNA
ggctgcttggagaggcg

SEQ ID NO: 150087 - DNA, 17 bp, synthetic construct
  source 1..17: mol_type = other DNA
tggctgcttggagaggc

SEQ ID NO: 150088 - DNA, 17 bp, synthetic construct
  source 1..17: mol_type = other DNA
atggctgcttggagagg

SEQ ID NO: 150089 - DNA, 17 bp, synthetic construct
  source 1..17: mol_type = other DNA
catggctgcttggagag

SEQ ID NO: 150090 - DNA, 17 bp, synthetic construct
  source 1..17: mol_type = other DNA
gcatggctgcttggaga

SEQ ID NO: 150091 - DNA, 17 bp, synthetic construct
  source 1..17: mol_type = other DNA
cgcatggctgcttggag

SEQ ID NO: 150092 - DNA, 17 bp, synthetic construct
  source 1..17: mol_type = other DNA
acgcatggctgcttgga

SEQ ID NO: 150093 - DNA, 17 bp, synthetic construct
  source 1..17: mol_type = other DNA
gacgcatggctgcttgg

SEQ ID NO: 150094 - DNA, 17 bp, synthetic construct
  source 1..17: mol_type = other DNA
agacgcatggctgcttg

SEQ ID NO: 150095 - DNA, 17 bp, synthetic construct
  source 1..17: mol_type = other DNA
cagacgcatggctgctt

SEQ ID NO: 150096 - DNA, 17 bp, synthetic construct
  source 1..17: mol_type = other DNA
tcagacgcatggctgct

SEQ ID NO: 150097 - DNA, 17 bp, synthetic construct
  source 1..17: mol_type = other DNA
gtcagacgcatggctgc

SEQ ID NO: 150098 - DNA, 17 bp, synthetic construct
  source 1..17: mol_type = other DNA
tgtcagacgcatggctg

SEQ ID NO: 150099 - DNA, 17 bp, synthetic construct
  source 1..17: mol_type = other DNA
ctgtcagacgcatggct

SEQ ID NO: 150100 - DNA, 17 bp, synthetic construct
  source 1..17: mol_type = other DNA
tctgtcagacgcatggc

SEQ ID NO: 150101 - DNA, 17 bp, synthetic construct
  source 1..17: mol_type = other DNA
ctctgtcagacgcatgg

SEQ ID NO: 150102 - DNA, 17 bp, synthetic construct
  source 1..17: mol_type = other DNA
tctctgtcagacgcatg

SEQ ID NO: 150103 - DNA, 17 bp, synthetic construct
  source 1..17: mol_type = other DNA
gtctctgtcagacgcat

SEQ ID NO: 150104 - DNA, 17 bp, synthetic construct
  source 1..17: mol_type = other DNA
ggtctctgtcagacgca

SEQ ID NO: 150105 - DNA, 17 bp, synthetic construct
  source 1..17: mol_type = other DNA
gggtctctgtcagacgc

SEQ ID NO: 150106 - DNA, 17 bp, synthetic construct
  source 1..17: mol_type = other DNA
agggtctctgtcagacg

SEQ ID NO: 150107 - DNA, 17 bp, synthetic construct
  source 1..17: mol_type = other DNA
gagggtctctgtcagac

SEQ ID NO: 150108 - DNA, 17 bp, synthetic construct
  source 1..17: mol_type = other DNA
ggagggtctctgtcaga

SEQ ID NO: 150109 - DNA, 17 bp, synthetic construct
  source 1..17: mol_type = other DNA
gggagggtctctgtcag

SEQ ID NO: 150110 - DNA, 17 bp, synthetic construct
  source 1..17: mol_type = other DNA
agggagggtctctgtca

SEQ ID NO: 150111 - DNA, 17 bp, synthetic construct
  source 1..17: mol_type = other DNA
cagggagggtctctgtc

SEQ ID NO: 150112 - DNA, 17 bp, synthetic construct
  source 1..17: mol_type = other DNA
ccagggagggtctctgt

SEQ ID NO: 150113 - DNA, 17 bp, synthetic construct
  source 1..17: mol_type = other DNA
cccagggagggtctctg

SEQ ID NO: 150114 - DNA, 17 bp, synthetic construct
  source 1..17: mol_type = other DNA
acccagggagggtctct

SEQ ID NO: 150115 - DNA, 17 bp, synthetic construct
  source 1..17: mol_type = other DNA
gacccagggagggtctc

SEQ ID NO: 150116 - DNA, 17 bp, synthetic construct
  source 1..17: mol_type = other DNA
ggacccagggagggtct

SEQ ID NO: 150117 - DNA, 17 bp, synthetic construct
  source 1..17: mol_type = other DNA
gggacccagggagggtc

SEQ ID NO: 150118 - DNA, 17 bp, synthetic construct
  source 1..17: mol_type = other DNA
ggggacccagggagggt

SEQ ID NO: 150119 - DNA, 17 bp, synthetic construct
  source 1..17: mol_type = other DNA
aggggacccagggaggg

SEQ ID NO: 150120 - DNA, 17 bp, synthetic construct
  source 1..17: mol_type = other DNA
caggggacccagggagg

SEQ ID NO: 150121 - DNA, 17 bp, synthetic construct
  source 1..17: mol_type = other DNA
gcaggggacccagggag

SEQ ID NO: 150122 - DNA, 17 bp, synthetic construct
  source 1..17: mol_type = other DNA
ggcaggggacccaggga

SEQ ID NO: 150123 - DNA, 17 bp, synthetic construct
  source 1..17: mol_type = other DNA
gggcaggggacccaggg

SEQ ID NO: 150124 - DNA, 17 bp, synthetic construct
  source 1..17: mol_type = other DNA
tgggcaggggacccagg

SEQ ID NO: 150125 - DNA, 17 bp, synthetic construct
  source 1..17: mol_type = other DNA
ctgggcaggggacccag

SEQ ID NO: 150126 - DNA, 17 bp, synthetic construct
  source 1..17: mol_type = other DNA
cctgggcaggggaccca

SEQ ID NO: 150127 - DNA, 17 bp, synthetic construct
  source 1..17: mol_type = other DNA
tcctgggcaggggaccc

SEQ ID NO: 150128 - DNA, 17 bp, synthetic construct
  source 1..17: mol_type = other DNA
gtcctgggcaggggacc

SEQ ID NO: 150129 - DNA, 17 bp, synthetic construct
  source 1..17: mol_type = other DNA
tgtcctgggcaggggac

SEQ ID NO: 150130 - DNA, 17 bp, synthetic construct
  source 1..17: mol_type = other DNA
ttgtcctgggcagggga

SEQ ID NO: 150131 - DNA, 17 bp, synthetic construct
  source 1..17: mol_type = other DNA
attgtcctgggcagggg

SEQ ID NO: 150132 - DNA, 17 bp, synthetic construct
  source 1..17: mol_type = other DNA
tattgtcctgggcaggg

SEQ ID NO: 150133 - DNA, 17 bp, synthetic construct
  source 1..17: mol_type = other DNA
gtattgtcctgggcagg

SEQ ID NO: 150134 - DNA, 17 bp, synthetic construct
  source 1..17: mol_type = other DNA
ggtattgtcctgggcag

SEQ ID NO: 150135 - DNA, 17 bp, synthetic construct
  source 1..17: mol_type = other DNA
gggtattgtcctgggca

SEQ ID NO: 150136 - DNA, 17 bp, synthetic construct
  source 1..17: mol_type = other DNA
tgggtattgtcctgggc

SEQ ID NO: 150137 - DNA, 17 bp, synthetic construct
  source 1..17: mol_type = other DNA
ctgggtattgtcctggg

SEQ ID NO: 150138 - DNA, 17 bp, synthetic construct
  source 1..17: mol_type = other DNA
gctgggtattgtcctgg

SEQ ID NO: 150139 - DNA, 17 bp, synthetic construct
  source 1..17: mol_type = other DNA
tgctgggtattgtcctg

SEQ ID NO: 150140 - DNA, 17 bp, synthetic construct
  source 1..17: mol_type = other DNA
gtgctgggtattgtcct

SEQ ID NO: 150141 - DNA, 17 bp, synthetic construct
  source 1..17: mol_type = other DNA
ggtgctgggtattgtcc

SEQ ID NO: 150142 - DNA, 17 bp, synthetic construct
  source 1..17: mol_type = other DNA
gggtgctgggtattgtc

SEQ ID NO: 150143 - DNA, 17 bp, synthetic construct
  source 1..17: mol_type = other DNA
cgggtgctgggtattgt

SEQ ID NO: 150144 - DNA, 17 bp, synthetic construct
  source 1..17: mol_type = other DNA
tcgggtgctgggtattg

SEQ ID NO: 150145 - DNA, 17 bp, synthetic construct
  source 1..17: mol_type = other DNA
ctcgggtgctgggtatt

SEQ ID NO: 150146 - DNA, 17 bp, synthetic construct
  source 1..17: mol_type = other DNA
cctcgggtgctgggtat

SEQ ID NO: 150147 - DNA, 17 bp, synthetic construct
  source 1..17: mol_type = other DNA
gcctcgggtgctgggta

SEQ ID NO: 150148 - DNA, 17 bp, synthetic construct
  source 1..17: mol_type = other DNA
cgcctcgggtgctgggt

SEQ ID NO: 150149 - DNA, 17 bp, synthetic construct
  source 1..17: mol_type = other DNA
ccgcctcgggtgctggg

SEQ ID NO: 150150 - DNA, 17 bp, synthetic construct
  source 1..17: mol_type = other DNA
tccgcctcgggtgctgg

SEQ ID NO: 150151 - DNA, 17 bp, synthetic construct
  source 1..17: mol_type = other DNA
ctccgcctcgggtgctg

SEQ ID NO: 150152 - DNA, 17 bp, synthetic construct
  source 1..17: mol_type = other DNA
gctccgcctcgggtgct

SEQ ID NO: 150153 - DNA, 17 bp, synthetic construct
  source 1..17: mol_type = other DNA
agctccgcctcgggtgc

SEQ ID NO: 150154 - DNA, 17 bp, synthetic construct
  source 1..17: mol_type = other DNA
aagctccgcctcgggtg

SEQ ID NO: 150155 - DNA, 17 bp, synthetic construct
  source 1..17: mol_type = other DNA
caagctccgcctcgggt

SEQ ID NO: 150156 - DNA, 17 bp, synthetic construct
  source 1..17: mol_type = other DNA
ccaagctccgcctcggg

SEQ ID NO: 150157 - DNA, 17 bp, synthetic construct
  source 1..17: mol_type = other DNA
accaagctccgcctcgg

SEQ ID NO: 150158 - DNA, 17 bp, synthetic construct
  source 1..17: mol_type = other DNA
caccaagctccgcctcg

SEQ ID NO: 150159 - DNA, 17 bp, synthetic construct
  source 1..17: mol_type = other DNA
gcaccaagctccgcctc

SEQ ID NO: 150160 - DNA, 17 bp, synthetic construct
  source 1..17: mol_type = other DNA
agcaccaagctccgcct

SEQ ID NO: 150161 - DNA, 17 bp, synthetic construct
  source 1..17: mol_type = other DNA
gagcaccaagctccgcc

SEQ ID NO: 150162 - DNA, 17 bp, synthetic construct
  source 1..17: mol_type = other DNA
ggagcaccaagctccgc

SEQ ID NO: 150163 - DNA, 17 bp, synthetic construct
  source 1..17: mol_type = other DNA
tggagcaccaagctccg

SEQ ID NO: 150164 - DNA, 17 bp, synthetic construct
  source 1..17: mol_type = other DNA
ttggagcaccaagctcc

SEQ ID NO: 150165 - DNA, 17 bp, synthetic construct
  source 1..17: mol_type = other DNA
tttggagcaccaagctc

SEQ ID NO: 150166 - DNA, 17 bp, synthetic construct
  source 1..17: mol_type = other DNA
ctttggagcaccaagct

SEQ ID NO: 150167 - DNA, 17 bp, synthetic construct
  source 1..17: mol_type = other DNA
tctttggagcaccaagc

SEQ ID NO: 150168 - DNA, 17 bp, synthetic construct
  source 1..17: mol_type = other DNA
ttctttggagcaccaag

SEQ ID NO: 150169 - DNA, 17 bp, synthetic construct
  source 1..17: mol_type = other DNA
cttctttggagcaccaa

SEQ ID NO: 150170 - DNA, 17 bp, synthetic construct
  source 1..17: mol_type = other DNA
tcttctttggagcacca

SEQ ID NO: 150171 - DNA, 17 bp, synthetic construct
  source 1..17: mol_type = other DNA
ctcttctttggagcacc

SEQ ID NO: 150172 - DNA, 17 bp, synthetic construct
  source 1..17: mol_type = other DNA
cctcttctttggagcac

SEQ ID NO: 150173 - DNA, 17 bp, synthetic construct
  source 1..17: mol_type = other DNA
tcctcttctttggagca

SEQ ID NO: 150174 - DNA, 17 bp, synthetic construct
  source 1..17: mol_type = other DNA
ttcctcttctttggagc

SEQ ID NO: 150175 - DNA, 17 bp, synthetic construct
  source 1..17: mol_type = other DNA
tttcctcttctttggag

SEQ ID NO: 150176 - DNA, 17 bp, synthetic construct
  source 1..17: mol_type = other DNA
ctttcctcttctttgga

SEQ ID NO: 150177 - DNA, 17 bp, synthetic construct
  source 1..17: mol_type = other DNA
actttcctcttctttgg

SEQ ID NO: 150178 - DNA, 17 bp, synthetic construct
  source 1..17: mol_type = other DNA
cactttcctcttctttg

SEQ ID NO: 150179 - DNA, 17 bp, synthetic construct
  source 1..17: mol_type = other DNA
gcactttcctcttcttt

SEQ ID NO: 150180 - DNA, 17 bp, synthetic construct
  source 1..17: mol_type = other DNA
tgcactttcctcttctt

SEQ ID NO: 150181 - DNA, 17 bp, synthetic construct
  source 1..17: mol_type = other DNA
ctgcactttcctcttct

SEQ ID NO: 150182 - DNA, 17 bp, synthetic construct
  source 1..17: mol_type = other DNA
tctgcactttcctcttc

SEQ ID NO: 150183 - DNA, 17 bp, synthetic construct
  source 1..17: mol_type = other DNA
ctctgcactttcctctt

SEQ ID NO: 150184 - DNA, 17 bp, synthetic construct
  source 1..17: mol_type = other DNA
gctctgcactttcctct

SEQ ID NO: 150185 - DNA, 17 bp, synthetic construct
  source 1..17: mol_type = other DNA
tgctctgcactttcctc

SEQ ID NO: 150186 - DNA, 17 bp, synthetic construct
  source 1..17: mol_type = other DNA
ctgctctgcactttcct

SEQ ID NO: 150187 - DNA, 17 bp, synthetic construct
  source 1..17: mol_type = other DNA
tctgctctgcactttcc

SEQ ID NO: 150188 - DNA, 17 bp, synthetic construct
  source 1..17: mol_type = other DNA
ctctgctctgcactttc

SEQ ID NO: 150189 - DNA, 17 bp, synthetic construct
  source 1..17: mol_type = other DNA
tctctgctctgcacttt

SEQ ID NO: 150190 - DNA, 17 bp, synthetic construct
  source 1..17: mol_type = other DNA
ctctctgctctgcactt

SEQ ID NO: 150191 - DNA, 17 bp, synthetic construct
  source 1..17: mol_type = other DNA
tctctctgctctgcact

SEQ ID NO: 150192 - DNA, 17 bp, synthetic construct
  source 1..17: mol_type = other DNA
gtctctctgctctgcac

SEQ ID NO: 150193 - DNA, 17 bp, synthetic construct
  source 1..17: mol_type = other DNA
tgtctctctgctctgca

SEQ ID NO: 150194 - DNA, 17 bp, synthetic construct
  source 1..17: mol_type = other DNA
atgtctctctgctctgc

SEQ ID NO: 150195 - DNA, 17 bp, synthetic construct
  source 1..17: mol_type = other DNA
catgtctctctgctctg

SEQ ID NO: 150196 - DNA, 17 bp, synthetic construct
  source 1..17: mol_type = other DNA
gcatgtctctctgctct

SEQ ID NO: 150197 - DNA, 17 bp, synthetic construct
  source 1..17: mol_type = other DNA
tgcatgtctctctgctc

SEQ ID NO: 150198 - DNA, 17 bp, synthetic construct
  source 1..17: mol_type = other DNA
gtgcatgtctctctgct

SEQ ID NO: 150199 - DNA, 17 bp, synthetic construct
  source 1..17: mol_type = other DNA
tgtgcatgtctctctgc

SEQ ID NO: 150200 - DNA, 17 bp, synthetic construct
  source 1..17: mol_type = other DNA
gtgtgcatgtctctctg

SEQ ID NO: 150201 - DNA, 17 bp, synthetic construct
  source 1..17: mol_type = other DNA
tgtgtgcatgtctctct

SEQ ID NO: 150202 - DNA, 17 bp, synthetic construct
  source 1..17: mol_type = other DNA
ctgtgtgcatgtctctc

SEQ ID NO: 150203 - DNA, 17 bp, synthetic construct
  source 1..17: mol_type = other DNA
tctgtgtgcatgtctct

SEQ ID NO: 150204 - DNA, 17 bp, synthetic construct
  source 1..17: mol_type = other DNA
ttctgtgtgcatgtctc

SEQ ID NO: 150205 - DNA, 17 bp, synthetic construct
  source 1..17: mol_type = other DNA
cttctgtgtgcatgtct

SEQ ID NO: 150206 - DNA, 17 bp, synthetic construct
  source 1..17: mol_type = other DNA
gcttctgtgtgcatgtc

SEQ ID NO: 150207 - DNA, 17 bp, synthetic construct
  source 1..17: mol_type = other DNA
tgcttctgtgtgcatgt

SEQ ID NO: 150208 - DNA, 17 bp, synthetic construct
  source 1..17: mol_type = other DNA
gtgcttctgtgtgcatg

SEQ ID NO: 150209 - DNA, 17 bp, synthetic construct
  source 1..17: mol_type = other DNA
tgtgcttctgtgtgcat

SEQ ID NO: 150210 - DNA, 17 bp, synthetic construct
  source 1..17: mol_type = other DNA
gtgtgcttctgtgtgca

SEQ ID NO: 150211 - DNA, 17 bp, synthetic construct
  source 1..17: mol_type = other DNA
cgtgtgcttctgtgtgc

SEQ ID NO: 150212 - DNA, 17 bp, synthetic construct
  source 1..17: mol_type = other DNA
gcgtgtgcttctgtgtg

SEQ ID NO: 150213 - DNA, 17 bp, synthetic construct
  source 1..17: mol_type = other DNA
cgcgtgtgcttctgtgt

SEQ ID NO: 150214 - DNA, 17 bp, synthetic construct
  source 1..17: mol_type = other DNA
acgcgtgtgcttctgtg

SEQ ID NO: 150215 - DNA, 17 bp, synthetic construct
  source 1..17: mol_type = other DNA
cacgcgtgtgcttctgt

SEQ ID NO: 150216 - DNA, 17 bp, synthetic construct
  source 1..17: mol_type = other DNA
ccacgcgtgtgcttctg

SEQ ID NO: 150217 - DNA, 17 bp, synthetic construct
  source 1..17: mol_type = other DNA
tccacgcgtgtgcttct

SEQ ID NO: 150218 - DNA, 17 bp, synthetic construct
  source 1..17: mol_type = other DNA
gtccacgcgtgtgcttc

SEQ ID NO: 150219 - DNA, 17 bp, synthetic construct
  source 1..17: mol_type = other DNA
tgtccacgcgtgtgctt

SEQ ID NO: 150220 - DNA, 17 bp, synthetic construct
  source 1..17: mol_type = other DNA
ctgtccacgcgtgtgct

SEQ ID NO: 150221 - DNA, 17 bp, synthetic construct
  source 1..17: mol_type = other DNA
cctgtccacgcgtgtgc

SEQ ID NO: 150222 - DNA, 17 bp, synthetic construct
  source 1..17: mol_type = other DNA
gcctgtccacgcgtgtg

SEQ ID NO: 150223 - DNA, 17 bp, synthetic construct
  source 1..17: mol_type = other DNA
tgcctgtccacgcgtgt

SEQ ID NO: 150224 - DNA, 17 bp, synthetic construct
  source 1..17: mol_type = other DNA
gtgcctgtccacgcgtg

SEQ ID NO: 150225 - DNA, 17 bp, synthetic construct
  source 1..17: mol_type = other DNA
tgtgcctgtccacgcgt

SEQ ID NO: 150226 - DNA, 17 bp, synthetic construct
  source 1..17: mol_type = other DNA
atgtgcctgtccacgcg

SEQ ID NO: 150227 - DNA, 17 bp, synthetic construct
  source 1..17: mol_type = other DNA
catgtgcctgtccacgc

SEQ ID NO: 150228 - DNA, 17 bp, synthetic construct
  source 1..17: mol_type = other DNA
gcatgtgcctgtccacg

SEQ ID NO: 150229 - DNA, 17 bp, synthetic construct
  source 1..17: mol_type = other DNA
cgcatgtgcctgtccac

SEQ ID NO: 150230 - DNA, 17 bp, synthetic construct
  source 1..17: mol_type = other DNA
acgcatgtgcctgtcca

SEQ ID NO: 150231 - DNA, 17 bp, synthetic construct
  source 1..17: mol_type = other DNA
cacgcatgtgcctgtcc

SEQ ID NO: 150232 - DNA, 17 bp, synthetic construct
  source 1..17: mol_type = other DNA
gcacgcatgtgcctgtc

SEQ ID NO: 150233 - DNA, 17 bp, synthetic construct
  source 1..17: mol_type = other DNA
ggcacgcatgtgcctgt

SEQ ID NO: 150234 - DNA, 17 bp, synthetic construct
  source 1..17: mol_type = other DNA
gggcacgcatgtgcctg

SEQ ID NO: 150235 - DNA, 17 bp, synthetic construct
  source 1..17: mol_type = other DNA
tgggcacgcatgtgcct

SEQ ID NO: 150236 - DNA, 17 bp, synthetic construct
  source 1..17: mol_type = other DNA
gtgggcacgcatgtgcc

SEQ ID NO: 150237 - DNA, 17 bp, synthetic construct
  source 1..17: mol_type = other DNA
tgtgggcacgcatgtgc

SEQ ID NO: 150238 - DNA, 17 bp, synthetic construct
  source 1..17: mol_type = other DNA
gtgtgggcacgcatgtg

SEQ ID NO: 150239 - DNA, 17 bp, synthetic construct
  source 1..17: mol_type = other DNA
agtgtgggcacgcatgt

SEQ ID NO: 150240 - DNA, 17 bp, synthetic construct
  source 1..17: mol_type = other DNA
aagtgtgggcacgcatg

SEQ ID NO: 150241 - DNA, 17 bp, synthetic construct
  source 1..17: mol_type = other DNA
taagtgtgggcacgcat

SEQ ID NO: 150242 - DNA, 17 bp, synthetic construct
  source 1..17: mol_type = other DNA
gtaagtgtgggcacgca

SEQ ID NO: 150243 - DNA, 17 bp, synthetic construct
  source 1..17: mol_type = other DNA
tgtaagtgtgggcacgc

SEQ ID NO: 150244 - DNA, 17 bp, synthetic construct
  source 1..17: mol_type = other DNA
gtgtaagtgtgggcacg

SEQ ID NO: 150245 - DNA, 17 bp, synthetic construct
  source 1..17: mol_type = other DNA
agtgtaagtgtgggcac

SEQ ID NO: 150246 - DNA, 17 bp, synthetic construct
  source 1..17: mol_type = other DNA
cagtgtaagtgtgggca

SEQ ID NO: 150247 - DNA, 17 bp, synthetic construct
  source 1..17: mol_type = other DNA
ccagtgtaagtgtgggc

SEQ ID NO: 150248 - DNA, 17 bp, synthetic construct
  source 1..17: mol_type = other DNA
gccagtgtaagtgtggg

SEQ ID NO: 150249 - DNA, 17 bp, synthetic construct
  source 1..17: mol_type = other DNA
tgccagtgtaagtgtgg

SEQ ID NO: 150250 - DNA, 17 bp, synthetic construct
  source 1..17: mol_type = other DNA
gtgccagtgtaagtgtg

SEQ ID NO: 150251 - DNA, 17 bp, synthetic construct
  source 1..17: mol_type = other DNA
tgtgccagtgtaagtgt

SEQ ID NO: 150252 - DNA, 17 bp, synthetic construct
  source 1..17: mol_type = other DNA
gtgtgccagtgtaagtg

SEQ ID NO: 150253 - DNA, 17 bp, synthetic construct
  source 1..17: mol_type = other DNA
tgtgtgccagtgtaagt

SEQ ID NO: 150254 - DNA, 17 bp, synthetic construct
  source 1..17: mol_type = other DNA
gtgtgtgccagtgtaag

SEQ ID NO: 150255 - DNA, 17 bp, synthetic construct
  source 1..17: mol_type = other DNA
tgtgtgtgccagtgtaa

SEQ ID NO: 150256 - DNA, 17 bp, synthetic construct
  source 1..17: mol_type = other DNA
atgtgtgtgccagtgta

SEQ ID NO: 150257 - DNA, 17 bp, synthetic construct
  source 1..17: mol_type = other DNA
catgtgtgtgccagtgt

SEQ ID NO: 150258 - DNA, 17 bp, synthetic construct
  source 1..17: mol_type = other DNA
acatgtgtgtgccagtg

SEQ ID NO: 150259 - DNA, 17 bp, synthetic construct
  source 1..17: mol_type = other DNA
cacatgtgtgtgccagt

SEQ ID NO: 150260 - DNA, 17 bp, synthetic construct
  source 1..17: mol_type = other DNA
acacatgtgtgtgccag

SEQ ID NO: 150261 - DNA, 17 bp, synthetic construct
  source 1..17: mol_type = other DNA
cacacatgtgtgtgcca

SEQ ID NO: 150262 - DNA, 17 bp, synthetic construct
  source 1..17: mol_type = other DNA
gcacacatgtgtgtgcc

SEQ ID NO: 150263 - DNA, 17 bp, synthetic construct
  source 1..17: mol_type = other DNA
tgcacacatgtgtgtgc

SEQ ID NO: 150264 - DNA, 17 bp, synthetic construct
  source 1..17: mol_type = other DNA
gtgcacacatgtgtgtg

SEQ ID NO: 150265 - DNA, 17 bp, synthetic construct
  source 1..17: mol_type = other DNA
tgtgcacacatgtgtgt

SEQ ID NO: 150266 - DNA, 17 bp, synthetic construct
  source 1..17: mol_type = other DNA
gtgtgcacacatgtgtg

SEQ ID NO: 150267 - DNA, 17 bp, synthetic construct
  source 1..17: mol_type = other DNA
tgtgtgcacacatgtgt

SEQ ID NO: 150268 - DNA, 17 bp, synthetic construct
  source 1..17: mol_type = other DNA
gtgtgtgcacacatgtg

SEQ ID NO: 150269 - DNA, 17 bp, synthetic construct
  source 1..17: mol_type = other DNA
tgtgtgtgcacacatgt

SEQ ID NO: 150270 - DNA, 17 bp, synthetic construct
  source 1..17: mol_type = other DNA
ctgtgtgtgcacacatg

SEQ ID NO: 150271 - DNA, 17 bp, synthetic construct
  source 1..17: mol_type = other DNA
cctgtgtgtgcacacat

SEQ ID NO: 150272 - DNA, 17 bp, synthetic construct
  source 1..17: mol_type = other DNA
gcctgtgtgtgcacaca

SEQ ID NO: 150273 - DNA, 17 bp, synthetic construct
  source 1..17: mol_type = other DNA
ggcctgtgtgtgcacac

SEQ ID NO: 150274 - DNA, 17 bp, synthetic construct
  source 1..17: mol_type = other DNA
tggcctgtgtgtgcaca

SEQ ID NO: 150275 - DNA, 17 bp, synthetic construct
  source 1..17: mol_type = other DNA
ttggcctgtgtgtgcac

SEQ ID NO: 150276 - DNA, 17 bp, synthetic construct
  source 1..17: mol_type = other DNA
tttggcctgtgtgtgca

SEQ ID NO: 150277 - DNA, 17 bp, synthetic construct
  source 1..17: mol_type = other DNA
ttttggcctgtgtgtgc

SEQ ID NO: 150278 - DNA, 17 bp, synthetic construct
  source 1..17: mol_type = other DNA
gttttggcctgtgtgtg

SEQ ID NO: 150279 - DNA, 17 bp, synthetic construct
  source 1..17: mol_type = other DNA
tgttttggcctgtgtgt

SEQ ID NO: 150280 - DNA, 17 bp, synthetic construct
  source 1..17: mol_type = other DNA
gtgttttggcctgtgtg

SEQ ID NO: 150281 - DNA, 17 bp, synthetic construct
  source 1..17: mol_type = other DNA
tgtgttttggcctgtgt

SEQ ID NO: 150282 - DNA, 17 bp, synthetic construct
  source 1..17: mol_type = other DNA
ttgtgttttggcctgtg

SEQ ID NO: 150283 - DNA, 17 bp, synthetic construct
  source 1..17: mol_type = other DNA
cttgtgttttggcctgt

SEQ ID NO: 150284 - DNA, 17 bp, synthetic construct
  source 1..17: mol_type = other DNA
ccttgtgttttggcctg

SEQ ID NO: 150285 - DNA, 17 bp, synthetic construct
  source 1..17: mol_type = other DNA
cccttgtgttttggcct

SEQ ID NO: 150286 - DNA, 17 bp, synthetic construct
  source 1..17: mol_type = other DNA
gcccttgtgttttggcc

SEQ ID NO: 150287 - DNA, 17 bp, synthetic construct
  source 1..17: mol_type = other DNA
tgcccttgtgttttggc

SEQ ID NO: 150288 - DNA, 17 bp, synthetic construct
  source 1..17: mol_type = other DNA
ctgcccttgtgttttgg

SEQ ID NO: 150289 - DNA, 17 bp, synthetic construct
  source 1..17: mol_type = other DNA
gctgcccttgtgttttg

SEQ ID NO: 150290 - DNA, 17 bp, synthetic construct
  source 1..17: mol_type = other DNA
tgctgcccttgtgtttt

SEQ ID NO: 150291 - DNA, 17 bp, synthetic construct
  source 1..17: mol_type = other DNA
ctgctgcccttgtgttt

SEQ ID NO: 150292 - DNA, 17 bp, synthetic construct
  source 1..17: mol_type = other DNA
actgctgcccttgtgtt

SEQ ID NO: 150293 - DNA, 17 bp, synthetic construct
  source 1..17: mol_type = other DNA
cactgctgcccttgtgt

SEQ ID NO: 150294 - DNA, 17 bp, synthetic construct
  source 1..17: mol_type = other DNA
acactgctgcccttgtg

SEQ ID NO: 150295 - DNA, 17 bp, synthetic construct
  source 1..17: mol_type = other DNA
aacactgctgcccttgt

SEQ ID NO: 150296 - DNA, 17 bp, synthetic construct
  source 1..17: mol_type = other DNA
aaacactgctgcccttg

SEQ ID NO: 150297 - DNA, 17 bp, synthetic construct
  source 1..17: mol_type = other DNA
caaacactgctgccctt

SEQ ID NO: 150298 - DNA, 17 bp, synthetic construct
  source 1..17: mol_type = other DNA
acaaacactgctgccct

SEQ ID NO: 150299 - DNA, 17 bp, synthetic construct
  source 1..17: mol_type = other DNA
cacaaacactgctgccc

SEQ ID NO: 150300 - DNA, 17 bp, synthetic construct
  source 1..17: mol_type = other DNA
ccacaaacactgctgcc

SEQ ID NO: 150301 - DNA, 17 bp, synthetic construct
  source 1..17: mol_type = other DNA
cccacaaacactgctgc

SEQ ID NO: 150302 - DNA, 17 bp, synthetic construct
  source 1..17: mol_type = other DNA
ccccacaaacactgctg

SEQ ID NO: 150303 - DNA, 17 bp, synthetic construct
  source 1..17: mol_type = other DNA
gccccacaaacactgct

SEQ ID NO: 150304 - DNA, 17 bp, synthetic construct
  source 1..17: mol_type = other DNA
tgccccacaaacactgc

SEQ ID NO: 150305 - DNA, 17 bp, synthetic construct
  source 1..17: mol_type = other DNA
ctgccccacaaacactg

SEQ ID NO: 150306 - DNA, 17 bp, synthetic construct
  source 1..17: mol_type = other DNA
tctgccccacaaacact

SEQ ID NO: 150307 - DNA, 17 bp, synthetic construct
  source 1..17: mol_type = other DNA
gtctgccccacaaacac

SEQ ID NO: 150308 - DNA, 17 bp, synthetic construct
  source 1..17: mol_type = other DNA
tgtctgccccacaaaca

SEQ ID NO: 150309 - DNA, 17 bp, synthetic construct
  source 1..17: mol_type = other DNA
ctgtctgccccacaaac

SEQ ID NO: 150310 - DNA, 17 bp, synthetic construct
  source 1..17: mol_type = other DNA
cctgtctgccccacaaa

SEQ ID NO: 150311 - DNA, 17 bp, synthetic construct
  source 1..17: mol_type = other DNA
ccctgtctgccccacaa

SEQ ID NO: 150312 - DNA, 17 bp, synthetic construct
  source 1..17: mol_type = other DNA
gccctgtctgccccaca

SEQ ID NO: 150313 - DNA, 17 bp, synthetic construct
  source 1..17: mol_type = other DNA
ggccctgtctgccccac

SEQ ID NO: 150314 - DNA, 17 bp, synthetic construct
  source 1..17: mol_type = other DNA
tggccctgtctgcccca

SEQ ID NO: 150315 - DNA, 17 bp, synthetic construct
  source 1..17: mol_type = other DNA
ttggccctgtctgcccc

SEQ ID NO: 150316 - DNA, 17 bp, synthetic construct
  source 1..17: mol_type = other DNA
cttggccctgtctgccc

SEQ ID NO: 150317 - DNA, 17 bp, synthetic construct
  source 1..17: mol_type = other DNA
ccttggccctgtctgcc

SEQ ID NO: 150318 - DNA, 17 bp, synthetic construct
  source 1..17: mol_type = other DNA
cccttggccctgtctgc

SEQ ID NO: 150319 - DNA, 17 bp, synthetic construct
  source 1..17: mol_type = other DNA
acccttggccctgtctg

SEQ ID NO: 150320 - DNA, 17 bp, synthetic construct
  source 1..17: mol_type = other DNA
tacccttggccctgtct

SEQ ID NO: 150321 - DNA, 17 bp, synthetic construct
  source 1..17: mol_type = other DNA
ttacccttggccctgtc

SEQ ID NO: 150322 - DNA, 17 bp, synthetic construct
  source 1..17: mol_type = other DNA
tttacccttggccctgt

SEQ ID NO: 150323 - DNA, 17 bp, synthetic construct
  source 1..17: mol_type = other DNA
ctttacccttggccctg

SEQ ID NO: 150324 - DNA, 17 bp, synthetic construct
  source 1..17: mol_type = other DNA
cctttacccttggccct

SEQ ID NO: 150325 - DNA, 17 bp, synthetic construct
  source 1..17: mol_type = other DNA
ccctttacccttggccc

SEQ ID NO: 150326 - DNA, 17 bp, synthetic construct
  source 1..17: mol_type = other DNA
cccctttacccttggcc

SEQ ID NO: 150327 - DNA, 17 bp, synthetic construct
  source 1..17: mol_type = other DNA
gcccctttacccttggc

SEQ ID NO: 150328 - DNA, 17 bp, synthetic construct
  source 1..17: mol_type = other DNA
agcccctttacccttgg

SEQ ID NO: 150329 - DNA, 17 bp, synthetic construct
  source 1..17: mol_type = other DNA
cagcccctttacccttg

SEQ ID NO: 150330 - DNA, 17 bp, synthetic construct
  source 1..17: mol_type = other DNA
gcagcccctttaccctt

SEQ ID NO: 150331 - DNA, 17 bp, synthetic construct
  source 1..17: mol_type = other DNA
ggcagcccctttaccct

SEQ ID NO: 150332 - DNA, 17 bp, synthetic construct
  source 1..17: mol_type = other DNA
aggcagcccctttaccc

SEQ ID NO: 150333 - DNA, 17 bp, synthetic construct
  source 1..17: mol_type = other DNA
aaggcagcccctttacc

SEQ ID NO: 150334 - DNA, 17 bp, synthetic construct
  source 1..17: mol_type = other DNA
caaggcagcccctttac

SEQ ID NO: 150335 - DNA, 17 bp, synthetic construct
  source 1..17: mol_type = other DNA
ccaaggcagccccttta

SEQ ID NO: 150336 - DNA, 17 bp, synthetic construct
  source 1..17: mol_type = other DNA
gccaaggcagccccttt

SEQ ID NO: 150337 - DNA, 17 bp, synthetic construct
  source 1..17: mol_type = other DNA
ggccaaggcagcccctt

SEQ ID NO: 150338 - DNA, 17 bp, synthetic construct
  source 1..17: mol_type = other DNA
gggccaaggcagcccct

SEQ ID NO: 150339 - DNA, 17 bp, synthetic construct
  source 1..17: mol_type = other DNA
ggggccaaggcagcccc

SEQ ID NO: 150340 - DNA, 17 bp, synthetic construct
  source 1..17: mol_type = other DNA
tggggccaaggcagccc

SEQ ID NO: 150341 - DNA, 17 bp, synthetic construct
  source 1..17: mol_type = other DNA
ctggggccaaggcagcc

SEQ ID NO: 150342 - DNA, 17 bp, synthetic construct
  source 1..17: mol_type = other DNA
gctggggccaaggcagc

SEQ ID NO: 150343 - DNA, 17 bp, synthetic construct
  source 1..17: mol_type = other DNA
ggctggggccaaggcag

SEQ ID NO: 150344 - DNA, 17 bp, synthetic construct
  source 1..17: mol_type = other DNA
gggctggggccaaggca

SEQ ID NO: 150345 - DNA, 17 bp, synthetic construct
  source 1..17: mol_type = other DNA
tgggctggggccaaggc

SEQ ID NO: 150346 - DNA, 17 bp, synthetic construct
  source 1..17: mol_type = other DNA
atgggctggggccaagg

SEQ ID NO: 150347 - DNA, 17 bp, synthetic construct
  source 1..17: mol_type = other DNA
gatgggctggggccaag

SEQ ID NO: 150348 - DNA, 17 bp, synthetic construct
  source 1..17: mol_type = other DNA
tgatgggctggggccaa

SEQ ID NO: 150349 - DNA, 17 bp, synthetic construct
  source 1..17: mol_type = other DNA
ctgatgggctggggcca

SEQ ID NO: 150350 - DNA, 17 bp, synthetic construct
  source 1..17: mol_type = other DNA
actgatgggctggggcc

SEQ ID NO: 150351 - DNA, 17 bp, synthetic construct
  source 1..17: mol_type = other DNA
aactgatgggctggggc

SEQ ID NO: 150352 - DNA, 17 bp, synthetic construct
  source 1..17: mol_type = other DNA
aaactgatgggctgggg

SEQ ID NO: 150353 - DNA, 17 bp, synthetic construct
  source 1..17: mol_type = other DNA
aaaactgatgggctggg

SEQ ID NO: 150354 - DNA, 17 bp, synthetic construct
  source 1..17: mol_type = other DNA
caaaactgatgggctgg

SEQ ID NO: 150355 - DNA, 17 bp, synthetic construct
  source 1..17: mol_type = other DNA
ccaaaactgatgggctg

SEQ ID NO: 150356 - DNA, 17 bp, synthetic construct
  source 1..17: mol_type = other DNA
cccaaaactgatgggct

SEQ ID NO: 150357 - DNA, 17 bp, synthetic construct
  source 1..17: mol_type = other DNA
gcccaaaactgatgggc

SEQ ID NO: 150358 - DNA, 17 bp, synthetic construct
  source 1..17: mol_type = other DNA
agcccaaaactgatggg

SEQ ID NO: 150359 - DNA, 17 bp, synthetic construct
  source 1..17: mol_type = other DNA
gagcccaaaactgatgg

SEQ ID NO: 150360 - DNA, 17 bp, synthetic construct
  source 1..17: mol_type = other DNA
ggagcccaaaactgatg

SEQ ID NO: 150361 - DNA, 17 bp, synthetic construct
  source 1..17: mol_type = other DNA
gggagcccaaaactgat

SEQ ID NO: 150362 - DNA, 17 bp, synthetic construct
  source 1..17: mol_type = other DNA
ggggagcccaaaactga

SEQ ID NO: 150363 - DNA, 17 bp, synthetic construct
  source 1..17: mol_type = other DNA
aggggagcccaaaactg

SEQ ID NO: 150364 - DNA, 17 bp, synthetic construct
  source 1..17: mol_type = other DNA
aaggggagcccaaaact

SEQ ID NO: 150365 - DNA, 17 bp, synthetic construct
  source 1..17: mol_type = other DNA
gaaggggagcccaaaac

SEQ ID NO: 150366 - DNA, 17 bp, synthetic construct
  source 1..17: mol_type = other DNA
tgaaggggagcccaaaa

SEQ ID NO: 150367 - DNA, 17 bp, synthetic construct
  source 1..17: mol_type = other DNA
ttgaaggggagcccaaa

SEQ ID NO: 150368 - DNA, 17 bp, synthetic construct
  source 1..17: mol_type = other DNA
gttgaaggggagcccaa

SEQ ID NO: 150369 - DNA, 17 bp, synthetic construct
  source 1..17: mol_type = other DNA
agttgaaggggagccca

SEQ ID NO: 150370 - DNA, 17 bp, synthetic construct
  source 1..17: mol_type = other DNA
gagttgaaggggagccc

SEQ ID NO: 150371 - DNA, 17 bp, synthetic construct
  source 1..17: mol_type = other DNA
agagttgaaggggagcc

SEQ ID NO: 150372 - DNA, 17 bp, synthetic construct
  source 1..17: mol_type = other DNA
cagagttgaaggggagc

SEQ ID NO: 150373 - DNA, 17 bp, synthetic construct
  source 1..17: mol_type = other DNA
ccagagttgaaggggag

SEQ ID NO: 150374 - DNA, 17 bp, synthetic construct
  source 1..17: mol_type = other DNA
accagagttgaagggga

SEQ ID NO: 150375 - DNA, 17 bp, synthetic construct
  source 1..17: mol_type = other DNA
caccagagttgaagggg

SEQ ID NO: 150376 - DNA, 17 bp, synthetic construct
  source 1..17: mol_type = other DNA
ccaccagagttgaaggg

SEQ ID NO: 150377 - DNA, 17 bp, synthetic construct
  source 1..17: mol_type = other DNA
gccaccagagttgaagg

SEQ ID NO: 150378 - DNA, 17 bp, synthetic construct
  source 1..17: mol_type = other DNA
agccaccagagttgaag

SEQ ID NO: 150379 - DNA, 17 bp, synthetic construct
  source 1..17: mol_type = other DNA
cagccaccagagttgaa

SEQ ID NO: 150380 - DNA, 17 bp, synthetic construct
  source 1..17: mol_type = other DNA
ccagccaccagagttga

SEQ ID NO: 150381 - DNA, 17 bp, synthetic construct
  source 1..17: mol_type = other DNA
gccagccaccagagttg

SEQ ID NO: 150382 - DNA, 17 bp, synthetic construct
  source 1..17: mol_type = other DNA
cgccagccaccagagtt

SEQ ID NO: 150383 - DNA, 17 bp, synthetic construct
  source 1..17: mol_type = other DNA
tcgccagccaccagagt

SEQ ID NO: 150384 - DNA, 17 bp, synthetic construct
  source 1..17: mol_type = other DNA
ctcgccagccaccagag

SEQ ID NO: 150385 - DNA, 17 bp, synthetic construct
  source 1..17: mol_type = other DNA
cctcgccagccaccaga

SEQ ID NO: 150386 - DNA, 17 bp, synthetic construct
  source 1..17: mol_type = other DNA
tcctcgccagccaccag

SEQ ID NO: 150387 - DNA, 17 bp, synthetic construct
  source 1..17: mol_type = other DNA
ctcctcgccagccacca

SEQ ID NO: 150388 - DNA, 17 bp, synthetic construct
  source 1..17: mol_type = other DNA
cctcctcgccagccacc

SEQ ID NO: 150389 - DNA, 17 bp, synthetic construct
  source 1..17: mol_type = other DNA
ccctcctcgccagccac

SEQ ID NO: 150390 - DNA, 17 bp, synthetic construct
  source 1..17: mol_type = other DNA
accctcctcgccagcca

SEQ ID NO: 150391 - DNA, 17 bp, synthetic construct
  source 1..17: mol_type = other DNA
caccctcctcgccagcc

SEQ ID NO: 150392 - DNA, 17 bp, synthetic construct
  source 1..17: mol_type = other DNA
ccaccctcctcgccagc

SEQ ID NO: 150393 - DNA, 17 bp, synthetic construct
  source 1..17: mol_type = other DNA
cccaccctcctcgccag

SEQ ID NO: 150394 - DNA, 17 bp, synthetic construct
  source 1..17: mol_type = other DNA
gcccaccctcctcgcca

SEQ ID NO: 150395 - DNA, 17 bp, synthetic construct
  source 1..17: mol_type = other DNA
ggcccaccctcctcgcc

SEQ ID NO: 150396 - DNA, 17 bp, synthetic construct
  source 1..17: mol_type = other DNA
gggcccaccctcctcgc

SEQ ID NO: 150397 - DNA, 17 bp, synthetic construct
  source 1..17: mol_type = other DNA
ggggcccaccctcctcg

SEQ ID NO: 150398 - DNA, 17 bp, synthetic construct
  source 1..17: mol_type = other DNA
cggggcccaccctcctc

SEQ ID NO: 150399 - DNA, 17 bp, synthetic construct
  source 1..17: mol_type = other DNA
ccggggcccaccctcct

SEQ ID NO: 150400 - DNA, 17 bp, synthetic construct
  source 1..17: mol_type = other DNA
cccggggcccaccctcc

SEQ ID NO: 150401 - DNA, 17 bp, synthetic construct
  source 1..17: mol_type = other DNA
ccccggggcccaccctc

SEQ ID NO: 150402 - DNA, 17 bp, synthetic construct
  source 1..17: mol_type = other DNA
tccccggggcccaccct

SEQ ID NO: 150403 - DNA, 17 bp, synthetic construct
  source 1..17: mol_type = other DNA
ctccccggggcccaccc

SEQ ID NO: 150404 - DNA, 17 bp, synthetic construct
  source 1..17: mol_type = other DNA
cctccccggggcccacc

SEQ ID NO: 150405 - DNA, 17 bp, synthetic construct
  source 1..17: mol_type = other DNA
ccctccccggggcccac

SEQ ID NO: 150406 - DNA, 17 bp, synthetic construct
  source 1..17: mol_type = other DNA
accctccccggggccca

SEQ ID NO: 150407 - DNA, 17 bp, synthetic construct
  source 1..17: mol_type = other DNA
caccctccccggggccc

SEQ ID NO: 150408 - DNA, 17 bp, synthetic construct
  source 1..17: mol_type = other DNA
acaccctccccggggcc

SEQ ID NO: 150409 - DNA, 17 bp, synthetic construct
  source 1..17: mol_type = other DNA
gacaccctccccggggc

SEQ ID NO: 150410 - DNA, 17 bp, synthetic construct
  source 1..17: mol_type = other DNA
agacaccctccccgggg

SEQ ID NO: 150411 - DNA, 17 bp, synthetic construct
  source 1..17: mol_type = other DNA
gagacaccctccccggg

SEQ ID NO: 150412 - DNA, 17 bp, synthetic construct
  source 1..17: mol_type = other DNA
agagacaccctccccgg

SEQ ID NO: 150413 - DNA, 17 bp, synthetic construct
  source 1..17: mol_type = other DNA
cagagacaccctccccg

SEQ ID NO: 150414 - DNA, 17 bp, synthetic construct
  source 1..17: mol_type = other DNA
gcagagacaccctcccc

SEQ ID NO: 150415 - DNA, 17 bp, synthetic construct
  source 1..17: mol_type = other DNA
agcagagacaccctccc

SEQ ID NO: 150416 - DNA, 17 bp, synthetic construct
  source 1..17: mol_type = other DNA
aagcagagacaccctcc

SEQ ID NO: 150417 - DNA, 17 bp, synthetic construct
  source 1..17: mol_type = other DNA
gaagcagagacaccctc

SEQ ID NO: 150418 - DNA, 17 bp, synthetic construct
  source 1..17: mol_type = other DNA
ggaagcagagacaccct

SEQ ID NO: 150419 - DNA, 17 bp, synthetic construct
  source 1..17: mol_type = other DNA
gggaagcagagacaccc

SEQ ID NO: 150420 - DNA, 17 bp, synthetic construct
  source 1..17: mol_type = other DNA
ggggaagcagagacacc

SEQ ID NO: 150421 - DNA, 17 bp, synthetic construct
  source 1..17: mol_type = other DNA
aggggaagcagagacac

SEQ ID NO: 150422 - DNA, 17 bp, synthetic construct
  source 1..17: mol_type = other DNA
aaggggaagcagagaca

SEQ ID NO: 150423 - DNA, 17 bp, synthetic construct
  source 1..17: mol_type = other DNA
gaaggggaagcagagac

SEQ ID NO: 150424 - DNA, 17 bp, synthetic construct
  source 1..17: mol_type = other DNA
ggaaggggaagcagaga

SEQ ID NO: 150425 - DNA, 17 bp, synthetic construct
  source 1..17: mol_type = other DNA
aggaaggggaagcagag

SEQ ID NO: 150426 - DNA, 17 bp, synthetic construct
  source 1..17: mol_type = other DNA
caggaaggggaagcaga

SEQ ID NO: 150427 - DNA, 17 bp, synthetic construct
  source 1..17: mol_type = other DNA
ccaggaaggggaagcag

SEQ ID NO: 150428 - DNA, 17 bp, synthetic construct
  source 1..17: mol_type = other DNA
gccaggaaggggaagca

SEQ ID NO: 150429 - DNA, 17 bp, synthetic construct
  source 1..17: mol_type = other DNA
ggccaggaaggggaagc

SEQ ID NO: 150430 - DNA, 17 bp, synthetic construct
  source 1..17: mol_type = other DNA
tggccaggaaggggaag

SEQ ID NO: 150431 - DNA, 17 bp, synthetic construct
  source 1..17: mol_type = other DNA
gtggccaggaaggggaa

SEQ ID NO: 150432 - DNA, 17 bp, synthetic construct
  source 1..17: mol_type = other DNA
cgtggccaggaagggga

SEQ ID NO: 150433 - DNA, 17 bp, synthetic construct
  source 1..17: mol_type = other DNA
acgtggccaggaagggg

SEQ ID NO: 150434 - DNA, 17 bp, synthetic construct
  source 1..17: mol_type = other DNA
aacgtggccaggaaggg

SEQ ID NO: 150435 - DNA, 17 bp, synthetic construct
  source 1..17: mol_type = other DNA
gaacgtggccaggaagg

SEQ ID NO: 150436 - DNA, 17 bp, synthetic construct
  source 1..17: mol_type = other DNA
ggaacgtggccaggaag

SEQ ID NO: 150437 - DNA, 17 bp, synthetic construct
  source 1..17: mol_type = other DNA
aggaacgtggccaggaa

SEQ ID NO: 150438 - DNA, 17 bp, synthetic construct
  source 1..17: mol_type = other DNA
caggaacgtggccagga

SEQ ID NO: 150439 - DNA, 17 bp, synthetic construct
  source 1..17: mol_type = other DNA
ccaggaacgtggccagg

SEQ ID NO: 150440 - DNA, 17 bp, synthetic construct
  source 1..17: mol_type = other DNA
cccaggaacgtggccag

SEQ ID NO: 150441 - DNA, 17 bp, synthetic construct
  source 1..17: mol_type = other DNA
ccccaggaacgtggcca

SEQ ID NO: 150442 - DNA, 17 bp, synthetic construct
  source 1..17: mol_type = other DNA
accccaggaacgtggcc

SEQ ID NO: 150443 - DNA, 17 bp, synthetic construct
  source 1..17: mol_type = other DNA
caccccaggaacgtggc

SEQ ID NO: 150444 - DNA, 17 bp, synthetic construct
  source 1..17: mol_type = other DNA
tcaccccaggaacgtgg

SEQ ID NO: 150445 - DNA, 17 bp, synthetic construct
  source 1..17: mol_type = other DNA
gtcaccccaggaacgtg

SEQ ID NO: 150446 - DNA, 17 bp, synthetic construct
  source 1..17: mol_type = other DNA
ggtcaccccaggaacgt

SEQ ID NO: 150447 - DNA, 17 bp, synthetic construct
  source 1..17: mol_type = other DNA
tggtcaccccaggaacg

SEQ ID NO: 150448 - DNA, 17 bp, synthetic construct
  source 1..17: mol_type = other DNA
ctggtcaccccaggaac

SEQ ID NO: 150449 - DNA, 17 bp, synthetic construct
  source 1..17: mol_type = other DNA
gctggtcaccccaggaa

SEQ ID NO: 150450 - DNA, 17 bp, synthetic construct
  source 1..17: mol_type = other DNA
ggctggtcaccccagga

SEQ ID NO: 150451 - DNA, 17 bp, synthetic construct
  source 1..17: mol_type = other DNA
aggctggtcaccccagg

SEQ ID NO: 150452 - DNA, 17 bp, synthetic construct
  source 1..17: mol_type = other DNA
aaggctggtcaccccag

SEQ ID NO: 150453 - DNA, 17 bp, synthetic construct
  source 1..17: mol_type = other DNA
gaaggctggtcacccca

SEQ ID NO: 150454 - DNA, 17 bp, synthetic construct
  source 1..17: mol_type = other DNA
tgaaggctggtcacccc

SEQ ID NO: 150455 - DNA, 17 bp, synthetic construct
  source 1..17: mol_type = other DNA
gtgaaggctggtcaccc

SEQ ID NO: 150456 - DNA, 17 bp, synthetic construct
  source 1..17: mol_type = other DNA
ggtgaaggctggtcacc

SEQ ID NO: 150457 - DNA, 17 bp, synthetic construct
  source 1..17: mol_type = other DNA
gggtgaaggctggtcac

SEQ ID NO: 150458 - DNA, 17 bp, synthetic construct
  source 1..17: mol_type = other DNA
tgggtgaaggctggtca

SEQ ID NO: 150459 - DNA, 17 bp, synthetic construct
  source 1..17: mol_type = other DNA
gtgggtgaaggctggtc

SEQ ID NO: 150460 - DNA, 17 bp, synthetic construct
  source 1..17: mol_type = other DNA
tgtgggtgaaggctggt

SEQ ID NO: 150461 - DNA, 17 bp, synthetic construct
  source 1..17: mol_type = other DNA
ctgtgggtgaaggctgg

SEQ ID NO: 150462 - DNA, 17 bp, synthetic construct
  source 1..17: mol_type = other DNA
cctgtgggtgaaggctg

SEQ ID NO: 150463 - DNA, 17 bp, synthetic construct
  source 1..17: mol_type = other DNA
acctgtgggtgaaggct

SEQ ID NO: 150464 - DNA, 17 bp, synthetic construct
  source 1..17: mol_type = other DNA
cacctgtgggtgaaggc

SEQ ID NO: 150465 - DNA, 17 bp, synthetic construct
  source 1..17: mol_type = other DNA
gcacctgtgggtgaagg

SEQ ID NO: 150466 - DNA, 17 bp, synthetic construct
  source 1..17: mol_type = other DNA
ggcacctgtgggtgaag

SEQ ID NO: 150467 - DNA, 17 bp, synthetic construct
  source 1..17: mol_type = other DNA
gggcacctgtgggtgaa

SEQ ID NO: 150468 - DNA, 17 bp, synthetic construct
  source 1..17: mol_type = other DNA
ggggcacctgtgggtga

SEQ ID NO: 150469 - DNA, 17 bp, synthetic construct
  source 1..17: mol_type = other DNA
cggggcacctgtgggtg

SEQ ID NO: 150470 - DNA, 17 bp, synthetic construct
  source 1..17: mol_type = other DNA
tcggggcacctgtgggt

SEQ ID NO: 150471 - DNA, 17 bp, synthetic construct
  source 1..17: mol_type = other DNA
gtcggggcacctgtggg

SEQ ID NO: 150472 - DNA, 17 bp, synthetic construct
  source 1..17: mol_type = other DNA
cgtcggggcacctgtgg

SEQ ID NO: 150473 - DNA, 17 bp, synthetic construct
  source 1..17: mol_type = other DNA
acgtcggggcacctgtg

SEQ ID NO: 150474 - DNA, 17 bp, synthetic construct
  source 1..17: mol_type = other DNA
gacgtcggggcacctgt

SEQ ID NO: 150475 - DNA, 17 bp, synthetic construct
  source 1..17: mol_type = other DNA
ggacgtcggggcacctg

SEQ ID NO: 150476 - DNA, 17 bp, synthetic construct
  source 1..17: mol_type = other DNA
aggacgtcggggcacct

SEQ ID NO: 150477 - DNA, 17 bp, synthetic construct
  source 1..17: mol_type = other DNA
gaggacgtcggggcacc

SEQ ID NO: 150478 - DNA, 17 bp, synthetic construct
  source 1..17: mol_type = other DNA
cgaggacgtcggggcac

SEQ ID NO: 150479 - DNA, 17 bp, synthetic construct
  source 1..17: mol_type = other DNA
gcgaggacgtcggggca

SEQ ID NO: 150480 - DNA, 17 bp, synthetic construct
  source 1..17: mol_type = other DNA
ggcgaggacgtcggggc

SEQ ID NO: 150481 - DNA, 17 bp, synthetic construct
  source 1..17: mol_type = other DNA
gggcgaggacgtcgggg

SEQ ID NO: 150482 - DNA, 17 bp, synthetic construct
  source 1..17: mol_type = other DNA
tgggcgaggacgtcggg

SEQ ID NO: 150483 - DNA, 17 bp, synthetic construct
  source 1..17: mol_type = other DNA
gtgggcgaggacgtcgg

SEQ ID NO: 150484 - DNA, 17 bp, synthetic construct
  source 1..17: mol_type = other DNA
ggtgggcgaggacgtcg

SEQ ID NO: 150485 - DNA, 17 bp, synthetic construct
  source 1..17: mol_type = other DNA
gggtgggcgaggacgtc

SEQ ID NO: 150486 - DNA, 17 bp, synthetic construct
  source 1..17: mol_type = other DNA
cgggtgggcgaggacgt

SEQ ID NO: 150487 - DNA, 17 bp, synthetic construct
  source 1..17: mol_type = other DNA
ccgggtgggcgaggacg

SEQ ID NO: 150488 - DNA, 17 bp, synthetic construct
  source 1..17: mol_type = other DNA
gccgggtgggcgaggac

SEQ ID NO: 150489 - DNA, 17 bp, synthetic construct
  source 1..17: mol_type = other DNA
cgccgggtgggcgagga

SEQ ID NO: 150490 - DNA, 17 bp, synthetic construct
  source 1..17: mol_type = other DNA
gcgccgggtgggcgagg

SEQ ID NO: 150491 - DNA, 17 bp, synthetic construct
  source 1..17: mol_type = other DNA
cgcgccgggtgggcgag

SEQ ID NO: 150492 - DNA, 17 bp, synthetic construct
  source 1..17: mol_type = other DNA
acgcgccgggtgggcga

SEQ ID NO: 150493 - DNA, 17 bp, synthetic construct
  source 1..17: mol_type = other DNA
cacgcgccgggtgggcg

SEQ ID NO: 150494 - DNA, 17 bp, synthetic construct
  source 1..17: mol_type = other DNA
tcacgcgccgggtgggc

SEQ ID NO: 150495 - DNA, 17 bp, synthetic construct
  source 1..17: mol_type = other DNA
ctcacgcgccgggtggg

SEQ ID NO: 150496 - DNA, 17 bp, synthetic construct
  source 1..17: mol_type = other DNA
gctcacgcgccgggtgg

SEQ ID NO: 150497 - DNA, 17 bp, synthetic construct
  source 1..17: mol_type = other DNA
agctcacgcgccgggtg

SEQ ID NO: 150498 - DNA, 17 bp, synthetic construct
  source 1..17: mol_type = other DNA
aagctcacgcgccgggt

SEQ ID NO: 150499 - DNA, 17 bp, synthetic construct
  source 1..17: mol_type = other DNA
aaagctcacgcgccggg

SEQ ID NO: 150500 - DNA, 17 bp, synthetic construct
  source 1..17: mol_type = other DNA
caaagctcacgcgccgg

SEQ ID NO: 150501 - DNA, 17 bp, synthetic construct
  source 1..17: mol_type = other DNA
acaaagctcacgcgccg

SEQ ID NO: 150502 - DNA, 17 bp, synthetic construct
  source 1..17: mol_type = other DNA
aacaaagctcacgcgcc

SEQ ID NO: 150503 - DNA, 17 bp, synthetic construct
  source 1..17: mol_type = other DNA
gaacaaagctcacgcgc

SEQ ID NO: 150504 - DNA, 17 bp, synthetic construct
  source 1..17: mol_type = other DNA
ggaacaaagctcacgcg

SEQ ID NO: 150505 - DNA, 17 bp, synthetic construct
  source 1..17: mol_type = other DNA
tggaacaaagctcacgc

SEQ ID NO: 150506 - DNA, 17 bp, synthetic construct
  source 1..17: mol_type = other DNA
gtggaacaaagctcacg

SEQ ID NO: 150507 - DNA, 17 bp, synthetic construct
  source 1..17: mol_type = other DNA
ggtggaacaaagctcac

SEQ ID NO: 150508 - DNA, 17 bp, synthetic construct
  source 1..17: mol_type = other DNA
gggtggaacaaagctca

SEQ ID NO: 150509 - DNA, 17 bp, synthetic construct
  source 1..17: mol_type = other DNA
cgggtggaacaaagctc

SEQ ID NO: 150510 - DNA, 17 bp, synthetic construct
  source 1..17: mol_type = other DNA
acgggtggaacaaagct

SEQ ID NO: 150511 - DNA, 17 bp, synthetic construct
  source 1..17: mol_type = other DNA
gacgggtggaacaaagc

SEQ ID NO: 150512 - DNA, 17 bp, synthetic construct
  source 1..17: mol_type = other DNA
tgacgggtggaacaaag

SEQ ID NO: 150513 - DNA, 17 bp, synthetic construct
  source 1..17: mol_type = other DNA
gtgacgggtggaacaaa

SEQ ID NO: 150514 - DNA, 17 bp, synthetic construct
  source 1..17: mol_type = other DNA
agtgacgggtggaacaa

SEQ ID NO: 150515 - DNA, 17 bp, synthetic construct
  source 1..17: mol_type = other DNA
cagtgacgggtggaaca

SEQ ID NO: 150516 - DNA, 17 bp, synthetic construct
  source 1..17: mol_type = other DNA
acagtgacgggtggaac

SEQ ID NO: 150517 - DNA, 17 bp, synthetic construct
  source 1..17: mol_type = other DNA
gacagtgacgggtggaa

SEQ ID NO: 150518 - DNA, 17 bp, synthetic construct
  source 1..17: mol_type = other DNA
agacagtgacgggtgga

SEQ ID NO: 150519 - DNA, 17 bp, synthetic construct
  source 1..17: mol_type = other DNA
aagacagtgacgggtgg

SEQ ID NO: 150520 - DNA, 17 bp, synthetic construct
  source 1..17: mol_type = other DNA
gaagacagtgacgggtg

SEQ ID NO: 150521 - DNA, 17 bp, synthetic construct
  source 1..17: mol_type = other DNA
ggaagacagtgacgggt

SEQ ID NO: 150522 - DNA, 17 bp, synthetic construct
  source 1..17: mol_type = other DNA
gggaagacagtgacggg

SEQ ID NO: 150523 - DNA, 17 bp, synthetic construct
  source 1..17: mol_type = other DNA
ggggaagacagtgacgg

SEQ ID NO: 150524 - DNA, 17 bp, synthetic construct
  source 1..17: mol_type = other DNA
tggggaagacagtgacg

SEQ ID NO: 150525 - DNA, 17 bp, synthetic construct
  source 1..17: mol_type = other DNA
ctggggaagacagtgac

SEQ ID NO: 150526 - DNA, 17 bp, synthetic construct
  source 1..17: mol_type = other DNA
gctggggaagacagtga

SEQ ID NO: 150527 - DNA, 17 bp, synthetic construct
  source 1..17: mol_type = other DNA
ggctggggaagacagtg

SEQ ID NO: 150528 - DNA, 17 bp, synthetic construct
  source 1..17: mol_type = other DNA
aggctggggaagacagt

SEQ ID NO: 150529 - DNA, 17 bp, synthetic construct
  source 1..17: mol_type = other DNA
caggctggggaagacag

SEQ ID NO: 150530 - DNA, 17 bp, synthetic construct
  source 1..17: mol_type = other DNA
tcaggctggggaagaca

SEQ ID NO: 150531 - DNA, 17 bp, synthetic construct
  source 1..17: mol_type = other DNA
ctcaggctggggaagac

SEQ ID NO: 150532 - DNA, 17 bp, synthetic construct
  source 1..17: mol_type = other DNA
gctcaggctggggaaga

SEQ ID NO: 150533 - DNA, 17 bp, synthetic construct
  source 1..17: mol_type = other DNA
ggctcaggctggggaag

SEQ ID NO: 150534 - DNA, 17 bp, synthetic construct
  source 1..17: mol_type = other DNA
cggctcaggctggggaa

SEQ ID NO: 150535 - DNA, 17 bp, synthetic construct
  source 1..17: mol_type = other DNA
acggctcaggctgggga

SEQ ID NO: 150536 - DNA, 17 bp, synthetic construct
  source 1..17: mol_type = other DNA
tacggctcaggctgggg

SEQ ID NO: 150537 - DNA, 17 bp, synthetic construct
  source 1..17: mol_type = other DNA
ttacggctcaggctggg

SEQ ID NO: 150538 - DNA, 17 bp, synthetic construct
  source 1..17: mol_type = other DNA
cttacggctcaggctgg

SEQ ID NO: 150539 - DNA, 17 bp, synthetic construct
  source 1..17: mol_type = other DNA
gcttacggctcaggctg

SEQ ID NO: 150540 - DNA, 17 bp, synthetic construct
  source 1..17: mol_type = other DNA
tgcttacggctcaggct

SEQ ID NO: 150541 - DNA, 17 bp, synthetic construct
  source 1..17: mol_type = other DNA
ctgcttacggctcaggc

SEQ ID NO: 150542 - DNA, 17 bp, synthetic construct
  source 1..17: mol_type = other DNA
tctgcttacggctcagg

SEQ ID NO: 150543 - DNA, 17 bp, synthetic construct
  source 1..17: mol_type = other DNA
atctgcttacggctcag

SEQ ID NO: 150544 - DNA, 17 bp, synthetic construct
  source 1..17: mol_type = other DNA
catctgcttacggctca

SEQ ID NO: 150545 - DNA, 17 bp, synthetic construct
  source 1..17: mol_type = other DNA
gcatctgcttacggctc

SEQ ID NO: 150546 - DNA, 17 bp, synthetic construct
  source 1..17: mol_type = other DNA
agcatctgcttacggct

SEQ ID NO: 150547 - DNA, 17 bp, synthetic construct
  source 1..17: mol_type = other DNA
cagcatctgcttacggc

SEQ ID NO: 150548 - DNA, 17 bp, synthetic construct
  source 1..17: mol_type = other DNA
gcagcatctgcttacgg

SEQ ID NO: 150549 - DNA, 17 bp, synthetic construct
  source 1..17: mol_type = other DNA
ggcagcatctgcttacg

SEQ ID NO: 150550 - DNA, 17 bp, synthetic construct
  source 1..17: mol_type = other DNA
gggcagcatctgcttac

SEQ ID NO: 150551 - DNA, 17 bp, synthetic construct
  source 1..17: mol_type = other DNA
ggggcagcatctgctta

SEQ ID NO: 150552 - DNA, 17 bp, synthetic construct
  source 1..17: mol_type = other DNA
aggggcagcatctgctt

SEQ ID NO: 150553 - DNA, 17 bp, synthetic construct
  source 1..17: mol_type = other DNA
caggggcagcatctgct

SEQ ID NO: 150554 - DNA, 17 bp, synthetic construct
  source 1..17: mol_type = other DNA
gcaggggcagcatctgc

SEQ ID NO: 150555 - DNA, 17 bp, synthetic construct
  source 1..17: mol_type = other DNA
ggcaggggcagcatctg

SEQ ID NO: 150556 - DNA, 17 bp, synthetic construct
  source 1..17: mol_type = other DNA
tggcaggggcagcatct

SEQ ID NO: 150557 - DNA, 17 bp, synthetic construct
  source 1..17: mol_type = other DNA
ctggcaggggcagcatc

SEQ ID NO: 150558 - DNA, 17 bp, synthetic construct
  source 1..17: mol_type = other DNA
gctggcaggggcagcat

SEQ ID NO: 150559 - DNA, 17 bp, synthetic construct
  source 1..17: mol_type = other DNA
ggctggcaggggcagca

SEQ ID NO: 150560 - DNA, 17 bp, synthetic construct
  source 1..17: mol_type = other DNA
cggctggcaggggcagc

SEQ ID NO: 150561 - DNA, 17 bp, synthetic construct
  source 1..17: mol_type = other DNA
ccggctggcaggggcag

SEQ ID NO: 150562 - DNA, 17 bp, synthetic construct
  source 1..17: mol_type = other DNA
cccggctggcaggggca

SEQ ID NO: 150563 - DNA, 17 bp, synthetic construct
  source 1..17: mol_type = other DNA
tcccggctggcaggggc

SEQ ID NO: 150564 - DNA, 17 bp, synthetic construct
  source 1..17: mol_type = other DNA
ttcccggctggcagggg

SEQ ID NO: 150565 - DNA, 17 bp, synthetic construct
  source 1..17: mol_type = other DNA
cttcccggctggcaggg

SEQ ID NO: 150566 - DNA, 17 bp, synthetic construct
  source 1..17: mol_type = other DNA
ccttcccggctggcagg

SEQ ID NO: 150567 - DNA, 17 bp, synthetic construct
  source 1..17: mol_type = other DNA
cccttcccggctggcag

SEQ ID NO: 150568 - DNA, 17 bp, synthetic construct
  source 1..17: mol_type = other DNA
ccccttcccggctggca

SEQ ID NO: 150569 - DNA, 17 bp, synthetic construct
  source 1..17: mol_type = other DNA
cccccttcccggctggc

SEQ ID NO: 150570 - DNA, 17 bp, synthetic construct
  source 1..17: mol_type = other DNA
acccccttcccggctgg

SEQ ID NO: 150571 - DNA, 17 bp, synthetic construct
  source 1..17: mol_type = other DNA
cacccccttcccggctg

SEQ ID NO: 150572 - DNA, 17 bp, synthetic construct
  source 1..17: mol_type = other DNA
acacccccttcccggct

SEQ ID NO: 150573 - DNA, 17 bp, synthetic construct
  source 1..17: mol_type = other DNA
aacacccccttcccggc

SEQ ID NO: 150574 - DNA, 17 bp, synthetic construct
  source 1..17: mol_type = other DNA
aaacacccccttcccgg

SEQ ID NO: 150575 - DNA, 17 bp, synthetic construct
  source 1..17: mol_type = other DNA
caaacacccccttcccg

SEQ ID NO: 150576 - DNA, 17 bp, synthetic construct
  source 1..17: mol_type = other DNA
gcaaacacccccttccc

SEQ ID NO: 150577 - DNA, 17 bp, synthetic construct
  source 1..17: mol_type = other DNA
ggcaaacacccccttcc

SEQ ID NO: 150578 - DNA, 17 bp, synthetic construct
  source 1..17: mol_type = other DNA
tggcaaacacccccttc

SEQ ID NO: 150579 - DNA, 17 bp, synthetic construct
  source 1..17: mol_type = other DNA
ctggcaaacaccccctt

SEQ ID NO: 150580 - DNA, 17 bp, synthetic construct
  source 1..17: mol_type = other DNA
actggcaaacaccccct

SEQ ID NO: 150581 - DNA, 17 bp, synthetic construct
  source 1..17: mol_type = other DNA
gactggcaaacaccccc

SEQ ID NO: 150582 - DNA, 17 bp, synthetic construct
  source 1..17: mol_type = other DNA
ggactggcaaacacccc

SEQ ID NO: 150583 - DNA, 17 bp, synthetic construct
  source 1..17: mol_type = other DNA
gggactggcaaacaccc

SEQ ID NO: 150584 - DNA, 17 bp, synthetic construct
  source 1..17: mol_type = other DNA
tgggactggcaaacacc

SEQ ID NO: 150585 - DNA, 17 bp, synthetic construct
  source 1..17: mol_type = other DNA
ttgggactggcaaacac

SEQ ID NO: 150586 - DNA, 17 bp, synthetic construct
  source 1..17: mol_type = other DNA
tttgggactggcaaaca

SEQ ID NO: 150587 - DNA, 17 bp, synthetic construct
  source 1..17: mol_type = other DNA
ctttgggactggcaaac

SEQ ID NO: 150588 - DNA, 17 bp, synthetic construct
  source 1..17: mol_type = other DNA
cctttgggactggcaaa

SEQ ID NO: 150589 - DNA, 17 bp, synthetic construct
  source 1..17: mol_type = other DNA
acctttgggactggcaa

SEQ ID NO: 150590 - DNA, 17 bp, synthetic construct
  source 1..17: mol_type = other DNA
cacctttgggactggca

SEQ ID NO: 150591 - DNA, 17 bp, synthetic construct
  source 1..17: mol_type = other DNA
ccacctttgggactggc

SEQ ID NO: 150592 - DNA, 17 bp, synthetic construct
  source 1..17: mol_type = other DNA
cccacctttgggactgg

SEQ ID NO: 150593 - DNA, 17 bp, synthetic construct
  source 1..17: mol_type = other DNA
ccccacctttgggactg

SEQ ID NO: 150594 - DNA, 17 bp, synthetic construct
  source 1..17: mol_type = other DNA
cccccacctttgggact

SEQ ID NO: 150595 - DNA, 17 bp, synthetic construct
  source 1..17: mol_type = other DNA
gcccccacctttgggac

SEQ ID NO: 150596 - DNA, 17 bp, synthetic construct
  source 1..17: mol_type = other DNA
ggcccccacctttggga

SEQ ID NO: 150597 - DNA, 17 bp, synthetic construct
  source 1..17: mol_type = other DNA
gggcccccacctttggg

SEQ ID NO: 150598 - DNA, 17 bp, synthetic construct
  source 1..17: mol_type = other DNA
tgggcccccacctttgg

SEQ ID NO: 150599 - DNA, 17 bp, synthetic construct
  source 1..17: mol_type = other DNA
ctgggcccccacctttg

SEQ ID NO: 150600 - DNA, 17 bp, synthetic construct
  source 1..17: mol_type = other DNA
tctgggcccccaccttt

SEQ ID NO: 150601 - DNA, 17 bp, synthetic construct
  source 1..17: mol_type = other DNA
atctgggcccccacctt

SEQ ID NO: 150602 - DNA, 17 bp, synthetic construct
  source 1..17: mol_type = other DNA
gatctgggcccccacct

SEQ ID NO: 150603 - DNA, 17 bp, synthetic construct
  source 1..17: mol_type = other DNA
agatctgggcccccacc

SEQ ID NO: 150604 - DNA, 17 bp, synthetic construct
  source 1..17: mol_type = other DNA
tagatctgggcccccac

SEQ ID NO: 150605 - DNA, 17 bp, synthetic construct
  source 1..17: mol_type = other DNA
ctagatctgggccccca

SEQ ID NO: 150606 - DNA, 17 bp, synthetic construct
  source 1..17: mol_type = other DNA
cctagatctgggccccc

SEQ ID NO: 150607 - DNA, 17 bp, synthetic construct
  source 1..17: mol_type = other DNA
ccctagatctgggcccc

SEQ ID NO: 150608 - DNA, 17 bp, synthetic construct
  source 1..17: mol_type = other DNA
cccctagatctgggccc

SEQ ID NO: 150609 - DNA, 17 bp, synthetic construct
  source 1..17: mol_type = other DNA
acccctagatctgggcc

SEQ ID NO: 150610 - DNA, 17 bp, synthetic construct
  source 1..17: mol_type = other DNA
cacccctagatctgggc

SEQ ID NO: 150611 - DNA, 17 bp, synthetic construct
  source 1..17: mol_type = other DNA
gcacccctagatctggg

SEQ ID NO: 150612 - DNA, 17 bp, synthetic construct
  source 1..17: mol_type = other DNA
tgcacccctagatctgg

SEQ ID NO: 150613 - DNA, 17 bp, synthetic construct
  source 1..17: mol_type = other DNA
ctgcacccctagatctg

SEQ ID NO: 150614 - DNA, 17 bp, synthetic construct
  source 1..17: mol_type = other DNA
gctgcacccctagatct

SEQ ID NO: 150615 - DNA, 17 bp, synthetic construct
  source 1..17: mol_type = other DNA
agctgcacccctagatc

SEQ ID NO: 150616 - DNA, 17 bp, synthetic construct
  source 1..17: mol_type = other DNA
cagctgcacccctagat

SEQ ID NO: 150617 - DNA, 17 bp, synthetic construct
  source 1..17: mol_type = other DNA
gcagctgcacccctaga

SEQ ID NO: 150618 - DNA, 17 bp, synthetic construct
  source 1..17: mol_type = other DNA
ggcagctgcacccctag

SEQ ID NO: 150619 - DNA, 17 bp, synthetic construct
  source 1..17: mol_type = other DNA
tggcagctgcaccccta

SEQ ID NO: 150620 - DNA, 17 bp, synthetic construct
  source 1..17: mol_type = other DNA
gtggcagctgcacccct

SEQ ID NO: 150621 - DNA, 17 bp, synthetic construct
  source 1..17: mol_type = other DNA
ggtggcagctgcacccc

SEQ ID NO: 150622 - DNA, 17 bp, synthetic construct
  source 1..17: mol_type = other DNA
tggtggcagctgcaccc

SEQ ID NO: 150623 - DNA, 17 bp, synthetic construct
  source 1..17: mol_type = other DNA
ctggtggcagctgcacc

SEQ ID NO: 150624 - DNA, 17 bp, synthetic construct
  source 1..17: mol_type = other DNA
cctggtggcagctgcac

SEQ ID NO: 150625 - DNA, 17 bp, synthetic construct
  source 1..17: mol_type = other DNA
acctggtggcagctgca

SEQ ID NO: 150626 - DNA, 17 bp, synthetic construct
  source 1..17: mol_type = other DNA
cacctggtggcagctgc

SEQ ID NO: 150627 - DNA, 17 bp, synthetic construct
  source 1..17: mol_type = other DNA
ccacctggtggcagctg

SEQ ID NO: 150628 - DNA, 17 bp, synthetic construct
  source 1..17: mol_type = other DNA
cccacctggtggcagct

SEQ ID NO: 150629 - DNA, 17 bp, synthetic construct
  source 1..17: mol_type = other DNA
ccccacctggtggcagc

SEQ ID NO: 150630 - DNA, 17 bp, synthetic construct
  source 1..17: mol_type = other DNA
gccccacctggtggcag

SEQ ID NO: 150631 - DNA, 17 bp, synthetic construct
  source 1..17: mol_type = other DNA
ggccccacctggtggca

SEQ ID NO: 150632 - DNA, 17 bp, synthetic construct
  source 1..17: mol_type = other DNA
cggccccacctggtggc

SEQ ID NO: 150633 - DNA, 17 bp, synthetic construct
  source 1..17: mol_type = other DNA
acggccccacctggtgg

SEQ ID NO: 150634 - DNA, 17 bp, synthetic construct
  source 1..17: mol_type = other DNA
aacggccccacctggtg

SEQ ID NO: 150635 - DNA, 17 bp, synthetic construct
  source 1..17: mol_type = other DNA
caacggccccacctggt

SEQ ID NO: 150636 - DNA, 17 bp, synthetic construct
  source 1..17: mol_type = other DNA
ccaacggccccacctgg

SEQ ID NO: 150637 - DNA, 17 bp, synthetic construct
  source 1..17: mol_type = other DNA
cccaacggccccacctg

SEQ ID NO: 150638 - DNA, 17 bp, synthetic construct
  source 1..17: mol_type = other DNA
gcccaacggccccacct

SEQ ID NO: 150639 - DNA, 17 bp, synthetic construct
  source 1..17: mol_type = other DNA
ggcccaacggccccacc

SEQ ID NO: 150640 - DNA, 17 bp, synthetic construct
  source 1..17: mol_type = other DNA
tggcccaacggccccac

SEQ ID NO: 150641 - DNA, 17 bp, synthetic construct
  source 1..17: mol_type = other DNA
ctggcccaacggcccca

SEQ ID NO: 150642 - DNA, 17 bp, synthetic construct
  source 1..17: mol_type = other DNA
tctggcccaacggcccc

SEQ ID NO: 150643 - DNA, 17 bp, synthetic construct
  source 1..17: mol_type = other DNA
gtctggcccaacggccc

SEQ ID NO: 150644 - DNA, 17 bp, synthetic construct
  source 1..17: mol_type = other DNA
ggtctggcccaacggcc

SEQ ID NO: 150645 - DNA, 17 bp, synthetic construct
  source 1..17: mol_type = other DNA
gggtctggcccaacggc

SEQ ID NO: 150646 - DNA, 17 bp, synthetic construct
  source 1..17: mol_type = other DNA
tgggtctggcccaacgg

SEQ ID NO: 150647 - DNA, 17 bp, synthetic construct
  source 1..17: mol_type = other DNA
ctgggtctggcccaacg

SEQ ID NO: 150648 - DNA, 17 bp, synthetic construct
  source 1..17: mol_type = other DNA
tctgggtctggcccaac

SEQ ID NO: 150649 - DNA, 17 bp, synthetic construct
  source 1..17: mol_type = other DNA
ctctgggtctggcccaa

SEQ ID NO: 150650 - DNA, 17 bp, synthetic construct
  source 1..17: mol_type = other DNA
actctgggtctggccca

SEQ ID NO: 150651 - DNA, 17 bp, synthetic construct
  source 1..17: mol_type = other DNA
gactctgggtctggccc

SEQ ID NO: 150652 - DNA, 17 bp, synthetic construct
  source 1..17: mol_type = other DNA
ggactctgggtctggcc

SEQ ID NO: 150653 - DNA, 17 bp, synthetic construct
  source 1..17: mol_type = other DNA
aggactctgggtctggc

SEQ ID NO: 150654 - DNA, 17 bp, synthetic construct
  source 1..17: mol_type = other DNA
gaggactctgggtctgg

SEQ ID NO: 150655 - DNA, 17 bp, synthetic construct
  source 1..17: mol_type = other DNA
ggaggactctgggtctg

SEQ ID NO: 150656 - DNA, 17 bp, synthetic construct
  source 1..17: mol_type = other DNA
cggaggactctgggtct

SEQ ID NO: 150657 - DNA, 17 bp, synthetic construct
  source 1..17: mol_type = other DNA
acggaggactctgggtc

SEQ ID NO: 150658 - DNA, 17 bp, synthetic construct
  source 1..17: mol_type = other DNA
cacggaggactctgggt

SEQ ID NO: 150659 - DNA, 17 bp, synthetic construct
  source 1..17: mol_type = other DNA
acacggaggactctggg

SEQ ID NO: 150660 - DNA, 17 bp, synthetic construct
  source 1..17: mol_type = other DNA
cacacggaggactctgg

SEQ ID NO: 150661 - DNA, 17 bp, synthetic construct
  source 1..17: mol_type = other DNA
ccacacggaggactctg

SEQ ID NO: 150662 - DNA, 17 bp, synthetic construct
  source 1..17: mol_type = other DNA
cccacacggaggactct

SEQ ID NO: 150663 - DNA, 17 bp, synthetic construct
  source 1..17: mol_type = other DNA
gcccacacggaggactc

SEQ ID NO: 150664 - DNA, 17 bp, synthetic construct
  source 1..17: mol_type = other DNA
cgcccacacggaggact

SEQ ID NO: 150665 - DNA, 17 bp, synthetic construct
  source 1..17: mol_type = other DNA
ccgcccacacggaggac

SEQ ID NO: 150666 - DNA, 17 bp, synthetic construct
  source 1..17: mol_type = other DNA
accgcccacacggagga

SEQ ID NO: 150667 - DNA, 17 bp, synthetic construct
  source 1..17: mol_type = other DNA
gaccgcccacacggagg

SEQ ID NO: 150668 - DNA, 17 bp, synthetic construct
  source 1..17: mol_type = other DNA
agaccgcccacacggag

SEQ ID NO: 150669 - DNA, 17 bp, synthetic construct
  source 1..17: mol_type = other DNA
gagaccgcccacacgga

SEQ ID NO: 150670 - DNA, 17 bp, synthetic construct
  source 1..17: mol_type = other DNA
ggagaccgcccacacgg

SEQ ID NO: 150671 - DNA, 17 bp, synthetic construct
  source 1..17: mol_type = other DNA
aggagaccgcccacacg

SEQ ID NO: 150672 - DNA, 17 bp, synthetic construct
  source 1..17: mol_type = other DNA
caggagaccgcccacac

SEQ ID NO: 150673 - DNA, 17 bp, synthetic construct
  source 1..17: mol_type = other DNA
ccaggagaccgcccaca

SEQ ID NO: 150674 - DNA, 17 bp, synthetic construct
  source 1..17: mol_type = other DNA
accaggagaccgcccac

SEQ ID NO: 150675 - DNA, 17 bp, synthetic construct
  source 1..17: mol_type = other DNA
gaccaggagaccgccca

SEQ ID NO: 150676 - DNA, 17 bp, synthetic construct
  source 1..17: mol_type = other DNA
tgaccaggagaccgccc

SEQ ID NO: 150677 - DNA, 17 bp, synthetic construct
  source 1..17: mol_type = other DNA
gtgaccaggagaccgcc

SEQ ID NO: 150678 - DNA, 17 bp, synthetic construct
  source 1..17: mol_type = other DNA
agtgaccaggagaccgc

SEQ ID NO: 150679 - DNA, 17 bp, synthetic construct
  source 1..17: mol_type = other DNA
cagtgaccaggagaccg

SEQ ID NO: 150680 - DNA, 17 bp, synthetic construct
  source 1..17: mol_type = other DNA
ccagtgaccaggagacc

SEQ ID NO: 150681 - DNA, 17 bp, synthetic construct
  source 1..17: mol_type = other DNA
gccagtgaccaggagac

SEQ ID NO: 150682 - DNA, 17 bp, synthetic construct
  source 1..17: mol_type = other DNA
ggccagtgaccaggaga

SEQ ID NO: 150683 - DNA, 17 bp, synthetic construct
  source 1..17: mol_type = other DNA
tggccagtgaccaggag

SEQ ID NO: 150684 - DNA, 17 bp, synthetic construct
  source 1..17: mol_type = other DNA
gtggccagtgaccagga

SEQ ID NO: 150685 - DNA, 17 bp, synthetic construct
  source 1..17: mol_type = other DNA
ggtggccagtgaccagg

SEQ ID NO: 150686 - DNA, 17 bp, synthetic construct
  source 1..17: mol_type = other DNA
gggtggccagtgaccag

SEQ ID NO: 150687 - DNA, 17 bp, synthetic construct
  source 1..17: mol_type = other DNA
agggtggccagtgacca

SEQ ID NO: 150688 - DNA, 17 bp, synthetic construct
  source 1..17: mol_type = other DNA
cagggtggccagtgacc

SEQ ID NO: 150689 - DNA, 17 bp, synthetic construct
  source 1..17: mol_type = other DNA
ccagggtggccagtgac

SEQ ID NO: 150690 - DNA, 17 bp, synthetic construct
  source 1..17: mol_type = other DNA
cccagggtggccagtga

SEQ ID NO: 150691 - DNA, 17 bp, synthetic construct
  source 1..17: mol_type = other DNA
ccccagggtggccagtg

SEQ ID NO: 150692 - DNA, 17 bp, synthetic construct
  source 1..17: mol_type = other DNA
cccccagggtggccagt

SEQ ID NO: 150693 - DNA, 17 bp, synthetic construct
  source 1..17: mol_type = other DNA
tcccccagggtggccag

SEQ ID NO: 150694 - DNA, 17 bp, synthetic construct
  source 1..17: mol_type = other DNA
atcccccagggtggcca

SEQ ID NO: 150695 - DNA, 17 bp, synthetic construct
  source 1..17: mol_type = other DNA
catcccccagggtggcc

SEQ ID NO: 150696 - DNA, 17 bp, synthetic construct
  source 1..17: mol_type = other DNA
ccatcccccagggtggc

SEQ ID NO: 150697 - DNA, 17 bp, synthetic construct
  source 1..17: mol_type = other DNA
cccatcccccagggtgg

SEQ ID NO: 150698 - DNA, 17 bp, synthetic construct
  source 1..17: mol_type = other DNA
ccccatcccccagggtg

SEQ ID NO: 150699 - DNA, 17 bp, synthetic construct
  source 1..17: mol_type = other DNA
tccccatcccccagggt

SEQ ID NO: 150700 - DNA, 17 bp, synthetic construct
  source 1..17: mol_type = other DNA
gtccccatcccccaggg

SEQ ID NO: 150701 - DNA, 17 bp, synthetic construct
  source 1..17: mol_type = other DNA
cgtccccatcccccagg

SEQ ID NO: 150702 - DNA, 17 bp, synthetic construct
  source 1..17: mol_type = other DNA
ccgtccccatcccccag

SEQ ID NO: 150703 - DNA, 17 bp, synthetic construct
  source 1..17: mol_type = other DNA
cccgtccccatccccca

SEQ ID NO: 150704 - DNA, 17 bp, synthetic construct
  source 1..17: mol_type = other DNA
acccgtccccatccccc

SEQ ID NO: 150705 - DNA, 17 bp, synthetic construct
  source 1..17: mol_type = other DNA
gacccgtccccatcccc

SEQ ID NO: 150706 - DNA, 17 bp, synthetic construct
  source 1..17: mol_type = other DNA
tgacccgtccccatccc

SEQ ID NO: 150707 - DNA, 17 bp, synthetic construct
  source 1..17: mol_type = other DNA
ctgacccgtccccatcc

SEQ ID NO: 150708 - DNA, 17 bp, synthetic construct
  source 1..17: mol_type = other DNA
cctgacccgtccccatc

SEQ ID NO: 150709 - DNA, 17 bp, synthetic construct
  source 1..17: mol_type = other DNA
ccctgacccgtccccat

SEQ ID NO: 150710 - DNA, 17 bp, synthetic construct
  source 1..17: mol_type = other DNA
cccctgacccgtcccca

SEQ ID NO: 150711 - DNA, 17 bp, synthetic construct
  source 1..17: mol_type = other DNA
acccctgacccgtcccc

SEQ ID NO: 150712 - DNA, 17 bp, synthetic construct
  source 1..17: mol_type = other DNA
gacccctgacccgtccc

SEQ ID NO: 150713 - DNA, 17 bp, synthetic construct
  source 1..17: mol_type = other DNA
agacccctgacccgtcc

SEQ ID NO: 150714 - DNA, 17 bp, synthetic construct
  source 1..17: mol_type = other DNA
aagacccctgacccgtc

SEQ ID NO: 150715 - DNA, 17 bp, synthetic construct
  source 1..17: mol_type = other DNA
caagacccctgacccgt

SEQ ID NO: 150716 - DNA, 17 bp, synthetic construct
  source 1..17: mol_type = other DNA
ccaagacccctgacccg

SEQ ID NO: 150717 - DNA, 17 bp, synthetic construct
  source 1..17: mol_type = other DNA
tccaagacccctgaccc

SEQ ID NO: 150718 - DNA, 17 bp, synthetic construct
  source 1..17: mol_type = other DNA
ctccaagacccctgacc

SEQ ID NO: 150719 - DNA, 17 bp, synthetic construct
  source 1..17: mol_type = other DNA
gctccaagacccctgac

SEQ ID NO: 150720 - DNA, 17 bp, synthetic construct
  source 1..17: mol_type = other DNA
tgctccaagacccctga

SEQ ID NO: 150721 - DNA, 17 bp, synthetic construct
  source 1..17: mol_type = other DNA
ttgctccaagacccctg

SEQ ID NO: 150722 - DNA, 17 bp, synthetic construct
  source 1..17: mol_type = other DNA
tttgctccaagacccct

SEQ ID NO: 150723 - DNA, 17 bp, synthetic construct
  source 1..17: mol_type = other DNA
ttttgctccaagacccc

SEQ ID NO: 150724 - DNA, 17 bp, synthetic construct
  source 1..17: mol_type = other DNA
gttttgctccaagaccc

SEQ ID NO: 150725 - DNA, 17 bp, synthetic construct
  source 1..17: mol_type = other DNA
tgttttgctccaagacc

SEQ ID NO: 150726 - DNA, 17 bp, synthetic construct
  source 1..17: mol_type = other DNA
ctgttttgctccaagac

SEQ ID NO: 150727 - DNA, 17 bp, synthetic construct
  source 1..17: mol_type = other DNA
tctgttttgctccaaga

SEQ ID NO: 150728 - DNA, 17 bp, synthetic construct
  source 1..17: mol_type = other DNA
gtctgttttgctccaag

SEQ ID NO: 150729 - DNA, 17 bp, synthetic construct
  source 1..17: mol_type = other DNA
cgtctgttttgctccaa

SEQ ID NO: 150730 - DNA, 17 bp, synthetic construct
  source 1..17: mol_type = other DNA
gcgtctgttttgctcca

SEQ ID NO: 150731 - DNA, 17 bp, synthetic construct
  source 1..17: mol_type = other DNA
tgcgtctgttttgctcc

SEQ ID NO: 150732 - DNA, 17 bp, synthetic construct
  source 1..17: mol_type = other DNA
ctgcgtctgttttgctc

SEQ ID NO: 150733 - DNA, 17 bp, synthetic construct
  source 1..17: mol_type = other DNA
actgcgtctgttttgct

SEQ ID NO: 150734 - DNA, 17 bp, synthetic construct
  source 1..17: mol_type = other DNA
gactgcgtctgttttgc

SEQ ID NO: 150735 - DNA, 17 bp, synthetic construct
  source 1..17: mol_type = other DNA
ggactgcgtctgttttg

SEQ ID NO: 150736 - DNA, 17 bp, synthetic construct
  source 1..17: mol_type = other DNA
tggactgcgtctgtttt

SEQ ID NO: 150737 - DNA, 17 bp, synthetic construct
  source 1..17: mol_type = other DNA
ctggactgcgtctgttt

SEQ ID NO: 150738 - DNA, 17 bp, synthetic construct
  source 1..17: mol_type = other DNA
cctggactgcgtctgtt

SEQ ID NO: 150739 - DNA, 17 bp, synthetic construct
  source 1..17: mol_type = other DNA
ccctggactgcgtctgt

SEQ ID NO: 150740 - DNA, 17 bp, synthetic construct
  source 1..17: mol_type = other DNA
accctggactgcgtctg

SEQ ID NO: 150741 - DNA, 17 bp, synthetic construct
  source 1..17: mol_type = other DNA
caccctggactgcgtct

SEQ ID NO: 150742 - DNA, 17 bp, synthetic construct
  source 1..17: mol_type = other DNA
tcaccctggactgcgtc

SEQ ID NO: 150743 - DNA, 17 bp, synthetic construct
  source 1..17: mol_type = other DNA
ctcaccctggactgcgt

SEQ ID NO: 150744 - DNA, 17 bp, synthetic construct
  source 1..17: mol_type = other DNA
gctcaccctggactgcg

SEQ ID NO: 150745 - DNA, 17 bp, synthetic construct
  source 1..17: mol_type = other DNA
ggctcaccctggactgc

SEQ ID NO: 150746 - DNA, 17 bp, synthetic construct
  source 1..17: mol_type = other DNA
tggctcaccctggactg

SEQ ID NO: 150747 - DNA, 17 bp, synthetic construct
  source 1..17: mol_type = other DNA
ctggctcaccctggact

SEQ ID NO: 150748 - DNA, 17 bp, synthetic construct
  source 1..17: mol_type = other DNA
cctggctcaccctggac

SEQ ID NO: 150749 - DNA, 17 bp, synthetic construct
  source 1..17: mol_type = other DNA
gcctggctcaccctgga

SEQ ID NO: 150750 - DNA, 17 bp, synthetic construct
  source 1..17: mol_type = other DNA
tgcctggctcaccctgg

SEQ ID NO: 150751 - DNA, 17 bp, synthetic construct
  source 1..17: mol_type = other DNA
ctgcctggctcaccctg

SEQ ID NO: 150752 - DNA, 17 bp, synthetic construct
  source 1..17: mol_type = other DNA
cctgcctggctcaccct

SEQ ID NO: 150753 - DNA, 17 bp, synthetic construct
  source 1..17: mol_type = other DNA
ccctgcctggctcaccc

SEQ ID NO: 150754 - DNA, 17 bp, synthetic construct
  source 1..17: mol_type = other DNA
gccctgcctggctcacc

SEQ ID NO: 150755 - DNA, 17 bp, synthetic construct
  source 1..17: mol_type = other DNA
tgccctgcctggctcac

SEQ ID NO: 150756 - DNA, 17 bp, synthetic construct
  source 1..17: mol_type = other DNA
gtgccctgcctggctca

SEQ ID NO: 150757 - DNA, 17 bp, synthetic construct
  source 1..17: mol_type = other DNA
tgtgccctgcctggctc

SEQ ID NO: 150758 - DNA, 17 bp, synthetic construct
  source 1..17: mol_type = other DNA
ctgtgccctgcctggct

SEQ ID NO: 150759 - DNA, 17 bp, synthetic construct
  source 1..17: mol_type = other DNA
gctgtgccctgcctggc

SEQ ID NO: 150760 - DNA, 17 bp, synthetic construct
  source 1..17: mol_type = other DNA
ggctgtgccctgcctgg

SEQ ID NO: 150761 - DNA, 17 bp, synthetic construct
  source 1..17: mol_type = other DNA
tggctgtgccctgcctg

SEQ ID NO: 150762 - DNA, 17 bp, synthetic construct
  source 1..17: mol_type = other DNA
ctggctgtgccctgcct

SEQ ID NO: 150763 - DNA, 17 bp, synthetic construct
  source 1..17: mol_type = other DNA
gctggctgtgccctgcc

SEQ ID NO: 150764 - DNA, 17 bp, synthetic construct
  source 1..17: mol_type = other DNA
tgctggctgtgccctgc

SEQ ID NO: 150765 - DNA, 17 bp, synthetic construct
  source 1..17: mol_type = other DNA
ctgctggctgtgccctg

SEQ ID NO: 150766 - DNA, 17 bp, synthetic construct
  source 1..17: mol_type = other DNA
gctgctggctgtgccct

SEQ ID NO: 150767 - DNA, 17 bp, synthetic construct
  source 1..17: mol_type = other DNA
ggctgctggctgtgccc

SEQ ID NO: 150768 - DNA, 17 bp, synthetic construct
  source 1..17: mol_type = other DNA
cggctgctggctgtgcc

SEQ ID NO: 150769 - DNA, 17 bp, synthetic construct
  source 1..17: mol_type = other DNA
tcggctgctggctgtgc

SEQ ID NO: 150770 - DNA, 17 bp, synthetic construct
  source 1..17: mol_type = other DNA
gtcggctgctggctgtg

SEQ ID NO: 150771 - DNA, 17 bp, synthetic construct
  source 1..17: mol_type = other DNA
ggtcggctgctggctgt

SEQ ID NO: 150772 - DNA, 17 bp, synthetic construct
  source 1..17: mol_type = other DNA
tggtcggctgctggctg

SEQ ID NO: 150773 - DNA, 17 bp, synthetic construct
  source 1..17: mol_type = other DNA
atggtcggctgctggct

SEQ ID NO: 150774 - DNA, 17 bp, synthetic construct
  source 1..17: mol_type = other DNA
catggtcggctgctggc

SEQ ID NO: 150775 - DNA, 17 bp, synthetic construct
  source 1..17: mol_type = other DNA
ccatggtcggctgctgg

SEQ ID NO: 150776 - DNA, 17 bp, synthetic construct
  source 1..17: mol_type = other DNA
cccatggtcggctgctg

SEQ ID NO: 150777 - DNA, 17 bp, synthetic construct
  source 1..17: mol_type = other DNA
gcccatggtcggctgct

SEQ ID NO: 150778 - DNA, 17 bp, synthetic construct
  source 1..17: mol_type = other DNA
agcccatggtcggctgc

SEQ ID NO: 150779 - DNA, 17 bp, synthetic construct
  source 1..17: mol_type = other DNA
aagcccatggtcggctg

SEQ ID NO: 150780 - DNA, 17 bp, synthetic construct
  source 1..17: mol_type = other DNA
aaagcccatggtcggct

SEQ ID NO: 150781 - DNA, 17 bp, synthetic construct
  source 1..17: mol_type = other DNA
aaaagcccatggtcggc

SEQ ID NO: 150782 - DNA, 17 bp, synthetic construct
  source 1..17: mol_type = other DNA
gaaaagcccatggtcgg

SEQ ID NO: 150783 - DNA, 17 bp, synthetic construct
  source 1..17: mol_type = other DNA
ggaaaagcccatggtcg

SEQ ID NO: 150784 - DNA, 17 bp, synthetic construct
  source 1..17: mol_type = other DNA
tggaaaagcccatggtc

SEQ ID NO: 150785 - DNA, 17 bp, synthetic construct
  source 1..17: mol_type = other DNA
atggaaaagcccatggt

SEQ ID NO: 150786 - DNA, 17 bp, synthetic construct
  source 1..17: mol_type = other DNA
aatggaaaagcccatgg

SEQ ID NO: 150787 - DNA, 17 bp, synthetic construct
  source 1..17: mol_type = other DNA
gaatggaaaagcccatg

SEQ ID NO: 150788 - DNA, 17 bp, synthetic construct
  source 1..17: mol_type = other DNA
ggaatggaaaagcccat

SEQ ID NO: 150789 - DNA, 17 bp, synthetic construct
  source 1..17: mol_type = other DNA
tggaatggaaaagccca

SEQ ID NO: 150790 - DNA, 17 bp, synthetic construct
  source 1..17: mol_type = other DNA
ttggaatggaaaagccc

SEQ ID NO: 150791 - DNA, 17 bp, synthetic construct
  source 1..17: mol_type = other DNA
tttggaatggaaaagcc

SEQ ID NO: 150792 - DNA, 17 bp, synthetic construct
  source 1..17: mol_type = other DNA
ttttggaatggaaaagc

SEQ ID NO: 150793 - DNA, 17 bp, synthetic construct
  source 1..17: mol_type = other DNA
tttttggaatggaaaag

SEQ ID NO: 150794 - DNA, 17 bp, synthetic construct
  source 1..17: mol_type = other DNA
gtttttggaatggaaaa

SEQ ID NO: 150795 - DNA, 17 bp, synthetic construct
  source 1..17: mol_type = other DNA
ggtttttggaatggaaa

SEQ ID NO: 150796 - DNA, 17 bp, synthetic construct
  source 1..17: mol_type = other DNA
tggtttttggaatggaa

SEQ ID NO: 150797 - DNA, 17 bp, synthetic construct
  source 1..17: mol_type = other DNA
ctggtttttggaatgga

SEQ ID NO: 150798 - DNA, 17 bp, synthetic construct
  source 1..17: mol_type = other DNA
cctggtttttggaatgg

SEQ ID NO: 150799 - DNA, 17 bp, synthetic construct
  source 1..17: mol_type = other DNA
ccctggtttttggaatg

SEQ ID NO: 150800 - DNA, 17 bp, synthetic construct
  source 1..17: mol_type = other DNA
accctggtttttggaat

SEQ ID NO: 150801 - DNA, 17 bp, synthetic construct
  source 1..17: mol_type = other DNA
caccctggtttttggaa

SEQ ID NO: 150802 - DNA, 17 bp, synthetic construct
  source 1..17: mol_type = other DNA
gcaccctggtttttgga

SEQ ID NO: 150803 - DNA, 17 bp, synthetic construct
  source 1..17: mol_type = other DNA
ggcaccctggtttttgg

SEQ ID NO: 150804 - DNA, 17 bp, synthetic construct
  source 1..17: mol_type = other DNA
aggcaccctggtttttg

SEQ ID NO: 150805 - DNA, 17 bp, synthetic construct
  source 1..17: mol_type = other DNA
gaggcaccctggttttt

SEQ ID NO: 150806 - DNA, 17 bp, synthetic construct
  source 1..17: mol_type = other DNA
cgaggcaccctggtttt

SEQ ID NO: 150807 - DNA, 17 bp, synthetic construct
  source 1..17: mol_type = other DNA
ccgaggcaccctggttt

SEQ ID NO: 150808 - DNA, 17 bp, synthetic construct
  source 1..17: mol_type = other DNA
gccgaggcaccctggtt

SEQ ID NO: 150809 - DNA, 17 bp, synthetic construct
  source 1..17: mol_type = other DNA
ggccgaggcaccctggt

SEQ ID NO: 150810 - DNA, 17 bp, synthetic construct
  source 1..17: mol_type = other DNA
gggccgaggcaccctgg

SEQ ID NO: 150811 - DNA, 17 bp, synthetic construct
  source 1..17: mol_type = other DNA
tgggccgaggcaccctg

SEQ ID NO: 150812 - DNA, 17 bp, synthetic construct
  source 1..17: mol_type = other DNA
ctgggccgaggcaccct

SEQ ID NO: 150813 - DNA, 17 bp, synthetic construct
  source 1..17: mol_type = other DNA
cctgggccgaggcaccc

SEQ ID NO: 150814 - DNA, 17 bp, synthetic construct
  source 1..17: mol_type = other DNA
ccctgggccgaggcacc

SEQ ID NO: 150815 - DNA, 17 bp, synthetic construct
  source 1..17: mol_type = other DNA
cccctgggccgaggcac

SEQ ID NO: 150816 - DNA, 17 bp, synthetic construct
  source 1..17: mol_type = other DNA
tcccctgggccgaggca

SEQ ID NO: 150817 - DNA, 17 bp, synthetic construct
  source 1..17: mol_type = other DNA
ctcccctgggccgaggc

SEQ ID NO: 150818 - DNA, 17 bp, synthetic construct
  source 1..17: mol_type = other DNA
cctcccctgggccgagg

SEQ ID NO: 150819 - DNA, 17 bp, synthetic construct
  source 1..17: mol_type = other DNA
gcctcccctgggccgag

SEQ ID NO: 150820 - DNA, 17 bp, synthetic construct
  source 1..17: mol_type = other DNA
agcctcccctgggccga

SEQ ID NO: 150821 - DNA, 17 bp, synthetic construct
  source 1..17: mol_type = other DNA
tagcctcccctgggccg

SEQ ID NO: 150822 - DNA, 17 bp, synthetic construct
  source 1..17: mol_type = other DNA
gtagcctcccctgggcc

SEQ ID NO: 150823 - DNA, 17 bp, synthetic construct
  source 1..17: mol_type = other DNA
ggtagcctcccctgggc

SEQ ID NO: 150824 - DNA, 17 bp, synthetic construct
  source 1..17: mol_type = other DNA
gggtagcctcccctggg

SEQ ID NO: 150825 - DNA, 17 bp, synthetic construct
  source 1..17: mol_type = other DNA
ggggtagcctcccctgg

SEQ ID NO: 150826 - DNA, 17 bp, synthetic construct
  source 1..17: mol_type = other DNA
cggggtagcctcccctg

SEQ ID NO: 150827 - DNA, 17 bp, synthetic construct
  source 1..17: mol_type = other DNA
acggggtagcctcccct

SEQ ID NO: 150828 - DNA, 17 bp, synthetic construct
  source 1..17: mol_type = other DNA
cacggggtagcctcccc

SEQ ID NO: 150829 - DNA, 17 bp, synthetic construct
  source 1..17: mol_type = other DNA
ccacggggtagcctccc

SEQ ID NO: 150830 - DNA, 17 bp, synthetic construct
  source 1..17: mol_type = other DNA
cccacggggtagcctcc

SEQ ID NO: 150831 - DNA, 17 bp, synthetic construct
  source 1..17: mol_type = other DNA
ccccacggggtagcctc

SEQ ID NO: 150832 - DNA, 17 bp, synthetic construct
  source 1..17: mol_type = other DNA
cccccacggggtagcct

SEQ ID NO: 150833 - DNA, 17 bp, synthetic construct
  source 1..17: mol_type = other DNA
ccccccacggggtagcc

SEQ ID NO: 150834 - DNA, 17 bp, synthetic construct
  source 1..17: mol_type = other DNA
gccccccacggggtagc

SEQ ID NO: 150835 - DNA, 17 bp, synthetic construct
  source 1..17: mol_type = other DNA
agccccccacggggtag

SEQ ID NO: 150836 - DNA, 17 bp, synthetic construct
  source 1..17: mol_type = other DNA
cagccccccacggggta

SEQ ID NO: 150837 - DNA, 17 bp, synthetic construct
  source 1..17: mol_type = other DNA
ccagccccccacggggt

SEQ ID NO: 150838 - DNA, 17 bp, synthetic construct
  source 1..17: mol_type = other DNA
gccagccccccacgggg

SEQ ID NO: 150839 - DNA, 17 bp, synthetic construct
  source 1..17: mol_type = other DNA
tgccagccccccacggg

SEQ ID NO: 150840 - DNA, 17 bp, synthetic construct
  source 1..17: mol_type = other DNA
atgccagccccccacgg

SEQ ID NO: 150841 - DNA, 17 bp, synthetic construct
  source 1..17: mol_type = other DNA
catgccagccccccacg

SEQ ID NO: 150842 - DNA, 17 bp, synthetic construct
  source 1..17: mol_type = other DNA
ccatgccagccccccac

SEQ ID NO: 150843 - DNA, 17 bp, synthetic construct
  source 1..17: mol_type = other DNA
cccatgccagcccccca

SEQ ID NO: 150844 - DNA, 17 bp, synthetic construct
  source 1..17: mol_type = other DNA
ccccatgccagcccccc

SEQ ID NO: 150845 - DNA, 17 bp, synthetic construct
  source 1..17: mol_type = other DNA
tccccatgccagccccc

SEQ ID NO: 150846 - DNA, 17 bp, synthetic construct
  source 1..17: mol_type = other DNA
atccccatgccagcccc

SEQ ID NO: 150847 - DNA, 17 bp, synthetic construct
  source 1..17: mol_type = other DNA
catccccatgccagccc

SEQ ID NO: 150848 - DNA, 17 bp, synthetic construct
  source 1..17: mol_type = other DNA
ccatccccatgccagcc

SEQ ID NO: 150849 - DNA, 17 bp, synthetic construct
  source 1..17: mol_type = other DNA
cccatccccatgccagc

SEQ ID NO: 150850 - DNA, 17 bp, synthetic construct
  source 1..17: mol_type = other DNA
gcccatccccatgccag

SEQ ID NO: 150851 - DNA, 17 bp, synthetic construct
  source 1..17: mol_type = other DNA
ggcccatccccatgcca

SEQ ID NO: 150852 - DNA, 17 bp, synthetic construct
  source 1..17: mol_type = other DNA
aggcccatccccatgcc

SEQ ID NO: 150853 - DNA, 17 bp, synthetic construct
  source 1..17: mol_type = other DNA
gaggcccatccccatgc

SEQ ID NO: 150854 - DNA, 17 bp, synthetic construct
  source 1..17: mol_type = other DNA
tgaggcccatccccatg

SEQ ID NO: 150855 - DNA, 17 bp, synthetic construct
  source 1..17: mol_type = other DNA
atgaggcccatccccat

SEQ ID NO: 150856 - DNA, 17 bp, synthetic construct
  source 1..17: mol_type = other DNA
gatgaggcccatcccca

SEQ ID NO: 150857 - DNA, 17 bp, synthetic construct
  source 1..17: mol_type = other DNA
ggatgaggcccatcccc

SEQ ID NO: 150858 - DNA, 17 bp, synthetic construct
  source 1..17: mol_type = other DNA
gggatgaggcccatccc

SEQ ID NO: 150859 - DNA, 17 bp, synthetic construct
  source 1..17: mol_type = other DNA
cgggatgaggcccatcc

SEQ ID NO: 150860 - DNA, 17 bp, synthetic construct
  source 1..17: mol_type = other DNA
gcgggatgaggcccatc

SEQ ID NO: 150861 - DNA, 17 bp, synthetic construct
  source 1..17: mol_type = other DNA
cgcgggatgaggcccat

SEQ ID NO: 150862 - DNA, 17 bp, synthetic construct
  source 1..17: mol_type = other DNA
gcgcgggatgaggccca

SEQ ID NO: 150863 - DNA, 17 bp, synthetic construct
  source 1..17: mol_type = other DNA
agcgcgggatgaggccc

SEQ ID NO: 150864 - DNA, 17 bp, synthetic construct
  source 1..17: mol_type = other DNA
gagcgcgggatgaggcc

SEQ ID NO: 150865 - DNA, 17 bp, synthetic construct
  source 1..17: mol_type = other DNA
ggagcgcgggatgaggc

SEQ ID NO: 150866 - DNA, 17 bp, synthetic construct
  source 1..17: mol_type = other DNA
gggagcgcgggatgagg

SEQ ID NO: 150867 - DNA, 17 bp, synthetic construct
  source 1..17: mol_type = other DNA
ggggagcgcgggatgag

SEQ ID NO: 150868 - DNA, 17 bp, synthetic construct
  source 1..17: mol_type = other DNA
tggggagcgcgggatga

SEQ ID NO: 150869 - DNA, 17 bp, synthetic construct
  source 1..17: mol_type = other DNA
gtggggagcgcgggatg

SEQ ID NO: 150870 - DNA, 17 bp, synthetic construct
  source 1..17: mol_type = other DNA
tgtggggagcgcgggat

SEQ ID NO: 150871 - DNA, 17 bp, synthetic construct
  source 1..17: mol_type = other DNA
ctgtggggagcgcggga

SEQ ID NO: 150872 - DNA, 17 bp, synthetic construct
  source 1..17: mol_type = other DNA
gctgtggggagcgcggg

SEQ ID NO: 150873 - DNA, 17 bp, synthetic construct
  source 1..17: mol_type = other DNA
ggctgtggggagcgcgg

SEQ ID NO: 150874 - DNA, 17 bp, synthetic construct
  source 1..17: mol_type = other DNA
gggctgtggggagcgcg

SEQ ID NO: 150875 - DNA, 17 bp, synthetic construct
  source 1..17: mol_type = other DNA
agggctgtggggagcgc

SEQ ID NO: 150876 - DNA, 17 bp, synthetic construct
  source 1..17: mol_type = other DNA
cagggctgtggggagcg

SEQ ID NO: 150877 - DNA, 17 bp, synthetic construct
  source 1..17: mol_type = other DNA
tcagggctgtggggagc

SEQ ID NO: 150878 - DNA, 17 bp, synthetic construct
  source 1..17: mol_type = other DNA
ttcagggctgtggggag

SEQ ID NO: 150879 - DNA, 17 bp, synthetic construct
  source 1..17: mol_type = other DNA
gttcagggctgtgggga

SEQ ID NO: 150880 - DNA, 17 bp, synthetic construct
  source 1..17: mol_type = other DNA
ggttcagggctgtgggg

SEQ ID NO: 150881 - DNA, 17 bp, synthetic construct
  source 1..17: mol_type = other DNA
gggttcagggctgtggg

SEQ ID NO: 150882 - DNA, 17 bp, synthetic construct
  source 1..17: mol_type = other DNA
cgggttcagggctgtgg

SEQ ID NO: 150883 - DNA, 17 bp, synthetic construct
  source 1..17: mol_type = other DNA
ccgggttcagggctgtg

SEQ ID NO: 150884 - DNA, 17 bp, synthetic construct
  source 1..17: mol_type = other DNA
gccgggttcagggctgt

SEQ ID NO: 150885 - DNA, 17 bp, synthetic construct
  source 1..17: mol_type = other DNA
cgccgggttcagggctg

SEQ ID NO: 150886 - DNA, 17 bp, synthetic construct
  source 1..17: mol_type = other DNA
gcgccgggttcagggct

SEQ ID NO: 150887 - DNA, 17 bp, synthetic construct
  source 1..17: mol_type = other DNA
tgcgccgggttcagggc

SEQ ID NO: 150888 - DNA, 17 bp, synthetic construct
  source 1..17: mol_type = other DNA
gtgcgccgggttcaggg

SEQ ID NO: 150889 - DNA, 17 bp, synthetic construct
  source 1..17: mol_type = other DNA
tgtgcgccgggttcagg

SEQ ID NO: 150890 - DNA, 17 bp, synthetic construct
  source 1..17: mol_type = other DNA
ttgtgcgccgggttcag

SEQ ID NO: 150891 - DNA, 17 bp, synthetic construct
  source 1..17: mol_type = other DNA
attgtgcgccgggttca

SEQ ID NO: 150892 - DNA, 17 bp, synthetic construct
  source 1..17: mol_type = other DNA
cattgtgcgccgggttc

SEQ ID NO: 150893 - DNA, 17 bp, synthetic construct
  source 1..17: mol_type = other DNA
ccattgtgcgccgggtt

SEQ ID NO: 150894 - DNA, 17 bp, synthetic construct
  source 1..17: mol_type = other DNA
cccattgtgcgccgggt

SEQ ID NO: 150895 - DNA, 17 bp, synthetic construct
  source 1..17: mol_type = other DNA
gcccattgtgcgccggg

SEQ ID NO: 150896 - DNA, 17 bp, synthetic construct
  source 1..17: mol_type = other DNA
cgcccattgtgcgccgg

SEQ ID NO: 150897 - DNA, 17 bp, synthetic construct
  source 1..17: mol_type = other DNA
ccgcccattgtgcgccg

SEQ ID NO: 150898 - DNA, 17 bp, synthetic construct
  source 1..17: mol_type = other DNA
cccgcccattgtgcgcc

SEQ ID NO: 150899 - DNA, 17 bp, synthetic construct
  source 1..17: mol_type = other DNA
acccgcccattgtgcgc

SEQ ID NO: 150900 - DNA, 17 bp, synthetic construct
  source 1..17: mol_type = other DNA
cacccgcccattgtgcg

SEQ ID NO: 150901 - DNA, 17 bp, synthetic construct
  source 1..17: mol_type = other DNA
acacccgcccattgtgc

SEQ ID NO: 150902 - DNA, 17 bp, synthetic construct
  source 1..17: mol_type = other DNA
cacacccgcccattgtg

SEQ ID NO: 150903 - DNA, 17 bp, synthetic construct
  source 1..17: mol_type = other DNA
gcacacccgcccattgt

SEQ ID NO: 150904 - DNA, 17 bp, synthetic construct
  source 1..17: mol_type = other DNA
tgcacacccgcccattg

SEQ ID NO: 150905 - DNA, 17 bp, synthetic construct
  source 1..17: mol_type = other DNA
ctgcacacccgcccatt

SEQ ID NO: 150906 - DNA, 17 bp, synthetic construct
  source 1..17: mol_type = other DNA
gctgcacacccgcccat

SEQ ID NO: 150907 - DNA, 17 bp, synthetic construct
  source 1..17: mol_type = other DNA
tgctgcacacccgccca

SEQ ID NO: 150908 - DNA, 17 bp, synthetic construct
  source 1..17: mol_type = other DNA
gtgctgcacacccgccc

SEQ ID NO: 150909 - DNA, 17 bp, synthetic construct
  source 1..17: mol_type = other DNA
ggtgctgcacacccgcc

SEQ ID NO: 150910 - DNA, 17 bp, synthetic construct
  source 1..17: mol_type = other DNA
aggtgctgcacacccgc

SEQ ID NO: 150911 - DNA, 17 bp, synthetic construct
  source 1..17: mol_type = other DNA
caggtgctgcacacccg

SEQ ID NO: 150912 - DNA, 17 bp, synthetic construct
  source 1..17: mol_type = other DNA
ccaggtgctgcacaccc

SEQ ID NO: 150913 - DNA, 17 bp, synthetic construct
  source 1..17: mol_type = other DNA
cccaggtgctgcacacc

SEQ ID NO: 150914 - DNA, 17 bp, synthetic construct
  source 1..17: mol_type = other DNA
ccccaggtgctgcacac

SEQ ID NO: 150915 - DNA, 17 bp, synthetic construct
  source 1..17: mol_type = other DNA
accccaggtgctgcaca

SEQ ID NO: 150916 - DNA, 17 bp, synthetic construct
  source 1..17: mol_type = other DNA
caccccaggtgctgcac

SEQ ID NO: 150917 - DNA, 17 bp, synthetic construct
  source 1..17: mol_type = other DNA
tcaccccaggtgctgca

SEQ ID NO: 150918 - DNA, 17 bp, synthetic construct
  source 1..17: mol_type = other DNA
gtcaccccaggtgctgc

SEQ ID NO: 150919 - DNA, 17 bp, synthetic construct
  source 1..17: mol_type = other DNA
agtcaccccaggtgctg

SEQ ID NO: 150920 - DNA, 17 bp, synthetic construct
  source 1..17: mol_type = other DNA
aagtcaccccaggtgct

SEQ ID NO: 150921 - DNA, 17 bp, synthetic construct
  source 1..17: mol_type = other DNA
gaagtcaccccaggtgc

SEQ ID NO: 150922 - DNA, 17 bp, synthetic construct
  source 1..17: mol_type = other DNA
ggaagtcaccccaggtg

SEQ ID NO: 150923 - DNA, 17 bp, synthetic construct
  source 1..17: mol_type = other DNA
tggaagtcaccccaggt

SEQ ID NO: 150924 - DNA, 17 bp, synthetic construct
  source 1..17: mol_type = other DNA
gtggaagtcaccccagg

SEQ ID NO: 150925 - DNA, 17 bp, synthetic construct
  source 1..17: mol_type = other DNA
agtggaagtcaccccag

SEQ ID NO: 150926 - DNA, 17 bp, synthetic construct
  source 1..17: mol_type = other DNA
tagtggaagtcacccca

SEQ ID NO: 150927 - DNA, 17 bp, synthetic construct
  source 1..17: mol_type = other DNA
gtagtggaagtcacccc

SEQ ID NO: 150928 - DNA, 17 bp, synthetic construct
  source 1..17: mol_type = other DNA
tgtagtggaagtcaccc

SEQ ID NO: 150929 - DNA, 17 bp, synthetic construct
  source 1..17: mol_type = other DNA
ttgtagtggaagtcacc

SEQ ID NO: 150930 - DNA, 17 bp, synthetic construct
  source 1..17: mol_type = other DNA
cttgtagtggaagtcac

SEQ ID NO: 150931 - DNA, 17 bp, synthetic construct
  source 1..17: mol_type = other DNA
tcttgtagtggaagtca

SEQ ID NO: 150932 - DNA, 17 bp, synthetic construct
  source 1..17: mol_type = other DNA
gtcttgtagtggaagtc

SEQ ID NO: 150933 - DNA, 17 bp, synthetic construct
  source 1..17: mol_type = other DNA
ggtcttgtagtggaagt

SEQ ID NO: 150934 - DNA, 17 bp, synthetic construct
  source 1..17: mol_type = other DNA
aggtcttgtagtggaag

SEQ ID NO: 150935 - DNA, 17 bp, synthetic construct
  source 1..17: mol_type = other DNA
aaggtcttgtagtggaa

SEQ ID NO: 150936 - DNA, 17 bp, synthetic construct
  source 1..17: mol_type = other DNA
gaaggtcttgtagtgga

SEQ ID NO: 150937 - DNA, 17 bp, synthetic construct
  source 1..17: mol_type = other DNA
cgaaggtcttgtagtgg

SEQ ID NO: 150938 - DNA, 17 bp, synthetic construct
  source 1..17: mol_type = other DNA
tcgaaggtcttgtagtg

SEQ ID NO: 150939 - DNA, 17 bp, synthetic construct
  source 1..17: mol_type = other DNA
gtcgaaggtcttgtagt

SEQ ID NO: 150940 - DNA, 17 bp, synthetic construct
  source 1..17: mol_type = other DNA
cgtcgaaggtcttgtag

SEQ ID NO: 150941 - DNA, 17 bp, synthetic construct
  source 1..17: mol_type = other DNA
ccgtcgaaggtcttgta

SEQ ID NO: 150942 - DNA, 17 bp, synthetic construct
  source 1..17: mol_type = other DNA
gccgtcgaaggtcttgt

SEQ ID NO: 150943 - DNA, 17 bp, synthetic construct
  source 1..17: mol_type = other DNA
cgccgtcgaaggtcttg

SEQ ID NO: 150944 - DNA, 17 bp, synthetic construct
  source 1..17: mol_type = other DNA
tcgccgtcgaaggtctt

SEQ ID NO: 150945 - DNA, 17 bp, synthetic construct
  source 1..17: mol_type = other DNA
gtcgccgtcgaaggtct

SEQ ID NO: 150946 - DNA, 17 bp, synthetic construct
  source 1..17: mol_type = other DNA
cgtcgccgtcgaaggtc

SEQ ID NO: 150947 - DNA, 17 bp, synthetic construct
  source 1..17: mol_type = other DNA
acgtcgccgtcgaaggt

SEQ ID NO: 150948 - DNA, 17 bp, synthetic construct
  source 1..17: mol_type = other DNA
gacgtcgccgtcgaagg

SEQ ID NO: 150949 - DNA, 17 bp, synthetic construct
  source 1..17: mol_type = other DNA
agacgtcgccgtcgaag

SEQ ID NO: 150950 - DNA, 17 bp, synthetic construct
  source 1..17: mol_type = other DNA
aagacgtcgccgtcgaa

SEQ ID NO: 150951 - DNA, 17 bp, synthetic construct
  source 1..17: mol_type = other DNA
gaagacgtcgccgtcga

SEQ ID NO: 150952 - DNA, 17 bp, synthetic construct
  source 1..17: mol_type = other DNA
ggaagacgtcgccgtcg

SEQ ID NO: 150953 - DNA, 17 bp, synthetic construct
  source 1..17: mol_type = other DNA
cggaagacgtcgccgtc

SEQ ID NO: 150954 - DNA, 17 bp, synthetic construct
  source 1..17: mol_type = other DNA
gcggaagacgtcgccgt

SEQ ID NO: 150955 - DNA, 17 bp, synthetic construct
  source 1..17: mol_type = other DNA
agcggaagacgtcgccg

SEQ ID NO: 150956 - DNA, 17 bp, synthetic construct
  source 1..17: mol_type = other DNA
aagcggaagacgtcgcc

SEQ ID NO: 150957 - DNA, 17 bp, synthetic construct
  source 1..17: mol_type = other DNA
gaagcggaagacgtcgc

SEQ ID NO: 150958 - DNA, 17 bp, synthetic construct
  source 1..17: mol_type = other DNA
ggaagcggaagacgtcg

SEQ ID NO: 150959 - DNA, 17 bp, synthetic construct
  source 1..17: mol_type = other DNA
gggaagcggaagacgtc

SEQ ID NO: 150960 - DNA, 17 bp, synthetic construct
  source 1..17: mol_type = other DNA
agggaagcggaagacgt

SEQ ID NO: 150961 - DNA, 17 bp, synthetic construct
  source 1..17: mol_type = other DNA
cagggaagcggaagacg

SEQ ID NO: 150962 - DNA, 17 bp, synthetic construct
  source 1..17: mol_type = other DNA
ccagggaagcggaagac

SEQ ID NO: 150963 - DNA, 17 bp, synthetic construct
  source 1..17: mol_type = other DNA
gccagggaagcggaaga

SEQ ID NO: 150964 - DNA, 17 bp, synthetic construct
  source 1..17: mol_type = other DNA
ggccagggaagcggaag

SEQ ID NO: 150965 - DNA, 17 bp, synthetic construct
  source 1..17: mol_type = other DNA
aggccagggaagcggaa

SEQ ID NO: 150966 - DNA, 17 bp, synthetic construct
  source 1..17: mol_type = other DNA
aaggccagggaagcgga

SEQ ID NO: 150967 - DNA, 17 bp, synthetic construct
  source 1..17: mol_type = other DNA
aaaggccagggaagcgg

SEQ ID NO: 150968 - DNA, 17 bp, synthetic construct
  source 1..17: mol_type = other DNA
caaaggccagggaagcg

SEQ ID NO: 150969 - DNA, 17 bp, synthetic construct
  source 1..17: mol_type = other DNA
gcaaaggccagggaagc

SEQ ID NO: 150970 - DNA, 17 bp, synthetic construct
  source 1..17: mol_type = other DNA
tgcaaaggccagggaag

SEQ ID NO: 150971 - DNA, 17 bp, synthetic construct
  source 1..17: mol_type = other DNA
ttgcaaaggccagggaa

SEQ ID NO: 150972 - DNA, 17 bp, synthetic construct
  source 1..17: mol_type = other DNA
gttgcaaaggccaggga

SEQ ID NO: 150973 - DNA, 17 bp, synthetic construct
  source 1..17: mol_type = other DNA
agttgcaaaggccaggg

SEQ ID NO: 150974 - DNA, 17 bp, synthetic construct
  source 1..17: mol_type = other DNA
tagttgcaaaggccagg

SEQ ID NO: 150975 - DNA, 17 bp, synthetic construct
  source 1..17: mol_type = other DNA
gtagttgcaaaggccag

SEQ ID NO: 150976 - DNA, 17 bp, synthetic construct
  source 1..17: mol_type = other DNA
cgtagttgcaaaggcca

SEQ ID NO: 150977 - DNA, 17 bp, synthetic construct
  source 1..17: mol_type = other DNA
acgtagttgcaaaggcc

SEQ ID NO: 150978 - DNA, 17 bp, synthetic construct
  source 1..17: mol_type = other DNA
cacgtagttgcaaaggc

SEQ ID NO: 150979 - DNA, 17 bp, synthetic construct
  source 1..17: mol_type = other DNA
acacgtagttgcaaagg

SEQ ID NO: 150980 - DNA, 17 bp, synthetic construct
  source 1..17: mol_type = other DNA
aacacgtagttgcaaag

SEQ ID NO: 150981 - DNA, 17 bp, synthetic construct
  source 1..17: mol_type = other DNA
gaacacgtagttgcaaa

SEQ ID NO: 150982 - DNA, 17 bp, synthetic construct
  source 1..17: mol_type = other DNA
agaacacgtagttgcaa

SEQ ID NO: 150983 - DNA, 17 bp, synthetic construct
  source 1..17: mol_type = other DNA
gagaacacgtagttgca

SEQ ID NO: 150984 - DNA, 17 bp, synthetic construct
  source 1..17: mol_type = other DNA
agagaacacgtagttgc

SEQ ID NO: 150985 - DNA, 17 bp, synthetic construct
  source 1..17: mol_type = other DNA
cagagaacacgtagttg

SEQ ID NO: 150986 - DNA, 17 bp, synthetic construct
  source 1..17: mol_type = other DNA
tcagagaacacgtagtt

SEQ ID NO: 150987 - DNA, 17 bp, synthetic construct
  source 1..17: mol_type = other DNA
ctcagagaacacgtagt

SEQ ID NO: 150988 - DNA, 17 bp, synthetic construct
  source 1..17: mol_type = other DNA
gctcagagaacacgtag

SEQ ID NO: 150989 - DNA, 17 bp, synthetic construct
  source 1..17: mol_type = other DNA
tgctcagagaacacgta

SEQ ID NO: 150990 - DNA, 17 bp, synthetic construct
  source 1..17: mol_type = other DNA
gtgctcagagaacacgt

SEQ ID NO: 150991 - DNA, 17 bp, synthetic construct
  source 1..17: mol_type = other DNA
agtgctcagagaacacg

SEQ ID NO: 150992 - DNA, 17 bp, synthetic construct
  source 1..17: mol_type = other DNA
cagtgctcagagaacac

SEQ ID NO: 150993 - DNA, 17 bp, synthetic construct
  source 1..17: mol_type = other DNA
gcagtgctcagagaaca

SEQ ID NO: 150994 - DNA, 17 bp, synthetic construct
  source 1..17: mol_type = other DNA
ggcagtgctcagagaac

SEQ ID NO: 150995 - DNA, 17 bp, synthetic construct
  source 1..17: mol_type = other DNA
cggcagtgctcagagaa

SEQ ID NO: 150996 - DNA, 17 bp, synthetic construct
  source 1..17: mol_type = other DNA
gcggcagtgctcagaga

SEQ ID NO: 150997 - DNA, 17 bp, synthetic construct
  source 1..17: mol_type = other DNA
cgcggcagtgctcagag

SEQ ID NO: 150998 - DNA, 17 bp, synthetic construct
  source 1..17: mol_type = other DNA
gcgcggcagtgctcaga

SEQ ID NO: 150999 - DNA, 17 bp, synthetic construct
  source 1..17: mol_type = other DNA
ggcgcggcagtgctcag

SEQ ID NO: 151000 - DNA, 17 bp, synthetic construct
  source 1..17: mol_type = other DNA
cggcgcggcagtgctca

SEQ ID NO: 151001 - DNA, 17 bp, synthetic construct
  source 1..17: mol_type = other DNA
gcggcgcggcagtgctc

SEQ ID NO: 151002 - DNA, 17 bp, synthetic construct
  source 1..17: mol_type = other DNA
ggcggcgcggcagtgct

SEQ ID NO: 151003 - DNA, 17 bp, synthetic construct
  source 1..17: mol_type = other DNA
aggcggcgcggcagtgc

SEQ ID NO: 151004 - DNA, 17 bp, synthetic construct
  source 1..17: mol_type = other DNA
taggcggcgcggcagtg

SEQ ID NO: 151005 - DNA, 17 bp, synthetic construct
  source 1..17: mol_type = other DNA
gtaggcggcgcggcagt

SEQ ID NO: 151006 - DNA, 17 bp, synthetic construct
  source 1..17: mol_type = other DNA
cgtaggcggcgcggcag

SEQ ID NO: 151007 - DNA, 17 bp, synthetic construct
  source 1..17: mol_type = other DNA
tcgtaggcggcgcggca

SEQ ID NO: 151008 - DNA, 17 bp, synthetic construct
  source 1..17: mol_type = other DNA
ctcgtaggcggcgcggc

SEQ ID NO: 151009 - DNA, 17 bp, synthetic construct
  source 1..17: mol_type = other DNA
cctcgtaggcggcgcgg

SEQ ID NO: 151010 - DNA, 17 bp, synthetic construct
  source 1..17: mol_type = other DNA
tcctcgtaggcggcgcg

SEQ ID NO: 151011 - DNA, 17 bp, synthetic construct
  source 1..17: mol_type = other DNA
gtcctcgtaggcggcgc

SEQ ID NO: 151012 - DNA, 17 bp, synthetic construct
  source 1..17: mol_type = other DNA
agtcctcgtaggcggcg

SEQ ID NO: 151013 - DNA, 17 bp, synthetic construct
  source 1..17: mol_type = other DNA
aagtcctcgtaggcggc

SEQ ID NO: 151014 - DNA, 17 bp, synthetic construct
  source 1..17: mol_type = other DNA
gaagtcctcgtaggcgg

SEQ ID NO: 151015 - DNA, 17 bp, synthetic construct
  source 1..17: mol_type = other DNA
tgaagtcctcgtaggcg

SEQ ID NO: 151016 - DNA, 17 bp, synthetic construct
  source 1..17: mol_type = other DNA
ttgaagtcctcgtaggc

SEQ ID NO: 151017 - DNA, 17 bp, synthetic construct
  source 1..17: mol_type = other DNA
gttgaagtcctcgtagg

SEQ ID NO: 151018 - DNA, 17 bp, synthetic construct
  source 1..17: mol_type = other DNA
cgttgaagtcctcgtag

SEQ ID NO: 151019 - DNA, 17 bp, synthetic construct
  source 1..17: mol_type = other DNA
acgttgaagtcctcgta

SEQ ID NO: 151020 - DNA, 17 bp, synthetic construct
  source 1..17: mol_type = other DNA
gacgttgaagtcctcgt

SEQ ID NO: 151021 - DNA, 17 bp, synthetic construct
  source 1..17: mol_type = other DNA
ggacgttgaagtcctcg

SEQ ID NO: 151022 - DNA, 17 bp, synthetic construct
  source 1..17: mol_type = other DNA
tggacgttgaagtcctc

SEQ ID NO: 151023 - DNA, 17 bp, synthetic construct
  source 1..17: mol_type = other DNA
ctggacgttgaagtcct

SEQ ID NO: 151024 - DNA, 17 bp, synthetic construct
  source 1..17: mol_type = other DNA
gctggacgttgaagtcc

SEQ ID NO: 151025 - DNA, 17 bp, synthetic construct
  source 1..17: mol_type = other DNA
agctggacgttgaagtc

SEQ ID NO: 151026 - DNA, 17 bp, synthetic construct
  source 1..17: mol_type = other DNA
tagctggacgttgaagt

SEQ ID NO: 151027 - DNA, 17 bp, synthetic construct
  source 1..17: mol_type = other DNA
gtagctggacgttgaag

SEQ ID NO: 151028 - DNA, 17 bp, synthetic construct
  source 1..17: mol_type = other DNA
cgtagctggacgttgaa

SEQ ID NO: 151029 - DNA, 17 bp, synthetic construct
  source 1..17: mol_type = other DNA
gcgtagctggacgttga

SEQ ID NO: 151030 - DNA, 17 bp, synthetic construct
  source 1..17: mol_type = other DNA
ggcgtagctggacgttg

SEQ ID NO: 151031 - DNA, 17 bp, synthetic construct
  source 1..17: mol_type = other DNA
cggcgtagctggacgtt

SEQ ID NO: 151032 - DNA, 17 bp, synthetic construct
  source 1..17: mol_type = other DNA
tcggcgtagctggacgt

SEQ ID NO: 151033 - DNA, 17 bp, synthetic construct
  source 1..17: mol_type = other DNA
ctcggcgtagctggacg

SEQ ID NO: 151034 - DNA, 17 bp, synthetic construct
  source 1..17: mol_type = other DNA
cctcggcgtagctggac

SEQ ID NO: 151035 - DNA, 17 bp, synthetic construct
  source 1..17: mol_type = other DNA
gcctcggcgtagctgga

SEQ ID NO: 151036 - DNA, 17 bp, synthetic construct
  source 1..17: mol_type = other DNA
ggcctcggcgtagctgg

SEQ ID NO: 151037 - DNA, 17 bp, synthetic construct
  source 1..17: mol_type = other DNA
aggcctcggcgtagctg

SEQ ID NO: 151038 - DNA, 17 bp, synthetic construct
  source 1..17: mol_type = other DNA
taggcctcggcgtagct

SEQ ID NO: 151039 - DNA, 17 bp, synthetic construct
  source 1..17: mol_type = other DNA
ctaggcctcggcgtagc

SEQ ID NO: 151040 - DNA, 17 bp, synthetic construct
  source 1..17: mol_type = other DNA
actaggcctcggcgtag

SEQ ID NO: 151041 - DNA, 17 bp, synthetic construct
  source 1..17: mol_type = other DNA
cactaggcctcggcgta

SEQ ID NO: 151042 - DNA, 17 bp, synthetic construct
  source 1..17: mol_type = other DNA
ccactaggcctcggcgt

SEQ ID NO: 151043 - DNA, 17 bp, synthetic construct
  source 1..17: mol_type = other DNA
cccactaggcctcggcg

SEQ ID NO: 151044 - DNA, 17 bp, synthetic construct
  source 1..17: mol_type = other DNA
gcccactaggcctcggc

SEQ ID NO: 151045 - DNA, 17 bp, synthetic construct
  source 1..17: mol_type = other DNA
agcccactaggcctcgg

SEQ ID NO: 151046 - DNA, 17 bp, synthetic construct
  source 1..17: mol_type = other DNA
gagcccactaggcctcg

SEQ ID NO: 151047 - DNA, 17 bp, synthetic construct
  source 1..17: mol_type = other DNA
ggagcccactaggcctc

SEQ ID NO: 151048 - DNA, 17 bp, synthetic construct
  source 1..17: mol_type = other DNA
tggagcccactaggcct

SEQ ID NO: 151049 - DNA, 17 bp, synthetic construct
  source 1..17: mol_type = other DNA
ctggagcccactaggcc

SEQ ID NO: 151050 - DNA, 17 bp, synthetic construct
  source 1..17: mol_type = other DNA
cctggagcccactaggc

SEQ ID NO: 151051 - DNA, 17 bp, synthetic construct
  source 1..17: mol_type = other DNA
gcctggagcccactagg

SEQ ID NO: 151052 - DNA, 17 bp, synthetic construct
  source 1..17: mol_type = other DNA
ggcctggagcccactag

SEQ ID NO: 151053 - DNA, 17 bp, synthetic construct
  source 1..17: mol_type = other DNA
aggcctggagcccacta

SEQ ID NO: 151054 - DNA, 17 bp, synthetic construct
  source 1..17: mol_type = other DNA
caggcctggagcccact

SEQ ID NO: 151055 - DNA, 17 bp, synthetic construct
  source 1..17: mol_type = other DNA
acaggcctggagcccac

SEQ ID NO: 151056 - DNA, 17 bp, synthetic construct
  source 1..17: mol_type = other DNA
cacaggcctggagccca

SEQ ID NO: 151057 - DNA, 17 bp, synthetic construct
  source 1..17: mol_type = other DNA
ccacaggcctggagccc

SEQ ID NO: 151058 - DNA, 17 bp, synthetic construct
  source 1..17: mol_type = other DNA
accacaggcctggagcc

SEQ ID NO: 151059 - DNA, 17 bp, synthetic construct
  source 1..17: mol_type = other DNA
gaccacaggcctggagc

SEQ ID NO: 151060 - DNA, 17 bp, synthetic construct
  source 1..17: mol_type = other DNA
tgaccacaggcctggag

SEQ ID NO: 151061 - DNA, 17 bp, synthetic construct
  source 1..17: mol_type = other DNA
gtgaccacaggcctgga

SEQ ID NO: 151062 - DNA, 17 bp, synthetic construct
  source 1..17: mol_type = other DNA
ggtgaccacaggcctgg

SEQ ID NO: 151063 - DNA, 17 bp, synthetic construct
  source 1..17: mol_type = other DNA
gggtgaccacaggcctg

SEQ ID NO: 151064 - DNA, 17 bp, synthetic construct
  source 1..17: mol_type = other DNA
cgggtgaccacaggcct

SEQ ID NO: 151065 - DNA, 17 bp, synthetic construct
  source 1..17: mol_type = other DNA
acgggtgaccacaggcc

SEQ ID NO: 151066 - DNA, 17 bp, synthetic construct
  source 1..17: mol_type = other DNA
cacgggtgaccacaggc

SEQ ID NO: 151067 - DNA, 17 bp, synthetic construct
  source 1..17: mol_type = other DNA
acacgggtgaccacagg

SEQ ID NO: 151068 - DNA, 17 bp, synthetic construct
  source 1..17: mol_type = other DNA
aacacgggtgaccacag

SEQ ID NO: 151069 - DNA, 17 bp, synthetic construct
  source 1..17: mol_type = other DNA
caacacgggtgaccaca

SEQ ID NO: 151070 - DNA, 17 bp, synthetic construct
  source 1..17: mol_type = other DNA
acaacacgggtgaccac

SEQ ID NO: 151071 - DNA, 17 bp, synthetic construct
  source 1..17: mol_type = other DNA
gacaacacgggtgacca

SEQ ID NO: 151072 - DNA, 17 bp, synthetic construct
  source 1..17: mol_type = other DNA
tgacaacacgggtgacc

SEQ ID NO: 151073 - DNA, 17 bp, synthetic construct
  source 1..17: mol_type = other DNA
atgacaacacgggtgac

SEQ ID NO: 151074 - DNA, 17 bp, synthetic construct
  source 1..17: mol_type = other DNA
gatgacaacacgggtga

SEQ ID NO: 151075 - DNA, 17 bp, synthetic construct
  source 1..17: mol_type = other DNA
tgatgacaacacgggtg

SEQ ID NO: 151076 - DNA, 17 bp, synthetic construct
  source 1..17: mol_type = other DNA
ttgatgacaacacgggt

SEQ ID NO: 151077 - DNA, 17 bp, synthetic construct
  source 1..17: mol_type = other DNA
cttgatgacaacacggg

SEQ ID NO: 151078 - DNA, 17 bp, synthetic construct
  source 1..17: mol_type = other DNA
ccttgatgacaacacgg

SEQ ID NO: 151079 - DNA, 17 bp, synthetic construct
  source 1..17: mol_type = other DNA
gccttgatgacaacacg

SEQ ID NO: 151080 - DNA, 17 bp, synthetic construct
  source 1..17: mol_type = other DNA
ggccttgatgacaacac

SEQ ID NO: 151081 - DNA, 17 bp, synthetic construct
  source 1..17: mol_type = other DNA
gggccttgatgacaaca

SEQ ID NO: 151082 - DNA, 17 bp, synthetic construct
  source 1..17: mol_type = other DNA
tgggccttgatgacaac

SEQ ID NO: 151083 - DNA, 17 bp, synthetic construct
  source 1..17: mol_type = other DNA
ctgggccttgatgacaa

SEQ ID NO: 151084 - DNA, 17 bp, synthetic construct
  source 1..17: mol_type = other DNA
cctgggccttgatgaca

SEQ ID NO: 151085 - DNA, 17 bp, synthetic construct
  source 1..17: mol_type = other DNA
ccctgggccttgatgac

SEQ ID NO: 151086 - DNA, 17 bp, synthetic construct
  source 1..17: mol_type = other DNA
cccctgggccttgatga

SEQ ID NO: 151087 - DNA, 17 bp, synthetic construct
  source 1..17: mol_type = other DNA
gcccctgggccttgatg

SEQ ID NO: 151088 - DNA, 17 bp, synthetic construct
  source 1..17: mol_type = other DNA
agcccctgggccttgat

SEQ ID NO: 151089 - DNA, 17 bp, synthetic construct
  source 1..17: mol_type = other DNA
cagcccctgggccttga

SEQ ID NO: 151090 - DNA, 17 bp, synthetic construct
  source 1..17: mol_type = other DNA
ccagcccctgggccttg

SEQ ID NO: 151091 - DNA, 17 bp, synthetic construct
  source 1..17: mol_type = other DNA
accagcccctgggcctt

SEQ ID NO: 151092 - DNA, 17 bp, synthetic construct
  source 1..17: mol_type = other DNA
caccagcccctgggcct

SEQ ID NO: 151093 - DNA, 17 bp, synthetic construct
  source 1..17: mol_type = other DNA
gcaccagcccctgggcc

SEQ ID NO: 151094 - DNA, 17 bp, synthetic construct
  source 1..17: mol_type = other DNA
agcaccagcccctgggc

SEQ ID NO: 151095 - DNA, 17 bp, synthetic construct
  source 1..17: mol_type = other DNA
cagcaccagcccctggg

SEQ ID NO: 151096 - DNA, 17 bp, synthetic construct
  source 1..17: mol_type = other DNA
ccagcaccagcccctgg

SEQ ID NO: 151097 - DNA, 17 bp, synthetic construct
  source 1..17: mol_type = other DNA
tccagcaccagcccctg

SEQ ID NO: 151098 - DNA, 17 bp, synthetic construct
  source 1..17: mol_type = other DNA
ctccagcaccagcccct

SEQ ID NO: 151099 - DNA, 17 bp, synthetic construct
  source 1..17: mol_type = other DNA
cctccagcaccagcccc

SEQ ID NO: 151100 - DNA, 17 bp, synthetic construct
  source 1..17: mol_type = other DNA
gcctccagcaccagccc

SEQ ID NO: 151101 - DNA, 17 bp, synthetic construct
  source 1..17: mol_type = other DNA
cgcctccagcaccagcc

SEQ ID NO: 151102 - DNA, 17 bp, synthetic construct
  source 1..17: mol_type = other DNA
acgcctccagcaccagc

SEQ ID NO: 151103 - DNA, 17 bp, synthetic construct
  source 1..17: mol_type = other DNA
gacgcctccagcaccag

SEQ ID NO: 151104 - DNA, 17 bp, synthetic construct
  source 1..17: mol_type = other DNA
ggacgcctccagcacca

SEQ ID NO: 151105 - DNA, 17 bp, synthetic construct
  source 1..17: mol_type = other DNA
tggacgcctccagcacc

SEQ ID NO: 151106 - DNA, 17 bp, synthetic construct
  source 1..17: mol_type = other DNA
ttggacgcctccagcac

SEQ ID NO: 151107 - DNA, 17 bp, synthetic construct
  source 1..17: mol_type = other DNA
gttggacgcctccagca

SEQ ID NO: 151108 - DNA, 17 bp, synthetic construct
  source 1..17: mol_type = other DNA
cgttggacgcctccagc

SEQ ID NO: 151109 - DNA, 17 bp, synthetic construct
  source 1..17: mol_type = other DNA
ccgttggacgcctccag

SEQ ID NO: 151110 - DNA, 17 bp, synthetic construct
  source 1..17: mol_type = other DNA
gccgttggacgcctcca

SEQ ID NO: 151111 - DNA, 17 bp, synthetic construct
  source 1..17: mol_type = other DNA
agccgttggacgcctcc

SEQ ID NO: 151112 - DNA, 17 bp, synthetic construct
  source 1..17: mol_type = other DNA
gagccgttggacgcctc

SEQ ID NO: 151113 - DNA, 17 bp, synthetic construct
  source 1..17: mol_type = other DNA
ggagccgttggacgcct

SEQ ID NO: 151114 - DNA, 17 bp, synthetic construct
  source 1..17: mol_type = other DNA
cggagccgttggacgcc

SEQ ID NO: 151115 - DNA, 17 bp, synthetic construct
  source 1..17: mol_type = other DNA
acggagccgttggacgc

SEQ ID NO: 151116 - DNA, 17 bp, synthetic construct
  source 1..17: mol_type = other DNA
gacggagccgttggacg

SEQ ID NO: 151117 - DNA, 17 bp, synthetic construct
  source 1..17: mol_type = other DNA
ggacggagccgttggac

SEQ ID NO: 151118 - DNA, 17 bp, synthetic construct
  source 1..17: mol_type = other DNA
aggacggagccgttgga

SEQ ID NO: 151119 - DNA, 17 bp, synthetic construct
  source 1..17: mol_type = other DNA
gaggacggagccgttgg

SEQ ID NO: 151120 - DNA, 17 bp, synthetic construct
  source 1..17: mol_type = other DNA
tgaggacggagccgttg

SEQ ID NO: 151121 - DNA, 17 bp, synthetic construct
  source 1..17: mol_type = other DNA
atgaggacggagccgtt

SEQ ID NO: 151122 - DNA, 17 bp, synthetic construct
  source 1..17: mol_type = other DNA
gatgaggacggagccgt

SEQ ID NO: 151123 - DNA, 17 bp, synthetic construct
  source 1..17: mol_type = other DNA
tgatgaggacggagccg

SEQ ID NO: 151124 - DNA, 17 bp, synthetic construct
  source 1..17: mol_type = other DNA
ttgatgaggacggagcc

SEQ ID NO: 151125 - DNA, 17 bp, synthetic construct
  source 1..17: mol_type = other DNA
attgatgaggacggagc

SEQ ID NO: 151126 - DNA, 17 bp, synthetic construct
  source 1..17: mol_type = other DNA
cattgatgaggacggag

SEQ ID NO: 151127 - DNA, 17 bp, synthetic construct
  source 1..17: mol_type = other DNA
ccattgatgaggacgga

SEQ ID NO: 151128 - DNA, 17 bp, synthetic construct
  source 1..17: mol_type = other DNA
cccattgatgaggacgg

SEQ ID NO: 151129 - DNA, 17 bp, synthetic construct
  source 1..17: mol_type = other DNA
gcccattgatgaggacg

SEQ ID NO: 151130 - DNA, 17 bp, synthetic construct
  source 1..17: mol_type = other DNA
tgcccattgatgaggac

SEQ ID NO: 151131 - DNA, 17 bp, synthetic construct
  source 1..17: mol_type = other DNA
ctgcccattgatgagga

SEQ ID NO: 151132 - DNA, 17 bp, synthetic construct
  source 1..17: mol_type = other DNA
gctgcccattgatgagg

SEQ ID NO: 151133 - DNA, 17 bp, synthetic construct
  source 1..17: mol_type = other DNA
cgctgcccattgatgag

SEQ ID NO: 151134 - DNA, 17 bp, synthetic construct
  source 1..17: mol_type = other DNA
ccgctgcccattgatga

SEQ ID NO: 151135 - DNA, 17 bp, synthetic construct
  source 1..17: mol_type = other DNA
accgctgcccattgatg

SEQ ID NO: 151136 - DNA, 17 bp, synthetic construct
  source 1..17: mol_type = other DNA
caccgctgcccattgat

SEQ ID NO: 151137 - DNA, 17 bp, synthetic construct
  source 1..17: mol_type = other DNA
tcaccgctgcccattga

SEQ ID NO: 151138 - DNA, 17 bp, synthetic construct
  source 1..17: mol_type = other DNA
ctcaccgctgcccattg

SEQ ID NO: 151139 - DNA, 17 bp, synthetic construct
  source 1..17: mol_type = other DNA
gctcaccgctgcccatt

SEQ ID NO: 151140 - DNA, 17 bp, synthetic construct
  source 1..17: mol_type = other DNA
ggctcaccgctgcccat

SEQ ID NO: 151141 - DNA, 17 bp, synthetic construct
  source 1..17: mol_type = other DNA
cggctcaccgctgccca

SEQ ID NO: 151142 - DNA, 17 bp, synthetic construct
  source 1..17: mol_type = other DNA
ccggctcaccgctgccc

SEQ ID NO: 151143 - DNA, 17 bp, synthetic construct
  source 1..17: mol_type = other DNA
gccggctcaccgctgcc

SEQ ID NO: 151144 - DNA, 17 bp, synthetic construct
  source 1..17: mol_type = other DNA
ggccggctcaccgctgc

SEQ ID NO: 151145 - DNA, 17 bp, synthetic construct
  source 1..17: mol_type = other DNA
tggccggctcaccgctg

SEQ ID NO: 151146 - DNA, 17 bp, synthetic construct
  source 1..17: mol_type = other DNA
gtggccggctcaccgct

SEQ ID NO: 151147 - DNA, 17 bp, synthetic construct
  source 1..17: mol_type = other DNA
ggtggccggctcaccgc

SEQ ID NO: 151148 - DNA, 17 bp, synthetic construct
  source 1..17: mol_type = other DNA
gggtggccggctcaccg

SEQ ID NO: 151149 - DNA, 17 bp, synthetic construct
  source 1..17: mol_type = other DNA
agggtggccggctcacc

SEQ ID NO: 151150 - DNA, 17 bp, synthetic construct
  source 1..17: mol_type = other DNA
cagggtggccggctcac

SEQ ID NO: 151151 - DNA, 17 bp, synthetic construct
  source 1..17: mol_type = other DNA
ccagggtggccggctca

SEQ ID NO: 151152 - DNA, 17 bp, synthetic construct
  source 1..17: mol_type = other DNA
cccagggtggccggctc

SEQ ID NO: 151153 - DNA, 17 bp, synthetic construct
  source 1..17: mol_type = other DNA
ccccagggtggccggct

SEQ ID NO: 151154 - DNA, 17 bp, synthetic construct
  source 1..17: mol_type = other DNA
tccccagggtggccggc

SEQ ID NO: 151155 - DNA, 17 bp, synthetic construct
  source 1..17: mol_type = other DNA
ctccccagggtggccgg

SEQ ID NO: 151156 - DNA, 17 bp, synthetic construct
  source 1..17: mol_type = other DNA
cctccccagggtggccg

SEQ ID NO: 151157 - DNA, 17 bp, synthetic construct
  source 1..17: mol_type = other DNA
ccctccccagggtggcc

SEQ ID NO: 151158 - DNA, 17 bp, synthetic construct
  source 1..17: mol_type = other DNA
cccctccccagggtggc

SEQ ID NO: 151159 - DNA, 17 bp, synthetic construct
  source 1..17: mol_type = other DNA
gcccctccccagggtgg

SEQ ID NO: 151160 - DNA, 17 bp, synthetic construct
  source 1..17: mol_type = other DNA
cgcccctccccagggtg

SEQ ID NO: 151161 - DNA, 17 bp, synthetic construct
  source 1..17: mol_type = other DNA
tcgcccctccccagggt

SEQ ID NO: 151162 - DNA, 17 bp, synthetic construct
  source 1..17: mol_type = other DNA
ctcgcccctccccaggg

SEQ ID NO: 151163 - DNA, 17 bp, synthetic construct
  source 1..17: mol_type = other DNA
cctcgcccctccccagg

SEQ ID NO: 151164 - DNA, 17 bp, synthetic construct
  source 1..17: mol_type = other DNA
ccctcgcccctccccag

SEQ ID NO: 151165 - DNA, 17 bp, synthetic construct
  source 1..17: mol_type = other DNA
gccctcgcccctcccca

SEQ ID NO: 151166 - DNA, 17 bp, synthetic construct
  source 1..17: mol_type = other DNA
ggccctcgcccctcccc

SEQ ID NO: 151167 - DNA, 17 bp, synthetic construct
  source 1..17: mol_type = other DNA
cggccctcgcccctccc

SEQ ID NO: 151168 - DNA, 17 bp, synthetic construct
  source 1..17: mol_type = other DNA
ccggccctcgcccctcc

SEQ ID NO: 151169 - DNA, 17 bp, synthetic construct
  source 1..17: mol_type = other DNA
cccggccctcgcccctc

SEQ ID NO: 151170 - DNA, 17 bp, synthetic construct
  source 1..17: mol_type = other DNA
gcccggccctcgcccct

SEQ ID NO: 151171 - DNA, 17 bp, synthetic construct
  source 1..17: mol_type = other DNA
ggcccggccctcgcccc

SEQ ID NO: 151172 - DNA, 17 bp, synthetic construct
  source 1..17: mol_type = other DNA
tggcccggccctcgccc

SEQ ID NO: 151173 - DNA, 17 bp, synthetic construct
  source 1..17: mol_type = other DNA
gtggcccggccctcgcc

SEQ ID NO: 151174 - DNA, 17 bp, synthetic construct
  source 1..17: mol_type = other DNA
tgtggcccggccctcgc

SEQ ID NO: 151175 - DNA, 17 bp, synthetic construct
  source 1..17: mol_type = other DNA
gtgtggcccggccctcg

SEQ ID NO: 151176 - DNA, 17 bp, synthetic construct
  source 1..17: mol_type = other DNA
tgtgtggcccggccctc

SEQ ID NO: 151177 - DNA, 17 bp, synthetic construct
  source 1..17: mol_type = other DNA
ctgtgtggcccggccct

SEQ ID NO: 151178 - DNA, 17 bp, synthetic construct
  source 1..17: mol_type = other DNA
actgtgtggcccggccc

SEQ ID NO: 151179 - DNA, 17 bp, synthetic construct
  source 1..17: mol_type = other DNA
cactgtgtggcccggcc

SEQ ID NO: 151180 - DNA, 17 bp, synthetic construct
  source 1..17: mol_type = other DNA
acactgtgtggcccggc

SEQ ID NO: 151181 - DNA, 17 bp, synthetic construct
  source 1..17: mol_type = other DNA
cacactgtgtggcccgg

SEQ ID NO: 151182 - DNA, 17 bp, synthetic construct
  source 1..17: mol_type = other DNA
tcacactgtgtggcccg

SEQ ID NO: 151183 - DNA, 17 bp, synthetic construct
  source 1..17: mol_type = other DNA
gtcacactgtgtggccc

SEQ ID NO: 151184 - DNA, 17 bp, synthetic construct
  source 1..17: mol_type = other DNA
ggtcacactgtgtggcc

SEQ ID NO: 151185 - DNA, 17 bp, synthetic construct
  source 1..17: mol_type = other DNA
aggtcacactgtgtggc

SEQ ID NO: 151186 - DNA, 17 bp, synthetic construct
  source 1..17: mol_type = other DNA
gaggtcacactgtgtgg

SEQ ID NO: 151187 - DNA, 17 bp, synthetic construct
  source 1..17: mol_type = other DNA
ggaggtcacactgtgtg

SEQ ID NO: 151188 - DNA, 17 bp, synthetic construct
  source 1..17: mol_type = other DNA
gggaggtcacactgtgt

SEQ ID NO: 151189 - DNA, 17 bp, synthetic construct
  source 1..17: mol_type = other DNA
ggggaggtcacactgtg

SEQ ID NO: 151190 - DNA, 17 bp, synthetic construct
  source 1..17: mol_type = other DNA
tggggaggtcacactgt

SEQ ID NO: 151191 - DNA, 17 bp, synthetic construct
  source 1..17: mol_type = other DNA
gtggggaggtcacactg

SEQ ID NO: 151192 - DNA, 17 bp, synthetic construct
  source 1..17: mol_type = other DNA
tgtggggaggtcacact

SEQ ID NO: 151193 - DNA, 17 bp, synthetic construct
  source 1..17: mol_type = other DNA
gtgtggggaggtcacac

SEQ ID NO: 151194 - DNA, 17 bp, synthetic construct
  source 1..17: mol_type = other DNA
cgtgtggggaggtcaca

SEQ ID NO: 151195 - DNA, 17 bp, synthetic construct
  source 1..17: mol_type = other DNA
ccgtgtggggaggtcac

SEQ ID NO: 151196 - DNA, 17 bp, synthetic construct
  source 1..17: mol_type = other DNA
gccgtgtggggaggtca

SEQ ID NO: 151197 - DNA, 17 bp, synthetic construct
  source 1..17: mol_type = other DNA
ggccgtgtggggaggtc

SEQ ID NO: 151198 - DNA, 17 bp, synthetic construct
  source 1..17: mol_type = other DNA
tggccgtgtggggaggt

SEQ ID NO: 151199 - DNA, 17 bp, synthetic construct
  source 1..17: mol_type = other DNA
atggccgtgtggggagg

SEQ ID NO: 151200 - DNA, 17 bp, synthetic construct
  source 1..17: mol_type = other DNA
catggccgtgtggggag

SEQ ID NO: 151201 - DNA, 17 bp, synthetic construct
  source 1..17: mol_type = other DNA
acatggccgtgtgggga

SEQ ID NO: 151202 - DNA, 17 bp, synthetic construct
  source 1..17: mol_type = other DNA
gacatggccgtgtgggg

SEQ ID NO: 151203 - DNA, 17 bp, synthetic construct
  source 1..17: mol_type = other DNA
agacatggccgtgtggg

SEQ ID NO: 151204 - DNA, 17 bp, synthetic construct
  source 1..17: mol_type = other DNA
cagacatggccgtgtgg

SEQ ID NO: 151205 - DNA, 17 bp, synthetic construct
  source 1..17: mol_type = other DNA
tcagacatggccgtgtg

SEQ ID NO: 151206 - DNA, 17 bp, synthetic construct
  source 1..17: mol_type = other DNA
gtcagacatggccgtgt

SEQ ID NO: 151207 - DNA, 17 bp, synthetic construct
  source 1..17: mol_type = other DNA
ggtcagacatggccgtg

SEQ ID NO: 151208 - DNA, 17 bp, synthetic construct
  source 1..17: mol_type = other DNA
aggtcagacatggccgt

SEQ ID NO: 151209 - DNA, 17 bp, synthetic construct
  source 1..17: mol_type = other DNA
caggtcagacatggccg

SEQ ID NO: 151210 - DNA, 17 bp, synthetic construct
  source 1..17: mol_type = other DNA
ccaggtcagacatggcc

SEQ ID NO: 151211 - DNA, 17 bp, synthetic construct
  source 1..17: mol_type = other DNA
cccaggtcagacatggc

SEQ ID NO: 151212 - DNA, 17 bp, synthetic construct
  source 1..17: mol_type = other DNA
gcccaggtcagacatgg

SEQ ID NO: 151213 - DNA, 17 bp, synthetic construct
  source 1..17: mol_type = other DNA
ggcccaggtcagacatg

SEQ ID NO: 151214 - DNA, 17 bp, synthetic construct
  source 1..17: mol_type = other DNA
tggcccaggtcagacat

SEQ ID NO: 151215 - DNA, 17 bp, synthetic construct
  source 1..17: mol_type = other DNA
ctggcccaggtcagaca

SEQ ID NO: 151216 - DNA, 17 bp, synthetic construct
  source 1..17: mol_type = other DNA
cctggcccaggtcagac

SEQ ID NO: 151217 - DNA, 17 bp, synthetic construct
  source 1..17: mol_type = other DNA
ccctggcccaggtcaga

SEQ ID NO: 151218 - DNA, 17 bp, synthetic construct
  source 1..17: mol_type = other DNA
gccctggcccaggtcag

SEQ ID NO: 151219 - DNA, 17 bp, synthetic construct
  source 1..17: mol_type = other DNA
agccctggcccaggtca

SEQ ID NO: 151220 - DNA, 17 bp, synthetic construct
  source 1..17: mol_type = other DNA
cagccctggcccaggtc

SEQ ID NO: 151221 - DNA, 17 bp, synthetic construct
  source 1..17: mol_type = other DNA
ccagccctggcccaggt

SEQ ID NO: 151222 - DNA, 17 bp, synthetic construct
  source 1..17: mol_type = other DNA
cccagccctggcccagg

SEQ ID NO: 151223 - DNA, 17 bp, synthetic construct
  source 1..17: mol_type = other DNA
ccccagccctggcccag

SEQ ID NO: 151224 - DNA, 17 bp, synthetic construct
  source 1..17: mol_type = other DNA
cccccagccctggccca

SEQ ID NO: 151225 - DNA, 17 bp, synthetic construct
  source 1..17: mol_type = other DNA
ccccccagccctggccc

SEQ ID NO: 151226 - DNA, 17 bp, synthetic construct
  source 1..17: mol_type = other DNA
cccccccagccctggcc

SEQ ID NO: 151227 - DNA, 17 bp, synthetic construct
  source 1..17: mol_type = other DNA
ccccccccagccctggc

SEQ ID NO: 151228 - DNA, 17 bp, synthetic construct
  source 1..17: mol_type = other DNA
cccccccccagccctgg

SEQ ID NO: 151229 - DNA, 17 bp, synthetic construct
  source 1..17: mol_type = other DNA
acccccccccagccctg

SEQ ID NO: 151230 - DNA, 17 bp, synthetic construct
  source 1..17: mol_type = other DNA
aacccccccccagccct

SEQ ID NO: 151231 - DNA, 17 bp, synthetic construct
  source 1..17: mol_type = other DNA
caacccccccccagccc

SEQ ID NO: 151232 - DNA, 17 bp, synthetic construct
  source 1..17: mol_type = other DNA
ccaacccccccccagcc

SEQ ID NO: 151233 - DNA, 17 bp, synthetic construct
  source 1..17: mol_type = other DNA
cccaacccccccccagc

SEQ ID NO: 151234 - DNA, 17 bp, synthetic construct
  source 1..17: mol_type = other DNA
acccaacccccccccag

SEQ ID NO: 151235 - DNA, 17 bp, synthetic construct
  source 1..17: mol_type = other DNA
cacccaaccccccccca

SEQ ID NO: 151236 - DNA, 17 bp, synthetic construct
  source 1..17: mol_type = other DNA
ccacccaaccccccccc

SEQ ID NO: 151237 - DNA, 17 bp, synthetic construct
  source 1..17: mol_type = other DNA
cccacccaacccccccc

SEQ ID NO: 151238 - DNA, 17 bp, synthetic construct
  source 1..17: mol_type = other DNA
gcccacccaaccccccc

SEQ ID NO: 151239 - DNA, 17 bp, synthetic construct
  source 1..17: mol_type = other DNA
tgcccacccaacccccc

SEQ ID NO: 151240 - DNA, 17 bp, synthetic construct
  source 1..17: mol_type = other DNA
ctgcccacccaaccccc

SEQ ID NO: 151241 - DNA, 17 bp, synthetic construct
  source 1..17: mol_type = other DNA
cctgcccacccaacccc

SEQ ID NO: 151242 - DNA, 17 bp, synthetic construct
  source 1..17: mol_type = other DNA
gcctgcccacccaaccc

SEQ ID NO: 151243 - DNA, 17 bp, synthetic construct
  source 1..17: mol_type = other DNA
tgcctgcccacccaacc

SEQ ID NO: 151244 - DNA, 17 bp, synthetic construct
  source 1..17: mol_type = other DNA
ctgcctgcccacccaac

SEQ ID NO: 151245 - DNA, 17 bp, synthetic construct
  source 1..17: mol_type = other DNA
gctgcctgcccacccaa

SEQ ID NO: 151246 - DNA, 17 bp, synthetic construct
  source 1..17: mol_type = other DNA
ggctgcctgcccaccca

SEQ ID NO: 151247 - DNA, 17 bp, synthetic construct
  source 1..17: mol_type = other DNA
tggctgcctgcccaccc

SEQ ID NO: 151248 - DNA, 17 bp, synthetic construct
  source 1..17: mol_type = other DNA
ctggctgcctgcccacc

SEQ ID NO: 151249 - DNA, 17 bp, synthetic construct
  source 1..17: mol_type = other DNA
cctggctgcctgcccac

SEQ ID NO: 151250 - DNA, 17 bp, synthetic construct
  source 1..17: mol_type = other DNA
tcctggctgcctgccca

SEQ ID NO: 151251 - DNA, 17 bp, synthetic construct
  source 1..17: mol_type = other DNA
ctcctggctgcctgccc

SEQ ID NO: 151252 - DNA, 17 bp, synthetic construct
  source 1..17: mol_type = other DNA
tctcctggctgcctgcc

SEQ ID NO: 151253 - DNA, 17 bp, synthetic construct
  source 1..17: mol_type = other DNA
ctctcctggctgcctgc

SEQ ID NO: 151254 - DNA, 17 bp, synthetic construct
  source 1..17: mol_type = other DNA
gctctcctggctgcctg

SEQ ID NO: 151255 - DNA, 17 bp, synthetic construct
  source 1..17: mol_type = other DNA
cgctctcctggctgcct

SEQ ID NO: 151256 - DNA, 17 bp, synthetic construct
  source 1..17: mol_type = other DNA
ccgctctcctggctgcc

SEQ ID NO: 151257 - DNA, 17 bp, synthetic construct
  source 1..17: mol_type = other DNA
cccgctctcctggctgc

SEQ ID NO: 151258 - DNA, 17 bp, synthetic construct
  source 1..17: mol_type = other DNA
ccccgctctcctggctg

SEQ ID NO: 151259 - DNA, 17 bp, synthetic construct
  source 1..17: mol_type = other DNA
gccccgctctcctggct

SEQ ID NO: 151260 - DNA, 17 bp, synthetic construct
  source 1..17: mol_type = other DNA
ggccccgctctcctggc

SEQ ID NO: 151261 - DNA, 17 bp, synthetic construct
  source 1..17: mol_type = other DNA
gggccccgctctcctgg

SEQ ID NO: 151262 - DNA, 17 bp, synthetic construct
  source 1..17: mol_type = other DNA
tgggccccgctctcctg

SEQ ID NO: 151263 - DNA, 17 bp, synthetic construct
  source 1..17: mol_type = other DNA
ctgggccccgctctcct

SEQ ID NO: 151264 - DNA, 17 bp, synthetic construct
  source 1..17: mol_type = other DNA
cctgggccccgctctcc

SEQ ID NO: 151265 - DNA, 17 bp, synthetic construct
  source 1..17: mol_type = other DNA
ccctgggccccgctctc

SEQ ID NO: 151266 - DNA, 17 bp, synthetic construct
  source 1..17: mol_type = other DNA
tccctgggccccgctct

SEQ ID NO: 151267 - DNA, 17 bp, synthetic construct
  source 1..17: mol_type = other DNA
ctccctgggccccgctc

SEQ ID NO: 151268 - DNA, 17 bp, synthetic construct
  source 1..17: mol_type = other DNA
tctccctgggccccgct

SEQ ID NO: 151269 - DNA, 17 bp, synthetic construct
  source 1..17: mol_type = other DNA
ctctccctgggccccgc

SEQ ID NO: 151270 - DNA, 17 bp, synthetic construct
  source 1..17: mol_type = other DNA
tctctccctgggccccg

SEQ ID NO: 151271 - DNA, 17 bp, synthetic construct
  source 1..17: mol_type = other DNA
gtctctccctgggcccc

SEQ ID NO: 151272 - DNA, 17 bp, synthetic construct
  source 1..17: mol_type = other DNA
ggtctctccctgggccc

SEQ ID NO: 151273 - DNA, 17 bp, synthetic construct
  source 1..17: mol_type = other DNA
gggtctctccctgggcc

SEQ ID NO: 151274 - DNA, 17 bp, synthetic construct
  source 1..17: mol_type = other DNA
ggggtctctccctgggc

SEQ ID NO: 151275 - DNA, 17 bp, synthetic construct
  source 1..17: mol_type = other DNA
cggggtctctccctggg

SEQ ID NO: 151276 - DNA, 17 bp, synthetic construct
  source 1..17: mol_type = other DNA
gcggggtctctccctgg

SEQ ID NO: 151277 - DNA, 17 bp, synthetic construct
  source 1..17: mol_type = other DNA
agcggggtctctccctg

SEQ ID NO: 151278 - DNA, 17 bp, synthetic construct
  source 1..17: mol_type = other DNA
cagcggggtctctccct

SEQ ID NO: 151279 - DNA, 17 bp, synthetic construct
  source 1..17: mol_type = other DNA
acagcggggtctctccc

SEQ ID NO: 151280 - DNA, 17 bp, synthetic construct
  source 1..17: mol_type = other DNA
gacagcggggtctctcc

SEQ ID NO: 151281 - DNA, 17 bp, synthetic construct
  source 1..17: mol_type = other DNA
agacagcggggtctctc

SEQ ID NO: 151282 - DNA, 17 bp, synthetic construct
  source 1..17: mol_type = other DNA
cagacagcggggtctct

SEQ ID NO: 151283 - DNA, 17 bp, synthetic construct
  source 1..17: mol_type = other DNA
gcagacagcggggtctc

SEQ ID NO: 151284 - DNA, 17 bp, synthetic construct
  source 1..17: mol_type = other DNA
cgcagacagcggggtct

SEQ ID NO: 151285 - DNA, 17 bp, synthetic construct
  source 1..17: mol_type = other DNA
gcgcagacagcggggtc

SEQ ID NO: 151286 - DNA, 17 bp, synthetic construct
  source 1..17: mol_type = other DNA
tgcgcagacagcggggt

SEQ ID NO: 151287 - DNA, 17 bp, synthetic construct
  source 1..17: mol_type = other DNA
ctgcgcagacagcgggg

SEQ ID NO: 151288 - DNA, 17 bp, synthetic construct
  source 1..17: mol_type = other DNA
cctgcgcagacagcggg

SEQ ID NO: 151289 - DNA, 17 bp, synthetic construct
  source 1..17: mol_type = other DNA
ccctgcgcagacagcgg

SEQ ID NO: 151290 - DNA, 17 bp, synthetic construct
  source 1..17: mol_type = other DNA
tccctgcgcagacagcg

SEQ ID NO: 151291 - DNA, 17 bp, synthetic construct
  source 1..17: mol_type = other DNA
ctccctgcgcagacagc

SEQ ID NO: 151292 - DNA, 17 bp, synthetic construct
  source 1..17: mol_type = other DNA
cctccctgcgcagacag

SEQ ID NO: 151293 - DNA, 17 bp, synthetic construct
  source 1..17: mol_type = other DNA
tcctccctgcgcagaca

SEQ ID NO: 151294 - DNA, 17 bp, synthetic construct
  source 1..17: mol_type = other DNA
ctcctccctgcgcagac

SEQ ID NO: 151295 - DNA, 17 bp, synthetic construct
  source 1..17: mol_type = other DNA
gctcctccctgcgcaga

SEQ ID NO: 151296 - DNA, 17 bp, synthetic construct
  source 1..17: mol_type = other DNA
agctcctccctgcgcag

SEQ ID NO: 151297 - DNA, 17 bp, synthetic construct
  source 1..17: mol_type = other DNA
cagctcctccctgcgca

SEQ ID NO: 151298 - DNA, 17 bp, synthetic construct
  source 1..17: mol_type = other DNA
gcagctcctccctgcgc

SEQ ID NO: 151299 - DNA, 17 bp, synthetic construct
  source 1..17: mol_type = other DNA
ggcagctcctccctgcg

SEQ ID NO: 151300 - DNA, 17 bp, synthetic construct
  source 1..17: mol_type = other DNA
aggcagctcctccctgc

SEQ ID NO: 151301 - DNA, 17 bp, synthetic construct
  source 1..17: mol_type = other DNA
aaggcagctcctccctg

SEQ ID NO: 151302 - DNA, 17 bp, synthetic construct
  source 1..17: mol_type = other DNA
taaggcagctcctccct

SEQ ID NO: 151303 - DNA, 17 bp, synthetic construct
  source 1..17: mol_type = other DNA
gtaaggcagctcctccc

SEQ ID NO: 151304 - DNA, 17 bp, synthetic construct
  source 1..17: mol_type = other DNA
tgtaaggcagctcctcc

SEQ ID NO: 151305 - DNA, 17 bp, synthetic construct
  source 1..17: mol_type = other DNA
ctgtaaggcagctcctc

SEQ ID NO: 151306 - DNA, 17 bp, synthetic construct
  source 1..17: mol_type = other DNA
gctgtaaggcagctcct

SEQ ID NO: 151307 - DNA, 17 bp, synthetic construct
  source 1..17: mol_type = other DNA
ggctgtaaggcagctcc

SEQ ID NO: 151308 - DNA, 17 bp, synthetic construct
  source 1..17: mol_type = other DNA
cggctgtaaggcagctc

SEQ ID NO: 151309 - DNA, 17 bp, synthetic construct
  source 1..17: mol_type = other DNA
gcggctgtaaggcagct

SEQ ID NO: 151310 - DNA, 17 bp, synthetic construct
  source 1..17: mol_type = other DNA
tgcggctgtaaggcagc

SEQ ID NO: 151311 - DNA, 17 bp, synthetic construct
  source 1..17: mol_type = other DNA
gtgcggctgtaaggcag

SEQ ID NO: 151312 - DNA, 17 bp, synthetic construct
  source 1..17: mol_type = other DNA
agtgcggctgtaaggca

SEQ ID NO: 151313 - DNA, 17 bp, synthetic construct
  source 1..17: mol_type = other DNA
cagtgcggctgtaaggc

SEQ ID NO: 151314 - DNA, 17 bp, synthetic construct
  source 1..17: mol_type = other DNA
ccagtgcggctgtaagg

SEQ ID NO: 151315 - DNA, 17 bp, synthetic construct
  source 1..17: mol_type = other DNA
gccagtgcggctgtaag

SEQ ID NO: 151316 - DNA, 17 bp, synthetic construct
  source 1..17: mol_type = other DNA
ggccagtgcggctgtaa

SEQ ID NO: 151317 - DNA, 17 bp, synthetic construct
  source 1..17: mol_type = other DNA
aggccagtgcggctgta

SEQ ID NO: 151318 - DNA, 17 bp, synthetic construct
  source 1..17: mol_type = other DNA
gaggccagtgcggctgt

SEQ ID NO: 151319 - DNA, 17 bp, synthetic construct
  source 1..17: mol_type = other DNA
ggaggccagtgcggctg

SEQ ID NO: 151320 - DNA, 17 bp, synthetic construct
  source 1..17: mol_type = other DNA
aggaggccagtgcggct

SEQ ID NO: 151321 - DNA, 17 bp, synthetic construct
  source 1..17: mol_type = other DNA
caggaggccagtgcggc

SEQ ID NO: 151322 - DNA, 17 bp, synthetic construct
  source 1..17: mol_type = other DNA
ccaggaggccagtgcgg

SEQ ID NO: 151323 - DNA, 17 bp, synthetic construct
  source 1..17: mol_type = other DNA
accaggaggccagtgcg

SEQ ID NO: 151324 - DNA, 17 bp, synthetic construct
  source 1..17: mol_type = other DNA
caccaggaggccagtgc

SEQ ID NO: 151325 - DNA, 17 bp, synthetic construct
  source 1..17: mol_type = other DNA
ccaccaggaggccagtg

SEQ ID NO: 151326 - DNA, 17 bp, synthetic construct
  source 1..17: mol_type = other DNA
tccaccaggaggccagt

SEQ ID NO: 151327 - DNA, 17 bp, synthetic construct
  source 1..17: mol_type = other DNA
ctccaccaggaggccag

SEQ ID NO: 151328 - DNA, 17 bp, synthetic construct
  source 1..17: mol_type = other DNA
gctccaccaggaggcca

SEQ ID NO: 151329 - DNA, 17 bp, synthetic construct
  source 1..17: mol_type = other DNA
tgctccaccaggaggcc

SEQ ID NO: 151330 - DNA, 17 bp, synthetic construct
  source 1..17: mol_type = other DNA
ctgctccaccaggaggc

SEQ ID NO: 151331 - DNA, 17 bp, synthetic construct
  source 1..17: mol_type = other DNA
tctgctccaccaggagg

SEQ ID NO: 151332 - DNA, 17 bp, synthetic construct
  source 1..17: mol_type = other DNA
ctctgctccaccaggag

SEQ ID NO: 151333 - DNA, 17 bp, synthetic construct
  source 1..17: mol_type = other DNA
gctctgctccaccagga

SEQ ID NO: 151334 - DNA, 17 bp, synthetic construct
  source 1..17: mol_type = other DNA
cgctctgctccaccagg

SEQ ID NO: 151335 - DNA, 17 bp, synthetic construct
  source 1..17: mol_type = other DNA
ccgctctgctccaccag

SEQ ID NO: 151336 - DNA, 17 bp, synthetic construct
  source 1..17: mol_type = other DNA
cccgctctgctccacca

SEQ ID NO: 151337 - DNA, 17 bp, synthetic construct
  source 1..17: mol_type = other DNA
ccccgctctgctccacc

SEQ ID NO: 151338 - DNA, 17 bp, synthetic construct
  source 1..17: mol_type = other DNA
tccccgctctgctccac

SEQ ID NO: 151339 - DNA, 17 bp, synthetic construct
  source 1..17: mol_type = other DNA
gtccccgctctgctcca

SEQ ID NO: 151340 - DNA, 17 bp, synthetic construct
  source 1..17: mol_type = other DNA
agtccccgctctgctcc

SEQ ID NO: 151341 - DNA, 17 bp, synthetic construct
  source 1..17: mol_type = other DNA
tagtccccgctctgctc

SEQ ID NO: 151342 - DNA, 17 bp, synthetic construct
  source 1..17: mol_type = other DNA
gtagtccccgctctgct

SEQ ID NO: 151343 - DNA, 17 bp, synthetic construct
  source 1..17: mol_type = other DNA
tgtagtccccgctctgc

SEQ ID NO: 151344 - DNA, 17 bp, synthetic construct
  source 1..17: mol_type = other DNA
atgtagtccccgctctg

SEQ ID NO: 151345 - DNA, 17 bp, synthetic construct
  source 1..17: mol_type = other DNA
gatgtagtccccgctct

SEQ ID NO: 151346 - DNA, 17 bp, synthetic construct
  source 1..17: mol_type = other DNA
tgatgtagtccccgctc

SEQ ID NO: 151347 - DNA, 17 bp, synthetic construct
  source 1..17: mol_type = other DNA
ttgatgtagtccccgct

SEQ ID NO: 151348 - DNA, 17 bp, synthetic construct
  source 1..17: mol_type = other DNA
cttgatgtagtccccgc

SEQ ID NO: 151349 - DNA, 17 bp, synthetic construct
  source 1..17: mol_type = other DNA
ccttgatgtagtccccg

SEQ ID NO: 151350 - DNA, 17 bp, synthetic construct
  source 1..17: mol_type = other DNA
accttgatgtagtcccc

SEQ ID NO: 151351 - DNA, 17 bp, synthetic construct
  source 1..17: mol_type = other DNA
gaccttgatgtagtccc

SEQ ID NO: 151352 - DNA, 17 bp, synthetic construct
  source 1..17: mol_type = other DNA
tgaccttgatgtagtcc

SEQ ID NO: 151353 - DNA, 17 bp, synthetic construct
  source 1..17: mol_type = other DNA
ctgaccttgatgtagtc

SEQ ID NO: 151354 - DNA, 17 bp, synthetic construct
  source 1..17: mol_type = other DNA
gctgaccttgatgtagt

SEQ ID NO: 151355 - DNA, 17 bp, synthetic construct
  source 1..17: mol_type = other DNA
tgctgaccttgatgtag

SEQ ID NO: 151356 - DNA, 17 bp, synthetic construct
  source 1..17: mol_type = other DNA
atgctgaccttgatgta

SEQ ID NO: 151357 - DNA, 17 bp, synthetic construct
  source 1..17: mol_type = other DNA
gatgctgaccttgatgt

SEQ ID NO: 151358 - DNA, 17 bp, synthetic construct
  source 1..17: mol_type = other DNA
ggatgctgaccttgatg

SEQ ID NO: 151359 - DNA, 17 bp, synthetic construct
  source 1..17: mol_type = other DNA
cggatgctgaccttgat

SEQ ID NO: 151360 - DNA, 17 bp, synthetic construct
  source 1..17: mol_type = other DNA
ccggatgctgaccttga

SEQ ID NO: 151361 - DNA, 17 bp, synthetic construct
  source 1..17: mol_type = other DNA
gccggatgctgaccttg

SEQ ID NO: 151362 - DNA, 17 bp, synthetic construct
  source 1..17: mol_type = other DNA
agccggatgctgacctt

SEQ ID NO: 151363 - DNA, 17 bp, synthetic construct
  source 1..17: mol_type = other DNA
cagccggatgctgacct

SEQ ID NO: 151364 - DNA, 17 bp, synthetic construct
  source 1..17: mol_type = other DNA
ccagccggatgctgacc

SEQ ID NO: 151365 - DNA, 17 bp, synthetic construct
  source 1..17: mol_type = other DNA
accagccggatgctgac

SEQ ID NO: 151366 - DNA, 17 bp, synthetic construct
  source 1..17: mol_type = other DNA
caccagccggatgctga

SEQ ID NO: 151367 - DNA, 17 bp, synthetic construct
  source 1..17: mol_type = other DNA
gcaccagccggatgctg

SEQ ID NO: 151368 - DNA, 17 bp, synthetic construct
  source 1..17: mol_type = other DNA
agcaccagccggatgct

SEQ ID NO: 151369 - DNA, 17 bp, synthetic construct
  source 1..17: mol_type = other DNA
cagcaccagccggatgc

SEQ ID NO: 151370 - DNA, 17 bp, synthetic construct
  source 1..17: mol_type = other DNA
tcagcaccagccggatg

SEQ ID NO: 151371 - DNA, 17 bp, synthetic construct
  source 1..17: mol_type = other DNA
gtcagcaccagccggat

SEQ ID NO: 151372 - DNA, 17 bp, synthetic construct
  source 1..17: mol_type = other DNA
tgtcagcaccagccgga

SEQ ID NO: 151373 - DNA, 17 bp, synthetic construct
  source 1..17: mol_type = other DNA
atgtcagcaccagccgg

SEQ ID NO: 151374 - DNA, 17 bp, synthetic construct
  source 1..17: mol_type = other DNA
aatgtcagcaccagccg

SEQ ID NO: 151375 - DNA, 17 bp, synthetic construct
  source 1..17: mol_type = other DNA
gaatgtcagcaccagcc

SEQ ID NO: 151376 - DNA, 17 bp, synthetic construct
  source 1..17: mol_type = other DNA
ggaatgtcagcaccagc

SEQ ID NO: 151377 - DNA, 17 bp, synthetic construct
  source 1..17: mol_type = other DNA
aggaatgtcagcaccag

SEQ ID NO: 151378 - DNA, 17 bp, synthetic construct
  source 1..17: mol_type = other DNA
caggaatgtcagcacca

SEQ ID NO: 151379 - DNA, 17 bp, synthetic construct
  source 1..17: mol_type = other DNA
acaggaatgtcagcacc

SEQ ID NO: 151380 - DNA, 17 bp, synthetic construct
  source 1..17: mol_type = other DNA
cacaggaatgtcagcac

SEQ ID NO: 151381 - DNA, 17 bp, synthetic construct
  source 1..17: mol_type = other DNA
ccacaggaatgtcagca

SEQ ID NO: 151382 - DNA, 17 bp, synthetic construct
  source 1..17: mol_type = other DNA
tccacaggaatgtcagc

SEQ ID NO: 151383 - DNA, 17 bp, synthetic construct
  source 1..17: mol_type = other DNA
ttccacaggaatgtcag

SEQ ID NO: 151384 - DNA, 17 bp, synthetic construct
  source 1..17: mol_type = other DNA
gttccacaggaatgtca

SEQ ID NO: 151385 - DNA, 17 bp, synthetic construct
  source 1..17: mol_type = other DNA
cgttccacaggaatgtc

SEQ ID NO: 151386 - DNA, 17 bp, synthetic construct
  source 1..17: mol_type = other DNA
ccgttccacaggaatgt

SEQ ID NO: 151387 - DNA, 17 bp, synthetic construct
  source 1..17: mol_type = other DNA
tccgttccacaggaatg

SEQ ID NO: 151388 - DNA, 17 bp, synthetic construct
  source 1..17: mol_type = other DNA
ctccgttccacaggaat

SEQ ID NO: 151389 - DNA, 17 bp, synthetic construct
  source 1..17: mol_type = other DNA
tctccgttccacaggaa

SEQ ID NO: 151390 - DNA, 17 bp, synthetic construct
  source 1..17: mol_type = other DNA
ctctccgttccacagga

SEQ ID NO: 151391 - DNA, 17 bp, synthetic construct
  source 1..17: mol_type = other DNA
cctctccgttccacagg

SEQ ID NO: 151392 - DNA, 17 bp, synthetic construct
  source 1..17: mol_type = other DNA
tcctctccgttccacag

SEQ ID NO: 151393 - DNA, 17 bp, synthetic construct
  source 1..17: mol_type = other DNA
gtcctctccgttccaca

SEQ ID NO: 151394 - DNA, 17 bp, synthetic construct
  source 1..17: mol_type = other DNA
tgtcctctccgttccac

SEQ ID NO: 151395 - DNA, 17 bp, synthetic construct
  source 1..17: mol_type = other DNA
ctgtcctctccgttcca

SEQ ID NO: 151396 - DNA, 17 bp, synthetic construct
  source 1..17: mol_type = other DNA
actgtcctctccgttcc

SEQ ID NO: 151397 - DNA, 17 bp, synthetic construct
  source 1..17: mol_type = other DNA
cactgtcctctccgttc

SEQ ID NO: 151398 - DNA, 17 bp, synthetic construct
  source 1..17: mol_type = other DNA
gcactgtcctctccgtt

SEQ ID NO: 151399 - DNA, 17 bp, synthetic construct
  source 1..17: mol_type = other DNA
ggcactgtcctctccgt

SEQ ID NO: 151400 - DNA, 17 bp, synthetic construct
  source 1..17: mol_type = other DNA
gggcactgtcctctccg

SEQ ID NO: 151401 - DNA, 17 bp, synthetic construct
  source 1..17: mol_type = other DNA
agggcactgtcctctcc

SEQ ID NO: 151402 - DNA, 17 bp, synthetic construct
  source 1..17: mol_type = other DNA
cagggcactgtcctctc

SEQ ID NO: 151403 - DNA, 17 bp, synthetic construct
  source 1..17: mol_type = other DNA
ccagggcactgtcctct

SEQ ID NO: 151404 - DNA, 17 bp, synthetic construct
  source 1..17: mol_type = other DNA
accagggcactgtcctc

SEQ ID NO: 151405 - DNA, 17 bp, synthetic construct
  source 1..17: mol_type = other DNA
caccagggcactgtcct

SEQ ID NO: 151406 - DNA, 17 bp, synthetic construct
  source 1..17: mol_type = other DNA
tcaccagggcactgtcc

SEQ ID NO: 151407 - DNA, 17 bp, synthetic construct
  source 1..17: mol_type = other DNA
ctcaccagggcactgtc

SEQ ID NO: 151408 - DNA, 17 bp, synthetic construct
  source 1..17: mol_type = other DNA
cctcaccagggcactgt

SEQ ID NO: 151409 - DNA, 17 bp, synthetic construct
  source 1..17: mol_type = other DNA
tcctcaccagggcactg

SEQ ID NO: 151410 - DNA, 17 bp, synthetic construct
  source 1..17: mol_type = other DNA
ttcctcaccagggcact

SEQ ID NO: 151411 - DNA, 17 bp, synthetic construct
  source 1..17: mol_type = other DNA
cttcctcaccagggcac

SEQ ID NO: 151412 - DNA, 17 bp, synthetic construct
  source 1..17: mol_type = other DNA
gcttcctcaccagggca

SEQ ID NO: 151413 - DNA, 17 bp, synthetic construct
  source 1..17: mol_type = other DNA
ggcttcctcaccagggc

SEQ ID NO: 151414 - DNA, 17 bp, synthetic construct
  source 1..17: mol_type = other DNA
gggcttcctcaccaggg

SEQ ID NO: 151415 - DNA, 17 bp, synthetic construct
  source 1..17: mol_type = other DNA
ggggcttcctcaccagg

SEQ ID NO: 151416 - DNA, 17 bp, synthetic construct
  source 1..17: mol_type = other DNA
gggggcttcctcaccag

SEQ ID NO: 151417 - DNA, 17 bp, synthetic construct
  source 1..17: mol_type = other DNA
agggggcttcctcacca

SEQ ID NO: 151418 - DNA, 17 bp, synthetic construct
  source 1..17: mol_type = other DNA
gagggggcttcctcacc

SEQ ID NO: 151419 - DNA, 17 bp, synthetic construct
  source 1..17: mol_type = other DNA
cgagggggcttcctcac

SEQ ID NO: 151420 - DNA, 17 bp, synthetic construct
  source 1..17: mol_type = other DNA
gcgagggggcttcctca

SEQ ID NO: 151421 - DNA, 17 bp, synthetic construct
  source 1..17: mol_type = other DNA
ggcgagggggcttcctc

SEQ ID NO: 151422 - DNA, 17 bp, synthetic construct
  source 1..17: mol_type = other DNA
gggcgagggggcttcct

SEQ ID NO: 151423 - DNA, 17 bp, synthetic construct
  source 1..17: mol_type = other DNA
ggggcgagggggcttcc

SEQ ID NO: 151424 - DNA, 17 bp, synthetic construct
  source 1..17: mol_type = other DNA
aggggcgagggggcttc

SEQ ID NO: 151425 - DNA, 17 bp, synthetic construct
  source 1..17: mol_type = other DNA
aaggggcgagggggctt

SEQ ID NO: 151426 - DNA, 17 bp, synthetic construct
  source 1..17: mol_type = other DNA
caaggggcgagggggct

SEQ ID NO: 151427 - DNA, 17 bp, synthetic construct
  source 1..17: mol_type = other DNA
gcaaggggcgagggggc

SEQ ID NO: 151428 - DNA, 17 bp, synthetic construct
  source 1..17: mol_type = other DNA
ggcaaggggcgaggggg

SEQ ID NO: 151429 - DNA, 17 bp, synthetic construct
  source 1..17: mol_type = other DNA
gggcaaggggcgagggg

SEQ ID NO: 151430 - DNA, 17 bp, synthetic construct
  source 1..17: mol_type = other DNA
ggggcaaggggcgaggg

SEQ ID NO: 151431 - DNA, 17 bp, synthetic construct
  source 1..17: mol_type = other DNA
aggggcaaggggcgagg

SEQ ID NO: 151432 - DNA, 17 bp, synthetic construct
  source 1..17: mol_type = other DNA
aaggggcaaggggcgag

SEQ ID NO: 151433 - DNA, 17 bp, synthetic construct
  source 1..17: mol_type = other DNA
gaaggggcaaggggcga

SEQ ID NO: 151434 - DNA, 17 bp, synthetic construct
  source 1..17: mol_type = other DNA
tgaaggggcaaggggcg

SEQ ID NO: 151435 - DNA, 17 bp, synthetic construct
  source 1..17: mol_type = other DNA
ctgaaggggcaaggggc

SEQ ID NO: 151436 - DNA, 17 bp, synthetic construct
  source 1..17: mol_type = other DNA
cctgaaggggcaagggg

SEQ ID NO: 151437 - DNA, 17 bp, synthetic construct
  source 1..17: mol_type = other DNA
gcctgaaggggcaaggg

SEQ ID NO: 151438 - DNA, 17 bp, synthetic construct
  source 1..17: mol_type = other DNA
ggcctgaaggggcaagg

SEQ ID NO: 151439 - DNA, 17 bp, synthetic construct
  source 1..17: mol_type = other DNA
aggcctgaaggggcaag

SEQ ID NO: 151440 - DNA, 17 bp, synthetic construct
  source 1..17: mol_type = other DNA
caggcctgaaggggcaa

SEQ ID NO: 151441 - DNA, 17 bp, synthetic construct
  source 1..17: mol_type = other DNA
ccaggcctgaaggggca

SEQ ID NO: 151442 - DNA, 17 bp, synthetic construct
  source 1..17: mol_type = other DNA
gccaggcctgaaggggc

SEQ ID NO: 151443 - DNA, 17 bp, synthetic construct
  source 1..17: mol_type = other DNA
ggccaggcctgaagggg

SEQ ID NO: 151444 - DNA, 17 bp, synthetic construct
  source 1..17: mol_type = other DNA
tggccaggcctgaaggg

SEQ ID NO: 151445 - DNA, 17 bp, synthetic construct
  source 1..17: mol_type = other DNA
gtggccaggcctgaagg

SEQ ID NO: 151446 - DNA, 17 bp, synthetic construct
  source 1..17: mol_type = other DNA
tgtggccaggcctgaag

SEQ ID NO: 151447 - DNA, 17 bp, synthetic construct
  source 1..17: mol_type = other DNA
ttgtggccaggcctgaa

SEQ ID NO: 151448 - DNA, 17 bp, synthetic construct
  source 1..17: mol_type = other DNA
tttgtggccaggcctga

SEQ ID NO: 151449 - DNA, 17 bp, synthetic construct
  source 1..17: mol_type = other DNA
ttttgtggccaggcctg

SEQ ID NO: 151450 - DNA, 17 bp, synthetic construct
  source 1..17: mol_type = other DNA
gttttgtggccaggcct

SEQ ID NO: 151451 - DNA, 17 bp, synthetic construct
  source 1..17: mol_type = other DNA
ggttttgtggccaggcc

SEQ ID NO: 151452 - DNA, 17 bp, synthetic construct
  source 1..17: mol_type = other DNA
gggttttgtggccaggc

SEQ ID NO: 151453 - DNA, 17 bp, synthetic construct
  source 1..17: mol_type = other DNA
ggggttttgtggccagg

SEQ ID NO: 151454 - DNA, 17 bp, synthetic construct
  source 1..17: mol_type = other DNA
gggggttttgtggccag

SEQ ID NO: 151455 - DNA, 17 bp, synthetic construct
  source 1..17: mol_type = other DNA
tgggggttttgtggcca

SEQ ID NO: 151456 - DNA, 17 bp, synthetic construct
  source 1..17: mol_type = other DNA
gtgggggttttgtggcc

SEQ ID NO: 151457 - DNA, 17 bp, synthetic construct
  source 1..17: mol_type = other DNA
ggtgggggttttgtggc

SEQ ID NO: 151458 - DNA, 17 bp, synthetic construct
  source 1..17: mol_type = other DNA
cggtgggggttttgtgg

SEQ ID NO: 151459 - DNA, 17 bp, synthetic construct
  source 1..17: mol_type = other DNA
ccggtgggggttttgtg

SEQ ID NO: 151460 - DNA, 17 bp, synthetic construct
  source 1..17: mol_type = other DNA
cccggtgggggttttgt

SEQ ID NO: 151461 - DNA, 17 bp, synthetic construct
  source 1..17: mol_type = other DNA
ccccggtgggggttttg

SEQ ID NO: 151462 - DNA, 17 bp, synthetic construct
  source 1..17: mol_type = other DNA
cccccggtgggggtttt

SEQ ID NO: 151463 - DNA, 17 bp, synthetic construct
  source 1..17: mol_type = other DNA
acccccggtgggggttt

SEQ ID NO: 151464 - DNA, 17 bp, synthetic construct
  source 1..17: mol_type = other DNA
gacccccggtgggggtt

SEQ ID NO: 151465 - DNA, 17 bp, synthetic construct
  source 1..17: mol_type = other DNA
cgacccccggtgggggt

SEQ ID NO: 151466 - DNA, 17 bp, synthetic construct
  source 1..17: mol_type = other DNA
tcgacccccggtggggg

SEQ ID NO: 151467 - DNA, 17 bp, synthetic construct
  source 1..17: mol_type = other DNA
ctcgacccccggtgggg

SEQ ID NO: 151468 - DNA, 17 bp, synthetic construct
  source 1..17: mol_type = other DNA
cctcgacccccggtggg

SEQ ID NO: 151469 - DNA, 17 bp, synthetic construct
  source 1..17: mol_type = other DNA
ccctcgacccccggtgg

SEQ ID NO: 151470 - DNA, 17 bp, synthetic construct
  source 1..17: mol_type = other DNA
tccctcgacccccggtg

SEQ ID NO: 151471 - DNA, 17 bp, synthetic construct
  source 1..17: mol_type = other DNA
atccctcgacccccggt

SEQ ID NO: 151472 - DNA, 17 bp, synthetic construct
  source 1..17: mol_type = other DNA
catccctcgacccccgg

SEQ ID NO: 151473 - DNA, 17 bp, synthetic construct
  source 1..17: mol_type = other DNA
gcatccctcgacccccg

SEQ ID NO: 151474 - DNA, 17 bp, synthetic construct
  source 1..17: mol_type = other DNA
ggcatccctcgaccccc

SEQ ID NO: 151475 - DNA, 17 bp, synthetic construct
  source 1..17: mol_type = other DNA
aggcatccctcgacccc

SEQ ID NO: 151476 - DNA, 17 bp, synthetic construct
  source 1..17: mol_type = other DNA
gaggcatccctcgaccc

SEQ ID NO: 151477 - DNA, 17 bp, synthetic construct
  source 1..17: mol_type = other DNA
ggaggcatccctcgacc

SEQ ID NO: 151478 - DNA, 17 bp, synthetic construct
  source 1..17: mol_type = other DNA
gggaggcatccctcgac

SEQ ID NO: 151479 - DNA, 17 bp, synthetic construct
  source 1..17: mol_type = other DNA
agggaggcatccctcga

SEQ ID NO: 151480 - DNA, 17 bp, synthetic construct
  source 1..17: mol_type = other DNA
cagggaggcatccctcg

SEQ ID NO: 151481 - DNA, 17 bp, synthetic construct
  source 1..17: mol_type = other DNA
ccagggaggcatccctc

SEQ ID NO: 151482 - DNA, 17 bp, synthetic construct
  source 1..17: mol_type = other DNA
cccagggaggcatccct

SEQ ID NO: 151483 - DNA, 17 bp, synthetic construct
  source 1..17: mol_type = other DNA
gcccagggaggcatccc

SEQ ID NO: 151484 - DNA, 17 bp, synthetic construct
  source 1..17: mol_type = other DNA
agcccagggaggcatcc

SEQ ID NO: 151485 - DNA, 17 bp, synthetic construct
  source 1..17: mol_type = other DNA
aagcccagggaggcatc

SEQ ID NO: 151486 - DNA, 17 bp, synthetic construct
  source 1..17: mol_type = other DNA
caagcccagggaggcat

SEQ ID NO: 151487 - DNA, 17 bp, synthetic construct
  source 1..17: mol_type = other DNA
ccaagcccagggaggca

SEQ ID NO: 151488 - DNA, 17 bp, synthetic construct
  source 1..17: mol_type = other DNA
cccaagcccagggaggc

SEQ ID NO: 151489 - DNA, 17 bp, synthetic construct
  source 1..17: mol_type = other DNA
ccccaagcccagggagg

SEQ ID NO: 151490 - DNA, 17 bp, synthetic construct
  source 1..17: mol_type = other DNA
accccaagcccagggag

SEQ ID NO: 151491 - DNA, 17 bp, synthetic construct
  source 1..17: mol_type = other DNA
gaccccaagcccaggga

SEQ ID NO: 151492 - DNA, 17 bp, synthetic construct
  source 1..17: mol_type = other DNA
tgaccccaagcccaggg

SEQ ID NO: 151493 - DNA, 17 bp, synthetic construct
  source 1..17: mol_type = other DNA
gtgaccccaagcccagg

SEQ ID NO: 151494 - DNA, 17 bp, synthetic construct
  source 1..17: mol_type = other DNA
cgtgaccccaagcccag

SEQ ID NO: 151495 - DNA, 17 bp, synthetic construct
  source 1..17: mol_type = other DNA
ccgtgaccccaagccca

SEQ ID NO: 151496 - DNA, 17 bp, synthetic construct
  source 1..17: mol_type = other DNA
cccgtgaccccaagccc

SEQ ID NO: 151497 - DNA, 17 bp, synthetic construct
  source 1..17: mol_type = other DNA
ccccgtgaccccaagcc

SEQ ID NO: 151498 - DNA, 17 bp, synthetic construct
  source 1..17: mol_type = other DNA
gccccgtgaccccaagc

SEQ ID NO: 151499 - DNA, 17 bp, synthetic construct
  source 1..17: mol_type = other DNA
agccccgtgaccccaag

SEQ ID NO: 151500 - DNA, 17 bp, synthetic construct
  source 1..17: mol_type = other DNA
aagccccgtgaccccaa

SEQ ID NO: 151501 - DNA, 17 bp, synthetic construct
  source 1..17: mol_type = other DNA
caagccccgtgacccca

SEQ ID NO: 151502 - DNA, 17 bp, synthetic construct
  source 1..17: mol_type = other DNA
ccaagccccgtgacccc

SEQ ID NO: 151503 - DNA, 17 bp, synthetic construct
  source 1..17: mol_type = other DNA
cccaagccccgtgaccc

SEQ ID NO: 151504 - DNA, 17 bp, synthetic construct
  source 1..17: mol_type = other DNA
ccccaagccccgtgacc

SEQ ID NO: 151505 - DNA, 17 bp, synthetic construct
  source 1..17: mol_type = other DNA
gccccaagccccgtgac

SEQ ID NO: 151506 - DNA, 17 bp, synthetic construct
  source 1..17: mol_type = other DNA
tgccccaagccccgtga

SEQ ID NO: 151507 - DNA, 17 bp, synthetic construct
  source 1..17: mol_type = other DNA
atgccccaagccccgtg

SEQ ID NO: 151508 - DNA, 17 bp, synthetic construct
  source 1..17: mol_type = other DNA
catgccccaagccccgt

SEQ ID NO: 151509 - DNA, 17 bp, synthetic construct
  source 1..17: mol_type = other DNA
acatgccccaagccccg

SEQ ID NO: 151510 - DNA, 17 bp, synthetic construct
  source 1..17: mol_type = other DNA
aacatgccccaagcccc

SEQ ID NO: 151511 - DNA, 17 bp, synthetic construct
  source 1..17: mol_type = other DNA
caacatgccccaagccc

SEQ ID NO: 151512 - DNA, 17 bp, synthetic construct
  source 1..17: mol_type = other DNA
gcaacatgccccaagcc

SEQ ID NO: 151513 - DNA, 17 bp, synthetic construct
  source 1..17: mol_type = other DNA
ggcaacatgccccaagc

SEQ ID NO: 151514 - DNA, 17 bp, synthetic construct
  source 1..17: mol_type = other DNA
tggcaacatgccccaag

SEQ ID NO: 151515 - DNA, 17 bp, synthetic construct
  source 1..17: mol_type = other DNA
ctggcaacatgccccaa

SEQ ID NO: 151516 - DNA, 17 bp, synthetic construct
  source 1..17: mol_type = other DNA
actggcaacatgcccca

SEQ ID NO: 151517 - DNA, 17 bp, synthetic construct
  source 1..17: mol_type = other DNA
cactggcaacatgcccc

SEQ ID NO: 151518 - DNA, 17 bp, synthetic construct
  source 1..17: mol_type = other DNA
acactggcaacatgccc

SEQ ID NO: 151519 - DNA, 17 bp, synthetic construct
  source 1..17: mol_type = other DNA
cacactggcaacatgcc

SEQ ID NO: 151520 - DNA, 17 bp, synthetic construct
  source 1..17: mol_type = other DNA
ccacactggcaacatgc

SEQ ID NO: 151521 - DNA, 17 bp, synthetic construct
  source 1..17: mol_type = other DNA
cccacactggcaacatg

SEQ ID NO: 151522 - DNA, 17 bp, synthetic construct
  source 1..17: mol_type = other DNA
ccccacactggcaacat

SEQ ID NO: 151523 - DNA, 17 bp, synthetic construct
  source 1..17: mol_type = other DNA
tccccacactggcaaca

SEQ ID NO: 151524 - DNA, 17 bp, synthetic construct
  source 1..17: mol_type = other DNA
atccccacactggcaac

SEQ ID NO: 151525 - DNA, 17 bp, synthetic construct
  source 1..17: mol_type = other DNA
gatccccacactggcaa

SEQ ID NO: 151526 - DNA, 17 bp, synthetic construct
  source 1..17: mol_type = other DNA
tgatccccacactggca

SEQ ID NO: 151527 - DNA, 17 bp, synthetic construct
  source 1..17: mol_type = other DNA
ctgatccccacactggc

SEQ ID NO: 151528 - DNA, 17 bp, synthetic construct
  source 1..17: mol_type = other DNA
tctgatccccacactgg

SEQ ID NO: 151529 - DNA, 17 bp, synthetic construct
  source 1..17: mol_type = other DNA
ctctgatccccacactg

SEQ ID NO: 151530 - DNA, 17 bp, synthetic construct
  source 1..17: mol_type = other DNA
cctctgatccccacact

SEQ ID NO: 151531 - DNA, 17 bp, synthetic construct
  source 1..17: mol_type = other DNA
acctctgatccccacac

SEQ ID NO: 151532 - DNA, 17 bp, synthetic construct
  source 1..17: mol_type = other DNA
gacctctgatccccaca

SEQ ID NO: 151533 - DNA, 17 bp, synthetic construct
  source 1..17: mol_type = other DNA
ggacctctgatccccac

SEQ ID NO: 151534 - DNA, 17 bp, synthetic construct
  source 1..17: mol_type = other DNA
aggacctctgatcccca

SEQ ID NO: 151535 - DNA, 17 bp, synthetic construct
  source 1..17: mol_type = other DNA
caggacctctgatcccc

SEQ ID NO: 151536 - DNA, 17 bp, synthetic construct
  source 1..17: mol_type = other DNA
tcaggacctctgatccc

SEQ ID NO: 151537 - DNA, 17 bp, synthetic construct
  source 1..17: mol_type = other DNA
ctcaggacctctgatcc

SEQ ID NO: 151538 - DNA, 17 bp, synthetic construct
  source 1..17: mol_type = other DNA
cctcaggacctctgatc

SEQ ID NO: 151539 - DNA, 17 bp, synthetic construct
  source 1..17: mol_type = other DNA
gcctcaggacctctgat

SEQ ID NO: 151540 - DNA, 17 bp, synthetic construct
  source 1..17: mol_type = other DNA
agcctcaggacctctga

SEQ ID NO: 151541 - DNA, 17 bp, synthetic construct
  source 1..17: mol_type = other DNA
cagcctcaggacctctg

SEQ ID NO: 151542 - DNA, 17 bp, synthetic construct
  source 1..17: mol_type = other DNA
ccagcctcaggacctct

SEQ ID NO: 151543 - DNA, 17 bp, synthetic construct
  source 1..17: mol_type = other DNA
tccagcctcaggacctc

SEQ ID NO: 151544 - DNA, 17 bp, synthetic construct
  source 1..17: mol_type = other DNA
ctccagcctcaggacct

SEQ ID NO: 151545 - DNA, 17 bp, synthetic construct
  source 1..17: mol_type = other DNA
gctccagcctcaggacc

SEQ ID NO: 151546 - DNA, 17 bp, synthetic construct
  source 1..17: mol_type = other DNA
agctccagcctcaggac

SEQ ID NO: 151547 - DNA, 17 bp, synthetic construct
  source 1..17: mol_type = other DNA
cagctccagcctcagga

SEQ ID NO: 151548 - DNA, 17 bp, synthetic construct
  source 1..17: mol_type = other DNA
gcagctccagcctcagg

SEQ ID NO: 151549 - DNA, 17 bp, synthetic construct
  source 1..17: mol_type = other DNA
ggcagctccagcctcag

SEQ ID NO: 151550 - DNA, 17 bp, synthetic construct
  source 1..17: mol_type = other DNA
gggcagctccagcctca

SEQ ID NO: 151551 - DNA, 17 bp, synthetic construct
  source 1..17: mol_type = other DNA
ggggcagctccagcctc

SEQ ID NO: 151552 - DNA, 17 bp, synthetic construct
  source 1..17: mol_type = other DNA
aggggcagctccagcct

SEQ ID NO: 151553 - DNA, 17 bp, synthetic construct
  source 1..17: mol_type = other DNA
gaggggcagctccagcc

SEQ ID NO: 151554 - DNA, 17 bp, synthetic construct
  source 1..17: mol_type = other DNA
ggaggggcagctccagc

SEQ ID NO: 151555 - DNA, 17 bp, synthetic construct
  source 1..17: mol_type = other DNA
gggaggggcagctccag

SEQ ID NO: 151556 - DNA, 17 bp, synthetic construct
  source 1..17: mol_type = other DNA
ggggaggggcagctcca

SEQ ID NO: 151557 - DNA, 17 bp, synthetic construct
  source 1..17: mol_type = other DNA
tggggaggggcagctcc

SEQ ID NO: 151558 - DNA, 17 bp, synthetic construct
  source 1..17: mol_type = other DNA
gtggggaggggcagctc

SEQ ID NO: 151559 - DNA, 17 bp, synthetic construct
  source 1..17: mol_type = other DNA
agtggggaggggcagct

SEQ ID NO: 151560 - DNA, 17 bp, synthetic construct
  source 1..17: mol_type = other DNA
gagtggggaggggcagc

SEQ ID NO: 151561 - DNA, 17 bp, synthetic construct
  source 1..17: mol_type = other DNA
agagtggggaggggcag

SEQ ID NO: 151562 - DNA, 17 bp, synthetic construct
  source 1..17: mol_type = other DNA
gagagtggggaggggca

SEQ ID NO: 151563 - DNA, 17 bp, synthetic construct
  source 1..17: mol_type = other DNA
tgagagtggggaggggc

SEQ ID NO: 151564 - DNA, 17 bp, synthetic construct
  source 1..17: mol_type = other DNA
ctgagagtggggagggg

SEQ ID NO: 151565 - DNA, 17 bp, synthetic construct
  source 1..17: mol_type = other DNA
gctgagagtggggaggg

SEQ ID NO: 151566 - DNA, 17 bp, synthetic construct
  source 1..17: mol_type = other DNA
agctgagagtggggagg

SEQ ID NO: 151567 - DNA, 17 bp, synthetic construct
  source 1..17: mol_type = other DNA
cagctgagagtggggag

SEQ ID NO: 151568 - DNA, 17 bp, synthetic construct
  source 1..17: mol_type = other DNA
ccagctgagagtgggga

SEQ ID NO: 151569 - DNA, 17 bp, synthetic construct
  source 1..17: mol_type = other DNA
tccagctgagagtgggg

SEQ ID NO: 151570 - DNA, 17 bp, synthetic construct
  source 1..17: mol_type = other DNA
ctccagctgagagtggg

SEQ ID NO: 151571 - DNA, 17 bp, synthetic construct
  source 1..17: mol_type = other DNA
gctccagctgagagtgg

SEQ ID NO: 151572 - DNA, 17 bp, synthetic construct
  source 1..17: mol_type = other DNA
agctccagctgagagtg

SEQ ID NO: 151573 - DNA, 17 bp, synthetic construct
  source 1..17: mol_type = other DNA
cagctccagctgagagt

SEQ ID NO: 151574 - DNA, 17 bp, synthetic construct
  source 1..17: mol_type = other DNA
ccagctccagctgagag

SEQ ID NO: 151575 - DNA, 17 bp, synthetic construct
  source 1..17: mol_type = other DNA
tccagctccagctgaga

SEQ ID NO: 151576 - DNA, 17 bp, synthetic construct
  source 1..17: mol_type = other DNA
atccagctccagctgag

SEQ ID NO: 151577 - DNA, 17 bp, synthetic construct
  source 1..17: mol_type = other DNA
gatccagctccagctga

SEQ ID NO: 151578 - DNA, 17 bp, synthetic construct
  source 1..17: mol_type = other DNA
ggatccagctccagctg

SEQ ID NO: 151579 - DNA, 17 bp, synthetic construct
  source 1..17: mol_type = other DNA
gggatccagctccagct

SEQ ID NO: 151580 - DNA, 17 bp, synthetic construct
  source 1..17: mol_type = other DNA
tgggatccagctccagc

SEQ ID NO: 151581 - DNA, 17 bp, synthetic construct
  source 1..17: mol_type = other DNA
ttgggatccagctccag

SEQ ID NO: 151582 - DNA, 17 bp, synthetic construct
  source 1..17: mol_type = other DNA
tttgggatccagctcca

SEQ ID NO: 151583 - DNA, 17 bp, synthetic construct
  source 1..17: mol_type = other DNA
atttgggatccagctcc

SEQ ID NO: 151584 - DNA, 17 bp, synthetic construct
  source 1..17: mol_type = other DNA
tatttgggatccagctc

SEQ ID NO: 151585 - DNA, 17 bp, synthetic construct
  source 1..17: mol_type = other DNA
gtatttgggatccagct

SEQ ID NO: 151586 - DNA, 17 bp, synthetic construct
  source 1..17: mol_type = other DNA
cgtatttgggatccagc

SEQ ID NO: 151587 - DNA, 17 bp, synthetic construct
  source 1..17: mol_type = other DNA
gcgtatttgggatccag

SEQ ID NO: 151588 - DNA, 17 bp, synthetic construct
  source 1..17: mol_type = other DNA
ggcgtatttgggatcca

SEQ ID NO: 151589 - DNA, 17 bp, synthetic construct
  source 1..17: mol_type = other DNA
tggcgtatttgggatcc

SEQ ID NO: 151590 - DNA, 17 bp, synthetic construct
  source 1..17: mol_type = other DNA
ttggcgtatttgggatc

SEQ ID NO: 151591 - DNA, 17 bp, synthetic construct
  source 1..17: mol_type = other DNA
gttggcgtatttgggat

SEQ ID NO: 151592 - DNA, 17 bp, synthetic construct
  source 1..17: mol_type = other DNA
ggttggcgtatttggga

SEQ ID NO: 151593 - DNA, 17 bp, synthetic construct
  source 1..17: mol_type = other DNA
tggttggcgtatttggg

SEQ ID NO: 151594 - DNA, 17 bp, synthetic construct
  source 1..17: mol_type = other DNA
ctggttggcgtatttgg

SEQ ID NO: 151595 - DNA, 17 bp, synthetic construct
  source 1..17: mol_type = other DNA
tctggttggcgtatttg

SEQ ID NO: 151596 - DNA, 17 bp, synthetic construct
  source 1..17: mol_type = other DNA
gtctggttggcgtattt

SEQ ID NO: 151597 - DNA, 17 bp, synthetic construct
  source 1..17: mol_type = other DNA
ggtctggttggcgtatt

SEQ ID NO: 151598 - DNA, 17 bp, synthetic construct
  source 1..17: mol_type = other DNA
aggtctggttggcgtat

SEQ ID NO: 151599 - DNA, 17 bp, synthetic construct
  source 1..17: mol_type = other DNA
caggtctggttggcgta

SEQ ID NO: 151600 - DNA, 17 bp, synthetic construct
  source 1..17: mol_type = other DNA
acaggtctggttggcgt

SEQ ID NO: 151601 - DNA, 17 bp, synthetic construct
  source 1..17: mol_type = other DNA
cacaggtctggttggcg

SEQ ID NO: 151602 - DNA, 17 bp, synthetic construct
  source 1..17: mol_type = other DNA
ccacaggtctggttggc

SEQ ID NO: 151603 - DNA, 17 bp, synthetic construct
  source 1..17: mol_type = other DNA
gccacaggtctggttgg

SEQ ID NO: 151604 - DNA, 17 bp, synthetic construct
  source 1..17: mol_type = other DNA
ggccacaggtctggttg

SEQ ID NO: 151605 - DNA, 17 bp, synthetic construct
  source 1..17: mol_type = other DNA
aggccacaggtctggtt

SEQ ID NO: 151606 - DNA, 17 bp, synthetic construct
  source 1..17: mol_type = other DNA
caggccacaggtctggt

SEQ ID NO: 151607 - DNA, 17 bp, synthetic construct
  source 1..17: mol_type = other DNA
acaggccacaggtctgg

SEQ ID NO: 151608 - DNA, 17 bp, synthetic construct
  source 1..17: mol_type = other DNA
cacaggccacaggtctg

SEQ ID NO: 151609 - DNA, 17 bp, synthetic construct
  source 1..17: mol_type = other DNA
acacaggccacaggtct

SEQ ID NO: 151610 - DNA, 17 bp, synthetic construct
  source 1..17: mol_type = other DNA
cacacaggccacaggtc

SEQ ID NO: 151611 - DNA, 17 bp, synthetic construct
  source 1..17: mol_type = other DNA
ccacacaggccacaggt

SEQ ID NO: 151612 - DNA, 17 bp, synthetic construct
  source 1..17: mol_type = other DNA
cccacacaggccacagg

SEQ ID NO: 151613 - DNA, 17 bp, synthetic construct
  source 1..17: mol_type = other DNA
ccccacacaggccacag

SEQ ID NO: 151614 - DNA, 17 bp, synthetic construct
  source 1..17: mol_type = other DNA
tccccacacaggccaca

SEQ ID NO: 151615 - DNA, 17 bp, synthetic construct
  source 1..17: mol_type = other DNA
gtccccacacaggccac

SEQ ID NO: 151616 - DNA, 17 bp, synthetic construct
  source 1..17: mol_type = other DNA
agtccccacacaggcca

SEQ ID NO: 151617 - DNA, 17 bp, synthetic construct
  source 1..17: mol_type = other DNA
aagtccccacacaggcc

SEQ ID NO: 151618 - DNA, 17 bp, synthetic construct
  source 1..17: mol_type = other DNA
gaagtccccacacaggc

SEQ ID NO: 151619 - DNA, 17 bp, synthetic construct
  source 1..17: mol_type = other DNA
tgaagtccccacacagg

SEQ ID NO: 151620 - DNA, 17 bp, synthetic construct
  source 1..17: mol_type = other DNA
ttgaagtccccacacag

SEQ ID NO: 151621 - DNA, 17 bp, synthetic construct
  source 1..17: mol_type = other DNA
gttgaagtccccacaca

SEQ ID NO: 151622 - DNA, 17 bp, synthetic construct
  source 1..17: mol_type = other DNA
cgttgaagtccccacac

SEQ ID NO: 151623 - DNA, 17 bp, synthetic construct
  source 1..17: mol_type = other DNA
ccgttgaagtccccaca

SEQ ID NO: 151624 - DNA, 17 bp, synthetic construct
  source 1..17: mol_type = other DNA
gccgttgaagtccccac

SEQ ID NO: 151625 - DNA, 17 bp, synthetic construct
  source 1..17: mol_type = other DNA
ggccgttgaagtcccca

SEQ ID NO: 151626 - DNA, 17 bp, synthetic construct
  source 1..17: mol_type = other DNA
aggccgttgaagtcccc

SEQ ID NO: 151627 - DNA, 17 bp, synthetic construct
  source 1..17: mol_type = other DNA
gaggccgttgaagtccc

SEQ ID NO: 151628 - DNA, 17 bp, synthetic construct
  source 1..17: mol_type = other DNA
ggaggccgttgaagtcc

SEQ ID NO: 151629 - DNA, 17 bp, synthetic construct
  source 1..17: mol_type = other DNA
gggaggccgttgaagtc

SEQ ID NO: 151630 - DNA, 17 bp, synthetic construct
  source 1..17: mol_type = other DNA
cgggaggccgttgaagt

SEQ ID NO: 151631 - DNA, 17 bp, synthetic construct
  source 1..17: mol_type = other DNA
ccgggaggccgttgaag

SEQ ID NO: 151632 - DNA, 17 bp, synthetic construct
  source 1..17: mol_type = other DNA
gccgggaggccgttgaa

SEQ ID NO: 151633 - DNA, 17 bp, synthetic construct
  source 1..17: mol_type = other DNA
ggccgggaggccgttga

SEQ ID NO: 151634 - DNA, 17 bp, synthetic construct
  source 1..17: mol_type = other DNA
aggccgggaggccgttg

SEQ ID NO: 151635 - DNA, 17 bp, synthetic construct
  source 1..17: mol_type = other DNA
aaggccgggaggccgtt

SEQ ID NO: 151636 - DNA, 17 bp, synthetic construct
  source 1..17: mol_type = other DNA
gaaggccgggaggccgt

SEQ ID NO: 151637 - DNA, 17 bp, synthetic construct
  source 1..17: mol_type = other DNA
tgaaggccgggaggccg

SEQ ID NO: 151638 - DNA, 17 bp, synthetic construct
  source 1..17: mol_type = other DNA
ttgaaggccgggaggcc

SEQ ID NO: 151639 - DNA, 17 bp, synthetic construct
  source 1..17: mol_type = other DNA
gttgaaggccgggaggc

SEQ ID NO: 151640 - DNA, 17 bp, synthetic construct
  source 1..17: mol_type = other DNA
cgttgaaggccgggagg

SEQ ID NO: 151641 - DNA, 17 bp, synthetic construct
  source 1..17: mol_type = other DNA
tcgttgaaggccgggag

SEQ ID NO: 151642 - DNA, 17 bp, synthetic construct
  source 1..17: mol_type = other DNA
ctcgttgaaggccggga

SEQ ID NO: 151643 - DNA, 17 bp, synthetic construct
  source 1..17: mol_type = other DNA
actcgttgaaggccggg

SEQ ID NO: 151644 - DNA, 17 bp, synthetic construct
  source 1..17: mol_type = other DNA
aactcgttgaaggccgg

SEQ ID NO: 151645 - DNA, 17 bp, synthetic construct
  source 1..17: mol_type = other DNA
gaactcgttgaaggccg

SEQ ID NO: 151646 - DNA, 17 bp, synthetic construct
  source 1..17: mol_type = other DNA
agaactcgttgaaggcc

SEQ ID NO: 151647 - DNA, 17 bp, synthetic construct
  source 1..17: mol_type = other DNA
tagaactcgttgaaggc

SEQ ID NO: 151648 - DNA, 17 bp, synthetic construct
  source 1..17: mol_type = other DNA
atagaactcgttgaagg

SEQ ID NO: 151649 - DNA, 17 bp, synthetic construct
  source 1..17: mol_type = other DNA
catagaactcgttgaag

SEQ ID NO: 151650 - DNA, 17 bp, synthetic construct
  source 1..17: mol_type = other DNA
gcatagaactcgttgaa

SEQ ID NO: 151651 - DNA, 17 bp, synthetic construct
  source 1..17: mol_type = other DNA
ggcatagaactcgttga

SEQ ID NO: 151652 - DNA, 17 bp, synthetic construct
  source 1..17: mol_type = other DNA
gggcatagaactcgttg

SEQ ID NO: 151653 - DNA, 17 bp, synthetic construct
  source 1..17: mol_type = other DNA
tgggcatagaactcgtt

SEQ ID NO: 151654 - DNA, 17 bp, synthetic construct
  source 1..17: mol_type = other DNA
gtgggcatagaactcgt

SEQ ID NO: 151655 - DNA, 17 bp, synthetic construct
  source 1..17: mol_type = other DNA
tgtgggcatagaactcg

SEQ ID NO: 151656 - DNA, 17 bp, synthetic construct
  source 1..17: mol_type = other DNA
ctgtgggcatagaactc

SEQ ID NO: 151657 - DNA, 17 bp, synthetic construct
  source 1..17: mol_type = other DNA
actgtgggcatagaact

SEQ ID NO: 151658 - DNA, 17 bp, synthetic construct
  source 1..17: mol_type = other DNA
cactgtgggcatagaac

SEQ ID NO: 151659 - DNA, 17 bp, synthetic construct
  source 1..17: mol_type = other DNA
tcactgtgggcatagaa

SEQ ID NO: 151660 - DNA, 17 bp, synthetic construct
  source 1..17: mol_type = other DNA
ctcactgtgggcataga

SEQ ID NO: 151661 - DNA, 17 bp, synthetic construct
  source 1..17: mol_type = other DNA
actcactgtgggcatag

SEQ ID NO: 151662 - DNA, 17 bp, synthetic construct
  source 1..17: mol_type = other DNA
cactcactgtgggcata

SEQ ID NO: 151663 - DNA, 17 bp, synthetic construct
  source 1..17: mol_type = other DNA
gcactcactgtgggcat

SEQ ID NO: 151664 - DNA, 17 bp, synthetic construct
  source 1..17: mol_type = other DNA
ggcactcactgtgggca

SEQ ID NO: 151665 - DNA, 17 bp, synthetic construct
  source 1..17: mol_type = other DNA
tggcactcactgtgggc

SEQ ID NO: 151666 - DNA, 17 bp, synthetic construct
  source 1..17: mol_type = other DNA
gtggcactcactgtggg

SEQ ID NO: 151667 - DNA, 17 bp, synthetic construct
  source 1..17: mol_type = other DNA
ggtggcactcactgtgg

SEQ ID NO: 151668 - DNA, 17 bp, synthetic construct
  source 1..17: mol_type = other DNA
aggtggcactcactgtg

SEQ ID NO: 151669 - DNA, 17 bp, synthetic construct
  source 1..17: mol_type = other DNA
caggtggcactcactgt

SEQ ID NO: 151670 - DNA, 17 bp, synthetic construct
  source 1..17: mol_type = other DNA
ccaggtggcactcactg

SEQ ID NO: 151671 - DNA, 17 bp, synthetic construct
  source 1..17: mol_type = other DNA
cccaggtggcactcact

SEQ ID NO: 151672 - DNA, 17 bp, synthetic construct
  source 1..17: mol_type = other DNA
acccaggtggcactcac

SEQ ID NO: 151673 - DNA, 17 bp, synthetic construct
  source 1..17: mol_type = other DNA
cacccaggtggcactca

SEQ ID NO: 151674 - DNA, 17 bp, synthetic construct
  source 1..17: mol_type = other DNA
tcacccaggtggcactc

SEQ ID NO: 151675 - DNA, 17 bp, synthetic construct
  source 1..17: mol_type = other DNA
ctcacccaggtggcact

SEQ ID NO: 151676 - DNA, 17 bp, synthetic construct
  source 1..17: mol_type = other DNA
cctcacccaggtggcac

SEQ ID NO: 151677 - DNA, 17 bp, synthetic construct
  source 1..17: mol_type = other DNA
ccctcacccaggtggca

SEQ ID NO: 151678 - DNA, 17 bp, synthetic construct
  source 1..17: mol_type = other DNA
cccctcacccaggtggc

SEQ ID NO: 151679 - DNA, 17 bp, synthetic construct
  source 1..17: mol_type = other DNA
ccccctcacccaggtgg

SEQ ID NO: 151680 - DNA, 17 bp, synthetic construct
  source 1..17: mol_type = other DNA
gccccctcacccaggtg

SEQ ID NO: 151681 - DNA, 17 bp, synthetic construct
  source 1..17: mol_type = other DNA
cgccccctcacccaggt

SEQ ID NO: 151682 - DNA, 17 bp, synthetic construct
  source 1..17: mol_type = other DNA
ccgccccctcacccagg

SEQ ID NO: 151683 - DNA, 17 bp, synthetic construct
  source 1..17: mol_type = other DNA
accgccccctcacccag

SEQ ID NO: 151684 - DNA, 17 bp, synthetic construct
  source 1..17: mol_type = other DNA
caccgccccctcaccca

SEQ ID NO: 151685 - DNA, 17 bp, synthetic construct
  source 1..17: mol_type = other DNA
tcaccgccccctcaccc

SEQ ID NO: 151686 - DNA, 17 bp, synthetic construct
  source 1..17: mol_type = other DNA
gtcaccgccccctcacc

SEQ ID NO: 151687 - DNA, 17 bp, synthetic construct
  source 1..17: mol_type = other DNA
ggtcaccgccccctcac

SEQ ID NO: 151688 - DNA, 17 bp, synthetic construct
  source 1..17: mol_type = other DNA
tggtcaccgccccctca

SEQ ID NO: 151689 - DNA, 17 bp, synthetic construct
  source 1..17: mol_type = other DNA
ttggtcaccgccccctc

SEQ ID NO: 151690 - DNA, 17 bp, synthetic construct
  source 1..17: mol_type = other DNA
attggtcaccgccccct

SEQ ID NO: 151691 - DNA, 17 bp, synthetic construct
  source 1..17: mol_type = other DNA
aattggtcaccgccccc

SEQ ID NO: 151692 - DNA, 17 bp, synthetic construct
  source 1..17: mol_type = other DNA
taattggtcaccgcccc

SEQ ID NO: 151693 - DNA, 17 bp, synthetic construct
  source 1..17: mol_type = other DNA
ataattggtcaccgccc

SEQ ID NO: 151694 - DNA, 17 bp, synthetic construct
  source 1..17: mol_type = other DNA
cataattggtcaccgcc

SEQ ID NO: 151695 - DNA, 17 bp, synthetic construct
  source 1..17: mol_type = other DNA
acataattggtcaccgc

SEQ ID NO: 151696 - DNA, 17 bp, synthetic construct
  source 1..17: mol_type = other DNA
gacataattggtcaccg

SEQ ID NO: 151697 - DNA, 17 bp, synthetic construct
  source 1..17: mol_type = other DNA
cgacataattggtcacc

SEQ ID NO: 151698 - DNA, 17 bp, synthetic construct
  source 1..17: mol_type = other DNA
ccgacataattggtcac

SEQ ID NO: 151699 - DNA, 17 bp, synthetic construct
  source 1..17: mol_type = other DNA
gccgacataattggtca

SEQ ID NO: 151700 - DNA, 17 bp, synthetic construct
  source 1..17: mol_type = other DNA
ggccgacataattggtc

SEQ ID NO: 151701 - DNA, 17 bp, synthetic construct
  source 1..17: mol_type = other DNA
tggccgacataattggt

SEQ ID NO: 151702 - DNA, 17 bp, synthetic construct
  source 1..17: mol_type = other DNA
ttggccgacataattgg

SEQ ID NO: 151703 - DNA, 17 bp, synthetic construct
  source 1..17: mol_type = other DNA
gttggccgacataattg

SEQ ID NO: 151704 - DNA, 17 bp, synthetic construct
  source 1..17: mol_type = other DNA
cgttggccgacataatt

SEQ ID NO: 151705 - DNA, 17 bp, synthetic construct
  source 1..17: mol_type = other DNA
tcgttggccgacataat

SEQ ID NO: 151706 - DNA, 17 bp, synthetic construct
  source 1..17: mol_type = other DNA
ttcgttggccgacataa

SEQ ID NO: 151707 - DNA, 17 bp, synthetic construct
  source 1..17: mol_type = other DNA
cttcgttggccgacata

SEQ ID NO: 151708 - DNA, 17 bp, synthetic construct
  source 1..17: mol_type = other DNA
tcttcgttggccgacat

SEQ ID NO: 151709 - DNA, 17 bp, synthetic construct
  source 1..17: mol_type = other DNA
ctcttcgttggccgaca

SEQ ID NO: 151710 - DNA, 17 bp, synthetic construct
  source 1..17: mol_type = other DNA
gctcttcgttggccgac

SEQ ID NO: 151711 - DNA, 17 bp, synthetic construct
  source 1..17: mol_type = other DNA
ggctcttcgttggccga

SEQ ID NO: 151712 - DNA, 17 bp, synthetic construct
  source 1..17: mol_type = other DNA
tggctcttcgttggccg

SEQ ID NO: 151713 - DNA, 17 bp, synthetic construct
  source 1..17: mol_type = other DNA
gtggctcttcgttggcc

SEQ ID NO: 151714 - DNA, 17 bp, synthetic construct
  source 1..17: mol_type = other DNA
tgtggctcttcgttggc

SEQ ID NO: 151715 - DNA, 17 bp, synthetic construct
  source 1..17: mol_type = other DNA
ctgtggctcttcgttgg

SEQ ID NO: 151716 - DNA, 17 bp, synthetic construct
  source 1..17: mol_type = other DNA
actgtggctcttcgttg

SEQ ID NO: 151717 - DNA, 17 bp, synthetic construct
  source 1..17: mol_type = other DNA
gactgtggctcttcgtt

SEQ ID NO: 151718 - DNA, 17 bp, synthetic construct
  source 1..17: mol_type = other DNA
ggactgtggctcttcgt

SEQ ID NO: 151719 - DNA, 17 bp, synthetic construct
  source 1..17: mol_type = other DNA
gggactgtggctcttcg

SEQ ID NO: 151720 - DNA, 17 bp, synthetic construct
  source 1..17: mol_type = other DNA
cgggactgtggctcttc

SEQ ID NO: 151721 - DNA, 17 bp, synthetic construct
  source 1..17: mol_type = other DNA
ccgggactgtggctctt

SEQ ID NO: 151722 - DNA, 17 bp, synthetic construct
  source 1..17: mol_type = other DNA
cccgggactgtggctct

SEQ ID NO: 151723 - DNA, 17 bp, synthetic construct
  source 1..17: mol_type = other DNA
ccccgggactgtggctc

SEQ ID NO: 151724 - DNA, 17 bp, synthetic construct
  source 1..17: mol_type = other DNA
tccccgggactgtggct

SEQ ID NO: 151725 - DNA, 17 bp, synthetic construct
  source 1..17: mol_type = other DNA
ctccccgggactgtggc

SEQ ID NO: 151726 - DNA, 17 bp, synthetic construct
  source 1..17: mol_type = other DNA
cctccccgggactgtgg

SEQ ID NO: 151727 - DNA, 17 bp, synthetic construct
  source 1..17: mol_type = other DNA
gcctccccgggactgtg

SEQ ID NO: 151728 - DNA, 17 bp, synthetic construct
  source 1..17: mol_type = other DNA
ggcctccccgggactgt

SEQ ID NO: 151729 - DNA, 17 bp, synthetic construct
  source 1..17: mol_type = other DNA
cggcctccccgggactg

SEQ ID NO: 151730 - DNA, 17 bp, synthetic construct
  source 1..17: mol_type = other DNA
ccggcctccccgggact

SEQ ID NO: 151731 - DNA, 17 bp, synthetic construct
  source 1..17: mol_type = other DNA
cccggcctccccgggac

SEQ ID NO: 151732 - DNA, 17 bp, synthetic construct
  source 1..17: mol_type = other DNA
tcccggcctccccggga

SEQ ID NO: 151733 - DNA, 17 bp, synthetic construct
  source 1..17: mol_type = other DNA
ctcccggcctccccggg

SEQ ID NO: 151734 - DNA, 17 bp, synthetic construct
  source 1..17: mol_type = other DNA
cctcccggcctccccgg

SEQ ID NO: 151735 - DNA, 17 bp, synthetic construct
  source 1..17: mol_type = other DNA
ccctcccggcctccccg

SEQ ID NO: 151736 - DNA, 17 bp, synthetic construct
  source 1..17: mol_type = other DNA
cccctcccggcctcccc

SEQ ID NO: 151737 - DNA, 17 bp, synthetic construct
  source 1..17: mol_type = other DNA
ccccctcccggcctccc

SEQ ID NO: 151738 - DNA, 17 bp, synthetic construct
  source 1..17: mol_type = other DNA
gccccctcccggcctcc

SEQ ID NO: 151739 - DNA, 17 bp, synthetic construct
  source 1..17: mol_type = other DNA
cgccccctcccggcctc

SEQ ID NO: 151740 - DNA, 17 bp, synthetic construct
  source 1..17: mol_type = other DNA
ccgccccctcccggcct

SEQ ID NO: 151741 - DNA, 17 bp, synthetic construct
  source 1..17: mol_type = other DNA
tccgccccctcccggcc

SEQ ID NO: 151742 - DNA, 17 bp, synthetic construct
  source 1..17: mol_type = other DNA
ctccgccccctcccggc

SEQ ID NO: 151743 - DNA, 17 bp, synthetic construct
  source 1..17: mol_type = other DNA
actccgccccctcccgg

SEQ ID NO: 151744 - DNA, 17 bp, synthetic construct
  source 1..17: mol_type = other DNA
cactccgccccctcccg

SEQ ID NO: 151745 - DNA, 17 bp, synthetic construct
  source 1..17: mol_type = other DNA
ccactccgccccctccc

SEQ ID NO: 151746 - DNA, 17 bp, synthetic construct
  source 1..17: mol_type = other DNA
cccactccgccccctcc

SEQ ID NO: 151747 - DNA, 17 bp, synthetic construct
  source 1..17: mol_type = other DNA
ccccactccgccccctc

SEQ ID NO: 151748 - DNA, 17 bp, synthetic construct
  source 1..17: mol_type = other DNA
tccccactccgccccct

SEQ ID NO: 151749 - DNA, 17 bp, synthetic construct
  source 1..17: mol_type = other DNA
gtccccactccgccccc

SEQ ID NO: 151750 - DNA, 17 bp, synthetic construct
  source 1..17: mol_type = other DNA
ggtccccactccgcccc

SEQ ID NO: 151751 - DNA, 17 bp, synthetic construct
  source 1..17: mol_type = other DNA
cggtccccactccgccc

SEQ ID NO: 151752 - DNA, 17 bp, synthetic construct
  source 1..17: mol_type = other DNA
ccggtccccactccgcc

SEQ ID NO: 151753 - DNA, 17 bp, synthetic construct
  source 1..17: mol_type = other DNA
cccggtccccactccgc

SEQ ID NO: 151754 - DNA, 17 bp, synthetic construct
  source 1..17: mol_type = other DNA
gcccggtccccactccg

SEQ ID NO: 151755 - DNA, 17 bp, synthetic construct
  source 1..17: mol_type = other DNA
tgcccggtccccactcc

SEQ ID NO: 151756 - DNA, 17 bp, synthetic construct
  source 1..17: mol_type = other DNA
gtgcccggtccccactc

SEQ ID NO: 151757 - DNA, 17 bp, synthetic construct
  source 1..17: mol_type = other DNA
ggtgcccggtccccact

SEQ ID NO: 151758 - DNA, 17 bp, synthetic construct
  source 1..17: mol_type = other DNA
tggtgcccggtccccac

SEQ ID NO: 151759 - DNA, 17 bp, synthetic construct
  source 1..17: mol_type = other DNA
ctggtgcccggtcccca

SEQ ID NO: 151760 - DNA, 17 bp, synthetic construct
  source 1..17: mol_type = other DNA
cctggtgcccggtcccc

SEQ ID NO: 151761 - DNA, 17 bp, synthetic construct
  source 1..17: mol_type = other DNA
gcctggtgcccggtccc

SEQ ID NO: 151762 - DNA, 17 bp, synthetic construct
  source 1..17: mol_type = other DNA
tgcctggtgcccggtcc

SEQ ID NO: 151763 - DNA, 17 bp, synthetic construct
  source 1..17: mol_type = other DNA
ctgcctggtgcccggtc

SEQ ID NO: 151764 - DNA, 17 bp, synthetic construct
  source 1..17: mol_type = other DNA
cctgcctggtgcccggt

SEQ ID NO: 151765 - DNA, 17 bp, synthetic construct
  source 1..17: mol_type = other DNA
ccctgcctggtgcccgg

SEQ ID NO: 151766 - DNA, 17 bp, synthetic construct
  source 1..17: mol_type = other DNA
tccctgcctggtgcccg

SEQ ID NO: 151767 - DNA, 17 bp, synthetic construct
  source 1..17: mol_type = other DNA
ctccctgcctggtgccc

SEQ ID NO: 151768 - DNA, 17 bp, synthetic construct
  source 1..17: mol_type = other DNA
cctccctgcctggtgcc

SEQ ID NO: 151769 - DNA, 17 bp, synthetic construct
  source 1..17: mol_type = other DNA
ccctccctgcctggtgc

SEQ ID NO: 151770 - DNA, 17 bp, synthetic construct
  source 1..17: mol_type = other DNA
cccctccctgcctggtg

SEQ ID NO: 151771 - DNA, 17 bp, synthetic construct
  source 1..17: mol_type = other DNA
gcccctccctgcctggt

SEQ ID NO: 151772 - DNA, 17 bp, synthetic construct
  source 1..17: mol_type = other DNA
ggcccctccctgcctgg

SEQ ID NO: 151773 - DNA, 17 bp, synthetic construct
  source 1..17: mol_type = other DNA
tggcccctccctgcctg

SEQ ID NO: 151774 - DNA, 17 bp, synthetic construct
  source 1..17: mol_type = other DNA
gtggcccctccctgcct

SEQ ID NO: 151775 - DNA, 17 bp, synthetic construct
  source 1..17: mol_type = other DNA
cgtggcccctccctgcc

SEQ ID NO: 151776 - DNA, 17 bp, synthetic construct
  source 1..17: mol_type = other DNA
tcgtggcccctccctgc

SEQ ID NO: 151777 - DNA, 17 bp, synthetic construct
  source 1..17: mol_type = other DNA
ctcgtggcccctccctg

SEQ ID NO: 151778 - DNA, 17 bp, synthetic construct
  source 1..17: mol_type = other DNA
cctcgtggcccctccct

SEQ ID NO: 151779 - DNA, 17 bp, synthetic construct
  source 1..17: mol_type = other DNA
tcctcgtggcccctccc

SEQ ID NO: 151780 - DNA, 17 bp, synthetic construct
  source 1..17: mol_type = other DNA
gtcctcgtggcccctcc

SEQ ID NO: 151781 - DNA, 17 bp, synthetic construct
  source 1..17: mol_type = other DNA
agtcctcgtggcccctc

SEQ ID NO: 151782 - DNA, 17 bp, synthetic construct
  source 1..17: mol_type = other DNA
cagtcctcgtggcccct

SEQ ID NO: 151783 - DNA, 17 bp, synthetic construct
  source 1..17: mol_type = other DNA
acagtcctcgtggcccc

SEQ ID NO: 151784 - DNA, 17 bp, synthetic construct
  source 1..17: mol_type = other DNA
cacagtcctcgtggccc

SEQ ID NO: 151785 - DNA, 17 bp, synthetic construct
  source 1..17: mol_type = other DNA
gcacagtcctcgtggcc

SEQ ID NO: 151786 - DNA, 17 bp, synthetic construct
  source 1..17: mol_type = other DNA
ggcacagtcctcgtggc

SEQ ID NO: 151787 - DNA, 17 bp, synthetic construct
  source 1..17: mol_type = other DNA
gggcacagtcctcgtgg

SEQ ID NO: 151788 - DNA, 17 bp, synthetic construct
  source 1..17: mol_type = other DNA
agggcacagtcctcgtg

SEQ ID NO: 151789 - DNA, 17 bp, synthetic construct
  source 1..17: mol_type = other DNA
tagggcacagtcctcgt

SEQ ID NO: 151790 - DNA, 17 bp, synthetic construct
  source 1..17: mol_type = other DNA
gtagggcacagtcctcg

SEQ ID NO: 151791 - DNA, 17 bp, synthetic construct
  source 1..17: mol_type = other DNA
tgtagggcacagtcctc

SEQ ID NO: 151792 - DNA, 17 bp, synthetic construct
  source 1..17: mol_type = other DNA
atgtagggcacagtcct

SEQ ID NO: 151793 - DNA, 17 bp, synthetic construct
  source 1..17: mol_type = other DNA
catgtagggcacagtcc

SEQ ID NO: 151794 - DNA, 17 bp, synthetic construct
  source 1..17: mol_type = other DNA
ccatgtagggcacagtc

SEQ ID NO: 151795 - DNA, 17 bp, synthetic construct
  source 1..17: mol_type = other DNA
accatgtagggcacagt

SEQ ID NO: 151796 - DNA, 17 bp, synthetic construct
  source 1..17: mol_type = other DNA
caccatgtagggcacag

SEQ ID NO: 151797 - DNA, 17 bp, synthetic construct
  source 1..17: mol_type = other DNA
ccaccatgtagggcaca

SEQ ID NO: 151798 - DNA, 17 bp, synthetic construct
  source 1..17: mol_type = other DNA
cccaccatgtagggcac

SEQ ID NO: 151799 - DNA, 17 bp, synthetic construct
  source 1..17: mol_type = other DNA
tcccaccatgtagggca

SEQ ID NO: 151800 - DNA, 17 bp, synthetic construct
  source 1..17: mol_type = other DNA
ctcccaccatgtagggc

SEQ ID NO: 151801 - DNA, 17 bp, synthetic construct
  source 1..17: mol_type = other DNA
cctcccaccatgtaggg

SEQ ID NO: 151802 - DNA, 17 bp, synthetic construct
  source 1..17: mol_type = other DNA
tcctcccaccatgtagg

SEQ ID NO: 151803 - DNA, 17 bp, synthetic construct
  source 1..17: mol_type = other DNA
ctcctcccaccatgtag

SEQ ID NO: 151804 - DNA, 17 bp, synthetic construct
  source 1..17: mol_type = other DNA
actcctcccaccatgta

SEQ ID NO: 151805 - DNA, 17 bp, synthetic construct
  source 1..17: mol_type = other DNA
cactcctcccaccatgt

SEQ ID NO: 151806 - DNA, 17 bp, synthetic construct
  source 1..17: mol_type = other DNA
gcactcctcccaccatg

SEQ ID NO: 151807 - DNA, 17 bp, synthetic construct
  source 1..17: mol_type = other DNA
ggcactcctcccaccat

SEQ ID NO: 151808 - DNA, 17 bp, synthetic construct
  source 1..17: mol_type = other DNA
gggcactcctcccacca

SEQ ID NO: 151809 - DNA, 17 bp, synthetic construct
  source 1..17: mol_type = other DNA
ggggcactcctcccacc

SEQ ID NO: 151810 - DNA, 17 bp, synthetic construct
  source 1..17: mol_type = other DNA
aggggcactcctcccac

SEQ ID NO: 151811 - DNA, 17 bp, synthetic construct
  source 1..17: mol_type = other DNA
gaggggcactcctccca

SEQ ID NO: 151812 - DNA, 17 bp, synthetic construct
  source 1..17: mol_type = other DNA
cgaggggcactcctccc

SEQ ID NO: 151813 - DNA, 17 bp, synthetic construct
  source 1..17: mol_type = other DNA
ccgaggggcactcctcc

SEQ ID NO: 151814 - DNA, 17 bp, synthetic construct
  source 1..17: mol_type = other DNA
cccgaggggcactcctc

SEQ ID NO: 151815 - DNA, 17 bp, synthetic construct
  source 1..17: mol_type = other DNA
ccccgaggggcactcct

SEQ ID NO: 151816 - DNA, 17 bp, synthetic construct
  source 1..17: mol_type = other DNA
cccccgaggggcactcc

SEQ ID NO: 151817 - DNA, 17 bp, synthetic construct
  source 1..17: mol_type = other DNA
acccccgaggggcactc

SEQ ID NO: 151818 - DNA, 17 bp, synthetic construct
  source 1..17: mol_type = other DNA
cacccccgaggggcact

SEQ ID NO: 151819 - DNA, 17 bp, synthetic construct
  source 1..17: mol_type = other DNA
acacccccgaggggcac

SEQ ID NO: 151820 - DNA, 17 bp, synthetic construct
  source 1..17: mol_type = other DNA
aacacccccgaggggca

SEQ ID NO: 151821 - DNA, 17 bp, synthetic construct
  source 1..17: mol_type = other DNA
caacacccccgaggggc

SEQ ID NO: 151822 - DNA, 17 bp, synthetic construct
  source 1..17: mol_type = other DNA
ccaacacccccgagggg

SEQ ID NO: 151823 - DNA, 17 bp, synthetic construct
  source 1..17: mol_type = other DNA
cccaacacccccgaggg

SEQ ID NO: 151824 - DNA, 17 bp, synthetic construct
  source 1..17: mol_type = other DNA
gcccaacacccccgagg

SEQ ID NO: 151825 - DNA, 17 bp, synthetic construct
  source 1..17: mol_type = other DNA
ggcccaacacccccgag

SEQ ID NO: 151826 - DNA, 17 bp, synthetic construct
  source 1..17: mol_type = other DNA
gggcccaacacccccga

SEQ ID NO: 151827 - DNA, 17 bp, synthetic construct
  source 1..17: mol_type = other DNA
agggcccaacacccccg

SEQ ID NO: 151828 - DNA, 17 bp, synthetic construct
  source 1..17: mol_type = other DNA
tagggcccaacaccccc

SEQ ID NO: 151829 - DNA, 17 bp, synthetic construct
  source 1..17: mol_type = other DNA
ctagggcccaacacccc

SEQ ID NO: 151830 - DNA, 17 bp, synthetic construct
  source 1..17: mol_type = other DNA
cctagggcccaacaccc

SEQ ID NO: 151831 - DNA, 17 bp, synthetic construct
  source 1..17: mol_type = other DNA
gcctagggcccaacacc

SEQ ID NO: 151832 - DNA, 17 bp, synthetic construct
  source 1..17: mol_type = other DNA
tgcctagggcccaacac

SEQ ID NO: 151833 - DNA, 17 bp, synthetic construct
  source 1..17: mol_type = other DNA
ctgcctagggcccaaca

SEQ ID NO: 151834 - DNA, 17 bp, synthetic construct
  source 1..17: mol_type = other DNA
cctgcctagggcccaac

SEQ ID NO: 151835 - DNA, 17 bp, synthetic construct
  source 1..17: mol_type = other DNA
tcctgcctagggcccaa

SEQ ID NO: 151836 - DNA, 17 bp, synthetic construct
  source 1..17: mol_type = other DNA
ctcctgcctagggccca

SEQ ID NO: 151837 - DNA, 17 bp, synthetic construct
  source 1..17: mol_type = other DNA
actcctgcctagggccc

SEQ ID NO: 151838 - DNA, 17 bp, synthetic construct
  source 1..17: mol_type = other DNA
cactcctgcctagggcc

SEQ ID NO: 151839 - DNA, 17 bp, synthetic construct
  source 1..17: mol_type = other DNA
ccactcctgcctagggc

SEQ ID NO: 151840 - DNA, 17 bp, synthetic construct
  source 1..17: mol_type = other DNA
cccactcctgcctaggg

SEQ ID NO: 151841 - DNA, 17 bp, synthetic construct
  source 1..17: mol_type = other DNA
tcccactcctgcctagg

SEQ ID NO: 151842 - DNA, 17 bp, synthetic construct
  source 1..17: mol_type = other DNA
ctcccactcctgcctag

SEQ ID NO: 151843 - DNA, 17 bp, synthetic construct
  source 1..17: mol_type = other DNA
actcccactcctgccta

SEQ ID NO: 151844 - DNA, 17 bp, synthetic construct
  source 1..17: mol_type = other DNA
gactcccactcctgcct

SEQ ID NO: 151845 - DNA, 17 bp, synthetic construct
  source 1..17: mol_type = other DNA
ggactcccactcctgcc

SEQ ID NO: 151846 - DNA, 17 bp, synthetic construct
  source 1..17: mol_type = other DNA
aggactcccactcctgc

SEQ ID NO: 151847 - DNA, 17 bp, synthetic construct
  source 1..17: mol_type = other DNA
gaggactcccactcctg

SEQ ID NO: 151848 - DNA, 17 bp, synthetic construct
  source 1..17: mol_type = other DNA
agaggactcccactcct

SEQ ID NO: 151849 - DNA, 17 bp, synthetic construct
  source 1..17: mol_type = other DNA
cagaggactcccactcc

SEQ ID NO: 151850 - DNA, 17 bp, synthetic construct
  source 1..17: mol_type = other DNA
ccagaggactcccactc

SEQ ID NO: 151851 - DNA, 17 bp, synthetic construct
  source 1..17: mol_type = other DNA
gccagaggactcccact

SEQ ID NO: 151852 - DNA, 17 bp, synthetic construct
  source 1..17: mol_type = other DNA
ggccagaggactcccac

SEQ ID NO: 151853 - DNA, 17 bp, synthetic construct
  source 1..17: mol_type = other DNA
aggccagaggactccca

SEQ ID NO: 151854 - DNA, 17 bp, synthetic construct
  source 1..17: mol_type = other DNA
caggccagaggactccc

SEQ ID NO: 151855 - DNA, 17 bp, synthetic construct
  source 1..17: mol_type = other DNA
ccaggccagaggactcc

SEQ ID NO: 151856 - DNA, 17 bp, synthetic construct
  source 1..17: mol_type = other DNA
cccaggccagaggactc

SEQ ID NO: 151857 - DNA, 17 bp, synthetic construct
  source 1..17: mol_type = other DNA
gcccaggccagaggact

SEQ ID NO: 151858 - DNA, 17 bp, synthetic construct
  source 1..17: mol_type = other DNA
agcccaggccagaggac

SEQ ID NO: 151859 - DNA, 17 bp, synthetic construct
  source 1..17: mol_type = other DNA
gagcccaggccagagga

SEQ ID NO: 151860 - DNA, 17 bp, synthetic construct
  source 1..17: mol_type = other DNA
tgagcccaggccagagg

SEQ ID NO: 151861 - DNA, 17 bp, synthetic construct
  source 1..17: mol_type = other DNA
ctgagcccaggccagag

SEQ ID NO: 151862 - DNA, 17 bp, synthetic construct
  source 1..17: mol_type = other DNA
cctgagcccaggccaga

SEQ ID NO: 151863 - DNA, 17 bp, synthetic construct
  source 1..17: mol_type = other DNA
tcctgagcccaggccag

SEQ ID NO: 151864 - DNA, 17 bp, synthetic construct
  source 1..17: mol_type = other DNA
ttcctgagcccaggcca

SEQ ID NO: 151865 - DNA, 17 bp, synthetic construct
  source 1..17: mol_type = other DNA
cttcctgagcccaggcc

SEQ ID NO: 151866 - DNA, 17 bp, synthetic construct
  source 1..17: mol_type = other DNA
acttcctgagcccaggc

SEQ ID NO: 151867 - DNA, 17 bp, synthetic construct
  source 1..17: mol_type = other DNA
cacttcctgagcccagg

SEQ ID NO: 151868 - DNA, 17 bp, synthetic construct
  source 1..17: mol_type = other DNA
ccacttcctgagcccag

SEQ ID NO: 151869 - DNA, 17 bp, synthetic construct
  source 1..17: mol_type = other DNA
cccacttcctgagccca

SEQ ID NO: 151870 - DNA, 17 bp, synthetic construct
  source 1..17: mol_type = other DNA
tcccacttcctgagccc

SEQ ID NO: 151871 - DNA, 17 bp, synthetic construct
  source 1..17: mol_type = other DNA
ctcccacttcctgagcc

SEQ ID NO: 151872 - DNA, 17 bp, synthetic construct
  source 1..17: mol_type = other DNA
gctcccacttcctgagc

SEQ ID NO: 151873 - DNA, 17 bp, synthetic construct
  source 1..17: mol_type = other DNA
ggctcccacttcctgag

SEQ ID NO: 151874 - DNA, 17 bp, synthetic construct
  source 1..17: mol_type = other DNA
gggctcccacttcctga

SEQ ID NO: 151875 - DNA, 17 bp, synthetic construct
  source 1..17: mol_type = other DNA
tgggctcccacttcctg

SEQ ID NO: 151876 - DNA, 17 bp, synthetic construct
  source 1..17: mol_type = other DNA
atgggctcccacttcct

SEQ ID NO: 151877 - DNA, 17 bp, synthetic construct
  source 1..17: mol_type = other DNA
tatgggctcccacttcc

SEQ ID NO: 151878 - DNA, 17 bp, synthetic construct
  source 1..17: mol_type = other DNA
atatgggctcccacttc

SEQ ID NO: 151879 - DNA, 17 bp, synthetic construct
  source 1..17: mol_type = other DNA
gatatgggctcccactt

SEQ ID NO: 151880 - DNA, 17 bp, synthetic construct
  source 1..17: mol_type = other DNA
agatatgggctcccact

SEQ ID NO: 151881 - DNA, 17 bp, synthetic construct
  source 1..17: mol_type = other DNA
aagatatgggctcccac

SEQ ID NO: 151882 - DNA, 17 bp, synthetic construct
  source 1..17: mol_type = other DNA
caagatatgggctccca

SEQ ID NO: 151883 - DNA, 17 bp, synthetic construct
  source 1..17: mol_type = other DNA
acaagatatgggctccc

SEQ ID NO: 151884 - DNA, 17 bp, synthetic construct
  source 1..17: mol_type = other DNA
gacaagatatgggctcc

SEQ ID NO: 151885 - DNA, 17 bp, synthetic construct
  source 1..17: mol_type = other DNA
ggacaagatatgggctc

SEQ ID NO: 151886 - DNA, 17 bp, synthetic construct
  source 1..17: mol_type = other DNA
gggacaagatatgggct

SEQ ID NO: 151887 - DNA, 17 bp, synthetic construct
  source 1..17: mol_type = other DNA
ggggacaagatatgggc

SEQ ID NO: 151888 - DNA, 17 bp, synthetic construct
  source 1..17: mol_type = other DNA
tggggacaagatatggg

SEQ ID NO: 151889 - DNA, 17 bp, synthetic construct
  source 1..17: mol_type = other DNA
ctggggacaagatatgg

SEQ ID NO: 151890 - DNA, 17 bp, synthetic construct
  source 1..17: mol_type = other DNA
cctggggacaagatatg

SEQ ID NO: 151891 - DNA, 17 bp, synthetic construct
  source 1..17: mol_type = other DNA
tcctggggacaagatat

SEQ ID NO: 151892 - DNA, 17 bp, synthetic construct
  source 1..17: mol_type = other DNA
ctcctggggacaagata

SEQ ID NO: 151893 - DNA, 17 bp, synthetic construct
  source 1..17: mol_type = other DNA
gctcctggggacaagat

SEQ ID NO: 151894 - DNA, 17 bp, synthetic construct
  source 1..17: mol_type = other DNA
ggctcctggggacaaga

SEQ ID NO: 151895 - DNA, 17 bp, synthetic construct
  source 1..17: mol_type = other DNA
gggctcctggggacaag

SEQ ID NO: 151896 - DNA, 17 bp, synthetic construct
  source 1..17: mol_type = other DNA
ggggctcctggggacaa

SEQ ID NO: 151897 - DNA, 17 bp, synthetic construct
  source 1..17: mol_type = other DNA
aggggctcctggggaca

SEQ ID NO: 151898 - DNA, 17 bp, synthetic construct
  source 1..17: mol_type = other DNA
gaggggctcctggggac

SEQ ID NO: 151899 - DNA, 17 bp, synthetic construct
  source 1..17: mol_type = other DNA
tgaggggctcctgggga

SEQ ID NO: 151900 - DNA, 17 bp, synthetic construct
  source 1..17: mol_type = other DNA
ctgaggggctcctgggg

SEQ ID NO: 151901 - DNA, 17 bp, synthetic construct
  source 1..17: mol_type = other DNA
tctgaggggctcctggg

SEQ ID NO: 151902 - DNA, 17 bp, synthetic construct
  source 1..17: mol_type = other DNA
ctctgaggggctcctgg

SEQ ID NO: 151903 - DNA, 17 bp, synthetic construct
  source 1..17: mol_type = other DNA
gctctgaggggctcctg

SEQ ID NO: 151904 - DNA, 17 bp, synthetic construct
  source 1..17: mol_type = other DNA
ggctctgaggggctcct

SEQ ID NO: 151905 - DNA, 17 bp, synthetic construct
  source 1..17: mol_type = other DNA
tggctctgaggggctcc

SEQ ID NO: 151906 - DNA, 17 bp, synthetic construct
  source 1..17: mol_type = other DNA
gtggctctgaggggctc

SEQ ID NO: 151907 - DNA, 17 bp, synthetic construct
  source 1..17: mol_type = other DNA
ggtggctctgaggggct

SEQ ID NO: 151908 - DNA, 17 bp, synthetic construct
  source 1..17: mol_type = other DNA
tggtggctctgaggggc

SEQ ID NO: 151909 - DNA, 17 bp, synthetic construct
  source 1..17: mol_type = other DNA
gtggtggctctgagggg

SEQ ID NO: 151910 - DNA, 17 bp, synthetic construct
  source 1..17: mol_type = other DNA
tgtggtggctctgaggg

SEQ ID NO: 151911 - DNA, 17 bp, synthetic construct
  source 1..17: mol_type = other DNA
gtgtggtggctctgagg

SEQ ID NO: 151912 - DNA, 17 bp, synthetic construct
  source 1..17: mol_type = other DNA
ggtgtggtggctctgag

SEQ ID NO: 151913 - DNA, 17 bp, synthetic construct
  source 1..17: mol_type = other DNA
gggtgtggtggctctga

SEQ ID NO: 151914 - DNA, 17 bp, synthetic construct
  source 1..17: mol_type = other DNA
ggggtgtggtggctctg

SEQ ID NO: 151915 - DNA, 17 bp, synthetic construct
  source 1..17: mol_type = other DNA
aggggtgtggtggctct

SEQ ID NO: 151916 - DNA, 17 bp, synthetic construct
  source 1..17: mol_type = other DNA
caggggtgtggtggctc

SEQ ID NO: 151917 - DNA, 17 bp, synthetic construct
  source 1..17: mol_type = other DNA
gcaggggtgtggtggct

SEQ ID NO: 151918 - DNA, 17 bp, synthetic construct
  source 1..17: mol_type = other DNA
agcaggggtgtggtggc

SEQ ID NO: 151919 - DNA, 17 bp, synthetic construct
  source 1..17: mol_type = other DNA
aagcaggggtgtggtgg

SEQ ID NO: 151920 - DNA, 17 bp, synthetic construct
  source 1..17: mol_type = other DNA
aaagcaggggtgtggtg

SEQ ID NO: 151921 - DNA, 17 bp, synthetic construct
  source 1..17: mol_type = other DNA
gaaagcaggggtgtggt

SEQ ID NO: 151922 - DNA, 17 bp, synthetic construct
  source 1..17: mol_type = other DNA
agaaagcaggggtgtgg

SEQ ID NO: 151923 - DNA, 17 bp, synthetic construct
  source 1..17: mol_type = other DNA
aagaaagcaggggtgtg

SEQ ID NO: 151924 - DNA, 17 bp, synthetic construct
  source 1..17: mol_type = other DNA
gaagaaagcaggggtgt

SEQ ID NO: 151925 - DNA, 17 bp, synthetic construct
  source 1..17: mol_type = other DNA
ggaagaaagcaggggtg

SEQ ID NO: 151926 - DNA, 17 bp, synthetic construct
  source 1..17: mol_type = other DNA
gggaagaaagcaggggt

SEQ ID NO: 151927 - DNA, 17 bp, synthetic construct
  source 1..17: mol_type = other DNA
cgggaagaaagcagggg

SEQ ID NO: 151928 - DNA, 17 bp, synthetic construct
  source 1..17: mol_type = other DNA
ccgggaagaaagcaggg

SEQ ID NO: 151929 - DNA, 17 bp, synthetic construct
  source 1..17: mol_type = other DNA
gccgggaagaaagcagg

SEQ ID NO: 151930 - DNA, 17 bp, synthetic construct
  source 1..17: mol_type = other DNA
tgccgggaagaaagcag

SEQ ID NO: 151931 - DNA, 17 bp, synthetic construct
  source 1..17: mol_type = other DNA
ctgccgggaagaaagca

SEQ ID NO: 151932 - DNA, 17 bp, synthetic construct
  source 1..17: mol_type = other DNA
tctgccgggaagaaagc

SEQ ID NO: 151933 - DNA, 17 bp, synthetic construct
  source 1..17: mol_type = other DNA
gtctgccgggaagaaag

SEQ ID NO: 151934 - DNA, 17 bp, synthetic construct
  source 1..17: mol_type = other DNA
cgtctgccgggaagaaa

SEQ ID NO: 151935 - DNA, 17 bp, synthetic construct
  source 1..17: mol_type = other DNA
gcgtctgccgggaagaa

SEQ ID NO: 151936 - DNA, 17 bp, synthetic construct
  source 1..17: mol_type = other DNA
ggcgtctgccgggaaga

SEQ ID NO: 151937 - DNA, 17 bp, synthetic construct
  source 1..17: mol_type = other DNA
tggcgtctgccgggaag

SEQ ID NO: 151938 - DNA, 17 bp, synthetic construct
  source 1..17: mol_type = other DNA
ctggcgtctgccgggaa

SEQ ID NO: 151939 - DNA, 17 bp, synthetic construct
  source 1..17: mol_type = other DNA
cctggcgtctgccggga

SEQ ID NO: 151940 - DNA, 17 bp, synthetic construct
  source 1..17: mol_type = other DNA
gcctggcgtctgccggg

SEQ ID NO: 151941 - DNA, 17 bp, synthetic construct
  source 1..17: mol_type = other DNA
agcctggcgtctgccgg

SEQ ID NO: 151942 - DNA, 17 bp, synthetic construct
  source 1..17: mol_type = other DNA
cagcctggcgtctgccg

SEQ ID NO: 151943 - DNA, 17 bp, synthetic construct
  source 1..17: mol_type = other DNA
tcagcctggcgtctgcc

SEQ ID NO: 151944 - DNA, 17 bp, synthetic construct
  source 1..17: mol_type = other DNA
gtcagcctggcgtctgc

SEQ ID NO: 151945 - DNA, 17 bp, synthetic construct
  source 1..17: mol_type = other DNA
ggtcagcctggcgtctg

SEQ ID NO: 151946 - DNA, 17 bp, synthetic construct
  source 1..17: mol_type = other DNA
gggtcagcctggcgtct

SEQ ID NO: 151947 - DNA, 17 bp, synthetic construct
  source 1..17: mol_type = other DNA
ggggtcagcctggcgtc

SEQ ID NO: 151948 - DNA, 17 bp, synthetic construct
  source 1..17: mol_type = other DNA
cggggtcagcctggcgt

SEQ ID NO: 151949 - DNA, 17 bp, synthetic construct
  source 1..17: mol_type = other DNA
gcggggtcagcctggcg

SEQ ID NO: 151950 - DNA, 17 bp, synthetic construct
  source 1..17: mol_type = other DNA
agcggggtcagcctggc

SEQ ID NO: 151951 - DNA, 17 bp, synthetic construct
  source 1..17: mol_type = other DNA
gagcggggtcagcctgg

SEQ ID NO: 151952 - DNA, 17 bp, synthetic construct
  source 1..17: mol_type = other DNA
ggagcggggtcagcctg

SEQ ID NO: 151953 - DNA, 17 bp, synthetic construct
  source 1..17: mol_type = other DNA
tggagcggggtcagcct

SEQ ID NO: 151954 - DNA, 17 bp, synthetic construct
  source 1..17: mol_type = other DNA
ctggagcggggtcagcc

SEQ ID NO: 151955 - DNA, 17 bp, synthetic construct
  source 1..17: mol_type = other DNA
actggagcggggtcagc

SEQ ID NO: 151956 - DNA, 17 bp, synthetic construct
  source 1..17: mol_type = other DNA
aactggagcggggtcag

SEQ ID NO: 151957 - DNA, 17 bp, synthetic construct
  source 1..17: mol_type = other DNA
aaactggagcggggtca

SEQ ID NO: 151958 - DNA, 17 bp, synthetic construct
  source 1..17: mol_type = other DNA
caaactggagcggggtc

SEQ ID NO: 151959 - DNA, 17 bp, synthetic construct
  source 1..17: mol_type = other DNA
ccaaactggagcggggt

SEQ ID NO: 151960 - DNA, 17 bp, synthetic construct
  source 1..17: mol_type = other DNA
cccaaactggagcgggg

SEQ ID NO: 151961 - DNA, 17 bp, synthetic construct
  source 1..17: mol_type = other DNA
tcccaaactggagcggg

SEQ ID NO: 151962 - DNA, 17 bp, synthetic construct
  source 1..17: mol_type = other DNA
ttcccaaactggagcgg

SEQ ID NO: 151963 - DNA, 17 bp, synthetic construct
  source 1..17: mol_type = other DNA
gttcccaaactggagcg

SEQ ID NO: 151964 - DNA, 17 bp, synthetic construct
  source 1..17: mol_type = other DNA
ggttcccaaactggagc

SEQ ID NO: 151965 - DNA, 17 bp, synthetic construct
  source 1..17: mol_type = other DNA
aggttcccaaactggag

SEQ ID NO: 151966 - DNA, 17 bp, synthetic construct
  source 1..17: mol_type = other DNA
caggttcccaaactgga

SEQ ID NO: 151967 - DNA, 17 bp, synthetic construct
  source 1..17: mol_type = other DNA
gcaggttcccaaactgg

SEQ ID NO: 151968 - DNA, 17 bp, synthetic construct
  source 1..17: mol_type = other DNA
tgcaggttcccaaactg

SEQ ID NO: 151969 - DNA, 17 bp, synthetic construct
  source 1..17: mol_type = other DNA
ctgcaggttcccaaact

SEQ ID NO: 151970 - DNA, 17 bp, synthetic construct
  source 1..17: mol_type = other DNA
tctgcaggttcccaaac

SEQ ID NO: 151971 - DNA, 17 bp, synthetic construct
  source 1..17: mol_type = other DNA
ttctgcaggttcccaaa

SEQ ID NO: 151972 - DNA, 17 bp, synthetic construct
  source 1..17: mol_type = other DNA
cttctgcaggttcccaa

SEQ ID NO: 151973 - DNA, 17 bp, synthetic construct
  source 1..17: mol_type = other DNA
acttctgcaggttccca

SEQ ID NO: 151974 - DNA, 17 bp, synthetic construct
  source 1..17: mol_type = other DNA
aacttctgcaggttccc

SEQ ID NO: 151975 - DNA, 17 bp, synthetic construct
  source 1..17: mol_type = other DNA
caacttctgcaggttcc

SEQ ID NO: 151976 - DNA, 17 bp, synthetic construct
  source 1..17: mol_type = other DNA
ccaacttctgcaggttc

SEQ ID NO: 151977 - DNA, 17 bp, synthetic construct
  source 1..17: mol_type = other DNA
tccaacttctgcaggtt

SEQ ID NO: 151978 - DNA, 17 bp, synthetic construct
  source 1..17: mol_type = other DNA
atccaacttctgcaggt

SEQ ID NO: 151979 - DNA, 17 bp, synthetic construct
  source 1..17: mol_type = other DNA
catccaacttctgcagg

SEQ ID NO: 151980 - DNA, 17 bp, synthetic construct
  source 1..17: mol_type = other DNA
ccatccaacttctgcag

SEQ ID NO: 151981 - DNA, 17 bp, synthetic construct
  source 1..17: mol_type = other DNA
cccatccaacttctgca

SEQ ID NO: 151982 - DNA, 17 bp, synthetic construct
  source 1..17: mol_type = other DNA
gcccatccaacttctgc

SEQ ID NO: 151983 - DNA, 17 bp, synthetic construct
  source 1..17: mol_type = other DNA
ggcccatccaacttctg

SEQ ID NO: 151984 - DNA, 17 bp, synthetic construct
  source 1..17: mol_type = other DNA
gggcccatccaacttct

SEQ ID NO: 151985 - DNA, 17 bp, synthetic construct
  source 1..17: mol_type = other DNA
tgggcccatccaacttc

SEQ ID NO: 151986 - DNA, 17 bp, synthetic construct
  source 1..17: mol_type = other DNA
gtgggcccatccaactt

SEQ ID NO: 151987 - DNA, 17 bp, synthetic construct
  source 1..17: mol_type = other DNA
cgtgggcccatccaact

SEQ ID NO: 151988 - DNA, 17 bp, synthetic construct
  source 1..17: mol_type = other DNA
ccgtgggcccatccaac

SEQ ID NO: 151989 - DNA, 17 bp, synthetic construct
  source 1..17: mol_type = other DNA
tccgtgggcccatccaa

SEQ ID NO: 151990 - DNA, 17 bp, synthetic construct
  source 1..17: mol_type = other DNA
ctccgtgggcccatcca

SEQ ID NO: 151991 - DNA, 17 bp, synthetic construct
  source 1..17: mol_type = other DNA
gctccgtgggcccatcc

SEQ ID NO: 151992 - DNA, 17 bp, synthetic construct
  source 1..17: mol_type = other DNA
tgctccgtgggcccatc

SEQ ID NO: 151993 - DNA, 17 bp, synthetic construct
  source 1..17: mol_type = other DNA
ctgctccgtgggcccat

SEQ ID NO: 151994 - DNA, 17 bp, synthetic construct
  source 1..17: mol_type = other DNA
actgctccgtgggccca

SEQ ID NO: 151995 - DNA, 17 bp, synthetic construct
  source 1..17: mol_type = other DNA
cactgctccgtgggccc

SEQ ID NO: 151996 - DNA, 17 bp, synthetic construct
  source 1..17: mol_type = other DNA
gcactgctccgtgggcc

SEQ ID NO: 151997 - DNA, 17 bp, synthetic construct
  source 1..17: mol_type = other DNA
ggcactgctccgtgggc

SEQ ID NO: 151998 - DNA, 17 bp, synthetic construct
  source 1..17: mol_type = other DNA
gggcactgctccgtggg

SEQ ID NO: 151999 - DNA, 17 bp, synthetic construct
  source 1..17: mol_type = other DNA
cgggcactgctccgtgg

SEQ ID NO: 152000 - DNA, 17 bp, synthetic construct
  source 1..17: mol_type = other DNA
ccgggcactgctccgtg

SEQ ID NO: 152001 - DNA, 17 bp, synthetic construct
  source 1..17: mol_type = other DNA
tccgggcactgctccgt

SEQ ID NO: 152002 - DNA, 17 bp, synthetic construct
  source 1..17: mol_type = other DNA
gtccgggcactgctccg

SEQ ID NO: 152003 - DNA, 17 bp, synthetic construct
  source 1..17: mol_type = other DNA
ggtccgggcactgctcc

SEQ ID NO: 152004 - DNA, 17 bp, synthetic construct
  source 1..17: mol_type = other DNA
gggtccgggcactgctc

SEQ ID NO: 152005 - DNA, 17 bp, synthetic construct
  source 1..17: mol_type = other DNA
cgggtccgggcactgct

SEQ ID NO: 152006 - DNA, 17 bp, synthetic construct
  source 1..17: mol_type = other DNA
gcgggtccgggcactgc

SEQ ID NO: 152007 - DNA, 17 bp, synthetic construct
  source 1..17: mol_type = other DNA
agcgggtccgggcactg

SEQ ID NO: 152008 - DNA, 17 bp, synthetic construct
  source 1..17: mol_type = other DNA
cagcgggtccgggcact

SEQ ID NO: 152009 - DNA, 17 bp, synthetic construct
  source 1..17: mol_type = other DNA
gcagcgggtccgggcac

SEQ ID NO: 152010 - DNA, 17 bp, synthetic construct
  source 1..17: mol_type = other DNA
ggcagcgggtccgggca

SEQ ID NO: 152011 - DNA, 17 bp, synthetic construct
  source 1..17: mol_type = other DNA
gggcagcgggtccgggc

SEQ ID NO: 152012 - DNA, 17 bp, synthetic construct
  source 1..17: mol_type = other DNA
agggcagcgggtccggg

SEQ ID NO: 152013 - DNA, 17 bp, synthetic construct
  source 1..17: mol_type = other DNA
aagggcagcgggtccgg

SEQ ID NO: 152014 - DNA, 17 bp, synthetic construct
  source 1..17: mol_type = other DNA
caagggcagcgggtccg

SEQ ID NO: 152015 - DNA, 17 bp, synthetic construct
  source 1..17: mol_type = other DNA
gcaagggcagcgggtcc

SEQ ID NO: 152016 - DNA, 17 bp, synthetic construct
  source 1..17: mol_type = other DNA
ggcaagggcagcgggtc

SEQ ID NO: 152017 - DNA, 17 bp, synthetic construct
  source 1..17: mol_type = other DNA
cggcaagggcagcgggt

SEQ ID NO: 152018 - DNA, 17 bp, synthetic construct
  source 1..17: mol_type = other DNA
ccggcaagggcagcggg

SEQ ID NO: 152019 - DNA, 17 bp, synthetic construct
  source 1..17: mol_type = other DNA
gccggcaagggcagcgg

SEQ ID NO: 152020 - DNA, 17 bp, synthetic construct
  source 1..17: mol_type = other DNA
ggccggcaagggcagcg

SEQ ID NO: 152021 - DNA, 17 bp, synthetic construct
  source 1..17: mol_type = other DNA
cggccggcaagggcagc

SEQ ID NO: 152022 - DNA, 17 bp, synthetic construct
  source 1..17: mol_type = other DNA
ccggccggcaagggcag

SEQ ID NO: 152023 - DNA, 17 bp, synthetic construct
  source 1..17: mol_type = other DNA
gccggccggcaagggca

SEQ ID NO: 152024 - DNA, 17 bp, synthetic construct
  source 1..17: mol_type = other DNA
tgccggccggcaagggc

SEQ ID NO: 152025 - DNA, 17 bp, synthetic construct
  source 1..17: mol_type = other DNA
ttgccggccggcaaggg

SEQ ID NO: 152026 - DNA, 17 bp, synthetic construct
  source 1..17: mol_type = other DNA
gttgccggccggcaagg

SEQ ID NO: 152027 - DNA, 17 bp, synthetic construct
  source 1..17: mol_type = other DNA
agttgccggccggcaag

SEQ ID NO: 152028 - DNA, 17 bp, synthetic construct
  source 1..17: mol_type = other DNA
cagttgccggccggcaa

SEQ ID NO: 152029 - DNA, 17 bp, synthetic construct
  source 1..17: mol_type = other DNA
gcagttgccggccggca

SEQ ID NO: 152030 - DNA, 17 bp, synthetic construct
  source 1..17: mol_type = other DNA
tgcagttgccggccggc

SEQ ID NO: 152031 - DNA, 17 bp, synthetic construct
  source 1..17: mol_type = other DNA
gtgcagttgccggccgg

SEQ ID NO: 152032 - DNA, 17 bp, synthetic construct
  source 1..17: mol_type = other DNA
cgtgcagttgccggccg

SEQ ID NO: 152033 - DNA, 17 bp, synthetic construct
  source 1..17: mol_type = other DNA
ccgtgcagttgccggcc

SEQ ID NO: 152034 - DNA, 17 bp, synthetic construct
  source 1..17: mol_type = other DNA
tccgtgcagttgccggc

SEQ ID NO: 152035 - DNA, 17 bp, synthetic construct
  source 1..17: mol_type = other DNA
gtccgtgcagttgccgg

SEQ ID NO: 152036 - DNA, 17 bp, synthetic construct
  source 1..17: mol_type = other DNA
cgtccgtgcagttgccg

SEQ ID NO: 152037 - DNA, 17 bp, synthetic construct
  source 1..17: mol_type = other DNA
tcgtccgtgcagttgcc

SEQ ID NO: 152038 - DNA, 17 bp, synthetic construct
  source 1..17: mol_type = other DNA
ctcgtccgtgcagttgc

SEQ ID NO: 152039 - DNA, 17 bp, synthetic construct
  source 1..17: mol_type = other DNA
cctcgtccgtgcagttg

SEQ ID NO: 152040 - DNA, 17 bp, synthetic construct
  source 1..17: mol_type = other DNA
acctcgtccgtgcagtt

SEQ ID NO: 152041 - DNA, 17 bp, synthetic construct
  source 1..17: mol_type = other DNA
cacctcgtccgtgcagt

SEQ ID NO: 152042 - DNA, 17 bp, synthetic construct
  source 1..17: mol_type = other DNA
tcacctcgtccgtgcag

SEQ ID NO: 152043 - DNA, 17 bp, synthetic construct
  source 1..17: mol_type = other DNA
ctcacctcgtccgtgca

SEQ ID NO: 152044 - DNA, 17 bp, synthetic construct
  source 1..17: mol_type = other DNA
actcacctcgtccgtgc

SEQ ID NO: 152045 - DNA, 17 bp, synthetic construct
  source 1..17: mol_type = other DNA
gactcacctcgtccgtg

SEQ ID NO: 152046 - DNA, 17 bp, synthetic construct
  source 1..17: mol_type = other DNA
ggactcacctcgtccgt

SEQ ID NO: 152047 - DNA, 17 bp, synthetic construct
  source 1..17: mol_type = other DNA
gggactcacctcgtccg

SEQ ID NO: 152048 - DNA, 17 bp, synthetic construct
  source 1..17: mol_type = other DNA
ggggactcacctcgtcc

SEQ ID NO: 152049 - DNA, 17 bp, synthetic construct
  source 1..17: mol_type = other DNA
gggggactcacctcgtc

SEQ ID NO: 152050 - DNA, 17 bp, synthetic construct
  source 1..17: mol_type = other DNA
cgggggactcacctcgt

SEQ ID NO: 152051 - DNA, 17 bp, synthetic construct
  source 1..17: mol_type = other DNA
gcgggggactcacctcg

SEQ ID NO: 152052 - DNA, 17 bp, synthetic construct
  source 1..17: mol_type = other DNA
ggcgggggactcacctc

SEQ ID NO: 152053 - DNA, 17 bp, synthetic construct
  source 1..17: mol_type = other DNA
tggcgggggactcacct

SEQ ID NO: 152054 - DNA, 17 bp, synthetic construct
  source 1..17: mol_type = other DNA
gtggcgggggactcacc

SEQ ID NO: 152055 - DNA, 17 bp, synthetic construct
  source 1..17: mol_type = other DNA
ggtggcgggggactcac

SEQ ID NO: 152056 - DNA, 17 bp, synthetic construct
  source 1..17: mol_type = other DNA
gggtggcgggggactca

SEQ ID NO: 152057 - DNA, 17 bp, synthetic construct
  source 1..17: mol_type = other DNA
ggggtggcgggggactc

SEQ ID NO: 152058 - DNA, 17 bp, synthetic construct
  source 1..17: mol_type = other DNA
gggggtggcgggggact

SEQ ID NO: 152059 - DNA, 17 bp, synthetic construct
  source 1..17: mol_type = other DNA
tgggggtggcgggggac

SEQ ID NO: 152060 - DNA, 17 bp, synthetic construct
  source 1..17: mol_type = other DNA
ctgggggtggcggggga

SEQ ID NO: 152061 - DNA, 17 bp, synthetic construct
  source 1..17: mol_type = other DNA
gctgggggtggcggggg

SEQ ID NO: 152062 - DNA, 17 bp, synthetic construct
  source 1..17: mol_type = other DNA
agctgggggtggcgggg

SEQ ID NO: 152063 - DNA, 17 bp, synthetic construct
  source 1..17: mol_type = other DNA
gagctgggggtggcggg

SEQ ID NO: 152064 - DNA, 17 bp, synthetic construct
  source 1..17: mol_type = other DNA
ggagctgggggtggcgg

SEQ ID NO: 152065 - DNA, 17 bp, synthetic construct
  source 1..17: mol_type = other DNA
aggagctgggggtggcg

SEQ ID NO: 152066 - DNA, 17 bp, synthetic construct
  source 1..17: mol_type = other DNA
caggagctgggggtggc

SEQ ID NO: 152067 - DNA, 17 bp, synthetic construct
  source 1..17: mol_type = other DNA
ccaggagctgggggtgg

SEQ ID NO: 152068 - DNA, 17 bp, synthetic construct
  source 1..17: mol_type = other DNA
cccaggagctgggggtg

SEQ ID NO: 152069 - DNA, 17 bp, synthetic construct
  source 1..17: mol_type = other DNA
gcccaggagctgggggt

SEQ ID NO: 152070 - DNA, 17 bp, synthetic construct
  source 1..17: mol_type = other DNA
tgcccaggagctggggg

SEQ ID NO: 152071 - DNA, 17 bp, synthetic construct
  source 1..17: mol_type = other DNA
ctgcccaggagctgggg

SEQ ID NO: 152072 - DNA, 17 bp, synthetic construct
  source 1..17: mol_type = other DNA
cctgcccaggagctggg

SEQ ID NO: 152073 - DNA, 17 bp, synthetic construct
  source 1..17: mol_type = other DNA
ccctgcccaggagctgg

SEQ ID NO: 152074 - DNA, 17 bp, synthetic construct
  source 1..17: mol_type = other DNA
tccctgcccaggagctg

SEQ ID NO: 152075 - DNA, 17 bp, synthetic construct
  source 1..17: mol_type = other DNA
gtccctgcccaggagct

SEQ ID NO: 152076 - DNA, 17 bp, synthetic construct
  source 1..17: mol_type = other DNA
cgtccctgcccaggagc

SEQ ID NO: 152077 - DNA, 17 bp, synthetic construct
  source 1..17: mol_type = other DNA
ccgtccctgcccaggag

SEQ ID NO: 152078 - DNA, 17 bp, synthetic construct
  source 1..17: mol_type = other DNA
gccgtccctgcccagga

SEQ ID NO: 152079 - DNA, 17 bp, synthetic construct
  source 1..17: mol_type = other DNA
ggccgtccctgcccagg

SEQ ID NO: 152080 - DNA, 17 bp, synthetic construct
  source 1..17: mol_type = other DNA
aggccgtccctgcccag

SEQ ID NO: 152081 - DNA, 17 bp, synthetic construct
  source 1..17: mol_type = other DNA
gaggccgtccctgccca

SEQ ID NO: 152082 - DNA, 17 bp, synthetic construct
  source 1..17: mol_type = other DNA
ggaggccgtccctgccc

SEQ ID NO: 152083 - DNA, 17 bp, synthetic construct
  source 1..17: mol_type = other DNA
tggaggccgtccctgcc

SEQ ID NO: 152084 - DNA, 17 bp, synthetic construct
  source 1..17: mol_type = other DNA
ctggaggccgtccctgc

SEQ ID NO: 152085 - DNA, 17 bp, synthetic construct
  source 1..17: mol_type = other DNA
cctggaggccgtccctg

SEQ ID NO: 152086 - DNA, 17 bp, synthetic construct
  source 1..17: mol_type = other DNA
acctggaggccgtccct

SEQ ID NO: 152087 - DNA, 17 bp, synthetic construct
  source 1..17: mol_type = other DNA
gacctggaggccgtccc

SEQ ID NO: 152088 - DNA, 17 bp, synthetic construct
  source 1..17: mol_type = other DNA
ggacctggaggccgtcc

SEQ ID NO: 152089 - DNA, 17 bp, synthetic construct
  source 1..17: mol_type = other DNA
tggacctggaggccgtc

SEQ ID NO: 152090 - DNA, 17 bp, synthetic construct
  source 1..17: mol_type = other DNA
ctggacctggaggccgt

SEQ ID NO: 152091 - DNA, 17 bp, synthetic construct
  source 1..17: mol_type = other DNA
cctggacctggaggccg

SEQ ID NO: 152092 - DNA, 17 bp, synthetic construct
  source 1..17: mol_type = other DNA
ccctggacctggaggcc

SEQ ID NO: 152093 - DNA, 17 bp, synthetic construct
  source 1..17: mol_type = other DNA
cccctggacctggaggc

SEQ ID NO: 152094 - DNA, 17 bp, synthetic construct
  source 1..17: mol_type = other DNA
ccccctggacctggagg

SEQ ID NO: 152095 - DNA, 17 bp, synthetic construct
  source 1..17: mol_type = other DNA
tccccctggacctggag

SEQ ID NO: 152096 - DNA, 17 bp, synthetic construct
  source 1..17: mol_type = other DNA
ctccccctggacctgga

SEQ ID NO: 152097 - DNA, 17 bp, synthetic construct
  source 1..17: mol_type = other DNA
gctccccctggacctgg

SEQ ID NO: 152098 - DNA, 17 bp, synthetic construct
  source 1..17: mol_type = other DNA
agctccccctggacctg

SEQ ID NO: 152099 - DNA, 17 bp, synthetic construct
  source 1..17: mol_type = other DNA
cagctccccctggacct

SEQ ID NO: 152100 - DNA, 17 bp, synthetic construct
  source 1..17: mol_type = other DNA
ccagctccccctggacc

SEQ ID NO: 152101 - DNA, 17 bp, synthetic construct
  source 1..17: mol_type = other DNA
cccagctccccctggac

SEQ ID NO: 152102 - DNA, 17 bp, synthetic construct
  source 1..17: mol_type = other DNA
gcccagctccccctgga

SEQ ID NO: 152103 - DNA, 17 bp, synthetic construct
  source 1..17: mol_type = other DNA
ggcccagctccccctgg

SEQ ID NO: 152104 - DNA, 17 bp, synthetic construct
  source 1..17: mol_type = other DNA
cggcccagctccccctg

SEQ ID NO: 152105 - DNA, 17 bp, synthetic construct
  source 1..17: mol_type = other DNA
tcggcccagctccccct

SEQ ID NO: 152106 - DNA, 17 bp, synthetic construct
  source 1..17: mol_type = other DNA
ctcggcccagctccccc

SEQ ID NO: 152107 - DNA, 17 bp, synthetic construct
  source 1..17: mol_type = other DNA
cctcggcccagctcccc

SEQ ID NO: 152108 - DNA, 17 bp, synthetic construct
  source 1..17: mol_type = other DNA
acctcggcccagctccc

SEQ ID NO: 152109 - DNA, 17 bp, synthetic construct
  source 1..17: mol_type = other DNA
gacctcggcccagctcc

SEQ ID NO: 152110 - DNA, 17 bp, synthetic construct
  source 1..17: mol_type = other DNA
agacctcggcccagctc

SEQ ID NO: 152111 - DNA, 17 bp, synthetic construct
  source 1..17: mol_type = other DNA
cagacctcggcccagct

SEQ ID NO: 152112 - DNA, 17 bp, synthetic construct
  source 1..17: mol_type = other DNA
tcagacctcggcccagc

SEQ ID NO: 152113 - DNA, 17 bp, synthetic construct
  source 1..17: mol_type = other DNA
ctcagacctcggcccag

SEQ ID NO: 152114 - DNA, 17 bp, synthetic construct
  source 1..17: mol_type = other DNA
cctcagacctcggccca

SEQ ID NO: 152115 - DNA, 17 bp, synthetic construct
  source 1..17: mol_type = other DNA
tcctcagacctcggccc

SEQ ID NO: 152116 - DNA, 17 bp, synthetic construct
  source 1..17: mol_type = other DNA
ttcctcagacctcggcc

SEQ ID NO: 152117 - DNA, 17 bp, synthetic construct
  source 1..17: mol_type = other DNA
attcctcagacctcggc

SEQ ID NO: 152118 - DNA, 17 bp, synthetic construct
  source 1..17: mol_type = other DNA
cattcctcagacctcgg

SEQ ID NO: 152119 - DNA, 17 bp, synthetic construct
  source 1..17: mol_type = other DNA
acattcctcagacctcg

SEQ ID NO: 152120 - DNA, 17 bp, synthetic construct
  source 1..17: mol_type = other DNA
aacattcctcagacctc

SEQ ID NO: 152121 - DNA, 17 bp, synthetic construct
  source 1..17: mol_type = other DNA
gaacattcctcagacct

SEQ ID NO: 152122 - DNA, 17 bp, synthetic construct
  source 1..17: mol_type = other DNA
ggaacattcctcagacc

SEQ ID NO: 152123 - DNA, 17 bp, synthetic construct
  source 1..17: mol_type = other DNA
gggaacattcctcagac

SEQ ID NO: 152124 - DNA, 17 bp, synthetic construct
  source 1..17: mol_type = other DNA
tgggaacattcctcaga

SEQ ID NO: 152125 - DNA, 17 bp, synthetic construct
  source 1..17: mol_type = other DNA
ctgggaacattcctcag

SEQ ID NO: 152126 - DNA, 17 bp, synthetic construct
  source 1..17: mol_type = other DNA
gctgggaacattcctca

SEQ ID NO: 152127 - DNA, 17 bp, synthetic construct
  source 1..17: mol_type = other DNA
agctgggaacattcctc

SEQ ID NO: 152128 - DNA, 17 bp, synthetic construct
  source 1..17: mol_type = other DNA
cagctgggaacattcct

SEQ ID NO: 152129 - DNA, 17 bp, synthetic construct
  source 1..17: mol_type = other DNA
ccagctgggaacattcc

SEQ ID NO: 152130 - DNA, 17 bp, synthetic construct
  source 1..17: mol_type = other DNA
accagctgggaacattc

SEQ ID NO: 152131 - DNA, 17 bp, synthetic construct
  source 1..17: mol_type = other DNA
caccagctgggaacatt

SEQ ID NO: 152132 - DNA, 17 bp, synthetic construct
  source 1..17: mol_type = other DNA
ccaccagctgggaacat

SEQ ID NO: 152133 - DNA, 17 bp, synthetic construct
  source 1..17: mol_type = other DNA
tccaccagctgggaaca

SEQ ID NO: 152134 - DNA, 17 bp, synthetic construct
  source 1..17: mol_type = other DNA
ctccaccagctgggaac

SEQ ID NO: 152135 - DNA, 17 bp, synthetic construct
  source 1..17: mol_type = other DNA
tctccaccagctgggaa

SEQ ID NO: 152136 - DNA, 17 bp, synthetic construct
  source 1..17: mol_type = other DNA
ctctccaccagctggga

SEQ ID NO: 152137 - DNA, 17 bp, synthetic construct
  source 1..17: mol_type = other DNA
tctctccaccagctggg

SEQ ID NO: 152138 - DNA, 17 bp, synthetic construct
  source 1..17: mol_type = other DNA
atctctccaccagctgg

SEQ ID NO: 152139 - DNA, 17 bp, synthetic construct
  source 1..17: mol_type = other DNA
catctctccaccagctg

SEQ ID NO: 152140 - DNA, 17 bp, synthetic construct
  source 1..17: mol_type = other DNA
ccatctctccaccagct

SEQ ID NO: 152141 - DNA, 17 bp, synthetic construct
  source 1..17: mol_type = other DNA
accatctctccaccagc

SEQ ID NO: 152142 - DNA, 17 bp, synthetic construct
  source 1..17: mol_type = other DNA
caccatctctccaccag

SEQ ID NO: 152143 - DNA, 17 bp, synthetic construct
  source 1..17: mol_type = other DNA
gcaccatctctccacca

SEQ ID NO: 152144 - DNA, 17 bp, synthetic construct
  source 1..17: mol_type = other DNA
ggcaccatctctccacc

SEQ ID NO: 152145 - DNA, 17 bp, synthetic construct
  source 1..17: mol_type = other DNA
tggcaccatctctccac

SEQ ID NO: 152146 - DNA, 17 bp, synthetic construct
  source 1..17: mol_type = other DNA
atggcaccatctctcca

SEQ ID NO: 152147 - DNA, 17 bp, synthetic construct
  source 1..17: mol_type = other DNA
aatggcaccatctctcc

SEQ ID NO: 152148 - DNA, 17 bp, synthetic construct
  source 1..17: mol_type = other DNA
caatggcaccatctctc

SEQ ID NO: 152149 - DNA, 17 bp, synthetic construct
  source 1..17: mol_type = other DNA
ccaatggcaccatctct

SEQ ID NO: 152150 - DNA, 17 bp, synthetic construct
  source 1..17: mol_type = other DNA
tccaatggcaccatctc

SEQ ID NO: 152151 - DNA, 17 bp, synthetic construct
  source 1..17: mol_type = other DNA
ctccaatggcaccatct

SEQ ID NO: 152152 - DNA, 17 bp, synthetic construct
  source 1..17: mol_type = other DNA
cctccaatggcaccatc

SEQ ID NO: 152153 - DNA, 17 bp, synthetic construct
  source 1..17: mol_type = other DNA
ccctccaatggcaccat

SEQ ID NO: 152154 - DNA, 17 bp, synthetic construct
  source 1..17: mol_type = other DNA
tccctccaatggcacca

SEQ ID NO: 152155 - DNA, 17 bp, synthetic construct
  source 1..17: mol_type = other DNA
ctccctccaatggcacc

SEQ ID NO: 152156 - DNA, 17 bp, synthetic construct
  source 1..17: mol_type = other DNA
cctccctccaatggcac

SEQ ID NO: 152157 - DNA, 17 bp, synthetic construct
  source 1..17: mol_type = other DNA
gcctccctccaatggca

SEQ ID NO: 152158 - DNA, 17 bp, synthetic construct
  source 1..17: mol_type = other DNA
ggcctccctccaatggc

SEQ ID NO: 152159 - DNA, 17 bp, synthetic construct
  source 1..17: mol_type = other DNA
cggcctccctccaatgg

SEQ ID NO: 152160 - DNA, 17 bp, synthetic construct
  source 1..17: mol_type = other DNA
ccggcctccctccaatg

SEQ ID NO: 152161 - DNA, 17 bp, synthetic construct
  source 1..17: mol_type = other DNA
cccggcctccctccaat

SEQ ID NO: 152162 - DNA, 17 bp, synthetic construct
  source 1..17: mol_type = other DNA
gcccggcctccctccaa

SEQ ID NO: 152163 - DNA, 17 bp, synthetic construct
  source 1..17: mol_type = other DNA
tgcccggcctccctcca

SEQ ID NO: 152164 - DNA, 17 bp, synthetic construct
  source 1..17: mol_type = other DNA
ctgcccggcctccctcc

SEQ ID NO: 152165 - DNA, 17 bp, synthetic construct
  source 1..17: mol_type = other DNA
gctgcccggcctccctc

SEQ ID NO: 152166 - DNA, 17 bp, synthetic construct
  source 1..17: mol_type = other DNA
ggctgcccggcctccct

SEQ ID NO: 152167 - DNA, 17 bp, synthetic construct
  source 1..17: mol_type = other DNA
tggctgcccggcctccc

SEQ ID NO: 152168 - DNA, 17 bp, synthetic construct
  source 1..17: mol_type = other DNA
gtggctgcccggcctcc

SEQ ID NO: 152169 - DNA, 17 bp, synthetic construct
  source 1..17: mol_type = other DNA
ggtggctgcccggcctc

SEQ ID NO: 152170 - DNA, 17 bp, synthetic construct
  source 1..17: mol_type = other DNA
gggtggctgcccggcct

SEQ ID NO: 152171 - DNA, 17 bp, synthetic construct
  source 1..17: mol_type = other DNA
agggtggctgcccggcc

SEQ ID NO: 152172 - DNA, 17 bp, synthetic construct
  source 1..17: mol_type = other DNA
gagggtggctgcccggc

SEQ ID NO: 152173 - DNA, 17 bp, synthetic construct
  source 1..17: mol_type = other DNA
agagggtggctgcccgg

SEQ ID NO: 152174 - DNA, 17 bp, synthetic construct
  source 1..17: mol_type = other DNA
cagagggtggctgcccg

SEQ ID NO: 152175 - DNA, 17 bp, synthetic construct
  source 1..17: mol_type = other DNA
acagagggtggctgccc

SEQ ID NO: 152176 - DNA, 17 bp, synthetic construct
  source 1..17: mol_type = other DNA
cacagagggtggctgcc

SEQ ID NO: 152177 - DNA, 17 bp, synthetic construct
  source 1..17: mol_type = other DNA
acacagagggtggctgc

SEQ ID NO: 152178 - DNA, 17 bp, synthetic construct
  source 1..17: mol_type = other DNA
cacacagagggtggctg

SEQ ID NO: 152179 - DNA, 17 bp, synthetic construct
  source 1..17: mol_type = other DNA
gcacacagagggtggct

SEQ ID NO: 152180 - DNA, 17 bp, synthetic construct
  source 1..17: mol_type = other DNA
agcacacagagggtggc

SEQ ID NO: 152181 - DNA, 17 bp, synthetic construct
  source 1..17: mol_type = other DNA
gagcacacagagggtgg

SEQ ID NO: 152182 - DNA, 17 bp, synthetic construct
  source 1..17: mol_type = other DNA
tgagcacacagagggtg

SEQ ID NO: 152183 - DNA, 17 bp, synthetic construct
  source 1..17: mol_type = other DNA
ctgagcacacagagggt

SEQ ID NO: 152184 - DNA, 17 bp, synthetic construct
  source 1..17: mol_type = other DNA
actgagcacacagaggg

SEQ ID NO: 152185 - DNA, 17 bp, synthetic construct
  source 1..17: mol_type = other DNA
aactgagcacacagagg

SEQ ID NO: 152186 - DNA, 17 bp, synthetic construct
  source 1..17: mol_type = other DNA
gaactgagcacacagag

SEQ ID NO: 152187 - DNA, 17 bp, synthetic construct
  source 1..17: mol_type = other DNA
ggaactgagcacacaga

SEQ ID NO: 152188 - DNA, 17 bp, synthetic construct
  source 1..17: mol_type = other DNA
tggaactgagcacacag

SEQ ID NO: 152189 - DNA, 17 bp, synthetic construct
  source 1..17: mol_type = other DNA
gtggaactgagcacaca

SEQ ID NO: 152190 - DNA, 17 bp, synthetic construct
  source 1..17: mol_type = other DNA
cgtggaactgagcacac

SEQ ID NO: 152191 - DNA, 17 bp, synthetic construct
  source 1..17: mol_type = other DNA
ccgtggaactgagcaca

SEQ ID NO: 152192 - DNA, 17 bp, synthetic construct
  source 1..17: mol_type = other DNA
accgtggaactgagcac

SEQ ID NO: 152193 - DNA, 17 bp, synthetic construct
  source 1..17: mol_type = other DNA
taccgtggaactgagca

SEQ ID NO: 152194 - DNA, 17 bp, synthetic construct
  source 1..17: mol_type = other DNA
gtaccgtggaactgagc

SEQ ID NO: 152195 - DNA, 17 bp, synthetic construct
  source 1..17: mol_type = other DNA
tgtaccgtggaactgag

SEQ ID NO: 152196 - DNA, 17 bp, synthetic construct
  source 1..17: mol_type = other DNA
gtgtaccgtggaactga

SEQ ID NO: 152197 - DNA, 17 bp, synthetic construct
  source 1..17: mol_type = other DNA
tgtgtaccgtggaactg

SEQ ID NO: 152198 - DNA, 17 bp, synthetic construct
  source 1..17: mol_type = other DNA
gtgtgtaccgtggaact

SEQ ID NO: 152199 - DNA, 17 bp, synthetic construct
  source 1..17: mol_type = other DNA
agtgtgtaccgtggaac

SEQ ID NO: 152200 - DNA, 17 bp, synthetic construct
  source 1..17: mol_type = other DNA
cagtgtgtaccgtggaa

SEQ ID NO: 152201 - DNA, 17 bp, synthetic construct
  source 1..17: mol_type = other DNA
acagtgtgtaccgtgga

SEQ ID NO: 152202 - DNA, 17 bp, synthetic construct
  source 1..17: mol_type = other DNA
gacagtgtgtaccgtgg

SEQ ID NO: 152203 - DNA, 17 bp, synthetic construct
  source 1..17: mol_type = other DNA
ggacagtgtgtaccgtg

SEQ ID NO: 152204 - DNA, 17 bp, synthetic construct
  source 1..17: mol_type = other DNA
cggacagtgtgtaccgt

SEQ ID NO: 152205 - DNA, 17 bp, synthetic construct
  source 1..17: mol_type = other DNA
tcggacagtgtgtaccg

SEQ ID NO: 152206 - DNA, 17 bp, synthetic construct
  source 1..17: mol_type = other DNA
ctcggacagtgtgtacc

SEQ ID NO: 152207 - DNA, 17 bp, synthetic construct
  source 1..17: mol_type = other DNA
actcggacagtgtgtac

SEQ ID NO: 152208 - DNA, 17 bp, synthetic construct
  source 1..17: mol_type = other DNA
cactcggacagtgtgta

SEQ ID NO: 152209 - DNA, 17 bp, synthetic construct
  source 1..17: mol_type = other DNA
acactcggacagtgtgt

SEQ ID NO: 152210 - DNA, 17 bp, synthetic construct
  source 1..17: mol_type = other DNA
cacactcggacagtgtg

SEQ ID NO: 152211 - DNA, 17 bp, synthetic construct
  source 1..17: mol_type = other DNA
ccacactcggacagtgt

SEQ ID NO: 152212 - DNA, 17 bp, synthetic construct
  source 1..17: mol_type = other DNA
accacactcggacagtg

SEQ ID NO: 152213 - DNA, 17 bp, synthetic construct
  source 1..17: mol_type = other DNA
caccacactcggacagt

SEQ ID NO: 152214 - DNA, 17 bp, synthetic construct
  source 1..17: mol_type = other DNA
tcaccacactcggacag

SEQ ID NO: 152215 - DNA, 17 bp, synthetic construct
  source 1..17: mol_type = other DNA
gtcaccacactcggaca

SEQ ID NO: 152216 - DNA, 17 bp, synthetic construct
  source 1..17: mol_type = other DNA
cgtcaccacactcggac

SEQ ID NO: 152217 - DNA, 17 bp, synthetic construct
  source 1..17: mol_type = other DNA
acgtcaccacactcgga

SEQ ID NO: 152218 - DNA, 17 bp, synthetic construct
  source 1..17: mol_type = other DNA
cacgtcaccacactcgg

SEQ ID NO: 152219 - DNA, 17 bp, synthetic construct
  source 1..17: mol_type = other DNA
gcacgtcaccacactcg

SEQ ID NO: 152220 - DNA, 17 bp, synthetic construct
  source 1..17: mol_type = other DNA
cgcacgtcaccacactc

SEQ ID NO: 152221 - DNA, 17 bp, synthetic construct
  source 1..17: mol_type = other DNA
acgcacgtcaccacact

SEQ ID NO: 152222 - DNA, 17 bp, synthetic construct
  source 1..17: mol_type = other DNA
cacgcacgtcaccacac

SEQ ID NO: 152223 - DNA, 17 bp, synthetic construct
  source 1..17: mol_type = other DNA
acacgcacgtcaccaca

SEQ ID NO: 152224 - DNA, 17 bp, synthetic construct
  source 1..17: mol_type = other DNA
aacacgcacgtcaccac

SEQ ID NO: 152225 - DNA, 17 bp, synthetic construct
  source 1..17: mol_type = other DNA
gaacacgcacgtcacca

SEQ ID NO: 152226 - DNA, 17 bp, synthetic construct
  source 1..17: mol_type = other DNA
tgaacacgcacgtcacc

SEQ ID NO: 152227 - DNA, 17 bp, synthetic construct
  source 1..17: mol_type = other DNA
atgaacacgcacgtcac

SEQ ID NO: 152228 - DNA, 17 bp, synthetic construct
  source 1..17: mol_type = other DNA
gatgaacacgcacgtca

SEQ ID NO: 152229 - DNA, 17 bp, synthetic construct
  source 1..17: mol_type = other DNA
tgatgaacacgcacgtc

SEQ ID NO: 152230 - DNA, 17 bp, synthetic construct
  source 1..17: mol_type = other DNA
ctgatgaacacgcacgt

SEQ ID NO: 152231 - DNA, 17 bp, synthetic construct
  source 1..17: mol_type = other DNA
cctgatgaacacgcacg

SEQ ID NO: 152232 - DNA, 17 bp, synthetic construct
  source 1..17: mol_type = other DNA
gcctgatgaacacgcac

SEQ ID NO: 152233 - DNA, 17 bp, synthetic construct
  source 1..17: mol_type = other DNA
ggcctgatgaacacgca

SEQ ID NO: 152234 - DNA, 17 bp, synthetic construct
  source 1..17: mol_type = other DNA
tggcctgatgaacacgc

SEQ ID NO: 152235 - DNA, 17 bp, synthetic construct
  source 1..17: mol_type = other DNA
gtggcctgatgaacacg

SEQ ID NO: 152236 - DNA, 17 bp, synthetic construct
  source 1..17: mol_type = other DNA
cgtggcctgatgaacac

SEQ ID NO: 152237 - DNA, 17 bp, synthetic construct
  source 1..17: mol_type = other DNA
gcgtggcctgatgaaca

SEQ ID NO: 152238 - DNA, 17 bp, synthetic construct
  source 1..17: mol_type = other DNA
cgcgtggcctgatgaac

SEQ ID NO: 152239 - DNA, 17 bp, synthetic construct
  source 1..17: mol_type = other DNA
acgcgtggcctgatgaa

SEQ ID NO: 152240 - DNA, 17 bp, synthetic construct
  source 1..17: mol_type = other DNA
cacgcgtggcctgatga

SEQ ID NO: 152241 - DNA, 17 bp, synthetic construct
  source 1..17: mol_type = other DNA
acacgcgtggcctgatg

SEQ ID NO: 152242 - DNA, 17 bp, synthetic construct
  source 1..17: mol_type = other DNA
cacacgcgtggcctgat

SEQ ID NO: 152243 - DNA, 17 bp, synthetic construct
  source 1..17: mol_type = other DNA
gcacacgcgtggcctga

SEQ ID NO: 152244 - DNA, 17 bp, synthetic construct
  source 1..17: mol_type = other DNA
ggcacacgcgtggcctg

SEQ ID NO: 152245 - DNA, 17 bp, synthetic construct
  source 1..17: mol_type = other DNA
gggcacacgcgtggcct

SEQ ID NO: 152246 - DNA, 17 bp, synthetic construct
  source 1..17: mol_type = other DNA
tgggcacacgcgtggcc

SEQ ID NO: 152247 - DNA, 17 bp, synthetic construct
  source 1..17: mol_type = other DNA
atgggcacacgcgtggc

SEQ ID NO: 152248 - DNA, 17 bp, synthetic construct
  source 1..17: mol_type = other DNA
gatgggcacacgcgtgg

SEQ ID NO: 152249 - DNA, 17 bp, synthetic construct
  source 1..17: mol_type = other DNA
agatgggcacacgcgtg

SEQ ID NO: 152250 - DNA, 17 bp, synthetic construct
  source 1..17: mol_type = other DNA
cagatgggcacacgcgt

SEQ ID NO: 152251 - DNA, 17 bp, synthetic construct
  source 1..17: mol_type = other DNA
acagatgggcacacgcg

SEQ ID NO: 152252 - DNA, 17 bp, synthetic construct
  source 1..17: mol_type = other DNA
cacagatgggcacacgc

SEQ ID NO: 152253 - DNA, 17 bp, synthetic construct
  source 1..17: mol_type = other DNA
acacagatgggcacacg

SEQ ID NO: 152254 - DNA, 17 bp, synthetic construct
  source 1..17: mol_type = other DNA
cacacagatgggcacac

SEQ ID NO: 152255 - DNA, 17 bp, synthetic construct
  source 1..17: mol_type = other DNA
tcacacagatgggcaca

SEQ ID NO: 152256 - DNA, 17 bp, synthetic construct
  source 1..17: mol_type = other DNA
ctcacacagatgggcac

SEQ ID NO: 152257 - DNA, 17 bp, synthetic construct
  source 1..17: mol_type = other DNA
gctcacacagatgggca

SEQ ID NO: 152258 - DNA, 17 bp, synthetic construct
  source 1..17: mol_type = other DNA
tgctcacacagatgggc

SEQ ID NO: 152259 - DNA, 17 bp, synthetic construct
  source 1..17: mol_type = other DNA
ttgctcacacagatggg

SEQ ID NO: 152260 - DNA, 17 bp, synthetic construct
  source 1..17: mol_type = other DNA
tttgctcacacagatgg

SEQ ID NO: 152261 - DNA, 17 bp, synthetic construct
  source 1..17: mol_type = other DNA
gtttgctcacacagatg

SEQ ID NO: 152262 - DNA, 17 bp, synthetic construct
  source 1..17: mol_type = other DNA
tgtttgctcacacagat

SEQ ID NO: 152263 - DNA, 17 bp, synthetic construct
  source 1..17: mol_type = other DNA
gtgtttgctcacacaga

SEQ ID NO: 152264 - DNA, 17 bp, synthetic construct
  source 1..17: mol_type = other DNA
tgtgtttgctcacacag

SEQ ID NO: 152265 - DNA, 17 bp, synthetic construct
  source 1..17: mol_type = other DNA
ctgtgtttgctcacaca

SEQ ID NO: 152266 - DNA, 17 bp, synthetic construct
  source 1..17: mol_type = other DNA
cctgtgtttgctcacac

SEQ ID NO: 152267 - DNA, 17 bp, synthetic construct
  source 1..17: mol_type = other DNA
gcctgtgtttgctcaca

SEQ ID NO: 152268 - DNA, 17 bp, synthetic construct
  source 1..17: mol_type = other DNA
ggcctgtgtttgctcac

SEQ ID NO: 152269 - DNA, 17 bp, synthetic construct
  source 1..17: mol_type = other DNA
gggcctgtgtttgctca

SEQ ID NO: 152270 - DNA, 17 bp, synthetic construct
  source 1..17: mol_type = other DNA
tgggcctgtgtttgctc

SEQ ID NO: 152271 - DNA, 17 bp, synthetic construct
  source 1..17: mol_type = other DNA
atgggcctgtgtttgct

SEQ ID NO: 152272 - DNA, 17 bp, synthetic construct
  source 1..17: mol_type = other DNA
catgggcctgtgtttgc

SEQ ID NO: 152273 - DNA, 17 bp, synthetic construct
  source 1..17: mol_type = other DNA
gcatgggcctgtgtttg

SEQ ID NO: 152274 - DNA, 17 bp, synthetic construct
  source 1..17: mol_type = other DNA
agcatgggcctgtgttt

SEQ ID NO: 152275 - DNA, 17 bp, synthetic construct
  source 1..17: mol_type = other DNA
cagcatgggcctgtgtt

SEQ ID NO: 152276 - DNA, 17 bp, synthetic construct
  source 1..17: mol_type = other DNA
gcagcatgggcctgtgt

SEQ ID NO: 152277 - DNA, 17 bp, synthetic construct
  source 1..17: mol_type = other DNA
tgcagcatgggcctgtg

SEQ ID NO: 152278 - DNA, 17 bp, synthetic construct
  source 1..17: mol_type = other DNA
gtgcagcatgggcctgt

SEQ ID NO: 152279 - DNA, 17 bp, synthetic construct
  source 1..17: mol_type = other DNA
tgtgcagcatgggcctg

SEQ ID NO: 152280 - DNA, 17 bp, synthetic construct
  source 1..17: mol_type = other DNA
ctgtgcagcatgggcct

SEQ ID NO: 152281 - DNA, 17 bp, synthetic construct
  source 1..17: mol_type = other DNA
cctgtgcagcatgggcc

SEQ ID NO: 152282 - DNA, 17 bp, synthetic construct
  source 1..17: mol_type = other DNA
gcctgtgcagcatgggc

SEQ ID NO: 152283 - DNA, 17 bp, synthetic construct
  source 1..17: mol_type = other DNA
agcctgtgcagcatggg

SEQ ID NO: 152284 - DNA, 17 bp, synthetic construct
  source 1..17: mol_type = other DNA
cagcctgtgcagcatgg

SEQ ID NO: 152285 - DNA, 17 bp, synthetic construct
  source 1..17: mol_type = other DNA
ccagcctgtgcagcatg

SEQ ID NO: 152286 - DNA, 17 bp, synthetic construct
  source 1..17: mol_type = other DNA
cccagcctgtgcagcat

SEQ ID NO: 152287 - DNA, 17 bp, synthetic construct
  source 1..17: mol_type = other DNA
gcccagcctgtgcagca

SEQ ID NO: 152288 - DNA, 17 bp, synthetic construct
  source 1..17: mol_type = other DNA
agcccagcctgtgcagc

SEQ ID NO: 152289 - DNA, 17 bp, synthetic construct
  source 1..17: mol_type = other DNA
cagcccagcctgtgcag

SEQ ID NO: 152290 - DNA, 17 bp, synthetic construct
  source 1..17: mol_type = other DNA
tcagcccagcctgtgca

SEQ ID NO: 152291 - DNA, 17 bp, synthetic construct
  source 1..17: mol_type = other DNA
ctcagcccagcctgtgc

SEQ ID NO: 152292 - DNA, 17 bp, synthetic construct
  source 1..17: mol_type = other DNA
cctcagcccagcctgtg

SEQ ID NO: 152293 - DNA, 17 bp, synthetic construct
  source 1..17: mol_type = other DNA
ccctcagcccagcctgt

SEQ ID NO: 152294 - DNA, 17 bp, synthetic construct
  source 1..17: mol_type = other DNA
accctcagcccagcctg

SEQ ID NO: 152295 - DNA, 17 bp, synthetic construct
  source 1..17: mol_type = other DNA
caccctcagcccagcct

SEQ ID NO: 152296 - DNA, 17 bp, synthetic construct
  source 1..17: mol_type = other DNA
ccaccctcagcccagcc

SEQ ID NO: 152297 - DNA, 17 bp, synthetic construct
  source 1..17: mol_type = other DNA
cccaccctcagcccagc

SEQ ID NO: 152298 - DNA, 17 bp, synthetic construct
  source 1..17: mol_type = other DNA
gcccaccctcagcccag

SEQ ID NO: 152299 - DNA, 17 bp, synthetic construct
  source 1..17: mol_type = other DNA
tgcccaccctcagccca

SEQ ID NO: 152300 - DNA, 17 bp, synthetic construct
  source 1..17: mol_type = other DNA
gtgcccaccctcagccc

SEQ ID NO: 152301 - DNA, 17 bp, synthetic construct
  source 1..17: mol_type = other DNA
agtgcccaccctcagcc

SEQ ID NO: 152302 - DNA, 17 bp, synthetic construct
  source 1..17: mol_type = other DNA
gagtgcccaccctcagc

SEQ ID NO: 152303 - DNA, 17 bp, synthetic construct
  source 1..17: mol_type = other DNA
cgagtgcccaccctcag

SEQ ID NO: 152304 - DNA, 17 bp, synthetic construct
  source 1..17: mol_type = other DNA
ccgagtgcccaccctca

SEQ ID NO: 152305 - DNA, 17 bp, synthetic construct
  source 1..17: mol_type = other DNA
cccgagtgcccaccctc

SEQ ID NO: 152306 - DNA, 17 bp, synthetic construct
  source 1..17: mol_type = other DNA
tcccgagtgcccaccct

SEQ ID NO: 152307 - DNA, 17 bp, synthetic construct
  source 1..17: mol_type = other DNA
ttcccgagtgcccaccc

SEQ ID NO: 152308 - DNA, 17 bp, synthetic construct
  source 1..17: mol_type = other DNA
cttcccgagtgcccacc

SEQ ID NO: 152309 - DNA, 17 bp, synthetic construct
  source 1..17: mol_type = other DNA
gcttcccgagtgcccac

SEQ ID NO: 152310 - DNA, 17 bp, synthetic construct
  source 1..17: mol_type = other DNA
ggcttcccgagtgccca

SEQ ID NO: 152311 - DNA, 17 bp, synthetic construct
  source 1..17: mol_type = other DNA
gggcttcccgagtgccc

SEQ ID NO: 152312 - DNA, 17 bp, synthetic construct
  source 1..17: mol_type = other DNA
cgggcttcccgagtgcc

SEQ ID NO: 152313 - DNA, 17 bp, synthetic construct
  source 1..17: mol_type = other DNA
ccgggcttcccgagtgc

SEQ ID NO: 152314 - DNA, 17 bp, synthetic construct
  source 1..17: mol_type = other DNA
tccgggcttcccgagtg

SEQ ID NO: 152315 - DNA, 17 bp, synthetic construct
  source 1..17: mol_type = other DNA
ctccgggcttcccgagt

SEQ ID NO: 152316 - DNA, 17 bp, synthetic construct
  source 1..17: mol_type = other DNA
gctccgggcttcccgag

SEQ ID NO: 152317 - DNA, 17 bp, synthetic construct
  source 1..17: mol_type = other DNA
ggctccgggcttcccga

SEQ ID NO: 152318 - DNA, 17 bp, synthetic construct
  source 1..17: mol_type = other DNA
tggctccgggcttcccg

SEQ ID NO: 152319 - DNA, 17 bp, synthetic construct
  source 1..17: mol_type = other DNA
ctggctccgggcttccc

SEQ ID NO: 152320 - DNA, 17 bp, synthetic construct
  source 1..17: mol_type = other DNA
gctggctccgggcttcc

SEQ ID NO: 152321 - DNA, 17 bp, synthetic construct
  source 1..17: mol_type = other DNA
ggctggctccgggcttc

SEQ ID NO: 152322 - DNA, 17 bp, synthetic construct
  source 1..17: mol_type = other DNA
gggctggctccgggctt

SEQ ID NO: 152323 - DNA, 17 bp, synthetic construct
  source 1..17: mol_type = other DNA
agggctggctccgggct

SEQ ID NO: 152324 - DNA, 17 bp, synthetic construct
  source 1..17: mol_type = other DNA
aagggctggctccgggc

SEQ ID NO: 152325 - DNA, 17 bp, synthetic construct
  source 1..17: mol_type = other DNA
gaagggctggctccggg

SEQ ID NO: 152326 - DNA, 17 bp, synthetic construct
  source 1..17: mol_type = other DNA
ggaagggctggctccgg

SEQ ID NO: 152327 - DNA, 17 bp, synthetic construct
  source 1..17: mol_type = other DNA
gggaagggctggctccg

SEQ ID NO: 152328 - DNA, 17 bp, synthetic construct
  source 1..17: mol_type = other DNA
tgggaagggctggctcc

SEQ ID NO: 152329 - DNA, 17 bp, synthetic construct
  source 1..17: mol_type = other DNA
gtgggaagggctggctc

SEQ ID NO: 152330 - DNA, 17 bp, synthetic construct
  source 1..17: mol_type = other DNA
ggtgggaagggctggct

SEQ ID NO: 152331 - DNA, 17 bp, synthetic construct
  source 1..17: mol_type = other DNA
tggtgggaagggctggc

SEQ ID NO: 152332 - DNA, 17 bp, synthetic construct
  source 1..17: mol_type = other DNA
ctggtgggaagggctgg

SEQ ID NO: 152333 - DNA, 17 bp, synthetic construct
  source 1..17: mol_type = other DNA
gctggtgggaagggctg

SEQ ID NO: 152334 - DNA, 17 bp, synthetic construct
  source 1..17: mol_type = other DNA
tgctggtgggaagggct

SEQ ID NO: 152335 - DNA, 17 bp, synthetic construct
  source 1..17: mol_type = other DNA
ctgctggtgggaagggc

SEQ ID NO: 152336 - DNA, 17 bp, synthetic construct
  source 1..17: mol_type = other DNA
cctgctggtgggaaggg

SEQ ID NO: 152337 - DNA, 17 bp, synthetic construct
  source 1..17: mol_type = other DNA
acctgctggtgggaagg

SEQ ID NO: 152338 - DNA, 17 bp, synthetic construct
  source 1..17: mol_type = other DNA
cacctgctggtgggaag

SEQ ID NO: 152339 - DNA, 17 bp, synthetic construct
  source 1..17: mol_type = other DNA
ccacctgctggtgggaa

SEQ ID NO: 152340 - DNA, 17 bp, synthetic construct
  source 1..17: mol_type = other DNA
tccacctgctggtggga

SEQ ID NO: 152341 - DNA, 17 bp, synthetic construct
  source 1..17: mol_type = other DNA
gtccacctgctggtggg

SEQ ID NO: 152342 - DNA, 17 bp, synthetic construct
  source 1..17: mol_type = other DNA
agtccacctgctggtgg

SEQ ID NO: 152343 - DNA, 17 bp, synthetic construct
  source 1..17: mol_type = other DNA
gagtccacctgctggtg

SEQ ID NO: 152344 - DNA, 17 bp, synthetic construct
  source 1..17: mol_type = other DNA
tgagtccacctgctggt

SEQ ID NO: 152345 - DNA, 17 bp, synthetic construct
  source 1..17: mol_type = other DNA
ctgagtccacctgctgg

SEQ ID NO: 152346 - DNA, 17 bp, synthetic construct
  source 1..17: mol_type = other DNA
tctgagtccacctgctg

SEQ ID NO: 152347 - DNA, 17 bp, synthetic construct
  source 1..17: mol_type = other DNA
ttctgagtccacctgct

SEQ ID NO: 152348 - DNA, 17 bp, synthetic construct
  source 1..17: mol_type = other DNA
cttctgagtccacctgc

SEQ ID NO: 152349 - DNA, 17 bp, synthetic construct
  source 1..17: mol_type = other DNA
ccttctgagtccacctg

SEQ ID NO: 152350 - DNA, 17 bp, synthetic construct
  source 1..17: mol_type = other DNA
cccttctgagtccacct

SEQ ID NO: 152351 - DNA, 17 bp, synthetic construct
  source 1..17: mol_type = other DNA
ccccttctgagtccacc

SEQ ID NO: 152352 - DNA, 17 bp, synthetic construct
  source 1..17: mol_type = other DNA
gccccttctgagtccac

SEQ ID NO: 152353 - DNA, 17 bp, synthetic construct
  source 1..17: mol_type = other DNA
ggccccttctgagtcca

SEQ ID NO: 152354 - DNA, 17 bp, synthetic construct
  source 1..17: mol_type = other DNA
aggccccttctgagtcc

SEQ ID NO: 152355 - DNA, 17 bp, synthetic construct
  source 1..17: mol_type = other DNA
caggccccttctgagtc

SEQ ID NO: 152356 - DNA, 17 bp, synthetic construct
  source 1..17: mol_type = other DNA
ccaggccccttctgagt

SEQ ID NO: 152357 - DNA, 17 bp, synthetic construct
  source 1..17: mol_type = other DNA
tccaggccccttctgag

SEQ ID NO: 152358 - DNA, 17 bp, synthetic construct
  source 1..17: mol_type = other DNA
ctccaggccccttctga

SEQ ID NO: 152359 - DNA, 17 bp, synthetic construct
  source 1..17: mol_type = other DNA
cctccaggccccttctg

SEQ ID NO: 152360 - DNA, 17 bp, synthetic construct
  source 1..17: mol_type = other DNA
gcctccaggccccttct

SEQ ID NO: 152361 - DNA, 17 bp, synthetic construct
  source 1..17: mol_type = other DNA
agcctccaggccccttc

SEQ ID NO: 152362 - DNA, 17 bp, synthetic construct
  source 1..17: mol_type = other DNA
gagcctccaggcccctt

SEQ ID NO: 152363 - DNA, 17 bp, synthetic construct
  source 1..17: mol_type = other DNA
ggagcctccaggcccct

SEQ ID NO: 152364 - DNA, 17 bp, synthetic construct
  source 1..17: mol_type = other DNA
tggagcctccaggcccc

SEQ ID NO: 152365 - DNA, 17 bp, synthetic construct
  source 1..17: mol_type = other DNA
ctggagcctccaggccc

SEQ ID NO: 152366 - DNA, 17 bp, synthetic construct
  source 1..17: mol_type = other DNA
cctggagcctccaggcc

SEQ ID NO: 152367 - DNA, 17 bp, synthetic construct
  source 1..17: mol_type = other DNA
tcctggagcctccaggc

SEQ ID NO: 152368 - DNA, 17 bp, synthetic construct
  source 1..17: mol_type = other DNA
atcctggagcctccagg

SEQ ID NO: 152369 - DNA, 17 bp, synthetic construct
  source 1..17: mol_type = other DNA
gatcctggagcctccag

SEQ ID NO: 152370 - DNA, 17 bp, synthetic construct
  source 1..17: mol_type = other DNA
ggatcctggagcctcca

SEQ ID NO: 152371 - DNA, 17 bp, synthetic construct
  source 1..17: mol_type = other DNA
gggatcctggagcctcc

SEQ ID NO: 152372 - DNA, 17 bp, synthetic construct
  source 1..17: mol_type = other DNA
ggggatcctggagcctc

SEQ ID NO: 152373 - DNA, 17 bp, synthetic construct
  source 1..17: mol_type = other DNA
tggggatcctggagcct

SEQ ID NO: 152374 - DNA, 17 bp, synthetic construct
  source 1..17: mol_type = other DNA
ttggggatcctggagcc

SEQ ID NO: 152375 - DNA, 17 bp, synthetic construct
  source 1..17: mol_type = other DNA
tttggggatcctggagc

SEQ ID NO: 152376 - DNA, 17 bp, synthetic construct
  source 1..17: mol_type = other DNA
gtttggggatcctggag

SEQ ID NO: 152377 - DNA, 17 bp, synthetic construct
  source 1..17: mol_type = other DNA
ggtttggggatcctgga

SEQ ID NO: 152378 - DNA, 17 bp, synthetic construct
  source 1..17: mol_type = other DNA
tggtttggggatcctgg

SEQ ID NO: 152379 - DNA, 17 bp, synthetic construct
  source 1..17: mol_type = other DNA
ctggtttggggatcctg

SEQ ID NO: 152380 - DNA, 17 bp, synthetic construct
  source 1..17: mol_type = other DNA
gctggtttggggatcct

SEQ ID NO: 152381 - DNA, 17 bp, synthetic construct
  source 1..17: mol_type = other DNA
tgctggtttggggatcc

SEQ ID NO: 152382 - DNA, 17 bp, synthetic construct
  source 1..17: mol_type = other DNA
ctgctggtttggggatc

SEQ ID NO: 152383 - DNA, 17 bp, synthetic construct
  source 1..17: mol_type = other DNA
cctgctggtttggggat

SEQ ID NO: 152384 - DNA, 17 bp, synthetic construct
  source 1..17: mol_type = other DNA
tcctgctggtttgggga

SEQ ID NO: 152385 - DNA, 17 bp, synthetic construct
  source 1..17: mol_type = other DNA
atcctgctggtttgggg

SEQ ID NO: 152386 - DNA, 17 bp, synthetic construct
  source 1..17: mol_type = other DNA
gatcctgctggtttggg

SEQ ID NO: 152387 - DNA, 17 bp, synthetic construct
  source 1..17: mol_type = other DNA
agatcctgctggtttgg

SEQ ID NO: 152388 - DNA, 17 bp, synthetic construct
  source 1..17: mol_type = other DNA
gagatcctgctggtttg

SEQ ID NO: 152389 - DNA, 17 bp, synthetic construct
  source 1..17: mol_type = other DNA
agagatcctgctggttt

SEQ ID NO: 152390 - DNA, 17 bp, synthetic construct
  source 1..17: mol_type = other DNA
cagagatcctgctggtt

SEQ ID NO: 152391 - DNA, 17 bp, synthetic construct
  source 1..17: mol_type = other DNA
tcagagatcctgctggt

SEQ ID NO: 152392 - DNA, 17 bp, synthetic construct
  source 1..17: mol_type = other DNA
ctcagagatcctgctgg

SEQ ID NO: 152393 - DNA, 17 bp, synthetic construct
  source 1..17: mol_type = other DNA
gctcagagatcctgctg

SEQ ID NO: 152394 - DNA, 17 bp, synthetic construct
  source 1..17: mol_type = other DNA
ggctcagagatcctgct

SEQ ID NO: 152395 - DNA, 17 bp, synthetic construct
  source 1..17: mol_type = other DNA
aggctcagagatcctgc

SEQ ID NO: 152396 - DNA, 17 bp, synthetic construct
  source 1..17: mol_type = other DNA
aaggctcagagatcctg

SEQ ID NO: 152397 - DNA, 17 bp, synthetic construct
  source 1..17: mol_type = other DNA
taaggctcagagatcct

SEQ ID NO: 152398 - DNA, 17 bp, synthetic construct
  source 1..17: mol_type = other DNA
ttaaggctcagagatcc

SEQ ID NO: 152399 - DNA, 17 bp, synthetic construct
  source 1..17: mol_type = other DNA
cttaaggctcagagatc

SEQ ID NO: 152400 - DNA, 17 bp, synthetic construct
  source 1..17: mol_type = other DNA
acttaaggctcagagat

SEQ ID NO: 152401 - DNA, 17 bp, synthetic construct
  source 1..17: mol_type = other DNA
aacttaaggctcagaga

SEQ ID NO: 152402 - DNA, 17 bp, synthetic construct
  source 1..17: mol_type = other DNA
caacttaaggctcagag

SEQ ID NO: 152403 - DNA, 17 bp, synthetic construct
  source 1..17: mol_type = other DNA
acaacttaaggctcaga

SEQ ID NO: 152404 - DNA, 17 bp, synthetic construct
  source 1..17: mol_type = other DNA
cacaacttaaggctcag

SEQ ID NO: 152405 - DNA, 17 bp, synthetic construct
  source 1..17: mol_type = other DNA
gcacaacttaaggctca

SEQ ID NO: 152406 - DNA, 17 bp, synthetic construct
  source 1..17: mol_type = other DNA
agcacaacttaaggctc

SEQ ID NO: 152407 - DNA, 17 bp, synthetic construct
  source 1..17: mol_type = other DNA
cagcacaacttaaggct

SEQ ID NO: 152408 - DNA, 17 bp, synthetic construct
  source 1..17: mol_type = other DNA
acagcacaacttaaggc

SEQ ID NO: 152409 - DNA, 17 bp, synthetic construct
  source 1..17: mol_type = other DNA
cacagcacaacttaagg

SEQ ID NO: 152410 - DNA, 17 bp, synthetic construct
  source 1..17: mol_type = other DNA
tcacagcacaacttaag

SEQ ID NO: 152411 - DNA, 17 bp, synthetic construct
  source 1..17: mol_type = other DNA
ttcacagcacaacttaa

SEQ ID NO: 152412 - DNA, 17 bp, synthetic construct
  source 1..17: mol_type = other DNA
attcacagcacaactta

SEQ ID NO: 152413 - DNA, 17 bp, synthetic construct
  source 1..17: mol_type = other DNA
cattcacagcacaactt

SEQ ID NO: 152414 - DNA, 17 bp, synthetic construct
  source 1..17: mol_type = other DNA
tcattcacagcacaact

SEQ ID NO: 152415 - DNA, 17 bp, synthetic construct
  source 1..17: mol_type = other DNA
gtcattcacagcacaac

SEQ ID NO: 152416 - DNA, 17 bp, synthetic construct
  source 1..17: mol_type = other DNA
tgtcattcacagcacaa

SEQ ID NO: 152417 - DNA, 17 bp, synthetic construct
  source 1..17: mol_type = other DNA
ctgtcattcacagcaca

SEQ ID NO: 152418 - DNA, 17 bp, synthetic construct
  source 1..17: mol_type = other DNA
gctgtcattcacagcac

SEQ ID NO: 152419 - DNA, 17 bp, synthetic construct
  source 1..17: mol_type = other DNA
tgctgtcattcacagca

SEQ ID NO: 152420 - DNA, 17 bp, synthetic construct
  source 1..17: mol_type = other DNA
atgctgtcattcacagc

SEQ ID NO: 152421 - DNA, 17 bp, synthetic construct
  source 1..17: mol_type = other DNA
catgctgtcattcacag

SEQ ID NO: 152422 - DNA, 17 bp, synthetic construct
  source 1..17: mol_type = other DNA
tcatgctgtcattcaca

SEQ ID NO: 152423 - DNA, 17 bp, synthetic construct
  source 1..17: mol_type = other DNA
ctcatgctgtcattcac

SEQ ID NO: 152424 - DNA, 17 bp, synthetic construct
  source 1..17: mol_type = other DNA
gctcatgctgtcattca

SEQ ID NO: 152425 - DNA, 17 bp, synthetic construct
  source 1..17: mol_type = other DNA
ggctcatgctgtcattc

SEQ ID NO: 152426 - DNA, 17 bp, synthetic construct
  source 1..17: mol_type = other DNA
gggctcatgctgtcatt

SEQ ID NO: 152427 - DNA, 17 bp, synthetic construct
  source 1..17: mol_type = other DNA
ggggctcatgctgtcat

SEQ ID NO: 152428 - DNA, 17 bp, synthetic construct
  source 1..17: mol_type = other DNA
gggggctcatgctgtca

SEQ ID NO: 152429 - DNA, 17 bp, synthetic construct
  source 1..17: mol_type = other DNA
ggggggctcatgctgtc

SEQ ID NO: 152430 - DNA, 17 bp, synthetic construct
  source 1..17: mol_type = other DNA
aggggggctcatgctgt

SEQ ID NO: 152431 - DNA, 17 bp, synthetic construct
  source 1..17: mol_type = other DNA
caggggggctcatgctg

SEQ ID NO: 152432 - DNA, 17 bp, synthetic construct
  source 1..17: mol_type = other DNA
acaggggggctcatgct

SEQ ID NO: 152433 - DNA, 17 bp, synthetic construct
  source 1..17: mol_type = other DNA
cacaggggggctcatgc

SEQ ID NO: 152434 - DNA, 17 bp, synthetic construct
  source 1..17: mol_type = other DNA
tcacaggggggctcatg

SEQ ID NO: 152435 - DNA, 17 bp, synthetic construct
  source 1..17: mol_type = other DNA
ctcacaggggggctcat

SEQ ID NO: 152436 - DNA, 17 bp, synthetic construct
  source 1..17: mol_type = other DNA
gctcacaggggggctca

SEQ ID NO: 152437 - DNA, 17 bp, synthetic construct
  source 1..17: mol_type = other DNA
agctcacaggggggctc

SEQ ID NO: 152438 - DNA, 17 bp, synthetic construct
  source 1..17: mol_type = other DNA
cagctcacaggggggct

SEQ ID NO: 152439 - DNA, 17 bp, synthetic construct
  source 1..17: mol_type = other DNA
ccagctcacaggggggc

SEQ ID NO: 152440 - DNA, 17 bp, synthetic construct
  source 1..17: mol_type = other DNA
cccagctcacagggggg

SEQ ID NO: 152441 - DNA, 17 bp, synthetic construct
  source 1..17: mol_type = other DNA
gcccagctcacaggggg

SEQ ID NO: 152442 - DNA, 17 bp, synthetic construct
  source 1..17: mol_type = other DNA
ggcccagctcacagggg

SEQ ID NO: 152443 - DNA, 17 bp, synthetic construct
  source 1..17: mol_type = other DNA
gggcccagctcacaggg

SEQ ID NO: 152444 - DNA, 17 bp, synthetic construct
  source 1..17: mol_type = other DNA
ggggcccagctcacagg

SEQ ID NO: 152445 - DNA, 17 bp, synthetic construct
  source 1..17: mol_type = other DNA
cggggcccagctcacag

SEQ ID NO: 152446 - DNA, 17 bp, synthetic construct
  source 1..17: mol_type = other DNA
gcggggcccagctcaca

SEQ ID NO: 152447 - DNA, 17 bp, synthetic construct
  source 1..17: mol_type = other DNA
tgcggggcccagctcac

SEQ ID NO: 152448 - DNA, 17 bp, synthetic construct
  source 1..17: mol_type = other DNA
ctgcggggcccagctca

SEQ ID NO: 152449 - DNA, 17 bp, synthetic construct
  source 1..17: mol_type = other DNA
gctgcggggcccagctc

SEQ ID NO: 152450 - DNA, 17 bp, synthetic construct
  source 1..17: mol_type = other DNA
ggctgcggggcccagct

SEQ ID NO: 152451 - DNA, 17 bp, synthetic construct
  source 1..17: mol_type = other DNA
cggctgcggggcccagc

SEQ ID NO: 152452 - DNA, 17 bp, synthetic construct
  source 1..17: mol_type = other DNA
ccggctgcggggcccag

SEQ ID NO: 152453 - DNA, 17 bp, synthetic construct
  source 1..17: mol_type = other DNA
gccggctgcggggccca

SEQ ID NO: 152454 - DNA, 17 bp, synthetic construct
  source 1..17: mol_type = other DNA
tgccggctgcggggccc

SEQ ID NO: 152455 - DNA, 17 bp, synthetic construct
  source 1..17: mol_type = other DNA
ctgccggctgcggggcc

SEQ ID NO: 152456 - DNA, 17 bp, synthetic construct
  source 1..17: mol_type = other DNA
gctgccggctgcggggc

SEQ ID NO: 152457 - DNA, 17 bp, synthetic construct
  source 1..17: mol_type = other DNA
ggctgccggctgcgggg

SEQ ID NO: 152458 - DNA, 17 bp, synthetic construct
  source 1..17: mol_type = other DNA
gggctgccggctgcggg

SEQ ID NO: 152459 - DNA, 17 bp, synthetic construct
  source 1..17: mol_type = other DNA
agggctgccggctgcgg

SEQ ID NO: 152460 - DNA, 17 bp, synthetic construct
  source 1..17: mol_type = other DNA
cagggctgccggctgcg

SEQ ID NO: 152461 - DNA, 17 bp, synthetic construct
  source 1..17: mol_type = other DNA
ccagggctgccggctgc

SEQ ID NO: 152462 - DNA, 17 bp, synthetic construct
  source 1..17: mol_type = other DNA
cccagggctgccggctg

SEQ ID NO: 152463 - DNA, 17 bp, synthetic construct
  source 1..17: mol_type = other DNA
gcccagggctgccggct

SEQ ID NO: 152464 - DNA, 17 bp, synthetic construct
  source 1..17: mol_type = other DNA
ggcccagggctgccggc

SEQ ID NO: 152465 - DNA, 17 bp, synthetic construct
  source 1..17: mol_type = other DNA
aggcccagggctgccgg

SEQ ID NO: 152466 - DNA, 17 bp, synthetic construct
  source 1..17: mol_type = other DNA
caggcccagggctgccg

SEQ ID NO: 152467 - DNA, 17 bp, synthetic construct
  source 1..17: mol_type = other DNA
ccaggcccagggctgcc

SEQ ID NO: 152468 - DNA, 17 bp, synthetic construct
  source 1..17: mol_type = other DNA
cccaggcccagggctgc

SEQ ID NO: 152469 - DNA, 17 bp, synthetic construct
  source 1..17: mol_type = other DNA
ccccaggcccagggctg

SEQ ID NO: 152470 - DNA, 17 bp, synthetic construct
  source 1..17: mol_type = other DNA
tccccaggcccagggct

SEQ ID NO: 152471 - DNA, 17 bp, synthetic construct
  source 1..17: mol_type = other DNA
gtccccaggcccagggc

SEQ ID NO: 152472 - DNA, 17 bp, synthetic construct
  source 1..17: mol_type = other DNA
cgtccccaggcccaggg

SEQ ID NO: 152473 - DNA, 17 bp, synthetic construct
  source 1..17: mol_type = other DNA
ccgtccccaggcccagg

SEQ ID NO: 152474 - DNA, 17 bp, synthetic construct
  source 1..17: mol_type = other DNA
tccgtccccaggcccag

SEQ ID NO: 152475 - DNA, 17 bp, synthetic construct
  source 1..17: mol_type = other DNA
ctccgtccccaggccca

SEQ ID NO: 152476 - DNA, 17 bp, synthetic construct
  source 1..17: mol_type = other DNA
cctccgtccccaggccc

SEQ ID NO: 152477 - DNA, 17 bp, synthetic construct
  source 1..17: mol_type = other DNA
tcctccgtccccaggcc

SEQ ID NO: 152478 - DNA, 17 bp, synthetic construct
  source 1..17: mol_type = other DNA
gtcctccgtccccaggc

SEQ ID NO: 152479 - DNA, 17 bp, synthetic construct
  source 1..17: mol_type = other DNA
tgtcctccgtccccagg

SEQ ID NO: 152480 - DNA, 17 bp, synthetic construct
  source 1..17: mol_type = other DNA
gtgtcctccgtccccag

SEQ ID NO: 152481 - DNA, 17 bp, synthetic construct
  source 1..17: mol_type = other DNA
agtgtcctccgtcccca

SEQ ID NO: 152482 - DNA, 17 bp, synthetic construct
  source 1..17: mol_type = other DNA
gagtgtcctccgtcccc

SEQ ID NO: 152483 - DNA, 17 bp, synthetic construct
  source 1..17: mol_type = other DNA
tgagtgtcctccgtccc

SEQ ID NO: 152484 - DNA, 17 bp, synthetic construct
  source 1..17: mol_type = other DNA
ctgagtgtcctccgtcc

SEQ ID NO: 152485 - DNA, 17 bp, synthetic construct
  source 1..17: mol_type = other DNA
gctgagtgtcctccgtc

SEQ ID NO: 152486 - DNA, 17 bp, synthetic construct
  source 1..17: mol_type = other DNA
tgctgagtgtcctccgt

SEQ ID NO: 152487 - DNA, 17 bp, synthetic construct
  source 1..17: mol_type = other DNA
gtgctgagtgtcctccg

SEQ ID NO: 152488 - DNA, 17 bp, synthetic construct
  source 1..17: mol_type = other DNA
agtgctgagtgtcctcc

SEQ ID NO: 152489 - DNA, 17 bp, synthetic construct
  source 1..17: mol_type = other DNA
cagtgctgagtgtcctc

SEQ ID NO: 152490 - DNA, 17 bp, synthetic construct
  source 1..17: mol_type = other DNA
ccagtgctgagtgtcct

SEQ ID NO: 152491 - DNA, 17 bp, synthetic construct
  source 1..17: mol_type = other DNA
tccagtgctgagtgtcc

SEQ ID NO: 152492 - DNA, 17 bp, synthetic construct
  source 1..17: mol_type = other DNA
gtccagtgctgagtgtc

SEQ ID NO: 152493 - DNA, 17 bp, synthetic construct
  source 1..17: mol_type = other DNA
agtccagtgctgagtgt

SEQ ID NO: 152494 - DNA, 17 bp, synthetic construct
  source 1..17: mol_type = other DNA
cagtccagtgctgagtg

SEQ ID NO: 152495 - DNA, 17 bp, synthetic construct
  source 1..17: mol_type = other DNA
gcagtccagtgctgagt

SEQ ID NO: 152496 - DNA, 17 bp, synthetic construct
  source 1..17: mol_type = other DNA
ggcagtccagtgctgag

SEQ ID NO: 152497 - DNA, 17 bp, synthetic construct
  source 1..17: mol_type = other DNA
gggcagtccagtgctga

SEQ ID NO: 152498 - DNA, 17 bp, synthetic construct
  source 1..17: mol_type = other DNA
agggcagtccagtgctg

SEQ ID NO: 152499 - DNA, 17 bp, synthetic construct
  source 1..17: mol_type = other DNA
cagggcagtccagtgct

SEQ ID NO: 152500 - DNA, 17 bp, synthetic construct
  source 1..17: mol_type = other DNA
tcagggcagtccagtgc

SEQ ID NO: 152501 - DNA, 17 bp, synthetic construct
  source 1..17: mol_type = other DNA
ttcagggcagtccagtg

SEQ ID NO: 152502 - DNA, 17 bp, synthetic construct
  source 1..17: mol_type = other DNA
gttcagggcagtccagt

SEQ ID NO: 152503 - DNA, 17 bp, synthetic construct
  source 1..17: mol_type = other DNA
ggttcagggcagtccag

SEQ ID NO: 152504 - DNA, 17 bp, synthetic construct
  source 1..17: mol_type = other DNA
aggttcagggcagtcca

SEQ ID NO: 152505 - DNA, 17 bp, synthetic construct
  source 1..17: mol_type = other DNA
caggttcagggcagtcc

SEQ ID NO: 152506 - DNA, 17 bp, synthetic construct
  source 1..17: mol_type = other DNA
gcaggttcagggcagtc

SEQ ID NO: 152507 - DNA, 17 bp, synthetic construct
  source 1..17: mol_type = other DNA
ggcaggttcagggcagt

SEQ ID NO: 152508 - DNA, 17 bp, synthetic construct
  source 1..17: mol_type = other DNA
cggcaggttcagggcag

SEQ ID NO: 152509 - DNA, 17 bp, synthetic construct
  source 1..17: mol_type = other DNA
ccggcaggttcagggca

SEQ ID NO: 152510 - DNA, 17 bp, synthetic construct
  source 1..17: mol_type = other DNA
cccggcaggttcagggc

SEQ ID NO: 152511 - DNA, 17 bp, synthetic construct
  source 1..17: mol_type = other DNA
gcccggcaggttcaggg

SEQ ID NO: 152512 - DNA, 17 bp, synthetic construct
  source 1..17: mol_type = other DNA
agcccggcaggttcagg

SEQ ID NO: 152513 - DNA, 17 bp, synthetic construct
  source 1..17: mol_type = other DNA
cagcccggcaggttcag

SEQ ID NO: 152514 - DNA, 17 bp, synthetic construct
  source 1..17: mol_type = other DNA
gcagcccggcaggttca

SEQ ID NO: 152515 - DNA, 17 bp, synthetic construct
  source 1..17: mol_type = other DNA
ggcagcccggcaggttc

SEQ ID NO: 152516 - DNA, 17 bp, synthetic construct
  source 1..17: mol_type = other DNA
gggcagcccggcaggtt

SEQ ID NO: 152517 - DNA, 17 bp, synthetic construct
  source 1..17: mol_type = other DNA
tgggcagcccggcaggt

SEQ ID NO: 152518 - DNA, 17 bp, synthetic construct
  source 1..17: mol_type = other DNA
ctgggcagcccggcagg

SEQ ID NO: 152519 - DNA, 17 bp, synthetic construct
  source 1..17: mol_type = other DNA
tctgggcagcccggcag

SEQ ID NO: 152520 - DNA, 17 bp, synthetic construct
  source 1..17: mol_type = other DNA
ctctgggcagcccggca

SEQ ID NO: 152521 - DNA, 17 bp, synthetic construct
  source 1..17: mol_type = other DNA
tctctgggcagcccggc

SEQ ID NO: 152522 - DNA, 17 bp, synthetic construct
  source 1..17: mol_type = other DNA
ctctctgggcagcccgg

SEQ ID NO: 152523 - DNA, 17 bp, synthetic construct
  source 1..17: mol_type = other DNA
cctctctgggcagcccg

SEQ ID NO: 152524 - DNA, 17 bp, synthetic construct
  source 1..17: mol_type = other DNA
gcctctctgggcagccc

SEQ ID NO: 152525 - DNA, 17 bp, synthetic construct
  source 1..17: mol_type = other DNA
cgcctctctgggcagcc

SEQ ID NO: 152526 - DNA, 17 bp, synthetic construct
  source 1..17: mol_type = other DNA
ccgcctctctgggcagc

SEQ ID NO: 152527 - DNA, 17 bp, synthetic construct
  source 1..17: mol_type = other DNA
cccgcctctctgggcag

SEQ ID NO: 152528 - DNA, 17 bp, synthetic construct
  source 1..17: mol_type = other DNA
ccccgcctctctgggca

SEQ ID NO: 152529 - DNA, 17 bp, synthetic construct
  source 1..17: mol_type = other DNA
gccccgcctctctgggc

SEQ ID NO: 152530 - DNA, 17 bp, synthetic construct
  source 1..17: mol_type = other DNA
ggccccgcctctctggg

SEQ ID NO: 152531 - DNA, 17 bp, synthetic construct
  source 1..17: mol_type = other DNA
aggccccgcctctctgg

SEQ ID NO: 152532 - DNA, 17 bp, synthetic construct
  source 1..17: mol_type = other DNA
gaggccccgcctctctg

SEQ ID NO: 152533 - DNA, 17 bp, synthetic construct
  source 1..17: mol_type = other DNA
ggaggccccgcctctct

SEQ ID NO: 152534 - DNA, 17 bp, synthetic construct
  source 1..17: mol_type = other DNA
tggaggccccgcctctc

SEQ ID NO: 152535 - DNA, 17 bp, synthetic construct
  source 1..17: mol_type = other DNA
gtggaggccccgcctct

SEQ ID NO: 152536 - DNA, 17 bp, synthetic construct
  source 1..17: mol_type = other DNA
ggtggaggccccgcctc

SEQ ID NO: 152537 - DNA, 17 bp, synthetic construct
  source 1..17: mol_type = other DNA
aggtggaggccccgcct

SEQ ID NO: 152538 - DNA, 17 bp, synthetic construct
  source 1..17: mol_type = other DNA
gaggtggaggccccgcc

SEQ ID NO: 152539 - DNA, 17 bp, synthetic construct
  source 1..17: mol_type = other DNA
ggaggtggaggccccgc

SEQ ID NO: 152540 - DNA, 17 bp, synthetic construct
  source 1..17: mol_type = other DNA
gggaggtggaggccccg

SEQ ID NO: 152541 - DNA, 17 bp, synthetic construct
  source 1..17: mol_type = other DNA
ggggaggtggaggcccc

SEQ ID NO: 152542 - DNA, 17 bp, synthetic construct
  source 1..17: mol_type = other DNA
aggggaggtggaggccc

SEQ ID NO: 152543 - DNA, 17 bp, synthetic construct
  source 1..17: mol_type = other DNA
gaggggaggtggaggcc

SEQ ID NO: 152544 - DNA, 17 bp, synthetic construct
  source 1..17: mol_type = other DNA
ggaggggaggtggaggc

SEQ ID NO: 152545 - DNA, 17 bp, synthetic construct
  source 1..17: mol_type = other DNA
aggaggggaggtggagg

SEQ ID NO: 152546 - DNA, 17 bp, synthetic construct
  source 1..17: mol_type = other DNA
aaggaggggaggtggag

SEQ ID NO: 152547 - DNA, 17 bp, synthetic construct
  source 1..17: mol_type = other DNA
caaggaggggaggtgga

SEQ ID NO: 152548 - DNA, 17 bp, synthetic construct
  source 1..17: mol_type = other DNA
ccaaggaggggaggtgg

SEQ ID NO: 152549 - DNA, 17 bp, synthetic construct
  source 1..17: mol_type = other DNA
gccaaggaggggaggtg

SEQ ID NO: 152550 - DNA, 17 bp, synthetic construct
  source 1..17: mol_type = other DNA
agccaaggaggggaggt

SEQ ID NO: 152551 - DNA, 17 bp, synthetic construct
  source 1..17: mol_type = other DNA
gagccaaggaggggagg

SEQ ID NO: 152552 - DNA, 17 bp, synthetic construct
  source 1..17: mol_type = other DNA
ggagccaaggaggggag

SEQ ID NO: 152553 - DNA, 17 bp, synthetic construct
  source 1..17: mol_type = other DNA
cggagccaaggagggga

SEQ ID NO: 152554 - DNA, 17 bp, synthetic construct
  source 1..17: mol_type = other DNA
gcggagccaaggagggg

SEQ ID NO: 152555 - DNA, 17 bp, synthetic construct
  source 1..17: mol_type = other DNA
ggcggagccaaggaggg

SEQ ID NO: 152556 - DNA, 17 bp, synthetic construct
  source 1..17: mol_type = other DNA
aggcggagccaaggagg

SEQ ID NO: 152557 - DNA, 17 bp, synthetic construct
  source 1..17: mol_type = other DNA
gaggcggagccaaggag

SEQ ID NO: 152558 - DNA, 17 bp, synthetic construct
  source 1..17: mol_type = other DNA
ggaggcggagccaagga

SEQ ID NO: 152559 - DNA, 17 bp, synthetic construct
  source 1..17: mol_type = other DNA
aggaggcggagccaagg

SEQ ID NO: 152560 - DNA, 17 bp, synthetic construct
  source 1..17: mol_type = other DNA
caggaggcggagccaag

SEQ ID NO: 152561 - DNA, 17 bp, synthetic construct
  source 1..17: mol_type = other DNA
ccaggaggcggagccaa

SEQ ID NO: 152562 - DNA, 17 bp, synthetic construct
  source 1..17: mol_type = other DNA
cccaggaggcggagcca

SEQ ID NO: 152563 - DNA, 17 bp, synthetic construct
  source 1..17: mol_type = other DNA
ccccaggaggcggagcc

SEQ ID NO: 152564 - DNA, 17 bp, synthetic construct
  source 1..17: mol_type = other DNA
accccaggaggcggagc

SEQ ID NO: 152565 - DNA, 17 bp, synthetic construct
  source 1..17: mol_type = other DNA
caccccaggaggcggag

SEQ ID NO: 152566 - DNA, 17 bp, synthetic construct
  source 1..17: mol_type = other DNA
ccaccccaggaggcgga

SEQ ID NO: 152567 - DNA, 17 bp, synthetic construct
  source 1..17: mol_type = other DNA
cccaccccaggaggcgg

SEQ ID NO: 152568 - DNA, 17 bp, synthetic construct
  source 1..17: mol_type = other DNA
ccccaccccaggaggcg

SEQ ID NO: 152569 - DNA, 17 bp, synthetic construct
  source 1..17: mol_type = other DNA
cccccaccccaggaggc

SEQ ID NO: 152570 - DNA, 17 bp, synthetic construct
  source 1..17: mol_type = other DNA
acccccaccccaggagg

SEQ ID NO: 152571 - DNA, 17 bp, synthetic construct
  source 1..17: mol_type = other DNA
gacccccaccccaggag

SEQ ID NO: 152572 - DNA, 17 bp, synthetic construct
  source 1..17: mol_type = other DNA
agacccccaccccagga

SEQ ID NO: 152573 - DNA, 17 bp, synthetic construct
  source 1..17: mol_type = other DNA
cagacccccaccccagg

SEQ ID NO: 152574 - DNA, 17 bp, synthetic construct
  source 1..17: mol_type = other DNA
gcagacccccaccccag

SEQ ID NO: 152575 - DNA, 17 bp, synthetic construct
  source 1..17: mol_type = other DNA
tgcagacccccacccca

SEQ ID NO: 152576 - DNA, 17 bp, synthetic construct
  source 1..17: mol_type = other DNA
gtgcagacccccacccc

SEQ ID NO: 152577 - DNA, 17 bp, synthetic construct
  source 1..17: mol_type = other DNA
ggtgcagacccccaccc

SEQ ID NO: 152578 - DNA, 17 bp, synthetic construct
  source 1..17: mol_type = other DNA
aggtgcagacccccacc

SEQ ID NO: 152579 - DNA, 17 bp, synthetic construct
  source 1..17: mol_type = other DNA
aaggtgcagacccccac

SEQ ID NO: 152580 - DNA, 17 bp, synthetic construct
  source 1..17: mol_type = other DNA
aaaggtgcagaccccca

SEQ ID NO: 152581 - DNA, 17 bp, synthetic construct
  source 1..17: mol_type = other DNA
gaaaggtgcagaccccc

SEQ ID NO: 152582 - DNA, 17 bp, synthetic construct
  source 1..17: mol_type = other DNA
agaaaggtgcagacccc

SEQ ID NO: 152583 - DNA, 17 bp, synthetic construct
  source 1..17: mol_type = other DNA
aagaaaggtgcagaccc

SEQ ID NO: 152584 - DNA, 17 bp, synthetic construct
  source 1..17: mol_type = other DNA
caagaaaggtgcagacc

SEQ ID NO: 152585 - DNA, 17 bp, synthetic construct
  source 1..17: mol_type = other DNA
ccaagaaaggtgcagac

SEQ ID NO: 152586 - DNA, 17 bp, synthetic construct
  source 1..17: mol_type = other DNA
cccaagaaaggtgcaga

SEQ ID NO: 152587 - DNA, 17 bp, synthetic construct
  source 1..17: mol_type = other DNA
gcccaagaaaggtgcag

SEQ ID NO: 152588 - DNA, 17 bp, synthetic construct
  source 1..17: mol_type = other DNA
cgcccaagaaaggtgca

SEQ ID NO: 152589 - DNA, 17 bp, synthetic construct
  source 1..17: mol_type = other DNA
gcgcccaagaaaggtgc

SEQ ID NO: 152590 - DNA, 17 bp, synthetic construct
  source 1..17: mol_type = other DNA
agcgcccaagaaaggtg

SEQ ID NO: 152591 - DNA, 17 bp, synthetic construct
  source 1..17: mol_type = other DNA
aagcgcccaagaaaggt

SEQ ID NO: 152592 - DNA, 17 bp, synthetic construct
  source 1..17: mol_type = other DNA
taagcgcccaagaaagg

SEQ ID NO: 152593 - DNA, 17 bp, synthetic construct
  source 1..17: mol_type = other DNA
gtaagcgcccaagaaag

SEQ ID NO: 152594 - DNA, 17 bp, synthetic construct
  source 1..17: mol_type = other DNA
agtaagcgcccaagaaa

SEQ ID NO: 152595 - DNA, 17 bp, synthetic construct
  source 1..17: mol_type = other DNA
gagtaagcgcccaagaa

SEQ ID NO: 152596 - DNA, 17 bp, synthetic construct
  source 1..17: mol_type = other DNA
ggagtaagcgcccaaga

SEQ ID NO: 152597 - DNA, 17 bp, synthetic construct
  source 1..17: mol_type = other DNA
tggagtaagcgcccaag

SEQ ID NO: 152598 - DNA, 17 bp, synthetic construct
  source 1..17: mol_type = other DNA
gtggagtaagcgcccaa

SEQ ID NO: 152599 - DNA, 17 bp, synthetic construct
  source 1..17: mol_type = other DNA
cgtggagtaagcgccca

SEQ ID NO: 152600 - DNA, 17 bp, synthetic construct
  source 1..17: mol_type = other DNA
ccgtggagtaagcgccc

SEQ ID NO: 152601 - DNA, 17 bp, synthetic construct
  source 1..17: mol_type = other DNA
cccgtggagtaagcgcc

SEQ ID NO: 152602 - DNA, 17 bp, synthetic construct
  source 1..17: mol_type = other DNA
gcccgtggagtaagcgc

SEQ ID NO: 152603 - DNA, 17 bp, synthetic construct
  source 1..17: mol_type = other DNA
tgcccgtggagtaagcg

SEQ ID NO: 152604 - DNA, 17 bp, synthetic construct
  source 1..17: mol_type = other DNA
ctgcccgtggagtaagc

SEQ ID NO: 152605 - DNA, 17 bp, synthetic construct
  source 1..17: mol_type = other DNA
cctgcccgtggagtaag

SEQ ID NO: 152606 - DNA, 17 bp, synthetic construct
  source 1..17: mol_type = other DNA
gcctgcccgtggagtaa

SEQ ID NO: 152607 - DNA, 17 bp, synthetic construct
  source 1..17: mol_type = other DNA
tgcctgcccgtggagta

SEQ ID NO: 152608 - DNA, 17 bp, synthetic construct
  source 1..17: mol_type = other DNA
gtgcctgcccgtggagt

SEQ ID NO: 152609 - DNA, 17 bp, synthetic construct
  source 1..17: mol_type = other DNA
tgtgcctgcccgtggag

SEQ ID NO: 152610 - DNA, 17 bp, synthetic construct
  source 1..17: mol_type = other DNA
atgtgcctgcccgtgga

SEQ ID NO: 152611 - DNA, 17 bp, synthetic construct
  source 1..17: mol_type = other DNA
gatgtgcctgcccgtgg

SEQ ID NO: 152612 - DNA, 17 bp, synthetic construct
  source 1..17: mol_type = other DNA
ggatgtgcctgcccgtg

SEQ ID NO: 152613 - DNA, 17 bp, synthetic construct
  source 1..17: mol_type = other DNA
cggatgtgcctgcccgt

SEQ ID NO: 152614 - DNA, 17 bp, synthetic construct
  source 1..17: mol_type = other DNA
ccggatgtgcctgcccg

SEQ ID NO: 152615 - DNA, 17 bp, synthetic construct
  source 1..17: mol_type = other DNA
tccggatgtgcctgccc

SEQ ID NO: 152616 - DNA, 17 bp, synthetic construct
  source 1..17: mol_type = other DNA
ctccggatgtgcctgcc

SEQ ID NO: 152617 - DNA, 17 bp, synthetic construct
  source 1..17: mol_type = other DNA
actccggatgtgcctgc

SEQ ID NO: 152618 - DNA, 17 bp, synthetic construct
  source 1..17: mol_type = other DNA
tactccggatgtgcctg

SEQ ID NO: 152619 - DNA, 17 bp, synthetic construct
  source 1..17: mol_type = other DNA
ctactccggatgtgcct

SEQ ID NO: 152620 - DNA, 17 bp, synthetic construct
  source 1..17: mol_type = other DNA
cctactccggatgtgcc

SEQ ID NO: 152621 - DNA, 17 bp, synthetic construct
  source 1..17: mol_type = other DNA
ccctactccggatgtgc

SEQ ID NO: 152622 - DNA, 17 bp, synthetic construct
  source 1..17: mol_type = other DNA
cccctactccggatgtg

SEQ ID NO: 152623 - DNA, 17 bp, synthetic construct
  source 1..17: mol_type = other DNA
tcccctactccggatgt

SEQ ID NO: 152624 - DNA, 17 bp, synthetic construct
  source 1..17: mol_type = other DNA
atcccctactccggatg

SEQ ID NO: 152625 - DNA, 17 bp, synthetic construct
  source 1..17: mol_type = other DNA
gatcccctactccggat

SEQ ID NO: 152626 - DNA, 17 bp, synthetic construct
  source 1..17: mol_type = other DNA
ggatcccctactccgga

SEQ ID NO: 152627 - DNA, 17 bp, synthetic construct
  source 1..17: mol_type = other DNA
gggatcccctactccgg

SEQ ID NO: 152628 - DNA, 17 bp, synthetic construct
  source 1..17: mol_type = other DNA
ggggatcccctactccg

SEQ ID NO: 152629 - DNA, 17 bp, synthetic construct
  source 1..17: mol_type = other DNA
cggggatcccctactcc

SEQ ID NO: 152630 - DNA, 17 bp, synthetic construct
  source 1..17: mol_type = other DNA
ccggggatcccctactc

SEQ ID NO: 152631 - DNA, 17 bp, synthetic construct
  source 1..17: mol_type = other DNA
accggggatcccctact

SEQ ID NO: 152632 - DNA, 17 bp, synthetic construct
  source 1..17: mol_type = other DNA
gaccggggatcccctac

SEQ ID NO: 152633 - DNA, 17 bp, synthetic construct
  source 1..17: mol_type = other DNA
tgaccggggatccccta

SEQ ID NO: 152634 - DNA, 17 bp, synthetic construct
  source 1..17: mol_type = other DNA
gtgaccggggatcccct

SEQ ID NO: 152635 - DNA, 17 bp, synthetic construct
  source 1..17: mol_type = other DNA
cgtgaccggggatcccc

SEQ ID NO: 152636 - DNA, 17 bp, synthetic construct
  source 1..17: mol_type = other DNA
ccgtgaccggggatccc

SEQ ID NO: 152637 - DNA, 17 bp, synthetic construct
  source 1..17: mol_type = other DNA
cccgtgaccggggatcc

SEQ ID NO: 152638 - DNA, 17 bp, synthetic construct
  source 1..17: mol_type = other DNA
acccgtgaccggggatc

SEQ ID NO: 152639 - DNA, 17 bp, synthetic construct
  source 1..17: mol_type = other DNA
gacccgtgaccggggat

SEQ ID NO: 152640 - DNA, 17 bp, synthetic construct
  source 1..17: mol_type = other DNA
tgacccgtgaccgggga

SEQ ID NO: 152641 - DNA, 17 bp, synthetic construct
  source 1..17: mol_type = other DNA
gtgacccgtgaccgggg

SEQ ID NO: 152642 - DNA, 17 bp, synthetic construct
  source 1..17: mol_type = other DNA
agtgacccgtgaccggg

SEQ ID NO: 152643 - DNA, 17 bp, synthetic construct
  source 1..17: mol_type = other DNA
gagtgacccgtgaccgg

SEQ ID NO: 152644 - DNA, 17 bp, synthetic construct
  source 1..17: mol_type = other DNA
ggagtgacccgtgaccg

SEQ ID NO: 152645 - DNA, 17 bp, synthetic construct
  source 1..17: mol_type = other DNA
gggagtgacccgtgacc

SEQ ID NO: 152646 - DNA, 17 bp, synthetic construct
  source 1..17: mol_type = other DNA
ggggagtgacccgtgac

SEQ ID NO: 152647 - DNA, 17 bp, synthetic construct
  source 1..17: mol_type = other DNA
tggggagtgacccgtga

SEQ ID NO: 152648 - DNA, 17 bp, synthetic construct
  source 1..17: mol_type = other DNA
ttggggagtgacccgtg

SEQ ID NO: 152649 - DNA, 17 bp, synthetic construct
  source 1..17: mol_type = other DNA
cttggggagtgacccgt

SEQ ID NO: 152650 - DNA, 17 bp, synthetic construct
  source 1..17: mol_type = other DNA
ccttggggagtgacccg

SEQ ID NO: 152651 - DNA, 17 bp, synthetic construct
  source 1..17: mol_type = other DNA
cccttggggagtgaccc

SEQ ID NO: 152652 - DNA, 17 bp, synthetic construct
  source 1..17: mol_type = other DNA
gcccttggggagtgacc

SEQ ID NO: 152653 - DNA, 17 bp, synthetic construct
  source 1..17: mol_type = other DNA
ggcccttggggagtgac

SEQ ID NO: 152654 - DNA, 17 bp, synthetic construct
  source 1..17: mol_type = other DNA
tggcccttggggagtga

SEQ ID NO: 152655 - DNA, 17 bp, synthetic construct
  source 1..17: mol_type = other DNA
ttggcccttggggagtg

SEQ ID NO: 152656 - DNA, 17 bp, synthetic construct
  source 1..17: mol_type = other DNA
cttggcccttggggagt

SEQ ID NO: 152657 - DNA, 17 bp, synthetic construct
  source 1..17: mol_type = other DNA
gcttggcccttggggag

SEQ ID NO: 152658 - DNA, 17 bp, synthetic construct
  source 1..17: mol_type = other DNA
tgcttggcccttgggga

SEQ ID NO: 152659 - DNA, 17 bp, synthetic construct
  source 1..17: mol_type = other DNA
ctgcttggcccttgggg

SEQ ID NO: 152660 - DNA, 17 bp, synthetic construct
  source 1..17: mol_type = other DNA
tctgcttggcccttggg

SEQ ID NO: 152661 - DNA, 17 bp, synthetic construct
  source 1..17: mol_type = other DNA
ctctgcttggcccttgg

SEQ ID NO: 152662 - DNA, 17 bp, synthetic construct
  source 1..17: mol_type = other DNA
gctctgcttggcccttg

SEQ ID NO: 152663 - DNA, 17 bp, synthetic construct
  source 1..17: mol_type = other DNA
agctctgcttggccctt

SEQ ID NO: 152664 - DNA, 17 bp, synthetic construct
  source 1..17: mol_type = other DNA
gagctctgcttggccct

SEQ ID NO: 152665 - DNA, 17 bp, synthetic construct
  source 1..17: mol_type = other DNA
agagctctgcttggccc

SEQ ID NO: 152666 - DNA, 17 bp, synthetic construct
  source 1..17: mol_type = other DNA
cagagctctgcttggcc

SEQ ID NO: 152667 - DNA, 17 bp, synthetic construct
  source 1..17: mol_type = other DNA
gcagagctctgcttggc

SEQ ID NO: 152668 - DNA, 17 bp, synthetic construct
  source 1..17: mol_type = other DNA
tgcagagctctgcttgg

SEQ ID NO: 152669 - DNA, 17 bp, synthetic construct
  source 1..17: mol_type = other DNA
atgcagagctctgcttg

SEQ ID NO: 152670 - DNA, 17 bp, synthetic construct
  source 1..17: mol_type = other DNA
catgcagagctctgctt

SEQ ID NO: 152671 - DNA, 17 bp, synthetic construct
  source 1..17: mol_type = other DNA
ccatgcagagctctgct

SEQ ID NO: 152672 - DNA, 17 bp, synthetic construct
  source 1..17: mol_type = other DNA
gccatgcagagctctgc

SEQ ID NO: 152673 - DNA, 17 bp, synthetic construct
  source 1..17: mol_type = other DNA
ggccatgcagagctctg

SEQ ID NO: 152674 - DNA, 17 bp, synthetic construct
  source 1..17: mol_type = other DNA
tggccatgcagagctct

SEQ ID NO: 152675 - DNA, 17 bp, synthetic construct
  source 1..17: mol_type = other DNA
gtggccatgcagagctc

SEQ ID NO: 152676 - DNA, 17 bp, synthetic construct
  source 1..17: mol_type = other DNA
tgtggccatgcagagct

SEQ ID NO: 152677 - DNA, 17 bp, synthetic construct
  source 1..17: mol_type = other DNA
ctgtggccatgcagagc

SEQ ID NO: 152678 - DNA, 17 bp, synthetic construct
  source 1..17: mol_type = other DNA
actgtggccatgcagag

SEQ ID NO: 152679 - DNA, 17 bp, synthetic construct
  source 1..17: mol_type = other DNA
cactgtggccatgcaga

SEQ ID NO: 152680 - DNA, 17 bp, synthetic construct
  source 1..17: mol_type = other DNA
ccactgtggccatgcag

SEQ ID NO: 152681 - DNA, 17 bp, synthetic construct
  source 1..17: mol_type = other DNA
cccactgtggccatgca

SEQ ID NO: 152682 - DNA, 17 bp, synthetic construct
  source 1..17: mol_type = other DNA
acccactgtggccatgc

SEQ ID NO: 152683 - DNA, 17 bp, synthetic construct
  source 1..17: mol_type = other DNA
cacccactgtggccatg

SEQ ID NO: 152684 - DNA, 17 bp, synthetic construct
  source 1..17: mol_type = other DNA
ccacccactgtggccat

SEQ ID NO: 152685 - DNA, 17 bp, synthetic construct
  source 1..17: mol_type = other DNA
tccacccactgtggcca

SEQ ID NO: 152686 - DNA, 17 bp, synthetic construct
  source 1..17: mol_type = other DNA
ttccacccactgtggcc

SEQ ID NO: 152687 - DNA, 17 bp, synthetic construct
  source 1..17: mol_type = other DNA
cttccacccactgtggc

SEQ ID NO: 152688 - DNA, 17 bp, synthetic construct
  source 1..17: mol_type = other DNA
ccttccacccactgtgg

SEQ ID NO: 152689 - DNA, 17 bp, synthetic construct
  source 1..17: mol_type = other DNA
cccttccacccactgtg

SEQ ID NO: 152690 - DNA, 17 bp, synthetic construct
  source 1..17: mol_type = other DNA
ccccttccacccactgt

SEQ ID NO: 152691 - DNA, 17 bp, synthetic construct
  source 1..17: mol_type = other DNA
accccttccacccactg

SEQ ID NO: 152692 - DNA, 17 bp, synthetic construct
  source 1..17: mol_type = other DNA
caccccttccacccact

SEQ ID NO: 152693 - DNA, 17 bp, synthetic construct
  source 1..17: mol_type = other DNA
ccaccccttccacccac

SEQ ID NO: 152694 - DNA, 17 bp, synthetic construct
  source 1..17: mol_type = other DNA
cccaccccttccaccca

SEQ ID NO: 152695 - DNA, 17 bp, synthetic construct
  source 1..17: mol_type = other DNA
ccccaccccttccaccc

SEQ ID NO: 152696 - DNA, 17 bp, synthetic construct
  source 1..17: mol_type = other DNA
gccccaccccttccacc

SEQ ID NO: 152697 - DNA, 17 bp, synthetic construct
  source 1..17: mol_type = other DNA
agccccaccccttccac

SEQ ID NO: 152698 - DNA, 17 bp, synthetic construct
  source 1..17: mol_type = other DNA
cagccccaccccttcca

SEQ ID NO: 152699 - DNA, 17 bp, synthetic construct
  source 1..17: mol_type = other DNA
ccagccccaccccttcc

SEQ ID NO: 152700 - DNA, 17 bp, synthetic construct
  source 1..17: mol_type = other DNA
cccagccccaccccttc

SEQ ID NO: 152701 - DNA, 17 bp, synthetic construct
  source 1..17: mol_type = other DNA
acccagccccacccctt

SEQ ID NO: 152702 - DNA, 17 bp, synthetic construct
  source 1..17: mol_type = other DNA
tacccagccccacccct

SEQ ID NO: 152703 - DNA, 17 bp, synthetic construct
  source 1..17: mol_type = other DNA
gtacccagccccacccc

SEQ ID NO: 152704 - DNA, 17 bp, synthetic construct
  source 1..17: mol_type = other DNA
tgtacccagccccaccc

SEQ ID NO: 152705 - DNA, 17 bp, synthetic construct
  source 1..17: mol_type = other DNA
ttgtacccagccccacc

SEQ ID NO: 152706 - DNA, 17 bp, synthetic construct
  source 1..17: mol_type = other DNA
cttgtacccagccccac

SEQ ID NO: 152707 - DNA, 17 bp, synthetic construct
  source 1..17: mol_type = other DNA
ccttgtacccagcccca

SEQ ID NO: 152708 - DNA, 17 bp, synthetic construct
  source 1..17: mol_type = other DNA
tccttgtacccagcccc

SEQ ID NO: 152709 - DNA, 17 bp, synthetic construct
  source 1..17: mol_type = other DNA
ttccttgtacccagccc

SEQ ID NO: 152710 - DNA, 17 bp, synthetic construct
  source 1..17: mol_type = other DNA
gttccttgtacccagcc

SEQ ID NO: 152711 - DNA, 17 bp, synthetic construct
  source 1..17: mol_type = other DNA
ggttccttgtacccagc

SEQ ID NO: 152712 - DNA, 17 bp, synthetic construct
  source 1..17: mol_type = other DNA
gggttccttgtacccag

SEQ ID NO: 152713 - DNA, 17 bp, synthetic construct
  source 1..17: mol_type = other DNA
ggggttccttgtaccca

SEQ ID NO: 152714 - DNA, 17 bp, synthetic construct
  source 1..17: mol_type = other DNA
cggggttccttgtaccc

SEQ ID NO: 152715 - DNA, 17 bp, synthetic construct
  source 1..17: mol_type = other DNA
tcggggttccttgtacc

SEQ ID NO: 152716 - DNA, 17 bp, synthetic construct
  source 1..17: mol_type = other DNA
gtcggggttccttgtac

SEQ ID NO: 152717 - DNA, 17 bp, synthetic construct
  source 1..17: mol_type = other DNA
tgtcggggttccttgta

SEQ ID NO: 152718 - DNA, 17 bp, synthetic construct
  source 1..17: mol_type = other DNA
ctgtcggggttccttgt

SEQ ID NO: 152719 - DNA, 17 bp, synthetic construct
  source 1..17: mol_type = other DNA
cctgtcggggttccttg

SEQ ID NO: 152720 - DNA, 17 bp, synthetic construct
  source 1..17: mol_type = other DNA
ccctgtcggggttcctt

SEQ ID NO: 152721 - DNA, 17 bp, synthetic construct
  source 1..17: mol_type = other DNA
tccctgtcggggttcct

SEQ ID NO: 152722 - DNA, 17 bp, synthetic construct
  source 1..17: mol_type = other DNA
ctccctgtcggggttcc

SEQ ID NO: 152723 - DNA, 17 bp, synthetic construct
  source 1..17: mol_type = other DNA
tctccctgtcggggttc

SEQ ID NO: 152724 - DNA, 17 bp, synthetic construct
  source 1..17: mol_type = other DNA
ctctccctgtcggggtt

SEQ ID NO: 152725 - DNA, 17 bp, synthetic construct
  source 1..17: mol_type = other DNA
cctctccctgtcggggt

SEQ ID NO: 152726 - DNA, 17 bp, synthetic construct
  source 1..17: mol_type = other DNA
ccctctccctgtcgggg

SEQ ID NO: 152727 - DNA, 17 bp, synthetic construct
  source 1..17: mol_type = other DNA
gccctctccctgtcggg

SEQ ID NO: 152728 - DNA, 17 bp, synthetic construct
  source 1..17: mol_type = other DNA
agccctctccctgtcgg

SEQ ID NO: 152729 - DNA, 17 bp, synthetic construct
  source 1..17: mol_type = other DNA
aagccctctccctgtcg

SEQ ID NO: 152730 - DNA, 17 bp, synthetic construct
  source 1..17: mol_type = other DNA
gaagccctctccctgtc

SEQ ID NO: 152731 - DNA, 17 bp, synthetic construct
  source 1..17: mol_type = other DNA
ggaagccctctccctgt

SEQ ID NO: 152732 - DNA, 17 bp, synthetic construct
  source 1..17: mol_type = other DNA
gggaagccctctccctg

SEQ ID NO: 152733 - DNA, 17 bp, synthetic construct
  source 1..17: mol_type = other DNA
cgggaagccctctccct

SEQ ID NO: 152734 - DNA, 17 bp, synthetic construct
  source 1..17: mol_type = other DNA
ccgggaagccctctccc

SEQ ID NO: 152735 - DNA, 17 bp, synthetic construct
  source 1..17: mol_type = other DNA
gccgggaagccctctcc

SEQ ID NO: 152736 - DNA, 17 bp, synthetic construct
  source 1..17: mol_type = other DNA
ggccgggaagccctctc

SEQ ID NO: 152737 - DNA, 17 bp, synthetic construct
  source 1..17: mol_type = other DNA
aggccgggaagccctct

SEQ ID NO: 152738 - DNA, 17 bp, synthetic construct
  source 1..17: mol_type = other DNA
caggccgggaagccctc

SEQ ID NO: 152739 - DNA, 17 bp, synthetic construct
  source 1..17: mol_type = other DNA
ccaggccgggaagccct

SEQ ID NO: 152740 - DNA, 17 bp, synthetic construct
  source 1..17: mol_type = other DNA
gccaggccgggaagccc

SEQ ID NO: 152741 - DNA, 17 bp, synthetic construct
  source 1..17: mol_type = other DNA
ggccaggccgggaagcc

SEQ ID NO: 152742 - DNA, 17 bp, synthetic construct
  source 1..17: mol_type = other DNA
aggccaggccgggaagc

SEQ ID NO: 152743 - DNA, 17 bp, synthetic construct
  source 1..17: mol_type = other DNA
caggccaggccgggaag

SEQ ID NO: 152744 - DNA, 17 bp, synthetic construct
  source 1..17: mol_type = other DNA
gcaggccaggccgggaa

SEQ ID NO: 152745 - DNA, 17 bp, synthetic construct
  source 1..17: mol_type = other DNA
ggcaggccaggccggga

SEQ ID NO: 152746 - DNA, 17 bp, synthetic construct
  source 1..17: mol_type = other DNA
tggcaggccaggccggg

SEQ ID NO: 152747 - DNA, 17 bp, synthetic construct
  source 1..17: mol_type = other DNA
atggcaggccaggccgg

SEQ ID NO: 152748 - DNA, 17 bp, synthetic construct
  source 1..17: mol_type = other DNA
catggcaggccaggccg

SEQ ID NO: 152749 - DNA, 17 bp, synthetic construct
  source 1..17: mol_type = other DNA
ccatggcaggccaggcc

SEQ ID NO: 152750 - DNA, 17 bp, synthetic construct
  source 1..17: mol_type = other DNA
cccatggcaggccaggc

SEQ ID NO: 152751 - DNA, 17 bp, synthetic construct
  source 1..17: mol_type = other DNA
acccatggcaggccagg

SEQ ID NO: 152752 - DNA, 17 bp, synthetic construct
  source 1..17: mol_type = other DNA
gacccatggcaggccag

SEQ ID NO: 152753 - DNA, 17 bp, synthetic construct
  source 1..17: mol_type = other DNA
ggacccatggcaggcca

SEQ ID NO: 152754 - DNA, 17 bp, synthetic construct
  source 1..17: mol_type = other DNA
aggacccatggcaggcc

SEQ ID NO: 152755 - DNA, 17 bp, synthetic construct
  source 1..17: mol_type = other DNA
taggacccatggcaggc

SEQ ID NO: 152756 - DNA, 17 bp, synthetic construct
  source 1..17: mol_type = other DNA
ataggacccatggcagg

SEQ ID NO: 152757 - DNA, 17 bp, synthetic construct
  source 1..17: mol_type = other DNA
aataggacccatggcag

SEQ ID NO: 152758 - DNA, 17 bp, synthetic construct
  source 1..17: mol_type = other DNA
gaataggacccatggca

SEQ ID NO: 152759 - DNA, 17 bp, synthetic construct
  source 1..17: mol_type = other DNA
ggaataggacccatggc

SEQ ID NO: 152760 - DNA, 17 bp, synthetic construct
  source 1..17: mol_type = other DNA
tggaataggacccatgg

SEQ ID NO: 152761 - DNA, 17 bp, synthetic construct
  source 1..17: mol_type = other DNA
ctggaataggacccatg

SEQ ID NO: 152762 - DNA, 17 bp, synthetic construct
  source 1..17: mol_type = other DNA
gctggaataggacccat

SEQ ID NO: 152763 - DNA, 17 bp, synthetic construct
  source 1..17: mol_type = other DNA
tgctggaataggaccca

SEQ ID NO: 152764 - DNA, 17 bp, synthetic construct
  source 1..17: mol_type = other DNA
gtgctggaataggaccc

SEQ ID NO: 152765 - DNA, 17 bp, synthetic construct
  source 1..17: mol_type = other DNA
ggtgctggaataggacc

SEQ ID NO: 152766 - DNA, 17 bp, synthetic construct
  source 1..17: mol_type = other DNA
cggtgctggaataggac

SEQ ID NO: 152767 - DNA, 17 bp, synthetic construct
  source 1..17: mol_type = other DNA
acggtgctggaatagga

SEQ ID NO: 152768 - DNA, 17 bp, synthetic construct
  source 1..17: mol_type = other DNA
cacggtgctggaatagg

SEQ ID NO: 152769 - DNA, 17 bp, synthetic construct
  source 1..17: mol_type = other DNA
ccacggtgctggaatag

SEQ ID NO: 152770 - DNA, 17 bp, synthetic construct
  source 1..17: mol_type = other DNA
gccacggtgctggaata

SEQ ID NO: 152771 - DNA, 17 bp, synthetic construct
  source 1..17: mol_type = other DNA
tgccacggtgctggaat

SEQ ID NO: 152772 - DNA, 17 bp, synthetic construct
  source 1..17: mol_type = other DNA
ctgccacggtgctggaa

SEQ ID NO: 152773 - DNA, 17 bp, synthetic construct
  source 1..17: mol_type = other DNA
gctgccacggtgctgga

SEQ ID NO: 152774 - DNA, 17 bp, synthetic construct
  source 1..17: mol_type = other DNA
ggctgccacggtgctgg

SEQ ID NO: 152775 - DNA, 17 bp, synthetic construct
  source 1..17: mol_type = other DNA
gggctgccacggtgctg

SEQ ID NO: 152776 - DNA, 17 bp, synthetic construct
  source 1..17: mol_type = other DNA
ggggctgccacggtgct

SEQ ID NO: 152777 - DNA, 17 bp, synthetic construct
  source 1..17: mol_type = other DNA
gggggctgccacggtgc

SEQ ID NO: 152778 - DNA, 17 bp, synthetic construct
  source 1..17: mol_type = other DNA
tgggggctgccacggtg

SEQ ID NO: 152779 - DNA, 17 bp, synthetic construct
  source 1..17: mol_type = other DNA
atgggggctgccacggt

SEQ ID NO: 152780 - DNA, 17 bp, synthetic construct
  source 1..17: mol_type = other DNA
catgggggctgccacgg

SEQ ID NO: 152781 - DNA, 17 bp, synthetic construct
  source 1..17: mol_type = other DNA
ccatgggggctgccacg

SEQ ID NO: 152782 - DNA, 17 bp, synthetic construct
  source 1..17: mol_type = other DNA
tccatgggggctgccac

SEQ ID NO: 152783 - DNA, 17 bp, synthetic construct
  source 1..17: mol_type = other DNA
atccatgggggctgcca

SEQ ID NO: 152784 - DNA, 17 bp, synthetic construct
  source 1..17: mol_type = other DNA
catccatgggggctgcc

SEQ ID NO: 152785 - DNA, 17 bp, synthetic construct
  source 1..17: mol_type = other DNA
ccatccatgggggctgc

SEQ ID NO: 152786 - DNA, 17 bp, synthetic construct
  source 1..17: mol_type = other DNA
gccatccatgggggctg

SEQ ID NO: 152787 - DNA, 17 bp, synthetic construct
  source 1..17: mol_type = other DNA
tgccatccatgggggct

SEQ ID NO: 152788 - DNA, 17 bp, synthetic construct
  source 1..17: mol_type = other DNA
ctgccatccatgggggc

SEQ ID NO: 152789 - DNA, 17 bp, synthetic construct
  source 1..17: mol_type = other DNA
cctgccatccatggggg

SEQ ID NO: 152790 - DNA, 17 bp, synthetic construct
  source 1..17: mol_type = other DNA
ccctgccatccatgggg

SEQ ID NO: 152791 - DNA, 17 bp, synthetic construct
  source 1..17: mol_type = other DNA
cccctgccatccatggg

SEQ ID NO: 152792 - DNA, 17 bp, synthetic construct
  source 1..17: mol_type = other DNA
acccctgccatccatgg

SEQ ID NO: 152793 - DNA, 17 bp, synthetic construct
  source 1..17: mol_type = other DNA
cacccctgccatccatg

SEQ ID NO: 152794 - DNA, 17 bp, synthetic construct
  source 1..17: mol_type = other DNA
gcacccctgccatccat

SEQ ID NO: 152795 - DNA, 17 bp, synthetic construct
  source 1..17: mol_type = other DNA
ggcacccctgccatcca

SEQ ID NO: 152796 - DNA, 17 bp, synthetic construct
  source 1..17: mol_type = other DNA
gggcacccctgccatcc

SEQ ID NO: 152797 - DNA, 17 bp, synthetic construct
  source 1..17: mol_type = other DNA
tgggcacccctgccatc

SEQ ID NO: 152798 - DNA, 17 bp, synthetic construct
  source 1..17: mol_type = other DNA
ctgggcacccctgccat

SEQ ID NO: 152799 - DNA, 17 bp, synthetic construct
  source 1..17: mol_type = other DNA
gctgggcacccctgcca

SEQ ID NO: 152800 - DNA, 17 bp, synthetic construct
  source 1..17: mol_type = other DNA
ggctgggcacccctgcc

SEQ ID NO: 152801 - DNA, 17 bp, synthetic construct
  source 1..17: mol_type = other DNA
aggctgggcacccctgc

SEQ ID NO: 152802 - DNA, 17 bp, synthetic construct
  source 1..17: mol_type = other DNA
caggctgggcacccctg

SEQ ID NO: 152803 - DNA, 17 bp, synthetic construct
  source 1..17: mol_type = other DNA
ccaggctgggcacccct

SEQ ID NO: 152804 - DNA, 17 bp, synthetic construct
  source 1..17: mol_type = other DNA
gccaggctgggcacccc

SEQ ID NO: 152805 - DNA, 17 bp, synthetic construct
  source 1..17: mol_type = other DNA
ggccaggctgggcaccc

SEQ ID NO: 152806 - DNA, 17 bp, synthetic construct
  source 1..17: mol_type = other DNA
gggccaggctgggcacc

SEQ ID NO: 152807 - DNA, 17 bp, synthetic construct
  source 1..17: mol_type = other DNA
tgggccaggctgggcac

SEQ ID NO: 152808 - DNA, 17 bp, synthetic construct
  source 1..17: mol_type = other DNA
gtgggccaggctgggca

SEQ ID NO: 152809 - DNA, 17 bp, synthetic construct
  source 1..17: mol_type = other DNA
agtgggccaggctgggc

SEQ ID NO: 152810 - DNA, 17 bp, synthetic construct
  source 1..17: mol_type = other DNA
cagtgggccaggctggg

SEQ ID NO: 152811 - DNA, 17 bp, synthetic construct
  source 1..17: mol_type = other DNA
acagtgggccaggctgg

SEQ ID NO: 152812 - DNA, 17 bp, synthetic construct
  source 1..17: mol_type = other DNA
cacagtgggccaggctg

SEQ ID NO: 152813 - DNA, 17 bp, synthetic construct
  source 1..17: mol_type = other DNA
gcacagtgggccaggct

SEQ ID NO: 152814 - DNA, 17 bp, synthetic construct
  source 1..17: mol_type = other DNA
agcacagtgggccaggc

SEQ ID NO: 152815 - DNA, 17 bp, synthetic construct
  source 1..17: mol_type = other DNA
gagcacagtgggccagg

SEQ ID NO: 152816 - DNA, 17 bp, synthetic construct
  source 1..17: mol_type = other DNA
ggagcacagtgggccag

SEQ ID NO: 152817 - DNA, 17 bp, synthetic construct
  source 1..17: mol_type = other DNA
gggagcacagtgggcca

SEQ ID NO: 152818 - DNA, 17 bp, synthetic construct
  source 1..17: mol_type = other DNA
ggggagcacagtgggcc

SEQ ID NO: 152819 - DNA, 17 bp, synthetic construct
  source 1..17: mol_type = other DNA
tggggagcacagtgggc

SEQ ID NO: 152820 - DNA, 17 bp, synthetic construct
  source 1..17: mol_type = other DNA
ctggggagcacagtggg

SEQ ID NO: 152821 - DNA, 17 bp, synthetic construct
  source 1..17: mol_type = other DNA
cctggggagcacagtgg

SEQ ID NO: 152822 - DNA, 17 bp, synthetic construct
  source 1..17: mol_type = other DNA
tcctggggagcacagtg

SEQ ID NO: 152823 - DNA, 17 bp, synthetic construct
  source 1..17: mol_type = other DNA
ctcctggggagcacagt

SEQ ID NO: 152824 - DNA, 17 bp, synthetic construct
  source 1..17: mol_type = other DNA
cctcctggggagcacag

SEQ ID NO: 152825 - DNA, 17 bp, synthetic construct
  source 1..17: mol_type = other DNA
ccctcctggggagcaca

SEQ ID NO: 152826 - DNA, 17 bp, synthetic construct
  source 1..17: mol_type = other DNA
gccctcctggggagcac

SEQ ID NO: 152827 - DNA, 17 bp, synthetic construct
  source 1..17: mol_type = other DNA
tgccctcctggggagca

SEQ ID NO: 152828 - DNA, 17 bp, synthetic construct
  source 1..17: mol_type = other DNA
atgccctcctggggagc

SEQ ID NO: 152829 - DNA, 17 bp, synthetic construct
  source 1..17: mol_type = other DNA
gatgccctcctggggag

SEQ ID NO: 152830 - DNA, 17 bp, synthetic construct
  source 1..17: mol_type = other DNA
agatgccctcctgggga

SEQ ID NO: 152831 - DNA, 17 bp, synthetic construct
  source 1..17: mol_type = other DNA
cagatgccctcctgggg

SEQ ID NO: 152832 - DNA, 17 bp, synthetic construct
  source 1..17: mol_type = other DNA
gcagatgccctcctggg

SEQ ID NO: 152833 - DNA, 17 bp, synthetic construct
  source 1..17: mol_type = other DNA
ggcagatgccctcctgg

SEQ ID NO: 152834 - DNA, 17 bp, synthetic construct
  source 1..17: mol_type = other DNA
tggcagatgccctcctg

SEQ ID NO: 152835 - DNA, 17 bp, synthetic construct
  source 1..17: mol_type = other DNA
gtggcagatgccctcct

SEQ ID NO: 152836 - DNA, 17 bp, synthetic construct
  source 1..17: mol_type = other DNA
ggtggcagatgccctcc

SEQ ID NO: 152837 - DNA, 17 bp, synthetic construct
  source 1..17: mol_type = other DNA
cggtggcagatgccctc

SEQ ID NO: 152838 - DNA, 17 bp, synthetic construct
  source 1..17: mol_type = other DNA
gcggtggcagatgccct

SEQ ID NO: 152839 - DNA, 17 bp, synthetic construct
  source 1..17: mol_type = other DNA
tgcggtggcagatgccc

SEQ ID NO: 152840 - DNA, 17 bp, synthetic construct
  source 1..17: mol_type = other DNA
gtgcggtggcagatgcc

SEQ ID NO: 152841 - DNA, 17 bp, synthetic construct
  source 1..17: mol_type = other DNA
ggtgcggtggcagatgc

SEQ ID NO: 152842 - DNA, 17 bp, synthetic construct
  source 1..17: mol_type = other DNA
gggtgcggtggcagatg

SEQ ID NO: 152843 - DNA, 17 bp, synthetic construct
  source 1..17: mol_type = other DNA
agggtgcggtggcagat

SEQ ID NO: 152844 - DNA, 17 bp, synthetic construct
  source 1..17: mol_type = other DNA
cagggtgcggtggcaga

SEQ ID NO: 152845 - DNA, 17 bp, synthetic construct
  source 1..17: mol_type = other DNA
gcagggtgcggtggcag

SEQ ID NO: 152846 - DNA, 17 bp, synthetic construct
  source 1..17: mol_type = other DNA
agcagggtgcggtggca

SEQ ID NO: 152847 - DNA, 17 bp, synthetic construct
  source 1..17: mol_type = other DNA
cagcagggtgcggtggc

SEQ ID NO: 152848 - DNA, 17 bp, synthetic construct
  source 1..17: mol_type = other DNA
ccagcagggtgcggtgg

SEQ ID NO: 152849 - DNA, 17 bp, synthetic construct
  source 1..17: mol_type = other DNA
cccagcagggtgcggtg

SEQ ID NO: 152850 - DNA, 17 bp, synthetic construct
  source 1..17: mol_type = other DNA
ccccagcagggtgcggt

SEQ ID NO: 152851 - DNA, 17 bp, synthetic construct
  source 1..17: mol_type = other DNA
gccccagcagggtgcgg

SEQ ID NO: 152852 - DNA, 17 bp, synthetic construct
  source 1..17: mol_type = other DNA
ggccccagcagggtgcg

SEQ ID NO: 152853 - DNA, 17 bp, synthetic construct
  source 1..17: mol_type = other DNA
cggccccagcagggtgc

SEQ ID NO: 152854 - DNA, 17 bp, synthetic construct
  source 1..17: mol_type = other DNA
ccggccccagcagggtg

SEQ ID NO: 152855 - DNA, 17 bp, synthetic construct
  source 1..17: mol_type = other DNA
gccggccccagcagggt

SEQ ID NO: 152856 - DNA, 17 bp, synthetic construct
  source 1..17: mol_type = other DNA
ggccggccccagcaggg

SEQ ID NO: 152857 - DNA, 17 bp, synthetic construct
  source 1..17: mol_type = other DNA
aggccggccccagcagg

SEQ ID NO: 152858 - DNA, 17 bp, synthetic construct
  source 1..17: mol_type = other DNA
aaggccggccccagcag

SEQ ID NO: 152859 - DNA, 17 bp, synthetic construct
  source 1..17: mol_type = other DNA
aaaggccggccccagca

SEQ ID NO: 152860 - DNA, 17 bp, synthetic construct
  source 1..17: mol_type = other DNA
caaaggccggccccagc

SEQ ID NO: 152861 - DNA, 17 bp, synthetic construct
  source 1..17: mol_type = other DNA
gcaaaggccggccccag

SEQ ID NO: 152862 - DNA, 17 bp, synthetic construct
  source 1..17: mol_type = other DNA
cgcaaaggccggcccca

SEQ ID NO: 152863 - DNA, 17 bp, synthetic construct
  source 1..17: mol_type = other DNA
ccgcaaaggccggcccc

SEQ ID NO: 152864 - DNA, 17 bp, synthetic construct
  source 1..17: mol_type = other DNA
tccgcaaaggccggccc

SEQ ID NO: 152865 - DNA, 17 bp, synthetic construct
  source 1..17: mol_type = other DNA
ctccgcaaaggccggcc

SEQ ID NO: 152866 - DNA, 17 bp, synthetic construct
  source 1..17: mol_type = other DNA
actccgcaaaggccggc

SEQ ID NO: 152867 - DNA, 17 bp, synthetic construct
  source 1..17: mol_type = other DNA
cactccgcaaaggccgg

SEQ ID NO: 152868 - DNA, 17 bp, synthetic construct
  source 1..17: mol_type = other DNA
gcactccgcaaaggccg

SEQ ID NO: 152869 - DNA, 17 bp, synthetic construct
  source 1..17: mol_type = other DNA
ggcactccgcaaaggcc

SEQ ID NO: 152870 - DNA, 17 bp, synthetic construct
  source 1..17: mol_type = other DNA
tggcactccgcaaaggc

SEQ ID NO: 152871 - DNA, 17 bp, synthetic construct
  source 1..17: mol_type = other DNA
gtggcactccgcaaagg

SEQ ID NO: 152872 - DNA, 17 bp, synthetic construct
  source 1..17: mol_type = other DNA
cgtggcactccgcaaag

SEQ ID NO: 152873 - DNA, 17 bp, synthetic construct
  source 1..17: mol_type = other DNA
gcgtggcactccgcaaa

SEQ ID NO: 152874 - DNA, 17 bp, synthetic construct
  source 1..17: mol_type = other DNA
tgcgtggcactccgcaa

SEQ ID NO: 152875 - DNA, 17 bp, synthetic construct
  source 1..17: mol_type = other DNA
gtgcgtggcactccgca

SEQ ID NO: 152876 - DNA, 17 bp, synthetic construct
  source 1..17: mol_type = other DNA
agtgcgtggcactccgc

SEQ ID NO: 152877 - DNA, 17 bp, synthetic construct
  source 1..17: mol_type = other DNA
cagtgcgtggcactccg

SEQ ID NO: 152878 - DNA, 17 bp, synthetic construct
  source 1..17: mol_type = other DNA
ccagtgcgtggcactcc

SEQ ID NO: 152879 - DNA, 17 bp, synthetic construct
  source 1..17: mol_type = other DNA
accagtgcgtggcactc

SEQ ID NO: 152880 - DNA, 17 bp, synthetic construct
  source 1..17: mol_type = other DNA
caccagtgcgtggcact

SEQ ID NO: 152881 - DNA, 17 bp, synthetic construct
  source 1..17: mol_type = other DNA
ccaccagtgcgtggcac

SEQ ID NO: 152882 - DNA, 17 bp, synthetic construct
  source 1..17: mol_type = other DNA
tccaccagtgcgtggca

SEQ ID NO: 152883 - DNA, 17 bp, synthetic construct
  source 1..17: mol_type = other DNA
gtccaccagtgcgtggc

SEQ ID NO: 152884 - DNA, 17 bp, synthetic construct
  source 1..17: mol_type = other DNA
tgtccaccagtgcgtgg

SEQ ID NO: 152885 - DNA, 17 bp, synthetic construct
  source 1..17: mol_type = other DNA
ctgtccaccagtgcgtg

SEQ ID NO: 152886 - DNA, 17 bp, synthetic construct
  source 1..17: mol_type = other DNA
gctgtccaccagtgcgt

SEQ ID NO: 152887 - DNA, 17 bp, synthetic construct
  source 1..17: mol_type = other DNA
tgctgtccaccagtgcg

SEQ ID NO: 152888 - DNA, 17 bp, synthetic construct
  source 1..17: mol_type = other DNA
gtgctgtccaccagtgc

SEQ ID NO: 152889 - DNA, 17 bp, synthetic construct
  source 1..17: mol_type = other DNA
agtgctgtccaccagtg

SEQ ID NO: 152890 - DNA, 17 bp, synthetic construct
  source 1..17: mol_type = other DNA
cagtgctgtccaccagt

SEQ ID NO: 152891 - DNA, 17 bp, synthetic construct
  source 1..17: mol_type = other DNA
gcagtgctgtccaccag

SEQ ID NO: 152892 - DNA, 17 bp, synthetic construct
  source 1..17: mol_type = other DNA
cgcagtgctgtccacca

SEQ ID NO: 152893 - DNA, 17 bp, synthetic construct
  source 1..17: mol_type = other DNA
acgcagtgctgtccacc

SEQ ID NO: 152894 - DNA, 17 bp, synthetic construct
  source 1..17: mol_type = other DNA
tacgcagtgctgtccac

SEQ ID NO: 152895 - DNA, 17 bp, synthetic construct
  source 1..17: mol_type = other DNA
gtacgcagtgctgtcca

SEQ ID NO: 152896 - DNA, 17 bp, synthetic construct
  source 1..17: mol_type = other DNA
ggtacgcagtgctgtcc

SEQ ID NO: 152897 - DNA, 17 bp, synthetic construct
  source 1..17: mol_type = other DNA
aggtacgcagtgctgtc

SEQ ID NO: 152898 - DNA, 17 bp, synthetic construct
  source 1..17: mol_type = other DNA
caggtacgcagtgctgt

SEQ ID NO: 152899 - DNA, 17 bp, synthetic construct
  source 1..17: mol_type = other DNA
ccaggtacgcagtgctg

SEQ ID NO: 152900 - DNA, 17 bp, synthetic construct
  source 1..17: mol_type = other DNA
gccaggtacgcagtgct

SEQ ID NO: 152901 - DNA, 17 bp, synthetic construct
  source 1..17: mol_type = other DNA
ggccaggtacgcagtgc

SEQ ID NO: 152902 - DNA, 17 bp, synthetic construct
  source 1..17: mol_type = other DNA
cggccaggtacgcagtg

SEQ ID NO: 152903 - DNA, 17 bp, synthetic construct
  source 1..17: mol_type = other DNA
gcggccaggtacgcagt

SEQ ID NO: 152904 - DNA, 17 bp, synthetic construct
  source 1..17: mol_type = other DNA
ggcggccaggtacgcag

SEQ ID NO: 152905 - DNA, 17 bp, synthetic construct
  source 1..17: mol_type = other DNA
aggcggccaggtacgca

SEQ ID NO: 152906 - DNA, 17 bp, synthetic construct
  source 1..17: mol_type = other DNA
caggcggccaggtacgc

SEQ ID NO: 152907 - DNA, 17 bp, synthetic construct
  source 1..17: mol_type = other DNA
gcaggcggccaggtacg

SEQ ID NO: 152908 - DNA, 17 bp, synthetic construct
  source 1..17: mol_type = other DNA
cgcaggcggccaggtac

SEQ ID NO: 152909 - DNA, 17 bp, synthetic construct
  source 1..17: mol_type = other DNA
gcgcaggcggccaggta

SEQ ID NO: 152910 - DNA, 17 bp, synthetic construct
  source 1..17: mol_type = other DNA
ggcgcaggcggccaggt

SEQ ID NO: 152911 - DNA, 17 bp, synthetic construct
  source 1..17: mol_type = other DNA
gggcgcaggcggccagg

SEQ ID NO: 152912 - DNA, 17 bp, synthetic construct
  source 1..17: mol_type = other DNA
tgggcgcaggcggccag

SEQ ID NO: 152913 - DNA, 17 bp, synthetic construct
  source 1..17: mol_type = other DNA
ctgggcgcaggcggcca

SEQ ID NO: 152914 - DNA, 17 bp, synthetic construct
  source 1..17: mol_type = other DNA
cctgggcgcaggcggcc

SEQ ID NO: 152915 - DNA, 17 bp, synthetic construct
  source 1..17: mol_type = other DNA
tcctgggcgcaggcggc

SEQ ID NO: 152916 - DNA, 17 bp, synthetic construct
  source 1..17: mol_type = other DNA
gtcctgggcgcaggcgg

SEQ ID NO: 152917 - DNA, 17 bp, synthetic construct
  source 1..17: mol_type = other DNA
ggtcctgggcgcaggcg

SEQ ID NO: 152918 - DNA, 17 bp, synthetic construct
  source 1..17: mol_type = other DNA
aggtcctgggcgcaggc

SEQ ID NO: 152919 - DNA, 17 bp, synthetic construct
  source 1..17: mol_type = other DNA
caggtcctgggcgcagg

SEQ ID NO: 152920 - DNA, 17 bp, synthetic construct
  source 1..17: mol_type = other DNA
acaggtcctgggcgcag

SEQ ID NO: 152921 - DNA, 17 bp, synthetic construct
  source 1..17: mol_type = other DNA
cacaggtcctgggcgca

SEQ ID NO: 152922 - DNA, 17 bp, synthetic construct
  source 1..17: mol_type = other DNA
gcacaggtcctgggcgc

SEQ ID NO: 152923 - DNA, 17 bp, synthetic construct
  source 1..17: mol_type = other DNA
ggcacaggtcctgggcg

SEQ ID NO: 152924 - DNA, 17 bp, synthetic construct
  source 1..17: mol_type = other DNA
cggcacaggtcctgggc

SEQ ID NO: 152925 - DNA, 17 bp, synthetic construct
  source 1..17: mol_type = other DNA
gcggcacaggtcctggg

SEQ ID NO: 152926 - DNA, 17 bp, synthetic construct
  source 1..17: mol_type = other DNA
agcggcacaggtcctgg

SEQ ID NO: 152927 - DNA, 17 bp, synthetic construct
  source 1..17: mol_type = other DNA
cagcggcacaggtcctg

SEQ ID NO: 152928 - DNA, 17 bp, synthetic construct
  source 1..17: mol_type = other DNA
gcagcggcacaggtcct

SEQ ID NO: 152929 - DNA, 17 bp, synthetic construct
  source 1..17: mol_type = other DNA
ggcagcggcacaggtcc

SEQ ID NO: 152930 - DNA, 17 bp, synthetic construct
  source 1..17: mol_type = other DNA
gggcagcggcacaggtc

SEQ ID NO: 152931 - DNA, 17 bp, synthetic construct
  source 1..17: mol_type = other DNA
ggggcagcggcacaggt

SEQ ID NO: 152932 - DNA, 17 bp, synthetic construct
  source 1..17: mol_type = other DNA
tggggcagcggcacagg

SEQ ID NO: 152933 - DNA, 17 bp, synthetic construct
  source 1..17: mol_type = other DNA
gtggggcagcggcacag

SEQ ID NO: 152934 - DNA, 17 bp, synthetic construct
  source 1..17: mol_type = other DNA
ggtggggcagcggcaca

SEQ ID NO: 152935 - DNA, 17 bp, synthetic construct
  source 1..17: mol_type = other DNA
aggtggggcagcggcac

SEQ ID NO: 152936 - DNA, 17 bp, synthetic construct
  source 1..17: mol_type = other DNA
caggtggggcagcggca

SEQ ID NO: 152937 - DNA, 17 bp, synthetic construct
  source 1..17: mol_type = other DNA
gcaggtggggcagcggc

SEQ ID NO: 152938 - DNA, 17 bp, synthetic construct
  source 1..17: mol_type = other DNA
ggcaggtggggcagcgg

SEQ ID NO: 152939 - DNA, 17 bp, synthetic construct
  source 1..17: mol_type = other DNA
gggcaggtggggcagcg

SEQ ID NO: 152940 - DNA, 17 bp, synthetic construct
  source 1..17: mol_type = other DNA
cgggcaggtggggcagc

SEQ ID NO: 152941 - DNA, 17 bp, synthetic construct
  source 1..17: mol_type = other DNA
acgggcaggtggggcag

SEQ ID NO: 152942 - DNA, 17 bp, synthetic construct
  source 1..17: mol_type = other DNA
cacgggcaggtggggca

SEQ ID NO: 152943 - DNA, 17 bp, synthetic construct
  source 1..17: mol_type = other DNA
acacgggcaggtggggc

SEQ ID NO: 152944 - DNA, 17 bp, synthetic construct
  source 1..17: mol_type = other DNA
cacacgggcaggtgggg

SEQ ID NO: 152945 - DNA, 17 bp, synthetic construct
  source 1..17: mol_type = other DNA
gcacacgggcaggtggg

SEQ ID NO: 152946 - DNA, 17 bp, synthetic construct
  source 1..17: mol_type = other DNA
ggcacacgggcaggtgg

SEQ ID NO: 152947 - DNA, 17 bp, synthetic construct
  source 1..17: mol_type = other DNA
tggcacacgggcaggtg

SEQ ID NO: 152948 - DNA, 17 bp, synthetic construct
  source 1..17: mol_type = other DNA
gtggcacacgggcaggt

SEQ ID NO: 152949 - DNA, 17 bp, synthetic construct
  source 1..17: mol_type = other DNA
ggtggcacacgggcagg

SEQ ID NO: 152950 - DNA, 17 bp, synthetic construct
  source 1..17: mol_type = other DNA
aggtggcacacgggcag

SEQ ID NO: 152951 - DNA, 17 bp, synthetic construct
  source 1..17: mol_type = other DNA
aaggtggcacacgggca

SEQ ID NO: 152952 - DNA, 17 bp, synthetic construct
  source 1..17: mol_type = other DNA
aaaggtggcacacgggc

SEQ ID NO: 152953 - DNA, 17 bp, synthetic construct
  source 1..17: mol_type = other DNA
caaaggtggcacacggg

SEQ ID NO: 152954 - DNA, 17 bp, synthetic construct
  source 1..17: mol_type = other DNA
acaaaggtggcacacgg

SEQ ID NO: 152955 - DNA, 17 bp, synthetic construct
  source 1..17: mol_type = other DNA
cacaaaggtggcacacg

SEQ ID NO: 152956 - DNA, 17 bp, synthetic construct
  source 1..17: mol_type = other DNA
ccacaaaggtggcacac

SEQ ID NO: 152957 - DNA, 17 bp, synthetic construct
  source 1..17: mol_type = other DNA
tccacaaaggtggcaca

SEQ ID NO: 152958 - DNA, 17 bp, synthetic construct
  source 1..17: mol_type = other DNA
ttccacaaaggtggcac

SEQ ID NO: 152959 - DNA, 17 bp, synthetic construct
  source 1..17: mol_type = other DNA
attccacaaaggtggca

SEQ ID NO: 152960 - DNA, 17 bp, synthetic construct
  source 1..17: mol_type = other DNA
tattccacaaaggtggc

SEQ ID NO: 152961 - DNA, 17 bp, synthetic construct
  source 1..17: mol_type = other DNA
gtattccacaaaggtgg

SEQ ID NO: 152962 - DNA, 17 bp, synthetic construct
  source 1..17: mol_type = other DNA
agtattccacaaaggtg

SEQ ID NO: 152963 - DNA, 17 bp, synthetic construct
  source 1..17: mol_type = other DNA
gagtattccacaaaggt

SEQ ID NO: 152964 - DNA, 17 bp, synthetic construct
  source 1..17: mol_type = other DNA
tgagtattccacaaagg

SEQ ID NO: 152965 - DNA, 17 bp, synthetic construct
  source 1..17: mol_type = other DNA
gtgagtattccacaaag

SEQ ID NO: 152966 - DNA, 17 bp, synthetic construct
  source 1..17: mol_type = other DNA
cgtgagtattccacaaa

SEQ ID NO: 152967 - DNA, 17 bp, synthetic construct
  source 1..17: mol_type = other DNA
gcgtgagtattccacaa

SEQ ID NO: 152968 - DNA, 17 bp, synthetic construct
  source 1..17: mol_type = other DNA
ggcgtgagtattccaca

SEQ ID NO: 152969 - DNA, 17 bp, synthetic construct
  source 1..17: mol_type = other DNA
tggcgtgagtattccac

SEQ ID NO: 152970 - DNA, 17 bp, synthetic construct
  source 1..17: mol_type = other DNA
ctggcgtgagtattcca

SEQ ID NO: 152971 - DNA, 17 bp, synthetic construct
  source 1..17: mol_type = other DNA
actggcgtgagtattcc

SEQ ID NO: 152972 - DNA, 17 bp, synthetic construct
  source 1..17: mol_type = other DNA
cactggcgtgagtattc

SEQ ID NO: 152973 - DNA, 17 bp, synthetic construct
  source 1..17: mol_type = other DNA
gcactggcgtgagtatt

SEQ ID NO: 152974 - DNA, 17 bp, synthetic construct
  source 1..17: mol_type = other DNA
cgcactggcgtgagtat

SEQ ID NO: 152975 - DNA, 17 bp, synthetic construct
  source 1..17: mol_type = other DNA
gcgcactggcgtgagta

SEQ ID NO: 152976 - DNA, 17 bp, synthetic construct
  source 1..17: mol_type = other DNA
ggcgcactggcgtgagt

SEQ ID NO: 152977 - DNA, 17 bp, synthetic construct
  source 1..17: mol_type = other DNA
gggcgcactggcgtgag

SEQ ID NO: 152978 - DNA, 17 bp, synthetic construct
  source 1..17: mol_type = other DNA
tgggcgcactggcgtga

SEQ ID NO: 152979 - DNA, 17 bp, synthetic construct
  source 1..17: mol_type = other DNA
gtgggcgcactggcgtg

SEQ ID NO: 152980 - DNA, 17 bp, synthetic construct
  source 1..17: mol_type = other DNA
cgtgggcgcactggcgt

SEQ ID NO: 152981 - DNA, 17 bp, synthetic construct
  source 1..17: mol_type = other DNA
gcgtgggcgcactggcg

SEQ ID NO: 152982 - DNA, 17 bp, synthetic construct
  source 1..17: mol_type = other DNA
cgcgtgggcgcactggc

SEQ ID NO: 152983 - DNA, 17 bp, synthetic construct
  source 1..17: mol_type = other DNA
ccgcgtgggcgcactgg

SEQ ID NO: 152984 - DNA, 17 bp, synthetic construct
  source 1..17: mol_type = other DNA
cccgcgtgggcgcactg

SEQ ID NO: 152985 - DNA, 17 bp, synthetic construct
  source 1..17: mol_type = other DNA
ccccgcgtgggcgcact

SEQ ID NO: 152986 - DNA, 17 bp, synthetic construct
  source 1..17: mol_type = other DNA
cccccgcgtgggcgcac

SEQ ID NO: 152987 - DNA, 17 bp, synthetic construct
  source 1..17: mol_type = other DNA
ccccccgcgtgggcgca

SEQ ID NO: 152988 - DNA, 17 bp, synthetic construct
  source 1..17: mol_type = other DNA
gccccccgcgtgggcgc

SEQ ID NO: 152989 - DNA, 17 bp, synthetic construct
  source 1..17: mol_type = other DNA
ggccccccgcgtgggcg

SEQ ID NO: 152990 - DNA, 17 bp, synthetic construct
  source 1..17: mol_type = other DNA
tggccccccgcgtgggc

SEQ ID NO: 152991 - DNA, 17 bp, synthetic construct
  source 1..17: mol_type = other DNA
ctggccccccgcgtggg

SEQ ID NO: 152992 - DNA, 17 bp, synthetic construct
  source 1..17: mol_type = other DNA
gctggccccccgcgtgg

SEQ ID NO: 152993 - DNA, 17 bp, synthetic construct
  source 1..17: mol_type = other DNA
ggctggccccccgcgtg

SEQ ID NO: 152994 - DNA, 17 bp, synthetic construct
  source 1..17: mol_type = other DNA
cggctggccccccgcgt

SEQ ID NO: 152995 - DNA, 17 bp, synthetic construct
  source 1..17: mol_type = other DNA
gcggctggccccccgcg

SEQ ID NO: 152996 - DNA, 17 bp, synthetic construct
  source 1..17: mol_type = other DNA
cgcggctggccccccgc

SEQ ID NO: 152997 - DNA, 17 bp, synthetic construct
  source 1..17: mol_type = other DNA
ccgcggctggccccccg

SEQ ID NO: 152998 - DNA, 17 bp, synthetic construct
  source 1..17: mol_type = other DNA
tccgcggctggcccccc

SEQ ID NO: 152999 - DNA, 17 bp, synthetic construct
  source 1..17: mol_type = other DNA
ttccgcggctggccccc

SEQ ID NO: 153000 - DNA, 17 bp, synthetic construct
  source 1..17: mol_type = other DNA
gttccgcggctggcccc

SEQ ID NO: 153001 - DNA, 17 bp, synthetic construct
  source 1..17: mol_type = other DNA
agttccgcggctggccc

SEQ ID NO: 153002 - DNA, 17 bp, synthetic construct
  source 1..17: mol_type = other DNA
cagttccgcggctggcc

SEQ ID NO: 153003 - DNA, 17 bp, synthetic construct
  source 1..17: mol_type = other DNA
ccagttccgcggctggc

SEQ ID NO: 153004 - DNA, 17 bp, synthetic construct
  source 1..17: mol_type = other DNA
tccagttccgcggctgg

SEQ ID NO: 153005 - DNA, 17 bp, synthetic construct
  source 1..17: mol_type = other DNA
ctccagttccgcggctg

SEQ ID NO: 153006 - DNA, 17 bp, synthetic construct
  source 1..17: mol_type = other DNA
cctccagttccgcggct

SEQ ID NO: 153007 - DNA, 17 bp, synthetic construct
  source 1..17: mol_type = other DNA
acctccagttccgcggc

SEQ ID NO: 153008 - DNA, 17 bp, synthetic construct
  source 1..17: mol_type = other DNA
cacctccagttccgcgg

SEQ ID NO: 153009 - DNA, 17 bp, synthetic construct
  source 1..17: mol_type = other DNA
gcacctccagttccgcg

SEQ ID NO: 153010 - DNA, 17 bp, synthetic construct
  source 1..17: mol_type = other DNA
ggcacctccagttccgc

SEQ ID NO: 153011 - DNA, 17 bp, synthetic construct
  source 1..17: mol_type = other DNA
gggcacctccagttccg

SEQ ID NO: 153012 - DNA, 17 bp, synthetic construct
  source 1..17: mol_type = other DNA
agggcacctccagttcc

SEQ ID NO: 153013 - DNA, 17 bp, synthetic construct
  source 1..17: mol_type = other DNA
cagggcacctccagttc

SEQ ID NO: 153014 - DNA, 17 bp, synthetic construct
  source 1..17: mol_type = other DNA
tcagggcacctccagtt

SEQ ID NO: 153015 - DNA, 17 bp, synthetic construct
  source 1..17: mol_type = other DNA
ctcagggcacctccagt

SEQ ID NO: 153016 - DNA, 17 bp, synthetic construct
  source 1..17: mol_type = other DNA
gctcagggcacctccag

SEQ ID NO: 153017 - DNA, 17 bp, synthetic construct
  source 1..17: mol_type = other DNA
agctcagggcacctcca

SEQ ID NO: 153018 - DNA, 17 bp, synthetic construct
  source 1..17: mol_type = other DNA
gagctcagggcacctcc

SEQ ID NO: 153019 - DNA, 17 bp, synthetic construct
  source 1..17: mol_type = other DNA
agagctcagggcacctc

SEQ ID NO: 153020 - DNA, 17 bp, synthetic construct
  source 1..17: mol_type = other DNA
cagagctcagggcacct

SEQ ID NO: 153021 - DNA, 17 bp, synthetic construct
  source 1..17: mol_type = other DNA
gcagagctcagggcacc

SEQ ID NO: 153022 - DNA, 17 bp, synthetic construct
  source 1..17: mol_type = other DNA
ggcagagctcagggcac

SEQ ID NO: 153023 - DNA, 17 bp, synthetic construct
  source 1..17: mol_type = other DNA
cggcagagctcagggca

SEQ ID NO: 153024 - DNA, 17 bp, synthetic construct
  source 1..17: mol_type = other DNA
acggcagagctcagggc

SEQ ID NO: 153025 - DNA, 17 bp, synthetic construct
  source 1..17: mol_type = other DNA
cacggcagagctcaggg

SEQ ID NO: 153026 - DNA, 17 bp, synthetic construct
  source 1..17: mol_type = other DNA
tcacggcagagctcagg

SEQ ID NO: 153027 - DNA, 17 bp, synthetic construct
  source 1..17: mol_type = other DNA
ctcacggcagagctcag

SEQ ID NO: 153028 - DNA, 17 bp, synthetic construct
  source 1..17: mol_type = other DNA
actcacggcagagctca

SEQ ID NO: 153029 - DNA, 17 bp, synthetic construct
  source 1..17: mol_type = other DNA
cactcacggcagagctc

SEQ ID NO: 153030 - DNA, 17 bp, synthetic construct
  source 1..17: mol_type = other DNA
gcactcacggcagagct

SEQ ID NO: 153031 - DNA, 17 bp, synthetic construct
  source 1..17: mol_type = other DNA
agcactcacggcagagc

SEQ ID NO: 153032 - DNA, 17 bp, synthetic construct
  source 1..17: mol_type = other DNA
gagcactcacggcagag

SEQ ID NO: 153033 - DNA, 17 bp, synthetic construct
  source 1..17: mol_type = other DNA
ggagcactcacggcaga

SEQ ID NO: 153034 - DNA, 17 bp, synthetic construct
  source 1..17: mol_type = other DNA
gggagcactcacggcag

SEQ ID NO: 153035 - DNA, 17 bp, synthetic construct
  source 1..17: mol_type = other DNA
tgggagcactcacggca

SEQ ID NO: 153036 - DNA, 17 bp, synthetic construct
  source 1..17: mol_type = other DNA
ctgggagcactcacggc

SEQ ID NO: 153037 - DNA, 17 bp, synthetic construct
  source 1..17: mol_type = other DNA
cctgggagcactcacgg

SEQ ID NO: 153038 - DNA, 17 bp, synthetic construct
  source 1..17: mol_type = other DNA
ccctgggagcactcacg

SEQ ID NO: 153039 - DNA, 17 bp, synthetic construct
  source 1..17: mol_type = other DNA
gccctgggagcactcac

SEQ ID NO: 153040 - DNA, 17 bp, synthetic construct
  source 1..17: mol_type = other DNA
ggccctgggagcactca

SEQ ID NO: 153041 - DNA, 17 bp, synthetic construct
  source 1..17: mol_type = other DNA
aggccctgggagcactc

SEQ ID NO: 153042 - DNA, 17 bp, synthetic construct
  source 1..17: mol_type = other DNA
aaggccctgggagcact

SEQ ID NO: 153043 - DNA, 17 bp, synthetic construct
  source 1..17: mol_type = other DNA
gaaggccctgggagcac

SEQ ID NO: 153044 - DNA, 17 bp, synthetic construct
  source 1..17: mol_type = other DNA
cgaaggccctgggagca

SEQ ID NO: 153045 - DNA, 17 bp, synthetic construct
  source 1..17: mol_type = other DNA
gcgaaggccctgggagc

SEQ ID NO: 153046 - DNA, 17 bp, synthetic construct
  source 1..17: mol_type = other DNA
ggcgaaggccctgggag

SEQ ID NO: 153047 - DNA, 17 bp, synthetic construct
  source 1..17: mol_type = other DNA
tggcgaaggccctggga

SEQ ID NO: 153048 - DNA, 17 bp, synthetic construct
  source 1..17: mol_type = other DNA
ctggcgaaggccctggg

SEQ ID NO: 153049 - DNA, 17 bp, synthetic construct
  source 1..17: mol_type = other DNA
cctggcgaaggccctgg

SEQ ID NO: 153050 - DNA, 17 bp, synthetic construct
  source 1..17: mol_type = other DNA
ccctggcgaaggccctg

SEQ ID NO: 153051 - DNA, 17 bp, synthetic construct
  source 1..17: mol_type = other DNA
tccctggcgaaggccct

SEQ ID NO: 153052 - DNA, 17 bp, synthetic construct
  source 1..17: mol_type = other DNA
atccctggcgaaggccc

SEQ ID NO: 153053 - DNA, 17 bp, synthetic construct
  source 1..17: mol_type = other DNA
aatccctggcgaaggcc

SEQ ID NO: 153054 - DNA, 17 bp, synthetic construct
  source 1..17: mol_type = other DNA
caatccctggcgaaggc

SEQ ID NO: 153055 - DNA, 17 bp, synthetic construct
  source 1..17: mol_type = other DNA
acaatccctggcgaagg

SEQ ID NO: 153056 - DNA, 17 bp, synthetic construct
  source 1..17: mol_type = other DNA
cacaatccctggcgaag

SEQ ID NO: 153057 - DNA, 17 bp, synthetic construct
  source 1..17: mol_type = other DNA
gcacaatccctggcgaa

SEQ ID NO: 153058 - DNA, 17 bp, synthetic construct
  source 1..17: mol_type = other DNA
ggcacaatccctggcga

SEQ ID NO: 153059 - DNA, 17 bp, synthetic construct
  source 1..17: mol_type = other DNA
tggcacaatccctggcg

SEQ ID NO: 153060 - DNA, 17 bp, synthetic construct
  source 1..17: mol_type = other DNA
ctggcacaatccctggc

SEQ ID NO: 153061 - DNA, 17 bp, synthetic construct
  source 1..17: mol_type = other DNA
tctggcacaatccctgg

SEQ ID NO: 153062 - DNA, 17 bp, synthetic construct
  source 1..17: mol_type = other DNA
ctctggcacaatccctg

SEQ ID NO: 153063 - DNA, 17 bp, synthetic construct
  source 1..17: mol_type = other DNA
tctctggcacaatccct

SEQ ID NO: 153064 - DNA, 17 bp, synthetic construct
  source 1..17: mol_type = other DNA
ctctctggcacaatccc

SEQ ID NO: 153065 - DNA, 17 bp, synthetic construct
  source 1..17: mol_type = other DNA
tctctctggcacaatcc

SEQ ID NO: 153066 - DNA, 17 bp, synthetic construct
  source 1..17: mol_type = other DNA
ttctctctggcacaatc

SEQ ID NO: 153067 - DNA, 17 bp, synthetic construct
  source 1..17: mol_type = other DNA
cttctctctggcacaat

SEQ ID NO: 153068 - DNA, 17 bp, synthetic construct
  source 1..17: mol_type = other DNA
ccttctctctggcacaa

SEQ ID NO: 153069 - DNA, 17 bp, synthetic construct
  source 1..17: mol_type = other DNA
cccttctctctggcaca

SEQ ID NO: 153070 - DNA, 17 bp, synthetic construct
  source 1..17: mol_type = other DNA
ccccttctctctggcac

SEQ ID NO: 153071 - DNA, 17 bp, synthetic construct
  source 1..17: mol_type = other DNA
gccccttctctctggca

SEQ ID NO: 153072 - DNA, 17 bp, synthetic construct
  source 1..17: mol_type = other DNA
tgccccttctctctggc

SEQ ID NO: 153073 - DNA, 17 bp, synthetic construct
  source 1..17: mol_type = other DNA
ctgccccttctctctgg

SEQ ID NO: 153074 - DNA, 17 bp, synthetic construct
  source 1..17: mol_type = other DNA
cctgccccttctctctg

SEQ ID NO: 153075 - DNA, 17 bp, synthetic construct
  source 1..17: mol_type = other DNA
ccctgccccttctctct

SEQ ID NO: 153076 - DNA, 17 bp, synthetic construct
  source 1..17: mol_type = other DNA
cccctgccccttctctc

SEQ ID NO: 153077 - DNA, 17 bp, synthetic construct
  source 1..17: mol_type = other DNA
ccccctgccccttctct

SEQ ID NO: 153078 - DNA, 17 bp, synthetic construct
  source 1..17: mol_type = other DNA
tccccctgccccttctc

SEQ ID NO: 153079 - DNA, 17 bp, synthetic construct
  source 1..17: mol_type = other DNA
ctccccctgccccttct

SEQ ID NO: 153080 - DNA, 17 bp, synthetic construct
  source 1..17: mol_type = other DNA
gctccccctgccccttc

SEQ ID NO: 153081 - DNA, 17 bp, synthetic construct
  source 1..17: mol_type = other DNA
cgctccccctgcccctt

SEQ ID NO: 153082 - DNA, 17 bp, synthetic construct
  source 1..17: mol_type = other DNA
gcgctccccctgcccct

SEQ ID NO: 153083 - DNA, 17 bp, synthetic construct
  source 1..17: mol_type = other DNA
ggcgctccccctgcccc

SEQ ID NO: 153084 - DNA, 17 bp, synthetic construct
  source 1..17: mol_type = other DNA
aggcgctccccctgccc

SEQ ID NO: 153085 - DNA, 17 bp, synthetic construct
  source 1..17: mol_type = other DNA
aaggcgctccccctgcc

SEQ ID NO: 153086 - DNA, 17 bp, synthetic construct
  source 1..17: mol_type = other DNA
caaggcgctccccctgc

SEQ ID NO: 153087 - DNA, 17 bp, synthetic construct
  source 1..17: mol_type = other DNA
ccaaggcgctccccctg

SEQ ID NO: 153088 - DNA, 17 bp, synthetic construct
  source 1..17: mol_type = other DNA
cccaaggcgctccccct

SEQ ID NO: 153089 - DNA, 17 bp, synthetic construct
  source 1..17: mol_type = other DNA
ccccaaggcgctccccc

SEQ ID NO: 153090 - DNA, 17 bp, synthetic construct
  source 1..17: mol_type = other DNA
cccccaaggcgctcccc

SEQ ID NO: 153091 - DNA, 17 bp, synthetic construct
  source 1..17: mol_type = other DNA
gcccccaaggcgctccc

SEQ ID NO: 153092 - DNA, 17 bp, synthetic construct
  source 1..17: mol_type = other DNA
ggcccccaaggcgctcc

SEQ ID NO: 153093 - DNA, 17 bp, synthetic construct
  source 1..17: mol_type = other DNA
tggcccccaaggcgctc

SEQ ID NO: 153094 - DNA, 17 bp, synthetic construct
  source 1..17: mol_type = other DNA
gtggcccccaaggcgct

SEQ ID NO: 153095 - DNA, 17 bp, synthetic construct
  source 1..17: mol_type = other DNA
agtggcccccaaggcgc

SEQ ID NO: 153096 - DNA, 17 bp, synthetic construct
  source 1..17: mol_type = other DNA
cagtggcccccaaggcg

SEQ ID NO: 153097 - DNA, 17 bp, synthetic construct
  source 1..17: mol_type = other DNA
ccagtggcccccaaggc

SEQ ID NO: 153098 - DNA, 17 bp, synthetic construct
  source 1..17: mol_type = other DNA
cccagtggcccccaagg

SEQ ID NO: 153099 - DNA, 17 bp, synthetic construct
  source 1..17: mol_type = other DNA
ccccagtggcccccaag

SEQ ID NO: 153100 - DNA, 17 bp, synthetic construct
  source 1..17: mol_type = other DNA
cccccagtggcccccaa

SEQ ID NO: 153101 - DNA, 17 bp, synthetic construct
  source 1..17: mol_type = other DNA
acccccagtggccccca

SEQ ID NO: 153102 - DNA, 17 bp, synthetic construct
  source 1..17: mol_type = other DNA
cacccccagtggccccc

SEQ ID NO: 153103 - DNA, 17 bp, synthetic construct
  source 1..17: mol_type = other DNA
ccacccccagtggcccc

SEQ ID NO: 153104 - DNA, 17 bp, synthetic construct
  source 1..17: mol_type = other DNA
cccacccccagtggccc

SEQ ID NO: 153105 - DNA, 17 bp, synthetic construct
  source 1..17: mol_type = other DNA
ccccacccccagtggcc

SEQ ID NO: 153106 - DNA, 17 bp, synthetic construct
  source 1..17: mol_type = other DNA
tccccacccccagtggc

SEQ ID NO: 153107 - DNA, 17 bp, synthetic construct
  source 1..17: mol_type = other DNA
ctccccacccccagtgg

SEQ ID NO: 153108 - DNA, 17 bp, synthetic construct
  source 1..17: mol_type = other DNA
cctccccacccccagtg

SEQ ID NO: 153109 - DNA, 17 bp, synthetic construct
  source 1..17: mol_type = other DNA
gcctccccacccccagt

SEQ ID NO: 153110 - DNA, 17 bp, synthetic construct
  source 1..17: mol_type = other DNA
ggcctccccacccccag

SEQ ID NO: 153111 - DNA, 17 bp, synthetic construct
  source 1..17: mol_type = other DNA
aggcctccccaccccca

SEQ ID NO: 153112 - DNA, 17 bp, synthetic construct
  source 1..17: mol_type = other DNA
caggcctccccaccccc

SEQ ID NO: 153113 - DNA, 17 bp, synthetic construct
  source 1..17: mol_type = other DNA
ccaggcctccccacccc

SEQ ID NO: 153114 - DNA, 17 bp, synthetic construct
  source 1..17: mol_type = other DNA
cccaggcctccccaccc

SEQ ID NO: 153115 - DNA, 17 bp, synthetic construct
  source 1..17: mol_type = other DNA
ccccaggcctccccacc

SEQ ID NO: 153116 - DNA, 17 bp, synthetic construct
  source 1..17: mol_type = other DNA
cccccaggcctccccac

SEQ ID NO: 153117 - DNA, 17 bp, synthetic construct
  source 1..17: mol_type = other DNA
tcccccaggcctcccca

SEQ ID NO: 153118 - DNA, 17 bp, synthetic construct
  source 1..17: mol_type = other DNA
gtcccccaggcctcccc

SEQ ID NO: 153119 - DNA, 17 bp, synthetic construct
  source 1..17: mol_type = other DNA
tgtcccccaggcctccc

SEQ ID NO: 153120 - DNA, 17 bp, synthetic construct
  source 1..17: mol_type = other DNA
ctgtcccccaggcctcc

SEQ ID NO: 153121 - DNA, 17 bp, synthetic construct
  source 1..17: mol_type = other DNA
cctgtcccccaggcctc

SEQ ID NO: 153122 - DNA, 17 bp, synthetic construct
  source 1..17: mol_type = other DNA
ccctgtcccccaggcct

SEQ ID NO: 153123 - DNA, 17 bp, synthetic construct
  source 1..17: mol_type = other DNA
cccctgtcccccaggcc

SEQ ID NO: 153124 - DNA, 17 bp, synthetic construct
  source 1..17: mol_type = other DNA
acccctgtcccccaggc

SEQ ID NO: 153125 - DNA, 17 bp, synthetic construct
  source 1..17: mol_type = other DNA
cacccctgtcccccagg

SEQ ID NO: 153126 - DNA, 17 bp, synthetic construct
  source 1..17: mol_type = other DNA
ccacccctgtcccccag

SEQ ID NO: 153127 - DNA, 17 bp, synthetic construct
  source 1..17: mol_type = other DNA
tccacccctgtccccca

SEQ ID NO: 153128 - DNA, 17 bp, synthetic construct
  source 1..17: mol_type = other DNA
ctccacccctgtccccc

SEQ ID NO: 153129 - DNA, 17 bp, synthetic construct
  source 1..17: mol_type = other DNA
cctccacccctgtcccc

SEQ ID NO: 153130 - DNA, 17 bp, synthetic construct
  source 1..17: mol_type = other DNA
ccctccacccctgtccc

SEQ ID NO: 153131 - DNA, 17 bp, synthetic construct
  source 1..17: mol_type = other DNA
gccctccacccctgtcc

SEQ ID NO: 153132 - DNA, 17 bp, synthetic construct
  source 1..17: mol_type = other DNA
tgccctccacccctgtc

SEQ ID NO: 153133 - DNA, 17 bp, synthetic construct
  source 1..17: mol_type = other DNA
ctgccctccacccctgt

SEQ ID NO: 153134 - DNA, 17 bp, synthetic construct
  source 1..17: mol_type = other DNA
tctgccctccacccctg

SEQ ID NO: 153135 - DNA, 17 bp, synthetic construct
  source 1..17: mol_type = other DNA
ctctgccctccacccct

SEQ ID NO: 153136 - DNA, 17 bp, synthetic construct
  source 1..17: mol_type = other DNA
cctctgccctccacccc

SEQ ID NO: 153137 - DNA, 17 bp, synthetic construct
  source 1..17: mol_type = other DNA
tcctctgccctccaccc

SEQ ID NO: 153138 - DNA, 17 bp, synthetic construct
  source 1..17: mol_type = other DNA
gtcctctgccctccacc

SEQ ID NO: 153139 - DNA, 17 bp, synthetic construct
  source 1..17: mol_type = other DNA
ggtcctctgccctccac

SEQ ID NO: 153140 - DNA, 17 bp, synthetic construct
  source 1..17: mol_type = other DNA
gggtcctctgccctcca

SEQ ID NO: 153141 - DNA, 17 bp, synthetic construct
  source 1..17: mol_type = other DNA
tgggtcctctgccctcc

SEQ ID NO: 153142 - DNA, 17 bp, synthetic construct
  source 1..17: mol_type = other DNA
gtgggtcctctgccctc

SEQ ID NO: 153143 - DNA, 17 bp, synthetic construct
  source 1..17: mol_type = other DNA
ggtgggtcctctgccct

SEQ ID NO: 153144 - DNA, 17 bp, synthetic construct
  source 1..17: mol_type = other DNA
gggtgggtcctctgccc

SEQ ID NO: 153145 - DNA, 17 bp, synthetic construct
  source 1..17: mol_type = other DNA
ggggtgggtcctctgcc

SEQ ID NO: 153146 - DNA, 17 bp, synthetic construct
  source 1..17: mol_type = other DNA
tggggtgggtcctctgc

SEQ ID NO: 153147 - DNA, 17 bp, synthetic construct
  source 1..17: mol_type = other DNA
ctggggtgggtcctctg

SEQ ID NO: 153148 - DNA, 17 bp, synthetic construct
  source 1..17: mol_type = other DNA
cctggggtgggtcctct

SEQ ID NO: 153149 - DNA, 17 bp, synthetic construct
  source 1..17: mol_type = other DNA
gcctggggtgggtcctc

SEQ ID NO: 153150 - DNA, 17 bp, synthetic construct
  source 1..17: mol_type = other DNA
tgcctggggtgggtcct

SEQ ID NO: 153151 - DNA, 17 bp, synthetic construct
  source 1..17: mol_type = other DNA
atgcctggggtgggtcc

SEQ ID NO: 153152 - DNA, 17 bp, synthetic construct
  source 1..17: mol_type = other DNA
tatgcctggggtgggtc

SEQ ID NO: 153153 - DNA, 17 bp, synthetic construct
  source 1..17: mol_type = other DNA
ctatgcctggggtgggt

SEQ ID NO: 153154 - DNA, 17 bp, synthetic construct
  source 1..17: mol_type = other DNA
actatgcctggggtggg

SEQ ID NO: 153155 - DNA, 17 bp, synthetic construct
  source 1..17: mol_type = other DNA
cactatgcctggggtgg

SEQ ID NO: 153156 - DNA, 17 bp, synthetic construct
  source 1..17: mol_type = other DNA
ccactatgcctggggtg

SEQ ID NO: 153157 - DNA, 17 bp, synthetic construct
  source 1..17: mol_type = other DNA
cccactatgcctggggt

SEQ ID NO: 153158 - DNA, 17 bp, synthetic construct
  source 1..17: mol_type = other DNA
gcccactatgcctgggg

SEQ ID NO: 153159 - DNA, 17 bp, synthetic construct
  source 1..17: mol_type = other DNA
tgcccactatgcctggg

SEQ ID NO: 153160 - DNA, 17 bp, synthetic construct
  source 1..17: mol_type = other DNA
ctgcccactatgcctgg

SEQ ID NO: 153161 - DNA, 17 bp, synthetic construct
  source 1..17: mol_type = other DNA
tctgcccactatgcctg

SEQ ID NO: 153162 - DNA, 17 bp, synthetic construct
  source 1..17: mol_type = other DNA
ctctgcccactatgcct

SEQ ID NO: 153163 - DNA, 17 bp, synthetic construct
  source 1..17: mol_type = other DNA
cctctgcccactatgcc

SEQ ID NO: 153164 - DNA, 17 bp, synthetic construct
  source 1..17: mol_type = other DNA
gcctctgcccactatgc

SEQ ID NO: 153165 - DNA, 17 bp, synthetic construct
  source 1..17: mol_type = other DNA
ggcctctgcccactatg

SEQ ID NO: 153166 - DNA, 17 bp, synthetic construct
  source 1..17: mol_type = other DNA
tggcctctgcccactat

SEQ ID NO: 153167 - DNA, 17 bp, synthetic construct
  source 1..17: mol_type = other DNA
gtggcctctgcccacta

SEQ ID NO: 153168 - DNA, 17 bp, synthetic construct
  source 1..17: mol_type = other DNA
ggtggcctctgcccact

SEQ ID NO: 153169 - DNA, 17 bp, synthetic construct
  source 1..17: mol_type = other DNA
gggtggcctctgcccac

SEQ ID NO: 153170 - DNA, 17 bp, synthetic construct
  source 1..17: mol_type = other DNA
ggggtggcctctgccca

SEQ ID NO: 153171 - DNA, 17 bp, synthetic construct
  source 1..17: mol_type = other DNA
tggggtggcctctgccc

SEQ ID NO: 153172 - DNA, 17 bp, synthetic construct
  source 1..17: mol_type = other DNA
ctggggtggcctctgcc

SEQ ID NO: 153173 - DNA, 17 bp, synthetic construct
  source 1..17: mol_type = other DNA
cctggggtggcctctgc

SEQ ID NO: 153174 - DNA, 17 bp, synthetic construct
  source 1..17: mol_type = other DNA
tcctggggtggcctctg

SEQ ID NO: 153175 - DNA, 17 bp, synthetic construct
  source 1..17: mol_type = other DNA
gtcctggggtggcctct

SEQ ID NO: 153176 - DNA, 17 bp, synthetic construct
  source 1..17: mol_type = other DNA
ggtcctggggtggcctc

SEQ ID NO: 153177 - DNA, 17 bp, synthetic construct
  source 1..17: mol_type = other DNA
gggtcctggggtggcct

SEQ ID NO: 153178 - DNA, 17 bp, synthetic construct
  source 1..17: mol_type = other DNA
ggggtcctggggtggcc

SEQ ID NO: 153179 - DNA, 17 bp, synthetic construct
  source 1..17: mol_type = other DNA
tggggtcctggggtggc

SEQ ID NO: 153180 - DNA, 17 bp, synthetic construct
  source 1..17: mol_type = other DNA
ctggggtcctggggtgg

SEQ ID NO: 153181 - DNA, 17 bp, synthetic construct
  source 1..17: mol_type = other DNA
cctggggtcctggggtg

SEQ ID NO: 153182 - DNA, 17 bp, synthetic construct
  source 1..17: mol_type = other DNA
tcctggggtcctggggt

SEQ ID NO: 153183 - DNA, 17 bp, synthetic construct
  source 1..17: mol_type = other DNA
ctcctggggtcctgggg

SEQ ID NO: 153184 - DNA, 17 bp, synthetic construct
  source 1..17: mol_type = other DNA
cctcctggggtcctggg

SEQ ID NO: 153185 - DNA, 17 bp, synthetic construct
  source 1..17: mol_type = other DNA
ccctcctggggtcctgg

SEQ ID NO: 153186 - DNA, 17 bp, synthetic construct
  source 1..17: mol_type = other DNA
cccctcctggggtcctg

SEQ ID NO: 153187 - DNA, 17 bp, synthetic construct
  source 1..17: mol_type = other DNA
ccccctcctggggtcct

SEQ ID NO: 153188 - DNA, 17 bp, synthetic construct
  source 1..17: mol_type = other DNA
accccctcctggggtcc

SEQ ID NO: 153189 - DNA, 17 bp, synthetic construct
  source 1..17: mol_type = other DNA
caccccctcctggggtc

SEQ ID NO: 153190 - DNA, 17 bp, synthetic construct
  source 1..17: mol_type = other DNA
ccaccccctcctggggt

SEQ ID NO: 153191 - DNA, 17 bp, synthetic construct
  source 1..17: mol_type = other DNA
cccaccccctcctgggg

SEQ ID NO: 153192 - DNA, 17 bp, synthetic construct
  source 1..17: mol_type = other DNA
ccccaccccctcctggg

SEQ ID NO: 153193 - DNA, 17 bp, synthetic construct
  source 1..17: mol_type = other DNA
gccccaccccctcctgg

SEQ ID NO: 153194 - DNA, 17 bp, synthetic construct
  source 1..17: mol_type = other DNA
ggccccaccccctcctg

SEQ ID NO: 153195 - DNA, 17 bp, synthetic construct
  source 1..17: mol_type = other DNA
aggccccaccccctcct

SEQ ID NO: 153196 - DNA, 17 bp, synthetic construct
  source 1..17: mol_type = other DNA
gaggccccaccccctcc

SEQ ID NO: 153197 - DNA, 17 bp, synthetic construct
  source 1..17: mol_type = other DNA
ggaggccccaccccctc

SEQ ID NO: 153198 - DNA, 17 bp, synthetic construct
  source 1..17: mol_type = other DNA
cggaggccccaccccct

SEQ ID NO: 153199 - DNA, 17 bp, synthetic construct
  source 1..17: mol_type = other DNA
ccggaggccccaccccc

SEQ ID NO: 153200 - DNA, 17 bp, synthetic construct
  source 1..17: mol_type = other DNA
cccggaggccccacccc

SEQ ID NO: 153201 - DNA, 17 bp, synthetic construct
  source 1..17: mol_type = other DNA
ccccggaggccccaccc

SEQ ID NO: 153202 - DNA, 17 bp, synthetic construct
  source 1..17: mol_type = other DNA
cccccggaggccccacc

SEQ ID NO: 153203 - DNA, 17 bp, synthetic construct
  source 1..17: mol_type = other DNA
gcccccggaggccccac

SEQ ID NO: 153204 - DNA, 17 bp, synthetic construct
  source 1..17: mol_type = other DNA
agcccccggaggcccca

SEQ ID NO: 153205 - DNA, 17 bp, synthetic construct
  source 1..17: mol_type = other DNA
cagcccccggaggcccc

SEQ ID NO: 153206 - DNA, 17 bp, synthetic construct
  source 1..17: mol_type = other DNA
gcagcccccggaggccc

SEQ ID NO: 153207 - DNA, 17 bp, synthetic construct
  source 1..17: mol_type = other DNA
tgcagcccccggaggcc

SEQ ID NO: 153208 - DNA, 17 bp, synthetic construct
  source 1..17: mol_type = other DNA
ctgcagcccccggaggc

SEQ ID NO: 153209 - DNA, 17 bp, synthetic construct
  source 1..17: mol_type = other DNA
cctgcagcccccggagg

SEQ ID NO: 153210 - DNA, 17 bp, synthetic construct
  source 1..17: mol_type = other DNA
tcctgcagcccccggag

SEQ ID NO: 153211 - DNA, 17 bp, synthetic construct
  source 1..17: mol_type = other DNA
ctcctgcagcccccgga

SEQ ID NO: 153212 - DNA, 17 bp, synthetic construct
  source 1..17: mol_type = other DNA
tctcctgcagcccccgg

SEQ ID NO: 153213 - DNA, 17 bp, synthetic construct
  source 1..17: mol_type = other DNA
ttctcctgcagcccccg

SEQ ID NO: 153214 - DNA, 17 bp, synthetic construct
  source 1..17: mol_type = other DNA
cttctcctgcagccccc

SEQ ID NO: 153215 - DNA, 17 bp, synthetic construct
  source 1..17: mol_type = other DNA
ccttctcctgcagcccc

SEQ ID NO: 153216 - DNA, 17 bp, synthetic construct
  source 1..17: mol_type = other DNA
tccttctcctgcagccc

SEQ ID NO: 153217 - DNA, 17 bp, synthetic construct
  source 1..17: mol_type = other DNA
ctccttctcctgcagcc

SEQ ID NO: 153218 - DNA, 17 bp, synthetic construct
  source 1..17: mol_type = other DNA
tctccttctcctgcagc

SEQ ID NO: 153219 - DNA, 17 bp, synthetic construct
  source 1..17: mol_type = other DNA
ctctccttctcctgcag

SEQ ID NO: 153220 - DNA, 17 bp, synthetic construct
  source 1..17: mol_type = other DNA
cctctccttctcctgca

SEQ ID NO: 153221 - DNA, 17 bp, synthetic construct
  source 1..17: mol_type = other DNA
gcctctccttctcctgc

SEQ ID NO: 153222 - DNA, 17 bp, synthetic construct
  source 1..17: mol_type = other DNA
agcctctccttctcctg

SEQ ID NO: 153223 - DNA, 17 bp, synthetic construct
  source 1..17: mol_type = other DNA
cagcctctccttctcct

SEQ ID NO: 153224 - DNA, 17 bp, synthetic construct
  source 1..17: mol_type = other DNA
acagcctctccttctcc

SEQ ID NO: 153225 - DNA, 17 bp, synthetic construct
  source 1..17: mol_type = other DNA
cacagcctctccttctc

SEQ ID NO: 153226 - DNA, 17 bp, synthetic construct
  source 1..17: mol_type = other DNA
ccacagcctctccttct

SEQ ID NO: 153227 - DNA, 17 bp, synthetic construct
  source 1..17: mol_type = other DNA
tccacagcctctccttc

SEQ ID NO: 153228 - DNA, 17 bp, synthetic construct
  source 1..17: mol_type = other DNA
ctccacagcctctcctt

SEQ ID NO: 153229 - DNA, 17 bp, synthetic construct
  source 1..17: mol_type = other DNA
tctccacagcctctcct

SEQ ID NO: 153230 - DNA, 17 bp, synthetic construct
  source 1..17: mol_type = other DNA
ctctccacagcctctcc

SEQ ID NO: 153231 - DNA, 17 bp, synthetic construct
  source 1..17: mol_type = other DNA
cctctccacagcctctc

SEQ ID NO: 153232 - DNA, 17 bp, synthetic construct
  source 1..17: mol_type = other DNA
gcctctccacagcctct

SEQ ID NO: 153233 - DNA, 17 bp, synthetic construct
  source 1..17: mol_type = other DNA
agcctctccacagcctc

SEQ ID NO: 153234 - DNA, 17 bp, synthetic construct
  source 1..17: mol_type = other DNA
cagcctctccacagcct

SEQ ID NO: 153235 - DNA, 17 bp, synthetic construct
  source 1..17: mol_type = other DNA
acagcctctccacagcc

SEQ ID NO: 153236 - DNA, 17 bp, synthetic construct
  source 1..17: mol_type = other DNA
cacagcctctccacagc

SEQ ID NO: 153237 - DNA, 17 bp, synthetic construct
  source 1..17: mol_type = other DNA
gcacagcctctccacag

SEQ ID NO: 153238 - DNA, 17 bp, synthetic construct
  source 1..17: mol_type = other DNA
tgcacagcctctccaca

SEQ ID NO: 153239 - DNA, 17 bp, synthetic construct
  source 1..17: mol_type = other DNA
ctgcacagcctctccac

SEQ ID NO: 153240 - DNA, 17 bp, synthetic construct
  source 1..17: mol_type = other DNA
gctgcacagcctctcca

SEQ ID NO: 153241 - DNA, 17 bp, synthetic construct
  source 1..17: mol_type = other DNA
tgctgcacagcctctcc

SEQ ID NO: 153242 - DNA, 17 bp, synthetic construct
  source 1..17: mol_type = other DNA
ctgctgcacagcctctc

SEQ ID NO: 153243 - DNA, 17 bp, synthetic construct
  source 1..17: mol_type = other DNA
cctgctgcacagcctct

SEQ ID NO: 153244 - DNA, 17 bp, synthetic construct
  source 1..17: mol_type = other DNA
acctgctgcacagcctc

SEQ ID NO: 153245 - DNA, 17 bp, synthetic construct
  source 1..17: mol_type = other DNA
cacctgctgcacagcct

SEQ ID NO: 153246 - DNA, 17 bp, synthetic construct
  source 1..17: mol_type = other DNA
ccacctgctgcacagcc

SEQ ID NO: 153247 - DNA, 17 bp, synthetic construct
  source 1..17: mol_type = other DNA
gccacctgctgcacagc

SEQ ID NO: 153248 - DNA, 17 bp, synthetic construct
  source 1..17: mol_type = other DNA
cgccacctgctgcacag

SEQ ID NO: 153249 - DNA, 17 bp, synthetic construct
  source 1..17: mol_type = other DNA
ccgccacctgctgcaca

SEQ ID NO: 153250 - DNA, 17 bp, synthetic construct
  source 1..17: mol_type = other DNA
cccgccacctgctgcac

SEQ ID NO: 153251 - DNA, 17 bp, synthetic construct
  source 1..17: mol_type = other DNA
ccccgccacctgctgca

SEQ ID NO: 153252 - DNA, 17 bp, synthetic construct
  source 1..17: mol_type = other DNA
cccccgccacctgctgc

SEQ ID NO: 153253 - DNA, 17 bp, synthetic construct
  source 1..17: mol_type = other DNA
gcccccgccacctgctg

SEQ ID NO: 153254 - DNA, 17 bp, synthetic construct
  source 1..17: mol_type = other DNA
agcccccgccacctgct

SEQ ID NO: 153255 - DNA, 17 bp, synthetic construct
  source 1..17: mol_type = other DNA
cagcccccgccacctgc

SEQ ID NO: 153256 - DNA, 17 bp, synthetic construct
  source 1..17: mol_type = other DNA
ccagcccccgccacctg

SEQ ID NO: 153257 - DNA, 17 bp, synthetic construct
  source 1..17: mol_type = other DNA
cccagcccccgccacct

SEQ ID NO: 153258 - DNA, 17 bp, synthetic construct
  source 1..17: mol_type = other DNA
ccccagcccccgccacc

SEQ ID NO: 153259 - DNA, 17 bp, synthetic construct
  source 1..17: mol_type = other DNA
gccccagcccccgccac

SEQ ID NO: 153260 - DNA, 17 bp, synthetic construct
  source 1..17: mol_type = other DNA
agccccagcccccgcca

SEQ ID NO: 153261 - DNA, 17 bp, synthetic construct
  source 1..17: mol_type = other DNA
cagccccagcccccgcc

SEQ ID NO: 153262 - DNA, 17 bp, synthetic construct
  source 1..17: mol_type = other DNA
ccagccccagcccccgc

SEQ ID NO: 153263 - DNA, 17 bp, synthetic construct
  source 1..17: mol_type = other DNA
tccagccccagcccccg

SEQ ID NO: 153264 - DNA, 17 bp, synthetic construct
  source 1..17: mol_type = other DNA
ctccagccccagccccc

SEQ ID NO: 153265 - DNA, 17 bp, synthetic construct
  source 1..17: mol_type = other DNA
cctccagccccagcccc

SEQ ID NO: 153266 - DNA, 17 bp, synthetic construct
  source 1..17: mol_type = other DNA
ccctccagccccagccc

SEQ ID NO: 153267 - DNA, 17 bp, synthetic construct
  source 1..17: mol_type = other DNA
accctccagccccagcc

SEQ ID NO: 153268 - DNA, 17 bp, synthetic construct
  source 1..17: mol_type = other DNA
caccctccagccccagc

SEQ ID NO: 153269 - DNA, 17 bp, synthetic construct
  source 1..17: mol_type = other DNA
ccaccctccagccccag

SEQ ID NO: 153270 - DNA, 17 bp, synthetic construct
  source 1..17: mol_type = other DNA
tccaccctccagcccca

SEQ ID NO: 153271 - DNA, 17 bp, synthetic construct
  source 1..17: mol_type = other DNA
ctccaccctccagcccc

SEQ ID NO: 153272 - DNA, 17 bp, synthetic construct
  source 1..17: mol_type = other DNA
gctccaccctccagccc

SEQ ID NO: 153273 - DNA, 17 bp, synthetic construct
  source 1..17: mol_type = other DNA
agctccaccctccagcc

SEQ ID NO: 153274 - DNA, 17 bp, synthetic construct
  source 1..17: mol_type = other DNA
cagctccaccctccagc

SEQ ID NO: 153275 - DNA, 17 bp, synthetic construct
  source 1..17: mol_type = other DNA
gcagctccaccctccag

SEQ ID NO: 153276 - DNA, 17 bp, synthetic construct
  source 1..17: mol_type = other DNA
ggcagctccaccctcca

SEQ ID NO: 153277 - DNA, 17 bp, synthetic construct
  source 1..17: mol_type = other DNA
gggcagctccaccctcc

SEQ ID NO: 153278 - DNA, 17 bp, synthetic construct
  source 1..17: mol_type = other DNA
tgggcagctccaccctc

SEQ ID NO: 153279 - DNA, 17 bp, synthetic construct
  source 1..17: mol_type = other DNA
gtgggcagctccaccct

SEQ ID NO: 153280 - DNA, 17 bp, synthetic construct
  source 1..17: mol_type = other DNA
cgtgggcagctccaccc

SEQ ID NO: 153281 - DNA, 17 bp, synthetic construct
  source 1..17: mol_type = other DNA
tcgtgggcagctccacc

SEQ ID NO: 153282 - DNA, 17 bp, synthetic construct
  source 1..17: mol_type = other DNA
atcgtgggcagctccac

SEQ ID NO: 153283 - DNA, 17 bp, synthetic construct
  source 1..17: mol_type = other DNA
catcgtgggcagctcca

SEQ ID NO: 153284 - DNA, 17 bp, synthetic construct
  source 1..17: mol_type = other DNA
tcatcgtgggcagctcc

SEQ ID NO: 153285 - DNA, 17 bp, synthetic construct
  source 1..17: mol_type = other DNA
ctcatcgtgggcagctc

SEQ ID NO: 153286 - DNA, 17 bp, synthetic construct
  source 1..17: mol_type = other DNA
cctcatcgtgggcagct

SEQ ID NO: 153287 - DNA, 17 bp, synthetic construct
  source 1..17: mol_type = other DNA
ccctcatcgtgggcagc

SEQ ID NO: 153288 - DNA, 17 bp, synthetic construct
  source 1..17: mol_type = other DNA
cccctcatcgtgggcag

SEQ ID NO: 153289 - DNA, 17 bp, synthetic construct
  source 1..17: mol_type = other DNA
gcccctcatcgtgggca

SEQ ID NO: 153290 - DNA, 17 bp, synthetic construct
  source 1..17: mol_type = other DNA
cgcccctcatcgtgggc

SEQ ID NO: 153291 - DNA, 17 bp, synthetic construct
  source 1..17: mol_type = other DNA
acgcccctcatcgtggg

SEQ ID NO: 153292 - DNA, 17 bp, synthetic construct
  source 1..17: mol_type = other DNA
gacgcccctcatcgtgg

SEQ ID NO: 153293 - DNA, 17 bp, synthetic construct
  source 1..17: mol_type = other DNA
tgacgcccctcatcgtg

SEQ ID NO: 153294 - DNA, 17 bp, synthetic construct
  source 1..17: mol_type = other DNA
ctgacgcccctcatcgt

SEQ ID NO: 153295 - DNA, 17 bp, synthetic construct
  source 1..17: mol_type = other DNA
cctgacgcccctcatcg

SEQ ID NO: 153296 - DNA, 17 bp, synthetic construct
  source 1..17: mol_type = other DNA
ccctgacgcccctcatc

SEQ ID NO: 153297 - DNA, 17 bp, synthetic construct
  source 1..17: mol_type = other DNA
gccctgacgcccctcat

SEQ ID NO: 153298 - DNA, 17 bp, synthetic construct
  source 1..17: mol_type = other DNA
ggccctgacgcccctca

SEQ ID NO: 153299 - DNA, 17 bp, synthetic construct
  source 1..17: mol_type = other DNA
tggccctgacgcccctc

SEQ ID NO: 153300 - DNA, 17 bp, synthetic construct
  source 1..17: mol_type = other DNA
gtggccctgacgcccct

SEQ ID NO: 153301 - DNA, 17 bp, synthetic construct
  source 1..17: mol_type = other DNA
ggtggccctgacgcccc

SEQ ID NO: 153302 - DNA, 17 bp, synthetic construct
  source 1..17: mol_type = other DNA
gggtggccctgacgccc

SEQ ID NO: 153303 - DNA, 17 bp, synthetic construct
  source 1..17: mol_type = other DNA
agggtggccctgacgcc

SEQ ID NO: 153304 - DNA, 17 bp, synthetic construct
  source 1..17: mol_type = other DNA
cagggtggccctgacgc

SEQ ID NO: 153305 - DNA, 17 bp, synthetic construct
  source 1..17: mol_type = other DNA
ccagggtggccctgacg

SEQ ID NO: 153306 - DNA, 17 bp, synthetic construct
  source 1..17: mol_type = other DNA
cccagggtggccctgac

SEQ ID NO: 153307 - DNA, 17 bp, synthetic construct
  source 1..17: mol_type = other DNA
ccccagggtggccctga

SEQ ID NO: 153308 - DNA, 17 bp, synthetic construct
  source 1..17: mol_type = other DNA
gccccagggtggccctg

SEQ ID NO: 153309 - DNA, 17 bp, synthetic construct
  source 1..17: mol_type = other DNA
ggccccagggtggccct

SEQ ID NO: 153310 - DNA, 17 bp, synthetic construct
  source 1..17: mol_type = other DNA
aggccccagggtggccc

SEQ ID NO: 153311 - DNA, 17 bp, synthetic construct
  source 1..17: mol_type = other DNA
taggccccagggtggcc

SEQ ID NO: 153312 - DNA, 17 bp, synthetic construct
  source 1..17: mol_type = other DNA
ctaggccccagggtggc

SEQ ID NO: 153313 - DNA, 17 bp, synthetic construct
  source 1..17: mol_type = other DNA
gctaggccccagggtgg

SEQ ID NO: 153314 - DNA, 17 bp, synthetic construct
  source 1..17: mol_type = other DNA
agctaggccccagggtg

SEQ ID NO: 153315 - DNA, 17 bp, synthetic construct
  source 1..17: mol_type = other DNA
gagctaggccccagggt

SEQ ID NO: 153316 - DNA, 17 bp, synthetic construct
  source 1..17: mol_type = other DNA
agagctaggccccaggg

SEQ ID NO: 153317 - DNA, 17 bp, synthetic construct
  source 1..17: mol_type = other DNA
cagagctaggccccagg

SEQ ID NO: 153318 - DNA, 17 bp, synthetic construct
  source 1..17: mol_type = other DNA
ccagagctaggccccag

SEQ ID NO: 153319 - DNA, 17 bp, synthetic construct
  source 1..17: mol_type = other DNA
gccagagctaggcccca

SEQ ID NO: 153320 - DNA, 17 bp, synthetic construct
  source 1..17: mol_type = other DNA
agccagagctaggcccc

SEQ ID NO: 153321 - DNA, 17 bp, synthetic construct
  source 1..17: mol_type = other DNA
aagccagagctaggccc

SEQ ID NO: 153322 - DNA, 17 bp, synthetic construct
  source 1..17: mol_type = other DNA
gaagccagagctaggcc

SEQ ID NO: 153323 - DNA, 17 bp, synthetic construct
  source 1..17: mol_type = other DNA
agaagccagagctaggc

SEQ ID NO: 153324 - DNA, 17 bp, synthetic construct
  source 1..17: mol_type = other DNA
cagaagccagagctagg

SEQ ID NO: 153325 - DNA, 17 bp, synthetic construct
  source 1..17: mol_type = other DNA
acagaagccagagctag

SEQ ID NO: 153326 - DNA, 17 bp, synthetic construct
  source 1..17: mol_type = other DNA
cacagaagccagagcta

SEQ ID NO: 153327 - DNA, 17 bp, synthetic construct
  source 1..17: mol_type = other DNA
ccacagaagccagagct

SEQ ID NO: 153328 - DNA, 17 bp, synthetic construct
  source 1..17: mol_type = other DNA
tccacagaagccagagc

SEQ ID NO: 153329 - DNA, 17 bp, synthetic construct
  source 1..17: mol_type = other DNA
gtccacagaagccagag

SEQ ID NO: 153330 - DNA, 17 bp, synthetic construct
  source 1..17: mol_type = other DNA
agtccacagaagccaga

SEQ ID NO: 153331 - DNA, 17 bp, synthetic construct
  source 1..17: mol_type = other DNA
aagtccacagaagccag

SEQ ID NO: 153332 - DNA, 17 bp, synthetic construct
  source 1..17: mol_type = other DNA
caagtccacagaagcca

SEQ ID NO: 153333 - DNA, 17 bp, synthetic construct
  source 1..17: mol_type = other DNA
tcaagtccacagaagcc

SEQ ID NO: 153334 - DNA, 17 bp, synthetic construct
  source 1..17: mol_type = other DNA
atcaagtccacagaagc

SEQ ID NO: 153335 - DNA, 17 bp, synthetic construct
  source 1..17: mol_type = other DNA
catcaagtccacagaag

SEQ ID NO: 153336 - DNA, 17 bp, synthetic construct
  source 1..17: mol_type = other DNA
ccatcaagtccacagaa

SEQ ID NO: 153337 - DNA, 17 bp, synthetic construct
  source 1..17: mol_type = other DNA
gccatcaagtccacaga

SEQ ID NO: 153338 - DNA, 17 bp, synthetic construct
  source 1..17: mol_type = other DNA
tgccatcaagtccacag

SEQ ID NO: 153339 - DNA, 17 bp, synthetic construct
  source 1..17: mol_type = other DNA
atgccatcaagtccaca

SEQ ID NO: 153340 - DNA, 17 bp, synthetic construct
  source 1..17: mol_type = other DNA
catgccatcaagtccac

SEQ ID NO: 153341 - DNA, 17 bp, synthetic construct
  source 1..17: mol_type = other DNA
acatgccatcaagtcca

SEQ ID NO: 153342 - DNA, 17 bp, synthetic construct
  source 1..17: mol_type = other DNA
cacatgccatcaagtcc

SEQ ID NO: 153343 - DNA, 17 bp, synthetic construct
  source 1..17: mol_type = other DNA
ccacatgccatcaagtc

SEQ ID NO: 153344 - DNA, 17 bp, synthetic construct
  source 1..17: mol_type = other DNA
tccacatgccatcaagt

SEQ ID NO: 153345 - DNA, 17 bp, synthetic construct
  source 1..17: mol_type = other DNA
ttccacatgccatcaag

SEQ ID NO: 153346 - DNA, 17 bp, synthetic construct
  source 1..17: mol_type = other DNA
cttccacatgccatcaa

SEQ ID NO: 153347 - DNA, 17 bp, synthetic construct
  source 1..17: mol_type = other DNA
ccttccacatgccatca

SEQ ID NO: 153348 - DNA, 17 bp, synthetic construct
  source 1..17: mol_type = other DNA
gccttccacatgccatc

SEQ ID NO: 153349 - DNA, 17 bp, synthetic construct
  source 1..17: mol_type = other DNA
ggccttccacatgccat

SEQ ID NO: 153350 - DNA, 17 bp, synthetic construct
  source 1..17: mol_type = other DNA
cggccttccacatgcca

SEQ ID NO: 153351 - DNA, 17 bp, synthetic construct
  source 1..17: mol_type = other DNA
acggccttccacatgcc

SEQ ID NO: 153352 - DNA, 17 bp, synthetic construct
  source 1..17: mol_type = other DNA
cacggccttccacatgc

SEQ ID NO: 153353 - DNA, 17 bp, synthetic construct
  source 1..17: mol_type = other DNA
ccacggccttccacatg

SEQ ID NO: 153354 - DNA, 17 bp, synthetic construct
  source 1..17: mol_type = other DNA
tccacggccttccacat

SEQ ID NO: 153355 - DNA, 17 bp, synthetic construct
  source 1..17: mol_type = other DNA
ttccacggccttccaca

SEQ ID NO: 153356 - DNA, 17 bp, synthetic construct
  source 1..17: mol_type = other DNA
cttccacggccttccac

SEQ ID NO: 153357 - DNA, 17 bp, synthetic construct
  source 1..17: mol_type = other DNA
ccttccacggccttcca

SEQ ID NO: 153358 - DNA, 17 bp, synthetic construct
  source 1..17: mol_type = other DNA
gccttccacggccttcc

SEQ ID NO: 153359 - DNA, 17 bp, synthetic construct
  source 1..17: mol_type = other DNA
cgccttccacggccttc

SEQ ID NO: 153360 - DNA, 17 bp, synthetic construct
  source 1..17: mol_type = other DNA
ccgccttccacggcctt

SEQ ID NO: 153361 - DNA, 17 bp, synthetic construct
  source 1..17: mol_type = other DNA
gccgccttccacggcct

SEQ ID NO: 153362 - DNA, 17 bp, synthetic construct
  source 1..17: mol_type = other DNA
agccgccttccacggcc

SEQ ID NO: 153363 - DNA, 17 bp, synthetic construct
  source 1..17: mol_type = other DNA
cagccgccttccacggc

SEQ ID NO: 153364 - DNA, 17 bp, synthetic construct
  source 1..17: mol_type = other DNA
ccagccgccttccacgg

SEQ ID NO: 153365 - DNA, 17 bp, synthetic construct
  source 1..17: mol_type = other DNA
cccagccgccttccacg

SEQ ID NO: 153366 - DNA, 17 bp, synthetic construct
  source 1..17: mol_type = other DNA
ccccagccgccttccac

SEQ ID NO: 153367 - DNA, 17 bp, synthetic construct
  source 1..17: mol_type = other DNA
gccccagccgccttcca

SEQ ID NO: 153368 - DNA, 17 bp, synthetic construct
  source 1..17: mol_type = other DNA
agccccagccgccttcc

SEQ ID NO: 153369 - DNA, 17 bp, synthetic construct
  source 1..17: mol_type = other DNA
cagccccagccgccttc

SEQ ID NO: 153370 - DNA, 17 bp, synthetic construct
  source 1..17: mol_type = other DNA
tcagccccagccgcctt

SEQ ID NO: 153371 - DNA, 17 bp, synthetic construct
  source 1..17: mol_type = other DNA
gtcagccccagccgcct

SEQ ID NO: 153372 - DNA, 17 bp, synthetic construct
  source 1..17: mol_type = other DNA
ggtcagccccagccgcc

SEQ ID NO: 153373 - DNA, 17 bp, synthetic construct
  source 1..17: mol_type = other DNA
tggtcagccccagccgc

SEQ ID NO: 153374 - DNA, 17 bp, synthetic construct
  source 1..17: mol_type = other DNA
gtggtcagccccagccg

SEQ ID NO: 153375 - DNA, 17 bp, synthetic construct
  source 1..17: mol_type = other DNA
tgtggtcagccccagcc

SEQ ID NO: 153376 - DNA, 17 bp, synthetic construct
  source 1..17: mol_type = other DNA
gtgtggtcagccccagc

SEQ ID NO: 153377 - DNA, 17 bp, synthetic construct
  source 1..17: mol_type = other DNA
cgtgtggtcagccccag

SEQ ID NO: 153378 - DNA, 17 bp, synthetic construct
  source 1..17: mol_type = other DNA
ccgtgtggtcagcccca

SEQ ID NO: 153379 - DNA, 17 bp, synthetic construct
  source 1..17: mol_type = other DNA
cccgtgtggtcagcccc

SEQ ID NO: 153380 - DNA, 17 bp, synthetic construct
  source 1..17: mol_type = other DNA
gcccgtgtggtcagccc

SEQ ID NO: 153381 - DNA, 17 bp, synthetic construct
  source 1..17: mol_type = other DNA
tgcccgtgtggtcagcc

SEQ ID NO: 153382 - DNA, 17 bp, synthetic construct
  source 1..17: mol_type = other DNA
ctgcccgtgtggtcagc

SEQ ID NO: 153383 - DNA, 17 bp, synthetic construct
  source 1..17: mol_type = other DNA
actgcccgtgtggtcag

SEQ ID NO: 153384 - DNA, 17 bp, synthetic construct
  source 1..17: mol_type = other DNA
tactgcccgtgtggtca

SEQ ID NO: 153385 - DNA, 17 bp, synthetic construct
  source 1..17: mol_type = other DNA
gtactgcccgtgtggtc

SEQ ID NO: 153386 - DNA, 17 bp, synthetic construct
  source 1..17: mol_type = other DNA
tgtactgcccgtgtggt

SEQ ID NO: 153387 - DNA, 17 bp, synthetic construct
  source 1..17: mol_type = other DNA
ctgtactgcccgtgtgg

SEQ ID NO: 153388 - DNA, 17 bp, synthetic construct
  source 1..17: mol_type = other DNA
cctgtactgcccgtgtg

SEQ ID NO: 153389 - DNA, 17 bp, synthetic construct
  source 1..17: mol_type = other DNA
ccctgtactgcccgtgt

SEQ ID NO: 153390 - DNA, 17 bp, synthetic construct
  source 1..17: mol_type = other DNA
gccctgtactgcccgtg

SEQ ID NO: 153391 - DNA, 17 bp, synthetic construct
  source 1..17: mol_type = other DNA
ggccctgtactgcccgt

SEQ ID NO: 153392 - DNA, 17 bp, synthetic construct
  source 1..17: mol_type = other DNA
gggccctgtactgcccg

SEQ ID NO: 153393 - DNA, 17 bp, synthetic construct
  source 1..17: mol_type = other DNA
agggccctgtactgccc

SEQ ID NO: 153394 - DNA, 17 bp, synthetic construct
  source 1..17: mol_type = other DNA
aagggccctgtactgcc

SEQ ID NO: 153395 - DNA, 17 bp, synthetic construct
  source 1..17: mol_type = other DNA
gaagggccctgtactgc

SEQ ID NO: 153396 - DNA, 17 bp, synthetic construct
  source 1..17: mol_type = other DNA
ggaagggccctgtactg

SEQ ID NO: 153397 - DNA, 17 bp, synthetic construct
  source 1..17: mol_type = other DNA
gggaagggccctgtact

SEQ ID NO: 153398 - DNA, 17 bp, synthetic construct
  source 1..17: mol_type = other DNA
ggggaagggccctgtac

SEQ ID NO: 153399 - DNA, 17 bp, synthetic construct
  source 1..17: mol_type = other DNA
aggggaagggccctgta

SEQ ID NO: 153400 - DNA, 17 bp, synthetic construct
  source 1..17: mol_type = other DNA
caggggaagggccctgt

SEQ ID NO: 153401 - DNA, 17 bp, synthetic construct
  source 1..17: mol_type = other DNA
ccaggggaagggccctg

SEQ ID NO: 153402 - DNA, 17 bp, synthetic construct
  source 1..17: mol_type = other DNA
gccaggggaagggccct

SEQ ID NO: 153403 - DNA, 17 bp, synthetic construct
  source 1..17: mol_type = other DNA
ggccaggggaagggccc

SEQ ID NO: 153404 - DNA, 17 bp, synthetic construct
  source 1..17: mol_type = other DNA
gggccaggggaagggcc

SEQ ID NO: 153405 - DNA, 17 bp, synthetic construct
  source 1..17: mol_type = other DNA
tgggccaggggaagggc

SEQ ID NO: 153406 - DNA, 17 bp, synthetic construct
  source 1..17: mol_type = other DNA
ctgggccaggggaaggg

SEQ ID NO: 153407 - DNA, 17 bp, synthetic construct
  source 1..17: mol_type = other DNA
gctgggccaggggaagg

SEQ ID NO: 153408 - DNA, 17 bp, synthetic construct
  source 1..17: mol_type = other DNA
ggctgggccaggggaag

SEQ ID NO: 153409 - DNA, 17 bp, synthetic construct
  source 1..17: mol_type = other DNA
gggctgggccaggggaa

SEQ ID NO: 153410 - DNA, 17 bp, synthetic construct
  source 1..17: mol_type = other DNA
ggggctgggccagggga

SEQ ID NO: 153411 - DNA, 17 bp, synthetic construct
  source 1..17: mol_type = other DNA
tggggctgggccagggg

SEQ ID NO: 153412 - DNA, 17 bp, synthetic construct
  source 1..17: mol_type = other DNA
gtggggctgggccaggg

SEQ ID NO: 153413 - DNA, 17 bp, synthetic construct
  source 1..17: mol_type = other DNA
ggtggggctgggccagg

SEQ ID NO: 153414 - DNA, 17 bp, synthetic construct
  source 1..17: mol_type = other DNA
aggtggggctgggccag

SEQ ID NO: 153415 - DNA, 17 bp, synthetic construct
  source 1..17: mol_type = other DNA
gaggtggggctgggcca

SEQ ID NO: 153416 - DNA, 17 bp, synthetic construct
  source 1..17: mol_type = other DNA
ggaggtggggctgggcc

SEQ ID NO: 153417 - DNA, 17 bp, synthetic construct
  source 1..17: mol_type = other DNA
aggaggtggggctgggc

SEQ ID NO: 153418 - DNA, 17 bp, synthetic construct
  source 1..17: mol_type = other DNA
aaggaggtggggctggg

SEQ ID NO: 153419 - DNA, 17 bp, synthetic construct
  source 1..17: mol_type = other DNA
aaaggaggtggggctgg

SEQ ID NO: 153420 - DNA, 17 bp, synthetic construct
  source 1..17: mol_type = other DNA
aaaaggaggtggggctg

SEQ ID NO: 153421 - DNA, 17 bp, synthetic construct
  source 1..17: mol_type = other DNA
caaaaggaggtggggct

SEQ ID NO: 153422 - DNA, 17 bp, synthetic construct
  source 1..17: mol_type = other DNA
gcaaaaggaggtggggc

SEQ ID NO: 153423 - DNA, 17 bp, synthetic construct
  source 1..17: mol_type = other DNA
cgcaaaaggaggtgggg

SEQ ID NO: 153424 - DNA, 17 bp, synthetic construct
  source 1..17: mol_type = other DNA
gcgcaaaaggaggtggg

SEQ ID NO: 153425 - DNA, 17 bp, synthetic construct
  source 1..17: mol_type = other DNA
tgcgcaaaaggaggtgg

SEQ ID NO: 153426 - DNA, 17 bp, synthetic construct
  source 1..17: mol_type = other DNA
ctgcgcaaaaggaggtg

SEQ ID NO: 153427 - DNA, 17 bp, synthetic construct
  source 1..17: mol_type = other DNA
gctgcgcaaaaggaggt

SEQ ID NO: 153428 - DNA, 17 bp, synthetic construct
  source 1..17: mol_type = other DNA
ggctgcgcaaaaggagg

SEQ ID NO: 153429 - DNA, 17 bp, synthetic construct
  source 1..17: mol_type = other DNA
gggctgcgcaaaaggag

SEQ ID NO: 153430 - DNA, 17 bp, synthetic construct
  source 1..17: mol_type = other DNA
cgggctgcgcaaaagga

SEQ ID NO: 153431 - DNA, 17 bp, synthetic construct
  source 1..17: mol_type = other DNA
ccgggctgcgcaaaagg

SEQ ID NO: 153432 - DNA, 17 bp, synthetic construct
  source 1..17: mol_type = other DNA
tccgggctgcgcaaaag

SEQ ID NO: 153433 - DNA, 17 bp, synthetic construct
  source 1..17: mol_type = other DNA
gtccgggctgcgcaaaa

SEQ ID NO: 153434 - DNA, 17 bp, synthetic construct
  source 1..17: mol_type = other DNA
ggtccgggctgcgcaaa

SEQ ID NO: 153435 - DNA, 17 bp, synthetic construct
  source 1..17: mol_type = other DNA
aggtccgggctgcgcaa

SEQ ID NO: 153436 - DNA, 17 bp, synthetic construct
  source 1..17: mol_type = other DNA
caggtccgggctgcgca

SEQ ID NO: 153437 - DNA, 17 bp, synthetic construct
  source 1..17: mol_type = other DNA
gcaggtccgggctgcgc

SEQ ID NO: 153438 - DNA, 17 bp, synthetic construct
  source 1..17: mol_type = other DNA
ggcaggtccgggctgcg

SEQ ID NO: 153439 - DNA, 17 bp, synthetic construct
  source 1..17: mol_type = other DNA
gggcaggtccgggctgc

SEQ ID NO: 153440 - DNA, 17 bp, synthetic construct
  source 1..17: mol_type = other DNA
ggggcaggtccgggctg

SEQ ID NO: 153441 - DNA, 17 bp, synthetic construct
  source 1..17: mol_type = other DNA
gggggcaggtccgggct

SEQ ID NO: 153442 - DNA, 17 bp, synthetic construct
  source 1..17: mol_type = other DNA
agggggcaggtccgggc

SEQ ID NO: 153443 - DNA, 17 bp, synthetic construct
  source 1..17: mol_type = other DNA
gagggggcaggtccggg

SEQ ID NO: 153444 - DNA, 17 bp, synthetic construct
  source 1..17: mol_type = other DNA
tgagggggcaggtccgg

SEQ ID NO: 153445 - DNA, 17 bp, synthetic construct
  source 1..17: mol_type = other DNA
ttgagggggcaggtccg

SEQ ID NO: 153446 - DNA, 17 bp, synthetic construct
  source 1..17: mol_type = other DNA
gttgagggggcaggtcc

SEQ ID NO: 153447 - DNA, 17 bp, synthetic construct
  source 1..17: mol_type = other DNA
tgttgagggggcaggtc

SEQ ID NO: 153448 - DNA, 17 bp, synthetic construct
  source 1..17: mol_type = other DNA
atgttgagggggcaggt

SEQ ID NO: 153449 - DNA, 17 bp, synthetic construct
  source 1..17: mol_type = other DNA
catgttgagggggcagg

SEQ ID NO: 153450 - DNA, 17 bp, synthetic construct
  source 1..17: mol_type = other DNA
gcatgttgagggggcag

SEQ ID NO: 153451 - DNA, 17 bp, synthetic construct
  source 1..17: mol_type = other DNA
tgcatgttgagggggca

SEQ ID NO: 153452 - DNA, 17 bp, synthetic construct
  source 1..17: mol_type = other DNA
ctgcatgttgagggggc

SEQ ID NO: 153453 - DNA, 17 bp, synthetic construct
  source 1..17: mol_type = other DNA
gctgcatgttgaggggg

SEQ ID NO: 153454 - DNA, 17 bp, synthetic construct
  source 1..17: mol_type = other DNA
tgctgcatgttgagggg

SEQ ID NO: 153455 - DNA, 17 bp, synthetic construct
  source 1..17: mol_type = other DNA
gtgctgcatgttgaggg

SEQ ID NO: 153456 - DNA, 17 bp, synthetic construct
  source 1..17: mol_type = other DNA
ggtgctgcatgttgagg

SEQ ID NO: 153457 - DNA, 17 bp, synthetic construct
  source 1..17: mol_type = other DNA
tggtgctgcatgttgag

SEQ ID NO: 153458 - DNA, 17 bp, synthetic construct
  source 1..17: mol_type = other DNA
ctggtgctgcatgttga

SEQ ID NO: 153459 - DNA, 17 bp, synthetic construct
  source 1..17: mol_type = other DNA
cctggtgctgcatgttg

SEQ ID NO: 153460 - DNA, 17 bp, synthetic construct
  source 1..17: mol_type = other DNA
tcctggtgctgcatgtt

SEQ ID NO: 153461 - DNA, 17 bp, synthetic construct
  source 1..17: mol_type = other DNA
ctcctggtgctgcatgt

SEQ ID NO: 153462 - DNA, 17 bp, synthetic construct
  source 1..17: mol_type = other DNA
actcctggtgctgcatg

SEQ ID NO: 153463 - DNA, 17 bp, synthetic construct
  source 1..17: mol_type = other DNA
cactcctggtgctgcat

SEQ ID NO: 153464 - DNA, 17 bp, synthetic construct
  source 1..17: mol_type = other DNA
acactcctggtgctgca

SEQ ID NO: 153465 - DNA, 17 bp, synthetic construct
  source 1..17: mol_type = other DNA
cacactcctggtgctgc

SEQ ID NO: 153466 - DNA, 17 bp, synthetic construct
  source 1..17: mol_type = other DNA
ccacactcctggtgctg

SEQ ID NO: 153467 - DNA, 17 bp, synthetic construct
  source 1..17: mol_type = other DNA
gccacactcctggtgct

SEQ ID NO: 153468 - DNA, 17 bp, synthetic construct
  source 1..17: mol_type = other DNA
agccacactcctggtgc

SEQ ID NO: 153469 - DNA, 17 bp, synthetic construct
  source 1..17: mol_type = other DNA
gagccacactcctggtg

SEQ ID NO: 153470 - DNA, 17 bp, synthetic construct
  source 1..17: mol_type = other DNA
tgagccacactcctggt

SEQ ID NO: 153471 - DNA, 17 bp, synthetic construct
  source 1..17: mol_type = other DNA
gtgagccacactcctgg

SEQ ID NO: 153472 - DNA, 17 bp, synthetic construct
  source 1..17: mol_type = other DNA
ggtgagccacactcctg

SEQ ID NO: 153473 - DNA, 17 bp, synthetic construct
  source 1..17: mol_type = other DNA
gggtgagccacactcct

SEQ ID NO: 153474 - DNA, 17 bp, synthetic construct
  source 1..17: mol_type = other DNA
agggtgagccacactcc

SEQ ID NO: 153475 - DNA, 17 bp, synthetic construct
  source 1..17: mol_type = other DNA
cagggtgagccacactc

SEQ ID NO: 153476 - DNA, 17 bp, synthetic construct
  source 1..17: mol_type = other DNA
gcagggtgagccacact

SEQ ID NO: 153477 - DNA, 17 bp, synthetic construct
  source 1..17: mol_type = other DNA
tgcagggtgagccacac

SEQ ID NO: 153478 - DNA, 17 bp, synthetic construct
  source 1..17: mol_type = other DNA
gtgcagggtgagccaca

SEQ ID NO: 153479 - DNA, 17 bp, synthetic construct
  source 1..17: mol_type = other DNA
cgtgcagggtgagccac

SEQ ID NO: 153480 - DNA, 17 bp, synthetic construct
  source 1..17: mol_type = other DNA
ccgtgcagggtgagcca

SEQ ID NO: 153481 - DNA, 17 bp, synthetic construct
  source 1..17: mol_type = other DNA
tccgtgcagggtgagcc

SEQ ID NO: 153482 - DNA, 17 bp, synthetic construct
  source 1..17: mol_type = other DNA
gtccgtgcagggtgagc

SEQ ID NO: 153483 - DNA, 17 bp, synthetic construct
  source 1..17: mol_type = other DNA
tgtccgtgcagggtgag

SEQ ID NO: 153484 - DNA, 17 bp, synthetic construct
  source 1..17: mol_type = other DNA
gtgtccgtgcagggtga

SEQ ID NO: 153485 - DNA, 17 bp, synthetic construct
  source 1..17: mol_type = other DNA
ggtgtccgtgcagggtg

SEQ ID NO: 153486 - DNA, 17 bp, synthetic construct
  source 1..17: mol_type = other DNA
aggtgtccgtgcagggt

SEQ ID NO: 153487 - DNA, 17 bp, synthetic construct
  source 1..17: mol_type = other DNA
caggtgtccgtgcaggg

SEQ ID NO: 153488 - DNA, 17 bp, synthetic construct
  source 1..17: mol_type = other DNA
gcaggtgtccgtgcagg

SEQ ID NO: 153489 - DNA, 17 bp, synthetic construct
  source 1..17: mol_type = other DNA
agcaggtgtccgtgcag

SEQ ID NO: 153490 - DNA, 17 bp, synthetic construct
  source 1..17: mol_type = other DNA
gagcaggtgtccgtgca

SEQ ID NO: 153491 - DNA, 17 bp, synthetic construct
  source 1..17: mol_type = other DNA
ggagcaggtgtccgtgc

SEQ ID NO: 153492 - DNA, 17 bp, synthetic construct
  source 1..17: mol_type = other DNA
tggagcaggtgtccgtg

SEQ ID NO: 153493 - DNA, 17 bp, synthetic construct
  source 1..17: mol_type = other DNA
ttggagcaggtgtccgt

SEQ ID NO: 153494 - DNA, 17 bp, synthetic construct
  source 1..17: mol_type = other DNA
gttggagcaggtgtccg

SEQ ID NO: 153495 - DNA, 17 bp, synthetic construct
  source 1..17: mol_type = other DNA
ggttggagcaggtgtcc

SEQ ID NO: 153496 - DNA, 17 bp, synthetic construct
  source 1..17: mol_type = other DNA
gggttggagcaggtgtc

SEQ ID NO: 153497 - DNA, 17 bp, synthetic construct
  source 1..17: mol_type = other DNA
ggggttggagcaggtgt

SEQ ID NO: 153498 - DNA, 17 bp, synthetic construct
  source 1..17: mol_type = other DNA
gggggttggagcaggtg

SEQ ID NO: 153499 - DNA, 17 bp, synthetic construct
  source 1..17: mol_type = other DNA
tgggggttggagcaggt

SEQ ID NO: 153500 - DNA, 17 bp, synthetic construct
  source 1..17: mol_type = other DNA
ctgggggttggagcagg

SEQ ID NO: 153501 - DNA, 17 bp, synthetic construct
  source 1..17: mol_type = other DNA
gctgggggttggagcag

SEQ ID NO: 153502 - DNA, 17 bp, synthetic construct
  source 1..17: mol_type = other DNA
cgctgggggttggagca

SEQ ID NO: 153503 - DNA, 17 bp, synthetic construct
  source 1..17: mol_type = other DNA
gcgctgggggttggagc

SEQ ID NO: 153504 - DNA, 17 bp, synthetic construct
  source 1..17: mol_type = other DNA
cgcgctgggggttggag

SEQ ID NO: 153505 - DNA, 17 bp, synthetic construct
  source 1..17: mol_type = other DNA
gcgcgctgggggttgga

SEQ ID NO: 153506 - DNA, 17 bp, synthetic construct
  source 1..17: mol_type = other DNA
cgcgcgctgggggttgg

SEQ ID NO: 153507 - DNA, 17 bp, synthetic construct
  source 1..17: mol_type = other DNA
gcgcgcgctgggggttg

SEQ ID NO: 153508 - DNA, 17 bp, synthetic construct
  source 1..17: mol_type = other DNA
tgcgcgcgctgggggtt

SEQ ID NO: 153509 - DNA, 17 bp, synthetic construct
  source 1..17: mol_type = other DNA
ctgcgcgcgctgggggt

SEQ ID NO: 153510 - DNA, 17 bp, synthetic construct
  source 1..17: mol_type = other DNA
gctgcgcgcgctggggg

SEQ ID NO: 153511 - DNA, 17 bp, synthetic construct
  source 1..17: mol_type = other DNA
agctgcgcgcgctgggg

SEQ ID NO: 153512 - DNA, 17 bp, synthetic construct
  source 1..17: mol_type = other DNA
gagctgcgcgcgctggg

SEQ ID NO: 153513 - DNA, 17 bp, synthetic construct
  source 1..17: mol_type = other DNA
agagctgcgcgcgctgg

SEQ ID NO: 153514 - DNA, 17 bp, synthetic construct
  source 1..17: mol_type = other DNA
cagagctgcgcgcgctg

SEQ ID NO: 153515 - DNA, 17 bp, synthetic construct
  source 1..17: mol_type = other DNA
gcagagctgcgcgcgct

SEQ ID NO: 153516 - DNA, 17 bp, synthetic construct
  source 1..17: mol_type = other DNA
cgcagagctgcgcgcgc

SEQ ID NO: 153517 - DNA, 17 bp, synthetic construct
  source 1..17: mol_type = other DNA
tcgcagagctgcgcgcg

SEQ ID NO: 153518 - DNA, 17 bp, synthetic construct
  source 1..17: mol_type = other DNA
ctcgcagagctgcgcgc

SEQ ID NO: 153519 - DNA, 17 bp, synthetic construct
  source 1..17: mol_type = other DNA
cctcgcagagctgcgcg

SEQ ID NO: 153520 - DNA, 17 bp, synthetic construct
  source 1..17: mol_type = other DNA
tcctcgcagagctgcgc

SEQ ID NO: 153521 - DNA, 17 bp, synthetic construct
  source 1..17: mol_type = other DNA
gtcctcgcagagctgcg

SEQ ID NO: 153522 - DNA, 17 bp, synthetic construct
  source 1..17: mol_type = other DNA
ggtcctcgcagagctgc

SEQ ID NO: 153523 - DNA, 17 bp, synthetic construct
  source 1..17: mol_type = other DNA
tggtcctcgcagagctg

SEQ ID NO: 153524 - DNA, 17 bp, synthetic construct
  source 1..17: mol_type = other DNA
gtggtcctcgcagagct

SEQ ID NO: 153525 - DNA, 17 bp, synthetic construct
  source 1..17: mol_type = other DNA
agtggtcctcgcagagc

SEQ ID NO: 153526 - DNA, 17 bp, synthetic construct
  source 1..17: mol_type = other DNA
cagtggtcctcgcagag

SEQ ID NO: 153527 - DNA, 17 bp, synthetic construct
  source 1..17: mol_type = other DNA
acagtggtcctcgcaga

SEQ ID NO: 153528 - DNA, 17 bp, synthetic construct
  source 1..17: mol_type = other DNA
cacagtggtcctcgcag

SEQ ID NO: 153529 - DNA, 17 bp, synthetic construct
  source 1..17: mol_type = other DNA
acacagtggtcctcgca

SEQ ID NO: 153530 - DNA, 17 bp, synthetic construct
  source 1..17: mol_type = other DNA
cacacagtggtcctcgc

SEQ ID NO: 153531 - DNA, 17 bp, synthetic construct
  source 1..17: mol_type = other DNA
ccacacagtggtcctcg

SEQ ID NO: 153532 - DNA, 17 bp, synthetic construct
  source 1..17: mol_type = other DNA
tccacacagtggtcctc

SEQ ID NO: 153533 - DNA, 17 bp, synthetic construct
  source 1..17: mol_type = other DNA
gtccacacagtggtcct

SEQ ID NO: 153534 - DNA, 17 bp, synthetic construct
  source 1..17: mol_type = other DNA
cgtccacacagtggtcc

SEQ ID NO: 153535 - DNA, 17 bp, synthetic construct
  source 1..17: mol_type = other DNA
ccgtccacacagtggtc

SEQ ID NO: 153536 - DNA, 17 bp, synthetic construct
  source 1..17: mol_type = other DNA
gccgtccacacagtggt

SEQ ID NO: 153537 - DNA, 17 bp, synthetic construct
  source 1..17: mol_type = other DNA
agccgtccacacagtgg

SEQ ID NO: 153538 - DNA, 17 bp, synthetic construct
  source 1..17: mol_type = other DNA
cagccgtccacacagtg

SEQ ID NO: 153539 - DNA, 17 bp, synthetic construct
  source 1..17: mol_type = other DNA
gcagccgtccacacagt

SEQ ID NO: 153540 - DNA, 17 bp, synthetic construct
  source 1..17: mol_type = other DNA
agcagccgtccacacag

SEQ ID NO: 153541 - DNA, 17 bp, synthetic construct
  source 1..17: mol_type = other DNA
aagcagccgtccacaca

SEQ ID NO: 153542 - DNA, 17 bp, synthetic construct
  source 1..17: mol_type = other DNA
gaagcagccgtccacac

SEQ ID NO: 153543 - DNA, 17 bp, synthetic construct
  source 1..17: mol_type = other DNA
agaagcagccgtccaca

SEQ ID NO: 153544 - DNA, 17 bp, synthetic construct
  source 1..17: mol_type = other DNA
cagaagcagccgtccac

SEQ ID NO: 153545 - DNA, 17 bp, synthetic construct
  source 1..17: mol_type = other DNA
gcagaagcagccgtcca

SEQ ID NO: 153546 - DNA, 17 bp, synthetic construct
  source 1..17: mol_type = other DNA
ggcagaagcagccgtcc

SEQ ID NO: 153547 - DNA, 17 bp, synthetic construct
  source 1..17: mol_type = other DNA
gggcagaagcagccgtc

SEQ ID NO: 153548 - DNA, 17 bp, synthetic construct
  source 1..17: mol_type = other DNA
ggggcagaagcagccgt

SEQ ID NO: 153549 - DNA, 17 bp, synthetic construct
  source 1..17: mol_type = other DNA
gggggcagaagcagccg

SEQ ID NO: 153550 - DNA, 17 bp, synthetic construct
  source 1..17: mol_type = other DNA
ggggggcagaagcagcc

SEQ ID NO: 153551 - DNA, 17 bp, synthetic construct
  source 1..17: mol_type = other DNA
tggggggcagaagcagc

SEQ ID NO: 153552 - DNA, 17 bp, synthetic construct
  source 1..17: mol_type = other DNA
ctggggggcagaagcag

SEQ ID NO: 153553 - DNA, 17 bp, synthetic construct
  source 1..17: mol_type = other DNA
cctggggggcagaagca

SEQ ID NO: 153554 - DNA, 17 bp, synthetic construct
  source 1..17: mol_type = other DNA
gcctggggggcagaagc

SEQ ID NO: 153555 - DNA, 17 bp, synthetic construct
  source 1..17: mol_type = other DNA
tgcctggggggcagaag

SEQ ID NO: 153556 - DNA, 17 bp, synthetic construct
  source 1..17: mol_type = other DNA
ctgcctggggggcagaa

SEQ ID NO: 153557 - DNA, 17 bp, synthetic construct
  source 1..17: mol_type = other DNA
cctgcctggggggcaga

SEQ ID NO: 153558 - DNA, 17 bp, synthetic construct
  source 1..17: mol_type = other DNA
acctgcctggggggcag

SEQ ID NO: 153559 - DNA, 17 bp, synthetic construct
  source 1..17: mol_type = other DNA
gacctgcctggggggca

SEQ ID NO: 153560 - DNA, 17 bp, synthetic construct
  source 1..17: mol_type = other DNA
agacctgcctggggggc

SEQ ID NO: 153561 - DNA, 17 bp, synthetic construct
  source 1..17: mol_type = other DNA
aagacctgcctgggggg

SEQ ID NO: 153562 - DNA, 17 bp, synthetic construct
  source 1..17: mol_type = other DNA
caagacctgcctggggg

SEQ ID NO: 153563 - DNA, 17 bp, synthetic construct
  source 1..17: mol_type = other DNA
acaagacctgcctgggg

SEQ ID NO: 153564 - DNA, 17 bp, synthetic construct
  source 1..17: mol_type = other DNA
cacaagacctgcctggg

SEQ ID NO: 153565 - DNA, 17 bp, synthetic construct
  source 1..17: mol_type = other DNA
acacaagacctgcctgg

SEQ ID NO: 153566 - DNA, 17 bp, synthetic construct
  source 1..17: mol_type = other DNA
cacacaagacctgcctg

SEQ ID NO: 153567 - DNA, 17 bp, synthetic construct
  source 1..17: mol_type = other DNA
gcacacaagacctgcct

SEQ ID NO: 153568 - DNA, 17 bp, synthetic construct
  source 1..17: mol_type = other DNA
ggcacacaagacctgcc

SEQ ID NO: 153569 - DNA, 17 bp, synthetic construct
  source 1..17: mol_type = other DNA
gggcacacaagacctgc

SEQ ID NO: 153570 - DNA, 17 bp, synthetic construct
  source 1..17: mol_type = other DNA
agggcacacaagacctg

SEQ ID NO: 153571 - DNA, 17 bp, synthetic construct
  source 1..17: mol_type = other DNA
cagggcacacaagacct

SEQ ID NO: 153572 - DNA, 17 bp, synthetic construct
  source 1..17: mol_type = other DNA
tcagggcacacaagacc

SEQ ID NO: 153573 - DNA, 17 bp, synthetic construct
  source 1..17: mol_type = other DNA
ttcagggcacacaagac

SEQ ID NO: 153574 - DNA, 17 bp, synthetic construct
  source 1..17: mol_type = other DNA
gttcagggcacacaaga

SEQ ID NO: 153575 - DNA, 17 bp, synthetic construct
  source 1..17: mol_type = other DNA
ggttcagggcacacaag

SEQ ID NO: 153576 - DNA, 17 bp, synthetic construct
  source 1..17: mol_type = other DNA
gggttcagggcacacaa

SEQ ID NO: 153577 - DNA, 17 bp, synthetic construct
  source 1..17: mol_type = other DNA
ggggttcagggcacaca

SEQ ID NO: 153578 - DNA, 17 bp, synthetic construct
  source 1..17: mol_type = other DNA
aggggttcagggcacac

SEQ ID NO: 153579 - DNA, 17 bp, synthetic construct
  source 1..17: mol_type = other DNA
gaggggttcagggcaca

SEQ ID NO: 153580 - DNA, 17 bp, synthetic construct
  source 1..17: mol_type = other DNA
tgaggggttcagggcac

SEQ ID NO: 153581 - DNA, 17 bp, synthetic construct
  source 1..17: mol_type = other DNA
ctgaggggttcagggca

SEQ ID NO: 153582 - DNA, 17 bp, synthetic construct
  source 1..17: mol_type = other DNA
cctgaggggttcagggc

SEQ ID NO: 153583 - DNA, 17 bp, synthetic construct
  source 1..17: mol_type = other DNA
ccctgaggggttcaggg

SEQ ID NO: 153584 - DNA, 17 bp, synthetic construct
  source 1..17: mol_type = other DNA
cccctgaggggttcagg

SEQ ID NO: 153585 - DNA, 17 bp, synthetic construct
  source 1..17: mol_type = other DNA
ccccctgaggggttcag

SEQ ID NO: 153586 - DNA, 17 bp, synthetic construct
  source 1..17: mol_type = other DNA
gccccctgaggggttca

SEQ ID NO: 153587 - DNA, 17 bp, synthetic construct
  source 1..17: mol_type = other DNA
agccccctgaggggttc

SEQ ID NO: 153588 - DNA, 17 bp, synthetic construct
  source 1..17: mol_type = other DNA
aagccccctgaggggtt

SEQ ID NO: 153589 - DNA, 17 bp, synthetic construct
  source 1..17: mol_type = other DNA
aaagccccctgaggggt

SEQ ID NO: 153590 - DNA, 17 bp, synthetic construct
  source 1..17: mol_type = other DNA
gaaagccccctgagggg

SEQ ID NO: 153591 - DNA, 17 bp, synthetic construct
  source 1..17: mol_type = other DNA
tgaaagccccctgaggg

SEQ ID NO: 153592 - DNA, 17 bp, synthetic construct
  source 1..17: mol_type = other DNA
ctgaaagccccctgagg

SEQ ID NO: 153593 - DNA, 17 bp, synthetic construct
  source 1..17: mol_type = other DNA
cctgaaagccccctgag

SEQ ID NO: 153594 - DNA, 17 bp, synthetic construct
  source 1..17: mol_type = other DNA
acctgaaagccccctga

SEQ ID NO: 153595 - DNA, 17 bp, synthetic construct
  source 1..17: mol_type = other DNA
gacctgaaagccccctg

SEQ ID NO: 153596 - DNA, 17 bp, synthetic construct
  source 1..17: mol_type = other DNA
ggacctgaaagccccct

SEQ ID NO: 153597 - DNA, 17 bp, synthetic construct
  source 1..17: mol_type = other DNA
gggacctgaaagccccc

SEQ ID NO: 153598 - DNA, 17 bp, synthetic construct
  source 1..17: mol_type = other DNA
agggacctgaaagcccc

SEQ ID NO: 153599 - DNA, 17 bp, synthetic construct
  source 1..17: mol_type = other DNA
cagggacctgaaagccc

SEQ ID NO: 153600 - DNA, 17 bp, synthetic construct
  source 1..17: mol_type = other DNA
gcagggacctgaaagcc

SEQ ID NO: 153601 - DNA, 17 bp, synthetic construct
  source 1..17: mol_type = other DNA
agcagggacctgaaagc

SEQ ID NO: 153602 - DNA, 17 bp, synthetic construct
  source 1..17: mol_type = other DNA
gagcagggacctgaaag

SEQ ID NO: 153603 - DNA, 17 bp, synthetic construct
  source 1..17: mol_type = other DNA
ggagcagggacctgaaa

SEQ ID NO: 153604 - DNA, 17 bp, synthetic construct
  source 1..17: mol_type = other DNA
gggagcagggacctgaa

SEQ ID NO: 153605 - DNA, 17 bp, synthetic construct
  source 1..17: mol_type = other DNA
tgggagcagggacctga

SEQ ID NO: 153606 - DNA, 17 bp, synthetic construct
  source 1..17: mol_type = other DNA
ttgggagcagggacctg

SEQ ID NO: 153607 - DNA, 17 bp, synthetic construct
  source 1..17: mol_type = other DNA
gttgggagcagggacct

SEQ ID NO: 153608 - DNA, 17 bp, synthetic construct
  source 1..17: mol_type = other DNA
ggttgggagcagggacc

SEQ ID NO: 153609 - DNA, 17 bp, synthetic construct
  source 1..17: mol_type = other DNA
gggttgggagcagggac

SEQ ID NO: 153610 - DNA, 17 bp, synthetic construct
  source 1..17: mol_type = other DNA
ggggttgggagcaggga

SEQ ID NO: 153611 - DNA, 17 bp, synthetic construct
  source 1..17: mol_type = other DNA
cggggttgggagcaggg

SEQ ID NO: 153612 - DNA, 17 bp, synthetic construct
  source 1..17: mol_type = other DNA
gcggggttgggagcagg

SEQ ID NO: 153613 - DNA, 17 bp, synthetic construct
  source 1..17: mol_type = other DNA
ggcggggttgggagcag

SEQ ID NO: 153614 - DNA, 17 bp, synthetic construct
  source 1..17: mol_type = other DNA
gggcggggttgggagca

SEQ ID NO: 153615 - DNA, 17 bp, synthetic construct
  source 1..17: mol_type = other DNA
ggggcggggttgggagc

SEQ ID NO: 153616 - DNA, 17 bp, synthetic construct
  source 1..17: mol_type = other DNA
gggggcggggttgggag

SEQ ID NO: 153617 - DNA, 17 bp, synthetic construct
  source 1..17: mol_type = other DNA
tgggggcggggttggga

SEQ ID NO: 153618 - DNA, 17 bp, synthetic construct
  source 1..17: mol_type = other DNA
ctgggggcggggttggg

SEQ ID NO: 153619 - DNA, 17 bp, synthetic construct
  source 1..17: mol_type = other DNA
gctgggggcggggttgg

SEQ ID NO: 153620 - DNA, 17 bp, synthetic construct
  source 1..17: mol_type = other DNA
ggctgggggcggggttg

SEQ ID NO: 153621 - DNA, 17 bp, synthetic construct
  source 1..17: mol_type = other DNA
aggctgggggcggggtt

SEQ ID NO: 153622 - DNA, 17 bp, synthetic construct
  source 1..17: mol_type = other DNA
gaggctgggggcggggt

SEQ ID NO: 153623 - DNA, 17 bp, synthetic construct
  source 1..17: mol_type = other DNA
tgaggctgggggcgggg

SEQ ID NO: 153624 - DNA, 17 bp, synthetic construct
  source 1..17: mol_type = other DNA
atgaggctgggggcggg

SEQ ID NO: 153625 - DNA, 17 bp, synthetic construct
  source 1..17: mol_type = other DNA
gatgaggctgggggcgg

SEQ ID NO: 153626 - DNA, 17 bp, synthetic construct
  source 1..17: mol_type = other DNA
tgatgaggctgggggcg

SEQ ID NO: 153627 - DNA, 17 bp, synthetic construct
  source 1..17: mol_type = other DNA
ctgatgaggctgggggc

SEQ ID NO: 153628 - DNA, 17 bp, synthetic construct
  source 1..17: mol_type = other DNA
cctgatgaggctggggg

SEQ ID NO: 153629 - DNA, 17 bp, synthetic construct
  source 1..17: mol_type = other DNA
gcctgatgaggctgggg

SEQ ID NO: 153630 - DNA, 17 bp, synthetic construct
  source 1..17: mol_type = other DNA
cgcctgatgaggctggg

SEQ ID NO: 153631 - DNA, 17 bp, synthetic construct
  source 1..17: mol_type = other DNA
acgcctgatgaggctgg

SEQ ID NO: 153632 - DNA, 17 bp, synthetic construct
  source 1..17: mol_type = other DNA
cacgcctgatgaggctg

SEQ ID NO: 153633 - DNA, 17 bp, synthetic construct
  source 1..17: mol_type = other DNA
ccacgcctgatgaggct

SEQ ID NO: 153634 - DNA, 17 bp, synthetic construct
  source 1..17: mol_type = other DNA
tccacgcctgatgaggc

SEQ ID NO: 153635 - DNA, 17 bp, synthetic construct
  source 1..17: mol_type = other DNA
ttccacgcctgatgagg

SEQ ID NO: 153636 - DNA, 17 bp, synthetic construct
  source 1..17: mol_type = other DNA
cttccacgcctgatgag

SEQ ID NO: 153637 - DNA, 17 bp, synthetic construct
  source 1..17: mol_type = other DNA
gcttccacgcctgatga

SEQ ID NO: 153638 - DNA, 17 bp, synthetic construct
  source 1..17: mol_type = other DNA
tgcttccacgcctgatg

SEQ ID NO: 153639 - DNA, 17 bp, synthetic construct
  source 1..17: mol_type = other DNA
ctgcttccacgcctgat

SEQ ID NO: 153640 - DNA, 17 bp, synthetic construct
  source 1..17: mol_type = other DNA
tctgcttccacgcctga

SEQ ID NO: 153641 - DNA, 17 bp, synthetic construct
  source 1..17: mol_type = other DNA
ctctgcttccacgcctg

SEQ ID NO: 153642 - DNA, 17 bp, synthetic construct
  source 1..17: mol_type = other DNA
gctctgcttccacgcct

SEQ ID NO: 153643 - DNA, 17 bp, synthetic construct
  source 1..17: mol_type = other DNA
ggctctgcttccacgcc

SEQ ID NO: 153644 - DNA, 17 bp, synthetic construct
  source 1..17: mol_type = other DNA
gggctctgcttccacgc

SEQ ID NO: 153645 - DNA, 17 bp, synthetic construct
  source 1..17: mol_type = other DNA
ggggctctgcttccacg

SEQ ID NO: 153646 - DNA, 17 bp, synthetic construct
  source 1..17: mol_type = other DNA
aggggctctgcttccac

SEQ ID NO: 153647 - DNA, 17 bp, synthetic construct
  source 1..17: mol_type = other DNA
gaggggctctgcttcca

SEQ ID NO: 153648 - DNA, 17 bp, synthetic construct
  source 1..17: mol_type = other DNA
tgaggggctctgcttcc

SEQ ID NO: 153649 - DNA, 17 bp, synthetic construct
  source 1..17: mol_type = other DNA
atgaggggctctgcttc

SEQ ID NO: 153650 - DNA, 17 bp, synthetic construct
  source 1..17: mol_type = other DNA
catgaggggctctgctt

SEQ ID NO: 153651 - DNA, 17 bp, synthetic construct
  source 1..17: mol_type = other DNA
gcatgaggggctctgct

SEQ ID NO: 153652 - DNA, 17 bp, synthetic construct
  source 1..17: mol_type = other DNA
ggcatgaggggctctgc

SEQ ID NO: 153653 - DNA, 17 bp, synthetic construct
  source 1..17: mol_type = other DNA
tggcatgaggggctctg

SEQ ID NO: 153654 - DNA, 17 bp, synthetic construct
  source 1..17: mol_type = other DNA
ctggcatgaggggctct

SEQ ID NO: 153655 - DNA, 17 bp, synthetic construct
  source 1..17: mol_type = other DNA
tctggcatgaggggctc

SEQ ID NO: 153656 - DNA, 17 bp, synthetic construct
  source 1..17: mol_type = other DNA
ttctggcatgaggggct

SEQ ID NO: 153657 - DNA, 17 bp, synthetic construct
  source 1..17: mol_type = other DNA
cttctggcatgaggggc

SEQ ID NO: 153658 - DNA, 17 bp, synthetic construct
  source 1..17: mol_type = other DNA
ccttctggcatgagggg

SEQ ID NO: 153659 - DNA, 17 bp, synthetic construct
  source 1..17: mol_type = other DNA
accttctggcatgaggg

SEQ ID NO: 153660 - DNA, 17 bp, synthetic construct
  source 1..17: mol_type = other DNA
gaccttctggcatgagg

SEQ ID NO: 153661 - DNA, 17 bp, synthetic construct
  source 1..17: mol_type = other DNA
ggaccttctggcatgag

SEQ ID NO: 153662 - DNA, 17 bp, synthetic construct
  source 1..17: mol_type = other DNA
gggaccttctggcatga

SEQ ID NO: 153663 - DNA, 17 bp, synthetic construct
  source 1..17: mol_type = other DNA
tgggaccttctggcatg

SEQ ID NO: 153664 - DNA, 17 bp, synthetic construct
  source 1..17: mol_type = other DNA
gtgggaccttctggcat

SEQ ID NO: 153665 - DNA, 17 bp, synthetic construct
  source 1..17: mol_type = other DNA
ggtgggaccttctggca

SEQ ID NO: 153666 - DNA, 17 bp, synthetic construct
  source 1..17: mol_type = other DNA
tggtgggaccttctggc

SEQ ID NO: 153667 - DNA, 17 bp, synthetic construct
  source 1..17: mol_type = other DNA
ctggtgggaccttctgg

SEQ ID NO: 153668 - DNA, 17 bp, synthetic construct
  source 1..17: mol_type = other DNA
tctggtgggaccttctg

SEQ ID NO: 153669 - DNA, 17 bp, synthetic construct
  source 1..17: mol_type = other DNA
ctctggtgggaccttct

SEQ ID NO: 153670 - DNA, 17 bp, synthetic construct
  source 1..17: mol_type = other DNA
cctctggtgggaccttc

SEQ ID NO: 153671 - DNA, 17 bp, synthetic construct
  source 1..17: mol_type = other DNA
ccctctggtgggacctt

SEQ ID NO: 153672 - DNA, 17 bp, synthetic construct
  source 1..17: mol_type = other DNA
gccctctggtgggacct

SEQ ID NO: 153673 - DNA, 17 bp, synthetic construct
  source 1..17: mol_type = other DNA
ggccctctggtgggacc

SEQ ID NO: 153674 - DNA, 17 bp, synthetic construct
  source 1..17: mol_type = other DNA
gggccctctggtgggac

SEQ ID NO: 153675 - DNA, 17 bp, synthetic construct
  source 1..17: mol_type = other DNA
tgggccctctggtggga

SEQ ID NO: 153676 - DNA, 17 bp, synthetic construct
  source 1..17: mol_type = other DNA
ctgggccctctggtggg

SEQ ID NO: 153677 - DNA, 17 bp, synthetic construct
  source 1..17: mol_type = other DNA
cctgggccctctggtgg

SEQ ID NO: 153678 - DNA, 17 bp, synthetic construct
  source 1..17: mol_type = other DNA
ccctgggccctctggtg

SEQ ID NO: 153679 - DNA, 17 bp, synthetic construct
  source 1..17: mol_type = other DNA
accctgggccctctggt

SEQ ID NO: 153680 - DNA, 17 bp, synthetic construct
  source 1..17: mol_type = other DNA
caccctgggccctctgg

SEQ ID NO: 153681 - DNA, 17 bp, synthetic construct
  source 1..17: mol_type = other DNA
ccaccctgggccctctg

SEQ ID NO: 153682 - DNA, 17 bp, synthetic construct
  source 1..17: mol_type = other DNA
cccaccctgggccctct

SEQ ID NO: 153683 - DNA, 17 bp, synthetic construct
  source 1..17: mol_type = other DNA
tcccaccctgggccctc

SEQ ID NO: 153684 - DNA, 17 bp, synthetic construct
  source 1..17: mol_type = other DNA
ttcccaccctgggccct

SEQ ID NO: 153685 - DNA, 17 bp, synthetic construct
  source 1..17: mol_type = other DNA
cttcccaccctgggccc

SEQ ID NO: 153686 - DNA, 17 bp, synthetic construct
  source 1..17: mol_type = other DNA
ccttcccaccctgggcc

SEQ ID NO: 153687 - DNA, 17 bp, synthetic construct
  source 1..17: mol_type = other DNA
cccttcccaccctgggc

SEQ ID NO: 153688 - DNA, 17 bp, synthetic construct
  source 1..17: mol_type = other DNA
gcccttcccaccctggg

SEQ ID NO: 153689 - DNA, 17 bp, synthetic construct
  source 1..17: mol_type = other DNA
tgcccttcccaccctgg

SEQ ID NO: 153690 - DNA, 17 bp, synthetic construct
  source 1..17: mol_type = other DNA
gtgcccttcccaccctg

SEQ ID NO: 153691 - DNA, 17 bp, synthetic construct
  source 1..17: mol_type = other DNA
agtgcccttcccaccct

SEQ ID NO: 153692 - DNA, 17 bp, synthetic construct
  source 1..17: mol_type = other DNA
cagtgcccttcccaccc

SEQ ID NO: 153693 - DNA, 17 bp, synthetic construct
  source 1..17: mol_type = other DNA
ccagtgcccttcccacc

SEQ ID NO: 153694 - DNA, 17 bp, synthetic construct
  source 1..17: mol_type = other DNA
gccagtgcccttcccac

SEQ ID NO: 153695 - DNA, 17 bp, synthetic construct
  source 1..17: mol_type = other DNA
agccagtgcccttccca

SEQ ID NO: 153696 - DNA, 17 bp, synthetic construct
  source 1..17: mol_type = other DNA
cagccagtgcccttccc

SEQ ID NO: 153697 - DNA, 17 bp, synthetic construct
  source 1..17: mol_type = other DNA
ccagccagtgcccttcc

SEQ ID NO: 153698 - DNA, 17 bp, synthetic construct
  source 1..17: mol_type = other DNA
cccagccagtgcccttc

SEQ ID NO: 153699 - DNA, 17 bp, synthetic construct
  source 1..17: mol_type = other DNA
tcccagccagtgccctt

SEQ ID NO: 153700 - DNA, 17 bp, synthetic construct
  source 1..17: mol_type = other DNA
ctcccagccagtgccct

SEQ ID NO: 153701 - DNA, 17 bp, synthetic construct
  source 1..17: mol_type = other DNA
cctcccagccagtgccc

SEQ ID NO: 153702 - DNA, 17 bp, synthetic construct
  source 1..17: mol_type = other DNA
ccctcccagccagtgcc

SEQ ID NO: 153703 - DNA, 17 bp, synthetic construct
  source 1..17: mol_type = other DNA
accctcccagccagtgc

SEQ ID NO: 153704 - DNA, 17 bp, synthetic construct
  source 1..17: mol_type = other DNA
caccctcccagccagtg

SEQ ID NO: 153705 - DNA, 17 bp, synthetic construct
  source 1..17: mol_type = other DNA
gcaccctcccagccagt

SEQ ID NO: 153706 - DNA, 17 bp, synthetic construct
  source 1..17: mol_type = other DNA
ggcaccctcccagccag

SEQ ID NO: 153707 - DNA, 17 bp, synthetic construct
  source 1..17: mol_type = other DNA
cggcaccctcccagcca

SEQ ID NO: 153708 - DNA, 17 bp, synthetic construct
  source 1..17: mol_type = other DNA
ccggcaccctcccagcc

SEQ ID NO: 153709 - DNA, 17 bp, synthetic construct
  source 1..17: mol_type = other DNA
tccggcaccctcccagc

SEQ ID NO: 153710 - DNA, 17 bp, synthetic construct
  source 1..17: mol_type = other DNA
ttccggcaccctcccag

SEQ ID NO: 153711 - DNA, 17 bp, synthetic construct
  source 1..17: mol_type = other DNA
cttccggcaccctccca

SEQ ID NO: 153712 - DNA, 17 bp, synthetic construct
  source 1..17: mol_type = other DNA
tcttccggcaccctccc

SEQ ID NO: 153713 - DNA, 17 bp, synthetic construct
  source 1..17: mol_type = other DNA
gtcttccggcaccctcc

SEQ ID NO: 153714 - DNA, 17 bp, synthetic construct
  source 1..17: mol_type = other DNA
ggtcttccggcaccctc

SEQ ID NO: 153715 - DNA, 17 bp, synthetic construct
  source 1..17: mol_type = other DNA
aggtcttccggcaccct

SEQ ID NO: 153716 - DNA, 17 bp, synthetic construct
  source 1..17: mol_type = other DNA
caggtcttccggcaccc

SEQ ID NO: 153717 - DNA, 17 bp, synthetic construct
  source 1..17: mol_type = other DNA
gcaggtcttccggcacc

SEQ ID NO: 153718 - DNA, 17 bp, synthetic construct
  source 1..17: mol_type = other DNA
ggcaggtcttccggcac

SEQ ID NO: 153719 - DNA, 17 bp, synthetic construct
  source 1..17: mol_type = other DNA
cggcaggtcttccggca

SEQ ID NO: 153720 - DNA, 17 bp, synthetic construct
  source 1..17: mol_type = other DNA
tcggcaggtcttccggc

SEQ ID NO: 153721 - DNA, 17 bp, synthetic construct
  source 1..17: mol_type = other DNA
atcggcaggtcttccgg

SEQ ID NO: 153722 - DNA, 17 bp, synthetic construct
  source 1..17: mol_type = other DNA
catcggcaggtcttccg

SEQ ID NO: 153723 - DNA, 17 bp, synthetic construct
  source 1..17: mol_type = other DNA
gcatcggcaggtcttcc

SEQ ID NO: 153724 - DNA, 17 bp, synthetic construct
  source 1..17: mol_type = other DNA
cgcatcggcaggtcttc

SEQ ID NO: 153725 - DNA, 17 bp, synthetic construct
  source 1..17: mol_type = other DNA
acgcatcggcaggtctt

SEQ ID NO: 153726 - DNA, 17 bp, synthetic construct
  source 1..17: mol_type = other DNA
cacgcatcggcaggtct

SEQ ID NO: 153727 - DNA, 17 bp, synthetic construct
  source 1..17: mol_type = other DNA
ccacgcatcggcaggtc

SEQ ID NO: 153728 - DNA, 17 bp, synthetic construct
  source 1..17: mol_type = other DNA
tccacgcatcggcaggt

SEQ ID NO: 153729 - DNA, 17 bp, synthetic construct
  source 1..17: mol_type = other DNA
ctccacgcatcggcagg

SEQ ID NO: 153730 - DNA, 17 bp, synthetic construct
  source 1..17: mol_type = other DNA
cctccacgcatcggcag

SEQ ID NO: 153731 - DNA, 17 bp, synthetic construct
  source 1..17: mol_type = other DNA
ccctccacgcatcggca

SEQ ID NO: 153732 - DNA, 17 bp, synthetic construct
  source 1..17: mol_type = other DNA
tccctccacgcatcggc

SEQ ID NO: 153733 - DNA, 17 bp, synthetic construct
  source 1..17: mol_type = other DNA
ctccctccacgcatcgg

SEQ ID NO: 153734 - DNA, 17 bp, synthetic construct
  source 1..17: mol_type = other DNA
cctccctccacgcatcg

SEQ ID NO: 153735 - DNA, 17 bp, synthetic construct
  source 1..17: mol_type = other DNA
acctccctccacgcatc

SEQ ID NO: 153736 - DNA, 17 bp, synthetic construct
  source 1..17: mol_type = other DNA
tacctccctccacgcat

SEQ ID NO: 153737 - DNA, 17 bp, synthetic construct
  source 1..17: mol_type = other DNA
ctacctccctccacgca

SEQ ID NO: 153738 - DNA, 17 bp, synthetic construct
  source 1..17: mol_type = other DNA
tctacctccctccacgc

SEQ ID NO: 153739 - DNA, 17 bp, synthetic construct
  source 1..17: mol_type = other DNA
ctctacctccctccacg

SEQ ID NO: 153740 - DNA, 17 bp, synthetic construct
  source 1..17: mol_type = other DNA
gctctacctccctccac

SEQ ID NO: 153741 - DNA, 17 bp, synthetic construct
  source 1..17: mol_type = other DNA
tgctctacctccctcca

SEQ ID NO: 153742 - DNA, 17 bp, synthetic construct
  source 1..17: mol_type = other DNA
ctgctctacctccctcc

SEQ ID NO: 153743 - DNA, 17 bp, synthetic construct
  source 1..17: mol_type = other DNA
actgctctacctccctc

SEQ ID NO: 153744 - DNA, 17 bp, synthetic construct
  source 1..17: mol_type = other DNA
cactgctctacctccct

SEQ ID NO: 153745 - DNA, 17 bp, synthetic construct
  source 1..17: mol_type = other DNA
gcactgctctacctccc

SEQ ID NO: 153746 - DNA, 17 bp, synthetic construct
  source 1..17: mol_type = other DNA
ggcactgctctacctcc

SEQ ID NO: 153747 - DNA, 17 bp, synthetic construct
  source 1..17: mol_type = other DNA
tggcactgctctacctc

SEQ ID NO: 153748 - DNA, 17 bp, synthetic construct
  source 1..17: mol_type = other DNA
atggcactgctctacct

SEQ ID NO: 153749 - DNA, 17 bp, synthetic construct
  source 1..17: mol_type = other DNA
catggcactgctctacc

SEQ ID NO: 153750 - DNA, 17 bp, synthetic construct
  source 1..17: mol_type = other DNA
tcatggcactgctctac

SEQ ID NO: 153751 - DNA, 17 bp, synthetic construct
  source 1..17: mol_type = other DNA
ctcatggcactgctcta

SEQ ID NO: 153752 - DNA, 17 bp, synthetic construct
  source 1..17: mol_type = other DNA
gctcatggcactgctct

SEQ ID NO: 153753 - DNA, 17 bp, synthetic construct
  source 1..17: mol_type = other DNA
ggctcatggcactgctc

SEQ ID NO: 153754 - DNA, 17 bp, synthetic construct
  source 1..17: mol_type = other DNA
tggctcatggcactgct

SEQ ID NO: 153755 - DNA, 17 bp, synthetic construct
  source 1..17: mol_type = other DNA
ctggctcatggcactgc

SEQ ID NO: 153756 - DNA, 17 bp, synthetic construct
  source 1..17: mol_type = other DNA
gctggctcatggcactg

SEQ ID NO: 153757 - DNA, 17 bp, synthetic construct
  source 1..17: mol_type = other DNA
agctggctcatggcact

SEQ ID NO: 153758 - DNA, 17 bp, synthetic construct
  source 1..17: mol_type = other DNA
cagctggctcatggcac

SEQ ID NO: 153759 - DNA, 17 bp, synthetic construct
  source 1..17: mol_type = other DNA
ccagctggctcatggca

SEQ ID NO: 153760 - DNA, 17 bp, synthetic construct
  source 1..17: mol_type = other DNA
cccagctggctcatggc

SEQ ID NO: 153761 - DNA, 17 bp, synthetic construct
  source 1..17: mol_type = other DNA
gcccagctggctcatgg

SEQ ID NO: 153762 - DNA, 17 bp, synthetic construct
  source 1..17: mol_type = other DNA
tgcccagctggctcatg

SEQ ID NO: 153763 - DNA, 17 bp, synthetic construct
  source 1..17: mol_type = other DNA
atgcccagctggctcat

SEQ ID NO: 153764 - DNA, 17 bp, synthetic construct
  source 1..17: mol_type = other DNA
catgcccagctggctca

SEQ ID NO: 153765 - DNA, 17 bp, synthetic construct
  source 1..17: mol_type = other DNA
ccatgcccagctggctc

SEQ ID NO: 153766 - DNA, 17 bp, synthetic construct
  source 1..17: mol_type = other DNA
accatgcccagctggct

SEQ ID NO: 153767 - DNA, 17 bp, synthetic construct
  source 1..17: mol_type = other DNA
caccatgcccagctggc

SEQ ID NO: 153768 - DNA, 17 bp, synthetic construct
  source 1..17: mol_type = other DNA
ccaccatgcccagctgg

SEQ ID NO: 153769 - DNA, 17 bp, synthetic construct
  source 1..17: mol_type = other DNA
cccaccatgcccagctg

SEQ ID NO: 153770 - DNA, 17 bp, synthetic construct
  source 1..17: mol_type = other DNA
ccccaccatgcccagct

SEQ ID NO: 153771 - DNA, 17 bp, synthetic construct
  source 1..17: mol_type = other DNA
tccccaccatgcccagc

SEQ ID NO: 153772 - DNA, 17 bp, synthetic construct
  source 1..17: mol_type = other DNA
ttccccaccatgcccag

SEQ ID NO: 153773 - DNA, 17 bp, synthetic construct
  source 1..17: mol_type = other DNA
tttccccaccatgccca

SEQ ID NO: 153774 - DNA, 17 bp, synthetic construct
  source 1..17: mol_type = other DNA
gtttccccaccatgccc

SEQ ID NO: 153775 - DNA, 17 bp, synthetic construct
  source 1..17: mol_type = other DNA
agtttccccaccatgcc

SEQ ID NO: 153776 - DNA, 17 bp, synthetic construct
  source 1..17: mol_type = other DNA
cagtttccccaccatgc

SEQ ID NO: 153777 - DNA, 17 bp, synthetic construct
  source 1..17: mol_type = other DNA
tcagtttccccaccatg

SEQ ID NO: 153778 - DNA, 17 bp, synthetic construct
  source 1..17: mol_type = other DNA
ctcagtttccccaccat

SEQ ID NO: 153779 - DNA, 17 bp, synthetic construct
  source 1..17: mol_type = other DNA
cctcagtttccccacca

SEQ ID NO: 153780 - DNA, 17 bp, synthetic construct
  source 1..17: mol_type = other DNA
gcctcagtttccccacc

SEQ ID NO: 153781 - DNA, 17 bp, synthetic construct
  source 1..17: mol_type = other DNA
ggcctcagtttccccac

SEQ ID NO: 153782 - DNA, 17 bp, synthetic construct
  source 1..17: mol_type = other DNA
gggcctcagtttcccca

SEQ ID NO: 153783 - DNA, 17 bp, synthetic construct
  source 1..17: mol_type = other DNA
tgggcctcagtttcccc

SEQ ID NO: 153784 - DNA, 17 bp, synthetic construct
  source 1..17: mol_type = other DNA
ctgggcctcagtttccc

SEQ ID NO: 153785 - DNA, 17 bp, synthetic construct
  source 1..17: mol_type = other DNA
tctgggcctcagtttcc

SEQ ID NO: 153786 - DNA, 17 bp, synthetic construct
  source 1..17: mol_type = other DNA
ctctgggcctcagtttc

SEQ ID NO: 153787 - DNA, 17 bp, synthetic construct
  source 1..17: mol_type = other DNA
cctctgggcctcagttt

SEQ ID NO: 153788 - DNA, 17 bp, synthetic construct
  source 1..17: mol_type = other DNA
acctctgggcctcagtt

SEQ ID NO: 153789 - DNA, 17 bp, synthetic construct
  source 1..17: mol_type = other DNA
cacctctgggcctcagt

SEQ ID NO: 153790 - DNA, 17 bp, synthetic construct
  source 1..17: mol_type = other DNA
gcacctctgggcctcag

SEQ ID NO: 153791 - DNA, 17 bp, synthetic construct
  source 1..17: mol_type = other DNA
agcacctctgggcctca

SEQ ID NO: 153792 - DNA, 17 bp, synthetic construct
  source 1..17: mol_type = other DNA
aagcacctctgggcctc

SEQ ID NO: 153793 - DNA, 17 bp, synthetic construct
  source 1..17: mol_type = other DNA
caagcacctctgggcct

SEQ ID NO: 153794 - DNA, 17 bp, synthetic construct
  source 1..17: mol_type = other DNA
ccaagcacctctgggcc

SEQ ID NO: 153795 - DNA, 17 bp, synthetic construct
  source 1..17: mol_type = other DNA
accaagcacctctgggc

SEQ ID NO: 153796 - DNA, 17 bp, synthetic construct
  source 1..17: mol_type = other DNA
caccaagcacctctggg

SEQ ID NO: 153797 - DNA, 17 bp, synthetic construct
  source 1..17: mol_type = other DNA
acaccaagcacctctgg

SEQ ID NO: 153798 - DNA, 17 bp, synthetic construct
  source 1..17: mol_type = other DNA
aacaccaagcacctctg

SEQ ID NO: 153799 - DNA, 17 bp, synthetic construct
  source 1..17: mol_type = other DNA
gaacaccaagcacctct

SEQ ID NO: 153800 - DNA, 17 bp, synthetic construct
  source 1..17: mol_type = other DNA
tgaacaccaagcacctc

SEQ ID NO: 153801 - DNA, 17 bp, synthetic construct
  source 1..17: mol_type = other DNA
atgaacaccaagcacct

SEQ ID NO: 153802 - DNA, 17 bp, synthetic construct
  source 1..17: mol_type = other DNA
gatgaacaccaagcacc

SEQ ID NO: 153803 - DNA, 17 bp, synthetic construct
  source 1..17: mol_type = other DNA
ggatgaacaccaagcac

SEQ ID NO: 153804 - DNA, 17 bp, synthetic construct
  source 1..17: mol_type = other DNA
tggatgaacaccaagca

SEQ ID NO: 153805 - DNA, 17 bp, synthetic construct
  source 1..17: mol_type = other DNA
ttggatgaacaccaagc

SEQ ID NO: 153806 - DNA, 17 bp, synthetic construct
  source 1..17: mol_type = other DNA
cttggatgaacaccaag

SEQ ID NO: 153807 - DNA, 17 bp, synthetic construct
  source 1..17: mol_type = other DNA
gcttggatgaacaccaa

SEQ ID NO: 153808 - DNA, 17 bp, synthetic construct
  source 1..17: mol_type = other DNA
cgcttggatgaacacca

SEQ ID NO: 153809 - DNA, 17 bp, synthetic construct
  source 1..17: mol_type = other DNA
tcgcttggatgaacacc

SEQ ID NO: 153810 - DNA, 17 bp, synthetic construct
  source 1..17: mol_type = other DNA
ctcgcttggatgaacac

SEQ ID NO: 153811 - DNA, 17 bp, synthetic construct
  source 1..17: mol_type = other DNA
actcgcttggatgaaca

SEQ ID NO: 153812 - DNA, 17 bp, synthetic construct
  source 1..17: mol_type = other DNA
cactcgcttggatgaac

SEQ ID NO: 153813 - DNA, 17 bp, synthetic construct
  source 1..17: mol_type = other DNA
gcactcgcttggatgaa

SEQ ID NO: 153814 - DNA, 17 bp, synthetic construct
  source 1..17: mol_type = other DNA
tgcactcgcttggatga

SEQ ID NO: 153815 - DNA, 17 bp, synthetic construct
  source 1..17: mol_type = other DNA
ctgcactcgcttggatg

SEQ ID NO: 153816 - DNA, 17 bp, synthetic construct
  source 1..17: mol_type = other DNA
gctgcactcgcttggat

SEQ ID NO: 153817 - DNA, 17 bp, synthetic construct
  source 1..17: mol_type = other DNA
agctgcactcgcttgga

SEQ ID NO: 153818 - DNA, 17 bp, synthetic construct
  source 1..17: mol_type = other DNA
gagctgcactcgcttgg

SEQ ID NO: 153819 - DNA, 17 bp, synthetic construct
  source 1..17: mol_type = other DNA
tgagctgcactcgcttg

SEQ ID NO: 153820 - DNA, 17 bp, synthetic construct
  source 1..17: mol_type = other DNA
ctgagctgcactcgctt

SEQ ID NO: 153821 - DNA, 17 bp, synthetic construct
  source 1..17: mol_type = other DNA
cctgagctgcactcgct

SEQ ID NO: 153822 - DNA, 17 bp, synthetic construct
  source 1..17: mol_type = other DNA
ccctgagctgcactcgc

SEQ ID NO: 153823 - DNA, 17 bp, synthetic construct
  source 1..17: mol_type = other DNA
gccctgagctgcactcg

SEQ ID NO: 153824 - DNA, 17 bp, synthetic construct
  source 1..17: mol_type = other DNA
cgccctgagctgcactc

SEQ ID NO: 153825 - DNA, 17 bp, synthetic construct
  source 1..17: mol_type = other DNA
ccgccctgagctgcact

SEQ ID NO: 153826 - DNA, 17 bp, synthetic construct
  source 1..17: mol_type = other DNA
cccgccctgagctgcac

SEQ ID NO: 153827 - DNA, 17 bp, synthetic construct
  source 1..17: mol_type = other DNA
ccccgccctgagctgca

SEQ ID NO: 153828 - DNA, 17 bp, synthetic construct
  source 1..17: mol_type = other DNA
cccccgccctgagctgc

SEQ ID NO: 153829 - DNA, 17 bp, synthetic construct
  source 1..17: mol_type = other DNA
gcccccgccctgagctg

SEQ ID NO: 153830 - DNA, 17 bp, synthetic construct
  source 1..17: mol_type = other DNA
cgcccccgccctgagct

SEQ ID NO: 153831 - DNA, 17 bp, synthetic construct
  source 1..17: mol_type = other DNA
ccgcccccgccctgagc

SEQ ID NO: 153832 - DNA, 17 bp, synthetic construct
  source 1..17: mol_type = other DNA
accgcccccgccctgag

SEQ ID NO: 153833 - DNA, 17 bp, synthetic construct
  source 1..17: mol_type = other DNA
caccgcccccgccctga

SEQ ID NO: 153834 - DNA, 17 bp, synthetic construct
  source 1..17: mol_type = other DNA
acaccgcccccgccctg

SEQ ID NO: 153835 - DNA, 17 bp, synthetic construct
  source 1..17: mol_type = other DNA
gacaccgcccccgccct

SEQ ID NO: 153836 - DNA, 17 bp, synthetic construct
  source 1..17: mol_type = other DNA
ggacaccgcccccgccc

SEQ ID NO: 153837 - DNA, 17 bp, synthetic construct
  source 1..17: mol_type = other DNA
aggacaccgcccccgcc

SEQ ID NO: 153838 - DNA, 17 bp, synthetic construct
  source 1..17: mol_type = other DNA
caggacaccgcccccgc

SEQ ID NO: 153839 - DNA, 17 bp, synthetic construct
  source 1..17: mol_type = other DNA
ccaggacaccgcccccg

SEQ ID NO: 153840 - DNA, 17 bp, synthetic construct
  source 1..17: mol_type = other DNA
tccaggacaccgccccc

SEQ ID NO: 153841 - DNA, 17 bp, synthetic construct
  source 1..17: mol_type = other DNA
ctccaggacaccgcccc

SEQ ID NO: 153842 - DNA, 17 bp, synthetic construct
  source 1..17: mol_type = other DNA
gctccaggacaccgccc

SEQ ID NO: 153843 - DNA, 17 bp, synthetic construct
  source 1..17: mol_type = other DNA
tgctccaggacaccgcc

SEQ ID NO: 153844 - DNA, 17 bp, synthetic construct
  source 1..17: mol_type = other DNA
ctgctccaggacaccgc

SEQ ID NO: 153845 - DNA, 17 bp, synthetic construct
  source 1..17: mol_type = other DNA
cctgctccaggacaccg

SEQ ID NO: 153846 - DNA, 17 bp, synthetic construct
  source 1..17: mol_type = other DNA
tcctgctccaggacacc

SEQ ID NO: 153847 - DNA, 17 bp, synthetic construct
  source 1..17: mol_type = other DNA
ttcctgctccaggacac

SEQ ID NO: 153848 - DNA, 17 bp, synthetic construct
  source 1..17: mol_type = other DNA
attcctgctccaggaca

SEQ ID NO: 153849 - DNA, 17 bp, synthetic construct
  source 1..17: mol_type = other DNA
aattcctgctccaggac

SEQ ID NO: 153850 - DNA, 17 bp, synthetic construct
  source 1..17: mol_type = other DNA
gaattcctgctccagga

SEQ ID NO: 153851 - DNA, 17 bp, synthetic construct
  source 1..17: mol_type = other DNA
ggaattcctgctccagg

SEQ ID NO: 153852 - DNA, 17 bp, synthetic construct
  source 1..17: mol_type = other DNA
aggaattcctgctccag

SEQ ID NO: 153853 - DNA, 17 bp, synthetic construct
  source 1..17: mol_type = other DNA
gaggaattcctgctcca

SEQ ID NO: 153854 - DNA, 17 bp, synthetic construct
  source 1..17: mol_type = other DNA
ggaggaattcctgctcc

SEQ ID NO: 153855 - DNA, 17 bp, synthetic construct
  source 1..17: mol_type = other DNA
gggaggaattcctgctc

SEQ ID NO: 153856 - DNA, 17 bp, synthetic construct
  source 1..17: mol_type = other DNA
ggggaggaattcctgct

SEQ ID NO: 153857 - DNA, 17 bp, synthetic construct
  source 1..17: mol_type = other DNA
tggggaggaattcctgc

SEQ ID NO: 153858 - DNA, 17 bp, synthetic construct
  source 1..17: mol_type = other DNA
ttggggaggaattcctg

SEQ ID NO: 153859 - DNA, 17 bp, synthetic construct
  source 1..17: mol_type = other DNA
cttggggaggaattcct

SEQ ID NO: 153860 - DNA, 17 bp, synthetic construct
  source 1..17: mol_type = other DNA
ccttggggaggaattcc

SEQ ID NO: 153861 - DNA, 17 bp, synthetic construct
  source 1..17: mol_type = other DNA
cccttggggaggaattc

SEQ ID NO: 153862 - DNA, 17 bp, synthetic construct
  source 1..17: mol_type = other DNA
tcccttggggaggaatt

SEQ ID NO: 153863 - DNA, 17 bp, synthetic construct
  source 1..17: mol_type = other DNA
ctcccttggggaggaat

SEQ ID NO: 153864 - DNA, 17 bp, synthetic construct
  source 1..17: mol_type = other DNA
cctcccttggggaggaa

SEQ ID NO: 153865 - DNA, 17 bp, synthetic construct
  source 1..17: mol_type = other DNA
gcctcccttggggagga

SEQ ID NO: 153866 - DNA, 17 bp, synthetic construct
  source 1..17: mol_type = other DNA
tgcctcccttggggagg

SEQ ID NO: 153867 - DNA, 17 bp, synthetic construct
  source 1..17: mol_type = other DNA
ctgcctcccttggggag

SEQ ID NO: 153868 - DNA, 17 bp, synthetic construct
  source 1..17: mol_type = other DNA
gctgcctcccttgggga

SEQ ID NO: 153869 - DNA, 17 bp, synthetic construct
  source 1..17: mol_type = other DNA
agctgcctcccttgggg

SEQ ID NO: 153870 - DNA, 17 bp, synthetic construct
  source 1..17: mol_type = other DNA
aagctgcctcccttggg

SEQ ID NO: 153871 - DNA, 17 bp, synthetic construct
  source 1..17: mol_type = other DNA
caagctgcctcccttgg

SEQ ID NO: 153872 - DNA, 17 bp, synthetic construct
  source 1..17: mol_type = other DNA
acaagctgcctcccttg

SEQ ID NO: 153873 - DNA, 17 bp, synthetic construct
  source 1..17: mol_type = other DNA
gacaagctgcctccctt

SEQ ID NO: 153874 - DNA, 17 bp, synthetic construct
  source 1..17: mol_type = other DNA
ggacaagctgcctccct

SEQ ID NO: 153875 - DNA, 17 bp, synthetic construct
  source 1..17: mol_type = other DNA
gggacaagctgcctccc

SEQ ID NO: 153876 - DNA, 17 bp, synthetic construct
  source 1..17: mol_type = other DNA
ggggacaagctgcctcc

SEQ ID NO: 153877 - DNA, 17 bp, synthetic construct
  source 1..17: mol_type = other DNA
tggggacaagctgcctc

SEQ ID NO: 153878 - DNA, 17 bp, synthetic construct
  source 1..17: mol_type = other DNA
ttggggacaagctgcct

SEQ ID NO: 153879 - DNA, 17 bp, synthetic construct
  source 1..17: mol_type = other DNA
cttggggacaagctgcc

SEQ ID NO: 153880 - DNA, 17 bp, synthetic construct
  source 1..17: mol_type = other DNA
ccttggggacaagctgc

SEQ ID NO: 153881 - DNA, 17 bp, synthetic construct
  source 1..17: mol_type = other DNA
gccttggggacaagctg

SEQ ID NO: 153882 - DNA, 17 bp, synthetic construct
  source 1..17: mol_type = other DNA
ggccttggggacaagct

SEQ ID NO: 153883 - DNA, 17 bp, synthetic construct
  source 1..17: mol_type = other DNA
cggccttggggacaagc

SEQ ID NO: 153884 - DNA, 17 bp, synthetic construct
  source 1..17: mol_type = other DNA
ccggccttggggacaag

SEQ ID NO: 153885 - DNA, 17 bp, synthetic construct
  source 1..17: mol_type = other DNA
accggccttggggacaa

SEQ ID NO: 153886 - DNA, 17 bp, synthetic construct
  source 1..17: mol_type = other DNA
caccggccttggggaca

SEQ ID NO: 153887 - DNA, 17 bp, synthetic construct
  source 1..17: mol_type = other DNA
acaccggccttggggac

SEQ ID NO: 153888 - DNA, 17 bp, synthetic construct
  source 1..17: mol_type = other DNA
gacaccggccttgggga

SEQ ID NO: 153889 - DNA, 17 bp, synthetic construct
  source 1..17: mol_type = other DNA
agacaccggccttgggg

SEQ ID NO: 153890 - DNA, 17 bp, synthetic construct
  source 1..17: mol_type = other DNA
aagacaccggccttggg

SEQ ID NO: 153891 - DNA, 17 bp, synthetic construct
  source 1..17: mol_type = other DNA
gaagacaccggccttgg

SEQ ID NO: 153892 - DNA, 17 bp, synthetic construct
  source 1..17: mol_type = other DNA
agaagacaccggccttg

SEQ ID NO: 153893 - DNA, 17 bp, synthetic construct
  source 1..17: mol_type = other DNA
cagaagacaccggcctt

SEQ ID NO: 153894 - DNA, 17 bp, synthetic construct
  source 1..17: mol_type = other DNA
tcagaagacaccggcct

SEQ ID NO: 153895 - DNA, 17 bp, synthetic construct
  source 1..17: mol_type = other DNA
gtcagaagacaccggcc

SEQ ID NO: 153896 - DNA, 17 bp, synthetic construct
  source 1..17: mol_type = other DNA
ggtcagaagacaccggc

SEQ ID NO: 153897 - DNA, 17 bp, synthetic construct
  source 1..17: mol_type = other DNA
aggtcagaagacaccgg

SEQ ID NO: 153898 - DNA, 17 bp, synthetic construct
  source 1..17: mol_type = other DNA
aaggtcagaagacaccg

SEQ ID NO: 153899 - DNA, 17 bp, synthetic construct
  source 1..17: mol_type = other DNA
caaggtcagaagacacc

SEQ ID NO: 153900 - DNA, 17 bp, synthetic construct
  source 1..17: mol_type = other DNA
ccaaggtcagaagacac

SEQ ID NO: 153901 - DNA, 17 bp, synthetic construct
  source 1..17: mol_type = other DNA
accaaggtcagaagaca

SEQ ID NO: 153902 - DNA, 17 bp, synthetic construct
  source 1..17: mol_type = other DNA
caccaaggtcagaagac

SEQ ID NO: 153903 - DNA, 17 bp, synthetic construct
  source 1..17: mol_type = other DNA
acaccaaggtcagaaga

SEQ ID NO: 153904 - DNA, 17 bp, synthetic construct
  source 1..17: mol_type = other DNA
gacaccaaggtcagaag

SEQ ID NO: 153905 - DNA, 17 bp, synthetic construct
  source 1..17: mol_type = other DNA
ggacaccaaggtcagaa

SEQ ID NO: 153906 - DNA, 17 bp, synthetic construct
  source 1..17: mol_type = other DNA
gggacaccaaggtcaga

SEQ ID NO: 153907 - DNA, 17 bp, synthetic construct
  source 1..17: mol_type = other DNA
ggggacaccaaggtcag

SEQ ID NO: 153908 - DNA, 17 bp, synthetic construct
  source 1..17: mol_type = other DNA
gggggacaccaaggtca

SEQ ID NO: 153909 - DNA, 17 bp, synthetic construct
  source 1..17: mol_type = other DNA
cgggggacaccaaggtc

SEQ ID NO: 153910 - DNA, 17 bp, synthetic construct
  source 1..17: mol_type = other DNA
acgggggacaccaaggt

SEQ ID NO: 153911 - DNA, 17 bp, synthetic construct
  source 1..17: mol_type = other DNA
cacgggggacaccaagg

SEQ ID NO: 153912 - DNA, 17 bp, synthetic construct
  source 1..17: mol_type = other DNA
gcacgggggacaccaag

SEQ ID NO: 153913 - DNA, 17 bp, synthetic construct
  source 1..17: mol_type = other DNA
tgcacgggggacaccaa

SEQ ID NO: 153914 - DNA, 17 bp, synthetic construct
  source 1..17: mol_type = other DNA
atgcacgggggacacca

SEQ ID NO: 153915 - DNA, 17 bp, synthetic construct
  source 1..17: mol_type = other DNA
catgcacgggggacacc

SEQ ID NO: 153916 - DNA, 17 bp, synthetic construct
  source 1..17: mol_type = other DNA
ccatgcacgggggacac

SEQ ID NO: 153917 - DNA, 17 bp, synthetic construct
  source 1..17: mol_type = other DNA
cccatgcacgggggaca

SEQ ID NO: 153918 - DNA, 17 bp, synthetic construct
  source 1..17: mol_type = other DNA
gcccatgcacgggggac

SEQ ID NO: 153919 - DNA, 17 bp, synthetic construct
  source 1..17: mol_type = other DNA
ggcccatgcacggggga

SEQ ID NO: 153920 - DNA, 17 bp, synthetic construct
  source 1..17: mol_type = other DNA
cggcccatgcacggggg

SEQ ID NO: 153921 - DNA, 17 bp, synthetic construct
  source 1..17: mol_type = other DNA
ccggcccatgcacgggg

SEQ ID NO: 153922 - DNA, 17 bp, synthetic construct
  source 1..17: mol_type = other DNA
gccggcccatgcacggg

SEQ ID NO: 153923 - DNA, 17 bp, synthetic construct
  source 1..17: mol_type = other DNA
ggccggcccatgcacgg

SEQ ID NO: 153924 - DNA, 17 bp, synthetic construct
  source 1..17: mol_type = other DNA
gggccggcccatgcacg

SEQ ID NO: 153925 - DNA, 17 bp, synthetic construct
  source 1..17: mol_type = other DNA
agggccggcccatgcac

SEQ ID NO: 153926 - DNA, 17 bp, synthetic construct
  source 1..17: mol_type = other DNA
cagggccggcccatgca

SEQ ID NO: 153927 - DNA, 17 bp, synthetic construct
  source 1..17: mol_type = other DNA
gcagggccggcccatgc

SEQ ID NO: 153928 - DNA, 17 bp, synthetic construct
  source 1..17: mol_type = other DNA
ggcagggccggcccatg

SEQ ID NO: 153929 - DNA, 17 bp, synthetic construct
  source 1..17: mol_type = other DNA
aggcagggccggcccat

SEQ ID NO: 153930 - DNA, 17 bp, synthetic construct
  source 1..17: mol_type = other DNA
gaggcagggccggccca

SEQ ID NO: 153931 - DNA, 17 bp, synthetic construct
  source 1..17: mol_type = other DNA
tgaggcagggccggccc

SEQ ID NO: 153932 - DNA, 17 bp, synthetic construct
  source 1..17: mol_type = other DNA
gtgaggcagggccggcc

SEQ ID NO: 153933 - DNA, 17 bp, synthetic construct
  source 1..17: mol_type = other DNA
cgtgaggcagggccggc

SEQ ID NO: 153934 - DNA, 17 bp, synthetic construct
  source 1..17: mol_type = other DNA
gcgtgaggcagggccgg

SEQ ID NO: 153935 - DNA, 17 bp, synthetic construct
  source 1..17: mol_type = other DNA
ggcgtgaggcagggccg

SEQ ID NO: 153936 - DNA, 17 bp, synthetic construct
  source 1..17: mol_type = other DNA
cggcgtgaggcagggcc

SEQ ID NO: 153937 - DNA, 17 bp, synthetic construct
  source 1..17: mol_type = other DNA
gcggcgtgaggcagggc

SEQ ID NO: 153938 - DNA, 17 bp, synthetic construct
  source 1..17: mol_type = other DNA
cgcggcgtgaggcaggg

SEQ ID NO: 153939 - DNA, 17 bp, synthetic construct
  source 1..17: mol_type = other DNA
gcgcggcgtgaggcagg

SEQ ID NO: 153940 - DNA, 17 bp, synthetic construct
  source 1..17: mol_type = other DNA
ggcgcggcgtgaggcag

SEQ ID NO: 153941 - DNA, 17 bp, synthetic construct
  source 1..17: mol_type = other DNA
gggcgcggcgtgaggca

SEQ ID NO: 153942 - DNA, 17 bp, synthetic construct
  source 1..17: mol_type = other DNA
ggggcgcggcgtgaggc

SEQ ID NO: 153943 - DNA, 17 bp, synthetic construct
  source 1..17: mol_type = other DNA
tggggcgcggcgtgagg

SEQ ID NO: 153944 - DNA, 17 bp, synthetic construct
  source 1..17: mol_type = other DNA
gtggggcgcggcgtgag

SEQ ID NO: 153945 - DNA, 17 bp, synthetic construct
  source 1..17: mol_type = other DNA
tgtggggcgcggcgtga

SEQ ID NO: 153946 - DNA, 17 bp, synthetic construct
  source 1..17: mol_type = other DNA
ctgtggggcgcggcgtg

SEQ ID NO: 153947 - DNA, 17 bp, synthetic construct
  source 1..17: mol_type = other DNA
cctgtggggcgcggcgt

SEQ ID NO: 153948 - DNA, 17 bp, synthetic construct
  source 1..17: mol_type = other DNA
gcctgtggggcgcggcg

SEQ ID NO: 153949 - DNA, 17 bp, synthetic construct
  source 1..17: mol_type = other DNA
tgcctgtggggcgcggc

SEQ ID NO: 153950 - DNA, 17 bp, synthetic construct
  source 1..17: mol_type = other DNA
gtgcctgtggggcgcgg

SEQ ID NO: 153951 - DNA, 17 bp, synthetic construct
  source 1..17: mol_type = other DNA
cgtgcctgtggggcgcg

SEQ ID NO: 153952 - DNA, 17 bp, synthetic construct
  source 1..17: mol_type = other DNA
ccgtgcctgtggggcgc

SEQ ID NO: 153953 - DNA, 17 bp, synthetic construct
  source 1..17: mol_type = other DNA
accgtgcctgtggggcg

SEQ ID NO: 153954 - DNA, 17 bp, synthetic construct
  source 1..17: mol_type = other DNA
caccgtgcctgtggggc

SEQ ID NO: 153955 - DNA, 17 bp, synthetic construct
  source 1..17: mol_type = other DNA
gcaccgtgcctgtgggg

SEQ ID NO: 153956 - DNA, 17 bp, synthetic construct
  source 1..17: mol_type = other DNA
agcaccgtgcctgtggg

SEQ ID NO: 153957 - DNA, 17 bp, synthetic construct
  source 1..17: mol_type = other DNA
cagcaccgtgcctgtgg

SEQ ID NO: 153958 - DNA, 17 bp, synthetic construct
  source 1..17: mol_type = other DNA
ccagcaccgtgcctgtg

SEQ ID NO: 153959 - DNA, 17 bp, synthetic construct
  source 1..17: mol_type = other DNA
tccagcaccgtgcctgt

SEQ ID NO: 153960 - DNA, 17 bp, synthetic construct
  source 1..17: mol_type = other DNA
atccagcaccgtgcctg

SEQ ID NO: 153961 - DNA, 17 bp, synthetic construct
  source 1..17: mol_type = other DNA
catccagcaccgtgcct

SEQ ID NO: 153962 - DNA, 17 bp, synthetic construct
  source 1..17: mol_type = other DNA
tcatccagcaccgtgcc

SEQ ID NO: 153963 - DNA, 17 bp, synthetic construct
  source 1..17: mol_type = other DNA
gtcatccagcaccgtgc

SEQ ID NO: 153964 - DNA, 17 bp, synthetic construct
  source 1..17: mol_type = other DNA
tgtcatccagcaccgtg

SEQ ID NO: 153965 - DNA, 17 bp, synthetic construct
  source 1..17: mol_type = other DNA
atgtcatccagcaccgt

SEQ ID NO: 153966 - DNA, 17 bp, synthetic construct
  source 1..17: mol_type = other DNA
gatgtcatccagcaccg

SEQ ID NO: 153967 - DNA, 17 bp, synthetic construct
  source 1..17: mol_type = other DNA
tgatgtcatccagcacc

SEQ ID NO: 153968 - DNA, 17 bp, synthetic construct
  source 1..17: mol_type = other DNA
gtgatgtcatccagcac

SEQ ID NO: 153969 - DNA, 17 bp, synthetic construct
  source 1..17: mol_type = other DNA
cgtgatgtcatccagca

SEQ ID NO: 153970 - DNA, 17 bp, synthetic construct
  source 1..17: mol_type = other DNA
gcgtgatgtcatccagc

SEQ ID NO: 153971 - DNA, 17 bp, synthetic construct
  source 1..17: mol_type = other DNA
tgcgtgatgtcatccag

SEQ ID NO: 153972 - DNA, 17 bp, synthetic construct
  source 1..17: mol_type = other DNA
gtgcgtgatgtcatcca

SEQ ID NO: 153973 - DNA, 17 bp, synthetic construct
  source 1..17: mol_type = other DNA
agtgcgtgatgtcatcc

SEQ ID NO: 153974 - DNA, 17 bp, synthetic construct
  source 1..17: mol_type = other DNA
gagtgcgtgatgtcatc

SEQ ID NO: 153975 - DNA, 17 bp, synthetic construct
  source 1..17: mol_type = other DNA
agagtgcgtgatgtcat

SEQ ID NO: 153976 - DNA, 17 bp, synthetic construct
  source 1..17: mol_type = other DNA
cagagtgcgtgatgtca

SEQ ID NO: 153977 - DNA, 17 bp, synthetic construct
  source 1..17: mol_type = other DNA
ccagagtgcgtgatgtc

SEQ ID NO: 153978 - DNA, 17 bp, synthetic construct
  source 1..17: mol_type = other DNA
gccagagtgcgtgatgt

SEQ ID NO: 153979 - DNA, 17 bp, synthetic construct
  source 1..17: mol_type = other DNA
agccagagtgcgtgatg

SEQ ID NO: 153980 - DNA, 17 bp, synthetic construct
  source 1..17: mol_type = other DNA
cagccagagtgcgtgat

SEQ ID NO: 153981 - DNA, 17 bp, synthetic construct
  source 1..17: mol_type = other DNA
gcagccagagtgcgtga

SEQ ID NO: 153982 - DNA, 17 bp, synthetic construct
  source 1..17: mol_type = other DNA
ggcagccagagtgcgtg

SEQ ID NO: 153983 - DNA, 17 bp, synthetic construct
  source 1..17: mol_type = other DNA
aggcagccagagtgcgt

SEQ ID NO: 153984 - DNA, 17 bp, synthetic construct
  source 1..17: mol_type = other DNA
caggcagccagagtgcg

SEQ ID NO: 153985 - DNA, 17 bp, synthetic construct
  source 1..17: mol_type = other DNA
gcaggcagccagagtgc

SEQ ID NO: 153986 - DNA, 17 bp, synthetic construct
  source 1..17: mol_type = other DNA
ggcaggcagccagagtg

SEQ ID NO: 153987 - DNA, 17 bp, synthetic construct
  source 1..17: mol_type = other DNA
gggcaggcagccagagt

SEQ ID NO: 153988 - DNA, 17 bp, synthetic construct
  source 1..17: mol_type = other DNA
ggggcaggcagccagag

SEQ ID NO: 153989 - DNA, 17 bp, synthetic construct
  source 1..17: mol_type = other DNA
aggggcaggcagccaga

SEQ ID NO: 153990 - DNA, 17 bp, synthetic construct
  source 1..17: mol_type = other DNA
gaggggcaggcagccag

SEQ ID NO: 153991 - DNA, 17 bp, synthetic construct
  source 1..17: mol_type = other DNA
cgaggggcaggcagcca

SEQ ID NO: 153992 - DNA, 17 bp, synthetic construct
  source 1..17: mol_type = other DNA
ccgaggggcaggcagcc

SEQ ID NO: 153993 - DNA, 17 bp, synthetic construct
  source 1..17: mol_type = other DNA
cccgaggggcaggcagc

SEQ ID NO: 153994 - DNA, 17 bp, synthetic construct
  source 1..17: mol_type = other DNA
gcccgaggggcaggcag

SEQ ID NO: 153995 - DNA, 17 bp, synthetic construct
  source 1..17: mol_type = other DNA
tgcccgaggggcaggca

SEQ ID NO: 153996 - DNA, 17 bp, synthetic construct
  source 1..17: mol_type = other DNA
ctgcccgaggggcaggc

SEQ ID NO: 153997 - DNA, 17 bp, synthetic construct
  source 1..17: mol_type = other DNA
actgcccgaggggcagg

SEQ ID NO: 153998 - DNA, 17 bp, synthetic construct
  source 1..17: mol_type = other DNA
cactgcccgaggggcag

SEQ ID NO: 153999 - DNA, 17 bp, synthetic construct
  source 1..17: mol_type = other DNA
gcactgcccgaggggca

SEQ ID NO: 154000 - DNA, 17 bp, synthetic construct
  source 1..17: mol_type = other DNA
ggcactgcccgaggggc

SEQ ID NO: 154001 - DNA, 17 bp, synthetic construct
  source 1..17: mol_type = other DNA
gggcactgcccgagggg

SEQ ID NO: 154002 - DNA, 17 bp, synthetic construct
  source 1..17: mol_type = other DNA
ggggcactgcccgaggg

SEQ ID NO: 154003 - DNA, 17 bp, synthetic construct
  source 1..17: mol_type = other DNA
aggggcactgcccgagg

SEQ ID NO: 154004 - DNA, 17 bp, synthetic construct
  source 1..17: mol_type = other DNA
caggggcactgcccgag

SEQ ID NO: 154005 - DNA, 17 bp, synthetic construct
  source 1..17: mol_type = other DNA
gcaggggcactgcccga

SEQ ID NO: 154006 - DNA, 17 bp, synthetic construct
  source 1..17: mol_type = other DNA
tgcaggggcactgcccg

SEQ ID NO: 154007 - DNA, 17 bp, synthetic construct
  source 1..17: mol_type = other DNA
gtgcaggggcactgccc

SEQ ID NO: 154008 - DNA, 17 bp, synthetic construct
  source 1..17: mol_type = other DNA
ggtgcaggggcactgcc

SEQ ID NO: 154009 - DNA, 17 bp, synthetic construct
  source 1..17: mol_type = other DNA
gggtgcaggggcactgc

SEQ ID NO: 154010 - DNA, 17 bp, synthetic construct
  source 1..17: mol_type = other DNA
tgggtgcaggggcactg

SEQ ID NO: 154011 - DNA, 17 bp, synthetic construct
  source 1..17: mol_type = other DNA
gtgggtgcaggggcact

SEQ ID NO: 154012 - DNA, 17 bp, synthetic construct
  source 1..17: mol_type = other DNA
cgtgggtgcaggggcac

SEQ ID NO: 154013 - DNA, 17 bp, synthetic construct
  source 1..17: mol_type = other DNA
ccgtgggtgcaggggca

SEQ ID NO: 154014 - DNA, 17 bp, synthetic construct
  source 1..17: mol_type = other DNA
gccgtgggtgcaggggc

SEQ ID NO: 154015 - DNA, 17 bp, synthetic construct
  source 1..17: mol_type = other DNA
cgccgtgggtgcagggg

SEQ ID NO: 154016 - DNA, 17 bp, synthetic construct
  source 1..17: mol_type = other DNA
ccgccgtgggtgcaggg

SEQ ID NO: 154017 - DNA, 17 bp, synthetic construct
  source 1..17: mol_type = other DNA
gccgccgtgggtgcagg

SEQ ID NO: 154018 - DNA, 17 bp, synthetic construct
  source 1..17: mol_type = other DNA
ggccgccgtgggtgcag

SEQ ID NO: 154019 - DNA, 17 bp, synthetic construct
  source 1..17: mol_type = other DNA
cggccgccgtgggtgca

SEQ ID NO: 154020 - DNA, 17 bp, synthetic construct
  source 1..17: mol_type = other DNA
gcggccgccgtgggtgc

SEQ ID NO: 154021 - DNA, 17 bp, synthetic construct
  source 1..17: mol_type = other DNA
tgcggccgccgtgggtg

SEQ ID NO: 154022 - DNA, 17 bp, synthetic construct
  source 1..17: mol_type = other DNA
gtgcggccgccgtgggt

SEQ ID NO: 154023 - DNA, 17 bp, synthetic construct
  source 1..17: mol_type = other DNA
ggtgcggccgccgtggg

SEQ ID NO: 154024 - DNA, 17 bp, synthetic construct
  source 1..17: mol_type = other DNA
aggtgcggccgccgtgg

SEQ ID NO: 154025 - DNA, 17 bp, synthetic construct
  source 1..17: mol_type = other DNA
taggtgcggccgccgtg

SEQ ID NO: 154026 - DNA, 17 bp, synthetic construct
  source 1..17: mol_type = other DNA
gtaggtgcggccgccgt

SEQ ID NO: 154027 - DNA, 17 bp, synthetic construct
  source 1..17: mol_type = other DNA
tgtaggtgcggccgccg

SEQ ID NO: 154028 - DNA, 17 bp, synthetic construct
  source 1..17: mol_type = other DNA
ctgtaggtgcggccgcc

SEQ ID NO: 154029 - DNA, 17 bp, synthetic construct
  source 1..17: mol_type = other DNA
gctgtaggtgcggccgc

SEQ ID NO: 154030 - DNA, 17 bp, synthetic construct
  source 1..17: mol_type = other DNA
ggctgtaggtgcggccg

SEQ ID NO: 154031 - DNA, 17 bp, synthetic construct
  source 1..17: mol_type = other DNA
gggctgtaggtgcggcc

SEQ ID NO: 154032 - DNA, 17 bp, synthetic construct
  source 1..17: mol_type = other DNA
cgggctgtaggtgcggc

SEQ ID NO: 154033 - DNA, 17 bp, synthetic construct
  source 1..17: mol_type = other DNA
ccgggctgtaggtgcgg

SEQ ID NO: 154034 - DNA, 17 bp, synthetic construct
  source 1..17: mol_type = other DNA
cccgggctgtaggtgcg

SEQ ID NO: 154035 - DNA, 17 bp, synthetic construct
  source 1..17: mol_type = other DNA
gcccgggctgtaggtgc

SEQ ID NO: 154036 - DNA, 17 bp, synthetic construct
  source 1..17: mol_type = other DNA
tgcccgggctgtaggtg

SEQ ID NO: 154037 - DNA, 17 bp, synthetic construct
  source 1..17: mol_type = other DNA
gtgcccgggctgtaggt

SEQ ID NO: 154038 - DNA, 17 bp, synthetic construct
  source 1..17: mol_type = other DNA
ggtgcccgggctgtagg

SEQ ID NO: 154039 - DNA, 17 bp, synthetic construct
  source 1..17: mol_type = other DNA
aggtgcccgggctgtag

SEQ ID NO: 154040 - DNA, 17 bp, synthetic construct
  source 1..17: mol_type = other DNA
gaggtgcccgggctgta

SEQ ID NO: 154041 - DNA, 17 bp, synthetic construct
  source 1..17: mol_type = other DNA
ggaggtgcccgggctgt

SEQ ID NO: 154042 - DNA, 17 bp, synthetic construct
  source 1..17: mol_type = other DNA
aggaggtgcccgggctg

SEQ ID NO: 154043 - DNA, 17 bp, synthetic construct
  source 1..17: mol_type = other DNA
aaggaggtgcccgggct

SEQ ID NO: 154044 - DNA, 17 bp, synthetic construct
  source 1..17: mol_type = other DNA
gaaggaggtgcccgggc

SEQ ID NO: 154045 - DNA, 17 bp, synthetic construct
  source 1..17: mol_type = other DNA
tgaaggaggtgcccggg

SEQ ID NO: 154046 - DNA, 17 bp, synthetic construct
  source 1..17: mol_type = other DNA
ttgaaggaggtgcccgg

SEQ ID NO: 154047 - DNA, 17 bp, synthetic construct
  source 1..17: mol_type = other DNA
gttgaaggaggtgcccg

SEQ ID NO: 154048 - DNA, 17 bp, synthetic construct
  source 1..17: mol_type = other DNA
tgttgaaggaggtgccc

SEQ ID NO: 154049 - DNA, 17 bp, synthetic construct
  source 1..17: mol_type = other DNA
gtgttgaaggaggtgcc

SEQ ID NO: 154050 - DNA, 17 bp, synthetic construct
  source 1..17: mol_type = other DNA
ggtgttgaaggaggtgc

SEQ ID NO: 154051 - DNA, 17 bp, synthetic construct
  source 1..17: mol_type = other DNA
tggtgttgaaggaggtg

SEQ ID NO: 154052 - DNA, 17 bp, synthetic construct
  source 1..17: mol_type = other DNA
gtggtgttgaaggaggt

SEQ ID NO: 154053 - DNA, 17 bp, synthetic construct
  source 1..17: mol_type = other DNA
ggtggtgttgaaggagg

SEQ ID NO: 154054 - DNA, 17 bp, synthetic construct
  source 1..17: mol_type = other DNA
aggtggtgttgaaggag

SEQ ID NO: 154055 - DNA, 17 bp, synthetic construct
  source 1..17: mol_type = other DNA
caggtggtgttgaagga

SEQ ID NO: 154056 - DNA, 17 bp, synthetic construct
  source 1..17: mol_type = other DNA
gcaggtggtgttgaagg

SEQ ID NO: 154057 - DNA, 17 bp, synthetic construct
  source 1..17: mol_type = other DNA
tgcaggtggtgttgaag

SEQ ID NO: 154058 - DNA, 17 bp, synthetic construct
  source 1..17: mol_type = other DNA
ctgcaggtggtgttgaa

SEQ ID NO: 154059 - DNA, 17 bp, synthetic construct
  source 1..17: mol_type = other DNA
gctgcaggtggtgttga

SEQ ID NO: 154060 - DNA, 17 bp, synthetic construct
  source 1..17: mol_type = other DNA
agctgcaggtggtgttg

SEQ ID NO: 154061 - DNA, 17 bp, synthetic construct
  source 1..17: mol_type = other DNA
gagctgcaggtggtgtt

SEQ ID NO: 154062 - DNA, 17 bp, synthetic construct
  source 1..17: mol_type = other DNA
ggagctgcaggtggtgt

SEQ ID NO: 154063 - DNA, 17 bp, synthetic construct
  source 1..17: mol_type = other DNA
aggagctgcaggtggtg

SEQ ID NO: 154064 - DNA, 17 bp, synthetic construct
  source 1..17: mol_type = other DNA
caggagctgcaggtggt

SEQ ID NO: 154065 - DNA, 17 bp, synthetic construct
  source 1..17: mol_type = other DNA
ccaggagctgcaggtgg

SEQ ID NO: 154066 - DNA, 17 bp, synthetic construct
  source 1..17: mol_type = other DNA
accaggagctgcaggtg

SEQ ID NO: 154067 - DNA, 17 bp, synthetic construct
  source 1..17: mol_type = other DNA
taccaggagctgcaggt

SEQ ID NO: 154068 - DNA, 17 bp, synthetic construct
  source 1..17: mol_type = other DNA
gtaccaggagctgcagg

SEQ ID NO: 154069 - DNA, 17 bp, synthetic construct
  source 1..17: mol_type = other DNA
agtaccaggagctgcag

SEQ ID NO: 154070 - DNA, 17 bp, synthetic construct
  source 1..17: mol_type = other DNA
aagtaccaggagctgca

SEQ ID NO: 154071 - DNA, 17 bp, synthetic construct
  source 1..17: mol_type = other DNA
taagtaccaggagctgc

SEQ ID NO: 154072 - DNA, 17 bp, synthetic construct
  source 1..17: mol_type = other DNA
ataagtaccaggagctg

SEQ ID NO: 154073 - DNA, 17 bp, synthetic construct
  source 1..17: mol_type = other DNA
cataagtaccaggagct

SEQ ID NO: 154074 - DNA, 17 bp, synthetic construct
  source 1..17: mol_type = other DNA
tcataagtaccaggagc

SEQ ID NO: 154075 - DNA, 17 bp, synthetic construct
  source 1..17: mol_type = other DNA
ctcataagtaccaggag

SEQ ID NO: 154076 - DNA, 17 bp, synthetic construct
  source 1..17: mol_type = other DNA
gctcataagtaccagga

SEQ ID NO: 154077 - DNA, 17 bp, synthetic construct
  source 1..17: mol_type = other DNA
ggctcataagtaccagg

SEQ ID NO: 154078 - DNA, 17 bp, synthetic construct
  source 1..17: mol_type = other DNA
gggctcataagtaccag

SEQ ID NO: 154079 - DNA, 17 bp, synthetic construct
  source 1..17: mol_type = other DNA
tgggctcataagtacca

SEQ ID NO: 154080 - DNA, 17 bp, synthetic construct
  source 1..17: mol_type = other DNA
gtgggctcataagtacc

SEQ ID NO: 154081 - DNA, 17 bp, synthetic construct
  source 1..17: mol_type = other DNA
ggtgggctcataagtac

SEQ ID NO: 154082 - DNA, 17 bp, synthetic construct
  source 1..17: mol_type = other DNA
tggtgggctcataagta

SEQ ID NO: 154083 - DNA, 17 bp, synthetic construct
  source 1..17: mol_type = other DNA
ctggtgggctcataagt

SEQ ID NO: 154084 - DNA, 17 bp, synthetic construct
  source 1..17: mol_type = other DNA
gctggtgggctcataag

SEQ ID NO: 154085 - DNA, 17 bp, synthetic construct
  source 1..17: mol_type = other DNA
ggctggtgggctcataa

SEQ ID NO: 154086 - DNA, 17 bp, synthetic construct
  source 1..17: mol_type = other DNA
aggctggtgggctcata

SEQ ID NO: 154087 - DNA, 17 bp, synthetic construct
  source 1..17: mol_type = other DNA
gaggctggtgggctcat

SEQ ID NO: 154088 - DNA, 17 bp, synthetic construct
  source 1..17: mol_type = other DNA
ggaggctggtgggctca

SEQ ID NO: 154089 - DNA, 17 bp, synthetic construct
  source 1..17: mol_type = other DNA
cggaggctggtgggctc

SEQ ID NO: 154090 - DNA, 17 bp, synthetic construct
  source 1..17: mol_type = other DNA
gcggaggctggtgggct

SEQ ID NO: 154091 - DNA, 17 bp, synthetic construct
  source 1..17: mol_type = other DNA
ggcggaggctggtgggc

SEQ ID NO: 154092 - DNA, 17 bp, synthetic construct
  source 1..17: mol_type = other DNA
aggcggaggctggtggg

SEQ ID NO: 154093 - DNA, 17 bp, synthetic construct
  source 1..17: mol_type = other DNA
caggcggaggctggtgg

SEQ ID NO: 154094 - DNA, 17 bp, synthetic construct
  source 1..17: mol_type = other DNA
ccaggcggaggctggtg

SEQ ID NO: 154095 - DNA, 17 bp, synthetic construct
  source 1..17: mol_type = other DNA
cccaggcggaggctggt

SEQ ID NO: 154096 - DNA, 17 bp, synthetic construct
  source 1..17: mol_type = other DNA
ccccaggcggaggctgg

SEQ ID NO: 154097 - DNA, 17 bp, synthetic construct
  source 1..17: mol_type = other DNA
accccaggcggaggctg

SEQ ID NO: 154098 - DNA, 17 bp, synthetic construct
  source 1..17: mol_type = other DNA
caccccaggcggaggct

SEQ ID NO: 154099 - DNA, 17 bp, synthetic construct
  source 1..17: mol_type = other DNA
ccaccccaggcggaggc

SEQ ID NO: 154100 - DNA, 17 bp, synthetic construct
  source 1..17: mol_type = other DNA
cccaccccaggcggagg

SEQ ID NO: 154101 - DNA, 17 bp, synthetic construct
  source 1..17: mol_type = other DNA
ccccaccccaggcggag

SEQ ID NO: 154102 - DNA, 17 bp, synthetic construct
  source 1..17: mol_type = other DNA
accccaccccaggcgga

SEQ ID NO: 154103 - DNA, 17 bp, synthetic construct
  source 1..17: mol_type = other DNA
caccccaccccaggcgg

SEQ ID NO: 154104 - DNA, 17 bp, synthetic construct
  source 1..17: mol_type = other DNA
acaccccaccccaggcg

SEQ ID NO: 154105 - DNA, 17 bp, synthetic construct
  source 1..17: mol_type = other DNA
cacaccccaccccaggc

SEQ ID NO: 154106 - DNA, 17 bp, synthetic construct
  source 1..17: mol_type = other DNA
ccacaccccaccccagg

SEQ ID NO: 154107 - DNA, 17 bp, synthetic construct
  source 1..17: mol_type = other DNA
tccacaccccaccccag

SEQ ID NO: 154108 - DNA, 17 bp, synthetic construct
  source 1..17: mol_type = other DNA
ctccacaccccacccca

SEQ ID NO: 154109 - DNA, 17 bp, synthetic construct
  source 1..17: mol_type = other DNA
gctccacaccccacccc

SEQ ID NO: 154110 - DNA, 17 bp, synthetic construct
  source 1..17: mol_type = other DNA
agctccacaccccaccc

SEQ ID NO: 154111 - DNA, 17 bp, synthetic construct
  source 1..17: mol_type = other DNA
gagctccacaccccacc

SEQ ID NO: 154112 - DNA, 17 bp, synthetic construct
  source 1..17: mol_type = other DNA
ggagctccacaccccac

SEQ ID NO: 154113 - DNA, 17 bp, synthetic construct
  source 1..17: mol_type = other DNA
aggagctccacacccca

SEQ ID NO: 154114 - DNA, 17 bp, synthetic construct
  source 1..17: mol_type = other DNA
caggagctccacacccc

SEQ ID NO: 154115 - DNA, 17 bp, synthetic construct
  source 1..17: mol_type = other DNA
ccaggagctccacaccc

SEQ ID NO: 154116 - DNA, 17 bp, synthetic construct
  source 1..17: mol_type = other DNA
accaggagctccacacc

SEQ ID NO: 154117 - DNA, 17 bp, synthetic construct
  source 1..17: mol_type = other DNA
taccaggagctccacac

SEQ ID NO: 154118 - DNA, 17 bp, synthetic construct
  source 1..17: mol_type = other DNA
ataccaggagctccaca

SEQ ID NO: 154119 - DNA, 17 bp, synthetic construct
  source 1..17: mol_type = other DNA
aataccaggagctccac

SEQ ID NO: 154120 - DNA, 17 bp, synthetic construct
  source 1..17: mol_type = other DNA
aaataccaggagctcca

SEQ ID NO: 154121 - DNA, 17 bp, synthetic construct
  source 1..17: mol_type = other DNA
taaataccaggagctcc

SEQ ID NO: 154122 - DNA, 17 bp, synthetic construct
  source 1..17: mol_type = other DNA
ataaataccaggagctc

SEQ ID NO: 154123 - DNA, 17 bp, synthetic construct
  source 1..17: mol_type = other DNA
cataaataccaggagct

SEQ ID NO: 154124 - DNA, 17 bp, synthetic construct
  source 1..17: mol_type = other DNA
tcataaataccaggagc

SEQ ID NO: 154125 - DNA, 17 bp, synthetic construct
  source 1..17: mol_type = other DNA
ttcataaataccaggag

SEQ ID NO: 154126 - DNA, 17 bp, synthetic construct
  source 1..17: mol_type = other DNA
gttcataaataccagga

SEQ ID NO: 154127 - DNA, 17 bp, synthetic construct
  source 1..17: mol_type = other DNA
ggttcataaataccagg

SEQ ID NO: 154128 - DNA, 17 bp, synthetic construct
  source 1..17: mol_type = other DNA
gggttcataaataccag

SEQ ID NO: 154129 - DNA, 17 bp, synthetic construct
  source 1..17: mol_type = other DNA
cgggttcataaatacca

SEQ ID NO: 154130 - DNA, 17 bp, synthetic construct
  source 1..17: mol_type = other DNA
gcgggttcataaatacc

SEQ ID NO: 154131 - DNA, 17 bp, synthetic construct
  source 1..17: mol_type = other DNA
ggcgggttcataaatac

SEQ ID NO: 154132 - DNA, 17 bp, synthetic construct
  source 1..17: mol_type = other DNA
tggcgggttcataaata

SEQ ID NO: 154133 - DNA, 17 bp, synthetic construct
  source 1..17: mol_type = other DNA
ctggcgggttcataaat

SEQ ID NO: 154134 - DNA, 17 bp, synthetic construct
  source 1..17: mol_type = other DNA
gctggcgggttcataaa

SEQ ID NO: 154135 - DNA, 17 bp, synthetic construct
  source 1..17: mol_type = other DNA
ggctggcgggttcataa

SEQ ID NO: 154136 - DNA, 17 bp, synthetic construct
  source 1..17: mol_type = other DNA
aggctggcgggttcata

SEQ ID NO: 154137 - DNA, 17 bp, synthetic construct
  source 1..17: mol_type = other DNA
gaggctggcgggttcat

SEQ ID NO: 154138 - DNA, 17 bp, synthetic construct
  source 1..17: mol_type = other DNA
agaggctggcgggttca

SEQ ID NO: 154139 - DNA, 17 bp, synthetic construct
  source 1..17: mol_type = other DNA
cagaggctggcgggttc

SEQ ID NO: 154140 - DNA, 17 bp, synthetic construct
  source 1..17: mol_type = other DNA
gcagaggctggcgggtt

SEQ ID NO: 154141 - DNA, 17 bp, synthetic construct
  source 1..17: mol_type = other DNA
ggcagaggctggcgggt

SEQ ID NO: 154142 - DNA, 17 bp, synthetic construct
  source 1..17: mol_type = other DNA
aggcagaggctggcggg

SEQ ID NO: 154143 - DNA, 17 bp, synthetic construct
  source 1..17: mol_type = other DNA
caggcagaggctggcgg

SEQ ID NO: 154144 - DNA, 17 bp, synthetic construct
  source 1..17: mol_type = other DNA
ccaggcagaggctggcg

SEQ ID NO: 154145 - DNA, 17 bp, synthetic construct
  source 1..17: mol_type = other DNA
cccaggcagaggctggc

SEQ ID NO: 154146 - DNA, 17 bp, synthetic construct
  source 1..17: mol_type = other DNA
ccccaggcagaggctgg

SEQ ID NO: 154147 - DNA, 17 bp, synthetic construct
  source 1..17: mol_type = other DNA
accccaggcagaggctg

SEQ ID NO: 154148 - DNA, 17 bp, synthetic construct
  source 1..17: mol_type = other DNA
caccccaggcagaggct

SEQ ID NO: 154149 - DNA, 17 bp, synthetic construct
  source 1..17: mol_type = other DNA
ccaccccaggcagaggc

SEQ ID NO: 154150 - DNA, 17 bp, synthetic construct
  source 1..17: mol_type = other DNA
cccaccccaggcagagg

SEQ ID NO: 154151 - DNA, 17 bp, synthetic construct
  source 1..17: mol_type = other DNA
ccccaccccaggcagag

SEQ ID NO: 154152 - DNA, 17 bp, synthetic construct
  source 1..17: mol_type = other DNA
cccccaccccaggcaga

SEQ ID NO: 154153 - DNA, 17 bp, synthetic construct
  source 1..17: mol_type = other DNA
acccccaccccaggcag

SEQ ID NO: 154154 - DNA, 17 bp, synthetic construct
  source 1..17: mol_type = other DNA
cacccccaccccaggca

SEQ ID NO: 154155 - DNA, 17 bp, synthetic construct
  source 1..17: mol_type = other DNA
acacccccaccccaggc

SEQ ID NO: 154156 - DNA, 17 bp, synthetic construct
  source 1..17: mol_type = other DNA
cacacccccaccccagg

SEQ ID NO: 154157 - DNA, 17 bp, synthetic construct
  source 1..17: mol_type = other DNA
ccacacccccaccccag

SEQ ID NO: 154158 - DNA, 17 bp, synthetic construct
  source 1..17: mol_type = other DNA
tccacacccccacccca

SEQ ID NO: 154159 - DNA, 17 bp, synthetic construct
  source 1..17: mol_type = other DNA
ctccacacccccacccc

SEQ ID NO: 154160 - DNA, 17 bp, synthetic construct
  source 1..17: mol_type = other DNA
gctccacacccccaccc

SEQ ID NO: 154161 - DNA, 17 bp, synthetic construct
  source 1..17: mol_type = other DNA
agctccacacccccacc

SEQ ID NO: 154162 - DNA, 17 bp, synthetic construct
  source 1..17: mol_type = other DNA
gagctccacacccccac

SEQ ID NO: 154163 - DNA, 17 bp, synthetic construct
  source 1..17: mol_type = other DNA
ggagctccacaccccca

SEQ ID NO: 154164 - DNA, 17 bp, synthetic construct
  source 1..17: mol_type = other DNA
aggagctccacaccccc

SEQ ID NO: 154165 - DNA, 17 bp, synthetic construct
  source 1..17: mol_type = other DNA
caggagctccacacccc

SEQ ID NO: 154166 - DNA, 17 bp, synthetic construct
  source 1..17: mol_type = other DNA
ccaggagctccacaccc

SEQ ID NO: 154167 - DNA, 17 bp, synthetic construct
  source 1..17: mol_type = other DNA
accaggagctccacacc

SEQ ID NO: 154168 - DNA, 17 bp, synthetic construct
  source 1..17: mol_type = other DNA
caccaggagctccacac

SEQ ID NO: 154169 - DNA, 17 bp, synthetic construct
  source 1..17: mol_type = other DNA
acaccaggagctccaca

SEQ ID NO: 154170 - DNA, 17 bp, synthetic construct
  source 1..17: mol_type = other DNA
cacaccaggagctccac

SEQ ID NO: 154171 - DNA, 17 bp, synthetic construct
  source 1..17: mol_type = other DNA
gcacaccaggagctcca

SEQ ID NO: 154172 - DNA, 17 bp, synthetic construct
  source 1..17: mol_type = other DNA
tgcacaccaggagctcc

SEQ ID NO: 154173 - DNA, 17 bp, synthetic construct
  source 1..17: mol_type = other DNA
gtgcacaccaggagctc

SEQ ID NO: 154174 - DNA, 17 bp, synthetic construct
  source 1..17: mol_type = other DNA
ggtgcacaccaggagct

SEQ ID NO: 154175 - DNA, 17 bp, synthetic construct
  source 1..17: mol_type = other DNA
gggtgcacaccaggagc

SEQ ID NO: 154176 - DNA, 17 bp, synthetic construct
  source 1..17: mol_type = other DNA
tgggtgcacaccaggag

SEQ ID NO: 154177 - DNA, 17 bp, synthetic construct
  source 1..17: mol_type = other DNA
gtgggtgcacaccagga

SEQ ID NO: 154178 - DNA, 17 bp, synthetic construct
  source 1..17: mol_type = other DNA
ggtgggtgcacaccagg

SEQ ID NO: 154179 - DNA, 17 bp, synthetic construct
  source 1..17: mol_type = other DNA
tggtgggtgcacaccag

SEQ ID NO: 154180 - DNA, 17 bp, synthetic construct
  source 1..17: mol_type = other DNA
ctggtgggtgcacacca

SEQ ID NO: 154181 - DNA, 17 bp, synthetic construct
  source 1..17: mol_type = other DNA
gctggtgggtgcacacc

SEQ ID NO: 154182 - DNA, 17 bp, synthetic construct
  source 1..17: mol_type = other DNA
ggctggtgggtgcacac

SEQ ID NO: 154183 - DNA, 17 bp, synthetic construct
  source 1..17: mol_type = other DNA
aggctggtgggtgcaca

SEQ ID NO: 154184 - DNA, 17 bp, synthetic construct
  source 1..17: mol_type = other DNA
gaggctggtgggtgcac

SEQ ID NO: 154185 - DNA, 17 bp, synthetic construct
  source 1..17: mol_type = other DNA
ggaggctggtgggtgca

SEQ ID NO: 154186 - DNA, 17 bp, synthetic construct
  source 1..17: mol_type = other DNA
cggaggctggtgggtgc

SEQ ID NO: 154187 - DNA, 17 bp, synthetic construct
  source 1..17: mol_type = other DNA
gcggaggctggtgggtg

SEQ ID NO: 154188 - DNA, 17 bp, synthetic construct
  source 1..17: mol_type = other DNA
ggcggaggctggtgggt

SEQ ID NO: 154189 - DNA, 17 bp, synthetic construct
  source 1..17: mol_type = other DNA
aggcggaggctggtggg

SEQ ID NO: 154190 - DNA, 17 bp, synthetic construct
  source 1..17: mol_type = other DNA
caggcggaggctggtgg

SEQ ID NO: 154191 - DNA, 17 bp, synthetic construct
  source 1..17: mol_type = other DNA
gcaggcggaggctggtg

SEQ ID NO: 154192 - DNA, 17 bp, synthetic construct
  source 1..17: mol_type = other DNA
cgcaggcggaggctggt

SEQ ID NO: 154193 - DNA, 17 bp, synthetic construct
  source 1..17: mol_type = other DNA
ccgcaggcggaggctgg

SEQ ID NO: 154194 - DNA, 17 bp, synthetic construct
  source 1..17: mol_type = other DNA
accgcaggcggaggctg

SEQ ID NO: 154195 - DNA, 17 bp, synthetic construct
  source 1..17: mol_type = other DNA
caccgcaggcggaggct

SEQ ID NO: 154196 - DNA, 17 bp, synthetic construct
  source 1..17: mol_type = other DNA
ccaccgcaggcggaggc

SEQ ID NO: 154197 - DNA, 17 bp, synthetic construct
  source 1..17: mol_type = other DNA
cccaccgcaggcggagg

SEQ ID NO: 154198 - DNA, 17 bp, synthetic construct
  source 1..17: mol_type = other DNA
ccccaccgcaggcggag

SEQ ID NO: 154199 - DNA, 17 bp, synthetic construct
  source 1..17: mol_type = other DNA
cccccaccgcaggcgga

SEQ ID NO: 154200 - DNA, 17 bp, synthetic construct
  source 1..17: mol_type = other DNA
acccccaccgcaggcgg

SEQ ID NO: 154201 - DNA, 17 bp, synthetic construct
  source 1..17: mol_type = other DNA
cacccccaccgcaggcg

SEQ ID NO: 154202 - DNA, 17 bp, synthetic construct
  source 1..17: mol_type = other DNA
acacccccaccgcaggc

SEQ ID NO: 154203 - DNA, 17 bp, synthetic construct
  source 1..17: mol_type = other DNA
cacacccccaccgcagg

SEQ ID NO: 154204 - DNA, 17 bp, synthetic construct
  source 1..17: mol_type = other DNA
ccacacccccaccgcag

SEQ ID NO: 154205 - DNA, 17 bp, synthetic construct
  source 1..17: mol_type = other DNA
tccacacccccaccgca

SEQ ID NO: 154206 - DNA, 17 bp, synthetic construct
  source 1..17: mol_type = other DNA
ctccacacccccaccgc

SEQ ID NO: 154207 - DNA, 17 bp, synthetic construct
  source 1..17: mol_type = other DNA
cctccacacccccaccg

SEQ ID NO: 154208 - DNA, 17 bp, synthetic construct
  source 1..17: mol_type = other DNA
ccctccacacccccacc

SEQ ID NO: 154209 - DNA, 17 bp, synthetic construct
  source 1..17: mol_type = other DNA
accctccacacccccac

SEQ ID NO: 154210 - DNA, 17 bp, synthetic construct
  source 1..17: mol_type = other DNA
caccctccacaccccca

SEQ ID NO: 154211 - DNA, 17 bp, synthetic construct
  source 1..17: mol_type = other DNA
ccaccctccacaccccc

SEQ ID NO: 154212 - DNA, 17 bp, synthetic construct
  source 1..17: mol_type = other DNA
cccaccctccacacccc

SEQ ID NO: 154213 - DNA, 17 bp, synthetic construct
  source 1..17: mol_type = other DNA
ccccaccctccacaccc

SEQ ID NO: 154214 - DNA, 17 bp, synthetic construct
  source 1..17: mol_type = other DNA
gccccaccctccacacc

SEQ ID NO: 154215 - DNA, 17 bp, synthetic construct
  source 1..17: mol_type = other DNA
ggccccaccctccacac

SEQ ID NO: 154216 - DNA, 17 bp, synthetic construct
  source 1..17: mol_type = other DNA
gggccccaccctccaca

SEQ ID NO: 154217 - DNA, 17 bp, synthetic construct
  source 1..17: mol_type = other DNA
tgggccccaccctccac

SEQ ID NO: 154218 - DNA, 17 bp, synthetic construct
  source 1..17: mol_type = other DNA
gtgggccccaccctcca

SEQ ID NO: 154219 - DNA, 17 bp, synthetic construct
  source 1..17: mol_type = other DNA
ggtgggccccaccctcc

SEQ ID NO: 154220 - DNA, 17 bp, synthetic construct
  source 1..17: mol_type = other DNA
aggtgggccccaccctc

SEQ ID NO: 154221 - DNA, 17 bp, synthetic construct
  source 1..17: mol_type = other DNA
gaggtgggccccaccct

SEQ ID NO: 154222 - DNA, 17 bp, synthetic construct
  source 1..17: mol_type = other DNA
ggaggtgggccccaccc

SEQ ID NO: 154223 - DNA, 17 bp, synthetic construct
  source 1..17: mol_type = other DNA
aggaggtgggccccacc

SEQ ID NO: 154224 - DNA, 17 bp, synthetic construct
  source 1..17: mol_type = other DNA
gaggaggtgggccccac

SEQ ID NO: 154225 - DNA, 17 bp, synthetic construct
  source 1..17: mol_type = other DNA
ggaggaggtgggcccca

SEQ ID NO: 154226 - DNA, 17 bp, synthetic construct
  source 1..17: mol_type = other DNA
gggaggaggtgggcccc

SEQ ID NO: 154227 - DNA, 17 bp, synthetic construct
  source 1..17: mol_type = other DNA
cgggaggaggtgggccc

SEQ ID NO: 154228 - DNA, 17 bp, synthetic construct
  source 1..17: mol_type = other DNA
tcgggaggaggtgggcc

SEQ ID NO: 154229 - DNA, 17 bp, synthetic construct
  source 1..17: mol_type = other DNA
gtcgggaggaggtgggc

SEQ ID NO: 154230 - DNA, 17 bp, synthetic construct
  source 1..17: mol_type = other DNA
tgtcgggaggaggtggg

SEQ ID NO: 154231 - DNA, 17 bp, synthetic construct
  source 1..17: mol_type = other DNA
atgtcgggaggaggtgg

SEQ ID NO: 154232 - DNA, 17 bp, synthetic construct
  source 1..17: mol_type = other DNA
catgtcgggaggaggtg

SEQ ID NO: 154233 - DNA, 17 bp, synthetic construct
  source 1..17: mol_type = other DNA
gcatgtcgggaggaggt

SEQ ID NO: 154234 - DNA, 17 bp, synthetic construct
  source 1..17: mol_type = other DNA
ggcatgtcgggaggagg

SEQ ID NO: 154235 - DNA, 17 bp, synthetic construct
  source 1..17: mol_type = other DNA
cggcatgtcgggaggag

SEQ ID NO: 154236 - DNA, 17 bp, synthetic construct
  source 1..17: mol_type = other DNA
ccggcatgtcgggagga

SEQ ID NO: 154237 - DNA, 17 bp, synthetic construct
  source 1..17: mol_type = other DNA
accggcatgtcgggagg

SEQ ID NO: 154238 - DNA, 17 bp, synthetic construct
  source 1..17: mol_type = other DNA
aaccggcatgtcgggag

SEQ ID NO: 154239 - DNA, 17 bp, synthetic construct
  source 1..17: mol_type = other DNA
gaaccggcatgtcggga

SEQ ID NO: 154240 - DNA, 17 bp, synthetic construct
  source 1..17: mol_type = other DNA
agaaccggcatgtcggg

SEQ ID NO: 154241 - DNA, 17 bp, synthetic construct
  source 1..17: mol_type = other DNA
cagaaccggcatgtcgg

SEQ ID NO: 154242 - DNA, 17 bp, synthetic construct
  source 1..17: mol_type = other DNA
gcagaaccggcatgtcg

SEQ ID NO: 154243 - DNA, 17 bp, synthetic construct
  source 1..17: mol_type = other DNA
agcagaaccggcatgtc

SEQ ID NO: 154244 - DNA, 17 bp, synthetic construct
  source 1..17: mol_type = other DNA
gagcagaaccggcatgt

SEQ ID NO: 154245 - DNA, 17 bp, synthetic construct
  source 1..17: mol_type = other DNA
tgagcagaaccggcatg

SEQ ID NO: 154246 - DNA, 17 bp, synthetic construct
  source 1..17: mol_type = other DNA
gtgagcagaaccggcat

SEQ ID NO: 154247 - DNA, 17 bp, synthetic construct
  source 1..17: mol_type = other DNA
cgtgagcagaaccggca

SEQ ID NO: 154248 - DNA, 17 bp, synthetic construct
  source 1..17: mol_type = other DNA
ccgtgagcagaaccggc

SEQ ID NO: 154249 - DNA, 17 bp, synthetic construct
  source 1..17: mol_type = other DNA
gccgtgagcagaaccgg

SEQ ID NO: 154250 - DNA, 17 bp, synthetic construct
  source 1..17: mol_type = other DNA
ggccgtgagcagaaccg

SEQ ID NO: 154251 - DNA, 17 bp, synthetic construct
  source 1..17: mol_type = other DNA
aggccgtgagcagaacc

SEQ ID NO: 154252 - DNA, 17 bp, synthetic construct
  source 1..17: mol_type = other DNA
gaggccgtgagcagaac

SEQ ID NO: 154253 - DNA, 17 bp, synthetic construct
  source 1..17: mol_type = other DNA
ggaggccgtgagcagaa

SEQ ID NO: 154254 - DNA, 17 bp, synthetic construct
  source 1..17: mol_type = other DNA
gggaggccgtgagcaga

SEQ ID NO: 154255 - DNA, 17 bp, synthetic construct
  source 1..17: mol_type = other DNA
agggaggccgtgagcag

SEQ ID NO: 154256 - DNA, 17 bp, synthetic construct
  source 1..17: mol_type = other DNA
gagggaggccgtgagca

SEQ ID NO: 154257 - DNA, 17 bp, synthetic construct
  source 1..17: mol_type = other DNA
ggagggaggccgtgagc

SEQ ID NO: 154258 - DNA, 17 bp, synthetic construct
  source 1..17: mol_type = other DNA
gggagggaggccgtgag

SEQ ID NO: 154259 - DNA, 17 bp, synthetic construct
  source 1..17: mol_type = other DNA
ggggagggaggccgtga

SEQ ID NO: 154260 - DNA, 17 bp, synthetic construct
  source 1..17: mol_type = other DNA
tggggagggaggccgtg

SEQ ID NO: 154261 - DNA, 17 bp, synthetic construct
  source 1..17: mol_type = other DNA
ctggggagggaggccgt

SEQ ID NO: 154262 - DNA, 17 bp, synthetic construct
  source 1..17: mol_type = other DNA
gctggggagggaggccg

SEQ ID NO: 154263 - DNA, 17 bp, synthetic construct
  source 1..17: mol_type = other DNA
tgctggggagggaggcc

SEQ ID NO: 154264 - DNA, 17 bp, synthetic construct
  source 1..17: mol_type = other DNA
gtgctggggagggaggc

SEQ ID NO: 154265 - DNA, 17 bp, synthetic construct
  source 1..17: mol_type = other DNA
ggtgctggggagggagg

SEQ ID NO: 154266 - DNA, 17 bp, synthetic construct
  source 1..17: mol_type = other DNA
aggtgctggggagggag

SEQ ID NO: 154267 - DNA, 17 bp, synthetic construct
  source 1..17: mol_type = other DNA
caggtgctggggaggga

SEQ ID NO: 154268 - DNA, 17 bp, synthetic construct
  source 1..17: mol_type = other DNA
gcaggtgctggggaggg

SEQ ID NO: 154269 - DNA, 17 bp, synthetic construct
  source 1..17: mol_type = other DNA
agcaggtgctggggagg

SEQ ID NO: 154270 - DNA, 17 bp, synthetic construct
  source 1..17: mol_type = other DNA
gagcaggtgctggggag

SEQ ID NO: 154271 - DNA, 17 bp, synthetic construct
  source 1..17: mol_type = other DNA
ggagcaggtgctgggga

SEQ ID NO: 154272 - DNA, 17 bp, synthetic construct
  source 1..17: mol_type = other DNA
cggagcaggtgctgggg

SEQ ID NO: 154273 - DNA, 17 bp, synthetic construct
  source 1..17: mol_type = other DNA
ccggagcaggtgctggg

SEQ ID NO: 154274 - DNA, 17 bp, synthetic construct
  source 1..17: mol_type = other DNA
cccggagcaggtgctgg

SEQ ID NO: 154275 - DNA, 17 bp, synthetic construct
  source 1..17: mol_type = other DNA
ccccggagcaggtgctg

SEQ ID NO: 154276 - DNA, 17 bp, synthetic construct
  source 1..17: mol_type = other DNA
cccccggagcaggtgct

SEQ ID NO: 154277 - DNA, 17 bp, synthetic construct
  source 1..17: mol_type = other DNA
ccccccggagcaggtgc

SEQ ID NO: 154278 - DNA, 17 bp, synthetic construct
  source 1..17: mol_type = other DNA
gccccccggagcaggtg

SEQ ID NO: 154279 - DNA, 17 bp, synthetic construct
  source 1..17: mol_type = other DNA
agccccccggagcaggt

SEQ ID NO: 154280 - DNA, 17 bp, synthetic construct
  source 1..17: mol_type = other DNA
tagccccccggagcagg

SEQ ID NO: 154281 - DNA, 17 bp, synthetic construct
  source 1..17: mol_type = other DNA
atagccccccggagcag

SEQ ID NO: 154282 - DNA, 17 bp, synthetic construct
  source 1..17: mol_type = other DNA
catagccccccggagca

SEQ ID NO: 154283 - DNA, 17 bp, synthetic construct
  source 1..17: mol_type = other DNA
ccatagccccccggagc

SEQ ID NO: 154284 - DNA, 17 bp, synthetic construct
  source 1..17: mol_type = other DNA
gccatagccccccggag

SEQ ID NO: 154285 - DNA, 17 bp, synthetic construct
  source 1..17: mol_type = other DNA
tgccatagccccccgga

SEQ ID NO: 154286 - DNA, 17 bp, synthetic construct
  source 1..17: mol_type = other DNA
ctgccatagccccccgg

SEQ ID NO: 154287 - DNA, 17 bp, synthetic construct
  source 1..17: mol_type = other DNA
actgccatagccccccg

SEQ ID NO: 154288 - DNA, 17 bp, synthetic construct
  source 1..17: mol_type = other DNA
cactgccatagcccccc

SEQ ID NO: 154289 - DNA, 17 bp, synthetic construct
  source 1..17: mol_type = other DNA
gcactgccatagccccc

SEQ ID NO: 154290 - DNA, 17 bp, synthetic construct
  source 1..17: mol_type = other DNA
ggcactgccatagcccc

SEQ ID NO: 154291 - DNA, 17 bp, synthetic construct
  source 1..17: mol_type = other DNA
tggcactgccatagccc

SEQ ID NO: 154292 - DNA, 17 bp, synthetic construct
  source 1..17: mol_type = other DNA
ctggcactgccatagcc

SEQ ID NO: 154293 - DNA, 17 bp, synthetic construct
  source 1..17: mol_type = other DNA
cctggcactgccatagc

SEQ ID NO: 154294 - DNA, 17 bp, synthetic construct
  source 1..17: mol_type = other DNA
tcctggcactgccatag

SEQ ID NO: 154295 - DNA, 17 bp, synthetic construct
  source 1..17: mol_type = other DNA
gtcctggcactgccata

SEQ ID NO: 154296 - DNA, 17 bp, synthetic construct
  source 1..17: mol_type = other DNA
ggtcctggcactgccat

SEQ ID NO: 154297 - DNA, 17 bp, synthetic construct
  source 1..17: mol_type = other DNA
aggtcctggcactgcca

SEQ ID NO: 154298 - DNA, 17 bp, synthetic construct
  source 1..17: mol_type = other DNA
caggtcctggcactgcc

SEQ ID NO: 154299 - DNA, 17 bp, synthetic construct
  source 1..17: mol_type = other DNA
gcaggtcctggcactgc

SEQ ID NO: 154300 - DNA, 17 bp, synthetic construct
  source 1..17: mol_type = other DNA
ggcaggtcctggcactg

SEQ ID NO: 154301 - DNA, 17 bp, synthetic construct
  source 1..17: mol_type = other DNA
cggcaggtcctggcact

SEQ ID NO: 154302 - DNA, 17 bp, synthetic construct
  source 1..17: mol_type = other DNA
acggcaggtcctggcac

SEQ ID NO: 154303 - DNA, 17 bp, synthetic construct
  source 1..17: mol_type = other DNA
cacggcaggtcctggca

SEQ ID NO: 154304 - DNA, 17 bp, synthetic construct
  source 1..17: mol_type = other DNA
gcacggcaggtcctggc

SEQ ID NO: 154305 - DNA, 17 bp, synthetic construct
  source 1..17: mol_type = other DNA
ggcacggcaggtcctgg

SEQ ID NO: 154306 - DNA, 17 bp, synthetic construct
  source 1..17: mol_type = other DNA
gggcacggcaggtcctg

SEQ ID NO: 154307 - DNA, 17 bp, synthetic construct
  source 1..17: mol_type = other DNA
agggcacggcaggtcct

SEQ ID NO: 154308 - DNA, 17 bp, synthetic construct
  source 1..17: mol_type = other DNA
cagggcacggcaggtcc

SEQ ID NO: 154309 - DNA, 17 bp, synthetic construct
  source 1..17: mol_type = other DNA
ccagggcacggcaggtc

SEQ ID NO: 154310 - DNA, 17 bp, synthetic construct
  source 1..17: mol_type = other DNA
gccagggcacggcaggt

SEQ ID NO: 154311 - DNA, 17 bp, synthetic construct
  source 1..17: mol_type = other DNA
tgccagggcacggcagg

SEQ ID NO: 154312 - DNA, 17 bp, synthetic construct
  source 1..17: mol_type = other DNA
gtgccagggcacggcag

SEQ ID NO: 154313 - DNA, 17 bp, synthetic construct
  source 1..17: mol_type = other DNA
ggtgccagggcacggca

SEQ ID NO: 154314 - DNA, 17 bp, synthetic construct
  source 1..17: mol_type = other DNA
aggtgccagggcacggc

SEQ ID NO: 154315 - DNA, 17 bp, synthetic construct
  source 1..17: mol_type = other DNA
caggtgccagggcacgg

SEQ ID NO: 154316 - DNA, 17 bp, synthetic construct
  source 1..17: mol_type = other DNA
gcaggtgccagggcacg

SEQ ID NO: 154317 - DNA, 17 bp, synthetic construct
  source 1..17: mol_type = other DNA
agcaggtgccagggcac

SEQ ID NO: 154318 - DNA, 17 bp, synthetic construct
  source 1..17: mol_type = other DNA
gagcaggtgccagggca

SEQ ID NO: 154319 - DNA, 17 bp, synthetic construct
  source 1..17: mol_type = other DNA
agagcaggtgccagggc

SEQ ID NO: 154320 - DNA, 17 bp, synthetic construct
  source 1..17: mol_type = other DNA
cagagcaggtgccaggg

SEQ ID NO: 154321 - DNA, 17 bp, synthetic construct
  source 1..17: mol_type = other DNA
acagagcaggtgccagg

SEQ ID NO: 154322 - DNA, 17 bp, synthetic construct
  source 1..17: mol_type = other DNA
cacagagcaggtgccag

SEQ ID NO: 154323 - DNA, 17 bp, synthetic construct
  source 1..17: mol_type = other DNA
gcacagagcaggtgcca

SEQ ID NO: 154324 - DNA, 17 bp, synthetic construct
  source 1..17: mol_type = other DNA
tgcacagagcaggtgcc

SEQ ID NO: 154325 - DNA, 17 bp, synthetic construct
  source 1..17: mol_type = other DNA
ctgcacagagcaggtgc

SEQ ID NO: 154326 - DNA, 17 bp, synthetic construct
  source 1..17: mol_type = other DNA
cctgcacagagcaggtg

SEQ ID NO: 154327 - DNA, 17 bp, synthetic construct
  source 1..17: mol_type = other DNA
ccctgcacagagcaggt

SEQ ID NO: 154328 - DNA, 17 bp, synthetic construct
  source 1..17: mol_type = other DNA
gccctgcacagagcagg

SEQ ID NO: 154329 - DNA, 17 bp, synthetic construct
  source 1..17: mol_type = other DNA
cgccctgcacagagcag

SEQ ID NO: 154330 - DNA, 17 bp, synthetic construct
  source 1..17: mol_type = other DNA
ccgccctgcacagagca

SEQ ID NO: 154331 - DNA, 17 bp, synthetic construct
  source 1..17: mol_type = other DNA
cccgccctgcacagagc

SEQ ID NO: 154332 - DNA, 17 bp, synthetic construct
  source 1..17: mol_type = other DNA
ccccgccctgcacagag

SEQ ID NO: 154333 - DNA, 17 bp, synthetic construct
  source 1..17: mol_type = other DNA
gccccgccctgcacaga

SEQ ID NO: 154334 - DNA, 17 bp, synthetic construct
  source 1..17: mol_type = other DNA
ggccccgccctgcacag

SEQ ID NO: 154335 - DNA, 17 bp, synthetic construct
  source 1..17: mol_type = other DNA
gggccccgccctgcaca

SEQ ID NO: 154336 - DNA, 17 bp, synthetic construct
  source 1..17: mol_type = other DNA
tgggccccgccctgcac

SEQ ID NO: 154337 - DNA, 17 bp, synthetic construct
  source 1..17: mol_type = other DNA
gtgggccccgccctgca

SEQ ID NO: 154338 - DNA, 17 bp, synthetic construct
  source 1..17: mol_type = other DNA
tgtgggccccgccctgc

SEQ ID NO: 154339 - DNA, 17 bp, synthetic construct
  source 1..17: mol_type = other DNA
atgtgggccccgccctg

SEQ ID NO: 154340 - DNA, 17 bp, synthetic construct
  source 1..17: mol_type = other DNA
gatgtgggccccgccct

SEQ ID NO: 154341 - DNA, 17 bp, synthetic construct
  source 1..17: mol_type = other DNA
agatgtgggccccgccc

SEQ ID NO: 154342 - DNA, 17 bp, synthetic construct
  source 1..17: mol_type = other DNA
gagatgtgggccccgcc

SEQ ID NO: 154343 - DNA, 17 bp, synthetic construct
  source 1..17: mol_type = other DNA
ggagatgtgggccccgc

SEQ ID NO: 154344 - DNA, 17 bp, synthetic construct
  source 1..17: mol_type = other DNA
tggagatgtgggccccg

SEQ ID NO: 154345 - DNA, 17 bp, synthetic construct
  source 1..17: mol_type = other DNA
gtggagatgtgggcccc

SEQ ID NO: 154346 - DNA, 17 bp, synthetic construct
  source 1..17: mol_type = other DNA
ggtggagatgtgggccc

SEQ ID NO: 154347 - DNA, 17 bp, synthetic construct
  source 1..17: mol_type = other DNA
aggtggagatgtgggcc

SEQ ID NO: 154348 - DNA, 17 bp, synthetic construct
  source 1..17: mol_type = other DNA
taggtggagatgtgggc

SEQ ID NO: 154349 - DNA, 17 bp, synthetic construct
  source 1..17: mol_type = other DNA
ataggtggagatgtggg

SEQ ID NO: 154350 - DNA, 17 bp, synthetic construct
  source 1..17: mol_type = other DNA
cataggtggagatgtgg

SEQ ID NO: 154351 - DNA, 17 bp, synthetic construct
  source 1..17: mol_type = other DNA
tcataggtggagatgtg

SEQ ID NO: 154352 - DNA, 17 bp, synthetic construct
  source 1..17: mol_type = other DNA
atcataggtggagatgt

SEQ ID NO: 154353 - DNA, 17 bp, synthetic construct
  source 1..17: mol_type = other DNA
catcataggtggagatg

SEQ ID NO: 154354 - DNA, 17 bp, synthetic construct
  source 1..17: mol_type = other DNA
tcatcataggtggagat

SEQ ID NO: 154355 - DNA, 17 bp, synthetic construct
  source 1..17: mol_type = other DNA
ctcatcataggtggaga

SEQ ID NO: 154356 - DNA, 17 bp, synthetic construct
  source 1..17: mol_type = other DNA
tctcatcataggtggag

SEQ ID NO: 154357 - DNA, 17 bp, synthetic construct
  source 1..17: mol_type = other DNA
ttctcatcataggtgga

SEQ ID NO: 154358 - DNA, 17 bp, synthetic construct
  source 1..17: mol_type = other DNA
tttctcatcataggtgg

SEQ ID NO: 154359 - DNA, 17 bp, synthetic construct
  source 1..17: mol_type = other DNA
gtttctcatcataggtg

SEQ ID NO: 154360 - DNA, 17 bp, synthetic construct
  source 1..17: mol_type = other DNA
agtttctcatcataggt

SEQ ID NO: 154361 - DNA, 17 bp, synthetic construct
  source 1..17: mol_type = other DNA
gagtttctcatcatagg

SEQ ID NO: 154362 - DNA, 17 bp, synthetic construct
  source 1..17: mol_type = other DNA
agagtttctcatcatag

SEQ ID NO: 154363 - DNA, 17 bp, synthetic construct
  source 1..17: mol_type = other DNA
tagagtttctcatcata

SEQ ID NO: 154364 - DNA, 17 bp, synthetic construct
  source 1..17: mol_type = other DNA
gtagagtttctcatcat

SEQ ID NO: 154365 - DNA, 17 bp, synthetic construct
  source 1..17: mol_type = other DNA
cgtagagtttctcatca

SEQ ID NO: 154366 - DNA, 17 bp, synthetic construct
  source 1..17: mol_type = other DNA
tcgtagagtttctcatc

SEQ ID NO: 154367 - DNA, 17 bp, synthetic construct
  source 1..17: mol_type = other DNA
gtcgtagagtttctcat

SEQ ID NO: 154368 - DNA, 17 bp, synthetic construct
  source 1..17: mol_type = other DNA
ggtcgtagagtttctca

SEQ ID NO: 154369 - DNA, 17 bp, synthetic construct
  source 1..17: mol_type = other DNA
aggtcgtagagtttctc

SEQ ID NO: 154370 - DNA, 17 bp, synthetic construct
  source 1..17: mol_type = other DNA
caggtcgtagagtttct

SEQ ID NO: 154371 - DNA, 17 bp, synthetic construct
  source 1..17: mol_type = other DNA
gcaggtcgtagagtttc

SEQ ID NO: 154372 - DNA, 17 bp, synthetic construct
  source 1..17: mol_type = other DNA
tgcaggtcgtagagttt

SEQ ID NO: 154373 - DNA, 17 bp, synthetic construct
  source 1..17: mol_type = other DNA
atgcaggtcgtagagtt

SEQ ID NO: 154374 - DNA, 17 bp, synthetic construct
  source 1..17: mol_type = other DNA
catgcaggtcgtagagt

SEQ ID NO: 154375 - DNA, 17 bp, synthetic construct
  source 1..17: mol_type = other DNA
ccatgcaggtcgtagag

SEQ ID NO: 154376 - DNA, 17 bp, synthetic construct
  source 1..17: mol_type = other DNA
accatgcaggtcgtaga

SEQ ID NO: 154377 - DNA, 17 bp, synthetic construct
  source 1..17: mol_type = other DNA
caccatgcaggtcgtag

SEQ ID NO: 154378 - DNA, 17 bp, synthetic construct
  source 1..17: mol_type = other DNA
tcaccatgcaggtcgta

SEQ ID NO: 154379 - DNA, 17 bp, synthetic construct
  source 1..17: mol_type = other DNA
gtcaccatgcaggtcgt

SEQ ID NO: 154380 - DNA, 17 bp, synthetic construct
  source 1..17: mol_type = other DNA
agtcaccatgcaggtcg

SEQ ID NO: 154381 - DNA, 17 bp, synthetic construct
  source 1..17: mol_type = other DNA
cagtcaccatgcaggtc

SEQ ID NO: 154382 - DNA, 17 bp, synthetic construct
  source 1..17: mol_type = other DNA
gcagtcaccatgcaggt

SEQ ID NO: 154383 - DNA, 17 bp, synthetic construct
  source 1..17: mol_type = other DNA
tgcagtcaccatgcagg

SEQ ID NO: 154384 - DNA, 17 bp, synthetic construct
  source 1..17: mol_type = other DNA
ctgcagtcaccatgcag

SEQ ID NO: 154385 - DNA, 17 bp, synthetic construct
  source 1..17: mol_type = other DNA
gctgcagtcaccatgca

SEQ ID NO: 154386 - DNA, 17 bp, synthetic construct
  source 1..17: mol_type = other DNA
agctgcagtcaccatgc

SEQ ID NO: 154387 - DNA, 17 bp, synthetic construct
  source 1..17: mol_type = other DNA
tagctgcagtcaccatg

SEQ ID NO: 154388 - DNA, 17 bp, synthetic construct
  source 1..17: mol_type = other DNA
gtagctgcagtcaccat

SEQ ID NO: 154389 - DNA, 17 bp, synthetic construct
  source 1..17: mol_type = other DNA
cgtagctgcagtcacca

SEQ ID NO: 154390 - DNA, 17 bp, synthetic construct
  source 1..17: mol_type = other DNA
acgtagctgcagtcacc

SEQ ID NO: 154391 - DNA, 17 bp, synthetic construct
  source 1..17: mol_type = other DNA
aacgtagctgcagtcac

SEQ ID NO: 154392 - DNA, 17 bp, synthetic construct
  source 1..17: mol_type = other DNA
gaacgtagctgcagtca

SEQ ID NO: 154393 - DNA, 17 bp, synthetic construct
  source 1..17: mol_type = other DNA
agaacgtagctgcagtc

SEQ ID NO: 154394 - DNA, 17 bp, synthetic construct
  source 1..17: mol_type = other DNA
cagaacgtagctgcagt

SEQ ID NO: 154395 - DNA, 17 bp, synthetic construct
  source 1..17: mol_type = other DNA
acagaacgtagctgcag

SEQ ID NO: 154396 - DNA, 17 bp, synthetic construct
  source 1..17: mol_type = other DNA
gacagaacgtagctgca

SEQ ID NO: 154397 - DNA, 17 bp, synthetic construct
  source 1..17: mol_type = other DNA
ggacagaacgtagctgc

SEQ ID NO: 154398 - DNA, 17 bp, synthetic construct
  source 1..17: mol_type = other DNA
tggacagaacgtagctg

SEQ ID NO: 154399 - DNA, 17 bp, synthetic construct
  source 1..17: mol_type = other DNA
ttggacagaacgtagct

SEQ ID NO: 154400 - DNA, 17 bp, synthetic construct
  source 1..17: mol_type = other DNA
cttggacagaacgtagc

SEQ ID NO: 154401 - DNA, 17 bp, synthetic construct
  source 1..17: mol_type = other DNA
ccttggacagaacgtag

SEQ ID NO: 154402 - DNA, 17 bp, synthetic construct
  source 1..17: mol_type = other DNA
accttggacagaacgta

SEQ ID NO: 154403 - DNA, 17 bp, synthetic construct
  source 1..17: mol_type = other DNA
gaccttggacagaacgt

SEQ ID NO: 154404 - DNA, 17 bp, synthetic construct
  source 1..17: mol_type = other DNA
agaccttggacagaacg

SEQ ID NO: 154405 - DNA, 17 bp, synthetic construct
  source 1..17: mol_type = other DNA
cagaccttggacagaac

SEQ ID NO: 154406 - DNA, 17 bp, synthetic construct
  source 1..17: mol_type = other DNA
ccagaccttggacagaa

SEQ ID NO: 154407 - DNA, 17 bp, synthetic construct
  source 1..17: mol_type = other DNA
cccagaccttggacaga

SEQ ID NO: 154408 - DNA, 17 bp, synthetic construct
  source 1..17: mol_type = other DNA
gcccagaccttggacag

SEQ ID NO: 154409 - DNA, 17 bp, synthetic construct
  source 1..17: mol_type = other DNA
agcccagaccttggaca

SEQ ID NO: 154410 - DNA, 17 bp, synthetic construct
  source 1..17: mol_type = other DNA
aagcccagaccttggac

SEQ ID NO: 154411 - DNA, 17 bp, synthetic construct
  source 1..17: mol_type = other DNA
caagcccagaccttgga

SEQ ID NO: 154412 - DNA, 17 bp, synthetic construct
  source 1..17: mol_type = other DNA
ccaagcccagaccttgg

SEQ ID NO: 154413 - DNA, 17 bp, synthetic construct
  source 1..17: mol_type = other DNA
cccaagcccagaccttg

SEQ ID NO: 154414 - DNA, 17 bp, synthetic construct
  source 1..17: mol_type = other DNA
ccccaagcccagacctt

SEQ ID NO: 154415 - DNA, 17 bp, synthetic construct
  source 1..17: mol_type = other DNA
gccccaagcccagacct

SEQ ID NO: 154416 - DNA, 17 bp, synthetic construct
  source 1..17: mol_type = other DNA
ggccccaagcccagacc

SEQ ID NO: 154417 - DNA, 17 bp, synthetic construct
  source 1..17: mol_type = other DNA
cggccccaagcccagac

SEQ ID NO: 154418 - DNA, 17 bp, synthetic construct
  source 1..17: mol_type = other DNA
ccggccccaagcccaga

SEQ ID NO: 154419 - DNA, 17 bp, synthetic construct
  source 1..17: mol_type = other DNA
cccggccccaagcccag

SEQ ID NO: 154420 - DNA, 17 bp, synthetic construct
  source 1..17: mol_type = other DNA
acccggccccaagccca

SEQ ID NO: 154421 - DNA, 17 bp, synthetic construct
  source 1..17: mol_type = other DNA
gacccggccccaagccc

SEQ ID NO: 154422 - DNA, 17 bp, synthetic construct
  source 1..17: mol_type = other DNA
agacccggccccaagcc

SEQ ID NO: 154423 - DNA, 17 bp, synthetic construct
  source 1..17: mol_type = other DNA
aagacccggccccaagc

SEQ ID NO: 154424 - DNA, 17 bp, synthetic construct
  source 1..17: mol_type = other DNA
gaagacccggccccaag

SEQ ID NO: 154425 - DNA, 17 bp, synthetic construct
  source 1..17: mol_type = other DNA
tgaagacccggccccaa

SEQ ID NO: 154426 - DNA, 17 bp, synthetic construct
  source 1..17: mol_type = other DNA
ctgaagacccggcccca

SEQ ID NO: 154427 - DNA, 17 bp, synthetic construct
  source 1..17: mol_type = other DNA
tctgaagacccggcccc

SEQ ID NO: 154428 - DNA, 17 bp, synthetic construct
  source 1..17: mol_type = other DNA
gtctgaagacccggccc

SEQ ID NO: 154429 - DNA, 17 bp, synthetic construct
  source 1..17: mol_type = other DNA
tgtctgaagacccggcc

SEQ ID NO: 154430 - DNA, 17 bp, synthetic construct
  source 1..17: mol_type = other DNA
gtgtctgaagacccggc

SEQ ID NO: 154431 - DNA, 17 bp, synthetic construct
  source 1..17: mol_type = other DNA
ggtgtctgaagacccgg

SEQ ID NO: 154432 - DNA, 17 bp, synthetic construct
  source 1..17: mol_type = other DNA
gggtgtctgaagacccg

SEQ ID NO: 154433 - DNA, 17 bp, synthetic construct
  source 1..17: mol_type = other DNA
tgggtgtctgaagaccc

SEQ ID NO: 154434 - DNA, 17 bp, synthetic construct
  source 1..17: mol_type = other DNA
ctgggtgtctgaagacc

SEQ ID NO: 154435 - DNA, 17 bp, synthetic construct
  source 1..17: mol_type = other DNA
tctgggtgtctgaagac

SEQ ID NO: 154436 - DNA, 17 bp, synthetic construct
  source 1..17: mol_type = other DNA
gtctgggtgtctgaaga

SEQ ID NO: 154437 - DNA, 17 bp, synthetic construct
  source 1..17: mol_type = other DNA
ggtctgggtgtctgaag

SEQ ID NO: 154438 - DNA, 17 bp, synthetic construct
  source 1..17: mol_type = other DNA
gggtctgggtgtctgaa

SEQ ID NO: 154439 - DNA, 17 bp, synthetic construct
  source 1..17: mol_type = other DNA
agggtctgggtgtctga

SEQ ID NO: 154440 - DNA, 17 bp, synthetic construct
  source 1..17: mol_type = other DNA
gagggtctgggtgtctg

SEQ ID NO: 154441 - DNA, 17 bp, synthetic construct
  source 1..17: mol_type = other DNA
ggagggtctgggtgtct

SEQ ID NO: 154442 - DNA, 17 bp, synthetic construct
  source 1..17: mol_type = other DNA
aggagggtctgggtgtc

SEQ ID NO: 154443 - DNA, 17 bp, synthetic construct
  source 1..17: mol_type = other DNA
caggagggtctgggtgt

SEQ ID NO: 154444 - DNA, 17 bp, synthetic construct
  source 1..17: mol_type = other DNA
ccaggagggtctgggtg

SEQ ID NO: 154445 - DNA, 17 bp, synthetic construct
  source 1..17: mol_type = other DNA
cccaggagggtctgggt

SEQ ID NO: 154446 - DNA, 17 bp, synthetic construct
  source 1..17: mol_type = other DNA
tcccaggagggtctggg

SEQ ID NO: 154447 - DNA, 17 bp, synthetic construct
  source 1..17: mol_type = other DNA
gtcccaggagggtctgg

SEQ ID NO: 154448 - DNA, 17 bp, synthetic construct
  source 1..17: mol_type = other DNA
ggtcccaggagggtctg

SEQ ID NO: 154449 - DNA, 17 bp, synthetic construct
  source 1..17: mol_type = other DNA
gggtcccaggagggtct

SEQ ID NO: 154450 - DNA, 17 bp, synthetic construct
  source 1..17: mol_type = other DNA
agggtcccaggagggtc

SEQ ID NO: 154451 - DNA, 17 bp, synthetic construct
  source 1..17: mol_type = other DNA
gagggtcccaggagggt

SEQ ID NO: 154452 - DNA, 17 bp, synthetic construct
  source 1..17: mol_type = other DNA
tgagggtcccaggaggg

SEQ ID NO: 154453 - DNA, 17 bp, synthetic construct
  source 1..17: mol_type = other DNA
atgagggtcccaggagg

SEQ ID NO: 154454 - DNA, 17 bp, synthetic construct
  source 1..17: mol_type = other DNA
catgagggtcccaggag

SEQ ID NO: 154455 - DNA, 17 bp, synthetic construct
  source 1..17: mol_type = other DNA
gcatgagggtcccagga

SEQ ID NO: 154456 - DNA, 17 bp, synthetic construct
  source 1..17: mol_type = other DNA
ggcatgagggtcccagg

SEQ ID NO: 154457 - DNA, 17 bp, synthetic construct
  source 1..17: mol_type = other DNA
tggcatgagggtcccag

SEQ ID NO: 154458 - DNA, 17 bp, synthetic construct
  source 1..17: mol_type = other DNA
gtggcatgagggtccca

SEQ ID NO: 154459 - DNA, 17 bp, synthetic construct
  source 1..17: mol_type = other DNA
agtggcatgagggtccc

SEQ ID NO: 154460 - DNA, 17 bp, synthetic construct
  source 1..17: mol_type = other DNA
aagtggcatgagggtcc

SEQ ID NO: 154461 - DNA, 17 bp, synthetic construct
  source 1..17: mol_type = other DNA
gaagtggcatgagggtc

SEQ ID NO: 154462 - DNA, 17 bp, synthetic construct
  source 1..17: mol_type = other DNA
ggaagtggcatgagggt

SEQ ID NO: 154463 - DNA, 17 bp, synthetic construct
  source 1..17: mol_type = other DNA
tggaagtggcatgaggg

SEQ ID NO: 154464 - DNA, 17 bp, synthetic construct
  source 1..17: mol_type = other DNA
gtggaagtggcatgagg

SEQ ID NO: 154465 - DNA, 17 bp, synthetic construct
  source 1..17: mol_type = other DNA
ggtggaagtggcatgag

SEQ ID NO: 154466 - DNA, 17 bp, synthetic construct
  source 1..17: mol_type = other DNA
gggtggaagtggcatga

SEQ ID NO: 154467 - DNA, 17 bp, synthetic construct
  source 1..17: mol_type = other DNA
tgggtggaagtggcatg

SEQ ID NO: 154468 - DNA, 17 bp, synthetic construct
  source 1..17: mol_type = other DNA
ctgggtggaagtggcat

SEQ ID NO: 154469 - DNA, 17 bp, synthetic construct
  source 1..17: mol_type = other DNA
cctgggtggaagtggca

SEQ ID NO: 154470 - DNA, 17 bp, synthetic construct
  source 1..17: mol_type = other DNA
ccctgggtggaagtggc

SEQ ID NO: 154471 - DNA, 17 bp, synthetic construct
  source 1..17: mol_type = other DNA
cccctgggtggaagtgg

SEQ ID NO: 154472 - DNA, 17 bp, synthetic construct
  source 1..17: mol_type = other DNA
tcccctgggtggaagtg

SEQ ID NO: 154473 - DNA, 17 bp, synthetic construct
  source 1..17: mol_type = other DNA
ctcccctgggtggaagt

SEQ ID NO: 154474 - DNA, 17 bp, synthetic construct
  source 1..17: mol_type = other DNA
cctcccctgggtggaag

SEQ ID NO: 154475 - DNA, 17 bp, synthetic construct
  source 1..17: mol_type = other DNA
gcctcccctgggtggaa

SEQ ID NO: 154476 - DNA, 17 bp, synthetic construct
  source 1..17: mol_type = other DNA
ggcctcccctgggtgga

SEQ ID NO: 154477 - DNA, 17 bp, synthetic construct
  source 1..17: mol_type = other DNA
gggcctcccctgggtgg

SEQ ID NO: 154478 - DNA, 17 bp, synthetic construct
  source 1..17: mol_type = other DNA
ggggcctcccctgggtg

SEQ ID NO: 154479 - DNA, 17 bp, synthetic construct
  source 1..17: mol_type = other DNA
gggggcctcccctgggt

SEQ ID NO: 154480 - DNA, 17 bp, synthetic construct
  source 1..17: mol_type = other DNA
tgggggcctcccctggg

SEQ ID NO: 154481 - DNA, 17 bp, synthetic construct
  source 1..17: mol_type = other DNA
gtgggggcctcccctgg

SEQ ID NO: 154482 - DNA, 17 bp, synthetic construct
  source 1..17: mol_type = other DNA
cgtgggggcctcccctg

SEQ ID NO: 154483 - DNA, 17 bp, synthetic construct
  source 1..17: mol_type = other DNA
tcgtgggggcctcccct

SEQ ID NO: 154484 - DNA, 17 bp, synthetic construct
  source 1..17: mol_type = other DNA
atcgtgggggcctcccc

SEQ ID NO: 154485 - DNA, 17 bp, synthetic construct
  source 1..17: mol_type = other DNA
catcgtgggggcctccc

SEQ ID NO: 154486 - DNA, 17 bp, synthetic construct
  source 1..17: mol_type = other DNA
ccatcgtgggggcctcc

SEQ ID NO: 154487 - DNA, 17 bp, synthetic construct
  source 1..17: mol_type = other DNA
accatcgtgggggcctc

SEQ ID NO: 154488 - DNA, 17 bp, synthetic construct
  source 1..17: mol_type = other DNA
gaccatcgtgggggcct

SEQ ID NO: 154489 - DNA, 17 bp, synthetic construct
  source 1..17: mol_type = other DNA
tgaccatcgtgggggcc

SEQ ID NO: 154490 - DNA, 17 bp, synthetic construct
  source 1..17: mol_type = other DNA
atgaccatcgtgggggc

SEQ ID NO: 154491 - DNA, 17 bp, synthetic construct
  source 1..17: mol_type = other DNA
tatgaccatcgtggggg

SEQ ID NO: 154492 - DNA, 17 bp, synthetic construct
  source 1..17: mol_type = other DNA
ctatgaccatcgtgggg

SEQ ID NO: 154493 - DNA, 17 bp, synthetic construct
  source 1..17: mol_type = other DNA
tctatgaccatcgtggg

SEQ ID NO: 154494 - DNA, 17 bp, synthetic construct
  source 1..17: mol_type = other DNA
ctctatgaccatcgtgg

SEQ ID NO: 154495 - DNA, 17 bp, synthetic construct
  source 1..17: mol_type = other DNA
cctctatgaccatcgtg

SEQ ID NO: 154496 - DNA, 17 bp, synthetic construct
  source 1..17: mol_type = other DNA
ccctctatgaccatcgt

SEQ ID NO: 154497 - DNA, 17 bp, synthetic construct
  source 1..17: mol_type = other DNA
cccctctatgaccatcg

SEQ ID NO: 154498 - DNA, 17 bp, synthetic construct
  source 1..17: mol_type = other DNA
acccctctatgaccatc

SEQ ID NO: 154499 - DNA, 17 bp, synthetic construct
  source 1..17: mol_type = other DNA
cacccctctatgaccat

SEQ ID NO: 154500 - DNA, 17 bp, synthetic construct
  source 1..17: mol_type = other DNA
ccacccctctatgacca

SEQ ID NO: 154501 - DNA, 17 bp, synthetic construct
  source 1..17: mol_type = other DNA
tccacccctctatgacc

SEQ ID NO: 154502 - DNA, 17 bp, synthetic construct
  source 1..17: mol_type = other DNA
atccacccctctatgac

SEQ ID NO: 154503 - DNA, 17 bp, synthetic construct
  source 1..17: mol_type = other DNA
catccacccctctatga

SEQ ID NO: 154504 - DNA, 17 bp, synthetic construct
  source 1..17: mol_type = other DNA
acatccacccctctatg

SEQ ID NO: 154505 - DNA, 17 bp, synthetic construct
  source 1..17: mol_type = other DNA
gacatccacccctctat

SEQ ID NO: 154506 - DNA, 17 bp, synthetic construct
  source 1..17: mol_type = other DNA
ggacatccacccctcta

SEQ ID NO: 154507 - DNA, 17 bp, synthetic construct
  source 1..17: mol_type = other DNA
gggacatccacccctct

SEQ ID NO: 154508 - DNA, 17 bp, synthetic construct
  source 1..17: mol_type = other DNA
agggacatccacccctc

SEQ ID NO: 154509 - DNA, 17 bp, synthetic construct
  source 1..17: mol_type = other DNA
cagggacatccacccct

SEQ ID NO: 154510 - DNA, 17 bp, synthetic construct
  source 1..17: mol_type = other DNA
gcagggacatccacccc

SEQ ID NO: 154511 - DNA, 17 bp, synthetic construct
  source 1..17: mol_type = other DNA
agcagggacatccaccc

SEQ ID NO: 154512 - DNA, 17 bp, synthetic construct
  source 1..17: mol_type = other DNA
cagcagggacatccacc

SEQ ID NO: 154513 - DNA, 17 bp, synthetic construct
  source 1..17: mol_type = other DNA
tcagcagggacatccac

SEQ ID NO: 154514 - DNA, 17 bp, synthetic construct
  source 1..17: mol_type = other DNA
ctcagcagggacatcca

SEQ ID NO: 154515 - DNA, 17 bp, synthetic construct
  source 1..17: mol_type = other DNA
cctcagcagggacatcc

SEQ ID NO: 154516 - DNA, 17 bp, synthetic construct
  source 1..17: mol_type = other DNA
ccctcagcagggacatc

SEQ ID NO: 154517 - DNA, 17 bp, synthetic construct
  source 1..17: mol_type = other DNA
cccctcagcagggacat

SEQ ID NO: 154518 - DNA, 17 bp, synthetic construct
  source 1..17: mol_type = other DNA
ccccctcagcagggaca

SEQ ID NO: 154519 - DNA, 17 bp, synthetic construct
  source 1..17: mol_type = other DNA
cccccctcagcagggac

SEQ ID NO: 154520 - DNA, 17 bp, synthetic construct
  source 1..17: mol_type = other DNA
tcccccctcagcaggga

SEQ ID NO: 154521 - DNA, 17 bp, synthetic construct
  source 1..17: mol_type = other DNA
ctcccccctcagcaggg

SEQ ID NO: 154522 - DNA, 17 bp, synthetic construct
  source 1..17: mol_type = other DNA
gctcccccctcagcagg

SEQ ID NO: 154523 - DNA, 17 bp, synthetic construct
  source 1..17: mol_type = other DNA
ggctcccccctcagcag

SEQ ID NO: 154524 - DNA, 17 bp, synthetic construct
  source 1..17: mol_type = other DNA
gggctcccccctcagca

SEQ ID NO: 154525 - DNA, 17 bp, synthetic construct
  source 1..17: mol_type = other DNA
agggctcccccctcagc

SEQ ID NO: 154526 - DNA, 17 bp, synthetic construct
  source 1..17: mol_type = other DNA
cagggctcccccctcag

SEQ ID NO: 154527 - DNA, 17 bp, synthetic construct
  source 1..17: mol_type = other DNA
ccagggctcccccctca

SEQ ID NO: 154528 - DNA, 17 bp, synthetic construct
  source 1..17: mol_type = other DNA
cccagggctcccccctc

SEQ ID NO: 154529 - DNA, 17 bp, synthetic construct
  source 1..17: mol_type = other DNA
acccagggctcccccct

SEQ ID NO: 154530 - DNA, 17 bp, synthetic construct
  source 1..17: mol_type = other DNA
gacccagggctcccccc

SEQ ID NO: 154531 - DNA, 17 bp, synthetic construct
  source 1..17: mol_type = other DNA
ggacccagggctccccc

SEQ ID NO: 154532 - DNA, 17 bp, synthetic construct
  source 1..17: mol_type = other DNA
gggacccagggctcccc

SEQ ID NO: 154533 - DNA, 17 bp, synthetic construct
  source 1..17: mol_type = other DNA
ggggacccagggctccc

SEQ ID NO: 154534 - DNA, 17 bp, synthetic construct
  source 1..17: mol_type = other DNA
tggggacccagggctcc

SEQ ID NO: 154535 - DNA, 17 bp, synthetic construct
  source 1..17: mol_type = other DNA
atggggacccagggctc

SEQ ID NO: 154536 - DNA, 17 bp, synthetic construct
  source 1..17: mol_type = other DNA
catggggacccagggct

SEQ ID NO: 154537 - DNA, 17 bp, synthetic construct
  source 1..17: mol_type = other DNA
tcatggggacccagggc

SEQ ID NO: 154538 - DNA, 17 bp, synthetic construct
  source 1..17: mol_type = other DNA
atcatggggacccaggg

SEQ ID NO: 154539 - DNA, 17 bp, synthetic construct
  source 1..17: mol_type = other DNA
catcatggggacccagg

SEQ ID NO: 154540 - DNA, 17 bp, synthetic construct
  source 1..17: mol_type = other DNA
ccatcatggggacccag

SEQ ID NO: 154541 - DNA, 17 bp, synthetic construct
  source 1..17: mol_type = other DNA
accatcatggggaccca

SEQ ID NO: 154542 - DNA, 17 bp, synthetic construct
  source 1..17: mol_type = other DNA
gaccatcatggggaccc

SEQ ID NO: 154543 - DNA, 17 bp, synthetic construct
  source 1..17: mol_type = other DNA
tgaccatcatggggacc

SEQ ID NO: 154544 - DNA, 17 bp, synthetic construct
  source 1..17: mol_type = other DNA
atgaccatcatggggac

SEQ ID NO: 154545 - DNA, 17 bp, synthetic construct
  source 1..17: mol_type = other DNA
tatgaccatcatgggga

SEQ ID NO: 154546 - DNA, 17 bp, synthetic construct
  source 1..17: mol_type = other DNA
ctatgaccatcatgggg

SEQ ID NO: 154547 - DNA, 17 bp, synthetic construct
  source 1..17: mol_type = other DNA
tctatgaccatcatggg

SEQ ID NO: 154548 - DNA, 17 bp, synthetic construct
  source 1..17: mol_type = other DNA
ctctatgaccatcatgg

SEQ ID NO: 154549 - DNA, 17 bp, synthetic construct
  source 1..17: mol_type = other DNA
cctctatgaccatcatg

SEQ ID NO: 154550 - DNA, 17 bp, synthetic construct
  source 1..17: mol_type = other DNA
ccctctatgaccatcat

SEQ ID NO: 154551 - DNA, 17 bp, synthetic construct
  source 1..17: mol_type = other DNA
tccctctatgaccatca

SEQ ID NO: 154552 - DNA, 17 bp, synthetic construct
  source 1..17: mol_type = other DNA
atccctctatgaccatc

SEQ ID NO: 154553 - DNA, 17 bp, synthetic construct
  source 1..17: mol_type = other DNA
catccctctatgaccat

SEQ ID NO: 154554 - DNA, 17 bp, synthetic construct
  source 1..17: mol_type = other DNA
ccatccctctatgacca

SEQ ID NO: 154555 - DNA, 17 bp, synthetic construct
  source 1..17: mol_type = other DNA
gccatccctctatgacc

SEQ ID NO: 154556 - DNA, 17 bp, synthetic construct
  source 1..17: mol_type = other DNA
agccatccctctatgac

SEQ ID NO: 154557 - DNA, 17 bp, synthetic construct
  source 1..17: mol_type = other DNA
gagccatccctctatga

SEQ ID NO: 154558 - DNA, 17 bp, synthetic construct
  source 1..17: mol_type = other DNA
agagccatccctctatg

SEQ ID NO: 154559 - DNA, 17 bp, synthetic construct
  source 1..17: mol_type = other DNA
gagagccatccctctat

SEQ ID NO: 154560 - DNA, 17 bp, synthetic construct
  source 1..17: mol_type = other DNA
ggagagccatccctcta

SEQ ID NO: 154561 - DNA, 17 bp, synthetic construct
  source 1..17: mol_type = other DNA
gggagagccatccctct

SEQ ID NO: 154562 - DNA, 17 bp, synthetic construct
  source 1..17: mol_type = other DNA
agggagagccatccctc

SEQ ID NO: 154563 - DNA, 17 bp, synthetic construct
  source 1..17: mol_type = other DNA
cagggagagccatccct

SEQ ID NO: 154564 - DNA, 17 bp, synthetic construct
  source 1..17: mol_type = other DNA
gcagggagagccatccc

SEQ ID NO: 154565 - DNA, 17 bp, synthetic construct
  source 1..17: mol_type = other DNA
agcagggagagccatcc

SEQ ID NO: 154566 - DNA, 17 bp, synthetic construct
  source 1..17: mol_type = other DNA
cagcagggagagccatc

SEQ ID NO: 154567 - DNA, 17 bp, synthetic construct
  source 1..17: mol_type = other DNA
tcagcagggagagccat

SEQ ID NO: 154568 - DNA, 17 bp, synthetic construct
  source 1..17: mol_type = other DNA
ctcagcagggagagcca

SEQ ID NO: 154569 - DNA, 17 bp, synthetic construct
  source 1..17: mol_type = other DNA
gctcagcagggagagcc

SEQ ID NO: 154570 - DNA, 17 bp, synthetic construct
  source 1..17: mol_type = other DNA
cgctcagcagggagagc

SEQ ID NO: 154571 - DNA, 17 bp, synthetic construct
  source 1..17: mol_type = other DNA
ccgctcagcagggagag

SEQ ID NO: 154572 - DNA, 17 bp, synthetic construct
  source 1..17: mol_type = other DNA
gccgctcagcagggaga

SEQ ID NO: 154573 - DNA, 17 bp, synthetic construct
  source 1..17: mol_type = other DNA
tgccgctcagcagggag

SEQ ID NO: 154574 - DNA, 17 bp, synthetic construct
  source 1..17: mol_type = other DNA
atgccgctcagcaggga

SEQ ID NO: 154575 - DNA, 17 bp, synthetic construct
  source 1..17: mol_type = other DNA
catgccgctcagcaggg

SEQ ID NO: 154576 - DNA, 17 bp, synthetic construct
  source 1..17: mol_type = other DNA
ccatgccgctcagcagg

SEQ ID NO: 154577 - DNA, 17 bp, synthetic construct
  source 1..17: mol_type = other DNA
cccatgccgctcagcag

SEQ ID NO: 154578 - DNA, 17 bp, synthetic construct
  source 1..17: mol_type = other DNA
ccccatgccgctcagca

SEQ ID NO: 154579 - DNA, 17 bp, synthetic construct
  source 1..17: mol_type = other DNA
gccccatgccgctcagc

SEQ ID NO: 154580 - DNA, 17 bp, synthetic construct
  source 1..17: mol_type = other DNA
ggccccatgccgctcag

SEQ ID NO: 154581 - DNA, 17 bp, synthetic construct
  source 1..17: mol_type = other DNA
tggccccatgccgctca

SEQ ID NO: 154582 - DNA, 17 bp, synthetic construct
  source 1..17: mol_type = other DNA
ttggccccatgccgctc

SEQ ID NO: 154583 - DNA, 17 bp, synthetic construct
  source 1..17: mol_type = other DNA
cttggccccatgccgct

SEQ ID NO: 154584 - DNA, 17 bp, synthetic construct
  source 1..17: mol_type = other DNA
ccttggccccatgccgc

SEQ ID NO: 154585 - DNA, 17 bp, synthetic construct
  source 1..17: mol_type = other DNA
tccttggccccatgccg

SEQ ID NO: 154586 - DNA, 17 bp, synthetic construct
  source 1..17: mol_type = other DNA
ctccttggccccatgcc

SEQ ID NO: 154587 - DNA, 17 bp, synthetic construct
  source 1..17: mol_type = other DNA
gctccttggccccatgc

SEQ ID NO: 154588 - DNA, 17 bp, synthetic construct
  source 1..17: mol_type = other DNA
ggctccttggccccatg

SEQ ID NO: 154589 - DNA, 17 bp, synthetic construct
  source 1..17: mol_type = other DNA
gggctccttggccccat

SEQ ID NO: 154590 - DNA, 17 bp, synthetic construct
  source 1..17: mol_type = other DNA
ggggctccttggcccca

SEQ ID NO: 154591 - DNA, 17 bp, synthetic construct
  source 1..17: mol_type = other DNA
gggggctccttggcccc

SEQ ID NO: 154592 - DNA, 17 bp, synthetic construct
  source 1..17: mol_type = other DNA
tgggggctccttggccc

SEQ ID NO: 154593 - DNA, 17 bp, synthetic construct
  source 1..17: mol_type = other DNA
ctgggggctccttggcc

SEQ ID NO: 154594 - DNA, 17 bp, synthetic construct
  source 1..17: mol_type = other DNA
cctgggggctccttggc

SEQ ID NO: 154595 - DNA, 17 bp, synthetic construct
  source 1..17: mol_type = other DNA
gcctgggggctccttgg

SEQ ID NO: 154596 - DNA, 17 bp, synthetic construct
  source 1..17: mol_type = other DNA
ggcctgggggctccttg

SEQ ID NO: 154597 - DNA, 17 bp, synthetic construct
  source 1..17: mol_type = other DNA
gggcctgggggctcctt

SEQ ID NO: 154598 - DNA, 17 bp, synthetic construct
  source 1..17: mol_type = other DNA
agggcctgggggctcct

SEQ ID NO: 154599 - DNA, 17 bp, synthetic construct
  source 1..17: mol_type = other DNA
cagggcctgggggctcc

SEQ ID NO: 154600 - DNA, 17 bp, synthetic construct
  source 1..17: mol_type = other DNA
tcagggcctgggggctc

SEQ ID NO: 154601 - DNA, 17 bp, synthetic construct
  source 1..17: mol_type = other DNA
ctcagggcctgggggct

SEQ ID NO: 154602 - DNA, 17 bp, synthetic construct
  source 1..17: mol_type = other DNA
tctcagggcctgggggc

SEQ ID NO: 154603 - DNA, 17 bp, synthetic construct
  source 1..17: mol_type = other DNA
gtctcagggcctggggg

SEQ ID NO: 154604 - DNA, 17 bp, synthetic construct
  source 1..17: mol_type = other DNA
tgtctcagggcctgggg

SEQ ID NO: 154605 - DNA, 17 bp, synthetic construct
  source 1..17: mol_type = other DNA
ttgtctcagggcctggg

SEQ ID NO: 154606 - DNA, 17 bp, synthetic construct
  source 1..17: mol_type = other DNA
cttgtctcagggcctgg

SEQ ID NO: 154607 - DNA, 17 bp, synthetic construct
  source 1..17: mol_type = other DNA
gcttgtctcagggcctg

SEQ ID NO: 154608 - DNA, 17 bp, synthetic construct
  source 1..17: mol_type = other DNA
agcttgtctcagggcct

SEQ ID NO: 154609 - DNA, 17 bp, synthetic construct
  source 1..17: mol_type = other DNA
cagcttgtctcagggcc

SEQ ID NO: 154610 - DNA, 17 bp, synthetic construct
  source 1..17: mol_type = other DNA
gcagcttgtctcagggc

SEQ ID NO: 154611 - DNA, 17 bp, synthetic construct
  source 1..17: mol_type = other DNA
agcagcttgtctcaggg

SEQ ID NO: 154612 - DNA, 17 bp, synthetic construct
  source 1..17: mol_type = other DNA
cagcagcttgtctcagg

SEQ ID NO: 154613 - DNA, 17 bp, synthetic construct
  source 1..17: mol_type = other DNA
ccagcagcttgtctcag

SEQ ID NO: 154614 - DNA, 17 bp, synthetic construct
  source 1..17: mol_type = other DNA
cccagcagcttgtctca

SEQ ID NO: 154615 - DNA, 17 bp, synthetic construct
  source 1..17: mol_type = other DNA
tcccagcagcttgtctc

SEQ ID NO: 154616 - DNA, 17 bp, synthetic construct
  source 1..17: mol_type = other DNA
ctcccagcagcttgtct

SEQ ID NO: 154617 - DNA, 17 bp, synthetic construct
  source 1..17: mol_type = other DNA
cctcccagcagcttgtc

SEQ ID NO: 154618 - DNA, 17 bp, synthetic construct
  source 1..17: mol_type = other DNA
acctcccagcagcttgt

SEQ ID NO: 154619 - DNA, 17 bp, synthetic construct
  source 1..17: mol_type = other DNA
cacctcccagcagcttg

SEQ ID NO: 154620 - DNA, 17 bp, synthetic construct
  source 1..17: mol_type = other DNA
tcacctcccagcagctt

SEQ ID NO: 154621 - DNA, 17 bp, synthetic construct
  source 1..17: mol_type = other DNA
gtcacctcccagcagct

SEQ ID NO: 154622 - DNA, 17 bp, synthetic construct
  source 1..17: mol_type = other DNA
ggtcacctcccagcagc

SEQ ID NO: 154623 - DNA, 17 bp, synthetic construct
  source 1..17: mol_type = other DNA
tggtcacctcccagcag

SEQ ID NO: 154624 - DNA, 17 bp, synthetic construct
  source 1..17: mol_type = other DNA
ctggtcacctcccagca

SEQ ID NO: 154625 - DNA, 17 bp, synthetic construct
  source 1..17: mol_type = other DNA
tctggtcacctcccagc

SEQ ID NO: 154626 - DNA, 17 bp, synthetic construct
  source 1..17: mol_type = other DNA
ctctggtcacctcccag

SEQ ID NO: 154627 - DNA, 17 bp, synthetic construct
  source 1..17: mol_type = other DNA
cctctggtcacctccca

SEQ ID NO: 154628 - DNA, 17 bp, synthetic construct
  source 1..17: mol_type = other DNA
acctctggtcacctccc

SEQ ID NO: 154629 - DNA, 17 bp, synthetic construct
  source 1..17: mol_type = other DNA
cacctctggtcacctcc

SEQ ID NO: 154630 - DNA, 17 bp, synthetic construct
  source 1..17: mol_type = other DNA
gcacctctggtcacctc

SEQ ID NO: 154631 - DNA, 17 bp, synthetic construct
  source 1..17: mol_type = other DNA
ggcacctctggtcacct

SEQ ID NO: 154632 - DNA, 17 bp, synthetic construct
  source 1..17: mol_type = other DNA
tggcacctctggtcacc

SEQ ID NO: 154633 - DNA, 17 bp, synthetic construct
  source 1..17: mol_type = other DNA
ttggcacctctggtcac

SEQ ID NO: 154634 - DNA, 17 bp, synthetic construct
  source 1..17: mol_type = other DNA
cttggcacctctggtca

SEQ ID NO: 154635 - DNA, 17 bp, synthetic construct
  source 1..17: mol_type = other DNA
ccttggcacctctggtc

SEQ ID NO: 154636 - DNA, 17 bp, synthetic construct
  source 1..17: mol_type = other DNA
tccttggcacctctggt

SEQ ID NO: 154637 - DNA, 17 bp, synthetic construct
  source 1..17: mol_type = other DNA
gtccttggcacctctgg

SEQ ID NO: 154638 - DNA, 17 bp, synthetic construct
  source 1..17: mol_type = other DNA
ggtccttggcacctctg

SEQ ID NO: 154639 - DNA, 17 bp, synthetic construct
  source 1..17: mol_type = other DNA
tggtccttggcacctct

SEQ ID NO: 154640 - DNA, 17 bp, synthetic construct
  source 1..17: mol_type = other DNA
gtggtccttggcacctc

SEQ ID NO: 154641 - DNA, 17 bp, synthetic construct
  source 1..17: mol_type = other DNA
ggtggtccttggcacct

SEQ ID NO: 154642 - DNA, 17 bp, synthetic construct
  source 1..17: mol_type = other DNA
aggtggtccttggcacc

SEQ ID NO: 154643 - DNA, 17 bp, synthetic construct
  source 1..17: mol_type = other DNA
gaggtggtccttggcac

SEQ ID NO: 154644 - DNA, 17 bp, synthetic construct
  source 1..17: mol_type = other DNA
ggaggtggtccttggca

SEQ ID NO: 154645 - DNA, 17 bp, synthetic construct
  source 1..17: mol_type = other DNA
gggaggtggtccttggc

SEQ ID NO: 154646 - DNA, 17 bp, synthetic construct
  source 1..17: mol_type = other DNA
ggggaggtggtccttgg

SEQ ID NO: 154647 - DNA, 17 bp, synthetic construct
  source 1..17: mol_type = other DNA
tggggaggtggtccttg

SEQ ID NO: 154648 - DNA, 17 bp, synthetic construct
  source 1..17: mol_type = other DNA
gtggggaggtggtcctt

SEQ ID NO: 154649 - DNA, 17 bp, synthetic construct
  source 1..17: mol_type = other DNA
tgtggggaggtggtcct

SEQ ID NO: 154650 - DNA, 17 bp, synthetic construct
  source 1..17: mol_type = other DNA
ctgtggggaggtggtcc

SEQ ID NO: 154651 - DNA, 17 bp, synthetic construct
  source 1..17: mol_type = other DNA
tctgtggggaggtggtc

SEQ ID NO: 154652 - DNA, 17 bp, synthetic construct
  source 1..17: mol_type = other DNA
ctctgtggggaggtggt

SEQ ID NO: 154653 - DNA, 17 bp, synthetic construct
  source 1..17: mol_type = other DNA
gctctgtggggaggtgg

SEQ ID NO: 154654 - DNA, 17 bp, synthetic construct
  source 1..17: mol_type = other DNA
ggctctgtggggaggtg

SEQ ID NO: 154655 - DNA, 17 bp, synthetic construct
  source 1..17: mol_type = other DNA
tggctctgtggggaggt

SEQ ID NO: 154656 - DNA, 17 bp, synthetic construct
  source 1..17: mol_type = other DNA
gtggctctgtggggagg

SEQ ID NO: 154657 - DNA, 17 bp, synthetic construct
  source 1..17: mol_type = other DNA
tgtggctctgtggggag

SEQ ID NO: 154658 - DNA, 17 bp, synthetic construct
  source 1..17: mol_type = other DNA
atgtggctctgtgggga

SEQ ID NO: 154659 - DNA, 17 bp, synthetic construct
  source 1..17: mol_type = other DNA
gatgtggctctgtgggg

SEQ ID NO: 154660 - DNA, 17 bp, synthetic construct
  source 1..17: mol_type = other DNA
ggatgtggctctgtggg

SEQ ID NO: 154661 - DNA, 17 bp, synthetic construct
  source 1..17: mol_type = other DNA
gggatgtggctctgtgg

SEQ ID NO: 154662 - DNA, 17 bp, synthetic construct
  source 1..17: mol_type = other DNA
ggggatgtggctctgtg

SEQ ID NO: 154663 - DNA, 17 bp, synthetic construct
  source 1..17: mol_type = other DNA
gggggatgtggctctgt

SEQ ID NO: 154664 - DNA, 17 bp, synthetic construct
  source 1..17: mol_type = other DNA
tgggggatgtggctctg

SEQ ID NO: 154665 - DNA, 17 bp, synthetic construct
  source 1..17: mol_type = other DNA
gtgggggatgtggctct

SEQ ID NO: 154666 - DNA, 17 bp, synthetic construct
  source 1..17: mol_type = other DNA
tgtgggggatgtggctc

SEQ ID NO: 154667 - DNA, 17 bp, synthetic construct
  source 1..17: mol_type = other DNA
atgtgggggatgtggct

SEQ ID NO: 154668 - DNA, 17 bp, synthetic construct
  source 1..17: mol_type = other DNA
catgtgggggatgtggc

SEQ ID NO: 154669 - DNA, 17 bp, synthetic construct
  source 1..17: mol_type = other DNA
ccatgtgggggatgtgg

SEQ ID NO: 154670 - DNA, 17 bp, synthetic construct
  source 1..17: mol_type = other DNA
cccatgtgggggatgtg

SEQ ID NO: 154671 - DNA, 17 bp, synthetic construct
  source 1..17: mol_type = other DNA
gcccatgtgggggatgt

SEQ ID NO: 154672 - DNA, 17 bp, synthetic construct
  source 1..17: mol_type = other DNA
tgcccatgtgggggatg

SEQ ID NO: 154673 - DNA, 17 bp, synthetic construct
  source 1..17: mol_type = other DNA
atgcccatgtgggggat

SEQ ID NO: 154674 - DNA, 17 bp, synthetic construct
  source 1..17: mol_type = other DNA
gatgcccatgtggggga

SEQ ID NO: 154675 - DNA, 17 bp, synthetic construct
  source 1..17: mol_type = other DNA
ggatgcccatgtggggg

SEQ ID NO: 154676 - DNA, 17 bp, synthetic construct
  source 1..17: mol_type = other DNA
gggatgcccatgtgggg

SEQ ID NO: 154677 - DNA, 17 bp, synthetic construct
  source 1..17: mol_type = other DNA
ggggatgcccatgtggg

SEQ ID NO: 154678 - DNA, 17 bp, synthetic construct
  source 1..17: mol_type = other DNA
tggggatgcccatgtgg

SEQ ID NO: 154679 - DNA, 17 bp, synthetic construct
  source 1..17: mol_type = other DNA
ctggggatgcccatgtg

SEQ ID NO: 154680 - DNA, 17 bp, synthetic construct
  source 1..17: mol_type = other DNA
gctggggatgcccatgt

SEQ ID NO: 154681 - DNA, 17 bp, synthetic construct
  source 1..17: mol_type = other DNA
tgctggggatgcccatg

SEQ ID NO: 154682 - DNA, 17 bp, synthetic construct
  source 1..17: mol_type = other DNA
gtgctggggatgcccat

SEQ ID NO: 154683 - DNA, 17 bp, synthetic construct
  source 1..17: mol_type = other DNA
tgtgctggggatgccca

SEQ ID NO: 154684 - DNA, 17 bp, synthetic construct
  source 1..17: mol_type = other DNA
gtgtgctggggatgccc

SEQ ID NO: 154685 - DNA, 17 bp, synthetic construct
  source 1..17: mol_type = other DNA
agtgtgctggggatgcc

SEQ ID NO: 154686 - DNA, 17 bp, synthetic construct
  source 1..17: mol_type = other DNA
aagtgtgctggggatgc

SEQ ID NO: 154687 - DNA, 17 bp, synthetic construct
  source 1..17: mol_type = other DNA
gaagtgtgctggggatg

SEQ ID NO: 154688 - DNA, 17 bp, synthetic construct
  source 1..17: mol_type = other DNA
agaagtgtgctggggat

SEQ ID NO: 154689 - DNA, 17 bp, synthetic construct
  source 1..17: mol_type = other DNA
cagaagtgtgctgggga

SEQ ID NO: 154690 - DNA, 17 bp, synthetic construct
  source 1..17: mol_type = other DNA
ccagaagtgtgctgggg

SEQ ID NO: 154691 - DNA, 17 bp, synthetic construct
  source 1..17: mol_type = other DNA
cccagaagtgtgctggg

SEQ ID NO: 154692 - DNA, 17 bp, synthetic construct
  source 1..17: mol_type = other DNA
ccccagaagtgtgctgg

SEQ ID NO: 154693 - DNA, 17 bp, synthetic construct
  source 1..17: mol_type = other DNA
cccccagaagtgtgctg

SEQ ID NO: 154694 - DNA, 17 bp, synthetic construct
  source 1..17: mol_type = other DNA
ccccccagaagtgtgct

SEQ ID NO: 154695 - DNA, 17 bp, synthetic construct
  source 1..17: mol_type = other DNA
gccccccagaagtgtgc

SEQ ID NO: 154696 - DNA, 17 bp, synthetic construct
  source 1..17: mol_type = other DNA
tgccccccagaagtgtg

SEQ ID NO: 154697 - DNA, 17 bp, synthetic construct
  source 1..17: mol_type = other DNA
gtgccccccagaagtgt

SEQ ID NO: 154698 - DNA, 17 bp, synthetic construct
  source 1..17: mol_type = other DNA
ggtgccccccagaagtg

SEQ ID NO: 154699 - DNA, 17 bp, synthetic construct
  source 1..17: mol_type = other DNA
gggtgccccccagaagt

SEQ ID NO: 154700 - DNA, 17 bp, synthetic construct
  source 1..17: mol_type = other DNA
ggggtgccccccagaag

SEQ ID NO: 154701 - DNA, 17 bp, synthetic construct
  source 1..17: mol_type = other DNA
tggggtgccccccagaa

SEQ ID NO: 154702 - DNA, 17 bp, synthetic construct
  source 1..17: mol_type = other DNA
gtggggtgccccccaga

SEQ ID NO: 154703 - DNA, 17 bp, synthetic construct
  source 1..17: mol_type = other DNA
tgtggggtgccccccag

SEQ ID NO: 154704 - DNA, 17 bp, synthetic construct
  source 1..17: mol_type = other DNA
atgtggggtgcccccca

SEQ ID NO: 154705 - DNA, 17 bp, synthetic construct
  source 1..17: mol_type = other DNA
gatgtggggtgcccccc

SEQ ID NO: 154706 - DNA, 17 bp, synthetic construct
  source 1..17: mol_type = other DNA
tgatgtggggtgccccc

SEQ ID NO: 154707 - DNA, 17 bp, synthetic construct
  source 1..17: mol_type = other DNA
atgatgtggggtgcccc

SEQ ID NO: 154708 - DNA, 17 bp, synthetic construct
  source 1..17: mol_type = other DNA
gatgatgtggggtgccc

SEQ ID NO: 154709 - DNA, 17 bp, synthetic construct
  source 1..17: mol_type = other DNA
cgatgatgtggggtgcc

SEQ ID NO: 154710 - DNA, 17 bp, synthetic construct
  source 1..17: mol_type = other DNA
tcgatgatgtggggtgc

SEQ ID NO: 154711 - DNA, 17 bp, synthetic construct
  source 1..17: mol_type = other DNA
ctcgatgatgtggggtg

SEQ ID NO: 154712 - DNA, 17 bp, synthetic construct
  source 1..17: mol_type = other DNA
gctcgatgatgtggggt

SEQ ID NO: 154713 - DNA, 17 bp, synthetic construct
  source 1..17: mol_type = other DNA
ggctcgatgatgtgggg

SEQ ID NO: 154714 - DNA, 17 bp, synthetic construct
  source 1..17: mol_type = other DNA
tggctcgatgatgtggg

SEQ ID NO: 154715 - DNA, 17 bp, synthetic construct
  source 1..17: mol_type = other DNA
ctggctcgatgatgtgg

SEQ ID NO: 154716 - DNA, 17 bp, synthetic construct
  source 1..17: mol_type = other DNA
cctggctcgatgatgtg

SEQ ID NO: 154717 - DNA, 17 bp, synthetic construct
  source 1..17: mol_type = other DNA
gcctggctcgatgatgt

SEQ ID NO: 154718 - DNA, 17 bp, synthetic construct
  source 1..17: mol_type = other DNA
ggcctggctcgatgatg

SEQ ID NO: 154719 - DNA, 17 bp, synthetic construct
  source 1..17: mol_type = other DNA
gggcctggctcgatgat

SEQ ID NO: 154720 - DNA, 17 bp, synthetic construct
  source 1..17: mol_type = other DNA
tgggcctggctcgatga

SEQ ID NO: 154721 - DNA, 17 bp, synthetic construct
  source 1..17: mol_type = other DNA
ttgggcctggctcgatg

SEQ ID NO: 154722 - DNA, 17 bp, synthetic construct
  source 1..17: mol_type = other DNA
attgggcctggctcgat

SEQ ID NO: 154723 - DNA, 17 bp, synthetic construct
  source 1..17: mol_type = other DNA
cattgggcctggctcga

SEQ ID NO: 154724 - DNA, 17 bp, synthetic construct
  source 1..17: mol_type = other DNA
gcattgggcctggctcg

SEQ ID NO: 154725 - DNA, 17 bp, synthetic construct
  source 1..17: mol_type = other DNA
tgcattgggcctggctc

SEQ ID NO: 154726 - DNA, 17 bp, synthetic construct
  source 1..17: mol_type = other DNA
gtgcattgggcctggct

SEQ ID NO: 154727 - DNA, 17 bp, synthetic construct
  source 1..17: mol_type = other DNA
cgtgcattgggcctggc

SEQ ID NO: 154728 - DNA, 17 bp, synthetic construct
  source 1..17: mol_type = other DNA
gcgtgcattgggcctgg

SEQ ID NO: 154729 - DNA, 17 bp, synthetic construct
  source 1..17: mol_type = other DNA
cgcgtgcattgggcctg

SEQ ID NO: 154730 - DNA, 17 bp, synthetic construct
  source 1..17: mol_type = other DNA
acgcgtgcattgggcct

SEQ ID NO: 154731 - DNA, 17 bp, synthetic construct
  source 1..17: mol_type = other DNA
cacgcgtgcattgggcc

SEQ ID NO: 154732 - DNA, 17 bp, synthetic construct
  source 1..17: mol_type = other DNA
ccacgcgtgcattgggc

SEQ ID NO: 154733 - DNA, 17 bp, synthetic construct
  source 1..17: mol_type = other DNA
cccacgcgtgcattggg

SEQ ID NO: 154734 - DNA, 17 bp, synthetic construct
  source 1..17: mol_type = other DNA
acccacgcgtgcattgg

SEQ ID NO: 154735 - DNA, 17 bp, synthetic construct
  source 1..17: mol_type = other DNA
gacccacgcgtgcattg

SEQ ID NO: 154736 - DNA, 17 bp, synthetic construct
  source 1..17: mol_type = other DNA
ggacccacgcgtgcatt

SEQ ID NO: 154737 - DNA, 17 bp, synthetic construct
  source 1..17: mol_type = other DNA
aggacccacgcgtgcat

SEQ ID NO: 154738 - DNA, 17 bp, synthetic construct
  source 1..17: mol_type = other DNA
aaggacccacgcgtgca

SEQ ID NO: 154739 - DNA, 17 bp, synthetic construct
  source 1..17: mol_type = other DNA
gaaggacccacgcgtgc

SEQ ID NO: 154740 - DNA, 17 bp, synthetic construct
  source 1..17: mol_type = other DNA
agaaggacccacgcgtg

SEQ ID NO: 154741 - DNA, 17 bp, synthetic construct
  source 1..17: mol_type = other DNA
gagaaggacccacgcgt

SEQ ID NO: 154742 - DNA, 17 bp, synthetic construct
  source 1..17: mol_type = other DNA
ggagaaggacccacgcg

SEQ ID NO: 154743 - DNA, 17 bp, synthetic construct
  source 1..17: mol_type = other DNA
gggagaaggacccacgc

SEQ ID NO: 154744 - DNA, 17 bp, synthetic construct
  source 1..17: mol_type = other DNA
ggggagaaggacccacg

SEQ ID NO: 154745 - DNA, 17 bp, synthetic construct
  source 1..17: mol_type = other DNA
tggggagaaggacccac

SEQ ID NO: 154746 - DNA, 17 bp, synthetic construct
  source 1..17: mol_type = other DNA
ctggggagaaggaccca

SEQ ID NO: 154747 - DNA, 17 bp, synthetic construct
  source 1..17: mol_type = other DNA
tctggggagaaggaccc

SEQ ID NO: 154748 - DNA, 17 bp, synthetic construct
  source 1..17: mol_type = other DNA
ttctggggagaaggacc

SEQ ID NO: 154749 - DNA, 17 bp, synthetic construct
  source 1..17: mol_type = other DNA
tttctggggagaaggac

SEQ ID NO: 154750 - DNA, 17 bp, synthetic construct
  source 1..17: mol_type = other DNA
atttctggggagaagga

SEQ ID NO: 154751 - DNA, 17 bp, synthetic construct
  source 1..17: mol_type = other DNA
catttctggggagaagg

SEQ ID NO: 154752 - DNA, 17 bp, synthetic construct
  source 1..17: mol_type = other DNA
acatttctggggagaag

SEQ ID NO: 154753 - DNA, 17 bp, synthetic construct
  source 1..17: mol_type = other DNA
cacatttctggggagaa

SEQ ID NO: 154754 - DNA, 17 bp, synthetic construct
  source 1..17: mol_type = other DNA
gcacatttctggggaga

SEQ ID NO: 154755 - DNA, 17 bp, synthetic construct
  source 1..17: mol_type = other DNA
ggcacatttctggggag

SEQ ID NO: 154756 - DNA, 17 bp, synthetic construct
  source 1..17: mol_type = other DNA
cggcacatttctgggga

SEQ ID NO: 154757 - DNA, 17 bp, synthetic construct
  source 1..17: mol_type = other DNA
tcggcacatttctgggg

SEQ ID NO: 154758 - DNA, 17 bp, synthetic construct
  source 1..17: mol_type = other DNA
gtcggcacatttctggg

SEQ ID NO: 154759 - DNA, 17 bp, synthetic construct
  source 1..17: mol_type = other DNA
tgtcggcacatttctgg

SEQ ID NO: 154760 - DNA, 17 bp, synthetic construct
  source 1..17: mol_type = other DNA
ctgtcggcacatttctg

SEQ ID NO: 154761 - DNA, 17 bp, synthetic construct
  source 1..17: mol_type = other DNA
gctgtcggcacatttct

SEQ ID NO: 154762 - DNA, 17 bp, synthetic construct
  source 1..17: mol_type = other DNA
tgctgtcggcacatttc

SEQ ID NO: 154763 - DNA, 17 bp, synthetic construct
  source 1..17: mol_type = other DNA
ctgctgtcggcacattt

SEQ ID NO: 154764 - DNA, 17 bp, synthetic construct
  source 1..17: mol_type = other DNA
gctgctgtcggcacatt

SEQ ID NO: 154765 - DNA, 17 bp, synthetic construct
  source 1..17: mol_type = other DNA
agctgctgtcggcacat

SEQ ID NO: 154766 - DNA, 17 bp, synthetic construct
  source 1..17: mol_type = other DNA
aagctgctgtcggcaca

SEQ ID NO: 154767 - DNA, 17 bp, synthetic construct
  source 1..17: mol_type = other DNA
gaagctgctgtcggcac

SEQ ID NO: 154768 - DNA, 17 bp, synthetic construct
  source 1..17: mol_type = other DNA
tgaagctgctgtcggca

SEQ ID NO: 154769 - DNA, 17 bp, synthetic construct
  source 1..17: mol_type = other DNA
gtgaagctgctgtcggc

SEQ ID NO: 154770 - DNA, 17 bp, synthetic construct
  source 1..17: mol_type = other DNA
ggtgaagctgctgtcgg

SEQ ID NO: 154771 - DNA, 17 bp, synthetic construct
  source 1..17: mol_type = other DNA
cggtgaagctgctgtcg

SEQ ID NO: 154772 - DNA, 17 bp, synthetic construct
  source 1..17: mol_type = other DNA
acggtgaagctgctgtc

SEQ ID NO: 154773 - DNA, 17 bp, synthetic construct
  source 1..17: mol_type = other DNA
cacggtgaagctgctgt

SEQ ID NO: 154774 - DNA, 17 bp, synthetic construct
  source 1..17: mol_type = other DNA
gcacggtgaagctgctg

SEQ ID NO: 154775 - DNA, 17 bp, synthetic construct
  source 1..17: mol_type = other DNA
agcacggtgaagctgct

SEQ ID NO: 154776 - DNA, 17 bp, synthetic construct
  source 1..17: mol_type = other DNA
cagcacggtgaagctgc

SEQ ID NO: 154777 - DNA, 17 bp, synthetic construct
  source 1..17: mol_type = other DNA
ccagcacggtgaagctg

SEQ ID NO: 154778 - DNA, 17 bp, synthetic construct
  source 1..17: mol_type = other DNA
gccagcacggtgaagct

SEQ ID NO: 154779 - DNA, 17 bp, synthetic construct
  source 1..17: mol_type = other DNA
agccagcacggtgaagc

SEQ ID NO: 154780 - DNA, 17 bp, synthetic construct
  source 1..17: mol_type = other DNA
cagccagcacggtgaag

SEQ ID NO: 154781 - DNA, 17 bp, synthetic construct
  source 1..17: mol_type = other DNA
tcagccagcacggtgaa

SEQ ID NO: 154782 - DNA, 17 bp, synthetic construct
  source 1..17: mol_type = other DNA
ctcagccagcacggtga

SEQ ID NO: 154783 - DNA, 17 bp, synthetic construct
  source 1..17: mol_type = other DNA
gctcagccagcacggtg

SEQ ID NO: 154784 - DNA, 17 bp, synthetic construct
  source 1..17: mol_type = other DNA
agctcagccagcacggt

SEQ ID NO: 154785 - DNA, 17 bp, synthetic construct
  source 1..17: mol_type = other DNA
cagctcagccagcacgg

SEQ ID NO: 154786 - DNA, 17 bp, synthetic construct
  source 1..17: mol_type = other DNA
gcagctcagccagcacg

SEQ ID NO: 154787 - DNA, 17 bp, synthetic construct
  source 1..17: mol_type = other DNA
cgcagctcagccagcac

SEQ ID NO: 154788 - DNA, 17 bp, synthetic construct
  source 1..17: mol_type = other DNA
ccgcagctcagccagca

SEQ ID NO: 154789 - DNA, 17 bp, synthetic construct
  source 1..17: mol_type = other DNA
tccgcagctcagccagc

SEQ ID NO: 154790 - DNA, 17 bp, synthetic construct
  source 1..17: mol_type = other DNA
ttccgcagctcagccag

SEQ ID NO: 154791 - DNA, 17 bp, synthetic construct
  source 1..17: mol_type = other DNA
cttccgcagctcagcca

SEQ ID NO: 154792 - DNA, 17 bp, synthetic construct
  source 1..17: mol_type = other DNA
acttccgcagctcagcc

SEQ ID NO: 154793 - DNA, 17 bp, synthetic construct
  source 1..17: mol_type = other DNA
cacttccgcagctcagc

SEQ ID NO: 154794 - DNA, 17 bp, synthetic construct
  source 1..17: mol_type = other DNA
gcacttccgcagctcag

SEQ ID NO: 154795 - DNA, 17 bp, synthetic construct
  source 1..17: mol_type = other DNA
cgcacttccgcagctca

SEQ ID NO: 154796 - DNA, 17 bp, synthetic construct
  source 1..17: mol_type = other DNA
ccgcacttccgcagctc

SEQ ID NO: 154797 - DNA, 17 bp, synthetic construct
  source 1..17: mol_type = other DNA
gccgcacttccgcagct

SEQ ID NO: 154798 - DNA, 17 bp, synthetic construct
  source 1..17: mol_type = other DNA
ggccgcacttccgcagc

SEQ ID NO: 154799 - DNA, 17 bp, synthetic construct
  source 1..17: mol_type = other DNA
aggccgcacttccgcag

SEQ ID NO: 154800 - DNA, 17 bp, synthetic construct
  source 1..17: mol_type = other DNA
caggccgcacttccgca

SEQ ID NO: 154801 - DNA, 17 bp, synthetic construct
  source 1..17: mol_type = other DNA
tcaggccgcacttccgc

SEQ ID NO: 154802 - DNA, 17 bp, synthetic construct
  source 1..17: mol_type = other DNA
gtcaggccgcacttccg

SEQ ID NO: 154803 - DNA, 17 bp, synthetic construct
  source 1..17: mol_type = other DNA
cgtcaggccgcacttcc

SEQ ID NO: 154804 - DNA, 17 bp, synthetic construct
  source 1..17: mol_type = other DNA
ccgtcaggccgcacttc

SEQ ID NO: 154805 - DNA, 17 bp, synthetic construct
  source 1..17: mol_type = other DNA
tccgtcaggccgcactt

SEQ ID NO: 154806 - DNA, 17 bp, synthetic construct
  source 1..17: mol_type = other DNA
gtccgtcaggccgcact

SEQ ID NO: 154807 - DNA, 17 bp, synthetic construct
  source 1..17: mol_type = other DNA
tgtccgtcaggccgcac

SEQ ID NO: 154808 - DNA, 17 bp, synthetic construct
  source 1..17: mol_type = other DNA
ttgtccgtcaggccgca

SEQ ID NO: 154809 - DNA, 17 bp, synthetic construct
  source 1..17: mol_type = other DNA
gttgtccgtcaggccgc

SEQ ID NO: 154810 - DNA, 17 bp, synthetic construct
  source 1..17: mol_type = other DNA
cgttgtccgtcaggccg

SEQ ID NO: 154811 - DNA, 17 bp, synthetic construct
  source 1..17: mol_type = other DNA
tcgttgtccgtcaggcc

SEQ ID NO: 154812 - DNA, 17 bp, synthetic construct
  source 1..17: mol_type = other DNA
ctcgttgtccgtcaggc

SEQ ID NO: 154813 - DNA, 17 bp, synthetic construct
  source 1..17: mol_type = other DNA
tctcgttgtccgtcagg

SEQ ID NO: 154814 - DNA, 17 bp, synthetic construct
  source 1..17: mol_type = other DNA
ttctcgttgtccgtcag

SEQ ID NO: 154815 - DNA, 17 bp, synthetic construct
  source 1..17: mol_type = other DNA
gttctcgttgtccgtca

SEQ ID NO: 154816 - DNA, 17 bp, synthetic construct
  source 1..17: mol_type = other DNA
agttctcgttgtccgtc

SEQ ID NO: 154817 - DNA, 17 bp, synthetic construct
  source 1..17: mol_type = other DNA
cagttctcgttgtccgt

SEQ ID NO: 154818 - DNA, 17 bp, synthetic construct
  source 1..17: mol_type = other DNA
gcagttctcgttgtccg

SEQ ID NO: 154819 - DNA, 17 bp, synthetic construct
  source 1..17: mol_type = other DNA
ggcagttctcgttgtcc

SEQ ID NO: 154820 - DNA, 17 bp, synthetic construct
  source 1..17: mol_type = other DNA
aggcagttctcgttgtc

SEQ ID NO: 154821 - DNA, 17 bp, synthetic construct
  source 1..17: mol_type = other DNA
caggcagttctcgttgt

SEQ ID NO: 154822 - DNA, 17 bp, synthetic construct
  source 1..17: mol_type = other DNA
tcaggcagttctcgttg

SEQ ID NO: 154823 - DNA, 17 bp, synthetic construct
  source 1..17: mol_type = other DNA
ttcaggcagttctcgtt

SEQ ID NO: 154824 - DNA, 17 bp, synthetic construct
  source 1..17: mol_type = other DNA
tttcaggcagttctcgt

SEQ ID NO: 154825 - DNA, 17 bp, synthetic construct
  source 1..17: mol_type = other DNA
ctttcaggcagttctcg

SEQ ID NO: 154826 - DNA, 17 bp, synthetic construct
  source 1..17: mol_type = other DNA
gctttcaggcagttctc

SEQ ID NO: 154827 - DNA, 17 bp, synthetic construct
  source 1..17: mol_type = other DNA
cgctttcaggcagttct

SEQ ID NO: 154828 - DNA, 17 bp, synthetic construct
  source 1..17: mol_type = other DNA
ccgctttcaggcagttc

SEQ ID NO: 154829 - DNA, 17 bp, synthetic construct
  source 1..17: mol_type = other DNA
accgctttcaggcagtt

SEQ ID NO: 154830 - DNA, 17 bp, synthetic construct
  source 1..17: mol_type = other DNA
caccgctttcaggcagt

SEQ ID NO: 154831 - DNA, 17 bp, synthetic construct
  source 1..17: mol_type = other DNA
tcaccgctttcaggcag

SEQ ID NO: 154832 - DNA, 17 bp, synthetic construct
  source 1..17: mol_type = other DNA
gtcaccgctttcaggca

SEQ ID NO: 154833 - DNA, 17 bp, synthetic construct
  source 1..17: mol_type = other DNA
cgtcaccgctttcaggc

SEQ ID NO: 154834 - DNA, 17 bp, synthetic construct
  source 1..17: mol_type = other DNA
gcgtcaccgctttcagg

SEQ ID NO: 154835 - DNA, 17 bp, synthetic construct
  source 1..17: mol_type = other DNA
agcgtcaccgctttcag

SEQ ID NO: 154836 - DNA, 17 bp, synthetic construct
  source 1..17: mol_type = other DNA
gagcgtcaccgctttca

SEQ ID NO: 154837 - DNA, 17 bp, synthetic construct
  source 1..17: mol_type = other DNA
tgagcgtcaccgctttc

SEQ ID NO: 154838 - DNA, 17 bp, synthetic construct
  source 1..17: mol_type = other DNA
ctgagcgtcaccgcttt

SEQ ID NO: 154839 - DNA, 17 bp, synthetic construct
  source 1..17: mol_type = other DNA
gctgagcgtcaccgctt

SEQ ID NO: 154840 - DNA, 17 bp, synthetic construct
  source 1..17: mol_type = other DNA
ggctgagcgtcaccgct

SEQ ID NO: 154841 - DNA, 17 bp, synthetic construct
  source 1..17: mol_type = other DNA
aggctgagcgtcaccgc

SEQ ID NO: 154842 - DNA, 17 bp, synthetic construct
  source 1..17: mol_type = other DNA
caggctgagcgtcaccg

SEQ ID NO: 154843 - DNA, 17 bp, synthetic construct
  source 1..17: mol_type = other DNA
ccaggctgagcgtcacc

SEQ ID NO: 154844 - DNA, 17 bp, synthetic construct
  source 1..17: mol_type = other DNA
tccaggctgagcgtcac

SEQ ID NO: 154845 - DNA, 17 bp, synthetic construct
  source 1..17: mol_type = other DNA
gtccaggctgagcgtca

SEQ ID NO: 154846 - DNA, 17 bp, synthetic construct
  source 1..17: mol_type = other DNA
cgtccaggctgagcgtc

SEQ ID NO: 154847 - DNA, 17 bp, synthetic construct
  source 1..17: mol_type = other DNA
ccgtccaggctgagcgt

SEQ ID NO: 154848 - DNA, 17 bp, synthetic construct
  source 1..17: mol_type = other DNA
gccgtccaggctgagcg

SEQ ID NO: 154849 - DNA, 17 bp, synthetic construct
  source 1..17: mol_type = other DNA
cgccgtccaggctgagc

SEQ ID NO: 154850 - DNA, 17 bp, synthetic construct
  source 1..17: mol_type = other DNA
ccgccgtccaggctgag

SEQ ID NO: 154851 - DNA, 17 bp, synthetic construct
  source 1..17: mol_type = other DNA
cccgccgtccaggctga

SEQ ID NO: 154852 - DNA, 17 bp, synthetic construct
  source 1..17: mol_type = other DNA
ccccgccgtccaggctg

SEQ ID NO: 154853 - DNA, 17 bp, synthetic construct
  source 1..17: mol_type = other DNA
tccccgccgtccaggct

SEQ ID NO: 154854 - DNA, 17 bp, synthetic construct
  source 1..17: mol_type = other DNA
gtccccgccgtccaggc

SEQ ID NO: 154855 - DNA, 17 bp, synthetic construct
  source 1..17: mol_type = other DNA
tgtccccgccgtccagg

SEQ ID NO: 154856 - DNA, 17 bp, synthetic construct
  source 1..17: mol_type = other DNA
gtgtccccgccgtccag

SEQ ID NO: 154857 - DNA, 17 bp, synthetic construct
  source 1..17: mol_type = other DNA
cgtgtccccgccgtcca

SEQ ID NO: 154858 - DNA, 17 bp, synthetic construct
  source 1..17: mol_type = other DNA
ccgtgtccccgccgtcc

SEQ ID NO: 154859 - DNA, 17 bp, synthetic construct
  source 1..17: mol_type = other DNA
accgtgtccccgccgtc

SEQ ID NO: 154860 - DNA, 17 bp, synthetic construct
  source 1..17: mol_type = other DNA
caccgtgtccccgccgt

SEQ ID NO: 154861 - DNA, 17 bp, synthetic construct
  source 1..17: mol_type = other DNA
tcaccgtgtccccgccg

SEQ ID NO: 154862 - DNA, 17 bp, synthetic construct
  source 1..17: mol_type = other DNA
ctcaccgtgtccccgcc

SEQ ID NO: 154863 - DNA, 17 bp, synthetic construct
  source 1..17: mol_type = other DNA
cctcaccgtgtccccgc

SEQ ID NO: 154864 - DNA, 17 bp, synthetic construct
  source 1..17: mol_type = other DNA
tcctcaccgtgtccccg

SEQ ID NO: 154865 - DNA, 17 bp, synthetic construct
  source 1..17: mol_type = other DNA
gtcctcaccgtgtcccc

SEQ ID NO: 154866 - DNA, 17 bp, synthetic construct
  source 1..17: mol_type = other DNA
ggtcctcaccgtgtccc

SEQ ID NO: 154867 - DNA, 17 bp, synthetic construct
  source 1..17: mol_type = other DNA
aggtcctcaccgtgtcc

SEQ ID NO: 154868 - DNA, 17 bp, synthetic construct
  source 1..17: mol_type = other DNA
caggtcctcaccgtgtc

SEQ ID NO: 154869 - DNA, 17 bp, synthetic construct
  source 1..17: mol_type = other DNA
ccaggtcctcaccgtgt

SEQ ID NO: 154870 - DNA, 17 bp, synthetic construct
  source 1..17: mol_type = other DNA
gccaggtcctcaccgtg

SEQ ID NO: 154871 - DNA, 17 bp, synthetic construct
  source 1..17: mol_type = other DNA
agccaggtcctcaccgt

SEQ ID NO: 154872 - DNA, 17 bp, synthetic construct
  source 1..17: mol_type = other DNA
cagccaggtcctcaccg

SEQ ID NO: 154873 - DNA, 17 bp, synthetic construct
  source 1..17: mol_type = other DNA
ccagccaggtcctcacc

SEQ ID NO: 154874 - DNA, 17 bp, synthetic construct
  source 1..17: mol_type = other DNA
cccagccaggtcctcac

SEQ ID NO: 154875 - DNA, 17 bp, synthetic construct
  source 1..17: mol_type = other DNA
ccccagccaggtcctca

SEQ ID NO: 154876 - DNA, 17 bp, synthetic construct
  source 1..17: mol_type = other DNA
gccccagccaggtcctc

SEQ ID NO: 154877 - DNA, 17 bp, synthetic construct
  source 1..17: mol_type = other DNA
ggccccagccaggtcct

SEQ ID NO: 154878 - DNA, 17 bp, synthetic construct
  source 1..17: mol_type = other DNA
gggccccagccaggtcc

SEQ ID NO: 154879 - DNA, 17 bp, synthetic construct
  source 1..17: mol_type = other DNA
agggccccagccaggtc

SEQ ID NO: 154880 - DNA, 17 bp, synthetic construct
  source 1..17: mol_type = other DNA
cagggccccagccaggt

SEQ ID NO: 154881 - DNA, 17 bp, synthetic construct
  source 1..17: mol_type = other DNA
ccagggccccagccagg

SEQ ID NO: 154882 - DNA, 17 bp, synthetic construct
  source 1..17: mol_type = other DNA
cccagggccccagccag

SEQ ID NO: 154883 - DNA, 17 bp, synthetic construct
  source 1..17: mol_type = other DNA
gcccagggccccagcca

SEQ ID NO: 154884 - DNA, 17 bp, synthetic construct
  source 1..17: mol_type = other DNA
agcccagggccccagcc

SEQ ID NO: 154885 - DNA, 17 bp, synthetic construct
  source 1..17: mol_type = other DNA
cagcccagggccccagc

SEQ ID NO: 154886 - DNA, 17 bp, synthetic construct
  source 1..17: mol_type = other DNA
ccagcccagggccccag

SEQ ID NO: 154887 - DNA, 17 bp, synthetic construct
  source 1..17: mol_type = other DNA
cccagcccagggcccca

SEQ ID NO: 154888 - DNA, 17 bp, synthetic construct
  source 1..17: mol_type = other DNA
tcccagcccagggcccc

SEQ ID NO: 154889 - DNA, 17 bp, synthetic construct
  source 1..17: mol_type = other DNA
gtcccagcccagggccc

SEQ ID NO: 154890 - DNA, 17 bp, synthetic construct
  source 1..17: mol_type = other DNA
tgtcccagcccagggcc

SEQ ID NO: 154891 - DNA, 17 bp, synthetic construct
  source 1..17: mol_type = other DNA
ctgtcccagcccagggc

SEQ ID NO: 154892 - DNA, 17 bp, synthetic construct
  source 1..17: mol_type = other DNA
cctgtcccagcccaggg

SEQ ID NO: 154893 - DNA, 17 bp, synthetic construct
  source 1..17: mol_type = other DNA
tcctgtcccagcccagg

SEQ ID NO: 154894 - DNA, 17 bp, synthetic construct
  source 1..17: mol_type = other DNA
ttcctgtcccagcccag

SEQ ID NO: 154895 - DNA, 17 bp, synthetic construct
  source 1..17: mol_type = other DNA
cttcctgtcccagccca

SEQ ID NO: 154896 - DNA, 17 bp, synthetic construct
  source 1..17: mol_type = other DNA
tcttcctgtcccagccc

SEQ ID NO: 154897 - DNA, 17 bp, synthetic construct
  source 1..17: mol_type = other DNA
ctcttcctgtcccagcc

SEQ ID NO: 154898 - DNA, 17 bp, synthetic construct
  source 1..17: mol_type = other DNA
cctcttcctgtcccagc

SEQ ID NO: 154899 - DNA, 17 bp, synthetic construct
  source 1..17: mol_type = other DNA
gcctcttcctgtcccag

SEQ ID NO: 154900 - DNA, 17 bp, synthetic construct
  source 1..17: mol_type = other DNA
tgcctcttcctgtccca

SEQ ID NO: 154901 - DNA, 17 bp, synthetic construct
  source 1..17: mol_type = other DNA
atgcctcttcctgtccc

SEQ ID NO: 154902 - DNA, 17 bp, synthetic construct
  source 1..17: mol_type = other DNA
catgcctcttcctgtcc

SEQ ID NO: 154903 - DNA, 17 bp, synthetic construct
  source 1..17: mol_type = other DNA
gcatgcctcttcctgtc

SEQ ID NO: 154904 - DNA, 17 bp, synthetic construct
  source 1..17: mol_type = other DNA
cgcatgcctcttcctgt

SEQ ID NO: 154905 - DNA, 17 bp, synthetic construct
  source 1..17: mol_type = other DNA
tcgcatgcctcttcctg

SEQ ID NO: 154906 - DNA, 17 bp, synthetic construct
  source 1..17: mol_type = other DNA
ttcgcatgcctcttcct

SEQ ID NO: 154907 - DNA, 17 bp, synthetic construct
  source 1..17: mol_type = other DNA
cttcgcatgcctcttcc

SEQ ID NO: 154908 - DNA, 17 bp, synthetic construct
  source 1..17: mol_type = other DNA
ccttcgcatgcctcttc

SEQ ID NO: 154909 - DNA, 17 bp, synthetic construct
  source 1..17: mol_type = other DNA
accttcgcatgcctctt

SEQ ID NO: 154910 - DNA, 17 bp, synthetic construct
  source 1..17: mol_type = other DNA
caccttcgcatgcctct

SEQ ID NO: 154911 - DNA, 17 bp, synthetic construct
  source 1..17: mol_type = other DNA
acaccttcgcatgcctc

SEQ ID NO: 154912 - DNA, 17 bp, synthetic construct
  source 1..17: mol_type = other DNA
cacaccttcgcatgcct

SEQ ID NO: 154913 - DNA, 17 bp, synthetic construct
  source 1..17: mol_type = other DNA
acacaccttcgcatgcc

SEQ ID NO: 154914 - DNA, 17 bp, synthetic construct
  source 1..17: mol_type = other DNA
cacacaccttcgcatgc

SEQ ID NO: 154915 - DNA, 17 bp, synthetic construct
  source 1..17: mol_type = other DNA
ccacacaccttcgcatg

SEQ ID NO: 154916 - DNA, 17 bp, synthetic construct
  source 1..17: mol_type = other DNA
cccacacaccttcgcat

SEQ ID NO: 154917 - DNA, 17 bp, synthetic construct
  source 1..17: mol_type = other DNA
ccccacacaccttcgca

SEQ ID NO: 154918 - DNA, 17 bp, synthetic construct
  source 1..17: mol_type = other DNA
tccccacacaccttcgc

SEQ ID NO: 154919 - DNA, 17 bp, synthetic construct
  source 1..17: mol_type = other DNA
ctccccacacaccttcg

SEQ ID NO: 154920 - DNA, 17 bp, synthetic construct
  source 1..17: mol_type = other DNA
gctccccacacaccttc

SEQ ID NO: 154921 - DNA, 17 bp, synthetic construct
  source 1..17: mol_type = other DNA
tgctccccacacacctt

SEQ ID NO: 154922 - DNA, 17 bp, synthetic construct
  source 1..17: mol_type = other DNA
ttgctccccacacacct

SEQ ID NO: 154923 - DNA, 17 bp, synthetic construct
  source 1..17: mol_type = other DNA
cttgctccccacacacc

SEQ ID NO: 154924 - DNA, 17 bp, synthetic construct
  source 1..17: mol_type = other DNA
gcttgctccccacacac

SEQ ID NO: 154925 - DNA, 17 bp, synthetic construct
  source 1..17: mol_type = other DNA
tgcttgctccccacaca

SEQ ID NO: 154926 - DNA, 17 bp, synthetic construct
  source 1..17: mol_type = other DNA
gtgcttgctccccacac

SEQ ID NO: 154927 - DNA, 17 bp, synthetic construct
  source 1..17: mol_type = other DNA
cgtgcttgctccccaca

SEQ ID NO: 154928 - DNA, 17 bp, synthetic construct
  source 1..17: mol_type = other DNA
ccgtgcttgctccccac

SEQ ID NO: 154929 - DNA, 17 bp, synthetic construct
  source 1..17: mol_type = other DNA
accgtgcttgctcccca

SEQ ID NO: 154930 - DNA, 17 bp, synthetic construct
  source 1..17: mol_type = other DNA
gaccgtgcttgctcccc

SEQ ID NO: 154931 - DNA, 17 bp, synthetic construct
  source 1..17: mol_type = other DNA
tgaccgtgcttgctccc

SEQ ID NO: 154932 - DNA, 17 bp, synthetic construct
  source 1..17: mol_type = other DNA
ctgaccgtgcttgctcc

SEQ ID NO: 154933 - DNA, 17 bp, synthetic construct
  source 1..17: mol_type = other DNA
cctgaccgtgcttgctc

SEQ ID NO: 154934 - DNA, 17 bp, synthetic construct
  source 1..17: mol_type = other DNA
acctgaccgtgcttgct

SEQ ID NO: 154935 - DNA, 17 bp, synthetic construct
  source 1..17: mol_type = other DNA
gacctgaccgtgcttgc

SEQ ID NO: 154936 - DNA, 17 bp, synthetic construct
  source 1..17: mol_type = other DNA
ggacctgaccgtgcttg

SEQ ID NO: 154937 - DNA, 17 bp, synthetic construct
  source 1..17: mol_type = other DNA
gggacctgaccgtgctt

SEQ ID NO: 154938 - DNA, 17 bp, synthetic construct
  source 1..17: mol_type = other DNA
ggggacctgaccgtgct

SEQ ID NO: 154939 - DNA, 17 bp, synthetic construct
  source 1..17: mol_type = other DNA
gggggacctgaccgtgc

SEQ ID NO: 154940 - DNA, 17 bp, synthetic construct
  source 1..17: mol_type = other DNA
agggggacctgaccgtg

SEQ ID NO: 154941 - DNA, 17 bp, synthetic construct
  source 1..17: mol_type = other DNA
gagggggacctgaccgt

SEQ ID NO: 154942 - DNA, 17 bp, synthetic construct
  source 1..17: mol_type = other DNA
ggagggggacctgaccg

SEQ ID NO: 154943 - DNA, 17 bp, synthetic construct
  source 1..17: mol_type = other DNA
tggagggggacctgacc

SEQ ID NO: 154944 - DNA, 17 bp, synthetic construct
  source 1..17: mol_type = other DNA
ctggagggggacctgac

SEQ ID NO: 154945 - DNA, 17 bp, synthetic construct
  source 1..17: mol_type = other DNA
gctggagggggacctga

SEQ ID NO: 154946 - DNA, 17 bp, synthetic construct
  source 1..17: mol_type = other DNA
ggctggagggggacctg

SEQ ID NO: 154947 - DNA, 17 bp, synthetic construct
  source 1..17: mol_type = other DNA
gggctggagggggacct

SEQ ID NO: 154948 - DNA, 17 bp, synthetic construct
  source 1..17: mol_type = other DNA
ggggctggagggggacc

SEQ ID NO: 154949 - DNA, 17 bp, synthetic construct
  source 1..17: mol_type = other DNA
cggggctggagggggac

SEQ ID NO: 154950 - DNA, 17 bp, synthetic construct
  source 1..17: mol_type = other DNA
tcggggctggaggggga

SEQ ID NO: 154951 - DNA, 17 bp, synthetic construct
  source 1..17: mol_type = other DNA
ctcggggctggaggggg

SEQ ID NO: 154952 - DNA, 17 bp, synthetic construct
  source 1..17: mol_type = other DNA
cctcggggctggagggg

SEQ ID NO: 154953 - DNA, 17 bp, synthetic construct
  source 1..17: mol_type = other DNA
gcctcggggctggaggg

SEQ ID NO: 154954 - DNA, 17 bp, synthetic construct
  source 1..17: mol_type = other DNA
ggcctcggggctggagg

SEQ ID NO: 154955 - DNA, 17 bp, synthetic construct
  source 1..17: mol_type = other DNA
tggcctcggggctggag

SEQ ID NO: 154956 - DNA, 17 bp, synthetic construct
  source 1..17: mol_type = other DNA
ctggcctcggggctgga

SEQ ID NO: 154957 - DNA, 17 bp, synthetic construct
  source 1..17: mol_type = other DNA
cctggcctcggggctgg

SEQ ID NO: 154958 - DNA, 17 bp, synthetic construct
  source 1..17: mol_type = other DNA
acctggcctcggggctg

SEQ ID NO: 154959 - DNA, 17 bp, synthetic construct
  source 1..17: mol_type = other DNA
gacctggcctcggggct

SEQ ID NO: 154960 - DNA, 17 bp, synthetic construct
  source 1..17: mol_type = other DNA
ggacctggcctcggggc

SEQ ID NO: 154961 - DNA, 17 bp, synthetic construct
  source 1..17: mol_type = other DNA
gggacctggcctcgggg

SEQ ID NO: 154962 - DNA, 17 bp, synthetic construct
  source 1..17: mol_type = other DNA
ggggacctggcctcggg

SEQ ID NO: 154963 - DNA, 17 bp, synthetic construct
  source 1..17: mol_type = other DNA
gggggacctggcctcgg

SEQ ID NO: 154964 - DNA, 17 bp, synthetic construct
  source 1..17: mol_type = other DNA
ggggggacctggcctcg

SEQ ID NO: 154965 - DNA, 17 bp, synthetic construct
  source 1..17: mol_type = other DNA
aggggggacctggcctc

SEQ ID NO: 154966 - DNA, 17 bp, synthetic construct
  source 1..17: mol_type = other DNA
gaggggggacctggcct

SEQ ID NO: 154967 - DNA, 17 bp, synthetic construct
  source 1..17: mol_type = other DNA
ggaggggggacctggcc

SEQ ID NO: 154968 - DNA, 17 bp, synthetic construct
  source 1..17: mol_type = other DNA
tggaggggggacctggc

SEQ ID NO: 154969 - DNA, 17 bp, synthetic construct
  source 1..17: mol_type = other DNA
ctggaggggggacctgg

SEQ ID NO: 154970 - DNA, 17 bp, synthetic construct
  source 1..17: mol_type = other DNA
gctggaggggggacctg

SEQ ID NO: 154971 - DNA, 17 bp, synthetic construct
  source 1..17: mol_type = other DNA
ggctggaggggggacct

SEQ ID NO: 154972 - DNA, 17 bp, synthetic construct
  source 1..17: mol_type = other DNA
gggctggaggggggacc

SEQ ID NO: 154973 - DNA, 17 bp, synthetic construct
  source 1..17: mol_type = other DNA
ggggctggaggggggac

SEQ ID NO: 154974 - DNA, 17 bp, synthetic construct
  source 1..17: mol_type = other DNA
gggggctggagggggga

SEQ ID NO: 154975 - DNA, 17 bp, synthetic construct
  source 1..17: mol_type = other DNA
tgggggctggagggggg

SEQ ID NO: 154976 - DNA, 17 bp, synthetic construct
  source 1..17: mol_type = other DNA
ctgggggctggaggggg

SEQ ID NO: 154977 - DNA, 17 bp, synthetic construct
  source 1..17: mol_type = other DNA
cctgggggctggagggg

SEQ ID NO: 154978 - DNA, 17 bp, synthetic construct
  source 1..17: mol_type = other DNA
gcctgggggctggaggg

SEQ ID NO: 154979 - DNA, 17 bp, synthetic construct
  source 1..17: mol_type = other DNA
ggcctgggggctggagg

SEQ ID NO: 154980 - DNA, 17 bp, synthetic construct
  source 1..17: mol_type = other DNA
tggcctgggggctggag

SEQ ID NO: 154981 - DNA, 17 bp, synthetic construct
  source 1..17: mol_type = other DNA
ctggcctgggggctgga

SEQ ID NO: 154982 - DNA, 17 bp, synthetic construct
  source 1..17: mol_type = other DNA
cctggcctgggggctgg

SEQ ID NO: 154983 - DNA, 17 bp, synthetic construct
  source 1..17: mol_type = other DNA
acctggcctgggggctg

SEQ ID NO: 154984 - DNA, 17 bp, synthetic construct
  source 1..17: mol_type = other DNA
gacctggcctgggggct

SEQ ID NO: 154985 - DNA, 17 bp, synthetic construct
  source 1..17: mol_type = other DNA
ggacctggcctgggggc

SEQ ID NO: 154986 - DNA, 17 bp, synthetic construct
  source 1..17: mol_type = other DNA
gggacctggcctggggg

SEQ ID NO: 154987 - DNA, 17 bp, synthetic construct
  source 1..17: mol_type = other DNA
ggggacctggcctgggg

SEQ ID NO: 154988 - DNA, 17 bp, synthetic construct
  source 1..17: mol_type = other DNA
gggggacctggcctggg

SEQ ID NO: 154989 - DNA, 17 bp, synthetic construct
  source 1..17: mol_type = other DNA
agggggacctggcctgg

SEQ ID NO: 154990 - DNA, 17 bp, synthetic construct
  source 1..17: mol_type = other DNA
gagggggacctggcctg

SEQ ID NO: 154991 - DNA, 17 bp, synthetic construct
  source 1..17: mol_type = other DNA
ggagggggacctggcct

SEQ ID NO: 154992 - DNA, 17 bp, synthetic construct
  source 1..17: mol_type = other DNA
tggagggggacctggcc

SEQ ID NO: 154993 - DNA, 17 bp, synthetic construct
  source 1..17: mol_type = other DNA
ctggagggggacctggc

SEQ ID NO: 154994 - DNA, 17 bp, synthetic construct
  source 1..17: mol_type = other DNA
gctggagggggacctgg

SEQ ID NO: 154995 - DNA, 17 bp, synthetic construct
  source 1..17: mol_type = other DNA
ggctggagggggacctg

SEQ ID NO: 154996 - DNA, 17 bp, synthetic construct
  source 1..17: mol_type = other DNA
gggctggagggggacct

SEQ ID NO: 154997 - DNA, 17 bp, synthetic construct
  source 1..17: mol_type = other DNA
ggggctggagggggacc

SEQ ID NO: 154998 - DNA, 17 bp, synthetic construct
  source 1..17: mol_type = other DNA
gggggctggagggggac

SEQ ID NO: 154999 - DNA, 17 bp, synthetic construct
  source 1..17: mol_type = other DNA
tgggggctggaggggga

SEQ ID NO: 155000 - DNA, 17 bp, synthetic construct
  source 1..17: mol_type = other DNA
ctgggggctggaggggg

SEQ ID NO: 155001 - DNA, 17 bp, synthetic construct
  source 1..17: mol_type = other DNA
cctgggggctggagggg

SEQ ID NO: 155002 - DNA, 17 bp, synthetic construct
  source 1..17: mol_type = other DNA
acctgggggctggaggg

SEQ ID NO: 155003 - DNA, 17 bp, synthetic construct
  source 1..17: mol_type = other DNA
gacctgggggctggagg

SEQ ID NO: 155004 - DNA, 17 bp, synthetic construct
  source 1..17: mol_type = other DNA
tgacctgggggctggag

SEQ ID NO: 155005 - DNA, 17 bp, synthetic construct
  source 1..17: mol_type = other DNA
ctgacctgggggctgga

SEQ ID NO: 155006 - DNA, 17 bp, synthetic construct
  source 1..17: mol_type = other DNA
cctgacctgggggctgg

SEQ ID NO: 155007 - DNA, 17 bp, synthetic construct
  source 1..17: mol_type = other DNA
acctgacctgggggctg

SEQ ID NO: 155008 - DNA, 17 bp, synthetic construct
  source 1..17: mol_type = other DNA
gacctgacctgggggct

SEQ ID NO: 155009 - DNA, 17 bp, synthetic construct
  source 1..17: mol_type = other DNA
ggacctgacctgggggc

SEQ ID NO: 155010 - DNA, 17 bp, synthetic construct
  source 1..17: mol_type = other DNA
gggacctgacctggggg

SEQ ID NO: 155011 - DNA, 17 bp, synthetic construct
  source 1..17: mol_type = other DNA
ggggacctgacctgggg

SEQ ID NO: 155012 - DNA, 17 bp, synthetic construct
  source 1..17: mol_type = other DNA
gggggacctgacctggg

SEQ ID NO: 155013 - DNA, 17 bp, synthetic construct
  source 1..17: mol_type = other DNA
ggggggacctgacctgg

SEQ ID NO: 155014 - DNA, 17 bp, synthetic construct
  source 1..17: mol_type = other DNA
aggggggacctgacctg

SEQ ID NO: 155015 - DNA, 17 bp, synthetic construct
  source 1..17: mol_type = other DNA
gaggggggacctgacct

SEQ ID NO: 155016 - DNA, 17 bp, synthetic construct
  source 1..17: mol_type = other DNA
ggaggggggacctgacc

SEQ ID NO: 155017 - DNA, 17 bp, synthetic construct
  source 1..17: mol_type = other DNA
tggaggggggacctgac

SEQ ID NO: 155018 - DNA, 17 bp, synthetic construct
  source 1..17: mol_type = other DNA
ctggaggggggacctga

SEQ ID NO: 155019 - DNA, 17 bp, synthetic construct
  source 1..17: mol_type = other DNA
gctggaggggggacctg

SEQ ID NO: 155020 - DNA, 17 bp, synthetic construct
  source 1..17: mol_type = other DNA
ggctggaggggggacct

SEQ ID NO: 155021 - DNA, 17 bp, synthetic construct
  source 1..17: mol_type = other DNA
gggctggaggggggacc

SEQ ID NO: 155022 - DNA, 17 bp, synthetic construct
  source 1..17: mol_type = other DNA
agggctggaggggggac

SEQ ID NO: 155023 - DNA, 17 bp, synthetic construct
  source 1..17: mol_type = other DNA
cagggctggagggggga

SEQ ID NO: 155024 - DNA, 17 bp, synthetic construct
  source 1..17: mol_type = other DNA
tcagggctggagggggg

SEQ ID NO: 155025 - DNA, 17 bp, synthetic construct
  source 1..17: mol_type = other DNA
ctcagggctggaggggg

SEQ ID NO: 155026 - DNA, 17 bp, synthetic construct
  source 1..17: mol_type = other DNA
cctcagggctggagggg

SEQ ID NO: 155027 - DNA, 17 bp, synthetic construct
  source 1..17: mol_type = other DNA
acctcagggctggaggg

SEQ ID NO: 155028 - DNA, 17 bp, synthetic construct
  source 1..17: mol_type = other DNA
gacctcagggctggagg

SEQ ID NO: 155029 - DNA, 17 bp, synthetic construct
  source 1..17: mol_type = other DNA
tgacctcagggctggag

SEQ ID NO: 155030 - DNA, 17 bp, synthetic construct
  source 1..17: mol_type = other DNA
ctgacctcagggctgga

SEQ ID NO: 155031 - DNA, 17 bp, synthetic construct
  source 1..17: mol_type = other DNA
cctgacctcagggctgg

SEQ ID NO: 155032 - DNA, 17 bp, synthetic construct
  source 1..17: mol_type = other DNA
acctgacctcagggctg

SEQ ID NO: 155033 - DNA, 17 bp, synthetic construct
  source 1..17: mol_type = other DNA
gacctgacctcagggct

SEQ ID NO: 155034 - DNA, 17 bp, synthetic construct
  source 1..17: mol_type = other DNA
ggacctgacctcagggc

SEQ ID NO: 155035 - DNA, 17 bp, synthetic construct
  source 1..17: mol_type = other DNA
aggacctgacctcaggg

SEQ ID NO: 155036 - DNA, 17 bp, synthetic construct
  source 1..17: mol_type = other DNA
gaggacctgacctcagg

SEQ ID NO: 155037 - DNA, 17 bp, synthetic construct
  source 1..17: mol_type = other DNA
ggaggacctgacctcag

SEQ ID NO: 155038 - DNA, 17 bp, synthetic construct
  source 1..17: mol_type = other DNA
gggaggacctgacctca

SEQ ID NO: 155039 - DNA, 17 bp, synthetic construct
  source 1..17: mol_type = other DNA
cgggaggacctgacctc

SEQ ID NO: 155040 - DNA, 17 bp, synthetic construct
  source 1..17: mol_type = other DNA
ccgggaggacctgacct

SEQ ID NO: 155041 - DNA, 17 bp, synthetic construct
  source 1..17: mol_type = other DNA
cccgggaggacctgacc

SEQ ID NO: 155042 - DNA, 17 bp, synthetic construct
  source 1..17: mol_type = other DNA
ccccgggaggacctgac

SEQ ID NO: 155043 - DNA, 17 bp, synthetic construct
  source 1..17: mol_type = other DNA
cccccgggaggacctga

SEQ ID NO: 155044 - DNA, 17 bp, synthetic construct
  source 1..17: mol_type = other DNA
ccccccgggaggacctg

SEQ ID NO: 155045 - DNA, 17 bp, synthetic construct
  source 1..17: mol_type = other DNA
cccccccgggaggacct

SEQ ID NO: 155046 - DNA, 17 bp, synthetic construct
  source 1..17: mol_type = other DNA
gcccccccgggaggacc

SEQ ID NO: 155047 - DNA, 17 bp, synthetic construct
  source 1..17: mol_type = other DNA
tgcccccccgggaggac

SEQ ID NO: 155048 - DNA, 17 bp, synthetic construct
  source 1..17: mol_type = other DNA
ttgcccccccgggagga

SEQ ID NO: 155049 - DNA, 17 bp, synthetic construct
  source 1..17: mol_type = other DNA
attgcccccccgggagg

SEQ ID NO: 155050 - DNA, 17 bp, synthetic construct
  source 1..17: mol_type = other DNA
aattgcccccccgggag

SEQ ID NO: 155051 - DNA, 17 bp, synthetic construct
  source 1..17: mol_type = other DNA
caattgcccccccggga

SEQ ID NO: 155052 - DNA, 17 bp, synthetic construct
  source 1..17: mol_type = other DNA
gcaattgcccccccggg

SEQ ID NO: 155053 - DNA, 17 bp, synthetic construct
  source 1..17: mol_type = other DNA
tgcaattgcccccccgg

SEQ ID NO: 155054 - DNA, 17 bp, synthetic construct
  source 1..17: mol_type = other DNA
ctgcaattgcccccccg

SEQ ID NO: 155055 - DNA, 17 bp, synthetic construct
  source 1..17: mol_type = other DNA
tctgcaattgccccccc

SEQ ID NO: 155056 - DNA, 17 bp, synthetic construct
  source 1..17: mol_type = other DNA
ctctgcaattgcccccc

SEQ ID NO: 155057 - DNA, 17 bp, synthetic construct
  source 1..17: mol_type = other DNA
gctctgcaattgccccc

SEQ ID NO: 155058 - DNA, 17 bp, synthetic construct
  source 1..17: mol_type = other DNA
ggctctgcaattgcccc

SEQ ID NO: 155059 - DNA, 17 bp, synthetic construct
  source 1..17: mol_type = other DNA
gggctctgcaattgccc

SEQ ID NO: 155060 - DNA, 17 bp, synthetic construct
  source 1..17: mol_type = other DNA
tgggctctgcaattgcc

SEQ ID NO: 155061 - DNA, 17 bp, synthetic construct
  source 1..17: mol_type = other DNA
gtgggctctgcaattgc

SEQ ID NO: 155062 - DNA, 17 bp, synthetic construct
  source 1..17: mol_type = other DNA
ggtgggctctgcaattg

SEQ ID NO: 155063 - DNA, 17 bp, synthetic construct
  source 1..17: mol_type = other DNA
cggtgggctctgcaatt

SEQ ID NO: 155064 - DNA, 17 bp, synthetic construct
  source 1..17: mol_type = other DNA
gcggtgggctctgcaat

SEQ ID NO: 155065 - DNA, 17 bp, synthetic construct
  source 1..17: mol_type = other DNA
tgcggtgggctctgcaa

SEQ ID NO: 155066 - DNA, 17 bp, synthetic construct
  source 1..17: mol_type = other DNA
ctgcggtgggctctgca

SEQ ID NO: 155067 - DNA, 17 bp, synthetic construct
  source 1..17: mol_type = other DNA
cctgcggtgggctctgc

SEQ ID NO: 155068 - DNA, 17 bp, synthetic construct
  source 1..17: mol_type = other DNA
acctgcggtgggctctg

SEQ ID NO: 155069 - DNA, 17 bp, synthetic construct
  source 1..17: mol_type = other DNA
gacctgcggtgggctct

SEQ ID NO: 155070 - DNA, 17 bp, synthetic construct
  source 1..17: mol_type = other DNA
ggacctgcggtgggctc

SEQ ID NO: 155071 - DNA, 17 bp, synthetic construct
  source 1..17: mol_type = other DNA
tggacctgcggtgggct

SEQ ID NO: 155072 - DNA, 17 bp, synthetic construct
  source 1..17: mol_type = other DNA
ctggacctgcggtgggc

SEQ ID NO: 155073 - DNA, 17 bp, synthetic construct
  source 1..17: mol_type = other DNA
cctggacctgcggtggg

SEQ ID NO: 155074 - DNA, 17 bp, synthetic construct
  source 1..17: mol_type = other DNA
acctggacctgcggtgg

SEQ ID NO: 155075 - DNA, 17 bp, synthetic construct
  source 1..17: mol_type = other DNA
gacctggacctgcggtg

SEQ ID NO: 155076 - DNA, 17 bp, synthetic construct
  source 1..17: mol_type = other DNA
agacctggacctgcggt

SEQ ID NO: 155077 - DNA, 17 bp, synthetic construct
  source 1..17: mol_type = other DNA
cagacctggacctgcgg

SEQ ID NO: 155078 - DNA, 17 bp, synthetic construct
  source 1..17: mol_type = other DNA
tcagacctggacctgcg

SEQ ID NO: 155079 - DNA, 17 bp, synthetic construct
  source 1..17: mol_type = other DNA
ctcagacctggacctgc

SEQ ID NO: 155080 - DNA, 17 bp, synthetic construct
  source 1..17: mol_type = other DNA
gctcagacctggacctg

SEQ ID NO: 155081 - DNA, 17 bp, synthetic construct
  source 1..17: mol_type = other DNA
agctcagacctggacct

SEQ ID NO: 155082 - DNA, 17 bp, synthetic construct
  source 1..17: mol_type = other DNA
aagctcagacctggacc

SEQ ID NO: 155083 - DNA, 17 bp, synthetic construct
  source 1..17: mol_type = other DNA
gaagctcagacctggac

SEQ ID NO: 155084 - DNA, 17 bp, synthetic construct
  source 1..17: mol_type = other DNA
agaagctcagacctgga

SEQ ID NO: 155085 - DNA, 17 bp, synthetic construct
  source 1..17: mol_type = other DNA
gagaagctcagacctgg

SEQ ID NO: 155086 - DNA, 17 bp, synthetic construct
  source 1..17: mol_type = other DNA
agagaagctcagacctg

SEQ ID NO: 155087 - DNA, 17 bp, synthetic construct
  source 1..17: mol_type = other DNA
cagagaagctcagacct

SEQ ID NO: 155088 - DNA, 17 bp, synthetic construct
  source 1..17: mol_type = other DNA
acagagaagctcagacc

SEQ ID NO: 155089 - DNA, 17 bp, synthetic construct
  source 1..17: mol_type = other DNA
cacagagaagctcagac

SEQ ID NO: 155090 - DNA, 17 bp, synthetic construct
  source 1..17: mol_type = other DNA
ccacagagaagctcaga

SEQ ID NO: 155091 - DNA, 17 bp, synthetic construct
  source 1..17: mol_type = other DNA
cccacagagaagctcag

SEQ ID NO: 155092 - DNA, 17 bp, synthetic construct
  source 1..17: mol_type = other DNA
gcccacagagaagctca

SEQ ID NO: 155093 - DNA, 17 bp, synthetic construct
  source 1..17: mol_type = other DNA
agcccacagagaagctc

SEQ ID NO: 155094 - DNA, 17 bp, synthetic construct
  source 1..17: mol_type = other DNA
gagcccacagagaagct

SEQ ID NO: 155095 - DNA, 17 bp, synthetic construct
  source 1..17: mol_type = other DNA
agagcccacagagaagc

SEQ ID NO: 155096 - DNA, 17 bp, synthetic construct
  source 1..17: mol_type = other DNA
cagagcccacagagaag

SEQ ID NO: 155097 - DNA, 17 bp, synthetic construct
  source 1..17: mol_type = other DNA
acagagcccacagagaa

SEQ ID NO: 155098 - DNA, 17 bp, synthetic construct
  source 1..17: mol_type = other DNA
gacagagcccacagaga

SEQ ID NO: 155099 - DNA, 17 bp, synthetic construct
  source 1..17: mol_type = other DNA
ggacagagcccacagag

SEQ ID NO: 155100 - DNA, 17 bp, synthetic construct
  source 1..17: mol_type = other DNA
gggacagagcccacaga

SEQ ID NO: 155101 - DNA, 17 bp, synthetic construct
  source 1..17: mol_type = other DNA
ggggacagagcccacag

SEQ ID NO: 155102 - DNA, 17 bp, synthetic construct
  source 1..17: mol_type = other DNA
tggggacagagcccaca

SEQ ID NO: 155103 - DNA, 17 bp, synthetic construct
  source 1..17: mol_type = other DNA
ctggggacagagcccac

SEQ ID NO: 155104 - DNA, 17 bp, synthetic construct
  source 1..17: mol_type = other DNA
actggggacagagccca

SEQ ID NO: 155105 - DNA, 17 bp, synthetic construct
  source 1..17: mol_type = other DNA
cactggggacagagccc

SEQ ID NO: 155106 - DNA, 17 bp, synthetic construct
  source 1..17: mol_type = other DNA
ccactggggacagagcc

SEQ ID NO: 155107 - DNA, 17 bp, synthetic construct
  source 1..17: mol_type = other DNA
cccactggggacagagc

SEQ ID NO: 155108 - DNA, 17 bp, synthetic construct
  source 1..17: mol_type = other DNA
ccccactggggacagag

SEQ ID NO: 155109 - DNA, 17 bp, synthetic construct
  source 1..17: mol_type = other DNA
cccccactggggacaga

SEQ ID NO: 155110 - DNA, 17 bp, synthetic construct
  source 1..17: mol_type = other DNA
gcccccactggggacag

SEQ ID NO: 155111 - DNA, 17 bp, synthetic construct
  source 1..17: mol_type = other DNA
ggcccccactggggaca

SEQ ID NO: 155112 - DNA, 17 bp, synthetic construct
  source 1..17: mol_type = other DNA
gggcccccactggggac

SEQ ID NO: 155113 - DNA, 17 bp, synthetic construct
  source 1..17: mol_type = other DNA
ggggcccccactgggga

SEQ ID NO: 155114 - DNA, 17 bp, synthetic construct
  source 1..17: mol_type = other DNA
aggggcccccactgggg

SEQ ID NO: 155115 - DNA, 17 bp, synthetic construct
  source 1..17: mol_type = other DNA
caggggcccccactggg

SEQ ID NO: 155116 - DNA, 17 bp, synthetic construct
  source 1..17: mol_type = other DNA
ccaggggcccccactgg

SEQ ID NO: 155117 - DNA, 17 bp, synthetic construct
  source 1..17: mol_type = other DNA
cccaggggcccccactg

SEQ ID NO: 155118 - DNA, 17 bp, synthetic construct
  source 1..17: mol_type = other DNA
gcccaggggcccccact

SEQ ID NO: 155119 - DNA, 17 bp, synthetic construct
  source 1..17: mol_type = other DNA
tgcccaggggcccccac

SEQ ID NO: 155120 - DNA, 17 bp, synthetic construct
  source 1..17: mol_type = other DNA
ctgcccaggggccccca

SEQ ID NO: 155121 - DNA, 17 bp, synthetic construct
  source 1..17: mol_type = other DNA
cctgcccaggggccccc

SEQ ID NO: 155122 - DNA, 17 bp, synthetic construct
  source 1..17: mol_type = other DNA
gcctgcccaggggcccc

SEQ ID NO: 155123 - DNA, 17 bp, synthetic construct
  source 1..17: mol_type = other DNA
ggcctgcccaggggccc

SEQ ID NO: 155124 - DNA, 17 bp, synthetic construct
  source 1..17: mol_type = other DNA
tggcctgcccaggggcc

SEQ ID NO: 155125 - DNA, 17 bp, synthetic construct
  source 1..17: mol_type = other DNA
gtggcctgcccaggggc

SEQ ID NO: 155126 - DNA, 17 bp, synthetic construct
  source 1..17: mol_type = other DNA
ggtggcctgcccagggg

SEQ ID NO: 155127 - DNA, 17 bp, synthetic construct
  source 1..17: mol_type = other DNA
gggtggcctgcccaggg

SEQ ID NO: 155128 - DNA, 17 bp, synthetic construct
  source 1..17: mol_type = other DNA
ggggtggcctgcccagg

SEQ ID NO: 155129 - DNA, 17 bp, synthetic construct
  source 1..17: mol_type = other DNA
gggggtggcctgcccag

SEQ ID NO: 155130 - DNA, 17 bp, synthetic construct
  source 1..17: mol_type = other DNA
agggggtggcctgccca

SEQ ID NO: 155131 - DNA, 17 bp, synthetic construct
  source 1..17: mol_type = other DNA
gagggggtggcctgccc

SEQ ID NO: 155132 - DNA, 17 bp, synthetic construct
  source 1..17: mol_type = other DNA
tgagggggtggcctgcc

SEQ ID NO: 155133 - DNA, 17 bp, synthetic construct
  source 1..17: mol_type = other DNA
atgagggggtggcctgc

SEQ ID NO: 155134 - DNA, 17 bp, synthetic construct
  source 1..17: mol_type = other DNA
aatgagggggtggcctg

SEQ ID NO: 155135 - DNA, 17 bp, synthetic construct
  source 1..17: mol_type = other DNA
aaatgagggggtggcct

SEQ ID NO: 155136 - DNA, 17 bp, synthetic construct
  source 1..17: mol_type = other DNA
caaatgagggggtggcc

SEQ ID NO: 155137 - DNA, 17 bp, synthetic construct
  source 1..17: mol_type = other DNA
tcaaatgagggggtggc

SEQ ID NO: 155138 - DNA, 17 bp, synthetic construct
  source 1..17: mol_type = other DNA
ctcaaatgagggggtgg

SEQ ID NO: 155139 - DNA, 17 bp, synthetic construct
  source 1..17: mol_type = other DNA
tctcaaatgagggggtg

SEQ ID NO: 155140 - DNA, 17 bp, synthetic construct
  source 1..17: mol_type = other DNA
ctctcaaatgagggggt

SEQ ID NO: 155141 - DNA, 17 bp, synthetic construct
  source 1..17: mol_type = other DNA
actctcaaatgaggggg

SEQ ID NO: 155142 - DNA, 17 bp, synthetic construct
  source 1..17: mol_type = other DNA
gactctcaaatgagggg

SEQ ID NO: 155143 - DNA, 17 bp, synthetic construct
  source 1..17: mol_type = other DNA
cgactctcaaatgaggg

SEQ ID NO: 155144 - DNA, 17 bp, synthetic construct
  source 1..17: mol_type = other DNA
ccgactctcaaatgagg

SEQ ID NO: 155145 - DNA, 17 bp, synthetic construct
  source 1..17: mol_type = other DNA
cccgactctcaaatgag

SEQ ID NO: 155146 - DNA, 17 bp, synthetic construct
  source 1..17: mol_type = other DNA
tcccgactctcaaatga

SEQ ID NO: 155147 - DNA, 17 bp, synthetic construct
  source 1..17: mol_type = other DNA
ttcccgactctcaaatg

SEQ ID NO: 155148 - DNA, 17 bp, synthetic construct
  source 1..17: mol_type = other DNA
attcccgactctcaaat

SEQ ID NO: 155149 - DNA, 17 bp, synthetic construct
  source 1..17: mol_type = other DNA
cattcccgactctcaaa

SEQ ID NO: 155150 - DNA, 17 bp, synthetic construct
  source 1..17: mol_type = other DNA
ccattcccgactctcaa

SEQ ID NO: 155151 - DNA, 17 bp, synthetic construct
  source 1..17: mol_type = other DNA
cccattcccgactctca

SEQ ID NO: 155152 - DNA, 17 bp, synthetic construct
  source 1..17: mol_type = other DNA
acccattcccgactctc

SEQ ID NO: 155153 - DNA, 17 bp, synthetic construct
  source 1..17: mol_type = other DNA
aacccattcccgactct

SEQ ID NO: 155154 - DNA, 17 bp, synthetic construct
  source 1..17: mol_type = other DNA
gaacccattcccgactc

SEQ ID NO: 155155 - DNA, 17 bp, synthetic construct
  source 1..17: mol_type = other DNA
ggaacccattcccgact

SEQ ID NO: 155156 - DNA, 17 bp, synthetic construct
  source 1..17: mol_type = other DNA
aggaacccattcccgac

SEQ ID NO: 155157 - DNA, 17 bp, synthetic construct
  source 1..17: mol_type = other DNA
gaggaacccattcccga

SEQ ID NO: 155158 - DNA, 17 bp, synthetic construct
  source 1..17: mol_type = other DNA
ggaggaacccattcccg

SEQ ID NO: 155159 - DNA, 17 bp, synthetic construct
  source 1..17: mol_type = other DNA
gggaggaacccattccc

SEQ ID NO: 155160 - DNA, 17 bp, synthetic construct
  source 1..17: mol_type = other DNA
ggggaggaacccattcc

SEQ ID NO: 155161 - DNA, 17 bp, synthetic construct
  source 1..17: mol_type = other DNA
tggggaggaacccattc

SEQ ID NO: 155162 - DNA, 17 bp, synthetic construct
  source 1..17: mol_type = other DNA
ctggggaggaacccatt

SEQ ID NO: 155163 - DNA, 17 bp, synthetic construct
  source 1..17: mol_type = other DNA
tctggggaggaacccat

SEQ ID NO: 155164 - DNA, 17 bp, synthetic construct
  source 1..17: mol_type = other DNA
ctctggggaggaaccca

SEQ ID NO: 155165 - DNA, 17 bp, synthetic construct
  source 1..17: mol_type = other DNA
gctctggggaggaaccc

SEQ ID NO: 155166 - DNA, 17 bp, synthetic construct
  source 1..17: mol_type = other DNA
agctctggggaggaacc

SEQ ID NO: 155167 - DNA, 17 bp, synthetic construct
  source 1..17: mol_type = other DNA
cagctctggggaggaac

SEQ ID NO: 155168 - DNA, 17 bp, synthetic construct
  source 1..17: mol_type = other DNA
tcagctctggggaggaa

SEQ ID NO: 155169 - DNA, 17 bp, synthetic construct
  source 1..17: mol_type = other DNA
gtcagctctggggagga

SEQ ID NO: 155170 - DNA, 17 bp, synthetic construct
  source 1..17: mol_type = other DNA
ggtcagctctggggagg

SEQ ID NO: 155171 - DNA, 17 bp, synthetic construct
  source 1..17: mol_type = other DNA
aggtcagctctggggag

SEQ ID NO: 155172 - DNA, 17 bp, synthetic construct
  source 1..17: mol_type = other DNA
gaggtcagctctgggga

SEQ ID NO: 155173 - DNA, 17 bp, synthetic construct
  source 1..17: mol_type = other DNA
ggaggtcagctctgggg

SEQ ID NO: 155174 - DNA, 17 bp, synthetic construct
  source 1..17: mol_type = other DNA
gggaggtcagctctggg

SEQ ID NO: 155175 - DNA, 17 bp, synthetic construct
  source 1..17: mol_type = other DNA
cgggaggtcagctctgg

SEQ ID NO: 155176 - DNA, 17 bp, synthetic construct
  source 1..17: mol_type = other DNA
gcgggaggtcagctctg

SEQ ID NO: 155177 - DNA, 17 bp, synthetic construct
  source 1..17: mol_type = other DNA
ggcgggaggtcagctct

SEQ ID NO: 155178 - DNA, 17 bp, synthetic construct
  source 1..17: mol_type = other DNA
gggcgggaggtcagctc

SEQ ID NO: 155179 - DNA, 17 bp, synthetic construct
  source 1..17: mol_type = other DNA
cgggcgggaggtcagct

SEQ ID NO: 155180 - DNA, 17 bp, synthetic construct
  source 1..17: mol_type = other DNA
gcgggcgggaggtcagc

SEQ ID NO: 155181 - DNA, 17 bp, synthetic construct
  source 1..17: mol_type = other DNA
ggcgggcgggaggtcag

SEQ ID NO: 155182 - DNA, 17 bp, synthetic construct
  source 1..17: mol_type = other DNA
aggcgggcgggaggtca

SEQ ID NO: 155183 - DNA, 17 bp, synthetic construct
  source 1..17: mol_type = other DNA
gaggcgggcgggaggtc

SEQ ID NO: 155184 - DNA, 17 bp, synthetic construct
  source 1..17: mol_type = other DNA
ggaggcgggcgggaggt

SEQ ID NO: 155185 - DNA, 17 bp, synthetic construct
  source 1..17: mol_type = other DNA
aggaggcgggcgggagg

SEQ ID NO: 155186 - DNA, 17 bp, synthetic construct
  source 1..17: mol_type = other DNA
aaggaggcgggcgggag

SEQ ID NO: 155187 - DNA, 17 bp, synthetic construct
  source 1..17: mol_type = other DNA
gaaggaggcgggcggga

SEQ ID NO: 155188 - DNA, 17 bp, synthetic construct
  source 1..17: mol_type = other DNA
ggaaggaggcgggcggg

SEQ ID NO: 155189 - DNA, 17 bp, synthetic construct
  source 1..17: mol_type = other DNA
cggaaggaggcgggcgg

SEQ ID NO: 155190 - DNA, 17 bp, synthetic construct
  source 1..17: mol_type = other DNA
gcggaaggaggcgggcg

SEQ ID NO: 155191 - DNA, 17 bp, synthetic construct
  source 1..17: mol_type = other DNA
tgcggaaggaggcgggc

SEQ ID NO: 155192 - DNA, 17 bp, synthetic construct
  source 1..17: mol_type = other DNA
ctgcggaaggaggcggg

SEQ ID NO: 155193 - DNA, 17 bp, synthetic construct
  source 1..17: mol_type = other DNA
cctgcggaaggaggcgg

SEQ ID NO: 155194 - DNA, 17 bp, synthetic construct
  source 1..17: mol_type = other DNA
gcctgcggaaggaggcg

SEQ ID NO: 155195 - DNA, 17 bp, synthetic construct
  source 1..17: mol_type = other DNA
ggcctgcggaaggaggc

SEQ ID NO: 155196 - DNA, 17 bp, synthetic construct
  source 1..17: mol_type = other DNA
tggcctgcggaaggagg

SEQ ID NO: 155197 - DNA, 17 bp, synthetic construct
  source 1..17: mol_type = other DNA
atggcctgcggaaggag

SEQ ID NO: 155198 - DNA, 17 bp, synthetic construct
  source 1..17: mol_type = other DNA
gatggcctgcggaagga

SEQ ID NO: 155199 - DNA, 17 bp, synthetic construct
  source 1..17: mol_type = other DNA
ggatggcctgcggaagg

SEQ ID NO: 155200 - DNA, 17 bp, synthetic construct
  source 1..17: mol_type = other DNA
cggatggcctgcggaag

SEQ ID NO: 155201 - DNA, 17 bp, synthetic construct
  source 1..17: mol_type = other DNA
ccggatggcctgcggaa

SEQ ID NO: 155202 - DNA, 17 bp, synthetic construct
  source 1..17: mol_type = other DNA
cccggatggcctgcgga

SEQ ID NO: 155203 - DNA, 17 bp, synthetic construct
  source 1..17: mol_type = other DNA
acccggatggcctgcgg

SEQ ID NO: 155204 - DNA, 17 bp, synthetic construct
  source 1..17: mol_type = other DNA
gacccggatggcctgcg

SEQ ID NO: 155205 - DNA, 17 bp, synthetic construct
  source 1..17: mol_type = other DNA
ggacccggatggcctgc

SEQ ID NO: 155206 - DNA, 17 bp, synthetic construct
  source 1..17: mol_type = other DNA
tggacccggatggcctg

SEQ ID NO: 155207 - DNA, 17 bp, synthetic construct
  source 1..17: mol_type = other DNA
ttggacccggatggcct

SEQ ID NO: 155208 - DNA, 17 bp, synthetic construct
  source 1..17: mol_type = other DNA
cttggacccggatggcc

SEQ ID NO: 155209 - DNA, 17 bp, synthetic construct
  source 1..17: mol_type = other DNA
gcttggacccggatggc

SEQ ID NO: 155210 - DNA, 17 bp, synthetic construct
  source 1..17: mol_type = other DNA
cgcttggacccggatgg

SEQ ID NO: 155211 - DNA, 17 bp, synthetic construct
  source 1..17: mol_type = other DNA
ccgcttggacccggatg

SEQ ID NO: 155212 - DNA, 17 bp, synthetic construct
  source 1..17: mol_type = other DNA
tccgcttggacccggat

SEQ ID NO: 155213 - DNA, 17 bp, synthetic construct
  source 1..17: mol_type = other DNA
gtccgcttggacccgga

SEQ ID NO: 155214 - DNA, 17 bp, synthetic construct
  source 1..17: mol_type = other DNA
cgtccgcttggacccgg

SEQ ID NO: 155215 - DNA, 17 bp, synthetic construct
  source 1..17: mol_type = other DNA
ccgtccgcttggacccg

SEQ ID NO: 155216 - DNA, 17 bp, synthetic construct
  source 1..17: mol_type = other DNA
gccgtccgcttggaccc

SEQ ID NO: 155217 - DNA, 17 bp, synthetic construct
  source 1..17: mol_type = other DNA
cgccgtccgcttggacc

SEQ ID NO: 155218 - DNA, 17 bp, synthetic construct
  source 1..17: mol_type = other DNA
ccgccgtccgcttggac

SEQ ID NO: 155219 - DNA, 17 bp, synthetic construct
  source 1..17: mol_type = other DNA
gccgccgtccgcttgga

SEQ ID NO: 155220 - DNA, 17 bp, synthetic construct
  source 1..17: mol_type = other DNA
cgccgccgtccgcttgg

SEQ ID NO: 155221 - DNA, 17 bp, synthetic construct
  source 1..17: mol_type = other DNA
acgccgccgtccgcttg

SEQ ID NO: 155222 - DNA, 17 bp, synthetic construct
  source 1..17: mol_type = other DNA
cacgccgccgtccgctt

SEQ ID NO: 155223 - DNA, 17 bp, synthetic construct
  source 1..17: mol_type = other DNA
acacgccgccgtccgct

SEQ ID NO: 155224 - DNA, 17 bp, synthetic construct
  source 1..17: mol_type = other DNA
aacacgccgccgtccgc

SEQ ID NO: 155225 - DNA, 17 bp, synthetic construct
  source 1..17: mol_type = other DNA
gaacacgccgccgtccg

SEQ ID NO: 155226 - DNA, 17 bp, synthetic construct
  source 1..17: mol_type = other DNA
ggaacacgccgccgtcc

SEQ ID NO: 155227 - DNA, 17 bp, synthetic construct
  source 1..17: mol_type = other DNA
aggaacacgccgccgtc

SEQ ID NO: 155228 - DNA, 17 bp, synthetic construct
  source 1..17: mol_type = other DNA
gaggaacacgccgccgt

SEQ ID NO: 155229 - DNA, 17 bp, synthetic construct
  source 1..17: mol_type = other DNA
tgaggaacacgccgccg

SEQ ID NO: 155230 - DNA, 17 bp, synthetic construct
  source 1..17: mol_type = other DNA
ttgaggaacacgccgcc

SEQ ID NO: 155231 - DNA, 17 bp, synthetic construct
  source 1..17: mol_type = other DNA
gttgaggaacacgccgc

SEQ ID NO: 155232 - DNA, 17 bp, synthetic construct
  source 1..17: mol_type = other DNA
agttgaggaacacgccg

SEQ ID NO: 155233 - DNA, 17 bp, synthetic construct
  source 1..17: mol_type = other DNA
gagttgaggaacacgcc

SEQ ID NO: 155234 - DNA, 17 bp, synthetic construct
  source 1..17: mol_type = other DNA
ggagttgaggaacacgc

SEQ ID NO: 155235 - DNA, 17 bp, synthetic construct
  source 1..17: mol_type = other DNA
tggagttgaggaacacg

SEQ ID NO: 155236 - DNA, 17 bp, synthetic construct
  source 1..17: mol_type = other DNA
atggagttgaggaacac

SEQ ID NO: 155237 - DNA, 17 bp, synthetic construct
  source 1..17: mol_type = other DNA
gatggagttgaggaaca

SEQ ID NO: 155238 - DNA, 17 bp, synthetic construct
  source 1..17: mol_type = other DNA
agatggagttgaggaac

SEQ ID NO: 155239 - DNA, 17 bp, synthetic construct
  source 1..17: mol_type = other DNA
tagatggagttgaggaa

SEQ ID NO: 155240 - DNA, 17 bp, synthetic construct
  source 1..17: mol_type = other DNA
gtagatggagttgagga

SEQ ID NO: 155241 - DNA, 17 bp, synthetic construct
  source 1..17: mol_type = other DNA
tgtagatggagttgagg

SEQ ID NO: 155242 - DNA, 17 bp, synthetic construct
  source 1..17: mol_type = other DNA
gtgtagatggagttgag

SEQ ID NO: 155243 - DNA, 17 bp, synthetic construct
  source 1..17: mol_type = other DNA
cgtgtagatggagttga

SEQ ID NO: 155244 - DNA, 17 bp, synthetic construct
  source 1..17: mol_type = other DNA
gcgtgtagatggagttg

SEQ ID NO: 155245 - DNA, 17 bp, synthetic construct
  source 1..17: mol_type = other DNA
tgcgtgtagatggagtt

SEQ ID NO: 155246 - DNA, 17 bp, synthetic construct
  source 1..17: mol_type = other DNA
ctgcgtgtagatggagt

SEQ ID NO: 155247 - DNA, 17 bp, synthetic construct
  source 1..17: mol_type = other DNA
gctgcgtgtagatggag

SEQ ID NO: 155248 - DNA, 17 bp, synthetic construct
  source 1..17: mol_type = other DNA
agctgcgtgtagatgga

SEQ ID NO: 155249 - DNA, 17 bp, synthetic construct
  source 1..17: mol_type = other DNA
cagctgcgtgtagatgg

SEQ ID NO: 155250 - DNA, 17 bp, synthetic construct
  source 1..17: mol_type = other DNA
gcagctgcgtgtagatg

SEQ ID NO: 155251 - DNA, 17 bp, synthetic construct
  source 1..17: mol_type = other DNA
ggcagctgcgtgtagat

SEQ ID NO: 155252 - DNA, 17 bp, synthetic construct
  source 1..17: mol_type = other DNA
gggcagctgcgtgtaga

SEQ ID NO: 155253 - DNA, 17 bp, synthetic construct
  source 1..17: mol_type = other DNA
ggggcagctgcgtgtag

SEQ ID NO: 155254 - DNA, 17 bp, synthetic construct
  source 1..17: mol_type = other DNA
aggggcagctgcgtgta

SEQ ID NO: 155255 - DNA, 17 bp, synthetic construct
  source 1..17: mol_type = other DNA
caggggcagctgcgtgt

SEQ ID NO: 155256 - DNA, 17 bp, synthetic construct
  source 1..17: mol_type = other DNA
acaggggcagctgcgtg

SEQ ID NO: 155257 - DNA, 17 bp, synthetic construct
  source 1..17: mol_type = other DNA
gacaggggcagctgcgt

SEQ ID NO: 155258 - DNA, 17 bp, synthetic construct
  source 1..17: mol_type = other DNA
cgacaggggcagctgcg

SEQ ID NO: 155259 - DNA, 17 bp, synthetic construct
  source 1..17: mol_type = other DNA
ccgacaggggcagctgc

SEQ ID NO: 155260 - DNA, 17 bp, synthetic construct
  source 1..17: mol_type = other DNA
gccgacaggggcagctg

SEQ ID NO: 155261 - DNA, 17 bp, synthetic construct
  source 1..17: mol_type = other DNA
tgccgacaggggcagct

SEQ ID NO: 155262 - DNA, 17 bp, synthetic construct
  source 1..17: mol_type = other DNA
ctgccgacaggggcagc

SEQ ID NO: 155263 - DNA, 17 bp, synthetic construct
  source 1..17: mol_type = other DNA
cctgccgacaggggcag

SEQ ID NO: 155264 - DNA, 17 bp, synthetic construct
  source 1..17: mol_type = other DNA
acctgccgacaggggca

SEQ ID NO: 155265 - DNA, 17 bp, synthetic construct
  source 1..17: mol_type = other DNA
tacctgccgacaggggc

SEQ ID NO: 155266 - DNA, 17 bp, synthetic construct
  source 1..17: mol_type = other DNA
atacctgccgacagggg

SEQ ID NO: 155267 - DNA, 17 bp, synthetic construct
  source 1..17: mol_type = other DNA
catacctgccgacaggg

SEQ ID NO: 155268 - DNA, 17 bp, synthetic construct
  source 1..17: mol_type = other DNA
acatacctgccgacagg

SEQ ID NO: 155269 - DNA, 17 bp, synthetic construct
  source 1..17: mol_type = other DNA
cacatacctgccgacag

SEQ ID NO: 155270 - DNA, 17 bp, synthetic construct
  source 1..17: mol_type = other DNA
ccacatacctgccgaca

SEQ ID NO: 155271 - DNA, 17 bp, synthetic construct
  source 1..17: mol_type = other DNA
gccacatacctgccgac

SEQ ID NO: 155272 - DNA, 17 bp, synthetic construct
  source 1..17: mol_type = other DNA
agccacatacctgccga

SEQ ID NO: 155273 - DNA, 17 bp, synthetic construct
  source 1..17: mol_type = other DNA
gagccacatacctgccg

SEQ ID NO: 155274 - DNA, 17 bp, synthetic construct
  source 1..17: mol_type = other DNA
agagccacatacctgcc

SEQ ID NO: 155275 - DNA, 17 bp, synthetic construct
  source 1..17: mol_type = other DNA
gagagccacatacctgc

SEQ ID NO: 155276 - DNA, 17 bp, synthetic construct
  source 1..17: mol_type = other DNA
ggagagccacatacctg

SEQ ID NO: 155277 - DNA, 17 bp, synthetic construct
  source 1..17: mol_type = other DNA
gggagagccacatacct

SEQ ID NO: 155278 - DNA, 17 bp, synthetic construct
  source 1..17: mol_type = other DNA
tgggagagccacatacc

SEQ ID NO: 155279 - DNA, 17 bp, synthetic construct
  source 1..17: mol_type = other DNA
ctgggagagccacatac

SEQ ID NO: 155280 - DNA, 17 bp, synthetic construct
  source 1..17: mol_type = other DNA
cctgggagagccacata

SEQ ID NO: 155281 - DNA, 17 bp, synthetic construct
  source 1..17: mol_type = other DNA
tcctgggagagccacat

SEQ ID NO: 155282 - DNA, 17 bp, synthetic construct
  source 1..17: mol_type = other DNA
gtcctgggagagccaca

SEQ ID NO: 155283 - DNA, 17 bp, synthetic construct
  source 1..17: mol_type = other DNA
cgtcctgggagagccac

SEQ ID NO: 155284 - DNA, 17 bp, synthetic construct
  source 1..17: mol_type = other DNA
ccgtcctgggagagcca

SEQ ID NO: 155285 - DNA, 17 bp, synthetic construct
  source 1..17: mol_type = other DNA
gccgtcctgggagagcc

SEQ ID NO: 155286 - DNA, 17 bp, synthetic construct
  source 1..17: mol_type = other DNA
ggccgtcctgggagagc

SEQ ID NO: 155287 - DNA, 17 bp, synthetic construct
  source 1..17: mol_type = other DNA
cggccgtcctgggagag

SEQ ID NO: 155288 - DNA, 17 bp, synthetic construct
  source 1..17: mol_type = other DNA
ccggccgtcctgggaga

SEQ ID NO: 155289 - DNA, 17 bp, synthetic construct
  source 1..17: mol_type = other DNA
cccggccgtcctgggag

SEQ ID NO: 155290 - DNA, 17 bp, synthetic construct
  source 1..17: mol_type = other DNA
gcccggccgtcctggga

SEQ ID NO: 155291 - DNA, 17 bp, synthetic construct
  source 1..17: mol_type = other DNA
agcccggccgtcctggg

SEQ ID NO: 155292 - DNA, 17 bp, synthetic construct
  source 1..17: mol_type = other DNA
cagcccggccgtcctgg

SEQ ID NO: 155293 - DNA, 17 bp, synthetic construct
  source 1..17: mol_type = other DNA
ccagcccggccgtcctg

SEQ ID NO: 155294 - DNA, 17 bp, synthetic construct
  source 1..17: mol_type = other DNA
cccagcccggccgtcct

SEQ ID NO: 155295 - DNA, 17 bp, synthetic construct
  source 1..17: mol_type = other DNA
acccagcccggccgtcc

SEQ ID NO: 155296 - DNA, 17 bp, synthetic construct
  source 1..17: mol_type = other DNA
cacccagcccggccgtc

SEQ ID NO: 155297 - DNA, 17 bp, synthetic construct
  source 1..17: mol_type = other DNA
ccacccagcccggccgt

SEQ ID NO: 155298 - DNA, 17 bp, synthetic construct
  source 1..17: mol_type = other DNA
gccacccagcccggccg

SEQ ID NO: 155299 - DNA, 17 bp, synthetic construct
  source 1..17: mol_type = other DNA
cgccacccagcccggcc

SEQ ID NO: 155300 - DNA, 17 bp, synthetic construct
  source 1..17: mol_type = other DNA
gcgccacccagcccggc

SEQ ID NO: 155301 - DNA, 17 bp, synthetic construct
  source 1..17: mol_type = other DNA
ggcgccacccagcccgg

SEQ ID NO: 155302 - DNA, 17 bp, synthetic construct
  source 1..17: mol_type = other DNA
aggcgccacccagcccg

SEQ ID NO: 155303 - DNA, 17 bp, synthetic construct
  source 1..17: mol_type = other DNA
caggcgccacccagccc

SEQ ID NO: 155304 - DNA, 17 bp, synthetic construct
  source 1..17: mol_type = other DNA
gcaggcgccacccagcc

SEQ ID NO: 155305 - DNA, 17 bp, synthetic construct
  source 1..17: mol_type = other DNA
agcaggcgccacccagc

SEQ ID NO: 155306 - DNA, 17 bp, synthetic construct
  source 1..17: mol_type = other DNA
aagcaggcgccacccag

SEQ ID NO: 155307 - DNA, 17 bp, synthetic construct
  source 1..17: mol_type = other DNA
caagcaggcgccaccca

SEQ ID NO: 155308 - DNA, 17 bp, synthetic construct
  source 1..17: mol_type = other DNA
gcaagcaggcgccaccc

SEQ ID NO: 155309 - DNA, 17 bp, synthetic construct
  source 1..17: mol_type = other DNA
tgcaagcaggcgccacc

SEQ ID NO: 155310 - DNA, 17 bp, synthetic construct
  source 1..17: mol_type = other DNA
ctgcaagcaggcgccac

SEQ ID NO: 155311 - DNA, 17 bp, synthetic construct
  source 1..17: mol_type = other DNA
cctgcaagcaggcgcca

SEQ ID NO: 155312 - DNA, 17 bp, synthetic construct
  source 1..17: mol_type = other DNA
ccctgcaagcaggcgcc

SEQ ID NO: 155313 - DNA, 17 bp, synthetic construct
  source 1..17: mol_type = other DNA
cccctgcaagcaggcgc

SEQ ID NO: 155314 - DNA, 17 bp, synthetic construct
  source 1..17: mol_type = other DNA
gcccctgcaagcaggcg

SEQ ID NO: 155315 - DNA, 17 bp, synthetic construct
  source 1..17: mol_type = other DNA
tgcccctgcaagcaggc

SEQ ID NO: 155316 - DNA, 17 bp, synthetic construct
  source 1..17: mol_type = other DNA
ctgcccctgcaagcagg

SEQ ID NO: 155317 - DNA, 17 bp, synthetic construct
  source 1..17: mol_type = other DNA
gctgcccctgcaagcag

SEQ ID NO: 155318 - DNA, 17 bp, synthetic construct
  source 1..17: mol_type = other DNA
agctgcccctgcaagca

SEQ ID NO: 155319 - DNA, 17 bp, synthetic construct
  source 1..17: mol_type = other DNA
gagctgcccctgcaagc

SEQ ID NO: 155320 - DNA, 17 bp, synthetic construct
  source 1..17: mol_type = other DNA
ggagctgcccctgcaag

SEQ ID NO: 155321 - DNA, 17 bp, synthetic construct
  source 1..17: mol_type = other DNA
gggagctgcccctgcaa

SEQ ID NO: 155322 - DNA, 17 bp, synthetic construct
  source 1..17: mol_type = other DNA
tgggagctgcccctgca

SEQ ID NO: 155323 - DNA, 17 bp, synthetic construct
  source 1..17: mol_type = other DNA
gtgggagctgcccctgc

SEQ ID NO: 155324 - DNA, 17 bp, synthetic construct
  source 1..17: mol_type = other DNA
tgtgggagctgcccctg

SEQ ID NO: 155325 - DNA, 17 bp, synthetic construct
  source 1..17: mol_type = other DNA
ctgtgggagctgcccct

SEQ ID NO: 155326 - DNA, 17 bp, synthetic construct
  source 1..17: mol_type = other DNA
gctgtgggagctgcccc

SEQ ID NO: 155327 - DNA, 17 bp, synthetic construct
  source 1..17: mol_type = other DNA
ggctgtgggagctgccc

SEQ ID NO: 155328 - DNA, 17 bp, synthetic construct
  source 1..17: mol_type = other DNA
aggctgtgggagctgcc

SEQ ID NO: 155329 - DNA, 17 bp, synthetic construct
  source 1..17: mol_type = other DNA
caggctgtgggagctgc

SEQ ID NO: 155330 - DNA, 17 bp, synthetic construct
  source 1..17: mol_type = other DNA
ccaggctgtgggagctg

SEQ ID NO: 155331 - DNA, 17 bp, synthetic construct
  source 1..17: mol_type = other DNA
cccaggctgtgggagct

SEQ ID NO: 155332 - DNA, 17 bp, synthetic construct
  source 1..17: mol_type = other DNA
gcccaggctgtgggagc

SEQ ID NO: 155333 - DNA, 17 bp, synthetic construct
  source 1..17: mol_type = other DNA
tgcccaggctgtgggag

SEQ ID NO: 155334 - DNA, 17 bp, synthetic construct
  source 1..17: mol_type = other DNA
ctgcccaggctgtggga

SEQ ID NO: 155335 - DNA, 17 bp, synthetic construct
  source 1..17: mol_type = other DNA
gctgcccaggctgtggg

SEQ ID NO: 155336 - DNA, 17 bp, synthetic construct
  source 1..17: mol_type = other DNA
cgctgcccaggctgtgg

SEQ ID NO: 155337 - DNA, 17 bp, synthetic construct
  source 1..17: mol_type = other DNA
acgctgcccaggctgtg

SEQ ID NO: 155338 - DNA, 17 bp, synthetic construct
  source 1..17: mol_type = other DNA
gacgctgcccaggctgt

SEQ ID NO: 155339 - DNA, 17 bp, synthetic construct
  source 1..17: mol_type = other DNA
ggacgctgcccaggctg

SEQ ID NO: 155340 - DNA, 17 bp, synthetic construct
  source 1..17: mol_type = other DNA
cggacgctgcccaggct

SEQ ID NO: 155341 - DNA, 17 bp, synthetic construct
  source 1..17: mol_type = other DNA
gcggacgctgcccaggc

SEQ ID NO: 155342 - DNA, 17 bp, synthetic construct
  source 1..17: mol_type = other DNA
agcggacgctgcccagg

SEQ ID NO: 155343 - DNA, 17 bp, synthetic construct
  source 1..17: mol_type = other DNA
gagcggacgctgcccag

SEQ ID NO: 155344 - DNA, 17 bp, synthetic construct
  source 1..17: mol_type = other DNA
ggagcggacgctgccca

SEQ ID NO: 155345 - DNA, 17 bp, synthetic construct
  source 1..17: mol_type = other DNA
tggagcggacgctgccc

SEQ ID NO: 155346 - DNA, 17 bp, synthetic construct
  source 1..17: mol_type = other DNA
atggagcggacgctgcc

SEQ ID NO: 155347 - DNA, 17 bp, synthetic construct
  source 1..17: mol_type = other DNA
gatggagcggacgctgc

SEQ ID NO: 155348 - DNA, 17 bp, synthetic construct
  source 1..17: mol_type = other DNA
ggatggagcggacgctg

SEQ ID NO: 155349 - DNA, 17 bp, synthetic construct
  source 1..17: mol_type = other DNA
gggatggagcggacgct

SEQ ID NO: 155350 - DNA, 17 bp, synthetic construct
  source 1..17: mol_type = other DNA
agggatggagcggacgc

SEQ ID NO: 155351 - DNA, 17 bp, synthetic construct
  source 1..17: mol_type = other DNA
cagggatggagcggacg

SEQ ID NO: 155352 - DNA, 17 bp, synthetic construct
  source 1..17: mol_type = other DNA
gcagggatggagcggac

SEQ ID NO: 155353 - DNA, 17 bp, synthetic construct
  source 1..17: mol_type = other DNA
agcagggatggagcgga

SEQ ID NO: 155354 - DNA, 17 bp, synthetic construct
  source 1..17: mol_type = other DNA
tagcagggatggagcgg

SEQ ID NO: 155355 - DNA, 17 bp, synthetic construct
  source 1..17: mol_type = other DNA
ctagcagggatggagcg

SEQ ID NO: 155356 - DNA, 17 bp, synthetic construct
  source 1..17: mol_type = other DNA
actagcagggatggagc

SEQ ID NO: 155357 - DNA, 17 bp, synthetic construct
  source 1..17: mol_type = other DNA
aactagcagggatggag

SEQ ID NO: 155358 - DNA, 17 bp, synthetic construct
  source 1..17: mol_type = other DNA
gaactagcagggatgga

SEQ ID NO: 155359 - DNA, 17 bp, synthetic construct
  source 1..17: mol_type = other DNA
agaactagcagggatgg

SEQ ID NO: 155360 - DNA, 17 bp, synthetic construct
  source 1..17: mol_type = other DNA
gagaactagcagggatg

SEQ ID NO: 155361 - DNA, 17 bp, synthetic construct
  source 1..17: mol_type = other DNA
ggagaactagcagggat

SEQ ID NO: 155362 - DNA, 17 bp, synthetic construct
  source 1..17: mol_type = other DNA
cggagaactagcaggga

SEQ ID NO: 155363 - DNA, 17 bp, synthetic construct
  source 1..17: mol_type = other DNA
acggagaactagcaggg

SEQ ID NO: 155364 - DNA, 17 bp, synthetic construct
  source 1..17: mol_type = other DNA
cacggagaactagcagg

SEQ ID NO: 155365 - DNA, 17 bp, synthetic construct
  source 1..17: mol_type = other DNA
ccacggagaactagcag

SEQ ID NO: 155366 - DNA, 17 bp, synthetic construct
  source 1..17: mol_type = other DNA
gccacggagaactagca

SEQ ID NO: 155367 - DNA, 17 bp, synthetic construct
  source 1..17: mol_type = other DNA
ggccacggagaactagc

SEQ ID NO: 155368 - DNA, 17 bp, synthetic construct
  source 1..17: mol_type = other DNA
aggccacggagaactag

SEQ ID NO: 155369 - DNA, 17 bp, synthetic construct
  source 1..17: mol_type = other DNA
gaggccacggagaacta

SEQ ID NO: 155370 - DNA, 17 bp, synthetic construct
  source 1..17: mol_type = other DNA
cgaggccacggagaact

SEQ ID NO: 155371 - DNA, 17 bp, synthetic construct
  source 1..17: mol_type = other DNA
ccgaggccacggagaac

SEQ ID NO: 155372 - DNA, 17 bp, synthetic construct
  source 1..17: mol_type = other DNA
cccgaggccacggagaa

SEQ ID NO: 155373 - DNA, 17 bp, synthetic construct
  source 1..17: mol_type = other DNA
gcccgaggccacggaga

SEQ ID NO: 155374 - DNA, 17 bp, synthetic construct
  source 1..17: mol_type = other DNA
tgcccgaggccacggag

SEQ ID NO: 155375 - DNA, 17 bp, synthetic construct
  source 1..17: mol_type = other DNA
ctgcccgaggccacgga

SEQ ID NO: 155376 - DNA, 17 bp, synthetic construct
  source 1..17: mol_type = other DNA
gctgcccgaggccacgg

SEQ ID NO: 155377 - DNA, 17 bp, synthetic construct
  source 1..17: mol_type = other DNA
agctgcccgaggccacg

SEQ ID NO: 155378 - DNA, 17 bp, synthetic construct
  source 1..17: mol_type = other DNA
gagctgcccgaggccac

SEQ ID NO: 155379 - DNA, 17 bp, synthetic construct
  source 1..17: mol_type = other DNA
ggagctgcccgaggcca

SEQ ID NO: 155380 - DNA, 17 bp, synthetic construct
  source 1..17: mol_type = other DNA
tggagctgcccgaggcc

SEQ ID NO: 155381 - DNA, 17 bp, synthetic construct
  source 1..17: mol_type = other DNA
ctggagctgcccgaggc

SEQ ID NO: 155382 - DNA, 17 bp, synthetic construct
  source 1..17: mol_type = other DNA
cctggagctgcccgagg

SEQ ID NO: 155383 - DNA, 17 bp, synthetic construct
  source 1..17: mol_type = other DNA
tcctggagctgcccgag

SEQ ID NO: 155384 - DNA, 17 bp, synthetic construct
  source 1..17: mol_type = other DNA
ctcctggagctgcccga

SEQ ID NO: 155385 - DNA, 17 bp, synthetic construct
  source 1..17: mol_type = other DNA
gctcctggagctgcccg

SEQ ID NO: 155386 - DNA, 17 bp, synthetic construct
  source 1..17: mol_type = other DNA
agctcctggagctgccc

SEQ ID NO: 155387 - DNA, 17 bp, synthetic construct
  source 1..17: mol_type = other DNA
gagctcctggagctgcc

SEQ ID NO: 155388 - DNA, 17 bp, synthetic construct
  source 1..17: mol_type = other DNA
ggagctcctggagctgc

SEQ ID NO: 155389 - DNA, 17 bp, synthetic construct
  source 1..17: mol_type = other DNA
gggagctcctggagctg

SEQ ID NO: 155390 - DNA, 17 bp, synthetic construct
  source 1..17: mol_type = other DNA
agggagctcctggagct

SEQ ID NO: 155391 - DNA, 17 bp, synthetic construct
  source 1..17: mol_type = other DNA
cagggagctcctggagc

SEQ ID NO: 155392 - DNA, 17 bp, synthetic construct
  source 1..17: mol_type = other DNA
acagggagctcctggag

SEQ ID NO: 155393 - DNA, 17 bp, synthetic construct
  source 1..17: mol_type = other DNA
cacagggagctcctgga

SEQ ID NO: 155394 - DNA, 17 bp, synthetic construct
  source 1..17: mol_type = other DNA
gcacagggagctcctgg

SEQ ID NO: 155395 - DNA, 17 bp, synthetic construct
  source 1..17: mol_type = other DNA
agcacagggagctcctg

SEQ ID NO: 155396 - DNA, 17 bp, synthetic construct
  source 1..17: mol_type = other DNA
gagcacagggagctcct

SEQ ID NO: 155397 - DNA, 17 bp, synthetic construct
  source 1..17: mol_type = other DNA
cgagcacagggagctcc

SEQ ID NO: 155398 - DNA, 17 bp, synthetic construct
  source 1..17: mol_type = other DNA
ccgagcacagggagctc

SEQ ID NO: 155399 - DNA, 17 bp, synthetic construct
  source 1..17: mol_type = other DNA
accgagcacagggagct

SEQ ID NO: 155400 - DNA, 17 bp, synthetic construct
  source 1..17: mol_type = other DNA
aaccgagcacagggagc

SEQ ID NO: 155401 - DNA, 17 bp, synthetic construct
  source 1..17: mol_type = other DNA
aaaccgagcacagggag

SEQ ID NO: 155402 - DNA, 17 bp, synthetic construct
  source 1..17: mol_type = other DNA
gaaaccgagcacaggga

SEQ ID NO: 155403 - DNA, 17 bp, synthetic construct
  source 1..17: mol_type = other DNA
agaaaccgagcacaggg

SEQ ID NO: 155404 - DNA, 17 bp, synthetic construct
  source 1..17: mol_type = other DNA
gagaaaccgagcacagg

SEQ ID NO: 155405 - DNA, 17 bp, synthetic construct
  source 1..17: mol_type = other DNA
cgagaaaccgagcacag

SEQ ID NO: 155406 - DNA, 17 bp, synthetic construct
  source 1..17: mol_type = other DNA
acgagaaaccgagcaca

SEQ ID NO: 155407 - DNA, 17 bp, synthetic construct
  source 1..17: mol_type = other DNA
gacgagaaaccgagcac

SEQ ID NO: 155408 - DNA, 17 bp, synthetic construct
  source 1..17: mol_type = other DNA
agacgagaaaccgagca

SEQ ID NO: 155409 - DNA, 17 bp, synthetic construct
  source 1..17: mol_type = other DNA
cagacgagaaaccgagc

SEQ ID NO: 155410 - DNA, 17 bp, synthetic construct
  source 1..17: mol_type = other DNA
gcagacgagaaaccgag

SEQ ID NO: 155411 - DNA, 17 bp, synthetic construct
  source 1..17: mol_type = other DNA
tgcagacgagaaaccga

SEQ ID NO: 155412 - DNA, 17 bp, synthetic construct
  source 1..17: mol_type = other DNA
ctgcagacgagaaaccg

SEQ ID NO: 155413 - DNA, 17 bp, synthetic construct
  source 1..17: mol_type = other DNA
tctgcagacgagaaacc

SEQ ID NO: 155414 - DNA, 17 bp, synthetic construct
  source 1..17: mol_type = other DNA
ctctgcagacgagaaac

SEQ ID NO: 155415 - DNA, 17 bp, synthetic construct
  source 1..17: mol_type = other DNA
actctgcagacgagaaa

SEQ ID NO: 155416 - DNA, 17 bp, synthetic construct
  source 1..17: mol_type = other DNA
cactctgcagacgagaa

SEQ ID NO: 155417 - DNA, 17 bp, synthetic construct
  source 1..17: mol_type = other DNA
ccactctgcagacgaga

SEQ ID NO: 155418 - DNA, 17 bp, synthetic construct
  source 1..17: mol_type = other DNA
cccactctgcagacgag

SEQ ID NO: 155419 - DNA, 17 bp, synthetic construct
  source 1..17: mol_type = other DNA
ccccactctgcagacga

SEQ ID NO: 155420 - DNA, 17 bp, synthetic construct
  source 1..17: mol_type = other DNA
tccccactctgcagacg

SEQ ID NO: 155421 - DNA, 17 bp, synthetic construct
  source 1..17: mol_type = other DNA
atccccactctgcagac

SEQ ID NO: 155422 - DNA, 17 bp, synthetic construct
  source 1..17: mol_type = other DNA
catccccactctgcaga

SEQ ID NO: 155423 - DNA, 17 bp, synthetic construct
  source 1..17: mol_type = other DNA
gcatccccactctgcag

SEQ ID NO: 155424 - DNA, 17 bp, synthetic construct
  source 1..17: mol_type = other DNA
ggcatccccactctgca

SEQ ID NO: 155425 - DNA, 17 bp, synthetic construct
  source 1..17: mol_type = other DNA
tggcatccccactctgc

SEQ ID NO: 155426 - DNA, 17 bp, synthetic construct
  source 1..17: mol_type = other DNA
ctggcatccccactctg

SEQ ID NO: 155427 - DNA, 17 bp, synthetic construct
  source 1..17: mol_type = other DNA
cctggcatccccactct

SEQ ID NO: 155428 - DNA, 17 bp, synthetic construct
  source 1..17: mol_type = other DNA
gcctggcatccccactc

SEQ ID NO: 155429 - DNA, 17 bp, synthetic construct
  source 1..17: mol_type = other DNA
agcctggcatccccact

SEQ ID NO: 155430 - DNA, 17 bp, synthetic construct
  source 1..17: mol_type = other DNA
gagcctggcatccccac

SEQ ID NO: 155431 - DNA, 17 bp, synthetic construct
  source 1..17: mol_type = other DNA
ggagcctggcatcccca

SEQ ID NO: 155432 - DNA, 17 bp, synthetic construct
  source 1..17: mol_type = other DNA
gggagcctggcatcccc

SEQ ID NO: 155433 - DNA, 17 bp, synthetic construct
  source 1..17: mol_type = other DNA
tgggagcctggcatccc

SEQ ID NO: 155434 - DNA, 17 bp, synthetic construct
  source 1..17: mol_type = other DNA
gtgggagcctggcatcc

SEQ ID NO: 155435 - DNA, 17 bp, synthetic construct
  source 1..17: mol_type = other DNA
ggtgggagcctggcatc

SEQ ID NO: 155436 - DNA, 17 bp, synthetic construct
  source 1..17: mol_type = other DNA
gggtgggagcctggcat

SEQ ID NO: 155437 - DNA, 17 bp, synthetic construct
  source 1..17: mol_type = other DNA
ggggtgggagcctggca

SEQ ID NO: 155438 - DNA, 17 bp, synthetic construct
  source 1..17: mol_type = other DNA
cggggtgggagcctggc

SEQ ID NO: 155439 - DNA, 17 bp, synthetic construct
  source 1..17: mol_type = other DNA
ccggggtgggagcctgg

SEQ ID NO: 155440 - DNA, 17 bp, synthetic construct
  source 1..17: mol_type = other DNA
gccggggtgggagcctg

SEQ ID NO: 155441 - DNA, 17 bp, synthetic construct
  source 1..17: mol_type = other DNA
tgccggggtgggagcct

SEQ ID NO: 155442 - DNA, 17 bp, synthetic construct
  source 1..17: mol_type = other DNA
ctgccggggtgggagcc

SEQ ID NO: 155443 - DNA, 17 bp, synthetic construct
  source 1..17: mol_type = other DNA
gctgccggggtgggagc

SEQ ID NO: 155444 - DNA, 17 bp, synthetic construct
  source 1..17: mol_type = other DNA
cgctgccggggtgggag

SEQ ID NO: 155445 - DNA, 17 bp, synthetic construct
  source 1..17: mol_type = other DNA
ccgctgccggggtggga

SEQ ID NO: 155446 - DNA, 17 bp, synthetic construct
  source 1..17: mol_type = other DNA
gccgctgccggggtggg

SEQ ID NO: 155447 - DNA, 17 bp, synthetic construct
  source 1..17: mol_type = other DNA
tgccgctgccggggtgg

SEQ ID NO: 155448 - DNA, 17 bp, synthetic construct
  source 1..17: mol_type = other DNA
ctgccgctgccggggtg

SEQ ID NO: 155449 - DNA, 17 bp, synthetic construct
  source 1..17: mol_type = other DNA
cctgccgctgccggggt

SEQ ID NO: 155450 - DNA, 17 bp, synthetic construct
  source 1..17: mol_type = other DNA
ccctgccgctgccgggg

SEQ ID NO: 155451 - DNA, 17 bp, synthetic construct
  source 1..17: mol_type = other DNA
tccctgccgctgccggg

SEQ ID NO: 155452 - DNA, 17 bp, synthetic construct
  source 1..17: mol_type = other DNA
gtccctgccgctgccgg

SEQ ID NO: 155453 - DNA, 17 bp, synthetic construct
  source 1..17: mol_type = other DNA
ggtccctgccgctgccg

SEQ ID NO: 155454 - DNA, 17 bp, synthetic construct
  source 1..17: mol_type = other DNA
gggtccctgccgctgcc

SEQ ID NO: 155455 - DNA, 17 bp, synthetic construct
  source 1..17: mol_type = other DNA
ggggtccctgccgctgc

SEQ ID NO: 155456 - DNA, 17 bp, synthetic construct
  source 1..17: mol_type = other DNA
tggggtccctgccgctg

SEQ ID NO: 155457 - DNA, 17 bp, synthetic construct
  source 1..17: mol_type = other DNA
gtggggtccctgccgct

SEQ ID NO: 155458 - DNA, 17 bp, synthetic construct
  source 1..17: mol_type = other DNA
tgtggggtccctgccgc

SEQ ID NO: 155459 - DNA, 17 bp, synthetic construct
  source 1..17: mol_type = other DNA
atgtggggtccctgccg

SEQ ID NO: 155460 - DNA, 17 bp, synthetic construct
  source 1..17: mol_type = other DNA
gatgtggggtccctgcc

SEQ ID NO: 155461 - DNA, 17 bp, synthetic construct
  source 1..17: mol_type = other DNA
ggatgtggggtccctgc

SEQ ID NO: 155462 - DNA, 17 bp, synthetic construct
  source 1..17: mol_type = other DNA
tggatgtggggtccctg

SEQ ID NO: 155463 - DNA, 17 bp, synthetic construct
  source 1..17: mol_type = other DNA
ctggatgtggggtccct

SEQ ID NO: 155464 - DNA, 17 bp, synthetic construct
  source 1..17: mol_type = other DNA
gctggatgtggggtccc

SEQ ID NO: 155465 - DNA, 17 bp, synthetic construct
  source 1..17: mol_type = other DNA
agctggatgtggggtcc

SEQ ID NO: 155466 - DNA, 17 bp, synthetic construct
  source 1..17: mol_type = other DNA
gagctggatgtggggtc

SEQ ID NO: 155467 - DNA, 17 bp, synthetic construct
  source 1..17: mol_type = other DNA
cgagctggatgtggggt

SEQ ID NO: 155468 - DNA, 17 bp, synthetic construct
  source 1..17: mol_type = other DNA
gcgagctggatgtgggg

SEQ ID NO: 155469 - DNA, 17 bp, synthetic construct
  source 1..17: mol_type = other DNA
agcgagctggatgtggg

SEQ ID NO: 155470 - DNA, 17 bp, synthetic construct
  source 1..17: mol_type = other DNA
gagcgagctggatgtgg

SEQ ID NO: 155471 - DNA, 17 bp, synthetic construct
  source 1..17: mol_type = other DNA
tgagcgagctggatgtg

SEQ ID NO: 155472 - DNA, 17 bp, synthetic construct
  source 1..17: mol_type = other DNA
ctgagcgagctggatgt

SEQ ID NO: 155473 - DNA, 17 bp, synthetic construct
  source 1..17: mol_type = other DNA
gctgagcgagctggatg

SEQ ID NO: 155474 - DNA, 17 bp, synthetic construct
  source 1..17: mol_type = other DNA
ggctgagcgagctggat

SEQ ID NO: 155475 - DNA, 17 bp, synthetic construct
  source 1..17: mol_type = other DNA
gggctgagcgagctgga

SEQ ID NO: 155476 - DNA, 17 bp, synthetic construct
  source 1..17: mol_type = other DNA
ggggctgagcgagctgg

SEQ ID NO: 155477 - DNA, 17 bp, synthetic construct
  source 1..17: mol_type = other DNA
tggggctgagcgagctg

SEQ ID NO: 155478 - DNA, 17 bp, synthetic construct
  source 1..17: mol_type = other DNA
gtggggctgagcgagct

SEQ ID NO: 155479 - DNA, 17 bp, synthetic construct
  source 1..17: mol_type = other DNA
agtggggctgagcgagc

SEQ ID NO: 155480 - DNA, 17 bp, synthetic construct
  source 1..17: mol_type = other DNA
gagtggggctgagcgag

SEQ ID NO: 155481 - DNA, 17 bp, synthetic construct
  source 1..17: mol_type = other DNA
agagtggggctgagcga

SEQ ID NO: 155482 - DNA, 17 bp, synthetic construct
  source 1..17: mol_type = other DNA
gagagtggggctgagcg

SEQ ID NO: 155483 - DNA, 17 bp, synthetic construct
  source 1..17: mol_type = other DNA
agagagtggggctgagc

SEQ ID NO: 155484 - DNA, 17 bp, synthetic construct
  source 1..17: mol_type = other DNA
gagagagtggggctgag

SEQ ID NO: 155485 - DNA, 17 bp, synthetic construct
  source 1..17: mol_type = other DNA
tgagagagtggggctga

SEQ ID NO: 155486 - DNA, 17 bp, synthetic construct
  source 1..17: mol_type = other DNA
ctgagagagtggggctg

SEQ ID NO: 155487 - DNA, 17 bp, synthetic construct
  source 1..17: mol_type = other DNA
cctgagagagtggggct

SEQ ID NO: 155488 - DNA, 17 bp, synthetic construct
  source 1..17: mol_type = other DNA
ccctgagagagtggggc

SEQ ID NO: 155489 - DNA, 17 bp, synthetic construct
  source 1..17: mol_type = other DNA
tccctgagagagtgggg

SEQ ID NO: 155490 - DNA, 17 bp, synthetic construct
  source 1..17: mol_type = other DNA
ctccctgagagagtggg

SEQ ID NO: 155491 - DNA, 17 bp, synthetic construct
  source 1..17: mol_type = other DNA
gctccctgagagagtgg

SEQ ID NO: 155492 - DNA, 17 bp, synthetic construct
  source 1..17: mol_type = other DNA
ggctccctgagagagtg

SEQ ID NO: 155493 - DNA, 17 bp, synthetic construct
  source 1..17: mol_type = other DNA
gggctccctgagagagt

SEQ ID NO: 155494 - DNA, 17 bp, synthetic construct
  source 1..17: mol_type = other DNA
cgggctccctgagagag

SEQ ID NO: 155495 - DNA, 17 bp, synthetic construct
  source 1..17: mol_type = other DNA
ccgggctccctgagaga

SEQ ID NO: 155496 - DNA, 17 bp, synthetic construct
  source 1..17: mol_type = other DNA
accgggctccctgagag

SEQ ID NO: 155497 - DNA, 17 bp, synthetic construct
  source 1..17: mol_type = other DNA
gaccgggctccctgaga

SEQ ID NO: 155498 - DNA, 17 bp, synthetic construct
  source 1..17: mol_type = other DNA
agaccgggctccctgag

SEQ ID NO: 155499 - DNA, 17 bp, synthetic construct
  source 1..17: mol_type = other DNA
gagaccgggctccctga

SEQ ID NO: 155500 - DNA, 17 bp, synthetic construct
  source 1..17: mol_type = other DNA
ggagaccgggctccctg

SEQ ID NO: 155501 - DNA, 17 bp, synthetic construct
  source 1..17: mol_type = other DNA
tggagaccgggctccct

SEQ ID NO: 155502 - DNA, 17 bp, synthetic construct
  source 1..17: mol_type = other DNA
gtggagaccgggctccc

SEQ ID NO: 155503 - DNA, 17 bp, synthetic construct
  source 1..17: mol_type = other DNA
ggtggagaccgggctcc

SEQ ID NO: 155504 - DNA, 17 bp, synthetic construct
  source 1..17: mol_type = other DNA
aggtggagaccgggctc

SEQ ID NO: 155505 - DNA, 17 bp, synthetic construct
  source 1..17: mol_type = other DNA
caggtggagaccgggct

SEQ ID NO: 155506 - DNA, 17 bp, synthetic construct
  source 1..17: mol_type = other DNA
tcaggtggagaccgggc

SEQ ID NO: 155507 - DNA, 17 bp, synthetic construct
  source 1..17: mol_type = other DNA
ctcaggtggagaccggg

SEQ ID NO: 155508 - DNA, 17 bp, synthetic construct
  source 1..17: mol_type = other DNA
gctcaggtggagaccgg

SEQ ID NO: 155509 - DNA, 17 bp, synthetic construct
  source 1..17: mol_type = other DNA
ggctcaggtggagaccg

SEQ ID NO: 155510 - DNA, 17 bp, synthetic construct
  source 1..17: mol_type = other DNA
gggctcaggtggagacc

SEQ ID NO: 155511 - DNA, 17 bp, synthetic construct
  source 1..17: mol_type = other DNA
tgggctcaggtggagac

SEQ ID NO: 155512 - DNA, 17 bp, synthetic construct
  source 1..17: mol_type = other DNA
gtgggctcaggtggaga

SEQ ID NO: 155513 - DNA, 17 bp, synthetic construct
  source 1..17: mol_type = other DNA
agtgggctcaggtggag

SEQ ID NO: 155514 - DNA, 17 bp, synthetic construct
  source 1..17: mol_type = other DNA
aagtgggctcaggtgga

SEQ ID NO: 155515 - DNA, 17 bp, synthetic construct
  source 1..17: mol_type = other DNA
caagtgggctcaggtgg

SEQ ID NO: 155516 - DNA, 17 bp, synthetic construct
  source 1..17: mol_type = other DNA
ccaagtgggctcaggtg

SEQ ID NO: 155517 - DNA, 17 bp, synthetic construct
  source 1..17: mol_type = other DNA
gccaagtgggctcaggt

SEQ ID NO: 155518 - DNA, 17 bp, synthetic construct
  source 1..17: mol_type = other DNA
cgccaagtgggctcagg

SEQ ID NO: 155519 - DNA, 17 bp, synthetic construct
  source 1..17: mol_type = other DNA
ccgccaagtgggctcag

SEQ ID NO: 155520 - DNA, 17 bp, synthetic construct
  source 1..17: mol_type = other DNA
gccgccaagtgggctca

SEQ ID NO: 155521 - DNA, 17 bp, synthetic construct
  source 1..17: mol_type = other DNA
ggccgccaagtgggctc

SEQ ID NO: 155522 - DNA, 17 bp, synthetic construct
  source 1..17: mol_type = other DNA
tggccgccaagtgggct

SEQ ID NO: 155523 - DNA, 17 bp, synthetic construct
  source 1..17: mol_type = other DNA
gtggccgccaagtgggc

SEQ ID NO: 155524 - DNA, 17 bp, synthetic construct
  source 1..17: mol_type = other DNA
tgtggccgccaagtggg

SEQ ID NO: 155525 - DNA, 17 bp, synthetic construct
  source 1..17: mol_type = other DNA
ctgtggccgccaagtgg

SEQ ID NO: 155526 - DNA, 17 bp, synthetic construct
  source 1..17: mol_type = other DNA
cctgtggccgccaagtg

SEQ ID NO: 155527 - DNA, 17 bp, synthetic construct
  source 1..17: mol_type = other DNA
gcctgtggccgccaagt

SEQ ID NO: 155528 - DNA, 17 bp, synthetic construct
  source 1..17: mol_type = other DNA
tgcctgtggccgccaag

SEQ ID NO: 155529 - DNA, 17 bp, synthetic construct
  source 1..17: mol_type = other DNA
atgcctgtggccgccaa

SEQ ID NO: 155530 - DNA, 17 bp, synthetic construct
  source 1..17: mol_type = other DNA
catgcctgtggccgcca

SEQ ID NO: 155531 - DNA, 17 bp, synthetic construct
  source 1..17: mol_type = other DNA
ccatgcctgtggccgcc

SEQ ID NO: 155532 - DNA, 17 bp, synthetic construct
  source 1..17: mol_type = other DNA
cccatgcctgtggccgc

SEQ ID NO: 155533 - DNA, 17 bp, synthetic construct
  source 1..17: mol_type = other DNA
tcccatgcctgtggccg

SEQ ID NO: 155534 - DNA, 17 bp, synthetic construct
  source 1..17: mol_type = other DNA
gtcccatgcctgtggcc

SEQ ID NO: 155535 - DNA, 17 bp, synthetic construct
  source 1..17: mol_type = other DNA
tgtcccatgcctgtggc

SEQ ID NO: 155536 - DNA, 17 bp, synthetic construct
  source 1..17: mol_type = other DNA
ctgtcccatgcctgtgg

SEQ ID NO: 155537 - DNA, 17 bp, synthetic construct
  source 1..17: mol_type = other DNA
cctgtcccatgcctgtg

SEQ ID NO: 155538 - DNA, 17 bp, synthetic construct
  source 1..17: mol_type = other DNA
ccctgtcccatgcctgt

SEQ ID NO: 155539 - DNA, 17 bp, synthetic construct
  source 1..17: mol_type = other DNA
tccctgtcccatgcctg

SEQ ID NO: 155540 - DNA, 17 bp, synthetic construct
  source 1..17: mol_type = other DNA
ctccctgtcccatgcct

SEQ ID NO: 155541 - DNA, 17 bp, synthetic construct
  source 1..17: mol_type = other DNA
gctccctgtcccatgcc

SEQ ID NO: 155542 - DNA, 17 bp, synthetic construct
  source 1..17: mol_type = other DNA
ggctccctgtcccatgc

SEQ ID NO: 155543 - DNA, 17 bp, synthetic construct
  source 1..17: mol_type = other DNA
aggctccctgtcccatg

SEQ ID NO: 155544 - DNA, 17 bp, synthetic construct
  source 1..17: mol_type = other DNA
caggctccctgtcccat

SEQ ID NO: 155545 - DNA, 17 bp, synthetic construct
  source 1..17: mol_type = other DNA
tcaggctccctgtccca

SEQ ID NO: 155546 - DNA, 17 bp, synthetic construct
  source 1..17: mol_type = other DNA
ctcaggctccctgtccc

SEQ ID NO: 155547 - DNA, 17 bp, synthetic construct
  source 1..17: mol_type = other DNA
cctcaggctccctgtcc

SEQ ID NO: 155548 - DNA, 17 bp, synthetic construct
  source 1..17: mol_type = other DNA
ccctcaggctccctgtc

SEQ ID NO: 155549 - DNA, 17 bp, synthetic construct
  source 1..17: mol_type = other DNA
gccctcaggctccctgt

SEQ ID NO: 155550 - DNA, 17 bp, synthetic construct
  source 1..17: mol_type = other DNA
agccctcaggctccctg

SEQ ID NO: 155551 - DNA, 17 bp, synthetic construct
  source 1..17: mol_type = other DNA
gagccctcaggctccct

SEQ ID NO: 155552 - DNA, 17 bp, synthetic construct
  source 1..17: mol_type = other DNA
ggagccctcaggctccc

SEQ ID NO: 155553 - DNA, 17 bp, synthetic construct
  source 1..17: mol_type = other DNA
aggagccctcaggctcc

SEQ ID NO: 155554 - DNA, 17 bp, synthetic construct
  source 1..17: mol_type = other DNA
caggagccctcaggctc

SEQ ID NO: 155555 - DNA, 17 bp, synthetic construct
  source 1..17: mol_type = other DNA
ccaggagccctcaggct

SEQ ID NO: 155556 - DNA, 17 bp, synthetic construct
  source 1..17: mol_type = other DNA
gccaggagccctcaggc

SEQ ID NO: 155557 - DNA, 17 bp, synthetic construct
  source 1..17: mol_type = other DNA
ggccaggagccctcagg

SEQ ID NO: 155558 - DNA, 17 bp, synthetic construct
  source 1..17: mol_type = other DNA
tggccaggagccctcag

SEQ ID NO: 155559 - DNA, 17 bp, synthetic construct
  source 1..17: mol_type = other DNA
gtggccaggagccctca

SEQ ID NO: 155560 - DNA, 17 bp, synthetic construct
  source 1..17: mol_type = other DNA
agtggccaggagccctc

SEQ ID NO: 155561 - DNA, 17 bp, synthetic construct
  source 1..17: mol_type = other DNA
gagtggccaggagccct

SEQ ID NO: 155562 - DNA, 17 bp, synthetic construct
  source 1..17: mol_type = other DNA
ggagtggccaggagccc

SEQ ID NO: 155563 - DNA, 17 bp, synthetic construct
  source 1..17: mol_type = other DNA
aggagtggccaggagcc

SEQ ID NO: 155564 - DNA, 17 bp, synthetic construct
  source 1..17: mol_type = other DNA
caggagtggccaggagc

SEQ ID NO: 155565 - DNA, 17 bp, synthetic construct
  source 1..17: mol_type = other DNA
ccaggagtggccaggag

SEQ ID NO: 155566 - DNA, 17 bp, synthetic construct
  source 1..17: mol_type = other DNA
cccaggagtggccagga

SEQ ID NO: 155567 - DNA, 17 bp, synthetic construct
  source 1..17: mol_type = other DNA
acccaggagtggccagg

SEQ ID NO: 155568 - DNA, 17 bp, synthetic construct
  source 1..17: mol_type = other DNA
gacccaggagtggccag

SEQ ID NO: 155569 - DNA, 17 bp, synthetic construct
  source 1..17: mol_type = other DNA
agacccaggagtggcca

SEQ ID NO: 155570 - DNA, 17 bp, synthetic construct
  source 1..17: mol_type = other DNA
gagacccaggagtggcc

SEQ ID NO: 155571 - DNA, 17 bp, synthetic construct
  source 1..17: mol_type = other DNA
tgagacccaggagtggc

SEQ ID NO: 155572 - DNA, 17 bp, synthetic construct
  source 1..17: mol_type = other DNA
gtgagacccaggagtgg

SEQ ID NO: 155573 - DNA, 17 bp, synthetic construct
  source 1..17: mol_type = other DNA
agtgagacccaggagtg

SEQ ID NO: 155574 - DNA, 17 bp, synthetic construct
  source 1..17: mol_type = other DNA
gagtgagacccaggagt

SEQ ID NO: 155575 - DNA, 17 bp, synthetic construct
  source 1..17: mol_type = other DNA
ggagtgagacccaggag

SEQ ID NO: 155576 - DNA, 17 bp, synthetic construct
  source 1..17: mol_type = other DNA
gggagtgagacccagga

SEQ ID NO: 155577 - DNA, 17 bp, synthetic construct
  source 1..17: mol_type = other DNA
cgggagtgagacccagg

SEQ ID NO: 155578 - DNA, 17 bp, synthetic construct
  source 1..17: mol_type = other DNA
ccgggagtgagacccag

SEQ ID NO: 155579 - DNA, 17 bp, synthetic construct
  source 1..17: mol_type = other DNA
cccgggagtgagaccca

SEQ ID NO: 155580 - DNA, 17 bp, synthetic construct
  source 1..17: mol_type = other DNA
acccgggagtgagaccc

SEQ ID NO: 155581 - DNA, 17 bp, synthetic construct
  source 1..17: mol_type = other DNA
gacccgggagtgagacc

SEQ ID NO: 155582 - DNA, 17 bp, synthetic construct
  source 1..17: mol_type = other DNA
agacccgggagtgagac

SEQ ID NO: 155583 - DNA, 17 bp, synthetic construct
  source 1..17: mol_type = other DNA
gagacccgggagtgaga

SEQ ID NO: 155584 - DNA, 17 bp, synthetic construct
  source 1..17: mol_type = other DNA
tgagacccgggagtgag

SEQ ID NO: 155585 - DNA, 17 bp, synthetic construct
  source 1..17: mol_type = other DNA
ctgagacccgggagtga

SEQ ID NO: 155586 - DNA, 17 bp, synthetic construct
  source 1..17: mol_type = other DNA
actgagacccgggagtg

SEQ ID NO: 155587 - DNA, 17 bp, synthetic construct
  source 1..17: mol_type = other DNA
cactgagacccgggagt

SEQ ID NO: 155588 - DNA, 17 bp, synthetic construct
  source 1..17: mol_type = other DNA
ccactgagacccgggag

SEQ ID NO: 155589 - DNA, 17 bp, synthetic construct
  source 1..17: mol_type = other DNA
cccactgagacccggga

SEQ ID NO: 155590 - DNA, 17 bp, synthetic construct
  source 1..17: mol_type = other DNA
ccccactgagacccggg

SEQ ID NO: 155591 - DNA, 17 bp, synthetic construct
  source 1..17: mol_type = other DNA
accccactgagacccgg

SEQ ID NO: 155592 - DNA, 17 bp, synthetic construct
  source 1..17: mol_type = other DNA
caccccactgagacccg

SEQ ID NO: 155593 - DNA, 17 bp, synthetic construct
  source 1..17: mol_type = other DNA
ccaccccactgagaccc

SEQ ID NO: 155594 - DNA, 17 bp, synthetic construct
  source 1..17: mol_type = other DNA
gccaccccactgagacc

SEQ ID NO: 155595 - DNA, 17 bp, synthetic construct
  source 1..17: mol_type = other DNA
ggccaccccactgagac

SEQ ID NO: 155596 - DNA, 17 bp, synthetic construct
  source 1..17: mol_type = other DNA
gggccaccccactgaga

SEQ ID NO: 155597 - DNA, 17 bp, synthetic construct
  source 1..17: mol_type = other DNA
cgggccaccccactgag

SEQ ID NO: 155598 - DNA, 17 bp, synthetic construct
  source 1..17: mol_type = other DNA
ccgggccaccccactga

SEQ ID NO: 155599 - DNA, 17 bp, synthetic construct
  source 1..17: mol_type = other DNA
gccgggccaccccactg

SEQ ID NO: 155600 - DNA, 17 bp, synthetic construct
  source 1..17: mol_type = other DNA
ggccgggccaccccact

SEQ ID NO: 155601 - DNA, 17 bp, synthetic construct
  source 1..17: mol_type = other DNA
gggccgggccaccccac

SEQ ID NO: 155602 - DNA, 17 bp, synthetic construct
  source 1..17: mol_type = other DNA
tgggccgggccacccca

SEQ ID NO: 155603 - DNA, 17 bp, synthetic construct
  source 1..17: mol_type = other DNA
gtgggccgggccacccc

SEQ ID NO: 155604 - DNA, 17 bp, synthetic construct
  source 1..17: mol_type = other DNA
agtgggccgggccaccc

SEQ ID NO: 155605 - DNA, 17 bp, synthetic construct
  source 1..17: mol_type = other DNA
cagtgggccgggccacc

SEQ ID NO: 155606 - DNA, 17 bp, synthetic construct
  source 1..17: mol_type = other DNA
ccagtgggccgggccac

SEQ ID NO: 155607 - DNA, 17 bp, synthetic construct
  source 1..17: mol_type = other DNA
tccagtgggccgggcca

SEQ ID NO: 155608 - DNA, 17 bp, synthetic construct
  source 1..17: mol_type = other DNA
atccagtgggccgggcc

SEQ ID NO: 155609 - DNA, 17 bp, synthetic construct
  source 1..17: mol_type = other DNA
catccagtgggccgggc

SEQ ID NO: 155610 - DNA, 17 bp, synthetic construct
  source 1..17: mol_type = other DNA
gcatccagtgggccggg

SEQ ID NO: 155611 - DNA, 17 bp, synthetic construct
  source 1..17: mol_type = other DNA
ggcatccagtgggccgg

SEQ ID NO: 155612 - DNA, 17 bp, synthetic construct
  source 1..17: mol_type = other DNA
gggcatccagtgggccg

SEQ ID NO: 155613 - DNA, 17 bp, synthetic construct
  source 1..17: mol_type = other DNA
agggcatccagtgggcc

SEQ ID NO: 155614 - DNA, 17 bp, synthetic construct
  source 1..17: mol_type = other DNA
cagggcatccagtgggc

SEQ ID NO: 155615 - DNA, 17 bp, synthetic construct
  source 1..17: mol_type = other DNA
gcagggcatccagtggg

SEQ ID NO: 155616 - DNA, 17 bp, synthetic construct
  source 1..17: mol_type = other DNA
ggcagggcatccagtgg

SEQ ID NO: 155617 - DNA, 17 bp, synthetic construct
  source 1..17: mol_type = other DNA
gggcagggcatccagtg

SEQ ID NO: 155618 - DNA, 17 bp, synthetic construct
  source 1..17: mol_type = other DNA
ggggcagggcatccagt

SEQ ID NO: 155619 - DNA, 17 bp, synthetic construct
  source 1..17: mol_type = other DNA
aggggcagggcatccag

SEQ ID NO: 155620 - DNA, 17 bp, synthetic construct
  source 1..17: mol_type = other DNA
gaggggcagggcatcca

SEQ ID NO: 155621 - DNA, 17 bp, synthetic construct
  source 1..17: mol_type = other DNA
ggaggggcagggcatcc

SEQ ID NO: 155622 - DNA, 17 bp, synthetic construct
  source 1..17: mol_type = other DNA
tggaggggcagggcatc

SEQ ID NO: 155623 - DNA, 17 bp, synthetic construct
  source 1..17: mol_type = other DNA
ttggaggggcagggcat

SEQ ID NO: 155624 - DNA, 17 bp, synthetic construct
  source 1..17: mol_type = other DNA
attggaggggcagggca

SEQ ID NO: 155625 - DNA, 17 bp, synthetic construct
  source 1..17: mol_type = other DNA
gattggaggggcagggc

SEQ ID NO: 155626 - DNA, 17 bp, synthetic construct
  source 1..17: mol_type = other DNA
agattggaggggcaggg

SEQ ID NO: 155627 - DNA, 17 bp, synthetic construct
  source 1..17: mol_type = other DNA
tagattggaggggcagg

SEQ ID NO: 155628 - DNA, 17 bp, synthetic construct
  source 1..17: mol_type = other DNA
ctagattggaggggcag

SEQ ID NO: 155629 - DNA, 17 bp, synthetic construct
  source 1..17: mol_type = other DNA
gctagattggaggggca

SEQ ID NO: 155630 - DNA, 17 bp, synthetic construct
  source 1..17: mol_type = other DNA
ggctagattggaggggc

SEQ ID NO: 155631 - DNA, 17 bp, synthetic construct
  source 1..17: mol_type = other DNA
tggctagattggagggg

SEQ ID NO: 155632 - DNA, 17 bp, synthetic construct
  source 1..17: mol_type = other DNA
ctggctagattggaggg

SEQ ID NO: 155633 - DNA, 17 bp, synthetic construct
  source 1..17: mol_type = other DNA
tctggctagattggagg

SEQ ID NO: 155634 - DNA, 17 bp, synthetic construct
  source 1..17: mol_type = other DNA
atctggctagattggag

SEQ ID NO: 155635 - DNA, 17 bp, synthetic construct
  source 1..17: mol_type = other DNA
gatctggctagattgga

SEQ ID NO: 155636 - DNA, 17 bp, synthetic construct
  source 1..17: mol_type = other DNA
agatctggctagattgg

SEQ ID NO: 155637 - DNA, 17 bp, synthetic construct
  source 1..17: mol_type = other DNA
cagatctggctagattg

SEQ ID NO: 155638 - DNA, 17 bp, synthetic construct
  source 1..17: mol_type = other DNA
acagatctggctagatt

SEQ ID NO: 155639 - DNA, 17 bp, synthetic construct
  source 1..17: mol_type = other DNA
gacagatctggctagat

SEQ ID NO: 155640 - DNA, 17 bp, synthetic construct
  source 1..17: mol_type = other DNA
ggacagatctggctaga

SEQ ID NO: 155641 - DNA, 17 bp, synthetic construct
  source 1..17: mol_type = other DNA
gggacagatctggctag

SEQ ID NO: 155642 - DNA, 17 bp, synthetic construct
  source 1..17: mol_type = other DNA
agggacagatctggcta

SEQ ID NO: 155643 - DNA, 17 bp, synthetic construct
  source 1..17: mol_type = other DNA
cagggacagatctggct

SEQ ID NO: 155644 - DNA, 17 bp, synthetic construct
  source 1..17: mol_type = other DNA
gcagggacagatctggc

SEQ ID NO: 155645 - DNA, 17 bp, synthetic construct
  source 1..17: mol_type = other DNA
tgcagggacagatctgg

SEQ ID NO: 155646 - DNA, 17 bp, synthetic construct
  source 1..17: mol_type = other DNA
gtgcagggacagatctg

SEQ ID NO: 155647 - DNA, 17 bp, synthetic construct
  source 1..17: mol_type = other DNA
ggtgcagggacagatct

SEQ ID NO: 155648 - DNA, 17 bp, synthetic construct
  source 1..17: mol_type = other DNA
gggtgcagggacagatc

SEQ ID NO: 155649 - DNA, 17 bp, synthetic construct
  source 1..17: mol_type = other DNA
ggggtgcagggacagat

SEQ ID NO: 155650 - DNA, 17 bp, synthetic construct
  source 1..17: mol_type = other DNA
aggggtgcagggacaga

SEQ ID NO: 155651 - DNA, 17 bp, synthetic construct
  source 1..17: mol_type = other DNA
caggggtgcagggacag

SEQ ID NO: 155652 - DNA, 17 bp, synthetic construct
  source 1..17: mol_type = other DNA
tcaggggtgcagggaca

SEQ ID NO: 155653 - DNA, 17 bp, synthetic construct
  source 1..17: mol_type = other DNA
gtcaggggtgcagggac

SEQ ID NO: 155654 - DNA, 17 bp, synthetic construct
  source 1..17: mol_type = other DNA
ggtcaggggtgcaggga

SEQ ID NO: 155655 - DNA, 17 bp, synthetic construct
  source 1..17: mol_type = other DNA
cggtcaggggtgcaggg

SEQ ID NO: 155656 - DNA, 17 bp, synthetic construct
  source 1..17: mol_type = other DNA
ccggtcaggggtgcagg

SEQ ID NO: 155657 - DNA, 17 bp, synthetic construct
  source 1..17: mol_type = other DNA
gccggtcaggggtgcag

SEQ ID NO: 155658 - DNA, 17 bp, synthetic construct
  source 1..17: mol_type = other DNA
ggccggtcaggggtgca

SEQ ID NO: 155659 - DNA, 17 bp, synthetic construct
  source 1..17: mol_type = other DNA
aggccggtcaggggtgc

SEQ ID NO: 155660 - DNA, 17 bp, synthetic construct
  source 1..17: mol_type = other DNA
gaggccggtcaggggtg

SEQ ID NO: 155661 - DNA, 17 bp, synthetic construct
  source 1..17: mol_type = other DNA
agaggccggtcaggggt

SEQ ID NO: 155662 - DNA, 17 bp, synthetic construct
  source 1..17: mol_type = other DNA
gagaggccggtcagggg

SEQ ID NO: 155663 - DNA, 17 bp, synthetic construct
  source 1..17: mol_type = other DNA
ggagaggccggtcaggg

SEQ ID NO: 155664 - DNA, 17 bp, synthetic construct
  source 1..17: mol_type = other DNA
gggagaggccggtcagg

SEQ ID NO: 155665 - DNA, 17 bp, synthetic construct
  source 1..17: mol_type = other DNA
ggggagaggccggtcag

SEQ ID NO: 155666 - DNA, 17 bp, synthetic construct
  source 1..17: mol_type = other DNA
gggggagaggccggtca

SEQ ID NO: 155667 - DNA, 17 bp, synthetic construct
  source 1..17: mol_type = other DNA
tgggggagaggccggtc

SEQ ID NO: 155668 - DNA, 17 bp, synthetic construct
  source 1..17: mol_type = other DNA
gtgggggagaggccggt

SEQ ID NO: 155669 - DNA, 17 bp, synthetic construct
  source 1..17: mol_type = other DNA
tgtgggggagaggccgg

SEQ ID NO: 155670 - DNA, 17 bp, synthetic construct
  source 1..17: mol_type = other DNA
gtgtgggggagaggccg

SEQ ID NO: 155671 - DNA, 17 bp, synthetic construct
  source 1..17: mol_type = other DNA
agtgtgggggagaggcc

SEQ ID NO: 155672 - DNA, 17 bp, synthetic construct
  source 1..17: mol_type = other DNA
gagtgtgggggagaggc

SEQ ID NO: 155673 - DNA, 17 bp, synthetic construct
  source 1..17: mol_type = other DNA
ggagtgtgggggagagg

SEQ ID NO: 155674 - DNA, 17 bp, synthetic construct
  source 1..17: mol_type = other DNA
gggagtgtgggggagag

SEQ ID NO: 155675 - DNA, 17 bp, synthetic construct
  source 1..17: mol_type = other DNA
cgggagtgtgggggaga

SEQ ID NO: 155676 - DNA, 17 bp, synthetic construct
  source 1..17: mol_type = other DNA
ccgggagtgtgggggag

SEQ ID NO: 155677 - DNA, 17 bp, synthetic construct
  source 1..17: mol_type = other DNA
gccgggagtgtggggga

SEQ ID NO: 155678 - DNA, 17 bp, synthetic construct
  source 1..17: mol_type = other DNA
tgccgggagtgtggggg

SEQ ID NO: 155679 - DNA, 17 bp, synthetic construct
  source 1..17: mol_type = other DNA
ctgccgggagtgtgggg

SEQ ID NO: 155680 - DNA, 17 bp, synthetic construct
  source 1..17: mol_type = other DNA
gctgccgggagtgtggg

SEQ ID NO: 155681 - DNA, 17 bp, synthetic construct
  source 1..17: mol_type = other DNA
ggctgccgggagtgtgg

SEQ ID NO: 155682 - DNA, 17 bp, synthetic construct
  source 1..17: mol_type = other DNA
tggctgccgggagtgtg

SEQ ID NO: 155683 - DNA, 17 bp, synthetic construct
  source 1..17: mol_type = other DNA
ttggctgccgggagtgt

SEQ ID NO: 155684 - DNA, 17 bp, synthetic construct
  source 1..17: mol_type = other DNA
gttggctgccgggagtg

SEQ ID NO: 155685 - DNA, 17 bp, synthetic construct
  source 1..17: mol_type = other DNA
tgttggctgccgggagt

SEQ ID NO: 155686 - DNA, 17 bp, synthetic construct
  source 1..17: mol_type = other DNA
atgttggctgccgggag

SEQ ID NO: 155687 - DNA, 17 bp, synthetic construct
  source 1..17: mol_type = other DNA
gatgttggctgccggga

SEQ ID NO: 155688 - DNA, 17 bp, synthetic construct
  source 1..17: mol_type = other DNA
tgatgttggctgccggg

SEQ ID NO: 155689 - DNA, 17 bp, synthetic construct
  source 1..17: mol_type = other DNA
gtgatgttggctgccgg

SEQ ID NO: 155690 - DNA, 17 bp, synthetic construct
  source 1..17: mol_type = other DNA
ggtgatgttggctgccg

SEQ ID NO: 155691 - DNA, 17 bp, synthetic construct
  source 1..17: mol_type = other DNA
gggtgatgttggctgcc

SEQ ID NO: 155692 - DNA, 17 bp, synthetic construct
  source 1..17: mol_type = other DNA
agggtgatgttggctgc

SEQ ID NO: 155693 - DNA, 17 bp, synthetic construct
  source 1..17: mol_type = other DNA
cagggtgatgttggctg

SEQ ID NO: 155694 - DNA, 17 bp, synthetic construct
  source 1..17: mol_type = other DNA
acagggtgatgttggct

SEQ ID NO: 155695 - DNA, 17 bp, synthetic construct
  source 1..17: mol_type = other DNA
aacagggtgatgttggc

SEQ ID NO: 155696 - DNA, 17 bp, synthetic construct
  source 1..17: mol_type = other DNA
gaacagggtgatgttgg

SEQ ID NO: 155697 - DNA, 17 bp, synthetic construct
  source 1..17: mol_type = other DNA
tgaacagggtgatgttg

SEQ ID NO: 155698 - DNA, 17 bp, synthetic construct
  source 1..17: mol_type = other DNA
gtgaacagggtgatgtt

SEQ ID NO: 155699 - DNA, 17 bp, synthetic construct
  source 1..17: mol_type = other DNA
tgtgaacagggtgatgt

SEQ ID NO: 155700 - DNA, 17 bp, synthetic construct
  source 1..17: mol_type = other DNA
gtgtgaacagggtgatg

SEQ ID NO: 155701 - DNA, 17 bp, synthetic construct
  source 1..17: mol_type = other DNA
ggtgtgaacagggtgat

SEQ ID NO: 155702 - DNA, 17 bp, synthetic construct
  source 1..17: mol_type = other DNA
gggtgtgaacagggtga

SEQ ID NO: 155703 - DNA, 17 bp, synthetic construct
  source 1..17: mol_type = other DNA
agggtgtgaacagggtg

SEQ ID NO: 155704 - DNA, 17 bp, synthetic construct
  source 1..17: mol_type = other DNA
gagggtgtgaacagggt

SEQ ID NO: 155705 - DNA, 17 bp, synthetic construct
  source 1..17: mol_type = other DNA
cgagggtgtgaacaggg

SEQ ID NO: 155706 - DNA, 17 bp, synthetic construct
  source 1..17: mol_type = other DNA
tcgagggtgtgaacagg

SEQ ID NO: 155707 - DNA, 17 bp, synthetic construct
  source 1..17: mol_type = other DNA
ctcgagggtgtgaacag

SEQ ID NO: 155708 - DNA, 17 bp, synthetic construct
  source 1..17: mol_type = other DNA
gctcgagggtgtgaaca

SEQ ID NO: 155709 - DNA, 17 bp, synthetic construct
  source 1..17: mol_type = other DNA
agctcgagggtgtgaac

SEQ ID NO: 155710 - DNA, 17 bp, synthetic construct
  source 1..17: mol_type = other DNA
aagctcgagggtgtgaa

SEQ ID NO: 155711 - DNA, 17 bp, synthetic construct
  source 1..17: mol_type = other DNA
gaagctcgagggtgtga

SEQ ID NO: 155712 - DNA, 17 bp, synthetic construct
  source 1..17: mol_type = other DNA
agaagctcgagggtgtg

SEQ ID NO: 155713 - DNA, 17 bp, synthetic construct
  source 1..17: mol_type = other DNA
aagaagctcgagggtgt

SEQ ID NO: 155714 - DNA, 17 bp, synthetic construct
  source 1..17: mol_type = other DNA
gaagaagctcgagggtg

SEQ ID NO: 155715 - DNA, 17 bp, synthetic construct
  source 1..17: mol_type = other DNA
tgaagaagctcgagggt

SEQ ID NO: 155716 - DNA, 17 bp, synthetic construct
  source 1..17: mol_type = other DNA
atgaagaagctcgaggg

SEQ ID NO: 155717 - DNA, 17 bp, synthetic construct
  source 1..17: mol_type = other DNA
gatgaagaagctcgagg

SEQ ID NO: 155718 - DNA, 17 bp, synthetic construct
  source 1..17: mol_type = other DNA
cgatgaagaagctcgag

SEQ ID NO: 155719 - DNA, 17 bp, synthetic construct
  source 1..17: mol_type = other DNA
acgatgaagaagctcga

SEQ ID NO: 155720 - DNA, 17 bp, synthetic construct
  source 1..17: mol_type = other DNA
cacgatgaagaagctcg

SEQ ID NO: 155721 - DNA, 17 bp, synthetic construct
  source 1..17: mol_type = other DNA
ccacgatgaagaagctc

SEQ ID NO: 155722 - DNA, 17 bp, synthetic construct
  source 1..17: mol_type = other DNA
accacgatgaagaagct

SEQ ID NO: 155723 - DNA, 17 bp, synthetic construct
  source 1..17: mol_type = other DNA
caccacgatgaagaagc

SEQ ID NO: 155724 - DNA, 17 bp, synthetic construct
  source 1..17: mol_type = other DNA
gcaccacgatgaagaag

SEQ ID NO: 155725 - DNA, 17 bp, synthetic construct
  source 1..17: mol_type = other DNA
tgcaccacgatgaagaa

SEQ ID NO: 155726 - DNA, 17 bp, synthetic construct
  source 1..17: mol_type = other DNA
ctgcaccacgatgaaga

SEQ ID NO: 155727 - DNA, 17 bp, synthetic construct
  source 1..17: mol_type = other DNA
tctgcaccacgatgaag

SEQ ID NO: 155728 - DNA, 17 bp, synthetic construct
  source 1..17: mol_type = other DNA
gtctgcaccacgatgaa

SEQ ID NO: 155729 - DNA, 17 bp, synthetic construct
  source 1..17: mol_type = other DNA
tgtctgcaccacgatga

SEQ ID NO: 155730 - DNA, 17 bp, synthetic construct
  source 1..17: mol_type = other DNA
ctgtctgcaccacgatg

SEQ ID NO: 155731 - DNA, 17 bp, synthetic construct
  source 1..17: mol_type = other DNA
cctgtctgcaccacgat

SEQ ID NO: 155732 - DNA, 17 bp, synthetic construct
  source 1..17: mol_type = other DNA
gcctgtctgcaccacga

SEQ ID NO: 155733 - DNA, 17 bp, synthetic construct
  source 1..17: mol_type = other DNA
ggcctgtctgcaccacg

SEQ ID NO: 155734 - DNA, 17 bp, synthetic construct
  source 1..17: mol_type = other DNA
aggcctgtctgcaccac

SEQ ID NO: 155735 - DNA, 17 bp, synthetic construct
  source 1..17: mol_type = other DNA
caggcctgtctgcacca

SEQ ID NO: 155736 - DNA, 17 bp, synthetic construct
  source 1..17: mol_type = other DNA
ccaggcctgtctgcacc

SEQ ID NO: 155737 - DNA, 17 bp, synthetic construct
  source 1..17: mol_type = other DNA
cccaggcctgtctgcac

SEQ ID NO: 155738 - DNA, 17 bp, synthetic construct
  source 1..17: mol_type = other DNA
ccccaggcctgtctgca

SEQ ID NO: 155739 - DNA, 17 bp, synthetic construct
  source 1..17: mol_type = other DNA
gccccaggcctgtctgc

SEQ ID NO: 155740 - DNA, 17 bp, synthetic construct
  source 1..17: mol_type = other DNA
agccccaggcctgtctg

SEQ ID NO: 155741 - DNA, 17 bp, synthetic construct
  source 1..17: mol_type = other DNA
cagccccaggcctgtct

SEQ ID NO: 155742 - DNA, 17 bp, synthetic construct
  source 1..17: mol_type = other DNA
gcagccccaggcctgtc

SEQ ID NO: 155743 - DNA, 17 bp, synthetic construct
  source 1..17: mol_type = other DNA
tgcagccccaggcctgt

SEQ ID NO: 155744 - DNA, 17 bp, synthetic construct
  source 1..17: mol_type = other DNA
ctgcagccccaggcctg

SEQ ID NO: 155745 - DNA, 17 bp, synthetic construct
  source 1..17: mol_type = other DNA
gctgcagccccaggcct

SEQ ID NO: 155746 - DNA, 17 bp, synthetic construct
  source 1..17: mol_type = other DNA
agctgcagccccaggcc

SEQ ID NO: 155747 - DNA, 17 bp, synthetic construct
  source 1..17: mol_type = other DNA
cagctgcagccccaggc

SEQ ID NO: 155748 - DNA, 17 bp, synthetic construct
  source 1..17: mol_type = other DNA
gcagctgcagccccagg

SEQ ID NO: 155749 - DNA, 17 bp, synthetic construct
  source 1..17: mol_type = other DNA
agcagctgcagccccag

SEQ ID NO: 155750 - DNA, 17 bp, synthetic construct
  source 1..17: mol_type = other DNA
cagcagctgcagcccca

SEQ ID NO: 155751 - DNA, 17 bp, synthetic construct
  source 1..17: mol_type = other DNA
ccagcagctgcagcccc

SEQ ID NO: 155752 - DNA, 17 bp, synthetic construct
  source 1..17: mol_type = other DNA
accagcagctgcagccc

SEQ ID NO: 155753 - DNA, 17 bp, synthetic construct
  source 1..17: mol_type = other DNA
caccagcagctgcagcc

SEQ ID NO: 155754 - DNA, 17 bp, synthetic construct
  source 1..17: mol_type = other DNA
gcaccagcagctgcagc

SEQ ID NO: 155755 - DNA, 17 bp, synthetic construct
  source 1..17: mol_type = other DNA
tgcaccagcagctgcag

SEQ ID NO: 155756 - DNA, 17 bp, synthetic construct
  source 1..17: mol_type = other DNA
ctgcaccagcagctgca

SEQ ID NO: 155757 - DNA, 17 bp, synthetic construct
  source 1..17: mol_type = other DNA
gctgcaccagcagctgc

SEQ ID NO: 155758 - DNA, 17 bp, synthetic construct
  source 1..17: mol_type = other DNA
agctgcaccagcagctg

SEQ ID NO: 155759 - DNA, 17 bp, synthetic construct
  source 1..17: mol_type = other DNA
cagctgcaccagcagct

SEQ ID NO: 155760 - DNA, 17 bp, synthetic construct
  source 1..17: mol_type = other DNA
ccagctgcaccagcagc

SEQ ID NO: 155761 - DNA, 17 bp, synthetic construct
  source 1..17: mol_type = other DNA
accagctgcaccagcag

SEQ ID NO: 155762 - DNA, 17 bp, synthetic construct
  source 1..17: mol_type = other DNA
caccagctgcaccagca

SEQ ID NO: 155763 - DNA, 17 bp, synthetic construct
  source 1..17: mol_type = other DNA
gcaccagctgcaccagc

SEQ ID NO: 155764 - DNA, 17 bp, synthetic construct
  source 1..17: mol_type = other DNA
ggcaccagctgcaccag

SEQ ID NO: 155765 - DNA, 17 bp, synthetic construct
  source 1..17: mol_type = other DNA
tggcaccagctgcacca

SEQ ID NO: 155766 - DNA, 17 bp, synthetic construct
  source 1..17: mol_type = other DNA
gtggcaccagctgcacc

SEQ ID NO: 155767 - DNA, 17 bp, synthetic construct
  source 1..17: mol_type = other DNA
agtggcaccagctgcac

SEQ ID NO: 155768 - DNA, 17 bp, synthetic construct
  source 1..17: mol_type = other DNA
gagtggcaccagctgca

SEQ ID NO: 155769 - DNA, 17 bp, synthetic construct
  source 1..17: mol_type = other DNA
tgagtggcaccagctgc

SEQ ID NO: 155770 - DNA, 17 bp, synthetic construct
  source 1..17: mol_type = other DNA
atgagtggcaccagctg

SEQ ID NO: 155771 - DNA, 17 bp, synthetic construct
  source 1..17: mol_type = other DNA
catgagtggcaccagct

SEQ ID NO: 155772 - DNA, 17 bp, synthetic construct
  source 1..17: mol_type = other DNA
gcatgagtggcaccagc

SEQ ID NO: 155773 - DNA, 17 bp, synthetic construct
  source 1..17: mol_type = other DNA
tgcatgagtggcaccag

SEQ ID NO: 155774 - DNA, 17 bp, synthetic construct
  source 1..17: mol_type = other DNA
ctgcatgagtggcacca

SEQ ID NO: 155775 - DNA, 17 bp, synthetic construct
  source 1..17: mol_type = other DNA
cctgcatgagtggcacc

SEQ ID NO: 155776 - DNA, 17 bp, synthetic construct
  source 1..17: mol_type = other DNA
acctgcatgagtggcac

SEQ ID NO: 155777 - DNA, 17 bp, synthetic construct
  source 1..17: mol_type = other DNA
cacctgcatgagtggca

SEQ ID NO: 155778 - DNA, 17 bp, synthetic construct
  source 1..17: mol_type = other DNA
acacctgcatgagtggc

SEQ ID NO: 155779 - DNA, 17 bp, synthetic construct
  source 1..17: mol_type = other DNA
aacacctgcatgagtgg

SEQ ID NO: 155780 - DNA, 17 bp, synthetic construct
  source 1..17: mol_type = other DNA
aaacacctgcatgagtg

SEQ ID NO: 155781 - DNA, 17 bp, synthetic construct
  source 1..17: mol_type = other DNA
caaacacctgcatgagt

SEQ ID NO: 155782 - DNA, 17 bp, synthetic construct
  source 1..17: mol_type = other DNA
acaaacacctgcatgag

SEQ ID NO: 155783 - DNA, 17 bp, synthetic construct
  source 1..17: mol_type = other DNA
gacaaacacctgcatga

SEQ ID NO: 155784 - DNA, 17 bp, synthetic construct
  source 1..17: mol_type = other DNA
tgacaaacacctgcatg

SEQ ID NO: 155785 - DNA, 17 bp, synthetic construct
  source 1..17: mol_type = other DNA
ctgacaaacacctgcat

SEQ ID NO: 155786 - DNA, 17 bp, synthetic construct
  source 1..17: mol_type = other DNA
cctgacaaacacctgca

SEQ ID NO: 155787 - DNA, 17 bp, synthetic construct
  source 1..17: mol_type = other DNA
gcctgacaaacacctgc

SEQ ID NO: 155788 - DNA, 17 bp, synthetic construct
  source 1..17: mol_type = other DNA
agcctgacaaacacctg

SEQ ID NO: 155789 - DNA, 17 bp, synthetic construct
  source 1..17: mol_type = other DNA
cagcctgacaaacacct

SEQ ID NO: 155790 - DNA, 17 bp, synthetic construct
  source 1..17: mol_type = other DNA
ccagcctgacaaacacc

SEQ ID NO: 155791 - DNA, 17 bp, synthetic construct
  source 1..17: mol_type = other DNA
tccagcctgacaaacac

SEQ ID NO: 155792 - DNA, 17 bp, synthetic construct
  source 1..17: mol_type = other DNA
gtccagcctgacaaaca

SEQ ID NO: 155793 - DNA, 17 bp, synthetic construct
  source 1..17: mol_type = other DNA
ggtccagcctgacaaac

SEQ ID NO: 155794 - DNA, 17 bp, synthetic construct
  source 1..17: mol_type = other DNA
gggtccagcctgacaaa

SEQ ID NO: 155795 - DNA, 17 bp, synthetic construct
  source 1..17: mol_type = other DNA
ggggtccagcctgacaa

SEQ ID NO: 155796 - DNA, 17 bp, synthetic construct
  source 1..17: mol_type = other DNA
cggggtccagcctgaca

SEQ ID NO: 155797 - DNA, 17 bp, synthetic construct
  source 1..17: mol_type = other DNA
gcggggtccagcctgac

SEQ ID NO: 155798 - DNA, 17 bp, synthetic construct
  source 1..17: mol_type = other DNA
ggcggggtccagcctga

SEQ ID NO: 155799 - DNA, 17 bp, synthetic construct
  source 1..17: mol_type = other DNA
gggcggggtccagcctg

SEQ ID NO: 155800 - DNA, 17 bp, synthetic construct
  source 1..17: mol_type = other DNA
tgggcggggtccagcct

SEQ ID NO: 155801 - DNA, 17 bp, synthetic construct
  source 1..17: mol_type = other DNA
gtgggcggggtccagcc

SEQ ID NO: 155802 - DNA, 17 bp, synthetic construct
  source 1..17: mol_type = other DNA
ggtgggcggggtccagc

SEQ ID NO: 155803 - DNA, 17 bp, synthetic construct
  source 1..17: mol_type = other DNA
tggtgggcggggtccag

SEQ ID NO: 155804 - DNA, 17 bp, synthetic construct
  source 1..17: mol_type = other DNA
ctggtgggcggggtcca

SEQ ID NO: 155805 - DNA, 17 bp, synthetic construct
  source 1..17: mol_type = other DNA
cctggtgggcggggtcc

SEQ ID NO: 155806 - DNA, 17 bp, synthetic construct
  source 1..17: mol_type = other DNA
ccctggtgggcggggtc

SEQ ID NO: 155807 - DNA, 17 bp, synthetic construct
  source 1..17: mol_type = other DNA
gccctggtgggcggggt

SEQ ID NO: 155808 - DNA, 17 bp, synthetic construct
  source 1..17: mol_type = other DNA
ggccctggtgggcgggg

SEQ ID NO: 155809 - DNA, 17 bp, synthetic construct
  source 1..17: mol_type = other DNA
tggccctggtgggcggg

SEQ ID NO: 155810 - DNA, 17 bp, synthetic construct
  source 1..17: mol_type = other DNA
ctggccctggtgggcgg

SEQ ID NO: 155811 - DNA, 17 bp, synthetic construct
  source 1..17: mol_type = other DNA
tctggccctggtgggcg

SEQ ID NO: 155812 - DNA, 17 bp, synthetic construct
  source 1..17: mol_type = other DNA
atctggccctggtgggc

SEQ ID NO: 155813 - DNA, 17 bp, synthetic construct
  source 1..17: mol_type = other DNA
catctggccctggtggg

SEQ ID NO: 155814 - DNA, 17 bp, synthetic construct
  source 1..17: mol_type = other DNA
acatctggccctggtgg

SEQ ID NO: 155815 - DNA, 17 bp, synthetic construct
  source 1..17: mol_type = other DNA
cacatctggccctggtg

SEQ ID NO: 155816 - DNA, 17 bp, synthetic construct
  source 1..17: mol_type = other DNA
gcacatctggccctggt

SEQ ID NO: 155817 - DNA, 17 bp, synthetic construct
  source 1..17: mol_type = other DNA
cgcacatctggccctgg

SEQ ID NO: 155818 - DNA, 17 bp, synthetic construct
  source 1..17: mol_type = other DNA
ccgcacatctggccctg

SEQ ID NO: 155819 - DNA, 17 bp, synthetic construct
  source 1..17: mol_type = other DNA
accgcacatctggccct

SEQ ID NO: 155820 - DNA, 17 bp, synthetic construct
  source 1..17: mol_type = other DNA
caccgcacatctggccc

SEQ ID NO: 155821 - DNA, 17 bp, synthetic construct
  source 1..17: mol_type = other DNA
tcaccgcacatctggcc

SEQ ID NO: 155822 - DNA, 17 bp, synthetic construct
  source 1..17: mol_type = other DNA
ctcaccgcacatctggc

SEQ ID NO: 155823 - DNA, 17 bp, synthetic construct
  source 1..17: mol_type = other DNA
cctcaccgcacatctgg

SEQ ID NO: 155824 - DNA, 17 bp, synthetic construct
  source 1..17: mol_type = other DNA
gcctcaccgcacatctg

SEQ ID NO: 155825 - DNA, 17 bp, synthetic construct
  source 1..17: mol_type = other DNA
agcctcaccgcacatct

SEQ ID NO: 155826 - DNA, 17 bp, synthetic construct
  source 1..17: mol_type = other DNA
cagcctcaccgcacatc

SEQ ID NO: 155827 - DNA, 17 bp, synthetic construct
  source 1..17: mol_type = other DNA
ccagcctcaccgcacat

SEQ ID NO: 155828 - DNA, 17 bp, synthetic construct
  source 1..17: mol_type = other DNA
cccagcctcaccgcaca

SEQ ID NO: 155829 - DNA, 17 bp, synthetic construct
  source 1..17: mol_type = other DNA
gcccagcctcaccgcac

SEQ ID NO: 155830 - DNA, 17 bp, synthetic construct
  source 1..17: mol_type = other DNA
tgcccagcctcaccgca

SEQ ID NO: 155831 - DNA, 17 bp, synthetic construct
  source 1..17: mol_type = other DNA
ctgcccagcctcaccgc

SEQ ID NO: 155832 - DNA, 17 bp, synthetic construct
  source 1..17: mol_type = other DNA
cctgcccagcctcaccg

SEQ ID NO: 155833 - DNA, 17 bp, synthetic construct
  source 1..17: mol_type = other DNA
ccctgcccagcctcacc

SEQ ID NO: 155834 - DNA, 17 bp, synthetic construct
  source 1..17: mol_type = other DNA
cccctgcccagcctcac

SEQ ID NO: 155835 - DNA, 17 bp, synthetic construct
  source 1..17: mol_type = other DNA
gcccctgcccagcctca

SEQ ID NO: 155836 - DNA, 17 bp, synthetic construct
  source 1..17: mol_type = other DNA
ggcccctgcccagcctc

SEQ ID NO: 155837 - DNA, 17 bp, synthetic construct
  source 1..17: mol_type = other DNA
aggcccctgcccagcct

SEQ ID NO: 155838 - DNA, 17 bp, synthetic construct
  source 1..17: mol_type = other DNA
aaggcccctgcccagcc

SEQ ID NO: 155839 - DNA, 17 bp, synthetic construct
  source 1..17: mol_type = other DNA
gaaggcccctgcccagc

SEQ ID NO: 155840 - DNA, 17 bp, synthetic construct
  source 1..17: mol_type = other DNA
cgaaggcccctgcccag

SEQ ID NO: 155841 - DNA, 17 bp, synthetic construct
  source 1..17: mol_type = other DNA
ccgaaggcccctgccca

SEQ ID NO: 155842 - DNA, 17 bp, synthetic construct
  source 1..17: mol_type = other DNA
cccgaaggcccctgccc

SEQ ID NO: 155843 - DNA, 17 bp, synthetic construct
  source 1..17: mol_type = other DNA
ccccgaaggcccctgcc

SEQ ID NO: 155844 - DNA, 17 bp, synthetic construct
  source 1..17: mol_type = other DNA
tccccgaaggcccctgc

SEQ ID NO: 155845 - DNA, 17 bp, synthetic construct
  source 1..17: mol_type = other DNA
gtccccgaaggcccctg

SEQ ID NO: 155846 - DNA, 17 bp, synthetic construct
  source 1..17: mol_type = other DNA
tgtccccgaaggcccct

SEQ ID NO: 155847 - DNA, 17 bp, synthetic construct
  source 1..17: mol_type = other DNA
ctgtccccgaaggcccc

SEQ ID NO: 155848 - DNA, 17 bp, synthetic construct
  source 1..17: mol_type = other DNA
cctgtccccgaaggccc

SEQ ID NO: 155849 - DNA, 17 bp, synthetic construct
  source 1..17: mol_type = other DNA
ccctgtccccgaaggcc

SEQ ID NO: 155850 - DNA, 17 bp, synthetic construct
  source 1..17: mol_type = other DNA
gccctgtccccgaaggc

SEQ ID NO: 155851 - DNA, 17 bp, synthetic construct
  source 1..17: mol_type = other DNA
ggccctgtccccgaagg

SEQ ID NO: 155852 - DNA, 17 bp, synthetic construct
  source 1..17: mol_type = other DNA
tggccctgtccccgaag

SEQ ID NO: 155853 - DNA, 17 bp, synthetic construct
  source 1..17: mol_type = other DNA
atggccctgtccccgaa

SEQ ID NO: 155854 - DNA, 17 bp, synthetic construct
  source 1..17: mol_type = other DNA
aatggccctgtccccga

SEQ ID NO: 155855 - DNA, 17 bp, synthetic construct
  source 1..17: mol_type = other DNA
caatggccctgtccccg

SEQ ID NO: 155856 - DNA, 17 bp, synthetic construct
  source 1..17: mol_type = other DNA
ccaatggccctgtcccc

SEQ ID NO: 155857 - DNA, 17 bp, synthetic construct
  source 1..17: mol_type = other DNA
cccaatggccctgtccc

SEQ ID NO: 155858 - DNA, 17 bp, synthetic construct
  source 1..17: mol_type = other DNA
ccccaatggccctgtcc

SEQ ID NO: 155859 - DNA, 17 bp, synthetic construct
  source 1..17: mol_type = other DNA
tccccaatggccctgtc

SEQ ID NO: 155860 - DNA, 17 bp, synthetic construct
  source 1..17: mol_type = other DNA
gtccccaatggccctgt

SEQ ID NO: 155861 - DNA, 17 bp, synthetic construct
  source 1..17: mol_type = other DNA
cgtccccaatggccctg

SEQ ID NO: 155862 - DNA, 17 bp, synthetic construct
  source 1..17: mol_type = other DNA
ccgtccccaatggccct

SEQ ID NO: 155863 - DNA, 17 bp, synthetic construct
  source 1..17: mol_type = other DNA
cccgtccccaatggccc

SEQ ID NO: 155864 - DNA, 17 bp, synthetic construct
  source 1..17: mol_type = other DNA
ccccgtccccaatggcc

SEQ ID NO: 155865 - DNA, 17 bp, synthetic construct
  source 1..17: mol_type = other DNA
gccccgtccccaatggc

SEQ ID NO: 155866 - DNA, 17 bp, synthetic construct
  source 1..17: mol_type = other DNA
ggccccgtccccaatgg

SEQ ID NO: 155867 - DNA, 17 bp, synthetic construct
  source 1..17: mol_type = other DNA
aggccccgtccccaatg

SEQ ID NO: 155868 - DNA, 17 bp, synthetic construct
  source 1..17: mol_type = other DNA
caggccccgtccccaat

SEQ ID NO: 155869 - DNA, 17 bp, synthetic construct
  source 1..17: mol_type = other DNA
ccaggccccgtccccaa

SEQ ID NO: 155870 - DNA, 17 bp, synthetic construct
  source 1..17: mol_type = other DNA
tccaggccccgtcccca

SEQ ID NO: 155871 - DNA, 17 bp, synthetic construct
  source 1..17: mol_type = other DNA
gtccaggccccgtcccc

SEQ ID NO: 155872 - DNA, 17 bp, synthetic construct
  source 1..17: mol_type = other DNA
agtccaggccccgtccc

SEQ ID NO: 155873 - DNA, 17 bp, synthetic construct
  source 1..17: mol_type = other DNA
tagtccaggccccgtcc

SEQ ID NO: 155874 - DNA, 17 bp, synthetic construct
  source 1..17: mol_type = other DNA
ctagtccaggccccgtc

SEQ ID NO: 155875 - DNA, 17 bp, synthetic construct
  source 1..17: mol_type = other DNA
gctagtccaggccccgt

SEQ ID NO: 155876 - DNA, 17 bp, synthetic construct
  source 1..17: mol_type = other DNA
cgctagtccaggccccg

SEQ ID NO: 155877 - DNA, 17 bp, synthetic construct
  source 1..17: mol_type = other DNA
gcgctagtccaggcccc

SEQ ID NO: 155878 - DNA, 17 bp, synthetic construct
  source 1..17: mol_type = other DNA
ggcgctagtccaggccc

SEQ ID NO: 155879 - DNA, 17 bp, synthetic construct
  source 1..17: mol_type = other DNA
tggcgctagtccaggcc

SEQ ID NO: 155880 - DNA, 17 bp, synthetic construct
  source 1..17: mol_type = other DNA
ctggcgctagtccaggc

SEQ ID NO: 155881 - DNA, 17 bp, synthetic construct
  source 1..17: mol_type = other DNA
cctggcgctagtccagg

SEQ ID NO: 155882 - DNA, 17 bp, synthetic construct
  source 1..17: mol_type = other DNA
gcctggcgctagtccag

SEQ ID NO: 155883 - DNA, 17 bp, synthetic construct
  source 1..17: mol_type = other DNA
agcctggcgctagtcca

SEQ ID NO: 155884 - DNA, 17 bp, synthetic construct
  source 1..17: mol_type = other DNA
cagcctggcgctagtcc

SEQ ID NO: 155885 - DNA, 17 bp, synthetic construct
  source 1..17: mol_type = other DNA
gcagcctggcgctagtc

SEQ ID NO: 155886 - DNA, 17 bp, synthetic construct
  source 1..17: mol_type = other DNA
tgcagcctggcgctagt

SEQ ID NO: 155887 - DNA, 17 bp, synthetic construct
  source 1..17: mol_type = other DNA
ctgcagcctggcgctag

SEQ ID NO: 155888 - DNA, 17 bp, synthetic construct
  source 1..17: mol_type = other DNA
cctgcagcctggcgcta

SEQ ID NO: 155889 - DNA, 17 bp, synthetic construct
  source 1..17: mol_type = other DNA
ccctgcagcctggcgct

SEQ ID NO: 155890 - DNA, 17 bp, synthetic construct
  source 1..17: mol_type = other DNA
tccctgcagcctggcgc

SEQ ID NO: 155891 - DNA, 17 bp, synthetic construct
  source 1..17: mol_type = other DNA
ctccctgcagcctggcg

SEQ ID NO: 155892 - DNA, 17 bp, synthetic construct
  source 1..17: mol_type = other DNA
cctccctgcagcctggc

SEQ ID NO: 155893 - DNA, 17 bp, synthetic construct
  source 1..17: mol_type = other DNA
ccctccctgcagcctgg

SEQ ID NO: 155894 - DNA, 17 bp, synthetic construct
  source 1..17: mol_type = other DNA
cccctccctgcagcctg

SEQ ID NO: 155895 - DNA, 17 bp, synthetic construct
  source 1..17: mol_type = other DNA
gcccctccctgcagcct

SEQ ID NO: 155896 - DNA, 17 bp, synthetic construct
  source 1..17: mol_type = other DNA
tgcccctccctgcagcc

SEQ ID NO: 155897 - DNA, 17 bp, synthetic construct
  source 1..17: mol_type = other DNA
ctgcccctccctgcagc

SEQ ID NO: 155898 - DNA, 17 bp, synthetic construct
  source 1..17: mol_type = other DNA
cctgcccctccctgcag

SEQ ID NO: 155899 - DNA, 17 bp, synthetic construct
  source 1..17: mol_type = other DNA
gcctgcccctccctgca

SEQ ID NO: 155900 - DNA, 17 bp, synthetic construct
  source 1..17: mol_type = other DNA
tgcctgcccctccctgc

SEQ ID NO: 155901 - DNA, 17 bp, synthetic construct
  source 1..17: mol_type = other DNA
ctgcctgcccctccctg

SEQ ID NO: 155902 - DNA, 17 bp, synthetic construct
  source 1..17: mol_type = other DNA
tctgcctgcccctccct

SEQ ID NO: 155903 - DNA, 17 bp, synthetic construct
  source 1..17: mol_type = other DNA
ctctgcctgcccctccc

SEQ ID NO: 155904 - DNA, 17 bp, synthetic construct
  source 1..17: mol_type = other DNA
cctctgcctgcccctcc

SEQ ID NO: 155905 - DNA, 17 bp, synthetic construct
  source 1..17: mol_type = other DNA
gcctctgcctgcccctc

SEQ ID NO: 155906 - DNA, 17 bp, synthetic construct
  source 1..17: mol_type = other DNA
cgcctctgcctgcccct

SEQ ID NO: 155907 - DNA, 17 bp, synthetic construct
  source 1..17: mol_type = other DNA
ccgcctctgcctgcccc

SEQ ID NO: 155908 - DNA, 17 bp, synthetic construct
  source 1..17: mol_type = other DNA
cccgcctctgcctgccc

SEQ ID NO: 155909 - DNA, 17 bp, synthetic construct
  source 1..17: mol_type = other DNA
gcccgcctctgcctgcc

SEQ ID NO: 155910 - DNA, 17 bp, synthetic construct
  source 1..17: mol_type = other DNA
tgcccgcctctgcctgc

SEQ ID NO: 155911 - DNA, 17 bp, synthetic construct
  source 1..17: mol_type = other DNA
ctgcccgcctctgcctg

SEQ ID NO: 155912 - DNA, 17 bp, synthetic construct
  source 1..17: mol_type = other DNA
cctgcccgcctctgcct

SEQ ID NO: 155913 - DNA, 17 bp, synthetic construct
  source 1..17: mol_type = other DNA
ccctgcccgcctctgcc

SEQ ID NO: 155914 - DNA, 17 bp, synthetic construct
  source 1..17: mol_type = other DNA
cccctgcccgcctctgc

SEQ ID NO: 155915 - DNA, 17 bp, synthetic construct
  source 1..17: mol_type = other DNA
tcccctgcccgcctctg

SEQ ID NO: 155916 - DNA, 17 bp, synthetic construct
  source 1..17: mol_type = other DNA
gtcccctgcccgcctct

SEQ ID NO: 155917 - DNA, 17 bp, synthetic construct
  source 1..17: mol_type = other DNA
ggtcccctgcccgcctc

SEQ ID NO: 155918 - DNA, 17 bp, synthetic construct
  source 1..17: mol_type = other DNA
cggtcccctgcccgcct

SEQ ID NO: 155919 - DNA, 17 bp, synthetic construct
  source 1..17: mol_type = other DNA
ccggtcccctgcccgcc

SEQ ID NO: 155920 - DNA, 17 bp, synthetic construct
  source 1..17: mol_type = other DNA
cccggtcccctgcccgc

SEQ ID NO: 155921 - DNA, 17 bp, synthetic construct
  source 1..17: mol_type = other DNA
ccccggtcccctgcccg

SEQ ID NO: 155922 - DNA, 17 bp, synthetic construct
  source 1..17: mol_type = other DNA
tccccggtcccctgccc

SEQ ID NO: 155923 - DNA, 17 bp, synthetic construct
  source 1..17: mol_type = other DNA
ctccccggtcccctgcc

SEQ ID NO: 155924 - DNA, 17 bp, synthetic construct
  source 1..17: mol_type = other DNA
cctccccggtcccctgc

SEQ ID NO: 155925 - DNA, 17 bp, synthetic construct
  source 1..17: mol_type = other DNA
ccctccccggtcccctg

SEQ ID NO: 155926 - DNA, 17 bp, synthetic construct
  source 1..17: mol_type = other DNA
cccctccccggtcccct

SEQ ID NO: 155927 - DNA, 17 bp, synthetic construct
  source 1..17: mol_type = other DNA
ccccctccccggtcccc

SEQ ID NO: 155928 - DNA, 17 bp, synthetic construct
  source 1..17: mol_type = other DNA
gccccctccccggtccc

SEQ ID NO: 155929 - DNA, 17 bp, synthetic construct
  source 1..17: mol_type = other DNA
agccccctccccggtcc

SEQ ID NO: 155930 - DNA, 17 bp, synthetic construct
  source 1..17: mol_type = other DNA
cagccccctccccggtc

SEQ ID NO: 155931 - DNA, 17 bp, synthetic construct
  source 1..17: mol_type = other DNA
gcagccccctccccggt

SEQ ID NO: 155932 - DNA, 17 bp, synthetic construct
  source 1..17: mol_type = other DNA
ggcagccccctccccgg

SEQ ID NO: 155933 - DNA, 17 bp, synthetic construct
  source 1..17: mol_type = other DNA
gggcagccccctccccg

SEQ ID NO: 155934 - DNA, 17 bp, synthetic construct
  source 1..17: mol_type = other DNA
ggggcagccccctcccc

SEQ ID NO: 155935 - DNA, 17 bp, synthetic construct
  source 1..17: mol_type = other DNA
gggggcagccccctccc

SEQ ID NO: 155936 - DNA, 17 bp, synthetic construct
  source 1..17: mol_type = other DNA
tgggggcagccccctcc

SEQ ID NO: 155937 - DNA, 17 bp, synthetic construct
  source 1..17: mol_type = other DNA
ctgggggcagccccctc

SEQ ID NO: 155938 - DNA, 17 bp, synthetic construct
  source 1..17: mol_type = other DNA
cctgggggcagccccct

SEQ ID NO: 155939 - DNA, 17 bp, synthetic construct
  source 1..17: mol_type = other DNA
ccctgggggcagccccc

SEQ ID NO: 155940 - DNA, 17 bp, synthetic construct
  source 1..17: mol_type = other DNA
gccctgggggcagcccc

SEQ ID NO: 155941 - DNA, 17 bp, synthetic construct
  source 1..17: mol_type = other DNA
tgccctgggggcagccc

SEQ ID NO: 155942 - DNA, 17 bp, synthetic construct
  source 1..17: mol_type = other DNA
atgccctgggggcagcc

SEQ ID NO: 155943 - DNA, 17 bp, synthetic construct
  source 1..17: mol_type = other DNA
catgccctgggggcagc

SEQ ID NO: 155944 - DNA, 17 bp, synthetic construct
  source 1..17: mol_type = other DNA
ccatgccctgggggcag

SEQ ID NO: 155945 - DNA, 17 bp, synthetic construct
  source 1..17: mol_type = other DNA
gccatgccctgggggca

SEQ ID NO: 155946 - DNA, 17 bp, synthetic construct
  source 1..17: mol_type = other DNA
cgccatgccctgggggc

SEQ ID NO: 155947 - DNA, 17 bp, synthetic construct
  source 1..17: mol_type = other DNA
ccgccatgccctggggg

SEQ ID NO: 155948 - DNA, 17 bp, synthetic construct
  source 1..17: mol_type = other DNA
tccgccatgccctgggg

SEQ ID NO: 155949 - DNA, 17 bp, synthetic construct
  source 1..17: mol_type = other DNA
ctccgccatgccctggg

SEQ ID NO: 155950 - DNA, 17 bp, synthetic construct
  source 1..17: mol_type = other DNA
tctccgccatgccctgg

SEQ ID NO: 155951 - DNA, 17 bp, synthetic construct
  source 1..17: mol_type = other DNA
atctccgccatgccctg

SEQ ID NO: 155952 - DNA, 17 bp, synthetic construct
  source 1..17: mol_type = other DNA
gatctccgccatgccct

SEQ ID NO: 155953 - DNA, 17 bp, synthetic construct
  source 1..17: mol_type = other DNA
ggatctccgccatgccc

SEQ ID NO: 155954 - DNA, 17 bp, synthetic construct
  source 1..17: mol_type = other DNA
aggatctccgccatgcc

SEQ ID NO: 155955 - DNA, 17 bp, synthetic construct
  source 1..17: mol_type = other DNA
caggatctccgccatgc

SEQ ID NO: 155956 - DNA, 17 bp, synthetic construct
  source 1..17: mol_type = other DNA
ccaggatctccgccatg

SEQ ID NO: 155957 - DNA, 17 bp, synthetic construct
  source 1..17: mol_type = other DNA
accaggatctccgccat

SEQ ID NO: 155958 - DNA, 17 bp, synthetic construct
  source 1..17: mol_type = other DNA
caccaggatctccgcca

SEQ ID NO: 155959 - DNA, 17 bp, synthetic construct
  source 1..17: mol_type = other DNA
gcaccaggatctccgcc

SEQ ID NO: 155960 - DNA, 17 bp, synthetic construct
  source 1..17: mol_type = other DNA
ggcaccaggatctccgc

SEQ ID NO: 155961 - DNA, 17 bp, synthetic construct
  source 1..17: mol_type = other DNA
tggcaccaggatctccg

SEQ ID NO: 155962 - DNA, 17 bp, synthetic construct
  source 1..17: mol_type = other DNA
ctggcaccaggatctcc

SEQ ID NO: 155963 - DNA, 17 bp, synthetic construct
  source 1..17: mol_type = other DNA
gctggcaccaggatctc

SEQ ID NO: 155964 - DNA, 17 bp, synthetic construct
  source 1..17: mol_type = other DNA
cgctggcaccaggatct

SEQ ID NO: 155965 - DNA, 17 bp, synthetic construct
  source 1..17: mol_type = other DNA
gcgctggcaccaggatc

SEQ ID NO: 155966 - DNA, 17 bp, synthetic construct
  source 1..17: mol_type = other DNA
tgcgctggcaccaggat

SEQ ID NO: 155967 - DNA, 17 bp, synthetic construct
  source 1..17: mol_type = other DNA
ctgcgctggcaccagga

SEQ ID NO: 155968 - DNA, 17 bp, synthetic construct
  source 1..17: mol_type = other DNA
cctgcgctggcaccagg

SEQ ID NO: 155969 - DNA, 17 bp, synthetic construct
  source 1..17: mol_type = other DNA
tcctgcgctggcaccag

SEQ ID NO: 155970 - DNA, 17 bp, synthetic construct
  source 1..17: mol_type = other DNA
gtcctgcgctggcacca

SEQ ID NO: 155971 - DNA, 17 bp, synthetic construct
  source 1..17: mol_type = other DNA
tgtcctgcgctggcacc

SEQ ID NO: 155972 - DNA, 17 bp, synthetic construct
  source 1..17: mol_type = other DNA
gtgtcctgcgctggcac

SEQ ID NO: 155973 - DNA, 17 bp, synthetic construct
  source 1..17: mol_type = other DNA
ggtgtcctgcgctggca

SEQ ID NO: 155974 - DNA, 17 bp, synthetic construct
  source 1..17: mol_type = other DNA
tggtgtcctgcgctggc

SEQ ID NO: 155975 - DNA, 17 bp, synthetic construct
  source 1..17: mol_type = other DNA
ctggtgtcctgcgctgg

SEQ ID NO: 155976 - DNA, 17 bp, synthetic construct
  source 1..17: mol_type = other DNA
gctggtgtcctgcgctg

SEQ ID NO: 155977 - DNA, 17 bp, synthetic construct
  source 1..17: mol_type = other DNA
tgctggtgtcctgcgct

SEQ ID NO: 155978 - DNA, 17 bp, synthetic construct
  source 1..17: mol_type = other DNA
atgctggtgtcctgcgc

SEQ ID NO: 155979 - DNA, 17 bp, synthetic construct
  source 1..17: mol_type = other DNA
aatgctggtgtcctgcg

SEQ ID NO: 155980 - DNA, 17 bp, synthetic construct
  source 1..17: mol_type = other DNA
caatgctggtgtcctgc

SEQ ID NO: 155981 - DNA, 17 bp, synthetic construct
  source 1..17: mol_type = other DNA
ccaatgctggtgtcctg

SEQ ID NO: 155982 - DNA, 17 bp, synthetic construct
  source 1..17: mol_type = other DNA
tccaatgctggtgtcct

SEQ ID NO: 155983 - DNA, 17 bp, synthetic construct
  source 1..17: mol_type = other DNA
gtccaatgctggtgtcc

SEQ ID NO: 155984 - DNA, 17 bp, synthetic construct
  source 1..17: mol_type = other DNA
ggtccaatgctggtgtc

SEQ ID NO: 155985 - DNA, 17 bp, synthetic construct
  source 1..17: mol_type = other DNA
tggtccaatgctggtgt

SEQ ID NO: 155986 - DNA, 17 bp, synthetic construct
  source 1..17: mol_type = other DNA
ctggtccaatgctggtg

SEQ ID NO: 155987 - DNA, 17 bp, synthetic construct
  source 1..17: mol_type = other DNA
gctggtccaatgctggt

SEQ ID NO: 155988 - DNA, 17 bp, synthetic construct
  source 1..17: mol_type = other DNA
cgctggtccaatgctgg

SEQ ID NO: 155989 - DNA, 17 bp, synthetic construct
  source 1..17: mol_type = other DNA
ccgctggtccaatgctg

SEQ ID NO: 155990 - DNA, 17 bp, synthetic construct
  source 1..17: mol_type = other DNA
gccgctggtccaatgct

SEQ ID NO: 155991 - DNA, 17 bp, synthetic construct
  source 1..17: mol_type = other DNA
ggccgctggtccaatgc

SEQ ID NO: 155992 - DNA, 17 bp, synthetic construct
  source 1..17: mol_type = other DNA
gggccgctggtccaatg

SEQ ID NO: 155993 - DNA, 17 bp, synthetic construct
  source 1..17: mol_type = other DNA
ggggccgctggtccaat

SEQ ID NO: 155994 - DNA, 17 bp, synthetic construct
  source 1..17: mol_type = other DNA
cggggccgctggtccaa

SEQ ID NO: 155995 - DNA, 17 bp, synthetic construct
  source 1..17: mol_type = other DNA
ccggggccgctggtcca

SEQ ID NO: 155996 - DNA, 17 bp, synthetic construct
  source 1..17: mol_type = other DNA
tccggggccgctggtcc

SEQ ID NO: 155997 - DNA, 17 bp, synthetic construct
  source 1..17: mol_type = other DNA
ttccggggccgctggtc

SEQ ID NO: 155998 - DNA, 17 bp, synthetic construct
  source 1..17: mol_type = other DNA
cttccggggccgctggt

SEQ ID NO: 155999 - DNA, 17 bp, synthetic construct
  source 1..17: mol_type = other DNA
gcttccggggccgctgg

SEQ ID NO: 156000 - DNA, 17 bp, synthetic construct
  source 1..17: mol_type = other DNA
tgcttccggggccgctg

SEQ ID NO: 156001 - DNA, 17 bp, synthetic construct
  source 1..17: mol_type = other DNA
ctgcttccggggccgct

SEQ ID NO: 156002 - DNA, 17 bp, synthetic construct
  source 1..17: mol_type = other DNA
gctgcttccggggccgc

SEQ ID NO: 156003 - DNA, 17 bp, synthetic construct
  source 1..17: mol_type = other DNA
ggctgcttccggggccg

SEQ ID NO: 156004 - DNA, 17 bp, synthetic construct
  source 1..17: mol_type = other DNA
tggctgcttccggggcc

SEQ ID NO: 156005 - DNA, 17 bp, synthetic construct
  source 1..17: mol_type = other DNA
ctggctgcttccggggc

SEQ ID NO: 156006 - DNA, 17 bp, synthetic construct
  source 1..17: mol_type = other DNA
gctggctgcttccgggg

SEQ ID NO: 156007 - DNA, 17 bp, synthetic construct
  source 1..17: mol_type = other DNA
agctggctgcttccggg

SEQ ID NO: 156008 - DNA, 17 bp, synthetic construct
  source 1..17: mol_type = other DNA
cagctggctgcttccgg

SEQ ID NO: 156009 - DNA, 17 bp, synthetic construct
  source 1..17: mol_type = other DNA
ccagctggctgcttccg

SEQ ID NO: 156010 - DNA, 17 bp, synthetic construct
  source 1..17: mol_type = other DNA
cccagctggctgcttcc

SEQ ID NO: 156011 - DNA, 17 bp, synthetic construct
  source 1..17: mol_type = other DNA
tcccagctggctgcttc

SEQ ID NO: 156012 - DNA, 17 bp, synthetic construct
  source 1..17: mol_type = other DNA
ctcccagctggctgctt

SEQ ID NO: 156013 - DNA, 17 bp, synthetic construct
  source 1..17: mol_type = other DNA
cctcccagctggctgct

SEQ ID NO: 156014 - DNA, 17 bp, synthetic construct
  source 1..17: mol_type = other DNA
tcctcccagctggctgc

SEQ ID NO: 156015 - DNA, 17 bp, synthetic construct
  source 1..17: mol_type = other DNA
atcctcccagctggctg

SEQ ID NO: 156016 - DNA, 17 bp, synthetic construct
  source 1..17: mol_type = other DNA
catcctcccagctggct

SEQ ID NO: 156017 - DNA, 17 bp, synthetic construct
  source 1..17: mol_type = other DNA
ccatcctcccagctggc

SEQ ID NO: 156018 - DNA, 17 bp, synthetic construct
  source 1..17: mol_type = other DNA
tccatcctcccagctgg

SEQ ID NO: 156019 - DNA, 17 bp, synthetic construct
  source 1..17: mol_type = other DNA
ctccatcctcccagctg

SEQ ID NO: 156020 - DNA, 17 bp, synthetic construct
  source 1..17: mol_type = other DNA
gctccatcctcccagct

SEQ ID NO: 156021 - DNA, 17 bp, synthetic construct
  source 1..17: mol_type = other DNA
cgctccatcctcccagc

SEQ ID NO: 156022 - DNA, 17 bp, synthetic construct
  source 1..17: mol_type = other DNA
ccgctccatcctcccag

SEQ ID NO: 156023 - DNA, 17 bp, synthetic construct
  source 1..17: mol_type = other DNA
cccgctccatcctccca

SEQ ID NO: 156024 - DNA, 17 bp, synthetic construct
  source 1..17: mol_type = other DNA
gcccgctccatcctccc

SEQ ID NO: 156025 - DNA, 17 bp, synthetic construct
  source 1..17: mol_type = other DNA
tgcccgctccatcctcc

SEQ ID NO: 156026 - DNA, 17 bp, synthetic construct
  source 1..17: mol_type = other DNA
ctgcccgctccatcctc

SEQ ID NO: 156027 - DNA, 17 bp, synthetic construct
  source 1..17: mol_type = other DNA
gctgcccgctccatcct

SEQ ID NO: 156028 - DNA, 17 bp, synthetic construct
  source 1..17: mol_type = other DNA
ggctgcccgctccatcc

SEQ ID NO: 156029 - DNA, 17 bp, synthetic construct
  source 1..17: mol_type = other DNA
gggctgcccgctccatc

SEQ ID NO: 156030 - DNA, 17 bp, synthetic construct
  source 1..17: mol_type = other DNA
agggctgcccgctccat

SEQ ID NO: 156031 - DNA, 17 bp, synthetic construct
  source 1..17: mol_type = other DNA
cagggctgcccgctcca

SEQ ID NO: 156032 - DNA, 17 bp, synthetic construct
  source 1..17: mol_type = other DNA
gcagggctgcccgctcc

SEQ ID NO: 156033 - DNA, 17 bp, synthetic construct
  source 1..17: mol_type = other DNA
ggcagggctgcccgctc

SEQ ID NO: 156034 - DNA, 17 bp, synthetic construct
  source 1..17: mol_type = other DNA
gggcagggctgcccgct

SEQ ID NO: 156035 - DNA, 17 bp, synthetic construct
  source 1..17: mol_type = other DNA
agggcagggctgcccgc

SEQ ID NO: 156036 - DNA, 17 bp, synthetic construct
  source 1..17: mol_type = other DNA
cagggcagggctgcccg

SEQ ID NO: 156037 - DNA, 17 bp, synthetic construct
  source 1..17: mol_type = other DNA
ccagggcagggctgccc

SEQ ID NO: 156038 - DNA, 17 bp, synthetic construct
  source 1..17: mol_type = other DNA
gccagggcagggctgcc

SEQ ID NO: 156039 - DNA, 17 bp, synthetic construct
  source 1..17: mol_type = other DNA
agccagggcagggctgc

SEQ ID NO: 156040 - DNA, 17 bp, synthetic construct
  source 1..17: mol_type = other DNA
gagccagggcagggctg

SEQ ID NO: 156041 - DNA, 17 bp, synthetic construct
  source 1..17: mol_type = other DNA
tgagccagggcagggct

SEQ ID NO: 156042 - DNA, 17 bp, synthetic construct
  source 1..17: mol_type = other DNA
ctgagccagggcagggc

SEQ ID NO: 156043 - DNA, 17 bp, synthetic construct
  source 1..17: mol_type = other DNA
cctgagccagggcaggg

SEQ ID NO: 156044 - DNA, 17 bp, synthetic construct
  source 1..17: mol_type = other DNA
gcctgagccagggcagg

SEQ ID NO: 156045 - DNA, 17 bp, synthetic construct
  source 1..17: mol_type = other DNA
ggcctgagccagggcag

SEQ ID NO: 156046 - DNA, 17 bp, synthetic construct
  source 1..17: mol_type = other DNA
cggcctgagccagggca

SEQ ID NO: 156047 - DNA, 17 bp, synthetic construct
  source 1..17: mol_type = other DNA
tcggcctgagccagggc

SEQ ID NO: 156048 - DNA, 17 bp, synthetic construct
  source 1..17: mol_type = other DNA
gtcggcctgagccaggg

SEQ ID NO: 156049 - DNA, 17 bp, synthetic construct
  source 1..17: mol_type = other DNA
agtcggcctgagccagg

SEQ ID NO: 156050 - DNA, 17 bp, synthetic construct
  source 1..17: mol_type = other DNA
aagtcggcctgagccag

SEQ ID NO: 156051 - DNA, 17 bp, synthetic construct
  source 1..17: mol_type = other DNA
aaagtcggcctgagcca

SEQ ID NO: 156052 - DNA, 17 bp, synthetic construct
  source 1..17: mol_type = other DNA
caaagtcggcctgagcc

SEQ ID NO: 156053 - DNA, 17 bp, synthetic construct
  source 1..17: mol_type = other DNA
gcaaagtcggcctgagc

SEQ ID NO: 156054 - DNA, 17 bp, synthetic construct
  source 1..17: mol_type = other DNA
tgcaaagtcggcctgag

SEQ ID NO: 156055 - DNA, 17 bp, synthetic construct
  source 1..17: mol_type = other DNA
gtgcaaagtcggcctga

SEQ ID NO: 156056 - DNA, 17 bp, synthetic construct
  source 1..17: mol_type = other DNA
tgtgcaaagtcggcctg

SEQ ID NO: 156057 - DNA, 17 bp, synthetic construct
  source 1..17: mol_type = other DNA
ctgtgcaaagtcggcct

SEQ ID NO: 156058 - DNA, 17 bp, synthetic construct
  source 1..17: mol_type = other DNA
cctgtgcaaagtcggcc

SEQ ID NO: 156059 - DNA, 17 bp, synthetic construct
  source 1..17: mol_type = other DNA
ccctgtgcaaagtcggc

SEQ ID NO: 156060 - DNA, 17 bp, synthetic construct
  source 1..17: mol_type = other DNA
cccctgtgcaaagtcgg

SEQ ID NO: 156061 - DNA, 17 bp, synthetic construct
  source 1..17: mol_type = other DNA
gcccctgtgcaaagtcg

SEQ ID NO: 156062 - DNA, 17 bp, synthetic construct
  source 1..17: mol_type = other DNA
agcccctgtgcaaagtc

SEQ ID NO: 156063 - DNA, 17 bp, synthetic construct
  source 1..17: mol_type = other DNA
cagcccctgtgcaaagt

SEQ ID NO: 156064 - DNA, 17 bp, synthetic construct
  source 1..17: mol_type = other DNA
ccagcccctgtgcaaag

SEQ ID NO: 156065 - DNA, 17 bp, synthetic construct
  source 1..17: mol_type = other DNA
gccagcccctgtgcaaa

SEQ ID NO: 156066 - DNA, 17 bp, synthetic construct
  source 1..17: mol_type = other DNA
agccagcccctgtgcaa

SEQ ID NO: 156067 - DNA, 17 bp, synthetic construct
  source 1..17: mol_type = other DNA
aagccagcccctgtgca

SEQ ID NO: 156068 - DNA, 17 bp, synthetic construct
  source 1..17: mol_type = other DNA
aaagccagcccctgtgc

SEQ ID NO: 156069 - DNA, 17 bp, synthetic construct
  source 1..17: mol_type = other DNA
caaagccagcccctgtg

SEQ ID NO: 156070 - DNA, 17 bp, synthetic construct
  source 1..17: mol_type = other DNA
gcaaagccagcccctgt

SEQ ID NO: 156071 - DNA, 17 bp, synthetic construct
  source 1..17: mol_type = other DNA
tgcaaagccagcccctg

SEQ ID NO: 156072 - DNA, 17 bp, synthetic construct
  source 1..17: mol_type = other DNA
gtgcaaagccagcccct

SEQ ID NO: 156073 - DNA, 17 bp, synthetic construct
  source 1..17: mol_type = other DNA
tgtgcaaagccagcccc

SEQ ID NO: 156074 - DNA, 17 bp, synthetic construct
  source 1..17: mol_type = other DNA
ctgtgcaaagccagccc

SEQ ID NO: 156075 - DNA, 17 bp, synthetic construct
  source 1..17: mol_type = other DNA
cctgtgcaaagccagcc

SEQ ID NO: 156076 - DNA, 17 bp, synthetic construct
  source 1..17: mol_type = other DNA
ccctgtgcaaagccagc

SEQ ID NO: 156077 - DNA, 17 bp, synthetic construct
  source 1..17: mol_type = other DNA
cccctgtgcaaagccag

SEQ ID NO: 156078 - DNA, 17 bp, synthetic construct
  source 1..17: mol_type = other DNA
gcccctgtgcaaagcca

SEQ ID NO: 156079 - DNA, 17 bp, synthetic construct
  source 1..17: mol_type = other DNA
ggcccctgtgcaaagcc

SEQ ID NO: 156080 - DNA, 17 bp, synthetic construct
  source 1..17: mol_type = other DNA
cggcccctgtgcaaagc

SEQ ID NO: 156081 - DNA, 17 bp, synthetic construct
  source 1..17: mol_type = other DNA
tcggcccctgtgcaaag

SEQ ID NO: 156082 - DNA, 17 bp, synthetic construct
  source 1..17: mol_type = other DNA
gtcggcccctgtgcaaa

SEQ ID NO: 156083 - DNA, 17 bp, synthetic construct
  source 1..17: mol_type = other DNA
agtcggcccctgtgcaa

SEQ ID NO: 156084 - DNA, 17 bp, synthetic construct
  source 1..17: mol_type = other DNA
cagtcggcccctgtgca

SEQ ID NO: 156085 - DNA, 17 bp, synthetic construct
  source 1..17: mol_type = other DNA
gcagtcggcccctgtgc

SEQ ID NO: 156086 - DNA, 17 bp, synthetic construct
  source 1..17: mol_type = other DNA
tgcagtcggcccctgtg

SEQ ID NO: 156087 - DNA, 17 bp, synthetic construct
  source 1..17: mol_type = other DNA
gtgcagtcggcccctgt

SEQ ID NO: 156088 - DNA, 17 bp, synthetic construct
  source 1..17: mol_type = other DNA
tgtgcagtcggcccctg

SEQ ID NO: 156089 - DNA, 17 bp, synthetic construct
  source 1..17: mol_type = other DNA
ctgtgcagtcggcccct

SEQ ID NO: 156090 - DNA, 17 bp, synthetic construct
  source 1..17: mol_type = other DNA
cctgtgcagtcggcccc

SEQ ID NO: 156091 - DNA, 17 bp, synthetic construct
  source 1..17: mol_type = other DNA
ccctgtgcagtcggccc

SEQ ID NO: 156092 - DNA, 17 bp, synthetic construct
  source 1..17: mol_type = other DNA
cccctgtgcagtcggcc

SEQ ID NO: 156093 - DNA, 17 bp, synthetic construct
  source 1..17: mol_type = other DNA
gcccctgtgcagtcggc

SEQ ID NO: 156094 - DNA, 17 bp, synthetic construct
  source 1..17: mol_type = other DNA
cgcccctgtgcagtcgg

SEQ ID NO: 156095 - DNA, 17 bp, synthetic construct
  source 1..17: mol_type = other DNA
gcgcccctgtgcagtcg

SEQ ID NO: 156096 - DNA, 17 bp, synthetic construct
  source 1..17: mol_type = other DNA
ggcgcccctgtgcagtc

SEQ ID NO: 156097 - DNA, 17 bp, synthetic construct
  source 1..17: mol_type = other DNA
gggcgcccctgtgcagt

SEQ ID NO: 156098 - DNA, 17 bp, synthetic construct
  source 1..17: mol_type = other DNA
ggggcgcccctgtgcag

SEQ ID NO: 156099 - DNA, 17 bp, synthetic construct
  source 1..17: mol_type = other DNA
gggggcgcccctgtgca

SEQ ID NO: 156100 - DNA, 17 bp, synthetic construct
  source 1..17: mol_type = other DNA
ggggggcgcccctgtgc

SEQ ID NO: 156101 - DNA, 17 bp, synthetic construct
  source 1..17: mol_type = other DNA
cggggggcgcccctgtg

SEQ ID NO: 156102 - DNA, 17 bp, synthetic construct
  source 1..17: mol_type = other DNA
gcggggggcgcccctgt

SEQ ID NO: 156103 - DNA, 17 bp, synthetic construct
  source 1..17: mol_type = other DNA
ggcggggggcgcccctg

SEQ ID NO: 156104 - DNA, 17 bp, synthetic construct
  source 1..17: mol_type = other DNA
tggcggggggcgcccct

SEQ ID NO: 156105 - DNA, 17 bp, synthetic construct
  source 1..17: mol_type = other DNA
ctggcggggggcgcccc

SEQ ID NO: 156106 - DNA, 17 bp, synthetic construct
  source 1..17: mol_type = other DNA
cctggcggggggcgccc

SEQ ID NO: 156107 - DNA, 17 bp, synthetic construct
  source 1..17: mol_type = other DNA
ccctggcggggggcgcc

SEQ ID NO: 156108 - DNA, 17 bp, synthetic construct
  source 1..17: mol_type = other DNA
gccctggcggggggcgc

SEQ ID NO: 156109 - DNA, 17 bp, synthetic construct
  source 1..17: mol_type = other DNA
agccctggcggggggcg

SEQ ID NO: 156110 - DNA, 17 bp, synthetic construct
  source 1..17: mol_type = other DNA
aagccctggcggggggc

SEQ ID NO: 156111 - DNA, 17 bp, synthetic construct
  source 1..17: mol_type = other DNA
taagccctggcgggggg

SEQ ID NO: 156112 - DNA, 17 bp, synthetic construct
  source 1..17: mol_type = other DNA
ataagccctggcggggg

SEQ ID NO: 156113 - DNA, 17 bp, synthetic construct
  source 1..17: mol_type = other DNA
gataagccctggcgggg

SEQ ID NO: 156114 - DNA, 17 bp, synthetic construct
  source 1..17: mol_type = other DNA
agataagccctggcggg

SEQ ID NO: 156115 - DNA, 17 bp, synthetic construct
  source 1..17: mol_type = other DNA
cagataagccctggcgg

SEQ ID NO: 156116 - DNA, 17 bp, synthetic construct
  source 1..17: mol_type = other DNA
gcagataagccctggcg

SEQ ID NO: 156117 - DNA, 17 bp, synthetic construct
  source 1..17: mol_type = other DNA
tgcagataagccctggc

SEQ ID NO: 156118 - DNA, 17 bp, synthetic construct
  source 1..17: mol_type = other DNA
ctgcagataagccctgg

SEQ ID NO: 156119 - DNA, 17 bp, synthetic construct
  source 1..17: mol_type = other DNA
tctgcagataagccctg

SEQ ID NO: 156120 - DNA, 17 bp, synthetic construct
  source 1..17: mol_type = other DNA
ctctgcagataagccct

SEQ ID NO: 156121 - DNA, 17 bp, synthetic construct
  source 1..17: mol_type = other DNA
cctctgcagataagccc

SEQ ID NO: 156122 - DNA, 17 bp, synthetic construct
  source 1..17: mol_type = other DNA
ccctctgcagataagcc

SEQ ID NO: 156123 - DNA, 17 bp, synthetic construct
  source 1..17: mol_type = other DNA
accctctgcagataagc

SEQ ID NO: 156124 - DNA, 17 bp, synthetic construct
  source 1..17: mol_type = other DNA
aaccctctgcagataag

SEQ ID NO: 156125 - DNA, 17 bp, synthetic construct
  source 1..17: mol_type = other DNA
gaaccctctgcagataa

SEQ ID NO: 156126 - DNA, 17 bp, synthetic construct
  source 1..17: mol_type = other DNA
agaaccctctgcagata

SEQ ID NO: 156127 - DNA, 17 bp, synthetic construct
  source 1..17: mol_type = other DNA
cagaaccctctgcagat

SEQ ID NO: 156128 - DNA, 17 bp, synthetic construct
  source 1..17: mol_type = other DNA
ccagaaccctctgcaga

SEQ ID NO: 156129 - DNA, 17 bp, synthetic construct
  source 1..17: mol_type = other DNA
cccagaaccctctgcag

SEQ ID NO: 156130 - DNA, 17 bp, synthetic construct
  source 1..17: mol_type = other DNA
tcccagaaccctctgca

SEQ ID NO: 156131 - DNA, 17 bp, synthetic construct
  source 1..17: mol_type = other DNA
ctcccagaaccctctgc

SEQ ID NO: 156132 - DNA, 17 bp, synthetic construct
  source 1..17: mol_type = other DNA
gctcccagaaccctctg

SEQ ID NO: 156133 - DNA, 17 bp, synthetic construct
  source 1..17: mol_type = other DNA
tgctcccagaaccctct

SEQ ID NO: 156134 - DNA, 17 bp, synthetic construct
  source 1..17: mol_type = other DNA
ctgctcccagaaccctc

SEQ ID NO: 156135 - DNA, 17 bp, synthetic construct
  source 1..17: mol_type = other DNA
tctgctcccagaaccct

SEQ ID NO: 156136 - DNA, 17 bp, synthetic construct
  source 1..17: mol_type = other DNA
ttctgctcccagaaccc

SEQ ID NO: 156137 - DNA, 17 bp, synthetic construct
  source 1..17: mol_type = other DNA
attctgctcccagaacc

SEQ ID NO: 156138 - DNA, 17 bp, synthetic construct
  source 1..17: mol_type = other DNA
gattctgctcccagaac

SEQ ID NO: 156139 - DNA, 17 bp, synthetic construct
  source 1..17: mol_type = other DNA
ggattctgctcccagaa

SEQ ID NO: 156140 - DNA, 17 bp, synthetic construct
  source 1..17: mol_type = other DNA
aggattctgctcccaga

SEQ ID NO: 156141 - DNA, 17 bp, synthetic construct
  source 1..17: mol_type = other DNA
caggattctgctcccag

SEQ ID NO: 156142 - DNA, 17 bp, synthetic construct
  source 1..17: mol_type = other DNA
ccaggattctgctccca

SEQ ID NO: 156143 - DNA, 17 bp, synthetic construct
  source 1..17: mol_type = other DNA
cccaggattctgctccc

SEQ ID NO: 156144 - DNA, 17 bp, synthetic construct
  source 1..17: mol_type = other DNA
tcccaggattctgctcc

SEQ ID NO: 156145 - DNA, 17 bp, synthetic construct
  source 1..17: mol_type = other DNA
gtcccaggattctgctc

SEQ ID NO: 156146 - DNA, 17 bp, synthetic construct
  source 1..17: mol_type = other DNA
tgtcccaggattctgct

SEQ ID NO: 156147 - DNA, 17 bp, synthetic construct
  source 1..17: mol_type = other DNA
ctgtcccaggattctgc

SEQ ID NO: 156148 - DNA, 17 bp, synthetic construct
  source 1..17: mol_type = other DNA
cctgtcccaggattctg

SEQ ID NO: 156149 - DNA, 17 bp, synthetic construct
  source 1..17: mol_type = other DNA
ccctgtcccaggattct

SEQ ID NO: 156150 - DNA, 17 bp, synthetic construct
  source 1..17: mol_type = other DNA
gccctgtcccaggattc

SEQ ID NO: 156151 - DNA, 17 bp, synthetic construct
  source 1..17: mol_type = other DNA
agccctgtcccaggatt

SEQ ID NO: 156152 - DNA, 17 bp, synthetic construct
  source 1..17: mol_type = other DNA
gagccctgtcccaggat

SEQ ID NO: 156153 - DNA, 17 bp, synthetic construct
  source 1..17: mol_type = other DNA
ggagccctgtcccagga

SEQ ID NO: 156154 - DNA, 17 bp, synthetic construct
  source 1..17: mol_type = other DNA
gggagccctgtcccagg

SEQ ID NO: 156155 - DNA, 17 bp, synthetic construct
  source 1..17: mol_type = other DNA
tgggagccctgtcccag

SEQ ID NO: 156156 - DNA, 17 bp, synthetic construct
  source 1..17: mol_type = other DNA
ctgggagccctgtccca

SEQ ID NO: 156157 - DNA, 17 bp, synthetic construct
  source 1..17: mol_type = other DNA
gctgggagccctgtccc

SEQ ID NO: 156158 - DNA, 17 bp, synthetic construct
  source 1..17: mol_type = other DNA
ggctgggagccctgtcc

SEQ ID NO: 156159 - DNA, 17 bp, synthetic construct
  source 1..17: mol_type = other DNA
cggctgggagccctgtc

SEQ ID NO: 156160 - DNA, 17 bp, synthetic construct
  source 1..17: mol_type = other DNA
acggctgggagccctgt

SEQ ID NO: 156161 - DNA, 17 bp, synthetic construct
  source 1..17: mol_type = other DNA
aacggctgggagccctg

SEQ ID NO: 156162 - DNA, 17 bp, synthetic construct
  source 1..17: mol_type = other DNA
gaacggctgggagccct

SEQ ID NO: 156163 - DNA, 17 bp, synthetic construct
  source 1..17: mol_type = other DNA
ggaacggctgggagccc

SEQ ID NO: 156164 - DNA, 17 bp, synthetic construct
  source 1..17: mol_type = other DNA
tggaacggctgggagcc

SEQ ID NO: 156165 - DNA, 17 bp, synthetic construct
  source 1..17: mol_type = other DNA
gtggaacggctgggagc

SEQ ID NO: 156166 - DNA, 17 bp, synthetic construct
  source 1..17: mol_type = other DNA
ggtggaacggctgggag

SEQ ID NO: 156167 - DNA, 17 bp, synthetic construct
  source 1..17: mol_type = other DNA
gggtggaacggctggga

SEQ ID NO: 156168 - DNA, 17 bp, synthetic construct
  source 1..17: mol_type = other DNA
agggtggaacggctggg

SEQ ID NO: 156169 - DNA, 17 bp, synthetic construct
  source 1..17: mol_type = other DNA
cagggtggaacggctgg

SEQ ID NO: 156170 - DNA, 17 bp, synthetic construct
  source 1..17: mol_type = other DNA
acagggtggaacggctg

SEQ ID NO: 156171 - DNA, 17 bp, synthetic construct
  source 1..17: mol_type = other DNA
cacagggtggaacggct

SEQ ID NO: 156172 - DNA, 17 bp, synthetic construct
  source 1..17: mol_type = other DNA
acacagggtggaacggc

SEQ ID NO: 156173 - DNA, 17 bp, synthetic construct
  source 1..17: mol_type = other DNA
cacacagggtggaacgg

SEQ ID NO: 156174 - DNA, 17 bp, synthetic construct
  source 1..17: mol_type = other DNA
ccacacagggtggaacg

SEQ ID NO: 156175 - DNA, 17 bp, synthetic construct
  source 1..17: mol_type = other DNA
accacacagggtggaac

SEQ ID NO: 156176 - DNA, 17 bp, synthetic construct
  source 1..17: mol_type = other DNA
caccacacagggtggaa

SEQ ID NO: 156177 - DNA, 17 bp, synthetic construct
  source 1..17: mol_type = other DNA
gcaccacacagggtgga

SEQ ID NO: 156178 - DNA, 17 bp, synthetic construct
  source 1..17: mol_type = other DNA
ggcaccacacagggtgg

SEQ ID NO: 156179 - DNA, 17 bp, synthetic construct
  source 1..17: mol_type = other DNA
aggcaccacacagggtg

SEQ ID NO: 156180 - DNA, 17 bp, synthetic construct
  source 1..17: mol_type = other DNA
caggcaccacacagggt

SEQ ID NO: 156181 - DNA, 17 bp, synthetic construct
  source 1..17: mol_type = other DNA
ccaggcaccacacaggg

SEQ ID NO: 156182 - DNA, 17 bp, synthetic construct
  source 1..17: mol_type = other DNA
tccaggcaccacacagg

SEQ ID NO: 156183 - DNA, 17 bp, synthetic construct
  source 1..17: mol_type = other DNA
ctccaggcaccacacag

SEQ ID NO: 156184 - DNA, 17 bp, synthetic construct
  source 1..17: mol_type = other DNA
cctccaggcaccacaca

SEQ ID NO: 156185 - DNA, 17 bp, synthetic construct
  source 1..17: mol_type = other DNA
ccctccaggcaccacac

SEQ ID NO: 156186 - DNA, 17 bp, synthetic construct
  source 1..17: mol_type = other DNA
tccctccaggcaccaca

SEQ ID NO: 156187 - DNA, 17 bp, synthetic construct
  source 1..17: mol_type = other DNA
atccctccaggcaccac

SEQ ID NO: 156188 - DNA, 17 bp, synthetic construct
  source 1..17: mol_type = other DNA
catccctccaggcacca

SEQ ID NO: 156189 - DNA, 17 bp, synthetic construct
  source 1..17: mol_type = other DNA
ccatccctccaggcacc

SEQ ID NO: 156190 - DNA, 17 bp, synthetic construct
  source 1..17: mol_type = other DNA
gccatccctccaggcac

SEQ ID NO: 156191 - DNA, 17 bp, synthetic construct
  source 1..17: mol_type = other DNA
tgccatccctccaggca

SEQ ID NO: 156192 - DNA, 17 bp, synthetic construct
  source 1..17: mol_type = other DNA
ctgccatccctccaggc

SEQ ID NO: 156193 - DNA, 17 bp, synthetic construct
  source 1..17: mol_type = other DNA
cctgccatccctccagg

SEQ ID NO: 156194 - DNA, 17 bp, synthetic construct
  source 1..17: mol_type = other DNA
ccctgccatccctccag

SEQ ID NO: 156195 - DNA, 17 bp, synthetic construct
  source 1..17: mol_type = other DNA
cccctgccatccctcca

SEQ ID NO: 156196 - DNA, 17 bp, synthetic construct
  source 1..17: mol_type = other DNA
gcccctgccatccctcc

SEQ ID NO: 156197 - DNA, 17 bp, synthetic construct
  source 1..17: mol_type = other DNA
ggcccctgccatccctc

SEQ ID NO: 156198 - DNA, 17 bp, synthetic construct
  source 1..17: mol_type = other DNA
tggcccctgccatccct

SEQ ID NO: 156199 - DNA, 17 bp, synthetic construct
  source 1..17: mol_type = other DNA
ctggcccctgccatccc

SEQ ID NO: 156200 - DNA, 17 bp, synthetic construct
  source 1..17: mol_type = other DNA
cctggcccctgccatcc

SEQ ID NO: 156201 - DNA, 17 bp, synthetic construct
  source 1..17: mol_type = other DNA
tcctggcccctgccatc

SEQ ID NO: 156202 - DNA, 17 bp, synthetic construct
  source 1..17: mol_type = other DNA
ctcctggcccctgccat

SEQ ID NO: 156203 - DNA, 17 bp, synthetic construct
  source 1..17: mol_type = other DNA
gctcctggcccctgcca

SEQ ID NO: 156204 - DNA, 17 bp, synthetic construct
  source 1..17: mol_type = other DNA
ggctcctggcccctgcc

SEQ ID NO: 156205 - DNA, 17 bp, synthetic construct
  source 1..17: mol_type = other DNA
tggctcctggcccctgc

SEQ ID NO: 156206 - DNA, 17 bp, synthetic construct
  source 1..17: mol_type = other DNA
ctggctcctggcccctg

SEQ ID NO: 156207 - DNA, 17 bp, synthetic construct
  source 1..17: mol_type = other DNA
cctggctcctggcccct

SEQ ID NO: 156208 - DNA, 17 bp, synthetic construct
  source 1..17: mol_type = other DNA
acctggctcctggcccc

SEQ ID NO: 156209 - DNA, 17 bp, synthetic construct
  source 1..17: mol_type = other DNA
cacctggctcctggccc

SEQ ID NO: 156210 - DNA, 17 bp, synthetic construct
  source 1..17: mol_type = other DNA
ccacctggctcctggcc

SEQ ID NO: 156211 - DNA, 17 bp, synthetic construct
  source 1..17: mol_type = other DNA
cccacctggctcctggc

SEQ ID NO: 156212 - DNA, 17 bp, synthetic construct
  source 1..17: mol_type = other DNA
gcccacctggctcctgg

SEQ ID NO: 156213 - DNA, 17 bp, synthetic construct
  source 1..17: mol_type = other DNA
ggcccacctggctcctg

SEQ ID NO: 156214 - DNA, 17 bp, synthetic construct
  source 1..17: mol_type = other DNA
gggcccacctggctcct

SEQ ID NO: 156215 - DNA, 17 bp, synthetic construct
  source 1..17: mol_type = other DNA
tgggcccacctggctcc

SEQ ID NO: 156216 - DNA, 17 bp, synthetic construct
  source 1..17: mol_type = other DNA
ttgggcccacctggctc

SEQ ID NO: 156217 - DNA, 17 bp, synthetic construct
  source 1..17: mol_type = other DNA
gttgggcccacctggct

SEQ ID NO: 156218 - DNA, 17 bp, synthetic construct
  source 1..17: mol_type = other DNA
tgttgggcccacctggc

SEQ ID NO: 156219 - DNA, 17 bp, synthetic construct
  source 1..17: mol_type = other DNA
ctgttgggcccacctgg

SEQ ID NO: 156220 - DNA, 17 bp, synthetic construct
  source 1..17: mol_type = other DNA
actgttgggcccacctg

SEQ ID NO: 156221 - DNA, 17 bp, synthetic construct
  source 1..17: mol_type = other DNA
cactgttgggcccacct

SEQ ID NO: 156222 - DNA, 17 bp, synthetic construct
  source 1..17: mol_type = other DNA
ccactgttgggcccacc

SEQ ID NO: 156223 - DNA, 17 bp, synthetic construct
  source 1..17: mol_type = other DNA
gccactgttgggcccac

SEQ ID NO: 156224 - DNA, 17 bp, synthetic construct
  source 1..17: mol_type = other DNA
ggccactgttgggccca

SEQ ID NO: 156225 - DNA, 17 bp, synthetic construct
  source 1..17: mol_type = other DNA
cggccactgttgggccc

SEQ ID NO: 156226 - DNA, 17 bp, synthetic construct
  source 1..17: mol_type = other DNA
gcggccactgttgggcc

SEQ ID NO: 156227 - DNA, 17 bp, synthetic construct
  source 1..17: mol_type = other DNA
agcggccactgttgggc

SEQ ID NO: 156228 - DNA, 17 bp, synthetic construct
  source 1..17: mol_type = other DNA
cagcggccactgttggg

SEQ ID NO: 156229 - DNA, 17 bp, synthetic construct
  source 1..17: mol_type = other DNA
tcagcggccactgttgg

SEQ ID NO: 156230 - DNA, 17 bp, synthetic construct
  source 1..17: mol_type = other DNA
gtcagcggccactgttg

SEQ ID NO: 156231 - DNA, 17 bp, synthetic construct
  source 1..17: mol_type = other DNA
tgtcagcggccactgtt

SEQ ID NO: 156232 - DNA, 17 bp, synthetic construct
  source 1..17: mol_type = other DNA
atgtcagcggccactgt

SEQ ID NO: 156233 - DNA, 17 bp, synthetic construct
  source 1..17: mol_type = other DNA
gatgtcagcggccactg

SEQ ID NO: 156234 - DNA, 17 bp, synthetic construct
  source 1..17: mol_type = other DNA
ggatgtcagcggccact

SEQ ID NO: 156235 - DNA, 17 bp, synthetic construct
  source 1..17: mol_type = other DNA
gggatgtcagcggccac

SEQ ID NO: 156236 - DNA, 17 bp, synthetic construct
  source 1..17: mol_type = other DNA
ggggatgtcagcggcca

SEQ ID NO: 156237 - DNA, 17 bp, synthetic construct
  source 1..17: mol_type = other DNA
gggggatgtcagcggcc

SEQ ID NO: 156238 - DNA, 17 bp, synthetic construct
  source 1..17: mol_type = other DNA
tgggggatgtcagcggc

SEQ ID NO: 156239 - DNA, 17 bp, synthetic construct
  source 1..17: mol_type = other DNA
ttgggggatgtcagcgg

SEQ ID NO: 156240 - DNA, 17 bp, synthetic construct
  source 1..17: mol_type = other DNA
gttgggggatgtcagcg

SEQ ID NO: 156241 - DNA, 17 bp, synthetic construct
  source 1..17: mol_type = other DNA
ggttgggggatgtcagc

SEQ ID NO: 156242 - DNA, 17 bp, synthetic construct
  source 1..17: mol_type = other DNA
gggttgggggatgtcag

SEQ ID NO: 156243 - DNA, 17 bp, synthetic construct
  source 1..17: mol_type = other DNA
agggttgggggatgtca

SEQ ID NO: 156244 - DNA, 17 bp, synthetic construct
  source 1..17: mol_type = other DNA
cagggttgggggatgtc

SEQ ID NO: 156245 - DNA, 17 bp, synthetic construct
  source 1..17: mol_type = other DNA
ccagggttgggggatgt

SEQ ID NO: 156246 - DNA, 17 bp, synthetic construct
  source 1..17: mol_type = other DNA
gccagggttgggggatg

SEQ ID NO: 156247 - DNA, 17 bp, synthetic construct
  source 1..17: mol_type = other DNA
ggccagggttgggggat

SEQ ID NO: 156248 - DNA, 17 bp, synthetic construct
  source 1..17: mol_type = other DNA
gggccagggttggggga

SEQ ID NO: 156249 - DNA, 17 bp, synthetic construct
  source 1..17: mol_type = other DNA
ggggccagggttggggg

SEQ ID NO: 156250 - DNA, 17 bp, synthetic construct
  source 1..17: mol_type = other DNA
gggggccagggttgggg

SEQ ID NO: 156251 - DNA, 17 bp, synthetic construct
  source 1..17: mol_type = other DNA
tgggggccagggttggg

SEQ ID NO: 156252 - DNA, 17 bp, synthetic construct
  source 1..17: mol_type = other DNA
ctgggggccagggttgg

SEQ ID NO: 156253 - DNA, 17 bp, synthetic construct
  source 1..17: mol_type = other DNA
cctgggggccagggttg

SEQ ID NO: 156254 - DNA, 17 bp, synthetic construct
  source 1..17: mol_type = other DNA
gcctgggggccagggtt

SEQ ID NO: 156255 - DNA, 17 bp, synthetic construct
  source 1..17: mol_type = other DNA
ggcctgggggccagggt

SEQ ID NO: 156256 - DNA, 17 bp, synthetic construct
  source 1..17: mol_type = other DNA
aggcctgggggccaggg

SEQ ID NO: 156257 - DNA, 17 bp, synthetic construct
  source 1..17: mol_type = other DNA
caggcctgggggccagg

SEQ ID NO: 156258 - DNA, 17 bp, synthetic construct
  source 1..17: mol_type = other DNA
acaggcctgggggccag

SEQ ID NO: 156259 - DNA, 17 bp, synthetic construct
  source 1..17: mol_type = other DNA
cacaggcctgggggcca

SEQ ID NO: 156260 - DNA, 17 bp, synthetic construct
  source 1..17: mol_type = other DNA
acacaggcctgggggcc

SEQ ID NO: 156261 - DNA, 17 bp, synthetic construct
  source 1..17: mol_type = other DNA
cacacaggcctgggggc

SEQ ID NO: 156262 - DNA, 17 bp, synthetic construct
  source 1..17: mol_type = other DNA
ccacacaggcctggggg

SEQ ID NO: 156263 - DNA, 17 bp, synthetic construct
  source 1..17: mol_type = other DNA
cccacacaggcctgggg

SEQ ID NO: 156264 - DNA, 17 bp, synthetic construct
  source 1..17: mol_type = other DNA
tcccacacaggcctggg

SEQ ID NO: 156265 - DNA, 17 bp, synthetic construct
  source 1..17: mol_type = other DNA
ttcccacacaggcctgg

SEQ ID NO: 156266 - DNA, 17 bp, synthetic construct
  source 1..17: mol_type = other DNA
gttcccacacaggcctg

SEQ ID NO: 156267 - DNA, 17 bp, synthetic construct
  source 1..17: mol_type = other DNA
agttcccacacaggcct

SEQ ID NO: 156268 - DNA, 17 bp, synthetic construct
  source 1..17: mol_type = other DNA
aagttcccacacaggcc

SEQ ID NO: 156269 - DNA, 17 bp, synthetic construct
  source 1..17: mol_type = other DNA
gaagttcccacacaggc

SEQ ID NO: 156270 - DNA, 17 bp, synthetic construct
  source 1..17: mol_type = other DNA
tgaagttcccacacagg

SEQ ID NO: 156271 - DNA, 17 bp, synthetic construct
  source 1..17: mol_type = other DNA
ttgaagttcccacacag

SEQ ID NO: 156272 - DNA, 17 bp, synthetic construct
  source 1..17: mol_type = other DNA
gttgaagttcccacaca

SEQ ID NO: 156273 - DNA, 17 bp, synthetic construct
  source 1..17: mol_type = other DNA
ggttgaagttcccacac

SEQ ID NO: 156274 - DNA, 17 bp, synthetic construct
  source 1..17: mol_type = other DNA
tggttgaagttcccaca

SEQ ID NO: 156275 - DNA, 17 bp, synthetic construct
  source 1..17: mol_type = other DNA
ctggttgaagttcccac

SEQ ID NO: 156276 - DNA, 17 bp, synthetic construct
  source 1..17: mol_type = other DNA
tctggttgaagttccca

SEQ ID NO: 156277 - DNA, 17 bp, synthetic construct
  source 1..17: mol_type = other DNA
ttctggttgaagttccc

SEQ ID NO: 156278 - DNA, 17 bp, synthetic construct
  source 1..17: mol_type = other DNA
gttctggttgaagttcc

SEQ ID NO: 156279 - DNA, 17 bp, synthetic construct
  source 1..17: mol_type = other DNA
ggttctggttgaagttc

SEQ ID NO: 156280 - DNA, 17 bp, synthetic construct
  source 1..17: mol_type = other DNA
tggttctggttgaagtt

SEQ ID NO: 156281 - DNA, 17 bp, synthetic construct
  source 1..17: mol_type = other DNA
ctggttctggttgaagt

SEQ ID NO: 156282 - DNA, 17 bp, synthetic construct
  source 1..17: mol_type = other DNA
cctggttctggttgaag

SEQ ID NO: 156283 - DNA, 17 bp, synthetic construct
  source 1..17: mol_type = other DNA
gcctggttctggttgaa

SEQ ID NO: 156284 - DNA, 17 bp, synthetic construct
  source 1..17: mol_type = other DNA
agcctggttctggttga

SEQ ID NO: 156285 - DNA, 17 bp, synthetic construct
  source 1..17: mol_type = other DNA
cagcctggttctggttg

SEQ ID NO: 156286 - DNA, 17 bp, synthetic construct
  source 1..17: mol_type = other DNA
tcagcctggttctggtt

SEQ ID NO: 156287 - DNA, 17 bp, synthetic construct
  source 1..17: mol_type = other DNA
gtcagcctggttctggt

SEQ ID NO: 156288 - DNA, 17 bp, synthetic construct
  source 1..17: mol_type = other DNA
cgtcagcctggttctgg

SEQ ID NO: 156289 - DNA, 17 bp, synthetic construct
  source 1..17: mol_type = other DNA
tcgtcagcctggttctg

SEQ ID NO: 156290 - DNA, 17 bp, synthetic construct
  source 1..17: mol_type = other DNA
gtcgtcagcctggttct

SEQ ID NO: 156291 - DNA, 17 bp, synthetic construct
  source 1..17: mol_type = other DNA
agtcgtcagcctggttc

SEQ ID NO: 156292 - DNA, 17 bp, synthetic construct
  source 1..17: mol_type = other DNA
aagtcgtcagcctggtt

SEQ ID NO: 156293 - DNA, 17 bp, synthetic construct
  source 1..17: mol_type = other DNA
gaagtcgtcagcctggt

SEQ ID NO: 156294 - DNA, 17 bp, synthetic construct
  source 1..17: mol_type = other DNA
tgaagtcgtcagcctgg

SEQ ID NO: 156295 - DNA, 17 bp, synthetic construct
  source 1..17: mol_type = other DNA
gtgaagtcgtcagcctg

SEQ ID NO: 156296 - DNA, 17 bp, synthetic construct
  source 1..17: mol_type = other DNA
cgtgaagtcgtcagcct

SEQ ID NO: 156297 - DNA, 17 bp, synthetic construct
  source 1..17: mol_type = other DNA
ccgtgaagtcgtcagcc

SEQ ID NO: 156298 - DNA, 17 bp, synthetic construct
  source 1..17: mol_type = other DNA
gccgtgaagtcgtcagc

SEQ ID NO: 156299 - DNA, 17 bp, synthetic construct
  source 1..17: mol_type = other DNA
ggccgtgaagtcgtcag

SEQ ID NO: 156300 - DNA, 17 bp, synthetic construct
  source 1..17: mol_type = other DNA
gggccgtgaagtcgtca

SEQ ID NO: 156301 - DNA, 17 bp, synthetic construct
  source 1..17: mol_type = other DNA
agggccgtgaagtcgtc

SEQ ID NO: 156302 - DNA, 17 bp, synthetic construct
  source 1..17: mol_type = other DNA
gagggccgtgaagtcgt

SEQ ID NO: 156303 - DNA, 17 bp, synthetic construct
  source 1..17: mol_type = other DNA
tgagggccgtgaagtcg

SEQ ID NO: 156304 - DNA, 17 bp, synthetic construct
  source 1..17: mol_type = other DNA
ctgagggccgtgaagtc

SEQ ID NO: 156305 - DNA, 17 bp, synthetic construct
  source 1..17: mol_type = other DNA
gctgagggccgtgaagt

SEQ ID NO: 156306 - DNA, 17 bp, synthetic construct
  source 1..17: mol_type = other DNA
cgctgagggccgtgaag

SEQ ID NO: 156307 - DNA, 17 bp, synthetic construct
  source 1..17: mol_type = other DNA
ccgctgagggccgtgaa

SEQ ID NO: 156308 - DNA, 17 bp, synthetic construct
  source 1..17: mol_type = other DNA
cccgctgagggccgtga

SEQ ID NO: 156309 - DNA, 17 bp, synthetic construct
  source 1..17: mol_type = other DNA
ccccgctgagggccgtg

SEQ ID NO: 156310 - DNA, 17 bp, synthetic construct
  source 1..17: mol_type = other DNA
accccgctgagggccgt

SEQ ID NO: 156311 - DNA, 17 bp, synthetic construct
  source 1..17: mol_type = other DNA
caccccgctgagggccg

SEQ ID NO: 156312 - DNA, 17 bp, synthetic construct
  source 1..17: mol_type = other DNA
ccaccccgctgagggcc

SEQ ID NO: 156313 - DNA, 17 bp, synthetic construct
  source 1..17: mol_type = other DNA
accaccccgctgagggc

SEQ ID NO: 156314 - DNA, 17 bp, synthetic construct
  source 1..17: mol_type = other DNA
caccaccccgctgaggg

SEQ ID NO: 156315 - DNA, 17 bp, synthetic construct
  source 1..17: mol_type = other DNA
ccaccaccccgctgagg

SEQ ID NO: 156316 - DNA, 17 bp, synthetic construct
  source 1..17: mol_type = other DNA
tccaccaccccgctgag

SEQ ID NO: 156317 - DNA, 17 bp, synthetic construct
  source 1..17: mol_type = other DNA
ctccaccaccccgctga

SEQ ID NO: 156318 - DNA, 17 bp, synthetic construct
  source 1..17: mol_type = other DNA
cctccaccaccccgctg

SEQ ID NO: 156319 - DNA, 17 bp, synthetic construct
  source 1..17: mol_type = other DNA
gcctccaccaccccgct

SEQ ID NO: 156320 - DNA, 17 bp, synthetic construct
  source 1..17: mol_type = other DNA
ggcctccaccaccccgc

SEQ ID NO: 156321 - DNA, 17 bp, synthetic construct
  source 1..17: mol_type = other DNA
tggcctccaccaccccg

SEQ ID NO: 156322 - DNA, 17 bp, synthetic construct
  source 1..17: mol_type = other DNA
gtggcctccaccacccc

SEQ ID NO: 156323 - DNA, 17 bp, synthetic construct
  source 1..17: mol_type = other DNA
cgtggcctccaccaccc

SEQ ID NO: 156324 - DNA, 17 bp, synthetic construct
  source 1..17: mol_type = other DNA
ccgtggcctccaccacc

SEQ ID NO: 156325 - DNA, 17 bp, synthetic construct
  source 1..17: mol_type = other DNA
cccgtggcctccaccac

SEQ ID NO: 156326 - DNA, 17 bp, synthetic construct
  source 1..17: mol_type = other DNA
gcccgtggcctccacca

SEQ ID NO: 156327 - DNA, 17 bp, synthetic construct
  source 1..17: mol_type = other DNA
cgcccgtggcctccacc

SEQ ID NO: 156328 - DNA, 17 bp, synthetic construct
  source 1..17: mol_type = other DNA
gcgcccgtggcctccac

SEQ ID NO: 156329 - DNA, 17 bp, synthetic construct
  source 1..17: mol_type = other DNA
tgcgcccgtggcctcca

SEQ ID NO: 156330 - DNA, 17 bp, synthetic construct
  source 1..17: mol_type = other DNA
ctgcgcccgtggcctcc

SEQ ID NO: 156331 - DNA, 17 bp, synthetic construct
  source 1..17: mol_type = other DNA
gctgcgcccgtggcctc

SEQ ID NO: 156332 - DNA, 17 bp, synthetic construct
  source 1..17: mol_type = other DNA
ggctgcgcccgtggcct

SEQ ID NO: 156333 - DNA, 17 bp, synthetic construct
  source 1..17: mol_type = other DNA
aggctgcgcccgtggcc

SEQ ID NO: 156334 - DNA, 17 bp, synthetic construct
  source 1..17: mol_type = other DNA
aaggctgcgcccgtggc

SEQ ID NO: 156335 - DNA, 17 bp, synthetic construct
  source 1..17: mol_type = other DNA
gaaggctgcgcccgtgg

SEQ ID NO: 156336 - DNA, 17 bp, synthetic construct
  source 1..17: mol_type = other DNA
cgaaggctgcgcccgtg

SEQ ID NO: 156337 - DNA, 17 bp, synthetic construct
  source 1..17: mol_type = other DNA
gcgaaggctgcgcccgt

SEQ ID NO: 156338 - DNA, 17 bp, synthetic construct
  source 1..17: mol_type = other DNA
ggcgaaggctgcgcccg

SEQ ID NO: 156339 - DNA, 17 bp, synthetic construct
  source 1..17: mol_type = other DNA
tggcgaaggctgcgccc

SEQ ID NO: 156340 - DNA, 17 bp, synthetic construct
  source 1..17: mol_type = other DNA
ttggcgaaggctgcgcc

SEQ ID NO: 156341 - DNA, 17 bp, synthetic construct
  source 1..17: mol_type = other DNA
gttggcgaaggctgcgc

SEQ ID NO: 156342 - DNA, 17 bp, synthetic construct
  source 1..17: mol_type = other DNA
tgttggcgaaggctgcg

SEQ ID NO: 156343 - DNA, 17 bp, synthetic construct
  source 1..17: mol_type = other DNA
gtgttggcgaaggctgc

SEQ ID NO: 156344 - DNA, 17 bp, synthetic construct
  source 1..17: mol_type = other DNA
ggtgttggcgaaggctg

SEQ ID NO: 156345 - DNA, 17 bp, synthetic construct
  source 1..17: mol_type = other DNA
aggtgttggcgaaggct

SEQ ID NO: 156346 - DNA, 17 bp, synthetic construct
  source 1..17: mol_type = other DNA
caggtgttggcgaaggc

SEQ ID NO: 156347 - DNA, 17 bp, synthetic construct
  source 1..17: mol_type = other DNA
ccaggtgttggcgaagg

SEQ ID NO: 156348 - DNA, 17 bp, synthetic construct
  source 1..17: mol_type = other DNA
tccaggtgttggcgaag

SEQ ID NO: 156349 - DNA, 17 bp, synthetic construct
  source 1..17: mol_type = other DNA
ttccaggtgttggcgaa

SEQ ID NO: 156350 - DNA, 17 bp, synthetic construct
  source 1..17: mol_type = other DNA
cttccaggtgttggcga

SEQ ID NO: 156351 - DNA, 17 bp, synthetic construct
  source 1..17: mol_type = other DNA
ccttccaggtgttggcg

SEQ ID NO: 156352 - DNA, 17 bp, synthetic construct
  source 1..17: mol_type = other DNA
gccttccaggtgttggc

SEQ ID NO: 156353 - DNA, 17 bp, synthetic construct
  source 1..17: mol_type = other DNA
ggccttccaggtgttgg

SEQ ID NO: 156354 - DNA, 17 bp, synthetic construct
  source 1..17: mol_type = other DNA
gggccttccaggtgttg

SEQ ID NO: 156355 - DNA, 17 bp, synthetic construct
  source 1..17: mol_type = other DNA
tgggccttccaggtgtt

SEQ ID NO: 156356 - DNA, 17 bp, synthetic construct
  source 1..17: mol_type = other DNA
ctgggccttccaggtgt

SEQ ID NO: 156357 - DNA, 17 bp, synthetic construct
  source 1..17: mol_type = other DNA
cctgggccttccaggtg

SEQ ID NO: 156358 - DNA, 17 bp, synthetic construct
  source 1..17: mol_type = other DNA
gcctgggccttccaggt

SEQ ID NO: 156359 - DNA, 17 bp, synthetic construct
  source 1..17: mol_type = other DNA
agcctgggccttccagg

SEQ ID NO: 156360 - DNA, 17 bp, synthetic construct
  source 1..17: mol_type = other DNA
cagcctgggccttccag

SEQ ID NO: 156361 - DNA, 17 bp, synthetic construct
  source 1..17: mol_type = other DNA
gcagcctgggccttcca

SEQ ID NO: 156362 - DNA, 17 bp, synthetic construct
  source 1..17: mol_type = other DNA
ggcagcctgggccttcc

SEQ ID NO: 156363 - DNA, 17 bp, synthetic construct
  source 1..17: mol_type = other DNA
aggcagcctgggccttc

SEQ ID NO: 156364 - DNA, 17 bp, synthetic construct
  source 1..17: mol_type = other DNA
caggcagcctgggcctt

SEQ ID NO: 156365 - DNA, 17 bp, synthetic construct
  source 1..17: mol_type = other DNA
acaggcagcctgggcct

SEQ ID NO: 156366 - DNA, 17 bp, synthetic construct
  source 1..17: mol_type = other DNA
cacaggcagcctgggcc

SEQ ID NO: 156367 - DNA, 17 bp, synthetic construct
  source 1..17: mol_type = other DNA
gcacaggcagcctgggc

SEQ ID NO: 156368 - DNA, 17 bp, synthetic construct
  source 1..17: mol_type = other DNA
ggcacaggcagcctggg

SEQ ID NO: 156369 - DNA, 17 bp, synthetic construct
  source 1..17: mol_type = other DNA
tggcacaggcagcctgg

SEQ ID NO: 156370 - DNA, 17 bp, synthetic construct
  source 1..17: mol_type = other DNA
ttggcacaggcagcctg

SEQ ID NO: 156371 - DNA, 17 bp, synthetic construct
  source 1..17: mol_type = other DNA
attggcacaggcagcct

SEQ ID NO: 156372 - DNA, 17 bp, synthetic construct
  source 1..17: mol_type = other DNA
cattggcacaggcagcc

SEQ ID NO: 156373 - DNA, 17 bp, synthetic construct
  source 1..17: mol_type = other DNA
gcattggcacaggcagc

SEQ ID NO: 156374 - DNA, 17 bp, synthetic construct
  source 1..17: mol_type = other DNA
ggcattggcacaggcag

SEQ ID NO: 156375 - DNA, 17 bp, synthetic construct
  source 1..17: mol_type = other DNA
tggcattggcacaggca

SEQ ID NO: 156376 - DNA, 17 bp, synthetic construct
  source 1..17: mol_type = other DNA
ctggcattggcacaggc

SEQ ID NO: 156377 - DNA, 17 bp, synthetic construct
  source 1..17: mol_type = other DNA
cctggcattggcacagg

SEQ ID NO: 156378 - DNA, 17 bp, synthetic construct
  source 1..17: mol_type = other DNA
tcctggcattggcacag

SEQ ID NO: 156379 - DNA, 17 bp, synthetic construct
  source 1..17: mol_type = other DNA
ttcctggcattggcaca

SEQ ID NO: 156380 - DNA, 17 bp, synthetic construct
  source 1..17: mol_type = other DNA
gttcctggcattggcac

SEQ ID NO: 156381 - DNA, 17 bp, synthetic construct
  source 1..17: mol_type = other DNA
tgttcctggcattggca

SEQ ID NO: 156382 - DNA, 17 bp, synthetic construct
  source 1..17: mol_type = other DNA
ctgttcctggcattggc

SEQ ID NO: 156383 - DNA, 17 bp, synthetic construct
  source 1..17: mol_type = other DNA
gctgttcctggcattgg

SEQ ID NO: 156384 - DNA, 17 bp, synthetic construct
  source 1..17: mol_type = other DNA
agctgttcctggcattg

SEQ ID NO: 156385 - DNA, 17 bp, synthetic construct
  source 1..17: mol_type = other DNA
aagctgttcctggcatt

SEQ ID NO: 156386 - DNA, 17 bp, synthetic construct
  source 1..17: mol_type = other DNA
aaagctgttcctggcat

SEQ ID NO: 156387 - DNA, 17 bp, synthetic construct
  source 1..17: mol_type = other DNA
caaagctgttcctggca

SEQ ID NO: 156388 - DNA, 17 bp, synthetic construct
  source 1..17: mol_type = other DNA
tcaaagctgttcctggc

SEQ ID NO: 156389 - DNA, 17 bp, synthetic construct
  source 1..17: mol_type = other DNA
ctcaaagctgttcctgg

SEQ ID NO: 156390 - DNA, 17 bp, synthetic construct
  source 1..17: mol_type = other DNA
cctcaaagctgttcctg

SEQ ID NO: 156391 - DNA, 17 bp, synthetic construct
  source 1..17: mol_type = other DNA
tcctcaaagctgttcct

SEQ ID NO: 156392 - DNA, 17 bp, synthetic construct
  source 1..17: mol_type = other DNA
gtcctcaaagctgttcc

SEQ ID NO: 156393 - DNA, 17 bp, synthetic construct
  source 1..17: mol_type = other DNA
ggtcctcaaagctgttc

SEQ ID NO: 156394 - DNA, 17 bp, synthetic construct
  source 1..17: mol_type = other DNA
gggtcctcaaagctgtt

SEQ ID NO: 156395 - DNA, 17 bp, synthetic construct
  source 1..17: mol_type = other DNA
ggggtcctcaaagctgt

SEQ ID NO: 156396 - DNA, 17 bp, synthetic construct
  source 1..17: mol_type = other DNA
aggggtcctcaaagctg

SEQ ID NO: 156397 - DNA, 17 bp, synthetic construct
  source 1..17: mol_type = other DNA
caggggtcctcaaagct

SEQ ID NO: 156398 - DNA, 17 bp, synthetic construct
  source 1..17: mol_type = other DNA
gcaggggtcctcaaagc

SEQ ID NO: 156399 - DNA, 17 bp, synthetic construct
  source 1..17: mol_type = other DNA
agcaggggtcctcaaag

SEQ ID NO: 156400 - DNA, 17 bp, synthetic construct
  source 1..17: mol_type = other DNA
gagcaggggtcctcaaa

SEQ ID NO: 156401 - DNA, 17 bp, synthetic construct
  source 1..17: mol_type = other DNA
ggagcaggggtcctcaa

SEQ ID NO: 156402 - DNA, 17 bp, synthetic construct
  source 1..17: mol_type = other DNA
gggagcaggggtcctca

SEQ ID NO: 156403 - DNA, 17 bp, synthetic construct
  source 1..17: mol_type = other DNA
agggagcaggggtcctc

SEQ ID NO: 156404 - DNA, 17 bp, synthetic construct
  source 1..17: mol_type = other DNA
gagggagcaggggtcct

SEQ ID NO: 156405 - DNA, 17 bp, synthetic construct
  source 1..17: mol_type = other DNA
tgagggagcaggggtcc

SEQ ID NO: 156406 - DNA, 17 bp, synthetic construct
  source 1..17: mol_type = other DNA
ctgagggagcaggggtc

SEQ ID NO: 156407 - DNA, 17 bp, synthetic construct
  source 1..17: mol_type = other DNA
actgagggagcaggggt

SEQ ID NO: 156408 - DNA, 17 bp, synthetic construct
  source 1..17: mol_type = other DNA
cactgagggagcagggg

SEQ ID NO: 156409 - DNA, 17 bp, synthetic construct
  source 1..17: mol_type = other DNA
acactgagggagcaggg

SEQ ID NO: 156410 - DNA, 17 bp, synthetic construct
  source 1..17: mol_type = other DNA
cacactgagggagcagg

SEQ ID NO: 156411 - DNA, 17 bp, synthetic construct
  source 1..17: mol_type = other DNA
ccacactgagggagcag

SEQ ID NO: 156412 - DNA, 17 bp, synthetic construct
  source 1..17: mol_type = other DNA
tccacactgagggagca

SEQ ID NO: 156413 - DNA, 17 bp, synthetic construct
  source 1..17: mol_type = other DNA
ctccacactgagggagc

SEQ ID NO: 156414 - DNA, 17 bp, synthetic construct
  source 1..17: mol_type = other DNA
tctccacactgagggag

SEQ ID NO: 156415 - DNA, 17 bp, synthetic construct
  source 1..17: mol_type = other DNA
ttctccacactgaggga

SEQ ID NO: 156416 - DNA, 17 bp, synthetic construct
  source 1..17: mol_type = other DNA
attctccacactgaggg

SEQ ID NO: 156417 - DNA, 17 bp, synthetic construct
  source 1..17: mol_type = other DNA
cattctccacactgagg

SEQ ID NO: 156418 - DNA, 17 bp, synthetic construct
  source 1..17: mol_type = other DNA
ccattctccacactgag

SEQ ID NO: 156419 - DNA, 17 bp, synthetic construct
  source 1..17: mol_type = other DNA
accattctccacactga

SEQ ID NO: 156420 - DNA, 17 bp, synthetic construct
  source 1..17: mol_type = other DNA
taccattctccacactg

SEQ ID NO: 156421 - DNA, 17 bp, synthetic construct
  source 1..17: mol_type = other DNA
gtaccattctccacact

SEQ ID NO: 156422 - DNA, 17 bp, synthetic construct
  source 1..17: mol_type = other DNA
agtaccattctccacac

SEQ ID NO: 156423 - DNA, 17 bp, synthetic construct
  source 1..17: mol_type = other DNA
gagtaccattctccaca

SEQ ID NO: 156424 - DNA, 17 bp, synthetic construct
  source 1..17: mol_type = other DNA
ggagtaccattctccac

SEQ ID NO: 156425 - DNA, 17 bp, synthetic construct
  source 1..17: mol_type = other DNA
aggagtaccattctcca

SEQ ID NO: 156426 - DNA, 17 bp, synthetic construct
  source 1..17: mol_type = other DNA
gaggagtaccattctcc

SEQ ID NO: 156427 - DNA, 17 bp, synthetic construct
  source 1..17: mol_type = other DNA
cgaggagtaccattctc

SEQ ID NO: 156428 - DNA, 17 bp, synthetic construct
  source 1..17: mol_type = other DNA
gcgaggagtaccattct

SEQ ID NO: 156429 - DNA, 17 bp, synthetic construct
  source 1..17: mol_type = other DNA
ggcgaggagtaccattc

SEQ ID NO: 156430 - DNA, 17 bp, synthetic construct
  source 1..17: mol_type = other DNA
gggcgaggagtaccatt

SEQ ID NO: 156431 - DNA, 17 bp, synthetic construct
  source 1..17: mol_type = other DNA
ggggcgaggagtaccat

SEQ ID NO: 156432 - DNA, 17 bp, synthetic construct
  source 1..17: mol_type = other DNA
gggggcgaggagtacca

SEQ ID NO: 156433 - DNA, 17 bp, synthetic construct
  source 1..17: mol_type = other DNA
tgggggcgaggagtacc

SEQ ID NO: 156434 - DNA, 17 bp, synthetic construct
  source 1..17: mol_type = other DNA
gtgggggcgaggagtac

SEQ ID NO: 156435 - DNA, 17 bp, synthetic construct
  source 1..17: mol_type = other DNA
ggtgggggcgaggagta

SEQ ID NO: 156436 - DNA, 17 bp, synthetic construct
  source 1..17: mol_type = other DNA
gggtgggggcgaggagt

SEQ ID NO: 156437 - DNA, 17 bp, synthetic construct
  source 1..17: mol_type = other DNA
ggggtgggggcgaggag

SEQ ID NO: 156438 - DNA, 17 bp, synthetic construct
  source 1..17: mol_type = other DNA
gggggtgggggcgagga

SEQ ID NO: 156439 - DNA, 17 bp, synthetic construct
  source 1..17: mol_type = other DNA
tgggggtgggggcgagg

SEQ ID NO: 156440 - DNA, 17 bp, synthetic construct
  source 1..17: mol_type = other DNA
gtgggggtgggggcgag

SEQ ID NO: 156441 - DNA, 17 bp, synthetic construct
  source 1..17: mol_type = other DNA
tgtgggggtgggggcga

SEQ ID NO: 156442 - DNA, 17 bp, synthetic construct
  source 1..17: mol_type = other DNA
ctgtgggggtgggggcg

SEQ ID NO: 156443 - DNA, 17 bp, synthetic construct
  source 1..17: mol_type = other DNA
actgtgggggtgggggc

SEQ ID NO: 156444 - DNA, 17 bp, synthetic construct
  source 1..17: mol_type = other DNA
gactgtgggggtggggg

SEQ ID NO: 156445 - DNA, 17 bp, synthetic construct
  source 1..17: mol_type = other DNA
tgactgtgggggtgggg

SEQ ID NO: 156446 - DNA, 17 bp, synthetic construct
  source 1..17: mol_type = other DNA
gtgactgtgggggtggg

SEQ ID NO: 156447 - DNA, 17 bp, synthetic construct
  source 1..17: mol_type = other DNA
ggtgactgtgggggtgg

SEQ ID NO: 156448 - DNA, 17 bp, synthetic construct
  source 1..17: mol_type = other DNA
gggtgactgtgggggtg

SEQ ID NO: 156449 - DNA, 17 bp, synthetic construct
  source 1..17: mol_type = other DNA
ggggtgactgtgggggt

SEQ ID NO: 156450 - DNA, 17 bp, synthetic construct
  source 1..17: mol_type = other DNA
tggggtgactgtggggg

SEQ ID NO: 156451 - DNA, 17 bp, synthetic construct
  source 1..17: mol_type = other DNA
ctggggtgactgtgggg

SEQ ID NO: 156452 - DNA, 17 bp, synthetic construct
  source 1..17: mol_type = other DNA
cctggggtgactgtggg

SEQ ID NO: 156453 - DNA, 17 bp, synthetic construct
  source 1..17: mol_type = other DNA
gcctggggtgactgtgg

SEQ ID NO: 156454 - DNA, 17 bp, synthetic construct
  source 1..17: mol_type = other DNA
agcctggggtgactgtg

SEQ ID NO: 156455 - DNA, 17 bp, synthetic construct
  source 1..17: mol_type = other DNA
gagcctggggtgactgt

SEQ ID NO: 156456 - DNA, 17 bp, synthetic construct
  source 1..17: mol_type = other DNA
tgagcctggggtgactg

SEQ ID NO: 156457 - DNA, 17 bp, synthetic construct
  source 1..17: mol_type = other DNA
ttgagcctggggtgact

SEQ ID NO: 156458 - DNA, 17 bp, synthetic construct
  source 1..17: mol_type = other DNA
cttgagcctggggtgac

SEQ ID NO: 156459 - DNA, 17 bp, synthetic construct
  source 1..17: mol_type = other DNA
acttgagcctggggtga

SEQ ID NO: 156460 - DNA, 17 bp, synthetic construct
  source 1..17: mol_type = other DNA
gacttgagcctggggtg

SEQ ID NO: 156461 - DNA, 17 bp, synthetic construct
  source 1..17: mol_type = other DNA
ggacttgagcctggggt

SEQ ID NO: 156462 - DNA, 17 bp, synthetic construct
  source 1..17: mol_type = other DNA
gggacttgagcctgggg

SEQ ID NO: 156463 - DNA, 17 bp, synthetic construct
  source 1..17: mol_type = other DNA
tgggacttgagcctggg

SEQ ID NO: 156464 - DNA, 17 bp, synthetic construct
  source 1..17: mol_type = other DNA
gtgggacttgagcctgg

SEQ ID NO: 156465 - DNA, 17 bp, synthetic construct
  source 1..17: mol_type = other DNA
ggtgggacttgagcctg

SEQ ID NO: 156466 - DNA, 17 bp, synthetic construct
  source 1..17: mol_type = other DNA
gggtgggacttgagcct

SEQ ID NO: 156467 - DNA, 17 bp, synthetic construct
  source 1..17: mol_type = other DNA
tgggtgggacttgagcc

SEQ ID NO: 156468 - DNA, 17 bp, synthetic construct
  source 1..17: mol_type = other DNA
ctgggtgggacttgagc

SEQ ID NO: 156469 - DNA, 17 bp, synthetic construct
  source 1..17: mol_type = other DNA
gctgggtgggacttgag

SEQ ID NO: 156470 - DNA, 17 bp, synthetic construct
  source 1..17: mol_type = other DNA
tgctgggtgggacttga

SEQ ID NO: 156471 - DNA, 17 bp, synthetic construct
  source 1..17: mol_type = other DNA
gtgctgggtgggacttg

SEQ ID NO: 156472 - DNA, 17 bp, synthetic construct
  source 1..17: mol_type = other DNA
ggtgctgggtgggactt

SEQ ID NO: 156473 - DNA, 17 bp, synthetic construct
  source 1..17: mol_type = other DNA
aggtgctgggtgggact

SEQ ID NO: 156474 - DNA, 17 bp, synthetic construct
  source 1..17: mol_type = other DNA
aaggtgctgggtgggac

SEQ ID NO: 156475 - DNA, 17 bp, synthetic construct
  source 1..17: mol_type = other DNA
gaaggtgctgggtggga

SEQ ID NO: 156476 - DNA, 17 bp, synthetic construct
  source 1..17: mol_type = other DNA
ggaaggtgctgggtggg

SEQ ID NO: 156477 - DNA, 17 bp, synthetic construct
  source 1..17: mol_type = other DNA
aggaaggtgctgggtgg

SEQ ID NO: 156478 - DNA, 17 bp, synthetic construct
  source 1..17: mol_type = other DNA
caggaaggtgctgggtg

SEQ ID NO: 156479 - DNA, 17 bp, synthetic construct
  source 1..17: mol_type = other DNA
acaggaaggtgctgggt

SEQ ID NO: 156480 - DNA, 17 bp, synthetic construct
  source 1..17: mol_type = other DNA
gacaggaaggtgctggg

SEQ ID NO: 156481 - DNA, 17 bp, synthetic construct
  source 1..17: mol_type = other DNA
ggacaggaaggtgctgg

SEQ ID NO: 156482 - DNA, 17 bp, synthetic construct
  source 1..17: mol_type = other DNA
gggacaggaaggtgctg

SEQ ID NO: 156483 - DNA, 17 bp, synthetic construct
  source 1..17: mol_type = other DNA
ggggacaggaaggtgct

SEQ ID NO: 156484 - DNA, 17 bp, synthetic construct
  source 1..17: mol_type = other DNA
aggggacaggaaggtgc

SEQ ID NO: 156485 - DNA, 17 bp, synthetic construct
  source 1..17: mol_type = other DNA
caggggacaggaaggtg

SEQ ID NO: 156486 - DNA, 17 bp, synthetic construct
  source 1..17: mol_type = other DNA
ccaggggacaggaaggt

SEQ ID NO: 156487 - DNA, 17 bp, synthetic construct
  source 1..17: mol_type = other DNA
cccaggggacaggaagg

SEQ ID NO: 156488 - DNA, 17 bp, synthetic construct
  source 1..17: mol_type = other DNA
gcccaggggacaggaag

SEQ ID NO: 156489 - DNA, 17 bp, synthetic construct
  source 1..17: mol_type = other DNA
ggcccaggggacaggaa

SEQ ID NO: 156490 - DNA, 17 bp, synthetic construct
  source 1..17: mol_type = other DNA
tggcccaggggacagga

SEQ ID NO: 156491 - DNA, 17 bp, synthetic construct
  source 1..17: mol_type = other DNA
gtggcccaggggacagg

SEQ ID NO: 156492 - DNA, 17 bp, synthetic construct
  source 1..17: mol_type = other DNA
cgtggcccaggggacag

SEQ ID NO: 156493 - DNA, 17 bp, synthetic construct
  source 1..17: mol_type = other DNA
ccgtggcccaggggaca

SEQ ID NO: 156494 - DNA, 17 bp, synthetic construct
  source 1..17: mol_type = other DNA
cccgtggcccaggggac

SEQ ID NO: 156495 - DNA, 17 bp, synthetic construct
  source 1..17: mol_type = other DNA
ccccgtggcccagggga

SEQ ID NO: 156496 - DNA, 17 bp, synthetic construct
  source 1..17: mol_type = other DNA
tccccgtggcccagggg

SEQ ID NO: 156497 - DNA, 17 bp, synthetic construct
  source 1..17: mol_type = other DNA
gtccccgtggcccaggg

SEQ ID NO: 156498 - DNA, 17 bp, synthetic construct
  source 1..17: mol_type = other DNA
ggtccccgtggcccagg

SEQ ID NO: 156499 - DNA, 17 bp, synthetic construct
  source 1..17: mol_type = other DNA
gggtccccgtggcccag

SEQ ID NO: 156500 - DNA, 17 bp, synthetic construct
  source 1..17: mol_type = other DNA
ggggtccccgtggccca

SEQ ID NO: 156501 - DNA, 17 bp, synthetic construct
  source 1..17: mol_type = other DNA
aggggtccccgtggccc

SEQ ID NO: 156502 - DNA, 17 bp, synthetic construct
  source 1..17: mol_type = other DNA
caggggtccccgtggcc

SEQ ID NO: 156503 - DNA, 17 bp, synthetic construct
  source 1..17: mol_type = other DNA
ccaggggtccccgtggc

SEQ ID NO: 156504 - DNA, 17 bp, synthetic construct
  source 1..17: mol_type = other DNA
cccaggggtccccgtgg

SEQ ID NO: 156505 - DNA, 17 bp, synthetic construct
  source 1..17: mol_type = other DNA
acccaggggtccccgtg

SEQ ID NO: 156506 - DNA, 17 bp, synthetic construct
  source 1..17: mol_type = other DNA
cacccaggggtccccgt

SEQ ID NO: 156507 - DNA, 17 bp, synthetic construct
  source 1..17: mol_type = other DNA
ccacccaggggtccccg

SEQ ID NO: 156508 - DNA, 17 bp, synthetic construct
  source 1..17: mol_type = other DNA
cccacccaggggtcccc

SEQ ID NO: 156509 - DNA, 17 bp, synthetic construct
  source 1..17: mol_type = other DNA
tcccacccaggggtccc

SEQ ID NO: 156510 - DNA, 17 bp, synthetic construct
  source 1..17: mol_type = other DNA
atcccacccaggggtcc

SEQ ID NO: 156511 - DNA, 17 bp, synthetic construct
  source 1..17: mol_type = other DNA
aatcccacccaggggtc

SEQ ID NO: 156512 - DNA, 17 bp, synthetic construct
  source 1..17: mol_type = other DNA
caatcccacccaggggt

SEQ ID NO: 156513 - DNA, 17 bp, synthetic construct
  source 1..17: mol_type = other DNA
ccaatcccacccagggg

SEQ ID NO: 156514 - DNA, 17 bp, synthetic construct
  source 1..17: mol_type = other DNA
cccaatcccacccaggg

SEQ ID NO: 156515 - DNA, 17 bp, synthetic construct
  source 1..17: mol_type = other DNA
ccccaatcccacccagg

SEQ ID NO: 156516 - DNA, 17 bp, synthetic construct
  source 1..17: mol_type = other DNA
tccccaatcccacccag

SEQ ID NO: 156517 - DNA, 17 bp, synthetic construct
  source 1..17: mol_type = other DNA
gtccccaatcccaccca

SEQ ID NO: 156518 - DNA, 17 bp, synthetic construct
  source 1..17: mol_type = other DNA
ggtccccaatcccaccc

SEQ ID NO: 156519 - DNA, 17 bp, synthetic construct
  source 1..17: mol_type = other DNA
gggtccccaatcccacc

SEQ ID NO: 156520 - DNA, 17 bp, synthetic construct
  source 1..17: mol_type = other DNA
ggggtccccaatcccac

SEQ ID NO: 156521 - DNA, 17 bp, synthetic construct
  source 1..17: mol_type = other DNA
tggggtccccaatccca

SEQ ID NO: 156522 - DNA, 17 bp, synthetic construct
  source 1..17: mol_type = other DNA
atggggtccccaatccc

SEQ ID NO: 156523 - DNA, 17 bp, synthetic construct
  source 1..17: mol_type = other DNA
catggggtccccaatcc

SEQ ID NO: 156524 - DNA, 17 bp, synthetic construct
  source 1..17: mol_type = other DNA
ccatggggtccccaatc

SEQ ID NO: 156525 - DNA, 17 bp, synthetic construct
  source 1..17: mol_type = other DNA
tccatggggtccccaat

SEQ ID NO: 156526 - DNA, 17 bp, synthetic construct
  source 1..17: mol_type = other DNA
ctccatggggtccccaa

SEQ ID NO: 156527 - DNA, 17 bp, synthetic construct
  source 1..17: mol_type = other DNA
cctccatggggtcccca

SEQ ID NO: 156528 - DNA, 17 bp, synthetic construct
  source 1..17: mol_type = other DNA
gcctccatggggtcccc

SEQ ID NO: 156529 - DNA, 17 bp, synthetic construct
  source 1..17: mol_type = other DNA
tgcctccatggggtccc

SEQ ID NO: 156530 - DNA, 17 bp, synthetic construct
  source 1..17: mol_type = other DNA
ctgcctccatggggtcc

SEQ ID NO: 156531 - DNA, 17 bp, synthetic construct
  source 1..17: mol_type = other DNA
cctgcctccatggggtc

SEQ ID NO: 156532 - DNA, 17 bp, synthetic construct
  source 1..17: mol_type = other DNA
acctgcctccatggggt

SEQ ID NO: 156533 - DNA, 17 bp, synthetic construct
  source 1..17: mol_type = other DNA
cacctgcctccatgggg

SEQ ID NO: 156534 - DNA, 17 bp, synthetic construct
  source 1..17: mol_type = other DNA
ccacctgcctccatggg

SEQ ID NO: 156535 - DNA, 17 bp, synthetic construct
  source 1..17: mol_type = other DNA
cccacctgcctccatgg

SEQ ID NO: 156536 - DNA, 17 bp, synthetic construct
  source 1..17: mol_type = other DNA
tcccacctgcctccatg

SEQ ID NO: 156537 - DNA, 17 bp, synthetic construct
  source 1..17: mol_type = other DNA
ctcccacctgcctccat

SEQ ID NO: 156538 - DNA, 17 bp, synthetic construct
  source 1..17: mol_type = other DNA
cctcccacctgcctcca

SEQ ID NO: 156539 - DNA, 17 bp, synthetic construct
  source 1..17: mol_type = other DNA
gcctcccacctgcctcc

SEQ ID NO: 156540 - DNA, 17 bp, synthetic construct
  source 1..17: mol_type = other DNA
tgcctcccacctgcctc

SEQ ID NO: 156541 - DNA, 17 bp, synthetic construct
  source 1..17: mol_type = other DNA
atgcctcccacctgcct

SEQ ID NO: 156542 - DNA, 17 bp, synthetic construct
  source 1..17: mol_type = other DNA
gatgcctcccacctgcc

SEQ ID NO: 156543 - DNA, 17 bp, synthetic construct
  source 1..17: mol_type = other DNA
tgatgcctcccacctgc

SEQ ID NO: 156544 - DNA, 17 bp, synthetic construct
  source 1..17: mol_type = other DNA
ctgatgcctcccacctg

SEQ ID NO: 156545 - DNA, 17 bp, synthetic construct
  source 1..17: mol_type = other DNA
cctgatgcctcccacct

SEQ ID NO: 156546 - DNA, 17 bp, synthetic construct
  source 1..17: mol_type = other DNA
tcctgatgcctcccacc

SEQ ID NO: 156547 - DNA, 17 bp, synthetic construct
  source 1..17: mol_type = other DNA
ctcctgatgcctcccac

SEQ ID NO: 156548 - DNA, 17 bp, synthetic construct
  source 1..17: mol_type = other DNA
cctcctgatgcctccca

SEQ ID NO: 156549 - DNA, 17 bp, synthetic construct
  source 1..17: mol_type = other DNA
tcctcctgatgcctccc

SEQ ID NO: 156550 - DNA, 17 bp, synthetic construct
  source 1..17: mol_type = other DNA
ctcctcctgatgcctcc

SEQ ID NO: 156551 - DNA, 17 bp, synthetic construct
  source 1..17: mol_type = other DNA
cctcctcctgatgcctc

SEQ ID NO: 156552 - DNA, 17 bp, synthetic construct
  source 1..17: mol_type = other DNA
acctcctcctgatgcct

SEQ ID NO: 156553 - DNA, 17 bp, synthetic construct
  source 1..17: mol_type = other DNA
cacctcctcctgatgcc

SEQ ID NO: 156554 - DNA, 17 bp, synthetic construct
  source 1..17: mol_type = other DNA
gcacctcctcctgatgc

SEQ ID NO: 156555 - DNA, 17 bp, synthetic construct
  source 1..17: mol_type = other DNA
agcacctcctcctgatg

SEQ ID NO: 156556 - DNA, 17 bp, synthetic construct
  source 1..17: mol_type = other DNA
aagcacctcctcctgat

SEQ ID NO: 156557 - DNA, 17 bp, synthetic construct
  source 1..17: mol_type = other DNA
caagcacctcctcctga

SEQ ID NO: 156558 - DNA, 17 bp, synthetic construct
  source 1..17: mol_type = other DNA
ccaagcacctcctcctg

SEQ ID NO: 156559 - DNA, 17 bp, synthetic construct
  source 1..17: mol_type = other DNA
cccaagcacctcctcct

SEQ ID NO: 156560 - DNA, 17 bp, synthetic construct
  source 1..17: mol_type = other DNA
ccccaagcacctcctcc

SEQ ID NO: 156561 - DNA, 17 bp, synthetic construct
  source 1..17: mol_type = other DNA
gccccaagcacctcctc

SEQ ID NO: 156562 - DNA, 17 bp, synthetic construct
  source 1..17: mol_type = other DNA
ggccccaagcacctcct

SEQ ID NO: 156563 - DNA, 17 bp, synthetic construct
  source 1..17: mol_type = other DNA
tggccccaagcacctcc

SEQ ID NO: 156564 - DNA, 17 bp, synthetic construct
  source 1..17: mol_type = other DNA
ctggccccaagcacctc

SEQ ID NO: 156565 - DNA, 17 bp, synthetic construct
  source 1..17: mol_type = other DNA
cctggccccaagcacct

SEQ ID NO: 156566 - DNA, 17 bp, synthetic construct
  source 1..17: mol_type = other DNA
gcctggccccaagcacc

SEQ ID NO: 156567 - DNA, 17 bp, synthetic construct
  source 1..17: mol_type = other DNA
cgcctggccccaagcac

SEQ ID NO: 156568 - DNA, 17 bp, synthetic construct
  source 1..17: mol_type = other DNA
ccgcctggccccaagca

SEQ ID NO: 156569 - DNA, 17 bp, synthetic construct
  source 1..17: mol_type = other DNA
gccgcctggccccaagc

SEQ ID NO: 156570 - DNA, 17 bp, synthetic construct
  source 1..17: mol_type = other DNA
ggccgcctggccccaag

SEQ ID NO: 156571 - DNA, 17 bp, synthetic construct
  source 1..17: mol_type = other DNA
tggccgcctggccccaa

SEQ ID NO: 156572 - DNA, 17 bp, synthetic construct
  source 1..17: mol_type = other DNA
ctggccgcctggcccca

SEQ ID NO: 156573 - DNA, 17 bp, synthetic construct
  source 1..17: mol_type = other DNA
tctggccgcctggcccc

SEQ ID NO: 156574 - DNA, 17 bp, synthetic construct
  source 1..17: mol_type = other DNA
ttctggccgcctggccc

SEQ ID NO: 156575 - DNA, 17 bp, synthetic construct
  source 1..17: mol_type = other DNA
gttctggccgcctggcc

SEQ ID NO: 156576 - DNA, 17 bp, synthetic construct
  source 1..17: mol_type = other DNA
ggttctggccgcctggc

SEQ ID NO: 156577 - DNA, 17 bp, synthetic construct
  source 1..17: mol_type = other DNA
gggttctggccgcctgg

SEQ ID NO: 156578 - DNA, 17 bp, synthetic construct
  source 1..17: mol_type = other DNA
ggggttctggccgcctg

SEQ ID NO: 156579 - DNA, 17 bp, synthetic construct
  source 1..17: mol_type = other DNA
gggggttctggccgcct

SEQ ID NO: 156580 - DNA, 17 bp, synthetic construct
  source 1..17: mol_type = other DNA
ggggggttctggccgcc

SEQ ID NO: 156581 - DNA, 17 bp, synthetic construct
  source 1..17: mol_type = other DNA
tggggggttctggccgc

SEQ ID NO: 156582 - DNA, 17 bp, synthetic construct
  source 1..17: mol_type = other DNA
ttggggggttctggccg

SEQ ID NO: 156583 - DNA, 17 bp, synthetic construct
  source 1..17: mol_type = other DNA
cttggggggttctggcc

SEQ ID NO: 156584 - DNA, 17 bp, synthetic construct
  source 1..17: mol_type = other DNA
ccttggggggttctggc

SEQ ID NO: 156585 - DNA, 17 bp, synthetic construct
  source 1..17: mol_type = other DNA
gccttggggggttctgg

SEQ ID NO: 156586 - DNA, 17 bp, synthetic construct
  source 1..17: mol_type = other DNA
cgccttggggggttctg

SEQ ID NO: 156587 - DNA, 17 bp, synthetic construct
  source 1..17: mol_type = other DNA
gcgccttggggggttct

SEQ ID NO: 156588 - DNA, 17 bp, synthetic construct
  source 1..17: mol_type = other DNA
tgcgccttggggggttc

SEQ ID NO: 156589 - DNA, 17 bp, synthetic construct
  source 1..17: mol_type = other DNA
ctgcgccttggggggtt

SEQ ID NO: 156590 - DNA, 17 bp, synthetic construct
  source 1..17: mol_type = other DNA
gctgcgccttggggggt

SEQ ID NO: 156591 - DNA, 17 bp, synthetic construct
  source 1..17: mol_type = other DNA
tgctgcgccttgggggg

SEQ ID NO: 156592 - DNA, 17 bp, synthetic construct
  source 1..17: mol_type = other DNA
ctgctgcgccttggggg

SEQ ID NO: 156593 - DNA, 17 bp, synthetic construct
  source 1..17: mol_type = other DNA
cctgctgcgccttgggg

SEQ ID NO: 156594 - DNA, 17 bp, synthetic construct
  source 1..17: mol_type = other DNA
acctgctgcgccttggg

SEQ ID NO: 156595 - DNA, 17 bp, synthetic construct
  source 1..17: mol_type = other DNA
cacctgctgcgccttgg

SEQ ID NO: 156596 - DNA, 17 bp, synthetic construct
  source 1..17: mol_type = other DNA
tcacctgctgcgccttg

SEQ ID NO: 156597 - DNA, 17 bp, synthetic construct
  source 1..17: mol_type = other DNA
ctcacctgctgcgcctt

SEQ ID NO: 156598 - DNA, 17 bp, synthetic construct
  source 1..17: mol_type = other DNA
gctcacctgctgcgcct

SEQ ID NO: 156599 - DNA, 17 bp, synthetic construct
  source 1..17: mol_type = other DNA
ggctcacctgctgcgcc

SEQ ID NO: 156600 - DNA, 17 bp, synthetic construct
  source 1..17: mol_type = other DNA
cggctcacctgctgcgc

SEQ ID NO: 156601 - DNA, 17 bp, synthetic construct
  source 1..17: mol_type = other DNA
gcggctcacctgctgcg

SEQ ID NO: 156602 - DNA, 17 bp, synthetic construct
  source 1..17: mol_type = other DNA
tgcggctcacctgctgc

SEQ ID NO: 156603 - DNA, 17 bp, synthetic construct
  source 1..17: mol_type = other DNA
ttgcggctcacctgctg

SEQ ID NO: 156604 - DNA, 17 bp, synthetic construct
  source 1..17: mol_type = other DNA
tttgcggctcacctgct

SEQ ID NO: 156605 - DNA, 17 bp, synthetic construct
  source 1..17: mol_type = other DNA
atttgcggctcacctgc

SEQ ID NO: 156606 - DNA, 17 bp, synthetic construct
  source 1..17: mol_type = other DNA
aatttgcggctcacctg

SEQ ID NO: 156607 - DNA, 17 bp, synthetic construct
  source 1..17: mol_type = other DNA
gaatttgcggctcacct

SEQ ID NO: 156608 - DNA, 17 bp, synthetic construct
  source 1..17: mol_type = other DNA
ggaatttgcggctcacc

SEQ ID NO: 156609 - DNA, 17 bp, synthetic construct
  source 1..17: mol_type = other DNA
tggaatttgcggctcac

SEQ ID NO: 156610 - DNA, 17 bp, synthetic construct
  source 1..17: mol_type = other DNA
ttggaatttgcggctca

SEQ ID NO: 156611 - DNA, 17 bp, synthetic construct
  source 1..17: mol_type = other DNA
gttggaatttgcggctc

SEQ ID NO: 156612 - DNA, 17 bp, synthetic construct
  source 1..17: mol_type = other DNA
agttggaatttgcggct

SEQ ID NO: 156613 - DNA, 17 bp, synthetic construct
  source 1..17: mol_type = other DNA
gagttggaatttgcggc

SEQ ID NO: 156614 - DNA, 17 bp, synthetic construct
  source 1..17: mol_type = other DNA
tgagttggaatttgcgg

SEQ ID NO: 156615 - DNA, 17 bp, synthetic construct
  source 1..17: mol_type = other DNA
gtgagttggaatttgcg

SEQ ID NO: 156616 - DNA, 17 bp, synthetic construct
  source 1..17: mol_type = other DNA
agtgagttggaatttgc

SEQ ID NO: 156617 - DNA, 17 bp, synthetic construct
  source 1..17: mol_type = other DNA
cagtgagttggaatttg

SEQ ID NO: 156618 - DNA, 17 bp, synthetic construct
  source 1..17: mol_type = other DNA
acagtgagttggaattt

SEQ ID NO: 156619 - DNA, 17 bp, synthetic construct
  source 1..17: mol_type = other DNA
aacagtgagttggaatt

SEQ ID NO: 156620 - DNA, 17 bp, synthetic construct
  source 1..17: mol_type = other DNA
gaacagtgagttggaat

SEQ ID NO: 156621 - DNA, 17 bp, synthetic construct
  source 1..17: mol_type = other DNA
ggaacagtgagttggaa

SEQ ID NO: 156622 - DNA, 17 bp, synthetic construct
  source 1..17: mol_type = other DNA
gggaacagtgagttgga

SEQ ID NO: 156623 - DNA, 17 bp, synthetic construct
  source 1..17: mol_type = other DNA
ggggaacagtgagttgg

SEQ ID NO: 156624 - DNA, 17 bp, synthetic construct
  source 1..17: mol_type = other DNA
cggggaacagtgagttg

SEQ ID NO: 156625 - DNA, 17 bp, synthetic construct
  source 1..17: mol_type = other DNA
ccggggaacagtgagtt

SEQ ID NO: 156626 - DNA, 17 bp, synthetic construct
  source 1..17: mol_type = other DNA
cccggggaacagtgagt

SEQ ID NO: 156627 - DNA, 17 bp, synthetic construct
  source 1..17: mol_type = other DNA
gcccggggaacagtgag

SEQ ID NO: 156628 - DNA, 17 bp, synthetic construct
  source 1..17: mol_type = other DNA
agcccggggaacagtga

SEQ ID NO: 156629 - DNA, 17 bp, synthetic construct
  source 1..17: mol_type = other DNA
cagcccggggaacagtg

SEQ ID NO: 156630 - DNA, 17 bp, synthetic construct
  source 1..17: mol_type = other DNA
tcagcccggggaacagt

SEQ ID NO: 156631 - DNA, 17 bp, synthetic construct
  source 1..17: mol_type = other DNA
ctcagcccggggaacag

SEQ ID NO: 156632 - DNA, 17 bp, synthetic construct
  source 1..17: mol_type = other DNA
cctcagcccggggaaca

SEQ ID NO: 156633 - DNA, 17 bp, synthetic construct
  source 1..17: mol_type = other DNA
ccctcagcccggggaac

SEQ ID NO: 156634 - DNA, 17 bp, synthetic construct
  source 1..17: mol_type = other DNA
cccctcagcccggggaa

SEQ ID NO: 156635 - DNA, 17 bp, synthetic construct
  source 1..17: mol_type = other DNA
ccccctcagcccgggga

SEQ ID NO: 156636 - DNA, 17 bp, synthetic construct
  source 1..17: mol_type = other DNA
accccctcagcccgggg

SEQ ID NO: 156637 - DNA, 17 bp, synthetic construct
  source 1..17: mol_type = other DNA
gaccccctcagcccggg

SEQ ID NO: 156638 - DNA, 17 bp, synthetic construct
  source 1..17: mol_type = other DNA
cgaccccctcagcccgg

SEQ ID NO: 156639 - DNA, 17 bp, synthetic construct
  source 1..17: mol_type = other DNA
gcgaccccctcagcccg

SEQ ID NO: 156640 - DNA, 17 bp, synthetic construct
  source 1..17: mol_type = other DNA
tgcgaccccctcagccc

SEQ ID NO: 156641 - DNA, 17 bp, synthetic construct
  source 1..17: mol_type = other DNA
ctgcgaccccctcagcc

SEQ ID NO: 156642 - DNA, 17 bp, synthetic construct
  source 1..17: mol_type = other DNA
cctgcgaccccctcagc

SEQ ID NO: 156643 - DNA, 17 bp, synthetic construct
  source 1..17: mol_type = other DNA
gcctgcgaccccctcag

SEQ ID NO: 156644 - DNA, 17 bp, synthetic construct
  source 1..17: mol_type = other DNA
ggcctgcgaccccctca

SEQ ID NO: 156645 - DNA, 17 bp, synthetic construct
  source 1..17: mol_type = other DNA
aggcctgcgaccccctc

SEQ ID NO: 156646 - DNA, 17 bp, synthetic construct
  source 1..17: mol_type = other DNA
caggcctgcgaccccct

SEQ ID NO: 156647 - DNA, 17 bp, synthetic construct
  source 1..17: mol_type = other DNA
gcaggcctgcgaccccc

SEQ ID NO: 156648 - DNA, 17 bp, synthetic construct
  source 1..17: mol_type = other DNA
cgcaggcctgcgacccc

SEQ ID NO: 156649 - DNA, 17 bp, synthetic construct
  source 1..17: mol_type = other DNA
acgcaggcctgcgaccc

SEQ ID NO: 156650 - DNA, 17 bp, synthetic construct
  source 1..17: mol_type = other DNA
cacgcaggcctgcgacc

SEQ ID NO: 156651 - DNA, 17 bp, synthetic construct
  source 1..17: mol_type = other DNA
acacgcaggcctgcgac

SEQ ID NO: 156652 - DNA, 17 bp, synthetic construct
  source 1..17: mol_type = other DNA
gacacgcaggcctgcga

SEQ ID NO: 156653 - DNA, 17 bp, synthetic construct
  source 1..17: mol_type = other DNA
tgacacgcaggcctgcg

SEQ ID NO: 156654 - DNA, 17 bp, synthetic construct
  source 1..17: mol_type = other DNA
ctgacacgcaggcctgc

SEQ ID NO: 156655 - DNA, 17 bp, synthetic construct
  source 1..17: mol_type = other DNA
cctgacacgcaggcctg

SEQ ID NO: 156656 - DNA, 17 bp, synthetic construct
  source 1..17: mol_type = other DNA
ccctgacacgcaggcct

SEQ ID NO: 156657 - DNA, 17 bp, synthetic construct
  source 1..17: mol_type = other DNA
cccctgacacgcaggcc

SEQ ID NO: 156658 - DNA, 17 bp, synthetic construct
  source 1..17: mol_type = other DNA
acccctgacacgcaggc

SEQ ID NO: 156659 - DNA, 17 bp, synthetic construct
  source 1..17: mol_type = other DNA
cacccctgacacgcagg

SEQ ID NO: 156660 - DNA, 17 bp, synthetic construct
  source 1..17: mol_type = other DNA
acacccctgacacgcag

SEQ ID NO: 156661 - DNA, 17 bp, synthetic construct
  source 1..17: mol_type = other DNA
cacacccctgacacgca

SEQ ID NO: 156662 - DNA, 17 bp, synthetic construct
  source 1..17: mol_type = other DNA
ccacacccctgacacgc

SEQ ID NO: 156663 - DNA, 17 bp, synthetic construct
  source 1..17: mol_type = other DNA
cccacacccctgacacg

SEQ ID NO: 156664 - DNA, 17 bp, synthetic construct
  source 1..17: mol_type = other DNA
gcccacacccctgacac

SEQ ID NO: 156665 - DNA, 17 bp, synthetic construct
  source 1..17: mol_type = other DNA
agcccacacccctgaca

SEQ ID NO: 156666 - DNA, 17 bp, synthetic construct
  source 1..17: mol_type = other DNA
aagcccacacccctgac

SEQ ID NO: 156667 - DNA, 17 bp, synthetic construct
  source 1..17: mol_type = other DNA
gaagcccacacccctga

SEQ ID NO: 156668 - DNA, 17 bp, synthetic construct
  source 1..17: mol_type = other DNA
cgaagcccacacccctg

SEQ ID NO: 156669 - DNA, 17 bp, synthetic construct
  source 1..17: mol_type = other DNA
ccgaagcccacacccct

SEQ ID NO: 156670 - DNA, 17 bp, synthetic construct
  source 1..17: mol_type = other DNA
cccgaagcccacacccc

SEQ ID NO: 156671 - DNA, 17 bp, synthetic construct
  source 1..17: mol_type = other DNA
ccccgaagcccacaccc

SEQ ID NO: 156672 - DNA, 17 bp, synthetic construct
  source 1..17: mol_type = other DNA
gccccgaagcccacacc

SEQ ID NO: 156673 - DNA, 17 bp, synthetic construct
  source 1..17: mol_type = other DNA
tgccccgaagcccacac

SEQ ID NO: 156674 - DNA, 17 bp, synthetic construct
  source 1..17: mol_type = other DNA
ctgccccgaagcccaca

SEQ ID NO: 156675 - DNA, 17 bp, synthetic construct
  source 1..17: mol_type = other DNA
cctgccccgaagcccac

SEQ ID NO: 156676 - DNA, 17 bp, synthetic construct
  source 1..17: mol_type = other DNA
ccctgccccgaagccca

SEQ ID NO: 156677 - DNA, 17 bp, synthetic construct
  source 1..17: mol_type = other DNA
gccctgccccgaagccc

SEQ ID NO: 156678 - DNA, 17 bp, synthetic construct
  source 1..17: mol_type = other DNA
cgccctgccccgaagcc

SEQ ID NO: 156679 - DNA, 17 bp, synthetic construct
  source 1..17: mol_type = other DNA
acgccctgccccgaagc

SEQ ID NO: 156680 - DNA, 17 bp, synthetic construct
  source 1..17: mol_type = other DNA
cacgccctgccccgaag

SEQ ID NO: 156681 - DNA, 17 bp, synthetic construct
  source 1..17: mol_type = other DNA
ccacgccctgccccgaa

SEQ ID NO: 156682 - DNA, 17 bp, synthetic construct
  source 1..17: mol_type = other DNA
tccacgccctgccccga

SEQ ID NO: 156683 - DNA, 17 bp, synthetic construct
  source 1..17: mol_type = other DNA
ctccacgccctgccccg

SEQ ID NO: 156684 - DNA, 17 bp, synthetic construct
  source 1..17: mol_type = other DNA
tctccacgccctgcccc

SEQ ID NO: 156685 - DNA, 17 bp, synthetic construct
  source 1..17: mol_type = other DNA
atctccacgccctgccc

SEQ ID NO: 156686 - DNA, 17 bp, synthetic construct
  source 1..17: mol_type = other DNA
catctccacgccctgcc

SEQ ID NO: 156687 - DNA, 17 bp, synthetic construct
  source 1..17: mol_type = other DNA
tcatctccacgccctgc

SEQ ID NO: 156688 - DNA, 17 bp, synthetic construct
  source 1..17: mol_type = other DNA
ctcatctccacgccctg

SEQ ID NO: 156689 - DNA, 17 bp, synthetic construct
  source 1..17: mol_type = other DNA
cctcatctccacgccct

SEQ ID NO: 156690 - DNA, 17 bp, synthetic construct
  source 1..17: mol_type = other DNA
acctcatctccacgccc

SEQ ID NO: 156691 - DNA, 17 bp, synthetic construct
  source 1..17: mol_type = other DNA
gacctcatctccacgcc

SEQ ID NO: 156692 - DNA, 17 bp, synthetic construct
  source 1..17: mol_type = other DNA
tgacctcatctccacgc

SEQ ID NO: 156693 - DNA, 17 bp, synthetic construct
  source 1..17: mol_type = other DNA
ctgacctcatctccacg

SEQ ID NO: 156694 - DNA, 17 bp, synthetic construct
  source 1..17: mol_type = other DNA
cctgacctcatctccac

SEQ ID NO: 156695 - DNA, 17 bp, synthetic construct
  source 1..17: mol_type = other DNA
acctgacctcatctcca

SEQ ID NO: 156696 - DNA, 17 bp, synthetic construct
  source 1..17: mol_type = other DNA
gacctgacctcatctcc

SEQ ID NO: 156697 - DNA, 17 bp, synthetic construct
  source 1..17: mol_type = other DNA
agacctgacctcatctc

SEQ ID NO: 156698 - DNA, 17 bp, synthetic construct
  source 1..17: mol_type = other DNA
aagacctgacctcatct

SEQ ID NO: 156699 - DNA, 17 bp, synthetic construct
  source 1..17: mol_type = other DNA
gaagacctgacctcatc

SEQ ID NO: 156700 - DNA, 17 bp, synthetic construct
  source 1..17: mol_type = other DNA
ggaagacctgacctcat

SEQ ID NO: 156701 - DNA, 17 bp, synthetic construct
  source 1..17: mol_type = other DNA
gggaagacctgacctca

SEQ ID NO: 156702 - DNA, 17 bp, synthetic construct
  source 1..17: mol_type = other DNA
ggggaagacctgacctc

SEQ ID NO: 156703 - DNA, 17 bp, synthetic construct
  source 1..17: mol_type = other DNA
tggggaagacctgacct

SEQ ID NO: 156704 - DNA, 17 bp, synthetic construct
  source 1..17: mol_type = other DNA
gtggggaagacctgacc

SEQ ID NO: 156705 - DNA, 17 bp, synthetic construct
  source 1..17: mol_type = other DNA
tgtggggaagacctgac

SEQ ID NO: 156706 - DNA, 17 bp, synthetic construct
  source 1..17: mol_type = other DNA
ctgtggggaagacctga

SEQ ID NO: 156707 - DNA, 17 bp, synthetic construct
  source 1..17: mol_type = other DNA
tctgtggggaagacctg

SEQ ID NO: 156708 - DNA, 17 bp, synthetic construct
  source 1..17: mol_type = other DNA
ctctgtggggaagacct

SEQ ID NO: 156709 - DNA, 17 bp, synthetic construct
  source 1..17: mol_type = other DNA
tctctgtggggaagacc

SEQ ID NO: 156710 - DNA, 17 bp, synthetic construct
  source 1..17: mol_type = other DNA
ttctctgtggggaagac

SEQ ID NO: 156711 - DNA, 17 bp, synthetic construct
  source 1..17: mol_type = other DNA
gttctctgtggggaaga

SEQ ID NO: 156712 - DNA, 17 bp, synthetic construct
  source 1..17: mol_type = other DNA
agttctctgtggggaag

SEQ ID NO: 156713 - DNA, 17 bp, synthetic construct
  source 1..17: mol_type = other DNA
tagttctctgtggggaa

SEQ ID NO: 156714 - DNA, 17 bp, synthetic construct
  source 1..17: mol_type = other DNA
gtagttctctgtgggga

SEQ ID NO: 156715 - DNA, 17 bp, synthetic construct
  source 1..17: mol_type = other DNA
cgtagttctctgtgggg

SEQ ID NO: 156716 - DNA, 17 bp, synthetic construct
  source 1..17: mol_type = other DNA
gcgtagttctctgtggg

SEQ ID NO: 156717 - DNA, 17 bp, synthetic construct
  source 1..17: mol_type = other DNA
ggcgtagttctctgtgg

SEQ ID NO: 156718 - DNA, 17 bp, synthetic construct
  source 1..17: mol_type = other DNA
gggcgtagttctctgtg

SEQ ID NO: 156719 - DNA, 17 bp, synthetic construct
  source 1..17: mol_type = other DNA
cgggcgtagttctctgt

SEQ ID NO: 156720 - DNA, 17 bp, synthetic construct
  source 1..17: mol_type = other DNA
ccgggcgtagttctctg

SEQ ID NO: 156721 - DNA, 17 bp, synthetic construct
  source 1..17: mol_type = other DNA
gccgggcgtagttctct

SEQ ID NO: 156722 - DNA, 17 bp, synthetic construct
  source 1..17: mol_type = other DNA
tgccgggcgtagttctc

SEQ ID NO: 156723 - DNA, 17 bp, synthetic construct
  source 1..17: mol_type = other DNA
gtgccgggcgtagttct

SEQ ID NO: 156724 - DNA, 17 bp, synthetic construct
  source 1..17: mol_type = other DNA
agtgccgggcgtagttc

SEQ ID NO: 156725 - DNA, 17 bp, synthetic construct
  source 1..17: mol_type = other DNA
cagtgccgggcgtagtt

SEQ ID NO: 156726 - DNA, 17 bp, synthetic construct
  source 1..17: mol_type = other DNA
ccagtgccgggcgtagt

SEQ ID NO: 156727 - DNA, 17 bp, synthetic construct
  source 1..17: mol_type = other DNA
accagtgccgggcgtag

SEQ ID NO: 156728 - DNA, 17 bp, synthetic construct
  source 1..17: mol_type = other DNA
caccagtgccgggcgta

SEQ ID NO: 156729 - DNA, 17 bp, synthetic construct
  source 1..17: mol_type = other DNA
gcaccagtgccgggcgt

SEQ ID NO: 156730 - DNA, 17 bp, synthetic construct
  source 1..17: mol_type = other DNA
agcaccagtgccgggcg

SEQ ID NO: 156731 - DNA, 17 bp, synthetic construct
  source 1..17: mol_type = other DNA
gagcaccagtgccgggc

SEQ ID NO: 156732 - DNA, 17 bp, synthetic construct
  source 1..17: mol_type = other DNA
cgagcaccagtgccggg

SEQ ID NO: 156733 - DNA, 17 bp, synthetic construct
  source 1..17: mol_type = other DNA
gcgagcaccagtgccgg

SEQ ID NO: 156734 - DNA, 17 bp, synthetic construct
  source 1..17: mol_type = other DNA
cgcgagcaccagtgccg

SEQ ID NO: 156735 - DNA, 17 bp, synthetic construct
  source 1..17: mol_type = other DNA
gcgcgagcaccagtgcc

SEQ ID NO: 156736 - DNA, 17 bp, synthetic construct
  source 1..17: mol_type = other DNA
ggcgcgagcaccagtgc

SEQ ID NO: 156737 - DNA, 17 bp, synthetic construct
  source 1..17: mol_type = other DNA
aggcgcgagcaccagtg

SEQ ID NO: 156738 - DNA, 17 bp, synthetic construct
  source 1..17: mol_type = other DNA
caggcgcgagcaccagt

SEQ ID NO: 156739 - DNA, 17 bp, synthetic construct
  source 1..17: mol_type = other DNA
tcaggcgcgagcaccag

SEQ ID NO: 156740 - DNA, 17 bp, synthetic construct
  source 1..17: mol_type = other DNA
gtcaggcgcgagcacca

SEQ ID NO: 156741 - DNA, 17 bp, synthetic construct
  source 1..17: mol_type = other DNA
ggtcaggcgcgagcacc

SEQ ID NO: 156742 - DNA, 17 bp, synthetic construct
  source 1..17: mol_type = other DNA
cggtcaggcgcgagcac

SEQ ID NO: 156743 - DNA, 17 bp, synthetic construct
  source 1..17: mol_type = other DNA
tcggtcaggcgcgagca

SEQ ID NO: 156744 - DNA, 17 bp, synthetic construct
  source 1..17: mol_type = other DNA
atcggtcaggcgcgagc

SEQ ID NO: 156745 - DNA, 17 bp, synthetic construct
  source 1..17: mol_type = other DNA
gatcggtcaggcgcgag

SEQ ID NO: 156746 - DNA, 17 bp, synthetic construct
  source 1..17: mol_type = other DNA
ggatcggtcaggcgcga

SEQ ID NO: 156747 - DNA, 17 bp, synthetic construct
  source 1..17: mol_type = other DNA
gggatcggtcaggcgcg

SEQ ID NO: 156748 - DNA, 17 bp, synthetic construct
  source 1..17: mol_type = other DNA
tgggatcggtcaggcgc

SEQ ID NO: 156749 - DNA, 17 bp, synthetic construct
  source 1..17: mol_type = other DNA
ttgggatcggtcaggcg

SEQ ID NO: 156750 - DNA, 17 bp, synthetic construct
  source 1..17: mol_type = other DNA
gttgggatcggtcaggc

SEQ ID NO: 156751 - DNA, 17 bp, synthetic construct
  source 1..17: mol_type = other DNA
tgttgggatcggtcagg

SEQ ID NO: 156752 - DNA, 17 bp, synthetic construct
  source 1..17: mol_type = other DNA
ctgttgggatcggtcag

SEQ ID NO: 156753 - DNA, 17 bp, synthetic construct
  source 1..17: mol_type = other DNA
actgttgggatcggtca

SEQ ID NO: 156754 - DNA, 17 bp, synthetic construct
  source 1..17: mol_type = other DNA
cactgttgggatcggtc

SEQ ID NO: 156755 - DNA, 17 bp, synthetic construct
  source 1..17: mol_type = other DNA
gcactgttgggatcggt

SEQ ID NO: 156756 - DNA, 17 bp, synthetic construct
  source 1..17: mol_type = other DNA
ggcactgttgggatcgg

SEQ ID NO: 156757 - DNA, 17 bp, synthetic construct
  source 1..17: mol_type = other DNA
aggcactgttgggatcg

SEQ ID NO: 156758 - DNA, 17 bp, synthetic construct
  source 1..17: mol_type = other DNA
aaggcactgttgggatc

SEQ ID NO: 156759 - DNA, 17 bp, synthetic construct
  source 1..17: mol_type = other DNA
gaaggcactgttgggat

SEQ ID NO: 156760 - DNA, 17 bp, synthetic construct
  source 1..17: mol_type = other DNA
agaaggcactgttggga

SEQ ID NO: 156761 - DNA, 17 bp, synthetic construct
  source 1..17: mol_type = other DNA
gagaaggcactgttggg

SEQ ID NO: 156762 - DNA, 17 bp, synthetic construct
  source 1..17: mol_type = other DNA
cgagaaggcactgttgg

SEQ ID NO: 156763 - DNA, 17 bp, synthetic construct
  source 1..17: mol_type = other DNA
gcgagaaggcactgttg

SEQ ID NO: 156764 - DNA, 17 bp, synthetic construct
  source 1..17: mol_type = other DNA
cgcgagaaggcactgtt

SEQ ID NO: 156765 - DNA, 17 bp, synthetic construct
  source 1..17: mol_type = other DNA
gcgcgagaaggcactgt

SEQ ID NO: 156766 - DNA, 17 bp, synthetic construct
  source 1..17: mol_type = other DNA
agcgcgagaaggcactg

SEQ ID NO: 156767 - DNA, 17 bp, synthetic construct
  source 1..17: mol_type = other DNA
cagcgcgagaaggcact

SEQ ID NO: 156768 - DNA, 17 bp, synthetic construct
  source 1..17: mol_type = other DNA
gcagcgcgagaaggcac

SEQ ID NO: 156769 - DNA, 17 bp, synthetic construct
  source 1..17: mol_type = other DNA
ggcagcgcgagaaggca

SEQ ID NO: 156770 - DNA, 17 bp, synthetic construct
  source 1..17: mol_type = other DNA
tggcagcgcgagaaggc

SEQ ID NO: 156771 - DNA, 17 bp, synthetic construct
  source 1..17: mol_type = other DNA
gtggcagcgcgagaagg

SEQ ID NO: 156772 - DNA, 17 bp, synthetic construct
  source 1..17: mol_type = other DNA
agtggcagcgcgagaag

SEQ ID NO: 156773 - DNA, 17 bp, synthetic construct
  source 1..17: mol_type = other DNA
gagtggcagcgcgagaa

SEQ ID NO: 156774 - DNA, 17 bp, synthetic construct
  source 1..17: mol_type = other DNA
ggagtggcagcgcgaga

SEQ ID NO: 156775 - DNA, 17 bp, synthetic construct
  source 1..17: mol_type = other DNA
tggagtggcagcgcgag

SEQ ID NO: 156776 - DNA, 17 bp, synthetic construct
  source 1..17: mol_type = other DNA
atggagtggcagcgcga

SEQ ID NO: 156777 - DNA, 17 bp, synthetic construct
  source 1..17: mol_type = other DNA
gatggagtggcagcgcg

SEQ ID NO: 156778 - DNA, 17 bp, synthetic construct
  source 1..17: mol_type = other DNA
tgatggagtggcagcgc

SEQ ID NO: 156779 - DNA, 17 bp, synthetic construct
  source 1..17: mol_type = other DNA
atgatggagtggcagcg

SEQ ID NO: 156780 - DNA, 17 bp, synthetic construct
  source 1..17: mol_type = other DNA
gatgatggagtggcagc

SEQ ID NO: 156781 - DNA, 17 bp, synthetic construct
  source 1..17: mol_type = other DNA
tgatgatggagtggcag

SEQ ID NO: 156782 - DNA, 17 bp, synthetic construct
  source 1..17: mol_type = other DNA
ttgatgatggagtggca

SEQ ID NO: 156783 - DNA, 17 bp, synthetic construct
  source 1..17: mol_type = other DNA
gttgatgatggagtggc

SEQ ID NO: 156784 - DNA, 17 bp, synthetic construct
  source 1..17: mol_type = other DNA
ggttgatgatggagtgg

SEQ ID NO: 156785 - DNA, 17 bp, synthetic construct
  source 1..17: mol_type = other DNA
gggttgatgatggagtg

SEQ ID NO: 156786 - DNA, 17 bp, synthetic construct
  source 1..17: mol_type = other DNA
ggggttgatgatggagt

SEQ ID NO: 156787 - DNA, 17 bp, synthetic construct
  source 1..17: mol_type = other DNA
tggggttgatgatggag

SEQ ID NO: 156788 - DNA, 17 bp, synthetic construct
  source 1..17: mol_type = other DNA
ttggggttgatgatgga

SEQ ID NO: 156789 - DNA, 17 bp, synthetic construct
  source 1..17: mol_type = other DNA
cttggggttgatgatgg

SEQ ID NO: 156790 - DNA, 17 bp, synthetic construct
  source 1..17: mol_type = other DNA
gcttggggttgatgatg

SEQ ID NO: 156791 - DNA, 17 bp, synthetic construct
  source 1..17: mol_type = other DNA
ggcttggggttgatgat

SEQ ID NO: 156792 - DNA, 17 bp, synthetic construct
  source 1..17: mol_type = other DNA
gggcttggggttgatga

SEQ ID NO: 156793 - DNA, 17 bp, synthetic construct
  source 1..17: mol_type = other DNA
agggcttggggttgatg

SEQ ID NO: 156794 - DNA, 17 bp, synthetic construct
  source 1..17: mol_type = other DNA
aagggcttggggttgat

SEQ ID NO: 156795 - DNA, 17 bp, synthetic construct
  source 1..17: mol_type = other DNA
gaagggcttggggttga

SEQ ID NO: 156796 - DNA, 17 bp, synthetic construct
  source 1..17: mol_type = other DNA
ggaagggcttggggttg

SEQ ID NO: 156797 - DNA, 17 bp, synthetic construct
  source 1..17: mol_type = other DNA
tggaagggcttggggtt

SEQ ID NO: 156798 - DNA, 17 bp, synthetic construct
  source 1..17: mol_type = other DNA
gtggaagggcttggggt

SEQ ID NO: 156799 - DNA, 17 bp, synthetic construct
  source 1..17: mol_type = other DNA
agtggaagggcttgggg

SEQ ID NO: 156800 - DNA, 17 bp, synthetic construct
  source 1..17: mol_type = other DNA
gagtggaagggcttggg

SEQ ID NO: 156801 - DNA, 17 bp, synthetic construct
  source 1..17: mol_type = other DNA
cgagtggaagggcttgg

SEQ ID NO: 156802 - DNA, 17 bp, synthetic construct
  source 1..17: mol_type = other DNA
ccgagtggaagggcttg

SEQ ID NO: 156803 - DNA, 17 bp, synthetic construct
  source 1..17: mol_type = other DNA
accgagtggaagggctt

SEQ ID NO: 156804 - DNA, 17 bp, synthetic construct
  source 1..17: mol_type = other DNA
caccgagtggaagggct

SEQ ID NO: 156805 - DNA, 17 bp, synthetic construct
  source 1..17: mol_type = other DNA
tcaccgagtggaagggc

SEQ ID NO: 156806 - DNA, 17 bp, synthetic construct
  source 1..17: mol_type = other DNA
ctcaccgagtggaaggg

SEQ ID NO: 156807 - DNA, 17 bp, synthetic construct
  source 1..17: mol_type = other DNA
tctcaccgagtggaagg

SEQ ID NO: 156808 - DNA, 17 bp, synthetic construct
  source 1..17: mol_type = other DNA
ctctcaccgagtggaag

SEQ ID NO: 156809 - DNA, 17 bp, synthetic construct
  source 1..17: mol_type = other DNA
cctctcaccgagtggaa

SEQ ID NO: 156810 - DNA, 17 bp, synthetic construct
  source 1..17: mol_type = other DNA
gcctctcaccgagtgga

SEQ ID NO: 156811 - DNA, 17 bp, synthetic construct
  source 1..17: mol_type = other DNA
agcctctcaccgagtgg

SEQ ID NO: 156812 - DNA, 17 bp, synthetic construct
  source 1..17: mol_type = other DNA
cagcctctcaccgagtg

SEQ ID NO: 156813 - DNA, 17 bp, synthetic construct
  source 1..17: mol_type = other DNA
tcagcctctcaccgagt

SEQ ID NO: 156814 - DNA, 17 bp, synthetic construct
  source 1..17: mol_type = other DNA
ctcagcctctcaccgag

SEQ ID NO: 156815 - DNA, 17 bp, synthetic construct
  source 1..17: mol_type = other DNA
cctcagcctctcaccga

SEQ ID NO: 156816 - DNA, 17 bp, synthetic construct
  source 1..17: mol_type = other DNA
gcctcagcctctcaccg

SEQ ID NO: 156817 - DNA, 17 bp, synthetic construct
  source 1..17: mol_type = other DNA
ggcctcagcctctcacc

SEQ ID NO: 156818 - DNA, 17 bp, synthetic construct
  source 1..17: mol_type = other DNA
tggcctcagcctctcac

SEQ ID NO: 156819 - DNA, 17 bp, synthetic construct
  source 1..17: mol_type = other DNA
ctggcctcagcctctca

SEQ ID NO: 156820 - DNA, 17 bp, synthetic construct
  source 1..17: mol_type = other DNA
tctggcctcagcctctc

SEQ ID NO: 156821 - DNA, 17 bp, synthetic construct
  source 1..17: mol_type = other DNA
gtctggcctcagcctct

SEQ ID NO: 156822 - DNA, 17 bp, synthetic construct
  source 1..17: mol_type = other DNA
ggtctggcctcagcctc

SEQ ID NO: 156823 - DNA, 17 bp, synthetic construct
  source 1..17: mol_type = other DNA
gggtctggcctcagcct

SEQ ID NO: 156824 - DNA, 17 bp, synthetic construct
  source 1..17: mol_type = other DNA
ggggtctggcctcagcc

SEQ ID NO: 156825 - DNA, 17 bp, synthetic construct
  source 1..17: mol_type = other DNA
gggggtctggcctcagc

SEQ ID NO: 156826 - DNA, 17 bp, synthetic construct
  source 1..17: mol_type = other DNA
tgggggtctggcctcag

SEQ ID NO: 156827 - DNA, 17 bp, synthetic construct
  source 1..17: mol_type = other DNA
gtgggggtctggcctca

SEQ ID NO: 156828 - DNA, 17 bp, synthetic construct
  source 1..17: mol_type = other DNA
cgtgggggtctggcctc

SEQ ID NO: 156829 - DNA, 17 bp, synthetic construct
  source 1..17: mol_type = other DNA
gcgtgggggtctggcct

SEQ ID NO: 156830 - DNA, 17 bp, synthetic construct
  source 1..17: mol_type = other DNA
ggcgtgggggtctggcc

SEQ ID NO: 156831 - DNA, 17 bp, synthetic construct
  source 1..17: mol_type = other DNA
aggcgtgggggtctggc

SEQ ID NO: 156832 - DNA, 17 bp, synthetic construct
  source 1..17: mol_type = other DNA
caggcgtgggggtctgg

SEQ ID NO: 156833 - DNA, 17 bp, synthetic construct
  source 1..17: mol_type = other DNA
ccaggcgtgggggtctg

SEQ ID NO: 156834 - DNA, 17 bp, synthetic construct
  source 1..17: mol_type = other DNA
cccaggcgtgggggtct

SEQ ID NO: 156835 - DNA, 17 bp, synthetic construct
  source 1..17: mol_type = other DNA
gcccaggcgtgggggtc

SEQ ID NO: 156836 - DNA, 17 bp, synthetic construct
  source 1..17: mol_type = other DNA
tgcccaggcgtgggggt

SEQ ID NO: 156837 - DNA, 17 bp, synthetic construct
  source 1..17: mol_type = other DNA
ctgcccaggcgtggggg

SEQ ID NO: 156838 - DNA, 17 bp, synthetic construct
  source 1..17: mol_type = other DNA
cctgcccaggcgtgggg

SEQ ID NO: 156839 - DNA, 17 bp, synthetic construct
  source 1..17: mol_type = other DNA
tcctgcccaggcgtggg

SEQ ID NO: 156840 - DNA, 17 bp, synthetic construct
  source 1..17: mol_type = other DNA
atcctgcccaggcgtgg

SEQ ID NO: 156841 - DNA, 17 bp, synthetic construct
  source 1..17: mol_type = other DNA
catcctgcccaggcgtg

SEQ ID NO: 156842 - DNA, 17 bp, synthetic construct
  source 1..17: mol_type = other DNA
ccatcctgcccaggcgt

SEQ ID NO: 156843 - DNA, 17 bp, synthetic construct
  source 1..17: mol_type = other DNA
cccatcctgcccaggcg

SEQ ID NO: 156844 - DNA, 17 bp, synthetic construct
  source 1..17: mol_type = other DNA
acccatcctgcccaggc

SEQ ID NO: 156845 - DNA, 17 bp, synthetic construct
  source 1..17: mol_type = other DNA
cacccatcctgcccagg

SEQ ID NO: 156846 - DNA, 17 bp, synthetic construct
  source 1..17: mol_type = other DNA
ccacccatcctgcccag

SEQ ID NO: 156847 - DNA, 17 bp, synthetic construct
  source 1..17: mol_type = other DNA
cccacccatcctgccca

SEQ ID NO: 156848 - DNA, 17 bp, synthetic construct
  source 1..17: mol_type = other DNA
ccccacccatcctgccc

SEQ ID NO: 156849 - DNA, 17 bp, synthetic construct
  source 1..17: mol_type = other DNA
cccccacccatcctgcc

SEQ ID NO: 156850 - DNA, 17 bp, synthetic construct
  source 1..17: mol_type = other DNA
tcccccacccatcctgc

SEQ ID NO: 156851 - DNA, 17 bp, synthetic construct
  source 1..17: mol_type = other DNA
ctcccccacccatcctg

SEQ ID NO: 156852 - DNA, 17 bp, synthetic construct
  source 1..17: mol_type = other DNA
gctcccccacccatcct

SEQ ID NO: 156853 - DNA, 17 bp, synthetic construct
  source 1..17: mol_type = other DNA
ggctcccccacccatcc

SEQ ID NO: 156854 - DNA, 17 bp, synthetic construct
  source 1..17: mol_type = other DNA
gggctcccccacccatc

SEQ ID NO: 156855 - DNA, 17 bp, synthetic construct
  source 1..17: mol_type = other DNA
agggctcccccacccat

SEQ ID NO: 156856 - DNA, 17 bp, synthetic construct
  source 1..17: mol_type = other DNA
cagggctcccccaccca

SEQ ID NO: 156857 - DNA, 17 bp, synthetic construct
  source 1..17: mol_type = other DNA
ccagggctcccccaccc

SEQ ID NO: 156858 - DNA, 17 bp, synthetic construct
  source 1..17: mol_type = other DNA
gccagggctcccccacc

SEQ ID NO: 156859 - DNA, 17 bp, synthetic construct
  source 1..17: mol_type = other DNA
tgccagggctcccccac

SEQ ID NO: 156860 - DNA, 17 bp, synthetic construct
  source 1..17: mol_type = other DNA
ctgccagggctccccca

SEQ ID NO: 156861 - DNA, 17 bp, synthetic construct
  source 1..17: mol_type = other DNA
cctgccagggctccccc

SEQ ID NO: 156862 - DNA, 17 bp, synthetic construct
  source 1..17: mol_type = other DNA
gcctgccagggctcccc

SEQ ID NO: 156863 - DNA, 17 bp, synthetic construct
  source 1..17: mol_type = other DNA
agcctgccagggctccc

SEQ ID NO: 156864 - DNA, 17 bp, synthetic construct
  source 1..17: mol_type = other DNA
cagcctgccagggctcc

SEQ ID NO: 156865 - DNA, 17 bp, synthetic construct
  source 1..17: mol_type = other DNA
ccagcctgccagggctc

SEQ ID NO: 156866 - DNA, 17 bp, synthetic construct
  source 1..17: mol_type = other DNA
cccagcctgccagggct

SEQ ID NO: 156867 - DNA, 17 bp, synthetic construct
  source 1..17: mol_type = other DNA
ccccagcctgccagggc

SEQ ID NO: 156868 - DNA, 17 bp, synthetic construct
  source 1..17: mol_type = other DNA
accccagcctgccaggg

SEQ ID NO: 156869 - DNA, 17 bp, synthetic construct
  source 1..17: mol_type = other DNA
gaccccagcctgccagg

SEQ ID NO: 156870 - DNA, 17 bp, synthetic construct
  source 1..17: mol_type = other DNA
ggaccccagcctgccag

SEQ ID NO: 156871 - DNA, 17 bp, synthetic construct
  source 1..17: mol_type = other DNA
gggaccccagcctgcca

SEQ ID NO: 156872 - DNA, 17 bp, synthetic construct
  source 1..17: mol_type = other DNA
agggaccccagcctgcc

SEQ ID NO: 156873 - DNA, 17 bp, synthetic construct
  source 1..17: mol_type = other DNA
cagggaccccagcctgc

SEQ ID NO: 156874 - DNA, 17 bp, synthetic construct
  source 1..17: mol_type = other DNA
tcagggaccccagcctg

SEQ ID NO: 156875 - DNA, 17 bp, synthetic construct
  source 1..17: mol_type = other DNA
gtcagggaccccagcct

SEQ ID NO: 156876 - DNA, 17 bp, synthetic construct
  source 1..17: mol_type = other DNA
cgtcagggaccccagcc

SEQ ID NO: 156877 - DNA, 17 bp, synthetic construct
  source 1..17: mol_type = other DNA
gcgtcagggaccccagc

SEQ ID NO: 156878 - DNA, 17 bp, synthetic construct
  source 1..17: mol_type = other DNA
ggcgtcagggaccccag

SEQ ID NO: 156879 - DNA, 17 bp, synthetic construct
  source 1..17: mol_type = other DNA
gggcgtcagggacccca

SEQ ID NO: 156880 - DNA, 17 bp, synthetic construct
  source 1..17: mol_type = other DNA
ggggcgtcagggacccc

SEQ ID NO: 156881 - DNA, 17 bp, synthetic construct
  source 1..17: mol_type = other DNA
cggggcgtcagggaccc

SEQ ID NO: 156882 - DNA, 17 bp, synthetic construct
  source 1..17: mol_type = other DNA
tcggggcgtcagggacc

SEQ ID NO: 156883 - DNA, 17 bp, synthetic construct
  source 1..17: mol_type = other DNA
atcggggcgtcagggac

SEQ ID NO: 156884 - DNA, 17 bp, synthetic construct
  source 1..17: mol_type = other DNA
catcggggcgtcaggga

SEQ ID NO: 156885 - DNA, 17 bp, synthetic construct
  source 1..17: mol_type = other DNA
gcatcggggcgtcaggg

SEQ ID NO: 156886 - DNA, 17 bp, synthetic construct
  source 1..17: mol_type = other DNA
ggcatcggggcgtcagg

SEQ ID NO: 156887 - DNA, 17 bp, synthetic construct
  source 1..17: mol_type = other DNA
aggcatcggggcgtcag

SEQ ID NO: 156888 - DNA, 17 bp, synthetic construct
  source 1..17: mol_type = other DNA
gaggcatcggggcgtca

SEQ ID NO: 156889 - DNA, 17 bp, synthetic construct
  source 1..17: mol_type = other DNA
ggaggcatcggggcgtc

SEQ ID NO: 156890 - DNA, 17 bp, synthetic construct
  source 1..17: mol_type = other DNA
gggaggcatcggggcgt

SEQ ID NO: 156891 - DNA, 17 bp, synthetic construct
  source 1..17: mol_type = other DNA
tgggaggcatcggggcg

SEQ ID NO: 156892 - DNA, 17 bp, synthetic construct
  source 1..17: mol_type = other DNA
gtgggaggcatcggggc

SEQ ID NO: 156893 - DNA, 17 bp, synthetic construct
  source 1..17: mol_type = other DNA
ggtgggaggcatcgggg

SEQ ID NO: 156894 - DNA, 17 bp, synthetic construct
  source 1..17: mol_type = other DNA
aggtgggaggcatcggg

SEQ ID NO: 156895 - DNA, 17 bp, synthetic construct
  source 1..17: mol_type = other DNA
gaggtgggaggcatcgg

SEQ ID NO: 156896 - DNA, 17 bp, synthetic construct
  source 1..17: mol_type = other DNA
ggaggtgggaggcatcg

SEQ ID NO: 156897 - DNA, 17 bp, synthetic construct
  source 1..17: mol_type = other DNA
cggaggtgggaggcatc

SEQ ID NO: 156898 - DNA, 17 bp, synthetic construct
  source 1..17: mol_type = other DNA
gcggaggtgggaggcat

SEQ ID NO: 156899 - DNA, 17 bp, synthetic construct
  source 1..17: mol_type = other DNA
tgcggaggtgggaggca

SEQ ID NO: 156900 - DNA, 17 bp, synthetic construct
  source 1..17: mol_type = other DNA
ctgcggaggtgggaggc

SEQ ID NO: 156901 - DNA, 17 bp, synthetic construct
  source 1..17: mol_type = other DNA
tctgcggaggtgggagg

SEQ ID NO: 156902 - DNA, 17 bp, synthetic construct
  source 1..17: mol_type = other DNA
ttctgcggaggtgggag

SEQ ID NO: 156903 - DNA, 17 bp, synthetic construct
  source 1..17: mol_type = other DNA
gttctgcggaggtggga

SEQ ID NO: 156904 - DNA, 17 bp, synthetic construct
  source 1..17: mol_type = other DNA
agttctgcggaggtggg

SEQ ID NO: 156905 - DNA, 17 bp, synthetic construct
  source 1..17: mol_type = other DNA
cagttctgcggaggtgg

SEQ ID NO: 156906 - DNA, 17 bp, synthetic construct
  source 1..17: mol_type = other DNA
gcagttctgcggaggtg

SEQ ID NO: 156907 - DNA, 17 bp, synthetic construct
  source 1..17: mol_type = other DNA
tgcagttctgcggaggt

SEQ ID NO: 156908 - DNA, 17 bp, synthetic construct
  source 1..17: mol_type = other DNA
atgcagttctgcggagg

SEQ ID NO: 156909 - DNA, 17 bp, synthetic construct
  source 1..17: mol_type = other DNA
catgcagttctgcggag

SEQ ID NO: 156910 - DNA, 17 bp, synthetic construct
  source 1..17: mol_type = other DNA
acatgcagttctgcgga

SEQ ID NO: 156911 - DNA, 17 bp, synthetic construct
  source 1..17: mol_type = other DNA
aacatgcagttctgcgg

SEQ ID NO: 156912 - DNA, 17 bp, synthetic construct
  source 1..17: mol_type = other DNA
aaacatgcagttctgcg

SEQ ID NO: 156913 - DNA, 17 bp, synthetic construct
  source 1..17: mol_type = other DNA
caaacatgcagttctgc

SEQ ID NO: 156914 - DNA, 17 bp, synthetic construct
  source 1..17: mol_type = other DNA
tcaaacatgcagttctg

SEQ ID NO: 156915 - DNA, 17 bp, synthetic construct
  source 1..17: mol_type = other DNA
gtcaaacatgcagttct

SEQ ID NO: 156916 - DNA, 17 bp, synthetic construct
  source 1..17: mol_type = other DNA
tgtcaaacatgcagttc

SEQ ID NO: 156917 - DNA, 17 bp, synthetic construct
  source 1..17: mol_type = other DNA
gtgtcaaacatgcagtt

SEQ ID NO: 156918 - DNA, 17 bp, synthetic construct
  source 1..17: mol_type = other DNA
ggtgtcaaacatgcagt

SEQ ID NO: 156919 - DNA, 17 bp, synthetic construct
  source 1..17: mol_type = other DNA
aggtgtcaaacatgcag

SEQ ID NO: 156920 - DNA, 17 bp, synthetic construct
  source 1..17: mol_type = other DNA
caggtgtcaaacatgca

SEQ ID NO: 156921 - DNA, 17 bp, synthetic construct
  source 1..17: mol_type = other DNA
gcaggtgtcaaacatgc

SEQ ID NO: 156922 - DNA, 17 bp, synthetic construct
  source 1..17: mol_type = other DNA
tgcaggtgtcaaacatg

SEQ ID NO: 156923 - DNA, 17 bp, synthetic construct
  source 1..17: mol_type = other DNA
ttgcaggtgtcaaacat

SEQ ID NO: 156924 - DNA, 17 bp, synthetic construct
  source 1..17: mol_type = other DNA
gttgcaggtgtcaaaca

SEQ ID NO: 156925 - DNA, 17 bp, synthetic construct
  source 1..17: mol_type = other DNA
agttgcaggtgtcaaac

SEQ ID NO: 156926 - DNA, 17 bp, synthetic construct
  source 1..17: mol_type = other DNA
cagttgcaggtgtcaaa

SEQ ID NO: 156927 - DNA, 17 bp, synthetic construct
  source 1..17: mol_type = other DNA
acagttgcaggtgtcaa

SEQ ID NO: 156928 - DNA, 17 bp, synthetic construct
  source 1..17: mol_type = other DNA
cacagttgcaggtgtca

SEQ ID NO: 156929 - DNA, 17 bp, synthetic construct
  source 1..17: mol_type = other DNA
tcacagttgcaggtgtc

SEQ ID NO: 156930 - DNA, 17 bp, synthetic construct
  source 1..17: mol_type = other DNA
ctcacagttgcaggtgt

SEQ ID NO: 156931 - DNA, 17 bp, synthetic construct
  source 1..17: mol_type = other DNA
gctcacagttgcaggtg

SEQ ID NO: 156932 - DNA, 17 bp, synthetic construct
  source 1..17: mol_type = other DNA
cgctcacagttgcaggt

SEQ ID NO: 156933 - DNA, 17 bp, synthetic construct
  source 1..17: mol_type = other DNA
ccgctcacagttgcagg

SEQ ID NO: 156934 - DNA, 17 bp, synthetic construct
  source 1..17: mol_type = other DNA
tccgctcacagttgcag

SEQ ID NO: 156935 - DNA, 17 bp, synthetic construct
  source 1..17: mol_type = other DNA
ctccgctcacagttgca

SEQ ID NO: 156936 - DNA, 17 bp, synthetic construct
  source 1..17: mol_type = other DNA
gctccgctcacagttgc

SEQ ID NO: 156937 - DNA, 17 bp, synthetic construct
  source 1..17: mol_type = other DNA
cgctccgctcacagttg

SEQ ID NO: 156938 - DNA, 17 bp, synthetic construct
  source 1..17: mol_type = other DNA
tcgctccgctcacagtt

SEQ ID NO: 156939 - DNA, 17 bp, synthetic construct
  source 1..17: mol_type = other DNA
ctcgctccgctcacagt

SEQ ID NO: 156940 - DNA, 17 bp, synthetic construct
  source 1..17: mol_type = other DNA
cctcgctccgctcacag

SEQ ID NO: 156941 - DNA, 17 bp, synthetic construct
  source 1..17: mol_type = other DNA
tcctcgctccgctcaca

SEQ ID NO: 156942 - DNA, 17 bp, synthetic construct
  source 1..17: mol_type = other DNA
gtcctcgctccgctcac

SEQ ID NO: 156943 - DNA, 17 bp, synthetic construct
  source 1..17: mol_type = other DNA
agtcctcgctccgctca

SEQ ID NO: 156944 - DNA, 17 bp, synthetic construct
  source 1..17: mol_type = other DNA
cagtcctcgctccgctc

SEQ ID NO: 156945 - DNA, 17 bp, synthetic construct
  source 1..17: mol_type = other DNA
gcagtcctcgctccgct

SEQ ID NO: 156946 - DNA, 17 bp, synthetic construct
  source 1..17: mol_type = other DNA
ggcagtcctcgctccgc

SEQ ID NO: 156947 - DNA, 17 bp, synthetic construct
  source 1..17: mol_type = other DNA
aggcagtcctcgctccg

SEQ ID NO: 156948 - DNA, 17 bp, synthetic construct
  source 1..17: mol_type = other DNA
caggcagtcctcgctcc

SEQ ID NO: 156949 - DNA, 17 bp, synthetic construct
  source 1..17: mol_type = other DNA
acaggcagtcctcgctc

SEQ ID NO: 156950 - DNA, 17 bp, synthetic construct
  source 1..17: mol_type = other DNA
cacaggcagtcctcgct

SEQ ID NO: 156951 - DNA, 17 bp, synthetic construct
  source 1..17: mol_type = other DNA
gcacaggcagtcctcgc

SEQ ID NO: 156952 - DNA, 17 bp, synthetic construct
  source 1..17: mol_type = other DNA
cgcacaggcagtcctcg

SEQ ID NO: 156953 - DNA, 17 bp, synthetic construct
  source 1..17: mol_type = other DNA
gcgcacaggcagtcctc

SEQ ID NO: 156954 - DNA, 17 bp, synthetic construct
  source 1..17: mol_type = other DNA
ggcgcacaggcagtcct

SEQ ID NO: 156955 - DNA, 17 bp, synthetic construct
  source 1..17: mol_type = other DNA
cggcgcacaggcagtcc

SEQ ID NO: 156956 - DNA, 17 bp, synthetic construct
  source 1..17: mol_type = other DNA
gcggcgcacaggcagtc

SEQ ID NO: 156957 - DNA, 17 bp, synthetic construct
  source 1..17: mol_type = other DNA
cgcggcgcacaggcagt

SEQ ID NO: 156958 - DNA, 17 bp, synthetic construct
  source 1..17: mol_type = other DNA
gcgcggcgcacaggcag

SEQ ID NO: 156959 - DNA, 17 bp, synthetic construct
  source 1..17: mol_type = other DNA
agcgcggcgcacaggca

SEQ ID NO: 156960 - DNA, 17 bp, synthetic construct
  source 1..17: mol_type = other DNA
cagcgcggcgcacaggc

SEQ ID NO: 156961 - DNA, 17 bp, synthetic construct
  source 1..17: mol_type = other DNA
acagcgcggcgcacagg

SEQ ID NO: 156962 - DNA, 17 bp, synthetic construct
  source 1..17: mol_type = other DNA
gacagcgcggcgcacag

SEQ ID NO: 156963 - DNA, 17 bp, synthetic construct
  source 1..17: mol_type = other DNA
ggacagcgcggcgcaca

SEQ ID NO: 156964 - DNA, 17 bp, synthetic construct
  source 1..17: mol_type = other DNA
aggacagcgcggcgcac

SEQ ID NO: 156965 - DNA, 17 bp, synthetic construct
  source 1..17: mol_type = other DNA
gaggacagcgcggcgca

SEQ ID NO: 156966 - DNA, 17 bp, synthetic construct
  source 1..17: mol_type = other DNA
ggaggacagcgcggcgc

SEQ ID NO: 156967 - DNA, 17 bp, synthetic construct
  source 1..17: mol_type = other DNA
aggaggacagcgcggcg

SEQ ID NO: 156968 - DNA, 17 bp, synthetic construct
  source 1..17: mol_type = other DNA
taggaggacagcgcggc

SEQ ID NO: 156969 - DNA, 17 bp, synthetic construct
  source 1..17: mol_type = other DNA
ataggaggacagcgcgg

SEQ ID NO: 156970 - DNA, 17 bp, synthetic construct
  source 1..17: mol_type = other DNA
cataggaggacagcgcg

SEQ ID NO: 156971 - DNA, 17 bp, synthetic construct
  source 1..17: mol_type = other DNA
acataggaggacagcgc

SEQ ID NO: 156972 - DNA, 17 bp, synthetic construct
  source 1..17: mol_type = other DNA
cacataggaggacagcg

SEQ ID NO: 156973 - DNA, 17 bp, synthetic construct
  source 1..17: mol_type = other DNA
gcacataggaggacagc

SEQ ID NO: 156974 - DNA, 17 bp, synthetic construct
  source 1..17: mol_type = other DNA
tgcacataggaggacag

SEQ ID NO: 156975 - DNA, 17 bp, synthetic construct
  source 1..17: mol_type = other DNA
gtgcacataggaggaca

SEQ ID NO: 156976 - DNA, 17 bp, synthetic construct
  source 1..17: mol_type = other DNA
cgtgcacataggaggac

SEQ ID NO: 156977 - DNA, 17 bp, synthetic construct
  source 1..17: mol_type = other DNA
gcgtgcacataggagga

SEQ ID NO: 156978 - DNA, 17 bp, synthetic construct
  source 1..17: mol_type = other DNA
ggcgtgcacataggagg

SEQ ID NO: 156979 - DNA, 17 bp, synthetic construct
  source 1..17: mol_type = other DNA
aggcgtgcacataggag

SEQ ID NO: 156980 - DNA, 17 bp, synthetic construct
  source 1..17: mol_type = other DNA
caggcgtgcacatagga

SEQ ID NO: 156981 - DNA, 17 bp, synthetic construct
  source 1..17: mol_type = other DNA
acaggcgtgcacatagg

SEQ ID NO: 156982 - DNA, 17 bp, synthetic construct
  source 1..17: mol_type = other DNA
cacaggcgtgcacatag

SEQ ID NO: 156983 - DNA, 17 bp, synthetic construct
  source 1..17: mol_type = other DNA
gcacaggcgtgcacata

SEQ ID NO: 156984 - DNA, 17 bp, synthetic construct
  source 1..17: mol_type = other DNA
ggcacaggcgtgcacat

SEQ ID NO: 156985 - DNA, 17 bp, synthetic construct
  source 1..17: mol_type = other DNA
cggcacaggcgtgcaca

SEQ ID NO: 156986 - DNA, 17 bp, synthetic construct
  source 1..17: mol_type = other DNA
gcggcacaggcgtgcac

SEQ ID NO: 156987 - DNA, 17 bp, synthetic construct
  source 1..17: mol_type = other DNA
ggcggcacaggcgtgca

SEQ ID NO: 156988 - DNA, 17 bp, synthetic construct
  source 1..17: mol_type = other DNA
tggcggcacaggcgtgc

SEQ ID NO: 156989 - DNA, 17 bp, synthetic construct
  source 1..17: mol_type = other DNA
ttggcggcacaggcgtg

SEQ ID NO: 156990 - DNA, 17 bp, synthetic construct
  source 1..17: mol_type = other DNA
cttggcggcacaggcgt

SEQ ID NO: 156991 - DNA, 17 bp, synthetic construct
  source 1..17: mol_type = other DNA
ccttggcggcacaggcg

SEQ ID NO: 156992 - DNA, 17 bp, synthetic construct
  source 1..17: mol_type = other DNA
cccttggcggcacaggc

SEQ ID NO: 156993 - DNA, 17 bp, synthetic construct
  source 1..17: mol_type = other DNA
gcccttggcggcacagg

SEQ ID NO: 156994 - DNA, 17 bp, synthetic construct
  source 1..17: mol_type = other DNA
cgcccttggcggcacag

SEQ ID NO: 156995 - DNA, 17 bp, synthetic construct
  source 1..17: mol_type = other DNA
acgcccttggcggcaca

SEQ ID NO: 156996 - DNA, 17 bp, synthetic construct
  source 1..17: mol_type = other DNA
tacgcccttggcggcac

SEQ ID NO: 156997 - DNA, 17 bp, synthetic construct
  source 1..17: mol_type = other DNA
gtacgcccttggcggca

SEQ ID NO: 156998 - DNA, 17 bp, synthetic construct
  source 1..17: mol_type = other DNA
tgtacgcccttggcggc

SEQ ID NO: 156999 - DNA, 17 bp, synthetic construct
  source 1..17: mol_type = other DNA
ctgtacgcccttggcgg

SEQ ID NO: 157000 - DNA, 17 bp, synthetic construct
  source 1..17: mol_type = other DNA
gctgtacgcccttggcg

SEQ ID NO: 157001 - DNA, 17 bp, synthetic construct
  source 1..17: mol_type = other DNA
agctgtacgcccttggc

SEQ ID NO: 157002 - DNA, 17 bp, synthetic construct
  source 1..17: mol_type = other DNA
gagctgtacgcccttgg

SEQ ID NO: 157003 - DNA, 17 bp, synthetic construct
  source 1..17: mol_type = other DNA
tgagctgtacgcccttg

SEQ ID NO: 157004 - DNA, 17 bp, synthetic construct
  source 1..17: mol_type = other DNA
ctgagctgtacgccctt

SEQ ID NO: 157005 - DNA, 17 bp, synthetic construct
  source 1..17: mol_type = other DNA
gctgagctgtacgccct

SEQ ID NO: 157006 - DNA, 17 bp, synthetic construct
  source 1..17: mol_type = other DNA
cgctgagctgtacgccc

SEQ ID NO: 157007 - DNA, 17 bp, synthetic construct
  source 1..17: mol_type = other DNA
tcgctgagctgtacgcc

SEQ ID NO: 157008 - DNA, 17 bp, synthetic construct
  source 1..17: mol_type = other DNA
gtcgctgagctgtacgc

SEQ ID NO: 157009 - DNA, 17 bp, synthetic construct
  source 1..17: mol_type = other DNA
agtcgctgagctgtacg

SEQ ID NO: 157010 - DNA, 17 bp, synthetic construct
  source 1..17: mol_type = other DNA
cagtcgctgagctgtac

SEQ ID NO: 157011 - DNA, 17 bp, synthetic construct
  source 1..17: mol_type = other DNA
ccagtcgctgagctgta

SEQ ID NO: 157012 - DNA, 17 bp, synthetic construct
  source 1..17: mol_type = other DNA
tccagtcgctgagctgt

SEQ ID NO: 157013 - DNA, 17 bp, synthetic construct
  source 1..17: mol_type = other DNA
ctccagtcgctgagctg

SEQ ID NO: 157014 - DNA, 17 bp, synthetic construct
  source 1..17: mol_type = other DNA
cctccagtcgctgagct

SEQ ID NO: 157015 - DNA, 17 bp, synthetic construct
  source 1..17: mol_type = other DNA
ccctccagtcgctgagc

SEQ ID NO: 157016 - DNA, 17 bp, synthetic construct
  source 1..17: mol_type = other DNA
tccctccagtcgctgag

SEQ ID NO: 157017 - DNA, 17 bp, synthetic construct
  source 1..17: mol_type = other DNA
gtccctccagtcgctga

SEQ ID NO: 157018 - DNA, 17 bp, synthetic construct
  source 1..17: mol_type = other DNA
cgtccctccagtcgctg

SEQ ID NO: 157019 - DNA, 17 bp, synthetic construct
  source 1..17: mol_type = other DNA
ccgtccctccagtcgct

SEQ ID NO: 157020 - DNA, 17 bp, synthetic construct
  source 1..17: mol_type = other DNA
gccgtccctccagtcgc

SEQ ID NO: 157021 - DNA, 17 bp, synthetic construct
  source 1..17: mol_type = other DNA
cgccgtccctccagtcg

SEQ ID NO: 157022 - DNA, 17 bp, synthetic construct
  source 1..17: mol_type = other DNA
acgccgtccctccagtc

SEQ ID NO: 157023 - DNA, 17 bp, synthetic construct
  source 1..17: mol_type = other DNA
gacgccgtccctccagt

SEQ ID NO: 157024 - DNA, 17 bp, synthetic construct
  source 1..17: mol_type = other DNA
agacgccgtccctccag

SEQ ID NO: 157025 - DNA, 17 bp, synthetic construct
  source 1..17: mol_type = other DNA
cagacgccgtccctcca

SEQ ID NO: 157026 - DNA, 17 bp, synthetic construct
  source 1..17: mol_type = other DNA
gcagacgccgtccctcc

SEQ ID NO: 157027 - DNA, 17 bp, synthetic construct
  source 1..17: mol_type = other DNA
tgcagacgccgtccctc

SEQ ID NO: 157028 - DNA, 17 bp, synthetic construct
  source 1..17: mol_type = other DNA
ctgcagacgccgtccct

SEQ ID NO: 157029 - DNA, 17 bp, synthetic construct
  source 1..17: mol_type = other DNA
actgcagacgccgtccc

SEQ ID NO: 157030 - DNA, 17 bp, synthetic construct
  source 1..17: mol_type = other DNA
cactgcagacgccgtcc

SEQ ID NO: 157031 - DNA, 17 bp, synthetic construct
  source 1..17: mol_type = other DNA
tcactgcagacgccgtc

SEQ ID NO: 157032 - DNA, 17 bp, synthetic construct
  source 1..17: mol_type = other DNA
ctcactgcagacgccgt

SEQ ID NO: 157033 - DNA, 17 bp, synthetic construct
  source 1..17: mol_type = other DNA
actcactgcagacgccg

SEQ ID NO: 157034 - DNA, 17 bp, synthetic construct
  source 1..17: mol_type = other DNA
cactcactgcagacgcc

SEQ ID NO: 157035 - DNA, 17 bp, synthetic construct
  source 1..17: mol_type = other DNA
gcactcactgcagacgc

SEQ ID NO: 157036 - DNA, 17 bp, synthetic construct
  source 1..17: mol_type = other DNA
ggcactcactgcagacg

SEQ ID NO: 157037 - DNA, 17 bp, synthetic construct
  source 1..17: mol_type = other DNA
gggcactcactgcagac

SEQ ID NO: 157038 - DNA, 17 bp, synthetic construct
  source 1..17: mol_type = other DNA
tgggcactcactgcaga

SEQ ID NO: 157039 - DNA, 17 bp, synthetic construct
  source 1..17: mol_type = other DNA
gtgggcactcactgcag

SEQ ID NO: 157040 - DNA, 17 bp, synthetic construct
  source 1..17: mol_type = other DNA
cgtgggcactcactgca

SEQ ID NO: 157041 - DNA, 17 bp, synthetic construct
  source 1..17: mol_type = other DNA
gcgtgggcactcactgc

SEQ ID NO: 157042 - DNA, 17 bp, synthetic construct
  source 1..17: mol_type = other DNA
agcgtgggcactcactg

SEQ ID NO: 157043 - DNA, 17 bp, synthetic construct
  source 1..17: mol_type = other DNA
cagcgtgggcactcact

SEQ ID NO: 157044 - DNA, 17 bp, synthetic construct
  source 1..17: mol_type = other DNA
ccagcgtgggcactcac

SEQ ID NO: 157045 - DNA, 17 bp, synthetic construct
  source 1..17: mol_type = other DNA
cccagcgtgggcactca

SEQ ID NO: 157046 - DNA, 17 bp, synthetic construct
  source 1..17: mol_type = other DNA
ccccagcgtgggcactc

SEQ ID NO: 157047 - DNA, 17 bp, synthetic construct
  source 1..17: mol_type = other DNA
cccccagcgtgggcact

SEQ ID NO: 157048 - DNA, 17 bp, synthetic construct
  source 1..17: mol_type = other DNA
acccccagcgtgggcac

SEQ ID NO: 157049 - DNA, 17 bp, synthetic construct
  source 1..17: mol_type = other DNA
cacccccagcgtgggca

SEQ ID NO: 157050 - DNA, 17 bp, synthetic construct
  source 1..17: mol_type = other DNA
ccacccccagcgtgggc

SEQ ID NO: 157051 - DNA, 17 bp, synthetic construct
  source 1..17: mol_type = other DNA
cccacccccagcgtggg

SEQ ID NO: 157052 - DNA, 17 bp, synthetic construct
  source 1..17: mol_type = other DNA
tcccacccccagcgtgg

SEQ ID NO: 157053 - DNA, 17 bp, synthetic construct
  source 1..17: mol_type = other DNA
atcccacccccagcgtg

SEQ ID NO: 157054 - DNA, 17 bp, synthetic construct
  source 1..17: mol_type = other DNA
catcccacccccagcgt

SEQ ID NO: 157055 - DNA, 17 bp, synthetic construct
  source 1..17: mol_type = other DNA
acatcccacccccagcg

SEQ ID NO: 157056 - DNA, 17 bp, synthetic construct
  source 1..17: mol_type = other DNA
cacatcccacccccagc

SEQ ID NO: 157057 - DNA, 17 bp, synthetic construct
  source 1..17: mol_type = other DNA
acacatcccacccccag

SEQ ID NO: 157058 - DNA, 17 bp, synthetic construct
  source 1..17: mol_type = other DNA
gacacatcccaccccca

SEQ ID NO: 157059 - DNA, 17 bp, synthetic construct
  source 1..17: mol_type = other DNA
ggacacatcccaccccc

SEQ ID NO: 157060 - DNA, 17 bp, synthetic construct
  source 1..17: mol_type = other DNA
tggacacatcccacccc

SEQ ID NO: 157061 - DNA, 17 bp, synthetic construct
  source 1..17: mol_type = other DNA
gtggacacatcccaccc

SEQ ID NO: 157062 - DNA, 17 bp, synthetic construct
  source 1..17: mol_type = other DNA
tgtggacacatcccacc

SEQ ID NO: 157063 - DNA, 17 bp, synthetic construct
  source 1..17: mol_type = other DNA
gtgtggacacatcccac

SEQ ID NO: 157064 - DNA, 17 bp, synthetic construct
  source 1..17: mol_type = other DNA
ggtgtggacacatccca

SEQ ID NO: 157065 - DNA, 17 bp, synthetic construct
  source 1..17: mol_type = other DNA
cggtgtggacacatccc

SEQ ID NO: 157066 - DNA, 17 bp, synthetic construct
  source 1..17: mol_type = other DNA
gcggtgtggacacatcc

SEQ ID NO: 157067 - DNA, 17 bp, synthetic construct
  source 1..17: mol_type = other DNA
cgcggtgtggacacatc

SEQ ID NO: 157068 - DNA, 17 bp, synthetic construct
  source 1..17: mol_type = other DNA
acgcggtgtggacacat

SEQ ID NO: 157069 - DNA, 17 bp, synthetic construct
  source 1..17: mol_type = other DNA
cacgcggtgtggacaca

SEQ ID NO: 157070 - DNA, 17 bp, synthetic construct
  source 1..17: mol_type = other DNA
ccacgcggtgtggacac

SEQ ID NO: 157071 - DNA, 17 bp, synthetic construct
  source 1..17: mol_type = other DNA
cccacgcggtgtggaca

SEQ ID NO: 157072 - DNA, 17 bp, synthetic construct
  source 1..17: mol_type = other DNA
ccccacgcggtgtggac

SEQ ID NO: 157073 - DNA, 17 bp, synthetic construct
  source 1..17: mol_type = other DNA
cccccacgcggtgtgga

SEQ ID NO: 157074 - DNA, 17 bp, synthetic construct
  source 1..17: mol_type = other DNA
acccccacgcggtgtgg

SEQ ID NO: 157075 - DNA, 17 bp, synthetic construct
  source 1..17: mol_type = other DNA
cacccccacgcggtgtg

SEQ ID NO: 157076 - DNA, 17 bp, synthetic construct
  source 1..17: mol_type = other DNA
gcacccccacgcggtgt

SEQ ID NO: 157077 - DNA, 17 bp, synthetic construct
  source 1..17: mol_type = other DNA
cgcacccccacgcggtg

SEQ ID NO: 157078 - DNA, 17 bp, synthetic construct
  source 1..17: mol_type = other DNA
ccgcacccccacgcggt

SEQ ID NO: 157079 - DNA, 17 bp, synthetic construct
  source 1..17: mol_type = other DNA
cccgcacccccacgcgg

SEQ ID NO: 157080 - DNA, 17 bp, synthetic construct
  source 1..17: mol_type = other DNA
ccccgcacccccacgcg

SEQ ID NO: 157081 - DNA, 17 bp, synthetic construct
  source 1..17: mol_type = other DNA
cccccgcacccccacgc

SEQ ID NO: 157082 - DNA, 17 bp, synthetic construct
  source 1..17: mol_type = other DNA
tcccccgcacccccacg

SEQ ID NO: 157083 - DNA, 17 bp, synthetic construct
  source 1..17: mol_type = other DNA
gtcccccgcacccccac

SEQ ID NO: 157084 - DNA, 17 bp, synthetic construct
  source 1..17: mol_type = other DNA
ggtcccccgcaccccca

SEQ ID NO: 157085 - DNA, 17 bp, synthetic construct
  source 1..17: mol_type = other DNA
gggtcccccgcaccccc

SEQ ID NO: 157086 - DNA, 17 bp, synthetic construct
  source 1..17: mol_type = other DNA
agggtcccccgcacccc

SEQ ID NO: 157087 - DNA, 17 bp, synthetic construct
  source 1..17: mol_type = other DNA
cagggtcccccgcaccc

SEQ ID NO: 157088 - DNA, 17 bp, synthetic construct
  source 1..17: mol_type = other DNA
ccagggtcccccgcacc

SEQ ID NO: 157089 - DNA, 17 bp, synthetic construct
  source 1..17: mol_type = other DNA
gccagggtcccccgcac

SEQ ID NO: 157090 - DNA, 17 bp, synthetic construct
  source 1..17: mol_type = other DNA
ggccagggtcccccgca

SEQ ID NO: 157091 - DNA, 17 bp, synthetic construct
  source 1..17: mol_type = other DNA
cggccagggtcccccgc

SEQ ID NO: 157092 - DNA, 17 bp, synthetic construct
  source 1..17: mol_type = other DNA
ccggccagggtcccccg

SEQ ID NO: 157093 - DNA, 17 bp, synthetic construct
  source 1..17: mol_type = other DNA
gccggccagggtccccc

SEQ ID NO: 157094 - DNA, 17 bp, synthetic construct
  source 1..17: mol_type = other DNA
tgccggccagggtcccc

SEQ ID NO: 157095 - DNA, 17 bp, synthetic construct
  source 1..17: mol_type = other DNA
ctgccggccagggtccc

SEQ ID NO: 157096 - DNA, 17 bp, synthetic construct
  source 1..17: mol_type = other DNA
gctgccggccagggtcc

SEQ ID NO: 157097 - DNA, 17 bp, synthetic construct
  source 1..17: mol_type = other DNA
tgctgccggccagggtc

SEQ ID NO: 157098 - DNA, 17 bp, synthetic construct
  source 1..17: mol_type = other DNA
ctgctgccggccagggt

SEQ ID NO: 157099 - DNA, 17 bp, synthetic construct
  source 1..17: mol_type = other DNA
gctgctgccggccaggg

SEQ ID NO: 157100 - DNA, 17 bp, synthetic construct
  source 1..17: mol_type = other DNA
ggctgctgccggccagg

SEQ ID NO: 157101 - DNA, 17 bp, synthetic construct
  source 1..17: mol_type = other DNA
cggctgctgccggccag

SEQ ID NO: 157102 - DNA, 17 bp, synthetic construct
  source 1..17: mol_type = other DNA
acggctgctgccggcca

SEQ ID NO: 157103 - DNA, 17 bp, synthetic construct
  source 1..17: mol_type = other DNA
gacggctgctgccggcc

SEQ ID NO: 157104 - DNA, 17 bp, synthetic construct
  source 1..17: mol_type = other DNA
tgacggctgctgccggc

SEQ ID NO: 157105 - DNA, 17 bp, synthetic construct
  source 1..17: mol_type = other DNA
gtgacggctgctgccgg

SEQ ID NO: 157106 - DNA, 17 bp, synthetic construct
  source 1..17: mol_type = other DNA
agtgacggctgctgccg

SEQ ID NO: 157107 - DNA, 17 bp, synthetic construct
  source 1..17: mol_type = other DNA
gagtgacggctgctgcc

SEQ ID NO: 157108 - DNA, 17 bp, synthetic construct
  source 1..17: mol_type = other DNA
tgagtgacggctgctgc

SEQ ID NO: 157109 - DNA, 17 bp, synthetic construct
  source 1..17: mol_type = other DNA
gtgagtgacggctgctg

SEQ ID NO: 157110 - DNA, 17 bp, synthetic construct
  source 1..17: mol_type = other DNA
tgtgagtgacggctgct

SEQ ID NO: 157111 - DNA, 17 bp, synthetic construct
  source 1..17: mol_type = other DNA
gtgtgagtgacggctgc

SEQ ID NO: 157112 - DNA, 17 bp, synthetic construct
  source 1..17: mol_type = other DNA
cgtgtgagtgacggctg

SEQ ID NO: 157113 - DNA, 17 bp, synthetic construct
  source 1..17: mol_type = other DNA
ccgtgtgagtgacggct

SEQ ID NO: 157114 - DNA, 17 bp, synthetic construct
  source 1..17: mol_type = other DNA
accgtgtgagtgacggc

SEQ ID NO: 157115 - DNA, 17 bp, synthetic construct
  source 1..17: mol_type = other DNA
aaccgtgtgagtgacgg

SEQ ID NO: 157116 - DNA, 17 bp, synthetic construct
  source 1..17: mol_type = other DNA
gaaccgtgtgagtgacg

SEQ ID NO: 157117 - DNA, 17 bp, synthetic construct
  source 1..17: mol_type = other DNA
agaaccgtgtgagtgac

SEQ ID NO: 157118 - DNA, 17 bp, synthetic construct
  source 1..17: mol_type = other DNA
gagaaccgtgtgagtga

SEQ ID NO: 157119 - DNA, 17 bp, synthetic construct
  source 1..17: mol_type = other DNA
tgagaaccgtgtgagtg

SEQ ID NO: 157120 - DNA, 17 bp, synthetic construct
  source 1..17: mol_type = other DNA
ctgagaaccgtgtgagt

SEQ ID NO: 157121 - DNA, 17 bp, synthetic construct
  source 1..17: mol_type = other DNA
gctgagaaccgtgtgag

SEQ ID NO: 157122 - DNA, 17 bp, synthetic construct
  source 1..17: mol_type = other DNA
ggctgagaaccgtgtga

SEQ ID NO: 157123 - DNA, 17 bp, synthetic construct
  source 1..17: mol_type = other DNA
gggctgagaaccgtgtg

SEQ ID NO: 157124 - DNA, 17 bp, synthetic construct
  source 1..17: mol_type = other DNA
tgggctgagaaccgtgt

SEQ ID NO: 157125 - DNA, 17 bp, synthetic construct
  source 1..17: mol_type = other DNA
ctgggctgagaaccgtg

SEQ ID NO: 157126 - DNA, 17 bp, synthetic construct
  source 1..17: mol_type = other DNA
tctgggctgagaaccgt

SEQ ID NO: 157127 - DNA, 17 bp, synthetic construct
  source 1..17: mol_type = other DNA
ctctgggctgagaaccg

SEQ ID NO: 157128 - DNA, 17 bp, synthetic construct
  source 1..17: mol_type = other DNA
gctctgggctgagaacc

SEQ ID NO: 157129 - DNA, 17 bp, synthetic construct
  source 1..17: mol_type = other DNA
agctctgggctgagaac

SEQ ID NO: 157130 - DNA, 17 bp, synthetic construct
  source 1..17: mol_type = other DNA
aagctctgggctgagaa

SEQ ID NO: 157131 - DNA, 17 bp, synthetic construct
  source 1..17: mol_type = other DNA
aaagctctgggctgaga

SEQ ID NO: 157132 - DNA, 17 bp, synthetic construct
  source 1..17: mol_type = other DNA
caaagctctgggctgag

SEQ ID NO: 157133 - DNA, 17 bp, synthetic construct
  source 1..17: mol_type = other DNA
gcaaagctctgggctga

SEQ ID NO: 157134 - DNA, 17 bp, synthetic construct
  source 1..17: mol_type = other DNA
tgcaaagctctgggctg

SEQ ID NO: 157135 - DNA, 17 bp, synthetic construct
  source 1..17: mol_type = other DNA
gtgcaaagctctgggct

SEQ ID NO: 157136 - DNA, 17 bp, synthetic construct
  source 1..17: mol_type = other DNA
agtgcaaagctctgggc

SEQ ID NO: 157137 - DNA, 17 bp, synthetic construct
  source 1..17: mol_type = other DNA
aagtgcaaagctctggg

SEQ ID NO: 157138 - DNA, 17 bp, synthetic construct
  source 1..17: mol_type = other DNA
gaagtgcaaagctctgg

SEQ ID NO: 157139 - DNA, 17 bp, synthetic construct
  source 1..17: mol_type = other DNA
ggaagtgcaaagctctg

SEQ ID NO: 157140 - DNA, 17 bp, synthetic construct
  source 1..17: mol_type = other DNA
aggaagtgcaaagctct

SEQ ID NO: 157141 - DNA, 17 bp, synthetic construct
  source 1..17: mol_type = other DNA
gaggaagtgcaaagctc

SEQ ID NO: 157142 - DNA, 17 bp, synthetic construct
  source 1..17: mol_type = other DNA
tgaggaagtgcaaagct

SEQ ID NO: 157143 - DNA, 17 bp, synthetic construct
  source 1..17: mol_type = other DNA
atgaggaagtgcaaagc

SEQ ID NO: 157144 - DNA, 17 bp, synthetic construct
  source 1..17: mol_type = other DNA
gatgaggaagtgcaaag

SEQ ID NO: 157145 - DNA, 17 bp, synthetic construct
  source 1..17: mol_type = other DNA
ggatgaggaagtgcaaa

SEQ ID NO: 157146 - DNA, 17 bp, synthetic construct
  source 1..17: mol_type = other DNA
gggatgaggaagtgcaa

SEQ ID NO: 157147 - DNA, 17 bp, synthetic construct
  source 1..17: mol_type = other DNA
tgggatgaggaagtgca

SEQ ID NO: 157148 - DNA, 17 bp, synthetic construct
  source 1..17: mol_type = other DNA
ctgggatgaggaagtgc

SEQ ID NO: 157149 - DNA, 17 bp, synthetic construct
  source 1..17: mol_type = other DNA
gctgggatgaggaagtg

SEQ ID NO: 157150 - DNA, 17 bp, synthetic construct
  source 1..17: mol_type = other DNA
ggctgggatgaggaagt

SEQ ID NO: 157151 - DNA, 17 bp, synthetic construct
  source 1..17: mol_type = other DNA
aggctgggatgaggaag

SEQ ID NO: 157152 - DNA, 17 bp, synthetic construct
  source 1..17: mol_type = other DNA
gaggctgggatgaggaa

SEQ ID NO: 157153 - DNA, 17 bp, synthetic construct
  source 1..17: mol_type = other DNA
cgaggctgggatgagga

SEQ ID NO: 157154 - DNA, 17 bp, synthetic construct
  source 1..17: mol_type = other DNA
gcgaggctgggatgagg

SEQ ID NO: 157155 - DNA, 17 bp, synthetic construct
  source 1..17: mol_type = other DNA
tgcgaggctgggatgag

SEQ ID NO: 157156 - DNA, 17 bp, synthetic construct
  source 1..17: mol_type = other DNA
ttgcgaggctgggatga

SEQ ID NO: 157157 - DNA, 17 bp, synthetic construct
  source 1..17: mol_type = other DNA
cttgcgaggctgggatg

SEQ ID NO: 157158 - DNA, 17 bp, synthetic construct
  source 1..17: mol_type = other DNA
tcttgcgaggctgggat

SEQ ID NO: 157159 - DNA, 17 bp, synthetic construct
  source 1..17: mol_type = other DNA
ttcttgcgaggctggga

SEQ ID NO: 157160 - DNA, 17 bp, synthetic construct
  source 1..17: mol_type = other DNA
gttcttgcgaggctggg

SEQ ID NO: 157161 - DNA, 17 bp, synthetic construct
  source 1..17: mol_type = other DNA
ggttcttgcgaggctgg

SEQ ID NO: 157162 - DNA, 17 bp, synthetic construct
  source 1..17: mol_type = other DNA
aggttcttgcgaggctg

SEQ ID NO: 157163 - DNA, 17 bp, synthetic construct
  source 1..17: mol_type = other DNA
gaggttcttgcgaggct

SEQ ID NO: 157164 - DNA, 17 bp, synthetic construct
  source 1..17: mol_type = other DNA
tgaggttcttgcgaggc

SEQ ID NO: 157165 - DNA, 17 bp, synthetic construct
  source 1..17: mol_type = other DNA
atgaggttcttgcgagg

SEQ ID NO: 157166 - DNA, 17 bp, synthetic construct
  source 1..17: mol_type = other DNA
catgaggttcttgcgag

SEQ ID NO: 157167 - DNA, 17 bp, synthetic construct
  source 1..17: mol_type = other DNA
gcatgaggttcttgcga

SEQ ID NO: 157168 - DNA, 17 bp, synthetic construct
  source 1..17: mol_type = other DNA
ggcatgaggttcttgcg

SEQ ID NO: 157169 - DNA, 17 bp, synthetic construct
  source 1..17: mol_type = other DNA
gggcatgaggttcttgc

SEQ ID NO: 157170 - DNA, 17 bp, synthetic construct
  source 1..17: mol_type = other DNA
agggcatgaggttcttg

SEQ ID NO: 157171 - DNA, 17 bp, synthetic construct
  source 1..17: mol_type = other DNA
aagggcatgaggttctt

SEQ ID NO: 157172 - DNA, 17 bp, synthetic construct
  source 1..17: mol_type = other DNA
caagggcatgaggttct

SEQ ID NO: 157173 - DNA, 17 bp, synthetic construct
  source 1..17: mol_type = other DNA
gcaagggcatgaggttc

SEQ ID NO: 157174 - DNA, 17 bp, synthetic construct
  source 1..17: mol_type = other DNA
cgcaagggcatgaggtt

SEQ ID NO: 157175 - DNA, 17 bp, synthetic construct
  source 1..17: mol_type = other DNA
tcgcaagggcatgaggt

SEQ ID NO: 157176 - DNA, 17 bp, synthetic construct
  source 1..17: mol_type = other DNA
atcgcaagggcatgagg

SEQ ID NO: 157177 - DNA, 17 bp, synthetic construct
  source 1..17: mol_type = other DNA
gatcgcaagggcatgag

SEQ ID NO: 157178 - DNA, 17 bp, synthetic construct
  source 1..17: mol_type = other DNA
ggatcgcaagggcatga

SEQ ID NO: 157179 - DNA, 17 bp, synthetic construct
  source 1..17: mol_type = other DNA
gggatcgcaagggcatg

SEQ ID NO: 157180 - DNA, 17 bp, synthetic construct
  source 1..17: mol_type = other DNA
ggggatcgcaagggcat

SEQ ID NO: 157181 - DNA, 17 bp, synthetic construct
  source 1..17: mol_type = other DNA
tggggatcgcaagggca

SEQ ID NO: 157182 - DNA, 17 bp, synthetic construct
  source 1..17: mol_type = other DNA
gtggggatcgcaagggc

SEQ ID NO: 157183 - DNA, 17 bp, synthetic construct
  source 1..17: mol_type = other DNA
cgtggggatcgcaaggg

SEQ ID NO: 157184 - DNA, 17 bp, synthetic construct
  source 1..17: mol_type = other DNA
acgtggggatcgcaagg

SEQ ID NO: 157185 - DNA, 17 bp, synthetic construct
  source 1..17: mol_type = other DNA
gacgtggggatcgcaag

SEQ ID NO: 157186 - DNA, 17 bp, synthetic construct
  source 1..17: mol_type = other DNA
tgacgtggggatcgcaa

SEQ ID NO: 157187 - DNA, 17 bp, synthetic construct
  source 1..17: mol_type = other DNA
gtgacgtggggatcgca

SEQ ID NO: 157188 - DNA, 17 bp, synthetic construct
  source 1..17: mol_type = other DNA
tgtgacgtggggatcgc

SEQ ID NO: 157189 - DNA, 17 bp, synthetic construct
  source 1..17: mol_type = other DNA
ctgtgacgtggggatcg

SEQ ID NO: 157190 - DNA, 17 bp, synthetic construct
  source 1..17: mol_type = other DNA
tctgtgacgtggggatc

SEQ ID NO: 157191 - DNA, 17 bp, synthetic construct
  source 1..17: mol_type = other DNA
gtctgtgacgtggggat

SEQ ID NO: 157192 - DNA, 17 bp, synthetic construct
  source 1..17: mol_type = other DNA
cgtctgtgacgtgggga

SEQ ID NO: 157193 - DNA, 17 bp, synthetic construct
  source 1..17: mol_type = other DNA
ccgtctgtgacgtgggg

SEQ ID NO: 157194 - DNA, 17 bp, synthetic construct
  source 1..17: mol_type = other DNA
cccgtctgtgacgtggg

SEQ ID NO: 157195 - DNA, 17 bp, synthetic construct
  source 1..17: mol_type = other DNA
ccccgtctgtgacgtgg

SEQ ID NO: 157196 - DNA, 17 bp, synthetic construct
  source 1..17: mol_type = other DNA
tccccgtctgtgacgtg

SEQ ID NO: 157197 - DNA, 17 bp, synthetic construct
  source 1..17: mol_type = other DNA
atccccgtctgtgacgt

SEQ ID NO: 157198 - DNA, 17 bp, synthetic construct
  source 1..17: mol_type = other DNA
catccccgtctgtgacg

SEQ ID NO: 157199 - DNA, 17 bp, synthetic construct
  source 1..17: mol_type = other DNA
gcatccccgtctgtgac

SEQ ID NO: 157200 - DNA, 17 bp, synthetic construct
  source 1..17: mol_type = other DNA
agcatccccgtctgtga

SEQ ID NO: 157201 - DNA, 17 bp, synthetic construct
  source 1..17: mol_type = other DNA
cagcatccccgtctgtg

SEQ ID NO: 157202 - DNA, 17 bp, synthetic construct
  source 1..17: mol_type = other DNA
tcagcatccccgtctgt

SEQ ID NO: 157203 - DNA, 17 bp, synthetic construct
  source 1..17: mol_type = other DNA
ctcagcatccccgtctg

SEQ ID NO: 157204 - DNA, 17 bp, synthetic construct
  source 1..17: mol_type = other DNA
actcagcatccccgtct

SEQ ID NO: 157205 - DNA, 17 bp, synthetic construct
  source 1..17: mol_type = other DNA
aactcagcatccccgtc

SEQ ID NO: 157206 - DNA, 17 bp, synthetic construct
  source 1..17: mol_type = other DNA
caactcagcatccccgt

SEQ ID NO: 157207 - DNA, 17 bp, synthetic construct
  source 1..17: mol_type = other DNA
tcaactcagcatccccg

SEQ ID NO: 157208 - DNA, 17 bp, synthetic construct
  source 1..17: mol_type = other DNA
ttcaactcagcatcccc

SEQ ID NO: 157209 - DNA, 17 bp, synthetic construct
  source 1..17: mol_type = other DNA
cttcaactcagcatccc

SEQ ID NO: 157210 - DNA, 17 bp, synthetic construct
  source 1..17: mol_type = other DNA
tcttcaactcagcatcc

SEQ ID NO: 157211 - DNA, 17 bp, synthetic construct
  source 1..17: mol_type = other DNA
atcttcaactcagcatc

SEQ ID NO: 157212 - DNA, 17 bp, synthetic construct
  source 1..17: mol_type = other DNA
catcttcaactcagcat

SEQ ID NO: 157213 - DNA, 17 bp, synthetic construct
  source 1..17: mol_type = other DNA
ccatcttcaactcagca

SEQ ID NO: 157214 - DNA, 17 bp, synthetic construct
  source 1..17: mol_type = other DNA
cccatcttcaactcagc

SEQ ID NO: 157215 - DNA, 17 bp, synthetic construct
  source 1..17: mol_type = other DNA
ccccatcttcaactcag

SEQ ID NO: 157216 - DNA, 17 bp, synthetic construct
  source 1..17: mol_type = other DNA
cccccatcttcaactca

SEQ ID NO: 157217 - DNA, 17 bp, synthetic construct
  source 1..17: mol_type = other DNA
gcccccatcttcaactc

SEQ ID NO: 157218 - DNA, 17 bp, synthetic construct
  source 1..17: mol_type = other DNA
agcccccatcttcaact

SEQ ID NO: 157219 - DNA, 17 bp, synthetic construct
  source 1..17: mol_type = other DNA
cagcccccatcttcaac

SEQ ID NO: 157220 - DNA, 17 bp, synthetic construct
  source 1..17: mol_type = other DNA
ccagcccccatcttcaa

SEQ ID NO: 157221 - DNA, 17 bp, synthetic construct
  source 1..17: mol_type = other DNA
gccagcccccatcttca

SEQ ID NO: 157222 - DNA, 17 bp, synthetic construct
  source 1..17: mol_type = other DNA
ggccagcccccatcttc

SEQ ID NO: 157223 - DNA, 17 bp, synthetic construct
  source 1..17: mol_type = other DNA
tggccagcccccatctt

SEQ ID NO: 157224 - DNA, 17 bp, synthetic construct
  source 1..17: mol_type = other DNA
ctggccagcccccatct

SEQ ID NO: 157225 - DNA, 17 bp, synthetic construct
  source 1..17: mol_type = other DNA
cctggccagcccccatc

SEQ ID NO: 157226 - DNA, 17 bp, synthetic construct
  source 1..17: mol_type = other DNA
gcctggccagcccccat

SEQ ID NO: 157227 - DNA, 17 bp, synthetic construct
  source 1..17: mol_type = other DNA
agcctggccagccccca

SEQ ID NO: 157228 - DNA, 17 bp, synthetic construct
  source 1..17: mol_type = other DNA
cagcctggccagccccc

SEQ ID NO: 157229 - DNA, 17 bp, synthetic construct
  source 1..17: mol_type = other DNA
gcagcctggccagcccc

SEQ ID NO: 157230 - DNA, 17 bp, synthetic construct
  source 1..17: mol_type = other DNA
agcagcctggccagccc

SEQ ID NO: 157231 - DNA, 17 bp, synthetic construct
  source 1..17: mol_type = other DNA
gagcagcctggccagcc

SEQ ID NO: 157232 - DNA, 17 bp, synthetic construct
  source 1..17: mol_type = other DNA
cgagcagcctggccagc

SEQ ID NO: 157233 - DNA, 17 bp, synthetic construct
  source 1..17: mol_type = other DNA
ccgagcagcctggccag

SEQ ID NO: 157234 - DNA, 17 bp, synthetic construct
  source 1..17: mol_type = other DNA
gccgagcagcctggcca

SEQ ID NO: 157235 - DNA, 17 bp, synthetic construct
  source 1..17: mol_type = other DNA
ggccgagcagcctggcc

SEQ ID NO: 157236 - DNA, 17 bp, synthetic construct
  source 1..17: mol_type = other DNA
cggccgagcagcctggc

SEQ ID NO: 157237 - DNA, 17 bp, synthetic construct
  source 1..17: mol_type = other DNA
gcggccgagcagcctgg

SEQ ID NO: 157238 - DNA, 17 bp, synthetic construct
  source 1..17: mol_type = other DNA
agcggccgagcagcctg

SEQ ID NO: 157239 - DNA, 17 bp, synthetic construct
  source 1..17: mol_type = other DNA
cagcggccgagcagcct

SEQ ID NO: 157240 - DNA, 17 bp, synthetic construct
  source 1..17: mol_type = other DNA
tcagcggccgagcagcc

SEQ ID NO: 157241 - DNA, 17 bp, synthetic construct
  source 1..17: mol_type = other DNA
gtcagcggccgagcagc

SEQ ID NO: 157242 - DNA, 17 bp, synthetic construct
  source 1..17: mol_type = other DNA
ggtcagcggccgagcag

SEQ ID NO: 157243 - DNA, 17 bp, synthetic construct
  source 1..17: mol_type = other DNA
aggtcagcggccgagca

SEQ ID NO: 157244 - DNA, 17 bp, synthetic construct
  source 1..17: mol_type = other DNA
caggtcagcggccgagc

SEQ ID NO: 157245 - DNA, 17 bp, synthetic construct
  source 1..17: mol_type = other DNA
acaggtcagcggccgag

SEQ ID NO: 157246 - DNA, 17 bp, synthetic construct
  source 1..17: mol_type = other DNA
gacaggtcagcggccga

SEQ ID NO: 157247 - DNA, 17 bp, synthetic construct
  source 1..17: mol_type = other DNA
ggacaggtcagcggccg

SEQ ID NO: 157248 - DNA, 17 bp, synthetic construct
  source 1..17: mol_type = other DNA
gggacaggtcagcggcc

SEQ ID NO: 157249 - DNA, 17 bp, synthetic construct
  source 1..17: mol_type = other DNA
ggggacaggtcagcggc

SEQ ID NO: 157250 - DNA, 17 bp, synthetic construct
  source 1..17: mol_type = other DNA
gggggacaggtcagcgg

SEQ ID NO: 157251 - DNA, 17 bp, synthetic construct
  source 1..17: mol_type = other DNA
ggggggacaggtcagcg

SEQ ID NO: 157252 - DNA, 17 bp, synthetic construct
  source 1..17: mol_type = other DNA
aggggggacaggtcagc

SEQ ID NO: 157253 - DNA, 17 bp, synthetic construct
  source 1..17: mol_type = other DNA
caggggggacaggtcag

SEQ ID NO: 157254 - DNA, 17 bp, synthetic construct
  source 1..17: mol_type = other DNA
ccaggggggacaggtca

SEQ ID NO: 157255 - DNA, 17 bp, synthetic construct
  source 1..17: mol_type = other DNA
gccaggggggacaggtc

SEQ ID NO: 157256 - DNA, 17 bp, synthetic construct
  source 1..17: mol_type = other DNA
ggccaggggggacaggt

SEQ ID NO: 157257 - DNA, 17 bp, synthetic construct
  source 1..17: mol_type = other DNA
gggccaggggggacagg

SEQ ID NO: 157258 - DNA, 17 bp, synthetic construct
  source 1..17: mol_type = other DNA
ggggccaggggggacag

SEQ ID NO: 157259 - DNA, 17 bp, synthetic construct
  source 1..17: mol_type = other DNA
tggggccaggggggaca

SEQ ID NO: 157260 - DNA, 17 bp, synthetic construct
  source 1..17: mol_type = other DNA
gtggggccaggggggac

SEQ ID NO: 157261 - DNA, 17 bp, synthetic construct
  source 1..17: mol_type = other DNA
ggtggggccagggggga

SEQ ID NO: 157262 - DNA, 17 bp, synthetic construct
  source 1..17: mol_type = other DNA
cggtggggccagggggg

SEQ ID NO: 157263 - DNA, 17 bp, synthetic construct
  source 1..17: mol_type = other DNA
tcggtggggccaggggg

SEQ ID NO: 157264 - DNA, 17 bp, synthetic construct
  source 1..17: mol_type = other DNA
gtcggtggggccagggg

SEQ ID NO: 157265 - DNA, 17 bp, synthetic construct
  source 1..17: mol_type = other DNA
ggtcggtggggccaggg

SEQ ID NO: 157266 - DNA, 17 bp, synthetic construct
  source 1..17: mol_type = other DNA
tggtcggtggggccagg

SEQ ID NO: 157267 - DNA, 17 bp, synthetic construct
  source 1..17: mol_type = other DNA
gtggtcggtggggccag

SEQ ID NO: 157268 - DNA, 17 bp, synthetic construct
  source 1..17: mol_type = other DNA
tgtggtcggtggggcca

SEQ ID NO: 157269 - DNA, 17 bp, synthetic construct
  source 1..17: mol_type = other DNA
ctgtggtcggtggggcc

SEQ ID NO: 157270 - DNA, 17 bp, synthetic construct
  source 1..17: mol_type = other DNA
gctgtggtcggtggggc

SEQ ID NO: 157271 - DNA, 17 bp, synthetic construct
  source 1..17: mol_type = other DNA
ggctgtggtcggtgggg

SEQ ID NO: 157272 - DNA, 17 bp, synthetic construct
  source 1..17: mol_type = other DNA
tggctgtggtcggtggg

SEQ ID NO: 157273 - DNA, 17 bp, synthetic construct
  source 1..17: mol_type = other DNA
ttggctgtggtcggtgg

SEQ ID NO: 157274 - DNA, 17 bp, synthetic construct
  source 1..17: mol_type = other DNA
cttggctgtggtcggtg

SEQ ID NO: 157275 - DNA, 17 bp, synthetic construct
  source 1..17: mol_type = other DNA
acttggctgtggtcggt

SEQ ID NO: 157276 - DNA, 17 bp, synthetic construct
  source 1..17: mol_type = other DNA
tacttggctgtggtcgg

SEQ ID NO: 157277 - DNA, 17 bp, synthetic construct
  source 1..17: mol_type = other DNA
gtacttggctgtggtcg

SEQ ID NO: 157278 - DNA, 17 bp, synthetic construct
  source 1..17: mol_type = other DNA
tgtacttggctgtggtc

SEQ ID NO: 157279 - DNA, 17 bp, synthetic construct
  source 1..17: mol_type = other DNA
atgtacttggctgtggt

SEQ ID NO: 157280 - DNA, 17 bp, synthetic construct
  source 1..17: mol_type = other DNA
catgtacttggctgtgg

SEQ ID NO: 157281 - DNA, 17 bp, synthetic construct
  source 1..17: mol_type = other DNA
gcatgtacttggctgtg

SEQ ID NO: 157282 - DNA, 17 bp, synthetic construct
  source 1..17: mol_type = other DNA
tgcatgtacttggctgt

SEQ ID NO: 157283 - DNA, 17 bp, synthetic construct
  source 1..17: mol_type = other DNA
ctgcatgtacttggctg

SEQ ID NO: 157284 - DNA, 17 bp, synthetic construct
  source 1..17: mol_type = other DNA
tctgcatgtacttggct

SEQ ID NO: 157285 - DNA, 17 bp, synthetic construct
  source 1..17: mol_type = other DNA
ttctgcatgtacttggc

SEQ ID NO: 157286 - DNA, 17 bp, synthetic construct
  source 1..17: mol_type = other DNA
gttctgcatgtacttgg

SEQ ID NO: 157287 - DNA, 17 bp, synthetic construct
  source 1..17: mol_type = other DNA
agttctgcatgtacttg

SEQ ID NO: 157288 - DNA, 17 bp, synthetic construct
  source 1..17: mol_type = other DNA
cagttctgcatgtactt

SEQ ID NO: 157289 - DNA, 17 bp, synthetic construct
  source 1..17: mol_type = other DNA
gcagttctgcatgtact

SEQ ID NO: 157290 - DNA, 17 bp, synthetic construct
  source 1..17: mol_type = other DNA
ggcagttctgcatgtac

SEQ ID NO: 157291 - DNA, 17 bp, synthetic construct
  source 1..17: mol_type = other DNA
gggcagttctgcatgta

SEQ ID NO: 157292 - DNA, 17 bp, synthetic construct
  source 1..17: mol_type = other DNA
ggggcagttctgcatgt

SEQ ID NO: 157293 - DNA, 17 bp, synthetic construct
  source 1..17: mol_type = other DNA
tggggcagttctgcatg

SEQ ID NO: 157294 - DNA, 17 bp, synthetic construct
  source 1..17: mol_type = other DNA
ttggggcagttctgcat

SEQ ID NO: 157295 - DNA, 17 bp, synthetic construct
  source 1..17: mol_type = other DNA
cttggggcagttctgca

SEQ ID NO: 157296 - DNA, 17 bp, synthetic construct
  source 1..17: mol_type = other DNA
acttggggcagttctgc

SEQ ID NO: 157297 - DNA, 17 bp, synthetic construct
  source 1..17: mol_type = other DNA
gacttggggcagttctg

SEQ ID NO: 157298 - DNA, 17 bp, synthetic construct
  source 1..17: mol_type = other DNA
ggacttggggcagttct

SEQ ID NO: 157299 - DNA, 17 bp, synthetic construct
  source 1..17: mol_type = other DNA
gggacttggggcagttc

SEQ ID NO: 157300 - DNA, 17 bp, synthetic construct
  source 1..17: mol_type = other DNA
tgggacttggggcagtt

SEQ ID NO: 157301 - DNA, 17 bp, synthetic construct
  source 1..17: mol_type = other DNA
ctgggacttggggcagt

SEQ ID NO: 157302 - DNA, 17 bp, synthetic construct
  source 1..17: mol_type = other DNA
gctgggacttggggcag

SEQ ID NO: 157303 - DNA, 17 bp, synthetic construct
  source 1..17: mol_type = other DNA
cgctgggacttggggca

SEQ ID NO: 157304 - DNA, 17 bp, synthetic construct
  source 1..17: mol_type = other DNA
gcgctgggacttggggc

SEQ ID NO: 157305 - DNA, 17 bp, synthetic construct
  source 1..17: mol_type = other DNA
agcgctgggacttgggg

SEQ ID NO: 157306 - DNA, 17 bp, synthetic construct
  source 1..17: mol_type = other DNA
tagcgctgggacttggg

SEQ ID NO: 157307 - DNA, 17 bp, synthetic construct
  source 1..17: mol_type = other DNA
gtagcgctgggacttgg

SEQ ID NO: 157308 - DNA, 17 bp, synthetic construct
  source 1..17: mol_type = other DNA
cgtagcgctgggacttg

SEQ ID NO: 157309 - DNA, 17 bp, synthetic construct
  source 1..17: mol_type = other DNA
gcgtagcgctgggactt

SEQ ID NO: 157310 - DNA, 17 bp, synthetic construct
  source 1..17: mol_type = other DNA
ggcgtagcgctgggact

SEQ ID NO: 157311 - DNA, 17 bp, synthetic construct
  source 1..17: mol_type = other DNA
aggcgtagcgctgggac

SEQ ID NO: 157312 - DNA, 17 bp, synthetic construct
  source 1..17: mol_type = other DNA
taggcgtagcgctggga

SEQ ID NO: 157313 - DNA, 17 bp, synthetic construct
  source 1..17: mol_type = other DNA
gtaggcgtagcgctggg

SEQ ID NO: 157314 - DNA, 17 bp, synthetic construct
  source 1..17: mol_type = other DNA
cgtaggcgtagcgctgg

SEQ ID NO: 157315 - DNA, 17 bp, synthetic construct
  source 1..17: mol_type = other DNA
acgtaggcgtagcgctg

SEQ ID NO: 157316 - DNA, 17 bp, synthetic construct
  source 1..17: mol_type = other DNA
cacgtaggcgtagcgct

SEQ ID NO: 157317 - DNA, 17 bp, synthetic construct
  source 1..17: mol_type = other DNA
ccacgtaggcgtagcgc

SEQ ID NO: 157318 - DNA, 17 bp, synthetic construct
  source 1..17: mol_type = other DNA
accacgtaggcgtagcg

SEQ ID NO: 157319 - DNA, 17 bp, synthetic construct
  source 1..17: mol_type = other DNA
caccacgtaggcgtagc

SEQ ID NO: 157320 - DNA, 17 bp, synthetic construct
  source 1..17: mol_type = other DNA
ccaccacgtaggcgtag

SEQ ID NO: 157321 - DNA, 17 bp, synthetic construct
  source 1..17: mol_type = other DNA
tccaccacgtaggcgta

SEQ ID NO: 157322 - DNA, 17 bp, synthetic construct
  source 1..17: mol_type = other DNA
atccaccacgtaggcgt

SEQ ID NO: 157323 - DNA, 17 bp, synthetic construct
  source 1..17: mol_type = other DNA
catccaccacgtaggcg

SEQ ID NO: 157324 - DNA, 17 bp, synthetic construct
  source 1..17: mol_type = other DNA
gcatccaccacgtaggc

SEQ ID NO: 157325 - DNA, 17 bp, synthetic construct
  source 1..17: mol_type = other DNA
ggcatccaccacgtagg

SEQ ID NO: 157326 - DNA, 17 bp, synthetic construct
  source 1..17: mol_type = other DNA
aggcatccaccacgtag

SEQ ID NO: 157327 - DNA, 17 bp, synthetic construct
  source 1..17: mol_type = other DNA
caggcatccaccacgta

SEQ ID NO: 157328 - DNA, 17 bp, synthetic construct
  source 1..17: mol_type = other DNA
gcaggcatccaccacgt

SEQ ID NO: 157329 - DNA, 17 bp, synthetic construct
  source 1..17: mol_type = other DNA
ggcaggcatccaccacg

SEQ ID NO: 157330 - DNA, 17 bp, synthetic construct
  source 1..17: mol_type = other DNA
tggcaggcatccaccac

SEQ ID NO: 157331 - DNA, 17 bp, synthetic construct
  source 1..17: mol_type = other DNA
ctggcaggcatccacca

SEQ ID NO: 157332 - DNA, 17 bp, synthetic construct
  source 1..17: mol_type = other DNA
gctggcaggcatccacc

SEQ ID NO: 157333 - DNA, 17 bp, synthetic construct
  source 1..17: mol_type = other DNA
ggctggcaggcatccac

SEQ ID NO: 157334 - DNA, 17 bp, synthetic construct
  source 1..17: mol_type = other DNA
gggctggcaggcatcca

SEQ ID NO: 157335 - DNA, 17 bp, synthetic construct
  source 1..17: mol_type = other DNA
tgggctggcaggcatcc

SEQ ID NO: 157336 - DNA, 17 bp, synthetic construct
  source 1..17: mol_type = other DNA
gtgggctggcaggcatc

SEQ ID NO: 157337 - DNA, 17 bp, synthetic construct
  source 1..17: mol_type = other DNA
agtgggctggcaggcat

SEQ ID NO: 157338 - DNA, 17 bp, synthetic construct
  source 1..17: mol_type = other DNA
aagtgggctggcaggca

SEQ ID NO: 157339 - DNA, 17 bp, synthetic construct
  source 1..17: mol_type = other DNA
caagtgggctggcaggc

SEQ ID NO: 157340 - DNA, 17 bp, synthetic construct
  source 1..17: mol_type = other DNA
gcaagtgggctggcagg

SEQ ID NO: 157341 - DNA, 17 bp, synthetic construct
  source 1..17: mol_type = other DNA
ggcaagtgggctggcag

SEQ ID NO: 157342 - DNA, 17 bp, synthetic construct
  source 1..17: mol_type = other DNA
cggcaagtgggctggca

SEQ ID NO: 157343 - DNA, 17 bp, synthetic construct
  source 1..17: mol_type = other DNA
gcggcaagtgggctggc

SEQ ID NO: 157344 - DNA, 17 bp, synthetic construct
  source 1..17: mol_type = other DNA
cgcggcaagtgggctgg

SEQ ID NO: 157345 - DNA, 17 bp, synthetic construct
  source 1..17: mol_type = other DNA
ccgcggcaagtgggctg

SEQ ID NO: 157346 - DNA, 17 bp, synthetic construct
  source 1..17: mol_type = other DNA
gccgcggcaagtgggct

SEQ ID NO: 157347 - DNA, 17 bp, synthetic construct
  source 1..17: mol_type = other DNA
ggccgcggcaagtgggc

SEQ ID NO: 157348 - DNA, 17 bp, synthetic construct
  source 1..17: mol_type = other DNA
aggccgcggcaagtggg

SEQ ID NO: 157349 - DNA, 17 bp, synthetic construct
  source 1..17: mol_type = other DNA
caggccgcggcaagtgg

SEQ ID NO: 157350 - DNA, 17 bp, synthetic construct
  source 1..17: mol_type = other DNA
tcaggccgcggcaagtg

SEQ ID NO: 157351 - DNA, 17 bp, synthetic construct
  source 1..17: mol_type = other DNA
ctcaggccgcggcaagt

SEQ ID NO: 157352 - DNA, 17 bp, synthetic construct
  source 1..17: mol_type = other DNA
actcaggccgcggcaag

SEQ ID NO: 157353 - DNA, 17 bp, synthetic construct
  source 1..17: mol_type = other DNA
cactcaggccgcggcaa

SEQ ID NO: 157354 - DNA, 17 bp, synthetic construct
  source 1..17: mol_type = other DNA
tcactcaggccgcggca

SEQ ID NO: 157355 - DNA, 17 bp, synthetic construct
  source 1..17: mol_type = other DNA
ctcactcaggccgcggc

SEQ ID NO: 157356 - DNA, 17 bp, synthetic construct
  source 1..17: mol_type = other DNA
cctcactcaggccgcgg

SEQ ID NO: 157357 - DNA, 17 bp, synthetic construct
  source 1..17: mol_type = other DNA
gcctcactcaggccgcg

SEQ ID NO: 157358 - DNA, 17 bp, synthetic construct
  source 1..17: mol_type = other DNA
ggcctcactcaggccgc

SEQ ID NO: 157359 - DNA, 17 bp, synthetic construct
  source 1..17: mol_type = other DNA
cggcctcactcaggccg

SEQ ID NO: 157360 - DNA, 17 bp, synthetic construct
  source 1..17: mol_type = other DNA
tcggcctcactcaggcc

SEQ ID NO: 157361 - DNA, 17 bp, synthetic construct
  source 1..17: mol_type = other DNA
gtcggcctcactcaggc

SEQ ID NO: 157362 - DNA, 17 bp, synthetic construct
  source 1..17: mol_type = other DNA
cgtcggcctcactcagg

SEQ ID NO: 157363 - DNA, 17 bp, synthetic construct
  source 1..17: mol_type = other DNA
acgtcggcctcactcag

SEQ ID NO: 157364 - DNA, 17 bp, synthetic construct
  source 1..17: mol_type = other DNA
gacgtcggcctcactca

SEQ ID NO: 157365 - DNA, 17 bp, synthetic construct
  source 1..17: mol_type = other DNA
tgacgtcggcctcactc

SEQ ID NO: 157366 - DNA, 17 bp, synthetic construct
  source 1..17: mol_type = other DNA
gtgacgtcggcctcact

SEQ ID NO: 157367 - DNA, 17 bp, synthetic construct
  source 1..17: mol_type = other DNA
ggtgacgtcggcctcac

SEQ ID NO: 157368 - DNA, 17 bp, synthetic construct
  source 1..17: mol_type = other DNA
aggtgacgtcggcctca

SEQ ID NO: 157369 - DNA, 17 bp, synthetic construct
  source 1..17: mol_type = other DNA
caggtgacgtcggcctc

SEQ ID NO: 157370 - DNA, 17 bp, synthetic construct
  source 1..17: mol_type = other DNA
gcaggtgacgtcggcct

SEQ ID NO: 157371 - DNA, 17 bp, synthetic construct
  source 1..17: mol_type = other DNA
tgcaggtgacgtcggcc

SEQ ID NO: 157372 - DNA, 17 bp, synthetic construct
  source 1..17: mol_type = other DNA
ctgcaggtgacgtcggc

SEQ ID NO: 157373 - DNA, 17 bp, synthetic construct
  source 1..17: mol_type = other DNA
gctgcaggtgacgtcgg

SEQ ID NO: 157374 - DNA, 17 bp, synthetic construct
  source 1..17: mol_type = other DNA
cgctgcaggtgacgtcg

SEQ ID NO: 157375 - DNA, 17 bp, synthetic construct
  source 1..17: mol_type = other DNA
acgctgcaggtgacgtc

SEQ ID NO: 157376 - DNA, 17 bp, synthetic construct
  source 1..17: mol_type = other DNA
aacgctgcaggtgacgt

SEQ ID NO: 157377 - DNA, 17 bp, synthetic construct
  source 1..17: mol_type = other DNA
aaacgctgcaggtgacg

SEQ ID NO: 157378 - DNA, 17 bp, synthetic construct
  source 1..17: mol_type = other DNA
gaaacgctgcaggtgac

SEQ ID NO: 157379 - DNA, 17 bp, synthetic construct
  source 1..17: mol_type = other DNA
ggaaacgctgcaggtga

SEQ ID NO: 157380 - DNA, 17 bp, synthetic construct
  source 1..17: mol_type = other DNA
aggaaacgctgcaggtg

SEQ ID NO: 157381 - DNA, 17 bp, synthetic construct
  source 1..17: mol_type = other DNA
aaggaaacgctgcaggt

SEQ ID NO: 157382 - DNA, 17 bp, synthetic construct
  source 1..17: mol_type = other DNA
gaaggaaacgctgcagg

SEQ ID NO: 157383 - DNA, 17 bp, synthetic construct
  source 1..17: mol_type = other DNA
cgaaggaaacgctgcag

SEQ ID NO: 157384 - DNA, 17 bp, synthetic construct
  source 1..17: mol_type = other DNA
acgaaggaaacgctgca

SEQ ID NO: 157385 - DNA, 17 bp, synthetic construct
  source 1..17: mol_type = other DNA
cacgaaggaaacgctgc

SEQ ID NO: 157386 - DNA, 17 bp, synthetic construct
  source 1..17: mol_type = other DNA
gcacgaaggaaacgctg

SEQ ID NO: 157387 - DNA, 17 bp, synthetic construct
  source 1..17: mol_type = other DNA
ggcacgaaggaaacgct

SEQ ID NO: 157388 - DNA, 17 bp, synthetic construct
  source 1..17: mol_type = other DNA
aggcacgaaggaaacgc

SEQ ID NO: 157389 - DNA, 17 bp, synthetic construct
  source 1..17: mol_type = other DNA
caggcacgaaggaaacg

SEQ ID NO: 157390 - DNA, 17 bp, synthetic construct
  source 1..17: mol_type = other DNA
acaggcacgaaggaaac

SEQ ID NO: 157391 - DNA, 17 bp, synthetic construct
  source 1..17: mol_type = other DNA
cacaggcacgaaggaaa

SEQ ID NO: 157392 - DNA, 17 bp, synthetic construct
  source 1..17: mol_type = other DNA
ccacaggcacgaaggaa

SEQ ID NO: 157393 - DNA, 17 bp, synthetic construct
  source 1..17: mol_type = other DNA
tccacaggcacgaagga

SEQ ID NO: 157394 - DNA, 17 bp, synthetic construct
  source 1..17: mol_type = other DNA
gtccacaggcacgaagg

SEQ ID NO: 157395 - DNA, 17 bp, synthetic construct
  source 1..17: mol_type = other DNA
cgtccacaggcacgaag

SEQ ID NO: 157396 - DNA, 17 bp, synthetic construct
  source 1..17: mol_type = other DNA
ccgtccacaggcacgaa

SEQ ID NO: 157397 - DNA, 17 bp, synthetic construct
  source 1..17: mol_type = other DNA
gccgtccacaggcacga

SEQ ID NO: 157398 - DNA, 17 bp, synthetic construct
  source 1..17: mol_type = other DNA
agccgtccacaggcacg

SEQ ID NO: 157399 - DNA, 17 bp, synthetic construct
  source 1..17: mol_type = other DNA
cagccgtccacaggcac

SEQ ID NO: 157400 - DNA, 17 bp, synthetic construct
  source 1..17: mol_type = other DNA
gcagccgtccacaggca

SEQ ID NO: 157401 - DNA, 17 bp, synthetic construct
  source 1..17: mol_type = other DNA
tgcagccgtccacaggc

SEQ ID NO: 157402 - DNA, 17 bp, synthetic construct
  source 1..17: mol_type = other DNA
gtgcagccgtccacagg

SEQ ID NO: 157403 - DNA, 17 bp, synthetic construct
  source 1..17: mol_type = other DNA
ggtgcagccgtccacag

SEQ ID NO: 157404 - DNA, 17 bp, synthetic construct
  source 1..17: mol_type = other DNA
aggtgcagccgtccaca

SEQ ID NO: 157405 - DNA, 17 bp, synthetic construct
  source 1..17: mol_type = other DNA
caggtgcagccgtccac

SEQ ID NO: 157406 - DNA, 17 bp, synthetic construct
  source 1..17: mol_type = other DNA
gcaggtgcagccgtcca

SEQ ID NO: 157407 - DNA, 17 bp, synthetic construct
  source 1..17: mol_type = other DNA
ggcaggtgcagccgtcc

SEQ ID NO: 157408 - DNA, 17 bp, synthetic construct
  source 1..17: mol_type = other DNA
gggcaggtgcagccgtc

SEQ ID NO: 157409 - DNA, 17 bp, synthetic construct
  source 1..17: mol_type = other DNA
ggggcaggtgcagccgt

SEQ ID NO: 157410 - DNA, 17 bp, synthetic construct
  source 1..17: mol_type = other DNA
cggggcaggtgcagccg

SEQ ID NO: 157411 - DNA, 17 bp, synthetic construct
  source 1..17: mol_type = other DNA
gcggggcaggtgcagcc

SEQ ID NO: 157412 - DNA, 17 bp, synthetic construct
  source 1..17: mol_type = other DNA
cgcggggcaggtgcagc

SEQ ID NO: 157413 - DNA, 17 bp, synthetic construct
  source 1..17: mol_type = other DNA
ccgcggggcaggtgcag

SEQ ID NO: 157414 - DNA, 17 bp, synthetic construct
  source 1..17: mol_type = other DNA
cccgcggggcaggtgca

SEQ ID NO: 157415 - DNA, 17 bp, synthetic construct
  source 1..17: mol_type = other DNA
gcccgcggggcaggtgc

SEQ ID NO: 157416 - DNA, 17 bp, synthetic construct
  source 1..17: mol_type = other DNA
tgcccgcggggcaggtg

SEQ ID NO: 157417 - DNA, 17 bp, synthetic construct
  source 1..17: mol_type = other DNA
gtgcccgcggggcaggt

SEQ ID NO: 157418 - DNA, 17 bp, synthetic construct
  source 1..17: mol_type = other DNA
ggtgcccgcggggcagg

SEQ ID NO: 157419 - DNA, 17 bp, synthetic construct
  source 1..17: mol_type = other DNA
aggtgcccgcggggcag

SEQ ID NO: 157420 - DNA, 17 bp, synthetic construct
  source 1..17: mol_type = other DNA
aaggtgcccgcggggca

SEQ ID NO: 157421 - DNA, 17 bp, synthetic construct
  source 1..17: mol_type = other DNA
gaaggtgcccgcggggc

SEQ ID NO: 157422 - DNA, 17 bp, synthetic construct
  source 1..17: mol_type = other DNA
ggaaggtgcccgcgggg

SEQ ID NO: 157423 - DNA, 17 bp, synthetic construct
  source 1..17: mol_type = other DNA
aggaaggtgcccgcggg

SEQ ID NO: 157424 - DNA, 17 bp, synthetic construct
  source 1..17: mol_type = other DNA
gaggaaggtgcccgcgg

SEQ ID NO: 157425 - DNA, 17 bp, synthetic construct
  source 1..17: mol_type = other DNA
tgaggaaggtgcccgcg

SEQ ID NO: 157426 - DNA, 17 bp, synthetic construct
  source 1..17: mol_type = other DNA
ttgaggaaggtgcccgc

SEQ ID NO: 157427 - DNA, 17 bp, synthetic construct
  source 1..17: mol_type = other DNA
attgaggaaggtgcccg

SEQ ID NO: 157428 - DNA, 17 bp, synthetic construct
  source 1..17: mol_type = other DNA
cattgaggaaggtgccc

SEQ ID NO: 157429 - DNA, 17 bp, synthetic construct
  source 1..17: mol_type = other DNA
tcattgaggaaggtgcc

SEQ ID NO: 157430 - DNA, 17 bp, synthetic construct
  source 1..17: mol_type = other DNA
gtcattgaggaaggtgc

SEQ ID NO: 157431 - DNA, 17 bp, synthetic construct
  source 1..17: mol_type = other DNA
cgtcattgaggaaggtg

SEQ ID NO: 157432 - DNA, 17 bp, synthetic construct
  source 1..17: mol_type = other DNA
gcgtcattgaggaaggt

SEQ ID NO: 157433 - DNA, 17 bp, synthetic construct
  source 1..17: mol_type = other DNA
cgcgtcattgaggaagg

SEQ ID NO: 157434 - DNA, 17 bp, synthetic construct
  source 1..17: mol_type = other DNA
ccgcgtcattgaggaag

SEQ ID NO: 157435 - DNA, 17 bp, synthetic construct
  source 1..17: mol_type = other DNA
cccgcgtcattgaggaa

SEQ ID NO: 157436 - DNA, 17 bp, synthetic construct
  source 1..17: mol_type = other DNA
gcccgcgtcattgagga

SEQ ID NO: 157437 - DNA, 17 bp, synthetic construct
  source 1..17: mol_type = other DNA
cgcccgcgtcattgagg

SEQ ID NO: 157438 - DNA, 17 bp, synthetic construct
  source 1..17: mol_type = other DNA
gcgcccgcgtcattgag

SEQ ID NO: 157439 - DNA, 17 bp, synthetic construct
  source 1..17: mol_type = other DNA
ggcgcccgcgtcattga

SEQ ID NO: 157440 - DNA, 17 bp, synthetic construct
  source 1..17: mol_type = other DNA
aggcgcccgcgtcattg

SEQ ID NO: 157441 - DNA, 17 bp, synthetic construct
  source 1..17: mol_type = other DNA
caggcgcccgcgtcatt

SEQ ID NO: 157442 - DNA, 17 bp, synthetic construct
  source 1..17: mol_type = other DNA
acaggcgcccgcgtcat

SEQ ID NO: 157443 - DNA, 17 bp, synthetic construct
  source 1..17: mol_type = other DNA
cacaggcgcccgcgtca

SEQ ID NO: 157444 - DNA, 17 bp, synthetic construct
  source 1..17: mol_type = other DNA
acacaggcgcccgcgtc

SEQ ID NO: 157445 - DNA, 17 bp, synthetic construct
  source 1..17: mol_type = other DNA
cacacaggcgcccgcgt

SEQ ID NO: 157446 - DNA, 17 bp, synthetic construct
  source 1..17: mol_type = other DNA
gcacacaggcgcccgcg

SEQ ID NO: 157447 - DNA, 17 bp, synthetic construct
  source 1..17: mol_type = other DNA
ggcacacaggcgcccgc

SEQ ID NO: 157448 - DNA, 17 bp, synthetic construct
  source 1..17: mol_type = other DNA
gggcacacaggcgcccg

SEQ ID NO: 157449 - DNA, 17 bp, synthetic construct
  source 1..17: mol_type = other DNA
cgggcacacaggcgccc

SEQ ID NO: 157450 - DNA, 17 bp, synthetic construct
  source 1..17: mol_type = other DNA
gcgggcacacaggcgcc

SEQ ID NO: 157451 - DNA, 17 bp, synthetic construct
  source 1..17: mol_type = other DNA
ggcgggcacacaggcgc

SEQ ID NO: 157452 - DNA, 17 bp, synthetic construct
  source 1..17: mol_type = other DNA
gggcgggcacacaggcg

SEQ ID NO: 157453 - DNA, 17 bp, synthetic construct
  source 1..17: mol_type = other DNA
tgggcgggcacacaggc

SEQ ID NO: 157454 - DNA, 17 bp, synthetic construct
  source 1..17: mol_type = other DNA
ctgggcgggcacacagg

SEQ ID NO: 157455 - DNA, 17 bp, synthetic construct
  source 1..17: mol_type = other DNA
cctgggcgggcacacag

SEQ ID NO: 157456 - DNA, 17 bp, synthetic construct
  source 1..17: mol_type = other DNA
tcctgggcgggcacaca

SEQ ID NO: 157457 - DNA, 17 bp, synthetic construct
  source 1..17: mol_type = other DNA
ctcctgggcgggcacac

SEQ ID NO: 157458 - DNA, 17 bp, synthetic construct
  source 1..17: mol_type = other DNA
actcctgggcgggcaca

SEQ ID NO: 157459 - DNA, 17 bp, synthetic construct
  source 1..17: mol_type = other DNA
cactcctgggcgggcac

SEQ ID NO: 157460 - DNA, 17 bp, synthetic construct
  source 1..17: mol_type = other DNA
gcactcctgggcgggca

SEQ ID NO: 157461 - DNA, 17 bp, synthetic construct
  source 1..17: mol_type = other DNA
ggcactcctgggcgggc

SEQ ID NO: 157462 - DNA, 17 bp, synthetic construct
  source 1..17: mol_type = other DNA
gggcactcctgggcggg

SEQ ID NO: 157463 - DNA, 17 bp, synthetic construct
  source 1..17: mol_type = other DNA
ggggcactcctgggcgg

SEQ ID NO: 157464 - DNA, 17 bp, synthetic construct
  source 1..17: mol_type = other DNA
aggggcactcctgggcg

SEQ ID NO: 157465 - DNA, 17 bp, synthetic construct
  source 1..17: mol_type = other DNA
caggggcactcctgggc

SEQ ID NO: 157466 - DNA, 17 bp, synthetic construct
  source 1..17: mol_type = other DNA
gcaggggcactcctggg

SEQ ID NO: 157467 - DNA, 17 bp, synthetic construct
  source 1..17: mol_type = other DNA
agcaggggcactcctgg

SEQ ID NO: 157468 - DNA, 17 bp, synthetic construct
  source 1..17: mol_type = other DNA
tagcaggggcactcctg

SEQ ID NO: 157469 - DNA, 17 bp, synthetic construct
  source 1..17: mol_type = other DNA
gtagcaggggcactcct

SEQ ID NO: 157470 - DNA, 17 bp, synthetic construct
  source 1..17: mol_type = other DNA
cgtagcaggggcactcc

SEQ ID NO: 157471 - DNA, 17 bp, synthetic construct
  source 1..17: mol_type = other DNA
gcgtagcaggggcactc

SEQ ID NO: 157472 - DNA, 17 bp, synthetic construct
  source 1..17: mol_type = other DNA
agcgtagcaggggcact

SEQ ID NO: 157473 - DNA, 17 bp, synthetic construct
  source 1..17: mol_type = other DNA
gagcgtagcaggggcac

SEQ ID NO: 157474 - DNA, 17 bp, synthetic construct
  source 1..17: mol_type = other DNA
tgagcgtagcaggggca

SEQ ID NO: 157475 - DNA, 17 bp, synthetic construct
  source 1..17: mol_type = other DNA
gtgagcgtagcaggggc

SEQ ID NO: 157476 - DNA, 17 bp, synthetic construct
  source 1..17: mol_type = other DNA
cgtgagcgtagcagggg

SEQ ID NO: 157477 - DNA, 17 bp, synthetic construct
  source 1..17: mol_type = other DNA
ccgtgagcgtagcaggg

SEQ ID NO: 157478 - DNA, 17 bp, synthetic construct
  source 1..17: mol_type = other DNA
gccgtgagcgtagcagg

SEQ ID NO: 157479 - DNA, 17 bp, synthetic construct
  source 1..17: mol_type = other DNA
tgccgtgagcgtagcag

SEQ ID NO: 157480 - DNA, 17 bp, synthetic construct
  source 1..17: mol_type = other DNA
gtgccgtgagcgtagca

SEQ ID NO: 157481 - DNA, 17 bp, synthetic construct
  source 1..17: mol_type = other DNA
ggtgccgtgagcgtagc

SEQ ID NO: 157482 - DNA, 17 bp, synthetic construct
  source 1..17: mol_type = other DNA
cggtgccgtgagcgtag

SEQ ID NO: 157483 - DNA, 17 bp, synthetic construct
  source 1..17: mol_type = other DNA
acggtgccgtgagcgta

SEQ ID NO: 157484 - DNA, 17 bp, synthetic construct
  source 1..17: mol_type = other DNA
cacggtgccgtgagcgt

SEQ ID NO: 157485 - DNA, 17 bp, synthetic construct
  source 1..17: mol_type = other DNA
gcacggtgccgtgagcg

SEQ ID NO: 157486 - DNA, 17 bp, synthetic construct
  source 1..17: mol_type = other DNA
agcacggtgccgtgagc

SEQ ID NO: 157487 - DNA, 17 bp, synthetic construct
  source 1..17: mol_type = other DNA
cagcacggtgccgtgag

SEQ ID NO: 157488 - DNA, 17 bp, synthetic construct
  source 1..17: mol_type = other DNA
ccagcacggtgccgtga

SEQ ID NO: 157489 - DNA, 17 bp, synthetic construct
  source 1..17: mol_type = other DNA
gccagcacggtgccgtg

SEQ ID NO: 157490 - DNA, 17 bp, synthetic construct
  source 1..17: mol_type = other DNA
agccagcacggtgccgt

SEQ ID NO: 157491 - DNA, 17 bp, synthetic construct
  source 1..17: mol_type = other DNA
gagccagcacggtgccg

SEQ ID NO: 157492 - DNA, 17 bp, synthetic construct
  source 1..17: mol_type = other DNA
ggagccagcacggtgcc

SEQ ID NO: 157493 - DNA, 17 bp, synthetic construct
  source 1..17: mol_type = other DNA
aggagccagcacggtgc

SEQ ID NO: 157494 - DNA, 17 bp, synthetic construct
  source 1..17: mol_type = other DNA
caggagccagcacggtg

SEQ ID NO: 157495 - DNA, 17 bp, synthetic construct
  source 1..17: mol_type = other DNA
ccaggagccagcacggt

SEQ ID NO: 157496 - DNA, 17 bp, synthetic construct
  source 1..17: mol_type = other DNA
tccaggagccagcacgg

SEQ ID NO: 157497 - DNA, 17 bp, synthetic construct
  source 1..17: mol_type = other DNA
ctccaggagccagcacg

SEQ ID NO: 157498 - DNA, 17 bp, synthetic construct
  source 1..17: mol_type = other DNA
tctccaggagccagcac

SEQ ID NO: 157499 - DNA, 17 bp, synthetic construct
  source 1..17: mol_type = other DNA
ctctccaggagccagca

SEQ ID NO: 157500 - DNA, 17 bp, synthetic construct
  source 1..17: mol_type = other DNA
cctctccaggagccagc

SEQ ID NO: 157501 - DNA, 17 bp, synthetic construct
  source 1..17: mol_type = other DNA
acctctccaggagccag

SEQ ID NO: 157502 - DNA, 17 bp, synthetic construct
  source 1..17: mol_type = other DNA
cacctctccaggagcca

SEQ ID NO: 157503 - DNA, 17 bp, synthetic construct
  source 1..17: mol_type = other DNA
ccacctctccaggagcc

SEQ ID NO: 157504 - DNA, 17 bp, synthetic construct
  source 1..17: mol_type = other DNA
accacctctccaggagc

SEQ ID NO: 157505 - DNA, 17 bp, synthetic construct
  source 1..17: mol_type = other DNA
caccacctctccaggag

SEQ ID NO: 157506 - DNA, 17 bp, synthetic construct
  source 1..17: mol_type = other DNA
gcaccacctctccagga

SEQ ID NO: 157507 - DNA, 17 bp, synthetic construct
  source 1..17: mol_type = other DNA
tgcaccacctctccagg

SEQ ID NO: 157508 - DNA, 17 bp, synthetic construct
  source 1..17: mol_type = other DNA
gtgcaccacctctccag

SEQ ID NO: 157509 - DNA, 17 bp, synthetic construct
  source 1..17: mol_type = other DNA
cgtgcaccacctctcca

SEQ ID NO: 157510 - DNA, 17 bp, synthetic construct
  source 1..17: mol_type = other DNA
tcgtgcaccacctctcc

SEQ ID NO: 157511 - DNA, 17 bp, synthetic construct
  source 1..17: mol_type = other DNA
gtcgtgcaccacctctc

SEQ ID NO: 157512 - DNA, 17 bp, synthetic construct
  source 1..17: mol_type = other DNA
cgtcgtgcaccacctct

SEQ ID NO: 157513 - DNA, 17 bp, synthetic construct
  source 1..17: mol_type = other DNA
tcgtcgtgcaccacctc

SEQ ID NO: 157514 - DNA, 17 bp, synthetic construct
  source 1..17: mol_type = other DNA
ctcgtcgtgcaccacct

SEQ ID NO: 157515 - DNA, 17 bp, synthetic construct
  source 1..17: mol_type = other DNA
cctcgtcgtgcaccacc

SEQ ID NO: 157516 - DNA, 17 bp, synthetic construct
  source 1..17: mol_type = other DNA
ccctcgtcgtgcaccac

SEQ ID NO: 157517 - DNA, 17 bp, synthetic construct
  source 1..17: mol_type = other DNA
gccctcgtcgtgcacca

SEQ ID NO: 157518 - DNA, 17 bp, synthetic construct
  source 1..17: mol_type = other DNA
cgccctcgtcgtgcacc

SEQ ID NO: 157519 - DNA, 17 bp, synthetic construct
  source 1..17: mol_type = other DNA
gcgccctcgtcgtgcac

SEQ ID NO: 157520 - DNA, 17 bp, synthetic construct
  source 1..17: mol_type = other DNA
ggcgccctcgtcgtgca

SEQ ID NO: 157521 - DNA, 17 bp, synthetic construct
  source 1..17: mol_type = other DNA
cggcgccctcgtcgtgc

SEQ ID NO: 157522 - DNA, 17 bp, synthetic construct
  source 1..17: mol_type = other DNA
acggcgccctcgtcgtg

SEQ ID NO: 157523 - DNA, 17 bp, synthetic construct
  source 1..17: mol_type = other DNA
cacggcgccctcgtcgt

SEQ ID NO: 157524 - DNA, 17 bp, synthetic construct
  source 1..17: mol_type = other DNA
acacggcgccctcgtcg

SEQ ID NO: 157525 - DNA, 17 bp, synthetic construct
  source 1..17: mol_type = other DNA
cacacggcgccctcgtc

SEQ ID NO: 157526 - DNA, 17 bp, synthetic construct
  source 1..17: mol_type = other DNA
ccacacggcgccctcgt

SEQ ID NO: 157527 - DNA, 17 bp, synthetic construct
  source 1..17: mol_type = other DNA
accacacggcgccctcg

SEQ ID NO: 157528 - DNA, 17 bp, synthetic construct
  source 1..17: mol_type = other DNA
taccacacggcgccctc

SEQ ID NO: 157529 - DNA, 17 bp, synthetic construct
  source 1..17: mol_type = other DNA
ttaccacacggcgccct

SEQ ID NO: 157530 - DNA, 17 bp, synthetic construct
  source 1..17: mol_type = other DNA
cttaccacacggcgccc

SEQ ID NO: 157531 - DNA, 17 bp, synthetic construct
  source 1..17: mol_type = other DNA
ccttaccacacggcgcc

SEQ ID NO: 157532 - DNA, 17 bp, synthetic construct
  source 1..17: mol_type = other DNA
cccttaccacacggcgc

SEQ ID NO: 157533 - DNA, 17 bp, synthetic construct
  source 1..17: mol_type = other DNA
acccttaccacacggcg

SEQ ID NO: 157534 - DNA, 17 bp, synthetic construct
  source 1..17: mol_type = other DNA
gacccttaccacacggc

SEQ ID NO: 157535 - DNA, 17 bp, synthetic construct
  source 1..17: mol_type = other DNA
agacccttaccacacgg

SEQ ID NO: 157536 - DNA, 17 bp, synthetic construct
  source 1..17: mol_type = other DNA
cagacccttaccacacg

SEQ ID NO: 157537 - DNA, 17 bp, synthetic construct
  source 1..17: mol_type = other DNA
ccagacccttaccacac

SEQ ID NO: 157538 - DNA, 17 bp, synthetic construct
  source 1..17: mol_type = other DNA
cccagacccttaccaca

SEQ ID NO: 157539 - DNA, 17 bp, synthetic construct
  source 1..17: mol_type = other DNA
ccccagacccttaccac

SEQ ID NO: 157540 - DNA, 17 bp, synthetic construct
  source 1..17: mol_type = other DNA
cccccagacccttacca

SEQ ID NO: 157541 - DNA, 17 bp, synthetic construct
  source 1..17: mol_type = other DNA
ccccccagacccttacc

SEQ ID NO: 157542 - DNA, 17 bp, synthetic construct
  source 1..17: mol_type = other DNA
tccccccagacccttac

SEQ ID NO: 157543 - DNA, 17 bp, synthetic construct
  source 1..17: mol_type = other DNA
ttccccccagaccctta

SEQ ID NO: 157544 - DNA, 17 bp, synthetic construct
  source 1..17: mol_type = other DNA
tttccccccagaccctt

SEQ ID NO: 157545 - DNA, 17 bp, synthetic construct
  source 1..17: mol_type = other DNA
ctttccccccagaccct

SEQ ID NO: 157546 - DNA, 17 bp, synthetic construct
  source 1..17: mol_type = other DNA
gctttccccccagaccc

SEQ ID NO: 157547 - DNA, 17 bp, synthetic construct
  source 1..17: mol_type = other DNA
tgctttccccccagacc

SEQ ID NO: 157548 - DNA, 17 bp, synthetic construct
  source 1..17: mol_type = other DNA
ctgctttccccccagac

SEQ ID NO: 157549 - DNA, 17 bp, synthetic construct
  source 1..17: mol_type = other DNA
cctgctttccccccaga

SEQ ID NO: 157550 - DNA, 17 bp, synthetic construct
  source 1..17: mol_type = other DNA
gcctgctttccccccag

SEQ ID NO: 157551 - DNA, 17 bp, synthetic construct
  source 1..17: mol_type = other DNA
ggcctgctttcccccca

SEQ ID NO: 157552 - DNA, 17 bp, synthetic construct
  source 1..17: mol_type = other DNA
gggcctgctttcccccc

SEQ ID NO: 157553 - DNA, 17 bp, synthetic construct
  source 1..17: mol_type = other DNA
ggggcctgctttccccc

SEQ ID NO: 157554 - DNA, 17 bp, synthetic construct
  source 1..17: mol_type = other DNA
gggggcctgctttcccc

SEQ ID NO: 157555 - DNA, 17 bp, synthetic construct
  source 1..17: mol_type = other DNA
ggggggcctgctttccc

SEQ ID NO: 157556 - DNA, 17 bp, synthetic construct
  source 1..17: mol_type = other DNA
tggggggcctgctttcc

SEQ ID NO: 157557 - DNA, 17 bp, synthetic construct
  source 1..17: mol_type = other DNA
ctggggggcctgctttc

SEQ ID NO: 157558 - DNA, 17 bp, synthetic construct
  source 1..17: mol_type = other DNA
cctggggggcctgcttt

SEQ ID NO: 157559 - DNA, 17 bp, synthetic construct
  source 1..17: mol_type = other DNA
acctggggggcctgctt

SEQ ID NO: 157560 - DNA, 17 bp, synthetic construct
  source 1..17: mol_type = other DNA
cacctggggggcctgct

SEQ ID NO: 157561 - DNA, 17 bp, synthetic construct
  source 1..17: mol_type = other DNA
gcacctggggggcctgc

SEQ ID NO: 157562 - DNA, 17 bp, synthetic construct
  source 1..17: mol_type = other DNA
agcacctggggggcctg

SEQ ID NO: 157563 - DNA, 17 bp, synthetic construct
  source 1..17: mol_type = other DNA
gagcacctggggggcct

SEQ ID NO: 157564 - DNA, 17 bp, synthetic construct
  source 1..17: mol_type = other DNA
ggagcacctggggggcc

SEQ ID NO: 157565 - DNA, 17 bp, synthetic construct
  source 1..17: mol_type = other DNA
aggagcacctggggggc

SEQ ID NO: 157566 - DNA, 17 bp, synthetic construct
  source 1..17: mol_type = other DNA
gaggagcacctgggggg

SEQ ID NO: 157567 - DNA, 17 bp, synthetic construct
  source 1..17: mol_type = other DNA
tgaggagcacctggggg

SEQ ID NO: 157568 - DNA, 17 bp, synthetic construct
  source 1..17: mol_type = other DNA
ctgaggagcacctgggg

SEQ ID NO: 157569 - DNA, 17 bp, synthetic construct
  source 1..17: mol_type = other DNA
tctgaggagcacctggg

SEQ ID NO: 157570 - DNA, 17 bp, synthetic construct
  source 1..17: mol_type = other DNA
ctctgaggagcacctgg

SEQ ID NO: 157571 - DNA, 17 bp, synthetic construct
  source 1..17: mol_type = other DNA
gctctgaggagcacctg

SEQ ID NO: 157572 - DNA, 17 bp, synthetic construct
  source 1..17: mol_type = other DNA
ggctctgaggagcacct

SEQ ID NO: 157573 - DNA, 17 bp, synthetic construct
  source 1..17: mol_type = other DNA
tggctctgaggagcacc

SEQ ID NO: 157574 - DNA, 17 bp, synthetic construct
  source 1..17: mol_type = other DNA
gtggctctgaggagcac

SEQ ID NO: 157575 - DNA, 17 bp, synthetic construct
  source 1..17: mol_type = other DNA
agtggctctgaggagca

SEQ ID NO: 157576 - DNA, 17 bp, synthetic construct
  source 1..17: mol_type = other DNA
aagtggctctgaggagc

SEQ ID NO: 157577 - DNA, 17 bp, synthetic construct
  source 1..17: mol_type = other DNA
gaagtggctctgaggag

SEQ ID NO: 157578 - DNA, 17 bp, synthetic construct
  source 1..17: mol_type = other DNA
ggaagtggctctgagga

SEQ ID NO: 157579 - DNA, 17 bp, synthetic construct
  source 1..17: mol_type = other DNA
gggaagtggctctgagg

SEQ ID NO: 157580 - DNA, 17 bp, synthetic construct
  source 1..17: mol_type = other DNA
cgggaagtggctctgag

SEQ ID NO: 157581 - DNA, 17 bp, synthetic construct
  source 1..17: mol_type = other DNA
gcgggaagtggctctga

SEQ ID NO: 157582 - DNA, 17 bp, synthetic construct
  source 1..17: mol_type = other DNA
ggcgggaagtggctctg

SEQ ID NO: 157583 - DNA, 17 bp, synthetic construct
  source 1..17: mol_type = other DNA
gggcgggaagtggctct

SEQ ID NO: 157584 - DNA, 17 bp, synthetic construct
  source 1..17: mol_type = other DNA
agggcgggaagtggctc

SEQ ID NO: 157585 - DNA, 17 bp, synthetic construct
  source 1..17: mol_type = other DNA
gagggcgggaagtggct

SEQ ID NO: 157586 - DNA, 17 bp, synthetic construct
  source 1..17: mol_type = other DNA
ggagggcgggaagtggc

SEQ ID NO: 157587 - DNA, 17 bp, synthetic construct
  source 1..17: mol_type = other DNA
gggagggcgggaagtgg

SEQ ID NO: 157588 - DNA, 17 bp, synthetic construct
  source 1..17: mol_type = other DNA
ggggagggcgggaagtg

SEQ ID NO: 157589 - DNA, 17 bp, synthetic construct
  source 1..17: mol_type = other DNA
cggggagggcgggaagt

SEQ ID NO: 157590 - DNA, 17 bp, synthetic construct
  source 1..17: mol_type = other DNA
tcggggagggcgggaag

SEQ ID NO: 157591 - DNA, 17 bp, synthetic construct
  source 1..17: mol_type = other DNA
ttcggggagggcgggaa

SEQ ID NO: 157592 - DNA, 17 bp, synthetic construct
  source 1..17: mol_type = other DNA
cttcggggagggcggga

SEQ ID NO: 157593 - DNA, 17 bp, synthetic construct
  source 1..17: mol_type = other DNA
ccttcggggagggcggg

SEQ ID NO: 157594 - DNA, 17 bp, synthetic construct
  source 1..17: mol_type = other DNA
gccttcggggagggcgg

SEQ ID NO: 157595 - DNA, 17 bp, synthetic construct
  source 1..17: mol_type = other DNA
agccttcggggagggcg

SEQ ID NO: 157596 - DNA, 17 bp, synthetic construct
  source 1..17: mol_type = other DNA
aagccttcggggagggc

SEQ ID NO: 157597 - DNA, 17 bp, synthetic construct
  source 1..17: mol_type = other DNA
gaagccttcggggaggg

SEQ ID NO: 157598 - DNA, 17 bp, synthetic construct
  source 1..17: mol_type = other DNA
agaagccttcggggagg

SEQ ID NO: 157599 - DNA, 17 bp, synthetic construct
  source 1..17: mol_type = other DNA
cagaagccttcggggag

SEQ ID NO: 157600 - DNA, 17 bp, synthetic construct
  source 1..17: mol_type = other DNA
acagaagccttcgggga

SEQ ID NO: 157601 - DNA, 17 bp, synthetic construct
  source 1..17: mol_type = other DNA
cacagaagccttcgggg

SEQ ID NO: 157602 - DNA, 17 bp, synthetic construct
  source 1..17: mol_type = other DNA
gcacagaagccttcggg

SEQ ID NO: 157603 - DNA, 17 bp, synthetic construct
  source 1..17: mol_type = other DNA
ggcacagaagccttcgg

SEQ ID NO: 157604 - DNA, 17 bp, synthetic construct
  source 1..17: mol_type = other DNA
aggcacagaagccttcg

SEQ ID NO: 157605 - DNA, 17 bp, synthetic construct
  source 1..17: mol_type = other DNA
gaggcacagaagccttc

SEQ ID NO: 157606 - DNA, 17 bp, synthetic construct
  source 1..17: mol_type = other DNA
ggaggcacagaagcctt

SEQ ID NO: 157607 - DNA, 17 bp, synthetic construct
  source 1..17: mol_type = other DNA
gggaggcacagaagcct

SEQ ID NO: 157608 - DNA, 17 bp, synthetic construct
  source 1..17: mol_type = other DNA
ggggaggcacagaagcc

SEQ ID NO: 157609 - DNA, 17 bp, synthetic construct
  source 1..17: mol_type = other DNA
gggggaggcacagaagc

SEQ ID NO: 157610 - DNA, 17 bp, synthetic construct
  source 1..17: mol_type = other DNA
ggggggaggcacagaag

SEQ ID NO: 157611 - DNA, 17 bp, synthetic construct
  source 1..17: mol_type = other DNA
cggggggaggcacagaa

SEQ ID NO: 157612 - DNA, 17 bp, synthetic construct
  source 1..17: mol_type = other DNA
tcggggggaggcacaga

SEQ ID NO: 157613 - DNA, 17 bp, synthetic construct
  source 1..17: mol_type = other DNA
ctcggggggaggcacag

SEQ ID NO: 157614 - DNA, 17 bp, synthetic construct
  source 1..17: mol_type = other DNA
cctcggggggaggcaca

SEQ ID NO: 157615 - DNA, 17 bp, synthetic construct
  source 1..17: mol_type = other DNA
ccctcggggggaggcac

SEQ ID NO: 157616 - DNA, 17 bp, synthetic construct
  source 1..17: mol_type = other DNA
accctcggggggaggca

SEQ ID NO: 157617 - DNA, 17 bp, synthetic construct
  source 1..17: mol_type = other DNA
aaccctcggggggaggc

SEQ ID NO: 157618 - DNA, 17 bp, synthetic construct
  source 1..17: mol_type = other DNA
gaaccctcggggggagg

SEQ ID NO: 157619 - DNA, 17 bp, synthetic construct
  source 1..17: mol_type = other DNA
agaaccctcggggggag

SEQ ID NO: 157620 - DNA, 17 bp, synthetic construct
  source 1..17: mol_type = other DNA
cagaaccctcgggggga

SEQ ID NO: 157621 - DNA, 17 bp, synthetic construct
  source 1..17: mol_type = other DNA
tcagaaccctcgggggg

SEQ ID NO: 157622 - DNA, 17 bp, synthetic construct
  source 1..17: mol_type = other DNA
ctcagaaccctcggggg

SEQ ID NO: 157623 - DNA, 17 bp, synthetic construct
  source 1..17: mol_type = other DNA
tctcagaaccctcgggg

SEQ ID NO: 157624 - DNA, 17 bp, synthetic construct
  source 1..17: mol_type = other DNA
gtctcagaaccctcggg

SEQ ID NO: 157625 - DNA, 17 bp, synthetic construct
  source 1..17: mol_type = other DNA
tgtctcagaaccctcgg

SEQ ID NO: 157626 - DNA, 17 bp, synthetic construct
  source 1..17: mol_type = other DNA
atgtctcagaaccctcg

SEQ ID NO: 157627 - DNA, 17 bp, synthetic construct
  source 1..17: mol_type = other DNA
catgtctcagaaccctc

SEQ ID NO: 157628 - DNA, 17 bp, synthetic construct
  source 1..17: mol_type = other DNA
tcatgtctcagaaccct

SEQ ID NO: 157629 - DNA, 17 bp, synthetic construct
  source 1..17: mol_type = other DNA
ctcatgtctcagaaccc

SEQ ID NO: 157630 - DNA, 17 bp, synthetic construct
  source 1..17: mol_type = other DNA
cctcatgtctcagaacc

SEQ ID NO: 157631 - DNA, 17 bp, synthetic construct
  source 1..17: mol_type = other DNA
ccctcatgtctcagaac

SEQ ID NO: 157632 - DNA, 17 bp, synthetic construct
  source 1..17: mol_type = other DNA
cccctcatgtctcagaa

SEQ ID NO: 157633 - DNA, 17 bp, synthetic construct
  source 1..17: mol_type = other DNA
gcccctcatgtctcaga

SEQ ID NO: 157634 - DNA, 17 bp, synthetic construct
  source 1..17: mol_type = other DNA
ggcccctcatgtctcag

SEQ ID NO: 157635 - DNA, 17 bp, synthetic construct
  source 1..17: mol_type = other DNA
tggcccctcatgtctca

SEQ ID NO: 157636 - DNA, 17 bp, synthetic construct
  source 1..17: mol_type = other DNA
ctggcccctcatgtctc

SEQ ID NO: 157637 - DNA, 17 bp, synthetic construct
  source 1..17: mol_type = other DNA
cctggcccctcatgtct

SEQ ID NO: 157638 - DNA, 17 bp, synthetic construct
  source 1..17: mol_type = other DNA
gcctggcccctcatgtc

SEQ ID NO: 157639 - DNA, 17 bp, synthetic construct
  source 1..17: mol_type = other DNA
agcctggcccctcatgt

SEQ ID NO: 157640 - DNA, 17 bp, synthetic construct
  source 1..17: mol_type = other DNA
cagcctggcccctcatg

SEQ ID NO: 157641 - DNA, 17 bp, synthetic construct
  source 1..17: mol_type = other DNA
ccagcctggcccctcat

SEQ ID NO: 157642 - DNA, 17 bp, synthetic construct
  source 1..17: mol_type = other DNA
cccagcctggcccctca

SEQ ID NO: 157643 - DNA, 17 bp, synthetic construct
  source 1..17: mol_type = other DNA
ccccagcctggcccctc

SEQ ID NO: 157644 - DNA, 17 bp, synthetic construct
  source 1..17: mol_type = other DNA
tccccagcctggcccct

SEQ ID NO: 157645 - DNA, 17 bp, synthetic construct
  source 1..17: mol_type = other DNA
ctccccagcctggcccc

SEQ ID NO: 157646 - DNA, 17 bp, synthetic construct
  source 1..17: mol_type = other DNA
tctccccagcctggccc

SEQ ID NO: 157647 - DNA, 17 bp, synthetic construct
  source 1..17: mol_type = other DNA
ctctccccagcctggcc

SEQ ID NO: 157648 - DNA, 17 bp, synthetic construct
  source 1..17: mol_type = other DNA
actctccccagcctggc

SEQ ID NO: 157649 - DNA, 17 bp, synthetic construct
  source 1..17: mol_type = other DNA
cactctccccagcctgg

SEQ ID NO: 157650 - DNA, 17 bp, synthetic construct
  source 1..17: mol_type = other DNA
ccactctccccagcctg

SEQ ID NO: 157651 - DNA, 17 bp, synthetic construct
  source 1..17: mol_type = other DNA
cccactctccccagcct

SEQ ID NO: 157652 - DNA, 17 bp, synthetic construct
  source 1..17: mol_type = other DNA
ccccactctccccagcc

SEQ ID NO: 157653 - DNA, 17 bp, synthetic construct
  source 1..17: mol_type = other DNA
gccccactctccccagc

SEQ ID NO: 157654 - DNA, 17 bp, synthetic construct
  source 1..17: mol_type = other DNA
tgccccactctccccag

SEQ ID NO: 157655 - DNA, 17 bp, synthetic construct
  source 1..17: mol_type = other DNA
ctgccccactctcccca

SEQ ID NO: 157656 - DNA, 17 bp, synthetic construct
  source 1..17: mol_type = other DNA
cctgccccactctcccc

SEQ ID NO: 157657 - DNA, 17 bp, synthetic construct
  source 1..17: mol_type = other DNA
ccctgccccactctccc

SEQ ID NO: 157658 - DNA, 17 bp, synthetic construct
  source 1..17: mol_type = other DNA
accctgccccactctcc

SEQ ID NO: 157659 - DNA, 17 bp, synthetic construct
  source 1..17: mol_type = other DNA
caccctgccccactctc

SEQ ID NO: 157660 - DNA, 17 bp, synthetic construct
  source 1..17: mol_type = other DNA
ccaccctgccccactct

SEQ ID NO: 157661 - DNA, 17 bp, synthetic construct
  source 1..17: mol_type = other DNA
tccaccctgccccactc

SEQ ID NO: 157662 - DNA, 17 bp, synthetic construct
  source 1..17: mol_type = other DNA
gtccaccctgccccact

SEQ ID NO: 157663 - DNA, 17 bp, synthetic construct
  source 1..17: mol_type = other DNA
ggtccaccctgccccac

SEQ ID NO: 157664 - DNA, 17 bp, synthetic construct
  source 1..17: mol_type = other DNA
gggtccaccctgcccca

SEQ ID NO: 157665 - DNA, 17 bp, synthetic construct
  source 1..17: mol_type = other DNA
tgggtccaccctgcccc

SEQ ID NO: 157666 - DNA, 17 bp, synthetic construct
  source 1..17: mol_type = other DNA
ctgggtccaccctgccc

SEQ ID NO: 157667 - DNA, 17 bp, synthetic construct
  source 1..17: mol_type = other DNA
gctgggtccaccctgcc

SEQ ID NO: 157668 - DNA, 17 bp, synthetic construct
  source 1..17: mol_type = other DNA
tgctgggtccaccctgc

SEQ ID NO: 157669 - DNA, 17 bp, synthetic construct
  source 1..17: mol_type = other DNA
gtgctgggtccaccctg

SEQ ID NO: 157670 - DNA, 17 bp, synthetic construct
  source 1..17: mol_type = other DNA
tgtgctgggtccaccct

SEQ ID NO: 157671 - DNA, 17 bp, synthetic construct
  source 1..17: mol_type = other DNA
atgtgctgggtccaccc

SEQ ID NO: 157672 - DNA, 17 bp, synthetic construct
  source 1..17: mol_type = other DNA
aatgtgctgggtccacc

SEQ ID NO: 157673 - DNA, 17 bp, synthetic construct
  source 1..17: mol_type = other DNA
gaatgtgctgggtccac

SEQ ID NO: 157674 - DNA, 17 bp, synthetic construct
  source 1..17: mol_type = other DNA
agaatgtgctgggtcca

SEQ ID NO: 157675 - DNA, 17 bp, synthetic construct
  source 1..17: mol_type = other DNA
cagaatgtgctgggtcc

SEQ ID NO: 157676 - DNA, 17 bp, synthetic construct
  source 1..17: mol_type = other DNA
tcagaatgtgctgggtc

SEQ ID NO: 157677 - DNA, 17 bp, synthetic construct
  source 1..17: mol_type = other DNA
ttcagaatgtgctgggt

SEQ ID NO: 157678 - DNA, 17 bp, synthetic construct
  source 1..17: mol_type = other DNA
cttcagaatgtgctggg

SEQ ID NO: 157679 - DNA, 17 bp, synthetic construct
  source 1..17: mol_type = other DNA
tcttcagaatgtgctgg

SEQ ID NO: 157680 - DNA, 17 bp, synthetic construct
  source 1..17: mol_type = other DNA
ctcttcagaatgtgctg

SEQ ID NO: 157681 - DNA, 17 bp, synthetic construct
  source 1..17: mol_type = other DNA
tctcttcagaatgtgct

SEQ ID NO: 157682 - DNA, 17 bp, synthetic construct
  source 1..17: mol_type = other DNA
ttctcttcagaatgtgc

SEQ ID NO: 157683 - DNA, 17 bp, synthetic construct
  source 1..17: mol_type = other DNA
tttctcttcagaatgtg

SEQ ID NO: 157684 - DNA, 17 bp, synthetic construct
  source 1..17: mol_type = other DNA
ttttctcttcagaatgt

SEQ ID NO: 157685 - DNA, 17 bp, synthetic construct
  source 1..17: mol_type = other DNA
attttctcttcagaatg

SEQ ID NO: 157686 - DNA, 17 bp, synthetic construct
  source 1..17: mol_type = other DNA
aattttctcttcagaat

SEQ ID NO: 157687 - DNA, 17 bp, synthetic construct
  source 1..17: mol_type = other DNA
gaattttctcttcagaa

SEQ ID NO: 157688 - DNA, 17 bp, synthetic construct
  source 1..17: mol_type = other DNA
ggaattttctcttcaga

SEQ ID NO: 157689 - DNA, 17 bp, synthetic construct
  source 1..17: mol_type = other DNA
gggaattttctcttcag

SEQ ID NO: 157690 - DNA, 17 bp, synthetic construct
  source 1..17: mol_type = other DNA
tgggaattttctcttca

SEQ ID NO: 157691 - DNA, 17 bp, synthetic construct
  source 1..17: mol_type = other DNA
ctgggaattttctcttc

SEQ ID NO: 157692 - DNA, 17 bp, synthetic construct
  source 1..17: mol_type = other DNA
gctgggaattttctctt

SEQ ID NO: 157693 - DNA, 17 bp, synthetic construct
  source 1..17: mol_type = other DNA
agctgggaattttctct

SEQ ID NO: 157694 - DNA, 17 bp, synthetic construct
  source 1..17: mol_type = other DNA
cagctgggaattttctc

SEQ ID NO: 157695 - DNA, 17 bp, synthetic construct
  source 1..17: mol_type = other DNA
ccagctgggaattttct

SEQ ID NO: 157696 - DNA, 17 bp, synthetic construct
  source 1..17: mol_type = other DNA
cccagctgggaattttc

SEQ ID NO: 157697 - DNA, 17 bp, synthetic construct
  source 1..17: mol_type = other DNA
tcccagctgggaatttt

SEQ ID NO: 157698 - DNA, 17 bp, synthetic construct
  source 1..17: mol_type = other DNA
ttcccagctgggaattt

SEQ ID NO: 157699 - DNA, 17 bp, synthetic construct
  source 1..17: mol_type = other DNA
tttcccagctgggaatt

SEQ ID NO: 157700 - DNA, 17 bp, synthetic construct
  source 1..17: mol_type = other DNA
ctttcccagctgggaat

SEQ ID NO: 157701 - DNA, 17 bp, synthetic construct
  source 1..17: mol_type = other DNA
tctttcccagctgggaa

SEQ ID NO: 157702 - DNA, 17 bp, synthetic construct
  source 1..17: mol_type = other DNA
ctctttcccagctggga

SEQ ID NO: 157703 - DNA, 17 bp, synthetic construct
  source 1..17: mol_type = other DNA
cctctttcccagctggg

SEQ ID NO: 157704 - DNA, 17 bp, synthetic construct
  source 1..17: mol_type = other DNA
gcctctttcccagctgg

SEQ ID NO: 157705 - DNA, 17 bp, synthetic construct
  source 1..17: mol_type = other DNA
ggcctctttcccagctg

SEQ ID NO: 157706 - DNA, 17 bp, synthetic construct
  source 1..17: mol_type = other DNA
tggcctctttcccagct

SEQ ID NO: 157707 - DNA, 17 bp, synthetic construct
  source 1..17: mol_type = other DNA
ctggcctctttcccagc

SEQ ID NO: 157708 - DNA, 17 bp, synthetic construct
  source 1..17: mol_type = other DNA
cctggcctctttcccag

SEQ ID NO: 157709 - DNA, 17 bp, synthetic construct
  source 1..17: mol_type = other DNA
tcctggcctctttccca

SEQ ID NO: 157710 - DNA, 17 bp, synthetic construct
  source 1..17: mol_type = other DNA
ctcctggcctctttccc

SEQ ID NO: 157711 - DNA, 17 bp, synthetic construct
  source 1..17: mol_type = other DNA
tctcctggcctctttcc

SEQ ID NO: 157712 - DNA, 17 bp, synthetic construct
  source 1..17: mol_type = other DNA
ctctcctggcctctttc

SEQ ID NO: 157713 - DNA, 17 bp, synthetic construct
  source 1..17: mol_type = other DNA
cctctcctggcctcttt

SEQ ID NO: 157714 - DNA, 17 bp, synthetic construct
  source 1..17: mol_type = other DNA
tcctctcctggcctctt

SEQ ID NO: 157715 - DNA, 17 bp, synthetic construct
  source 1..17: mol_type = other DNA
ctcctctcctggcctct

SEQ ID NO: 157716 - DNA, 17 bp, synthetic construct
  source 1..17: mol_type = other DNA
cctcctctcctggcctc

SEQ ID NO: 157717 - DNA, 17 bp, synthetic construct
  source 1..17: mol_type = other DNA
acctcctctcctggcct

SEQ ID NO: 157718 - DNA, 17 bp, synthetic construct
  source 1..17: mol_type = other DNA
cacctcctctcctggcc

SEQ ID NO: 157719 - DNA, 17 bp, synthetic construct
  source 1..17: mol_type = other DNA
ccacctcctctcctggc

SEQ ID NO: 157720 - DNA, 17 bp, synthetic construct
  source 1..17: mol_type = other DNA
gccacctcctctcctgg

SEQ ID NO: 157721 - DNA, 17 bp, synthetic construct
  source 1..17: mol_type = other DNA
ggccacctcctctcctg

SEQ ID NO: 157722 - DNA, 17 bp, synthetic construct
  source 1..17: mol_type = other DNA
gggccacctcctctcct

SEQ ID NO: 157723 - DNA, 17 bp, synthetic construct
  source 1..17: mol_type = other DNA
agggccacctcctctcc

SEQ ID NO: 157724 - DNA, 17 bp, synthetic construct
  source 1..17: mol_type = other DNA
cagggccacctcctctc

SEQ ID NO: 157725 - DNA, 17 bp, synthetic construct
  source 1..17: mol_type = other DNA
ccagggccacctcctct

SEQ ID NO: 157726 - DNA, 17 bp, synthetic construct
  source 1..17: mol_type = other DNA
cccagggccacctcctc

SEQ ID NO: 157727 - DNA, 17 bp, synthetic construct
  source 1..17: mol_type = other DNA
tcccagggccacctcct

SEQ ID NO: 157728 - DNA, 17 bp, synthetic construct
  source 1..17: mol_type = other DNA
ctcccagggccacctcc

SEQ ID NO: 157729 - DNA, 17 bp, synthetic construct
  source 1..17: mol_type = other DNA
cctcccagggccacctc

SEQ ID NO: 157730 - DNA, 17 bp, synthetic construct
  source 1..17: mol_type = other DNA
tcctcccagggccacct

SEQ ID NO: 157731 - DNA, 17 bp, synthetic construct
  source 1..17: mol_type = other DNA
gtcctcccagggccacc

SEQ ID NO: 157732 - DNA, 17 bp, synthetic construct
  source 1..17: mol_type = other DNA
tgtcctcccagggccac

SEQ ID NO: 157733 - DNA, 17 bp, synthetic construct
  source 1..17: mol_type = other DNA
gtgtcctcccagggcca

SEQ ID NO: 157734 - DNA, 17 bp, synthetic construct
  source 1..17: mol_type = other DNA
ggtgtcctcccagggcc

SEQ ID NO: 157735 - DNA, 17 bp, synthetic construct
  source 1..17: mol_type = other DNA
aggtgtcctcccagggc

SEQ ID NO: 157736 - DNA, 17 bp, synthetic construct
  source 1..17: mol_type = other DNA
caggtgtcctcccaggg

SEQ ID NO: 157737 - DNA, 17 bp, synthetic construct
  source 1..17: mol_type = other DNA
gcaggtgtcctcccagg

SEQ ID NO: 157738 - DNA, 17 bp, synthetic construct
  source 1..17: mol_type = other DNA
agcaggtgtcctcccag

SEQ ID NO: 157739 - DNA, 17 bp, synthetic construct
  source 1..17: mol_type = other DNA
cagcaggtgtcctccca

SEQ ID NO: 157740 - DNA, 17 bp, synthetic construct
  source 1..17: mol_type = other DNA
ccagcaggtgtcctccc

SEQ ID NO: 157741 - DNA, 17 bp, synthetic construct
  source 1..17: mol_type = other DNA
gccagcaggtgtcctcc

SEQ ID NO: 157742 - DNA, 17 bp, synthetic construct
  source 1..17: mol_type = other DNA
agccagcaggtgtcctc

SEQ ID NO: 157743 - DNA, 17 bp, synthetic construct
  source 1..17: mol_type = other DNA
cagccagcaggtgtcct

SEQ ID NO: 157744 - DNA, 17 bp, synthetic construct
  source 1..17: mol_type = other DNA
acagccagcaggtgtcc

SEQ ID NO: 157745 - DNA, 17 bp, synthetic construct
  source 1..17: mol_type = other DNA
aacagccagcaggtgtc

SEQ ID NO: 157746 - DNA, 17 bp, synthetic construct
  source 1..17: mol_type = other DNA
gaacagccagcaggtgt

SEQ ID NO: 157747 - DNA, 17 bp, synthetic construct
  source 1..17: mol_type = other DNA
agaacagccagcaggtg

SEQ ID NO: 157748 - DNA, 17 bp, synthetic construct
  source 1..17: mol_type = other DNA
gagaacagccagcaggt

SEQ ID NO: 157749 - DNA, 17 bp, synthetic construct
  source 1..17: mol_type = other DNA
tgagaacagccagcagg

SEQ ID NO: 157750 - DNA, 17 bp, synthetic construct
  source 1..17: mol_type = other DNA
ctgagaacagccagcag

SEQ ID NO: 157751 - DNA, 17 bp, synthetic construct
  source 1..17: mol_type = other DNA
gctgagaacagccagca

SEQ ID NO: 157752 - DNA, 17 bp, synthetic construct
  source 1..17: mol_type = other DNA
agctgagaacagccagc

SEQ ID NO: 157753 - DNA, 17 bp, synthetic construct
  source 1..17: mol_type = other DNA
cagctgagaacagccag

SEQ ID NO: 157754 - DNA, 17 bp, synthetic construct
  source 1..17: mol_type = other DNA
ccagctgagaacagcca

SEQ ID NO: 157755 - DNA, 17 bp, synthetic construct
  source 1..17: mol_type = other DNA
cccagctgagaacagcc

SEQ ID NO: 157756 - DNA, 17 bp, synthetic construct
  source 1..17: mol_type = other DNA
acccagctgagaacagc

SEQ ID NO: 157757 - DNA, 17 bp, synthetic construct
  source 1..17: mol_type = other DNA
gacccagctgagaacag

SEQ ID NO: 157758 - DNA, 17 bp, synthetic construct
  source 1..17: mol_type = other DNA
ggacccagctgagaaca

SEQ ID NO: 157759 - DNA, 17 bp, synthetic construct
  source 1..17: mol_type = other DNA
tggacccagctgagaac

SEQ ID NO: 157760 - DNA, 17 bp, synthetic construct
  source 1..17: mol_type = other DNA
gtggacccagctgagaa

SEQ ID NO: 157761 - DNA, 17 bp, synthetic construct
  source 1..17: mol_type = other DNA
tgtggacccagctgaga

SEQ ID NO: 157762 - DNA, 17 bp, synthetic construct
  source 1..17: mol_type = other DNA
atgtggacccagctgag

SEQ ID NO: 157763 - DNA, 17 bp, synthetic construct
  source 1..17: mol_type = other DNA
catgtggacccagctga

SEQ ID NO: 157764 - DNA, 17 bp, synthetic construct
  source 1..17: mol_type = other DNA
ccatgtggacccagctg

SEQ ID NO: 157765 - DNA, 17 bp, synthetic construct
  source 1..17: mol_type = other DNA
gccatgtggacccagct

SEQ ID NO: 157766 - DNA, 17 bp, synthetic construct
  source 1..17: mol_type = other DNA
tgccatgtggacccagc

SEQ ID NO: 157767 - DNA, 17 bp, synthetic construct
  source 1..17: mol_type = other DNA
ctgccatgtggacccag

SEQ ID NO: 157768 - DNA, 17 bp, synthetic construct
  source 1..17: mol_type = other DNA
gctgccatgtggaccca

SEQ ID NO: 157769 - DNA, 17 bp, synthetic construct
  source 1..17: mol_type = other DNA
ggctgccatgtggaccc

SEQ ID NO: 157770 - DNA, 17 bp, synthetic construct
  source 1..17: mol_type = other DNA
gggctgccatgtggacc

SEQ ID NO: 157771 - DNA, 17 bp, synthetic construct
  source 1..17: mol_type = other DNA
ggggctgccatgtggac

SEQ ID NO: 157772 - DNA, 17 bp, synthetic construct
  source 1..17: mol_type = other DNA
aggggctgccatgtgga

SEQ ID NO: 157773 - DNA, 17 bp, synthetic construct
  source 1..17: mol_type = other DNA
caggggctgccatgtgg

SEQ ID NO: 157774 - DNA, 17 bp, synthetic construct
  source 1..17: mol_type = other DNA
gcaggggctgccatgtg

SEQ ID NO: 157775 - DNA, 17 bp, synthetic construct
  source 1..17: mol_type = other DNA
ggcaggggctgccatgt

SEQ ID NO: 157776 - DNA, 17 bp, synthetic construct
  source 1..17: mol_type = other DNA
tggcaggggctgccatg

SEQ ID NO: 157777 - DNA, 17 bp, synthetic construct
  source 1..17: mol_type = other DNA
ctggcaggggctgccat

SEQ ID NO: 157778 - DNA, 17 bp, synthetic construct
  source 1..17: mol_type = other DNA
cctggcaggggctgcca

SEQ ID NO: 157779 - DNA, 17 bp, synthetic construct
  source 1..17: mol_type = other DNA
tcctggcaggggctgcc

SEQ ID NO: 157780 - DNA, 17 bp, synthetic construct
  source 1..17: mol_type = other DNA
ttcctggcaggggctgc

SEQ ID NO: 157781 - DNA, 17 bp, synthetic construct
  source 1..17: mol_type = other DNA
tttcctggcaggggctg

SEQ ID NO: 157782 - DNA, 17 bp, synthetic construct
  source 1..17: mol_type = other DNA
ctttcctggcaggggct

SEQ ID NO: 157783 - DNA, 17 bp, synthetic construct
  source 1..17: mol_type = other DNA
cctttcctggcaggggc

SEQ ID NO: 157784 - DNA, 17 bp, synthetic construct
  source 1..17: mol_type = other DNA
acctttcctggcagggg

SEQ ID NO: 157785 - DNA, 17 bp, synthetic construct
  source 1..17: mol_type = other DNA
cacctttcctggcaggg

SEQ ID NO: 157786 - DNA, 17 bp, synthetic construct
  source 1..17: mol_type = other DNA
ccacctttcctggcagg

SEQ ID NO: 157787 - DNA, 17 bp, synthetic construct
  source 1..17: mol_type = other DNA
cccacctttcctggcag

SEQ ID NO: 157788 - DNA, 17 bp, synthetic construct
  source 1..17: mol_type = other DNA
acccacctttcctggca

SEQ ID NO: 157789 - DNA, 17 bp, synthetic construct
  source 1..17: mol_type = other DNA
cacccacctttcctggc

SEQ ID NO: 157790 - DNA, 17 bp, synthetic construct
  source 1..17: mol_type = other DNA
ccacccacctttcctgg

SEQ ID NO: 157791 - DNA, 17 bp, synthetic construct
  source 1..17: mol_type = other DNA
gccacccacctttcctg

SEQ ID NO: 157792 - DNA, 17 bp, synthetic construct
  source 1..17: mol_type = other DNA
ggccacccacctttcct

SEQ ID NO: 157793 - DNA, 17 bp, synthetic construct
  source 1..17: mol_type = other DNA
gggccacccacctttcc

SEQ ID NO: 157794 - DNA, 17 bp, synthetic construct
  source 1..17: mol_type = other DNA
ggggccacccacctttc

SEQ ID NO: 157795 - DNA, 17 bp, synthetic construct
  source 1..17: mol_type = other DNA
gggggccacccaccttt

SEQ ID NO: 157796 - DNA, 17 bp, synthetic construct
  source 1..17: mol_type = other DNA
tgggggccacccacctt

SEQ ID NO: 157797 - DNA, 17 bp, synthetic construct
  source 1..17: mol_type = other DNA
gtgggggccacccacct

SEQ ID NO: 157798 - DNA, 17 bp, synthetic construct
  source 1..17: mol_type = other DNA
agtgggggccacccacc

SEQ ID NO: 157799 - DNA, 17 bp, synthetic construct
  source 1..17: mol_type = other DNA
gagtgggggccacccac

SEQ ID NO: 157800 - DNA, 17 bp, synthetic construct
  source 1..17: mol_type = other DNA
ggagtgggggccaccca

SEQ ID NO: 157801 - DNA, 17 bp, synthetic construct
  source 1..17: mol_type = other DNA
gggagtgggggccaccc

SEQ ID NO: 157802 - DNA, 17 bp, synthetic construct
  source 1..17: mol_type = other DNA
tgggagtgggggccacc

SEQ ID NO: 157803 - DNA, 17 bp, synthetic construct
  source 1..17: mol_type = other DNA
gtgggagtgggggccac

SEQ ID NO: 157804 - DNA, 17 bp, synthetic construct
  source 1..17: mol_type = other DNA
ggtgggagtgggggcca

SEQ ID NO: 157805 - DNA, 17 bp, synthetic construct
  source 1..17: mol_type = other DNA
gggtgggagtgggggcc

SEQ ID NO: 157806 - DNA, 17 bp, synthetic construct
  source 1..17: mol_type = other DNA
agggtgggagtgggggc

SEQ ID NO: 157807 - DNA, 17 bp, synthetic construct
  source 1..17: mol_type = other DNA
cagggtgggagtggggg

SEQ ID NO: 157808 - DNA, 17 bp, synthetic construct
  source 1..17: mol_type = other DNA
ccagggtgggagtgggg

SEQ ID NO: 157809 - DNA, 17 bp, synthetic construct
  source 1..17: mol_type = other DNA
cccagggtgggagtggg

SEQ ID NO: 157810 - DNA, 17 bp, synthetic construct
  source 1..17: mol_type = other DNA
gcccagggtgggagtgg

SEQ ID NO: 157811 - DNA, 17 bp, synthetic construct
  source 1..17: mol_type = other DNA
agcccagggtgggagtg

SEQ ID NO: 157812 - DNA, 17 bp, synthetic construct
  source 1..17: mol_type = other DNA
gagcccagggtgggagt

SEQ ID NO: 157813 - DNA, 17 bp, synthetic construct
  source 1..17: mol_type = other DNA
tgagcccagggtgggag

SEQ ID NO: 157814 - DNA, 17 bp, synthetic construct
  source 1..17: mol_type = other DNA
ttgagcccagggtggga

SEQ ID NO: 157815 - DNA, 17 bp, synthetic construct
  source 1..17: mol_type = other DNA
tttgagcccagggtggg

SEQ ID NO: 157816 - DNA, 17 bp, synthetic construct
  source 1..17: mol_type = other DNA
ctttgagcccagggtgg

SEQ ID NO: 157817 - DNA, 17 bp, synthetic construct
  source 1..17: mol_type = other DNA
cctttgagcccagggtg

SEQ ID NO: 157818 - DNA, 17 bp, synthetic construct
  source 1..17: mol_type = other DNA
gcctttgagcccagggt

SEQ ID NO: 157819 - DNA, 17 bp, synthetic construct
  source 1..17: mol_type = other DNA
ggcctttgagcccaggg

SEQ ID NO: 157820 - DNA, 17 bp, synthetic construct
  source 1..17: mol_type = other DNA
cggcctttgagcccagg

SEQ ID NO: 157821 - DNA, 17 bp, synthetic construct
  source 1..17: mol_type = other DNA
gcggcctttgagcccag

SEQ ID NO: 157822 - DNA, 17 bp, synthetic construct
  source 1..17: mol_type = other DNA
agcggcctttgagccca

SEQ ID NO: 157823 - DNA, 17 bp, synthetic construct
  source 1..17: mol_type = other DNA
gagcggcctttgagccc

SEQ ID NO: 157824 - DNA, 17 bp, synthetic construct
  source 1..17: mol_type = other DNA
ggagcggcctttgagcc

SEQ ID NO: 157825 - DNA, 17 bp, synthetic construct
  source 1..17: mol_type = other DNA
aggagcggcctttgagc

SEQ ID NO: 157826 - DNA, 17 bp, synthetic construct
  source 1..17: mol_type = other DNA
taggagcggcctttgag

SEQ ID NO: 157827 - DNA, 17 bp, synthetic construct
  source 1..17: mol_type = other DNA
ttaggagcggcctttga

SEQ ID NO: 157828 - DNA, 17 bp, synthetic construct
  source 1..17: mol_type = other DNA
gttaggagcggcctttg

SEQ ID NO: 157829 - DNA, 17 bp, synthetic construct
  source 1..17: mol_type = other DNA
ggttaggagcggccttt

SEQ ID NO: 157830 - DNA, 17 bp, synthetic construct
  source 1..17: mol_type = other DNA
gggttaggagcggcctt

SEQ ID NO: 157831 - DNA, 17 bp, synthetic construct
  source 1..17: mol_type = other DNA
ggggttaggagcggcct

SEQ ID NO: 157832 - DNA, 17 bp, synthetic construct
  source 1..17: mol_type = other DNA
tggggttaggagcggcc

SEQ ID NO: 157833 - DNA, 17 bp, synthetic construct
  source 1..17: mol_type = other DNA
ctggggttaggagcggc

SEQ ID NO: 157834 - DNA, 17 bp, synthetic construct
  source 1..17: mol_type = other DNA
cctggggttaggagcgg

SEQ ID NO: 157835 - DNA, 17 bp, synthetic construct
  source 1..17: mol_type = other DNA
ccctggggttaggagcg

SEQ ID NO: 157836 - DNA, 17 bp, synthetic construct
  source 1..17: mol_type = other DNA
accctggggttaggagc

SEQ ID NO: 157837 - DNA, 17 bp, synthetic construct
  source 1..17: mol_type = other DNA
gaccctggggttaggag

SEQ ID NO: 157838 - DNA, 17 bp, synthetic construct
  source 1..17: mol_type = other DNA
ggaccctggggttagga

SEQ ID NO: 157839 - DNA, 17 bp, synthetic construct
  source 1..17: mol_type = other DNA
aggaccctggggttagg

SEQ ID NO: 157840 - DNA, 17 bp, synthetic construct
  source 1..17: mol_type = other DNA
caggaccctggggttag

SEQ ID NO: 157841 - DNA, 17 bp, synthetic construct
  source 1..17: mol_type = other DNA
ccaggaccctggggtta

SEQ ID NO: 157842 - DNA, 17 bp, synthetic construct
  source 1..17: mol_type = other DNA
gccaggaccctggggtt

SEQ ID NO: 157843 - DNA, 17 bp, synthetic construct
  source 1..17: mol_type = other DNA
agccaggaccctggggt

SEQ ID NO: 157844 - DNA, 17 bp, synthetic construct
  source 1..17: mol_type = other DNA
cagccaggaccctgggg

SEQ ID NO: 157845 - DNA, 17 bp, synthetic construct
  source 1..17: mol_type = other DNA
gcagccaggaccctggg

SEQ ID NO: 157846 - DNA, 17 bp, synthetic construct
  source 1..17: mol_type = other DNA
agcagccaggaccctgg

SEQ ID NO: 157847 - DNA, 17 bp, synthetic construct
  source 1..17: mol_type = other DNA
aagcagccaggaccctg

SEQ ID NO: 157848 - DNA, 17 bp, synthetic construct
  source 1..17: mol_type = other DNA
aaagcagccaggaccct

SEQ ID NO: 157849 - DNA, 17 bp, synthetic construct
  source 1..17: mol_type = other DNA
caaagcagccaggaccc

SEQ ID NO: 157850 - DNA, 17 bp, synthetic construct
  source 1..17: mol_type = other DNA
gcaaagcagccaggacc

SEQ ID NO: 157851 - DNA, 17 bp, synthetic construct
  source 1..17: mol_type = other DNA
agcaaagcagccaggac

SEQ ID NO: 157852 - DNA, 17 bp, synthetic construct
  source 1..17: mol_type = other DNA
cagcaaagcagccagga

SEQ ID NO: 157853 - DNA, 17 bp, synthetic construct
  source 1..17: mol_type = other DNA
gcagcaaagcagccagg

SEQ ID NO: 157854 - DNA, 17 bp, synthetic construct
  source 1..17: mol_type = other DNA
ggcagcaaagcagccag

SEQ ID NO: 157855 - DNA, 17 bp, synthetic construct
  source 1..17: mol_type = other DNA
gggcagcaaagcagcca

SEQ ID NO: 157856 - DNA, 17 bp, synthetic construct
  source 1..17: mol_type = other DNA
ggggcagcaaagcagcc

SEQ ID NO: 157857 - DNA, 17 bp, synthetic construct
  source 1..17: mol_type = other DNA
gggggcagcaaagcagc

SEQ ID NO: 157858 - DNA, 17 bp, synthetic construct
  source 1..17: mol_type = other DNA
ggggggcagcaaagcag

SEQ ID NO: 157859 - DNA, 17 bp, synthetic construct
  source 1..17: mol_type = other DNA
aggggggcagcaaagca

SEQ ID NO: 157860 - DNA, 17 bp, synthetic construct
  source 1..17: mol_type = other DNA
caggggggcagcaaagc

SEQ ID NO: 157861 - DNA, 17 bp, synthetic construct
  source 1..17: mol_type = other DNA
acaggggggcagcaaag

SEQ ID NO: 157862 - DNA, 17 bp, synthetic construct
  source 1..17: mol_type = other DNA
cacaggggggcagcaaa

SEQ ID NO: 157863 - DNA, 17 bp, synthetic construct
  source 1..17: mol_type = other DNA
acacaggggggcagcaa

SEQ ID NO: 157864 - DNA, 17 bp, synthetic construct
  source 1..17: mol_type = other DNA
cacacaggggggcagca

SEQ ID NO: 157865 - DNA, 17 bp, synthetic construct
  source 1..17: mol_type = other DNA
acacacaggggggcagc

SEQ ID NO: 157866 - DNA, 17 bp, synthetic construct
  source 1..17: mol_type = other DNA
tacacacaggggggcag

SEQ ID NO: 157867 - DNA, 17 bp, synthetic construct
  source 1..17: mol_type = other DNA
atacacacaggggggca

SEQ ID NO: 157868 - DNA, 17 bp, synthetic construct
  source 1..17: mol_type = other DNA
aatacacacaggggggc

SEQ ID NO: 157869 - DNA, 17 bp, synthetic construct
  source 1..17: mol_type = other DNA
aaatacacacagggggg

SEQ ID NO: 157870 - DNA, 17 bp, synthetic construct
  source 1..17: mol_type = other DNA
taaatacacacaggggg

SEQ ID NO: 157871 - DNA, 17 bp, synthetic construct
  source 1..17: mol_type = other DNA
gtaaatacacacagggg

SEQ ID NO: 157872 - DNA, 17 bp, synthetic construct
  source 1..17: mol_type = other DNA
ggtaaatacacacaggg

SEQ ID NO: 157873 - DNA, 17 bp, synthetic construct
  source 1..17: mol_type = other DNA
gggtaaatacacacagg

SEQ ID NO: 157874 - DNA, 17 bp, synthetic construct
  source 1..17: mol_type = other DNA
tgggtaaatacacacag

SEQ ID NO: 157875 - DNA, 17 bp, synthetic construct
  source 1..17: mol_type = other DNA
atgggtaaatacacaca

SEQ ID NO: 157876 - DNA, 17 bp, synthetic construct
  source 1..17: mol_type = other DNA
catgggtaaatacacac

SEQ ID NO: 157877 - DNA, 17 bp, synthetic construct
  source 1..17: mol_type = other DNA
acatgggtaaatacaca

SEQ ID NO: 157878 - DNA, 17 bp, synthetic construct
  source 1..17: mol_type = other DNA
cacatgggtaaatacac

SEQ ID NO: 157879 - DNA, 17 bp, synthetic construct
  source 1..17: mol_type = other DNA
gcacatgggtaaataca

SEQ ID NO: 157880 - DNA, 17 bp, synthetic construct
  source 1..17: mol_type = other DNA
ggcacatgggtaaatac

SEQ ID NO: 157881 - DNA, 17 bp, synthetic construct
  source 1..17: mol_type = other DNA
aggcacatgggtaaata

SEQ ID NO: 157882 - DNA, 17 bp, synthetic construct
  source 1..17: mol_type = other DNA
gaggcacatgggtaaat

SEQ ID NO: 157883 - DNA, 17 bp, synthetic construct
  source 1..17: mol_type = other DNA
ggaggcacatgggtaaa

SEQ ID NO: 157884 - DNA, 17 bp, synthetic construct
  source 1..17: mol_type = other DNA
tggaggcacatgggtaa

SEQ ID NO: 157885 - DNA, 17 bp, synthetic construct
  source 1..17: mol_type = other DNA
ctggaggcacatgggta

SEQ ID NO: 157886 - DNA, 17 bp, synthetic construct
  source 1..17: mol_type = other DNA
cctggaggcacatgggt

SEQ ID NO: 157887 - DNA, 17 bp, synthetic construct
  source 1..17: mol_type = other DNA
ccctggaggcacatggg

SEQ ID NO: 157888 - DNA, 17 bp, synthetic construct
  source 1..17: mol_type = other DNA
cccctggaggcacatgg

SEQ ID NO: 157889 - DNA, 17 bp, synthetic construct
  source 1..17: mol_type = other DNA
tcccctggaggcacatg

SEQ ID NO: 157890 - DNA, 17 bp, synthetic construct
  source 1..17: mol_type = other DNA
atcccctggaggcacat

SEQ ID NO: 157891 - DNA, 17 bp, synthetic construct
  source 1..17: mol_type = other DNA
aatcccctggaggcaca

SEQ ID NO: 157892 - DNA, 17 bp, synthetic construct
  source 1..17: mol_type = other DNA
aaatcccctggaggcac

SEQ ID NO: 157893 - DNA, 17 bp, synthetic construct
  source 1..17: mol_type = other DNA
caaatcccctggaggca

SEQ ID NO: 157894 - DNA, 17 bp, synthetic construct
  source 1..17: mol_type = other DNA
ccaaatcccctggaggc

SEQ ID NO: 157895 - DNA, 17 bp, synthetic construct
  source 1..17: mol_type = other DNA
cccaaatcccctggagg

SEQ ID NO: 157896 - DNA, 17 bp, synthetic construct
  source 1..17: mol_type = other DNA
ccccaaatcccctggag

SEQ ID NO: 157897 - DNA, 17 bp, synthetic construct
  source 1..17: mol_type = other DNA
cccccaaatcccctgga

SEQ ID NO: 157898 - DNA, 17 bp, synthetic construct
  source 1..17: mol_type = other DNA
gcccccaaatcccctgg

SEQ ID NO: 157899 - DNA, 17 bp, synthetic construct
  source 1..17: mol_type = other DNA
agcccccaaatcccctg

SEQ ID NO: 157900 - DNA, 17 bp, synthetic construct
  source 1..17: mol_type = other DNA
gagcccccaaatcccct

SEQ ID NO: 157901 - DNA, 17 bp, synthetic construct
  source 1..17: mol_type = other DNA
ggagcccccaaatcccc

SEQ ID NO: 157902 - DNA, 17 bp, synthetic construct
  source 1..17: mol_type = other DNA
gggagcccccaaatccc

SEQ ID NO: 157903 - DNA, 17 bp, synthetic construct
  source 1..17: mol_type = other DNA
tgggagcccccaaatcc

SEQ ID NO: 157904 - DNA, 17 bp, synthetic construct
  source 1..17: mol_type = other DNA
ctgggagcccccaaatc

SEQ ID NO: 157905 - DNA, 17 bp, synthetic construct
  source 1..17: mol_type = other DNA
gctgggagcccccaaat

SEQ ID NO: 157906 - DNA, 17 bp, synthetic construct
  source 1..17: mol_type = other DNA
tgctgggagcccccaaa

SEQ ID NO: 157907 - DNA, 17 bp, synthetic construct
  source 1..17: mol_type = other DNA
ttgctgggagcccccaa

SEQ ID NO: 157908 - DNA, 17 bp, synthetic construct
  source 1..17: mol_type = other DNA
tttgctgggagccccca

SEQ ID NO: 157909 - DNA, 17 bp, synthetic construct
  source 1..17: mol_type = other DNA
gtttgctgggagccccc

SEQ ID NO: 157910 - DNA, 17 bp, synthetic construct
  source 1..17: mol_type = other DNA
tgtttgctgggagcccc

SEQ ID NO: 157911 - DNA, 17 bp, synthetic construct
  source 1..17: mol_type = other DNA
gtgtttgctgggagccc

SEQ ID NO: 157912 - DNA, 17 bp, synthetic construct
  source 1..17: mol_type = other DNA
tgtgtttgctgggagcc

SEQ ID NO: 157913 - DNA, 17 bp, synthetic construct
  source 1..17: mol_type = other DNA
ctgtgtttgctgggagc

SEQ ID NO: 157914 - DNA, 17 bp, synthetic construct
  source 1..17: mol_type = other DNA
gctgtgtttgctgggag

SEQ ID NO: 157915 - DNA, 17 bp, synthetic construct
  source 1..17: mol_type = other DNA
tgctgtgtttgctggga

SEQ ID NO: 157916 - DNA, 17 bp, synthetic construct
  source 1..17: mol_type = other DNA
ctgctgtgtttgctggg

SEQ ID NO: 157917 - DNA, 17 bp, synthetic construct
  source 1..17: mol_type = other DNA
gctgctgtgtttgctgg

SEQ ID NO: 157918 - DNA, 17 bp, synthetic construct
  source 1..17: mol_type = other DNA
tgctgctgtgtttgctg

SEQ ID NO: 157919 - DNA, 17 bp, synthetic construct
  source 1..17: mol_type = other DNA
ctgctgctgtgtttgct

SEQ ID NO: 157920 - DNA, 17 bp, synthetic construct
  source 1..17: mol_type = other DNA
cctgctgctgtgtttgc

SEQ ID NO: 157921 - DNA, 17 bp, synthetic construct
  source 1..17: mol_type = other DNA
gcctgctgctgtgtttg

SEQ ID NO: 157922 - DNA, 17 bp, synthetic construct
  source 1..17: mol_type = other DNA
tgcctgctgctgtgttt

SEQ ID NO: 157923 - DNA, 17 bp, synthetic construct
  source 1..17: mol_type = other DNA
gtgcctgctgctgtgtt

SEQ ID NO: 157924 - DNA, 17 bp, synthetic construct
  source 1..17: mol_type = other DNA
ggtgcctgctgctgtgt

SEQ ID NO: 157925 - DNA, 17 bp, synthetic construct
  source 1..17: mol_type = other DNA
cggtgcctgctgctgtg

SEQ ID NO: 157926 - DNA, 17 bp, synthetic construct
  source 1..17: mol_type = other DNA
acggtgcctgctgctgt

SEQ ID NO: 157927 - DNA, 17 bp, synthetic construct
  source 1..17: mol_type = other DNA
gacggtgcctgctgctg

SEQ ID NO: 157928 - DNA, 17 bp, synthetic construct
  source 1..17: mol_type = other DNA
agacggtgcctgctgct

SEQ ID NO: 157929 - DNA, 17 bp, synthetic construct
  source 1..17: mol_type = other DNA
cagacggtgcctgctgc

SEQ ID NO: 157930 - DNA, 17 bp, synthetic construct
  source 1..17: mol_type = other DNA
ccagacggtgcctgctg

SEQ ID NO: 157931 - DNA, 17 bp, synthetic construct
  source 1..17: mol_type = other DNA
gccagacggtgcctgct

SEQ ID NO: 157932 - DNA, 17 bp, synthetic construct
  source 1..17: mol_type = other DNA
ggccagacggtgcctgc

SEQ ID NO: 157933 - DNA, 17 bp, synthetic construct
  source 1..17: mol_type = other DNA
aggccagacggtgcctg

SEQ ID NO: 157934 - DNA, 17 bp, synthetic construct
  source 1..17: mol_type = other DNA
aaggccagacggtgcct

SEQ ID NO: 157935 - DNA, 17 bp, synthetic construct
  source 1..17: mol_type = other DNA
taaggccagacggtgcc

SEQ ID NO: 157936 - DNA, 17 bp, synthetic construct
  source 1..17: mol_type = other DNA
gtaaggccagacggtgc

SEQ ID NO: 157937 - DNA, 17 bp, synthetic construct
  source 1..17: mol_type = other DNA
tgtaaggccagacggtg

SEQ ID NO: 157938 - DNA, 17 bp, synthetic construct
  source 1..17: mol_type = other DNA
ttgtaaggccagacggt

SEQ ID NO: 157939 - DNA, 17 bp, synthetic construct
  source 1..17: mol_type = other DNA
cttgtaaggccagacgg

SEQ ID NO: 157940 - DNA, 17 bp, synthetic construct
  source 1..17: mol_type = other DNA
ccttgtaaggccagacg

SEQ ID NO: 157941 - DNA, 17 bp, synthetic construct
  source 1..17: mol_type = other DNA
tccttgtaaggccagac

SEQ ID NO: 157942 - DNA, 17 bp, synthetic construct
  source 1..17: mol_type = other DNA
ctccttgtaaggccaga

SEQ ID NO: 157943 - DNA, 17 bp, synthetic construct
  source 1..17: mol_type = other DNA
cctccttgtaaggccag

SEQ ID NO: 157944 - DNA, 17 bp, synthetic construct
  source 1..17: mol_type = other DNA
acctccttgtaaggcca

SEQ ID NO: 157945 - DNA, 17 bp, synthetic construct
  source 1..17: mol_type = other DNA
cacctccttgtaaggcc

SEQ ID NO: 157946 - DNA, 17 bp, synthetic construct
  source 1..17: mol_type = other DNA
ccacctccttgtaaggc

SEQ ID NO: 157947 - DNA, 17 bp, synthetic construct
  source 1..17: mol_type = other DNA
gccacctccttgtaagg

SEQ ID NO: 157948 - DNA, 17 bp, synthetic construct
  source 1..17: mol_type = other DNA
ggccacctccttgtaag

SEQ ID NO: 157949 - DNA, 17 bp, synthetic construct
  source 1..17: mol_type = other DNA
tggccacctccttgtaa

SEQ ID NO: 157950 - DNA, 17 bp, synthetic construct
  source 1..17: mol_type = other DNA
ctggccacctccttgta

SEQ ID NO: 157951 - DNA, 17 bp, synthetic construct
  source 1..17: mol_type = other DNA
cctggccacctccttgt

SEQ ID NO: 157952 - DNA, 17 bp, synthetic construct
  source 1..17: mol_type = other DNA
gcctggccacctccttg

SEQ ID NO: 157953 - DNA, 17 bp, synthetic construct
  source 1..17: mol_type = other DNA
agcctggccacctcctt

SEQ ID NO: 157954 - DNA, 17 bp, synthetic construct
  source 1..17: mol_type = other DNA
cagcctggccacctcct

SEQ ID NO: 157955 - DNA, 17 bp, synthetic construct
  source 1..17: mol_type = other DNA
ccagcctggccacctcc

SEQ ID NO: 157956 - DNA, 17 bp, synthetic construct
  source 1..17: mol_type = other DNA
cccagcctggccacctc

SEQ ID NO: 157957 - DNA, 17 bp, synthetic construct
  source 1..17: mol_type = other DNA
ccccagcctggccacct

SEQ ID NO: 157958 - DNA, 17 bp, synthetic construct
  source 1..17: mol_type = other DNA
tccccagcctggccacc

SEQ ID NO: 157959 - DNA, 17 bp, synthetic construct
  source 1..17: mol_type = other DNA
ctccccagcctggccac

SEQ ID NO: 157960 - DNA, 17 bp, synthetic construct
  source 1..17: mol_type = other DNA
cctccccagcctggcca

SEQ ID NO: 157961 - DNA, 17 bp, synthetic construct
  source 1..17: mol_type = other DNA
gcctccccagcctggcc

SEQ ID NO: 157962 - DNA, 17 bp, synthetic construct
  source 1..17: mol_type = other DNA
ggcctccccagcctggc

SEQ ID NO: 157963 - DNA, 17 bp, synthetic construct
  source 1..17: mol_type = other DNA
gggcctccccagcctgg

SEQ ID NO: 157964 - DNA, 17 bp, synthetic construct
  source 1..17: mol_type = other DNA
tgggcctccccagcctg

SEQ ID NO: 157965 - DNA, 17 bp, synthetic construct
  source 1..17: mol_type = other DNA
ctgggcctccccagcct

SEQ ID NO: 157966 - DNA, 17 bp, synthetic construct
  source 1..17: mol_type = other DNA
gctgggcctccccagcc

SEQ ID NO: 157967 - DNA, 17 bp, synthetic construct
  source 1..17: mol_type = other DNA
cgctgggcctccccagc

SEQ ID NO: 157968 - DNA, 17 bp, synthetic construct
  source 1..17: mol_type = other DNA
acgctgggcctccccag

SEQ ID NO: 157969 - DNA, 17 bp, synthetic construct
  source 1..17: mol_type = other DNA
aacgctgggcctcccca

SEQ ID NO: 157970 - DNA, 17 bp, synthetic construct
  source 1..17: mol_type = other DNA
gaacgctgggcctcccc

SEQ ID NO: 157971 - DNA, 17 bp, synthetic construct
  source 1..17: mol_type = other DNA
cgaacgctgggcctccc

SEQ ID NO: 157972 - DNA, 17 bp, synthetic construct
  source 1..17: mol_type = other DNA
ccgaacgctgggcctcc

SEQ ID NO: 157973 - DNA, 17 bp, synthetic construct
  source 1..17: mol_type = other DNA
gccgaacgctgggcctc

SEQ ID NO: 157974 - DNA, 17 bp, synthetic construct
  source 1..17: mol_type = other DNA
cgccgaacgctgggcct

SEQ ID NO: 157975 - DNA, 17 bp, synthetic construct
  source 1..17: mol_type = other DNA
ccgccgaacgctgggcc

SEQ ID NO: 157976 - DNA, 17 bp, synthetic construct
  source 1..17: mol_type = other DNA
cccgccgaacgctgggc

SEQ ID NO: 157977 - DNA, 17 bp, synthetic construct
  source 1..17: mol_type = other DNA
ccccgccgaacgctggg

SEQ ID NO: 157978 - DNA, 17 bp, synthetic construct
  source 1..17: mol_type = other DNA
cccccgccgaacgctgg

SEQ ID NO: 157979 - DNA, 17 bp, synthetic construct
  source 1..17: mol_type = other DNA
gcccccgccgaacgctg

SEQ ID NO: 157980 - DNA, 17 bp, synthetic construct
  source 1..17: mol_type = other DNA
agcccccgccgaacgct

SEQ ID NO: 157981 - DNA, 17 bp, synthetic construct
  source 1..17: mol_type = other DNA
gagcccccgccgaacgc

SEQ ID NO: 157982 - DNA, 17 bp, synthetic construct
  source 1..17: mol_type = other DNA
cgagcccccgccgaacg

SEQ ID NO: 157983 - DNA, 17 bp, synthetic construct
  source 1..17: mol_type = other DNA
ccgagcccccgccgaac

SEQ ID NO: 157984 - DNA, 17 bp, synthetic construct
  source 1..17: mol_type = other DNA
tccgagcccccgccgaa

SEQ ID NO: 157985 - DNA, 17 bp, synthetic construct
  source 1..17: mol_type = other DNA
ttccgagcccccgccga

SEQ ID NO: 157986 - DNA, 17 bp, synthetic construct
  source 1..17: mol_type = other DNA
cttccgagcccccgccg

SEQ ID NO: 157987 - DNA, 17 bp, synthetic construct
  source 1..17: mol_type = other DNA
gcttccgagcccccgcc

SEQ ID NO: 157988 - DNA, 17 bp, synthetic construct
  source 1..17: mol_type = other DNA
ggcttccgagcccccgc

SEQ ID NO: 157989 - DNA, 17 bp, synthetic construct
  source 1..17: mol_type = other DNA
gggcttccgagcccccg

SEQ ID NO: 157990 - DNA, 17 bp, synthetic construct
  source 1..17: mol_type = other DNA
cgggcttccgagccccc

SEQ ID NO: 157991 - DNA, 17 bp, synthetic construct
  source 1..17: mol_type = other DNA
ccgggcttccgagcccc

SEQ ID NO: 157992 - DNA, 17 bp, synthetic construct
  source 1..17: mol_type = other DNA
cccgggcttccgagccc

SEQ ID NO: 157993 - DNA, 17 bp, synthetic construct
  source 1..17: mol_type = other DNA
ccccgggcttccgagcc

SEQ ID NO: 157994 - DNA, 17 bp, synthetic construct
  source 1..17: mol_type = other DNA
cccccgggcttccgagc

SEQ ID NO: 157995 - DNA, 17 bp, synthetic construct
  source 1..17: mol_type = other DNA
acccccgggcttccgag

SEQ ID NO: 157996 - DNA, 17 bp, synthetic construct
  source 1..17: mol_type = other DNA
cacccccgggcttccga

SEQ ID NO: 157997 - DNA, 17 bp, synthetic construct
  source 1..17: mol_type = other DNA
ccacccccgggcttccg

SEQ ID NO: 157998 - DNA, 17 bp, synthetic construct
  source 1..17: mol_type = other DNA
cccacccccgggcttcc

SEQ ID NO: 157999 - DNA, 17 bp, synthetic construct
  source 1..17: mol_type = other DNA
ccccacccccgggcttc

SEQ ID NO: 158000 - DNA, 17 bp, synthetic construct
  source 1..17: mol_type = other DNA
accccacccccgggctt

SEQ ID NO: 158001 - DNA, 17 bp, synthetic construct
  source 1..17: mol_type = other DNA
gaccccacccccgggct

SEQ ID NO: 158002 - DNA, 17 bp, synthetic construct
  source 1..17: mol_type = other DNA
agaccccacccccgggc

SEQ ID NO: 158003 - DNA, 17 bp, synthetic construct
  source 1..17: mol_type = other DNA
cagaccccacccccggg

SEQ ID NO: 158004 - DNA, 17 bp, synthetic construct
  source 1..17: mol_type = other DNA
gcagaccccacccccgg

SEQ ID NO: 158005 - DNA, 17 bp, synthetic construct
  source 1..17: mol_type = other DNA
cgcagaccccacccccg

SEQ ID NO: 158006 - DNA, 17 bp, synthetic construct
  source 1..17: mol_type = other DNA
ccgcagaccccaccccc

SEQ ID NO: 158007 - DNA, 17 bp, synthetic construct
  source 1..17: mol_type = other DNA
cccgcagaccccacccc

SEQ ID NO: 158008 - DNA, 17 bp, synthetic construct
  source 1..17: mol_type = other DNA
ccccgcagaccccaccc

SEQ ID NO: 158009 - DNA, 17 bp, synthetic construct
  source 1..17: mol_type = other DNA
accccgcagaccccacc

SEQ ID NO: 158010 - DNA, 17 bp, synthetic construct
  source 1..17: mol_type = other DNA
caccccgcagaccccac

SEQ ID NO: 158011 - DNA, 17 bp, synthetic construct
  source 1..17: mol_type = other DNA
tcaccccgcagacccca

SEQ ID NO: 158012 - DNA, 17 bp, synthetic construct
  source 1..17: mol_type = other DNA
ctcaccccgcagacccc

SEQ ID NO: 158013 - DNA, 17 bp, synthetic construct
  source 1..17: mol_type = other DNA
cctcaccccgcagaccc

SEQ ID NO: 158014 - DNA, 17 bp, synthetic construct
  source 1..17: mol_type = other DNA
ccctcaccccgcagacc

SEQ ID NO: 158015 - DNA, 17 bp, synthetic construct
  source 1..17: mol_type = other DNA
gccctcaccccgcagac

SEQ ID NO: 158016 - DNA, 17 bp, synthetic construct
  source 1..17: mol_type = other DNA
ggccctcaccccgcaga

SEQ ID NO: 158017 - DNA, 17 bp, synthetic construct
  source 1..17: mol_type = other DNA
cggccctcaccccgcag

SEQ ID NO: 158018 - DNA, 17 bp, synthetic construct
  source 1..17: mol_type = other DNA
gcggccctcaccccgca

SEQ ID NO: 158019 - DNA, 17 bp, synthetic construct
  source 1..17: mol_type = other DNA
tgcggccctcaccccgc

SEQ ID NO: 158020 - DNA, 17 bp, synthetic construct
  source 1..17: mol_type = other DNA
ctgcggccctcaccccg

SEQ ID NO: 158021 - DNA, 17 bp, synthetic construct
  source 1..17: mol_type = other DNA
tctgcggccctcacccc

SEQ ID NO: 158022 - DNA, 17 bp, synthetic construct
  source 1..17: mol_type = other DNA
atctgcggccctcaccc

SEQ ID NO: 158023 - DNA, 17 bp, synthetic construct
  source 1..17: mol_type = other DNA
gatctgcggccctcacc

SEQ ID NO: 158024 - DNA, 17 bp, synthetic construct
  source 1..17: mol_type = other DNA
ggatctgcggccctcac

SEQ ID NO: 158025 - DNA, 17 bp, synthetic construct
  source 1..17: mol_type = other DNA
tggatctgcggccctca

SEQ ID NO: 158026 - DNA, 17 bp, synthetic construct
  source 1..17: mol_type = other DNA
ctggatctgcggccctc

SEQ ID NO: 158027 - DNA, 17 bp, synthetic construct
  source 1..17: mol_type = other DNA
cctggatctgcggccct

SEQ ID NO: 158028 - DNA, 17 bp, synthetic construct
  source 1..17: mol_type = other DNA
gcctggatctgcggccc

SEQ ID NO: 158029 - DNA, 17 bp, synthetic construct
  source 1..17: mol_type = other DNA
agcctggatctgcggcc

SEQ ID NO: 158030 - DNA, 17 bp, synthetic construct
  source 1..17: mol_type = other DNA
cagcctggatctgcggc

SEQ ID NO: 158031 - DNA, 17 bp, synthetic construct
  source 1..17: mol_type = other DNA
acagcctggatctgcgg

SEQ ID NO: 158032 - DNA, 17 bp, synthetic construct
  source 1..17: mol_type = other DNA
cacagcctggatctgcg

SEQ ID NO: 158033 - DNA, 17 bp, synthetic construct
  source 1..17: mol_type = other DNA
gcacagcctggatctgc

SEQ ID NO: 158034 - DNA, 17 bp, synthetic construct
  source 1..17: mol_type = other DNA
ggcacagcctggatctg

SEQ ID NO: 158035 - DNA, 17 bp, synthetic construct
  source 1..17: mol_type = other DNA
cggcacagcctggatct

SEQ ID NO: 158036 - DNA, 17 bp, synthetic construct
  source 1..17: mol_type = other DNA
acggcacagcctggatc

SEQ ID NO: 158037 - DNA, 17 bp, synthetic construct
  source 1..17: mol_type = other DNA
gacggcacagcctggat

SEQ ID NO: 158038 - DNA, 17 bp, synthetic construct
  source 1..17: mol_type = other DNA
agacggcacagcctgga

SEQ ID NO: 158039 - DNA, 17 bp, synthetic construct
  source 1..17: mol_type = other DNA
cagacggcacagcctgg

SEQ ID NO: 158040 - DNA, 17 bp, synthetic construct
  source 1..17: mol_type = other DNA
acagacggcacagcctg

SEQ ID NO: 158041 - DNA, 17 bp, synthetic construct
  source 1..17: mol_type = other DNA
gacagacggcacagcct

SEQ ID NO: 158042 - DNA, 17 bp, synthetic construct
  source 1..17: mol_type = other DNA
agacagacggcacagcc

SEQ ID NO: 158043 - DNA, 17 bp, synthetic construct
  source 1..17: mol_type = other DNA
gagacagacggcacagc

SEQ ID NO: 158044 - DNA, 17 bp, synthetic construct
  source 1..17: mol_type = other DNA
agagacagacggcacag

SEQ ID NO: 158045 - DNA, 17 bp, synthetic construct
  source 1..17: mol_type = other DNA
aagagacagacggcaca

SEQ ID NO: 158046 - DNA, 17 bp, synthetic construct
  source 1..17: mol_type = other DNA
caagagacagacggcac

SEQ ID NO: 158047 - DNA, 17 bp, synthetic construct
  source 1..17: mol_type = other DNA
acaagagacagacggca

SEQ ID NO: 158048 - DNA, 17 bp, synthetic construct
  source 1..17: mol_type = other DNA
tacaagagacagacggc

SEQ ID NO: 158049 - DNA, 17 bp, synthetic construct
  source 1..17: mol_type = other DNA
ctacaagagacagacgg

SEQ ID NO: 158050 - DNA, 17 bp, synthetic construct
  source 1..17: mol_type = other DNA
actacaagagacagacg

SEQ ID NO: 158051 - DNA, 17 bp, synthetic construct
  source 1..17: mol_type = other DNA
aactacaagagacagac

SEQ ID NO: 158052 - DNA, 17 bp, synthetic construct
  source 1..17: mol_type = other DNA
gaactacaagagacaga

SEQ ID NO: 158053 - DNA, 17 bp, synthetic construct
  source 1..17: mol_type = other DNA
tgaactacaagagacag

SEQ ID NO: 158054 - DNA, 17 bp, synthetic construct
  source 1..17: mol_type = other DNA
atgaactacaagagaca

SEQ ID NO: 158055 - DNA, 17 bp, synthetic construct
  source 1..17: mol_type = other DNA
catgaactacaagagac

SEQ ID NO: 158056 - DNA, 17 bp, synthetic construct
  source 1..17: mol_type = other DNA
acatgaactacaagaga

SEQ ID NO: 158057 - DNA, 17 bp, synthetic construct
  source 1..17: mol_type = other DNA
tacatgaactacaagag

SEQ ID NO: 158058 - DNA, 17 bp, synthetic construct
  source 1..17: mol_type = other DNA
gtacatgaactacaaga

SEQ ID NO: 158059 - DNA, 17 bp, synthetic construct
  source 1..17: mol_type = other DNA
cgtacatgaactacaag

SEQ ID NO: 158060 - DNA, 17 bp, synthetic construct
  source 1..17: mol_type = other DNA
ccgtacatgaactacaa

SEQ ID NO: 158061 - DNA, 17 bp, synthetic construct
  source 1..17: mol_type = other DNA
cccgtacatgaactaca

SEQ ID NO: 158062 - DNA, 17 bp, synthetic construct
  source 1..17: mol_type = other DNA
acccgtacatgaactac

SEQ ID NO: 158063 - DNA, 17 bp, synthetic construct
  source 1..17: mol_type = other DNA
cacccgtacatgaacta

SEQ ID NO: 158064 - DNA, 17 bp, synthetic construct
  source 1..17: mol_type = other DNA
ccacccgtacatgaact

SEQ ID NO: 158065 - DNA, 17 bp, synthetic construct
  source 1..17: mol_type = other DNA
cccacccgtacatgaac

SEQ ID NO: 158066 - DNA, 17 bp, synthetic construct
  source 1..17: mol_type = other DNA
tcccacccgtacatgaa

SEQ ID NO: 158067 - DNA, 17 bp, synthetic construct
  source 1..17: mol_type = other DNA
ttcccacccgtacatga

SEQ ID NO: 158068 - DNA, 17 bp, synthetic construct
  source 1..17: mol_type = other DNA
cttcccacccgtacatg

SEQ ID NO: 158069 - DNA, 17 bp, synthetic construct
  source 1..17: mol_type = other DNA
gcttcccacccgtacat

SEQ ID NO: 158070 - DNA, 17 bp, synthetic construct
  source 1..17: mol_type = other DNA
agcttcccacccgtaca

SEQ ID NO: 158071 - DNA, 17 bp, synthetic construct
  source 1..17: mol_type = other DNA
tagcttcccacccgtac

SEQ ID NO: 158072 - DNA, 17 bp, synthetic construct
  source 1..17: mol_type = other DNA
ttagcttcccacccgta

SEQ ID NO: 158073 - DNA, 17 bp, synthetic construct
  source 1..17: mol_type = other DNA
cttagcttcccacccgt

SEQ ID NO: 158074 - DNA, 17 bp, synthetic construct
  source 1..17: mol_type = other DNA
gcttagcttcccacccg

SEQ ID NO: 158075 - DNA, 17 bp, synthetic construct
  source 1..17: mol_type = other DNA
agcttagcttcccaccc

SEQ ID NO: 158076 - DNA, 17 bp, synthetic construct
  source 1..17: mol_type = other DNA
cagcttagcttcccacc

SEQ ID NO: 158077 - DNA, 17 bp, synthetic construct
  source 1..17: mol_type = other DNA
gcagcttagcttcccac

SEQ ID NO: 158078 - DNA, 17 bp, synthetic construct
  source 1..17: mol_type = other DNA
ggcagcttagcttccca

SEQ ID NO: 158079 - DNA, 17 bp, synthetic construct
  source 1..17: mol_type = other DNA
aggcagcttagcttccc

SEQ ID NO: 158080 - DNA, 17 bp, synthetic construct
  source 1..17: mol_type = other DNA
caggcagcttagcttcc

SEQ ID NO: 158081 - DNA, 17 bp, synthetic construct
  source 1..17: mol_type = other DNA
ccaggcagcttagcttc

SEQ ID NO: 158082 - DNA, 17 bp, synthetic construct
  source 1..17: mol_type = other DNA
cccaggcagcttagctt

SEQ ID NO: 158083 - DNA, 17 bp, synthetic construct
  source 1..17: mol_type = other DNA
tcccaggcagcttagct

SEQ ID NO: 158084 - DNA, 17 bp, synthetic construct
  source 1..17: mol_type = other DNA
ctcccaggcagcttagc

SEQ ID NO: 158085 - DNA, 17 bp, synthetic construct
  source 1..17: mol_type = other DNA
gctcccaggcagcttag

SEQ ID NO: 158086 - DNA, 17 bp, synthetic construct
  source 1..17: mol_type = other DNA
ggctcccaggcagctta

SEQ ID NO: 158087 - DNA, 17 bp, synthetic construct
  source 1..17: mol_type = other DNA
aggctcccaggcagctt

SEQ ID NO: 158088 - DNA, 17 bp, synthetic construct
  source 1..17: mol_type = other DNA
gaggctcccaggcagct

SEQ ID NO: 158089 - DNA, 17 bp, synthetic construct
  source 1..17: mol_type = other DNA
agaggctcccaggcagc

SEQ ID NO: 158090 - DNA, 17 bp, synthetic construct
  source 1..17: mol_type = other DNA
gagaggctcccaggcag

SEQ ID NO: 158091 - DNA, 17 bp, synthetic construct
  source 1..17: mol_type = other DNA
agagaggctcccaggca

SEQ ID NO: 158092 - DNA, 17 bp, synthetic construct
  source 1..17: mol_type = other DNA
cagagaggctcccaggc

SEQ ID NO: 158093 - DNA, 17 bp, synthetic construct
  source 1..17: mol_type = other DNA
gcagagaggctcccagg

SEQ ID NO: 158094 - DNA, 17 bp, synthetic construct
  source 1..17: mol_type = other DNA
tgcagagaggctcccag

SEQ ID NO: 158095 - DNA, 17 bp, synthetic construct
  source 1..17: mol_type = other DNA
ctgcagagaggctccca

SEQ ID NO: 158096 - DNA, 17 bp, synthetic construct
  source 1..17: mol_type = other DNA
tctgcagagaggctccc

SEQ ID NO: 158097 - DNA, 17 bp, synthetic construct
  source 1..17: mol_type = other DNA
ttctgcagagaggctcc

SEQ ID NO: 158098 - DNA, 17 bp, synthetic construct
  source 1..17: mol_type = other DNA
tttctgcagagaggctc

SEQ ID NO: 158099 - DNA, 17 bp, synthetic construct
  source 1..17: mol_type = other DNA
ttttctgcagagaggct

SEQ ID NO: 158100 - DNA, 17 bp, synthetic construct
  source 1..17: mol_type = other DNA
cttttctgcagagaggc

SEQ ID NO: 158101 - DNA, 17 bp, synthetic construct
  source 1..17: mol_type = other DNA
gcttttctgcagagagg

SEQ ID NO: 158102 - DNA, 17 bp, synthetic construct
  source 1..17: mol_type = other DNA
tgcttttctgcagagag

SEQ ID NO: 158103 - DNA, 17 bp, synthetic construct
  source 1..17: mol_type = other DNA
gtgcttttctgcagaga

SEQ ID NO: 158104 - DNA, 17 bp, synthetic construct
  source 1..17: mol_type = other DNA
tgtgcttttctgcagag

SEQ ID NO: 158105 - DNA, 17 bp, synthetic construct
  source 1..17: mol_type = other DNA
ctgtgcttttctgcaga

SEQ ID NO: 158106 - DNA, 17 bp, synthetic construct
  source 1..17: mol_type = other DNA
cctgtgcttttctgcag

SEQ ID NO: 158107 - DNA, 17 bp, synthetic construct
  source 1..17: mol_type = other DNA
acctgtgcttttctgca

SEQ ID NO: 158108 - DNA, 17 bp, synthetic construct
  source 1..17: mol_type = other DNA
tacctgtgcttttctgc

SEQ ID NO: 158109 - DNA, 17 bp, synthetic construct
  source 1..17: mol_type = other DNA
ttacctgtgcttttctg

SEQ ID NO: 158110 - DNA, 17 bp, synthetic construct
  source 1..17: mol_type = other DNA
cttacctgtgcttttct

SEQ ID NO: 158111 - DNA, 17 bp, synthetic construct
  source 1..17: mol_type = other DNA
acttacctgtgcttttc

SEQ ID NO: 158112 - DNA, 17 bp, synthetic construct
  source 1..17: mol_type = other DNA
cacttacctgtgctttt

SEQ ID NO: 158113 - DNA, 17 bp, synthetic construct
  source 1..17: mol_type = other DNA
gcacttacctgtgcttt

SEQ ID NO: 158114 - DNA, 17 bp, synthetic construct
  source 1..17: mol_type = other DNA
ggcacttacctgtgctt

SEQ ID NO: 158115 - DNA, 17 bp, synthetic construct
  source 1..17: mol_type = other DNA
tggcacttacctgtgct

SEQ ID NO: 158116 - DNA, 17 bp, synthetic construct
  source 1..17: mol_type = other DNA
gtggcacttacctgtgc

SEQ ID NO: 158117 - DNA, 17 bp, synthetic construct
  source 1..17: mol_type = other DNA
ggtggcacttacctgtg

SEQ ID NO: 158118 - DNA, 17 bp, synthetic construct
  source 1..17: mol_type = other DNA
gggtggcacttacctgt

SEQ ID NO: 158119 - DNA, 17 bp, synthetic construct
  source 1..17: mol_type = other DNA
ggggtggcacttacctg

SEQ ID NO: 158120 - DNA, 17 bp, synthetic construct
  source 1..17: mol_type = other DNA
aggggtggcacttacct

SEQ ID NO: 158121 - DNA, 17 bp, synthetic construct
  source 1..17: mol_type = other DNA
caggggtggcacttacc

SEQ ID NO: 158122 - DNA, 17 bp, synthetic construct
  source 1..17: mol_type = other DNA
gcaggggtggcacttac

SEQ ID NO: 158123 - DNA, 17 bp, synthetic construct
  source 1..17: mol_type = other DNA
ggcaggggtggcactta

SEQ ID NO: 158124 - DNA, 17 bp, synthetic construct
  source 1..17: mol_type = other DNA
gggcaggggtggcactt

SEQ ID NO: 158125 - DNA, 17 bp, synthetic construct
  source 1..17: mol_type = other DNA
agggcaggggtggcact

SEQ ID NO: 158126 - DNA, 17 bp, synthetic construct
  source 1..17: mol_type = other DNA
cagggcaggggtggcac

SEQ ID NO: 158127 - DNA, 17 bp, synthetic construct
  source 1..17: mol_type = other DNA
gcagggcaggggtggca

SEQ ID NO: 158128 - DNA, 17 bp, synthetic construct
  source 1..17: mol_type = other DNA
ggcagggcaggggtggc

SEQ ID NO: 158129 - DNA, 17 bp, synthetic construct
  source 1..17: mol_type = other DNA
gggcagggcaggggtgg

SEQ ID NO: 158130 - DNA, 17 bp, synthetic construct
  source 1..17: mol_type = other DNA
agggcagggcaggggtg

SEQ ID NO: 158131 - DNA, 17 bp, synthetic construct
  source 1..17: mol_type = other DNA
cagggcagggcaggggt

SEQ ID NO: 158132 - DNA, 17 bp, synthetic construct
  source 1..17: mol_type = other DNA
gcagggcagggcagggg

SEQ ID NO: 158133 - DNA, 17 bp, synthetic construct
  source 1..17: mol_type = other DNA
ggcagggcagggcaggg

SEQ ID NO: 158134 - DNA, 17 bp, synthetic construct
  source 1..17: mol_type = other DNA
gggcagggcagggcagg

SEQ ID NO: 158135 - DNA, 17 bp, synthetic construct
  source 1..17: mol_type = other DNA
agggcagggcagggcag

SEQ ID NO: 158136 - DNA, 17 bp, synthetic construct
  source 1..17: mol_type = other DNA
cagggcagggcagggca

SEQ ID NO: 158137 - DNA, 17 bp, synthetic construct
  source 1..17: mol_type = other DNA
gcagggcagggcagggc

SEQ ID NO: 158138 - DNA, 17 bp, synthetic construct
  source 1..17: mol_type = other DNA
ggcagggcagggcaggg

SEQ ID NO: 158139 - DNA, 17 bp, synthetic construct
  source 1..17: mol_type = other DNA
gggcagggcagggcagg

SEQ ID NO: 158140 - DNA, 17 bp, synthetic construct
  source 1..17: mol_type = other DNA
ggggcagggcagggcag

SEQ ID NO: 158141 - DNA, 17 bp, synthetic construct
  source 1..17: mol_type = other DNA
cggggcagggcagggca

SEQ ID NO: 158142 - DNA, 17 bp, synthetic construct
  source 1..17: mol_type = other DNA
gcggggcagggcagggc

SEQ ID NO: 158143 - DNA, 17 bp, synthetic construct
  source 1..17: mol_type = other DNA
ggcggggcagggcaggg

SEQ ID NO: 158144 - DNA, 17 bp, synthetic construct
  source 1..17: mol_type = other DNA
gggcggggcagggcagg

SEQ ID NO: 158145 - DNA, 17 bp, synthetic construct
  source 1..17: mol_type = other DNA
ggggcggggcagggcag

SEQ ID NO: 158146 - DNA, 17 bp, synthetic construct
  source 1..17: mol_type = other DNA
cggggcggggcagggca

SEQ ID NO: 158147 - DNA, 17 bp, synthetic construct
  source 1..17: mol_type = other DNA
gcggggcggggcagggc

SEQ ID NO: 158148 - DNA, 17 bp, synthetic construct
  source 1..17: mol_type = other DNA
tgcggggcggggcaggg

SEQ ID NO: 158149 - DNA, 17 bp, synthetic construct
  source 1..17: mol_type = other DNA
atgcggggcggggcagg

SEQ ID NO: 158150 - DNA, 17 bp, synthetic construct
  source 1..17: mol_type = other DNA
gatgcggggcggggcag

SEQ ID NO: 158151 - DNA, 17 bp, synthetic construct
  source 1..17: mol_type = other DNA
tgatgcggggcggggca

SEQ ID NO: 158152 - DNA, 17 bp, synthetic construct
  source 1..17: mol_type = other DNA
gtgatgcggggcggggc

SEQ ID NO: 158153 - DNA, 17 bp, synthetic construct
  source 1..17: mol_type = other DNA
ggtgatgcggggcgggg

SEQ ID NO: 158154 - DNA, 17 bp, synthetic construct
  source 1..17: mol_type = other DNA
gggtgatgcggggcggg

SEQ ID NO: 158155 - DNA, 17 bp, synthetic construct
  source 1..17: mol_type = other DNA
ggggtgatgcggggcgg

SEQ ID NO: 158156 - DNA, 17 bp, synthetic construct
  source 1..17: mol_type = other DNA
cggggtgatgcggggcg

SEQ ID NO: 158157 - DNA, 17 bp, synthetic construct
  source 1..17: mol_type = other DNA
gcggggtgatgcggggc

SEQ ID NO: 158158 - DNA, 17 bp, synthetic construct
  source 1..17: mol_type = other DNA
ggcggggtgatgcgggg

SEQ ID NO: 158159 - DNA, 17 bp, synthetic construct
  source 1..17: mol_type = other DNA
aggcggggtgatgcggg

SEQ ID NO: 158160 - DNA, 17 bp, synthetic construct
  source 1..17: mol_type = other DNA
caggcggggtgatgcgg

SEQ ID NO: 158161 - DNA, 17 bp, synthetic construct
  source 1..17: mol_type = other DNA
ccaggcggggtgatgcg

SEQ ID NO: 158162 - DNA, 17 bp, synthetic construct
  source 1..17: mol_type = other DNA
gccaggcggggtgatgc

SEQ ID NO: 158163 - DNA, 17 bp, synthetic construct
  source 1..17: mol_type = other DNA
ggccaggcggggtgatg

SEQ ID NO: 158164 - DNA, 17 bp, synthetic construct
  source 1..17: mol_type = other DNA
aggccaggcggggtgat

SEQ ID NO: 158165 - DNA, 17 bp, synthetic construct
  source 1..17: mol_type = other DNA
caggccaggcggggtga

SEQ ID NO: 158166 - DNA, 17 bp, synthetic construct
  source 1..17: mol_type = other DNA
ccaggccaggcggggtg

SEQ ID NO: 158167 - DNA, 17 bp, synthetic construct
  source 1..17: mol_type = other DNA
gccaggccaggcggggt

SEQ ID NO: 158168 - DNA, 17 bp, synthetic construct
  source 1..17: mol_type = other DNA
ggccaggccaggcgggg

SEQ ID NO: 158169 - DNA, 17 bp, synthetic construct
  source 1..17: mol_type = other DNA
gggccaggccaggcggg

SEQ ID NO: 158170 - DNA, 17 bp, synthetic construct
  source 1..17: mol_type = other DNA
ggggccaggccaggcgg

SEQ ID NO: 158171 - DNA, 17 bp, synthetic construct
  source 1..17: mol_type = other DNA
tggggccaggccaggcg

SEQ ID NO: 158172 - DNA, 17 bp, synthetic construct
  source 1..17: mol_type = other DNA
ttggggccaggccaggc

SEQ ID NO: 158173 - DNA, 17 bp, synthetic construct
  source 1..17: mol_type = other DNA
gttggggccaggccagg

SEQ ID NO: 158174 - DNA, 17 bp, synthetic construct
  source 1..17: mol_type = other DNA
tgttggggccaggccag

SEQ ID NO: 158175 - DNA, 17 bp, synthetic construct
  source 1..17: mol_type = other DNA
gtgttggggccaggcca

SEQ ID NO: 158176 - DNA, 17 bp, synthetic construct
  source 1..17: mol_type = other DNA
cgtgttggggccaggcc

SEQ ID NO: 158177 - DNA, 17 bp, synthetic construct
  source 1..17: mol_type = other DNA
gcgtgttggggccaggc

SEQ ID NO: 158178 - DNA, 17 bp, synthetic construct
  source 1..17: mol_type = other DNA
ggcgtgttggggccagg

SEQ ID NO: 158179 - DNA, 17 bp, synthetic construct
  source 1..17: mol_type = other DNA
gggcgtgttggggccag

SEQ ID NO: 158180 - DNA, 17 bp, synthetic construct
  source 1..17: mol_type = other DNA
ggggcgtgttggggcca

SEQ ID NO: 158181 - DNA, 17 bp, synthetic construct
  source 1..17: mol_type = other DNA
tggggcgtgttggggcc

SEQ ID NO: 158182 - DNA, 17 bp, synthetic construct
  source 1..17: mol_type = other DNA
gtggggcgtgttggggc

SEQ ID NO: 158183 - DNA, 17 bp, synthetic construct
  source 1..17: mol_type = other DNA
ggtggggcgtgttgggg

SEQ ID NO: 158184 - DNA, 17 bp, synthetic construct
  source 1..17: mol_type = other DNA
gggtggggcgtgttggg

SEQ ID NO: 158185 - DNA, 17 bp, synthetic construct
  source 1..17: mol_type = other DNA
agggtggggcgtgttgg

SEQ ID NO: 158186 - DNA, 17 bp, synthetic construct
  source 1..17: mol_type = other DNA
cagggtggggcgtgttg

SEQ ID NO: 158187 - DNA, 17 bp, synthetic construct
  source 1..17: mol_type = other DNA
gcagggtggggcgtgtt

SEQ ID NO: 158188 - DNA, 17 bp, synthetic construct
  source 1..17: mol_type = other DNA
ggcagggtggggcgtgt

SEQ ID NO: 158189 - DNA, 17 bp, synthetic construct
  source 1..17: mol_type = other DNA
gggcagggtggggcgtg

SEQ ID NO: 158190 - DNA, 17 bp, synthetic construct
  source 1..17: mol_type = other DNA
ggggcagggtggggcgt

SEQ ID NO: 158191 - DNA, 17 bp, synthetic construct
  source 1..17: mol_type = other DNA
tggggcagggtggggcg

SEQ ID NO: 158192 - DNA, 17 bp, synthetic construct
  source 1..17: mol_type = other DNA
gtggggcagggtggggc

SEQ ID NO: 158193 - DNA, 17 bp, synthetic construct
  source 1..17: mol_type = other DNA
ggtggggcagggtgggg

SEQ ID NO: 158194 - DNA, 17 bp, synthetic construct
  source 1..17: mol_type = other DNA
gggtggggcagggtggg

SEQ ID NO: 158195 - DNA, 17 bp, synthetic construct
  source 1..17: mol_type = other DNA
ggggtggggcagggtgg

SEQ ID NO: 158196 - DNA, 17 bp, synthetic construct
  source 1..17: mol_type = other DNA
tggggtggggcagggtg

SEQ ID NO: 158197 - DNA, 17 bp, synthetic construct
  source 1..17: mol_type = other DNA
gtggggtggggcagggt

SEQ ID NO: 158198 - DNA, 17 bp, synthetic construct
  source 1..17: mol_type = other DNA
ggtggggtggggcaggg

SEQ ID NO: 158199 - DNA, 17 bp, synthetic construct
  source 1..17: mol_type = other DNA
aggtggggtggggcagg

SEQ ID NO: 158200 - DNA, 17 bp, synthetic construct
  source 1..17: mol_type = other DNA
caggtggggtggggcag

SEQ ID NO: 158201 - DNA, 17 bp, synthetic construct
  source 1..17: mol_type = other DNA
tcaggtggggtggggca

SEQ ID NO: 158202 - DNA, 17 bp, synthetic construct
  source 1..17: mol_type = other DNA
ttcaggtggggtggggc

SEQ ID NO: 158203 - DNA, 17 bp, synthetic construct
  source 1..17: mol_type = other DNA
gttcaggtggggtgggg

SEQ ID NO: 158204 - DNA, 17 bp, synthetic construct
  source 1..17: mol_type = other DNA
ggttcaggtggggtggg

SEQ ID NO: 158205 - DNA, 17 bp, synthetic construct
  source 1..17: mol_type = other DNA
gggttcaggtggggtgg

SEQ ID NO: 158206 - DNA, 17 bp, synthetic construct
  source 1..17: mol_type = other DNA
agggttcaggtggggtg

SEQ ID NO: 158207 - DNA, 17 bp, synthetic construct
  source 1..17: mol_type = other DNA
cagggttcaggtggggt

SEQ ID NO: 158208 - DNA, 17 bp, synthetic construct
  source 1..17: mol_type = other DNA
gcagggttcaggtgggg

SEQ ID NO: 158209 - DNA, 17 bp, synthetic construct
  source 1..17: mol_type = other DNA
ggcagggttcaggtggg

SEQ ID NO: 158210 - DNA, 17 bp, synthetic construct
  source 1..17: mol_type = other DNA
cggcagggttcaggtgg

SEQ ID NO: 158211 - DNA, 17 bp, synthetic construct
  source 1..17: mol_type = other DNA
ccggcagggttcaggtg

SEQ ID NO: 158212 - DNA, 17 bp, synthetic construct
  source 1..17: mol_type = other DNA
cccggcagggttcaggt

SEQ ID NO: 158213 - DNA, 17 bp, synthetic construct
  source 1..17: mol_type = other DNA
gcccggcagggttcagg

SEQ ID NO: 158214 - DNA, 17 bp, synthetic construct
  source 1..17: mol_type = other DNA
ggcccggcagggttcag

SEQ ID NO: 158215 - DNA, 17 bp, synthetic construct
  source 1..17: mol_type = other DNA
tggcccggcagggttca

SEQ ID NO: 158216 - DNA, 17 bp, synthetic construct
  source 1..17: mol_type = other DNA
ctggcccggcagggttc

SEQ ID NO: 158217 - DNA, 17 bp, synthetic construct
  source 1..17: mol_type = other DNA
cctggcccggcagggtt

SEQ ID NO: 158218 - DNA, 17 bp, synthetic construct
  source 1..17: mol_type = other DNA
acctggcccggcagggt

SEQ ID NO: 158219 - DNA, 17 bp, synthetic construct
  source 1..17: mol_type = other DNA
gacctggcccggcaggg

SEQ ID NO: 158220 - DNA, 17 bp, synthetic construct
  source 1..17: mol_type = other DNA
tgacctggcccggcagg

SEQ ID NO: 158221 - DNA, 17 bp, synthetic construct
  source 1..17: mol_type = other DNA
ctgacctggcccggcag

SEQ ID NO: 158222 - DNA, 17 bp, synthetic construct
  source 1..17: mol_type = other DNA
actgacctggcccggca

SEQ ID NO: 158223 - DNA, 17 bp, synthetic construct
  source 1..17: mol_type = other DNA
gactgacctggcccggc

SEQ ID NO: 158224 - DNA, 17 bp, synthetic construct
  source 1..17: mol_type = other DNA
ggactgacctggcccgg

SEQ ID NO: 158225 - DNA, 17 bp, synthetic construct
  source 1..17: mol_type = other DNA
aggactgacctggcccg

SEQ ID NO: 158226 - DNA, 17 bp, synthetic construct
  source 1..17: mol_type = other DNA
gaggactgacctggccc

SEQ ID NO: 158227 - DNA, 17 bp, synthetic construct
  source 1..17: mol_type = other DNA
tgaggactgacctggcc

SEQ ID NO: 158228 - DNA, 17 bp, synthetic construct
  source 1..17: mol_type = other DNA
gtgaggactgacctggc

SEQ ID NO: 158229 - DNA, 17 bp, synthetic construct
  source 1..17: mol_type = other DNA
ggtgaggactgacctgg

SEQ ID NO: 158230 - DNA, 17 bp, synthetic construct
  source 1..17: mol_type = other DNA
aggtgaggactgacctg

SEQ ID NO: 158231 - DNA, 17 bp, synthetic construct
  source 1..17: mol_type = other DNA
caggtgaggactgacct

SEQ ID NO: 158232 - DNA, 17 bp, synthetic construct
  source 1..17: mol_type = other DNA
ccaggtgaggactgacc

SEQ ID NO: 158233 - DNA, 17 bp, synthetic construct
  source 1..17: mol_type = other DNA
cccaggtgaggactgac

SEQ ID NO: 158234 - DNA, 17 bp, synthetic construct
  source 1..17: mol_type = other DNA
gcccaggtgaggactga

SEQ ID NO: 158235 - DNA, 17 bp, synthetic construct
  source 1..17: mol_type = other DNA
agcccaggtgaggactg

SEQ ID NO: 158236 - DNA, 17 bp, synthetic construct
  source 1..17: mol_type = other DNA
gagcccaggtgaggact

SEQ ID NO: 158237 - DNA, 17 bp, synthetic construct
  source 1..17: mol_type = other DNA
agagcccaggtgaggac

SEQ ID NO: 158238 - DNA, 17 bp, synthetic construct
  source 1..17: mol_type = other DNA
cagagcccaggtgagga

SEQ ID NO: 158239 - DNA, 17 bp, synthetic construct
  source 1..17: mol_type = other DNA
gcagagcccaggtgagg

SEQ ID NO: 158240 - DNA, 17 bp, synthetic construct
  source 1..17: mol_type = other DNA
ggcagagcccaggtgag

SEQ ID NO: 158241 - DNA, 17 bp, synthetic construct
  source 1..17: mol_type = other DNA
tggcagagcccaggtga

SEQ ID NO: 158242 - DNA, 17 bp, synthetic construct
  source 1..17: mol_type = other DNA
gtggcagagcccaggtg

SEQ ID NO: 158243 - DNA, 17 bp, synthetic construct
  source 1..17: mol_type = other DNA
tgtggcagagcccaggt

SEQ ID NO: 158244 - DNA, 17 bp, synthetic construct
  source 1..17: mol_type = other DNA
ctgtggcagagcccagg

SEQ ID NO: 158245 - DNA, 17 bp, synthetic construct
  source 1..17: mol_type = other DNA
cctgtggcagagcccag

SEQ ID NO: 158246 - DNA, 17 bp, synthetic construct
  source 1..17: mol_type = other DNA
gcctgtggcagagccca

SEQ ID NO: 158247 - DNA, 17 bp, synthetic construct
  source 1..17: mol_type = other DNA
tgcctgtggcagagccc

SEQ ID NO: 158248 - DNA, 17 bp, synthetic construct
  source 1..17: mol_type = other DNA
gtgcctgtggcagagcc

SEQ ID NO: 158249 - DNA, 17 bp, synthetic construct
  source 1..17: mol_type = other DNA
ggtgcctgtggcagagc

SEQ ID NO: 158250 - DNA, 17 bp, synthetic construct
  source 1..17: mol_type = other DNA
gggtgcctgtggcagag

SEQ ID NO: 158251 - DNA, 17 bp, synthetic construct
  source 1..17: mol_type = other DNA
tgggtgcctgtggcaga

SEQ ID NO: 158252 - DNA, 17 bp, synthetic construct
  source 1..17: mol_type = other DNA
atgggtgcctgtggcag

SEQ ID NO: 158253 - DNA, 17 bp, synthetic construct
  source 1..17: mol_type = other DNA
catgggtgcctgtggca

SEQ ID NO: 158254 - DNA, 17 bp, synthetic construct
  source 1..17: mol_type = other DNA
gcatgggtgcctgtggc

SEQ ID NO: 158255 - DNA, 17 bp, synthetic construct
  source 1..17: mol_type = other DNA
ggcatgggtgcctgtgg

SEQ ID NO: 158256 - DNA, 17 bp, synthetic construct
  source 1..17: mol_type = other DNA
gggcatgggtgcctgtg

SEQ ID NO: 158257 - DNA, 17 bp, synthetic construct
  source 1..17: mol_type = other DNA
agggcatgggtgcctgt

SEQ ID NO: 158258 - DNA, 17 bp, synthetic construct
  source 1..17: mol_type = other DNA
cagggcatgggtgcctg

SEQ ID NO: 158259 - DNA, 17 bp, synthetic construct
  source 1..17: mol_type = other DNA
tcagggcatgggtgcct

SEQ ID NO: 158260 - DNA, 17 bp, synthetic construct
  source 1..17: mol_type = other DNA
gtcagggcatgggtgcc

SEQ ID NO: 158261 - DNA, 17 bp, synthetic construct
  source 1..17: mol_type = other DNA
tgtcagggcatgggtgc

SEQ ID NO: 158262 - DNA, 17 bp, synthetic construct
  source 1..17: mol_type = other DNA
gtgtcagggcatgggtg

SEQ ID NO: 158263 - DNA, 17 bp, synthetic construct
  source 1..17: mol_type = other DNA
cgtgtcagggcatgggt

SEQ ID NO: 158264 - DNA, 17 bp, synthetic construct
  source 1..17: mol_type = other DNA
gcgtgtcagggcatggg

SEQ ID NO: 158265 - DNA, 17 bp, synthetic construct
  source 1..17: mol_type = other DNA
ggcgtgtcagggcatgg

SEQ ID NO: 158266 - DNA, 17 bp, synthetic construct
  source 1..17: mol_type = other DNA
tggcgtgtcagggcatg

SEQ ID NO: 158267 - DNA, 17 bp, synthetic construct
  source 1..17: mol_type = other DNA
ctggcgtgtcagggcat

SEQ ID NO: 158268 - DNA, 17 bp, synthetic construct
  source 1..17: mol_type = other DNA
cctggcgtgtcagggca

SEQ ID NO: 158269 - DNA, 17 bp, synthetic construct
  source 1..17: mol_type = other DNA
ccctggcgtgtcagggc

SEQ ID NO: 158270 - DNA, 17 bp, synthetic construct
  source 1..17: mol_type = other DNA
tccctggcgtgtcaggg

SEQ ID NO: 158271 - DNA, 17 bp, synthetic construct
  source 1..17: mol_type = other DNA
gtccctggcgtgtcagg

SEQ ID NO: 158272 - DNA, 17 bp, synthetic construct
  source 1..17: mol_type = other DNA
cgtccctggcgtgtcag

SEQ ID NO: 158273 - DNA, 17 bp, synthetic construct
  source 1..17: mol_type = other DNA
ccgtccctggcgtgtca

SEQ ID NO: 158274 - DNA, 17 bp, synthetic construct
  source 1..17: mol_type = other DNA
tccgtccctggcgtgtc

SEQ ID NO: 158275 - DNA, 17 bp, synthetic construct
  source 1..17: mol_type = other DNA
ctccgtccctggcgtgt

SEQ ID NO: 158276 - DNA, 17 bp, synthetic construct
  source 1..17: mol_type = other DNA
cctccgtccctggcgtg

SEQ ID NO: 158277 - DNA, 17 bp, synthetic construct
  source 1..17: mol_type = other DNA
ccctccgtccctggcgt

SEQ ID NO: 158278 - DNA, 17 bp, synthetic construct
  source 1..17: mol_type = other DNA
cccctccgtccctggcg

SEQ ID NO: 158279 - DNA, 17 bp, synthetic construct
  source 1..17: mol_type = other DNA
gcccctccgtccctggc

SEQ ID NO: 158280 - DNA, 17 bp, synthetic construct
  source 1..17: mol_type = other DNA
ggcccctccgtccctgg

SEQ ID NO: 158281 - DNA, 17 bp, synthetic construct
  source 1..17: mol_type = other DNA
tggcccctccgtccctg

SEQ ID NO: 158282 - DNA, 17 bp, synthetic construct
  source 1..17: mol_type = other DNA
ctggcccctccgtccct

SEQ ID NO: 158283 - DNA, 17 bp, synthetic construct
  source 1..17: mol_type = other DNA
actggcccctccgtccc

SEQ ID NO: 158284 - DNA, 17 bp, synthetic construct
  source 1..17: mol_type = other DNA
cactggcccctccgtcc

SEQ ID NO: 158285 - DNA, 17 bp, synthetic construct
  source 1..17: mol_type = other DNA
ccactggcccctccgtc

SEQ ID NO: 158286 - DNA, 17 bp, synthetic construct
  source 1..17: mol_type = other DNA
cccactggcccctccgt

SEQ ID NO: 158287 - DNA, 17 bp, synthetic construct
  source 1..17: mol_type = other DNA
acccactggcccctccg

SEQ ID NO: 158288 - DNA, 17 bp, synthetic construct
  source 1..17: mol_type = other DNA
gacccactggcccctcc

SEQ ID NO: 158289 - DNA, 17 bp, synthetic construct
  source 1..17: mol_type = other DNA
agacccactggcccctc

SEQ ID NO: 158290 - DNA, 17 bp, synthetic construct
  source 1..17: mol_type = other DNA
gagacccactggcccct

SEQ ID NO: 158291 - DNA, 17 bp, synthetic construct
  source 1..17: mol_type = other DNA
agagacccactggcccc

SEQ ID NO: 158292 - DNA, 17 bp, synthetic construct
  source 1..17: mol_type = other DNA
cagagacccactggccc

SEQ ID NO: 158293 - DNA, 17 bp, synthetic construct
  source 1..17: mol_type = other DNA
gcagagacccactggcc

SEQ ID NO: 158294 - DNA, 17 bp, synthetic construct
  source 1..17: mol_type = other DNA
ggcagagacccactggc

SEQ ID NO: 158295 - DNA, 17 bp, synthetic construct
  source 1..17: mol_type = other DNA
gggcagagacccactgg

SEQ ID NO: 158296 - DNA, 17 bp, synthetic construct
  source 1..17: mol_type = other DNA
ggggcagagacccactg

SEQ ID NO: 158297 - DNA, 17 bp, synthetic construct
  source 1..17: mol_type = other DNA
cggggcagagacccact

SEQ ID NO: 158298 - DNA, 17 bp, synthetic construct
  source 1..17: mol_type = other DNA
gcggggcagagacccac

SEQ ID NO: 158299 - DNA, 17 bp, synthetic construct
  source 1..17: mol_type = other DNA
tgcggggcagagaccca

SEQ ID NO: 158300 - DNA, 17 bp, synthetic construct
  source 1..17: mol_type = other DNA
ctgcggggcagagaccc

SEQ ID NO: 158301 - DNA, 17 bp, synthetic construct
  source 1..17: mol_type = other DNA
actgcggggcagagacc

SEQ ID NO: 158302 - DNA, 17 bp, synthetic construct
  source 1..17: mol_type = other DNA
cactgcggggcagagac

SEQ ID NO: 158303 - DNA, 17 bp, synthetic construct
  source 1..17: mol_type = other DNA
acactgcggggcagaga

SEQ ID NO: 158304 - DNA, 17 bp, synthetic construct
  source 1..17: mol_type = other DNA
cacactgcggggcagag

SEQ ID NO: 158305 - DNA, 17 bp, synthetic construct
  source 1..17: mol_type = other DNA
ccacactgcggggcaga

SEQ ID NO: 158306 - DNA, 17 bp, synthetic construct
  source 1..17: mol_type = other DNA
gccacactgcggggcag

SEQ ID NO: 158307 - DNA, 17 bp, synthetic construct
  source 1..17: mol_type = other DNA
ggccacactgcggggca

SEQ ID NO: 158308 - DNA, 17 bp, synthetic construct
  source 1..17: mol_type = other DNA
cggccacactgcggggc

SEQ ID NO: 158309 - DNA, 17 bp, synthetic construct
  source 1..17: mol_type = other DNA
ccggccacactgcgggg

SEQ ID NO: 158310 - DNA, 17 bp, synthetic construct
  source 1..17: mol_type = other DNA
cccggccacactgcggg

SEQ ID NO: 158311 - DNA, 17 bp, synthetic construct
  source 1..17: mol_type = other DNA
ccccggccacactgcgg

SEQ ID NO: 158312 - DNA, 17 bp, synthetic construct
  source 1..17: mol_type = other DNA
accccggccacactgcg

SEQ ID NO: 158313 - DNA, 17 bp, synthetic construct
  source 1..17: mol_type = other DNA
caccccggccacactgc

SEQ ID NO: 158314 - DNA, 17 bp, synthetic construct
  source 1..17: mol_type = other DNA
acaccccggccacactg

SEQ ID NO: 158315 - DNA, 17 bp, synthetic construct
  source 1..17: mol_type = other DNA
gacaccccggccacact

SEQ ID NO: 158316 - DNA, 17 bp, synthetic construct
  source 1..17: mol_type = other DNA
ggacaccccggccacac

SEQ ID NO: 158317 - DNA, 17 bp, synthetic construct
  source 1..17: mol_type = other DNA
aggacaccccggccaca

SEQ ID NO: 158318 - DNA, 17 bp, synthetic construct
  source 1..17: mol_type = other DNA
caggacaccccggccac

SEQ ID NO: 158319 - DNA, 17 bp, synthetic construct
  source 1..17: mol_type = other DNA
ccaggacaccccggcca

SEQ ID NO: 158320 - DNA, 17 bp, synthetic construct
  source 1..17: mol_type = other DNA
cccaggacaccccggcc

SEQ ID NO: 158321 - DNA, 17 bp, synthetic construct
  source 1..17: mol_type = other DNA
ccccaggacaccccggc

SEQ ID NO: 158322 - DNA, 17 bp, synthetic construct
  source 1..17: mol_type = other DNA
accccaggacaccccgg

SEQ ID NO: 158323 - DNA, 17 bp, synthetic construct
  source 1..17: mol_type = other DNA
aaccccaggacaccccg

SEQ ID NO: 158324 - DNA, 17 bp, synthetic construct
  source 1..17: mol_type = other DNA
caaccccaggacacccc

SEQ ID NO: 158325 - DNA, 17 bp, synthetic construct
  source 1..17: mol_type = other DNA
ccaaccccaggacaccc

SEQ ID NO: 158326 - DNA, 17 bp, synthetic construct
  source 1..17: mol_type = other DNA
cccaaccccaggacacc

SEQ ID NO: 158327 - DNA, 17 bp, synthetic construct
  source 1..17: mol_type = other DNA
ccccaaccccaggacac

SEQ ID NO: 158328 - DNA, 17 bp, synthetic construct
  source 1..17: mol_type = other DNA
cccccaaccccaggaca

SEQ ID NO: 158329 - DNA, 17 bp, synthetic construct
  source 1..17: mol_type = other DNA
gcccccaaccccaggac

SEQ ID NO: 158330 - DNA, 17 bp, synthetic construct
  source 1..17: mol_type = other DNA
agcccccaaccccagga

SEQ ID NO: 158331 - DNA, 17 bp, synthetic construct
  source 1..17: mol_type = other DNA
cagcccccaaccccagg

SEQ ID NO: 158332 - DNA, 17 bp, synthetic construct
  source 1..17: mol_type = other DNA
gcagcccccaaccccag

SEQ ID NO: 158333 - DNA, 17 bp, synthetic construct
  source 1..17: mol_type = other DNA
tgcagcccccaacccca

SEQ ID NO: 158334 - DNA, 17 bp, synthetic construct
  source 1..17: mol_type = other DNA
ctgcagcccccaacccc

SEQ ID NO: 158335 - DNA, 17 bp, synthetic construct
  source 1..17: mol_type = other DNA
cctgcagcccccaaccc

SEQ ID NO: 158336 - DNA, 17 bp, synthetic construct
  source 1..17: mol_type = other DNA
acctgcagcccccaacc

SEQ ID NO: 158337 - DNA, 17 bp, synthetic construct
  source 1..17: mol_type = other DNA
cacctgcagcccccaac

SEQ ID NO: 158338 - DNA, 17 bp, synthetic construct
  source 1..17: mol_type = other DNA
acacctgcagcccccaa

SEQ ID NO: 158339 - DNA, 17 bp, synthetic construct
  source 1..17: mol_type = other DNA
gacacctgcagccccca

SEQ ID NO: 158340 - DNA, 17 bp, synthetic construct
  source 1..17: mol_type = other DNA
tgacacctgcagccccc

SEQ ID NO: 158341 - DNA, 17 bp, synthetic construct
  source 1..17: mol_type = other DNA
atgacacctgcagcccc

SEQ ID NO: 158342 - DNA, 17 bp, synthetic construct
  source 1..17: mol_type = other DNA
catgacacctgcagccc

SEQ ID NO: 158343 - DNA, 17 bp, synthetic construct
  source 1..17: mol_type = other DNA
ccatgacacctgcagcc

SEQ ID NO: 158344 - DNA, 17 bp, synthetic construct
  source 1..17: mol_type = other DNA
tccatgacacctgcagc

SEQ ID NO: 158345 - DNA, 17 bp, synthetic construct
  source 1..17: mol_type = other DNA
ttccatgacacctgcag

SEQ ID NO: 158346 - DNA, 17 bp, synthetic construct
  source 1..17: mol_type = other DNA
cttccatgacacctgca

SEQ ID NO: 158347 - DNA, 17 bp, synthetic construct
  source 1..17: mol_type = other DNA
gcttccatgacacctgc

SEQ ID NO: 158348 - DNA, 17 bp, synthetic construct
  source 1..17: mol_type = other DNA
agcttccatgacacctg

SEQ ID NO: 158349 - DNA, 17 bp, synthetic construct
  source 1..17: mol_type = other DNA
aagcttccatgacacct

SEQ ID NO: 158350 - DNA, 17 bp, synthetic construct
  source 1..17: mol_type = other DNA
aaagcttccatgacacc

SEQ ID NO: 158351 - DNA, 17 bp, synthetic construct
  source 1..17: mol_type = other DNA
caaagcttccatgacac

SEQ ID NO: 158352 - DNA, 17 bp, synthetic construct
  source 1..17: mol_type = other DNA
ccaaagcttccatgaca

SEQ ID NO: 158353 - DNA, 17 bp, synthetic construct
  source 1..17: mol_type = other DNA
gccaaagcttccatgac

SEQ ID NO: 158354 - DNA, 17 bp, synthetic construct
  source 1..17: mol_type = other DNA
agccaaagcttccatga

SEQ ID NO: 158355 - DNA, 17 bp, synthetic construct
  source 1..17: mol_type = other DNA
gagccaaagcttccatg

SEQ ID NO: 158356 - DNA, 17 bp, synthetic construct
  source 1..17: mol_type = other DNA
cgagccaaagcttccat

SEQ ID NO: 158357 - DNA, 17 bp, synthetic construct
  source 1..17: mol_type = other DNA
ccgagccaaagcttcca

SEQ ID NO: 158358 - DNA, 17 bp, synthetic construct
  source 1..17: mol_type = other DNA
cccgagccaaagcttcc

SEQ ID NO: 158359 - DNA, 17 bp, synthetic construct
  source 1..17: mol_type = other DNA
ccccgagccaaagcttc

SEQ ID NO: 158360 - DNA, 17 bp, synthetic construct
  source 1..17: mol_type = other DNA
cccccgagccaaagctt

SEQ ID NO: 158361 - DNA, 17 bp, synthetic construct
  source 1..17: mol_type = other DNA
gcccccgagccaaagct

SEQ ID NO: 158362 - DNA, 17 bp, synthetic construct
  source 1..17: mol_type = other DNA
agcccccgagccaaagc

SEQ ID NO: 158363 - DNA, 17 bp, synthetic construct
  source 1..17: mol_type = other DNA
cagcccccgagccaaag

SEQ ID NO: 158364 - DNA, 17 bp, synthetic construct
  source 1..17: mol_type = other DNA
acagcccccgagccaaa

SEQ ID NO: 158365 - DNA, 17 bp, synthetic construct
  source 1..17: mol_type = other DNA
aacagcccccgagccaa

SEQ ID NO: 158366 - DNA, 17 bp, synthetic construct
  source 1..17: mol_type = other DNA
taacagcccccgagcca

SEQ ID NO: 158367 - DNA, 17 bp, synthetic construct
  source 1..17: mol_type = other DNA
ttaacagcccccgagcc

SEQ ID NO: 158368 - DNA, 17 bp, synthetic construct
  source 1..17: mol_type = other DNA
gttaacagcccccgagc

SEQ ID NO: 158369 - DNA, 17 bp, synthetic construct
  source 1..17: mol_type = other DNA
agttaacagcccccgag

SEQ ID NO: 158370 - DNA, 17 bp, synthetic construct
  source 1..17: mol_type = other DNA
aagttaacagcccccga

SEQ ID NO: 158371 - DNA, 17 bp, synthetic construct
  source 1..17: mol_type = other DNA
caagttaacagcccccg

SEQ ID NO: 158372 - DNA, 17 bp, synthetic construct
  source 1..17: mol_type = other DNA
tcaagttaacagccccc

SEQ ID NO: 158373 - DNA, 17 bp, synthetic construct
  source 1..17: mol_type = other DNA
atcaagttaacagcccc

SEQ ID NO: 158374 - DNA, 17 bp, synthetic construct
  source 1..17: mol_type = other DNA
gatcaagttaacagccc

SEQ ID NO: 158375 - DNA, 17 bp, synthetic construct
  source 1..17: mol_type = other DNA
tgatcaagttaacagcc

SEQ ID NO: 158376 - DNA, 17 bp, synthetic construct
  source 1..17: mol_type = other DNA
ctgatcaagttaacagc

SEQ ID NO: 158377 - DNA, 17 bp, synthetic construct
  source 1..17: mol_type = other DNA
gctgatcaagttaacag

SEQ ID NO: 158378 - DNA, 17 bp, synthetic construct
  source 1..17: mol_type = other DNA
tgctgatcaagttaaca

SEQ ID NO: 158379 - DNA, 17 bp, synthetic construct
  source 1..17: mol_type = other DNA
ctgctgatcaagttaac

SEQ ID NO: 158380 - DNA, 17 bp, synthetic construct
  source 1..17: mol_type = other DNA
cctgctgatcaagttaa

SEQ ID NO: 158381 - DNA, 17 bp, synthetic construct
  source 1..17: mol_type = other DNA
tcctgctgatcaagtta

SEQ ID NO: 158382 - DNA, 17 bp, synthetic construct
  source 1..17: mol_type = other DNA
gtcctgctgatcaagtt

SEQ ID NO: 158383 - DNA, 17 bp, synthetic construct
  source 1..17: mol_type = other DNA
tgtcctgctgatcaagt

SEQ ID NO: 158384 - DNA, 17 bp, synthetic construct
  source 1..17: mol_type = other DNA
ctgtcctgctgatcaag

SEQ ID NO: 158385 - DNA, 17 bp, synthetic construct
  source 1..17: mol_type = other DNA
cctgtcctgctgatcaa

SEQ ID NO: 158386 - DNA, 17 bp, synthetic construct
  source 1..17: mol_type = other DNA
gcctgtcctgctgatca

SEQ ID NO: 158387 - DNA, 17 bp, synthetic construct
  source 1..17: mol_type = other DNA
agcctgtcctgctgatc

SEQ ID NO: 158388 - DNA, 17 bp, synthetic construct
  source 1..17: mol_type = other DNA
gagcctgtcctgctgat

SEQ ID NO: 158389 - DNA, 17 bp, synthetic construct
  source 1..17: mol_type = other DNA
tgagcctgtcctgctga

SEQ ID NO: 158390 - DNA, 17 bp, synthetic construct
  source 1..17: mol_type = other DNA
ctgagcctgtcctgctg

SEQ ID NO: 158391 - DNA, 17 bp, synthetic construct
  source 1..17: mol_type = other DNA
cctgagcctgtcctgct

SEQ ID NO: 158392 - DNA, 17 bp, synthetic construct
  source 1..17: mol_type = other DNA
ccctgagcctgtcctgc

SEQ ID NO: 158393 - DNA, 17 bp, synthetic construct
  source 1..17: mol_type = other DNA
gccctgagcctgtcctg

SEQ ID NO: 158394 - DNA, 17 bp, synthetic construct
  source 1..17: mol_type = other DNA
agccctgagcctgtcct

SEQ ID NO: 158395 - DNA, 17 bp, synthetic construct
  source 1..17: mol_type = other DNA
cagccctgagcctgtcc

SEQ ID NO: 158396 - DNA, 17 bp, synthetic construct
  source 1..17: mol_type = other DNA
gcagccctgagcctgtc

SEQ ID NO: 158397 - DNA, 17 bp, synthetic construct
  source 1..17: mol_type = other DNA
ggcagccctgagcctgt

SEQ ID NO: 158398 - DNA, 17 bp, synthetic construct
  source 1..17: mol_type = other DNA
aggcagccctgagcctg

SEQ ID NO: 158399 - DNA, 17 bp, synthetic construct
  source 1..17: mol_type = other DNA
caggcagccctgagcct

SEQ ID NO: 158400 - DNA, 17 bp, synthetic construct
  source 1..17: mol_type = other DNA
ccaggcagccctgagcc

SEQ ID NO: 158401 - DNA, 17 bp, synthetic construct
  source 1..17: mol_type = other DNA
cccaggcagccctgagc

SEQ ID NO: 158402 - DNA, 17 bp, synthetic construct
  source 1..17: mol_type = other DNA
ccccaggcagccctgag

SEQ ID NO: 158403 - DNA, 17 bp, synthetic construct
  source 1..17: mol_type = other DNA
accccaggcagccctga

SEQ ID NO: 158404 - DNA, 17 bp, synthetic construct
  source 1..17: mol_type = other DNA
gaccccaggcagccctg

SEQ ID NO: 158405 - DNA, 17 bp, synthetic construct
  source 1..17: mol_type = other DNA
tgaccccaggcagccct

SEQ ID NO: 158406 - DNA, 17 bp, synthetic construct
  source 1..17: mol_type = other DNA
ctgaccccaggcagccc

SEQ ID NO: 158407 - DNA, 17 bp, synthetic construct
  source 1..17: mol_type = other DNA
actgaccccaggcagcc

SEQ ID NO: 158408 - DNA, 17 bp, synthetic construct
  source 1..17: mol_type = other DNA
aactgaccccaggcagc

SEQ ID NO: 158409 - DNA, 17 bp, synthetic construct
  source 1..17: mol_type = other DNA
caactgaccccaggcag

SEQ ID NO: 158410 - DNA, 17 bp, synthetic construct
  source 1..17: mol_type = other DNA
tcaactgaccccaggca

SEQ ID NO: 158411 - DNA, 17 bp, synthetic construct
  source 1..17: mol_type = other DNA
ctcaactgaccccaggc

SEQ ID NO: 158412 - DNA, 17 bp, synthetic construct
  source 1..17: mol_type = other DNA
cctcaactgaccccagg

SEQ ID NO: 158413 - DNA, 17 bp, synthetic construct
  source 1..17: mol_type = other DNA
ccctcaactgaccccag

SEQ ID NO: 158414 - DNA, 17 bp, synthetic construct
  source 1..17: mol_type = other DNA
gccctcaactgacccca

SEQ ID NO: 158415 - DNA, 17 bp, synthetic construct
  source 1..17: mol_type = other DNA
ggccctcaactgacccc

SEQ ID NO: 158416 - DNA, 17 bp, synthetic construct
  source 1..17: mol_type = other DNA
cggccctcaactgaccc

SEQ ID NO: 158417 - DNA, 17 bp, synthetic construct
  source 1..17: mol_type = other DNA
acggccctcaactgacc

SEQ ID NO: 158418 - DNA, 17 bp, synthetic construct
  source 1..17: mol_type = other DNA
cacggccctcaactgac

SEQ ID NO: 158419 - DNA, 17 bp, synthetic construct
  source 1..17: mol_type = other DNA
ccacggccctcaactga

SEQ ID NO: 158420 - DNA, 17 bp, synthetic construct
  source 1..17: mol_type = other DNA
gccacggccctcaactg

SEQ ID NO: 158421 - DNA, 17 bp, synthetic construct
  source 1..17: mol_type = other DNA
agccacggccctcaact

SEQ ID NO: 158422 - DNA, 17 bp, synthetic construct
  source 1..17: mol_type = other DNA
cagccacggccctcaac

SEQ ID NO: 158423 - DNA, 17 bp, synthetic construct
  source 1..17: mol_type = other DNA
gcagccacggccctcaa

SEQ ID NO: 158424 - DNA, 17 bp, synthetic construct
  source 1..17: mol_type = other DNA
ggcagccacggccctca

SEQ ID NO: 158425 - DNA, 17 bp, synthetic construct
  source 1..17: mol_type = other DNA
gggcagccacggccctc

SEQ ID NO: 158426 - DNA, 17 bp, synthetic construct
  source 1..17: mol_type = other DNA
agggcagccacggccct

SEQ ID NO: 158427 - DNA, 17 bp, synthetic construct
  source 1..17: mol_type = other DNA
aagggcagccacggccc

SEQ ID NO: 158428 - DNA, 17 bp, synthetic construct
  source 1..17: mol_type = other DNA
gaagggcagccacggcc

SEQ ID NO: 158429 - DNA, 17 bp, synthetic construct
  source 1..17: mol_type = other DNA
ggaagggcagccacggc

SEQ ID NO: 158430 - DNA, 17 bp, synthetic construct
  source 1..17: mol_type = other DNA
gggaagggcagccacgg

SEQ ID NO: 158431 - DNA, 17 bp, synthetic construct
  source 1..17: mol_type = other DNA
ggggaagggcagccacg

SEQ ID NO: 158432 - DNA, 17 bp, synthetic construct
  source 1..17: mol_type = other DNA
tggggaagggcagccac

SEQ ID NO: 158433 - DNA, 17 bp, synthetic construct
  source 1..17: mol_type = other DNA
ctggggaagggcagcca

SEQ ID NO: 158434 - DNA, 17 bp, synthetic construct
  source 1..17: mol_type = other DNA
cctggggaagggcagcc

SEQ ID NO: 158435 - DNA, 17 bp, synthetic construct
  source 1..17: mol_type = other DNA
tcctggggaagggcagc

SEQ ID NO: 158436 - DNA, 17 bp, synthetic construct
  source 1..17: mol_type = other DNA
gtcctggggaagggcag

SEQ ID NO: 158437 - DNA, 17 bp, synthetic construct
  source 1..17: mol_type = other DNA
ggtcctggggaagggca

SEQ ID NO: 158438 - DNA, 17 bp, synthetic construct
  source 1..17: mol_type = other DNA
gggtcctggggaagggc

SEQ ID NO: 158439 - DNA, 17 bp, synthetic construct
  source 1..17: mol_type = other DNA
ggggtcctggggaaggg

SEQ ID NO: 158440 - DNA, 17 bp, synthetic construct
  source 1..17: mol_type = other DNA
aggggtcctggggaagg

SEQ ID NO: 158441 - DNA, 17 bp, synthetic construct
  source 1..17: mol_type = other DNA
gaggggtcctggggaag

SEQ ID NO: 158442 - DNA, 17 bp, synthetic construct
  source 1..17: mol_type = other DNA
ggaggggtcctggggaa

SEQ ID NO: 158443 - DNA, 17 bp, synthetic construct
  source 1..17: mol_type = other DNA
gggaggggtcctgggga

SEQ ID NO: 158444 - DNA, 17 bp, synthetic construct
  source 1..17: mol_type = other DNA
tgggaggggtcctgggg

SEQ ID NO: 158445 - DNA, 17 bp, synthetic construct
  source 1..17: mol_type = other DNA
gtgggaggggtcctggg

SEQ ID NO: 158446 - DNA, 17 bp, synthetic construct
  source 1..17: mol_type = other DNA
ggtgggaggggtcctgg

SEQ ID NO: 158447 - DNA, 17 bp, synthetic construct
  source 1..17: mol_type = other DNA
tggtgggaggggtcctg

SEQ ID NO: 158448 - DNA, 17 bp, synthetic construct
  source 1..17: mol_type = other DNA
ttggtgggaggggtcct

SEQ ID NO: 158449 - DNA, 17 bp, synthetic construct
  source 1..17: mol_type = other DNA
cttggtgggaggggtcc

SEQ ID NO: 158450 - DNA, 17 bp, synthetic construct
  source 1..17: mol_type = other DNA
gcttggtgggaggggtc

SEQ ID NO: 158451 - DNA, 17 bp, synthetic construct
  source 1..17: mol_type = other DNA
agcttggtgggaggggt

SEQ ID NO: 158452 - DNA, 17 bp, synthetic construct
  source 1..17: mol_type = other DNA
gagcttggtgggagggg

SEQ ID NO: 158453 - DNA, 17 bp, synthetic construct
  source 1..17: mol_type = other DNA
agagcttggtgggaggg

SEQ ID NO: 158454 - DNA, 17 bp, synthetic construct
  source 1..17: mol_type = other DNA
cagagcttggtgggagg

SEQ ID NO: 158455 - DNA, 17 bp, synthetic construct
  source 1..17: mol_type = other DNA
acagagcttggtgggag

SEQ ID NO: 158456 - DNA, 17 bp, synthetic construct
  source 1..17: mol_type = other DNA
gacagagcttggtggga

SEQ ID NO: 158457 - DNA, 17 bp, synthetic construct
  source 1..17: mol_type = other DNA
ggacagagcttggtggg

SEQ ID NO: 158458 - DNA, 17 bp, synthetic construct
  source 1..17: mol_type = other DNA
gggacagagcttggtgg

SEQ ID NO: 158459 - DNA, 17 bp, synthetic construct
  source 1..17: mol_type = other DNA
ggggacagagcttggtg

SEQ ID NO: 158460 - DNA, 17 bp, synthetic construct
  source 1..17: mol_type = other DNA
tggggacagagcttggt

SEQ ID NO: 158461 - DNA, 17 bp, synthetic construct
  source 1..17: mol_type = other DNA
ctggggacagagcttgg

SEQ ID NO: 158462 - DNA, 17 bp, synthetic construct
  source 1..17: mol_type = other DNA
cctggggacagagcttg

SEQ ID NO: 158463 - DNA, 17 bp, synthetic construct
  source 1..17: mol_type = other DNA
ccctggggacagagctt

SEQ ID NO: 158464 - DNA, 17 bp, synthetic construct
  source 1..17: mol_type = other DNA
accctggggacagagct

SEQ ID NO: 158465 - DNA, 17 bp, synthetic construct
  source 1..17: mol_type = other DNA
caccctggggacagagc

SEQ ID NO: 158466 - DNA, 17 bp, synthetic construct
  source 1..17: mol_type = other DNA
acaccctggggacagag

SEQ ID NO: 158467 - DNA, 17 bp, synthetic construct
  source 1..17: mol_type = other DNA
cacaccctggggacaga

SEQ ID NO: 158468 - DNA, 17 bp, synthetic construct
  source 1..17: mol_type = other DNA
gcacaccctggggacag

SEQ ID NO: 158469 - DNA, 17 bp, synthetic construct
  source 1..17: mol_type = other DNA
tgcacaccctggggaca

SEQ ID NO: 158470 - DNA, 17 bp, synthetic construct
  source 1..17: mol_type = other DNA
ctgcacaccctggggac

SEQ ID NO: 158471 - DNA, 17 bp, synthetic construct
  source 1..17: mol_type = other DNA
gctgcacaccctgggga

SEQ ID NO: 158472 - DNA, 17 bp, synthetic construct
  source 1..17: mol_type = other DNA
ggctgcacaccctgggg

SEQ ID NO: 158473 - DNA, 17 bp, synthetic construct
  source 1..17: mol_type = other DNA
gggctgcacaccctggg

SEQ ID NO: 158474 - DNA, 17 bp, synthetic construct
  source 1..17: mol_type = other DNA
ggggctgcacaccctgg

SEQ ID NO: 158475 - DNA, 17 bp, synthetic construct
  source 1..17: mol_type = other DNA
gggggctgcacaccctg

SEQ ID NO: 158476 - DNA, 17 bp, synthetic construct
  source 1..17: mol_type = other DNA
tgggggctgcacaccct

SEQ ID NO: 158477 - DNA, 17 bp, synthetic construct
  source 1..17: mol_type = other DNA
atgggggctgcacaccc

SEQ ID NO: 158478 - DNA, 17 bp, synthetic construct
  source 1..17: mol_type = other DNA
catgggggctgcacacc

SEQ ID NO: 158479 - DNA, 17 bp, synthetic construct
  source 1..17: mol_type = other DNA
ccatgggggctgcacac

SEQ ID NO: 158480 - DNA, 17 bp, synthetic construct
  source 1..17: mol_type = other DNA
accatgggggctgcaca

SEQ ID NO: 158481 - DNA, 17 bp, synthetic construct
  source 1..17: mol_type = other DNA
caccatgggggctgcac

SEQ ID NO: 158482 - DNA, 17 bp, synthetic construct
  source 1..17: mol_type = other DNA
acaccatgggggctgca

SEQ ID NO: 158483 - DNA, 17 bp, synthetic construct
  source 1..17: mol_type = other DNA
tacaccatgggggctgc

SEQ ID NO: 158484 - DNA, 17 bp, synthetic construct
  source 1..17: mol_type = other DNA
gtacaccatgggggctg

SEQ ID NO: 158485 - DNA, 17 bp, synthetic construct
  source 1..17: mol_type = other DNA
ggtacaccatgggggct

SEQ ID NO: 158486 - DNA, 17 bp, synthetic construct
  source 1..17: mol_type = other DNA
aggtacaccatgggggc

SEQ ID NO: 158487 - DNA, 17 bp, synthetic construct
  source 1..17: mol_type = other DNA
caggtacaccatggggg

SEQ ID NO: 158488 - DNA, 17 bp, synthetic construct
  source 1..17: mol_type = other DNA
ccaggtacaccatgggg

SEQ ID NO: 158489 - DNA, 17 bp, synthetic construct
  source 1..17: mol_type = other DNA
tccaggtacaccatggg

SEQ ID NO: 158490 - DNA, 17 bp, synthetic construct
  source 1..17: mol_type = other DNA
gtccaggtacaccatgg

SEQ ID NO: 158491 - DNA, 17 bp, synthetic construct
  source 1..17: mol_type = other DNA
agtccaggtacaccatg

SEQ ID NO: 158492 - DNA, 17 bp, synthetic construct
  source 1..17: mol_type = other DNA
cagtccaggtacaccat

SEQ ID NO: 158493 - DNA, 17 bp, synthetic construct
  source 1..17: mol_type = other DNA
gcagtccaggtacacca

SEQ ID NO: 158494 - DNA, 17 bp, synthetic construct
  source 1..17: mol_type = other DNA
tgcagtccaggtacacc

SEQ ID NO: 158495 - DNA, 17 bp, synthetic construct
  source 1..17: mol_type = other DNA
ctgcagtccaggtacac

SEQ ID NO: 158496 - DNA, 17 bp, synthetic construct
  source 1..17: mol_type = other DNA
gctgcagtccaggtaca

SEQ ID NO: 158497 - DNA, 17 bp, synthetic construct
  source 1..17: mol_type = other DNA
tgctgcagtccaggtac

SEQ ID NO: 158498 - DNA, 17 bp, synthetic construct
  source 1..17: mol_type = other DNA
ttgctgcagtccaggta

SEQ ID NO: 158499 - DNA, 17 bp, synthetic construct
  source 1..17: mol_type = other DNA
gttgctgcagtccaggt

SEQ ID NO: 158500 - DNA, 17 bp, synthetic construct
  source 1..17: mol_type = other DNA
tgttgctgcagtccagg

SEQ ID NO: 158501 - DNA, 17 bp, synthetic construct
  source 1..17: mol_type = other DNA
ctgttgctgcagtccag

SEQ ID NO: 158502 - DNA, 17 bp, synthetic construct
  source 1..17: mol_type = other DNA
gctgttgctgcagtcca

SEQ ID NO: 158503 - DNA, 17 bp, synthetic construct
  source 1..17: mol_type = other DNA
agctgttgctgcagtcc

SEQ ID NO: 158504 - DNA, 17 bp, synthetic construct
  source 1..17: mol_type = other DNA
gagctgttgctgcagtc

SEQ ID NO: 158505 - DNA, 17 bp, synthetic construct
  source 1..17: mol_type = other DNA
cgagctgttgctgcagt

SEQ ID NO: 158506 - DNA, 17 bp, synthetic construct
  source 1..17: mol_type = other DNA
ccgagctgttgctgcag

SEQ ID NO: 158507 - DNA, 17 bp, synthetic construct
  source 1..17: mol_type = other DNA
gccgagctgttgctgca

SEQ ID NO: 158508 - DNA, 17 bp, synthetic construct
  source 1..17: mol_type = other DNA
cgccgagctgttgctgc

SEQ ID NO: 158509 - DNA, 17 bp, synthetic construct
  source 1..17: mol_type = other DNA
ccgccgagctgttgctg

SEQ ID NO: 158510 - DNA, 17 bp, synthetic construct
  source 1..17: mol_type = other DNA
cccgccgagctgttgct

SEQ ID NO: 158511 - DNA, 17 bp, synthetic construct
  source 1..17: mol_type = other DNA
gcccgccgagctgttgc

SEQ ID NO: 158512 - DNA, 17 bp, synthetic construct
  source 1..17: mol_type = other DNA
tgcccgccgagctgttg

SEQ ID NO: 158513 - DNA, 17 bp, synthetic construct
  source 1..17: mol_type = other DNA
gtgcccgccgagctgtt

SEQ ID NO: 158514 - DNA, 17 bp, synthetic construct
  source 1..17: mol_type = other DNA
ggtgcccgccgagctgt

SEQ ID NO: 158515 - DNA, 17 bp, synthetic construct
  source 1..17: mol_type = other DNA
gggtgcccgccgagctg

SEQ ID NO: 158516 - DNA, 17 bp, synthetic construct
  source 1..17: mol_type = other DNA
ggggtgcccgccgagct

SEQ ID NO: 158517 - DNA, 17 bp, synthetic construct
  source 1..17: mol_type = other DNA
aggggtgcccgccgagc

SEQ ID NO: 158518 - DNA, 17 bp, synthetic construct
  source 1..17: mol_type = other DNA
caggggtgcccgccgag

SEQ ID NO: 158519 - DNA, 17 bp, synthetic construct
  source 1..17: mol_type = other DNA
ccaggggtgcccgccga

SEQ ID NO: 158520 - DNA, 17 bp, synthetic construct
  source 1..17: mol_type = other DNA
cccaggggtgcccgccg

SEQ ID NO: 158521 - DNA, 17 bp, synthetic construct
  source 1..17: mol_type = other DNA
ccccaggggtgcccgcc

SEQ ID NO: 158522 - DNA, 17 bp, synthetic construct
  source 1..17: mol_type = other DNA
gccccaggggtgcccgc

SEQ ID NO: 158523 - DNA, 17 bp, synthetic construct
  source 1..17: mol_type = other DNA
ggccccaggggtgcccg

SEQ ID NO: 158524 - DNA, 17 bp, synthetic construct
  source 1..17: mol_type = other DNA
cggccccaggggtgccc

SEQ ID NO: 158525 - DNA, 17 bp, synthetic construct
  source 1..17: mol_type = other DNA
tcggccccaggggtgcc

SEQ ID NO: 158526 - DNA, 17 bp, synthetic construct
  source 1..17: mol_type = other DNA
ctcggccccaggggtgc

SEQ ID NO: 158527 - DNA, 17 bp, synthetic construct
  source 1..17: mol_type = other DNA
actcggccccaggggtg

SEQ ID NO: 158528 - DNA, 17 bp, synthetic construct
  source 1..17: mol_type = other DNA
cactcggccccaggggt

SEQ ID NO: 158529 - DNA, 17 bp, synthetic construct
  source 1..17: mol_type = other DNA
gcactcggccccagggg

SEQ ID NO: 158530 - DNA, 17 bp, synthetic construct
  source 1..17: mol_type = other DNA
ggcactcggccccaggg

SEQ ID NO: 158531 - DNA, 17 bp, synthetic construct
  source 1..17: mol_type = other DNA
aggcactcggccccagg

SEQ ID NO: 158532 - DNA, 17 bp, synthetic construct
  source 1..17: mol_type = other DNA
gaggcactcggccccag

SEQ ID NO: 158533 - DNA, 17 bp, synthetic construct
  source 1..17: mol_type = other DNA
ggaggcactcggcccca

SEQ ID NO: 158534 - DNA, 17 bp, synthetic construct
  source 1..17: mol_type = other DNA
cggaggcactcggcccc

SEQ ID NO: 158535 - DNA, 17 bp, synthetic construct
  source 1..17: mol_type = other DNA
ccggaggcactcggccc

SEQ ID NO: 158536 - DNA, 17 bp, synthetic construct
  source 1..17: mol_type = other DNA
tccggaggcactcggcc

SEQ ID NO: 158537 - DNA, 17 bp, synthetic construct
  source 1..17: mol_type = other DNA
ctccggaggcactcggc

SEQ ID NO: 158538 - DNA, 17 bp, synthetic construct
  source 1..17: mol_type = other DNA
gctccggaggcactcgg

SEQ ID NO: 158539 - DNA, 17 bp, synthetic construct
  source 1..17: mol_type = other DNA
agctccggaggcactcg

SEQ ID NO: 158540 - DNA, 17 bp, synthetic construct
  source 1..17: mol_type = other DNA
cagctccggaggcactc

SEQ ID NO: 158541 - DNA, 17 bp, synthetic construct
  source 1..17: mol_type = other DNA
gcagctccggaggcact

SEQ ID NO: 158542 - DNA, 17 bp, synthetic construct
  source 1..17: mol_type = other DNA
ggcagctccggaggcac

SEQ ID NO: 158543 - DNA, 17 bp, synthetic construct
  source 1..17: mol_type = other DNA
tggcagctccggaggca

SEQ ID NO: 158544 - DNA, 17 bp, synthetic construct
  source 1..17: mol_type = other DNA
gtggcagctccggaggc

SEQ ID NO: 158545 - DNA, 17 bp, synthetic construct
  source 1..17: mol_type = other DNA
tgtggcagctccggagg

SEQ ID NO: 158546 - DNA, 17 bp, synthetic construct
  source 1..17: mol_type = other DNA
gtgtggcagctccggag

SEQ ID NO: 158547 - DNA, 17 bp, synthetic construct
  source 1..17: mol_type = other DNA
cgtgtggcagctccgga

SEQ ID NO: 158548 - DNA, 17 bp, synthetic construct
  source 1..17: mol_type = other DNA
gcgtgtggcagctccgg

SEQ ID NO: 158549 - DNA, 17 bp, synthetic construct
  source 1..17: mol_type = other DNA
agcgtgtggcagctccg

SEQ ID NO: 158550 - DNA, 17 bp, synthetic construct
  source 1..17: mol_type = other DNA
cagcgtgtggcagctcc

SEQ ID NO: 158551 - DNA, 17 bp, synthetic construct
  source 1..17: mol_type = other DNA
ccagcgtgtggcagctc

SEQ ID NO: 158552 - DNA, 17 bp, synthetic construct
  source 1..17: mol_type = other DNA
tccagcgtgtggcagct

SEQ ID NO: 158553 - DNA, 17 bp, synthetic construct
  source 1..17: mol_type = other DNA
gtccagcgtgtggcagc

SEQ ID NO: 158554 - DNA, 17 bp, synthetic construct
  source 1..17: mol_type = other DNA
cgtccagcgtgtggcag

SEQ ID NO: 158555 - DNA, 17 bp, synthetic construct
  source 1..17: mol_type = other DNA
acgtccagcgtgtggca

SEQ ID NO: 158556 - DNA, 17 bp, synthetic construct
  source 1..17: mol_type = other DNA
cacgtccagcgtgtggc

SEQ ID NO: 158557 - DNA, 17 bp, synthetic construct
  source 1..17: mol_type = other DNA
ccacgtccagcgtgtgg

SEQ ID NO: 158558 - DNA, 17 bp, synthetic construct
  source 1..17: mol_type = other DNA
cccacgtccagcgtgtg

SEQ ID NO: 158559 - DNA, 17 bp, synthetic construct
  source 1..17: mol_type = other DNA
gcccacgtccagcgtgt

SEQ ID NO: 158560 - DNA, 17 bp, synthetic construct
  source 1..17: mol_type = other DNA
agcccacgtccagcgtg

SEQ ID NO: 158561 - DNA, 17 bp, synthetic construct
  source 1..17: mol_type = other DNA
cagcccacgtccagcgt

SEQ ID NO: 158562 - DNA, 17 bp, synthetic construct
  source 1..17: mol_type = other DNA
acagcccacgtccagcg

SEQ ID NO: 158563 - DNA, 17 bp, synthetic construct
  source 1..17: mol_type = other DNA
cacagcccacgtccagc

SEQ ID NO: 158564 - DNA, 17 bp, synthetic construct
  source 1..17: mol_type = other DNA
acacagcccacgtccag

SEQ ID NO: 158565 - DNA, 17 bp, synthetic construct
  source 1..17: mol_type = other DNA
cacacagcccacgtcca

SEQ ID NO: 158566 - DNA, 17 bp, synthetic construct
  source 1..17: mol_type = other DNA
tcacacagcccacgtcc

SEQ ID NO: 158567 - DNA, 17 bp, synthetic construct
  source 1..17: mol_type = other DNA
ctcacacagcccacgtc

SEQ ID NO: 158568 - DNA, 17 bp, synthetic construct
  source 1..17: mol_type = other DNA
actcacacagcccacgt

SEQ ID NO: 158569 - DNA, 17 bp, synthetic construct
  source 1..17: mol_type = other DNA
aactcacacagcccacg

SEQ ID NO: 158570 - DNA, 17 bp, synthetic construct
  source 1..17: mol_type = other DNA
gaactcacacagcccac

SEQ ID NO: 158571 - DNA, 17 bp, synthetic construct
  source 1..17: mol_type = other DNA
ggaactcacacagccca

SEQ ID NO: 158572 - DNA, 17 bp, synthetic construct
  source 1..17: mol_type = other DNA
tggaactcacacagccc

SEQ ID NO: 158573 - DNA, 17 bp, synthetic construct
  source 1..17: mol_type = other DNA
atggaactcacacagcc

SEQ ID NO: 158574 - DNA, 17 bp, synthetic construct
  source 1..17: mol_type = other DNA
catggaactcacacagc

SEQ ID NO: 158575 - DNA, 17 bp, synthetic construct
  source 1..17: mol_type = other DNA
gcatggaactcacacag

SEQ ID NO: 158576 - DNA, 17 bp, synthetic construct
  source 1..17: mol_type = other DNA
agcatggaactcacaca

SEQ ID NO: 158577 - DNA, 17 bp, synthetic construct
  source 1..17: mol_type = other DNA
aagcatggaactcacac

SEQ ID NO: 158578 - DNA, 17 bp, synthetic construct
  source 1..17: mol_type = other DNA
gaagcatggaactcaca

SEQ ID NO: 158579 - DNA, 17 bp, synthetic construct
  source 1..17: mol_type = other DNA
tgaagcatggaactcac

SEQ ID NO: 158580 - DNA, 17 bp, synthetic construct
  source 1..17: mol_type = other DNA
ctgaagcatggaactca

SEQ ID NO: 158581 - DNA, 17 bp, synthetic construct
  source 1..17: mol_type = other DNA
cctgaagcatggaactc

SEQ ID NO: 158582 - DNA, 17 bp, synthetic construct
  source 1..17: mol_type = other DNA
ccctgaagcatggaact

SEQ ID NO: 158583 - DNA, 17 bp, synthetic construct
  source 1..17: mol_type = other DNA
tccctgaagcatggaac

SEQ ID NO: 158584 - DNA, 17 bp, synthetic construct
  source 1..17: mol_type = other DNA
ctccctgaagcatggaa

SEQ ID NO: 158585 - DNA, 17 bp, synthetic construct
  source 1..17: mol_type = other DNA
cctccctgaagcatgga

SEQ ID NO: 158586 - DNA, 17 bp, synthetic construct
  source 1..17: mol_type = other DNA
ccctccctgaagcatgg

SEQ ID NO: 158587 - DNA, 17 bp, synthetic construct
  source 1..17: mol_type = other DNA
cccctccctgaagcatg

SEQ ID NO: 158588 - DNA, 17 bp, synthetic construct
  source 1..17: mol_type = other DNA
acccctccctgaagcat

SEQ ID NO: 158589 - DNA, 17 bp, synthetic construct
  source 1..17: mol_type = other DNA
cacccctccctgaagca

SEQ ID NO: 158590 - DNA, 17 bp, synthetic construct
  source 1..17: mol_type = other DNA
ccacccctccctgaagc

SEQ ID NO: 158591 - DNA, 17 bp, synthetic construct
  source 1..17: mol_type = other DNA
cccacccctccctgaag

SEQ ID NO: 158592 - DNA, 17 bp, synthetic construct
  source 1..17: mol_type = other DNA
gcccacccctccctgaa

SEQ ID NO: 158593 - DNA, 17 bp, synthetic construct
  source 1..17: mol_type = other DNA
tgcccacccctccctga

SEQ ID NO: 158594 - DNA, 17 bp, synthetic construct
  source 1..17: mol_type = other DNA
ctgcccacccctccctg

SEQ ID NO: 158595 - DNA, 17 bp, synthetic construct
  source 1..17: mol_type = other DNA
cctgcccacccctccct

SEQ ID NO: 158596 - DNA, 17 bp, synthetic construct
  source 1..17: mol_type = other DNA
ccctgcccacccctccc

SEQ ID NO: 158597 - DNA, 17 bp, synthetic construct
  source 1..17: mol_type = other DNA
tccctgcccacccctcc

SEQ ID NO: 158598 - DNA, 17 bp, synthetic construct
  source 1..17: mol_type = other DNA
ttccctgcccacccctc

SEQ ID NO: 158599 - DNA, 17 bp, synthetic construct
  source 1..17: mol_type = other DNA
cttccctgcccacccct

SEQ ID NO: 158600 - DNA, 17 bp, synthetic construct
  source 1..17: mol_type = other DNA
ccttccctgcccacccc

SEQ ID NO: 158601 - DNA, 17 bp, synthetic construct
  source 1..17: mol_type = other DNA
cccttccctgcccaccc

SEQ ID NO: 158602 - DNA, 17 bp, synthetic construct
  source 1..17: mol_type = other DNA
ccccttccctgcccacc

SEQ ID NO: 158603 - DNA, 17 bp, synthetic construct
  source 1..17: mol_type = other DNA
accccttccctgcccac

SEQ ID NO: 158604 - DNA, 17 bp, synthetic construct
  source 1..17: mol_type = other DNA
gaccccttccctgccca

SEQ ID NO: 158605 - DNA, 17 bp, synthetic construct
  source 1..17: mol_type = other DNA
ggaccccttccctgccc

SEQ ID NO: 158606 - DNA, 17 bp, synthetic construct
  source 1..17: mol_type = other DNA
gggaccccttccctgcc

SEQ ID NO: 158607 - DNA, 17 bp, synthetic construct
  source 1..17: mol_type = other DNA
tgggaccccttccctgc

SEQ ID NO: 158608 - DNA, 17 bp, synthetic construct
  source 1..17: mol_type = other DNA
ctgggaccccttccctg

SEQ ID NO: 158609 - DNA, 17 bp, synthetic construct
  source 1..17: mol_type = other DNA
gctgggaccccttccct

SEQ ID NO: 158610 - DNA, 17 bp, synthetic construct
  source 1..17: mol_type = other DNA
agctgggaccccttccc

SEQ ID NO: 158611 - DNA, 17 bp, synthetic construct
  source 1..17: mol_type = other DNA
aagctgggaccccttcc

SEQ ID NO: 158612 - DNA, 17 bp, synthetic construct
  source 1..17: mol_type = other DNA
aaagctgggaccccttc

SEQ ID NO: 158613 - DNA, 17 bp, synthetic construct
  source 1..17: mol_type = other DNA
gaaagctgggacccctt

SEQ ID NO: 158614 - DNA, 17 bp, synthetic construct
  source 1..17: mol_type = other DNA
ggaaagctgggacccct

SEQ ID NO: 158615 - DNA, 17 bp, synthetic construct
  source 1..17: mol_type = other DNA
gggaaagctgggacccc

SEQ ID NO: 158616 - DNA, 17 bp, synthetic construct
  source 1..17: mol_type = other DNA
tgggaaagctgggaccc

SEQ ID NO: 158617 - DNA, 17 bp, synthetic construct
  source 1..17: mol_type = other DNA
ctgggaaagctgggacc

SEQ ID NO: 158618 - DNA, 17 bp, synthetic construct
  source 1..17: mol_type = other DNA
gctgggaaagctgggac

SEQ ID NO: 158619 - DNA, 17 bp, synthetic construct
  source 1..17: mol_type = other DNA
agctgggaaagctggga

SEQ ID NO: 158620 - DNA, 17 bp, synthetic construct
  source 1..17: mol_type = other DNA
gagctgggaaagctggg

SEQ ID NO: 158621 - DNA, 17 bp, synthetic construct
  source 1..17: mol_type = other DNA
ggagctgggaaagctgg

SEQ ID NO: 158622 - DNA, 17 bp, synthetic construct
  source 1..17: mol_type = other DNA
gggagctgggaaagctg

SEQ ID NO: 158623 - DNA, 17 bp, synthetic construct
  source 1..17: mol_type = other DNA
cgggagctgggaaagct

SEQ ID NO: 158624 - DNA, 17 bp, synthetic construct
  source 1..17: mol_type = other DNA
tcgggagctgggaaagc

SEQ ID NO: 158625 - DNA, 17 bp, synthetic construct
  source 1..17: mol_type = other DNA
ctcgggagctgggaaag

SEQ ID NO: 158626 - DNA, 17 bp, synthetic construct
  source 1..17: mol_type = other DNA
gctcgggagctgggaaa

SEQ ID NO: 158627 - DNA, 17 bp, synthetic construct
  source 1..17: mol_type = other DNA
ggctcgggagctgggaa

SEQ ID NO: 158628 - DNA, 17 bp, synthetic construct
  source 1..17: mol_type = other DNA
gggctcgggagctggga

SEQ ID NO: 158629 - DNA, 17 bp, synthetic construct
  source 1..17: mol_type = other DNA
tgggctcgggagctggg

SEQ ID NO: 158630 - DNA, 17 bp, synthetic construct
  source 1..17: mol_type = other DNA
ctgggctcgggagctgg

SEQ ID NO: 158631 - DNA, 17 bp, synthetic construct
  source 1..17: mol_type = other DNA
cctgggctcgggagctg

SEQ ID NO: 158632 - DNA, 17 bp, synthetic construct
  source 1..17: mol_type = other DNA
ccctgggctcgggagct

SEQ ID NO: 158633 - DNA, 17 bp, synthetic construct
  source 1..17: mol_type = other DNA
tccctgggctcgggagc

SEQ ID NO: 158634 - DNA, 17 bp, synthetic construct
  source 1..17: mol_type = other DNA
atccctgggctcgggag

SEQ ID NO: 158635 - DNA, 17 bp, synthetic construct
  source 1..17: mol_type = other DNA
gatccctgggctcggga

SEQ ID NO: 158636 - DNA, 17 bp, synthetic construct
  source 1..17: mol_type = other DNA
agatccctgggctcggg

SEQ ID NO: 158637 - DNA, 17 bp, synthetic construct
  source 1..17: mol_type = other DNA
cagatccctgggctcgg

SEQ ID NO: 158638 - DNA, 17 bp, synthetic construct
  source 1..17: mol_type = other DNA
ccagatccctgggctcg

SEQ ID NO: 158639 - DNA, 17 bp, synthetic construct
  source 1..17: mol_type = other DNA
accagatccctgggctc

SEQ ID NO: 158640 - DNA, 17 bp, synthetic construct
  source 1..17: mol_type = other DNA
caccagatccctgggct

SEQ ID NO: 158641 - DNA, 17 bp, synthetic construct
  source 1..17: mol_type = other DNA
ccaccagatccctgggc

SEQ ID NO: 158642 - DNA, 17 bp, synthetic construct
  source 1..17: mol_type = other DNA
accaccagatccctggg

SEQ ID NO: 158643 - DNA, 17 bp, synthetic construct
  source 1..17: mol_type = other DNA
gaccaccagatccctgg

SEQ ID NO: 158644 - DNA, 17 bp, synthetic construct
  source 1..17: mol_type = other DNA
ggaccaccagatccctg

SEQ ID NO: 158645 - DNA, 17 bp, synthetic construct
  source 1..17: mol_type = other DNA
aggaccaccagatccct

SEQ ID NO: 158646 - DNA, 17 bp, synthetic construct
  source 1..17: mol_type = other DNA
caggaccaccagatccc

SEQ ID NO: 158647 - DNA, 17 bp, synthetic construct
  source 1..17: mol_type = other DNA
ccaggaccaccagatcc

SEQ ID NO: 158648 - DNA, 17 bp, synthetic construct
  source 1..17: mol_type = other DNA
tccaggaccaccagatc

SEQ ID NO: 158649 - DNA, 17 bp, synthetic construct
  source 1..17: mol_type = other DNA
ctccaggaccaccagat

SEQ ID NO: 158650 - DNA, 17 bp, synthetic construct
  source 1..17: mol_type = other DNA
tctccaggaccaccaga

SEQ ID NO: 158651 - DNA, 17 bp, synthetic construct
  source 1..17: mol_type = other DNA
gtctccaggaccaccag

SEQ ID NO: 158652 - DNA, 17 bp, synthetic construct
  source 1..17: mol_type = other DNA
tgtctccaggaccacca

SEQ ID NO: 158653 - DNA, 17 bp, synthetic construct
  source 1..17: mol_type = other DNA
gtgtctccaggaccacc

SEQ ID NO: 158654 - DNA, 17 bp, synthetic construct
  source 1..17: mol_type = other DNA
agtgtctccaggaccac

SEQ ID NO: 158655 - DNA, 17 bp, synthetic construct
  source 1..17: mol_type = other DNA
aagtgtctccaggacca

SEQ ID NO: 158656 - DNA, 17 bp, synthetic construct
  source 1..17: mol_type = other DNA
taagtgtctccaggacc

SEQ ID NO: 158657 - DNA, 17 bp, synthetic construct
  source 1..17: mol_type = other DNA
gtaagtgtctccaggac

SEQ ID NO: 158658 - DNA, 17 bp, synthetic construct
  source 1..17: mol_type = other DNA
ggtaagtgtctccagga

SEQ ID NO: 158659 - DNA, 17 bp, synthetic construct
  source 1..17: mol_type = other DNA
gggtaagtgtctccagg

SEQ ID NO: 158660 - DNA, 17 bp, synthetic construct
  source 1..17: mol_type = other DNA
tgggtaagtgtctccag

SEQ ID NO: 158661 - DNA, 17 bp, synthetic construct
  source 1..17: mol_type = other DNA
gtgggtaagtgtctcca

SEQ ID NO: 158662 - DNA, 17 bp, synthetic construct
  source 1..17: mol_type = other DNA
ggtgggtaagtgtctcc

SEQ ID NO: 158663 - DNA, 17 bp, synthetic construct
  source 1..17: mol_type = other DNA
aggtgggtaagtgtctc

SEQ ID NO: 158664 - DNA, 17 bp, synthetic construct
  source 1..17: mol_type = other DNA
caggtgggtaagtgtct

SEQ ID NO: 158665 - DNA, 17 bp, synthetic construct
  source 1..17: mol_type = other DNA
ccaggtgggtaagtgtc

SEQ ID NO: 158666 - DNA, 17 bp, synthetic construct
  source 1..17: mol_type = other DNA
tccaggtgggtaagtgt

SEQ ID NO: 158667 - DNA, 17 bp, synthetic construct
  source 1..17: mol_type = other DNA
ttccaggtgggtaagtg

SEQ ID NO: 158668 - DNA, 17 bp, synthetic construct
  source 1..17: mol_type = other DNA
cttccaggtgggtaagt

SEQ ID NO: 158669 - DNA, 17 bp, synthetic construct
  source 1..17: mol_type = other DNA
gcttccaggtgggtaag

SEQ ID NO: 158670 - DNA, 17 bp, synthetic construct
  source 1..17: mol_type = other DNA
agcttccaggtgggtaa

SEQ ID NO: 158671 - DNA, 17 bp, synthetic construct
  source 1..17: mol_type = other DNA
gagcttccaggtgggta

SEQ ID NO: 158672 - DNA, 17 bp, synthetic construct
  source 1..17: mol_type = other DNA
ggagcttccaggtgggt

SEQ ID NO: 158673 - DNA, 17 bp, synthetic construct
  source 1..17: mol_type = other DNA
cggagcttccaggtggg

SEQ ID NO: 158674 - DNA, 17 bp, synthetic construct
  source 1..17: mol_type = other DNA
gcggagcttccaggtgg

SEQ ID NO: 158675 - DNA, 17 bp, synthetic construct
  source 1..17: mol_type = other DNA
ggcggagcttccaggtg

SEQ ID NO: 158676 - DNA, 17 bp, synthetic construct
  source 1..17: mol_type = other DNA
gggcggagcttccaggt

SEQ ID NO: 158677 - DNA, 17 bp, synthetic construct
  source 1..17: mol_type = other DNA
agggcggagcttccagg

SEQ ID NO: 158678 - DNA, 17 bp, synthetic construct
  source 1..17: mol_type = other DNA
cagggcggagcttccag

SEQ ID NO: 158679 - DNA, 17 bp, synthetic construct
  source 1..17: mol_type = other DNA
ccagggcggagcttcca

SEQ ID NO: 158680 - DNA, 17 bp, synthetic construct
  source 1..17: mol_type = other DNA
gccagggcggagcttcc

SEQ ID NO: 158681 - DNA, 17 bp, synthetic construct
  source 1..17: mol_type = other DNA
ggccagggcggagcttc

SEQ ID NO: 158682 - DNA, 17 bp, synthetic construct
  source 1..17: mol_type = other DNA
gggccagggcggagctt

SEQ ID NO: 158683 - DNA, 17 bp, synthetic construct
  source 1..17: mol_type = other DNA
tgggccagggcggagct

SEQ ID NO: 158684 - DNA, 17 bp, synthetic construct
  source 1..17: mol_type = other DNA
atgggccagggcggagc

SEQ ID NO: 158685 - DNA, 17 bp, synthetic construct
  source 1..17: mol_type = other DNA
catgggccagggcggag

SEQ ID NO: 158686 - DNA, 17 bp, synthetic construct
  source 1..17: mol_type = other DNA
gcatgggccagggcgga

SEQ ID NO: 158687 - DNA, 17 bp, synthetic construct
  source 1..17: mol_type = other DNA
cgcatgggccagggcgg

SEQ ID NO: 158688 - DNA, 17 bp, synthetic construct
  source 1..17: mol_type = other DNA
acgcatgggccagggcg

SEQ ID NO: 158689 - DNA, 17 bp, synthetic construct
  source 1..17: mol_type = other DNA
aacgcatgggccagggc

SEQ ID NO: 158690 - DNA, 17 bp, synthetic construct
  source 1..17: mol_type = other DNA
caacgcatgggccaggg

SEQ ID NO: 158691 - DNA, 17 bp, synthetic construct
  source 1..17: mol_type = other DNA
gcaacgcatgggccagg

SEQ ID NO: 158692 - DNA, 17 bp, synthetic construct
  source 1..17: mol_type = other DNA
ggcaacgcatgggccag

SEQ ID NO: 158693 - DNA, 17 bp, synthetic construct
  source 1..17: mol_type = other DNA
gggcaacgcatgggcca

SEQ ID NO: 158694 - DNA, 17 bp, synthetic construct
  source 1..17: mol_type = other DNA
agggcaacgcatgggcc

SEQ ID NO: 158695 - DNA, 17 bp, synthetic construct
  source 1..17: mol_type = other DNA
cagggcaacgcatgggc

SEQ ID NO: 158696 - DNA, 17 bp, synthetic construct
  source 1..17: mol_type = other DNA
ccagggcaacgcatggg

SEQ ID NO: 158697 - DNA, 17 bp, synthetic construct
  source 1..17: mol_type = other DNA
cccagggcaacgcatgg

SEQ ID NO: 158698 - DNA, 17 bp, synthetic construct
  source 1..17: mol_type = other DNA
acccagggcaacgcatg

SEQ ID NO: 158699 - DNA, 17 bp, synthetic construct
  source 1..17: mol_type = other DNA
cacccagggcaacgcat

SEQ ID NO: 158700 - DNA, 17 bp, synthetic construct
  source 1..17: mol_type = other DNA
gcacccagggcaacgca

SEQ ID NO: 158701 - DNA, 17 bp, synthetic construct
  source 1..17: mol_type = other DNA
agcacccagggcaacgc

SEQ ID NO: 158702 - DNA, 17 bp, synthetic construct
  source 1..17: mol_type = other DNA
cagcacccagggcaacg

SEQ ID NO: 158703 - DNA, 17 bp, synthetic construct
  source 1..17: mol_type = other DNA
gcagcacccagggcaac

SEQ ID NO: 158704 - DNA, 17 bp, synthetic construct
  source 1..17: mol_type = other DNA
agcagcacccagggcaa

SEQ ID NO: 158705 - DNA, 17 bp, synthetic construct
  source 1..17: mol_type = other DNA
cagcagcacccagggca

SEQ ID NO: 158706 - DNA, 17 bp, synthetic construct
  source 1..17: mol_type = other DNA
ccagcagcacccagggc

SEQ ID NO: 158707 - DNA, 17 bp, synthetic construct
  source 1..17: mol_type = other DNA
cccagcagcacccaggg

SEQ ID NO: 158708 - DNA, 17 bp, synthetic construct
  source 1..17: mol_type = other DNA
acccagcagcacccagg

SEQ ID NO: 158709 - DNA, 17 bp, synthetic construct
  source 1..17: mol_type = other DNA
cacccagcagcacccag

SEQ ID NO: 158710 - DNA, 17 bp, synthetic construct
  source 1..17: mol_type = other DNA
gcacccagcagcaccca

SEQ ID NO: 158711 - DNA, 17 bp, synthetic construct
  source 1..17: mol_type = other DNA
cgcacccagcagcaccc

SEQ ID NO: 158712 - DNA, 17 bp, synthetic construct
  source 1..17: mol_type = other DNA
gcgcacccagcagcacc

SEQ ID NO: 158713 - DNA, 17 bp, synthetic construct
  source 1..17: mol_type = other DNA
ggcgcacccagcagcac

SEQ ID NO: 158714 - DNA, 17 bp, synthetic construct
  source 1..17: mol_type = other DNA
aggcgcacccagcagca

SEQ ID NO: 158715 - DNA, 17 bp, synthetic construct
  source 1..17: mol_type = other DNA
caggcgcacccagcagc

SEQ ID NO: 158716 - DNA, 17 bp, synthetic construct
  source 1..17: mol_type = other DNA
acaggcgcacccagcag

SEQ ID NO: 158717 - DNA, 17 bp, synthetic construct
  source 1..17: mol_type = other DNA
gacaggcgcacccagca

SEQ ID NO: 158718 - DNA, 17 bp, synthetic construct
  source 1..17: mol_type = other DNA
ggacaggcgcacccagc

SEQ ID NO: 158719 - DNA, 17 bp, synthetic construct
  source 1..17: mol_type = other DNA
gggacaggcgcacccag

SEQ ID NO: 158720 - DNA, 17 bp, synthetic construct
  source 1..17: mol_type = other DNA
tgggacaggcgcaccca

SEQ ID NO: 158721 - DNA, 17 bp, synthetic construct
  source 1..17: mol_type = other DNA
ctgggacaggcgcaccc

SEQ ID NO: 158722 - DNA, 17 bp, synthetic construct
  source 1..17: mol_type = other DNA
tctgggacaggcgcacc

SEQ ID NO: 158723 - DNA, 17 bp, synthetic construct
  source 1..17: mol_type = other DNA
ctctgggacaggcgcac

SEQ ID NO: 158724 - DNA, 17 bp, synthetic construct
  source 1..17: mol_type = other DNA
cctctgggacaggcgca

SEQ ID NO: 158725 - DNA, 17 bp, synthetic construct
  source 1..17: mol_type = other DNA
ccctctgggacaggcgc

SEQ ID NO: 158726 - DNA, 17 bp, synthetic construct
  source 1..17: mol_type = other DNA
accctctgggacaggcg

SEQ ID NO: 158727 - DNA, 17 bp, synthetic construct
  source 1..17: mol_type = other DNA
caccctctgggacaggc

SEQ ID NO: 158728 - DNA, 17 bp, synthetic construct
  source 1..17: mol_type = other DNA
tcaccctctgggacagg

SEQ ID NO: 158729 - DNA, 17 bp, synthetic construct
  source 1..17: mol_type = other DNA
ctcaccctctgggacag

SEQ ID NO: 158730 - DNA, 17 bp, synthetic construct
  source 1..17: mol_type = other DNA
actcaccctctgggaca

SEQ ID NO: 158731 - DNA, 17 bp, synthetic construct
  source 1..17: mol_type = other DNA
cactcaccctctgggac

SEQ ID NO: 158732 - DNA, 17 bp, synthetic construct
  source 1..17: mol_type = other DNA
tcactcaccctctggga

SEQ ID NO: 158733 - DNA, 17 bp, synthetic construct
  source 1..17: mol_type = other DNA
gtcactcaccctctggg

SEQ ID NO: 158734 - DNA, 17 bp, synthetic construct
  source 1..17: mol_type = other DNA
tgtcactcaccctctgg

SEQ ID NO: 158735 - DNA, 17 bp, synthetic construct
  source 1..17: mol_type = other DNA
atgtcactcaccctctg

SEQ ID NO: 158736 - DNA, 17 bp, synthetic construct
  source 1..17: mol_type = other DNA
gatgtcactcaccctct

SEQ ID NO: 158737 - DNA, 17 bp, synthetic construct
  source 1..17: mol_type = other DNA
agatgtcactcaccctc

SEQ ID NO: 158738 - DNA, 17 bp, synthetic construct
  source 1..17: mol_type = other DNA
cagatgtcactcaccct

SEQ ID NO: 158739 - DNA, 17 bp, synthetic construct
  source 1..17: mol_type = other DNA
gcagatgtcactcaccc

SEQ ID NO: 158740 - DNA, 17 bp, synthetic construct
  source 1..17: mol_type = other DNA
ggcagatgtcactcacc

SEQ ID NO: 158741 - DNA, 17 bp, synthetic construct
  source 1..17: mol_type = other DNA
gggcagatgtcactcac

SEQ ID NO: 158742 - DNA, 17 bp, synthetic construct
  source 1..17: mol_type = other DNA
tgggcagatgtcactca

SEQ ID NO: 158743 - DNA, 17 bp, synthetic construct
  source 1..17: mol_type = other DNA
gtgggcagatgtcactc

SEQ ID NO: 158744 - DNA, 17 bp, synthetic construct
  source 1..17: mol_type = other DNA
ggtgggcagatgtcact

SEQ ID NO: 158745 - DNA, 17 bp, synthetic construct
  source 1..17: mol_type = other DNA
gggtgggcagatgtcac

SEQ ID NO: 158746 - DNA, 17 bp, synthetic construct
  source 1..17: mol_type = other DNA
agggtgggcagatgtca

SEQ ID NO: 158747 - DNA, 17 bp, synthetic construct
  source 1..17: mol_type = other DNA
cagggtgggcagatgtc

SEQ ID NO: 158748 - DNA, 17 bp, synthetic construct
  source 1..17: mol_type = other DNA
ccagggtgggcagatgt

SEQ ID NO: 158749 - DNA, 17 bp, synthetic construct
  source 1..17: mol_type = other DNA
accagggtgggcagatg

SEQ ID NO: 158750 - DNA, 17 bp, synthetic construct
  source 1..17: mol_type = other DNA
caccagggtgggcagat

SEQ ID NO: 158751 - DNA, 17 bp, synthetic construct
  source 1..17: mol_type = other DNA
acaccagggtgggcaga

SEQ ID NO: 158752 - DNA, 17 bp, synthetic construct
  source 1..17: mol_type = other DNA
gacaccagggtgggcag

SEQ ID NO: 158753 - DNA, 17 bp, synthetic construct
  source 1..17: mol_type = other DNA
ggacaccagggtgggca

SEQ ID NO: 158754 - DNA, 17 bp, synthetic construct
  source 1..17: mol_type = other DNA
tggacaccagggtgggc

SEQ ID NO: 158755 - DNA, 17 bp, synthetic construct
  source 1..17: mol_type = other DNA
ctggacaccagggtggg

SEQ ID NO: 158756 - DNA, 17 bp, synthetic construct
  source 1..17: mol_type = other DNA
gctggacaccagggtgg

SEQ ID NO: 158757 - DNA, 17 bp, synthetic construct
  source 1..17: mol_type = other DNA
ggctggacaccagggtg

SEQ ID NO: 158758 - DNA, 17 bp, synthetic construct
  source 1..17: mol_type = other DNA
gggctggacaccagggt

SEQ ID NO: 158759 - DNA, 17 bp, synthetic construct
  source 1..17: mol_type = other DNA
agggctggacaccaggg

SEQ ID NO: 158760 - DNA, 17 bp, synthetic construct
  source 1..17: mol_type = other DNA
cagggctggacaccagg

SEQ ID NO: 158761 - DNA, 17 bp, synthetic construct
  source 1..17: mol_type = other DNA
tcagggctggacaccag

SEQ ID NO: 158762 - DNA, 17 bp, synthetic construct
  source 1..17: mol_type = other DNA
gtcagggctggacacca

SEQ ID NO: 158763 - DNA, 17 bp, synthetic construct
  source 1..17: mol_type = other DNA
ggtcagggctggacacc

SEQ ID NO: 158764 - DNA, 17 bp, synthetic construct
  source 1..17: mol_type = other DNA
cggtcagggctggacac

SEQ ID NO: 158765 - DNA, 17 bp, synthetic construct
  source 1..17: mol_type = other DNA
ccggtcagggctggaca

SEQ ID NO: 158766 - DNA, 17 bp, synthetic construct
  source 1..17: mol_type = other DNA
accggtcagggctggac

SEQ ID NO: 158767 - DNA, 17 bp, synthetic construct
  source 1..17: mol_type = other DNA
taccggtcagggctgga

SEQ ID NO: 158768 - DNA, 17 bp, synthetic construct
  source 1..17: mol_type = other DNA
gtaccggtcagggctgg

SEQ ID NO: 158769 - DNA, 17 bp, synthetic construct
  source 1..17: mol_type = other DNA
ggtaccggtcagggctg

SEQ ID NO: 158770 - DNA, 17 bp, synthetic construct
  source 1..17: mol_type = other DNA
aggtaccggtcagggct

SEQ ID NO: 158771 - DNA, 17 bp, synthetic construct
  source 1..17: mol_type = other DNA
caggtaccggtcagggc

SEQ ID NO: 158772 - DNA, 17 bp, synthetic construct
  source 1..17: mol_type = other DNA
gcaggtaccggtcaggg

SEQ ID NO: 158773 - DNA, 17 bp, synthetic construct
  source 1..17: mol_type = other DNA
ggcaggtaccggtcagg

SEQ ID NO: 158774 - DNA, 17 bp, synthetic construct
  source 1..17: mol_type = other DNA
aggcaggtaccggtcag

SEQ ID NO: 158775 - DNA, 17 bp, synthetic construct
  source 1..17: mol_type = other DNA
caggcaggtaccggtca

SEQ ID NO: 158776 - DNA, 17 bp, synthetic construct
  source 1..17: mol_type = other DNA
ccaggcaggtaccggtc

SEQ ID NO: 158777 - DNA, 17 bp, synthetic construct
  source 1..17: mol_type = other DNA
cccaggcaggtaccggt

SEQ ID NO: 158778 - DNA, 17 bp, synthetic construct
  source 1..17: mol_type = other DNA
gcccaggcaggtaccgg

SEQ ID NO: 158779 - DNA, 17 bp, synthetic construct
  source 1..17: mol_type = other DNA
ggcccaggcaggtaccg

SEQ ID NO: 158780 - DNA, 17 bp, synthetic construct
  source 1..17: mol_type = other DNA
gggcccaggcaggtacc

SEQ ID NO: 158781 - DNA, 17 bp, synthetic construct
  source 1..17: mol_type = other DNA
ggggcccaggcaggtac

SEQ ID NO: 158782 - DNA, 17 bp, synthetic construct
  source 1..17: mol_type = other DNA
tggggcccaggcaggta

SEQ ID NO: 158783 - DNA, 17 bp, synthetic construct
  source 1..17: mol_type = other DNA
gtggggcccaggcaggt

SEQ ID NO: 158784 - DNA, 17 bp, synthetic construct
  source 1..17: mol_type = other DNA
tgtggggcccaggcagg

SEQ ID NO: 158785 - DNA, 17 bp, synthetic construct
  source 1..17: mol_type = other DNA
ctgtggggcccaggcag

SEQ ID NO: 158786 - DNA, 17 bp, synthetic construct
  source 1..17: mol_type = other DNA
actgtggggcccaggca

SEQ ID NO: 158787 - DNA, 17 bp, synthetic construct
  source 1..17: mol_type = other DNA
aactgtggggcccaggc

SEQ ID NO: 158788 - DNA, 17 bp, synthetic construct
  source 1..17: mol_type = other DNA
gaactgtggggcccagg

SEQ ID NO: 158789 - DNA, 17 bp, synthetic construct
  source 1..17: mol_type = other DNA
tgaactgtggggcccag

SEQ ID NO: 158790 - DNA, 17 bp, synthetic construct
  source 1..17: mol_type = other DNA
ctgaactgtggggccca

SEQ ID NO: 158791 - DNA, 17 bp, synthetic construct
  source 1..17: mol_type = other DNA
gctgaactgtggggccc

SEQ ID NO: 158792 - DNA, 17 bp, synthetic construct
  source 1..17: mol_type = other DNA
tgctgaactgtggggcc

SEQ ID NO: 158793 - DNA, 17 bp, synthetic construct
  source 1..17: mol_type = other DNA
gtgctgaactgtggggc

SEQ ID NO: 158794 - DNA, 17 bp, synthetic construct
  source 1..17: mol_type = other DNA
tgtgctgaactgtgggg

SEQ ID NO: 158795 - DNA, 17 bp, synthetic construct
  source 1..17: mol_type = other DNA
gtgtgctgaactgtggg

SEQ ID NO: 158796 - DNA, 17 bp, synthetic construct
  source 1..17: mol_type = other DNA
tgtgtgctgaactgtgg

SEQ ID NO: 158797 - DNA, 17 bp, synthetic construct
  source 1..17: mol_type = other DNA
gtgtgtgctgaactgtg

SEQ ID NO: 158798 - DNA, 17 bp, synthetic construct
  source 1..17: mol_type = other DNA
agtgtgtgctgaactgt

SEQ ID NO: 158799 - DNA, 17 bp, synthetic construct
  source 1..17: mol_type = other DNA
cagtgtgtgctgaactg

SEQ ID NO: 158800 - DNA, 17 bp, synthetic construct
  source 1..17: mol_type = other DNA
gcagtgtgtgctgaact

SEQ ID NO: 158801 - DNA, 17 bp, synthetic construct
  source 1..17: mol_type = other DNA
cgcagtgtgtgctgaac

SEQ ID NO: 158802 - DNA, 17 bp, synthetic construct
  source 1..17: mol_type = other DNA
acgcagtgtgtgctgaa

SEQ ID NO: 158803 - DNA, 17 bp, synthetic construct
  source 1..17: mol_type = other DNA
cacgcagtgtgtgctga

SEQ ID NO: 158804 - DNA, 17 bp, synthetic construct
  source 1..17: mol_type = other DNA
acacgcagtgtgtgctg

SEQ ID NO: 158805 - DNA, 17 bp, synthetic construct
  source 1..17: mol_type = other DNA
gacacgcagtgtgtgct

SEQ ID NO: 158806 - DNA, 17 bp, synthetic construct
  source 1..17: mol_type = other DNA
ggacacgcagtgtgtgc

SEQ ID NO: 158807 - DNA, 17 bp, synthetic construct
  source 1..17: mol_type = other DNA
cggacacgcagtgtgtg

SEQ ID NO: 158808 - DNA, 17 bp, synthetic construct
  source 1..17: mol_type = other DNA
ccggacacgcagtgtgt

SEQ ID NO: 158809 - DNA, 17 bp, synthetic construct
  source 1..17: mol_type = other DNA
gccggacacgcagtgtg

SEQ ID NO: 158810 - DNA, 17 bp, synthetic construct
  source 1..17: mol_type = other DNA
agccggacacgcagtgt

SEQ ID NO: 158811 - DNA, 17 bp, synthetic construct
  source 1..17: mol_type = other DNA
cagccggacacgcagtg

SEQ ID NO: 158812 - DNA, 17 bp, synthetic construct
  source 1..17: mol_type = other DNA
acagccggacacgcagt

SEQ ID NO: 158813 - DNA, 17 bp, synthetic construct
  source 1..17: mol_type = other DNA
cacagccggacacgcag

SEQ ID NO: 158814 - DNA, 17 bp, synthetic construct
  source 1..17: mol_type = other DNA
acacagccggacacgca

SEQ ID NO: 158815 - DNA, 17 bp, synthetic construct
  source 1..17: mol_type = other DNA
gacacagccggacacgc

SEQ ID NO: 158816 - DNA, 17 bp, synthetic construct
  source 1..17: mol_type = other DNA
agacacagccggacacg

SEQ ID NO: 158817 - DNA, 17 bp, synthetic construct
  source 1..17: mol_type = other DNA
cagacacagccggacac

SEQ ID NO: 158818 - DNA, 17 bp, synthetic construct
  source 1..17: mol_type = other DNA
acagacacagccggaca

SEQ ID NO: 158819 - DNA, 17 bp, synthetic construct
  source 1..17: mol_type = other DNA
gacagacacagccggac

SEQ ID NO: 158820 - DNA, 17 bp, synthetic construct
  source 1..17: mol_type = other DNA
ggacagacacagccgga

SEQ ID NO: 158821 - DNA, 17 bp, synthetic construct
  source 1..17: mol_type = other DNA
gggacagacacagccgg

SEQ ID NO: 158822 - DNA, 17 bp, synthetic construct
  source 1..17: mol_type = other DNA
ggggacagacacagccg

SEQ ID NO: 158823 - DNA, 17 bp, synthetic construct
  source 1..17: mol_type = other DNA
gggggacagacacagcc

SEQ ID NO: 158824 - DNA, 17 bp, synthetic construct
  source 1..17: mol_type = other DNA
cgggggacagacacagc

SEQ ID NO: 158825 - DNA, 17 bp, synthetic construct
  source 1..17: mol_type = other DNA
ccgggggacagacacag

SEQ ID NO: 158826 - DNA, 17 bp, synthetic construct
  source 1..17: mol_type = other DNA
cccgggggacagacaca

SEQ ID NO: 158827 - DNA, 17 bp, synthetic construct
  source 1..17: mol_type = other DNA
ccccgggggacagacac

SEQ ID NO: 158828 - DNA, 17 bp, synthetic construct
  source 1..17: mol_type = other DNA
gccccgggggacagaca

SEQ ID NO: 158829 - DNA, 17 bp, synthetic construct
  source 1..17: mol_type = other DNA
agccccgggggacagac

SEQ ID NO: 158830 - DNA, 17 bp, synthetic construct
  source 1..17: mol_type = other DNA
cagccccgggggacaga

SEQ ID NO: 158831 - DNA, 17 bp, synthetic construct
  source 1..17: mol_type = other DNA
ccagccccgggggacag

SEQ ID NO: 158832 - DNA, 17 bp, synthetic construct
  source 1..17: mol_type = other DNA
accagccccgggggaca

SEQ ID NO: 158833 - DNA, 17 bp, synthetic construct
  source 1..17: mol_type = other DNA
caccagccccgggggac

SEQ ID NO: 158834 - DNA, 17 bp, synthetic construct
  source 1..17: mol_type = other DNA
acaccagccccggggga

SEQ ID NO: 158835 - DNA, 17 bp, synthetic construct
  source 1..17: mol_type = other DNA
gacaccagccccggggg

SEQ ID NO: 158836 - DNA, 17 bp, synthetic construct
  source 1..17: mol_type = other DNA
cgacaccagccccgggg

SEQ ID NO: 158837 - DNA, 17 bp, synthetic construct
  source 1..17: mol_type = other DNA
ccgacaccagccccggg

SEQ ID NO: 158838 - DNA, 17 bp, synthetic construct
  source 1..17: mol_type = other DNA
tccgacaccagccccgg

SEQ ID NO: 158839 - DNA, 17 bp, synthetic construct
  source 1..17: mol_type = other DNA
atccgacaccagccccg

SEQ ID NO: 158840 - DNA, 17 bp, synthetic construct
  source 1..17: mol_type = other DNA
catccgacaccagcccc

SEQ ID NO: 158841 - DNA, 17 bp, synthetic construct
  source 1..17: mol_type = other DNA
ccatccgacaccagccc

SEQ ID NO: 158842 - DNA, 17 bp, synthetic construct
  source 1..17: mol_type = other DNA
cccatccgacaccagcc

SEQ ID NO: 158843 - DNA, 17 bp, synthetic construct
  source 1..17: mol_type = other DNA
tcccatccgacaccagc

SEQ ID NO: 158844 - DNA, 17 bp, synthetic construct
  source 1..17: mol_type = other DNA
ctcccatccgacaccag

SEQ ID NO: 158845 - DNA, 17 bp, synthetic construct
  source 1..17: mol_type = other DNA
actcccatccgacacca

SEQ ID NO: 158846 - DNA, 17 bp, synthetic construct
  source 1..17: mol_type = other DNA
cactcccatccgacacc

SEQ ID NO: 158847 - DNA, 17 bp, synthetic construct
  source 1..17: mol_type = other DNA
ccactcccatccgacac

SEQ ID NO: 158848 - DNA, 17 bp, synthetic construct
  source 1..17: mol_type = other DNA
cccactcccatccgaca

SEQ ID NO: 158849 - DNA, 17 bp, synthetic construct
  source 1..17: mol_type = other DNA
ccccactcccatccgac

SEQ ID NO: 158850 - DNA, 17 bp, synthetic construct
  source 1..17: mol_type = other DNA
cccccactcccatccga

SEQ ID NO: 158851 - DNA, 17 bp, synthetic construct
  source 1..17: mol_type = other DNA
gcccccactcccatccg

SEQ ID NO: 158852 - DNA, 17 bp, synthetic construct
  source 1..17: mol_type = other DNA
agcccccactcccatcc

SEQ ID NO: 158853 - DNA, 17 bp, synthetic construct
  source 1..17: mol_type = other DNA
cagcccccactcccatc

SEQ ID NO: 158854 - DNA, 17 bp, synthetic construct
  source 1..17: mol_type = other DNA
gcagcccccactcccat

SEQ ID NO: 158855 - DNA, 17 bp, synthetic construct
  source 1..17: mol_type = other DNA
tgcagcccccactccca

SEQ ID NO: 158856 - DNA, 17 bp, synthetic construct
  source 1..17: mol_type = other DNA
atgcagcccccactccc

SEQ ID NO: 158857 - DNA, 17 bp, synthetic construct
  source 1..17: mol_type = other DNA
aatgcagcccccactcc

SEQ ID NO: 158858 - DNA, 17 bp, synthetic construct
  source 1..17: mol_type = other DNA
caatgcagcccccactc

SEQ ID NO: 158859 - DNA, 17 bp, synthetic construct
  source 1..17: mol_type = other DNA
gcaatgcagcccccact

SEQ ID NO: 158860 - DNA, 17 bp, synthetic construct
  source 1..17: mol_type = other DNA
ggcaatgcagcccccac

SEQ ID NO: 158861 - DNA, 17 bp, synthetic construct
  source 1..17: mol_type = other DNA
cggcaatgcagccccca

SEQ ID NO: 158862 - DNA, 17 bp, synthetic construct
  source 1..17: mol_type = other DNA
tcggcaatgcagccccc

SEQ ID NO: 158863 - DNA, 17 bp, synthetic construct
  source 1..17: mol_type = other DNA
ctcggcaatgcagcccc

SEQ ID NO: 158864 - DNA, 17 bp, synthetic construct
  source 1..17: mol_type = other DNA
cctcggcaatgcagccc

SEQ ID NO: 158865 - DNA, 17 bp, synthetic construct
  source 1..17: mol_type = other DNA
tcctcggcaatgcagcc

SEQ ID NO: 158866 - DNA, 17 bp, synthetic construct
  source 1..17: mol_type = other DNA
ctcctcggcaatgcagc

SEQ ID NO: 158867 - DNA, 17 bp, synthetic construct
  source 1..17: mol_type = other DNA
cctcctcggcaatgcag

SEQ ID NO: 158868 - DNA, 17 bp, synthetic construct
  source 1..17: mol_type = other DNA
tcctcctcggcaatgca

SEQ ID NO: 158869 - DNA, 17 bp, synthetic construct
  source 1..17: mol_type = other DNA
gtcctcctcggcaatgc

SEQ ID NO: 158870 - DNA, 17 bp, synthetic construct
  source 1..17: mol_type = other DNA
agtcctcctcggcaatg

SEQ ID NO: 158871 - DNA, 17 bp, synthetic construct
  source 1..17: mol_type = other DNA
cagtcctcctcggcaat

SEQ ID NO: 158872 - DNA, 17 bp, synthetic construct
  source 1..17: mol_type = other DNA
gcagtcctcctcggcaa

SEQ ID NO: 158873 - DNA, 17 bp, synthetic construct
  source 1..17: mol_type = other DNA
ggcagtcctcctcggca

SEQ ID NO: 158874 - DNA, 17 bp, synthetic construct
  source 1..17: mol_type = other DNA
gggcagtcctcctcggc

SEQ ID NO: 158875 - DNA, 17 bp, synthetic construct
  source 1..17: mol_type = other DNA
ggggcagtcctcctcgg

SEQ ID NO: 158876 - DNA, 17 bp, synthetic construct
  source 1..17: mol_type = other DNA
aggggcagtcctcctcg

SEQ ID NO: 158877 - DNA, 17 bp, synthetic construct
  source 1..17: mol_type = other DNA
caggggcagtcctcctc

SEQ ID NO: 158878 - DNA, 17 bp, synthetic construct
  source 1..17: mol_type = other DNA
acaggggcagtcctcct

SEQ ID NO: 158879 - DNA, 17 bp, synthetic construct
  source 1..17: mol_type = other DNA
cacaggggcagtcctcc

SEQ ID NO: 158880 - DNA, 17 bp, synthetic construct
  source 1..17: mol_type = other DNA
acacaggggcagtcctc

SEQ ID NO: 158881 - DNA, 17 bp, synthetic construct
  source 1..17: mol_type = other DNA
cacacaggggcagtcct

SEQ ID NO: 158882 - DNA, 17 bp, synthetic construct
  source 1..17: mol_type = other DNA
gcacacaggggcagtcc

SEQ ID NO: 158883 - DNA, 17 bp, synthetic construct
  source 1..17: mol_type = other DNA
tgcacacaggggcagtc

SEQ ID NO: 158884 - DNA, 17 bp, synthetic construct
  source 1..17: mol_type = other DNA
gtgcacacaggggcagt

SEQ ID NO: 158885 - DNA, 17 bp, synthetic construct
  source 1..17: mol_type = other DNA
tgtgcacacaggggcag

SEQ ID NO: 158886 - DNA, 17 bp, synthetic construct
  source 1..17: mol_type = other DNA
ttgtgcacacaggggca

SEQ ID NO: 158887 - DNA, 17 bp, synthetic construct
  source 1..17: mol_type = other DNA
gttgtgcacacaggggc

SEQ ID NO: 158888 - DNA, 17 bp, synthetic construct
  source 1..17: mol_type = other DNA
cgttgtgcacacagggg

SEQ ID NO: 158889 - DNA, 17 bp, synthetic construct
  source 1..17: mol_type = other DNA
tcgttgtgcacacaggg

SEQ ID NO: 158890 - DNA, 17 bp, synthetic construct
  source 1..17: mol_type = other DNA
ctcgttgtgcacacagg

SEQ ID NO: 158891 - DNA, 17 bp, synthetic construct
  source 1..17: mol_type = other DNA
cctcgttgtgcacacag

SEQ ID NO: 158892 - DNA, 17 bp, synthetic construct
  source 1..17: mol_type = other DNA
gcctcgttgtgcacaca

SEQ ID NO: 158893 - DNA, 17 bp, synthetic construct
  source 1..17: mol_type = other DNA
ggcctcgttgtgcacac

SEQ ID NO: 158894 - DNA, 17 bp, synthetic construct
  source 1..17: mol_type = other DNA
tggcctcgttgtgcaca

SEQ ID NO: 158895 - DNA, 17 bp, synthetic construct
  source 1..17: mol_type = other DNA
gtggcctcgttgtgcac

SEQ ID NO: 158896 - DNA, 17 bp, synthetic construct
  source 1..17: mol_type = other DNA
ggtggcctcgttgtgca

SEQ ID NO: 158897 - DNA, 17 bp, synthetic construct
  source 1..17: mol_type = other DNA
aggtggcctcgttgtgc

SEQ ID NO: 158898 - DNA, 17 bp, synthetic construct
  source 1..17: mol_type = other DNA
taggtggcctcgttgtg

SEQ ID NO: 158899 - DNA, 17 bp, synthetic construct
  source 1..17: mol_type = other DNA
gtaggtggcctcgttgt

SEQ ID NO: 158900 - DNA, 17 bp, synthetic construct
  source 1..17: mol_type = other DNA
tgtaggtggcctcgttg

SEQ ID NO: 158901 - DNA, 17 bp, synthetic construct
  source 1..17: mol_type = other DNA
ttgtaggtggcctcgtt

SEQ ID NO: 158902 - DNA, 17 bp, synthetic construct
  source 1..17: mol_type = other DNA
cttgtaggtggcctcgt

SEQ ID NO: 158903 - DNA, 17 bp, synthetic construct
  source 1..17: mol_type = other DNA
gcttgtaggtggcctcg

SEQ ID NO: 158904 - DNA, 17 bp, synthetic construct
  source 1..17: mol_type = other DNA
ggcttgtaggtggcctc

SEQ ID NO: 158905 - DNA, 17 bp, synthetic construct
  source 1..17: mol_type = other DNA
aggcttgtaggtggcct

SEQ ID NO: 158906 - DNA, 17 bp, synthetic construct
  source 1..17: mol_type = other DNA
caggcttgtaggtggcc

SEQ ID NO: 158907 - DNA, 17 bp, synthetic construct
  source 1..17: mol_type = other DNA
ccaggcttgtaggtggc

SEQ ID NO: 158908 - DNA, 17 bp, synthetic construct
  source 1..17: mol_type = other DNA
tccaggcttgtaggtgg

SEQ ID NO: 158909 - DNA, 17 bp, synthetic construct
  source 1..17: mol_type = other DNA
ctccaggcttgtaggtg

SEQ ID NO: 158910 - DNA, 17 bp, synthetic construct
  source 1..17: mol_type = other DNA
tctccaggcttgtaggt

SEQ ID NO: 158911 - DNA, 17 bp, synthetic construct
  source 1..17: mol_type = other DNA
ctctccaggcttgtagg

SEQ ID NO: 158912 - DNA, 17 bp, synthetic construct
  source 1..17: mol_type = other DNA
tctctccaggcttgtag

SEQ ID NO: 158913 - DNA, 17 bp, synthetic construct
  source 1..17: mol_type = other DNA
gtctctccaggcttgta

SEQ ID NO: 158914 - DNA, 17 bp, synthetic construct
  source 1..17: mol_type = other DNA
ggtctctccaggcttgt

SEQ ID NO: 158915 - DNA, 17 bp, synthetic construct
  source 1..17: mol_type = other DNA
tggtctctccaggcttg

SEQ ID NO: 158916 - DNA, 17 bp, synthetic construct
  source 1..17: mol_type = other DNA
atggtctctccaggctt

SEQ ID NO: 158917 - DNA, 17 bp, synthetic construct
  source 1..17: mol_type = other DNA
gatggtctctccaggct

SEQ ID NO: 158918 - DNA, 17 bp, synthetic construct
  source 1..17: mol_type = other DNA
tgatggtctctccaggc

SEQ ID NO: 158919 - DNA, 17 bp, synthetic construct
  source 1..17: mol_type = other DNA
ctgatggtctctccagg

SEQ ID NO: 158920 - DNA, 17 bp, synthetic construct
  source 1..17: mol_type = other DNA
cctgatggtctctccag

SEQ ID NO: 158921 - DNA, 17 bp, synthetic construct
  source 1..17: mol_type = other DNA
ccctgatggtctctcca

SEQ ID NO: 158922 - DNA, 17 bp, synthetic construct
  source 1..17: mol_type = other DNA
accctgatggtctctcc

SEQ ID NO: 158923 - DNA, 17 bp, synthetic construct
  source 1..17: mol_type = other DNA
gaccctgatggtctctc

SEQ ID NO: 158924 - DNA, 17 bp, synthetic construct
  source 1..17: mol_type = other DNA
cgaccctgatggtctct

SEQ ID NO: 158925 - DNA, 17 bp, synthetic construct
  source 1..17: mol_type = other DNA
tcgaccctgatggtctc

SEQ ID NO: 158926 - DNA, 17 bp, synthetic construct
  source 1..17: mol_type = other DNA
gtcgaccctgatggtct

SEQ ID NO: 158927 - DNA, 17 bp, synthetic construct
  source 1..17: mol_type = other DNA
agtcgaccctgatggtc

SEQ ID NO: 158928 - DNA, 17 bp, synthetic construct
  source 1..17: mol_type = other DNA
cagtcgaccctgatggt

SEQ ID NO: 158929 - DNA, 17 bp, synthetic construct
  source 1..17: mol_type = other DNA
gcagtcgaccctgatgg

SEQ ID NO: 158930 - DNA, 17 bp, synthetic construct
  source 1..17: mol_type = other DNA
tgcagtcgaccctgatg

SEQ ID NO: 158931 - DNA, 17 bp, synthetic construct
  source 1..17: mol_type = other DNA
ttgcagtcgaccctgat

SEQ ID NO: 158932 - DNA, 17 bp, synthetic construct
  source 1..17: mol_type = other DNA
gttgcagtcgaccctga

SEQ ID NO: 158933 - DNA, 17 bp, synthetic construct
  source 1..17: mol_type = other DNA
tgttgcagtcgaccctg

SEQ ID NO: 158934 - DNA, 17 bp, synthetic construct
  source 1..17: mol_type = other DNA
gtgttgcagtcgaccct

SEQ ID NO: 158935 - DNA, 17 bp, synthetic construct
  source 1..17: mol_type = other DNA
ggtgttgcagtcgaccc

SEQ ID NO: 158936 - DNA, 17 bp, synthetic construct
  source 1..17: mol_type = other DNA
aggtgttgcagtcgacc

SEQ ID NO: 158937 - DNA, 17 bp, synthetic construct
  source 1..17: mol_type = other DNA
caggtgttgcagtcgac

SEQ ID NO: 158938 - DNA, 17 bp, synthetic construct
  source 1..17: mol_type = other DNA
ccaggtgttgcagtcga

SEQ ID NO: 158939 - DNA, 17 bp, synthetic construct
  source 1..17: mol_type = other DNA
accaggtgttgcagtcg

SEQ ID NO: 158940 - DNA, 17 bp, synthetic construct
  source 1..17: mol_type = other DNA
caccaggtgttgcagtc

SEQ ID NO: 158941 - DNA, 17 bp, synthetic construct
  source 1..17: mol_type = other DNA
ccaccaggtgttgcagt

SEQ ID NO: 158942 - DNA, 17 bp, synthetic construct
  source 1..17: mol_type = other DNA
cccaccaggtgttgcag

SEQ ID NO: 158943 - DNA, 17 bp, synthetic construct
  source 1..17: mol_type = other DNA
acccaccaggtgttgca

SEQ ID NO: 158944 - DNA, 17 bp, synthetic construct
  source 1..17: mol_type = other DNA
gacccaccaggtgttgc

SEQ ID NO: 158945 - DNA, 17 bp, synthetic construct
  source 1..17: mol_type = other DNA
cgacccaccaggtgttg

SEQ ID NO: 158946 - DNA, 17 bp, synthetic construct
  source 1..17: mol_type = other DNA
acgacccaccaggtgtt

SEQ ID NO: 158947 - DNA, 17 bp, synthetic construct
  source 1..17: mol_type = other DNA
cacgacccaccaggtgt

SEQ ID NO: 158948 - DNA, 17 bp, synthetic construct
  source 1..17: mol_type = other DNA
tcacgacccaccaggtg

SEQ ID NO: 158949 - DNA, 17 bp, synthetic construct
  source 1..17: mol_type = other DNA
ctcacgacccaccaggt

SEQ ID NO: 158950 - DNA, 17 bp, synthetic construct
  source 1..17: mol_type = other DNA
actcacgacccaccagg

SEQ ID NO: 158951 - DNA, 17 bp, synthetic construct
  source 1..17: mol_type = other DNA
gactcacgacccaccag

SEQ ID NO: 158952 - DNA, 17 bp, synthetic construct
  source 1..17: mol_type = other DNA
agactcacgacccacca

SEQ ID NO: 158953 - DNA, 17 bp, synthetic construct
  source 1..17: mol_type = other DNA
gagactcacgacccacc

SEQ ID NO: 158954 - DNA, 17 bp, synthetic construct
  source 1..17: mol_type = other DNA
agagactcacgacccac

SEQ ID NO: 158955 - DNA, 17 bp, synthetic construct
  source 1..17: mol_type = other DNA
gagagactcacgaccca

SEQ ID NO: 158956 - DNA, 17 bp, synthetic construct
  source 1..17: mol_type = other DNA
cgagagactcacgaccc

SEQ ID NO: 158957 - DNA, 17 bp, synthetic construct
  source 1..17: mol_type = other DNA
ccgagagactcacgacc

SEQ ID NO: 158958 - DNA, 17 bp, synthetic construct
  source 1..17: mol_type = other DNA
tccgagagactcacgac

SEQ ID NO: 158959 - DNA, 17 bp, synthetic construct
  source 1..17: mol_type = other DNA
ctccgagagactcacga

SEQ ID NO: 158960 - DNA, 17 bp, synthetic construct
  source 1..17: mol_type = other DNA
cctccgagagactcacg

SEQ ID NO: 158961 - DNA, 17 bp, synthetic construct
  source 1..17: mol_type = other DNA
gcctccgagagactcac

SEQ ID NO: 158962 - DNA, 17 bp, synthetic construct
  source 1..17: mol_type = other DNA
tgcctccgagagactca

SEQ ID NO: 158963 - DNA, 17 bp, synthetic construct
  source 1..17: mol_type = other DNA
ctgcctccgagagactc

SEQ ID NO: 158964 - DNA, 17 bp, synthetic construct
  source 1..17: mol_type = other DNA
gctgcctccgagagact

SEQ ID NO: 158965 - DNA, 17 bp, synthetic construct
  source 1..17: mol_type = other DNA
tgctgcctccgagagac

SEQ ID NO: 158966 - DNA, 17 bp, synthetic construct
  source 1..17: mol_type = other DNA
ctgctgcctccgagaga

SEQ ID NO: 158967 - DNA, 17 bp, synthetic construct
  source 1..17: mol_type = other DNA
cctgctgcctccgagag

SEQ ID NO: 158968 - DNA, 17 bp, synthetic construct
  source 1..17: mol_type = other DNA
acctgctgcctccgaga

SEQ ID NO: 158969 - DNA, 17 bp, synthetic construct
  source 1..17: mol_type = other DNA
cacctgctgcctccgag

SEQ ID NO: 158970 - DNA, 17 bp, synthetic construct
  source 1..17: mol_type = other DNA
ccacctgctgcctccga

SEQ ID NO: 158971 - DNA, 17 bp, synthetic construct
  source 1..17: mol_type = other DNA
cccacctgctgcctccg

SEQ ID NO: 158972 - DNA, 17 bp, synthetic construct
  source 1..17: mol_type = other DNA
ccccacctgctgcctcc

SEQ ID NO: 158973 - DNA, 17 bp, synthetic construct
  source 1..17: mol_type = other DNA
tccccacctgctgcctc

SEQ ID NO: 158974 - DNA, 17 bp, synthetic construct
  source 1..17: mol_type = other DNA
ctccccacctgctgcct

SEQ ID NO: 158975 - DNA, 17 bp, synthetic construct
  source 1..17: mol_type = other DNA
cctccccacctgctgcc

SEQ ID NO: 158976 - DNA, 17 bp, synthetic construct
  source 1..17: mol_type = other DNA
ccctccccacctgctgc

SEQ ID NO: 158977 - DNA, 17 bp, synthetic construct
  source 1..17: mol_type = other DNA
gccctccccacctgctg

SEQ ID NO: 158978 - DNA, 17 bp, synthetic construct
  source 1..17: mol_type = other DNA
cgccctccccacctgct

SEQ ID NO: 158979 - DNA, 17 bp, synthetic construct
  source 1..17: mol_type = other DNA
ccgccctccccacctgc

SEQ ID NO: 158980 - DNA, 17 bp, synthetic construct
  source 1..17: mol_type = other DNA
cccgccctccccacctg

SEQ ID NO: 158981 - DNA, 17 bp, synthetic construct
  source 1..17: mol_type = other DNA
ccccgccctccccacct

SEQ ID NO: 158982 - DNA, 17 bp, synthetic construct
  source 1..17: mol_type = other DNA
cccccgccctccccacc

SEQ ID NO: 158983 - DNA, 17 bp, synthetic construct
  source 1..17: mol_type = other DNA
gcccccgccctccccac

SEQ ID NO: 158984 - DNA, 17 bp, synthetic construct
  source 1..17: mol_type = other DNA
cgcccccgccctcccca

SEQ ID NO: 158985 - DNA, 17 bp, synthetic construct
  source 1..17: mol_type = other DNA
ccgcccccgccctcccc

SEQ ID NO: 158986 - DNA, 17 bp, synthetic construct
  source 1..17: mol_type = other DNA
cccgcccccgccctccc

SEQ ID NO: 158987 - DNA, 17 bp, synthetic construct
  source 1..17: mol_type = other DNA
ccccgcccccgccctcc

SEQ ID NO: 158988 - DNA, 17 bp, synthetic construct
  source 1..17: mol_type = other DNA
tccccgcccccgccctc

SEQ ID NO: 158989 - DNA, 17 bp, synthetic construct
  source 1..17: mol_type = other DNA
ctccccgcccccgccct

SEQ ID NO: 158990 - DNA, 17 bp, synthetic construct
  source 1..17: mol_type = other DNA
cctccccgcccccgccc

SEQ ID NO: 158991 - DNA, 17 bp, synthetic construct
  source 1..17: mol_type = other DNA
ccctccccgcccccgcc

SEQ ID NO: 158992 - DNA, 17 bp, synthetic construct
  source 1..17: mol_type = other DNA
gccctccccgcccccgc

SEQ ID NO: 158993 - DNA, 17 bp, synthetic construct
  source 1..17: mol_type = other DNA
tgccctccccgcccccg

SEQ ID NO: 158994 - DNA, 17 bp, synthetic construct
  source 1..17: mol_type = other DNA
ctgccctccccgccccc

SEQ ID NO: 158995 - DNA, 17 bp, synthetic construct
  source 1..17: mol_type = other DNA
gctgccctccccgcccc

SEQ ID NO: 158996 - DNA, 17 bp, synthetic construct
  source 1..17: mol_type = other DNA
cgctgccctccccgccc

SEQ ID NO: 158997 - DNA, 17 bp, synthetic construct
  source 1..17: mol_type = other DNA
ccgctgccctccccgcc

SEQ ID NO: 158998 - DNA, 17 bp, synthetic construct
  source 1..17: mol_type = other DNA
cccgctgccctccccgc

SEQ ID NO: 158999 - DNA, 17 bp, synthetic construct
  source 1..17: mol_type = other DNA
acccgctgccctccccg

SEQ ID NO: 159000 - DNA, 17 bp, synthetic construct
  source 1..17: mol_type = other DNA
cacccgctgccctcccc

SEQ ID NO: 159001 - DNA, 17 bp, synthetic construct
  source 1..17: mol_type = other DNA
ccacccgctgccctccc

SEQ ID NO: 159002 - DNA, 17 bp, synthetic construct
  source 1..17: mol_type = other DNA
cccacccgctgccctcc

SEQ ID NO: 159003 - DNA, 17 bp, synthetic construct
  source 1..17: mol_type = other DNA
ccccacccgctgccctc

SEQ ID NO: 159004 - DNA, 17 bp, synthetic construct
  source 1..17: mol_type = other DNA
tccccacccgctgccct

SEQ ID NO: 159005 - DNA, 17 bp, synthetic construct
  source 1..17: mol_type = other DNA
ctccccacccgctgccc

SEQ ID NO: 159006 - DNA, 17 bp, synthetic construct
  source 1..17: mol_type = other DNA
cctccccacccgctgcc

SEQ ID NO: 159007 - DNA, 17 bp, synthetic construct
  source 1..17: mol_type = other DNA
gcctccccacccgctgc

SEQ ID NO: 159008 - DNA, 17 bp, synthetic construct
  source 1..17: mol_type = other DNA
tgcctccccacccgctg

SEQ ID NO: 159009 - DNA, 17 bp, synthetic construct
  source 1..17: mol_type = other DNA
ctgcctccccacccgct

SEQ ID NO: 159010 - DNA, 17 bp, synthetic construct
  source 1..17: mol_type = other DNA
gctgcctccccacccgc

SEQ ID NO: 159011 - DNA, 17 bp, synthetic construct
  source 1..17: mol_type = other DNA
cgctgcctccccacccg

SEQ ID NO: 159012 - DNA, 17 bp, synthetic construct
  source 1..17: mol_type = other DNA
ccgctgcctccccaccc

SEQ ID NO: 159013 - DNA, 17 bp, synthetic construct
  source 1..17: mol_type = other DNA
cccgctgcctccccacc

SEQ ID NO: 159014 - DNA, 17 bp, synthetic construct
  source 1..17: mol_type = other DNA
gcccgctgcctccccac

SEQ ID NO: 159015 - DNA, 17 bp, synthetic construct
  source 1..17: mol_type = other DNA
tgcccgctgcctcccca

SEQ ID NO: 159016 - DNA, 17 bp, synthetic construct
  source 1..17: mol_type = other DNA
ctgcccgctgcctcccc

SEQ ID NO: 159017 - DNA, 17 bp, synthetic construct
  source 1..17: mol_type = other DNA
cctgcccgctgcctccc

SEQ ID NO: 159018 - DNA, 17 bp, synthetic construct
  source 1..17: mol_type = other DNA
ccctgcccgctgcctcc

SEQ ID NO: 159019 - DNA, 17 bp, synthetic construct
  source 1..17: mol_type = other DNA
tccctgcccgctgcctc

SEQ ID NO: 159020 - DNA, 17 bp, synthetic construct
  source 1..17: mol_type = other DNA
ctccctgcccgctgcct

SEQ ID NO: 159021 - DNA, 17 bp, synthetic construct
  source 1..17: mol_type = other DNA
cctccctgcccgctgcc

SEQ ID NO: 159022 - DNA, 17 bp, synthetic construct
  source 1..17: mol_type = other DNA
ccctccctgcccgctgc

SEQ ID NO: 159023 - DNA, 17 bp, synthetic construct
  source 1..17: mol_type = other DNA
gccctccctgcccgctg

SEQ ID NO: 159024 - DNA, 17 bp, synthetic construct
  source 1..17: mol_type = other DNA
tgccctccctgcccgct

SEQ ID NO: 159025 - DNA, 17 bp, synthetic construct
  source 1..17: mol_type = other DNA
ctgccctccctgcccgc

SEQ ID NO: 159026 - DNA, 17 bp, synthetic construct
  source 1..17: mol_type = other DNA
cctgccctccctgcccg

SEQ ID NO: 159027 - DNA, 17 bp, synthetic construct
  source 1..17: mol_type = other DNA
ccctgccctccctgccc

SEQ ID NO: 159028 - DNA, 17 bp, synthetic construct
  source 1..17: mol_type = other DNA
cccctgccctccctgcc

SEQ ID NO: 159029 - DNA, 17 bp, synthetic construct
  source 1..17: mol_type = other DNA
ccccctgccctccctgc

SEQ ID NO: 159030 - DNA, 17 bp, synthetic construct
  source 1..17: mol_type = other DNA
gccccctgccctccctg

SEQ ID NO: 159031 - DNA, 17 bp, synthetic construct
  source 1..17: mol_type = other DNA
cgccccctgccctccct

SEQ ID NO: 159032 - DNA, 17 bp, synthetic construct
  source 1..17: mol_type = other DNA
ccgccccctgccctccc

SEQ ID NO: 159033 - DNA, 17 bp, synthetic construct
  source 1..17: mol_type = other DNA
cccgccccctgccctcc

SEQ ID NO: 159034 - DNA, 17 bp, synthetic construct
  source 1..17: mol_type = other DNA
ccccgccccctgccctc

SEQ ID NO: 159035 - DNA, 17 bp, synthetic construct
  source 1..17: mol_type = other DNA
tccccgccccctgccct

SEQ ID NO: 159036 - DNA, 17 bp, synthetic construct
  source 1..17: mol_type = other DNA
ctccccgccccctgccc

SEQ ID NO: 159037 - DNA, 17 bp, synthetic construct
  source 1..17: mol_type = other DNA
cctccccgccccctgcc

SEQ ID NO: 159038 - DNA, 17 bp, synthetic construct
  source 1..17: mol_type = other DNA
ccctccccgccccctgc

SEQ ID NO: 159039 - DNA, 17 bp, synthetic construct
  source 1..17: mol_type = other DNA
gccctccccgccccctg

SEQ ID NO: 159040 - DNA, 17 bp, synthetic construct
  source 1..17: mol_type = other DNA
tgccctccccgccccct

SEQ ID NO: 159041 - DNA, 17 bp, synthetic construct
  source 1..17: mol_type = other DNA
ctgccctccccgccccc

SEQ ID NO: 159042 - DNA, 17 bp, synthetic construct
  source 1..17: mol_type = other DNA
cctgccctccccgcccc

SEQ ID NO: 159043 - DNA, 17 bp, synthetic construct
  source 1..17: mol_type = other DNA
ccctgccctccccgccc

SEQ ID NO: 159044 - DNA, 17 bp, synthetic construct
  source 1..17: mol_type = other DNA
cccctgccctccccgcc

SEQ ID NO: 159045 - DNA, 17 bp, synthetic construct
  source 1..17: mol_type = other DNA
ccccctgccctccccgc

SEQ ID NO: 159046 - DNA, 17 bp, synthetic construct
  source 1..17: mol_type = other DNA
gccccctgccctccccg

SEQ ID NO: 159047 - DNA, 17 bp, synthetic construct
  source 1..17: mol_type = other DNA
ggccccctgccctcccc

SEQ ID NO: 159048 - DNA, 17 bp, synthetic construct
  source 1..17: mol_type = other DNA
tggccccctgccctccc

SEQ ID NO: 159049 - DNA, 17 bp, synthetic construct
  source 1..17: mol_type = other DNA
ctggccccctgccctcc

SEQ ID NO: 159050 - DNA, 17 bp, synthetic construct
  source 1..17: mol_type = other DNA
gctggccccctgccctc

SEQ ID NO: 159051 - DNA, 17 bp, synthetic construct
  source 1..17: mol_type = other DNA
agctggccccctgccct

SEQ ID NO: 159052 - DNA, 17 bp, synthetic construct
  source 1..17: mol_type = other DNA
cagctggccccctgccc

SEQ ID NO: 159053 - DNA, 17 bp, synthetic construct
  source 1..17: mol_type = other DNA
ccagctggccccctgcc

SEQ ID NO: 159054 - DNA, 17 bp, synthetic construct
  source 1..17: mol_type = other DNA
gccagctggccccctgc

SEQ ID NO: 159055 - DNA, 17 bp, synthetic construct
  source 1..17: mol_type = other DNA
ggccagctggccccctg

SEQ ID NO: 159056 - DNA, 17 bp, synthetic construct
  source 1..17: mol_type = other DNA
tggccagctggccccct

SEQ ID NO: 159057 - DNA, 17 bp, synthetic construct
  source 1..17: mol_type = other DNA
ctggccagctggccccc

SEQ ID NO: 159058 - DNA, 17 bp, synthetic construct
  source 1..17: mol_type = other DNA
cctggccagctggcccc

SEQ ID NO: 159059 - DNA, 17 bp, synthetic construct
  source 1..17: mol_type = other DNA
ccctggccagctggccc

SEQ ID NO: 159060 - DNA, 17 bp, synthetic construct
  source 1..17: mol_type = other DNA
accctggccagctggcc

SEQ ID NO: 159061 - DNA, 17 bp, synthetic construct
  source 1..17: mol_type = other DNA
caccctggccagctggc

SEQ ID NO: 159062 - DNA, 17 bp, synthetic construct
  source 1..17: mol_type = other DNA
tcaccctggccagctgg

SEQ ID NO: 159063 - DNA, 17 bp, synthetic construct
  source 1..17: mol_type = other DNA
ctcaccctggccagctg

SEQ ID NO: 159064 - DNA, 17 bp, synthetic construct
  source 1..17: mol_type = other DNA
cctcaccctggccagct

SEQ ID NO: 159065 - DNA, 17 bp, synthetic construct
  source 1..17: mol_type = other DNA
acctcaccctggccagc

SEQ ID NO: 159066 - DNA, 17 bp, synthetic construct
  source 1..17: mol_type = other DNA
cacctcaccctggccag

SEQ ID NO: 159067 - DNA, 17 bp, synthetic construct
  source 1..17: mol_type = other DNA
ccacctcaccctggcca

SEQ ID NO: 159068 - DNA, 17 bp, synthetic construct
  source 1..17: mol_type = other DNA
cccacctcaccctggcc

SEQ ID NO: 159069 - DNA, 17 bp, synthetic construct
  source 1..17: mol_type = other DNA
ccccacctcaccctggc

SEQ ID NO: 159070 - DNA, 17 bp, synthetic construct
  source 1..17: mol_type = other DNA
gccccacctcaccctgg

SEQ ID NO: 159071 - DNA, 17 bp, synthetic construct
  source 1..17: mol_type = other DNA
ggccccacctcaccctg

SEQ ID NO: 159072 - DNA, 17 bp, synthetic construct
  source 1..17: mol_type = other DNA
cggccccacctcaccct

SEQ ID NO: 159073 - DNA, 17 bp, synthetic construct
  source 1..17: mol_type = other DNA
acggccccacctcaccc

SEQ ID NO: 159074 - DNA, 17 bp, synthetic construct
  source 1..17: mol_type = other DNA
cacggccccacctcacc

SEQ ID NO: 159075 - DNA, 17 bp, synthetic construct
  source 1..17: mol_type = other DNA
ccacggccccacctcac

SEQ ID NO: 159076 - DNA, 17 bp, synthetic construct
  source 1..17: mol_type = other DNA
gccacggccccacctca

SEQ ID NO: 159077 - DNA, 17 bp, synthetic construct
  source 1..17: mol_type = other DNA
tgccacggccccacctc

SEQ ID NO: 159078 - DNA, 17 bp, synthetic construct
  source 1..17: mol_type = other DNA
ctgccacggccccacct

SEQ ID NO: 159079 - DNA, 17 bp, synthetic construct
  source 1..17: mol_type = other DNA
cctgccacggccccacc

SEQ ID NO: 159080 - DNA, 17 bp, synthetic construct
  source 1..17: mol_type = other DNA
tcctgccacggccccac

SEQ ID NO: 159081 - DNA, 17 bp, synthetic construct
  source 1..17: mol_type = other DNA
ctcctgccacggcccca

SEQ ID NO: 159082 - DNA, 17 bp, synthetic construct
  source 1..17: mol_type = other DNA
tctcctgccacggcccc

SEQ ID NO: 159083 - DNA, 17 bp, synthetic construct
  source 1..17: mol_type = other DNA
ctctcctgccacggccc

SEQ ID NO: 159084 - DNA, 17 bp, synthetic construct
  source 1..17: mol_type = other DNA
tctctcctgccacggcc

SEQ ID NO: 159085 - DNA, 17 bp, synthetic construct
  source 1..17: mol_type = other DNA
ctctctcctgccacggc

SEQ ID NO: 159086 - DNA, 17 bp, synthetic construct
  source 1..17: mol_type = other DNA
tctctctcctgccacgg

SEQ ID NO: 159087 - DNA, 17 bp, synthetic construct
  source 1..17: mol_type = other DNA
ctctctctcctgccacg

SEQ ID NO: 159088 - DNA, 17 bp, synthetic construct
  source 1..17: mol_type = other DNA
actctctctcctgccac

SEQ ID NO: 159089 - DNA, 17 bp, synthetic construct
  source 1..17: mol_type = other DNA
aactctctctcctgcca

SEQ ID NO: 159090 - DNA, 17 bp, synthetic construct
  source 1..17: mol_type = other DNA
caactctctctcctgcc

SEQ ID NO: 159091 - DNA, 17 bp, synthetic construct
  source 1..17: mol_type = other DNA
gcaactctctctcctgc

SEQ ID NO: 159092 - DNA, 17 bp, synthetic construct
  source 1..17: mol_type = other DNA
agcaactctctctcctg

SEQ ID NO: 159093 - DNA, 17 bp, synthetic construct
  source 1..17: mol_type = other DNA
tagcaactctctctcct

SEQ ID NO: 159094 - DNA, 17 bp, synthetic construct
  source 1..17: mol_type = other DNA
ctagcaactctctctcc

SEQ ID NO: 159095 - DNA, 17 bp, synthetic construct
  source 1..17: mol_type = other DNA
cctagcaactctctctc

SEQ ID NO: 159096 - DNA, 17 bp, synthetic construct
  source 1..17: mol_type = other DNA
tcctagcaactctctct

SEQ ID NO: 159097 - DNA, 17 bp, synthetic construct
  source 1..17: mol_type = other DNA
ttcctagcaactctctc

SEQ ID NO: 159098 - DNA, 17 bp, synthetic construct
  source 1..17: mol_type = other DNA
tttcctagcaactctct

SEQ ID NO: 159099 - DNA, 17 bp, synthetic construct
  source 1..17: mol_type = other DNA
ctttcctagcaactctc

SEQ ID NO: 159100 - DNA, 17 bp, synthetic construct
  source 1..17: mol_type = other DNA
gctttcctagcaactct

SEQ ID NO: 159101 - DNA, 17 bp, synthetic construct
  source 1..17: mol_type = other DNA
ggctttcctagcaactc

SEQ ID NO: 159102 - DNA, 17 bp, synthetic construct
  source 1..17: mol_type = other DNA
tggctttcctagcaact

SEQ ID NO: 159103 - DNA, 17 bp, synthetic construct
  source 1..17: mol_type = other DNA
atggctttcctagcaac

SEQ ID NO: 159104 - DNA, 17 bp, synthetic construct
  source 1..17: mol_type = other DNA
catggctttcctagcaa

SEQ ID NO: 159105 - DNA, 17 bp, synthetic construct
  source 1..17: mol_type = other DNA
ccatggctttcctagca

SEQ ID NO: 159106 - DNA, 17 bp, synthetic construct
  source 1..17: mol_type = other DNA
cccatggctttcctagc

SEQ ID NO: 159107 - DNA, 17 bp, synthetic construct
  source 1..17: mol_type = other DNA
gcccatggctttcctag

SEQ ID NO: 159108 - DNA, 17 bp, synthetic construct
  source 1..17: mol_type = other DNA
ggcccatggctttccta

SEQ ID NO: 159109 - DNA, 17 bp, synthetic construct
  source 1..17: mol_type = other DNA
cggcccatggctttcct

SEQ ID NO: 159110 - DNA, 17 bp, synthetic construct
  source 1..17: mol_type = other DNA
acggcccatggctttcc

SEQ ID NO: 159111 - DNA, 17 bp, synthetic construct
  source 1..17: mol_type = other DNA
gacggcccatggctttc

SEQ ID NO: 159112 - DNA, 17 bp, synthetic construct
  source 1..17: mol_type = other DNA
ggacggcccatggcttt

SEQ ID NO: 159113 - DNA, 17 bp, synthetic construct
  source 1..17: mol_type = other DNA
aggacggcccatggctt

SEQ ID NO: 159114 - DNA, 17 bp, synthetic construct
  source 1..17: mol_type = other DNA
caggacggcccatggct

SEQ ID NO: 159115 - DNA, 17 bp, synthetic construct
  source 1..17: mol_type = other DNA
acaggacggcccatggc

SEQ ID NO: 159116 - DNA, 17 bp, synthetic construct
  source 1..17: mol_type = other DNA
cacaggacggcccatgg

SEQ ID NO: 159117 - DNA, 17 bp, synthetic construct
  source 1..17: mol_type = other DNA
gcacaggacggcccatg

SEQ ID NO: 159118 - DNA, 17 bp, synthetic construct
  source 1..17: mol_type = other DNA
cgcacaggacggcccat

SEQ ID NO: 159119 - DNA, 17 bp, synthetic construct
  source 1..17: mol_type = other DNA
acgcacaggacggccca

SEQ ID NO: 159120 - DNA, 17 bp, synthetic construct
  source 1..17: mol_type = other DNA
gacgcacaggacggccc

SEQ ID NO: 159121 - DNA, 17 bp, synthetic construct
  source 1..17: mol_type = other DNA
ggacgcacaggacggcc

SEQ ID NO: 159122 - DNA, 17 bp, synthetic construct
  source 1..17: mol_type = other DNA
aggacgcacaggacggc

SEQ ID NO: 159123 - DNA, 17 bp, synthetic construct
  source 1..17: mol_type = other DNA
gaggacgcacaggacgg

SEQ ID NO: 159124 - DNA, 17 bp, synthetic construct
  source 1..17: mol_type = other DNA
agaggacgcacaggacg

SEQ ID NO: 159125 - DNA, 17 bp, synthetic construct
  source 1..17: mol_type = other DNA
cagaggacgcacaggac

SEQ ID NO: 159126 - DNA, 17 bp, synthetic construct
  source 1..17: mol_type = other DNA
ccagaggacgcacagga

SEQ ID NO: 159127 - DNA, 17 bp, synthetic construct
  source 1..17: mol_type = other DNA
tccagaggacgcacagg

SEQ ID NO: 159128 - DNA, 17 bp, synthetic construct
  source 1..17: mol_type = other DNA
ttccagaggacgcacag

SEQ ID NO: 159129 - DNA, 17 bp, synthetic construct
  source 1..17: mol_type = other DNA
cttccagaggacgcaca

SEQ ID NO: 159130 - DNA, 17 bp, synthetic construct
  source 1..17: mol_type = other DNA
ccttccagaggacgcac

SEQ ID NO: 159131 - DNA, 17 bp, synthetic construct
  source 1..17: mol_type = other DNA
accttccagaggacgca

SEQ ID NO: 159132 - DNA, 17 bp, synthetic construct
  source 1..17: mol_type = other DNA
caccttccagaggacgc

SEQ ID NO: 159133 - DNA, 17 bp, synthetic construct
  source 1..17: mol_type = other DNA
ccaccttccagaggacg

SEQ ID NO: 159134 - DNA, 17 bp, synthetic construct
  source 1..17: mol_type = other DNA
gccaccttccagaggac

SEQ ID NO: 159135 - DNA, 17 bp, synthetic construct
  source 1..17: mol_type = other DNA
ggccaccttccagagga

SEQ ID NO: 159136 - DNA, 17 bp, synthetic construct
  source 1..17: mol_type = other DNA
gggccaccttccagagg

SEQ ID NO: 159137 - DNA, 17 bp, synthetic construct
  source 1..17: mol_type = other DNA
tgggccaccttccagag

SEQ ID NO: 159138 - DNA, 17 bp, synthetic construct
  source 1..17: mol_type = other DNA
ctgggccaccttccaga

SEQ ID NO: 159139 - DNA, 17 bp, synthetic construct
  source 1..17: mol_type = other DNA
cctgggccaccttccag

SEQ ID NO: 159140 - DNA, 17 bp, synthetic construct
  source 1..17: mol_type = other DNA
ccctgggccaccttcca

SEQ ID NO: 159141 - DNA, 17 bp, synthetic construct
  source 1..17: mol_type = other DNA
cccctgggccaccttcc

SEQ ID NO: 159142 - DNA, 17 bp, synthetic construct
  source 1..17: mol_type = other DNA
gcccctgggccaccttc

SEQ ID NO: 159143 - DNA, 17 bp, synthetic construct
  source 1..17: mol_type = other DNA
ggcccctgggccacctt

SEQ ID NO: 159144 - DNA, 17 bp, synthetic construct
  source 1..17: mol_type = other DNA
cggcccctgggccacct

SEQ ID NO: 159145 - DNA, 17 bp, synthetic construct
  source 1..17: mol_type = other DNA
acggcccctgggccacc

SEQ ID NO: 159146 - DNA, 17 bp, synthetic construct
  source 1..17: mol_type = other DNA
cacggcccctgggccac

SEQ ID NO: 159147 - DNA, 17 bp, synthetic construct
  source 1..17: mol_type = other DNA
ccacggcccctgggcca

SEQ ID NO: 159148 - DNA, 17 bp, synthetic construct
  source 1..17: mol_type = other DNA
accacggcccctgggcc

SEQ ID NO: 159149 - DNA, 17 bp, synthetic construct
  source 1..17: mol_type = other DNA
caccacggcccctgggc

SEQ ID NO: 159150 - DNA, 17 bp, synthetic construct
  source 1..17: mol_type = other DNA
gcaccacggcccctggg

SEQ ID NO: 159151 - DNA, 17 bp, synthetic construct
  source 1..17: mol_type = other DNA
agcaccacggcccctgg

SEQ ID NO: 159152 - DNA, 17 bp, synthetic construct
  source 1..17: mol_type = other DNA
tagcaccacggcccctg

SEQ ID NO: 159153 - DNA, 17 bp, synthetic construct
  source 1..17: mol_type = other DNA
gtagcaccacggcccct

SEQ ID NO: 159154 - DNA, 17 bp, synthetic construct
  source 1..17: mol_type = other DNA
ggtagcaccacggcccc

SEQ ID NO: 159155 - DNA, 17 bp, synthetic construct
  source 1..17: mol_type = other DNA
tggtagcaccacggccc

SEQ ID NO: 159156 - DNA, 17 bp, synthetic construct
  source 1..17: mol_type = other DNA
ctggtagcaccacggcc

SEQ ID NO: 159157 - DNA, 17 bp, synthetic construct
  source 1..17: mol_type = other DNA
cctggtagcaccacggc

SEQ ID NO: 159158 - DNA, 17 bp, synthetic construct
  source 1..17: mol_type = other DNA
tcctggtagcaccacgg

SEQ ID NO: 159159 - DNA, 17 bp, synthetic construct
  source 1..17: mol_type = other DNA
ctcctggtagcaccacg

SEQ ID NO: 159160 - DNA, 17 bp, synthetic construct
  source 1..17: mol_type = other DNA
gctcctggtagcaccac

SEQ ID NO: 159161 - DNA, 17 bp, synthetic construct
  source 1..17: mol_type = other DNA
ggctcctggtagcacca

SEQ ID NO: 159162 - DNA, 17 bp, synthetic construct
  source 1..17: mol_type = other DNA
aggctcctggtagcacc

SEQ ID NO: 159163 - DNA, 17 bp, synthetic construct
  source 1..17: mol_type = other DNA
caggctcctggtagcac

SEQ ID NO: 159164 - DNA, 17 bp, synthetic construct
  source 1..17: mol_type = other DNA
ccaggctcctggtagca

SEQ ID NO: 159165 - DNA, 17 bp, synthetic construct
  source 1..17: mol_type = other DNA
accaggctcctggtagc

SEQ ID NO: 159166 - DNA, 17 bp, synthetic construct
  source 1..17: mol_type = other DNA
caccaggctcctggtag

SEQ ID NO: 159167 - DNA, 17 bp, synthetic construct
  source 1..17: mol_type = other DNA
ccaccaggctcctggta

SEQ ID NO: 159168 - DNA, 17 bp, synthetic construct
  source 1..17: mol_type = other DNA
cccaccaggctcctggt

SEQ ID NO: 159169 - DNA, 17 bp, synthetic construct
  source 1..17: mol_type = other DNA
ccccaccaggctcctgg

SEQ ID NO: 159170 - DNA, 17 bp, synthetic construct
  source 1..17: mol_type = other DNA
gccccaccaggctcctg

SEQ ID NO: 159171 - DNA, 17 bp, synthetic construct
  source 1..17: mol_type = other DNA
agccccaccaggctcct

SEQ ID NO: 159172 - DNA, 17 bp, synthetic construct
  source 1..17: mol_type = other DNA
cagccccaccaggctcc

SEQ ID NO: 159173 - DNA, 17 bp, synthetic construct
  source 1..17: mol_type = other DNA
gcagccccaccaggctc

SEQ ID NO: 159174 - DNA, 17 bp, synthetic construct
  source 1..17: mol_type = other DNA
cgcagccccaccaggct

SEQ ID NO: 159175 - DNA, 17 bp, synthetic construct
  source 1..17: mol_type = other DNA
acgcagccccaccaggc

SEQ ID NO: 159176 - DNA, 17 bp, synthetic construct
  source 1..17: mol_type = other DNA
cacgcagccccaccagg

SEQ ID NO: 159177 - DNA, 17 bp, synthetic construct
  source 1..17: mol_type = other DNA
gcacgcagccccaccag

SEQ ID NO: 159178 - DNA, 17 bp, synthetic construct
  source 1..17: mol_type = other DNA
ggcacgcagccccacca

SEQ ID NO: 159179 - DNA, 17 bp, synthetic construct
  source 1..17: mol_type = other DNA
gggcacgcagccccacc

SEQ ID NO: 159180 - DNA, 17 bp, synthetic construct
  source 1..17: mol_type = other DNA
agggcacgcagccccac

SEQ ID NO: 159181 - DNA, 17 bp, synthetic construct
  source 1..17: mol_type = other DNA
cagggcacgcagcccca

SEQ ID NO: 159182 - DNA, 17 bp, synthetic construct
  source 1..17: mol_type = other DNA
gcagggcacgcagcccc

SEQ ID NO: 159183 - DNA, 17 bp, synthetic construct
  source 1..17: mol_type = other DNA
tgcagggcacgcagccc

SEQ ID NO: 159184 - DNA, 17 bp, synthetic construct
  source 1..17: mol_type = other DNA
atgcagggcacgcagcc

SEQ ID NO: 159185 - DNA, 17 bp, synthetic construct
  source 1..17: mol_type = other DNA
aatgcagggcacgcagc

SEQ ID NO: 159186 - DNA, 17 bp, synthetic construct
  source 1..17: mol_type = other DNA
gaatgcagggcacgcag

SEQ ID NO: 159187 - DNA, 17 bp, synthetic construct
  source 1..17: mol_type = other DNA
tgaatgcagggcacgca

SEQ ID NO: 159188 - DNA, 17 bp, synthetic construct
  source 1..17: mol_type = other DNA
gtgaatgcagggcacgc

SEQ ID NO: 159189 - DNA, 17 bp, synthetic construct
  source 1..17: mol_type = other DNA
tgtgaatgcagggcacg

SEQ ID NO: 159190 - DNA, 17 bp, synthetic construct
  source 1..17: mol_type = other DNA
ctgtgaatgcagggcac

SEQ ID NO: 159191 - DNA, 17 bp, synthetic construct
  source 1..17: mol_type = other DNA
actgtgaatgcagggca

SEQ ID NO: 159192 - DNA, 17 bp, synthetic construct
  source 1..17: mol_type = other DNA
cactgtgaatgcagggc

SEQ ID NO: 159193 - DNA, 17 bp, synthetic construct
  source 1..17: mol_type = other DNA
ccactgtgaatgcaggg

SEQ ID NO: 159194 - DNA, 17 bp, synthetic construct
  source 1..17: mol_type = other DNA
cccactgtgaatgcagg

SEQ ID NO: 159195 - DNA, 17 bp, synthetic construct
  source 1..17: mol_type = other DNA
ccccactgtgaatgcag

SEQ ID NO: 159196 - DNA, 17 bp, synthetic construct
  source 1..17: mol_type = other DNA
cccccactgtgaatgca

SEQ ID NO: 159197 - DNA, 17 bp, synthetic construct
  source 1..17: mol_type = other DNA
tcccccactgtgaatgc

SEQ ID NO: 159198 - DNA, 17 bp, synthetic construct
  source 1..17: mol_type = other DNA
gtcccccactgtgaatg

SEQ ID NO: 159199 - DNA, 17 bp, synthetic construct
  source 1..17: mol_type = other DNA
tgtcccccactgtgaat

SEQ ID NO: 159200 - DNA, 17 bp, synthetic construct
  source 1..17: mol_type = other DNA
gtgtcccccactgtgaa

SEQ ID NO: 159201 - DNA, 17 bp, synthetic construct
  source 1..17: mol_type = other DNA
ggtgtcccccactgtga

SEQ ID NO: 159202 - DNA, 17 bp, synthetic construct
  source 1..17: mol_type = other DNA
tggtgtcccccactgtg

SEQ ID NO: 159203 - DNA, 17 bp, synthetic construct
  source 1..17: mol_type = other DNA
gtggtgtcccccactgt

SEQ ID NO: 159204 - DNA, 17 bp, synthetic construct
  source 1..17: mol_type = other DNA
agtggtgtcccccactg

SEQ ID NO: 159205 - DNA, 17 bp, synthetic construct
  source 1..17: mol_type = other DNA
aagtggtgtcccccact

SEQ ID NO: 159206 - DNA, 17 bp, synthetic construct
  source 1..17: mol_type = other DNA
gaagtggtgtcccccac

SEQ ID NO: 159207 - DNA, 17 bp, synthetic construct
  source 1..17: mol_type = other DNA
agaagtggtgtccccca

SEQ ID NO: 159208 - DNA, 17 bp, synthetic construct
  source 1..17: mol_type = other DNA
aagaagtggtgtccccc

SEQ ID NO: 159209 - DNA, 17 bp, synthetic construct
  source 1..17: mol_type = other DNA
gaagaagtggtgtcccc

SEQ ID NO: 159210 - DNA, 17 bp, synthetic construct
  source 1..17: mol_type = other DNA
ggaagaagtggtgtccc

SEQ ID NO: 159211 - DNA, 17 bp, synthetic construct
  source 1..17: mol_type = other DNA
tggaagaagtggtgtcc

SEQ ID NO: 159212 - DNA, 17 bp, synthetic construct
  source 1..17: mol_type = other DNA
gtggaagaagtggtgtc

SEQ ID NO: 159213 - DNA, 17 bp, synthetic construct
  source 1..17: mol_type = other DNA
cgtggaagaagtggtgt

SEQ ID NO: 159214 - DNA, 17 bp, synthetic construct
  source 1..17: mol_type = other DNA
ccgtggaagaagtggtg

SEQ ID NO: 159215 - DNA, 17 bp, synthetic construct
  source 1..17: mol_type = other DNA
tccgtggaagaagtggt

SEQ ID NO: 159216 - DNA, 17 bp, synthetic construct
  source 1..17: mol_type = other DNA
ctccgtggaagaagtgg

SEQ ID NO: 159217 - DNA, 17 bp, synthetic construct
  source 1..17: mol_type = other DNA
cctccgtggaagaagtg

SEQ ID NO: 159218 - DNA, 17 bp, synthetic construct
  source 1..17: mol_type = other DNA
tcctccgtggaagaagt

SEQ ID NO: 159219 - DNA, 17 bp, synthetic construct
  source 1..17: mol_type = other DNA
ctcctccgtggaagaag

SEQ ID NO: 159220 - DNA, 17 bp, synthetic construct
  source 1..17: mol_type = other DNA
cctcctccgtggaagaa

SEQ ID NO: 159221 - DNA, 17 bp, synthetic construct
  source 1..17: mol_type = other DNA
ccctcctccgtggaaga

SEQ ID NO: 159222 - DNA, 17 bp, synthetic construct
  source 1..17: mol_type = other DNA
cccctcctccgtggaag

SEQ ID NO: 159223 - DNA, 17 bp, synthetic construct
  source 1..17: mol_type = other DNA
acccctcctccgtggaa

SEQ ID NO: 159224 - DNA, 17 bp, synthetic construct
  source 1..17: mol_type = other DNA
gacccctcctccgtgga

SEQ ID NO: 159225 - DNA, 17 bp, synthetic construct
  source 1..17: mol_type = other DNA
tgacccctcctccgtgg

SEQ ID NO: 159226 - DNA, 17 bp, synthetic construct
  source 1..17: mol_type = other DNA
ctgacccctcctccgtg

SEQ ID NO: 159227 - DNA, 17 bp, synthetic construct
  source 1..17: mol_type = other DNA
cctgacccctcctccgt

SEQ ID NO: 159228 - DNA, 17 bp, synthetic construct
  source 1..17: mol_type = other DNA
gcctgacccctcctccg

SEQ ID NO: 159229 - DNA, 17 bp, synthetic construct
  source 1..17: mol_type = other DNA
agcctgacccctcctcc

SEQ ID NO: 159230 - DNA, 17 bp, synthetic construct
  source 1..17: mol_type = other DNA
cagcctgacccctcctc

SEQ ID NO: 159231 - DNA, 17 bp, synthetic construct
  source 1..17: mol_type = other DNA
ccagcctgacccctcct

SEQ ID NO: 159232 - DNA, 17 bp, synthetic construct
  source 1..17: mol_type = other DNA
cccagcctgacccctcc

SEQ ID NO: 159233 - DNA, 17 bp, synthetic construct
  source 1..17: mol_type = other DNA
gcccagcctgacccctc

SEQ ID NO: 159234 - DNA, 17 bp, synthetic construct
  source 1..17: mol_type = other DNA
ggcccagcctgacccct

SEQ ID NO: 159235 - DNA, 17 bp, synthetic construct
  source 1..17: mol_type = other DNA
aggcccagcctgacccc

SEQ ID NO: 159236 - DNA, 17 bp, synthetic construct
  source 1..17: mol_type = other DNA
caggcccagcctgaccc

SEQ ID NO: 159237 - DNA, 17 bp, synthetic construct
  source 1..17: mol_type = other DNA
ccaggcccagcctgacc

SEQ ID NO: 159238 - DNA, 17 bp, synthetic construct
  source 1..17: mol_type = other DNA
cccaggcccagcctgac

SEQ ID NO: 159239 - DNA, 17 bp, synthetic construct
  source 1..17: mol_type = other DNA
ccccaggcccagcctga

SEQ ID NO: 159240 - DNA, 17 bp, synthetic construct
  source 1..17: mol_type = other DNA
tccccaggcccagcctg

SEQ ID NO: 159241 - DNA, 17 bp, synthetic construct
  source 1..17: mol_type = other DNA
ctccccaggcccagcct

SEQ ID NO: 159242 - DNA, 17 bp, synthetic construct
  source 1..17: mol_type = other DNA
cctccccaggcccagcc

SEQ ID NO: 159243 - DNA, 17 bp, synthetic construct
  source 1..17: mol_type = other DNA
gcctccccaggcccagc

SEQ ID NO: 159244 - DNA, 17 bp, synthetic construct
  source 1..17: mol_type = other DNA
agcctccccaggcccag

SEQ ID NO: 159245 - DNA, 17 bp, synthetic construct
  source 1..17: mol_type = other DNA
cagcctccccaggccca

SEQ ID NO: 159246 - DNA, 17 bp, synthetic construct
  source 1..17: mol_type = other DNA
tcagcctccccaggccc

SEQ ID NO: 159247 - DNA, 17 bp, synthetic construct
  source 1..17: mol_type = other DNA
ctcagcctccccaggcc

SEQ ID NO: 159248 - DNA, 17 bp, synthetic construct
  source 1..17: mol_type = other DNA
cctcagcctccccaggc

SEQ ID NO: 159249 - DNA, 17 bp, synthetic construct
  source 1..17: mol_type = other DNA
gcctcagcctccccagg

SEQ ID NO: 159250 - DNA, 17 bp, synthetic construct
  source 1..17: mol_type = other DNA
ggcctcagcctccccag

SEQ ID NO: 159251 - DNA, 17 bp, synthetic construct
  source 1..17: mol_type = other DNA
gggcctcagcctcccca

SEQ ID NO: 159252 - DNA, 17 bp, synthetic construct
  source 1..17: mol_type = other DNA
ggggcctcagcctcccc

SEQ ID NO: 159253 - DNA, 17 bp, synthetic construct
  source 1..17: mol_type = other DNA
cggggcctcagcctccc

SEQ ID NO: 159254 - DNA, 17 bp, synthetic construct
  source 1..17: mol_type = other DNA
acggggcctcagcctcc

SEQ ID NO: 159255 - DNA, 17 bp, synthetic construct
  source 1..17: mol_type = other DNA
cacggggcctcagcctc

SEQ ID NO: 159256 - DNA, 17 bp, synthetic construct
  source 1..17: mol_type = other DNA
gcacggggcctcagcct

SEQ ID NO: 159257 - DNA, 17 bp, synthetic construct
  source 1..17: mol_type = other DNA
agcacggggcctcagcc

SEQ ID NO: 159258 - DNA, 17 bp, synthetic construct
  source 1..17: mol_type = other DNA
cagcacggggcctcagc

SEQ ID NO: 159259 - DNA, 17 bp, synthetic construct
  source 1..17: mol_type = other DNA
tcagcacggggcctcag

SEQ ID NO: 159260 - DNA, 17 bp, synthetic construct
  source 1..17: mol_type = other DNA
gtcagcacggggcctca

SEQ ID NO: 159261 - DNA, 17 bp, synthetic construct
  source 1..17: mol_type = other DNA
ggtcagcacggggcctc

SEQ ID NO: 159262 - DNA, 17 bp, synthetic construct
  source 1..17: mol_type = other DNA
aggtcagcacggggcct

SEQ ID NO: 159263 - DNA, 17 bp, synthetic construct
  source 1..17: mol_type = other DNA
caggtcagcacggggcc

SEQ ID NO: 159264 - DNA, 17 bp, synthetic construct
  source 1..17: mol_type = other DNA
gcaggtcagcacggggc

SEQ ID NO: 159265 - DNA, 17 bp, synthetic construct
  source 1..17: mol_type = other DNA
tgcaggtcagcacgggg

SEQ ID NO: 159266 - DNA, 17 bp, synthetic construct
  source 1..17: mol_type = other DNA
gtgcaggtcagcacggg

SEQ ID NO: 159267 - DNA, 17 bp, synthetic construct
  source 1..17: mol_type = other DNA
tgtgcaggtcagcacgg

SEQ ID NO: 159268 - DNA, 17 bp, synthetic construct
  source 1..17: mol_type = other DNA
ctgtgcaggtcagcacg

SEQ ID NO: 159269 - DNA, 17 bp, synthetic construct
  source 1..17: mol_type = other DNA
cctgtgcaggtcagcac

SEQ ID NO: 159270 - DNA, 17 bp, synthetic construct
  source 1..17: mol_type = other DNA
gcctgtgcaggtcagca

SEQ ID NO: 159271 - DNA, 17 bp, synthetic construct
  source 1..17: mol_type = other DNA
ggcctgtgcaggtcagc

SEQ ID NO: 159272 - DNA, 17 bp, synthetic construct
  source 1..17: mol_type = other DNA
aggcctgtgcaggtcag

SEQ ID NO: 159273 - DNA, 17 bp, synthetic construct
  source 1..17: mol_type = other DNA
caggcctgtgcaggtca

SEQ ID NO: 159274 - DNA, 17 bp, synthetic construct
  source 1..17: mol_type = other DNA
ccaggcctgtgcaggtc

SEQ ID NO: 159275 - DNA, 17 bp, synthetic construct
  source 1..17: mol_type = other DNA
cccaggcctgtgcaggt

SEQ ID NO: 159276 - DNA, 17 bp, synthetic construct
  source 1..17: mol_type = other DNA
acccaggcctgtgcagg

SEQ ID NO: 159277 - DNA, 17 bp, synthetic construct
  source 1..17: mol_type = other DNA
cacccaggcctgtgcag

SEQ ID NO: 159278 - DNA, 17 bp, synthetic construct
  source 1..17: mol_type = other DNA
gcacccaggcctgtgca

SEQ ID NO: 159279 - DNA, 17 bp, synthetic construct
  source 1..17: mol_type = other DNA
ggcacccaggcctgtgc

SEQ ID NO: 159280 - DNA, 17 bp, synthetic construct
  source 1..17: mol_type = other DNA
cggcacccaggcctgtg

SEQ ID NO: 159281 - DNA, 17 bp, synthetic construct
  source 1..17: mol_type = other DNA
ccggcacccaggcctgt

SEQ ID NO: 159282 - DNA, 17 bp, synthetic construct
  source 1..17: mol_type = other DNA
cccggcacccaggcctg

SEQ ID NO: 159283 - DNA, 17 bp, synthetic construct
  source 1..17: mol_type = other DNA
acccggcacccaggcct

SEQ ID NO: 159284 - DNA, 17 bp, synthetic construct
  source 1..17: mol_type = other DNA
gacccggcacccaggcc

SEQ ID NO: 159285 - DNA, 17 bp, synthetic construct
  source 1..17: mol_type = other DNA
agacccggcacccaggc

SEQ ID NO: 159286 - DNA, 17 bp, synthetic construct
  source 1..17: mol_type = other DNA
gagacccggcacccagg

SEQ ID NO: 159287 - DNA, 17 bp, synthetic construct
  source 1..17: mol_type = other DNA
tgagacccggcacccag

SEQ ID NO: 159288 - DNA, 17 bp, synthetic construct
  source 1..17: mol_type = other DNA
ctgagacccggcaccca

SEQ ID NO: 159289 - DNA, 17 bp, synthetic construct
  source 1..17: mol_type = other DNA
cctgagacccggcaccc

SEQ ID NO: 159290 - DNA, 17 bp, synthetic construct
  source 1..17: mol_type = other DNA
tcctgagacccggcacc

SEQ ID NO: 159291 - DNA, 17 bp, synthetic construct
  source 1..17: mol_type = other DNA
ttcctgagacccggcac

SEQ ID NO: 159292 - DNA, 17 bp, synthetic construct
  source 1..17: mol_type = other DNA
cttcctgagacccggca

SEQ ID NO: 159293 - DNA, 17 bp, synthetic construct
  source 1..17: mol_type = other DNA
ccttcctgagacccggc

SEQ ID NO: 159294 - DNA, 17 bp, synthetic construct
  source 1..17: mol_type = other DNA
gccttcctgagacccgg

SEQ ID NO: 159295 - DNA, 17 bp, synthetic construct
  source 1..17: mol_type = other DNA
ggccttcctgagacccg

SEQ ID NO: 159296 - DNA, 17 bp, synthetic construct
  source 1..17: mol_type = other DNA
cggccttcctgagaccc

SEQ ID NO: 159297 - DNA, 17 bp, synthetic construct
  source 1..17: mol_type = other DNA
ccggccttcctgagacc

SEQ ID NO: 159298 - DNA, 17 bp, synthetic construct
  source 1..17: mol_type = other DNA
cccggccttcctgagac

SEQ ID NO: 159299 - DNA, 17 bp, synthetic construct
  source 1..17: mol_type = other DNA
tcccggccttcctgaga

SEQ ID NO: 159300 - DNA, 17 bp, synthetic construct
  source 1..17: mol_type = other DNA
ctcccggccttcctgag

SEQ ID NO: 159301 - DNA, 17 bp, synthetic construct
  source 1..17: mol_type = other DNA
tctcccggccttcctga

SEQ ID NO: 159302 - DNA, 17 bp, synthetic construct
  source 1..17: mol_type = other DNA
ctctcccggccttcctg

SEQ ID NO: 159303 - DNA, 17 bp, synthetic construct
  source 1..17: mol_type = other DNA
gctctcccggccttcct

SEQ ID NO: 159304 - DNA, 17 bp, synthetic construct
  source 1..17: mol_type = other DNA
tgctctcccggccttcc

SEQ ID NO: 159305 - DNA, 17 bp, synthetic construct
  source 1..17: mol_type = other DNA
ctgctctcccggccttc

SEQ ID NO: 159306 - DNA, 17 bp, synthetic construct
  source 1..17: mol_type = other DNA
cctgctctcccggcctt

SEQ ID NO: 159307 - DNA, 17 bp, synthetic construct
  source 1..17: mol_type = other DNA
gcctgctctcccggcct

SEQ ID NO: 159308 - DNA, 17 bp, synthetic construct
  source 1..17: mol_type = other DNA
ggcctgctctcccggcc

SEQ ID NO: 159309 - DNA, 17 bp, synthetic construct
  source 1..17: mol_type = other DNA
gggcctgctctcccggc

SEQ ID NO: 159310 - DNA, 17 bp, synthetic construct
  source 1..17: mol_type = other DNA
ggggcctgctctcccgg

SEQ ID NO: 159311 - DNA, 17 bp, synthetic construct
  source 1..17: mol_type = other DNA
aggggcctgctctcccg

SEQ ID NO: 159312 - DNA, 17 bp, synthetic construct
  source 1..17: mol_type = other DNA
caggggcctgctctccc

SEQ ID NO: 159313 - DNA, 17 bp, synthetic construct
  source 1..17: mol_type = other DNA
acaggggcctgctctcc

SEQ ID NO: 159314 - DNA, 17 bp, synthetic construct
  source 1..17: mol_type = other DNA
cacaggggcctgctctc

SEQ ID NO: 159315 - DNA, 17 bp, synthetic construct
  source 1..17: mol_type = other DNA
tcacaggggcctgctct

SEQ ID NO: 159316 - DNA, 17 bp, synthetic construct
  source 1..17: mol_type = other DNA
ctcacaggggcctgctc

SEQ ID NO: 159317 - DNA, 17 bp, synthetic construct
  source 1..17: mol_type = other DNA
gctcacaggggcctgct

SEQ ID NO: 159318 - DNA, 17 bp, synthetic construct
  source 1..17: mol_type = other DNA
tgctcacaggggcctgc

SEQ ID NO: 159319 - DNA, 17 bp, synthetic construct
  source 1..17: mol_type = other DNA
ctgctcacaggggcctg

SEQ ID NO: 159320 - DNA, 17 bp, synthetic construct
  source 1..17: mol_type = other DNA
cctgctcacaggggcct

SEQ ID NO: 159321 - DNA, 17 bp, synthetic construct
  source 1..17: mol_type = other DNA
gcctgctcacaggggcc

SEQ ID NO: 159322 - DNA, 17 bp, synthetic construct
  source 1..17: mol_type = other DNA
tgcctgctcacaggggc

SEQ ID NO: 159323 - DNA, 17 bp, synthetic construct
  source 1..17: mol_type = other DNA
gtgcctgctcacagggg

SEQ ID NO: 159324 - DNA, 17 bp, synthetic construct
  source 1..17: mol_type = other DNA
ggtgcctgctcacaggg

SEQ ID NO: 159325 - DNA, 17 bp, synthetic construct
  source 1..17: mol_type = other DNA
tggtgcctgctcacagg

SEQ ID NO: 159326 - DNA, 17 bp, synthetic construct
  source 1..17: mol_type = other DNA
atggtgcctgctcacag

SEQ ID NO: 159327 - DNA, 17 bp, synthetic construct
  source 1..17: mol_type = other DNA
aatggtgcctgctcaca

SEQ ID NO: 159328 - DNA, 17 bp, synthetic construct
  source 1..17: mol_type = other DNA
caatggtgcctgctcac

SEQ ID NO: 159329 - DNA, 17 bp, synthetic construct
  source 1..17: mol_type = other DNA
acaatggtgcctgctca

SEQ ID NO: 159330 - DNA, 17 bp, synthetic construct
  source 1..17: mol_type = other DNA
cacaatggtgcctgctc

SEQ ID NO: 159331 - DNA, 17 bp, synthetic construct
  source 1..17: mol_type = other DNA
ccacaatggtgcctgct

SEQ ID NO: 159332 - DNA, 17 bp, synthetic construct
  source 1..17: mol_type = other DNA
gccacaatggtgcctgc

SEQ ID NO: 159333 - DNA, 17 bp, synthetic construct
  source 1..17: mol_type = other DNA
ggccacaatggtgcctg

SEQ ID NO: 159334 - DNA, 17 bp, synthetic construct
  source 1..17: mol_type = other DNA
gggccacaatggtgcct

SEQ ID NO: 159335 - DNA, 17 bp, synthetic construct
  source 1..17: mol_type = other DNA
ggggccacaatggtgcc

SEQ ID NO: 159336 - DNA, 17 bp, synthetic construct
  source 1..17: mol_type = other DNA
aggggccacaatggtgc

SEQ ID NO: 159337 - DNA, 17 bp, synthetic construct
  source 1..17: mol_type = other DNA
aaggggccacaatggtg

SEQ ID NO: 159338 - DNA, 17 bp, synthetic construct
  source 1..17: mol_type = other DNA
caaggggccacaatggt

SEQ ID NO: 159339 - DNA, 17 bp, synthetic construct
  source 1..17: mol_type = other DNA
gcaaggggccacaatgg

SEQ ID NO: 159340 - DNA, 17 bp, synthetic construct
  source 1..17: mol_type = other DNA
tgcaaggggccacaatg

SEQ ID NO: 159341 - DNA, 17 bp, synthetic construct
  source 1..17: mol_type = other DNA
ctgcaaggggccacaat

SEQ ID NO: 159342 - DNA, 17 bp, synthetic construct
  source 1..17: mol_type = other DNA
gctgcaaggggccacaa

SEQ ID NO: 159343 - DNA, 17 bp, synthetic construct
  source 1..17: mol_type = other DNA
tgctgcaaggggccaca

SEQ ID NO: 159344 - DNA, 17 bp, synthetic construct
  source 1..17: mol_type = other DNA
gtgctgcaaggggccac

SEQ ID NO: 159345 - DNA, 17 bp, synthetic construct
  source 1..17: mol_type = other DNA
ggtgctgcaaggggcca

SEQ ID NO: 159346 - DNA, 17 bp, synthetic construct
  source 1..17: mol_type = other DNA
aggtgctgcaaggggcc

SEQ ID NO: 159347 - DNA, 17 bp, synthetic construct
  source 1..17: mol_type = other DNA
caggtgctgcaaggggc

SEQ ID NO: 159348 - DNA, 17 bp, synthetic construct
  source 1..17: mol_type = other DNA
gcaggtgctgcaagggg

SEQ ID NO: 159349 - DNA, 17 bp, synthetic construct
  source 1..17: mol_type = other DNA
tgcaggtgctgcaaggg

SEQ ID NO: 159350 - DNA, 17 bp, synthetic construct
  source 1..17: mol_type = other DNA
ctgcaggtgctgcaagg

SEQ ID NO: 159351 - DNA, 17 bp, synthetic construct
  source 1..17: mol_type = other DNA
cctgcaggtgctgcaag

SEQ ID NO: 159352 - DNA, 17 bp, synthetic construct
  source 1..17: mol_type = other DNA
tcctgcaggtgctgcaa

SEQ ID NO: 159353 - DNA, 17 bp, synthetic construct
  source 1..17: mol_type = other DNA
ttcctgcaggtgctgca

SEQ ID NO: 159354 - DNA, 17 bp, synthetic construct
  source 1..17: mol_type = other DNA
gttcctgcaggtgctgc

SEQ ID NO: 159355 - DNA, 17 bp, synthetic construct
  source 1..17: mol_type = other DNA
ggttcctgcaggtgctg

SEQ ID NO: 159356 - DNA, 17 bp, synthetic construct
  source 1..17: mol_type = other DNA
cggttcctgcaggtgct

SEQ ID NO: 159357 - DNA, 17 bp, synthetic construct
  source 1..17: mol_type = other DNA
ccggttcctgcaggtgc

SEQ ID NO: 159358 - DNA, 17 bp, synthetic construct
  source 1..17: mol_type = other DNA
tccggttcctgcaggtg

SEQ ID NO: 159359 - DNA, 17 bp, synthetic construct
  source 1..17: mol_type = other DNA
ctccggttcctgcaggt

SEQ ID NO: 159360 - DNA, 17 bp, synthetic construct
  source 1..17: mol_type = other DNA
cctccggttcctgcagg

SEQ ID NO: 159361 - DNA, 17 bp, synthetic construct
  source 1..17: mol_type = other DNA
acctccggttcctgcag

SEQ ID NO: 159362 - DNA, 17 bp, synthetic construct
  source 1..17: mol_type = other DNA
cacctccggttcctgca

SEQ ID NO: 159363 - DNA, 17 bp, synthetic construct
  source 1..17: mol_type = other DNA
ccacctccggttcctgc

SEQ ID NO: 159364 - DNA, 17 bp, synthetic construct
  source 1..17: mol_type = other DNA
cccacctccggttcctg

SEQ ID NO: 159365 - DNA, 17 bp, synthetic construct
  source 1..17: mol_type = other DNA
tcccacctccggttcct

SEQ ID NO: 159366 - DNA, 17 bp, synthetic construct
  source 1..17: mol_type = other DNA
ctcccacctccggttcc

SEQ ID NO: 159367 - DNA, 17 bp, synthetic construct
  source 1..17: mol_type = other DNA
actcccacctccggttc

SEQ ID NO: 159368 - DNA, 17 bp, synthetic construct
  source 1..17: mol_type = other DNA
cactcccacctccggtt

SEQ ID NO: 159369 - DNA, 17 bp, synthetic construct
  source 1..17: mol_type = other DNA
gcactcccacctccggt

SEQ ID NO: 159370 - DNA, 17 bp, synthetic construct
  source 1..17: mol_type = other DNA
tgcactcccacctccgg

SEQ ID NO: 159371 - DNA, 17 bp, synthetic construct
  source 1..17: mol_type = other DNA
ctgcactcccacctccg

SEQ ID NO: 159372 - DNA, 17 bp, synthetic construct
  source 1..17: mol_type = other DNA
gctgcactcccacctcc

SEQ ID NO: 159373 - DNA, 17 bp, synthetic construct
  source 1..17: mol_type = other DNA
ggctgcactcccacctc

SEQ ID NO: 159374 - DNA, 17 bp, synthetic construct
  source 1..17: mol_type = other DNA
tggctgcactcccacct

SEQ ID NO: 159375 - DNA, 17 bp, synthetic construct
  source 1..17: mol_type = other DNA
gtggctgcactcccacc

SEQ ID NO: 159376 - DNA, 17 bp, synthetic construct
  source 1..17: mol_type = other DNA
ggtggctgcactcccac

SEQ ID NO: 159377 - DNA, 17 bp, synthetic construct
  source 1..17: mol_type = other DNA
cggtggctgcactccca

SEQ ID NO: 159378 - DNA, 17 bp, synthetic construct
  source 1..17: mol_type = other DNA
ccggtggctgcactccc

SEQ ID NO: 159379 - DNA, 17 bp, synthetic construct
  source 1..17: mol_type = other DNA
gccggtggctgcactcc

SEQ ID NO: 159380 - DNA, 17 bp, synthetic construct
  source 1..17: mol_type = other DNA
agccggtggctgcactc

SEQ ID NO: 159381 - DNA, 17 bp, synthetic construct
  source 1..17: mol_type = other DNA
gagccggtggctgcact

SEQ ID NO: 159382 - DNA, 17 bp, synthetic construct
  source 1..17: mol_type = other DNA
agagccggtggctgcac

SEQ ID NO: 159383 - DNA, 17 bp, synthetic construct
  source 1..17: mol_type = other DNA
cagagccggtggctgca

SEQ ID NO: 159384 - DNA, 17 bp, synthetic construct
  source 1..17: mol_type = other DNA
gcagagccggtggctgc

SEQ ID NO: 159385 - DNA, 17 bp, synthetic construct
  source 1..17: mol_type = other DNA
ggcagagccggtggctg

SEQ ID NO: 159386 - DNA, 17 bp, synthetic construct
  source 1..17: mol_type = other DNA
aggcagagccggtggct

SEQ ID NO: 159387 - DNA, 17 bp, synthetic construct
  source 1..17: mol_type = other DNA
caggcagagccggtggc

SEQ ID NO: 159388 - DNA, 17 bp, synthetic construct
  source 1..17: mol_type = other DNA
ccaggcagagccggtgg

SEQ ID NO: 159389 - DNA, 17 bp, synthetic construct
  source 1..17: mol_type = other DNA
cccaggcagagccggtg

SEQ ID NO: 159390 - DNA, 17 bp, synthetic construct
  source 1..17: mol_type = other DNA
gcccaggcagagccggt

SEQ ID NO: 159391 - DNA, 17 bp, synthetic construct
  source 1..17: mol_type = other DNA
tgcccaggcagagccgg

SEQ ID NO: 159392 - DNA, 17 bp, synthetic construct
  source 1..17: mol_type = other DNA
gtgcccaggcagagccg

SEQ ID NO: 159393 - DNA, 17 bp, synthetic construct
  source 1..17: mol_type = other DNA
ggtgcccaggcagagcc

SEQ ID NO: 159394 - DNA, 17 bp, synthetic construct
  source 1..17: mol_type = other DNA
aggtgcccaggcagagc

SEQ ID NO: 159395 - DNA, 17 bp, synthetic construct
  source 1..17: mol_type = other DNA
caggtgcccaggcagag

SEQ ID NO: 159396 - DNA, 17 bp, synthetic construct
  source 1..17: mol_type = other DNA
gcaggtgcccaggcaga

SEQ ID NO: 159397 - DNA, 17 bp, synthetic construct
  source 1..17: mol_type = other DNA
cgcaggtgcccaggcag

SEQ ID NO: 159398 - DNA, 17 bp, synthetic construct
  source 1..17: mol_type = other DNA
acgcaggtgcccaggca

SEQ ID NO: 159399 - DNA, 17 bp, synthetic construct
  source 1..17: mol_type = other DNA
cacgcaggtgcccaggc

SEQ ID NO: 159400 - DNA, 17 bp, synthetic construct
  source 1..17: mol_type = other DNA
ccacgcaggtgcccagg

SEQ ID NO: 159401 - DNA, 17 bp, synthetic construct
  source 1..17: mol_type = other DNA
gccacgcaggtgcccag

SEQ ID NO: 159402 - DNA, 17 bp, synthetic construct
  source 1..17: mol_type = other DNA
ggccacgcaggtgccca

SEQ ID NO: 159403 - DNA, 17 bp, synthetic construct
  source 1..17: mol_type = other DNA
aggccacgcaggtgccc

SEQ ID NO: 159404 - DNA, 17 bp, synthetic construct
  source 1..17: mol_type = other DNA
taggccacgcaggtgcc

SEQ ID NO: 159405 - DNA, 17 bp, synthetic construct
  source 1..17: mol_type = other DNA
gtaggccacgcaggtgc

SEQ ID NO: 159406 - DNA, 17 bp, synthetic construct
  source 1..17: mol_type = other DNA
cgtaggccacgcaggtg

SEQ ID NO: 159407 - DNA, 17 bp, synthetic construct
  source 1..17: mol_type = other DNA
ccgtaggccacgcaggt

SEQ ID NO: 159408 - DNA, 17 bp, synthetic construct
  source 1..17: mol_type = other DNA
cccgtaggccacgcagg

SEQ ID NO: 159409 - DNA, 17 bp, synthetic construct
  source 1..17: mol_type = other DNA
ccccgtaggccacgcag

SEQ ID NO: 159410 - DNA, 17 bp, synthetic construct
  source 1..17: mol_type = other DNA
tccccgtaggccacgca

SEQ ID NO: 159411 - DNA, 17 bp, synthetic construct
  source 1..17: mol_type = other DNA
atccccgtaggccacgc

SEQ ID NO: 159412 - DNA, 17 bp, synthetic construct
  source 1..17: mol_type = other DNA
catccccgtaggccacg

SEQ ID NO: 159413 - DNA, 17 bp, synthetic construct
  source 1..17: mol_type = other DNA
ccatccccgtaggccac

SEQ ID NO: 159414 - DNA, 17 bp, synthetic construct
  source 1..17: mol_type = other DNA
gccatccccgtaggcca

SEQ ID NO: 159415 - DNA, 17 bp, synthetic construct
  source 1..17: mol_type = other DNA
ggccatccccgtaggcc

SEQ ID NO: 159416 - DNA, 17 bp, synthetic construct
  source 1..17: mol_type = other DNA
tggccatccccgtaggc

SEQ ID NO: 159417 - DNA, 17 bp, synthetic construct
  source 1..17: mol_type = other DNA
gtggccatccccgtagg

SEQ ID NO: 159418 - DNA, 17 bp, synthetic construct
  source 1..17: mol_type = other DNA
agtggccatccccgtag

SEQ ID NO: 159419 - DNA, 17 bp, synthetic construct
  source 1..17: mol_type = other DNA
aagtggccatccccgta

SEQ ID NO: 159420 - DNA, 17 bp, synthetic construct
  source 1..17: mol_type = other DNA
gaagtggccatccccgt

SEQ ID NO: 159421 - DNA, 17 bp, synthetic construct
  source 1..17: mol_type = other DNA
tgaagtggccatccccg

SEQ ID NO: 159422 - DNA, 17 bp, synthetic construct
  source 1..17: mol_type = other DNA
atgaagtggccatcccc

SEQ ID NO: 159423 - DNA, 17 bp, synthetic construct
  source 1..17: mol_type = other DNA
gatgaagtggccatccc

SEQ ID NO: 159424 - DNA, 17 bp, synthetic construct
  source 1..17: mol_type = other DNA
tgatgaagtggccatcc

SEQ ID NO: 159425 - DNA, 17 bp, synthetic construct
  source 1..17: mol_type = other DNA
gtgatgaagtggccatc

SEQ ID NO: 159426 - DNA, 17 bp, synthetic construct
  source 1..17: mol_type = other DNA
ggtgatgaagtggccat

SEQ ID NO: 159427 - DNA, 17 bp, synthetic construct
  source 1..17: mol_type = other DNA
aggtgatgaagtggcca

SEQ ID NO: 159428 - DNA, 17 bp, synthetic construct
  source 1..17: mol_type = other DNA
aaggtgatgaagtggcc

SEQ ID NO: 159429 - DNA, 17 bp, synthetic construct
  source 1..17: mol_type = other DNA
aaaggtgatgaagtggc

SEQ ID NO: 159430 - DNA, 17 bp, synthetic construct
  source 1..17: mol_type = other DNA
caaaggtgatgaagtgg

SEQ ID NO: 159431 - DNA, 17 bp, synthetic construct
  source 1..17: mol_type = other DNA
tcaaaggtgatgaagtg

SEQ ID NO: 159432 - DNA, 17 bp, synthetic construct
  source 1..17: mol_type = other DNA
atcaaaggtgatgaagt

SEQ ID NO: 159433 - DNA, 17 bp, synthetic construct
  source 1..17: mol_type = other DNA
catcaaaggtgatgaag

SEQ ID NO: 159434 - DNA, 17 bp, synthetic construct
  source 1..17: mol_type = other DNA
ccatcaaaggtgatgaa

SEQ ID NO: 159435 - DNA, 17 bp, synthetic construct
  source 1..17: mol_type = other DNA
gccatcaaaggtgatga

SEQ ID NO: 159436 - DNA, 17 bp, synthetic construct
  source 1..17: mol_type = other DNA
cgccatcaaaggtgatg

SEQ ID NO: 159437 - DNA, 17 bp, synthetic construct
  source 1..17: mol_type = other DNA
tcgccatcaaaggtgat

SEQ ID NO: 159438 - DNA, 17 bp, synthetic construct
  source 1..17: mol_type = other DNA
atcgccatcaaaggtga

SEQ ID NO: 159439 - DNA, 17 bp, synthetic construct
  source 1..17: mol_type = other DNA
gatcgccatcaaaggtg

SEQ ID NO: 159440 - DNA, 17 bp, synthetic construct
  source 1..17: mol_type = other DNA
cgatcgccatcaaaggt

SEQ ID NO: 159441 - DNA, 17 bp, synthetic construct
  source 1..17: mol_type = other DNA
gcgatcgccatcaaagg

SEQ ID NO: 159442 - DNA, 17 bp, synthetic construct
  source 1..17: mol_type = other DNA
agcgatcgccatcaaag

SEQ ID NO: 159443 - DNA, 17 bp, synthetic construct
  source 1..17: mol_type = other DNA
tagcgatcgccatcaaa

SEQ ID NO: 159444 - DNA, 17 bp, synthetic construct
  source 1..17: mol_type = other DNA
gtagcgatcgccatcaa

SEQ ID NO: 159445 - DNA, 17 bp, synthetic construct
  source 1..17: mol_type = other DNA
tgtagcgatcgccatca

SEQ ID NO: 159446 - DNA, 17 bp, synthetic construct
  source 1..17: mol_type = other DNA
ctgtagcgatcgccatc

SEQ ID NO: 159447 - DNA, 17 bp, synthetic construct
  source 1..17: mol_type = other DNA
gctgtagcgatcgccat

SEQ ID NO: 159448 - DNA, 17 bp, synthetic construct
  source 1..17: mol_type = other DNA
agctgtagcgatcgcca

SEQ ID NO: 159449 - DNA, 17 bp, synthetic construct
  source 1..17: mol_type = other DNA
aagctgtagcgatcgcc

SEQ ID NO: 159450 - DNA, 17 bp, synthetic construct
  source 1..17: mol_type = other DNA
aaagctgtagcgatcgc

SEQ ID NO: 159451 - DNA, 17 bp, synthetic construct
  source 1..17: mol_type = other DNA
caaagctgtagcgatcg

SEQ ID NO: 159452 - DNA, 17 bp, synthetic construct
  source 1..17: mol_type = other DNA
tcaaagctgtagcgatc

SEQ ID NO: 159453 - DNA, 17 bp, synthetic construct
  source 1..17: mol_type = other DNA
ttcaaagctgtagcgat

SEQ ID NO: 159454 - DNA, 17 bp, synthetic construct
  source 1..17: mol_type = other DNA
cttcaaagctgtagcga

SEQ ID NO: 159455 - DNA, 17 bp, synthetic construct
  source 1..17: mol_type = other DNA
ccttcaaagctgtagcg

SEQ ID NO: 159456 - DNA, 17 bp, synthetic construct
  source 1..17: mol_type = other DNA
gccttcaaagctgtagc

SEQ ID NO: 159457 - DNA, 17 bp, synthetic construct
  source 1..17: mol_type = other DNA
tgccttcaaagctgtag

SEQ ID NO: 159458 - DNA, 17 bp, synthetic construct
  source 1..17: mol_type = other DNA
ctgccttcaaagctgta

SEQ ID NO: 159459 - DNA, 17 bp, synthetic construct
  source 1..17: mol_type = other DNA
gctgccttcaaagctgt

SEQ ID NO: 159460 - DNA, 17 bp, synthetic construct
  source 1..17: mol_type = other DNA
agctgccttcaaagctg

SEQ ID NO: 159461 - DNA, 17 bp, synthetic construct
  source 1..17: mol_type = other DNA
cagctgccttcaaagct

SEQ ID NO: 159462 - DNA, 17 bp, synthetic construct
  source 1..17: mol_type = other DNA
gcagctgccttcaaagc

SEQ ID NO: 159463 - DNA, 17 bp, synthetic construct
  source 1..17: mol_type = other DNA
cgcagctgccttcaaag

SEQ ID NO: 159464 - DNA, 17 bp, synthetic construct
  source 1..17: mol_type = other DNA
tcgcagctgccttcaaa

SEQ ID NO: 159465 - DNA, 17 bp, synthetic construct
  source 1..17: mol_type = other DNA
ctcgcagctgccttcaa

SEQ ID NO: 159466 - DNA, 17 bp, synthetic construct
  source 1..17: mol_type = other DNA
actcgcagctgccttca

SEQ ID NO: 159467 - DNA, 17 bp, synthetic construct
  source 1..17: mol_type = other DNA
tactcgcagctgccttc

SEQ ID NO: 159468 - DNA, 17 bp, synthetic construct
  source 1..17: mol_type = other DNA
gtactcgcagctgcctt

SEQ ID NO: 159469 - DNA, 17 bp, synthetic construct
  source 1..17: mol_type = other DNA
tgtactcgcagctgcct

SEQ ID NO: 159470 - DNA, 17 bp, synthetic construct
  source 1..17: mol_type = other DNA
atgtactcgcagctgcc

SEQ ID NO: 159471 - DNA, 17 bp, synthetic construct
  source 1..17: mol_type = other DNA
gatgtactcgcagctgc

SEQ ID NO: 159472 - DNA, 17 bp, synthetic construct
  source 1..17: mol_type = other DNA
agatgtactcgcagctg

SEQ ID NO: 159473 - DNA, 17 bp, synthetic construct
  source 1..17: mol_type = other DNA
aagatgtactcgcagct

SEQ ID NO: 159474 - DNA, 17 bp, synthetic construct
  source 1..17: mol_type = other DNA
caagatgtactcgcagc

SEQ ID NO: 159475 - DNA, 17 bp, synthetic construct
  source 1..17: mol_type = other DNA
ccaagatgtactcgcag

SEQ ID NO: 159476 - DNA, 17 bp, synthetic construct
  source 1..17: mol_type = other DNA
gccaagatgtactcgca

SEQ ID NO: 159477 - DNA, 17 bp, synthetic construct
  source 1..17: mol_type = other DNA
ggccaagatgtactcgc

SEQ ID NO: 159478 - DNA, 17 bp, synthetic construct
  source 1..17: mol_type = other DNA
gggccaagatgtactcg

SEQ ID NO: 159479 - DNA, 17 bp, synthetic construct
  source 1..17: mol_type = other DNA
tgggccaagatgtactc

SEQ ID NO: 159480 - DNA, 17 bp, synthetic construct
  source 1..17: mol_type = other DNA
ctgggccaagatgtact

SEQ ID NO: 159481 - DNA, 17 bp, synthetic construct
  source 1..17: mol_type = other DNA
cctgggccaagatgtac

SEQ ID NO: 159482 - DNA, 17 bp, synthetic construct
  source 1..17: mol_type = other DNA
acctgggccaagatgta

SEQ ID NO: 159483 - DNA, 17 bp, synthetic construct
  source 1..17: mol_type = other DNA
tacctgggccaagatgt

SEQ ID NO: 159484 - DNA, 17 bp, synthetic construct
  source 1..17: mol_type = other DNA
gtacctgggccaagatg

SEQ ID NO: 159485 - DNA, 17 bp, synthetic construct
  source 1..17: mol_type = other DNA
cgtacctgggccaagat

SEQ ID NO: 159486 - DNA, 17 bp, synthetic construct
  source 1..17: mol_type = other DNA
gcgtacctgggccaaga

SEQ ID NO: 159487 - DNA, 17 bp, synthetic construct
  source 1..17: mol_type = other DNA
ggcgtacctgggccaag

SEQ ID NO: 159488 - DNA, 17 bp, synthetic construct
  source 1..17: mol_type = other DNA
cggcgtacctgggccaa

SEQ ID NO: 159489 - DNA, 17 bp, synthetic construct
  source 1..17: mol_type = other DNA
gcggcgtacctgggcca

SEQ ID NO: 159490 - DNA, 17 bp, synthetic construct
  source 1..17: mol_type = other DNA
ggcggcgtacctgggcc

SEQ ID NO: 159491 - DNA, 17 bp, synthetic construct
  source 1..17: mol_type = other DNA
gggcggcgtacctgggc

SEQ ID NO: 159492 - DNA, 17 bp, synthetic construct
  source 1..17: mol_type = other DNA
ggggcggcgtacctggg

SEQ ID NO: 159493 - DNA, 17 bp, synthetic construct
  source 1..17: mol_type = other DNA
gggggcggcgtacctgg

SEQ ID NO: 159494 - DNA, 17 bp, synthetic construct
  source 1..17: mol_type = other DNA
agggggcggcgtacctg

SEQ ID NO: 159495 - DNA, 17 bp, synthetic construct
  source 1..17: mol_type = other DNA
gagggggcggcgtacct

SEQ ID NO: 159496 - DNA, 17 bp, synthetic construct
  source 1..17: mol_type = other DNA
cgagggggcggcgtacc

SEQ ID NO: 159497 - DNA, 17 bp, synthetic construct
  source 1..17: mol_type = other DNA
gcgagggggcggcgtac

SEQ ID NO: 159498 - DNA, 17 bp, synthetic construct
  source 1..17: mol_type = other DNA
ggcgagggggcggcgta

SEQ ID NO: 159499 - DNA, 17 bp, synthetic construct
  source 1..17: mol_type = other DNA
gggcgagggggcggcgt

SEQ ID NO: 159500 - DNA, 17 bp, synthetic construct
  source 1..17: mol_type = other DNA
tgggcgagggggcggcg

SEQ ID NO: 159501 - DNA, 17 bp, synthetic construct
  source 1..17: mol_type = other DNA
gtgggcgagggggcggc

SEQ ID NO: 159502 - DNA, 17 bp, synthetic construct
  source 1..17: mol_type = other DNA
agtgggcgagggggcgg

SEQ ID NO: 159503 - DNA, 17 bp, synthetic construct
  source 1..17: mol_type = other DNA
gagtgggcgagggggcg

SEQ ID NO: 159504 - DNA, 17 bp, synthetic construct
  source 1..17: mol_type = other DNA
ggagtgggcgagggggc

SEQ ID NO: 159505 - DNA, 17 bp, synthetic construct
  source 1..17: mol_type = other DNA
aggagtgggcgaggggg

SEQ ID NO: 159506 - DNA, 17 bp, synthetic construct
  source 1..17: mol_type = other DNA
caggagtgggcgagggg

SEQ ID NO: 159507 - DNA, 17 bp, synthetic construct
  source 1..17: mol_type = other DNA
gcaggagtgggcgaggg

SEQ ID NO: 159508 - DNA, 17 bp, synthetic construct
  source 1..17: mol_type = other DNA
tgcaggagtgggcgagg

SEQ ID NO: 159509 - DNA, 17 bp, synthetic construct
  source 1..17: mol_type = other DNA
ctgcaggagtgggcgag

SEQ ID NO: 159510 - DNA, 17 bp, synthetic construct
  source 1..17: mol_type = other DNA
cctgcaggagtgggcga

SEQ ID NO: 159511 - DNA, 17 bp, synthetic construct
  source 1..17: mol_type = other DNA
gcctgcaggagtgggcg

SEQ ID NO: 159512 - DNA, 17 bp, synthetic construct
  source 1..17: mol_type = other DNA
ggcctgcaggagtgggc

SEQ ID NO: 159513 - DNA, 17 bp, synthetic construct
  source 1..17: mol_type = other DNA
cggcctgcaggagtggg

SEQ ID NO: 159514 - DNA, 17 bp, synthetic construct
  source 1..17: mol_type = other DNA
ccggcctgcaggagtgg

SEQ ID NO: 159515 - DNA, 17 bp, synthetic construct
  source 1..17: mol_type = other DNA
cccggcctgcaggagtg

SEQ ID NO: 159516 - DNA, 17 bp, synthetic construct
  source 1..17: mol_type = other DNA
gcccggcctgcaggagt

SEQ ID NO: 159517 - DNA, 17 bp, synthetic construct
  source 1..17: mol_type = other DNA
tgcccggcctgcaggag

SEQ ID NO: 159518 - DNA, 17 bp, synthetic construct
  source 1..17: mol_type = other DNA
gtgcccggcctgcagga

SEQ ID NO: 159519 - DNA, 17 bp, synthetic construct
  source 1..17: mol_type = other DNA
tgtgcccggcctgcagg

SEQ ID NO: 159520 - DNA, 17 bp, synthetic construct
  source 1..17: mol_type = other DNA
gtgtgcccggcctgcag

SEQ ID NO: 159521 - DNA, 17 bp, synthetic construct
  source 1..17: mol_type = other DNA
agtgtgcccggcctgca

SEQ ID NO: 159522 - DNA, 17 bp, synthetic construct
  source 1..17: mol_type = other DNA
gagtgtgcccggcctgc

SEQ ID NO: 159523 - DNA, 17 bp, synthetic construct
  source 1..17: mol_type = other DNA
ggagtgtgcccggcctg

SEQ ID NO: 159524 - DNA, 17 bp, synthetic construct
  source 1..17: mol_type = other DNA
tggagtgtgcccggcct

SEQ ID NO: 159525 - DNA, 17 bp, synthetic construct
  source 1..17: mol_type = other DNA
ctggagtgtgcccggcc

SEQ ID NO: 159526 - DNA, 17 bp, synthetic construct
  source 1..17: mol_type = other DNA
gctggagtgtgcccggc

SEQ ID NO: 159527 - DNA, 17 bp, synthetic construct
  source 1..17: mol_type = other DNA
ggctggagtgtgcccgg

SEQ ID NO: 159528 - DNA, 17 bp, synthetic construct
  source 1..17: mol_type = other DNA
gggctggagtgtgcccg

SEQ ID NO: 159529 - DNA, 17 bp, synthetic construct
  source 1..17: mol_type = other DNA
cgggctggagtgtgccc

SEQ ID NO: 159530 - DNA, 17 bp, synthetic construct
  source 1..17: mol_type = other DNA
gcgggctggagtgtgcc

SEQ ID NO: 159531 - DNA, 17 bp, synthetic construct
  source 1..17: mol_type = other DNA
cgcgggctggagtgtgc

SEQ ID NO: 159532 - DNA, 17 bp, synthetic construct
  source 1..17: mol_type = other DNA
ccgcgggctggagtgtg

SEQ ID NO: 159533 - DNA, 17 bp, synthetic construct
  source 1..17: mol_type = other DNA
gccgcgggctggagtgt

SEQ ID NO: 159534 - DNA, 17 bp, synthetic construct
  source 1..17: mol_type = other DNA
ggccgcgggctggagtg

SEQ ID NO: 159535 - DNA, 17 bp, synthetic construct
  source 1..17: mol_type = other DNA
tggccgcgggctggagt

SEQ ID NO: 159536 - DNA, 17 bp, synthetic construct
  source 1..17: mol_type = other DNA
ctggccgcgggctggag

SEQ ID NO: 159537 - DNA, 17 bp, synthetic construct
  source 1..17: mol_type = other DNA
gctggccgcgggctgga

SEQ ID NO: 159538 - DNA, 17 bp, synthetic construct
  source 1..17: mol_type = other DNA
tgctggccgcgggctgg

SEQ ID NO: 159539 - DNA, 17 bp, synthetic construct
  source 1..17: mol_type = other DNA
ctgctggccgcgggctg

SEQ ID NO: 159540 - DNA, 17 bp, synthetic construct
  source 1..17: mol_type = other DNA
gctgctggccgcgggct

SEQ ID NO: 159541 - DNA, 17 bp, synthetic construct
  source 1..17: mol_type = other DNA
agctgctggccgcgggc

SEQ ID NO: 159542 - DNA, 17 bp, synthetic construct
  source 1..17: mol_type = other DNA
aagctgctggccgcggg

SEQ ID NO: 159543 - DNA, 17 bp, synthetic construct
  source 1..17: mol_type = other DNA
caagctgctggccgcgg

SEQ ID NO: 159544 - DNA, 17 bp, synthetic construct
  source 1..17: mol_type = other DNA
acaagctgctggccgcg

SEQ ID NO: 159545 - DNA, 17 bp, synthetic construct
  source 1..17: mol_type = other DNA
gacaagctgctggccgc

SEQ ID NO: 159546 - DNA, 17 bp, synthetic construct
  source 1..17: mol_type = other DNA
agacaagctgctggccg

SEQ ID NO: 159547 - DNA, 17 bp, synthetic construct
  source 1..17: mol_type = other DNA
gagacaagctgctggcc

SEQ ID NO: 159548 - DNA, 17 bp, synthetic construct
  source 1..17: mol_type = other DNA
agagacaagctgctggc

SEQ ID NO: 159549 - DNA, 17 bp, synthetic construct
  source 1..17: mol_type = other DNA
aagagacaagctgctgg

SEQ ID NO: 159550 - DNA, 17 bp, synthetic construct
  source 1..17: mol_type = other DNA
aaagagacaagctgctg

SEQ ID NO: 159551 - DNA, 17 bp, synthetic construct
  source 1..17: mol_type = other DNA
gaaagagacaagctgct

SEQ ID NO: 159552 - DNA, 17 bp, synthetic construct
  source 1..17: mol_type = other DNA
agaaagagacaagctgc

SEQ ID NO: 159553 - DNA, 17 bp, synthetic construct
  source 1..17: mol_type = other DNA
cagaaagagacaagctg

SEQ ID NO: 159554 - DNA, 17 bp, synthetic construct
  source 1..17: mol_type = other DNA
ccagaaagagacaagct

SEQ ID NO: 159555 - DNA, 17 bp, synthetic construct
  source 1..17: mol_type = other DNA
gccagaaagagacaagc

SEQ ID NO: 159556 - DNA, 17 bp, synthetic construct
  source 1..17: mol_type = other DNA
ggccagaaagagacaag

SEQ ID NO: 159557 - DNA, 17 bp, synthetic construct
  source 1..17: mol_type = other DNA
gggccagaaagagacaa

SEQ ID NO: 159558 - DNA, 17 bp, synthetic construct
  source 1..17: mol_type = other DNA
tgggccagaaagagaca

SEQ ID NO: 159559 - DNA, 17 bp, synthetic construct
  source 1..17: mol_type = other DNA
ctgggccagaaagagac

SEQ ID NO: 159560 - DNA, 17 bp, synthetic construct
  source 1..17: mol_type = other DNA
cctgggccagaaagaga

SEQ ID NO: 159561 - DNA, 17 bp, synthetic construct
  source 1..17: mol_type = other DNA
tcctgggccagaaagag

SEQ ID NO: 159562 - DNA, 17 bp, synthetic construct
  source 1..17: mol_type = other DNA
gtcctgggccagaaaga

SEQ ID NO: 159563 - DNA, 17 bp, synthetic construct
  source 1..17: mol_type = other DNA
agtcctgggccagaaag

SEQ ID NO: 159564 - DNA, 17 bp, synthetic construct
  source 1..17: mol_type = other DNA
tagtcctgggccagaaa

SEQ ID NO: 159565 - DNA, 17 bp, synthetic construct
  source 1..17: mol_type = other DNA
gtagtcctgggccagaa

SEQ ID NO: 159566 - DNA, 17 bp, synthetic construct
  source 1..17: mol_type = other DNA
agtagtcctgggccaga

SEQ ID NO: 159567 - DNA, 17 bp, synthetic construct
  source 1..17: mol_type = other DNA
cagtagtcctgggccag

SEQ ID NO: 159568 - DNA, 17 bp, synthetic construct
  source 1..17: mol_type = other DNA
acagtagtcctgggcca

SEQ ID NO: 159569 - DNA, 17 bp, synthetic construct
  source 1..17: mol_type = other DNA
cacagtagtcctgggcc

SEQ ID NO: 159570 - DNA, 17 bp, synthetic construct
  source 1..17: mol_type = other DNA
ccacagtagtcctgggc

SEQ ID NO: 159571 - DNA, 17 bp, synthetic construct
  source 1..17: mol_type = other DNA
cccacagtagtcctggg

SEQ ID NO: 159572 - DNA, 17 bp, synthetic construct
  source 1..17: mol_type = other DNA
ccccacagtagtcctgg

SEQ ID NO: 159573 - DNA, 17 bp, synthetic construct
  source 1..17: mol_type = other DNA
tccccacagtagtcctg

SEQ ID NO: 159574 - DNA, 17 bp, synthetic construct
  source 1..17: mol_type = other DNA
gtccccacagtagtcct

SEQ ID NO: 159575 - DNA, 17 bp, synthetic construct
  source 1..17: mol_type = other DNA
tgtccccacagtagtcc

SEQ ID NO: 159576 - DNA, 17 bp, synthetic construct
  source 1..17: mol_type = other DNA
ttgtccccacagtagtc

SEQ ID NO: 159577 - DNA, 17 bp, synthetic construct
  source 1..17: mol_type = other DNA
gttgtccccacagtagt

SEQ ID NO: 159578 - DNA, 17 bp, synthetic construct
  source 1..17: mol_type = other DNA
tgttgtccccacagtag

SEQ ID NO: 159579 - DNA, 17 bp, synthetic construct
  source 1..17: mol_type = other DNA
gtgttgtccccacagta

SEQ ID NO: 159580 - DNA, 17 bp, synthetic construct
  source 1..17: mol_type = other DNA
ggtgttgtccccacagt

SEQ ID NO: 159581 - DNA, 17 bp, synthetic construct
  source 1..17: mol_type = other DNA
tggtgttgtccccacag

SEQ ID NO: 159582 - DNA, 17 bp, synthetic construct
  source 1..17: mol_type = other DNA
gtggtgttgtccccaca

SEQ ID NO: 159583 - DNA, 17 bp, synthetic construct
  source 1..17: mol_type = other DNA
ggtggtgttgtccccac

SEQ ID NO: 159584 - DNA, 17 bp, synthetic construct
  source 1..17: mol_type = other DNA
gggtggtgttgtcccca

SEQ ID NO: 159585 - DNA, 17 bp, synthetic construct
  source 1..17: mol_type = other DNA
tgggtggtgttgtcccc

SEQ ID NO: 159586 - DNA, 17 bp, synthetic construct
  source 1..17: mol_type = other DNA
gtgggtggtgttgtccc

SEQ ID NO: 159587 - DNA, 17 bp, synthetic construct
  source 1..17: mol_type = other DNA
cgtgggtggtgttgtcc

SEQ ID NO: 159588 - DNA, 17 bp, synthetic construct
  source 1..17: mol_type = other DNA
ccgtgggtggtgttgtc

SEQ ID NO: 159589 - DNA, 17 bp, synthetic construct
  source 1..17: mol_type = other DNA
cccgtgggtggtgttgt

SEQ ID NO: 159590 - DNA, 17 bp, synthetic construct
  source 1..17: mol_type = other DNA
tcccgtgggtggtgttg

SEQ ID NO: 159591 - DNA, 17 bp, synthetic construct
  source 1..17: mol_type = other DNA
gtcccgtgggtggtgtt

SEQ ID NO: 159592 - DNA, 17 bp, synthetic construct
  source 1..17: mol_type = other DNA
ggtcccgtgggtggtgt

SEQ ID NO: 159593 - DNA, 17 bp, synthetic construct
  source 1..17: mol_type = other DNA
aggtcccgtgggtggtg

SEQ ID NO: 159594 - DNA, 17 bp, synthetic construct
  source 1..17: mol_type = other DNA
aaggtcccgtgggtggt

SEQ ID NO: 159595 - DNA, 17 bp, synthetic construct
  source 1..17: mol_type = other DNA
gaaggtcccgtgggtgg

SEQ ID NO: 159596 - DNA, 17 bp, synthetic construct
  source 1..17: mol_type = other DNA
ggaaggtcccgtgggtg

SEQ ID NO: 159597 - DNA, 17 bp, synthetic construct
  source 1..17: mol_type = other DNA
cggaaggtcccgtgggt

SEQ ID NO: 159598 - DNA, 17 bp, synthetic construct
  source 1..17: mol_type = other DNA
gcggaaggtcccgtggg

SEQ ID NO: 159599 - DNA, 17 bp, synthetic construct
  source 1..17: mol_type = other DNA
tgcggaaggtcccgtgg

SEQ ID NO: 159600 - DNA, 17 bp, synthetic construct
  source 1..17: mol_type = other DNA
atgcggaaggtcccgtg

SEQ ID NO: 159601 - DNA, 17 bp, synthetic construct
  source 1..17: mol_type = other DNA
gatgcggaaggtcccgt

SEQ ID NO: 159602 - DNA, 17 bp, synthetic construct
  source 1..17: mol_type = other DNA
cgatgcggaaggtcccg

SEQ ID NO: 159603 - DNA, 17 bp, synthetic construct
  source 1..17: mol_type = other DNA
acgatgcggaaggtccc

SEQ ID NO: 159604 - DNA, 17 bp, synthetic construct
  source 1..17: mol_type = other DNA
gacgatgcggaaggtcc

SEQ ID NO: 159605 - DNA, 17 bp, synthetic construct
  source 1..17: mol_type = other DNA
tgacgatgcggaaggtc

SEQ ID NO: 159606 - DNA, 17 bp, synthetic construct
  source 1..17: mol_type = other DNA
gtgacgatgcggaaggt

SEQ ID NO: 159607 - DNA, 17 bp, synthetic construct
  source 1..17: mol_type = other DNA
ggtgacgatgcggaagg

SEQ ID NO: 159608 - DNA, 17 bp, synthetic construct
  source 1..17: mol_type = other DNA
cggtgacgatgcggaag

SEQ ID NO: 159609 - DNA, 17 bp, synthetic construct
  source 1..17: mol_type = other DNA
tcggtgacgatgcggaa

SEQ ID NO: 159610 - DNA, 17 bp, synthetic construct
  source 1..17: mol_type = other DNA
ctcggtgacgatgcgga

SEQ ID NO: 159611 - DNA, 17 bp, synthetic construct
  source 1..17: mol_type = other DNA
tctcggtgacgatgcgg

SEQ ID NO: 159612 - DNA, 17 bp, synthetic construct
  source 1..17: mol_type = other DNA
ttctcggtgacgatgcg

SEQ ID NO: 159613 - DNA, 17 bp, synthetic construct
  source 1..17: mol_type = other DNA
gttctcggtgacgatgc

SEQ ID NO: 159614 - DNA, 17 bp, synthetic construct
  source 1..17: mol_type = other DNA
tgttctcggtgacgatg

SEQ ID NO: 159615 - DNA, 17 bp, synthetic construct
  source 1..17: mol_type = other DNA
atgttctcggtgacgat

SEQ ID NO: 159616 - DNA, 17 bp, synthetic construct
  source 1..17: mol_type = other DNA
gatgttctcggtgacga

SEQ ID NO: 159617 - DNA, 17 bp, synthetic construct
  source 1..17: mol_type = other DNA
ggatgttctcggtgacg

SEQ ID NO: 159618 - DNA, 17 bp, synthetic construct
  source 1..17: mol_type = other DNA
gggatgttctcggtgac

SEQ ID NO: 159619 - DNA, 17 bp, synthetic construct
  source 1..17: mol_type = other DNA
ggggatgttctcggtga

SEQ ID NO: 159620 - DNA, 17 bp, synthetic construct
  source 1..17: mol_type = other DNA
aggggatgttctcggtg

SEQ ID NO: 159621 - DNA, 17 bp, synthetic construct
  source 1..17: mol_type = other DNA
caggggatgttctcggt

SEQ ID NO: 159622 - DNA, 17 bp, synthetic construct
  source 1..17: mol_type = other DNA
acaggggatgttctcgg

SEQ ID NO: 159623 - DNA, 17 bp, synthetic construct
  source 1..17: mol_type = other DNA
cacaggggatgttctcg

SEQ ID NO: 159624 - DNA, 17 bp, synthetic construct
  source 1..17: mol_type = other DNA
ccacaggggatgttctc

SEQ ID NO: 159625 - DNA, 17 bp, synthetic construct
  source 1..17: mol_type = other DNA
cccacaggggatgttct

SEQ ID NO: 159626 - DNA, 17 bp, synthetic construct
  source 1..17: mol_type = other DNA
tcccacaggggatgttc

SEQ ID NO: 159627 - DNA, 17 bp, synthetic construct
  source 1..17: mol_type = other DNA
gtcccacaggggatgtt

SEQ ID NO: 159628 - DNA, 17 bp, synthetic construct
  source 1..17: mol_type = other DNA
ggtcccacaggggatgt

SEQ ID NO: 159629 - DNA, 17 bp, synthetic construct
  source 1..17: mol_type = other DNA
tggtcccacaggggatg

SEQ ID NO: 159630 - DNA, 17 bp, synthetic construct
  source 1..17: mol_type = other DNA
gtggtcccacaggggat

SEQ ID NO: 159631 - DNA, 17 bp, synthetic construct
  source 1..17: mol_type = other DNA
ggtggtcccacagggga

SEQ ID NO: 159632 - DNA, 17 bp, synthetic construct
  source 1..17: mol_type = other DNA
cggtggtcccacagggg

SEQ ID NO: 159633 - DNA, 17 bp, synthetic construct
  source 1..17: mol_type = other DNA
ccggtggtcccacaggg

SEQ ID NO: 159634 - DNA, 17 bp, synthetic construct
  source 1..17: mol_type = other DNA
gccggtggtcccacagg

SEQ ID NO: 159635 - DNA, 17 bp, synthetic construct
  source 1..17: mol_type = other DNA
tgccggtggtcccacag

SEQ ID NO: 159636 - DNA, 17 bp, synthetic construct
  source 1..17: mol_type = other DNA
gtgccggtggtcccaca

SEQ ID NO: 159637 - DNA, 17 bp, synthetic construct
  source 1..17: mol_type = other DNA
ggtgccggtggtcccac

SEQ ID NO: 159638 - DNA, 17 bp, synthetic construct
  source 1..17: mol_type = other DNA
tggtgccggtggtccca

SEQ ID NO: 159639 - DNA, 17 bp, synthetic construct
  source 1..17: mol_type = other DNA
gtggtgccggtggtccc

SEQ ID NO: 159640 - DNA, 17 bp, synthetic construct
  source 1..17: mol_type = other DNA
ggtggtgccggtggtcc

SEQ ID NO: 159641 - DNA, 17 bp, synthetic construct
  source 1..17: mol_type = other DNA
aggtggtgccggtggtc

SEQ ID NO: 159642 - DNA, 17 bp, synthetic construct
  source 1..17: mol_type = other DNA
caggtggtgccggtggt

SEQ ID NO: 159643 - DNA, 17 bp, synthetic construct
  source 1..17: mol_type = other DNA
gcaggtggtgccggtgg

SEQ ID NO: 159644 - DNA, 17 bp, synthetic construct
  source 1..17: mol_type = other DNA
agcaggtggtgccggtg

SEQ ID NO: 159645 - DNA, 17 bp, synthetic construct
  source 1..17: mol_type = other DNA
gagcaggtggtgccggt

SEQ ID NO: 159646 - DNA, 17 bp, synthetic construct
  source 1..17: mol_type = other DNA
ggagcaggtggtgccgg

SEQ ID NO: 159647 - DNA, 17 bp, synthetic construct
  source 1..17: mol_type = other DNA
tggagcaggtggtgccg

SEQ ID NO: 159648 - DNA, 17 bp, synthetic construct
  source 1..17: mol_type = other DNA
ttggagcaggtggtgcc

SEQ ID NO: 159649 - DNA, 17 bp, synthetic construct
  source 1..17: mol_type = other DNA
cttggagcaggtggtgc

SEQ ID NO: 159650 - DNA, 17 bp, synthetic construct
  source 1..17: mol_type = other DNA
ccttggagcaggtggtg

SEQ ID NO: 159651 - DNA, 17 bp, synthetic construct
  source 1..17: mol_type = other DNA
gccttggagcaggtggt

SEQ ID NO: 159652 - DNA, 17 bp, synthetic construct
  source 1..17: mol_type = other DNA
ggccttggagcaggtgg

SEQ ID NO: 159653 - DNA, 17 bp, synthetic construct
  source 1..17: mol_type = other DNA
tggccttggagcaggtg

SEQ ID NO: 159654 - DNA, 17 bp, synthetic construct
  source 1..17: mol_type = other DNA
atggccttggagcaggt

SEQ ID NO: 159655 - DNA, 17 bp, synthetic construct
  source 1..17: mol_type = other DNA
gatggccttggagcagg

SEQ ID NO: 159656 - DNA, 17 bp, synthetic construct
  source 1..17: mol_type = other DNA
tgatggccttggagcag

SEQ ID NO: 159657 - DNA, 17 bp, synthetic construct
  source 1..17: mol_type = other DNA
ttgatggccttggagca

SEQ ID NO: 159658 - DNA, 17 bp, synthetic construct
  source 1..17: mol_type = other DNA
cttgatggccttggagc

SEQ ID NO: 159659 - DNA, 17 bp, synthetic construct
  source 1..17: mol_type = other DNA
gcttgatggccttggag

SEQ ID NO: 159660 - DNA, 17 bp, synthetic construct
  source 1..17: mol_type = other DNA
agcttgatggccttgga

SEQ ID NO: 159661 - DNA, 17 bp, synthetic construct
  source 1..17: mol_type = other DNA
gagcttgatggccttgg

SEQ ID NO: 159662 - DNA, 17 bp, synthetic construct
  source 1..17: mol_type = other DNA
agagcttgatggccttg

SEQ ID NO: 159663 - DNA, 17 bp, synthetic construct
  source 1..17: mol_type = other DNA
aagagcttgatggcctt

SEQ ID NO: 159664 - DNA, 17 bp, synthetic construct
  source 1..17: mol_type = other DNA
gaagagcttgatggcct

SEQ ID NO: 159665 - DNA, 17 bp, synthetic construct
  source 1..17: mol_type = other DNA
cgaagagcttgatggcc

SEQ ID NO: 159666 - DNA, 17 bp, synthetic construct
  source 1..17: mol_type = other DNA
acgaagagcttgatggc

SEQ ID NO: 159667 - DNA, 17 bp, synthetic construct
  source 1..17: mol_type = other DNA
cacgaagagcttgatgg

SEQ ID NO: 159668 - DNA, 17 bp, synthetic construct
  source 1..17: mol_type = other DNA
ccacgaagagcttgatg

SEQ ID NO: 159669 - DNA, 17 bp, synthetic construct
  source 1..17: mol_type = other DNA
tccacgaagagcttgat

SEQ ID NO: 159670 - DNA, 17 bp, synthetic construct
  source 1..17: mol_type = other DNA
ctccacgaagagcttga

SEQ ID NO: 159671 - DNA, 17 bp, synthetic construct
  source 1..17: mol_type = other DNA
cctccacgaagagcttg

SEQ ID NO: 159672 - DNA, 17 bp, synthetic construct
  source 1..17: mol_type = other DNA
acctccacgaagagctt

SEQ ID NO: 159673 - DNA, 17 bp, synthetic construct
  source 1..17: mol_type = other DNA
cacctccacgaagagct

SEQ ID NO: 159674 - DNA, 17 bp, synthetic construct
  source 1..17: mol_type = other DNA
tcacctccacgaagagc

SEQ ID NO: 159675 - DNA, 17 bp, synthetic construct
  source 1..17: mol_type = other DNA
ctcacctccacgaagag

SEQ ID NO: 159676 - DNA, 17 bp, synthetic construct
  source 1..17: mol_type = other DNA
tctcacctccacgaaga

SEQ ID NO: 159677 - DNA, 17 bp, synthetic construct
  source 1..17: mol_type = other DNA
ttctcacctccacgaag

SEQ ID NO: 159678 - DNA, 17 bp, synthetic construct
  source 1..17: mol_type = other DNA
gttctcacctccacgaa

SEQ ID NO: 159679 - DNA, 17 bp, synthetic construct
  source 1..17: mol_type = other DNA
cgttctcacctccacga

SEQ ID NO: 159680 - DNA, 17 bp, synthetic construct
  source 1..17: mol_type = other DNA
ccgttctcacctccacg

SEQ ID NO: 159681 - DNA, 17 bp, synthetic construct
  source 1..17: mol_type = other DNA
gccgttctcacctccac

SEQ ID NO: 159682 - DNA, 17 bp, synthetic construct
  source 1..17: mol_type = other DNA
ggccgttctcacctcca

SEQ ID NO: 159683 - DNA, 17 bp, synthetic construct
  source 1..17: mol_type = other DNA
gggccgttctcacctcc

SEQ ID NO: 159684 - DNA, 17 bp, synthetic construct
  source 1..17: mol_type = other DNA
ggggccgttctcacctc

SEQ ID NO: 159685 - DNA, 17 bp, synthetic construct
  source 1..17: mol_type = other DNA
tggggccgttctcacct

SEQ ID NO: 159686 - DNA, 17 bp, synthetic construct
  source 1..17: mol_type = other DNA
ctggggccgttctcacc

SEQ ID NO: 159687 - DNA, 17 bp, synthetic construct
  source 1..17: mol_type = other DNA
gctggggccgttctcac

SEQ ID NO: 159688 - DNA, 17 bp, synthetic construct
  source 1..17: mol_type = other DNA
agctggggccgttctca

SEQ ID NO: 159689 - DNA, 17 bp, synthetic construct
  source 1..17: mol_type = other DNA
cagctggggccgttctc

SEQ ID NO: 159690 - DNA, 17 bp, synthetic construct
  source 1..17: mol_type = other DNA
acagctggggccgttct

SEQ ID NO: 159691 - DNA, 17 bp, synthetic construct
  source 1..17: mol_type = other DNA
cacagctggggccgttc

SEQ ID NO: 159692 - DNA, 17 bp, synthetic construct
  source 1..17: mol_type = other DNA
tcacagctggggccgtt

SEQ ID NO: 159693 - DNA, 17 bp, synthetic construct
  source 1..17: mol_type = other DNA
ctcacagctggggccgt

SEQ ID NO: 159694 - DNA, 17 bp, synthetic construct
  source 1..17: mol_type = other DNA
gctcacagctggggccg

SEQ ID NO: 159695 - DNA, 17 bp, synthetic construct
  source 1..17: mol_type = other DNA
tgctcacagctggggcc

SEQ ID NO: 159696 - DNA, 17 bp, synthetic construct
  source 1..17: mol_type = other DNA
gtgctcacagctggggc

SEQ ID NO: 159697 - DNA, 17 bp, synthetic construct
  source 1..17: mol_type = other DNA
ggtgctcacagctgggg

SEQ ID NO: 159698 - DNA, 17 bp, synthetic construct
  source 1..17: mol_type = other DNA
gggtgctcacagctggg

SEQ ID NO: 159699 - DNA, 17 bp, synthetic construct
  source 1..17: mol_type = other DNA
ggggtgctcacagctgg

SEQ ID NO: 159700 - DNA, 17 bp, synthetic construct
  source 1..17: mol_type = other DNA
gggggtgctcacagctg

SEQ ID NO: 159701 - DNA, 17 bp, synthetic construct
  source 1..17: mol_type = other DNA
cgggggtgctcacagct

SEQ ID NO: 159702 - DNA, 17 bp, synthetic construct
  source 1..17: mol_type = other DNA
tcgggggtgctcacagc

SEQ ID NO: 159703 - DNA, 17 bp, synthetic construct
  source 1..17: mol_type = other DNA
gtcgggggtgctcacag

SEQ ID NO: 159704 - DNA, 17 bp, synthetic construct
  source 1..17: mol_type = other DNA
ggtcgggggtgctcaca

SEQ ID NO: 159705 - DNA, 17 bp, synthetic construct
  source 1..17: mol_type = other DNA
gggtcgggggtgctcac

SEQ ID NO: 159706 - DNA, 17 bp, synthetic construct
  source 1..17: mol_type = other DNA
agggtcgggggtgctca

SEQ ID NO: 159707 - DNA, 17 bp, synthetic construct
  source 1..17: mol_type = other DNA
cagggtcgggggtgctc

SEQ ID NO: 159708 - DNA, 17 bp, synthetic construct
  source 1..17: mol_type = other DNA
gcagggtcgggggtgct

SEQ ID NO: 159709 - DNA, 17 bp, synthetic construct
  source 1..17: mol_type = other DNA
tgcagggtcgggggtgc

SEQ ID NO: 159710 - DNA, 17 bp, synthetic construct
  source 1..17: mol_type = other DNA
ctgcagggtcgggggtg

SEQ ID NO: 159711 - DNA, 17 bp, synthetic construct
  source 1..17: mol_type = other DNA
gctgcagggtcgggggt

SEQ ID NO: 159712 - DNA, 17 bp, synthetic construct
  source 1..17: mol_type = other DNA
ggctgcagggtcggggg

SEQ ID NO: 159713 - DNA, 17 bp, synthetic construct
  source 1..17: mol_type = other DNA
tggctgcagggtcgggg

SEQ ID NO: 159714 - DNA, 17 bp, synthetic construct
  source 1..17: mol_type = other DNA
ttggctgcagggtcggg

SEQ ID NO: 159715 - DNA, 17 bp, synthetic construct
  source 1..17: mol_type = other DNA
gttggctgcagggtcgg

SEQ ID NO: 159716 - DNA, 17 bp, synthetic construct
  source 1..17: mol_type = other DNA
cgttggctgcagggtcg

SEQ ID NO: 159717 - DNA, 17 bp, synthetic construct
  source 1..17: mol_type = other DNA
tcgttggctgcagggtc

SEQ ID NO: 159718 - DNA, 17 bp, synthetic construct
  source 1..17: mol_type = other DNA
ctcgttggctgcagggt

SEQ ID NO: 159719 - DNA, 17 bp, synthetic construct
  source 1..17: mol_type = other DNA
gctcgttggctgcaggg

SEQ ID NO: 159720 - DNA, 17 bp, synthetic construct
  source 1..17: mol_type = other DNA
ggctcgttggctgcagg

SEQ ID NO: 159721 - DNA, 17 bp, synthetic construct
  source 1..17: mol_type = other DNA
cggctcgttggctgcag

SEQ ID NO: 159722 - DNA, 17 bp, synthetic construct
  source 1..17: mol_type = other DNA
ccggctcgttggctgca

SEQ ID NO: 159723 - DNA, 17 bp, synthetic construct
  source 1..17: mol_type = other DNA
gccggctcgttggctgc

SEQ ID NO: 159724 - DNA, 17 bp, synthetic construct
  source 1..17: mol_type = other DNA
ggccggctcgttggctg

SEQ ID NO: 159725 - DNA, 17 bp, synthetic construct
  source 1..17: mol_type = other DNA
gggccggctcgttggct

SEQ ID NO: 159726 - DNA, 17 bp, synthetic construct
  source 1..17: mol_type = other DNA
ggggccggctcgttggc

SEQ ID NO: 159727 - DNA, 17 bp, synthetic construct
  source 1..17: mol_type = other DNA
gggggccggctcgttgg

SEQ ID NO: 159728 - DNA, 17 bp, synthetic construct
  source 1..17: mol_type = other DNA
tgggggccggctcgttg

SEQ ID NO: 159729 - DNA, 17 bp, synthetic construct
  source 1..17: mol_type = other DNA
ctgggggccggctcgtt

SEQ ID NO: 159730 - DNA, 17 bp, synthetic construct
  source 1..17: mol_type = other DNA
cctgggggccggctcgt

SEQ ID NO: 159731 - DNA, 17 bp, synthetic construct
  source 1..17: mol_type = other DNA
ccctgggggccggctcg

SEQ ID NO: 159732 - DNA, 17 bp, synthetic construct
  source 1..17: mol_type = other DNA
tccctgggggccggctc

SEQ ID NO: 159733 - DNA, 17 bp, synthetic construct
  source 1..17: mol_type = other DNA
ttccctgggggccggct

SEQ ID NO: 159734 - DNA, 17 bp, synthetic construct
  source 1..17: mol_type = other DNA
cttccctgggggccggc

SEQ ID NO: 159735 - DNA, 17 bp, synthetic construct
  source 1..17: mol_type = other DNA
gcttccctgggggccgg

SEQ ID NO: 159736 - DNA, 17 bp, synthetic construct
  source 1..17: mol_type = other DNA
agcttccctgggggccg

SEQ ID NO: 159737 - DNA, 17 bp, synthetic construct
  source 1..17: mol_type = other DNA
aagcttccctgggggcc

SEQ ID NO: 159738 - DNA, 17 bp, synthetic construct
  source 1..17: mol_type = other DNA
gaagcttccctgggggc

SEQ ID NO: 159739 - DNA, 17 bp, synthetic construct
  source 1..17: mol_type = other DNA
cgaagcttccctggggg

SEQ ID NO: 159740 - DNA, 17 bp, synthetic construct
  source 1..17: mol_type = other DNA
acgaagcttccctgggg

SEQ ID NO: 159741 - DNA, 17 bp, synthetic construct
  source 1..17: mol_type = other DNA
cacgaagcttccctggg

SEQ ID NO: 159742 - DNA, 17 bp, synthetic construct
  source 1..17: mol_type = other DNA
tcacgaagcttccctgg

SEQ ID NO: 159743 - DNA, 17 bp, synthetic construct
  source 1..17: mol_type = other DNA
ctcacgaagcttccctg

SEQ ID NO: 159744 - DNA, 17 bp, synthetic construct
  source 1..17: mol_type = other DNA
cctcacgaagcttccct

SEQ ID NO: 159745 - DNA, 17 bp, synthetic construct
  source 1..17: mol_type = other DNA
gcctcacgaagcttccc

SEQ ID NO: 159746 - DNA, 17 bp, synthetic construct
  source 1..17: mol_type = other DNA
agcctcacgaagcttcc

SEQ ID NO: 159747 - DNA, 17 bp, synthetic construct
  source 1..17: mol_type = other DNA
aagcctcacgaagcttc

SEQ ID NO: 159748 - DNA, 17 bp, synthetic construct
  source 1..17: mol_type = other DNA
aaagcctcacgaagctt

SEQ ID NO: 159749 - DNA, 17 bp, synthetic construct
  source 1..17: mol_type = other DNA
taaagcctcacgaagct

SEQ ID NO: 159750 - DNA, 17 bp, synthetic construct
  source 1..17: mol_type = other DNA
ctaaagcctcacgaagc

SEQ ID NO: 159751 - DNA, 17 bp, synthetic construct
  source 1..17: mol_type = other DNA
gctaaagcctcacgaag

SEQ ID NO: 159752 - DNA, 17 bp, synthetic construct
  source 1..17: mol_type = other DNA
agctaaagcctcacgaa

SEQ ID NO: 159753 - DNA, 17 bp, synthetic construct
  source 1..17: mol_type = other DNA
cagctaaagcctcacga

SEQ ID NO: 159754 - DNA, 17 bp, synthetic construct
  source 1..17: mol_type = other DNA
gcagctaaagcctcacg

SEQ ID NO: 159755 - DNA, 17 bp, synthetic construct
  source 1..17: mol_type = other DNA
tgcagctaaagcctcac

SEQ ID NO: 159756 - DNA, 17 bp, synthetic construct
  source 1..17: mol_type = other DNA
gtgcagctaaagcctca

SEQ ID NO: 159757 - DNA, 17 bp, synthetic construct
  source 1..17: mol_type = other DNA
ggtgcagctaaagcctc

SEQ ID NO: 159758 - DNA, 17 bp, synthetic construct
  source 1..17: mol_type = other DNA
gggtgcagctaaagcct

SEQ ID NO: 159759 - DNA, 17 bp, synthetic construct
  source 1..17: mol_type = other DNA
tgggtgcagctaaagcc

SEQ ID NO: 159760 - DNA, 17 bp, synthetic construct
  source 1..17: mol_type = other DNA
gtgggtgcagctaaagc

SEQ ID NO: 159761 - DNA, 17 bp, synthetic construct
  source 1..17: mol_type = other DNA
tgtgggtgcagctaaag

SEQ ID NO: 159762 - DNA, 17 bp, synthetic construct
  source 1..17: mol_type = other DNA
ctgtgggtgcagctaaa

SEQ ID NO: 159763 - DNA, 17 bp, synthetic construct
  source 1..17: mol_type = other DNA
cctgtgggtgcagctaa

SEQ ID NO: 159764 - DNA, 17 bp, synthetic construct
  source 1..17: mol_type = other DNA
acctgtgggtgcagcta

SEQ ID NO: 159765 - DNA, 17 bp, synthetic construct
  source 1..17: mol_type = other DNA
aacctgtgggtgcagct

SEQ ID NO: 159766 - DNA, 17 bp, synthetic construct
  source 1..17: mol_type = other DNA
gaacctgtgggtgcagc

SEQ ID NO: 159767 - DNA, 17 bp, synthetic construct
  source 1..17: mol_type = other DNA
agaacctgtgggtgcag

SEQ ID NO: 159768 - DNA, 17 bp, synthetic construct
  source 1..17: mol_type = other DNA
gagaacctgtgggtgca

SEQ ID NO: 159769 - DNA, 17 bp, synthetic construct
  source 1..17: mol_type = other DNA
tgagaacctgtgggtgc

SEQ ID NO: 159770 - DNA, 17 bp, synthetic construct
  source 1..17: mol_type = other DNA
ctgagaacctgtgggtg

SEQ ID NO: 159771 - DNA, 17 bp, synthetic construct
  source 1..17: mol_type = other DNA
gctgagaacctgtgggt

SEQ ID NO: 159772 - DNA, 17 bp, synthetic construct
  source 1..17: mol_type = other DNA
tgctgagaacctgtggg

SEQ ID NO: 159773 - DNA, 17 bp, synthetic construct
  source 1..17: mol_type = other DNA
ctgctgagaacctgtgg

SEQ ID NO: 159774 - DNA, 17 bp, synthetic construct
  source 1..17: mol_type = other DNA
actgctgagaacctgtg

SEQ ID NO: 159775 - DNA, 17 bp, synthetic construct
  source 1..17: mol_type = other DNA
cactgctgagaacctgt

SEQ ID NO: 159776 - DNA, 17 bp, synthetic construct
  source 1..17: mol_type = other DNA
acactgctgagaacctg

SEQ ID NO: 159777 - DNA, 17 bp, synthetic construct
  source 1..17: mol_type = other DNA
gacactgctgagaacct

SEQ ID NO: 159778 - DNA, 17 bp, synthetic construct
  source 1..17: mol_type = other DNA
ggacactgctgagaacc

SEQ ID NO: 159779 - DNA, 17 bp, synthetic construct
  source 1..17: mol_type = other DNA
aggacactgctgagaac

SEQ ID NO: 159780 - DNA, 17 bp, synthetic construct
  source 1..17: mol_type = other DNA
caggacactgctgagaa

SEQ ID NO: 159781 - DNA, 17 bp, synthetic construct
  source 1..17: mol_type = other DNA
ccaggacactgctgaga

SEQ ID NO: 159782 - DNA, 17 bp, synthetic construct
  source 1..17: mol_type = other DNA
gccaggacactgctgag

SEQ ID NO: 159783 - DNA, 17 bp, synthetic construct
  source 1..17: mol_type = other DNA
ggccaggacactgctga

SEQ ID NO: 159784 - DNA, 17 bp, synthetic construct
  source 1..17: mol_type = other DNA
gggccaggacactgctg

SEQ ID NO: 159785 - DNA, 17 bp, synthetic construct
  source 1..17: mol_type = other DNA
ggggccaggacactgct

SEQ ID NO: 159786 - DNA, 17 bp, synthetic construct
  source 1..17: mol_type = other DNA
cggggccaggacactgc

SEQ ID NO: 159787 - DNA, 17 bp, synthetic construct
  source 1..17: mol_type = other DNA
ccggggccaggacactg

SEQ ID NO: 159788 - DNA, 17 bp, synthetic construct
  source 1..17: mol_type = other DNA
cccggggccaggacact

SEQ ID NO: 159789 - DNA, 17 bp, synthetic construct
  source 1..17: mol_type = other DNA
gcccggggccaggacac

SEQ ID NO: 159790 - DNA, 17 bp, synthetic construct
  source 1..17: mol_type = other DNA
agcccggggccaggaca

SEQ ID NO: 159791 - DNA, 17 bp, synthetic construct
  source 1..17: mol_type = other DNA
cagcccggggccaggac

SEQ ID NO: 159792 - DNA, 17 bp, synthetic construct
  source 1..17: mol_type = other DNA
gcagcccggggccagga

SEQ ID NO: 159793 - DNA, 17 bp, synthetic construct
  source 1..17: mol_type = other DNA
agcagcccggggccagg

SEQ ID NO: 159794 - DNA, 17 bp, synthetic construct
  source 1..17: mol_type = other DNA
cagcagcccggggccag

SEQ ID NO: 159795 - DNA, 17 bp, synthetic construct
  source 1..17: mol_type = other DNA
acagcagcccggggcca

SEQ ID NO: 159796 - DNA, 17 bp, synthetic construct
  source 1..17: mol_type = other DNA
aacagcagcccggggcc

SEQ ID NO: 159797 - DNA, 17 bp, synthetic construct
  source 1..17: mol_type = other DNA
gaacagcagcccggggc

SEQ ID NO: 159798 - DNA, 17 bp, synthetic construct
  source 1..17: mol_type = other DNA
ggaacagcagcccgggg

SEQ ID NO: 159799 - DNA, 17 bp, synthetic construct
  source 1..17: mol_type = other DNA
tggaacagcagcccggg

SEQ ID NO: 159800 - DNA, 17 bp, synthetic construct
  source 1..17: mol_type = other DNA
ttggaacagcagcccgg

SEQ ID NO: 159801 - DNA, 17 bp, synthetic construct
  source 1..17: mol_type = other DNA
cttggaacagcagcccg

SEQ ID NO: 159802 - DNA, 17 bp, synthetic construct
  source 1..17: mol_type = other DNA
gcttggaacagcagccc

SEQ ID NO: 159803 - DNA, 17 bp, synthetic construct
  source 1..17: mol_type = other DNA
tgcttggaacagcagcc

SEQ ID NO: 159804 - DNA, 17 bp, synthetic construct
  source 1..17: mol_type = other DNA
ctgcttggaacagcagc

SEQ ID NO: 159805 - DNA, 17 bp, synthetic construct
  source 1..17: mol_type = other DNA
gctgcttggaacagcag

SEQ ID NO: 159806 - DNA, 17 bp, synthetic construct
  source 1..17: mol_type = other DNA
ggctgcttggaacagca

SEQ ID NO: 159807 - DNA, 17 bp, synthetic construct
  source 1..17: mol_type = other DNA
tggctgcttggaacagc

SEQ ID NO: 159808 - DNA, 17 bp, synthetic construct
  source 1..17: mol_type = other DNA
gtggctgcttggaacag

SEQ ID NO: 159809 - DNA, 17 bp, synthetic construct
  source 1..17: mol_type = other DNA
tgtggctgcttggaaca

SEQ ID NO: 159810 - DNA, 17 bp, synthetic construct
  source 1..17: mol_type = other DNA
ttgtggctgcttggaac

SEQ ID NO: 159811 - DNA, 17 bp, synthetic construct
  source 1..17: mol_type = other DNA
tttgtggctgcttggaa

SEQ ID NO: 159812 - DNA, 17 bp, synthetic construct
  source 1..17: mol_type = other DNA
gtttgtggctgcttgga

SEQ ID NO: 159813 - DNA, 17 bp, synthetic construct
  source 1..17: mol_type = other DNA
ggtttgtggctgcttgg

SEQ ID NO: 159814 - DNA, 17 bp, synthetic construct
  source 1..17: mol_type = other DNA
tggtttgtggctgcttg

SEQ ID NO: 159815 - DNA, 17 bp, synthetic construct
  source 1..17: mol_type = other DNA
ctggtttgtggctgctt

SEQ ID NO: 159816 - DNA, 17 bp, synthetic construct
  source 1..17: mol_type = other DNA
cctggtttgtggctgct

SEQ ID NO: 159817 - DNA, 17 bp, synthetic construct
  source 1..17: mol_type = other DNA
ccctggtttgtggctgc

SEQ ID NO: 159818 - DNA, 17 bp, synthetic construct
  source 1..17: mol_type = other DNA
cccctggtttgtggctg

SEQ ID NO: 159819 - DNA, 17 bp, synthetic construct
  source 1..17: mol_type = other DNA
ccccctggtttgtggct

SEQ ID NO: 159820 - DNA, 17 bp, synthetic construct
  source 1..17: mol_type = other DNA
gccccctggtttgtggc

SEQ ID NO: 159821 - DNA, 17 bp, synthetic construct
  source 1..17: mol_type = other DNA
agccccctggtttgtgg

SEQ ID NO: 159822 - DNA, 17 bp, synthetic construct
  source 1..17: mol_type = other DNA
aagccccctggtttgtg

SEQ ID NO: 159823 - DNA, 17 bp, synthetic construct
  source 1..17: mol_type = other DNA
taagccccctggtttgt

SEQ ID NO: 159824 - DNA, 17 bp, synthetic construct
  source 1..17: mol_type = other DNA
ctaagccccctggtttg

SEQ ID NO: 159825 - DNA, 17 bp, synthetic construct
  source 1..17: mol_type = other DNA
tctaagccccctggttt

SEQ ID NO: 159826 - DNA, 17 bp, synthetic construct
  source 1..17: mol_type = other DNA
gtctaagccccctggtt

SEQ ID NO: 159827 - DNA, 17 bp, synthetic construct
  source 1..17: mol_type = other DNA
tgtctaagccccctggt

SEQ ID NO: 159828 - DNA, 17 bp, synthetic construct
  source 1..17: mol_type = other DNA
ttgtctaagccccctgg

SEQ ID NO: 159829 - DNA, 17 bp, synthetic construct
  source 1..17: mol_type = other DNA
gttgtctaagccccctg

SEQ ID NO: 159830 - DNA, 17 bp, synthetic construct
  source 1..17: mol_type = other DNA
tgttgtctaagccccct

SEQ ID NO: 159831 - DNA, 17 bp, synthetic construct
  source 1..17: mol_type = other DNA
ctgttgtctaagccccc

SEQ ID NO: 159832 - DNA, 17 bp, synthetic construct
  source 1..17: mol_type = other DNA
tctgttgtctaagcccc

SEQ ID NO: 159833 - DNA, 17 bp, synthetic construct
  source 1..17: mol_type = other DNA
ttctgttgtctaagccc

SEQ ID NO: 159834 - DNA, 17 bp, synthetic construct
  source 1..17: mol_type = other DNA
tttctgttgtctaagcc

SEQ ID NO: 159835 - DNA, 17 bp, synthetic construct
  source 1..17: mol_type = other DNA
atttctgttgtctaagc

SEQ ID NO: 159836 - DNA, 17 bp, synthetic construct
  source 1..17: mol_type = other DNA
catttctgttgtctaag

SEQ ID NO: 159837 - DNA, 17 bp, synthetic construct
  source 1..17: mol_type = other DNA
gcatttctgttgtctaa

SEQ ID NO: 159838 - DNA, 17 bp, synthetic construct
  source 1..17: mol_type = other DNA
tgcatttctgttgtcta

SEQ ID NO: 159839 - DNA, 17 bp, synthetic construct
  source 1..17: mol_type = other DNA
atgcatttctgttgtct

SEQ ID NO: 159840 - DNA, 17 bp, synthetic construct
  source 1..17: mol_type = other DNA
aatgcatttctgttgtc

SEQ ID NO: 159841 - DNA, 17 bp, synthetic construct
  source 1..17: mol_type = other DNA
gaatgcatttctgttgt

SEQ ID NO: 159842 - DNA, 17 bp, synthetic construct
  source 1..17: mol_type = other DNA
agaatgcatttctgttg

SEQ ID NO: 159843 - DNA, 17 bp, synthetic construct
  source 1..17: mol_type = other DNA
gagaatgcatttctgtt

SEQ ID NO: 159844 - DNA, 17 bp, synthetic construct
  source 1..17: mol_type = other DNA
tgagaatgcatttctgt

SEQ ID NO: 159845 - DNA, 17 bp, synthetic construct
  source 1..17: mol_type = other DNA
ctgagaatgcatttctg

SEQ ID NO: 159846 - DNA, 17 bp, synthetic construct
  source 1..17: mol_type = other DNA
actgagaatgcatttct

SEQ ID NO: 159847 - DNA, 17 bp, synthetic construct
  source 1..17: mol_type = other DNA
gactgagaatgcatttc

SEQ ID NO: 159848 - DNA, 17 bp, synthetic construct
  source 1..17: mol_type = other DNA
ggactgagaatgcattt

SEQ ID NO: 159849 - DNA, 17 bp, synthetic construct
  source 1..17: mol_type = other DNA
aggactgagaatgcatt

SEQ ID NO: 159850 - DNA, 17 bp, synthetic construct
  source 1..17: mol_type = other DNA
caggactgagaatgcat

SEQ ID NO: 159851 - DNA, 17 bp, synthetic construct
  source 1..17: mol_type = other DNA
ccaggactgagaatgca

SEQ ID NO: 159852 - DNA, 17 bp, synthetic construct
  source 1..17: mol_type = other DNA
tccaggactgagaatgc

SEQ ID NO: 159853 - DNA, 17 bp, synthetic construct
  source 1..17: mol_type = other DNA
ctccaggactgagaatg

SEQ ID NO: 159854 - DNA, 17 bp, synthetic construct
  source 1..17: mol_type = other DNA
gctccaggactgagaat

SEQ ID NO: 159855 - DNA, 17 bp, synthetic construct
  source 1..17: mol_type = other DNA
ggctccaggactgagaa

SEQ ID NO: 159856 - DNA, 17 bp, synthetic construct
  source 1..17: mol_type = other DNA
cggctccaggactgaga

SEQ ID NO: 159857 - DNA, 17 bp, synthetic construct
  source 1..17: mol_type = other DNA
ccggctccaggactgag

SEQ ID NO: 159858 - DNA, 17 bp, synthetic construct
  source 1..17: mol_type = other DNA
tccggctccaggactga

SEQ ID NO: 159859 - DNA, 17 bp, synthetic construct
  source 1..17: mol_type = other DNA
ttccggctccaggactg

SEQ ID NO: 159860 - DNA, 17 bp, synthetic construct
  source 1..17: mol_type = other DNA
cttccggctccaggact

SEQ ID NO: 159861 - DNA, 17 bp, synthetic construct
  source 1..17: mol_type = other DNA
acttccggctccaggac

SEQ ID NO: 159862 - DNA, 17 bp, synthetic construct
  source 1..17: mol_type = other DNA
gacttccggctccagga

SEQ ID NO: 159863 - DNA, 17 bp, synthetic construct
  source 1..17: mol_type = other DNA
tgacttccggctccagg

SEQ ID NO: 159864 - DNA, 17 bp, synthetic construct
  source 1..17: mol_type = other DNA
ctgacttccggctccag

SEQ ID NO: 159865 - DNA, 17 bp, synthetic construct
  source 1..17: mol_type = other DNA
tctgacttccggctcca

SEQ ID NO: 159866 - DNA, 17 bp, synthetic construct
  source 1..17: mol_type = other DNA
ctctgacttccggctcc

SEQ ID NO: 159867 - DNA, 17 bp, synthetic construct
  source 1..17: mol_type = other DNA
tctctgacttccggctc

SEQ ID NO: 159868 - DNA, 17 bp, synthetic construct
  source 1..17: mol_type = other DNA
atctctgacttccggct

SEQ ID NO: 159869 - DNA, 17 bp, synthetic construct
  source 1..17: mol_type = other DNA
gatctctgacttccggc

SEQ ID NO: 159870 - DNA, 17 bp, synthetic construct
  source 1..17: mol_type = other DNA
ggatctctgacttccgg

SEQ ID NO: 159871 - DNA, 17 bp, synthetic construct
  source 1..17: mol_type = other DNA
tggatctctgacttccg

SEQ ID NO: 159872 - DNA, 17 bp, synthetic construct
  source 1..17: mol_type = other DNA
ctggatctctgacttcc

SEQ ID NO: 159873 - DNA, 17 bp, synthetic construct
  source 1..17: mol_type = other DNA
cctggatctctgacttc

SEQ ID NO: 159874 - DNA, 17 bp, synthetic construct
  source 1..17: mol_type = other DNA
gcctggatctctgactt

SEQ ID NO: 159875 - DNA, 17 bp, synthetic construct
  source 1..17: mol_type = other DNA
cgcctggatctctgact

SEQ ID NO: 159876 - DNA, 17 bp, synthetic construct
  source 1..17: mol_type = other DNA
ccgcctggatctctgac

SEQ ID NO: 159877 - DNA, 17 bp, synthetic construct
  source 1..17: mol_type = other DNA
cccgcctggatctctga

SEQ ID NO: 159878 - DNA, 17 bp, synthetic construct
  source 1..17: mol_type = other DNA
gcccgcctggatctctg

SEQ ID NO: 159879 - DNA, 17 bp, synthetic construct
  source 1..17: mol_type = other DNA
tgcccgcctggatctct

SEQ ID NO: 159880 - DNA, 17 bp, synthetic construct
  source 1..17: mol_type = other DNA
ctgcccgcctggatctc

SEQ ID NO: 159881 - DNA, 17 bp, synthetic construct
  source 1..17: mol_type = other DNA
cctgcccgcctggatct

SEQ ID NO: 159882 - DNA, 17 bp, synthetic construct
  source 1..17: mol_type = other DNA
ccctgcccgcctggatc

SEQ ID NO: 159883 - DNA, 17 bp, synthetic construct
  source 1..17: mol_type = other DNA
gccctgcccgcctggat

SEQ ID NO: 159884 - DNA, 17 bp, synthetic construct
  source 1..17: mol_type = other DNA
ggccctgcccgcctgga

SEQ ID NO: 159885 - DNA, 17 bp, synthetic construct
  source 1..17: mol_type = other DNA
tggccctgcccgcctgg

SEQ ID NO: 159886 - DNA, 17 bp, synthetic construct
  source 1..17: mol_type = other DNA
gtggccctgcccgcctg

SEQ ID NO: 159887 - DNA, 17 bp, synthetic construct
  source 1..17: mol_type = other DNA
tgtggccctgcccgcct

SEQ ID NO: 159888 - DNA, 17 bp, synthetic construct
  source 1..17: mol_type = other DNA
gtgtggccctgcccgcc

SEQ ID NO: 159889 - DNA, 17 bp, synthetic construct
  source 1..17: mol_type = other DNA
agtgtggccctgcccgc

SEQ ID NO: 159890 - DNA, 17 bp, synthetic construct
  source 1..17: mol_type = other DNA
gagtgtggccctgcccg

SEQ ID NO: 159891 - DNA, 17 bp, synthetic construct
  source 1..17: mol_type = other DNA
ggagtgtggccctgccc

SEQ ID NO: 159892 - DNA, 17 bp, synthetic construct
  source 1..17: mol_type = other DNA
gggagtgtggccctgcc

SEQ ID NO: 159893 - DNA, 17 bp, synthetic construct
  source 1..17: mol_type = other DNA
agggagtgtggccctgc

SEQ ID NO: 159894 - DNA, 17 bp, synthetic construct
  source 1..17: mol_type = other DNA
cagggagtgtggccctg

SEQ ID NO: 159895 - DNA, 17 bp, synthetic construct
  source 1..17: mol_type = other DNA
acagggagtgtggccct

SEQ ID NO: 159896 - DNA, 17 bp, synthetic construct
  source 1..17: mol_type = other DNA
gacagggagtgtggccc

SEQ ID NO: 159897 - DNA, 17 bp, synthetic construct
  source 1..17: mol_type = other DNA
cgacagggagtgtggcc

SEQ ID NO: 159898 - DNA, 17 bp, synthetic construct
  source 1..17: mol_type = other DNA
tcgacagggagtgtggc

SEQ ID NO: 159899 - DNA, 17 bp, synthetic construct
  source 1..17: mol_type = other DNA
ctcgacagggagtgtgg

SEQ ID NO: 159900 - DNA, 17 bp, synthetic construct
  source 1..17: mol_type = other DNA
cctcgacagggagtgtg

SEQ ID NO: 159901 - DNA, 17 bp, synthetic construct
  source 1..17: mol_type = other DNA
ccctcgacagggagtgt

SEQ ID NO: 159902 - DNA, 17 bp, synthetic construct
  source 1..17: mol_type = other DNA
accctcgacagggagtg

SEQ ID NO: 159903 - DNA, 17 bp, synthetic construct
  source 1..17: mol_type = other DNA
gaccctcgacagggagt

SEQ ID NO: 159904 - DNA, 17 bp, synthetic construct
  source 1..17: mol_type = other DNA
agaccctcgacagggag

SEQ ID NO: 159905 - DNA, 17 bp, synthetic construct
  source 1..17: mol_type = other DNA
cagaccctcgacaggga

SEQ ID NO: 159906 - DNA, 17 bp, synthetic construct
  source 1..17: mol_type = other DNA
ccagaccctcgacaggg

SEQ ID NO: 159907 - DNA, 17 bp, synthetic construct
  source 1..17: mol_type = other DNA
cccagaccctcgacagg

SEQ ID NO: 159908 - DNA, 17 bp, synthetic construct
  source 1..17: mol_type = other DNA
ccccagaccctcgacag

SEQ ID NO: 159909 - DNA, 17 bp, synthetic construct
  source 1..17: mol_type = other DNA
tccccagaccctcgaca

SEQ ID NO: 159910 - DNA, 17 bp, synthetic construct
  source 1..17: mol_type = other DNA
ctccccagaccctcgac

SEQ ID NO: 159911 - DNA, 17 bp, synthetic construct
  source 1..17: mol_type = other DNA
cctccccagaccctcga

SEQ ID NO: 159912 - DNA, 17 bp, synthetic construct
  source 1..17: mol_type = other DNA
acctccccagaccctcg

SEQ ID NO: 159913 - DNA, 17 bp, synthetic construct
  source 1..17: mol_type = other DNA
gacctccccagaccctc

SEQ ID NO: 159914 - DNA, 17 bp, synthetic construct
  source 1..17: mol_type = other DNA
ggacctccccagaccct

SEQ ID NO: 159915 - DNA, 17 bp, synthetic construct
  source 1..17: mol_type = other DNA
aggacctccccagaccc

SEQ ID NO: 159916 - DNA, 17 bp, synthetic construct
  source 1..17: mol_type = other DNA
aaggacctccccagacc

SEQ ID NO: 159917 - DNA, 17 bp, synthetic construct
  source 1..17: mol_type = other DNA
gaaggacctccccagac

SEQ ID NO: 159918 - DNA, 17 bp, synthetic construct
  source 1..17: mol_type = other DNA
ggaaggacctccccaga

SEQ ID NO: 159919 - DNA, 17 bp, synthetic construct
  source 1..17: mol_type = other DNA
aggaaggacctccccag

SEQ ID NO: 159920 - DNA, 17 bp, synthetic construct
  source 1..17: mol_type = other DNA
caggaaggacctcccca

SEQ ID NO: 159921 - DNA, 17 bp, synthetic construct
  source 1..17: mol_type = other DNA
gcaggaaggacctcccc

SEQ ID NO: 159922 - DNA, 17 bp, synthetic construct
  source 1..17: mol_type = other DNA
ggcaggaaggacctccc

SEQ ID NO: 159923 - DNA, 17 bp, synthetic construct
  source 1..17: mol_type = other DNA
aggcaggaaggacctcc

SEQ ID NO: 159924 - DNA, 17 bp, synthetic construct
  source 1..17: mol_type = other DNA
gaggcaggaaggacctc

SEQ ID NO: 159925 - DNA, 17 bp, synthetic construct
  source 1..17: mol_type = other DNA
agaggcaggaaggacct

SEQ ID NO: 159926 - DNA, 17 bp, synthetic construct
  source 1..17: mol_type = other DNA
gagaggcaggaaggacc

SEQ ID NO: 159927 - DNA, 17 bp, synthetic construct
  source 1..17: mol_type = other DNA
ggagaggcaggaaggac

SEQ ID NO: 159928 - DNA, 17 bp, synthetic construct
  source 1..17: mol_type = other DNA
gggagaggcaggaagga

SEQ ID NO: 159929 - DNA, 17 bp, synthetic construct
  source 1..17: mol_type = other DNA
tgggagaggcaggaagg

SEQ ID NO: 159930 - DNA, 17 bp, synthetic construct
  source 1..17: mol_type = other DNA
ctgggagaggcaggaag

SEQ ID NO: 159931 - DNA, 17 bp, synthetic construct
  source 1..17: mol_type = other DNA
gctgggagaggcaggaa

SEQ ID NO: 159932 - DNA, 17 bp, synthetic construct
  source 1..17: mol_type = other DNA
agctgggagaggcagga

SEQ ID NO: 159933 - DNA, 17 bp, synthetic construct
  source 1..17: mol_type = other DNA
aagctgggagaggcagg

SEQ ID NO: 159934 - DNA, 17 bp, synthetic construct
  source 1..17: mol_type = other DNA
gaagctgggagaggcag

SEQ ID NO: 159935 - DNA, 17 bp, synthetic construct
  source 1..17: mol_type = other DNA
tgaagctgggagaggca

SEQ ID NO: 159936 - DNA, 17 bp, synthetic construct
  source 1..17: mol_type = other DNA
gtgaagctgggagaggc

SEQ ID NO: 159937 - DNA, 17 bp, synthetic construct
  source 1..17: mol_type = other DNA
tgtgaagctgggagagg

SEQ ID NO: 159938 - DNA, 17 bp, synthetic construct
  source 1..17: mol_type = other DNA
ctgtgaagctgggagag

SEQ ID NO: 159939 - DNA, 17 bp, synthetic construct
  source 1..17: mol_type = other DNA
cctgtgaagctgggaga

SEQ ID NO: 159940 - DNA, 17 bp, synthetic construct
  source 1..17: mol_type = other DNA
gcctgtgaagctgggag

SEQ ID NO: 159941 - DNA, 17 bp, synthetic construct
  source 1..17: mol_type = other DNA
cgcctgtgaagctggga

SEQ ID NO: 159942 - DNA, 17 bp, synthetic construct
  source 1..17: mol_type = other DNA
ccgcctgtgaagctggg

SEQ ID NO: 159943 - DNA, 17 bp, synthetic construct
  source 1..17: mol_type = other DNA
gccgcctgtgaagctgg

SEQ ID NO: 159944 - DNA, 17 bp, synthetic construct
  source 1..17: mol_type = other DNA
tgccgcctgtgaagctg

SEQ ID NO: 159945 - DNA, 17 bp, synthetic construct
  source 1..17: mol_type = other DNA
ctgccgcctgtgaagct

SEQ ID NO: 159946 - DNA, 17 bp, synthetic construct
  source 1..17: mol_type = other DNA
cctgccgcctgtgaagc

SEQ ID NO: 159947 - DNA, 17 bp, synthetic construct
  source 1..17: mol_type = other DNA
gcctgccgcctgtgaag

SEQ ID NO: 159948 - DNA, 17 bp, synthetic construct
  source 1..17: mol_type = other DNA
cgcctgccgcctgtgaa

SEQ ID NO: 159949 - DNA, 17 bp, synthetic construct
  source 1..17: mol_type = other DNA
acgcctgccgcctgtga

SEQ ID NO: 159950 - DNA, 17 bp, synthetic construct
  source 1..17: mol_type = other DNA
gacgcctgccgcctgtg

SEQ ID NO: 159951 - DNA, 17 bp, synthetic construct
  source 1..17: mol_type = other DNA
ggacgcctgccgcctgt

SEQ ID NO: 159952 - DNA, 17 bp, synthetic construct
  source 1..17: mol_type = other DNA
gggacgcctgccgcctg

SEQ ID NO: 159953 - DNA, 17 bp, synthetic construct
  source 1..17: mol_type = other DNA
agggacgcctgccgcct

SEQ ID NO: 159954 - DNA, 17 bp, synthetic construct
  source 1..17: mol_type = other DNA
cagggacgcctgccgcc

SEQ ID NO: 159955 - DNA, 17 bp, synthetic construct
  source 1..17: mol_type = other DNA
ccagggacgcctgccgc

SEQ ID NO: 159956 - DNA, 17 bp, synthetic construct
  source 1..17: mol_type = other DNA
cccagggacgcctgccg

SEQ ID NO: 159957 - DNA, 17 bp, synthetic construct
  source 1..17: mol_type = other DNA
gcccagggacgcctgcc

SEQ ID NO: 159958 - DNA, 17 bp, synthetic construct
  source 1..17: mol_type = other DNA
agcccagggacgcctgc

SEQ ID NO: 159959 - DNA, 17 bp, synthetic construct
  source 1..17: mol_type = other DNA
cagcccagggacgcctg

SEQ ID NO: 159960 - DNA, 17 bp, synthetic construct
  source 1..17: mol_type = other DNA
acagcccagggacgcct

SEQ ID NO: 159961 - DNA, 17 bp, synthetic construct
  source 1..17: mol_type = other DNA
cacagcccagggacgcc

SEQ ID NO: 159962 - DNA, 17 bp, synthetic construct
  source 1..17: mol_type = other DNA
ccacagcccagggacgc

SEQ ID NO: 159963 - DNA, 17 bp, synthetic construct
  source 1..17: mol_type = other DNA
gccacagcccagggacg

SEQ ID NO: 159964 - DNA, 17 bp, synthetic construct
  source 1..17: mol_type = other DNA
agccacagcccagggac

SEQ ID NO: 159965 - DNA, 17 bp, synthetic construct
  source 1..17: mol_type = other DNA
cagccacagcccaggga

SEQ ID NO: 159966 - DNA, 17 bp, synthetic construct
  source 1..17: mol_type = other DNA
gcagccacagcccaggg

SEQ ID NO: 159967 - DNA, 17 bp, synthetic construct
  source 1..17: mol_type = other DNA
ggcagccacagcccagg

SEQ ID NO: 159968 - DNA, 17 bp, synthetic construct
  source 1..17: mol_type = other DNA
aggcagccacagcccag

SEQ ID NO: 159969 - DNA, 17 bp, synthetic construct
  source 1..17: mol_type = other DNA
caggcagccacagccca

SEQ ID NO: 159970 - DNA, 17 bp, synthetic construct
  source 1..17: mol_type = other DNA
acaggcagccacagccc

SEQ ID NO: 159971 - DNA, 17 bp, synthetic construct
  source 1..17: mol_type = other DNA
cacaggcagccacagcc

SEQ ID NO: 159972 - DNA, 17 bp, synthetic construct
  source 1..17: mol_type = other DNA
ccacaggcagccacagc

SEQ ID NO: 159973 - DNA, 17 bp, synthetic construct
  source 1..17: mol_type = other DNA
gccacaggcagccacag

SEQ ID NO: 159974 - DNA, 17 bp, synthetic construct
  source 1..17: mol_type = other DNA
ggccacaggcagccaca

SEQ ID NO: 159975 - DNA, 17 bp, synthetic construct
  source 1..17: mol_type = other DNA
aggccacaggcagccac

SEQ ID NO: 159976 - DNA, 17 bp, synthetic construct
  source 1..17: mol_type = other DNA
gaggccacaggcagcca

SEQ ID NO: 159977 - DNA, 17 bp, synthetic construct
  source 1..17: mol_type = other DNA
ggaggccacaggcagcc

SEQ ID NO: 159978 - DNA, 17 bp, synthetic construct
  source 1..17: mol_type = other DNA
gggaggccacaggcagc

SEQ ID NO: 159979 - DNA, 17 bp, synthetic construct
  source 1..17: mol_type = other DNA
cgggaggccacaggcag

SEQ ID NO: 159980 - DNA, 17 bp, synthetic construct
  source 1..17: mol_type = other DNA
gcgggaggccacaggca

SEQ ID NO: 159981 - DNA, 17 bp, synthetic construct
  source 1..17: mol_type = other DNA
agcgggaggccacaggc

SEQ ID NO: 159982 - DNA, 17 bp, synthetic construct
  source 1..17: mol_type = other DNA
cagcgggaggccacagg

SEQ ID NO: 159983 - DNA, 17 bp, synthetic construct
  source 1..17: mol_type = other DNA
acagcgggaggccacag

SEQ ID NO: 159984 - DNA, 17 bp, synthetic construct
  source 1..17: mol_type = other DNA
cacagcgggaggccaca

SEQ ID NO: 159985 - DNA, 17 bp, synthetic construct
  source 1..17: mol_type = other DNA
acacagcgggaggccac

SEQ ID NO: 159986 - DNA, 17 bp, synthetic construct
  source 1..17: mol_type = other DNA
gacacagcgggaggcca

SEQ ID NO: 159987 - DNA, 17 bp, synthetic construct
  source 1..17: mol_type = other DNA
agacacagcgggaggcc

SEQ ID NO: 159988 - DNA, 17 bp, synthetic construct
  source 1..17: mol_type = other DNA
cagacacagcgggaggc

SEQ ID NO: 159989 - DNA, 17 bp, synthetic construct
  source 1..17: mol_type = other DNA
gcagacacagcgggagg

SEQ ID NO: 159990 - DNA, 17 bp, synthetic construct
  source 1..17: mol_type = other DNA
cgcagacacagcgggag

SEQ ID NO: 159991 - DNA, 17 bp, synthetic construct
  source 1..17: mol_type = other DNA
acgcagacacagcggga

SEQ ID NO: 159992 - DNA, 17 bp, synthetic construct
  source 1..17: mol_type = other DNA
gacgcagacacagcggg

SEQ ID NO: 159993 - DNA, 17 bp, synthetic construct
  source 1..17: mol_type = other DNA
agacgcagacacagcgg

SEQ ID NO: 159994 - DNA, 17 bp, synthetic construct
  source 1..17: mol_type = other DNA
cagacgcagacacagcg

SEQ ID NO: 159995 - DNA, 17 bp, synthetic construct
  source 1..17: mol_type = other DNA
acagacgcagacacagc

SEQ ID NO: 159996 - DNA, 17 bp, synthetic construct
  source 1..17: mol_type = other DNA
gacagacgcagacacag

SEQ ID NO: 159997 - DNA, 17 bp, synthetic construct
  source 1..17: mol_type = other DNA
agacagacgcagacaca

SEQ ID NO: 159998 - DNA, 17 bp, synthetic construct
  source 1..17: mol_type = other DNA
aagacagacgcagacac

SEQ ID NO: 159999 - DNA, 17 bp, synthetic construct
  source 1..17: mol_type = other DNA
gaagacagacgcagaca

SEQ ID NO: 160000 - DNA, 17 bp, synthetic construct
  source 1..17: mol_type = other DNA
agaagacagacgcagac

SEQ ID NO: 160001 - DNA, 17 bp, synthetic construct
  source 1..17: mol_type = other DNA
gagaagacagacgcaga

SEQ ID NO: 160002 - DNA, 17 bp, synthetic construct
  source 1..17: mol_type = other DNA
agagaagacagacgcag

SEQ ID NO: 160003 - DNA, 17 bp, synthetic construct
  source 1..17: mol_type = other DNA
gagagaagacagacgca

SEQ ID NO: 160004 - DNA, 17 bp, synthetic construct
  source 1..17: mol_type = other DNA
agagagaagacagacgc

SEQ ID NO: 160005 - DNA, 17 bp, synthetic construct
  source 1..17: mol_type = other DNA
cagagagaagacagacg

SEQ ID NO: 160006 - DNA, 17 bp, synthetic construct
  source 1..17: mol_type = other DNA
acagagagaagacagac

SEQ ID NO: 160007 - DNA, 17 bp, synthetic construct
  source 1..17: mol_type = other DNA
aacagagagaagacaga

SEQ ID NO: 160008 - DNA, 17 bp, synthetic construct
  source 1..17: mol_type = other DNA
aaacagagagaagacag

SEQ ID NO: 160009 - DNA, 17 bp, synthetic construct
  source 1..17: mol_type = other DNA
aaaacagagagaagaca

SEQ ID NO: 160010 - DNA, 17 bp, synthetic construct
  source 1..17: mol_type = other DNA
aaaaacagagagaagac

SEQ ID NO: 160011 - DNA, 17 bp, synthetic construct
  source 1..17: mol_type = other DNA
gaaaaacagagagaaga

SEQ ID NO: 160012 - DNA, 17 bp, synthetic construct
  source 1..17: mol_type = other DNA
agaaaaacagagagaag

SEQ ID NO: 160013 - DNA, 17 bp, synthetic construct
  source 1..17: mol_type = other DNA
gagaaaaacagagagaa

SEQ ID NO: 160014 - DNA, 17 bp, synthetic construct
  source 1..17: mol_type = other DNA
agagaaaaacagagaga

SEQ ID NO: 160015 - DNA, 17 bp, synthetic construct
  source 1..17: mol_type = other DNA
aagagaaaaacagagag

SEQ ID NO: 160016 - DNA, 17 bp, synthetic construct
  source 1..17: mol_type = other DNA
gaagagaaaaacagaga

SEQ ID NO: 160017 - DNA, 17 bp, synthetic construct
  source 1..17: mol_type = other DNA
agaagagaaaaacagag

SEQ ID NO: 160018 - DNA, 17 bp, synthetic construct
  source 1..17: mol_type = other DNA
cagaagagaaaaacaga

SEQ ID NO: 160019 - DNA, 17 bp, synthetic construct
  source 1..17: mol_type = other DNA
acagaagagaaaaacag

SEQ ID NO: 160020 - DNA, 17 bp, synthetic construct
  source 1..17: mol_type = other DNA
gacagaagagaaaaaca

SEQ ID NO: 160021 - DNA, 17 bp, synthetic construct
  source 1..17: mol_type = other DNA
agacagaagagaaaaac

SEQ ID NO: 160022 - DNA, 17 bp, synthetic construct
  source 1..17: mol_type = other DNA
gagacagaagagaaaaa

SEQ ID NO: 160023 - DNA, 17 bp, synthetic construct
  source 1..17: mol_type = other DNA
agagacagaagagaaaa

SEQ ID NO: 160024 - DNA, 17 bp, synthetic construct
  source 1..17: mol_type = other DNA
aagagacagaagagaaa

SEQ ID NO: 160025 - DNA, 17 bp, synthetic construct
  source 1..17: mol_type = other DNA
caagagacagaagagaa

SEQ ID NO: 160026 - DNA, 17 bp, synthetic construct
  source 1..17: mol_type = other DNA
acaagagacagaagaga

SEQ ID NO: 160027 - DNA, 17 bp, synthetic construct
  source 1..17: mol_type = other DNA
tacaagagacagaagag

SEQ ID NO: 160028 - DNA, 17 bp, synthetic construct
  source 1..17: mol_type = other DNA
ttacaagagacagaaga

SEQ ID NO: 160029 - DNA, 17 bp, synthetic construct
  source 1..17: mol_type = other DNA
cttacaagagacagaag

SEQ ID NO: 160030 - DNA, 17 bp, synthetic construct
  source 1..17: mol_type = other DNA
ccttacaagagacagaa

SEQ ID NO: 160031 - DNA, 17 bp, synthetic construct
  source 1..17: mol_type = other DNA
tccttacaagagacaga

SEQ ID NO: 160032 - DNA, 17 bp, synthetic construct
  source 1..17: mol_type = other DNA
gtccttacaagagacag

SEQ ID NO: 160033 - DNA, 17 bp, synthetic construct
  source 1..17: mol_type = other DNA
tgtccttacaagagaca

SEQ ID NO: 160034 - DNA, 17 bp, synthetic construct
  source 1..17: mol_type = other DNA
gtgtccttacaagagac

SEQ ID NO: 160035 - DNA, 17 bp, synthetic construct
  source 1..17: mol_type = other DNA
agtgtccttacaagaga

SEQ ID NO: 160036 - DNA, 17 bp, synthetic construct
  source 1..17: mol_type = other DNA
cagtgtccttacaagag

SEQ ID NO: 160037 - DNA, 17 bp, synthetic construct
  source 1..17: mol_type = other DNA
ccagtgtccttacaaga

SEQ ID NO: 160038 - DNA, 17 bp, synthetic construct
  source 1..17: mol_type = other DNA
accagtgtccttacaag

SEQ ID NO: 160039 - DNA, 17 bp, synthetic construct
  source 1..17: mol_type = other DNA
gaccagtgtccttacaa

SEQ ID NO: 160040 - DNA, 17 bp, synthetic construct
  source 1..17: mol_type = other DNA
tgaccagtgtccttaca

SEQ ID NO: 160041 - DNA, 17 bp, synthetic construct
  source 1..17: mol_type = other DNA
atgaccagtgtccttac

SEQ ID NO: 160042 - DNA, 17 bp, synthetic construct
  source 1..17: mol_type = other DNA
aatgaccagtgtcctta

SEQ ID NO: 160043 - DNA, 17 bp, synthetic construct
  source 1..17: mol_type = other DNA
caatgaccagtgtcctt

SEQ ID NO: 160044 - DNA, 17 bp, synthetic construct
  source 1..17: mol_type = other DNA
ccaatgaccagtgtcct

SEQ ID NO: 160045 - DNA, 17 bp, synthetic construct
  source 1..17: mol_type = other DNA
tccaatgaccagtgtcc

SEQ ID NO: 160046 - DNA, 17 bp, synthetic construct
  source 1..17: mol_type = other DNA
atccaatgaccagtgtc

SEQ ID NO: 160047 - DNA, 17 bp, synthetic construct
  source 1..17: mol_type = other DNA
aatccaatgaccagtgt

SEQ ID NO: 160048 - DNA, 17 bp, synthetic construct
  source 1..17: mol_type = other DNA
aaatccaatgaccagtg

SEQ ID NO: 160049 - DNA, 17 bp, synthetic construct
  source 1..17: mol_type = other DNA
taaatccaatgaccagt

SEQ ID NO: 160050 - DNA, 17 bp, synthetic construct
  source 1..17: mol_type = other DNA
ctaaatccaatgaccag

SEQ ID NO: 160051 - DNA, 17 bp, synthetic construct
  source 1..17: mol_type = other DNA
cctaaatccaatgacca

SEQ ID NO: 160052 - DNA, 17 bp, synthetic construct
  source 1..17: mol_type = other DNA
ccctaaatccaatgacc

SEQ ID NO: 160053 - DNA, 17 bp, synthetic construct
  source 1..17: mol_type = other DNA
gccctaaatccaatgac

SEQ ID NO: 160054 - DNA, 17 bp, synthetic construct
  source 1..17: mol_type = other DNA
ggccctaaatccaatga

SEQ ID NO: 160055 - DNA, 17 bp, synthetic construct
  source 1..17: mol_type = other DNA
gggccctaaatccaatg

SEQ ID NO: 160056 - DNA, 17 bp, synthetic construct
  source 1..17: mol_type = other DNA
ggggccctaaatccaat

SEQ ID NO: 160057 - DNA, 17 bp, synthetic construct
  source 1..17: mol_type = other DNA
gggggccctaaatccaa

SEQ ID NO: 160058 - DNA, 17 bp, synthetic construct
  source 1..17: mol_type = other DNA
ggggggccctaaatcca

SEQ ID NO: 160059 - DNA, 17 bp, synthetic construct
  source 1..17: mol_type = other DNA
gggggggccctaaatcc

SEQ ID NO: 160060 - DNA, 17 bp, synthetic construct
  source 1..17: mol_type = other DNA
ggggggggccctaaatc

SEQ ID NO: 160061 - DNA, 17 bp, synthetic construct
  source 1..17: mol_type = other DNA
gggggggggccctaaat

SEQ ID NO: 160062 - DNA, 17 bp, synthetic construct
  source 1..17: mol_type = other DNA
cgggggggggccctaaa

SEQ ID NO: 160063 - DNA, 17 bp, synthetic construct
  source 1..17: mol_type = other DNA
gcgggggggggccctaa

SEQ ID NO: 160064 - DNA, 17 bp, synthetic construct
  source 1..17: mol_type = other DNA
ggcgggggggggcccta

SEQ ID NO: 160065 - DNA, 17 bp, synthetic construct
  source 1..17: mol_type = other DNA
gggcgggggggggccct

SEQ ID NO: 160066 - DNA, 17 bp, synthetic construct
  source 1..17: mol_type = other DNA
ggggcgggggggggccc

SEQ ID NO: 160067 - DNA, 17 bp, synthetic construct
  source 1..17: mol_type = other DNA
gggggcgggggggggcc

SEQ ID NO: 160068 - DNA, 17 bp, synthetic construct
  source 1..17: mol_type = other DNA
tgggggcgggggggggc

SEQ ID NO: 160069 - DNA, 17 bp, synthetic construct
  source 1..17: mol_type = other DNA
gtgggggcggggggggg

SEQ ID NO: 160070 - DNA, 17 bp, synthetic construct
  source 1..17: mol_type = other DNA
cgtgggggcgggggggg

SEQ ID NO: 160071 - DNA, 17 bp, synthetic construct
  source 1..17: mol_type = other DNA
acgtgggggcggggggg

SEQ ID NO: 160072 - DNA, 17 bp, synthetic construct
  source 1..17: mol_type = other DNA
tacgtgggggcgggggg

SEQ ID NO: 160073 - DNA, 17 bp, synthetic construct
  source 1..17: mol_type = other DNA
ctacgtgggggcggggg

SEQ ID NO: 160074 - DNA, 17 bp, synthetic construct
  source 1..17: mol_type = other DNA
actacgtgggggcgggg

SEQ ID NO: 160075 - DNA, 17 bp, synthetic construct
  source 1..17: mol_type = other DNA
gactacgtgggggcggg

SEQ ID NO: 160076 - DNA, 17 bp, synthetic construct
  source 1..17: mol_type = other DNA
ggactacgtgggggcgg

SEQ ID NO: 160077 - DNA, 17 bp, synthetic construct
  source 1..17: mol_type = other DNA
tggactacgtgggggcg

SEQ ID NO: 160078 - DNA, 17 bp, synthetic construct
  source 1..17: mol_type = other DNA
ctggactacgtgggggc

SEQ ID NO: 160079 - DNA, 17 bp, synthetic construct
  source 1..17: mol_type = other DNA
cctggactacgtggggg

SEQ ID NO: 160080 - DNA, 17 bp, synthetic construct
  source 1..17: mol_type = other DNA
tcctggactacgtgggg

SEQ ID NO: 160081 - DNA, 17 bp, synthetic construct
  source 1..17: mol_type = other DNA
atcctggactacgtggg

SEQ ID NO: 160082 - DNA, 17 bp, synthetic construct
  source 1..17: mol_type = other DNA
catcctggactacgtgg

SEQ ID NO: 160083 - DNA, 17 bp, synthetic construct
  source 1..17: mol_type = other DNA
tcatcctggactacgtg

SEQ ID NO: 160084 - DNA, 17 bp, synthetic construct
  source 1..17: mol_type = other DNA
atcatcctggactacgt

SEQ ID NO: 160085 - DNA, 17 bp, synthetic construct
  source 1..17: mol_type = other DNA
gatcatcctggactacg

SEQ ID NO: 160086 - DNA, 17 bp, synthetic construct
  source 1..17: mol_type = other DNA
agatcatcctggactac

SEQ ID NO: 160087 - DNA, 17 bp, synthetic construct
  source 1..17: mol_type = other DNA
gagatcatcctggacta

SEQ ID NO: 160088 - DNA, 17 bp, synthetic construct
  source 1..17: mol_type = other DNA
tgagatcatcctggact

SEQ ID NO: 160089 - DNA, 17 bp, synthetic construct
  source 1..17: mol_type = other DNA
atgagatcatcctggac

SEQ ID NO: 160090 - DNA, 17 bp, synthetic construct
  source 1..17: mol_type = other DNA
aatgagatcatcctgga

SEQ ID NO: 160091 - DNA, 17 bp, synthetic construct
  source 1..17: mol_type = other DNA
aaatgagatcatcctgg

SEQ ID NO: 160092 - DNA, 17 bp, synthetic construct
  source 1..17: mol_type = other DNA
gaaatgagatcatcctg

SEQ ID NO: 160093 - DNA, 17 bp, synthetic construct
  source 1..17: mol_type = other DNA
tgaaatgagatcatcct

SEQ ID NO: 160094 - DNA, 17 bp, synthetic construct
  source 1..17: mol_type = other DNA
ttgaaatgagatcatcc

SEQ ID NO: 160095 - DNA, 17 bp, synthetic construct
  source 1..17: mol_type = other DNA
cttgaaatgagatcatc

SEQ ID NO: 160096 - DNA, 17 bp, synthetic construct
  source 1..17: mol_type = other DNA
tcttgaaatgagatcat

SEQ ID NO: 160097 - DNA, 17 bp, synthetic construct
  source 1..17: mol_type = other DNA
atcttgaaatgagatca

SEQ ID NO: 160098 - DNA, 17 bp, synthetic construct
  source 1..17: mol_type = other DNA
catcttgaaatgagatc

SEQ ID NO: 160099 - DNA, 17 bp, synthetic construct
  source 1..17: mol_type = other DNA
gcatcttgaaatgagat

SEQ ID NO: 160100 - DNA, 17 bp, synthetic construct
  source 1..17: mol_type = other DNA
agcatcttgaaatgaga

SEQ ID NO: 160101 - DNA, 17 bp, synthetic construct
  source 1..17: mol_type = other DNA
aagcatcttgaaatgag

SEQ ID NO: 160102 - DNA, 17 bp, synthetic construct
  source 1..17: mol_type = other DNA
gaagcatcttgaaatga

SEQ ID NO: 160103 - DNA, 17 bp, synthetic construct
  source 1..17: mol_type = other DNA
tgaagcatcttgaaatg

SEQ ID NO: 160104 - DNA, 17 bp, synthetic construct
  source 1..17: mol_type = other DNA
gtgaagcatcttgaaat

SEQ ID NO: 160105 - DNA, 17 bp, synthetic construct
  source 1..17: mol_type = other DNA
agtgaagcatcttgaaa

SEQ ID NO: 160106 - DNA, 17 bp, synthetic construct
  source 1..17: mol_type = other DNA
aagtgaagcatcttgaa

SEQ ID NO: 160107 - DNA, 17 bp, synthetic construct
  source 1..17: mol_type = other DNA
taagtgaagcatcttga

SEQ ID NO: 160108 - DNA, 17 bp, synthetic construct
  source 1..17: mol_type = other DNA
ttaagtgaagcatcttg

SEQ ID NO: 160109 - DNA, 17 bp, synthetic construct
  source 1..17: mol_type = other DNA
attaagtgaagcatctt

SEQ ID NO: 160110 - DNA, 17 bp, synthetic construct
  source 1..17: mol_type = other DNA
gattaagtgaagcatct

SEQ ID NO: 160111 - DNA, 17 bp, synthetic construct
  source 1..17: mol_type = other DNA
ggattaagtgaagcatc

SEQ ID NO: 160112 - DNA, 17 bp, synthetic construct
  source 1..17: mol_type = other DNA
gggattaagtgaagcat

SEQ ID NO: 160113 - DNA, 17 bp, synthetic construct
  source 1..17: mol_type = other DNA
cgggattaagtgaagca

SEQ ID NO: 160114 - DNA, 17 bp, synthetic construct
  source 1..17: mol_type = other DNA
acgggattaagtgaagc

SEQ ID NO: 160115 - DNA, 17 bp, synthetic construct
  source 1..17: mol_type = other DNA
gacgggattaagtgaag

SEQ ID NO: 160116 - DNA, 17 bp, synthetic construct
  source 1..17: mol_type = other DNA
agacgggattaagtgaa

SEQ ID NO: 160117 - DNA, 17 bp, synthetic construct
  source 1..17: mol_type = other DNA
cagacgggattaagtga

SEQ ID NO: 160118 - DNA, 17 bp, synthetic construct
  source 1..17: mol_type = other DNA
gcagacgggattaagtg

SEQ ID NO: 160119 - DNA, 17 bp, synthetic construct
  source 1..17: mol_type = other DNA
tgcagacgggattaagt

SEQ ID NO: 160120 - DNA, 17 bp, synthetic construct
  source 1..17: mol_type = other DNA
ctgcagacgggattaag

SEQ ID NO: 160121 - DNA, 17 bp, synthetic construct
  source 1..17: mol_type = other DNA
tctgcagacgggattaa

SEQ ID NO: 160122 - DNA, 17 bp, synthetic construct
  source 1..17: mol_type = other DNA
ctctgcagacgggatta

SEQ ID NO: 160123 - DNA, 17 bp, synthetic construct
  source 1..17: mol_type = other DNA
tctctgcagacgggatt

SEQ ID NO: 160124 - DNA, 17 bp, synthetic construct
  source 1..17: mol_type = other DNA
atctctgcagacgggat

SEQ ID NO: 160125 - DNA, 17 bp, synthetic construct
  source 1..17: mol_type = other DNA
catctctgcagacggga

SEQ ID NO: 160126 - DNA, 17 bp, synthetic construct
  source 1..17: mol_type = other DNA
gcatctctgcagacggg

SEQ ID NO: 160127 - DNA, 17 bp, synthetic construct
  source 1..17: mol_type = other DNA
agcatctctgcagacgg

SEQ ID NO: 160128 - DNA, 17 bp, synthetic construct
  source 1..17: mol_type = other DNA
aagcatctctgcagacg

SEQ ID NO: 160129 - DNA, 17 bp, synthetic construct
  source 1..17: mol_type = other DNA
aaagcatctctgcagac

SEQ ID NO: 160130 - DNA, 17 bp, synthetic construct
  source 1..17: mol_type = other DNA
gaaagcatctctgcaga

SEQ ID NO: 160131 - DNA, 17 bp, synthetic construct
  source 1..17: mol_type = other DNA
agaaagcatctctgcag

SEQ ID NO: 160132 - DNA, 17 bp, synthetic construct
  source 1..17: mol_type = other DNA
gagaaagcatctctgca

SEQ ID NO: 160133 - DNA, 17 bp, synthetic construct
  source 1..17: mol_type = other DNA
ggagaaagcatctctgc

SEQ ID NO: 160134 - DNA, 17 bp, synthetic construct
  source 1..17: mol_type = other DNA
gggagaaagcatctctg

SEQ ID NO: 160135 - DNA, 17 bp, synthetic construct
  source 1..17: mol_type = other DNA
tgggagaaagcatctct

SEQ ID NO: 160136 - DNA, 17 bp, synthetic construct
  source 1..17: mol_type = other DNA
ctgggagaaagcatctc

SEQ ID NO: 160137 - DNA, 17 bp, synthetic construct
  source 1..17: mol_type = other DNA
actgggagaaagcatct

SEQ ID NO: 160138 - DNA, 17 bp, synthetic construct
  source 1..17: mol_type = other DNA
cactgggagaaagcatc

SEQ ID NO: 160139 - DNA, 17 bp, synthetic construct
  source 1..17: mol_type = other DNA
tcactgggagaaagcat

SEQ ID NO: 160140 - DNA, 17 bp, synthetic construct
  source 1..17: mol_type = other DNA
ctcactgggagaaagca

SEQ ID NO: 160141 - DNA, 17 bp, synthetic construct
  source 1..17: mol_type = other DNA
cctcactgggagaaagc

SEQ ID NO: 160142 - DNA, 17 bp, synthetic construct
  source 1..17: mol_type = other DNA
ccctcactgggagaaag

SEQ ID NO: 160143 - DNA, 17 bp, synthetic construct
  source 1..17: mol_type = other DNA
gccctcactgggagaaa

SEQ ID NO: 160144 - DNA, 17 bp, synthetic construct
  source 1..17: mol_type = other DNA
ggccctcactgggagaa

SEQ ID NO: 160145 - DNA, 17 bp, synthetic construct
  source 1..17: mol_type = other DNA
gggccctcactgggaga

SEQ ID NO: 160146 - DNA, 17 bp, synthetic construct
  source 1..17: mol_type = other DNA
cgggccctcactgggag

SEQ ID NO: 160147 - DNA, 17 bp, synthetic construct
  source 1..17: mol_type = other DNA
ccgggccctcactggga

SEQ ID NO: 160148 - DNA, 17 bp, synthetic construct
  source 1..17: mol_type = other DNA
cccgggccctcactggg

SEQ ID NO: 160149 - DNA, 17 bp, synthetic construct
  source 1..17: mol_type = other DNA
gcccgggccctcactgg

SEQ ID NO: 160150 - DNA, 17 bp, synthetic construct
  source 1..17: mol_type = other DNA
agcccgggccctcactg

SEQ ID NO: 160151 - DNA, 17 bp, synthetic construct
  source 1..17: mol_type = other DNA
cagcccgggccctcact

SEQ ID NO: 160152 - DNA, 17 bp, synthetic construct
  source 1..17: mol_type = other DNA
tcagcccgggccctcac

SEQ ID NO: 160153 - DNA, 17 bp, synthetic construct
  source 1..17: mol_type = other DNA
ctcagcccgggccctca

SEQ ID NO: 160154 - DNA, 17 bp, synthetic construct
  source 1..17: mol_type = other DNA
cctcagcccgggccctc

SEQ ID NO: 160155 - DNA, 17 bp, synthetic construct
  source 1..17: mol_type = other DNA
acctcagcccgggccct

SEQ ID NO: 160156 - DNA, 17 bp, synthetic construct
  source 1..17: mol_type = other DNA
aacctcagcccgggccc

SEQ ID NO: 160157 - DNA, 17 bp, synthetic construct
  source 1..17: mol_type = other DNA
gaacctcagcccgggcc

SEQ ID NO: 160158 - DNA, 17 bp, synthetic construct
  source 1..17: mol_type = other DNA
agaacctcagcccgggc

SEQ ID NO: 160159 - DNA, 17 bp, synthetic construct
  source 1..17: mol_type = other DNA
cagaacctcagcccggg

SEQ ID NO: 160160 - DNA, 17 bp, synthetic construct
  source 1..17: mol_type = other DNA
ccagaacctcagcccgg

SEQ ID NO: 160161 - DNA, 17 bp, synthetic construct
  source 1..17: mol_type = other DNA
cccagaacctcagcccg

SEQ ID NO: 160162 - DNA, 17 bp, synthetic construct
  source 1..17: mol_type = other DNA
tcccagaacctcagccc

SEQ ID NO: 160163 - DNA, 17 bp, synthetic construct
  source 1..17: mol_type = other DNA
ctcccagaacctcagcc

SEQ ID NO: 160164 - DNA, 17 bp, synthetic construct
  source 1..17: mol_type = other DNA
actcccagaacctcagc

SEQ ID NO: 160165 - DNA, 17 bp, synthetic construct
  source 1..17: mol_type = other DNA
aactcccagaacctcag

SEQ ID NO: 160166 - DNA, 17 bp, synthetic construct
  source 1..17: mol_type = other DNA
gaactcccagaacctca

SEQ ID NO: 160167 - DNA, 17 bp, synthetic construct
  source 1..17: mol_type = other DNA
cgaactcccagaacctc

SEQ ID NO: 160168 - DNA, 17 bp, synthetic construct
  source 1..17: mol_type = other DNA
gcgaactcccagaacct

SEQ ID NO: 160169 - DNA, 17 bp, synthetic construct
  source 1..17: mol_type = other DNA
tgcgaactcccagaacc

SEQ ID NO: 160170 - DNA, 17 bp, synthetic construct
  source 1..17: mol_type = other DNA
atgcgaactcccagaac

SEQ ID NO: 160171 - DNA, 17 bp, synthetic construct
  source 1..17: mol_type = other DNA
catgcgaactcccagaa

SEQ ID NO: 160172 - DNA, 17 bp, synthetic construct
  source 1..17: mol_type = other DNA
acatgcgaactcccaga

SEQ ID NO: 160173 - DNA, 17 bp, synthetic construct
  source 1..17: mol_type = other DNA
cacatgcgaactcccag

SEQ ID NO: 160174 - DNA, 17 bp, synthetic construct
  source 1..17: mol_type = other DNA
ccacatgcgaactccca

SEQ ID NO: 160175 - DNA, 17 bp, synthetic construct
  source 1..17: mol_type = other DNA
tccacatgcgaactccc

SEQ ID NO: 160176 - DNA, 17 bp, synthetic construct
  source 1..17: mol_type = other DNA
gtccacatgcgaactcc

SEQ ID NO: 160177 - DNA, 17 bp, synthetic construct
  source 1..17: mol_type = other DNA
tgtccacatgcgaactc

SEQ ID NO: 160178 - DNA, 17 bp, synthetic construct
  source 1..17: mol_type = other DNA
ctgtccacatgcgaact

SEQ ID NO: 160179 - DNA, 17 bp, synthetic construct
  source 1..17: mol_type = other DNA
cctgtccacatgcgaac

SEQ ID NO: 160180 - DNA, 17 bp, synthetic construct
  source 1..17: mol_type = other DNA
gcctgtccacatgcgaa

SEQ ID NO: 160181 - DNA, 17 bp, synthetic construct
  source 1..17: mol_type = other DNA
tgcctgtccacatgcga

SEQ ID NO: 160182 - DNA, 17 bp, synthetic construct
  source 1..17: mol_type = other DNA
atgcctgtccacatgcg

SEQ ID NO: 160183 - DNA, 17 bp, synthetic construct
  source 1..17: mol_type = other DNA
aatgcctgtccacatgc

SEQ ID NO: 160184 - DNA, 17 bp, synthetic construct
  source 1..17: mol_type = other DNA
aaatgcctgtccacatg

SEQ ID NO: 160185 - DNA, 17 bp, synthetic construct
  source 1..17: mol_type = other DNA
aaaatgcctgtccacat

SEQ ID NO: 160186 - DNA, 17 bp, synthetic construct
  source 1..17: mol_type = other DNA
gaaaatgcctgtccaca

SEQ ID NO: 160187 - DNA, 17 bp, synthetic construct
  source 1..17: mol_type = other DNA
tgaaaatgcctgtccac

SEQ ID NO: 160188 - DNA, 17 bp, synthetic construct
  source 1..17: mol_type = other DNA
ctgaaaatgcctgtcca

SEQ ID NO: 160189 - DNA, 17 bp, synthetic construct
  source 1..17: mol_type = other DNA
cctgaaaatgcctgtcc

SEQ ID NO: 160190 - DNA, 17 bp, synthetic construct
  source 1..17: mol_type = other DNA
tcctgaaaatgcctgtc

SEQ ID NO: 160191 - DNA, 17 bp, synthetic construct
  source 1..17: mol_type = other DNA
ctcctgaaaatgcctgt

SEQ ID NO: 160192 - DNA, 17 bp, synthetic construct
  source 1..17: mol_type = other DNA
gctcctgaaaatgcctg

SEQ ID NO: 160193 - DNA, 17 bp, synthetic construct
  source 1..17: mol_type = other DNA
ggctcctgaaaatgcct

SEQ ID NO: 160194 - DNA, 17 bp, synthetic construct
  source 1..17: mol_type = other DNA
tggctcctgaaaatgcc

SEQ ID NO: 160195 - DNA, 17 bp, synthetic construct
  source 1..17: mol_type = other DNA
gtggctcctgaaaatgc

SEQ ID NO: 160196 - DNA, 17 bp, synthetic construct
  source 1..17: mol_type = other DNA
cgtggctcctgaaaatg

SEQ ID NO: 160197 - DNA, 17 bp, synthetic construct
  source 1..17: mol_type = other DNA
tcgtggctcctgaaaat

SEQ ID NO: 160198 - DNA, 17 bp, synthetic construct
  source 1..17: mol_type = other DNA
atcgtggctcctgaaaa

SEQ ID NO: 160199 - DNA, 17 bp, synthetic construct
  source 1..17: mol_type = other DNA
aatcgtggctcctgaaa

SEQ ID NO: 160200 - DNA, 17 bp, synthetic construct
  source 1..17: mol_type = other DNA
gaatcgtggctcctgaa

SEQ ID NO: 160201 - DNA, 17 bp, synthetic construct
  source 1..17: mol_type = other DNA
tgaatcgtggctcctga

SEQ ID NO: 160202 - DNA, 17 bp, synthetic construct
  source 1..17: mol_type = other DNA
gtgaatcgtggctcctg

SEQ ID NO: 160203 - DNA, 17 bp, synthetic construct
  source 1..17: mol_type = other DNA
ggtgaatcgtggctcct

SEQ ID NO: 160204 - DNA, 17 bp, synthetic construct
  source 1..17: mol_type = other DNA
gggtgaatcgtggctcc

SEQ ID NO: 160205 - DNA, 17 bp, synthetic construct
  source 1..17: mol_type = other DNA
agggtgaatcgtggctc

SEQ ID NO: 160206 - DNA, 17 bp, synthetic construct
  source 1..17: mol_type = other DNA
cagggtgaatcgtggct

SEQ ID NO: 160207 - DNA, 17 bp, synthetic construct
  source 1..17: mol_type = other DNA
gcagggtgaatcgtggc

SEQ ID NO: 160208 - DNA, 17 bp, synthetic construct
  source 1..17: mol_type = other DNA
ggcagggtgaatcgtgg

SEQ ID NO: 160209 - DNA, 17 bp, synthetic construct
  source 1..17: mol_type = other DNA
tggcagggtgaatcgtg

SEQ ID NO: 160210 - DNA, 17 bp, synthetic construct
  source 1..17: mol_type = other DNA
gtggcagggtgaatcgt

SEQ ID NO: 160211 - DNA, 17 bp, synthetic construct
  source 1..17: mol_type = other DNA
tgtggcagggtgaatcg

SEQ ID NO: 160212 - DNA, 17 bp, synthetic construct
  source 1..17: mol_type = other DNA
gtgtggcagggtgaatc

SEQ ID NO: 160213 - DNA, 17 bp, synthetic construct
  source 1..17: mol_type = other DNA
ggtgtggcagggtgaat

SEQ ID NO: 160214 - DNA, 17 bp, synthetic construct
  source 1..17: mol_type = other DNA
aggtgtggcagggtgaa

SEQ ID NO: 160215 - DNA, 17 bp, synthetic construct
  source 1..17: mol_type = other DNA
taggtgtggcagggtga

SEQ ID NO: 160216 - DNA, 17 bp, synthetic construct
  source 1..17: mol_type = other DNA
ctaggtgtggcagggtg

SEQ ID NO: 160217 - DNA, 17 bp, synthetic construct
  source 1..17: mol_type = other DNA
tctaggtgtggcagggt

SEQ ID NO: 160218 - DNA, 17 bp, synthetic construct
  source 1..17: mol_type = other DNA
ctctaggtgtggcaggg

SEQ ID NO: 160219 - DNA, 17 bp, synthetic construct
  source 1..17: mol_type = other DNA
tctctaggtgtggcagg

SEQ ID NO: 160220 - DNA, 17 bp, synthetic construct
  source 1..17: mol_type = other DNA
gtctctaggtgtggcag

SEQ ID NO: 160221 - DNA, 17 bp, synthetic construct
  source 1..17: mol_type = other DNA
tgtctctaggtgtggca

SEQ ID NO: 160222 - DNA, 17 bp, synthetic construct
  source 1..17: mol_type = other DNA
gtgtctctaggtgtggc

SEQ ID NO: 160223 - DNA, 17 bp, synthetic construct
  source 1..17: mol_type = other DNA
ggtgtctctaggtgtgg

SEQ ID NO: 160224 - DNA, 17 bp, synthetic construct
  source 1..17: mol_type = other DNA
gggtgtctctaggtgtg

SEQ ID NO: 160225 - DNA, 17 bp, synthetic construct
  source 1..17: mol_type = other DNA
tgggtgtctctaggtgt

SEQ ID NO: 160226 - DNA, 17 bp, synthetic construct
  source 1..17: mol_type = other DNA
gtgggtgtctctaggtg

SEQ ID NO: 160227 - DNA, 17 bp, synthetic construct
  source 1..17: mol_type = other DNA
agtgggtgtctctaggt

SEQ ID NO: 160228 - DNA, 17 bp, synthetic construct
  source 1..17: mol_type = other DNA
gagtgggtgtctctagg

SEQ ID NO: 160229 - DNA, 17 bp, synthetic construct
  source 1..17: mol_type = other DNA
ggagtgggtgtctctag

SEQ ID NO: 160230 - DNA, 17 bp, synthetic construct
  source 1..17: mol_type = other DNA
tggagtgggtgtctcta

SEQ ID NO: 160231 - DNA, 17 bp, synthetic construct
  source 1..17: mol_type = other DNA
ctggagtgggtgtctct

SEQ ID NO: 160232 - DNA, 17 bp, synthetic construct
  source 1..17: mol_type = other DNA
gctggagtgggtgtctc

SEQ ID NO: 160233 - DNA, 17 bp, synthetic construct
  source 1..17: mol_type = other DNA
tgctggagtgggtgtct

SEQ ID NO: 160234 - DNA, 17 bp, synthetic construct
  source 1..17: mol_type = other DNA
ttgctggagtgggtgtc

SEQ ID NO: 160235 - DNA, 17 bp, synthetic construct
  source 1..17: mol_type = other DNA
tttgctggagtgggtgt

SEQ ID NO: 160236 - DNA, 17 bp, synthetic construct
  source 1..17: mol_type = other DNA
ctttgctggagtgggtg

SEQ ID NO: 160237 - DNA, 17 bp, synthetic construct
  source 1..17: mol_type = other DNA
cctttgctggagtgggt

SEQ ID NO: 160238 - DNA, 17 bp, synthetic construct
  source 1..17: mol_type = other DNA
ccctttgctggagtggg

SEQ ID NO: 160239 - DNA, 17 bp, synthetic construct
  source 1..17: mol_type = other DNA
cccctttgctggagtgg

SEQ ID NO: 160240 - DNA, 17 bp, synthetic construct
  source 1..17: mol_type = other DNA
ccccctttgctggagtg

SEQ ID NO: 160241 - DNA, 17 bp, synthetic construct
  source 1..17: mol_type = other DNA
cccccctttgctggagt

SEQ ID NO: 160242 - DNA, 17 bp, synthetic construct
  source 1..17: mol_type = other DNA
gcccccctttgctggag

SEQ ID NO: 160243 - DNA, 17 bp, synthetic construct
  source 1..17: mol_type = other DNA
ggcccccctttgctgga

SEQ ID NO: 160244 - DNA, 17 bp, synthetic construct
  source 1..17: mol_type = other DNA
tggcccccctttgctgg

SEQ ID NO: 160245 - DNA, 17 bp, synthetic construct
  source 1..17: mol_type = other DNA
ctggcccccctttgctg

SEQ ID NO: 160246 - DNA, 17 bp, synthetic construct
  source 1..17: mol_type = other DNA
tctggcccccctttgct

SEQ ID NO: 160247 - DNA, 17 bp, synthetic construct
  source 1..17: mol_type = other DNA
ctctggcccccctttgc

SEQ ID NO: 160248 - DNA, 17 bp, synthetic construct
  source 1..17: mol_type = other DNA
gctctggcccccctttg

SEQ ID NO: 160249 - DNA, 17 bp, synthetic construct
  source 1..17: mol_type = other DNA
agctctggccccccttt

SEQ ID NO: 160250 - DNA, 17 bp, synthetic construct
  source 1..17: mol_type = other DNA
gagctctggcccccctt

SEQ ID NO: 160251 - DNA, 17 bp, synthetic construct
  source 1..17: mol_type = other DNA
ggagctctggcccccct

SEQ ID NO: 160252 - DNA, 17 bp, synthetic construct
  source 1..17: mol_type = other DNA
gggagctctggcccccc

SEQ ID NO: 160253 - DNA, 17 bp, synthetic construct
  source 1..17: mol_type = other DNA
tgggagctctggccccc

SEQ ID NO: 160254 - DNA, 17 bp, synthetic construct
  source 1..17: mol_type = other DNA
ctgggagctctggcccc

SEQ ID NO: 160255 - DNA, 17 bp, synthetic construct
  source 1..17: mol_type = other DNA
cctgggagctctggccc

SEQ ID NO: 160256 - DNA, 17 bp, synthetic construct
  source 1..17: mol_type = other DNA
ccctgggagctctggcc

SEQ ID NO: 160257 - DNA, 17 bp, synthetic construct
  source 1..17: mol_type = other DNA
cccctgggagctctggc

SEQ ID NO: 160258 - DNA, 17 bp, synthetic construct
  source 1..17: mol_type = other DNA
tcccctgggagctctgg

SEQ ID NO: 160259 - DNA, 17 bp, synthetic construct
  source 1..17: mol_type = other DNA
atcccctgggagctctg

SEQ ID NO: 160260 - DNA, 17 bp, synthetic construct
  source 1..17: mol_type = other DNA
tatcccctgggagctct

SEQ ID NO: 160261 - DNA, 17 bp, synthetic construct
  source 1..17: mol_type = other DNA
ttatcccctgggagctc

SEQ ID NO: 160262 - DNA, 17 bp, synthetic construct
  source 1..17: mol_type = other DNA
tttatcccctgggagct

SEQ ID NO: 160263 - DNA, 17 bp, synthetic construct
  source 1..17: mol_type = other DNA
ctttatcccctgggagc

SEQ ID NO: 160264 - DNA, 17 bp, synthetic construct
  source 1..17: mol_type = other DNA
gctttatcccctgggag

SEQ ID NO: 160265 - DNA, 17 bp, synthetic construct
  source 1..17: mol_type = other DNA
tgctttatcccctggga

SEQ ID NO: 160266 - DNA, 17 bp, synthetic construct
  source 1..17: mol_type = other DNA
ctgctttatcccctggg

SEQ ID NO: 160267 - DNA, 17 bp, synthetic construct
  source 1..17: mol_type = other DNA
gctgctttatcccctgg

SEQ ID NO: 160268 - DNA, 17 bp, synthetic construct
  source 1..17: mol_type = other DNA
cgctgctttatcccctg

SEQ ID NO: 160269 - DNA, 17 bp, synthetic construct
  source 1..17: mol_type = other DNA
gcgctgctttatcccct

SEQ ID NO: 160270 - DNA, 17 bp, synthetic construct
  source 1..17: mol_type = other DNA
ggcgctgctttatcccc

SEQ ID NO: 160271 - DNA, 17 bp, synthetic construct
  source 1..17: mol_type = other DNA
cggcgctgctttatccc

SEQ ID NO: 160272 - DNA, 17 bp, synthetic construct
  source 1..17: mol_type = other DNA
gcggcgctgctttatcc

SEQ ID NO: 160273 - DNA, 17 bp, synthetic construct
  source 1..17: mol_type = other DNA
agcggcgctgctttatc

SEQ ID NO: 160274 - DNA, 17 bp, synthetic construct
  source 1..17: mol_type = other DNA
cagcggcgctgctttat

SEQ ID NO: 160275 - DNA, 17 bp, synthetic construct
  source 1..17: mol_type = other DNA
ccagcggcgctgcttta

SEQ ID NO: 160276 - DNA, 17 bp, synthetic construct
  source 1..17: mol_type = other DNA
gccagcggcgctgcttt

SEQ ID NO: 160277 - DNA, 17 bp, synthetic construct
  source 1..17: mol_type = other DNA
ggccagcggcgctgctt

SEQ ID NO: 160278 - DNA, 17 bp, synthetic construct
  source 1..17: mol_type = other DNA
cggccagcggcgctgct

SEQ ID NO: 160279 - DNA, 17 bp, synthetic construct
  source 1..17: mol_type = other DNA
ccggccagcggcgctgc

SEQ ID NO: 160280 - DNA, 17 bp, synthetic construct
  source 1..17: mol_type = other DNA
cccggccagcggcgctg

SEQ ID NO: 160281 - DNA, 17 bp, synthetic construct
  source 1..17: mol_type = other DNA
tcccggccagcggcgct

SEQ ID NO: 160282 - DNA, 17 bp, synthetic construct
  source 1..17: mol_type = other DNA
atcccggccagcggcgc

SEQ ID NO: 160283 - DNA, 17 bp, synthetic construct
  source 1..17: mol_type = other DNA
catcccggccagcggcg

SEQ ID NO: 160284 - DNA, 17 bp, synthetic construct
  source 1..17: mol_type = other DNA
gcatcccggccagcggc

SEQ ID NO: 160285 - DNA, 17 bp, synthetic construct
  source 1..17: mol_type = other DNA
agcatcccggccagcgg

SEQ ID NO: 160286 - DNA, 17 bp, synthetic construct
  source 1..17: mol_type = other DNA
gagcatcccggccagcg

SEQ ID NO: 160287 - DNA, 17 bp, synthetic construct
  source 1..17: mol_type = other DNA
ggagcatcccggccagc

SEQ ID NO: 160288 - DNA, 17 bp, synthetic construct
  source 1..17: mol_type = other DNA
gggagcatcccggccag

SEQ ID NO: 160289 - DNA, 17 bp, synthetic construct
  source 1..17: mol_type = other DNA
agggagcatcccggcca

SEQ ID NO: 160290 - DNA, 17 bp, synthetic construct
  source 1..17: mol_type = other DNA
cagggagcatcccggcc

SEQ ID NO: 160291 - DNA, 17 bp, synthetic construct
  source 1..17: mol_type = other DNA
gcagggagcatcccggc

SEQ ID NO: 160292 - DNA, 17 bp, synthetic construct
  source 1..17: mol_type = other DNA
tgcagggagcatcccgg

SEQ ID NO: 160293 - DNA, 17 bp, synthetic construct
  source 1..17: mol_type = other DNA
ctgcagggagcatcccg

SEQ ID NO: 160294 - DNA, 17 bp, synthetic construct
  source 1..17: mol_type = other DNA
tctgcagggagcatccc

SEQ ID NO: 160295 - DNA, 17 bp, synthetic construct
  source 1..17: mol_type = other DNA
atctgcagggagcatcc

SEQ ID NO: 160296 - DNA, 17 bp, synthetic construct
  source 1..17: mol_type = other DNA
catctgcagggagcatc

SEQ ID NO: 160297 - DNA, 17 bp, synthetic construct
  source 1..17: mol_type = other DNA
ccatctgcagggagcat

SEQ ID NO: 160298 - DNA, 17 bp, synthetic construct
  source 1..17: mol_type = other DNA
gccatctgcagggagca

SEQ ID NO: 160299 - DNA, 17 bp, synthetic construct
  source 1..17: mol_type = other DNA
cgccatctgcagggagc

SEQ ID NO: 160300 - DNA, 17 bp, synthetic construct
  source 1..17: mol_type = other DNA
ccgccatctgcagggag

SEQ ID NO: 160301 - DNA, 17 bp, synthetic construct
  source 1..17: mol_type = other DNA
cccgccatctgcaggga

SEQ ID NO: 160302 - DNA, 17 bp, synthetic construct
  source 1..17: mol_type = other DNA
tcccgccatctgcaggg

SEQ ID NO: 160303 - DNA, 17 bp, synthetic construct
  source 1..17: mol_type = other DNA
ctcccgccatctgcagg

SEQ ID NO: 160304 - DNA, 17 bp, synthetic construct
  source 1..17: mol_type = other DNA
cctcccgccatctgcag

SEQ ID NO: 160305 - DNA, 17 bp, synthetic construct
  source 1..17: mol_type = other DNA
ccctcccgccatctgca

SEQ ID NO: 160306 - DNA, 17 bp, synthetic construct
  source 1..17: mol_type = other DNA
cccctcccgccatctgc

SEQ ID NO: 160307 - DNA, 17 bp, synthetic construct
  source 1..17: mol_type = other DNA
gcccctcccgccatctg

SEQ ID NO: 160308 - DNA, 17 bp, synthetic construct
  source 1..17: mol_type = other DNA
agcccctcccgccatct

SEQ ID NO: 160309 - DNA, 17 bp, synthetic construct
  source 1..17: mol_type = other DNA
cagcccctcccgccatc

SEQ ID NO: 160310 - DNA, 17 bp, synthetic construct
  source 1..17: mol_type = other DNA
tcagcccctcccgccat

SEQ ID NO: 160311 - DNA, 17 bp, synthetic construct
  source 1..17: mol_type = other DNA
ctcagcccctcccgcca

SEQ ID NO: 160312 - DNA, 17 bp, synthetic construct
  source 1..17: mol_type = other DNA
cctcagcccctcccgcc

SEQ ID NO: 160313 - DNA, 17 bp, synthetic construct
  source 1..17: mol_type = other DNA
tcctcagcccctcccgc

SEQ ID NO: 160314 - DNA, 17 bp, synthetic construct
  source 1..17: mol_type = other DNA
gtcctcagcccctcccg

SEQ ID NO: 160315 - DNA, 17 bp, synthetic construct
  source 1..17: mol_type = other DNA
ggtcctcagcccctccc

SEQ ID NO: 160316 - DNA, 17 bp, synthetic construct
  source 1..17: mol_type = other DNA
cggtcctcagcccctcc

SEQ ID NO: 160317 - DNA, 17 bp, synthetic construct
  source 1..17: mol_type = other DNA
gcggtcctcagcccctc

SEQ ID NO: 160318 - DNA, 17 bp, synthetic construct
  source 1..17: mol_type = other DNA
tgcggtcctcagcccct

SEQ ID NO: 160319 - DNA, 17 bp, synthetic construct
  source 1..17: mol_type = other DNA
ctgcggtcctcagcccc

SEQ ID NO: 160320 - DNA, 17 bp, synthetic construct
  source 1..17: mol_type = other DNA
gctgcggtcctcagccc

SEQ ID NO: 160321 - DNA, 17 bp, synthetic construct
  source 1..17: mol_type = other DNA
cgctgcggtcctcagcc

SEQ ID NO: 160322 - DNA, 17 bp, synthetic construct
  source 1..17: mol_type = other DNA
ccgctgcggtcctcagc

SEQ ID NO: 160323 - DNA, 17 bp, synthetic construct
  source 1..17: mol_type = other DNA
cccgctgcggtcctcag

SEQ ID NO: 160324 - DNA, 17 bp, synthetic construct
  source 1..17: mol_type = other DNA
acccgctgcggtcctca

SEQ ID NO: 160325 - DNA, 17 bp, synthetic construct
  source 1..17: mol_type = other DNA
gacccgctgcggtcctc

SEQ ID NO: 160326 - DNA, 17 bp, synthetic construct
  source 1..17: mol_type = other DNA
tgacccgctgcggtcct

SEQ ID NO: 160327 - DNA, 17 bp, synthetic construct
  source 1..17: mol_type = other DNA
ctgacccgctgcggtcc

SEQ ID NO: 160328 - DNA, 17 bp, synthetic construct
  source 1..17: mol_type = other DNA
cctgacccgctgcggtc

SEQ ID NO: 160329 - DNA, 17 bp, synthetic construct
  source 1..17: mol_type = other DNA
ccctgacccgctgcggt

SEQ ID NO: 160330 - DNA, 17 bp, synthetic construct
  source 1..17: mol_type = other DNA
cccctgacccgctgcgg

SEQ ID NO: 160331 - DNA, 17 bp, synthetic construct
  source 1..17: mol_type = other DNA
tcccctgacccgctgcg

SEQ ID NO: 160332 - DNA, 17 bp, synthetic construct
  source 1..17: mol_type = other DNA
ctcccctgacccgctgc

SEQ ID NO: 160333 - DNA, 17 bp, synthetic construct
  source 1..17: mol_type = other DNA
cctcccctgacccgctg

SEQ ID NO: 160334 - DNA, 17 bp, synthetic construct
  source 1..17: mol_type = other DNA
gcctcccctgacccgct

SEQ ID NO: 160335 - DNA, 17 bp, synthetic construct
  source 1..17: mol_type = other DNA
agcctcccctgacccgc

SEQ ID NO: 160336 - DNA, 17 bp, synthetic construct
  source 1..17: mol_type = other DNA
cagcctcccctgacccg

SEQ ID NO: 160337 - DNA, 17 bp, synthetic construct
  source 1..17: mol_type = other DNA
ccagcctcccctgaccc

SEQ ID NO: 160338 - DNA, 17 bp, synthetic construct
  source 1..17: mol_type = other DNA
accagcctcccctgacc

SEQ ID NO: 160339 - DNA, 17 bp, synthetic construct
  source 1..17: mol_type = other DNA
caccagcctcccctgac

SEQ ID NO: 160340 - DNA, 17 bp, synthetic construct
  source 1..17: mol_type = other DNA
acaccagcctcccctga

SEQ ID NO: 160341 - DNA, 17 bp, synthetic construct
  source 1..17: mol_type = other DNA
cacaccagcctcccctg

SEQ ID NO: 160342 - DNA, 17 bp, synthetic construct
  source 1..17: mol_type = other DNA
tcacaccagcctcccct

SEQ ID NO: 160343 - DNA, 17 bp, synthetic construct
  source 1..17: mol_type = other DNA
ctcacaccagcctcccc

SEQ ID NO: 160344 - DNA, 17 bp, synthetic construct
  source 1..17: mol_type = other DNA
cctcacaccagcctccc

SEQ ID NO: 160345 - DNA, 17 bp, synthetic construct
  source 1..17: mol_type = other DNA
ccctcacaccagcctcc

SEQ ID NO: 160346 - DNA, 17 bp, synthetic construct
  source 1..17: mol_type = other DNA
gccctcacaccagcctc

SEQ ID NO: 160347 - DNA, 17 bp, synthetic construct
  source 1..17: mol_type = other DNA
cgccctcacaccagcct

SEQ ID NO: 160348 - DNA, 17 bp, synthetic construct
  source 1..17: mol_type = other DNA
acgccctcacaccagcc

SEQ ID NO: 160349 - DNA, 17 bp, synthetic construct
  source 1..17: mol_type = other DNA
cacgccctcacaccagc

SEQ ID NO: 160350 - DNA, 17 bp, synthetic construct
  source 1..17: mol_type = other DNA
ccacgccctcacaccag

SEQ ID NO: 160351 - DNA, 17 bp, synthetic construct
  source 1..17: mol_type = other DNA
cccacgccctcacacca

SEQ ID NO: 160352 - DNA, 17 bp, synthetic construct
  source 1..17: mol_type = other DNA
ccccacgccctcacacc

SEQ ID NO: 160353 - DNA, 17 bp, synthetic construct
  source 1..17: mol_type = other DNA
cccccacgccctcacac

SEQ ID NO: 160354 - DNA, 17 bp, synthetic construct
  source 1..17: mol_type = other DNA
gcccccacgccctcaca

SEQ ID NO: 160355 - DNA, 17 bp, synthetic construct
  source 1..17: mol_type = other DNA
agcccccacgccctcac

SEQ ID NO: 160356 - DNA, 17 bp, synthetic construct
  source 1..17: mol_type = other DNA
cagcccccacgccctca

SEQ ID NO: 160357 - DNA, 17 bp, synthetic construct
  source 1..17: mol_type = other DNA
gcagcccccacgccctc

SEQ ID NO: 160358 - DNA, 17 bp, synthetic construct
  source 1..17: mol_type = other DNA
tgcagcccccacgccct

SEQ ID NO: 160359 - DNA, 17 bp, synthetic construct
  source 1..17: mol_type = other DNA
ctgcagcccccacgccc

SEQ ID NO: 160360 - DNA, 17 bp, synthetic construct
  source 1..17: mol_type = other DNA
cctgcagcccccacgcc

SEQ ID NO: 160361 - DNA, 17 bp, synthetic construct
  source 1..17: mol_type = other DNA
ccctgcagcccccacgc

SEQ ID NO: 160362 - DNA, 17 bp, synthetic construct
  source 1..17: mol_type = other DNA
gccctgcagcccccacg

SEQ ID NO: 160363 - DNA, 17 bp, synthetic construct
  source 1..17: mol_type = other DNA
agccctgcagcccccac

SEQ ID NO: 160364 - DNA, 17 bp, synthetic construct
  source 1..17: mol_type = other DNA
cagccctgcagccccca

SEQ ID NO: 160365 - DNA, 17 bp, synthetic construct
  source 1..17: mol_type = other DNA
ccagccctgcagccccc

SEQ ID NO: 160366 - DNA, 17 bp, synthetic construct
  source 1..17: mol_type = other DNA
tccagccctgcagcccc

SEQ ID NO: 160367 - DNA, 17 bp, synthetic construct
  source 1..17: mol_type = other DNA
atccagccctgcagccc

SEQ ID NO: 160368 - DNA, 17 bp, synthetic construct
  source 1..17: mol_type = other DNA
catccagccctgcagcc

SEQ ID NO: 160369 - DNA, 17 bp, synthetic construct
  source 1..17: mol_type = other DNA
ccatccagccctgcagc

SEQ ID NO: 160370 - DNA, 17 bp, synthetic construct
  source 1..17: mol_type = other DNA
cccatccagccctgcag

SEQ ID NO: 160371 - DNA, 17 bp, synthetic construct
  source 1..17: mol_type = other DNA
ccccatccagccctgca

SEQ ID NO: 160372 - DNA, 17 bp, synthetic construct
  source 1..17: mol_type = other DNA
tccccatccagccctgc

SEQ ID NO: 160373 - DNA, 17 bp, synthetic construct
  source 1..17: mol_type = other DNA
ctccccatccagccctg

SEQ ID NO: 160374 - DNA, 17 bp, synthetic construct
  source 1..17: mol_type = other DNA
gctccccatccagccct

SEQ ID NO: 160375 - DNA, 17 bp, synthetic construct
  source 1..17: mol_type = other DNA
tgctccccatccagccc

SEQ ID NO: 160376 - DNA, 17 bp, synthetic construct
  source 1..17: mol_type = other DNA
ctgctccccatccagcc

SEQ ID NO: 160377 - DNA, 17 bp, synthetic construct
  source 1..17: mol_type = other DNA
cctgctccccatccagc

SEQ ID NO: 160378 - DNA, 17 bp, synthetic construct
  source 1..17: mol_type = other DNA
ccctgctccccatccag

SEQ ID NO: 160379 - DNA, 17 bp, synthetic construct
  source 1..17: mol_type = other DNA
accctgctccccatcca

SEQ ID NO: 160380 - DNA, 17 bp, synthetic construct
  source 1..17: mol_type = other DNA
caccctgctccccatcc

SEQ ID NO: 160381 - DNA, 17 bp, synthetic construct
  source 1..17: mol_type = other DNA
ccaccctgctccccatc

SEQ ID NO: 160382 - DNA, 17 bp, synthetic construct
  source 1..17: mol_type = other DNA
cccaccctgctccccat

SEQ ID NO: 160383 - DNA, 17 bp, synthetic construct
  source 1..17: mol_type = other DNA
ccccaccctgctcccca

SEQ ID NO: 160384 - DNA, 17 bp, synthetic construct
  source 1..17: mol_type = other DNA
accccaccctgctcccc

SEQ ID NO: 160385 - DNA, 17 bp, synthetic construct
  source 1..17: mol_type = other DNA
caccccaccctgctccc

SEQ ID NO: 160386 - DNA, 17 bp, synthetic construct
  source 1..17: mol_type = other DNA
ccaccccaccctgctcc

SEQ ID NO: 160387 - DNA, 17 bp, synthetic construct
  source 1..17: mol_type = other DNA
tccaccccaccctgctc

SEQ ID NO: 160388 - DNA, 17 bp, synthetic construct
  source 1..17: mol_type = other DNA
ctccaccccaccctgct

SEQ ID NO: 160389 - DNA, 17 bp, synthetic construct
  source 1..17: mol_type = other DNA
actccaccccaccctgc

SEQ ID NO: 160390 - DNA, 17 bp, synthetic construct
  source 1..17: mol_type = other DNA
cactccaccccaccctg

SEQ ID NO: 160391 - DNA, 17 bp, synthetic construct
  source 1..17: mol_type = other DNA
ccactccaccccaccct

SEQ ID NO: 160392 - DNA, 17 bp, synthetic construct
  source 1..17: mol_type = other DNA
cccactccaccccaccc

SEQ ID NO: 160393 - DNA, 17 bp, synthetic construct
  source 1..17: mol_type = other DNA
gcccactccaccccacc

SEQ ID NO: 160394 - DNA, 17 bp, synthetic construct
  source 1..17: mol_type = other DNA
ggcccactccaccccac

SEQ ID NO: 160395 - DNA, 17 bp, synthetic construct
  source 1..17: mol_type = other DNA
aggcccactccacccca

SEQ ID NO: 160396 - DNA, 17 bp, synthetic construct
  source 1..17: mol_type = other DNA
taggcccactccacccc

SEQ ID NO: 160397 - DNA, 17 bp, synthetic construct
  source 1..17: mol_type = other DNA
gtaggcccactccaccc

SEQ ID NO: 160398 - DNA, 17 bp, synthetic construct
  source 1..17: mol_type = other DNA
agtaggcccactccacc

SEQ ID NO: 160399 - DNA, 17 bp, synthetic construct
  source 1..17: mol_type = other DNA
cagtaggcccactccac

SEQ ID NO: 160400 - DNA, 17 bp, synthetic construct
  source 1..17: mol_type = other DNA
gcagtaggcccactcca

SEQ ID NO: 160401 - DNA, 17 bp, synthetic construct
  source 1..17: mol_type = other DNA
tgcagtaggcccactcc

SEQ ID NO: 160402 - DNA, 17 bp, synthetic construct
  source 1..17: mol_type = other DNA
ctgcagtaggcccactc

SEQ ID NO: 160403 - DNA, 17 bp, synthetic construct
  source 1..17: mol_type = other DNA
gctgcagtaggcccact

SEQ ID NO: 160404 - DNA, 17 bp, synthetic construct
  source 1..17: mol_type = other DNA
ggctgcagtaggcccac

SEQ ID NO: 160405 - DNA, 17 bp, synthetic construct
  source 1..17: mol_type = other DNA
aggctgcagtaggccca

SEQ ID NO: 160406 - DNA, 17 bp, synthetic construct
  source 1..17: mol_type = other DNA
gaggctgcagtaggccc

SEQ ID NO: 160407 - DNA, 17 bp, synthetic construct
  source 1..17: mol_type = other DNA
agaggctgcagtaggcc

SEQ ID NO: 160408 - DNA, 17 bp, synthetic construct
  source 1..17: mol_type = other DNA
cagaggctgcagtaggc

SEQ ID NO: 160409 - DNA, 17 bp, synthetic construct
  source 1..17: mol_type = other DNA
gcagaggctgcagtagg

SEQ ID NO: 160410 - DNA, 17 bp, synthetic construct
  source 1..17: mol_type = other DNA
agcagaggctgcagtag

SEQ ID NO: 160411 - DNA, 17 bp, synthetic construct
  source 1..17: mol_type = other DNA
cagcagaggctgcagta

SEQ ID NO: 160412 - DNA, 17 bp, synthetic construct
  source 1..17: mol_type = other DNA
gcagcagaggctgcagt

SEQ ID NO: 160413 - DNA, 17 bp, synthetic construct
  source 1..17: mol_type = other DNA
agcagcagaggctgcag

SEQ ID NO: 160414 - DNA, 17 bp, synthetic construct
  source 1..17: mol_type = other DNA
gagcagcagaggctgca

SEQ ID NO: 160415 - DNA, 17 bp, synthetic construct
  source 1..17: mol_type = other DNA
ggagcagcagaggctgc

SEQ ID NO: 160416 - DNA, 17 bp, synthetic construct
  source 1..17: mol_type = other DNA
gggagcagcagaggctg

SEQ ID NO: 160417 - DNA, 17 bp, synthetic construct
  source 1..17: mol_type = other DNA
cgggagcagcagaggct

SEQ ID NO: 160418 - DNA, 17 bp, synthetic construct
  source 1..17: mol_type = other DNA
acgggagcagcagaggc

SEQ ID NO: 160419 - DNA, 17 bp, synthetic construct
  source 1..17: mol_type = other DNA
cacgggagcagcagagg

SEQ ID NO: 160420 - DNA, 17 bp, synthetic construct
  source 1..17: mol_type = other DNA
gcacgggagcagcagag

SEQ ID NO: 160421 - DNA, 17 bp, synthetic construct
  source 1..17: mol_type = other DNA
tgcacgggagcagcaga

SEQ ID NO: 160422 - DNA, 17 bp, synthetic construct
  source 1..17: mol_type = other DNA
ctgcacgggagcagcag

SEQ ID NO: 160423 - DNA, 17 bp, synthetic construct
  source 1..17: mol_type = other DNA
gctgcacgggagcagca

SEQ ID NO: 160424 - DNA, 17 bp, synthetic construct
  source 1..17: mol_type = other DNA
ggctgcacgggagcagc

SEQ ID NO: 160425 - DNA, 17 bp, synthetic construct
  source 1..17: mol_type = other DNA
gggctgcacgggagcag

SEQ ID NO: 160426 - DNA, 17 bp, synthetic construct
  source 1..17: mol_type = other DNA
ggggctgcacgggagca

SEQ ID NO: 160427 - DNA, 17 bp, synthetic construct
  source 1..17: mol_type = other DNA
tggggctgcacgggagc

SEQ ID NO: 160428 - DNA, 17 bp, synthetic construct
  source 1..17: mol_type = other DNA
ttggggctgcacgggag

SEQ ID NO: 160429 - DNA, 17 bp, synthetic construct
  source 1..17: mol_type = other DNA
cttggggctgcacggga

SEQ ID NO: 160430 - DNA, 17 bp, synthetic construct
  source 1..17: mol_type = other DNA
ccttggggctgcacggg

SEQ ID NO: 160431 - DNA, 17 bp, synthetic construct
  source 1..17: mol_type = other DNA
accttggggctgcacgg

SEQ ID NO: 160432 - DNA, 17 bp, synthetic construct
  source 1..17: mol_type = other DNA
aaccttggggctgcacg

SEQ ID NO: 160433 - DNA, 17 bp, synthetic construct
  source 1..17: mol_type = other DNA
gaaccttggggctgcac

SEQ ID NO: 160434 - DNA, 17 bp, synthetic construct
  source 1..17: mol_type = other DNA
ggaaccttggggctgca

SEQ ID NO: 160435 - DNA, 17 bp, synthetic construct
  source 1..17: mol_type = other DNA
gggaaccttggggctgc

SEQ ID NO: 160436 - DNA, 17 bp, synthetic construct
  source 1..17: mol_type = other DNA
tgggaaccttggggctg

SEQ ID NO: 160437 - DNA, 17 bp, synthetic construct
  source 1..17: mol_type = other DNA
ctgggaaccttggggct

SEQ ID NO: 160438 - DNA, 17 bp, synthetic construct
  source 1..17: mol_type = other DNA
cctgggaaccttggggc

SEQ ID NO: 160439 - DNA, 17 bp, synthetic construct
  source 1..17: mol_type = other DNA
gcctgggaaccttgggg

SEQ ID NO: 160440 - DNA, 17 bp, synthetic construct
  source 1..17: mol_type = other DNA
tgcctgggaaccttggg

SEQ ID NO: 160441 - DNA, 17 bp, synthetic construct
  source 1..17: mol_type = other DNA
ctgcctgggaaccttgg

SEQ ID NO: 160442 - DNA, 17 bp, synthetic construct
  source 1..17: mol_type = other DNA
gctgcctgggaaccttg

SEQ ID NO: 160443 - DNA, 17 bp, synthetic construct
  source 1..17: mol_type = other DNA
ggctgcctgggaacctt

SEQ ID NO: 160444 - DNA, 17 bp, synthetic construct
  source 1..17: mol_type = other DNA
gggctgcctgggaacct

SEQ ID NO: 160445 - DNA, 17 bp, synthetic construct
  source 1..17: mol_type = other DNA
ggggctgcctgggaacc

SEQ ID NO: 160446 - DNA, 17 bp, synthetic construct
  source 1..17: mol_type = other DNA
aggggctgcctgggaac

SEQ ID NO: 160447 - DNA, 17 bp, synthetic construct
  source 1..17: mol_type = other DNA
caggggctgcctgggaa

SEQ ID NO: 160448 - DNA, 17 bp, synthetic construct
  source 1..17: mol_type = other DNA
acaggggctgcctggga

SEQ ID NO: 160449 - DNA, 17 bp, synthetic construct
  source 1..17: mol_type = other DNA
aacaggggctgcctggg

SEQ ID NO: 160450 - DNA, 17 bp, synthetic construct
  source 1..17: mol_type = other DNA
gaacaggggctgcctgg

SEQ ID NO: 160451 - DNA, 17 bp, synthetic construct
  source 1..17: mol_type = other DNA
ggaacaggggctgcctg

SEQ ID NO: 160452 - DNA, 17 bp, synthetic construct
  source 1..17: mol_type = other DNA
gggaacaggggctgcct

SEQ ID NO: 160453 - DNA, 17 bp, synthetic construct
  source 1..17: mol_type = other DNA
tgggaacaggggctgcc

SEQ ID NO: 160454 - DNA, 17 bp, synthetic construct
  source 1..17: mol_type = other DNA
ctgggaacaggggctgc

SEQ ID NO: 160455 - DNA, 17 bp, synthetic construct
  source 1..17: mol_type = other DNA
gctgggaacaggggctg

SEQ ID NO: 160456 - DNA, 17 bp, synthetic construct
  source 1..17: mol_type = other DNA
tgctgggaacaggggct

SEQ ID NO: 160457 - DNA, 17 bp, synthetic construct
  source 1..17: mol_type = other DNA
gtgctgggaacaggggc

SEQ ID NO: 160458 - DNA, 17 bp, synthetic construct
  source 1..17: mol_type = other DNA
agtgctgggaacagggg

SEQ ID NO: 160459 - DNA, 17 bp, synthetic construct
  source 1..17: mol_type = other DNA
aagtgctgggaacaggg

SEQ ID NO: 160460 - DNA, 17 bp, synthetic construct
  source 1..17: mol_type = other DNA
gaagtgctgggaacagg

SEQ ID NO: 160461 - DNA, 17 bp, synthetic construct
  source 1..17: mol_type = other DNA
ggaagtgctgggaacag

SEQ ID NO: 160462 - DNA, 17 bp, synthetic construct
  source 1..17: mol_type = other DNA
aggaagtgctgggaaca

SEQ ID NO: 160463 - DNA, 17 bp, synthetic construct
  source 1..17: mol_type = other DNA
caggaagtgctgggaac

SEQ ID NO: 160464 - DNA, 17 bp, synthetic construct
  source 1..17: mol_type = other DNA
ccaggaagtgctgggaa

SEQ ID NO: 160465 - DNA, 17 bp, synthetic construct
  source 1..17: mol_type = other DNA
gccaggaagtgctggga

SEQ ID NO: 160466 - DNA, 17 bp, synthetic construct
  source 1..17: mol_type = other DNA
ggccaggaagtgctggg

SEQ ID NO: 160467 - DNA, 17 bp, synthetic construct
  source 1..17: mol_type = other DNA
tggccaggaagtgctgg

SEQ ID NO: 160468 - DNA, 17 bp, synthetic construct
  source 1..17: mol_type = other DNA
ctggccaggaagtgctg

SEQ ID NO: 160469 - DNA, 17 bp, synthetic construct
  source 1..17: mol_type = other DNA
gctggccaggaagtgct

SEQ ID NO: 160470 - DNA, 17 bp, synthetic construct
  source 1..17: mol_type = other DNA
ggctggccaggaagtgc

SEQ ID NO: 160471 - DNA, 17 bp, synthetic construct
  source 1..17: mol_type = other DNA
aggctggccaggaagtg

SEQ ID NO: 160472 - DNA, 17 bp, synthetic construct
  source 1..17: mol_type = other DNA
gaggctggccaggaagt

SEQ ID NO: 160473 - DNA, 17 bp, synthetic construct
  source 1..17: mol_type = other DNA
agaggctggccaggaag

SEQ ID NO: 160474 - DNA, 17 bp, synthetic construct
  source 1..17: mol_type = other DNA
aagaggctggccaggaa

SEQ ID NO: 160475 - DNA, 17 bp, synthetic construct
  source 1..17: mol_type = other DNA
caagaggctggccagga

SEQ ID NO: 160476 - DNA, 17 bp, synthetic construct
  source 1..17: mol_type = other DNA
gcaagaggctggccagg

SEQ ID NO: 160477 - DNA, 17 bp, synthetic construct
  source 1..17: mol_type = other DNA
ggcaagaggctggccag

SEQ ID NO: 160478 - DNA, 17 bp, synthetic construct
  source 1..17: mol_type = other DNA
tggcaagaggctggcca

SEQ ID NO: 160479 - DNA, 17 bp, synthetic construct
  source 1..17: mol_type = other DNA
ttggcaagaggctggcc

SEQ ID NO: 160480 - DNA, 17 bp, synthetic construct
  source 1..17: mol_type = other DNA
tttggcaagaggctggc

SEQ ID NO: 160481 - DNA, 17 bp, synthetic construct
  source 1..17: mol_type = other DNA
gtttggcaagaggctgg

SEQ ID NO: 160482 - DNA, 17 bp, synthetic construct
  source 1..17: mol_type = other DNA
ggtttggcaagaggctg

SEQ ID NO: 160483 - DNA, 17 bp, synthetic construct
  source 1..17: mol_type = other DNA
aggtttggcaagaggct

SEQ ID NO: 160484 - DNA, 17 bp, synthetic construct
  source 1..17: mol_type = other DNA
aaggtttggcaagaggc

SEQ ID NO: 160485 - DNA, 17 bp, synthetic construct
  source 1..17: mol_type = other DNA
gaaggtttggcaagagg

SEQ ID NO: 160486 - DNA, 17 bp, synthetic construct
  source 1..17: mol_type = other DNA
cgaaggtttggcaagag

SEQ ID NO: 160487 - DNA, 17 bp, synthetic construct
  source 1..17: mol_type = other DNA
gcgaaggtttggcaaga

SEQ ID NO: 160488 - DNA, 17 bp, synthetic construct
  source 1..17: mol_type = other DNA
agcgaaggtttggcaag

SEQ ID NO: 160489 - DNA, 17 bp, synthetic construct
  source 1..17: mol_type = other DNA
cagcgaaggtttggcaa

SEQ ID NO: 160490 - DNA, 17 bp, synthetic construct
  source 1..17: mol_type = other DNA
tcagcgaaggtttggca

SEQ ID NO: 160491 - DNA, 17 bp, synthetic construct
  source 1..17: mol_type = other DNA
ctcagcgaaggtttggc

SEQ ID NO: 160492 - DNA, 17 bp, synthetic construct
  source 1..17: mol_type = other DNA
cctcagcgaaggtttgg

SEQ ID NO: 160493 - DNA, 17 bp, synthetic construct
  source 1..17: mol_type = other DNA
ccctcagcgaaggtttg

SEQ ID NO: 160494 - DNA, 17 bp, synthetic construct
  source 1..17: mol_type = other DNA
accctcagcgaaggttt

SEQ ID NO: 160495 - DNA, 17 bp, synthetic construct
  source 1..17: mol_type = other DNA
gaccctcagcgaaggtt

SEQ ID NO: 160496 - DNA, 17 bp, synthetic construct
  source 1..17: mol_type = other DNA
agaccctcagcgaaggt

SEQ ID NO: 160497 - DNA, 17 bp, synthetic construct
  source 1..17: mol_type = other DNA
gagaccctcagcgaagg

SEQ ID NO: 160498 - DNA, 17 bp, synthetic construct
  source 1..17: mol_type = other DNA
tgagaccctcagcgaag

SEQ ID NO: 160499 - DNA, 17 bp, synthetic construct
  source 1..17: mol_type = other DNA
gtgagaccctcagcgaa

SEQ ID NO: 160500 - DNA, 17 bp, synthetic construct
  source 1..17: mol_type = other DNA
cgtgagaccctcagcga

SEQ ID NO: 160501 - DNA, 17 bp, synthetic construct
  source 1..17: mol_type = other DNA
ccgtgagaccctcagcg

SEQ ID NO: 160502 - DNA, 17 bp, synthetic construct
  source 1..17: mol_type = other DNA
tccgtgagaccctcagc

SEQ ID NO: 160503 - DNA, 17 bp, synthetic construct
  source 1..17: mol_type = other DNA
gtccgtgagaccctcag

SEQ ID NO: 160504 - DNA, 17 bp, synthetic construct
  source 1..17: mol_type = other DNA
ggtccgtgagaccctca

SEQ ID NO: 160505 - DNA, 17 bp, synthetic construct
  source 1..17: mol_type = other DNA
gggtccgtgagaccctc

SEQ ID NO: 160506 - DNA, 17 bp, synthetic construct
  source 1..17: mol_type = other DNA
tgggtccgtgagaccct

SEQ ID NO: 160507 - DNA, 17 bp, synthetic construct
  source 1..17: mol_type = other DNA
ctgggtccgtgagaccc

SEQ ID NO: 160508 - DNA, 17 bp, synthetic construct
  source 1..17: mol_type = other DNA
gctgggtccgtgagacc

SEQ ID NO: 160509 - DNA, 17 bp, synthetic construct
  source 1..17: mol_type = other DNA
agctgggtccgtgagac

SEQ ID NO: 160510 - DNA, 17 bp, synthetic construct
  source 1..17: mol_type = other DNA
gagctgggtccgtgaga

SEQ ID NO: 160511 - DNA, 17 bp, synthetic construct
  source 1..17: mol_type = other DNA
tgagctgggtccgtgag

SEQ ID NO: 160512 - DNA, 17 bp, synthetic construct
  source 1..17: mol_type = other DNA
gtgagctgggtccgtga

SEQ ID NO: 160513 - DNA, 17 bp, synthetic construct
  source 1..17: mol_type = other DNA
ggtgagctgggtccgtg

SEQ ID NO: 160514 - DNA, 17 bp, synthetic construct
  source 1..17: mol_type = other DNA
gggtgagctgggtccgt

SEQ ID NO: 160515 - DNA, 17 bp, synthetic construct
  source 1..17: mol_type = other DNA
ggggtgagctgggtccg

SEQ ID NO: 160516 - DNA, 17 bp, synthetic construct
  source 1..17: mol_type = other DNA
aggggtgagctgggtcc

SEQ ID NO: 160517 - DNA, 17 bp, synthetic construct
  source 1..17: mol_type = other DNA
taggggtgagctgggtc

SEQ ID NO: 160518 - DNA, 17 bp, synthetic construct
  source 1..17: mol_type = other DNA
ttaggggtgagctgggt

SEQ ID NO: 160519 - DNA, 17 bp, synthetic construct
  source 1..17: mol_type = other DNA
gttaggggtgagctggg

SEQ ID NO: 160520 - DNA, 17 bp, synthetic construct
  source 1..17: mol_type = other DNA
cgttaggggtgagctgg

SEQ ID NO: 160521 - DNA, 17 bp, synthetic construct
  source 1..17: mol_type = other DNA
gcgttaggggtgagctg

SEQ ID NO: 160522 - DNA, 17 bp, synthetic construct
  source 1..17: mol_type = other DNA
ggcgttaggggtgagct

SEQ ID NO: 160523 - DNA, 17 bp, synthetic construct
  source 1..17: mol_type = other DNA
tggcgttaggggtgagc

SEQ ID NO: 160524 - DNA, 17 bp, synthetic construct
  source 1..17: mol_type = other DNA
ctggcgttaggggtgag

SEQ ID NO: 160525 - DNA, 17 bp, synthetic construct
  source 1..17: mol_type = other DNA
gctggcgttaggggtga

SEQ ID NO: 160526 - DNA, 17 bp, synthetic construct
  source 1..17: mol_type = other DNA
ggctggcgttaggggtg

SEQ ID NO: 160527 - DNA, 17 bp, synthetic construct
  source 1..17: mol_type = other DNA
cggctggcgttaggggt

SEQ ID NO: 160528 - DNA, 17 bp, synthetic construct
  source 1..17: mol_type = other DNA
gcggctggcgttagggg

SEQ ID NO: 160529 - DNA, 17 bp, synthetic construct
  source 1..17: mol_type = other DNA
agcggctggcgttaggg

SEQ ID NO: 160530 - DNA, 17 bp, synthetic construct
  source 1..17: mol_type = other DNA
aagcggctggcgttagg

SEQ ID NO: 160531 - DNA, 17 bp, synthetic construct
  source 1..17: mol_type = other DNA
caagcggctggcgttag

SEQ ID NO: 160532 - DNA, 17 bp, synthetic construct
  source 1..17: mol_type = other DNA
acaagcggctggcgtta

SEQ ID NO: 160533 - DNA, 17 bp, synthetic construct
  source 1..17: mol_type = other DNA
cacaagcggctggcgtt

SEQ ID NO: 160534 - DNA, 17 bp, synthetic construct
  source 1..17: mol_type = other DNA
gcacaagcggctggcgt

SEQ ID NO: 160535 - DNA, 17 bp, synthetic construct
  source 1..17: mol_type = other DNA
agcacaagcggctggcg

SEQ ID NO: 160536 - DNA, 17 bp, synthetic construct
  source 1..17: mol_type = other DNA
tagcacaagcggctggc

SEQ ID NO: 160537 - DNA, 17 bp, synthetic construct
  source 1..17: mol_type = other DNA
ttagcacaagcggctgg

SEQ ID NO: 160538 - DNA, 17 bp, synthetic construct
  source 1..17: mol_type = other DNA
cttagcacaagcggctg

SEQ ID NO: 160539 - DNA, 17 bp, synthetic construct
  source 1..17: mol_type = other DNA
tcttagcacaagcggct

SEQ ID NO: 160540 - DNA, 17 bp, synthetic construct
  source 1..17: mol_type = other DNA
ctcttagcacaagcggc

SEQ ID NO: 160541 - DNA, 17 bp, synthetic construct
  source 1..17: mol_type = other DNA
gctcttagcacaagcgg

SEQ ID NO: 160542 - DNA, 17 bp, synthetic construct
  source 1..17: mol_type = other DNA
ggctcttagcacaagcg

SEQ ID NO: 160543 - DNA, 17 bp, synthetic construct
  source 1..17: mol_type = other DNA
gggctcttagcacaagc

SEQ ID NO: 160544 - DNA, 17 bp, synthetic construct
  source 1..17: mol_type = other DNA
cgggctcttagcacaag

SEQ ID NO: 160545 - DNA, 17 bp, synthetic construct
  source 1..17: mol_type = other DNA
acgggctcttagcacaa

SEQ ID NO: 160546 - DNA, 17 bp, synthetic construct
  source 1..17: mol_type = other DNA
cacgggctcttagcaca

SEQ ID NO: 160547 - DNA, 17 bp, synthetic construct
  source 1..17: mol_type = other DNA
gcacgggctcttagcac

SEQ ID NO: 160548 - DNA, 17 bp, synthetic construct
  source 1..17: mol_type = other DNA
cgcacgggctcttagca

SEQ ID NO: 160549 - DNA, 17 bp, synthetic construct
  source 1..17: mol_type = other DNA
gcgcacgggctcttagc

SEQ ID NO: 160550 - DNA, 17 bp, synthetic construct
  source 1..17: mol_type = other DNA
tgcgcacgggctcttag

SEQ ID NO: 160551 - DNA, 17 bp, synthetic construct
  source 1..17: mol_type = other DNA
gtgcgcacgggctctta

SEQ ID NO: 160552 - DNA, 17 bp, synthetic construct
  source 1..17: mol_type = other DNA
ggtgcgcacgggctctt

SEQ ID NO: 160553 - DNA, 17 bp, synthetic construct
  source 1..17: mol_type = other DNA
aggtgcgcacgggctct

SEQ ID NO: 160554 - DNA, 17 bp, synthetic construct
  source 1..17: mol_type = other DNA
caggtgcgcacgggctc

SEQ ID NO: 160555 - DNA, 17 bp, synthetic construct
  source 1..17: mol_type = other DNA
gcaggtgcgcacgggct

SEQ ID NO: 160556 - DNA, 17 bp, synthetic construct
  source 1..17: mol_type = other DNA
tgcaggtgcgcacgggc

SEQ ID NO: 160557 - DNA, 17 bp, synthetic construct
  source 1..17: mol_type = other DNA
ctgcaggtgcgcacggg

SEQ ID NO: 160558 - DNA, 17 bp, synthetic construct
  source 1..17: mol_type = other DNA
tctgcaggtgcgcacgg

SEQ ID NO: 160559 - DNA, 17 bp, synthetic construct
  source 1..17: mol_type = other DNA
ctctgcaggtgcgcacg

SEQ ID NO: 160560 - DNA, 17 bp, synthetic construct
  source 1..17: mol_type = other DNA
gctctgcaggtgcgcac

SEQ ID NO: 160561 - DNA, 17 bp, synthetic construct
  source 1..17: mol_type = other DNA
tgctctgcaggtgcgca

SEQ ID NO: 160562 - DNA, 17 bp, synthetic construct
  source 1..17: mol_type = other DNA
gtgctctgcaggtgcgc

SEQ ID NO: 160563 - DNA, 17 bp, synthetic construct
  source 1..17: mol_type = other DNA
agtgctctgcaggtgcg

SEQ ID NO: 160564 - DNA, 17 bp, synthetic construct
  source 1..17: mol_type = other DNA
cagtgctctgcaggtgc

SEQ ID NO: 160565 - DNA, 17 bp, synthetic construct
  source 1..17: mol_type = other DNA
ccagtgctctgcaggtg

SEQ ID NO: 160566 - DNA, 17 bp, synthetic construct
  source 1..17: mol_type = other DNA
cccagtgctctgcaggt

SEQ ID NO: 160567 - DNA, 17 bp, synthetic construct
  source 1..17: mol_type = other DNA
acccagtgctctgcagg

SEQ ID NO: 160568 - DNA, 17 bp, synthetic construct
  source 1..17: mol_type = other DNA
cacccagtgctctgcag

SEQ ID NO: 160569 - DNA, 17 bp, synthetic construct
  source 1..17: mol_type = other DNA
ccacccagtgctctgca

SEQ ID NO: 160570 - DNA, 17 bp, synthetic construct
  source 1..17: mol_type = other DNA
cccacccagtgctctgc

SEQ ID NO: 160571 - DNA, 17 bp, synthetic construct
  source 1..17: mol_type = other DNA
ccccacccagtgctctg

SEQ ID NO: 160572 - DNA, 17 bp, synthetic construct
  source 1..17: mol_type = other DNA
gccccacccagtgctct

SEQ ID NO: 160573 - DNA, 17 bp, synthetic construct
  source 1..17: mol_type = other DNA
tgccccacccagtgctc

SEQ ID NO: 160574 - DNA, 17 bp, synthetic construct
  source 1..17: mol_type = other DNA
atgccccacccagtgct

SEQ ID NO: 160575 - DNA, 17 bp, synthetic construct
  source 1..17: mol_type = other DNA
gatgccccacccagtgc

SEQ ID NO: 160576 - DNA, 17 bp, synthetic construct
  source 1..17: mol_type = other DNA
ggatgccccacccagtg

SEQ ID NO: 160577 - DNA, 17 bp, synthetic construct
  source 1..17: mol_type = other DNA
gggatgccccacccagt

SEQ ID NO: 160578 - DNA, 17 bp, synthetic construct
  source 1..17: mol_type = other DNA
agggatgccccacccag

SEQ ID NO: 160579 - DNA, 17 bp, synthetic construct
  source 1..17: mol_type = other DNA
cagggatgccccaccca

SEQ ID NO: 160580 - DNA, 17 bp, synthetic construct
  source 1..17: mol_type = other DNA
ccagggatgccccaccc

SEQ ID NO: 160581 - DNA, 17 bp, synthetic construct
  source 1..17: mol_type = other DNA
cccagggatgccccacc

SEQ ID NO: 160582 - DNA, 17 bp, synthetic construct
  source 1..17: mol_type = other DNA
acccagggatgccccac

SEQ ID NO: 160583 - DNA, 17 bp, synthetic construct
  source 1..17: mol_type = other DNA
gacccagggatgcccca

SEQ ID NO: 160584 - DNA, 17 bp, synthetic construct
  source 1..17: mol_type = other DNA
agacccagggatgcccc

SEQ ID NO: 160585 - DNA, 17 bp, synthetic construct
  source 1..17: mol_type = other DNA
gagacccagggatgccc

SEQ ID NO: 160586 - DNA, 17 bp, synthetic construct
  source 1..17: mol_type = other DNA
tgagacccagggatgcc

SEQ ID NO: 160587 - DNA, 17 bp, synthetic construct
  source 1..17: mol_type = other DNA
ctgagacccagggatgc

SEQ ID NO: 160588 - DNA, 17 bp, synthetic construct
  source 1..17: mol_type = other DNA
cctgagacccagggatg

SEQ ID NO: 160589 - DNA, 17 bp, synthetic construct
  source 1..17: mol_type = other DNA
gcctgagacccagggat

SEQ ID NO: 160590 - DNA, 17 bp, synthetic construct
  source 1..17: mol_type = other DNA
ggcctgagacccaggga

SEQ ID NO: 160591 - DNA, 17 bp, synthetic construct
  source 1..17: mol_type = other DNA
gggcctgagacccaggg

SEQ ID NO: 160592 - DNA, 17 bp, synthetic construct
  source 1..17: mol_type = other DNA
ggggcctgagacccagg

SEQ ID NO: 160593 - DNA, 17 bp, synthetic construct
  source 1..17: mol_type = other DNA
aggggcctgagacccag

SEQ ID NO: 160594 - DNA, 17 bp, synthetic construct
  source 1..17: mol_type = other DNA
gaggggcctgagaccca

SEQ ID NO: 160595 - DNA, 17 bp, synthetic construct
  source 1..17: mol_type = other DNA
ggaggggcctgagaccc

SEQ ID NO: 160596 - DNA, 17 bp, synthetic construct
  source 1..17: mol_type = other DNA
gggaggggcctgagacc

SEQ ID NO: 160597 - DNA, 17 bp, synthetic construct
  source 1..17: mol_type = other DNA
agggaggggcctgagac

SEQ ID NO: 160598 - DNA, 17 bp, synthetic construct
  source 1..17: mol_type = other DNA
cagggaggggcctgaga

SEQ ID NO: 160599 - DNA, 17 bp, synthetic construct
  source 1..17: mol_type = other DNA
ccagggaggggcctgag

SEQ ID NO: 160600 - DNA, 17 bp, synthetic construct
  source 1..17: mol_type = other DNA
cccagggaggggcctga

SEQ ID NO: 160601 - DNA, 17 bp, synthetic construct
  source 1..17: mol_type = other DNA
ccccagggaggggcctg

SEQ ID NO: 160602 - DNA, 17 bp, synthetic construct
  source 1..17: mol_type = other DNA
cccccagggaggggcct

SEQ ID NO: 160603 - DNA, 17 bp, synthetic construct
  source 1..17: mol_type = other DNA
gcccccagggaggggcc

SEQ ID NO: 160604 - DNA, 17 bp, synthetic construct
  source 1..17: mol_type = other DNA
ggcccccagggaggggc

SEQ ID NO: 160605 - DNA, 17 bp, synthetic construct
  source 1..17: mol_type = other DNA
tggcccccagggagggg

SEQ ID NO: 160606 - DNA, 17 bp, synthetic construct
  source 1..17: mol_type = other DNA
gtggcccccagggaggg

SEQ ID NO: 160607 - DNA, 17 bp, synthetic construct
  source 1..17: mol_type = other DNA
tgtggcccccagggagg

SEQ ID NO: 160608 - DNA, 17 bp, synthetic construct
  source 1..17: mol_type = other DNA
ctgtggcccccagggag

SEQ ID NO: 160609 - DNA, 17 bp, synthetic construct
  source 1..17: mol_type = other DNA
cctgtggcccccaggga

SEQ ID NO: 160610 - DNA, 17 bp, synthetic construct
  source 1..17: mol_type = other DNA
ccctgtggcccccaggg

SEQ ID NO: 160611 - DNA, 17 bp, synthetic construct
  source 1..17: mol_type = other DNA
accctgtggcccccagg

SEQ ID NO: 160612 - DNA, 17 bp, synthetic construct
  source 1..17: mol_type = other DNA
gaccctgtggcccccag

SEQ ID NO: 160613 - DNA, 17 bp, synthetic construct
  source 1..17: mol_type = other DNA
cgaccctgtggccccca

SEQ ID NO: 160614 - DNA, 17 bp, synthetic construct
  source 1..17: mol_type = other DNA
ccgaccctgtggccccc

SEQ ID NO: 160615 - DNA, 17 bp, synthetic construct
  source 1..17: mol_type = other DNA
gccgaccctgtggcccc

SEQ ID NO: 160616 - DNA, 17 bp, synthetic construct
  source 1..17: mol_type = other DNA
agccgaccctgtggccc

SEQ ID NO: 160617 - DNA, 17 bp, synthetic construct
  source 1..17: mol_type = other DNA
aagccgaccctgtggcc

SEQ ID NO: 160618 - DNA, 17 bp, synthetic construct
  source 1..17: mol_type = other DNA
gaagccgaccctgtggc

SEQ ID NO: 160619 - DNA, 17 bp, synthetic construct
  source 1..17: mol_type = other DNA
ggaagccgaccctgtgg

SEQ ID NO: 160620 - DNA, 17 bp, synthetic construct
  source 1..17: mol_type = other DNA
cggaagccgaccctgtg

SEQ ID NO: 160621 - DNA, 17 bp, synthetic construct
  source 1..17: mol_type = other DNA
ccggaagccgaccctgt

SEQ ID NO: 160622 - DNA, 17 bp, synthetic construct
  source 1..17: mol_type = other DNA
gccggaagccgaccctg

SEQ ID NO: 160623 - DNA, 17 bp, synthetic construct
  source 1..17: mol_type = other DNA
tgccggaagccgaccct

SEQ ID NO: 160624 - DNA, 17 bp, synthetic construct
  source 1..17: mol_type = other DNA
ctgccggaagccgaccc

SEQ ID NO: 160625 - DNA, 17 bp, synthetic construct
  source 1..17: mol_type = other DNA
gctgccggaagccgacc

SEQ ID NO: 160626 - DNA, 17 bp, synthetic construct
  source 1..17: mol_type = other DNA
cgctgccggaagccgac

SEQ ID NO: 160627 - DNA, 17 bp, synthetic construct
  source 1..17: mol_type = other DNA
acgctgccggaagccga

SEQ ID NO: 160628 - DNA, 17 bp, synthetic construct
  source 1..17: mol_type = other DNA
gacgctgccggaagccg

SEQ ID NO: 160629 - DNA, 17 bp, synthetic construct
  source 1..17: mol_type = other DNA
agacgctgccggaagcc

SEQ ID NO: 160630 - DNA, 17 bp, synthetic construct
  source 1..17: mol_type = other DNA
cagacgctgccggaagc

SEQ ID NO: 160631 - DNA, 17 bp, synthetic construct
  source 1..17: mol_type = other DNA
gcagacgctgccggaag

SEQ ID NO: 160632 - DNA, 17 bp, synthetic construct
  source 1..17: mol_type = other DNA
ggcagacgctgccggaa

SEQ ID NO: 160633 - DNA, 17 bp, synthetic construct
  source 1..17: mol_type = other DNA
aggcagacgctgccgga

SEQ ID NO: 160634 - DNA, 17 bp, synthetic construct
  source 1..17: mol_type = other DNA
gaggcagacgctgccgg

SEQ ID NO: 160635 - DNA, 17 bp, synthetic construct
  source 1..17: mol_type = other DNA
ggaggcagacgctgccg

SEQ ID NO: 160636 - DNA, 17 bp, synthetic construct
  source 1..17: mol_type = other DNA
gggaggcagacgctgcc

SEQ ID NO: 160637 - DNA, 17 bp, synthetic construct
  source 1..17: mol_type = other DNA
ggggaggcagacgctgc

SEQ ID NO: 160638 - DNA, 17 bp, synthetic construct
  source 1..17: mol_type = other DNA
aggggaggcagacgctg

SEQ ID NO: 160639 - DNA, 17 bp, synthetic construct
  source 1..17: mol_type = other DNA
caggggaggcagacgct

SEQ ID NO: 160640 - DNA, 17 bp, synthetic construct
  source 1..17: mol_type = other DNA
gcaggggaggcagacgc

SEQ ID NO: 160641 - DNA, 17 bp, synthetic construct
  source 1..17: mol_type = other DNA
tgcaggggaggcagacg

SEQ ID NO: 160642 - DNA, 17 bp, synthetic construct
  source 1..17: mol_type = other DNA
ctgcaggggaggcagac

SEQ ID NO: 160643 - DNA, 17 bp, synthetic construct
  source 1..17: mol_type = other DNA
tctgcaggggaggcaga

SEQ ID NO: 160644 - DNA, 17 bp, synthetic construct
  source 1..17: mol_type = other DNA
ctctgcaggggaggcag

SEQ ID NO: 160645 - DNA, 17 bp, synthetic construct
  source 1..17: mol_type = other DNA
gctctgcaggggaggca

SEQ ID NO: 160646 - DNA, 17 bp, synthetic construct
  source 1..17: mol_type = other DNA
agctctgcaggggaggc

SEQ ID NO: 160647 - DNA, 17 bp, synthetic construct
  source 1..17: mol_type = other DNA
tagctctgcaggggagg

SEQ ID NO: 160648 - DNA, 17 bp, synthetic construct
  source 1..17: mol_type = other DNA
gtagctctgcaggggag

SEQ ID NO: 160649 - DNA, 17 bp, synthetic construct
  source 1..17: mol_type = other DNA
cgtagctctgcagggga

SEQ ID NO: 160650 - DNA, 17 bp, synthetic construct
  source 1..17: mol_type = other DNA
tcgtagctctgcagggg

SEQ ID NO: 160651 - DNA, 17 bp, synthetic construct
  source 1..17: mol_type = other DNA
ctcgtagctctgcaggg

SEQ ID NO: 160652 - DNA, 17 bp, synthetic construct
  source 1..17: mol_type = other DNA
gctcgtagctctgcagg

SEQ ID NO: 160653 - DNA, 17 bp, synthetic construct
  source 1..17: mol_type = other DNA
agctcgtagctctgcag

SEQ ID NO: 160654 - DNA, 17 bp, synthetic construct
  source 1..17: mol_type = other DNA
cagctcgtagctctgca

SEQ ID NO: 160655 - DNA, 17 bp, synthetic construct
  source 1..17: mol_type = other DNA
tcagctcgtagctctgc

SEQ ID NO: 160656 - DNA, 17 bp, synthetic construct
  source 1..17: mol_type = other DNA
atcagctcgtagctctg

SEQ ID NO: 160657 - DNA, 17 bp, synthetic construct
  source 1..17: mol_type = other DNA
gatcagctcgtagctct

SEQ ID NO: 160658 - DNA, 17 bp, synthetic construct
  source 1..17: mol_type = other DNA
ggatcagctcgtagctc

SEQ ID NO: 160659 - DNA, 17 bp, synthetic construct
  source 1..17: mol_type = other DNA
aggatcagctcgtagct

SEQ ID NO: 160660 - DNA, 17 bp, synthetic construct
  source 1..17: mol_type = other DNA
gaggatcagctcgtagc

SEQ ID NO: 160661 - DNA, 17 bp, synthetic construct
  source 1..17: mol_type = other DNA
ggaggatcagctcgtag

SEQ ID NO: 160662 - DNA, 17 bp, synthetic construct
  source 1..17: mol_type = other DNA
tggaggatcagctcgta

SEQ ID NO: 160663 - DNA, 17 bp, synthetic construct
  source 1..17: mol_type = other DNA
ttggaggatcagctcgt

SEQ ID NO: 160664 - DNA, 17 bp, synthetic construct
  source 1..17: mol_type = other DNA
cttggaggatcagctcg

SEQ ID NO: 160665 - DNA, 17 bp, synthetic construct
  source 1..17: mol_type = other DNA
tcttggaggatcagctc

SEQ ID NO: 160666 - DNA, 17 bp, synthetic construct
  source 1..17: mol_type = other DNA
ctcttggaggatcagct

SEQ ID NO: 160667 - DNA, 17 bp, synthetic construct
  source 1..17: mol_type = other DNA
cctcttggaggatcagc

SEQ ID NO: 160668 - DNA, 17 bp, synthetic construct
  source 1..17: mol_type = other DNA
ccctcttggaggatcag

SEQ ID NO: 160669 - DNA, 17 bp, synthetic construct
  source 1..17: mol_type = other DNA
cccctcttggaggatca

SEQ ID NO: 160670 - DNA, 17 bp, synthetic construct
  source 1..17: mol_type = other DNA
tcccctcttggaggatc

SEQ ID NO: 160671 - DNA, 17 bp, synthetic construct
  source 1..17: mol_type = other DNA
gtcccctcttggaggat

SEQ ID NO: 160672 - DNA, 17 bp, synthetic construct
  source 1..17: mol_type = other DNA
ggtcccctcttggagga

SEQ ID NO: 160673 - DNA, 17 bp, synthetic construct
  source 1..17: mol_type = other DNA
aggtcccctcttggagg

SEQ ID NO: 160674 - DNA, 17 bp, synthetic construct
  source 1..17: mol_type = other DNA
aaggtcccctcttggag

SEQ ID NO: 160675 - DNA, 17 bp, synthetic construct
  source 1..17: mol_type = other DNA
aaaggtcccctcttgga

SEQ ID NO: 160676 - DNA, 17 bp, synthetic construct
  source 1..17: mol_type = other DNA
taaaggtcccctcttgg

SEQ ID NO: 160677 - DNA, 17 bp, synthetic construct
  source 1..17: mol_type = other DNA
ttaaaggtcccctcttg

SEQ ID NO: 160678 - DNA, 17 bp, synthetic construct
  source 1..17: mol_type = other DNA
cttaaaggtcccctctt

SEQ ID NO: 160679 - DNA, 17 bp, synthetic construct
  source 1..17: mol_type = other DNA
ccttaaaggtcccctct

SEQ ID NO: 160680 - DNA, 17 bp, synthetic construct
  source 1..17: mol_type = other DNA
gccttaaaggtcccctc

SEQ ID NO: 160681 - DNA, 17 bp, synthetic construct
  source 1..17: mol_type = other DNA
cgccttaaaggtcccct

SEQ ID NO: 160682 - DNA, 17 bp, synthetic construct
  source 1..17: mol_type = other DNA
ccgccttaaaggtcccc

SEQ ID NO: 160683 - DNA, 17 bp, synthetic construct
  source 1..17: mol_type = other DNA
accgccttaaaggtccc

SEQ ID NO: 160684 - DNA, 17 bp, synthetic construct
  source 1..17: mol_type = other DNA
caccgccttaaaggtcc

SEQ ID NO: 160685 - DNA, 17 bp, synthetic construct
  source 1..17: mol_type = other DNA
ccaccgccttaaaggtc

SEQ ID NO: 160686 - DNA, 17 bp, synthetic construct
  source 1..17: mol_type = other DNA
gccaccgccttaaaggt

SEQ ID NO: 160687 - DNA, 17 bp, synthetic construct
  source 1..17: mol_type = other DNA
cgccaccgccttaaagg

SEQ ID NO: 160688 - DNA, 17 bp, synthetic construct
  source 1..17: mol_type = other DNA
tcgccaccgccttaaag

SEQ ID NO: 160689 - DNA, 17 bp, synthetic construct
  source 1..17: mol_type = other DNA
ctcgccaccgccttaaa

SEQ ID NO: 160690 - DNA, 17 bp, synthetic construct
  source 1..17: mol_type = other DNA
tctcgccaccgccttaa

SEQ ID NO: 160691 - DNA, 17 bp, synthetic construct
  source 1..17: mol_type = other DNA
ctctcgccaccgcctta

SEQ ID NO: 160692 - DNA, 17 bp, synthetic construct
  source 1..17: mol_type = other DNA
cctctcgccaccgcctt

SEQ ID NO: 160693 - DNA, 17 bp, synthetic construct
  source 1..17: mol_type = other DNA
ccctctcgccaccgcct

SEQ ID NO: 160694 - DNA, 17 bp, synthetic construct
  source 1..17: mol_type = other DNA
gccctctcgccaccgcc

SEQ ID NO: 160695 - DNA, 17 bp, synthetic construct
  source 1..17: mol_type = other DNA
ggccctctcgccaccgc

SEQ ID NO: 160696 - DNA, 17 bp, synthetic construct
  source 1..17: mol_type = other DNA
cggccctctcgccaccg

SEQ ID NO: 160697 - DNA, 17 bp, synthetic construct
  source 1..17: mol_type = other DNA
ccggccctctcgccacc

SEQ ID NO: 160698 - DNA, 17 bp, synthetic construct
  source 1..17: mol_type = other DNA
cccggccctctcgccac

SEQ ID NO: 160699 - DNA, 17 bp, synthetic construct
  source 1..17: mol_type = other DNA
acccggccctctcgcca

SEQ ID NO: 160700 - DNA, 17 bp, synthetic construct
  source 1..17: mol_type = other DNA
cacccggccctctcgcc

SEQ ID NO: 160701 - DNA, 17 bp, synthetic construct
  source 1..17: mol_type = other DNA
ccacccggccctctcgc

SEQ ID NO: 160702 - DNA, 17 bp, synthetic construct
  source 1..17: mol_type = other DNA
cccacccggccctctcg

SEQ ID NO: 160703 - DNA, 17 bp, synthetic construct
  source 1..17: mol_type = other DNA
ccccacccggccctctc

SEQ ID NO: 160704 - DNA, 17 bp, synthetic construct
  source 1..17: mol_type = other DNA
tccccacccggccctct

SEQ ID NO: 160705 - DNA, 17 bp, synthetic construct
  source 1..17: mol_type = other DNA
gtccccacccggccctc

SEQ ID NO: 160706 - DNA, 17 bp, synthetic construct
  source 1..17: mol_type = other DNA
ggtccccacccggccct

SEQ ID NO: 160707 - DNA, 17 bp, synthetic construct
  source 1..17: mol_type = other DNA
gggtccccacccggccc

SEQ ID NO: 160708 - DNA, 17 bp, synthetic construct
  source 1..17: mol_type = other DNA
tgggtccccacccggcc

SEQ ID NO: 160709 - DNA, 17 bp, synthetic construct
  source 1..17: mol_type = other DNA
gtgggtccccacccggc

SEQ ID NO: 160710 - DNA, 17 bp, synthetic construct
  source 1..17: mol_type = other DNA
ggtgggtccccacccgg

SEQ ID NO: 160711 - DNA, 17 bp, synthetic construct
  source 1..17: mol_type = other DNA
gggtgggtccccacccg

SEQ ID NO: 160712 - DNA, 17 bp, synthetic construct
  source 1..17: mol_type = other DNA
agggtgggtccccaccc

SEQ ID NO: 160713 - DNA, 17 bp, synthetic construct
  source 1..17: mol_type = other DNA
tagggtgggtccccacc

SEQ ID NO: 160714 - DNA, 17 bp, synthetic construct
  source 1..17: mol_type = other DNA
gtagggtgggtccccac

SEQ ID NO: 160715 - DNA, 17 bp, synthetic construct
  source 1..17: mol_type = other DNA
tgtagggtgggtcccca

SEQ ID NO: 160716 - DNA, 17 bp, synthetic construct
  source 1..17: mol_type = other DNA
ttgtagggtgggtcccc

SEQ ID NO: 160717 - DNA, 17 bp, synthetic construct
  source 1..17: mol_type = other DNA
cttgtagggtgggtccc

SEQ ID NO: 160718 - DNA, 17 bp, synthetic construct
  source 1..17: mol_type = other DNA
tcttgtagggtgggtcc

SEQ ID NO: 160719 - DNA, 17 bp, synthetic construct
  source 1..17: mol_type = other DNA
atcttgtagggtgggtc

SEQ ID NO: 160720 - DNA, 17 bp, synthetic construct
  source 1..17: mol_type = other DNA
tatcttgtagggtgggt

SEQ ID NO: 160721 - DNA, 17 bp, synthetic construct
  source 1..17: mol_type = other DNA
gtatcttgtagggtggg

SEQ ID NO: 160722 - DNA, 17 bp, synthetic construct
  source 1..17: mol_type = other DNA
cgtatcttgtagggtgg

SEQ ID NO: 160723 - DNA, 17 bp, synthetic construct
  source 1..17: mol_type = other DNA
gcgtatcttgtagggtg

SEQ ID NO: 160724 - DNA, 17 bp, synthetic construct
  source 1..17: mol_type = other DNA
agcgtatcttgtagggt

SEQ ID NO: 160725 - DNA, 17 bp, synthetic construct
  source 1..17: mol_type = other DNA
tagcgtatcttgtaggg

SEQ ID NO: 160726 - DNA, 17 bp, synthetic construct
  source 1..17: mol_type = other DNA
gtagcgtatcttgtagg

SEQ ID NO: 160727 - DNA, 17 bp, synthetic construct
  source 1..17: mol_type = other DNA
tgtagcgtatcttgtag

SEQ ID NO: 160728 - DNA, 17 bp, synthetic construct
  source 1..17: mol_type = other DNA
atgtagcgtatcttgta

SEQ ID NO: 160729 - DNA, 17 bp, synthetic construct
  source 1..17: mol_type = other DNA
catgtagcgtatcttgt

SEQ ID NO: 160730 - DNA, 17 bp, synthetic construct
  source 1..17: mol_type = other DNA
ccatgtagcgtatcttg

SEQ ID NO: 160731 - DNA, 17 bp, synthetic construct
  source 1..17: mol_type = other DNA
cccatgtagcgtatctt

SEQ ID NO: 160732 - DNA, 17 bp, synthetic construct
  source 1..17: mol_type = other DNA
ccccatgtagcgtatct

SEQ ID NO: 160733 - DNA, 17 bp, synthetic construct
  source 1..17: mol_type = other DNA
tccccatgtagcgtatc

SEQ ID NO: 160734 - DNA, 17 bp, synthetic construct
  source 1..17: mol_type = other DNA
atccccatgtagcgtat

SEQ ID NO: 160735 - DNA, 17 bp, synthetic construct
  source 1..17: mol_type = other DNA
gatccccatgtagcgta

SEQ ID NO: 160736 - DNA, 17 bp, synthetic construct
  source 1..17: mol_type = other DNA
agatccccatgtagcgt

SEQ ID NO: 160737 - DNA, 17 bp, synthetic construct
  source 1..17: mol_type = other DNA
aagatccccatgtagcg

SEQ ID NO: 160738 - DNA, 17 bp, synthetic construct
  source 1..17: mol_type = other DNA
gaagatccccatgtagc

SEQ ID NO: 160739 - DNA, 17 bp, synthetic construct
  source 1..17: mol_type = other DNA
ggaagatccccatgtag

SEQ ID NO: 160740 - DNA, 17 bp, synthetic construct
  source 1..17: mol_type = other DNA
aggaagatccccatgta

SEQ ID NO: 160741 - DNA, 17 bp, synthetic construct
  source 1..17: mol_type = other DNA
caggaagatccccatgt

SEQ ID NO: 160742 - DNA, 17 bp, synthetic construct
  source 1..17: mol_type = other DNA
ccaggaagatccccatg

SEQ ID NO: 160743 - DNA, 17 bp, synthetic construct
  source 1..17: mol_type = other DNA
accaggaagatccccat

SEQ ID NO: 160744 - DNA, 17 bp, synthetic construct
  source 1..17: mol_type = other DNA
gaccaggaagatcccca

SEQ ID NO: 160745 - DNA, 17 bp, synthetic construct
  source 1..17: mol_type = other DNA
tgaccaggaagatcccc

SEQ ID NO: 160746 - DNA, 17 bp, synthetic construct
  source 1..17: mol_type = other DNA
atgaccaggaagatccc

SEQ ID NO: 160747 - DNA, 17 bp, synthetic construct
  source 1..17: mol_type = other DNA
gatgaccaggaagatcc

SEQ ID NO: 160748 - DNA, 17 bp, synthetic construct
  source 1..17: mol_type = other DNA
cgatgaccaggaagatc

SEQ ID NO: 160749 - DNA, 17 bp, synthetic construct
  source 1..17: mol_type = other DNA
tcgatgaccaggaagat

SEQ ID NO: 160750 - DNA, 17 bp, synthetic construct
  source 1..17: mol_type = other DNA
ctcgatgaccaggaaga

SEQ ID NO: 160751 - DNA, 17 bp, synthetic construct
  source 1..17: mol_type = other DNA
tctcgatgaccaggaag

SEQ ID NO: 160752 - DNA, 17 bp, synthetic construct
  source 1..17: mol_type = other DNA
gtctcgatgaccaggaa

SEQ ID NO: 160753 - DNA, 17 bp, synthetic construct
  source 1..17: mol_type = other DNA
ggtctcgatgaccagga

SEQ ID NO: 160754 - DNA, 17 bp, synthetic construct
  source 1..17: mol_type = other DNA
gggtctcgatgaccagg

SEQ ID NO: 160755 - DNA, 17 bp, synthetic construct
  source 1..17: mol_type = other DNA
tgggtctcgatgaccag

SEQ ID NO: 160756 - DNA, 17 bp, synthetic construct
  source 1..17: mol_type = other DNA
gtgggtctcgatgacca

SEQ ID NO: 160757 - DNA, 17 bp, synthetic construct
  source 1..17: mol_type = other DNA
cgtgggtctcgatgacc

SEQ ID NO: 160758 - DNA, 17 bp, synthetic construct
  source 1..17: mol_type = other DNA
ccgtgggtctcgatgac

SEQ ID NO: 160759 - DNA, 17 bp, synthetic construct
  source 1..17: mol_type = other DNA
cccgtgggtctcgatga

SEQ ID NO: 160760 - DNA, 17 bp, synthetic construct
  source 1..17: mol_type = other DNA
tcccgtgggtctcgatg

SEQ ID NO: 160761 - DNA, 17 bp, synthetic construct
  source 1..17: mol_type = other DNA
atcccgtgggtctcgat

SEQ ID NO: 160762 - DNA, 17 bp, synthetic construct
  source 1..17: mol_type = other DNA
catcccgtgggtctcga

SEQ ID NO: 160763 - DNA, 17 bp, synthetic construct
  source 1..17: mol_type = other DNA
ccatcccgtgggtctcg

SEQ ID NO: 160764 - DNA, 17 bp, synthetic construct
  source 1..17: mol_type = other DNA
gccatcccgtgggtctc

SEQ ID NO: 160765 - DNA, 17 bp, synthetic construct
  source 1..17: mol_type = other DNA
ggccatcccgtgggtct

SEQ ID NO: 160766 - DNA, 17 bp, synthetic construct
  source 1..17: mol_type = other DNA
cggccatcccgtgggtc

SEQ ID NO: 160767 - DNA, 17 bp, synthetic construct
  source 1..17: mol_type = other DNA
acggccatcccgtgggt

SEQ ID NO: 160768 - DNA, 17 bp, synthetic construct
  source 1..17: mol_type = other DNA
cacggccatcccgtggg

SEQ ID NO: 160769 - DNA, 17 bp, synthetic construct
  source 1..17: mol_type = other DNA
acacggccatcccgtgg

SEQ ID NO: 160770 - DNA, 17 bp, synthetic construct
  source 1..17: mol_type = other DNA
gacacggccatcccgtg

SEQ ID NO: 160771 - DNA, 17 bp, synthetic construct
  source 1..17: mol_type = other DNA
ggacacggccatcccgt

SEQ ID NO: 160772 - DNA, 17 bp, synthetic construct
  source 1..17: mol_type = other DNA
aggacacggccatcccg

SEQ ID NO: 160773 - DNA, 17 bp, synthetic construct
  source 1..17: mol_type = other DNA
caggacacggccatccc

SEQ ID NO: 160774 - DNA, 17 bp, synthetic construct
  source 1..17: mol_type = other DNA
ccaggacacggccatcc

SEQ ID NO: 160775 - DNA, 17 bp, synthetic construct
  source 1..17: mol_type = other DNA
cccaggacacggccatc

SEQ ID NO: 160776 - DNA, 17 bp, synthetic construct
  source 1..17: mol_type = other DNA
tcccaggacacggccat

SEQ ID NO: 160777 - DNA, 17 bp, synthetic construct
  source 1..17: mol_type = other DNA
gtcccaggacacggcca

SEQ ID NO: 160778 - DNA, 17 bp, synthetic construct
  source 1..17: mol_type = other DNA
ggtcccaggacacggcc

SEQ ID NO: 160779 - DNA, 17 bp, synthetic construct
  source 1..17: mol_type = other DNA
cggtcccaggacacggc

SEQ ID NO: 160780 - DNA, 17 bp, synthetic construct
  source 1..17: mol_type = other DNA
ccggtcccaggacacgg

SEQ ID NO: 160781 - DNA, 17 bp, synthetic construct
  source 1..17: mol_type = other DNA
tccggtcccaggacacg

SEQ ID NO: 160782 - DNA, 17 bp, synthetic construct
  source 1..17: mol_type = other DNA
ttccggtcccaggacac

SEQ ID NO: 160783 - DNA, 17 bp, synthetic construct
  source 1..17: mol_type = other DNA
cttccggtcccaggaca

SEQ ID NO: 160784 - DNA, 17 bp, synthetic construct
  source 1..17: mol_type = other DNA
tcttccggtcccaggac

SEQ ID NO: 160785 - DNA, 17 bp, synthetic construct
  source 1..17: mol_type = other DNA
gtcttccggtcccagga

SEQ ID NO: 160786 - DNA, 17 bp, synthetic construct
  source 1..17: mol_type = other DNA
ggtcttccggtcccagg

SEQ ID NO: 160787 - DNA, 17 bp, synthetic construct
  source 1..17: mol_type = other DNA
tggtcttccggtcccag

SEQ ID NO: 160788 - DNA, 17 bp, synthetic construct
  source 1..17: mol_type = other DNA
ctggtcttccggtccca

SEQ ID NO: 160789 - DNA, 17 bp, synthetic construct
  source 1..17: mol_type = other DNA
gctggtcttccggtccc

SEQ ID NO: 160790 - DNA, 17 bp, synthetic construct
  source 1..17: mol_type = other DNA
cgctggtcttccggtcc

SEQ ID NO: 160791 - DNA, 17 bp, synthetic construct
  source 1..17: mol_type = other DNA
acgctggtcttccggtc

SEQ ID NO: 160792 - DNA, 17 bp, synthetic construct
  source 1..17: mol_type = other DNA
cacgctggtcttccggt

SEQ ID NO: 160793 - DNA, 17 bp, synthetic construct
  source 1..17: mol_type = other DNA
acacgctggtcttccgg

SEQ ID NO: 160794 - DNA, 17 bp, synthetic construct
  source 1..17: mol_type = other DNA
aacacgctggtcttccg

SEQ ID NO: 160795 - DNA, 17 bp, synthetic construct
  source 1..17: mol_type = other DNA
gaacacgctggtcttcc

SEQ ID NO: 160796 - DNA, 17 bp, synthetic construct
  source 1..17: mol_type = other DNA
tgaacacgctggtcttc

SEQ ID NO: 160797 - DNA, 17 bp, synthetic construct
  source 1..17: mol_type = other DNA
atgaacacgctggtctt

SEQ ID NO: 160798 - DNA, 17 bp, synthetic construct
  source 1..17: mol_type = other DNA
gatgaacacgctggtct

SEQ ID NO: 160799 - DNA, 17 bp, synthetic construct
  source 1..17: mol_type = other DNA
ggatgaacacgctggtc

SEQ ID NO: 160800 - DNA, 17 bp, synthetic construct
  source 1..17: mol_type = other DNA
cggatgaacacgctggt

SEQ ID NO: 160801 - DNA, 17 bp, synthetic construct
  source 1..17: mol_type = other DNA
tcggatgaacacgctgg

SEQ ID NO: 160802 - DNA, 17 bp, synthetic construct
  source 1..17: mol_type = other DNA
gtcggatgaacacgctg

SEQ ID NO: 160803 - DNA, 17 bp, synthetic construct
  source 1..17: mol_type = other DNA
agtcggatgaacacgct

SEQ ID NO: 160804 - DNA, 17 bp, synthetic construct
  source 1..17: mol_type = other DNA
cagtcggatgaacacgc

SEQ ID NO: 160805 - DNA, 17 bp, synthetic construct
  source 1..17: mol_type = other DNA
gcagtcggatgaacacg

SEQ ID NO: 160806 - DNA, 17 bp, synthetic construct
  source 1..17: mol_type = other DNA
tgcagtcggatgaacac

SEQ ID NO: 160807 - DNA, 17 bp, synthetic construct
  source 1..17: mol_type = other DNA
gtgcagtcggatgaaca

SEQ ID NO: 160808 - DNA, 17 bp, synthetic construct
  source 1..17: mol_type = other DNA
ggtgcagtcggatgaac

SEQ ID NO: 160809 - DNA, 17 bp, synthetic construct
  source 1..17: mol_type = other DNA
tggtgcagtcggatgaa

SEQ ID NO: 160810 - DNA, 17 bp, synthetic construct
  source 1..17: mol_type = other DNA
ctggtgcagtcggatga

SEQ ID NO: 160811 - DNA, 17 bp, synthetic construct
  source 1..17: mol_type = other DNA
cctggtgcagtcggatg

SEQ ID NO: 160812 - DNA, 17 bp, synthetic construct
  source 1..17: mol_type = other DNA
tcctggtgcagtcggat

SEQ ID NO: 160813 - DNA, 17 bp, synthetic construct
  source 1..17: mol_type = other DNA
gtcctggtgcagtcgga

SEQ ID NO: 160814 - DNA, 17 bp, synthetic construct
  source 1..17: mol_type = other DNA
agtcctggtgcagtcgg

SEQ ID NO: 160815 - DNA, 17 bp, synthetic construct
  source 1..17: mol_type = other DNA
tagtcctggtgcagtcg

SEQ ID NO: 160816 - DNA, 17 bp, synthetic construct
  source 1..17: mol_type = other DNA
gtagtcctggtgcagtc

SEQ ID NO: 160817 - DNA, 17 bp, synthetic construct
  source 1..17: mol_type = other DNA
tgtagtcctggtgcagt

SEQ ID NO: 160818 - DNA, 17 bp, synthetic construct
  source 1..17: mol_type = other DNA
ttgtagtcctggtgcag

SEQ ID NO: 160819 - DNA, 17 bp, synthetic construct
  source 1..17: mol_type = other DNA
cttgtagtcctggtgca

SEQ ID NO: 160820 - DNA, 17 bp, synthetic construct
  source 1..17: mol_type = other DNA
ccttgtagtcctggtgc

SEQ ID NO: 160821 - DNA, 17 bp, synthetic construct
  source 1..17: mol_type = other DNA
accttgtagtcctggtg

SEQ ID NO: 160822 - DNA, 17 bp, synthetic construct
  source 1..17: mol_type = other DNA
caccttgtagtcctggt

SEQ ID NO: 160823 - DNA, 17 bp, synthetic construct
  source 1..17: mol_type = other DNA
tcaccttgtagtcctgg

SEQ ID NO: 160824 - DNA, 17 bp, synthetic construct
  source 1..17: mol_type = other DNA
ctcaccttgtagtcctg

SEQ ID NO: 160825 - DNA, 17 bp, synthetic construct
  source 1..17: mol_type = other DNA
gctcaccttgtagtcct

SEQ ID NO: 160826 - DNA, 17 bp, synthetic construct
  source 1..17: mol_type = other DNA
agctcaccttgtagtcc

SEQ ID NO: 160827 - DNA, 17 bp, synthetic construct
  source 1..17: mol_type = other DNA
gagctcaccttgtagtc

SEQ ID NO: 160828 - DNA, 17 bp, synthetic construct
  source 1..17: mol_type = other DNA
cgagctcaccttgtagt

SEQ ID NO: 160829 - DNA, 17 bp, synthetic construct
  source 1..17: mol_type = other DNA
ccgagctcaccttgtag

SEQ ID NO: 160830 - DNA, 17 bp, synthetic construct
  source 1..17: mol_type = other DNA
cccgagctcaccttgta

SEQ ID NO: 160831 - DNA, 17 bp, synthetic construct
  source 1..17: mol_type = other DNA
gcccgagctcaccttgt

SEQ ID NO: 160832 - DNA, 17 bp, synthetic construct
  source 1..17: mol_type = other DNA
ggcccgagctcaccttg

SEQ ID NO: 160833 - DNA, 17 bp, synthetic construct
  source 1..17: mol_type = other DNA
cggcccgagctcacctt

SEQ ID NO: 160834 - DNA, 17 bp, synthetic construct
  source 1..17: mol_type = other DNA
acggcccgagctcacct

SEQ ID NO: 160835 - DNA, 17 bp, synthetic construct
  source 1..17: mol_type = other DNA
cacggcccgagctcacc

SEQ ID NO: 160836 - DNA, 17 bp, synthetic construct
  source 1..17: mol_type = other DNA
gcacggcccgagctcac

SEQ ID NO: 160837 - DNA, 17 bp, synthetic construct
  source 1..17: mol_type = other DNA
tgcacggcccgagctca

SEQ ID NO: 160838 - DNA, 17 bp, synthetic construct
  source 1..17: mol_type = other DNA
gtgcacggcccgagctc

SEQ ID NO: 160839 - DNA, 17 bp, synthetic construct
  source 1..17: mol_type = other DNA
agtgcacggcccgagct

SEQ ID NO: 160840 - DNA, 17 bp, synthetic construct
  source 1..17: mol_type = other DNA
gagtgcacggcccgagc

SEQ ID NO: 160841 - DNA, 17 bp, synthetic construct
  source 1..17: mol_type = other DNA
ggagtgcacggcccgag

SEQ ID NO: 160842 - DNA, 17 bp, synthetic construct
  source 1..17: mol_type = other DNA
aggagtgcacggcccga

SEQ ID NO: 160843 - DNA, 17 bp, synthetic construct
  source 1..17: mol_type = other DNA
taggagtgcacggcccg

SEQ ID NO: 160844 - DNA, 17 bp, synthetic construct
  source 1..17: mol_type = other DNA
ctaggagtgcacggccc

SEQ ID NO: 160845 - DNA, 17 bp, synthetic construct
  source 1..17: mol_type = other DNA
cctaggagtgcacggcc

SEQ ID NO: 160846 - DNA, 17 bp, synthetic construct
  source 1..17: mol_type = other DNA
gcctaggagtgcacggc

SEQ ID NO: 160847 - DNA, 17 bp, synthetic construct
  source 1..17: mol_type = other DNA
ggcctaggagtgcacgg

SEQ ID NO: 160848 - DNA, 17 bp, synthetic construct
  source 1..17: mol_type = other DNA
gggcctaggagtgcacg

SEQ ID NO: 160849 - DNA, 17 bp, synthetic construct
  source 1..17: mol_type = other DNA
agggcctaggagtgcac

SEQ ID NO: 160850 - DNA, 17 bp, synthetic construct
  source 1..17: mol_type = other DNA
cagggcctaggagtgca

SEQ ID NO: 160851 - DNA, 17 bp, synthetic construct
  source 1..17: mol_type = other DNA
gcagggcctaggagtgc

SEQ ID NO: 160852 - DNA, 17 bp, synthetic construct
  source 1..17: mol_type = other DNA
tgcagggcctaggagtg

SEQ ID NO: 160853 - DNA, 17 bp, synthetic construct
  source 1..17: mol_type = other DNA
ctgcagggcctaggagt

SEQ ID NO: 160854 - DNA, 17 bp, synthetic construct
  source 1..17: mol_type = other DNA
cctgcagggcctaggag

SEQ ID NO: 160855 - DNA, 17 bp, synthetic construct
  source 1..17: mol_type = other DNA
tcctgcagggcctagga

SEQ ID NO: 160856 - DNA, 17 bp, synthetic construct
  source 1..17: mol_type = other DNA
gtcctgcagggcctagg

SEQ ID NO: 160857 - DNA, 17 bp, synthetic construct
  source 1..17: mol_type = other DNA
ggtcctgcagggcctag

SEQ ID NO: 160858 - DNA, 17 bp, synthetic construct
  source 1..17: mol_type = other DNA
gggtcctgcagggccta

SEQ ID NO: 160859 - DNA, 17 bp, synthetic construct
  source 1..17: mol_type = other DNA
agggtcctgcagggcct

SEQ ID NO: 160860 - DNA, 17 bp, synthetic construct
  source 1..17: mol_type = other DNA
gagggtcctgcagggcc

SEQ ID NO: 160861 - DNA, 17 bp, synthetic construct
  source 1..17: mol_type = other DNA
agagggtcctgcagggc

SEQ ID NO: 160862 - DNA, 17 bp, synthetic construct
  source 1..17: mol_type = other DNA
gagagggtcctgcaggg

SEQ ID NO: 160863 - DNA, 17 bp, synthetic construct
  source 1..17: mol_type = other DNA
tgagagggtcctgcagg

SEQ ID NO: 160864 - DNA, 17 bp, synthetic construct
  source 1..17: mol_type = other DNA
gtgagagggtcctgcag

SEQ ID NO: 160865 - DNA, 17 bp, synthetic construct
  source 1..17: mol_type = other DNA
tgtgagagggtcctgca

SEQ ID NO: 160866 - DNA, 17 bp, synthetic construct
  source 1..17: mol_type = other DNA
ctgtgagagggtcctgc

SEQ ID NO: 160867 - DNA, 17 bp, synthetic construct
  source 1..17: mol_type = other DNA
actgtgagagggtcctg

SEQ ID NO: 160868 - DNA, 17 bp, synthetic construct
  source 1..17: mol_type = other DNA
cactgtgagagggtcct

SEQ ID NO: 160869 - DNA, 17 bp, synthetic construct
  source 1..17: mol_type = other DNA
tcactgtgagagggtcc

SEQ ID NO: 160870 - DNA, 17 bp, synthetic construct
  source 1..17: mol_type = other DNA
gtcactgtgagagggtc

SEQ ID NO: 160871 - DNA, 17 bp, synthetic construct
  source 1..17: mol_type = other DNA
tgtcactgtgagagggt

SEQ ID NO: 160872 - DNA, 17 bp, synthetic construct
  source 1..17: mol_type = other DNA
ctgtcactgtgagaggg

SEQ ID NO: 160873 - DNA, 17 bp, synthetic construct
  source 1..17: mol_type = other DNA
tctgtcactgtgagagg

SEQ ID NO: 160874 - DNA, 17 bp, synthetic construct
  source 1..17: mol_type = other DNA
ttctgtcactgtgagag

SEQ ID NO: 160875 - DNA, 17 bp, synthetic construct
  source 1..17: mol_type = other DNA
tttctgtcactgtgaga

SEQ ID NO: 160876 - DNA, 17 bp, synthetic construct
  source 1..17: mol_type = other DNA
gtttctgtcactgtgag

SEQ ID NO: 160877 - DNA, 17 bp, synthetic construct
  source 1..17: mol_type = other DNA
ggtttctgtcactgtga

SEQ ID NO: 160878 - DNA, 17 bp, synthetic construct
  source 1..17: mol_type = other DNA
gggtttctgtcactgtg

SEQ ID NO: 160879 - DNA, 17 bp, synthetic construct
  source 1..17: mol_type = other DNA
agggtttctgtcactgt

SEQ ID NO: 160880 - DNA, 17 bp, synthetic construct
  source 1..17: mol_type = other DNA
cagggtttctgtcactg

SEQ ID NO: 160881 - DNA, 17 bp, synthetic construct
  source 1..17: mol_type = other DNA
ccagggtttctgtcact

SEQ ID NO: 160882 - DNA, 17 bp, synthetic construct
  source 1..17: mol_type = other DNA
accagggtttctgtcac

SEQ ID NO: 160883 - DNA, 17 bp, synthetic construct
  source 1..17: mol_type = other DNA
caccagggtttctgtca

SEQ ID NO: 160884 - DNA, 17 bp, synthetic construct
  source 1..17: mol_type = other DNA
gcaccagggtttctgtc

SEQ ID NO: 160885 - DNA, 17 bp, synthetic construct
  source 1..17: mol_type = other DNA
ggcaccagggtttctgt

SEQ ID NO: 160886 - DNA, 17 bp, synthetic construct
  source 1..17: mol_type = other DNA
tggcaccagggtttctg

SEQ ID NO: 160887 - DNA, 17 bp, synthetic construct
  source 1..17: mol_type = other DNA
ctggcaccagggtttct

SEQ ID NO: 160888 - DNA, 17 bp, synthetic construct
  source 1..17: mol_type = other DNA
cctggcaccagggtttc

SEQ ID NO: 160889 - DNA, 17 bp, synthetic construct
  source 1..17: mol_type = other DNA
acctggcaccagggttt

SEQ ID NO: 160890 - DNA, 17 bp, synthetic construct
  source 1..17: mol_type = other DNA
cacctggcaccagggtt

SEQ ID NO: 160891 - DNA, 17 bp, synthetic construct
  source 1..17: mol_type = other DNA
ccacctggcaccagggt

SEQ ID NO: 160892 - DNA, 17 bp, synthetic construct
  source 1..17: mol_type = other DNA
cccacctggcaccaggg

SEQ ID NO: 160893 - DNA, 17 bp, synthetic construct
  source 1..17: mol_type = other DNA
ccccacctggcaccagg

SEQ ID NO: 160894 - DNA, 17 bp, synthetic construct
  source 1..17: mol_type = other DNA
accccacctggcaccag

SEQ ID NO: 160895 - DNA, 17 bp, synthetic construct
  source 1..17: mol_type = other DNA
gaccccacctggcacca

SEQ ID NO: 160896 - DNA, 17 bp, synthetic construct
  source 1..17: mol_type = other DNA
agaccccacctggcacc

SEQ ID NO: 160897 - DNA, 17 bp, synthetic construct
  source 1..17: mol_type = other DNA
cagaccccacctggcac

SEQ ID NO: 160898 - DNA, 17 bp, synthetic construct
  source 1..17: mol_type = other DNA
acagaccccacctggca

SEQ ID NO: 160899 - DNA, 17 bp, synthetic construct
  source 1..17: mol_type = other DNA
cacagaccccacctggc

SEQ ID NO: 160900 - DNA, 17 bp, synthetic construct
  source 1..17: mol_type = other DNA
ccacagaccccacctgg

SEQ ID NO: 160901 - DNA, 17 bp, synthetic construct
  source 1..17: mol_type = other DNA
cccacagaccccacctg

SEQ ID NO: 160902 - DNA, 17 bp, synthetic construct
  source 1..17: mol_type = other DNA
tcccacagaccccacct

SEQ ID NO: 160903 - DNA, 17 bp, synthetic construct
  source 1..17: mol_type = other DNA
gtcccacagaccccacc

SEQ ID NO: 160904 - DNA, 17 bp, synthetic construct
  source 1..17: mol_type = other DNA
agtcccacagaccccac

SEQ ID NO: 160905 - DNA, 17 bp, synthetic construct
  source 1..17: mol_type = other DNA
gagtcccacagacccca

SEQ ID NO: 160906 - DNA, 17 bp, synthetic construct
  source 1..17: mol_type = other DNA
cgagtcccacagacccc

SEQ ID NO: 160907 - DNA, 17 bp, synthetic construct
  source 1..17: mol_type = other DNA
gcgagtcccacagaccc

SEQ ID NO: 160908 - DNA, 17 bp, synthetic construct
  source 1..17: mol_type = other DNA
agcgagtcccacagacc

SEQ ID NO: 160909 - DNA, 17 bp, synthetic construct
  source 1..17: mol_type = other DNA
cagcgagtcccacagac

SEQ ID NO: 160910 - DNA, 17 bp, synthetic construct
  source 1..17: mol_type = other DNA
tcagcgagtcccacaga

SEQ ID NO: 160911 - DNA, 17 bp, synthetic construct
  source 1..17: mol_type = other DNA
gtcagcgagtcccacag

SEQ ID NO: 160912 - DNA, 17 bp, synthetic construct
  source 1..17: mol_type = other DNA
ggtcagcgagtcccaca

SEQ ID NO: 160913 - DNA, 17 bp, synthetic construct
  source 1..17: mol_type = other DNA
gggtcagcgagtcccac

SEQ ID NO: 160914 - DNA, 17 bp, synthetic construct
  source 1..17: mol_type = other DNA
cgggtcagcgagtccca

SEQ ID NO: 160915 - DNA, 17 bp, synthetic construct
  source 1..17: mol_type = other DNA
acgggtcagcgagtccc

SEQ ID NO: 160916 - DNA, 17 bp, synthetic construct
  source 1..17: mol_type = other DNA
cacgggtcagcgagtcc

SEQ ID NO: 160917 - DNA, 17 bp, synthetic construct
  source 1..17: mol_type = other DNA
ccacgggtcagcgagtc

SEQ ID NO: 160918 - DNA, 17 bp, synthetic construct
  source 1..17: mol_type = other DNA
cccacgggtcagcgagt

SEQ ID NO: 160919 - DNA, 17 bp, synthetic construct
  source 1..17: mol_type = other DNA
acccacgggtcagcgag

SEQ ID NO: 160920 - DNA, 17 bp, synthetic construct
  source 1..17: mol_type = other DNA
cacccacgggtcagcga

SEQ ID NO: 160921 - DNA, 17 bp, synthetic construct
  source 1..17: mol_type = other DNA
gcacccacgggtcagcg

SEQ ID NO: 160922 - DNA, 17 bp, synthetic construct
  source 1..17: mol_type = other DNA
cgcacccacgggtcagc

SEQ ID NO: 160923 - DNA, 17 bp, synthetic construct
  source 1..17: mol_type = other DNA
acgcacccacgggtcag

SEQ ID NO: 160924 - DNA, 17 bp, synthetic construct
  source 1..17: mol_type = other DNA
cacgcacccacgggtca

SEQ ID NO: 160925 - DNA, 17 bp, synthetic construct
  source 1..17: mol_type = other DNA
tcacgcacccacgggtc

SEQ ID NO: 160926 - DNA, 17 bp, synthetic construct
  source 1..17: mol_type = other DNA
ctcacgcacccacgggt

SEQ ID NO: 160927 - DNA, 17 bp, synthetic construct
  source 1..17: mol_type = other DNA
gctcacgcacccacggg

SEQ ID NO: 160928 - DNA, 17 bp, synthetic construct
  source 1..17: mol_type = other DNA
ggctcacgcacccacgg

SEQ ID NO: 160929 - DNA, 17 bp, synthetic construct
  source 1..17: mol_type = other DNA
aggctcacgcacccacg

SEQ ID NO: 160930 - DNA, 17 bp, synthetic construct
  source 1..17: mol_type = other DNA
caggctcacgcacccac

SEQ ID NO: 160931 - DNA, 17 bp, synthetic construct
  source 1..17: mol_type = other DNA
ccaggctcacgcaccca

SEQ ID NO: 160932 - DNA, 17 bp, synthetic construct
  source 1..17: mol_type = other DNA
gccaggctcacgcaccc

SEQ ID NO: 160933 - DNA, 17 bp, synthetic construct
  source 1..17: mol_type = other DNA
agccaggctcacgcacc

SEQ ID NO: 160934 - DNA, 17 bp, synthetic construct
  source 1..17: mol_type = other DNA
cagccaggctcacgcac

SEQ ID NO: 160935 - DNA, 17 bp, synthetic construct
  source 1..17: mol_type = other DNA
ccagccaggctcacgca

SEQ ID NO: 160936 - DNA, 17 bp, synthetic construct
  source 1..17: mol_type = other DNA
accagccaggctcacgc

SEQ ID NO: 160937 - DNA, 17 bp, synthetic construct
  source 1..17: mol_type = other DNA
caccagccaggctcacg

SEQ ID NO: 160938 - DNA, 17 bp, synthetic construct
  source 1..17: mol_type = other DNA
tcaccagccaggctcac

SEQ ID NO: 160939 - DNA, 17 bp, synthetic construct
  source 1..17: mol_type = other DNA
ctcaccagccaggctca

SEQ ID NO: 160940 - DNA, 17 bp, synthetic construct
  source 1..17: mol_type = other DNA
cctcaccagccaggctc

SEQ ID NO: 160941 - DNA, 17 bp, synthetic construct
  source 1..17: mol_type = other DNA
ccctcaccagccaggct

SEQ ID NO: 160942 - DNA, 17 bp, synthetic construct
  source 1..17: mol_type = other DNA
gccctcaccagccaggc

SEQ ID NO: 160943 - DNA, 17 bp, synthetic construct
  source 1..17: mol_type = other DNA
ggccctcaccagccagg

SEQ ID NO: 160944 - DNA, 17 bp, synthetic construct
  source 1..17: mol_type = other DNA
gggccctcaccagccag

SEQ ID NO: 160945 - DNA, 17 bp, synthetic construct
  source 1..17: mol_type = other DNA
agggccctcaccagcca

SEQ ID NO: 160946 - DNA, 17 bp, synthetic construct
  source 1..17: mol_type = other DNA
cagggccctcaccagcc

SEQ ID NO: 160947 - DNA, 17 bp, synthetic construct
  source 1..17: mol_type = other DNA
gcagggccctcaccagc

SEQ ID NO: 160948 - DNA, 17 bp, synthetic construct
  source 1..17: mol_type = other DNA
ggcagggccctcaccag

SEQ ID NO: 160949 - DNA, 17 bp, synthetic construct
  source 1..17: mol_type = other DNA
aggcagggccctcacca

SEQ ID NO: 160950 - DNA, 17 bp, synthetic construct
  source 1..17: mol_type = other DNA
caggcagggccctcacc

SEQ ID NO: 160951 - DNA, 17 bp, synthetic construct
  source 1..17: mol_type = other DNA
acaggcagggccctcac

SEQ ID NO: 160952 - DNA, 17 bp, synthetic construct
  source 1..17: mol_type = other DNA
cacaggcagggccctca

SEQ ID NO: 160953 - DNA, 17 bp, synthetic construct
  source 1..17: mol_type = other DNA
ccacaggcagggccctc

SEQ ID NO: 160954 - DNA, 17 bp, synthetic construct
  source 1..17: mol_type = other DNA
gccacaggcagggccct

SEQ ID NO: 160955 - DNA, 17 bp, synthetic construct
  source 1..17: mol_type = other DNA
ggccacaggcagggccc

SEQ ID NO: 160956 - DNA, 17 bp, synthetic construct
  source 1..17: mol_type = other DNA
aggccacaggcagggcc

SEQ ID NO: 160957 - DNA, 17 bp, synthetic construct
  source 1..17: mol_type = other DNA
gaggccacaggcagggc

SEQ ID NO: 160958 - DNA, 17 bp, synthetic construct
  source 1..17: mol_type = other DNA
ggaggccacaggcaggg

SEQ ID NO: 160959 - DNA, 17 bp, synthetic construct
  source 1..17: mol_type = other DNA
tggaggccacaggcagg

SEQ ID NO: 160960 - DNA, 17 bp, synthetic construct
  source 1..17: mol_type = other DNA
gtggaggccacaggcag

SEQ ID NO: 160961 - DNA, 17 bp, synthetic construct
  source 1..17: mol_type = other DNA
tgtggaggccacaggca

SEQ ID NO: 160962 - DNA, 17 bp, synthetic construct
  source 1..17: mol_type = other DNA
ctgtggaggccacaggc

SEQ ID NO: 160963 - DNA, 17 bp, synthetic construct
  source 1..17: mol_type = other DNA
actgtggaggccacagg

SEQ ID NO: 160964 - DNA, 17 bp, synthetic construct
  source 1..17: mol_type = other DNA
cactgtggaggccacag

SEQ ID NO: 160965 - DNA, 17 bp, synthetic construct
  source 1..17: mol_type = other DNA
ccactgtggaggccaca

SEQ ID NO: 160966 - DNA, 17 bp, synthetic construct
  source 1..17: mol_type = other DNA
cccactgtggaggccac

SEQ ID NO: 160967 - DNA, 17 bp, synthetic construct
  source 1..17: mol_type = other DNA
gcccactgtggaggcca

SEQ ID NO: 160968 - DNA, 17 bp, synthetic construct
  source 1..17: mol_type = other DNA
tgcccactgtggaggcc

SEQ ID NO: 160969 - DNA, 17 bp, synthetic construct
  source 1..17: mol_type = other DNA
ctgcccactgtggaggc

SEQ ID NO: 160970 - DNA, 17 bp, synthetic construct
  source 1..17: mol_type = other DNA
tctgcccactgtggagg

SEQ ID NO: 160971 - DNA, 17 bp, synthetic construct
  source 1..17: mol_type = other DNA
ctctgcccactgtggag

SEQ ID NO: 160972 - DNA, 17 bp, synthetic construct
  source 1..17: mol_type = other DNA
cctctgcccactgtgga

SEQ ID NO: 160973 - DNA, 17 bp, synthetic construct
  source 1..17: mol_type = other DNA
tcctctgcccactgtgg

SEQ ID NO: 160974 - DNA, 17 bp, synthetic construct
  source 1..17: mol_type = other DNA
atcctctgcccactgtg

SEQ ID NO: 160975 - DNA, 17 bp, synthetic construct
  source 1..17: mol_type = other DNA
aatcctctgcccactgt

SEQ ID NO: 160976 - DNA, 17 bp, synthetic construct
  source 1..17: mol_type = other DNA
aaatcctctgcccactg

SEQ ID NO: 160977 - DNA, 17 bp, synthetic construct
  source 1..17: mol_type = other DNA
aaaatcctctgcccact

SEQ ID NO: 160978 - DNA, 17 bp, synthetic construct
  source 1..17: mol_type = other DNA
caaaatcctctgcccac

SEQ ID NO: 160979 - DNA, 17 bp, synthetic construct
  source 1..17: mol_type = other DNA
gcaaaatcctctgccca

SEQ ID NO: 160980 - DNA, 17 bp, synthetic construct
  source 1..17: mol_type = other DNA
tgcaaaatcctctgccc

SEQ ID NO: 160981 - DNA, 17 bp, synthetic construct
  source 1..17: mol_type = other DNA
ctgcaaaatcctctgcc

SEQ ID NO: 160982 - DNA, 17 bp, synthetic construct
  source 1..17: mol_type = other DNA
cctgcaaaatcctctgc

SEQ ID NO: 160983 - DNA, 17 bp, synthetic construct
  source 1..17: mol_type = other DNA
ccctgcaaaatcctctg

SEQ ID NO: 160984 - DNA, 17 bp, synthetic construct
  source 1..17: mol_type = other DNA
tccctgcaaaatcctct

SEQ ID NO: 160985 - DNA, 17 bp, synthetic construct
  source 1..17: mol_type = other DNA
ttccctgcaaaatcctc

SEQ ID NO: 160986 - DNA, 17 bp, synthetic construct
  source 1..17: mol_type = other DNA
cttccctgcaaaatcct

SEQ ID NO: 160987 - DNA, 17 bp, synthetic construct
  source 1..17: mol_type = other DNA
gcttccctgcaaaatcc

SEQ ID NO: 160988 - DNA, 17 bp, synthetic construct
  source 1..17: mol_type = other DNA
tgcttccctgcaaaatc

SEQ ID NO: 160989 - DNA, 17 bp, synthetic construct
  source 1..17: mol_type = other DNA
ctgcttccctgcaaaat

SEQ ID NO: 160990 - DNA, 17 bp, synthetic construct
  source 1..17: mol_type = other DNA
cctgcttccctgcaaaa

SEQ ID NO: 160991 - DNA, 17 bp, synthetic construct
  source 1..17: mol_type = other DNA
acctgcttccctgcaaa

SEQ ID NO: 160992 - DNA, 17 bp, synthetic construct
  source 1..17: mol_type = other DNA
cacctgcttccctgcaa

SEQ ID NO: 160993 - DNA, 17 bp, synthetic construct
  source 1..17: mol_type = other DNA
gcacctgcttccctgca

SEQ ID NO: 160994 - DNA, 17 bp, synthetic construct
  source 1..17: mol_type = other DNA
ggcacctgcttccctgc

SEQ ID NO: 160995 - DNA, 17 bp, synthetic construct
  source 1..17: mol_type = other DNA
tggcacctgcttccctg

SEQ ID NO: 160996 - DNA, 17 bp, synthetic construct
  source 1..17: mol_type = other DNA
gtggcacctgcttccct

SEQ ID NO: 160997 - DNA, 17 bp, synthetic construct
  source 1..17: mol_type = other DNA
ggtggcacctgcttccc

SEQ ID NO: 160998 - DNA, 17 bp, synthetic construct
  source 1..17: mol_type = other DNA
gggtggcacctgcttcc

SEQ ID NO: 160999 - DNA, 17 bp, synthetic construct
  source 1..17: mol_type = other DNA
tgggtggcacctgcttc

SEQ ID NO: 161000 - DNA, 17 bp, synthetic construct
  source 1..17: mol_type = other DNA
ctgggtggcacctgctt

SEQ ID NO: 161001 - DNA, 17 bp, synthetic construct
  source 1..17: mol_type = other DNA
gctgggtggcacctgct

SEQ ID NO: 161002 - DNA, 17 bp, synthetic construct
  source 1..17: mol_type = other DNA
cgctgggtggcacctgc

SEQ ID NO: 161003 - DNA, 17 bp, synthetic construct
  source 1..17: mol_type = other DNA
ccgctgggtggcacctg

SEQ ID NO: 161004 - DNA, 17 bp, synthetic construct
  source 1..17: mol_type = other DNA
gccgctgggtggcacct

SEQ ID NO: 161005 - DNA, 17 bp, synthetic construct
  source 1..17: mol_type = other DNA
ggccgctgggtggcacc

SEQ ID NO: 161006 - DNA, 17 bp, synthetic construct
  source 1..17: mol_type = other DNA
gggccgctgggtggcac

SEQ ID NO: 161007 - DNA, 17 bp, synthetic construct
  source 1..17: mol_type = other DNA
tgggccgctgggtggca

SEQ ID NO: 161008 - DNA, 17 bp, synthetic construct
  source 1..17: mol_type = other DNA
gtgggccgctgggtggc

SEQ ID NO: 161009 - DNA, 17 bp, synthetic construct
  source 1..17: mol_type = other DNA
ggtgggccgctgggtgg

SEQ ID NO: 161010 - DNA, 17 bp, synthetic construct
  source 1..17: mol_type = other DNA
gggtgggccgctgggtg

SEQ ID NO: 161011 - DNA, 17 bp, synthetic construct
  source 1..17: mol_type = other DNA
tgggtgggccgctgggt

SEQ ID NO: 161012 - DNA, 17 bp, synthetic construct
  source 1..17: mol_type = other DNA
ctgggtgggccgctggg

SEQ ID NO: 161013 - DNA, 17 bp, synthetic construct
  source 1..17: mol_type = other DNA
cctgggtgggccgctgg

SEQ ID NO: 161014 - DNA, 17 bp, synthetic construct
  source 1..17: mol_type = other DNA
ccctgggtgggccgctg

SEQ ID NO: 161015 - DNA, 17 bp, synthetic construct
  source 1..17: mol_type = other DNA
tccctgggtgggccgct

SEQ ID NO: 161016 - DNA, 17 bp, synthetic construct
  source 1..17: mol_type = other DNA
gtccctgggtgggccgc

SEQ ID NO: 161017 - DNA, 17 bp, synthetic construct
  source 1..17: mol_type = other DNA
ggtccctgggtgggccg

SEQ ID NO: 161018 - DNA, 17 bp, synthetic construct
  source 1..17: mol_type = other DNA
gggtccctgggtgggcc

SEQ ID NO: 161019 - DNA, 17 bp, synthetic construct
  source 1..17: mol_type = other DNA
tgggtccctgggtgggc

SEQ ID NO: 161020 - DNA, 17 bp, synthetic construct
  source 1..17: mol_type = other DNA
gtgggtccctgggtggg

SEQ ID NO: 161021 - DNA, 17 bp, synthetic construct
  source 1..17: mol_type = other DNA
agtgggtccctgggtgg

SEQ ID NO: 161022 - DNA, 17 bp, synthetic construct
  source 1..17: mol_type = other DNA
cagtgggtccctgggtg

SEQ ID NO: 161023 - DNA, 17 bp, synthetic construct
  source 1..17: mol_type = other DNA
gcagtgggtccctgggt

SEQ ID NO: 161024 - DNA, 17 bp, synthetic construct
  source 1..17: mol_type = other DNA
tgcagtgggtccctggg

SEQ ID NO: 161025 - DNA, 17 bp, synthetic construct
  source 1..17: mol_type = other DNA
gtgcagtgggtccctgg

SEQ ID NO: 161026 - DNA, 17 bp, synthetic construct
  source 1..17: mol_type = other DNA
tgtgcagtgggtccctg

SEQ ID NO: 161027 - DNA, 17 bp, synthetic construct
  source 1..17: mol_type = other DNA
gtgtgcagtgggtccct

SEQ ID NO: 161028 - DNA, 17 bp, synthetic construct
  source 1..17: mol_type = other DNA
ggtgtgcagtgggtccc

SEQ ID NO: 161029 - DNA, 17 bp, synthetic construct
  source 1..17: mol_type = other DNA
aggtgtgcagtgggtcc

SEQ ID NO: 161030 - DNA, 17 bp, synthetic construct
  source 1..17: mol_type = other DNA
caggtgtgcagtgggtc

SEQ ID NO: 161031 - DNA, 17 bp, synthetic construct
  source 1..17: mol_type = other DNA
acaggtgtgcagtgggt

SEQ ID NO: 161032 - DNA, 17 bp, synthetic construct
  source 1..17: mol_type = other DNA
gacaggtgtgcagtggg

SEQ ID NO: 161033 - DNA, 17 bp, synthetic construct
  source 1..17: mol_type = other DNA
agacaggtgtgcagtgg

SEQ ID NO: 161034 - DNA, 17 bp, synthetic construct
  source 1..17: mol_type = other DNA
gagacaggtgtgcagtg

SEQ ID NO: 161035 - DNA, 17 bp, synthetic construct
  source 1..17: mol_type = other DNA
ggagacaggtgtgcagt

SEQ ID NO: 161036 - DNA, 17 bp, synthetic construct
  source 1..17: mol_type = other DNA
aggagacaggtgtgcag

SEQ ID NO: 161037 - DNA, 17 bp, synthetic construct
  source 1..17: mol_type = other DNA
taggagacaggtgtgca

SEQ ID NO: 161038 - DNA, 17 bp, synthetic construct
  source 1..17: mol_type = other DNA
gtaggagacaggtgtgc

SEQ ID NO: 161039 - DNA, 17 bp, synthetic construct
  source 1..17: mol_type = other DNA
tgtaggagacaggtgtg

SEQ ID NO: 161040 - DNA, 17 bp, synthetic construct
  source 1..17: mol_type = other DNA
ttgtaggagacaggtgt

SEQ ID NO: 161041 - DNA, 17 bp, synthetic construct
  source 1..17: mol_type = other DNA
cttgtaggagacaggtg

SEQ ID NO: 161042 - DNA, 17 bp, synthetic construct
  source 1..17: mol_type = other DNA
acttgtaggagacaggt

SEQ ID NO: 161043 - DNA, 17 bp, synthetic construct
  source 1..17: mol_type = other DNA
aacttgtaggagacagg

SEQ ID NO: 161044 - DNA, 17 bp, synthetic construct
  source 1..17: mol_type = other DNA
gaacttgtaggagacag

SEQ ID NO: 161045 - DNA, 17 bp, synthetic construct
  source 1..17: mol_type = other DNA
tgaacttgtaggagaca

SEQ ID NO: 161046 - DNA, 17 bp, synthetic construct
  source 1..17: mol_type = other DNA
gtgaacttgtaggagac

SEQ ID NO: 161047 - DNA, 17 bp, synthetic construct
  source 1..17: mol_type = other DNA
ggtgaacttgtaggaga

SEQ ID NO: 161048 - DNA, 17 bp, synthetic construct
  source 1..17: mol_type = other DNA
tggtgaacttgtaggag

SEQ ID NO: 161049 - DNA, 17 bp, synthetic construct
  source 1..17: mol_type = other DNA
ctggtgaacttgtagga

SEQ ID NO: 161050 - DNA, 17 bp, synthetic construct
  source 1..17: mol_type = other DNA
cctggtgaacttgtagg

SEQ ID NO: 161051 - DNA, 17 bp, synthetic construct
  source 1..17: mol_type = other DNA
gcctggtgaacttgtag

SEQ ID NO: 161052 - DNA, 17 bp, synthetic construct
  source 1..17: mol_type = other DNA
tgcctggtgaacttgta

SEQ ID NO: 161053 - DNA, 17 bp, synthetic construct
  source 1..17: mol_type = other DNA
gtgcctggtgaacttgt

SEQ ID NO: 161054 - DNA, 17 bp, synthetic construct
  source 1..17: mol_type = other DNA
agtgcctggtgaacttg

SEQ ID NO: 161055 - DNA, 17 bp, synthetic construct
  source 1..17: mol_type = other DNA
cagtgcctggtgaactt

SEQ ID NO: 161056 - DNA, 17 bp, synthetic construct
  source 1..17: mol_type = other DNA
gcagtgcctggtgaact

SEQ ID NO: 161057 - DNA, 17 bp, synthetic construct
  source 1..17: mol_type = other DNA
ggcagtgcctggtgaac

SEQ ID NO: 161058 - DNA, 17 bp, synthetic construct
  source 1..17: mol_type = other DNA
aggcagtgcctggtgaa

SEQ ID NO: 161059 - DNA, 17 bp, synthetic construct
  source 1..17: mol_type = other DNA
caggcagtgcctggtga

SEQ ID NO: 161060 - DNA, 17 bp, synthetic construct
  source 1..17: mol_type = other DNA
ccaggcagtgcctggtg

SEQ ID NO: 161061 - DNA, 17 bp, synthetic construct
  source 1..17: mol_type = other DNA
cccaggcagtgcctggt

SEQ ID NO: 161062 - DNA, 17 bp, synthetic construct
  source 1..17: mol_type = other DNA
ccccaggcagtgcctgg

SEQ ID NO: 161063 - DNA, 17 bp, synthetic construct
  source 1..17: mol_type = other DNA
tccccaggcagtgcctg

SEQ ID NO: 161064 - DNA, 17 bp, synthetic construct
  source 1..17: mol_type = other DNA
ttccccaggcagtgcct

SEQ ID NO: 161065 - DNA, 17 bp, synthetic construct
  source 1..17: mol_type = other DNA
gttccccaggcagtgcc

SEQ ID NO: 161066 - DNA, 17 bp, synthetic construct
  source 1..17: mol_type = other DNA
ggttccccaggcagtgc

SEQ ID NO: 161067 - DNA, 17 bp, synthetic construct
  source 1..17: mol_type = other DNA
cggttccccaggcagtg

SEQ ID NO: 161068 - DNA, 17 bp, synthetic construct
  source 1..17: mol_type = other DNA
ccggttccccaggcagt

SEQ ID NO: 161069 - DNA, 17 bp, synthetic construct
  source 1..17: mol_type = other DNA
gccggttccccaggcag

SEQ ID NO: 161070 - DNA, 17 bp, synthetic construct
  source 1..17: mol_type = other DNA
agccggttccccaggca

SEQ ID NO: 161071 - DNA, 17 bp, synthetic construct
  source 1..17: mol_type = other DNA
cagccggttccccaggc

SEQ ID NO: 161072 - DNA, 17 bp, synthetic construct
  source 1..17: mol_type = other DNA
gcagccggttccccagg

SEQ ID NO: 161073 - DNA, 17 bp, synthetic construct
  source 1..17: mol_type = other DNA
ggcagccggttccccag

SEQ ID NO: 161074 - DNA, 17 bp, synthetic construct
  source 1..17: mol_type = other DNA
gggcagccggttcccca

SEQ ID NO: 161075 - DNA, 17 bp, synthetic construct
  source 1..17: mol_type = other DNA
agggcagccggttcccc

SEQ ID NO: 161076 - DNA, 17 bp, synthetic construct
  source 1..17: mol_type = other DNA
gagggcagccggttccc

SEQ ID NO: 161077 - DNA, 17 bp, synthetic construct
  source 1..17: mol_type = other DNA
ggagggcagccggttcc

SEQ ID NO: 161078 - DNA, 17 bp, synthetic construct
  source 1..17: mol_type = other DNA
gggagggcagccggttc

SEQ ID NO: 161079 - DNA, 17 bp, synthetic construct
  source 1..17: mol_type = other DNA
agggagggcagccggtt

SEQ ID NO: 161080 - DNA, 17 bp, synthetic construct
  source 1..17: mol_type = other DNA
gagggagggcagccggt

SEQ ID NO: 161081 - DNA, 17 bp, synthetic construct
  source 1..17: mol_type = other DNA
ggagggagggcagccgg

SEQ ID NO: 161082 - DNA, 17 bp, synthetic construct
  source 1..17: mol_type = other DNA
tggagggagggcagccg

SEQ ID NO: 161083 - DNA, 17 bp, synthetic construct
  source 1..17: mol_type = other DNA
atggagggagggcagcc

SEQ ID NO: 161084 - DNA, 17 bp, synthetic construct
  source 1..17: mol_type = other DNA
gatggagggagggcagc

SEQ ID NO: 161085 - DNA, 17 bp, synthetic construct
  source 1..17: mol_type = other DNA
ggatggagggagggcag

SEQ ID NO: 161086 - DNA, 17 bp, synthetic construct
  source 1..17: mol_type = other DNA
gggatggagggagggca

SEQ ID NO: 161087 - DNA, 17 bp, synthetic construct
  source 1..17: mol_type = other DNA
ggggatggagggagggc

SEQ ID NO: 161088 - DNA, 17 bp, synthetic construct
  source 1..17: mol_type = other DNA
gggggatggagggaggg

SEQ ID NO: 161089 - DNA, 17 bp, synthetic construct
  source 1..17: mol_type = other DNA
cgggggatggagggagg

SEQ ID NO: 161090 - DNA, 17 bp, synthetic construct
  source 1..17: mol_type = other DNA
tcgggggatggagggag

SEQ ID NO: 161091 - DNA, 17 bp, synthetic construct
  source 1..17: mol_type = other DNA
ctcgggggatggaggga

SEQ ID NO: 161092 - DNA, 17 bp, synthetic construct
  source 1..17: mol_type = other DNA
cctcgggggatggaggg

SEQ ID NO: 161093 - DNA, 17 bp, synthetic construct
  source 1..17: mol_type = other DNA
ccctcgggggatggagg

SEQ ID NO: 161094 - DNA, 17 bp, synthetic construct
  source 1..17: mol_type = other DNA
gccctcgggggatggag

SEQ ID NO: 161095 - DNA, 17 bp, synthetic construct
  source 1..17: mol_type = other DNA
agccctcgggggatgga

SEQ ID NO: 161096 - DNA, 17 bp, synthetic construct
  source 1..17: mol_type = other DNA
gagccctcgggggatgg

SEQ ID NO: 161097 - DNA, 17 bp, synthetic construct
  source 1..17: mol_type = other DNA
agagccctcgggggatg

SEQ ID NO: 161098 - DNA, 17 bp, synthetic construct
  source 1..17: mol_type = other DNA
cagagccctcgggggat

SEQ ID NO: 161099 - DNA, 17 bp, synthetic construct
  source 1..17: mol_type = other DNA
ccagagccctcggggga

SEQ ID NO: 161100 - DNA, 17 bp, synthetic construct
  source 1..17: mol_type = other DNA
tccagagccctcggggg

SEQ ID NO: 161101 - DNA, 17 bp, synthetic construct
  source 1..17: mol_type = other DNA
ctccagagccctcgggg

SEQ ID NO: 161102 - DNA, 17 bp, synthetic construct
  source 1..17: mol_type = other DNA
gctccagagccctcggg

SEQ ID NO: 161103 - DNA, 17 bp, synthetic construct
  source 1..17: mol_type = other DNA
ggctccagagccctcgg

SEQ ID NO: 161104 - DNA, 17 bp, synthetic construct
  source 1..17: mol_type = other DNA
gggctccagagccctcg

SEQ ID NO: 161105 - DNA, 17 bp, synthetic construct
  source 1..17: mol_type = other DNA
tgggctccagagccctc

SEQ ID NO: 161106 - DNA, 17 bp, synthetic construct
  source 1..17: mol_type = other DNA
ctgggctccagagccct

SEQ ID NO: 161107 - DNA, 17 bp, synthetic construct
  source 1..17: mol_type = other DNA
cctgggctccagagccc

SEQ ID NO: 161108 - DNA, 17 bp, synthetic construct
  source 1..17: mol_type = other DNA
ccctgggctccagagcc

SEQ ID NO: 161109 - DNA, 17 bp, synthetic construct
  source 1..17: mol_type = other DNA
accctgggctccagagc

SEQ ID NO: 161110 - DNA, 17 bp, synthetic construct
  source 1..17: mol_type = other DNA
caccctgggctccagag

SEQ ID NO: 161111 - DNA, 17 bp, synthetic construct
  source 1..17: mol_type = other DNA
ccaccctgggctccaga

SEQ ID NO: 161112 - DNA, 17 bp, synthetic construct
  source 1..17: mol_type = other DNA
cccaccctgggctccag

SEQ ID NO: 161113 - DNA, 17 bp, synthetic construct
  source 1..17: mol_type = other DNA
gcccaccctgggctcca

SEQ ID NO: 161114 - DNA, 17 bp, synthetic construct
  source 1..17: mol_type = other DNA
agcccaccctgggctcc

SEQ ID NO: 161115 - DNA, 17 bp, synthetic construct
  source 1..17: mol_type = other DNA
gagcccaccctgggctc

SEQ ID NO: 161116 - DNA, 17 bp, synthetic construct
  source 1..17: mol_type = other DNA
agagcccaccctgggct

SEQ ID NO: 161117 - DNA, 17 bp, synthetic construct
  source 1..17: mol_type = other DNA
cagagcccaccctgggc

SEQ ID NO: 161118 - DNA, 17 bp, synthetic construct
  source 1..17: mol_type = other DNA
acagagcccaccctggg

SEQ ID NO: 161119 - DNA, 17 bp, synthetic construct
  source 1..17: mol_type = other DNA
cacagagcccaccctgg

SEQ ID NO: 161120 - DNA, 17 bp, synthetic construct
  source 1..17: mol_type = other DNA
gcacagagcccaccctg

SEQ ID NO: 161121 - DNA, 17 bp, synthetic construct
  source 1..17: mol_type = other DNA
agcacagagcccaccct

SEQ ID NO: 161122 - DNA, 17 bp, synthetic construct
  source 1..17: mol_type = other DNA
cagcacagagcccaccc

SEQ ID NO: 161123 - DNA, 17 bp, synthetic construct
  source 1..17: mol_type = other DNA
gcagcacagagcccacc

SEQ ID NO: 161124 - DNA, 17 bp, synthetic construct
  source 1..17: mol_type = other DNA
ggcagcacagagcccac

SEQ ID NO: 161125 - DNA, 17 bp, synthetic construct
  source 1..17: mol_type = other DNA
aggcagcacagagccca

SEQ ID NO: 161126 - DNA, 17 bp, synthetic construct
  source 1..17: mol_type = other DNA
gaggcagcacagagccc

SEQ ID NO: 161127 - DNA, 17 bp, synthetic construct
  source 1..17: mol_type = other DNA
ggaggcagcacagagcc

SEQ ID NO: 161128 - DNA, 17 bp, synthetic construct
  source 1..17: mol_type = other DNA
gggaggcagcacagagc

SEQ ID NO: 161129 - DNA, 17 bp, synthetic construct
  source 1..17: mol_type = other DNA
tgggaggcagcacagag

SEQ ID NO: 161130 - DNA, 17 bp, synthetic construct
  source 1..17: mol_type = other DNA
gtgggaggcagcacaga

SEQ ID NO: 161131 - DNA, 17 bp, synthetic construct
  source 1..17: mol_type = other DNA
cgtgggaggcagcacag

SEQ ID NO: 161132 - DNA, 17 bp, synthetic construct
  source 1..17: mol_type = other DNA
ccgtgggaggcagcaca

SEQ ID NO: 161133 - DNA, 17 bp, synthetic construct
  source 1..17: mol_type = other DNA
cccgtgggaggcagcac

SEQ ID NO: 161134 - DNA, 17 bp, synthetic construct
  source 1..17: mol_type = other DNA
acccgtgggaggcagca

SEQ ID NO: 161135 - DNA, 17 bp, synthetic construct
  source 1..17: mol_type = other DNA
cacccgtgggaggcagc

SEQ ID NO: 161136 - DNA, 17 bp, synthetic construct
  source 1..17: mol_type = other DNA
gcacccgtgggaggcag

SEQ ID NO: 161137 - DNA, 17 bp, synthetic construct
  source 1..17: mol_type = other DNA
ggcacccgtgggaggca

SEQ ID NO: 161138 - DNA, 17 bp, synthetic construct
  source 1..17: mol_type = other DNA
aggcacccgtgggaggc

SEQ ID NO: 161139 - DNA, 17 bp, synthetic construct
  source 1..17: mol_type = other DNA
caggcacccgtgggagg

SEQ ID NO: 161140 - DNA, 17 bp, synthetic construct
  source 1..17: mol_type = other DNA
acaggcacccgtgggag

SEQ ID NO: 161141 - DNA, 17 bp, synthetic construct
  source 1..17: mol_type = other DNA
cacaggcacccgtggga

SEQ ID NO: 161142 - DNA, 17 bp, synthetic construct
  source 1..17: mol_type = other DNA
ccacaggcacccgtggg

SEQ ID NO: 161143 - DNA, 17 bp, synthetic construct
  source 1..17: mol_type = other DNA
gccacaggcacccgtgg

SEQ ID NO: 161144 - DNA, 17 bp, synthetic construct
  source 1..17: mol_type = other DNA
ggccacaggcacccgtg

SEQ ID NO: 161145 - DNA, 17 bp, synthetic construct
  source 1..17: mol_type = other DNA
gggccacaggcacccgt

SEQ ID NO: 161146 - DNA, 17 bp, synthetic construct
  source 1..17: mol_type = other DNA
ggggccacaggcacccg

SEQ ID NO: 161147 - DNA, 17 bp, synthetic construct
  source 1..17: mol_type = other DNA
tggggccacaggcaccc

SEQ ID NO: 161148 - DNA, 17 bp, synthetic construct
  source 1..17: mol_type = other DNA
ctggggccacaggcacc

SEQ ID NO: 161149 - DNA, 17 bp, synthetic construct
  source 1..17: mol_type = other DNA
gctggggccacaggcac

SEQ ID NO: 161150 - DNA, 17 bp, synthetic construct
  source 1..17: mol_type = other DNA
agctggggccacaggca

SEQ ID NO: 161151 - DNA, 17 bp, synthetic construct
  source 1..17: mol_type = other DNA
gagctggggccacaggc

SEQ ID NO: 161152 - DNA, 17 bp, synthetic construct
  source 1..17: mol_type = other DNA
ggagctggggccacagg

SEQ ID NO: 161153 - DNA, 17 bp, synthetic construct
  source 1..17: mol_type = other DNA
tggagctggggccacag

SEQ ID NO: 161154 - DNA, 17 bp, synthetic construct
  source 1..17: mol_type = other DNA
ctggagctggggccaca

SEQ ID NO: 161155 - DNA, 17 bp, synthetic construct
  source 1..17: mol_type = other DNA
cctggagctggggccac

SEQ ID NO: 161156 - DNA, 17 bp, synthetic construct
  source 1..17: mol_type = other DNA
ccctggagctggggcca

SEQ ID NO: 161157 - DNA, 17 bp, synthetic construct
  source 1..17: mol_type = other DNA
gccctggagctggggcc

SEQ ID NO: 161158 - DNA, 17 bp, synthetic construct
  source 1..17: mol_type = other DNA
ggccctggagctggggc

SEQ ID NO: 161159 - DNA, 17 bp, synthetic construct
  source 1..17: mol_type = other DNA
gggccctggagctgggg

SEQ ID NO: 161160 - DNA, 17 bp, synthetic construct
  source 1..17: mol_type = other DNA
ggggccctggagctggg

SEQ ID NO: 161161 - DNA, 17 bp, synthetic construct
  source 1..17: mol_type = other DNA
tggggccctggagctgg

SEQ ID NO: 161162 - DNA, 17 bp, synthetic construct
  source 1..17: mol_type = other DNA
gtggggccctggagctg

SEQ ID NO: 161163 - DNA, 17 bp, synthetic construct
  source 1..17: mol_type = other DNA
agtggggccctggagct

SEQ ID NO: 161164 - DNA, 17 bp, synthetic construct
  source 1..17: mol_type = other DNA
gagtggggccctggagc

SEQ ID NO: 161165 - DNA, 17 bp, synthetic construct
  source 1..17: mol_type = other DNA
agagtggggccctggag

SEQ ID NO: 161166 - DNA, 17 bp, synthetic construct
  source 1..17: mol_type = other DNA
gagagtggggccctgga

SEQ ID NO: 161167 - DNA, 17 bp, synthetic construct
  source 1..17: mol_type = other DNA
agagagtggggccctgg

SEQ ID NO: 161168 - DNA, 17 bp, synthetic construct
  source 1..17: mol_type = other DNA
gagagagtggggccctg

SEQ ID NO: 161169 - DNA, 17 bp, synthetic construct
  source 1..17: mol_type = other DNA
cgagagagtggggccct

SEQ ID NO: 161170 - DNA, 17 bp, synthetic construct
  source 1..17: mol_type = other DNA
gcgagagagtggggccc

SEQ ID NO: 161171 - DNA, 17 bp, synthetic construct
  source 1..17: mol_type = other DNA
agcgagagagtggggcc

SEQ ID NO: 161172 - DNA, 17 bp, synthetic construct
  source 1..17: mol_type = other DNA
cagcgagagagtggggc

SEQ ID NO: 161173 - DNA, 17 bp, synthetic construct
  source 1..17: mol_type = other DNA
gcagcgagagagtgggg

SEQ ID NO: 161174 - DNA, 17 bp, synthetic construct
  source 1..17: mol_type = other DNA
ggcagcgagagagtggg

SEQ ID NO: 161175 - DNA, 17 bp, synthetic construct
  source 1..17: mol_type = other DNA
aggcagcgagagagtgg

SEQ ID NO: 161176 - DNA, 17 bp, synthetic construct
  source 1..17: mol_type = other DNA
gaggcagcgagagagtg

SEQ ID NO: 161177 - DNA, 17 bp, synthetic construct
  source 1..17: mol_type = other DNA
agaggcagcgagagagt

SEQ ID NO: 161178 - DNA, 17 bp, synthetic construct
  source 1..17: mol_type = other DNA
cagaggcagcgagagag

SEQ ID NO: 161179 - DNA, 17 bp, synthetic construct
  source 1..17: mol_type = other DNA
gcagaggcagcgagaga

SEQ ID NO: 161180 - DNA, 17 bp, synthetic construct
  source 1..17: mol_type = other DNA
tgcagaggcagcgagag

SEQ ID NO: 161181 - DNA, 17 bp, synthetic construct
  source 1..17: mol_type = other DNA
ctgcagaggcagcgaga

SEQ ID NO: 161182 - DNA, 17 bp, synthetic construct
  source 1..17: mol_type = other DNA
cctgcagaggcagcgag

SEQ ID NO: 161183 - DNA, 17 bp, synthetic construct
  source 1..17: mol_type = other DNA
ccctgcagaggcagcga

SEQ ID NO: 161184 - DNA, 17 bp, synthetic construct
  source 1..17: mol_type = other DNA
gccctgcagaggcagcg

SEQ ID NO: 161185 - DNA, 17 bp, synthetic construct
  source 1..17: mol_type = other DNA
tgccctgcagaggcagc

SEQ ID NO: 161186 - DNA, 17 bp, synthetic construct
  source 1..17: mol_type = other DNA
ctgccctgcagaggcag

SEQ ID NO: 161187 - DNA, 17 bp, synthetic construct
  source 1..17: mol_type = other DNA
cctgccctgcagaggca

SEQ ID NO: 161188 - DNA, 17 bp, synthetic construct
  source 1..17: mol_type = other DNA
ccctgccctgcagaggc

SEQ ID NO: 161189 - DNA, 17 bp, synthetic construct
  source 1..17: mol_type = other DNA
accctgccctgcagagg

SEQ ID NO: 161190 - DNA, 17 bp, synthetic construct
  source 1..17: mol_type = other DNA
gaccctgccctgcagag

SEQ ID NO: 161191 - DNA, 17 bp, synthetic construct
  source 1..17: mol_type = other DNA
agaccctgccctgcaga

SEQ ID NO: 161192 - DNA, 17 bp, synthetic construct
  source 1..17: mol_type = other DNA
cagaccctgccctgcag

SEQ ID NO: 161193 - DNA, 17 bp, synthetic construct
  source 1..17: mol_type = other DNA
gcagaccctgccctgca

SEQ ID NO: 161194 - DNA, 17 bp, synthetic construct
  source 1..17: mol_type = other DNA
cgcagaccctgccctgc

SEQ ID NO: 161195 - DNA, 17 bp, synthetic construct
  source 1..17: mol_type = other DNA
ccgcagaccctgccctg

SEQ ID NO: 161196 - DNA, 17 bp, synthetic construct
  source 1..17: mol_type = other DNA
gccgcagaccctgccct

SEQ ID NO: 161197 - DNA, 17 bp, synthetic construct
  source 1..17: mol_type = other DNA
ggccgcagaccctgccc

SEQ ID NO: 161198 - DNA, 17 bp, synthetic construct
  source 1..17: mol_type = other DNA
aggccgcagaccctgcc

SEQ ID NO: 161199 - DNA, 17 bp, synthetic construct
  source 1..17: mol_type = other DNA
caggccgcagaccctgc

SEQ ID NO: 161200 - DNA, 17 bp, synthetic construct
  source 1..17: mol_type = other DNA
acaggccgcagaccctg

SEQ ID NO: 161201 - DNA, 17 bp, synthetic construct
  source 1..17: mol_type = other DNA
cacaggccgcagaccct

SEQ ID NO: 161202 - DNA, 17 bp, synthetic construct
  source 1..17: mol_type = other DNA
gcacaggccgcagaccc

SEQ ID NO: 161203 - DNA, 17 bp, synthetic construct
  source 1..17: mol_type = other DNA
cgcacaggccgcagacc

SEQ ID NO: 161204 - DNA, 17 bp, synthetic construct
  source 1..17: mol_type = other DNA
ccgcacaggccgcagac

SEQ ID NO: 161205 - DNA, 17 bp, synthetic construct
  source 1..17: mol_type = other DNA
cccgcacaggccgcaga

SEQ ID NO: 161206 - DNA, 17 bp, synthetic construct
  source 1..17: mol_type = other DNA
tcccgcacaggccgcag

SEQ ID NO: 161207 - DNA, 17 bp, synthetic construct
  source 1..17: mol_type = other DNA
ttcccgcacaggccgca

SEQ ID NO: 161208 - DNA, 17 bp, synthetic construct
  source 1..17: mol_type = other DNA
gttcccgcacaggccgc

SEQ ID NO: 161209 - DNA, 17 bp, synthetic construct
  source 1..17: mol_type = other DNA
agttcccgcacaggccg

SEQ ID NO: 161210 - DNA, 17 bp, synthetic construct
  source 1..17: mol_type = other DNA
aagttcccgcacaggcc

SEQ ID NO: 161211 - DNA, 17 bp, synthetic construct
  source 1..17: mol_type = other DNA
gaagttcccgcacaggc

SEQ ID NO: 161212 - DNA, 17 bp, synthetic construct
  source 1..17: mol_type = other DNA
cgaagttcccgcacagg

SEQ ID NO: 161213 - DNA, 17 bp, synthetic construct
  source 1..17: mol_type = other DNA
tcgaagttcccgcacag

SEQ ID NO: 161214 - DNA, 17 bp, synthetic construct
  source 1..17: mol_type = other DNA
gtcgaagttcccgcaca

SEQ ID NO: 161215 - DNA, 17 bp, synthetic construct
  source 1..17: mol_type = other DNA
cgtcgaagttcccgcac

SEQ ID NO: 161216 - DNA, 17 bp, synthetic construct
  source 1..17: mol_type = other DNA
tcgtcgaagttcccgca

SEQ ID NO: 161217 - DNA, 17 bp, synthetic construct
  source 1..17: mol_type = other DNA
gtcgtcgaagttcccgc

SEQ ID NO: 161218 - DNA, 17 bp, synthetic construct
  source 1..17: mol_type = other DNA
tgtcgtcgaagttcccg

SEQ ID NO: 161219 - DNA, 17 bp, synthetic construct
  source 1..17: mol_type = other DNA
ttgtcgtcgaagttccc

SEQ ID NO: 161220 - DNA, 17 bp, synthetic construct
  source 1..17: mol_type = other DNA
attgtcgtcgaagttcc

SEQ ID NO: 161221 - DNA, 17 bp, synthetic construct
  source 1..17: mol_type = other DNA
cattgtcgtcgaagttc

SEQ ID NO: 161222 - DNA, 17 bp, synthetic construct
  source 1..17: mol_type = other DNA
gcattgtcgtcgaagtt

SEQ ID NO: 161223 - DNA, 17 bp, synthetic construct
  source 1..17: mol_type = other DNA
ggcattgtcgtcgaagt

SEQ ID NO: 161224 - DNA, 17 bp, synthetic construct
  source 1..17: mol_type = other DNA
tggcattgtcgtcgaag

SEQ ID NO: 161225 - DNA, 17 bp, synthetic construct
  source 1..17: mol_type = other DNA
atggcattgtcgtcgaa

SEQ ID NO: 161226 - DNA, 17 bp, synthetic construct
  source 1..17: mol_type = other DNA
gatggcattgtcgtcga

SEQ ID NO: 161227 - DNA, 17 bp, synthetic construct
  source 1..17: mol_type = other DNA
tgatggcattgtcgtcg

SEQ ID NO: 161228 - DNA, 17 bp, synthetic construct
  source 1..17: mol_type = other DNA
ttgatggcattgtcgtc

SEQ ID NO: 161229 - DNA, 17 bp, synthetic construct
  source 1..17: mol_type = other DNA
attgatggcattgtcgt

SEQ ID NO: 161230 - DNA, 17 bp, synthetic construct
  source 1..17: mol_type = other DNA
cattgatggcattgtcg

SEQ ID NO: 161231 - DNA, 17 bp, synthetic construct
  source 1..17: mol_type = other DNA
tcattgatggcattgtc

SEQ ID NO: 161232 - DNA, 17 bp, synthetic construct
  source 1..17: mol_type = other DNA
gtcattgatggcattgt

SEQ ID NO: 161233 - DNA, 17 bp, synthetic construct
  source 1..17: mol_type = other DNA
agtcattgatggcattg

SEQ ID NO: 161234 - DNA, 17 bp, synthetic construct
  source 1..17: mol_type = other DNA
aagtcattgatggcatt

SEQ ID NO: 161235 - DNA, 17 bp, synthetic construct
  source 1..17: mol_type = other DNA
aaagtcattgatggcat

SEQ ID NO: 161236 - DNA, 17 bp, synthetic construct
  source 1..17: mol_type = other DNA
caaagtcattgatggca

SEQ ID NO: 161237 - DNA, 17 bp, synthetic construct
  source 1..17: mol_type = other DNA
gcaaagtcattgatggc

SEQ ID NO: 161238 - DNA, 17 bp, synthetic construct
  source 1..17: mol_type = other DNA
ggcaaagtcattgatgg

SEQ ID NO: 161239 - DNA, 17 bp, synthetic construct
  source 1..17: mol_type = other DNA
tggcaaagtcattgatg

SEQ ID NO: 161240 - DNA, 17 bp, synthetic construct
  source 1..17: mol_type = other DNA
gtggcaaagtcattgat

SEQ ID NO: 161241 - DNA, 17 bp, synthetic construct
  source 1..17: mol_type = other DNA
cgtggcaaagtcattga

SEQ ID NO: 161242 - DNA, 17 bp, synthetic construct
  source 1..17: mol_type = other DNA
gcgtggcaaagtcattg

SEQ ID NO: 161243 - DNA, 17 bp, synthetic construct
  source 1..17: mol_type = other DNA
cgcgtggcaaagtcatt

SEQ ID NO: 161244 - DNA, 17 bp, synthetic construct
  source 1..17: mol_type = other DNA
acgcgtggcaaagtcat

SEQ ID NO: 161245 - DNA, 17 bp, synthetic construct
  source 1..17: mol_type = other DNA
tacgcgtggcaaagtca

SEQ ID NO: 161246 - DNA, 17 bp, synthetic construct
  source 1..17: mol_type = other DNA
ctacgcgtggcaaagtc

SEQ ID NO: 161247 - DNA, 17 bp, synthetic construct
  source 1..17: mol_type = other DNA
gctacgcgtggcaaagt

SEQ ID NO: 161248 - DNA, 17 bp, synthetic construct
  source 1..17: mol_type = other DNA
ggctacgcgtggcaaag

SEQ ID NO: 161249 - DNA, 17 bp, synthetic construct
  source 1..17: mol_type = other DNA
cggctacgcgtggcaaa

SEQ ID NO: 161250 - DNA, 17 bp, synthetic construct
  source 1..17: mol_type = other DNA
ccggctacgcgtggcaa

SEQ ID NO: 161251 - DNA, 17 bp, synthetic construct
  source 1..17: mol_type = other DNA
accggctacgcgtggca

SEQ ID NO: 161252 - DNA, 17 bp, synthetic construct
  source 1..17: mol_type = other DNA
gaccggctacgcgtggc

SEQ ID NO: 161253 - DNA, 17 bp, synthetic construct
  source 1..17: mol_type = other DNA
ggaccggctacgcgtgg

SEQ ID NO: 161254 - DNA, 17 bp, synthetic construct
  source 1..17: mol_type = other DNA
cggaccggctacgcgtg

SEQ ID NO: 161255 - DNA, 17 bp, synthetic construct
  source 1..17: mol_type = other DNA
acggaccggctacgcgt

SEQ ID NO: 161256 - DNA, 17 bp, synthetic construct
  source 1..17: mol_type = other DNA
cacggaccggctacgcg

SEQ ID NO: 161257 - DNA, 17 bp, synthetic construct
  source 1..17: mol_type = other DNA
ccacggaccggctacgc

SEQ ID NO: 161258 - DNA, 17 bp, synthetic construct
  source 1..17: mol_type = other DNA
accacggaccggctacg

SEQ ID NO: 161259 - DNA, 17 bp, synthetic construct
  source 1..17: mol_type = other DNA
caccacggaccggctac

SEQ ID NO: 161260 - DNA, 17 bp, synthetic construct
  source 1..17: mol_type = other DNA
ccaccacggaccggcta

SEQ ID NO: 161261 - DNA, 17 bp, synthetic construct
  source 1..17: mol_type = other DNA
cccaccacggaccggct

SEQ ID NO: 161262 - DNA, 17 bp, synthetic construct
  source 1..17: mol_type = other DNA
ccccaccacggaccggc

SEQ ID NO: 161263 - DNA, 17 bp, synthetic construct
  source 1..17: mol_type = other DNA
cccccaccacggaccgg

SEQ ID NO: 161264 - DNA, 17 bp, synthetic construct
  source 1..17: mol_type = other DNA
tcccccaccacggaccg

SEQ ID NO: 161265 - DNA, 17 bp, synthetic construct
  source 1..17: mol_type = other DNA
gtcccccaccacggacc

SEQ ID NO: 161266 - DNA, 17 bp, synthetic construct
  source 1..17: mol_type = other DNA
cgtcccccaccacggac

SEQ ID NO: 161267 - DNA, 17 bp, synthetic construct
  source 1..17: mol_type = other DNA
gcgtcccccaccacgga

SEQ ID NO: 161268 - DNA, 17 bp, synthetic construct
  source 1..17: mol_type = other DNA
tgcgtcccccaccacgg

SEQ ID NO: 161269 - DNA, 17 bp, synthetic construct
  source 1..17: mol_type = other DNA
gtgcgtcccccaccacg

SEQ ID NO: 161270 - DNA, 17 bp, synthetic construct
  source 1..17: mol_type = other DNA
agtgcgtcccccaccac

SEQ ID NO: 161271 - DNA, 17 bp, synthetic construct
  source 1..17: mol_type = other DNA
cagtgcgtcccccacca

SEQ ID NO: 161272 - DNA, 17 bp, synthetic construct
  source 1..17: mol_type = other DNA
ccagtgcgtcccccacc

SEQ ID NO: 161273 - DNA, 17 bp, synthetic construct
  source 1..17: mol_type = other DNA
tccagtgcgtcccccac

SEQ ID NO: 161274 - DNA, 17 bp, synthetic construct
  source 1..17: mol_type = other DNA
ctccagtgcgtccccca

SEQ ID NO: 161275 - DNA, 17 bp, synthetic construct
  source 1..17: mol_type = other DNA
actccagtgcgtccccc

SEQ ID NO: 161276 - DNA, 17 bp, synthetic construct
  source 1..17: mol_type = other DNA
aactccagtgcgtcccc

SEQ ID NO: 161277 - DNA, 17 bp, synthetic construct
  source 1..17: mol_type = other DNA
aaactccagtgcgtccc

SEQ ID NO: 161278 - DNA, 17 bp, synthetic construct
  source 1..17: mol_type = other DNA
caaactccagtgcgtcc

SEQ ID NO: 161279 - DNA, 17 bp, synthetic construct
  source 1..17: mol_type = other DNA
ccaaactccagtgcgtc

SEQ ID NO: 161280 - DNA, 17 bp, synthetic construct
  source 1..17: mol_type = other DNA
cccaaactccagtgcgt

SEQ ID NO: 161281 - DNA, 17 bp, synthetic construct
  source 1..17: mol_type = other DNA
tcccaaactccagtgcg

SEQ ID NO: 161282 - DNA, 17 bp, synthetic construct
  source 1..17: mol_type = other DNA
ttcccaaactccagtgc

SEQ ID NO: 161283 - DNA, 17 bp, synthetic construct
  source 1..17: mol_type = other DNA
gttcccaaactccagtg

SEQ ID NO: 161284 - DNA, 17 bp, synthetic construct
  source 1..17: mol_type = other DNA
tgttcccaaactccagt

SEQ ID NO: 161285 - DNA, 17 bp, synthetic construct
  source 1..17: mol_type = other DNA
ctgttcccaaactccag

SEQ ID NO: 161286 - DNA, 17 bp, synthetic construct
  source 1..17: mol_type = other DNA
gctgttcccaaactcca

SEQ ID NO: 161287 - DNA, 17 bp, synthetic construct
  source 1..17: mol_type = other DNA
agctgttcccaaactcc

SEQ ID NO: 161288 - DNA, 17 bp, synthetic construct
  source 1..17: mol_type = other DNA
cagctgttcccaaactc

SEQ ID NO: 161289 - DNA, 17 bp, synthetic construct
  source 1..17: mol_type = other DNA
ccagctgttcccaaact

SEQ ID NO: 161290 - DNA, 17 bp, synthetic construct
  source 1..17: mol_type = other DNA
tccagctgttcccaaac

SEQ ID NO: 161291 - DNA, 17 bp, synthetic construct
  source 1..17: mol_type = other DNA
ttccagctgttcccaaa

SEQ ID NO: 161292 - DNA, 17 bp, synthetic construct
  source 1..17: mol_type = other DNA
cttccagctgttcccaa

SEQ ID NO: 161293 - DNA, 17 bp, synthetic construct
  source 1..17: mol_type = other DNA
gcttccagctgttccca

SEQ ID NO: 161294 - DNA, 17 bp, synthetic construct
  source 1..17: mol_type = other DNA
agcttccagctgttccc

SEQ ID NO: 161295 - DNA, 17 bp, synthetic construct
  source 1..17: mol_type = other DNA
gagcttccagctgttcc

SEQ ID NO: 161296 - DNA, 17 bp, synthetic construct
  source 1..17: mol_type = other DNA
agagcttccagctgttc

SEQ ID NO: 161297 - DNA, 17 bp, synthetic construct
  source 1..17: mol_type = other DNA
gagagcttccagctgtt

SEQ ID NO: 161298 - DNA, 17 bp, synthetic construct
  source 1..17: mol_type = other DNA
ggagagcttccagctgt

SEQ ID NO: 161299 - DNA, 17 bp, synthetic construct
  source 1..17: mol_type = other DNA
gggagagcttccagctg

SEQ ID NO: 161300 - DNA, 17 bp, synthetic construct
  source 1..17: mol_type = other DNA
ggggagagcttccagct

SEQ ID NO: 161301 - DNA, 17 bp, synthetic construct
  source 1..17: mol_type = other DNA
gggggagagcttccagc

SEQ ID NO: 161302 - DNA, 17 bp, synthetic construct
  source 1..17: mol_type = other DNA
agggggagagcttccag

SEQ ID NO: 161303 - DNA, 17 bp, synthetic construct
  source 1..17: mol_type = other DNA
gagggggagagcttcca

SEQ ID NO: 161304 - DNA, 17 bp, synthetic construct
  source 1..17: mol_type = other DNA
ggagggggagagcttcc

SEQ ID NO: 161305 - DNA, 17 bp, synthetic construct
  source 1..17: mol_type = other DNA
aggagggggagagcttc

SEQ ID NO: 161306 - DNA, 17 bp, synthetic construct
  source 1..17: mol_type = other DNA
caggagggggagagctt

SEQ ID NO: 161307 - DNA, 17 bp, synthetic construct
  source 1..17: mol_type = other DNA
gcaggagggggagagct

SEQ ID NO: 161308 - DNA, 17 bp, synthetic construct
  source 1..17: mol_type = other DNA
ggcaggagggggagagc

SEQ ID NO: 161309 - DNA, 17 bp, synthetic construct
  source 1..17: mol_type = other DNA
gggcaggagggggagag

SEQ ID NO: 161310 - DNA, 17 bp, synthetic construct
  source 1..17: mol_type = other DNA
cgggcaggagggggaga

SEQ ID NO: 161311 - DNA, 17 bp, synthetic construct
  source 1..17: mol_type = other DNA
ccgggcaggagggggag

SEQ ID NO: 161312 - DNA, 17 bp, synthetic construct
  source 1..17: mol_type = other DNA
tccgggcaggaggggga

SEQ ID NO: 161313 - DNA, 17 bp, synthetic construct
  source 1..17: mol_type = other DNA
gtccgggcaggaggggg

SEQ ID NO: 161314 - DNA, 17 bp, synthetic construct
  source 1..17: mol_type = other DNA
cgtccgggcaggagggg

SEQ ID NO: 161315 - DNA, 17 bp, synthetic construct
  source 1..17: mol_type = other DNA
gcgtccgggcaggaggg

SEQ ID NO: 161316 - DNA, 17 bp, synthetic construct
  source 1..17: mol_type = other DNA
ggcgtccgggcaggagg

SEQ ID NO: 161317 - DNA, 17 bp, synthetic construct
  source 1..17: mol_type = other DNA
gggcgtccgggcaggag

SEQ ID NO: 161318 - DNA, 17 bp, synthetic construct
  source 1..17: mol_type = other DNA
agggcgtccgggcagga

SEQ ID NO: 161319 - DNA, 17 bp, synthetic construct
  source 1..17: mol_type = other DNA
cagggcgtccgggcagg

SEQ ID NO: 161320 - DNA, 17 bp, synthetic construct
  source 1..17: mol_type = other DNA
ccagggcgtccgggcag

SEQ ID NO: 161321 - DNA, 17 bp, synthetic construct
  source 1..17: mol_type = other DNA
gccagggcgtccgggca

SEQ ID NO: 161322 - DNA, 17 bp, synthetic construct
  source 1..17: mol_type = other DNA
tgccagggcgtccgggc

SEQ ID NO: 161323 - DNA, 17 bp, synthetic construct
  source 1..17: mol_type = other DNA
gtgccagggcgtccggg

SEQ ID NO: 161324 - DNA, 17 bp, synthetic construct
  source 1..17: mol_type = other DNA
ggtgccagggcgtccgg

SEQ ID NO: 161325 - DNA, 17 bp, synthetic construct
  source 1..17: mol_type = other DNA
gggtgccagggcgtccg

SEQ ID NO: 161326 - DNA, 17 bp, synthetic construct
  source 1..17: mol_type = other DNA
tgggtgccagggcgtcc

SEQ ID NO: 161327 - DNA, 17 bp, synthetic construct
  source 1..17: mol_type = other DNA
ttgggtgccagggcgtc

SEQ ID NO: 161328 - DNA, 17 bp, synthetic construct
  source 1..17: mol_type = other DNA
cttgggtgccagggcgt

SEQ ID NO: 161329 - DNA, 17 bp, synthetic construct
  source 1..17: mol_type = other DNA
ccttgggtgccagggcg

SEQ ID NO: 161330 - DNA, 17 bp, synthetic construct
  source 1..17: mol_type = other DNA
tccttgggtgccagggc

SEQ ID NO: 161331 - DNA, 17 bp, synthetic construct
  source 1..17: mol_type = other DNA
gtccttgggtgccaggg

SEQ ID NO: 161332 - DNA, 17 bp, synthetic construct
  source 1..17: mol_type = other DNA
ggtccttgggtgccagg

SEQ ID NO: 161333 - DNA, 17 bp, synthetic construct
  source 1..17: mol_type = other DNA
gggtccttgggtgccag

SEQ ID NO: 161334 - DNA, 17 bp, synthetic construct
  source 1..17: mol_type = other DNA
ggggtccttgggtgcca

SEQ ID NO: 161335 - DNA, 17 bp, synthetic construct
  source 1..17: mol_type = other DNA
aggggtccttgggtgcc

SEQ ID NO: 161336 - DNA, 17 bp, synthetic construct
  source 1..17: mol_type = other DNA
caggggtccttgggtgc

SEQ ID NO: 161337 - DNA, 17 bp, synthetic construct
  source 1..17: mol_type = other DNA
gcaggggtccttgggtg

SEQ ID NO: 161338 - DNA, 17 bp, synthetic construct
  source 1..17: mol_type = other DNA
tgcaggggtccttgggt

SEQ ID NO: 161339 - DNA, 17 bp, synthetic construct
  source 1..17: mol_type = other DNA
gtgcaggggtccttggg

SEQ ID NO: 161340 - DNA, 17 bp, synthetic construct
  source 1..17: mol_type = other DNA
cgtgcaggggtccttgg

SEQ ID NO: 161341 - DNA, 17 bp, synthetic construct
  source 1..17: mol_type = other DNA
ccgtgcaggggtccttg

SEQ ID NO: 161342 - DNA, 17 bp, synthetic construct
  source 1..17: mol_type = other DNA
gccgtgcaggggtcctt

SEQ ID NO: 161343 - DNA, 17 bp, synthetic construct
  source 1..17: mol_type = other DNA
ggccgtgcaggggtcct

SEQ ID NO: 161344 - DNA, 17 bp, synthetic construct
  source 1..17: mol_type = other DNA
tggccgtgcaggggtcc

SEQ ID NO: 161345 - DNA, 17 bp, synthetic construct
  source 1..17: mol_type = other DNA
ttggccgtgcaggggtc

SEQ ID NO: 161346 - DNA, 17 bp, synthetic construct
  source 1..17: mol_type = other DNA
gttggccgtgcaggggt

SEQ ID NO: 161347 - DNA, 17 bp, synthetic construct
  source 1..17: mol_type = other DNA
ggttggccgtgcagggg

SEQ ID NO: 161348 - DNA, 17 bp, synthetic construct
  source 1..17: mol_type = other DNA
gggttggccgtgcaggg

SEQ ID NO: 161349 - DNA, 17 bp, synthetic construct
  source 1..17: mol_type = other DNA
ggggttggccgtgcagg

SEQ ID NO: 161350 - DNA, 17 bp, synthetic construct
  source 1..17: mol_type = other DNA
aggggttggccgtgcag

SEQ ID NO: 161351 - DNA, 17 bp, synthetic construct
  source 1..17: mol_type = other DNA
aaggggttggccgtgca

SEQ ID NO: 161352 - DNA, 17 bp, synthetic construct
  source 1..17: mol_type = other DNA
gaaggggttggccgtgc

SEQ ID NO: 161353 - DNA, 17 bp, synthetic construct
  source 1..17: mol_type = other DNA
ggaaggggttggccgtg

SEQ ID NO: 161354 - DNA, 17 bp, synthetic construct
  source 1..17: mol_type = other DNA
cggaaggggttggccgt

SEQ ID NO: 161355 - DNA, 17 bp, synthetic construct
  source 1..17: mol_type = other DNA
gcggaaggggttggccg

SEQ ID NO: 161356 - DNA, 17 bp, synthetic construct
  source 1..17: mol_type = other DNA
tgcggaaggggttggcc

SEQ ID NO: 161357 - DNA, 17 bp, synthetic construct
  source 1..17: mol_type = other DNA
ttgcggaaggggttggc

SEQ ID NO: 161358 - DNA, 17 bp, synthetic construct
  source 1..17: mol_type = other DNA
cttgcggaaggggttgg

SEQ ID NO: 161359 - DNA, 17 bp, synthetic construct
  source 1..17: mol_type = other DNA
acttgcggaaggggttg

SEQ ID NO: 161360 - DNA, 17 bp, synthetic construct
  source 1..17: mol_type = other DNA
gacttgcggaaggggtt

SEQ ID NO: 161361 - DNA, 17 bp, synthetic construct
  source 1..17: mol_type = other DNA
ggacttgcggaaggggt

SEQ ID NO: 161362 - DNA, 17 bp, synthetic construct
  source 1..17: mol_type = other DNA
aggacttgcggaagggg

SEQ ID NO: 161363 - DNA, 17 bp, synthetic construct
  source 1..17: mol_type = other DNA
caggacttgcggaaggg

SEQ ID NO: 161364 - DNA, 17 bp, synthetic construct
  source 1..17: mol_type = other DNA
ccaggacttgcggaagg

SEQ ID NO: 161365 - DNA, 17 bp, synthetic construct
  source 1..17: mol_type = other DNA
cccaggacttgcggaag

SEQ ID NO: 161366 - DNA, 17 bp, synthetic construct
  source 1..17: mol_type = other DNA
gcccaggacttgcggaa

SEQ ID NO: 161367 - DNA, 17 bp, synthetic construct
  source 1..17: mol_type = other DNA
ggcccaggacttgcgga

SEQ ID NO: 161368 - DNA, 17 bp, synthetic construct
  source 1..17: mol_type = other DNA
gggcccaggacttgcgg

SEQ ID NO: 161369 - DNA, 17 bp, synthetic construct
  source 1..17: mol_type = other DNA
tgggcccaggacttgcg

SEQ ID NO: 161370 - DNA, 17 bp, synthetic construct
  source 1..17: mol_type = other DNA
ctgggcccaggacttgc

SEQ ID NO: 161371 - DNA, 17 bp, synthetic construct
  source 1..17: mol_type = other DNA
tctgggcccaggacttg

SEQ ID NO: 161372 - DNA, 17 bp, synthetic construct
  source 1..17: mol_type = other DNA
ttctgggcccaggactt

SEQ ID NO: 161373 - DNA, 17 bp, synthetic construct
  source 1..17: mol_type = other DNA
cttctgggcccaggact

SEQ ID NO: 161374 - DNA, 17 bp, synthetic construct
  source 1..17: mol_type = other DNA
gcttctgggcccaggac

SEQ ID NO: 161375 - DNA, 17 bp, synthetic construct
  source 1..17: mol_type = other DNA
tgcttctgggcccagga

SEQ ID NO: 161376 - DNA, 17 bp, synthetic construct
  source 1..17: mol_type = other DNA
ctgcttctgggcccagg

SEQ ID NO: 161377 - DNA, 17 bp, synthetic construct
  source 1..17: mol_type = other DNA
actgcttctgggcccag

SEQ ID NO: 161378 - DNA, 17 bp, synthetic construct
  source 1..17: mol_type = other DNA
cactgcttctgggccca

SEQ ID NO: 161379 - DNA, 17 bp, synthetic construct
  source 1..17: mol_type = other DNA
gcactgcttctgggccc

SEQ ID NO: 161380 - DNA, 17 bp, synthetic construct
  source 1..17: mol_type = other DNA
tgcactgcttctgggcc

SEQ ID NO: 161381 - DNA, 17 bp, synthetic construct
  source 1..17: mol_type = other DNA
ctgcactgcttctgggc

SEQ ID NO: 161382 - DNA, 17 bp, synthetic construct
  source 1..17: mol_type = other DNA
gctgcactgcttctggg

SEQ ID NO: 161383 - DNA, 17 bp, synthetic construct
  source 1..17: mol_type = other DNA
tgctgcactgcttctgg

SEQ ID NO: 161384 - DNA, 17 bp, synthetic construct
  source 1..17: mol_type = other DNA
atgctgcactgcttctg

SEQ ID NO: 161385 - DNA, 17 bp, synthetic construct
  source 1..17: mol_type = other DNA
gatgctgcactgcttct

SEQ ID NO: 161386 - DNA, 17 bp, synthetic construct
  source 1..17: mol_type = other DNA
ggatgctgcactgcttc

SEQ ID NO: 161387 - DNA, 17 bp, synthetic construct
  source 1..17: mol_type = other DNA
aggatgctgcactgctt

SEQ ID NO: 161388 - DNA, 17 bp, synthetic construct
  source 1..17: mol_type = other DNA
gaggatgctgcactgct

SEQ ID NO: 161389 - DNA, 17 bp, synthetic construct
  source 1..17: mol_type = other DNA
ggaggatgctgcactgc

SEQ ID NO: 161390 - DNA, 17 bp, synthetic construct
  source 1..17: mol_type = other DNA
tggaggatgctgcactg

SEQ ID NO: 161391 - DNA, 17 bp, synthetic construct
  source 1..17: mol_type = other DNA
gtggaggatgctgcact

SEQ ID NO: 161392 - DNA, 17 bp, synthetic construct
  source 1..17: mol_type = other DNA
cgtggaggatgctgcac

SEQ ID NO: 161393 - DNA, 17 bp, synthetic construct
  source 1..17: mol_type = other DNA
ccgtggaggatgctgca

SEQ ID NO: 161394 - DNA, 17 bp, synthetic construct
  source 1..17: mol_type = other DNA
gccgtggaggatgctgc

SEQ ID NO: 161395 - DNA, 17 bp, synthetic construct
  source 1..17: mol_type = other DNA
ggccgtggaggatgctg

SEQ ID NO: 161396 - DNA, 17 bp, synthetic construct
  source 1..17: mol_type = other DNA
gggccgtggaggatgct

SEQ ID NO: 161397 - DNA, 17 bp, synthetic construct
  source 1..17: mol_type = other DNA
ggggccgtggaggatgc

SEQ ID NO: 161398 - DNA, 17 bp, synthetic construct
  source 1..17: mol_type = other DNA
tggggccgtggaggatg

SEQ ID NO: 161399 - DNA, 17 bp, synthetic construct
  source 1..17: mol_type = other DNA
gtggggccgtggaggat

SEQ ID NO: 161400 - DNA, 17 bp, synthetic construct
  source 1..17: mol_type = other DNA
ggtggggccgtggagga

SEQ ID NO: 161401 - DNA, 17 bp, synthetic construct
  source 1..17: mol_type = other DNA
aggtggggccgtggagg

SEQ ID NO: 161402 - DNA, 17 bp, synthetic construct
  source 1..17: mol_type = other DNA
aaggtggggccgtggag

SEQ ID NO: 161403 - DNA, 17 bp, synthetic construct
  source 1..17: mol_type = other DNA
gaaggtggggccgtgga

SEQ ID NO: 161404 - DNA, 17 bp, synthetic construct
  source 1..17: mol_type = other DNA
cgaaggtggggccgtgg

SEQ ID NO: 161405 - DNA, 17 bp, synthetic construct
  source 1..17: mol_type = other DNA
gcgaaggtggggccgtg

SEQ ID NO: 161406 - DNA, 17 bp, synthetic construct
  source 1..17: mol_type = other DNA
ggcgaaggtggggccgt

SEQ ID NO: 161407 - DNA, 17 bp, synthetic construct
  source 1..17: mol_type = other DNA
cggcgaaggtggggccg

SEQ ID NO: 161408 - DNA, 17 bp, synthetic construct
  source 1..17: mol_type = other DNA
gcggcgaaggtggggcc

SEQ ID NO: 161409 - DNA, 17 bp, synthetic construct
  source 1..17: mol_type = other DNA
ggcggcgaaggtggggc

SEQ ID NO: 161410 - DNA, 17 bp, synthetic construct
  source 1..17: mol_type = other DNA
aggcggcgaaggtgggg

SEQ ID NO: 161411 - DNA, 17 bp, synthetic construct
  source 1..17: mol_type = other DNA
caggcggcgaaggtggg

SEQ ID NO: 161412 - DNA, 17 bp, synthetic construct
  source 1..17: mol_type = other DNA
gcaggcggcgaaggtgg

SEQ ID NO: 161413 - DNA, 17 bp, synthetic construct
  source 1..17: mol_type = other DNA
ggcaggcggcgaaggtg

SEQ ID NO: 161414 - DNA, 17 bp, synthetic construct
  source 1..17: mol_type = other DNA
cggcaggcggcgaaggt

SEQ ID NO: 161415 - DNA, 17 bp, synthetic construct
  source 1..17: mol_type = other DNA
gcggcaggcggcgaagg

SEQ ID NO: 161416 - DNA, 17 bp, synthetic construct
  source 1..17: mol_type = other DNA
agcggcaggcggcgaag

SEQ ID NO: 161417 - DNA, 17 bp, synthetic construct
  source 1..17: mol_type = other DNA
gagcggcaggcggcgaa

SEQ ID NO: 161418 - DNA, 17 bp, synthetic construct
  source 1..17: mol_type = other DNA
ggagcggcaggcggcga

SEQ ID NO: 161419 - DNA, 17 bp, synthetic construct
  source 1..17: mol_type = other DNA
gggagcggcaggcggcg

SEQ ID NO: 161420 - DNA, 17 bp, synthetic construct
  source 1..17: mol_type = other DNA
tgggagcggcaggcggc

SEQ ID NO: 161421 - DNA, 17 bp, synthetic construct
  source 1..17: mol_type = other DNA
ctgggagcggcaggcgg

SEQ ID NO: 161422 - DNA, 17 bp, synthetic construct
  source 1..17: mol_type = other DNA
cctgggagcggcaggcg

SEQ ID NO: 161423 - DNA, 17 bp, synthetic construct
  source 1..17: mol_type = other DNA
acctgggagcggcaggc

SEQ ID NO: 161424 - DNA, 17 bp, synthetic construct
  source 1..17: mol_type = other DNA
cacctgggagcggcagg

SEQ ID NO: 161425 - DNA, 17 bp, synthetic construct
  source 1..17: mol_type = other DNA
ccacctgggagcggcag

SEQ ID NO: 161426 - DNA, 17 bp, synthetic construct
  source 1..17: mol_type = other DNA
cccacctgggagcggca

SEQ ID NO: 161427 - DNA, 17 bp, synthetic construct
  source 1..17: mol_type = other DNA
ccccacctgggagcggc

SEQ ID NO: 161428 - DNA, 17 bp, synthetic construct
  source 1..17: mol_type = other DNA
gccccacctgggagcgg

SEQ ID NO: 161429 - DNA, 17 bp, synthetic construct
  source 1..17: mol_type = other DNA
agccccacctgggagcg

SEQ ID NO: 161430 - DNA, 17 bp, synthetic construct
  source 1..17: mol_type = other DNA
gagccccacctgggagc

SEQ ID NO: 161431 - DNA, 17 bp, synthetic construct
  source 1..17: mol_type = other DNA
agagccccacctgggag

SEQ ID NO: 161432 - DNA, 17 bp, synthetic construct
  source 1..17: mol_type = other DNA
cagagccccacctggga

SEQ ID NO: 161433 - DNA, 17 bp, synthetic construct
  source 1..17: mol_type = other DNA
ccagagccccacctggg

SEQ ID NO: 161434 - DNA, 17 bp, synthetic construct
  source 1..17: mol_type = other DNA
accagagccccacctgg

SEQ ID NO: 161435 - DNA, 17 bp, synthetic construct
  source 1..17: mol_type = other DNA
gaccagagccccacctg

SEQ ID NO: 161436 - DNA, 17 bp, synthetic construct
  source 1..17: mol_type = other DNA
agaccagagccccacct

SEQ ID NO: 161437 - DNA, 17 bp, synthetic construct
  source 1..17: mol_type = other DNA
aagaccagagccccacc

SEQ ID NO: 161438 - DNA, 17 bp, synthetic construct
  source 1..17: mol_type = other DNA
caagaccagagccccac

SEQ ID NO: 161439 - DNA, 17 bp, synthetic construct
  source 1..17: mol_type = other DNA
ccaagaccagagcccca

SEQ ID NO: 161440 - DNA, 17 bp, synthetic construct
  source 1..17: mol_type = other DNA
gccaagaccagagcccc

SEQ ID NO: 161441 - DNA, 17 bp, synthetic construct
  source 1..17: mol_type = other DNA
tgccaagaccagagccc

SEQ ID NO: 161442 - DNA, 17 bp, synthetic construct
  source 1..17: mol_type = other DNA
ctgccaagaccagagcc

SEQ ID NO: 161443 - DNA, 17 bp, synthetic construct
  source 1..17: mol_type = other DNA
cctgccaagaccagagc

SEQ ID NO: 161444 - DNA, 17 bp, synthetic construct
  source 1..17: mol_type = other DNA
gcctgccaagaccagag

SEQ ID NO: 161445 - DNA, 17 bp, synthetic construct
  source 1..17: mol_type = other DNA
tgcctgccaagaccaga

SEQ ID NO: 161446 - DNA, 17 bp, synthetic construct
  source 1..17: mol_type = other DNA
ctgcctgccaagaccag

SEQ ID NO: 161447 - DNA, 17 bp, synthetic construct
  source 1..17: mol_type = other DNA
cctgcctgccaagacca

SEQ ID NO: 161448 - DNA, 17 bp, synthetic construct
  source 1..17: mol_type = other DNA
ccctgcctgccaagacc

SEQ ID NO: 161449 - DNA, 17 bp, synthetic construct
  source 1..17: mol_type = other DNA
accctgcctgccaagac

SEQ ID NO: 161450 - DNA, 17 bp, synthetic construct
  source 1..17: mol_type = other DNA
gaccctgcctgccaaga

SEQ ID NO: 161451 - DNA, 17 bp, synthetic construct
  source 1..17: mol_type = other DNA
agaccctgcctgccaag

SEQ ID NO: 161452 - DNA, 17 bp, synthetic construct
  source 1..17: mol_type = other DNA
cagaccctgcctgccaa

SEQ ID NO: 161453 - DNA, 17 bp, synthetic construct
  source 1..17: mol_type = other DNA
ccagaccctgcctgcca

SEQ ID NO: 161454 - DNA, 17 bp, synthetic construct
  source 1..17: mol_type = other DNA
accagaccctgcctgcc

SEQ ID NO: 161455 - DNA, 17 bp, synthetic construct
  source 1..17: mol_type = other DNA
caccagaccctgcctgc

SEQ ID NO: 161456 - DNA, 17 bp, synthetic construct
  source 1..17: mol_type = other DNA
ccaccagaccctgcctg

SEQ ID NO: 161457 - DNA, 17 bp, synthetic construct
  source 1..17: mol_type = other DNA
cccaccagaccctgcct

SEQ ID NO: 161458 - DNA, 17 bp, synthetic construct
  source 1..17: mol_type = other DNA
ccccaccagaccctgcc

SEQ ID NO: 161459 - DNA, 17 bp, synthetic construct
  source 1..17: mol_type = other DNA
tccccaccagaccctgc

SEQ ID NO: 161460 - DNA, 17 bp, synthetic construct
  source 1..17: mol_type = other DNA
atccccaccagaccctg

SEQ ID NO: 161461 - DNA, 17 bp, synthetic construct
  source 1..17: mol_type = other DNA
catccccaccagaccct

SEQ ID NO: 161462 - DNA, 17 bp, synthetic construct
  source 1..17: mol_type = other DNA
ccatccccaccagaccc

SEQ ID NO: 161463 - DNA, 17 bp, synthetic construct
  source 1..17: mol_type = other DNA
gccatccccaccagacc

SEQ ID NO: 161464 - DNA, 17 bp, synthetic construct
  source 1..17: mol_type = other DNA
tgccatccccaccagac

SEQ ID NO: 161465 - DNA, 17 bp, synthetic construct
  source 1..17: mol_type = other DNA
ctgccatccccaccaga

SEQ ID NO: 161466 - DNA, 17 bp, synthetic construct
  source 1..17: mol_type = other DNA
actgccatccccaccag

SEQ ID NO: 161467 - DNA, 17 bp, synthetic construct
  source 1..17: mol_type = other DNA
aactgccatccccacca

SEQ ID NO: 161468 - DNA, 17 bp, synthetic construct
  source 1..17: mol_type = other DNA
caactgccatccccacc

SEQ ID NO: 161469 - DNA, 17 bp, synthetic construct
  source 1..17: mol_type = other DNA
gcaactgccatccccac

SEQ ID NO: 161470 - DNA, 17 bp, synthetic construct
  source 1..17: mol_type = other DNA
agcaactgccatcccca

SEQ ID NO: 161471 - DNA, 17 bp, synthetic construct
  source 1..17: mol_type = other DNA
aagcaactgccatcccc

SEQ ID NO: 161472 - DNA, 17 bp, synthetic construct
  source 1..17: mol_type = other DNA
gaagcaactgccatccc

SEQ ID NO: 161473 - DNA, 17 bp, synthetic construct
  source 1..17: mol_type = other DNA
ggaagcaactgccatcc

SEQ ID NO: 161474 - DNA, 17 bp, synthetic construct
  source 1..17: mol_type = other DNA
aggaagcaactgccatc

SEQ ID NO: 161475 - DNA, 17 bp, synthetic construct
  source 1..17: mol_type = other DNA
aaggaagcaactgccat

SEQ ID NO: 161476 - DNA, 17 bp, synthetic construct
  source 1..17: mol_type = other DNA
gaaggaagcaactgcca

SEQ ID NO: 161477 - DNA, 17 bp, synthetic construct
  source 1..17: mol_type = other DNA
ggaaggaagcaactgcc

SEQ ID NO: 161478 - DNA, 17 bp, synthetic construct
  source 1..17: mol_type = other DNA
gggaaggaagcaactgc

SEQ ID NO: 161479 - DNA, 17 bp, synthetic construct
  source 1..17: mol_type = other DNA
cgggaaggaagcaactg

SEQ ID NO: 161480 - DNA, 17 bp, synthetic construct
  source 1..17: mol_type = other DNA
gcgggaaggaagcaact

SEQ ID NO: 161481 - DNA, 17 bp, synthetic construct
  source 1..17: mol_type = other DNA
ggcgggaaggaagcaac

SEQ ID NO: 161482 - DNA, 17 bp, synthetic construct
  source 1..17: mol_type = other DNA
cggcgggaaggaagcaa

SEQ ID NO: 161483 - DNA, 17 bp, synthetic construct
  source 1..17: mol_type = other DNA
tcggcgggaaggaagca

SEQ ID NO: 161484 - DNA, 17 bp, synthetic construct
  source 1..17: mol_type = other DNA
ctcggcgggaaggaagc

SEQ ID NO: 161485 - DNA, 17 bp, synthetic construct
  source 1..17: mol_type = other DNA
tctcggcgggaaggaag

SEQ ID NO: 161486 - DNA, 17 bp, synthetic construct
  source 1..17: mol_type = other DNA
ttctcggcgggaaggaa

SEQ ID NO: 161487 - DNA, 17 bp, synthetic construct
  source 1..17: mol_type = other DNA
gttctcggcgggaagga

SEQ ID NO: 161488 - DNA, 17 bp, synthetic construct
  source 1..17: mol_type = other DNA
agttctcggcgggaagg

SEQ ID NO: 161489 - DNA, 17 bp, synthetic construct
  source 1..17: mol_type = other DNA
cagttctcggcgggaag

SEQ ID NO: 161490 - DNA, 17 bp, synthetic construct
  source 1..17: mol_type = other DNA
ccagttctcggcgggaa

SEQ ID NO: 161491 - DNA, 17 bp, synthetic construct
  source 1..17: mol_type = other DNA
cccagttctcggcggga

SEQ ID NO: 161492 - DNA, 17 bp, synthetic construct
  source 1..17: mol_type = other DNA
acccagttctcggcggg

SEQ ID NO: 161493 - DNA, 17 bp, synthetic construct
  source 1..17: mol_type = other DNA
gacccagttctcggcgg

SEQ ID NO: 161494 - DNA, 17 bp, synthetic construct
  source 1..17: mol_type = other DNA
agacccagttctcggcg

SEQ ID NO: 161495 - DNA, 17 bp, synthetic construct
  source 1..17: mol_type = other DNA
aagacccagttctcggc

SEQ ID NO: 161496 - DNA, 17 bp, synthetic construct
  source 1..17: mol_type = other DNA
gaagacccagttctcgg

SEQ ID NO: 161497 - DNA, 17 bp, synthetic construct
  source 1..17: mol_type = other DNA
agaagacccagttctcg

SEQ ID NO: 161498 - DNA, 17 bp, synthetic construct
  source 1..17: mol_type = other DNA
cagaagacccagttctc

SEQ ID NO: 161499 - DNA, 17 bp, synthetic construct
  source 1..17: mol_type = other DNA
ccagaagacccagttct

SEQ ID NO: 161500 - DNA, 17 bp, synthetic construct
  source 1..17: mol_type = other DNA
cccagaagacccagttc

SEQ ID NO: 161501 - DNA, 17 bp, synthetic construct
  source 1..17: mol_type = other DNA
gcccagaagacccagtt

SEQ ID NO: 161502 - DNA, 17 bp, synthetic construct
  source 1..17: mol_type = other DNA
tgcccagaagacccagt

SEQ ID NO: 161503 - DNA, 17 bp, synthetic construct
  source 1..17: mol_type = other DNA
ctgcccagaagacccag

SEQ ID NO: 161504 - DNA, 17 bp, synthetic construct
  source 1..17: mol_type = other DNA
tctgcccagaagaccca

SEQ ID NO: 161505 - DNA, 17 bp, synthetic construct
  source 1..17: mol_type = other DNA
gtctgcccagaagaccc

SEQ ID NO: 161506 - DNA, 17 bp, synthetic construct
  source 1..17: mol_type = other DNA
tgtctgcccagaagacc

SEQ ID NO: 161507 - DNA, 17 bp, synthetic construct
  source 1..17: mol_type = other DNA
ctgtctgcccagaagac

SEQ ID NO: 161508 - DNA, 17 bp, synthetic construct
  source 1..17: mol_type = other DNA
gctgtctgcccagaaga

SEQ ID NO: 161509 - DNA, 17 bp, synthetic construct
  source 1..17: mol_type = other DNA
tgctgtctgcccagaag

SEQ ID NO: 161510 - DNA, 17 bp, synthetic construct
  source 1..17: mol_type = other DNA
ctgctgtctgcccagaa

SEQ ID NO: 161511 - DNA, 17 bp, synthetic construct
  source 1..17: mol_type = other DNA
gctgctgtctgcccaga

SEQ ID NO: 161512 - DNA, 17 bp, synthetic construct
  source 1..17: mol_type = other DNA
cgctgctgtctgcccag

SEQ ID NO: 161513 - DNA, 17 bp, synthetic construct
  source 1..17: mol_type = other DNA
gcgctgctgtctgccca

SEQ ID NO: 161514 - DNA, 17 bp, synthetic construct
  source 1..17: mol_type = other DNA
agcgctgctgtctgccc

SEQ ID NO: 161515 - DNA, 17 bp, synthetic construct
  source 1..17: mol_type = other DNA
gagcgctgctgtctgcc

SEQ ID NO: 161516 - DNA, 17 bp, synthetic construct
  source 1..17: mol_type = other DNA
ggagcgctgctgtctgc

SEQ ID NO: 161517 - DNA, 17 bp, synthetic construct
  source 1..17: mol_type = other DNA
tggagcgctgctgtctg

SEQ ID NO: 161518 - DNA, 17 bp, synthetic construct
  source 1..17: mol_type = other DNA
ttggagcgctgctgtct

SEQ ID NO: 161519 - DNA, 17 bp, synthetic construct
  source 1..17: mol_type = other DNA
cttggagcgctgctgtc

SEQ ID NO: 161520 - DNA, 17 bp, synthetic construct
  source 1..17: mol_type = other DNA
ccttggagcgctgctgt

SEQ ID NO: 161521 - DNA, 17 bp, synthetic construct
  source 1..17: mol_type = other DNA
tccttggagcgctgctg

SEQ ID NO: 161522 - DNA, 17 bp, synthetic construct
  source 1..17: mol_type = other DNA
ctccttggagcgctgct

SEQ ID NO: 161523 - DNA, 17 bp, synthetic construct
  source 1..17: mol_type = other DNA
cctccttggagcgctgc

SEQ ID NO: 161524 - DNA, 17 bp, synthetic construct
  source 1..17: mol_type = other DNA
ccctccttggagcgctg

SEQ ID NO: 161525 - DNA, 17 bp, synthetic construct
  source 1..17: mol_type = other DNA
accctccttggagcgct

SEQ ID NO: 161526 - DNA, 17 bp, synthetic construct
  source 1..17: mol_type = other DNA
gaccctccttggagcgc

SEQ ID NO: 161527 - DNA, 17 bp, synthetic construct
  source 1..17: mol_type = other DNA
agaccctccttggagcg

SEQ ID NO: 161528 - DNA, 17 bp, synthetic construct
  source 1..17: mol_type = other DNA
cagaccctccttggagc

SEQ ID NO: 161529 - DNA, 17 bp, synthetic construct
  source 1..17: mol_type = other DNA
tcagaccctccttggag

SEQ ID NO: 161530 - DNA, 17 bp, synthetic construct
  source 1..17: mol_type = other DNA
gtcagaccctccttgga

SEQ ID NO: 161531 - DNA, 17 bp, synthetic construct
  source 1..17: mol_type = other DNA
ggtcagaccctccttgg

SEQ ID NO: 161532 - DNA, 17 bp, synthetic construct
  source 1..17: mol_type = other DNA
tggtcagaccctccttg

SEQ ID NO: 161533 - DNA, 17 bp, synthetic construct
  source 1..17: mol_type = other DNA
atggtcagaccctcctt

SEQ ID NO: 161534 - DNA, 17 bp, synthetic construct
  source 1..17: mol_type = other DNA
catggtcagaccctcct

SEQ ID NO: 161535 - DNA, 17 bp, synthetic construct
  source 1..17: mol_type = other DNA
acatggtcagaccctcc

SEQ ID NO: 161536 - DNA, 17 bp, synthetic construct
  source 1..17: mol_type = other DNA
gacatggtcagaccctc

SEQ ID NO: 161537 - DNA, 17 bp, synthetic construct
  source 1..17: mol_type = other DNA
ggacatggtcagaccct

SEQ ID NO: 161538 - DNA, 17 bp, synthetic construct
  source 1..17: mol_type = other DNA
gggacatggtcagaccc

SEQ ID NO: 161539 - DNA, 17 bp, synthetic construct
  source 1..17: mol_type = other DNA
tgggacatggtcagacc

SEQ ID NO: 161540 - DNA, 17 bp, synthetic construct
  source 1..17: mol_type = other DNA
gtgggacatggtcagac

SEQ ID NO: 161541 - DNA, 17 bp, synthetic construct
  source 1..17: mol_type = other DNA
cgtgggacatggtcaga

SEQ ID NO: 161542 - DNA, 17 bp, synthetic construct
  source 1..17: mol_type = other DNA
ccgtgggacatggtcag

SEQ ID NO: 161543 - DNA, 17 bp, synthetic construct
  source 1..17: mol_type = other DNA
gccgtgggacatggtca

SEQ ID NO: 161544 - DNA, 17 bp, synthetic construct
  source 1..17: mol_type = other DNA
tgccgtgggacatggtc

SEQ ID NO: 161545 - DNA, 17 bp, synthetic construct
  source 1..17: mol_type = other DNA
gtgccgtgggacatggt

SEQ ID NO: 161546 - DNA, 17 bp, synthetic construct
  source 1..17: mol_type = other DNA
tgtgccgtgggacatgg

SEQ ID NO: 161547 - DNA, 17 bp, synthetic construct
  source 1..17: mol_type = other DNA
gtgtgccgtgggacatg

SEQ ID NO: 161548 - DNA, 17 bp, synthetic construct
  source 1..17: mol_type = other DNA
tgtgtgccgtgggacat

SEQ ID NO: 161549 - DNA, 17 bp, synthetic construct
  source 1..17: mol_type = other DNA
ctgtgtgccgtgggaca

SEQ ID NO: 161550 - DNA, 17 bp, synthetic construct
  source 1..17: mol_type = other DNA
actgtgtgccgtgggac

SEQ ID NO: 161551 - DNA, 17 bp, synthetic construct
  source 1..17: mol_type = other DNA
gactgtgtgccgtggga

SEQ ID NO: 161552 - DNA, 17 bp, synthetic construct
  source 1..17: mol_type = other DNA
ggactgtgtgccgtggg

SEQ ID NO: 161553 - DNA, 17 bp, synthetic construct
  source 1..17: mol_type = other DNA
aggactgtgtgccgtgg

SEQ ID NO: 161554 - DNA, 17 bp, synthetic construct
  source 1..17: mol_type = other DNA
caggactgtgtgccgtg

SEQ ID NO: 161555 - DNA, 17 bp, synthetic construct
  source 1..17: mol_type = other DNA
ccaggactgtgtgccgt

SEQ ID NO: 161556 - DNA, 17 bp, synthetic construct
  source 1..17: mol_type = other DNA
tccaggactgtgtgccg

SEQ ID NO: 161557 - DNA, 17 bp, synthetic construct
  source 1..17: mol_type = other DNA
atccaggactgtgtgcc

SEQ ID NO: 161558 - DNA, 17 bp, synthetic construct
  source 1..17: mol_type = other DNA
catccaggactgtgtgc

SEQ ID NO: 161559 - DNA, 17 bp, synthetic construct
  source 1..17: mol_type = other DNA
acatccaggactgtgtg

SEQ ID NO: 161560 - DNA, 17 bp, synthetic construct
  source 1..17: mol_type = other DNA
gacatccaggactgtgt

SEQ ID NO: 161561 - DNA, 17 bp, synthetic construct
  source 1..17: mol_type = other DNA
tgacatccaggactgtg

SEQ ID NO: 161562 - DNA, 17 bp, synthetic construct
  source 1..17: mol_type = other DNA
ctgacatccaggactgt

SEQ ID NO: 161563 - DNA, 17 bp, synthetic construct
  source 1..17: mol_type = other DNA
cctgacatccaggactg

SEQ ID NO: 161564 - DNA, 17 bp, synthetic construct
  source 1..17: mol_type = other DNA
acctgacatccaggact

SEQ ID NO: 161565 - DNA, 17 bp, synthetic construct
  source 1..17: mol_type = other DNA
gacctgacatccaggac

SEQ ID NO: 161566 - DNA, 17 bp, synthetic construct
  source 1..17: mol_type = other DNA
ggacctgacatccagga

SEQ ID NO: 161567 - DNA, 17 bp, synthetic construct
  source 1..17: mol_type = other DNA
gggacctgacatccagg

SEQ ID NO: 161568 - DNA, 17 bp, synthetic construct
  source 1..17: mol_type = other DNA
tgggacctgacatccag

SEQ ID NO: 161569 - DNA, 17 bp, synthetic construct
  source 1..17: mol_type = other DNA
ttgggacctgacatcca

SEQ ID NO: 161570 - DNA, 17 bp, synthetic construct
  source 1..17: mol_type = other DNA
cttgggacctgacatcc

SEQ ID NO: 161571 - DNA, 17 bp, synthetic construct
  source 1..17: mol_type = other DNA
acttgggacctgacatc

SEQ ID NO: 161572 - DNA, 17 bp, synthetic construct
  source 1..17: mol_type = other DNA
gacttgggacctgacat

SEQ ID NO: 161573 - DNA, 17 bp, synthetic construct
  source 1..17: mol_type = other DNA
ggacttgggacctgaca

SEQ ID NO: 161574 - DNA, 17 bp, synthetic construct
  source 1..17: mol_type = other DNA
cggacttgggacctgac

SEQ ID NO: 161575 - DNA, 17 bp, synthetic construct
  source 1..17: mol_type = other DNA
ccggacttgggacctga

SEQ ID NO: 161576 - DNA, 17 bp, synthetic construct
  source 1..17: mol_type = other DNA
tccggacttgggacctg

SEQ ID NO: 161577 - DNA, 17 bp, synthetic construct
  source 1..17: mol_type = other DNA
atccggacttgggacct

SEQ ID NO: 161578 - DNA, 17 bp, synthetic construct
  source 1..17: mol_type = other DNA
gatccggacttgggacc

SEQ ID NO: 161579 - DNA, 17 bp, synthetic construct
  source 1..17: mol_type = other DNA
agatccggacttgggac

SEQ ID NO: 161580 - DNA, 17 bp, synthetic construct
  source 1..17: mol_type = other DNA
gagatccggacttggga

SEQ ID NO: 161581 - DNA, 17 bp, synthetic construct
  source 1..17: mol_type = other DNA
ggagatccggacttggg

SEQ ID NO: 161582 - DNA, 17 bp, synthetic construct
  source 1..17: mol_type = other DNA
gggagatccggacttgg

SEQ ID NO: 161583 - DNA, 17 bp, synthetic construct
  source 1..17: mol_type = other DNA
cgggagatccggacttg

SEQ ID NO: 161584 - DNA, 17 bp, synthetic construct
  source 1..17: mol_type = other DNA
acgggagatccggactt

SEQ ID NO: 161585 - DNA, 17 bp, synthetic construct
  source 1..17: mol_type = other DNA
gacgggagatccggact

SEQ ID NO: 161586 - DNA, 17 bp, synthetic construct
  source 1..17: mol_type = other DNA
tgacgggagatccggac

SEQ ID NO: 161587 - DNA, 17 bp, synthetic construct
  source 1..17: mol_type = other DNA
ctgacgggagatccgga

SEQ ID NO: 161588 - DNA, 17 bp, synthetic construct
  source 1..17: mol_type = other DNA
gctgacgggagatccgg

SEQ ID NO: 161589 - DNA, 17 bp, synthetic construct
  source 1..17: mol_type = other DNA
ggctgacgggagatccg

SEQ ID NO: 161590 - DNA, 17 bp, synthetic construct
  source 1..17: mol_type = other DNA
gggctgacgggagatcc

SEQ ID NO: 161591 - DNA, 17 bp, synthetic construct
  source 1..17: mol_type = other DNA
ggggctgacgggagatc

SEQ ID NO: 161592 - DNA, 17 bp, synthetic construct
  source 1..17: mol_type = other DNA
tggggctgacgggagat

SEQ ID NO: 161593 - DNA, 17 bp, synthetic construct
  source 1..17: mol_type = other DNA
gtggggctgacgggaga

SEQ ID NO: 161594 - DNA, 17 bp, synthetic construct
  source 1..17: mol_type = other DNA
tgtggggctgacgggag

SEQ ID NO: 161595 - DNA, 17 bp, synthetic construct
  source 1..17: mol_type = other DNA
gtgtggggctgacggga

SEQ ID NO: 161596 - DNA, 17 bp, synthetic construct
  source 1..17: mol_type = other DNA
ggtgtggggctgacggg

SEQ ID NO: 161597 - DNA, 17 bp, synthetic construct
  source 1..17: mol_type = other DNA
aggtgtggggctgacgg

SEQ ID NO: 161598 - DNA, 17 bp, synthetic construct
  source 1..17: mol_type = other DNA
caggtgtggggctgacg

SEQ ID NO: 161599 - DNA, 17 bp, synthetic construct
  source 1..17: mol_type = other DNA
acaggtgtggggctgac

SEQ ID NO: 161600 - DNA, 17 bp, synthetic construct
  source 1..17: mol_type = other DNA
cacaggtgtggggctga

SEQ ID NO: 161601 - DNA, 17 bp, synthetic construct
  source 1..17: mol_type = other DNA
gcacaggtgtggggctg

SEQ ID NO: 161602 - DNA, 17 bp, synthetic construct
  source 1..17: mol_type = other DNA
ggcacaggtgtggggct

SEQ ID NO: 161603 - DNA, 17 bp, synthetic construct
  source 1..17: mol_type = other DNA
aggcacaggtgtggggc

SEQ ID NO: 161604 - DNA, 17 bp, synthetic construct
  source 1..17: mol_type = other DNA
gaggcacaggtgtgggg

SEQ ID NO: 161605 - DNA, 17 bp, synthetic construct
  source 1..17: mol_type = other DNA
agaggcacaggtgtggg

SEQ ID NO: 161606 - DNA, 17 bp, synthetic construct
  source 1..17: mol_type = other DNA
aagaggcacaggtgtgg

SEQ ID NO: 161607 - DNA, 17 bp, synthetic construct
  source 1..17: mol_type = other DNA
caagaggcacaggtgtg

SEQ ID NO: 161608 - DNA, 17 bp, synthetic construct
  source 1..17: mol_type = other DNA
gcaagaggcacaggtgt

SEQ ID NO: 161609 - DNA, 17 bp, synthetic construct
  source 1..17: mol_type = other DNA
ggcaagaggcacaggtg

SEQ ID NO: 161610 - DNA, 17 bp, synthetic construct
  source 1..17: mol_type = other DNA
gggcaagaggcacaggt

SEQ ID NO: 161611 - DNA, 17 bp, synthetic construct
  source 1..17: mol_type = other DNA
ggggcaagaggcacagg

SEQ ID NO: 161612 - DNA, 17 bp, synthetic construct
  source 1..17: mol_type = other DNA
aggggcaagaggcacag

SEQ ID NO: 161613 - DNA, 17 bp, synthetic construct
  source 1..17: mol_type = other DNA
caggggcaagaggcaca

SEQ ID NO: 161614 - DNA, 17 bp, synthetic construct
  source 1..17: mol_type = other DNA
ccaggggcaagaggcac

SEQ ID NO: 161615 - DNA, 17 bp, synthetic construct
  source 1..17: mol_type = other DNA
gccaggggcaagaggca

SEQ ID NO: 161616 - DNA, 17 bp, synthetic construct
  source 1..17: mol_type = other DNA
tgccaggggcaagaggc

SEQ ID NO: 161617 - DNA, 17 bp, synthetic construct
  source 1..17: mol_type = other DNA
gtgccaggggcaagagg

SEQ ID NO: 161618 - DNA, 17 bp, synthetic construct
  source 1..17: mol_type = other DNA
cgtgccaggggcaagag

SEQ ID NO: 161619 - DNA, 17 bp, synthetic construct
  source 1..17: mol_type = other DNA
tcgtgccaggggcaaga

SEQ ID NO: 161620 - DNA, 17 bp, synthetic construct
  source 1..17: mol_type = other DNA
ttcgtgccaggggcaag

SEQ ID NO: 161621 - DNA, 17 bp, synthetic construct
  source 1..17: mol_type = other DNA
cttcgtgccaggggcaa

SEQ ID NO: 161622 - DNA, 17 bp, synthetic construct
  source 1..17: mol_type = other DNA
gcttcgtgccaggggca

SEQ ID NO: 161623 - DNA, 17 bp, synthetic construct
  source 1..17: mol_type = other DNA
ggcttcgtgccaggggc

SEQ ID NO: 161624 - DNA, 17 bp, synthetic construct
  source 1..17: mol_type = other DNA
tggcttcgtgccagggg

SEQ ID NO: 161625 - DNA, 17 bp, synthetic construct
  source 1..17: mol_type = other DNA
atggcttcgtgccaggg

SEQ ID NO: 161626 - DNA, 17 bp, synthetic construct
  source 1..17: mol_type = other DNA
gatggcttcgtgccagg

SEQ ID NO: 161627 - DNA, 17 bp, synthetic construct
  source 1..17: mol_type = other DNA
agatggcttcgtgccag

SEQ ID NO: 161628 - DNA, 17 bp, synthetic construct
  source 1..17: mol_type = other DNA
aagatggcttcgtgcca

SEQ ID NO: 161629 - DNA, 17 bp, synthetic construct
  source 1..17: mol_type = other DNA
caagatggcttcgtgcc

SEQ ID NO: 161630 - DNA, 17 bp, synthetic construct
  source 1..17: mol_type = other DNA
ccaagatggcttcgtgc

SEQ ID NO: 161631 - DNA, 17 bp, synthetic construct
  source 1..17: mol_type = other DNA
gccaagatggcttcgtg

SEQ ID NO: 161632 - DNA, 17 bp, synthetic construct
  source 1..17: mol_type = other DNA
agccaagatggcttcgt

SEQ ID NO: 161633 - DNA, 17 bp, synthetic construct
  source 1..17: mol_type = other DNA
cagccaagatggcttcg

SEQ ID NO: 161634 - DNA, 17 bp, synthetic construct
  source 1..17: mol_type = other DNA
acagccaagatggcttc

SEQ ID NO: 161635 - DNA, 17 bp, synthetic construct
  source 1..17: mol_type = other DNA
aacagccaagatggctt

SEQ ID NO: 161636 - DNA, 17 bp, synthetic construct
  source 1..17: mol_type = other DNA
aaacagccaagatggct

SEQ ID NO: 161637 - DNA, 17 bp, synthetic construct
  source 1..17: mol_type = other DNA
gaaacagccaagatggc

SEQ ID NO: 161638 - DNA, 17 bp, synthetic construct
  source 1..17: mol_type = other DNA
ggaaacagccaagatgg

SEQ ID NO: 161639 - DNA, 17 bp, synthetic construct
  source 1..17: mol_type = other DNA
gggaaacagccaagatg

SEQ ID NO: 161640 - DNA, 17 bp, synthetic construct
  source 1..17: mol_type = other DNA
cgggaaacagccaagat

SEQ ID NO: 161641 - DNA, 17 bp, synthetic construct
  source 1..17: mol_type = other DNA
ccgggaaacagccaaga

SEQ ID NO: 161642 - DNA, 17 bp, synthetic construct
  source 1..17: mol_type = other DNA
gccgggaaacagccaag

SEQ ID NO: 161643 - DNA, 17 bp, synthetic construct
  source 1..17: mol_type = other DNA
ggccgggaaacagccaa

SEQ ID NO: 161644 - DNA, 17 bp, synthetic construct
  source 1..17: mol_type = other DNA
tggccgggaaacagcca

SEQ ID NO: 161645 - DNA, 17 bp, synthetic construct
  source 1..17: mol_type = other DNA
gtggccgggaaacagcc

SEQ ID NO: 161646 - DNA, 17 bp, synthetic construct
  source 1..17: mol_type = other DNA
agtggccgggaaacagc

SEQ ID NO: 161647 - DNA, 17 bp, synthetic construct
  source 1..17: mol_type = other DNA
gagtggccgggaaacag

SEQ ID NO: 161648 - DNA, 17 bp, synthetic construct
  source 1..17: mol_type = other DNA
ggagtggccgggaaaca

SEQ ID NO: 161649 - DNA, 17 bp, synthetic construct
  source 1..17: mol_type = other DNA
aggagtggccgggaaac

SEQ ID NO: 161650 - DNA, 17 bp, synthetic construct
  source 1..17: mol_type = other DNA
aaggagtggccgggaaa

SEQ ID NO: 161651 - DNA, 17 bp, synthetic construct
  source 1..17: mol_type = other DNA
aaaggagtggccgggaa

SEQ ID NO: 161652 - DNA, 17 bp, synthetic construct
  source 1..17: mol_type = other DNA
caaaggagtggccggga

SEQ ID NO: 161653 - DNA, 17 bp, synthetic construct
  source 1..17: mol_type = other DNA
tcaaaggagtggccggg

SEQ ID NO: 161654 - DNA, 17 bp, synthetic construct
  source 1..17: mol_type = other DNA
gtcaaaggagtggccgg

SEQ ID NO: 161655 - DNA, 17 bp, synthetic construct
  source 1..17: mol_type = other DNA
ggtcaaaggagtggccg

SEQ ID NO: 161656 - DNA, 17 bp, synthetic construct
  source 1..17: mol_type = other DNA
tggtcaaaggagtggcc

SEQ ID NO: 161657 - DNA, 17 bp, synthetic construct
  source 1..17: mol_type = other DNA
gtggtcaaaggagtggc

SEQ ID NO: 161658 - DNA, 17 bp, synthetic construct
  source 1..17: mol_type = other DNA
tgtggtcaaaggagtgg

SEQ ID NO: 161659 - DNA, 17 bp, synthetic construct
  source 1..17: mol_type = other DNA
ctgtggtcaaaggagtg

SEQ ID NO: 161660 - DNA, 17 bp, synthetic construct
  source 1..17: mol_type = other DNA
gctgtggtcaaaggagt

SEQ ID NO: 161661 - DNA, 17 bp, synthetic construct
  source 1..17: mol_type = other DNA
ggctgtggtcaaaggag

SEQ ID NO: 161662 - DNA, 17 bp, synthetic construct
  source 1..17: mol_type = other DNA
aggctgtggtcaaagga

SEQ ID NO: 161663 - DNA, 17 bp, synthetic construct
  source 1..17: mol_type = other DNA
gaggctgtggtcaaagg

SEQ ID NO: 161664 - DNA, 17 bp, synthetic construct
  source 1..17: mol_type = other DNA
tgaggctgtggtcaaag

SEQ ID NO: 161665 - DNA, 17 bp, synthetic construct
  source 1..17: mol_type = other DNA
ctgaggctgtggtcaaa

SEQ ID NO: 161666 - DNA, 17 bp, synthetic construct
  source 1..17: mol_type = other DNA
actgaggctgtggtcaa

SEQ ID NO: 161667 - DNA, 17 bp, synthetic construct
  source 1..17: mol_type = other DNA
gactgaggctgtggtca

SEQ ID NO: 161668 - DNA, 17 bp, synthetic construct
  source 1..17: mol_type = other DNA
tgactgaggctgtggtc

SEQ ID NO: 161669 - DNA, 17 bp, synthetic construct
  source 1..17: mol_type = other DNA
gtgactgaggctgtggt

SEQ ID NO: 161670 - DNA, 17 bp, synthetic construct
  source 1..17: mol_type = other DNA
tgtgactgaggctgtgg

SEQ ID NO: 161671 - DNA, 17 bp, synthetic construct
  source 1..17: mol_type = other DNA
gtgtgactgaggctgtg

SEQ ID NO: 161672 - DNA, 17 bp, synthetic construct
  source 1..17: mol_type = other DNA
ggtgtgactgaggctgt

SEQ ID NO: 161673 - DNA, 17 bp, synthetic construct
  source 1..17: mol_type = other DNA
gggtgtgactgaggctg

SEQ ID NO: 161674 - DNA, 17 bp, synthetic construct
  source 1..17: mol_type = other DNA
tgggtgtgactgaggct

SEQ ID NO: 161675 - DNA, 17 bp, synthetic construct
  source 1..17: mol_type = other DNA
ctgggtgtgactgaggc

SEQ ID NO: 161676 - DNA, 17 bp, synthetic construct
  source 1..17: mol_type = other DNA
tctgggtgtgactgagg

SEQ ID NO: 161677 - DNA, 17 bp, synthetic construct
  source 1..17: mol_type = other DNA
ctctgggtgtgactgag

SEQ ID NO: 161678 - DNA, 17 bp, synthetic construct
  source 1..17: mol_type = other DNA
cctctgggtgtgactga

SEQ ID NO: 161679 - DNA, 17 bp, synthetic construct
  source 1..17: mol_type = other DNA
gcctctgggtgtgactg

SEQ ID NO: 161680 - DNA, 17 bp, synthetic construct
  source 1..17: mol_type = other DNA
agcctctgggtgtgact

SEQ ID NO: 161681 - DNA, 17 bp, synthetic construct
  source 1..17: mol_type = other DNA
gagcctctgggtgtgac

SEQ ID NO: 161682 - DNA, 17 bp, synthetic construct
  source 1..17: mol_type = other DNA
tgagcctctgggtgtga

SEQ ID NO: 161683 - DNA, 17 bp, synthetic construct
  source 1..17: mol_type = other DNA
gtgagcctctgggtgtg

SEQ ID NO: 161684 - DNA, 17 bp, synthetic construct
  source 1..17: mol_type = other DNA
tgtgagcctctgggtgt

SEQ ID NO: 161685 - DNA, 17 bp, synthetic construct
  source 1..17: mol_type = other DNA
ctgtgagcctctgggtg

SEQ ID NO: 161686 - DNA, 17 bp, synthetic construct
  source 1..17: mol_type = other DNA
cctgtgagcctctgggt

SEQ ID NO: 161687 - DNA, 17 bp, synthetic construct
  source 1..17: mol_type = other DNA
ccctgtgagcctctggg

SEQ ID NO: 161688 - DNA, 17 bp, synthetic construct
  source 1..17: mol_type = other DNA
tccctgtgagcctctgg

SEQ ID NO: 161689 - DNA, 17 bp, synthetic construct
  source 1..17: mol_type = other DNA
ctccctgtgagcctctg

SEQ ID NO: 161690 - DNA, 17 bp, synthetic construct
  source 1..17: mol_type = other DNA
cctccctgtgagcctct

SEQ ID NO: 161691 - DNA, 17 bp, synthetic construct
  source 1..17: mol_type = other DNA
ccctccctgtgagcctc

SEQ ID NO: 161692 - DNA, 17 bp, synthetic construct
  source 1..17: mol_type = other DNA
cccctccctgtgagcct

SEQ ID NO: 161693 - DNA, 17 bp, synthetic construct
  source 1..17: mol_type = other DNA
gcccctccctgtgagcc

SEQ ID NO: 161694 - DNA, 17 bp, synthetic construct
  source 1..17: mol_type = other DNA
tgcccctccctgtgagc

SEQ ID NO: 161695 - DNA, 17 bp, synthetic construct
  source 1..17: mol_type = other DNA
ctgcccctccctgtgag

SEQ ID NO: 161696 - DNA, 17 bp, synthetic construct
  source 1..17: mol_type = other DNA
gctgcccctccctgtga

SEQ ID NO: 161697 - DNA, 17 bp, synthetic construct
  source 1..17: mol_type = other DNA
ggctgcccctccctgtg

SEQ ID NO: 161698 - DNA, 17 bp, synthetic construct
  source 1..17: mol_type = other DNA
gggctgcccctccctgt

SEQ ID NO: 161699 - DNA, 17 bp, synthetic construct
  source 1..17: mol_type = other DNA
agggctgcccctccctg

SEQ ID NO: 161700 - DNA, 17 bp, synthetic construct
  source 1..17: mol_type = other DNA
gagggctgcccctccct

SEQ ID NO: 161701 - DNA, 17 bp, synthetic construct
  source 1..17: mol_type = other DNA
agagggctgcccctccc

SEQ ID NO: 161702 - DNA, 17 bp, synthetic construct
  source 1..17: mol_type = other DNA
tagagggctgcccctcc

SEQ ID NO: 161703 - DNA, 17 bp, synthetic construct
  source 1..17: mol_type = other DNA
atagagggctgcccctc

SEQ ID NO: 161704 - DNA, 17 bp, synthetic construct
  source 1..17: mol_type = other DNA
catagagggctgcccct

SEQ ID NO: 161705 - DNA, 17 bp, synthetic construct
  source 1..17: mol_type = other DNA
acatagagggctgcccc

SEQ ID NO: 161706 - DNA, 17 bp, synthetic construct
  source 1..17: mol_type = other DNA
cacatagagggctgccc

SEQ ID NO: 161707 - DNA, 17 bp, synthetic construct
  source 1..17: mol_type = other DNA
ccacatagagggctgcc

SEQ ID NO: 161708 - DNA, 17 bp, synthetic construct
  source 1..17: mol_type = other DNA
gccacatagagggctgc

SEQ ID NO: 161709 - DNA, 17 bp, synthetic construct
  source 1..17: mol_type = other DNA
ggccacatagagggctg

SEQ ID NO: 161710 - DNA, 17 bp, synthetic construct
  source 1..17: mol_type = other DNA
gggccacatagagggct

SEQ ID NO: 161711 - DNA, 17 bp, synthetic construct
  source 1..17: mol_type = other DNA
ggggccacatagagggc

SEQ ID NO: 161712 - DNA, 17 bp, synthetic construct
  source 1..17: mol_type = other DNA
aggggccacatagaggg

SEQ ID NO: 161713 - DNA, 17 bp, synthetic construct
  source 1..17: mol_type = other DNA
taggggccacatagagg

SEQ ID NO: 161714 - DNA, 17 bp, synthetic construct
  source 1..17: mol_type = other DNA
ctaggggccacatagag

SEQ ID NO: 161715 - DNA, 17 bp, synthetic construct
  source 1..17: mol_type = other DNA
gctaggggccacataga

SEQ ID NO: 161716 - DNA, 17 bp, synthetic construct
  source 1..17: mol_type = other DNA
ggctaggggccacatag

SEQ ID NO: 161717 - DNA, 17 bp, synthetic construct
  source 1..17: mol_type = other DNA
tggctaggggccacata

SEQ ID NO: 161718 - DNA, 17 bp, synthetic construct
  source 1..17: mol_type = other DNA
gtggctaggggccacat

SEQ ID NO: 161719 - DNA, 17 bp, synthetic construct
  source 1..17: mol_type = other DNA
ggtggctaggggccaca

SEQ ID NO: 161720 - DNA, 17 bp, synthetic construct
  source 1..17: mol_type = other DNA
gggtggctaggggccac

SEQ ID NO: 161721 - DNA, 17 bp, synthetic construct
  source 1..17: mol_type = other DNA
agggtggctaggggcca

SEQ ID NO: 161722 - DNA, 17 bp, synthetic construct
  source 1..17: mol_type = other DNA
gagggtggctaggggcc

SEQ ID NO: 161723 - DNA, 17 bp, synthetic construct
  source 1..17: mol_type = other DNA
ggagggtggctaggggc

SEQ ID NO: 161724 - DNA, 17 bp, synthetic construct
  source 1..17: mol_type = other DNA
aggagggtggctagggg

SEQ ID NO: 161725 - DNA, 17 bp, synthetic construct
  source 1..17: mol_type = other DNA
gaggagggtggctaggg

SEQ ID NO: 161726 - DNA, 17 bp, synthetic construct
  source 1..17: mol_type = other DNA
agaggagggtggctagg

SEQ ID NO: 161727 - DNA, 17 bp, synthetic construct
  source 1..17: mol_type = other DNA
tagaggagggtggctag

SEQ ID NO: 161728 - DNA, 17 bp, synthetic construct
  source 1..17: mol_type = other DNA
atagaggagggtggcta

SEQ ID NO: 161729 - DNA, 17 bp, synthetic construct
  source 1..17: mol_type = other DNA
catagaggagggtggct

SEQ ID NO: 161730 - DNA, 17 bp, synthetic construct
  source 1..17: mol_type = other DNA
tcatagaggagggtggc

SEQ ID NO: 161731 - DNA, 17 bp, synthetic construct
  source 1..17: mol_type = other DNA
atcatagaggagggtgg

SEQ ID NO: 161732 - DNA, 17 bp, synthetic construct
  source 1..17: mol_type = other DNA
gatcatagaggagggtg

SEQ ID NO: 161733 - DNA, 17 bp, synthetic construct
  source 1..17: mol_type = other DNA
ggatcatagaggagggt

SEQ ID NO: 161734 - DNA, 17 bp, synthetic construct
  source 1..17: mol_type = other DNA
gggatcatagaggaggg

SEQ ID NO: 161735 - DNA, 17 bp, synthetic construct
  source 1..17: mol_type = other DNA
ggggatcatagaggagg

SEQ ID NO: 161736 - DNA, 17 bp, synthetic construct
  source 1..17: mol_type = other DNA
tggggatcatagaggag

SEQ ID NO: 161737 - DNA, 17 bp, synthetic construct
  source 1..17: mol_type = other DNA
ctggggatcatagagga

SEQ ID NO: 161738 - DNA, 17 bp, synthetic construct
  source 1..17: mol_type = other DNA
tctggggatcatagagg

SEQ ID NO: 161739 - DNA, 17 bp, synthetic construct
  source 1..17: mol_type = other DNA
gtctggggatcatagag

SEQ ID NO: 161740 - DNA, 17 bp, synthetic construct
  source 1..17: mol_type = other DNA
ggtctggggatcataga

SEQ ID NO: 161741 - DNA, 17 bp, synthetic construct
  source 1..17: mol_type = other DNA
aggtctggggatcatag

SEQ ID NO: 161742 - DNA, 17 bp, synthetic construct
  source 1..17: mol_type = other DNA
caggtctggggatcata

SEQ ID NO: 161743 - DNA, 17 bp, synthetic construct
  source 1..17: mol_type = other DNA
gcaggtctggggatcat

SEQ ID NO: 161744 - DNA, 17 bp, synthetic construct
  source 1..17: mol_type = other DNA
ggcaggtctggggatca

SEQ ID NO: 161745 - DNA, 17 bp, synthetic construct
  source 1..17: mol_type = other DNA
gggcaggtctggggatc

SEQ ID NO: 161746 - DNA, 17 bp, synthetic construct
  source 1..17: mol_type = other DNA
tgggcaggtctggggat

SEQ ID NO: 161747 - DNA, 17 bp, synthetic construct
  source 1..17: mol_type = other DNA
ctgggcaggtctgggga

SEQ ID NO: 161748 - DNA, 17 bp, synthetic construct
  source 1..17: mol_type = other DNA
actgggcaggtctgggg

SEQ ID NO: 161749 - DNA, 17 bp, synthetic construct
  source 1..17: mol_type = other DNA
gactgggcaggtctggg

SEQ ID NO: 161750 - DNA, 17 bp, synthetic construct
  source 1..17: mol_type = other DNA
ggactgggcaggtctgg

SEQ ID NO: 161751 - DNA, 17 bp, synthetic construct
  source 1..17: mol_type = other DNA
aggactgggcaggtctg

SEQ ID NO: 161752 - DNA, 17 bp, synthetic construct
  source 1..17: mol_type = other DNA
gaggactgggcaggtct

SEQ ID NO: 161753 - DNA, 17 bp, synthetic construct
  source 1..17: mol_type = other DNA
tgaggactgggcaggtc

SEQ ID NO: 161754 - DNA, 17 bp, synthetic construct
  source 1..17: mol_type = other DNA
ctgaggactgggcaggt

SEQ ID NO: 161755 - DNA, 17 bp, synthetic construct
  source 1..17: mol_type = other DNA
gctgaggactgggcagg

SEQ ID NO: 161756 - DNA, 17 bp, synthetic construct
  source 1..17: mol_type = other DNA
tgctgaggactgggcag

SEQ ID NO: 161757 - DNA, 17 bp, synthetic construct
  source 1..17: mol_type = other DNA
gtgctgaggactgggca

SEQ ID NO: 161758 - DNA, 17 bp, synthetic construct
  source 1..17: mol_type = other DNA
tgtgctgaggactgggc

SEQ ID NO: 161759 - DNA, 17 bp, synthetic construct
  source 1..17: mol_type = other DNA
ttgtgctgaggactggg

SEQ ID NO: 161760 - DNA, 17 bp, synthetic construct
  source 1..17: mol_type = other DNA
tttgtgctgaggactgg

SEQ ID NO: 161761 - DNA, 17 bp, synthetic construct
  source 1..17: mol_type = other DNA
gtttgtgctgaggactg

SEQ ID NO: 161762 - DNA, 17 bp, synthetic construct
  source 1..17: mol_type = other DNA
agtttgtgctgaggact

SEQ ID NO: 161763 - DNA, 17 bp, synthetic construct
  source 1..17: mol_type = other DNA
cagtttgtgctgaggac

SEQ ID NO: 161764 - DNA, 17 bp, synthetic construct
  source 1..17: mol_type = other DNA
ccagtttgtgctgagga

SEQ ID NO: 161765 - DNA, 17 bp, synthetic construct
  source 1..17: mol_type = other DNA
tccagtttgtgctgagg

SEQ ID NO: 161766 - DNA, 17 bp, synthetic construct
  source 1..17: mol_type = other DNA
ttccagtttgtgctgag

SEQ ID NO: 161767 - DNA, 17 bp, synthetic construct
  source 1..17: mol_type = other DNA
attccagtttgtgctga

SEQ ID NO: 161768 - DNA, 17 bp, synthetic construct
  source 1..17: mol_type = other DNA
cattccagtttgtgctg

SEQ ID NO: 161769 - DNA, 17 bp, synthetic construct
  source 1..17: mol_type = other DNA
gcattccagtttgtgct

SEQ ID NO: 161770 - DNA, 17 bp, synthetic construct
  source 1..17: mol_type = other DNA
ggcattccagtttgtgc

SEQ ID NO: 161771 - DNA, 17 bp, synthetic construct
  source 1..17: mol_type = other DNA
tggcattccagtttgtg

SEQ ID NO: 161772 - DNA, 17 bp, synthetic construct
  source 1..17: mol_type = other DNA
ctggcattccagtttgt

SEQ ID NO: 161773 - DNA, 17 bp, synthetic construct
  source 1..17: mol_type = other DNA
gctggcattccagtttg

SEQ ID NO: 161774 - DNA, 17 bp, synthetic construct
  source 1..17: mol_type = other DNA
ggctggcattccagttt

SEQ ID NO: 161775 - DNA, 17 bp, synthetic construct
  source 1..17: mol_type = other DNA
aggctggcattccagtt

SEQ ID NO: 161776 - DNA, 17 bp, synthetic construct
  source 1..17: mol_type = other DNA
caggctggcattccagt

SEQ ID NO: 161777 - DNA, 17 bp, synthetic construct
  source 1..17: mol_type = other DNA
ccaggctggcattccag

SEQ ID NO: 161778 - DNA, 17 bp, synthetic construct
  source 1..17: mol_type = other DNA
gccaggctggcattcca

SEQ ID NO: 161779 - DNA, 17 bp, synthetic construct
  source 1..17: mol_type = other DNA
agccaggctggcattcc

SEQ ID NO: 161780 - DNA, 17 bp, synthetic construct
  source 1..17: mol_type = other DNA
gagccaggctggcattc

SEQ ID NO: 161781 - DNA, 17 bp, synthetic construct
  source 1..17: mol_type = other DNA
ggagccaggctggcatt

SEQ ID NO: 161782 - DNA, 17 bp, synthetic construct
  source 1..17: mol_type = other DNA
gggagccaggctggcat

SEQ ID NO: 161783 - DNA, 17 bp, synthetic construct
  source 1..17: mol_type = other DNA
ggggagccaggctggca

SEQ ID NO: 161784 - DNA, 17 bp, synthetic construct
  source 1..17: mol_type = other DNA
cggggagccaggctggc

SEQ ID NO: 161785 - DNA, 17 bp, synthetic construct
  source 1..17: mol_type = other DNA
gcggggagccaggctgg

SEQ ID NO: 161786 - DNA, 17 bp, synthetic construct
  source 1..17: mol_type = other DNA
agcggggagccaggctg

SEQ ID NO: 161787 - DNA, 17 bp, synthetic construct
  source 1..17: mol_type = other DNA
gagcggggagccaggct

SEQ ID NO: 161788 - DNA, 17 bp, synthetic construct
  source 1..17: mol_type = other DNA
tgagcggggagccaggc

SEQ ID NO: 161789 - DNA, 17 bp, synthetic construct
  source 1..17: mol_type = other DNA
ctgagcggggagccagg

SEQ ID NO: 161790 - DNA, 17 bp, synthetic construct
  source 1..17: mol_type = other DNA
gctgagcggggagccag

SEQ ID NO: 161791 - DNA, 17 bp, synthetic construct
  source 1..17: mol_type = other DNA
ggctgagcggggagcca

SEQ ID NO: 161792 - DNA, 17 bp, synthetic construct
  source 1..17: mol_type = other DNA
tggctgagcggggagcc

SEQ ID NO: 161793 - DNA, 17 bp, synthetic construct
  source 1..17: mol_type = other DNA
ctggctgagcggggagc

SEQ ID NO: 161794 - DNA, 17 bp, synthetic construct
  source 1..17: mol_type = other DNA
cctggctgagcggggag

SEQ ID NO: 161795 - DNA, 17 bp, synthetic construct
  source 1..17: mol_type = other DNA
ccctggctgagcgggga

SEQ ID NO: 161796 - DNA, 17 bp, synthetic construct
  source 1..17: mol_type = other DNA
tccctggctgagcgggg

SEQ ID NO: 161797 - DNA, 17 bp, synthetic construct
  source 1..17: mol_type = other DNA
ctccctggctgagcggg

SEQ ID NO: 161798 - DNA, 17 bp, synthetic construct
  source 1..17: mol_type = other DNA
cctccctggctgagcgg

SEQ ID NO: 161799 - DNA, 17 bp, synthetic construct
  source 1..17: mol_type = other DNA
tcctccctggctgagcg

SEQ ID NO: 161800 - DNA, 17 bp, synthetic construct
  source 1..17: mol_type = other DNA
ttcctccctggctgagc

SEQ ID NO: 161801 - DNA, 17 bp, synthetic construct
  source 1..17: mol_type = other DNA
attcctccctggctgag

SEQ ID NO: 161802 - DNA, 17 bp, synthetic construct
  source 1..17: mol_type = other DNA
gattcctccctggctga

SEQ ID NO: 161803 - DNA, 17 bp, synthetic construct
  source 1..17: mol_type = other DNA
tgattcctccctggctg

SEQ ID NO: 161804 - DNA, 17 bp, synthetic construct
  source 1..17: mol_type = other DNA
ctgattcctccctggct

SEQ ID NO: 161805 - DNA, 17 bp, synthetic construct
  source 1..17: mol_type = other DNA
tctgattcctccctggc

SEQ ID NO: 161806 - DNA, 17 bp, synthetic construct
  source 1..17: mol_type = other DNA
ctctgattcctccctgg

SEQ ID NO: 161807 - DNA, 17 bp, synthetic construct
  source 1..17: mol_type = other DNA
tctctgattcctccctg

SEQ ID NO: 161808 - DNA, 17 bp, synthetic construct
  source 1..17: mol_type = other DNA
atctctgattcctccct

SEQ ID NO: 161809 - DNA, 17 bp, synthetic construct
  source 1..17: mol_type = other DNA
gatctctgattcctccc

SEQ ID NO: 161810 - DNA, 17 bp, synthetic construct
  source 1..17: mol_type = other DNA
agatctctgattcctcc

SEQ ID NO: 161811 - DNA, 17 bp, synthetic construct
  source 1..17: mol_type = other DNA
cagatctctgattcctc

SEQ ID NO: 161812 - DNA, 17 bp, synthetic construct
  source 1..17: mol_type = other DNA
gcagatctctgattcct

SEQ ID NO: 161813 - DNA, 17 bp, synthetic construct
  source 1..17: mol_type = other DNA
ggcagatctctgattcc

SEQ ID NO: 161814 - DNA, 17 bp, synthetic construct
  source 1..17: mol_type = other DNA
gggcagatctctgattc

SEQ ID NO: 161815 - DNA, 17 bp, synthetic construct
  source 1..17: mol_type = other DNA
agggcagatctctgatt

SEQ ID NO: 161816 - DNA, 17 bp, synthetic construct
  source 1..17: mol_type = other DNA
tagggcagatctctgat

SEQ ID NO: 161817 - DNA, 17 bp, synthetic construct
  source 1..17: mol_type = other DNA
ttagggcagatctctga

SEQ ID NO: 161818 - DNA, 17 bp, synthetic construct
  source 1..17: mol_type = other DNA
cttagggcagatctctg

SEQ ID NO: 161819 - DNA, 17 bp, synthetic construct
  source 1..17: mol_type = other DNA
gcttagggcagatctct

SEQ ID NO: 161820 - DNA, 17 bp, synthetic construct
  source 1..17: mol_type = other DNA
tgcttagggcagatctc

SEQ ID NO: 161821 - DNA, 17 bp, synthetic construct
  source 1..17: mol_type = other DNA
ctgcttagggcagatct

SEQ ID NO: 161822 - DNA, 17 bp, synthetic construct
  source 1..17: mol_type = other DNA
tctgcttagggcagatc

SEQ ID NO: 161823 - DNA, 17 bp, synthetic construct
  source 1..17: mol_type = other DNA
ctctgcttagggcagat

SEQ ID NO: 161824 - DNA, 17 bp, synthetic construct
  source 1..17: mol_type = other DNA
tctctgcttagggcaga

SEQ ID NO: 161825 - DNA, 17 bp, synthetic construct
  source 1..17: mol_type = other DNA
gtctctgcttagggcag

SEQ ID NO: 161826 - DNA, 17 bp, synthetic construct
  source 1..17: mol_type = other DNA
agtctctgcttagggca

SEQ ID NO: 161827 - DNA, 17 bp, synthetic construct
  source 1..17: mol_type = other DNA
aagtctctgcttagggc

SEQ ID NO: 161828 - DNA, 17 bp, synthetic construct
  source 1..17: mol_type = other DNA
gaagtctctgcttaggg

SEQ ID NO: 161829 - DNA, 17 bp, synthetic construct
  source 1..17: mol_type = other DNA
ggaagtctctgcttagg

SEQ ID NO: 161830 - DNA, 17 bp, synthetic construct
  source 1..17: mol_type = other DNA
tggaagtctctgcttag

SEQ ID NO: 161831 - DNA, 17 bp, synthetic construct
  source 1..17: mol_type = other DNA
ttggaagtctctgctta

SEQ ID NO: 161832 - DNA, 17 bp, synthetic construct
  source 1..17: mol_type = other DNA
tttggaagtctctgctt

SEQ ID NO: 161833 - DNA, 17 bp, synthetic construct
  source 1..17: mol_type = other DNA
ttttggaagtctctgct

SEQ ID NO: 161834 - DNA, 17 bp, synthetic construct
  source 1..17: mol_type = other DNA
tttttggaagtctctgc

SEQ ID NO: 161835 - DNA, 17 bp, synthetic construct
  source 1..17: mol_type = other DNA
ctttttggaagtctctg

SEQ ID NO: 161836 - DNA, 17 bp, synthetic construct
  source 1..17: mol_type = other DNA
gctttttggaagtctct

SEQ ID NO: 161837 - DNA, 17 bp, synthetic construct
  source 1..17: mol_type = other DNA
tgctttttggaagtctc

SEQ ID NO: 161838 - DNA, 17 bp, synthetic construct
  source 1..17: mol_type = other DNA
ctgctttttggaagtct

SEQ ID NO: 161839 - DNA, 17 bp, synthetic construct
  source 1..17: mol_type = other DNA
actgctttttggaagtc

SEQ ID NO: 161840 - DNA, 17 bp, synthetic construct
  source 1..17: mol_type = other DNA
aactgctttttggaagt

SEQ ID NO: 161841 - DNA, 17 bp, synthetic construct
  source 1..17: mol_type = other DNA
aaactgctttttggaag

SEQ ID NO: 161842 - DNA, 17 bp, synthetic construct
  source 1..17: mol_type = other DNA
gaaactgctttttggaa

SEQ ID NO: 161843 - DNA, 17 bp, synthetic construct
  source 1..17: mol_type = other DNA
ggaaactgctttttgga

SEQ ID NO: 161844 - DNA, 17 bp, synthetic construct
  source 1..17: mol_type = other DNA
aggaaactgctttttgg

SEQ ID NO: 161845 - DNA, 17 bp, synthetic construct
  source 1..17: mol_type = other DNA
caggaaactgctttttg

SEQ ID NO: 161846 - DNA, 17 bp, synthetic construct
  source 1..17: mol_type = other DNA
tcaggaaactgcttttt

SEQ ID NO: 161847 - DNA, 17 bp, synthetic construct
  source 1..17: mol_type = other DNA
gtcaggaaactgctttt

SEQ ID NO: 161848 - DNA, 17 bp, synthetic construct
  source 1..17: mol_type = other DNA
agtcaggaaactgcttt

SEQ ID NO: 161849 - DNA, 17 bp, synthetic construct
  source 1..17: mol_type = other DNA
cagtcaggaaactgctt

SEQ ID NO: 161850 - DNA, 17 bp, synthetic construct
  source 1..17: mol_type = other DNA
ccagtcaggaaactgct

SEQ ID NO: 161851 - DNA, 17 bp, synthetic construct
  source 1..17: mol_type = other DNA
cccagtcaggaaactgc

SEQ ID NO: 161852 - DNA, 17 bp, synthetic construct
  source 1..17: mol_type = other DNA
gcccagtcaggaaactg

SEQ ID NO: 161853 - DNA, 17 bp, synthetic construct
  source 1..17: mol_type = other DNA
cgcccagtcaggaaact

SEQ ID NO: 161854 - DNA, 17 bp, synthetic construct
  source 1..17: mol_type = other DNA
gcgcccagtcaggaaac

SEQ ID NO: 161855 - DNA, 17 bp, synthetic construct
  source 1..17: mol_type = other DNA
cgcgcccagtcaggaaa

SEQ ID NO: 161856 - DNA, 17 bp, synthetic construct
  source 1..17: mol_type = other DNA
ccgcgcccagtcaggaa

SEQ ID NO: 161857 - DNA, 17 bp, synthetic construct
  source 1..17: mol_type = other DNA
accgcgcccagtcagga

SEQ ID NO: 161858 - DNA, 17 bp, synthetic construct
  source 1..17: mol_type = other DNA
caccgcgcccagtcagg

SEQ ID NO: 161859 - DNA, 17 bp, synthetic construct
  source 1..17: mol_type = other DNA
ccaccgcgcccagtcag

SEQ ID NO: 161860 - DNA, 17 bp, synthetic construct
  source 1..17: mol_type = other DNA
gccaccgcgcccagtca

SEQ ID NO: 161861 - DNA, 17 bp, synthetic construct
  source 1..17: mol_type = other DNA
agccaccgcgcccagtc

SEQ ID NO: 161862 - DNA, 17 bp, synthetic construct
  source 1..17: mol_type = other DNA
gagccaccgcgcccagt

SEQ ID NO: 161863 - DNA, 17 bp, synthetic construct
  source 1..17: mol_type = other DNA
tgagccaccgcgcccag

SEQ ID NO: 161864 - DNA, 17 bp, synthetic construct
  source 1..17: mol_type = other DNA
atgagccaccgcgccca

SEQ ID NO: 161865 - DNA, 17 bp, synthetic construct
  source 1..17: mol_type = other DNA
catgagccaccgcgccc

SEQ ID NO: 161866 - DNA, 17 bp, synthetic construct
  source 1..17: mol_type = other DNA
acatgagccaccgcgcc

SEQ ID NO: 161867 - DNA, 17 bp, synthetic construct
  source 1..17: mol_type = other DNA
gacatgagccaccgcgc

SEQ ID NO: 161868 - DNA, 17 bp, synthetic construct
  source 1..17: mol_type = other DNA
agacatgagccaccgcg

SEQ ID NO: 161869 - DNA, 17 bp, synthetic construct
  source 1..17: mol_type = other DNA
cagacatgagccaccgc

SEQ ID NO: 161870 - DNA, 17 bp, synthetic construct
  source 1..17: mol_type = other DNA
acagacatgagccaccg

SEQ ID NO: 161871 - DNA, 17 bp, synthetic construct
  source 1..17: mol_type = other DNA
tacagacatgagccacc

SEQ ID NO: 161872 - DNA, 17 bp, synthetic construct
  source 1..17: mol_type = other DNA
ttacagacatgagccac

SEQ ID NO: 161873 - DNA, 17 bp, synthetic construct
  source 1..17: mol_type = other DNA
attacagacatgagcca

SEQ ID NO: 161874 - DNA, 17 bp, synthetic construct
  source 1..17: mol_type = other DNA
gattacagacatgagcc

SEQ ID NO: 161875 - DNA, 17 bp, synthetic construct
  source 1..17: mol_type = other DNA
ggattacagacatgagc

SEQ ID NO: 161876 - DNA, 17 bp, synthetic construct
  source 1..17: mol_type = other DNA
gggattacagacatgag

SEQ ID NO: 161877 - DNA, 17 bp, synthetic construct
  source 1..17: mol_type = other DNA
tgggattacagacatga

SEQ ID NO: 161878 - DNA, 17 bp, synthetic construct
  source 1..17: mol_type = other DNA
ctgggattacagacatg

SEQ ID NO: 161879 - DNA, 17 bp, synthetic construct
  source 1..17: mol_type = other DNA
gctgggattacagacat

SEQ ID NO: 161880 - DNA, 17 bp, synthetic construct
  source 1..17: mol_type = other DNA
tgctgggattacagaca

SEQ ID NO: 161881 - DNA, 17 bp, synthetic construct
  source 1..17: mol_type = other DNA
gtgctgggattacagac

SEQ ID NO: 161882 - DNA, 17 bp, synthetic construct
  source 1..17: mol_type = other DNA
agtgctgggattacaga

SEQ ID NO: 161883 - DNA, 17 bp, synthetic construct
  source 1..17: mol_type = other DNA
aagtgctgggattacag

SEQ ID NO: 161884 - DNA, 17 bp, synthetic construct
  source 1..17: mol_type = other DNA
aaagtgctgggattaca

SEQ ID NO: 161885 - DNA, 17 bp, synthetic construct
  source 1..17: mol_type = other DNA
caaagtgctgggattac

SEQ ID NO: 161886 - DNA, 17 bp, synthetic construct
  source 1..17: mol_type = other DNA
ccaaagtgctgggatta

SEQ ID NO: 161887 - DNA, 17 bp, synthetic construct
  source 1..17: mol_type = other DNA
cccaaagtgctgggatt

SEQ ID NO: 161888 - DNA, 17 bp, synthetic construct
  source 1..17: mol_type = other DNA
tcccaaagtgctgggat

SEQ ID NO: 161889 - DNA, 17 bp, synthetic construct
  source 1..17: mol_type = other DNA
gtcccaaagtgctggga

SEQ ID NO: 161890 - DNA, 17 bp, synthetic construct
  source 1..17: mol_type = other DNA
cgtcccaaagtgctggg

SEQ ID NO: 161891 - DNA, 17 bp, synthetic construct
  source 1..17: mol_type = other DNA
gcgtcccaaagtgctgg

SEQ ID NO: 161892 - DNA, 17 bp, synthetic construct
  source 1..17: mol_type = other DNA
agcgtcccaaagtgctg

SEQ ID NO: 161893 - DNA, 17 bp, synthetic construct
  source 1..17: mol_type = other DNA
cagcgtcccaaagtgct

SEQ ID NO: 161894 - DNA, 17 bp, synthetic construct
  source 1..17: mol_type = other DNA
tcagcgtcccaaagtgc

SEQ ID NO: 161895 - DNA, 17 bp, synthetic construct
  source 1..17: mol_type = other DNA
ctcagcgtcccaaagtg

SEQ ID NO: 161896 - DNA, 17 bp, synthetic construct
  source 1..17: mol_type = other DNA
cctcagcgtcccaaagt

SEQ ID NO: 161897 - DNA, 17 bp, synthetic construct
  source 1..17: mol_type = other DNA
gcctcagcgtcccaaag

SEQ ID NO: 161898 - DNA, 17 bp, synthetic construct
  source 1..17: mol_type = other DNA
tgcctcagcgtcccaaa

SEQ ID NO: 161899 - DNA, 17 bp, synthetic construct
  source 1..17: mol_type = other DNA
ctgcctcagcgtcccaa

SEQ ID NO: 161900 - DNA, 17 bp, synthetic construct
  source 1..17: mol_type = other DNA
cctgcctcagcgtccca

SEQ ID NO: 161901 - DNA, 17 bp, synthetic construct
  source 1..17: mol_type = other DNA
acctgcctcagcgtccc

SEQ ID NO: 161902 - DNA, 17 bp, synthetic construct
  source 1..17: mol_type = other DNA
cacctgcctcagcgtcc

SEQ ID NO: 161903 - DNA, 17 bp, synthetic construct
  source 1..17: mol_type = other DNA
ccacctgcctcagcgtc

SEQ ID NO: 161904 - DNA, 17 bp, synthetic construct
  source 1..17: mol_type = other DNA
tccacctgcctcagcgt

SEQ ID NO: 161905 - DNA, 17 bp, synthetic construct
  source 1..17: mol_type = other DNA
atccacctgcctcagcg

SEQ ID NO: 161906 - DNA, 17 bp, synthetic construct
  source 1..17: mol_type = other DNA
gatccacctgcctcagc

SEQ ID NO: 161907 - DNA, 17 bp, synthetic construct
  source 1..17: mol_type = other DNA
tgatccacctgcctcag

SEQ ID NO: 161908 - DNA, 17 bp, synthetic construct
  source 1..17: mol_type = other DNA
gtgatccacctgcctca

SEQ ID NO: 161909 - DNA, 17 bp, synthetic construct
  source 1..17: mol_type = other DNA
ggtgatccacctgcctc

SEQ ID NO: 161910 - DNA, 17 bp, synthetic construct
  source 1..17: mol_type = other DNA
aggtgatccacctgcct

SEQ ID NO: 161911 - DNA, 17 bp, synthetic construct
  source 1..17: mol_type = other DNA
caggtgatccacctgcc

SEQ ID NO: 161912 - DNA, 17 bp, synthetic construct
  source 1..17: mol_type = other DNA
tcaggtgatccacctgc

SEQ ID NO: 161913 - DNA, 17 bp, synthetic construct
  source 1..17: mol_type = other DNA
ctcaggtgatccacctg

SEQ ID NO: 161914 - DNA, 17 bp, synthetic construct
  source 1..17: mol_type = other DNA
cctcaggtgatccacct

SEQ ID NO: 161915 - DNA, 17 bp, synthetic construct
  source 1..17: mol_type = other DNA
acctcaggtgatccacc

SEQ ID NO: 161916 - DNA, 17 bp, synthetic construct
  source 1..17: mol_type = other DNA
gacctcaggtgatccac

SEQ ID NO: 161917 - DNA, 17 bp, synthetic construct
  source 1..17: mol_type = other DNA
tgacctcaggtgatcca

SEQ ID NO: 161918 - DNA, 17 bp, synthetic construct
  source 1..17: mol_type = other DNA
ctgacctcaggtgatcc

SEQ ID NO: 161919 - DNA, 17 bp, synthetic construct
  source 1..17: mol_type = other DNA
cctgacctcaggtgatc

SEQ ID NO: 161920 - DNA, 17 bp, synthetic construct
  source 1..17: mol_type = other DNA
tcctgacctcaggtgat

SEQ ID NO: 161921 - DNA, 17 bp, synthetic construct
  source 1..17: mol_type = other DNA
ctcctgacctcaggtga

SEQ ID NO: 161922 - DNA, 17 bp, synthetic construct
  source 1..17: mol_type = other DNA
actcctgacctcaggtg

SEQ ID NO: 161923 - DNA, 17 bp, synthetic construct
  source 1..17: mol_type = other DNA
aactcctgacctcaggt

SEQ ID NO: 161924 - DNA, 17 bp, synthetic construct
  source 1..17: mol_type = other DNA
aaactcctgacctcagg

SEQ ID NO: 161925 - DNA, 17 bp, synthetic construct
  source 1..17: mol_type = other DNA
caaactcctgacctcag

SEQ ID NO: 161926 - DNA, 17 bp, synthetic construct
  source 1..17: mol_type = other DNA
tcaaactcctgacctca

SEQ ID NO: 161927 - DNA, 17 bp, synthetic construct
  source 1..17: mol_type = other DNA
ctcaaactcctgacctc

SEQ ID NO: 161928 - DNA, 17 bp, synthetic construct
  source 1..17: mol_type = other DNA
tctcaaactcctgacct

SEQ ID NO: 161929 - DNA, 17 bp, synthetic construct
  source 1..17: mol_type = other DNA
gtctcaaactcctgacc

SEQ ID NO: 161930 - DNA, 17 bp, synthetic construct
  source 1..17: mol_type = other DNA
ggtctcaaactcctgac

SEQ ID NO: 161931 - DNA, 17 bp, synthetic construct
  source 1..17: mol_type = other DNA
tggtctcaaactcctga

SEQ ID NO: 161932 - DNA, 17 bp, synthetic construct
  source 1..17: mol_type = other DNA
ctggtctcaaactcctg

SEQ ID NO: 161933 - DNA, 17 bp, synthetic construct
  source 1..17: mol_type = other DNA
gctggtctcaaactcct

SEQ ID NO: 161934 - DNA, 17 bp, synthetic construct
  source 1..17: mol_type = other DNA
ggctggtctcaaactcc

SEQ ID NO: 161935 - DNA, 17 bp, synthetic construct
  source 1..17: mol_type = other DNA
aggctggtctcaaactc

SEQ ID NO: 161936 - DNA, 17 bp, synthetic construct
  source 1..17: mol_type = other DNA
caggctggtctcaaact

SEQ ID NO: 161937 - DNA, 17 bp, synthetic construct
  source 1..17: mol_type = other DNA
ccaggctggtctcaaac

SEQ ID NO: 161938 - DNA, 17 bp, synthetic construct
  source 1..17: mol_type = other DNA
accaggctggtctcaaa

SEQ ID NO: 161939 - DNA, 17 bp, synthetic construct
  source 1..17: mol_type = other DNA
gaccaggctggtctcaa

SEQ ID NO: 161940 - DNA, 17 bp, synthetic construct
  source 1..17: mol_type = other DNA
tgaccaggctggtctca

SEQ ID NO: 161941 - DNA, 17 bp, synthetic construct
  source 1..17: mol_type = other DNA
ttgaccaggctggtctc

SEQ ID NO: 161942 - DNA, 17 bp, synthetic construct
  source 1..17: mol_type = other DNA
gttgaccaggctggtct

SEQ ID NO: 161943 - DNA, 17 bp, synthetic construct
  source 1..17: mol_type = other DNA
tgttgaccaggctggtc

SEQ ID NO: 161944 - DNA, 17 bp, synthetic construct
  source 1..17: mol_type = other DNA
atgttgaccaggctggt

SEQ ID NO: 161945 - DNA, 17 bp, synthetic construct
  source 1..17: mol_type = other DNA
catgttgaccaggctgg

SEQ ID NO: 161946 - DNA, 17 bp, synthetic construct
  source 1..17: mol_type = other DNA
ccatgttgaccaggctg

SEQ ID NO: 161947 - DNA, 17 bp, synthetic construct
  source 1..17: mol_type = other DNA
gccatgttgaccaggct

SEQ ID NO: 161948 - DNA, 17 bp, synthetic construct
  source 1..17: mol_type = other DNA
cgccatgttgaccaggc

SEQ ID NO: 161949 - DNA, 17 bp, synthetic construct
  source 1..17: mol_type = other DNA
tcgccatgttgaccagg

SEQ ID NO: 161950 - DNA, 17 bp, synthetic construct
  source 1..17: mol_type = other DNA
ttcgccatgttgaccag

SEQ ID NO: 161951 - DNA, 17 bp, synthetic construct
  source 1..17: mol_type = other DNA
tttcgccatgttgacca

SEQ ID NO: 161952 - DNA, 17 bp, synthetic construct
  source 1..17: mol_type = other DNA
gtttcgccatgttgacc

SEQ ID NO: 161953 - DNA, 17 bp, synthetic construct
  source 1..17: mol_type = other DNA
ggtttcgccatgttgac

SEQ ID NO: 161954 - DNA, 17 bp, synthetic construct
  source 1..17: mol_type = other DNA
gggtttcgccatgttga

SEQ ID NO: 161955 - DNA, 17 bp, synthetic construct
  source 1..17: mol_type = other DNA
ggggtttcgccatgttg

SEQ ID NO: 161956 - DNA, 17 bp, synthetic construct
  source 1..17: mol_type = other DNA
cggggtttcgccatgtt

SEQ ID NO: 161957 - DNA, 17 bp, synthetic construct
  source 1..17: mol_type = other DNA
acggggtttcgccatgt

SEQ ID NO: 161958 - DNA, 17 bp, synthetic construct
  source 1..17: mol_type = other DNA
gacggggtttcgccatg

SEQ ID NO: 161959 - DNA, 17 bp, synthetic construct
  source 1..17: mol_type = other DNA
agacggggtttcgccat

SEQ ID NO: 161960 - DNA, 17 bp, synthetic construct
  source 1..17: mol_type = other DNA
gagacggggtttcgcca

SEQ ID NO: 161961 - DNA, 17 bp, synthetic construct
  source 1..17: mol_type = other DNA
agagacggggtttcgcc

SEQ ID NO: 161962 - DNA, 17 bp, synthetic construct
  source 1..17: mol_type = other DNA
tagagacggggtttcgc

SEQ ID NO: 161963 - DNA, 17 bp, synthetic construct
  source 1..17: mol_type = other DNA
gtagagacggggtttcg

SEQ ID NO: 161964 - DNA, 17 bp, synthetic construct
  source 1..17: mol_type = other DNA
tgtagagacggggtttc

SEQ ID NO: 161965 - DNA, 17 bp, synthetic construct
  source 1..17: mol_type = other DNA
ttgtagagacggggttt

SEQ ID NO: 161966 - DNA, 17 bp, synthetic construct
  source 1..17: mol_type = other DNA
tttgtagagacggggtt

SEQ ID NO: 161967 - DNA, 17 bp, synthetic construct
  source 1..17: mol_type = other DNA
ttttgtagagacggggt

SEQ ID NO: 161968 - DNA, 17 bp, synthetic construct
  source 1..17: mol_type = other DNA
tttttgtagagacgggg

SEQ ID NO: 161969 - DNA, 17 bp, synthetic construct
  source 1..17: mol_type = other DNA
ttttttgtagagacggg

SEQ ID NO: 161970 - DNA, 17 bp, synthetic construct
  source 1..17: mol_type = other DNA
attttttgtagagacgg

SEQ ID NO: 161971 - DNA, 17 bp, synthetic construct
  source 1..17: mol_type = other DNA
tattttttgtagagacg

SEQ ID NO: 161972 - DNA, 17 bp, synthetic construct
  source 1..17: mol_type = other DNA
gtattttttgtagagac

SEQ ID NO: 161973 - DNA, 17 bp, synthetic construct
  source 1..17: mol_type = other DNA
tgtattttttgtagaga

SEQ ID NO: 161974 - DNA, 17 bp, synthetic construct
  source 1..17: mol_type = other DNA
ttgtattttttgtagag

SEQ ID NO: 161975 - DNA, 17 bp, synthetic construct
  source 1..17: mol_type = other DNA
tttgtattttttgtaga

SEQ ID NO: 161976 - DNA, 17 bp, synthetic construct
  source 1..17: mol_type = other DNA
ttttgtattttttgtag

SEQ ID NO: 161977 - DNA, 17 bp, synthetic construct
  source 1..17: mol_type = other DNA
tttttgtattttttgta

SEQ ID NO: 161978 - DNA, 17 bp, synthetic construct
  source 1..17: mol_type = other DNA
atttttgtattttttgt

SEQ ID NO: 161979 - DNA, 17 bp, synthetic construct
  source 1..17: mol_type = other DNA
tatttttgtattttttg

SEQ ID NO: 161980 - DNA, 17 bp, synthetic construct
  source 1..17: mol_type = other DNA
ctatttttgtatttttt

SEQ ID NO: 161981 - DNA, 17 bp, synthetic construct
  source 1..17: mol_type = other DNA
gctatttttgtattttt

SEQ ID NO: 161982 - DNA, 17 bp, synthetic construct
  source 1..17: mol_type = other DNA
ggctatttttgtatttt

SEQ ID NO: 161983 - DNA, 17 bp, synthetic construct
  source 1..17: mol_type = other DNA
cggctatttttgtattt

SEQ ID NO: 161984 - DNA, 17 bp, synthetic construct
  source 1..17: mol_type = other DNA
ccggctatttttgtatt

SEQ ID NO: 161985 - DNA, 17 bp, synthetic construct
  source 1..17: mol_type = other DNA
cccggctatttttgtat

SEQ ID NO: 161986 - DNA, 17 bp, synthetic construct
  source 1..17: mol_type = other DNA
acccggctatttttgta

SEQ ID NO: 161987 - DNA, 17 bp, synthetic construct
  source 1..17: mol_type = other DNA
cacccggctatttttgt

SEQ ID NO: 161988 - DNA, 17 bp, synthetic construct
  source 1..17: mol_type = other DNA
acacccggctatttttg

SEQ ID NO: 161989 - DNA, 17 bp, synthetic construct
  source 1..17: mol_type = other DNA
cacacccggctattttt

SEQ ID NO: 161990 - DNA, 17 bp, synthetic construct
  source 1..17: mol_type = other DNA
ccacacccggctatttt

SEQ ID NO: 161991 - DNA, 17 bp, synthetic construct
  source 1..17: mol_type = other DNA
accacacccggctattt

SEQ ID NO: 161992 - DNA, 17 bp, synthetic construct
  source 1..17: mol_type = other DNA
caccacacccggctatt

SEQ ID NO: 161993 - DNA, 17 bp, synthetic construct
  source 1..17: mol_type = other DNA
ccaccacacccggctat

SEQ ID NO: 161994 - DNA, 17 bp, synthetic construct
  source 1..17: mol_type = other DNA
accaccacacccggcta

SEQ ID NO: 161995 - DNA, 17 bp, synthetic construct
  source 1..17: mol_type = other DNA
caccaccacacccggct

SEQ ID NO: 161996 - DNA, 17 bp, synthetic construct
  source 1..17: mol_type = other DNA
acaccaccacacccggc

SEQ ID NO: 161997 - DNA, 17 bp, synthetic construct
  source 1..17: mol_type = other DNA
cacaccaccacacccgg

SEQ ID NO: 161998 - DNA, 17 bp, synthetic construct
  source 1..17: mol_type = other DNA
acacaccaccacacccg

SEQ ID NO: 161999 - DNA, 17 bp, synthetic construct
  source 1..17: mol_type = other DNA
cacacaccaccacaccc

SEQ ID NO: 162000 - DNA, 17 bp, synthetic construct
  source 1..17: mol_type = other DNA
gcacacaccaccacacc

SEQ ID NO: 162001 - DNA, 17 bp, synthetic construct
  source 1..17: mol_type = other DNA
ggcacacaccaccacac

SEQ ID NO: 162002 - DNA, 17 bp, synthetic construct
  source 1..17: mol_type = other DNA
aggcacacaccaccaca

SEQ ID NO: 162003 - DNA, 17 bp, synthetic construct
  source 1..17: mol_type = other DNA
caggcacacaccaccac

SEQ ID NO: 162004 - DNA, 17 bp, synthetic construct
  source 1..17: mol_type = other DNA
acaggcacacaccacca

SEQ ID NO: 162005 - DNA, 17 bp, synthetic construct
  source 1..17: mol_type = other DNA
tacaggcacacaccacc

SEQ ID NO: 162006 - DNA, 17 bp, synthetic construct
  source 1..17: mol_type = other DNA
ttacaggcacacaccac

SEQ ID NO: 162007 - DNA, 17 bp, synthetic construct
  source 1..17: mol_type = other DNA
attacaggcacacacca

SEQ ID NO: 162008 - DNA, 17 bp, synthetic construct
  source 1..17: mol_type = other DNA
gattacaggcacacacc

SEQ ID NO: 162009 - DNA, 17 bp, synthetic construct
  source 1..17: mol_type = other DNA
ggattacaggcacacac

SEQ ID NO: 162010 - DNA, 17 bp, synthetic construct
  source 1..17: mol_type = other DNA
gggattacaggcacaca

SEQ ID NO: 162011 - DNA, 17 bp, synthetic construct
  source 1..17: mol_type = other DNA
tgggattacaggcacac

SEQ ID NO: 162012 - DNA, 17 bp, synthetic construct
  source 1..17: mol_type = other DNA
ctgggattacaggcaca

SEQ ID NO: 162013 - DNA, 17 bp, synthetic construct
  source 1..17: mol_type = other DNA
gctgggattacaggcac

SEQ ID NO: 162014 - DNA, 17 bp, synthetic construct
  source 1..17: mol_type = other DNA
agctgggattacaggca

SEQ ID NO: 162015 - DNA, 17 bp, synthetic construct
  source 1..17: mol_type = other DNA
tagctgggattacaggc

SEQ ID NO: 162016 - DNA, 17 bp, synthetic construct
  source 1..17: mol_type = other DNA
gtagctgggattacagg

SEQ ID NO: 162017 - DNA, 17 bp, synthetic construct
  source 1..17: mol_type = other DNA
agtagctgggattacag

SEQ ID NO: 162018 - DNA, 17 bp, synthetic construct
  source 1..17: mol_type = other DNA
gagtagctgggattaca

SEQ ID NO: 162019 - DNA, 17 bp, synthetic construct
  source 1..17: mol_type = other DNA
cgagtagctgggattac

SEQ ID NO: 162020 - DNA, 17 bp, synthetic construct
  source 1..17: mol_type = other DNA
ccgagtagctgggatta

SEQ ID NO: 162021 - DNA, 17 bp, synthetic construct
  source 1..17: mol_type = other DNA
cccgagtagctgggatt

SEQ ID NO: 162022 - DNA, 17 bp, synthetic construct
  source 1..17: mol_type = other DNA
tcccgagtagctgggat

SEQ ID NO: 162023 - DNA, 17 bp, synthetic construct
  source 1..17: mol_type = other DNA
ctcccgagtagctggga

SEQ ID NO: 162024 - DNA, 17 bp, synthetic construct
  source 1..17: mol_type = other DNA
cctcccgagtagctggg

SEQ ID NO: 162025 - DNA, 17 bp, synthetic construct
  source 1..17: mol_type = other DNA
gcctcccgagtagctgg

SEQ ID NO: 162026 - DNA, 17 bp, synthetic construct
  source 1..17: mol_type = other DNA
agcctcccgagtagctg

SEQ ID NO: 162027 - DNA, 17 bp, synthetic construct
  source 1..17: mol_type = other DNA
cagcctcccgagtagct

SEQ ID NO: 162028 - DNA, 17 bp, synthetic construct
  source 1..17: mol_type = other DNA
tcagcctcccgagtagc

SEQ ID NO: 162029 - DNA, 17 bp, synthetic construct
  source 1..17: mol_type = other DNA
ctcagcctcccgagtag

SEQ ID NO: 162030 - DNA, 17 bp, synthetic construct
  source 1..17: mol_type = other DNA
cctcagcctcccgagta

SEQ ID NO: 162031 - DNA, 17 bp, synthetic construct
  source 1..17: mol_type = other DNA
gcctcagcctcccgagt

SEQ ID NO: 162032 - DNA, 17 bp, synthetic construct
  source 1..17: mol_type = other DNA
tgcctcagcctcccgag

SEQ ID NO: 162033 - DNA, 17 bp, synthetic construct
  source 1..17: mol_type = other DNA
ctgcctcagcctcccga

SEQ ID NO: 162034 - DNA, 17 bp, synthetic construct
  source 1..17: mol_type = other DNA
cctgcctcagcctcccg

SEQ ID NO: 162035 - DNA, 17 bp, synthetic construct
  source 1..17: mol_type = other DNA
tcctgcctcagcctccc

SEQ ID NO: 162036 - DNA, 17 bp, synthetic construct
  source 1..17: mol_type = other DNA
ctcctgcctcagcctcc

SEQ ID NO: 162037 - DNA, 17 bp, synthetic construct
  source 1..17: mol_type = other DNA
tctcctgcctcagcctc

SEQ ID NO: 162038 - DNA, 17 bp, synthetic construct
  source 1..17: mol_type = other DNA
ttctcctgcctcagcct

SEQ ID NO: 162039 - DNA, 17 bp, synthetic construct
  source 1..17: mol_type = other DNA
attctcctgcctcagcc

SEQ ID NO: 162040 - DNA, 17 bp, synthetic construct
  source 1..17: mol_type = other DNA
gattctcctgcctcagc

SEQ ID NO: 162041 - DNA, 17 bp, synthetic construct
  source 1..17: mol_type = other DNA
tgattctcctgcctcag

SEQ ID NO: 162042 - DNA, 17 bp, synthetic construct
  source 1..17: mol_type = other DNA
gtgattctcctgcctca

SEQ ID NO: 162043 - DNA, 17 bp, synthetic construct
  source 1..17: mol_type = other DNA
agtgattctcctgcctc

SEQ ID NO: 162044 - DNA, 17 bp, synthetic construct
  source 1..17: mol_type = other DNA
aagtgattctcctgcct

SEQ ID NO: 162045 - DNA, 17 bp, synthetic construct
  source 1..17: mol_type = other DNA
caagtgattctcctgcc

SEQ ID NO: 162046 - DNA, 17 bp, synthetic construct
  source 1..17: mol_type = other DNA
tcaagtgattctcctgc

SEQ ID NO: 162047 - DNA, 17 bp, synthetic construct
  source 1..17: mol_type = other DNA
ttcaagtgattctcctg

SEQ ID NO: 162048 - DNA, 17 bp, synthetic construct
  source 1..17: mol_type = other DNA
gttcaagtgattctcct

SEQ ID NO: 162049 - DNA, 17 bp, synthetic construct
  source 1..17: mol_type = other DNA
ggttcaagtgattctcc

SEQ ID NO: 162050 - DNA, 17 bp, synthetic construct
  source 1..17: mol_type = other DNA
aggttcaagtgattctc

SEQ ID NO: 162051 - DNA, 17 bp, synthetic construct
  source 1..17: mol_type = other DNA
caggttcaagtgattct

SEQ ID NO: 162052 - DNA, 17 bp, synthetic construct
  source 1..17: mol_type = other DNA
ccaggttcaagtgattc

SEQ ID NO: 162053 - DNA, 17 bp, synthetic construct
  source 1..17: mol_type = other DNA
cccaggttcaagtgatt

SEQ ID NO: 162054 - DNA, 17 bp, synthetic construct
  source 1..17: mol_type = other DNA
tcccaggttcaagtgat

SEQ ID NO: 162055 - DNA, 17 bp, synthetic construct
  source 1..17: mol_type = other DNA
ttcccaggttcaagtga

SEQ ID NO: 162056 - DNA, 17 bp, synthetic construct
  source 1..17: mol_type = other DNA
cttcccaggttcaagtg

SEQ ID NO: 162057 - DNA, 17 bp, synthetic construct
  source 1..17: mol_type = other DNA
tcttcccaggttcaagt

SEQ ID NO: 162058 - DNA, 17 bp, synthetic construct
  source 1..17: mol_type = other DNA
ctcttcccaggttcaag

SEQ ID NO: 162059 - DNA, 17 bp, synthetic construct
  source 1..17: mol_type = other DNA
cctcttcccaggttcaa

SEQ ID NO: 162060 - DNA, 17 bp, synthetic construct
  source 1..17: mol_type = other DNA
tcctcttcccaggttca

SEQ ID NO: 162061 - DNA, 17 bp, synthetic construct
  source 1..17: mol_type = other DNA
ctcctcttcccaggttc

SEQ ID NO: 162062 - DNA, 17 bp, synthetic construct
  source 1..17: mol_type = other DNA
cctcctcttcccaggtt

SEQ ID NO: 162063 - DNA, 17 bp, synthetic construct
  source 1..17: mol_type = other DNA
acctcctcttcccaggt

SEQ ID NO: 162064 - DNA, 17 bp, synthetic construct
  source 1..17: mol_type = other DNA
aacctcctcttcccagg

SEQ ID NO: 162065 - DNA, 17 bp, synthetic construct
  source 1..17: mol_type = other DNA
caacctcctcttcccag

SEQ ID NO: 162066 - DNA, 17 bp, synthetic construct
  source 1..17: mol_type = other DNA
gcaacctcctcttccca

SEQ ID NO: 162067 - DNA, 17 bp, synthetic construct
  source 1..17: mol_type = other DNA
tgcaacctcctcttccc

SEQ ID NO: 162068 - DNA, 17 bp, synthetic construct
  source 1..17: mol_type = other DNA
ctgcaacctcctcttcc

SEQ ID NO: 162069 - DNA, 17 bp, synthetic construct
  source 1..17: mol_type = other DNA
actgcaacctcctcttc

SEQ ID NO: 162070 - DNA, 17 bp, synthetic construct
  source 1..17: mol_type = other DNA
cactgcaacctcctctt

SEQ ID NO: 162071 - DNA, 17 bp, synthetic construct
  source 1..17: mol_type = other DNA
tcactgcaacctcctct

SEQ ID NO: 162072 - DNA, 17 bp, synthetic construct
  source 1..17: mol_type = other DNA
ctcactgcaacctcctc

SEQ ID NO: 162073 - DNA, 17 bp, synthetic construct
  source 1..17: mol_type = other DNA
gctcactgcaacctcct

SEQ ID NO: 162074 - DNA, 17 bp, synthetic construct
  source 1..17: mol_type = other DNA
ggctcactgcaacctcc

SEQ ID NO: 162075 - DNA, 17 bp, synthetic construct
  source 1..17: mol_type = other DNA
tggctcactgcaacctc

SEQ ID NO: 162076 - DNA, 17 bp, synthetic construct
  source 1..17: mol_type = other DNA
ttggctcactgcaacct

SEQ ID NO: 162077 - DNA, 17 bp, synthetic construct
  source 1..17: mol_type = other DNA
cttggctcactgcaacc

SEQ ID NO: 162078 - DNA, 17 bp, synthetic construct
  source 1..17: mol_type = other DNA
tcttggctcactgcaac

SEQ ID NO: 162079 - DNA, 17 bp, synthetic construct
  source 1..17: mol_type = other DNA
atcttggctcactgcaa

SEQ ID NO: 162080 - DNA, 17 bp, synthetic construct
  source 1..17: mol_type = other DNA
gatcttggctcactgca

SEQ ID NO: 162081 - DNA, 17 bp, synthetic construct
  source 1..17: mol_type = other DNA
cgatcttggctcactgc

SEQ ID NO: 162082 - DNA, 17 bp, synthetic construct
  source 1..17: mol_type = other DNA
acgatcttggctcactg

SEQ ID NO: 162083 - DNA, 17 bp, synthetic construct
  source 1..17: mol_type = other DNA
cacgatcttggctcact

SEQ ID NO: 162084 - DNA, 17 bp, synthetic construct
  source 1..17: mol_type = other DNA
gcacgatcttggctcac

SEQ ID NO: 162085 - DNA, 17 bp, synthetic construct
  source 1..17: mol_type = other DNA
ggcacgatcttggctca

SEQ ID NO: 162086 - DNA, 17 bp, synthetic construct
  source 1..17: mol_type = other DNA
tggcacgatcttggctc

SEQ ID NO: 162087 - DNA, 17 bp, synthetic construct
  source 1..17: mol_type = other DNA
gtggcacgatcttggct

SEQ ID NO: 162088 - DNA, 17 bp, synthetic construct
  source 1..17: mol_type = other DNA
agtggcacgatcttggc

SEQ ID NO: 162089 - DNA, 17 bp, synthetic construct
  source 1..17: mol_type = other DNA
cagtggcacgatcttgg

SEQ ID NO: 162090 - DNA, 17 bp, synthetic construct
  source 1..17: mol_type = other DNA
gcagtggcacgatcttg

SEQ ID NO: 162091 - DNA, 17 bp, synthetic construct
  source 1..17: mol_type = other DNA
tgcagtggcacgatctt

SEQ ID NO: 162092 - DNA, 17 bp, synthetic construct
  source 1..17: mol_type = other DNA
gtgcagtggcacgatct

SEQ ID NO: 162093 - DNA, 17 bp, synthetic construct
  source 1..17: mol_type = other DNA
agtgcagtggcacgatc

SEQ ID NO: 162094 - DNA, 17 bp, synthetic construct
  source 1..17: mol_type = other DNA
gagtgcagtggcacgat

SEQ ID NO: 162095 - DNA, 17 bp, synthetic construct
  source 1..17: mol_type = other DNA
ggagtgcagtggcacga

SEQ ID NO: 162096 - DNA, 17 bp, synthetic construct
  source 1..17: mol_type = other DNA
tggagtgcagtggcacg

SEQ ID NO: 162097 - DNA, 17 bp, synthetic construct
  source 1..17: mol_type = other DNA
ctggagtgcagtggcac

SEQ ID NO: 162098 - DNA, 17 bp, synthetic construct
  source 1..17: mol_type = other DNA
gctggagtgcagtggca

SEQ ID NO: 162099 - DNA, 17 bp, synthetic construct
  source 1..17: mol_type = other DNA
ggctggagtgcagtggc

SEQ ID NO: 162100 - DNA, 17 bp, synthetic construct
  source 1..17: mol_type = other DNA
aggctggagtgcagtgg

SEQ ID NO: 162101 - DNA, 17 bp, synthetic construct
  source 1..17: mol_type = other DNA
taggctggagtgcagtg

SEQ ID NO: 162102 - DNA, 17 bp, synthetic construct
  source 1..17: mol_type = other DNA
ttaggctggagtgcagt

SEQ ID NO: 162103 - DNA, 17 bp, synthetic construct
  source 1..17: mol_type = other DNA
cttaggctggagtgcag

SEQ ID NO: 162104 - DNA, 17 bp, synthetic construct
  source 1..17: mol_type = other DNA
gcttaggctggagtgca

SEQ ID NO: 162105 - DNA, 17 bp, synthetic construct
  source 1..17: mol_type = other DNA
tgcttaggctggagtgc

SEQ ID NO: 162106 - DNA, 17 bp, synthetic construct
  source 1..17: mol_type = other DNA
ttgcttaggctggagtg

SEQ ID NO: 162107 - DNA, 17 bp, synthetic construct
  source 1..17: mol_type = other DNA
tttgcttaggctggagt

SEQ ID NO: 162108 - DNA, 17 bp, synthetic construct
  source 1..17: mol_type = other DNA
ttttgcttaggctggag

SEQ ID NO: 162109 - DNA, 17 bp, synthetic construct
  source 1..17: mol_type = other DNA
tttttgcttaggctgga

SEQ ID NO: 162110 - DNA, 17 bp, synthetic construct
  source 1..17: mol_type = other DNA
ctttttgcttaggctgg

SEQ ID NO: 162111 - DNA, 17 bp, synthetic construct
  source 1..17: mol_type = other DNA
tctttttgcttaggctg

SEQ ID NO: 162112 - DNA, 17 bp, synthetic construct
  source 1..17: mol_type = other DNA
ctctttttgcttaggct

SEQ ID NO: 162113 - DNA, 17 bp, synthetic construct
  source 1..17: mol_type = other DNA
actctttttgcttaggc

SEQ ID NO: 162114 - DNA, 17 bp, synthetic construct
  source 1..17: mol_type = other DNA
cactctttttgcttagg

SEQ ID NO: 162115 - DNA, 17 bp, synthetic construct
  source 1..17: mol_type = other DNA
tcactctttttgcttag

SEQ ID NO: 162116 - DNA, 17 bp, synthetic construct
  source 1..17: mol_type = other DNA
ctcactctttttgctta

SEQ ID NO: 162117 - DNA, 17 bp, synthetic construct
  source 1..17: mol_type = other DNA
tctcactctttttgctt

SEQ ID NO: 162118 - DNA, 17 bp, synthetic construct
  source 1..17: mol_type = other DNA
gtctcactctttttgct

SEQ ID NO: 162119 - DNA, 17 bp, synthetic construct
  source 1..17: mol_type = other DNA
agtctcactctttttgc

SEQ ID NO: 162120 - DNA, 17 bp, synthetic construct
  source 1..17: mol_type = other DNA
gagtctcactctttttg

SEQ ID NO: 162121 - DNA, 17 bp, synthetic construct
  source 1..17: mol_type = other DNA
agagtctcactcttttt

SEQ ID NO: 162122 - DNA, 17 bp, synthetic construct
  source 1..17: mol_type = other DNA
cagagtctcactctttt

SEQ ID NO: 162123 - DNA, 17 bp, synthetic construct
  source 1..17: mol_type = other DNA
acagagtctcactcttt

SEQ ID NO: 162124 - DNA, 17 bp, synthetic construct
  source 1..17: mol_type = other DNA
gacagagtctcactctt

SEQ ID NO: 162125 - DNA, 17 bp, synthetic construct
  source 1..17: mol_type = other DNA
agacagagtctcactct

SEQ ID NO: 162126 - DNA, 17 bp, synthetic construct
  source 1..17: mol_type = other DNA
gagacagagtctcactc

SEQ ID NO: 162127 - DNA, 17 bp, synthetic construct
  source 1..17: mol_type = other DNA
tgagacagagtctcact

SEQ ID NO: 162128 - DNA, 17 bp, synthetic construct
  source 1..17: mol_type = other DNA
ttgagacagagtctcac

SEQ ID NO: 162129 - DNA, 17 bp, synthetic construct
  source 1..17: mol_type = other DNA
tttgagacagagtctca

SEQ ID NO: 162130 - DNA, 17 bp, synthetic construct
  source 1..17: mol_type = other DNA
ttttgagacagagtctc

SEQ ID NO: 162131 - DNA, 17 bp, synthetic construct
  source 1..17: mol_type = other DNA
gttttgagacagagtct

SEQ ID NO: 162132 - DNA, 17 bp, synthetic construct
  source 1..17: mol_type = other DNA
tgttttgagacagagtc

SEQ ID NO: 162133 - DNA, 17 bp, synthetic construct
  source 1..17: mol_type = other DNA
ttgttttgagacagagt

SEQ ID NO: 162134 - DNA, 17 bp, synthetic construct
  source 1..17: mol_type = other DNA
tttgttttgagacagag

SEQ ID NO: 162135 - DNA, 17 bp, synthetic construct
  source 1..17: mol_type = other DNA
ttttgttttgagacaga

SEQ ID NO: 162136 - DNA, 17 bp, synthetic construct
  source 1..17: mol_type = other DNA
gttttgttttgagacag

SEQ ID NO: 162137 - DNA, 17 bp, synthetic construct
  source 1..17: mol_type = other DNA
tgttttgttttgagaca

SEQ ID NO: 162138 - DNA, 17 bp, synthetic construct
  source 1..17: mol_type = other DNA
ttgttttgttttgagac

SEQ ID NO: 162139 - DNA, 17 bp, synthetic construct
  source 1..17: mol_type = other DNA
gttgttttgttttgaga

SEQ ID NO: 162140 - DNA, 17 bp, synthetic construct
  source 1..17: mol_type = other DNA
tgttgttttgttttgag

SEQ ID NO: 162141 - DNA, 17 bp, synthetic construct
  source 1..17: mol_type = other DNA
ttgttgttttgttttga

SEQ ID NO: 162142 - DNA, 17 bp, synthetic construct
  source 1..17: mol_type = other DNA
tttgttgttttgttttg

SEQ ID NO: 162143 - DNA, 17 bp, synthetic construct
  source 1..17: mol_type = other DNA
ttttgttgttttgtttt

SEQ ID NO: 162144 - DNA, 17 bp, synthetic construct
  source 1..17: mol_type = other DNA
tttttgttgttttgttt

SEQ ID NO: 162145 - DNA, 17 bp, synthetic construct
  source 1..17: mol_type = other DNA
ttttttgttgttttgtt

SEQ ID NO: 162146 - DNA, 17 bp, synthetic construct
  source 1..17: mol_type = other DNA
gttttttgttgttttgt

SEQ ID NO: 162147 - DNA, 17 bp, synthetic construct
  source 1..17: mol_type = other DNA
ggttttttgttgttttg

SEQ ID NO: 162148 - DNA, 17 bp, synthetic construct
  source 1..17: mol_type = other DNA
tggttttttgttgtttt

SEQ ID NO: 162149 - DNA, 17 bp, synthetic construct
  source 1..17: mol_type = other DNA
ttggttttttgttgttt

SEQ ID NO: 162150 - DNA, 17 bp, synthetic construct
  source 1..17: mol_type = other DNA
tttggttttttgttgtt

SEQ ID NO: 162151 - DNA, 17 bp, synthetic construct
  source 1..17: mol_type = other DNA
ttttggttttttgttgt

SEQ ID NO: 162152 - DNA, 17 bp, synthetic construct
  source 1..17: mol_type = other DNA
tttttggttttttgttg

SEQ ID NO: 162153 - DNA, 17 bp, synthetic construct
  source 1..17: mol_type = other DNA
ctttttggttttttgtt

SEQ ID NO: 162154 - DNA, 17 bp, synthetic construct
  source 1..17: mol_type = other DNA
gctttttggttttttgt

SEQ ID NO: 162155 - DNA, 17 bp, synthetic construct
  source 1..17: mol_type = other DNA
tgctttttggttttttg

SEQ ID NO: 162156 - DNA, 17 bp, synthetic construct
  source 1..17: mol_type = other DNA
ctgctttttggtttttt

SEQ ID NO: 162157 - DNA, 17 bp, synthetic construct
  source 1..17: mol_type = other DNA
actgctttttggttttt

SEQ ID NO: 162158 - DNA, 17 bp, synthetic construct
  source 1..17: mol_type = other DNA
aactgctttttggtttt

SEQ ID NO: 162159 - DNA, 17 bp, synthetic construct
  source 1..17: mol_type = other DNA
aaactgctttttggttt

SEQ ID NO: 162160 - DNA, 17 bp, synthetic construct
  source 1..17: mol_type = other DNA
gaaactgctttttggtt

SEQ ID NO: 162161 - DNA, 17 bp, synthetic construct
  source 1..17: mol_type = other DNA
cgaaactgctttttggt

SEQ ID NO: 162162 - DNA, 17 bp, synthetic construct
  source 1..17: mol_type = other DNA
acgaaactgctttttgg

SEQ ID NO: 162163 - DNA, 17 bp, synthetic construct
  source 1..17: mol_type = other DNA
cacgaaactgctttttg

SEQ ID NO: 162164 - DNA, 17 bp, synthetic construct
  source 1..17: mol_type = other DNA
acacgaaactgcttttt

SEQ ID NO: 162165 - DNA, 17 bp, synthetic construct
  source 1..17: mol_type = other DNA
gacacgaaactgctttt

SEQ ID NO: 162166 - DNA, 17 bp, synthetic construct
  source 1..17: mol_type = other DNA
tgacacgaaactgcttt

SEQ ID NO: 162167 - DNA, 17 bp, synthetic construct
  source 1..17: mol_type = other DNA
atgacacgaaactgctt

SEQ ID NO: 162168 - DNA, 17 bp, synthetic construct
  source 1..17: mol_type = other DNA
gatgacacgaaactgct

SEQ ID NO: 162169 - DNA, 17 bp, synthetic construct
  source 1..17: mol_type = other DNA
agatgacacgaaactgc

SEQ ID NO: 162170 - DNA, 17 bp, synthetic construct
  source 1..17: mol_type = other DNA
aagatgacacgaaactg

SEQ ID NO: 162171 - DNA, 17 bp, synthetic construct
  source 1..17: mol_type = other DNA
taagatgacacgaaact

SEQ ID NO: 162172 - DNA, 17 bp, synthetic construct
  source 1..17: mol_type = other DNA
ttaagatgacacgaaac

SEQ ID NO: 162173 - DNA, 17 bp, synthetic construct
  source 1..17: mol_type = other DNA
cttaagatgacacgaaa

SEQ ID NO: 162174 - DNA, 17 bp, synthetic construct
  source 1..17: mol_type = other DNA
ccttaagatgacacgaa

SEQ ID NO: 162175 - DNA, 17 bp, synthetic construct
  source 1..17: mol_type = other DNA
tccttaagatgacacga

SEQ ID NO: 162176 - DNA, 17 bp, synthetic construct
  source 1..17: mol_type = other DNA
ttccttaagatgacacg

SEQ ID NO: 162177 - DNA, 17 bp, synthetic construct
  source 1..17: mol_type = other DNA
cttccttaagatgacac

SEQ ID NO: 162178 - DNA, 17 bp, synthetic construct
  source 1..17: mol_type = other DNA
tcttccttaagatgaca

SEQ ID NO: 162179 - DNA, 17 bp, synthetic construct
  source 1..17: mol_type = other DNA
gtcttccttaagatgac

SEQ ID NO: 162180 - DNA, 17 bp, synthetic construct
  source 1..17: mol_type = other DNA
agtcttccttaagatga

SEQ ID NO: 162181 - DNA, 17 bp, synthetic construct
  source 1..17: mol_type = other DNA
aagtcttccttaagatg

SEQ ID NO: 162182 - DNA, 17 bp, synthetic construct
  source 1..17: mol_type = other DNA
caagtcttccttaagat

SEQ ID NO: 162183 - DNA, 17 bp, synthetic construct
  source 1..17: mol_type = other DNA
tcaagtcttccttaaga

SEQ ID NO: 162184 - DNA, 17 bp, synthetic construct
  source 1..17: mol_type = other DNA
ctcaagtcttccttaag

SEQ ID NO: 162185 - DNA, 17 bp, synthetic construct
  source 1..17: mol_type = other DNA
actcaagtcttccttaa

SEQ ID NO: 162186 - DNA, 17 bp, synthetic construct
  source 1..17: mol_type = other DNA
cactcaagtcttcctta

SEQ ID NO: 162187 - DNA, 17 bp, synthetic construct
  source 1..17: mol_type = other DNA
gcactcaagtcttcctt

SEQ ID NO: 162188 - DNA, 17 bp, synthetic construct
  source 1..17: mol_type = other DNA
ggcactcaagtcttcct

SEQ ID NO: 162189 - DNA, 17 bp, synthetic construct
  source 1..17: mol_type = other DNA
gggcactcaagtcttcc

SEQ ID NO: 162190 - DNA, 17 bp, synthetic construct
  source 1..17: mol_type = other DNA
tgggcactcaagtcttc

SEQ ID NO: 162191 - DNA, 17 bp, synthetic construct
  source 1..17: mol_type = other DNA
gtgggcactcaagtctt

SEQ ID NO: 162192 - DNA, 17 bp, synthetic construct
  source 1..17: mol_type = other DNA
agtgggcactcaagtct

SEQ ID NO: 162193 - DNA, 17 bp, synthetic construct
  source 1..17: mol_type = other DNA
aagtgggcactcaagtc

SEQ ID NO: 162194 - DNA, 17 bp, synthetic construct
  source 1..17: mol_type = other DNA
taagtgggcactcaagt

SEQ ID NO: 162195 - DNA, 17 bp, synthetic construct
  source 1..17: mol_type = other DNA
ctaagtgggcactcaag

SEQ ID NO: 162196 - DNA, 17 bp, synthetic construct
  source 1..17: mol_type = other DNA
cctaagtgggcactcaa

SEQ ID NO: 162197 - DNA, 17 bp, synthetic construct
  source 1..17: mol_type = other DNA
gcctaagtgggcactca

SEQ ID NO: 162198 - DNA, 17 bp, synthetic construct
  source 1..17: mol_type = other DNA
tgcctaagtgggcactc

SEQ ID NO: 162199 - DNA, 17 bp, synthetic construct
  source 1..17: mol_type = other DNA
gtgcctaagtgggcact

SEQ ID NO: 162200 - DNA, 17 bp, synthetic construct
  source 1..17: mol_type = other DNA
tgtgcctaagtgggcac

SEQ ID NO: 162201 - DNA, 17 bp, synthetic construct
  source 1..17: mol_type = other DNA
gtgtgcctaagtgggca

SEQ ID NO: 162202 - DNA, 17 bp, synthetic construct
  source 1..17: mol_type = other DNA
tgtgtgcctaagtgggc

SEQ ID NO: 162203 - DNA, 17 bp, synthetic construct
  source 1..17: mol_type = other DNA
ctgtgtgcctaagtggg

SEQ ID NO: 162204 - DNA, 17 bp, synthetic construct
  source 1..17: mol_type = other DNA
gctgtgtgcctaagtgg

SEQ ID NO: 162205 - DNA, 17 bp, synthetic construct
  source 1..17: mol_type = other DNA
tgctgtgtgcctaagtg

SEQ ID NO: 162206 - DNA, 17 bp, synthetic construct
  source 1..17: mol_type = other DNA
atgctgtgtgcctaagt

SEQ ID NO: 162207 - DNA, 17 bp, synthetic construct
  source 1..17: mol_type = other DNA
catgctgtgtgcctaag

SEQ ID NO: 162208 - DNA, 17 bp, synthetic construct
  source 1..17: mol_type = other DNA
ccatgctgtgtgcctaa

SEQ ID NO: 162209 - DNA, 17 bp, synthetic construct
  source 1..17: mol_type = other DNA
accatgctgtgtgccta

SEQ ID NO: 162210 - DNA, 17 bp, synthetic construct
  source 1..17: mol_type = other DNA
caccatgctgtgtgcct

SEQ ID NO: 162211 - DNA, 17 bp, synthetic construct
  source 1..17: mol_type = other DNA
ccaccatgctgtgtgcc

SEQ ID NO: 162212 - DNA, 17 bp, synthetic construct
  source 1..17: mol_type = other DNA
gccaccatgctgtgtgc

SEQ ID NO: 162213 - DNA, 17 bp, synthetic construct
  source 1..17: mol_type = other DNA
agccaccatgctgtgtg

SEQ ID NO: 162214 - DNA, 17 bp, synthetic construct
  source 1..17: mol_type = other DNA
gagccaccatgctgtgt

SEQ ID NO: 162215 - DNA, 17 bp, synthetic construct
  source 1..17: mol_type = other DNA
tgagccaccatgctgtg

SEQ ID NO: 162216 - DNA, 17 bp, synthetic construct
  source 1..17: mol_type = other DNA
ctgagccaccatgctgt

SEQ ID NO: 162217 - DNA, 17 bp, synthetic construct
  source 1..17: mol_type = other DNA
cctgagccaccatgctg

SEQ ID NO: 162218 - DNA, 17 bp, synthetic construct
  source 1..17: mol_type = other DNA
tcctgagccaccatgct

SEQ ID NO: 162219 - DNA, 17 bp, synthetic construct
  source 1..17: mol_type = other DNA
ctcctgagccaccatgc

SEQ ID NO: 162220 - DNA, 17 bp, synthetic construct
  source 1..17: mol_type = other DNA
gctcctgagccaccatg

SEQ ID NO: 162221 - DNA, 17 bp, synthetic construct
  source 1..17: mol_type = other DNA
agctcctgagccaccat

SEQ ID NO: 162222 - DNA, 17 bp, synthetic construct
  source 1..17: mol_type = other DNA
cagctcctgagccacca

SEQ ID NO: 162223 - DNA, 17 bp, synthetic construct
  source 1..17: mol_type = other DNA
tcagctcctgagccacc

SEQ ID NO: 162224 - DNA, 17 bp, synthetic construct
  source 1..17: mol_type = other DNA
ctcagctcctgagccac

SEQ ID NO: 162225 - DNA, 17 bp, synthetic construct
  source 1..17: mol_type = other DNA
tctcagctcctgagcca

SEQ ID NO: 162226 - DNA, 17 bp, synthetic construct
  source 1..17: mol_type = other DNA
atctcagctcctgagcc

SEQ ID NO: 162227 - DNA, 17 bp, synthetic construct
  source 1..17: mol_type = other DNA
catctcagctcctgagc

SEQ ID NO: 162228 - DNA, 17 bp, synthetic construct
  source 1..17: mol_type = other DNA
tcatctcagctcctgag

SEQ ID NO: 162229 - DNA, 17 bp, synthetic construct
  source 1..17: mol_type = other DNA
ctcatctcagctcctga

SEQ ID NO: 162230 - DNA, 17 bp, synthetic construct
  source 1..17: mol_type = other DNA
cctcatctcagctcctg

SEQ ID NO: 162231 - DNA, 17 bp, synthetic construct
  source 1..17: mol_type = other DNA
ccctcatctcagctcct

SEQ ID NO: 162232 - DNA, 17 bp, synthetic construct
  source 1..17: mol_type = other DNA
cccctcatctcagctcc

SEQ ID NO: 162233 - DNA, 17 bp, synthetic construct
  source 1..17: mol_type = other DNA
gcccctcatctcagctc

SEQ ID NO: 162234 - DNA, 17 bp, synthetic construct
  source 1..17: mol_type = other DNA
agcccctcatctcagct

SEQ ID NO: 162235 - DNA, 17 bp, synthetic construct
  source 1..17: mol_type = other DNA
cagcccctcatctcagc

SEQ ID NO: 162236 - DNA, 17 bp, synthetic construct
  source 1..17: mol_type = other DNA
ccagcccctcatctcag

SEQ ID NO: 162237 - DNA, 17 bp, synthetic construct
  source 1..17: mol_type = other DNA
gccagcccctcatctca

SEQ ID NO: 162238 - DNA, 17 bp, synthetic construct
  source 1..17: mol_type = other DNA
cgccagcccctcatctc

SEQ ID NO: 162239 - DNA, 17 bp, synthetic construct
  source 1..17: mol_type = other DNA
acgccagcccctcatct

SEQ ID NO: 162240 - DNA, 17 bp, synthetic construct
  source 1..17: mol_type = other DNA
tacgccagcccctcatc

SEQ ID NO: 162241 - DNA, 17 bp, synthetic construct
  source 1..17: mol_type = other DNA
ctacgccagcccctcat

SEQ ID NO: 162242 - DNA, 17 bp, synthetic construct
  source 1..17: mol_type = other DNA
cctacgccagcccctca

SEQ ID NO: 162243 - DNA, 17 bp, synthetic construct
  source 1..17: mol_type = other DNA
ccctacgccagcccctc

SEQ ID NO: 162244 - DNA, 17 bp, synthetic construct
  source 1..17: mol_type = other DNA
cccctacgccagcccct

SEQ ID NO: 162245 - DNA, 17 bp, synthetic construct
  source 1..17: mol_type = other DNA
gcccctacgccagcccc

SEQ ID NO: 162246 - DNA, 17 bp, synthetic construct
  source 1..17: mol_type = other DNA
tgcccctacgccagccc

SEQ ID NO: 162247 - DNA, 17 bp, synthetic construct
  source 1..17: mol_type = other DNA
ctgcccctacgccagcc

SEQ ID NO: 162248 - DNA, 17 bp, synthetic construct
  source 1..17: mol_type = other DNA
gctgcccctacgccagc

SEQ ID NO: 162249 - DNA, 17 bp, synthetic construct
  source 1..17: mol_type = other DNA
tgctgcccctacgccag

SEQ ID NO: 162250 - DNA, 17 bp, synthetic construct
  source 1..17: mol_type = other DNA
ctgctgcccctacgcca

SEQ ID NO: 162251 - DNA, 17 bp, synthetic construct
  source 1..17: mol_type = other DNA
actgctgcccctacgcc

SEQ ID NO: 162252 - DNA, 17 bp, synthetic construct
  source 1..17: mol_type = other DNA
cactgctgcccctacgc

SEQ ID NO: 162253 - DNA, 17 bp, synthetic construct
  source 1..17: mol_type = other DNA
ccactgctgcccctacg

SEQ ID NO: 162254 - DNA, 17 bp, synthetic construct
  source 1..17: mol_type = other DNA
cccactgctgcccctac

SEQ ID NO: 162255 - DNA, 17 bp, synthetic construct
  source 1..17: mol_type = other DNA
gcccactgctgccccta

SEQ ID NO: 162256 - DNA, 17 bp, synthetic construct
  source 1..17: mol_type = other DNA
tgcccactgctgcccct

SEQ ID NO: 162257 - DNA, 17 bp, synthetic construct
  source 1..17: mol_type = other DNA
atgcccactgctgcccc

SEQ ID NO: 162258 - DNA, 17 bp, synthetic construct
  source 1..17: mol_type = other DNA
tatgcccactgctgccc

SEQ ID NO: 162259 - DNA, 17 bp, synthetic construct
  source 1..17: mol_type = other DNA
gtatgcccactgctgcc

SEQ ID NO: 162260 - DNA, 17 bp, synthetic construct
  source 1..17: mol_type = other DNA
agtatgcccactgctgc

SEQ ID NO: 162261 - DNA, 17 bp, synthetic construct
  source 1..17: mol_type = other DNA
gagtatgcccactgctg

SEQ ID NO: 162262 - DNA, 17 bp, synthetic construct
  source 1..17: mol_type = other DNA
cgagtatgcccactgct

SEQ ID NO: 162263 - DNA, 17 bp, synthetic construct
  source 1..17: mol_type = other DNA
gcgagtatgcccactgc

SEQ ID NO: 162264 - DNA, 17 bp, synthetic construct
  source 1..17: mol_type = other DNA
agcgagtatgcccactg

SEQ ID NO: 162265 - DNA, 17 bp, synthetic construct
  source 1..17: mol_type = other DNA
gagcgagtatgcccact

SEQ ID NO: 162266 - DNA, 17 bp, synthetic construct
  source 1..17: mol_type = other DNA
cgagcgagtatgcccac

SEQ ID NO: 162267 - DNA, 17 bp, synthetic construct
  source 1..17: mol_type = other DNA
acgagcgagtatgccca

SEQ ID NO: 162268 - DNA, 17 bp, synthetic construct
  source 1..17: mol_type = other DNA
cacgagcgagtatgccc

SEQ ID NO: 162269 - DNA, 17 bp, synthetic construct
  source 1..17: mol_type = other DNA
ccacgagcgagtatgcc

SEQ ID NO: 162270 - DNA, 17 bp, synthetic construct
  source 1..17: mol_type = other DNA
cccacgagcgagtatgc

SEQ ID NO: 162271 - DNA, 17 bp, synthetic construct
  source 1..17: mol_type = other DNA
tcccacgagcgagtatg

SEQ ID NO: 162272 - DNA, 17 bp, synthetic construct
  source 1..17: mol_type = other DNA
ctcccacgagcgagtat

SEQ ID NO: 162273 - DNA, 17 bp, synthetic construct
  source 1..17: mol_type = other DNA
cctcccacgagcgagta

SEQ ID NO: 162274 - DNA, 17 bp, synthetic construct
  source 1..17: mol_type = other DNA
gcctcccacgagcgagt

SEQ ID NO: 162275 - DNA, 17 bp, synthetic construct
  source 1..17: mol_type = other DNA
ggcctcccacgagcgag

SEQ ID NO: 162276 - DNA, 17 bp, synthetic construct
  source 1..17: mol_type = other DNA
gggcctcccacgagcga

SEQ ID NO: 162277 - DNA, 17 bp, synthetic construct
  source 1..17: mol_type = other DNA
agggcctcccacgagcg

SEQ ID NO: 162278 - DNA, 17 bp, synthetic construct
  source 1..17: mol_type = other DNA
cagggcctcccacgagc

SEQ ID NO: 162279 - DNA, 17 bp, synthetic construct
  source 1..17: mol_type = other DNA
tcagggcctcccacgag

SEQ ID NO: 162280 - DNA, 17 bp, synthetic construct
  source 1..17: mol_type = other DNA
ttcagggcctcccacga

SEQ ID NO: 162281 - DNA, 17 bp, synthetic construct
  source 1..17: mol_type = other DNA
cttcagggcctcccacg

SEQ ID NO: 162282 - DNA, 17 bp, synthetic construct
  source 1..17: mol_type = other DNA
gcttcagggcctcccac

SEQ ID NO: 162283 - DNA, 17 bp, synthetic construct
  source 1..17: mol_type = other DNA
tgcttcagggcctccca

SEQ ID NO: 162284 - DNA, 17 bp, synthetic construct
  source 1..17: mol_type = other DNA
gtgcttcagggcctccc

SEQ ID NO: 162285 - DNA, 17 bp, synthetic construct
  source 1..17: mol_type = other DNA
agtgcttcagggcctcc

SEQ ID NO: 162286 - DNA, 17 bp, synthetic construct
  source 1..17: mol_type = other DNA
gagtgcttcagggcctc

SEQ ID NO: 162287 - DNA, 17 bp, synthetic construct
  source 1..17: mol_type = other DNA
agagtgcttcagggcct

SEQ ID NO: 162288 - DNA, 17 bp, synthetic construct
  source 1..17: mol_type = other DNA
gagagtgcttcagggcc

SEQ ID NO: 162289 - DNA, 17 bp, synthetic construct
  source 1..17: mol_type = other DNA
tgagagtgcttcagggc

SEQ ID NO: 162290 - DNA, 17 bp, synthetic construct
  source 1..17: mol_type = other DNA
atgagagtgcttcaggg

SEQ ID NO: 162291 - DNA, 17 bp, synthetic construct
  source 1..17: mol_type = other DNA
catgagagtgcttcagg

SEQ ID NO: 162292 - DNA, 17 bp, synthetic construct
  source 1..17: mol_type = other DNA
acatgagagtgcttcag

SEQ ID NO: 162293 - DNA, 17 bp, synthetic construct
  source 1..17: mol_type = other DNA
gacatgagagtgcttca

SEQ ID NO: 162294 - DNA, 17 bp, synthetic construct
  source 1..17: mol_type = other DNA
cgacatgagagtgcttc

SEQ ID NO: 162295 - DNA, 17 bp, synthetic construct
  source 1..17: mol_type = other DNA
ccgacatgagagtgctt

SEQ ID NO: 162296 - DNA, 17 bp, synthetic construct
  source 1..17: mol_type = other DNA
gccgacatgagagtgct

SEQ ID NO: 162297 - DNA, 17 bp, synthetic construct
  source 1..17: mol_type = other DNA
ggccgacatgagagtgc

SEQ ID NO: 162298 - DNA, 17 bp, synthetic construct
  source 1..17: mol_type = other DNA
cggccgacatgagagtg

SEQ ID NO: 162299 - DNA, 17 bp, synthetic construct
  source 1..17: mol_type = other DNA
gcggccgacatgagagt

SEQ ID NO: 162300 - DNA, 17 bp, synthetic construct
  source 1..17: mol_type = other DNA
ggcggccgacatgagag

SEQ ID NO: 162301 - DNA, 17 bp, synthetic construct
  source 1..17: mol_type = other DNA
cggcggccgacatgaga

SEQ ID NO: 162302 - DNA, 17 bp, synthetic construct
  source 1..17: mol_type = other DNA
gcggcggccgacatgag

SEQ ID NO: 162303 - DNA, 17 bp, synthetic construct
  source 1..17: mol_type = other DNA
agcggcggccgacatga

SEQ ID NO: 162304 - DNA, 17 bp, synthetic construct
  source 1..17: mol_type = other DNA
aagcggcggccgacatg

SEQ ID NO: 162305 - DNA, 17 bp, synthetic construct
  source 1..17: mol_type = other DNA
caagcggcggccgacat

SEQ ID NO: 162306 - DNA, 17 bp, synthetic construct
  source 1..17: mol_type = other DNA
gcaagcggcggccgaca

SEQ ID NO: 162307 - DNA, 17 bp, synthetic construct
  source 1..17: mol_type = other DNA
ggcaagcggcggccgac

SEQ ID NO: 162308 - DNA, 17 bp, synthetic construct
  source 1..17: mol_type = other DNA
gggcaagcggcggccga

SEQ ID NO: 162309 - DNA, 17 bp, synthetic construct
  source 1..17: mol_type = other DNA
agggcaagcggcggccg

SEQ ID NO: 162310 - DNA, 17 bp, synthetic construct
  source 1..17: mol_type = other DNA
gagggcaagcggcggcc

SEQ ID NO: 162311 - DNA, 17 bp, synthetic construct
  source 1..17: mol_type = other DNA
agagggcaagcggcggc

SEQ ID NO: 162312 - DNA, 17 bp, synthetic construct
  source 1..17: mol_type = other DNA
aagagggcaagcggcgg

SEQ ID NO: 162313 - DNA, 17 bp, synthetic construct
  source 1..17: mol_type = other DNA
caagagggcaagcggcg

SEQ ID NO: 162314 - DNA, 17 bp, synthetic construct
  source 1..17: mol_type = other DNA
tcaagagggcaagcggc

SEQ ID NO: 162315 - DNA, 17 bp, synthetic construct
  source 1..17: mol_type = other DNA
ctcaagagggcaagcgg

SEQ ID NO: 162316 - DNA, 17 bp, synthetic construct
  source 1..17: mol_type = other DNA
tctcaagagggcaagcg

SEQ ID NO: 162317 - DNA, 17 bp, synthetic construct
  source 1..17: mol_type = other DNA
ttctcaagagggcaagc

SEQ ID NO: 162318 - DNA, 17 bp, synthetic construct
  source 1..17: mol_type = other DNA
cttctcaagagggcaag

SEQ ID NO: 162319 - DNA, 17 bp, synthetic construct
  source 1..17: mol_type = other DNA
ccttctcaagagggcaa

SEQ ID NO: 162320 - DNA, 17 bp, synthetic construct
  source 1..17: mol_type = other DNA
gccttctcaagagggca

SEQ ID NO: 162321 - DNA, 17 bp, synthetic construct
  source 1..17: mol_type = other DNA
tgccttctcaagagggc

SEQ ID NO: 162322 - DNA, 17 bp, synthetic construct
  source 1..17: mol_type = other DNA
ctgccttctcaagaggg

SEQ ID NO: 162323 - DNA, 17 bp, synthetic construct
  source 1..17: mol_type = other DNA
gctgccttctcaagagg

SEQ ID NO: 162324 - DNA, 17 bp, synthetic construct
  source 1..17: mol_type = other DNA
agctgccttctcaagag

SEQ ID NO: 162325 - DNA, 17 bp, synthetic construct
  source 1..17: mol_type = other DNA
cagctgccttctcaaga

SEQ ID NO: 162326 - DNA, 17 bp, synthetic construct
  source 1..17: mol_type = other DNA
ccagctgccttctcaag

SEQ ID NO: 162327 - DNA, 17 bp, synthetic construct
  source 1..17: mol_type = other DNA
accagctgccttctcaa

SEQ ID NO: 162328 - DNA, 17 bp, synthetic construct
  source 1..17: mol_type = other DNA
caccagctgccttctca

SEQ ID NO: 162329 - DNA, 17 bp, synthetic construct
  source 1..17: mol_type = other DNA
tcaccagctgccttctc

SEQ ID NO: 162330 - DNA, 17 bp, synthetic construct
  source 1..17: mol_type = other DNA
gtcaccagctgccttct

SEQ ID NO: 162331 - DNA, 17 bp, synthetic construct
  source 1..17: mol_type = other DNA
ggtcaccagctgccttc

SEQ ID NO: 162332 - DNA, 17 bp, synthetic construct
  source 1..17: mol_type = other DNA
gggtcaccagctgcctt

SEQ ID NO: 162333 - DNA, 17 bp, synthetic construct
  source 1..17: mol_type = other DNA
ggggtcaccagctgcct

SEQ ID NO: 162334 - DNA, 17 bp, synthetic construct
  source 1..17: mol_type = other DNA
aggggtcaccagctgcc

SEQ ID NO: 162335 - DNA, 17 bp, synthetic construct
  source 1..17: mol_type = other DNA
aaggggtcaccagctgc

SEQ ID NO: 162336 - DNA, 17 bp, synthetic construct
  source 1..17: mol_type = other DNA
caaggggtcaccagctg

SEQ ID NO: 162337 - DNA, 17 bp, synthetic construct
  source 1..17: mol_type = other DNA
ccaaggggtcaccagct

SEQ ID NO: 162338 - DNA, 17 bp, synthetic construct
  source 1..17: mol_type = other DNA
tccaaggggtcaccagc

SEQ ID NO: 162339 - DNA, 17 bp, synthetic construct
  source 1..17: mol_type = other DNA
ttccaaggggtcaccag

SEQ ID NO: 162340 - DNA, 17 bp, synthetic construct
  source 1..17: mol_type = other DNA
cttccaaggggtcacca

SEQ ID NO: 162341 - DNA, 17 bp, synthetic construct
  source 1..17: mol_type = other DNA
ccttccaaggggtcacc

SEQ ID NO: 162342 - DNA, 17 bp, synthetic construct
  source 1..17: mol_type = other DNA
accttccaaggggtcac

SEQ ID NO: 162343 - DNA, 17 bp, synthetic construct
  source 1..17: mol_type = other DNA
gaccttccaaggggtca

SEQ ID NO: 162344 - DNA, 17 bp, synthetic construct
  source 1..17: mol_type = other DNA
ggaccttccaaggggtc

SEQ ID NO: 162345 - DNA, 17 bp, synthetic construct
  source 1..17: mol_type = other DNA
aggaccttccaaggggt

SEQ ID NO: 162346 - DNA, 17 bp, synthetic construct
  source 1..17: mol_type = other DNA
caggaccttccaagggg

SEQ ID NO: 162347 - DNA, 17 bp, synthetic construct
  source 1..17: mol_type = other DNA
acaggaccttccaaggg

SEQ ID NO: 162348 - DNA, 17 bp, synthetic construct
  source 1..17: mol_type = other DNA
cacaggaccttccaagg

SEQ ID NO: 162349 - DNA, 17 bp, synthetic construct
  source 1..17: mol_type = other DNA
ccacaggaccttccaag

SEQ ID NO: 162350 - DNA, 17 bp, synthetic construct
  source 1..17: mol_type = other DNA
gccacaggaccttccaa

SEQ ID NO: 162351 - DNA, 17 bp, synthetic construct
  source 1..17: mol_type = other DNA
ggccacaggaccttcca

SEQ ID NO: 162352 - DNA, 17 bp, synthetic construct
  source 1..17: mol_type = other DNA
aggccacaggaccttcc

SEQ ID NO: 162353 - DNA, 17 bp, synthetic construct
  source 1..17: mol_type = other DNA
caggccacaggaccttc

SEQ ID NO: 162354 - DNA, 17 bp, synthetic construct
  source 1..17: mol_type = other DNA
tcaggccacaggacctt

SEQ ID NO: 162355 - DNA, 17 bp, synthetic construct
  source 1..17: mol_type = other DNA
gtcaggccacaggacct

SEQ ID NO: 162356 - DNA, 17 bp, synthetic construct
  source 1..17: mol_type = other DNA
tgtcaggccacaggacc

SEQ ID NO: 162357 - DNA, 17 bp, synthetic construct
  source 1..17: mol_type = other DNA
ttgtcaggccacaggac

SEQ ID NO: 162358 - DNA, 17 bp, synthetic construct
  source 1..17: mol_type = other DNA
tttgtcaggccacagga

SEQ ID NO: 162359 - DNA, 17 bp, synthetic construct
  source 1..17: mol_type = other DNA
ctttgtcaggccacagg

SEQ ID NO: 162360 - DNA, 17 bp, synthetic construct
  source 1..17: mol_type = other DNA
gctttgtcaggccacag

SEQ ID NO: 162361 - DNA, 17 bp, synthetic construct
  source 1..17: mol_type = other DNA
agctttgtcaggccaca

SEQ ID NO: 162362 - DNA, 17 bp, synthetic construct
  source 1..17: mol_type = other DNA
cagctttgtcaggccac

SEQ ID NO: 162363 - DNA, 17 bp, synthetic construct
  source 1..17: mol_type = other DNA
tcagctttgtcaggcca

SEQ ID NO: 162364 - DNA, 17 bp, synthetic construct
  source 1..17: mol_type = other DNA
ctcagctttgtcaggcc

SEQ ID NO: 162365 - DNA, 17 bp, synthetic construct
  source 1..17: mol_type = other DNA
gctcagctttgtcaggc

SEQ ID NO: 162366 - DNA, 17 bp, synthetic construct
  source 1..17: mol_type = other DNA
ggctcagctttgtcagg

SEQ ID NO: 162367 - DNA, 17 bp, synthetic construct
  source 1..17: mol_type = other DNA
gggctcagctttgtcag

SEQ ID NO: 162368 - DNA, 17 bp, synthetic construct
  source 1..17: mol_type = other DNA
tgggctcagctttgtca

SEQ ID NO: 162369 - DNA, 17 bp, synthetic construct
  source 1..17: mol_type = other DNA
ctgggctcagctttgtc

SEQ ID NO: 162370 - DNA, 17 bp, synthetic construct
  source 1..17: mol_type = other DNA
cctgggctcagctttgt

SEQ ID NO: 162371 - DNA, 17 bp, synthetic construct
  source 1..17: mol_type = other DNA
acctgggctcagctttg

SEQ ID NO: 162372 - DNA, 17 bp, synthetic construct
  source 1..17: mol_type = other DNA
aacctgggctcagcttt

SEQ ID NO: 162373 - DNA, 17 bp, synthetic construct
  source 1..17: mol_type = other DNA
gaacctgggctcagctt

SEQ ID NO: 162374 - DNA, 17 bp, synthetic construct
  source 1..17: mol_type = other DNA
tgaacctgggctcagct

SEQ ID NO: 162375 - DNA, 17 bp, synthetic construct
  source 1..17: mol_type = other DNA
ctgaacctgggctcagc

SEQ ID NO: 162376 - DNA, 17 bp, synthetic construct
  source 1..17: mol_type = other DNA
tctgaacctgggctcag

SEQ ID NO: 162377 - DNA, 17 bp, synthetic construct
  source 1..17: mol_type = other DNA
atctgaacctgggctca

SEQ ID NO: 162378 - DNA, 17 bp, synthetic construct
  source 1..17: mol_type = other DNA
catctgaacctgggctc

SEQ ID NO: 162379 - DNA, 17 bp, synthetic construct
  source 1..17: mol_type = other DNA
ccatctgaacctgggct

SEQ ID NO: 162380 - DNA, 17 bp, synthetic construct
  source 1..17: mol_type = other DNA
cccatctgaacctgggc

SEQ ID NO: 162381 - DNA, 17 bp, synthetic construct
  source 1..17: mol_type = other DNA
ccccatctgaacctggg

SEQ ID NO: 162382 - DNA, 17 bp, synthetic construct
  source 1..17: mol_type = other DNA
gccccatctgaacctgg

SEQ ID NO: 162383 - DNA, 17 bp, synthetic construct
  source 1..17: mol_type = other DNA
ggccccatctgaacctg

SEQ ID NO: 162384 - DNA, 17 bp, synthetic construct
  source 1..17: mol_type = other DNA
aggccccatctgaacct

SEQ ID NO: 162385 - DNA, 17 bp, synthetic construct
  source 1..17: mol_type = other DNA
caggccccatctgaacc

SEQ ID NO: 162386 - DNA, 17 bp, synthetic construct
  source 1..17: mol_type = other DNA
ccaggccccatctgaac

SEQ ID NO: 162387 - DNA, 17 bp, synthetic construct
  source 1..17: mol_type = other DNA
cccaggccccatctgaa

SEQ ID NO: 162388 - DNA, 17 bp, synthetic construct
  source 1..17: mol_type = other DNA
tcccaggccccatctga

SEQ ID NO: 162389 - DNA, 17 bp, synthetic construct
  source 1..17: mol_type = other DNA
ctcccaggccccatctg

SEQ ID NO: 162390 - DNA, 17 bp, synthetic construct
  source 1..17: mol_type = other DNA
cctcccaggccccatct

SEQ ID NO: 162391 - DNA, 17 bp, synthetic construct
  source 1..17: mol_type = other DNA
ccctcccaggccccatc

SEQ ID NO: 162392 - DNA, 17 bp, synthetic construct
  source 1..17: mol_type = other DNA
cccctcccaggccccat

SEQ ID NO: 162393 - DNA, 17 bp, synthetic construct
  source 1..17: mol_type = other DNA
acccctcccaggcccca

SEQ ID NO: 162394 - DNA, 17 bp, synthetic construct
  source 1..17: mol_type = other DNA
cacccctcccaggcccc

SEQ ID NO: 162395 - DNA, 17 bp, synthetic construct
  source 1..17: mol_type = other DNA
acacccctcccaggccc

SEQ ID NO: 162396 - DNA, 17 bp, synthetic construct
  source 1..17: mol_type = other DNA
cacacccctcccaggcc

SEQ ID NO: 162397 - DNA, 17 bp, synthetic construct
  source 1..17: mol_type = other DNA
ccacacccctcccaggc

SEQ ID NO: 162398 - DNA, 17 bp, synthetic construct
  source 1..17: mol_type = other DNA
cccacacccctcccagg

SEQ ID NO: 162399 - DNA, 17 bp, synthetic construct
  source 1..17: mol_type = other DNA
gcccacacccctcccag

SEQ ID NO: 162400 - DNA, 17 bp, synthetic construct
  source 1..17: mol_type = other DNA
agcccacacccctccca

SEQ ID NO: 162401 - DNA, 17 bp, synthetic construct
  source 1..17: mol_type = other DNA
cagcccacacccctccc

SEQ ID NO: 162402 - DNA, 17 bp, synthetic construct
  source 1..17: mol_type = other DNA
gcagcccacacccctcc

SEQ ID NO: 162403 - DNA, 17 bp, synthetic construct
  source 1..17: mol_type = other DNA
ggcagcccacacccctc

SEQ ID NO: 162404 - DNA, 17 bp, synthetic construct
  source 1..17: mol_type = other DNA
aggcagcccacacccct

SEQ ID NO: 162405 - DNA, 17 bp, synthetic construct
  source 1..17: mol_type = other DNA
caggcagcccacacccc

SEQ ID NO: 162406 - DNA, 17 bp, synthetic construct
  source 1..17: mol_type = other DNA
ccaggcagcccacaccc

SEQ ID NO: 162407 - DNA, 17 bp, synthetic construct
  source 1..17: mol_type = other DNA
tccaggcagcccacacc

SEQ ID NO: 162408 - DNA, 17 bp, synthetic construct
  source 1..17: mol_type = other DNA
ctccaggcagcccacac

SEQ ID NO: 162409 - DNA, 17 bp, synthetic construct
  source 1..17: mol_type = other DNA
cctccaggcagcccaca

SEQ ID NO: 162410 - DNA, 17 bp, synthetic construct
  source 1..17: mol_type = other DNA
tcctccaggcagcccac

SEQ ID NO: 162411 - DNA, 17 bp, synthetic construct
  source 1..17: mol_type = other DNA
ttcctccaggcagccca

SEQ ID NO: 162412 - DNA, 17 bp, synthetic construct
  source 1..17: mol_type = other DNA
cttcctccaggcagccc

SEQ ID NO: 162413 - DNA, 17 bp, synthetic construct
  source 1..17: mol_type = other DNA
gcttcctccaggcagcc

SEQ ID NO: 162414 - DNA, 17 bp, synthetic construct
  source 1..17: mol_type = other DNA
tgcttcctccaggcagc

SEQ ID NO: 162415 - DNA, 17 bp, synthetic construct
  source 1..17: mol_type = other DNA
ctgcttcctccaggcag

SEQ ID NO: 162416 - DNA, 17 bp, synthetic construct
  source 1..17: mol_type = other DNA
cctgcttcctccaggca

SEQ ID NO: 162417 - DNA, 17 bp, synthetic construct
  source 1..17: mol_type = other DNA
gcctgcttcctccaggc

SEQ ID NO: 162418 - DNA, 17 bp, synthetic construct
  source 1..17: mol_type = other DNA
tgcctgcttcctccagg

SEQ ID NO: 162419 - DNA, 17 bp, synthetic construct
  source 1..17: mol_type = other DNA
ctgcctgcttcctccag

SEQ ID NO: 162420 - DNA, 17 bp, synthetic construct
  source 1..17: mol_type = other DNA
gctgcctgcttcctcca

SEQ ID NO: 162421 - DNA, 17 bp, synthetic construct
  source 1..17: mol_type = other DNA
agctgcctgcttcctcc

SEQ ID NO: 162422 - DNA, 17 bp, synthetic construct
  source 1..17: mol_type = other DNA
aagctgcctgcttcctc

SEQ ID NO: 162423 - DNA, 17 bp, synthetic construct
  source 1..17: mol_type = other DNA
gaagctgcctgcttcct

SEQ ID NO: 162424 - DNA, 17 bp, synthetic construct
  source 1..17: mol_type = other DNA
ggaagctgcctgcttcc

SEQ ID NO: 162425 - DNA, 17 bp, synthetic construct
  source 1..17: mol_type = other DNA
gggaagctgcctgcttc

SEQ ID NO: 162426 - DNA, 17 bp, synthetic construct
  source 1..17: mol_type = other DNA
tgggaagctgcctgctt

SEQ ID NO: 162427 - DNA, 17 bp, synthetic construct
  source 1..17: mol_type = other DNA
atgggaagctgcctgct

SEQ ID NO: 162428 - DNA, 17 bp, synthetic construct
  source 1..17: mol_type = other DNA
catgggaagctgcctgc

SEQ ID NO: 162429 - DNA, 17 bp, synthetic construct
  source 1..17: mol_type = other DNA
ccatgggaagctgcctg

SEQ ID NO: 162430 - DNA, 17 bp, synthetic construct
  source 1..17: mol_type = other DNA
accatgggaagctgcct

SEQ ID NO: 162431 - DNA, 17 bp, synthetic construct
  source 1..17: mol_type = other DNA
gaccatgggaagctgcc

SEQ ID NO: 162432 - DNA, 17 bp, synthetic construct
  source 1..17: mol_type = other DNA
tgaccatgggaagctgc

SEQ ID NO: 162433 - DNA, 17 bp, synthetic construct
  source 1..17: mol_type = other DNA
ctgaccatgggaagctg

SEQ ID NO: 162434 - DNA, 17 bp, synthetic construct
  source 1..17: mol_type = other DNA
cctgaccatgggaagct

SEQ ID NO: 162435 - DNA, 17 bp, synthetic construct
  source 1..17: mol_type = other DNA
tcctgaccatgggaagc

SEQ ID NO: 162436 - DNA, 17 bp, synthetic construct
  source 1..17: mol_type = other DNA
gtcctgaccatgggaag

SEQ ID NO: 162437 - DNA, 17 bp, synthetic construct
  source 1..17: mol_type = other DNA
cgtcctgaccatgggaa

SEQ ID NO: 162438 - DNA, 17 bp, synthetic construct
  source 1..17: mol_type = other DNA
gcgtcctgaccatggga

SEQ ID NO: 162439 - DNA, 17 bp, synthetic construct
  source 1..17: mol_type = other DNA
tgcgtcctgaccatggg

SEQ ID NO: 162440 - DNA, 17 bp, synthetic construct
  source 1..17: mol_type = other DNA
atgcgtcctgaccatgg

SEQ ID NO: 162441 - DNA, 17 bp, synthetic construct
  source 1..17: mol_type = other DNA
aatgcgtcctgaccatg

SEQ ID NO: 162442 - DNA, 17 bp, synthetic construct
  source 1..17: mol_type = other DNA
gaatgcgtcctgaccat

SEQ ID NO: 162443 - DNA, 17 bp, synthetic construct
  source 1..17: mol_type = other DNA
tgaatgcgtcctgacca

SEQ ID NO: 162444 - DNA, 17 bp, synthetic construct
  source 1..17: mol_type = other DNA
gtgaatgcgtcctgacc

SEQ ID NO: 162445 - DNA, 17 bp, synthetic construct
  source 1..17: mol_type = other DNA
tgtgaatgcgtcctgac

SEQ ID NO: 162446 - DNA, 17 bp, synthetic construct
  source 1..17: mol_type = other DNA
ctgtgaatgcgtcctga

SEQ ID NO: 162447 - DNA, 17 bp, synthetic construct
  source 1..17: mol_type = other DNA
gctgtgaatgcgtcctg

SEQ ID NO: 162448 - DNA, 17 bp, synthetic construct
  source 1..17: mol_type = other DNA
agctgtgaatgcgtcct

SEQ ID NO: 162449 - DNA, 17 bp, synthetic construct
  source 1..17: mol_type = other DNA
gagctgtgaatgcgtcc

SEQ ID NO: 162450 - DNA, 17 bp, synthetic construct
  source 1..17: mol_type = other DNA
tgagctgtgaatgcgtc

SEQ ID NO: 162451 - DNA, 17 bp, synthetic construct
  source 1..17: mol_type = other DNA
ctgagctgtgaatgcgt

SEQ ID NO: 162452 - DNA, 17 bp, synthetic construct
  source 1..17: mol_type = other DNA
gctgagctgtgaatgcg

SEQ ID NO: 162453 - DNA, 17 bp, synthetic construct
  source 1..17: mol_type = other DNA
agctgagctgtgaatgc

SEQ ID NO: 162454 - DNA, 17 bp, synthetic construct
  source 1..17: mol_type = other DNA
gagctgagctgtgaatg

SEQ ID NO: 162455 - DNA, 17 bp, synthetic construct
  source 1..17: mol_type = other DNA
ggagctgagctgtgaat

SEQ ID NO: 162456 - DNA, 17 bp, synthetic construct
  source 1..17: mol_type = other DNA
gggagctgagctgtgaa

SEQ ID NO: 162457 - DNA, 17 bp, synthetic construct
  source 1..17: mol_type = other DNA
ggggagctgagctgtga

SEQ ID NO: 162458 - DNA, 17 bp, synthetic construct
  source 1..17: mol_type = other DNA
cggggagctgagctgtg

SEQ ID NO: 162459 - DNA, 17 bp, synthetic construct
  source 1..17: mol_type = other DNA
gcggggagctgagctgt

SEQ ID NO: 162460 - DNA, 17 bp, synthetic construct
  source 1..17: mol_type = other DNA
cgcggggagctgagctg

SEQ ID NO: 162461 - DNA, 17 bp, synthetic construct
  source 1..17: mol_type = other DNA
acgcggggagctgagct

SEQ ID NO: 162462 - DNA, 17 bp, synthetic construct
  source 1..17: mol_type = other DNA
cacgcggggagctgagc

SEQ ID NO: 162463 - DNA, 17 bp, synthetic construct
  source 1..17: mol_type = other DNA
ccacgcggggagctgag

SEQ ID NO: 162464 - DNA, 17 bp, synthetic construct
  source 1..17: mol_type = other DNA
gccacgcggggagctga

SEQ ID NO: 162465 - DNA, 17 bp, synthetic construct
  source 1..17: mol_type = other DNA
agccacgcggggagctg

SEQ ID NO: 162466 - DNA, 17 bp, synthetic construct
  source 1..17: mol_type = other DNA
cagccacgcggggagct

SEQ ID NO: 162467 - DNA, 17 bp, synthetic construct
  source 1..17: mol_type = other DNA
ccagccacgcggggagc

SEQ ID NO: 162468 - DNA, 17 bp, synthetic construct
  source 1..17: mol_type = other DNA
accagccacgcggggag

SEQ ID NO: 162469 - DNA, 17 bp, synthetic construct
  source 1..17: mol_type = other DNA
gaccagccacgcgggga

SEQ ID NO: 162470 - DNA, 17 bp, synthetic construct
  source 1..17: mol_type = other DNA
agaccagccacgcgggg

SEQ ID NO: 162471 - DNA, 17 bp, synthetic construct
  source 1..17: mol_type = other DNA
cagaccagccacgcggg

SEQ ID NO: 162472 - DNA, 17 bp, synthetic construct
  source 1..17: mol_type = other DNA
ccagaccagccacgcgg

SEQ ID NO: 162473 - DNA, 17 bp, synthetic construct
  source 1..17: mol_type = other DNA
tccagaccagccacgcg

SEQ ID NO: 162474 - DNA, 17 bp, synthetic construct
  source 1..17: mol_type = other DNA
ttccagaccagccacgc

SEQ ID NO: 162475 - DNA, 17 bp, synthetic construct
  source 1..17: mol_type = other DNA
tttccagaccagccacg

SEQ ID NO: 162476 - DNA, 17 bp, synthetic construct
  source 1..17: mol_type = other DNA
ctttccagaccagccac

SEQ ID NO: 162477 - DNA, 17 bp, synthetic construct
  source 1..17: mol_type = other DNA
cctttccagaccagcca

SEQ ID NO: 162478 - DNA, 17 bp, synthetic construct
  source 1..17: mol_type = other DNA
tcctttccagaccagcc

SEQ ID NO: 162479 - DNA, 17 bp, synthetic construct
  source 1..17: mol_type = other DNA
ttcctttccagaccagc

SEQ ID NO: 162480 - DNA, 17 bp, synthetic construct
  source 1..17: mol_type = other DNA
cttcctttccagaccag

SEQ ID NO: 162481 - DNA, 17 bp, synthetic construct
  source 1..17: mol_type = other DNA
acttcctttccagacca

SEQ ID NO: 162482 - DNA, 17 bp, synthetic construct
  source 1..17: mol_type = other DNA
cacttcctttccagacc

SEQ ID NO: 162483 - DNA, 17 bp, synthetic construct
  source 1..17: mol_type = other DNA
tcacttcctttccagac

SEQ ID NO: 162484 - DNA, 17 bp, synthetic construct
  source 1..17: mol_type = other DNA
gtcacttcctttccaga

SEQ ID NO: 162485 - DNA, 17 bp, synthetic construct
  source 1..17: mol_type = other DNA
ggtcacttcctttccag

SEQ ID NO: 162486 - DNA, 17 bp, synthetic construct
  source 1..17: mol_type = other DNA
tggtcacttcctttcca

SEQ ID NO: 162487 - DNA, 17 bp, synthetic construct
  source 1..17: mol_type = other DNA
gtggtcacttcctttcc

SEQ ID NO: 162488 - DNA, 17 bp, synthetic construct
  source 1..17: mol_type = other DNA
agtggtcacttcctttc

SEQ ID NO: 162489 - DNA, 17 bp, synthetic construct
  source 1..17: mol_type = other DNA
gagtggtcacttccttt

SEQ ID NO: 162490 - DNA, 17 bp, synthetic construct
  source 1..17: mol_type = other DNA
ggagtggtcacttcctt

SEQ ID NO: 162491 - DNA, 17 bp, synthetic construct
  source 1..17: mol_type = other DNA
aggagtggtcacttcct

SEQ ID NO: 162492 - DNA, 17 bp, synthetic construct
  source 1..17: mol_type = other DNA
aaggagtggtcacttcc

SEQ ID NO: 162493 - DNA, 17 bp, synthetic construct
  source 1..17: mol_type = other DNA
gaaggagtggtcacttc

SEQ ID NO: 162494 - DNA, 17 bp, synthetic construct
  source 1..17: mol_type = other DNA
ggaaggagtggtcactt

SEQ ID NO: 162495 - DNA, 17 bp, synthetic construct
  source 1..17: mol_type = other DNA
aggaaggagtggtcact

SEQ ID NO: 162496 - DNA, 17 bp, synthetic construct
  source 1..17: mol_type = other DNA
aaggaaggagtggtcac

SEQ ID NO: 162497 - DNA, 17 bp, synthetic construct
  source 1..17: mol_type = other DNA
taaggaaggagtggtca

SEQ ID NO: 162498 - DNA, 17 bp, synthetic construct
  source 1..17: mol_type = other DNA
ctaaggaaggagtggtc

SEQ ID NO: 162499 - DNA, 17 bp, synthetic construct
  source 1..17: mol_type = other DNA
actaaggaaggagtggt

SEQ ID NO: 162500 - DNA, 17 bp, synthetic construct
  source 1..17: mol_type = other DNA
cactaaggaaggagtgg

SEQ ID NO: 162501 - DNA, 17 bp, synthetic construct
  source 1..17: mol_type = other DNA
gcactaaggaaggagtg

SEQ ID NO: 162502 - DNA, 17 bp, synthetic construct
  source 1..17: mol_type = other DNA
tgcactaaggaaggagt

SEQ ID NO: 162503 - DNA, 17 bp, synthetic construct
  source 1..17: mol_type = other DNA
gtgcactaaggaaggag

SEQ ID NO: 162504 - DNA, 17 bp, synthetic construct
  source 1..17: mol_type = other DNA
tgtgcactaaggaagga

SEQ ID NO: 162505 - DNA, 17 bp, synthetic construct
  source 1..17: mol_type = other DNA
atgtgcactaaggaagg

SEQ ID NO: 162506 - DNA, 17 bp, synthetic construct
  source 1..17: mol_type = other DNA
aatgtgcactaaggaag

SEQ ID NO: 162507 - DNA, 17 bp, synthetic construct
  source 1..17: mol_type = other DNA
gaatgtgcactaaggaa

SEQ ID NO: 162508 - DNA, 17 bp, synthetic construct
  source 1..17: mol_type = other DNA
tgaatgtgcactaagga

SEQ ID NO: 162509 - DNA, 17 bp, synthetic construct
  source 1..17: mol_type = other DNA
gtgaatgtgcactaagg

SEQ ID NO: 162510 - DNA, 17 bp, synthetic construct
  source 1..17: mol_type = other DNA
agtgaatgtgcactaag

SEQ ID NO: 162511 - DNA, 17 bp, synthetic construct
  source 1..17: mol_type = other DNA
cagtgaatgtgcactaa

SEQ ID NO: 162512 - DNA, 17 bp, synthetic construct
  source 1..17: mol_type = other DNA
ccagtgaatgtgcacta

SEQ ID NO: 162513 - DNA, 17 bp, synthetic construct
  source 1..17: mol_type = other DNA
cccagtgaatgtgcact

SEQ ID NO: 162514 - DNA, 17 bp, synthetic construct
  source 1..17: mol_type = other DNA
acccagtgaatgtgcac

SEQ ID NO: 162515 - DNA, 17 bp, synthetic construct
  source 1..17: mol_type = other DNA
cacccagtgaatgtgca

SEQ ID NO: 162516 - DNA, 17 bp, synthetic construct
  source 1..17: mol_type = other DNA
gcacccagtgaatgtgc

SEQ ID NO: 162517 - DNA, 17 bp, synthetic construct
  source 1..17: mol_type = other DNA
ggcacccagtgaatgtg

SEQ ID NO: 162518 - DNA, 17 bp, synthetic construct
  source 1..17: mol_type = other DNA
aggcacccagtgaatgt

SEQ ID NO: 162519 - DNA, 17 bp, synthetic construct
  source 1..17: mol_type = other DNA
caggcacccagtgaatg

SEQ ID NO: 162520 - DNA, 17 bp, synthetic construct
  source 1..17: mol_type = other DNA
ccaggcacccagtgaat

SEQ ID NO: 162521 - DNA, 17 bp, synthetic construct
  source 1..17: mol_type = other DNA
tccaggcacccagtgaa

SEQ ID NO: 162522 - DNA, 17 bp, synthetic construct
  source 1..17: mol_type = other DNA
ttccaggcacccagtga

SEQ ID NO: 162523 - DNA, 17 bp, synthetic construct
  source 1..17: mol_type = other DNA
attccaggcacccagtg

SEQ ID NO: 162524 - DNA, 17 bp, synthetic construct
  source 1..17: mol_type = other DNA
tattccaggcacccagt

SEQ ID NO: 162525 - DNA, 17 bp, synthetic construct
  source 1..17: mol_type = other DNA
ctattccaggcacccag

SEQ ID NO: 162526 - DNA, 17 bp, synthetic construct
  source 1..17: mol_type = other DNA
gctattccaggcaccca

SEQ ID NO: 162527 - DNA, 17 bp, synthetic construct
  source 1..17: mol_type = other DNA
ggctattccaggcaccc

SEQ ID NO: 162528 - DNA, 17 bp, synthetic construct
  source 1..17: mol_type = other DNA
aggctattccaggcacc

SEQ ID NO: 162529 - DNA, 17 bp, synthetic construct
  source 1..17: mol_type = other DNA
caggctattccaggcac

SEQ ID NO: 162530 - DNA, 17 bp, synthetic construct
  source 1..17: mol_type = other DNA
ccaggctattccaggca

SEQ ID NO: 162531 - DNA, 17 bp, synthetic construct
  source 1..17: mol_type = other DNA
gccaggctattccaggc

SEQ ID NO: 162532 - DNA, 17 bp, synthetic construct
  source 1..17: mol_type = other DNA
tgccaggctattccagg

SEQ ID NO: 162533 - DNA, 17 bp, synthetic construct
  source 1..17: mol_type = other DNA
atgccaggctattccag

SEQ ID NO: 162534 - DNA, 17 bp, synthetic construct
  source 1..17: mol_type = other DNA
catgccaggctattcca

SEQ ID NO: 162535 - DNA, 17 bp, synthetic construct
  source 1..17: mol_type = other DNA
acatgccaggctattcc

SEQ ID NO: 162536 - DNA, 17 bp, synthetic construct
  source 1..17: mol_type = other DNA
aacatgccaggctattc

SEQ ID NO: 162537 - DNA, 17 bp, synthetic construct
  source 1..17: mol_type = other DNA
gaacatgccaggctatt

SEQ ID NO: 162538 - DNA, 17 bp, synthetic construct
  source 1..17: mol_type = other DNA
agaacatgccaggctat

SEQ ID NO: 162539 - DNA, 17 bp, synthetic construct
  source 1..17: mol_type = other DNA
cagaacatgccaggcta

SEQ ID NO: 162540 - DNA, 17 bp, synthetic construct
  source 1..17: mol_type = other DNA
ccagaacatgccaggct

SEQ ID NO: 162541 - DNA, 17 bp, synthetic construct
  source 1..17: mol_type = other DNA
cccagaacatgccaggc

SEQ ID NO: 162542 - DNA, 17 bp, synthetic construct
  source 1..17: mol_type = other DNA
gcccagaacatgccagg

SEQ ID NO: 162543 - DNA, 17 bp, synthetic construct
  source 1..17: mol_type = other DNA
agcccagaacatgccag

SEQ ID NO: 162544 - DNA, 17 bp, synthetic construct
  source 1..17: mol_type = other DNA
gagcccagaacatgcca

SEQ ID NO: 162545 - DNA, 17 bp, synthetic construct
  source 1..17: mol_type = other DNA
tgagcccagaacatgcc

SEQ ID NO: 162546 - DNA, 17 bp, synthetic construct
  source 1..17: mol_type = other DNA
gtgagcccagaacatgc

SEQ ID NO: 162547 - DNA, 17 bp, synthetic construct
  source 1..17: mol_type = other DNA
ggtgagcccagaacatg

SEQ ID NO: 162548 - DNA, 17 bp, synthetic construct
  source 1..17: mol_type = other DNA
gggtgagcccagaacat

SEQ ID NO: 162549 - DNA, 17 bp, synthetic construct
  source 1..17: mol_type = other DNA
ggggtgagcccagaaca

SEQ ID NO: 162550 - DNA, 17 bp, synthetic construct
  source 1..17: mol_type = other DNA
tggggtgagcccagaac

SEQ ID NO: 162551 - DNA, 17 bp, synthetic construct
  source 1..17: mol_type = other DNA
ctggggtgagcccagaa

SEQ ID NO: 162552 - DNA, 17 bp, synthetic construct
  source 1..17: mol_type = other DNA
actggggtgagcccaga

SEQ ID NO: 162553 - DNA, 17 bp, synthetic construct
  source 1..17: mol_type = other DNA
cactggggtgagcccag

SEQ ID NO: 162554 - DNA, 17 bp, synthetic construct
  source 1..17: mol_type = other DNA
tcactggggtgagccca

SEQ ID NO: 162555 - DNA, 17 bp, synthetic construct
  source 1..17: mol_type = other DNA
atcactggggtgagccc

SEQ ID NO: 162556 - DNA, 17 bp, synthetic construct
  source 1..17: mol_type = other DNA
gatcactggggtgagcc

SEQ ID NO: 162557 - DNA, 17 bp, synthetic construct
  source 1..17: mol_type = other DNA
tgatcactggggtgagc

SEQ ID NO: 162558 - DNA, 17 bp, synthetic construct
  source 1..17: mol_type = other DNA
ctgatcactggggtgag

SEQ ID NO: 162559 - DNA, 17 bp, synthetic construct
  source 1..17: mol_type = other DNA
cctgatcactggggtga

SEQ ID NO: 162560 - DNA, 17 bp, synthetic construct
  source 1..17: mol_type = other DNA
ccctgatcactggggtg

SEQ ID NO: 162561 - DNA, 17 bp, synthetic construct
  source 1..17: mol_type = other DNA
cccctgatcactggggt

SEQ ID NO: 162562 - DNA, 17 bp, synthetic construct
  source 1..17: mol_type = other DNA
tcccctgatcactgggg

SEQ ID NO: 162563 - DNA, 17 bp, synthetic construct
  source 1..17: mol_type = other DNA
gtcccctgatcactggg

SEQ ID NO: 162564 - DNA, 17 bp, synthetic construct
  source 1..17: mol_type = other DNA
cgtcccctgatcactgg

SEQ ID NO: 162565 - DNA, 17 bp, synthetic construct
  source 1..17: mol_type = other DNA
tcgtcccctgatcactg

SEQ ID NO: 162566 - DNA, 17 bp, synthetic construct
  source 1..17: mol_type = other DNA
ctcgtcccctgatcact

SEQ ID NO: 162567 - DNA, 17 bp, synthetic construct
  source 1..17: mol_type = other DNA
cctcgtcccctgatcac

SEQ ID NO: 162568 - DNA, 17 bp, synthetic construct
  source 1..17: mol_type = other DNA
gcctcgtcccctgatca

SEQ ID NO: 162569 - DNA, 17 bp, synthetic construct
  source 1..17: mol_type = other DNA
agcctcgtcccctgatc

SEQ ID NO: 162570 - DNA, 17 bp, synthetic construct
  source 1..17: mol_type = other DNA
cagcctcgtcccctgat

SEQ ID NO: 162571 - DNA, 17 bp, synthetic construct
  source 1..17: mol_type = other DNA
tcagcctcgtcccctga

SEQ ID NO: 162572 - DNA, 17 bp, synthetic construct
  source 1..17: mol_type = other DNA
gtcagcctcgtcccctg

SEQ ID NO: 162573 - DNA, 17 bp, synthetic construct
  source 1..17: mol_type = other DNA
ggtcagcctcgtcccct

SEQ ID NO: 162574 - DNA, 17 bp, synthetic construct
  source 1..17: mol_type = other DNA
gggtcagcctcgtcccc

SEQ ID NO: 162575 - DNA, 17 bp, synthetic construct
  source 1..17: mol_type = other DNA
agggtcagcctcgtccc

SEQ ID NO: 162576 - DNA, 17 bp, synthetic construct
  source 1..17: mol_type = other DNA
gagggtcagcctcgtcc

SEQ ID NO: 162577 - DNA, 17 bp, synthetic construct
  source 1..17: mol_type = other DNA
tgagggtcagcctcgtc

SEQ ID NO: 162578 - DNA, 17 bp, synthetic construct
  source 1..17: mol_type = other DNA
gtgagggtcagcctcgt

SEQ ID NO: 162579 - DNA, 17 bp, synthetic construct
  source 1..17: mol_type = other DNA
tgtgagggtcagcctcg

SEQ ID NO: 162580 - DNA, 17 bp, synthetic construct
  source 1..17: mol_type = other DNA
ctgtgagggtcagcctc

SEQ ID NO: 162581 - DNA, 17 bp, synthetic construct
  source 1..17: mol_type = other DNA
tctgtgagggtcagcct

SEQ ID NO: 162582 - DNA, 17 bp, synthetic construct
  source 1..17: mol_type = other DNA
ctctgtgagggtcagcc

SEQ ID NO: 162583 - DNA, 17 bp, synthetic construct
  source 1..17: mol_type = other DNA
gctctgtgagggtcagc

SEQ ID NO: 162584 - DNA, 17 bp, synthetic construct
  source 1..17: mol_type = other DNA
agctctgtgagggtcag

SEQ ID NO: 162585 - DNA, 17 bp, synthetic construct
  source 1..17: mol_type = other DNA
aagctctgtgagggtca

SEQ ID NO: 162586 - DNA, 17 bp, synthetic construct
  source 1..17: mol_type = other DNA
gaagctctgtgagggtc

SEQ ID NO: 162587 - DNA, 17 bp, synthetic construct
  source 1..17: mol_type = other DNA
ggaagctctgtgagggt

SEQ ID NO: 162588 - DNA, 17 bp, synthetic construct
  source 1..17: mol_type = other DNA
tggaagctctgtgaggg

SEQ ID NO: 162589 - DNA, 17 bp, synthetic construct
  source 1..17: mol_type = other DNA
ctggaagctctgtgagg

SEQ ID NO: 162590 - DNA, 17 bp, synthetic construct
  source 1..17: mol_type = other DNA
tctggaagctctgtgag

SEQ ID NO: 162591 - DNA, 17 bp, synthetic construct
  source 1..17: mol_type = other DNA
ctctggaagctctgtga

SEQ ID NO: 162592 - DNA, 17 bp, synthetic construct
  source 1..17: mol_type = other DNA
cctctggaagctctgtg

SEQ ID NO: 162593 - DNA, 17 bp, synthetic construct
  source 1..17: mol_type = other DNA
tcctctggaagctctgt

SEQ ID NO: 162594 - DNA, 17 bp, synthetic construct
  source 1..17: mol_type = other DNA
ctcctctggaagctctg

SEQ ID NO: 162595 - DNA, 17 bp, synthetic construct
  source 1..17: mol_type = other DNA
cctcctctggaagctct

SEQ ID NO: 162596 - DNA, 17 bp, synthetic construct
  source 1..17: mol_type = other DNA
gcctcctctggaagctc

SEQ ID NO: 162597 - DNA, 17 bp, synthetic construct
  source 1..17: mol_type = other DNA
tgcctcctctggaagct

SEQ ID NO: 162598 - DNA, 17 bp, synthetic construct
  source 1..17: mol_type = other DNA
ctgcctcctctggaagc

SEQ ID NO: 162599 - DNA, 17 bp, synthetic construct
  source 1..17: mol_type = other DNA
tctgcctcctctggaag

SEQ ID NO: 162600 - DNA, 17 bp, synthetic construct
  source 1..17: mol_type = other DNA
ttctgcctcctctggaa

SEQ ID NO: 162601 - DNA, 17 bp, synthetic construct
  source 1..17: mol_type = other DNA
tttctgcctcctctgga

SEQ ID NO: 162602 - DNA, 17 bp, synthetic construct
  source 1..17: mol_type = other DNA
ctttctgcctcctctgg

SEQ ID NO: 162603 - DNA, 17 bp, synthetic construct
  source 1..17: mol_type = other DNA
cctttctgcctcctctg

SEQ ID NO: 162604 - DNA, 17 bp, synthetic construct
  source 1..17: mol_type = other DNA
gcctttctgcctcctct

SEQ ID NO: 162605 - DNA, 17 bp, synthetic construct
  source 1..17: mol_type = other DNA
cgcctttctgcctcctc

SEQ ID NO: 162606 - DNA, 17 bp, synthetic construct
  source 1..17: mol_type = other DNA
ccgcctttctgcctcct

SEQ ID NO: 162607 - DNA, 17 bp, synthetic construct
  source 1..17: mol_type = other DNA
accgcctttctgcctcc

SEQ ID NO: 162608 - DNA, 17 bp, synthetic construct
  source 1..17: mol_type = other DNA
caccgcctttctgcctc

SEQ ID NO: 162609 - DNA, 17 bp, synthetic construct
  source 1..17: mol_type = other DNA
ccaccgcctttctgcct

SEQ ID NO: 162610 - DNA, 17 bp, synthetic construct
  source 1..17: mol_type = other DNA
cccaccgcctttctgcc

SEQ ID NO: 162611 - DNA, 17 bp, synthetic construct
  source 1..17: mol_type = other DNA
acccaccgcctttctgc

SEQ ID NO: 162612 - DNA, 17 bp, synthetic construct
  source 1..17: mol_type = other DNA
cacccaccgcctttctg

SEQ ID NO: 162613 - DNA, 17 bp, synthetic construct
  source 1..17: mol_type = other DNA
gcacccaccgcctttct

SEQ ID NO: 162614 - DNA, 17 bp, synthetic construct
  source 1..17: mol_type = other DNA
agcacccaccgcctttc

SEQ ID NO: 162615 - DNA, 17 bp, synthetic construct
  source 1..17: mol_type = other DNA
cagcacccaccgccttt

SEQ ID NO: 162616 - DNA, 17 bp, synthetic construct
  source 1..17: mol_type = other DNA
ccagcacccaccgcctt

SEQ ID NO: 162617 - DNA, 17 bp, synthetic construct
  source 1..17: mol_type = other DNA
cccagcacccaccgcct

SEQ ID NO: 162618 - DNA, 17 bp, synthetic construct
  source 1..17: mol_type = other DNA
acccagcacccaccgcc

SEQ ID NO: 162619 - DNA, 17 bp, synthetic construct
  source 1..17: mol_type = other DNA
cacccagcacccaccgc

SEQ ID NO: 162620 - DNA, 17 bp, synthetic construct
  source 1..17: mol_type = other DNA
ccacccagcacccaccg

SEQ ID NO: 162621 - DNA, 17 bp, synthetic construct
  source 1..17: mol_type = other DNA
accacccagcacccacc

SEQ ID NO: 162622 - DNA, 17 bp, synthetic construct
  source 1..17: mol_type = other DNA
gaccacccagcacccac

SEQ ID NO: 162623 - DNA, 17 bp, synthetic construct
  source 1..17: mol_type = other DNA
cgaccacccagcaccca

SEQ ID NO: 162624 - DNA, 17 bp, synthetic construct
  source 1..17: mol_type = other DNA
ccgaccacccagcaccc

SEQ ID NO: 162625 - DNA, 17 bp, synthetic construct
  source 1..17: mol_type = other DNA
tccgaccacccagcacc

SEQ ID NO: 162626 - DNA, 17 bp, synthetic construct
  source 1..17: mol_type = other DNA
atccgaccacccagcac

SEQ ID NO: 162627 - DNA, 17 bp, synthetic construct
  source 1..17: mol_type = other DNA
catccgaccacccagca

SEQ ID NO: 162628 - DNA, 17 bp, synthetic construct
  source 1..17: mol_type = other DNA
gcatccgaccacccagc

SEQ ID NO: 162629 - DNA, 17 bp, synthetic construct
  source 1..17: mol_type = other DNA
agcatccgaccacccag

SEQ ID NO: 162630 - DNA, 17 bp, synthetic construct
  source 1..17: mol_type = other DNA
tagcatccgaccaccca

SEQ ID NO: 162631 - DNA, 17 bp, synthetic construct
  source 1..17: mol_type = other DNA
ctagcatccgaccaccc

SEQ ID NO: 162632 - DNA, 17 bp, synthetic construct
  source 1..17: mol_type = other DNA
cctagcatccgaccacc

SEQ ID NO: 162633 - DNA, 17 bp, synthetic construct
  source 1..17: mol_type = other DNA
tcctagcatccgaccac

SEQ ID NO: 162634 - DNA, 17 bp, synthetic construct
  source 1..17: mol_type = other DNA
atcctagcatccgacca

SEQ ID NO: 162635 - DNA, 17 bp, synthetic construct
  source 1..17: mol_type = other DNA
catcctagcatccgacc

SEQ ID NO: 162636 - DNA, 17 bp, synthetic construct
  source 1..17: mol_type = other DNA
acatcctagcatccgac

SEQ ID NO: 162637 - DNA, 17 bp, synthetic construct
  source 1..17: mol_type = other DNA
cacatcctagcatccga

SEQ ID NO: 162638 - DNA, 17 bp, synthetic construct
  source 1..17: mol_type = other DNA
ccacatcctagcatccg

SEQ ID NO: 162639 - DNA, 17 bp, synthetic construct
  source 1..17: mol_type = other DNA
tccacatcctagcatcc

SEQ ID NO: 162640 - DNA, 17 bp, synthetic construct
  source 1..17: mol_type = other DNA
ctccacatcctagcatc

SEQ ID NO: 162641 - DNA, 17 bp, synthetic construct
  source 1..17: mol_type = other DNA
cctccacatcctagcat

SEQ ID NO: 162642 - DNA, 17 bp, synthetic construct
  source 1..17: mol_type = other DNA
ccctccacatcctagca

SEQ ID NO: 162643 - DNA, 17 bp, synthetic construct
  source 1..17: mol_type = other DNA
gccctccacatcctagc

SEQ ID NO: 162644 - DNA, 17 bp, synthetic construct
  source 1..17: mol_type = other DNA
ggccctccacatcctag

SEQ ID NO: 162645 - DNA, 17 bp, synthetic construct
  source 1..17: mol_type = other DNA
gggccctccacatccta

SEQ ID NO: 162646 - DNA, 17 bp, synthetic construct
  source 1..17: mol_type = other DNA
agggccctccacatcct

SEQ ID NO: 162647 - DNA, 17 bp, synthetic construct
  source 1..17: mol_type = other DNA
cagggccctccacatcc

SEQ ID NO: 162648 - DNA, 17 bp, synthetic construct
  source 1..17: mol_type = other DNA
ccagggccctccacatc

SEQ ID NO: 162649 - DNA, 17 bp, synthetic construct
  source 1..17: mol_type = other DNA
gccagggccctccacat

SEQ ID NO: 162650 - DNA, 17 bp, synthetic construct
  source 1..17: mol_type = other DNA
ggccagggccctccaca

SEQ ID NO: 162651 - DNA, 17 bp, synthetic construct
  source 1..17: mol_type = other DNA
cggccagggccctccac

SEQ ID NO: 162652 - DNA, 17 bp, synthetic construct
  source 1..17: mol_type = other DNA
ccggccagggccctcca

SEQ ID NO: 162653 - DNA, 17 bp, synthetic construct
  source 1..17: mol_type = other DNA
cccggccagggccctcc

SEQ ID NO: 162654 - DNA, 17 bp, synthetic construct
  source 1..17: mol_type = other DNA
ccccggccagggccctc

SEQ ID NO: 162655 - DNA, 17 bp, synthetic construct
  source 1..17: mol_type = other DNA
cccccggccagggccct

SEQ ID NO: 162656 - DNA, 17 bp, synthetic construct
  source 1..17: mol_type = other DNA
acccccggccagggccc

SEQ ID NO: 162657 - DNA, 17 bp, synthetic construct
  source 1..17: mol_type = other DNA
aacccccggccagggcc

SEQ ID NO: 162658 - DNA, 17 bp, synthetic construct
  source 1..17: mol_type = other DNA
caacccccggccagggc

SEQ ID NO: 162659 - DNA, 17 bp, synthetic construct
  source 1..17: mol_type = other DNA
ccaacccccggccaggg

SEQ ID NO: 162660 - DNA, 17 bp, synthetic construct
  source 1..17: mol_type = other DNA
accaacccccggccagg

SEQ ID NO: 162661 - DNA, 17 bp, synthetic construct
  source 1..17: mol_type = other DNA
aaccaacccccggccag

SEQ ID NO: 162662 - DNA, 17 bp, synthetic construct
  source 1..17: mol_type = other DNA
gaaccaacccccggcca

SEQ ID NO: 162663 - DNA, 17 bp, synthetic construct
  source 1..17: mol_type = other DNA
ggaaccaacccccggcc

SEQ ID NO: 162664 - DNA, 17 bp, synthetic construct
  source 1..17: mol_type = other DNA
cggaaccaacccccggc

SEQ ID NO: 162665 - DNA, 17 bp, synthetic construct
  source 1..17: mol_type = other DNA
gcggaaccaacccccgg

SEQ ID NO: 162666 - DNA, 17 bp, synthetic construct
  source 1..17: mol_type = other DNA
agcggaaccaacccccg

SEQ ID NO: 162667 - DNA, 17 bp, synthetic construct
  source 1..17: mol_type = other DNA
cagcggaaccaaccccc

SEQ ID NO: 162668 - DNA, 17 bp, synthetic construct
  source 1..17: mol_type = other DNA
ccagcggaaccaacccc

SEQ ID NO: 162669 - DNA, 17 bp, synthetic construct
  source 1..17: mol_type = other DNA
tccagcggaaccaaccc

SEQ ID NO: 162670 - DNA, 17 bp, synthetic construct
  source 1..17: mol_type = other DNA
ctccagcggaaccaacc

SEQ ID NO: 162671 - DNA, 17 bp, synthetic construct
  source 1..17: mol_type = other DNA
cctccagcggaaccaac

SEQ ID NO: 162672 - DNA, 17 bp, synthetic construct
  source 1..17: mol_type = other DNA
ccctccagcggaaccaa

SEQ ID NO: 162673 - DNA, 17 bp, synthetic construct
  source 1..17: mol_type = other DNA
tccctccagcggaacca

SEQ ID NO: 162674 - DNA, 17 bp, synthetic construct
  source 1..17: mol_type = other DNA
ttccctccagcggaacc

SEQ ID NO: 162675 - DNA, 17 bp, synthetic construct
  source 1..17: mol_type = other DNA
cttccctccagcggaac

SEQ ID NO: 162676 - DNA, 17 bp, synthetic construct
  source 1..17: mol_type = other DNA
ccttccctccagcggaa

SEQ ID NO: 162677 - DNA, 17 bp, synthetic construct
  source 1..17: mol_type = other DNA
gccttccctccagcgga

SEQ ID NO: 162678 - DNA, 17 bp, synthetic construct
  source 1..17: mol_type = other DNA
ggccttccctccagcgg

SEQ ID NO: 162679 - DNA, 17 bp, synthetic construct
  source 1..17: mol_type = other DNA
gggccttccctccagcg

SEQ ID NO: 162680 - DNA, 17 bp, synthetic construct
  source 1..17: mol_type = other DNA
ggggccttccctccagc

SEQ ID NO: 162681 - DNA, 17 bp, synthetic construct
  source 1..17: mol_type = other DNA
gggggccttccctccag

SEQ ID NO: 162682 - DNA, 17 bp, synthetic construct
  source 1..17: mol_type = other DNA
tgggggccttccctcca

SEQ ID NO: 162683 - DNA, 17 bp, synthetic construct
  source 1..17: mol_type = other DNA
ctgggggccttccctcc

SEQ ID NO: 162684 - DNA, 17 bp, synthetic construct
  source 1..17: mol_type = other DNA
cctgggggccttccctc

SEQ ID NO: 162685 - DNA, 17 bp, synthetic construct
  source 1..17: mol_type = other DNA
acctgggggccttccct

SEQ ID NO: 162686 - DNA, 17 bp, synthetic construct
  source 1..17: mol_type = other DNA
cacctgggggccttccc

SEQ ID NO: 162687 - DNA, 17 bp, synthetic construct
  source 1..17: mol_type = other DNA
ccacctgggggccttcc

SEQ ID NO: 162688 - DNA, 17 bp, synthetic construct
  source 1..17: mol_type = other DNA
tccacctgggggccttc

SEQ ID NO: 162689 - DNA, 17 bp, synthetic construct
  source 1..17: mol_type = other DNA
ttccacctgggggcctt

SEQ ID NO: 162690 - DNA, 17 bp, synthetic construct
  source 1..17: mol_type = other DNA
tttccacctgggggcct

SEQ ID NO: 162691 - DNA, 17 bp, synthetic construct
  source 1..17: mol_type = other DNA
ctttccacctgggggcc

SEQ ID NO: 162692 - DNA, 17 bp, synthetic construct
  source 1..17: mol_type = other DNA
cctttccacctgggggc

SEQ ID NO: 162693 - DNA, 17 bp, synthetic construct
  source 1..17: mol_type = other DNA
tcctttccacctggggg

SEQ ID NO: 162694 - DNA, 17 bp, synthetic construct
  source 1..17: mol_type = other DNA
ctcctttccacctgggg

SEQ ID NO: 162695 - DNA, 17 bp, synthetic construct
  source 1..17: mol_type = other DNA
cctcctttccacctggg

SEQ ID NO: 162696 - DNA, 17 bp, synthetic construct
  source 1..17: mol_type = other DNA
gcctcctttccacctgg

SEQ ID NO: 162697 - DNA, 17 bp, synthetic construct
  source 1..17: mol_type = other DNA
ggcctcctttccacctg

SEQ ID NO: 162698 - DNA, 17 bp, synthetic construct
  source 1..17: mol_type = other DNA
tggcctcctttccacct

SEQ ID NO: 162699 - DNA, 17 bp, synthetic construct
  source 1..17: mol_type = other DNA
ctggcctcctttccacc

SEQ ID NO: 162700 - DNA, 17 bp, synthetic construct
  source 1..17: mol_type = other DNA
actggcctcctttccac

SEQ ID NO: 162701 - DNA, 17 bp, synthetic construct
  source 1..17: mol_type = other DNA
tactggcctcctttcca

SEQ ID NO: 162702 - DNA, 17 bp, synthetic construct
  source 1..17: mol_type = other DNA
gtactggcctcctttcc

SEQ ID NO: 162703 - DNA, 17 bp, synthetic construct
  source 1..17: mol_type = other DNA
cgtactggcctcctttc

SEQ ID NO: 162704 - DNA, 17 bp, synthetic construct
  source 1..17: mol_type = other DNA
tcgtactggcctccttt

SEQ ID NO: 162705 - DNA, 17 bp, synthetic construct
  source 1..17: mol_type = other DNA
gtcgtactggcctcctt

SEQ ID NO: 162706 - DNA, 17 bp, synthetic construct
  source 1..17: mol_type = other DNA
agtcgtactggcctcct

SEQ ID NO: 162707 - DNA, 17 bp, synthetic construct
  source 1..17: mol_type = other DNA
cagtcgtactggcctcc

SEQ ID NO: 162708 - DNA, 17 bp, synthetic construct
  source 1..17: mol_type = other DNA
gcagtcgtactggcctc

SEQ ID NO: 162709 - DNA, 17 bp, synthetic construct
  source 1..17: mol_type = other DNA
tgcagtcgtactggcct

SEQ ID NO: 162710 - DNA, 17 bp, synthetic construct
  source 1..17: mol_type = other DNA
ctgcagtcgtactggcc

SEQ ID NO: 162711 - DNA, 17 bp, synthetic construct
  source 1..17: mol_type = other DNA
gctgcagtcgtactggc

SEQ ID NO: 162712 - DNA, 17 bp, synthetic construct
  source 1..17: mol_type = other DNA
cgctgcagtcgtactgg

SEQ ID NO: 162713 - DNA, 17 bp, synthetic construct
  source 1..17: mol_type = other DNA
ccgctgcagtcgtactg

SEQ ID NO: 162714 - DNA, 17 bp, synthetic construct
  source 1..17: mol_type = other DNA
tccgctgcagtcgtact

SEQ ID NO: 162715 - DNA, 17 bp, synthetic construct
  source 1..17: mol_type = other DNA
ctccgctgcagtcgtac

SEQ ID NO: 162716 - DNA, 17 bp, synthetic construct
  source 1..17: mol_type = other DNA
cctccgctgcagtcgta

SEQ ID NO: 162717 - DNA, 17 bp, synthetic construct
  source 1..17: mol_type = other DNA
ccctccgctgcagtcgt

SEQ ID NO: 162718 - DNA, 17 bp, synthetic construct
  source 1..17: mol_type = other DNA
tccctccgctgcagtcg

SEQ ID NO: 162719 - DNA, 17 bp, synthetic construct
  source 1..17: mol_type = other DNA
ctccctccgctgcagtc

SEQ ID NO: 162720 - DNA, 17 bp, synthetic construct
  source 1..17: mol_type = other DNA
cctccctccgctgcagt

SEQ ID NO: 162721 - DNA, 17 bp, synthetic construct
  source 1..17: mol_type = other DNA
acctccctccgctgcag

SEQ ID NO: 162722 - DNA, 17 bp, synthetic construct
  source 1..17: mol_type = other DNA
cacctccctccgctgca

SEQ ID NO: 162723 - DNA, 17 bp, synthetic construct
  source 1..17: mol_type = other DNA
ccacctccctccgctgc

SEQ ID NO: 162724 - DNA, 17 bp, synthetic construct
  source 1..17: mol_type = other DNA
cccacctccctccgctg

SEQ ID NO: 162725 - DNA, 17 bp, synthetic construct
  source 1..17: mol_type = other DNA
ccccacctccctccgct

SEQ ID NO: 162726 - DNA, 17 bp, synthetic construct
  source 1..17: mol_type = other DNA
cccccacctccctccgc

SEQ ID NO: 162727 - DNA, 17 bp, synthetic construct
  source 1..17: mol_type = other DNA
gcccccacctccctccg

SEQ ID NO: 162728 - DNA, 17 bp, synthetic construct
  source 1..17: mol_type = other DNA
cgcccccacctccctcc

SEQ ID NO: 162729 - DNA, 17 bp, synthetic construct
  source 1..17: mol_type = other DNA
tcgcccccacctccctc

SEQ ID NO: 162730 - DNA, 17 bp, synthetic construct
  source 1..17: mol_type = other DNA
ctcgcccccacctccct

SEQ ID NO: 162731 - DNA, 17 bp, synthetic construct
  source 1..17: mol_type = other DNA
cctcgcccccacctccc

SEQ ID NO: 162732 - DNA, 17 bp, synthetic construct
  source 1..17: mol_type = other DNA
ccctcgcccccacctcc

SEQ ID NO: 162733 - DNA, 17 bp, synthetic construct
  source 1..17: mol_type = other DNA
gccctcgcccccacctc

SEQ ID NO: 162734 - DNA, 17 bp, synthetic construct
  source 1..17: mol_type = other DNA
tgccctcgcccccacct

SEQ ID NO: 162735 - DNA, 17 bp, synthetic construct
  source 1..17: mol_type = other DNA
ctgccctcgcccccacc

SEQ ID NO: 162736 - DNA, 17 bp, synthetic construct
  source 1..17: mol_type = other DNA
tctgccctcgcccccac

SEQ ID NO: 162737 - DNA, 17 bp, synthetic construct
  source 1..17: mol_type = other DNA
ctctgccctcgccccca

SEQ ID NO: 162738 - DNA, 17 bp, synthetic construct
  source 1..17: mol_type = other DNA
cctctgccctcgccccc

SEQ ID NO: 162739 - DNA, 17 bp, synthetic construct
  source 1..17: mol_type = other DNA
ccctctgccctcgcccc

SEQ ID NO: 162740 - DNA, 17 bp, synthetic construct
  source 1..17: mol_type = other DNA
accctctgccctcgccc

SEQ ID NO: 162741 - DNA, 17 bp, synthetic construct
  source 1..17: mol_type = other DNA
taccctctgccctcgcc

SEQ ID NO: 162742 - DNA, 17 bp, synthetic construct
  source 1..17: mol_type = other DNA
ttaccctctgccctcgc

SEQ ID NO: 162743 - DNA, 17 bp, synthetic construct
  source 1..17: mol_type = other DNA
cttaccctctgccctcg

SEQ ID NO: 162744 - DNA, 17 bp, synthetic construct
  source 1..17: mol_type = other DNA
gcttaccctctgccctc

SEQ ID NO: 162745 - DNA, 17 bp, synthetic construct
  source 1..17: mol_type = other DNA
tgcttaccctctgccct

SEQ ID NO: 162746 - DNA, 17 bp, synthetic construct
  source 1..17: mol_type = other DNA
ctgcttaccctctgccc

SEQ ID NO: 162747 - DNA, 17 bp, synthetic construct
  source 1..17: mol_type = other DNA
cctgcttaccctctgcc

SEQ ID NO: 162748 - DNA, 17 bp, synthetic construct
  source 1..17: mol_type = other DNA
ccctgcttaccctctgc

SEQ ID NO: 162749 - DNA, 17 bp, synthetic construct
  source 1..17: mol_type = other DNA
cccctgcttaccctctg

SEQ ID NO: 162750 - DNA, 17 bp, synthetic construct
  source 1..17: mol_type = other DNA
acccctgcttaccctct

SEQ ID NO: 162751 - DNA, 17 bp, synthetic construct
  source 1..17: mol_type = other DNA
cacccctgcttaccctc

SEQ ID NO: 162752 - DNA, 17 bp, synthetic construct
  source 1..17: mol_type = other DNA
gcacccctgcttaccct

SEQ ID NO: 162753 - DNA, 17 bp, synthetic construct
  source 1..17: mol_type = other DNA
agcacccctgcttaccc

SEQ ID NO: 162754 - DNA, 17 bp, synthetic construct
  source 1..17: mol_type = other DNA
tagcacccctgcttacc

SEQ ID NO: 162755 - DNA, 17 bp, synthetic construct
  source 1..17: mol_type = other DNA
atagcacccctgcttac

SEQ ID NO: 162756 - DNA, 17 bp, synthetic construct
  source 1..17: mol_type = other DNA
catagcacccctgctta

SEQ ID NO: 162757 - DNA, 17 bp, synthetic construct
  source 1..17: mol_type = other DNA
gcatagcacccctgctt

SEQ ID NO: 162758 - DNA, 17 bp, synthetic construct
  source 1..17: mol_type = other DNA
agcatagcacccctgct

SEQ ID NO: 162759 - DNA, 17 bp, synthetic construct
  source 1..17: mol_type = other DNA
gagcatagcacccctgc

SEQ ID NO: 162760 - DNA, 17 bp, synthetic construct
  source 1..17: mol_type = other DNA
ggagcatagcacccctg

SEQ ID NO: 162761 - DNA, 17 bp, synthetic construct
  source 1..17: mol_type = other DNA
tggagcatagcacccct

SEQ ID NO: 162762 - DNA, 17 bp, synthetic construct
  source 1..17: mol_type = other DNA
gtggagcatagcacccc

SEQ ID NO: 162763 - DNA, 17 bp, synthetic construct
  source 1..17: mol_type = other DNA
tgtggagcatagcaccc

SEQ ID NO: 162764 - DNA, 17 bp, synthetic construct
  source 1..17: mol_type = other DNA
atgtggagcatagcacc

SEQ ID NO: 162765 - DNA, 17 bp, synthetic construct
  source 1..17: mol_type = other DNA
catgtggagcatagcac

SEQ ID NO: 162766 - DNA, 17 bp, synthetic construct
  source 1..17: mol_type = other DNA
ccatgtggagcatagca

SEQ ID NO: 162767 - DNA, 17 bp, synthetic construct
  source 1..17: mol_type = other DNA
cccatgtggagcatagc

SEQ ID NO: 162768 - DNA, 17 bp, synthetic construct
  source 1..17: mol_type = other DNA
acccatgtggagcatag

SEQ ID NO: 162769 - DNA, 17 bp, synthetic construct
  source 1..17: mol_type = other DNA
aacccatgtggagcata

SEQ ID NO: 162770 - DNA, 17 bp, synthetic construct
  source 1..17: mol_type = other DNA
aaacccatgtggagcat

SEQ ID NO: 162771 - DNA, 17 bp, synthetic construct
  source 1..17: mol_type = other DNA
caaacccatgtggagca

SEQ ID NO: 162772 - DNA, 17 bp, synthetic construct
  source 1..17: mol_type = other DNA
tcaaacccatgtggagc

SEQ ID NO: 162773 - DNA, 17 bp, synthetic construct
  source 1..17: mol_type = other DNA
ttcaaacccatgtggag

SEQ ID NO: 162774 - DNA, 17 bp, synthetic construct
  source 1..17: mol_type = other DNA
tttcaaacccatgtgga

SEQ ID NO: 162775 - DNA, 17 bp, synthetic construct
  source 1..17: mol_type = other DNA
gtttcaaacccatgtgg

SEQ ID NO: 162776 - DNA, 17 bp, synthetic construct
  source 1..17: mol_type = other DNA
ggtttcaaacccatgtg

SEQ ID NO: 162777 - DNA, 17 bp, synthetic construct
  source 1..17: mol_type = other DNA
aggtttcaaacccatgt

SEQ ID NO: 162778 - DNA, 17 bp, synthetic construct
  source 1..17: mol_type = other DNA
caggtttcaaacccatg

SEQ ID NO: 162779 - DNA, 17 bp, synthetic construct
  source 1..17: mol_type = other DNA
acaggtttcaaacccat

SEQ ID NO: 162780 - DNA, 17 bp, synthetic construct
  source 1..17: mol_type = other DNA
cacaggtttcaaaccca

SEQ ID NO: 162781 - DNA, 17 bp, synthetic construct
  source 1..17: mol_type = other DNA
ccacaggtttcaaaccc

SEQ ID NO: 162782 - DNA, 17 bp, synthetic construct
  source 1..17: mol_type = other DNA
cccacaggtttcaaacc

SEQ ID NO: 162783 - DNA, 17 bp, synthetic construct
  source 1..17: mol_type = other DNA
gcccacaggtttcaaac

SEQ ID NO: 162784 - DNA, 17 bp, synthetic construct
  source 1..17: mol_type = other DNA
ggcccacaggtttcaaa

SEQ ID NO: 162785 - DNA, 17 bp, synthetic construct
  source 1..17: mol_type = other DNA
tggcccacaggtttcaa

SEQ ID NO: 162786 - DNA, 17 bp, synthetic construct
  source 1..17: mol_type = other DNA
gtggcccacaggtttca

SEQ ID NO: 162787 - DNA, 17 bp, synthetic construct
  source 1..17: mol_type = other DNA
tgtggcccacaggtttc

SEQ ID NO: 162788 - DNA, 17 bp, synthetic construct
  source 1..17: mol_type = other DNA
atgtggcccacaggttt

SEQ ID NO: 162789 - DNA, 17 bp, synthetic construct
  source 1..17: mol_type = other DNA
catgtggcccacaggtt

SEQ ID NO: 162790 - DNA, 17 bp, synthetic construct
  source 1..17: mol_type = other DNA
tcatgtggcccacaggt

SEQ ID NO: 162791 - DNA, 17 bp, synthetic construct
  source 1..17: mol_type = other DNA
gtcatgtggcccacagg

SEQ ID NO: 162792 - DNA, 17 bp, synthetic construct
  source 1..17: mol_type = other DNA
ggtcatgtggcccacag

SEQ ID NO: 162793 - DNA, 17 bp, synthetic construct
  source 1..17: mol_type = other DNA
tggtcatgtggcccaca

SEQ ID NO: 162794 - DNA, 17 bp, synthetic construct
  source 1..17: mol_type = other DNA
ctggtcatgtggcccac

SEQ ID NO: 162795 - DNA, 17 bp, synthetic construct
  source 1..17: mol_type = other DNA
tctggtcatgtggccca

SEQ ID NO: 162796 - DNA, 17 bp, synthetic construct
  source 1..17: mol_type = other DNA
atctggtcatgtggccc

SEQ ID NO: 162797 - DNA, 17 bp, synthetic construct
  source 1..17: mol_type = other DNA
gatctggtcatgtggcc

SEQ ID NO: 162798 - DNA, 17 bp, synthetic construct
  source 1..17: mol_type = other DNA
ggatctggtcatgtggc

SEQ ID NO: 162799 - DNA, 17 bp, synthetic construct
  source 1..17: mol_type = other DNA
tggatctggtcatgtgg

SEQ ID NO: 162800 - DNA, 17 bp, synthetic construct
  source 1..17: mol_type = other DNA
gtggatctggtcatgtg

SEQ ID NO: 162801 - DNA, 17 bp, synthetic construct
  source 1..17: mol_type = other DNA
cgtggatctggtcatgt

SEQ ID NO: 162802 - DNA, 17 bp, synthetic construct
  source 1..17: mol_type = other DNA
acgtggatctggtcatg

SEQ ID NO: 162803 - DNA, 17 bp, synthetic construct
  source 1..17: mol_type = other DNA
cacgtggatctggtcat

SEQ ID NO: 162804 - DNA, 17 bp, synthetic construct
  source 1..17: mol_type = other DNA
tcacgtggatctggtca

SEQ ID NO: 162805 - DNA, 17 bp, synthetic construct
  source 1..17: mol_type = other DNA
atcacgtggatctggtc

SEQ ID NO: 162806 - DNA, 17 bp, synthetic construct
  source 1..17: mol_type = other DNA
tatcacgtggatctggt

SEQ ID NO: 162807 - DNA, 17 bp, synthetic construct
  source 1..17: mol_type = other DNA
ctatcacgtggatctgg

SEQ ID NO: 162808 - DNA, 17 bp, synthetic construct
  source 1..17: mol_type = other DNA
tctatcacgtggatctg

SEQ ID NO: 162809 - DNA, 17 bp, synthetic construct
  source 1..17: mol_type = other DNA
ttctatcacgtggatct

SEQ ID NO: 162810 - DNA, 17 bp, synthetic construct
  source 1..17: mol_type = other DNA
tttctatcacgtggatc

SEQ ID NO: 162811 - DNA, 17 bp, synthetic construct
  source 1..17: mol_type = other DNA
ctttctatcacgtggat

SEQ ID NO: 162812 - DNA, 17 bp, synthetic construct
  source 1..17: mol_type = other DNA
tctttctatcacgtgga

SEQ ID NO: 162813 - DNA, 17 bp, synthetic construct
  source 1..17: mol_type = other DNA
atctttctatcacgtgg

SEQ ID NO: 162814 - DNA, 17 bp, synthetic construct
  source 1..17: mol_type = other DNA
gatctttctatcacgtg

SEQ ID NO: 162815 - DNA, 17 bp, synthetic construct
  source 1..17: mol_type = other DNA
ggatctttctatcacgt

SEQ ID NO: 162816 - DNA, 17 bp, synthetic construct
  source 1..17: mol_type = other DNA
tggatctttctatcacg

SEQ ID NO: 162817 - DNA, 17 bp, synthetic construct
  source 1..17: mol_type = other DNA
ttggatctttctatcac

SEQ ID NO: 162818 - DNA, 17 bp, synthetic construct
  source 1..17: mol_type = other DNA
tttggatctttctatca

SEQ ID NO: 162819 - DNA, 17 bp, synthetic construct
  source 1..17: mol_type = other DNA
ctttggatctttctatc

SEQ ID NO: 162820 - DNA, 17 bp, synthetic construct
  source 1..17: mol_type = other DNA
tctttggatctttctat

SEQ ID NO: 162821 - DNA, 17 bp, synthetic construct
  source 1..17: mol_type = other DNA
ctctttggatctttcta

SEQ ID NO: 162822 - DNA, 17 bp, synthetic construct
  source 1..17: mol_type = other DNA
gctctttggatctttct

SEQ ID NO: 162823 - DNA, 17 bp, synthetic construct
  source 1..17: mol_type = other DNA
tgctctttggatctttc

SEQ ID NO: 162824 - DNA, 17 bp, synthetic construct
  source 1..17: mol_type = other DNA
gtgctctttggatcttt

SEQ ID NO: 162825 - DNA, 17 bp, synthetic construct
  source 1..17: mol_type = other DNA
tgtgctctttggatctt

SEQ ID NO: 162826 - DNA, 17 bp, synthetic construct
  source 1..17: mol_type = other DNA
atgtgctctttggatct

SEQ ID NO: 162827 - DNA, 17 bp, synthetic construct
  source 1..17: mol_type = other DNA
catgtgctctttggatc

SEQ ID NO: 162828 - DNA, 17 bp, synthetic construct
  source 1..17: mol_type = other DNA
acatgtgctctttggat

SEQ ID NO: 162829 - DNA, 17 bp, synthetic construct
  source 1..17: mol_type = other DNA
cacatgtgctctttgga

SEQ ID NO: 162830 - DNA, 17 bp, synthetic construct
  source 1..17: mol_type = other DNA
tcacatgtgctctttgg

SEQ ID NO: 162831 - DNA, 17 bp, synthetic construct
  source 1..17: mol_type = other DNA
ttcacatgtgctctttg

SEQ ID NO: 162832 - DNA, 17 bp, synthetic construct
  source 1..17: mol_type = other DNA
cttcacatgtgctcttt

SEQ ID NO: 162833 - DNA, 17 bp, synthetic construct
  source 1..17: mol_type = other DNA
ccttcacatgtgctctt

SEQ ID NO: 162834 - DNA, 17 bp, synthetic construct
  source 1..17: mol_type = other DNA
gccttcacatgtgctct

SEQ ID NO: 162835 - DNA, 17 bp, synthetic construct
  source 1..17: mol_type = other DNA
tgccttcacatgtgctc

SEQ ID NO: 162836 - DNA, 17 bp, synthetic construct
  source 1..17: mol_type = other DNA
ctgccttcacatgtgct

SEQ ID NO: 162837 - DNA, 17 bp, synthetic construct
  source 1..17: mol_type = other DNA
cctgccttcacatgtgc

SEQ ID NO: 162838 - DNA, 17 bp, synthetic construct
  source 1..17: mol_type = other DNA
gcctgccttcacatgtg

SEQ ID NO: 162839 - DNA, 17 bp, synthetic construct
  source 1..17: mol_type = other DNA
tgcctgccttcacatgt

SEQ ID NO: 162840 - DNA, 17 bp, synthetic construct
  source 1..17: mol_type = other DNA
ctgcctgccttcacatg

SEQ ID NO: 162841 - DNA, 17 bp, synthetic construct
  source 1..17: mol_type = other DNA
tctgcctgccttcacat

SEQ ID NO: 162842 - DNA, 17 bp, synthetic construct
  source 1..17: mol_type = other DNA
atctgcctgccttcaca

SEQ ID NO: 162843 - DNA, 17 bp, synthetic construct
  source 1..17: mol_type = other DNA
catctgcctgccttcac

SEQ ID NO: 162844 - DNA, 17 bp, synthetic construct
  source 1..17: mol_type = other DNA
ccatctgcctgccttca

SEQ ID NO: 162845 - DNA, 17 bp, synthetic construct
  source 1..17: mol_type = other DNA
cccatctgcctgccttc

SEQ ID NO: 162846 - DNA, 17 bp, synthetic construct
  source 1..17: mol_type = other DNA
gcccatctgcctgcctt

SEQ ID NO: 162847 - DNA, 17 bp, synthetic construct
  source 1..17: mol_type = other DNA
tgcccatctgcctgcct

SEQ ID NO: 162848 - DNA, 17 bp, synthetic construct
  source 1..17: mol_type = other DNA
ctgcccatctgcctgcc

SEQ ID NO: 162849 - DNA, 17 bp, synthetic construct
  source 1..17: mol_type = other DNA
cctgcccatctgcctgc

SEQ ID NO: 162850 - DNA, 17 bp, synthetic construct
  source 1..17: mol_type = other DNA
acctgcccatctgcctg

SEQ ID NO: 162851 - DNA, 17 bp, synthetic construct
  source 1..17: mol_type = other DNA
cacctgcccatctgcct

SEQ ID NO: 162852 - DNA, 17 bp, synthetic construct
  source 1..17: mol_type = other DNA
gcacctgcccatctgcc

SEQ ID NO: 162853 - DNA, 17 bp, synthetic construct
  source 1..17: mol_type = other DNA
tgcacctgcccatctgc

SEQ ID NO: 162854 - DNA, 17 bp, synthetic construct
  source 1..17: mol_type = other DNA
atgcacctgcccatctg

SEQ ID NO: 162855 - DNA, 17 bp, synthetic construct
  source 1..17: mol_type = other DNA
tatgcacctgcccatct

SEQ ID NO: 162856 - DNA, 17 bp, synthetic construct
  source 1..17: mol_type = other DNA
ctatgcacctgcccatc

SEQ ID NO: 162857 - DNA, 17 bp, synthetic construct
  source 1..17: mol_type = other DNA
cctatgcacctgcccat

SEQ ID NO: 162858 - DNA, 17 bp, synthetic construct
  source 1..17: mol_type = other DNA
acctatgcacctgccca

SEQ ID NO: 162859 - DNA, 17 bp, synthetic construct
  source 1..17: mol_type = other DNA
cacctatgcacctgccc

SEQ ID NO: 162860 - DNA, 17 bp, synthetic construct
  source 1..17: mol_type = other DNA
ccacctatgcacctgcc

SEQ ID NO: 162861 - DNA, 17 bp, synthetic construct
  source 1..17: mol_type = other DNA
cccacctatgcacctgc

SEQ ID NO: 162862 - DNA, 17 bp, synthetic construct
  source 1..17: mol_type = other DNA
gcccacctatgcacctg

SEQ ID NO: 162863 - DNA, 17 bp, synthetic construct
  source 1..17: mol_type = other DNA
tgcccacctatgcacct

SEQ ID NO: 162864 - DNA, 17 bp, synthetic construct
  source 1..17: mol_type = other DNA
ctgcccacctatgcacc

SEQ ID NO: 162865 - DNA, 17 bp, synthetic construct
  source 1..17: mol_type = other DNA
cctgcccacctatgcac

SEQ ID NO: 162866 - DNA, 17 bp, synthetic construct
  source 1..17: mol_type = other DNA
acctgcccacctatgca

SEQ ID NO: 162867 - DNA, 17 bp, synthetic construct
  source 1..17: mol_type = other DNA
cacctgcccacctatgc

SEQ ID NO: 162868 - DNA, 17 bp, synthetic construct
  source 1..17: mol_type = other DNA
gcacctgcccacctatg

SEQ ID NO: 162869 - DNA, 17 bp, synthetic construct
  source 1..17: mol_type = other DNA
tgcacctgcccacctat

SEQ ID NO: 162870 - DNA, 17 bp, synthetic construct
  source 1..17: mol_type = other DNA
atgcacctgcccaccta

SEQ ID NO: 162871 - DNA, 17 bp, synthetic construct
  source 1..17: mol_type = other DNA
tatgcacctgcccacct

SEQ ID NO: 162872 - DNA, 17 bp, synthetic construct
  source 1..17: mol_type = other DNA
ctatgcacctgcccacc

SEQ ID NO: 162873 - DNA, 17 bp, synthetic construct
  source 1..17: mol_type = other DNA
cctatgcacctgcccac

SEQ ID NO: 162874 - DNA, 17 bp, synthetic construct
  source 1..17: mol_type = other DNA
acctatgcacctgccca

SEQ ID NO: 162875 - DNA, 17 bp, synthetic construct
  source 1..17: mol_type = other DNA
cacctatgcacctgccc

SEQ ID NO: 162876 - DNA, 17 bp, synthetic construct
  source 1..17: mol_type = other DNA
ccacctatgcacctgcc

SEQ ID NO: 162877 - DNA, 17 bp, synthetic construct
  source 1..17: mol_type = other DNA
cccacctatgcacctgc

SEQ ID NO: 162878 - DNA, 17 bp, synthetic construct
  source 1..17: mol_type = other DNA
gcccacctatgcacctg

SEQ ID NO: 162879 - DNA, 17 bp, synthetic construct
  source 1..17: mol_type = other DNA
tgcccacctatgcacct

SEQ ID NO: 162880 - DNA, 17 bp, synthetic construct
  source 1..17: mol_type = other DNA
ctgcccacctatgcacc

SEQ ID NO: 162881 - DNA, 17 bp, synthetic construct
  source 1..17: mol_type = other DNA
tctgcccacctatgcac

SEQ ID NO: 162882 - DNA, 17 bp, synthetic construct
  source 1..17: mol_type = other DNA
atctgcccacctatgca

SEQ ID NO: 162883 - DNA, 17 bp, synthetic construct
  source 1..17: mol_type = other DNA
catctgcccacctatgc

SEQ ID NO: 162884 - DNA, 17 bp, synthetic construct
  source 1..17: mol_type = other DNA
ccatctgcccacctatg

SEQ ID NO: 162885 - DNA, 17 bp, synthetic construct
  source 1..17: mol_type = other DNA
tccatctgcccacctat

SEQ ID NO: 162886 - DNA, 17 bp, synthetic construct
  source 1..17: mol_type = other DNA
gtccatctgcccaccta

SEQ ID NO: 162887 - DNA, 17 bp, synthetic construct
  source 1..17: mol_type = other DNA
tgtccatctgcccacct

SEQ ID NO: 162888 - DNA, 17 bp, synthetic construct
  source 1..17: mol_type = other DNA
ctgtccatctgcccacc

SEQ ID NO: 162889 - DNA, 17 bp, synthetic construct
  source 1..17: mol_type = other DNA
cctgtccatctgcccac

SEQ ID NO: 162890 - DNA, 17 bp, synthetic construct
  source 1..17: mol_type = other DNA
acctgtccatctgccca

SEQ ID NO: 162891 - DNA, 17 bp, synthetic construct
  source 1..17: mol_type = other DNA
cacctgtccatctgccc

SEQ ID NO: 162892 - DNA, 17 bp, synthetic construct
  source 1..17: mol_type = other DNA
ccacctgtccatctgcc

SEQ ID NO: 162893 - DNA, 17 bp, synthetic construct
  source 1..17: mol_type = other DNA
cccacctgtccatctgc

SEQ ID NO: 162894 - DNA, 17 bp, synthetic construct
  source 1..17: mol_type = other DNA
gcccacctgtccatctg

SEQ ID NO: 162895 - DNA, 17 bp, synthetic construct
  source 1..17: mol_type = other DNA
tgcccacctgtccatct

SEQ ID NO: 162896 - DNA, 17 bp, synthetic construct
  source 1..17: mol_type = other DNA
ctgcccacctgtccatc

SEQ ID NO: 162897 - DNA, 17 bp, synthetic construct
  source 1..17: mol_type = other DNA
tctgcccacctgtccat

SEQ ID NO: 162898 - DNA, 17 bp, synthetic construct
  source 1..17: mol_type = other DNA
atctgcccacctgtcca

SEQ ID NO: 162899 - DNA, 17 bp, synthetic construct
  source 1..17: mol_type = other DNA
catctgcccacctgtcc

SEQ ID NO: 162900 - DNA, 17 bp, synthetic construct
  source 1..17: mol_type = other DNA
ccatctgcccacctgtc

SEQ ID NO: 162901 - DNA, 17 bp, synthetic construct
  source 1..17: mol_type = other DNA
cccatctgcccacctgt

SEQ ID NO: 162902 - DNA, 17 bp, synthetic construct
  source 1..17: mol_type = other DNA
gcccatctgcccacctg

SEQ ID NO: 162903 - DNA, 17 bp, synthetic construct
  source 1..17: mol_type = other DNA
tgcccatctgcccacct

SEQ ID NO: 162904 - DNA, 17 bp, synthetic construct
  source 1..17: mol_type = other DNA
ctgcccatctgcccacc

SEQ ID NO: 162905 - DNA, 17 bp, synthetic construct
  source 1..17: mol_type = other DNA
cctgcccatctgcccac

SEQ ID NO: 162906 - DNA, 17 bp, synthetic construct
  source 1..17: mol_type = other DNA
acctgcccatctgccca

SEQ ID NO: 162907 - DNA, 17 bp, synthetic construct
  source 1..17: mol_type = other DNA
cacctgcccatctgccc

SEQ ID NO: 162908 - DNA, 17 bp, synthetic construct
  source 1..17: mol_type = other DNA
ccacctgcccatctgcc

SEQ ID NO: 162909 - DNA, 17 bp, synthetic construct
  source 1..17: mol_type = other DNA
cccacctgcccatctgc

SEQ ID NO: 162910 - DNA, 17 bp, synthetic construct
  source 1..17: mol_type = other DNA
gcccacctgcccatctg

SEQ ID NO: 162911 - DNA, 17 bp, synthetic construct
  source 1..17: mol_type = other DNA
tgcccacctgcccatct

SEQ ID NO: 162912 - DNA, 17 bp, synthetic construct
  source 1..17: mol_type = other DNA
ctgcccacctgcccatc

SEQ ID NO: 162913 - DNA, 17 bp, synthetic construct
  source 1..17: mol_type = other DNA
cctgcccacctgcccat

SEQ ID NO: 162914 - DNA, 17 bp, synthetic construct
  source 1..17: mol_type = other DNA
ccctgcccacctgccca

SEQ ID NO: 162915 - DNA, 17 bp, synthetic construct
  source 1..17: mol_type = other DNA
tccctgcccacctgccc

SEQ ID NO: 162916 - DNA, 17 bp, synthetic construct
  source 1..17: mol_type = other DNA
atccctgcccacctgcc

SEQ ID NO: 162917 - DNA, 17 bp, synthetic construct
  source 1..17: mol_type = other DNA
tatccctgcccacctgc

SEQ ID NO: 162918 - DNA, 17 bp, synthetic construct
  source 1..17: mol_type = other DNA
atatccctgcccacctg

SEQ ID NO: 162919 - DNA, 17 bp, synthetic construct
  source 1..17: mol_type = other DNA
tatatccctgcccacct

SEQ ID NO: 162920 - DNA, 17 bp, synthetic construct
  source 1..17: mol_type = other DNA
ctatatccctgcccacc

SEQ ID NO: 162921 - DNA, 17 bp, synthetic construct
  source 1..17: mol_type = other DNA
cctatatccctgcccac

SEQ ID NO: 162922 - DNA, 17 bp, synthetic construct
  source 1..17: mol_type = other DNA
acctatatccctgccca

SEQ ID NO: 162923 - DNA, 17 bp, synthetic construct
  source 1..17: mol_type = other DNA
cacctatatccctgccc

SEQ ID NO: 162924 - DNA, 17 bp, synthetic construct
  source 1..17: mol_type = other DNA
ccacctatatccctgcc

SEQ ID NO: 162925 - DNA, 17 bp, synthetic construct
  source 1..17: mol_type = other DNA
tccacctatatccctgc

SEQ ID NO: 162926 - DNA, 17 bp, synthetic construct
  source 1..17: mol_type = other DNA
gtccacctatatccctg

SEQ ID NO: 162927 - DNA, 17 bp, synthetic construct
  source 1..17: mol_type = other DNA
cgtccacctatatccct

SEQ ID NO: 162928 - DNA, 17 bp, synthetic construct
  source 1..17: mol_type = other DNA
tcgtccacctatatccc

SEQ ID NO: 162929 - DNA, 17 bp, synthetic construct
  source 1..17: mol_type = other DNA
ctcgtccacctatatcc

SEQ ID NO: 162930 - DNA, 17 bp, synthetic construct
  source 1..17: mol_type = other DNA
cctcgtccacctatatc

SEQ ID NO: 162931 - DNA, 17 bp, synthetic construct
  source 1..17: mol_type = other DNA
ccctcgtccacctatat

SEQ ID NO: 162932 - DNA, 17 bp, synthetic construct
  source 1..17: mol_type = other DNA
gccctcgtccacctata

SEQ ID NO: 162933 - DNA, 17 bp, synthetic construct
  source 1..17: mol_type = other DNA
tgccctcgtccacctat

SEQ ID NO: 162934 - DNA, 17 bp, synthetic construct
  source 1..17: mol_type = other DNA
gtgccctcgtccaccta

SEQ ID NO: 162935 - DNA, 17 bp, synthetic construct
  source 1..17: mol_type = other DNA
tgtgccctcgtccacct

SEQ ID NO: 162936 - DNA, 17 bp, synthetic construct
  source 1..17: mol_type = other DNA
ctgtgccctcgtccacc

SEQ ID NO: 162937 - DNA, 17 bp, synthetic construct
  source 1..17: mol_type = other DNA
cctgtgccctcgtccac

SEQ ID NO: 162938 - DNA, 17 bp, synthetic construct
  source 1..17: mol_type = other DNA
acctgtgccctcgtcca

SEQ ID NO: 162939 - DNA, 17 bp, synthetic construct
  source 1..17: mol_type = other DNA
cacctgtgccctcgtcc

SEQ ID NO: 162940 - DNA, 17 bp, synthetic construct
  source 1..17: mol_type = other DNA
ccacctgtgccctcgtc

SEQ ID NO: 162941 - DNA, 17 bp, synthetic construct
  source 1..17: mol_type = other DNA
cccacctgtgccctcgt

SEQ ID NO: 162942 - DNA, 17 bp, synthetic construct
  source 1..17: mol_type = other DNA
gcccacctgtgccctcg

SEQ ID NO: 162943 - DNA, 17 bp, synthetic construct
  source 1..17: mol_type = other DNA
agcccacctgtgccctc

SEQ ID NO: 162944 - DNA, 17 bp, synthetic construct
  source 1..17: mol_type = other DNA
cagcccacctgtgccct

SEQ ID NO: 162945 - DNA, 17 bp, synthetic construct
  source 1..17: mol_type = other DNA
ccagcccacctgtgccc

SEQ ID NO: 162946 - DNA, 17 bp, synthetic construct
  source 1..17: mol_type = other DNA
tccagcccacctgtgcc

SEQ ID NO: 162947 - DNA, 17 bp, synthetic construct
  source 1..17: mol_type = other DNA
ctccagcccacctgtgc

SEQ ID NO: 162948 - DNA, 17 bp, synthetic construct
  source 1..17: mol_type = other DNA
tctccagcccacctgtg

SEQ ID NO: 162949 - DNA, 17 bp, synthetic construct
  source 1..17: mol_type = other DNA
ttctccagcccacctgt

SEQ ID NO: 162950 - DNA, 17 bp, synthetic construct
  source 1..17: mol_type = other DNA
cttctccagcccacctg

SEQ ID NO: 162951 - DNA, 17 bp, synthetic construct
  source 1..17: mol_type = other DNA
acttctccagcccacct

SEQ ID NO: 162952 - DNA, 17 bp, synthetic construct
  source 1..17: mol_type = other DNA
cacttctccagcccacc

SEQ ID NO: 162953 - DNA, 17 bp, synthetic construct
  source 1..17: mol_type = other DNA
gcacttctccagcccac

SEQ ID NO: 162954 - DNA, 17 bp, synthetic construct
  source 1..17: mol_type = other DNA
agcacttctccagccca

SEQ ID NO: 162955 - DNA, 17 bp, synthetic construct
  source 1..17: mol_type = other DNA
cagcacttctccagccc

SEQ ID NO: 162956 - DNA, 17 bp, synthetic construct
  source 1..17: mol_type = other DNA
ccagcacttctccagcc

SEQ ID NO: 162957 - DNA, 17 bp, synthetic construct
  source 1..17: mol_type = other DNA
cccagcacttctccagc

SEQ ID NO: 162958 - DNA, 17 bp, synthetic construct
  source 1..17: mol_type = other DNA
ccccagcacttctccag

SEQ ID NO: 162959 - DNA, 17 bp, synthetic construct
  source 1..17: mol_type = other DNA
gccccagcacttctcca

SEQ ID NO: 162960 - DNA, 17 bp, synthetic construct
  source 1..17: mol_type = other DNA
tgccccagcacttctcc

SEQ ID NO: 162961 - DNA, 17 bp, synthetic construct
  source 1..17: mol_type = other DNA
ctgccccagcacttctc

SEQ ID NO: 162962 - DNA, 17 bp, synthetic construct
  source 1..17: mol_type = other DNA
gctgccccagcacttct

SEQ ID NO: 162963 - DNA, 17 bp, synthetic construct
  source 1..17: mol_type = other DNA
agctgccccagcacttc

SEQ ID NO: 162964 - DNA, 17 bp, synthetic construct
  source 1..17: mol_type = other DNA
gagctgccccagcactt

SEQ ID NO: 162965 - DNA, 17 bp, synthetic construct
  source 1..17: mol_type = other DNA
ggagctgccccagcact

SEQ ID NO: 162966 - DNA, 17 bp, synthetic construct
  source 1..17: mol_type = other DNA
gggagctgccccagcac

SEQ ID NO: 162967 - DNA, 17 bp, synthetic construct
  source 1..17: mol_type = other DNA
tgggagctgccccagca

SEQ ID NO: 162968 - DNA, 17 bp, synthetic construct
  source 1..17: mol_type = other DNA
atgggagctgccccagc

SEQ ID NO: 162969 - DNA, 17 bp, synthetic construct
  source 1..17: mol_type = other DNA
aatgggagctgccccag

SEQ ID NO: 162970 - DNA, 17 bp, synthetic construct
  source 1..17: mol_type = other DNA
aaatgggagctgcccca

SEQ ID NO: 162971 - DNA, 17 bp, synthetic construct
  source 1..17: mol_type = other DNA
caaatgggagctgcccc

SEQ ID NO: 162972 - DNA, 17 bp, synthetic construct
  source 1..17: mol_type = other DNA
ccaaatgggagctgccc

SEQ ID NO: 162973 - DNA, 17 bp, synthetic construct
  source 1..17: mol_type = other DNA
cccaaatgggagctgcc

SEQ ID NO: 162974 - DNA, 17 bp, synthetic construct
  source 1..17: mol_type = other DNA
ccccaaatgggagctgc

SEQ ID NO: 162975 - DNA, 17 bp, synthetic construct
  source 1..17: mol_type = other DNA
gccccaaatgggagctg

SEQ ID NO: 162976 - DNA, 17 bp, synthetic construct
  source 1..17: mol_type = other DNA
tgccccaaatgggagct

SEQ ID NO: 162977 - DNA, 17 bp, synthetic construct
  source 1..17: mol_type = other DNA
gtgccccaaatgggagc

SEQ ID NO: 162978 - DNA, 17 bp, synthetic construct
  source 1..17: mol_type = other DNA
cgtgccccaaatgggag

SEQ ID NO: 162979 - DNA, 17 bp, synthetic construct
  source 1..17: mol_type = other DNA
gcgtgccccaaatggga

SEQ ID NO: 162980 - DNA, 17 bp, synthetic construct
  source 1..17: mol_type = other DNA
agcgtgccccaaatggg

SEQ ID NO: 162981 - DNA, 17 bp, synthetic construct
  source 1..17: mol_type = other DNA
gagcgtgccccaaatgg

SEQ ID NO: 162982 - DNA, 17 bp, synthetic construct
  source 1..17: mol_type = other DNA
agagcgtgccccaaatg

SEQ ID NO: 162983 - DNA, 17 bp, synthetic construct
  source 1..17: mol_type = other DNA
cagagcgtgccccaaat

SEQ ID NO: 162984 - DNA, 17 bp, synthetic construct
  source 1..17: mol_type = other DNA
tcagagcgtgccccaaa

SEQ ID NO: 162985 - DNA, 17 bp, synthetic construct
  source 1..17: mol_type = other DNA
ctcagagcgtgccccaa

SEQ ID NO: 162986 - DNA, 17 bp, synthetic construct
  source 1..17: mol_type = other DNA
cctcagagcgtgcccca

SEQ ID NO: 162987 - DNA, 17 bp, synthetic construct
  source 1..17: mol_type = other DNA
acctcagagcgtgcccc

SEQ ID NO: 162988 - DNA, 17 bp, synthetic construct
  source 1..17: mol_type = other DNA
tacctcagagcgtgccc

SEQ ID NO: 162989 - DNA, 17 bp, synthetic construct
  source 1..17: mol_type = other DNA
atacctcagagcgtgcc

SEQ ID NO: 162990 - DNA, 17 bp, synthetic construct
  source 1..17: mol_type = other DNA
aatacctcagagcgtgc

SEQ ID NO: 162991 - DNA, 17 bp, synthetic construct
  source 1..17: mol_type = other DNA
gaatacctcagagcgtg

SEQ ID NO: 162992 - DNA, 17 bp, synthetic construct
  source 1..17: mol_type = other DNA
ggaatacctcagagcgt

SEQ ID NO: 162993 - DNA, 17 bp, synthetic construct
  source 1..17: mol_type = other DNA
tggaatacctcagagcg

SEQ ID NO: 162994 - DNA, 17 bp, synthetic construct
  source 1..17: mol_type = other DNA
ctggaatacctcagagc

SEQ ID NO: 162995 - DNA, 17 bp, synthetic construct
  source 1..17: mol_type = other DNA
cctggaatacctcagag

SEQ ID NO: 162996 - DNA, 17 bp, synthetic construct
  source 1..17: mol_type = other DNA
gcctggaatacctcaga

SEQ ID NO: 162997 - DNA, 17 bp, synthetic construct
  source 1..17: mol_type = other DNA
ggcctggaatacctcag

SEQ ID NO: 162998 - DNA, 17 bp, synthetic construct
  source 1..17: mol_type = other DNA
gggcctggaatacctca

SEQ ID NO: 162999 - DNA, 17 bp, synthetic construct
  source 1..17: mol_type = other DNA
ggggcctggaatacctc

SEQ ID NO: 163000 - DNA, 17 bp, synthetic construct
  source 1..17: mol_type = other DNA
tggggcctggaatacct

SEQ ID NO: 163001 - DNA, 17 bp, synthetic construct
  source 1..17: mol_type = other DNA
ctggggcctggaatacc

SEQ ID NO: 163002 - DNA, 17 bp, synthetic construct
  source 1..17: mol_type = other DNA
cctggggcctggaatac

SEQ ID NO: 163003 - DNA, 17 bp, synthetic construct
  source 1..17: mol_type = other DNA
tcctggggcctggaata

SEQ ID NO: 163004 - DNA, 17 bp, synthetic construct
  source 1..17: mol_type = other DNA
ctcctggggcctggaat

SEQ ID NO: 163005 - DNA, 17 bp, synthetic construct
  source 1..17: mol_type = other DNA
gctcctggggcctggaa

SEQ ID NO: 163006 - DNA, 17 bp, synthetic construct
  source 1..17: mol_type = other DNA
agctcctggggcctgga

SEQ ID NO: 163007 - DNA, 17 bp, synthetic construct
  source 1..17: mol_type = other DNA
gagctcctggggcctgg

SEQ ID NO: 163008 - DNA, 17 bp, synthetic construct
  source 1..17: mol_type = other DNA
tgagctcctggggcctg

SEQ ID NO: 163009 - DNA, 17 bp, synthetic construct
  source 1..17: mol_type = other DNA
ctgagctcctggggcct

SEQ ID NO: 163010 - DNA, 17 bp, synthetic construct
  source 1..17: mol_type = other DNA
tctgagctcctggggcc

SEQ ID NO: 163011 - DNA, 17 bp, synthetic construct
  source 1..17: mol_type = other DNA
ctctgagctcctggggc

SEQ ID NO: 163012 - DNA, 17 bp, synthetic construct
  source 1..17: mol_type = other DNA
tctctgagctcctgggg

SEQ ID NO: 163013 - DNA, 17 bp, synthetic construct
  source 1..17: mol_type = other DNA
ctctctgagctcctggg

SEQ ID NO: 163014 - DNA, 17 bp, synthetic construct
  source 1..17: mol_type = other DNA
gctctctgagctcctgg

SEQ ID NO: 163015 - DNA, 17 bp, synthetic construct
  source 1..17: mol_type = other DNA
agctctctgagctcctg

SEQ ID NO: 163016 - DNA, 17 bp, synthetic construct
  source 1..17: mol_type = other DNA
cagctctctgagctcct

SEQ ID NO: 163017 - DNA, 17 bp, synthetic construct
  source 1..17: mol_type = other DNA
gcagctctctgagctcc

SEQ ID NO: 163018 - DNA, 17 bp, synthetic construct
  source 1..17: mol_type = other DNA
ggcagctctctgagctc

SEQ ID NO: 163019 - DNA, 17 bp, synthetic construct
  source 1..17: mol_type = other DNA
tggcagctctctgagct

SEQ ID NO: 163020 - DNA, 17 bp, synthetic construct
  source 1..17: mol_type = other DNA
atggcagctctctgagc

SEQ ID NO: 163021 - DNA, 17 bp, synthetic construct
  source 1..17: mol_type = other DNA
catggcagctctctgag

SEQ ID NO: 163022 - DNA, 17 bp, synthetic construct
  source 1..17: mol_type = other DNA
ccatggcagctctctga

SEQ ID NO: 163023 - DNA, 17 bp, synthetic construct
  source 1..17: mol_type = other DNA
cccatggcagctctctg

SEQ ID NO: 163024 - DNA, 17 bp, synthetic construct
  source 1..17: mol_type = other DNA
ccccatggcagctctct

SEQ ID NO: 163025 - DNA, 17 bp, synthetic construct
  source 1..17: mol_type = other DNA
cccccatggcagctctc

SEQ ID NO: 163026 - DNA, 17 bp, synthetic construct
  source 1..17: mol_type = other DNA
ccccccatggcagctct

SEQ ID NO: 163027 - DNA, 17 bp, synthetic construct
  source 1..17: mol_type = other DNA
accccccatggcagctc

SEQ ID NO: 163028 - DNA, 17 bp, synthetic construct
  source 1..17: mol_type = other DNA
caccccccatggcagct

SEQ ID NO: 163029 - DNA, 17 bp, synthetic construct
  source 1..17: mol_type = other DNA
acaccccccatggcagc

SEQ ID NO: 163030 - DNA, 17 bp, synthetic construct
  source 1..17: mol_type = other DNA
aacaccccccatggcag

SEQ ID NO: 163031 - DNA, 17 bp, synthetic construct
  source 1..17: mol_type = other DNA
caacaccccccatggca

SEQ ID NO: 163032 - DNA, 17 bp, synthetic construct
  source 1..17: mol_type = other DNA
tcaacaccccccatggc

SEQ ID NO: 163033 - DNA, 17 bp, synthetic construct
  source 1..17: mol_type = other DNA
ttcaacaccccccatgg

SEQ ID NO: 163034 - DNA, 17 bp, synthetic construct
  source 1..17: mol_type = other DNA
tttcaacaccccccatg

SEQ ID NO: 163035 - DNA, 17 bp, synthetic construct
  source 1..17: mol_type = other DNA
atttcaacaccccccat

SEQ ID NO: 163036 - DNA, 17 bp, synthetic construct
  source 1..17: mol_type = other DNA
tatttcaacacccccca

SEQ ID NO: 163037 - DNA, 17 bp, synthetic construct
  source 1..17: mol_type = other DNA
gtatttcaacacccccc

SEQ ID NO: 163038 - DNA, 17 bp, synthetic construct
  source 1..17: mol_type = other DNA
tgtatttcaacaccccc

SEQ ID NO: 163039 - DNA, 17 bp, synthetic construct
  source 1..17: mol_type = other DNA
ctgtatttcaacacccc

SEQ ID NO: 163040 - DNA, 17 bp, synthetic construct
  source 1..17: mol_type = other DNA
tctgtatttcaacaccc

SEQ ID NO: 163041 - DNA, 17 bp, synthetic construct
  source 1..17: mol_type = other DNA
atctgtatttcaacacc

SEQ ID NO: 163042 - DNA, 17 bp, synthetic construct
  source 1..17: mol_type = other DNA
catctgtatttcaacac

SEQ ID NO: 163043 - DNA, 17 bp, synthetic construct
  source 1..17: mol_type = other DNA
ccatctgtatttcaaca

SEQ ID NO: 163044 - DNA, 17 bp, synthetic construct
  source 1..17: mol_type = other DNA
accatctgtatttcaac

SEQ ID NO: 163045 - DNA, 17 bp, synthetic construct
  source 1..17: mol_type = other DNA
aaccatctgtatttcaa

SEQ ID NO: 163046 - DNA, 17 bp, synthetic construct
  source 1..17: mol_type = other DNA
gaaccatctgtatttca

SEQ ID NO: 163047 - DNA, 17 bp, synthetic construct
  source 1..17: mol_type = other DNA
ggaaccatctgtatttc

SEQ ID NO: 163048 - DNA, 17 bp, synthetic construct
  source 1..17: mol_type = other DNA
tggaaccatctgtattt

SEQ ID NO: 163049 - DNA, 17 bp, synthetic construct
  source 1..17: mol_type = other DNA
ctggaaccatctgtatt

SEQ ID NO: 163050 - DNA, 17 bp, synthetic construct
  source 1..17: mol_type = other DNA
gctggaaccatctgtat

SEQ ID NO: 163051 - DNA, 17 bp, synthetic construct
  source 1..17: mol_type = other DNA
tgctggaaccatctgta

SEQ ID NO: 163052 - DNA, 17 bp, synthetic construct
  source 1..17: mol_type = other DNA
ttgctggaaccatctgt

SEQ ID NO: 163053 - DNA, 17 bp, synthetic construct
  source 1..17: mol_type = other DNA
gttgctggaaccatctg

SEQ ID NO: 163054 - DNA, 17 bp, synthetic construct
  source 1..17: mol_type = other DNA
agttgctggaaccatct

SEQ ID NO: 163055 - DNA, 17 bp, synthetic construct
  source 1..17: mol_type = other DNA
cagttgctggaaccatc

SEQ ID NO: 163056 - DNA, 17 bp, synthetic construct
  source 1..17: mol_type = other DNA
ccagttgctggaaccat

SEQ ID NO: 163057 - DNA, 17 bp, synthetic construct
  source 1..17: mol_type = other DNA
gccagttgctggaacca

SEQ ID NO: 163058 - DNA, 17 bp, synthetic construct
  source 1..17: mol_type = other DNA
ggccagttgctggaacc

SEQ ID NO: 163059 - DNA, 17 bp, synthetic construct
  source 1..17: mol_type = other DNA
gggccagttgctggaac

SEQ ID NO: 163060 - DNA, 17 bp, synthetic construct
  source 1..17: mol_type = other DNA
agggccagttgctggaa

SEQ ID NO: 163061 - DNA, 17 bp, synthetic construct
  source 1..17: mol_type = other DNA
cagggccagttgctgga

SEQ ID NO: 163062 - DNA, 17 bp, synthetic construct
  source 1..17: mol_type = other DNA
ccagggccagttgctgg

SEQ ID NO: 163063 - DNA, 17 bp, synthetic construct
  source 1..17: mol_type = other DNA
cccagggccagttgctg

SEQ ID NO: 163064 - DNA, 17 bp, synthetic construct
  source 1..17: mol_type = other DNA
gcccagggccagttgct

SEQ ID NO: 163065 - DNA, 17 bp, synthetic construct
  source 1..17: mol_type = other DNA
ggcccagggccagttgc

SEQ ID NO: 163066 - DNA, 17 bp, synthetic construct
  source 1..17: mol_type = other DNA
tggcccagggccagttg

SEQ ID NO: 163067 - DNA, 17 bp, synthetic construct
  source 1..17: mol_type = other DNA
ctggcccagggccagtt

SEQ ID NO: 163068 - DNA, 17 bp, synthetic construct
  source 1..17: mol_type = other DNA
gctggcccagggccagt

SEQ ID NO: 163069 - DNA, 17 bp, synthetic construct
  source 1..17: mol_type = other DNA
ggctggcccagggccag

SEQ ID NO: 163070 - DNA, 17 bp, synthetic construct
  source 1..17: mol_type = other DNA
tggctggcccagggcca

SEQ ID NO: 163071 - DNA, 17 bp, synthetic construct
  source 1..17: mol_type = other DNA
gtggctggcccagggcc

SEQ ID NO: 163072 - DNA, 17 bp, synthetic construct
  source 1..17: mol_type = other DNA
ggtggctggcccagggc

SEQ ID NO: 163073 - DNA, 17 bp, synthetic construct
  source 1..17: mol_type = other DNA
gggtggctggcccaggg

SEQ ID NO: 163074 - DNA, 17 bp, synthetic construct
  source 1..17: mol_type = other DNA
ggggtggctggcccagg

SEQ ID NO: 163075 - DNA, 17 bp, synthetic construct
  source 1..17: mol_type = other DNA
gggggtggctggcccag

SEQ ID NO: 163076 - DNA, 17 bp, synthetic construct
  source 1..17: mol_type = other DNA
agggggtggctggccca

SEQ ID NO: 163077 - DNA, 17 bp, synthetic construct
  source 1..17: mol_type = other DNA
cagggggtggctggccc

SEQ ID NO: 163078 - DNA, 17 bp, synthetic construct
  source 1..17: mol_type = other DNA
ccagggggtggctggcc

SEQ ID NO: 163079 - DNA, 17 bp, synthetic construct
  source 1..17: mol_type = other DNA
gccagggggtggctggc

SEQ ID NO: 163080 - DNA, 17 bp, synthetic construct
  source 1..17: mol_type = other DNA
ggccagggggtggctgg

SEQ ID NO: 163081 - DNA, 17 bp, synthetic construct
  source 1..17: mol_type = other DNA
cggccagggggtggctg

SEQ ID NO: 163082 - DNA, 17 bp, synthetic construct
  source 1..17: mol_type = other DNA
ccggccagggggtggct

SEQ ID NO: 163083 - DNA, 17 bp, synthetic construct
  source 1..17: mol_type = other DNA
cccggccagggggtggc

SEQ ID NO: 163084 - DNA, 17 bp, synthetic construct
  source 1..17: mol_type = other DNA
ccccggccagggggtgg

SEQ ID NO: 163085 - DNA, 17 bp, synthetic construct
  source 1..17: mol_type = other DNA
cccccggccagggggtg

SEQ ID NO: 163086 - DNA, 17 bp, synthetic construct
  source 1..17: mol_type = other DNA
ccccccggccagggggt

SEQ ID NO: 163087 - DNA, 17 bp, synthetic construct
  source 1..17: mol_type = other DNA
cccccccggccaggggg

SEQ ID NO: 163088 - DNA, 17 bp, synthetic construct
  source 1..17: mol_type = other DNA
gcccccccggccagggg

SEQ ID NO: 163089 - DNA, 17 bp, synthetic construct
  source 1..17: mol_type = other DNA
ggcccccccggccaggg

SEQ ID NO: 163090 - DNA, 17 bp, synthetic construct
  source 1..17: mol_type = other DNA
tggcccccccggccagg

SEQ ID NO: 163091 - DNA, 17 bp, synthetic construct
  source 1..17: mol_type = other DNA
atggcccccccggccag

SEQ ID NO: 163092 - DNA, 17 bp, synthetic construct
  source 1..17: mol_type = other DNA
aatggcccccccggcca

SEQ ID NO: 163093 - DNA, 17 bp, synthetic construct
  source 1..17: mol_type = other DNA
caatggcccccccggcc

SEQ ID NO: 163094 - DNA, 17 bp, synthetic construct
  source 1..17: mol_type = other DNA
acaatggcccccccggc

SEQ ID NO: 163095 - DNA, 17 bp, synthetic construct
  source 1..17: mol_type = other DNA
gacaatggcccccccgg

SEQ ID NO: 163096 - DNA, 17 bp, synthetic construct
  source 1..17: mol_type = other DNA
ggacaatggcccccccg

SEQ ID NO: 163097 - DNA, 17 bp, synthetic construct
  source 1..17: mol_type = other DNA
gggacaatggccccccc

SEQ ID NO: 163098 - DNA, 17 bp, synthetic construct
  source 1..17: mol_type = other DNA
cgggacaatggcccccc

SEQ ID NO: 163099 - DNA, 17 bp, synthetic construct
  source 1..17: mol_type = other DNA
ccgggacaatggccccc

SEQ ID NO: 163100 - DNA, 17 bp, synthetic construct
  source 1..17: mol_type = other DNA
gccgggacaatggcccc

SEQ ID NO: 163101 - DNA, 17 bp, synthetic construct
  source 1..17: mol_type = other DNA
agccgggacaatggccc

SEQ ID NO: 163102 - DNA, 17 bp, synthetic construct
  source 1..17: mol_type = other DNA
cagccgggacaatggcc

SEQ ID NO: 163103 - DNA, 17 bp, synthetic construct
  source 1..17: mol_type = other DNA
tcagccgggacaatggc

SEQ ID NO: 163104 - DNA, 17 bp, synthetic construct
  source 1..17: mol_type = other DNA
ctcagccgggacaatgg

SEQ ID NO: 163105 - DNA, 17 bp, synthetic construct
  source 1..17: mol_type = other DNA
gctcagccgggacaatg

SEQ ID NO: 163106 - DNA, 17 bp, synthetic construct
  source 1..17: mol_type = other DNA
agctcagccgggacaat

SEQ ID NO: 163107 - DNA, 17 bp, synthetic construct
  source 1..17: mol_type = other DNA
cagctcagccgggacaa

SEQ ID NO: 163108 - DNA, 17 bp, synthetic construct
  source 1..17: mol_type = other DNA
gcagctcagccgggaca

SEQ ID NO: 163109 - DNA, 17 bp, synthetic construct
  source 1..17: mol_type = other DNA
tgcagctcagccgggac

SEQ ID NO: 163110 - DNA, 17 bp, synthetic construct
  source 1..17: mol_type = other DNA
gtgcagctcagccggga

SEQ ID NO: 163111 - DNA, 17 bp, synthetic construct
  source 1..17: mol_type = other DNA
ggtgcagctcagccggg

SEQ ID NO: 163112 - DNA, 17 bp, synthetic construct
  source 1..17: mol_type = other DNA
aggtgcagctcagccgg

SEQ ID NO: 163113 - DNA, 17 bp, synthetic construct
  source 1..17: mol_type = other DNA
aaggtgcagctcagccg

SEQ ID NO: 163114 - DNA, 17 bp, synthetic construct
  source 1..17: mol_type = other DNA
caaggtgcagctcagcc

SEQ ID NO: 163115 - DNA, 17 bp, synthetic construct
  source 1..17: mol_type = other DNA
ccaaggtgcagctcagc

SEQ ID NO: 163116 - DNA, 17 bp, synthetic construct
  source 1..17: mol_type = other DNA
gccaaggtgcagctcag

SEQ ID NO: 163117 - DNA, 17 bp, synthetic construct
  source 1..17: mol_type = other DNA
ggccaaggtgcagctca

SEQ ID NO: 163118 - DNA, 17 bp, synthetic construct
  source 1..17: mol_type = other DNA
aggccaaggtgcagctc

SEQ ID NO: 163119 - DNA, 17 bp, synthetic construct
  source 1..17: mol_type = other DNA
gaggccaaggtgcagct

SEQ ID NO: 163120 - DNA, 17 bp, synthetic construct
  source 1..17: mol_type = other DNA
tgaggccaaggtgcagc

SEQ ID NO: 163121 - DNA, 17 bp, synthetic construct
  source 1..17: mol_type = other DNA
gtgaggccaaggtgcag

SEQ ID NO: 163122 - DNA, 17 bp, synthetic construct
  source 1..17: mol_type = other DNA
ggtgaggccaaggtgca

SEQ ID NO: 163123 - DNA, 17 bp, synthetic construct
  source 1..17: mol_type = other DNA
gggtgaggccaaggtgc

SEQ ID NO: 163124 - DNA, 17 bp, synthetic construct
  source 1..17: mol_type = other DNA
cgggtgaggccaaggtg

SEQ ID NO: 163125 - DNA, 17 bp, synthetic construct
  source 1..17: mol_type = other DNA
gcgggtgaggccaaggt

SEQ ID NO: 163126 - DNA, 17 bp, synthetic construct
  source 1..17: mol_type = other DNA
tgcgggtgaggccaagg

SEQ ID NO: 163127 - DNA, 17 bp, synthetic construct
  source 1..17: mol_type = other DNA
ctgcgggtgaggccaag

SEQ ID NO: 163128 - DNA, 17 bp, synthetic construct
  source 1..17: mol_type = other DNA
cctgcgggtgaggccaa

SEQ ID NO: 163129 - DNA, 17 bp, synthetic construct
  source 1..17: mol_type = other DNA
acctgcgggtgaggcca

SEQ ID NO: 163130 - DNA, 17 bp, synthetic construct
  source 1..17: mol_type = other DNA
aacctgcgggtgaggcc

SEQ ID NO: 163131 - DNA, 17 bp, synthetic construct
  source 1..17: mol_type = other DNA
caacctgcgggtgaggc

SEQ ID NO: 163132 - DNA, 17 bp, synthetic construct
  source 1..17: mol_type = other DNA
tcaacctgcgggtgagg

SEQ ID NO: 163133 - DNA, 17 bp, synthetic construct
  source 1..17: mol_type = other DNA
gtcaacctgcgggtgag

SEQ ID NO: 163134 - DNA, 17 bp, synthetic construct
  source 1..17: mol_type = other DNA
agtcaacctgcgggtga

SEQ ID NO: 163135 - DNA, 17 bp, synthetic construct
  source 1..17: mol_type = other DNA
gagtcaacctgcgggtg

SEQ ID NO: 163136 - DNA, 17 bp, synthetic construct
  source 1..17: mol_type = other DNA
ggagtcaacctgcgggt

SEQ ID NO: 163137 - DNA, 17 bp, synthetic construct
  source 1..17: mol_type = other DNA
tggagtcaacctgcggg

SEQ ID NO: 163138 - DNA, 17 bp, synthetic construct
  source 1..17: mol_type = other DNA
gtggagtcaacctgcgg

SEQ ID NO: 163139 - DNA, 17 bp, synthetic construct
  source 1..17: mol_type = other DNA
ggtggagtcaacctgcg

SEQ ID NO: 163140 - DNA, 17 bp, synthetic construct
  source 1..17: mol_type = other DNA
tggtggagtcaacctgc

SEQ ID NO: 163141 - DNA, 17 bp, synthetic construct
  source 1..17: mol_type = other DNA
ttggtggagtcaacctg

SEQ ID NO: 163142 - DNA, 17 bp, synthetic construct
  source 1..17: mol_type = other DNA
cttggtggagtcaacct

SEQ ID NO: 163143 - DNA, 17 bp, synthetic construct
  source 1..17: mol_type = other DNA
acttggtggagtcaacc

SEQ ID NO: 163144 - DNA, 17 bp, synthetic construct
  source 1..17: mol_type = other DNA
tacttggtggagtcaac

SEQ ID NO: 163145 - DNA, 17 bp, synthetic construct
  source 1..17: mol_type = other DNA
gtacttggtggagtcaa

SEQ ID NO: 163146 - DNA, 17 bp, synthetic construct
  source 1..17: mol_type = other DNA
agtacttggtggagtca

SEQ ID NO: 163147 - DNA, 17 bp, synthetic construct
  source 1..17: mol_type = other DNA
tagtacttggtggagtc

SEQ ID NO: 163148 - DNA, 17 bp, synthetic construct
  source 1..17: mol_type = other DNA
gtagtacttggtggagt

SEQ ID NO: 163149 - DNA, 17 bp, synthetic construct
  source 1..17: mol_type = other DNA
cgtagtacttggtggag

SEQ ID NO: 163150 - DNA, 17 bp, synthetic construct
  source 1..17: mol_type = other DNA
tcgtagtacttggtgga

SEQ ID NO: 163151 - DNA, 17 bp, synthetic construct
  source 1..17: mol_type = other DNA
ctcgtagtacttggtgg

SEQ ID NO: 163152 - DNA, 17 bp, synthetic construct
  source 1..17: mol_type = other DNA
cctcgtagtacttggtg

SEQ ID NO: 163153 - DNA, 17 bp, synthetic construct
  source 1..17: mol_type = other DNA
gcctcgtagtacttggt

SEQ ID NO: 163154 - DNA, 17 bp, synthetic construct
  source 1..17: mol_type = other DNA
ggcctcgtagtacttgg

SEQ ID NO: 163155 - DNA, 17 bp, synthetic construct
  source 1..17: mol_type = other DNA
aggcctcgtagtacttg

SEQ ID NO: 163156 - DNA, 17 bp, synthetic construct
  source 1..17: mol_type = other DNA
caggcctcgtagtactt

SEQ ID NO: 163157 - DNA, 17 bp, synthetic construct
  source 1..17: mol_type = other DNA
gcaggcctcgtagtact

SEQ ID NO: 163158 - DNA, 17 bp, synthetic construct
  source 1..17: mol_type = other DNA
cgcaggcctcgtagtac

SEQ ID NO: 163159 - DNA, 17 bp, synthetic construct
  source 1..17: mol_type = other DNA
acgcaggcctcgtagta

SEQ ID NO: 163160 - DNA, 17 bp, synthetic construct
  source 1..17: mol_type = other DNA
cacgcaggcctcgtagt

SEQ ID NO: 163161 - DNA, 17 bp, synthetic construct
  source 1..17: mol_type = other DNA
tcacgcaggcctcgtag

SEQ ID NO: 163162 - DNA, 17 bp, synthetic construct
  source 1..17: mol_type = other DNA
ttcacgcaggcctcgta

SEQ ID NO: 163163 - DNA, 17 bp, synthetic construct
  source 1..17: mol_type = other DNA
gttcacgcaggcctcgt

SEQ ID NO: 163164 - DNA, 17 bp, synthetic construct
  source 1..17: mol_type = other DNA
cgttcacgcaggcctcg

SEQ ID NO: 163165 - DNA, 17 bp, synthetic construct
  source 1..17: mol_type = other DNA
tcgttcacgcaggcctc

SEQ ID NO: 163166 - DNA, 17 bp, synthetic construct
  source 1..17: mol_type = other DNA
gtcgttcacgcaggcct

SEQ ID NO: 163167 - DNA, 17 bp, synthetic construct
  source 1..17: mol_type = other DNA
cgtcgttcacgcaggcc

SEQ ID NO: 163168 - DNA, 17 bp, synthetic construct
  source 1..17: mol_type = other DNA
gcgtcgttcacgcaggc

SEQ ID NO: 163169 - DNA, 17 bp, synthetic construct
  source 1..17: mol_type = other DNA
cgcgtcgttcacgcagg

SEQ ID NO: 163170 - DNA, 17 bp, synthetic construct
  source 1..17: mol_type = other DNA
acgcgtcgttcacgcag

SEQ ID NO: 163171 - DNA, 17 bp, synthetic construct
  source 1..17: mol_type = other DNA
cacgcgtcgttcacgca

SEQ ID NO: 163172 - DNA, 17 bp, synthetic construct
  source 1..17: mol_type = other DNA
acacgcgtcgttcacgc

SEQ ID NO: 163173 - DNA, 17 bp, synthetic construct
  source 1..17: mol_type = other DNA
cacacgcgtcgttcacg

SEQ ID NO: 163174 - DNA, 17 bp, synthetic construct
  source 1..17: mol_type = other DNA
gcacacgcgtcgttcac

SEQ ID NO: 163175 - DNA, 17 bp, synthetic construct
  source 1..17: mol_type = other DNA
ggcacacgcgtcgttca

SEQ ID NO: 163176 - DNA, 17 bp, synthetic construct
  source 1..17: mol_type = other DNA
aggcacacgcgtcgttc

SEQ ID NO: 163177 - DNA, 17 bp, synthetic construct
  source 1..17: mol_type = other DNA
caggcacacgcgtcgtt

SEQ ID NO: 163178 - DNA, 17 bp, synthetic construct
  source 1..17: mol_type = other DNA
gcaggcacacgcgtcgt

SEQ ID NO: 163179 - DNA, 17 bp, synthetic construct
  source 1..17: mol_type = other DNA
cgcaggcacacgcgtcg

SEQ ID NO: 163180 - DNA, 17 bp, synthetic construct
  source 1..17: mol_type = other DNA
tcgcaggcacacgcgtc

SEQ ID NO: 163181 - DNA, 17 bp, synthetic construct
  source 1..17: mol_type = other DNA
gtcgcaggcacacgcgt

SEQ ID NO: 163182 - DNA, 17 bp, synthetic construct
  source 1..17: mol_type = other DNA
agtcgcaggcacacgcg

SEQ ID NO: 163183 - DNA, 17 bp, synthetic construct
  source 1..17: mol_type = other DNA
gagtcgcaggcacacgc

SEQ ID NO: 163184 - DNA, 17 bp, synthetic construct
  source 1..17: mol_type = other DNA
cgagtcgcaggcacacg

SEQ ID NO: 163185 - DNA, 17 bp, synthetic construct
  source 1..17: mol_type = other DNA
ccgagtcgcaggcacac

SEQ ID NO: 163186 - DNA, 17 bp, synthetic construct
  source 1..17: mol_type = other DNA
cccgagtcgcaggcaca

SEQ ID NO: 163187 - DNA, 17 bp, synthetic construct
  source 1..17: mol_type = other DNA
acccgagtcgcaggcac

SEQ ID NO: 163188 - DNA, 17 bp, synthetic construct
  source 1..17: mol_type = other DNA
cacccgagtcgcaggca

SEQ ID NO: 163189 - DNA, 17 bp, synthetic construct
  source 1..17: mol_type = other DNA
ccacccgagtcgcaggc

SEQ ID NO: 163190 - DNA, 17 bp, synthetic construct
  source 1..17: mol_type = other DNA
gccacccgagtcgcagg

SEQ ID NO: 163191 - DNA, 17 bp, synthetic construct
  source 1..17: mol_type = other DNA
cgccacccgagtcgcag

SEQ ID NO: 163192 - DNA, 17 bp, synthetic construct
  source 1..17: mol_type = other DNA
tcgccacccgagtcgca

SEQ ID NO: 163193 - DNA, 17 bp, synthetic construct
  source 1..17: mol_type = other DNA
gtcgccacccgagtcgc

SEQ ID NO: 163194 - DNA, 17 bp, synthetic construct
  source 1..17: mol_type = other DNA
agtcgccacccgagtcg

SEQ ID NO: 163195 - DNA, 17 bp, synthetic construct
  source 1..17: mol_type = other DNA
cagtcgccacccgagtc

SEQ ID NO: 163196 - DNA, 17 bp, synthetic construct
  source 1..17: mol_type = other DNA
gcagtcgccacccgagt

SEQ ID NO: 163197 - DNA, 17 bp, synthetic construct
  source 1..17: mol_type = other DNA
cgcagtcgccacccgag

SEQ ID NO: 163198 - DNA, 17 bp, synthetic construct
  source 1..17: mol_type = other DNA
tcgcagtcgccacccga

SEQ ID NO: 163199 - DNA, 17 bp, synthetic construct
  source 1..17: mol_type = other DNA
ctcgcagtcgccacccg

SEQ ID NO: 163200 - DNA, 17 bp, synthetic construct
  source 1..17: mol_type = other DNA
actcgcagtcgccaccc

SEQ ID NO: 163201 - DNA, 17 bp, synthetic construct
  source 1..17: mol_type = other DNA
cactcgcagtcgccacc

SEQ ID NO: 163202 - DNA, 17 bp, synthetic construct
  source 1..17: mol_type = other DNA
acactcgcagtcgccac

SEQ ID NO: 163203 - DNA, 17 bp, synthetic construct
  source 1..17: mol_type = other DNA
aacactcgcagtcgcca

SEQ ID NO: 163204 - DNA, 17 bp, synthetic construct
  source 1..17: mol_type = other DNA
aaacactcgcagtcgcc

SEQ ID NO: 163205 - DNA, 17 bp, synthetic construct
  source 1..17: mol_type = other DNA
gaaacactcgcagtcgc

SEQ ID NO: 163206 - DNA, 17 bp, synthetic construct
  source 1..17: mol_type = other DNA
agaaacactcgcagtcg

SEQ ID NO: 163207 - DNA, 17 bp, synthetic construct
  source 1..17: mol_type = other DNA
cagaaacactcgcagtc

SEQ ID NO: 163208 - DNA, 17 bp, synthetic construct
  source 1..17: mol_type = other DNA
gcagaaacactcgcagt

SEQ ID NO: 163209 - DNA, 17 bp, synthetic construct
  source 1..17: mol_type = other DNA
tgcagaaacactcgcag

SEQ ID NO: 163210 - DNA, 17 bp, synthetic construct
  source 1..17: mol_type = other DNA
gtgcagaaacactcgca

SEQ ID NO: 163211 - DNA, 17 bp, synthetic construct
  source 1..17: mol_type = other DNA
cgtgcagaaacactcgc

SEQ ID NO: 163212 - DNA, 17 bp, synthetic construct
  source 1..17: mol_type = other DNA
ccgtgcagaaacactcg

SEQ ID NO: 163213 - DNA, 17 bp, synthetic construct
  source 1..17: mol_type = other DNA
gccgtgcagaaacactc

SEQ ID NO: 163214 - DNA, 17 bp, synthetic construct
  source 1..17: mol_type = other DNA
agccgtgcagaaacact

SEQ ID NO: 163215 - DNA, 17 bp, synthetic construct
  source 1..17: mol_type = other DNA
cagccgtgcagaaacac

SEQ ID NO: 163216 - DNA, 17 bp, synthetic construct
  source 1..17: mol_type = other DNA
acagccgtgcagaaaca

SEQ ID NO: 163217 - DNA, 17 bp, synthetic construct
  source 1..17: mol_type = other DNA
cacagccgtgcagaaac

SEQ ID NO: 163218 - DNA, 17 bp, synthetic construct
  source 1..17: mol_type = other DNA
ccacagccgtgcagaaa

SEQ ID NO: 163219 - DNA, 17 bp, synthetic construct
  source 1..17: mol_type = other DNA
gccacagccgtgcagaa

SEQ ID NO: 163220 - DNA, 17 bp, synthetic construct
  source 1..17: mol_type = other DNA
agccacagccgtgcaga

SEQ ID NO: 163221 - DNA, 17 bp, synthetic construct
  source 1..17: mol_type = other DNA
cagccacagccgtgcag

SEQ ID NO: 163222 - DNA, 17 bp, synthetic construct
  source 1..17: mol_type = other DNA
gcagccacagccgtgca

SEQ ID NO: 163223 - DNA, 17 bp, synthetic construct
  source 1..17: mol_type = other DNA
ggcagccacagccgtgc

SEQ ID NO: 163224 - DNA, 17 bp, synthetic construct
  source 1..17: mol_type = other DNA
aggcagccacagccgtg

SEQ ID NO: 163225 - DNA, 17 bp, synthetic construct
  source 1..17: mol_type = other DNA
taggcagccacagccgt

SEQ ID NO: 163226 - DNA, 17 bp, synthetic construct
  source 1..17: mol_type = other DNA
gtaggcagccacagccg

SEQ ID NO: 163227 - DNA, 17 bp, synthetic construct
  source 1..17: mol_type = other DNA
cgtaggcagccacagcc

SEQ ID NO: 163228 - DNA, 17 bp, synthetic construct
  source 1..17: mol_type = other DNA
gcgtaggcagccacagc

SEQ ID NO: 163229 - DNA, 17 bp, synthetic construct
  source 1..17: mol_type = other DNA
ggcgtaggcagccacag

SEQ ID NO: 163230 - DNA, 17 bp, synthetic construct
  source 1..17: mol_type = other DNA
gggcgtaggcagccaca

SEQ ID NO: 163231 - DNA, 17 bp, synthetic construct
  source 1..17: mol_type = other DNA
tgggcgtaggcagccac

SEQ ID NO: 163232 - DNA, 17 bp, synthetic construct
  source 1..17: mol_type = other DNA
ctgggcgtaggcagcca

SEQ ID NO: 163233 - DNA, 17 bp, synthetic construct
  source 1..17: mol_type = other DNA
cctgggcgtaggcagcc

SEQ ID NO: 163234 - DNA, 17 bp, synthetic construct
  source 1..17: mol_type = other DNA
gcctgggcgtaggcagc

SEQ ID NO: 163235 - DNA, 17 bp, synthetic construct
  source 1..17: mol_type = other DNA
ggcctgggcgtaggcag

SEQ ID NO: 163236 - DNA, 17 bp, synthetic construct
  source 1..17: mol_type = other DNA
aggcctgggcgtaggca

SEQ ID NO: 163237 - DNA, 17 bp, synthetic construct
  source 1..17: mol_type = other DNA
caggcctgggcgtaggc

SEQ ID NO: 163238 - DNA, 17 bp, synthetic construct
  source 1..17: mol_type = other DNA
gcaggcctgggcgtagg

SEQ ID NO: 163239 - DNA, 17 bp, synthetic construct
  source 1..17: mol_type = other DNA
ggcaggcctgggcgtag

SEQ ID NO: 163240 - DNA, 17 bp, synthetic construct
  source 1..17: mol_type = other DNA
tggcaggcctgggcgta

SEQ ID NO: 163241 - DNA, 17 bp, synthetic construct
  source 1..17: mol_type = other DNA
gtggcaggcctgggcgt

SEQ ID NO: 163242 - DNA, 17 bp, synthetic construct
  source 1..17: mol_type = other DNA
cgtggcaggcctgggcg

SEQ ID NO: 163243 - DNA, 17 bp, synthetic construct
  source 1..17: mol_type = other DNA
tcgtggcaggcctgggc

SEQ ID NO: 163244 - DNA, 17 bp, synthetic construct
  source 1..17: mol_type = other DNA
gtcgtggcaggcctggg

SEQ ID NO: 163245 - DNA, 17 bp, synthetic construct
  source 1..17: mol_type = other DNA
cgtcgtggcaggcctgg

SEQ ID NO: 163246 - DNA, 17 bp, synthetic construct
  source 1..17: mol_type = other DNA
gcgtcgtggcaggcctg

SEQ ID NO: 163247 - DNA, 17 bp, synthetic construct
  source 1..17: mol_type = other DNA
cgcgtcgtggcaggcct

SEQ ID NO: 163248 - DNA, 17 bp, synthetic construct
  source 1..17: mol_type = other DNA
ccgcgtcgtggcaggcc

SEQ ID NO: 163249 - DNA, 17 bp, synthetic construct
  source 1..17: mol_type = other DNA
cccgcgtcgtggcaggc

SEQ ID NO: 163250 - DNA, 17 bp, synthetic construct
  source 1..17: mol_type = other DNA
gcccgcgtcgtggcagg

SEQ ID NO: 163251 - DNA, 17 bp, synthetic construct
  source 1..17: mol_type = other DNA
ggcccgcgtcgtggcag

SEQ ID NO: 163252 - DNA, 17 bp, synthetic construct
  source 1..17: mol_type = other DNA
aggcccgcgtcgtggca

SEQ ID NO: 163253 - DNA, 17 bp, synthetic construct
  source 1..17: mol_type = other DNA
caggcccgcgtcgtggc

SEQ ID NO: 163254 - DNA, 17 bp, synthetic construct
  source 1..17: mol_type = other DNA
acaggcccgcgtcgtgg

SEQ ID NO: 163255 - DNA, 17 bp, synthetic construct
  source 1..17: mol_type = other DNA
cacaggcccgcgtcgtg

SEQ ID NO: 163256 - DNA, 17 bp, synthetic construct
  source 1..17: mol_type = other DNA
acacaggcccgcgtcgt

SEQ ID NO: 163257 - DNA, 17 bp, synthetic construct
  source 1..17: mol_type = other DNA
cacacaggcccgcgtcg

SEQ ID NO: 163258 - DNA, 17 bp, synthetic construct
  source 1..17: mol_type = other DNA
acacacaggcccgcgtc

SEQ ID NO: 163259 - DNA, 17 bp, synthetic construct
  source 1..17: mol_type = other DNA
cacacacaggcccgcgt

SEQ ID NO: 163260 - DNA, 17 bp, synthetic construct
  source 1..17: mol_type = other DNA
acacacacaggcccgcg

SEQ ID NO: 163261 - DNA, 17 bp, synthetic construct
  source 1..17: mol_type = other DNA
gacacacacaggcccgc

SEQ ID NO: 163262 - DNA, 17 bp, synthetic construct
  source 1..17: mol_type = other DNA
ggacacacacaggcccg

SEQ ID NO: 163263 - DNA, 17 bp, synthetic construct
  source 1..17: mol_type = other DNA
aggacacacacaggccc

SEQ ID NO: 163264 - DNA, 17 bp, synthetic construct
  source 1..17: mol_type = other DNA
caggacacacacaggcc

SEQ ID NO: 163265 - DNA, 17 bp, synthetic construct
  source 1..17: mol_type = other DNA
ccaggacacacacaggc

SEQ ID NO: 163266 - DNA, 17 bp, synthetic construct
  source 1..17: mol_type = other DNA
gccaggacacacacagg

SEQ ID NO: 163267 - DNA, 17 bp, synthetic construct
  source 1..17: mol_type = other DNA
cgccaggacacacacag

SEQ ID NO: 163268 - DNA, 17 bp, synthetic construct
  source 1..17: mol_type = other DNA
ccgccaggacacacaca

SEQ ID NO: 163269 - DNA, 17 bp, synthetic construct
  source 1..17: mol_type = other DNA
tccgccaggacacacac

SEQ ID NO: 163270 - DNA, 17 bp, synthetic construct
  source 1..17: mol_type = other DNA
gtccgccaggacacaca

SEQ ID NO: 163271 - DNA, 17 bp, synthetic construct
  source 1..17: mol_type = other DNA
agtccgccaggacacac

SEQ ID NO: 163272 - DNA, 17 bp, synthetic construct
  source 1..17: mol_type = other DNA
gagtccgccaggacaca

SEQ ID NO: 163273 - DNA, 17 bp, synthetic construct
  source 1..17: mol_type = other DNA
ggagtccgccaggacac

SEQ ID NO: 163274 - DNA, 17 bp, synthetic construct
  source 1..17: mol_type = other DNA
cggagtccgccaggaca

SEQ ID NO: 163275 - DNA, 17 bp, synthetic construct
  source 1..17: mol_type = other DNA
ccggagtccgccaggac

SEQ ID NO: 163276 - DNA, 17 bp, synthetic construct
  source 1..17: mol_type = other DNA
tccggagtccgccagga

SEQ ID NO: 163277 - DNA, 17 bp, synthetic construct
  source 1..17: mol_type = other DNA
gtccggagtccgccagg

SEQ ID NO: 163278 - DNA, 17 bp, synthetic construct
  source 1..17: mol_type = other DNA
tgtccggagtccgccag

SEQ ID NO: 163279 - DNA, 17 bp, synthetic construct
  source 1..17: mol_type = other DNA
gtgtccggagtccgcca

SEQ ID NO: 163280 - DNA, 17 bp, synthetic construct
  source 1..17: mol_type = other DNA
ggtgtccggagtccgcc

SEQ ID NO: 163281 - DNA, 17 bp, synthetic construct
  source 1..17: mol_type = other DNA
aggtgtccggagtccgc

SEQ ID NO: 163282 - DNA, 17 bp, synthetic construct
  source 1..17: mol_type = other DNA
caggtgtccggagtccg

SEQ ID NO: 163283 - DNA, 17 bp, synthetic construct
  source 1..17: mol_type = other DNA
gcaggtgtccggagtcc

SEQ ID NO: 163284 - DNA, 17 bp, synthetic construct
  source 1..17: mol_type = other DNA
ggcaggtgtccggagtc

SEQ ID NO: 163285 - DNA, 17 bp, synthetic construct
  source 1..17: mol_type = other DNA
cggcaggtgtccggagt

SEQ ID NO: 163286 - DNA, 17 bp, synthetic construct
  source 1..17: mol_type = other DNA
acggcaggtgtccggag

SEQ ID NO: 163287 - DNA, 17 bp, synthetic construct
  source 1..17: mol_type = other DNA
cacggcaggtgtccgga

SEQ ID NO: 163288 - DNA, 17 bp, synthetic construct
  source 1..17: mol_type = other DNA
tcacggcaggtgtccgg

SEQ ID NO: 163289 - DNA, 17 bp, synthetic construct
  source 1..17: mol_type = other DNA
ctcacggcaggtgtccg

SEQ ID NO: 163290 - DNA, 17 bp, synthetic construct
  source 1..17: mol_type = other DNA
actcacggcaggtgtcc

SEQ ID NO: 163291 - DNA, 17 bp, synthetic construct
  source 1..17: mol_type = other DNA
gactcacggcaggtgtc

SEQ ID NO: 163292 - DNA, 17 bp, synthetic construct
  source 1..17: mol_type = other DNA
cgactcacggcaggtgt

SEQ ID NO: 163293 - DNA, 17 bp, synthetic construct
  source 1..17: mol_type = other DNA
ccgactcacggcaggtg

SEQ ID NO: 163294 - DNA, 17 bp, synthetic construct
  source 1..17: mol_type = other DNA
cccgactcacggcaggt

SEQ ID NO: 163295 - DNA, 17 bp, synthetic construct
  source 1..17: mol_type = other DNA
gcccgactcacggcagg

SEQ ID NO: 163296 - DNA, 17 bp, synthetic construct
  source 1..17: mol_type = other DNA
agcccgactcacggcag

SEQ ID NO: 163297 - DNA, 17 bp, synthetic construct
  source 1..17: mol_type = other DNA
gagcccgactcacggca

SEQ ID NO: 163298 - DNA, 17 bp, synthetic construct
  source 1..17: mol_type = other DNA
agagcccgactcacggc

SEQ ID NO: 163299 - DNA, 17 bp, synthetic construct
  source 1..17: mol_type = other DNA
cagagcccgactcacgg

SEQ ID NO: 163300 - DNA, 17 bp, synthetic construct
  source 1..17: mol_type = other DNA
acagagcccgactcacg

SEQ ID NO: 163301 - DNA, 17 bp, synthetic construct
  source 1..17: mol_type = other DNA
gacagagcccgactcac

SEQ ID NO: 163302 - DNA, 17 bp, synthetic construct
  source 1..17: mol_type = other DNA
ggacagagcccgactca

SEQ ID NO: 163303 - DNA, 17 bp, synthetic construct
  source 1..17: mol_type = other DNA
cggacagagcccgactc

SEQ ID NO: 163304 - DNA, 17 bp, synthetic construct
  source 1..17: mol_type = other DNA
acggacagagcccgact

SEQ ID NO: 163305 - DNA, 17 bp, synthetic construct
  source 1..17: mol_type = other DNA
cacggacagagcccgac

SEQ ID NO: 163306 - DNA, 17 bp, synthetic construct
  source 1..17: mol_type = other DNA
ccacggacagagcccga

SEQ ID NO: 163307 - DNA, 17 bp, synthetic construct
  source 1..17: mol_type = other DNA
accacggacagagcccg

SEQ ID NO: 163308 - DNA, 17 bp, synthetic construct
  source 1..17: mol_type = other DNA
caccacggacagagccc

SEQ ID NO: 163309 - DNA, 17 bp, synthetic construct
  source 1..17: mol_type = other DNA
gcaccacggacagagcc

SEQ ID NO: 163310 - DNA, 17 bp, synthetic construct
  source 1..17: mol_type = other DNA
agcaccacggacagagc

SEQ ID NO: 163311 - DNA, 17 bp, synthetic construct
  source 1..17: mol_type = other DNA
cagcaccacggacagag

SEQ ID NO: 163312 - DNA, 17 bp, synthetic construct
  source 1..17: mol_type = other DNA
tcagcaccacggacaga

SEQ ID NO: 163313 - DNA, 17 bp, synthetic construct
  source 1..17: mol_type = other DNA
ttcagcaccacggacag

SEQ ID NO: 163314 - DNA, 17 bp, synthetic construct
  source 1..17: mol_type = other DNA
cttcagcaccacggaca

SEQ ID NO: 163315 - DNA, 17 bp, synthetic construct
  source 1..17: mol_type = other DNA
ccttcagcaccacggac

SEQ ID NO: 163316 - DNA, 17 bp, synthetic construct
  source 1..17: mol_type = other DNA
cccttcagcaccacgga

SEQ ID NO: 163317 - DNA, 17 bp, synthetic construct
  source 1..17: mol_type = other DNA
acccttcagcaccacgg

SEQ ID NO: 163318 - DNA, 17 bp, synthetic construct
  source 1..17: mol_type = other DNA
cacccttcagcaccacg

SEQ ID NO: 163319 - DNA, 17 bp, synthetic construct
  source 1..17: mol_type = other DNA
ccacccttcagcaccac

SEQ ID NO: 163320 - DNA, 17 bp, synthetic construct
  source 1..17: mol_type = other DNA
tccacccttcagcacca

SEQ ID NO: 163321 - DNA, 17 bp, synthetic construct
  source 1..17: mol_type = other DNA
ctccacccttcagcacc

SEQ ID NO: 163322 - DNA, 17 bp, synthetic construct
  source 1..17: mol_type = other DNA
gctccacccttcagcac

SEQ ID NO: 163323 - DNA, 17 bp, synthetic construct
  source 1..17: mol_type = other DNA
agctccacccttcagca

SEQ ID NO: 163324 - DNA, 17 bp, synthetic construct
  source 1..17: mol_type = other DNA
cagctccacccttcagc

SEQ ID NO: 163325 - DNA, 17 bp, synthetic construct
  source 1..17: mol_type = other DNA
gcagctccacccttcag

SEQ ID NO: 163326 - DNA, 17 bp, synthetic construct
  source 1..17: mol_type = other DNA
agcagctccacccttca

SEQ ID NO: 163327 - DNA, 17 bp, synthetic construct
  source 1..17: mol_type = other DNA
cagcagctccacccttc

SEQ ID NO: 163328 - DNA, 17 bp, synthetic construct
  source 1..17: mol_type = other DNA
ccagcagctccaccctt

SEQ ID NO: 163329 - DNA, 17 bp, synthetic construct
  source 1..17: mol_type = other DNA
cccagcagctccaccct

SEQ ID NO: 163330 - DNA, 17 bp, synthetic construct
  source 1..17: mol_type = other DNA
ccccagcagctccaccc

SEQ ID NO: 163331 - DNA, 17 bp, synthetic construct
  source 1..17: mol_type = other DNA
gccccagcagctccacc

SEQ ID NO: 163332 - DNA, 17 bp, synthetic construct
  source 1..17: mol_type = other DNA
tgccccagcagctccac

SEQ ID NO: 163333 - DNA, 17 bp, synthetic construct
  source 1..17: mol_type = other DNA
ctgccccagcagctcca

SEQ ID NO: 163334 - DNA, 17 bp, synthetic construct
  source 1..17: mol_type = other DNA
cctgccccagcagctcc

SEQ ID NO: 163335 - DNA, 17 bp, synthetic construct
  source 1..17: mol_type = other DNA
ccctgccccagcagctc

SEQ ID NO: 163336 - DNA, 17 bp, synthetic construct
  source 1..17: mol_type = other DNA
cccctgccccagcagct

SEQ ID NO: 163337 - DNA, 17 bp, synthetic construct
  source 1..17: mol_type = other DNA
tcccctgccccagcagc

SEQ ID NO: 163338 - DNA, 17 bp, synthetic construct
  source 1..17: mol_type = other DNA
ctcccctgccccagcag

SEQ ID NO: 163339 - DNA, 17 bp, synthetic construct
  source 1..17: mol_type = other DNA
cctcccctgccccagca

SEQ ID NO: 163340 - DNA, 17 bp, synthetic construct
  source 1..17: mol_type = other DNA
tcctcccctgccccagc

SEQ ID NO: 163341 - DNA, 17 bp, synthetic construct
  source 1..17: mol_type = other DNA
ctcctcccctgccccag

SEQ ID NO: 163342 - DNA, 17 bp, synthetic construct
  source 1..17: mol_type = other DNA
cctcctcccctgcccca

SEQ ID NO: 163343 - DNA, 17 bp, synthetic construct
  source 1..17: mol_type = other DNA
acctcctcccctgcccc

SEQ ID NO: 163344 - DNA, 17 bp, synthetic construct
  source 1..17: mol_type = other DNA
cacctcctcccctgccc

SEQ ID NO: 163345 - DNA, 17 bp, synthetic construct
  source 1..17: mol_type = other DNA
acacctcctcccctgcc

SEQ ID NO: 163346 - DNA, 17 bp, synthetic construct
  source 1..17: mol_type = other DNA
cacacctcctcccctgc

SEQ ID NO: 163347 - DNA, 17 bp, synthetic construct
  source 1..17: mol_type = other DNA
ccacacctcctcccctg

SEQ ID NO: 163348 - DNA, 17 bp, synthetic construct
  source 1..17: mol_type = other DNA
gccacacctcctcccct

SEQ ID NO: 163349 - DNA, 17 bp, synthetic construct
  source 1..17: mol_type = other DNA
tgccacacctcctcccc

SEQ ID NO: 163350 - DNA, 17 bp, synthetic construct
  source 1..17: mol_type = other DNA
ctgccacacctcctccc

SEQ ID NO: 163351 - DNA, 17 bp, synthetic construct
  source 1..17: mol_type = other DNA
gctgccacacctcctcc

SEQ ID NO: 163352 - DNA, 17 bp, synthetic construct
  source 1..17: mol_type = other DNA
ggctgccacacctcctc

SEQ ID NO: 163353 - DNA, 17 bp, synthetic construct
  source 1..17: mol_type = other DNA
aggctgccacacctcct

SEQ ID NO: 163354 - DNA, 17 bp, synthetic construct
  source 1..17: mol_type = other DNA
gaggctgccacacctcc

SEQ ID NO: 163355 - DNA, 17 bp, synthetic construct
  source 1..17: mol_type = other DNA
ggaggctgccacacctc

SEQ ID NO: 163356 - DNA, 17 bp, synthetic construct
  source 1..17: mol_type = other DNA
cggaggctgccacacct

SEQ ID NO: 163357 - DNA, 17 bp, synthetic construct
  source 1..17: mol_type = other DNA
tcggaggctgccacacc

SEQ ID NO: 163358 - DNA, 17 bp, synthetic construct
  source 1..17: mol_type = other DNA
ttcggaggctgccacac

SEQ ID NO: 163359 - DNA, 17 bp, synthetic construct
  source 1..17: mol_type = other DNA
cttcggaggctgccaca

SEQ ID NO: 163360 - DNA, 17 bp, synthetic construct
  source 1..17: mol_type = other DNA
ccttcggaggctgccac

SEQ ID NO: 163361 - DNA, 17 bp, synthetic construct
  source 1..17: mol_type = other DNA
accttcggaggctgcca

SEQ ID NO: 163362 - DNA, 17 bp, synthetic construct
  source 1..17: mol_type = other DNA
caccttcggaggctgcc

SEQ ID NO: 163363 - DNA, 17 bp, synthetic construct
  source 1..17: mol_type = other DNA
gcaccttcggaggctgc

SEQ ID NO: 163364 - DNA, 17 bp, synthetic construct
  source 1..17: mol_type = other DNA
tgcaccttcggaggctg

SEQ ID NO: 163365 - DNA, 17 bp, synthetic construct
  source 1..17: mol_type = other DNA
atgcaccttcggaggct

SEQ ID NO: 163366 - DNA, 17 bp, synthetic construct
  source 1..17: mol_type = other DNA
aatgcaccttcggaggc

SEQ ID NO: 163367 - DNA, 17 bp, synthetic construct
  source 1..17: mol_type = other DNA
caatgcaccttcggagg

SEQ ID NO: 163368 - DNA, 17 bp, synthetic construct
  source 1..17: mol_type = other DNA
tcaatgcaccttcggag

SEQ ID NO: 163369 - DNA, 17 bp, synthetic construct
  source 1..17: mol_type = other DNA
gtcaatgcaccttcgga

SEQ ID NO: 163370 - DNA, 17 bp, synthetic construct
  source 1..17: mol_type = other DNA
ggtcaatgcaccttcgg

SEQ ID NO: 163371 - DNA, 17 bp, synthetic construct
  source 1..17: mol_type = other DNA
aggtcaatgcaccttcg

SEQ ID NO: 163372 - DNA, 17 bp, synthetic construct
  source 1..17: mol_type = other DNA
caggtcaatgcaccttc

SEQ ID NO: 163373 - DNA, 17 bp, synthetic construct
  source 1..17: mol_type = other DNA
ccaggtcaatgcacctt

SEQ ID NO: 163374 - DNA, 17 bp, synthetic construct
  source 1..17: mol_type = other DNA
cccaggtcaatgcacct

SEQ ID NO: 163375 - DNA, 17 bp, synthetic construct
  source 1..17: mol_type = other DNA
gcccaggtcaatgcacc

SEQ ID NO: 163376 - DNA, 17 bp, synthetic construct
  source 1..17: mol_type = other DNA
ggcccaggtcaatgcac

SEQ ID NO: 163377 - DNA, 17 bp, synthetic construct
  source 1..17: mol_type = other DNA
aggcccaggtcaatgca

SEQ ID NO: 163378 - DNA, 17 bp, synthetic construct
  source 1..17: mol_type = other DNA
caggcccaggtcaatgc

SEQ ID NO: 163379 - DNA, 17 bp, synthetic construct
  source 1..17: mol_type = other DNA
tcaggcccaggtcaatg

SEQ ID NO: 163380 - DNA, 17 bp, synthetic construct
  source 1..17: mol_type = other DNA
ctcaggcccaggtcaat

SEQ ID NO: 163381 - DNA, 17 bp, synthetic construct
  source 1..17: mol_type = other DNA
gctcaggcccaggtcaa

SEQ ID NO: 163382 - DNA, 17 bp, synthetic construct
  source 1..17: mol_type = other DNA
ggctcaggcccaggtca

SEQ ID NO: 163383 - DNA, 17 bp, synthetic construct
  source 1..17: mol_type = other DNA
cggctcaggcccaggtc

SEQ ID NO: 163384 - DNA, 17 bp, synthetic construct
  source 1..17: mol_type = other DNA
gcggctcaggcccaggt

SEQ ID NO: 163385 - DNA, 17 bp, synthetic construct
  source 1..17: mol_type = other DNA
tgcggctcaggcccagg

SEQ ID NO: 163386 - DNA, 17 bp, synthetic construct
  source 1..17: mol_type = other DNA
gtgcggctcaggcccag

SEQ ID NO: 163387 - DNA, 17 bp, synthetic construct
  source 1..17: mol_type = other DNA
tgtgcggctcaggccca

SEQ ID NO: 163388 - DNA, 17 bp, synthetic construct
  source 1..17: mol_type = other DNA
gtgtgcggctcaggccc

SEQ ID NO: 163389 - DNA, 17 bp, synthetic construct
  source 1..17: mol_type = other DNA
tgtgtgcggctcaggcc

SEQ ID NO: 163390 - DNA, 17 bp, synthetic construct
  source 1..17: mol_type = other DNA
ctgtgtgcggctcaggc

SEQ ID NO: 163391 - DNA, 17 bp, synthetic construct
  source 1..17: mol_type = other DNA
tctgtgtgcggctcagg

SEQ ID NO: 163392 - DNA, 17 bp, synthetic construct
  source 1..17: mol_type = other DNA
gtctgtgtgcggctcag

SEQ ID NO: 163393 - DNA, 17 bp, synthetic construct
  source 1..17: mol_type = other DNA
tgtctgtgtgcggctca

SEQ ID NO: 163394 - DNA, 17 bp, synthetic construct
  source 1..17: mol_type = other DNA
atgtctgtgtgcggctc

SEQ ID NO: 163395 - DNA, 17 bp, synthetic construct
  source 1..17: mol_type = other DNA
gatgtctgtgtgcggct

SEQ ID NO: 163396 - DNA, 17 bp, synthetic construct
  source 1..17: mol_type = other DNA
ggatgtctgtgtgcggc

SEQ ID NO: 163397 - DNA, 17 bp, synthetic construct
  source 1..17: mol_type = other DNA
tggatgtctgtgtgcgg

SEQ ID NO: 163398 - DNA, 17 bp, synthetic construct
  source 1..17: mol_type = other DNA
ttggatgtctgtgtgcg

SEQ ID NO: 163399 - DNA, 17 bp, synthetic construct
  source 1..17: mol_type = other DNA
gttggatgtctgtgtgc

SEQ ID NO: 163400 - DNA, 17 bp, synthetic construct
  source 1..17: mol_type = other DNA
tgttggatgtctgtgtg

SEQ ID NO: 163401 - DNA, 17 bp, synthetic construct
  source 1..17: mol_type = other DNA
gtgttggatgtctgtgt

SEQ ID NO: 163402 - DNA, 17 bp, synthetic construct
  source 1..17: mol_type = other DNA
cgtgttggatgtctgtg

SEQ ID NO: 163403 - DNA, 17 bp, synthetic construct
  source 1..17: mol_type = other DNA
gcgtgttggatgtctgt

SEQ ID NO: 163404 - DNA, 17 bp, synthetic construct
  source 1..17: mol_type = other DNA
tgcgtgttggatgtctg

SEQ ID NO: 163405 - DNA, 17 bp, synthetic construct
  source 1..17: mol_type = other DNA
atgcgtgttggatgtct

SEQ ID NO: 163406 - DNA, 17 bp, synthetic construct
  source 1..17: mol_type = other DNA
catgcgtgttggatgtc

SEQ ID NO: 163407 - DNA, 17 bp, synthetic construct
  source 1..17: mol_type = other DNA
acatgcgtgttggatgt

SEQ ID NO: 163408 - DNA, 17 bp, synthetic construct
  source 1..17: mol_type = other DNA
cacatgcgtgttggatg

SEQ ID NO: 163409 - DNA, 17 bp, synthetic construct
  source 1..17: mol_type = other DNA
gcacatgcgtgttggat

SEQ ID NO: 163410 - DNA, 17 bp, synthetic construct
  source 1..17: mol_type = other DNA
ggcacatgcgtgttgga

SEQ ID NO: 163411 - DNA, 17 bp, synthetic construct
  source 1..17: mol_type = other DNA
aggcacatgcgtgttgg

SEQ ID NO: 163412 - DNA, 17 bp, synthetic construct
  source 1..17: mol_type = other DNA
gaggcacatgcgtgttg

SEQ ID NO: 163413 - DNA, 17 bp, synthetic construct
  source 1..17: mol_type = other DNA
ggaggcacatgcgtgtt

SEQ ID NO: 163414 - DNA, 17 bp, synthetic construct
  source 1..17: mol_type = other DNA
tggaggcacatgcgtgt

SEQ ID NO: 163415 - DNA, 17 bp, synthetic construct
  source 1..17: mol_type = other DNA
atggaggcacatgcgtg

SEQ ID NO: 163416 - DNA, 17 bp, synthetic construct
  source 1..17: mol_type = other DNA
catggaggcacatgcgt

SEQ ID NO: 163417 - DNA, 17 bp, synthetic construct
  source 1..17: mol_type = other DNA
acatggaggcacatgcg

SEQ ID NO: 163418 - DNA, 17 bp, synthetic construct
  source 1..17: mol_type = other DNA
cacatggaggcacatgc

SEQ ID NO: 163419 - DNA, 17 bp, synthetic construct
  source 1..17: mol_type = other DNA
tcacatggaggcacatg

SEQ ID NO: 163420 - DNA, 17 bp, synthetic construct
  source 1..17: mol_type = other DNA
ctcacatggaggcacat

SEQ ID NO: 163421 - DNA, 17 bp, synthetic construct
  source 1..17: mol_type = other DNA
actcacatggaggcaca

SEQ ID NO: 163422 - DNA, 17 bp, synthetic construct
  source 1..17: mol_type = other DNA
cactcacatggaggcac

SEQ ID NO: 163423 - DNA, 17 bp, synthetic construct
  source 1..17: mol_type = other DNA
gcactcacatggaggca

SEQ ID NO: 163424 - DNA, 17 bp, synthetic construct
  source 1..17: mol_type = other DNA
tgcactcacatggaggc

SEQ ID NO: 163425 - DNA, 17 bp, synthetic construct
  source 1..17: mol_type = other DNA
gtgcactcacatggagg

SEQ ID NO: 163426 - DNA, 17 bp, synthetic construct
  source 1..17: mol_type = other DNA
tgtgcactcacatggag

SEQ ID NO: 163427 - DNA, 17 bp, synthetic construct
  source 1..17: mol_type = other DNA
ttgtgcactcacatgga

SEQ ID NO: 163428 - DNA, 17 bp, synthetic construct
  source 1..17: mol_type = other DNA
cttgtgcactcacatgg

SEQ ID NO: 163429 - DNA, 17 bp, synthetic construct
  source 1..17: mol_type = other DNA
acttgtgcactcacatg

SEQ ID NO: 163430 - DNA, 17 bp, synthetic construct
  source 1..17: mol_type = other DNA
aacttgtgcactcacat

SEQ ID NO: 163431 - DNA, 17 bp, synthetic construct
  source 1..17: mol_type = other DNA
aaacttgtgcactcaca

SEQ ID NO: 163432 - DNA, 17 bp, synthetic construct
  source 1..17: mol_type = other DNA
gaaacttgtgcactcac

SEQ ID NO: 163433 - DNA, 17 bp, synthetic construct
  source 1..17: mol_type = other DNA
agaaacttgtgcactca

SEQ ID NO: 163434 - DNA, 17 bp, synthetic construct
  source 1..17: mol_type = other DNA
tagaaacttgtgcactc

SEQ ID NO: 163435 - DNA, 17 bp, synthetic construct
  source 1..17: mol_type = other DNA
atagaaacttgtgcact

SEQ ID NO: 163436 - DNA, 17 bp, synthetic construct
  source 1..17: mol_type = other DNA
catagaaacttgtgcac

SEQ ID NO: 163437 - DNA, 17 bp, synthetic construct
  source 1..17: mol_type = other DNA
gcatagaaacttgtgca

SEQ ID NO: 163438 - DNA, 17 bp, synthetic construct
  source 1..17: mol_type = other DNA
tgcatagaaacttgtgc

SEQ ID NO: 163439 - DNA, 17 bp, synthetic construct
  source 1..17: mol_type = other DNA
gtgcatagaaacttgtg

SEQ ID NO: 163440 - DNA, 17 bp, synthetic construct
  source 1..17: mol_type = other DNA
tgtgcatagaaacttgt

SEQ ID NO: 163441 - DNA, 17 bp, synthetic construct
  source 1..17: mol_type = other DNA
ctgtgcatagaaacttg

SEQ ID NO: 163442 - DNA, 17 bp, synthetic construct
  source 1..17: mol_type = other DNA
tctgtgcatagaaactt

SEQ ID NO: 163443 - DNA, 17 bp, synthetic construct
  source 1..17: mol_type = other DNA
ctctgtgcatagaaact

SEQ ID NO: 163444 - DNA, 17 bp, synthetic construct
  source 1..17: mol_type = other DNA
cctctgtgcatagaaac

SEQ ID NO: 163445 - DNA, 17 bp, synthetic construct
  source 1..17: mol_type = other DNA
tcctctgtgcatagaaa

SEQ ID NO: 163446 - DNA, 17 bp, synthetic construct
  source 1..17: mol_type = other DNA
ttcctctgtgcatagaa

SEQ ID NO: 163447 - DNA, 17 bp, synthetic construct
  source 1..17: mol_type = other DNA
cttcctctgtgcataga

SEQ ID NO: 163448 - DNA, 17 bp, synthetic construct
  source 1..17: mol_type = other DNA
tcttcctctgtgcatag

SEQ ID NO: 163449 - DNA, 17 bp, synthetic construct
  source 1..17: mol_type = other DNA
gtcttcctctgtgcata

SEQ ID NO: 163450 - DNA, 17 bp, synthetic construct
  source 1..17: mol_type = other DNA
ggtcttcctctgtgcat

SEQ ID NO: 163451 - DNA, 17 bp, synthetic construct
  source 1..17: mol_type = other DNA
aggtcttcctctgtgca

SEQ ID NO: 163452 - DNA, 17 bp, synthetic construct
  source 1..17: mol_type = other DNA
caggtcttcctctgtgc

SEQ ID NO: 163453 - DNA, 17 bp, synthetic construct
  source 1..17: mol_type = other DNA
acaggtcttcctctgtg

SEQ ID NO: 163454 - DNA, 17 bp, synthetic construct
  source 1..17: mol_type = other DNA
cacaggtcttcctctgt

SEQ ID NO: 163455 - DNA, 17 bp, synthetic construct
  source 1..17: mol_type = other DNA
gcacaggtcttcctctg

SEQ ID NO: 163456 - DNA, 17 bp, synthetic construct
  source 1..17: mol_type = other DNA
tgcacaggtcttcctct

SEQ ID NO: 163457 - DNA, 17 bp, synthetic construct
  source 1..17: mol_type = other DNA
ttgcacaggtcttcctc

SEQ ID NO: 163458 - DNA, 17 bp, synthetic construct
  source 1..17: mol_type = other DNA
tttgcacaggtcttcct

SEQ ID NO: 163459 - DNA, 17 bp, synthetic construct
  source 1..17: mol_type = other DNA
ttttgcacaggtcttcc

SEQ ID NO: 163460 - DNA, 17 bp, synthetic construct
  source 1..17: mol_type = other DNA
gttttgcacaggtcttc

SEQ ID NO: 163461 - DNA, 17 bp, synthetic construct
  source 1..17: mol_type = other DNA
ggttttgcacaggtctt

SEQ ID NO: 163462 - DNA, 17 bp, synthetic construct
  source 1..17: mol_type = other DNA
tggttttgcacaggtct

SEQ ID NO: 163463 - DNA, 17 bp, synthetic construct
  source 1..17: mol_type = other DNA
gtggttttgcacaggtc

SEQ ID NO: 163464 - DNA, 17 bp, synthetic construct
  source 1..17: mol_type = other DNA
ggtggttttgcacaggt

SEQ ID NO: 163465 - DNA, 17 bp, synthetic construct
  source 1..17: mol_type = other DNA
tggtggttttgcacagg

SEQ ID NO: 163466 - DNA, 17 bp, synthetic construct
  source 1..17: mol_type = other DNA
ctggtggttttgcacag

SEQ ID NO: 163467 - DNA, 17 bp, synthetic construct
  source 1..17: mol_type = other DNA
tctggtggttttgcaca

SEQ ID NO: 163468 - DNA, 17 bp, synthetic construct
  source 1..17: mol_type = other DNA
gtctggtggttttgcac

SEQ ID NO: 163469 - DNA, 17 bp, synthetic construct
  source 1..17: mol_type = other DNA
tgtctggtggttttgca

SEQ ID NO: 163470 - DNA, 17 bp, synthetic construct
  source 1..17: mol_type = other DNA
ctgtctggtggttttgc

SEQ ID NO: 163471 - DNA, 17 bp, synthetic construct
  source 1..17: mol_type = other DNA
cctgtctggtggttttg

SEQ ID NO: 163472 - DNA, 17 bp, synthetic construct
  source 1..17: mol_type = other DNA
acctgtctggtggtttt

SEQ ID NO: 163473 - DNA, 17 bp, synthetic construct
  source 1..17: mol_type = other DNA
aacctgtctggtggttt

SEQ ID NO: 163474 - DNA, 17 bp, synthetic construct
  source 1..17: mol_type = other DNA
caacctgtctggtggtt

SEQ ID NO: 163475 - DNA, 17 bp, synthetic construct
  source 1..17: mol_type = other DNA
gcaacctgtctggtggt

SEQ ID NO: 163476 - DNA, 17 bp, synthetic construct
  source 1..17: mol_type = other DNA
ggcaacctgtctggtgg

SEQ ID NO: 163477 - DNA, 17 bp, synthetic construct
  source 1..17: mol_type = other DNA
gggcaacctgtctggtg

SEQ ID NO: 163478 - DNA, 17 bp, synthetic construct
  source 1..17: mol_type = other DNA
ggggcaacctgtctggt

SEQ ID NO: 163479 - DNA, 17 bp, synthetic construct
  source 1..17: mol_type = other DNA
tggggcaacctgtctgg

SEQ ID NO: 163480 - DNA, 17 bp, synthetic construct
  source 1..17: mol_type = other DNA
ctggggcaacctgtctg

SEQ ID NO: 163481 - DNA, 17 bp, synthetic construct
  source 1..17: mol_type = other DNA
gctggggcaacctgtct

SEQ ID NO: 163482 - DNA, 17 bp, synthetic construct
  source 1..17: mol_type = other DNA
tgctggggcaacctgtc

SEQ ID NO: 163483 - DNA, 17 bp, synthetic construct
  source 1..17: mol_type = other DNA
atgctggggcaacctgt

SEQ ID NO: 163484 - DNA, 17 bp, synthetic construct
  source 1..17: mol_type = other DNA
catgctggggcaacctg

SEQ ID NO: 163485 - DNA, 17 bp, synthetic construct
  source 1..17: mol_type = other DNA
tcatgctggggcaacct

SEQ ID NO: 163486 - DNA, 17 bp, synthetic construct
  source 1..17: mol_type = other DNA
ctcatgctggggcaacc

SEQ ID NO: 163487 - DNA, 17 bp, synthetic construct
  source 1..17: mol_type = other DNA
tctcatgctggggcaac

SEQ ID NO: 163488 - DNA, 17 bp, synthetic construct
  source 1..17: mol_type = other DNA
gtctcatgctggggcaa

SEQ ID NO: 163489 - DNA, 17 bp, synthetic construct
  source 1..17: mol_type = other DNA
tgtctcatgctggggca

SEQ ID NO: 163490 - DNA, 17 bp, synthetic construct
  source 1..17: mol_type = other DNA
ctgtctcatgctggggc

SEQ ID NO: 163491 - DNA, 17 bp, synthetic construct
  source 1..17: mol_type = other DNA
gctgtctcatgctgggg

SEQ ID NO: 163492 - DNA, 17 bp, synthetic construct
  source 1..17: mol_type = other DNA
agctgtctcatgctggg

SEQ ID NO: 163493 - DNA, 17 bp, synthetic construct
  source 1..17: mol_type = other DNA
gagctgtctcatgctgg

SEQ ID NO: 163494 - DNA, 17 bp, synthetic construct
  source 1..17: mol_type = other DNA
ggagctgtctcatgctg

SEQ ID NO: 163495 - DNA, 17 bp, synthetic construct
  source 1..17: mol_type = other DNA
aggagctgtctcatgct

SEQ ID NO: 163496 - DNA, 17 bp, synthetic construct
  source 1..17: mol_type = other DNA
taggagctgtctcatgc

SEQ ID NO: 163497 - DNA, 17 bp, synthetic construct
  source 1..17: mol_type = other DNA
ctaggagctgtctcatg

SEQ ID NO: 163498 - DNA, 17 bp, synthetic construct
  source 1..17: mol_type = other DNA
cctaggagctgtctcat

SEQ ID NO: 163499 - DNA, 17 bp, synthetic construct
  source 1..17: mol_type = other DNA
ccctaggagctgtctca

SEQ ID NO: 163500 - DNA, 17 bp, synthetic construct
  source 1..17: mol_type = other DNA
cccctaggagctgtctc

SEQ ID NO: 163501 - DNA, 17 bp, synthetic construct
  source 1..17: mol_type = other DNA
tcccctaggagctgtct

SEQ ID NO: 163502 - DNA, 17 bp, synthetic construct
  source 1..17: mol_type = other DNA
gtcccctaggagctgtc

SEQ ID NO: 163503 - DNA, 17 bp, synthetic construct
  source 1..17: mol_type = other DNA
tgtcccctaggagctgt

SEQ ID NO: 163504 - DNA, 17 bp, synthetic construct
  source 1..17: mol_type = other DNA
ttgtcccctaggagctg

SEQ ID NO: 163505 - DNA, 17 bp, synthetic construct
  source 1..17: mol_type = other DNA
cttgtcccctaggagct

SEQ ID NO: 163506 - DNA, 17 bp, synthetic construct
  source 1..17: mol_type = other DNA
tcttgtcccctaggagc

SEQ ID NO: 163507 - DNA, 17 bp, synthetic construct
  source 1..17: mol_type = other DNA
ctcttgtcccctaggag

SEQ ID NO: 163508 - DNA, 17 bp, synthetic construct
  source 1..17: mol_type = other DNA
actcttgtcccctagga

SEQ ID NO: 163509 - DNA, 17 bp, synthetic construct
  source 1..17: mol_type = other DNA
aactcttgtcccctagg

SEQ ID NO: 163510 - DNA, 17 bp, synthetic construct
  source 1..17: mol_type = other DNA
gaactcttgtcccctag

SEQ ID NO: 163511 - DNA, 17 bp, synthetic construct
  source 1..17: mol_type = other DNA
ggaactcttgtccccta

SEQ ID NO: 163512 - DNA, 17 bp, synthetic construct
  source 1..17: mol_type = other DNA
tggaactcttgtcccct

SEQ ID NO: 163513 - DNA, 17 bp, synthetic construct
  source 1..17: mol_type = other DNA
ttggaactcttgtcccc

SEQ ID NO: 163514 - DNA, 17 bp, synthetic construct
  source 1..17: mol_type = other DNA
cttggaactcttgtccc

SEQ ID NO: 163515 - DNA, 17 bp, synthetic construct
  source 1..17: mol_type = other DNA
ccttggaactcttgtcc

SEQ ID NO: 163516 - DNA, 17 bp, synthetic construct
  source 1..17: mol_type = other DNA
cccttggaactcttgtc

SEQ ID NO: 163517 - DNA, 17 bp, synthetic construct
  source 1..17: mol_type = other DNA
gcccttggaactcttgt

SEQ ID NO: 163518 - DNA, 17 bp, synthetic construct
  source 1..17: mol_type = other DNA
tgcccttggaactcttg

SEQ ID NO: 163519 - DNA, 17 bp, synthetic construct
  source 1..17: mol_type = other DNA
ctgcccttggaactctt

SEQ ID NO: 163520 - DNA, 17 bp, synthetic construct
  source 1..17: mol_type = other DNA
cctgcccttggaactct

SEQ ID NO: 163521 - DNA, 17 bp, synthetic construct
  source 1..17: mol_type = other DNA
ccctgcccttggaactc

SEQ ID NO: 163522 - DNA, 17 bp, synthetic construct
  source 1..17: mol_type = other DNA
gccctgcccttggaact

SEQ ID NO: 163523 - DNA, 17 bp, synthetic construct
  source 1..17: mol_type = other DNA
agccctgcccttggaac

SEQ ID NO: 163524 - DNA, 17 bp, synthetic construct
  source 1..17: mol_type = other DNA
cagccctgcccttggaa

SEQ ID NO: 163525 - DNA, 17 bp, synthetic construct
  source 1..17: mol_type = other DNA
ccagccctgcccttgga

SEQ ID NO: 163526 - DNA, 17 bp, synthetic construct
  source 1..17: mol_type = other DNA
cccagccctgcccttgg

SEQ ID NO: 163527 - DNA, 17 bp, synthetic construct
  source 1..17: mol_type = other DNA
ccccagccctgcccttg

SEQ ID NO: 163528 - DNA, 17 bp, synthetic construct
  source 1..17: mol_type = other DNA
tccccagccctgccctt

SEQ ID NO: 163529 - DNA, 17 bp, synthetic construct
  source 1..17: mol_type = other DNA
ctccccagccctgccct

SEQ ID NO: 163530 - DNA, 17 bp, synthetic construct
  source 1..17: mol_type = other DNA
actccccagccctgccc

SEQ ID NO: 163531 - DNA, 17 bp, synthetic construct
  source 1..17: mol_type = other DNA
cactccccagccctgcc

SEQ ID NO: 163532 - DNA, 17 bp, synthetic construct
  source 1..17: mol_type = other DNA
ccactccccagccctgc

SEQ ID NO: 163533 - DNA, 17 bp, synthetic construct
  source 1..17: mol_type = other DNA
tccactccccagccctg

SEQ ID NO: 163534 - DNA, 17 bp, synthetic construct
  source 1..17: mol_type = other DNA
ctccactccccagccct

SEQ ID NO: 163535 - DNA, 17 bp, synthetic construct
  source 1..17: mol_type = other DNA
cctccactccccagccc

SEQ ID NO: 163536 - DNA, 17 bp, synthetic construct
  source 1..17: mol_type = other DNA
ccctccactccccagcc

SEQ ID NO: 163537 - DNA, 17 bp, synthetic construct
  source 1..17: mol_type = other DNA
cccctccactccccagc

SEQ ID NO: 163538 - DNA, 17 bp, synthetic construct
  source 1..17: mol_type = other DNA
tcccctccactccccag

SEQ ID NO: 163539 - DNA, 17 bp, synthetic construct
  source 1..17: mol_type = other DNA
ttcccctccactcccca

SEQ ID NO: 163540 - DNA, 17 bp, synthetic construct
  source 1..17: mol_type = other DNA
cttcccctccactcccc

SEQ ID NO: 163541 - DNA, 17 bp, synthetic construct
  source 1..17: mol_type = other DNA
ccttcccctccactccc

SEQ ID NO: 163542 - DNA, 17 bp, synthetic construct
  source 1..17: mol_type = other DNA
accttcccctccactcc

SEQ ID NO: 163543 - DNA, 17 bp, synthetic construct
  source 1..17: mol_type = other DNA
caccttcccctccactc

SEQ ID NO: 163544 - DNA, 17 bp, synthetic construct
  source 1..17: mol_type = other DNA
tcaccttcccctccact

SEQ ID NO: 163545 - DNA, 17 bp, synthetic construct
  source 1..17: mol_type = other DNA
ctcaccttcccctccac

SEQ ID NO: 163546 - DNA, 17 bp, synthetic construct
  source 1..17: mol_type = other DNA
cctcaccttcccctcca

SEQ ID NO: 163547 - DNA, 17 bp, synthetic construct
  source 1..17: mol_type = other DNA
gcctcaccttcccctcc

SEQ ID NO: 163548 - DNA, 17 bp, synthetic construct
  source 1..17: mol_type = other DNA
tgcctcaccttcccctc

SEQ ID NO: 163549 - DNA, 17 bp, synthetic construct
  source 1..17: mol_type = other DNA
gtgcctcaccttcccct

SEQ ID NO: 163550 - DNA, 17 bp, synthetic construct
  source 1..17: mol_type = other DNA
ggtgcctcaccttcccc

SEQ ID NO: 163551 - DNA, 17 bp, synthetic construct
  source 1..17: mol_type = other DNA
tggtgcctcaccttccc

SEQ ID NO: 163552 - DNA, 17 bp, synthetic construct
  source 1..17: mol_type = other DNA
gtggtgcctcaccttcc

SEQ ID NO: 163553 - DNA, 17 bp, synthetic construct
  source 1..17: mol_type = other DNA
ggtggtgcctcaccttc

SEQ ID NO: 163554 - DNA, 17 bp, synthetic construct
  source 1..17: mol_type = other DNA
gggtggtgcctcacctt

SEQ ID NO: 163555 - DNA, 17 bp, synthetic construct
  source 1..17: mol_type = other DNA
cgggtggtgcctcacct

SEQ ID NO: 163556 - DNA, 17 bp, synthetic construct
  source 1..17: mol_type = other DNA
ccgggtggtgcctcacc

SEQ ID NO: 163557 - DNA, 17 bp, synthetic construct
  source 1..17: mol_type = other DNA
gccgggtggtgcctcac

SEQ ID NO: 163558 - DNA, 17 bp, synthetic construct
  source 1..17: mol_type = other DNA
ggccgggtggtgcctca

SEQ ID NO: 163559 - DNA, 17 bp, synthetic construct
  source 1..17: mol_type = other DNA
cggccgggtggtgcctc

SEQ ID NO: 163560 - DNA, 17 bp, synthetic construct
  source 1..17: mol_type = other DNA
tcggccgggtggtgcct

SEQ ID NO: 163561 - DNA, 17 bp, synthetic construct
  source 1..17: mol_type = other DNA
ctcggccgggtggtgcc

SEQ ID NO: 163562 - DNA, 17 bp, synthetic construct
  source 1..17: mol_type = other DNA
cctcggccgggtggtgc

SEQ ID NO: 163563 - DNA, 17 bp, synthetic construct
  source 1..17: mol_type = other DNA
gcctcggccgggtggtg

SEQ ID NO: 163564 - DNA, 17 bp, synthetic construct
  source 1..17: mol_type = other DNA
ggcctcggccgggtggt

SEQ ID NO: 163565 - DNA, 17 bp, synthetic construct
  source 1..17: mol_type = other DNA
gggcctcggccgggtgg

SEQ ID NO: 163566 - DNA, 17 bp, synthetic construct
  source 1..17: mol_type = other DNA
agggcctcggccgggtg

SEQ ID NO: 163567 - DNA, 17 bp, synthetic construct
  source 1..17: mol_type = other DNA
cagggcctcggccgggt

SEQ ID NO: 163568 - DNA, 17 bp, synthetic construct
  source 1..17: mol_type = other DNA
gcagggcctcggccggg

SEQ ID NO: 163569 - DNA, 17 bp, synthetic construct
  source 1..17: mol_type = other DNA
tgcagggcctcggccgg

SEQ ID NO: 163570 - DNA, 17 bp, synthetic construct
  source 1..17: mol_type = other DNA
atgcagggcctcggccg

SEQ ID NO: 163571 - DNA, 17 bp, synthetic construct
  source 1..17: mol_type = other DNA
catgcagggcctcggcc

SEQ ID NO: 163572 - DNA, 17 bp, synthetic construct
  source 1..17: mol_type = other DNA
acatgcagggcctcggc

SEQ ID NO: 163573 - DNA, 17 bp, synthetic construct
  source 1..17: mol_type = other DNA
gacatgcagggcctcgg

SEQ ID NO: 163574 - DNA, 17 bp, synthetic construct
  source 1..17: mol_type = other DNA
agacatgcagggcctcg

SEQ ID NO: 163575 - DNA, 17 bp, synthetic construct
  source 1..17: mol_type = other DNA
cagacatgcagggcctc

SEQ ID NO: 163576 - DNA, 17 bp, synthetic construct
  source 1..17: mol_type = other DNA
ccagacatgcagggcct

SEQ ID NO: 163577 - DNA, 17 bp, synthetic construct
  source 1..17: mol_type = other DNA
cccagacatgcagggcc

SEQ ID NO: 163578 - DNA, 17 bp, synthetic construct
  source 1..17: mol_type = other DNA
tcccagacatgcagggc

SEQ ID NO: 163579 - DNA, 17 bp, synthetic construct
  source 1..17: mol_type = other DNA
gtcccagacatgcaggg

SEQ ID NO: 163580 - DNA, 17 bp, synthetic construct
  source 1..17: mol_type = other DNA
tgtcccagacatgcagg

SEQ ID NO: 163581 - DNA, 17 bp, synthetic construct
  source 1..17: mol_type = other DNA
ttgtcccagacatgcag

SEQ ID NO: 163582 - DNA, 17 bp, synthetic construct
  source 1..17: mol_type = other DNA
cttgtcccagacatgca

SEQ ID NO: 163583 - DNA, 17 bp, synthetic construct
  source 1..17: mol_type = other DNA
gcttgtcccagacatgc

SEQ ID NO: 163584 - DNA, 17 bp, synthetic construct
  source 1..17: mol_type = other DNA
ggcttgtcccagacatg

SEQ ID NO: 163585 - DNA, 17 bp, synthetic construct
  source 1..17: mol_type = other DNA
gggcttgtcccagacat

SEQ ID NO: 163586 - DNA, 17 bp, synthetic construct
  source 1..17: mol_type = other DNA
cgggcttgtcccagaca

SEQ ID NO: 163587 - DNA, 17 bp, synthetic construct
  source 1..17: mol_type = other DNA
ccgggcttgtcccagac

SEQ ID NO: 163588 - DNA, 17 bp, synthetic construct
  source 1..17: mol_type = other DNA
cccgggcttgtcccaga

SEQ ID NO: 163589 - DNA, 17 bp, synthetic construct
  source 1..17: mol_type = other DNA
acccgggcttgtcccag

SEQ ID NO: 163590 - DNA, 17 bp, synthetic construct
  source 1..17: mol_type = other DNA
gacccgggcttgtccca

SEQ ID NO: 163591 - DNA, 17 bp, synthetic construct
  source 1..17: mol_type = other DNA
agacccgggcttgtccc

SEQ ID NO: 163592 - DNA, 17 bp, synthetic construct
  source 1..17: mol_type = other DNA
cagacccgggcttgtcc

SEQ ID NO: 163593 - DNA, 17 bp, synthetic construct
  source 1..17: mol_type = other DNA
ccagacccgggcttgtc

SEQ ID NO: 163594 - DNA, 17 bp, synthetic construct
  source 1..17: mol_type = other DNA
gccagacccgggcttgt

SEQ ID NO: 163595 - DNA, 17 bp, synthetic construct
  source 1..17: mol_type = other DNA
agccagacccgggcttg

SEQ ID NO: 163596 - DNA, 17 bp, synthetic construct
  source 1..17: mol_type = other DNA
gagccagacccgggctt

SEQ ID NO: 163597 - DNA, 17 bp, synthetic construct
  source 1..17: mol_type = other DNA
agagccagacccgggct

SEQ ID NO: 163598 - DNA, 17 bp, synthetic construct
  source 1..17: mol_type = other DNA
cagagccagacccgggc

SEQ ID NO: 163599 - DNA, 17 bp, synthetic construct
  source 1..17: mol_type = other DNA
ccagagccagacccggg

SEQ ID NO: 163600 - DNA, 17 bp, synthetic construct
  source 1..17: mol_type = other DNA
cccagagccagacccgg

SEQ ID NO: 163601 - DNA, 17 bp, synthetic construct
  source 1..17: mol_type = other DNA
ccccagagccagacccg

SEQ ID NO: 163602 - DNA, 17 bp, synthetic construct
  source 1..17: mol_type = other DNA
tccccagagccagaccc

SEQ ID NO: 163603 - DNA, 17 bp, synthetic construct
  source 1..17: mol_type = other DNA
gtccccagagccagacc

SEQ ID NO: 163604 - DNA, 17 bp, synthetic construct
  source 1..17: mol_type = other DNA
tgtccccagagccagac

SEQ ID NO: 163605 - DNA, 17 bp, synthetic construct
  source 1..17: mol_type = other DNA
gtgtccccagagccaga

SEQ ID NO: 163606 - DNA, 17 bp, synthetic construct
  source 1..17: mol_type = other DNA
ggtgtccccagagccag

SEQ ID NO: 163607 - DNA, 17 bp, synthetic construct
  source 1..17: mol_type = other DNA
cggtgtccccagagcca

SEQ ID NO: 163608 - DNA, 17 bp, synthetic construct
  source 1..17: mol_type = other DNA
ccggtgtccccagagcc

SEQ ID NO: 163609 - DNA, 17 bp, synthetic construct
  source 1..17: mol_type = other DNA
gccggtgtccccagagc

SEQ ID NO: 163610 - DNA, 17 bp, synthetic construct
  source 1..17: mol_type = other DNA
ggccggtgtccccagag

SEQ ID NO: 163611 - DNA, 17 bp, synthetic construct
  source 1..17: mol_type = other DNA
gggccggtgtccccaga

SEQ ID NO: 163612 - DNA, 17 bp, synthetic construct
  source 1..17: mol_type = other DNA
ggggccggtgtccccag

SEQ ID NO: 163613 - DNA, 17 bp, synthetic construct
  source 1..17: mol_type = other DNA
gggggccggtgtcccca

SEQ ID NO: 163614 - DNA, 17 bp, synthetic construct
  source 1..17: mol_type = other DNA
tgggggccggtgtcccc

SEQ ID NO: 163615 - DNA, 17 bp, synthetic construct
  source 1..17: mol_type = other DNA
gtgggggccggtgtccc

SEQ ID NO: 163616 - DNA, 17 bp, synthetic construct
  source 1..17: mol_type = other DNA
cgtgggggccggtgtcc

SEQ ID NO: 163617 - DNA, 17 bp, synthetic construct
  source 1..17: mol_type = other DNA
gcgtgggggccggtgtc

SEQ ID NO: 163618 - DNA, 17 bp, synthetic construct
  source 1..17: mol_type = other DNA
ggcgtgggggccggtgt

SEQ ID NO: 163619 - DNA, 17 bp, synthetic construct
  source 1..17: mol_type = other DNA
gggcgtgggggccggtg

SEQ ID NO: 163620 - DNA, 17 bp, synthetic construct
  source 1..17: mol_type = other DNA
cgggcgtgggggccggt

SEQ ID NO: 163621 - DNA, 17 bp, synthetic construct
  source 1..17: mol_type = other DNA
ccgggcgtgggggccgg

SEQ ID NO: 163622 - DNA, 17 bp, synthetic construct
  source 1..17: mol_type = other DNA
cccgggcgtgggggccg

SEQ ID NO: 163623 - DNA, 17 bp, synthetic construct
  source 1..17: mol_type = other DNA
ccccgggcgtgggggcc

SEQ ID NO: 163624 - DNA, 17 bp, synthetic construct
  source 1..17: mol_type = other DNA
accccgggcgtgggggc

SEQ ID NO: 163625 - DNA, 17 bp, synthetic construct
  source 1..17: mol_type = other DNA
taccccgggcgtggggg

SEQ ID NO: 163626 - DNA, 17 bp, synthetic construct
  source 1..17: mol_type = other DNA
ctaccccgggcgtgggg

SEQ ID NO: 163627 - DNA, 17 bp, synthetic construct
  source 1..17: mol_type = other DNA
cctaccccgggcgtggg

SEQ ID NO: 163628 - DNA, 17 bp, synthetic construct
  source 1..17: mol_type = other DNA
ccctaccccgggcgtgg

SEQ ID NO: 163629 - DNA, 17 bp, synthetic construct
  source 1..17: mol_type = other DNA
cccctaccccgggcgtg

SEQ ID NO: 163630 - DNA, 17 bp, synthetic construct
  source 1..17: mol_type = other DNA
gcccctaccccgggcgt

SEQ ID NO: 163631 - DNA, 17 bp, synthetic construct
  source 1..17: mol_type = other DNA
agcccctaccccgggcg

SEQ ID NO: 163632 - DNA, 17 bp, synthetic construct
  source 1..17: mol_type = other DNA
cagcccctaccccgggc

SEQ ID NO: 163633 - DNA, 17 bp, synthetic construct
  source 1..17: mol_type = other DNA
gcagcccctaccccggg

SEQ ID NO: 163634 - DNA, 17 bp, synthetic construct
  source 1..17: mol_type = other DNA
ggcagcccctaccccgg

SEQ ID NO: 163635 - DNA, 17 bp, synthetic construct
  source 1..17: mol_type = other DNA
gggcagcccctaccccg

SEQ ID NO: 163636 - DNA, 17 bp, synthetic construct
  source 1..17: mol_type = other DNA
agggcagcccctacccc

SEQ ID NO: 163637 - DNA, 17 bp, synthetic construct
  source 1..17: mol_type = other DNA
cagggcagcccctaccc

SEQ ID NO: 163638 - DNA, 17 bp, synthetic construct
  source 1..17: mol_type = other DNA
gcagggcagcccctacc

SEQ ID NO: 163639 - DNA, 17 bp, synthetic construct
  source 1..17: mol_type = other DNA
tgcagggcagcccctac

SEQ ID NO: 163640 - DNA, 17 bp, synthetic construct
  source 1..17: mol_type = other DNA
gtgcagggcagccccta

SEQ ID NO: 163641 - DNA, 17 bp, synthetic construct
  source 1..17: mol_type = other DNA
tgtgcagggcagcccct

SEQ ID NO: 163642 - DNA, 17 bp, synthetic construct
  source 1..17: mol_type = other DNA
ttgtgcagggcagcccc

SEQ ID NO: 163643 - DNA, 17 bp, synthetic construct
  source 1..17: mol_type = other DNA
gttgtgcagggcagccc

SEQ ID NO: 163644 - DNA, 17 bp, synthetic construct
  source 1..17: mol_type = other DNA
tgttgtgcagggcagcc

SEQ ID NO: 163645 - DNA, 17 bp, synthetic construct
  source 1..17: mol_type = other DNA
ctgttgtgcagggcagc

SEQ ID NO: 163646 - DNA, 17 bp, synthetic construct
  source 1..17: mol_type = other DNA
cctgttgtgcagggcag

SEQ ID NO: 163647 - DNA, 17 bp, synthetic construct
  source 1..17: mol_type = other DNA
ccctgttgtgcagggca

SEQ ID NO: 163648 - DNA, 17 bp, synthetic construct
  source 1..17: mol_type = other DNA
cccctgttgtgcagggc

SEQ ID NO: 163649 - DNA, 17 bp, synthetic construct
  source 1..17: mol_type = other DNA
acccctgttgtgcaggg

SEQ ID NO: 163650 - DNA, 17 bp, synthetic construct
  source 1..17: mol_type = other DNA
cacccctgttgtgcagg

SEQ ID NO: 163651 - DNA, 17 bp, synthetic construct
  source 1..17: mol_type = other DNA
tcacccctgttgtgcag

SEQ ID NO: 163652 - DNA, 17 bp, synthetic construct
  source 1..17: mol_type = other DNA
ctcacccctgttgtgca

SEQ ID NO: 163653 - DNA, 17 bp, synthetic construct
  source 1..17: mol_type = other DNA
cctcacccctgttgtgc

SEQ ID NO: 163654 - DNA, 17 bp, synthetic construct
  source 1..17: mol_type = other DNA
ccctcacccctgttgtg

SEQ ID NO: 163655 - DNA, 17 bp, synthetic construct
  source 1..17: mol_type = other DNA
gccctcacccctgttgt

SEQ ID NO: 163656 - DNA, 17 bp, synthetic construct
  source 1..17: mol_type = other DNA
agccctcacccctgttg

SEQ ID NO: 163657 - DNA, 17 bp, synthetic construct
  source 1..17: mol_type = other DNA
cagccctcacccctgtt

SEQ ID NO: 163658 - DNA, 17 bp, synthetic construct
  source 1..17: mol_type = other DNA
ccagccctcacccctgt

SEQ ID NO: 163659 - DNA, 17 bp, synthetic construct
  source 1..17: mol_type = other DNA
accagccctcacccctg

SEQ ID NO: 163660 - DNA, 17 bp, synthetic construct
  source 1..17: mol_type = other DNA
caccagccctcacccct

SEQ ID NO: 163661 - DNA, 17 bp, synthetic construct
  source 1..17: mol_type = other DNA
ccaccagccctcacccc

SEQ ID NO: 163662 - DNA, 17 bp, synthetic construct
  source 1..17: mol_type = other DNA
cccaccagccctcaccc

SEQ ID NO: 163663 - DNA, 17 bp, synthetic construct
  source 1..17: mol_type = other DNA
gcccaccagccctcacc

SEQ ID NO: 163664 - DNA, 17 bp, synthetic construct
  source 1..17: mol_type = other DNA
cgcccaccagccctcac

SEQ ID NO: 163665 - DNA, 17 bp, synthetic construct
  source 1..17: mol_type = other DNA
gcgcccaccagccctca

SEQ ID NO: 163666 - DNA, 17 bp, synthetic construct
  source 1..17: mol_type = other DNA
ggcgcccaccagccctc

SEQ ID NO: 163667 - DNA, 17 bp, synthetic construct
  source 1..17: mol_type = other DNA
aggcgcccaccagccct

SEQ ID NO: 163668 - DNA, 17 bp, synthetic construct
  source 1..17: mol_type = other DNA
gaggcgcccaccagccc

SEQ ID NO: 163669 - DNA, 17 bp, synthetic construct
  source 1..17: mol_type = other DNA
ggaggcgcccaccagcc

SEQ ID NO: 163670 - DNA, 17 bp, synthetic construct
  source 1..17: mol_type = other DNA
aggaggcgcccaccagc

SEQ ID NO: 163671 - DNA, 17 bp, synthetic construct
  source 1..17: mol_type = other DNA
aaggaggcgcccaccag

SEQ ID NO: 163672 - DNA, 17 bp, synthetic construct
  source 1..17: mol_type = other DNA
taaggaggcgcccacca

SEQ ID NO: 163673 - DNA, 17 bp, synthetic construct
  source 1..17: mol_type = other DNA
ctaaggaggcgcccacc

SEQ ID NO: 163674 - DNA, 17 bp, synthetic construct
  source 1..17: mol_type = other DNA
gctaaggaggcgcccac

SEQ ID NO: 163675 - DNA, 17 bp, synthetic construct
  source 1..17: mol_type = other DNA
ggctaaggaggcgccca

SEQ ID NO: 163676 - DNA, 17 bp, synthetic construct
  source 1..17: mol_type = other DNA
aggctaaggaggcgccc

SEQ ID NO: 163677 - DNA, 17 bp, synthetic construct
  source 1..17: mol_type = other DNA
gaggctaaggaggcgcc

SEQ ID NO: 163678 - DNA, 17 bp, synthetic construct
  source 1..17: mol_type = other DNA
agaggctaaggaggcgc

SEQ ID NO: 163679 - DNA, 17 bp, synthetic construct
  source 1..17: mol_type = other DNA
cagaggctaaggaggcg

SEQ ID NO: 163680 - DNA, 17 bp, synthetic construct
  source 1..17: mol_type = other DNA
gcagaggctaaggaggc

SEQ ID NO: 163681 - DNA, 17 bp, synthetic construct
  source 1..17: mol_type = other DNA
ggcagaggctaaggagg

SEQ ID NO: 163682 - DNA, 17 bp, synthetic construct
  source 1..17: mol_type = other DNA
gggcagaggctaaggag

SEQ ID NO: 163683 - DNA, 17 bp, synthetic construct
  source 1..17: mol_type = other DNA
agggcagaggctaagga

SEQ ID NO: 163684 - DNA, 17 bp, synthetic construct
  source 1..17: mol_type = other DNA
gagggcagaggctaagg

SEQ ID NO: 163685 - DNA, 17 bp, synthetic construct
  source 1..17: mol_type = other DNA
agagggcagaggctaag

SEQ ID NO: 163686 - DNA, 17 bp, synthetic construct
  source 1..17: mol_type = other DNA
cagagggcagaggctaa

SEQ ID NO: 163687 - DNA, 17 bp, synthetic construct
  source 1..17: mol_type = other DNA
acagagggcagaggcta

SEQ ID NO: 163688 - DNA, 17 bp, synthetic construct
  source 1..17: mol_type = other DNA
cacagagggcagaggct

SEQ ID NO: 163689 - DNA, 17 bp, synthetic construct
  source 1..17: mol_type = other DNA
gcacagagggcagaggc

SEQ ID NO: 163690 - DNA, 17 bp, synthetic construct
  source 1..17: mol_type = other DNA
ggcacagagggcagagg

SEQ ID NO: 163691 - DNA, 17 bp, synthetic construct
  source 1..17: mol_type = other DNA
gggcacagagggcagag

SEQ ID NO: 163692 - DNA, 17 bp, synthetic construct
  source 1..17: mol_type = other DNA
ggggcacagagggcaga

SEQ ID NO: 163693 - DNA, 17 bp, synthetic construct
  source 1..17: mol_type = other DNA
tggggcacagagggcag

SEQ ID NO: 163694 - DNA, 17 bp, synthetic construct
  source 1..17: mol_type = other DNA
ctggggcacagagggca

SEQ ID NO: 163695 - DNA, 17 bp, synthetic construct
  source 1..17: mol_type = other DNA
gctggggcacagagggc

SEQ ID NO: 163696 - DNA, 17 bp, synthetic construct
  source 1..17: mol_type = other DNA
ggctggggcacagaggg

SEQ ID NO: 163697 - DNA, 17 bp, synthetic construct
  source 1..17: mol_type = other DNA
aggctggggcacagagg

SEQ ID NO: 163698 - DNA, 17 bp, synthetic construct
  source 1..17: mol_type = other DNA
aaggctggggcacagag

SEQ ID NO: 163699 - DNA, 17 bp, synthetic construct
  source 1..17: mol_type = other DNA
caaggctggggcacaga

SEQ ID NO: 163700 - DNA, 17 bp, synthetic construct
  source 1..17: mol_type = other DNA
acaaggctggggcacag

SEQ ID NO: 163701 - DNA, 17 bp, synthetic construct
  source 1..17: mol_type = other DNA
aacaaggctggggcaca

SEQ ID NO: 163702 - DNA, 17 bp, synthetic construct
  source 1..17: mol_type = other DNA
gaacaaggctggggcac

SEQ ID NO: 163703 - DNA, 17 bp, synthetic construct
  source 1..17: mol_type = other DNA
agaacaaggctggggca

SEQ ID NO: 163704 - DNA, 17 bp, synthetic construct
  source 1..17: mol_type = other DNA
cagaacaaggctggggc

SEQ ID NO: 163705 - DNA, 17 bp, synthetic construct
  source 1..17: mol_type = other DNA
acagaacaaggctgggg

SEQ ID NO: 163706 - DNA, 17 bp, synthetic construct
  source 1..17: mol_type = other DNA
cacagaacaaggctggg

SEQ ID NO: 163707 - DNA, 17 bp, synthetic construct
  source 1..17: mol_type = other DNA
tcacagaacaaggctgg

SEQ ID NO: 163708 - DNA, 17 bp, synthetic construct
  source 1..17: mol_type = other DNA
gtcacagaacaaggctg

SEQ ID NO: 163709 - DNA, 17 bp, synthetic construct
  source 1..17: mol_type = other DNA
agtcacagaacaaggct

SEQ ID NO: 163710 - DNA, 17 bp, synthetic construct
  source 1..17: mol_type = other DNA
aagtcacagaacaaggc

SEQ ID NO: 163711 - DNA, 17 bp, synthetic construct
  source 1..17: mol_type = other DNA
gaagtcacagaacaagg

SEQ ID NO: 163712 - DNA, 17 bp, synthetic construct
  source 1..17: mol_type = other DNA
agaagtcacagaacaag

SEQ ID NO: 163713 - DNA, 17 bp, synthetic construct
  source 1..17: mol_type = other DNA
tagaagtcacagaacaa

SEQ ID NO: 163714 - DNA, 17 bp, synthetic construct
  source 1..17: mol_type = other DNA
gtagaagtcacagaaca

SEQ ID NO: 163715 - DNA, 17 bp, synthetic construct
  source 1..17: mol_type = other DNA
tgtagaagtcacagaac

SEQ ID NO: 163716 - DNA, 17 bp, synthetic construct
  source 1..17: mol_type = other DNA
ttgtagaagtcacagaa

SEQ ID NO: 163717 - DNA, 17 bp, synthetic construct
  source 1..17: mol_type = other DNA
gttgtagaagtcacaga

SEQ ID NO: 163718 - DNA, 17 bp, synthetic construct
  source 1..17: mol_type = other DNA
ggttgtagaagtcacag

SEQ ID NO: 163719 - DNA, 17 bp, synthetic construct
  source 1..17: mol_type = other DNA
gggttgtagaagtcaca

SEQ ID NO: 163720 - DNA, 17 bp, synthetic construct
  source 1..17: mol_type = other DNA
tgggttgtagaagtcac

SEQ ID NO: 163721 - DNA, 17 bp, synthetic construct
  source 1..17: mol_type = other DNA
gtgggttgtagaagtca

SEQ ID NO: 163722 - DNA, 17 bp, synthetic construct
  source 1..17: mol_type = other DNA
tgtgggttgtagaagtc

SEQ ID NO: 163723 - DNA, 17 bp, synthetic construct
  source 1..17: mol_type = other DNA
atgtgggttgtagaagt

SEQ ID NO: 163724 - DNA, 17 bp, synthetic construct
  source 1..17: mol_type = other DNA
catgtgggttgtagaag

SEQ ID NO: 163725 - DNA, 17 bp, synthetic construct
  source 1..17: mol_type = other DNA
ccatgtgggttgtagaa

SEQ ID NO: 163726 - DNA, 17 bp, synthetic construct
  source 1..17: mol_type = other DNA
cccatgtgggttgtaga

SEQ ID NO: 163727 - DNA, 17 bp, synthetic construct
  source 1..17: mol_type = other DNA
ccccatgtgggttgtag

SEQ ID NO: 163728 - DNA, 17 bp, synthetic construct
  source 1..17: mol_type = other DNA
cccccatgtgggttgta

SEQ ID NO: 163729 - DNA, 17 bp, synthetic construct
  source 1..17: mol_type = other DNA
gcccccatgtgggttgt

SEQ ID NO: 163730 - DNA, 17 bp, synthetic construct
  source 1..17: mol_type = other DNA
agcccccatgtgggttg

SEQ ID NO: 163731 - DNA, 17 bp, synthetic construct
  source 1..17: mol_type = other DNA
cagcccccatgtgggtt

SEQ ID NO: 163732 - DNA, 17 bp, synthetic construct
  source 1..17: mol_type = other DNA
acagcccccatgtgggt

SEQ ID NO: 163733 - DNA, 17 bp, synthetic construct
  source 1..17: mol_type = other DNA
cacagcccccatgtggg

SEQ ID NO: 163734 - DNA, 17 bp, synthetic construct
  source 1..17: mol_type = other DNA
tcacagcccccatgtgg

SEQ ID NO: 163735 - DNA, 17 bp, synthetic construct
  source 1..17: mol_type = other DNA
ctcacagcccccatgtg

SEQ ID NO: 163736 - DNA, 17 bp, synthetic construct
  source 1..17: mol_type = other DNA
actcacagcccccatgt

SEQ ID NO: 163737 - DNA, 17 bp, synthetic construct
  source 1..17: mol_type = other DNA
cactcacagcccccatg

SEQ ID NO: 163738 - DNA, 17 bp, synthetic construct
  source 1..17: mol_type = other DNA
ccactcacagcccccat

SEQ ID NO: 163739 - DNA, 17 bp, synthetic construct
  source 1..17: mol_type = other DNA
gccactcacagccccca

SEQ ID NO: 163740 - DNA, 17 bp, synthetic construct
  source 1..17: mol_type = other DNA
tgccactcacagccccc

SEQ ID NO: 163741 - DNA, 17 bp, synthetic construct
  source 1..17: mol_type = other DNA
gtgccactcacagcccc

SEQ ID NO: 163742 - DNA, 17 bp, synthetic construct
  source 1..17: mol_type = other DNA
agtgccactcacagccc

SEQ ID NO: 163743 - DNA, 17 bp, synthetic construct
  source 1..17: mol_type = other DNA
tagtgccactcacagcc

SEQ ID NO: 163744 - DNA, 17 bp, synthetic construct
  source 1..17: mol_type = other DNA
gtagtgccactcacagc

SEQ ID NO: 163745 - DNA, 17 bp, synthetic construct
  source 1..17: mol_type = other DNA
ggtagtgccactcacag

SEQ ID NO: 163746 - DNA, 17 bp, synthetic construct
  source 1..17: mol_type = other DNA
tggtagtgccactcaca

SEQ ID NO: 163747 - DNA, 17 bp, synthetic construct
  source 1..17: mol_type = other DNA
ctggtagtgccactcac

SEQ ID NO: 163748 - DNA, 17 bp, synthetic construct
  source 1..17: mol_type = other DNA
gctggtagtgccactca

SEQ ID NO: 163749 - DNA, 17 bp, synthetic construct
  source 1..17: mol_type = other DNA
ggctggtagtgccactc

SEQ ID NO: 163750 - DNA, 17 bp, synthetic construct
  source 1..17: mol_type = other DNA
gggctggtagtgccact

SEQ ID NO: 163751 - DNA, 17 bp, synthetic construct
  source 1..17: mol_type = other DNA
agggctggtagtgccac

SEQ ID NO: 163752 - DNA, 17 bp, synthetic construct
  source 1..17: mol_type = other DNA
cagggctggtagtgcca

SEQ ID NO: 163753 - DNA, 17 bp, synthetic construct
  source 1..17: mol_type = other DNA
gcagggctggtagtgcc

SEQ ID NO: 163754 - DNA, 17 bp, synthetic construct
  source 1..17: mol_type = other DNA
cgcagggctggtagtgc

SEQ ID NO: 163755 - DNA, 17 bp, synthetic construct
  source 1..17: mol_type = other DNA
ccgcagggctggtagtg

SEQ ID NO: 163756 - DNA, 17 bp, synthetic construct
  source 1..17: mol_type = other DNA
cccgcagggctggtagt

SEQ ID NO: 163757 - DNA, 17 bp, synthetic construct
  source 1..17: mol_type = other DNA
ccccgcagggctggtag

SEQ ID NO: 163758 - DNA, 17 bp, synthetic construct
  source 1..17: mol_type = other DNA
gccccgcagggctggta

SEQ ID NO: 163759 - DNA, 17 bp, synthetic construct
  source 1..17: mol_type = other DNA
tgccccgcagggctggt

SEQ ID NO: 163760 - DNA, 17 bp, synthetic construct
  source 1..17: mol_type = other DNA
gtgccccgcagggctgg

SEQ ID NO: 163761 - DNA, 17 bp, synthetic construct
  source 1..17: mol_type = other DNA
ggtgccccgcagggctg

SEQ ID NO: 163762 - DNA, 17 bp, synthetic construct
  source 1..17: mol_type = other DNA
gggtgccccgcagggct

SEQ ID NO: 163763 - DNA, 17 bp, synthetic construct
  source 1..17: mol_type = other DNA
agggtgccccgcagggc

SEQ ID NO: 163764 - DNA, 17 bp, synthetic construct
  source 1..17: mol_type = other DNA
cagggtgccccgcaggg

SEQ ID NO: 163765 - DNA, 17 bp, synthetic construct
  source 1..17: mol_type = other DNA
gcagggtgccccgcagg

SEQ ID NO: 163766 - DNA, 17 bp, synthetic construct
  source 1..17: mol_type = other DNA
ggcagggtgccccgcag

SEQ ID NO: 163767 - DNA, 17 bp, synthetic construct
  source 1..17: mol_type = other DNA
aggcagggtgccccgca

SEQ ID NO: 163768 - DNA, 17 bp, synthetic construct
  source 1..17: mol_type = other DNA
taggcagggtgccccgc

SEQ ID NO: 163769 - DNA, 17 bp, synthetic construct
  source 1..17: mol_type = other DNA
ttaggcagggtgccccg

SEQ ID NO: 163770 - DNA, 17 bp, synthetic construct
  source 1..17: mol_type = other DNA
tttaggcagggtgcccc

SEQ ID NO: 163771 - DNA, 17 bp, synthetic construct
  source 1..17: mol_type = other DNA
ttttaggcagggtgccc

SEQ ID NO: 163772 - DNA, 17 bp, synthetic construct
  source 1..17: mol_type = other DNA
tttttaggcagggtgcc

SEQ ID NO: 163773 - DNA, 17 bp, synthetic construct
  source 1..17: mol_type = other DNA
gtttttaggcagggtgc

SEQ ID NO: 163774 - DNA, 17 bp, synthetic construct
  source 1..17: mol_type = other DNA
ggtttttaggcagggtg

SEQ ID NO: 163775 - DNA, 17 bp, synthetic construct
  source 1..17: mol_type = other DNA
aggtttttaggcagggt

SEQ ID NO: 163776 - DNA, 17 bp, synthetic construct
  source 1..17: mol_type = other DNA
caggtttttaggcaggg

SEQ ID NO: 163777 - DNA, 17 bp, synthetic construct
  source 1..17: mol_type = other DNA
gcaggtttttaggcagg

SEQ ID NO: 163778 - DNA, 17 bp, synthetic construct
  source 1..17: mol_type = other DNA
ggcaggtttttaggcag

SEQ ID NO: 163779 - DNA, 17 bp, synthetic construct
  source 1..17: mol_type = other DNA
cggcaggtttttaggca

SEQ ID NO: 163780 - DNA, 17 bp, synthetic construct
  source 1..17: mol_type = other DNA
ccggcaggtttttaggc

SEQ ID NO: 163781 - DNA, 17 bp, synthetic construct
  source 1..17: mol_type = other DNA
tccggcaggtttttagg

SEQ ID NO: 163782 - DNA, 17 bp, synthetic construct
  source 1..17: mol_type = other DNA
ttccggcaggtttttag

SEQ ID NO: 163783 - DNA, 17 bp, synthetic construct
  source 1..17: mol_type = other DNA
gttccggcaggttttta

SEQ ID NO: 163784 - DNA, 17 bp, synthetic construct
  source 1..17: mol_type = other DNA
ggttccggcaggttttt

SEQ ID NO: 163785 - DNA, 17 bp, synthetic construct
  source 1..17: mol_type = other DNA
gggttccggcaggtttt

SEQ ID NO: 163786 - DNA, 17 bp, synthetic construct
  source 1..17: mol_type = other DNA
ggggttccggcaggttt

SEQ ID NO: 163787 - DNA, 17 bp, synthetic construct
  source 1..17: mol_type = other DNA
tggggttccggcaggtt

SEQ ID NO: 163788 - DNA, 17 bp, synthetic construct
  source 1..17: mol_type = other DNA
ctggggttccggcaggt

SEQ ID NO: 163789 - DNA, 17 bp, synthetic construct
  source 1..17: mol_type = other DNA
actggggttccggcagg

SEQ ID NO: 163790 - DNA, 17 bp, synthetic construct
  source 1..17: mol_type = other DNA
cactggggttccggcag

SEQ ID NO: 163791 - DNA, 17 bp, synthetic construct
  source 1..17: mol_type = other DNA
ccactggggttccggca

SEQ ID NO: 163792 - DNA, 17 bp, synthetic construct
  source 1..17: mol_type = other DNA
cccactggggttccggc

SEQ ID NO: 163793 - DNA, 17 bp, synthetic construct
  source 1..17: mol_type = other DNA
gcccactggggttccgg

SEQ ID NO: 163794 - DNA, 17 bp, synthetic construct
  source 1..17: mol_type = other DNA
tgcccactggggttccg

SEQ ID NO: 163795 - DNA, 17 bp, synthetic construct
  source 1..17: mol_type = other DNA
gtgcccactggggttcc

SEQ ID NO: 163796 - DNA, 17 bp, synthetic construct
  source 1..17: mol_type = other DNA
agtgcccactggggttc

SEQ ID NO: 163797 - DNA, 17 bp, synthetic construct
  source 1..17: mol_type = other DNA
cagtgcccactggggtt

SEQ ID NO: 163798 - DNA, 17 bp, synthetic construct
  source 1..17: mol_type = other DNA
gcagtgcccactggggt

SEQ ID NO: 163799 - DNA, 17 bp, synthetic construct
  source 1..17: mol_type = other DNA
ggcagtgcccactgggg

SEQ ID NO: 163800 - DNA, 17 bp, synthetic construct
  source 1..17: mol_type = other DNA
aggcagtgcccactggg

SEQ ID NO: 163801 - DNA, 17 bp, synthetic construct
  source 1..17: mol_type = other DNA
caggcagtgcccactgg

SEQ ID NO: 163802 - DNA, 17 bp, synthetic construct
  source 1..17: mol_type = other DNA
ccaggcagtgcccactg

SEQ ID NO: 163803 - DNA, 17 bp, synthetic construct
  source 1..17: mol_type = other DNA
accaggcagtgcccact

SEQ ID NO: 163804 - DNA, 17 bp, synthetic construct
  source 1..17: mol_type = other DNA
caccaggcagtgcccac

SEQ ID NO: 163805 - DNA, 17 bp, synthetic construct
  source 1..17: mol_type = other DNA
ccaccaggcagtgccca

SEQ ID NO: 163806 - DNA, 17 bp, synthetic construct
  source 1..17: mol_type = other DNA
tccaccaggcagtgccc

SEQ ID NO: 163807 - DNA, 17 bp, synthetic construct
  source 1..17: mol_type = other DNA
gtccaccaggcagtgcc

SEQ ID NO: 163808 - DNA, 17 bp, synthetic construct
  source 1..17: mol_type = other DNA
ggtccaccaggcagtgc

SEQ ID NO: 163809 - DNA, 17 bp, synthetic construct
  source 1..17: mol_type = other DNA
aggtccaccaggcagtg

SEQ ID NO: 163810 - DNA, 17 bp, synthetic construct
  source 1..17: mol_type = other DNA
caggtccaccaggcagt

SEQ ID NO: 163811 - DNA, 17 bp, synthetic construct
  source 1..17: mol_type = other DNA
gcaggtccaccaggcag

SEQ ID NO: 163812 - DNA, 17 bp, synthetic construct
  source 1..17: mol_type = other DNA
ggcaggtccaccaggca

SEQ ID NO: 163813 - DNA, 17 bp, synthetic construct
  source 1..17: mol_type = other DNA
aggcaggtccaccaggc

SEQ ID NO: 163814 - DNA, 17 bp, synthetic construct
  source 1..17: mol_type = other DNA
caggcaggtccaccagg

SEQ ID NO: 163815 - DNA, 17 bp, synthetic construct
  source 1..17: mol_type = other DNA
ccaggcaggtccaccag

SEQ ID NO: 163816 - DNA, 17 bp, synthetic construct
  source 1..17: mol_type = other DNA
gccaggcaggtccacca

SEQ ID NO: 163817 - DNA, 17 bp, synthetic construct
  source 1..17: mol_type = other DNA
ggccaggcaggtccacc

SEQ ID NO: 163818 - DNA, 17 bp, synthetic construct
  source 1..17: mol_type = other DNA
aggccaggcaggtccac

SEQ ID NO: 163819 - DNA, 17 bp, synthetic construct
  source 1..17: mol_type = other DNA
caggccaggcaggtcca

SEQ ID NO: 163820 - DNA, 17 bp, synthetic construct
  source 1..17: mol_type = other DNA
ccaggccaggcaggtcc

SEQ ID NO: 163821 - DNA, 17 bp, synthetic construct
  source 1..17: mol_type = other DNA
tccaggccaggcaggtc

SEQ ID NO: 163822 - DNA, 17 bp, synthetic construct
  source 1..17: mol_type = other DNA
ttccaggccaggcaggt

SEQ ID NO: 163823 - DNA, 17 bp, synthetic construct
  source 1..17: mol_type = other DNA
cttccaggccaggcagg

SEQ ID NO: 163824 - DNA, 17 bp, synthetic construct
  source 1..17: mol_type = other DNA
ccttccaggccaggcag

SEQ ID NO: 163825 - DNA, 17 bp, synthetic construct
  source 1..17: mol_type = other DNA
accttccaggccaggca

SEQ ID NO: 163826 - DNA, 17 bp, synthetic construct
  source 1..17: mol_type = other DNA
caccttccaggccaggc

SEQ ID NO: 163827 - DNA, 17 bp, synthetic construct
  source 1..17: mol_type = other DNA
tcaccttccaggccagg

SEQ ID NO: 163828 - DNA, 17 bp, synthetic construct
  source 1..17: mol_type = other DNA
ctcaccttccaggccag

SEQ ID NO: 163829 - DNA, 17 bp, synthetic construct
  source 1..17: mol_type = other DNA
cctcaccttccaggcca

SEQ ID NO: 163830 - DNA, 17 bp, synthetic construct
  source 1..17: mol_type = other DNA
ccctcaccttccaggcc

SEQ ID NO: 163831 - DNA, 17 bp, synthetic construct
  source 1..17: mol_type = other DNA
cccctcaccttccaggc

SEQ ID NO: 163832 - DNA, 17 bp, synthetic construct
  source 1..17: mol_type = other DNA
gcccctcaccttccagg

SEQ ID NO: 163833 - DNA, 17 bp, synthetic construct
  source 1..17: mol_type = other DNA
tgcccctcaccttccag

SEQ ID NO: 163834 - DNA, 17 bp, synthetic construct
  source 1..17: mol_type = other DNA
ctgcccctcaccttcca

SEQ ID NO: 163835 - DNA, 17 bp, synthetic construct
  source 1..17: mol_type = other DNA
gctgcccctcaccttcc

SEQ ID NO: 163836 - DNA, 17 bp, synthetic construct
  source 1..17: mol_type = other DNA
ggctgcccctcaccttc

SEQ ID NO: 163837 - DNA, 17 bp, synthetic construct
  source 1..17: mol_type = other DNA
aggctgcccctcacctt

SEQ ID NO: 163838 - DNA, 17 bp, synthetic construct
  source 1..17: mol_type = other DNA
aaggctgcccctcacct

SEQ ID NO: 163839 - DNA, 17 bp, synthetic construct
  source 1..17: mol_type = other DNA
aaaggctgcccctcacc

SEQ ID NO: 163840 - DNA, 17 bp, synthetic construct
  source 1..17: mol_type = other DNA
gaaaggctgcccctcac

SEQ ID NO: 163841 - DNA, 17 bp, synthetic construct
  source 1..17: mol_type = other DNA
agaaaggctgcccctca

SEQ ID NO: 163842 - DNA, 17 bp, synthetic construct
  source 1..17: mol_type = other DNA
aagaaaggctgcccctc

SEQ ID NO: 163843 - DNA, 17 bp, synthetic construct
  source 1..17: mol_type = other DNA
caagaaaggctgcccct

SEQ ID NO: 163844 - DNA, 17 bp, synthetic construct
  source 1..17: mol_type = other DNA
ccaagaaaggctgcccc

SEQ ID NO: 163845 - DNA, 17 bp, synthetic construct
  source 1..17: mol_type = other DNA
tccaagaaaggctgccc

SEQ ID NO: 163846 - DNA, 17 bp, synthetic construct
  source 1..17: mol_type = other DNA
atccaagaaaggctgcc

SEQ ID NO: 163847 - DNA, 17 bp, synthetic construct
  source 1..17: mol_type = other DNA
catccaagaaaggctgc

SEQ ID NO: 163848 - DNA, 17 bp, synthetic construct
  source 1..17: mol_type = other DNA
ccatccaagaaaggctg

SEQ ID NO: 163849 - DNA, 17 bp, synthetic construct
  source 1..17: mol_type = other DNA
tccatccaagaaaggct

SEQ ID NO: 163850 - DNA, 17 bp, synthetic construct
  source 1..17: mol_type = other DNA
ctccatccaagaaaggc

SEQ ID NO: 163851 - DNA, 17 bp, synthetic construct
  source 1..17: mol_type = other DNA
gctccatccaagaaagg

SEQ ID NO: 163852 - DNA, 17 bp, synthetic construct
  source 1..17: mol_type = other DNA
ggctccatccaagaaag

SEQ ID NO: 163853 - DNA, 17 bp, synthetic construct
  source 1..17: mol_type = other DNA
aggctccatccaagaaa

SEQ ID NO: 163854 - DNA, 17 bp, synthetic construct
  source 1..17: mol_type = other DNA
gaggctccatccaagaa

SEQ ID NO: 163855 - DNA, 17 bp, synthetic construct
  source 1..17: mol_type = other DNA
ggaggctccatccaaga

SEQ ID NO: 163856 - DNA, 17 bp, synthetic construct
  source 1..17: mol_type = other DNA
aggaggctccatccaag

SEQ ID NO: 163857 - DNA, 17 bp, synthetic construct
  source 1..17: mol_type = other DNA
gaggaggctccatccaa

SEQ ID NO: 163858 - DNA, 17 bp, synthetic construct
  source 1..17: mol_type = other DNA
agaggaggctccatcca

SEQ ID NO: 163859 - DNA, 17 bp, synthetic construct
  source 1..17: mol_type = other DNA
gagaggaggctccatcc

SEQ ID NO: 163860 - DNA, 17 bp, synthetic construct
  source 1..17: mol_type = other DNA
ggagaggaggctccatc

SEQ ID NO: 163861 - DNA, 17 bp, synthetic construct
  source 1..17: mol_type = other DNA
aggagaggaggctccat

SEQ ID NO: 163862 - DNA, 17 bp, synthetic construct
  source 1..17: mol_type = other DNA
aaggagaggaggctcca

SEQ ID NO: 163863 - DNA, 17 bp, synthetic construct
  source 1..17: mol_type = other DNA
caaggagaggaggctcc

SEQ ID NO: 163864 - DNA, 17 bp, synthetic construct
  source 1..17: mol_type = other DNA
ccaaggagaggaggctc

SEQ ID NO: 163865 - DNA, 17 bp, synthetic construct
  source 1..17: mol_type = other DNA
cccaaggagaggaggct

SEQ ID NO: 163866 - DNA, 17 bp, synthetic construct
  source 1..17: mol_type = other DNA
acccaaggagaggaggc

SEQ ID NO: 163867 - DNA, 17 bp, synthetic construct
  source 1..17: mol_type = other DNA
aacccaaggagaggagg

SEQ ID NO: 163868 - DNA, 17 bp, synthetic construct
  source 1..17: mol_type = other DNA
gaacccaaggagaggag

SEQ ID NO: 163869 - DNA, 17 bp, synthetic construct
  source 1..17: mol_type = other DNA
ggaacccaaggagagga

SEQ ID NO: 163870 - DNA, 17 bp, synthetic construct
  source 1..17: mol_type = other DNA
gggaacccaaggagagg

SEQ ID NO: 163871 - DNA, 17 bp, synthetic construct
  source 1..17: mol_type = other DNA
cgggaacccaaggagag

SEQ ID NO: 163872 - DNA, 17 bp, synthetic construct
  source 1..17: mol_type = other DNA
tcgggaacccaaggaga

SEQ ID NO: 163873 - DNA, 17 bp, synthetic construct
  source 1..17: mol_type = other DNA
ctcgggaacccaaggag

SEQ ID NO: 163874 - DNA, 17 bp, synthetic construct
  source 1..17: mol_type = other DNA
actcgggaacccaagga

SEQ ID NO: 163875 - DNA, 17 bp, synthetic construct
  source 1..17: mol_type = other DNA
cactcgggaacccaagg

SEQ ID NO: 163876 - DNA, 17 bp, synthetic construct
  source 1..17: mol_type = other DNA
acactcgggaacccaag

SEQ ID NO: 163877 - DNA, 17 bp, synthetic construct
  source 1..17: mol_type = other DNA
tacactcgggaacccaa

SEQ ID NO: 163878 - DNA, 17 bp, synthetic construct
  source 1..17: mol_type = other DNA
gtacactcgggaaccca

SEQ ID NO: 163879 - DNA, 17 bp, synthetic construct
  source 1..17: mol_type = other DNA
cgtacactcgggaaccc

SEQ ID NO: 163880 - DNA, 17 bp, synthetic construct
  source 1..17: mol_type = other DNA
acgtacactcgggaacc

SEQ ID NO: 163881 - DNA, 17 bp, synthetic construct
  source 1..17: mol_type = other DNA
cacgtacactcgggaac

SEQ ID NO: 163882 - DNA, 17 bp, synthetic construct
  source 1..17: mol_type = other DNA
ccacgtacactcgggaa

SEQ ID NO: 163883 - DNA, 17 bp, synthetic construct
  source 1..17: mol_type = other DNA
cccacgtacactcggga

SEQ ID NO: 163884 - DNA, 17 bp, synthetic construct
  source 1..17: mol_type = other DNA
ccccacgtacactcggg

SEQ ID NO: 163885 - DNA, 17 bp, synthetic construct
  source 1..17: mol_type = other DNA
cccccacgtacactcgg

SEQ ID NO: 163886 - DNA, 17 bp, synthetic construct
  source 1..17: mol_type = other DNA
ccccccacgtacactcg

SEQ ID NO: 163887 - DNA, 17 bp, synthetic construct
  source 1..17: mol_type = other DNA
cccccccacgtacactc

SEQ ID NO: 163888 - DNA, 17 bp, synthetic construct
  source 1..17: mol_type = other DNA
gcccccccacgtacact

SEQ ID NO: 163889 - DNA, 17 bp, synthetic construct
  source 1..17: mol_type = other DNA
cgcccccccacgtacac

SEQ ID NO: 163890 - DNA, 17 bp, synthetic construct
  source 1..17: mol_type = other DNA
ccgcccccccacgtaca

SEQ ID NO: 163891 - DNA, 17 bp, synthetic construct
  source 1..17: mol_type = other DNA
cccgcccccccacgtac

SEQ ID NO: 163892 - DNA, 17 bp, synthetic construct
  source 1..17: mol_type = other DNA
ccccgcccccccacgta

SEQ ID NO: 163893 - DNA, 17 bp, synthetic construct
  source 1..17: mol_type = other DNA
tccccgcccccccacgt

SEQ ID NO: 163894 - DNA, 17 bp, synthetic construct
  source 1..17: mol_type = other DNA
atccccgcccccccacg

SEQ ID NO: 163895 - DNA, 17 bp, synthetic construct
  source 1..17: mol_type = other DNA
gatccccgcccccccac

SEQ ID NO: 163896 - DNA, 17 bp, synthetic construct
  source 1..17: mol_type = other DNA
ggatccccgccccccca

SEQ ID NO: 163897 - DNA, 17 bp, synthetic construct
  source 1..17: mol_type = other DNA
gggatccccgccccccc

SEQ ID NO: 163898 - DNA, 17 bp, synthetic construct
  source 1..17: mol_type = other DNA
ggggatccccgcccccc

SEQ ID NO: 163899 - DNA, 17 bp, synthetic construct
  source 1..17: mol_type = other DNA
tggggatccccgccccc

SEQ ID NO: 163900 - DNA, 17 bp, synthetic construct
  source 1..17: mol_type = other DNA
ctggggatccccgcccc

SEQ ID NO: 163901 - DNA, 17 bp, synthetic construct
  source 1..17: mol_type = other DNA
cctggggatccccgccc

SEQ ID NO: 163902 - DNA, 17 bp, synthetic construct
  source 1..17: mol_type = other DNA
ccctggggatccccgcc

SEQ ID NO: 163903 - DNA, 17 bp, synthetic construct
  source 1..17: mol_type = other DNA
tccctggggatccccgc

SEQ ID NO: 163904 - DNA, 17 bp, synthetic construct
  source 1..17: mol_type = other DNA
gtccctggggatccccg

SEQ ID NO: 163905 - DNA, 17 bp, synthetic construct
  source 1..17: mol_type = other DNA
cgtccctggggatcccc

SEQ ID NO: 163906 - DNA, 17 bp, synthetic construct
  source 1..17: mol_type = other DNA
gcgtccctggggatccc

SEQ ID NO: 163907 - DNA, 17 bp, synthetic construct
  source 1..17: mol_type = other DNA
cgcgtccctggggatcc

SEQ ID NO: 163908 - DNA, 17 bp, synthetic construct
  source 1..17: mol_type = other DNA
ccgcgtccctggggatc

SEQ ID NO: 163909 - DNA, 17 bp, synthetic construct
  source 1..17: mol_type = other DNA
accgcgtccctggggat

SEQ ID NO: 163910 - DNA, 17 bp, synthetic construct
  source 1..17: mol_type = other DNA
caccgcgtccctgggga

SEQ ID NO: 163911 - DNA, 17 bp, synthetic construct
  source 1..17: mol_type = other DNA
acaccgcgtccctgggg

SEQ ID NO: 163912 - DNA, 17 bp, synthetic construct
  source 1..17: mol_type = other DNA
tacaccgcgtccctggg

SEQ ID NO: 163913 - DNA, 17 bp, synthetic construct
  source 1..17: mol_type = other DNA
ctacaccgcgtccctgg

SEQ ID NO: 163914 - DNA, 17 bp, synthetic construct
  source 1..17: mol_type = other DNA
cctacaccgcgtccctg

SEQ ID NO: 163915 - DNA, 17 bp, synthetic construct
  source 1..17: mol_type = other DNA
gcctacaccgcgtccct

SEQ ID NO: 163916 - DNA, 17 bp, synthetic construct
  source 1..17: mol_type = other DNA
agcctacaccgcgtccc

SEQ ID NO: 163917 - DNA, 17 bp, synthetic construct
  source 1..17: mol_type = other DNA
gagcctacaccgcgtcc

SEQ ID NO: 163918 - DNA, 17 bp, synthetic construct
  source 1..17: mol_type = other DNA
ggagcctacaccgcgtc

SEQ ID NO: 163919 - DNA, 17 bp, synthetic construct
  source 1..17: mol_type = other DNA
gggagcctacaccgcgt

SEQ ID NO: 163920 - DNA, 17 bp, synthetic construct
  source 1..17: mol_type = other DNA
cgggagcctacaccgcg

SEQ ID NO: 163921 - DNA, 17 bp, synthetic construct
  source 1..17: mol_type = other DNA
acgggagcctacaccgc

SEQ ID NO: 163922 - DNA, 17 bp, synthetic construct
  source 1..17: mol_type = other DNA
tacgggagcctacaccg

SEQ ID NO: 163923 - DNA, 17 bp, synthetic construct
  source 1..17: mol_type = other DNA
ttacgggagcctacacc

SEQ ID NO: 163924 - DNA, 17 bp, synthetic construct
  source 1..17: mol_type = other DNA
tttacgggagcctacac

SEQ ID NO: 163925 - DNA, 17 bp, synthetic construct
  source 1..17: mol_type = other DNA
gtttacgggagcctaca

SEQ ID NO: 163926 - DNA, 17 bp, synthetic construct
  source 1..17: mol_type = other DNA
agtttacgggagcctac

SEQ ID NO: 163927 - DNA, 17 bp, synthetic construct
  source 1..17: mol_type = other DNA
cagtttacgggagccta

SEQ ID NO: 163928 - DNA, 17 bp, synthetic construct
  source 1..17: mol_type = other DNA
gcagtttacgggagcct

SEQ ID NO: 163929 - DNA, 17 bp, synthetic construct
  source 1..17: mol_type = other DNA
tgcagtttacgggagcc

SEQ ID NO: 163930 - DNA, 17 bp, synthetic construct
  source 1..17: mol_type = other DNA
gtgcagtttacgggagc

SEQ ID NO: 163931 - DNA, 17 bp, synthetic construct
  source 1..17: mol_type = other DNA
tgtgcagtttacgggag

SEQ ID NO: 163932 - DNA, 17 bp, synthetic construct
  source 1..17: mol_type = other DNA
ttgtgcagtttacggga

SEQ ID NO: 163933 - DNA, 17 bp, synthetic construct
  source 1..17: mol_type = other DNA
attgtgcagtttacggg

SEQ ID NO: 163934 - DNA, 17 bp, synthetic construct
  source 1..17: mol_type = other DNA
cattgtgcagtttacgg

SEQ ID NO: 163935 - DNA, 17 bp, synthetic construct
  source 1..17: mol_type = other DNA
gcattgtgcagtttacg

SEQ ID NO: 163936 - DNA, 17 bp, synthetic construct
  source 1..17: mol_type = other DNA
tgcattgtgcagtttac

SEQ ID NO: 163937 - DNA, 17 bp, synthetic construct
  source 1..17: mol_type = other DNA
ttgcattgtgcagttta

SEQ ID NO: 163938 - DNA, 17 bp, synthetic construct
  source 1..17: mol_type = other DNA
cttgcattgtgcagttt

SEQ ID NO: 163939 - DNA, 17 bp, synthetic construct
  source 1..17: mol_type = other DNA
gcttgcattgtgcagtt

SEQ ID NO: 163940 - DNA, 17 bp, synthetic construct
  source 1..17: mol_type = other DNA
ggcttgcattgtgcagt

SEQ ID NO: 163941 - DNA, 17 bp, synthetic construct
  source 1..17: mol_type = other DNA
aggcttgcattgtgcag

SEQ ID NO: 163942 - DNA, 17 bp, synthetic construct
  source 1..17: mol_type = other DNA
aaggcttgcattgtgca

SEQ ID NO: 163943 - DNA, 17 bp, synthetic construct
  source 1..17: mol_type = other DNA
caaggcttgcattgtgc

SEQ ID NO: 163944 - DNA, 17 bp, synthetic construct
  source 1..17: mol_type = other DNA
tcaaggcttgcattgtg

SEQ ID NO: 163945 - DNA, 17 bp, synthetic construct
  source 1..17: mol_type = other DNA
ctcaaggcttgcattgt

SEQ ID NO: 163946 - DNA, 17 bp, synthetic construct
  source 1..17: mol_type = other DNA
cctcaaggcttgcattg

SEQ ID NO: 163947 - DNA, 17 bp, synthetic construct
  source 1..17: mol_type = other DNA
ccctcaaggcttgcatt

SEQ ID NO: 163948 - DNA, 17 bp, synthetic construct
  source 1..17: mol_type = other DNA
gccctcaaggcttgcat

SEQ ID NO: 163949 - DNA, 17 bp, synthetic construct
  source 1..17: mol_type = other DNA
tgccctcaaggcttgca

SEQ ID NO: 163950 - DNA, 17 bp, synthetic construct
  source 1..17: mol_type = other DNA
ctgccctcaaggcttgc

SEQ ID NO: 163951 - DNA, 17 bp, synthetic construct
  source 1..17: mol_type = other DNA
cctgccctcaaggcttg

SEQ ID NO: 163952 - DNA, 17 bp, synthetic construct
  source 1..17: mol_type = other DNA
gcctgccctcaaggctt

SEQ ID NO: 163953 - DNA, 17 bp, synthetic construct
  source 1..17: mol_type = other DNA
ggcctgccctcaaggct

SEQ ID NO: 163954 - DNA, 17 bp, synthetic construct
  source 1..17: mol_type = other DNA
gggcctgccctcaaggc

SEQ ID NO: 163955 - DNA, 17 bp, synthetic construct
  source 1..17: mol_type = other DNA
ggggcctgccctcaagg

SEQ ID NO: 163956 - DNA, 17 bp, synthetic construct
  source 1..17: mol_type = other DNA
aggggcctgccctcaag

SEQ ID NO: 163957 - DNA, 17 bp, synthetic construct
  source 1..17: mol_type = other DNA
caggggcctgccctcaa

SEQ ID NO: 163958 - DNA, 17 bp, synthetic construct
  source 1..17: mol_type = other DNA
gcaggggcctgccctca

SEQ ID NO: 163959 - DNA, 17 bp, synthetic construct
  source 1..17: mol_type = other DNA
agcaggggcctgccctc

SEQ ID NO: 163960 - DNA, 17 bp, synthetic construct
  source 1..17: mol_type = other DNA
cagcaggggcctgccct

SEQ ID NO: 163961 - DNA, 17 bp, synthetic construct
  source 1..17: mol_type = other DNA
ccagcaggggcctgccc

SEQ ID NO: 163962 - DNA, 17 bp, synthetic construct
  source 1..17: mol_type = other DNA
gccagcaggggcctgcc

SEQ ID NO: 163963 - DNA, 17 bp, synthetic construct
  source 1..17: mol_type = other DNA
agccagcaggggcctgc

SEQ ID NO: 163964 - DNA, 17 bp, synthetic construct
  source 1..17: mol_type = other DNA
cagccagcaggggcctg

SEQ ID NO: 163965 - DNA, 17 bp, synthetic construct
  source 1..17: mol_type = other DNA
ccagccagcaggggcct

SEQ ID NO: 163966 - DNA, 17 bp, synthetic construct
  source 1..17: mol_type = other DNA
accagccagcaggggcc

SEQ ID NO: 163967 - DNA, 17 bp, synthetic construct
  source 1..17: mol_type = other DNA
caccagccagcaggggc

SEQ ID NO: 163968 - DNA, 17 bp, synthetic construct
  source 1..17: mol_type = other DNA
ccaccagccagcagggg

SEQ ID NO: 163969 - DNA, 17 bp, synthetic construct
  source 1..17: mol_type = other DNA
cccaccagccagcaggg

SEQ ID NO: 163970 - DNA, 17 bp, synthetic construct
  source 1..17: mol_type = other DNA
ccccaccagccagcagg

SEQ ID NO: 163971 - DNA, 17 bp, synthetic construct
  source 1..17: mol_type = other DNA
cccccaccagccagcag

SEQ ID NO: 163972 - DNA, 17 bp, synthetic construct
  source 1..17: mol_type = other DNA
ccccccaccagccagca

SEQ ID NO: 163973 - DNA, 17 bp, synthetic construct
  source 1..17: mol_type = other DNA
gccccccaccagccagc

SEQ ID NO: 163974 - DNA, 17 bp, synthetic construct
  source 1..17: mol_type = other DNA
cgccccccaccagccag

SEQ ID NO: 163975 - DNA, 17 bp, synthetic construct
  source 1..17: mol_type = other DNA
ccgccccccaccagcca

SEQ ID NO: 163976 - DNA, 17 bp, synthetic construct
  source 1..17: mol_type = other DNA
gccgccccccaccagcc

SEQ ID NO: 163977 - DNA, 17 bp, synthetic construct
  source 1..17: mol_type = other DNA
agccgccccccaccagc

SEQ ID NO: 163978 - DNA, 17 bp, synthetic construct
  source 1..17: mol_type = other DNA
tagccgccccccaccag

SEQ ID NO: 163979 - DNA, 17 bp, synthetic construct
  source 1..17: mol_type = other DNA
gtagccgccccccacca

SEQ ID NO: 163980 - DNA, 17 bp, synthetic construct
  source 1..17: mol_type = other DNA
agtagccgccccccacc

SEQ ID NO: 163981 - DNA, 17 bp, synthetic construct
  source 1..17: mol_type = other DNA
gagtagccgccccccac

SEQ ID NO: 163982 - DNA, 17 bp, synthetic construct
  source 1..17: mol_type = other DNA
ggagtagccgcccccca

SEQ ID NO: 163983 - DNA, 17 bp, synthetic construct
  source 1..17: mol_type = other DNA
gggagtagccgcccccc

SEQ ID NO: 163984 - DNA, 17 bp, synthetic construct
  source 1..17: mol_type = other DNA
agggagtagccgccccc

SEQ ID NO: 163985 - DNA, 17 bp, synthetic construct
  source 1..17: mol_type = other DNA
cagggagtagccgcccc

SEQ ID NO: 163986 - DNA, 17 bp, synthetic construct
  source 1..17: mol_type = other DNA
gcagggagtagccgccc

SEQ ID NO: 163987 - DNA, 17 bp, synthetic construct
  source 1..17: mol_type = other DNA
tgcagggagtagccgcc

SEQ ID NO: 163988 - DNA, 17 bp, synthetic construct
  source 1..17: mol_type = other DNA
ctgcagggagtagccgc

SEQ ID NO: 163989 - DNA, 17 bp, synthetic construct
  source 1..17: mol_type = other DNA
gctgcagggagtagccg

SEQ ID NO: 163990 - DNA, 17 bp, synthetic construct
  source 1..17: mol_type = other DNA
tgctgcagggagtagcc

SEQ ID NO: 163991 - DNA, 17 bp, synthetic construct
  source 1..17: mol_type = other DNA
atgctgcagggagtagc

SEQ ID NO: 163992 - DNA, 17 bp, synthetic construct
  source 1..17: mol_type = other DNA
catgctgcagggagtag

SEQ ID NO: 163993 - DNA, 17 bp, synthetic construct
  source 1..17: mol_type = other DNA
ccatgctgcagggagta

SEQ ID NO: 163994 - DNA, 17 bp, synthetic construct
  source 1..17: mol_type = other DNA
tccatgctgcagggagt

SEQ ID NO: 163995 - DNA, 17 bp, synthetic construct
  source 1..17: mol_type = other DNA
ctccatgctgcagggag

SEQ ID NO: 163996 - DNA, 17 bp, synthetic construct
  source 1..17: mol_type = other DNA
gctccatgctgcaggga

SEQ ID NO: 163997 - DNA, 17 bp, synthetic construct
  source 1..17: mol_type = other DNA
ggctccatgctgcaggg

SEQ ID NO: 163998 - DNA, 17 bp, synthetic construct
  source 1..17: mol_type = other DNA
gggctccatgctgcagg

SEQ ID NO: 163999 - DNA, 17 bp, synthetic construct
  source 1..17: mol_type = other DNA
ggggctccatgctgcag

SEQ ID NO: 164000 - DNA, 17 bp, synthetic construct
  source 1..17: mol_type = other DNA
aggggctccatgctgca

SEQ ID NO: 164001 - DNA, 17 bp, synthetic construct
  source 1..17: mol_type = other DNA
caggggctccatgctgc

SEQ ID NO: 164002 - DNA, 17 bp, synthetic construct
  source 1..17: mol_type = other DNA
ccaggggctccatgctg

SEQ ID NO: 164003 - DNA, 17 bp, synthetic construct
  source 1..17: mol_type = other DNA
gccaggggctccatgct

SEQ ID NO: 164004 - DNA, 17 bp, synthetic construct
  source 1..17: mol_type = other DNA
agccaggggctccatgc

SEQ ID NO: 164005 - DNA, 17 bp, synthetic construct
  source 1..17: mol_type = other DNA
cagccaggggctccatg

SEQ ID NO: 164006 - DNA, 17 bp, synthetic construct
  source 1..17: mol_type = other DNA
ccagccaggggctccat

SEQ ID NO: 164007 - DNA, 17 bp, synthetic construct
  source 1..17: mol_type = other DNA
tccagccaggggctcca

SEQ ID NO: 164008 - DNA, 17 bp, synthetic construct
  source 1..17: mol_type = other DNA
ctccagccaggggctcc

SEQ ID NO: 164009 - DNA, 17 bp, synthetic construct
  source 1..17: mol_type = other DNA
tctccagccaggggctc

SEQ ID NO: 164010 - DNA, 17 bp, synthetic construct
  source 1..17: mol_type = other DNA
ctctccagccaggggct

SEQ ID NO: 164011 - DNA, 17 bp, synthetic construct
  source 1..17: mol_type = other DNA
tctctccagccaggggc

SEQ ID NO: 164012 - DNA, 17 bp, synthetic construct
  source 1..17: mol_type = other DNA
gtctctccagccagggg

SEQ ID NO: 164013 - DNA, 17 bp, synthetic construct
  source 1..17: mol_type = other DNA
agtctctccagccaggg

SEQ ID NO: 164014 - DNA, 17 bp, synthetic construct
  source 1..17: mol_type = other DNA
tagtctctccagccagg

SEQ ID NO: 164015 - DNA, 17 bp, synthetic construct
  source 1..17: mol_type = other DNA
ttagtctctccagccag

SEQ ID NO: 164016 - DNA, 17 bp, synthetic construct
  source 1..17: mol_type = other DNA
tttagtctctccagcca

SEQ ID NO: 164017 - DNA, 17 bp, synthetic construct
  source 1..17: mol_type = other DNA
ctttagtctctccagcc

SEQ ID NO: 164018 - DNA, 17 bp, synthetic construct
  source 1..17: mol_type = other DNA
cctttagtctctccagc

SEQ ID NO: 164019 - DNA, 17 bp, synthetic construct
  source 1..17: mol_type = other DNA
ccctttagtctctccag

SEQ ID NO: 164020 - DNA, 17 bp, synthetic construct
  source 1..17: mol_type = other DNA
gccctttagtctctcca

SEQ ID NO: 164021 - DNA, 17 bp, synthetic construct
  source 1..17: mol_type = other DNA
ggccctttagtctctcc

SEQ ID NO: 164022 - DNA, 17 bp, synthetic construct
  source 1..17: mol_type = other DNA
gggccctttagtctctc

SEQ ID NO: 164023 - DNA, 17 bp, synthetic construct
  source 1..17: mol_type = other DNA
agggccctttagtctct

SEQ ID NO: 164024 - DNA, 17 bp, synthetic construct
  source 1..17: mol_type = other DNA
cagggccctttagtctc

SEQ ID NO: 164025 - DNA, 17 bp, synthetic construct
  source 1..17: mol_type = other DNA
ccagggccctttagtct

SEQ ID NO: 164026 - DNA, 17 bp, synthetic construct
  source 1..17: mol_type = other DNA
accagggccctttagtc

SEQ ID NO: 164027 - DNA, 17 bp, synthetic construct
  source 1..17: mol_type = other DNA
caccagggccctttagt

SEQ ID NO: 164028 - DNA, 17 bp, synthetic construct
  source 1..17: mol_type = other DNA
tcaccagggccctttag

SEQ ID NO: 164029 - DNA, 17 bp, synthetic construct
  source 1..17: mol_type = other DNA
ctcaccagggcccttta

SEQ ID NO: 164030 - DNA, 17 bp, synthetic construct
  source 1..17: mol_type = other DNA
actcaccagggcccttt

SEQ ID NO: 164031 - DNA, 17 bp, synthetic construct
  source 1..17: mol_type = other DNA
gactcaccagggccctt

SEQ ID NO: 164032 - DNA, 17 bp, synthetic construct
  source 1..17: mol_type = other DNA
agactcaccagggccct

SEQ ID NO: 164033 - DNA, 17 bp, synthetic construct
  source 1..17: mol_type = other DNA
aagactcaccagggccc

SEQ ID NO: 164034 - DNA, 17 bp, synthetic construct
  source 1..17: mol_type = other DNA
gaagactcaccagggcc

SEQ ID NO: 164035 - DNA, 17 bp, synthetic construct
  source 1..17: mol_type = other DNA
agaagactcaccagggc

SEQ ID NO: 164036 - DNA, 17 bp, synthetic construct
  source 1..17: mol_type = other DNA
cagaagactcaccaggg

SEQ ID NO: 164037 - DNA, 17 bp, synthetic construct
  source 1..17: mol_type = other DNA
gcagaagactcaccagg

SEQ ID NO: 164038 - DNA, 17 bp, synthetic construct
  source 1..17: mol_type = other DNA
agcagaagactcaccag

SEQ ID NO: 164039 - DNA, 17 bp, synthetic construct
  source 1..17: mol_type = other DNA
gagcagaagactcacca

SEQ ID NO: 164040 - DNA, 17 bp, synthetic construct
  source 1..17: mol_type = other DNA
tgagcagaagactcacc

SEQ ID NO: 164041 - DNA, 17 bp, synthetic construct
  source 1..17: mol_type = other DNA
gtgagcagaagactcac

SEQ ID NO: 164042 - DNA, 17 bp, synthetic construct
  source 1..17: mol_type = other DNA
ggtgagcagaagactca

SEQ ID NO: 164043 - DNA, 17 bp, synthetic construct
  source 1..17: mol_type = other DNA
gggtgagcagaagactc

SEQ ID NO: 164044 - DNA, 17 bp, synthetic construct
  source 1..17: mol_type = other DNA
agggtgagcagaagact

SEQ ID NO: 164045 - DNA, 17 bp, synthetic construct
  source 1..17: mol_type = other DNA
cagggtgagcagaagac

SEQ ID NO: 164046 - DNA, 17 bp, synthetic construct
  source 1..17: mol_type = other DNA
gcagggtgagcagaaga

SEQ ID NO: 164047 - DNA, 17 bp, synthetic construct
  source 1..17: mol_type = other DNA
ggcagggtgagcagaag

SEQ ID NO: 164048 - DNA, 17 bp, synthetic construct
  source 1..17: mol_type = other DNA
cggcagggtgagcagaa

SEQ ID NO: 164049 - DNA, 17 bp, synthetic construct
  source 1..17: mol_type = other DNA
ccggcagggtgagcaga

SEQ ID NO: 164050 - DNA, 17 bp, synthetic construct
  source 1..17: mol_type = other DNA
gccggcagggtgagcag

SEQ ID NO: 164051 - DNA, 17 bp, synthetic construct
  source 1..17: mol_type = other DNA
ggccggcagggtgagca

SEQ ID NO: 164052 - DNA, 17 bp, synthetic construct
  source 1..17: mol_type = other DNA
gggccggcagggtgagc

SEQ ID NO: 164053 - DNA, 17 bp, synthetic construct
  source 1..17: mol_type = other DNA
agggccggcagggtgag

SEQ ID NO: 164054 - DNA, 17 bp, synthetic construct
  source 1..17: mol_type = other DNA
tagggccggcagggtga

SEQ ID NO: 164055 - DNA, 17 bp, synthetic construct
  source 1..17: mol_type = other DNA
ctagggccggcagggtg

SEQ ID NO: 164056 - DNA, 17 bp, synthetic construct
  source 1..17: mol_type = other DNA
cctagggccggcagggt

SEQ ID NO: 164057 - DNA, 17 bp, synthetic construct
  source 1..17: mol_type = other DNA
gcctagggccggcaggg

SEQ ID NO: 164058 - DNA, 17 bp, synthetic construct
  source 1..17: mol_type = other DNA
agcctagggccggcagg

SEQ ID NO: 164059 - DNA, 17 bp, synthetic construct
  source 1..17: mol_type = other DNA
cagcctagggccggcag

SEQ ID NO: 164060 - DNA, 17 bp, synthetic construct
  source 1..17: mol_type = other DNA
gcagcctagggccggca

SEQ ID NO: 164061 - DNA, 17 bp, synthetic construct
  source 1..17: mol_type = other DNA
agcagcctagggccggc

SEQ ID NO: 164062 - DNA, 17 bp, synthetic construct
  source 1..17: mol_type = other DNA
tagcagcctagggccgg

SEQ ID NO: 164063 - DNA, 17 bp, synthetic construct
  source 1..17: mol_type = other DNA
gtagcagcctagggccg

SEQ ID NO: 164064 - DNA, 17 bp, synthetic construct
  source 1..17: mol_type = other DNA
ggtagcagcctagggcc

SEQ ID NO: 164065 - DNA, 17 bp, synthetic construct
  source 1..17: mol_type = other DNA
gggtagcagcctagggc

SEQ ID NO: 164066 - DNA, 17 bp, synthetic construct
  source 1..17: mol_type = other DNA
cgggtagcagcctaggg

SEQ ID NO: 164067 - DNA, 17 bp, synthetic construct
  source 1..17: mol_type = other DNA
tcgggtagcagcctagg

SEQ ID NO: 164068 - DNA, 17 bp, synthetic construct
  source 1..17: mol_type = other DNA
ttcgggtagcagcctag

SEQ ID NO: 164069 - DNA, 17 bp, synthetic construct
  source 1..17: mol_type = other DNA
cttcgggtagcagccta

SEQ ID NO: 164070 - DNA, 17 bp, synthetic construct
  source 1..17: mol_type = other DNA
acttcgggtagcagcct

SEQ ID NO: 164071 - DNA, 17 bp, synthetic construct
  source 1..17: mol_type = other DNA
cacttcgggtagcagcc

SEQ ID NO: 164072 - DNA, 17 bp, synthetic construct
  source 1..17: mol_type = other DNA
gcacttcgggtagcagc

SEQ ID NO: 164073 - DNA, 17 bp, synthetic construct
  source 1..17: mol_type = other DNA
ggcacttcgggtagcag

SEQ ID NO: 164074 - DNA, 17 bp, synthetic construct
  source 1..17: mol_type = other DNA
gggcacttcgggtagca

SEQ ID NO: 164075 - DNA, 17 bp, synthetic construct
  source 1..17: mol_type = other DNA
tgggcacttcgggtagc

SEQ ID NO: 164076 - DNA, 17 bp, synthetic construct
  source 1..17: mol_type = other DNA
gtgggcacttcgggtag

SEQ ID NO: 164077 - DNA, 17 bp, synthetic construct
  source 1..17: mol_type = other DNA
ggtgggcacttcgggta

SEQ ID NO: 164078 - DNA, 17 bp, synthetic construct
  source 1..17: mol_type = other DNA
gggtgggcacttcgggt

SEQ ID NO: 164079 - DNA, 17 bp, synthetic construct
  source 1..17: mol_type = other DNA
tgggtgggcacttcggg

SEQ ID NO: 164080 - DNA, 17 bp, synthetic construct
  source 1..17: mol_type = other DNA
ctgggtgggcacttcgg

SEQ ID NO: 164081 - DNA, 17 bp, synthetic construct
  source 1..17: mol_type = other DNA
gctgggtgggcacttcg

SEQ ID NO: 164082 - DNA, 17 bp, synthetic construct
  source 1..17: mol_type = other DNA
ggctgggtgggcacttc

SEQ ID NO: 164083 - DNA, 17 bp, synthetic construct
  source 1..17: mol_type = other DNA
tggctgggtgggcactt

SEQ ID NO: 164084 - DNA, 17 bp, synthetic construct
  source 1..17: mol_type = other DNA
ctggctgggtgggcact

SEQ ID NO: 164085 - DNA, 17 bp, synthetic construct
  source 1..17: mol_type = other DNA
gctggctgggtgggcac

SEQ ID NO: 164086 - DNA, 17 bp, synthetic construct
  source 1..17: mol_type = other DNA
ggctggctgggtgggca

SEQ ID NO: 164087 - DNA, 17 bp, synthetic construct
  source 1..17: mol_type = other DNA
gggctggctgggtgggc

SEQ ID NO: 164088 - DNA, 17 bp, synthetic construct
  source 1..17: mol_type = other DNA
agggctggctgggtggg

SEQ ID NO: 164089 - DNA, 17 bp, synthetic construct
  source 1..17: mol_type = other DNA
aagggctggctgggtgg

SEQ ID NO: 164090 - DNA, 17 bp, synthetic construct
  source 1..17: mol_type = other DNA
gaagggctggctgggtg

SEQ ID NO: 164091 - DNA, 17 bp, synthetic construct
  source 1..17: mol_type = other DNA
agaagggctggctgggt

SEQ ID NO: 164092 - DNA, 17 bp, synthetic construct
  source 1..17: mol_type = other DNA
aagaagggctggctggg

SEQ ID NO: 164093 - DNA, 17 bp, synthetic construct
  source 1..17: mol_type = other DNA
gaagaagggctggctgg

SEQ ID NO: 164094 - DNA, 17 bp, synthetic construct
  source 1..17: mol_type = other DNA
tgaagaagggctggctg

SEQ ID NO: 164095 - DNA, 17 bp, synthetic construct
  source 1..17: mol_type = other DNA
ttgaagaagggctggct

SEQ ID NO: 164096 - DNA, 17 bp, synthetic construct
  source 1..17: mol_type = other DNA
attgaagaagggctggc

SEQ ID NO: 164097 - DNA, 17 bp, synthetic construct
  source 1..17: mol_type = other DNA
cattgaagaagggctgg

SEQ ID NO: 164098 - DNA, 17 bp, synthetic construct
  source 1..17: mol_type = other DNA
tcattgaagaagggctg

SEQ ID NO: 164099 - DNA, 17 bp, synthetic construct
  source 1..17: mol_type = other DNA
ctcattgaagaagggct

SEQ ID NO: 164100 - DNA, 17 bp, synthetic construct
  source 1..17: mol_type = other DNA
cctcattgaagaagggc

SEQ ID NO: 164101 - DNA, 17 bp, synthetic construct
  source 1..17: mol_type = other DNA
tcctcattgaagaaggg

SEQ ID NO: 164102 - DNA, 17 bp, synthetic construct
  source 1..17: mol_type = other DNA
gtcctcattgaagaagg

SEQ ID NO: 164103 - DNA, 17 bp, synthetic construct
  source 1..17: mol_type = other DNA
ggtcctcattgaagaag

SEQ ID NO: 164104 - DNA, 17 bp, synthetic construct
  source 1..17: mol_type = other DNA
tggtcctcattgaagaa

SEQ ID NO: 164105 - DNA, 17 bp, synthetic construct
  source 1..17: mol_type = other DNA
ctggtcctcattgaaga

SEQ ID NO: 164106 - DNA, 17 bp, synthetic construct
  source 1..17: mol_type = other DNA
tctggtcctcattgaag

SEQ ID NO: 164107 - DNA, 17 bp, synthetic construct
  source 1..17: mol_type = other DNA
atctggtcctcattgaa

SEQ ID NO: 164108 - DNA, 17 bp, synthetic construct
  source 1..17: mol_type = other DNA
catctggtcctcattga

SEQ ID NO: 164109 - DNA, 17 bp, synthetic construct
  source 1..17: mol_type = other DNA
tcatctggtcctcattg

SEQ ID NO: 164110 - DNA, 17 bp, synthetic construct
  source 1..17: mol_type = other DNA
ttcatctggtcctcatt

SEQ ID NO: 164111 - DNA, 17 bp, synthetic construct
  source 1..17: mol_type = other DNA
cttcatctggtcctcat

SEQ ID NO: 164112 - DNA, 17 bp, synthetic construct
  source 1..17: mol_type = other DNA
acttcatctggtcctca

SEQ ID NO: 164113 - DNA, 17 bp, synthetic construct
  source 1..17: mol_type = other DNA
cacttcatctggtcctc

SEQ ID NO: 164114 - DNA, 17 bp, synthetic construct
  source 1..17: mol_type = other DNA
gcacttcatctggtcct

SEQ ID NO: 164115 - DNA, 17 bp, synthetic construct
  source 1..17: mol_type = other DNA
cgcacttcatctggtcc

SEQ ID NO: 164116 - DNA, 17 bp, synthetic construct
  source 1..17: mol_type = other DNA
acgcacttcatctggtc

SEQ ID NO: 164117 - DNA, 17 bp, synthetic construct
  source 1..17: mol_type = other DNA
cacgcacttcatctggt

SEQ ID NO: 164118 - DNA, 17 bp, synthetic construct
  source 1..17: mol_type = other DNA
ccacgcacttcatctgg

SEQ ID NO: 164119 - DNA, 17 bp, synthetic construct
  source 1..17: mol_type = other DNA
gccacgcacttcatctg

SEQ ID NO: 164120 - DNA, 17 bp, synthetic construct
  source 1..17: mol_type = other DNA
ggccacgcacttcatct

SEQ ID NO: 164121 - DNA, 17 bp, synthetic construct
  source 1..17: mol_type = other DNA
gggccacgcacttcatc

SEQ ID NO: 164122 - DNA, 17 bp, synthetic construct
  source 1..17: mol_type = other DNA
tgggccacgcacttcat

SEQ ID NO: 164123 - DNA, 17 bp, synthetic construct
  source 1..17: mol_type = other DNA
ctgggccacgcacttca

SEQ ID NO: 164124 - DNA, 17 bp, synthetic construct
  source 1..17: mol_type = other DNA
actgggccacgcacttc

SEQ ID NO: 164125 - DNA, 17 bp, synthetic construct
  source 1..17: mol_type = other DNA
cactgggccacgcactt

SEQ ID NO: 164126 - DNA, 17 bp, synthetic construct
  source 1..17: mol_type = other DNA
acactgggccacgcact

SEQ ID NO: 164127 - DNA, 17 bp, synthetic construct
  source 1..17: mol_type = other DNA
cacactgggccacgcac

SEQ ID NO: 164128 - DNA, 17 bp, synthetic construct
  source 1..17: mol_type = other DNA
ccacactgggccacgca

SEQ ID NO: 164129 - DNA, 17 bp, synthetic construct
  source 1..17: mol_type = other DNA
gccacactgggccacgc

SEQ ID NO: 164130 - DNA, 17 bp, synthetic construct
  source 1..17: mol_type = other DNA
agccacactgggccacg

SEQ ID NO: 164131 - DNA, 17 bp, synthetic construct
  source 1..17: mol_type = other DNA
cagccacactgggccac

SEQ ID NO: 164132 - DNA, 17 bp, synthetic construct
  source 1..17: mol_type = other DNA
gcagccacactgggcca

SEQ ID NO: 164133 - DNA, 17 bp, synthetic construct
  source 1..17: mol_type = other DNA
agcagccacactgggcc

SEQ ID NO: 164134 - DNA, 17 bp, synthetic construct
  source 1..17: mol_type = other DNA
tagcagccacactgggc

SEQ ID NO: 164135 - DNA, 17 bp, synthetic construct
  source 1..17: mol_type = other DNA
gtagcagccacactggg

SEQ ID NO: 164136 - DNA, 17 bp, synthetic construct
  source 1..17: mol_type = other DNA
cgtagcagccacactgg

SEQ ID NO: 164137 - DNA, 17 bp, synthetic construct
  source 1..17: mol_type = other DNA
tcgtagcagccacactg

SEQ ID NO: 164138 - DNA, 17 bp, synthetic construct
  source 1..17: mol_type = other DNA
gtcgtagcagccacact

SEQ ID NO: 164139 - DNA, 17 bp, synthetic construct
  source 1..17: mol_type = other DNA
tgtcgtagcagccacac

SEQ ID NO: 164140 - DNA, 17 bp, synthetic construct
  source 1..17: mol_type = other DNA
ttgtcgtagcagccaca

SEQ ID NO: 164141 - DNA, 17 bp, synthetic construct
  source 1..17: mol_type = other DNA
cttgtcgtagcagccac

SEQ ID NO: 164142 - DNA, 17 bp, synthetic construct
  source 1..17: mol_type = other DNA
ccttgtcgtagcagcca

SEQ ID NO: 164143 - DNA, 17 bp, synthetic construct
  source 1..17: mol_type = other DNA
tccttgtcgtagcagcc

SEQ ID NO: 164144 - DNA, 17 bp, synthetic construct
  source 1..17: mol_type = other DNA
gtccttgtcgtagcagc

SEQ ID NO: 164145 - DNA, 17 bp, synthetic construct
  source 1..17: mol_type = other DNA
cgtccttgtcgtagcag

SEQ ID NO: 164146 - DNA, 17 bp, synthetic construct
  source 1..17: mol_type = other DNA
ccgtccttgtcgtagca

SEQ ID NO: 164147 - DNA, 17 bp, synthetic construct
  source 1..17: mol_type = other DNA
tccgtccttgtcgtagc

SEQ ID NO: 164148 - DNA, 17 bp, synthetic construct
  source 1..17: mol_type = other DNA
ttccgtccttgtcgtag

SEQ ID NO: 164149 - DNA, 17 bp, synthetic construct
  source 1..17: mol_type = other DNA
tttccgtccttgtcgta

SEQ ID NO: 164150 - DNA, 17 bp, synthetic construct
  source 1..17: mol_type = other DNA
gtttccgtccttgtcgt

SEQ ID NO: 164151 - DNA, 17 bp, synthetic construct
  source 1..17: mol_type = other DNA
agtttccgtccttgtcg

SEQ ID NO: 164152 - DNA, 17 bp, synthetic construct
  source 1..17: mol_type = other DNA
tagtttccgtccttgtc

SEQ ID NO: 164153 - DNA, 17 bp, synthetic construct
  source 1..17: mol_type = other DNA
gtagtttccgtccttgt

SEQ ID NO: 164154 - DNA, 17 bp, synthetic construct
  source 1..17: mol_type = other DNA
agtagtttccgtccttg

SEQ ID NO: 164155 - DNA, 17 bp, synthetic construct
  source 1..17: mol_type = other DNA
tagtagtttccgtcctt

SEQ ID NO: 164156 - DNA, 17 bp, synthetic construct
  source 1..17: mol_type = other DNA
atagtagtttccgtcct

SEQ ID NO: 164157 - DNA, 17 bp, synthetic construct
  source 1..17: mol_type = other DNA
catagtagtttccgtcc

SEQ ID NO: 164158 - DNA, 17 bp, synthetic construct
  source 1..17: mol_type = other DNA
tcatagtagtttccgtc

SEQ ID NO: 164159 - DNA, 17 bp, synthetic construct
  source 1..17: mol_type = other DNA
gtcatagtagtttccgt

SEQ ID NO: 164160 - DNA, 17 bp, synthetic construct
  source 1..17: mol_type = other DNA
cgtcatagtagtttccg

SEQ ID NO: 164161 - DNA, 17 bp, synthetic construct
  source 1..17: mol_type = other DNA
acgtcatagtagtttcc

SEQ ID NO: 164162 - DNA, 17 bp, synthetic construct
  source 1..17: mol_type = other DNA
gacgtcatagtagtttc

SEQ ID NO: 164163 - DNA, 17 bp, synthetic construct
  source 1..17: mol_type = other DNA
cgacgtcatagtagttt

SEQ ID NO: 164164 - DNA, 17 bp, synthetic construct
  source 1..17: mol_type = other DNA
ccgacgtcatagtagtt

SEQ ID NO: 164165 - DNA, 17 bp, synthetic construct
  source 1..17: mol_type = other DNA
accgacgtcatagtagt

SEQ ID NO: 164166 - DNA, 17 bp, synthetic construct
  source 1..17: mol_type = other DNA
caccgacgtcatagtag

SEQ ID NO: 164167 - DNA, 17 bp, synthetic construct
  source 1..17: mol_type = other DNA
gcaccgacgtcatagta

SEQ ID NO: 164168 - DNA, 17 bp, synthetic construct
  source 1..17: mol_type = other DNA
tgcaccgacgtcatagt

SEQ ID NO: 164169 - DNA, 17 bp, synthetic construct
  source 1..17: mol_type = other DNA
ttgcaccgacgtcatag

SEQ ID NO: 164170 - DNA, 17 bp, synthetic construct
  source 1..17: mol_type = other DNA
cttgcaccgacgtcata

SEQ ID NO: 164171 - DNA, 17 bp, synthetic construct
  source 1..17: mol_type = other DNA
ccttgcaccgacgtcat

SEQ ID NO: 164172 - DNA, 17 bp, synthetic construct
  source 1..17: mol_type = other DNA
cccttgcaccgacgtca

SEQ ID NO: 164173 - DNA, 17 bp, synthetic construct
  source 1..17: mol_type = other DNA
acccttgcaccgacgtc

SEQ ID NO: 164174 - DNA, 17 bp, synthetic construct
  source 1..17: mol_type = other DNA
gacccttgcaccgacgt

SEQ ID NO: 164175 - DNA, 17 bp, synthetic construct
  source 1..17: mol_type = other DNA
ggacccttgcaccgacg

SEQ ID NO: 164176 - DNA, 17 bp, synthetic construct
  source 1..17: mol_type = other DNA
gggacccttgcaccgac

SEQ ID NO: 164177 - DNA, 17 bp, synthetic construct
  source 1..17: mol_type = other DNA
ggggacccttgcaccga

SEQ ID NO: 164178 - DNA, 17 bp, synthetic construct
  source 1..17: mol_type = other DNA
tggggacccttgcaccg

SEQ ID NO: 164179 - DNA, 17 bp, synthetic construct
  source 1..17: mol_type = other DNA
gtggggacccttgcacc

SEQ ID NO: 164180 - DNA, 17 bp, synthetic construct
  source 1..17: mol_type = other DNA
tgtggggacccttgcac

SEQ ID NO: 164181 - DNA, 17 bp, synthetic construct
  source 1..17: mol_type = other DNA
ctgtggggacccttgca

SEQ ID NO: 164182 - DNA, 17 bp, synthetic construct
  source 1..17: mol_type = other DNA
gctgtggggacccttgc

SEQ ID NO: 164183 - DNA, 17 bp, synthetic construct
  source 1..17: mol_type = other DNA
cgctgtggggacccttg

SEQ ID NO: 164184 - DNA, 17 bp, synthetic construct
  source 1..17: mol_type = other DNA
ccgctgtggggaccctt

SEQ ID NO: 164185 - DNA, 17 bp, synthetic construct
  source 1..17: mol_type = other DNA
tccgctgtggggaccct

SEQ ID NO: 164186 - DNA, 17 bp, synthetic construct
  source 1..17: mol_type = other DNA
ctccgctgtggggaccc

SEQ ID NO: 164187 - DNA, 17 bp, synthetic construct
  source 1..17: mol_type = other DNA
tctccgctgtggggacc

SEQ ID NO: 164188 - DNA, 17 bp, synthetic construct
  source 1..17: mol_type = other DNA
ttctccgctgtggggac

SEQ ID NO: 164189 - DNA, 17 bp, synthetic construct
  source 1..17: mol_type = other DNA
gttctccgctgtgggga

SEQ ID NO: 164190 - DNA, 17 bp, synthetic construct
  source 1..17: mol_type = other DNA
agttctccgctgtgggg

SEQ ID NO: 164191 - DNA, 17 bp, synthetic construct
  source 1..17: mol_type = other DNA
cagttctccgctgtggg

SEQ ID NO: 164192 - DNA, 17 bp, synthetic construct
  source 1..17: mol_type = other DNA
gcagttctccgctgtgg

SEQ ID NO: 164193 - DNA, 17 bp, synthetic construct
  source 1..17: mol_type = other DNA
ggcagttctccgctgtg

SEQ ID NO: 164194 - DNA, 17 bp, synthetic construct
  source 1..17: mol_type = other DNA
tggcagttctccgctgt

SEQ ID NO: 164195 - DNA, 17 bp, synthetic construct
  source 1..17: mol_type = other DNA
ctggcagttctccgctg

SEQ ID NO: 164196 - DNA, 17 bp, synthetic construct
  source 1..17: mol_type = other DNA
tctggcagttctccgct

SEQ ID NO: 164197 - DNA, 17 bp, synthetic construct
  source 1..17: mol_type = other DNA
ctctggcagttctccgc

SEQ ID NO: 164198 - DNA, 17 bp, synthetic construct
  source 1..17: mol_type = other DNA
gctctggcagttctccg

SEQ ID NO: 164199 - DNA, 17 bp, synthetic construct
  source 1..17: mol_type = other DNA
agctctggcagttctcc

SEQ ID NO: 164200 - DNA, 17 bp, synthetic construct
  source 1..17: mol_type = other DNA
cagctctggcagttctc

SEQ ID NO: 164201 - DNA, 17 bp, synthetic construct
  source 1..17: mol_type = other DNA
ccagctctggcagttct

SEQ ID NO: 164202 - DNA, 17 bp, synthetic construct
  source 1..17: mol_type = other DNA
accagctctggcagttc

SEQ ID NO: 164203 - DNA, 17 bp, synthetic construct
  source 1..17: mol_type = other DNA
caccagctctggcagtt

SEQ ID NO: 164204 - DNA, 17 bp, synthetic construct
  source 1..17: mol_type = other DNA
tcaccagctctggcagt

SEQ ID NO: 164205 - DNA, 17 bp, synthetic construct
  source 1..17: mol_type = other DNA
ctcaccagctctggcag

SEQ ID NO: 164206 - DNA, 17 bp, synthetic construct
  source 1..17: mol_type = other DNA
cctcaccagctctggca

SEQ ID NO: 164207 - DNA, 17 bp, synthetic construct
  source 1..17: mol_type = other DNA
ccctcaccagctctggc

SEQ ID NO: 164208 - DNA, 17 bp, synthetic construct
  source 1..17: mol_type = other DNA
cccctcaccagctctgg

SEQ ID NO: 164209 - DNA, 17 bp, synthetic construct
  source 1..17: mol_type = other DNA
ccccctcaccagctctg

SEQ ID NO: 164210 - DNA, 17 bp, synthetic construct
  source 1..17: mol_type = other DNA
accccctcaccagctct

SEQ ID NO: 164211 - DNA, 17 bp, synthetic construct
  source 1..17: mol_type = other DNA
caccccctcaccagctc

SEQ ID NO: 164212 - DNA, 17 bp, synthetic construct
  source 1..17: mol_type = other DNA
ccaccccctcaccagct

SEQ ID NO: 164213 - DNA, 17 bp, synthetic construct
  source 1..17: mol_type = other DNA
cccaccccctcaccagc

SEQ ID NO: 164214 - DNA, 17 bp, synthetic construct
  source 1..17: mol_type = other DNA
tcccaccccctcaccag

SEQ ID NO: 164215 - DNA, 17 bp, synthetic construct
  source 1..17: mol_type = other DNA
ttcccaccccctcacca

SEQ ID NO: 164216 - DNA, 17 bp, synthetic construct
  source 1..17: mol_type = other DNA
cttcccaccccctcacc

SEQ ID NO: 164217 - DNA, 17 bp, synthetic construct
  source 1..17: mol_type = other DNA
gcttcccaccccctcac

SEQ ID NO: 164218 - DNA, 17 bp, synthetic construct
  source 1..17: mol_type = other DNA
cgcttcccaccccctca

SEQ ID NO: 164219 - DNA, 17 bp, synthetic construct
  source 1..17: mol_type = other DNA
ccgcttcccaccccctc

SEQ ID NO: 164220 - DNA, 17 bp, synthetic construct
  source 1..17: mol_type = other DNA
cccgcttcccaccccct

SEQ ID NO: 164221 - DNA, 17 bp, synthetic construct
  source 1..17: mol_type = other DNA
acccgcttcccaccccc

SEQ ID NO: 164222 - DNA, 17 bp, synthetic construct
  source 1..17: mol_type = other DNA
cacccgcttcccacccc

SEQ ID NO: 164223 - DNA, 17 bp, synthetic construct
  source 1..17: mol_type = other DNA
ccacccgcttcccaccc

SEQ ID NO: 164224 - DNA, 17 bp, synthetic construct
  source 1..17: mol_type = other DNA
gccacccgcttcccacc

SEQ ID NO: 164225 - DNA, 17 bp, synthetic construct
  source 1..17: mol_type = other DNA
cgccacccgcttcccac

SEQ ID NO: 164226 - DNA, 17 bp, synthetic construct
  source 1..17: mol_type = other DNA
gcgccacccgcttccca

SEQ ID NO: 164227 - DNA, 17 bp, synthetic construct
  source 1..17: mol_type = other DNA
agcgccacccgcttccc

SEQ ID NO: 164228 - DNA, 17 bp, synthetic construct
  source 1..17: mol_type = other DNA
cagcgccacccgcttcc

SEQ ID NO: 164229 - DNA, 17 bp, synthetic construct
  source 1..17: mol_type = other DNA
ccagcgccacccgcttc

SEQ ID NO: 164230 - DNA, 17 bp, synthetic construct
  source 1..17: mol_type = other DNA
cccagcgccacccgctt

SEQ ID NO: 164231 - DNA, 17 bp, synthetic construct
  source 1..17: mol_type = other DNA
ccccagcgccacccgct

SEQ ID NO: 164232 - DNA, 17 bp, synthetic construct
  source 1..17: mol_type = other DNA
cccccagcgccacccgc

SEQ ID NO: 164233 - DNA, 17 bp, synthetic construct
  source 1..17: mol_type = other DNA
tcccccagcgccacccg

SEQ ID NO: 164234 - DNA, 17 bp, synthetic construct
  source 1..17: mol_type = other DNA
ctcccccagcgccaccc

SEQ ID NO: 164235 - DNA, 17 bp, synthetic construct
  source 1..17: mol_type = other DNA
gctcccccagcgccacc

SEQ ID NO: 164236 - DNA, 17 bp, synthetic construct
  source 1..17: mol_type = other DNA
tgctcccccagcgccac

SEQ ID NO: 164237 - DNA, 17 bp, synthetic construct
  source 1..17: mol_type = other DNA
ctgctcccccagcgcca

SEQ ID NO: 164238 - DNA, 17 bp, synthetic construct
  source 1..17: mol_type = other DNA
cctgctcccccagcgcc

SEQ ID NO: 164239 - DNA, 17 bp, synthetic construct
  source 1..17: mol_type = other DNA
ccctgctcccccagcgc

SEQ ID NO: 164240 - DNA, 17 bp, synthetic construct
  source 1..17: mol_type = other DNA
gccctgctcccccagcg

SEQ ID NO: 164241 - DNA, 17 bp, synthetic construct
  source 1..17: mol_type = other DNA
agccctgctcccccagc

SEQ ID NO: 164242 - DNA, 17 bp, synthetic construct
  source 1..17: mol_type = other DNA
cagccctgctcccccag

SEQ ID NO: 164243 - DNA, 17 bp, synthetic construct
  source 1..17: mol_type = other DNA
ccagccctgctccccca

SEQ ID NO: 164244 - DNA, 17 bp, synthetic construct
  source 1..17: mol_type = other DNA
cccagccctgctccccc

SEQ ID NO: 164245 - DNA, 17 bp, synthetic construct
  source 1..17: mol_type = other DNA
ccccagccctgctcccc

SEQ ID NO: 164246 - DNA, 17 bp, synthetic construct
  source 1..17: mol_type = other DNA
tccccagccctgctccc

SEQ ID NO: 164247 - DNA, 17 bp, synthetic construct
  source 1..17: mol_type = other DNA
ctccccagccctgctcc

SEQ ID NO: 164248 - DNA, 17 bp, synthetic construct
  source 1..17: mol_type = other DNA
gctccccagccctgctc

SEQ ID NO: 164249 - DNA, 17 bp, synthetic construct
  source 1..17: mol_type = other DNA
tgctccccagccctgct

SEQ ID NO: 164250 - DNA, 17 bp, synthetic construct
  source 1..17: mol_type = other DNA
ctgctccccagccctgc

SEQ ID NO: 164251 - DNA, 17 bp, synthetic construct
  source 1..17: mol_type = other DNA
cctgctccccagccctg

SEQ ID NO: 164252 - DNA, 17 bp, synthetic construct
  source 1..17: mol_type = other DNA
gcctgctccccagccct

SEQ ID NO: 164253 - DNA, 17 bp, synthetic construct
  source 1..17: mol_type = other DNA
ggcctgctccccagccc

SEQ ID NO: 164254 - DNA, 17 bp, synthetic construct
  source 1..17: mol_type = other DNA
gggcctgctccccagcc

SEQ ID NO: 164255 - DNA, 17 bp, synthetic construct
  source 1..17: mol_type = other DNA
agggcctgctccccagc

SEQ ID NO: 164256 - DNA, 17 bp, synthetic construct
  source 1..17: mol_type = other DNA
cagggcctgctccccag

SEQ ID NO: 164257 - DNA, 17 bp, synthetic construct
  source 1..17: mol_type = other DNA
gcagggcctgctcccca

SEQ ID NO: 164258 - DNA, 17 bp, synthetic construct
  source 1..17: mol_type = other DNA
tgcagggcctgctcccc

SEQ ID NO: 164259 - DNA, 17 bp, synthetic construct
  source 1..17: mol_type = other DNA
ctgcagggcctgctccc

SEQ ID NO: 164260 - DNA, 17 bp, synthetic construct
  source 1..17: mol_type = other DNA
cctgcagggcctgctcc

SEQ ID NO: 164261 - DNA, 17 bp, synthetic construct
  source 1..17: mol_type = other DNA
gcctgcagggcctgctc

SEQ ID NO: 164262 - DNA, 17 bp, synthetic construct
  source 1..17: mol_type = other DNA
agcctgcagggcctgct

SEQ ID NO: 164263 - DNA, 17 bp, synthetic construct
  source 1..17: mol_type = other DNA
cagcctgcagggcctgc

SEQ ID NO: 164264 - DNA, 17 bp, synthetic construct
  source 1..17: mol_type = other DNA
gcagcctgcagggcctg

SEQ ID NO: 164265 - DNA, 17 bp, synthetic construct
  source 1..17: mol_type = other DNA
ggcagcctgcagggcct

SEQ ID NO: 164266 - DNA, 17 bp, synthetic construct
  source 1..17: mol_type = other DNA
gggcagcctgcagggcc

SEQ ID NO: 164267 - DNA, 17 bp, synthetic construct
  source 1..17: mol_type = other DNA
ggggcagcctgcagggc

SEQ ID NO: 164268 - DNA, 17 bp, synthetic construct
  source 1..17: mol_type = other DNA
gggggcagcctgcaggg

SEQ ID NO: 164269 - DNA, 17 bp, synthetic construct
  source 1..17: mol_type = other DNA
ggggggcagcctgcagg

SEQ ID NO: 164270 - DNA, 17 bp, synthetic construct
  source 1..17: mol_type = other DNA
tggggggcagcctgcag

SEQ ID NO: 164271 - DNA, 17 bp, synthetic construct
  source 1..17: mol_type = other DNA
ctggggggcagcctgca

SEQ ID NO: 164272 - DNA, 17 bp, synthetic construct
  source 1..17: mol_type = other DNA
cctggggggcagcctgc

SEQ ID NO: 164273 - DNA, 17 bp, synthetic construct
  source 1..17: mol_type = other DNA
gcctggggggcagcctg

SEQ ID NO: 164274 - DNA, 17 bp, synthetic construct
  source 1..17: mol_type = other DNA
ggcctggggggcagcct

SEQ ID NO: 164275 - DNA, 17 bp, synthetic construct
  source 1..17: mol_type = other DNA
gggcctggggggcagcc

SEQ ID NO: 164276 - DNA, 17 bp, synthetic construct
  source 1..17: mol_type = other DNA
agggcctggggggcagc

SEQ ID NO: 164277 - DNA, 17 bp, synthetic construct
  source 1..17: mol_type = other DNA
gagggcctggggggcag

SEQ ID NO: 164278 - DNA, 17 bp, synthetic construct
  source 1..17: mol_type = other DNA
tgagggcctggggggca

SEQ ID NO: 164279 - DNA, 17 bp, synthetic construct
  source 1..17: mol_type = other DNA
ctgagggcctggggggc

SEQ ID NO: 164280 - DNA, 17 bp, synthetic construct
  source 1..17: mol_type = other DNA
gctgagggcctgggggg

SEQ ID NO: 164281 - DNA, 17 bp, synthetic construct
  source 1..17: mol_type = other DNA
agctgagggcctggggg

SEQ ID NO: 164282 - DNA, 17 bp, synthetic construct
  source 1..17: mol_type = other DNA
gagctgagggcctgggg

SEQ ID NO: 164283 - DNA, 17 bp, synthetic construct
  source 1..17: mol_type = other DNA
cgagctgagggcctggg

SEQ ID NO: 164284 - DNA, 17 bp, synthetic construct
  source 1..17: mol_type = other DNA
gcgagctgagggcctgg

SEQ ID NO: 164285 - DNA, 17 bp, synthetic construct
  source 1..17: mol_type = other DNA
ggcgagctgagggcctg

SEQ ID NO: 164286 - DNA, 17 bp, synthetic construct
  source 1..17: mol_type = other DNA
aggcgagctgagggcct

SEQ ID NO: 164287 - DNA, 17 bp, synthetic construct
  source 1..17: mol_type = other DNA
gaggcgagctgagggcc

SEQ ID NO: 164288 - DNA, 17 bp, synthetic construct
  source 1..17: mol_type = other DNA
agaggcgagctgagggc

SEQ ID NO: 164289 - DNA, 17 bp, synthetic construct
  source 1..17: mol_type = other DNA
gagaggcgagctgaggg

SEQ ID NO: 164290 - DNA, 17 bp, synthetic construct
  source 1..17: mol_type = other DNA
ggagaggcgagctgagg

SEQ ID NO: 164291 - DNA, 17 bp, synthetic construct
  source 1..17: mol_type = other DNA
gggagaggcgagctgag

SEQ ID NO: 164292 - DNA, 17 bp, synthetic construct
  source 1..17: mol_type = other DNA
ggggagaggcgagctga

SEQ ID NO: 164293 - DNA, 17 bp, synthetic construct
  source 1..17: mol_type = other DNA
gggggagaggcgagctg

SEQ ID NO: 164294 - DNA, 17 bp, synthetic construct
  source 1..17: mol_type = other DNA
tgggggagaggcgagct

SEQ ID NO: 164295 - DNA, 17 bp, synthetic construct
  source 1..17: mol_type = other DNA
gtgggggagaggcgagc

SEQ ID NO: 164296 - DNA, 17 bp, synthetic construct
  source 1..17: mol_type = other DNA
ggtgggggagaggcgag

SEQ ID NO: 164297 - DNA, 17 bp, synthetic construct
  source 1..17: mol_type = other DNA
gggtgggggagaggcga

SEQ ID NO: 164298 - DNA, 17 bp, synthetic construct
  source 1..17: mol_type = other DNA
ggggtgggggagaggcg

SEQ ID NO: 164299 - DNA, 17 bp, synthetic construct
  source 1..17: mol_type = other DNA
aggggtgggggagaggc

SEQ ID NO: 164300 - DNA, 17 bp, synthetic construct
  source 1..17: mol_type = other DNA
taggggtgggggagagg

SEQ ID NO: 164301 - DNA, 17 bp, synthetic construct
  source 1..17: mol_type = other DNA
ctaggggtgggggagag

SEQ ID NO: 164302 - DNA, 17 bp, synthetic construct
  source 1..17: mol_type = other DNA
actaggggtgggggaga

SEQ ID NO: 164303 - DNA, 17 bp, synthetic construct
  source 1..17: mol_type = other DNA
tactaggggtgggggag

SEQ ID NO: 164304 - DNA, 17 bp, synthetic construct
  source 1..17: mol_type = other DNA
ttactaggggtggggga

SEQ ID NO: 164305 - DNA, 17 bp, synthetic construct
  source 1..17: mol_type = other DNA
gttactaggggtggggg

SEQ ID NO: 164306 - DNA, 17 bp, synthetic construct
  source 1..17: mol_type = other DNA
agttactaggggtgggg

SEQ ID NO: 164307 - DNA, 17 bp, synthetic construct
  source 1..17: mol_type = other DNA
cagttactaggggtggg

SEQ ID NO: 164308 - DNA, 17 bp, synthetic construct
  source 1..17: mol_type = other DNA
gcagttactaggggtgg

SEQ ID NO: 164309 - DNA, 17 bp, synthetic construct
  source 1..17: mol_type = other DNA
tgcagttactaggggtg

SEQ ID NO: 164310 - DNA, 17 bp, synthetic construct
  source 1..17: mol_type = other DNA
gtgcagttactaggggt

SEQ ID NO: 164311 - DNA, 17 bp, synthetic construct
  source 1..17: mol_type = other DNA
tgtgcagttactagggg

SEQ ID NO: 164312 - DNA, 17 bp, synthetic construct
  source 1..17: mol_type = other DNA
gtgtgcagttactaggg

SEQ ID NO: 164313 - DNA, 17 bp, synthetic construct
  source 1..17: mol_type = other DNA
ggtgtgcagttactagg

SEQ ID NO: 164314 - DNA, 17 bp, synthetic construct
  source 1..17: mol_type = other DNA
gggtgtgcagttactag

SEQ ID NO: 164315 - DNA, 17 bp, synthetic construct
  source 1..17: mol_type = other DNA
tgggtgtgcagttacta

SEQ ID NO: 164316 - DNA, 17 bp, synthetic construct
  source 1..17: mol_type = other DNA
ctgggtgtgcagttact

SEQ ID NO: 164317 - DNA, 17 bp, synthetic construct
  source 1..17: mol_type = other DNA
actgggtgtgcagttac

SEQ ID NO: 164318 - DNA, 17 bp, synthetic construct
  source 1..17: mol_type = other DNA
cactgggtgtgcagtta

SEQ ID NO: 164319 - DNA, 17 bp, synthetic construct
  source 1..17: mol_type = other DNA
ccactgggtgtgcagtt

SEQ ID NO: 164320 - DNA, 17 bp, synthetic construct
  source 1..17: mol_type = other DNA
gccactgggtgtgcagt

SEQ ID NO: 164321 - DNA, 17 bp, synthetic construct
  source 1..17: mol_type = other DNA
tgccactgggtgtgcag

SEQ ID NO: 164322 - DNA, 17 bp, synthetic construct
  source 1..17: mol_type = other DNA
atgccactgggtgtgca

SEQ ID NO: 164323 - DNA, 17 bp, synthetic construct
  source 1..17: mol_type = other DNA
gatgccactgggtgtgc

SEQ ID NO: 164324 - DNA, 17 bp, synthetic construct
  source 1..17: mol_type = other DNA
ggatgccactgggtgtg

SEQ ID NO: 164325 - DNA, 17 bp, synthetic construct
  source 1..17: mol_type = other DNA
tggatgccactgggtgt

SEQ ID NO: 164326 - DNA, 17 bp, synthetic construct
  source 1..17: mol_type = other DNA
ctggatgccactgggtg

SEQ ID NO: 164327 - DNA, 17 bp, synthetic construct
  source 1..17: mol_type = other DNA
actggatgccactgggt

SEQ ID NO: 164328 - DNA, 17 bp, synthetic construct
  source 1..17: mol_type = other DNA
cactggatgccactggg

SEQ ID NO: 164329 - DNA, 17 bp, synthetic construct
  source 1..17: mol_type = other DNA
gcactggatgccactgg

SEQ ID NO: 164330 - DNA, 17 bp, synthetic construct
  source 1..17: mol_type = other DNA
cgcactggatgccactg

SEQ ID NO: 164331 - DNA, 17 bp, synthetic construct
  source 1..17: mol_type = other DNA
gcgcactggatgccact

SEQ ID NO: 164332 - DNA, 17 bp, synthetic construct
  source 1..17: mol_type = other DNA
agcgcactggatgccac

SEQ ID NO: 164333 - DNA, 17 bp, synthetic construct
  source 1..17: mol_type = other DNA
gagcgcactggatgcca

SEQ ID NO: 164334 - DNA, 17 bp, synthetic construct
  source 1..17: mol_type = other DNA
tgagcgcactggatgcc

SEQ ID NO: 164335 - DNA, 17 bp, synthetic construct
  source 1..17: mol_type = other DNA
gtgagcgcactggatgc

SEQ ID NO: 164336 - DNA, 17 bp, synthetic construct
  source 1..17: mol_type = other DNA
tgtgagcgcactggatg

SEQ ID NO: 164337 - DNA, 17 bp, synthetic construct
  source 1..17: mol_type = other DNA
ctgtgagcgcactggat

SEQ ID NO: 164338 - DNA, 17 bp, synthetic construct
  source 1..17: mol_type = other DNA
gctgtgagcgcactgga

SEQ ID NO: 164339 - DNA, 17 bp, synthetic construct
  source 1..17: mol_type = other DNA
ggctgtgagcgcactgg

SEQ ID NO: 164340 - DNA, 17 bp, synthetic construct
  source 1..17: mol_type = other DNA
aggctgtgagcgcactg

SEQ ID NO: 164341 - DNA, 17 bp, synthetic construct
  source 1..17: mol_type = other DNA
aaggctgtgagcgcact

SEQ ID NO: 164342 - DNA, 17 bp, synthetic construct
  source 1..17: mol_type = other DNA
caaggctgtgagcgcac

SEQ ID NO: 164343 - DNA, 17 bp, synthetic construct
  source 1..17: mol_type = other DNA
tcaaggctgtgagcgca

SEQ ID NO: 164344 - DNA, 17 bp, synthetic construct
  source 1..17: mol_type = other DNA
ctcaaggctgtgagcgc

SEQ ID NO: 164345 - DNA, 17 bp, synthetic construct
  source 1..17: mol_type = other DNA
cctcaaggctgtgagcg

SEQ ID NO: 164346 - DNA, 17 bp, synthetic construct
  source 1..17: mol_type = other DNA
ccctcaaggctgtgagc

SEQ ID NO: 164347 - DNA, 17 bp, synthetic construct
  source 1..17: mol_type = other DNA
accctcaaggctgtgag

SEQ ID NO: 164348 - DNA, 17 bp, synthetic construct
  source 1..17: mol_type = other DNA
taccctcaaggctgtga

SEQ ID NO: 164349 - DNA, 17 bp, synthetic construct
  source 1..17: mol_type = other DNA
ttaccctcaaggctgtg

SEQ ID NO: 164350 - DNA, 17 bp, synthetic construct
  source 1..17: mol_type = other DNA
cttaccctcaaggctgt

SEQ ID NO: 164351 - DNA, 17 bp, synthetic construct
  source 1..17: mol_type = other DNA
ccttaccctcaaggctg

SEQ ID NO: 164352 - DNA, 17 bp, synthetic construct
  source 1..17: mol_type = other DNA
tccttaccctcaaggct

SEQ ID NO: 164353 - DNA, 17 bp, synthetic construct
  source 1..17: mol_type = other DNA
ttccttaccctcaaggc

SEQ ID NO: 164354 - DNA, 17 bp, synthetic construct
  source 1..17: mol_type = other DNA
cttccttaccctcaagg

SEQ ID NO: 164355 - DNA, 17 bp, synthetic construct
  source 1..17: mol_type = other DNA
ccttccttaccctcaag

SEQ ID NO: 164356 - DNA, 17 bp, synthetic construct
  source 1..17: mol_type = other DNA
cccttccttaccctcaa

SEQ ID NO: 164357 - DNA, 17 bp, synthetic construct
  source 1..17: mol_type = other DNA
gcccttccttaccctca

SEQ ID NO: 164358 - DNA, 17 bp, synthetic construct
  source 1..17: mol_type = other DNA
ggcccttccttaccctc

SEQ ID NO: 164359 - DNA, 17 bp, synthetic construct
  source 1..17: mol_type = other DNA
cggcccttccttaccct

SEQ ID NO: 164360 - DNA, 17 bp, synthetic construct
  source 1..17: mol_type = other DNA
ccggcccttccttaccc

SEQ ID NO: 164361 - DNA, 17 bp, synthetic construct
  source 1..17: mol_type = other DNA
cccggcccttccttacc

SEQ ID NO: 164362 - DNA, 17 bp, synthetic construct
  source 1..17: mol_type = other DNA
ccccggcccttccttac

SEQ ID NO: 164363 - DNA, 17 bp, synthetic construct
  source 1..17: mol_type = other DNA
cccccggcccttcctta

SEQ ID NO: 164364 - DNA, 17 bp, synthetic construct
  source 1..17: mol_type = other DNA
ccccccggcccttcctt

SEQ ID NO: 164365 - DNA, 17 bp, synthetic construct
  source 1..17: mol_type = other DNA
accccccggcccttcct

SEQ ID NO: 164366 - DNA, 17 bp, synthetic construct
  source 1..17: mol_type = other DNA
aaccccccggcccttcc

SEQ ID NO: 164367 - DNA, 17 bp, synthetic construct
  source 1..17: mol_type = other DNA
taaccccccggcccttc

SEQ ID NO: 164368 - DNA, 17 bp, synthetic construct
  source 1..17: mol_type = other DNA
ctaaccccccggccctt

SEQ ID NO: 164369 - DNA, 17 bp, synthetic construct
  source 1..17: mol_type = other DNA
actaaccccccggccct

SEQ ID NO: 164370 - DNA, 17 bp, synthetic construct
  source 1..17: mol_type = other DNA
cactaaccccccggccc

SEQ ID NO: 164371 - DNA, 17 bp, synthetic construct
  source 1..17: mol_type = other DNA
ccactaaccccccggcc

SEQ ID NO: 164372 - DNA, 17 bp, synthetic construct
  source 1..17: mol_type = other DNA
cccactaaccccccggc

SEQ ID NO: 164373 - DNA, 17 bp, synthetic construct
  source 1..17: mol_type = other DNA
gcccactaaccccccgg

SEQ ID NO: 164374 - DNA, 17 bp, synthetic construct
  source 1..17: mol_type = other DNA
ggcccactaaccccccg

SEQ ID NO: 164375 - DNA, 17 bp, synthetic construct
  source 1..17: mol_type = other DNA
cggcccactaacccccc

SEQ ID NO: 164376 - DNA, 17 bp, synthetic construct
  source 1..17: mol_type = other DNA
ccggcccactaaccccc

SEQ ID NO: 164377 - DNA, 17 bp, synthetic construct
  source 1..17: mol_type = other DNA
accggcccactaacccc

SEQ ID NO: 164378 - DNA, 17 bp, synthetic construct
  source 1..17: mol_type = other DNA
caccggcccactaaccc

SEQ ID NO: 164379 - DNA, 17 bp, synthetic construct
  source 1..17: mol_type = other DNA
tcaccggcccactaacc

SEQ ID NO: 164380 - DNA, 17 bp, synthetic construct
  source 1..17: mol_type = other DNA
ttcaccggcccactaac

SEQ ID NO: 164381 - DNA, 17 bp, synthetic construct
  source 1..17: mol_type = other DNA
cttcaccggcccactaa

SEQ ID NO: 164382 - DNA, 17 bp, synthetic construct
  source 1..17: mol_type = other DNA
ccttcaccggcccacta

SEQ ID NO: 164383 - DNA, 17 bp, synthetic construct
  source 1..17: mol_type = other DNA
gccttcaccggcccact

SEQ ID NO: 164384 - DNA, 17 bp, synthetic construct
  source 1..17: mol_type = other DNA
agccttcaccggcccac

SEQ ID NO: 164385 - DNA, 17 bp, synthetic construct
  source 1..17: mol_type = other DNA
cagccttcaccggccca

SEQ ID NO: 164386 - DNA, 17 bp, synthetic construct
  source 1..17: mol_type = other DNA
ccagccttcaccggccc

SEQ ID NO: 164387 - DNA, 17 bp, synthetic construct
  source 1..17: mol_type = other DNA
cccagccttcaccggcc

SEQ ID NO: 164388 - DNA, 17 bp, synthetic construct
  source 1..17: mol_type = other DNA
ccccagccttcaccggc

SEQ ID NO: 164389 - DNA, 17 bp, synthetic construct
  source 1..17: mol_type = other DNA
gccccagccttcaccgg

SEQ ID NO: 164390 - DNA, 17 bp, synthetic construct
  source 1..17: mol_type = other DNA
ggccccagccttcaccg

SEQ ID NO: 164391 - DNA, 17 bp, synthetic construct
  source 1..17: mol_type = other DNA
tggccccagccttcacc

SEQ ID NO: 164392 - DNA, 17 bp, synthetic construct
  source 1..17: mol_type = other DNA
ctggccccagccttcac

SEQ ID NO: 164393 - DNA, 17 bp, synthetic construct
  source 1..17: mol_type = other DNA
cctggccccagccttca

SEQ ID NO: 164394 - DNA, 17 bp, synthetic construct
  source 1..17: mol_type = other DNA
ccctggccccagccttc

SEQ ID NO: 164395 - DNA, 17 bp, synthetic construct
  source 1..17: mol_type = other DNA
cccctggccccagcctt

SEQ ID NO: 164396 - DNA, 17 bp, synthetic construct
  source 1..17: mol_type = other DNA
gcccctggccccagcct

SEQ ID NO: 164397 - DNA, 17 bp, synthetic construct
  source 1..17: mol_type = other DNA
agcccctggccccagcc

SEQ ID NO: 164398 - DNA, 17 bp, synthetic construct
  source 1..17: mol_type = other DNA
gagcccctggccccagc

SEQ ID NO: 164399 - DNA, 17 bp, synthetic construct
  source 1..17: mol_type = other DNA
cgagcccctggccccag

SEQ ID NO: 164400 - DNA, 17 bp, synthetic construct
  source 1..17: mol_type = other DNA
ccgagcccctggcccca

SEQ ID NO: 164401 - DNA, 17 bp, synthetic construct
  source 1..17: mol_type = other DNA
tccgagcccctggcccc

SEQ ID NO: 164402 - DNA, 17 bp, synthetic construct
  source 1..17: mol_type = other DNA
ctccgagcccctggccc

SEQ ID NO: 164403 - DNA, 17 bp, synthetic construct
  source 1..17: mol_type = other DNA
cctccgagcccctggcc

SEQ ID NO: 164404 - DNA, 17 bp, synthetic construct
  source 1..17: mol_type = other DNA
gcctccgagcccctggc

SEQ ID NO: 164405 - DNA, 17 bp, synthetic construct
  source 1..17: mol_type = other DNA
ggcctccgagcccctgg

SEQ ID NO: 164406 - DNA, 17 bp, synthetic construct
  source 1..17: mol_type = other DNA
gggcctccgagcccctg

SEQ ID NO: 164407 - DNA, 17 bp, synthetic construct
  source 1..17: mol_type = other DNA
agggcctccgagcccct

SEQ ID NO: 164408 - DNA, 17 bp, synthetic construct
  source 1..17: mol_type = other DNA
cagggcctccgagcccc

SEQ ID NO: 164409 - DNA, 17 bp, synthetic construct
  source 1..17: mol_type = other DNA
ccagggcctccgagccc

SEQ ID NO: 164410 - DNA, 17 bp, synthetic construct
  source 1..17: mol_type = other DNA
cccagggcctccgagcc

SEQ ID NO: 164411 - DNA, 17 bp, synthetic construct
  source 1..17: mol_type = other DNA
acccagggcctccgagc

SEQ ID NO: 164412 - DNA, 17 bp, synthetic construct
  source 1..17: mol_type = other DNA
cacccagggcctccgag

SEQ ID NO: 164413 - DNA, 17 bp, synthetic construct
  source 1..17: mol_type = other DNA
tcacccagggcctccga

SEQ ID NO: 164414 - DNA, 17 bp, synthetic construct
  source 1..17: mol_type = other DNA
gtcacccagggcctccg

SEQ ID NO: 164415 - DNA, 17 bp, synthetic construct
  source 1..17: mol_type = other DNA
agtcacccagggcctcc

SEQ ID NO: 164416 - DNA, 17 bp, synthetic construct
  source 1..17: mol_type = other DNA
gagtcacccagggcctc

SEQ ID NO: 164417 - DNA, 17 bp, synthetic construct
  source 1..17: mol_type = other DNA
agagtcacccagggcct

SEQ ID NO: 164418 - DNA, 17 bp, synthetic construct
  source 1..17: mol_type = other DNA
cagagtcacccagggcc

SEQ ID NO: 164419 - DNA, 17 bp, synthetic construct
  source 1..17: mol_type = other DNA
gcagagtcacccagggc

SEQ ID NO: 164420 - DNA, 17 bp, synthetic construct
  source 1..17: mol_type = other DNA
ggcagagtcacccaggg

SEQ ID NO: 164421 - DNA, 17 bp, synthetic construct
  source 1..17: mol_type = other DNA
cggcagagtcacccagg

SEQ ID NO: 164422 - DNA, 17 bp, synthetic construct
  source 1..17: mol_type = other DNA
ccggcagagtcacccag

SEQ ID NO: 164423 - DNA, 17 bp, synthetic construct
  source 1..17: mol_type = other DNA
gccggcagagtcaccca

SEQ ID NO: 164424 - DNA, 17 bp, synthetic construct
  source 1..17: mol_type = other DNA
agccggcagagtcaccc

SEQ ID NO: 164425 - DNA, 17 bp, synthetic construct
  source 1..17: mol_type = other DNA
gagccggcagagtcacc

SEQ ID NO: 164426 - DNA, 17 bp, synthetic construct
  source 1..17: mol_type = other DNA
ggagccggcagagtcac

SEQ ID NO: 164427 - DNA, 17 bp, synthetic construct
  source 1..17: mol_type = other DNA
tggagccggcagagtca

SEQ ID NO: 164428 - DNA, 17 bp, synthetic construct
  source 1..17: mol_type = other DNA
atggagccggcagagtc

SEQ ID NO: 164429 - DNA, 17 bp, synthetic construct
  source 1..17: mol_type = other DNA
gatggagccggcagagt

SEQ ID NO: 164430 - DNA, 17 bp, synthetic construct
  source 1..17: mol_type = other DNA
ggatggagccggcagag

SEQ ID NO: 164431 - DNA, 17 bp, synthetic construct
  source 1..17: mol_type = other DNA
gggatggagccggcaga

SEQ ID NO: 164432 - DNA, 17 bp, synthetic construct
  source 1..17: mol_type = other DNA
ggggatggagccggcag

SEQ ID NO: 164433 - DNA, 17 bp, synthetic construct
  source 1..17: mol_type = other DNA
tggggatggagccggca

SEQ ID NO: 164434 - DNA, 17 bp, synthetic construct
  source 1..17: mol_type = other DNA
ctggggatggagccggc

SEQ ID NO: 164435 - DNA, 17 bp, synthetic construct
  source 1..17: mol_type = other DNA
gctggggatggagccgg

SEQ ID NO: 164436 - DNA, 17 bp, synthetic construct
  source 1..17: mol_type = other DNA
ggctggggatggagccg

SEQ ID NO: 164437 - DNA, 17 bp, synthetic construct
  source 1..17: mol_type = other DNA
aggctggggatggagcc

SEQ ID NO: 164438 - DNA, 17 bp, synthetic construct
  source 1..17: mol_type = other DNA
caggctggggatggagc

SEQ ID NO: 164439 - DNA, 17 bp, synthetic construct
  source 1..17: mol_type = other DNA
gcaggctggggatggag

SEQ ID NO: 164440 - DNA, 17 bp, synthetic construct
  source 1..17: mol_type = other DNA
tgcaggctggggatgga

SEQ ID NO: 164441 - DNA, 17 bp, synthetic construct
  source 1..17: mol_type = other DNA
gtgcaggctggggatgg

SEQ ID NO: 164442 - DNA, 17 bp, synthetic construct
  source 1..17: mol_type = other DNA
ggtgcaggctggggatg

SEQ ID NO: 164443 - DNA, 17 bp, synthetic construct
  source 1..17: mol_type = other DNA
aggtgcaggctggggat

SEQ ID NO: 164444 - DNA, 17 bp, synthetic construct
  source 1..17: mol_type = other DNA
caggtgcaggctgggga

SEQ ID NO: 164445 - DNA, 17 bp, synthetic construct
  source 1..17: mol_type = other DNA
gcaggtgcaggctgggg

SEQ ID NO: 164446 - DNA, 17 bp, synthetic construct
  source 1..17: mol_type = other DNA
tgcaggtgcaggctggg

SEQ ID NO: 164447 - DNA, 17 bp, synthetic construct
  source 1..17: mol_type = other DNA
gtgcaggtgcaggctgg

SEQ ID NO: 164448 - DNA, 17 bp, synthetic construct
  source 1..17: mol_type = other DNA
ggtgcaggtgcaggctg

SEQ ID NO: 164449 - DNA, 17 bp, synthetic construct
  source 1..17: mol_type = other DNA
aggtgcaggtgcaggct

SEQ ID NO: 164450 - DNA, 17 bp, synthetic construct
  source 1..17: mol_type = other DNA
taggtgcaggtgcaggc

SEQ ID NO: 164451 - DNA, 17 bp, synthetic construct
  source 1..17: mol_type = other DNA
ataggtgcaggtgcagg

SEQ ID NO: 164452 - DNA, 17 bp, synthetic construct
  source 1..17: mol_type = other DNA
cataggtgcaggtgcag

SEQ ID NO: 164453 - DNA, 17 bp, synthetic construct
  source 1..17: mol_type = other DNA
tcataggtgcaggtgca

SEQ ID NO: 164454 - DNA, 17 bp, synthetic construct
  source 1..17: mol_type = other DNA
ctcataggtgcaggtgc

SEQ ID NO: 164455 - DNA, 17 bp, synthetic construct
  source 1..17: mol_type = other DNA
cctcataggtgcaggtg

SEQ ID NO: 164456 - DNA, 17 bp, synthetic construct
  source 1..17: mol_type = other DNA
tcctcataggtgcaggt

SEQ ID NO: 164457 - DNA, 17 bp, synthetic construct
  source 1..17: mol_type = other DNA
gtcctcataggtgcagg

SEQ ID NO: 164458 - DNA, 17 bp, synthetic construct
  source 1..17: mol_type = other DNA
tgtcctcataggtgcag

SEQ ID NO: 164459 - DNA, 17 bp, synthetic construct
  source 1..17: mol_type = other DNA
ctgtcctcataggtgca

SEQ ID NO: 164460 - DNA, 17 bp, synthetic construct
  source 1..17: mol_type = other DNA
cctgtcctcataggtgc

SEQ ID NO: 164461 - DNA, 17 bp, synthetic construct
  source 1..17: mol_type = other DNA
tcctgtcctcataggtg

SEQ ID NO: 164462 - DNA, 17 bp, synthetic construct
  source 1..17: mol_type = other DNA
gtcctgtcctcataggt

SEQ ID NO: 164463 - DNA, 17 bp, synthetic construct
  source 1..17: mol_type = other DNA
ggtcctgtcctcatagg

SEQ ID NO: 164464 - DNA, 17 bp, synthetic construct
  source 1..17: mol_type = other DNA
aggtcctgtcctcatag

SEQ ID NO: 164465 - DNA, 17 bp, synthetic construct
  source 1..17: mol_type = other DNA
taggtcctgtcctcata

SEQ ID NO: 164466 - DNA, 17 bp, synthetic construct
  source 1..17: mol_type = other DNA
gtaggtcctgtcctcat

SEQ ID NO: 164467 - DNA, 17 bp, synthetic construct
  source 1..17: mol_type = other DNA
tgtaggtcctgtcctca

SEQ ID NO: 164468 - DNA, 17 bp, synthetic construct
  source 1..17: mol_type = other DNA
ctgtaggtcctgtcctc

SEQ ID NO: 164469 - DNA, 17 bp, synthetic construct
  source 1..17: mol_type = other DNA
gctgtaggtcctgtcct

SEQ ID NO: 164470 - DNA, 17 bp, synthetic construct
  source 1..17: mol_type = other DNA
agctgtaggtcctgtcc

SEQ ID NO: 164471 - DNA, 17 bp, synthetic construct
  source 1..17: mol_type = other DNA
tagctgtaggtcctgtc

SEQ ID NO: 164472 - DNA, 17 bp, synthetic construct
  source 1..17: mol_type = other DNA
gtagctgtaggtcctgt

SEQ ID NO: 164473 - DNA, 17 bp, synthetic construct
  source 1..17: mol_type = other DNA
ggtagctgtaggtcctg

SEQ ID NO: 164474 - DNA, 17 bp, synthetic construct
  source 1..17: mol_type = other DNA
tggtagctgtaggtcct

SEQ ID NO: 164475 - DNA, 17 bp, synthetic construct
  source 1..17: mol_type = other DNA
ctggtagctgtaggtcc

SEQ ID NO: 164476 - DNA, 17 bp, synthetic construct
  source 1..17: mol_type = other DNA
cctggtagctgtaggtc

SEQ ID NO: 164477 - DNA, 17 bp, synthetic construct
  source 1..17: mol_type = other DNA
tcctggtagctgtaggt

SEQ ID NO: 164478 - DNA, 17 bp, synthetic construct
  source 1..17: mol_type = other DNA
gtcctggtagctgtagg

SEQ ID NO: 164479 - DNA, 17 bp, synthetic construct
  source 1..17: mol_type = other DNA
cgtcctggtagctgtag

SEQ ID NO: 164480 - DNA, 17 bp, synthetic construct
  source 1..17: mol_type = other DNA
acgtcctggtagctgta

SEQ ID NO: 164481 - DNA, 17 bp, synthetic construct
  source 1..17: mol_type = other DNA
gacgtcctggtagctgt

SEQ ID NO: 164482 - DNA, 17 bp, synthetic construct
  source 1..17: mol_type = other DNA
tgacgtcctggtagctg

SEQ ID NO: 164483 - DNA, 17 bp, synthetic construct
  source 1..17: mol_type = other DNA
atgacgtcctggtagct

SEQ ID NO: 164484 - DNA, 17 bp, synthetic construct
  source 1..17: mol_type = other DNA
gatgacgtcctggtagc

SEQ ID NO: 164485 - DNA, 17 bp, synthetic construct
  source 1..17: mol_type = other DNA
agatgacgtcctggtag

SEQ ID NO: 164486 - DNA, 17 bp, synthetic construct
  source 1..17: mol_type = other DNA
tagatgacgtcctggta

SEQ ID NO: 164487 - DNA, 17 bp, synthetic construct
  source 1..17: mol_type = other DNA
gtagatgacgtcctggt

SEQ ID NO: 164488 - DNA, 17 bp, synthetic construct
  source 1..17: mol_type = other DNA
tgtagatgacgtcctgg

SEQ ID NO: 164489 - DNA, 17 bp, synthetic construct
  source 1..17: mol_type = other DNA
ttgtagatgacgtcctg

SEQ ID NO: 164490 - DNA, 17 bp, synthetic construct
  source 1..17: mol_type = other DNA
gttgtagatgacgtcct

SEQ ID NO: 164491 - DNA, 17 bp, synthetic construct
  source 1..17: mol_type = other DNA
tgttgtagatgacgtcc

SEQ ID NO: 164492 - DNA, 17 bp, synthetic construct
  source 1..17: mol_type = other DNA
gtgttgtagatgacgtc

SEQ ID NO: 164493 - DNA, 17 bp, synthetic construct
  source 1..17: mol_type = other DNA
ggtgttgtagatgacgt

SEQ ID NO: 164494 - DNA, 17 bp, synthetic construct
  source 1..17: mol_type = other DNA
tggtgttgtagatgacg

SEQ ID NO: 164495 - DNA, 17 bp, synthetic construct
  source 1..17: mol_type = other DNA
gtggtgttgtagatgac

SEQ ID NO: 164496 - DNA, 17 bp, synthetic construct
  source 1..17: mol_type = other DNA
ggtggtgttgtagatga

SEQ ID NO: 164497 - DNA, 17 bp, synthetic construct
  source 1..17: mol_type = other DNA
cggtggtgttgtagatg

SEQ ID NO: 164498 - DNA, 17 bp, synthetic construct
  source 1..17: mol_type = other DNA
tcggtggtgttgtagat

SEQ ID NO: 164499 - DNA, 17 bp, synthetic construct
  source 1..17: mol_type = other DNA
atcggtggtgttgtaga

SEQ ID NO: 164500 - DNA, 17 bp, synthetic construct
  source 1..17: mol_type = other DNA
catcggtggtgttgtag

SEQ ID NO: 164501 - DNA, 17 bp, synthetic construct
  source 1..17: mol_type = other DNA
ccatcggtggtgttgta

SEQ ID NO: 164502 - DNA, 17 bp, synthetic construct
  source 1..17: mol_type = other DNA
cccatcggtggtgttgt

SEQ ID NO: 164503 - DNA, 17 bp, synthetic construct
  source 1..17: mol_type = other DNA
gcccatcggtggtgttg

SEQ ID NO: 164504 - DNA, 17 bp, synthetic construct
  source 1..17: mol_type = other DNA
agcccatcggtggtgtt

SEQ ID NO: 164505 - DNA, 17 bp, synthetic construct
  source 1..17: mol_type = other DNA
aagcccatcggtggtgt

SEQ ID NO: 164506 - DNA, 17 bp, synthetic construct
  source 1..17: mol_type = other DNA
caagcccatcggtggtg

SEQ ID NO: 164507 - DNA, 17 bp, synthetic construct
  source 1..17: mol_type = other DNA
ccaagcccatcggtggt

SEQ ID NO: 164508 - DNA, 17 bp, synthetic construct
  source 1..17: mol_type = other DNA
gccaagcccatcggtgg

SEQ ID NO: 164509 - DNA, 17 bp, synthetic construct
  source 1..17: mol_type = other DNA
cgccaagcccatcggtg

SEQ ID NO: 164510 - DNA, 17 bp, synthetic construct
  source 1..17: mol_type = other DNA
gcgccaagcccatcggt

SEQ ID NO: 164511 - DNA, 17 bp, synthetic construct
  source 1..17: mol_type = other DNA
ggcgccaagcccatcgg

SEQ ID NO: 164512 - DNA, 17 bp, synthetic construct
  source 1..17: mol_type = other DNA
aggcgccaagcccatcg

SEQ ID NO: 164513 - DNA, 17 bp, synthetic construct
  source 1..17: mol_type = other DNA
caggcgccaagcccatc

SEQ ID NO: 164514 - DNA, 17 bp, synthetic construct
  source 1..17: mol_type = other DNA
gcaggcgccaagcccat

SEQ ID NO: 164515 - DNA, 17 bp, synthetic construct
  source 1..17: mol_type = other DNA
agcaggcgccaagccca

SEQ ID NO: 164516 - DNA, 17 bp, synthetic construct
  source 1..17: mol_type = other DNA
aagcaggcgccaagccc

SEQ ID NO: 164517 - DNA, 17 bp, synthetic construct
  source 1..17: mol_type = other DNA
caagcaggcgccaagcc

SEQ ID NO: 164518 - DNA, 17 bp, synthetic construct
  source 1..17: mol_type = other DNA
tcaagcaggcgccaagc

SEQ ID NO: 164519 - DNA, 17 bp, synthetic construct
  source 1..17: mol_type = other DNA
atcaagcaggcgccaag

SEQ ID NO: 164520 - DNA, 17 bp, synthetic construct
  source 1..17: mol_type = other DNA
gatcaagcaggcgccaa

SEQ ID NO: 164521 - DNA, 17 bp, synthetic construct
  source 1..17: mol_type = other DNA
cgatcaagcaggcgcca

SEQ ID NO: 164522 - DNA, 17 bp, synthetic construct
  source 1..17: mol_type = other DNA
gcgatcaagcaggcgcc

SEQ ID NO: 164523 - DNA, 17 bp, synthetic construct
  source 1..17: mol_type = other DNA
ggcgatcaagcaggcgc

SEQ ID NO: 164524 - DNA, 17 bp, synthetic construct
  source 1..17: mol_type = other DNA
tggcgatcaagcaggcg

SEQ ID NO: 164525 - DNA, 17 bp, synthetic construct
  source 1..17: mol_type = other DNA
atggcgatcaagcaggc

SEQ ID NO: 164526 - DNA, 17 bp, synthetic construct
  source 1..17: mol_type = other DNA
gatggcgatcaagcagg

SEQ ID NO: 164527 - DNA, 17 bp, synthetic construct
  source 1..17: mol_type = other DNA
agatggcgatcaagcag

SEQ ID NO: 164528 - DNA, 17 bp, synthetic construct
  source 1..17: mol_type = other DNA
cagatggcgatcaagca

SEQ ID NO: 164529 - DNA, 17 bp, synthetic construct
  source 1..17: mol_type = other DNA
gcagatggcgatcaagc

SEQ ID NO: 164530 - DNA, 17 bp, synthetic construct
  source 1..17: mol_type = other DNA
cgcagatggcgatcaag

SEQ ID NO: 164531 - DNA, 17 bp, synthetic construct
  source 1..17: mol_type = other DNA
ccgcagatggcgatcaa

SEQ ID NO: 164532 - DNA, 17 bp, synthetic construct
  source 1..17: mol_type = other DNA
tccgcagatggcgatca

SEQ ID NO: 164533 - DNA, 17 bp, synthetic construct
  source 1..17: mol_type = other DNA
ttccgcagatggcgatc

SEQ ID NO: 164534 - DNA, 17 bp, synthetic construct
  source 1..17: mol_type = other DNA
cttccgcagatggcgat

SEQ ID NO: 164535 - DNA, 17 bp, synthetic construct
  source 1..17: mol_type = other DNA
gcttccgcagatggcga

SEQ ID NO: 164536 - DNA, 17 bp, synthetic construct
  source 1..17: mol_type = other DNA
tgcttccgcagatggcg

SEQ ID NO: 164537 - DNA, 17 bp, synthetic construct
  source 1..17: mol_type = other DNA
ttgcttccgcagatggc

SEQ ID NO: 164538 - DNA, 17 bp, synthetic construct
  source 1..17: mol_type = other DNA
gttgcttccgcagatgg

SEQ ID NO: 164539 - DNA, 17 bp, synthetic construct
  source 1..17: mol_type = other DNA
cgttgcttccgcagatg

SEQ ID NO: 164540 - DNA, 17 bp, synthetic construct
  source 1..17: mol_type = other DNA
ccgttgcttccgcagat

SEQ ID NO: 164541 - DNA, 17 bp, synthetic construct
  source 1..17: mol_type = other DNA
gccgttgcttccgcaga

SEQ ID NO: 164542 - DNA, 17 bp, synthetic construct
  source 1..17: mol_type = other DNA
tgccgttgcttccgcag

SEQ ID NO: 164543 - DNA, 17 bp, synthetic construct
  source 1..17: mol_type = other DNA
gtgccgttgcttccgca

SEQ ID NO: 164544 - DNA, 17 bp, synthetic construct
  source 1..17: mol_type = other DNA
ggtgccgttgcttccgc

SEQ ID NO: 164545 - DNA, 17 bp, synthetic construct
  source 1..17: mol_type = other DNA
tggtgccgttgcttccg

SEQ ID NO: 164546 - DNA, 17 bp, synthetic construct
  source 1..17: mol_type = other DNA
atggtgccgttgcttcc

SEQ ID NO: 164547 - DNA, 17 bp, synthetic construct
  source 1..17: mol_type = other DNA
gatggtgccgttgcttc

SEQ ID NO: 164548 - DNA, 17 bp, synthetic construct
  source 1..17: mol_type = other DNA
tgatggtgccgttgctt

SEQ ID NO: 164549 - DNA, 17 bp, synthetic construct
  source 1..17: mol_type = other DNA
atgatggtgccgttgct

SEQ ID NO: 164550 - DNA, 17 bp, synthetic construct
  source 1..17: mol_type = other DNA
gatgatggtgccgttgc

SEQ ID NO: 164551 - DNA, 17 bp, synthetic construct
  source 1..17: mol_type = other DNA
tgatgatggtgccgttg

SEQ ID NO: 164552 - DNA, 17 bp, synthetic construct
  source 1..17: mol_type = other DNA
ctgatgatggtgccgtt

SEQ ID NO: 164553 - DNA, 17 bp, synthetic construct
  source 1..17: mol_type = other DNA
cctgatgatggtgccgt

SEQ ID NO: 164554 - DNA, 17 bp, synthetic construct
  source 1..17: mol_type = other DNA
tcctgatgatggtgccg

SEQ ID NO: 164555 - DNA, 17 bp, synthetic construct
  source 1..17: mol_type = other DNA
ttcctgatgatggtgcc

SEQ ID NO: 164556 - DNA, 17 bp, synthetic construct
  source 1..17: mol_type = other DNA
cttcctgatgatggtgc

SEQ ID NO: 164557 - DNA, 17 bp, synthetic construct
  source 1..17: mol_type = other DNA
ccttcctgatgatggtg

SEQ ID NO: 164558 - DNA, 17 bp, synthetic construct
  source 1..17: mol_type = other DNA
gccttcctgatgatggt

SEQ ID NO: 164559 - DNA, 17 bp, synthetic construct
  source 1..17: mol_type = other DNA
agccttcctgatgatgg

SEQ ID NO: 164560 - DNA, 17 bp, synthetic construct
  source 1..17: mol_type = other DNA
cagccttcctgatgatg

SEQ ID NO: 164561 - DNA, 17 bp, synthetic construct
  source 1..17: mol_type = other DNA
acagccttcctgatgat

SEQ ID NO: 164562 - DNA, 17 bp, synthetic construct
  source 1..17: mol_type = other DNA
cacagccttcctgatga

SEQ ID NO: 164563 - DNA, 17 bp, synthetic construct
  source 1..17: mol_type = other DNA
ccacagccttcctgatg

SEQ ID NO: 164564 - DNA, 17 bp, synthetic construct
  source 1..17: mol_type = other DNA
gccacagccttcctgat

SEQ ID NO: 164565 - DNA, 17 bp, synthetic construct
  source 1..17: mol_type = other DNA
tgccacagccttcctga

SEQ ID NO: 164566 - DNA, 17 bp, synthetic construct
  source 1..17: mol_type = other DNA
atgccacagccttcctg

SEQ ID NO: 164567 - DNA, 17 bp, synthetic construct
  source 1..17: mol_type = other DNA
catgccacagccttcct

SEQ ID NO: 164568 - DNA, 17 bp, synthetic construct
  source 1..17: mol_type = other DNA
acatgccacagccttcc

SEQ ID NO: 164569 - DNA, 17 bp, synthetic construct
  source 1..17: mol_type = other DNA
gacatgccacagccttc

SEQ ID NO: 164570 - DNA, 17 bp, synthetic construct
  source 1..17: mol_type = other DNA
ggacatgccacagcctt

SEQ ID NO: 164571 - DNA, 17 bp, synthetic construct
  source 1..17: mol_type = other DNA
aggacatgccacagcct

SEQ ID NO: 164572 - DNA, 17 bp, synthetic construct
  source 1..17: mol_type = other DNA
caggacatgccacagcc

SEQ ID NO: 164573 - DNA, 17 bp, synthetic construct
  source 1..17: mol_type = other DNA
ccaggacatgccacagc

SEQ ID NO: 164574 - DNA, 17 bp, synthetic construct
  source 1..17: mol_type = other DNA
tccaggacatgccacag

SEQ ID NO: 164575 - DNA, 17 bp, synthetic construct
  source 1..17: mol_type = other DNA
ttccaggacatgccaca

SEQ ID NO: 164576 - DNA, 17 bp, synthetic construct
  source 1..17: mol_type = other DNA
gttccaggacatgccac

SEQ ID NO: 164577 - DNA, 17 bp, synthetic construct
  source 1..17: mol_type = other DNA
agttccaggacatgcca

SEQ ID NO: 164578 - DNA, 17 bp, synthetic construct
  source 1..17: mol_type = other DNA
gagttccaggacatgcc

SEQ ID NO: 164579 - DNA, 17 bp, synthetic construct
  source 1..17: mol_type = other DNA
ggagttccaggacatgc

SEQ ID NO: 164580 - DNA, 17 bp, synthetic construct
  source 1..17: mol_type = other DNA
tggagttccaggacatg

SEQ ID NO: 164581 - DNA, 17 bp, synthetic construct
  source 1..17: mol_type = other DNA
ctggagttccaggacat

SEQ ID NO: 164582 - DNA, 17 bp, synthetic construct
  source 1..17: mol_type = other DNA
gctggagttccaggaca

SEQ ID NO: 164583 - DNA, 17 bp, synthetic construct
  source 1..17: mol_type = other DNA
ggctggagttccaggac

SEQ ID NO: 164584 - DNA, 17 bp, synthetic construct
  source 1..17: mol_type = other DNA
tggctggagttccagga

SEQ ID NO: 164585 - DNA, 17 bp, synthetic construct
  source 1..17: mol_type = other DNA
gtggctggagttccagg

SEQ ID NO: 164586 - DNA, 17 bp, synthetic construct
  source 1..17: mol_type = other DNA
tgtggctggagttccag

SEQ ID NO: 164587 - DNA, 17 bp, synthetic construct
  source 1..17: mol_type = other DNA
ttgtggctggagttcca

SEQ ID NO: 164588 - DNA, 17 bp, synthetic construct
  source 1..17: mol_type = other DNA
gttgtggctggagttcc

SEQ ID NO: 164589 - DNA, 17 bp, synthetic construct
  source 1..17: mol_type = other DNA
cgttgtggctggagttc

SEQ ID NO: 164590 - DNA, 17 bp, synthetic construct
  source 1..17: mol_type = other DNA
gcgttgtggctggagtt

SEQ ID NO: 164591 - DNA, 17 bp, synthetic construct
  source 1..17: mol_type = other DNA
ggcgttgtggctggagt

SEQ ID NO: 164592 - DNA, 17 bp, synthetic construct
  source 1..17: mol_type = other DNA
tggcgttgtggctggag

SEQ ID NO: 164593 - DNA, 17 bp, synthetic construct
  source 1..17: mol_type = other DNA
atggcgttgtggctgga

SEQ ID NO: 164594 - DNA, 17 bp, synthetic construct
  source 1..17: mol_type = other DNA
aatggcgttgtggctgg

SEQ ID NO: 164595 - DNA, 17 bp, synthetic construct
  source 1..17: mol_type = other DNA
gaatggcgttgtggctg

SEQ ID NO: 164596 - DNA, 17 bp, synthetic construct
  source 1..17: mol_type = other DNA
tgaatggcgttgtggct

SEQ ID NO: 164597 - DNA, 17 bp, synthetic construct
  source 1..17: mol_type = other DNA
gtgaatggcgttgtggc

SEQ ID NO: 164598 - DNA, 17 bp, synthetic construct
  source 1..17: mol_type = other DNA
ggtgaatggcgttgtgg

SEQ ID NO: 164599 - DNA, 17 bp, synthetic construct
  source 1..17: mol_type = other DNA
aggtgaatggcgttgtg

SEQ ID NO: 164600 - DNA, 17 bp, synthetic construct
  source 1..17: mol_type = other DNA
aaggtgaatggcgttgt

SEQ ID NO: 164601 - DNA, 17 bp, synthetic construct
  source 1..17: mol_type = other DNA
gaaggtgaatggcgttg

SEQ ID NO: 164602 - DNA, 17 bp, synthetic construct
  source 1..17: mol_type = other DNA
tgaaggtgaatggcgtt

SEQ ID NO: 164603 - DNA, 17 bp, synthetic construct
  source 1..17: mol_type = other DNA
gtgaaggtgaatggcgt

SEQ ID NO: 164604 - DNA, 17 bp, synthetic construct
  source 1..17: mol_type = other DNA
ggtgaaggtgaatggcg

SEQ ID NO: 164605 - DNA, 17 bp, synthetic construct
  source 1..17: mol_type = other DNA
tggtgaaggtgaatggc

SEQ ID NO: 164606 - DNA, 17 bp, synthetic construct
  source 1..17: mol_type = other DNA
gtggtgaaggtgaatgg

SEQ ID NO: 164607 - DNA, 17 bp, synthetic construct
  source 1..17: mol_type = other DNA
ggtggtgaaggtgaatg

SEQ ID NO: 164608 - DNA, 17 bp, synthetic construct
  source 1..17: mol_type = other DNA
cggtggtgaaggtgaat

SEQ ID NO: 164609 - DNA, 17 bp, synthetic construct
  source 1..17: mol_type = other DNA
gcggtggtgaaggtgaa

SEQ ID NO: 164610 - DNA, 17 bp, synthetic construct
  source 1..17: mol_type = other DNA
ggcggtggtgaaggtga

SEQ ID NO: 164611 - DNA, 17 bp, synthetic construct
  source 1..17: mol_type = other DNA
aggcggtggtgaaggtg

SEQ ID NO: 164612 - DNA, 17 bp, synthetic construct
  source 1..17: mol_type = other DNA
caggcggtggtgaaggt

SEQ ID NO: 164613 - DNA, 17 bp, synthetic construct
  source 1..17: mol_type = other DNA
ccaggcggtggtgaagg

SEQ ID NO: 164614 - DNA, 17 bp, synthetic construct
  source 1..17: mol_type = other DNA
cccaggcggtggtgaag

SEQ ID NO: 164615 - DNA, 17 bp, synthetic construct
  source 1..17: mol_type = other DNA
acccaggcggtggtgaa

SEQ ID NO: 164616 - DNA, 17 bp, synthetic construct
  source 1..17: mol_type = other DNA
gacccaggcggtggtga

SEQ ID NO: 164617 - DNA, 17 bp, synthetic construct
  source 1..17: mol_type = other DNA
ggacccaggcggtggtg

SEQ ID NO: 164618 - DNA, 17 bp, synthetic construct
  source 1..17: mol_type = other DNA
gggacccaggcggtggt

SEQ ID NO: 164619 - DNA, 17 bp, synthetic construct
  source 1..17: mol_type = other DNA
ggggacccaggcggtgg

SEQ ID NO: 164620 - DNA, 17 bp, synthetic construct
  source 1..17: mol_type = other DNA
gggggacccaggcggtg

SEQ ID NO: 164621 - DNA, 17 bp, synthetic construct
  source 1..17: mol_type = other DNA
tgggggacccaggcggt

SEQ ID NO: 164622 - DNA, 17 bp, synthetic construct
  source 1..17: mol_type = other DNA
gtgggggacccaggcgg

SEQ ID NO: 164623 - DNA, 17 bp, synthetic construct
  source 1..17: mol_type = other DNA
agtgggggacccaggcg

SEQ ID NO: 164624 - DNA, 17 bp, synthetic construct
  source 1..17: mol_type = other DNA
gagtgggggacccaggc

SEQ ID NO: 164625 - DNA, 17 bp, synthetic construct
  source 1..17: mol_type = other DNA
ggagtgggggacccagg

SEQ ID NO: 164626 - DNA, 17 bp, synthetic construct
  source 1..17: mol_type = other DNA
tggagtgggggacccag

SEQ ID NO: 164627 - DNA, 17 bp, synthetic construct
  source 1..17: mol_type = other DNA
gtggagtgggggaccca

SEQ ID NO: 164628 - DNA, 17 bp, synthetic construct
  source 1..17: mol_type = other DNA
cgtggagtgggggaccc

SEQ ID NO: 164629 - DNA, 17 bp, synthetic construct
  source 1..17: mol_type = other DNA
tcgtggagtgggggacc

SEQ ID NO: 164630 - DNA, 17 bp, synthetic construct
  source 1..17: mol_type = other DNA
gtcgtggagtgggggac

SEQ ID NO: 164631 - DNA, 17 bp, synthetic construct
  source 1..17: mol_type = other DNA
tgtcgtggagtggggga

SEQ ID NO: 164632 - DNA, 17 bp, synthetic construct
  source 1..17: mol_type = other DNA
ttgtcgtggagtggggg

SEQ ID NO: 164633 - DNA, 17 bp, synthetic construct
  source 1..17: mol_type = other DNA
cttgtcgtggagtgggg

SEQ ID NO: 164634 - DNA, 17 bp, synthetic construct
  source 1..17: mol_type = other DNA
acttgtcgtggagtggg

SEQ ID NO: 164635 - DNA, 17 bp, synthetic construct
  source 1..17: mol_type = other DNA
tacttgtcgtggagtgg

SEQ ID NO: 164636 - DNA, 17 bp, synthetic construct
  source 1..17: mol_type = other DNA
ttacttgtcgtggagtg

SEQ ID NO: 164637 - DNA, 17 bp, synthetic construct
  source 1..17: mol_type = other DNA
cttacttgtcgtggagt

SEQ ID NO: 164638 - DNA, 17 bp, synthetic construct
  source 1..17: mol_type = other DNA
gcttacttgtcgtggag

SEQ ID NO: 164639 - DNA, 17 bp, synthetic construct
  source 1..17: mol_type = other DNA
ggcttacttgtcgtgga

SEQ ID NO: 164640 - DNA, 17 bp, synthetic construct
  source 1..17: mol_type = other DNA
gggcttacttgtcgtgg

SEQ ID NO: 164641 - DNA, 17 bp, synthetic construct
  source 1..17: mol_type = other DNA
agggcttacttgtcgtg

SEQ ID NO: 164642 - DNA, 17 bp, synthetic construct
  source 1..17: mol_type = other DNA
cagggcttacttgtcgt

SEQ ID NO: 164643 - DNA, 17 bp, synthetic construct
  source 1..17: mol_type = other DNA
gcagggcttacttgtcg

SEQ ID NO: 164644 - DNA, 17 bp, synthetic construct
  source 1..17: mol_type = other DNA
ggcagggcttacttgtc

SEQ ID NO: 164645 - DNA, 17 bp, synthetic construct
  source 1..17: mol_type = other DNA
aggcagggcttacttgt

SEQ ID NO: 164646 - DNA, 17 bp, synthetic construct
  source 1..17: mol_type = other DNA
caggcagggcttacttg

SEQ ID NO: 164647 - DNA, 17 bp, synthetic construct
  source 1..17: mol_type = other DNA
ccaggcagggcttactt

SEQ ID NO: 164648 - DNA, 17 bp, synthetic construct
  source 1..17: mol_type = other DNA
gccaggcagggcttact

SEQ ID NO: 164649 - DNA, 17 bp, synthetic construct
  source 1..17: mol_type = other DNA
agccaggcagggcttac

SEQ ID NO: 164650 - DNA, 17 bp, synthetic construct
  source 1..17: mol_type = other DNA
gagccaggcagggctta

SEQ ID NO: 164651 - DNA, 17 bp, synthetic construct
  source 1..17: mol_type = other DNA
agagccaggcagggctt

SEQ ID NO: 164652 - DNA, 17 bp, synthetic construct
  source 1..17: mol_type = other DNA
gagagccaggcagggct

SEQ ID NO: 164653 - DNA, 17 bp, synthetic construct
  source 1..17: mol_type = other DNA
ggagagccaggcagggc

SEQ ID NO: 164654 - DNA, 17 bp, synthetic construct
  source 1..17: mol_type = other DNA
aggagagccaggcaggg

SEQ ID NO: 164655 - DNA, 17 bp, synthetic construct
  source 1..17: mol_type = other DNA
caggagagccaggcagg

SEQ ID NO: 164656 - DNA, 17 bp, synthetic construct
  source 1..17: mol_type = other DNA
tcaggagagccaggcag

SEQ ID NO: 164657 - DNA, 17 bp, synthetic construct
  source 1..17: mol_type = other DNA
ctcaggagagccaggca

SEQ ID NO: 164658 - DNA, 17 bp, synthetic construct
  source 1..17: mol_type = other DNA
cctcaggagagccaggc

SEQ ID NO: 164659 - DNA, 17 bp, synthetic construct
  source 1..17: mol_type = other DNA
gcctcaggagagccagg

SEQ ID NO: 164660 - DNA, 17 bp, synthetic construct
  source 1..17: mol_type = other DNA
ggcctcaggagagccag

SEQ ID NO: 164661 - DNA, 17 bp, synthetic construct
  source 1..17: mol_type = other DNA
gggcctcaggagagcca

SEQ ID NO: 164662 - DNA, 17 bp, synthetic construct
  source 1..17: mol_type = other DNA
tgggcctcaggagagcc

SEQ ID NO: 164663 - DNA, 17 bp, synthetic construct
  source 1..17: mol_type = other DNA
ctgggcctcaggagagc

SEQ ID NO: 164664 - DNA, 17 bp, synthetic construct
  source 1..17: mol_type = other DNA
actgggcctcaggagag

SEQ ID NO: 164665 - DNA, 17 bp, synthetic construct
  source 1..17: mol_type = other DNA
tactgggcctcaggaga

SEQ ID NO: 164666 - DNA, 17 bp, synthetic construct
  source 1..17: mol_type = other DNA
gtactgggcctcaggag

SEQ ID NO: 164667 - DNA, 17 bp, synthetic construct
  source 1..17: mol_type = other DNA
ggtactgggcctcagga

SEQ ID NO: 164668 - DNA, 17 bp, synthetic construct
  source 1..17: mol_type = other DNA
cggtactgggcctcagg

SEQ ID NO: 164669 - DNA, 17 bp, synthetic construct
  source 1..17: mol_type = other DNA
acggtactgggcctcag

SEQ ID NO: 164670 - DNA, 17 bp, synthetic construct
  source 1..17: mol_type = other DNA
gacggtactgggcctca

SEQ ID NO: 164671 - DNA, 17 bp, synthetic construct
  source 1..17: mol_type = other DNA
agacggtactgggcctc

SEQ ID NO: 164672 - DNA, 17 bp, synthetic construct
  source 1..17: mol_type = other DNA
cagacggtactgggcct

SEQ ID NO: 164673 - DNA, 17 bp, synthetic construct
  source 1..17: mol_type = other DNA
ccagacggtactgggcc

SEQ ID NO: 164674 - DNA, 17 bp, synthetic construct
  source 1..17: mol_type = other DNA
cccagacggtactgggc

SEQ ID NO: 164675 - DNA, 17 bp, synthetic construct
  source 1..17: mol_type = other DNA
acccagacggtactggg

SEQ ID NO: 164676 - DNA, 17 bp, synthetic construct
  source 1..17: mol_type = other DNA
cacccagacggtactgg

SEQ ID NO: 164677 - DNA, 17 bp, synthetic construct
  source 1..17: mol_type = other DNA
tcacccagacggtactg

SEQ ID NO: 164678 - DNA, 17 bp, synthetic construct
  source 1..17: mol_type = other DNA
gtcacccagacggtact

SEQ ID NO: 164679 - DNA, 17 bp, synthetic construct
  source 1..17: mol_type = other DNA
tgtcacccagacggtac

SEQ ID NO: 164680 - DNA, 17 bp, synthetic construct
  source 1..17: mol_type = other DNA
ttgtcacccagacggta

SEQ ID NO: 164681 - DNA, 17 bp, synthetic construct
  source 1..17: mol_type = other DNA
cttgtcacccagacggt

SEQ ID NO: 164682 - DNA, 17 bp, synthetic construct
  source 1..17: mol_type = other DNA
ccttgtcacccagacgg

SEQ ID NO: 164683 - DNA, 17 bp, synthetic construct
  source 1..17: mol_type = other DNA
tccttgtcacccagacg

SEQ ID NO: 164684 - DNA, 17 bp, synthetic construct
  source 1..17: mol_type = other DNA
ctccttgtcacccagac

SEQ ID NO: 164685 - DNA, 17 bp, synthetic construct
  source 1..17: mol_type = other DNA
cctccttgtcacccaga

SEQ ID NO: 164686 - DNA, 17 bp, synthetic construct
  source 1..17: mol_type = other DNA
tcctccttgtcacccag

SEQ ID NO: 164687 - DNA, 17 bp, synthetic construct
  source 1..17: mol_type = other DNA
gtcctccttgtcaccca

SEQ ID NO: 164688 - DNA, 17 bp, synthetic construct
  source 1..17: mol_type = other DNA
ggtcctccttgtcaccc

SEQ ID NO: 164689 - DNA, 17 bp, synthetic construct
  source 1..17: mol_type = other DNA
gggtcctccttgtcacc

SEQ ID NO: 164690 - DNA, 17 bp, synthetic construct
  source 1..17: mol_type = other DNA
ggggtcctccttgtcac

SEQ ID NO: 164691 - DNA, 17 bp, synthetic construct
  source 1..17: mol_type = other DNA
gggggtcctccttgtca

SEQ ID NO: 164692 - DNA, 17 bp, synthetic construct
  source 1..17: mol_type = other DNA
agggggtcctccttgtc

SEQ ID NO: 164693 - DNA, 17 bp, synthetic construct
  source 1..17: mol_type = other DNA
cagggggtcctccttgt

SEQ ID NO: 164694 - DNA, 17 bp, synthetic construct
  source 1..17: mol_type = other DNA
ccagggggtcctccttg

SEQ ID NO: 164695 - DNA, 17 bp, synthetic construct
  source 1..17: mol_type = other DNA
cccagggggtcctcctt

SEQ ID NO: 164696 - DNA, 17 bp, synthetic construct
  source 1..17: mol_type = other DNA
gcccagggggtcctcct

SEQ ID NO: 164697 - DNA, 17 bp, synthetic construct
  source 1..17: mol_type = other DNA
agcccagggggtcctcc

SEQ ID NO: 164698 - DNA, 17 bp, synthetic construct
  source 1..17: mol_type = other DNA
gagcccagggggtcctc

SEQ ID NO: 164699 - DNA, 17 bp, synthetic construct
  source 1..17: mol_type = other DNA
agagcccagggggtcct

SEQ ID NO: 164700 - DNA, 17 bp, synthetic construct
  source 1..17: mol_type = other DNA
aagagcccagggggtcc

SEQ ID NO: 164701 - DNA, 17 bp, synthetic construct
  source 1..17: mol_type = other DNA
taagagcccagggggtc

SEQ ID NO: 164702 - DNA, 17 bp, synthetic construct
  source 1..17: mol_type = other DNA
ctaagagcccagggggt

SEQ ID NO: 164703 - DNA, 17 bp, synthetic construct
  source 1..17: mol_type = other DNA
actaagagcccaggggg

SEQ ID NO: 164704 - DNA, 17 bp, synthetic construct
  source 1..17: mol_type = other DNA
cactaagagcccagggg

SEQ ID NO: 164705 - DNA, 17 bp, synthetic construct
  source 1..17: mol_type = other DNA
gcactaagagcccaggg

SEQ ID NO: 164706 - DNA, 17 bp, synthetic construct
  source 1..17: mol_type = other DNA
tgcactaagagcccagg

SEQ ID NO: 164707 - DNA, 17 bp, synthetic construct
  source 1..17: mol_type = other DNA
ctgcactaagagcccag

SEQ ID NO: 164708 - DNA, 17 bp, synthetic construct
  source 1..17: mol_type = other DNA
cctgcactaagagccca

SEQ ID NO: 164709 - DNA, 17 bp, synthetic construct
  source 1..17: mol_type = other DNA
acctgcactaagagccc

SEQ ID NO: 164710 - DNA, 17 bp, synthetic construct
  source 1..17: mol_type = other DNA
cacctgcactaagagcc

SEQ ID NO: 164711 - DNA, 17 bp, synthetic construct
  source 1..17: mol_type = other DNA
gcacctgcactaagagc

SEQ ID NO: 164712 - DNA, 17 bp, synthetic construct
  source 1..17: mol_type = other DNA
ggcacctgcactaagag

SEQ ID NO: 164713 - DNA, 17 bp, synthetic construct
  source 1..17: mol_type = other DNA
gggcacctgcactaaga

SEQ ID NO: 164714 - DNA, 17 bp, synthetic construct
  source 1..17: mol_type = other DNA
agggcacctgcactaag

SEQ ID NO: 164715 - DNA, 17 bp, synthetic construct
  source 1..17: mol_type = other DNA
cagggcacctgcactaa

SEQ ID NO: 164716 - DNA, 17 bp, synthetic construct
  source 1..17: mol_type = other DNA
acagggcacctgcacta

SEQ ID NO: 164717 - DNA, 17 bp, synthetic construct
  source 1..17: mol_type = other DNA
tacagggcacctgcact

SEQ ID NO: 164718 - DNA, 17 bp, synthetic construct
  source 1..17: mol_type = other DNA
atacagggcacctgcac

SEQ ID NO: 164719 - DNA, 17 bp, synthetic construct
  source 1..17: mol_type = other DNA
catacagggcacctgca

SEQ ID NO: 164720 - DNA, 17 bp, synthetic construct
  source 1..17: mol_type = other DNA
ccatacagggcacctgc

SEQ ID NO: 164721 - DNA, 17 bp, synthetic construct
  source 1..17: mol_type = other DNA
accatacagggcacctg

SEQ ID NO: 164722 - DNA, 17 bp, synthetic construct
  source 1..17: mol_type = other DNA
taccatacagggcacct

SEQ ID NO: 164723 - DNA, 17 bp, synthetic construct
  source 1..17: mol_type = other DNA
ctaccatacagggcacc

SEQ ID NO: 164724 - DNA, 17 bp, synthetic construct
  source 1..17: mol_type = other DNA
gctaccatacagggcac

SEQ ID NO: 164725 - DNA, 17 bp, synthetic construct
  source 1..17: mol_type = other DNA
cgctaccatacagggca

SEQ ID NO: 164726 - DNA, 17 bp, synthetic construct
  source 1..17: mol_type = other DNA
tcgctaccatacagggc

SEQ ID NO: 164727 - DNA, 17 bp, synthetic construct
  source 1..17: mol_type = other DNA
gtcgctaccatacaggg

SEQ ID NO: 164728 - DNA, 17 bp, synthetic construct
  source 1..17: mol_type = other DNA
tgtcgctaccatacagg

SEQ ID NO: 164729 - DNA, 17 bp, synthetic construct
  source 1..17: mol_type = other DNA
ctgtcgctaccatacag

SEQ ID NO: 164730 - DNA, 17 bp, synthetic construct
  source 1..17: mol_type = other DNA
actgtcgctaccataca

SEQ ID NO: 164731 - DNA, 17 bp, synthetic construct
  source 1..17: mol_type = other DNA
gactgtcgctaccatac

SEQ ID NO: 164732 - DNA, 17 bp, synthetic construct
  source 1..17: mol_type = other DNA
ggactgtcgctaccata

SEQ ID NO: 164733 - DNA, 17 bp, synthetic construct
  source 1..17: mol_type = other DNA
gggactgtcgctaccat

SEQ ID NO: 164734 - DNA, 17 bp, synthetic construct
  source 1..17: mol_type = other DNA
tgggactgtcgctacca

SEQ ID NO: 164735 - DNA, 17 bp, synthetic construct
  source 1..17: mol_type = other DNA
ttgggactgtcgctacc

SEQ ID NO: 164736 - DNA, 17 bp, synthetic construct
  source 1..17: mol_type = other DNA
attgggactgtcgctac

SEQ ID NO: 164737 - DNA, 17 bp, synthetic construct
  source 1..17: mol_type = other DNA
gattgggactgtcgcta

SEQ ID NO: 164738 - DNA, 17 bp, synthetic construct
  source 1..17: mol_type = other DNA
ggattgggactgtcgct

SEQ ID NO: 164739 - DNA, 17 bp, synthetic construct
  source 1..17: mol_type = other DNA
tggattgggactgtcgc

SEQ ID NO: 164740 - DNA, 17 bp, synthetic construct
  source 1..17: mol_type = other DNA
gtggattgggactgtcg

SEQ ID NO: 164741 - DNA, 17 bp, synthetic construct
  source 1..17: mol_type = other DNA
agtggattgggactgtc

SEQ ID NO: 164742 - DNA, 17 bp, synthetic construct
  source 1..17: mol_type = other DNA
cagtggattgggactgt

SEQ ID NO: 164743 - DNA, 17 bp, synthetic construct
  source 1..17: mol_type = other DNA
tcagtggattgggactg

SEQ ID NO: 164744 - DNA, 17 bp, synthetic construct
  source 1..17: mol_type = other DNA
gtcagtggattgggact

SEQ ID NO: 164745 - DNA, 17 bp, synthetic construct
  source 1..17: mol_type = other DNA
ggtcagtggattgggac

SEQ ID NO: 164746 - DNA, 17 bp, synthetic construct
  source 1..17: mol_type = other DNA
aggtcagtggattggga

SEQ ID NO: 164747 - DNA, 17 bp, synthetic construct
  source 1..17: mol_type = other DNA
aaggtcagtggattggg

SEQ ID NO: 164748 - DNA, 17 bp, synthetic construct
  source 1..17: mol_type = other DNA
gaaggtcagtggattgg

SEQ ID NO: 164749 - DNA, 17 bp, synthetic construct
  source 1..17: mol_type = other DNA
ggaaggtcagtggattg

SEQ ID NO: 164750 - DNA, 17 bp, synthetic construct
  source 1..17: mol_type = other DNA
cggaaggtcagtggatt

SEQ ID NO: 164751 - DNA, 17 bp, synthetic construct
  source 1..17: mol_type = other DNA
ccggaaggtcagtggat

SEQ ID NO: 164752 - DNA, 17 bp, synthetic construct
  source 1..17: mol_type = other DNA
cccggaaggtcagtgga

SEQ ID NO: 164753 - DNA, 17 bp, synthetic construct
  source 1..17: mol_type = other DNA
gcccggaaggtcagtgg

SEQ ID NO: 164754 - DNA, 17 bp, synthetic construct
  source 1..17: mol_type = other DNA
agcccggaaggtcagtg

SEQ ID NO: 164755 - DNA, 17 bp, synthetic construct
  source 1..17: mol_type = other DNA
gagcccggaaggtcagt

SEQ ID NO: 164756 - DNA, 17 bp, synthetic construct
  source 1..17: mol_type = other DNA
agagcccggaaggtcag

SEQ ID NO: 164757 - DNA, 17 bp, synthetic construct
  source 1..17: mol_type = other DNA
cagagcccggaaggtca

SEQ ID NO: 164758 - DNA, 17 bp, synthetic construct
  source 1..17: mol_type = other DNA
acagagcccggaaggtc

SEQ ID NO: 164759 - DNA, 17 bp, synthetic construct
  source 1..17: mol_type = other DNA
gacagagcccggaaggt

SEQ ID NO: 164760 - DNA, 17 bp, synthetic construct
  source 1..17: mol_type = other DNA
agacagagcccggaagg

SEQ ID NO: 164761 - DNA, 17 bp, synthetic construct
  source 1..17: mol_type = other DNA
tagacagagcccggaag

SEQ ID NO: 164762 - DNA, 17 bp, synthetic construct
  source 1..17: mol_type = other DNA
ctagacagagcccggaa

SEQ ID NO: 164763 - DNA, 17 bp, synthetic construct
  source 1..17: mol_type = other DNA
cctagacagagcccgga

SEQ ID NO: 164764 - DNA, 17 bp, synthetic construct
  source 1..17: mol_type = other DNA
ccctagacagagcccgg

SEQ ID NO: 164765 - DNA, 17 bp, synthetic construct
  source 1..17: mol_type = other DNA
cccctagacagagcccg

SEQ ID NO: 164766 - DNA, 17 bp, synthetic construct
  source 1..17: mol_type = other DNA
acccctagacagagccc

SEQ ID NO: 164767 - DNA, 17 bp, synthetic construct
  source 1..17: mol_type = other DNA
cacccctagacagagcc

SEQ ID NO: 164768 - DNA, 17 bp, synthetic construct
  source 1..17: mol_type = other DNA
gcacccctagacagagc

SEQ ID NO: 164769 - DNA, 17 bp, synthetic construct
  source 1..17: mol_type = other DNA
tgcacccctagacagag

SEQ ID NO: 164770 - DNA, 17 bp, synthetic construct
  source 1..17: mol_type = other DNA
gtgcacccctagacaga

SEQ ID NO: 164771 - DNA, 17 bp, synthetic construct
  source 1..17: mol_type = other DNA
cgtgcacccctagacag

SEQ ID NO: 164772 - DNA, 17 bp, synthetic construct
  source 1..17: mol_type = other DNA
ccgtgcacccctagaca

SEQ ID NO: 164773 - DNA, 17 bp, synthetic construct
  source 1..17: mol_type = other DNA
gccgtgcacccctagac

SEQ ID NO: 164774 - DNA, 17 bp, synthetic construct
  source 1..17: mol_type = other DNA
ggccgtgcacccctaga

SEQ ID NO: 164775 - DNA, 17 bp, synthetic construct
  source 1..17: mol_type = other DNA
gggccgtgcacccctag

SEQ ID NO: 164776 - DNA, 17 bp, synthetic construct
  source 1..17: mol_type = other DNA
ggggccgtgcaccccta

SEQ ID NO: 164777 - DNA, 17 bp, synthetic construct
  source 1..17: mol_type = other DNA
aggggccgtgcacccct

SEQ ID NO: 164778 - DNA, 17 bp, synthetic construct
  source 1..17: mol_type = other DNA
gaggggccgtgcacccc

SEQ ID NO: 164779 - DNA, 17 bp, synthetic construct
  source 1..17: mol_type = other DNA
tgaggggccgtgcaccc

SEQ ID NO: 164780 - DNA, 17 bp, synthetic construct
  source 1..17: mol_type = other DNA
ttgaggggccgtgcacc

SEQ ID NO: 164781 - DNA, 17 bp, synthetic construct
  source 1..17: mol_type = other DNA
gttgaggggccgtgcac

SEQ ID NO: 164782 - DNA, 17 bp, synthetic construct
  source 1..17: mol_type = other DNA
tgttgaggggccgtgca

SEQ ID NO: 164783 - DNA, 17 bp, synthetic construct
  source 1..17: mol_type = other DNA
gtgttgaggggccgtgc

SEQ ID NO: 164784 - DNA, 17 bp, synthetic construct
  source 1..17: mol_type = other DNA
ggtgttgaggggccgtg

SEQ ID NO: 164785 - DNA, 17 bp, synthetic construct
  source 1..17: mol_type = other DNA
gggtgttgaggggccgt

SEQ ID NO: 164786 - DNA, 17 bp, synthetic construct
  source 1..17: mol_type = other DNA
agggtgttgaggggccg

SEQ ID NO: 164787 - DNA, 17 bp, synthetic construct
  source 1..17: mol_type = other DNA
cagggtgttgaggggcc

SEQ ID NO: 164788 - DNA, 17 bp, synthetic construct
  source 1..17: mol_type = other DNA
gcagggtgttgaggggc

SEQ ID NO: 164789 - DNA, 17 bp, synthetic construct
  source 1..17: mol_type = other DNA
cgcagggtgttgagggg

SEQ ID NO: 164790 - DNA, 17 bp, synthetic construct
  source 1..17: mol_type = other DNA
acgcagggtgttgaggg

SEQ ID NO: 164791 - DNA, 17 bp, synthetic construct
  source 1..17: mol_type = other DNA
cacgcagggtgttgagg

SEQ ID NO: 164792 - DNA, 17 bp, synthetic construct
  source 1..17: mol_type = other DNA
acacgcagggtgttgag

SEQ ID NO: 164793 - DNA, 17 bp, synthetic construct
  source 1..17: mol_type = other DNA
gacacgcagggtgttga

SEQ ID NO: 164794 - DNA, 17 bp, synthetic construct
  source 1..17: mol_type = other DNA
agacacgcagggtgttg

SEQ ID NO: 164795 - DNA, 17 bp, synthetic construct
  source 1..17: mol_type = other DNA
gagacacgcagggtgtt

SEQ ID NO: 164796 - DNA, 17 bp, synthetic construct
  source 1..17: mol_type = other DNA
ggagacacgcagggtgt

SEQ ID NO: 164797 - DNA, 17 bp, synthetic construct
  source 1..17: mol_type = other DNA
tggagacacgcagggtg

SEQ ID NO: 164798 - DNA, 17 bp, synthetic construct
  source 1..17: mol_type = other DNA
ctggagacacgcagggt

SEQ ID NO: 164799 - DNA, 17 bp, synthetic construct
  source 1..17: mol_type = other DNA
cctggagacacgcaggg

SEQ ID NO: 164800 - DNA, 17 bp, synthetic construct
  source 1..17: mol_type = other DNA
ccctggagacacgcagg

SEQ ID NO: 164801 - DNA, 17 bp, synthetic construct
  source 1..17: mol_type = other DNA
cccctggagacacgcag

SEQ ID NO: 164802 - DNA, 17 bp, synthetic construct
  source 1..17: mol_type = other DNA
gcccctggagacacgca

SEQ ID NO: 164803 - DNA, 17 bp, synthetic construct
  source 1..17: mol_type = other DNA
agcccctggagacacgc

SEQ ID NO: 164804 - DNA, 17 bp, synthetic construct
  source 1..17: mol_type = other DNA
gagcccctggagacacg

SEQ ID NO: 164805 - DNA, 17 bp, synthetic construct
  source 1..17: mol_type = other DNA
ggagcccctggagacac

SEQ ID NO: 164806 - DNA, 17 bp, synthetic construct
  source 1..17: mol_type = other DNA
gggagcccctggagaca

SEQ ID NO: 164807 - DNA, 17 bp, synthetic construct
  source 1..17: mol_type = other DNA
ggggagcccctggagac

SEQ ID NO: 164808 - DNA, 17 bp, synthetic construct
  source 1..17: mol_type = other DNA
tggggagcccctggaga

SEQ ID NO: 164809 - DNA, 17 bp, synthetic construct
  source 1..17: mol_type = other DNA
gtggggagcccctggag

SEQ ID NO: 164810 - DNA, 17 bp, synthetic construct
  source 1..17: mol_type = other DNA
cgtggggagcccctgga

SEQ ID NO: 164811 - DNA, 17 bp, synthetic construct
  source 1..17: mol_type = other DNA
tcgtggggagcccctgg

SEQ ID NO: 164812 - DNA, 17 bp, synthetic construct
  source 1..17: mol_type = other DNA
ttcgtggggagcccctg

SEQ ID NO: 164813 - DNA, 17 bp, synthetic construct
  source 1..17: mol_type = other DNA
cttcgtggggagcccct

SEQ ID NO: 164814 - DNA, 17 bp, synthetic construct
  source 1..17: mol_type = other DNA
gcttcgtggggagcccc

SEQ ID NO: 164815 - DNA, 17 bp, synthetic construct
  source 1..17: mol_type = other DNA
ggcttcgtggggagccc

SEQ ID NO: 164816 - DNA, 17 bp, synthetic construct
  source 1..17: mol_type = other DNA
aggcttcgtggggagcc

SEQ ID NO: 164817 - DNA, 17 bp, synthetic construct
  source 1..17: mol_type = other DNA
gaggcttcgtggggagc

SEQ ID NO: 164818 - DNA, 17 bp, synthetic construct
  source 1..17: mol_type = other DNA
tgaggcttcgtggggag

SEQ ID NO: 164819 - DNA, 17 bp, synthetic construct
  source 1..17: mol_type = other DNA
ctgaggcttcgtgggga

SEQ ID NO: 164820 - DNA, 17 bp, synthetic construct
  source 1..17: mol_type = other DNA
gctgaggcttcgtgggg

SEQ ID NO: 164821 - DNA, 17 bp, synthetic construct
  source 1..17: mol_type = other DNA
tgctgaggcttcgtggg

SEQ ID NO: 164822 - DNA, 17 bp, synthetic construct
  source 1..17: mol_type = other DNA
gtgctgaggcttcgtgg

SEQ ID NO: 164823 - DNA, 17 bp, synthetic construct
  source 1..17: mol_type = other DNA
tgtgctgaggcttcgtg

SEQ ID NO: 164824 - DNA, 17 bp, synthetic construct
  source 1..17: mol_type = other DNA
ttgtgctgaggcttcgt

SEQ ID NO: 164825 - DNA, 17 bp, synthetic construct
  source 1..17: mol_type = other DNA
attgtgctgaggcttcg

SEQ ID NO: 164826 - DNA, 17 bp, synthetic construct
  source 1..17: mol_type = other DNA
cattgtgctgaggcttc

SEQ ID NO: 164827 - DNA, 17 bp, synthetic construct
  source 1..17: mol_type = other DNA
tcattgtgctgaggctt

SEQ ID NO: 164828 - DNA, 17 bp, synthetic construct
  source 1..17: mol_type = other DNA
atcattgtgctgaggct

SEQ ID NO: 164829 - DNA, 17 bp, synthetic construct
  source 1..17: mol_type = other DNA
aatcattgtgctgaggc

SEQ ID NO: 164830 - DNA, 17 bp, synthetic construct
  source 1..17: mol_type = other DNA
caatcattgtgctgagg

SEQ ID NO: 164831 - DNA, 17 bp, synthetic construct
  source 1..17: mol_type = other DNA
tcaatcattgtgctgag

SEQ ID NO: 164832 - DNA, 17 bp, synthetic construct
  source 1..17: mol_type = other DNA
atcaatcattgtgctga

SEQ ID NO: 164833 - DNA, 17 bp, synthetic construct
  source 1..17: mol_type = other DNA
catcaatcattgtgctg

SEQ ID NO: 164834 - DNA, 17 bp, synthetic construct
  source 1..17: mol_type = other DNA
ccatcaatcattgtgct

SEQ ID NO: 164835 - DNA, 17 bp, synthetic construct
  source 1..17: mol_type = other DNA
cccatcaatcattgtgc

SEQ ID NO: 164836 - DNA, 17 bp, synthetic construct
  source 1..17: mol_type = other DNA
tcccatcaatcattgtg

SEQ ID NO: 164837 - DNA, 17 bp, synthetic construct
  source 1..17: mol_type = other DNA
atcccatcaatcattgt

SEQ ID NO: 164838 - DNA, 17 bp, synthetic construct
  source 1..17: mol_type = other DNA
tatcccatcaatcattg

SEQ ID NO: 164839 - DNA, 17 bp, synthetic construct
  source 1..17: mol_type = other DNA
gtatcccatcaatcatt

SEQ ID NO: 164840 - DNA, 17 bp, synthetic construct
  source 1..17: mol_type = other DNA
ggtatcccatcaatcat

SEQ ID NO: 164841 - DNA, 17 bp, synthetic construct
  source 1..17: mol_type = other DNA
gggtatcccatcaatca

SEQ ID NO: 164842 - DNA, 17 bp, synthetic construct
  source 1..17: mol_type = other DNA
ggggtatcccatcaatc

SEQ ID NO: 164843 - DNA, 17 bp, synthetic construct
  source 1..17: mol_type = other DNA
tggggtatcccatcaat

SEQ ID NO: 164844 - DNA, 17 bp, synthetic construct
  source 1..17: mol_type = other DNA
ttggggtatcccatcaa

SEQ ID NO: 164845 - DNA, 17 bp, synthetic construct
  source 1..17: mol_type = other DNA
cttggggtatcccatca

SEQ ID NO: 164846 - DNA, 17 bp, synthetic construct
  source 1..17: mol_type = other DNA
ccttggggtatcccatc

SEQ ID NO: 164847 - DNA, 17 bp, synthetic construct
  source 1..17: mol_type = other DNA
tccttggggtatcccat

SEQ ID NO: 164848 - DNA, 17 bp, synthetic construct
  source 1..17: mol_type = other DNA
ctccttggggtatccca

SEQ ID NO: 164849 - DNA, 17 bp, synthetic construct
  source 1..17: mol_type = other DNA
tctccttggggtatccc

SEQ ID NO: 164850 - DNA, 17 bp, synthetic construct
  source 1..17: mol_type = other DNA
gtctccttggggtatcc

SEQ ID NO: 164851 - DNA, 17 bp, synthetic construct
  source 1..17: mol_type = other DNA
tgtctccttggggtatc

SEQ ID NO: 164852 - DNA, 17 bp, synthetic construct
  source 1..17: mol_type = other DNA
ttgtctccttggggtat

SEQ ID NO: 164853 - DNA, 17 bp, synthetic construct
  source 1..17: mol_type = other DNA
attgtctccttggggta

SEQ ID NO: 164854 - DNA, 17 bp, synthetic construct
  source 1..17: mol_type = other DNA
tattgtctccttggggt

SEQ ID NO: 164855 - DNA, 17 bp, synthetic construct
  source 1..17: mol_type = other DNA
ttattgtctccttgggg

SEQ ID NO: 164856 - DNA, 17 bp, synthetic construct
  source 1..17: mol_type = other DNA
tttattgtctccttggg

SEQ ID NO: 164857 - DNA, 17 bp, synthetic construct
  source 1..17: mol_type = other DNA
ctttattgtctccttgg

SEQ ID NO: 164858 - DNA, 17 bp, synthetic construct
  source 1..17: mol_type = other DNA
gctttattgtctccttg

SEQ ID NO: 164859 - DNA, 17 bp, synthetic construct
  source 1..17: mol_type = other DNA
agctttattgtctcctt

SEQ ID NO: 164860 - DNA, 17 bp, synthetic construct
  source 1..17: mol_type = other DNA
aagctttattgtctcct

SEQ ID NO: 164861 - DNA, 17 bp, synthetic construct
  source 1..17: mol_type = other DNA
aaagctttattgtctcc

SEQ ID NO: 164862 - DNA, 17 bp, synthetic construct
  source 1..17: mol_type = other DNA
gaaagctttattgtctc

SEQ ID NO: 164863 - DNA, 17 bp, synthetic construct
  source 1..17: mol_type = other DNA
ggaaagctttattgtct

SEQ ID NO: 164864 - DNA, 17 bp, synthetic construct
  source 1..17: mol_type = other DNA
aggaaagctttattgtc

SEQ ID NO: 164865 - DNA, 17 bp, synthetic construct
  source 1..17: mol_type = other DNA
caggaaagctttattgt

SEQ ID NO: 164866 - DNA, 17 bp, synthetic construct
  source 1..17: mol_type = other DNA
ccaggaaagctttattg

SEQ ID NO: 164867 - DNA, 17 bp, synthetic construct
  source 1..17: mol_type = other DNA
tccaggaaagctttatt

SEQ ID NO: 164868 - DNA, 17 bp, synthetic construct
  source 1..17: mol_type = other DNA
gtccaggaaagctttat

SEQ ID NO: 164869 - DNA, 17 bp, synthetic construct
  source 1..17: mol_type = other DNA
agtccaggaaagcttta

SEQ ID NO: 164870 - DNA, 17 bp, synthetic construct
  source 1..17: mol_type = other DNA
gagtccaggaaagcttt

SEQ ID NO: 164871 - DNA, 17 bp, synthetic construct
  source 1..17: mol_type = other DNA
ggagtccaggaaagctt

SEQ ID NO: 164872 - DNA, 17 bp, synthetic construct
  source 1..17: mol_type = other DNA
cggagtccaggaaagct

SEQ ID NO: 164873 - DNA, 17 bp, synthetic construct
  source 1..17: mol_type = other DNA
acggagtccaggaaagc

SEQ ID NO: 164874 - DNA, 17 bp, synthetic construct
  source 1..17: mol_type = other DNA
gacggagtccaggaaag

SEQ ID NO: 164875 - DNA, 17 bp, synthetic construct
  source 1..17: mol_type = other DNA
ggacggagtccaggaaa

SEQ ID NO: 164876 - DNA, 17 bp, synthetic construct
  source 1..17: mol_type = other DNA
gggacggagtccaggaa

SEQ ID NO: 164877 - DNA, 17 bp, synthetic construct
  source 1..17: mol_type = other DNA
tgggacggagtccagga

SEQ ID NO: 164878 - DNA, 17 bp, synthetic construct
  source 1..17: mol_type = other DNA
atgggacggagtccagg

SEQ ID NO: 164879 - DNA, 17 bp, synthetic construct
  source 1..17: mol_type = other DNA
gatgggacggagtccag

SEQ ID NO: 164880 - DNA, 17 bp, synthetic construct
  source 1..17: mol_type = other DNA
ggatgggacggagtcca

SEQ ID NO: 164881 - DNA, 17 bp, synthetic construct
  source 1..17: mol_type = other DNA
gggatgggacggagtcc

SEQ ID NO: 164882 - DNA, 17 bp, synthetic construct
  source 1..17: mol_type = other DNA
agggatgggacggagtc

SEQ ID NO: 164883 - DNA, 17 bp, synthetic construct
  source 1..17: mol_type = other DNA
gagggatgggacggagt

SEQ ID NO: 164884 - DNA, 17 bp, synthetic construct
  source 1..17: mol_type = other DNA
tgagggatgggacggag

SEQ ID NO: 164885 - DNA, 17 bp, synthetic construct
  source 1..17: mol_type = other DNA
ctgagggatgggacgga

SEQ ID NO: 164886 - DNA, 17 bp, synthetic construct
  source 1..17: mol_type = other DNA
gctgagggatgggacgg

SEQ ID NO: 164887 - DNA, 17 bp, synthetic construct
  source 1..17: mol_type = other DNA
tgctgagggatgggacg

SEQ ID NO: 164888 - DNA, 17 bp, synthetic construct
  source 1..17: mol_type = other DNA
gtgctgagggatgggac

SEQ ID NO: 164889 - DNA, 17 bp, synthetic construct
  source 1..17: mol_type = other DNA
cgtgctgagggatggga

SEQ ID NO: 164890 - DNA, 17 bp, synthetic construct
  source 1..17: mol_type = other DNA
ccgtgctgagggatggg

SEQ ID NO: 164891 - DNA, 17 bp, synthetic construct
  source 1..17: mol_type = other DNA
gccgtgctgagggatgg

SEQ ID NO: 164892 - DNA, 17 bp, synthetic construct
  source 1..17: mol_type = other DNA
ggccgtgctgagggatg

SEQ ID NO: 164893 - DNA, 17 bp, synthetic construct
  source 1..17: mol_type = other DNA
aggccgtgctgagggat

SEQ ID NO: 164894 - DNA, 17 bp, synthetic construct
  source 1..17: mol_type = other DNA
taggccgtgctgaggga

SEQ ID NO: 164895 - DNA, 17 bp, synthetic construct
  source 1..17: mol_type = other DNA
ataggccgtgctgaggg

SEQ ID NO: 164896 - DNA, 17 bp, synthetic construct
  source 1..17: mol_type = other DNA
gataggccgtgctgagg

SEQ ID NO: 164897 - DNA, 17 bp, synthetic construct
  source 1..17: mol_type = other DNA
ggataggccgtgctgag

SEQ ID NO: 164898 - DNA, 17 bp, synthetic construct
  source 1..17: mol_type = other DNA
gggataggccgtgctga

SEQ ID NO: 164899 - DNA, 17 bp, synthetic construct
  source 1..17: mol_type = other DNA
tgggataggccgtgctg

SEQ ID NO: 164900 - DNA, 17 bp, synthetic construct
  source 1..17: mol_type = other DNA
ctgggataggccgtgct

SEQ ID NO: 164901 - DNA, 17 bp, synthetic construct
  source 1..17: mol_type = other DNA
gctgggataggccgtgc

SEQ ID NO: 164902 - DNA, 17 bp, synthetic construct
  source 1..17: mol_type = other DNA
ggctgggataggccgtg

SEQ ID NO: 164903 - DNA, 17 bp, synthetic construct
  source 1..17: mol_type = other DNA
tggctgggataggccgt

SEQ ID NO: 164904 - DNA, 17 bp, synthetic construct
  source 1..17: mol_type = other DNA
ctggctgggataggccg

SEQ ID NO: 164905 - DNA, 17 bp, synthetic construct
  source 1..17: mol_type = other DNA
gctggctgggataggcc

SEQ ID NO: 164906 - DNA, 17 bp, synthetic construct
  source 1..17: mol_type = other DNA
ggctggctgggataggc

SEQ ID NO: 164907 - DNA, 17 bp, synthetic construct
  source 1..17: mol_type = other DNA
tggctggctgggatagg

SEQ ID NO: 164908 - DNA, 17 bp, synthetic construct
  source 1..17: mol_type = other DNA
ctggctggctgggatag

SEQ ID NO: 164909 - DNA, 17 bp, synthetic construct
  source 1..17: mol_type = other DNA
gctggctggctgggata

SEQ ID NO: 164910 - DNA, 17 bp, synthetic construct
  source 1..17: mol_type = other DNA
agctggctggctgggat

SEQ ID NO: 164911 - DNA, 17 bp, synthetic construct
  source 1..17: mol_type = other DNA
gagctggctggctggga

SEQ ID NO: 164912 - DNA, 17 bp, synthetic construct
  source 1..17: mol_type = other DNA
ggagctggctggctggg

SEQ ID NO: 164913 - DNA, 17 bp, synthetic construct
  source 1..17: mol_type = other DNA
gggagctggctggctgg

SEQ ID NO: 164914 - DNA, 17 bp, synthetic construct
  source 1..17: mol_type = other DNA
agggagctggctggctg

SEQ ID NO: 164915 - DNA, 17 bp, synthetic construct
  source 1..17: mol_type = other DNA
gagggagctggctggct

SEQ ID NO: 164916 - DNA, 17 bp, synthetic construct
  source 1..17: mol_type = other DNA
tgagggagctggctggc

SEQ ID NO: 164917 - DNA, 17 bp, synthetic construct
  source 1..17: mol_type = other DNA
ttgagggagctggctgg

SEQ ID NO: 164918 - DNA, 17 bp, synthetic construct
  source 1..17: mol_type = other DNA
cttgagggagctggctg

SEQ ID NO: 164919 - DNA, 17 bp, synthetic construct
  source 1..17: mol_type = other DNA
ccttgagggagctggct

SEQ ID NO: 164920 - DNA, 17 bp, synthetic construct
  source 1..17: mol_type = other DNA
gccttgagggagctggc

SEQ ID NO: 164921 - DNA, 17 bp, synthetic construct
  source 1..17: mol_type = other DNA
ggccttgagggagctgg

SEQ ID NO: 164922 - DNA, 17 bp, synthetic construct
  source 1..17: mol_type = other DNA
tggccttgagggagctg

SEQ ID NO: 164923 - DNA, 17 bp, synthetic construct
  source 1..17: mol_type = other DNA
ctggccttgagggagct

SEQ ID NO: 164924 - DNA, 17 bp, synthetic construct
  source 1..17: mol_type = other DNA
cctggccttgagggagc

SEQ ID NO: 164925 - DNA, 17 bp, synthetic construct
  source 1..17: mol_type = other DNA
gcctggccttgagggag

SEQ ID NO: 164926 - DNA, 17 bp, synthetic construct
  source 1..17: mol_type = other DNA
agcctggccttgaggga

SEQ ID NO: 164927 - DNA, 17 bp, synthetic construct
  source 1..17: mol_type = other DNA
cagcctggccttgaggg

SEQ ID NO: 164928 - DNA, 17 bp, synthetic construct
  source 1..17: mol_type = other DNA
gcagcctggccttgagg

SEQ ID NO: 164929 - DNA, 17 bp, synthetic construct
  source 1..17: mol_type = other DNA
ggcagcctggccttgag

SEQ ID NO: 164930 - DNA, 17 bp, synthetic construct
  source 1..17: mol_type = other DNA
tggcagcctggccttga

SEQ ID NO: 164931 - DNA, 17 bp, synthetic construct
  source 1..17: mol_type = other DNA
ctggcagcctggccttg

SEQ ID NO: 164932 - DNA, 17 bp, synthetic construct
  source 1..17: mol_type = other DNA
cctggcagcctggcctt

SEQ ID NO: 164933 - DNA, 17 bp, synthetic construct
  source 1..17: mol_type = other DNA
gcctggcagcctggcct

SEQ ID NO: 164934 - DNA, 17 bp, synthetic construct
  source 1..17: mol_type = other DNA
ggcctggcagcctggcc

SEQ ID NO: 164935 - DNA, 17 bp, synthetic construct
  source 1..17: mol_type = other DNA
gggcctggcagcctggc

SEQ ID NO: 164936 - DNA, 17 bp, synthetic construct
  source 1..17: mol_type = other DNA
ggggcctggcagcctgg

SEQ ID NO: 164937 - DNA, 17 bp, synthetic construct
  source 1..17: mol_type = other DNA
tggggcctggcagcctg

SEQ ID NO: 164938 - DNA, 17 bp, synthetic construct
  source 1..17: mol_type = other DNA
ctggggcctggcagcct

SEQ ID NO: 164939 - DNA, 17 bp, synthetic construct
  source 1..17: mol_type = other DNA
actggggcctggcagcc

SEQ ID NO: 164940 - DNA, 17 bp, synthetic construct
  source 1..17: mol_type = other DNA
gactggggcctggcagc

SEQ ID NO: 164941 - DNA, 17 bp, synthetic construct
  source 1..17: mol_type = other DNA
ggactggggcctggcag

SEQ ID NO: 164942 - DNA, 17 bp, synthetic construct
  source 1..17: mol_type = other DNA
gggactggggcctggca

SEQ ID NO: 164943 - DNA, 17 bp, synthetic construct
  source 1..17: mol_type = other DNA
agggactggggcctggc

SEQ ID NO: 164944 - DNA, 17 bp, synthetic construct
  source 1..17: mol_type = other DNA
gagggactggggcctgg

SEQ ID NO: 164945 - DNA, 17 bp, synthetic construct
  source 1..17: mol_type = other DNA
tgagggactggggcctg

SEQ ID NO: 164946 - DNA, 17 bp, synthetic construct
  source 1..17: mol_type = other DNA
atgagggactggggcct

SEQ ID NO: 164947 - DNA, 17 bp, synthetic construct
  source 1..17: mol_type = other DNA
catgagggactggggcc

SEQ ID NO: 164948 - DNA, 17 bp, synthetic construct
  source 1..17: mol_type = other DNA
gcatgagggactggggc

SEQ ID NO: 164949 - DNA, 17 bp, synthetic construct
  source 1..17: mol_type = other DNA
tgcatgagggactgggg

SEQ ID NO: 164950 - DNA, 17 bp, synthetic construct
  source 1..17: mol_type = other DNA
ctgcatgagggactggg

SEQ ID NO: 164951 - DNA, 17 bp, synthetic construct
  source 1..17: mol_type = other DNA
tctgcatgagggactgg

SEQ ID NO: 164952 - DNA, 17 bp, synthetic construct
  source 1..17: mol_type = other DNA
ttctgcatgagggactg

SEQ ID NO: 164953 - DNA, 17 bp, synthetic construct
  source 1..17: mol_type = other DNA
tttctgcatgagggact

SEQ ID NO: 164954 - DNA, 17 bp, synthetic construct
  source 1..17: mol_type = other DNA
gtttctgcatgagggac

SEQ ID NO: 164955 - DNA, 17 bp, synthetic construct
  source 1..17: mol_type = other DNA
cgtttctgcatgaggga

SEQ ID NO: 164956 - DNA, 17 bp, synthetic construct
  source 1..17: mol_type = other DNA
ccgtttctgcatgaggg

SEQ ID NO: 164957 - DNA, 17 bp, synthetic construct
  source 1..17: mol_type = other DNA
gccgtttctgcatgagg

SEQ ID NO: 164958 - DNA, 17 bp, synthetic construct
  source 1..17: mol_type = other DNA
agccgtttctgcatgag

SEQ ID NO: 164959 - DNA, 17 bp, synthetic construct
  source 1..17: mol_type = other DNA
gagccgtttctgcatga

SEQ ID NO: 164960 - DNA, 17 bp, synthetic construct
  source 1..17: mol_type = other DNA
agagccgtttctgcatg

SEQ ID NO: 164961 - DNA, 17 bp, synthetic construct
  source 1..17: mol_type = other DNA
tagagccgtttctgcat

SEQ ID NO: 164962 - DNA, 17 bp, synthetic construct
  source 1..17: mol_type = other DNA
ttagagccgtttctgca

SEQ ID NO: 164963 - DNA, 17 bp, synthetic construct
  source 1..17: mol_type = other DNA
gttagagccgtttctgc

SEQ ID NO: 164964 - DNA, 17 bp, synthetic construct
  source 1..17: mol_type = other DNA
ggttagagccgtttctg

SEQ ID NO: 164965 - DNA, 17 bp, synthetic construct
  source 1..17: mol_type = other DNA
tggttagagccgtttct

SEQ ID NO: 164966 - DNA, 17 bp, synthetic construct
  source 1..17: mol_type = other DNA
ttggttagagccgtttc

SEQ ID NO: 164967 - DNA, 17 bp, synthetic construct
  source 1..17: mol_type = other DNA
cttggttagagccgttt

SEQ ID NO: 164968 - DNA, 17 bp, synthetic construct
  source 1..17: mol_type = other DNA
ccttggttagagccgtt

SEQ ID NO: 164969 - DNA, 17 bp, synthetic construct
  source 1..17: mol_type = other DNA
gccttggttagagccgt

SEQ ID NO: 164970 - DNA, 17 bp, synthetic construct
  source 1..17: mol_type = other DNA
agccttggttagagccg

SEQ ID NO: 164971 - DNA, 17 bp, synthetic construct
  source 1..17: mol_type = other DNA
cagccttggttagagcc

SEQ ID NO: 164972 - DNA, 17 bp, synthetic construct
  source 1..17: mol_type = other DNA
tcagccttggttagagc

SEQ ID NO: 164973 - DNA, 17 bp, synthetic construct
  source 1..17: mol_type = other DNA
ctcagccttggttagag

SEQ ID NO: 164974 - DNA, 17 bp, synthetic construct
  source 1..17: mol_type = other DNA
cctcagccttggttaga

SEQ ID NO: 164975 - DNA, 17 bp, synthetic construct
  source 1..17: mol_type = other DNA
gcctcagccttggttag

SEQ ID NO: 164976 - DNA, 17 bp, synthetic construct
  source 1..17: mol_type = other DNA
tgcctcagccttggtta

SEQ ID NO: 164977 - DNA, 17 bp, synthetic construct
  source 1..17: mol_type = other DNA
ctgcctcagccttggtt

SEQ ID NO: 164978 - DNA, 17 bp, synthetic construct
  source 1..17: mol_type = other DNA
cctgcctcagccttggt

SEQ ID NO: 164979 - DNA, 17 bp, synthetic construct
  source 1..17: mol_type = other DNA
gcctgcctcagccttgg

SEQ ID NO: 164980 - DNA, 17 bp, synthetic construct
  source 1..17: mol_type = other DNA
tgcctgcctcagccttg

SEQ ID NO: 164981 - DNA, 17 bp, synthetic construct
  source 1..17: mol_type = other DNA
gtgcctgcctcagcctt

SEQ ID NO: 164982 - DNA, 17 bp, synthetic construct
  source 1..17: mol_type = other DNA
agtgcctgcctcagcct

SEQ ID NO: 164983 - DNA, 17 bp, synthetic construct
  source 1..17: mol_type = other DNA
cagtgcctgcctcagcc

SEQ ID NO: 164984 - DNA, 17 bp, synthetic construct
  source 1..17: mol_type = other DNA
ccagtgcctgcctcagc

SEQ ID NO: 164985 - DNA, 17 bp, synthetic construct
  source 1..17: mol_type = other DNA
cccagtgcctgcctcag

SEQ ID NO: 164986 - DNA, 17 bp, synthetic construct
  source 1..17: mol_type = other DNA
ccccagtgcctgcctca

SEQ ID NO: 164987 - DNA, 17 bp, synthetic construct
  source 1..17: mol_type = other DNA
accccagtgcctgcctc

SEQ ID NO: 164988 - DNA, 17 bp, synthetic construct
  source 1..17: mol_type = other DNA
gaccccagtgcctgcct

SEQ ID NO: 164989 - DNA, 17 bp, synthetic construct
  source 1..17: mol_type = other DNA
ggaccccagtgcctgcc

SEQ ID NO: 164990 - DNA, 17 bp, synthetic construct
  source 1..17: mol_type = other DNA
gggaccccagtgcctgc

SEQ ID NO: 164991 - DNA, 17 bp, synthetic construct
  source 1..17: mol_type = other DNA
ggggaccccagtgcctg

SEQ ID NO: 164992 - DNA, 17 bp, synthetic construct
  source 1..17: mol_type = other DNA
tggggaccccagtgcct

SEQ ID NO: 164993 - DNA, 17 bp, synthetic construct
  source 1..17: mol_type = other DNA
ctggggaccccagtgcc

SEQ ID NO: 164994 - DNA, 17 bp, synthetic construct
  source 1..17: mol_type = other DNA
actggggaccccagtgc

SEQ ID NO: 164995 - DNA, 17 bp, synthetic construct
  source 1..17: mol_type = other DNA
tactggggaccccagtg

SEQ ID NO: 164996 - DNA, 17 bp, synthetic construct
  source 1..17: mol_type = other DNA
atactggggaccccagt

SEQ ID NO: 164997 - DNA, 17 bp, synthetic construct
  source 1..17: mol_type = other DNA
gatactggggaccccag

SEQ ID NO: 164998 - DNA, 17 bp, synthetic construct
  source 1..17: mol_type = other DNA
ggatactggggacccca

SEQ ID NO: 164999 - DNA, 17 bp, synthetic construct
  source 1..17: mol_type = other DNA
gggatactggggacccc

SEQ ID NO: 165000 - DNA, 17 bp, synthetic construct
  source 1..17: mol_type = other DNA
tgggatactggggaccc

SEQ ID NO: 165001 - DNA, 17 bp, synthetic construct
  source 1..17: mol_type = other DNA
gtgggatactggggacc

SEQ ID NO: 165002 - DNA, 17 bp, synthetic construct
  source 1..17: mol_type = other DNA
tgtgggatactggggac

SEQ ID NO: 165003 - DNA, 17 bp, synthetic construct
  source 1..17: mol_type = other DNA
ctgtgggatactgggga

SEQ ID NO: 165004 - DNA, 17 bp, synthetic construct
  source 1..17: mol_type = other DNA
cctgtgggatactgggg

SEQ ID NO: 165005 - DNA, 17 bp, synthetic construct
  source 1..17: mol_type = other DNA
ccctgtgggatactggg

SEQ ID NO: 165006 - DNA, 17 bp, synthetic construct
  source 1..17: mol_type = other DNA
cccctgtgggatactgg

SEQ ID NO: 165007 - DNA, 17 bp, synthetic construct
  source 1..17: mol_type = other DNA
gcccctgtgggatactg

SEQ ID NO: 165008 - DNA, 17 bp, synthetic construct
  source 1..17: mol_type = other DNA
tgcccctgtgggatact

SEQ ID NO: 165009 - DNA, 17 bp, synthetic construct
  source 1..17: mol_type = other DNA
ctgcccctgtgggatac

SEQ ID NO: 165010 - DNA, 17 bp, synthetic construct
  source 1..17: mol_type = other DNA
cctgcccctgtgggata

SEQ ID NO: 165011 - DNA, 17 bp, synthetic construct
  source 1..17: mol_type = other DNA
ccctgcccctgtgggat

SEQ ID NO: 165012 - DNA, 17 bp, synthetic construct
  source 1..17: mol_type = other DNA
gccctgcccctgtggga

SEQ ID NO: 165013 - DNA, 17 bp, synthetic construct
  source 1..17: mol_type = other DNA
ggccctgcccctgtggg

SEQ ID NO: 165014 - DNA, 17 bp, synthetic construct
  source 1..17: mol_type = other DNA
tggccctgcccctgtgg

SEQ ID NO: 165015 - DNA, 17 bp, synthetic construct
  source 1..17: mol_type = other DNA
ctggccctgcccctgtg

SEQ ID NO: 165016 - DNA, 17 bp, synthetic construct
  source 1..17: mol_type = other DNA
gctggccctgcccctgt

SEQ ID NO: 165017 - DNA, 17 bp, synthetic construct
  source 1..17: mol_type = other DNA
ggctggccctgcccctg

SEQ ID NO: 165018 - DNA, 17 bp, synthetic construct
  source 1..17: mol_type = other DNA
gggctggccctgcccct

SEQ ID NO: 165019 - DNA, 17 bp, synthetic construct
  source 1..17: mol_type = other DNA
agggctggccctgcccc

SEQ ID NO: 165020 - DNA, 17 bp, synthetic construct
  source 1..17: mol_type = other DNA
cagggctggccctgccc

SEQ ID NO: 165021 - DNA, 17 bp, synthetic construct
  source 1..17: mol_type = other DNA
ccagggctggccctgcc

SEQ ID NO: 165022 - DNA, 17 bp, synthetic construct
  source 1..17: mol_type = other DNA
cccagggctggccctgc

SEQ ID NO: 165023 - DNA, 17 bp, synthetic construct
  source 1..17: mol_type = other DNA
ccccagggctggccctg

SEQ ID NO: 165024 - DNA, 17 bp, synthetic construct
  source 1..17: mol_type = other DNA
tccccagggctggccct

SEQ ID NO: 165025 - DNA, 17 bp, synthetic construct
  source 1..17: mol_type = other DNA
ttccccagggctggccc

SEQ ID NO: 165026 - DNA, 17 bp, synthetic construct
  source 1..17: mol_type = other DNA
tttccccagggctggcc

SEQ ID NO: 165027 - DNA, 17 bp, synthetic construct
  source 1..17: mol_type = other DNA
ctttccccagggctggc

SEQ ID NO: 165028 - DNA, 17 bp, synthetic construct
  source 1..17: mol_type = other DNA
cctttccccagggctgg

SEQ ID NO: 165029 - DNA, 17 bp, synthetic construct
  source 1..17: mol_type = other DNA
ccctttccccagggctg

SEQ ID NO: 165030 - DNA, 17 bp, synthetic construct
  source 1..17: mol_type = other DNA
accctttccccagggct

SEQ ID NO: 165031 - DNA, 17 bp, synthetic construct
  source 1..17: mol_type = other DNA
gaccctttccccagggc

SEQ ID NO: 165032 - DNA, 17 bp, synthetic construct
  source 1..17: mol_type = other DNA
ggaccctttccccaggg

SEQ ID NO: 165033 - DNA, 17 bp, synthetic construct
  source 1..17: mol_type = other DNA
aggaccctttccccagg

SEQ ID NO: 165034 - DNA, 17 bp, synthetic construct
  source 1..17: mol_type = other DNA
gaggaccctttccccag

SEQ ID NO: 165035 - DNA, 17 bp, synthetic construct
  source 1..17: mol_type = other DNA
agaggaccctttcccca

SEQ ID NO: 165036 - DNA, 17 bp, synthetic construct
  source 1..17: mol_type = other DNA
cagaggaccctttcccc

SEQ ID NO: 165037 - DNA, 17 bp, synthetic construct
  source 1..17: mol_type = other DNA
ccagaggaccctttccc

SEQ ID NO: 165038 - DNA, 17 bp, synthetic construct
  source 1..17: mol_type = other DNA
cccagaggaccctttcc

SEQ ID NO: 165039 - DNA, 17 bp, synthetic construct
  source 1..17: mol_type = other DNA
ccccagaggaccctttc

SEQ ID NO: 165040 - DNA, 17 bp, synthetic construct
  source 1..17: mol_type = other DNA
gccccagaggacccttt

SEQ ID NO: 165041 - DNA, 17 bp, synthetic construct
  source 1..17: mol_type = other DNA
ggccccagaggaccctt

SEQ ID NO: 165042 - DNA, 17 bp, synthetic construct
  source 1..17: mol_type = other DNA
gggccccagaggaccct

SEQ ID NO: 165043 - DNA, 17 bp, synthetic construct
  source 1..17: mol_type = other DNA
ggggccccagaggaccc

SEQ ID NO: 165044 - DNA, 17 bp, synthetic construct
  source 1..17: mol_type = other DNA
aggggccccagaggacc

SEQ ID NO: 165045 - DNA, 17 bp, synthetic construct
  source 1..17: mol_type = other DNA
gaggggccccagaggac

SEQ ID NO: 165046 - DNA, 17 bp, synthetic construct
  source 1..17: mol_type = other DNA
ggaggggccccagagga

SEQ ID NO: 165047 - DNA, 17 bp, synthetic construct
  source 1..17: mol_type = other DNA
tggaggggccccagagg

SEQ ID NO: 165048 - DNA, 17 bp, synthetic construct
  source 1..17: mol_type = other DNA
gtggaggggccccagag

SEQ ID NO: 165049 - DNA, 17 bp, synthetic construct
  source 1..17: mol_type = other DNA
ggtggaggggccccaga

SEQ ID NO: 165050 - DNA, 17 bp, synthetic construct
  source 1..17: mol_type = other DNA
aggtggaggggccccag

SEQ ID NO: 165051 - DNA, 17 bp, synthetic construct
  source 1..17: mol_type = other DNA
aaggtggaggggcccca

SEQ ID NO: 165052 - DNA, 17 bp, synthetic construct
  source 1..17: mol_type = other DNA
caaggtggaggggcccc

SEQ ID NO: 165053 - DNA, 17 bp, synthetic construct
  source 1..17: mol_type = other DNA
acaaggtggaggggccc

SEQ ID NO: 165054 - DNA, 17 bp, synthetic construct
  source 1..17: mol_type = other DNA
cacaaggtggaggggcc

SEQ ID NO: 165055 - DNA, 17 bp, synthetic construct
  source 1..17: mol_type = other DNA
tcacaaggtggaggggc

SEQ ID NO: 165056 - DNA, 17 bp, synthetic construct
  source 1..17: mol_type = other DNA
ctcacaaggtggagggg

SEQ ID NO: 165057 - DNA, 17 bp, synthetic construct
  source 1..17: mol_type = other DNA
cctcacaaggtggaggg

SEQ ID NO: 165058 - DNA, 17 bp, synthetic construct
  source 1..17: mol_type = other DNA
gcctcacaaggtggagg

SEQ ID NO: 165059 - DNA, 17 bp, synthetic construct
  source 1..17: mol_type = other DNA
ggcctcacaaggtggag

SEQ ID NO: 165060 - DNA, 17 bp, synthetic construct
  source 1..17: mol_type = other DNA
tggcctcacaaggtgga

SEQ ID NO: 165061 - DNA, 17 bp, synthetic construct
  source 1..17: mol_type = other DNA
ctggcctcacaaggtgg

SEQ ID NO: 165062 - DNA, 17 bp, synthetic construct
  source 1..17: mol_type = other DNA
cctggcctcacaaggtg

SEQ ID NO: 165063 - DNA, 17 bp, synthetic construct
  source 1..17: mol_type = other DNA
tcctggcctcacaaggt

SEQ ID NO: 165064 - DNA, 17 bp, synthetic construct
  source 1..17: mol_type = other DNA
gtcctggcctcacaagg

SEQ ID NO: 165065 - DNA, 17 bp, synthetic construct
  source 1..17: mol_type = other DNA
agtcctggcctcacaag

SEQ ID NO: 165066 - DNA, 17 bp, synthetic construct
  source 1..17: mol_type = other DNA
cagtcctggcctcacaa

SEQ ID NO: 165067 - DNA, 17 bp, synthetic construct
  source 1..17: mol_type = other DNA
ccagtcctggcctcaca

SEQ ID NO: 165068 - DNA, 17 bp, synthetic construct
  source 1..17: mol_type = other DNA
tccagtcctggcctcac

SEQ ID NO: 165069 - DNA, 17 bp, synthetic construct
  source 1..17: mol_type = other DNA
ctccagtcctggcctca

SEQ ID NO: 165070 - DNA, 17 bp, synthetic construct
  source 1..17: mol_type = other DNA
cctccagtcctggcctc

SEQ ID NO: 165071 - DNA, 17 bp, synthetic construct
  source 1..17: mol_type = other DNA
tcctccagtcctggcct

SEQ ID NO: 165072 - DNA, 17 bp, synthetic construct
  source 1..17: mol_type = other DNA
atcctccagtcctggcc

SEQ ID NO: 165073 - DNA, 17 bp, synthetic construct
  source 1..17: mol_type = other DNA
catcctccagtcctggc

SEQ ID NO: 165074 - DNA, 17 bp, synthetic construct
  source 1..17: mol_type = other DNA
gcatcctccagtcctgg

SEQ ID NO: 165075 - DNA, 17 bp, synthetic construct
  source 1..17: mol_type = other DNA
agcatcctccagtcctg

SEQ ID NO: 165076 - DNA, 17 bp, synthetic construct
  source 1..17: mol_type = other DNA
cagcatcctccagtcct

SEQ ID NO: 165077 - DNA, 17 bp, synthetic construct
  source 1..17: mol_type = other DNA
tcagcatcctccagtcc

SEQ ID NO: 165078 - DNA, 17 bp, synthetic construct
  source 1..17: mol_type = other DNA
ctcagcatcctccagtc

SEQ ID NO: 165079 - DNA, 17 bp, synthetic construct
  source 1..17: mol_type = other DNA
gctcagcatcctccagt

SEQ ID NO: 165080 - DNA, 17 bp, synthetic construct
  source 1..17: mol_type = other DNA
ggctcagcatcctccag

SEQ ID NO: 165081 - DNA, 17 bp, synthetic construct
  source 1..17: mol_type = other DNA
tggctcagcatcctcca

SEQ ID NO: 165082 - DNA, 17 bp, synthetic construct
  source 1..17: mol_type = other DNA
ctggctcagcatcctcc

SEQ ID NO: 165083 - DNA, 17 bp, synthetic construct
  source 1..17: mol_type = other DNA
cctggctcagcatcctc

SEQ ID NO: 165084 - DNA, 17 bp, synthetic construct
  source 1..17: mol_type = other DNA
tcctggctcagcatcct

SEQ ID NO: 165085 - DNA, 17 bp, synthetic construct
  source 1..17: mol_type = other DNA
gtcctggctcagcatcc

SEQ ID NO: 165086 - DNA, 17 bp, synthetic construct
  source 1..17: mol_type = other DNA
ggtcctggctcagcatc

SEQ ID NO: 165087 - DNA, 17 bp, synthetic construct
  source 1..17: mol_type = other DNA
gggtcctggctcagcat

SEQ ID NO: 165088 - DNA, 17 bp, synthetic construct
  source 1..17: mol_type = other DNA
ggggtcctggctcagca

SEQ ID NO: 165089 - DNA, 17 bp, synthetic construct
  source 1..17: mol_type = other DNA
aggggtcctggctcagc

SEQ ID NO: 165090 - DNA, 17 bp, synthetic construct
  source 1..17: mol_type = other DNA
aaggggtcctggctcag

SEQ ID NO: 165091 - DNA, 17 bp, synthetic construct
  source 1..17: mol_type = other DNA
aaaggggtcctggctca

SEQ ID NO: 165092 - DNA, 17 bp, synthetic construct
  source 1..17: mol_type = other DNA
gaaaggggtcctggctc

SEQ ID NO: 165093 - DNA, 17 bp, synthetic construct
  source 1..17: mol_type = other DNA
ggaaaggggtcctggct

SEQ ID NO: 165094 - DNA, 17 bp, synthetic construct
  source 1..17: mol_type = other DNA
gggaaaggggtcctggc

SEQ ID NO: 165095 - DNA, 17 bp, synthetic construct
  source 1..17: mol_type = other DNA
tgggaaaggggtcctgg

SEQ ID NO: 165096 - DNA, 17 bp, synthetic construct
  source 1..17: mol_type = other DNA
atgggaaaggggtcctg

SEQ ID NO: 165097 - DNA, 17 bp, synthetic construct
  source 1..17: mol_type = other DNA
catgggaaaggggtcct

SEQ ID NO: 165098 - DNA, 17 bp, synthetic construct
  source 1..17: mol_type = other DNA
gcatgggaaaggggtcc

SEQ ID NO: 165099 - DNA, 17 bp, synthetic construct
  source 1..17: mol_type = other DNA
ggcatgggaaaggggtc

SEQ ID NO: 165100 - DNA, 17 bp, synthetic construct
  source 1..17: mol_type = other DNA
gggcatgggaaaggggt

SEQ ID NO: 165101 - DNA, 17 bp, synthetic construct
  source 1..17: mol_type = other DNA
ggggcatgggaaagggg

SEQ ID NO: 165102 - DNA, 17 bp, synthetic construct
  source 1..17: mol_type = other DNA
aggggcatgggaaaggg

SEQ ID NO: 165103 - DNA, 17 bp, synthetic construct
  source 1..17: mol_type = other DNA
aaggggcatgggaaagg

SEQ ID NO: 165104 - DNA, 17 bp, synthetic construct
  source 1..17: mol_type = other DNA
caaggggcatgggaaag

SEQ ID NO: 165105 - DNA, 17 bp, synthetic construct
  source 1..17: mol_type = other DNA
gcaaggggcatgggaaa

SEQ ID NO: 165106 - DNA, 17 bp, synthetic construct
  source 1..17: mol_type = other DNA
tgcaaggggcatgggaa

SEQ ID NO: 165107 - DNA, 17 bp, synthetic construct
  source 1..17: mol_type = other DNA
ctgcaaggggcatggga

SEQ ID NO: 165108 - DNA, 17 bp, synthetic construct
  source 1..17: mol_type = other DNA
cctgcaaggggcatggg

SEQ ID NO: 165109 - DNA, 17 bp, synthetic construct
  source 1..17: mol_type = other DNA
gcctgcaaggggcatgg

SEQ ID NO: 165110 - DNA, 17 bp, synthetic construct
  source 1..17: mol_type = other DNA
ggcctgcaaggggcatg

SEQ ID NO: 165111 - DNA, 17 bp, synthetic construct
  source 1..17: mol_type = other DNA
gggcctgcaaggggcat

SEQ ID NO: 165112 - DNA, 17 bp, synthetic construct
  source 1..17: mol_type = other DNA
cgggcctgcaaggggca

SEQ ID NO: 165113 - DNA, 17 bp, synthetic construct
  source 1..17: mol_type = other DNA
ccgggcctgcaaggggc

SEQ ID NO: 165114 - DNA, 17 bp, synthetic construct
  source 1..17: mol_type = other DNA
gccgggcctgcaagggg

SEQ ID NO: 165115 - DNA, 17 bp, synthetic construct
  source 1..17: mol_type = other DNA
ggccgggcctgcaaggg

SEQ ID NO: 165116 - DNA, 17 bp, synthetic construct
  source 1..17: mol_type = other DNA
gggccgggcctgcaagg

SEQ ID NO: 165117 - DNA, 17 bp, synthetic construct
  source 1..17: mol_type = other DNA
agggccgggcctgcaag

SEQ ID NO: 165118 - DNA, 17 bp, synthetic construct
  source 1..17: mol_type = other DNA
gagggccgggcctgcaa

SEQ ID NO: 165119 - DNA, 17 bp, synthetic construct
  source 1..17: mol_type = other DNA
ggagggccgggcctgca

SEQ ID NO: 165120 - DNA, 17 bp, synthetic construct
  source 1..17: mol_type = other DNA
gggagggccgggcctgc

SEQ ID NO: 165121 - DNA, 17 bp, synthetic construct
  source 1..17: mol_type = other DNA
cgggagggccgggcctg

SEQ ID NO: 165122 - DNA, 17 bp, synthetic construct
  source 1..17: mol_type = other DNA
ccgggagggccgggcct

SEQ ID NO: 165123 - DNA, 17 bp, synthetic construct
  source 1..17: mol_type = other DNA
accgggagggccgggcc

SEQ ID NO: 165124 - DNA, 17 bp, synthetic construct
  source 1..17: mol_type = other DNA
gaccgggagggccgggc

SEQ ID NO: 165125 - DNA, 17 bp, synthetic construct
  source 1..17: mol_type = other DNA
agaccgggagggccggg

SEQ ID NO: 165126 - DNA, 17 bp, synthetic construct
  source 1..17: mol_type = other DNA
gagaccgggagggccgg

SEQ ID NO: 165127 - DNA, 17 bp, synthetic construct
  source 1..17: mol_type = other DNA
ggagaccgggagggccg

SEQ ID NO: 165128 - DNA, 17 bp, synthetic construct
  source 1..17: mol_type = other DNA
tggagaccgggagggcc

SEQ ID NO: 165129 - DNA, 17 bp, synthetic construct
  source 1..17: mol_type = other DNA
gtggagaccgggagggc

SEQ ID NO: 165130 - DNA, 17 bp, synthetic construct
  source 1..17: mol_type = other DNA
ggtggagaccgggaggg

SEQ ID NO: 165131 - DNA, 17 bp, synthetic construct
  source 1..17: mol_type = other DNA
cggtggagaccgggagg

SEQ ID NO: 165132 - DNA, 17 bp, synthetic construct
  source 1..17: mol_type = other DNA
acggtggagaccgggag

SEQ ID NO: 165133 - DNA, 17 bp, synthetic construct
  source 1..17: mol_type = other DNA
cacggtggagaccggga

SEQ ID NO: 165134 - DNA, 17 bp, synthetic construct
  source 1..17: mol_type = other DNA
acacggtggagaccggg

SEQ ID NO: 165135 - DNA, 17 bp, synthetic construct
  source 1..17: mol_type = other DNA
cacacggtggagaccgg

SEQ ID NO: 165136 - DNA, 17 bp, synthetic construct
  source 1..17: mol_type = other DNA
acacacggtggagaccg

SEQ ID NO: 165137 - DNA, 17 bp, synthetic construct
  source 1..17: mol_type = other DNA
cacacacggtggagacc

SEQ ID NO: 165138 - DNA, 17 bp, synthetic construct
  source 1..17: mol_type = other DNA
acacacacggtggagac

SEQ ID NO: 165139 - DNA, 17 bp, synthetic construct
  source 1..17: mol_type = other DNA
gacacacacggtggaga

SEQ ID NO: 165140 - DNA, 17 bp, synthetic construct
  source 1..17: mol_type = other DNA
ggacacacacggtggag

SEQ ID NO: 165141 - DNA, 17 bp, synthetic construct
  source 1..17: mol_type = other DNA
cggacacacacggtgga

SEQ ID NO: 165142 - DNA, 17 bp, synthetic construct
  source 1..17: mol_type = other DNA
gcggacacacacggtgg

SEQ ID NO: 165143 - DNA, 17 bp, synthetic construct
  source 1..17: mol_type = other DNA
cgcggacacacacggtg

SEQ ID NO: 165144 - DNA, 17 bp, synthetic construct
  source 1..17: mol_type = other DNA
tcgcggacacacacggt

SEQ ID NO: 165145 - DNA, 17 bp, synthetic construct
  source 1..17: mol_type = other DNA
ctcgcggacacacacgg

SEQ ID NO: 165146 - DNA, 17 bp, synthetic construct
  source 1..17: mol_type = other DNA
cctcgcggacacacacg

SEQ ID NO: 165147 - DNA, 17 bp, synthetic construct
  source 1..17: mol_type = other DNA
acctcgcggacacacac

SEQ ID NO: 165148 - DNA, 17 bp, synthetic construct
  source 1..17: mol_type = other DNA
gacctcgcggacacaca

SEQ ID NO: 165149 - DNA, 17 bp, synthetic construct
  source 1..17: mol_type = other DNA
agacctcgcggacacac

SEQ ID NO: 165150 - DNA, 17 bp, synthetic construct
  source 1..17: mol_type = other DNA
cagacctcgcggacaca

SEQ ID NO: 165151 - DNA, 17 bp, synthetic construct
  source 1..17: mol_type = other DNA
gcagacctcgcggacac

SEQ ID NO: 165152 - DNA, 17 bp, synthetic construct
  source 1..17: mol_type = other DNA
ggcagacctcgcggaca

SEQ ID NO: 165153 - DNA, 17 bp, synthetic construct
  source 1..17: mol_type = other DNA
cggcagacctcgcggac

SEQ ID NO: 165154 - DNA, 17 bp, synthetic construct
  source 1..17: mol_type = other DNA
gcggcagacctcgcgga

SEQ ID NO: 165155 - DNA, 17 bp, synthetic construct
  source 1..17: mol_type = other DNA
agcggcagacctcgcgg

SEQ ID NO: 165156 - DNA, 17 bp, synthetic construct
  source 1..17: mol_type = other DNA
cagcggcagacctcgcg

SEQ ID NO: 165157 - DNA, 17 bp, synthetic construct
  source 1..17: mol_type = other DNA
ccagcggcagacctcgc

SEQ ID NO: 165158 - DNA, 17 bp, synthetic construct
  source 1..17: mol_type = other DNA
accagcggcagacctcg

SEQ ID NO: 165159 - DNA, 17 bp, synthetic construct
  source 1..17: mol_type = other DNA
gaccagcggcagacctc

SEQ ID NO: 165160 - DNA, 17 bp, synthetic construct
  source 1..17: mol_type = other DNA
ggaccagcggcagacct

SEQ ID NO: 165161 - DNA, 17 bp, synthetic construct
  source 1..17: mol_type = other DNA
tggaccagcggcagacc

SEQ ID NO: 165162 - DNA, 17 bp, synthetic construct
  source 1..17: mol_type = other DNA
ctggaccagcggcagac

SEQ ID NO: 165163 - DNA, 17 bp, synthetic construct
  source 1..17: mol_type = other DNA
gctggaccagcggcaga

SEQ ID NO: 165164 - DNA, 17 bp, synthetic construct
  source 1..17: mol_type = other DNA
agctggaccagcggcag

SEQ ID NO: 165165 - DNA, 17 bp, synthetic construct
  source 1..17: mol_type = other DNA
cagctggaccagcggca

SEQ ID NO: 165166 - DNA, 17 bp, synthetic construct
  source 1..17: mol_type = other DNA
ccagctggaccagcggc

SEQ ID NO: 165167 - DNA, 17 bp, synthetic construct
  source 1..17: mol_type = other DNA
accagctggaccagcgg

SEQ ID NO: 165168 - DNA, 17 bp, synthetic construct
  source 1..17: mol_type = other DNA
taccagctggaccagcg

SEQ ID NO: 165169 - DNA, 17 bp, synthetic construct
  source 1..17: mol_type = other DNA
gtaccagctggaccagc

SEQ ID NO: 165170 - DNA, 17 bp, synthetic construct
  source 1..17: mol_type = other DNA
tgtaccagctggaccag

SEQ ID NO: 165171 - DNA, 17 bp, synthetic construct
  source 1..17: mol_type = other DNA
ttgtaccagctggacca

SEQ ID NO: 165172 - DNA, 17 bp, synthetic construct
  source 1..17: mol_type = other DNA
attgtaccagctggacc

SEQ ID NO: 165173 - DNA, 17 bp, synthetic construct
  source 1..17: mol_type = other DNA
cattgtaccagctggac

SEQ ID NO: 165174 - DNA, 17 bp, synthetic construct
  source 1..17: mol_type = other DNA
ccattgtaccagctgga

SEQ ID NO: 165175 - DNA, 17 bp, synthetic construct
  source 1..17: mol_type = other DNA
cccattgtaccagctgg

SEQ ID NO: 165176 - DNA, 17 bp, synthetic construct
  source 1..17: mol_type = other DNA
gcccattgtaccagctg

SEQ ID NO: 165177 - DNA, 17 bp, synthetic construct
  source 1..17: mol_type = other DNA
tgcccattgtaccagct

SEQ ID NO: 165178 - DNA, 17 bp, synthetic construct
  source 1..17: mol_type = other DNA
gtgcccattgtaccagc

SEQ ID NO: 165179 - DNA, 17 bp, synthetic construct
  source 1..17: mol_type = other DNA
ggtgcccattgtaccag

SEQ ID NO: 165180 - DNA, 17 bp, synthetic construct
  source 1..17: mol_type = other DNA
cggtgcccattgtacca

SEQ ID NO: 165181 - DNA, 17 bp, synthetic construct
  source 1..17: mol_type = other DNA
gcggtgcccattgtacc

SEQ ID NO: 165182 - DNA, 17 bp, synthetic construct
  source 1..17: mol_type = other DNA
ggcggtgcccattgtac

SEQ ID NO: 165183 - DNA, 17 bp, synthetic construct
  source 1..17: mol_type = other DNA
gggcggtgcccattgta

SEQ ID NO: 165184 - DNA, 17 bp, synthetic construct
  source 1..17: mol_type = other DNA
tgggcggtgcccattgt

SEQ ID NO: 165185 - DNA, 17 bp, synthetic construct
  source 1..17: mol_type = other DNA
ctgggcggtgcccattg

SEQ ID NO: 165186 - DNA, 17 bp, synthetic construct
  source 1..17: mol_type = other DNA
tctgggcggtgcccatt

SEQ ID NO: 165187 - DNA, 17 bp, synthetic construct
  source 1..17: mol_type = other DNA
ctctgggcggtgcccat

SEQ ID NO: 165188 - DNA, 17 bp, synthetic construct
  source 1..17: mol_type = other DNA
gctctgggcggtgccca

SEQ ID NO: 165189 - DNA, 17 bp, synthetic construct
  source 1..17: mol_type = other DNA
ggctctgggcggtgccc

SEQ ID NO: 165190 - DNA, 17 bp, synthetic construct
  source 1..17: mol_type = other DNA
gggctctgggcggtgcc

SEQ ID NO: 165191 - DNA, 17 bp, synthetic construct
  source 1..17: mol_type = other DNA
cgggctctgggcggtgc

SEQ ID NO: 165192 - DNA, 17 bp, synthetic construct
  source 1..17: mol_type = other DNA
ccgggctctgggcggtg

SEQ ID NO: 165193 - DNA, 17 bp, synthetic construct
  source 1..17: mol_type = other DNA
gccgggctctgggcggt

SEQ ID NO: 165194 - DNA, 17 bp, synthetic construct
  source 1..17: mol_type = other DNA
ggccgggctctgggcgg

SEQ ID NO: 165195 - DNA, 17 bp, synthetic construct
  source 1..17: mol_type = other DNA
aggccgggctctgggcg

SEQ ID NO: 165196 - DNA, 17 bp, synthetic construct
  source 1..17: mol_type = other DNA
caggccgggctctgggc

SEQ ID NO: 165197 - DNA, 17 bp, synthetic construct
  source 1..17: mol_type = other DNA
ccaggccgggctctggg

SEQ ID NO: 165198 - DNA, 17 bp, synthetic construct
  source 1..17: mol_type = other DNA
cccaggccgggctctgg

SEQ ID NO: 165199 - DNA, 17 bp, synthetic construct
  source 1..17: mol_type = other DNA
tcccaggccgggctctg

SEQ ID NO: 165200 - DNA, 17 bp, synthetic construct
  source 1..17: mol_type = other DNA
ctcccaggccgggctct

SEQ ID NO: 165201 - DNA, 17 bp, synthetic construct
  source 1..17: mol_type = other DNA
cctcccaggccgggctc

SEQ ID NO: 165202 - DNA, 17 bp, synthetic construct
  source 1..17: mol_type = other DNA
gcctcccaggccgggct

SEQ ID NO: 165203 - DNA, 17 bp, synthetic construct
  source 1..17: mol_type = other DNA
cgcctcccaggccgggc

SEQ ID NO: 165204 - DNA, 17 bp, synthetic construct
  source 1..17: mol_type = other DNA
ccgcctcccaggccggg

SEQ ID NO: 165205 - DNA, 17 bp, synthetic construct
  source 1..17: mol_type = other DNA
tccgcctcccaggccgg

SEQ ID NO: 165206 - DNA, 17 bp, synthetic construct
  source 1..17: mol_type = other DNA
ctccgcctcccaggccg

SEQ ID NO: 165207 - DNA, 17 bp, synthetic construct
  source 1..17: mol_type = other DNA
tctccgcctcccaggcc

SEQ ID NO: 165208 - DNA, 17 bp, synthetic construct
  source 1..17: mol_type = other DNA
gtctccgcctcccaggc

SEQ ID NO: 165209 - DNA, 17 bp, synthetic construct
  source 1..17: mol_type = other DNA
agtctccgcctcccagg

SEQ ID NO: 165210 - DNA, 17 bp, synthetic construct
  source 1..17: mol_type = other DNA
aagtctccgcctcccag

SEQ ID NO: 165211 - DNA, 17 bp, synthetic construct
  source 1..17: mol_type = other DNA
aaagtctccgcctccca

SEQ ID NO: 165212 - DNA, 17 bp, synthetic construct
  source 1..17: mol_type = other DNA
caaagtctccgcctccc

SEQ ID NO: 165213 - DNA, 17 bp, synthetic construct
  source 1..17: mol_type = other DNA
tcaaagtctccgcctcc

SEQ ID NO: 165214 - DNA, 17 bp, synthetic construct
  source 1..17: mol_type = other DNA
ctcaaagtctccgcctc

SEQ ID NO: 165215 - DNA, 17 bp, synthetic construct
  source 1..17: mol_type = other DNA
tctcaaagtctccgcct

SEQ ID NO: 165216 - DNA, 17 bp, synthetic construct
  source 1..17: mol_type = other DNA
gtctcaaagtctccgcc

SEQ ID NO: 165217 - DNA, 17 bp, synthetic construct
  source 1..17: mol_type = other DNA
cgtctcaaagtctccgc

SEQ ID NO: 165218 - DNA, 17 bp, synthetic construct
  source 1..17: mol_type = other DNA
acgtctcaaagtctccg

SEQ ID NO: 165219 - DNA, 17 bp, synthetic construct
  source 1..17: mol_type = other DNA
aacgtctcaaagtctcc

SEQ ID NO: 165220 - DNA, 17 bp, synthetic construct
  source 1..17: mol_type = other DNA
aaacgtctcaaagtctc

SEQ ID NO: 165221 - DNA, 17 bp, synthetic construct
  source 1..17: mol_type = other DNA
caaacgtctcaaagtct

SEQ ID NO: 165222 - DNA, 17 bp, synthetic construct
  source 1..17: mol_type = other DNA
tcaaacgtctcaaagtc

SEQ ID NO: 165223 - DNA, 17 bp, synthetic construct
  source 1..17: mol_type = other DNA
ttcaaacgtctcaaagt

SEQ ID NO: 165224 - DNA, 17 bp, synthetic construct
  source 1..17: mol_type = other DNA
tttcaaacgtctcaaag

SEQ ID NO: 165225 - DNA, 17 bp, synthetic construct
  source 1..17: mol_type = other DNA
ttttcaaacgtctcaaa

SEQ ID NO: 165226 - DNA, 17 bp, synthetic construct
  source 1..17: mol_type = other DNA
gttttcaaacgtctcaa

SEQ ID NO: 165227 - DNA, 17 bp, synthetic construct
  source 1..17: mol_type = other DNA
ggttttcaaacgtctca

SEQ ID NO: 165228 - DNA, 17 bp, synthetic construct
  source 1..17: mol_type = other DNA
aggttttcaaacgtctc

SEQ ID NO: 165229 - DNA, 17 bp, synthetic construct
  source 1..17: mol_type = other DNA
caggttttcaaacgtct

SEQ ID NO: 165230 - DNA, 17 bp, synthetic construct
  source 1..17: mol_type = other DNA
tcaggttttcaaacgtc

SEQ ID NO: 165231 - DNA, 17 bp, synthetic construct
  source 1..17: mol_type = other DNA
ctcaggttttcaaacgt

SEQ ID NO: 165232 - DNA, 17 bp, synthetic construct
  source 1..17: mol_type = other DNA
cctcaggttttcaaacg

SEQ ID NO: 165233 - DNA, 17 bp, synthetic construct
  source 1..17: mol_type = other DNA
gcctcaggttttcaaac

SEQ ID NO: 165234 - DNA, 17 bp, synthetic construct
  source 1..17: mol_type = other DNA
tgcctcaggttttcaaa

SEQ ID NO: 165235 - DNA, 17 bp, synthetic construct
  source 1..17: mol_type = other DNA
ctgcctcaggttttcaa

SEQ ID NO: 165236 - DNA, 17 bp, synthetic construct
  source 1..17: mol_type = other DNA
tctgcctcaggttttca

SEQ ID NO: 165237 - DNA, 17 bp, synthetic construct
  source 1..17: mol_type = other DNA
ctctgcctcaggttttc

SEQ ID NO: 165238 - DNA, 17 bp, synthetic construct
  source 1..17: mol_type = other DNA
tctctgcctcaggtttt

SEQ ID NO: 165239 - DNA, 17 bp, synthetic construct
  source 1..17: mol_type = other DNA
ctctctgcctcaggttt

SEQ ID NO: 165240 - DNA, 17 bp, synthetic construct
  source 1..17: mol_type = other DNA
cctctctgcctcaggtt

SEQ ID NO: 165241 - DNA, 17 bp, synthetic construct
  source 1..17: mol_type = other DNA
ccctctctgcctcaggt

SEQ ID NO: 165242 - DNA, 17 bp, synthetic construct
  source 1..17: mol_type = other DNA
accctctctgcctcagg

SEQ ID NO: 165243 - DNA, 17 bp, synthetic construct
  source 1..17: mol_type = other DNA
taccctctctgcctcag

SEQ ID NO: 165244 - DNA, 17 bp, synthetic construct
  source 1..17: mol_type = other DNA
gtaccctctctgcctca

SEQ ID NO: 165245 - DNA, 17 bp, synthetic construct
  source 1..17: mol_type = other DNA
ggtaccctctctgcctc

SEQ ID NO: 165246 - DNA, 17 bp, synthetic construct
  source 1..17: mol_type = other DNA
tggtaccctctctgcct

SEQ ID NO: 165247 - DNA, 17 bp, synthetic construct
  source 1..17: mol_type = other DNA
ctggtaccctctctgcc

SEQ ID NO: 165248 - DNA, 17 bp, synthetic construct
  source 1..17: mol_type = other DNA
cctggtaccctctctgc

SEQ ID NO: 165249 - DNA, 17 bp, synthetic construct
  source 1..17: mol_type = other DNA
acctggtaccctctctg

SEQ ID NO: 165250 - DNA, 17 bp, synthetic construct
  source 1..17: mol_type = other DNA
tacctggtaccctctct

SEQ ID NO: 165251 - DNA, 17 bp, synthetic construct
  source 1..17: mol_type = other DNA
atacctggtaccctctc

SEQ ID NO: 165252 - DNA, 17 bp, synthetic construct
  source 1..17: mol_type = other DNA
catacctggtaccctct

SEQ ID NO: 165253 - DNA, 17 bp, synthetic construct
  source 1..17: mol_type = other DNA
gcatacctggtaccctc

SEQ ID NO: 165254 - DNA, 17 bp, synthetic construct
  source 1..17: mol_type = other DNA
ggcatacctggtaccct

SEQ ID NO: 165255 - DNA, 17 bp, synthetic construct
  source 1..17: mol_type = other DNA
gggcatacctggtaccc

SEQ ID NO: 165256 - DNA, 17 bp, synthetic construct
  source 1..17: mol_type = other DNA
agggcatacctggtacc

SEQ ID NO: 165257 - DNA, 17 bp, synthetic construct
  source 1..17: mol_type = other DNA
cagggcatacctggtac

SEQ ID NO: 165258 - DNA, 17 bp, synthetic construct
  source 1..17: mol_type = other DNA
acagggcatacctggta

SEQ ID NO: 165259 - DNA, 17 bp, synthetic construct
  source 1..17: mol_type = other DNA
cacagggcatacctggt

SEQ ID NO: 165260 - DNA, 17 bp, synthetic construct
  source 1..17: mol_type = other DNA
gcacagggcatacctgg

SEQ ID NO: 165261 - DNA, 17 bp, synthetic construct
  source 1..17: mol_type = other DNA
agcacagggcatacctg

SEQ ID NO: 165262 - DNA, 17 bp, synthetic construct
  source 1..17: mol_type = other DNA
cagcacagggcatacct

SEQ ID NO: 165263 - DNA, 17 bp, synthetic construct
  source 1..17: mol_type = other DNA
ccagcacagggcatacc

SEQ ID NO: 165264 - DNA, 17 bp, synthetic construct
  source 1..17: mol_type = other DNA
gccagcacagggcatac

SEQ ID NO: 165265 - DNA, 17 bp, synthetic construct
  source 1..17: mol_type = other DNA
agccagcacagggcata

SEQ ID NO: 165266 - DNA, 17 bp, synthetic construct
  source 1..17: mol_type = other DNA
cagccagcacagggcat

SEQ ID NO: 165267 - DNA, 17 bp, synthetic construct
  source 1..17: mol_type = other DNA
tcagccagcacagggca

SEQ ID NO: 165268 - DNA, 17 bp, synthetic construct
  source 1..17: mol_type = other DNA
gtcagccagcacagggc

SEQ ID NO: 165269 - DNA, 17 bp, synthetic construct
  source 1..17: mol_type = other DNA
tgtcagccagcacaggg

SEQ ID NO: 165270 - DNA, 17 bp, synthetic construct
  source 1..17: mol_type = other DNA
atgtcagccagcacagg

SEQ ID NO: 165271 - DNA, 17 bp, synthetic construct
  source 1..17: mol_type = other DNA
gatgtcagccagcacag

SEQ ID NO: 165272 - DNA, 17 bp, synthetic construct
  source 1..17: mol_type = other DNA
cgatgtcagccagcaca

SEQ ID NO: 165273 - DNA, 17 bp, synthetic construct
  source 1..17: mol_type = other DNA
tcgatgtcagccagcac

SEQ ID NO: 165274 - DNA, 17 bp, synthetic construct
  source 1..17: mol_type = other DNA
ctcgatgtcagccagca

SEQ ID NO: 165275 - DNA, 17 bp, synthetic construct
  source 1..17: mol_type = other DNA
actcgatgtcagccagc

SEQ ID NO: 165276 - DNA, 17 bp, synthetic construct
  source 1..17: mol_type = other DNA
cactcgatgtcagccag

SEQ ID NO: 165277 - DNA, 17 bp, synthetic construct
  source 1..17: mol_type = other DNA
gcactcgatgtcagcca

SEQ ID NO: 165278 - DNA, 17 bp, synthetic construct
  source 1..17: mol_type = other DNA
ggcactcgatgtcagcc

SEQ ID NO: 165279 - DNA, 17 bp, synthetic construct
  source 1..17: mol_type = other DNA
cggcactcgatgtcagc

SEQ ID NO: 165280 - DNA, 17 bp, synthetic construct
  source 1..17: mol_type = other DNA
ccggcactcgatgtcag

SEQ ID NO: 165281 - DNA, 17 bp, synthetic construct
  source 1..17: mol_type = other DNA
cccggcactcgatgtca

SEQ ID NO: 165282 - DNA, 17 bp, synthetic construct
  source 1..17: mol_type = other DNA
gcccggcactcgatgtc

SEQ ID NO: 165283 - DNA, 17 bp, synthetic construct
  source 1..17: mol_type = other DNA
cgcccggcactcgatgt

SEQ ID NO: 165284 - DNA, 17 bp, synthetic construct
  source 1..17: mol_type = other DNA
ccgcccggcactcgatg

SEQ ID NO: 165285 - DNA, 17 bp, synthetic construct
  source 1..17: mol_type = other DNA
gccgcccggcactcgat

SEQ ID NO: 165286 - DNA, 17 bp, synthetic construct
  source 1..17: mol_type = other DNA
cgccgcccggcactcga

SEQ ID NO: 165287 - DNA, 17 bp, synthetic construct
  source 1..17: mol_type = other DNA
gcgccgcccggcactcg

SEQ ID NO: 165288 - DNA, 17 bp, synthetic construct
  source 1..17: mol_type = other DNA
tgcgccgcccggcactc

SEQ ID NO: 165289 - DNA, 17 bp, synthetic construct
  source 1..17: mol_type = other DNA
ctgcgccgcccggcact

SEQ ID NO: 165290 - DNA, 17 bp, synthetic construct
  source 1..17: mol_type = other DNA
gctgcgccgcccggcac

SEQ ID NO: 165291 - DNA, 17 bp, synthetic construct
  source 1..17: mol_type = other DNA
agctgcgccgcccggca

SEQ ID NO: 165292 - DNA, 17 bp, synthetic construct
  source 1..17: mol_type = other DNA
aagctgcgccgcccggc

SEQ ID NO: 165293 - DNA, 17 bp, synthetic construct
  source 1..17: mol_type = other DNA
gaagctgcgccgcccgg

SEQ ID NO: 165294 - DNA, 17 bp, synthetic construct
  source 1..17: mol_type = other DNA
ggaagctgcgccgcccg

SEQ ID NO: 165295 - DNA, 17 bp, synthetic construct
  source 1..17: mol_type = other DNA
gggaagctgcgccgccc

SEQ ID NO: 165296 - DNA, 17 bp, synthetic construct
  source 1..17: mol_type = other DNA
cgggaagctgcgccgcc

SEQ ID NO: 165297 - DNA, 17 bp, synthetic construct
  source 1..17: mol_type = other DNA
tcgggaagctgcgccgc

SEQ ID NO: 165298 - DNA, 17 bp, synthetic construct
  source 1..17: mol_type = other DNA
gtcgggaagctgcgccg

SEQ ID NO: 165299 - DNA, 17 bp, synthetic construct
  source 1..17: mol_type = other DNA
tgtcgggaagctgcgcc

SEQ ID NO: 165300 - DNA, 17 bp, synthetic construct
  source 1..17: mol_type = other DNA
atgtcgggaagctgcgc

SEQ ID NO: 165301 - DNA, 17 bp, synthetic construct
  source 1..17: mol_type = other DNA
catgtcgggaagctgcg

SEQ ID NO: 165302 - DNA, 17 bp, synthetic construct
  source 1..17: mol_type = other DNA
gcatgtcgggaagctgc

SEQ ID NO: 165303 - DNA, 17 bp, synthetic construct
  source 1..17: mol_type = other DNA
ggcatgtcgggaagctg

SEQ ID NO: 165304 - DNA, 17 bp, synthetic construct
  source 1..17: mol_type = other DNA
cggcatgtcgggaagct

SEQ ID NO: 165305 - DNA, 17 bp, synthetic construct
  source 1..17: mol_type = other DNA
gcggcatgtcgggaagc

SEQ ID NO: 165306 - DNA, 17 bp, synthetic construct
  source 1..17: mol_type = other DNA
agcggcatgtcgggaag

SEQ ID NO: 165307 - DNA, 17 bp, synthetic construct
  source 1..17: mol_type = other DNA
cagcggcatgtcgggaa

SEQ ID NO: 165308 - DNA, 17 bp, synthetic construct
  source 1..17: mol_type = other DNA
ccagcggcatgtcggga

SEQ ID NO: 165309 - DNA, 17 bp, synthetic construct
  source 1..17: mol_type = other DNA
tccagcggcatgtcggg

SEQ ID NO: 165310 - DNA, 17 bp, synthetic construct
  source 1..17: mol_type = other DNA
ctccagcggcatgtcgg

SEQ ID NO: 165311 - DNA, 17 bp, synthetic construct
  source 1..17: mol_type = other DNA
cctccagcggcatgtcg

SEQ ID NO: 165312 - DNA, 17 bp, synthetic construct
  source 1..17: mol_type = other DNA
tcctccagcggcatgtc

SEQ ID NO: 165313 - DNA, 17 bp, synthetic construct
  source 1..17: mol_type = other DNA
ctcctccagcggcatgt

SEQ ID NO: 165314 - DNA, 17 bp, synthetic construct
  source 1..17: mol_type = other DNA
gctcctccagcggcatg

SEQ ID NO: 165315 - DNA, 17 bp, synthetic construct
  source 1..17: mol_type = other DNA
agctcctccagcggcat

SEQ ID NO: 165316 - DNA, 17 bp, synthetic construct
  source 1..17: mol_type = other DNA
cagctcctccagcggca

SEQ ID NO: 165317 - DNA, 17 bp, synthetic construct
  source 1..17: mol_type = other DNA
ccagctcctccagcggc

SEQ ID NO: 165318 - DNA, 17 bp, synthetic construct
  source 1..17: mol_type = other DNA
cccagctcctccagcgg

SEQ ID NO: 165319 - DNA, 17 bp, synthetic construct
  source 1..17: mol_type = other DNA
gcccagctcctccagcg

SEQ ID NO: 165320 - DNA, 17 bp, synthetic construct
  source 1..17: mol_type = other DNA
ggcccagctcctccagc

SEQ ID NO: 165321 - DNA, 17 bp, synthetic construct
  source 1..17: mol_type = other DNA
tggcccagctcctccag

SEQ ID NO: 165322 - DNA, 17 bp, synthetic construct
  source 1..17: mol_type = other DNA
ctggcccagctcctcca

SEQ ID NO: 165323 - DNA, 17 bp, synthetic construct
  source 1..17: mol_type = other DNA
gctggcccagctcctcc

SEQ ID NO: 165324 - DNA, 17 bp, synthetic construct
  source 1..17: mol_type = other DNA
tgctggcccagctcctc

SEQ ID NO: 165325 - DNA, 17 bp, synthetic construct
  source 1..17: mol_type = other DNA
ctgctggcccagctcct

SEQ ID NO: 165326 - DNA, 17 bp, synthetic construct
  source 1..17: mol_type = other DNA
cctgctggcccagctcc

SEQ ID NO: 165327 - DNA, 17 bp, synthetic construct
  source 1..17: mol_type = other DNA
acctgctggcccagctc

SEQ ID NO: 165328 - DNA, 17 bp, synthetic construct
  source 1..17: mol_type = other DNA
cacctgctggcccagct

SEQ ID NO: 165329 - DNA, 17 bp, synthetic construct
  source 1..17: mol_type = other DNA
ccacctgctggcccagc

SEQ ID NO: 165330 - DNA, 17 bp, synthetic construct
  source 1..17: mol_type = other DNA
tccacctgctggcccag

SEQ ID NO: 165331 - DNA, 17 bp, synthetic construct
  source 1..17: mol_type = other DNA
gtccacctgctggccca

SEQ ID NO: 165332 - DNA, 17 bp, synthetic construct
  source 1..17: mol_type = other DNA
agtccacctgctggccc

SEQ ID NO: 165333 - DNA, 17 bp, synthetic construct
  source 1..17: mol_type = other DNA
cagtccacctgctggcc

SEQ ID NO: 165334 - DNA, 17 bp, synthetic construct
  source 1..17: mol_type = other DNA
acagtccacctgctggc

SEQ ID NO: 165335 - DNA, 17 bp, synthetic construct
  source 1..17: mol_type = other DNA
cacagtccacctgctgg

SEQ ID NO: 165336 - DNA, 17 bp, synthetic construct
  source 1..17: mol_type = other DNA
tcacagtccacctgctg

SEQ ID NO: 165337 - DNA, 17 bp, synthetic construct
  source 1..17: mol_type = other DNA
gtcacagtccacctgct

SEQ ID NO: 165338 - DNA, 17 bp, synthetic construct
  source 1..17: mol_type = other DNA
ggtcacagtccacctgc

SEQ ID NO: 165339 - DNA, 17 bp, synthetic construct
  source 1..17: mol_type = other DNA
cggtcacagtccacctg

SEQ ID NO: 165340 - DNA, 17 bp, synthetic construct
  source 1..17: mol_type = other DNA
gcggtcacagtccacct

SEQ ID NO: 165341 - DNA, 17 bp, synthetic construct
  source 1..17: mol_type = other DNA
tgcggtcacagtccacc

SEQ ID NO: 165342 - DNA, 17 bp, synthetic construct
  source 1..17: mol_type = other DNA
atgcggtcacagtccac

SEQ ID NO: 165343 - DNA, 17 bp, synthetic construct
  source 1..17: mol_type = other DNA
catgcggtcacagtcca

SEQ ID NO: 165344 - DNA, 17 bp, synthetic construct
  source 1..17: mol_type = other DNA
gcatgcggtcacagtcc

SEQ ID NO: 165345 - DNA, 17 bp, synthetic construct
  source 1..17: mol_type = other DNA
cgcatgcggtcacagtc

SEQ ID NO: 165346 - DNA, 17 bp, synthetic construct
  source 1..17: mol_type = other DNA
ccgcatgcggtcacagt

SEQ ID NO: 165347 - DNA, 17 bp, synthetic construct
  source 1..17: mol_type = other DNA
cccgcatgcggtcacag

SEQ ID NO: 165348 - DNA, 17 bp, synthetic construct
  source 1..17: mol_type = other DNA
ccccgcatgcggtcaca

SEQ ID NO: 165349 - DNA, 17 bp, synthetic construct
  source 1..17: mol_type = other DNA
cccccgcatgcggtcac

SEQ ID NO: 165350 - DNA, 17 bp, synthetic construct
  source 1..17: mol_type = other DNA
gcccccgcatgcggtca

SEQ ID NO: 165351 - DNA, 17 bp, synthetic construct
  source 1..17: mol_type = other DNA
agcccccgcatgcggtc

SEQ ID NO: 165352 - DNA, 17 bp, synthetic construct
  source 1..17: mol_type = other DNA
cagcccccgcatgcggt

SEQ ID NO: 165353 - DNA, 17 bp, synthetic construct
  source 1..17: mol_type = other DNA
tcagcccccgcatgcgg

SEQ ID NO: 165354 - DNA, 17 bp, synthetic construct
  source 1..17: mol_type = other DNA
atcagcccccgcatgcg

SEQ ID NO: 165355 - DNA, 17 bp, synthetic construct
  source 1..17: mol_type = other DNA
catcagcccccgcatgc

SEQ ID NO: 165356 - DNA, 17 bp, synthetic construct
  source 1..17: mol_type = other DNA
acatcagcccccgcatg

SEQ ID NO: 165357 - DNA, 17 bp, synthetic construct
  source 1..17: mol_type = other DNA
cacatcagcccccgcat

SEQ ID NO: 165358 - DNA, 17 bp, synthetic construct
  source 1..17: mol_type = other DNA
gcacatcagcccccgca

SEQ ID NO: 165359 - DNA, 17 bp, synthetic construct
  source 1..17: mol_type = other DNA
cgcacatcagcccccgc

SEQ ID NO: 165360 - DNA, 17 bp, synthetic construct
  source 1..17: mol_type = other DNA
gcgcacatcagcccccg

SEQ ID NO: 165361 - DNA, 17 bp, synthetic construct
  source 1..17: mol_type = other DNA
ggcgcacatcagccccc

SEQ ID NO: 165362 - DNA, 17 bp, synthetic construct
  source 1..17: mol_type = other DNA
tggcgcacatcagcccc

SEQ ID NO: 165363 - DNA, 17 bp, synthetic construct
  source 1..17: mol_type = other DNA
ttggcgcacatcagccc

SEQ ID NO: 165364 - DNA, 17 bp, synthetic construct
  source 1..17: mol_type = other DNA
gttggcgcacatcagcc

SEQ ID NO: 165365 - DNA, 17 bp, synthetic construct
  source 1..17: mol_type = other DNA
tgttggcgcacatcagc

SEQ ID NO: 165366 - DNA, 17 bp, synthetic construct
  source 1..17: mol_type = other DNA
ctgttggcgcacatcag

SEQ ID NO: 165367 - DNA, 17 bp, synthetic construct
  source 1..17: mol_type = other DNA
gctgttggcgcacatca

SEQ ID NO: 165368 - DNA, 17 bp, synthetic construct
  source 1..17: mol_type = other DNA
ggctgttggcgcacatc

SEQ ID NO: 165369 - DNA, 17 bp, synthetic construct
  source 1..17: mol_type = other DNA
tggctgttggcgcacat

SEQ ID NO: 165370 - DNA, 17 bp, synthetic construct
  source 1..17: mol_type = other DNA
ttggctgttggcgcaca

SEQ ID NO: 165371 - DNA, 17 bp, synthetic construct
  source 1..17: mol_type = other DNA
gttggctgttggcgcac

SEQ ID NO: 165372 - DNA, 17 bp, synthetic construct
  source 1..17: mol_type = other DNA
tgttggctgttggcgca

SEQ ID NO: 165373 - DNA, 17 bp, synthetic construct
  source 1..17: mol_type = other DNA
ctgttggctgttggcgc

SEQ ID NO: 165374 - DNA, 17 bp, synthetic construct
  source 1..17: mol_type = other DNA
tctgttggctgttggcg

SEQ ID NO: 165375 - DNA, 17 bp, synthetic construct
  source 1..17: mol_type = other DNA
ctctgttggctgttggc

SEQ ID NO: 165376 - DNA, 17 bp, synthetic construct
  source 1..17: mol_type = other DNA
actctgttggctgttgg

SEQ ID NO: 165377 - DNA, 17 bp, synthetic construct
  source 1..17: mol_type = other DNA
gactctgttggctgttg

SEQ ID NO: 165378 - DNA, 17 bp, synthetic construct
  source 1..17: mol_type = other DNA
ggactctgttggctgtt

SEQ ID NO: 165379 - DNA, 17 bp, synthetic construct
  source 1..17: mol_type = other DNA
gggactctgttggctgt

SEQ ID NO: 165380 - DNA, 17 bp, synthetic construct
  source 1..17: mol_type = other DNA
ggggactctgttggctg

SEQ ID NO: 165381 - DNA, 17 bp, synthetic construct
  source 1..17: mol_type = other DNA
gggggactctgttggct

SEQ ID NO: 165382 - DNA, 17 bp, synthetic construct
  source 1..17: mol_type = other DNA
cgggggactctgttggc

SEQ ID NO: 165383 - DNA, 17 bp, synthetic construct
  source 1..17: mol_type = other DNA
gcgggggactctgttgg

SEQ ID NO: 165384 - DNA, 17 bp, synthetic construct
  source 1..17: mol_type = other DNA
agcgggggactctgttg

SEQ ID NO: 165385 - DNA, 17 bp, synthetic construct
  source 1..17: mol_type = other DNA
gagcgggggactctgtt

SEQ ID NO: 165386 - DNA, 17 bp, synthetic construct
  source 1..17: mol_type = other DNA
agagcgggggactctgt

SEQ ID NO: 165387 - DNA, 17 bp, synthetic construct
  source 1..17: mol_type = other DNA
cagagcgggggactctg

SEQ ID NO: 165388 - DNA, 17 bp, synthetic construct
  source 1..17: mol_type = other DNA
acagagcgggggactct

SEQ ID NO: 165389 - DNA, 17 bp, synthetic construct
  source 1..17: mol_type = other DNA
gacagagcgggggactc

SEQ ID NO: 165390 - DNA, 17 bp, synthetic construct
  source 1..17: mol_type = other DNA
tgacagagcgggggact

SEQ ID NO: 165391 - DNA, 17 bp, synthetic construct
  source 1..17: mol_type = other DNA
gtgacagagcgggggac

SEQ ID NO: 165392 - DNA, 17 bp, synthetic construct
  source 1..17: mol_type = other DNA
cgtgacagagcggggga

SEQ ID NO: 165393 - DNA, 17 bp, synthetic construct
  source 1..17: mol_type = other DNA
tcgtgacagagcggggg

SEQ ID NO: 165394 - DNA, 17 bp, synthetic construct
  source 1..17: mol_type = other DNA
gtcgtgacagagcgggg

SEQ ID NO: 165395 - DNA, 17 bp, synthetic construct
  source 1..17: mol_type = other DNA
agtcgtgacagagcggg

SEQ ID NO: 165396 - DNA, 17 bp, synthetic construct
  source 1..17: mol_type = other DNA
tagtcgtgacagagcgg

SEQ ID NO: 165397 - DNA, 17 bp, synthetic construct
  source 1..17: mol_type = other DNA
gtagtcgtgacagagcg

SEQ ID NO: 165398 - DNA, 17 bp, synthetic construct
  source 1..17: mol_type = other DNA
cgtagtcgtgacagagc

SEQ ID NO: 165399 - DNA, 17 bp, synthetic construct
  source 1..17: mol_type = other DNA
tcgtagtcgtgacagag

SEQ ID NO: 165400 - DNA, 17 bp, synthetic construct
  source 1..17: mol_type = other DNA
ctcgtagtcgtgacaga

SEQ ID NO: 165401 - DNA, 17 bp, synthetic construct
  source 1..17: mol_type = other DNA
gctcgtagtcgtgacag

SEQ ID NO: 165402 - DNA, 17 bp, synthetic construct
  source 1..17: mol_type = other DNA
agctcgtagtcgtgaca

SEQ ID NO: 165403 - DNA, 17 bp, synthetic construct
  source 1..17: mol_type = other DNA
cagctcgtagtcgtgac

SEQ ID NO: 165404 - DNA, 17 bp, synthetic construct
  source 1..17: mol_type = other DNA
gcagctcgtagtcgtga

SEQ ID NO: 165405 - DNA, 17 bp, synthetic construct
  source 1..17: mol_type = other DNA
cgcagctcgtagtcgtg

SEQ ID NO: 165406 - DNA, 17 bp, synthetic construct
  source 1..17: mol_type = other DNA
ccgcagctcgtagtcgt

SEQ ID NO: 165407 - DNA, 17 bp, synthetic construct
  source 1..17: mol_type = other DNA
cccgcagctcgtagtcg

SEQ ID NO: 165408 - DNA, 17 bp, synthetic construct
  source 1..17: mol_type = other DNA
acccgcagctcgtagtc

SEQ ID NO: 165409 - DNA, 17 bp, synthetic construct
  source 1..17: mol_type = other DNA
aacccgcagctcgtagt

SEQ ID NO: 165410 - DNA, 17 bp, synthetic construct
  source 1..17: mol_type = other DNA
gaacccgcagctcgtag

SEQ ID NO: 165411 - DNA, 17 bp, synthetic construct
  source 1..17: mol_type = other DNA
agaacccgcagctcgta

SEQ ID NO: 165412 - DNA, 17 bp, synthetic construct
  source 1..17: mol_type = other DNA
gagaacccgcagctcgt

SEQ ID NO: 165413 - DNA, 17 bp, synthetic construct
  source 1..17: mol_type = other DNA
agagaacccgcagctcg

SEQ ID NO: 165414 - DNA, 17 bp, synthetic construct
  source 1..17: mol_type = other DNA
cagagaacccgcagctc

SEQ ID NO: 165415 - DNA, 17 bp, synthetic construct
  source 1..17: mol_type = other DNA
gcagagaacccgcagct

SEQ ID NO: 165416 - DNA, 17 bp, synthetic construct
  source 1..17: mol_type = other DNA
agcagagaacccgcagc

SEQ ID NO: 165417 - DNA, 17 bp, synthetic construct
  source 1..17: mol_type = other DNA
cagcagagaacccgcag

SEQ ID NO: 165418 - DNA, 17 bp, synthetic construct
  source 1..17: mol_type = other DNA
gcagcagagaacccgca

SEQ ID NO: 165419 - DNA, 17 bp, synthetic construct
  source 1..17: mol_type = other DNA
cgcagcagagaacccgc

SEQ ID NO: 165420 - DNA, 17 bp, synthetic construct
  source 1..17: mol_type = other DNA
tcgcagcagagaacccg

SEQ ID NO: 165421 - DNA, 17 bp, synthetic construct
  source 1..17: mol_type = other DNA
ttcgcagcagagaaccc

SEQ ID NO: 165422 - DNA, 17 bp, synthetic construct
  source 1..17: mol_type = other DNA
attcgcagcagagaacc

SEQ ID NO: 165423 - DNA, 17 bp, synthetic construct
  source 1..17: mol_type = other DNA
tattcgcagcagagaac

SEQ ID NO: 165424 - DNA, 17 bp, synthetic construct
  source 1..17: mol_type = other DNA
gtattcgcagcagagaa

SEQ ID NO: 165425 - DNA, 17 bp, synthetic construct
  source 1..17: mol_type = other DNA
cgtattcgcagcagaga

SEQ ID NO: 165426 - DNA, 17 bp, synthetic construct
  source 1..17: mol_type = other DNA
acgtattcgcagcagag

SEQ ID NO: 165427 - DNA, 17 bp, synthetic construct
  source 1..17: mol_type = other DNA
cacgtattcgcagcaga

SEQ ID NO: 165428 - DNA, 17 bp, synthetic construct
  source 1..17: mol_type = other DNA
gcacgtattcgcagcag

SEQ ID NO: 165429 - DNA, 17 bp, synthetic construct
  source 1..17: mol_type = other DNA
ggcacgtattcgcagca

SEQ ID NO: 165430 - DNA, 17 bp, synthetic construct
  source 1..17: mol_type = other DNA
gggcacgtattcgcagc

SEQ ID NO: 165431 - DNA, 17 bp, synthetic construct
  source 1..17: mol_type = other DNA
agggcacgtattcgcag

SEQ ID NO: 165432 - DNA, 17 bp, synthetic construct
  source 1..17: mol_type = other DNA
cagggcacgtattcgca

SEQ ID NO: 165433 - DNA, 17 bp, synthetic construct
  source 1..17: mol_type = other DNA
acagggcacgtattcgc

SEQ ID NO: 165434 - DNA, 17 bp, synthetic construct
  source 1..17: mol_type = other DNA
cacagggcacgtattcg

SEQ ID NO: 165435 - DNA, 17 bp, synthetic construct
  source 1..17: mol_type = other DNA
ccacagggcacgtattc

SEQ ID NO: 165436 - DNA, 17 bp, synthetic construct
  source 1..17: mol_type = other DNA
gccacagggcacgtatt

SEQ ID NO: 165437 - DNA, 17 bp, synthetic construct
  source 1..17: mol_type = other DNA
ggccacagggcacgtat

SEQ ID NO: 165438 - DNA, 17 bp, synthetic construct
  source 1..17: mol_type = other DNA
gggccacagggcacgta

SEQ ID NO: 165439 - DNA, 17 bp, synthetic construct
  source 1..17: mol_type = other DNA
ggggccacagggcacgt

SEQ ID NO: 165440 - DNA, 17 bp, synthetic construct
  source 1..17: mol_type = other DNA
aggggccacagggcacg

SEQ ID NO: 165441 - DNA, 17 bp, synthetic construct
  source 1..17: mol_type = other DNA
gaggggccacagggcac

SEQ ID NO: 165442 - DNA, 17 bp, synthetic construct
  source 1..17: mol_type = other DNA
ggaggggccacagggca

SEQ ID NO: 165443 - DNA, 17 bp, synthetic construct
  source 1..17: mol_type = other DNA
gggaggggccacagggc

SEQ ID NO: 165444 - DNA, 17 bp, synthetic construct
  source 1..17: mol_type = other DNA
ggggaggggccacaggg

SEQ ID NO: 165445 - DNA, 17 bp, synthetic construct
  source 1..17: mol_type = other DNA
cggggaggggccacagg

SEQ ID NO: 165446 - DNA, 17 bp, synthetic construct
  source 1..17: mol_type = other DNA
ccggggaggggccacag

SEQ ID NO: 165447 - DNA, 17 bp, synthetic construct
  source 1..17: mol_type = other DNA
gccggggaggggccaca

SEQ ID NO: 165448 - DNA, 17 bp, synthetic construct
  source 1..17: mol_type = other DNA
ggccggggaggggccac

SEQ ID NO: 165449 - DNA, 17 bp, synthetic construct
  source 1..17: mol_type = other DNA
gggccggggaggggcca

SEQ ID NO: 165450 - DNA, 17 bp, synthetic construct
  source 1..17: mol_type = other DNA
ggggccggggaggggcc

SEQ ID NO: 165451 - DNA, 17 bp, synthetic construct
  source 1..17: mol_type = other DNA
tggggccggggaggggc

SEQ ID NO: 165452 - DNA, 17 bp, synthetic construct
  source 1..17: mol_type = other DNA
ctggggccggggagggg

SEQ ID NO: 165453 - DNA, 17 bp, synthetic construct
  source 1..17: mol_type = other DNA
cctggggccggggaggg

SEQ ID NO: 165454 - DNA, 17 bp, synthetic construct
  source 1..17: mol_type = other DNA
gcctggggccggggagg

SEQ ID NO: 165455 - DNA, 17 bp, synthetic construct
  source 1..17: mol_type = other DNA
tgcctggggccggggag

SEQ ID NO: 165456 - DNA, 17 bp, synthetic construct
  source 1..17: mol_type = other DNA
gtgcctggggccgggga

SEQ ID NO: 165457 - DNA, 17 bp, synthetic construct
  source 1..17: mol_type = other DNA
ggtgcctggggccgggg

SEQ ID NO: 165458 - DNA, 17 bp, synthetic construct
  source 1..17: mol_type = other DNA
tggtgcctggggccggg

SEQ ID NO: 165459 - DNA, 17 bp, synthetic construct
  source 1..17: mol_type = other DNA
ctggtgcctggggccgg

SEQ ID NO: 165460 - DNA, 17 bp, synthetic construct
  source 1..17: mol_type = other DNA
gctggtgcctggggccg

SEQ ID NO: 165461 - DNA, 17 bp, synthetic construct
  source 1..17: mol_type = other DNA
ggctggtgcctggggcc

SEQ ID NO: 165462 - DNA, 17 bp, synthetic construct
  source 1..17: mol_type = other DNA
gggctggtgcctggggc

SEQ ID NO: 165463 - DNA, 17 bp, synthetic construct
  source 1..17: mol_type = other DNA
agggctggtgcctgggg

SEQ ID NO: 165464 - DNA, 17 bp, synthetic construct
  source 1..17: mol_type = other DNA
gagggctggtgcctggg

SEQ ID NO: 165465 - DNA, 17 bp, synthetic construct
  source 1..17: mol_type = other DNA
tgagggctggtgcctgg

SEQ ID NO: 165466 - DNA, 17 bp, synthetic construct
  source 1..17: mol_type = other DNA
ctgagggctggtgcctg

SEQ ID NO: 165467 - DNA, 17 bp, synthetic construct
  source 1..17: mol_type = other DNA
gctgagggctggtgcct

SEQ ID NO: 165468 - DNA, 17 bp, synthetic construct
  source 1..17: mol_type = other DNA
ggctgagggctggtgcc

SEQ ID NO: 165469 - DNA, 17 bp, synthetic construct
  source 1..17: mol_type = other DNA
gggctgagggctggtgc

SEQ ID NO: 165470 - DNA, 17 bp, synthetic construct
  source 1..17: mol_type = other DNA
agggctgagggctggtg

SEQ ID NO: 165471 - DNA, 17 bp, synthetic construct
  source 1..17: mol_type = other DNA
gagggctgagggctggt

SEQ ID NO: 165472 - DNA, 17 bp, synthetic construct
  source 1..17: mol_type = other DNA
ggagggctgagggctgg

SEQ ID NO: 165473 - DNA, 17 bp, synthetic construct
  source 1..17: mol_type = other DNA
gggagggctgagggctg

SEQ ID NO: 165474 - DNA, 17 bp, synthetic construct
  source 1..17: mol_type = other DNA
agggagggctgagggct

SEQ ID NO: 165475 - DNA, 17 bp, synthetic construct
  source 1..17: mol_type = other DNA
gagggagggctgagggc

SEQ ID NO: 165476 - DNA, 17 bp, synthetic construct
  source 1..17: mol_type = other DNA
tgagggagggctgaggg

SEQ ID NO: 165477 - DNA, 17 bp, synthetic construct
  source 1..17: mol_type = other DNA
ctgagggagggctgagg

SEQ ID NO: 165478 - DNA, 17 bp, synthetic construct
  source 1..17: mol_type = other DNA
actgagggagggctgag

SEQ ID NO: 165479 - DNA, 17 bp, synthetic construct
  source 1..17: mol_type = other DNA
cactgagggagggctga

SEQ ID NO: 165480 - DNA, 17 bp, synthetic construct
  source 1..17: mol_type = other DNA
gcactgagggagggctg

SEQ ID NO: 165481 - DNA, 17 bp, synthetic construct
  source 1..17: mol_type = other DNA
ggcactgagggagggct

SEQ ID NO: 165482 - DNA, 17 bp, synthetic construct
  source 1..17: mol_type = other DNA
tggcactgagggagggc

SEQ ID NO: 165483 - DNA, 17 bp, synthetic construct
  source 1..17: mol_type = other DNA
ctggcactgagggaggg

SEQ ID NO: 165484 - DNA, 17 bp, synthetic construct
  source 1..17: mol_type = other DNA
gctggcactgagggagg

SEQ ID NO: 165485 - DNA, 17 bp, synthetic construct
  source 1..17: mol_type = other DNA
tgctggcactgagggag

SEQ ID NO: 165486 - DNA, 17 bp, synthetic construct
  source 1..17: mol_type = other DNA
gtgctggcactgaggga

SEQ ID NO: 165487 - DNA, 17 bp, synthetic construct
  source 1..17: mol_type = other DNA
cgtgctggcactgaggg

SEQ ID NO: 165488 - DNA, 17 bp, synthetic construct
  source 1..17: mol_type = other DNA
ccgtgctggcactgagg

SEQ ID NO: 165489 - DNA, 17 bp, synthetic construct
  source 1..17: mol_type = other DNA
tccgtgctggcactgag

SEQ ID NO: 165490 - DNA, 17 bp, synthetic construct
  source 1..17: mol_type = other DNA
ctccgtgctggcactga

SEQ ID NO: 165491 - DNA, 17 bp, synthetic construct
  source 1..17: mol_type = other DNA
gctccgtgctggcactg

SEQ ID NO: 165492 - DNA, 17 bp, synthetic construct
  source 1..17: mol_type = other DNA
ggctccgtgctggcact

SEQ ID NO: 165493 - DNA, 17 bp, synthetic construct
  source 1..17: mol_type = other DNA
aggctccgtgctggcac

SEQ ID NO: 165494 - DNA, 17 bp, synthetic construct
  source 1..17: mol_type = other DNA
caggctccgtgctggca

SEQ ID NO: 165495 - DNA, 17 bp, synthetic construct
  source 1..17: mol_type = other DNA
gcaggctccgtgctggc

SEQ ID NO: 165496 - DNA, 17 bp, synthetic construct
  source 1..17: mol_type = other DNA
agcaggctccgtgctgg

SEQ ID NO: 165497 - DNA, 17 bp, synthetic construct
  source 1..17: mol_type = other DNA
cagcaggctccgtgctg

SEQ ID NO: 165498 - DNA, 17 bp, synthetic construct
  source 1..17: mol_type = other DNA
acagcaggctccgtgct

SEQ ID NO: 165499 - DNA, 17 bp, synthetic construct
  source 1..17: mol_type = other DNA
cacagcaggctccgtgc

SEQ ID NO: 165500 - DNA, 17 bp, synthetic construct
  source 1..17: mol_type = other DNA
gcacagcaggctccgtg

SEQ ID NO: 165501 - DNA, 17 bp, synthetic construct
  source 1..17: mol_type = other DNA
ggcacagcaggctccgt

SEQ ID NO: 165502 - DNA, 17 bp, synthetic construct
  source 1..17: mol_type = other DNA
aggcacagcaggctccg

SEQ ID NO: 165503 - DNA, 17 bp, synthetic construct
  source 1..17: mol_type = other DNA
taggcacagcaggctcc

SEQ ID NO: 165504 - DNA, 17 bp, synthetic construct
  source 1..17: mol_type = other DNA
gtaggcacagcaggctc

SEQ ID NO: 165505 - DNA, 17 bp, synthetic construct
  source 1..17: mol_type = other DNA
ggtaggcacagcaggct

SEQ ID NO: 165506 - DNA, 17 bp, synthetic construct
  source 1..17: mol_type = other DNA
gggtaggcacagcaggc

SEQ ID NO: 165507 - DNA, 17 bp, synthetic construct
  source 1..17: mol_type = other DNA
ggggtaggcacagcagg

SEQ ID NO: 165508 - DNA, 17 bp, synthetic construct
  source 1..17: mol_type = other DNA
tggggtaggcacagcag

SEQ ID NO: 165509 - DNA, 17 bp, synthetic construct
  source 1..17: mol_type = other DNA
ttggggtaggcacagca

SEQ ID NO: 165510 - DNA, 17 bp, synthetic construct
  source 1..17: mol_type = other DNA
gttggggtaggcacagc

SEQ ID NO: 165511 - DNA, 17 bp, synthetic construct
  source 1..17: mol_type = other DNA
ggttggggtaggcacag

SEQ ID NO: 165512 - DNA, 17 bp, synthetic construct
  source 1..17: mol_type = other DNA
gggttggggtaggcaca

SEQ ID NO: 165513 - DNA, 17 bp, synthetic construct
  source 1..17: mol_type = other DNA
tgggttggggtaggcac

SEQ ID NO: 165514 - DNA, 17 bp, synthetic construct
  source 1..17: mol_type = other DNA
ctgggttggggtaggca

SEQ ID NO: 165515 - DNA, 17 bp, synthetic construct
  source 1..17: mol_type = other DNA
tctgggttggggtaggc

SEQ ID NO: 165516 - DNA, 17 bp, synthetic construct
  source 1..17: mol_type = other DNA
gtctgggttggggtagg

SEQ ID NO: 165517 - DNA, 17 bp, synthetic construct
  source 1..17: mol_type = other DNA
ggtctgggttggggtag

SEQ ID NO: 165518 - DNA, 17 bp, synthetic construct
  source 1..17: mol_type = other DNA
tggtctgggttggggta

SEQ ID NO: 165519 - DNA, 17 bp, synthetic construct
  source 1..17: mol_type = other DNA
gtggtctgggttggggt

SEQ ID NO: 165520 - DNA, 17 bp, synthetic construct
  source 1..17: mol_type = other DNA
tgtggtctgggttgggg

SEQ ID NO: 165521 - DNA, 17 bp, synthetic construct
  source 1..17: mol_type = other DNA
ctgtggtctgggttggg

SEQ ID NO: 165522 - DNA, 17 bp, synthetic construct
  source 1..17: mol_type = other DNA
gctgtggtctgggttgg

SEQ ID NO: 165523 - DNA, 17 bp, synthetic construct
  source 1..17: mol_type = other DNA
tgctgtggtctgggttg

SEQ ID NO: 165524 - DNA, 17 bp, synthetic construct
  source 1..17: mol_type = other DNA
ttgctgtggtctgggtt

SEQ ID NO: 165525 - DNA, 17 bp, synthetic construct
  source 1..17: mol_type = other DNA
gttgctgtggtctgggt

SEQ ID NO: 165526 - DNA, 17 bp, synthetic construct
  source 1..17: mol_type = other DNA
ggttgctgtggtctggg

SEQ ID NO: 165527 - DNA, 17 bp, synthetic construct
  source 1..17: mol_type = other DNA
cggttgctgtggtctgg

SEQ ID NO: 165528 - DNA, 17 bp, synthetic construct
  source 1..17: mol_type = other DNA
tcggttgctgtggtctg

SEQ ID NO: 165529 - DNA, 17 bp, synthetic construct
  source 1..17: mol_type = other DNA
ttcggttgctgtggtct

SEQ ID NO: 165530 - DNA, 17 bp, synthetic construct
  source 1..17: mol_type = other DNA
tttcggttgctgtggtc

SEQ ID NO: 165531 - DNA, 17 bp, synthetic construct
  source 1..17: mol_type = other DNA
ttttcggttgctgtggt

SEQ ID NO: 165532 - DNA, 17 bp, synthetic construct
  source 1..17: mol_type = other DNA
cttttcggttgctgtgg

SEQ ID NO: 165533 - DNA, 17 bp, synthetic construct
  source 1..17: mol_type = other DNA
tcttttcggttgctgtg

SEQ ID NO: 165534 - DNA, 17 bp, synthetic construct
  source 1..17: mol_type = other DNA
gtcttttcggttgctgt

SEQ ID NO: 165535 - DNA, 17 bp, synthetic construct
  source 1..17: mol_type = other DNA
ggtcttttcggttgctg

SEQ ID NO: 165536 - DNA, 17 bp, synthetic construct
  source 1..17: mol_type = other DNA
tggtcttttcggttgct

SEQ ID NO: 165537 - DNA, 17 bp, synthetic construct
  source 1..17: mol_type = other DNA
gtggtcttttcggttgc

SEQ ID NO: 165538 - DNA, 17 bp, synthetic construct
  source 1..17: mol_type = other DNA
ggtggtcttttcggttg

SEQ ID NO: 165539 - DNA, 17 bp, synthetic construct
  source 1..17: mol_type = other DNA
gggtggtcttttcggtt

SEQ ID NO: 165540 - DNA, 17 bp, synthetic construct
  source 1..17: mol_type = other DNA
agggtggtcttttcggt

SEQ ID NO: 165541 - DNA, 17 bp, synthetic construct
  source 1..17: mol_type = other DNA
tagggtggtcttttcgg

SEQ ID NO: 165542 - DNA, 17 bp, synthetic construct
  source 1..17: mol_type = other DNA
atagggtggtcttttcg

SEQ ID NO: 165543 - DNA, 17 bp, synthetic construct
  source 1..17: mol_type = other DNA
catagggtggtcttttc

SEQ ID NO: 165544 - DNA, 17 bp, synthetic construct
  source 1..17: mol_type = other DNA
ccatagggtggtctttt

SEQ ID NO: 165545 - DNA, 17 bp, synthetic construct
  source 1..17: mol_type = other DNA
cccatagggtggtcttt

SEQ ID NO: 165546 - DNA, 17 bp, synthetic construct
  source 1..17: mol_type = other DNA
acccatagggtggtctt

SEQ ID NO: 165547 - DNA, 17 bp, synthetic construct
  source 1..17: mol_type = other DNA
cacccatagggtggtct

SEQ ID NO: 165548 - DNA, 17 bp, synthetic construct
  source 1..17: mol_type = other DNA
tcacccatagggtggtc

SEQ ID NO: 165549 - DNA, 17 bp, synthetic construct
  source 1..17: mol_type = other DNA
gtcacccatagggtggt

SEQ ID NO: 165550 - DNA, 17 bp, synthetic construct
  source 1..17: mol_type = other DNA
ggtcacccatagggtgg

SEQ ID NO: 165551 - DNA, 17 bp, synthetic construct
  source 1..17: mol_type = other DNA
gggtcacccatagggtg

SEQ ID NO: 165552 - DNA, 17 bp, synthetic construct
  source 1..17: mol_type = other DNA
ggggtcacccatagggt

SEQ ID NO: 165553 - DNA, 17 bp, synthetic construct
  source 1..17: mol_type = other DNA
cggggtcacccataggg

SEQ ID NO: 165554 - DNA, 17 bp, synthetic construct
  source 1..17: mol_type = other DNA
tcggggtcacccatagg

SEQ ID NO: 165555 - DNA, 17 bp, synthetic construct
  source 1..17: mol_type = other DNA
ctcggggtcacccatag

SEQ ID NO: 165556 - DNA, 17 bp, synthetic construct
  source 1..17: mol_type = other DNA
gctcggggtcacccata

SEQ ID NO: 165557 - DNA, 17 bp, synthetic construct
  source 1..17: mol_type = other DNA
tgctcggggtcacccat

SEQ ID NO: 165558 - DNA, 17 bp, synthetic construct
  source 1..17: mol_type = other DNA
atgctcggggtcaccca

SEQ ID NO: 165559 - DNA, 17 bp, synthetic construct
  source 1..17: mol_type = other DNA
gatgctcggggtcaccc

SEQ ID NO: 165560 - DNA, 17 bp, synthetic construct
  source 1..17: mol_type = other DNA
ggatgctcggggtcacc

SEQ ID NO: 165561 - DNA, 17 bp, synthetic construct
  source 1..17: mol_type = other DNA
cggatgctcggggtcac

SEQ ID NO: 165562 - DNA, 17 bp, synthetic construct
  source 1..17: mol_type = other DNA
ccggatgctcggggtca

SEQ ID NO: 165563 - DNA, 17 bp, synthetic construct
  source 1..17: mol_type = other DNA
accggatgctcggggtc

SEQ ID NO: 165564 - DNA, 17 bp, synthetic construct
  source 1..17: mol_type = other DNA
gaccggatgctcggggt

SEQ ID NO: 165565 - DNA, 17 bp, synthetic construct
  source 1..17: mol_type = other DNA
cgaccggatgctcgggg

SEQ ID NO: 165566 - DNA, 17 bp, synthetic construct
  source 1..17: mol_type = other DNA
tcgaccggatgctcggg

SEQ ID NO: 165567 - DNA, 17 bp, synthetic construct
  source 1..17: mol_type = other DNA
gtcgaccggatgctcgg

SEQ ID NO: 165568 - DNA, 17 bp, synthetic construct
  source 1..17: mol_type = other DNA
cgtcgaccggatgctcg

SEQ ID NO: 165569 - DNA, 17 bp, synthetic construct
  source 1..17: mol_type = other DNA
ccgtcgaccggatgctc

SEQ ID NO: 165570 - DNA, 17 bp, synthetic construct
  source 1..17: mol_type = other DNA
gccgtcgaccggatgct

SEQ ID NO: 165571 - DNA, 17 bp, synthetic construct
  source 1..17: mol_type = other DNA
cgccgtcgaccggatgc

SEQ ID NO: 165572 - DNA, 17 bp, synthetic construct
  source 1..17: mol_type = other DNA
ccgccgtcgaccggatg

SEQ ID NO: 165573 - DNA, 17 bp, synthetic construct
  source 1..17: mol_type = other DNA
gccgccgtcgaccggat

SEQ ID NO: 165574 - DNA, 17 bp, synthetic construct
  source 1..17: mol_type = other DNA
ggccgccgtcgaccgga

SEQ ID NO: 165575 - DNA, 17 bp, synthetic construct
  source 1..17: mol_type = other DNA
gggccgccgtcgaccgg

SEQ ID NO: 165576 - DNA, 17 bp, synthetic construct
  source 1..17: mol_type = other DNA
agggccgccgtcgaccg

SEQ ID NO: 165577 - DNA, 17 bp, synthetic construct
  source 1..17: mol_type = other DNA
gagggccgccgtcgacc

SEQ ID NO: 165578 - DNA, 17 bp, synthetic construct
  source 1..17: mol_type = other DNA
tgagggccgccgtcgac

SEQ ID NO: 165579 - DNA, 17 bp, synthetic construct
  source 1..17: mol_type = other DNA
gtgagggccgccgtcga

SEQ ID NO: 165580 - DNA, 17 bp, synthetic construct
  source 1..17: mol_type = other DNA
ggtgagggccgccgtcg

SEQ ID NO: 165581 - DNA, 17 bp, synthetic construct
  source 1..17: mol_type = other DNA
aggtgagggccgccgtc

SEQ ID NO: 165582 - DNA, 17 bp, synthetic construct
  source 1..17: mol_type = other DNA
gaggtgagggccgccgt

SEQ ID NO: 165583 - DNA, 17 bp, synthetic construct
  source 1..17: mol_type = other DNA
cgaggtgagggccgccg

SEQ ID NO: 165584 - DNA, 17 bp, synthetic construct
  source 1..17: mol_type = other DNA
gcgaggtgagggccgcc

SEQ ID NO: 165585 - DNA, 17 bp, synthetic construct
  source 1..17: mol_type = other DNA
tgcgaggtgagggccgc

SEQ ID NO: 165586 - DNA, 17 bp, synthetic construct
  source 1..17: mol_type = other DNA
ctgcgaggtgagggccg

SEQ ID NO: 165587 - DNA, 17 bp, synthetic construct
  source 1..17: mol_type = other DNA
tctgcgaggtgagggcc

SEQ ID NO: 165588 - DNA, 17 bp, synthetic construct
  source 1..17: mol_type = other DNA
gtctgcgaggtgagggc

SEQ ID NO: 165589 - DNA, 17 bp, synthetic construct
  source 1..17: mol_type = other DNA
agtctgcgaggtgaggg

SEQ ID NO: 165590 - DNA, 17 bp, synthetic construct
  source 1..17: mol_type = other DNA
cagtctgcgaggtgagg

SEQ ID NO: 165591 - DNA, 17 bp, synthetic construct
  source 1..17: mol_type = other DNA
ccagtctgcgaggtgag

SEQ ID NO: 165592 - DNA, 17 bp, synthetic construct
  source 1..17: mol_type = other DNA
cccagtctgcgaggtga

SEQ ID NO: 165593 - DNA, 17 bp, synthetic construct
  source 1..17: mol_type = other DNA
acccagtctgcgaggtg

SEQ ID NO: 165594 - DNA, 17 bp, synthetic construct
  source 1..17: mol_type = other DNA
gacccagtctgcgaggt

SEQ ID NO: 165595 - DNA, 17 bp, synthetic construct
  source 1..17: mol_type = other DNA
ggacccagtctgcgagg

SEQ ID NO: 165596 - DNA, 17 bp, synthetic construct
  source 1..17: mol_type = other DNA
tggacccagtctgcgag

SEQ ID NO: 165597 - DNA, 17 bp, synthetic construct
  source 1..17: mol_type = other DNA
ctggacccagtctgcga

SEQ ID NO: 165598 - DNA, 17 bp, synthetic construct
  source 1..17: mol_type = other DNA
gctggacccagtctgcg

SEQ ID NO: 165599 - DNA, 17 bp, synthetic construct
  source 1..17: mol_type = other DNA
agctggacccagtctgc

SEQ ID NO: 165600 - DNA, 17 bp, synthetic construct
  source 1..17: mol_type = other DNA
gagctggacccagtctg

SEQ ID NO: 165601 - DNA, 17 bp, synthetic construct
  source 1..17: mol_type = other DNA
tgagctggacccagtct

SEQ ID NO: 165602 - DNA, 17 bp, synthetic construct
  source 1..17: mol_type = other DNA
ctgagctggacccagtc

SEQ ID NO: 165603 - DNA, 17 bp, synthetic construct
  source 1..17: mol_type = other DNA
cctgagctggacccagt

SEQ ID NO: 165604 - DNA, 17 bp, synthetic construct
  source 1..17: mol_type = other DNA
gcctgagctggacccag

SEQ ID NO: 165605 - DNA, 17 bp, synthetic construct
  source 1..17: mol_type = other DNA
ggcctgagctggaccca

SEQ ID NO: 165606 - DNA, 17 bp, synthetic construct
  source 1..17: mol_type = other DNA
gggcctgagctggaccc

SEQ ID NO: 165607 - DNA, 17 bp, synthetic construct
  source 1..17: mol_type = other DNA
ggggcctgagctggacc

SEQ ID NO: 165608 - DNA, 17 bp, synthetic construct
  source 1..17: mol_type = other DNA
cggggcctgagctggac

SEQ ID NO: 165609 - DNA, 17 bp, synthetic construct
  source 1..17: mol_type = other DNA
acggggcctgagctgga

SEQ ID NO: 165610 - DNA, 17 bp, synthetic construct
  source 1..17: mol_type = other DNA
cacggggcctgagctgg

SEQ ID NO: 165611 - DNA, 17 bp, synthetic construct
  source 1..17: mol_type = other DNA
tcacggggcctgagctg

SEQ ID NO: 165612 - DNA, 17 bp, synthetic construct
  source 1..17: mol_type = other DNA
gtcacggggcctgagct

SEQ ID NO: 165613 - DNA, 17 bp, synthetic construct
  source 1..17: mol_type = other DNA
cgtcacggggcctgagc

SEQ ID NO: 165614 - DNA, 17 bp, synthetic construct
  source 1..17: mol_type = other DNA
ccgtcacggggcctgag

SEQ ID NO: 165615 - DNA, 17 bp, synthetic construct
  source 1..17: mol_type = other DNA
accgtcacggggcctga

SEQ ID NO: 165616 - DNA, 17 bp, synthetic construct
  source 1..17: mol_type = other DNA
gaccgtcacggggcctg

SEQ ID NO: 165617 - DNA, 17 bp, synthetic construct
  source 1..17: mol_type = other DNA
tgaccgtcacggggcct

SEQ ID NO: 165618 - DNA, 17 bp, synthetic construct
  source 1..17: mol_type = other DNA
gtgaccgtcacggggcc

SEQ ID NO: 165619 - DNA, 17 bp, synthetic construct
  source 1..17: mol_type = other DNA
ggtgaccgtcacggggc

SEQ ID NO: 165620 - DNA, 17 bp, synthetic construct
  source 1..17: mol_type = other DNA
gggtgaccgtcacgggg

SEQ ID NO: 165621 - DNA, 17 bp, synthetic construct
  source 1..17: mol_type = other DNA
ggggtgaccgtcacggg

SEQ ID NO: 165622 - DNA, 17 bp, synthetic construct
  source 1..17: mol_type = other DNA
gggggtgaccgtcacgg

SEQ ID NO: 165623 - DNA, 17 bp, synthetic construct
  source 1..17: mol_type = other DNA
agggggtgaccgtcacg

SEQ ID NO: 165624 - DNA, 17 bp, synthetic construct
  source 1..17: mol_type = other DNA
gagggggtgaccgtcac

SEQ ID NO: 165625 - DNA, 17 bp, synthetic construct
  source 1..17: mol_type = other DNA
cgagggggtgaccgtca

SEQ ID NO: 165626 - DNA, 17 bp, synthetic construct
  source 1..17: mol_type = other DNA
ccgagggggtgaccgtc

SEQ ID NO: 165627 - DNA, 17 bp, synthetic construct
  source 1..17: mol_type = other DNA
gccgagggggtgaccgt

SEQ ID NO: 165628 - DNA, 17 bp, synthetic construct
  source 1..17: mol_type = other DNA
ggccgagggggtgaccg

SEQ ID NO: 165629 - DNA, 17 bp, synthetic construct
  source 1..17: mol_type = other DNA
gggccgagggggtgacc

SEQ ID NO: 165630 - DNA, 17 bp, synthetic construct
  source 1..17: mol_type = other DNA
ggggccgagggggtgac

SEQ ID NO: 165631 - DNA, 17 bp, synthetic construct
  source 1..17: mol_type = other DNA
tggggccgagggggtga

SEQ ID NO: 165632 - DNA, 17 bp, synthetic construct
  source 1..17: mol_type = other DNA
ctggggccgagggggtg

SEQ ID NO: 165633 - DNA, 17 bp, synthetic construct
  source 1..17: mol_type = other DNA
cctggggccgagggggt

SEQ ID NO: 165634 - DNA, 17 bp, synthetic construct
  source 1..17: mol_type = other DNA
acctggggccgaggggg

SEQ ID NO: 165635 - DNA, 17 bp, synthetic construct
  source 1..17: mol_type = other DNA
tacctggggccgagggg

SEQ ID NO: 165636 - DNA, 17 bp, synthetic construct
  source 1..17: mol_type = other DNA
gtacctggggccgaggg

SEQ ID NO: 165637 - DNA, 17 bp, synthetic construct
  source 1..17: mol_type = other DNA
ggtacctggggccgagg

SEQ ID NO: 165638 - DNA, 17 bp, synthetic construct
  source 1..17: mol_type = other DNA
tggtacctggggccgag

SEQ ID NO: 165639 - DNA, 17 bp, synthetic construct
  source 1..17: mol_type = other DNA
gtggtacctggggccga

SEQ ID NO: 165640 - DNA, 17 bp, synthetic construct
  source 1..17: mol_type = other DNA
ggtggtacctggggccg

SEQ ID NO: 165641 - DNA, 17 bp, synthetic construct
  source 1..17: mol_type = other DNA
tggtggtacctggggcc

SEQ ID NO: 165642 - DNA, 17 bp, synthetic construct
  source 1..17: mol_type = other DNA
gtggtggtacctggggc

SEQ ID NO: 165643 - DNA, 17 bp, synthetic construct
  source 1..17: mol_type = other DNA
ggtggtggtacctgggg

SEQ ID NO: 165644 - DNA, 17 bp, synthetic construct
  source 1..17: mol_type = other DNA
aggtggtggtacctggg

SEQ ID NO: 165645 - DNA, 17 bp, synthetic construct
  source 1..17: mol_type = other DNA
caggtggtggtacctgg

SEQ ID NO: 165646 - DNA, 17 bp, synthetic construct
  source 1..17: mol_type = other DNA
gcaggtggtggtacctg

SEQ ID NO: 165647 - DNA, 17 bp, synthetic construct
  source 1..17: mol_type = other DNA
ggcaggtggtggtacct

SEQ ID NO: 165648 - DNA, 17 bp, synthetic construct
  source 1..17: mol_type = other DNA
tggcaggtggtggtacc

SEQ ID NO: 165649 - DNA, 17 bp, synthetic construct
  source 1..17: mol_type = other DNA
ctggcaggtggtggtac

SEQ ID NO: 165650 - DNA, 17 bp, synthetic construct
  source 1..17: mol_type = other DNA
gctggcaggtggtggta

SEQ ID NO: 165651 - DNA, 17 bp, synthetic construct
  source 1..17: mol_type = other DNA
ggctggcaggtggtggt

SEQ ID NO: 165652 - DNA, 17 bp, synthetic construct
  source 1..17: mol_type = other DNA
gggctggcaggtggtgg

SEQ ID NO: 165653 - DNA, 17 bp, synthetic construct
  source 1..17: mol_type = other DNA
ggggctggcaggtggtg

SEQ ID NO: 165654 - DNA, 17 bp, synthetic construct
  source 1..17: mol_type = other DNA
cggggctggcaggtggt

SEQ ID NO: 165655 - DNA, 17 bp, synthetic construct
  source 1..17: mol_type = other DNA
ccggggctggcaggtgg

SEQ ID NO: 165656 - DNA, 17 bp, synthetic construct
  source 1..17: mol_type = other DNA
accggggctggcaggtg

SEQ ID NO: 165657 - DNA, 17 bp, synthetic construct
  source 1..17: mol_type = other DNA
caccggggctggcaggt

SEQ ID NO: 165658 - DNA, 17 bp, synthetic construct
  source 1..17: mol_type = other DNA
acaccggggctggcagg

SEQ ID NO: 165659 - DNA, 17 bp, synthetic construct
  source 1..17: mol_type = other DNA
gacaccggggctggcag

SEQ ID NO: 165660 - DNA, 17 bp, synthetic construct
  source 1..17: mol_type = other DNA
tgacaccggggctggca

SEQ ID NO: 165661 - DNA, 17 bp, synthetic construct
  source 1..17: mol_type = other DNA
ctgacaccggggctggc

SEQ ID NO: 165662 - DNA, 17 bp, synthetic construct
  source 1..17: mol_type = other DNA
actgacaccggggctgg

SEQ ID NO: 165663 - DNA, 17 bp, synthetic construct
  source 1..17: mol_type = other DNA
cactgacaccggggctg

SEQ ID NO: 165664 - DNA, 17 bp, synthetic construct
  source 1..17: mol_type = other DNA
ccactgacaccggggct

SEQ ID NO: 165665 - DNA, 17 bp, synthetic construct
  source 1..17: mol_type = other DNA
tccactgacaccggggc

SEQ ID NO: 165666 - DNA, 17 bp, synthetic construct
  source 1..17: mol_type = other DNA
gtccactgacaccgggg

SEQ ID NO: 165667 - DNA, 17 bp, synthetic construct
  source 1..17: mol_type = other DNA
tgtccactgacaccggg

SEQ ID NO: 165668 - DNA, 17 bp, synthetic construct
  source 1..17: mol_type = other DNA
ctgtccactgacaccgg

SEQ ID NO: 165669 - DNA, 17 bp, synthetic construct
  source 1..17: mol_type = other DNA
tctgtccactgacaccg

SEQ ID NO: 165670 - DNA, 17 bp, synthetic construct
  source 1..17: mol_type = other DNA
ctctgtccactgacacc

SEQ ID NO: 165671 - DNA, 17 bp, synthetic construct
  source 1..17: mol_type = other DNA
actctgtccactgacac

SEQ ID NO: 165672 - DNA, 17 bp, synthetic construct
  source 1..17: mol_type = other DNA
cactctgtccactgaca

SEQ ID NO: 165673 - DNA, 17 bp, synthetic construct
  source 1..17: mol_type = other DNA
ccactctgtccactgac

SEQ ID NO: 165674 - DNA, 17 bp, synthetic construct
  source 1..17: mol_type = other DNA
accactctgtccactga

SEQ ID NO: 165675 - DNA, 17 bp, synthetic construct
  source 1..17: mol_type = other DNA
aaccactctgtccactg

SEQ ID NO: 165676 - DNA, 17 bp, synthetic construct
  source 1..17: mol_type = other DNA
aaaccactctgtccact

SEQ ID NO: 165677 - DNA, 17 bp, synthetic construct
  source 1..17: mol_type = other DNA
caaaccactctgtccac

SEQ ID NO: 165678 - DNA, 17 bp, synthetic construct
  source 1..17: mol_type = other DNA
tcaaaccactctgtcca

SEQ ID NO: 165679 - DNA, 17 bp, synthetic construct
  source 1..17: mol_type = other DNA
atcaaaccactctgtcc

SEQ ID NO: 165680 - DNA, 17 bp, synthetic construct
  source 1..17: mol_type = other DNA
catcaaaccactctgtc

SEQ ID NO: 165681 - DNA, 17 bp, synthetic construct
  source 1..17: mol_type = other DNA
tcatcaaaccactctgt

SEQ ID NO: 165682 - DNA, 17 bp, synthetic construct
  source 1..17: mol_type = other DNA
ctcatcaaaccactctg

SEQ ID NO: 165683 - DNA, 17 bp, synthetic construct
  source 1..17: mol_type = other DNA
cctcatcaaaccactct

SEQ ID NO: 165684 - DNA, 17 bp, synthetic construct
  source 1..17: mol_type = other DNA
tcctcatcaaaccactc

SEQ ID NO: 165685 - DNA, 17 bp, synthetic construct
  source 1..17: mol_type = other DNA
gtcctcatcaaaccact

SEQ ID NO: 165686 - DNA, 17 bp, synthetic construct
  source 1..17: mol_type = other DNA
agtcctcatcaaaccac

SEQ ID NO: 165687 - DNA, 17 bp, synthetic construct
  source 1..17: mol_type = other DNA
tagtcctcatcaaacca

SEQ ID NO: 165688 - DNA, 17 bp, synthetic construct
  source 1..17: mol_type = other DNA
gtagtcctcatcaaacc

SEQ ID NO: 165689 - DNA, 17 bp, synthetic construct
  source 1..17: mol_type = other DNA
ggtagtcctcatcaaac

SEQ ID NO: 165690 - DNA, 17 bp, synthetic construct
  source 1..17: mol_type = other DNA
gggtagtcctcatcaaa

SEQ ID NO: 165691 - DNA, 17 bp, synthetic construct
  source 1..17: mol_type = other DNA
ggggtagtcctcatcaa

SEQ ID NO: 165692 - DNA, 17 bp, synthetic construct
  source 1..17: mol_type = other DNA
tggggtagtcctcatca

SEQ ID NO: 165693 - DNA, 17 bp, synthetic construct
  source 1..17: mol_type = other DNA
ttggggtagtcctcatc

SEQ ID NO: 165694 - DNA, 17 bp, synthetic construct
  source 1..17: mol_type = other DNA
cttggggtagtcctcat

SEQ ID NO: 165695 - DNA, 17 bp, synthetic construct
  source 1..17: mol_type = other DNA
acttggggtagtcctca

SEQ ID NO: 165696 - DNA, 17 bp, synthetic construct
  source 1..17: mol_type = other DNA
gacttggggtagtcctc

SEQ ID NO: 165697 - DNA, 17 bp, synthetic construct
  source 1..17: mol_type = other DNA
agacttggggtagtcct

SEQ ID NO: 165698 - DNA, 17 bp, synthetic construct
  source 1..17: mol_type = other DNA
cagacttggggtagtcc

SEQ ID NO: 165699 - DNA, 17 bp, synthetic construct
  source 1..17: mol_type = other DNA
tcagacttggggtagtc

SEQ ID NO: 165700 - DNA, 17 bp, synthetic construct
  source 1..17: mol_type = other DNA
ttcagacttggggtagt

SEQ ID NO: 165701 - DNA, 17 bp, synthetic construct
  source 1..17: mol_type = other DNA
gttcagacttggggtag

SEQ ID NO: 165702 - DNA, 17 bp, synthetic construct
  source 1..17: mol_type = other DNA
tgttcagacttggggta

SEQ ID NO: 165703 - DNA, 17 bp, synthetic construct
  source 1..17: mol_type = other DNA
ttgttcagacttggggt

SEQ ID NO: 165704 - DNA, 17 bp, synthetic construct
  source 1..17: mol_type = other DNA
gttgttcagacttgggg

SEQ ID NO: 165705 - DNA, 17 bp, synthetic construct
  source 1..17: mol_type = other DNA
agttgttcagacttggg

SEQ ID NO: 165706 - DNA, 17 bp, synthetic construct
  source 1..17: mol_type = other DNA
aagttgttcagacttgg

SEQ ID NO: 165707 - DNA, 17 bp, synthetic construct
  source 1..17: mol_type = other DNA
caagttgttcagacttg

SEQ ID NO: 165708 - DNA, 17 bp, synthetic construct
  source 1..17: mol_type = other DNA
ccaagttgttcagactt

SEQ ID NO: 165709 - DNA, 17 bp, synthetic construct
  source 1..17: mol_type = other DNA
tccaagttgttcagact

SEQ ID NO: 165710 - DNA, 17 bp, synthetic construct
  source 1..17: mol_type = other DNA
ctccaagttgttcagac

SEQ ID NO: 165711 - DNA, 17 bp, synthetic construct
  source 1..17: mol_type = other DNA
cctccaagttgttcaga

SEQ ID NO: 165712 - DNA, 17 bp, synthetic construct
  source 1..17: mol_type = other DNA
ccctccaagttgttcag

SEQ ID NO: 165713 - DNA, 17 bp, synthetic construct
  source 1..17: mol_type = other DNA
cccctccaagttgttca

SEQ ID NO: 165714 - DNA, 17 bp, synthetic construct
  source 1..17: mol_type = other DNA
tcccctccaagttgttc

SEQ ID NO: 165715 - DNA, 17 bp, synthetic construct
  source 1..17: mol_type = other DNA
gtcccctccaagttgtt

SEQ ID NO: 165716 - DNA, 17 bp, synthetic construct
  source 1..17: mol_type = other DNA
cgtcccctccaagttgt

SEQ ID NO: 165717 - DNA, 17 bp, synthetic construct
  source 1..17: mol_type = other DNA
acgtcccctccaagttg

SEQ ID NO: 165718 - DNA, 17 bp, synthetic construct
  source 1..17: mol_type = other DNA
aacgtcccctccaagtt

SEQ ID NO: 165719 - DNA, 17 bp, synthetic construct
  source 1..17: mol_type = other DNA
caacgtcccctccaagt

SEQ ID NO: 165720 - DNA, 17 bp, synthetic construct
  source 1..17: mol_type = other DNA
tcaacgtcccctccaag

SEQ ID NO: 165721 - DNA, 17 bp, synthetic construct
  source 1..17: mol_type = other DNA
ctcaacgtcccctccaa

SEQ ID NO: 165722 - DNA, 17 bp, synthetic construct
  source 1..17: mol_type = other DNA
actcaacgtcccctcca

SEQ ID NO: 165723 - DNA, 17 bp, synthetic construct
  source 1..17: mol_type = other DNA
gactcaacgtcccctcc

SEQ ID NO: 165724 - DNA, 17 bp, synthetic construct
  source 1..17: mol_type = other DNA
ggactcaacgtcccctc

SEQ ID NO: 165725 - DNA, 17 bp, synthetic construct
  source 1..17: mol_type = other DNA
aggactcaacgtcccct

SEQ ID NO: 165726 - DNA, 17 bp, synthetic construct
  source 1..17: mol_type = other DNA
taggactcaacgtcccc

SEQ ID NO: 165727 - DNA, 17 bp, synthetic construct
  source 1..17: mol_type = other DNA
gtaggactcaacgtccc

SEQ ID NO: 165728 - DNA, 17 bp, synthetic construct
  source 1..17: mol_type = other DNA
cgtaggactcaacgtcc

SEQ ID NO: 165729 - DNA, 17 bp, synthetic construct
  source 1..17: mol_type = other DNA
tcgtaggactcaacgtc

SEQ ID NO: 165730 - DNA, 17 bp, synthetic construct
  source 1..17: mol_type = other DNA
atcgtaggactcaacgt

SEQ ID NO: 165731 - DNA, 17 bp, synthetic construct
  source 1..17: mol_type = other DNA
tatcgtaggactcaacg

SEQ ID NO: 165732 - DNA, 17 bp, synthetic construct
  source 1..17: mol_type = other DNA
ttatcgtaggactcaac

SEQ ID NO: 165733 - DNA, 17 bp, synthetic construct
  source 1..17: mol_type = other DNA
cttatcgtaggactcaa

SEQ ID NO: 165734 - DNA, 17 bp, synthetic construct
  source 1..17: mol_type = other DNA
tcttatcgtaggactca

SEQ ID NO: 165735 - DNA, 17 bp, synthetic construct
  source 1..17: mol_type = other DNA
atcttatcgtaggactc

SEQ ID NO: 165736 - DNA, 17 bp, synthetic construct
  source 1..17: mol_type = other DNA
gatcttatcgtaggact

SEQ ID NO: 165737 - DNA, 17 bp, synthetic construct
  source 1..17: mol_type = other DNA
tgatcttatcgtaggac

SEQ ID NO: 165738 - DNA, 17 bp, synthetic construct
  source 1..17: mol_type = other DNA
ctgatcttatcgtagga

SEQ ID NO: 165739 - DNA, 17 bp, synthetic construct
  source 1..17: mol_type = other DNA
cctgatcttatcgtagg

SEQ ID NO: 165740 - DNA, 17 bp, synthetic construct
  source 1..17: mol_type = other DNA
ccctgatcttatcgtag

SEQ ID NO: 165741 - DNA, 17 bp, synthetic construct
  source 1..17: mol_type = other DNA
gccctgatcttatcgta

SEQ ID NO: 165742 - DNA, 17 bp, synthetic construct
  source 1..17: mol_type = other DNA
ggccctgatcttatcgt

SEQ ID NO: 165743 - DNA, 17 bp, synthetic construct
  source 1..17: mol_type = other DNA
cggccctgatcttatcg

SEQ ID NO: 165744 - DNA, 17 bp, synthetic construct
  source 1..17: mol_type = other DNA
gcggccctgatcttatc

SEQ ID NO: 165745 - DNA, 17 bp, synthetic construct
  source 1..17: mol_type = other DNA
agcggccctgatcttat

SEQ ID NO: 165746 - DNA, 17 bp, synthetic construct
  source 1..17: mol_type = other DNA
cagcggccctgatctta

SEQ ID NO: 165747 - DNA, 17 bp, synthetic construct
  source 1..17: mol_type = other DNA
ccagcggccctgatctt

SEQ ID NO: 165748 - DNA, 17 bp, synthetic construct
  source 1..17: mol_type = other DNA
tccagcggccctgatct

SEQ ID NO: 165749 - DNA, 17 bp, synthetic construct
  source 1..17: mol_type = other DNA
ctccagcggccctgatc

SEQ ID NO: 165750 - DNA, 17 bp, synthetic construct
  source 1..17: mol_type = other DNA
cctccagcggccctgat

SEQ ID NO: 165751 - DNA, 17 bp, synthetic construct
  source 1..17: mol_type = other DNA
ccctccagcggccctga

SEQ ID NO: 165752 - DNA, 17 bp, synthetic construct
  source 1..17: mol_type = other DNA
gccctccagcggccctg

SEQ ID NO: 165753 - DNA, 17 bp, synthetic construct
  source 1..17: mol_type = other DNA
tgccctccagcggccct

SEQ ID NO: 165754 - DNA, 17 bp, synthetic construct
  source 1..17: mol_type = other DNA
gtgccctccagcggccc

SEQ ID NO: 165755 - DNA, 17 bp, synthetic construct
  source 1..17: mol_type = other DNA
agtgccctccagcggcc

SEQ ID NO: 165756 - DNA, 17 bp, synthetic construct
  source 1..17: mol_type = other DNA
aagtgccctccagcggc

SEQ ID NO: 165757 - DNA, 17 bp, synthetic construct
  source 1..17: mol_type = other DNA
taagtgccctccagcgg

SEQ ID NO: 165758 - DNA, 17 bp, synthetic construct
  source 1..17: mol_type = other DNA
ataagtgccctccagcg

SEQ ID NO: 165759 - DNA, 17 bp, synthetic construct
  source 1..17: mol_type = other DNA
cataagtgccctccagc

SEQ ID NO: 165760 - DNA, 17 bp, synthetic construct
  source 1..17: mol_type = other DNA
gcataagtgccctccag

SEQ ID NO: 165761 - DNA, 17 bp, synthetic construct
  source 1..17: mol_type = other DNA
ggcataagtgccctcca

SEQ ID NO: 165762 - DNA, 17 bp, synthetic construct
  source 1..17: mol_type = other DNA
tggcataagtgccctcc

SEQ ID NO: 165763 - DNA, 17 bp, synthetic construct
  source 1..17: mol_type = other DNA
ctggcataagtgccctc

SEQ ID NO: 165764 - DNA, 17 bp, synthetic construct
  source 1..17: mol_type = other DNA
gctggcataagtgccct

SEQ ID NO: 165765 - DNA, 17 bp, synthetic construct
  source 1..17: mol_type = other DNA
tgctggcataagtgccc

SEQ ID NO: 165766 - DNA, 17 bp, synthetic construct
  source 1..17: mol_type = other DNA
ctgctggcataagtgcc

SEQ ID NO: 165767 - DNA, 17 bp, synthetic construct
  source 1..17: mol_type = other DNA
gctgctggcataagtgc

SEQ ID NO: 165768 - DNA, 17 bp, synthetic construct
  source 1..17: mol_type = other DNA
ggctgctggcataagtg

SEQ ID NO: 165769 - DNA, 17 bp, synthetic construct
  source 1..17: mol_type = other DNA
aggctgctggcataagt

SEQ ID NO: 165770 - DNA, 17 bp, synthetic construct
  source 1..17: mol_type = other DNA
taggctgctggcataag

SEQ ID NO: 165771 - DNA, 17 bp, synthetic construct
  source 1..17: mol_type = other DNA
ttaggctgctggcataa

SEQ ID NO: 165772 - DNA, 17 bp, synthetic construct
  source 1..17: mol_type = other DNA
cttaggctgctggcata

SEQ ID NO: 165773 - DNA, 17 bp, synthetic construct
  source 1..17: mol_type = other DNA
ccttaggctgctggcat

SEQ ID NO: 165774 - DNA, 17 bp, synthetic construct
  source 1..17: mol_type = other DNA
tccttaggctgctggca

SEQ ID NO: 165775 - DNA, 17 bp, synthetic construct
  source 1..17: mol_type = other DNA
gtccttaggctgctggc

SEQ ID NO: 165776 - DNA, 17 bp, synthetic construct
  source 1..17: mol_type = other DNA
tgtccttaggctgctgg

SEQ ID NO: 165777 - DNA, 17 bp, synthetic construct
  source 1..17: mol_type = other DNA
atgtccttaggctgctg

SEQ ID NO: 165778 - DNA, 17 bp, synthetic construct
  source 1..17: mol_type = other DNA
tatgtccttaggctgct

SEQ ID NO: 165779 - DNA, 17 bp, synthetic construct
  source 1..17: mol_type = other DNA
ctatgtccttaggctgc

SEQ ID NO: 165780 - DNA, 17 bp, synthetic construct
  source 1..17: mol_type = other DNA
tctatgtccttaggctg

SEQ ID NO: 165781 - DNA, 17 bp, synthetic construct
  source 1..17: mol_type = other DNA
ctctatgtccttaggct

SEQ ID NO: 165782 - DNA, 17 bp, synthetic construct
  source 1..17: mol_type = other DNA
actctatgtccttaggc

SEQ ID NO: 165783 - DNA, 17 bp, synthetic construct
  source 1..17: mol_type = other DNA
cactctatgtccttagg

SEQ ID NO: 165784 - DNA, 17 bp, synthetic construct
  source 1..17: mol_type = other DNA
gcactctatgtccttag

SEQ ID NO: 165785 - DNA, 17 bp, synthetic construct
  source 1..17: mol_type = other DNA
ggcactctatgtcctta

SEQ ID NO: 165786 - DNA, 17 bp, synthetic construct
  source 1..17: mol_type = other DNA
tggcactctatgtcctt

SEQ ID NO: 165787 - DNA, 17 bp, synthetic construct
  source 1..17: mol_type = other DNA
ctggcactctatgtcct

SEQ ID NO: 165788 - DNA, 17 bp, synthetic construct
  source 1..17: mol_type = other DNA
cctggcactctatgtcc

SEQ ID NO: 165789 - DNA, 17 bp, synthetic construct
  source 1..17: mol_type = other DNA
gcctggcactctatgtc

SEQ ID NO: 165790 - DNA, 17 bp, synthetic construct
  source 1..17: mol_type = other DNA
ggcctggcactctatgt

SEQ ID NO: 165791 - DNA, 17 bp, synthetic construct
  source 1..17: mol_type = other DNA
cggcctggcactctatg

SEQ ID NO: 165792 - DNA, 17 bp, synthetic construct
  source 1..17: mol_type = other DNA
tcggcctggcactctat

SEQ ID NO: 165793 - DNA, 17 bp, synthetic construct
  source 1..17: mol_type = other DNA
ctcggcctggcactcta

SEQ ID NO: 165794 - DNA, 17 bp, synthetic construct
  source 1..17: mol_type = other DNA
tctcggcctggcactct

SEQ ID NO: 165795 - DNA, 17 bp, synthetic construct
  source 1..17: mol_type = other DNA
ctctcggcctggcactc

SEQ ID NO: 165796 - DNA, 17 bp, synthetic construct
  source 1..17: mol_type = other DNA
gctctcggcctggcact

SEQ ID NO: 165797 - DNA, 17 bp, synthetic construct
  source 1..17: mol_type = other DNA
agctctcggcctggcac

SEQ ID NO: 165798 - DNA, 17 bp, synthetic construct
  source 1..17: mol_type = other DNA
aagctctcggcctggca

SEQ ID NO: 165799 - DNA, 17 bp, synthetic construct
  source 1..17: mol_type = other DNA
gaagctctcggcctggc

SEQ ID NO: 165800 - DNA, 17 bp, synthetic construct
  source 1..17: mol_type = other DNA
ggaagctctcggcctgg

SEQ ID NO: 165801 - DNA, 17 bp, synthetic construct
  source 1..17: mol_type = other DNA
gggaagctctcggcctg

SEQ ID NO: 165802 - DNA, 17 bp, synthetic construct
  source 1..17: mol_type = other DNA
ggggaagctctcggcct

SEQ ID NO: 165803 - DNA, 17 bp, synthetic construct
  source 1..17: mol_type = other DNA
tggggaagctctcggcc

SEQ ID NO: 165804 - DNA, 17 bp, synthetic construct
  source 1..17: mol_type = other DNA
ttggggaagctctcggc

SEQ ID NO: 165805 - DNA, 17 bp, synthetic construct
  source 1..17: mol_type = other DNA
gttggggaagctctcgg

SEQ ID NO: 165806 - DNA, 17 bp, synthetic construct
  source 1..17: mol_type = other DNA
agttggggaagctctcg

SEQ ID NO: 165807 - DNA, 17 bp, synthetic construct
  source 1..17: mol_type = other DNA
cagttggggaagctctc

SEQ ID NO: 165808 - DNA, 17 bp, synthetic construct
  source 1..17: mol_type = other DNA
ccagttggggaagctct

SEQ ID NO: 165809 - DNA, 17 bp, synthetic construct
  source 1..17: mol_type = other DNA
tccagttggggaagctc

SEQ ID NO: 165810 - DNA, 17 bp, synthetic construct
  source 1..17: mol_type = other DNA
gtccagttggggaagct

SEQ ID NO: 165811 - DNA, 17 bp, synthetic construct
  source 1..17: mol_type = other DNA
ggtccagttggggaagc

SEQ ID NO: 165812 - DNA, 17 bp, synthetic construct
  source 1..17: mol_type = other DNA
gggtccagttggggaag

SEQ ID NO: 165813 - DNA, 17 bp, synthetic construct
  source 1..17: mol_type = other DNA
agggtccagttggggaa

SEQ ID NO: 165814 - DNA, 17 bp, synthetic construct
  source 1..17: mol_type = other DNA
cagggtccagttgggga

SEQ ID NO: 165815 - DNA, 17 bp, synthetic construct
  source 1..17: mol_type = other DNA
ccagggtccagttgggg

SEQ ID NO: 165816 - DNA, 17 bp, synthetic construct
  source 1..17: mol_type = other DNA
gccagggtccagttggg

SEQ ID NO: 165817 - DNA, 17 bp, synthetic construct
  source 1..17: mol_type = other DNA
tgccagggtccagttgg

SEQ ID NO: 165818 - DNA, 17 bp, synthetic construct
  source 1..17: mol_type = other DNA
gtgccagggtccagttg

SEQ ID NO: 165819 - DNA, 17 bp, synthetic construct
  source 1..17: mol_type = other DNA
tgtgccagggtccagtt

SEQ ID NO: 165820 - DNA, 17 bp, synthetic construct
  source 1..17: mol_type = other DNA
ctgtgccagggtccagt

SEQ ID NO: 165821 - DNA, 17 bp, synthetic construct
  source 1..17: mol_type = other DNA
cctgtgccagggtccag

SEQ ID NO: 165822 - DNA, 17 bp, synthetic construct
  source 1..17: mol_type = other DNA
acctgtgccagggtcca

SEQ ID NO: 165823 - DNA, 17 bp, synthetic construct
  source 1..17: mol_type = other DNA
cacctgtgccagggtcc

SEQ ID NO: 165824 - DNA, 17 bp, synthetic construct
  source 1..17: mol_type = other DNA
ccacctgtgccagggtc

SEQ ID NO: 165825 - DNA, 17 bp, synthetic construct
  source 1..17: mol_type = other DNA
cccacctgtgccagggt

SEQ ID NO: 165826 - DNA, 17 bp, synthetic construct
  source 1..17: mol_type = other DNA
ccccacctgtgccaggg

SEQ ID NO: 165827 - DNA, 17 bp, synthetic construct
  source 1..17: mol_type = other DNA
gccccacctgtgccagg

SEQ ID NO: 165828 - DNA, 17 bp, synthetic construct
  source 1..17: mol_type = other DNA
tgccccacctgtgccag

SEQ ID NO: 165829 - DNA, 17 bp, synthetic construct
  source 1..17: mol_type = other DNA
ctgccccacctgtgcca

SEQ ID NO: 165830 - DNA, 17 bp, synthetic construct
  source 1..17: mol_type = other DNA
tctgccccacctgtgcc

SEQ ID NO: 165831 - DNA, 17 bp, synthetic construct
  source 1..17: mol_type = other DNA
ttctgccccacctgtgc

SEQ ID NO: 165832 - DNA, 17 bp, synthetic construct
  source 1..17: mol_type = other DNA
cttctgccccacctgtg

SEQ ID NO: 165833 - DNA, 17 bp, synthetic construct
  source 1..17: mol_type = other DNA
ccttctgccccacctgt

SEQ ID NO: 165834 - DNA, 17 bp, synthetic construct
  source 1..17: mol_type = other DNA
accttctgccccacctg

SEQ ID NO: 165835 - DNA, 17 bp, synthetic construct
  source 1..17: mol_type = other DNA
caccttctgccccacct

SEQ ID NO: 165836 - DNA, 17 bp, synthetic construct
  source 1..17: mol_type = other DNA
gcaccttctgccccacc

SEQ ID NO: 165837 - DNA, 17 bp, synthetic construct
  source 1..17: mol_type = other DNA
tgcaccttctgccccac

SEQ ID NO: 165838 - DNA, 17 bp, synthetic construct
  source 1..17: mol_type = other DNA
gtgcaccttctgcccca

SEQ ID NO: 165839 - DNA, 17 bp, synthetic construct
  source 1..17: mol_type = other DNA
agtgcaccttctgcccc

SEQ ID NO: 165840 - DNA, 17 bp, synthetic construct
  source 1..17: mol_type = other DNA
cagtgcaccttctgccc

SEQ ID NO: 165841 - DNA, 17 bp, synthetic construct
  source 1..17: mol_type = other DNA
acagtgcaccttctgcc

SEQ ID NO: 165842 - DNA, 17 bp, synthetic construct
  source 1..17: mol_type = other DNA
cacagtgcaccttctgc

SEQ ID NO: 165843 - DNA, 17 bp, synthetic construct
  source 1..17: mol_type = other DNA
tcacagtgcaccttctg

SEQ ID NO: 165844 - DNA, 17 bp, synthetic construct
  source 1..17: mol_type = other DNA
gtcacagtgcaccttct

SEQ ID NO: 165845 - DNA, 17 bp, synthetic construct
  source 1..17: mol_type = other DNA
cgtcacagtgcaccttc

SEQ ID NO: 165846 - DNA, 17 bp, synthetic construct
  source 1..17: mol_type = other DNA
acgtcacagtgcacctt

SEQ ID NO: 165847 - DNA, 17 bp, synthetic construct
  source 1..17: mol_type = other DNA
gacgtcacagtgcacct

SEQ ID NO: 165848 - DNA, 17 bp, synthetic construct
  source 1..17: mol_type = other DNA
ggacgtcacagtgcacc

SEQ ID NO: 165849 - DNA, 17 bp, synthetic construct
  source 1..17: mol_type = other DNA
tggacgtcacagtgcac

SEQ ID NO: 165850 - DNA, 17 bp, synthetic construct
  source 1..17: mol_type = other DNA
gtggacgtcacagtgca

SEQ ID NO: 165851 - DNA, 17 bp, synthetic construct
  source 1..17: mol_type = other DNA
agtggacgtcacagtgc

SEQ ID NO: 165852 - DNA, 17 bp, synthetic construct
  source 1..17: mol_type = other DNA
aagtggacgtcacagtg

SEQ ID NO: 165853 - DNA, 17 bp, synthetic construct
  source 1..17: mol_type = other DNA
gaagtggacgtcacagt

SEQ ID NO: 165854 - DNA, 17 bp, synthetic construct
  source 1..17: mol_type = other DNA
cgaagtggacgtcacag

SEQ ID NO: 165855 - DNA, 17 bp, synthetic construct
  source 1..17: mol_type = other DNA
ccgaagtggacgtcaca

SEQ ID NO: 165856 - DNA, 17 bp, synthetic construct
  source 1..17: mol_type = other DNA
gccgaagtggacgtcac

SEQ ID NO: 165857 - DNA, 17 bp, synthetic construct
  source 1..17: mol_type = other DNA
ggccgaagtggacgtca

SEQ ID NO: 165858 - DNA, 17 bp, synthetic construct
  source 1..17: mol_type = other DNA
aggccgaagtggacgtc

SEQ ID NO: 165859 - DNA, 17 bp, synthetic construct
  source 1..17: mol_type = other DNA
caggccgaagtggacgt

SEQ ID NO: 165860 - DNA, 17 bp, synthetic construct
  source 1..17: mol_type = other DNA
ccaggccgaagtggacg

SEQ ID NO: 165861 - DNA, 17 bp, synthetic construct
  source 1..17: mol_type = other DNA
accaggccgaagtggac

SEQ ID NO: 165862 - DNA, 17 bp, synthetic construct
  source 1..17: mol_type = other DNA
caccaggccgaagtgga

SEQ ID NO: 165863 - DNA, 17 bp, synthetic construct
  source 1..17: mol_type = other DNA
acaccaggccgaagtgg

SEQ ID NO: 165864 - DNA, 17 bp, synthetic construct
  source 1..17: mol_type = other DNA
cacaccaggccgaagtg

SEQ ID NO: 165865 - DNA, 17 bp, synthetic construct
  source 1..17: mol_type = other DNA
gcacaccaggccgaagt

SEQ ID NO: 165866 - DNA, 17 bp, synthetic construct
  source 1..17: mol_type = other DNA
tgcacaccaggccgaag

SEQ ID NO: 165867 - DNA, 17 bp, synthetic construct
  source 1..17: mol_type = other DNA
ctgcacaccaggccgaa

SEQ ID NO: 165868 - DNA, 17 bp, synthetic construct
  source 1..17: mol_type = other DNA
cctgcacaccaggccga

SEQ ID NO: 165869 - DNA, 17 bp, synthetic construct
  source 1..17: mol_type = other DNA
tcctgcacaccaggccg

SEQ ID NO: 165870 - DNA, 17 bp, synthetic construct
  source 1..17: mol_type = other DNA
ttcctgcacaccaggcc

SEQ ID NO: 165871 - DNA, 17 bp, synthetic construct
  source 1..17: mol_type = other DNA
gttcctgcacaccaggc

SEQ ID NO: 165872 - DNA, 17 bp, synthetic construct
  source 1..17: mol_type = other DNA
agttcctgcacaccagg

SEQ ID NO: 165873 - DNA, 17 bp, synthetic construct
  source 1..17: mol_type = other DNA
cagttcctgcacaccag

SEQ ID NO: 165874 - DNA, 17 bp, synthetic construct
  source 1..17: mol_type = other DNA
ccagttcctgcacacca

SEQ ID NO: 165875 - DNA, 17 bp, synthetic construct
  source 1..17: mol_type = other DNA
cccagttcctgcacacc

SEQ ID NO: 165876 - DNA, 17 bp, synthetic construct
  source 1..17: mol_type = other DNA
tcccagttcctgcacac

SEQ ID NO: 165877 - DNA, 17 bp, synthetic construct
  source 1..17: mol_type = other DNA
ctcccagttcctgcaca

SEQ ID NO: 165878 - DNA, 17 bp, synthetic construct
  source 1..17: mol_type = other DNA
gctcccagttcctgcac

SEQ ID NO: 165879 - DNA, 17 bp, synthetic construct
  source 1..17: mol_type = other DNA
tgctcccagttcctgca

SEQ ID NO: 165880 - DNA, 17 bp, synthetic construct
  source 1..17: mol_type = other DNA
ctgctcccagttcctgc

SEQ ID NO: 165881 - DNA, 17 bp, synthetic construct
  source 1..17: mol_type = other DNA
cctgctcccagttcctg

SEQ ID NO: 165882 - DNA, 17 bp, synthetic construct
  source 1..17: mol_type = other DNA
tcctgctcccagttcct

SEQ ID NO: 165883 - DNA, 17 bp, synthetic construct
  source 1..17: mol_type = other DNA
ctcctgctcccagttcc

SEQ ID NO: 165884 - DNA, 17 bp, synthetic construct
  source 1..17: mol_type = other DNA
cctcctgctcccagttc

SEQ ID NO: 165885 - DNA, 17 bp, synthetic construct
  source 1..17: mol_type = other DNA
ccctcctgctcccagtt

SEQ ID NO: 165886 - DNA, 17 bp, synthetic construct
  source 1..17: mol_type = other DNA
gccctcctgctcccagt

SEQ ID NO: 165887 - DNA, 17 bp, synthetic construct
  source 1..17: mol_type = other DNA
cgccctcctgctcccag

SEQ ID NO: 165888 - DNA, 17 bp, synthetic construct
  source 1..17: mol_type = other DNA
acgccctcctgctccca

SEQ ID NO: 165889 - DNA, 17 bp, synthetic construct
  source 1..17: mol_type = other DNA
gacgccctcctgctccc

SEQ ID NO: 165890 - DNA, 17 bp, synthetic construct
  source 1..17: mol_type = other DNA
agacgccctcctgctcc

SEQ ID NO: 165891 - DNA, 17 bp, synthetic construct
  source 1..17: mol_type = other DNA
aagacgccctcctgctc

SEQ ID NO: 165892 - DNA, 17 bp, synthetic construct
  source 1..17: mol_type = other DNA
gaagacgccctcctgct

SEQ ID NO: 165893 - DNA, 17 bp, synthetic construct
  source 1..17: mol_type = other DNA
tgaagacgccctcctgc

SEQ ID NO: 165894 - DNA, 17 bp, synthetic construct
  source 1..17: mol_type = other DNA
ttgaagacgccctcctg

SEQ ID NO: 165895 - DNA, 17 bp, synthetic construct
  source 1..17: mol_type = other DNA
cttgaagacgccctcct

SEQ ID NO: 165896 - DNA, 17 bp, synthetic construct
  source 1..17: mol_type = other DNA
tcttgaagacgccctcc

SEQ ID NO: 165897 - DNA, 17 bp, synthetic construct
  source 1..17: mol_type = other DNA
atcttgaagacgccctc

SEQ ID NO: 165898 - DNA, 17 bp, synthetic construct
  source 1..17: mol_type = other DNA
catcttgaagacgccct

SEQ ID NO: 165899 - DNA, 17 bp, synthetic construct
  source 1..17: mol_type = other DNA
acatcttgaagacgccc

SEQ ID NO: 165900 - DNA, 17 bp, synthetic construct
  source 1..17: mol_type = other DNA
cacatcttgaagacgcc

SEQ ID NO: 165901 - DNA, 17 bp, synthetic construct
  source 1..17: mol_type = other DNA
gcacatcttgaagacgc

SEQ ID NO: 165902 - DNA, 17 bp, synthetic construct
  source 1..17: mol_type = other DNA
agcacatcttgaagacg

SEQ ID NO: 165903 - DNA, 17 bp, synthetic construct
  source 1..17: mol_type = other DNA
tagcacatcttgaagac

SEQ ID NO: 165904 - DNA, 17 bp, synthetic construct
  source 1..17: mol_type = other DNA
gtagcacatcttgaaga

SEQ ID NO: 165905 - DNA, 17 bp, synthetic construct
  source 1..17: mol_type = other DNA
tgtagcacatcttgaag

SEQ ID NO: 165906 - DNA, 17 bp, synthetic construct
  source 1..17: mol_type = other DNA
ttgtagcacatcttgaa

SEQ ID NO: 165907 - DNA, 17 bp, synthetic construct
  source 1..17: mol_type = other DNA
gttgtagcacatcttga

SEQ ID NO: 165908 - DNA, 17 bp, synthetic construct
  source 1..17: mol_type = other DNA
agttgtagcacatcttg

SEQ ID NO: 165909 - DNA, 17 bp, synthetic construct
  source 1..17: mol_type = other DNA
tagttgtagcacatctt

SEQ ID NO: 165910 - DNA, 17 bp, synthetic construct
  source 1..17: mol_type = other DNA
gtagttgtagcacatct

SEQ ID NO: 165911 - DNA, 17 bp, synthetic construct
  source 1..17: mol_type = other DNA
tgtagttgtagcacatc

SEQ ID NO: 165912 - DNA, 17 bp, synthetic construct
  source 1..17: mol_type = other DNA
ctgtagttgtagcacat

SEQ ID NO: 165913 - DNA, 17 bp, synthetic construct
  source 1..17: mol_type = other DNA
cctgtagttgtagcaca

SEQ ID NO: 165914 - DNA, 17 bp, synthetic construct
  source 1..17: mol_type = other DNA
tcctgtagttgtagcac

SEQ ID NO: 165915 - DNA, 17 bp, synthetic construct
  source 1..17: mol_type = other DNA
atcctgtagttgtagca

SEQ ID NO: 165916 - DNA, 17 bp, synthetic construct
  source 1..17: mol_type = other DNA
gatcctgtagttgtagc

SEQ ID NO: 165917 - DNA, 17 bp, synthetic construct
  source 1..17: mol_type = other DNA
ggatcctgtagttgtag

SEQ ID NO: 165918 - DNA, 17 bp, synthetic construct
  source 1..17: mol_type = other DNA
cggatcctgtagttgta

SEQ ID NO: 165919 - DNA, 17 bp, synthetic construct
  source 1..17: mol_type = other DNA
ccggatcctgtagttgt

SEQ ID NO: 165920 - DNA, 17 bp, synthetic construct
  source 1..17: mol_type = other DNA
cccggatcctgtagttg

SEQ ID NO: 165921 - DNA, 17 bp, synthetic construct
  source 1..17: mol_type = other DNA
acccggatcctgtagtt

SEQ ID NO: 165922 - DNA, 17 bp, synthetic construct
  source 1..17: mol_type = other DNA
gacccggatcctgtagt

SEQ ID NO: 165923 - DNA, 17 bp, synthetic construct
  source 1..17: mol_type = other DNA
ggacccggatcctgtag

SEQ ID NO: 165924 - DNA, 17 bp, synthetic construct
  source 1..17: mol_type = other DNA
aggacccggatcctgta

SEQ ID NO: 165925 - DNA, 17 bp, synthetic construct
  source 1..17: mol_type = other DNA
gaggacccggatcctgt

SEQ ID NO: 165926 - DNA, 17 bp, synthetic construct
  source 1..17: mol_type = other DNA
agaggacccggatcctg

SEQ ID NO: 165927 - DNA, 17 bp, synthetic construct
  source 1..17: mol_type = other DNA
cagaggacccggatcct

SEQ ID NO: 165928 - DNA, 17 bp, synthetic construct
  source 1..17: mol_type = other DNA
gcagaggacccggatcc

SEQ ID NO: 165929 - DNA, 17 bp, synthetic construct
  source 1..17: mol_type = other DNA
agcagaggacccggatc

SEQ ID NO: 165930 - DNA, 17 bp, synthetic construct
  source 1..17: mol_type = other DNA
cagcagaggacccggat

SEQ ID NO: 165931 - DNA, 17 bp, synthetic construct
  source 1..17: mol_type = other DNA
gcagcagaggacccgga

SEQ ID NO: 165932 - DNA, 17 bp, synthetic construct
  source 1..17: mol_type = other DNA
tgcagcagaggacccgg

SEQ ID NO: 165933 - DNA, 17 bp, synthetic construct
  source 1..17: mol_type = other DNA
ctgcagcagaggacccg

SEQ ID NO: 165934 - DNA, 17 bp, synthetic construct
  source 1..17: mol_type = other DNA
actgcagcagaggaccc

SEQ ID NO: 165935 - DNA, 17 bp, synthetic construct
  source 1..17: mol_type = other DNA
cactgcagcagaggacc

SEQ ID NO: 165936 - DNA, 17 bp, synthetic construct
  source 1..17: mol_type = other DNA
tcactgcagcagaggac

SEQ ID NO: 165937 - DNA, 17 bp, synthetic construct
  source 1..17: mol_type = other DNA
gtcactgcagcagagga

SEQ ID NO: 165938 - DNA, 17 bp, synthetic construct
  source 1..17: mol_type = other DNA
cgtcactgcagcagagg

SEQ ID NO: 165939 - DNA, 17 bp, synthetic construct
  source 1..17: mol_type = other DNA
tcgtcactgcagcagag

SEQ ID NO: 165940 - DNA, 17 bp, synthetic construct
  source 1..17: mol_type = other DNA
gtcgtcactgcagcaga

SEQ ID NO: 165941 - DNA, 17 bp, synthetic construct
  source 1..17: mol_type = other DNA
ggtcgtcactgcagcag

SEQ ID NO: 165942 - DNA, 17 bp, synthetic construct
  source 1..17: mol_type = other DNA
tggtcgtcactgcagca

SEQ ID NO: 165943 - DNA, 17 bp, synthetic construct
  source 1..17: mol_type = other DNA
gtggtcgtcactgcagc

SEQ ID NO: 165944 - DNA, 17 bp, synthetic construct
  source 1..17: mol_type = other DNA
agtggtcgtcactgcag

SEQ ID NO: 165945 - DNA, 17 bp, synthetic construct
  source 1..17: mol_type = other DNA
cagtggtcgtcactgca

SEQ ID NO: 165946 - DNA, 17 bp, synthetic construct
  source 1..17: mol_type = other DNA
gcagtggtcgtcactgc

SEQ ID NO: 165947 - DNA, 17 bp, synthetic construct
  source 1..17: mol_type = other DNA
tgcagtggtcgtcactg

SEQ ID NO: 165948 - DNA, 17 bp, synthetic construct
  source 1..17: mol_type = other DNA
ctgcagtggtcgtcact

SEQ ID NO: 165949 - DNA, 17 bp, synthetic construct
  source 1..17: mol_type = other DNA
cctgcagtggtcgtcac

SEQ ID NO: 165950 - DNA, 17 bp, synthetic construct
  source 1..17: mol_type = other DNA
ccctgcagtggtcgtca

SEQ ID NO: 165951 - DNA, 17 bp, synthetic construct
  source 1..17: mol_type = other DNA
cccctgcagtggtcgtc

SEQ ID NO: 165952 - DNA, 17 bp, synthetic construct
  source 1..17: mol_type = other DNA
tcccctgcagtggtcgt

SEQ ID NO: 165953 - DNA, 17 bp, synthetic construct
  source 1..17: mol_type = other DNA
gtcccctgcagtggtcg

SEQ ID NO: 165954 - DNA, 17 bp, synthetic construct
  source 1..17: mol_type = other DNA
cgtcccctgcagtggtc

SEQ ID NO: 165955 - DNA, 17 bp, synthetic construct
  source 1..17: mol_type = other DNA
acgtcccctgcagtggt

SEQ ID NO: 165956 - DNA, 17 bp, synthetic construct
  source 1..17: mol_type = other DNA
cacgtcccctgcagtgg

SEQ ID NO: 165957 - DNA, 17 bp, synthetic construct
  source 1..17: mol_type = other DNA
gcacgtcccctgcagtg

SEQ ID NO: 165958 - DNA, 17 bp, synthetic construct
  source 1..17: mol_type = other DNA
ggcacgtcccctgcagt

SEQ ID NO: 165959 - DNA, 17 bp, synthetic construct
  source 1..17: mol_type = other DNA
tggcacgtcccctgcag

SEQ ID NO: 165960 - DNA, 17 bp, synthetic construct
  source 1..17: mol_type = other DNA
gtggcacgtcccctgca

SEQ ID NO: 165961 - DNA, 17 bp, synthetic construct
  source 1..17: mol_type = other DNA
tgtggcacgtcccctgc

SEQ ID NO: 165962 - DNA, 17 bp, synthetic construct
  source 1..17: mol_type = other DNA
ttgtggcacgtcccctg

SEQ ID NO: 165963 - DNA, 17 bp, synthetic construct
  source 1..17: mol_type = other DNA
gttgtggcacgtcccct

SEQ ID NO: 165964 - DNA, 17 bp, synthetic construct
  source 1..17: mol_type = other DNA
ggttgtggcacgtcccc

SEQ ID NO: 165965 - DNA, 17 bp, synthetic construct
  source 1..17: mol_type = other DNA
gggttgtggcacgtccc

SEQ ID NO: 165966 - DNA, 17 bp, synthetic construct
  source 1..17: mol_type = other DNA
ggggttgtggcacgtcc

SEQ ID NO: 165967 - DNA, 17 bp, synthetic construct
  source 1..17: mol_type = other DNA
cggggttgtggcacgtc

SEQ ID NO: 165968 - DNA, 17 bp, synthetic construct
  source 1..17: mol_type = other DNA
gcggggttgtggcacgt

SEQ ID NO: 165969 - DNA, 17 bp, synthetic construct
  source 1..17: mol_type = other DNA
ggcggggttgtggcacg

SEQ ID NO: 165970 - DNA, 17 bp, synthetic construct
  source 1..17: mol_type = other DNA
tggcggggttgtggcac

SEQ ID NO: 165971 - DNA, 17 bp, synthetic construct
  source 1..17: mol_type = other DNA
gtggcggggttgtggca

SEQ ID NO: 165972 - DNA, 17 bp, synthetic construct
  source 1..17: mol_type = other DNA
ggtggcggggttgtggc

SEQ ID NO: 165973 - DNA, 17 bp, synthetic construct
  source 1..17: mol_type = other DNA
cggtggcggggttgtgg

SEQ ID NO: 165974 - DNA, 17 bp, synthetic construct
  source 1..17: mol_type = other DNA
tcggtggcggggttgtg

SEQ ID NO: 165975 - DNA, 17 bp, synthetic construct
  source 1..17: mol_type = other DNA
gtcggtggcggggttgt

SEQ ID NO: 165976 - DNA, 17 bp, synthetic construct
  source 1..17: mol_type = other DNA
ggtcggtggcggggttg

SEQ ID NO: 165977 - DNA, 17 bp, synthetic construct
  source 1..17: mol_type = other DNA
tggtcggtggcggggtt

SEQ ID NO: 165978 - DNA, 17 bp, synthetic construct
  source 1..17: mol_type = other DNA
gtggtcggtggcggggt

SEQ ID NO: 165979 - DNA, 17 bp, synthetic construct
  source 1..17: mol_type = other DNA
tgtggtcggtggcgggg

SEQ ID NO: 165980 - DNA, 17 bp, synthetic construct
  source 1..17: mol_type = other DNA
ctgtggtcggtggcggg

SEQ ID NO: 165981 - DNA, 17 bp, synthetic construct
  source 1..17: mol_type = other DNA
tctgtggtcggtggcgg

SEQ ID NO: 165982 - DNA, 17 bp, synthetic construct
  source 1..17: mol_type = other DNA
ctctgtggtcggtggcg

SEQ ID NO: 165983 - DNA, 17 bp, synthetic construct
  source 1..17: mol_type = other DNA
gctctgtggtcggtggc

SEQ ID NO: 165984 - DNA, 17 bp, synthetic construct
  source 1..17: mol_type = other DNA
agctctgtggtcggtgg

SEQ ID NO: 165985 - DNA, 17 bp, synthetic construct
  source 1..17: mol_type = other DNA
cagctctgtggtcggtg

SEQ ID NO: 165986 - DNA, 17 bp, synthetic construct
  source 1..17: mol_type = other DNA
ccagctctgtggtcggt

SEQ ID NO: 165987 - DNA, 17 bp, synthetic construct
  source 1..17: mol_type = other DNA
tccagctctgtggtcgg

SEQ ID NO: 165988 - DNA, 17 bp, synthetic construct
  source 1..17: mol_type = other DNA
ctccagctctgtggtcg

SEQ ID NO: 165989 - DNA, 17 bp, synthetic construct
  source 1..17: mol_type = other DNA
tctccagctctgtggtc

SEQ ID NO: 165990 - DNA, 17 bp, synthetic construct
  source 1..17: mol_type = other DNA
gtctccagctctgtggt

SEQ ID NO: 165991 - DNA, 17 bp, synthetic construct
  source 1..17: mol_type = other DNA
cgtctccagctctgtgg

SEQ ID NO: 165992 - DNA, 17 bp, synthetic construct
  source 1..17: mol_type = other DNA
ccgtctccagctctgtg

SEQ ID NO: 165993 - DNA, 17 bp, synthetic construct
  source 1..17: mol_type = other DNA
gccgtctccagctctgt

SEQ ID NO: 165994 - DNA, 17 bp, synthetic construct
  source 1..17: mol_type = other DNA
ggccgtctccagctctg

SEQ ID NO: 165995 - DNA, 17 bp, synthetic construct
  source 1..17: mol_type = other DNA
tggccgtctccagctct

SEQ ID NO: 165996 - DNA, 17 bp, synthetic construct
  source 1..17: mol_type = other DNA
gtggccgtctccagctc

SEQ ID NO: 165997 - DNA, 17 bp, synthetic construct
  source 1..17: mol_type = other DNA
ggtggccgtctccagct

SEQ ID NO: 165998 - DNA, 17 bp, synthetic construct
  source 1..17: mol_type = other DNA
tggtggccgtctccagc

SEQ ID NO: 165999 - DNA, 17 bp, synthetic construct
  source 1..17: mol_type = other DNA
gtggtggccgtctccag

SEQ ID NO: 166000 - DNA, 17 bp, synthetic construct
  source 1..17: mol_type = other DNA
ggtggtggccgtctcca

SEQ ID NO: 166001 - DNA, 17 bp, synthetic construct
  source 1..17: mol_type = other DNA
tggtggtggccgtctcc

SEQ ID NO: 166002 - DNA, 17 bp, synthetic construct
  source 1..17: mol_type = other DNA
gtggtggtggccgtctc

SEQ ID NO: 166003 - DNA, 17 bp, synthetic construct
  source 1..17: mol_type = other DNA
ggtggtggtggccgtct

SEQ ID NO: 166004 - DNA, 17 bp, synthetic construct
  source 1..17: mol_type = other DNA
tggtggtggtggccgtc

SEQ ID NO: 166005 - DNA, 17 bp, synthetic construct
  source 1..17: mol_type = other DNA
gtggtggtggtggccgt

SEQ ID NO: 166006 - DNA, 17 bp, synthetic construct
  source 1..17: mol_type = other DNA
ggtggtggtggtggccg

SEQ ID NO: 166007 - DNA, 17 bp, synthetic construct
  source 1..17: mol_type = other DNA
tggtggtggtggtggcc

SEQ ID NO: 166008 - DNA, 17 bp, synthetic construct
  source 1..17: mol_type = other DNA
gtggtggtggtggtggc

SEQ ID NO: 166009 - DNA, 17 bp, synthetic construct
  source 1..17: mol_type = other DNA
ggtggtggtggtggtgg

SEQ ID NO: 166010 - DNA, 17 bp, synthetic construct
  source 1..17: mol_type = other DNA
gggtggtggtggtggtg

SEQ ID NO: 166011 - DNA, 17 bp, synthetic construct
  source 1..17: mol_type = other DNA
tgggtggtggtggtggt

SEQ ID NO: 166012 - DNA, 17 bp, synthetic construct
  source 1..17: mol_type = other DNA
ctgggtggtggtggtgg

SEQ ID NO: 166013 - DNA, 17 bp, synthetic construct
  source 1..17: mol_type = other DNA
cctgggtggtggtggtg

SEQ ID NO: 166014 - DNA, 17 bp, synthetic construct
  source 1..17: mol_type = other DNA
gcctgggtggtggtggt

SEQ ID NO: 166015 - DNA, 17 bp, synthetic construct
  source 1..17: mol_type = other DNA
ggcctgggtggtggtgg

SEQ ID NO: 166016 - DNA, 17 bp, synthetic construct
  source 1..17: mol_type = other DNA
gggcctgggtggtggtg

SEQ ID NO: 166017 - DNA, 17 bp, synthetic construct
  source 1..17: mol_type = other DNA
agggcctgggtggtggt

SEQ ID NO: 166018 - DNA, 17 bp, synthetic construct
  source 1..17: mol_type = other DNA
cagggcctgggtggtgg

SEQ ID NO: 166019 - DNA, 17 bp, synthetic construct
  source 1..17: mol_type = other DNA
acagggcctgggtggtg

SEQ ID NO: 166020 - DNA, 17 bp, synthetic construct
  source 1..17: mol_type = other DNA
aacagggcctgggtggt

SEQ ID NO: 166021 - DNA, 17 bp, synthetic construct
  source 1..17: mol_type = other DNA
gaacagggcctgggtgg

SEQ ID NO: 166022 - DNA, 17 bp, synthetic construct
  source 1..17: mol_type = other DNA
agaacagggcctgggtg

SEQ ID NO: 166023 - DNA, 17 bp, synthetic construct
  source 1..17: mol_type = other DNA
gagaacagggcctgggt

SEQ ID NO: 166024 - DNA, 17 bp, synthetic construct
  source 1..17: mol_type = other DNA
tgagaacagggcctggg

SEQ ID NO: 166025 - DNA, 17 bp, synthetic construct
  source 1..17: mol_type = other DNA
ttgagaacagggcctgg

SEQ ID NO: 166026 - DNA, 17 bp, synthetic construct
  source 1..17: mol_type = other DNA
gttgagaacagggcctg

SEQ ID NO: 166027 - DNA, 17 bp, synthetic construct
  source 1..17: mol_type = other DNA
cgttgagaacagggcct

SEQ ID NO: 166028 - DNA, 17 bp, synthetic construct
  source 1..17: mol_type = other DNA
gcgttgagaacagggcc

SEQ ID NO: 166029 - DNA, 17 bp, synthetic construct
  source 1..17: mol_type = other DNA
ggcgttgagaacagggc

SEQ ID NO: 166030 - DNA, 17 bp, synthetic construct
  source 1..17: mol_type = other DNA
cggcgttgagaacaggg

SEQ ID NO: 166031 - DNA, 17 bp, synthetic construct
  source 1..17: mol_type = other DNA
gcggcgttgagaacagg

SEQ ID NO: 166032 - DNA, 17 bp, synthetic construct
  source 1..17: mol_type = other DNA
tgcggcgttgagaacag

SEQ ID NO: 166033 - DNA, 17 bp, synthetic construct
  source 1..17: mol_type = other DNA
ctgcggcgttgagaaca

SEQ ID NO: 166034 - DNA, 17 bp, synthetic construct
  source 1..17: mol_type = other DNA
gctgcggcgttgagaac

SEQ ID NO: 166035 - DNA, 17 bp, synthetic construct
  source 1..17: mol_type = other DNA
ggctgcggcgttgagaa

SEQ ID NO: 166036 - DNA, 17 bp, synthetic construct
  source 1..17: mol_type = other DNA
aggctgcggcgttgaga

SEQ ID NO: 166037 - DNA, 17 bp, synthetic construct
  source 1..17: mol_type = other DNA
taggctgcggcgttgag

SEQ ID NO: 166038 - DNA, 17 bp, synthetic construct
  source 1..17: mol_type = other DNA
gtaggctgcggcgttga

SEQ ID NO: 166039 - DNA, 17 bp, synthetic construct
  source 1..17: mol_type = other DNA
cgtaggctgcggcgttg

SEQ ID NO: 166040 - DNA, 17 bp, synthetic construct
  source 1..17: mol_type = other DNA
tcgtaggctgcggcgtt

SEQ ID NO: 166041 - DNA, 17 bp, synthetic construct
  source 1..17: mol_type = other DNA
ctcgtaggctgcggcgt

SEQ ID NO: 166042 - DNA, 17 bp, synthetic construct
  source 1..17: mol_type = other DNA
actcgtaggctgcggcg

SEQ ID NO: 166043 - DNA, 17 bp, synthetic construct
  source 1..17: mol_type = other DNA
tactcgtaggctgcggc

SEQ ID NO: 166044 - DNA, 17 bp, synthetic construct
  source 1..17: mol_type = other DNA
ctactcgtaggctgcgg

SEQ ID NO: 166045 - DNA, 17 bp, synthetic construct
  source 1..17: mol_type = other DNA
gctactcgtaggctgcg

SEQ ID NO: 166046 - DNA, 17 bp, synthetic construct
  source 1..17: mol_type = other DNA
ggctactcgtaggctgc

SEQ ID NO: 166047 - DNA, 17 bp, synthetic construct
  source 1..17: mol_type = other DNA
gggctactcgtaggctg

SEQ ID NO: 166048 - DNA, 17 bp, synthetic construct
  source 1..17: mol_type = other DNA
cgggctactcgtaggct

SEQ ID NO: 166049 - DNA, 17 bp, synthetic construct
  source 1..17: mol_type = other DNA
ccgggctactcgtaggc

SEQ ID NO: 166050 - DNA, 17 bp, synthetic construct
  source 1..17: mol_type = other DNA
cccgggctactcgtagg

SEQ ID NO: 166051 - DNA, 17 bp, synthetic construct
  source 1..17: mol_type = other DNA
ccccgggctactcgtag

SEQ ID NO: 166052 - DNA, 17 bp, synthetic construct
  source 1..17: mol_type = other DNA
gccccgggctactcgta

SEQ ID NO: 166053 - DNA, 17 bp, synthetic construct
  source 1..17: mol_type = other DNA
agccccgggctactcgt

SEQ ID NO: 166054 - DNA, 17 bp, synthetic construct
  source 1..17: mol_type = other DNA
cagccccgggctactcg

SEQ ID NO: 166055 - DNA, 17 bp, synthetic construct
  source 1..17: mol_type = other DNA
tcagccccgggctactc

SEQ ID NO: 166056 - DNA, 17 bp, synthetic construct
  source 1..17: mol_type = other DNA
gtcagccccgggctact

SEQ ID NO: 166057 - DNA, 17 bp, synthetic construct
  source 1..17: mol_type = other DNA
ggtcagccccgggctac

SEQ ID NO: 166058 - DNA, 17 bp, synthetic construct
  source 1..17: mol_type = other DNA
tggtcagccccgggcta

SEQ ID NO: 166059 - DNA, 17 bp, synthetic construct
  source 1..17: mol_type = other DNA
ctggtcagccccgggct

SEQ ID NO: 166060 - DNA, 17 bp, synthetic construct
  source 1..17: mol_type = other DNA
cctggtcagccccgggc

SEQ ID NO: 166061 - DNA, 17 bp, synthetic construct
  source 1..17: mol_type = other DNA
ccctggtcagccccggg

SEQ ID NO: 166062 - DNA, 17 bp, synthetic construct
  source 1..17: mol_type = other DNA
gccctggtcagccccgg

SEQ ID NO: 166063 - DNA, 17 bp, synthetic construct
  source 1..17: mol_type = other DNA
agccctggtcagccccg

SEQ ID NO: 166064 - DNA, 17 bp, synthetic construct
  source 1..17: mol_type = other DNA
gagccctggtcagcccc

SEQ ID NO: 166065 - DNA, 17 bp, synthetic construct
  source 1..17: mol_type = other DNA
ggagccctggtcagccc

SEQ ID NO: 166066 - DNA, 17 bp, synthetic construct
  source 1..17: mol_type = other DNA
gggagccctggtcagcc

SEQ ID NO: 166067 - DNA, 17 bp, synthetic construct
  source 1..17: mol_type = other DNA
ggggagccctggtcagc

SEQ ID NO: 166068 - DNA, 17 bp, synthetic construct
  source 1..17: mol_type = other DNA
gggggagccctggtcag

SEQ ID NO: 166069 - DNA, 17 bp, synthetic construct
  source 1..17: mol_type = other DNA
cgggggagccctggtca

SEQ ID NO: 166070 - DNA, 17 bp, synthetic construct
  source 1..17: mol_type = other DNA
ccgggggagccctggtc

SEQ ID NO: 166071 - DNA, 17 bp, synthetic construct
  source 1..17: mol_type = other DNA
gccgggggagccctggt

SEQ ID NO: 166072 - DNA, 17 bp, synthetic construct
  source 1..17: mol_type = other DNA
ggccgggggagccctgg

SEQ ID NO: 166073 - DNA, 17 bp, synthetic construct
  source 1..17: mol_type = other DNA
tggccgggggagccctg

SEQ ID NO: 166074 - DNA, 17 bp, synthetic construct
  source 1..17: mol_type = other DNA
ctggccgggggagccct

SEQ ID NO: 166075 - DNA, 17 bp, synthetic construct
  source 1..17: mol_type = other DNA
gctggccgggggagccc

SEQ ID NO: 166076 - DNA, 17 bp, synthetic construct
  source 1..17: mol_type = other DNA
tgctggccgggggagcc

SEQ ID NO: 166077 - DNA, 17 bp, synthetic construct
  source 1..17: mol_type = other DNA
gtgctggccgggggagc

SEQ ID NO: 166078 - DNA, 17 bp, synthetic construct
  source 1..17: mol_type = other DNA
ggtgctggccgggggag

SEQ ID NO: 166079 - DNA, 17 bp, synthetic construct
  source 1..17: mol_type = other DNA
tggtgctggccggggga

SEQ ID NO: 166080 - DNA, 17 bp, synthetic construct
  source 1..17: mol_type = other DNA
gtggtgctggccggggg

SEQ ID NO: 166081 - DNA, 17 bp, synthetic construct
  source 1..17: mol_type = other DNA
tgtggtgctggccgggg

SEQ ID NO: 166082 - DNA, 17 bp, synthetic construct
  source 1..17: mol_type = other DNA
ctgtggtgctggccggg

SEQ ID NO: 166083 - DNA, 17 bp, synthetic construct
  source 1..17: mol_type = other DNA
gctgtggtgctggccgg

SEQ ID NO: 166084 - DNA, 17 bp, synthetic construct
  source 1..17: mol_type = other DNA
tgctgtggtgctggccg

SEQ ID NO: 166085 - DNA, 17 bp, synthetic construct
  source 1..17: mol_type = other DNA
ctgctgtggtgctggcc

SEQ ID NO: 166086 - DNA, 17 bp, synthetic construct
  source 1..17: mol_type = other DNA
actgctgtggtgctggc

SEQ ID NO: 166087 - DNA, 17 bp, synthetic construct
  source 1..17: mol_type = other DNA
gactgctgtggtgctgg

SEQ ID NO: 166088 - DNA, 17 bp, synthetic construct
  source 1..17: mol_type = other DNA
ggactgctgtggtgctg

SEQ ID NO: 166089 - DNA, 17 bp, synthetic construct
  source 1..17: mol_type = other DNA
gggactgctgtggtgct

SEQ ID NO: 166090 - DNA, 17 bp, synthetic construct
  source 1..17: mol_type = other DNA
ggggactgctgtggtgc

SEQ ID NO: 166091 - DNA, 17 bp, synthetic construct
  source 1..17: mol_type = other DNA
tggggactgctgtggtg

SEQ ID NO: 166092 - DNA, 17 bp, synthetic construct
  source 1..17: mol_type = other DNA
gtggggactgctgtggt

SEQ ID NO: 166093 - DNA, 17 bp, synthetic construct
  source 1..17: mol_type = other DNA
ggtggggactgctgtgg

SEQ ID NO: 166094 - DNA, 17 bp, synthetic construct
  source 1..17: mol_type = other DNA
gggtggggactgctgtg

SEQ ID NO: 166095 - DNA, 17 bp, synthetic construct
  source 1..17: mol_type = other DNA
agggtggggactgctgt

SEQ ID NO: 166096 - DNA, 17 bp, synthetic construct
  source 1..17: mol_type = other DNA
gagggtggggactgctg

SEQ ID NO: 166097 - DNA, 17 bp, synthetic construct
  source 1..17: mol_type = other DNA
agagggtggggactgct

SEQ ID NO: 166098 - DNA, 17 bp, synthetic construct
  source 1..17: mol_type = other DNA
gagagggtggggactgc

SEQ ID NO: 166099 - DNA, 17 bp, synthetic construct
  source 1..17: mol_type = other DNA
tgagagggtggggactg

SEQ ID NO: 166100 - DNA, 17 bp, synthetic construct
  source 1..17: mol_type = other DNA
ctgagagggtggggact

SEQ ID NO: 166101 - DNA, 17 bp, synthetic construct
  source 1..17: mol_type = other DNA
tctgagagggtggggac

SEQ ID NO: 166102 - DNA, 17 bp, synthetic construct
  source 1..17: mol_type = other DNA
ttctgagagggtgggga

SEQ ID NO: 166103 - DNA, 17 bp, synthetic construct
  source 1..17: mol_type = other DNA
cttctgagagggtgggg

SEQ ID NO: 166104 - DNA, 17 bp, synthetic construct
  source 1..17: mol_type = other DNA
ccttctgagagggtggg

SEQ ID NO: 166105 - DNA, 17 bp, synthetic construct
  source 1..17: mol_type = other DNA
tccttctgagagggtgg

SEQ ID NO: 166106 - DNA, 17 bp, synthetic construct
  source 1..17: mol_type = other DNA
gtccttctgagagggtg

SEQ ID NO: 166107 - DNA, 17 bp, synthetic construct
  source 1..17: mol_type = other DNA
agtccttctgagagggt

SEQ ID NO: 166108 - DNA, 17 bp, synthetic construct
  source 1..17: mol_type = other DNA
cagtccttctgagaggg

SEQ ID NO: 166109 - DNA, 17 bp, synthetic construct
  source 1..17: mol_type = other DNA
tcagtccttctgagagg

SEQ ID NO: 166110 - DNA, 17 bp, synthetic construct
  source 1..17: mol_type = other DNA
gtcagtccttctgagag

SEQ ID NO: 166111 - DNA, 17 bp, synthetic construct
  source 1..17: mol_type = other DNA
tgtcagtccttctgaga

SEQ ID NO: 166112 - DNA, 17 bp, synthetic construct
  source 1..17: mol_type = other DNA
atgtcagtccttctgag

SEQ ID NO: 166113 - DNA, 17 bp, synthetic construct
  source 1..17: mol_type = other DNA
gatgtcagtccttctga

SEQ ID NO: 166114 - DNA, 17 bp, synthetic construct
  source 1..17: mol_type = other DNA
ggatgtcagtccttctg

SEQ ID NO: 166115 - DNA, 17 bp, synthetic construct
  source 1..17: mol_type = other DNA
gggatgtcagtccttct

SEQ ID NO: 166116 - DNA, 17 bp, synthetic construct
  source 1..17: mol_type = other DNA
ggggatgtcagtccttc

SEQ ID NO: 166117 - DNA, 17 bp, synthetic construct
  source 1..17: mol_type = other DNA
gggggatgtcagtcctt

SEQ ID NO: 166118 - DNA, 17 bp, synthetic construct
  source 1..17: mol_type = other DNA
tgggggatgtcagtcct

SEQ ID NO: 166119 - DNA, 17 bp, synthetic construct
  source 1..17: mol_type = other DNA
ctgggggatgtcagtcc

SEQ ID NO: 166120 - DNA, 17 bp, synthetic construct
  source 1..17: mol_type = other DNA
tctgggggatgtcagtc

SEQ ID NO: 166121 - DNA, 17 bp, synthetic construct
  source 1..17: mol_type = other DNA
atctgggggatgtcagt

SEQ ID NO: 166122 - DNA, 17 bp, synthetic construct
  source 1..17: mol_type = other DNA
tatctgggggatgtcag

SEQ ID NO: 166123 - DNA, 17 bp, synthetic construct
  source 1..17: mol_type = other DNA
gtatctgggggatgtca

SEQ ID NO: 166124 - DNA, 17 bp, synthetic construct
  source 1..17: mol_type = other DNA
tgtatctgggggatgtc

SEQ ID NO: 166125 - DNA, 17 bp, synthetic construct
  source 1..17: mol_type = other DNA
gtgtatctgggggatgt

SEQ ID NO: 166126 - DNA, 17 bp, synthetic construct
  source 1..17: mol_type = other DNA
tgtgtatctgggggatg

SEQ ID NO: 166127 - DNA, 17 bp, synthetic construct
  source 1..17: mol_type = other DNA
ttgtgtatctgggggat

SEQ ID NO: 166128 - DNA, 17 bp, synthetic construct
  source 1..17: mol_type = other DNA
cttgtgtatctggggga

SEQ ID NO: 166129 - DNA, 17 bp, synthetic construct
  source 1..17: mol_type = other DNA
gcttgtgtatctggggg

SEQ ID NO: 166130 - DNA, 17 bp, synthetic construct
  source 1..17: mol_type = other DNA
tgcttgtgtatctgggg

SEQ ID NO: 166131 - DNA, 17 bp, synthetic construct
  source 1..17: mol_type = other DNA
gtgcttgtgtatctggg

SEQ ID NO: 166132 - DNA, 17 bp, synthetic construct
  source 1..17: mol_type = other DNA
ggtgcttgtgtatctgg

SEQ ID NO: 166133 - DNA, 17 bp, synthetic construct
  source 1..17: mol_type = other DNA
gggtgcttgtgtatctg

SEQ ID NO: 166134 - DNA, 17 bp, synthetic construct
  source 1..17: mol_type = other DNA
agggtgcttgtgtatct

SEQ ID NO: 166135 - DNA, 17 bp, synthetic construct
  source 1..17: mol_type = other DNA
aagggtgcttgtgtatc

SEQ ID NO: 166136 - DNA, 17 bp, synthetic construct
  source 1..17: mol_type = other DNA
caagggtgcttgtgtat

SEQ ID NO: 166137 - DNA, 17 bp, synthetic construct
  source 1..17: mol_type = other DNA
ccaagggtgcttgtgta

SEQ ID NO: 166138 - DNA, 17 bp, synthetic construct
  source 1..17: mol_type = other DNA
accaagggtgcttgtgt

SEQ ID NO: 166139 - DNA, 17 bp, synthetic construct
  source 1..17: mol_type = other DNA
taccaagggtgcttgtg

SEQ ID NO: 166140 - DNA, 17 bp, synthetic construct
  source 1..17: mol_type = other DNA
gtaccaagggtgcttgt

SEQ ID NO: 166141 - DNA, 17 bp, synthetic construct
  source 1..17: mol_type = other DNA
tgtaccaagggtgcttg

SEQ ID NO: 166142 - DNA, 17 bp, synthetic construct
  source 1..17: mol_type = other DNA
ctgtaccaagggtgctt

SEQ ID NO: 166143 - DNA, 17 bp, synthetic construct
  source 1..17: mol_type = other DNA
gctgtaccaagggtgct

SEQ ID NO: 166144 - DNA, 17 bp, synthetic construct
  source 1..17: mol_type = other DNA
ggctgtaccaagggtgc

SEQ ID NO: 166145 - DNA, 17 bp, synthetic construct
  source 1..17: mol_type = other DNA
tggctgtaccaagggtg

SEQ ID NO: 166146 - DNA, 17 bp, synthetic construct
  source 1..17: mol_type = other DNA
gtggctgtaccaagggt

SEQ ID NO: 166147 - DNA, 17 bp, synthetic construct
  source 1..17: mol_type = other DNA
ggtggctgtaccaaggg

SEQ ID NO: 166148 - DNA, 17 bp, synthetic construct
  source 1..17: mol_type = other DNA
tggtggctgtaccaagg

SEQ ID NO: 166149 - DNA, 17 bp, synthetic construct
  source 1..17: mol_type = other DNA
gtggtggctgtaccaag

SEQ ID NO: 166150 - DNA, 17 bp, synthetic construct
  source 1..17: mol_type = other DNA
cgtggtggctgtaccaa

SEQ ID NO: 166151 - DNA, 17 bp, synthetic construct
  source 1..17: mol_type = other DNA
ccgtggtggctgtacca

SEQ ID NO: 166152 - DNA, 17 bp, synthetic construct
  source 1..17: mol_type = other DNA
cccgtggtggctgtacc

SEQ ID NO: 166153 - DNA, 17 bp, synthetic construct
  source 1..17: mol_type = other DNA
tcccgtggtggctgtac

SEQ ID NO: 166154 - DNA, 17 bp, synthetic construct
  source 1..17: mol_type = other DNA
ctcccgtggtggctgta

SEQ ID NO: 166155 - DNA, 17 bp, synthetic construct
  source 1..17: mol_type = other DNA
cctcccgtggtggctgt

SEQ ID NO: 166156 - DNA, 17 bp, synthetic construct
  source 1..17: mol_type = other DNA
gcctcccgtggtggctg

SEQ ID NO: 166157 - DNA, 17 bp, synthetic construct
  source 1..17: mol_type = other DNA
ggcctcccgtggtggct

SEQ ID NO: 166158 - DNA, 17 bp, synthetic construct
  source 1..17: mol_type = other DNA
gggcctcccgtggtggc

SEQ ID NO: 166159 - DNA, 17 bp, synthetic construct
  source 1..17: mol_type = other DNA
ggggcctcccgtggtgg

SEQ ID NO: 166160 - DNA, 17 bp, synthetic construct
  source 1..17: mol_type = other DNA
tggggcctcccgtggtg

SEQ ID NO: 166161 - DNA, 17 bp, synthetic construct
  source 1..17: mol_type = other DNA
gtggggcctcccgtggt

SEQ ID NO: 166162 - DNA, 17 bp, synthetic construct
  source 1..17: mol_type = other DNA
cgtggggcctcccgtgg

SEQ ID NO: 166163 - DNA, 17 bp, synthetic construct
  source 1..17: mol_type = other DNA
tcgtggggcctcccgtg

SEQ ID NO: 166164 - DNA, 17 bp, synthetic construct
  source 1..17: mol_type = other DNA
gtcgtggggcctcccgt

SEQ ID NO: 166165 - DNA, 17 bp, synthetic construct
  source 1..17: mol_type = other DNA
cgtcgtggggcctcccg

SEQ ID NO: 166166 - DNA, 17 bp, synthetic construct
  source 1..17: mol_type = other DNA
gcgtcgtggggcctccc

SEQ ID NO: 166167 - DNA, 17 bp, synthetic construct
  source 1..17: mol_type = other DNA
ggcgtcgtggggcctcc

SEQ ID NO: 166168 - DNA, 17 bp, synthetic construct
  source 1..17: mol_type = other DNA
aggcgtcgtggggcctc

SEQ ID NO: 166169 - DNA, 17 bp, synthetic construct
  source 1..17: mol_type = other DNA
caggcgtcgtggggcct

SEQ ID NO: 166170 - DNA, 17 bp, synthetic construct
  source 1..17: mol_type = other DNA
gcaggcgtcgtggggcc

SEQ ID NO: 166171 - DNA, 17 bp, synthetic construct
  source 1..17: mol_type = other DNA
tgcaggcgtcgtggggc

SEQ ID NO: 166172 - DNA, 17 bp, synthetic construct
  source 1..17: mol_type = other DNA
ctgcaggcgtcgtgggg

SEQ ID NO: 166173 - DNA, 17 bp, synthetic construct
  source 1..17: mol_type = other DNA
cctgcaggcgtcgtggg

SEQ ID NO: 166174 - DNA, 17 bp, synthetic construct
  source 1..17: mol_type = other DNA
gcctgcaggcgtcgtgg

SEQ ID NO: 166175 - DNA, 17 bp, synthetic construct
  source 1..17: mol_type = other DNA
agcctgcaggcgtcgtg

SEQ ID NO: 166176 - DNA, 17 bp, synthetic construct
  source 1..17: mol_type = other DNA
gagcctgcaggcgtcgt

SEQ ID NO: 166177 - DNA, 17 bp, synthetic construct
  source 1..17: mol_type = other DNA
ggagcctgcaggcgtcg

SEQ ID NO: 166178 - DNA, 17 bp, synthetic construct
  source 1..17: mol_type = other DNA
tggagcctgcaggcgtc

SEQ ID NO: 166179 - DNA, 17 bp, synthetic construct
  source 1..17: mol_type = other DNA
gtggagcctgcaggcgt

SEQ ID NO: 166180 - DNA, 17 bp, synthetic construct
  source 1..17: mol_type = other DNA
tgtggagcctgcaggcg

SEQ ID NO: 166181 - DNA, 17 bp, synthetic construct
  source 1..17: mol_type = other DNA
ctgtggagcctgcaggc

SEQ ID NO: 166182 - DNA, 17 bp, synthetic construct
  source 1..17: mol_type = other DNA
tctgtggagcctgcagg

SEQ ID NO: 166183 - DNA, 17 bp, synthetic construct
  source 1..17: mol_type = other DNA
ttctgtggagcctgcag

SEQ ID NO: 166184 - DNA, 17 bp, synthetic construct
  source 1..17: mol_type = other DNA
gttctgtggagcctgca

SEQ ID NO: 166185 - DNA, 17 bp, synthetic construct
  source 1..17: mol_type = other DNA
ggttctgtggagcctgc

SEQ ID NO: 166186 - DNA, 17 bp, synthetic construct
  source 1..17: mol_type = other DNA
gggttctgtggagcctg

SEQ ID NO: 166187 - DNA, 17 bp, synthetic construct
  source 1..17: mol_type = other DNA
tgggttctgtggagcct

SEQ ID NO: 166188 - DNA, 17 bp, synthetic construct
  source 1..17: mol_type = other DNA
gtgggttctgtggagcc

SEQ ID NO: 166189 - DNA, 17 bp, synthetic construct
  source 1..17: mol_type = other DNA
agtgggttctgtggagc

SEQ ID NO: 166190 - DNA, 17 bp, synthetic construct
  source 1..17: mol_type = other DNA
cagtgggttctgtggag

SEQ ID NO: 166191 - DNA, 17 bp, synthetic construct
  source 1..17: mol_type = other DNA
acagtgggttctgtgga

SEQ ID NO: 166192 - DNA, 17 bp, synthetic construct
  source 1..17: mol_type = other DNA
gacagtgggttctgtgg

SEQ ID NO: 166193 - DNA, 17 bp, synthetic construct
  source 1..17: mol_type = other DNA
ggacagtgggttctgtg

SEQ ID NO: 166194 - DNA, 17 bp, synthetic construct
  source 1..17: mol_type = other DNA
gggacagtgggttctgt

SEQ ID NO: 166195 - DNA, 17 bp, synthetic construct
  source 1..17: mol_type = other DNA
tgggacagtgggttctg

SEQ ID NO: 166196 - DNA, 17 bp, synthetic construct
  source 1..17: mol_type = other DNA
ctgggacagtgggttct

SEQ ID NO: 166197 - DNA, 17 bp, synthetic construct
  source 1..17: mol_type = other DNA
cctgggacagtgggttc

SEQ ID NO: 166198 - DNA, 17 bp, synthetic construct
  source 1..17: mol_type = other DNA
ccctgggacagtgggtt

SEQ ID NO: 166199 - DNA, 17 bp, synthetic construct
  source 1..17: mol_type = other DNA
cccctgggacagtgggt

SEQ ID NO: 166200 - DNA, 17 bp, synthetic construct
  source 1..17: mol_type = other DNA
acccctgggacagtggg

SEQ ID NO: 166201 - DNA, 17 bp, synthetic construct
  source 1..17: mol_type = other DNA
cacccctgggacagtgg

SEQ ID NO: 166202 - DNA, 17 bp, synthetic construct
  source 1..17: mol_type = other DNA
ccacccctgggacagtg

SEQ ID NO: 166203 - DNA, 17 bp, synthetic construct
  source 1..17: mol_type = other DNA
gccacccctgggacagt

SEQ ID NO: 166204 - DNA, 17 bp, synthetic construct
  source 1..17: mol_type = other DNA
ggccacccctgggacag

SEQ ID NO: 166205 - DNA, 17 bp, synthetic construct
  source 1..17: mol_type = other DNA
tggccacccctgggaca

SEQ ID NO: 166206 - DNA, 17 bp, synthetic construct
  source 1..17: mol_type = other DNA
gtggccacccctgggac

SEQ ID NO: 166207 - DNA, 17 bp, synthetic construct
  source 1..17: mol_type = other DNA
tgtggccacccctggga

SEQ ID NO: 166208 - DNA, 17 bp, synthetic construct
  source 1..17: mol_type = other DNA
atgtggccacccctggg

SEQ ID NO: 166209 - DNA, 17 bp, synthetic construct
  source 1..17: mol_type = other DNA
gatgtggccacccctgg

SEQ ID NO: 166210 - DNA, 17 bp, synthetic construct
  source 1..17: mol_type = other DNA
ggatgtggccacccctg

SEQ ID NO: 166211 - DNA, 17 bp, synthetic construct
  source 1..17: mol_type = other DNA
tggatgtggccacccct

SEQ ID NO: 166212 - DNA, 17 bp, synthetic construct
  source 1..17: mol_type = other DNA
gtggatgtggccacccc

SEQ ID NO: 166213 - DNA, 17 bp, synthetic construct
  source 1..17: mol_type = other DNA
ggtggatgtggccaccc

SEQ ID NO: 166214 - DNA, 17 bp, synthetic construct
  source 1..17: mol_type = other DNA
gggtggatgtggccacc

SEQ ID NO: 166215 - DNA, 17 bp, synthetic construct
  source 1..17: mol_type = other DNA
agggtggatgtggccac

SEQ ID NO: 166216 - DNA, 17 bp, synthetic construct
  source 1..17: mol_type = other DNA
aagggtggatgtggcca

SEQ ID NO: 166217 - DNA, 17 bp, synthetic construct
  source 1..17: mol_type = other DNA
gaagggtggatgtggcc

SEQ ID NO: 166218 - DNA, 17 bp, synthetic construct
  source 1..17: mol_type = other DNA
ggaagggtggatgtggc

SEQ ID NO: 166219 - DNA, 17 bp, synthetic construct
  source 1..17: mol_type = other DNA
tggaagggtggatgtgg

SEQ ID NO: 166220 - DNA, 17 bp, synthetic construct
  source 1..17: mol_type = other DNA
ttggaagggtggatgtg

SEQ ID NO: 166221 - DNA, 17 bp, synthetic construct
  source 1..17: mol_type = other DNA
gttggaagggtggatgt

SEQ ID NO: 166222 - DNA, 17 bp, synthetic construct
  source 1..17: mol_type = other DNA
tgttggaagggtggatg

SEQ ID NO: 166223 - DNA, 17 bp, synthetic construct
  source 1..17: mol_type = other DNA
gtgttggaagggtggat

SEQ ID NO: 166224 - DNA, 17 bp, synthetic construct
  source 1..17: mol_type = other DNA
cgtgttggaagggtgga

SEQ ID NO: 166225 - DNA, 17 bp, synthetic construct
  source 1..17: mol_type = other DNA
gcgtgttggaagggtgg

SEQ ID NO: 166226 - DNA, 17 bp, synthetic construct
  source 1..17: mol_type = other DNA
agcgtgttggaagggtg

SEQ ID NO: 166227 - DNA, 17 bp, synthetic construct
  source 1..17: mol_type = other DNA
gagcgtgttggaagggt

SEQ ID NO: 166228 - DNA, 17 bp, synthetic construct
  source 1..17: mol_type = other DNA
tgagcgtgttggaaggg

SEQ ID NO: 166229 - DNA, 17 bp, synthetic construct
  source 1..17: mol_type = other DNA
ctgagcgtgttggaagg

SEQ ID NO: 166230 - DNA, 17 bp, synthetic construct
  source 1..17: mol_type = other DNA
gctgagcgtgttggaag

SEQ ID NO: 166231 - DNA, 17 bp, synthetic construct
  source 1..17: mol_type = other DNA
ggctgagcgtgttggaa

SEQ ID NO: 166232 - DNA, 17 bp, synthetic construct
  source 1..17: mol_type = other DNA
gggctgagcgtgttgga

SEQ ID NO: 166233 - DNA, 17 bp, synthetic construct
  source 1..17: mol_type = other DNA
agggctgagcgtgttgg

SEQ ID NO: 166234 - DNA, 17 bp, synthetic construct
  source 1..17: mol_type = other DNA
aagggctgagcgtgttg

SEQ ID NO: 166235 - DNA, 17 bp, synthetic construct
  source 1..17: mol_type = other DNA
gaagggctgagcgtgtt

SEQ ID NO: 166236 - DNA, 17 bp, synthetic construct
  source 1..17: mol_type = other DNA
ggaagggctgagcgtgt

SEQ ID NO: 166237 - DNA, 17 bp, synthetic construct
  source 1..17: mol_type = other DNA
tggaagggctgagcgtg

SEQ ID NO: 166238 - DNA, 17 bp, synthetic construct
  source 1..17: mol_type = other DNA
ctggaagggctgagcgt

SEQ ID NO: 166239 - DNA, 17 bp, synthetic construct
  source 1..17: mol_type = other DNA
cctggaagggctgagcg

SEQ ID NO: 166240 - DNA, 17 bp, synthetic construct
  source 1..17: mol_type = other DNA
ccctggaagggctgagc

SEQ ID NO: 166241 - DNA, 17 bp, synthetic construct
  source 1..17: mol_type = other DNA
tccctggaagggctgag

SEQ ID NO: 166242 - DNA, 17 bp, synthetic construct
  source 1..17: mol_type = other DNA
gtccctggaagggctga

SEQ ID NO: 166243 - DNA, 17 bp, synthetic construct
  source 1..17: mol_type = other DNA
cgtccctggaagggctg

SEQ ID NO: 166244 - DNA, 17 bp, synthetic construct
  source 1..17: mol_type = other DNA
tcgtccctggaagggct

SEQ ID NO: 166245 - DNA, 17 bp, synthetic construct
  source 1..17: mol_type = other DNA
gtcgtccctggaagggc

SEQ ID NO: 166246 - DNA, 17 bp, synthetic construct
  source 1..17: mol_type = other DNA
cgtcgtccctggaaggg

SEQ ID NO: 166247 - DNA, 17 bp, synthetic construct
  source 1..17: mol_type = other DNA
ccgtcgtccctggaagg

SEQ ID NO: 166248 - DNA, 17 bp, synthetic construct
  source 1..17: mol_type = other DNA
cccgtcgtccctggaag

SEQ ID NO: 166249 - DNA, 17 bp, synthetic construct
  source 1..17: mol_type = other DNA
ccccgtcgtccctggaa

SEQ ID NO: 166250 - DNA, 17 bp, synthetic construct
  source 1..17: mol_type = other DNA
tccccgtcgtccctgga

SEQ ID NO: 166251 - DNA, 17 bp, synthetic construct
  source 1..17: mol_type = other DNA
ctccccgtcgtccctgg

SEQ ID NO: 166252 - DNA, 17 bp, synthetic construct
  source 1..17: mol_type = other DNA
gctccccgtcgtccctg

SEQ ID NO: 166253 - DNA, 17 bp, synthetic construct
  source 1..17: mol_type = other DNA
agctccccgtcgtccct

SEQ ID NO: 166254 - DNA, 17 bp, synthetic construct
  source 1..17: mol_type = other DNA
aagctccccgtcgtccc

SEQ ID NO: 166255 - DNA, 17 bp, synthetic construct
  source 1..17: mol_type = other DNA
caagctccccgtcgtcc

SEQ ID NO: 166256 - DNA, 17 bp, synthetic construct
  source 1..17: mol_type = other DNA
ccaagctccccgtcgtc

SEQ ID NO: 166257 - DNA, 17 bp, synthetic construct
  source 1..17: mol_type = other DNA
cccaagctccccgtcgt

SEQ ID NO: 166258 - DNA, 17 bp, synthetic construct
  source 1..17: mol_type = other DNA
gcccaagctccccgtcg

SEQ ID NO: 166259 - DNA, 17 bp, synthetic construct
  source 1..17: mol_type = other DNA
tgcccaagctccccgtc

SEQ ID NO: 166260 - DNA, 17 bp, synthetic construct
  source 1..17: mol_type = other DNA
gtgcccaagctccccgt

SEQ ID NO: 166261 - DNA, 17 bp, synthetic construct
  source 1..17: mol_type = other DNA
tgtgcccaagctccccg

SEQ ID NO: 166262 - DNA, 17 bp, synthetic construct
  source 1..17: mol_type = other DNA
atgtgcccaagctcccc

SEQ ID NO: 166263 - DNA, 17 bp, synthetic construct
  source 1..17: mol_type = other DNA
catgtgcccaagctccc

SEQ ID NO: 166264 - DNA, 17 bp, synthetic construct
  source 1..17: mol_type = other DNA
ccatgtgcccaagctcc

SEQ ID NO: 166265 - DNA, 17 bp, synthetic construct
  source 1..17: mol_type = other DNA
gccatgtgcccaagctc

SEQ ID NO: 166266 - DNA, 17 bp, synthetic construct
  source 1..17: mol_type = other DNA
cgccatgtgcccaagct

SEQ ID NO: 166267 - DNA, 17 bp, synthetic construct
  source 1..17: mol_type = other DNA
gcgccatgtgcccaagc

SEQ ID NO: 166268 - DNA, 17 bp, synthetic construct
  source 1..17: mol_type = other DNA
ggcgccatgtgcccaag

SEQ ID NO: 166269 - DNA, 17 bp, synthetic construct
  source 1..17: mol_type = other DNA
gggcgccatgtgcccaa

SEQ ID NO: 166270 - DNA, 17 bp, synthetic construct
  source 1..17: mol_type = other DNA
ggggcgccatgtgccca

SEQ ID NO: 166271 - DNA, 17 bp, synthetic construct
  source 1..17: mol_type = other DNA
aggggcgccatgtgccc

SEQ ID NO: 166272 - DNA, 17 bp, synthetic construct
  source 1..17: mol_type = other DNA
gaggggcgccatgtgcc

SEQ ID NO: 166273 - DNA, 17 bp, synthetic construct
  source 1..17: mol_type = other DNA
tgaggggcgccatgtgc

SEQ ID NO: 166274 - DNA, 17 bp, synthetic construct
  source 1..17: mol_type = other DNA
gtgaggggcgccatgtg

SEQ ID NO: 166275 - DNA, 17 bp, synthetic construct
  source 1..17: mol_type = other DNA
tgtgaggggcgccatgt

SEQ ID NO: 166276 - DNA, 17 bp, synthetic construct
  source 1..17: mol_type = other DNA
ctgtgaggggcgccatg

SEQ ID NO: 166277 - DNA, 17 bp, synthetic construct
  source 1..17: mol_type = other DNA
gctgtgaggggcgccat

SEQ ID NO: 166278 - DNA, 17 bp, synthetic construct
  source 1..17: mol_type = other DNA
ggctgtgaggggcgcca

SEQ ID NO: 166279 - DNA, 17 bp, synthetic construct
  source 1..17: mol_type = other DNA
tggctgtgaggggcgcc

SEQ ID NO: 166280 - DNA, 17 bp, synthetic construct
  source 1..17: mol_type = other DNA
gtggctgtgaggggcgc

SEQ ID NO: 166281 - DNA, 17 bp, synthetic construct
  source 1..17: mol_type = other DNA
ggtggctgtgaggggcg

SEQ ID NO: 166282 - DNA, 17 bp, synthetic construct
  source 1..17: mol_type = other DNA
gggtggctgtgaggggc

SEQ ID NO: 166283 - DNA, 17 bp, synthetic construct
  source 1..17: mol_type = other DNA
tgggtggctgtgagggg

SEQ ID NO: 166284 - DNA, 17 bp, synthetic construct
  source 1..17: mol_type = other DNA
gtgggtggctgtgaggg

SEQ ID NO: 166285 - DNA, 17 bp, synthetic construct
  source 1..17: mol_type = other DNA
cgtgggtggctgtgagg

SEQ ID NO: 166286 - DNA, 17 bp, synthetic construct
  source 1..17: mol_type = other DNA
gcgtgggtggctgtgag

SEQ ID NO: 166287 - DNA, 17 bp, synthetic construct
  source 1..17: mol_type = other DNA
agcgtgggtggctgtga

SEQ ID NO: 166288 - DNA, 17 bp, synthetic construct
  source 1..17: mol_type = other DNA
cagcgtgggtggctgtg

SEQ ID NO: 166289 - DNA, 17 bp, synthetic construct
  source 1..17: mol_type = other DNA
ccagcgtgggtggctgt

SEQ ID NO: 166290 - DNA, 17 bp, synthetic construct
  source 1..17: mol_type = other DNA
gccagcgtgggtggctg

SEQ ID NO: 166291 - DNA, 17 bp, synthetic construct
  source 1..17: mol_type = other DNA
ggccagcgtgggtggct

SEQ ID NO: 166292 - DNA, 17 bp, synthetic construct
  source 1..17: mol_type = other DNA
gggccagcgtgggtggc

SEQ ID NO: 166293 - DNA, 17 bp, synthetic construct
  source 1..17: mol_type = other DNA
ggggccagcgtgggtgg

SEQ ID NO: 166294 - DNA, 17 bp, synthetic construct
  source 1..17: mol_type = other DNA
tggggccagcgtgggtg

SEQ ID NO: 166295 - DNA, 17 bp, synthetic construct
  source 1..17: mol_type = other DNA
ttggggccagcgtgggt

SEQ ID NO: 166296 - DNA, 17 bp, synthetic construct
  source 1..17: mol_type = other DNA
gttggggccagcgtggg

SEQ ID NO: 166297 - DNA, 17 bp, synthetic construct
  source 1..17: mol_type = other DNA
tgttggggccagcgtgg

SEQ ID NO: 166298 - DNA, 17 bp, synthetic construct
  source 1..17: mol_type = other DNA
ttgttggggccagcgtg

SEQ ID NO: 166299 - DNA, 17 bp, synthetic construct
  source 1..17: mol_type = other DNA
gttgttggggccagcgt

SEQ ID NO: 166300 - DNA, 17 bp, synthetic construct
  source 1..17: mol_type = other DNA
tgttgttggggccagcg

SEQ ID NO: 166301 - DNA, 17 bp, synthetic construct
  source 1..17: mol_type = other DNA
ttgttgttggggccagc

SEQ ID NO: 166302 - DNA, 17 bp, synthetic construct
  source 1..17: mol_type = other DNA
attgttgttggggccag

SEQ ID NO: 166303 - DNA, 17 bp, synthetic construct
  source 1..17: mol_type = other DNA
cattgttgttggggcca

SEQ ID NO: 166304 - DNA, 17 bp, synthetic construct
  source 1..17: mol_type = other DNA
ccattgttgttggggcc

SEQ ID NO: 166305 - DNA, 17 bp, synthetic construct
  source 1..17: mol_type = other DNA
gccattgttgttggggc

SEQ ID NO: 166306 - DNA, 17 bp, synthetic construct
  source 1..17: mol_type = other DNA
tgccattgttgttgggg

SEQ ID NO: 166307 - DNA, 17 bp, synthetic construct
  source 1..17: mol_type = other DNA
ttgccattgttgttggg

SEQ ID NO: 166308 - DNA, 17 bp, synthetic construct
  source 1..17: mol_type = other DNA
gttgccattgttgttgg

SEQ ID NO: 166309 - DNA, 17 bp, synthetic construct
  source 1..17: mol_type = other DNA
ggttgccattgttgttg

SEQ ID NO: 166310 - DNA, 17 bp, synthetic construct
  source 1..17: mol_type = other DNA
aggttgccattgttgtt

SEQ ID NO: 166311 - DNA, 17 bp, synthetic construct
  source 1..17: mol_type = other DNA
gaggttgccattgttgt

SEQ ID NO: 166312 - DNA, 17 bp, synthetic construct
  source 1..17: mol_type = other DNA
ggaggttgccattgttg

SEQ ID NO: 166313 - DNA, 17 bp, synthetic construct
  source 1..17: mol_type = other DNA
tggaggttgccattgtt

SEQ ID NO: 166314 - DNA, 17 bp, synthetic construct
  source 1..17: mol_type = other DNA
ctggaggttgccattgt

SEQ ID NO: 166315 - DNA, 17 bp, synthetic construct
  source 1..17: mol_type = other DNA
tctggaggttgccattg

SEQ ID NO: 166316 - DNA, 17 bp, synthetic construct
  source 1..17: mol_type = other DNA
ctctggaggttgccatt

SEQ ID NO: 166317 - DNA, 17 bp, synthetic construct
  source 1..17: mol_type = other DNA
gctctggaggttgccat

SEQ ID NO: 166318 - DNA, 17 bp, synthetic construct
  source 1..17: mol_type = other DNA
agctctggaggttgcca

SEQ ID NO: 166319 - DNA, 17 bp, synthetic construct
  source 1..17: mol_type = other DNA
gagctctggaggttgcc

SEQ ID NO: 166320 - DNA, 17 bp, synthetic construct
  source 1..17: mol_type = other DNA
cgagctctggaggttgc

SEQ ID NO: 166321 - DNA, 17 bp, synthetic construct
  source 1..17: mol_type = other DNA
gcgagctctggaggttg

SEQ ID NO: 166322 - DNA, 17 bp, synthetic construct
  source 1..17: mol_type = other DNA
ggcgagctctggaggtt

SEQ ID NO: 166323 - DNA, 17 bp, synthetic construct
  source 1..17: mol_type = other DNA
gggcgagctctggaggt

SEQ ID NO: 166324 - DNA, 17 bp, synthetic construct
  source 1..17: mol_type = other DNA
cgggcgagctctggagg

SEQ ID NO: 166325 - DNA, 17 bp, synthetic construct
  source 1..17: mol_type = other DNA
tcgggcgagctctggag

SEQ ID NO: 166326 - DNA, 17 bp, synthetic construct
  source 1..17: mol_type = other DNA
gtcgggcgagctctgga

SEQ ID NO: 166327 - DNA, 17 bp, synthetic construct
  source 1..17: mol_type = other DNA
tgtcgggcgagctctgg

SEQ ID NO: 166328 - DNA, 17 bp, synthetic construct
  source 1..17: mol_type = other DNA
ctgtcgggcgagctctg

SEQ ID NO: 166329 - DNA, 17 bp, synthetic construct
  source 1..17: mol_type = other DNA
cctgtcgggcgagctct

SEQ ID NO: 166330 - DNA, 17 bp, synthetic construct
  source 1..17: mol_type = other DNA
gcctgtcgggcgagctc

SEQ ID NO: 166331 - DNA, 17 bp, synthetic construct
  source 1..17: mol_type = other DNA
tgcctgtcgggcgagct

SEQ ID NO: 166332 - DNA, 17 bp, synthetic construct
  source 1..17: mol_type = other DNA
gtgcctgtcgggcgagc

SEQ ID NO: 166333 - DNA, 17 bp, synthetic construct
  source 1..17: mol_type = other DNA
tgtgcctgtcgggcgag

SEQ ID NO: 166334 - DNA, 17 bp, synthetic construct
  source 1..17: mol_type = other DNA
ctgtgcctgtcgggcga

SEQ ID NO: 166335 - DNA, 17 bp, synthetic construct
  source 1..17: mol_type = other DNA
gctgtgcctgtcgggcg

SEQ ID NO: 166336 - DNA, 17 bp, synthetic construct
  source 1..17: mol_type = other DNA
ggctgtgcctgtcgggc

SEQ ID NO: 166337 - DNA, 17 bp, synthetic construct
  source 1..17: mol_type = other DNA
tggctgtgcctgtcggg

SEQ ID NO: 166338 - DNA, 17 bp, synthetic construct
  source 1..17: mol_type = other DNA
ctggctgtgcctgtcgg

SEQ ID NO: 166339 - DNA, 17 bp, synthetic construct
  source 1..17: mol_type = other DNA
gctggctgtgcctgtcg

SEQ ID NO: 166340 - DNA, 17 bp, synthetic construct
  source 1..17: mol_type = other DNA
tgctggctgtgcctgtc

SEQ ID NO: 166341 - DNA, 17 bp, synthetic construct
  source 1..17: mol_type = other DNA
gtgctggctgtgcctgt

SEQ ID NO: 166342 - DNA, 17 bp, synthetic construct
  source 1..17: mol_type = other DNA
ggtgctggctgtgcctg

SEQ ID NO: 166343 - DNA, 17 bp, synthetic construct
  source 1..17: mol_type = other DNA
cggtgctggctgtgcct

SEQ ID NO: 166344 - DNA, 17 bp, synthetic construct
  source 1..17: mol_type = other DNA
gcggtgctggctgtgcc

SEQ ID NO: 166345 - DNA, 17 bp, synthetic construct
  source 1..17: mol_type = other DNA
agcggtgctggctgtgc

SEQ ID NO: 166346 - DNA, 17 bp, synthetic construct
  source 1..17: mol_type = other DNA
aagcggtgctggctgtg

SEQ ID NO: 166347 - DNA, 17 bp, synthetic construct
  source 1..17: mol_type = other DNA
gaagcggtgctggctgt

SEQ ID NO: 166348 - DNA, 17 bp, synthetic construct
  source 1..17: mol_type = other DNA
ggaagcggtgctggctg

SEQ ID NO: 166349 - DNA, 17 bp, synthetic construct
  source 1..17: mol_type = other DNA
tggaagcggtgctggct

SEQ ID NO: 166350 - DNA, 17 bp, synthetic construct
  source 1..17: mol_type = other DNA
ttggaagcggtgctggc

SEQ ID NO: 166351 - DNA, 17 bp, synthetic construct
  source 1..17: mol_type = other DNA
tttggaagcggtgctgg

SEQ ID NO: 166352 - DNA, 17 bp, synthetic construct
  source 1..17: mol_type = other DNA
ctttggaagcggtgctg

SEQ ID NO: 166353 - DNA, 17 bp, synthetic construct
  source 1..17: mol_type = other DNA
tctttggaagcggtgct

SEQ ID NO: 166354 - DNA, 17 bp, synthetic construct
  source 1..17: mol_type = other DNA
ctctttggaagcggtgc

SEQ ID NO: 166355 - DNA, 17 bp, synthetic construct
  source 1..17: mol_type = other DNA
gctctttggaagcggtg

SEQ ID NO: 166356 - DNA, 17 bp, synthetic construct
  source 1..17: mol_type = other DNA
ggctctttggaagcggt

SEQ ID NO: 166357 - DNA, 17 bp, synthetic construct
  source 1..17: mol_type = other DNA
cggctctttggaagcgg

SEQ ID NO: 166358 - DNA, 17 bp, synthetic construct
  source 1..17: mol_type = other DNA
gcggctctttggaagcg

SEQ ID NO: 166359 - DNA, 17 bp, synthetic construct
  source 1..17: mol_type = other DNA
agcggctctttggaagc

SEQ ID NO: 166360 - DNA, 17 bp, synthetic construct
  source 1..17: mol_type = other DNA
cagcggctctttggaag

SEQ ID NO: 166361 - DNA, 17 bp, synthetic construct
  source 1..17: mol_type = other DNA
tcagcggctctttggaa

SEQ ID NO: 166362 - DNA, 17 bp, synthetic construct
  source 1..17: mol_type = other DNA
gtcagcggctctttgga

SEQ ID NO: 166363 - DNA, 17 bp, synthetic construct
  source 1..17: mol_type = other DNA
ggtcagcggctctttgg

SEQ ID NO: 166364 - DNA, 17 bp, synthetic construct
  source 1..17: mol_type = other DNA
tggtcagcggctctttg

SEQ ID NO: 166365 - DNA, 17 bp, synthetic construct
  source 1..17: mol_type = other DNA
gtggtcagcggctcttt

SEQ ID NO: 166366 - DNA, 17 bp, synthetic construct
  source 1..17: mol_type = other DNA
cgtggtcagcggctctt

SEQ ID NO: 166367 - DNA, 17 bp, synthetic construct
  source 1..17: mol_type = other DNA
tcgtggtcagcggctct

SEQ ID NO: 166368 - DNA, 17 bp, synthetic construct
  source 1..17: mol_type = other DNA
ctcgtggtcagcggctc

SEQ ID NO: 166369 - DNA, 17 bp, synthetic construct
  source 1..17: mol_type = other DNA
gctcgtggtcagcggct

SEQ ID NO: 166370 - DNA, 17 bp, synthetic construct
  source 1..17: mol_type = other DNA
ggctcgtggtcagcggc

SEQ ID NO: 166371 - DNA, 17 bp, synthetic construct
  source 1..17: mol_type = other DNA
aggctcgtggtcagcgg

SEQ ID NO: 166372 - DNA, 17 bp, synthetic construct
  source 1..17: mol_type = other DNA
caggctcgtggtcagcg

SEQ ID NO: 166373 - DNA, 17 bp, synthetic construct
  source 1..17: mol_type = other DNA
ccaggctcgtggtcagc

SEQ ID NO: 166374 - DNA, 17 bp, synthetic construct
  source 1..17: mol_type = other DNA
gccaggctcgtggtcag

SEQ ID NO: 166375 - DNA, 17 bp, synthetic construct
  source 1..17: mol_type = other DNA
cgccaggctcgtggtca

SEQ ID NO: 166376 - DNA, 17 bp, synthetic construct
  source 1..17: mol_type = other DNA
gcgccaggctcgtggtc

SEQ ID NO: 166377 - DNA, 17 bp, synthetic construct
  source 1..17: mol_type = other DNA
ggcgccaggctcgtggt

SEQ ID NO: 166378 - DNA, 17 bp, synthetic construct
  source 1..17: mol_type = other DNA
tggcgccaggctcgtgg

SEQ ID NO: 166379 - DNA, 17 bp, synthetic construct
  source 1..17: mol_type = other DNA
ttggcgccaggctcgtg

SEQ ID NO: 166380 - DNA, 17 bp, synthetic construct
  source 1..17: mol_type = other DNA
gttggcgccaggctcgt

SEQ ID NO: 166381 - DNA, 17 bp, synthetic construct
  source 1..17: mol_type = other DNA
tgttggcgccaggctcg

SEQ ID NO: 166382 - DNA, 17 bp, synthetic construct
  source 1..17: mol_type = other DNA
gtgttggcgccaggctc

SEQ ID NO: 166383 - DNA, 17 bp, synthetic construct
  source 1..17: mol_type = other DNA
agtgttggcgccaggct

SEQ ID NO: 166384 - DNA, 17 bp, synthetic construct
  source 1..17: mol_type = other DNA
gagtgttggcgccaggc

SEQ ID NO: 166385 - DNA, 17 bp, synthetic construct
  source 1..17: mol_type = other DNA
tgagtgttggcgccagg

SEQ ID NO: 166386 - DNA, 17 bp, synthetic construct
  source 1..17: mol_type = other DNA
gtgagtgttggcgccag

SEQ ID NO: 166387 - DNA, 17 bp, synthetic construct
  source 1..17: mol_type = other DNA
cgtgagtgttggcgcca

SEQ ID NO: 166388 - DNA, 17 bp, synthetic construct
  source 1..17: mol_type = other DNA
tcgtgagtgttggcgcc

SEQ ID NO: 166389 - DNA, 17 bp, synthetic construct
  source 1..17: mol_type = other DNA
ctcgtgagtgttggcgc

SEQ ID NO: 166390 - DNA, 17 bp, synthetic construct
  source 1..17: mol_type = other DNA
gctcgtgagtgttggcg

SEQ ID NO: 166391 - DNA, 17 bp, synthetic construct
  source 1..17: mol_type = other DNA
cgctcgtgagtgttggc

SEQ ID NO: 166392 - DNA, 17 bp, synthetic construct
  source 1..17: mol_type = other DNA
tcgctcgtgagtgttgg

SEQ ID NO: 166393 - DNA, 17 bp, synthetic construct
  source 1..17: mol_type = other DNA
ctcgctcgtgagtgttg

SEQ ID NO: 166394 - DNA, 17 bp, synthetic construct
  source 1..17: mol_type = other DNA
gctcgctcgtgagtgtt

SEQ ID NO: 166395 - DNA, 17 bp, synthetic construct
  source 1..17: mol_type = other DNA
agctcgctcgtgagtgt

SEQ ID NO: 166396 - DNA, 17 bp, synthetic construct
  source 1..17: mol_type = other DNA
cagctcgctcgtgagtg

SEQ ID NO: 166397 - DNA, 17 bp, synthetic construct
  source 1..17: mol_type = other DNA
acagctcgctcgtgagt

SEQ ID NO: 166398 - DNA, 17 bp, synthetic construct
  source 1..17: mol_type = other DNA
gacagctcgctcgtgag

SEQ ID NO: 166399 - DNA, 17 bp, synthetic construct
  source 1..17: mol_type = other DNA
ggacagctcgctcgtga

SEQ ID NO: 166400 - DNA, 17 bp, synthetic construct
  source 1..17: mol_type = other DNA
tggacagctcgctcgtg

SEQ ID NO: 166401 - DNA, 17 bp, synthetic construct
  source 1..17: mol_type = other DNA
gtggacagctcgctcgt

SEQ ID NO: 166402 - DNA, 17 bp, synthetic construct
  source 1..17: mol_type = other DNA
ggtggacagctcgctcg

SEQ ID NO: 166403 - DNA, 17 bp, synthetic construct
  source 1..17: mol_type = other DNA
aggtggacagctcgctc

SEQ ID NO: 166404 - DNA, 17 bp, synthetic construct
  source 1..17: mol_type = other DNA
gaggtggacagctcgct

SEQ ID NO: 166405 - DNA, 17 bp, synthetic construct
  source 1..17: mol_type = other DNA
agaggtggacagctcgc

SEQ ID NO: 166406 - DNA, 17 bp, synthetic construct
  source 1..17: mol_type = other DNA
gagaggtggacagctcg

SEQ ID NO: 166407 - DNA, 17 bp, synthetic construct
  source 1..17: mol_type = other DNA
tgagaggtggacagctc

SEQ ID NO: 166408 - DNA, 17 bp, synthetic construct
  source 1..17: mol_type = other DNA
ctgagaggtggacagct

SEQ ID NO: 166409 - DNA, 17 bp, synthetic construct
  source 1..17: mol_type = other DNA
cctgagaggtggacagc

SEQ ID NO: 166410 - DNA, 17 bp, synthetic construct
  source 1..17: mol_type = other DNA
gcctgagaggtggacag

SEQ ID NO: 166411 - DNA, 17 bp, synthetic construct
  source 1..17: mol_type = other DNA
ggcctgagaggtggaca

SEQ ID NO: 166412 - DNA, 17 bp, synthetic construct
  source 1..17: mol_type = other DNA
cggcctgagaggtggac

SEQ ID NO: 166413 - DNA, 17 bp, synthetic construct
  source 1..17: mol_type = other DNA
tcggcctgagaggtgga

SEQ ID NO: 166414 - DNA, 17 bp, synthetic construct
  source 1..17: mol_type = other DNA
ctcggcctgagaggtgg

SEQ ID NO: 166415 - DNA, 17 bp, synthetic construct
  source 1..17: mol_type = other DNA
tctcggcctgagaggtg

SEQ ID NO: 166416 - DNA, 17 bp, synthetic construct
  source 1..17: mol_type = other DNA
gtctcggcctgagaggt

SEQ ID NO: 166417 - DNA, 17 bp, synthetic construct
  source 1..17: mol_type = other DNA
ggtctcggcctgagagg

SEQ ID NO: 166418 - DNA, 17 bp, synthetic construct
  source 1..17: mol_type = other DNA
tggtctcggcctgagag

SEQ ID NO: 166419 - DNA, 17 bp, synthetic construct
  source 1..17: mol_type = other DNA
ctggtctcggcctgaga

SEQ ID NO: 166420 - DNA, 17 bp, synthetic construct
  source 1..17: mol_type = other DNA
gctggtctcggcctgag

SEQ ID NO: 166421 - DNA, 17 bp, synthetic construct
  source 1..17: mol_type = other DNA
tgctggtctcggcctga

SEQ ID NO: 166422 - DNA, 17 bp, synthetic construct
  source 1..17: mol_type = other DNA
gtgctggtctcggcctg

SEQ ID NO: 166423 - DNA, 17 bp, synthetic construct
  source 1..17: mol_type = other DNA
cgtgctggtctcggcct

SEQ ID NO: 166424 - DNA, 17 bp, synthetic construct
  source 1..17: mol_type = other DNA
gcgtgctggtctcggcc

SEQ ID NO: 166425 - DNA, 17 bp, synthetic construct
  source 1..17: mol_type = other DNA
ggcgtgctggtctcggc

SEQ ID NO: 166426 - DNA, 17 bp, synthetic construct
  source 1..17: mol_type = other DNA
gggcgtgctggtctcgg

SEQ ID NO: 166427 - DNA, 17 bp, synthetic construct
  source 1..17: mol_type = other DNA
tgggcgtgctggtctcg

SEQ ID NO: 166428 - DNA, 17 bp, synthetic construct
  source 1..17: mol_type = other DNA
ctgggcgtgctggtctc

SEQ ID NO: 166429 - DNA, 17 bp, synthetic construct
  source 1..17: mol_type = other DNA
cctgggcgtgctggtct

SEQ ID NO: 166430 - DNA, 17 bp, synthetic construct
  source 1..17: mol_type = other DNA
tcctgggcgtgctggtc

SEQ ID NO: 166431 - DNA, 17 bp, synthetic construct
  source 1..17: mol_type = other DNA
gtcctgggcgtgctggt

SEQ ID NO: 166432 - DNA, 17 bp, synthetic construct
  source 1..17: mol_type = other DNA
tgtcctgggcgtgctgg

SEQ ID NO: 166433 - DNA, 17 bp, synthetic construct
  source 1..17: mol_type = other DNA
ctgtcctgggcgtgctg

SEQ ID NO: 166434 - DNA, 17 bp, synthetic construct
  source 1..17: mol_type = other DNA
tctgtcctgggcgtgct

SEQ ID NO: 166435 - DNA, 17 bp, synthetic construct
  source 1..17: mol_type = other DNA
ctctgtcctgggcgtgc

SEQ ID NO: 166436 - DNA, 17 bp, synthetic construct
  source 1..17: mol_type = other DNA
tctctgtcctgggcgtg

SEQ ID NO: 166437 - DNA, 17 bp, synthetic construct
  source 1..17: mol_type = other DNA
gtctctgtcctgggcgt

SEQ ID NO: 166438 - DNA, 17 bp, synthetic construct
  source 1..17: mol_type = other DNA
cgtctctgtcctgggcg

SEQ ID NO: 166439 - DNA, 17 bp, synthetic construct
  source 1..17: mol_type = other DNA
tcgtctctgtcctgggc

SEQ ID NO: 166440 - DNA, 17 bp, synthetic construct
  source 1..17: mol_type = other DNA
gtcgtctctgtcctggg

SEQ ID NO: 166441 - DNA, 17 bp, synthetic construct
  source 1..17: mol_type = other DNA
tgtcgtctctgtcctgg

SEQ ID NO: 166442 - DNA, 17 bp, synthetic construct
  source 1..17: mol_type = other DNA
ttgtcgtctctgtcctg

SEQ ID NO: 166443 - DNA, 17 bp, synthetic construct
  source 1..17: mol_type = other DNA
attgtcgtctctgtcct

SEQ ID NO: 166444 - DNA, 17 bp, synthetic construct
  source 1..17: mol_type = other DNA
cattgtcgtctctgtcc

SEQ ID NO: 166445 - DNA, 17 bp, synthetic construct
  source 1..17: mol_type = other DNA
tcattgtcgtctctgtc

SEQ ID NO: 166446 - DNA, 17 bp, synthetic construct
  source 1..17: mol_type = other DNA
ctcattgtcgtctctgt

SEQ ID NO: 166447 - DNA, 17 bp, synthetic construct
  source 1..17: mol_type = other DNA
gctcattgtcgtctctg

SEQ ID NO: 166448 - DNA, 17 bp, synthetic construct
  source 1..17: mol_type = other DNA
ggctcattgtcgtctct

SEQ ID NO: 166449 - DNA, 17 bp, synthetic construct
  source 1..17: mol_type = other DNA
gggctcattgtcgtctc

SEQ ID NO: 166450 - DNA, 17 bp, synthetic construct
  source 1..17: mol_type = other DNA
ggggctcattgtcgtct

SEQ ID NO: 166451 - DNA, 17 bp, synthetic construct
  source 1..17: mol_type = other DNA
aggggctcattgtcgtc

SEQ ID NO: 166452 - DNA, 17 bp, synthetic construct
  source 1..17: mol_type = other DNA
aaggggctcattgtcgt

SEQ ID NO: 166453 - DNA, 17 bp, synthetic construct
  source 1..17: mol_type = other DNA
caaggggctcattgtcg

SEQ ID NO: 166454 - DNA, 17 bp, synthetic construct
  source 1..17: mol_type = other DNA
tcaaggggctcattgtc

SEQ ID NO: 166455 - DNA, 17 bp, synthetic construct
  source 1..17: mol_type = other DNA
gtcaaggggctcattgt

SEQ ID NO: 166456 - DNA, 17 bp, synthetic construct
  source 1..17: mol_type = other DNA
agtcaaggggctcattg

SEQ ID NO: 166457 - DNA, 17 bp, synthetic construct
  source 1..17: mol_type = other DNA
tagtcaaggggctcatt

SEQ ID NO: 166458 - DNA, 17 bp, synthetic construct
  source 1..17: mol_type = other DNA
ttagtcaaggggctcat

SEQ ID NO: 166459 - DNA, 17 bp, synthetic construct
  source 1..17: mol_type = other DNA
gttagtcaaggggctca

SEQ ID NO: 166460 - DNA, 17 bp, synthetic construct
  source 1..17: mol_type = other DNA
tgttagtcaaggggctc

SEQ ID NO: 166461 - DNA, 17 bp, synthetic construct
  source 1..17: mol_type = other DNA
gtgttagtcaaggggct

SEQ ID NO: 166462 - DNA, 17 bp, synthetic construct
  source 1..17: mol_type = other DNA
ggtgttagtcaaggggc

SEQ ID NO: 166463 - DNA, 17 bp, synthetic construct
  source 1..17: mol_type = other DNA
tggtgttagtcaagggg

SEQ ID NO: 166464 - DNA, 17 bp, synthetic construct
  source 1..17: mol_type = other DNA
gtggtgttagtcaaggg

SEQ ID NO: 166465 - DNA, 17 bp, synthetic construct
  source 1..17: mol_type = other DNA
ggtggtgttagtcaagg

SEQ ID NO: 166466 - DNA, 17 bp, synthetic construct
  source 1..17: mol_type = other DNA
tggtggtgttagtcaag

SEQ ID NO: 166467 - DNA, 17 bp, synthetic construct
  source 1..17: mol_type = other DNA
gtggtggtgttagtcaa

SEQ ID NO: 166468 - DNA, 17 bp, synthetic construct
  source 1..17: mol_type = other DNA
ggtggtggtgttagtca

SEQ ID NO: 166469 - DNA, 17 bp, synthetic construct
  source 1..17: mol_type = other DNA
tggtggtggtgttagtc

SEQ ID NO: 166470 - DNA, 17 bp, synthetic construct
  source 1..17: mol_type = other DNA
ctggtggtggtgttagt

SEQ ID NO: 166471 - DNA, 17 bp, synthetic construct
  source 1..17: mol_type = other DNA
gctggtggtggtgttag

SEQ ID NO: 166472 - DNA, 17 bp, synthetic construct
  source 1..17: mol_type = other DNA
ggctggtggtggtgtta

SEQ ID NO: 166473 - DNA, 17 bp, synthetic construct
  source 1..17: mol_type = other DNA
tggctggtggtggtgtt

SEQ ID NO: 166474 - DNA, 17 bp, synthetic construct
  source 1..17: mol_type = other DNA
ctggctggtggtggtgt

SEQ ID NO: 166475 - DNA, 17 bp, synthetic construct
  source 1..17: mol_type = other DNA
cctggctggtggtggtg

SEQ ID NO: 166476 - DNA, 17 bp, synthetic construct
  source 1..17: mol_type = other DNA
ccctggctggtggtggt

SEQ ID NO: 166477 - DNA, 17 bp, synthetic construct
  source 1..17: mol_type = other DNA
gccctggctggtggtgg

SEQ ID NO: 166478 - DNA, 17 bp, synthetic construct
  source 1..17: mol_type = other DNA
tgccctggctggtggtg

SEQ ID NO: 166479 - DNA, 17 bp, synthetic construct
  source 1..17: mol_type = other DNA
gtgccctggctggtggt

SEQ ID NO: 166480 - DNA, 17 bp, synthetic construct
  source 1..17: mol_type = other DNA
cgtgccctggctggtgg

SEQ ID NO: 166481 - DNA, 17 bp, synthetic construct
  source 1..17: mol_type = other DNA
tcgtgccctggctggtg

SEQ ID NO: 166482 - DNA, 17 bp, synthetic construct
  source 1..17: mol_type = other DNA
gtcgtgccctggctggt

SEQ ID NO: 166483 - DNA, 17 bp, synthetic construct
  source 1..17: mol_type = other DNA
ggtcgtgccctggctgg

SEQ ID NO: 166484 - DNA, 17 bp, synthetic construct
  source 1..17: mol_type = other DNA
gggtcgtgccctggctg

SEQ ID NO: 166485 - DNA, 17 bp, synthetic construct
  source 1..17: mol_type = other DNA
cgggtcgtgccctggct

SEQ ID NO: 166486 - DNA, 17 bp, synthetic construct
  source 1..17: mol_type = other DNA
gcgggtcgtgccctggc

SEQ ID NO: 166487 - DNA, 17 bp, synthetic construct
  source 1..17: mol_type = other DNA
agcgggtcgtgccctgg

SEQ ID NO: 166488 - DNA, 17 bp, synthetic construct
  source 1..17: mol_type = other DNA
cagcgggtcgtgccctg

SEQ ID NO: 166489 - DNA, 17 bp, synthetic construct
  source 1..17: mol_type = other DNA
acagcgggtcgtgccct

SEQ ID NO: 166490 - DNA, 17 bp, synthetic construct
  source 1..17: mol_type = other DNA
gacagcgggtcgtgccc

SEQ ID NO: 166491 - DNA, 17 bp, synthetic construct
  source 1..17: mol_type = other DNA
tgacagcgggtcgtgcc

SEQ ID NO: 166492 - DNA, 17 bp, synthetic construct
  source 1..17: mol_type = other DNA
ttgacagcgggtcgtgc

SEQ ID NO: 166493 - DNA, 17 bp, synthetic construct
  source 1..17: mol_type = other DNA
gttgacagcgggtcgtg

SEQ ID NO: 166494 - DNA, 17 bp, synthetic construct
  source 1..17: mol_type = other DNA
ggttgacagcgggtcgt

SEQ ID NO: 166495 - DNA, 17 bp, synthetic construct
  source 1..17: mol_type = other DNA
cggttgacagcgggtcg

SEQ ID NO: 166496 - DNA, 17 bp, synthetic construct
  source 1..17: mol_type = other DNA
tcggttgacagcgggtc

SEQ ID NO: 166497 - DNA, 17 bp, synthetic construct
  source 1..17: mol_type = other DNA
ttcggttgacagcgggt

SEQ ID NO: 166498 - DNA, 17 bp, synthetic construct
  source 1..17: mol_type = other DNA
cttcggttgacagcggg

SEQ ID NO: 166499 - DNA, 17 bp, synthetic construct
  source 1..17: mol_type = other DNA
acttcggttgacagcgg

SEQ ID NO: 166500 - DNA, 17 bp, synthetic construct
  source 1..17: mol_type = other DNA
cacttcggttgacagcg

SEQ ID NO: 166501 - DNA, 17 bp, synthetic construct
  source 1..17: mol_type = other DNA
acacttcggttgacagc

SEQ ID NO: 166502 - DNA, 17 bp, synthetic construct
  source 1..17: mol_type = other DNA
cacacttcggttgacag

SEQ ID NO: 166503 - DNA, 17 bp, synthetic construct
  source 1..17: mol_type = other DNA
tcacacttcggttgaca

SEQ ID NO: 166504 - DNA, 17 bp, synthetic construct
  source 1..17: mol_type = other DNA
ctcacacttcggttgac

SEQ ID NO: 166505 - DNA, 17 bp, synthetic construct
  source 1..17: mol_type = other DNA
actcacacttcggttga

SEQ ID NO: 166506 - DNA, 17 bp, synthetic construct
  source 1..17: mol_type = other DNA
cactcacacttcggttg

SEQ ID NO: 166507 - DNA, 17 bp, synthetic construct
  source 1..17: mol_type = other DNA
ccactcacacttcggtt

SEQ ID NO: 166508 - DNA, 17 bp, synthetic construct
  source 1..17: mol_type = other DNA
tccactcacacttcggt

SEQ ID NO: 166509 - DNA, 17 bp, synthetic construct
  source 1..17: mol_type = other DNA
gtccactcacacttcgg

SEQ ID NO: 166510 - DNA, 17 bp, synthetic construct
  source 1..17: mol_type = other DNA
tgtccactcacacttcg

SEQ ID NO: 166511 - DNA, 17 bp, synthetic construct
  source 1..17: mol_type = other DNA
ctgtccactcacacttc

SEQ ID NO: 166512 - DNA, 17 bp, synthetic construct
  source 1..17: mol_type = other DNA
tctgtccactcacactt

SEQ ID NO: 166513 - DNA, 17 bp, synthetic construct
  source 1..17: mol_type = other DNA
ctctgtccactcacact

SEQ ID NO: 166514 - DNA, 17 bp, synthetic construct
  source 1..17: mol_type = other DNA
actctgtccactcacac

SEQ ID NO: 166515 - DNA, 17 bp, synthetic construct
  source 1..17: mol_type = other DNA
cactctgtccactcaca

SEQ ID NO: 166516 - DNA, 17 bp, synthetic construct
  source 1..17: mol_type = other DNA
ccactctgtccactcac

SEQ ID NO: 166517 - DNA, 17 bp, synthetic construct
  source 1..17: mol_type = other DNA
accactctgtccactca

SEQ ID NO: 166518 - DNA, 17 bp, synthetic construct
  source 1..17: mol_type = other DNA
aaccactctgtccactc

SEQ ID NO: 166519 - DNA, 17 bp, synthetic construct
  source 1..17: mol_type = other DNA
aaaccactctgtccact

SEQ ID NO: 166520 - DNA, 17 bp, synthetic construct
  source 1..17: mol_type = other DNA
caaaccactctgtccac

SEQ ID NO: 166521 - DNA, 17 bp, synthetic construct
  source 1..17: mol_type = other DNA
tcaaaccactctgtcca

SEQ ID NO: 166522 - DNA, 17 bp, synthetic construct
  source 1..17: mol_type = other DNA
gtcaaaccactctgtcc

SEQ ID NO: 166523 - DNA, 17 bp, synthetic construct
  source 1..17: mol_type = other DNA
cgtcaaaccactctgtc

SEQ ID NO: 166524 - DNA, 17 bp, synthetic construct
  source 1..17: mol_type = other DNA
acgtcaaaccactctgt

SEQ ID NO: 166525 - DNA, 17 bp, synthetic construct
  source 1..17: mol_type = other DNA
cacgtcaaaccactctg

SEQ ID NO: 166526 - DNA, 17 bp, synthetic construct
  source 1..17: mol_type = other DNA
ccacgtcaaaccactct

SEQ ID NO: 166527 - DNA, 17 bp, synthetic construct
  source 1..17: mol_type = other DNA
tccacgtcaaaccactc

SEQ ID NO: 166528 - DNA, 17 bp, synthetic construct
  source 1..17: mol_type = other DNA
gtccacgtcaaaccact

SEQ ID NO: 166529 - DNA, 17 bp, synthetic construct
  source 1..17: mol_type = other DNA
agtccacgtcaaaccac

SEQ ID NO: 166530 - DNA, 17 bp, synthetic construct
  source 1..17: mol_type = other DNA
aagtccacgtcaaacca

SEQ ID NO: 166531 - DNA, 17 bp, synthetic construct
  source 1..17: mol_type = other DNA
gaagtccacgtcaaacc

SEQ ID NO: 166532 - DNA, 17 bp, synthetic construct
  source 1..17: mol_type = other DNA
ggaagtccacgtcaaac

SEQ ID NO: 166533 - DNA, 17 bp, synthetic construct
  source 1..17: mol_type = other DNA
gggaagtccacgtcaaa

SEQ ID NO: 166534 - DNA, 17 bp, synthetic construct
  source 1..17: mol_type = other DNA
tgggaagtccacgtcaa

SEQ ID NO: 166535 - DNA, 17 bp, synthetic construct
  source 1..17: mol_type = other DNA
ttgggaagtccacgtca

SEQ ID NO: 166536 - DNA, 17 bp, synthetic construct
  source 1..17: mol_type = other DNA
gttgggaagtccacgtc

SEQ ID NO: 166537 - DNA, 17 bp, synthetic construct
  source 1..17: mol_type = other DNA
ggttgggaagtccacgt

SEQ ID NO: 166538 - DNA, 17 bp, synthetic construct
  source 1..17: mol_type = other DNA
aggttgggaagtccacg

SEQ ID NO: 166539 - DNA, 17 bp, synthetic construct
  source 1..17: mol_type = other DNA
gaggttgggaagtccac

SEQ ID NO: 166540 - DNA, 17 bp, synthetic construct
  source 1..17: mol_type = other DNA
tgaggttgggaagtcca

SEQ ID NO: 166541 - DNA, 17 bp, synthetic construct
  source 1..17: mol_type = other DNA
ctgaggttgggaagtcc

SEQ ID NO: 166542 - DNA, 17 bp, synthetic construct
  source 1..17: mol_type = other DNA
cctgaggttgggaagtc

SEQ ID NO: 166543 - DNA, 17 bp, synthetic construct
  source 1..17: mol_type = other DNA
ccctgaggttgggaagt

SEQ ID NO: 166544 - DNA, 17 bp, synthetic construct
  source 1..17: mol_type = other DNA
cccctgaggttgggaag

SEQ ID NO: 166545 - DNA, 17 bp, synthetic construct
  source 1..17: mol_type = other DNA
acccctgaggttgggaa

SEQ ID NO: 166546 - DNA, 17 bp, synthetic construct
  source 1..17: mol_type = other DNA
aacccctgaggttggga

SEQ ID NO: 166547 - DNA, 17 bp, synthetic construct
  source 1..17: mol_type = other DNA
caacccctgaggttggg

SEQ ID NO: 166548 - DNA, 17 bp, synthetic construct
  source 1..17: mol_type = other DNA
gcaacccctgaggttgg

SEQ ID NO: 166549 - DNA, 17 bp, synthetic construct
  source 1..17: mol_type = other DNA
tgcaacccctgaggttg

SEQ ID NO: 166550 - DNA, 17 bp, synthetic construct
  source 1..17: mol_type = other DNA
ctgcaacccctgaggtt

SEQ ID NO: 166551 - DNA, 17 bp, synthetic construct
  source 1..17: mol_type = other DNA
cctgcaacccctgaggt

SEQ ID NO: 166552 - DNA, 17 bp, synthetic construct
  source 1..17: mol_type = other DNA
gcctgcaacccctgagg

SEQ ID NO: 166553 - DNA, 17 bp, synthetic construct
  source 1..17: mol_type = other DNA
cgcctgcaacccctgag

SEQ ID NO: 166554 - DNA, 17 bp, synthetic construct
  source 1..17: mol_type = other DNA
ccgcctgcaacccctga

SEQ ID NO: 166555 - DNA, 17 bp, synthetic construct
  source 1..17: mol_type = other DNA
cccgcctgcaacccctg

SEQ ID NO: 166556 - DNA, 17 bp, synthetic construct
  source 1..17: mol_type = other DNA
ccccgcctgcaacccct

SEQ ID NO: 166557 - DNA, 17 bp, synthetic construct
  source 1..17: mol_type = other DNA
tccccgcctgcaacccc

SEQ ID NO: 166558 - DNA, 17 bp, synthetic construct
  source 1..17: mol_type = other DNA
gtccccgcctgcaaccc

SEQ ID NO: 166559 - DNA, 17 bp, synthetic construct
  source 1..17: mol_type = other DNA
tgtccccgcctgcaacc

SEQ ID NO: 166560 - DNA, 17 bp, synthetic construct
  source 1..17: mol_type = other DNA
atgtccccgcctgcaac

SEQ ID NO: 166561 - DNA, 17 bp, synthetic construct
  source 1..17: mol_type = other DNA
catgtccccgcctgcaa

SEQ ID NO: 166562 - DNA, 17 bp, synthetic construct
  source 1..17: mol_type = other DNA
ccatgtccccgcctgca

SEQ ID NO: 166563 - DNA, 17 bp, synthetic construct
  source 1..17: mol_type = other DNA
tccatgtccccgcctgc

SEQ ID NO: 166564 - DNA, 17 bp, synthetic construct
  source 1..17: mol_type = other DNA
ttccatgtccccgcctg

SEQ ID NO: 166565 - DNA, 17 bp, synthetic construct
  source 1..17: mol_type = other DNA
tttccatgtccccgcct

SEQ ID NO: 166566 - DNA, 17 bp, synthetic construct
  source 1..17: mol_type = other DNA
gtttccatgtccccgcc

SEQ ID NO: 166567 - DNA, 17 bp, synthetic construct
  source 1..17: mol_type = other DNA
agtttccatgtccccgc

SEQ ID NO: 166568 - DNA, 17 bp, synthetic construct
  source 1..17: mol_type = other DNA
aagtttccatgtccccg

SEQ ID NO: 166569 - DNA, 17 bp, synthetic construct
  source 1..17: mol_type = other DNA
aaagtttccatgtcccc

SEQ ID NO: 166570 - DNA, 17 bp, synthetic construct
  source 1..17: mol_type = other DNA
aaaagtttccatgtccc

SEQ ID NO: 166571 - DNA, 17 bp, synthetic construct
  source 1..17: mol_type = other DNA
caaaagtttccatgtcc

SEQ ID NO: 166572 - DNA, 17 bp, synthetic construct
  source 1..17: mol_type = other DNA
tcaaaagtttccatgtc

SEQ ID NO: 166573 - DNA, 17 bp, synthetic construct
  source 1..17: mol_type = other DNA
ttcaaaagtttccatgt

SEQ ID NO: 166574 - DNA, 17 bp, synthetic construct
  source 1..17: mol_type = other DNA
tttcaaaagtttccatg

SEQ ID NO: 166575 - DNA, 17 bp, synthetic construct
  source 1..17: mol_type = other DNA
ttttcaaaagtttccat

SEQ ID NO: 166576 - DNA, 17 bp, synthetic construct
  source 1..17: mol_type = other DNA
gttttcaaaagtttcca

SEQ ID NO: 166577 - DNA, 17 bp, synthetic construct
  source 1..17: mol_type = other DNA
tgttttcaaaagtttcc

SEQ ID NO: 166578 - DNA, 17 bp, synthetic construct
  source 1..17: mol_type = other DNA
atgttttcaaaagtttc

SEQ ID NO: 166579 - DNA, 17 bp, synthetic construct
  source 1..17: mol_type = other DNA
gatgttttcaaaagttt

SEQ ID NO: 166580 - DNA, 17 bp, synthetic construct
  source 1..17: mol_type = other DNA
tgatgttttcaaaagtt

SEQ ID NO: 166581 - DNA, 17 bp, synthetic construct
  source 1..17: mol_type = other DNA
ctgatgttttcaaaagt

SEQ ID NO: 166582 - DNA, 17 bp, synthetic construct
  source 1..17: mol_type = other DNA
cctgatgttttcaaaag

SEQ ID NO: 166583 - DNA, 17 bp, synthetic construct
  source 1..17: mol_type = other DNA
ccctgatgttttcaaaa

SEQ ID NO: 166584 - DNA, 17 bp, synthetic construct
  source 1..17: mol_type = other DNA
gccctgatgttttcaaa

SEQ ID NO: 166585 - DNA, 17 bp, synthetic construct
  source 1..17: mol_type = other DNA
agccctgatgttttcaa

SEQ ID NO: 166586 - DNA, 17 bp, synthetic construct
  source 1..17: mol_type = other DNA
cagccctgatgttttca

SEQ ID NO: 166587 - DNA, 17 bp, synthetic construct
  source 1..17: mol_type = other DNA
gcagccctgatgttttc

SEQ ID NO: 166588 - DNA, 17 bp, synthetic construct
  source 1..17: mol_type = other DNA
agcagccctgatgtttt

SEQ ID NO: 166589 - DNA, 17 bp, synthetic construct
  source 1..17: mol_type = other DNA
cagcagccctgatgttt

SEQ ID NO: 166590 - DNA, 17 bp, synthetic construct
  source 1..17: mol_type = other DNA
ccagcagccctgatgtt

SEQ ID NO: 166591 - DNA, 17 bp, synthetic construct
  source 1..17: mol_type = other DNA
cccagcagccctgatgt

SEQ ID NO: 166592 - DNA, 17 bp, synthetic construct
  source 1..17: mol_type = other DNA
ccccagcagccctgatg

SEQ ID NO: 166593 - DNA, 17 bp, synthetic construct
  source 1..17: mol_type = other DNA
cccccagcagccctgat

SEQ ID NO: 166594 - DNA, 17 bp, synthetic construct
  source 1..17: mol_type = other DNA
gcccccagcagccctga

SEQ ID NO: 166595 - DNA, 17 bp, synthetic construct
  source 1..17: mol_type = other DNA
tgcccccagcagccctg

SEQ ID NO: 166596 - DNA, 17 bp, synthetic construct
  source 1..17: mol_type = other DNA
ttgcccccagcagccct

SEQ ID NO: 166597 - DNA, 17 bp, synthetic construct
  source 1..17: mol_type = other DNA
cttgcccccagcagccc

SEQ ID NO: 166598 - DNA, 17 bp, synthetic construct
  source 1..17: mol_type = other DNA
tcttgcccccagcagcc

SEQ ID NO: 166599 - DNA, 17 bp, synthetic construct
  source 1..17: mol_type = other DNA
atcttgcccccagcagc

SEQ ID NO: 166600 - DNA, 17 bp, synthetic construct
  source 1..17: mol_type = other DNA
catcttgcccccagcag

SEQ ID NO: 166601 - DNA, 17 bp, synthetic construct
  source 1..17: mol_type = other DNA
acatcttgcccccagca

SEQ ID NO: 166602 - DNA, 17 bp, synthetic construct
  source 1..17: mol_type = other DNA
cacatcttgcccccagc

SEQ ID NO: 166603 - DNA, 17 bp, synthetic construct
  source 1..17: mol_type = other DNA
gcacatcttgcccccag

SEQ ID NO: 166604 - DNA, 17 bp, synthetic construct
  source 1..17: mol_type = other DNA
agcacatcttgccccca

SEQ ID NO: 166605 - DNA, 17 bp, synthetic construct
  source 1..17: mol_type = other DNA
cagcacatcttgccccc

SEQ ID NO: 166606 - DNA, 17 bp, synthetic construct
  source 1..17: mol_type = other DNA
ccagcacatcttgcccc

SEQ ID NO: 166607 - DNA, 17 bp, synthetic construct
  source 1..17: mol_type = other DNA
cccagcacatcttgccc

SEQ ID NO: 166608 - DNA, 17 bp, synthetic construct
  source 1..17: mol_type = other DNA
gcccagcacatcttgcc

SEQ ID NO: 166609 - DNA, 17 bp, synthetic construct
  source 1..17: mol_type = other DNA
tgcccagcacatcttgc

SEQ ID NO: 166610 - DNA, 17 bp, synthetic construct
  source 1..17: mol_type = other DNA
gtgcccagcacatcttg

SEQ ID NO: 166611 - DNA, 17 bp, synthetic construct
  source 1..17: mol_type = other DNA
ggtgcccagcacatctt

SEQ ID NO: 166612 - DNA, 17 bp, synthetic construct
  source 1..17: mol_type = other DNA
tggtgcccagcacatct

SEQ ID NO: 166613 - DNA, 17 bp, synthetic construct
  source 1..17: mol_type = other DNA
ttggtgcccagcacatc

SEQ ID NO: 166614 - DNA, 17 bp, synthetic construct
  source 1..17: mol_type = other DNA
tttggtgcccagcacat

SEQ ID NO: 166615 - DNA, 17 bp, synthetic construct
  source 1..17: mol_type = other DNA
ctttggtgcccagcaca

SEQ ID NO: 166616 - DNA, 17 bp, synthetic construct
  source 1..17: mol_type = other DNA
tctttggtgcccagcac

SEQ ID NO: 166617 - DNA, 17 bp, synthetic construct
  source 1..17: mol_type = other DNA
ctctttggtgcccagca

SEQ ID NO: 166618 - DNA, 17 bp, synthetic construct
  source 1..17: mol_type = other DNA
gctctttggtgcccagc

SEQ ID NO: 166619 - DNA, 17 bp, synthetic construct
  source 1..17: mol_type = other DNA
tgctctttggtgcccag

SEQ ID NO: 166620 - DNA, 17 bp, synthetic construct
  source 1..17: mol_type = other DNA
atgctctttggtgccca

SEQ ID NO: 166621 - DNA, 17 bp, synthetic construct
  source 1..17: mol_type = other DNA
tatgctctttggtgccc

SEQ ID NO: 166622 - DNA, 17 bp, synthetic construct
  source 1..17: mol_type = other DNA
ctatgctctttggtgcc

SEQ ID NO: 166623 - DNA, 17 bp, synthetic construct
  source 1..17: mol_type = other DNA
tctatgctctttggtgc

SEQ ID NO: 166624 - DNA, 17 bp, synthetic construct
  source 1..17: mol_type = other DNA
ctctatgctctttggtg

SEQ ID NO: 166625 - DNA, 17 bp, synthetic construct
  source 1..17: mol_type = other DNA
actctatgctctttggt

SEQ ID NO: 166626 - DNA, 17 bp, synthetic construct
  source 1..17: mol_type = other DNA
cactctatgctctttgg

SEQ ID NO: 166627 - DNA, 17 bp, synthetic construct
  source 1..17: mol_type = other DNA
gcactctatgctctttg

SEQ ID NO: 166628 - DNA, 17 bp, synthetic construct
  source 1..17: mol_type = other DNA
ggcactctatgctcttt

SEQ ID NO: 166629 - DNA, 17 bp, synthetic construct
  source 1..17: mol_type = other DNA
cggcactctatgctctt

SEQ ID NO: 166630 - DNA, 17 bp, synthetic construct
  source 1..17: mol_type = other DNA
ccggcactctatgctct

SEQ ID NO: 166631 - DNA, 17 bp, synthetic construct
  source 1..17: mol_type = other DNA
cccggcactctatgctc

SEQ ID NO: 166632 - DNA, 17 bp, synthetic construct
  source 1..17: mol_type = other DNA
gcccggcactctatgct

SEQ ID NO: 166633 - DNA, 17 bp, synthetic construct
  source 1..17: mol_type = other DNA
cgcccggcactctatgc

SEQ ID NO: 166634 - DNA, 17 bp, synthetic construct
  source 1..17: mol_type = other DNA
ccgcccggcactctatg

SEQ ID NO: 166635 - DNA, 17 bp, synthetic construct
  source 1..17: mol_type = other DNA
tccgcccggcactctat

SEQ ID NO: 166636 - DNA, 17 bp, synthetic construct
  source 1..17: mol_type = other DNA
ctccgcccggcactcta

SEQ ID NO: 166637 - DNA, 17 bp, synthetic construct
  source 1..17: mol_type = other DNA
tctccgcccggcactct

SEQ ID NO: 166638 - DNA, 17 bp, synthetic construct
  source 1..17: mol_type = other DNA
ttctccgcccggcactc

SEQ ID NO: 166639 - DNA, 17 bp, synthetic construct
  source 1..17: mol_type = other DNA
gttctccgcccggcact

SEQ ID NO: 166640 - DNA, 17 bp, synthetic construct
  source 1..17: mol_type = other DNA
agttctccgcccggcac

SEQ ID NO: 166641 - DNA, 17 bp, synthetic construct
  source 1..17: mol_type = other DNA
tagttctccgcccggca

SEQ ID NO: 166642 - DNA, 17 bp, synthetic construct
  source 1..17: mol_type = other DNA
gtagttctccgcccggc

SEQ ID NO: 166643 - DNA, 17 bp, synthetic construct
  source 1..17: mol_type = other DNA
ggtagttctccgcccgg

SEQ ID NO: 166644 - DNA, 17 bp, synthetic construct
  source 1..17: mol_type = other DNA
gggtagttctccgcccg

SEQ ID NO: 166645 - DNA, 17 bp, synthetic construct
  source 1..17: mol_type = other DNA
ggggtagttctccgccc

SEQ ID NO: 166646 - DNA, 17 bp, synthetic construct
  source 1..17: mol_type = other DNA
cggggtagttctccgcc

SEQ ID NO: 166647 - DNA, 17 bp, synthetic construct
  source 1..17: mol_type = other DNA
tcggggtagttctccgc

SEQ ID NO: 166648 - DNA, 17 bp, synthetic construct
  source 1..17: mol_type = other DNA
ctcggggtagttctccg

SEQ ID NO: 166649 - DNA, 17 bp, synthetic construct
  source 1..17: mol_type = other DNA
cctcggggtagttctcc

SEQ ID NO: 166650 - DNA, 17 bp, synthetic construct
  source 1..17: mol_type = other DNA
acctcggggtagttctc

SEQ ID NO: 166651 - DNA, 17 bp, synthetic construct
  source 1..17: mol_type = other DNA
tacctcggggtagttct

SEQ ID NO: 166652 - DNA, 17 bp, synthetic construct
  source 1..17: mol_type = other DNA
ttacctcggggtagttc

SEQ ID NO: 166653 - DNA, 17 bp, synthetic construct
  source 1..17: mol_type = other DNA
cttacctcggggtagtt

SEQ ID NO: 166654 - DNA, 17 bp, synthetic construct
  source 1..17: mol_type = other DNA
gcttacctcggggtagt

SEQ ID NO: 166655 - DNA, 17 bp, synthetic construct
  source 1..17: mol_type = other DNA
tgcttacctcggggtag

SEQ ID NO: 166656 - DNA, 17 bp, synthetic construct
  source 1..17: mol_type = other DNA
atgcttacctcggggta

SEQ ID NO: 166657 - DNA, 17 bp, synthetic construct
  source 1..17: mol_type = other DNA
gatgcttacctcggggt

SEQ ID NO: 166658 - DNA, 17 bp, synthetic construct
  source 1..17: mol_type = other DNA
cgatgcttacctcgggg

SEQ ID NO: 166659 - DNA, 17 bp, synthetic construct
  source 1..17: mol_type = other DNA
tcgatgcttacctcggg

SEQ ID NO: 166660 - DNA, 17 bp, synthetic construct
  source 1..17: mol_type = other DNA
gtcgatgcttacctcgg

SEQ ID NO: 166661 - DNA, 17 bp, synthetic construct
  source 1..17: mol_type = other DNA
ggtcgatgcttacctcg

SEQ ID NO: 166662 - DNA, 17 bp, synthetic construct
  source 1..17: mol_type = other DNA
tggtcgatgcttacctc

SEQ ID NO: 166663 - DNA, 17 bp, synthetic construct
  source 1..17: mol_type = other DNA
ctggtcgatgcttacct

SEQ ID NO: 166664 - DNA, 17 bp, synthetic construct
  source 1..17: mol_type = other DNA
cctggtcgatgcttacc

SEQ ID NO: 166665 - DNA, 17 bp, synthetic construct
  source 1..17: mol_type = other DNA
acctggtcgatgcttac

SEQ ID NO: 166666 - DNA, 17 bp, synthetic construct
  source 1..17: mol_type = other DNA
gacctggtcgatgctta

SEQ ID NO: 166667 - DNA, 17 bp, synthetic construct
  source 1..17: mol_type = other DNA
cgacctggtcgatgctt

SEQ ID NO: 166668 - DNA, 17 bp, synthetic construct
  source 1..17: mol_type = other DNA
ccgacctggtcgatgct

SEQ ID NO: 166669 - DNA, 17 bp, synthetic construct
  source 1..17: mol_type = other DNA
cccgacctggtcgatgc

SEQ ID NO: 166670 - DNA, 17 bp, synthetic construct
  source 1..17: mol_type = other DNA
gcccgacctggtcgatg

SEQ ID NO: 166671 - DNA, 17 bp, synthetic construct
  source 1..17: mol_type = other DNA
tgcccgacctggtcgat

SEQ ID NO: 166672 - DNA, 17 bp, synthetic construct
  source 1..17: mol_type = other DNA
ctgcccgacctggtcga

SEQ ID NO: 166673 - DNA, 17 bp, synthetic construct
  source 1..17: mol_type = other DNA
cctgcccgacctggtcg

SEQ ID NO: 166674 - DNA, 17 bp, synthetic construct
  source 1..17: mol_type = other DNA
acctgcccgacctggtc

SEQ ID NO: 166675 - DNA, 17 bp, synthetic construct
  source 1..17: mol_type = other DNA
cacctgcccgacctggt

SEQ ID NO: 166676 - DNA, 17 bp, synthetic construct
  source 1..17: mol_type = other DNA
gcacctgcccgacctgg

SEQ ID NO: 166677 - DNA, 17 bp, synthetic construct
  source 1..17: mol_type = other DNA
agcacctgcccgacctg

SEQ ID NO: 166678 - DNA, 17 bp, synthetic construct
  source 1..17: mol_type = other DNA
cagcacctgcccgacct

SEQ ID NO: 166679 - DNA, 17 bp, synthetic construct
  source 1..17: mol_type = other DNA
tcagcacctgcccgacc

SEQ ID NO: 166680 - DNA, 17 bp, synthetic construct
  source 1..17: mol_type = other DNA
gtcagcacctgcccgac

SEQ ID NO: 166681 - DNA, 17 bp, synthetic construct
  source 1..17: mol_type = other DNA
ggtcagcacctgcccga

SEQ ID NO: 166682 - DNA, 17 bp, synthetic construct
  source 1..17: mol_type = other DNA
aggtcagcacctgcccg

SEQ ID NO: 166683 - DNA, 17 bp, synthetic construct
  source 1..17: mol_type = other DNA
caggtcagcacctgccc

SEQ ID NO: 166684 - DNA, 17 bp, synthetic construct
  source 1..17: mol_type = other DNA
gcaggtcagcacctgcc

SEQ ID NO: 166685 - DNA, 17 bp, synthetic construct
  source 1..17: mol_type = other DNA
tgcaggtcagcacctgc

SEQ ID NO: 166686 - DNA, 17 bp, synthetic construct
  source 1..17: mol_type = other DNA
ctgcaggtcagcacctg

SEQ ID NO: 166687 - DNA, 17 bp, synthetic construct
  source 1..17: mol_type = other DNA
gctgcaggtcagcacct

SEQ ID NO: 166688 - DNA, 17 bp, synthetic construct
  source 1..17: mol_type = other DNA
ggctgcaggtcagcacc

SEQ ID NO: 166689 - DNA, 17 bp, synthetic construct
  source 1..17: mol_type = other DNA
aggctgcaggtcagcac

SEQ ID NO: 166690 - DNA, 17 bp, synthetic construct
  source 1..17: mol_type = other DNA
caggctgcaggtcagca

SEQ ID NO: 166691 - DNA, 17 bp, synthetic construct
  source 1..17: mol_type = other DNA
ccaggctgcaggtcagc

SEQ ID NO: 166692 - DNA, 17 bp, synthetic construct
  source 1..17: mol_type = other DNA
tccaggctgcaggtcag

SEQ ID NO: 166693 - DNA, 17 bp, synthetic construct
  source 1..17: mol_type = other DNA
ctccaggctgcaggtca

SEQ ID NO: 166694 - DNA, 17 bp, synthetic construct
  source 1..17: mol_type = other DNA
tctccaggctgcaggtc

SEQ ID NO: 166695 - DNA, 17 bp, synthetic construct
  source 1..17: mol_type = other DNA
gtctccaggctgcaggt

SEQ ID NO: 166696 - DNA, 17 bp, synthetic construct
  source 1..17: mol_type = other DNA
cgtctccaggctgcagg

SEQ ID NO: 166697 - DNA, 17 bp, synthetic construct
  source 1..17: mol_type = other DNA
ccgtctccaggctgcag

SEQ ID NO: 166698 - DNA, 17 bp, synthetic construct
  source 1..17: mol_type = other DNA
cccgtctccaggctgca

SEQ ID NO: 166699 - DNA, 17 bp, synthetic construct
  source 1..17: mol_type = other DNA
ccccgtctccaggctgc

SEQ ID NO: 166700 - DNA, 17 bp, synthetic construct
  source 1..17: mol_type = other DNA
gccccgtctccaggctg

SEQ ID NO: 166701 - DNA, 17 bp, synthetic construct
  source 1..17: mol_type = other DNA
agccccgtctccaggct

SEQ ID NO: 166702 - DNA, 17 bp, synthetic construct
  source 1..17: mol_type = other DNA
cagccccgtctccaggc

SEQ ID NO: 166703 - DNA, 17 bp, synthetic construct
  source 1..17: mol_type = other DNA
tcagccccgtctccagg

SEQ ID NO: 166704 - DNA, 17 bp, synthetic construct
  source 1..17: mol_type = other DNA
gtcagccccgtctccag

SEQ ID NO: 166705 - DNA, 17 bp, synthetic construct
  source 1..17: mol_type = other DNA
ggtcagccccgtctcca

SEQ ID NO: 166706 - DNA, 17 bp, synthetic construct
  source 1..17: mol_type = other DNA
aggtcagccccgtctcc

SEQ ID NO: 166707 - DNA, 17 bp, synthetic construct
  source 1..17: mol_type = other DNA
caggtcagccccgtctc

SEQ ID NO: 166708 - DNA, 17 bp, synthetic construct
  source 1..17: mol_type = other DNA
gcaggtcagccccgtct

SEQ ID NO: 166709 - DNA, 17 bp, synthetic construct
  source 1..17: mol_type = other DNA
tgcaggtcagccccgtc

SEQ ID NO: 166710 - DNA, 17 bp, synthetic construct
  source 1..17: mol_type = other DNA
ttgcaggtcagccccgt

SEQ ID NO: 166711 - DNA, 17 bp, synthetic construct
  source 1..17: mol_type = other DNA
cttgcaggtcagccccg

SEQ ID NO: 166712 - DNA, 17 bp, synthetic construct
  source 1..17: mol_type = other DNA
tcttgcaggtcagcccc

SEQ ID NO: 166713 - DNA, 17 bp, synthetic construct
  source 1..17: mol_type = other DNA
ttcttgcaggtcagccc

SEQ ID NO: 166714 - DNA, 17 bp, synthetic construct
  source 1..17: mol_type = other DNA
gttcttgcaggtcagcc

SEQ ID NO: 166715 - DNA, 17 bp, synthetic construct
  source 1..17: mol_type = other DNA
cgttcttgcaggtcagc

SEQ ID NO: 166716 - DNA, 17 bp, synthetic construct
  source 1..17: mol_type = other DNA
tcgttcttgcaggtcag

SEQ ID NO: 166717 - DNA, 17 bp, synthetic construct
  source 1..17: mol_type = other DNA
ttcgttcttgcaggtca

SEQ ID NO: 166718 - DNA, 17 bp, synthetic construct
  source 1..17: mol_type = other DNA
cttcgttcttgcaggtc

SEQ ID NO: 166719 - DNA, 17 bp, synthetic construct
  source 1..17: mol_type = other DNA
tcttcgttcttgcaggt

SEQ ID NO: 166720 - DNA, 17 bp, synthetic construct
  source 1..17: mol_type = other DNA
gtcttcgttcttgcagg

SEQ ID NO: 166721 - DNA, 17 bp, synthetic construct
  source 1..17: mol_type = other DNA
ggtcttcgttcttgcag

SEQ ID NO: 166722 - DNA, 17 bp, synthetic construct
  source 1..17: mol_type = other DNA
tggtcttcgttcttgca

SEQ ID NO: 166723 - DNA, 17 bp, synthetic construct
  source 1..17: mol_type = other DNA
ctggtcttcgttcttgc

SEQ ID NO: 166724 - DNA, 17 bp, synthetic construct
  source 1..17: mol_type = other DNA
tctggtcttcgttcttg

SEQ ID NO: 166725 - DNA, 17 bp, synthetic construct
  source 1..17: mol_type = other DNA
gtctggtcttcgttctt

SEQ ID NO: 166726 - DNA, 17 bp, synthetic construct
  source 1..17: mol_type = other DNA
tgtctggtcttcgttct

SEQ ID NO: 166727 - DNA, 17 bp, synthetic construct
  source 1..17: mol_type = other DNA
ctgtctggtcttcgttc

SEQ ID NO: 166728 - DNA, 17 bp, synthetic construct
  source 1..17: mol_type = other DNA
cctgtctggtcttcgtt

SEQ ID NO: 166729 - DNA, 17 bp, synthetic construct
  source 1..17: mol_type = other DNA
gcctgtctggtcttcgt

SEQ ID NO: 166730 - DNA, 17 bp, synthetic construct
  source 1..17: mol_type = other DNA
tgcctgtctggtcttcg

SEQ ID NO: 166731 - DNA, 17 bp, synthetic construct
  source 1..17: mol_type = other DNA
ctgcctgtctggtcttc

SEQ ID NO: 166732 - DNA, 17 bp, synthetic construct
  source 1..17: mol_type = other DNA
cctgcctgtctggtctt

SEQ ID NO: 166733 - DNA, 17 bp, synthetic construct
  source 1..17: mol_type = other DNA
acctgcctgtctggtct

SEQ ID NO: 166734 - DNA, 17 bp, synthetic construct
  source 1..17: mol_type = other DNA
aacctgcctgtctggtc

SEQ ID NO: 166735 - DNA, 17 bp, synthetic construct
  source 1..17: mol_type = other DNA
gaacctgcctgtctggt

SEQ ID NO: 166736 - DNA, 17 bp, synthetic construct
  source 1..17: mol_type = other DNA
tgaacctgcctgtctgg

SEQ ID NO: 166737 - DNA, 17 bp, synthetic construct
  source 1..17: mol_type = other DNA
ttgaacctgcctgtctg

SEQ ID NO: 166738 - DNA, 17 bp, synthetic construct
  source 1..17: mol_type = other DNA
gttgaacctgcctgtct

SEQ ID NO: 166739 - DNA, 17 bp, synthetic construct
  source 1..17: mol_type = other DNA
tgttgaacctgcctgtc

SEQ ID NO: 166740 - DNA, 17 bp, synthetic construct
  source 1..17: mol_type = other DNA
atgttgaacctgcctgt

SEQ ID NO: 166741 - DNA, 17 bp, synthetic construct
  source 1..17: mol_type = other DNA
catgttgaacctgcctg

SEQ ID NO: 166742 - DNA, 17 bp, synthetic construct
  source 1..17: mol_type = other DNA
acatgttgaacctgcct

SEQ ID NO: 166743 - DNA, 17 bp, synthetic construct
  source 1..17: mol_type = other DNA
cacatgttgaacctgcc

SEQ ID NO: 166744 - DNA, 17 bp, synthetic construct
  source 1..17: mol_type = other DNA
gcacatgttgaacctgc

SEQ ID NO: 166745 - DNA, 17 bp, synthetic construct
  source 1..17: mol_type = other DNA
agcacatgttgaacctg

SEQ ID NO: 166746 - DNA, 17 bp, synthetic construct
  source 1..17: mol_type = other DNA
aagcacatgttgaacct

SEQ ID NO: 166747 - DNA, 17 bp, synthetic construct
  source 1..17: mol_type = other DNA
gaagcacatgttgaacc

SEQ ID NO: 166748 - DNA, 17 bp, synthetic construct
  source 1..17: mol_type = other DNA
tgaagcacatgttgaac

SEQ ID NO: 166749 - DNA, 17 bp, synthetic construct
  source 1..17: mol_type = other DNA
ttgaagcacatgttgaa

SEQ ID NO: 166750 - DNA, 17 bp, synthetic construct
  source 1..17: mol_type = other DNA
gttgaagcacatgttga

SEQ ID NO: 166751 - DNA, 17 bp, synthetic construct
  source 1..17: mol_type = other DNA
agttgaagcacatgttg

SEQ ID NO: 166752 - DNA, 17 bp, synthetic construct
  source 1..17: mol_type = other DNA
tagttgaagcacatgtt

SEQ ID NO: 166753 - DNA, 17 bp, synthetic construct
  source 1..17: mol_type = other DNA
gtagttgaagcacatgt

SEQ ID NO: 166754 - DNA, 17 bp, synthetic construct
  source 1..17: mol_type = other DNA
tgtagttgaagcacatg

SEQ ID NO: 166755 - DNA, 17 bp, synthetic construct
  source 1..17: mol_type = other DNA
ttgtagttgaagcacat

SEQ ID NO: 166756 - DNA, 17 bp, synthetic construct
  source 1..17: mol_type = other DNA
gttgtagttgaagcaca

SEQ ID NO: 166757 - DNA, 17 bp, synthetic construct
  source 1..17: mol_type = other DNA
cgttgtagttgaagcac

SEQ ID NO: 166758 - DNA, 17 bp, synthetic construct
  source 1..17: mol_type = other DNA
acgttgtagttgaagca

SEQ ID NO: 166759 - DNA, 17 bp, synthetic construct
  source 1..17: mol_type = other DNA
cacgttgtagttgaagc

SEQ ID NO: 166760 - DNA, 17 bp, synthetic construct
  source 1..17: mol_type = other DNA
gcacgttgtagttgaag

SEQ ID NO: 166761 - DNA, 17 bp, synthetic construct
  source 1..17: mol_type = other DNA
cgcacgttgtagttgaa

SEQ ID NO: 166762 - DNA, 17 bp, synthetic construct
  source 1..17: mol_type = other DNA
acgcacgttgtagttga

SEQ ID NO: 166763 - DNA, 17 bp, synthetic construct
  source 1..17: mol_type = other DNA
cacgcacgttgtagttg

SEQ ID NO: 166764 - DNA, 17 bp, synthetic construct
  source 1..17: mol_type = other DNA
acacgcacgttgtagtt

SEQ ID NO: 166765 - DNA, 17 bp, synthetic construct
  source 1..17: mol_type = other DNA
cacacgcacgttgtagt

SEQ ID NO: 166766 - DNA, 17 bp, synthetic construct
  source 1..17: mol_type = other DNA
gcacacgcacgttgtag

SEQ ID NO: 166767 - DNA, 17 bp, synthetic construct
  source 1..17: mol_type = other DNA
agcacacgcacgttgta

SEQ ID NO: 166768 - DNA, 17 bp, synthetic construct
  source 1..17: mol_type = other DNA
aagcacacgcacgttgt

SEQ ID NO: 166769 - DNA, 17 bp, synthetic construct
  source 1..17: mol_type = other DNA
aaagcacacgcacgttg

SEQ ID NO: 166770 - DNA, 17 bp, synthetic construct
  source 1..17: mol_type = other DNA
caaagcacacgcacgtt

SEQ ID NO: 166771 - DNA, 17 bp, synthetic construct
  source 1..17: mol_type = other DNA
gcaaagcacacgcacgt

SEQ ID NO: 166772 - DNA, 17 bp, synthetic construct
  source 1..17: mol_type = other DNA
agcaaagcacacgcacg

SEQ ID NO: 166773 - DNA, 17 bp, synthetic construct
  source 1..17: mol_type = other DNA
cagcaaagcacacgcac

SEQ ID NO: 166774 - DNA, 17 bp, synthetic construct
  source 1..17: mol_type = other DNA
acagcaaagcacacgca

SEQ ID NO: 166775 - DNA, 17 bp, synthetic construct
  source 1..17: mol_type = other DNA
cacagcaaagcacacgc

SEQ ID NO: 166776 - DNA, 17 bp, synthetic construct
  source 1..17: mol_type = other DNA
tcacagcaaagcacacg

SEQ ID NO: 166777 - DNA, 17 bp, synthetic construct
  source 1..17: mol_type = other DNA
gtcacagcaaagcacac

SEQ ID NO: 166778 - DNA, 17 bp, synthetic construct
  source 1..17: mol_type = other DNA
cgtcacagcaaagcaca

SEQ ID NO: 166779 - DNA, 17 bp, synthetic construct
  source 1..17: mol_type = other DNA
tcgtcacagcaaagcac

SEQ ID NO: 166780 - DNA, 17 bp, synthetic construct
  source 1..17: mol_type = other DNA
gtcgtcacagcaaagca

SEQ ID NO: 166781 - DNA, 17 bp, synthetic construct
  source 1..17: mol_type = other DNA
agtcgtcacagcaaagc

SEQ ID NO: 166782 - DNA, 17 bp, synthetic construct
  source 1..17: mol_type = other DNA
tagtcgtcacagcaaag

SEQ ID NO: 166783 - DNA, 17 bp, synthetic construct
  source 1..17: mol_type = other DNA
gtagtcgtcacagcaaa

SEQ ID NO: 166784 - DNA, 17 bp, synthetic construct
  source 1..17: mol_type = other DNA
tgtagtcgtcacagcaa

SEQ ID NO: 166785 - DNA, 17 bp, synthetic construct
  source 1..17: mol_type = other DNA
ctgtagtcgtcacagca

SEQ ID NO: 166786 - DNA, 17 bp, synthetic construct
  source 1..17: mol_type = other DNA
gctgtagtcgtcacagc

SEQ ID NO: 166787 - DNA, 17 bp, synthetic construct
  source 1..17: mol_type = other DNA
ggctgtagtcgtcacag

SEQ ID NO: 166788 - DNA, 17 bp, synthetic construct
  source 1..17: mol_type = other DNA
tggctgtagtcgtcaca

SEQ ID NO: 166789 - DNA, 17 bp, synthetic construct
  source 1..17: mol_type = other DNA
gtggctgtagtcgtcac

SEQ ID NO: 166790 - DNA, 17 bp, synthetic construct
  source 1..17: mol_type = other DNA
agtggctgtagtcgtca

SEQ ID NO: 166791 - DNA, 17 bp, synthetic construct
  source 1..17: mol_type = other DNA
cagtggctgtagtcgtc

SEQ ID NO: 166792 - DNA, 17 bp, synthetic construct
  source 1..17: mol_type = other DNA
gcagtggctgtagtcgt

SEQ ID NO: 166793 - DNA, 17 bp, synthetic construct
  source 1..17: mol_type = other DNA
ggcagtggctgtagtcg

SEQ ID NO: 166794 - DNA, 17 bp, synthetic construct
  source 1..17: mol_type = other DNA
gggcagtggctgtagtc

SEQ ID NO: 166795 - DNA, 17 bp, synthetic construct
  source 1..17: mol_type = other DNA
ggggcagtggctgtagt

SEQ ID NO: 166796 - DNA, 17 bp, synthetic construct
  source 1..17: mol_type = other DNA
tggggcagtggctgtag

SEQ ID NO: 166797 - DNA, 17 bp, synthetic construct
  source 1..17: mol_type = other DNA
ctggggcagtggctgta

SEQ ID NO: 166798 - DNA, 17 bp, synthetic construct
  source 1..17: mol_type = other DNA
actggggcagtggctgt

SEQ ID NO: 166799 - DNA, 17 bp, synthetic construct
  source 1..17: mol_type = other DNA
tactggggcagtggctg

SEQ ID NO: 166800 - DNA, 17 bp, synthetic construct
  source 1..17: mol_type = other DNA
gtactggggcagtggct

SEQ ID NO: 166801 - DNA, 17 bp, synthetic construct
  source 1..17: mol_type = other DNA
ggtactggggcagtggc

SEQ ID NO: 166802 - DNA, 17 bp, synthetic construct
  source 1..17: mol_type = other DNA
gggtactggggcagtgg

SEQ ID NO: 166803 - DNA, 17 bp, synthetic construct
  source 1..17: mol_type = other DNA
ggggtactggggcagtg

SEQ ID NO: 166804 - DNA, 17 bp, synthetic construct
  source 1..17: mol_type = other DNA
tggggtactggggcagt

SEQ ID NO: 166805 - DNA, 17 bp, synthetic construct
  source 1..17: mol_type = other DNA
ctggggtactggggcag

SEQ ID NO: 166806 - DNA, 17 bp, synthetic construct
  source 1..17: mol_type = other DNA
gctggggtactggggca

SEQ ID NO: 166807 - DNA, 17 bp, synthetic construct
  source 1..17: mol_type = other DNA
ggctggggtactggggc

SEQ ID NO: 166808 - DNA, 17 bp, synthetic construct
  source 1..17: mol_type = other DNA
tggctggggtactgggg

SEQ ID NO: 166809 - DNA, 17 bp, synthetic construct
  source 1..17: mol_type = other DNA
gtggctggggtactggg

SEQ ID NO: 166810 - DNA, 17 bp, synthetic construct
  source 1..17: mol_type = other DNA
ggtggctggggtactgg

SEQ ID NO: 166811 - DNA, 17 bp, synthetic construct
  source 1..17: mol_type = other DNA
tggtggctggggtactg

SEQ ID NO: 166812 - DNA, 17 bp, synthetic construct
  source 1..17: mol_type = other DNA
ctggtggctggggtact

SEQ ID NO: 166813 - DNA, 17 bp, synthetic construct
  source 1..17: mol_type = other DNA
gctggtggctggggtac

SEQ ID NO: 166814 - DNA, 17 bp, synthetic construct
  source 1..17: mol_type = other DNA
agctggtggctggggta

SEQ ID NO: 166815 - DNA, 17 bp, synthetic construct
  source 1..17: mol_type = other DNA
gagctggtggctggggt

SEQ ID NO: 166816 - DNA, 17 bp, synthetic construct
  source 1..17: mol_type = other DNA
ggagctggtggctgggg

SEQ ID NO: 166817 - DNA, 17 bp, synthetic construct
  source 1..17: mol_type = other DNA
tggagctggtggctggg

SEQ ID NO: 166818 - DNA, 17 bp, synthetic construct
  source 1..17: mol_type = other DNA
gtggagctggtggctgg

SEQ ID NO: 166819 - DNA, 17 bp, synthetic construct
  source 1..17: mol_type = other DNA
cgtggagctggtggctg

SEQ ID NO: 166820 - DNA, 17 bp, synthetic construct
  source 1..17: mol_type = other DNA
ccgtggagctggtggct

SEQ ID NO: 166821 - DNA, 17 bp, synthetic construct
  source 1..17: mol_type = other DNA
gccgtggagctggtggc

SEQ ID NO: 166822 - DNA, 17 bp, synthetic construct
  source 1..17: mol_type = other DNA
ggccgtggagctggtgg

SEQ ID NO: 166823 - DNA, 17 bp, synthetic construct
  source 1..17: mol_type = other DNA
tggccgtggagctggtg

SEQ ID NO: 166824 - DNA, 17 bp, synthetic construct
  source 1..17: mol_type = other DNA
gtggccgtggagctggt

SEQ ID NO: 166825 - DNA, 17 bp, synthetic construct
  source 1..17: mol_type = other DNA
cgtggccgtggagctgg

SEQ ID NO: 166826 - DNA, 17 bp, synthetic construct
  source 1..17: mol_type = other DNA
gcgtggccgtggagctg

SEQ ID NO: 166827 - DNA, 17 bp, synthetic construct
  source 1..17: mol_type = other DNA
ggcgtggccgtggagct

SEQ ID NO: 166828 - DNA, 17 bp, synthetic construct
  source 1..17: mol_type = other DNA
gggcgtggccgtggagc

SEQ ID NO: 166829 - DNA, 17 bp, synthetic construct
  source 1..17: mol_type = other DNA
agggcgtggccgtggag

SEQ ID NO: 166830 - DNA, 17 bp, synthetic construct
  source 1..17: mol_type = other DNA
gagggcgtggccgtgga

SEQ ID NO: 166831 - DNA, 17 bp, synthetic construct
  source 1..17: mol_type = other DNA
ggagggcgtggccgtgg

SEQ ID NO: 166832 - DNA, 17 bp, synthetic construct
  source 1..17: mol_type = other DNA
aggagggcgtggccgtg

SEQ ID NO: 166833 - DNA, 17 bp, synthetic construct
  source 1..17: mol_type = other DNA
gaggagggcgtggccgt

SEQ ID NO: 166834 - DNA, 17 bp, synthetic construct
  source 1..17: mol_type = other DNA
tgaggagggcgtggccg

SEQ ID NO: 166835 - DNA, 17 bp, synthetic construct
  source 1..17: mol_type = other DNA
ttgaggagggcgtggcc

SEQ ID NO: 166836 - DNA, 17 bp, synthetic construct
  source 1..17: mol_type = other DNA
gttgaggagggcgtggc

SEQ ID NO: 166837 - DNA, 17 bp, synthetic construct
  source 1..17: mol_type = other DNA
agttgaggagggcgtgg

SEQ ID NO: 166838 - DNA, 17 bp, synthetic construct
  source 1..17: mol_type = other DNA
gagttgaggagggcgtg

SEQ ID NO: 166839 - DNA, 17 bp, synthetic construct
  source 1..17: mol_type = other DNA
ggagttgaggagggcgt

SEQ ID NO: 166840 - DNA, 17 bp, synthetic construct
  source 1..17: mol_type = other DNA
cggagttgaggagggcg

SEQ ID NO: 166841 - DNA, 17 bp, synthetic construct
  source 1..17: mol_type = other DNA
ccggagttgaggagggc

SEQ ID NO: 166842 - DNA, 17 bp, synthetic construct
  source 1..17: mol_type = other DNA
cccggagttgaggaggg

SEQ ID NO: 166843 - DNA, 17 bp, synthetic construct
  source 1..17: mol_type = other DNA
ccccggagttgaggagg

SEQ ID NO: 166844 - DNA, 17 bp, synthetic construct
  source 1..17: mol_type = other DNA
tccccggagttgaggag

SEQ ID NO: 166845 - DNA, 17 bp, synthetic construct
  source 1..17: mol_type = other DNA
gtccccggagttgagga

SEQ ID NO: 166846 - DNA, 17 bp, synthetic construct
  source 1..17: mol_type = other DNA
cgtccccggagttgagg

SEQ ID NO: 166847 - DNA, 17 bp, synthetic construct
  source 1..17: mol_type = other DNA
tcgtccccggagttgag

SEQ ID NO: 166848 - DNA, 17 bp, synthetic construct
  source 1..17: mol_type = other DNA
gtcgtccccggagttga

SEQ ID NO: 166849 - DNA, 17 bp, synthetic construct
  source 1..17: mol_type = other DNA
ggtcgtccccggagttg

SEQ ID NO: 166850 - DNA, 17 bp, synthetic construct
  source 1..17: mol_type = other DNA
aggtcgtccccggagtt

SEQ ID NO: 166851 - DNA, 17 bp, synthetic construct
  source 1..17: mol_type = other DNA
caggtcgtccccggagt

SEQ ID NO: 166852 - DNA, 17 bp, synthetic construct
  source 1..17: mol_type = other DNA
ccaggtcgtccccggag

SEQ ID NO: 166853 - DNA, 17 bp, synthetic construct
  source 1..17: mol_type = other DNA
tccaggtcgtccccgga

SEQ ID NO: 166854 - DNA, 17 bp, synthetic construct
  source 1..17: mol_type = other DNA
atccaggtcgtccccgg

SEQ ID NO: 166855 - DNA, 17 bp, synthetic construct
  source 1..17: mol_type = other DNA
gatccaggtcgtccccg

SEQ ID NO: 166856 - DNA, 17 bp, synthetic construct
  source 1..17: mol_type = other DNA
ggatccaggtcgtcccc

SEQ ID NO: 166857 - DNA, 17 bp, synthetic construct
  source 1..17: mol_type = other DNA
aggatccaggtcgtccc

SEQ ID NO: 166858 - DNA, 17 bp, synthetic construct
  source 1..17: mol_type = other DNA
gaggatccaggtcgtcc

SEQ ID NO: 166859 - DNA, 17 bp, synthetic construct
  source 1..17: mol_type = other DNA
tgaggatccaggtcgtc

SEQ ID NO: 166860 - DNA, 17 bp, synthetic construct
  source 1..17: mol_type = other DNA
gtgaggatccaggtcgt

SEQ ID NO: 166861 - DNA, 17 bp, synthetic construct
  source 1..17: mol_type = other DNA
tgtgaggatccaggtcg

SEQ ID NO: 166862 - DNA, 17 bp, synthetic construct
  source 1..17: mol_type = other DNA
ttgtgaggatccaggtc

SEQ ID NO: 166863 - DNA, 17 bp, synthetic construct
  source 1..17: mol_type = other DNA
tttgtgaggatccaggt

SEQ ID NO: 166864 - DNA, 17 bp, synthetic construct
  source 1..17: mol_type = other DNA
ctttgtgaggatccagg

SEQ ID NO: 166865 - DNA, 17 bp, synthetic construct
  source 1..17: mol_type = other DNA
gctttgtgaggatccag

SEQ ID NO: 166866 - DNA, 17 bp, synthetic construct
  source 1..17: mol_type = other DNA
ggctttgtgaggatcca

SEQ ID NO: 166867 - DNA, 17 bp, synthetic construct
  source 1..17: mol_type = other DNA
cggctttgtgaggatcc

SEQ ID NO: 166868 - DNA, 17 bp, synthetic construct
  source 1..17: mol_type = other DNA
tcggctttgtgaggatc

SEQ ID NO: 166869 - DNA, 17 bp, synthetic construct
  source 1..17: mol_type = other DNA
gtcggctttgtgaggat

SEQ ID NO: 166870 - DNA, 17 bp, synthetic construct
  source 1..17: mol_type = other DNA
ggtcggctttgtgagga

SEQ ID NO: 166871 - DNA, 17 bp, synthetic construct
  source 1..17: mol_type = other DNA
tggtcggctttgtgagg

SEQ ID NO: 166872 - DNA, 17 bp, synthetic construct
  source 1..17: mol_type = other DNA
gtggtcggctttgtgag

SEQ ID NO: 166873 - DNA, 17 bp, synthetic construct
  source 1..17: mol_type = other DNA
tgtggtcggctttgtga

SEQ ID NO: 166874 - DNA, 17 bp, synthetic construct
  source 1..17: mol_type = other DNA
ttgtggtcggctttgtg

SEQ ID NO: 166875 - DNA, 17 bp, synthetic construct
  source 1..17: mol_type = other DNA
gttgtggtcggctttgt

SEQ ID NO: 166876 - DNA, 17 bp, synthetic construct
  source 1..17: mol_type = other DNA
tgttgtggtcggctttg

SEQ ID NO: 166877 - DNA, 17 bp, synthetic construct
  source 1..17: mol_type = other DNA
ctgttgtggtcggcttt

SEQ ID NO: 166878 - DNA, 17 bp, synthetic construct
  source 1..17: mol_type = other DNA
gctgttgtggtcggctt

SEQ ID NO: 166879 - DNA, 17 bp, synthetic construct
  source 1..17: mol_type = other DNA
ggctgttgtggtcggct

SEQ ID NO: 166880 - DNA, 17 bp, synthetic construct
  source 1..17: mol_type = other DNA
tggctgttgtggtcggc

SEQ ID NO: 166881 - DNA, 17 bp, synthetic construct
  source 1..17: mol_type = other DNA
gtggctgttgtggtcgg

SEQ ID NO: 166882 - DNA, 17 bp, synthetic construct
  source 1..17: mol_type = other DNA
agtggctgttgtggtcg

SEQ ID NO: 166883 - DNA, 17 bp, synthetic construct
  source 1..17: mol_type = other DNA
tagtggctgttgtggtc

SEQ ID NO: 166884 - DNA, 17 bp, synthetic construct
  source 1..17: mol_type = other DNA
gtagtggctgttgtggt

SEQ ID NO: 166885 - DNA, 17 bp, synthetic construct
  source 1..17: mol_type = other DNA
cgtagtggctgttgtgg

SEQ ID NO: 166886 - DNA, 17 bp, synthetic construct
  source 1..17: mol_type = other DNA
tcgtagtggctgttgtg

SEQ ID NO: 166887 - DNA, 17 bp, synthetic construct
  source 1..17: mol_type = other DNA
gtcgtagtggctgttgt

SEQ ID NO: 166888 - DNA, 17 bp, synthetic construct
  source 1..17: mol_type = other DNA
agtcgtagtggctgttg

SEQ ID NO: 166889 - DNA, 17 bp, synthetic construct
  source 1..17: mol_type = other DNA
cagtcgtagtggctgtt

SEQ ID NO: 166890 - DNA, 17 bp, synthetic construct
  source 1..17: mol_type = other DNA
gcagtcgtagtggctgt

SEQ ID NO: 166891 - DNA, 17 bp, synthetic construct
  source 1..17: mol_type = other DNA
cgcagtcgtagtggctg

SEQ ID NO: 166892 - DNA, 17 bp, synthetic construct
  source 1..17: mol_type = other DNA
acgcagtcgtagtggct

SEQ ID NO: 166893 - DNA, 17 bp, synthetic construct
  source 1..17: mol_type = other DNA
gacgcagtcgtagtggc

SEQ ID NO: 166894 - DNA, 17 bp, synthetic construct
  source 1..17: mol_type = other DNA
ggacgcagtcgtagtgg

SEQ ID NO: 166895 - DNA, 17 bp, synthetic construct
  source 1..17: mol_type = other DNA
tggacgcagtcgtagtg

SEQ ID NO: 166896 - DNA, 17 bp, synthetic construct
  source 1..17: mol_type = other DNA
gtggacgcagtcgtagt

SEQ ID NO: 166897 - DNA, 17 bp, synthetic construct
  source 1..17: mol_type = other DNA
agtggacgcagtcgtag

SEQ ID NO: 166898 - DNA, 17 bp, synthetic construct
  source 1..17: mol_type = other DNA
cagtggacgcagtcgta

SEQ ID NO: 166899 - DNA, 17 bp, synthetic construct
  source 1..17: mol_type = other DNA
ccagtggacgcagtcgt

SEQ ID NO: 166900 - DNA, 17 bp, synthetic construct
  source 1..17: mol_type = other DNA
tccagtggacgcagtcg

SEQ ID NO: 166901 - DNA, 17 bp, synthetic construct
  source 1..17: mol_type = other DNA
atccagtggacgcagtc

SEQ ID NO: 166902 - DNA, 17 bp, synthetic construct
  source 1..17: mol_type = other DNA
gatccagtggacgcagt

SEQ ID NO: 166903 - DNA, 17 bp, synthetic construct
  source 1..17: mol_type = other DNA
ggatccagtggacgcag

SEQ ID NO: 166904 - DNA, 17 bp, synthetic construct
  source 1..17: mol_type = other DNA
tggatccagtggacgca

SEQ ID NO: 166905 - DNA, 17 bp, synthetic construct
  source 1..17: mol_type = other DNA
gtggatccagtggacgc

SEQ ID NO: 166906 - DNA, 17 bp, synthetic construct
  source 1..17: mol_type = other DNA
cgtggatccagtggacg

SEQ ID NO: 166907 - DNA, 17 bp, synthetic construct
  source 1..17: mol_type = other DNA
ccgtggatccagtggac

SEQ ID NO: 166908 - DNA, 17 bp, synthetic construct
  source 1..17: mol_type = other DNA
gccgtggatccagtgga

SEQ ID NO: 166909 - DNA, 17 bp, synthetic construct
  source 1..17: mol_type = other DNA
ggccgtggatccagtgg

SEQ ID NO: 166910 - DNA, 17 bp, synthetic construct
  source 1..17: mol_type = other DNA
tggccgtggatccagtg

SEQ ID NO: 166911 - DNA, 17 bp, synthetic construct
  source 1..17: mol_type = other DNA
gtggccgtggatccagt

SEQ ID NO: 166912 - DNA, 17 bp, synthetic construct
  source 1..17: mol_type = other DNA
ggtggccgtggatccag

SEQ ID NO: 166913 - DNA, 17 bp, synthetic construct
  source 1..17: mol_type = other DNA
gggtggccgtggatcca

SEQ ID NO: 166914 - DNA, 17 bp, synthetic construct
  source 1..17: mol_type = other DNA
ggggtggccgtggatcc

SEQ ID NO: 166915 - DNA, 17 bp, synthetic construct
  source 1..17: mol_type = other DNA
cggggtggccgtggatc

SEQ ID NO: 166916 - DNA, 17 bp, synthetic construct
  source 1..17: mol_type = other DNA
tcggggtggccgtggat

SEQ ID NO: 166917 - DNA, 17 bp, synthetic construct
  source 1..17: mol_type = other DNA
gtcggggtggccgtgga

SEQ ID NO: 166918 - DNA, 17 bp, synthetic construct
  source 1..17: mol_type = other DNA
ggtcggggtggccgtgg

SEQ ID NO: 166919 - DNA, 17 bp, synthetic construct
  source 1..17: mol_type = other DNA
aggtcggggtggccgtg

SEQ ID NO: 166920 - DNA, 17 bp, synthetic construct
  source 1..17: mol_type = other DNA
gaggtcggggtggccgt

SEQ ID NO: 166921 - DNA, 17 bp, synthetic construct
  source 1..17: mol_type = other DNA
ggaggtcggggtggccg

SEQ ID NO: 166922 - DNA, 17 bp, synthetic construct
  source 1..17: mol_type = other DNA
tggaggtcggggtggcc

SEQ ID NO: 166923 - DNA, 17 bp, synthetic construct
  source 1..17: mol_type = other DNA
gtggaggtcggggtggc

SEQ ID NO: 166924 - DNA, 17 bp, synthetic construct
  source 1..17: mol_type = other DNA
ggtggaggtcggggtgg

SEQ ID NO: 166925 - DNA, 17 bp, synthetic construct
  source 1..17: mol_type = other DNA
gggtggaggtcggggtg

SEQ ID NO: 166926 - DNA, 17 bp, synthetic construct
  source 1..17: mol_type = other DNA
agggtggaggtcggggt

SEQ ID NO: 166927 - DNA, 17 bp, synthetic construct
  source 1..17: mol_type = other DNA
cagggtggaggtcgggg

SEQ ID NO: 166928 - DNA, 17 bp, synthetic construct
  source 1..17: mol_type = other DNA
tcagggtggaggtcggg

SEQ ID NO: 166929 - DNA, 17 bp, synthetic construct
  source 1..17: mol_type = other DNA
ctcagggtggaggtcgg

SEQ ID NO: 166930 - DNA, 17 bp, synthetic construct
  source 1..17: mol_type = other DNA
tctcagggtggaggtcg

SEQ ID NO: 166931 - DNA, 17 bp, synthetic construct
  source 1..17: mol_type = other DNA
ttctcagggtggaggtc

SEQ ID NO: 166932 - DNA, 17 bp, synthetic construct
  source 1..17: mol_type = other DNA
gttctcagggtggaggt

SEQ ID NO: 166933 - DNA, 17 bp, synthetic construct
  source 1..17: mol_type = other DNA
tgttctcagggtggagg

SEQ ID NO: 166934 - DNA, 17 bp, synthetic construct
  source 1..17: mol_type = other DNA
ctgttctcagggtggag

SEQ ID NO: 166935 - DNA, 17 bp, synthetic construct
  source 1..17: mol_type = other DNA
gctgttctcagggtgga

SEQ ID NO: 166936 - DNA, 17 bp, synthetic construct
  source 1..17: mol_type = other DNA
agctgttctcagggtgg

SEQ ID NO: 166937 - DNA, 17 bp, synthetic construct
  source 1..17: mol_type = other DNA
gagctgttctcagggtg

SEQ ID NO: 166938 - DNA, 17 bp, synthetic construct
  source 1..17: mol_type = other DNA
ggagctgttctcagggt

SEQ ID NO: 166939 - DNA, 17 bp, synthetic construct
  source 1..17: mol_type = other DNA
gggagctgttctcaggg

SEQ ID NO: 166940 - DNA, 17 bp, synthetic construct
  source 1..17: mol_type = other DNA
ggggagctgttctcagg

SEQ ID NO: 166941 - DNA, 17 bp, synthetic construct
  source 1..17: mol_type = other DNA
gggggagctgttctcag

SEQ ID NO: 166942 - DNA, 17 bp, synthetic construct
  source 1..17: mol_type = other DNA
agggggagctgttctca

SEQ ID NO: 166943 - DNA, 17 bp, synthetic construct
  source 1..17: mol_type = other DNA
gagggggagctgttctc

SEQ ID NO: 166944 - DNA, 17 bp, synthetic construct
  source 1..17: mol_type = other DNA
ggagggggagctgttct

SEQ ID NO: 166945 - DNA, 17 bp, synthetic construct
  source 1..17: mol_type = other DNA
gggagggggagctgttc

SEQ ID NO: 166946 - DNA, 17 bp, synthetic construct
  source 1..17: mol_type = other DNA
tgggagggggagctgtt

SEQ ID NO: 166947 - DNA, 17 bp, synthetic construct
  source 1..17: mol_type = other DNA
ttgggagggggagctgt

SEQ ID NO: 166948 - DNA, 17 bp, synthetic construct
  source 1..17: mol_type = other DNA
tttgggagggggagctg

SEQ ID NO: 166949 - DNA, 17 bp, synthetic construct
  source 1..17: mol_type = other DNA
ctttgggagggggagct

SEQ ID NO: 166950 - DNA, 17 bp, synthetic construct
  source 1..17: mol_type = other DNA
actttgggagggggagc

SEQ ID NO: 166951 - DNA, 17 bp, synthetic construct
  source 1..17: mol_type = other DNA
cactttgggagggggag

SEQ ID NO: 166952 - DNA, 17 bp, synthetic construct
  source 1..17: mol_type = other DNA
gcactttgggaggggga

SEQ ID NO: 166953 - DNA, 17 bp, synthetic construct
  source 1..17: mol_type = other DNA
agcactttgggaggggg

SEQ ID NO: 166954 - DNA, 17 bp, synthetic construct
  source 1..17: mol_type = other DNA
cagcactttgggagggg

SEQ ID NO: 166955 - DNA, 17 bp, synthetic construct
  source 1..17: mol_type = other DNA
tcagcactttgggaggg

SEQ ID NO: 166956 - DNA, 17 bp, synthetic construct
  source 1..17: mol_type = other DNA
gtcagcactttgggagg

SEQ ID NO: 166957 - DNA, 17 bp, synthetic construct
  source 1..17: mol_type = other DNA
ggtcagcactttgggag

SEQ ID NO: 166958 - DNA, 17 bp, synthetic construct
  source 1..17: mol_type = other DNA
tggtcagcactttggga

SEQ ID NO: 166959 - DNA, 17 bp, synthetic construct
  source 1..17: mol_type = other DNA
gtggtcagcactttggg

SEQ ID NO: 166960 - DNA, 17 bp, synthetic construct
  source 1..17: mol_type = other DNA
ggtggtcagcactttgg

SEQ ID NO: 166961 - DNA, 17 bp, synthetic construct
  source 1..17: mol_type = other DNA
tggtggtcagcactttg

SEQ ID NO: 166962 - DNA, 17 bp, synthetic construct
  source 1..17: mol_type = other DNA
gtggtggtcagcacttt

SEQ ID NO: 166963 - DNA, 17 bp, synthetic construct
  source 1..17: mol_type = other DNA
cgtggtggtcagcactt

SEQ ID NO: 166964 - DNA, 17 bp, synthetic construct
  source 1..17: mol_type = other DNA
ccgtggtggtcagcact

SEQ ID NO: 166965 - DNA, 17 bp, synthetic construct
  source 1..17: mol_type = other DNA
gccgtggtggtcagcac

SEQ ID NO: 166966 - DNA, 17 bp, synthetic construct
  source 1..17: mol_type = other DNA
ggccgtggtggtcagca

SEQ ID NO: 166967 - DNA, 17 bp, synthetic construct
  source 1..17: mol_type = other DNA
tggccgtggtggtcagc

SEQ ID NO: 166968 - DNA, 17 bp, synthetic construct
  source 1..17: mol_type = other DNA
gtggccgtggtggtcag

SEQ ID NO: 166969 - DNA, 17 bp, synthetic construct
  source 1..17: mol_type = other DNA
ggtggccgtggtggtca

SEQ ID NO: 166970 - DNA, 17 bp, synthetic construct
  source 1..17: mol_type = other DNA
tggtggccgtggtggtc

SEQ ID NO: 166971 - DNA, 17 bp, synthetic construct
  source 1..17: mol_type = other DNA
gtggtggccgtggtggt

SEQ ID NO: 166972 - DNA, 17 bp, synthetic construct
  source 1..17: mol_type = other DNA
tgtggtggccgtggtgg

SEQ ID NO: 166973 - DNA, 17 bp, synthetic construct
  source 1..17: mol_type = other DNA
gtgtggtggccgtggtg

SEQ ID NO: 166974 - DNA, 17 bp, synthetic construct
  source 1..17: mol_type = other DNA
ggtgtggtggccgtggt

SEQ ID NO: 166975 - DNA, 17 bp, synthetic construct
  source 1..17: mol_type = other DNA
gggtgtggtggccgtgg

SEQ ID NO: 166976 - DNA, 17 bp, synthetic construct
  source 1..17: mol_type = other DNA
tgggtgtggtggccgtg

SEQ ID NO: 166977 - DNA, 17 bp, synthetic construct
  source 1..17: mol_type = other DNA
gtgggtgtggtggccgt

SEQ ID NO: 166978 - DNA, 17 bp, synthetic construct
  source 1..17: mol_type = other DNA
tgtgggtgtggtggccg

SEQ ID NO: 166979 - DNA, 17 bp, synthetic construct
  source 1..17: mol_type = other DNA
ctgtgggtgtggtggcc

SEQ ID NO: 166980 - DNA, 17 bp, synthetic construct
  source 1..17: mol_type = other DNA
actgtgggtgtggtggc

SEQ ID NO: 166981 - DNA, 17 bp, synthetic construct
  source 1..17: mol_type = other DNA
gactgtgggtgtggtgg

SEQ ID NO: 166982 - DNA, 17 bp, synthetic construct
  source 1..17: mol_type = other DNA
tgactgtgggtgtggtg

SEQ ID NO: 166983 - DNA, 17 bp, synthetic construct
  source 1..17: mol_type = other DNA
gtgactgtgggtgtggt

SEQ ID NO: 166984 - DNA, 17 bp, synthetic construct
  source 1..17: mol_type = other DNA
ggtgactgtgggtgtgg

SEQ ID NO: 166985 - DNA, 17 bp, synthetic construct
  source 1..17: mol_type = other DNA
tggtgactgtgggtgtg

SEQ ID NO: 166986 - DNA, 17 bp, synthetic construct
  source 1..17: mol_type = other DNA
ctggtgactgtgggtgt

SEQ ID NO: 166987 - DNA, 17 bp, synthetic construct
  source 1..17: mol_type = other DNA
gctggtgactgtgggtg

SEQ ID NO: 166988 - DNA, 17 bp, synthetic construct
  source 1..17: mol_type = other DNA
agctggtgactgtgggt

SEQ ID NO: 166989 - DNA, 17 bp, synthetic construct
  source 1..17: mol_type = other DNA
gagctggtgactgtggg

SEQ ID NO: 166990 - DNA, 17 bp, synthetic construct
  source 1..17: mol_type = other DNA
ggagctggtgactgtgg

SEQ ID NO: 166991 - DNA, 17 bp, synthetic construct
  source 1..17: mol_type = other DNA
tggagctggtgactgtg

SEQ ID NO: 166992 - DNA, 17 bp, synthetic construct
  source 1..17: mol_type = other DNA
ttggagctggtgactgt

SEQ ID NO: 166993 - DNA, 17 bp, synthetic construct
  source 1..17: mol_type = other DNA
tttggagctggtgactg

SEQ ID NO: 166994 - DNA, 17 bp, synthetic construct
  source 1..17: mol_type = other DNA
ctttggagctggtgact

SEQ ID NO: 166995 - DNA, 17 bp, synthetic construct
  source 1..17: mol_type = other DNA
gctttggagctggtgac

SEQ ID NO: 166996 - DNA, 17 bp, synthetic construct
  source 1..17: mol_type = other DNA
ggctttggagctggtga

SEQ ID NO: 166997 - DNA, 17 bp, synthetic construct
  source 1..17: mol_type = other DNA
tggctttggagctggtg

SEQ ID NO: 166998 - DNA, 17 bp, synthetic construct
  source 1..17: mol_type = other DNA
gtggctttggagctggt

SEQ ID NO: 166999 - DNA, 17 bp, synthetic construct
  source 1..17: mol_type = other DNA
agtggctttggagctgg

SEQ ID NO: 167000 - DNA, 17 bp, synthetic construct
  source 1..17: mol_type = other DNA
gagtggctttggagctg

SEQ ID NO: 167001 - DNA, 17 bp, synthetic construct
  source 1..17: mol_type = other DNA
ggagtggctttggagct

SEQ ID NO: 167002 - DNA, 17 bp, synthetic construct
  source 1..17: mol_type = other DNA
gggagtggctttggagc

SEQ ID NO: 167003 - DNA, 17 bp, synthetic construct
  source 1..17: mol_type = other DNA
agggagtggctttggag

SEQ ID NO: 167004 - DNA, 17 bp, synthetic construct
  source 1..17: mol_type = other DNA
gagggagtggctttgga

SEQ ID NO: 167005 - DNA, 17 bp, synthetic construct
  source 1..17: mol_type = other DNA
ggagggagtggctttgg

SEQ ID NO: 167006 - DNA, 17 bp, synthetic construct
  source 1..17: mol_type = other DNA
aggagggagtggctttg

SEQ ID NO: 167007 - DNA, 17 bp, synthetic construct
  source 1..17: mol_type = other DNA
gaggagggagtggcttt

SEQ ID NO: 167008 - DNA, 17 bp, synthetic construct
  source 1..17: mol_type = other DNA
ggaggagggagtggctt

SEQ ID NO: 167009 - DNA, 17 bp, synthetic construct
  source 1..17: mol_type = other DNA
tggaggagggagtggct

SEQ ID NO: 167010 - DNA, 17 bp, synthetic construct
  source 1..17: mol_type = other DNA
ctggaggagggagtggc

SEQ ID NO: 167011 - DNA, 17 bp, synthetic construct
  source 1..17: mol_type = other DNA
actggaggagggagtgg

SEQ ID NO: 167012 - DNA, 17 bp, synthetic construct
  source 1..17: mol_type = other DNA
gactggaggagggagtg

SEQ ID NO: 167013 - DNA, 17 bp, synthetic construct
  source 1..17: mol_type = other DNA
ggactggaggagggagt

SEQ ID NO: 167014 - DNA, 17 bp, synthetic construct
  source 1..17: mol_type = other DNA
tggactggaggagggag

SEQ ID NO: 167015 - DNA, 17 bp, synthetic construct
  source 1..17: mol_type = other DNA
ctggactggaggaggga

SEQ ID NO: 167016 - DNA, 17 bp, synthetic construct
  source 1..17: mol_type = other DNA
cctggactggaggaggg

SEQ ID NO: 167017 - DNA, 17 bp, synthetic construct
  source 1..17: mol_type = other DNA
ccctggactggaggagg

SEQ ID NO: 167018 - DNA, 17 bp, synthetic construct
  source 1..17: mol_type = other DNA
tccctggactggaggag

SEQ ID NO: 167019 - DNA, 17 bp, synthetic construct
  source 1..17: mol_type = other DNA
gtccctggactggagga

SEQ ID NO: 167020 - DNA, 17 bp, synthetic construct
  source 1..17: mol_type = other DNA
agtccctggactggagg

SEQ ID NO: 167021 - DNA, 17 bp, synthetic construct
  source 1..17: mol_type = other DNA
cagtccctggactggag

SEQ ID NO: 167022 - DNA, 17 bp, synthetic construct
  source 1..17: mol_type = other DNA
gcagtccctggactgga

SEQ ID NO: 167023 - DNA, 17 bp, synthetic construct
  source 1..17: mol_type = other DNA
tgcagtccctggactgg

SEQ ID NO: 167024 - DNA, 17 bp, synthetic construct
  source 1..17: mol_type = other DNA
ttgcagtccctggactg

SEQ ID NO: 167025 - DNA, 17 bp, synthetic construct
  source 1..17: mol_type = other DNA
gttgcagtccctggact

SEQ ID NO: 167026 - DNA, 17 bp, synthetic construct
  source 1..17: mol_type = other DNA
ggttgcagtccctggac

SEQ ID NO: 167027 - DNA, 17 bp, synthetic construct
  source 1..17: mol_type = other DNA
cggttgcagtccctgga

SEQ ID NO: 167028 - DNA, 17 bp, synthetic construct
  source 1..17: mol_type = other DNA
gcggttgcagtccctgg

SEQ ID NO: 167029 - DNA, 17 bp, synthetic construct
  source 1..17: mol_type = other DNA
ggcggttgcagtccctg

SEQ ID NO: 167030 - DNA, 17 bp, synthetic construct
  source 1..17: mol_type = other DNA
gggcggttgcagtccct

SEQ ID NO: 167031 - DNA, 17 bp, synthetic construct
  source 1..17: mol_type = other DNA
agggcggttgcagtccc

SEQ ID NO: 167032 - DNA, 17 bp, synthetic construct
  source 1..17: mol_type = other DNA
aagggcggttgcagtcc

SEQ ID NO: 167033 - DNA, 17 bp, synthetic construct
  source 1..17: mol_type = other DNA
gaagggcggttgcagtc

SEQ ID NO: 167034 - DNA, 17 bp, synthetic construct
  source 1..17: mol_type = other DNA
ggaagggcggttgcagt

SEQ ID NO: 167035 - DNA, 17 bp, synthetic construct
  source 1..17: mol_type = other DNA
tggaagggcggttgcag

SEQ ID NO: 167036 - DNA, 17 bp, synthetic construct
  source 1..17: mol_type = other DNA
ctggaagggcggttgca

SEQ ID NO: 167037 - DNA, 17 bp, synthetic construct
  source 1..17: mol_type = other DNA
gctggaagggcggttgc

SEQ ID NO: 167038 - DNA, 17 bp, synthetic construct
  source 1..17: mol_type = other DNA
tgctggaagggcggttg

SEQ ID NO: 167039 - DNA, 17 bp, synthetic construct
  source 1..17: mol_type = other DNA
gtgctggaagggcggtt

SEQ ID NO: 167040 - DNA, 17 bp, synthetic construct
  source 1..17: mol_type = other DNA
agtgctggaagggcggt

SEQ ID NO: 167041 - DNA, 17 bp, synthetic construct
  source 1..17: mol_type = other DNA
cagtgctggaagggcgg

SEQ ID NO: 167042 - DNA, 17 bp, synthetic construct
  source 1..17: mol_type = other DNA
tcagtgctggaagggcg

SEQ ID NO: 167043 - DNA, 17 bp, synthetic construct
  source 1..17: mol_type = other DNA
ctcagtgctggaagggc

SEQ ID NO: 167044 - DNA, 17 bp, synthetic construct
  source 1..17: mol_type = other DNA
tctcagtgctggaaggg

SEQ ID NO: 167045 - DNA, 17 bp, synthetic construct
  source 1..17: mol_type = other DNA
ttctcagtgctggaagg

SEQ ID NO: 167046 - DNA, 17 bp, synthetic construct
  source 1..17: mol_type = other DNA
cttctcagtgctggaag

SEQ ID NO: 167047 - DNA, 17 bp, synthetic construct
  source 1..17: mol_type = other DNA
gcttctcagtgctggaa

SEQ ID NO: 167048 - DNA, 17 bp, synthetic construct
  source 1..17: mol_type = other DNA
tgcttctcagtgctgga

SEQ ID NO: 167049 - DNA, 17 bp, synthetic construct
  source 1..17: mol_type = other DNA
gtgcttctcagtgctgg

SEQ ID NO: 167050 - DNA, 17 bp, synthetic construct
  source 1..17: mol_type = other DNA
tgtgcttctcagtgctg

SEQ ID NO: 167051 - DNA, 17 bp, synthetic construct
  source 1..17: mol_type = other DNA
ctgtgcttctcagtgct

SEQ ID NO: 167052 - DNA, 17 bp, synthetic construct
  source 1..17: mol_type = other DNA
gctgtgcttctcagtgc

SEQ ID NO: 167053 - DNA, 17 bp, synthetic construct
  source 1..17: mol_type = other DNA
ggctgtgcttctcagtg

SEQ ID NO: 167054 - DNA, 17 bp, synthetic construct
  source 1..17: mol_type = other DNA
tggctgtgcttctcagt

SEQ ID NO: 167055 - DNA, 17 bp, synthetic construct
  source 1..17: mol_type = other DNA
gtggctgtgcttctcag

SEQ ID NO: 167056 - DNA, 17 bp, synthetic construct
  source 1..17: mol_type = other DNA
ggtggctgtgcttctca

SEQ ID NO: 167057 - DNA, 17 bp, synthetic construct
  source 1..17: mol_type = other DNA
tggtggctgtgcttctc

SEQ ID NO: 167058 - DNA, 17 bp, synthetic construct
  source 1..17: mol_type = other DNA
gtggtggctgtgcttct

SEQ ID NO: 167059 - DNA, 17 bp, synthetic construct
  source 1..17: mol_type = other DNA
tgtggtggctgtgcttc

SEQ ID NO: 167060 - DNA, 17 bp, synthetic construct
  source 1..17: mol_type = other DNA
gtgtggtggctgtgctt

SEQ ID NO: 167061 - DNA, 17 bp, synthetic construct
  source 1..17: mol_type = other DNA
ggtgtggtggctgtgct

SEQ ID NO: 167062 - DNA, 17 bp, synthetic construct
  source 1..17: mol_type = other DNA
gggtgtggtggctgtgc

SEQ ID NO: 167063 - DNA, 17 bp, synthetic construct
  source 1..17: mol_type = other DNA
tgggtgtggtggctgtg

SEQ ID NO: 167064 - DNA, 17 bp, synthetic construct
  source 1..17: mol_type = other DNA
gtgggtgtggtggctgt

SEQ ID NO: 167065 - DNA, 17 bp, synthetic construct
  source 1..17: mol_type = other DNA
tgtgggtgtggtggctg

SEQ ID NO: 167066 - DNA, 17 bp, synthetic construct
  source 1..17: mol_type = other DNA
ctgtgggtgtggtggct

SEQ ID NO: 167067 - DNA, 17 bp, synthetic construct
  source 1..17: mol_type = other DNA
gctgtgggtgtggtggc

SEQ ID NO: 167068 - DNA, 17 bp, synthetic construct
  source 1..17: mol_type = other DNA
agctgtgggtgtggtgg

SEQ ID NO: 167069 - DNA, 17 bp, synthetic construct
  source 1..17: mol_type = other DNA
tagctgtgggtgtggtg

SEQ ID NO: 167070 - DNA, 17 bp, synthetic construct
  source 1..17: mol_type = other DNA
gtagctgtgggtgtggt

SEQ ID NO: 167071 - DNA, 17 bp, synthetic construct
  source 1..17: mol_type = other DNA
ggtagctgtgggtgtgg

SEQ ID NO: 167072 - DNA, 17 bp, synthetic construct
  source 1..17: mol_type = other DNA
tggtagctgtgggtgtg

SEQ ID NO: 167073 - DNA, 17 bp, synthetic construct
  source 1..17: mol_type = other DNA
ctggtagctgtgggtgt

SEQ ID NO: 167074 - DNA, 17 bp, synthetic construct
  source 1..17: mol_type = other DNA
gctggtagctgtgggtg

SEQ ID NO: 167075 - DNA, 17 bp, synthetic construct
  source 1..17: mol_type = other DNA
cgctggtagctgtgggt

SEQ ID NO: 167076 - DNA, 17 bp, synthetic construct
  source 1..17: mol_type = other DNA
acgctggtagctgtggg

SEQ ID NO: 167077 - DNA, 17 bp, synthetic construct
  source 1..17: mol_type = other DNA
aacgctggtagctgtgg

SEQ ID NO: 167078 - DNA, 17 bp, synthetic construct
  source 1..17: mol_type = other DNA
taacgctggtagctgtg

SEQ ID NO: 167079 - DNA, 17 bp, synthetic construct
  source 1..17: mol_type = other DNA
gtaacgctggtagctgt

SEQ ID NO: 167080 - DNA, 17 bp, synthetic construct
  source 1..17: mol_type = other DNA
tgtaacgctggtagctg

SEQ ID NO: 167081 - DNA, 17 bp, synthetic construct
  source 1..17: mol_type = other DNA
gtgtaacgctggtagct

SEQ ID NO: 167082 - DNA, 17 bp, synthetic construct
  source 1..17: mol_type = other DNA
ggtgtaacgctggtagc

SEQ ID NO: 167083 - DNA, 17 bp, synthetic construct
  source 1..17: mol_type = other DNA
gggtgtaacgctggtag

SEQ ID NO: 167084 - DNA, 17 bp, synthetic construct
  source 1..17: mol_type = other DNA
tgggtgtaacgctggta

SEQ ID NO: 167085 - DNA, 17 bp, synthetic construct
  source 1..17: mol_type = other DNA
atgggtgtaacgctggt

SEQ ID NO: 167086 - DNA, 17 bp, synthetic construct
  source 1..17: mol_type = other DNA
gatgggtgtaacgctgg

SEQ ID NO: 167087 - DNA, 17 bp, synthetic construct
  source 1..17: mol_type = other DNA
ggatgggtgtaacgctg

SEQ ID NO: 167088 - DNA, 17 bp, synthetic construct
  source 1..17: mol_type = other DNA
gggatgggtgtaacgct

SEQ ID NO: 167089 - DNA, 17 bp, synthetic construct
  source 1..17: mol_type = other DNA
ggggatgggtgtaacgc

SEQ ID NO: 167090 - DNA, 17 bp, synthetic construct
  source 1..17: mol_type = other DNA
aggggatgggtgtaacg

SEQ ID NO: 167091 - DNA, 17 bp, synthetic construct
  source 1..17: mol_type = other DNA
gaggggatgggtgtaac

SEQ ID NO: 167092 - DNA, 17 bp, synthetic construct
  source 1..17: mol_type = other DNA
agaggggatgggtgtaa

SEQ ID NO: 167093 - DNA, 17 bp, synthetic construct
  source 1..17: mol_type = other DNA
aagaggggatgggtgta

SEQ ID NO: 167094 - DNA, 17 bp, synthetic construct
  source 1..17: mol_type = other DNA
gaagaggggatgggtgt

SEQ ID NO: 167095 - DNA, 17 bp, synthetic construct
  source 1..17: mol_type = other DNA
ggaagaggggatgggtg

SEQ ID NO: 167096 - DNA, 17 bp, synthetic construct
  source 1..17: mol_type = other DNA
aggaagaggggatgggt

SEQ ID NO: 167097 - DNA, 17 bp, synthetic construct
  source 1..17: mol_type = other DNA
gaggaagaggggatggg

SEQ ID NO: 167098 - DNA, 17 bp, synthetic construct
  source 1..17: mol_type = other DNA
ggaggaagaggggatgg

SEQ ID NO: 167099 - DNA, 17 bp, synthetic construct
  source 1..17: mol_type = other DNA
gggaggaagaggggatg

SEQ ID NO: 167100 - DNA, 17 bp, synthetic construct
  source 1..17: mol_type = other DNA
agggaggaagaggggat

SEQ ID NO: 167101 - DNA, 17 bp, synthetic construct
  source 1..17: mol_type = other DNA
cagggaggaagagggga

SEQ ID NO: 167102 - DNA, 17 bp, synthetic construct
  source 1..17: mol_type = other DNA
ccagggaggaagagggg

SEQ ID NO: 167103 - DNA, 17 bp, synthetic construct
  source 1..17: mol_type = other DNA
cccagggaggaagaggg

SEQ ID NO: 167104 - DNA, 17 bp, synthetic construct
  source 1..17: mol_type = other DNA
gcccagggaggaagagg

SEQ ID NO: 167105 - DNA, 17 bp, synthetic construct
  source 1..17: mol_type = other DNA
tgcccagggaggaagag

SEQ ID NO: 167106 - DNA, 17 bp, synthetic construct
  source 1..17: mol_type = other DNA
gtgcccagggaggaaga

SEQ ID NO: 167107 - DNA, 17 bp, synthetic construct
  source 1..17: mol_type = other DNA
ggtgcccagggaggaag

SEQ ID NO: 167108 - DNA, 17 bp, synthetic construct
  source 1..17: mol_type = other DNA
tggtgcccagggaggaa

SEQ ID NO: 167109 - DNA, 17 bp, synthetic construct
  source 1..17: mol_type = other DNA
gtggtgcccagggagga

SEQ ID NO: 167110 - DNA, 17 bp, synthetic construct
  source 1..17: mol_type = other DNA
ggtggtgcccagggagg

SEQ ID NO: 167111 - DNA, 17 bp, synthetic construct
  source 1..17: mol_type = other DNA
aggtggtgcccagggag

SEQ ID NO: 167112 - DNA, 17 bp, synthetic construct
  source 1..17: mol_type = other DNA
caggtggtgcccaggga

SEQ ID NO: 167113 - DNA, 17 bp, synthetic construct
  source 1..17: mol_type = other DNA
ccaggtggtgcccaggg

SEQ ID NO: 167114 - DNA, 17 bp, synthetic construct
  source 1..17: mol_type = other DNA
tccaggtggtgcccagg

SEQ ID NO: 167115 - DNA, 17 bp, synthetic construct
  source 1..17: mol_type = other DNA
gtccaggtggtgcccag

SEQ ID NO: 167116 - DNA, 17 bp, synthetic construct
  source 1..17: mol_type = other DNA
ggtccaggtggtgccca

SEQ ID NO: 167117 - DNA, 17 bp, synthetic construct
  source 1..17: mol_type = other DNA
gggtccaggtggtgccc

SEQ ID NO: 167118 - DNA, 17 bp, synthetic construct
  source 1..17: mol_type = other DNA
cgggtccaggtggtgcc

SEQ ID NO: 167119 - DNA, 17 bp, synthetic construct
  source 1..17: mol_type = other DNA
gcgggtccaggtggtgc

SEQ ID NO: 167120 - DNA, 17 bp, synthetic construct
  source 1..17: mol_type = other DNA
ggcgggtccaggtggtg

SEQ ID NO: 167121 - DNA, 17 bp, synthetic construct
  source 1..17: mol_type = other DNA
aggcgggtccaggtggt

SEQ ID NO: 167122 - DNA, 17 bp, synthetic construct
  source 1..17: mol_type = other DNA
taggcgggtccaggtgg

SEQ ID NO: 167123 - DNA, 17 bp, synthetic construct
  source 1..17: mol_type = other DNA
ataggcgggtccaggtg

SEQ ID NO: 167124 - DNA, 17 bp, synthetic construct
  source 1..17: mol_type = other DNA
gataggcgggtccaggt

SEQ ID NO: 167125 - DNA, 17 bp, synthetic construct
  source 1..17: mol_type = other DNA
tgataggcgggtccagg

SEQ ID NO: 167126 - DNA, 17 bp, synthetic construct
  source 1..17: mol_type = other DNA
gtgataggcgggtccag

SEQ ID NO: 167127 - DNA, 17 bp, synthetic construct
  source 1..17: mol_type = other DNA
tgtgataggcgggtcca

SEQ ID NO: 167128 - DNA, 17 bp, synthetic construct
  source 1..17: mol_type = other DNA
ctgtgataggcgggtcc

SEQ ID NO: 167129 - DNA, 17 bp, synthetic construct
  source 1..17: mol_type = other DNA
tctgtgataggcgggtc

SEQ ID NO: 167130 - DNA, 17 bp, synthetic construct
  source 1..17: mol_type = other DNA
gtctgtgataggcgggt

SEQ ID NO: 167131 - DNA, 17 bp, synthetic construct
  source 1..17: mol_type = other DNA
ggtctgtgataggcggg

SEQ ID NO: 167132 - DNA, 17 bp, synthetic construct
  source 1..17: mol_type = other DNA
tggtctgtgataggcgg

SEQ ID NO: 167133 - DNA, 17 bp, synthetic construct
  source 1..17: mol_type = other DNA
gtggtctgtgataggcg

SEQ ID NO: 167134 - DNA, 17 bp, synthetic construct
  source 1..17: mol_type = other DNA
ggtggtctgtgataggc

SEQ ID NO: 167135 - DNA, 17 bp, synthetic construct
  source 1..17: mol_type = other DNA
tggtggtctgtgatagg

SEQ ID NO: 167136 - DNA, 17 bp, synthetic construct
  source 1..17: mol_type = other DNA
gtggtggtctgtgatag

SEQ ID NO: 167137 - DNA, 17 bp, synthetic construct
  source 1..17: mol_type = other DNA
tgtggtggtctgtgata

SEQ ID NO: 167138 - DNA, 17 bp, synthetic construct
  source 1..17: mol_type = other DNA
gtgtggtggtctgtgat

SEQ ID NO: 167139 - DNA, 17 bp, synthetic construct
  source 1..17: mol_type = other DNA
ggtgtggtggtctgtga

SEQ ID NO: 167140 - DNA, 17 bp, synthetic construct
  source 1..17: mol_type = other DNA
gggtgtggtggtctgtg

SEQ ID NO: 167141 - DNA, 17 bp, synthetic construct
  source 1..17: mol_type = other DNA
tgggtgtggtggtctgt

SEQ ID NO: 167142 - DNA, 17 bp, synthetic construct
  source 1..17: mol_type = other DNA
gtgggtgtggtggtctg

SEQ ID NO: 167143 - DNA, 17 bp, synthetic construct
  source 1..17: mol_type = other DNA
cgtgggtgtggtggtct

SEQ ID NO: 167144 - DNA, 17 bp, synthetic construct
  source 1..17: mol_type = other DNA
ccgtgggtgtggtggtc

SEQ ID NO: 167145 - DNA, 17 bp, synthetic construct
  source 1..17: mol_type = other DNA
gccgtgggtgtggtggt

SEQ ID NO: 167146 - DNA, 17 bp, synthetic construct
  source 1..17: mol_type = other DNA
ggccgtgggtgtggtgg

SEQ ID NO: 167147 - DNA, 17 bp, synthetic construct
  source 1..17: mol_type = other DNA
tggccgtgggtgtggtg

SEQ ID NO: 167148 - DNA, 17 bp, synthetic construct
  source 1..17: mol_type = other DNA
gtggccgtgggtgtggt

SEQ ID NO: 167149 - DNA, 17 bp, synthetic construct
  source 1..17: mol_type = other DNA
ggtggccgtgggtgtgg

SEQ ID NO: 167150 - DNA, 17 bp, synthetic construct
  source 1..17: mol_type = other DNA
tggtggccgtgggtgtg

SEQ ID NO: 167151 - DNA, 17 bp, synthetic construct
  source 1..17: mol_type = other DNA
atggtggccgtgggtgt

SEQ ID NO: 167152 - DNA, 17 bp, synthetic construct
  source 1..17: mol_type = other DNA
catggtggccgtgggtg

SEQ ID NO: 167153 - DNA, 17 bp, synthetic construct
  source 1..17: mol_type = other DNA
acatggtggccgtgggt

SEQ ID NO: 167154 - DNA, 17 bp, synthetic construct
  source 1..17: mol_type = other DNA
gacatggtggccgtggg

SEQ ID NO: 167155 - DNA, 17 bp, synthetic construct
  source 1..17: mol_type = other DNA
ggacatggtggccgtgg

SEQ ID NO: 167156 - DNA, 17 bp, synthetic construct
  source 1..17: mol_type = other DNA
tggacatggtggccgtg

SEQ ID NO: 167157 - DNA, 17 bp, synthetic construct
  source 1..17: mol_type = other DNA
gtggacatggtggccgt

SEQ ID NO: 167158 - DNA, 17 bp, synthetic construct
  source 1..17: mol_type = other DNA
tgtggacatggtggccg

SEQ ID NO: 167159 - DNA, 17 bp, synthetic construct
  source 1..17: mol_type = other DNA
ctgtggacatggtggcc

SEQ ID NO: 167160 - DNA, 17 bp, synthetic construct
  source 1..17: mol_type = other DNA
gctgtggacatggtggc

SEQ ID NO: 167161 - DNA, 17 bp, synthetic construct
  source 1..17: mol_type = other DNA
ggctgtggacatggtgg

SEQ ID NO: 167162 - DNA, 17 bp, synthetic construct
  source 1..17: mol_type = other DNA
tggctgtggacatggtg

SEQ ID NO: 167163 - DNA, 17 bp, synthetic construct
  source 1..17: mol_type = other DNA
gtggctgtggacatggt

SEQ ID NO: 167164 - DNA, 17 bp, synthetic construct
  source 1..17: mol_type = other DNA
tgtggctgtggacatgg

SEQ ID NO: 167165 - DNA, 17 bp, synthetic construct
  source 1..17: mol_type = other DNA
gtgtggctgtggacatg

SEQ ID NO: 167166 - DNA, 17 bp, synthetic construct
  source 1..17: mol_type = other DNA
ggtgtggctgtggacat

SEQ ID NO: 167167 - DNA, 17 bp, synthetic construct
  source 1..17: mol_type = other DNA
gggtgtggctgtggaca

SEQ ID NO: 167168 - DNA, 17 bp, synthetic construct
  source 1..17: mol_type = other DNA
agggtgtggctgtggac

SEQ ID NO: 167169 - DNA, 17 bp, synthetic construct
  source 1..17: mol_type = other DNA
gagggtgtggctgtgga

SEQ ID NO: 167170 - DNA, 17 bp, synthetic construct
  source 1..17: mol_type = other DNA
ggagggtgtggctgtgg

SEQ ID NO: 167171 - DNA, 17 bp, synthetic construct
  source 1..17: mol_type = other DNA
aggagggtgtggctgtg

SEQ ID NO: 167172 - DNA, 17 bp, synthetic construct
  source 1..17: mol_type = other DNA
gaggagggtgtggctgt

SEQ ID NO: 167173 - DNA, 17 bp, synthetic construct
  source 1..17: mol_type = other DNA
ggaggagggtgtggctg

SEQ ID NO: 167174 - DNA, 17 bp, synthetic construct
  source 1..17: mol_type = other DNA
tggaggagggtgtggct

SEQ ID NO: 167175 - DNA, 17 bp, synthetic construct
  source 1..17: mol_type = other DNA
gtggaggagggtgtggc

SEQ ID NO: 167176 - DNA, 17 bp, synthetic construct
  source 1..17: mol_type = other DNA
agtggaggagggtgtgg

SEQ ID NO: 167177 - DNA, 17 bp, synthetic construct
  source 1..17: mol_type = other DNA
gagtggaggagggtgtg

SEQ ID NO: 167178 - DNA, 17 bp, synthetic construct
  source 1..17: mol_type = other DNA
ggagtggaggagggtgt

SEQ ID NO: 167179 - DNA, 17 bp, synthetic construct
  source 1..17: mol_type = other DNA
tggagtggaggagggtg

SEQ ID NO: 167180 - DNA, 17 bp, synthetic construct
  source 1..17: mol_type = other DNA
ctggagtggaggagggt

SEQ ID NO: 167181 - DNA, 17 bp, synthetic construct
  source 1..17: mol_type = other DNA
tctggagtggaggaggg

SEQ ID NO: 167182 - DNA, 17 bp, synthetic construct
  source 1..17: mol_type = other DNA
ctctggagtggaggagg

SEQ ID NO: 167183 - DNA, 17 bp, synthetic construct
  source 1..17: mol_type = other DNA
tctctggagtggaggag

SEQ ID NO: 167184 - DNA, 17 bp, synthetic construct
  source 1..17: mol_type = other DNA
gtctctggagtggagga

SEQ ID NO: 167185 - DNA, 17 bp, synthetic construct
  source 1..17: mol_type = other DNA
agtctctggagtggagg

SEQ ID NO: 167186 - DNA, 17 bp, synthetic construct
  source 1..17: mol_type = other DNA
cagtctctggagtggag

SEQ ID NO: 167187 - DNA, 17 bp, synthetic construct
  source 1..17: mol_type = other DNA
gcagtctctggagtgga

SEQ ID NO: 167188 - DNA, 17 bp, synthetic construct
  source 1..17: mol_type = other DNA
ggcagtctctggagtgg

SEQ ID NO: 167189 - DNA, 17 bp, synthetic construct
  source 1..17: mol_type = other DNA
gggcagtctctggagtg

SEQ ID NO: 167190 - DNA, 17 bp, synthetic construct
  source 1..17: mol_type = other DNA
tgggcagtctctggagt

SEQ ID NO: 167191 - DNA, 17 bp, synthetic construct
  source 1..17: mol_type = other DNA
gtgggcagtctctggag

SEQ ID NO: 167192 - DNA, 17 bp, synthetic construct
  source 1..17: mol_type = other DNA
tgtgggcagtctctgga

SEQ ID NO: 167193 - DNA, 17 bp, synthetic construct
  source 1..17: mol_type = other DNA
gtgtgggcagtctctgg

SEQ ID NO: 167194 - DNA, 17 bp, synthetic construct
  source 1..17: mol_type = other DNA
ggtgtgggcagtctctg

SEQ ID NO: 167195 - DNA, 17 bp, synthetic construct
  source 1..17: mol_type = other DNA
aggtgtgggcagtctct

SEQ ID NO: 167196 - DNA, 17 bp, synthetic construct
  source 1..17: mol_type = other DNA
gaggtgtgggcagtctc

SEQ ID NO: 167197 - DNA, 17 bp, synthetic construct
  source 1..17: mol_type = other DNA
ggaggtgtgggcagtct

SEQ ID NO: 167198 - DNA, 17 bp, synthetic construct
  source 1..17: mol_type = other DNA
tggaggtgtgggcagtc

SEQ ID NO: 167199 - DNA, 17 bp, synthetic construct
  source 1..17: mol_type = other DNA
gtggaggtgtgggcagt

SEQ ID NO: 167200 - DNA, 17 bp, synthetic construct
  source 1..17: mol_type = other DNA
tgtggaggtgtgggcag

SEQ ID NO: 167201 - DNA, 17 bp, synthetic construct
  source 1..17: mol_type = other DNA
ctgtggaggtgtgggca

SEQ ID NO: 167202 - DNA, 17 bp, synthetic construct
  source 1..17: mol_type = other DNA
actgtggaggtgtgggc

SEQ ID NO: 167203 - DNA, 17 bp, synthetic construct
  source 1..17: mol_type = other DNA
cactgtggaggtgtggg

SEQ ID NO: 167204 - DNA, 17 bp, synthetic construct
  source 1..17: mol_type = other DNA
gcactgtggaggtgtgg

SEQ ID NO: 167205 - DNA, 17 bp, synthetic construct
  source 1..17: mol_type = other DNA
agcactgtggaggtgtg

SEQ ID NO: 167206 - DNA, 17 bp, synthetic construct
  source 1..17: mol_type = other DNA
aagcactgtggaggtgt

SEQ ID NO: 167207 - DNA, 17 bp, synthetic construct
  source 1..17: mol_type = other DNA
taagcactgtggaggtg

SEQ ID NO: 167208 - DNA, 17 bp, synthetic construct
  source 1..17: mol_type = other DNA
gtaagcactgtggaggt

SEQ ID NO: 167209 - DNA, 17 bp, synthetic construct
  source 1..17: mol_type = other DNA
ggtaagcactgtggagg

SEQ ID NO: 167210 - DNA, 17 bp, synthetic construct
  source 1..17: mol_type = other DNA
cggtaagcactgtggag

SEQ ID NO: 167211 - DNA, 17 bp, synthetic construct
  source 1..17: mol_type = other DNA
gcggtaagcactgtgga

SEQ ID NO: 167212 - DNA, 17 bp, synthetic construct
  source 1..17: mol_type = other DNA
ggcggtaagcactgtgg

SEQ ID NO: 167213 - DNA, 17 bp, synthetic construct
  source 1..17: mol_type = other DNA
tggcggtaagcactgtg

SEQ ID NO: 167214 - DNA, 17 bp, synthetic construct
  source 1..17: mol_type = other DNA
gtggcggtaagcactgt

SEQ ID NO: 167215 - DNA, 17 bp, synthetic construct
  source 1..17: mol_type = other DNA
cgtggcggtaagcactg

SEQ ID NO: 167216 - DNA, 17 bp, synthetic construct
  source 1..17: mol_type = other DNA
ccgtggcggtaagcact

SEQ ID NO: 167217 - DNA, 17 bp, synthetic construct
  source 1..17: mol_type = other DNA
gccgtggcggtaagcac

SEQ ID NO: 167218 - DNA, 17 bp, synthetic construct
  source 1..17: mol_type = other DNA
ggccgtggcggtaagca

SEQ ID NO: 167219 - DNA, 17 bp, synthetic construct
  source 1..17: mol_type = other DNA
tggccgtggcggtaagc

SEQ ID NO: 167220 - DNA, 17 bp, synthetic construct
  source 1..17: mol_type = other DNA
gtggccgtggcggtaag

SEQ ID NO: 167221 - DNA, 17 bp, synthetic construct
  source 1..17: mol_type = other DNA
ggtggccgtggcggtaa

SEQ ID NO: 167222 - DNA, 17 bp, synthetic construct
  source 1..17: mol_type = other DNA
tggtggccgtggcggta

SEQ ID NO: 167223 - DNA, 17 bp, synthetic construct
  source 1..17: mol_type = other DNA
gtggtggccgtggcggt

SEQ ID NO: 167224 - DNA, 17 bp, synthetic construct
  source 1..17: mol_type = other DNA
tgtggtggccgtggcgg

SEQ ID NO: 167225 - DNA, 17 bp, synthetic construct
  source 1..17: mol_type = other DNA
ttgtggtggccgtggcg

SEQ ID NO: 167226 - DNA, 17 bp, synthetic construct
  source 1..17: mol_type = other DNA
gttgtggtggccgtggc

SEQ ID NO: 167227 - DNA, 17 bp, synthetic construct
  source 1..17: mol_type = other DNA
agttgtggtggccgtgg

SEQ ID NO: 167228 - DNA, 17 bp, synthetic construct
  source 1..17: mol_type = other DNA
cagttgtggtggccgtg

SEQ ID NO: 167229 - DNA, 17 bp, synthetic construct
  source 1..17: mol_type = other DNA
ccagttgtggtggccgt

SEQ ID NO: 167230 - DNA, 17 bp, synthetic construct
  source 1..17: mol_type = other DNA
cccagttgtggtggccg

SEQ ID NO: 167231 - DNA, 17 bp, synthetic construct
  source 1..17: mol_type = other DNA
ccccagttgtggtggcc

SEQ ID NO: 167232 - DNA, 17 bp, synthetic construct
  source 1..17: mol_type = other DNA
gccccagttgtggtggc

SEQ ID NO: 167233 - DNA, 17 bp, synthetic construct
  source 1..17: mol_type = other DNA
ggccccagttgtggtgg

SEQ ID NO: 167234 - DNA, 17 bp, synthetic construct
  source 1..17: mol_type = other DNA
tggccccagttgtggtg

SEQ ID NO: 167235 - DNA, 17 bp, synthetic construct
  source 1..17: mol_type = other DNA
gtggccccagttgtggt

SEQ ID NO: 167236 - DNA, 17 bp, synthetic construct
  source 1..17: mol_type = other DNA
ggtggccccagttgtgg

SEQ ID NO: 167237 - DNA, 17 bp, synthetic construct
  source 1..17: mol_type = other DNA
cggtggccccagttgtg

SEQ ID NO: 167238 - DNA, 17 bp, synthetic construct
  source 1..17: mol_type = other DNA
ccggtggccccagttgt

SEQ ID NO: 167239 - DNA, 17 bp, synthetic construct
  source 1..17: mol_type = other DNA
gccggtggccccagttg

SEQ ID NO: 167240 - DNA, 17 bp, synthetic construct
  source 1..17: mol_type = other DNA
agccggtggccccagtt

SEQ ID NO: 167241 - DNA, 17 bp, synthetic construct
  source 1..17: mol_type = other DNA
gagccggtggccccagt

SEQ ID NO: 167242 - DNA, 17 bp, synthetic construct
  source 1..17: mol_type = other DNA
agagccggtggccccag

SEQ ID NO: 167243 - DNA, 17 bp, synthetic construct
  source 1..17: mol_type = other DNA
cagagccggtggcccca

SEQ ID NO: 167244 - DNA, 17 bp, synthetic construct
  source 1..17: mol_type = other DNA
acagagccggtggcccc

SEQ ID NO: 167245 - DNA, 17 bp, synthetic construct
  source 1..17: mol_type = other DNA
cacagagccggtggccc

SEQ ID NO: 167246 - DNA, 17 bp, synthetic construct
  source 1..17: mol_type = other DNA
ccacagagccggtggcc

SEQ ID NO: 167247 - DNA, 17 bp, synthetic construct
  source 1..17: mol_type = other DNA
gccacagagccggtggc

SEQ ID NO: 167248 - DNA, 17 bp, synthetic construct
  source 1..17: mol_type = other DNA
ggccacagagccggtgg

SEQ ID NO: 167249 - DNA, 17 bp, synthetic construct
  source 1..17: mol_type = other DNA
tggccacagagccggtg

SEQ ID NO: 167250 - DNA, 17 bp, synthetic construct
  source 1..17: mol_type = other DNA
gtggccacagagccggt

SEQ ID NO: 167251 - DNA, 17 bp, synthetic construct
  source 1..17: mol_type = other DNA
ggtggccacagagccgg

SEQ ID NO: 167252 - DNA, 17 bp, synthetic construct
  source 1..17: mol_type = other DNA
gggtggccacagagccg

SEQ ID NO: 167253 - DNA, 17 bp, synthetic construct
  source 1..17: mol_type = other DNA
ggggtggccacagagcc

SEQ ID NO: 167254 - DNA, 17 bp, synthetic construct
  source 1..17: mol_type = other DNA
gggggtggccacagagc

SEQ ID NO: 167255 - DNA, 17 bp, synthetic construct
  source 1..17: mol_type = other DNA
agggggtggccacagag

SEQ ID NO: 167256 - DNA, 17 bp, synthetic construct
  source 1..17: mol_type = other DNA
gagggggtggccacaga

SEQ ID NO: 167257 - DNA, 17 bp, synthetic construct
  source 1..17: mol_type = other DNA
ggagggggtggccacag

SEQ ID NO: 167258 - DNA, 17 bp, synthetic construct
  source 1..17: mol_type = other DNA
aggagggggtggccaca

SEQ ID NO: 167259 - DNA, 17 bp, synthetic construct
  source 1..17: mol_type = other DNA
gaggagggggtggccac

SEQ ID NO: 167260 - DNA, 17 bp, synthetic construct
  source 1..17: mol_type = other DNA
ggaggagggggtggcca

SEQ ID NO: 167261 - DNA, 17 bp, synthetic construct
  source 1..17: mol_type = other DNA
tggaggagggggtggcc

SEQ ID NO: 167262 - DNA, 17 bp, synthetic construct
  source 1..17: mol_type = other DNA
gtggaggagggggtggc

SEQ ID NO: 167263 - DNA, 17 bp, synthetic construct
  source 1..17: mol_type = other DNA
ggtggaggagggggtgg

SEQ ID NO: 167264 - DNA, 17 bp, synthetic construct
  source 1..17: mol_type = other DNA
gggtggaggagggggtg

SEQ ID NO: 167265 - DNA, 17 bp, synthetic construct
  source 1..17: mol_type = other DNA
ggggtggaggagggggt

SEQ ID NO: 167266 - DNA, 17 bp, synthetic construct
  source 1..17: mol_type = other DNA
tggggtggaggaggggg

SEQ ID NO: 167267 - DNA, 17 bp, synthetic construct
  source 1..17: mol_type = other DNA
ctggggtggaggagggg

SEQ ID NO: 167268 - DNA, 17 bp, synthetic construct
  source 1..17: mol_type = other DNA
cctggggtggaggaggg

SEQ ID NO: 167269 - DNA, 17 bp, synthetic construct
  source 1..17: mol_type = other DNA
tcctggggtggaggagg

SEQ ID NO: 167270 - DNA, 17 bp, synthetic construct
  source 1..17: mol_type = other DNA
ttcctggggtggaggag

SEQ ID NO: 167271 - DNA, 17 bp, synthetic construct
  source 1..17: mol_type = other DNA
gttcctggggtggagga

SEQ ID NO: 167272 - DNA, 17 bp, synthetic construct
  source 1..17: mol_type = other DNA
tgttcctggggtggagg

SEQ ID NO: 167273 - DNA, 17 bp, synthetic construct
  source 1..17: mol_type = other DNA
ctgttcctggggtggag

SEQ ID NO: 167274 - DNA, 17 bp, synthetic construct
  source 1..17: mol_type = other DNA
gctgttcctggggtgga

SEQ ID NO: 167275 - DNA, 17 bp, synthetic construct
  source 1..17: mol_type = other DNA
agctgttcctggggtgg

SEQ ID NO: 167276 - DNA, 17 bp, synthetic construct
  source 1..17: mol_type = other DNA
gagctgttcctggggtg

SEQ ID NO: 167277 - DNA, 17 bp, synthetic construct
  source 1..17: mol_type = other DNA
tgagctgttcctggggt

SEQ ID NO: 167278 - DNA, 17 bp, synthetic construct
  source 1..17: mol_type = other DNA
gtgagctgttcctgggg

SEQ ID NO: 167279 - DNA, 17 bp, synthetic construct
  source 1..17: mol_type = other DNA
tgtgagctgttcctggg

SEQ ID NO: 167280 - DNA, 17 bp, synthetic construct
  source 1..17: mol_type = other DNA
gtgtgagctgttcctgg

SEQ ID NO: 167281 - DNA, 17 bp, synthetic construct
  source 1..17: mol_type = other DNA
agtgtgagctgttcctg

SEQ ID NO: 167282 - DNA, 17 bp, synthetic construct
  source 1..17: mol_type = other DNA
tagtgtgagctgttcct

SEQ ID NO: 167283 - DNA, 17 bp, synthetic construct
  source 1..17: mol_type = other DNA
gtagtgtgagctgttcc

SEQ ID NO: 167284 - DNA, 17 bp, synthetic construct
  source 1..17: mol_type = other DNA
ggtagtgtgagctgttc

SEQ ID NO: 167285 - DNA, 17 bp, synthetic construct
  source 1..17: mol_type = other DNA
tggtagtgtgagctgtt

SEQ ID NO: 167286 - DNA, 17 bp, synthetic construct
  source 1..17: mol_type = other DNA
ttggtagtgtgagctgt

SEQ ID NO: 167287 - DNA, 17 bp, synthetic construct
  source 1..17: mol_type = other DNA
tttggtagtgtgagctg

SEQ ID NO: 167288 - DNA, 17 bp, synthetic construct
  source 1..17: mol_type = other DNA
ctttggtagtgtgagct

SEQ ID NO: 167289 - DNA, 17 bp, synthetic construct
  source 1..17: mol_type = other DNA
actttggtagtgtgagc

SEQ ID NO: 167290 - DNA, 17 bp, synthetic construct
  source 1..17: mol_type = other DNA
cactttggtagtgtgag

SEQ ID NO: 167291 - DNA, 17 bp, synthetic construct
  source 1..17: mol_type = other DNA
gcactttggtagtgtga

SEQ ID NO: 167292 - DNA, 17 bp, synthetic construct
  source 1..17: mol_type = other DNA
ggcactttggtagtgtg

SEQ ID NO: 167293 - DNA, 17 bp, synthetic construct
  source 1..17: mol_type = other DNA
tggcactttggtagtgt

SEQ ID NO: 167294 - DNA, 17 bp, synthetic construct
  source 1..17: mol_type = other DNA
ttggcactttggtagtg

SEQ ID NO: 167295 - DNA, 17 bp, synthetic construct
  source 1..17: mol_type = other DNA
gttggcactttggtagt

SEQ ID NO: 167296 - DNA, 17 bp, synthetic construct
  source 1..17: mol_type = other DNA
agttggcactttggtag

SEQ ID NO: 167297 - DNA, 17 bp, synthetic construct
  source 1..17: mol_type = other DNA
tagttggcactttggta

SEQ ID NO: 167298 - DNA, 17 bp, synthetic construct
  source 1..17: mol_type = other DNA
gtagttggcactttggt

SEQ ID NO: 167299 - DNA, 17 bp, synthetic construct
  source 1..17: mol_type = other DNA
ggtagttggcactttgg

SEQ ID NO: 167300 - DNA, 17 bp, synthetic construct
  source 1..17: mol_type = other DNA
tggtagttggcactttg

SEQ ID NO: 167301 - DNA, 17 bp, synthetic construct
  source 1..17: mol_type = other DNA
gtggtagttggcacttt

SEQ ID NO: 167302 - DNA, 17 bp, synthetic construct
  source 1..17: mol_type = other DNA
tgtggtagttggcactt

SEQ ID NO: 167303 - DNA, 17 bp, synthetic construct
  source 1..17: mol_type = other DNA
ttgtggtagttggcact

SEQ ID NO: 167304 - DNA, 17 bp, synthetic construct
  source 1..17: mol_type = other DNA
gttgtggtagttggcac

SEQ ID NO: 167305 - DNA, 17 bp, synthetic construct
  source 1..17: mol_type = other DNA
ggttgtggtagttggca

SEQ ID NO: 167306 - DNA, 17 bp, synthetic construct
  source 1..17: mol_type = other DNA
tggttgtggtagttggc

SEQ ID NO: 167307 - DNA, 17 bp, synthetic construct
  source 1..17: mol_type = other DNA
gtggttgtggtagttgg

SEQ ID NO: 167308 - DNA, 17 bp, synthetic construct
  source 1..17: mol_type = other DNA
cgtggttgtggtagttg

SEQ ID NO: 167309 - DNA, 17 bp, synthetic construct
  source 1..17: mol_type = other DNA
ccgtggttgtggtagtt

SEQ ID NO: 167310 - DNA, 17 bp, synthetic construct
  source 1..17: mol_type = other DNA
cccgtggttgtggtagt

SEQ ID NO: 167311 - DNA, 17 bp, synthetic construct
  source 1..17: mol_type = other DNA
gcccgtggttgtggtag

SEQ ID NO: 167312 - DNA, 17 bp, synthetic construct
  source 1..17: mol_type = other DNA
agcccgtggttgtggta

SEQ ID NO: 167313 - DNA, 17 bp, synthetic construct
  source 1..17: mol_type = other DNA
aagcccgtggttgtggt

SEQ ID NO: 167314 - DNA, 17 bp, synthetic construct
  source 1..17: mol_type = other DNA
gaagcccgtggttgtgg

SEQ ID NO: 167315 - DNA, 17 bp, synthetic construct
  source 1..17: mol_type = other DNA
tgaagcccgtggttgtg

SEQ ID NO: 167316 - DNA, 17 bp, synthetic construct
  source 1..17: mol_type = other DNA
gtgaagcccgtggttgt

SEQ ID NO: 167317 - DNA, 17 bp, synthetic construct
  source 1..17: mol_type = other DNA
tgtgaagcccgtggttg

SEQ ID NO: 167318 - DNA, 17 bp, synthetic construct
  source 1..17: mol_type = other DNA
ctgtgaagcccgtggtt

SEQ ID NO: 167319 - DNA, 17 bp, synthetic construct
  source 1..17: mol_type = other DNA
gctgtgaagcccgtggt

SEQ ID NO: 167320 - DNA, 17 bp, synthetic construct
  source 1..17: mol_type = other DNA
ggctgtgaagcccgtgg

SEQ ID NO: 167321 - DNA, 17 bp, synthetic construct
  source 1..17: mol_type = other DNA
tggctgtgaagcccgtg

SEQ ID NO: 167322 - DNA, 17 bp, synthetic construct
  source 1..17: mol_type = other DNA
gtggctgtgaagcccgt

SEQ ID NO: 167323 - DNA, 17 bp, synthetic construct
  source 1..17: mol_type = other DNA
ggtggctgtgaagcccg

SEQ ID NO: 167324 - DNA, 17 bp, synthetic construct
  source 1..17: mol_type = other DNA
gggtggctgtgaagccc

SEQ ID NO: 167325 - DNA, 17 bp, synthetic construct
  source 1..17: mol_type = other DNA
ggggtggctgtgaagcc

SEQ ID NO: 167326 - DNA, 17 bp, synthetic construct
  source 1..17: mol_type = other DNA
gggggtggctgtgaagc

SEQ ID NO: 167327 - DNA, 17 bp, synthetic construct
  source 1..17: mol_type = other DNA
agggggtggctgtgaag

SEQ ID NO: 167328 - DNA, 17 bp, synthetic construct
  source 1..17: mol_type = other DNA
gagggggtggctgtgaa

SEQ ID NO: 167329 - DNA, 17 bp, synthetic construct
  source 1..17: mol_type = other DNA
ggagggggtggctgtga

SEQ ID NO: 167330 - DNA, 17 bp, synthetic construct
  source 1..17: mol_type = other DNA
aggagggggtggctgtg

SEQ ID NO: 167331 - DNA, 17 bp, synthetic construct
  source 1..17: mol_type = other DNA
gaggagggggtggctgt

SEQ ID NO: 167332 - DNA, 17 bp, synthetic construct
  source 1..17: mol_type = other DNA
ggaggagggggtggctg

SEQ ID NO: 167333 - DNA, 17 bp, synthetic construct
  source 1..17: mol_type = other DNA
tggaggagggggtggct

SEQ ID NO: 167334 - DNA, 17 bp, synthetic construct
  source 1..17: mol_type = other DNA
ctggaggagggggtggc

SEQ ID NO: 167335 - DNA, 17 bp, synthetic construct
  source 1..17: mol_type = other DNA
gctggaggagggggtgg

SEQ ID NO: 167336 - DNA, 17 bp, synthetic construct
  source 1..17: mol_type = other DNA
ggctggaggagggggtg

SEQ ID NO: 167337 - DNA, 17 bp, synthetic construct
  source 1..17: mol_type = other DNA
gggctggaggagggggt

SEQ ID NO: 167338 - DNA, 17 bp, synthetic construct
  source 1..17: mol_type = other DNA
tgggctggaggaggggg

SEQ ID NO: 167339 - DNA, 17 bp, synthetic construct
  source 1..17: mol_type = other DNA
ctgggctggaggagggg

SEQ ID NO: 167340 - DNA, 17 bp, synthetic construct
  source 1..17: mol_type = other DNA
cctgggctggaggaggg

SEQ ID NO: 167341 - DNA, 17 bp, synthetic construct
  source 1..17: mol_type = other DNA
ccctgggctggaggagg

SEQ ID NO: 167342 - DNA, 17 bp, synthetic construct
  source 1..17: mol_type = other DNA
tccctgggctggaggag

SEQ ID NO: 167343 - DNA, 17 bp, synthetic construct
  source 1..17: mol_type = other DNA
gtccctgggctggagga

SEQ ID NO: 167344 - DNA, 17 bp, synthetic construct
  source 1..17: mol_type = other DNA
cgtccctgggctggagg

SEQ ID NO: 167345 - DNA, 17 bp, synthetic construct
  source 1..17: mol_type = other DNA
ccgtccctgggctggag

SEQ ID NO: 167346 - DNA, 17 bp, synthetic construct
  source 1..17: mol_type = other DNA
gccgtccctgggctgga

SEQ ID NO: 167347 - DNA, 17 bp, synthetic construct
  source 1..17: mol_type = other DNA
tgccgtccctgggctgg

SEQ ID NO: 167348 - DNA, 17 bp, synthetic construct
  source 1..17: mol_type = other DNA
gtgccgtccctgggctg

SEQ ID NO: 167349 - DNA, 17 bp, synthetic construct
  source 1..17: mol_type = other DNA
agtgccgtccctgggct

SEQ ID NO: 167350 - DNA, 17 bp, synthetic construct
  source 1..17: mol_type = other DNA
gagtgccgtccctgggc

SEQ ID NO: 167351 - DNA, 17 bp, synthetic construct
  source 1..17: mol_type = other DNA
tgagtgccgtccctggg

SEQ ID NO: 167352 - DNA, 17 bp, synthetic construct
  source 1..17: mol_type = other DNA
gtgagtgccgtccctgg

SEQ ID NO: 167353 - DNA, 17 bp, synthetic construct
  source 1..17: mol_type = other DNA
cgtgagtgccgtccctg

SEQ ID NO: 167354 - DNA, 17 bp, synthetic construct
  source 1..17: mol_type = other DNA
gcgtgagtgccgtccct

SEQ ID NO: 167355 - DNA, 17 bp, synthetic construct
  source 1..17: mol_type = other DNA
ggcgtgagtgccgtccc

SEQ ID NO: 167356 - DNA, 17 bp, synthetic construct
  source 1..17: mol_type = other DNA
aggcgtgagtgccgtcc

SEQ ID NO: 167357 - DNA, 17 bp, synthetic construct
  source 1..17: mol_type = other DNA
gaggcgtgagtgccgtc

SEQ ID NO: 167358 - DNA, 17 bp, synthetic construct
  source 1..17: mol_type = other DNA
ggaggcgtgagtgccgt

SEQ ID NO: 167359 - DNA, 17 bp, synthetic construct
  source 1..17: mol_type = other DNA
tggaggcgtgagtgccg

SEQ ID NO: 167360 - DNA, 17 bp, synthetic construct
  source 1..17: mol_type = other DNA
ctggaggcgtgagtgcc

SEQ ID NO: 167361 - DNA, 17 bp, synthetic construct
  source 1..17: mol_type = other DNA
actggaggcgtgagtgc

SEQ ID NO: 167362 - DNA, 17 bp, synthetic construct
  source 1..17: mol_type = other DNA
cactggaggcgtgagtg

SEQ ID NO: 167363 - DNA, 17 bp, synthetic construct
  source 1..17: mol_type = other DNA
acactggaggcgtgagt

SEQ ID NO: 167364 - DNA, 17 bp, synthetic construct
  source 1..17: mol_type = other DNA
cacactggaggcgtgag

SEQ ID NO: 167365 - DNA, 17 bp, synthetic construct
  source 1..17: mol_type = other DNA
ccacactggaggcgtga

SEQ ID NO: 167366 - DNA, 17 bp, synthetic construct
  source 1..17: mol_type = other DNA
tccacactggaggcgtg

SEQ ID NO: 167367 - DNA, 17 bp, synthetic construct
  source 1..17: mol_type = other DNA
atccacactggaggcgt

SEQ ID NO: 167368 - DNA, 17 bp, synthetic construct
  source 1..17: mol_type = other DNA
gatccacactggaggcg

SEQ ID NO: 167369 - DNA, 17 bp, synthetic construct
  source 1..17: mol_type = other DNA
tgatccacactggaggc

SEQ ID NO: 167370 - DNA, 17 bp, synthetic construct
  source 1..17: mol_type = other DNA
ctgatccacactggagg

SEQ ID NO: 167371 - DNA, 17 bp, synthetic construct
  source 1..17: mol_type = other DNA
gctgatccacactggag

SEQ ID NO: 167372 - DNA, 17 bp, synthetic construct
  source 1..17: mol_type = other DNA
tgctgatccacactgga

SEQ ID NO: 167373 - DNA, 17 bp, synthetic construct
  source 1..17: mol_type = other DNA
gtgctgatccacactgg

SEQ ID NO: 167374 - DNA, 17 bp, synthetic construct
  source 1..17: mol_type = other DNA
tgtgctgatccacactg

SEQ ID NO: 167375 - DNA, 17 bp, synthetic construct
  source 1..17: mol_type = other DNA
ttgtgctgatccacact

SEQ ID NO: 167376 - DNA, 17 bp, synthetic construct
  source 1..17: mol_type = other DNA
gttgtgctgatccacac

SEQ ID NO: 167377 - DNA, 17 bp, synthetic construct
  source 1..17: mol_type = other DNA
ggttgtgctgatccaca

SEQ ID NO: 167378 - DNA, 17 bp, synthetic construct
  source 1..17: mol_type = other DNA
tggttgtgctgatccac

SEQ ID NO: 167379 - DNA, 17 bp, synthetic construct
  source 1..17: mol_type = other DNA
gtggttgtgctgatcca

SEQ ID NO: 167380 - DNA, 17 bp, synthetic construct
  source 1..17: mol_type = other DNA
ggtggttgtgctgatcc

SEQ ID NO: 167381 - DNA, 17 bp, synthetic construct
  source 1..17: mol_type = other DNA
tggtggttgtgctgatc

SEQ ID NO: 167382 - DNA, 17 bp, synthetic construct
  source 1..17: mol_type = other DNA
gtggtggttgtgctgat

SEQ ID NO: 167383 - DNA, 17 bp, synthetic construct
  source 1..17: mol_type = other DNA
tgtggtggttgtgctga

SEQ ID NO: 167384 - DNA, 17 bp, synthetic construct
  source 1..17: mol_type = other DNA
gtgtggtggttgtgctg

SEQ ID NO: 167385 - DNA, 17 bp, synthetic construct
  source 1..17: mol_type = other DNA
ggtgtggtggttgtgct

SEQ ID NO: 167386 - DNA, 17 bp, synthetic construct
  source 1..17: mol_type = other DNA
gggtgtggtggttgtgc

SEQ ID NO: 167387 - DNA, 17 bp, synthetic construct
  source 1..17: mol_type = other DNA
tgggtgtggtggttgtg

SEQ ID NO: 167388 - DNA, 17 bp, synthetic construct
  source 1..17: mol_type = other DNA
gtgggtgtggtggttgt

SEQ ID NO: 167389 - DNA, 17 bp, synthetic construct
  source 1..17: mol_type = other DNA
tgtgggtgtggtggttg

SEQ ID NO: 167390 - DNA, 17 bp, synthetic construct
  source 1..17: mol_type = other DNA
ttgtgggtgtggtggtt

SEQ ID NO: 167391 - DNA, 17 bp, synthetic construct
  source 1..17: mol_type = other DNA
gttgtgggtgtggtggt

SEQ ID NO: 167392 - DNA, 17 bp, synthetic construct
  source 1..17: mol_type = other DNA
ggttgtgggtgtggtgg

SEQ ID NO: 167393 - DNA, 17 bp, synthetic construct
  source 1..17: mol_type = other DNA
tggttgtgggtgtggtg

SEQ ID NO: 167394 - DNA, 17 bp, synthetic construct
  source 1..17: mol_type = other DNA
ctggttgtgggtgtggt

SEQ ID NO: 167395 - DNA, 17 bp, synthetic construct
  source 1..17: mol_type = other DNA
tctggttgtgggtgtgg

SEQ ID NO: 167396 - DNA, 17 bp, synthetic construct
  source 1..17: mol_type = other DNA
ctctggttgtgggtgtg

SEQ ID NO: 167397 - DNA, 17 bp, synthetic construct
  source 1..17: mol_type = other DNA
cctctggttgtgggtgt

SEQ ID NO: 167398 - DNA, 17 bp, synthetic construct
  source 1..17: mol_type = other DNA
gcctctggttgtgggtg

SEQ ID NO: 167399 - DNA, 17 bp, synthetic construct
  source 1..17: mol_type = other DNA
agcctctggttgtgggt

SEQ ID NO: 167400 - DNA, 17 bp, synthetic construct
  source 1..17: mol_type = other DNA
gagcctctggttgtggg

SEQ ID NO: 167401 - DNA, 17 bp, synthetic construct
  source 1..17: mol_type = other DNA
ggagcctctggttgtgg

SEQ ID NO: 167402 - DNA, 17 bp, synthetic construct
  source 1..17: mol_type = other DNA
tggagcctctggttgtg

SEQ ID NO: 167403 - DNA, 17 bp, synthetic construct
  source 1..17: mol_type = other DNA
gtggagcctctggttgt

SEQ ID NO: 167404 - DNA, 17 bp, synthetic construct
  source 1..17: mol_type = other DNA
cgtggagcctctggttg

SEQ ID NO: 167405 - DNA, 17 bp, synthetic construct
  source 1..17: mol_type = other DNA
ccgtggagcctctggtt

SEQ ID NO: 167406 - DNA, 17 bp, synthetic construct
  source 1..17: mol_type = other DNA
accgtggagcctctggt

SEQ ID NO: 167407 - DNA, 17 bp, synthetic construct
  source 1..17: mol_type = other DNA
caccgtggagcctctgg

SEQ ID NO: 167408 - DNA, 17 bp, synthetic construct
  source 1..17: mol_type = other DNA
tcaccgtggagcctctg

SEQ ID NO: 167409 - DNA, 17 bp, synthetic construct
  source 1..17: mol_type = other DNA
gtcaccgtggagcctct

SEQ ID NO: 167410 - DNA, 17 bp, synthetic construct
  source 1..17: mol_type = other DNA
ggtcaccgtggagcctc

SEQ ID NO: 167411 - DNA, 17 bp, synthetic construct
  source 1..17: mol_type = other DNA
gggtcaccgtggagcct

SEQ ID NO: 167412 - DNA, 17 bp, synthetic construct
  source 1..17: mol_type = other DNA
ggggtcaccgtggagcc

SEQ ID NO: 167413 - DNA, 17 bp, synthetic construct
  source 1..17: mol_type = other DNA
gggggtcaccgtggagc

SEQ ID NO: 167414 - DNA, 17 bp, synthetic construct
  source 1..17: mol_type = other DNA
agggggtcaccgtggag

SEQ ID NO: 167415 - DNA, 17 bp, synthetic construct
  source 1..17: mol_type = other DNA
gagggggtcaccgtgga

SEQ ID NO: 167416 - DNA, 17 bp, synthetic construct
  source 1..17: mol_type = other DNA
ggagggggtcaccgtgg

SEQ ID NO: 167417 - DNA, 17 bp, synthetic construct
  source 1..17: mol_type = other DNA
aggagggggtcaccgtg

SEQ ID NO: 167418 - DNA, 17 bp, synthetic construct
  source 1..17: mol_type = other DNA
gaggagggggtcaccgt

SEQ ID NO: 167419 - DNA, 17 bp, synthetic construct
  source 1..17: mol_type = other DNA
ggaggagggggtcaccg

SEQ ID NO: 167420 - DNA, 17 bp, synthetic construct
  source 1..17: mol_type = other DNA
tggaggagggggtcacc

SEQ ID NO: 167421 - DNA, 17 bp, synthetic construct
  source 1..17: mol_type = other DNA
atggaggagggggtcac

SEQ ID NO: 167422 - DNA, 17 bp, synthetic construct
  source 1..17: mol_type = other DNA
gatggaggagggggtca

SEQ ID NO: 167423 - DNA, 17 bp, synthetic construct
  source 1..17: mol_type = other DNA
ggatggaggagggggtc

SEQ ID NO: 167424 - DNA, 17 bp, synthetic construct
  source 1..17: mol_type = other DNA
gggatggaggagggggt

SEQ ID NO: 167425 - DNA, 17 bp, synthetic construct
  source 1..17: mol_type = other DNA
cgggatggaggaggggg

SEQ ID NO: 167426 - DNA, 17 bp, synthetic construct
  source 1..17: mol_type = other DNA
ccgggatggaggagggg

SEQ ID NO: 167427 - DNA, 17 bp, synthetic construct
  source 1..17: mol_type = other DNA
cccgggatggaggaggg

SEQ ID NO: 167428 - DNA, 17 bp, synthetic construct
  source 1..17: mol_type = other DNA
ccccgggatggaggagg

SEQ ID NO: 167429 - DNA, 17 bp, synthetic construct
  source 1..17: mol_type = other DNA
tccccgggatggaggag

SEQ ID NO: 167430 - DNA, 17 bp, synthetic construct
  source 1..17: mol_type = other DNA
gtccccgggatggagga

SEQ ID NO: 167431 - DNA, 17 bp, synthetic construct
  source 1..17: mol_type = other DNA
ggtccccgggatggagg

SEQ ID NO: 167432 - DNA, 17 bp, synthetic construct
  source 1..17: mol_type = other DNA
tggtccccgggatggag

SEQ ID NO: 167433 - DNA, 17 bp, synthetic construct
  source 1..17: mol_type = other DNA
gtggtccccgggatgga

SEQ ID NO: 167434 - DNA, 17 bp, synthetic construct
  source 1..17: mol_type = other DNA
ggtggtccccgggatgg

SEQ ID NO: 167435 - DNA, 17 bp, synthetic construct
  source 1..17: mol_type = other DNA
gggtggtccccgggatg

SEQ ID NO: 167436 - DNA, 17 bp, synthetic construct
  source 1..17: mol_type = other DNA
tgggtggtccccgggat

SEQ ID NO: 167437 - DNA, 17 bp, synthetic construct
  source 1..17: mol_type = other DNA
gtgggtggtccccggga

SEQ ID NO: 167438 - DNA, 17 bp, synthetic construct
  source 1..17: mol_type = other DNA
tgtgggtggtccccggg

SEQ ID NO: 167439 - DNA, 17 bp, synthetic construct
  source 1..17: mol_type = other DNA
gtgtgggtggtccccgg

SEQ ID NO: 167440 - DNA, 17 bp, synthetic construct
  source 1..17: mol_type = other DNA
ggtgtgggtggtccccg

SEQ ID NO: 167441 - DNA, 17 bp, synthetic construct
  source 1..17: mol_type = other DNA
cggtgtgggtggtcccc

SEQ ID NO: 167442 - DNA, 17 bp, synthetic construct
  source 1..17: mol_type = other DNA
gcggtgtgggtggtccc

SEQ ID NO: 167443 - DNA, 17 bp, synthetic construct
  source 1..17: mol_type = other DNA
ggcggtgtgggtggtcc

SEQ ID NO: 167444 - DNA, 17 bp, synthetic construct
  source 1..17: mol_type = other DNA
tggcggtgtgggtggtc

SEQ ID NO: 167445 - DNA, 17 bp, synthetic construct
  source 1..17: mol_type = other DNA
gtggcggtgtgggtggt

SEQ ID NO: 167446 - DNA, 17 bp, synthetic construct
  source 1..17: mol_type = other DNA
tgtggcggtgtgggtgg

SEQ ID NO: 167447 - DNA, 17 bp, synthetic construct
  source 1..17: mol_type = other DNA
ctgtggcggtgtgggtg

SEQ ID NO: 167448 - DNA, 17 bp, synthetic construct
  source 1..17: mol_type = other DNA
actgtggcggtgtgggt

SEQ ID NO: 167449 - DNA, 17 bp, synthetic construct
  source 1..17: mol_type = other DNA
cactgtggcggtgtggg

SEQ ID NO: 167450 - DNA, 17 bp, synthetic construct
  source 1..17: mol_type = other DNA
gcactgtggcggtgtgg

SEQ ID NO: 167451 - DNA, 17 bp, synthetic construct
  source 1..17: mol_type = other DNA
agcactgtggcggtgtg

SEQ ID NO: 167452 - DNA, 17 bp, synthetic construct
  source 1..17: mol_type = other DNA
cagcactgtggcggtgt

SEQ ID NO: 167453 - DNA, 17 bp, synthetic construct
  source 1..17: mol_type = other DNA
tcagcactgtggcggtg

SEQ ID NO: 167454 - DNA, 17 bp, synthetic construct
  source 1..17: mol_type = other DNA
gtcagcactgtggcggt

SEQ ID NO: 167455 - DNA, 17 bp, synthetic construct
  source 1..17: mol_type = other DNA
ggtcagcactgtggcgg

SEQ ID NO: 167456 - DNA, 17 bp, synthetic construct
  source 1..17: mol_type = other DNA
tggtcagcactgtggcg

SEQ ID NO: 167457 - DNA, 17 bp, synthetic construct
  source 1..17: mol_type = other DNA
gtggtcagcactgtggc

SEQ ID NO: 167458 - DNA, 17 bp, synthetic construct
  source 1..17: mol_type = other DNA
ggtggtcagcactgtgg

SEQ ID NO: 167459 - DNA, 17 bp, synthetic construct
  source 1..17: mol_type = other DNA
tggtggtcagcactgtg

SEQ ID NO: 167460 - DNA, 17 bp, synthetic construct
  source 1..17: mol_type = other DNA
gtggtggtcagcactgt

SEQ ID NO: 167461 - DNA, 17 bp, synthetic construct
  source 1..17: mol_type = other DNA
ggtggtggtcagcactg

SEQ ID NO: 167462 - DNA, 17 bp, synthetic construct
  source 1..17: mol_type = other DNA
tggtggtggtcagcact

SEQ ID NO: 167463 - DNA, 17 bp, synthetic construct
  source 1..17: mol_type = other DNA
gtggtggtggtcagcac

SEQ ID NO: 167464 - DNA, 17 bp, synthetic construct
  source 1..17: mol_type = other DNA
ggtggtggtggtcagca

SEQ ID NO: 167465 - DNA, 17 bp, synthetic construct
  source 1..17: mol_type = other DNA
tggtggtggtggtcagc

SEQ ID NO: 167466 - DNA, 17 bp, synthetic construct
  source 1..17: mol_type = other DNA
gtggtggtggtggtcag

SEQ ID NO: 167467 - DNA, 17 bp, synthetic construct
  source 1..17: mol_type = other DNA
tgtggtggtggtggtca

SEQ ID NO: 167468 - DNA, 17 bp, synthetic construct
  source 1..17: mol_type = other DNA
ttgtggtggtggtggtc

SEQ ID NO: 167469 - DNA, 17 bp, synthetic construct
  source 1..17: mol_type = other DNA
gttgtggtggtggtggt

SEQ ID NO: 167470 - DNA, 17 bp, synthetic construct
  source 1..17: mol_type = other DNA
agttgtggtggtggtgg

SEQ ID NO: 167471 - DNA, 17 bp, synthetic construct
  source 1..17: mol_type = other DNA
cagttgtggtggtggtg

SEQ ID NO: 167472 - DNA, 17 bp, synthetic construct
  source 1..17: mol_type = other DNA
acagttgtggtggtggt

SEQ ID NO: 167473 - DNA, 17 bp, synthetic construct
  source 1..17: mol_type = other DNA
cacagttgtggtggtgg

SEQ ID NO: 167474 - DNA, 17 bp, synthetic construct
  source 1..17: mol_type = other DNA
ccacagttgtggtggtg

SEQ ID NO: 167475 - DNA, 17 bp, synthetic construct
  source 1..17: mol_type = other DNA
gccacagttgtggtggt

SEQ ID NO: 167476 - DNA, 17 bp, synthetic construct
  source 1..17: mol_type = other DNA
ggccacagttgtggtgg

SEQ ID NO: 167477 - DNA, 17 bp, synthetic construct
  source 1..17: mol_type = other DNA
tggccacagttgtggtg

SEQ ID NO: 167478 - DNA, 17 bp, synthetic construct
  source 1..17: mol_type = other DNA
gtggccacagttgtggt

SEQ ID NO: 167479 - DNA, 17 bp, synthetic construct
  source 1..17: mol_type = other DNA
agtggccacagttgtgg

SEQ ID NO: 167480 - DNA, 17 bp, synthetic construct
  source 1..17: mol_type = other DNA
cagtggccacagttgtg

SEQ ID NO: 167481 - DNA, 17 bp, synthetic construct
  source 1..17: mol_type = other DNA
ccagtggccacagttgt

SEQ ID NO: 167482 - DNA, 17 bp, synthetic construct
  source 1..17: mol_type = other DNA
accagtggccacagttg

SEQ ID NO: 167483 - DNA, 17 bp, synthetic construct
  source 1..17: mol_type = other DNA
aaccagtggccacagtt

SEQ ID NO: 167484 - DNA, 17 bp, synthetic construct
  source 1..17: mol_type = other DNA
gaaccagtggccacagt

SEQ ID NO: 167485 - DNA, 17 bp, synthetic construct
  source 1..17: mol_type = other DNA
agaaccagtggccacag

SEQ ID NO: 167486 - DNA, 17 bp, synthetic construct
  source 1..17: mol_type = other DNA
tagaaccagtggccaca

SEQ ID NO: 167487 - DNA, 17 bp, synthetic construct
  source 1..17: mol_type = other DNA
atagaaccagtggccac

SEQ ID NO: 167488 - DNA, 17 bp, synthetic construct
  source 1..17: mol_type = other DNA
catagaaccagtggcca

SEQ ID NO: 167489 - DNA, 17 bp, synthetic construct
  source 1..17: mol_type = other DNA
ccatagaaccagtggcc

SEQ ID NO: 167490 - DNA, 17 bp, synthetic construct
  source 1..17: mol_type = other DNA
gccatagaaccagtggc

SEQ ID NO: 167491 - DNA, 17 bp, synthetic construct
  source 1..17: mol_type = other DNA
tgccatagaaccagtgg

SEQ ID NO: 167492 - DNA, 17 bp, synthetic construct
  source 1..17: mol_type = other DNA
ttgccatagaaccagtg

SEQ ID NO: 167493 - DNA, 17 bp, synthetic construct
  source 1..17: mol_type = other DNA
gttgccatagaaccagt

SEQ ID NO: 167494 - DNA, 17 bp, synthetic construct
  source 1..17: mol_type = other DNA
tgttgccatagaaccag

SEQ ID NO: 167495 - DNA, 17 bp, synthetic construct
  source 1..17: mol_type = other DNA
gtgttgccatagaacca

SEQ ID NO: 167496 - DNA, 17 bp, synthetic construct
  source 1..17: mol_type = other DNA
ggtgttgccatagaacc

SEQ ID NO: 167497 - DNA, 17 bp, synthetic construct
  source 1..17: mol_type = other DNA
gggtgttgccatagaac

SEQ ID NO: 167498 - DNA, 17 bp, synthetic construct
  source 1..17: mol_type = other DNA
agggtgttgccatagaa

SEQ ID NO: 167499 - DNA, 17 bp, synthetic construct
  source 1..17: mol_type = other DNA
gagggtgttgccataga

SEQ ID NO: 167500 - DNA, 17 bp, synthetic construct
  source 1..17: mol_type = other DNA
ggagggtgttgccatag

SEQ ID NO: 167501 - DNA, 17 bp, synthetic construct
  source 1..17: mol_type = other DNA
aggagggtgttgccata

SEQ ID NO: 167502 - DNA, 17 bp, synthetic construct
  source 1..17: mol_type = other DNA
gaggagggtgttgccat

SEQ ID NO: 167503 - DNA, 17 bp, synthetic construct
  source 1..17: mol_type = other DNA
agaggagggtgttgcca

SEQ ID NO: 167504 - DNA, 17 bp, synthetic construct
  source 1..17: mol_type = other DNA
tagaggagggtgttgcc

SEQ ID NO: 167505 - DNA, 17 bp, synthetic construct
  source 1..17: mol_type = other DNA
ctagaggagggtgttgc

SEQ ID NO: 167506 - DNA, 17 bp, synthetic construct
  source 1..17: mol_type = other DNA
gctagaggagggtgttg

SEQ ID NO: 167507 - DNA, 17 bp, synthetic construct
  source 1..17: mol_type = other DNA
tgctagaggagggtgtt

SEQ ID NO: 167508 - DNA, 17 bp, synthetic construct
  source 1..17: mol_type = other DNA
gtgctagaggagggtgt

SEQ ID NO: 167509 - DNA, 17 bp, synthetic construct
  source 1..17: mol_type = other DNA
tgtgctagaggagggtg

SEQ ID NO: 167510 - DNA, 17 bp, synthetic construct
  source 1..17: mol_type = other DNA
gtgtgctagaggagggt

SEQ ID NO: 167511 - DNA, 17 bp, synthetic construct
  source 1..17: mol_type = other DNA
tgtgtgctagaggaggg

SEQ ID NO: 167512 - DNA, 17 bp, synthetic construct
  source 1..17: mol_type = other DNA
ctgtgtgctagaggagg

SEQ ID NO: 167513 - DNA, 17 bp, synthetic construct
  source 1..17: mol_type = other DNA
tctgtgtgctagaggag

SEQ ID NO: 167514 - DNA, 17 bp, synthetic construct
  source 1..17: mol_type = other DNA
gtctgtgtgctagagga

SEQ ID NO: 167515 - DNA, 17 bp, synthetic construct
  source 1..17: mol_type = other DNA
ggtctgtgtgctagagg

SEQ ID NO: 167516 - DNA, 17 bp, synthetic construct
  source 1..17: mol_type = other DNA
tggtctgtgtgctagag

SEQ ID NO: 167517 - DNA, 17 bp, synthetic construct
  source 1..17: mol_type = other DNA
ctggtctgtgtgctaga

SEQ ID NO: 167518 - DNA, 17 bp, synthetic construct
  source 1..17: mol_type = other DNA
actggtctgtgtgctag

SEQ ID NO: 167519 - DNA, 17 bp, synthetic construct
  source 1..17: mol_type = other DNA
cactggtctgtgtgcta

SEQ ID NO: 167520 - DNA, 17 bp, synthetic construct
  source 1..17: mol_type = other DNA
ccactggtctgtgtgct

SEQ ID NO: 167521 - DNA, 17 bp, synthetic construct
  source 1..17: mol_type = other DNA
accactggtctgtgtgc

SEQ ID NO: 167522 - DNA, 17 bp, synthetic construct
  source 1..17: mol_type = other DNA
taccactggtctgtgtg

SEQ ID NO: 167523 - DNA, 17 bp, synthetic construct
  source 1..17: mol_type = other DNA
gtaccactggtctgtgt

SEQ ID NO: 167524 - DNA, 17 bp, synthetic construct
  source 1..17: mol_type = other DNA
agtaccactggtctgtg

SEQ ID NO: 167525 - DNA, 17 bp, synthetic construct
  source 1..17: mol_type = other DNA
gagtaccactggtctgt

SEQ ID NO: 167526 - DNA, 17 bp, synthetic construct
  source 1..17: mol_type = other DNA
ggagtaccactggtctg

SEQ ID NO: 167527 - DNA, 17 bp, synthetic construct
  source 1..17: mol_type = other DNA
gggagtaccactggtct

SEQ ID NO: 167528 - DNA, 17 bp, synthetic construct
  source 1..17: mol_type = other DNA
ggggagtaccactggtc

SEQ ID NO: 167529 - DNA, 17 bp, synthetic construct
  source 1..17: mol_type = other DNA
gggggagtaccactggt

SEQ ID NO: 167530 - DNA, 17 bp, synthetic construct
  source 1..17: mol_type = other DNA
tgggggagtaccactgg

SEQ ID NO: 167531 - DNA, 17 bp, synthetic construct
  source 1..17: mol_type = other DNA
atgggggagtaccactg

SEQ ID NO: 167532 - DNA, 17 bp, synthetic construct
  source 1..17: mol_type = other DNA
gatgggggagtaccact

SEQ ID NO: 167533 - DNA, 17 bp, synthetic construct
  source 1..17: mol_type = other DNA
tgatgggggagtaccac

SEQ ID NO: 167534 - DNA, 17 bp, synthetic construct
  source 1..17: mol_type = other DNA
gtgatgggggagtacca

SEQ ID NO: 167535 - DNA, 17 bp, synthetic construct
  source 1..17: mol_type = other DNA
agtgatgggggagtacc

SEQ ID NO: 167536 - DNA, 17 bp, synthetic construct
  source 1..17: mol_type = other DNA
cagtgatgggggagtac

SEQ ID NO: 167537 - DNA, 17 bp, synthetic construct
  source 1..17: mol_type = other DNA
tcagtgatgggggagta

SEQ ID NO: 167538 - DNA, 17 bp, synthetic construct
  source 1..17: mol_type = other DNA
gtcagtgatgggggagt

SEQ ID NO: 167539 - DNA, 17 bp, synthetic construct
  source 1..17: mol_type = other DNA
ggtcagtgatgggggag

SEQ ID NO: 167540 - DNA, 17 bp, synthetic construct
  source 1..17: mol_type = other DNA
tggtcagtgatggggga

SEQ ID NO: 167541 - DNA, 17 bp, synthetic construct
  source 1..17: mol_type = other DNA
gtggtcagtgatggggg

SEQ ID NO: 167542 - DNA, 17 bp, synthetic construct
  source 1..17: mol_type = other DNA
ggtggtcagtgatgggg

SEQ ID NO: 167543 - DNA, 17 bp, synthetic construct
  source 1..17: mol_type = other DNA
tggtggtcagtgatggg

SEQ ID NO: 167544 - DNA, 17 bp, synthetic construct
  source 1..17: mol_type = other DNA
gtggtggtcagtgatgg

SEQ ID NO: 167545 - DNA, 17 bp, synthetic construct
  source 1..17: mol_type = other DNA
cgtggtggtcagtgatg

SEQ ID NO: 167546 - DNA, 17 bp, synthetic construct
  source 1..17: mol_type = other DNA
ccgtggtggtcagtgat

SEQ ID NO: 167547 - DNA, 17 bp, synthetic construct
  source 1..17: mol_type = other DNA
gccgtggtggtcagtga

SEQ ID NO: 167548 - DNA, 17 bp, synthetic construct
  source 1..17: mol_type = other DNA
ggccgtggtggtcagtg

SEQ ID NO: 167549 - DNA, 17 bp, synthetic construct
  source 1..17: mol_type = other DNA
tggccgtggtggtcagt

SEQ ID NO: 167550 - DNA, 17 bp, synthetic construct
  source 1..17: mol_type = other DNA
gtggccgtggtggtcag

SEQ ID NO: 167551 - DNA, 17 bp, synthetic construct
  source 1..17: mol_type = other DNA
agtggccgtggtggtca

SEQ ID NO: 167552 - DNA, 17 bp, synthetic construct
  source 1..17: mol_type = other DNA
tagtggccgtggtggtc

SEQ ID NO: 167553 - DNA, 17 bp, synthetic construct
  source 1..17: mol_type = other DNA
gtagtggccgtggtggt

SEQ ID NO: 167554 - DNA, 17 bp, synthetic construct
  source 1..17: mol_type = other DNA
cgtagtggccgtggtgg

SEQ ID NO: 167555 - DNA, 17 bp, synthetic construct
  source 1..17: mol_type = other DNA
tcgtagtggccgtggtg

SEQ ID NO: 167556 - DNA, 17 bp, synthetic construct
  source 1..17: mol_type = other DNA
atcgtagtggccgtggt

SEQ ID NO: 167557 - DNA, 17 bp, synthetic construct
  source 1..17: mol_type = other DNA
gatcgtagtggccgtgg

SEQ ID NO: 167558 - DNA, 17 bp, synthetic construct
  source 1..17: mol_type = other DNA
tgatcgtagtggccgtg

SEQ ID NO: 167559 - DNA, 17 bp, synthetic construct
  source 1..17: mol_type = other DNA
gtgatcgtagtggccgt

SEQ ID NO: 167560 - DNA, 17 bp, synthetic construct
  source 1..17: mol_type = other DNA
cgtgatcgtagtggccg

SEQ ID NO: 167561 - DNA, 17 bp, synthetic construct
  source 1..17: mol_type = other DNA
ccgtgatcgtagtggcc

SEQ ID NO: 167562 - DNA, 17 bp, synthetic construct
  source 1..17: mol_type = other DNA
gccgtgatcgtagtggc

SEQ ID NO: 167563 - DNA, 17 bp, synthetic construct
  source 1..17: mol_type = other DNA
ggccgtgatcgtagtgg

SEQ ID NO: 167564 - DNA, 17 bp, synthetic construct
  source 1..17: mol_type = other DNA
tggccgtgatcgtagtg

SEQ ID NO: 167565 - DNA, 17 bp, synthetic construct
  source 1..17: mol_type = other DNA
gtggccgtgatcgtagt

SEQ ID NO: 167566 - DNA, 17 bp, synthetic construct
  source 1..17: mol_type = other DNA
ggtggccgtgatcgtag

SEQ ID NO: 167567 - DNA, 17 bp, synthetic construct
  source 1..17: mol_type = other DNA
cggtggccgtgatcgta

SEQ ID NO: 167568 - DNA, 17 bp, synthetic construct
  source 1..17: mol_type = other DNA
ccggtggccgtgatcgt

SEQ ID NO: 167569 - DNA, 17 bp, synthetic construct
  source 1..17: mol_type = other DNA
gccggtggccgtgatcg

SEQ ID NO: 167570 - DNA, 17 bp, synthetic construct
  source 1..17: mol_type = other DNA
agccggtggccgtgatc

SEQ ID NO: 167571 - DNA, 17 bp, synthetic construct
  source 1..17: mol_type = other DNA
gagccggtggccgtgat

SEQ ID NO: 167572 - DNA, 17 bp, synthetic construct
  source 1..17: mol_type = other DNA
ggagccggtggccgtga

SEQ ID NO: 167573 - DNA, 17 bp, synthetic construct
  source 1..17: mol_type = other DNA
tggagccggtggccgtg

SEQ ID NO: 167574 - DNA, 17 bp, synthetic construct
  source 1..17: mol_type = other DNA
gtggagccggtggccgt

SEQ ID NO: 167575 - DNA, 17 bp, synthetic construct
  source 1..17: mol_type = other DNA
ggtggagccggtggccg

SEQ ID NO: 167576 - DNA, 17 bp, synthetic construct
  source 1..17: mol_type = other DNA
tggtggagccggtggcc

SEQ ID NO: 167577 - DNA, 17 bp, synthetic construct
  source 1..17: mol_type = other DNA
gtggtggagccggtggc

SEQ ID NO: 167578 - DNA, 17 bp, synthetic construct
  source 1..17: mol_type = other DNA
ggtggtggagccggtgg

SEQ ID NO: 167579 - DNA, 17 bp, synthetic construct
  source 1..17: mol_type = other DNA
tggtggtggagccggtg

SEQ ID NO: 167580 - DNA, 17 bp, synthetic construct
  source 1..17: mol_type = other DNA
ttggtggtggagccggt

SEQ ID NO: 167581 - DNA, 17 bp, synthetic construct
  source 1..17: mol_type = other DNA
gttggtggtggagccgg

SEQ ID NO: 167582 - DNA, 17 bp, synthetic construct
  source 1..17: mol_type = other DNA
ggttggtggtggagccg

SEQ ID NO: 167583 - DNA, 17 bp, synthetic construct
  source 1..17: mol_type = other DNA
gggttggtggtggagcc

SEQ ID NO: 167584 - DNA, 17 bp, synthetic construct
  source 1..17: mol_type = other DNA
ggggttggtggtggagc

SEQ ID NO: 167585 - DNA, 17 bp, synthetic construct
  source 1..17: mol_type = other DNA
aggggttggtggtggag

SEQ ID NO: 167586 - DNA, 17 bp, synthetic construct
  source 1..17: mol_type = other DNA
gaggggttggtggtgga

SEQ ID NO: 167587 - DNA, 17 bp, synthetic construct
  source 1..17: mol_type = other DNA
ggaggggttggtggtgg

SEQ ID NO: 167588 - DNA, 17 bp, synthetic construct
  source 1..17: mol_type = other DNA
aggaggggttggtggtg

SEQ ID NO: 167589 - DNA, 17 bp, synthetic construct
  source 1..17: mol_type = other DNA
gaggaggggttggtggt

SEQ ID NO: 167590 - DNA, 17 bp, synthetic construct
  source 1..17: mol_type = other DNA
tgaggaggggttggtgg

SEQ ID NO: 167591 - DNA, 17 bp, synthetic construct
  source 1..17: mol_type = other DNA
ttgaggaggggttggtg

SEQ ID NO: 167592 - DNA, 17 bp, synthetic construct
  source 1..17: mol_type = other DNA
gttgaggaggggttggt

SEQ ID NO: 167593 - DNA, 17 bp, synthetic construct
  source 1..17: mol_type = other DNA
agttgaggaggggttgg

SEQ ID NO: 167594 - DNA, 17 bp, synthetic construct
  source 1..17: mol_type = other DNA
gagttgaggaggggttg

SEQ ID NO: 167595 - DNA, 17 bp, synthetic construct
  source 1..17: mol_type = other DNA
ggagttgaggaggggtt

SEQ ID NO: 167596 - DNA, 17 bp, synthetic construct
  source 1..17: mol_type = other DNA
aggagttgaggaggggt

SEQ ID NO: 167597 - DNA, 17 bp, synthetic construct
  source 1..17: mol_type = other DNA
caggagttgaggagggg

SEQ ID NO: 167598 - DNA, 17 bp, synthetic construct
  source 1..17: mol_type = other DNA
ccaggagttgaggaggg

SEQ ID NO: 167599 - DNA, 17 bp, synthetic construct
  source 1..17: mol_type = other DNA
cccaggagttgaggagg

SEQ ID NO: 167600 - DNA, 17 bp, synthetic construct
  source 1..17: mol_type = other DNA
tcccaggagttgaggag

SEQ ID NO: 167601 - DNA, 17 bp, synthetic construct
  source 1..17: mol_type = other DNA
gtcccaggagttgagga

SEQ ID NO: 167602 - DNA, 17 bp, synthetic construct
  source 1..17: mol_type = other DNA
tgtcccaggagttgagg

SEQ ID NO: 167603 - DNA, 17 bp, synthetic construct
  source 1..17: mol_type = other DNA
ttgtcccaggagttgag

SEQ ID NO: 167604 - DNA, 17 bp, synthetic construct
  source 1..17: mol_type = other DNA
gttgtcccaggagttga

SEQ ID NO: 167605 - DNA, 17 bp, synthetic construct
  source 1..17: mol_type = other DNA
agttgtcccaggagttg

SEQ ID NO: 167606 - DNA, 17 bp, synthetic construct
  source 1..17: mol_type = other DNA
gagttgtcccaggagtt

SEQ ID NO: 167607 - DNA, 17 bp, synthetic construct
  source 1..17: mol_type = other DNA
ggagttgtcccaggagt

SEQ ID NO: 167608 - DNA, 17 bp, synthetic construct
  source 1..17: mol_type = other DNA
gggagttgtcccaggag

SEQ ID NO: 167609 - DNA, 17 bp, synthetic construct
  source 1..17: mol_type = other DNA
tgggagttgtcccagga

SEQ ID NO: 167610 - DNA, 17 bp, synthetic construct
  source 1..17: mol_type = other DNA
atgggagttgtcccagg

SEQ ID NO: 167611 - DNA, 17 bp, synthetic construct
  source 1..17: mol_type = other DNA
gatgggagttgtcccag

SEQ ID NO: 167612 - DNA, 17 bp, synthetic construct
  source 1..17: mol_type = other DNA
ggatgggagttgtccca

SEQ ID NO: 167613 - DNA, 17 bp, synthetic construct
  source 1..17: mol_type = other DNA
gggatgggagttgtccc

SEQ ID NO: 167614 - DNA, 17 bp, synthetic construct
  source 1..17: mol_type = other DNA
ggggatgggagttgtcc

SEQ ID NO: 167615 - DNA, 17 bp, synthetic construct
  source 1..17: mol_type = other DNA
gggggatgggagttgtc

SEQ ID NO: 167616 - DNA, 17 bp, synthetic construct
  source 1..17: mol_type = other DNA
ggggggatgggagttgt

SEQ ID NO: 167617 - DNA, 17 bp, synthetic construct
  source 1..17: mol_type = other DNA
tggggggatgggagttg

SEQ ID NO: 167618 - DNA, 17 bp, synthetic construct
  source 1..17: mol_type = other DNA
ctggggggatgggagtt

SEQ ID NO: 167619 - DNA, 17 bp, synthetic construct
  source 1..17: mol_type = other DNA
actggggggatgggagt

SEQ ID NO: 167620 - DNA, 17 bp, synthetic construct
  source 1..17: mol_type = other DNA
cactggggggatgggag

SEQ ID NO: 167621 - DNA, 17 bp, synthetic construct
  source 1..17: mol_type = other DNA
gcactggggggatggga

SEQ ID NO: 167622 - DNA, 17 bp, synthetic construct
  source 1..17: mol_type = other DNA
agcactggggggatggg

SEQ ID NO: 167623 - DNA, 17 bp, synthetic construct
  source 1..17: mol_type = other DNA
cagcactggggggatgg

SEQ ID NO: 167624 - DNA, 17 bp, synthetic construct
  source 1..17: mol_type = other DNA
tcagcactggggggatg

SEQ ID NO: 167625 - DNA, 17 bp, synthetic construct
  source 1..17: mol_type = other DNA
gtcagcactggggggat

SEQ ID NO: 167626 - DNA, 17 bp, synthetic construct
  source 1..17: mol_type = other DNA
ggtcagcactgggggga

SEQ ID NO: 167627 - DNA, 17 bp, synthetic construct
  source 1..17: mol_type = other DNA
tggtcagcactgggggg

SEQ ID NO: 167628 - DNA, 17 bp, synthetic construct
  source 1..17: mol_type = other DNA
gtggtcagcactggggg

SEQ ID NO: 167629 - DNA, 17 bp, synthetic construct
  source 1..17: mol_type = other DNA
ggtggtcagcactgggg

SEQ ID NO: 167630 - DNA, 17 bp, synthetic construct
  source 1..17: mol_type = other DNA
tggtggtcagcactggg

SEQ ID NO: 167631 - DNA, 17 bp, synthetic construct
  source 1..17: mol_type = other DNA
gtggtggtcagcactgg

SEQ ID NO: 167632 - DNA, 17 bp, synthetic construct
  source 1..17: mol_type = other DNA
ggtggtggtcagcactg

SEQ ID NO: 167633 - DNA, 17 bp, synthetic construct
  source 1..17: mol_type = other DNA
cggtggtggtcagcact

SEQ ID NO: 167634 - DNA, 17 bp, synthetic construct
  source 1..17: mol_type = other DNA
gcggtggtggtcagcac

SEQ ID NO: 167635 - DNA, 17 bp, synthetic construct
  source 1..17: mol_type = other DNA
ggcggtggtggtcagca

SEQ ID NO: 167636 - DNA, 17 bp, synthetic construct
  source 1..17: mol_type = other DNA
tggcggtggtggtcagc

SEQ ID NO: 167637 - DNA, 17 bp, synthetic construct
  source 1..17: mol_type = other DNA
gtggcggtggtggtcag

SEQ ID NO: 167638 - DNA, 17 bp, synthetic construct
  source 1..17: mol_type = other DNA
ggtggcggtggtggtca

SEQ ID NO: 167639 - DNA, 17 bp, synthetic construct
  source 1..17: mol_type = other DNA
tggtggcggtggtggtc

SEQ ID NO: 167640 - DNA, 17 bp, synthetic construct
  source 1..17: mol_type = other DNA
gtggtggcggtggtggt

SEQ ID NO: 167641 - DNA, 17 bp, synthetic construct
  source 1..17: mol_type = other DNA
tgtggtggcggtggtgg

SEQ ID NO: 167642 - DNA, 17 bp, synthetic construct
  source 1..17: mol_type = other DNA
gtgtggtggcggtggtg

SEQ ID NO: 167643 - DNA, 17 bp, synthetic construct
  source 1..17: mol_type = other DNA
ggtgtggtggcggtggt

SEQ ID NO: 167644 - DNA, 17 bp, synthetic construct
  source 1..17: mol_type = other DNA
aggtgtggtggcggtgg

SEQ ID NO: 167645 - DNA, 17 bp, synthetic construct
  source 1..17: mol_type = other DNA
caggtgtggtggcggtg

SEQ ID NO: 167646 - DNA, 17 bp, synthetic construct
  source 1..17: mol_type = other DNA
gcaggtgtggtggcggt

SEQ ID NO: 167647 - DNA, 17 bp, synthetic construct
  source 1..17: mol_type = other DNA
tgcaggtgtggtggcgg

SEQ ID NO: 167648 - DNA, 17 bp, synthetic construct
  source 1..17: mol_type = other DNA
ctgcaggtgtggtggcg

SEQ ID NO: 167649 - DNA, 17 bp, synthetic construct
  source 1..17: mol_type = other DNA
gctgcaggtgtggtggc

SEQ ID NO: 167650 - DNA, 17 bp, synthetic construct
  source 1..17: mol_type = other DNA
ggctgcaggtgtggtgg

SEQ ID NO: 167651 - DNA, 17 bp, synthetic construct
  source 1..17: mol_type = other DNA
tggctgcaggtgtggtg

SEQ ID NO: 167652 - DNA, 17 bp, synthetic construct
  source 1..17: mol_type = other DNA
gtggctgcaggtgtggt

SEQ ID NO: 167653 - DNA, 17 bp, synthetic construct
  source 1..17: mol_type = other DNA
ggtggctgcaggtgtgg

SEQ ID NO: 167654 - DNA, 17 bp, synthetic construct
  source 1..17: mol_type = other DNA
tggtggctgcaggtgtg

SEQ ID NO: 167655 - DNA, 17 bp, synthetic construct
  source 1..17: mol_type = other DNA
ctggtggctgcaggtgt

SEQ ID NO: 167656 - DNA, 17 bp, synthetic construct
  source 1..17: mol_type = other DNA
gctggtggctgcaggtg

SEQ ID NO: 167657 - DNA, 17 bp, synthetic construct
  source 1..17: mol_type = other DNA
tgctggtggctgcaggt

SEQ ID NO: 167658 - DNA, 17 bp, synthetic construct
  source 1..17: mol_type = other DNA
ttgctggtggctgcagg

SEQ ID NO: 167659 - DNA, 17 bp, synthetic construct
  source 1..17: mol_type = other DNA
gttgctggtggctgcag

SEQ ID NO: 167660 - DNA, 17 bp, synthetic construct
  source 1..17: mol_type = other DNA
tgttgctggtggctgca

SEQ ID NO: 167661 - DNA, 17 bp, synthetic construct
  source 1..17: mol_type = other DNA
gtgttgctggtggctgc

SEQ ID NO: 167662 - DNA, 17 bp, synthetic construct
  source 1..17: mol_type = other DNA
tgtgttgctggtggctg

SEQ ID NO: 167663 - DNA, 17 bp, synthetic construct
  source 1..17: mol_type = other DNA
ctgtgttgctggtggct

SEQ ID NO: 167664 - DNA, 17 bp, synthetic construct
  source 1..17: mol_type = other DNA
actgtgttgctggtggc

SEQ ID NO: 167665 - DNA, 17 bp, synthetic construct
  source 1..17: mol_type = other DNA
cactgtgttgctggtgg

SEQ ID NO: 167666 - DNA, 17 bp, synthetic construct
  source 1..17: mol_type = other DNA
tcactgtgttgctggtg

SEQ ID NO: 167667 - DNA, 17 bp, synthetic construct
  source 1..17: mol_type = other DNA
gtcactgtgttgctggt

SEQ ID NO: 167668 - DNA, 17 bp, synthetic construct
  source 1..17: mol_type = other DNA
agtcactgtgttgctgg

SEQ ID NO: 167669 - DNA, 17 bp, synthetic construct
  source 1..17: mol_type = other DNA
gagtcactgtgttgctg

SEQ ID NO: 167670 - DNA, 17 bp, synthetic construct
  source 1..17: mol_type = other DNA
ggagtcactgtgttgct

SEQ ID NO: 167671 - DNA, 17 bp, synthetic construct
  source 1..17: mol_type = other DNA
gggagtcactgtgttgc

SEQ ID NO: 167672 - DNA, 17 bp, synthetic construct
  source 1..17: mol_type = other DNA
agggagtcactgtgttg

SEQ ID NO: 167673 - DNA, 17 bp, synthetic construct
  source 1..17: mol_type = other DNA
gagggagtcactgtgtt

SEQ ID NO: 167674 - DNA, 17 bp, synthetic construct
  source 1..17: mol_type = other DNA
ggagggagtcactgtgt

SEQ ID NO: 167675 - DNA, 17 bp, synthetic construct
  source 1..17: mol_type = other DNA
aggagggagtcactgtg

SEQ ID NO: 167676 - DNA, 17 bp, synthetic construct
  source 1..17: mol_type = other DNA
gaggagggagtcactgt

SEQ ID NO: 167677 - DNA, 17 bp, synthetic construct
  source 1..17: mol_type = other DNA
agaggagggagtcactg

SEQ ID NO: 167678 - DNA, 17 bp, synthetic construct
  source 1..17: mol_type = other DNA
cagaggagggagtcact

SEQ ID NO: 167679 - DNA, 17 bp, synthetic construct
  source 1..17: mol_type = other DNA
gcagaggagggagtcac

SEQ ID NO: 167680 - DNA, 17 bp, synthetic construct
  source 1..17: mol_type = other DNA
ggcagaggagggagtca

SEQ ID NO: 167681 - DNA, 17 bp, synthetic construct
  source 1..17: mol_type = other DNA
gggcagaggagggagtc

SEQ ID NO: 167682 - DNA, 17 bp, synthetic construct
  source 1..17: mol_type = other DNA
agggcagaggagggagt

SEQ ID NO: 167683 - DNA, 17 bp, synthetic construct
  source 1..17: mol_type = other DNA
tagggcagaggagggag

SEQ ID NO: 167684 - DNA, 17 bp, synthetic construct
  source 1..17: mol_type = other DNA
ctagggcagaggaggga

SEQ ID NO: 167685 - DNA, 17 bp, synthetic construct
  source 1..17: mol_type = other DNA
cctagggcagaggaggg

SEQ ID NO: 167686 - DNA, 17 bp, synthetic construct
  source 1..17: mol_type = other DNA
ccctagggcagaggagg

SEQ ID NO: 167687 - DNA, 17 bp, synthetic construct
  source 1..17: mol_type = other DNA
tccctagggcagaggag

SEQ ID NO: 167688 - DNA, 17 bp, synthetic construct
  source 1..17: mol_type = other DNA
gtccctagggcagagga

SEQ ID NO: 167689 - DNA, 17 bp, synthetic construct
  source 1..17: mol_type = other DNA
ggtccctagggcagagg

SEQ ID NO: 167690 - DNA, 17 bp, synthetic construct
  source 1..17: mol_type = other DNA
tggtccctagggcagag

SEQ ID NO: 167691 - DNA, 17 bp, synthetic construct
  source 1..17: mol_type = other DNA
gtggtccctagggcaga

SEQ ID NO: 167692 - DNA, 17 bp, synthetic construct
  source 1..17: mol_type = other DNA
ggtggtccctagggcag

SEQ ID NO: 167693 - DNA, 17 bp, synthetic construct
  source 1..17: mol_type = other DNA
gggtggtccctagggca

SEQ ID NO: 167694 - DNA, 17 bp, synthetic construct
  source 1..17: mol_type = other DNA
tgggtggtccctagggc

SEQ ID NO: 167695 - DNA, 17 bp, synthetic construct
  source 1..17: mol_type = other DNA
gtgggtggtccctaggg

SEQ ID NO: 167696 - DNA, 17 bp, synthetic construct
  source 1..17: mol_type = other DNA
tgtgggtggtccctagg

SEQ ID NO: 167697 - DNA, 17 bp, synthetic construct
  source 1..17: mol_type = other DNA
gtgtgggtggtccctag

SEQ ID NO: 167698 - DNA, 17 bp, synthetic construct
  source 1..17: mol_type = other DNA
tgtgtgggtggtcccta

SEQ ID NO: 167699 - DNA, 17 bp, synthetic construct
  source 1..17: mol_type = other DNA
gtgtgtgggtggtccct

SEQ ID NO: 167700 - DNA, 17 bp, synthetic construct
  source 1..17: mol_type = other DNA
ggtgtgtgggtggtccc

SEQ ID NO: 167701 - DNA, 17 bp, synthetic construct
  source 1..17: mol_type = other DNA
gggtgtgtgggtggtcc

SEQ ID NO: 167702 - DNA, 17 bp, synthetic construct
  source 1..17: mol_type = other DNA
ggggtgtgtgggtggtc

SEQ ID NO: 167703 - DNA, 17 bp, synthetic construct
  source 1..17: mol_type = other DNA
gggggtgtgtgggtggt

SEQ ID NO: 167704 - DNA, 17 bp, synthetic construct
  source 1..17: mol_type = other DNA
tgggggtgtgtgggtgg

SEQ ID NO: 167705 - DNA, 17 bp, synthetic construct
  source 1..17: mol_type = other DNA
ctgggggtgtgtgggtg

SEQ ID NO: 167706 - DNA, 17 bp, synthetic construct
  source 1..17: mol_type = other DNA
actgggggtgtgtgggt

SEQ ID NO: 167707 - DNA, 17 bp, synthetic construct
  source 1..17: mol_type = other DNA
cactgggggtgtgtggg

SEQ ID NO: 167708 - DNA, 17 bp, synthetic construct
  source 1..17: mol_type = other DNA
gcactgggggtgtgtgg

SEQ ID NO: 167709 - DNA, 17 bp, synthetic construct
  source 1..17: mol_type = other DNA
ggcactgggggtgtgtg

SEQ ID NO: 167710 - DNA, 17 bp, synthetic construct
  source 1..17: mol_type = other DNA
cggcactgggggtgtgt

SEQ ID NO: 167711 - DNA, 17 bp, synthetic construct
  source 1..17: mol_type = other DNA
tcggcactgggggtgtg

SEQ ID NO: 167712 - DNA, 17 bp, synthetic construct
  source 1..17: mol_type = other DNA
ttcggcactgggggtgt

SEQ ID NO: 167713 - DNA, 17 bp, synthetic construct
  source 1..17: mol_type = other DNA
gttcggcactgggggtg

SEQ ID NO: 167714 - DNA, 17 bp, synthetic construct
  source 1..17: mol_type = other DNA
tgttcggcactgggggt

SEQ ID NO: 167715 - DNA, 17 bp, synthetic construct
  source 1..17: mol_type = other DNA
gtgttcggcactggggg

SEQ ID NO: 167716 - DNA, 17 bp, synthetic construct
  source 1..17: mol_type = other DNA
ggtgttcggcactgggg

SEQ ID NO: 167717 - DNA, 17 bp, synthetic construct
  source 1..17: mol_type = other DNA
tggtgttcggcactggg

SEQ ID NO: 167718 - DNA, 17 bp, synthetic construct
  source 1..17: mol_type = other DNA
atggtgttcggcactgg

SEQ ID NO: 167719 - DNA, 17 bp, synthetic construct
  source 1..17: mol_type = other DNA
catggtgttcggcactg

SEQ ID NO: 167720 - DNA, 17 bp, synthetic construct
  source 1..17: mol_type = other DNA
ccatggtgttcggcact

SEQ ID NO: 167721 - DNA, 17 bp, synthetic construct
  source 1..17: mol_type = other DNA
gccatggtgttcggcac

SEQ ID NO: 167722 - DNA, 17 bp, synthetic construct
  source 1..17: mol_type = other DNA
ggccatggtgttcggca

SEQ ID NO: 167723 - DNA, 17 bp, synthetic construct
  source 1..17: mol_type = other DNA
tggccatggtgttcggc

SEQ ID NO: 167724 - DNA, 17 bp, synthetic construct
  source 1..17: mol_type = other DNA
gtggccatggtgttcgg

SEQ ID NO: 167725 - DNA, 17 bp, synthetic construct
  source 1..17: mol_type = other DNA
ggtggccatggtgttcg

SEQ ID NO: 167726 - DNA, 17 bp, synthetic construct
  source 1..17: mol_type = other DNA
tggtggccatggtgttc

SEQ ID NO: 167727 - DNA, 17 bp, synthetic construct
  source 1..17: mol_type = other DNA
gtggtggccatggtgtt

SEQ ID NO: 167728 - DNA, 17 bp, synthetic construct
  source 1..17: mol_type = other DNA
tgtggtggccatggtgt

SEQ ID NO: 167729 - DNA, 17 bp, synthetic construct
  source 1..17: mol_type = other DNA
gtgtggtggccatggtg

SEQ ID NO: 167730 - DNA, 17 bp, synthetic construct
  source 1..17: mol_type = other DNA
tgtgtggtggccatggt

SEQ ID NO: 167731 - DNA, 17 bp, synthetic construct
  source 1..17: mol_type = other DNA
gtgtgtggtggccatgg

SEQ ID NO: 167732 - DNA, 17 bp, synthetic construct
  source 1..17: mol_type = other DNA
cgtgtgtggtggccatg

SEQ ID NO: 167733 - DNA, 17 bp, synthetic construct
  source 1..17: mol_type = other DNA
ccgtgtgtggtggccat

SEQ ID NO: 167734 - DNA, 17 bp, synthetic construct
  source 1..17: mol_type = other DNA
cccgtgtgtggtggcca

SEQ ID NO: 167735 - DNA, 17 bp, synthetic construct
  source 1..17: mol_type = other DNA
gcccgtgtgtggtggcc

SEQ ID NO: 167736 - DNA, 17 bp, synthetic construct
  source 1..17: mol_type = other DNA
cgcccgtgtgtggtggc

SEQ ID NO: 167737 - DNA, 17 bp, synthetic construct
  source 1..17: mol_type = other DNA
tcgcccgtgtgtggtgg

SEQ ID NO: 167738 - DNA, 17 bp, synthetic construct
  source 1..17: mol_type = other DNA
atcgcccgtgtgtggtg

SEQ ID NO: 167739 - DNA, 17 bp, synthetic construct
  source 1..17: mol_type = other DNA
gatcgcccgtgtgtggt

SEQ ID NO: 167740 - DNA, 17 bp, synthetic construct
  source 1..17: mol_type = other DNA
ggatcgcccgtgtgtgg

SEQ ID NO: 167741 - DNA, 17 bp, synthetic construct
  source 1..17: mol_type = other DNA
gggatcgcccgtgtgtg

SEQ ID NO: 167742 - DNA, 17 bp, synthetic construct
  source 1..17: mol_type = other DNA
agggatcgcccgtgtgt

SEQ ID NO: 167743 - DNA, 17 bp, synthetic construct
  source 1..17: mol_type = other DNA
cagggatcgcccgtgtg

SEQ ID NO: 167744 - DNA, 17 bp, synthetic construct
  source 1..17: mol_type = other DNA
gcagggatcgcccgtgt

SEQ ID NO: 167745 - DNA, 17 bp, synthetic construct
  source 1..17: mol_type = other DNA
ggcagggatcgcccgtg

SEQ ID NO: 167746 - DNA, 17 bp, synthetic construct
  source 1..17: mol_type = other DNA
gggcagggatcgcccgt

SEQ ID NO: 167747 - DNA, 17 bp, synthetic construct
  source 1..17: mol_type = other DNA
ggggcagggatcgcccg

SEQ ID NO: 167748 - DNA, 17 bp, synthetic construct
  source 1..17: mol_type = other DNA
gggggcagggatcgccc

SEQ ID NO: 167749 - DNA, 17 bp, synthetic construct
  source 1..17: mol_type = other DNA
ggggggcagggatcgcc

SEQ ID NO: 167750 - DNA, 17 bp, synthetic construct
  source 1..17: mol_type = other DNA
tggggggcagggatcgc

SEQ ID NO: 167751 - DNA, 17 bp, synthetic construct
  source 1..17: mol_type = other DNA
ctggggggcagggatcg

SEQ ID NO: 167752 - DNA, 17 bp, synthetic construct
  source 1..17: mol_type = other DNA
gctggggggcagggatc

SEQ ID NO: 167753 - DNA, 17 bp, synthetic construct
  source 1..17: mol_type = other DNA
tgctggggggcagggat

SEQ ID NO: 167754 - DNA, 17 bp, synthetic construct
  source 1..17: mol_type = other DNA
ctgctggggggcaggga

SEQ ID NO: 167755 - DNA, 17 bp, synthetic construct
  source 1..17: mol_type = other DNA
actgctggggggcaggg

SEQ ID NO: 167756 - DNA, 17 bp, synthetic construct
  source 1..17: mol_type = other DNA
gactgctggggggcagg

SEQ ID NO: 167757 - DNA, 17 bp, synthetic construct
  source 1..17: mol_type = other DNA
ggactgctggggggcag

SEQ ID NO: 167758 - DNA, 17 bp, synthetic construct
  source 1..17: mol_type = other DNA
gggactgctggggggca

SEQ ID NO: 167759 - DNA, 17 bp, synthetic construct
  source 1..17: mol_type = other DNA
ggggactgctggggggc

SEQ ID NO: 167760 - DNA, 17 bp, synthetic construct
  source 1..17: mol_type = other DNA
tggggactgctgggggg

SEQ ID NO: 167761 - DNA, 17 bp, synthetic construct
  source 1..17: mol_type = other DNA
gtggggactgctggggg

SEQ ID NO: 167762 - DNA, 17 bp, synthetic construct
  source 1..17: mol_type = other DNA
tgtggggactgctgggg

SEQ ID NO: 167763 - DNA, 17 bp, synthetic construct
  source 1..17: mol_type = other DNA
gtgtggggactgctggg

SEQ ID NO: 167764 - DNA, 17 bp, synthetic construct
  source 1..17: mol_type = other DNA
cgtgtggggactgctgg

SEQ ID NO: 167765 - DNA, 17 bp, synthetic construct
  source 1..17: mol_type = other DNA
ccgtgtggggactgctg

SEQ ID NO: 167766 - DNA, 17 bp, synthetic construct
  source 1..17: mol_type = other DNA
accgtgtggggactgct

SEQ ID NO: 167767 - DNA, 17 bp, synthetic construct
  source 1..17: mol_type = other DNA
caccgtgtggggactgc

SEQ ID NO: 167768 - DNA, 17 bp, synthetic construct
  source 1..17: mol_type = other DNA
gcaccgtgtggggactg

SEQ ID NO: 167769 - DNA, 17 bp, synthetic construct
  source 1..17: mol_type = other DNA
cgcaccgtgtggggact

SEQ ID NO: 167770 - DNA, 17 bp, synthetic construct
  source 1..17: mol_type = other DNA
gcgcaccgtgtggggac

SEQ ID NO: 167771 - DNA, 17 bp, synthetic construct
  source 1..17: mol_type = other DNA
tgcgcaccgtgtgggga

SEQ ID NO: 167772 - DNA, 17 bp, synthetic construct
  source 1..17: mol_type = other DNA
gtgcgcaccgtgtgggg

SEQ ID NO: 167773 - DNA, 17 bp, synthetic construct
  source 1..17: mol_type = other DNA
tgtgcgcaccgtgtggg

SEQ ID NO: 167774 - DNA, 17 bp, synthetic construct
  source 1..17: mol_type = other DNA
ctgtgcgcaccgtgtgg

SEQ ID NO: 167775 - DNA, 17 bp, synthetic construct
  source 1..17: mol_type = other DNA
gctgtgcgcaccgtgtg

SEQ ID NO: 167776 - DNA, 17 bp, synthetic construct
  source 1..17: mol_type = other DNA
ggctgtgcgcaccgtgt

SEQ ID NO: 167777 - DNA, 17 bp, synthetic construct
  source 1..17: mol_type = other DNA
aggctgtgcgcaccgtg

SEQ ID NO: 167778 - DNA, 17 bp, synthetic construct
  source 1..17: mol_type = other DNA
caggctgtgcgcaccgt

SEQ ID NO: 167779 - DNA, 17 bp, synthetic construct
  source 1..17: mol_type = other DNA
ccaggctgtgcgcaccg

SEQ ID NO: 167780 - DNA, 17 bp, synthetic construct
  source 1..17: mol_type = other DNA
tccaggctgtgcgcacc

SEQ ID NO: 167781 - DNA, 17 bp, synthetic construct
  source 1..17: mol_type = other DNA
gtccaggctgtgcgcac

SEQ ID NO: 167782 - DNA, 17 bp, synthetic construct
  source 1..17: mol_type = other DNA
agtccaggctgtgcgca

SEQ ID NO: 167783 - DNA, 17 bp, synthetic construct
  source 1..17: mol_type = other DNA
aagtccaggctgtgcgc

SEQ ID NO: 167784 - DNA, 17 bp, synthetic construct
  source 1..17: mol_type = other DNA
gaagtccaggctgtgcg

SEQ ID NO: 167785 - DNA, 17 bp, synthetic construct
  source 1..17: mol_type = other DNA
cgaagtccaggctgtgc

SEQ ID NO: 167786 - DNA, 17 bp, synthetic construct
  source 1..17: mol_type = other DNA
ccgaagtccaggctgtg

SEQ ID NO: 167787 - DNA, 17 bp, synthetic construct
  source 1..17: mol_type = other DNA
gccgaagtccaggctgt

SEQ ID NO: 167788 - DNA, 17 bp, synthetic construct
  source 1..17: mol_type = other DNA
ggccgaagtccaggctg

SEQ ID NO: 167789 - DNA, 17 bp, synthetic construct
  source 1..17: mol_type = other DNA
tggccgaagtccaggct

SEQ ID NO: 167790 - DNA, 17 bp, synthetic construct
  source 1..17: mol_type = other DNA
gtggccgaagtccaggc

SEQ ID NO: 167791 - DNA, 17 bp, synthetic construct
  source 1..17: mol_type = other DNA
ggtggccgaagtccagg

SEQ ID NO: 167792 - DNA, 17 bp, synthetic construct
  source 1..17: mol_type = other DNA
aggtggccgaagtccag

SEQ ID NO: 167793 - DNA, 17 bp, synthetic construct
  source 1..17: mol_type = other DNA
gaggtggccgaagtcca

SEQ ID NO: 167794 - DNA, 17 bp, synthetic construct
  source 1..17: mol_type = other DNA
cgaggtggccgaagtcc

SEQ ID NO: 167795 - DNA, 17 bp, synthetic construct
  source 1..17: mol_type = other DNA
ccgaggtggccgaagtc

SEQ ID NO: 167796 - DNA, 17 bp, synthetic construct
  source 1..17: mol_type = other DNA
cccgaggtggccgaagt

SEQ ID NO: 167797 - DNA, 17 bp, synthetic construct
  source 1..17: mol_type = other DNA
gcccgaggtggccgaag

SEQ ID NO: 167798 - DNA, 17 bp, synthetic construct
  source 1..17: mol_type = other DNA
tgcccgaggtggccgaa

SEQ ID NO: 167799 - DNA, 17 bp, synthetic construct
  source 1..17: mol_type = other DNA
atgcccgaggtggccga

SEQ ID NO: 167800 - DNA, 17 bp, synthetic construct
  source 1..17: mol_type = other DNA
gatgcccgaggtggccg

SEQ ID NO: 167801 - DNA, 17 bp, synthetic construct
  source 1..17: mol_type = other DNA
agatgcccgaggtggcc

SEQ ID NO: 167802 - DNA, 17 bp, synthetic construct
  source 1..17: mol_type = other DNA
aagatgcccgaggtggc

SEQ ID NO: 167803 - DNA, 17 bp, synthetic construct
  source 1..17: mol_type = other DNA
caagatgcccgaggtgg

SEQ ID NO: 167804 - DNA, 17 bp, synthetic construct
  source 1..17: mol_type = other DNA
ccaagatgcccgaggtg

SEQ ID NO: 167805 - DNA, 17 bp, synthetic construct
  source 1..17: mol_type = other DNA
cccaagatgcccgaggt

SEQ ID NO: 167806 - DNA, 17 bp, synthetic construct
  source 1..17: mol_type = other DNA
gcccaagatgcccgagg

SEQ ID NO: 167807 - DNA, 17 bp, synthetic construct
  source 1..17: mol_type = other DNA
tgcccaagatgcccgag

SEQ ID NO: 167808 - DNA, 17 bp, synthetic construct
  source 1..17: mol_type = other DNA
gtgcccaagatgcccga

SEQ ID NO: 167809 - DNA, 17 bp, synthetic construct
  source 1..17: mol_type = other DNA
ggtgcccaagatgcccg

SEQ ID NO: 167810 - DNA, 17 bp, synthetic construct
  source 1..17: mol_type = other DNA
tggtgcccaagatgccc

SEQ ID NO: 167811 - DNA, 17 bp, synthetic construct
  source 1..17: mol_type = other DNA
gtggtgcccaagatgcc

SEQ ID NO: 167812 - DNA, 17 bp, synthetic construct
  source 1..17: mol_type = other DNA
ggtggtgcccaagatgc

SEQ ID NO: 167813 - DNA, 17 bp, synthetic construct
  source 1..17: mol_type = other DNA
gggtggtgcccaagatg

SEQ ID NO: 167814 - DNA, 17 bp, synthetic construct
  source 1..17: mol_type = other DNA
tgggtggtgcccaagat

SEQ ID NO: 167815 - DNA, 17 bp, synthetic construct
  source 1..17: mol_type = other DNA
gtgggtggtgcccaaga

SEQ ID NO: 167816 - DNA, 17 bp, synthetic construct
  source 1..17: mol_type = other DNA
tgtgggtggtgcccaag

SEQ ID NO: 167817 - DNA, 17 bp, synthetic construct
  source 1..17: mol_type = other DNA
atgtgggtggtgcccaa

SEQ ID NO: 167818 - DNA, 17 bp, synthetic construct
  source 1..17: mol_type = other DNA
gatgtgggtggtgccca

SEQ ID NO: 167819 - DNA, 17 bp, synthetic construct
  source 1..17: mol_type = other DNA
tgatgtgggtggtgccc

SEQ ID NO: 167820 - DNA, 17 bp, synthetic construct
  source 1..17: mol_type = other DNA
gtgatgtgggtggtgcc

SEQ ID NO: 167821 - DNA, 17 bp, synthetic construct
  source 1..17: mol_type = other DNA
tgtgatgtgggtggtgc

SEQ ID NO: 167822 - DNA, 17 bp, synthetic construct
  source 1..17: mol_type = other DNA
ctgtgatgtgggtggtg

SEQ ID NO: 167823 - DNA, 17 bp, synthetic construct
  source 1..17: mol_type = other DNA
tctgtgatgtgggtggt

SEQ ID NO: 167824 - DNA, 17 bp, synthetic construct
  source 1..17: mol_type = other DNA
ctctgtgatgtgggtgg

SEQ ID NO: 167825 - DNA, 17 bp, synthetic construct
  source 1..17: mol_type = other DNA
gctctgtgatgtgggtg

SEQ ID NO: 167826 - DNA, 17 bp, synthetic construct
  source 1..17: mol_type = other DNA
ggctctgtgatgtgggt

SEQ ID NO: 167827 - DNA, 17 bp, synthetic construct
  source 1..17: mol_type = other DNA
aggctctgtgatgtggg

SEQ ID NO: 167828 - DNA, 17 bp, synthetic construct
  source 1..17: mol_type = other DNA
aaggctctgtgatgtgg

SEQ ID NO: 167829 - DNA, 17 bp, synthetic construct
  source 1..17: mol_type = other DNA
gaaggctctgtgatgtg

SEQ ID NO: 167830 - DNA, 17 bp, synthetic construct
  source 1..17: mol_type = other DNA
ggaaggctctgtgatgt

SEQ ID NO: 167831 - DNA, 17 bp, synthetic construct
  source 1..17: mol_type = other DNA
tggaaggctctgtgatg

SEQ ID NO: 167832 - DNA, 17 bp, synthetic construct
  source 1..17: mol_type = other DNA
gtggaaggctctgtgat

SEQ ID NO: 167833 - DNA, 17 bp, synthetic construct
  source 1..17: mol_type = other DNA
cgtggaaggctctgtga

SEQ ID NO: 167834 - DNA, 17 bp, synthetic construct
  source 1..17: mol_type = other DNA
ccgtggaaggctctgtg

SEQ ID NO: 167835 - DNA, 17 bp, synthetic construct
  source 1..17: mol_type = other DNA
accgtggaaggctctgt

SEQ ID NO: 167836 - DNA, 17 bp, synthetic construct
  source 1..17: mol_type = other DNA
caccgtggaaggctctg

SEQ ID NO: 167837 - DNA, 17 bp, synthetic construct
  source 1..17: mol_type = other DNA
tcaccgtggaaggctct

SEQ ID NO: 167838 - DNA, 17 bp, synthetic construct
  source 1..17: mol_type = other DNA
gtcaccgtggaaggctc

SEQ ID NO: 167839 - DNA, 17 bp, synthetic construct
  source 1..17: mol_type = other DNA
agtcaccgtggaaggct

SEQ ID NO: 167840 - DNA, 17 bp, synthetic construct
  source 1..17: mol_type = other DNA
aagtcaccgtggaaggc

SEQ ID NO: 167841 - DNA, 17 bp, synthetic construct
  source 1..17: mol_type = other DNA
gaagtcaccgtggaagg

SEQ ID NO: 167842 - DNA, 17 bp, synthetic construct
  source 1..17: mol_type = other DNA
ggaagtcaccgtggaag

SEQ ID NO: 167843 - DNA, 17 bp, synthetic construct
  source 1..17: mol_type = other DNA
gggaagtcaccgtggaa

SEQ ID NO: 167844 - DNA, 17 bp, synthetic construct
  source 1..17: mol_type = other DNA
tgggaagtcaccgtgga

SEQ ID NO: 167845 - DNA, 17 bp, synthetic construct
  source 1..17: mol_type = other DNA
gtgggaagtcaccgtgg

SEQ ID NO: 167846 - DNA, 17 bp, synthetic construct
  source 1..17: mol_type = other DNA
tgtgggaagtcaccgtg

SEQ ID NO: 167847 - DNA, 17 bp, synthetic construct
  source 1..17: mol_type = other DNA
gtgtgggaagtcaccgt

SEQ ID NO: 167848 - DNA, 17 bp, synthetic construct
  source 1..17: mol_type = other DNA
ggtgtgggaagtcaccg

SEQ ID NO: 167849 - DNA, 17 bp, synthetic construct
  source 1..17: mol_type = other DNA
gggtgtgggaagtcacc

SEQ ID NO: 167850 - DNA, 17 bp, synthetic construct
  source 1..17: mol_type = other DNA
agggtgtgggaagtcac

SEQ ID NO: 167851 - DNA, 17 bp, synthetic construct
  source 1..17: mol_type = other DNA
tagggtgtgggaagtca

SEQ ID NO: 167852 - DNA, 17 bp, synthetic construct
  source 1..17: mol_type = other DNA
ctagggtgtgggaagtc

SEQ ID NO: 167853 - DNA, 17 bp, synthetic construct
  source 1..17: mol_type = other DNA
gctagggtgtgggaagt

SEQ ID NO: 167854 - DNA, 17 bp, synthetic construct
  source 1..17: mol_type = other DNA
tgctagggtgtgggaag

SEQ ID NO: 167855 - DNA, 17 bp, synthetic construct
  source 1..17: mol_type = other DNA
ctgctagggtgtgggaa

SEQ ID NO: 167856 - DNA, 17 bp, synthetic construct
  source 1..17: mol_type = other DNA
gctgctagggtgtggga

SEQ ID NO: 167857 - DNA, 17 bp, synthetic construct
  source 1..17: mol_type = other DNA
tgctgctagggtgtggg

SEQ ID NO: 167858 - DNA, 17 bp, synthetic construct
  source 1..17: mol_type = other DNA
ttgctgctagggtgtgg

SEQ ID NO: 167859 - DNA, 17 bp, synthetic construct
  source 1..17: mol_type = other DNA
gttgctgctagggtgtg

SEQ ID NO: 167860 - DNA, 17 bp, synthetic construct
  source 1..17: mol_type = other DNA
ggttgctgctagggtgt

SEQ ID NO: 167861 - DNA, 17 bp, synthetic construct
  source 1..17: mol_type = other DNA
tggttgctgctagggtg

SEQ ID NO: 167862 - DNA, 17 bp, synthetic construct
  source 1..17: mol_type = other DNA
gtggttgctgctagggt

SEQ ID NO: 167863 - DNA, 17 bp, synthetic construct
  source 1..17: mol_type = other DNA
ggtggttgctgctaggg

SEQ ID NO: 167864 - DNA, 17 bp, synthetic construct
  source 1..17: mol_type = other DNA
cggtggttgctgctagg

SEQ ID NO: 167865 - DNA, 17 bp, synthetic construct
  source 1..17: mol_type = other DNA
ccggtggttgctgctag

SEQ ID NO: 167866 - DNA, 17 bp, synthetic construct
  source 1..17: mol_type = other DNA
accggtggttgctgcta

SEQ ID NO: 167867 - DNA, 17 bp, synthetic construct
  source 1..17: mol_type = other DNA
taccggtggttgctgct

SEQ ID NO: 167868 - DNA, 17 bp, synthetic construct
  source 1..17: mol_type = other DNA
gtaccggtggttgctgc

SEQ ID NO: 167869 - DNA, 17 bp, synthetic construct
  source 1..17: mol_type = other DNA
ggtaccggtggttgctg

SEQ ID NO: 167870 - DNA, 17 bp, synthetic construct
  source 1..17: mol_type = other DNA
tggtaccggtggttgct

SEQ ID NO: 167871 - DNA, 17 bp, synthetic construct
  source 1..17: mol_type = other DNA
gtggtaccggtggttgc

SEQ ID NO: 167872 - DNA, 17 bp, synthetic construct
  source 1..17: mol_type = other DNA
ggtggtaccggtggttg

SEQ ID NO: 167873 - DNA, 17 bp, synthetic construct
  source 1..17: mol_type = other DNA
gggtggtaccggtggtt

SEQ ID NO: 167874 - DNA, 17 bp, synthetic construct
  source 1..17: mol_type = other DNA
tgggtggtaccggtggt

SEQ ID NO: 167875 - DNA, 17 bp, synthetic construct
  source 1..17: mol_type = other DNA
ctgggtggtaccggtgg

SEQ ID NO: 167876 - DNA, 17 bp, synthetic construct
  source 1..17: mol_type = other DNA
gctgggtggtaccggtg

SEQ ID NO: 167877 - DNA, 17 bp, synthetic construct
  source 1..17: mol_type = other DNA
tgctgggtggtaccggt

SEQ ID NO: 167878 - DNA, 17 bp, synthetic construct
  source 1..17: mol_type = other DNA
gtgctgggtggtaccgg

SEQ ID NO: 167879 - DNA, 17 bp, synthetic construct
  source 1..17: mol_type = other DNA
agtgctgggtggtaccg

SEQ ID NO: 167880 - DNA, 17 bp, synthetic construct
  source 1..17: mol_type = other DNA
gagtgctgggtggtacc

SEQ ID NO: 167881 - DNA, 17 bp, synthetic construct
  source 1..17: mol_type = other DNA
cgagtgctgggtggtac

SEQ ID NO: 167882 - DNA, 17 bp, synthetic construct
  source 1..17: mol_type = other DNA
tcgagtgctgggtggta

SEQ ID NO: 167883 - DNA, 17 bp, synthetic construct
  source 1..17: mol_type = other DNA
gtcgagtgctgggtggt

SEQ ID NO: 167884 - DNA, 17 bp, synthetic construct
  source 1..17: mol_type = other DNA
agtcgagtgctgggtgg

SEQ ID NO: 167885 - DNA, 17 bp, synthetic construct
  source 1..17: mol_type = other DNA
gagtcgagtgctgggtg

SEQ ID NO: 167886 - DNA, 17 bp, synthetic construct
  source 1..17: mol_type = other DNA
ggagtcgagtgctgggt

SEQ ID NO: 167887 - DNA, 17 bp, synthetic construct
  source 1..17: mol_type = other DNA
tggagtcgagtgctggg

SEQ ID NO: 167888 - DNA, 17 bp, synthetic construct
  source 1..17: mol_type = other DNA
ctggagtcgagtgctgg

SEQ ID NO: 167889 - DNA, 17 bp, synthetic construct
  source 1..17: mol_type = other DNA
gctggagtcgagtgctg

SEQ ID NO: 167890 - DNA, 17 bp, synthetic construct
  source 1..17: mol_type = other DNA
ggctggagtcgagtgct

SEQ ID NO: 167891 - DNA, 17 bp, synthetic construct
  source 1..17: mol_type = other DNA
gggctggagtcgagtgc

SEQ ID NO: 167892 - DNA, 17 bp, synthetic construct
  source 1..17: mol_type = other DNA
agggctggagtcgagtg

SEQ ID NO: 167893 - DNA, 17 bp, synthetic construct
  source 1..17: mol_type = other DNA
aagggctggagtcgagt

SEQ ID NO: 167894 - DNA, 17 bp, synthetic construct
  source 1..17: mol_type = other DNA
aaagggctggagtcgag

SEQ ID NO: 167895 - DNA, 17 bp, synthetic construct
  source 1..17: mol_type = other DNA
gaaagggctggagtcga

SEQ ID NO: 167896 - DNA, 17 bp, synthetic construct
  source 1..17: mol_type = other DNA
ggaaagggctggagtcg

SEQ ID NO: 167897 - DNA, 17 bp, synthetic construct
  source 1..17: mol_type = other DNA
tggaaagggctggagtc

SEQ ID NO: 167898 - DNA, 17 bp, synthetic construct
  source 1..17: mol_type = other DNA
ctggaaagggctggagt

SEQ ID NO: 167899 - DNA, 17 bp, synthetic construct
  source 1..17: mol_type = other DNA
gctggaaagggctggag

SEQ ID NO: 167900 - DNA, 17 bp, synthetic construct
  source 1..17: mol_type = other DNA
ggctggaaagggctgga

SEQ ID NO: 167901 - DNA, 17 bp, synthetic construct
  source 1..17: mol_type = other DNA
gggctggaaagggctgg

SEQ ID NO: 167902 - DNA, 17 bp, synthetic construct
  source 1..17: mol_type = other DNA
agggctggaaagggctg

SEQ ID NO: 167903 - DNA, 17 bp, synthetic construct
  source 1..17: mol_type = other DNA
gagggctggaaagggct

SEQ ID NO: 167904 - DNA, 17 bp, synthetic construct
  source 1..17: mol_type = other DNA
tgagggctggaaagggc

SEQ ID NO: 167905 - DNA, 17 bp, synthetic construct
  source 1..17: mol_type = other DNA
gtgagggctggaaaggg

SEQ ID NO: 167906 - DNA, 17 bp, synthetic construct
  source 1..17: mol_type = other DNA
ggtgagggctggaaagg

SEQ ID NO: 167907 - DNA, 17 bp, synthetic construct
  source 1..17: mol_type = other DNA
gggtgagggctggaaag

SEQ ID NO: 167908 - DNA, 17 bp, synthetic construct
  source 1..17: mol_type = other DNA
agggtgagggctggaaa

SEQ ID NO: 167909 - DNA, 17 bp, synthetic construct
  source 1..17: mol_type = other DNA
tagggtgagggctggaa

SEQ ID NO: 167910 - DNA, 17 bp, synthetic construct
  source 1..17: mol_type = other DNA
ctagggtgagggctgga

SEQ ID NO: 167911 - DNA, 17 bp, synthetic construct
  source 1..17: mol_type = other DNA
gctagggtgagggctgg

SEQ ID NO: 167912 - DNA, 17 bp, synthetic construct
  source 1..17: mol_type = other DNA
tgctagggtgagggctg

SEQ ID NO: 167913 - DNA, 17 bp, synthetic construct
  source 1..17: mol_type = other DNA
ctgctagggtgagggct

SEQ ID NO: 167914 - DNA, 17 bp, synthetic construct
  source 1..17: mol_type = other DNA
gctgctagggtgagggc

SEQ ID NO: 167915 - DNA, 17 bp, synthetic construct
  source 1..17: mol_type = other DNA
tgctgctagggtgaggg

SEQ ID NO: 167916 - DNA, 17 bp, synthetic construct
  source 1..17: mol_type = other DNA
ctgctgctagggtgagg

SEQ ID NO: 167917 - DNA, 17 bp, synthetic construct
  source 1..17: mol_type = other DNA
tctgctgctagggtgag

SEQ ID NO: 167918 - DNA, 17 bp, synthetic construct
  source 1..17: mol_type = other DNA
ttctgctgctagggtga

SEQ ID NO: 167919 - DNA, 17 bp, synthetic construct
  source 1..17: mol_type = other DNA
gttctgctgctagggtg

SEQ ID NO: 167920 - DNA, 17 bp, synthetic construct
  source 1..17: mol_type = other DNA
ggttctgctgctagggt

SEQ ID NO: 167921 - DNA, 17 bp, synthetic construct
  source 1..17: mol_type = other DNA
tggttctgctgctaggg

SEQ ID NO: 167922 - DNA, 17 bp, synthetic construct
  source 1..17: mol_type = other DNA
gtggttctgctgctagg

SEQ ID NO: 167923 - DNA, 17 bp, synthetic construct
  source 1..17: mol_type = other DNA
ggtggttctgctgctag

SEQ ID NO: 167924 - DNA, 17 bp, synthetic construct
  source 1..17: mol_type = other DNA
cggtggttctgctgcta

SEQ ID NO: 167925 - DNA, 17 bp, synthetic construct
  source 1..17: mol_type = other DNA
tcggtggttctgctgct

SEQ ID NO: 167926 - DNA, 17 bp, synthetic construct
  source 1..17: mol_type = other DNA
ctcggtggttctgctgc

SEQ ID NO: 167927 - DNA, 17 bp, synthetic construct
  source 1..17: mol_type = other DNA
actcggtggttctgctg

SEQ ID NO: 167928 - DNA, 17 bp, synthetic construct
  source 1..17: mol_type = other DNA
gactcggtggttctgct

SEQ ID NO: 167929 - DNA, 17 bp, synthetic construct
  source 1..17: mol_type = other DNA
tgactcggtggttctgc

SEQ ID NO: 167930 - DNA, 17 bp, synthetic construct
  source 1..17: mol_type = other DNA
gtgactcggtggttctg

SEQ ID NO: 167931 - DNA, 17 bp, synthetic construct
  source 1..17: mol_type = other DNA
ggtgactcggtggttct

SEQ ID NO: 167932 - DNA, 17 bp, synthetic construct
  source 1..17: mol_type = other DNA
gggtgactcggtggttc

SEQ ID NO: 167933 - DNA, 17 bp, synthetic construct
  source 1..17: mol_type = other DNA
ggggtgactcggtggtt

SEQ ID NO: 167934 - DNA, 17 bp, synthetic construct
  source 1..17: mol_type = other DNA
gggggtgactcggtggt

SEQ ID NO: 167935 - DNA, 17 bp, synthetic construct
  source 1..17: mol_type = other DNA
agggggtgactcggtgg

SEQ ID NO: 167936 - DNA, 17 bp, synthetic construct
  source 1..17: mol_type = other DNA
aagggggtgactcggtg

SEQ ID NO: 167937 - DNA, 17 bp, synthetic construct
  source 1..17: mol_type = other DNA
gaagggggtgactcggt

SEQ ID NO: 167938 - DNA, 17 bp, synthetic construct
  source 1..17: mol_type = other DNA
agaagggggtgactcgg

SEQ ID NO: 167939 - DNA, 17 bp, synthetic construct
  source 1..17: mol_type = other DNA
gagaagggggtgactcg

SEQ ID NO: 167940 - DNA, 17 bp, synthetic construct
  source 1..17: mol_type = other DNA
ggagaagggggtgactc

SEQ ID NO: 167941 - DNA, 17 bp, synthetic construct
  source 1..17: mol_type = other DNA
tggagaagggggtgact

SEQ ID NO: 167942 - DNA, 17 bp, synthetic construct
  source 1..17: mol_type = other DNA
ctggagaagggggtgac

SEQ ID NO: 167943 - DNA, 17 bp, synthetic construct
  source 1..17: mol_type = other DNA
cctggagaagggggtga

SEQ ID NO: 167944 - DNA, 17 bp, synthetic construct
  source 1..17: mol_type = other DNA
ccctggagaagggggtg

SEQ ID NO: 167945 - DNA, 17 bp, synthetic construct
  source 1..17: mol_type = other DNA
tccctggagaagggggt

SEQ ID NO: 167946 - DNA, 17 bp, synthetic construct
  source 1..17: mol_type = other DNA
gtccctggagaaggggg

SEQ ID NO: 167947 - DNA, 17 bp, synthetic construct
  source 1..17: mol_type = other DNA
cgtccctggagaagggg

SEQ ID NO: 167948 - DNA, 17 bp, synthetic construct
  source 1..17: mol_type = other DNA
tcgtccctggagaaggg

SEQ ID NO: 167949 - DNA, 17 bp, synthetic construct
  source 1..17: mol_type = other DNA
gtcgtccctggagaagg

SEQ ID NO: 167950 - DNA, 17 bp, synthetic construct
  source 1..17: mol_type = other DNA
ggtcgtccctggagaag

SEQ ID NO: 167951 - DNA, 17 bp, synthetic construct
  source 1..17: mol_type = other DNA
tggtcgtccctggagaa

SEQ ID NO: 167952 - DNA, 17 bp, synthetic construct
  source 1..17: mol_type = other DNA
gtggtcgtccctggaga

SEQ ID NO: 167953 - DNA, 17 bp, synthetic construct
  source 1..17: mol_type = other DNA
ggtggtcgtccctggag

SEQ ID NO: 167954 - DNA, 17 bp, synthetic construct
  source 1..17: mol_type = other DNA
gggtggtcgtccctgga

SEQ ID NO: 167955 - DNA, 17 bp, synthetic construct
  source 1..17: mol_type = other DNA
ggggtggtcgtccctgg

SEQ ID NO: 167956 - DNA, 17 bp, synthetic construct
  source 1..17: mol_type = other DNA
cggggtggtcgtccctg

SEQ ID NO: 167957 - DNA, 17 bp, synthetic construct
  source 1..17: mol_type = other DNA
ccggggtggtcgtccct

SEQ ID NO: 167958 - DNA, 17 bp, synthetic construct
  source 1..17: mol_type = other DNA
cccggggtggtcgtccc

SEQ ID NO: 167959 - DNA, 17 bp, synthetic construct
  source 1..17: mol_type = other DNA
gcccggggtggtcgtcc

SEQ ID NO: 167960 - DNA, 17 bp, synthetic construct
  source 1..17: mol_type = other DNA
ggcccggggtggtcgtc

SEQ ID NO: 167961 - DNA, 17 bp, synthetic construct
  source 1..17: mol_type = other DNA
tggcccggggtggtcgt

SEQ ID NO: 167962 - DNA, 17 bp, synthetic construct
  source 1..17: mol_type = other DNA
gtggcccggggtggtcg

SEQ ID NO: 167963 - DNA, 17 bp, synthetic construct
  source 1..17: mol_type = other DNA
tgtggcccggggtggtc

SEQ ID NO: 167964 - DNA, 17 bp, synthetic construct
  source 1..17: mol_type = other DNA
gtgtggcccggggtggt

SEQ ID NO: 167965 - DNA, 17 bp, synthetic construct
  source 1..17: mol_type = other DNA
ggtgtggcccggggtgg

SEQ ID NO: 167966 - DNA, 17 bp, synthetic construct
  source 1..17: mol_type = other DNA
tggtgtggcccggggtg

SEQ ID NO: 167967 - DNA, 17 bp, synthetic construct
  source 1..17: mol_type = other DNA
gtggtgtggcccggggt

SEQ ID NO: 167968 - DNA, 17 bp, synthetic construct
  source 1..17: mol_type = other DNA
cgtggtgtggcccgggg

SEQ ID NO: 167969 - DNA, 17 bp, synthetic construct
  source 1..17: mol_type = other DNA
ccgtggtgtggcccggg

SEQ ID NO: 167970 - DNA, 17 bp, synthetic construct
  source 1..17: mol_type = other DNA
gccgtggtgtggcccgg

SEQ ID NO: 167971 - DNA, 17 bp, synthetic construct
  source 1..17: mol_type = other DNA
ggccgtggtgtggcccg

SEQ ID NO: 167972 - DNA, 17 bp, synthetic construct
  source 1..17: mol_type = other DNA
tggccgtggtgtggccc

SEQ ID NO: 167973 - DNA, 17 bp, synthetic construct
  source 1..17: mol_type = other DNA
gtggccgtggtgtggcc

SEQ ID NO: 167974 - DNA, 17 bp, synthetic construct
  source 1..17: mol_type = other DNA
ggtggccgtggtgtggc

SEQ ID NO: 167975 - DNA, 17 bp, synthetic construct
  source 1..17: mol_type = other DNA
aggtggccgtggtgtgg

SEQ ID NO: 167976 - DNA, 17 bp, synthetic construct
  source 1..17: mol_type = other DNA
gaggtggccgtggtgtg

SEQ ID NO: 167977 - DNA, 17 bp, synthetic construct
  source 1..17: mol_type = other DNA
ggaggtggccgtggtgt

SEQ ID NO: 167978 - DNA, 17 bp, synthetic construct
  source 1..17: mol_type = other DNA
tggaggtggccgtggtg

SEQ ID NO: 167979 - DNA, 17 bp, synthetic construct
  source 1..17: mol_type = other DNA
ctggaggtggccgtggt

SEQ ID NO: 167980 - DNA, 17 bp, synthetic construct
  source 1..17: mol_type = other DNA
cctggaggtggccgtgg

SEQ ID NO: 167981 - DNA, 17 bp, synthetic construct
  source 1..17: mol_type = other DNA
tcctggaggtggccgtg

SEQ ID NO: 167982 - DNA, 17 bp, synthetic construct
  source 1..17: mol_type = other DNA
gtcctggaggtggccgt

SEQ ID NO: 167983 - DNA, 17 bp, synthetic construct
  source 1..17: mol_type = other DNA
ggtcctggaggtggccg

SEQ ID NO: 167984 - DNA, 17 bp, synthetic construct
  source 1..17: mol_type = other DNA
tggtcctggaggtggcc

SEQ ID NO: 167985 - DNA, 17 bp, synthetic construct
  source 1..17: mol_type = other DNA
gtggtcctggaggtggc

SEQ ID NO: 167986 - DNA, 17 bp, synthetic construct
  source 1..17: mol_type = other DNA
tgtggtcctggaggtgg

SEQ ID NO: 167987 - DNA, 17 bp, synthetic construct
  source 1..17: mol_type = other DNA
ctgtggtcctggaggtg

SEQ ID NO: 167988 - DNA, 17 bp, synthetic construct
  source 1..17: mol_type = other DNA
gctgtggtcctggaggt

SEQ ID NO: 167989 - DNA, 17 bp, synthetic construct
  source 1..17: mol_type = other DNA
ggctgtggtcctggagg

SEQ ID NO: 167990 - DNA, 17 bp, synthetic construct
  source 1..17: mol_type = other DNA
tggctgtggtcctggag

SEQ ID NO: 167991 - DNA, 17 bp, synthetic construct
  source 1..17: mol_type = other DNA
gtggctgtggtcctgga

SEQ ID NO: 167992 - DNA, 17 bp, synthetic construct
  source 1..17: mol_type = other DNA
cgtggctgtggtcctgg

SEQ ID NO: 167993 - DNA, 17 bp, synthetic construct
  source 1..17: mol_type = other DNA
ccgtggctgtggtcctg

SEQ ID NO: 167994 - DNA, 17 bp, synthetic construct
  source 1..17: mol_type = other DNA
gccgtggctgtggtcct

SEQ ID NO: 167995 - DNA, 17 bp, synthetic construct
  source 1..17: mol_type = other DNA
ggccgtggctgtggtcc

SEQ ID NO: 167996 - DNA, 17 bp, synthetic construct
  source 1..17: mol_type = other DNA
tggccgtggctgtggtc

SEQ ID NO: 167997 - DNA, 17 bp, synthetic construct
  source 1..17: mol_type = other DNA
gtggccgtggctgtggt

SEQ ID NO: 167998 - DNA, 17 bp, synthetic construct
  source 1..17: mol_type = other DNA
tgtggccgtggctgtgg

SEQ ID NO: 167999 - DNA, 17 bp, synthetic construct
  source 1..17: mol_type = other DNA
gtgtggccgtggctgtg

SEQ ID NO: 168000 - DNA, 17 bp, synthetic construct
  source 1..17: mol_type = other DNA
ggtgtggccgtggctgt

SEQ ID NO: 168001 - DNA, 17 bp, synthetic construct
  source 1..17: mol_type = other DNA
gggtgtggccgtggctg

SEQ ID NO: 168002 - DNA, 17 bp, synthetic construct
  source 1..17: mol_type = other DNA
tgggtgtggccgtggct

SEQ ID NO: 168003 - DNA, 17 bp, synthetic construct
  source 1..17: mol_type = other DNA
ctgggtgtggccgtggc

SEQ ID NO: 168004 - DNA, 17 bp, synthetic construct
  source 1..17: mol_type = other DNA
gctgggtgtggccgtgg

SEQ ID NO: 168005 - DNA, 17 bp, synthetic construct
  source 1..17: mol_type = other DNA
tgctgggtgtggccgtg

SEQ ID NO: 168006 - DNA, 17 bp, synthetic construct
  source 1..17: mol_type = other DNA
ttgctgggtgtggccgt

SEQ ID NO: 168007 - DNA, 17 bp, synthetic construct
  source 1..17: mol_type = other DNA
cttgctgggtgtggccg

SEQ ID NO: 168008 - DNA, 17 bp, synthetic construct
  source 1..17: mol_type = other DNA
tcttgctgggtgtggcc

SEQ ID NO: 168009 - DNA, 17 bp, synthetic construct
  source 1..17: mol_type = other DNA
gtcttgctgggtgtggc

SEQ ID NO: 168010 - DNA, 17 bp, synthetic construct
  source 1..17: mol_type = other DNA
ggtcttgctgggtgtgg

SEQ ID NO: 168011 - DNA, 17 bp, synthetic construct
  source 1..17: mol_type = other DNA
gggtcttgctgggtgtg

SEQ ID NO: 168012 - DNA, 17 bp, synthetic construct
  source 1..17: mol_type = other DNA
cgggtcttgctgggtgt

SEQ ID NO: 168013 - DNA, 17 bp, synthetic construct
  source 1..17: mol_type = other DNA
gcgggtcttgctgggtg

SEQ ID NO: 168014 - DNA, 17 bp, synthetic construct
  source 1..17: mol_type = other DNA
tgcgggtcttgctgggt

SEQ ID NO: 168015 - DNA, 17 bp, synthetic construct
  source 1..17: mol_type = other DNA
gtgcgggtcttgctggg

SEQ ID NO: 168016 - DNA, 17 bp, synthetic construct
  source 1..17: mol_type = other DNA
ggtgcgggtcttgctgg

SEQ ID NO: 168017 - DNA, 17 bp, synthetic construct
  source 1..17: mol_type = other DNA
aggtgcgggtcttgctg

SEQ ID NO: 168018 - DNA, 17 bp, synthetic construct
  source 1..17: mol_type = other DNA
gaggtgcgggtcttgct

SEQ ID NO: 168019 - DNA, 17 bp, synthetic construct
  source 1..17: mol_type = other DNA
cgaggtgcgggtcttgc

SEQ ID NO: 168020 - DNA, 17 bp, synthetic construct
  source 1..17: mol_type = other DNA
tcgaggtgcgggtcttg

SEQ ID NO: 168021 - DNA, 17 bp, synthetic construct
  source 1..17: mol_type = other DNA
gtcgaggtgcgggtctt

SEQ ID NO: 168022 - DNA, 17 bp, synthetic construct
  source 1..17: mol_type = other DNA
ggtcgaggtgcgggtct

SEQ ID NO: 168023 - DNA, 17 bp, synthetic construct
  source 1..17: mol_type = other DNA
gggtcgaggtgcgggtc

SEQ ID NO: 168024 - DNA, 17 bp, synthetic construct
  source 1..17: mol_type = other DNA
agggtcgaggtgcgggt

SEQ ID NO: 168025 - DNA, 17 bp, synthetic construct
  source 1..17: mol_type = other DNA
cagggtcgaggtgcggg

SEQ ID NO: 168026 - DNA, 17 bp, synthetic construct
  source 1..17: mol_type = other DNA
gcagggtcgaggtgcgg

SEQ ID NO: 168027 - DNA, 17 bp, synthetic construct
  source 1..17: mol_type = other DNA
agcagggtcgaggtgcg

SEQ ID NO: 168028 - DNA, 17 bp, synthetic construct
  source 1..17: mol_type = other DNA
cagcagggtcgaggtgc

SEQ ID NO: 168029 - DNA, 17 bp, synthetic construct
  source 1..17: mol_type = other DNA
gcagcagggtcgaggtg

SEQ ID NO: 168030 - DNA, 17 bp, synthetic construct
  source 1..17: mol_type = other DNA
ggcagcagggtcgaggt

SEQ ID NO: 168031 - DNA, 17 bp, synthetic construct
  source 1..17: mol_type = other DNA
gggcagcagggtcgagg

SEQ ID NO: 168032 - DNA, 17 bp, synthetic construct
  source 1..17: mol_type = other DNA
tgggcagcagggtcgag

SEQ ID NO: 168033 - DNA, 17 bp, synthetic construct
  source 1..17: mol_type = other DNA
ctgggcagcagggtcga

SEQ ID NO: 168034 - DNA, 17 bp, synthetic construct
  source 1..17: mol_type = other DNA
gctgggcagcagggtcg

SEQ ID NO: 168035 - DNA, 17 bp, synthetic construct
  source 1..17: mol_type = other DNA
tgctgggcagcagggtc

SEQ ID NO: 168036 - DNA, 17 bp, synthetic construct
  source 1..17: mol_type = other DNA
ctgctgggcagcagggt

SEQ ID NO: 168037 - DNA, 17 bp, synthetic construct
  source 1..17: mol_type = other DNA
gctgctgggcagcaggg

SEQ ID NO: 168038 - DNA, 17 bp, synthetic construct
  source 1..17: mol_type = other DNA
ggctgctgggcagcagg

SEQ ID NO: 168039 - DNA, 17 bp, synthetic construct
  source 1..17: mol_type = other DNA
gggctgctgggcagcag

SEQ ID NO: 168040 - DNA, 17 bp, synthetic construct
  source 1..17: mol_type = other DNA
ggggctgctgggcagca

SEQ ID NO: 168041 - DNA, 17 bp, synthetic construct
  source 1..17: mol_type = other DNA
tggggctgctgggcagc

SEQ ID NO: 168042 - DNA, 17 bp, synthetic construct
  source 1..17: mol_type = other DNA
gtggggctgctgggcag

SEQ ID NO: 168043 - DNA, 17 bp, synthetic construct
  source 1..17: mol_type = other DNA
tgtggggctgctgggca

SEQ ID NO: 168044 - DNA, 17 bp, synthetic construct
  source 1..17: mol_type = other DNA
atgtggggctgctgggc

SEQ ID NO: 168045 - DNA, 17 bp, synthetic construct
  source 1..17: mol_type = other DNA
gatgtggggctgctggg

SEQ ID NO: 168046 - DNA, 17 bp, synthetic construct
  source 1..17: mol_type = other DNA
cgatgtggggctgctgg

SEQ ID NO: 168047 - DNA, 17 bp, synthetic construct
  source 1..17: mol_type = other DNA
ccgatgtggggctgctg

SEQ ID NO: 168048 - DNA, 17 bp, synthetic construct
  source 1..17: mol_type = other DNA
gccgatgtggggctgct

SEQ ID NO: 168049 - DNA, 17 bp, synthetic construct
  source 1..17: mol_type = other DNA
ggccgatgtggggctgc

SEQ ID NO: 168050 - DNA, 17 bp, synthetic construct
  source 1..17: mol_type = other DNA
gggccgatgtggggctg

SEQ ID NO: 168051 - DNA, 17 bp, synthetic construct
  source 1..17: mol_type = other DNA
ggggccgatgtggggct

SEQ ID NO: 168052 - DNA, 17 bp, synthetic construct
  source 1..17: mol_type = other DNA
gggggccgatgtggggc

SEQ ID NO: 168053 - DNA, 17 bp, synthetic construct
  source 1..17: mol_type = other DNA
tgggggccgatgtgggg

SEQ ID NO: 168054 - DNA, 17 bp, synthetic construct
  source 1..17: mol_type = other DNA
atgggggccgatgtggg

SEQ ID NO: 168055 - DNA, 17 bp, synthetic construct
  source 1..17: mol_type = other DNA
tatgggggccgatgtgg

SEQ ID NO: 168056 - DNA, 17 bp, synthetic construct
  source 1..17: mol_type = other DNA
ttatgggggccgatgtg

SEQ ID NO: 168057 - DNA, 17 bp, synthetic construct
  source 1..17: mol_type = other DNA
gttatgggggccgatgt

SEQ ID NO: 168058 - DNA, 17 bp, synthetic construct
  source 1..17: mol_type = other DNA
ggttatgggggccgatg

SEQ ID NO: 168059 - DNA, 17 bp, synthetic construct
  source 1..17: mol_type = other DNA
tggttatgggggccgat

SEQ ID NO: 168060 - DNA, 17 bp, synthetic construct
  source 1..17: mol_type = other DNA
gtggttatgggggccga

SEQ ID NO: 168061 - DNA, 17 bp, synthetic construct
  source 1..17: mol_type = other DNA
cgtggttatgggggccg

SEQ ID NO: 168062 - DNA, 17 bp, synthetic construct
  source 1..17: mol_type = other DNA
ccgtggttatgggggcc

SEQ ID NO: 168063 - DNA, 17 bp, synthetic construct
  source 1..17: mol_type = other DNA
accgtggttatgggggc

SEQ ID NO: 168064 - DNA, 17 bp, synthetic construct
  source 1..17: mol_type = other DNA
caccgtggttatggggg

SEQ ID NO: 168065 - DNA, 17 bp, synthetic construct
  source 1..17: mol_type = other DNA
ccaccgtggttatgggg

SEQ ID NO: 168066 - DNA, 17 bp, synthetic construct
  source 1..17: mol_type = other DNA
accaccgtggttatggg

SEQ ID NO: 168067 - DNA, 17 bp, synthetic construct
  source 1..17: mol_type = other DNA
caccaccgtggttatgg

SEQ ID NO: 168068 - DNA, 17 bp, synthetic construct
  source 1..17: mol_type = other DNA
tcaccaccgtggttatg

SEQ ID NO: 168069 - DNA, 17 bp, synthetic construct
  source 1..17: mol_type = other DNA
gtcaccaccgtggttat

SEQ ID NO: 168070 - DNA, 17 bp, synthetic construct
  source 1..17: mol_type = other DNA
ggtcaccaccgtggtta

SEQ ID NO: 168071 - DNA, 17 bp, synthetic construct
  source 1..17: mol_type = other DNA
tggtcaccaccgtggtt

SEQ ID NO: 168072 - DNA, 17 bp, synthetic construct
  source 1..17: mol_type = other DNA
atggtcaccaccgtggt

SEQ ID NO: 168073 - DNA, 17 bp, synthetic construct
  source 1..17: mol_type = other DNA
catggtcaccaccgtgg

SEQ ID NO: 168074 - DNA, 17 bp, synthetic construct
  source 1..17: mol_type = other DNA
ccatggtcaccaccgtg

SEQ ID NO: 168075 - DNA, 17 bp, synthetic construct
  source 1..17: mol_type = other DNA
cccatggtcaccaccgt

SEQ ID NO: 168076 - DNA, 17 bp, synthetic construct
  source 1..17: mol_type = other DNA
gcccatggtcaccaccg

SEQ ID NO: 168077 - DNA, 17 bp, synthetic construct
  source 1..17: mol_type = other DNA
agcccatggtcaccacc

SEQ ID NO: 168078 - DNA, 17 bp, synthetic construct
  source 1..17: mol_type = other DNA
cagcccatggtcaccac

SEQ ID NO: 168079 - DNA, 17 bp, synthetic construct
  source 1..17: mol_type = other DNA
acagcccatggtcacca

SEQ ID NO: 168080 - DNA, 17 bp, synthetic construct
  source 1..17: mol_type = other DNA
cacagcccatggtcacc

SEQ ID NO: 168081 - DNA, 17 bp, synthetic construct
  source 1..17: mol_type = other DNA
tcacagcccatggtcac

SEQ ID NO: 168082 - DNA, 17 bp, synthetic construct
  source 1..17: mol_type = other DNA
ctcacagcccatggtca

SEQ ID NO: 168083 - DNA, 17 bp, synthetic construct
  source 1..17: mol_type = other DNA
gctcacagcccatggtc

SEQ ID NO: 168084 - DNA, 17 bp, synthetic construct
  source 1..17: mol_type = other DNA
ggctcacagcccatggt

SEQ ID NO: 168085 - DNA, 17 bp, synthetic construct
  source 1..17: mol_type = other DNA
gggctcacagcccatgg

SEQ ID NO: 168086 - DNA, 17 bp, synthetic construct
  source 1..17: mol_type = other DNA
ggggctcacagcccatg

SEQ ID NO: 168087 - DNA, 17 bp, synthetic construct
  source 1..17: mol_type = other DNA
tggggctcacagcccat

SEQ ID NO: 168088 - DNA, 17 bp, synthetic construct
  source 1..17: mol_type = other DNA
ctggggctcacagccca

SEQ ID NO: 168089 - DNA, 17 bp, synthetic construct
  source 1..17: mol_type = other DNA
actggggctcacagccc

SEQ ID NO: 168090 - DNA, 17 bp, synthetic construct
  source 1..17: mol_type = other DNA
cactggggctcacagcc

SEQ ID NO: 168091 - DNA, 17 bp, synthetic construct
  source 1..17: mol_type = other DNA
acactggggctcacagc

SEQ ID NO: 168092 - DNA, 17 bp, synthetic construct
  source 1..17: mol_type = other DNA
cacactggggctcacag

SEQ ID NO: 168093 - DNA, 17 bp, synthetic construct
  source 1..17: mol_type = other DNA
gcacactggggctcaca

SEQ ID NO: 168094 - DNA, 17 bp, synthetic construct
  source 1..17: mol_type = other DNA
ggcacactggggctcac

SEQ ID NO: 168095 - DNA, 17 bp, synthetic construct
  source 1..17: mol_type = other DNA
aggcacactggggctca

SEQ ID NO: 168096 - DNA, 17 bp, synthetic construct
  source 1..17: mol_type = other DNA
caggcacactggggctc

SEQ ID NO: 168097 - DNA, 17 bp, synthetic construct
  source 1..17: mol_type = other DNA
ccaggcacactggggct

SEQ ID NO: 168098 - DNA, 17 bp, synthetic construct
  source 1..17: mol_type = other DNA
accaggcacactggggc

SEQ ID NO: 168099 - DNA, 17 bp, synthetic construct
  source 1..17: mol_type = other DNA
gaccaggcacactgggg

SEQ ID NO: 168100 - DNA, 17 bp, synthetic construct
  source 1..17: mol_type = other DNA
tgaccaggcacactggg

SEQ ID NO: 168101 - DNA, 17 bp, synthetic construct
  source 1..17: mol_type = other DNA
ctgaccaggcacactgg

SEQ ID NO: 168102 - DNA, 17 bp, synthetic construct
  source 1..17: mol_type = other DNA
tctgaccaggcacactg

SEQ ID NO: 168103 - DNA, 17 bp, synthetic construct
  source 1..17: mol_type = other DNA
ctctgaccaggcacact

SEQ ID NO: 168104 - DNA, 17 bp, synthetic construct
  source 1..17: mol_type = other DNA
actctgaccaggcacac

SEQ ID NO: 168105 - DNA, 17 bp, synthetic construct
  source 1..17: mol_type = other DNA
cactctgaccaggcaca

SEQ ID NO: 168106 - DNA, 17 bp, synthetic construct
  source 1..17: mol_type = other DNA
ccactctgaccaggcac

SEQ ID NO: 168107 - DNA, 17 bp, synthetic construct
  source 1..17: mol_type = other DNA
gccactctgaccaggca

SEQ ID NO: 168108 - DNA, 17 bp, synthetic construct
  source 1..17: mol_type = other DNA
agccactctgaccaggc

SEQ ID NO: 168109 - DNA, 17 bp, synthetic construct
  source 1..17: mol_type = other DNA
cagccactctgaccagg

SEQ ID NO: 168110 - DNA, 17 bp, synthetic construct
  source 1..17: mol_type = other DNA
ccagccactctgaccag

SEQ ID NO: 168111 - DNA, 17 bp, synthetic construct
  source 1..17: mol_type = other DNA
tccagccactctgacca

SEQ ID NO: 168112 - DNA, 17 bp, synthetic construct
  source 1..17: mol_type = other DNA
gtccagccactctgacc

SEQ ID NO: 168113 - DNA, 17 bp, synthetic construct
  source 1..17: mol_type = other DNA
agtccagccactctgac

SEQ ID NO: 168114 - DNA, 17 bp, synthetic construct
  source 1..17: mol_type = other DNA
tagtccagccactctga

SEQ ID NO: 168115 - DNA, 17 bp, synthetic construct
  source 1..17: mol_type = other DNA
gtagtccagccactctg

SEQ ID NO: 168116 - DNA, 17 bp, synthetic construct
  source 1..17: mol_type = other DNA
tgtagtccagccactct

SEQ ID NO: 168117 - DNA, 17 bp, synthetic construct
  source 1..17: mol_type = other DNA
ctgtagtccagccactc

SEQ ID NO: 168118 - DNA, 17 bp, synthetic construct
  source 1..17: mol_type = other DNA
gctgtagtccagccact

SEQ ID NO: 168119 - DNA, 17 bp, synthetic construct
  source 1..17: mol_type = other DNA
agctgtagtccagccac

SEQ ID NO: 168120 - DNA, 17 bp, synthetic construct
  source 1..17: mol_type = other DNA
tagctgtagtccagcca

SEQ ID NO: 168121 - DNA, 17 bp, synthetic construct
  source 1..17: mol_type = other DNA
gtagctgtagtccagcc

SEQ ID NO: 168122 - DNA, 17 bp, synthetic construct
  source 1..17: mol_type = other DNA
ggtagctgtagtccagc

SEQ ID NO: 168123 - DNA, 17 bp, synthetic construct
  source 1..17: mol_type = other DNA
gggtagctgtagtccag

SEQ ID NO: 168124 - DNA, 17 bp, synthetic construct
  source 1..17: mol_type = other DNA
ggggtagctgtagtcca

SEQ ID NO: 168125 - DNA, 17 bp, synthetic construct
  source 1..17: mol_type = other DNA
tggggtagctgtagtcc

SEQ ID NO: 168126 - DNA, 17 bp, synthetic construct
  source 1..17: mol_type = other DNA
atggggtagctgtagtc

SEQ ID NO: 168127 - DNA, 17 bp, synthetic construct
  source 1..17: mol_type = other DNA
catggggtagctgtagt

SEQ ID NO: 168128 - DNA, 17 bp, synthetic construct
  source 1..17: mol_type = other DNA
gcatggggtagctgtag

SEQ ID NO: 168129 - DNA, 17 bp, synthetic construct
  source 1..17: mol_type = other DNA
ggcatggggtagctgta

SEQ ID NO: 168130 - DNA, 17 bp, synthetic construct
  source 1..17: mol_type = other DNA
cggcatggggtagctgt

SEQ ID NO: 168131 - DNA, 17 bp, synthetic construct
  source 1..17: mol_type = other DNA
ccggcatggggtagctg

SEQ ID NO: 168132 - DNA, 17 bp, synthetic construct
  source 1..17: mol_type = other DNA
cccggcatggggtagct

SEQ ID NO: 168133 - DNA, 17 bp, synthetic construct
  source 1..17: mol_type = other DNA
ccccggcatggggtagc

SEQ ID NO: 168134 - DNA, 17 bp, synthetic construct
  source 1..17: mol_type = other DNA
gccccggcatggggtag

SEQ ID NO: 168135 - DNA, 17 bp, synthetic construct
  source 1..17: mol_type = other DNA
ggccccggcatggggta

SEQ ID NO: 168136 - DNA, 17 bp, synthetic construct
  source 1..17: mol_type = other DNA
gggccccggcatggggt

SEQ ID NO: 168137 - DNA, 17 bp, synthetic construct
  source 1..17: mol_type = other DNA
agggccccggcatgggg

SEQ ID NO: 168138 - DNA, 17 bp, synthetic construct
  source 1..17: mol_type = other DNA
gagggccccggcatggg

SEQ ID NO: 168139 - DNA, 17 bp, synthetic construct
  source 1..17: mol_type = other DNA
agagggccccggcatgg

SEQ ID NO: 168140 - DNA, 17 bp, synthetic construct
  source 1..17: mol_type = other DNA
cagagggccccggcatg

SEQ ID NO: 168141 - DNA, 17 bp, synthetic construct
  source 1..17: mol_type = other DNA
ccagagggccccggcat

SEQ ID NO: 168142 - DNA, 17 bp, synthetic construct
  source 1..17: mol_type = other DNA
gccagagggccccggca

SEQ ID NO: 168143 - DNA, 17 bp, synthetic construct
  source 1..17: mol_type = other DNA
cgccagagggccccggc

SEQ ID NO: 168144 - DNA, 17 bp, synthetic construct
  source 1..17: mol_type = other DNA
ccgccagagggccccgg

SEQ ID NO: 168145 - DNA, 17 bp, synthetic construct
  source 1..17: mol_type = other DNA
cccgccagagggccccg

SEQ ID NO: 168146 - DNA, 17 bp, synthetic construct
  source 1..17: mol_type = other DNA
ccccgccagagggcccc

SEQ ID NO: 168147 - DNA, 17 bp, synthetic construct
  source 1..17: mol_type = other DNA
tccccgccagagggccc

SEQ ID NO: 168148 - DNA, 17 bp, synthetic construct
  source 1..17: mol_type = other DNA
gtccccgccagagggcc

SEQ ID NO: 168149 - DNA, 17 bp, synthetic construct
  source 1..17: mol_type = other DNA
agtccccgccagagggc

SEQ ID NO: 168150 - DNA, 17 bp, synthetic construct
  source 1..17: mol_type = other DNA
aagtccccgccagaggg

SEQ ID NO: 168151 - DNA, 17 bp, synthetic construct
  source 1..17: mol_type = other DNA
aaagtccccgccagagg

SEQ ID NO: 168152 - DNA, 17 bp, synthetic construct
  source 1..17: mol_type = other DNA
caaagtccccgccagag

SEQ ID NO: 168153 - DNA, 17 bp, synthetic construct
  source 1..17: mol_type = other DNA
tcaaagtccccgccaga

SEQ ID NO: 168154 - DNA, 17 bp, synthetic construct
  source 1..17: mol_type = other DNA
gtcaaagtccccgccag

SEQ ID NO: 168155 - DNA, 17 bp, synthetic construct
  source 1..17: mol_type = other DNA
tgtcaaagtccccgcca

SEQ ID NO: 168156 - DNA, 17 bp, synthetic construct
  source 1..17: mol_type = other DNA
gtgtcaaagtccccgcc

SEQ ID NO: 168157 - DNA, 17 bp, synthetic construct
  source 1..17: mol_type = other DNA
ggtgtcaaagtccccgc

SEQ ID NO: 168158 - DNA, 17 bp, synthetic construct
  source 1..17: mol_type = other DNA
aggtgtcaaagtccccg

SEQ ID NO: 168159 - DNA, 17 bp, synthetic construct
  source 1..17: mol_type = other DNA
taggtgtcaaagtcccc

SEQ ID NO: 168160 - DNA, 17 bp, synthetic construct
  source 1..17: mol_type = other DNA
gtaggtgtcaaagtccc

SEQ ID NO: 168161 - DNA, 17 bp, synthetic construct
  source 1..17: mol_type = other DNA
agtaggtgtcaaagtcc

SEQ ID NO: 168162 - DNA, 17 bp, synthetic construct
  source 1..17: mol_type = other DNA
gagtaggtgtcaaagtc

SEQ ID NO: 168163 - DNA, 17 bp, synthetic construct
  source 1..17: mol_type = other DNA
ggagtaggtgtcaaagt

SEQ ID NO: 168164 - DNA, 17 bp, synthetic construct
  source 1..17: mol_type = other DNA
tggagtaggtgtcaaag

SEQ ID NO: 168165 - DNA, 17 bp, synthetic construct
  source 1..17: mol_type = other DNA
ttggagtaggtgtcaaa

SEQ ID NO: 168166 - DNA, 17 bp, synthetic construct
  source 1..17: mol_type = other DNA
gttggagtaggtgtcaa

SEQ ID NO: 168167 - DNA, 17 bp, synthetic construct
  source 1..17: mol_type = other DNA
tgttggagtaggtgtca

SEQ ID NO: 168168 - DNA, 17 bp, synthetic construct
  source 1..17: mol_type = other DNA
atgttggagtaggtgtc

SEQ ID NO: 168169 - DNA, 17 bp, synthetic construct
  source 1..17: mol_type = other DNA
gatgttggagtaggtgt

SEQ ID NO: 168170 - DNA, 17 bp, synthetic construct
  source 1..17: mol_type = other DNA
ggatgttggagtaggtg

SEQ ID NO: 168171 - DNA, 17 bp, synthetic construct
  source 1..17: mol_type = other DNA
cggatgttggagtaggt

SEQ ID NO: 168172 - DNA, 17 bp, synthetic construct
  source 1..17: mol_type = other DNA
acggatgttggagtagg

SEQ ID NO: 168173 - DNA, 17 bp, synthetic construct
  source 1..17: mol_type = other DNA
cacggatgttggagtag

SEQ ID NO: 168174 - DNA, 17 bp, synthetic construct
  source 1..17: mol_type = other DNA
gcacggatgttggagta

SEQ ID NO: 168175 - DNA, 17 bp, synthetic construct
  source 1..17: mol_type = other DNA
cgcacggatgttggagt

SEQ ID NO: 168176 - DNA, 17 bp, synthetic construct
  source 1..17: mol_type = other DNA
ccgcacggatgttggag

SEQ ID NO: 168177 - DNA, 17 bp, synthetic construct
  source 1..17: mol_type = other DNA
gccgcacggatgttgga

SEQ ID NO: 168178 - DNA, 17 bp, synthetic construct
  source 1..17: mol_type = other DNA
ggccgcacggatgttgg

SEQ ID NO: 168179 - DNA, 17 bp, synthetic construct
  source 1..17: mol_type = other DNA
cggccgcacggatgttg

SEQ ID NO: 168180 - DNA, 17 bp, synthetic construct
  source 1..17: mol_type = other DNA
ccggccgcacggatgtt

SEQ ID NO: 168181 - DNA, 17 bp, synthetic construct
  source 1..17: mol_type = other DNA
tccggccgcacggatgt

SEQ ID NO: 168182 - DNA, 17 bp, synthetic construct
  source 1..17: mol_type = other DNA
ctccggccgcacggatg

SEQ ID NO: 168183 - DNA, 17 bp, synthetic construct
  source 1..17: mol_type = other DNA
cctccggccgcacggat

SEQ ID NO: 168184 - DNA, 17 bp, synthetic construct
  source 1..17: mol_type = other DNA
ccctccggccgcacgga

SEQ ID NO: 168185 - DNA, 17 bp, synthetic construct
  source 1..17: mol_type = other DNA
cccctccggccgcacgg

SEQ ID NO: 168186 - DNA, 17 bp, synthetic construct
  source 1..17: mol_type = other DNA
gcccctccggccgcacg

SEQ ID NO: 168187 - DNA, 17 bp, synthetic construct
  source 1..17: mol_type = other DNA
ggcccctccggccgcac

SEQ ID NO: 168188 - DNA, 17 bp, synthetic construct
  source 1..17: mol_type = other DNA
cggcccctccggccgca

SEQ ID NO: 168189 - DNA, 17 bp, synthetic construct
  source 1..17: mol_type = other DNA
acggcccctccggccgc

SEQ ID NO: 168190 - DNA, 17 bp, synthetic construct
  source 1..17: mol_type = other DNA
gacggcccctccggccg

SEQ ID NO: 168191 - DNA, 17 bp, synthetic construct
  source 1..17: mol_type = other DNA
agacggcccctccggcc

SEQ ID NO: 168192 - DNA, 17 bp, synthetic construct
  source 1..17: mol_type = other DNA
cagacggcccctccggc

SEQ ID NO: 168193 - DNA, 17 bp, synthetic construct
  source 1..17: mol_type = other DNA
acagacggcccctccgg

SEQ ID NO: 168194 - DNA, 17 bp, synthetic construct
  source 1..17: mol_type = other DNA
cacagacggcccctccg

SEQ ID NO: 168195 - DNA, 17 bp, synthetic construct
  source 1..17: mol_type = other DNA
tcacagacggcccctcc

SEQ ID NO: 168196 - DNA, 17 bp, synthetic construct
  source 1..17: mol_type = other DNA
ctcacagacggcccctc

SEQ ID NO: 168197 - DNA, 17 bp, synthetic construct
  source 1..17: mol_type = other DNA
gctcacagacggcccct

SEQ ID NO: 168198 - DNA, 17 bp, synthetic construct
  source 1..17: mol_type = other DNA
tgctcacagacggcccc

SEQ ID NO: 168199 - DNA, 17 bp, synthetic construct
  source 1..17: mol_type = other DNA
ctgctcacagacggccc

SEQ ID NO: 168200 - DNA, 17 bp, synthetic construct
  source 1..17: mol_type = other DNA
gctgctcacagacggcc

SEQ ID NO: 168201 - DNA, 17 bp, synthetic construct
  source 1..17: mol_type = other DNA
ggctgctcacagacggc

SEQ ID NO: 168202 - DNA, 17 bp, synthetic construct
  source 1..17: mol_type = other DNA
gggctgctcacagacgg

SEQ ID NO: 168203 - DNA, 17 bp, synthetic construct
  source 1..17: mol_type = other DNA
ggggctgctcacagacg

SEQ ID NO: 168204 - DNA, 17 bp, synthetic construct
  source 1..17: mol_type = other DNA
aggggctgctcacagac

SEQ ID NO: 168205 - DNA, 17 bp, synthetic construct
  source 1..17: mol_type = other DNA
caggggctgctcacaga

SEQ ID NO: 168206 - DNA, 17 bp, synthetic construct
  source 1..17: mol_type = other DNA
ccaggggctgctcacag

SEQ ID NO: 168207 - DNA, 17 bp, synthetic construct
  source 1..17: mol_type = other DNA
cccaggggctgctcaca

SEQ ID NO: 168208 - DNA, 17 bp, synthetic construct
  source 1..17: mol_type = other DNA
gcccaggggctgctcac

SEQ ID NO: 168209 - DNA, 17 bp, synthetic construct
  source 1..17: mol_type = other DNA
ggcccaggggctgctca

SEQ ID NO: 168210 - DNA, 17 bp, synthetic construct
  source 1..17: mol_type = other DNA
aggcccaggggctgctc

SEQ ID NO: 168211 - DNA, 17 bp, synthetic construct
  source 1..17: mol_type = other DNA
gaggcccaggggctgct

SEQ ID NO: 168212 - DNA, 17 bp, synthetic construct
  source 1..17: mol_type = other DNA
cgaggcccaggggctgc

SEQ ID NO: 168213 - DNA, 17 bp, synthetic construct
  source 1..17: mol_type = other DNA
tcgaggcccaggggctg

SEQ ID NO: 168214 - DNA, 17 bp, synthetic construct
  source 1..17: mol_type = other DNA
ctcgaggcccaggggct

SEQ ID NO: 168215 - DNA, 17 bp, synthetic construct
  source 1..17: mol_type = other DNA
actcgaggcccaggggc

SEQ ID NO: 168216 - DNA, 17 bp, synthetic construct
  source 1..17: mol_type = other DNA
cactcgaggcccagggg

SEQ ID NO: 168217 - DNA, 17 bp, synthetic construct
  source 1..17: mol_type = other DNA
gcactcgaggcccaggg

SEQ ID NO: 168218 - DNA, 17 bp, synthetic construct
  source 1..17: mol_type = other DNA
ggcactcgaggcccagg

SEQ ID NO: 168219 - DNA, 17 bp, synthetic construct
  source 1..17: mol_type = other DNA
cggcactcgaggcccag

SEQ ID NO: 168220 - DNA, 17 bp, synthetic construct
  source 1..17: mol_type = other DNA
acggcactcgaggccca

SEQ ID NO: 168221 - DNA, 17 bp, synthetic construct
  source 1..17: mol_type = other DNA
cacggcactcgaggccc

SEQ ID NO: 168222 - DNA, 17 bp, synthetic construct
  source 1..17: mol_type = other DNA
gcacggcactcgaggcc

SEQ ID NO: 168223 - DNA, 17 bp, synthetic construct
  source 1..17: mol_type = other DNA
ggcacggcactcgaggc

SEQ ID NO: 168224 - DNA, 17 bp, synthetic construct
  source 1..17: mol_type = other DNA
gggcacggcactcgagg

SEQ ID NO: 168225 - DNA, 17 bp, synthetic construct
  source 1..17: mol_type = other DNA
tgggcacggcactcgag

SEQ ID NO: 168226 - DNA, 17 bp, synthetic construct
  source 1..17: mol_type = other DNA
ctgggcacggcactcga

SEQ ID NO: 168227 - DNA, 17 bp, synthetic construct
  source 1..17: mol_type = other DNA
cctgggcacggcactcg

SEQ ID NO: 168228 - DNA, 17 bp, synthetic construct
  source 1..17: mol_type = other DNA
gcctgggcacggcactc

SEQ ID NO: 168229 - DNA, 17 bp, synthetic construct
  source 1..17: mol_type = other DNA
ggcctgggcacggcact

SEQ ID NO: 168230 - DNA, 17 bp, synthetic construct
  source 1..17: mol_type = other DNA
gggcctgggcacggcac

SEQ ID NO: 168231 - DNA, 17 bp, synthetic construct
  source 1..17: mol_type = other DNA
tgggcctgggcacggca

SEQ ID NO: 168232 - DNA, 17 bp, synthetic construct
  source 1..17: mol_type = other DNA
ctgggcctgggcacggc

SEQ ID NO: 168233 - DNA, 17 bp, synthetic construct
  source 1..17: mol_type = other DNA
gctgggcctgggcacgg

SEQ ID NO: 168234 - DNA, 17 bp, synthetic construct
  source 1..17: mol_type = other DNA
ggctgggcctgggcacg

SEQ ID NO: 168235 - DNA, 17 bp, synthetic construct
  source 1..17: mol_type = other DNA
aggctgggcctgggcac

SEQ ID NO: 168236 - DNA, 17 bp, synthetic construct
  source 1..17: mol_type = other DNA
caggctgggcctgggca

SEQ ID NO: 168237 - DNA, 17 bp, synthetic construct
  source 1..17: mol_type = other DNA
ccaggctgggcctgggc

SEQ ID NO: 168238 - DNA, 17 bp, synthetic construct
  source 1..17: mol_type = other DNA
accaggctgggcctggg

SEQ ID NO: 168239 - DNA, 17 bp, synthetic construct
  source 1..17: mol_type = other DNA
caccaggctgggcctgg

SEQ ID NO: 168240 - DNA, 17 bp, synthetic construct
  source 1..17: mol_type = other DNA
acaccaggctgggcctg

SEQ ID NO: 168241 - DNA, 17 bp, synthetic construct
  source 1..17: mol_type = other DNA
gacaccaggctgggcct

SEQ ID NO: 168242 - DNA, 17 bp, synthetic construct
  source 1..17: mol_type = other DNA
ggacaccaggctgggcc

SEQ ID NO: 168243 - DNA, 17 bp, synthetic construct
  source 1..17: mol_type = other DNA
gggacaccaggctgggc

SEQ ID NO: 168244 - DNA, 17 bp, synthetic construct
  source 1..17: mol_type = other DNA
ggggacaccaggctggg

SEQ ID NO: 168245 - DNA, 17 bp, synthetic construct
  source 1..17: mol_type = other DNA
gggggacaccaggctgg

SEQ ID NO: 168246 - DNA, 17 bp, synthetic construct
  source 1..17: mol_type = other DNA
agggggacaccaggctg

SEQ ID NO: 168247 - DNA, 17 bp, synthetic construct
  source 1..17: mol_type = other DNA
cagggggacaccaggct

SEQ ID NO: 168248 - DNA, 17 bp, synthetic construct
  source 1..17: mol_type = other DNA
gcagggggacaccaggc

SEQ ID NO: 168249 - DNA, 17 bp, synthetic construct
  source 1..17: mol_type = other DNA
cgcagggggacaccagg

SEQ ID NO: 168250 - DNA, 17 bp, synthetic construct
  source 1..17: mol_type = other DNA
ccgcagggggacaccag

SEQ ID NO: 168251 - DNA, 17 bp, synthetic construct
  source 1..17: mol_type = other DNA
cccgcagggggacacca

SEQ ID NO: 168252 - DNA, 17 bp, synthetic construct
  source 1..17: mol_type = other DNA
tcccgcagggggacacc

SEQ ID NO: 168253 - DNA, 17 bp, synthetic construct
  source 1..17: mol_type = other DNA
ctcccgcagggggacac

SEQ ID NO: 168254 - DNA, 17 bp, synthetic construct
  source 1..17: mol_type = other DNA
actcccgcagggggaca

SEQ ID NO: 168255 - DNA, 17 bp, synthetic construct
  source 1..17: mol_type = other DNA
aactcccgcagggggac

SEQ ID NO: 168256 - DNA, 17 bp, synthetic construct
  source 1..17: mol_type = other DNA
caactcccgcaggggga

SEQ ID NO: 168257 - DNA, 17 bp, synthetic construct
  source 1..17: mol_type = other DNA
ccaactcccgcaggggg

SEQ ID NO: 168258 - DNA, 17 bp, synthetic construct
  source 1..17: mol_type = other DNA
cccaactcccgcagggg

SEQ ID NO: 168259 - DNA, 17 bp, synthetic construct
  source 1..17: mol_type = other DNA
gcccaactcccgcaggg

SEQ ID NO: 168260 - DNA, 17 bp, synthetic construct
  source 1..17: mol_type = other DNA
ggcccaactcccgcagg

SEQ ID NO: 168261 - DNA, 17 bp, synthetic construct
  source 1..17: mol_type = other DNA
tggcccaactcccgcag

SEQ ID NO: 168262 - DNA, 17 bp, synthetic construct
  source 1..17: mol_type = other DNA
ctggcccaactcccgca

SEQ ID NO: 168263 - DNA, 17 bp, synthetic construct
  source 1..17: mol_type = other DNA
cctggcccaactcccgc

SEQ ID NO: 168264 - DNA, 17 bp, synthetic construct
  source 1..17: mol_type = other DNA
acctggcccaactcccg

SEQ ID NO: 168265 - DNA, 17 bp, synthetic construct
  source 1..17: mol_type = other DNA
gacctggcccaactccc

SEQ ID NO: 168266 - DNA, 17 bp, synthetic construct
  source 1..17: mol_type = other DNA
cgacctggcccaactcc

SEQ ID NO: 168267 - DNA, 17 bp, synthetic construct
  source 1..17: mol_type = other DNA
acgacctggcccaactc

SEQ ID NO: 168268 - DNA, 17 bp, synthetic construct
  source 1..17: mol_type = other DNA
cacgacctggcccaact

SEQ ID NO: 168269 - DNA, 17 bp, synthetic construct
  source 1..17: mol_type = other DNA
ccacgacctggcccaac

SEQ ID NO: 168270 - DNA, 17 bp, synthetic construct
  source 1..17: mol_type = other DNA
tccacgacctggcccaa

SEQ ID NO: 168271 - DNA, 17 bp, synthetic construct
  source 1..17: mol_type = other DNA
ttccacgacctggccca

SEQ ID NO: 168272 - DNA, 17 bp, synthetic construct
  source 1..17: mol_type = other DNA
attccacgacctggccc

SEQ ID NO: 168273 - DNA, 17 bp, synthetic construct
  source 1..17: mol_type = other DNA
cattccacgacctggcc

SEQ ID NO: 168274 - DNA, 17 bp, synthetic construct
  source 1..17: mol_type = other DNA
gcattccacgacctggc

SEQ ID NO: 168275 - DNA, 17 bp, synthetic construct
  source 1..17: mol_type = other DNA
tgcattccacgacctgg

SEQ ID NO: 168276 - DNA, 17 bp, synthetic construct
  source 1..17: mol_type = other DNA
ctgcattccacgacctg

SEQ ID NO: 168277 - DNA, 17 bp, synthetic construct
  source 1..17: mol_type = other DNA
gctgcattccacgacct

SEQ ID NO: 168278 - DNA, 17 bp, synthetic construct
  source 1..17: mol_type = other DNA
ggctgcattccacgacc

SEQ ID NO: 168279 - DNA, 17 bp, synthetic construct
  source 1..17: mol_type = other DNA
aggctgcattccacgac

SEQ ID NO: 168280 - DNA, 17 bp, synthetic construct
  source 1..17: mol_type = other DNA
caggctgcattccacga

SEQ ID NO: 168281 - DNA, 17 bp, synthetic construct
  source 1..17: mol_type = other DNA
ccaggctgcattccacg

SEQ ID NO: 168282 - DNA, 17 bp, synthetic construct
  source 1..17: mol_type = other DNA
tccaggctgcattccac

SEQ ID NO: 168283 - DNA, 17 bp, synthetic construct
  source 1..17: mol_type = other DNA
gtccaggctgcattcca

SEQ ID NO: 168284 - DNA, 17 bp, synthetic construct
  source 1..17: mol_type = other DNA
agtccaggctgcattcc

SEQ ID NO: 168285 - DNA, 17 bp, synthetic construct
  source 1..17: mol_type = other DNA
aagtccaggctgcattc

SEQ ID NO: 168286 - DNA, 17 bp, synthetic construct
  source 1..17: mol_type = other DNA
aaagtccaggctgcatt

SEQ ID NO: 168287 - DNA, 17 bp, synthetic construct
  source 1..17: mol_type = other DNA
caaagtccaggctgcat

SEQ ID NO: 168288 - DNA, 17 bp, synthetic construct
  source 1..17: mol_type = other DNA
ccaaagtccaggctgca

SEQ ID NO: 168289 - DNA, 17 bp, synthetic construct
  source 1..17: mol_type = other DNA
gccaaagtccaggctgc

SEQ ID NO: 168290 - DNA, 17 bp, synthetic construct
  source 1..17: mol_type = other DNA
ggccaaagtccaggctg

SEQ ID NO: 168291 - DNA, 17 bp, synthetic construct
  source 1..17: mol_type = other DNA
aggccaaagtccaggct

SEQ ID NO: 168292 - DNA, 17 bp, synthetic construct
  source 1..17: mol_type = other DNA
caggccaaagtccaggc

SEQ ID NO: 168293 - DNA, 17 bp, synthetic construct
  source 1..17: mol_type = other DNA
ccaggccaaagtccagg

SEQ ID NO: 168294 - DNA, 17 bp, synthetic construct
  source 1..17: mol_type = other DNA
accaggccaaagtccag

SEQ ID NO: 168295 - DNA, 17 bp, synthetic construct
  source 1..17: mol_type = other DNA
gaccaggccaaagtcca

SEQ ID NO: 168296 - DNA, 17 bp, synthetic construct
  source 1..17: mol_type = other DNA
agaccaggccaaagtcc

SEQ ID NO: 168297 - DNA, 17 bp, synthetic construct
  source 1..17: mol_type = other DNA
cagaccaggccaaagtc

SEQ ID NO: 168298 - DNA, 17 bp, synthetic construct
  source 1..17: mol_type = other DNA
gcagaccaggccaaagt

SEQ ID NO: 168299 - DNA, 17 bp, synthetic construct
  source 1..17: mol_type = other DNA
tgcagaccaggccaaag

SEQ ID NO: 168300 - DNA, 17 bp, synthetic construct
  source 1..17: mol_type = other DNA
ctgcagaccaggccaaa

SEQ ID NO: 168301 - DNA, 17 bp, synthetic construct
  source 1..17: mol_type = other DNA
cctgcagaccaggccaa

SEQ ID NO: 168302 - DNA, 17 bp, synthetic construct
  source 1..17: mol_type = other DNA
tcctgcagaccaggcca

SEQ ID NO: 168303 - DNA, 17 bp, synthetic construct
  source 1..17: mol_type = other DNA
ttcctgcagaccaggcc

SEQ ID NO: 168304 - DNA, 17 bp, synthetic construct
  source 1..17: mol_type = other DNA
gttcctgcagaccaggc

SEQ ID NO: 168305 - DNA, 17 bp, synthetic construct
  source 1..17: mol_type = other DNA
ggttcctgcagaccagg

SEQ ID NO: 168306 - DNA, 17 bp, synthetic construct
  source 1..17: mol_type = other DNA
cggttcctgcagaccag

SEQ ID NO: 168307 - DNA, 17 bp, synthetic construct
  source 1..17: mol_type = other DNA
acggttcctgcagacca

SEQ ID NO: 168308 - DNA, 17 bp, synthetic construct
  source 1..17: mol_type = other DNA
cacggttcctgcagacc

SEQ ID NO: 168309 - DNA, 17 bp, synthetic construct
  source 1..17: mol_type = other DNA
tcacggttcctgcagac

SEQ ID NO: 168310 - DNA, 17 bp, synthetic construct
  source 1..17: mol_type = other DNA
ctcacggttcctgcaga

SEQ ID NO: 168311 - DNA, 17 bp, synthetic construct
  source 1..17: mol_type = other DNA
gctcacggttcctgcag

SEQ ID NO: 168312 - DNA, 17 bp, synthetic construct
  source 1..17: mol_type = other DNA
tgctcacggttcctgca

SEQ ID NO: 168313 - DNA, 17 bp, synthetic construct
  source 1..17: mol_type = other DNA
ctgctcacggttcctgc

SEQ ID NO: 168314 - DNA, 17 bp, synthetic construct
  source 1..17: mol_type = other DNA
cctgctcacggttcctg

SEQ ID NO: 168315 - DNA, 17 bp, synthetic construct
  source 1..17: mol_type = other DNA
acctgctcacggttcct

SEQ ID NO: 168316 - DNA, 17 bp, synthetic construct
  source 1..17: mol_type = other DNA
cacctgctcacggttcc

SEQ ID NO: 168317 - DNA, 17 bp, synthetic construct
  source 1..17: mol_type = other DNA
ccacctgctcacggttc

SEQ ID NO: 168318 - DNA, 17 bp, synthetic construct
  source 1..17: mol_type = other DNA
cccacctgctcacggtt

SEQ ID NO: 168319 - DNA, 17 bp, synthetic construct
  source 1..17: mol_type = other DNA
ccccacctgctcacggt

SEQ ID NO: 168320 - DNA, 17 bp, synthetic construct
  source 1..17: mol_type = other DNA
tccccacctgctcacgg

SEQ ID NO: 168321 - DNA, 17 bp, synthetic construct
  source 1..17: mol_type = other DNA
ttccccacctgctcacg

SEQ ID NO: 168322 - DNA, 17 bp, synthetic construct
  source 1..17: mol_type = other DNA
cttccccacctgctcac

SEQ ID NO: 168323 - DNA, 17 bp, synthetic construct
  source 1..17: mol_type = other DNA
acttccccacctgctca

SEQ ID NO: 168324 - DNA, 17 bp, synthetic construct
  source 1..17: mol_type = other DNA
aacttccccacctgctc

SEQ ID NO: 168325 - DNA, 17 bp, synthetic construct
  source 1..17: mol_type = other DNA
gaacttccccacctgct

SEQ ID NO: 168326 - DNA, 17 bp, synthetic construct
  source 1..17: mol_type = other DNA
tgaacttccccacctgc

SEQ ID NO: 168327 - DNA, 17 bp, synthetic construct
  source 1..17: mol_type = other DNA
ttgaacttccccacctg

SEQ ID NO: 168328 - DNA, 17 bp, synthetic construct
  source 1..17: mol_type = other DNA
cttgaacttccccacct

SEQ ID NO: 168329 - DNA, 17 bp, synthetic construct
  source 1..17: mol_type = other DNA
tcttgaacttccccacc

SEQ ID NO: 168330 - DNA, 17 bp, synthetic construct
  source 1..17: mol_type = other DNA
atcttgaacttccccac

SEQ ID NO: 168331 - DNA, 17 bp, synthetic construct
  source 1..17: mol_type = other DNA
catcttgaacttcccca

SEQ ID NO: 168332 - DNA, 17 bp, synthetic construct
  source 1..17: mol_type = other DNA
acatcttgaacttcccc

SEQ ID NO: 168333 - DNA, 17 bp, synthetic construct
  source 1..17: mol_type = other DNA
cacatcttgaacttccc

SEQ ID NO: 168334 - DNA, 17 bp, synthetic construct
  source 1..17: mol_type = other DNA
gcacatcttgaacttcc

SEQ ID NO: 168335 - DNA, 17 bp, synthetic construct
  source 1..17: mol_type = other DNA
agcacatcttgaacttc

SEQ ID NO: 168336 - DNA, 17 bp, synthetic construct
  source 1..17: mol_type = other DNA
aagcacatcttgaactt

SEQ ID NO: 168337 - DNA, 17 bp, synthetic construct
  source 1..17: mol_type = other DNA
gaagcacatcttgaact

SEQ ID NO: 168338 - DNA, 17 bp, synthetic construct
  source 1..17: mol_type = other DNA
tgaagcacatcttgaac

SEQ ID NO: 168339 - DNA, 17 bp, synthetic construct
  source 1..17: mol_type = other DNA
ttgaagcacatcttgaa

SEQ ID NO: 168340 - DNA, 17 bp, synthetic construct
  source 1..17: mol_type = other DNA
gttgaagcacatcttga

SEQ ID NO: 168341 - DNA, 17 bp, synthetic construct
  source 1..17: mol_type = other DNA
agttgaagcacatcttg

SEQ ID NO: 168342 - DNA, 17 bp, synthetic construct
  source 1..17: mol_type = other DNA
tagttgaagcacatctt

SEQ ID NO: 168343 - DNA, 17 bp, synthetic construct
  source 1..17: mol_type = other DNA
atagttgaagcacatct

SEQ ID NO: 168344 - DNA, 17 bp, synthetic construct
  source 1..17: mol_type = other DNA
catagttgaagcacatc

SEQ ID NO: 168345 - DNA, 17 bp, synthetic construct
  source 1..17: mol_type = other DNA
tcatagttgaagcacat

SEQ ID NO: 168346 - DNA, 17 bp, synthetic construct
  source 1..17: mol_type = other DNA
ttcatagttgaagcaca

SEQ ID NO: 168347 - DNA, 17 bp, synthetic construct
  source 1..17: mol_type = other DNA
tttcatagttgaagcac

SEQ ID NO: 168348 - DNA, 17 bp, synthetic construct
  source 1..17: mol_type = other DNA
atttcatagttgaagca

SEQ ID NO: 168349 - DNA, 17 bp, synthetic construct
  source 1..17: mol_type = other DNA
gatttcatagttgaagc

SEQ ID NO: 168350 - DNA, 17 bp, synthetic construct
  source 1..17: mol_type = other DNA
ggatttcatagttgaag

SEQ ID NO: 168351 - DNA, 17 bp, synthetic construct
  source 1..17: mol_type = other DNA
cggatttcatagttgaa

SEQ ID NO: 168352 - DNA, 17 bp, synthetic construct
  source 1..17: mol_type = other DNA
acggatttcatagttga

SEQ ID NO: 168353 - DNA, 17 bp, synthetic construct
  source 1..17: mol_type = other DNA
cacggatttcatagttg

SEQ ID NO: 168354 - DNA, 17 bp, synthetic construct
  source 1..17: mol_type = other DNA
acacggatttcatagtt

SEQ ID NO: 168355 - DNA, 17 bp, synthetic construct
  source 1..17: mol_type = other DNA
cacacggatttcatagt

SEQ ID NO: 168356 - DNA, 17 bp, synthetic construct
  source 1..17: mol_type = other DNA
acacacggatttcatag

SEQ ID NO: 168357 - DNA, 17 bp, synthetic construct
  source 1..17: mol_type = other DNA
aacacacggatttcata

SEQ ID NO: 168358 - DNA, 17 bp, synthetic construct
  source 1..17: mol_type = other DNA
gaacacacggatttcat

SEQ ID NO: 168359 - DNA, 17 bp, synthetic construct
  source 1..17: mol_type = other DNA
agaacacacggatttca

SEQ ID NO: 168360 - DNA, 17 bp, synthetic construct
  source 1..17: mol_type = other DNA
cagaacacacggatttc

SEQ ID NO: 168361 - DNA, 17 bp, synthetic construct
  source 1..17: mol_type = other DNA
gcagaacacacggattt

SEQ ID NO: 168362 - DNA, 17 bp, synthetic construct
  source 1..17: mol_type = other DNA
agcagaacacacggatt

SEQ ID NO: 168363 - DNA, 17 bp, synthetic construct
  source 1..17: mol_type = other DNA
cagcagaacacacggat

SEQ ID NO: 168364 - DNA, 17 bp, synthetic construct
  source 1..17: mol_type = other DNA
gcagcagaacacacgga

SEQ ID NO: 168365 - DNA, 17 bp, synthetic construct
  source 1..17: mol_type = other DNA
tgcagcagaacacacgg

SEQ ID NO: 168366 - DNA, 17 bp, synthetic construct
  source 1..17: mol_type = other DNA
ttgcagcagaacacacg

SEQ ID NO: 168367 - DNA, 17 bp, synthetic construct
  source 1..17: mol_type = other DNA
gttgcagcagaacacac

SEQ ID NO: 168368 - DNA, 17 bp, synthetic construct
  source 1..17: mol_type = other DNA
agttgcagcagaacaca

SEQ ID NO: 168369 - DNA, 17 bp, synthetic construct
  source 1..17: mol_type = other DNA
tagttgcagcagaacac

SEQ ID NO: 168370 - DNA, 17 bp, synthetic construct
  source 1..17: mol_type = other DNA
gtagttgcagcagaaca

SEQ ID NO: 168371 - DNA, 17 bp, synthetic construct
  source 1..17: mol_type = other DNA
cgtagttgcagcagaac

SEQ ID NO: 168372 - DNA, 17 bp, synthetic construct
  source 1..17: mol_type = other DNA
ccgtagttgcagcagaa

SEQ ID NO: 168373 - DNA, 17 bp, synthetic construct
  source 1..17: mol_type = other DNA
gccgtagttgcagcaga

SEQ ID NO: 168374 - DNA, 17 bp, synthetic construct
  source 1..17: mol_type = other DNA
ggccgtagttgcagcag

SEQ ID NO: 168375 - DNA, 17 bp, synthetic construct
  source 1..17: mol_type = other DNA
tggccgtagttgcagca

SEQ ID NO: 168376 - DNA, 17 bp, synthetic construct
  source 1..17: mol_type = other DNA
gtggccgtagttgcagc

SEQ ID NO: 168377 - DNA, 17 bp, synthetic construct
  source 1..17: mol_type = other DNA
agtggccgtagttgcag

SEQ ID NO: 168378 - DNA, 17 bp, synthetic construct
  source 1..17: mol_type = other DNA
cagtggccgtagttgca

SEQ ID NO: 168379 - DNA, 17 bp, synthetic construct
  source 1..17: mol_type = other DNA
gcagtggccgtagttgc

SEQ ID NO: 168380 - DNA, 17 bp, synthetic construct
  source 1..17: mol_type = other DNA
ggcagtggccgtagttg

SEQ ID NO: 168381 - DNA, 17 bp, synthetic construct
  source 1..17: mol_type = other DNA
gggcagtggccgtagtt

SEQ ID NO: 168382 - DNA, 17 bp, synthetic construct
  source 1..17: mol_type = other DNA
ggggcagtggccgtagt

SEQ ID NO: 168383 - DNA, 17 bp, synthetic construct
  source 1..17: mol_type = other DNA
tggggcagtggccgtag

SEQ ID NO: 168384 - DNA, 17 bp, synthetic construct
  source 1..17: mol_type = other DNA
ctggggcagtggccgta

SEQ ID NO: 168385 - DNA, 17 bp, synthetic construct
  source 1..17: mol_type = other DNA
gctggggcagtggccgt

SEQ ID NO: 168386 - DNA, 17 bp, synthetic construct
  source 1..17: mol_type = other DNA
tgctggggcagtggccg

SEQ ID NO: 168387 - DNA, 17 bp, synthetic construct
  source 1..17: mol_type = other DNA
gtgctggggcagtggcc

SEQ ID NO: 168388 - DNA, 17 bp, synthetic construct
  source 1..17: mol_type = other DNA
ggtgctggggcagtggc

SEQ ID NO: 168389 - DNA, 17 bp, synthetic construct
  source 1..17: mol_type = other DNA
gggtgctggggcagtgg

SEQ ID NO: 168390 - DNA, 17 bp, synthetic construct
  source 1..17: mol_type = other DNA
ggggtgctggggcagtg

SEQ ID NO: 168391 - DNA, 17 bp, synthetic construct
  source 1..17: mol_type = other DNA
cggggtgctggggcagt

SEQ ID NO: 168392 - DNA, 17 bp, synthetic construct
  source 1..17: mol_type = other DNA
ccggggtgctggggcag

SEQ ID NO: 168393 - DNA, 17 bp, synthetic construct
  source 1..17: mol_type = other DNA
gccggggtgctggggca

SEQ ID NO: 168394 - DNA, 17 bp, synthetic construct
  source 1..17: mol_type = other DNA
ggccggggtgctggggc

SEQ ID NO: 168395 - DNA, 17 bp, synthetic construct
  source 1..17: mol_type = other DNA
tggccggggtgctgggg

SEQ ID NO: 168396 - DNA, 17 bp, synthetic construct
  source 1..17: mol_type = other DNA
gtggccggggtgctggg

SEQ ID NO: 168397 - DNA, 17 bp, synthetic construct
  source 1..17: mol_type = other DNA
ggtggccggggtgctgg

SEQ ID NO: 168398 - DNA, 17 bp, synthetic construct
  source 1..17: mol_type = other DNA
tggtggccggggtgctg

SEQ ID NO: 168399 - DNA, 17 bp, synthetic construct
  source 1..17: mol_type = other DNA
ctggtggccggggtgct

SEQ ID NO: 168400 - DNA, 17 bp, synthetic construct
  source 1..17: mol_type = other DNA
gctggtggccggggtgc

SEQ ID NO: 168401 - DNA, 17 bp, synthetic construct
  source 1..17: mol_type = other DNA
agctggtggccggggtg

SEQ ID NO: 168402 - DNA, 17 bp, synthetic construct
  source 1..17: mol_type = other DNA
gagctggtggccggggt

SEQ ID NO: 168403 - DNA, 17 bp, synthetic construct
  source 1..17: mol_type = other DNA
agagctggtggccgggg

SEQ ID NO: 168404 - DNA, 17 bp, synthetic construct
  source 1..17: mol_type = other DNA
tagagctggtggccggg

SEQ ID NO: 168405 - DNA, 17 bp, synthetic construct
  source 1..17: mol_type = other DNA
gtagagctggtggccgg

SEQ ID NO: 168406 - DNA, 17 bp, synthetic construct
  source 1..17: mol_type = other DNA
cgtagagctggtggccg

SEQ ID NO: 168407 - DNA, 17 bp, synthetic construct
  source 1..17: mol_type = other DNA
ccgtagagctggtggcc

SEQ ID NO: 168408 - DNA, 17 bp, synthetic construct
  source 1..17: mol_type = other DNA
gccgtagagctggtggc

SEQ ID NO: 168409 - DNA, 17 bp, synthetic construct
  source 1..17: mol_type = other DNA
ggccgtagagctggtgg

SEQ ID NO: 168410 - DNA, 17 bp, synthetic construct
  source 1..17: mol_type = other DNA
tggccgtagagctggtg

SEQ ID NO: 168411 - DNA, 17 bp, synthetic construct
  source 1..17: mol_type = other DNA
atggccgtagagctggt

SEQ ID NO: 168412 - DNA, 17 bp, synthetic construct
  source 1..17: mol_type = other DNA
catggccgtagagctgg

SEQ ID NO: 168413 - DNA, 17 bp, synthetic construct
  source 1..17: mol_type = other DNA
gcatggccgtagagctg

SEQ ID NO: 168414 - DNA, 17 bp, synthetic construct
  source 1..17: mol_type = other DNA
ggcatggccgtagagct

SEQ ID NO: 168415 - DNA, 17 bp, synthetic construct
  source 1..17: mol_type = other DNA
gggcatggccgtagagc

SEQ ID NO: 168416 - DNA, 17 bp, synthetic construct
  source 1..17: mol_type = other DNA
agggcatggccgtagag

SEQ ID NO: 168417 - DNA, 17 bp, synthetic construct
  source 1..17: mol_type = other DNA
gagggcatggccgtaga

SEQ ID NO: 168418 - DNA, 17 bp, synthetic construct
  source 1..17: mol_type = other DNA
ggagggcatggccgtag

SEQ ID NO: 168419 - DNA, 17 bp, synthetic construct
  source 1..17: mol_type = other DNA
aggagggcatggccgta

SEQ ID NO: 168420 - DNA, 17 bp, synthetic construct
  source 1..17: mol_type = other DNA
gaggagggcatggccgt

SEQ ID NO: 168421 - DNA, 17 bp, synthetic construct
  source 1..17: mol_type = other DNA
ggaggagggcatggccg

SEQ ID NO: 168422 - DNA, 17 bp, synthetic construct
  source 1..17: mol_type = other DNA
tggaggagggcatggcc

SEQ ID NO: 168423 - DNA, 17 bp, synthetic construct
  source 1..17: mol_type = other DNA
gtggaggagggcatggc

SEQ ID NO: 168424 - DNA, 17 bp, synthetic construct
  source 1..17: mol_type = other DNA
agtggaggagggcatgg

SEQ ID NO: 168425 - DNA, 17 bp, synthetic construct
  source 1..17: mol_type = other DNA
gagtggaggagggcatg

SEQ ID NO: 168426 - DNA, 17 bp, synthetic construct
  source 1..17: mol_type = other DNA
ggagtggaggagggcat

SEQ ID NO: 168427 - DNA, 17 bp, synthetic construct
  source 1..17: mol_type = other DNA
cggagtggaggagggca

SEQ ID NO: 168428 - DNA, 17 bp, synthetic construct
  source 1..17: mol_type = other DNA
ccggagtggaggagggc

SEQ ID NO: 168429 - DNA, 17 bp, synthetic construct
  source 1..17: mol_type = other DNA
cccggagtggaggaggg

SEQ ID NO: 168430 - DNA, 17 bp, synthetic construct
  source 1..17: mol_type = other DNA
ccccggagtggaggagg

SEQ ID NO: 168431 - DNA, 17 bp, synthetic construct
  source 1..17: mol_type = other DNA
tccccggagtggaggag

SEQ ID NO: 168432 - DNA, 17 bp, synthetic construct
  source 1..17: mol_type = other DNA
gtccccggagtggagga

SEQ ID NO: 168433 - DNA, 17 bp, synthetic construct
  source 1..17: mol_type = other DNA
cgtccccggagtggagg

SEQ ID NO: 168434 - DNA, 17 bp, synthetic construct
  source 1..17: mol_type = other DNA
tcgtccccggagtggag

SEQ ID NO: 168435 - DNA, 17 bp, synthetic construct
  source 1..17: mol_type = other DNA
gtcgtccccggagtgga

SEQ ID NO: 168436 - DNA, 17 bp, synthetic construct
  source 1..17: mol_type = other DNA
ggtcgtccccggagtgg

SEQ ID NO: 168437 - DNA, 17 bp, synthetic construct
  source 1..17: mol_type = other DNA
aggtcgtccccggagtg

SEQ ID NO: 168438 - DNA, 17 bp, synthetic construct
  source 1..17: mol_type = other DNA
caggtcgtccccggagt

SEQ ID NO: 168439 - DNA, 17 bp, synthetic construct
  source 1..17: mol_type = other DNA
ccaggtcgtccccggag

SEQ ID NO: 168440 - DNA, 17 bp, synthetic construct
  source 1..17: mol_type = other DNA
tccaggtcgtccccgga

SEQ ID NO: 168441 - DNA, 17 bp, synthetic construct
  source 1..17: mol_type = other DNA
atccaggtcgtccccgg

SEQ ID NO: 168442 - DNA, 17 bp, synthetic construct
  source 1..17: mol_type = other DNA
gatccaggtcgtccccg

SEQ ID NO: 168443 - DNA, 17 bp, synthetic construct
  source 1..17: mol_type = other DNA
ggatccaggtcgtcccc

SEQ ID NO: 168444 - DNA, 17 bp, synthetic construct
  source 1..17: mol_type = other DNA
aggatccaggtcgtccc

SEQ ID NO: 168445 - DNA, 17 bp, synthetic construct
  source 1..17: mol_type = other DNA
gaggatccaggtcgtcc

SEQ ID NO: 168446 - DNA, 17 bp, synthetic construct
  source 1..17: mol_type = other DNA
tgaggatccaggtcgtc

SEQ ID NO: 168447 - DNA, 17 bp, synthetic construct
  source 1..17: mol_type = other DNA
gtgaggatccaggtcgt

SEQ ID NO: 168448 - DNA, 17 bp, synthetic construct
  source 1..17: mol_type = other DNA
tgtgaggatccaggtcg

SEQ ID NO: 168449 - DNA, 17 bp, synthetic construct
  source 1..17: mol_type = other DNA
ctgtgaggatccaggtc

SEQ ID NO: 168450 - DNA, 17 bp, synthetic construct
  source 1..17: mol_type = other DNA
tctgtgaggatccaggt

SEQ ID NO: 168451 - DNA, 17 bp, synthetic construct
  source 1..17: mol_type = other DNA
ctctgtgaggatccagg

SEQ ID NO: 168452 - DNA, 17 bp, synthetic construct
  source 1..17: mol_type = other DNA
gctctgtgaggatccag

SEQ ID NO: 168453 - DNA, 17 bp, synthetic construct
  source 1..17: mol_type = other DNA
agctctgtgaggatcca

SEQ ID NO: 168454 - DNA, 17 bp, synthetic construct
  source 1..17: mol_type = other DNA
cagctctgtgaggatcc

SEQ ID NO: 168455 - DNA, 17 bp, synthetic construct
  source 1..17: mol_type = other DNA
tcagctctgtgaggatc

SEQ ID NO: 168456 - DNA, 17 bp, synthetic construct
  source 1..17: mol_type = other DNA
gtcagctctgtgaggat

SEQ ID NO: 168457 - DNA, 17 bp, synthetic construct
  source 1..17: mol_type = other DNA
ggtcagctctgtgagga

SEQ ID NO: 168458 - DNA, 17 bp, synthetic construct
  source 1..17: mol_type = other DNA
tggtcagctctgtgagg

SEQ ID NO: 168459 - DNA, 17 bp, synthetic construct
  source 1..17: mol_type = other DNA
gtggtcagctctgtgag

SEQ ID NO: 168460 - DNA, 17 bp, synthetic construct
  source 1..17: mol_type = other DNA
tgtggtcagctctgtga

SEQ ID NO: 168461 - DNA, 17 bp, synthetic construct
  source 1..17: mol_type = other DNA
ttgtggtcagctctgtg

SEQ ID NO: 168462 - DNA, 17 bp, synthetic construct
  source 1..17: mol_type = other DNA
gttgtggtcagctctgt

SEQ ID NO: 168463 - DNA, 17 bp, synthetic construct
  source 1..17: mol_type = other DNA
tgttgtggtcagctctg

SEQ ID NO: 168464 - DNA, 17 bp, synthetic construct
  source 1..17: mol_type = other DNA
ctgttgtggtcagctct

SEQ ID NO: 168465 - DNA, 17 bp, synthetic construct
  source 1..17: mol_type = other DNA
gctgttgtggtcagctc

SEQ ID NO: 168466 - DNA, 17 bp, synthetic construct
  source 1..17: mol_type = other DNA
ggctgttgtggtcagct

SEQ ID NO: 168467 - DNA, 17 bp, synthetic construct
  source 1..17: mol_type = other DNA
tggctgttgtggtcagc

SEQ ID NO: 168468 - DNA, 17 bp, synthetic construct
  source 1..17: mol_type = other DNA
gtggctgttgtggtcag

SEQ ID NO: 168469 - DNA, 17 bp, synthetic construct
  source 1..17: mol_type = other DNA
agtggctgttgtggtca

SEQ ID NO: 168470 - DNA, 17 bp, synthetic construct
  source 1..17: mol_type = other DNA
tagtggctgttgtggtc

SEQ ID NO: 168471 - DNA, 17 bp, synthetic construct
  source 1..17: mol_type = other DNA
gtagtggctgttgtggt

SEQ ID NO: 168472 - DNA, 17 bp, synthetic construct
  source 1..17: mol_type = other DNA
cgtagtggctgttgtgg

SEQ ID NO: 168473 - DNA, 17 bp, synthetic construct
  source 1..17: mol_type = other DNA
tcgtagtggctgttgtg

SEQ ID NO: 168474 - DNA, 17 bp, synthetic construct
  source 1..17: mol_type = other DNA
gtcgtagtggctgttgt

SEQ ID NO: 168475 - DNA, 17 bp, synthetic construct
  source 1..17: mol_type = other DNA
agtcgtagtggctgttg

SEQ ID NO: 168476 - DNA, 17 bp, synthetic construct
  source 1..17: mol_type = other DNA
cagtcgtagtggctgtt

SEQ ID NO: 168477 - DNA, 17 bp, synthetic construct
  source 1..17: mol_type = other DNA
tcagtcgtagtggctgt

SEQ ID NO: 168478 - DNA, 17 bp, synthetic construct
  source 1..17: mol_type = other DNA
ctcagtcgtagtggctg

SEQ ID NO: 168479 - DNA, 17 bp, synthetic construct
  source 1..17: mol_type = other DNA
actcagtcgtagtggct

SEQ ID NO: 168480 - DNA, 17 bp, synthetic construct
  source 1..17: mol_type = other DNA
gactcagtcgtagtggc

SEQ ID NO: 168481 - DNA, 17 bp, synthetic construct
  source 1..17: mol_type = other DNA
ggactcagtcgtagtgg

SEQ ID NO: 168482 - DNA, 17 bp, synthetic construct
  source 1..17: mol_type = other DNA
tggactcagtcgtagtg

SEQ ID NO: 168483 - DNA, 17 bp, synthetic construct
  source 1..17: mol_type = other DNA
gtggactcagtcgtagt

SEQ ID NO: 168484 - DNA, 17 bp, synthetic construct
  source 1..17: mol_type = other DNA
agtggactcagtcgtag

SEQ ID NO: 168485 - DNA, 17 bp, synthetic construct
  source 1..17: mol_type = other DNA
cagtggactcagtcgta

SEQ ID NO: 168486 - DNA, 17 bp, synthetic construct
  source 1..17: mol_type = other DNA
ccagtggactcagtcgt

SEQ ID NO: 168487 - DNA, 17 bp, synthetic construct
  source 1..17: mol_type = other DNA
tccagtggactcagtcg

SEQ ID NO: 168488 - DNA, 17 bp, synthetic construct
  source 1..17: mol_type = other DNA
atccagtggactcagtc

SEQ ID NO: 168489 - DNA, 17 bp, synthetic construct
  source 1..17: mol_type = other DNA
gatccagtggactcagt

SEQ ID NO: 168490 - DNA, 17 bp, synthetic construct
  source 1..17: mol_type = other DNA
ggatccagtggactcag

SEQ ID NO: 168491 - DNA, 17 bp, synthetic construct
  source 1..17: mol_type = other DNA
tggatccagtggactca

SEQ ID NO: 168492 - DNA, 17 bp, synthetic construct
  source 1..17: mol_type = other DNA
gtggatccagtggactc

SEQ ID NO: 168493 - DNA, 17 bp, synthetic construct
  source 1..17: mol_type = other DNA
cgtggatccagtggact

SEQ ID NO: 168494 - DNA, 17 bp, synthetic construct
  source 1..17: mol_type = other DNA
ccgtggatccagtggac

SEQ ID NO: 168495 - DNA, 17 bp, synthetic construct
  source 1..17: mol_type = other DNA
gccgtggatccagtgga

SEQ ID NO: 168496 - DNA, 17 bp, synthetic construct
  source 1..17: mol_type = other DNA
ggccgtggatccagtgg

SEQ ID NO: 168497 - DNA, 17 bp, synthetic construct
  source 1..17: mol_type = other DNA
tggccgtggatccagtg

SEQ ID NO: 168498 - DNA, 17 bp, synthetic construct
  source 1..17: mol_type = other DNA
gtggccgtggatccagt

SEQ ID NO: 168499 - DNA, 17 bp, synthetic construct
  source 1..17: mol_type = other DNA
ggtggccgtggatccag

SEQ ID NO: 168500 - DNA, 17 bp, synthetic construct
  source 1..17: mol_type = other DNA
gggtggccgtggatcca

SEQ ID NO: 168501 - DNA, 17 bp, synthetic construct
  source 1..17: mol_type = other DNA
ggggtggccgtggatcc

SEQ ID NO: 168502 - DNA, 17 bp, synthetic construct
  source 1..17: mol_type = other DNA
cggggtggccgtggatc

SEQ ID NO: 168503 - DNA, 17 bp, synthetic construct
  source 1..17: mol_type = other DNA
acggggtggccgtggat

SEQ ID NO: 168504 - DNA, 17 bp, synthetic construct
  source 1..17: mol_type = other DNA
gacggggtggccgtgga

SEQ ID NO: 168505 - DNA, 17 bp, synthetic construct
  source 1..17: mol_type = other DNA
ggacggggtggccgtgg

SEQ ID NO: 168506 - DNA, 17 bp, synthetic construct
  source 1..17: mol_type = other DNA
aggacggggtggccgtg

SEQ ID NO: 168507 - DNA, 17 bp, synthetic construct
  source 1..17: mol_type = other DNA
gaggacggggtggccgt

SEQ ID NO: 168508 - DNA, 17 bp, synthetic construct
  source 1..17: mol_type = other DNA
ggaggacggggtggccg

SEQ ID NO: 168509 - DNA, 17 bp, synthetic construct
  source 1..17: mol_type = other DNA
tggaggacggggtggcc

SEQ ID NO: 168510 - DNA, 17 bp, synthetic construct
  source 1..17: mol_type = other DNA
gtggaggacggggtggc

SEQ ID NO: 168511 - DNA, 17 bp, synthetic construct
  source 1..17: mol_type = other DNA
ggtggaggacggggtgg

SEQ ID NO: 168512 - DNA, 17 bp, synthetic construct
  source 1..17: mol_type = other DNA
gggtggaggacggggtg

SEQ ID NO: 168513 - DNA, 17 bp, synthetic construct
  source 1..17: mol_type = other DNA
ggggtggaggacggggt

SEQ ID NO: 168514 - DNA, 17 bp, synthetic construct
  source 1..17: mol_type = other DNA
tggggtggaggacgggg

SEQ ID NO: 168515 - DNA, 17 bp, synthetic construct
  source 1..17: mol_type = other DNA
ctggggtggaggacggg

SEQ ID NO: 168516 - DNA, 17 bp, synthetic construct
  source 1..17: mol_type = other DNA
cctggggtggaggacgg

SEQ ID NO: 168517 - DNA, 17 bp, synthetic construct
  source 1..17: mol_type = other DNA
ccctggggtggaggacg

SEQ ID NO: 168518 - DNA, 17 bp, synthetic construct
  source 1..17: mol_type = other DNA
tccctggggtggaggac

SEQ ID NO: 168519 - DNA, 17 bp, synthetic construct
  source 1..17: mol_type = other DNA
gtccctggggtggagga

SEQ ID NO: 168520 - DNA, 17 bp, synthetic construct
  source 1..17: mol_type = other DNA
ggtccctggggtggagg

SEQ ID NO: 168521 - DNA, 17 bp, synthetic construct
  source 1..17: mol_type = other DNA
tggtccctggggtggag

SEQ ID NO: 168522 - DNA, 17 bp, synthetic construct
  source 1..17: mol_type = other DNA
gtggtccctggggtgga

SEQ ID NO: 168523 - DNA, 17 bp, synthetic construct
  source 1..17: mol_type = other DNA
ggtggtccctggggtgg

SEQ ID NO: 168524 - DNA, 17 bp, synthetic construct
  source 1..17: mol_type = other DNA
aggtggtccctggggtg

SEQ ID NO: 168525 - DNA, 17 bp, synthetic construct
  source 1..17: mol_type = other DNA
caggtggtccctggggt

SEQ ID NO: 168526 - DNA, 17 bp, synthetic construct
  source 1..17: mol_type = other DNA
ccaggtggtccctgggg

SEQ ID NO: 168527 - DNA, 17 bp, synthetic construct
  source 1..17: mol_type = other DNA
tccaggtggtccctggg

SEQ ID NO: 168528 - DNA, 17 bp, synthetic construct
  source 1..17: mol_type = other DNA
atccaggtggtccctgg

SEQ ID NO: 168529 - DNA, 17 bp, synthetic construct
  source 1..17: mol_type = other DNA
gatccaggtggtccctg

SEQ ID NO: 168530 - DNA, 17 bp, synthetic construct
  source 1..17: mol_type = other DNA
ggatccaggtggtccct

SEQ ID NO: 168531 - DNA, 17 bp, synthetic construct
  source 1..17: mol_type = other DNA
aggatccaggtggtccc

SEQ ID NO: 168532 - DNA, 17 bp, synthetic construct
  source 1..17: mol_type = other DNA
gaggatccaggtggtcc

SEQ ID NO: 168533 - DNA, 17 bp, synthetic construct
  source 1..17: mol_type = other DNA
tgaggatccaggtggtc

SEQ ID NO: 168534 - DNA, 17 bp, synthetic construct
  source 1..17: mol_type = other DNA
gtgaggatccaggtggt

SEQ ID NO: 168535 - DNA, 17 bp, synthetic construct
  source 1..17: mol_type = other DNA
tgtgaggatccaggtgg

SEQ ID NO: 168536 - DNA, 17 bp, synthetic construct
  source 1..17: mol_type = other DNA
ctgtgaggatccaggtg

SEQ ID NO: 168537 - DNA, 17 bp, synthetic construct
  source 1..17: mol_type = other DNA
tctgtgaggatccaggt

SEQ ID NO: 168538 - DNA, 17 bp, synthetic construct
  source 1..17: mol_type = other DNA
ctctgtgaggatccagg

SEQ ID NO: 168539 - DNA, 17 bp, synthetic construct
  source 1..17: mol_type = other DNA
gctctgtgaggatccag

SEQ ID NO: 168540 - DNA, 17 bp, synthetic construct
  source 1..17: mol_type = other DNA
ggctctgtgaggatcca

SEQ ID NO: 168541 - DNA, 17 bp, synthetic construct
  source 1..17: mol_type = other DNA
cggctctgtgaggatcc

SEQ ID NO: 168542 - DNA, 17 bp, synthetic construct
  source 1..17: mol_type = other DNA
tcggctctgtgaggatc

SEQ ID NO: 168543 - DNA, 17 bp, synthetic construct
  source 1..17: mol_type = other DNA
ctcggctctgtgaggat

SEQ ID NO: 168544 - DNA, 17 bp, synthetic construct
  source 1..17: mol_type = other DNA
gctcggctctgtgagga

SEQ ID NO: 168545 - DNA, 17 bp, synthetic construct
  source 1..17: mol_type = other DNA
tgctcggctctgtgagg

SEQ ID NO: 168546 - DNA, 17 bp, synthetic construct
  source 1..17: mol_type = other DNA
gtgctcggctctgtgag

SEQ ID NO: 168547 - DNA, 17 bp, synthetic construct
  source 1..17: mol_type = other DNA
agtgctcggctctgtga

SEQ ID NO: 168548 - DNA, 17 bp, synthetic construct
  source 1..17: mol_type = other DNA
tagtgctcggctctgtg

SEQ ID NO: 168549 - DNA, 17 bp, synthetic construct
  source 1..17: mol_type = other DNA
gtagtgctcggctctgt

SEQ ID NO: 168550 - DNA, 17 bp, synthetic construct
  source 1..17: mol_type = other DNA
tgtagtgctcggctctg

SEQ ID NO: 168551 - DNA, 17 bp, synthetic construct
  source 1..17: mol_type = other DNA
ctgtagtgctcggctct

SEQ ID NO: 168552 - DNA, 17 bp, synthetic construct
  source 1..17: mol_type = other DNA
gctgtagtgctcggctc

SEQ ID NO: 168553 - DNA, 17 bp, synthetic construct
  source 1..17: mol_type = other DNA
ggctgtagtgctcggct

SEQ ID NO: 168554 - DNA, 17 bp, synthetic construct
  source 1..17: mol_type = other DNA
tggctgtagtgctcggc

SEQ ID NO: 168555 - DNA, 17 bp, synthetic construct
  source 1..17: mol_type = other DNA
gtggctgtagtgctcgg

SEQ ID NO: 168556 - DNA, 17 bp, synthetic construct
  source 1..17: mol_type = other DNA
ggtggctgtagtgctcg

SEQ ID NO: 168557 - DNA, 17 bp, synthetic construct
  source 1..17: mol_type = other DNA
cggtggctgtagtgctc

SEQ ID NO: 168558 - DNA, 17 bp, synthetic construct
  source 1..17: mol_type = other DNA
acggtggctgtagtgct

SEQ ID NO: 168559 - DNA, 17 bp, synthetic construct
  source 1..17: mol_type = other DNA
cacggtggctgtagtgc

SEQ ID NO: 168560 - DNA, 17 bp, synthetic construct
  source 1..17: mol_type = other DNA
tcacggtggctgtagtg

SEQ ID NO: 168561 - DNA, 17 bp, synthetic construct
  source 1..17: mol_type = other DNA
gtcacggtggctgtagt

SEQ ID NO: 168562 - DNA, 17 bp, synthetic construct
  source 1..17: mol_type = other DNA
cgtcacggtggctgtag

SEQ ID NO: 168563 - DNA, 17 bp, synthetic construct
  source 1..17: mol_type = other DNA
ccgtcacggtggctgta

SEQ ID NO: 168564 - DNA, 17 bp, synthetic construct
  source 1..17: mol_type = other DNA
accgtcacggtggctgt

SEQ ID NO: 168565 - DNA, 17 bp, synthetic construct
  source 1..17: mol_type = other DNA
caccgtcacggtggctg

SEQ ID NO: 168566 - DNA, 17 bp, synthetic construct
  source 1..17: mol_type = other DNA
gcaccgtcacggtggct

SEQ ID NO: 168567 - DNA, 17 bp, synthetic construct
  source 1..17: mol_type = other DNA
ggcaccgtcacggtggc

SEQ ID NO: 168568 - DNA, 17 bp, synthetic construct
  source 1..17: mol_type = other DNA
gggcaccgtcacggtgg

SEQ ID NO: 168569 - DNA, 17 bp, synthetic construct
  source 1..17: mol_type = other DNA
tgggcaccgtcacggtg

SEQ ID NO: 168570 - DNA, 17 bp, synthetic construct
  source 1..17: mol_type = other DNA
gtgggcaccgtcacggt

SEQ ID NO: 168571 - DNA, 17 bp, synthetic construct
  source 1..17: mol_type = other DNA
ggtgggcaccgtcacgg

SEQ ID NO: 168572 - DNA, 17 bp, synthetic construct
  source 1..17: mol_type = other DNA
cggtgggcaccgtcacg

SEQ ID NO: 168573 - DNA, 17 bp, synthetic construct
  source 1..17: mol_type = other DNA
ccggtgggcaccgtcac

SEQ ID NO: 168574 - DNA, 17 bp, synthetic construct
  source 1..17: mol_type = other DNA
tccggtgggcaccgtca

SEQ ID NO: 168575 - DNA, 17 bp, synthetic construct
  source 1..17: mol_type = other DNA
atccggtgggcaccgtc

SEQ ID NO: 168576 - DNA, 17 bp, synthetic construct
  source 1..17: mol_type = other DNA
gatccggtgggcaccgt

SEQ ID NO: 168577 - DNA, 17 bp, synthetic construct
  source 1..17: mol_type = other DNA
ggatccggtgggcaccg

SEQ ID NO: 168578 - DNA, 17 bp, synthetic construct
  source 1..17: mol_type = other DNA
tggatccggtgggcacc

SEQ ID NO: 168579 - DNA, 17 bp, synthetic construct
  source 1..17: mol_type = other DNA
gtggatccggtgggcac

SEQ ID NO: 168580 - DNA, 17 bp, synthetic construct
  source 1..17: mol_type = other DNA
cgtggatccggtgggca

SEQ ID NO: 168581 - DNA, 17 bp, synthetic construct
  source 1..17: mol_type = other DNA
ccgtggatccggtgggc

SEQ ID NO: 168582 - DNA, 17 bp, synthetic construct
  source 1..17: mol_type = other DNA
gccgtggatccggtggg

SEQ ID NO: 168583 - DNA, 17 bp, synthetic construct
  source 1..17: mol_type = other DNA
ggccgtggatccggtgg

SEQ ID NO: 168584 - DNA, 17 bp, synthetic construct
  source 1..17: mol_type = other DNA
tggccgtggatccggtg

SEQ ID NO: 168585 - DNA, 17 bp, synthetic construct
  source 1..17: mol_type = other DNA
gtggccgtggatccggt

SEQ ID NO: 168586 - DNA, 17 bp, synthetic construct
  source 1..17: mol_type = other DNA
ggtggccgtggatccgg

SEQ ID NO: 168587 - DNA, 17 bp, synthetic construct
  source 1..17: mol_type = other DNA
cggtggccgtggatccg

SEQ ID NO: 168588 - DNA, 17 bp, synthetic construct
  source 1..17: mol_type = other DNA
gcggtggccgtggatcc

SEQ ID NO: 168589 - DNA, 17 bp, synthetic construct
  source 1..17: mol_type = other DNA
ggcggtggccgtggatc

SEQ ID NO: 168590 - DNA, 17 bp, synthetic construct
  source 1..17: mol_type = other DNA
aggcggtggccgtggat

SEQ ID NO: 168591 - DNA, 17 bp, synthetic construct
  source 1..17: mol_type = other DNA
gaggcggtggccgtgga

SEQ ID NO: 168592 - DNA, 17 bp, synthetic construct
  source 1..17: mol_type = other DNA
ggaggcggtggccgtgg

SEQ ID NO: 168593 - DNA, 17 bp, synthetic construct
  source 1..17: mol_type = other DNA
aggaggcggtggccgtg

SEQ ID NO: 168594 - DNA, 17 bp, synthetic construct
  source 1..17: mol_type = other DNA
gaggaggcggtggccgt

SEQ ID NO: 168595 - DNA, 17 bp, synthetic construct
  source 1..17: mol_type = other DNA
ggaggaggcggtggccg

SEQ ID NO: 168596 - DNA, 17 bp, synthetic construct
  source 1..17: mol_type = other DNA
tggaggaggcggtggcc

SEQ ID NO: 168597 - DNA, 17 bp, synthetic construct
  source 1..17: mol_type = other DNA
gtggaggaggcggtggc

SEQ ID NO: 168598 - DNA, 17 bp, synthetic construct
  source 1..17: mol_type = other DNA
ggtggaggaggcggtgg

SEQ ID NO: 168599 - DNA, 17 bp, synthetic construct
  source 1..17: mol_type = other DNA
gggtggaggaggcggtg

SEQ ID NO: 168600 - DNA, 17 bp, synthetic construct
  source 1..17: mol_type = other DNA
tgggtggaggaggcggt

SEQ ID NO: 168601 - DNA, 17 bp, synthetic construct
  source 1..17: mol_type = other DNA
ctgggtggaggaggcgg

SEQ ID NO: 168602 - DNA, 17 bp, synthetic construct
  source 1..17: mol_type = other DNA
cctgggtggaggaggcg

SEQ ID NO: 168603 - DNA, 17 bp, synthetic construct
  source 1..17: mol_type = other DNA
gcctgggtggaggaggc

SEQ ID NO: 168604 - DNA, 17 bp, synthetic construct
  source 1..17: mol_type = other DNA
tgcctgggtggaggagg

SEQ ID NO: 168605 - DNA, 17 bp, synthetic construct
  source 1..17: mol_type = other DNA
ttgcctgggtggaggag

SEQ ID NO: 168606 - DNA, 17 bp, synthetic construct
  source 1..17: mol_type = other DNA
gttgcctgggtggagga

SEQ ID NO: 168607 - DNA, 17 bp, synthetic construct
  source 1..17: mol_type = other DNA
agttgcctgggtggagg

SEQ ID NO: 168608 - DNA, 17 bp, synthetic construct
  source 1..17: mol_type = other DNA
cagttgcctgggtggag

SEQ ID NO: 168609 - DNA, 17 bp, synthetic construct
  source 1..17: mol_type = other DNA
gcagttgcctgggtgga

SEQ ID NO: 168610 - DNA, 17 bp, synthetic construct
  source 1..17: mol_type = other DNA
agcagttgcctgggtgg

SEQ ID NO: 168611 - DNA, 17 bp, synthetic construct
  source 1..17: mol_type = other DNA
cagcagttgcctgggtg

SEQ ID NO: 168612 - DNA, 17 bp, synthetic construct
  source 1..17: mol_type = other DNA
ccagcagttgcctgggt

SEQ ID NO: 168613 - DNA, 17 bp, synthetic construct
  source 1..17: mol_type = other DNA
gccagcagttgcctggg

SEQ ID NO: 168614 - DNA, 17 bp, synthetic construct
  source 1..17: mol_type = other DNA
tgccagcagttgcctgg

SEQ ID NO: 168615 - DNA, 17 bp, synthetic construct
  source 1..17: mol_type = other DNA
gtgccagcagttgcctg

SEQ ID NO: 168616 - DNA, 17 bp, synthetic construct
  source 1..17: mol_type = other DNA
ggtgccagcagttgcct

SEQ ID NO: 168617 - DNA, 17 bp, synthetic construct
  source 1..17: mol_type = other DNA
gggtgccagcagttgcc

SEQ ID NO: 168618 - DNA, 17 bp, synthetic construct
  source 1..17: mol_type = other DNA
ggggtgccagcagttgc

SEQ ID NO: 168619 - DNA, 17 bp, synthetic construct
  source 1..17: mol_type = other DNA
tggggtgccagcagttg

SEQ ID NO: 168620 - DNA, 17 bp, synthetic construct
  source 1..17: mol_type = other DNA
gtggggtgccagcagtt

SEQ ID NO: 168621 - DNA, 17 bp, synthetic construct
  source 1..17: mol_type = other DNA
tgtggggtgccagcagt

SEQ ID NO: 168622 - DNA, 17 bp, synthetic construct
  source 1..17: mol_type = other DNA
atgtggggtgccagcag

SEQ ID NO: 168623 - DNA, 17 bp, synthetic construct
  source 1..17: mol_type = other DNA
catgtggggtgccagca

SEQ ID NO: 168624 - DNA, 17 bp, synthetic construct
  source 1..17: mol_type = other DNA
acatgtggggtgccagc

SEQ ID NO: 168625 - DNA, 17 bp, synthetic construct
  source 1..17: mol_type = other DNA
cacatgtggggtgccag

SEQ ID NO: 168626 - DNA, 17 bp, synthetic construct
  source 1..17: mol_type = other DNA
tcacatgtggggtgcca

SEQ ID NO: 168627 - DNA, 17 bp, synthetic construct
  source 1..17: mol_type = other DNA
ctcacatgtggggtgcc

SEQ ID NO: 168628 - DNA, 17 bp, synthetic construct
  source 1..17: mol_type = other DNA
gctcacatgtggggtgc

SEQ ID NO: 168629 - DNA, 17 bp, synthetic construct
  source 1..17: mol_type = other DNA
tgctcacatgtggggtg

SEQ ID NO: 168630 - DNA, 17 bp, synthetic construct
  source 1..17: mol_type = other DNA
gtgctcacatgtggggt

SEQ ID NO: 168631 - DNA, 17 bp, synthetic construct
  source 1..17: mol_type = other DNA
ggtgctcacatgtgggg

SEQ ID NO: 168632 - DNA, 17 bp, synthetic construct
  source 1..17: mol_type = other DNA
tggtgctcacatgtggg

SEQ ID NO: 168633 - DNA, 17 bp, synthetic construct
  source 1..17: mol_type = other DNA
gtggtgctcacatgtgg

SEQ ID NO: 168634 - DNA, 17 bp, synthetic construct
  source 1..17: mol_type = other DNA
cgtggtgctcacatgtg

SEQ ID NO: 168635 - DNA, 17 bp, synthetic construct
  source 1..17: mol_type = other DNA
ccgtggtgctcacatgt

SEQ ID NO: 168636 - DNA, 17 bp, synthetic construct
  source 1..17: mol_type = other DNA
gccgtggtgctcacatg

SEQ ID NO: 168637 - DNA, 17 bp, synthetic construct
  source 1..17: mol_type = other DNA
ggccgtggtgctcacat

SEQ ID NO: 168638 - DNA, 17 bp, synthetic construct
  source 1..17: mol_type = other DNA
tggccgtggtgctcaca

SEQ ID NO: 168639 - DNA, 17 bp, synthetic construct
  source 1..17: mol_type = other DNA
gtggccgtggtgctcac

SEQ ID NO: 168640 - DNA, 17 bp, synthetic construct
  source 1..17: mol_type = other DNA
cgtggccgtggtgctca

SEQ ID NO: 168641 - DNA, 17 bp, synthetic construct
  source 1..17: mol_type = other DNA
tcgtggccgtggtgctc

SEQ ID NO: 168642 - DNA, 17 bp, synthetic construct
  source 1..17: mol_type = other DNA
gtcgtggccgtggtgct

SEQ ID NO: 168643 - DNA, 17 bp, synthetic construct
  source 1..17: mol_type = other DNA
tgtcgtggccgtggtgc

SEQ ID NO: 168644 - DNA, 17 bp, synthetic construct
  source 1..17: mol_type = other DNA
gtgtcgtggccgtggtg

SEQ ID NO: 168645 - DNA, 17 bp, synthetic construct
  source 1..17: mol_type = other DNA
ggtgtcgtggccgtggt

SEQ ID NO: 168646 - DNA, 17 bp, synthetic construct
  source 1..17: mol_type = other DNA
gggtgtcgtggccgtgg

SEQ ID NO: 168647 - DNA, 17 bp, synthetic construct
  source 1..17: mol_type = other DNA
tgggtgtcgtggccgtg

SEQ ID NO: 168648 - DNA, 17 bp, synthetic construct
  source 1..17: mol_type = other DNA
gtgggtgtcgtggccgt

SEQ ID NO: 168649 - DNA, 17 bp, synthetic construct
  source 1..17: mol_type = other DNA
tgtgggtgtcgtggccg

SEQ ID NO: 168650 - DNA, 17 bp, synthetic construct
  source 1..17: mol_type = other DNA
ctgtgggtgtcgtggcc

SEQ ID NO: 168651 - DNA, 17 bp, synthetic construct
  source 1..17: mol_type = other DNA
actgtgggtgtcgtggc

SEQ ID NO: 168652 - DNA, 17 bp, synthetic construct
  source 1..17: mol_type = other DNA
gactgtgggtgtcgtgg

SEQ ID NO: 168653 - DNA, 17 bp, synthetic construct
  source 1..17: mol_type = other DNA
tgactgtgggtgtcgtg

SEQ ID NO: 168654 - DNA, 17 bp, synthetic construct
  source 1..17: mol_type = other DNA
gtgactgtgggtgtcgt

SEQ ID NO: 168655 - DNA, 17 bp, synthetic construct
  source 1..17: mol_type = other DNA
ggtgactgtgggtgtcg

SEQ ID NO: 168656 - DNA, 17 bp, synthetic construct
  source 1..17: mol_type = other DNA
tggtgactgtgggtgtc

SEQ ID NO: 168657 - DNA, 17 bp, synthetic construct
  source 1..17: mol_type = other DNA
ctggtgactgtgggtgt

SEQ ID NO: 168658 - DNA, 17 bp, synthetic construct
  source 1..17: mol_type = other DNA
gctggtgactgtgggtg

SEQ ID NO: 168659 - DNA, 17 bp, synthetic construct
  source 1..17: mol_type = other DNA
agctggtgactgtgggt

SEQ ID NO: 168660 - DNA, 17 bp, synthetic construct
  source 1..17: mol_type = other DNA
gagctggtgactgtggg

SEQ ID NO: 168661 - DNA, 17 bp, synthetic construct
  source 1..17: mol_type = other DNA
ggagctggtgactgtgg

SEQ ID NO: 168662 - DNA, 17 bp, synthetic construct
  source 1..17: mol_type = other DNA
tggagctggtgactgtg

SEQ ID NO: 168663 - DNA, 17 bp, synthetic construct
  source 1..17: mol_type = other DNA
ttggagctggtgactgt

SEQ ID NO: 168664 - DNA, 17 bp, synthetic construct
  source 1..17: mol_type = other DNA
tttggagctggtgactg

SEQ ID NO: 168665 - DNA, 17 bp, synthetic construct
  source 1..17: mol_type = other DNA
ctttggagctggtgact

SEQ ID NO: 168666 - DNA, 17 bp, synthetic construct
  source 1..17: mol_type = other DNA
gctttggagctggtgac

SEQ ID NO: 168667 - DNA, 17 bp, synthetic construct
  source 1..17: mol_type = other DNA
ggctttggagctggtga

SEQ ID NO: 168668 - DNA, 17 bp, synthetic construct
  source 1..17: mol_type = other DNA
tggctttggagctggtg

SEQ ID NO: 168669 - DNA, 17 bp, synthetic construct
  source 1..17: mol_type = other DNA
gtggctttggagctggt

SEQ ID NO: 168670 - DNA, 17 bp, synthetic construct
  source 1..17: mol_type = other DNA
agtggctttggagctgg

SEQ ID NO: 168671 - DNA, 17 bp, synthetic construct
  source 1..17: mol_type = other DNA
gagtggctttggagctg

SEQ ID NO: 168672 - DNA, 17 bp, synthetic construct
  source 1..17: mol_type = other DNA
ggagtggctttggagct

SEQ ID NO: 168673 - DNA, 17 bp, synthetic construct
  source 1..17: mol_type = other DNA
gggagtggctttggagc

SEQ ID NO: 168674 - DNA, 17 bp, synthetic construct
  source 1..17: mol_type = other DNA
agggagtggctttggag

SEQ ID NO: 168675 - DNA, 17 bp, synthetic construct
  source 1..17: mol_type = other DNA
aagggagtggctttgga

SEQ ID NO: 168676 - DNA, 17 bp, synthetic construct
  source 1..17: mol_type = other DNA
gaagggagtggctttgg

SEQ ID NO: 168677 - DNA, 17 bp, synthetic construct
  source 1..17: mol_type = other DNA
agaagggagtggctttg

SEQ ID NO: 168678 - DNA, 17 bp, synthetic construct
  source 1..17: mol_type = other DNA
gagaagggagtggcttt

SEQ ID NO: 168679 - DNA, 17 bp, synthetic construct
  source 1..17: mol_type = other DNA
ggagaagggagtggctt

SEQ ID NO: 168680 - DNA, 17 bp, synthetic construct
  source 1..17: mol_type = other DNA
tggagaagggagtggct

SEQ ID NO: 168681 - DNA, 17 bp, synthetic construct
  source 1..17: mol_type = other DNA
ctggagaagggagtggc

SEQ ID NO: 168682 - DNA, 17 bp, synthetic construct
  source 1..17: mol_type = other DNA
actggagaagggagtgg

SEQ ID NO: 168683 - DNA, 17 bp, synthetic construct
  source 1..17: mol_type = other DNA
gactggagaagggagtg

SEQ ID NO: 168684 - DNA, 17 bp, synthetic construct
  source 1..17: mol_type = other DNA
ggactggagaagggagt

SEQ ID NO: 168685 - DNA, 17 bp, synthetic construct
  source 1..17: mol_type = other DNA
tggactggagaagggag

SEQ ID NO: 168686 - DNA, 17 bp, synthetic construct
  source 1..17: mol_type = other DNA
ctggactggagaaggga

SEQ ID NO: 168687 - DNA, 17 bp, synthetic construct
  source 1..17: mol_type = other DNA
cctggactggagaaggg

SEQ ID NO: 168688 - DNA, 17 bp, synthetic construct
  source 1..17: mol_type = other DNA
ccctggactggagaagg

SEQ ID NO: 168689 - DNA, 17 bp, synthetic construct
  source 1..17: mol_type = other DNA
tccctggactggagaag

SEQ ID NO: 168690 - DNA, 17 bp, synthetic construct
  source 1..17: mol_type = other DNA
gtccctggactggagaa

SEQ ID NO: 168691 - DNA, 17 bp, synthetic construct
  source 1..17: mol_type = other DNA
agtccctggactggaga

SEQ ID NO: 168692 - DNA, 17 bp, synthetic construct
  source 1..17: mol_type = other DNA
cagtccctggactggag

SEQ ID NO: 168693 - DNA, 17 bp, synthetic construct
  source 1..17: mol_type = other DNA
gcagtccctggactgga

SEQ ID NO: 168694 - DNA, 17 bp, synthetic construct
  source 1..17: mol_type = other DNA
tgcagtccctggactgg

SEQ ID NO: 168695 - DNA, 17 bp, synthetic construct
  source 1..17: mol_type = other DNA
ttgcagtccctggactg

SEQ ID NO: 168696 - DNA, 17 bp, synthetic construct
  source 1..17: mol_type = other DNA
gttgcagtccctggact

SEQ ID NO: 168697 - DNA, 17 bp, synthetic construct
  source 1..17: mol_type = other DNA
ggttgcagtccctggac

SEQ ID NO: 168698 - DNA, 17 bp, synthetic construct
  source 1..17: mol_type = other DNA
cggttgcagtccctgga

SEQ ID NO: 168699 - DNA, 17 bp, synthetic construct
  source 1..17: mol_type = other DNA
gcggttgcagtccctgg

SEQ ID NO: 168700 - DNA, 17 bp, synthetic construct
  source 1..17: mol_type = other DNA
ggcggttgcagtccctg

SEQ ID NO: 168701 - DNA, 17 bp, synthetic construct
  source 1..17: mol_type = other DNA
gggcggttgcagtccct

SEQ ID NO: 168702 - DNA, 17 bp, synthetic construct
  source 1..17: mol_type = other DNA
agggcggttgcagtccc

SEQ ID NO: 168703 - DNA, 17 bp, synthetic construct
  source 1..17: mol_type = other DNA
aagggcggttgcagtcc

SEQ ID NO: 168704 - DNA, 17 bp, synthetic construct
  source 1..17: mol_type = other DNA
gaagggcggttgcagtc

SEQ ID NO: 168705 - DNA, 17 bp, synthetic construct
  source 1..17: mol_type = other DNA
ggaagggcggttgcagt

SEQ ID NO: 168706 - DNA, 17 bp, synthetic construct
  source 1..17: mol_type = other DNA
tggaagggcggttgcag

SEQ ID NO: 168707 - DNA, 17 bp, synthetic construct
  source 1..17: mol_type = other DNA
ctggaagggcggttgca

SEQ ID NO: 168708 - DNA, 17 bp, synthetic construct
  source 1..17: mol_type = other DNA
gctggaagggcggttgc

SEQ ID NO: 168709 - DNA, 17 bp, synthetic construct
  source 1..17: mol_type = other DNA
tgctggaagggcggttg

SEQ ID NO: 168710 - DNA, 17 bp, synthetic construct
  source 1..17: mol_type = other DNA
gtgctggaagggcggtt

SEQ ID NO: 168711 - DNA, 17 bp, synthetic construct
  source 1..17: mol_type = other DNA
agtgctggaagggcggt

SEQ ID NO: 168712 - DNA, 17 bp, synthetic construct
  source 1..17: mol_type = other DNA
cagtgctggaagggcgg

SEQ ID NO: 168713 - DNA, 17 bp, synthetic construct
  source 1..17: mol_type = other DNA
tcagtgctggaagggcg

SEQ ID NO: 168714 - DNA, 17 bp, synthetic construct
  source 1..17: mol_type = other DNA
ctcagtgctggaagggc

SEQ ID NO: 168715 - DNA, 17 bp, synthetic construct
  source 1..17: mol_type = other DNA
tctcagtgctggaaggg

SEQ ID NO: 168716 - DNA, 17 bp, synthetic construct
  source 1..17: mol_type = other DNA
ttctcagtgctggaagg

SEQ ID NO: 168717 - DNA, 17 bp, synthetic construct
  source 1..17: mol_type = other DNA
cttctcagtgctggaag

SEQ ID NO: 168718 - DNA, 17 bp, synthetic construct
  source 1..17: mol_type = other DNA
gcttctcagtgctggaa

SEQ ID NO: 168719 - DNA, 17 bp, synthetic construct
  source 1..17: mol_type = other DNA
tgcttctcagtgctgga

SEQ ID NO: 168720 - DNA, 17 bp, synthetic construct
  source 1..17: mol_type = other DNA
gtgcttctcagtgctgg

SEQ ID NO: 168721 - DNA, 17 bp, synthetic construct
  source 1..17: mol_type = other DNA
tgtgcttctcagtgctg

SEQ ID NO: 168722 - DNA, 17 bp, synthetic construct
  source 1..17: mol_type = other DNA
ctgtgcttctcagtgct

SEQ ID NO: 168723 - DNA, 17 bp, synthetic construct
  source 1..17: mol_type = other DNA
gctgtgcttctcagtgc

SEQ ID NO: 168724 - DNA, 17 bp, synthetic construct
  source 1..17: mol_type = other DNA
ggctgtgcttctcagtg

SEQ ID NO: 168725 - DNA, 17 bp, synthetic construct
  source 1..17: mol_type = other DNA
tggctgtgcttctcagt

SEQ ID NO: 168726 - DNA, 17 bp, synthetic construct
  source 1..17: mol_type = other DNA
gtggctgtgcttctcag

SEQ ID NO: 168727 - DNA, 17 bp, synthetic construct
  source 1..17: mol_type = other DNA
ggtggctgtgcttctca

SEQ ID NO: 168728 - DNA, 17 bp, synthetic construct
  source 1..17: mol_type = other DNA
tggtggctgtgcttctc

SEQ ID NO: 168729 - DNA, 17 bp, synthetic construct
  source 1..17: mol_type = other DNA
gtggtggctgtgcttct

SEQ ID NO: 168730 - DNA, 17 bp, synthetic construct
  source 1..17: mol_type = other DNA
tgtggtggctgtgcttc

SEQ ID NO: 168731 - DNA, 17 bp, synthetic construct
  source 1..17: mol_type = other DNA
gtgtggtggctgtgctt

SEQ ID NO: 168732 - DNA, 17 bp, synthetic construct
  source 1..17: mol_type = other DNA
ggtgtggtggctgtgct

SEQ ID NO: 168733 - DNA, 17 bp, synthetic construct
  source 1..17: mol_type = other DNA
gggtgtggtggctgtgc

SEQ ID NO: 168734 - DNA, 17 bp, synthetic construct
  source 1..17: mol_type = other DNA
tgggtgtggtggctgtg

SEQ ID NO: 168735 - DNA, 17 bp, synthetic construct
  source 1..17: mol_type = other DNA
gtgggtgtggtggctgt

SEQ ID NO: 168736 - DNA, 17 bp, synthetic construct
  source 1..17: mol_type = other DNA
tgtgggtgtggtggctg

SEQ ID NO: 168737 - DNA, 17 bp, synthetic construct
  source 1..17: mol_type = other DNA
ctgtgggtgtggtggct

SEQ ID NO: 168738 - DNA, 17 bp, synthetic construct
  source 1..17: mol_type = other DNA
gctgtgggtgtggtggc

SEQ ID NO: 168739 - DNA, 17 bp, synthetic construct
  source 1..17: mol_type = other DNA
agctgtgggtgtggtgg

SEQ ID NO: 168740 - DNA, 17 bp, synthetic construct
  source 1..17: mol_type = other DNA
tagctgtgggtgtggtg

SEQ ID NO: 168741 - DNA, 17 bp, synthetic construct
  source 1..17: mol_type = other DNA
gtagctgtgggtgtggt

SEQ ID NO: 168742 - DNA, 17 bp, synthetic construct
  source 1..17: mol_type = other DNA
ggtagctgtgggtgtgg

SEQ ID NO: 168743 - DNA, 17 bp, synthetic construct
  source 1..17: mol_type = other DNA
tggtagctgtgggtgtg

SEQ ID NO: 168744 - DNA, 17 bp, synthetic construct
  source 1..17: mol_type = other DNA
ctggtagctgtgggtgt

SEQ ID NO: 168745 - DNA, 17 bp, synthetic construct
  source 1..17: mol_type = other DNA
gctggtagctgtgggtg

SEQ ID NO: 168746 - DNA, 17 bp, synthetic construct
  source 1..17: mol_type = other DNA
agctggtagctgtgggt

SEQ ID NO: 168747 - DNA, 17 bp, synthetic construct
  source 1..17: mol_type = other DNA
aagctggtagctgtggg

SEQ ID NO: 168748 - DNA, 17 bp, synthetic construct
  source 1..17: mol_type = other DNA
aaagctggtagctgtgg

SEQ ID NO: 168749 - DNA, 17 bp, synthetic construct
  source 1..17: mol_type = other DNA
taaagctggtagctgtg

SEQ ID NO: 168750 - DNA, 17 bp, synthetic construct
  source 1..17: mol_type = other DNA
gtaaagctggtagctgt

SEQ ID NO: 168751 - DNA, 17 bp, synthetic construct
  source 1..17: mol_type = other DNA
tgtaaagctggtagctg

SEQ ID NO: 168752 - DNA, 17 bp, synthetic construct
  source 1..17: mol_type = other DNA
ctgtaaagctggtagct

SEQ ID NO: 168753 - DNA, 17 bp, synthetic construct
  source 1..17: mol_type = other DNA
gctgtaaagctggtagc

SEQ ID NO: 168754 - DNA, 17 bp, synthetic construct
  source 1..17: mol_type = other DNA
ggctgtaaagctggtag

SEQ ID NO: 168755 - DNA, 17 bp, synthetic construct
  source 1..17: mol_type = other DNA
tggctgtaaagctggta

SEQ ID NO: 168756 - DNA, 17 bp, synthetic construct
  source 1..17: mol_type = other DNA
atggctgtaaagctggt

SEQ ID NO: 168757 - DNA, 17 bp, synthetic construct
  source 1..17: mol_type = other DNA
gatggctgtaaagctgg

SEQ ID NO: 168758 - DNA, 17 bp, synthetic construct
  source 1..17: mol_type = other DNA
ggatggctgtaaagctg

SEQ ID NO: 168759 - DNA, 17 bp, synthetic construct
  source 1..17: mol_type = other DNA
gggatggctgtaaagct

SEQ ID NO: 168760 - DNA, 17 bp, synthetic construct
  source 1..17: mol_type = other DNA
ggggatggctgtaaagc

SEQ ID NO: 168761 - DNA, 17 bp, synthetic construct
  source 1..17: mol_type = other DNA
aggggatggctgtaaag

SEQ ID NO: 168762 - DNA, 17 bp, synthetic construct
  source 1..17: mol_type = other DNA
gaggggatggctgtaaa

SEQ ID NO: 168763 - DNA, 17 bp, synthetic construct
  source 1..17: mol_type = other DNA
ggaggggatggctgtaa

SEQ ID NO: 168764 - DNA, 17 bp, synthetic construct
  source 1..17: mol_type = other DNA
aggaggggatggctgta

SEQ ID NO: 168765 - DNA, 17 bp, synthetic construct
  source 1..17: mol_type = other DNA
gaggaggggatggctgt

SEQ ID NO: 168766 - DNA, 17 bp, synthetic construct
  source 1..17: mol_type = other DNA
ggaggaggggatggctg

SEQ ID NO: 168767 - DNA, 17 bp, synthetic construct
  source 1..17: mol_type = other DNA
aggaggaggggatggct

SEQ ID NO: 168768 - DNA, 17 bp, synthetic construct
  source 1..17: mol_type = other DNA
gaggaggaggggatggc

SEQ ID NO: 168769 - DNA, 17 bp, synthetic construct
  source 1..17: mol_type = other DNA
ggaggaggaggggatgg

SEQ ID NO: 168770 - DNA, 17 bp, synthetic construct
  source 1..17: mol_type = other DNA
gggaggaggaggggatg

SEQ ID NO: 168771 - DNA, 17 bp, synthetic construct
  source 1..17: mol_type = other DNA
agggaggaggaggggat

SEQ ID NO: 168772 - DNA, 17 bp, synthetic construct
  source 1..17: mol_type = other DNA
cagggaggaggagggga

SEQ ID NO: 168773 - DNA, 17 bp, synthetic construct
  source 1..17: mol_type = other DNA
ccagggaggaggagggg

SEQ ID NO: 168774 - DNA, 17 bp, synthetic construct
  source 1..17: mol_type = other DNA
cccagggaggaggaggg

SEQ ID NO: 168775 - DNA, 17 bp, synthetic construct
  source 1..17: mol_type = other DNA
gcccagggaggaggagg

SEQ ID NO: 168776 - DNA, 17 bp, synthetic construct
  source 1..17: mol_type = other DNA
tgcccagggaggaggag

SEQ ID NO: 168777 - DNA, 17 bp, synthetic construct
  source 1..17: mol_type = other DNA
gtgcccagggaggagga

SEQ ID NO: 168778 - DNA, 17 bp, synthetic construct
  source 1..17: mol_type = other DNA
ggtgcccagggaggagg

SEQ ID NO: 168779 - DNA, 17 bp, synthetic construct
  source 1..17: mol_type = other DNA
tggtgcccagggaggag

SEQ ID NO: 168780 - DNA, 17 bp, synthetic construct
  source 1..17: mol_type = other DNA
gtggtgcccagggagga

SEQ ID NO: 168781 - DNA, 17 bp, synthetic construct
  source 1..17: mol_type = other DNA
ggtggtgcccagggagg

SEQ ID NO: 168782 - DNA, 17 bp, synthetic construct
  source 1..17: mol_type = other DNA
aggtggtgcccagggag

SEQ ID NO: 168783 - DNA, 17 bp, synthetic construct
  source 1..17: mol_type = other DNA
caggtggtgcccaggga

SEQ ID NO: 168784 - DNA, 17 bp, synthetic construct
  source 1..17: mol_type = other DNA
ccaggtggtgcccaggg

SEQ ID NO: 168785 - DNA, 17 bp, synthetic construct
  source 1..17: mol_type = other DNA
tccaggtggtgcccagg

SEQ ID NO: 168786 - DNA, 17 bp, synthetic construct
  source 1..17: mol_type = other DNA
gtccaggtggtgcccag

SEQ ID NO: 168787 - DNA, 17 bp, synthetic construct
  source 1..17: mol_type = other DNA
ggtccaggtggtgccca

SEQ ID NO: 168788 - DNA, 17 bp, synthetic construct
  source 1..17: mol_type = other DNA
gggtccaggtggtgccc

SEQ ID NO: 168789 - DNA, 17 bp, synthetic construct
  source 1..17: mol_type = other DNA
cgggtccaggtggtgcc

SEQ ID NO: 168790 - DNA, 17 bp, synthetic construct
  source 1..17: mol_type = other DNA
gcgggtccaggtggtgc

SEQ ID NO: 168791 - DNA, 17 bp, synthetic construct
  source 1..17: mol_type = other DNA
ggcgggtccaggtggtg

SEQ ID NO: 168792 - DNA, 17 bp, synthetic construct
  source 1..17: mol_type = other DNA
aggcgggtccaggtggt

SEQ ID NO: 168793 - DNA, 17 bp, synthetic construct
  source 1..17: mol_type = other DNA
taggcgggtccaggtgg

SEQ ID NO: 168794 - DNA, 17 bp, synthetic construct
  source 1..17: mol_type = other DNA
ataggcgggtccaggtg

SEQ ID NO: 168795 - DNA, 17 bp, synthetic construct
  source 1..17: mol_type = other DNA
gataggcgggtccaggt

SEQ ID NO: 168796 - DNA, 17 bp, synthetic construct
  source 1..17: mol_type = other DNA
tgataggcgggtccagg

SEQ ID NO: 168797 - DNA, 17 bp, synthetic construct
  source 1..17: mol_type = other DNA
gtgataggcgggtccag

SEQ ID NO: 168798 - DNA, 17 bp, synthetic construct
  source 1..17: mol_type = other DNA
tgtgataggcgggtcca

SEQ ID NO: 168799 - DNA, 17 bp, synthetic construct
  source 1..17: mol_type = other DNA
ctgtgataggcgggtcc

SEQ ID NO: 168800 - DNA, 17 bp, synthetic construct
  source 1..17: mol_type = other DNA
tctgtgataggcgggtc

SEQ ID NO: 168801 - DNA, 17 bp, synthetic construct
  source 1..17: mol_type = other DNA
gtctgtgataggcgggt

SEQ ID NO: 168802 - DNA, 17 bp, synthetic construct
  source 1..17: mol_type = other DNA
ggtctgtgataggcggg

SEQ ID NO: 168803 - DNA, 17 bp, synthetic construct
  source 1..17: mol_type = other DNA
tggtctgtgataggcgg

SEQ ID NO: 168804 - DNA, 17 bp, synthetic construct
  source 1..17: mol_type = other DNA
gtggtctgtgataggcg

SEQ ID NO: 168805 - DNA, 17 bp, synthetic construct
  source 1..17: mol_type = other DNA
ggtggtctgtgataggc

SEQ ID NO: 168806 - DNA, 17 bp, synthetic construct
  source 1..17: mol_type = other DNA
tggtggtctgtgatagg

SEQ ID NO: 168807 - DNA, 17 bp, synthetic construct
  source 1..17: mol_type = other DNA
gtggtggtctgtgatag

SEQ ID NO: 168808 - DNA, 17 bp, synthetic construct
  source 1..17: mol_type = other DNA
tgtggtggtctgtgata

SEQ ID NO: 168809 - DNA, 17 bp, synthetic construct
  source 1..17: mol_type = other DNA
gtgtggtggtctgtgat

SEQ ID NO: 168810 - DNA, 17 bp, synthetic construct
  source 1..17: mol_type = other DNA
ggtgtggtggtctgtga

SEQ ID NO: 168811 - DNA, 17 bp, synthetic construct
  source 1..17: mol_type = other DNA
gggtgtggtggtctgtg

SEQ ID NO: 168812 - DNA, 17 bp, synthetic construct
  source 1..17: mol_type = other DNA
tgggtgtggtggtctgt

SEQ ID NO: 168813 - DNA, 17 bp, synthetic construct
  source 1..17: mol_type = other DNA
gtgggtgtggtggtctg

SEQ ID NO: 168814 - DNA, 17 bp, synthetic construct
  source 1..17: mol_type = other DNA
cgtgggtgtggtggtct

SEQ ID NO: 168815 - DNA, 17 bp, synthetic construct
  source 1..17: mol_type = other DNA
ccgtgggtgtggtggtc

SEQ ID NO: 168816 - DNA, 17 bp, synthetic construct
  source 1..17: mol_type = other DNA
gccgtgggtgtggtggt

SEQ ID NO: 168817 - DNA, 17 bp, synthetic construct
  source 1..17: mol_type = other DNA
ggccgtgggtgtggtgg

SEQ ID NO: 168818 - DNA, 17 bp, synthetic construct
  source 1..17: mol_type = other DNA
tggccgtgggtgtggtg

SEQ ID NO: 168819 - DNA, 17 bp, synthetic construct
  source 1..17: mol_type = other DNA
gtggccgtgggtgtggt

SEQ ID NO: 168820 - DNA, 17 bp, synthetic construct
  source 1..17: mol_type = other DNA
ggtggccgtgggtgtgg

SEQ ID NO: 168821 - DNA, 17 bp, synthetic construct
  source 1..17: mol_type = other DNA
tggtggccgtgggtgtg

SEQ ID NO: 168822 - DNA, 17 bp, synthetic construct
  source 1..17: mol_type = other DNA
atggtggccgtgggtgt

SEQ ID NO: 168823 - DNA, 17 bp, synthetic construct
  source 1..17: mol_type = other DNA
catggtggccgtgggtg

SEQ ID NO: 168824 - DNA, 17 bp, synthetic construct
  source 1..17: mol_type = other DNA
acatggtggccgtgggt

SEQ ID NO: 168825 - DNA, 17 bp, synthetic construct
  source 1..17: mol_type = other DNA
gacatggtggccgtggg

SEQ ID NO: 168826 - DNA, 17 bp, synthetic construct
  source 1..17: mol_type = other DNA
ggacatggtggccgtgg

SEQ ID NO: 168827 - DNA, 17 bp, synthetic construct
  source 1..17: mol_type = other DNA
tggacatggtggccgtg

SEQ ID NO: 168828 - DNA, 17 bp, synthetic construct
  source 1..17: mol_type = other DNA
gtggacatggtggccgt

SEQ ID NO: 168829 - DNA, 17 bp, synthetic construct
  source 1..17: mol_type = other DNA
tgtggacatggtggccg

SEQ ID NO: 168830 - DNA, 17 bp, synthetic construct
  source 1..17: mol_type = other DNA
ctgtggacatggtggcc

SEQ ID NO: 168831 - DNA, 17 bp, synthetic construct
  source 1..17: mol_type = other DNA
gctgtggacatggtggc

SEQ ID NO: 168832 - DNA, 17 bp, synthetic construct
  source 1..17: mol_type = other DNA
ggctgtggacatggtgg

SEQ ID NO: 168833 - DNA, 17 bp, synthetic construct
  source 1..17: mol_type = other DNA
tggctgtggacatggtg

SEQ ID NO: 168834 - DNA, 17 bp, synthetic construct
  source 1..17: mol_type = other DNA
gtggctgtggacatggt

SEQ ID NO: 168835 - DNA, 17 bp, synthetic construct
  source 1..17: mol_type = other DNA
tgtggctgtggacatgg

SEQ ID NO: 168836 - DNA, 17 bp, synthetic construct
  source 1..17: mol_type = other DNA
gtgtggctgtggacatg

SEQ ID NO: 168837 - DNA, 17 bp, synthetic construct
  source 1..17: mol_type = other DNA
ggtgtggctgtggacat

SEQ ID NO: 168838 - DNA, 17 bp, synthetic construct
  source 1..17: mol_type = other DNA
gggtgtggctgtggaca

SEQ ID NO: 168839 - DNA, 17 bp, synthetic construct
  source 1..17: mol_type = other DNA
agggtgtggctgtggac

SEQ ID NO: 168840 - DNA, 17 bp, synthetic construct
  source 1..17: mol_type = other DNA
gagggtgtggctgtgga

SEQ ID NO: 168841 - DNA, 17 bp, synthetic construct
  source 1..17: mol_type = other DNA
ggagggtgtggctgtgg

SEQ ID NO: 168842 - DNA, 17 bp, synthetic construct
  source 1..17: mol_type = other DNA
aggagggtgtggctgtg

SEQ ID NO: 168843 - DNA, 17 bp, synthetic construct
  source 1..17: mol_type = other DNA
gaggagggtgtggctgt

SEQ ID NO: 168844 - DNA, 17 bp, synthetic construct
  source 1..17: mol_type = other DNA
ggaggagggtgtggctg

SEQ ID NO: 168845 - DNA, 17 bp, synthetic construct
  source 1..17: mol_type = other DNA
tggaggagggtgtggct

SEQ ID NO: 168846 - DNA, 17 bp, synthetic construct
  source 1..17: mol_type = other DNA
gtggaggagggtgtggc

SEQ ID NO: 168847 - DNA, 17 bp, synthetic construct
  source 1..17: mol_type = other DNA
agtggaggagggtgtgg

SEQ ID NO: 168848 - DNA, 17 bp, synthetic construct
  source 1..17: mol_type = other DNA
gagtggaggagggtgtg

SEQ ID NO: 168849 - DNA, 17 bp, synthetic construct
  source 1..17: mol_type = other DNA
ggagtggaggagggtgt

SEQ ID NO: 168850 - DNA, 17 bp, synthetic construct
  source 1..17: mol_type = other DNA
tggagtggaggagggtg

SEQ ID NO: 168851 - DNA, 17 bp, synthetic construct
  source 1..17: mol_type = other DNA
ctggagtggaggagggt

SEQ ID NO: 168852 - DNA, 17 bp, synthetic construct
  source 1..17: mol_type = other DNA
tctggagtggaggaggg

SEQ ID NO: 168853 - DNA, 17 bp, synthetic construct
  source 1..17: mol_type = other DNA
ctctggagtggaggagg

SEQ ID NO: 168854 - DNA, 17 bp, synthetic construct
  source 1..17: mol_type = other DNA
tctctggagtggaggag

SEQ ID NO: 168855 - DNA, 17 bp, synthetic construct
  source 1..17: mol_type = other DNA
gtctctggagtggagga

SEQ ID NO: 168856 - DNA, 17 bp, synthetic construct
  source 1..17: mol_type = other DNA
agtctctggagtggagg

SEQ ID NO: 168857 - DNA, 17 bp, synthetic construct
  source 1..17: mol_type = other DNA
cagtctctggagtggag

SEQ ID NO: 168858 - DNA, 17 bp, synthetic construct
  source 1..17: mol_type = other DNA
acagtctctggagtgga

SEQ ID NO: 168859 - DNA, 17 bp, synthetic construct
  source 1..17: mol_type = other DNA
gacagtctctggagtgg

SEQ ID NO: 168860 - DNA, 17 bp, synthetic construct
  source 1..17: mol_type = other DNA
ggacagtctctggagtg

SEQ ID NO: 168861 - DNA, 17 bp, synthetic construct
  source 1..17: mol_type = other DNA
tggacagtctctggagt

SEQ ID NO: 168862 - DNA, 17 bp, synthetic construct
  source 1..17: mol_type = other DNA
gtggacagtctctggag

SEQ ID NO: 168863 - DNA, 17 bp, synthetic construct
  source 1..17: mol_type = other DNA
tgtggacagtctctgga

SEQ ID NO: 168864 - DNA, 17 bp, synthetic construct
  source 1..17: mol_type = other DNA
gtgtggacagtctctgg

SEQ ID NO: 168865 - DNA, 17 bp, synthetic construct
  source 1..17: mol_type = other DNA
ggtgtggacagtctctg

SEQ ID NO: 168866 - DNA, 17 bp, synthetic construct
  source 1..17: mol_type = other DNA
aggtgtggacagtctct

SEQ ID NO: 168867 - DNA, 17 bp, synthetic construct
  source 1..17: mol_type = other DNA
gaggtgtggacagtctc

SEQ ID NO: 168868 - DNA, 17 bp, synthetic construct
  source 1..17: mol_type = other DNA
ggaggtgtggacagtct

SEQ ID NO: 168869 - DNA, 17 bp, synthetic construct
  source 1..17: mol_type = other DNA
tggaggtgtggacagtc

SEQ ID NO: 168870 - DNA, 17 bp, synthetic construct
  source 1..17: mol_type = other DNA
gtggaggtgtggacagt

SEQ ID NO: 168871 - DNA, 17 bp, synthetic construct
  source 1..17: mol_type = other DNA
tgtggaggtgtggacag

SEQ ID NO: 168872 - DNA, 17 bp, synthetic construct
  source 1..17: mol_type = other DNA
ctgtggaggtgtggaca

SEQ ID NO: 168873 - DNA, 17 bp, synthetic construct
  source 1..17: mol_type = other DNA
actgtggaggtgtggac

SEQ ID NO: 168874 - DNA, 17 bp, synthetic construct
  source 1..17: mol_type = other DNA
cactgtggaggtgtgga

SEQ ID NO: 168875 - DNA, 17 bp, synthetic construct
  source 1..17: mol_type = other DNA
gcactgtggaggtgtgg

SEQ ID NO: 168876 - DNA, 17 bp, synthetic construct
  source 1..17: mol_type = other DNA
agcactgtggaggtgtg

SEQ ID NO: 168877 - DNA, 17 bp, synthetic construct
  source 1..17: mol_type = other DNA
aagcactgtggaggtgt

SEQ ID NO: 168878 - DNA, 17 bp, synthetic construct
  source 1..17: mol_type = other DNA
taagcactgtggaggtg

SEQ ID NO: 168879 - DNA, 17 bp, synthetic construct
  source 1..17: mol_type = other DNA
gtaagcactgtggaggt

SEQ ID NO: 168880 - DNA, 17 bp, synthetic construct
  source 1..17: mol_type = other DNA
ggtaagcactgtggagg

SEQ ID NO: 168881 - DNA, 17 bp, synthetic construct
  source 1..17: mol_type = other DNA
tggtaagcactgtggag

SEQ ID NO: 168882 - DNA, 17 bp, synthetic construct
  source 1..17: mol_type = other DNA
gtggtaagcactgtgga

SEQ ID NO: 168883 - DNA, 17 bp, synthetic construct
  source 1..17: mol_type = other DNA
ggtggtaagcactgtgg

SEQ ID NO: 168884 - DNA, 17 bp, synthetic construct
  source 1..17: mol_type = other DNA
tggtggtaagcactgtg

SEQ ID NO: 168885 - DNA, 17 bp, synthetic construct
  source 1..17: mol_type = other DNA
gtggtggtaagcactgt

SEQ ID NO: 168886 - DNA, 17 bp, synthetic construct
  source 1..17: mol_type = other DNA
cgtggtggtaagcactg

SEQ ID NO: 168887 - DNA, 17 bp, synthetic construct
  source 1..17: mol_type = other DNA
ccgtggtggtaagcact

SEQ ID NO: 168888 - DNA, 17 bp, synthetic construct
  source 1..17: mol_type = other DNA
gccgtggtggtaagcac

SEQ ID NO: 168889 - DNA, 17 bp, synthetic construct
  source 1..17: mol_type = other DNA
ggccgtggtggtaagca

SEQ ID NO: 168890 - DNA, 17 bp, synthetic construct
  source 1..17: mol_type = other DNA
tggccgtggtggtaagc

SEQ ID NO: 168891 - DNA, 17 bp, synthetic construct
  source 1..17: mol_type = other DNA
gtggccgtggtggtaag

SEQ ID NO: 168892 - DNA, 17 bp, synthetic construct
  source 1..17: mol_type = other DNA
ggtggccgtggtggtaa

SEQ ID NO: 168893 - DNA, 17 bp, synthetic construct
  source 1..17: mol_type = other DNA
tggtggccgtggtggta

SEQ ID NO: 168894 - DNA, 17 bp, synthetic construct
  source 1..17: mol_type = other DNA
gtggtggccgtggtggt

SEQ ID NO: 168895 - DNA, 17 bp, synthetic construct
  source 1..17: mol_type = other DNA
tgtggtggccgtggtgg

SEQ ID NO: 168896 - DNA, 17 bp, synthetic construct
  source 1..17: mol_type = other DNA
ttgtggtggccgtggtg

SEQ ID NO: 168897 - DNA, 17 bp, synthetic construct
  source 1..17: mol_type = other DNA
gttgtggtggccgtggt

SEQ ID NO: 168898 - DNA, 17 bp, synthetic construct
  source 1..17: mol_type = other DNA
ggttgtggtggccgtgg

SEQ ID NO: 168899 - DNA, 17 bp, synthetic construct
  source 1..17: mol_type = other DNA
cggttgtggtggccgtg

SEQ ID NO: 168900 - DNA, 17 bp, synthetic construct
  source 1..17: mol_type = other DNA
ccggttgtggtggccgt

SEQ ID NO: 168901 - DNA, 17 bp, synthetic construct
  source 1..17: mol_type = other DNA
cccggttgtggtggccg

SEQ ID NO: 168902 - DNA, 17 bp, synthetic construct
  source 1..17: mol_type = other DNA
ccccggttgtggtggcc

SEQ ID NO: 168903 - DNA, 17 bp, synthetic construct
  source 1..17: mol_type = other DNA
gccccggttgtggtggc

SEQ ID NO: 168904 - DNA, 17 bp, synthetic construct
  source 1..17: mol_type = other DNA
ggccccggttgtggtgg

SEQ ID NO: 168905 - DNA, 17 bp, synthetic construct
  source 1..17: mol_type = other DNA
tggccccggttgtggtg

SEQ ID NO: 168906 - DNA, 17 bp, synthetic construct
  source 1..17: mol_type = other DNA
gtggccccggttgtggt

SEQ ID NO: 168907 - DNA, 17 bp, synthetic construct
  source 1..17: mol_type = other DNA
ggtggccccggttgtgg

SEQ ID NO: 168908 - DNA, 17 bp, synthetic construct
  source 1..17: mol_type = other DNA
cggtggccccggttgtg

SEQ ID NO: 168909 - DNA, 17 bp, synthetic construct
  source 1..17: mol_type = other DNA
ccggtggccccggttgt

SEQ ID NO: 168910 - DNA, 17 bp, synthetic construct
  source 1..17: mol_type = other DNA
gccggtggccccggttg

SEQ ID NO: 168911 - DNA, 17 bp, synthetic construct
  source 1..17: mol_type = other DNA
agccggtggccccggtt

SEQ ID NO: 168912 - DNA, 17 bp, synthetic construct
  source 1..17: mol_type = other DNA
gagccggtggccccggt

SEQ ID NO: 168913 - DNA, 17 bp, synthetic construct
  source 1..17: mol_type = other DNA
agagccggtggccccgg

SEQ ID NO: 168914 - DNA, 17 bp, synthetic construct
  source 1..17: mol_type = other DNA
cagagccggtggccccg

SEQ ID NO: 168915 - DNA, 17 bp, synthetic construct
  source 1..17: mol_type = other DNA
acagagccggtggcccc

SEQ ID NO: 168916 - DNA, 17 bp, synthetic construct
  source 1..17: mol_type = other DNA
cacagagccggtggccc

SEQ ID NO: 168917 - DNA, 17 bp, synthetic construct
  source 1..17: mol_type = other DNA
ccacagagccggtggcc

SEQ ID NO: 168918 - DNA, 17 bp, synthetic construct
  source 1..17: mol_type = other DNA
gccacagagccggtggc

SEQ ID NO: 168919 - DNA, 17 bp, synthetic construct
  source 1..17: mol_type = other DNA
ggccacagagccggtgg

SEQ ID NO: 168920 - DNA, 17 bp, synthetic construct
  source 1..17: mol_type = other DNA
tggccacagagccggtg

SEQ ID NO: 168921 - DNA, 17 bp, synthetic construct
  source 1..17: mol_type = other DNA
gtggccacagagccggt

SEQ ID NO: 168922 - DNA, 17 bp, synthetic construct
  source 1..17: mol_type = other DNA
ggtggccacagagccgg

SEQ ID NO: 168923 - DNA, 17 bp, synthetic construct
  source 1..17: mol_type = other DNA
gggtggccacagagccg

SEQ ID NO: 168924 - DNA, 17 bp, synthetic construct
  source 1..17: mol_type = other DNA
ggggtggccacagagcc

SEQ ID NO: 168925 - DNA, 17 bp, synthetic construct
  source 1..17: mol_type = other DNA
gggggtggccacagagc

SEQ ID NO: 168926 - DNA, 17 bp, synthetic construct
  source 1..17: mol_type = other DNA
agggggtggccacagag

SEQ ID NO: 168927 - DNA, 17 bp, synthetic construct
  source 1..17: mol_type = other DNA
gagggggtggccacaga

SEQ ID NO: 168928 - DNA, 17 bp, synthetic construct
  source 1..17: mol_type = other DNA
ggagggggtggccacag

SEQ ID NO: 168929 - DNA, 17 bp, synthetic construct
  source 1..17: mol_type = other DNA
aggagggggtggccaca

SEQ ID NO: 168930 - DNA, 17 bp, synthetic construct
  source 1..17: mol_type = other DNA
gaggagggggtggccac

SEQ ID NO: 168931 - DNA, 17 bp, synthetic construct
  source 1..17: mol_type = other DNA
ggaggagggggtggcca

SEQ ID NO: 168932 - DNA, 17 bp, synthetic construct
  source 1..17: mol_type = other DNA
tggaggagggggtggcc

SEQ ID NO: 168933 - DNA, 17 bp, synthetic construct
  source 1..17: mol_type = other DNA
gtggaggagggggtggc

SEQ ID NO: 168934 - DNA, 17 bp, synthetic construct
  source 1..17: mol_type = other DNA
ggtggaggagggggtgg

SEQ ID NO: 168935 - DNA, 17 bp, synthetic construct
  source 1..17: mol_type = other DNA
gggtggaggagggggtg

SEQ ID NO: 168936 - DNA, 17 bp, synthetic construct
  source 1..17: mol_type = other DNA
ggggtggaggagggggt

SEQ ID NO: 168937 - DNA, 17 bp, synthetic construct
  source 1..17: mol_type = other DNA
tggggtggaggaggggg

SEQ ID NO: 168938 - DNA, 17 bp, synthetic construct
  source 1..17: mol_type = other DNA
ctggggtggaggagggg

SEQ ID NO: 168939 - DNA, 17 bp, synthetic construct
  source 1..17: mol_type = other DNA
cctggggtggaggaggg

SEQ ID NO: 168940 - DNA, 17 bp, synthetic construct
  source 1..17: mol_type = other DNA
tcctggggtggaggagg

SEQ ID NO: 168941 - DNA, 17 bp, synthetic construct
  source 1..17: mol_type = other DNA
ttcctggggtggaggag

SEQ ID NO: 168942 - DNA, 17 bp, synthetic construct
  source 1..17: mol_type = other DNA
gttcctggggtggagga

SEQ ID NO: 168943 - DNA, 17 bp, synthetic construct
  source 1..17: mol_type = other DNA
tgttcctggggtggagg

SEQ ID NO: 168944 - DNA, 17 bp, synthetic construct
  source 1..17: mol_type = other DNA
ctgttcctggggtggag

SEQ ID NO: 168945 - DNA, 17 bp, synthetic construct
  source 1..17: mol_type = other DNA
gctgttcctggggtgga

SEQ ID NO: 168946 - DNA, 17 bp, synthetic construct
  source 1..17: mol_type = other DNA
agctgttcctggggtgg

SEQ ID NO: 168947 - DNA, 17 bp, synthetic construct
  source 1..17: mol_type = other DNA
gagctgttcctggggtg

SEQ ID NO: 168948 - DNA, 17 bp, synthetic construct
  source 1..17: mol_type = other DNA
tgagctgttcctggggt

SEQ ID NO: 168949 - DNA, 17 bp, synthetic construct
  source 1..17: mol_type = other DNA
gtgagctgttcctgggg

SEQ ID NO: 168950 - DNA, 17 bp, synthetic construct
  source 1..17: mol_type = other DNA
tgtgagctgttcctggg

SEQ ID NO: 168951 - DNA, 17 bp, synthetic construct
  source 1..17: mol_type = other DNA
gtgtgagctgttcctgg

SEQ ID NO: 168952 - DNA, 17 bp, synthetic construct
  source 1..17: mol_type = other DNA
agtgtgagctgttcctg

SEQ ID NO: 168953 - DNA, 17 bp, synthetic construct
  source 1..17: mol_type = other DNA
tagtgtgagctgttcct

SEQ ID NO: 168954 - DNA, 17 bp, synthetic construct
  source 1..17: mol_type = other DNA
gtagtgtgagctgttcc

SEQ ID NO: 168955 - DNA, 17 bp, synthetic construct
  source 1..17: mol_type = other DNA
ggtagtgtgagctgttc

SEQ ID NO: 168956 - DNA, 17 bp, synthetic construct
  source 1..17: mol_type = other DNA
tggtagtgtgagctgtt

SEQ ID NO: 168957 - DNA, 17 bp, synthetic construct
  source 1..17: mol_type = other DNA
ttggtagtgtgagctgt

SEQ ID NO: 168958 - DNA, 17 bp, synthetic construct
  source 1..17: mol_type = other DNA
tttggtagtgtgagctg

SEQ ID NO: 168959 - DNA, 17 bp, synthetic construct
  source 1..17: mol_type = other DNA
ctttggtagtgtgagct

SEQ ID NO: 168960 - DNA, 17 bp, synthetic construct
  source 1..17: mol_type = other DNA
actttggtagtgtgagc

SEQ ID NO: 168961 - DNA, 17 bp, synthetic construct
  source 1..17: mol_type = other DNA
cactttggtagtgtgag

SEQ ID NO: 168962 - DNA, 17 bp, synthetic construct
  source 1..17: mol_type = other DNA
gcactttggtagtgtga

SEQ ID NO: 168963 - DNA, 17 bp, synthetic construct
  source 1..17: mol_type = other DNA
agcactttggtagtgtg

SEQ ID NO: 168964 - DNA, 17 bp, synthetic construct
  source 1..17: mol_type = other DNA
cagcactttggtagtgt

SEQ ID NO: 168965 - DNA, 17 bp, synthetic construct
  source 1..17: mol_type = other DNA
tcagcactttggtagtg

SEQ ID NO: 168966 - DNA, 17 bp, synthetic construct
  source 1..17: mol_type = other DNA
gtcagcactttggtagt

SEQ ID NO: 168967 - DNA, 17 bp, synthetic construct
  source 1..17: mol_type = other DNA
agtcagcactttggtag

SEQ ID NO: 168968 - DNA, 17 bp, synthetic construct
  source 1..17: mol_type = other DNA
tagtcagcactttggta

SEQ ID NO: 168969 - DNA, 17 bp, synthetic construct
  source 1..17: mol_type = other DNA
gtagtcagcactttggt

SEQ ID NO: 168970 - DNA, 17 bp, synthetic construct
  source 1..17: mol_type = other DNA
ggtagtcagcactttgg

SEQ ID NO: 168971 - DNA, 17 bp, synthetic construct
  source 1..17: mol_type = other DNA
tggtagtcagcactttg

SEQ ID NO: 168972 - DNA, 17 bp, synthetic construct
  source 1..17: mol_type = other DNA
gtggtagtcagcacttt

SEQ ID NO: 168973 - DNA, 17 bp, synthetic construct
  source 1..17: mol_type = other DNA
tgtggtagtcagcactt

SEQ ID NO: 168974 - DNA, 17 bp, synthetic construct
  source 1..17: mol_type = other DNA
ttgtggtagtcagcact

SEQ ID NO: 168975 - DNA, 17 bp, synthetic construct
  source 1..17: mol_type = other DNA
gttgtggtagtcagcac

SEQ ID NO: 168976 - DNA, 17 bp, synthetic construct
  source 1..17: mol_type = other DNA
ggttgtggtagtcagca

SEQ ID NO: 168977 - DNA, 17 bp, synthetic construct
  source 1..17: mol_type = other DNA
tggttgtggtagtcagc

SEQ ID NO: 168978 - DNA, 17 bp, synthetic construct
  source 1..17: mol_type = other DNA
gtggttgtggtagtcag

SEQ ID NO: 168979 - DNA, 17 bp, synthetic construct
  source 1..17: mol_type = other DNA
cgtggttgtggtagtca

SEQ ID NO: 168980 - DNA, 17 bp, synthetic construct
  source 1..17: mol_type = other DNA
ccgtggttgtggtagtc

SEQ ID NO: 168981 - DNA, 17 bp, synthetic construct
  source 1..17: mol_type = other DNA
cccgtggttgtggtagt

SEQ ID NO: 168982 - DNA, 17 bp, synthetic construct
  source 1..17: mol_type = other DNA
gcccgtggttgtggtag

SEQ ID NO: 168983 - DNA, 17 bp, synthetic construct
  source 1..17: mol_type = other DNA
agcccgtggttgtggta

SEQ ID NO: 168984 - DNA, 17 bp, synthetic construct
  source 1..17: mol_type = other DNA
aagcccgtggttgtggt

SEQ ID NO: 168985 - DNA, 17 bp, synthetic construct
  source 1..17: mol_type = other DNA
gaagcccgtggttgtgg

SEQ ID NO: 168986 - DNA, 17 bp, synthetic construct
  source 1..17: mol_type = other DNA
tgaagcccgtggttgtg

SEQ ID NO: 168987 - DNA, 17 bp, synthetic construct
  source 1..17: mol_type = other DNA
gtgaagcccgtggttgt

SEQ ID NO: 168988 - DNA, 17 bp, synthetic construct
  source 1..17: mol_type = other DNA
tgtgaagcccgtggttg

SEQ ID NO: 168989 - DNA, 17 bp, synthetic construct
  source 1..17: mol_type = other DNA
ctgtgaagcccgtggtt

SEQ ID NO: 168990 - DNA, 17 bp, synthetic construct
  source 1..17: mol_type = other DNA
gctgtgaagcccgtggt

SEQ ID NO: 168991 - DNA, 17 bp, synthetic construct
  source 1..17: mol_type = other DNA
ggctgtgaagcccgtgg

SEQ ID NO: 168992 - DNA, 17 bp, synthetic construct
  source 1..17: mol_type = other DNA
tggctgtgaagcccgtg

SEQ ID NO: 168993 - DNA, 17 bp, synthetic construct
  source 1..17: mol_type = other DNA
gtggctgtgaagcccgt

SEQ ID NO: 168994 - DNA, 17 bp, synthetic construct
  source 1..17: mol_type = other DNA
ggtggctgtgaagcccg

SEQ ID NO: 168995 - DNA, 17 bp, synthetic construct
  source 1..17: mol_type = other DNA
gggtggctgtgaagccc

SEQ ID NO: 168996 - DNA, 17 bp, synthetic construct
  source 1..17: mol_type = other DNA
ggggtggctgtgaagcc

SEQ ID NO: 168997 - DNA, 17 bp, synthetic construct
  source 1..17: mol_type = other DNA
gggggtggctgtgaagc

SEQ ID NO: 168998 - DNA, 17 bp, synthetic construct
  source 1..17: mol_type = other DNA
agggggtggctgtgaag

SEQ ID NO: 168999 - DNA, 17 bp, synthetic construct
  source 1..17: mol_type = other DNA
gagggggtggctgtgaa

SEQ ID NO: 169000 - DNA, 17 bp, synthetic construct
  source 1..17: mol_type = other DNA
ggagggggtggctgtga

SEQ ID NO: 169001 - DNA, 17 bp, synthetic construct
  source 1..17: mol_type = other DNA
aggagggggtggctgtg

SEQ ID NO: 169002 - DNA, 17 bp, synthetic construct
  source 1..17: mol_type = other DNA
gaggagggggtggctgt

SEQ ID NO: 169003 - DNA, 17 bp, synthetic construct
  source 1..17: mol_type = other DNA
ggaggagggggtggctg

SEQ ID NO: 169004 - DNA, 17 bp, synthetic construct
  source 1..17: mol_type = other DNA
tggaggagggggtggct

SEQ ID NO: 169005 - DNA, 17 bp, synthetic construct
  source 1..17: mol_type = other DNA
ctggaggagggggtggc

SEQ ID NO: 169006 - DNA, 17 bp, synthetic construct
  source 1..17: mol_type = other DNA
gctggaggagggggtgg

SEQ ID NO: 169007 - DNA, 17 bp, synthetic construct
  source 1..17: mol_type = other DNA
ggctggaggagggggtg

SEQ ID NO: 169008 - DNA, 17 bp, synthetic construct
  source 1..17: mol_type = other DNA
gggctggaggagggggt

SEQ ID NO: 169009 - DNA, 17 bp, synthetic construct
  source 1..17: mol_type = other DNA
tgggctggaggaggggg

SEQ ID NO: 169010 - DNA, 17 bp, synthetic construct
  source 1..17: mol_type = other DNA
ctgggctggaggagggg

SEQ ID NO: 169011 - DNA, 17 bp, synthetic construct
  source 1..17: mol_type = other DNA
cctgggctggaggaggg

SEQ ID NO: 169012 - DNA, 17 bp, synthetic construct
  source 1..17: mol_type = other DNA
ccctgggctggaggagg

SEQ ID NO: 169013 - DNA, 17 bp, synthetic construct
  source 1..17: mol_type = other DNA
tccctgggctggaggag

SEQ ID NO: 169014 - DNA, 17 bp, synthetic construct
  source 1..17: mol_type = other DNA
gtccctgggctggagga

SEQ ID NO: 169015 - DNA, 17 bp, synthetic construct
  source 1..17: mol_type = other DNA
cgtccctgggctggagg

SEQ ID NO: 169016 - DNA, 17 bp, synthetic construct
  source 1..17: mol_type = other DNA
ccgtccctgggctggag

SEQ ID NO: 169017 - DNA, 17 bp, synthetic construct
  source 1..17: mol_type = other DNA
gccgtccctgggctgga

SEQ ID NO: 169018 - DNA, 17 bp, synthetic construct
  source 1..17: mol_type = other DNA
tgccgtccctgggctgg

SEQ ID NO: 169019 - DNA, 17 bp, synthetic construct
  source 1..17: mol_type = other DNA
gtgccgtccctgggctg

SEQ ID NO: 169020 - DNA, 17 bp, synthetic construct
  source 1..17: mol_type = other DNA
cgtgccgtccctgggct

SEQ ID NO: 169021 - DNA, 17 bp, synthetic construct
  source 1..17: mol_type = other DNA
gcgtgccgtccctgggc

SEQ ID NO: 169022 - DNA, 17 bp, synthetic construct
  source 1..17: mol_type = other DNA
tgcgtgccgtccctggg

SEQ ID NO: 169023 - DNA, 17 bp, synthetic construct
  source 1..17: mol_type = other DNA
gtgcgtgccgtccctgg

SEQ ID NO: 169024 - DNA, 17 bp, synthetic construct
  source 1..17: mol_type = other DNA
cgtgcgtgccgtccctg

SEQ ID NO: 169025 - DNA, 17 bp, synthetic construct
  source 1..17: mol_type = other DNA
gcgtgcgtgccgtccct

SEQ ID NO: 169026 - DNA, 17 bp, synthetic construct
  source 1..17: mol_type = other DNA
agcgtgcgtgccgtccc

SEQ ID NO: 169027 - DNA, 17 bp, synthetic construct
  source 1..17: mol_type = other DNA
aagcgtgcgtgccgtcc

SEQ ID NO: 169028 - DNA, 17 bp, synthetic construct
  source 1..17: mol_type = other DNA
gaagcgtgcgtgccgtc

SEQ ID NO: 169029 - DNA, 17 bp, synthetic construct
  source 1..17: mol_type = other DNA
ggaagcgtgcgtgccgt

SEQ ID NO: 169030 - DNA, 17 bp, synthetic construct
  source 1..17: mol_type = other DNA
tggaagcgtgcgtgccg

SEQ ID NO: 169031 - DNA, 17 bp, synthetic construct
  source 1..17: mol_type = other DNA
ctggaagcgtgcgtgcc

SEQ ID NO: 169032 - DNA, 17 bp, synthetic construct
  source 1..17: mol_type = other DNA
actggaagcgtgcgtgc

SEQ ID NO: 169033 - DNA, 17 bp, synthetic construct
  source 1..17: mol_type = other DNA
cactggaagcgtgcgtg

SEQ ID NO: 169034 - DNA, 17 bp, synthetic construct
  source 1..17: mol_type = other DNA
acactggaagcgtgcgt

SEQ ID NO: 169035 - DNA, 17 bp, synthetic construct
  source 1..17: mol_type = other DNA
cacactggaagcgtgcg

SEQ ID NO: 169036 - DNA, 17 bp, synthetic construct
  source 1..17: mol_type = other DNA
ccacactggaagcgtgc

SEQ ID NO: 169037 - DNA, 17 bp, synthetic construct
  source 1..17: mol_type = other DNA
tccacactggaagcgtg

SEQ ID NO: 169038 - DNA, 17 bp, synthetic construct
  source 1..17: mol_type = other DNA
atccacactggaagcgt

SEQ ID NO: 169039 - DNA, 17 bp, synthetic construct
  source 1..17: mol_type = other DNA
gatccacactggaagcg

SEQ ID NO: 169040 - DNA, 17 bp, synthetic construct
  source 1..17: mol_type = other DNA
tgatccacactggaagc

SEQ ID NO: 169041 - DNA, 17 bp, synthetic construct
  source 1..17: mol_type = other DNA
ctgatccacactggaag

SEQ ID NO: 169042 - DNA, 17 bp, synthetic construct
  source 1..17: mol_type = other DNA
gctgatccacactggaa

SEQ ID NO: 169043 - DNA, 17 bp, synthetic construct
  source 1..17: mol_type = other DNA
tgctgatccacactgga

SEQ ID NO: 169044 - DNA, 17 bp, synthetic construct
  source 1..17: mol_type = other DNA
gtgctgatccacactgg

SEQ ID NO: 169045 - DNA, 17 bp, synthetic construct
  source 1..17: mol_type = other DNA
tgtgctgatccacactg

SEQ ID NO: 169046 - DNA, 17 bp, synthetic construct
  source 1..17: mol_type = other DNA
ttgtgctgatccacact

SEQ ID NO: 169047 - DNA, 17 bp, synthetic construct
  source 1..17: mol_type = other DNA
gttgtgctgatccacac

SEQ ID NO: 169048 - DNA, 17 bp, synthetic construct
  source 1..17: mol_type = other DNA
ggttgtgctgatccaca

SEQ ID NO: 169049 - DNA, 17 bp, synthetic construct
  source 1..17: mol_type = other DNA
tggttgtgctgatccac

SEQ ID NO: 169050 - DNA, 17 bp, synthetic construct
  source 1..17: mol_type = other DNA
gtggttgtgctgatcca

SEQ ID NO: 169051 - DNA, 17 bp, synthetic construct
  source 1..17: mol_type = other DNA
ggtggttgtgctgatcc

SEQ ID NO: 169052 - DNA, 17 bp, synthetic construct
  source 1..17: mol_type = other DNA
tggtggttgtgctgatc

SEQ ID NO: 169053 - DNA, 17 bp, synthetic construct
  source 1..17: mol_type = other DNA
gtggtggttgtgctgat

SEQ ID NO: 169054 - DNA, 17 bp, synthetic construct
  source 1..17: mol_type = other DNA
tgtggtggttgtgctga

SEQ ID NO: 169055 - DNA, 17 bp, synthetic construct
  source 1..17: mol_type = other DNA
gtgtggtggttgtgctg

SEQ ID NO: 169056 - DNA, 17 bp, synthetic construct
  source 1..17: mol_type = other DNA
ggtgtggtggttgtgct

SEQ ID NO: 169057 - DNA, 17 bp, synthetic construct
  source 1..17: mol_type = other DNA
gggtgtggtggttgtgc

SEQ ID NO: 169058 - DNA, 17 bp, synthetic construct
  source 1..17: mol_type = other DNA
tgggtgtggtggttgtg

SEQ ID NO: 169059 - DNA, 17 bp, synthetic construct
  source 1..17: mol_type = other DNA
gtgggtgtggtggttgt

SEQ ID NO: 169060 - DNA, 17 bp, synthetic construct
  source 1..17: mol_type = other DNA
tgtgggtgtggtggttg

SEQ ID NO: 169061 - DNA, 17 bp, synthetic construct
  source 1..17: mol_type = other DNA
ttgtgggtgtggtggtt

SEQ ID NO: 169062 - DNA, 17 bp, synthetic construct
  source 1..17: mol_type = other DNA
gttgtgggtgtggtggt

SEQ ID NO: 169063 - DNA, 17 bp, synthetic construct
  source 1..17: mol_type = other DNA
ggttgtgggtgtggtgg

SEQ ID NO: 169064 - DNA, 17 bp, synthetic construct
  source 1..17: mol_type = other DNA
tggttgtgggtgtggtg

SEQ ID NO: 169065 - DNA, 17 bp, synthetic construct
  source 1..17: mol_type = other DNA
ctggttgtgggtgtggt

SEQ ID NO: 169066 - DNA, 17 bp, synthetic construct
  source 1..17: mol_type = other DNA
tctggttgtgggtgtgg

SEQ ID NO: 169067 - DNA, 17 bp, synthetic construct
  source 1..17: mol_type = other DNA
ctctggttgtgggtgtg

SEQ ID NO: 169068 - DNA, 17 bp, synthetic construct
  source 1..17: mol_type = other DNA
cctctggttgtgggtgt

SEQ ID NO: 169069 - DNA, 17 bp, synthetic construct
  source 1..17: mol_type = other DNA
acctctggttgtgggtg

SEQ ID NO: 169070 - DNA, 17 bp, synthetic construct
  source 1..17: mol_type = other DNA
aacctctggttgtgggt

SEQ ID NO: 169071 - DNA, 17 bp, synthetic construct
  source 1..17: mol_type = other DNA
gaacctctggttgtggg

SEQ ID NO: 169072 - DNA, 17 bp, synthetic construct
  source 1..17: mol_type = other DNA
ggaacctctggttgtgg

SEQ ID NO: 169073 - DNA, 17 bp, synthetic construct
  source 1..17: mol_type = other DNA
tggaacctctggttgtg

SEQ ID NO: 169074 - DNA, 17 bp, synthetic construct
  source 1..17: mol_type = other DNA
gtggaacctctggttgt

SEQ ID NO: 169075 - DNA, 17 bp, synthetic construct
  source 1..17: mol_type = other DNA
cgtggaacctctggttg

SEQ ID NO: 169076 - DNA, 17 bp, synthetic construct
  source 1..17: mol_type = other DNA
ccgtggaacctctggtt

SEQ ID NO: 169077 - DNA, 17 bp, synthetic construct
  source 1..17: mol_type = other DNA
accgtggaacctctggt

SEQ ID NO: 169078 - DNA, 17 bp, synthetic construct
  source 1..17: mol_type = other DNA
caccgtggaacctctgg

SEQ ID NO: 169079 - DNA, 17 bp, synthetic construct
  source 1..17: mol_type = other DNA
tcaccgtggaacctctg

SEQ ID NO: 169080 - DNA, 17 bp, synthetic construct
  source 1..17: mol_type = other DNA
gtcaccgtggaacctct

SEQ ID NO: 169081 - DNA, 17 bp, synthetic construct
  source 1..17: mol_type = other DNA
ggtcaccgtggaacctc

SEQ ID NO: 169082 - DNA, 17 bp, synthetic construct
  source 1..17: mol_type = other DNA
gggtcaccgtggaacct

SEQ ID NO: 169083 - DNA, 17 bp, synthetic construct
  source 1..17: mol_type = other DNA
ggggtcaccgtggaacc

SEQ ID NO: 169084 - DNA, 17 bp, synthetic construct
  source 1..17: mol_type = other DNA
gggggtcaccgtggaac

SEQ ID NO: 169085 - DNA, 17 bp, synthetic construct
  source 1..17: mol_type = other DNA
agggggtcaccgtggaa

SEQ ID NO: 169086 - DNA, 17 bp, synthetic construct
  source 1..17: mol_type = other DNA
gagggggtcaccgtgga

SEQ ID NO: 169087 - DNA, 17 bp, synthetic construct
  source 1..17: mol_type = other DNA
ggagggggtcaccgtgg

SEQ ID NO: 169088 - DNA, 17 bp, synthetic construct
  source 1..17: mol_type = other DNA
aggagggggtcaccgtg

SEQ ID NO: 169089 - DNA, 17 bp, synthetic construct
  source 1..17: mol_type = other DNA
gaggagggggtcaccgt

SEQ ID NO: 169090 - DNA, 17 bp, synthetic construct
  source 1..17: mol_type = other DNA
ggaggagggggtcaccg

SEQ ID NO: 169091 - DNA, 17 bp, synthetic construct
  source 1..17: mol_type = other DNA
tggaggagggggtcacc

SEQ ID NO: 169092 - DNA, 17 bp, synthetic construct
  source 1..17: mol_type = other DNA
atggaggagggggtcac

SEQ ID NO: 169093 - DNA, 17 bp, synthetic construct
  source 1..17: mol_type = other DNA
gatggaggagggggtca

SEQ ID NO: 169094 - DNA, 17 bp, synthetic construct
  source 1..17: mol_type = other DNA
ggatggaggagggggtc

SEQ ID NO: 169095 - DNA, 17 bp, synthetic construct
  source 1..17: mol_type = other DNA
gggatggaggagggggt

SEQ ID NO: 169096 - DNA, 17 bp, synthetic construct
  source 1..17: mol_type = other DNA
cgggatggaggaggggg

SEQ ID NO: 169097 - DNA, 17 bp, synthetic construct
  source 1..17: mol_type = other DNA
ccgggatggaggagggg

SEQ ID NO: 169098 - DNA, 17 bp, synthetic construct
  source 1..17: mol_type = other DNA
cccgggatggaggaggg

SEQ ID NO: 169099 - DNA, 17 bp, synthetic construct
  source 1..17: mol_type = other DNA
ccccgggatggaggagg

SEQ ID NO: 169100 - DNA, 17 bp, synthetic construct
  source 1..17: mol_type = other DNA
tccccgggatggaggag

SEQ ID NO: 169101 - DNA, 17 bp, synthetic construct
  source 1..17: mol_type = other DNA
gtccccgggatggagga

SEQ ID NO: 169102 - DNA, 17 bp, synthetic construct
  source 1..17: mol_type = other DNA
ggtccccgggatggagg

SEQ ID NO: 169103 - DNA, 17 bp, synthetic construct
  source 1..17: mol_type = other DNA
tggtccccgggatggag

SEQ ID NO: 169104 - DNA, 17 bp, synthetic construct
  source 1..17: mol_type = other DNA
gtggtccccgggatgga

SEQ ID NO: 169105 - DNA, 17 bp, synthetic construct
  source 1..17: mol_type = other DNA
ggtggtccccgggatgg

SEQ ID NO: 169106 - DNA, 17 bp, synthetic construct
  source 1..17: mol_type = other DNA
gggtggtccccgggatg

SEQ ID NO: 169107 - DNA, 17 bp, synthetic construct
  source 1..17: mol_type = other DNA
tgggtggtccccgggat

SEQ ID NO: 169108 - DNA, 17 bp, synthetic construct
  source 1..17: mol_type = other DNA
gtgggtggtccccggga

SEQ ID NO: 169109 - DNA, 17 bp, synthetic construct
  source 1..17: mol_type = other DNA
tgtgggtggtccccggg

SEQ ID NO: 169110 - DNA, 17 bp, synthetic construct
  source 1..17: mol_type = other DNA
gtgtgggtggtccccgg

SEQ ID NO: 169111 - DNA, 17 bp, synthetic construct
  source 1..17: mol_type = other DNA
ggtgtgggtggtccccg

SEQ ID NO: 169112 - DNA, 17 bp, synthetic construct
  source 1..17: mol_type = other DNA
gggtgtgggtggtcccc

SEQ ID NO: 169113 - DNA, 17 bp, synthetic construct
  source 1..17: mol_type = other DNA
ggggtgtgggtggtccc

SEQ ID NO: 169114 - DNA, 17 bp, synthetic construct
  source 1..17: mol_type = other DNA
gggggtgtgggtggtcc

SEQ ID NO: 169115 - DNA, 17 bp, synthetic construct
  source 1..17: mol_type = other DNA
tgggggtgtgggtggtc

SEQ ID NO: 169116 - DNA, 17 bp, synthetic construct
  source 1..17: mol_type = other DNA
gtgggggtgtgggtggt

SEQ ID NO: 169117 - DNA, 17 bp, synthetic construct
  source 1..17: mol_type = other DNA
tgtgggggtgtgggtgg

SEQ ID NO: 169118 - DNA, 17 bp, synthetic construct
  source 1..17: mol_type = other DNA
ctgtgggggtgtgggtg

SEQ ID NO: 169119 - DNA, 17 bp, synthetic construct
  source 1..17: mol_type = other DNA
actgtgggggtgtgggt

SEQ ID NO: 169120 - DNA, 17 bp, synthetic construct
  source 1..17: mol_type = other DNA
cactgtgggggtgtggg

SEQ ID NO: 169121 - DNA, 17 bp, synthetic construct
  source 1..17: mol_type = other DNA
gcactgtgggggtgtgg

SEQ ID NO: 169122 - DNA, 17 bp, synthetic construct
  source 1..17: mol_type = other DNA
agcactgtgggggtgtg

SEQ ID NO: 169123 - DNA, 17 bp, synthetic construct
  source 1..17: mol_type = other DNA
cagcactgtgggggtgt

SEQ ID NO: 169124 - DNA, 17 bp, synthetic construct
  source 1..17: mol_type = other DNA
tcagcactgtgggggtg

SEQ ID NO: 169125 - DNA, 17 bp, synthetic construct
  source 1..17: mol_type = other DNA
gtcagcactgtgggggt

SEQ ID NO: 169126 - DNA, 17 bp, synthetic construct
  source 1..17: mol_type = other DNA
ggtcagcactgtggggg

SEQ ID NO: 169127 - DNA, 17 bp, synthetic construct
  source 1..17: mol_type = other DNA
tggtcagcactgtgggg

SEQ ID NO: 169128 - DNA, 17 bp, synthetic construct
  source 1..17: mol_type = other DNA
gtggtcagcactgtggg

SEQ ID NO: 169129 - DNA, 17 bp, synthetic construct
  source 1..17: mol_type = other DNA
ggtggtcagcactgtgg

SEQ ID NO: 169130 - DNA, 17 bp, synthetic construct
  source 1..17: mol_type = other DNA
tggtggtcagcactgtg

SEQ ID NO: 169131 - DNA, 17 bp, synthetic construct
  source 1..17: mol_type = other DNA
gtggtggtcagcactgt

SEQ ID NO: 169132 - DNA, 17 bp, synthetic construct
  source 1..17: mol_type = other DNA
ggtggtggtcagcactg

SEQ ID NO: 169133 - DNA, 17 bp, synthetic construct
  source 1..17: mol_type = other DNA
tggtggtggtcagcact

SEQ ID NO: 169134 - DNA, 17 bp, synthetic construct
  source 1..17: mol_type = other DNA
gtggtggtggtcagcac

SEQ ID NO: 169135 - DNA, 17 bp, synthetic construct
  source 1..17: mol_type = other DNA
ggtggtggtggtcagca

SEQ ID NO: 169136 - DNA, 17 bp, synthetic construct
  source 1..17: mol_type = other DNA
tggtggtggtggtcagc

SEQ ID NO: 169137 - DNA, 17 bp, synthetic construct
  source 1..17: mol_type = other DNA
gtggtggtggtggtcag

SEQ ID NO: 169138 - DNA, 17 bp, synthetic construct
  source 1..17: mol_type = other DNA
tgtggtggtggtggtca

SEQ ID NO: 169139 - DNA, 17 bp, synthetic construct
  source 1..17: mol_type = other DNA
ttgtggtggtggtggtc

SEQ ID NO: 169140 - DNA, 17 bp, synthetic construct
  source 1..17: mol_type = other DNA
gttgtggtggtggtggt

SEQ ID NO: 169141 - DNA, 17 bp, synthetic construct
  source 1..17: mol_type = other DNA
agttgtggtggtggtgg

SEQ ID NO: 169142 - DNA, 17 bp, synthetic construct
  source 1..17: mol_type = other DNA
cagttgtggtggtggtg

SEQ ID NO: 169143 - DNA, 17 bp, synthetic construct
  source 1..17: mol_type = other DNA
acagttgtggtggtggt

SEQ ID NO: 169144 - DNA, 17 bp, synthetic construct
  source 1..17: mol_type = other DNA
cacagttgtggtggtgg

SEQ ID NO: 169145 - DNA, 17 bp, synthetic construct
  source 1..17: mol_type = other DNA
ccacagttgtggtggtg

SEQ ID NO: 169146 - DNA, 17 bp, synthetic construct
  source 1..17: mol_type = other DNA
gccacagttgtggtggt

SEQ ID NO: 169147 - DNA, 17 bp, synthetic construct
  source 1..17: mol_type = other DNA
ggccacagttgtggtgg

SEQ ID NO: 169148 - DNA, 17 bp, synthetic construct
  source 1..17: mol_type = other DNA
tggccacagttgtggtg

SEQ ID NO: 169149 - DNA, 17 bp, synthetic construct
  source 1..17: mol_type = other DNA
gtggccacagttgtggt

SEQ ID NO: 169150 - DNA, 17 bp, synthetic construct
  source 1..17: mol_type = other DNA
agtggccacagttgtgg

SEQ ID NO: 169151 - DNA, 17 bp, synthetic construct
  source 1..17: mol_type = other DNA
cagtggccacagttgtg

SEQ ID NO: 169152 - DNA, 17 bp, synthetic construct
  source 1..17: mol_type = other DNA
ccagtggccacagttgt

SEQ ID NO: 169153 - DNA, 17 bp, synthetic construct
  source 1..17: mol_type = other DNA
accagtggccacagttg

SEQ ID NO: 169154 - DNA, 17 bp, synthetic construct
  source 1..17: mol_type = other DNA
aaccagtggccacagtt

SEQ ID NO: 169155 - DNA, 17 bp, synthetic construct
  source 1..17: mol_type = other DNA
gaaccagtggccacagt

SEQ ID NO: 169156 - DNA, 17 bp, synthetic construct
  source 1..17: mol_type = other DNA
agaaccagtggccacag

SEQ ID NO: 169157 - DNA, 17 bp, synthetic construct
  source 1..17: mol_type = other DNA
tagaaccagtggccaca

SEQ ID NO: 169158 - DNA, 17 bp, synthetic construct
  source 1..17: mol_type = other DNA
atagaaccagtggccac

SEQ ID NO: 169159 - DNA, 17 bp, synthetic construct
  source 1..17: mol_type = other DNA
catagaaccagtggcca

SEQ ID NO: 169160 - DNA, 17 bp, synthetic construct
  source 1..17: mol_type = other DNA
ccatagaaccagtggcc

SEQ ID NO: 169161 - DNA, 17 bp, synthetic construct
  source 1..17: mol_type = other DNA
gccatagaaccagtggc

SEQ ID NO: 169162 - DNA, 17 bp, synthetic construct
  source 1..17: mol_type = other DNA
tgccatagaaccagtgg

SEQ ID NO: 169163 - DNA, 17 bp, synthetic construct
  source 1..17: mol_type = other DNA
ttgccatagaaccagtg

SEQ ID NO: 169164 - DNA, 17 bp, synthetic construct
  source 1..17: mol_type = other DNA
gttgccatagaaccagt

SEQ ID NO: 169165 - DNA, 17 bp, synthetic construct
  source 1..17: mol_type = other DNA
tgttgccatagaaccag

SEQ ID NO: 169166 - DNA, 17 bp, synthetic construct
  source 1..17: mol_type = other DNA
gtgttgccatagaacca

SEQ ID NO: 169167 - DNA, 17 bp, synthetic construct
  source 1..17: mol_type = other DNA
ggtgttgccatagaacc

SEQ ID NO: 169168 - DNA, 17 bp, synthetic construct
  source 1..17: mol_type = other DNA
gggtgttgccatagaac

SEQ ID NO: 169169 - DNA, 17 bp, synthetic construct
  source 1..17: mol_type = other DNA
agggtgttgccatagaa

SEQ ID NO: 169170 - DNA, 17 bp, synthetic construct
  source 1..17: mol_type = other DNA
gagggtgttgccataga

SEQ ID NO: 169171 - DNA, 17 bp, synthetic construct
  source 1..17: mol_type = other DNA
ggagggtgttgccatag

SEQ ID NO: 169172 - DNA, 17 bp, synthetic construct
  source 1..17: mol_type = other DNA
aggagggtgttgccata

SEQ ID NO: 169173 - DNA, 17 bp, synthetic construct
  source 1..17: mol_type = other DNA
gaggagggtgttgccat

SEQ ID NO: 169174 - DNA, 17 bp, synthetic construct
  source 1..17: mol_type = other DNA
agaggagggtgttgcca

SEQ ID NO: 169175 - DNA, 17 bp, synthetic construct
  source 1..17: mol_type = other DNA
tagaggagggtgttgcc

SEQ ID NO: 169176 - DNA, 17 bp, synthetic construct
  source 1..17: mol_type = other DNA
ctagaggagggtgttgc

SEQ ID NO: 169177 - DNA, 17 bp, synthetic construct
  source 1..17: mol_type = other DNA
gctagaggagggtgttg

SEQ ID NO: 169178 - DNA, 17 bp, synthetic construct
  source 1..17: mol_type = other DNA
tgctagaggagggtgtt

SEQ ID NO: 169179 - DNA, 17 bp, synthetic construct
  source 1..17: mol_type = other DNA
gtgctagaggagggtgt

SEQ ID NO: 169180 - DNA, 17 bp, synthetic construct
  source 1..17: mol_type = other DNA
tgtgctagaggagggtg

SEQ ID NO: 169181 - DNA, 17 bp, synthetic construct
  source 1..17: mol_type = other DNA
gtgtgctagaggagggt

SEQ ID NO: 169182 - DNA, 17 bp, synthetic construct
  source 1..17: mol_type = other DNA
tgtgtgctagaggaggg

SEQ ID NO: 169183 - DNA, 17 bp, synthetic construct
  source 1..17: mol_type = other DNA
ctgtgtgctagaggagg

SEQ ID NO: 169184 - DNA, 17 bp, synthetic construct
  source 1..17: mol_type = other DNA
tctgtgtgctagaggag

SEQ ID NO: 169185 - DNA, 17 bp, synthetic construct
  source 1..17: mol_type = other DNA
gtctgtgtgctagagga

SEQ ID NO: 169186 - DNA, 17 bp, synthetic construct
  source 1..17: mol_type = other DNA
ggtctgtgtgctagagg

SEQ ID NO: 169187 - DNA, 17 bp, synthetic construct
  source 1..17: mol_type = other DNA
tggtctgtgtgctagag

SEQ ID NO: 169188 - DNA, 17 bp, synthetic construct
  source 1..17: mol_type = other DNA
ctggtctgtgtgctaga

SEQ ID NO: 169189 - DNA, 17 bp, synthetic construct
  source 1..17: mol_type = other DNA
actggtctgtgtgctag

SEQ ID NO: 169190 - DNA, 17 bp, synthetic construct
  source 1..17: mol_type = other DNA
cactggtctgtgtgcta

SEQ ID NO: 169191 - DNA, 17 bp, synthetic construct
  source 1..17: mol_type = other DNA
ccactggtctgtgtgct

SEQ ID NO: 169192 - DNA, 17 bp, synthetic construct
  source 1..17: mol_type = other DNA
accactggtctgtgtgc

SEQ ID NO: 169193 - DNA, 17 bp, synthetic construct
  source 1..17: mol_type = other DNA
taccactggtctgtgtg

SEQ ID NO: 169194 - DNA, 17 bp, synthetic construct
  source 1..17: mol_type = other DNA
gtaccactggtctgtgt

SEQ ID NO: 169195 - DNA, 17 bp, synthetic construct
  source 1..17: mol_type = other DNA
agtaccactggtctgtg

SEQ ID NO: 169196 - DNA, 17 bp, synthetic construct
  source 1..17: mol_type = other DNA
gagtaccactggtctgt

SEQ ID NO: 169197 - DNA, 17 bp, synthetic construct
  source 1..17: mol_type = other DNA
ggagtaccactggtctg

SEQ ID NO: 169198 - DNA, 17 bp, synthetic construct
  source 1..17: mol_type = other DNA
gggagtaccactggtct

SEQ ID NO: 169199 - DNA, 17 bp, synthetic construct
  source 1..17: mol_type = other DNA
ggggagtaccactggtc

SEQ ID NO: 169200 - DNA, 17 bp, synthetic construct
  source 1..17: mol_type = other DNA
gggggagtaccactggt

SEQ ID NO: 169201 - DNA, 17 bp, synthetic construct
  source 1..17: mol_type = other DNA
tgggggagtaccactgg

SEQ ID NO: 169202 - DNA, 17 bp, synthetic construct
  source 1..17: mol_type = other DNA
atgggggagtaccactg

SEQ ID NO: 169203 - DNA, 17 bp, synthetic construct
  source 1..17: mol_type = other DNA
gatgggggagtaccact

SEQ ID NO: 169204 - DNA, 17 bp, synthetic construct
  source 1..17: mol_type = other DNA
tgatgggggagtaccac

SEQ ID NO: 169205 - DNA, 17 bp, synthetic construct
  source 1..17: mol_type = other DNA
gtgatgggggagtacca

SEQ ID NO: 169206 - DNA, 17 bp, synthetic construct
  source 1..17: mol_type = other DNA
agtgatgggggagtacc

SEQ ID NO: 169207 - DNA, 17 bp, synthetic construct
  source 1..17: mol_type = other DNA
cagtgatgggggagtac

SEQ ID NO: 169208 - DNA, 17 bp, synthetic construct
  source 1..17: mol_type = other DNA
tcagtgatgggggagta

SEQ ID NO: 169209 - DNA, 17 bp, synthetic construct
  source 1..17: mol_type = other DNA
gtcagtgatgggggagt

SEQ ID NO: 169210 - DNA, 17 bp, synthetic construct
  source 1..17: mol_type = other DNA
ggtcagtgatgggggag

SEQ ID NO: 169211 - DNA, 17 bp, synthetic construct
  source 1..17: mol_type = other DNA
tggtcagtgatggggga

SEQ ID NO: 169212 - DNA, 17 bp, synthetic construct
  source 1..17: mol_type = other DNA
gtggtcagtgatggggg

SEQ ID NO: 169213 - DNA, 17 bp, synthetic construct
  source 1..17: mol_type = other DNA
ggtggtcagtgatgggg

SEQ ID NO: 169214 - DNA, 17 bp, synthetic construct
  source 1..17: mol_type = other DNA
tggtggtcagtgatggg

SEQ ID NO: 169215 - DNA, 17 bp, synthetic construct
  source 1..17: mol_type = other DNA
gtggtggtcagtgatgg

SEQ ID NO: 169216 - DNA, 17 bp, synthetic construct
  source 1..17: mol_type = other DNA
cgtggtggtcagtgatg

SEQ ID NO: 169217 - DNA, 17 bp, synthetic construct
  source 1..17: mol_type = other DNA
ccgtggtggtcagtgat

SEQ ID NO: 169218 - DNA, 17 bp, synthetic construct
  source 1..17: mol_type = other DNA
gccgtggtggtcagtga

SEQ ID NO: 169219 - DNA, 17 bp, synthetic construct
  source 1..17: mol_type = other DNA
ggccgtggtggtcagtg

SEQ ID NO: 169220 - DNA, 17 bp, synthetic construct
  source 1..17: mol_type = other DNA
tggccgtggtggtcagt

SEQ ID NO: 169221 - DNA, 17 bp, synthetic construct
  source 1..17: mol_type = other DNA
gtggccgtggtggtcag

SEQ ID NO: 169222 - DNA, 17 bp, synthetic construct
  source 1..17: mol_type = other DNA
agtggccgtggtggtca

SEQ ID NO: 169223 - DNA, 17 bp, synthetic construct
  source 1..17: mol_type = other DNA
tagtggccgtggtggtc

SEQ ID NO: 169224 - DNA, 17 bp, synthetic construct
  source 1..17: mol_type = other DNA
gtagtggccgtggtggt

SEQ ID NO: 169225 - DNA, 17 bp, synthetic construct
  source 1..17: mol_type = other DNA
cgtagtggccgtggtgg

SEQ ID NO: 169226 - DNA, 17 bp, synthetic construct
  source 1..17: mol_type = other DNA
tcgtagtggccgtggtg

SEQ ID NO: 169227 - DNA, 17 bp, synthetic construct
  source 1..17: mol_type = other DNA
atcgtagtggccgtggt

SEQ ID NO: 169228 - DNA, 17 bp, synthetic construct
  source 1..17: mol_type = other DNA
gatcgtagtggccgtgg

SEQ ID NO: 169229 - DNA, 17 bp, synthetic construct
  source 1..17: mol_type = other DNA
tgatcgtagtggccgtg

SEQ ID NO: 169230 - DNA, 17 bp, synthetic construct
  source 1..17: mol_type = other DNA
gtgatcgtagtggccgt

SEQ ID NO: 169231 - DNA, 17 bp, synthetic construct
  source 1..17: mol_type = other DNA
cgtgatcgtagtggccg

SEQ ID NO: 169232 - DNA, 17 bp, synthetic construct
  source 1..17: mol_type = other DNA
ccgtgatcgtagtggcc

SEQ ID NO: 169233 - DNA, 17 bp, synthetic construct
  source 1..17: mol_type = other DNA
gccgtgatcgtagtggc

SEQ ID NO: 169234 - DNA, 17 bp, synthetic construct
  source 1..17: mol_type = other DNA
ggccgtgatcgtagtgg

SEQ ID NO: 169235 - DNA, 17 bp, synthetic construct
  source 1..17: mol_type = other DNA
tggccgtgatcgtagtg

SEQ ID NO: 169236 - DNA, 17 bp, synthetic construct
  source 1..17: mol_type = other DNA
gtggccgtgatcgtagt

SEQ ID NO: 169237 - DNA, 17 bp, synthetic construct
  source 1..17: mol_type = other DNA
ggtggccgtgatcgtag

SEQ ID NO: 169238 - DNA, 17 bp, synthetic construct
  source 1..17: mol_type = other DNA
cggtggccgtgatcgta

SEQ ID NO: 169239 - DNA, 17 bp, synthetic construct
  source 1..17: mol_type = other DNA
ccggtggccgtgatcgt

SEQ ID NO: 169240 - DNA, 17 bp, synthetic construct
  source 1..17: mol_type = other DNA
gccggtggccgtgatcg

SEQ ID NO: 169241 - DNA, 17 bp, synthetic construct
  source 1..17: mol_type = other DNA
agccggtggccgtgatc

SEQ ID NO: 169242 - DNA, 17 bp, synthetic construct
  source 1..17: mol_type = other DNA
gagccggtggccgtgat

SEQ ID NO: 169243 - DNA, 17 bp, synthetic construct
  source 1..17: mol_type = other DNA
ggagccggtggccgtga

SEQ ID NO: 169244 - DNA, 17 bp, synthetic construct
  source 1..17: mol_type = other DNA
tggagccggtggccgtg

SEQ ID NO: 169245 - DNA, 17 bp, synthetic construct
  source 1..17: mol_type = other DNA
gtggagccggtggccgt

SEQ ID NO: 169246 - DNA, 17 bp, synthetic construct
  source 1..17: mol_type = other DNA
ggtggagccggtggccg

SEQ ID NO: 169247 - DNA, 17 bp, synthetic construct
  source 1..17: mol_type = other DNA
tggtggagccggtggcc

SEQ ID NO: 169248 - DNA, 17 bp, synthetic construct
  source 1..17: mol_type = other DNA
gtggtggagccggtggc

SEQ ID NO: 169249 - DNA, 17 bp, synthetic construct
  source 1..17: mol_type = other DNA
ggtggtggagccggtgg

SEQ ID NO: 169250 - DNA, 17 bp, synthetic construct
  source 1..17: mol_type = other DNA
tggtggtggagccggtg

SEQ ID NO: 169251 - DNA, 17 bp, synthetic construct
  source 1..17: mol_type = other DNA
ttggtggtggagccggt

SEQ ID NO: 169252 - DNA, 17 bp, synthetic construct
  source 1..17: mol_type = other DNA
gttggtggtggagccgg

SEQ ID NO: 169253 - DNA, 17 bp, synthetic construct
  source 1..17: mol_type = other DNA
ggttggtggtggagccg

SEQ ID NO: 169254 - DNA, 17 bp, synthetic construct
  source 1..17: mol_type = other DNA
gggttggtggtggagcc

SEQ ID NO: 169255 - DNA, 17 bp, synthetic construct
  source 1..17: mol_type = other DNA
ggggttggtggtggagc

SEQ ID NO: 169256 - DNA, 17 bp, synthetic construct
  source 1..17: mol_type = other DNA
aggggttggtggtggag

SEQ ID NO: 169257 - DNA, 17 bp, synthetic construct
  source 1..17: mol_type = other DNA
gaggggttggtggtgga

SEQ ID NO: 169258 - DNA, 17 bp, synthetic construct
  source 1..17: mol_type = other DNA
ggaggggttggtggtgg

SEQ ID NO: 169259 - DNA, 17 bp, synthetic construct
  source 1..17: mol_type = other DNA
aggaggggttggtggtg

SEQ ID NO: 169260 - DNA, 17 bp, synthetic construct
  source 1..17: mol_type = other DNA
gaggaggggttggtggt

SEQ ID NO: 169261 - DNA, 17 bp, synthetic construct
  source 1..17: mol_type = other DNA
tgaggaggggttggtgg

SEQ ID NO: 169262 - DNA, 17 bp, synthetic construct
  source 1..17: mol_type = other DNA
ttgaggaggggttggtg

SEQ ID NO: 169263 - DNA, 17 bp, synthetic construct
  source 1..17: mol_type = other DNA
gttgaggaggggttggt

SEQ ID NO: 169264 - DNA, 17 bp, synthetic construct
  source 1..17: mol_type = other DNA
agttgaggaggggttgg

SEQ ID NO: 169265 - DNA, 17 bp, synthetic construct
  source 1..17: mol_type = other DNA
gagttgaggaggggttg

SEQ ID NO: 169266 - DNA, 17 bp, synthetic construct
  source 1..17: mol_type = other DNA
ggagttgaggaggggtt

SEQ ID NO: 169267 - DNA, 17 bp, synthetic construct
  source 1..17: mol_type = other DNA
tggagttgaggaggggt

SEQ ID NO: 169268 - DNA, 17 bp, synthetic construct
  source 1..17: mol_type = other DNA
ctggagttgaggagggg

SEQ ID NO: 169269 - DNA, 17 bp, synthetic construct
  source 1..17: mol_type = other DNA
cctggagttgaggaggg

SEQ ID NO: 169270 - DNA, 17 bp, synthetic construct
  source 1..17: mol_type = other DNA
ccctggagttgaggagg

SEQ ID NO: 169271 - DNA, 17 bp, synthetic construct
  source 1..17: mol_type = other DNA
tccctggagttgaggag

SEQ ID NO: 169272 - DNA, 17 bp, synthetic construct
  source 1..17: mol_type = other DNA
gtccctggagttgagga

SEQ ID NO: 169273 - DNA, 17 bp, synthetic construct
  source 1..17: mol_type = other DNA
tgtccctggagttgagg

SEQ ID NO: 169274 - DNA, 17 bp, synthetic construct
  source 1..17: mol_type = other DNA
ttgtccctggagttgag

SEQ ID NO: 169275 - DNA, 17 bp, synthetic construct
  source 1..17: mol_type = other DNA
gttgtccctggagttga

SEQ ID NO: 169276 - DNA, 17 bp, synthetic construct
  source 1..17: mol_type = other DNA
tgttgtccctggagttg

SEQ ID NO: 169277 - DNA, 17 bp, synthetic construct
  source 1..17: mol_type = other DNA
gtgttgtccctggagtt

SEQ ID NO: 169278 - DNA, 17 bp, synthetic construct
  source 1..17: mol_type = other DNA
ggtgttgtccctggagt

SEQ ID NO: 169279 - DNA, 17 bp, synthetic construct
  source 1..17: mol_type = other DNA
aggtgttgtccctggag

SEQ ID NO: 169280 - DNA, 17 bp, synthetic construct
  source 1..17: mol_type = other DNA
taggtgttgtccctgga

SEQ ID NO: 169281 - DNA, 17 bp, synthetic construct
  source 1..17: mol_type = other DNA
ataggtgttgtccctgg

SEQ ID NO: 169282 - DNA, 17 bp, synthetic construct
  source 1..17: mol_type = other DNA
gataggtgttgtccctg

SEQ ID NO: 169283 - DNA, 17 bp, synthetic construct
  source 1..17: mol_type = other DNA
ggataggtgttgtccct

SEQ ID NO: 169284 - DNA, 17 bp, synthetic construct
  source 1..17: mol_type = other DNA
gggataggtgttgtccc

SEQ ID NO: 169285 - DNA, 17 bp, synthetic construct
  source 1..17: mol_type = other DNA
ggggataggtgttgtcc

SEQ ID NO: 169286 - DNA, 17 bp, synthetic construct
  source 1..17: mol_type = other DNA
gggggataggtgttgtc

SEQ ID NO: 169287 - DNA, 17 bp, synthetic construct
  source 1..17: mol_type = other DNA
ggggggataggtgttgt

SEQ ID NO: 169288 - DNA, 17 bp, synthetic construct
  source 1..17: mol_type = other DNA
tggggggataggtgttg

SEQ ID NO: 169289 - DNA, 17 bp, synthetic construct
  source 1..17: mol_type = other DNA
ctggggggataggtgtt

SEQ ID NO: 169290 - DNA, 17 bp, synthetic construct
  source 1..17: mol_type = other DNA
actggggggataggtgt

SEQ ID NO: 169291 - DNA, 17 bp, synthetic construct
  source 1..17: mol_type = other DNA
cactggggggataggtg

SEQ ID NO: 169292 - DNA, 17 bp, synthetic construct
  source 1..17: mol_type = other DNA
gcactggggggataggt

SEQ ID NO: 169293 - DNA, 17 bp, synthetic construct
  source 1..17: mol_type = other DNA
agcactggggggatagg

SEQ ID NO: 169294 - DNA, 17 bp, synthetic construct
  source 1..17: mol_type = other DNA
cagcactggggggatag

SEQ ID NO: 169295 - DNA, 17 bp, synthetic construct
  source 1..17: mol_type = other DNA
tcagcactggggggata

SEQ ID NO: 169296 - DNA, 17 bp, synthetic construct
  source 1..17: mol_type = other DNA
gtcagcactggggggat

SEQ ID NO: 169297 - DNA, 17 bp, synthetic construct
  source 1..17: mol_type = other DNA
ggtcagcactgggggga

SEQ ID NO: 169298 - DNA, 17 bp, synthetic construct
  source 1..17: mol_type = other DNA
tggtcagcactgggggg

SEQ ID NO: 169299 - DNA, 17 bp, synthetic construct
  source 1..17: mol_type = other DNA
gtggtcagcactggggg

SEQ ID NO: 169300 - DNA, 17 bp, synthetic construct
  source 1..17: mol_type = other DNA
ggtggtcagcactgggg

SEQ ID NO: 169301 - DNA, 17 bp, synthetic construct
  source 1..17: mol_type = other DNA
tggtggtcagcactggg

SEQ ID NO: 169302 - DNA, 17 bp, synthetic construct
  source 1..17: mol_type = other DNA
gtggtggtcagcactgg

SEQ ID NO: 169303 - DNA, 17 bp, synthetic construct
  source 1..17: mol_type = other DNA
ggtggtggtcagcactg

SEQ ID NO: 169304 - DNA, 17 bp, synthetic construct
  source 1..17: mol_type = other DNA
cggtggtggtcagcact

SEQ ID NO: 169305 - DNA, 17 bp, synthetic construct
  source 1..17: mol_type = other DNA
gcggtggtggtcagcac

SEQ ID NO: 169306 - DNA, 17 bp, synthetic construct
  source 1..17: mol_type = other DNA
ggcggtggtggtcagca

SEQ ID NO: 169307 - DNA, 17 bp, synthetic construct
  source 1..17: mol_type = other DNA
tggcggtggtggtcagc

SEQ ID NO: 169308 - DNA, 17 bp, synthetic construct
  source 1..17: mol_type = other DNA
gtggcggtggtggtcag

SEQ ID NO: 169309 - DNA, 17 bp, synthetic construct
  source 1..17: mol_type = other DNA
ggtggcggtggtggtca

SEQ ID NO: 169310 - DNA, 17 bp, synthetic construct
  source 1..17: mol_type = other DNA
tggtggcggtggtggtc

SEQ ID NO: 169311 - DNA, 17 bp, synthetic construct
  source 1..17: mol_type = other DNA
gtggtggcggtggtggt

SEQ ID NO: 169312 - DNA, 17 bp, synthetic construct
  source 1..17: mol_type = other DNA
tgtggtggcggtggtgg

SEQ ID NO: 169313 - DNA, 17 bp, synthetic construct
  source 1..17: mol_type = other DNA
gtgtggtggcggtggtg

SEQ ID NO: 169314 - DNA, 17 bp, synthetic construct
  source 1..17: mol_type = other DNA
ggtgtggtggcggtggt

SEQ ID NO: 169315 - DNA, 17 bp, synthetic construct
  source 1..17: mol_type = other DNA
aggtgtggtggcggtgg

SEQ ID NO: 169316 - DNA, 17 bp, synthetic construct
  source 1..17: mol_type = other DNA
caggtgtggtggcggtg

SEQ ID NO: 169317 - DNA, 17 bp, synthetic construct
  source 1..17: mol_type = other DNA
gcaggtgtggtggcggt

SEQ ID NO: 169318 - DNA, 17 bp, synthetic construct
  source 1..17: mol_type = other DNA
tgcaggtgtggtggcgg

SEQ ID NO: 169319 - DNA, 17 bp, synthetic construct
  source 1..17: mol_type = other DNA
ctgcaggtgtggtggcg

SEQ ID NO: 169320 - DNA, 17 bp, synthetic construct
  source 1..17: mol_type = other DNA
gctgcaggtgtggtggc

SEQ ID NO: 169321 - DNA, 17 bp, synthetic construct
  source 1..17: mol_type = other DNA
ggctgcaggtgtggtgg

SEQ ID NO: 169322 - DNA, 17 bp, synthetic construct
  source 1..17: mol_type = other DNA
tggctgcaggtgtggtg

SEQ ID NO: 169323 - DNA, 17 bp, synthetic construct
  source 1..17: mol_type = other DNA
gtggctgcaggtgtggt

SEQ ID NO: 169324 - DNA, 17 bp, synthetic construct
  source 1..17: mol_type = other DNA
ggtggctgcaggtgtgg

SEQ ID NO: 169325 - DNA, 17 bp, synthetic construct
  source 1..17: mol_type = other DNA
tggtggctgcaggtgtg

SEQ ID NO: 169326 - DNA, 17 bp, synthetic construct
  source 1..17: mol_type = other DNA
ctggtggctgcaggtgt

SEQ ID NO: 169327 - DNA, 17 bp, synthetic construct
  source 1..17: mol_type = other DNA
gctggtggctgcaggtg

SEQ ID NO: 169328 - DNA, 17 bp, synthetic construct
  source 1..17: mol_type = other DNA
tgctggtggctgcaggt

SEQ ID NO: 169329 - DNA, 17 bp, synthetic construct
  source 1..17: mol_type = other DNA
ctgctggtggctgcagg

SEQ ID NO: 169330 - DNA, 17 bp, synthetic construct
  source 1..17: mol_type = other DNA
gctgctggtggctgcag

SEQ ID NO: 169331 - DNA, 17 bp, synthetic construct
  source 1..17: mol_type = other DNA
tgctgctggtggctgca

SEQ ID NO: 169332 - DNA, 17 bp, synthetic construct
  source 1..17: mol_type = other DNA
gtgctgctggtggctgc

SEQ ID NO: 169333 - DNA, 17 bp, synthetic construct
  source 1..17: mol_type = other DNA
tgtgctgctggtggctg

SEQ ID NO: 169334 - DNA, 17 bp, synthetic construct
  source 1..17: mol_type = other DNA
ctgtgctgctggtggct

SEQ ID NO: 169335 - DNA, 17 bp, synthetic construct
  source 1..17: mol_type = other DNA
actgtgctgctggtggc

SEQ ID NO: 169336 - DNA, 17 bp, synthetic construct
  source 1..17: mol_type = other DNA
cactgtgctgctggtgg

SEQ ID NO: 169337 - DNA, 17 bp, synthetic construct
  source 1..17: mol_type = other DNA
tcactgtgctgctggtg

SEQ ID NO: 169338 - DNA, 17 bp, synthetic construct
  source 1..17: mol_type = other DNA
gtcactgtgctgctggt

SEQ ID NO: 169339 - DNA, 17 bp, synthetic construct
  source 1..17: mol_type = other DNA
agtcactgtgctgctgg

SEQ ID NO: 169340 - DNA, 17 bp, synthetic construct
  source 1..17: mol_type = other DNA
gagtcactgtgctgctg

SEQ ID NO: 169341 - DNA, 17 bp, synthetic construct
  source 1..17: mol_type = other DNA
ggagtcactgtgctgct

SEQ ID NO: 169342 - DNA, 17 bp, synthetic construct
  source 1..17: mol_type = other DNA
gggagtcactgtgctgc

SEQ ID NO: 169343 - DNA, 17 bp, synthetic construct
  source 1..17: mol_type = other DNA
agggagtcactgtgctg

SEQ ID NO: 169344 - DNA, 17 bp, synthetic construct
  source 1..17: mol_type = other DNA
gagggagtcactgtgct

SEQ ID NO: 169345 - DNA, 17 bp, synthetic construct
  source 1..17: mol_type = other DNA
ggagggagtcactgtgc

SEQ ID NO: 169346 - DNA, 17 bp, synthetic construct
  source 1..17: mol_type = other DNA
aggagggagtcactgtg

SEQ ID NO: 169347 - DNA, 17 bp, synthetic construct
  source 1..17: mol_type = other DNA
gaggagggagtcactgt

SEQ ID NO: 169348 - DNA, 17 bp, synthetic construct
  source 1..17: mol_type = other DNA
agaggagggagtcactg

SEQ ID NO: 169349 - DNA, 17 bp, synthetic construct
  source 1..17: mol_type = other DNA
cagaggagggagtcact

SEQ ID NO: 169350 - DNA, 17 bp, synthetic construct
  source 1..17: mol_type = other DNA
gcagaggagggagtcac

SEQ ID NO: 169351 - DNA, 17 bp, synthetic construct
  source 1..17: mol_type = other DNA
ggcagaggagggagtca

SEQ ID NO: 169352 - DNA, 17 bp, synthetic construct
  source 1..17: mol_type = other DNA
gggcagaggagggagtc

SEQ ID NO: 169353 - DNA, 17 bp, synthetic construct
  source 1..17: mol_type = other DNA
agggcagaggagggagt

SEQ ID NO: 169354 - DNA, 17 bp, synthetic construct
  source 1..17: mol_type = other DNA
tagggcagaggagggag

SEQ ID NO: 169355 - DNA, 17 bp, synthetic construct
  source 1..17: mol_type = other DNA
ctagggcagaggaggga

SEQ ID NO: 169356 - DNA, 17 bp, synthetic construct
  source 1..17: mol_type = other DNA
cctagggcagaggaggg

SEQ ID NO: 169357 - DNA, 17 bp, synthetic construct
  source 1..17: mol_type = other DNA
ccctagggcagaggagg

SEQ ID NO: 169358 - DNA, 17 bp, synthetic construct
  source 1..17: mol_type = other DNA
tccctagggcagaggag

SEQ ID NO: 169359 - DNA, 17 bp, synthetic construct
  source 1..17: mol_type = other DNA
gtccctagggcagagga

SEQ ID NO: 169360 - DNA, 17 bp, synthetic construct
  source 1..17: mol_type = other DNA
ggtccctagggcagagg

SEQ ID NO: 169361 - DNA, 17 bp, synthetic construct
  source 1..17: mol_type = other DNA
tggtccctagggcagag

SEQ ID NO: 169362 - DNA, 17 bp, synthetic construct
  source 1..17: mol_type = other DNA
gtggtccctagggcaga

SEQ ID NO: 169363 - DNA, 17 bp, synthetic construct
  source 1..17: mol_type = other DNA
ggtggtccctagggcag

SEQ ID NO: 169364 - DNA, 17 bp, synthetic construct
  source 1..17: mol_type = other DNA
gggtggtccctagggca

SEQ ID NO: 169365 - DNA, 17 bp, synthetic construct
  source 1..17: mol_type = other DNA
tgggtggtccctagggc

SEQ ID NO: 169366 - DNA, 17 bp, synthetic construct
  source 1..17: mol_type = other DNA
gtgggtggtccctaggg

SEQ ID NO: 169367 - DNA, 17 bp, synthetic construct
  source 1..17: mol_type = other DNA
tgtgggtggtccctagg

SEQ ID NO: 169368 - DNA, 17 bp, synthetic construct
  source 1..17: mol_type = other DNA
gtgtgggtggtccctag

SEQ ID NO: 169369 - DNA, 17 bp, synthetic construct
  source 1..17: mol_type = other DNA
tgtgtgggtggtcccta

SEQ ID NO: 169370 - DNA, 17 bp, synthetic construct
  source 1..17: mol_type = other DNA
gtgtgtgggtggtccct

SEQ ID NO: 169371 - DNA, 17 bp, synthetic construct
  source 1..17: mol_type = other DNA
ggtgtgtgggtggtccc

SEQ ID NO: 169372 - DNA, 17 bp, synthetic construct
  source 1..17: mol_type = other DNA
gggtgtgtgggtggtcc

SEQ ID NO: 169373 - DNA, 17 bp, synthetic construct
  source 1..17: mol_type = other DNA
ggggtgtgtgggtggtc

SEQ ID NO: 169374 - DNA, 17 bp, synthetic construct
  source 1..17: mol_type = other DNA
gggggtgtgtgggtggt

SEQ ID NO: 169375 - DNA, 17 bp, synthetic construct
  source 1..17: mol_type = other DNA
tgggggtgtgtgggtgg

SEQ ID NO: 169376 - DNA, 17 bp, synthetic construct
  source 1..17: mol_type = other DNA
ctgggggtgtgtgggtg

SEQ ID NO: 169377 - DNA, 17 bp, synthetic construct
  source 1..17: mol_type = other DNA
actgggggtgtgtgggt

SEQ ID NO: 169378 - DNA, 17 bp, synthetic construct
  source 1..17: mol_type = other DNA
cactgggggtgtgtggg

SEQ ID NO: 169379 - DNA, 17 bp, synthetic construct
  source 1..17: mol_type = other DNA
gcactgggggtgtgtgg

SEQ ID NO: 169380 - DNA, 17 bp, synthetic construct
  source 1..17: mol_type = other DNA
ggcactgggggtgtgtg

SEQ ID NO: 169381 - DNA, 17 bp, synthetic construct
  source 1..17: mol_type = other DNA
cggcactgggggtgtgt

SEQ ID NO: 169382 - DNA, 17 bp, synthetic construct
  source 1..17: mol_type = other DNA
tcggcactgggggtgtg

SEQ ID NO: 169383 - DNA, 17 bp, synthetic construct
  source 1..17: mol_type = other DNA
ttcggcactgggggtgt

SEQ ID NO: 169384 - DNA, 17 bp, synthetic construct
  source 1..17: mol_type = other DNA
gttcggcactgggggtg

SEQ ID NO: 169385 - DNA, 17 bp, synthetic construct
  source 1..17: mol_type = other DNA
tgttcggcactgggggt

SEQ ID NO: 169386 - DNA, 17 bp, synthetic construct
  source 1..17: mol_type = other DNA
gtgttcggcactggggg

SEQ ID NO: 169387 - DNA, 17 bp, synthetic construct
  source 1..17: mol_type = other DNA
ggtgttcggcactgggg

SEQ ID NO: 169388 - DNA, 17 bp, synthetic construct
  source 1..17: mol_type = other DNA
tggtgttcggcactggg

SEQ ID NO: 169389 - DNA, 17 bp, synthetic construct
  source 1..17: mol_type = other DNA
gtggtgttcggcactgg

SEQ ID NO: 169390 - DNA, 17 bp, synthetic construct
  source 1..17: mol_type = other DNA
cgtggtgttcggcactg

SEQ ID NO: 169391 - DNA, 17 bp, synthetic construct
  source 1..17: mol_type = other DNA
ccgtggtgttcggcact

SEQ ID NO: 169392 - DNA, 17 bp, synthetic construct
  source 1..17: mol_type = other DNA
gccgtggtgttcggcac

SEQ ID NO: 169393 - DNA, 17 bp, synthetic construct
  source 1..17: mol_type = other DNA
ggccgtggtgttcggca

SEQ ID NO: 169394 - DNA, 17 bp, synthetic construct
  source 1..17: mol_type = other DNA
tggccgtggtgttcggc

SEQ ID NO: 169395 - DNA, 17 bp, synthetic construct
  source 1..17: mol_type = other DNA
gtggccgtggtgttcgg

SEQ ID NO: 169396 - DNA, 17 bp, synthetic construct
  source 1..17: mol_type = other DNA
ggtggccgtggtgttcg

SEQ ID NO: 169397 - DNA, 17 bp, synthetic construct
  source 1..17: mol_type = other DNA
tggtggccgtggtgttc

SEQ ID NO: 169398 - DNA, 17 bp, synthetic construct
  source 1..17: mol_type = other DNA
gtggtggccgtggtgtt

SEQ ID NO: 169399 - DNA, 17 bp, synthetic construct
  source 1..17: mol_type = other DNA
tgtggtggccgtggtgt

SEQ ID NO: 169400 - DNA, 17 bp, synthetic construct
  source 1..17: mol_type = other DNA
gtgtggtggccgtggtg

SEQ ID NO: 169401 - DNA, 17 bp, synthetic construct
  source 1..17: mol_type = other DNA
tgtgtggtggccgtggt

SEQ ID NO: 169402 - DNA, 17 bp, synthetic construct
  source 1..17: mol_type = other DNA
gtgtgtggtggccgtgg

SEQ ID NO: 169403 - DNA, 17 bp, synthetic construct
  source 1..17: mol_type = other DNA
cgtgtgtggtggccgtg

SEQ ID NO: 169404 - DNA, 17 bp, synthetic construct
  source 1..17: mol_type = other DNA
ccgtgtgtggtggccgt

SEQ ID NO: 169405 - DNA, 17 bp, synthetic construct
  source 1..17: mol_type = other DNA
cccgtgtgtggtggccg

SEQ ID NO: 169406 - DNA, 17 bp, synthetic construct
  source 1..17: mol_type = other DNA
gcccgtgtgtggtggcc

SEQ ID NO: 169407 - DNA, 17 bp, synthetic construct
  source 1..17: mol_type = other DNA
cgcccgtgtgtggtggc

SEQ ID NO: 169408 - DNA, 17 bp, synthetic construct
  source 1..17: mol_type = other DNA
tcgcccgtgtgtggtgg

SEQ ID NO: 169409 - DNA, 17 bp, synthetic construct
  source 1..17: mol_type = other DNA
atcgcccgtgtgtggtg

SEQ ID NO: 169410 - DNA, 17 bp, synthetic construct
  source 1..17: mol_type = other DNA
gatcgcccgtgtgtggt

SEQ ID NO: 169411 - DNA, 17 bp, synthetic construct
  source 1..17: mol_type = other DNA
ggatcgcccgtgtgtgg

SEQ ID NO: 169412 - DNA, 17 bp, synthetic construct
  source 1..17: mol_type = other DNA
gggatcgcccgtgtgtg

SEQ ID NO: 169413 - DNA, 17 bp, synthetic construct
  source 1..17: mol_type = other DNA
agggatcgcccgtgtgt

SEQ ID NO: 169414 - DNA, 17 bp, synthetic construct
  source 1..17: mol_type = other DNA
cagggatcgcccgtgtg

SEQ ID NO: 169415 - DNA, 17 bp, synthetic construct
  source 1..17: mol_type = other DNA
acagggatcgcccgtgt

SEQ ID NO: 169416 - DNA, 17 bp, synthetic construct
  source 1..17: mol_type = other DNA
gacagggatcgcccgtg

SEQ ID NO: 169417 - DNA, 17 bp, synthetic construct
  source 1..17: mol_type = other DNA
ggacagggatcgcccgt

SEQ ID NO: 169418 - DNA, 17 bp, synthetic construct
  source 1..17: mol_type = other DNA
gggacagggatcgcccg

SEQ ID NO: 169419 - DNA, 17 bp, synthetic construct
  source 1..17: mol_type = other DNA
ggggacagggatcgccc

SEQ ID NO: 169420 - DNA, 17 bp, synthetic construct
  source 1..17: mol_type = other DNA
gggggacagggatcgcc

SEQ ID NO: 169421 - DNA, 17 bp, synthetic construct
  source 1..17: mol_type = other DNA
tgggggacagggatcgc

SEQ ID NO: 169422 - DNA, 17 bp, synthetic construct
  source 1..17: mol_type = other DNA
ctgggggacagggatcg

SEQ ID NO: 169423 - DNA, 17 bp, synthetic construct
  source 1..17: mol_type = other DNA
gctgggggacagggatc

SEQ ID NO: 169424 - DNA, 17 bp, synthetic construct
  source 1..17: mol_type = other DNA
tgctgggggacagggat

SEQ ID NO: 169425 - DNA, 17 bp, synthetic construct
  source 1..17: mol_type = other DNA
ctgctgggggacaggga

SEQ ID NO: 169426 - DNA, 17 bp, synthetic construct
  source 1..17: mol_type = other DNA
actgctgggggacaggg

SEQ ID NO: 169427 - DNA, 17 bp, synthetic construct
  source 1..17: mol_type = other DNA
gactgctgggggacagg

SEQ ID NO: 169428 - DNA, 17 bp, synthetic construct
  source 1..17: mol_type = other DNA
ggactgctgggggacag

SEQ ID NO: 169429 - DNA, 17 bp, synthetic construct
  source 1..17: mol_type = other DNA
gggactgctgggggaca

SEQ ID NO: 169430 - DNA, 17 bp, synthetic construct
  source 1..17: mol_type = other DNA
ggggactgctgggggac

SEQ ID NO: 169431 - DNA, 17 bp, synthetic construct
  source 1..17: mol_type = other DNA
tggggactgctggggga

SEQ ID NO: 169432 - DNA, 17 bp, synthetic construct
  source 1..17: mol_type = other DNA
gtggggactgctggggg

SEQ ID NO: 169433 - DNA, 17 bp, synthetic construct
  source 1..17: mol_type = other DNA
tgtggggactgctgggg

SEQ ID NO: 169434 - DNA, 17 bp, synthetic construct
  source 1..17: mol_type = other DNA
gtgtggggactgctggg

SEQ ID NO: 169435 - DNA, 17 bp, synthetic construct
  source 1..17: mol_type = other DNA
cgtgtggggactgctgg

SEQ ID NO: 169436 - DNA, 17 bp, synthetic construct
  source 1..17: mol_type = other DNA
ccgtgtggggactgctg

SEQ ID NO: 169437 - DNA, 17 bp, synthetic construct
  source 1..17: mol_type = other DNA
accgtgtggggactgct

SEQ ID NO: 169438 - DNA, 17 bp, synthetic construct
  source 1..17: mol_type = other DNA
caccgtgtggggactgc

SEQ ID NO: 169439 - DNA, 17 bp, synthetic construct
  source 1..17: mol_type = other DNA
gcaccgtgtggggactg

SEQ ID NO: 169440 - DNA, 17 bp, synthetic construct
  source 1..17: mol_type = other DNA
cgcaccgtgtggggact

SEQ ID NO: 169441 - DNA, 17 bp, synthetic construct
  source 1..17: mol_type = other DNA
gcgcaccgtgtggggac

SEQ ID NO: 169442 - DNA, 17 bp, synthetic construct
  source 1..17: mol_type = other DNA
tgcgcaccgtgtgggga

SEQ ID NO: 169443 - DNA, 17 bp, synthetic construct
  source 1..17: mol_type = other DNA
gtgcgcaccgtgtgggg

SEQ ID NO: 169444 - DNA, 17 bp, synthetic construct
  source 1..17: mol_type = other DNA
tgtgcgcaccgtgtggg

SEQ ID NO: 169445 - DNA, 17 bp, synthetic construct
  source 1..17: mol_type = other DNA
ctgtgcgcaccgtgtgg

SEQ ID NO: 169446 - DNA, 17 bp, synthetic construct
  source 1..17: mol_type = other DNA
gctgtgcgcaccgtgtg

SEQ ID NO: 169447 - DNA, 17 bp, synthetic construct
  source 1..17: mol_type = other DNA
ggctgtgcgcaccgtgt

SEQ ID NO: 169448 - DNA, 17 bp, synthetic construct
  source 1..17: mol_type = other DNA
aggctgtgcgcaccgtg

SEQ ID NO: 169449 - DNA, 17 bp, synthetic construct
  source 1..17: mol_type = other DNA
caggctgtgcgcaccgt

SEQ ID NO: 169450 - DNA, 17 bp, synthetic construct
  source 1..17: mol_type = other DNA
ccaggctgtgcgcaccg

SEQ ID NO: 169451 - DNA, 17 bp, synthetic construct
  source 1..17: mol_type = other DNA
tccaggctgtgcgcacc

SEQ ID NO: 169452 - DNA, 17 bp, synthetic construct
  source 1..17: mol_type = other DNA
gtccaggctgtgcgcac

SEQ ID NO: 169453 - DNA, 17 bp, synthetic construct
  source 1..17: mol_type = other DNA
agtccaggctgtgcgca

SEQ ID NO: 169454 - DNA, 17 bp, synthetic construct
  source 1..17: mol_type = other DNA
aagtccaggctgtgcgc

SEQ ID NO: 169455 - DNA, 17 bp, synthetic construct
  source 1..17: mol_type = other DNA
gaagtccaggctgtgcg

SEQ ID NO: 169456 - DNA, 17 bp, synthetic construct
  source 1..17: mol_type = other DNA
cgaagtccaggctgtgc

SEQ ID NO: 169457 - DNA, 17 bp, synthetic construct
  source 1..17: mol_type = other DNA
ccgaagtccaggctgtg

SEQ ID NO: 169458 - DNA, 17 bp, synthetic construct
  source 1..17: mol_type = other DNA
gccgaagtccaggctgt

SEQ ID NO: 169459 - DNA, 17 bp, synthetic construct
  source 1..17: mol_type = other DNA
ggccgaagtccaggctg

SEQ ID NO: 169460 - DNA, 17 bp, synthetic construct
  source 1..17: mol_type = other DNA
tggccgaagtccaggct

SEQ ID NO: 169461 - DNA, 17 bp, synthetic construct
  source 1..17: mol_type = other DNA
gtggccgaagtccaggc

SEQ ID NO: 169462 - DNA, 17 bp, synthetic construct
  source 1..17: mol_type = other DNA
ggtggccgaagtccagg

SEQ ID NO: 169463 - DNA, 17 bp, synthetic construct
  source 1..17: mol_type = other DNA
aggtggccgaagtccag

SEQ ID NO: 169464 - DNA, 17 bp, synthetic construct
  source 1..17: mol_type = other DNA
gaggtggccgaagtcca

SEQ ID NO: 169465 - DNA, 17 bp, synthetic construct
  source 1..17: mol_type = other DNA
tgaggtggccgaagtcc

SEQ ID NO: 169466 - DNA, 17 bp, synthetic construct
  source 1..17: mol_type = other DNA
ctgaggtggccgaagtc

SEQ ID NO: 169467 - DNA, 17 bp, synthetic construct
  source 1..17: mol_type = other DNA
cctgaggtggccgaagt

SEQ ID NO: 169468 - DNA, 17 bp, synthetic construct
  source 1..17: mol_type = other DNA
gcctgaggtggccgaag

SEQ ID NO: 169469 - DNA, 17 bp, synthetic construct
  source 1..17: mol_type = other DNA
tgcctgaggtggccgaa

SEQ ID NO: 169470 - DNA, 17 bp, synthetic construct
  source 1..17: mol_type = other DNA
gtgcctgaggtggccga

SEQ ID NO: 169471 - DNA, 17 bp, synthetic construct
  source 1..17: mol_type = other DNA
ggtgcctgaggtggccg

SEQ ID NO: 169472 - DNA, 17 bp, synthetic construct
  source 1..17: mol_type = other DNA
aggtgcctgaggtggcc

SEQ ID NO: 169473 - DNA, 17 bp, synthetic construct
  source 1..17: mol_type = other DNA
aaggtgcctgaggtggc

SEQ ID NO: 169474 - DNA, 17 bp, synthetic construct
  source 1..17: mol_type = other DNA
caaggtgcctgaggtgg

SEQ ID NO: 169475 - DNA, 17 bp, synthetic construct
  source 1..17: mol_type = other DNA
ccaaggtgcctgaggtg

SEQ ID NO: 169476 - DNA, 17 bp, synthetic construct
  source 1..17: mol_type = other DNA
cccaaggtgcctgaggt

SEQ ID NO: 169477 - DNA, 17 bp, synthetic construct
  source 1..17: mol_type = other DNA
gcccaaggtgcctgagg

SEQ ID NO: 169478 - DNA, 17 bp, synthetic construct
  source 1..17: mol_type = other DNA
tgcccaaggtgcctgag

SEQ ID NO: 169479 - DNA, 17 bp, synthetic construct
  source 1..17: mol_type = other DNA
gtgcccaaggtgcctga

SEQ ID NO: 169480 - DNA, 17 bp, synthetic construct
  source 1..17: mol_type = other DNA
ggtgcccaaggtgcctg

SEQ ID NO: 169481 - DNA, 17 bp, synthetic construct
  source 1..17: mol_type = other DNA
tggtgcccaaggtgcct

SEQ ID NO: 169482 - DNA, 17 bp, synthetic construct
  source 1..17: mol_type = other DNA
gtggtgcccaaggtgcc

SEQ ID NO: 169483 - DNA, 17 bp, synthetic construct
  source 1..17: mol_type = other DNA
ggtggtgcccaaggtgc

SEQ ID NO: 169484 - DNA, 17 bp, synthetic construct
  source 1..17: mol_type = other DNA
gggtggtgcccaaggtg

SEQ ID NO: 169485 - DNA, 17 bp, synthetic construct
  source 1..17: mol_type = other DNA
tgggtggtgcccaaggt

SEQ ID NO: 169486 - DNA, 17 bp, synthetic construct
  source 1..17: mol_type = other DNA
gtgggtggtgcccaagg

SEQ ID NO: 169487 - DNA, 17 bp, synthetic construct
  source 1..17: mol_type = other DNA
tgtgggtggtgcccaag

SEQ ID NO: 169488 - DNA, 17 bp, synthetic construct
  source 1..17: mol_type = other DNA
atgtgggtggtgcccaa

SEQ ID NO: 169489 - DNA, 17 bp, synthetic construct
  source 1..17: mol_type = other DNA
gatgtgggtggtgccca

SEQ ID NO: 169490 - DNA, 17 bp, synthetic construct
  source 1..17: mol_type = other DNA
tgatgtgggtggtgccc

SEQ ID NO: 169491 - DNA, 17 bp, synthetic construct
  source 1..17: mol_type = other DNA
gtgatgtgggtggtgcc

SEQ ID NO: 169492 - DNA, 17 bp, synthetic construct
  source 1..17: mol_type = other DNA
tgtgatgtgggtggtgc

SEQ ID NO: 169493 - DNA, 17 bp, synthetic construct
  source 1..17: mol_type = other DNA
ctgtgatgtgggtggtg

SEQ ID NO: 169494 - DNA, 17 bp, synthetic construct
  source 1..17: mol_type = other DNA
tctgtgatgtgggtggt

SEQ ID NO: 169495 - DNA, 17 bp, synthetic construct
  source 1..17: mol_type = other DNA
ctctgtgatgtgggtgg

SEQ ID NO: 169496 - DNA, 17 bp, synthetic construct
  source 1..17: mol_type = other DNA
gctctgtgatgtgggtg

SEQ ID NO: 169497 - DNA, 17 bp, synthetic construct
  source 1..17: mol_type = other DNA
ggctctgtgatgtgggt

SEQ ID NO: 169498 - DNA, 17 bp, synthetic construct
  source 1..17: mol_type = other DNA
aggctctgtgatgtggg

SEQ ID NO: 169499 - DNA, 17 bp, synthetic construct
  source 1..17: mol_type = other DNA
aaggctctgtgatgtgg

SEQ ID NO: 169500 - DNA, 17 bp, synthetic construct
  source 1..17: mol_type = other DNA
gaaggctctgtgatgtg

SEQ ID NO: 169501 - DNA, 17 bp, synthetic construct
  source 1..17: mol_type = other DNA
ggaaggctctgtgatgt

SEQ ID NO: 169502 - DNA, 17 bp, synthetic construct
  source 1..17: mol_type = other DNA
tggaaggctctgtgatg

SEQ ID NO: 169503 - DNA, 17 bp, synthetic construct
  source 1..17: mol_type = other DNA
gtggaaggctctgtgat

SEQ ID NO: 169504 - DNA, 17 bp, synthetic construct
  source 1..17: mol_type = other DNA
cgtggaaggctctgtga

SEQ ID NO: 169505 - DNA, 17 bp, synthetic construct
  source 1..17: mol_type = other DNA
ccgtggaaggctctgtg

SEQ ID NO: 169506 - DNA, 17 bp, synthetic construct
  source 1..17: mol_type = other DNA
cccgtggaaggctctgt

SEQ ID NO: 169507 - DNA, 17 bp, synthetic construct
  source 1..17: mol_type = other DNA
ccccgtggaaggctctg

SEQ ID NO: 169508 - DNA, 17 bp, synthetic construct
  source 1..17: mol_type = other DNA
tccccgtggaaggctct

SEQ ID NO: 169509 - DNA, 17 bp, synthetic construct
  source 1..17: mol_type = other DNA
gtccccgtggaaggctc

SEQ ID NO: 169510 - DNA, 17 bp, synthetic construct
  source 1..17: mol_type = other DNA
agtccccgtggaaggct

SEQ ID NO: 169511 - DNA, 17 bp, synthetic construct
  source 1..17: mol_type = other DNA
aagtccccgtggaaggc

SEQ ID NO: 169512 - DNA, 17 bp, synthetic construct
  source 1..17: mol_type = other DNA
gaagtccccgtggaagg

SEQ ID NO: 169513 - DNA, 17 bp, synthetic construct
  source 1..17: mol_type = other DNA
ggaagtccccgtggaag

SEQ ID NO: 169514 - DNA, 17 bp, synthetic construct
  source 1..17: mol_type = other DNA
gggaagtccccgtggaa

SEQ ID NO: 169515 - DNA, 17 bp, synthetic construct
  source 1..17: mol_type = other DNA
tgggaagtccccgtgga

SEQ ID NO: 169516 - DNA, 17 bp, synthetic construct
  source 1..17: mol_type = other DNA
gtgggaagtccccgtgg

SEQ ID NO: 169517 - DNA, 17 bp, synthetic construct
  source 1..17: mol_type = other DNA
tgtgggaagtccccgtg

SEQ ID NO: 169518 - DNA, 17 bp, synthetic construct
  source 1..17: mol_type = other DNA
gtgtgggaagtccccgt

SEQ ID NO: 169519 - DNA, 17 bp, synthetic construct
  source 1..17: mol_type = other DNA
ggtgtgggaagtccccg

SEQ ID NO: 169520 - DNA, 17 bp, synthetic construct
  source 1..17: mol_type = other DNA
gggtgtgggaagtcccc

SEQ ID NO: 169521 - DNA, 17 bp, synthetic construct
  source 1..17: mol_type = other DNA
ggggtgtgggaagtccc

SEQ ID NO: 169522 - DNA, 17 bp, synthetic construct
  source 1..17: mol_type = other DNA
tggggtgtgggaagtcc

SEQ ID NO: 169523 - DNA, 17 bp, synthetic construct
  source 1..17: mol_type = other DNA
ctggggtgtgggaagtc

SEQ ID NO: 169524 - DNA, 17 bp, synthetic construct
  source 1..17: mol_type = other DNA
gctggggtgtgggaagt

SEQ ID NO: 169525 - DNA, 17 bp, synthetic construct
  source 1..17: mol_type = other DNA
tgctggggtgtgggaag

SEQ ID NO: 169526 - DNA, 17 bp, synthetic construct
  source 1..17: mol_type = other DNA
ctgctggggtgtgggaa

SEQ ID NO: 169527 - DNA, 17 bp, synthetic construct
  source 1..17: mol_type = other DNA
gctgctggggtgtggga

SEQ ID NO: 169528 - DNA, 17 bp, synthetic construct
  source 1..17: mol_type = other DNA
tgctgctggggtgtggg

SEQ ID NO: 169529 - DNA, 17 bp, synthetic construct
  source 1..17: mol_type = other DNA
ttgctgctggggtgtgg

SEQ ID NO: 169530 - DNA, 17 bp, synthetic construct
  source 1..17: mol_type = other DNA
gttgctgctggggtgtg

SEQ ID NO: 169531 - DNA, 17 bp, synthetic construct
  source 1..17: mol_type = other DNA
ggttgctgctggggtgt

SEQ ID NO: 169532 - DNA, 17 bp, synthetic construct
  source 1..17: mol_type = other DNA
tggttgctgctggggtg

SEQ ID NO: 169533 - DNA, 17 bp, synthetic construct
  source 1..17: mol_type = other DNA
gtggttgctgctggggt

SEQ ID NO: 169534 - DNA, 17 bp, synthetic construct
  source 1..17: mol_type = other DNA
ggtggttgctgctgggg

SEQ ID NO: 169535 - DNA, 17 bp, synthetic construct
  source 1..17: mol_type = other DNA
cggtggttgctgctggg

SEQ ID NO: 169536 - DNA, 17 bp, synthetic construct
  source 1..17: mol_type = other DNA
ccggtggttgctgctgg

SEQ ID NO: 169537 - DNA, 17 bp, synthetic construct
  source 1..17: mol_type = other DNA
accggtggttgctgctg

SEQ ID NO: 169538 - DNA, 17 bp, synthetic construct
  source 1..17: mol_type = other DNA
taccggtggttgctgct

SEQ ID NO: 169539 - DNA, 17 bp, synthetic construct
  source 1..17: mol_type = other DNA
gtaccggtggttgctgc

SEQ ID NO: 169540 - DNA, 17 bp, synthetic construct
  source 1..17: mol_type = other DNA
ggtaccggtggttgctg

SEQ ID NO: 169541 - DNA, 17 bp, synthetic construct
  source 1..17: mol_type = other DNA
tggtaccggtggttgct

SEQ ID NO: 169542 - DNA, 17 bp, synthetic construct
  source 1..17: mol_type = other DNA
gtggtaccggtggttgc

SEQ ID NO: 169543 - DNA, 17 bp, synthetic construct
  source 1..17: mol_type = other DNA
ggtggtaccggtggttg

SEQ ID NO: 169544 - DNA, 17 bp, synthetic construct
  source 1..17: mol_type = other DNA
gggtggtaccggtggtt

SEQ ID NO: 169545 - DNA, 17 bp, synthetic construct
  source 1..17: mol_type = other DNA
tgggtggtaccggtggt

SEQ ID NO: 169546 - DNA, 17 bp, synthetic construct
  source 1..17: mol_type = other DNA
ctgggtggtaccggtgg

SEQ ID NO: 169547 - DNA, 17 bp, synthetic construct
  source 1..17: mol_type = other DNA
gctgggtggtaccggtg

SEQ ID NO: 169548 - DNA, 17 bp, synthetic construct
  source 1..17: mol_type = other DNA
tgctgggtggtaccggt

SEQ ID NO: 169549 - DNA, 17 bp, synthetic construct
  source 1..17: mol_type = other DNA
gtgctgggtggtaccgg

SEQ ID NO: 169550 - DNA, 17 bp, synthetic construct
  source 1..17: mol_type = other DNA
agtgctgggtggtaccg

SEQ ID NO: 169551 - DNA, 17 bp, synthetic construct
  source 1..17: mol_type = other DNA
gagtgctgggtggtacc

SEQ ID NO: 169552 - DNA, 17 bp, synthetic construct
  source 1..17: mol_type = other DNA
cgagtgctgggtggtac

SEQ ID NO: 169553 - DNA, 17 bp, synthetic construct
  source 1..17: mol_type = other DNA
tcgagtgctgggtggta

SEQ ID NO: 169554 - DNA, 17 bp, synthetic construct
  source 1..17: mol_type = other DNA
gtcgagtgctgggtggt

SEQ ID NO: 169555 - DNA, 17 bp, synthetic construct
  source 1..17: mol_type = other DNA
agtcgagtgctgggtgg

SEQ ID NO: 169556 - DNA, 17 bp, synthetic construct
  source 1..17: mol_type = other DNA
gagtcgagtgctgggtg

SEQ ID NO: 169557 - DNA, 17 bp, synthetic construct
  source 1..17: mol_type = other DNA
ggagtcgagtgctgggt

SEQ ID NO: 169558 - DNA, 17 bp, synthetic construct
  source 1..17: mol_type = other DNA
tggagtcgagtgctggg

SEQ ID NO: 169559 - DNA, 17 bp, synthetic construct
  source 1..17: mol_type = other DNA
ctggagtcgagtgctgg

SEQ ID NO: 169560 - DNA, 17 bp, synthetic construct
  source 1..17: mol_type = other DNA
gctggagtcgagtgctg

SEQ ID NO: 169561 - DNA, 17 bp, synthetic construct
  source 1..17: mol_type = other DNA
ggctggagtcgagtgct

SEQ ID NO: 169562 - DNA, 17 bp, synthetic construct
  source 1..17: mol_type = other DNA
gggctggagtcgagtgc

SEQ ID NO: 169563 - DNA, 17 bp, synthetic construct
  source 1..17: mol_type = other DNA
agggctggagtcgagtg

SEQ ID NO: 169564 - DNA, 17 bp, synthetic construct
  source 1..17: mol_type = other DNA
cagggctggagtcgagt

SEQ ID NO: 169565 - DNA, 17 bp, synthetic construct
  source 1..17: mol_type = other DNA
acagggctggagtcgag

SEQ ID NO: 169566 - DNA, 17 bp, synthetic construct
  source 1..17: mol_type = other DNA
gacagggctggagtcga

SEQ ID NO: 169567 - DNA, 17 bp, synthetic construct
  source 1..17: mol_type = other DNA
ggacagggctggagtcg

SEQ ID NO: 169568 - DNA, 17 bp, synthetic construct
  source 1..17: mol_type = other DNA
tggacagggctggagtc

SEQ ID NO: 169569 - DNA, 17 bp, synthetic construct
  source 1..17: mol_type = other DNA
ctggacagggctggagt

SEQ ID NO: 169570 - DNA, 17 bp, synthetic construct
  source 1..17: mol_type = other DNA
gctggacagggctggag

SEQ ID NO: 169571 - DNA, 17 bp, synthetic construct
  source 1..17: mol_type = other DNA
ggctggacagggctgga

SEQ ID NO: 169572 - DNA, 17 bp, synthetic construct
  source 1..17: mol_type = other DNA
gggctggacagggctgg

SEQ ID NO: 169573 - DNA, 17 bp, synthetic construct
  source 1..17: mol_type = other DNA
agggctggacagggctg

SEQ ID NO: 169574 - DNA, 17 bp, synthetic construct
  source 1..17: mol_type = other DNA
gagggctggacagggct

SEQ ID NO: 169575 - DNA, 17 bp, synthetic construct
  source 1..17: mol_type = other DNA
tgagggctggacagggc

SEQ ID NO: 169576 - DNA, 17 bp, synthetic construct
  source 1..17: mol_type = other DNA
gtgagggctggacaggg

SEQ ID NO: 169577 - DNA, 17 bp, synthetic construct
  source 1..17: mol_type = other DNA
ggtgagggctggacagg

SEQ ID NO: 169578 - DNA, 17 bp, synthetic construct
  source 1..17: mol_type = other DNA
gggtgagggctggacag

SEQ ID NO: 169579 - DNA, 17 bp, synthetic construct
  source 1..17: mol_type = other DNA
agggtgagggctggaca

SEQ ID NO: 169580 - DNA, 17 bp, synthetic construct
  source 1..17: mol_type = other DNA
tagggtgagggctggac

SEQ ID NO: 169581 - DNA, 17 bp, synthetic construct
  source 1..17: mol_type = other DNA
ctagggtgagggctgga

SEQ ID NO: 169582 - DNA, 17 bp, synthetic construct
  source 1..17: mol_type = other DNA
gctagggtgagggctgg

SEQ ID NO: 169583 - DNA, 17 bp, synthetic construct
  source 1..17: mol_type = other DNA
tgctagggtgagggctg

SEQ ID NO: 169584 - DNA, 17 bp, synthetic construct
  source 1..17: mol_type = other DNA
ctgctagggtgagggct

SEQ ID NO: 169585 - DNA, 17 bp, synthetic construct
  source 1..17: mol_type = other DNA
gctgctagggtgagggc

SEQ ID NO: 169586 - DNA, 17 bp, synthetic construct
  source 1..17: mol_type = other DNA
tgctgctagggtgaggg

SEQ ID NO: 169587 - DNA, 17 bp, synthetic construct
  source 1..17: mol_type = other DNA
ctgctgctagggtgagg

SEQ ID NO: 169588 - DNA, 17 bp, synthetic construct
  source 1..17: mol_type = other DNA
cctgctgctagggtgag

SEQ ID NO: 169589 - DNA, 17 bp, synthetic construct
  source 1..17: mol_type = other DNA
tcctgctgctagggtga

SEQ ID NO: 169590 - DNA, 17 bp, synthetic construct
  source 1..17: mol_type = other DNA
gtcctgctgctagggtg

SEQ ID NO: 169591 - DNA, 17 bp, synthetic construct
  source 1..17: mol_type = other DNA
ggtcctgctgctagggt

SEQ ID NO: 169592 - DNA, 17 bp, synthetic construct
  source 1..17: mol_type = other DNA
tggtcctgctgctaggg

SEQ ID NO: 169593 - DNA, 17 bp, synthetic construct
  source 1..17: mol_type = other DNA
gtggtcctgctgctagg

SEQ ID NO: 169594 - DNA, 17 bp, synthetic construct
  source 1..17: mol_type = other DNA
ggtggtcctgctgctag

SEQ ID NO: 169595 - DNA, 17 bp, synthetic construct
  source 1..17: mol_type = other DNA
cggtggtcctgctgcta

SEQ ID NO: 169596 - DNA, 17 bp, synthetic construct
  source 1..17: mol_type = other DNA
tcggtggtcctgctgct

SEQ ID NO: 169597 - DNA, 17 bp, synthetic construct
  source 1..17: mol_type = other DNA
ctcggtggtcctgctgc

SEQ ID NO: 169598 - DNA, 17 bp, synthetic construct
  source 1..17: mol_type = other DNA
actcggtggtcctgctg

SEQ ID NO: 169599 - DNA, 17 bp, synthetic construct
  source 1..17: mol_type = other DNA
gactcggtggtcctgct

SEQ ID NO: 169600 - DNA, 17 bp, synthetic construct
  source 1..17: mol_type = other DNA
tgactcggtggtcctgc

SEQ ID NO: 169601 - DNA, 17 bp, synthetic construct
  source 1..17: mol_type = other DNA
gtgactcggtggtcctg

SEQ ID NO: 169602 - DNA, 17 bp, synthetic construct
  source 1..17: mol_type = other DNA
ggtgactcggtggtcct

SEQ ID NO: 169603 - DNA, 17 bp, synthetic construct
  source 1..17: mol_type = other DNA
gggtgactcggtggtcc

SEQ ID NO: 169604 - DNA, 17 bp, synthetic construct
  source 1..17: mol_type = other DNA
ggggtgactcggtggtc

SEQ ID NO: 169605 - DNA, 17 bp, synthetic construct
  source 1..17: mol_type = other DNA
gggggtgactcggtggt

SEQ ID NO: 169606 - DNA, 17 bp, synthetic construct
  source 1..17: mol_type = other DNA
agggggtgactcggtgg

SEQ ID NO: 169607 - DNA, 17 bp, synthetic construct
  source 1..17: mol_type = other DNA
aagggggtgactcggtg

SEQ ID NO: 169608 - DNA, 17 bp, synthetic construct
  source 1..17: mol_type = other DNA
gaagggggtgactcggt

SEQ ID NO: 169609 - DNA, 17 bp, synthetic construct
  source 1..17: mol_type = other DNA
agaagggggtgactcgg

SEQ ID NO: 169610 - DNA, 17 bp, synthetic construct
  source 1..17: mol_type = other DNA
gagaagggggtgactcg

SEQ ID NO: 169611 - DNA, 17 bp, synthetic construct
  source 1..17: mol_type = other DNA
ggagaagggggtgactc

SEQ ID NO: 169612 - DNA, 17 bp, synthetic construct
  source 1..17: mol_type = other DNA
tggagaagggggtgact

SEQ ID NO: 169613 - DNA, 17 bp, synthetic construct
  source 1..17: mol_type = other DNA
ctggagaagggggtgac

SEQ ID NO: 169614 - DNA, 17 bp, synthetic construct
  source 1..17: mol_type = other DNA
cctggagaagggggtga

SEQ ID NO: 169615 - DNA, 17 bp, synthetic construct
  source 1..17: mol_type = other DNA
ccctggagaagggggtg

SEQ ID NO: 169616 - DNA, 17 bp, synthetic construct
  source 1..17: mol_type = other DNA
tccctggagaagggggt

SEQ ID NO: 169617 - DNA, 17 bp, synthetic construct
  source 1..17: mol_type = other DNA
gtccctggagaaggggg

SEQ ID NO: 169618 - DNA, 17 bp, synthetic construct
  source 1..17: mol_type = other DNA
cgtccctggagaagggg

SEQ ID NO: 169619 - DNA, 17 bp, synthetic construct
  source 1..17: mol_type = other DNA
tcgtccctggagaaggg

SEQ ID NO: 169620 - DNA, 17 bp, synthetic construct
  source 1..17: mol_type = other DNA
gtcgtccctggagaagg

SEQ ID NO: 169621 - DNA, 17 bp, synthetic construct
  source 1..17: mol_type = other DNA
ggtcgtccctggagaag

SEQ ID NO: 169622 - DNA, 17 bp, synthetic construct
  source 1..17: mol_type = other DNA
tggtcgtccctggagaa

SEQ ID NO: 169623 - DNA, 17 bp, synthetic construct
  source 1..17: mol_type = other DNA
gtggtcgtccctggaga

SEQ ID NO: 169624 - DNA, 17 bp, synthetic construct
  source 1..17: mol_type = other DNA
ggtggtcgtccctggag

SEQ ID NO: 169625 - DNA, 17 bp, synthetic construct
  source 1..17: mol_type = other DNA
gggtggtcgtccctgga

SEQ ID NO: 169626 - DNA, 17 bp, synthetic construct
  source 1..17: mol_type = other DNA
ggggtggtcgtccctgg

SEQ ID NO: 169627 - DNA, 17 bp, synthetic construct
  source 1..17: mol_type = other DNA
cggggtggtcgtccctg

SEQ ID NO: 169628 - DNA, 17 bp, synthetic construct
  source 1..17: mol_type = other DNA
ccggggtggtcgtccct

SEQ ID NO: 169629 - DNA, 17 bp, synthetic construct
  source 1..17: mol_type = other DNA
cccggggtggtcgtccc

SEQ ID NO: 169630 - DNA, 17 bp, synthetic construct
  source 1..17: mol_type = other DNA
gcccggggtggtcgtcc

SEQ ID NO: 169631 - DNA, 17 bp, synthetic construct
  source 1..17: mol_type = other DNA
ggcccggggtggtcgtc

SEQ ID NO: 169632 - DNA, 17 bp, synthetic construct
  source 1..17: mol_type = other DNA
tggcccggggtggtcgt

SEQ ID NO: 169633 - DNA, 17 bp, synthetic construct
  source 1..17: mol_type = other DNA
gtggcccggggtggtcg

SEQ ID NO: 169634 - DNA, 17 bp, synthetic construct
  source 1..17: mol_type = other DNA
tgtggcccggggtggtc

SEQ ID NO: 169635 - DNA, 17 bp, synthetic construct
  source 1..17: mol_type = other DNA
gtgtggcccggggtggt

SEQ ID NO: 169636 - DNA, 17 bp, synthetic construct
  source 1..17: mol_type = other DNA
ggtgtggcccggggtgg

SEQ ID NO: 169637 - DNA, 17 bp, synthetic construct
  source 1..17: mol_type = other DNA
tggtgtggcccggggtg

SEQ ID NO: 169638 - DNA, 17 bp, synthetic construct
  source 1..17: mol_type = other DNA
ctggtgtggcccggggt

SEQ ID NO: 169639 - DNA, 17 bp, synthetic construct
  source 1..17: mol_type = other DNA
cctggtgtggcccgggg

SEQ ID NO: 169640 - DNA, 17 bp, synthetic construct
  source 1..17: mol_type = other DNA
ccctggtgtggcccggg

SEQ ID NO: 169641 - DNA, 17 bp, synthetic construct
  source 1..17: mol_type = other DNA
gccctggtgtggcccgg

SEQ ID NO: 169642 - DNA, 17 bp, synthetic construct
  source 1..17: mol_type = other DNA
ggccctggtgtggcccg

SEQ ID NO: 169643 - DNA, 17 bp, synthetic construct
  source 1..17: mol_type = other DNA
tggccctggtgtggccc

SEQ ID NO: 169644 - DNA, 17 bp, synthetic construct
  source 1..17: mol_type = other DNA
gtggccctggtgtggcc

SEQ ID NO: 169645 - DNA, 17 bp, synthetic construct
  source 1..17: mol_type = other DNA
ggtggccctggtgtggc

SEQ ID NO: 169646 - DNA, 17 bp, synthetic construct
  source 1..17: mol_type = other DNA
aggtggccctggtgtgg

SEQ ID NO: 169647 - DNA, 17 bp, synthetic construct
  source 1..17: mol_type = other DNA
gaggtggccctggtgtg

SEQ ID NO: 169648 - DNA, 17 bp, synthetic construct
  source 1..17: mol_type = other DNA
ggaggtggccctggtgt

SEQ ID NO: 169649 - DNA, 17 bp, synthetic construct
  source 1..17: mol_type = other DNA
tggaggtggccctggtg

SEQ ID NO: 169650 - DNA, 17 bp, synthetic construct
  source 1..17: mol_type = other DNA
ctggaggtggccctggt

SEQ ID NO: 169651 - DNA, 17 bp, synthetic construct
  source 1..17: mol_type = other DNA
cctggaggtggccctgg

SEQ ID NO: 169652 - DNA, 17 bp, synthetic construct
  source 1..17: mol_type = other DNA
tcctggaggtggccctg

SEQ ID NO: 169653 - DNA, 17 bp, synthetic construct
  source 1..17: mol_type = other DNA
gtcctggaggtggccct

SEQ ID NO: 169654 - DNA, 17 bp, synthetic construct
  source 1..17: mol_type = other DNA
ggtcctggaggtggccc

SEQ ID NO: 169655 - DNA, 17 bp, synthetic construct
  source 1..17: mol_type = other DNA
tggtcctggaggtggcc

SEQ ID NO: 169656 - DNA, 17 bp, synthetic construct
  source 1..17: mol_type = other DNA
gtggtcctggaggtggc

SEQ ID NO: 169657 - DNA, 17 bp, synthetic construct
  source 1..17: mol_type = other DNA
cgtggtcctggaggtgg

SEQ ID NO: 169658 - DNA, 17 bp, synthetic construct
  source 1..17: mol_type = other DNA
ccgtggtcctggaggtg

SEQ ID NO: 169659 - DNA, 17 bp, synthetic construct
  source 1..17: mol_type = other DNA
gccgtggtcctggaggt

SEQ ID NO: 169660 - DNA, 17 bp, synthetic construct
  source 1..17: mol_type = other DNA
ggccgtggtcctggagg

SEQ ID NO: 169661 - DNA, 17 bp, synthetic construct
  source 1..17: mol_type = other DNA
tggccgtggtcctggag

SEQ ID NO: 169662 - DNA, 17 bp, synthetic construct
  source 1..17: mol_type = other DNA
gtggccgtggtcctgga

SEQ ID NO: 169663 - DNA, 17 bp, synthetic construct
  source 1..17: mol_type = other DNA
cgtggccgtggtcctgg

SEQ ID NO: 169664 - DNA, 17 bp, synthetic construct
  source 1..17: mol_type = other DNA
ccgtggccgtggtcctg

SEQ ID NO: 169665 - DNA, 17 bp, synthetic construct
  source 1..17: mol_type = other DNA
gccgtggccgtggtcct

SEQ ID NO: 169666 - DNA, 17 bp, synthetic construct
  source 1..17: mol_type = other DNA
ggccgtggccgtggtcc

SEQ ID NO: 169667 - DNA, 17 bp, synthetic construct
  source 1..17: mol_type = other DNA
tggccgtggccgtggtc

SEQ ID NO: 169668 - DNA, 17 bp, synthetic construct
  source 1..17: mol_type = other DNA
gtggccgtggccgtggt

SEQ ID NO: 169669 - DNA, 17 bp, synthetic construct
  source 1..17: mol_type = other DNA
tgtggccgtggccgtgg

SEQ ID NO: 169670 - DNA, 17 bp, synthetic construct
  source 1..17: mol_type = other DNA
gtgtggccgtggccgtg

SEQ ID NO: 169671 - DNA, 17 bp, synthetic construct
  source 1..17: mol_type = other DNA
ggtgtggccgtggccgt

SEQ ID NO: 169672 - DNA, 17 bp, synthetic construct
  source 1..17: mol_type = other DNA
gggtgtggccgtggccg

SEQ ID NO: 169673 - DNA, 17 bp, synthetic construct
  source 1..17: mol_type = other DNA
tgggtgtggccgtggcc

SEQ ID NO: 169674 - DNA, 17 bp, synthetic construct
  source 1..17: mol_type = other DNA
ctgggtgtggccgtggc

SEQ ID NO: 169675 - DNA, 17 bp, synthetic construct
  source 1..17: mol_type = other DNA
gctgggtgtggccgtgg

SEQ ID NO: 169676 - DNA, 17 bp, synthetic construct
  source 1..17: mol_type = other DNA
tgctgggtgtggccgtg

SEQ ID NO: 169677 - DNA, 17 bp, synthetic construct
  source 1..17: mol_type = other DNA
ttgctgggtgtggccgt

SEQ ID NO: 169678 - DNA, 17 bp, synthetic construct
  source 1..17: mol_type = other DNA
cttgctgggtgtggccg

SEQ ID NO: 169679 - DNA, 17 bp, synthetic construct
  source 1..17: mol_type = other DNA
tcttgctgggtgtggcc

SEQ ID NO: 169680 - DNA, 17 bp, synthetic construct
  source 1..17: mol_type = other DNA
gtcttgctgggtgtggc

SEQ ID NO: 169681 - DNA, 17 bp, synthetic construct
  source 1..17: mol_type = other DNA
ggtcttgctgggtgtgg

SEQ ID NO: 169682 - DNA, 17 bp, synthetic construct
  source 1..17: mol_type = other DNA
gggtcttgctgggtgtg

SEQ ID NO: 169683 - DNA, 17 bp, synthetic construct
  source 1..17: mol_type = other DNA
cgggtcttgctgggtgt

SEQ ID NO: 169684 - DNA, 17 bp, synthetic construct
  source 1..17: mol_type = other DNA
gcgggtcttgctgggtg

SEQ ID NO: 169685 - DNA, 17 bp, synthetic construct
  source 1..17: mol_type = other DNA
tgcgggtcttgctgggt

SEQ ID NO: 169686 - DNA, 17 bp, synthetic construct
  source 1..17: mol_type = other DNA
gtgcgggtcttgctggg

SEQ ID NO: 169687 - DNA, 17 bp, synthetic construct
  source 1..17: mol_type = other DNA
ggtgcgggtcttgctgg

SEQ ID NO: 169688 - DNA, 17 bp, synthetic construct
  source 1..17: mol_type = other DNA
aggtgcgggtcttgctg

SEQ ID NO: 169689 - DNA, 17 bp, synthetic construct
  source 1..17: mol_type = other DNA
gaggtgcgggtcttgct

SEQ ID NO: 169690 - DNA, 17 bp, synthetic construct
  source 1..17: mol_type = other DNA
cgaggtgcgggtcttgc

SEQ ID NO: 169691 - DNA, 17 bp, synthetic construct
  source 1..17: mol_type = other DNA
tcgaggtgcgggtcttg

SEQ ID NO: 169692 - DNA, 17 bp, synthetic construct
  source 1..17: mol_type = other DNA
gtcgaggtgcgggtctt

SEQ ID NO: 169693 - DNA, 17 bp, synthetic construct
  source 1..17: mol_type = other DNA
ggtcgaggtgcgggtct

SEQ ID NO: 169694 - DNA, 17 bp, synthetic construct
  source 1..17: mol_type = other DNA
gggtcgaggtgcgggtc

SEQ ID NO: 169695 - DNA, 17 bp, synthetic construct
  source 1..17: mol_type = other DNA
agggtcgaggtgcgggt

SEQ ID NO: 169696 - DNA, 17 bp, synthetic construct
  source 1..17: mol_type = other DNA
cagggtcgaggtgcggg

SEQ ID NO: 169697 - DNA, 17 bp, synthetic construct
  source 1..17: mol_type = other DNA
gcagggtcgaggtgcgg

SEQ ID NO: 169698 - DNA, 17 bp, synthetic construct
  source 1..17: mol_type = other DNA
agcagggtcgaggtgcg

SEQ ID NO: 169699 - DNA, 17 bp, synthetic construct
  source 1..17: mol_type = other DNA
cagcagggtcgaggtgc

SEQ ID NO: 169700 - DNA, 17 bp, synthetic construct
  source 1..17: mol_type = other DNA
gcagcagggtcgaggtg

SEQ ID NO: 169701 - DNA, 17 bp, synthetic construct
  source 1..17: mol_type = other DNA
ggcagcagggtcgaggt

SEQ ID NO: 169702 - DNA, 17 bp, synthetic construct
  source 1..17: mol_type = other DNA
gggcagcagggtcgagg

SEQ ID NO: 169703 - DNA, 17 bp, synthetic construct
  source 1..17: mol_type = other DNA
tgggcagcagggtcgag

SEQ ID NO: 169704 - DNA, 17 bp, synthetic construct
  source 1..17: mol_type = other DNA
ctgggcagcagggtcga

SEQ ID NO: 169705 - DNA, 17 bp, synthetic construct
  source 1..17: mol_type = other DNA
gctgggcagcagggtcg

SEQ ID NO: 169706 - DNA, 17 bp, synthetic construct
  source 1..17: mol_type = other DNA
tgctgggcagcagggtc

SEQ ID NO: 169707 - DNA, 17 bp, synthetic construct
  source 1..17: mol_type = other DNA
ctgctgggcagcagggt

SEQ ID NO: 169708 - DNA, 17 bp, synthetic construct
  source 1..17: mol_type = other DNA
gctgctgggcagcaggg

SEQ ID NO: 169709 - DNA, 17 bp, synthetic construct
  source 1..17: mol_type = other DNA
ggctgctgggcagcagg

SEQ ID NO: 169710 - DNA, 17 bp, synthetic construct
  source 1..17: mol_type = other DNA
gggctgctgggcagcag

SEQ ID NO: 169711 - DNA, 17 bp, synthetic construct
  source 1..17: mol_type = other DNA
ggggctgctgggcagca

SEQ ID NO: 169712 - DNA, 17 bp, synthetic construct
  source 1..17: mol_type = other DNA
tggggctgctgggcagc

SEQ ID NO: 169713 - DNA, 17 bp, synthetic construct
  source 1..17: mol_type = other DNA
gtggggctgctgggcag

SEQ ID NO: 169714 - DNA, 17 bp, synthetic construct
  source 1..17: mol_type = other DNA
tgtggggctgctgggca

SEQ ID NO: 169715 - DNA, 17 bp, synthetic construct
  source 1..17: mol_type = other DNA
atgtggggctgctgggc

SEQ ID NO: 169716 - DNA, 17 bp, synthetic construct
  source 1..17: mol_type = other DNA
gatgtggggctgctggg

SEQ ID NO: 169717 - DNA, 17 bp, synthetic construct
  source 1..17: mol_type = other DNA
cgatgtggggctgctgg

SEQ ID NO: 169718 - DNA, 17 bp, synthetic construct
  source 1..17: mol_type = other DNA
ccgatgtggggctgctg

SEQ ID NO: 169719 - DNA, 17 bp, synthetic construct
  source 1..17: mol_type = other DNA
gccgatgtggggctgct

SEQ ID NO: 169720 - DNA, 17 bp, synthetic construct
  source 1..17: mol_type = other DNA
ggccgatgtggggctgc

SEQ ID NO: 169721 - DNA, 17 bp, synthetic construct
  source 1..17: mol_type = other DNA
gggccgatgtggggctg

SEQ ID NO: 169722 - DNA, 17 bp, synthetic construct
  source 1..17: mol_type = other DNA
ggggccgatgtggggct

SEQ ID NO: 169723 - DNA, 17 bp, synthetic construct
  source 1..17: mol_type = other DNA
tggggccgatgtggggc

SEQ ID NO: 169724 - DNA, 17 bp, synthetic construct
  source 1..17: mol_type = other DNA
ttggggccgatgtgggg

SEQ ID NO: 169725 - DNA, 17 bp, synthetic construct
  source 1..17: mol_type = other DNA
attggggccgatgtggg

SEQ ID NO: 169726 - DNA, 17 bp, synthetic construct
  source 1..17: mol_type = other DNA
tattggggccgatgtgg

SEQ ID NO: 169727 - DNA, 17 bp, synthetic construct
  source 1..17: mol_type = other DNA
ttattggggccgatgtg

SEQ ID NO: 169728 - DNA, 17 bp, synthetic construct
  source 1..17: mol_type = other DNA
gttattggggccgatgt

SEQ ID NO: 169729 - DNA, 17 bp, synthetic construct
  source 1..17: mol_type = other DNA
ggttattggggccgatg

SEQ ID NO: 169730 - DNA, 17 bp, synthetic construct
  source 1..17: mol_type = other DNA
tggttattggggccgat

SEQ ID NO: 169731 - DNA, 17 bp, synthetic construct
  source 1..17: mol_type = other DNA
gtggttattggggccga

SEQ ID NO: 169732 - DNA, 17 bp, synthetic construct
  source 1..17: mol_type = other DNA
cgtggttattggggccg

SEQ ID NO: 169733 - DNA, 17 bp, synthetic construct
  source 1..17: mol_type = other DNA
ccgtggttattggggcc

SEQ ID NO: 169734 - DNA, 17 bp, synthetic construct
  source 1..17: mol_type = other DNA
accgtggttattggggc

SEQ ID NO: 169735 - DNA, 17 bp, synthetic construct
  source 1..17: mol_type = other DNA
caccgtggttattgggg

SEQ ID NO: 169736 - DNA, 17 bp, synthetic construct
  source 1..17: mol_type = other DNA
ccaccgtggttattggg

SEQ ID NO: 169737 - DNA, 17 bp, synthetic construct
  source 1..17: mol_type = other DNA
accaccgtggttattgg

SEQ ID NO: 169738 - DNA, 17 bp, synthetic construct
  source 1..17: mol_type = other DNA
caccaccgtggttattg

SEQ ID NO: 169739 - DNA, 17 bp, synthetic construct
  source 1..17: mol_type = other DNA
tcaccaccgtggttatt

SEQ ID NO: 169740 - DNA, 17 bp, synthetic construct
  source 1..17: mol_type = other DNA
gtcaccaccgtggttat

SEQ ID NO: 169741 - DNA, 17 bp, synthetic construct
  source 1..17: mol_type = other DNA
ggtcaccaccgtggtta

SEQ ID NO: 169742 - DNA, 17 bp, synthetic construct
  source 1..17: mol_type = other DNA
tggtcaccaccgtggtt

SEQ ID NO: 169743 - DNA, 17 bp, synthetic construct
  source 1..17: mol_type = other DNA
atggtcaccaccgtggt

SEQ ID NO: 169744 - DNA, 17 bp, synthetic construct
  source 1..17: mol_type = other DNA
catggtcaccaccgtgg

SEQ ID NO: 169745 - DNA, 17 bp, synthetic construct
  source 1..17: mol_type = other DNA
ccatggtcaccaccgtg

SEQ ID NO: 169746 - DNA, 17 bp, synthetic construct
  source 1..17: mol_type = other DNA
cccatggtcaccaccgt

SEQ ID NO: 169747 - DNA, 17 bp, synthetic construct
  source 1..17: mol_type = other DNA
gcccatggtcaccaccg

SEQ ID NO: 169748 - DNA, 17 bp, synthetic construct
  source 1..17: mol_type = other DNA
agcccatggtcaccacc

SEQ ID NO: 169749 - DNA, 17 bp, synthetic construct
  source 1..17: mol_type = other DNA
cagcccatggtcaccac

SEQ ID NO: 169750 - DNA, 17 bp, synthetic construct
  source 1..17: mol_type = other DNA
acagcccatggtcacca

SEQ ID NO: 169751 - DNA, 17 bp, synthetic construct
  source 1..17: mol_type = other DNA
cacagcccatggtcacc

SEQ ID NO: 169752 - DNA, 17 bp, synthetic construct
  source 1..17: mol_type = other DNA
tcacagcccatggtcac

SEQ ID NO: 169753 - DNA, 17 bp, synthetic construct
  source 1..17: mol_type = other DNA
ctcacagcccatggtca

SEQ ID NO: 169754 - DNA, 17 bp, synthetic construct
  source 1..17: mol_type = other DNA
gctcacagcccatggtc

SEQ ID NO: 169755 - DNA, 17 bp, synthetic construct
  source 1..17: mol_type = other DNA
ggctcacagcccatggt

SEQ ID NO: 169756 - DNA, 17 bp, synthetic construct
  source 1..17: mol_type = other DNA
gggctcacagcccatgg

SEQ ID NO: 169757 - DNA, 17 bp, synthetic construct
  source 1..17: mol_type = other DNA
ggggctcacagcccatg

SEQ ID NO: 169758 - DNA, 17 bp, synthetic construct
  source 1..17: mol_type = other DNA
tggggctcacagcccat

SEQ ID NO: 169759 - DNA, 17 bp, synthetic construct
  source 1..17: mol_type = other DNA
ctggggctcacagccca

SEQ ID NO: 169760 - DNA, 17 bp, synthetic construct
  source 1..17: mol_type = other DNA
actggggctcacagccc

SEQ ID NO: 169761 - DNA, 17 bp, synthetic construct
  source 1..17: mol_type = other DNA
cactggggctcacagcc

SEQ ID NO: 169762 - DNA, 17 bp, synthetic construct
  source 1..17: mol_type = other DNA
acactggggctcacagc

SEQ ID NO: 169763 - DNA, 17 bp, synthetic construct
  source 1..17: mol_type = other DNA
cacactggggctcacag

SEQ ID NO: 169764 - DNA, 17 bp, synthetic construct
  source 1..17: mol_type = other DNA
gcacactggggctcaca

SEQ ID NO: 169765 - DNA, 17 bp, synthetic construct
  source 1..17: mol_type = other DNA
ggcacactggggctcac

SEQ ID NO: 169766 - DNA, 17 bp, synthetic construct
  source 1..17: mol_type = other DNA
aggcacactggggctca

SEQ ID NO: 169767 - DNA, 17 bp, synthetic construct
  source 1..17: mol_type = other DNA
caggcacactggggctc

SEQ ID NO: 169768 - DNA, 17 bp, synthetic construct
  source 1..17: mol_type = other DNA
ccaggcacactggggct

SEQ ID NO: 169769 - DNA, 17 bp, synthetic construct
  source 1..17: mol_type = other DNA
accaggcacactggggc

SEQ ID NO: 169770 - DNA, 17 bp, synthetic construct
  source 1..17: mol_type = other DNA
gaccaggcacactgggg

SEQ ID NO: 169771 - DNA, 17 bp, synthetic construct
  source 1..17: mol_type = other DNA
tgaccaggcacactggg

SEQ ID NO: 169772 - DNA, 17 bp, synthetic construct
  source 1..17: mol_type = other DNA
ctgaccaggcacactgg

SEQ ID NO: 169773 - DNA, 17 bp, synthetic construct
  source 1..17: mol_type = other DNA
tctgaccaggcacactg

SEQ ID NO: 169774 - DNA, 17 bp, synthetic construct
  source 1..17: mol_type = other DNA
ctctgaccaggcacact

SEQ ID NO: 169775 - DNA, 17 bp, synthetic construct
  source 1..17: mol_type = other DNA
actctgaccaggcacac

SEQ ID NO: 169776 - DNA, 17 bp, synthetic construct
  source 1..17: mol_type = other DNA
cactctgaccaggcaca

SEQ ID NO: 169777 - DNA, 17 bp, synthetic construct
  source 1..17: mol_type = other DNA
ccactctgaccaggcac

SEQ ID NO: 169778 - DNA, 17 bp, synthetic construct
  source 1..17: mol_type = other DNA
gccactctgaccaggca

SEQ ID NO: 169779 - DNA, 17 bp, synthetic construct
  source 1..17: mol_type = other DNA
agccactctgaccaggc

SEQ ID NO: 169780 - DNA, 17 bp, synthetic construct
  source 1..17: mol_type = other DNA
cagccactctgaccagg

SEQ ID NO: 169781 - DNA, 17 bp, synthetic construct
  source 1..17: mol_type = other DNA
ccagccactctgaccag

SEQ ID NO: 169782 - DNA, 17 bp, synthetic construct
  source 1..17: mol_type = other DNA
tccagccactctgacca

SEQ ID NO: 169783 - DNA, 17 bp, synthetic construct
  source 1..17: mol_type = other DNA
gtccagccactctgacc

SEQ ID NO: 169784 - DNA, 17 bp, synthetic construct
  source 1..17: mol_type = other DNA
agtccagccactctgac

SEQ ID NO: 169785 - DNA, 17 bp, synthetic construct
  source 1..17: mol_type = other DNA
tagtccagccactctga

SEQ ID NO: 169786 - DNA, 17 bp, synthetic construct
  source 1..17: mol_type = other DNA
gtagtccagccactctg

SEQ ID NO: 169787 - DNA, 17 bp, synthetic construct
  source 1..17: mol_type = other DNA
tgtagtccagccactct

SEQ ID NO: 169788 - DNA, 17 bp, synthetic construct
  source 1..17: mol_type = other DNA
ctgtagtccagccactc

SEQ ID NO: 169789 - DNA, 17 bp, synthetic construct
  source 1..17: mol_type = other DNA
gctgtagtccagccact

SEQ ID NO: 169790 - DNA, 17 bp, synthetic construct
  source 1..17: mol_type = other DNA
agctgtagtccagccac

SEQ ID NO: 169791 - DNA, 17 bp, synthetic construct
  source 1..17: mol_type = other DNA
tagctgtagtccagcca

SEQ ID NO: 169792 - DNA, 17 bp, synthetic construct
  source 1..17: mol_type = other DNA
gtagctgtagtccagcc

SEQ ID NO: 169793 - DNA, 17 bp, synthetic construct
  source 1..17: mol_type = other DNA
ggtagctgtagtccagc

SEQ ID NO: 169794 - DNA, 17 bp, synthetic construct
  source 1..17: mol_type = other DNA
gggtagctgtagtccag

SEQ ID NO: 169795 - DNA, 17 bp, synthetic construct
  source 1..17: mol_type = other DNA
ggggtagctgtagtcca

SEQ ID NO: 169796 - DNA, 17 bp, synthetic construct
  source 1..17: mol_type = other DNA
tggggtagctgtagtcc

SEQ ID NO: 169797 - DNA, 17 bp, synthetic construct
  source 1..17: mol_type = other DNA
atggggtagctgtagtc

SEQ ID NO: 169798 - DNA, 17 bp, synthetic construct
  source 1..17: mol_type = other DNA
catggggtagctgtagt

SEQ ID NO: 169799 - DNA, 17 bp, synthetic construct
  source 1..17: mol_type = other DNA
gcatggggtagctgtag

SEQ ID NO: 169800 - DNA, 17 bp, synthetic construct
  source 1..17: mol_type = other DNA
ggcatggggtagctgta

SEQ ID NO: 169801 - DNA, 17 bp, synthetic construct
  source 1..17: mol_type = other DNA
cggcatggggtagctgt

SEQ ID NO: 169802 - DNA, 17 bp, synthetic construct
  source 1..17: mol_type = other DNA
ccggcatggggtagctg

SEQ ID NO: 169803 - DNA, 17 bp, synthetic construct
  source 1..17: mol_type = other DNA
cccggcatggggtagct

SEQ ID NO: 169804 - DNA, 17 bp, synthetic construct
  source 1..17: mol_type = other DNA
ccccggcatggggtagc

SEQ ID NO: 169805 - DNA, 17 bp, synthetic construct
  source 1..17: mol_type = other DNA
gccccggcatggggtag

SEQ ID NO: 169806 - DNA, 17 bp, synthetic construct
  source 1..17: mol_type = other DNA
ggccccggcatggggta

SEQ ID NO: 169807 - DNA, 17 bp, synthetic construct
  source 1..17: mol_type = other DNA
gggccccggcatggggt

SEQ ID NO: 169808 - DNA, 17 bp, synthetic construct
  source 1..17: mol_type = other DNA
agggccccggcatgggg

SEQ ID NO: 169809 - DNA, 17 bp, synthetic construct
  source 1..17: mol_type = other DNA
gagggccccggcatggg

SEQ ID NO: 169810 - DNA, 17 bp, synthetic construct
  source 1..17: mol_type = other DNA
agagggccccggcatgg

SEQ ID NO: 169811 - DNA, 17 bp, synthetic construct
  source 1..17: mol_type = other DNA
cagagggccccggcatg

SEQ ID NO: 169812 - DNA, 17 bp, synthetic construct
  source 1..17: mol_type = other DNA
ccagagggccccggcat

SEQ ID NO: 169813 - DNA, 17 bp, synthetic construct
  source 1..17: mol_type = other DNA
gccagagggccccggca

SEQ ID NO: 169814 - DNA, 17 bp, synthetic construct
  source 1..17: mol_type = other DNA
cgccagagggccccggc

SEQ ID NO: 169815 - DNA, 17 bp, synthetic construct
  source 1..17: mol_type = other DNA
ccgccagagggccccgg

SEQ ID NO: 169816 - DNA, 17 bp, synthetic construct
  source 1..17: mol_type = other DNA
cccgccagagggccccg

SEQ ID NO: 169817 - DNA, 17 bp, synthetic construct
  source 1..17: mol_type = other DNA
ccccgccagagggcccc

SEQ ID NO: 169818 - DNA, 17 bp, synthetic construct
  source 1..17: mol_type = other DNA
tccccgccagagggccc

SEQ ID NO: 169819 - DNA, 17 bp, synthetic construct
  source 1..17: mol_type = other DNA
gtccccgccagagggcc

SEQ ID NO: 169820 - DNA, 17 bp, synthetic construct
  source 1..17: mol_type = other DNA
agtccccgccagagggc

SEQ ID NO: 169821 - DNA, 17 bp, synthetic construct
  source 1..17: mol_type = other DNA
aagtccccgccagaggg

SEQ ID NO: 169822 - DNA, 17 bp, synthetic construct
  source 1..17: mol_type = other DNA
aaagtccccgccagagg

SEQ ID NO: 169823 - DNA, 17 bp, synthetic construct
  source 1..17: mol_type = other DNA
caaagtccccgccagag

SEQ ID NO: 169824 - DNA, 17 bp, synthetic construct
  source 1..17: mol_type = other DNA
tcaaagtccccgccaga

SEQ ID NO: 169825 - DNA, 17 bp, synthetic construct
  source 1..17: mol_type = other DNA
gtcaaagtccccgccag

SEQ ID NO: 169826 - DNA, 17 bp, synthetic construct
  source 1..17: mol_type = other DNA
tgtcaaagtccccgcca

SEQ ID NO: 169827 - DNA, 17 bp, synthetic construct
  source 1..17: mol_type = other DNA
gtgtcaaagtccccgcc

SEQ ID NO: 169828 - DNA, 17 bp, synthetic construct
  source 1..17: mol_type = other DNA
ggtgtcaaagtccccgc

SEQ ID NO: 169829 - DNA, 17 bp, synthetic construct
  source 1..17: mol_type = other DNA
aggtgtcaaagtccccg

SEQ ID NO: 169830 - DNA, 17 bp, synthetic construct
  source 1..17: mol_type = other DNA
taggtgtcaaagtcccc

SEQ ID NO: 169831 - DNA, 17 bp, synthetic construct
  source 1..17: mol_type = other DNA
gtaggtgtcaaagtccc

SEQ ID NO: 169832 - DNA, 17 bp, synthetic construct
  source 1..17: mol_type = other DNA
agtaggtgtcaaagtcc

SEQ ID NO: 169833 - DNA, 17 bp, synthetic construct
  source 1..17: mol_type = other DNA
gagtaggtgtcaaagtc

SEQ ID NO: 169834 - DNA, 17 bp, synthetic construct
  source 1..17: mol_type = other DNA
ggagtaggtgtcaaagt

SEQ ID NO: 169835 - DNA, 17 bp, synthetic construct
  source 1..17: mol_type = other DNA
tggagtaggtgtcaaag

SEQ ID NO: 169836 - DNA, 17 bp, synthetic construct
  source 1..17: mol_type = other DNA
ttggagtaggtgtcaaa

SEQ ID NO: 169837 - DNA, 17 bp, synthetic construct
  source 1..17: mol_type = other DNA
gttggagtaggtgtcaa

SEQ ID NO: 169838 - DNA, 17 bp, synthetic construct
  source 1..17: mol_type = other DNA
tgttggagtaggtgtca

SEQ ID NO: 169839 - DNA, 17 bp, synthetic construct
  source 1..17: mol_type = other DNA
atgttggagtaggtgtc

SEQ ID NO: 169840 - DNA, 17 bp, synthetic construct
  source 1..17: mol_type = other DNA
gatgttggagtaggtgt

SEQ ID NO: 169841 - DNA, 17 bp, synthetic construct
  source 1..17: mol_type = other DNA
ggatgttggagtaggtg

SEQ ID NO: 169842 - DNA, 17 bp, synthetic construct
  source 1..17: mol_type = other DNA
cggatgttggagtaggt

SEQ ID NO: 169843 - DNA, 17 bp, synthetic construct
  source 1..17: mol_type = other DNA
acggatgttggagtagg

SEQ ID NO: 169844 - DNA, 17 bp, synthetic construct
  source 1..17: mol_type = other DNA
cacggatgttggagtag

SEQ ID NO: 169845 - DNA, 17 bp, synthetic construct
  source 1..17: mol_type = other DNA
gcacggatgttggagta

SEQ ID NO: 169846 - DNA, 17 bp, synthetic construct
  source 1..17: mol_type = other DNA
cgcacggatgttggagt

SEQ ID NO: 169847 - DNA, 17 bp, synthetic construct
  source 1..17: mol_type = other DNA
ccgcacggatgttggag

SEQ ID NO: 169848 - DNA, 17 bp, synthetic construct
  source 1..17: mol_type = other DNA
gccgcacggatgttgga

SEQ ID NO: 169849 - DNA, 17 bp, synthetic construct
  source 1..17: mol_type = other DNA
ggccgcacggatgttgg

SEQ ID NO: 169850 - DNA, 17 bp, synthetic construct
  source 1..17: mol_type = other DNA
cggccgcacggatgttg

SEQ ID NO: 169851 - DNA, 17 bp, synthetic construct
  source 1..17: mol_type = other DNA
ccggccgcacggatgtt

SEQ ID NO: 169852 - DNA, 17 bp, synthetic construct
  source 1..17: mol_type = other DNA
tccggccgcacggatgt

SEQ ID NO: 169853 - DNA, 17 bp, synthetic construct
  source 1..17: mol_type = other DNA
ctccggccgcacggatg

SEQ ID NO: 169854 - DNA, 17 bp, synthetic construct
  source 1..17: mol_type = other DNA
cctccggccgcacggat

SEQ ID NO: 169855 - DNA, 17 bp, synthetic construct
  source 1..17: mol_type = other DNA
ccctccggccgcacgga

SEQ ID NO: 169856 - DNA, 17 bp, synthetic construct
  source 1..17: mol_type = other DNA
cccctccggccgcacgg

SEQ ID NO: 169857 - DNA, 17 bp, synthetic construct
  source 1..17: mol_type = other DNA
gcccctccggccgcacg

SEQ ID NO: 169858 - DNA, 17 bp, synthetic construct
  source 1..17: mol_type = other DNA
ggcccctccggccgcac

SEQ ID NO: 169859 - DNA, 17 bp, synthetic construct
  source 1..17: mol_type = other DNA
cggcccctccggccgca

SEQ ID NO: 169860 - DNA, 17 bp, synthetic construct
  source 1..17: mol_type = other DNA
acggcccctccggccgc

SEQ ID NO: 169861 - DNA, 17 bp, synthetic construct
  source 1..17: mol_type = other DNA
gacggcccctccggccg

SEQ ID NO: 169862 - DNA, 17 bp, synthetic construct
  source 1..17: mol_type = other DNA
agacggcccctccggcc

SEQ ID NO: 169863 - DNA, 17 bp, synthetic construct
  source 1..17: mol_type = other DNA
cagacggcccctccggc

SEQ ID NO: 169864 - DNA, 17 bp, synthetic construct
  source 1..17: mol_type = other DNA
acagacggcccctccgg

SEQ ID NO: 169865 - DNA, 17 bp, synthetic construct
  source 1..17: mol_type = other DNA
cacagacggcccctccg

SEQ ID NO: 169866 - DNA, 17 bp, synthetic construct
  source 1..17: mol_type = other DNA
tcacagacggcccctcc

SEQ ID NO: 169867 - DNA, 17 bp, synthetic construct
  source 1..17: mol_type = other DNA
ctcacagacggcccctc

SEQ ID NO: 169868 - DNA, 17 bp, synthetic construct
  source 1..17: mol_type = other DNA
gctcacagacggcccct

SEQ ID NO: 169869 - DNA, 17 bp, synthetic construct
  source 1..17: mol_type = other DNA
tgctcacagacggcccc

SEQ ID NO: 169870 - DNA, 17 bp, synthetic construct
  source 1..17: mol_type = other DNA
ctgctcacagacggccc

SEQ ID NO: 169871 - DNA, 17 bp, synthetic construct
  source 1..17: mol_type = other DNA
gctgctcacagacggcc

SEQ ID NO: 169872 - DNA, 17 bp, synthetic construct
  source 1..17: mol_type = other DNA
ggctgctcacagacggc

SEQ ID NO: 169873 - DNA, 17 bp, synthetic construct
  source 1..17: mol_type = other DNA
gggctgctcacagacgg

SEQ ID NO: 169874 - DNA, 17 bp, synthetic construct
  source 1..17: mol_type = other DNA
ggggctgctcacagacg

SEQ ID NO: 169875 - DNA, 17 bp, synthetic construct
  source 1..17: mol_type = other DNA
aggggctgctcacagac

SEQ ID NO: 169876 - DNA, 17 bp, synthetic construct
  source 1..17: mol_type = other DNA
caggggctgctcacaga

SEQ ID NO: 169877 - DNA, 17 bp, synthetic construct
  source 1..17: mol_type = other DNA
ccaggggctgctcacag

SEQ ID NO: 169878 - DNA, 17 bp, synthetic construct
  source 1..17: mol_type = other DNA
cccaggggctgctcaca

SEQ ID NO: 169879 - DNA, 17 bp, synthetic construct
  source 1..17: mol_type = other DNA
gcccaggggctgctcac

SEQ ID NO: 169880 - DNA, 17 bp, synthetic construct
  source 1..17: mol_type = other DNA
ggcccaggggctgctca

SEQ ID NO: 169881 - DNA, 17 bp, synthetic construct
  source 1..17: mol_type = other DNA
aggcccaggggctgctc

SEQ ID NO: 169882 - DNA, 17 bp, synthetic construct
  source 1..17: mol_type = other DNA
gaggcccaggggctgct

SEQ ID NO: 169883 - DNA, 17 bp, synthetic construct
  source 1..17: mol_type = other DNA
cgaggcccaggggctgc

SEQ ID NO: 169884 - DNA, 17 bp, synthetic construct
  source 1..17: mol_type = other DNA
tcgaggcccaggggctg

SEQ ID NO: 169885 - DNA, 17 bp, synthetic construct
  source 1..17: mol_type = other DNA
ctcgaggcccaggggct

SEQ ID NO: 169886 - DNA, 17 bp, synthetic construct
  source 1..17: mol_type = other DNA
actcgaggcccaggggc

SEQ ID NO: 169887 - DNA, 17 bp, synthetic construct
  source 1..17: mol_type = other DNA
cactcgaggcccagggg

SEQ ID NO: 169888 - DNA, 17 bp, synthetic construct
  source 1..17: mol_type = other DNA
gcactcgaggcccaggg

SEQ ID NO: 169889 - DNA, 17 bp, synthetic construct
  source 1..17: mol_type = other DNA
ggcactcgaggcccagg

SEQ ID NO: 169890 - DNA, 17 bp, synthetic construct
  source 1..17: mol_type = other DNA
cggcactcgaggcccag

SEQ ID NO: 169891 - DNA, 17 bp, synthetic construct
  source 1..17: mol_type = other DNA
acggcactcgaggccca

SEQ ID NO: 169892 - DNA, 17 bp, synthetic construct
  source 1..17: mol_type = other DNA
cacggcactcgaggccc

SEQ ID NO: 169893 - DNA, 17 bp, synthetic construct
  source 1..17: mol_type = other DNA
gcacggcactcgaggcc

SEQ ID NO: 169894 - DNA, 17 bp, synthetic construct
  source 1..17: mol_type = other DNA
ggcacggcactcgaggc

SEQ ID NO: 169895 - DNA, 17 bp, synthetic construct
  source 1..17: mol_type = other DNA
gggcacggcactcgagg

SEQ ID NO: 169896 - DNA, 17 bp, synthetic construct
  source 1..17: mol_type = other DNA
tgggcacggcactcgag

SEQ ID NO: 169897 - DNA, 17 bp, synthetic construct
  source 1..17: mol_type = other DNA
ctgggcacggcactcga

SEQ ID NO: 169898 - DNA, 17 bp, synthetic construct
  source 1..17: mol_type = other DNA
cctgggcacggcactcg

SEQ ID NO: 169899 - DNA, 17 bp, synthetic construct
  source 1..17: mol_type = other DNA
gcctgggcacggcactc

SEQ ID NO: 169900 - DNA, 17 bp, synthetic construct
  source 1..17: mol_type = other DNA
ggcctgggcacggcact

SEQ ID NO: 169901 - DNA, 17 bp, synthetic construct
  source 1..17: mol_type = other DNA
gggcctgggcacggcac

SEQ ID NO: 169902 - DNA, 17 bp, synthetic construct
  source 1..17: mol_type = other DNA
tgggcctgggcacggca

SEQ ID NO: 169903 - DNA, 17 bp, synthetic construct
  source 1..17: mol_type = other DNA
ctgggcctgggcacggc

SEQ ID NO: 169904 - DNA, 17 bp, synthetic construct
  source 1..17: mol_type = other DNA
gctgggcctgggcacgg

SEQ ID NO: 169905 - DNA, 17 bp, synthetic construct
  source 1..17: mol_type = other DNA
ggctgggcctgggcacg

SEQ ID NO: 169906 - DNA, 17 bp, synthetic construct
  source 1..17: mol_type = other DNA
aggctgggcctgggcac

SEQ ID NO: 169907 - DNA, 17 bp, synthetic construct
  source 1..17: mol_type = other DNA
caggctgggcctgggca

SEQ ID NO: 169908 - DNA, 17 bp, synthetic construct
  source 1..17: mol_type = other DNA
ccaggctgggcctgggc

SEQ ID NO: 169909 - DNA, 17 bp, synthetic construct
  source 1..17: mol_type = other DNA
accaggctgggcctggg

SEQ ID NO: 169910 - DNA, 17 bp, synthetic construct
  source 1..17: mol_type = other DNA
caccaggctgggcctgg

SEQ ID NO: 169911 - DNA, 17 bp, synthetic construct
  source 1..17: mol_type = other DNA
acaccaggctgggcctg

SEQ ID NO: 169912 - DNA, 17 bp, synthetic construct
  source 1..17: mol_type = other DNA
gacaccaggctgggcct

SEQ ID NO: 169913 - DNA, 17 bp, synthetic construct
  source 1..17: mol_type = other DNA
ggacaccaggctgggcc

SEQ ID NO: 169914 - DNA, 17 bp, synthetic construct
  source 1..17: mol_type = other DNA
gggacaccaggctgggc

SEQ ID NO: 169915 - DNA, 17 bp, synthetic construct
  source 1..17: mol_type = other DNA
ggggacaccaggctggg

SEQ ID NO: 169916 - DNA, 17 bp, synthetic construct
  source 1..17: mol_type = other DNA
gggggacaccaggctgg

SEQ ID NO: 169917 - DNA, 17 bp, synthetic construct
  source 1..17: mol_type = other DNA
agggggacaccaggctg

SEQ ID NO: 169918 - DNA, 17 bp, synthetic construct
  source 1..17: mol_type = other DNA
cagggggacaccaggct

SEQ ID NO: 169919 - DNA, 17 bp, synthetic construct
  source 1..17: mol_type = other DNA
gcagggggacaccaggc

SEQ ID NO: 169920 - DNA, 17 bp, synthetic construct
  source 1..17: mol_type = other DNA
cgcagggggacaccagg

SEQ ID NO: 169921 - DNA, 17 bp, synthetic construct
  source 1..17: mol_type = other DNA
ccgcagggggacaccag

SEQ ID NO: 169922 - DNA, 17 bp, synthetic construct
  source 1..17: mol_type = other DNA
cccgcagggggacacca

SEQ ID NO: 169923 - DNA, 17 bp, synthetic construct
  source 1..17: mol_type = other DNA
tcccgcagggggacacc

SEQ ID NO: 169924 - DNA, 17 bp, synthetic construct
  source 1..17: mol_type = other DNA
ctcccgcagggggacac

SEQ ID NO: 169925 - DNA, 17 bp, synthetic construct
  source 1..17: mol_type = other DNA
actcccgcagggggaca

SEQ ID NO: 169926 - DNA, 17 bp, synthetic construct
  source 1..17: mol_type = other DNA
aactcccgcagggggac

SEQ ID NO: 169927 - DNA, 17 bp, synthetic construct
  source 1..17: mol_type = other DNA
caactcccgcaggggga

SEQ ID NO: 169928 - DNA, 17 bp, synthetic construct
  source 1..17: mol_type = other DNA
ccaactcccgcaggggg

SEQ ID NO: 169929 - DNA, 17 bp, synthetic construct
  source 1..17: mol_type = other DNA
cccaactcccgcagggg

SEQ ID NO: 169930 - DNA, 17 bp, synthetic construct
  source 1..17: mol_type = other DNA
gcccaactcccgcaggg

SEQ ID NO: 169931 - DNA, 17 bp, synthetic construct
  source 1..17: mol_type = other DNA
ggcccaactcccgcagg

SEQ ID NO: 169932 - DNA, 17 bp, synthetic construct
  source 1..17: mol_type = other DNA
tggcccaactcccgcag

SEQ ID NO: 169933 - DNA, 17 bp, synthetic construct
  source 1..17: mol_type = other DNA
ctggcccaactcccgca

SEQ ID NO: 169934 - DNA, 17 bp, synthetic construct
  source 1..17: mol_type = other DNA
cctggcccaactcccgc

SEQ ID NO: 169935 - DNA, 17 bp, synthetic construct
  source 1..17: mol_type = other DNA
acctggcccaactcccg

SEQ ID NO: 169936 - DNA, 17 bp, synthetic construct
  source 1..17: mol_type = other DNA
gacctggcccaactccc

SEQ ID NO: 169937 - DNA, 17 bp, synthetic construct
  source 1..17: mol_type = other DNA
cgacctggcccaactcc

SEQ ID NO: 169938 - DNA, 17 bp, synthetic construct
  source 1..17: mol_type = other DNA
acgacctggcccaactc

SEQ ID NO: 169939 - DNA, 17 bp, synthetic construct
  source 1..17: mol_type = other DNA
cacgacctggcccaact

SEQ ID NO: 169940 - DNA, 17 bp, synthetic construct
  source 1..17: mol_type = other DNA
ccacgacctggcccaac

SEQ ID NO: 169941 - DNA, 17 bp, synthetic construct
  source 1..17: mol_type = other DNA
tccacgacctggcccaa

SEQ ID NO: 169942 - DNA, 17 bp, synthetic construct
  source 1..17: mol_type = other DNA
ttccacgacctggccca

SEQ ID NO: 169943 - DNA, 17 bp, synthetic construct
  source 1..17: mol_type = other DNA
attccacgacctggccc

SEQ ID NO: 169944 - DNA, 17 bp, synthetic construct
  source 1..17: mol_type = other DNA
cattccacgacctggcc

SEQ ID NO: 169945 - DNA, 17 bp, synthetic construct
  source 1..17: mol_type = other DNA
gcattccacgacctggc

SEQ ID NO: 169946 - DNA, 17 bp, synthetic construct
  source 1..17: mol_type = other DNA
tgcattccacgacctgg

SEQ ID NO: 169947 - DNA, 17 bp, synthetic construct
  source 1..17: mol_type = other DNA
ctgcattccacgacctg

SEQ ID NO: 169948 - DNA, 17 bp, synthetic construct
  source 1..17: mol_type = other DNA
gctgcattccacgacct

SEQ ID NO: 169949 - DNA, 17 bp, synthetic construct
  source 1..17: mol_type = other DNA
ggctgcattccacgacc

SEQ ID NO: 169950 - DNA, 17 bp, synthetic construct
  source 1..17: mol_type = other DNA
aggctgcattccacgac

SEQ ID NO: 169951 - DNA, 17 bp, synthetic construct
  source 1..17: mol_type = other DNA
caggctgcattccacga

SEQ ID NO: 169952 - DNA, 17 bp, synthetic construct
  source 1..17: mol_type = other DNA
ccaggctgcattccacg

SEQ ID NO: 169953 - DNA, 17 bp, synthetic construct
  source 1..17: mol_type = other DNA
tccaggctgcattccac

SEQ ID NO: 169954 - DNA, 17 bp, synthetic construct
  source 1..17: mol_type = other DNA
gtccaggctgcattcca

SEQ ID NO: 169955 - DNA, 17 bp, synthetic construct
  source 1..17: mol_type = other DNA
agtccaggctgcattcc

SEQ ID NO: 169956 - DNA, 17 bp, synthetic construct
  source 1..17: mol_type = other DNA
aagtccaggctgcattc

SEQ ID NO: 169957 - DNA, 17 bp, synthetic construct
  source 1..17: mol_type = other DNA
aaagtccaggctgcatt

SEQ ID NO: 169958 - DNA, 17 bp, synthetic construct
  source 1..17: mol_type = other DNA
caaagtccaggctgcat

SEQ ID NO: 169959 - DNA, 17 bp, synthetic construct
  source 1..17: mol_type = other DNA
ccaaagtccaggctgca

SEQ ID NO: 169960 - DNA, 17 bp, synthetic construct
  source 1..17: mol_type = other DNA
gccaaagtccaggctgc

SEQ ID NO: 169961 - DNA, 17 bp, synthetic construct
  source 1..17: mol_type = other DNA
ggccaaagtccaggctg

SEQ ID NO: 169962 - DNA, 17 bp, synthetic construct
  source 1..17: mol_type = other DNA
aggccaaagtccaggct

SEQ ID NO: 169963 - DNA, 17 bp, synthetic construct
  source 1..17: mol_type = other DNA
caggccaaagtccaggc

SEQ ID NO: 169964 - DNA, 17 bp, synthetic construct
  source 1..17: mol_type = other DNA
ccaggccaaagtccagg

SEQ ID NO: 169965 - DNA, 17 bp, synthetic construct
  source 1..17: mol_type = other DNA
accaggccaaagtccag

SEQ ID NO: 169966 - DNA, 17 bp, synthetic construct
  source 1..17: mol_type = other DNA
gaccaggccaaagtcca

SEQ ID NO: 169967 - DNA, 17 bp, synthetic construct
  source 1..17: mol_type = other DNA
agaccaggccaaagtcc

SEQ ID NO: 169968 - DNA, 17 bp, synthetic construct
  source 1..17: mol_type = other DNA
cagaccaggccaaagtc

SEQ ID NO: 169969 - DNA, 17 bp, synthetic construct
  source 1..17: mol_type = other DNA
gcagaccaggccaaagt

SEQ ID NO: 169970 - DNA, 17 bp, synthetic construct
  source 1..17: mol_type = other DNA
tgcagaccaggccaaag

SEQ ID NO: 169971 - DNA, 17 bp, synthetic construct
  source 1..17: mol_type = other DNA
ctgcagaccaggccaaa

SEQ ID NO: 169972 - DNA, 17 bp, synthetic construct
  source 1..17: mol_type = other DNA
cctgcagaccaggccaa

SEQ ID NO: 169973 - DNA, 17 bp, synthetic construct
  source 1..17: mol_type = other DNA
tcctgcagaccaggcca

SEQ ID NO: 169974 - DNA, 17 bp, synthetic construct
  source 1..17: mol_type = other DNA
ttcctgcagaccaggcc

SEQ ID NO: 169975 - DNA, 17 bp, synthetic construct
  source 1..17: mol_type = other DNA
gttcctgcagaccaggc

SEQ ID NO: 169976 - DNA, 17 bp, synthetic construct
  source 1..17: mol_type = other DNA
ggttcctgcagaccagg

SEQ ID NO: 169977 - DNA, 17 bp, synthetic construct
  source 1..17: mol_type = other DNA
cggttcctgcagaccag

SEQ ID NO: 169978 - DNA, 17 bp, synthetic construct
  source 1..17: mol_type = other DNA
acggttcctgcagacca

SEQ ID NO: 169979 - DNA, 17 bp, synthetic construct
  source 1..17: mol_type = other DNA
cacggttcctgcagacc

SEQ ID NO: 169980 - DNA, 17 bp, synthetic construct
  source 1..17: mol_type = other DNA
tcacggttcctgcagac

SEQ ID NO: 169981 - DNA, 17 bp, synthetic construct
  source 1..17: mol_type = other DNA
ctcacggttcctgcaga

SEQ ID NO: 169982 - DNA, 17 bp, synthetic construct
  source 1..17: mol_type = other DNA
gctcacggttcctgcag

SEQ ID NO: 169983 - DNA, 17 bp, synthetic construct
  source 1..17: mol_type = other DNA
tgctcacggttcctgca

SEQ ID NO: 169984 - DNA, 17 bp, synthetic construct
  source 1..17: mol_type = other DNA
ctgctcacggttcctgc

SEQ ID NO: 169985 - DNA, 17 bp, synthetic construct
  source 1..17: mol_type = other DNA
cctgctcacggttcctg

SEQ ID NO: 169986 - DNA, 17 bp, synthetic construct
  source 1..17: mol_type = other DNA
acctgctcacggttcct

SEQ ID NO: 169987 - DNA, 17 bp, synthetic construct
  source 1..17: mol_type = other DNA
cacctgctcacggttcc

SEQ ID NO: 169988 - DNA, 17 bp, synthetic construct
  source 1..17: mol_type = other DNA
ccacctgctcacggttc

SEQ ID NO: 169989 - DNA, 17 bp, synthetic construct
  source 1..17: mol_type = other DNA
cccacctgctcacggtt

SEQ ID NO: 169990 - DNA, 17 bp, synthetic construct
  source 1..17: mol_type = other DNA
ccccacctgctcacggt

SEQ ID NO: 169991 - DNA, 17 bp, synthetic construct
  source 1..17: mol_type = other DNA
tccccacctgctcacgg

SEQ ID NO: 169992 - DNA, 17 bp, synthetic construct
  source 1..17: mol_type = other DNA
ttccccacctgctcacg

SEQ ID NO: 169993 - DNA, 17 bp, synthetic construct
  source 1..17: mol_type = other DNA
cttccccacctgctcac

SEQ ID NO: 169994 - DNA, 17 bp, synthetic construct
  source 1..17: mol_type = other DNA
acttccccacctgctca

SEQ ID NO: 169995 - DNA, 17 bp, synthetic construct
  source 1..17: mol_type = other DNA
aacttccccacctgctc

SEQ ID NO: 169996 - DNA, 17 bp, synthetic construct
  source 1..17: mol_type = other DNA
gaacttccccacctgct

SEQ ID NO: 169997 - DNA, 17 bp, synthetic construct
  source 1..17: mol_type = other DNA
tgaacttccccacctgc

SEQ ID NO: 169998 - DNA, 17 bp, synthetic construct
  source 1..17: mol_type = other DNA
ttgaacttccccacctg

SEQ ID NO: 169999 - DNA, 17 bp, synthetic construct
  source 1..17: mol_type = other DNA
cttgaacttccccacct

SEQ ID NO: 170000 - DNA, 17 bp, synthetic construct
  source 1..17: mol_type = other DNA
tcttgaacttccccacc

SEQ ID NO: 170001 - DNA, 17 bp, synthetic construct
  source 1..17: mol_type = other DNA
atcttgaacttccccac

SEQ ID NO: 170002 - DNA, 17 bp, synthetic construct
  source 1..17: mol_type = other DNA
catcttgaacttcccca

SEQ ID NO: 170003 - DNA, 17 bp, synthetic construct
  source 1..17: mol_type = other DNA
acatcttgaacttcccc

SEQ ID NO: 170004 - DNA, 17 bp, synthetic construct
  source 1..17: mol_type = other DNA
cacatcttgaacttccc

SEQ ID NO: 170005 - DNA, 17 bp, synthetic construct
  source 1..17: mol_type = other DNA
gcacatcttgaacttcc

SEQ ID NO: 170006 - DNA, 17 bp, synthetic construct
  source 1..17: mol_type = other DNA
agcacatcttgaacttc

SEQ ID NO: 170007 - DNA, 17 bp, synthetic construct
  source 1..17: mol_type = other DNA
aagcacatcttgaactt

SEQ ID NO: 170008 - DNA, 17 bp, synthetic construct
  source 1..17: mol_type = other DNA
gaagcacatcttgaact

SEQ ID NO: 170009 - DNA, 17 bp, synthetic construct
  source 1..17: mol_type = other DNA
tgaagcacatcttgaac

SEQ ID NO: 170010 - DNA, 17 bp, synthetic construct
  source 1..17: mol_type = other DNA
ttgaagcacatcttgaa

SEQ ID NO: 170011 - DNA, 17 bp, synthetic construct
  source 1..17: mol_type = other DNA
gttgaagcacatcttga

SEQ ID NO: 170012 - DNA, 17 bp, synthetic construct
  source 1..17: mol_type = other DNA
agttgaagcacatcttg

SEQ ID NO: 170013 - DNA, 17 bp, synthetic construct
  source 1..17: mol_type = other DNA
tagttgaagcacatctt

SEQ ID NO: 170014 - DNA, 17 bp, synthetic construct
  source 1..17: mol_type = other DNA
atagttgaagcacatct

SEQ ID NO: 170015 - DNA, 17 bp, synthetic construct
  source 1..17: mol_type = other DNA
catagttgaagcacatc

SEQ ID NO: 170016 - DNA, 17 bp, synthetic construct
  source 1..17: mol_type = other DNA
tcatagttgaagcacat

SEQ ID NO: 170017 - DNA, 17 bp, synthetic construct
  source 1..17: mol_type = other DNA
ttcatagttgaagcaca

SEQ ID NO: 170018 - DNA, 17 bp, synthetic construct
  source 1..17: mol_type = other DNA
tttcatagttgaagcac

SEQ ID NO: 170019 - DNA, 17 bp, synthetic construct
  source 1..17: mol_type = other DNA
atttcatagttgaagca

SEQ ID NO: 170020 - DNA, 17 bp, synthetic construct
  source 1..17: mol_type = other DNA
gatttcatagttgaagc

SEQ ID NO: 170021 - DNA, 17 bp, synthetic construct
  source 1..17: mol_type = other DNA
ggatttcatagttgaag

SEQ ID NO: 170022 - DNA, 17 bp, synthetic construct
  source 1..17: mol_type = other DNA
cggatttcatagttgaa

SEQ ID NO: 170023 - DNA, 17 bp, synthetic construct
  source 1..17: mol_type = other DNA
acggatttcatagttga

SEQ ID NO: 170024 - DNA, 17 bp, synthetic construct
  source 1..17: mol_type = other DNA
cacggatttcatagttg

SEQ ID NO: 170025 - DNA, 17 bp, synthetic construct
  source 1..17: mol_type = other DNA
acacggatttcatagtt

SEQ ID NO: 170026 - DNA, 17 bp, synthetic construct
  source 1..17: mol_type = other DNA
cacacggatttcatagt

SEQ ID NO: 170027 - DNA, 17 bp, synthetic construct
  source 1..17: mol_type = other DNA
acacacggatttcatag

SEQ ID NO: 170028 - DNA, 17 bp, synthetic construct
  source 1..17: mol_type = other DNA
aacacacggatttcata

SEQ ID NO: 170029 - DNA, 17 bp, synthetic construct
  source 1..17: mol_type = other DNA
gaacacacggatttcat

SEQ ID NO: 170030 - DNA, 17 bp, synthetic construct
  source 1..17: mol_type = other DNA
agaacacacggatttca

SEQ ID NO: 170031 - DNA, 17 bp, synthetic construct
  source 1..17: mol_type = other DNA
cagaacacacggatttc

SEQ ID NO: 170032 - DNA, 17 bp, synthetic construct
  source 1..17: mol_type = other DNA
gcagaacacacggattt

SEQ ID NO: 170033 - DNA, 17 bp, synthetic construct
  source 1..17: mol_type = other DNA
agcagaacacacggatt

SEQ ID NO: 170034 - DNA, 17 bp, synthetic construct
  source 1..17: mol_type = other DNA
cagcagaacacacggat

SEQ ID NO: 170035 - DNA, 17 bp, synthetic construct
  source 1..17: mol_type = other DNA
gcagcagaacacacgga

SEQ ID NO: 170036 - DNA, 17 bp, synthetic construct
  source 1..17: mol_type = other DNA
tgcagcagaacacacgg

SEQ ID NO: 170037 - DNA, 17 bp, synthetic construct
  source 1..17: mol_type = other DNA
ttgcagcagaacacacg

SEQ ID NO: 170038 - DNA, 17 bp, synthetic construct
  source 1..17: mol_type = other DNA
gttgcagcagaacacac

SEQ ID NO: 170039 - DNA, 17 bp, synthetic construct
  source 1..17: mol_type = other DNA
agttgcagcagaacaca

SEQ ID NO: 170040 - DNA, 17 bp, synthetic construct
  source 1..17: mol_type = other DNA
tagttgcagcagaacac

SEQ ID NO: 170041 - DNA, 17 bp, synthetic construct
  source 1..17: mol_type = other DNA
gtagttgcagcagaaca

SEQ ID NO: 170042 - DNA, 17 bp, synthetic construct
  source 1..17: mol_type = other DNA
cgtagttgcagcagaac

SEQ ID NO: 170043 - DNA, 17 bp, synthetic construct
  source 1..17: mol_type = other DNA
ccgtagttgcagcagaa

SEQ ID NO: 170044 - DNA, 17 bp, synthetic construct
  source 1..17: mol_type = other DNA
gccgtagttgcagcaga

SEQ ID NO: 170045 - DNA, 17 bp, synthetic construct
  source 1..17: mol_type = other DNA
ggccgtagttgcagcag

SEQ ID NO: 170046 - DNA, 17 bp, synthetic construct
  source 1..17: mol_type = other DNA
tggccgtagttgcagca

SEQ ID NO: 170047 - DNA, 17 bp, synthetic construct
  source 1..17: mol_type = other DNA
gtggccgtagttgcagc

SEQ ID NO: 170048 - DNA, 17 bp, synthetic construct
  source 1..17: mol_type = other DNA
agtggccgtagttgcag

SEQ ID NO: 170049 - DNA, 17 bp, synthetic construct
  source 1..17: mol_type = other DNA
cagtggccgtagttgca

SEQ ID NO: 170050 - DNA, 17 bp, synthetic construct
  source 1..17: mol_type = other DNA
gcagtggccgtagttgc

SEQ ID NO: 170051 - DNA, 17 bp, synthetic construct
  source 1..17: mol_type = other DNA
ggcagtggccgtagttg

SEQ ID NO: 170052 - DNA, 17 bp, synthetic construct
  source 1..17: mol_type = other DNA
gggcagtggccgtagtt

SEQ ID NO: 170053 - DNA, 17 bp, synthetic construct
  source 1..17: mol_type = other DNA
ggggcagtggccgtagt

SEQ ID NO: 170054 - DNA, 17 bp, synthetic construct
  source 1..17: mol_type = other DNA
tggggcagtggccgtag

SEQ ID NO: 170055 - DNA, 17 bp, synthetic construct
  source 1..17: mol_type = other DNA
ctggggcagtggccgta

SEQ ID NO: 170056 - DNA, 17 bp, synthetic construct
  source 1..17: mol_type = other DNA
gctggggcagtggccgt

SEQ ID NO: 170057 - DNA, 17 bp, synthetic construct
  source 1..17: mol_type = other DNA
tgctggggcagtggccg

SEQ ID NO: 170058 - DNA, 17 bp, synthetic construct
  source 1..17: mol_type = other DNA
gtgctggggcagtggcc

SEQ ID NO: 170059 - DNA, 17 bp, synthetic construct
  source 1..17: mol_type = other DNA
ggtgctggggcagtggc

SEQ ID NO: 170060 - DNA, 17 bp, synthetic construct
  source 1..17: mol_type = other DNA
gggtgctggggcagtgg

SEQ ID NO: 170061 - DNA, 17 bp, synthetic construct
  source 1..17: mol_type = other DNA
ggggtgctggggcagtg

SEQ ID NO: 170062 - DNA, 17 bp, synthetic construct
  source 1..17: mol_type = other DNA
cggggtgctggggcagt

SEQ ID NO: 170063 - DNA, 17 bp, synthetic construct
  source 1..17: mol_type = other DNA
ccggggtgctggggcag

SEQ ID NO: 170064 - DNA, 17 bp, synthetic construct
  source 1..17: mol_type = other DNA
gccggggtgctggggca

SEQ ID NO: 170065 - DNA, 17 bp, synthetic construct
  source 1..17: mol_type = other DNA
ggccggggtgctggggc

SEQ ID NO: 170066 - DNA, 17 bp, synthetic construct
  source 1..17: mol_type = other DNA
tggccggggtgctgggg

SEQ ID NO: 170067 - DNA, 17 bp, synthetic construct
  source 1..17: mol_type = other DNA
gtggccggggtgctggg

SEQ ID NO: 170068 - DNA, 17 bp, synthetic construct
  source 1..17: mol_type = other DNA
ggtggccggggtgctgg

SEQ ID NO: 170069 - DNA, 17 bp, synthetic construct
  source 1..17: mol_type = other DNA
tggtggccggggtgctg

SEQ ID NO: 170070 - DNA, 17 bp, synthetic construct
  source 1..17: mol_type = other DNA
ctggtggccggggtgct

SEQ ID NO: 170071 - DNA, 17 bp, synthetic construct
  source 1..17: mol_type = other DNA
gctggtggccggggtgc

SEQ ID NO: 170072 - DNA, 17 bp, synthetic construct
  source 1..17: mol_type = other DNA
agctggtggccggggtg

SEQ ID NO: 170073 - DNA, 17 bp, synthetic construct
  source 1..17: mol_type = other DNA
gagctggtggccggggt

SEQ ID NO: 170074 - DNA, 17 bp, synthetic construct
  source 1..17: mol_type = other DNA
agagctggtggccgggg

SEQ ID NO: 170075 - DNA, 17 bp, synthetic construct
  source 1..17: mol_type = other DNA
tagagctggtggccggg

SEQ ID NO: 170076 - DNA, 17 bp, synthetic construct
  source 1..17: mol_type = other DNA
gtagagctggtggccgg

SEQ ID NO: 170077 - DNA, 17 bp, synthetic construct
  source 1..17: mol_type = other DNA
cgtagagctggtggccg

SEQ ID NO: 170078 - DNA, 17 bp, synthetic construct
  source 1..17: mol_type = other DNA
ccgtagagctggtggcc

SEQ ID NO: 170079 - DNA, 17 bp, synthetic construct
  source 1..17: mol_type = other DNA
gccgtagagctggtggc

SEQ ID NO: 170080 - DNA, 17 bp, synthetic construct
  source 1..17: mol_type = other DNA
ggccgtagagctggtgg

SEQ ID NO: 170081 - DNA, 17 bp, synthetic construct
  source 1..17: mol_type = other DNA
tggccgtagagctggtg

SEQ ID NO: 170082 - DNA, 17 bp, synthetic construct
  source 1..17: mol_type = other DNA
gtggccgtagagctggt

SEQ ID NO: 170083 - DNA, 17 bp, synthetic construct
  source 1..17: mol_type = other DNA
cgtggccgtagagctgg

SEQ ID NO: 170084 - DNA, 17 bp, synthetic construct
  source 1..17: mol_type = other DNA
gcgtggccgtagagctg

SEQ ID NO: 170085 - DNA, 17 bp, synthetic construct
  source 1..17: mol_type = other DNA
ggcgtggccgtagagct

SEQ ID NO: 170086 - DNA, 17 bp, synthetic construct
  source 1..17: mol_type = other DNA
gggcgtggccgtagagc

SEQ ID NO: 170087 - DNA, 17 bp, synthetic construct
  source 1..17: mol_type = other DNA
agggcgtggccgtagag

SEQ ID NO: 170088 - DNA, 17 bp, synthetic construct
  source 1..17: mol_type = other DNA
gagggcgtggccgtaga

SEQ ID NO: 170089 - DNA, 17 bp, synthetic construct
  source 1..17: mol_type = other DNA
ggagggcgtggccgtag

SEQ ID NO: 170090 - DNA, 17 bp, synthetic construct
  source 1..17: mol_type = other DNA
aggagggcgtggccgta

SEQ ID NO: 170091 - DNA, 17 bp, synthetic construct
  source 1..17: mol_type = other DNA
gaggagggcgtggccgt

SEQ ID NO: 170092 - DNA, 17 bp, synthetic construct
  source 1..17: mol_type = other DNA
ggaggagggcgtggccg

SEQ ID NO: 170093 - DNA, 17 bp, synthetic construct
  source 1..17: mol_type = other DNA
tggaggagggcgtggcc

SEQ ID NO: 170094 - DNA, 17 bp, synthetic construct
  source 1..17: mol_type = other DNA
gtggaggagggcgtggc

SEQ ID NO: 170095 - DNA, 17 bp, synthetic construct
  source 1..17: mol_type = other DNA
agtggaggagggcgtgg

SEQ ID NO: 170096 - DNA, 17 bp, synthetic construct
  source 1..17: mol_type = other DNA
gagtggaggagggcgtg

SEQ ID NO: 170097 - DNA, 17 bp, synthetic construct
  source 1..17: mol_type = other DNA
ggagtggaggagggcgt

SEQ ID NO: 170098 - DNA, 17 bp, synthetic construct
  source 1..17: mol_type = other DNA
tggagtggaggagggcg

SEQ ID NO: 170099 - DNA, 17 bp, synthetic construct
  source 1..17: mol_type = other DNA
ctggagtggaggagggc

SEQ ID NO: 170100 - DNA, 17 bp, synthetic construct
  source 1..17: mol_type = other DNA
cctggagtggaggaggg

SEQ ID NO: 170101 - DNA, 17 bp, synthetic construct
  source 1..17: mol_type = other DNA
ccctggagtggaggagg

SEQ ID NO: 170102 - DNA, 17 bp, synthetic construct
  source 1..17: mol_type = other DNA
tccctggagtggaggag

SEQ ID NO: 170103 - DNA, 17 bp, synthetic construct
  source 1..17: mol_type = other DNA
gtccctggagtggagga

SEQ ID NO: 170104 - DNA, 17 bp, synthetic construct
  source 1..17: mol_type = other DNA
cgtccctggagtggagg

SEQ ID NO: 170105 - DNA, 17 bp, synthetic construct
  source 1..17: mol_type = other DNA
tcgtccctggagtggag

SEQ ID NO: 170106 - DNA, 17 bp, synthetic construct
  source 1..17: mol_type = other DNA
gtcgtccctggagtgga

SEQ ID NO: 170107 - DNA, 17 bp, synthetic construct
  source 1..17: mol_type = other DNA
ggtcgtccctggagtgg

SEQ ID NO: 170108 - DNA, 17 bp, synthetic construct
  source 1..17: mol_type = other DNA
aggtcgtccctggagtg

SEQ ID NO: 170109 - DNA, 17 bp, synthetic construct
  source 1..17: mol_type = other DNA
caggtcgtccctggagt

SEQ ID NO: 170110 - DNA, 17 bp, synthetic construct
  source 1..17: mol_type = other DNA
ccaggtcgtccctggag

SEQ ID NO: 170111 - DNA, 17 bp, synthetic construct
  source 1..17: mol_type = other DNA
tccaggtcgtccctgga

SEQ ID NO: 170112 - DNA, 17 bp, synthetic construct
  source 1..17: mol_type = other DNA
atccaggtcgtccctgg

SEQ ID NO: 170113 - DNA, 17 bp, synthetic construct
  source 1..17: mol_type = other DNA
gatccaggtcgtccctg

SEQ ID NO: 170114 - DNA, 17 bp, synthetic construct
  source 1..17: mol_type = other DNA
ggatccaggtcgtccct

SEQ ID NO: 170115 - DNA, 17 bp, synthetic construct
  source 1..17: mol_type = other DNA
aggatccaggtcgtccc

SEQ ID NO: 170116 - DNA, 17 bp, synthetic construct
  source 1..17: mol_type = other DNA
gaggatccaggtcgtcc

SEQ ID NO: 170117 - DNA, 17 bp, synthetic construct
  source 1..17: mol_type = other DNA
tgaggatccaggtcgtc

SEQ ID NO: 170118 - DNA, 17 bp, synthetic construct
  source 1..17: mol_type = other DNA
gtgaggatccaggtcgt

SEQ ID NO: 170119 - DNA, 17 bp, synthetic construct
  source 1..17: mol_type = other DNA
tgtgaggatccaggtcg

SEQ ID NO: 170120 - DNA, 17 bp, synthetic construct
  source 1..17: mol_type = other DNA
ctgtgaggatccaggtc

SEQ ID NO: 170121 - DNA, 17 bp, synthetic construct
  source 1..17: mol_type = other DNA
tctgtgaggatccaggt

SEQ ID NO: 170122 - DNA, 17 bp, synthetic construct
  source 1..17: mol_type = other DNA
ctctgtgaggatccagg

SEQ ID NO: 170123 - DNA, 17 bp, synthetic construct
  source 1..17: mol_type = other DNA
gctctgtgaggatccag

SEQ ID NO: 170124 - DNA, 17 bp, synthetic construct
  source 1..17: mol_type = other DNA
tgctctgtgaggatcca

SEQ ID NO: 170125 - DNA, 17 bp, synthetic construct
  source 1..17: mol_type = other DNA
ctgctctgtgaggatcc

SEQ ID NO: 170126 - DNA, 17 bp, synthetic construct
  source 1..17: mol_type = other DNA
tctgctctgtgaggatc

SEQ ID NO: 170127 - DNA, 17 bp, synthetic construct
  source 1..17: mol_type = other DNA
gtctgctctgtgaggat

SEQ ID NO: 170128 - DNA, 17 bp, synthetic construct
  source 1..17: mol_type = other DNA
ggtctgctctgtgagga

SEQ ID NO: 170129 - DNA, 17 bp, synthetic construct
  source 1..17: mol_type = other DNA
tggtctgctctgtgagg

SEQ ID NO: 170130 - DNA, 17 bp, synthetic construct
  source 1..17: mol_type = other DNA
gtggtctgctctgtgag

SEQ ID NO: 170131 - DNA, 17 bp, synthetic construct
  source 1..17: mol_type = other DNA
tgtggtctgctctgtga

SEQ ID NO: 170132 - DNA, 17 bp, synthetic construct
  source 1..17: mol_type = other DNA
ctgtggtctgctctgtg

SEQ ID NO: 170133 - DNA, 17 bp, synthetic construct
  source 1..17: mol_type = other DNA
gctgtggtctgctctgt

SEQ ID NO: 170134 - DNA, 17 bp, synthetic construct
  source 1..17: mol_type = other DNA
tgctgtggtctgctctg

SEQ ID NO: 170135 - DNA, 17 bp, synthetic construct
  source 1..17: mol_type = other DNA
ctgctgtggtctgctct

SEQ ID NO: 170136 - DNA, 17 bp, synthetic construct
  source 1..17: mol_type = other DNA
gctgctgtggtctgctc

SEQ ID NO: 170137 - DNA, 17 bp, synthetic construct
  source 1..17: mol_type = other DNA
ggctgctgtggtctgct

SEQ ID NO: 170138 - DNA, 17 bp, synthetic construct
  source 1..17: mol_type = other DNA
tggctgctgtggtctgc

SEQ ID NO: 170139 - DNA, 17 bp, synthetic construct
  source 1..17: mol_type = other DNA
gtggctgctgtggtctg

SEQ ID NO: 170140 - DNA, 17 bp, synthetic construct
  source 1..17: mol_type = other DNA
agtggctgctgtggtct

SEQ ID NO: 170141 - DNA, 17 bp, synthetic construct
  source 1..17: mol_type = other DNA
tagtggctgctgtggtc

SEQ ID NO: 170142 - DNA, 17 bp, synthetic construct
  source 1..17: mol_type = other DNA
gtagtggctgctgtggt

SEQ ID NO: 170143 - DNA, 17 bp, synthetic construct
  source 1..17: mol_type = other DNA
cgtagtggctgctgtgg

SEQ ID NO: 170144 - DNA, 17 bp, synthetic construct
  source 1..17: mol_type = other DNA
tcgtagtggctgctgtg

SEQ ID NO: 170145 - DNA, 17 bp, synthetic construct
  source 1..17: mol_type = other DNA
gtcgtagtggctgctgt

SEQ ID NO: 170146 - DNA, 17 bp, synthetic construct
  source 1..17: mol_type = other DNA
ggtcgtagtggctgctg

SEQ ID NO: 170147 - DNA, 17 bp, synthetic construct
  source 1..17: mol_type = other DNA
cggtcgtagtggctgct

SEQ ID NO: 170148 - DNA, 17 bp, synthetic construct
  source 1..17: mol_type = other DNA
gcggtcgtagtggctgc

SEQ ID NO: 170149 - DNA, 17 bp, synthetic construct
  source 1..17: mol_type = other DNA
tgcggtcgtagtggctg

SEQ ID NO: 170150 - DNA, 17 bp, synthetic construct
  source 1..17: mol_type = other DNA
ttgcggtcgtagtggct

SEQ ID NO: 170151 - DNA, 17 bp, synthetic construct
  source 1..17: mol_type = other DNA
gttgcggtcgtagtggc

SEQ ID NO: 170152 - DNA, 17 bp, synthetic construct
  source 1..17: mol_type = other DNA
ggttgcggtcgtagtgg

SEQ ID NO: 170153 - DNA, 17 bp, synthetic construct
  source 1..17: mol_type = other DNA
tggttgcggtcgtagtg

SEQ ID NO: 170154 - DNA, 17 bp, synthetic construct
  source 1..17: mol_type = other DNA
gtggttgcggtcgtagt

SEQ ID NO: 170155 - DNA, 17 bp, synthetic construct
  source 1..17: mol_type = other DNA
agtggttgcggtcgtag

SEQ ID NO: 170156 - DNA, 17 bp, synthetic construct
  source 1..17: mol_type = other DNA
cagtggttgcggtcgta

SEQ ID NO: 170157 - DNA, 17 bp, synthetic construct
  source 1..17: mol_type = other DNA
ccagtggttgcggtcgt

SEQ ID NO: 170158 - DNA, 17 bp, synthetic construct
  source 1..17: mol_type = other DNA
tccagtggttgcggtcg

SEQ ID NO: 170159 - DNA, 17 bp, synthetic construct
  source 1..17: mol_type = other DNA
atccagtggttgcggtc

SEQ ID NO: 170160 - DNA, 17 bp, synthetic construct
  source 1..17: mol_type = other DNA
gatccagtggttgcggt

SEQ ID NO: 170161 - DNA, 17 bp, synthetic construct
  source 1..17: mol_type = other DNA
ggatccagtggttgcgg

SEQ ID NO: 170162 - DNA, 17 bp, synthetic construct
  source 1..17: mol_type = other DNA
tggatccagtggttgcg

SEQ ID NO: 170163 - DNA, 17 bp, synthetic construct
  source 1..17: mol_type = other DNA
gtggatccagtggttgc

SEQ ID NO: 170164 - DNA, 17 bp, synthetic construct
  source 1..17: mol_type = other DNA
cgtggatccagtggttg

SEQ ID NO: 170165 - DNA, 17 bp, synthetic construct
  source 1..17: mol_type = other DNA
ccgtggatccagtggtt

SEQ ID NO: 170166 - DNA, 17 bp, synthetic construct
  source 1..17: mol_type = other DNA
gccgtggatccagtggt

SEQ ID NO: 170167 - DNA, 17 bp, synthetic construct
  source 1..17: mol_type = other DNA
ggccgtggatccagtgg

SEQ ID NO: 170168 - DNA, 17 bp, synthetic construct
  source 1..17: mol_type = other DNA
tggccgtggatccagtg

SEQ ID NO: 170169 - DNA, 17 bp, synthetic construct
  source 1..17: mol_type = other DNA
atggccgtggatccagt

SEQ ID NO: 170170 - DNA, 17 bp, synthetic construct
  source 1..17: mol_type = other DNA
gatggccgtggatccag

SEQ ID NO: 170171 - DNA, 17 bp, synthetic construct
  source 1..17: mol_type = other DNA
ggatggccgtggatcca

SEQ ID NO: 170172 - DNA, 17 bp, synthetic construct
  source 1..17: mol_type = other DNA
gggatggccgtggatcc

SEQ ID NO: 170173 - DNA, 17 bp, synthetic construct
  source 1..17: mol_type = other DNA
cgggatggccgtggatc

SEQ ID NO: 170174 - DNA, 17 bp, synthetic construct
  source 1..17: mol_type = other DNA
acgggatggccgtggat

SEQ ID NO: 170175 - DNA, 17 bp, synthetic construct
  source 1..17: mol_type = other DNA
gacgggatggccgtgga

SEQ ID NO: 170176 - DNA, 17 bp, synthetic construct
  source 1..17: mol_type = other DNA
ggacgggatggccgtgg

SEQ ID NO: 170177 - DNA, 17 bp, synthetic construct
  source 1..17: mol_type = other DNA
aggacgggatggccgtg

SEQ ID NO: 170178 - DNA, 17 bp, synthetic construct
  source 1..17: mol_type = other DNA
gaggacgggatggccgt

SEQ ID NO: 170179 - DNA, 17 bp, synthetic construct
  source 1..17: mol_type = other DNA
ggaggacgggatggccg

SEQ ID NO: 170180 - DNA, 17 bp, synthetic construct
  source 1..17: mol_type = other DNA
tggaggacgggatggcc

SEQ ID NO: 170181 - DNA, 17 bp, synthetic construct
  source 1..17: mol_type = other DNA
gtggaggacgggatggc

SEQ ID NO: 170182 - DNA, 17 bp, synthetic construct
  source 1..17: mol_type = other DNA
ggtggaggacgggatgg

SEQ ID NO: 170183 - DNA, 17 bp, synthetic construct
  source 1..17: mol_type = other DNA
gggtggaggacgggatg

SEQ ID NO: 170184 - DNA, 17 bp, synthetic construct
  source 1..17: mol_type = other DNA
ggggtggaggacgggat

SEQ ID NO: 170185 - DNA, 17 bp, synthetic construct
  source 1..17: mol_type = other DNA
cggggtggaggacggga

SEQ ID NO: 170186 - DNA, 17 bp, synthetic construct
  source 1..17: mol_type = other DNA
ccggggtggaggacggg

SEQ ID NO: 170187 - DNA, 17 bp, synthetic construct
  source 1..17: mol_type = other DNA
cccggggtggaggacgg

SEQ ID NO: 170188 - DNA, 17 bp, synthetic construct
  source 1..17: mol_type = other DNA
tcccggggtggaggacg

SEQ ID NO: 170189 - DNA, 17 bp, synthetic construct
  source 1..17: mol_type = other DNA
ttcccggggtggaggac

SEQ ID NO: 170190 - DNA, 17 bp, synthetic construct
  source 1..17: mol_type = other DNA
gttcccggggtggagga

SEQ ID NO: 170191 - DNA, 17 bp, synthetic construct
  source 1..17: mol_type = other DNA
tgttcccggggtggagg

SEQ ID NO: 170192 - DNA, 17 bp, synthetic construct
  source 1..17: mol_type = other DNA
ctgttcccggggtggag

SEQ ID NO: 170193 - DNA, 17 bp, synthetic construct
  source 1..17: mol_type = other DNA
gctgttcccggggtgga

SEQ ID NO: 170194 - DNA, 17 bp, synthetic construct
  source 1..17: mol_type = other DNA
agctgttcccggggtgg

SEQ ID NO: 170195 - DNA, 17 bp, synthetic construct
  source 1..17: mol_type = other DNA
gagctgttcccggggtg

SEQ ID NO: 170196 - DNA, 17 bp, synthetic construct
  source 1..17: mol_type = other DNA
ggagctgttcccggggt

SEQ ID NO: 170197 - DNA, 17 bp, synthetic construct
  source 1..17: mol_type = other DNA
gggagctgttcccgggg

SEQ ID NO: 170198 - DNA, 17 bp, synthetic construct
  source 1..17: mol_type = other DNA
ggggagctgttcccggg

SEQ ID NO: 170199 - DNA, 17 bp, synthetic construct
  source 1..17: mol_type = other DNA
gggggagctgttcccgg

SEQ ID NO: 170200 - DNA, 17 bp, synthetic construct
  source 1..17: mol_type = other DNA
agggggagctgttcccg

SEQ ID NO: 170201 - DNA, 17 bp, synthetic construct
  source 1..17: mol_type = other DNA
gagggggagctgttccc

SEQ ID NO: 170202 - DNA, 17 bp, synthetic construct
  source 1..17: mol_type = other DNA
ggagggggagctgttcc

SEQ ID NO: 170203 - DNA, 17 bp, synthetic construct
  source 1..17: mol_type = other DNA
gggagggggagctgttc

SEQ ID NO: 170204 - DNA, 17 bp, synthetic construct
  source 1..17: mol_type = other DNA
tgggagggggagctgtt

SEQ ID NO: 170205 - DNA, 17 bp, synthetic construct
  source 1..17: mol_type = other DNA
ttgggagggggagctgt

SEQ ID NO: 170206 - DNA, 17 bp, synthetic construct
  source 1..17: mol_type = other DNA
tttgggagggggagctg

SEQ ID NO: 170207 - DNA, 17 bp, synthetic construct
  source 1..17: mol_type = other DNA
ctttgggagggggagct

SEQ ID NO: 170208 - DNA, 17 bp, synthetic construct
  source 1..17: mol_type = other DNA
actttgggagggggagc

SEQ ID NO: 170209 - DNA, 17 bp, synthetic construct
  source 1..17: mol_type = other DNA
cactttgggagggggag

SEQ ID NO: 170210 - DNA, 17 bp, synthetic construct
  source 1..17: mol_type = other DNA
gcactttgggaggggga

SEQ ID NO: 170211 - DNA, 17 bp, synthetic construct
  source 1..17: mol_type = other DNA
agcactttgggaggggg

SEQ ID NO: 170212 - DNA, 17 bp, synthetic construct
  source 1..17: mol_type = other DNA
cagcactttgggagggg

SEQ ID NO: 170213 - DNA, 17 bp, synthetic construct
  source 1..17: mol_type = other DNA
tcagcactttgggaggg

SEQ ID NO: 170214 - DNA, 17 bp, synthetic construct
  source 1..17: mol_type = other DNA
gtcagcactttgggagg

SEQ ID NO: 170215 - DNA, 17 bp, synthetic construct
  source 1..17: mol_type = other DNA
ggtcagcactttgggag

SEQ ID NO: 170216 - DNA, 17 bp, synthetic construct
  source 1..17: mol_type = other DNA
tggtcagcactttggga

SEQ ID NO: 170217 - DNA, 17 bp, synthetic construct
  source 1..17: mol_type = other DNA
ctggtcagcactttggg

SEQ ID NO: 170218 - DNA, 17 bp, synthetic construct
  source 1..17: mol_type = other DNA
gctggtcagcactttgg

SEQ ID NO: 170219 - DNA, 17 bp, synthetic construct
  source 1..17: mol_type = other DNA
tgctggtcagcactttg

SEQ ID NO: 170220 - DNA, 17 bp, synthetic construct
  source 1..17: mol_type = other DNA
gtgctggtcagcacttt

SEQ ID NO: 170221 - DNA, 17 bp, synthetic construct
  source 1..17: mol_type = other DNA
cgtgctggtcagcactt

SEQ ID NO: 170222 - DNA, 17 bp, synthetic construct
  source 1..17: mol_type = other DNA
ccgtgctggtcagcact

SEQ ID NO: 170223 - DNA, 17 bp, synthetic construct
  source 1..17: mol_type = other DNA
gccgtgctggtcagcac

SEQ ID NO: 170224 - DNA, 17 bp, synthetic construct
  source 1..17: mol_type = other DNA
ggccgtgctggtcagca

SEQ ID NO: 170225 - DNA, 17 bp, synthetic construct
  source 1..17: mol_type = other DNA
tggccgtgctggtcagc

SEQ ID NO: 170226 - DNA, 17 bp, synthetic construct
  source 1..17: mol_type = other DNA
gtggccgtgctggtcag

SEQ ID NO: 170227 - DNA, 17 bp, synthetic construct
  source 1..17: mol_type = other DNA
ggtggccgtgctggtca

SEQ ID NO: 170228 - DNA, 17 bp, synthetic construct
  source 1..17: mol_type = other DNA
tggtggccgtgctggtc

SEQ ID NO: 170229 - DNA, 17 bp, synthetic construct
  source 1..17: mol_type = other DNA
gtggtggccgtgctggt

SEQ ID NO: 170230 - DNA, 17 bp, synthetic construct
  source 1..17: mol_type = other DNA
tgtggtggccgtgctgg

SEQ ID NO: 170231 - DNA, 17 bp, synthetic construct
  source 1..17: mol_type = other DNA
gtgtggtggccgtgctg

SEQ ID NO: 170232 - DNA, 17 bp, synthetic construct
  source 1..17: mol_type = other DNA
ggtgtggtggccgtgct

SEQ ID NO: 170233 - DNA, 17 bp, synthetic construct
  source 1..17: mol_type = other DNA
gggtgtggtggccgtgc

SEQ ID NO: 170234 - DNA, 17 bp, synthetic construct
  source 1..17: mol_type = other DNA
tgggtgtggtggccgtg

SEQ ID NO: 170235 - DNA, 17 bp, synthetic construct
  source 1..17: mol_type = other DNA
gtgggtgtggtggccgt

SEQ ID NO: 170236 - DNA, 17 bp, synthetic construct
  source 1..17: mol_type = other DNA
tgtgggtgtggtggccg

SEQ ID NO: 170237 - DNA, 17 bp, synthetic construct
  source 1..17: mol_type = other DNA
ctgtgggtgtggtggcc

SEQ ID NO: 170238 - DNA, 17 bp, synthetic construct
  source 1..17: mol_type = other DNA
gctgtgggtgtggtggc

SEQ ID NO: 170239 - DNA, 17 bp, synthetic construct
  source 1..17: mol_type = other DNA
ggctgtgggtgtggtgg

SEQ ID NO: 170240 - DNA, 17 bp, synthetic construct
  source 1..17: mol_type = other DNA
tggctgtgggtgtggtg

SEQ ID NO: 170241 - DNA, 17 bp, synthetic construct
  source 1..17: mol_type = other DNA
gtggctgtgggtgtggt

SEQ ID NO: 170242 - DNA, 17 bp, synthetic construct
  source 1..17: mol_type = other DNA
ggtggctgtgggtgtgg

SEQ ID NO: 170243 - DNA, 17 bp, synthetic construct
  source 1..17: mol_type = other DNA
tggtggctgtgggtgtg

SEQ ID NO: 170244 - DNA, 17 bp, synthetic construct
  source 1..17: mol_type = other DNA
ctggtggctgtgggtgt

SEQ ID NO: 170245 - DNA, 17 bp, synthetic construct
  source 1..17: mol_type = other DNA
actggtggctgtgggtg

SEQ ID NO: 170246 - DNA, 17 bp, synthetic construct
  source 1..17: mol_type = other DNA
aactggtggctgtgggt

SEQ ID NO: 170247 - DNA, 17 bp, synthetic construct
  source 1..17: mol_type = other DNA
gaactggtggctgtggg

SEQ ID NO: 170248 - DNA, 17 bp, synthetic construct
  source 1..17: mol_type = other DNA
ggaactggtggctgtgg

SEQ ID NO: 170249 - DNA, 17 bp, synthetic construct
  source 1..17: mol_type = other DNA
tggaactggtggctgtg

SEQ ID NO: 170250 - DNA, 17 bp, synthetic construct
  source 1..17: mol_type = other DNA
ttggaactggtggctgt

SEQ ID NO: 170251 - DNA, 17 bp, synthetic construct
  source 1..17: mol_type = other DNA
tttggaactggtggctg

SEQ ID NO: 170252 - DNA, 17 bp, synthetic construct
  source 1..17: mol_type = other DNA
ctttggaactggtggct

SEQ ID NO: 170253 - DNA, 17 bp, synthetic construct
  source 1..17: mol_type = other DNA
gctttggaactggtggc

SEQ ID NO: 170254 - DNA, 17 bp, synthetic construct
  source 1..17: mol_type = other DNA
ggctttggaactggtgg

SEQ ID NO: 170255 - DNA, 17 bp, synthetic construct
  source 1..17: mol_type = other DNA
tggctttggaactggtg

SEQ ID NO: 170256 - DNA, 17 bp, synthetic construct
  source 1..17: mol_type = other DNA
gtggctttggaactggt

SEQ ID NO: 170257 - DNA, 17 bp, synthetic construct
  source 1..17: mol_type = other DNA
agtggctttggaactgg

SEQ ID NO: 170258 - DNA, 17 bp, synthetic construct
  source 1..17: mol_type = other DNA
aagtggctttggaactg

SEQ ID NO: 170259 - DNA, 17 bp, synthetic construct
  source 1..17: mol_type = other DNA
gaagtggctttggaact

SEQ ID NO: 170260 - DNA, 17 bp, synthetic construct
  source 1..17: mol_type = other DNA
ggaagtggctttggaac

SEQ ID NO: 170261 - DNA, 17 bp, synthetic construct
  source 1..17: mol_type = other DNA
aggaagtggctttggaa

SEQ ID NO: 170262 - DNA, 17 bp, synthetic construct
  source 1..17: mol_type = other DNA
gaggaagtggctttgga

SEQ ID NO: 170263 - DNA, 17 bp, synthetic construct
  source 1..17: mol_type = other DNA
ggaggaagtggctttgg

SEQ ID NO: 170264 - DNA, 17 bp, synthetic construct
  source 1..17: mol_type = other DNA
aggaggaagtggctttg

SEQ ID NO: 170265 - DNA, 17 bp, synthetic construct
  source 1..17: mol_type = other DNA
gaggaggaagtggcttt

SEQ ID NO: 170266 - DNA, 17 bp, synthetic construct
  source 1..17: mol_type = other DNA
ggaggaggaagtggctt

SEQ ID NO: 170267 - DNA, 17 bp, synthetic construct
  source 1..17: mol_type = other DNA
tggaggaggaagtggct

SEQ ID NO: 170268 - DNA, 17 bp, synthetic construct
  source 1..17: mol_type = other DNA
ctggaggaggaagtggc

SEQ ID NO: 170269 - DNA, 17 bp, synthetic construct
  source 1..17: mol_type = other DNA
actggaggaggaagtgg

SEQ ID NO: 170270 - DNA, 17 bp, synthetic construct
  source 1..17: mol_type = other DNA
gactggaggaggaagtg

SEQ ID NO: 170271 - DNA, 17 bp, synthetic construct
  source 1..17: mol_type = other DNA
ggactggaggaggaagt

SEQ ID NO: 170272 - DNA, 17 bp, synthetic construct
  source 1..17: mol_type = other DNA
tggactggaggaggaag

SEQ ID NO: 170273 - DNA, 17 bp, synthetic construct
  source 1..17: mol_type = other DNA
ttggactggaggaggaa

SEQ ID NO: 170274 - DNA, 17 bp, synthetic construct
  source 1..17: mol_type = other DNA
cttggactggaggagga

SEQ ID NO: 170275 - DNA, 17 bp, synthetic construct
  source 1..17: mol_type = other DNA
ccttggactggaggagg

SEQ ID NO: 170276 - DNA, 17 bp, synthetic construct
  source 1..17: mol_type = other DNA
tccttggactggaggag

SEQ ID NO: 170277 - DNA, 17 bp, synthetic construct
  source 1..17: mol_type = other DNA
gtccttggactggagga

SEQ ID NO: 170278 - DNA, 17 bp, synthetic construct
  source 1..17: mol_type = other DNA
agtccttggactggagg

SEQ ID NO: 170279 - DNA, 17 bp, synthetic construct
  source 1..17: mol_type = other DNA
cagtccttggactggag

SEQ ID NO: 170280 - DNA, 17 bp, synthetic construct
  source 1..17: mol_type = other DNA
gcagtccttggactgga

SEQ ID NO: 170281 - DNA, 17 bp, synthetic construct
  source 1..17: mol_type = other DNA
tgcagtccttggactgg

SEQ ID NO: 170282 - DNA, 17 bp, synthetic construct
  source 1..17: mol_type = other DNA
ttgcagtccttggactg

SEQ ID NO: 170283 - DNA, 17 bp, synthetic construct
  source 1..17: mol_type = other DNA
gttgcagtccttggact

SEQ ID NO: 170284 - DNA, 17 bp, synthetic construct
  source 1..17: mol_type = other DNA
ggttgcagtccttggac

SEQ ID NO: 170285 - DNA, 17 bp, synthetic construct
  source 1..17: mol_type = other DNA
tggttgcagtccttgga

SEQ ID NO: 170286 - DNA, 17 bp, synthetic construct
  source 1..17: mol_type = other DNA
gtggttgcagtccttgg

SEQ ID NO: 170287 - DNA, 17 bp, synthetic construct
  source 1..17: mol_type = other DNA
ggtggttgcagtccttg

SEQ ID NO: 170288 - DNA, 17 bp, synthetic construct
  source 1..17: mol_type = other DNA
gggtggttgcagtcctt

SEQ ID NO: 170289 - DNA, 17 bp, synthetic construct
  source 1..17: mol_type = other DNA
agggtggttgcagtcct

SEQ ID NO: 170290 - DNA, 17 bp, synthetic construct
  source 1..17: mol_type = other DNA
aagggtggttgcagtcc

SEQ ID NO: 170291 - DNA, 17 bp, synthetic construct
  source 1..17: mol_type = other DNA
gaagggtggttgcagtc

SEQ ID NO: 170292 - DNA, 17 bp, synthetic construct
  source 1..17: mol_type = other DNA
ggaagggtggttgcagt

SEQ ID NO: 170293 - DNA, 17 bp, synthetic construct
  source 1..17: mol_type = other DNA
tggaagggtggttgcag

SEQ ID NO: 170294 - DNA, 17 bp, synthetic construct
  source 1..17: mol_type = other DNA
ctggaagggtggttgca

SEQ ID NO: 170295 - DNA, 17 bp, synthetic construct
  source 1..17: mol_type = other DNA
actggaagggtggttgc

SEQ ID NO: 170296 - DNA, 17 bp, synthetic construct
  source 1..17: mol_type = other DNA
cactggaagggtggttg

SEQ ID NO: 170297 - DNA, 17 bp, synthetic construct
  source 1..17: mol_type = other DNA
gcactggaagggtggtt

SEQ ID NO: 170298 - DNA, 17 bp, synthetic construct
  source 1..17: mol_type = other DNA
agcactggaagggtggt

SEQ ID NO: 170299 - DNA, 17 bp, synthetic construct
  source 1..17: mol_type = other DNA
cagcactggaagggtgg

SEQ ID NO: 170300 - DNA, 17 bp, synthetic construct
  source 1..17: mol_type = other DNA
tcagcactggaagggtg

SEQ ID NO: 170301 - DNA, 17 bp, synthetic construct
  source 1..17: mol_type = other DNA
gtcagcactggaagggt

SEQ ID NO: 170302 - DNA, 17 bp, synthetic construct
  source 1..17: mol_type = other DNA
tgtcagcactggaaggg

SEQ ID NO: 170303 - DNA, 17 bp, synthetic construct
  source 1..17: mol_type = other DNA
ttgtcagcactggaagg

SEQ ID NO: 170304 - DNA, 17 bp, synthetic construct
  source 1..17: mol_type = other DNA
cttgtcagcactggaag

SEQ ID NO: 170305 - DNA, 17 bp, synthetic construct
  source 1..17: mol_type = other DNA
gcttgtcagcactggaa

SEQ ID NO: 170306 - DNA, 17 bp, synthetic construct
  source 1..17: mol_type = other DNA
tgcttgtcagcactgga

SEQ ID NO: 170307 - DNA, 17 bp, synthetic construct
  source 1..17: mol_type = other DNA
gtgcttgtcagcactgg

SEQ ID NO: 170308 - DNA, 17 bp, synthetic construct
  source 1..17: mol_type = other DNA
tgtgcttgtcagcactg

SEQ ID NO: 170309 - DNA, 17 bp, synthetic construct
  source 1..17: mol_type = other DNA
ctgtgcttgtcagcact

SEQ ID NO: 170310 - DNA, 17 bp, synthetic construct
  source 1..17: mol_type = other DNA
gctgtgcttgtcagcac

SEQ ID NO: 170311 - DNA, 17 bp, synthetic construct
  source 1..17: mol_type = other DNA
ggctgtgcttgtcagca

SEQ ID NO: 170312 - DNA, 17 bp, synthetic construct
  source 1..17: mol_type = other DNA
tggctgtgcttgtcagc

SEQ ID NO: 170313 - DNA, 17 bp, synthetic construct
  source 1..17: mol_type = other DNA
gtggctgtgcttgtcag

SEQ ID NO: 170314 - DNA, 17 bp, synthetic construct
  source 1..17: mol_type = other DNA
ggtggctgtgcttgtca

SEQ ID NO: 170315 - DNA, 17 bp, synthetic construct
  source 1..17: mol_type = other DNA
tggtggctgtgcttgtc

SEQ ID NO: 170316 - DNA, 17 bp, synthetic construct
  source 1..17: mol_type = other DNA
ttggtggctgtgcttgt

SEQ ID NO: 170317 - DNA, 17 bp, synthetic construct
  source 1..17: mol_type = other DNA
tttggtggctgtgcttg

SEQ ID NO: 170318 - DNA, 17 bp, synthetic construct
  source 1..17: mol_type = other DNA
atttggtggctgtgctt

SEQ ID NO: 170319 - DNA, 17 bp, synthetic construct
  source 1..17: mol_type = other DNA
gatttggtggctgtgct

SEQ ID NO: 170320 - DNA, 17 bp, synthetic construct
  source 1..17: mol_type = other DNA
ggatttggtggctgtgc

SEQ ID NO: 170321 - DNA, 17 bp, synthetic construct
  source 1..17: mol_type = other DNA
tggatttggtggctgtg

SEQ ID NO: 170322 - DNA, 17 bp, synthetic construct
  source 1..17: mol_type = other DNA
gtggatttggtggctgt

SEQ ID NO: 170323 - DNA, 17 bp, synthetic construct
  source 1..17: mol_type = other DNA
tgtggatttggtggctg

SEQ ID NO: 170324 - DNA, 17 bp, synthetic construct
  source 1..17: mol_type = other DNA
ctgtggatttggtggct

SEQ ID NO: 170325 - DNA, 17 bp, synthetic construct
  source 1..17: mol_type = other DNA
gctgtggatttggtggc

SEQ ID NO: 170326 - DNA, 17 bp, synthetic construct
  source 1..17: mol_type = other DNA
agctgtggatttggtgg

SEQ ID NO: 170327 - DNA, 17 bp, synthetic construct
  source 1..17: mol_type = other DNA
tagctgtggatttggtg

SEQ ID NO: 170328 - DNA, 17 bp, synthetic construct
  source 1..17: mol_type = other DNA
gtagctgtggatttggt

SEQ ID NO: 170329 - DNA, 17 bp, synthetic construct
  source 1..17: mol_type = other DNA
ggtagctgtggatttgg

SEQ ID NO: 170330 - DNA, 17 bp, synthetic construct
  source 1..17: mol_type = other DNA
tggtagctgtggatttg

SEQ ID NO: 170331 - DNA, 17 bp, synthetic construct
  source 1..17: mol_type = other DNA
ctggtagctgtggattt

SEQ ID NO: 170332 - DNA, 17 bp, synthetic construct
  source 1..17: mol_type = other DNA
gctggtagctgtggatt

SEQ ID NO: 170333 - DNA, 17 bp, synthetic construct
  source 1..17: mol_type = other DNA
agctggtagctgtggat

SEQ ID NO: 170334 - DNA, 17 bp, synthetic construct
  source 1..17: mol_type = other DNA
aagctggtagctgtgga

SEQ ID NO: 170335 - DNA, 17 bp, synthetic construct
  source 1..17: mol_type = other DNA
aaagctggtagctgtgg

SEQ ID NO: 170336 - DNA, 17 bp, synthetic construct
  source 1..17: mol_type = other DNA
taaagctggtagctgtg

SEQ ID NO: 170337 - DNA, 17 bp, synthetic construct
  source 1..17: mol_type = other DNA
gtaaagctggtagctgt

SEQ ID NO: 170338 - DNA, 17 bp, synthetic construct
  source 1..17: mol_type = other DNA
tgtaaagctggtagctg

SEQ ID NO: 170339 - DNA, 17 bp, synthetic construct
  source 1..17: mol_type = other DNA
gtgtaaagctggtagct

SEQ ID NO: 170340 - DNA, 17 bp, synthetic construct
  source 1..17: mol_type = other DNA
ggtgtaaagctggtagc

SEQ ID NO: 170341 - DNA, 17 bp, synthetic construct
  source 1..17: mol_type = other DNA
gggtgtaaagctggtag

SEQ ID NO: 170342 - DNA, 17 bp, synthetic construct
  source 1..17: mol_type = other DNA
tgggtgtaaagctggta

SEQ ID NO: 170343 - DNA, 17 bp, synthetic construct
  source 1..17: mol_type = other DNA
atgggtgtaaagctggt

SEQ ID NO: 170344 - DNA, 17 bp, synthetic construct
  source 1..17: mol_type = other DNA
gatgggtgtaaagctgg

SEQ ID NO: 170345 - DNA, 17 bp, synthetic construct
  source 1..17: mol_type = other DNA
ggatgggtgtaaagctg

SEQ ID NO: 170346 - DNA, 17 bp, synthetic construct
  source 1..17: mol_type = other DNA
gggatgggtgtaaagct

SEQ ID NO: 170347 - DNA, 17 bp, synthetic construct
  source 1..17: mol_type = other DNA
ggggatgggtgtaaagc

SEQ ID NO: 170348 - DNA, 17 bp, synthetic construct
  source 1..17: mol_type = other DNA
aggggatgggtgtaaag

SEQ ID NO: 170349 - DNA, 17 bp, synthetic construct
  source 1..17: mol_type = other DNA
gaggggatgggtgtaaa

SEQ ID NO: 170350 - DNA, 17 bp, synthetic construct
  source 1..17: mol_type = other DNA
ggaggggatgggtgtaa

SEQ ID NO: 170351 - DNA, 17 bp, synthetic construct
  source 1..17: mol_type = other DNA
aggaggggatgggtgta

SEQ ID NO: 170352 - DNA, 17 bp, synthetic construct
  source 1..17: mol_type = other DNA
aaggaggggatgggtgt

SEQ ID NO: 170353 - DNA, 17 bp, synthetic construct
  source 1..17: mol_type = other DNA
gaaggaggggatgggtg

SEQ ID NO: 170354 - DNA, 17 bp, synthetic construct
  source 1..17: mol_type = other DNA
tgaaggaggggatgggt

SEQ ID NO: 170355 - DNA, 17 bp, synthetic construct
  source 1..17: mol_type = other DNA
gtgaaggaggggatggg

SEQ ID NO: 170356 - DNA, 17 bp, synthetic construct
  source 1..17: mol_type = other DNA
ggtgaaggaggggatgg

SEQ ID NO: 170357 - DNA, 17 bp, synthetic construct
  source 1..17: mol_type = other DNA
gggtgaaggaggggatg

SEQ ID NO: 170358 - DNA, 17 bp, synthetic construct
  source 1..17: mol_type = other DNA
agggtgaaggaggggat

SEQ ID NO: 170359 - DNA, 17 bp, synthetic construct
  source 1..17: mol_type = other DNA
aagggtgaaggagggga

SEQ ID NO: 170360 - DNA, 17 bp, synthetic construct
  source 1..17: mol_type = other DNA
caagggtgaaggagggg

SEQ ID NO: 170361 - DNA, 17 bp, synthetic construct
  source 1..17: mol_type = other DNA
ccaagggtgaaggaggg

SEQ ID NO: 170362 - DNA, 17 bp, synthetic construct
  source 1..17: mol_type = other DNA
cccaagggtgaaggagg

SEQ ID NO: 170363 - DNA, 17 bp, synthetic construct
  source 1..17: mol_type = other DNA
tcccaagggtgaaggag

SEQ ID NO: 170364 - DNA, 17 bp, synthetic construct
  source 1..17: mol_type = other DNA
gtcccaagggtgaagga

SEQ ID NO: 170365 - DNA, 17 bp, synthetic construct
  source 1..17: mol_type = other DNA
ggtcccaagggtgaagg

SEQ ID NO: 170366 - DNA, 17 bp, synthetic construct
  source 1..17: mol_type = other DNA
tggtcccaagggtgaag

SEQ ID NO: 170367 - DNA, 17 bp, synthetic construct
  source 1..17: mol_type = other DNA
gtggtcccaagggtgaa

SEQ ID NO: 170368 - DNA, 17 bp, synthetic construct
  source 1..17: mol_type = other DNA
ggtggtcccaagggtga

SEQ ID NO: 170369 - DNA, 17 bp, synthetic construct
  source 1..17: mol_type = other DNA
cggtggtcccaagggtg

SEQ ID NO: 170370 - DNA, 17 bp, synthetic construct
  source 1..17: mol_type = other DNA
ccggtggtcccaagggt

SEQ ID NO: 170371 - DNA, 17 bp, synthetic construct
  source 1..17: mol_type = other DNA
cccggtggtcccaaggg

SEQ ID NO: 170372 - DNA, 17 bp, synthetic construct
  source 1..17: mol_type = other DNA
tcccggtggtcccaagg

SEQ ID NO: 170373 - DNA, 17 bp, synthetic construct
  source 1..17: mol_type = other DNA
gtcccggtggtcccaag

SEQ ID NO: 170374 - DNA, 17 bp, synthetic construct
  source 1..17: mol_type = other DNA
ggtcccggtggtcccaa

SEQ ID NO: 170375 - DNA, 17 bp, synthetic construct
  source 1..17: mol_type = other DNA
gggtcccggtggtccca

SEQ ID NO: 170376 - DNA, 17 bp, synthetic construct
  source 1..17: mol_type = other DNA
agggtcccggtggtccc

SEQ ID NO: 170377 - DNA, 17 bp, synthetic construct
  source 1..17: mol_type = other DNA
gagggtcccggtggtcc

SEQ ID NO: 170378 - DNA, 17 bp, synthetic construct
  source 1..17: mol_type = other DNA
ggagggtcccggtggtc

SEQ ID NO: 170379 - DNA, 17 bp, synthetic construct
  source 1..17: mol_type = other DNA
gggagggtcccggtggt

SEQ ID NO: 170380 - DNA, 17 bp, synthetic construct
  source 1..17: mol_type = other DNA
tgggagggtcccggtgg

SEQ ID NO: 170381 - DNA, 17 bp, synthetic construct
  source 1..17: mol_type = other DNA
ctgggagggtcccggtg

SEQ ID NO: 170382 - DNA, 17 bp, synthetic construct
  source 1..17: mol_type = other DNA
tctgggagggtcccggt

SEQ ID NO: 170383 - DNA, 17 bp, synthetic construct
  source 1..17: mol_type = other DNA
ttctgggagggtcccgg

SEQ ID NO: 170384 - DNA, 17 bp, synthetic construct
  source 1..17: mol_type = other DNA
gttctgggagggtcccg

SEQ ID NO: 170385 - DNA, 17 bp, synthetic construct
  source 1..17: mol_type = other DNA
tgttctgggagggtccc

SEQ ID NO: 170386 - DNA, 17 bp, synthetic construct
  source 1..17: mol_type = other DNA
ctgttctgggagggtcc

SEQ ID NO: 170387 - DNA, 17 bp, synthetic construct
  source 1..17: mol_type = other DNA
tctgttctgggagggtc

SEQ ID NO: 170388 - DNA, 17 bp, synthetic construct
  source 1..17: mol_type = other DNA
gtctgttctgggagggt

SEQ ID NO: 170389 - DNA, 17 bp, synthetic construct
  source 1..17: mol_type = other DNA
ggtctgttctgggaggg

SEQ ID NO: 170390 - DNA, 17 bp, synthetic construct
  source 1..17: mol_type = other DNA
tggtctgttctgggagg

SEQ ID NO: 170391 - DNA, 17 bp, synthetic construct
  source 1..17: mol_type = other DNA
gtggtctgttctgggag

SEQ ID NO: 170392 - DNA, 17 bp, synthetic construct
  source 1..17: mol_type = other DNA
ggtggtctgttctggga

SEQ ID NO: 170393 - DNA, 17 bp, synthetic construct
  source 1..17: mol_type = other DNA
tggtggtctgttctggg

SEQ ID NO: 170394 - DNA, 17 bp, synthetic construct
  source 1..17: mol_type = other DNA
gtggtggtctgttctgg

SEQ ID NO: 170395 - DNA, 17 bp, synthetic construct
  source 1..17: mol_type = other DNA
tgtggtggtctgttctg

SEQ ID NO: 170396 - DNA, 17 bp, synthetic construct
  source 1..17: mol_type = other DNA
gtgtggtggtctgttct

SEQ ID NO: 170397 - DNA, 17 bp, synthetic construct
  source 1..17: mol_type = other DNA
ggtgtggtggtctgttc

SEQ ID NO: 170398 - DNA, 17 bp, synthetic construct
  source 1..17: mol_type = other DNA
gggtgtggtggtctgtt

SEQ ID NO: 170399 - DNA, 17 bp, synthetic construct
  source 1..17: mol_type = other DNA
tgggtgtggtggtctgt

SEQ ID NO: 170400 - DNA, 17 bp, synthetic construct
  source 1..17: mol_type = other DNA
atgggtgtggtggtctg

SEQ ID NO: 170401 - DNA, 17 bp, synthetic construct
  source 1..17: mol_type = other DNA
catgggtgtggtggtct

SEQ ID NO: 170402 - DNA, 17 bp, synthetic construct
  source 1..17: mol_type = other DNA
ccatgggtgtggtggtc

SEQ ID NO: 170403 - DNA, 17 bp, synthetic construct
  source 1..17: mol_type = other DNA
gccatgggtgtggtggt

SEQ ID NO: 170404 - DNA, 17 bp, synthetic construct
  source 1..17: mol_type = other DNA
ggccatgggtgtggtgg

SEQ ID NO: 170405 - DNA, 17 bp, synthetic construct
  source 1..17: mol_type = other DNA
tggccatgggtgtggtg

SEQ ID NO: 170406 - DNA, 17 bp, synthetic construct
  source 1..17: mol_type = other DNA
gtggccatgggtgtggt

SEQ ID NO: 170407 - DNA, 17 bp, synthetic construct
  source 1..17: mol_type = other DNA
ggtggccatgggtgtgg

SEQ ID NO: 170408 - DNA, 17 bp, synthetic construct
  source 1..17: mol_type = other DNA
tggtggccatgggtgtg

SEQ ID NO: 170409 - DNA, 17 bp, synthetic construct
  source 1..17: mol_type = other DNA
atggtggccatgggtgt

SEQ ID NO: 170410 - DNA, 17 bp, synthetic construct
  source 1..17: mol_type = other DNA
catggtggccatgggtg

SEQ ID NO: 170411 - DNA, 17 bp, synthetic construct
  source 1..17: mol_type = other DNA
acatggtggccatgggt

SEQ ID NO: 170412 - DNA, 17 bp, synthetic construct
  source 1..17: mol_type = other DNA
gacatggtggccatggg

SEQ ID NO: 170413 - DNA, 17 bp, synthetic construct
  source 1..17: mol_type = other DNA
ggacatggtggccatgg

SEQ ID NO: 170414 - DNA, 17 bp, synthetic construct
  source 1..17: mol_type = other DNA
tggacatggtggccatg

SEQ ID NO: 170415 - DNA, 17 bp, synthetic construct
  source 1..17: mol_type = other DNA
gtggacatggtggccat

SEQ ID NO: 170416 - DNA, 17 bp, synthetic construct
  source 1..17: mol_type = other DNA
tgtggacatggtggcca

SEQ ID NO: 170417 - DNA, 17 bp, synthetic construct
  source 1..17: mol_type = other DNA
ttgtggacatggtggcc

SEQ ID NO: 170418 - DNA, 17 bp, synthetic construct
  source 1..17: mol_type = other DNA
attgtggacatggtggc

SEQ ID NO: 170419 - DNA, 17 bp, synthetic construct
  source 1..17: mol_type = other DNA
gattgtggacatggtgg

SEQ ID NO: 170420 - DNA, 17 bp, synthetic construct
  source 1..17: mol_type = other DNA
ggattgtggacatggtg

SEQ ID NO: 170421 - DNA, 17 bp, synthetic construct
  source 1..17: mol_type = other DNA
tggattgtggacatggt

SEQ ID NO: 170422 - DNA, 17 bp, synthetic construct
  source 1..17: mol_type = other DNA
gtggattgtggacatgg

SEQ ID NO: 170423 - DNA, 17 bp, synthetic construct
  source 1..17: mol_type = other DNA
ggtggattgtggacatg

SEQ ID NO: 170424 - DNA, 17 bp, synthetic construct
  source 1..17: mol_type = other DNA
gggtggattgtggacat

SEQ ID NO: 170425 - DNA, 17 bp, synthetic construct
  source 1..17: mol_type = other DNA
ggggtggattgtggaca

SEQ ID NO: 170426 - DNA, 17 bp, synthetic construct
  source 1..17: mol_type = other DNA
aggggtggattgtggac

SEQ ID NO: 170427 - DNA, 17 bp, synthetic construct
  source 1..17: mol_type = other DNA
gaggggtggattgtgga

SEQ ID NO: 170428 - DNA, 17 bp, synthetic construct
  source 1..17: mol_type = other DNA
ggaggggtggattgtgg

SEQ ID NO: 170429 - DNA, 17 bp, synthetic construct
  source 1..17: mol_type = other DNA
aggaggggtggattgtg

SEQ ID NO: 170430 - DNA, 17 bp, synthetic construct
  source 1..17: mol_type = other DNA
gaggaggggtggattgt

SEQ ID NO: 170431 - DNA, 17 bp, synthetic construct
  source 1..17: mol_type = other DNA
ggaggaggggtggattg

SEQ ID NO: 170432 - DNA, 17 bp, synthetic construct
  source 1..17: mol_type = other DNA
tggaggaggggtggatt

SEQ ID NO: 170433 - DNA, 17 bp, synthetic construct
  source 1..17: mol_type = other DNA
gtggaggaggggtggat

SEQ ID NO: 170434 - DNA, 17 bp, synthetic construct
  source 1..17: mol_type = other DNA
agtggaggaggggtgga

SEQ ID NO: 170435 - DNA, 17 bp, synthetic construct
  source 1..17: mol_type = other DNA
gagtggaggaggggtgg

SEQ ID NO: 170436 - DNA, 17 bp, synthetic construct
  source 1..17: mol_type = other DNA
ggagtggaggaggggtg

SEQ ID NO: 170437 - DNA, 17 bp, synthetic construct
  source 1..17: mol_type = other DNA
cggagtggaggaggggt

SEQ ID NO: 170438 - DNA, 17 bp, synthetic construct
  source 1..17: mol_type = other DNA
ccggagtggaggagggg

SEQ ID NO: 170439 - DNA, 17 bp, synthetic construct
  source 1..17: mol_type = other DNA
tccggagtggaggaggg

SEQ ID NO: 170440 - DNA, 17 bp, synthetic construct
  source 1..17: mol_type = other DNA
ctccggagtggaggagg

SEQ ID NO: 170441 - DNA, 17 bp, synthetic construct
  source 1..17: mol_type = other DNA
tctccggagtggaggag

SEQ ID NO: 170442 - DNA, 17 bp, synthetic construct
  source 1..17: mol_type = other DNA
gtctccggagtggagga

SEQ ID NO: 170443 - DNA, 17 bp, synthetic construct
  source 1..17: mol_type = other DNA
ggtctccggagtggagg

SEQ ID NO: 170444 - DNA, 17 bp, synthetic construct
  source 1..17: mol_type = other DNA
tggtctccggagtggag

SEQ ID NO: 170445 - DNA, 17 bp, synthetic construct
  source 1..17: mol_type = other DNA
gtggtctccggagtgga

SEQ ID NO: 170446 - DNA, 17 bp, synthetic construct
  source 1..17: mol_type = other DNA
ggtggtctccggagtgg

SEQ ID NO: 170447 - DNA, 17 bp, synthetic construct
  source 1..17: mol_type = other DNA
gggtggtctccggagtg

SEQ ID NO: 170448 - DNA, 17 bp, synthetic construct
  source 1..17: mol_type = other DNA
tgggtggtctccggagt

SEQ ID NO: 170449 - DNA, 17 bp, synthetic construct
  source 1..17: mol_type = other DNA
gtgggtggtctccggag

SEQ ID NO: 170450 - DNA, 17 bp, synthetic construct
  source 1..17: mol_type = other DNA
tgtgggtggtctccgga

SEQ ID NO: 170451 - DNA, 17 bp, synthetic construct
  source 1..17: mol_type = other DNA
gtgtgggtggtctccgg

SEQ ID NO: 170452 - DNA, 17 bp, synthetic construct
  source 1..17: mol_type = other DNA
ggtgtgggtggtctccg

SEQ ID NO: 170453 - DNA, 17 bp, synthetic construct
  source 1..17: mol_type = other DNA
aggtgtgggtggtctcc

SEQ ID NO: 170454 - DNA, 17 bp, synthetic construct
  source 1..17: mol_type = other DNA
gaggtgtgggtggtctc

SEQ ID NO: 170455 - DNA, 17 bp, synthetic construct
  source 1..17: mol_type = other DNA
ggaggtgtgggtggtct

SEQ ID NO: 170456 - DNA, 17 bp, synthetic construct
  source 1..17: mol_type = other DNA
tggaggtgtgggtggtc

SEQ ID NO: 170457 - DNA, 17 bp, synthetic construct
  source 1..17: mol_type = other DNA
gtggaggtgtgggtggt

SEQ ID NO: 170458 - DNA, 17 bp, synthetic construct
  source 1..17: mol_type = other DNA
tgtggaggtgtgggtgg

SEQ ID NO: 170459 - DNA, 17 bp, synthetic construct
  source 1..17: mol_type = other DNA
ctgtggaggtgtgggtg

SEQ ID NO: 170460 - DNA, 17 bp, synthetic construct
  source 1..17: mol_type = other DNA
actgtggaggtgtgggt

SEQ ID NO: 170461 - DNA, 17 bp, synthetic construct
  source 1..17: mol_type = other DNA
cactgtggaggtgtggg

SEQ ID NO: 170462 - DNA, 17 bp, synthetic construct
  source 1..17: mol_type = other DNA
gcactgtggaggtgtgg

SEQ ID NO: 170463 - DNA, 17 bp, synthetic construct
  source 1..17: mol_type = other DNA
agcactgtggaggtgtg

SEQ ID NO: 170464 - DNA, 17 bp, synthetic construct
  source 1..17: mol_type = other DNA
cagcactgtggaggtgt

SEQ ID NO: 170465 - DNA, 17 bp, synthetic construct
  source 1..17: mol_type = other DNA
tcagcactgtggaggtg

SEQ ID NO: 170466 - DNA, 17 bp, synthetic construct
  source 1..17: mol_type = other DNA
gtcagcactgtggaggt

SEQ ID NO: 170467 - DNA, 17 bp, synthetic construct
  source 1..17: mol_type = other DNA
ggtcagcactgtggagg

SEQ ID NO: 170468 - DNA, 17 bp, synthetic construct
  source 1..17: mol_type = other DNA
tggtcagcactgtggag

SEQ ID NO: 170469 - DNA, 17 bp, synthetic construct
  source 1..17: mol_type = other DNA
gtggtcagcactgtgga

SEQ ID NO: 170470 - DNA, 17 bp, synthetic construct
  source 1..17: mol_type = other DNA
cgtggtcagcactgtgg

SEQ ID NO: 170471 - DNA, 17 bp, synthetic construct
  source 1..17: mol_type = other DNA
tcgtggtcagcactgtg

SEQ ID NO: 170472 - DNA, 17 bp, synthetic construct
  source 1..17: mol_type = other DNA
ttcgtggtcagcactgt

SEQ ID NO: 170473 - DNA, 17 bp, synthetic construct
  source 1..17: mol_type = other DNA
cttcgtggtcagcactg

SEQ ID NO: 170474 - DNA, 17 bp, synthetic construct
  source 1..17: mol_type = other DNA
ccttcgtggtcagcact

SEQ ID NO: 170475 - DNA, 17 bp, synthetic construct
  source 1..17: mol_type = other DNA
gccttcgtggtcagcac

SEQ ID NO: 170476 - DNA, 17 bp, synthetic construct
  source 1..17: mol_type = other DNA
ggccttcgtggtcagca

SEQ ID NO: 170477 - DNA, 17 bp, synthetic construct
  source 1..17: mol_type = other DNA
tggccttcgtggtcagc

SEQ ID NO: 170478 - DNA, 17 bp, synthetic construct
  source 1..17: mol_type = other DNA
gtggccttcgtggtcag

SEQ ID NO: 170479 - DNA, 17 bp, synthetic construct
  source 1..17: mol_type = other DNA
ggtggccttcgtggtca

SEQ ID NO: 170480 - DNA, 17 bp, synthetic construct
  source 1..17: mol_type = other DNA
tggtggccttcgtggtc

SEQ ID NO: 170481 - DNA, 17 bp, synthetic construct
  source 1..17: mol_type = other DNA
gtggtggccttcgtggt

SEQ ID NO: 170482 - DNA, 17 bp, synthetic construct
  source 1..17: mol_type = other DNA
cgtggtggccttcgtgg

SEQ ID NO: 170483 - DNA, 17 bp, synthetic construct
  source 1..17: mol_type = other DNA
tcgtggtggccttcgtg

SEQ ID NO: 170484 - DNA, 17 bp, synthetic construct
  source 1..17: mol_type = other DNA
gtcgtggtggccttcgt

SEQ ID NO: 170485 - DNA, 17 bp, synthetic construct
  source 1..17: mol_type = other DNA
tgtcgtggtggccttcg

SEQ ID NO: 170486 - DNA, 17 bp, synthetic construct
  source 1..17: mol_type = other DNA
ttgtcgtggtggccttc

SEQ ID NO: 170487 - DNA, 17 bp, synthetic construct
  source 1..17: mol_type = other DNA
cttgtcgtggtggcctt

SEQ ID NO: 170488 - DNA, 17 bp, synthetic construct
  source 1..17: mol_type = other DNA
ccttgtcgtggtggcct

SEQ ID NO: 170489 - DNA, 17 bp, synthetic construct
  source 1..17: mol_type = other DNA
cccttgtcgtggtggcc

SEQ ID NO: 170490 - DNA, 17 bp, synthetic construct
  source 1..17: mol_type = other DNA
gcccttgtcgtggtggc

SEQ ID NO: 170491 - DNA, 17 bp, synthetic construct
  source 1..17: mol_type = other DNA
ggcccttgtcgtggtgg

SEQ ID NO: 170492 - DNA, 17 bp, synthetic construct
  source 1..17: mol_type = other DNA
tggcccttgtcgtggtg

SEQ ID NO: 170493 - DNA, 17 bp, synthetic construct
  source 1..17: mol_type = other DNA
gtggcccttgtcgtggt

SEQ ID NO: 170494 - DNA, 17 bp, synthetic construct
  source 1..17: mol_type = other DNA
ggtggcccttgtcgtgg

SEQ ID NO: 170495 - DNA, 17 bp, synthetic construct
  source 1..17: mol_type = other DNA
tggtggcccttgtcgtg

SEQ ID NO: 170496 - DNA, 17 bp, synthetic construct
  source 1..17: mol_type = other DNA
ctggtggcccttgtcgt

SEQ ID NO: 170497 - DNA, 17 bp, synthetic construct
  source 1..17: mol_type = other DNA
actggtggcccttgtcg

SEQ ID NO: 170498 - DNA, 17 bp, synthetic construct
  source 1..17: mol_type = other DNA
aactggtggcccttgtc

SEQ ID NO: 170499 - DNA, 17 bp, synthetic construct
  source 1..17: mol_type = other DNA
gaactggtggcccttgt

SEQ ID NO: 170500 - DNA, 17 bp, synthetic construct
  source 1..17: mol_type = other DNA
ggaactggtggcccttg

SEQ ID NO: 170501 - DNA, 17 bp, synthetic construct
  source 1..17: mol_type = other DNA
tggaactggtggccctt

SEQ ID NO: 170502 - DNA, 17 bp, synthetic construct
  source 1..17: mol_type = other DNA
atggaactggtggccct

SEQ ID NO: 170503 - DNA, 17 bp, synthetic construct
  source 1..17: mol_type = other DNA
catggaactggtggccc

SEQ ID NO: 170504 - DNA, 17 bp, synthetic construct
  source 1..17: mol_type = other DNA
acatggaactggtggcc

SEQ ID NO: 170505 - DNA, 17 bp, synthetic construct
  source 1..17: mol_type = other DNA
gacatggaactggtggc

SEQ ID NO: 170506 - DNA, 17 bp, synthetic construct
  source 1..17: mol_type = other DNA
ggacatggaactggtgg

SEQ ID NO: 170507 - DNA, 17 bp, synthetic construct
  source 1..17: mol_type = other DNA
tggacatggaactggtg

SEQ ID NO: 170508 - DNA, 17 bp, synthetic construct
  source 1..17: mol_type = other DNA
gtggacatggaactggt

SEQ ID NO: 170509 - DNA, 17 bp, synthetic construct
  source 1..17: mol_type = other DNA
ggtggacatggaactgg

SEQ ID NO: 170510 - DNA, 17 bp, synthetic construct
  source 1..17: mol_type = other DNA
gggtggacatggaactg

SEQ ID NO: 170511 - DNA, 17 bp, synthetic construct
  source 1..17: mol_type = other DNA
ggggtggacatggaact

SEQ ID NO: 170512 - DNA, 17 bp, synthetic construct
  source 1..17: mol_type = other DNA
gggggtggacatggaac

SEQ ID NO: 170513 - DNA, 17 bp, synthetic construct
  source 1..17: mol_type = other DNA
agggggtggacatggaa

SEQ ID NO: 170514 - DNA, 17 bp, synthetic construct
  source 1..17: mol_type = other DNA
gagggggtggacatgga

SEQ ID NO: 170515 - DNA, 17 bp, synthetic construct
  source 1..17: mol_type = other DNA
ggagggggtggacatgg

SEQ ID NO: 170516 - DNA, 17 bp, synthetic construct
  source 1..17: mol_type = other DNA
aggagggggtggacatg

SEQ ID NO: 170517 - DNA, 17 bp, synthetic construct
  source 1..17: mol_type = other DNA
gaggagggggtggacat

SEQ ID NO: 170518 - DNA, 17 bp, synthetic construct
  source 1..17: mol_type = other DNA
ggaggagggggtggaca

SEQ ID NO: 170519 - DNA, 17 bp, synthetic construct
  source 1..17: mol_type = other DNA
tggaggagggggtggac

SEQ ID NO: 170520 - DNA, 17 bp, synthetic construct
  source 1..17: mol_type = other DNA
gtggaggagggggtgga

SEQ ID NO: 170521 - DNA, 17 bp, synthetic construct
  source 1..17: mol_type = other DNA
agtggaggagggggtgg

SEQ ID NO: 170522 - DNA, 17 bp, synthetic construct
  source 1..17: mol_type = other DNA
gagtggaggagggggtg

SEQ ID NO: 170523 - DNA, 17 bp, synthetic construct
  source 1..17: mol_type = other DNA
ggagtggaggagggggt

SEQ ID NO: 170524 - DNA, 17 bp, synthetic construct
  source 1..17: mol_type = other DNA
cggagtggaggaggggg

SEQ ID NO: 170525 - DNA, 17 bp, synthetic construct
  source 1..17: mol_type = other DNA
ccggagtggaggagggg

SEQ ID NO: 170526 - DNA, 17 bp, synthetic construct
  source 1..17: mol_type = other DNA
cccggagtggaggaggg

SEQ ID NO: 170527 - DNA, 17 bp, synthetic construct
  source 1..17: mol_type = other DNA
ccccggagtggaggagg

SEQ ID NO: 170528 - DNA, 17 bp, synthetic construct
  source 1..17: mol_type = other DNA
tccccggagtggaggag

SEQ ID NO: 170529 - DNA, 17 bp, synthetic construct
  source 1..17: mol_type = other DNA
gtccccggagtggagga

SEQ ID NO: 170530 - DNA, 17 bp, synthetic construct
  source 1..17: mol_type = other DNA
cgtccccggagtggagg

SEQ ID NO: 170531 - DNA, 17 bp, synthetic construct
  source 1..17: mol_type = other DNA
tcgtccccggagtggag

SEQ ID NO: 170532 - DNA, 17 bp, synthetic construct
  source 1..17: mol_type = other DNA
gtcgtccccggagtgga

SEQ ID NO: 170533 - DNA, 17 bp, synthetic construct
  source 1..17: mol_type = other DNA
ggtcgtccccggagtgg

SEQ ID NO: 170534 - DNA, 17 bp, synthetic construct
  source 1..17: mol_type = other DNA
aggtcgtccccggagtg

SEQ ID NO: 170535 - DNA, 17 bp, synthetic construct
  source 1..17: mol_type = other DNA
caggtcgtccccggagt

SEQ ID NO: 170536 - DNA, 17 bp, synthetic construct
  source 1..17: mol_type = other DNA
ccaggtcgtccccggag

SEQ ID NO: 170537 - DNA, 17 bp, synthetic construct
  source 1..17: mol_type = other DNA
tccaggtcgtccccgga

SEQ ID NO: 170538 - DNA, 17 bp, synthetic construct
  source 1..17: mol_type = other DNA
atccaggtcgtccccgg

SEQ ID NO: 170539 - DNA, 17 bp, synthetic construct
  source 1..17: mol_type = other DNA
gatccaggtcgtccccg

SEQ ID NO: 170540 - DNA, 17 bp, synthetic construct
  source 1..17: mol_type = other DNA
ggatccaggtcgtcccc

SEQ ID NO: 170541 - DNA, 17 bp, synthetic construct
  source 1..17: mol_type = other DNA
aggatccaggtcgtccc

SEQ ID NO: 170542 - DNA, 17 bp, synthetic construct
  source 1..17: mol_type = other DNA
gaggatccaggtcgtcc

SEQ ID NO: 170543 - DNA, 17 bp, synthetic construct
  source 1..17: mol_type = other DNA
tgaggatccaggtcgtc

SEQ ID NO: 170544 - DNA, 17 bp, synthetic construct
  source 1..17: mol_type = other DNA
gtgaggatccaggtcgt

SEQ ID NO: 170545 - DNA, 17 bp, synthetic construct
  source 1..17: mol_type = other DNA
tgtgaggatccaggtcg

SEQ ID NO: 170546 - DNA, 17 bp, synthetic construct
  source 1..17: mol_type = other DNA
ctgtgaggatccaggtc

SEQ ID NO: 170547 - DNA, 17 bp, synthetic construct
  source 1..17: mol_type = other DNA
tctgtgaggatccaggt

SEQ ID NO: 170548 - DNA, 17 bp, synthetic construct
  source 1..17: mol_type = other DNA
ctctgtgaggatccagg

SEQ ID NO: 170549 - DNA, 17 bp, synthetic construct
  source 1..17: mol_type = other DNA
gctctgtgaggatccag

SEQ ID NO: 170550 - DNA, 17 bp, synthetic construct
  source 1..17: mol_type = other DNA
agctctgtgaggatcca

SEQ ID NO: 170551 - DNA, 17 bp, synthetic construct
  source 1..17: mol_type = other DNA
cagctctgtgaggatcc

SEQ ID NO: 170552 - DNA, 17 bp, synthetic construct
  source 1..17: mol_type = other DNA
tcagctctgtgaggatc

SEQ ID NO: 170553 - DNA, 17 bp, synthetic construct
  source 1..17: mol_type = other DNA
gtcagctctgtgaggat

SEQ ID NO: 170554 - DNA, 17 bp, synthetic construct
  source 1..17: mol_type = other DNA
ggtcagctctgtgagga

SEQ ID NO: 170555 - DNA, 17 bp, synthetic construct
  source 1..17: mol_type = other DNA
tggtcagctctgtgagg

SEQ ID NO: 170556 - DNA, 17 bp, synthetic construct
  source 1..17: mol_type = other DNA
gtggtcagctctgtgag

SEQ ID NO: 170557 - DNA, 17 bp, synthetic construct
  source 1..17: mol_type = other DNA
tgtggtcagctctgtga

SEQ ID NO: 170558 - DNA, 17 bp, synthetic construct
  source 1..17: mol_type = other DNA
ctgtggtcagctctgtg

SEQ ID NO: 170559 - DNA, 17 bp, synthetic construct
  source 1..17: mol_type = other DNA
gctgtggtcagctctgt

SEQ ID NO: 170560 - DNA, 17 bp, synthetic construct
  source 1..17: mol_type = other DNA
tgctgtggtcagctctg

SEQ ID NO: 170561 - DNA, 17 bp, synthetic construct
  source 1..17: mol_type = other DNA
ctgctgtggtcagctct

SEQ ID NO: 170562 - DNA, 17 bp, synthetic construct
  source 1..17: mol_type = other DNA
gctgctgtggtcagctc

SEQ ID NO: 170563 - DNA, 17 bp, synthetic construct
  source 1..17: mol_type = other DNA
ggctgctgtggtcagct

SEQ ID NO: 170564 - DNA, 17 bp, synthetic construct
  source 1..17: mol_type = other DNA
tggctgctgtggtcagc

SEQ ID NO: 170565 - DNA, 17 bp, synthetic construct
  source 1..17: mol_type = other DNA
gtggctgctgtggtcag

SEQ ID NO: 170566 - DNA, 17 bp, synthetic construct
  source 1..17: mol_type = other DNA
agtggctgctgtggtca

SEQ ID NO: 170567 - DNA, 17 bp, synthetic construct
  source 1..17: mol_type = other DNA
tagtggctgctgtggtc

SEQ ID NO: 170568 - DNA, 17 bp, synthetic construct
  source 1..17: mol_type = other DNA
gtagtggctgctgtggt

SEQ ID NO: 170569 - DNA, 17 bp, synthetic construct
  source 1..17: mol_type = other DNA
tgtagtggctgctgtgg

SEQ ID NO: 170570 - DNA, 17 bp, synthetic construct
  source 1..17: mol_type = other DNA
ttgtagtggctgctgtg

SEQ ID NO: 170571 - DNA, 17 bp, synthetic construct
  source 1..17: mol_type = other DNA
gttgtagtggctgctgt

SEQ ID NO: 170572 - DNA, 17 bp, synthetic construct
  source 1..17: mol_type = other DNA
agttgtagtggctgctg

SEQ ID NO: 170573 - DNA, 17 bp, synthetic construct
  source 1..17: mol_type = other DNA
cagttgtagtggctgct

SEQ ID NO: 170574 - DNA, 17 bp, synthetic construct
  source 1..17: mol_type = other DNA
gcagttgtagtggctgc

SEQ ID NO: 170575 - DNA, 17 bp, synthetic construct
  source 1..17: mol_type = other DNA
tgcagttgtagtggctg

SEQ ID NO: 170576 - DNA, 17 bp, synthetic construct
  source 1..17: mol_type = other DNA
ctgcagttgtagtggct

SEQ ID NO: 170577 - DNA, 17 bp, synthetic construct
  source 1..17: mol_type = other DNA
gctgcagttgtagtggc

SEQ ID NO: 170578 - DNA, 17 bp, synthetic construct
  source 1..17: mol_type = other DNA
ggctgcagttgtagtgg

SEQ ID NO: 170579 - DNA, 17 bp, synthetic construct
  source 1..17: mol_type = other DNA
tggctgcagttgtagtg

SEQ ID NO: 170580 - DNA, 17 bp, synthetic construct
  source 1..17: mol_type = other DNA
gtggctgcagttgtagt

SEQ ID NO: 170581 - DNA, 17 bp, synthetic construct
  source 1..17: mol_type = other DNA
agtggctgcagttgtag

SEQ ID NO: 170582 - DNA, 17 bp, synthetic construct
  source 1..17: mol_type = other DNA
cagtggctgcagttgta

SEQ ID NO: 170583 - DNA, 17 bp, synthetic construct
  source 1..17: mol_type = other DNA
ccagtggctgcagttgt

SEQ ID NO: 170584 - DNA, 17 bp, synthetic construct
  source 1..17: mol_type = other DNA
gccagtggctgcagttg

SEQ ID NO: 170585 - DNA, 17 bp, synthetic construct
  source 1..17: mol_type = other DNA
ggccagtggctgcagtt

SEQ ID NO: 170586 - DNA, 17 bp, synthetic construct
  source 1..17: mol_type = other DNA
gggccagtggctgcagt

SEQ ID NO: 170587 - DNA, 17 bp, synthetic construct
  source 1..17: mol_type = other DNA
ggggccagtggctgcag

SEQ ID NO: 170588 - DNA, 17 bp, synthetic construct
  source 1..17: mol_type = other DNA
tggggccagtggctgca

SEQ ID NO: 170589 - DNA, 17 bp, synthetic construct
  source 1..17: mol_type = other DNA
gtggggccagtggctgc

SEQ ID NO: 170590 - DNA, 17 bp, synthetic construct
  source 1..17: mol_type = other DNA
cgtggggccagtggctg

SEQ ID NO: 170591 - DNA, 17 bp, synthetic construct
  source 1..17: mol_type = other DNA
ccgtggggccagtggct

SEQ ID NO: 170592 - DNA, 17 bp, synthetic construct
  source 1..17: mol_type = other DNA
gccgtggggccagtggc

SEQ ID NO: 170593 - DNA, 17 bp, synthetic construct
  source 1..17: mol_type = other DNA
ggccgtggggccagtgg

SEQ ID NO: 170594 - DNA, 17 bp, synthetic construct
  source 1..17: mol_type = other DNA
tggccgtggggccagtg

SEQ ID NO: 170595 - DNA, 17 bp, synthetic construct
  source 1..17: mol_type = other DNA
gtggccgtggggccagt

SEQ ID NO: 170596 - DNA, 17 bp, synthetic construct
  source 1..17: mol_type = other DNA
ggtggccgtggggccag

SEQ ID NO: 170597 - DNA, 17 bp, synthetic construct
  source 1..17: mol_type = other DNA
gggtggccgtggggcca

SEQ ID NO: 170598 - DNA, 17 bp, synthetic construct
  source 1..17: mol_type = other DNA
ggggtggccgtggggcc

SEQ ID NO: 170599 - DNA, 17 bp, synthetic construct
  source 1..17: mol_type = other DNA
cggggtggccgtggggc

SEQ ID NO: 170600 - DNA, 17 bp, synthetic construct
  source 1..17: mol_type = other DNA
acggggtggccgtgggg

SEQ ID NO: 170601 - DNA, 17 bp, synthetic construct
  source 1..17: mol_type = other DNA
gacggggtggccgtggg

SEQ ID NO: 170602 - DNA, 17 bp, synthetic construct
  source 1..17: mol_type = other DNA
ggacggggtggccgtgg

SEQ ID NO: 170603 - DNA, 17 bp, synthetic construct
  source 1..17: mol_type = other DNA
aggacggggtggccgtg

SEQ ID NO: 170604 - DNA, 17 bp, synthetic construct
  source 1..17: mol_type = other DNA
gaggacggggtggccgt

SEQ ID NO: 170605 - DNA, 17 bp, synthetic construct
  source 1..17: mol_type = other DNA
ggaggacggggtggccg

SEQ ID NO: 170606 - DNA, 17 bp, synthetic construct
  source 1..17: mol_type = other DNA
tggaggacggggtggcc

SEQ ID NO: 170607 - DNA, 17 bp, synthetic construct
  source 1..17: mol_type = other DNA
gtggaggacggggtggc

SEQ ID NO: 170608 - DNA, 17 bp, synthetic construct
  source 1..17: mol_type = other DNA
ggtggaggacggggtgg

SEQ ID NO: 170609 - DNA, 17 bp, synthetic construct
  source 1..17: mol_type = other DNA
gggtggaggacggggtg

SEQ ID NO: 170610 - DNA, 17 bp, synthetic construct
  source 1..17: mol_type = other DNA
ggggtggaggacggggt

SEQ ID NO: 170611 - DNA, 17 bp, synthetic construct
  source 1..17: mol_type = other DNA
tggggtggaggacgggg

SEQ ID NO: 170612 - DNA, 17 bp, synthetic construct
  source 1..17: mol_type = other DNA
ctggggtggaggacggg

SEQ ID NO: 170613 - DNA, 17 bp, synthetic construct
  source 1..17: mol_type = other DNA
cctggggtggaggacgg

SEQ ID NO: 170614 - DNA, 17 bp, synthetic construct
  source 1..17: mol_type = other DNA
ccctggggtggaggacg

SEQ ID NO: 170615 - DNA, 17 bp, synthetic construct
  source 1..17: mol_type = other DNA
tccctggggtggaggac

SEQ ID NO: 170616 - DNA, 17 bp, synthetic construct
  source 1..17: mol_type = other DNA
gtccctggggtggagga

SEQ ID NO: 170617 - DNA, 17 bp, synthetic construct
  source 1..17: mol_type = other DNA
ggtccctggggtggagg

SEQ ID NO: 170618 - DNA, 17 bp, synthetic construct
  source 1..17: mol_type = other DNA
tggtccctggggtggag

SEQ ID NO: 170619 - DNA, 17 bp, synthetic construct
  source 1..17: mol_type = other DNA
gtggtccctggggtgga

SEQ ID NO: 170620 - DNA, 17 bp, synthetic construct
  source 1..17: mol_type = other DNA
ggtggtccctggggtgg

SEQ ID NO: 170621 - DNA, 17 bp, synthetic construct
  source 1..17: mol_type = other DNA
aggtggtccctggggtg

SEQ ID NO: 170622 - DNA, 17 bp, synthetic construct
  source 1..17: mol_type = other DNA
caggtggtccctggggt

SEQ ID NO: 170623 - DNA, 17 bp, synthetic construct
  source 1..17: mol_type = other DNA
ccaggtggtccctgggg

SEQ ID NO: 170624 - DNA, 17 bp, synthetic construct
  source 1..17: mol_type = other DNA
tccaggtggtccctggg

SEQ ID NO: 170625 - DNA, 17 bp, synthetic construct
  source 1..17: mol_type = other DNA
atccaggtggtccctgg

SEQ ID NO: 170626 - DNA, 17 bp, synthetic construct
  source 1..17: mol_type = other DNA
gatccaggtggtccctg

SEQ ID NO: 170627 - DNA, 17 bp, synthetic construct
  source 1..17: mol_type = other DNA
ggatccaggtggtccct

SEQ ID NO: 170628 - DNA, 17 bp, synthetic construct
  source 1..17: mol_type = other DNA
aggatccaggtggtccc

SEQ ID NO: 170629 - DNA, 17 bp, synthetic construct
  source 1..17: mol_type = other DNA
gaggatccaggtggtcc

SEQ ID NO: 170630 - DNA, 17 bp, synthetic construct
  source 1..17: mol_type = other DNA
tgaggatccaggtggtc

SEQ ID NO: 170631 - DNA, 17 bp, synthetic construct
  source 1..17: mol_type = other DNA
gtgaggatccaggtggt

SEQ ID NO: 170632 - DNA, 17 bp, synthetic construct
  source 1..17: mol_type = other DNA
tgtgaggatccaggtgg

SEQ ID NO: 170633 - DNA, 17 bp, synthetic construct
  source 1..17: mol_type = other DNA
ctgtgaggatccaggtg

SEQ ID NO: 170634 - DNA, 17 bp, synthetic construct
  source 1..17: mol_type = other DNA
tctgtgaggatccaggt

SEQ ID NO: 170635 - DNA, 17 bp, synthetic construct
  source 1..17: mol_type = other DNA
ctctgtgaggatccagg

SEQ ID NO: 170636 - DNA, 17 bp, synthetic construct
  source 1..17: mol_type = other DNA
gctctgtgaggatccag

SEQ ID NO: 170637 - DNA, 17 bp, synthetic construct
  source 1..17: mol_type = other DNA
ggctctgtgaggatcca

SEQ ID NO: 170638 - DNA, 17 bp, synthetic construct
  source 1..17: mol_type = other DNA
gggctctgtgaggatcc

SEQ ID NO: 170639 - DNA, 17 bp, synthetic construct
  source 1..17: mol_type = other DNA
tgggctctgtgaggatc

SEQ ID NO: 170640 - DNA, 17 bp, synthetic construct
  source 1..17: mol_type = other DNA
ctgggctctgtgaggat

SEQ ID NO: 170641 - DNA, 17 bp, synthetic construct
  source 1..17: mol_type = other DNA
gctgggctctgtgagga

SEQ ID NO: 170642 - DNA, 17 bp, synthetic construct
  source 1..17: mol_type = other DNA
tgctgggctctgtgagg

SEQ ID NO: 170643 - DNA, 17 bp, synthetic construct
  source 1..17: mol_type = other DNA
gtgctgggctctgtgag

SEQ ID NO: 170644 - DNA, 17 bp, synthetic construct
  source 1..17: mol_type = other DNA
agtgctgggctctgtga

SEQ ID NO: 170645 - DNA, 17 bp, synthetic construct
  source 1..17: mol_type = other DNA
tagtgctgggctctgtg

SEQ ID NO: 170646 - DNA, 17 bp, synthetic construct
  source 1..17: mol_type = other DNA
gtagtgctgggctctgt

SEQ ID NO: 170647 - DNA, 17 bp, synthetic construct
  source 1..17: mol_type = other DNA
tgtagtgctgggctctg

SEQ ID NO: 170648 - DNA, 17 bp, synthetic construct
  source 1..17: mol_type = other DNA
ctgtagtgctgggctct

SEQ ID NO: 170649 - DNA, 17 bp, synthetic construct
  source 1..17: mol_type = other DNA
gctgtagtgctgggctc

SEQ ID NO: 170650 - DNA, 17 bp, synthetic construct
  source 1..17: mol_type = other DNA
ggctgtagtgctgggct

SEQ ID NO: 170651 - DNA, 17 bp, synthetic construct
  source 1..17: mol_type = other DNA
tggctgtagtgctgggc

SEQ ID NO: 170652 - DNA, 17 bp, synthetic construct
  source 1..17: mol_type = other DNA
gtggctgtagtgctggg

SEQ ID NO: 170653 - DNA, 17 bp, synthetic construct
  source 1..17: mol_type = other DNA
ggtggctgtagtgctgg

SEQ ID NO: 170654 - DNA, 17 bp, synthetic construct
  source 1..17: mol_type = other DNA
cggtggctgtagtgctg

SEQ ID NO: 170655 - DNA, 17 bp, synthetic construct
  source 1..17: mol_type = other DNA
acggtggctgtagtgct

SEQ ID NO: 170656 - DNA, 17 bp, synthetic construct
  source 1..17: mol_type = other DNA
cacggtggctgtagtgc

SEQ ID NO: 170657 - DNA, 17 bp, synthetic construct
  source 1..17: mol_type = other DNA
tcacggtggctgtagtg

SEQ ID NO: 170658 - DNA, 17 bp, synthetic construct
  source 1..17: mol_type = other DNA
gtcacggtggctgtagt

SEQ ID NO: 170659 - DNA, 17 bp, synthetic construct
  source 1..17: mol_type = other DNA
cgtcacggtggctgtag

SEQ ID NO: 170660 - DNA, 17 bp, synthetic construct
  source 1..17: mol_type = other DNA
ccgtcacggtggctgta

SEQ ID NO: 170661 - DNA, 17 bp, synthetic construct
  source 1..17: mol_type = other DNA
accgtcacggtggctgt

SEQ ID NO: 170662 - DNA, 17 bp, synthetic construct
  source 1..17: mol_type = other DNA
caccgtcacggtggctg

SEQ ID NO: 170663 - DNA, 17 bp, synthetic construct
  source 1..17: mol_type = other DNA
gcaccgtcacggtggct

SEQ ID NO: 170664 - DNA, 17 bp, synthetic construct
  source 1..17: mol_type = other DNA
ggcaccgtcacggtggc

SEQ ID NO: 170665 - DNA, 17 bp, synthetic construct
  source 1..17: mol_type = other DNA
gggcaccgtcacggtgg

SEQ ID NO: 170666 - DNA, 17 bp, synthetic construct
  source 1..17: mol_type = other DNA
tgggcaccgtcacggtg

SEQ ID NO: 170667 - DNA, 17 bp, synthetic construct
  source 1..17: mol_type = other DNA
gtgggcaccgtcacggt

SEQ ID NO: 170668 - DNA, 17 bp, synthetic construct
  source 1..17: mol_type = other DNA
ggtgggcaccgtcacgg

SEQ ID NO: 170669 - DNA, 17 bp, synthetic construct
  source 1..17: mol_type = other DNA
cggtgggcaccgtcacg

SEQ ID NO: 170670 - DNA, 17 bp, synthetic construct
  source 1..17: mol_type = other DNA
ccggtgggcaccgtcac

SEQ ID NO: 170671 - DNA, 17 bp, synthetic construct
  source 1..17: mol_type = other DNA
tccggtgggcaccgtca

SEQ ID NO: 170672 - DNA, 17 bp, synthetic construct
  source 1..17: mol_type = other DNA
atccggtgggcaccgtc

SEQ ID NO: 170673 - DNA, 17 bp, synthetic construct
  source 1..17: mol_type = other DNA
gatccggtgggcaccgt

SEQ ID NO: 170674 - DNA, 17 bp, synthetic construct
  source 1..17: mol_type = other DNA
ggatccggtgggcaccg

SEQ ID NO: 170675 - DNA, 17 bp, synthetic construct
  source 1..17: mol_type = other DNA
tggatccggtgggcacc

SEQ ID NO: 170676 - DNA, 17 bp, synthetic construct
  source 1..17: mol_type = other DNA
gtggatccggtgggcac

SEQ ID NO: 170677 - DNA, 17 bp, synthetic construct
  source 1..17: mol_type = other DNA
cgtggatccggtgggca

SEQ ID NO: 170678 - DNA, 17 bp, synthetic construct
  source 1..17: mol_type = other DNA
ccgtggatccggtgggc

SEQ ID NO: 170679 - DNA, 17 bp, synthetic construct
  source 1..17: mol_type = other DNA
gccgtggatccggtggg

SEQ ID NO: 170680 - DNA, 17 bp, synthetic construct
  source 1..17: mol_type = other DNA
ggccgtggatccggtgg

SEQ ID NO: 170681 - DNA, 17 bp, synthetic construct
  source 1..17: mol_type = other DNA
tggccgtggatccggtg

SEQ ID NO: 170682 - DNA, 17 bp, synthetic construct
  source 1..17: mol_type = other DNA
gtggccgtggatccggt

SEQ ID NO: 170683 - DNA, 17 bp, synthetic construct
  source 1..17: mol_type = other DNA
ggtggccgtggatccgg

SEQ ID NO: 170684 - DNA, 17 bp, synthetic construct
  source 1..17: mol_type = other DNA
cggtggccgtggatccg

SEQ ID NO: 170685 - DNA, 17 bp, synthetic construct
  source 1..17: mol_type = other DNA
gcggtggccgtggatcc

SEQ ID NO: 170686 - DNA, 17 bp, synthetic construct
  source 1..17: mol_type = other DNA
ggcggtggccgtggatc

SEQ ID NO: 170687 - DNA, 17 bp, synthetic construct
  source 1..17: mol_type = other DNA
aggcggtggccgtggat

SEQ ID NO: 170688 - DNA, 17 bp, synthetic construct
  source 1..17: mol_type = other DNA
gaggcggtggccgtgga

SEQ ID NO: 170689 - DNA, 17 bp, synthetic construct
  source 1..17: mol_type = other DNA
ggaggcggtggccgtgg

SEQ ID NO: 170690 - DNA, 17 bp, synthetic construct
  source 1..17: mol_type = other DNA
aggaggcggtggccgtg

SEQ ID NO: 170691 - DNA, 17 bp, synthetic construct
  source 1..17: mol_type = other DNA
gaggaggcggtggccgt

SEQ ID NO: 170692 - DNA, 17 bp, synthetic construct
  source 1..17: mol_type = other DNA
ggaggaggcggtggccg

SEQ ID NO: 170693 - DNA, 17 bp, synthetic construct
  source 1..17: mol_type = other DNA
tggaggaggcggtggcc

SEQ ID NO: 170694 - DNA, 17 bp, synthetic construct
  source 1..17: mol_type = other DNA
gtggaggaggcggtggc

SEQ ID NO: 170695 - DNA, 17 bp, synthetic construct
  source 1..17: mol_type = other DNA
ggtggaggaggcggtgg

SEQ ID NO: 170696 - DNA, 17 bp, synthetic construct
  source 1..17: mol_type = other DNA
gggtggaggaggcggtg

SEQ ID NO: 170697 - DNA, 17 bp, synthetic construct
  source 1..17: mol_type = other DNA
cgggtggaggaggcggt

SEQ ID NO: 170698 - DNA, 17 bp, synthetic construct
  source 1..17: mol_type = other DNA
ccgggtggaggaggcgg

SEQ ID NO: 170699 - DNA, 17 bp, synthetic construct
  source 1..17: mol_type = other DNA
cccgggtggaggaggcg

SEQ ID NO: 170700 - DNA, 17 bp, synthetic construct
  source 1..17: mol_type = other DNA
gcccgggtggaggaggc

SEQ ID NO: 170701 - DNA, 17 bp, synthetic construct
  source 1..17: mol_type = other DNA
tgcccgggtggaggagg

SEQ ID NO: 170702 - DNA, 17 bp, synthetic construct
  source 1..17: mol_type = other DNA
ttgcccgggtggaggag

SEQ ID NO: 170703 - DNA, 17 bp, synthetic construct
  source 1..17: mol_type = other DNA
gttgcccgggtggagga

SEQ ID NO: 170704 - DNA, 17 bp, synthetic construct
  source 1..17: mol_type = other DNA
agttgcccgggtggagg

SEQ ID NO: 170705 - DNA, 17 bp, synthetic construct
  source 1..17: mol_type = other DNA
cagttgcccgggtggag

SEQ ID NO: 170706 - DNA, 17 bp, synthetic construct
  source 1..17: mol_type = other DNA
gcagttgcccgggtgga

SEQ ID NO: 170707 - DNA, 17 bp, synthetic construct
  source 1..17: mol_type = other DNA
agcagttgcccgggtgg

SEQ ID NO: 170708 - DNA, 17 bp, synthetic construct
  source 1..17: mol_type = other DNA
cagcagttgcccgggtg

SEQ ID NO: 170709 - DNA, 17 bp, synthetic construct
  source 1..17: mol_type = other DNA
ccagcagttgcccgggt

SEQ ID NO: 170710 - DNA, 17 bp, synthetic construct
  source 1..17: mol_type = other DNA
gccagcagttgcccggg

SEQ ID NO: 170711 - DNA, 17 bp, synthetic construct
  source 1..17: mol_type = other DNA
tgccagcagttgcccgg

SEQ ID NO: 170712 - DNA, 17 bp, synthetic construct
  source 1..17: mol_type = other DNA
gtgccagcagttgcccg

SEQ ID NO: 170713 - DNA, 17 bp, synthetic construct
  source 1..17: mol_type = other DNA
ggtgccagcagttgccc

SEQ ID NO: 170714 - DNA, 17 bp, synthetic construct
  source 1..17: mol_type = other DNA
gggtgccagcagttgcc

SEQ ID NO: 170715 - DNA, 17 bp, synthetic construct
  source 1..17: mol_type = other DNA
agggtgccagcagttgc

SEQ ID NO: 170716 - DNA, 17 bp, synthetic construct
  source 1..17: mol_type = other DNA
gagggtgccagcagttg

SEQ ID NO: 170717 - DNA, 17 bp, synthetic construct
  source 1..17: mol_type = other DNA
tgagggtgccagcagtt

SEQ ID NO: 170718 - DNA, 17 bp, synthetic construct
  source 1..17: mol_type = other DNA
ttgagggtgccagcagt

SEQ ID NO: 170719 - DNA, 17 bp, synthetic construct
  source 1..17: mol_type = other DNA
tttgagggtgccagcag

SEQ ID NO: 170720 - DNA, 17 bp, synthetic construct
  source 1..17: mol_type = other DNA
ctttgagggtgccagca

SEQ ID NO: 170721 - DNA, 17 bp, synthetic construct
  source 1..17: mol_type = other DNA
actttgagggtgccagc

SEQ ID NO: 170722 - DNA, 17 bp, synthetic construct
  source 1..17: mol_type = other DNA
cactttgagggtgccag

SEQ ID NO: 170723 - DNA, 17 bp, synthetic construct
  source 1..17: mol_type = other DNA
gcactttgagggtgcca

SEQ ID NO: 170724 - DNA, 17 bp, synthetic construct
  source 1..17: mol_type = other DNA
agcactttgagggtgcc

SEQ ID NO: 170725 - DNA, 17 bp, synthetic construct
  source 1..17: mol_type = other DNA
cagcactttgagggtgc

SEQ ID NO: 170726 - DNA, 17 bp, synthetic construct
  source 1..17: mol_type = other DNA
tcagcactttgagggtg

SEQ ID NO: 170727 - DNA, 17 bp, synthetic construct
  source 1..17: mol_type = other DNA
gtcagcactttgagggt

SEQ ID NO: 170728 - DNA, 17 bp, synthetic construct
  source 1..17: mol_type = other DNA
ggtcagcactttgaggg

SEQ ID NO: 170729 - DNA, 17 bp, synthetic construct
  source 1..17: mol_type = other DNA
tggtcagcactttgagg

SEQ ID NO: 170730 - DNA, 17 bp, synthetic construct
  source 1..17: mol_type = other DNA
ctggtcagcactttgag

SEQ ID NO: 170731 - DNA, 17 bp, synthetic construct
  source 1..17: mol_type = other DNA
gctggtcagcactttga

SEQ ID NO: 170732 - DNA, 17 bp, synthetic construct
  source 1..17: mol_type = other DNA
tgctggtcagcactttg

SEQ ID NO: 170733 - DNA, 17 bp, synthetic construct
  source 1..17: mol_type = other DNA
gtgctggtcagcacttt

SEQ ID NO: 170734 - DNA, 17 bp, synthetic construct
  source 1..17: mol_type = other DNA
cgtgctggtcagcactt

SEQ ID NO: 170735 - DNA, 17 bp, synthetic construct
  source 1..17: mol_type = other DNA
ccgtgctggtcagcact

SEQ ID NO: 170736 - DNA, 17 bp, synthetic construct
  source 1..17: mol_type = other DNA
gccgtgctggtcagcac

SEQ ID NO: 170737 - DNA, 17 bp, synthetic construct
  source 1..17: mol_type = other DNA
ggccgtgctggtcagca

SEQ ID NO: 170738 - DNA, 17 bp, synthetic construct
  source 1..17: mol_type = other DNA
tggccgtgctggtcagc

SEQ ID NO: 170739 - DNA, 17 bp, synthetic construct
  source 1..17: mol_type = other DNA
gtggccgtgctggtcag

SEQ ID NO: 170740 - DNA, 17 bp, synthetic construct
  source 1..17: mol_type = other DNA
ggtggccgtgctggtca

SEQ ID NO: 170741 - DNA, 17 bp, synthetic construct
  source 1..17: mol_type = other DNA
tggtggccgtgctggtc

SEQ ID NO: 170742 - DNA, 17 bp, synthetic construct
  source 1..17: mol_type = other DNA
gtggtggccgtgctggt

SEQ ID NO: 170743 - DNA, 17 bp, synthetic construct
  source 1..17: mol_type = other DNA
tgtggtggccgtgctgg

SEQ ID NO: 170744 - DNA, 17 bp, synthetic construct
  source 1..17: mol_type = other DNA
gtgtggtggccgtgctg

SEQ ID NO: 170745 - DNA, 17 bp, synthetic construct
  source 1..17: mol_type = other DNA
ggtgtggtggccgtgct

SEQ ID NO: 170746 - DNA, 17 bp, synthetic construct
  source 1..17: mol_type = other DNA
gggtgtggtggccgtgc

SEQ ID NO: 170747 - DNA, 17 bp, synthetic construct
  source 1..17: mol_type = other DNA
tgggtgtggtggccgtg

SEQ ID NO: 170748 - DNA, 17 bp, synthetic construct
  source 1..17: mol_type = other DNA
gtgggtgtggtggccgt

SEQ ID NO: 170749 - DNA, 17 bp, synthetic construct
  source 1..17: mol_type = other DNA
tgtgggtgtggtggccg

SEQ ID NO: 170750 - DNA, 17 bp, synthetic construct
  source 1..17: mol_type = other DNA
ctgtgggtgtggtggcc

SEQ ID NO: 170751 - DNA, 17 bp, synthetic construct
  source 1..17: mol_type = other DNA
actgtgggtgtggtggc

SEQ ID NO: 170752 - DNA, 17 bp, synthetic construct
  source 1..17: mol_type = other DNA
gactgtgggtgtggtgg

SEQ ID NO: 170753 - DNA, 17 bp, synthetic construct
  source 1..17: mol_type = other DNA
tgactgtgggtgtggtg

SEQ ID NO: 170754 - DNA, 17 bp, synthetic construct
  source 1..17: mol_type = other DNA
atgactgtgggtgtggt

SEQ ID NO: 170755 - DNA, 17 bp, synthetic construct
  source 1..17: mol_type = other DNA
gatgactgtgggtgtgg

SEQ ID NO: 170756 - DNA, 17 bp, synthetic construct
  source 1..17: mol_type = other DNA
tgatgactgtgggtgtg

SEQ ID NO: 170757 - DNA, 17 bp, synthetic construct
  source 1..17: mol_type = other DNA
ctgatgactgtgggtgt

SEQ ID NO: 170758 - DNA, 17 bp, synthetic construct
  source 1..17: mol_type = other DNA
gctgatgactgtgggtg

SEQ ID NO: 170759 - DNA, 17 bp, synthetic construct
  source 1..17: mol_type = other DNA
agctgatgactgtgggt

SEQ ID NO: 170760 - DNA, 17 bp, synthetic construct
  source 1..17: mol_type = other DNA
gagctgatgactgtggg

SEQ ID NO: 170761 - DNA, 17 bp, synthetic construct
  source 1..17: mol_type = other DNA
ggagctgatgactgtgg

SEQ ID NO: 170762 - DNA, 17 bp, synthetic construct
  source 1..17: mol_type = other DNA
tggagctgatgactgtg

SEQ ID NO: 170763 - DNA, 17 bp, synthetic construct
  source 1..17: mol_type = other DNA
ctggagctgatgactgt

SEQ ID NO: 170764 - DNA, 17 bp, synthetic construct
  source 1..17: mol_type = other DNA
tctggagctgatgactg

SEQ ID NO: 170765 - DNA, 17 bp, synthetic construct
  source 1..17: mol_type = other DNA
ctctggagctgatgact

SEQ ID NO: 170766 - DNA, 17 bp, synthetic construct
  source 1..17: mol_type = other DNA
gctctggagctgatgac

SEQ ID NO: 170767 - DNA, 17 bp, synthetic construct
  source 1..17: mol_type = other DNA
ggctctggagctgatga

SEQ ID NO: 170768 - DNA, 17 bp, synthetic construct
  source 1..17: mol_type = other DNA
tggctctggagctgatg

SEQ ID NO: 170769 - DNA, 17 bp, synthetic construct
  source 1..17: mol_type = other DNA
gtggctctggagctgat

SEQ ID NO: 170770 - DNA, 17 bp, synthetic construct
  source 1..17: mol_type = other DNA
agtggctctggagctga

SEQ ID NO: 170771 - DNA, 17 bp, synthetic construct
  source 1..17: mol_type = other DNA
gagtggctctggagctg

SEQ ID NO: 170772 - DNA, 17 bp, synthetic construct
  source 1..17: mol_type = other DNA
ggagtggctctggagct

SEQ ID NO: 170773 - DNA, 17 bp, synthetic construct
  source 1..17: mol_type = other DNA
gggagtggctctggagc

SEQ ID NO: 170774 - DNA, 17 bp, synthetic construct
  source 1..17: mol_type = other DNA
agggagtggctctggag

SEQ ID NO: 170775 - DNA, 17 bp, synthetic construct
  source 1..17: mol_type = other DNA
gagggagtggctctgga

SEQ ID NO: 170776 - DNA, 17 bp, synthetic construct
  source 1..17: mol_type = other DNA
ggagggagtggctctgg

SEQ ID NO: 170777 - DNA, 17 bp, synthetic construct
  source 1..17: mol_type = other DNA
aggagggagtggctctg

SEQ ID NO: 170778 - DNA, 17 bp, synthetic construct
  source 1..17: mol_type = other DNA
gaggagggagtggctct

SEQ ID NO: 170779 - DNA, 17 bp, synthetic construct
  source 1..17: mol_type = other DNA
ggaggagggagtggctc

SEQ ID NO: 170780 - DNA, 17 bp, synthetic construct
  source 1..17: mol_type = other DNA
tggaggagggagtggct

SEQ ID NO: 170781 - DNA, 17 bp, synthetic construct
  source 1..17: mol_type = other DNA
ctggaggagggagtggc

SEQ ID NO: 170782 - DNA, 17 bp, synthetic construct
  source 1..17: mol_type = other DNA
actggaggagggagtgg

SEQ ID NO: 170783 - DNA, 17 bp, synthetic construct
  source 1..17: mol_type = other DNA
gactggaggagggagtg

SEQ ID NO: 170784 - DNA, 17 bp, synthetic construct
  source 1..17: mol_type = other DNA
ggactggaggagggagt

SEQ ID NO: 170785 - DNA, 17 bp, synthetic construct
  source 1..17: mol_type = other DNA
tggactggaggagggag

SEQ ID NO: 170786 - DNA, 17 bp, synthetic construct
  source 1..17: mol_type = other DNA
ctggactggaggaggga

SEQ ID NO: 170787 - DNA, 17 bp, synthetic construct
  source 1..17: mol_type = other DNA
cctggactggaggaggg

SEQ ID NO: 170788 - DNA, 17 bp, synthetic construct
  source 1..17: mol_type = other DNA
ccctggactggaggagg

SEQ ID NO: 170789 - DNA, 17 bp, synthetic construct
  source 1..17: mol_type = other DNA
tccctggactggaggag

SEQ ID NO: 170790 - DNA, 17 bp, synthetic construct
  source 1..17: mol_type = other DNA
gtccctggactggagga

SEQ ID NO: 170791 - DNA, 17 bp, synthetic construct
  source 1..17: mol_type = other DNA
agtccctggactggagg

SEQ ID NO: 170792 - DNA, 17 bp, synthetic construct
  source 1..17: mol_type = other DNA
cagtccctggactggag

SEQ ID NO: 170793 - DNA, 17 bp, synthetic construct
  source 1..17: mol_type = other DNA
gcagtccctggactgga

SEQ ID NO: 170794 - DNA, 17 bp, synthetic construct
  source 1..17: mol_type = other DNA
tgcagtccctggactgg

SEQ ID NO: 170795 - DNA, 17 bp, synthetic construct
  source 1..17: mol_type = other DNA
ttgcagtccctggactg

SEQ ID NO: 170796 - DNA, 17 bp, synthetic construct
  source 1..17: mol_type = other DNA
gttgcagtccctggact

SEQ ID NO: 170797 - DNA, 17 bp, synthetic construct
  source 1..17: mol_type = other DNA
ggttgcagtccctggac

SEQ ID NO: 170798 - DNA, 17 bp, synthetic construct
  source 1..17: mol_type = other DNA
cggttgcagtccctgga

SEQ ID NO: 170799 - DNA, 17 bp, synthetic construct
  source 1..17: mol_type = other DNA
gcggttgcagtccctgg

SEQ ID NO: 170800 - DNA, 17 bp, synthetic construct
  source 1..17: mol_type = other DNA
ggcggttgcagtccctg

SEQ ID NO: 170801 - DNA, 17 bp, synthetic construct
  source 1..17: mol_type = other DNA
gggcggttgcagtccct

SEQ ID NO: 170802 - DNA, 17 bp, synthetic construct
  source 1..17: mol_type = other DNA
agggcggttgcagtccc

SEQ ID NO: 170803 - DNA, 17 bp, synthetic construct
  source 1..17: mol_type = other DNA
aagggcggttgcagtcc

SEQ ID NO: 170804 - DNA, 17 bp, synthetic construct
  source 1..17: mol_type = other DNA
gaagggcggttgcagtc

SEQ ID NO: 170805 - DNA, 17 bp, synthetic construct
  source 1..17: mol_type = other DNA
ggaagggcggttgcagt

SEQ ID NO: 170806 - DNA, 17 bp, synthetic construct
  source 1..17: mol_type = other DNA
tggaagggcggttgcag

SEQ ID NO: 170807 - DNA, 17 bp, synthetic construct
  source 1..17: mol_type = other DNA
ctggaagggcggttgca

SEQ ID NO: 170808 - DNA, 17 bp, synthetic construct
  source 1..17: mol_type = other DNA
gctggaagggcggttgc

SEQ ID NO: 170809 - DNA, 17 bp, synthetic construct
  source 1..17: mol_type = other DNA
tgctggaagggcggttg

SEQ ID NO: 170810 - DNA, 17 bp, synthetic construct
  source 1..17: mol_type = other DNA
gtgctggaagggcggtt

SEQ ID NO: 170811 - DNA, 17 bp, synthetic construct
  source 1..17: mol_type = other DNA
agtgctggaagggcggt

SEQ ID NO: 170812 - DNA, 17 bp, synthetic construct
  source 1..17: mol_type = other DNA
cagtgctggaagggcgg

SEQ ID NO: 170813 - DNA, 17 bp, synthetic construct
  source 1..17: mol_type = other DNA
tcagtgctggaagggcg

SEQ ID NO: 170814 - DNA, 17 bp, synthetic construct
  source 1..17: mol_type = other DNA
ctcagtgctggaagggc

SEQ ID NO: 170815 - DNA, 17 bp, synthetic construct
  source 1..17: mol_type = other DNA
tctcagtgctggaaggg

SEQ ID NO: 170816 - DNA, 17 bp, synthetic construct
  source 1..17: mol_type = other DNA
ttctcagtgctggaagg

SEQ ID NO: 170817 - DNA, 17 bp, synthetic construct
  source 1..17: mol_type = other DNA
cttctcagtgctggaag

SEQ ID NO: 170818 - DNA, 17 bp, synthetic construct
  source 1..17: mol_type = other DNA
gcttctcagtgctggaa

SEQ ID NO: 170819 - DNA, 17 bp, synthetic construct
  source 1..17: mol_type = other DNA
tgcttctcagtgctgga

SEQ ID NO: 170820 - DNA, 17 bp, synthetic construct
  source 1..17: mol_type = other DNA
gtgcttctcagtgctgg

SEQ ID NO: 170821 - DNA, 17 bp, synthetic construct
  source 1..17: mol_type = other DNA
tgtgcttctcagtgctg

SEQ ID NO: 170822 - DNA, 17 bp, synthetic construct
  source 1..17: mol_type = other DNA
ctgtgcttctcagtgct

SEQ ID NO: 170823 - DNA, 17 bp, synthetic construct
  source 1..17: mol_type = other DNA
gctgtgcttctcagtgc

SEQ ID NO: 170824 - DNA, 17 bp, synthetic construct
  source 1..17: mol_type = other DNA
ggctgtgcttctcagtg

SEQ ID NO: 170825 - DNA, 17 bp, synthetic construct
  source 1..17: mol_type = other DNA
tggctgtgcttctcagt

SEQ ID NO: 170826 - DNA, 17 bp, synthetic construct
  source 1..17: mol_type = other DNA
gtggctgtgcttctcag

SEQ ID NO: 170827 - DNA, 17 bp, synthetic construct
  source 1..17: mol_type = other DNA
ggtggctgtgcttctca

SEQ ID NO: 170828 - DNA, 17 bp, synthetic construct
  source 1..17: mol_type = other DNA
tggtggctgtgcttctc

SEQ ID NO: 170829 - DNA, 17 bp, synthetic construct
  source 1..17: mol_type = other DNA
gtggtggctgtgcttct

SEQ ID NO: 170830 - DNA, 17 bp, synthetic construct
  source 1..17: mol_type = other DNA
tgtggtggctgtgcttc

SEQ ID NO: 170831 - DNA, 17 bp, synthetic construct
  source 1..17: mol_type = other DNA
gtgtggtggctgtgctt

SEQ ID NO: 170832 - DNA, 17 bp, synthetic construct
  source 1..17: mol_type = other DNA
ggtgtggtggctgtgct

SEQ ID NO: 170833 - DNA, 17 bp, synthetic construct
  source 1..17: mol_type = other DNA
gggtgtggtggctgtgc

SEQ ID NO: 170834 - DNA, 17 bp, synthetic construct
  source 1..17: mol_type = other DNA
tgggtgtggtggctgtg

SEQ ID NO: 170835 - DNA, 17 bp, synthetic construct
  source 1..17: mol_type = other DNA
gtgggtgtggtggctgt

SEQ ID NO: 170836 - DNA, 17 bp, synthetic construct
  source 1..17: mol_type = other DNA
tgtgggtgtggtggctg

SEQ ID NO: 170837 - DNA, 17 bp, synthetic construct
  source 1..17: mol_type = other DNA
ctgtgggtgtggtggct

SEQ ID NO: 170838 - DNA, 17 bp, synthetic construct
  source 1..17: mol_type = other DNA
gctgtgggtgtggtggc

SEQ ID NO: 170839 - DNA, 17 bp, synthetic construct
  source 1..17: mol_type = other DNA
agctgtgggtgtggtgg

SEQ ID NO: 170840 - DNA, 17 bp, synthetic construct
  source 1..17: mol_type = other DNA
tagctgtgggtgtggtg

SEQ ID NO: 170841 - DNA, 17 bp, synthetic construct
  source 1..17: mol_type = other DNA
gtagctgtgggtgtggt

SEQ ID NO: 170842 - DNA, 17 bp, synthetic construct
  source 1..17: mol_type = other DNA
ggtagctgtgggtgtgg

SEQ ID NO: 170843 - DNA, 17 bp, synthetic construct
  source 1..17: mol_type = other DNA
tggtagctgtgggtgtg

SEQ ID NO: 170844 - DNA, 17 bp, synthetic construct
  source 1..17: mol_type = other DNA
ctggtagctgtgggtgt

SEQ ID NO: 170845 - DNA, 17 bp, synthetic construct
  source 1..17: mol_type = other DNA
gctggtagctgtgggtg

SEQ ID NO: 170846 - DNA, 17 bp, synthetic construct
  source 1..17: mol_type = other DNA
cgctggtagctgtgggt

SEQ ID NO: 170847 - DNA, 17 bp, synthetic construct
  source 1..17: mol_type = other DNA
acgctggtagctgtggg

SEQ ID NO: 170848 - DNA, 17 bp, synthetic construct
  source 1..17: mol_type = other DNA
aacgctggtagctgtgg

SEQ ID NO: 170849 - DNA, 17 bp, synthetic construct
  source 1..17: mol_type = other DNA
taacgctggtagctgtg

SEQ ID NO: 170850 - DNA, 17 bp, synthetic construct
  source 1..17: mol_type = other DNA
gtaacgctggtagctgt

SEQ ID NO: 170851 - DNA, 17 bp, synthetic construct
  source 1..17: mol_type = other DNA
tgtaacgctggtagctg

SEQ ID NO: 170852 - DNA, 17 bp, synthetic construct
  source 1..17: mol_type = other DNA
ctgtaacgctggtagct

SEQ ID NO: 170853 - DNA, 17 bp, synthetic construct
  source 1..17: mol_type = other DNA
gctgtaacgctggtagc

SEQ ID NO: 170854 - DNA, 17 bp, synthetic construct
  source 1..17: mol_type = other DNA
ggctgtaacgctggtag

SEQ ID NO: 170855 - DNA, 17 bp, synthetic construct
  source 1..17: mol_type = other DNA
tggctgtaacgctggta

SEQ ID NO: 170856 - DNA, 17 bp, synthetic construct
  source 1..17: mol_type = other DNA
atggctgtaacgctggt

SEQ ID NO: 170857 - DNA, 17 bp, synthetic construct
  source 1..17: mol_type = other DNA
gatggctgtaacgctgg

SEQ ID NO: 170858 - DNA, 17 bp, synthetic construct
  source 1..17: mol_type = other DNA
ggatggctgtaacgctg

SEQ ID NO: 170859 - DNA, 17 bp, synthetic construct
  source 1..17: mol_type = other DNA
gggatggctgtaacgct

SEQ ID NO: 170860 - DNA, 17 bp, synthetic construct
  source 1..17: mol_type = other DNA
ggggatggctgtaacgc

SEQ ID NO: 170861 - DNA, 17 bp, synthetic construct
  source 1..17: mol_type = other DNA
aggggatggctgtaacg

SEQ ID NO: 170862 - DNA, 17 bp, synthetic construct
  source 1..17: mol_type = other DNA
gaggggatggctgtaac

SEQ ID NO: 170863 - DNA, 17 bp, synthetic construct
  source 1..17: mol_type = other DNA
agaggggatggctgtaa

SEQ ID NO: 170864 - DNA, 17 bp, synthetic construct
  source 1..17: mol_type = other DNA
aagaggggatggctgta

SEQ ID NO: 170865 - DNA, 17 bp, synthetic construct
  source 1..17: mol_type = other DNA
gaagaggggatggctgt

SEQ ID NO: 170866 - DNA, 17 bp, synthetic construct
  source 1..17: mol_type = other DNA
ggaagaggggatggctg

SEQ ID NO: 170867 - DNA, 17 bp, synthetic construct
  source 1..17: mol_type = other DNA
aggaagaggggatggct

SEQ ID NO: 170868 - DNA, 17 bp, synthetic construct
  source 1..17: mol_type = other DNA
gaggaagaggggatggc

SEQ ID NO: 170869 - DNA, 17 bp, synthetic construct
  source 1..17: mol_type = other DNA
ggaggaagaggggatgg

SEQ ID NO: 170870 - DNA, 17 bp, synthetic construct
  source 1..17: mol_type = other DNA
gggaggaagaggggatg

SEQ ID NO: 170871 - DNA, 17 bp, synthetic construct
  source 1..17: mol_type = other DNA
agggaggaagaggggat

SEQ ID NO: 170872 - DNA, 17 bp, synthetic construct
  source 1..17: mol_type = other DNA
cagggaggaagagggga

SEQ ID NO: 170873 - DNA, 17 bp, synthetic construct
  source 1..17: mol_type = other DNA
ccagggaggaagagggg

SEQ ID NO: 170874 - DNA, 17 bp, synthetic construct
  source 1..17: mol_type = other DNA
cccagggaggaagaggg

SEQ ID NO: 170875 - DNA, 17 bp, synthetic construct
  source 1..17: mol_type = other DNA
gcccagggaggaagagg

SEQ ID NO: 170876 - DNA, 17 bp, synthetic construct
  source 1..17: mol_type = other DNA
tgcccagggaggaagag

SEQ ID NO: 170877 - DNA, 17 bp, synthetic construct
  source 1..17: mol_type = other DNA
gtgcccagggaggaaga

SEQ ID NO: 170878 - DNA, 17 bp, synthetic construct
  source 1..17: mol_type = other DNA
ggtgcccagggaggaag

SEQ ID NO: 170879 - DNA, 17 bp, synthetic construct
  source 1..17: mol_type = other DNA
cggtgcccagggaggaa

SEQ ID NO: 170880 - DNA, 17 bp, synthetic construct
  source 1..17: mol_type = other DNA
gcggtgcccagggagga

SEQ ID NO: 170881 - DNA, 17 bp, synthetic construct
  source 1..17: mol_type = other DNA
ggcggtgcccagggagg

SEQ ID NO: 170882 - DNA, 17 bp, synthetic construct
  source 1..17: mol_type = other DNA
aggcggtgcccagggag

SEQ ID NO: 170883 - DNA, 17 bp, synthetic construct
  source 1..17: mol_type = other DNA
caggcggtgcccaggga

SEQ ID NO: 170884 - DNA, 17 bp, synthetic construct
  source 1..17: mol_type = other DNA
ccaggcggtgcccaggg

SEQ ID NO: 170885 - DNA, 17 bp, synthetic construct
  source 1..17: mol_type = other DNA
tccaggcggtgcccagg

SEQ ID NO: 170886 - DNA, 17 bp, synthetic construct
  source 1..17: mol_type = other DNA
gtccaggcggtgcccag

SEQ ID NO: 170887 - DNA, 17 bp, synthetic construct
  source 1..17: mol_type = other DNA
ggtccaggcggtgccca

SEQ ID NO: 170888 - DNA, 17 bp, synthetic construct
  source 1..17: mol_type = other DNA
gggtccaggcggtgccc

SEQ ID NO: 170889 - DNA, 17 bp, synthetic construct
  source 1..17: mol_type = other DNA
cgggtccaggcggtgcc

SEQ ID NO: 170890 - DNA, 17 bp, synthetic construct
  source 1..17: mol_type = other DNA
gcgggtccaggcggtgc

SEQ ID NO: 170891 - DNA, 17 bp, synthetic construct
  source 1..17: mol_type = other DNA
ggcgggtccaggcggtg

SEQ ID NO: 170892 - DNA, 17 bp, synthetic construct
  source 1..17: mol_type = other DNA
aggcgggtccaggcggt

SEQ ID NO: 170893 - DNA, 17 bp, synthetic construct
  source 1..17: mol_type = other DNA
taggcgggtccaggcgg

SEQ ID NO: 170894 - DNA, 17 bp, synthetic construct
  source 1..17: mol_type = other DNA
ataggcgggtccaggcg

SEQ ID NO: 170895 - DNA, 17 bp, synthetic construct
  source 1..17: mol_type = other DNA
gataggcgggtccaggc

SEQ ID NO: 170896 - DNA, 17 bp, synthetic construct
  source 1..17: mol_type = other DNA
tgataggcgggtccagg

SEQ ID NO: 170897 - DNA, 17 bp, synthetic construct
  source 1..17: mol_type = other DNA
gtgataggcgggtccag

SEQ ID NO: 170898 - DNA, 17 bp, synthetic construct
  source 1..17: mol_type = other DNA
tgtgataggcgggtcca

SEQ ID NO: 170899 - DNA, 17 bp, synthetic construct
  source 1..17: mol_type = other DNA
ctgtgataggcgggtcc

SEQ ID NO: 170900 - DNA, 17 bp, synthetic construct
  source 1..17: mol_type = other DNA
tctgtgataggcgggtc

SEQ ID NO: 170901 - DNA, 17 bp, synthetic construct
  source 1..17: mol_type = other DNA
gtctgtgataggcgggt

SEQ ID NO: 170902 - DNA, 17 bp, synthetic construct
  source 1..17: mol_type = other DNA
ggtctgtgataggcggg

SEQ ID NO: 170903 - DNA, 17 bp, synthetic construct
  source 1..17: mol_type = other DNA
tggtctgtgataggcgg

SEQ ID NO: 170904 - DNA, 17 bp, synthetic construct
  source 1..17: mol_type = other DNA
gtggtctgtgataggcg

SEQ ID NO: 170905 - DNA, 17 bp, synthetic construct
  source 1..17: mol_type = other DNA
ggtggtctgtgataggc

SEQ ID NO: 170906 - DNA, 17 bp, synthetic construct
  source 1..17: mol_type = other DNA
tggtggtctgtgatagg

SEQ ID NO: 170907 - DNA, 17 bp, synthetic construct
  source 1..17: mol_type = other DNA
gtggtggtctgtgatag

SEQ ID NO: 170908 - DNA, 17 bp, synthetic construct
  source 1..17: mol_type = other DNA
tgtggtggtctgtgata

SEQ ID NO: 170909 - DNA, 17 bp, synthetic construct
  source 1..17: mol_type = other DNA
gtgtggtggtctgtgat

SEQ ID NO: 170910 - DNA, 17 bp, synthetic construct
  source 1..17: mol_type = other DNA
ggtgtggtggtctgtga

SEQ ID NO: 170911 - DNA, 17 bp, synthetic construct
  source 1..17: mol_type = other DNA
gggtgtggtggtctgtg

SEQ ID NO: 170912 - DNA, 17 bp, synthetic construct
  source 1..17: mol_type = other DNA
tgggtgtggtggtctgt

SEQ ID NO: 170913 - DNA, 17 bp, synthetic construct
  source 1..17: mol_type = other DNA
gtgggtgtggtggtctg

SEQ ID NO: 170914 - DNA, 17 bp, synthetic construct
  source 1..17: mol_type = other DNA
cgtgggtgtggtggtct

SEQ ID NO: 170915 - DNA, 17 bp, synthetic construct
  source 1..17: mol_type = other DNA
ccgtgggtgtggtggtc

SEQ ID NO: 170916 - DNA, 17 bp, synthetic construct
  source 1..17: mol_type = other DNA
gccgtgggtgtggtggt

SEQ ID NO: 170917 - DNA, 17 bp, synthetic construct
  source 1..17: mol_type = other DNA
ggccgtgggtgtggtgg

SEQ ID NO: 170918 - DNA, 17 bp, synthetic construct
  source 1..17: mol_type = other DNA
tggccgtgggtgtggtg

SEQ ID NO: 170919 - DNA, 17 bp, synthetic construct
  source 1..17: mol_type = other DNA
gtggccgtgggtgtggt

SEQ ID NO: 170920 - DNA, 17 bp, synthetic construct
  source 1..17: mol_type = other DNA
ggtggccgtgggtgtgg

SEQ ID NO: 170921 - DNA, 17 bp, synthetic construct
  source 1..17: mol_type = other DNA
tggtggccgtgggtgtg

SEQ ID NO: 170922 - DNA, 17 bp, synthetic construct
  source 1..17: mol_type = other DNA
atggtggccgtgggtgt

SEQ ID NO: 170923 - DNA, 17 bp, synthetic construct
  source 1..17: mol_type = other DNA
catggtggccgtgggtg

SEQ ID NO: 170924 - DNA, 17 bp, synthetic construct
  source 1..17: mol_type = other DNA
acatggtggccgtgggt

SEQ ID NO: 170925 - DNA, 17 bp, synthetic construct
  source 1..17: mol_type = other DNA
gacatggtggccgtggg

SEQ ID NO: 170926 - DNA, 17 bp, synthetic construct
  source 1..17: mol_type = other DNA
ggacatggtggccgtgg

SEQ ID NO: 170927 - DNA, 17 bp, synthetic construct
  source 1..17: mol_type = other DNA
tggacatggtggccgtg

SEQ ID NO: 170928 - DNA, 17 bp, synthetic construct
  source 1..17: mol_type = other DNA
gtggacatggtggccgt

SEQ ID NO: 170929 - DNA, 17 bp, synthetic construct
  source 1..17: mol_type = other DNA
tgtggacatggtggccg

SEQ ID NO: 170930 - DNA, 17 bp, synthetic construct
  source 1..17: mol_type = other DNA
ctgtggacatggtggcc

SEQ ID NO: 170931 - DNA, 17 bp, synthetic construct
  source 1..17: mol_type = other DNA
gctgtggacatggtggc

SEQ ID NO: 170932 - DNA, 17 bp, synthetic construct
  source 1..17: mol_type = other DNA
ggctgtggacatggtgg

SEQ ID NO: 170933 - DNA, 17 bp, synthetic construct
  source 1..17: mol_type = other DNA
tggctgtggacatggtg

SEQ ID NO: 170934 - DNA, 17 bp, synthetic construct
  source 1..17: mol_type = other DNA
gtggctgtggacatggt

SEQ ID NO: 170935 - DNA, 17 bp, synthetic construct
  source 1..17: mol_type = other DNA
tgtggctgtggacatgg

SEQ ID NO: 170936 - DNA, 17 bp, synthetic construct
  source 1..17: mol_type = other DNA
gtgtggctgtggacatg

SEQ ID NO: 170937 - DNA, 17 bp, synthetic construct
  source 1..17: mol_type = other DNA
ggtgtggctgtggacat

SEQ ID NO: 170938 - DNA, 17 bp, synthetic construct
  source 1..17: mol_type = other DNA
gggtgtggctgtggaca

SEQ ID NO: 170939 - DNA, 17 bp, synthetic construct
  source 1..17: mol_type = other DNA
agggtgtggctgtggac

SEQ ID NO: 170940 - DNA, 17 bp, synthetic construct
  source 1..17: mol_type = other DNA
gagggtgtggctgtgga

SEQ ID NO: 170941 - DNA, 17 bp, synthetic construct
  source 1..17: mol_type = other DNA
ggagggtgtggctgtgg

SEQ ID NO: 170942 - DNA, 17 bp, synthetic construct
  source 1..17: mol_type = other DNA
aggagggtgtggctgtg

SEQ ID NO: 170943 - DNA, 17 bp, synthetic construct
  source 1..17: mol_type = other DNA
gaggagggtgtggctgt

SEQ ID NO: 170944 - DNA, 17 bp, synthetic construct
  source 1..17: mol_type = other DNA
agaggagggtgtggctg

SEQ ID NO: 170945 - DNA, 17 bp, synthetic construct
  source 1..17: mol_type = other DNA
tagaggagggtgtggct

SEQ ID NO: 170946 - DNA, 17 bp, synthetic construct
  source 1..17: mol_type = other DNA
gtagaggagggtgtggc

SEQ ID NO: 170947 - DNA, 17 bp, synthetic construct
  source 1..17: mol_type = other DNA
agtagaggagggtgtgg

SEQ ID NO: 170948 - DNA, 17 bp, synthetic construct
  source 1..17: mol_type = other DNA
gagtagaggagggtgtg

SEQ ID NO: 170949 - DNA, 17 bp, synthetic construct
  source 1..17: mol_type = other DNA
ggagtagaggagggtgt

SEQ ID NO: 170950 - DNA, 17 bp, synthetic construct
  source 1..17: mol_type = other DNA
tggagtagaggagggtg

SEQ ID NO: 170951 - DNA, 17 bp, synthetic construct
  source 1..17: mol_type = other DNA
ctggagtagaggagggt

SEQ ID NO: 170952 - DNA, 17 bp, synthetic construct
  source 1..17: mol_type = other DNA
tctggagtagaggaggg

SEQ ID NO: 170953 - DNA, 17 bp, synthetic construct
  source 1..17: mol_type = other DNA
ctctggagtagaggagg

SEQ ID NO: 170954 - DNA, 17 bp, synthetic construct
  source 1..17: mol_type = other DNA
tctctggagtagaggag

SEQ ID NO: 170955 - DNA, 17 bp, synthetic construct
  source 1..17: mol_type = other DNA
gtctctggagtagagga

SEQ ID NO: 170956 - DNA, 17 bp, synthetic construct
  source 1..17: mol_type = other DNA
agtctctggagtagagg

SEQ ID NO: 170957 - DNA, 17 bp, synthetic construct
  source 1..17: mol_type = other DNA
cagtctctggagtagag

SEQ ID NO: 170958 - DNA, 17 bp, synthetic construct
  source 1..17: mol_type = other DNA
acagtctctggagtaga

SEQ ID NO: 170959 - DNA, 17 bp, synthetic construct
  source 1..17: mol_type = other DNA
gacagtctctggagtag

SEQ ID NO: 170960 - DNA, 17 bp, synthetic construct
  source 1..17: mol_type = other DNA
ggacagtctctggagta

SEQ ID NO: 170961 - DNA, 17 bp, synthetic construct
  source 1..17: mol_type = other DNA
tggacagtctctggagt

SEQ ID NO: 170962 - DNA, 17 bp, synthetic construct
  source 1..17: mol_type = other DNA
gtggacagtctctggag

SEQ ID NO: 170963 - DNA, 17 bp, synthetic construct
  source 1..17: mol_type = other DNA
tgtggacagtctctgga

SEQ ID NO: 170964 - DNA, 17 bp, synthetic construct
  source 1..17: mol_type = other DNA
gtgtggacagtctctgg

SEQ ID NO: 170965 - DNA, 17 bp, synthetic construct
  source 1..17: mol_type = other DNA
ggtgtggacagtctctg

SEQ ID NO: 170966 - DNA, 17 bp, synthetic construct
  source 1..17: mol_type = other DNA
aggtgtggacagtctct

SEQ ID NO: 170967 - DNA, 17 bp, synthetic construct
  source 1..17: mol_type = other DNA
gaggtgtggacagtctc

SEQ ID NO: 170968 - DNA, 17 bp, synthetic construct
  source 1..17: mol_type = other DNA
ggaggtgtggacagtct

SEQ ID NO: 170969 - DNA, 17 bp, synthetic construct
  source 1..17: mol_type = other DNA
tggaggtgtggacagtc

SEQ ID NO: 170970 - DNA, 17 bp, synthetic construct
  source 1..17: mol_type = other DNA
gtggaggtgtggacagt

SEQ ID NO: 170971 - DNA, 17 bp, synthetic construct
  source 1..17: mol_type = other DNA
tgtggaggtgtggacag

SEQ ID NO: 170972 - DNA, 17 bp, synthetic construct
  source 1..17: mol_type = other DNA
ctgtggaggtgtggaca

SEQ ID NO: 170973 - DNA, 17 bp, synthetic construct
  source 1..17: mol_type = other DNA
actgtggaggtgtggac

SEQ ID NO: 170974 - DNA, 17 bp, synthetic construct
  source 1..17: mol_type = other DNA
cactgtggaggtgtgga

SEQ ID NO: 170975 - DNA, 17 bp, synthetic construct
  source 1..17: mol_type = other DNA
gcactgtggaggtgtgg

SEQ ID NO: 170976 - DNA, 17 bp, synthetic construct
  source 1..17: mol_type = other DNA
agcactgtggaggtgtg

SEQ ID NO: 170977 - DNA, 17 bp, synthetic construct
  source 1..17: mol_type = other DNA
aagcactgtggaggtgt

SEQ ID NO: 170978 - DNA, 17 bp, synthetic construct
  source 1..17: mol_type = other DNA
taagcactgtggaggtg

SEQ ID NO: 170979 - DNA, 17 bp, synthetic construct
  source 1..17: mol_type = other DNA
gtaagcactgtggaggt

SEQ ID NO: 170980 - DNA, 17 bp, synthetic construct
  source 1..17: mol_type = other DNA
ggtaagcactgtggagg

SEQ ID NO: 170981 - DNA, 17 bp, synthetic construct
  source 1..17: mol_type = other DNA
tggtaagcactgtggag

SEQ ID NO: 170982 - DNA, 17 bp, synthetic construct
  source 1..17: mol_type = other DNA
gtggtaagcactgtgga

SEQ ID NO: 170983 - DNA, 17 bp, synthetic construct
  source 1..17: mol_type = other DNA
ggtggtaagcactgtgg

SEQ ID NO: 170984 - DNA, 17 bp, synthetic construct
  source 1..17: mol_type = other DNA
tggtggtaagcactgtg

SEQ ID NO: 170985 - DNA, 17 bp, synthetic construct
  source 1..17: mol_type = other DNA
gtggtggtaagcactgt

SEQ ID NO: 170986 - DNA, 17 bp, synthetic construct
  source 1..17: mol_type = other DNA
cgtggtggtaagcactg

SEQ ID NO: 170987 - DNA, 17 bp, synthetic construct
  source 1..17: mol_type = other DNA
tcgtggtggtaagcact

SEQ ID NO: 170988 - DNA, 17 bp, synthetic construct
  source 1..17: mol_type = other DNA
gtcgtggtggtaagcac

SEQ ID NO: 170989 - DNA, 17 bp, synthetic construct
  source 1..17: mol_type = other DNA
ggtcgtggtggtaagca

SEQ ID NO: 170990 - DNA, 17 bp, synthetic construct
  source 1..17: mol_type = other DNA
tggtcgtggtggtaagc

SEQ ID NO: 170991 - DNA, 17 bp, synthetic construct
  source 1..17: mol_type = other DNA
gtggtcgtggtggtaag

SEQ ID NO: 170992 - DNA, 17 bp, synthetic construct
  source 1..17: mol_type = other DNA
ggtggtcgtggtggtaa

SEQ ID NO: 170993 - DNA, 17 bp, synthetic construct
  source 1..17: mol_type = other DNA
tggtggtcgtggtggta

SEQ ID NO: 170994 - DNA, 17 bp, synthetic construct
  source 1..17: mol_type = other DNA
gtggtggtcgtggtggt

SEQ ID NO: 170995 - DNA, 17 bp, synthetic construct
  source 1..17: mol_type = other DNA
tgtggtggtcgtggtgg

SEQ ID NO: 170996 - DNA, 17 bp, synthetic construct
  source 1..17: mol_type = other DNA
ttgtggtggtcgtggtg

SEQ ID NO: 170997 - DNA, 17 bp, synthetic construct
  source 1..17: mol_type = other DNA
gttgtggtggtcgtggt

SEQ ID NO: 170998 - DNA, 17 bp, synthetic construct
  source 1..17: mol_type = other DNA
ggttgtggtggtcgtgg

SEQ ID NO: 170999 - DNA, 17 bp, synthetic construct
  source 1..17: mol_type = other DNA
tggttgtggtggtcgtg

SEQ ID NO: 171000 - DNA, 17 bp, synthetic construct
  source 1..17: mol_type = other DNA
ctggttgtggtggtcgt

SEQ ID NO: 171001 - DNA, 17 bp, synthetic construct
  source 1..17: mol_type = other DNA
cctggttgtggtggtcg

SEQ ID NO: 171002 - DNA, 17 bp, synthetic construct
  source 1..17: mol_type = other DNA
ccctggttgtggtggtc

SEQ ID NO: 171003 - DNA, 17 bp, synthetic construct
  source 1..17: mol_type = other DNA
gccctggttgtggtggt

SEQ ID NO: 171004 - DNA, 17 bp, synthetic construct
  source 1..17: mol_type = other DNA
ggccctggttgtggtgg

SEQ ID NO: 171005 - DNA, 17 bp, synthetic construct
  source 1..17: mol_type = other DNA
tggccctggttgtggtg

SEQ ID NO: 171006 - DNA, 17 bp, synthetic construct
  source 1..17: mol_type = other DNA
gtggccctggttgtggt

SEQ ID NO: 171007 - DNA, 17 bp, synthetic construct
  source 1..17: mol_type = other DNA
ggtggccctggttgtgg

SEQ ID NO: 171008 - DNA, 17 bp, synthetic construct
  source 1..17: mol_type = other DNA
cggtggccctggttgtg

SEQ ID NO: 171009 - DNA, 17 bp, synthetic construct
  source 1..17: mol_type = other DNA
ccggtggccctggttgt

SEQ ID NO: 171010 - DNA, 17 bp, synthetic construct
  source 1..17: mol_type = other DNA
gccggtggccctggttg

SEQ ID NO: 171011 - DNA, 17 bp, synthetic construct
  source 1..17: mol_type = other DNA
agccggtggccctggtt

SEQ ID NO: 171012 - DNA, 17 bp, synthetic construct
  source 1..17: mol_type = other DNA
gagccggtggccctggt

SEQ ID NO: 171013 - DNA, 17 bp, synthetic construct
  source 1..17: mol_type = other DNA
agagccggtggccctgg

SEQ ID NO: 171014 - DNA, 17 bp, synthetic construct
  source 1..17: mol_type = other DNA
cagagccggtggccctg

SEQ ID NO: 171015 - DNA, 17 bp, synthetic construct
  source 1..17: mol_type = other DNA
acagagccggtggccct

SEQ ID NO: 171016 - DNA, 17 bp, synthetic construct
  source 1..17: mol_type = other DNA
cacagagccggtggccc

SEQ ID NO: 171017 - DNA, 17 bp, synthetic construct
  source 1..17: mol_type = other DNA
ccacagagccggtggcc

SEQ ID NO: 171018 - DNA, 17 bp, synthetic construct
  source 1..17: mol_type = other DNA
gccacagagccggtggc

SEQ ID NO: 171019 - DNA, 17 bp, synthetic construct
  source 1..17: mol_type = other DNA
ggccacagagccggtgg

SEQ ID NO: 171020 - DNA, 17 bp, synthetic construct
  source 1..17: mol_type = other DNA
tggccacagagccggtg

SEQ ID NO: 171021 - DNA, 17 bp, synthetic construct
  source 1..17: mol_type = other DNA
gtggccacagagccggt

SEQ ID NO: 171022 - DNA, 17 bp, synthetic construct
  source 1..17: mol_type = other DNA
ggtggccacagagccgg

SEQ ID NO: 171023 - DNA, 17 bp, synthetic construct
  source 1..17: mol_type = other DNA
gggtggccacagagccg

SEQ ID NO: 171024 - DNA, 17 bp, synthetic construct
  source 1..17: mol_type = other DNA
ggggtggccacagagcc

SEQ ID NO: 171025 - DNA, 17 bp, synthetic construct
  source 1..17: mol_type = other DNA
gggggtggccacagagc

SEQ ID NO: 171026 - DNA, 17 bp, synthetic construct
  source 1..17: mol_type = other DNA
agggggtggccacagag

SEQ ID NO: 171027 - DNA, 17 bp, synthetic construct
  source 1..17: mol_type = other DNA
gagggggtggccacaga

SEQ ID NO: 171028 - DNA, 17 bp, synthetic construct
  source 1..17: mol_type = other DNA
ggagggggtggccacag

SEQ ID NO: 171029 - DNA, 17 bp, synthetic construct
  source 1..17: mol_type = other DNA
aggagggggtggccaca

SEQ ID NO: 171030 - DNA, 17 bp, synthetic construct
  source 1..17: mol_type = other DNA
gaggagggggtggccac

SEQ ID NO: 171031 - DNA, 17 bp, synthetic construct
  source 1..17: mol_type = other DNA
ggaggagggggtggcca

SEQ ID NO: 171032 - DNA, 17 bp, synthetic construct
  source 1..17: mol_type = other DNA
tggaggagggggtggcc

SEQ ID NO: 171033 - DNA, 17 bp, synthetic construct
  source 1..17: mol_type = other DNA
gtggaggagggggtggc

SEQ ID NO: 171034 - DNA, 17 bp, synthetic construct
  source 1..17: mol_type = other DNA
ggtggaggagggggtgg

SEQ ID NO: 171035 - DNA, 17 bp, synthetic construct
  source 1..17: mol_type = other DNA
gggtggaggagggggtg

SEQ ID NO: 171036 - DNA, 17 bp, synthetic construct
  source 1..17: mol_type = other DNA
ggggtggaggagggggt

SEQ ID NO: 171037 - DNA, 17 bp, synthetic construct
  source 1..17: mol_type = other DNA
tggggtggaggaggggg

SEQ ID NO: 171038 - DNA, 17 bp, synthetic construct
  source 1..17: mol_type = other DNA
ctggggtggaggagggg

SEQ ID NO: 171039 - DNA, 17 bp, synthetic construct
  source 1..17: mol_type = other DNA
cctggggtggaggaggg

SEQ ID NO: 171040 - DNA, 17 bp, synthetic construct
  source 1..17: mol_type = other DNA
tcctggggtggaggagg

SEQ ID NO: 171041 - DNA, 17 bp, synthetic construct
  source 1..17: mol_type = other DNA
ttcctggggtggaggag

SEQ ID NO: 171042 - DNA, 17 bp, synthetic construct
  source 1..17: mol_type = other DNA
gttcctggggtggagga

SEQ ID NO: 171043 - DNA, 17 bp, synthetic construct
  source 1..17: mol_type = other DNA
tgttcctggggtggagg

SEQ ID NO: 171044 - DNA, 17 bp, synthetic construct
  source 1..17: mol_type = other DNA
ctgttcctggggtggag

SEQ ID NO: 171045 - DNA, 17 bp, synthetic construct
  source 1..17: mol_type = other DNA
gctgttcctggggtgga

SEQ ID NO: 171046 - DNA, 17 bp, synthetic construct
  source 1..17: mol_type = other DNA
agctgttcctggggtgg

SEQ ID NO: 171047 - DNA, 17 bp, synthetic construct
  source 1..17: mol_type = other DNA
gagctgttcctggggtg

SEQ ID NO: 171048 - DNA, 17 bp, synthetic construct
  source 1..17: mol_type = other DNA
tgagctgttcctggggt

SEQ ID NO: 171049 - DNA, 17 bp, synthetic construct
  source 1..17: mol_type = other DNA
gtgagctgttcctgggg

SEQ ID NO: 171050 - DNA, 17 bp, synthetic construct
  source 1..17: mol_type = other DNA
tgtgagctgttcctggg

SEQ ID NO: 171051 - DNA, 17 bp, synthetic construct
  source 1..17: mol_type = other DNA
gtgtgagctgttcctgg

SEQ ID NO: 171052 - DNA, 17 bp, synthetic construct
  source 1..17: mol_type = other DNA
agtgtgagctgttcctg

SEQ ID NO: 171053 - DNA, 17 bp, synthetic construct
  source 1..17: mol_type = other DNA
tagtgtgagctgttcct

SEQ ID NO: 171054 - DNA, 17 bp, synthetic construct
  source 1..17: mol_type = other DNA
gtagtgtgagctgttcc

SEQ ID NO: 171055 - DNA, 17 bp, synthetic construct
  source 1..17: mol_type = other DNA
ggtagtgtgagctgttc

SEQ ID NO: 171056 - DNA, 17 bp, synthetic construct
  source 1..17: mol_type = other DNA
tggtagtgtgagctgtt

SEQ ID NO: 171057 - DNA, 17 bp, synthetic construct
  source 1..17: mol_type = other DNA
ttggtagtgtgagctgt

SEQ ID NO: 171058 - DNA, 17 bp, synthetic construct
  source 1..17: mol_type = other DNA
tttggtagtgtgagctg

SEQ ID NO: 171059 - DNA, 17 bp, synthetic construct
  source 1..17: mol_type = other DNA
ctttggtagtgtgagct

SEQ ID NO: 171060 - DNA, 17 bp, synthetic construct
  source 1..17: mol_type = other DNA
actttggtagtgtgagc

SEQ ID NO: 171061 - DNA, 17 bp, synthetic construct
  source 1..17: mol_type = other DNA
cactttggtagtgtgag

SEQ ID NO: 171062 - DNA, 17 bp, synthetic construct
  source 1..17: mol_type = other DNA
gcactttggtagtgtga

SEQ ID NO: 171063 - DNA, 17 bp, synthetic construct
  source 1..17: mol_type = other DNA
ggcactttggtagtgtg

SEQ ID NO: 171064 - DNA, 17 bp, synthetic construct
  source 1..17: mol_type = other DNA
cggcactttggtagtgt

SEQ ID NO: 171065 - DNA, 17 bp, synthetic construct
  source 1..17: mol_type = other DNA
tcggcactttggtagtg

SEQ ID NO: 171066 - DNA, 17 bp, synthetic construct
  source 1..17: mol_type = other DNA
gtcggcactttggtagt

SEQ ID NO: 171067 - DNA, 17 bp, synthetic construct
  source 1..17: mol_type = other DNA
agtcggcactttggtag

SEQ ID NO: 171068 - DNA, 17 bp, synthetic construct
  source 1..17: mol_type = other DNA
tagtcggcactttggta

SEQ ID NO: 171069 - DNA, 17 bp, synthetic construct
  source 1..17: mol_type = other DNA
gtagtcggcactttggt

SEQ ID NO: 171070 - DNA, 17 bp, synthetic construct
  source 1..17: mol_type = other DNA
ggtagtcggcactttgg

SEQ ID NO: 171071 - DNA, 17 bp, synthetic construct
  source 1..17: mol_type = other DNA
tggtagtcggcactttg

SEQ ID NO: 171072 - DNA, 17 bp, synthetic construct
  source 1..17: mol_type = other DNA
gtggtagtcggcacttt

SEQ ID NO: 171073 - DNA, 17 bp, synthetic construct
  source 1..17: mol_type = other DNA
tgtggtagtcggcactt

SEQ ID NO: 171074 - DNA, 17 bp, synthetic construct
  source 1..17: mol_type = other DNA
ttgtggtagtcggcact

SEQ ID NO: 171075 - DNA, 17 bp, synthetic construct
  source 1..17: mol_type = other DNA
gttgtggtagtcggcac

SEQ ID NO: 171076 - DNA, 17 bp, synthetic construct
  source 1..17: mol_type = other DNA
ggttgtggtagtcggca

SEQ ID NO: 171077 - DNA, 17 bp, synthetic construct
  source 1..17: mol_type = other DNA
tggttgtggtagtcggc

SEQ ID NO: 171078 - DNA, 17 bp, synthetic construct
  source 1..17: mol_type = other DNA
gtggttgtggtagtcgg

SEQ ID NO: 171079 - DNA, 17 bp, synthetic construct
  source 1..17: mol_type = other DNA
cgtggttgtggtagtcg

SEQ ID NO: 171080 - DNA, 17 bp, synthetic construct
  source 1..17: mol_type = other DNA
ccgtggttgtggtagtc

SEQ ID NO: 171081 - DNA, 17 bp, synthetic construct
  source 1..17: mol_type = other DNA
cccgtggttgtggtagt

SEQ ID NO: 171082 - DNA, 17 bp, synthetic construct
  source 1..17: mol_type = other DNA
gcccgtggttgtggtag

SEQ ID NO: 171083 - DNA, 17 bp, synthetic construct
  source 1..17: mol_type = other DNA
agcccgtggttgtggta

SEQ ID NO: 171084 - DNA, 17 bp, synthetic construct
  source 1..17: mol_type = other DNA
aagcccgtggttgtggt

SEQ ID NO: 171085 - DNA, 17 bp, synthetic construct
  source 1..17: mol_type = other DNA
gaagcccgtggttgtgg

SEQ ID NO: 171086 - DNA, 17 bp, synthetic construct
  source 1..17: mol_type = other DNA
tgaagcccgtggttgtg

SEQ ID NO: 171087 - DNA, 17 bp, synthetic construct
  source 1..17: mol_type = other DNA
gtgaagcccgtggttgt

SEQ ID NO: 171088 - DNA, 17 bp, synthetic construct
  source 1..17: mol_type = other DNA
tgtgaagcccgtggttg

SEQ ID NO: 171089 - DNA, 17 bp, synthetic construct
  source 1..17: mol_type = other DNA
ctgtgaagcccgtggtt

SEQ ID NO: 171090 - DNA, 17 bp, synthetic construct
  source 1..17: mol_type = other DNA
gctgtgaagcccgtggt

SEQ ID NO: 171091 - DNA, 17 bp, synthetic construct
  source 1..17: mol_type = other DNA
ggctgtgaagcccgtgg

SEQ ID NO: 171092 - DNA, 17 bp, synthetic construct
  source 1..17: mol_type = other DNA
tggctgtgaagcccgtg

SEQ ID NO: 171093 - DNA, 17 bp, synthetic construct
  source 1..17: mol_type = other DNA
gtggctgtgaagcccgt

SEQ ID NO: 171094 - DNA, 17 bp, synthetic construct
  source 1..17: mol_type = other DNA
ggtggctgtgaagcccg

SEQ ID NO: 171095 - DNA, 17 bp, synthetic construct
  source 1..17: mol_type = other DNA
gggtggctgtgaagccc

SEQ ID NO: 171096 - DNA, 17 bp, synthetic construct
  source 1..17: mol_type = other DNA
ggggtggctgtgaagcc

SEQ ID NO: 171097 - DNA, 17 bp, synthetic construct
  source 1..17: mol_type = other DNA
gggggtggctgtgaagc

SEQ ID NO: 171098 - DNA, 17 bp, synthetic construct
  source 1..17: mol_type = other DNA
agggggtggctgtgaag

SEQ ID NO: 171099 - DNA, 17 bp, synthetic construct
  source 1..17: mol_type = other DNA
gagggggtggctgtgaa

SEQ ID NO: 171100 - DNA, 17 bp, synthetic construct
  source 1..17: mol_type = other DNA
ggagggggtggctgtga

SEQ ID NO: 171101 - DNA, 17 bp, synthetic construct
  source 1..17: mol_type = other DNA
aggagggggtggctgtg

SEQ ID NO: 171102 - DNA, 17 bp, synthetic construct
  source 1..17: mol_type = other DNA
gaggagggggtggctgt

SEQ ID NO: 171103 - DNA, 17 bp, synthetic construct
  source 1..17: mol_type = other DNA
ggaggagggggtggctg

SEQ ID NO: 171104 - DNA, 17 bp, synthetic construct
  source 1..17: mol_type = other DNA
tggaggagggggtggct

SEQ ID NO: 171105 - DNA, 17 bp, synthetic construct
  source 1..17: mol_type = other DNA
ctggaggagggggtggc

SEQ ID NO: 171106 - DNA, 17 bp, synthetic construct
  source 1..17: mol_type = other DNA
gctggaggagggggtgg

SEQ ID NO: 171107 - DNA, 17 bp, synthetic construct
  source 1..17: mol_type = other DNA
ggctggaggagggggtg

SEQ ID NO: 171108 - DNA, 17 bp, synthetic construct
  source 1..17: mol_type = other DNA
gggctggaggagggggt

SEQ ID NO: 171109 - DNA, 17 bp, synthetic construct
  source 1..17: mol_type = other DNA
tgggctggaggaggggg

SEQ ID NO: 171110 - DNA, 17 bp, synthetic construct
  source 1..17: mol_type = other DNA
ctgggctggaggagggg

SEQ ID NO: 171111 - DNA, 17 bp, synthetic construct
  source 1..17: mol_type = other DNA
cctgggctggaggaggg

SEQ ID NO: 171112 - DNA, 17 bp, synthetic construct
  source 1..17: mol_type = other DNA
ccctgggctggaggagg

SEQ ID NO: 171113 - DNA, 17 bp, synthetic construct
  source 1..17: mol_type = other DNA
tccctgggctggaggag

SEQ ID NO: 171114 - DNA, 17 bp, synthetic construct
  source 1..17: mol_type = other DNA
gtccctgggctggagga

SEQ ID NO: 171115 - DNA, 17 bp, synthetic construct
  source 1..17: mol_type = other DNA
cgtccctgggctggagg

SEQ ID NO: 171116 - DNA, 17 bp, synthetic construct
  source 1..17: mol_type = other DNA
ccgtccctgggctggag

SEQ ID NO: 171117 - DNA, 17 bp, synthetic construct
  source 1..17: mol_type = other DNA
gccgtccctgggctgga

SEQ ID NO: 171118 - DNA, 17 bp, synthetic construct
  source 1..17: mol_type = other DNA
tgccgtccctgggctgg

SEQ ID NO: 171119 - DNA, 17 bp, synthetic construct
  source 1..17: mol_type = other DNA
gtgccgtccctgggctg

SEQ ID NO: 171120 - DNA, 17 bp, synthetic construct
  source 1..17: mol_type = other DNA
agtgccgtccctgggct

SEQ ID NO: 171121 - DNA, 17 bp, synthetic construct
  source 1..17: mol_type = other DNA
gagtgccgtccctgggc

SEQ ID NO: 171122 - DNA, 17 bp, synthetic construct
  source 1..17: mol_type = other DNA
tgagtgccgtccctggg

SEQ ID NO: 171123 - DNA, 17 bp, synthetic construct
  source 1..17: mol_type = other DNA
gtgagtgccgtccctgg

SEQ ID NO: 171124 - DNA, 17 bp, synthetic construct
  source 1..17: mol_type = other DNA
cgtgagtgccgtccctg

SEQ ID NO: 171125 - DNA, 17 bp, synthetic construct
  source 1..17: mol_type = other DNA
gcgtgagtgccgtccct

SEQ ID NO: 171126 - DNA, 17 bp, synthetic construct
  source 1..17: mol_type = other DNA
ggcgtgagtgccgtccc

SEQ ID NO: 171127 - DNA, 17 bp, synthetic construct
  source 1..17: mol_type = other DNA
aggcgtgagtgccgtcc

SEQ ID NO: 171128 - DNA, 17 bp, synthetic construct
  source 1..17: mol_type = other DNA
gaggcgtgagtgccgtc

SEQ ID NO: 171129 - DNA, 17 bp, synthetic construct
  source 1..17: mol_type = other DNA
ggaggcgtgagtgccgt

SEQ ID NO: 171130 - DNA, 17 bp, synthetic construct
  source 1..17: mol_type = other DNA
tggaggcgtgagtgccg

SEQ ID NO: 171131 - DNA, 17 bp, synthetic construct
  source 1..17: mol_type = other DNA
ctggaggcgtgagtgcc

SEQ ID NO: 171132 - DNA, 17 bp, synthetic construct
  source 1..17: mol_type = other DNA
actggaggcgtgagtgc

SEQ ID NO: 171133 - DNA, 17 bp, synthetic construct
  source 1..17: mol_type = other DNA
cactggaggcgtgagtg

SEQ ID NO: 171134 - DNA, 17 bp, synthetic construct
  source 1..17: mol_type = other DNA
acactggaggcgtgagt

SEQ ID NO: 171135 - DNA, 17 bp, synthetic construct
  source 1..17: mol_type = other DNA
cacactggaggcgtgag

SEQ ID NO: 171136 - DNA, 17 bp, synthetic construct
  source 1..17: mol_type = other DNA
ccacactggaggcgtga

SEQ ID NO: 171137 - DNA, 17 bp, synthetic construct
  source 1..17: mol_type = other DNA
tccacactggaggcgtg

SEQ ID NO: 171138 - DNA, 17 bp, synthetic construct
  source 1..17: mol_type = other DNA
atccacactggaggcgt

SEQ ID NO: 171139 - DNA, 17 bp, synthetic construct
  source 1..17: mol_type = other DNA
gatccacactggaggcg

SEQ ID NO: 171140 - DNA, 17 bp, synthetic construct
  source 1..17: mol_type = other DNA
tgatccacactggaggc

SEQ ID NO: 171141 - DNA, 17 bp, synthetic construct
  source 1..17: mol_type = other DNA
ctgatccacactggagg

SEQ ID NO: 171142 - DNA, 17 bp, synthetic construct
  source 1..17: mol_type = other DNA
gctgatccacactggag

SEQ ID NO: 171143 - DNA, 17 bp, synthetic construct
  source 1..17: mol_type = other DNA
tgctgatccacactgga

SEQ ID NO: 171144 - DNA, 17 bp, synthetic construct
  source 1..17: mol_type = other DNA
gtgctgatccacactgg

SEQ ID NO: 171145 - DNA, 17 bp, synthetic construct
  source 1..17: mol_type = other DNA
tgtgctgatccacactg

SEQ ID NO: 171146 - DNA, 17 bp, synthetic construct
  source 1..17: mol_type = other DNA
ttgtgctgatccacact

SEQ ID NO: 171147 - DNA, 17 bp, synthetic construct
  source 1..17: mol_type = other DNA
gttgtgctgatccacac

SEQ ID NO: 171148 - DNA, 17 bp, synthetic construct
  source 1..17: mol_type = other DNA
ggttgtgctgatccaca

SEQ ID NO: 171149 - DNA, 17 bp, synthetic construct
  source 1..17: mol_type = other DNA
tggttgtgctgatccac

SEQ ID NO: 171150 - DNA, 17 bp, synthetic construct
  source 1..17: mol_type = other DNA
gtggttgtgctgatcca

SEQ ID NO: 171151 - DNA, 17 bp, synthetic construct
  source 1..17: mol_type = other DNA
ggtggttgtgctgatcc

SEQ ID NO: 171152 - DNA, 17 bp, synthetic construct
  source 1..17: mol_type = other DNA
tggtggttgtgctgatc

SEQ ID NO: 171153 - DNA, 17 bp, synthetic construct
  source 1..17: mol_type = other DNA
gtggtggttgtgctgat

SEQ ID NO: 171154 - DNA, 17 bp, synthetic construct
  source 1..17: mol_type = other DNA
tgtggtggttgtgctga

SEQ ID NO: 171155 - DNA, 17 bp, synthetic construct
  source 1..17: mol_type = other DNA
gtgtggtggttgtgctg

SEQ ID NO: 171156 - DNA, 17 bp, synthetic construct
  source 1..17: mol_type = other DNA
ggtgtggtggttgtgct

SEQ ID NO: 171157 - DNA, 17 bp, synthetic construct
  source 1..17: mol_type = other DNA
gggtgtggtggttgtgc

SEQ ID NO: 171158 - DNA, 17 bp, synthetic construct
  source 1..17: mol_type = other DNA
tgggtgtggtggttgtg

SEQ ID NO: 171159 - DNA, 17 bp, synthetic construct
  source 1..17: mol_type = other DNA
gtgggtgtggtggttgt

SEQ ID NO: 171160 - DNA, 17 bp, synthetic construct
  source 1..17: mol_type = other DNA
tgtgggtgtggtggttg

SEQ ID NO: 171161 - DNA, 17 bp, synthetic construct
  source 1..17: mol_type = other DNA
ttgtgggtgtggtggtt

SEQ ID NO: 171162 - DNA, 17 bp, synthetic construct
  source 1..17: mol_type = other DNA
gttgtgggtgtggtggt

SEQ ID NO: 171163 - DNA, 17 bp, synthetic construct
  source 1..17: mol_type = other DNA
ggttgtgggtgtggtgg

SEQ ID NO: 171164 - DNA, 17 bp, synthetic construct
  source 1..17: mol_type = other DNA
tggttgtgggtgtggtg

SEQ ID NO: 171165 - DNA, 17 bp, synthetic construct
  source 1..17: mol_type = other DNA
ctggttgtgggtgtggt

SEQ ID NO: 171166 - DNA, 17 bp, synthetic construct
  source 1..17: mol_type = other DNA
tctggttgtgggtgtgg

SEQ ID NO: 171167 - DNA, 17 bp, synthetic construct
  source 1..17: mol_type = other DNA
ctctggttgtgggtgtg

SEQ ID NO: 171168 - DNA, 17 bp, synthetic construct
  source 1..17: mol_type = other DNA
cctctggttgtgggtgt

SEQ ID NO: 171169 - DNA, 17 bp, synthetic construct
  source 1..17: mol_type = other DNA
gcctctggttgtgggtg

SEQ ID NO: 171170 - DNA, 17 bp, synthetic construct
  source 1..17: mol_type = other DNA
agcctctggttgtgggt

SEQ ID NO: 171171 - DNA, 17 bp, synthetic construct
  source 1..17: mol_type = other DNA
gagcctctggttgtggg

SEQ ID NO: 171172 - DNA, 17 bp, synthetic construct
  source 1..17: mol_type = other DNA
ggagcctctggttgtgg

SEQ ID NO: 171173 - DNA, 17 bp, synthetic construct
  source 1..17: mol_type = other DNA
tggagcctctggttgtg

SEQ ID NO: 171174 - DNA, 17 bp, synthetic construct
  source 1..17: mol_type = other DNA
gtggagcctctggttgt

SEQ ID NO: 171175 - DNA, 17 bp, synthetic construct
  source 1..17: mol_type = other DNA
cgtggagcctctggttg

SEQ ID NO: 171176 - DNA, 17 bp, synthetic construct
  source 1..17: mol_type = other DNA
ccgtggagcctctggtt

SEQ ID NO: 171177 - DNA, 17 bp, synthetic construct
  source 1..17: mol_type = other DNA
accgtggagcctctggt

SEQ ID NO: 171178 - DNA, 17 bp, synthetic construct
  source 1..17: mol_type = other DNA
caccgtggagcctctgg

SEQ ID NO: 171179 - DNA, 17 bp, synthetic construct
  source 1..17: mol_type = other DNA
tcaccgtggagcctctg

SEQ ID NO: 171180 - DNA, 17 bp, synthetic construct
  source 1..17: mol_type = other DNA
gtcaccgtggagcctct

SEQ ID NO: 171181 - DNA, 17 bp, synthetic construct
  source 1..17: mol_type = other DNA
ggtcaccgtggagcctc

SEQ ID NO: 171182 - DNA, 17 bp, synthetic construct
  source 1..17: mol_type = other DNA
gggtcaccgtggagcct

SEQ ID NO: 171183 - DNA, 17 bp, synthetic construct
  source 1..17: mol_type = other DNA
ggggtcaccgtggagcc

SEQ ID NO: 171184 - DNA, 17 bp, synthetic construct
  source 1..17: mol_type = other DNA
gggggtcaccgtggagc

SEQ ID NO: 171185 - DNA, 17 bp, synthetic construct
  source 1..17: mol_type = other DNA
agggggtcaccgtggag

SEQ ID NO: 171186 - DNA, 17 bp, synthetic construct
  source 1..17: mol_type = other DNA
gagggggtcaccgtgga

SEQ ID NO: 171187 - DNA, 17 bp, synthetic construct
  source 1..17: mol_type = other DNA
ggagggggtcaccgtgg

SEQ ID NO: 171188 - DNA, 17 bp, synthetic construct
  source 1..17: mol_type = other DNA
aggagggggtcaccgtg

SEQ ID NO: 171189 - DNA, 17 bp, synthetic construct
  source 1..17: mol_type = other DNA
gaggagggggtcaccgt

SEQ ID NO: 171190 - DNA, 17 bp, synthetic construct
  source 1..17: mol_type = other DNA
ggaggagggggtcaccg

SEQ ID NO: 171191 - DNA, 17 bp, synthetic construct
  source 1..17: mol_type = other DNA
tggaggagggggtcacc

SEQ ID NO: 171192 - DNA, 17 bp, synthetic construct
  source 1..17: mol_type = other DNA
atggaggagggggtcac

SEQ ID NO: 171193 - DNA, 17 bp, synthetic construct
  source 1..17: mol_type = other DNA
gatggaggagggggtca

SEQ ID NO: 171194 - DNA, 17 bp, synthetic construct
  source 1..17: mol_type = other DNA
ggatggaggagggggtc

SEQ ID NO: 171195 - DNA, 17 bp, synthetic construct
  source 1..17: mol_type = other DNA
gggatggaggagggggt

SEQ ID NO: 171196 - DNA, 17 bp, synthetic construct
  source 1..17: mol_type = other DNA
cgggatggaggaggggg

SEQ ID NO: 171197 - DNA, 17 bp, synthetic construct
  source 1..17: mol_type = other DNA
ccgggatggaggagggg

SEQ ID NO: 171198 - DNA, 17 bp, synthetic construct
  source 1..17: mol_type = other DNA
cccgggatggaggaggg

SEQ ID NO: 171199 - DNA, 17 bp, synthetic construct
  source 1..17: mol_type = other DNA
ccccgggatggaggagg

SEQ ID NO: 171200 - DNA, 17 bp, synthetic construct
  source 1..17: mol_type = other DNA
tccccgggatggaggag

SEQ ID NO: 171201 - DNA, 17 bp, synthetic construct
  source 1..17: mol_type = other DNA
gtccccgggatggagga

SEQ ID NO: 171202 - DNA, 17 bp, synthetic construct
  source 1..17: mol_type = other DNA
ggtccccgggatggagg

SEQ ID NO: 171203 - DNA, 17 bp, synthetic construct
  source 1..17: mol_type = other DNA
tggtccccgggatggag

SEQ ID NO: 171204 - DNA, 17 bp, synthetic construct
  source 1..17: mol_type = other DNA
gtggtccccgggatgga

SEQ ID NO: 171205 - DNA, 17 bp, synthetic construct
  source 1..17: mol_type = other DNA
ggtggtccccgggatgg

SEQ ID NO: 171206 - DNA, 17 bp, synthetic construct
  source 1..17: mol_type = other DNA
gggtggtccccgggatg

SEQ ID NO: 171207 - DNA, 17 bp, synthetic construct
  source 1..17: mol_type = other DNA
tgggtggtccccgggat

SEQ ID NO: 171208 - DNA, 17 bp, synthetic construct
  source 1..17: mol_type = other DNA
gtgggtggtccccggga

SEQ ID NO: 171209 - DNA, 17 bp, synthetic construct
  source 1..17: mol_type = other DNA
tgtgggtggtccccggg

SEQ ID NO: 171210 - DNA, 17 bp, synthetic construct
  source 1..17: mol_type = other DNA
gtgtgggtggtccccgg

SEQ ID NO: 171211 - DNA, 17 bp, synthetic construct
  source 1..17: mol_type = other DNA
ggtgtgggtggtccccg

SEQ ID NO: 171212 - DNA, 17 bp, synthetic construct
  source 1..17: mol_type = other DNA
cggtgtgggtggtcccc

SEQ ID NO: 171213 - DNA, 17 bp, synthetic construct
  source 1..17: mol_type = other DNA
gcggtgtgggtggtccc

SEQ ID NO: 171214 - DNA, 17 bp, synthetic construct
  source 1..17: mol_type = other DNA
ggcggtgtgggtggtcc

SEQ ID NO: 171215 - DNA, 17 bp, synthetic construct
  source 1..17: mol_type = other DNA
tggcggtgtgggtggtc

SEQ ID NO: 171216 - DNA, 17 bp, synthetic construct
  source 1..17: mol_type = other DNA
gtggcggtgtgggtggt

SEQ ID NO: 171217 - DNA, 17 bp, synthetic construct
  source 1..17: mol_type = other DNA
tgtggcggtgtgggtgg

SEQ ID NO: 171218 - DNA, 17 bp, synthetic construct
  source 1..17: mol_type = other DNA
ctgtggcggtgtgggtg

SEQ ID NO: 171219 - DNA, 17 bp, synthetic construct
  source 1..17: mol_type = other DNA
actgtggcggtgtgggt

SEQ ID NO: 171220 - DNA, 17 bp, synthetic construct
  source 1..17: mol_type = other DNA
cactgtggcggtgtggg

SEQ ID NO: 171221 - DNA, 17 bp, synthetic construct
  source 1..17: mol_type = other DNA
gcactgtggcggtgtgg

SEQ ID NO: 171222 - DNA, 17 bp, synthetic construct
  source 1..17: mol_type = other DNA
agcactgtggcggtgtg

SEQ ID NO: 171223 - DNA, 17 bp, synthetic construct
  source 1..17: mol_type = other DNA
cagcactgtggcggtgt

SEQ ID NO: 171224 - DNA, 17 bp, synthetic construct
  source 1..17: mol_type = other DNA
tcagcactgtggcggtg

SEQ ID NO: 171225 - DNA, 17 bp, synthetic construct
  source 1..17: mol_type = other DNA
gtcagcactgtggcggt

SEQ ID NO: 171226 - DNA, 17 bp, synthetic construct
  source 1..17: mol_type = other DNA
ggtcagcactgtggcgg

SEQ ID NO: 171227 - DNA, 17 bp, synthetic construct
  source 1..17: mol_type = other DNA
tggtcagcactgtggcg

SEQ ID NO: 171228 - DNA, 17 bp, synthetic construct
  source 1..17: mol_type = other DNA
gtggtcagcactgtggc

SEQ ID NO: 171229 - DNA, 17 bp, synthetic construct
  source 1..17: mol_type = other DNA
ggtggtcagcactgtgg

SEQ ID NO: 171230 - DNA, 17 bp, synthetic construct
  source 1..17: mol_type = other DNA
tggtggtcagcactgtg

SEQ ID NO: 171231 - DNA, 17 bp, synthetic construct
  source 1..17: mol_type = other DNA
gtggtggtcagcactgt

SEQ ID NO: 171232 - DNA, 17 bp, synthetic construct
  source 1..17: mol_type = other DNA
ggtggtggtcagcactg

SEQ ID NO: 171233 - DNA, 17 bp, synthetic construct
  source 1..17: mol_type = other DNA
tggtggtggtcagcact

SEQ ID NO: 171234 - DNA, 17 bp, synthetic construct
  source 1..17: mol_type = other DNA
gtggtggtggtcagcac

SEQ ID NO: 171235 - DNA, 17 bp, synthetic construct
  source 1..17: mol_type = other DNA
ggtggtggtggtcagca

SEQ ID NO: 171236 - DNA, 17 bp, synthetic construct
  source 1..17: mol_type = other DNA
tggtggtggtggtcagc

SEQ ID NO: 171237 - DNA, 17 bp, synthetic construct
  source 1..17: mol_type = other DNA
gtggtggtggtggtcag

SEQ ID NO: 171238 - DNA, 17 bp, synthetic construct
  source 1..17: mol_type = other DNA
tgtggtggtggtggtca

SEQ ID NO: 171239 - DNA, 17 bp, synthetic construct
  source 1..17: mol_type = other DNA
ttgtggtggtggtggtc

SEQ ID NO: 171240 - DNA, 17 bp, synthetic construct
  source 1..17: mol_type = other DNA
gttgtggtggtggtggt

SEQ ID NO: 171241 - DNA, 17 bp, synthetic construct
  source 1..17: mol_type = other DNA
agttgtggtggtggtgg

SEQ ID NO: 171242 - DNA, 17 bp, synthetic construct
  source 1..17: mol_type = other DNA
cagttgtggtggtggtg

SEQ ID NO: 171243 - DNA, 17 bp, synthetic construct
  source 1..17: mol_type = other DNA
acagttgtggtggtggt

SEQ ID NO: 171244 - DNA, 17 bp, synthetic construct
  source 1..17: mol_type = other DNA
cacagttgtggtggtgg

SEQ ID NO: 171245 - DNA, 17 bp, synthetic construct
  source 1..17: mol_type = other DNA
ccacagttgtggtggtg

SEQ ID NO: 171246 - DNA, 17 bp, synthetic construct
  source 1..17: mol_type = other DNA
gccacagttgtggtggt

SEQ ID NO: 171247 - DNA, 17 bp, synthetic construct
  source 1..17: mol_type = other DNA
ggccacagttgtggtgg

SEQ ID NO: 171248 - DNA, 17 bp, synthetic construct
  source 1..17: mol_type = other DNA
tggccacagttgtggtg

SEQ ID NO: 171249 - DNA, 17 bp, synthetic construct
  source 1..17: mol_type = other DNA
gtggccacagttgtggt

SEQ ID NO: 171250 - DNA, 17 bp, synthetic construct
  source 1..17: mol_type = other DNA
agtggccacagttgtgg

SEQ ID NO: 171251 - DNA, 17 bp, synthetic construct
  source 1..17: mol_type = other DNA
cagtggccacagttgtg

SEQ ID NO: 171252 - DNA, 17 bp, synthetic construct
  source 1..17: mol_type = other DNA
ccagtggccacagttgt

SEQ ID NO: 171253 - DNA, 17 bp, synthetic construct
  source 1..17: mol_type = other DNA
accagtggccacagttg

SEQ ID NO: 171254 - DNA, 17 bp, synthetic construct
  source 1..17: mol_type = other DNA
aaccagtggccacagtt

SEQ ID NO: 171255 - DNA, 17 bp, synthetic construct
  source 1..17: mol_type = other DNA
gaaccagtggccacagt

SEQ ID NO: 171256 - DNA, 17 bp, synthetic construct
  source 1..17: mol_type = other DNA
agaaccagtggccacag

SEQ ID NO: 171257 - DNA, 17 bp, synthetic construct
  source 1..17: mol_type = other DNA
tagaaccagtggccaca

SEQ ID NO: 171258 - DNA, 17 bp, synthetic construct
  source 1..17: mol_type = other DNA
atagaaccagtggccac

SEQ ID NO: 171259 - DNA, 17 bp, synthetic construct
  source 1..17: mol_type = other DNA
catagaaccagtggcca

SEQ ID NO: 171260 - DNA, 17 bp, synthetic construct
  source 1..17: mol_type = other DNA
ccatagaaccagtggcc

SEQ ID NO: 171261 - DNA, 17 bp, synthetic construct
  source 1..17: mol_type = other DNA
gccatagaaccagtggc

SEQ ID NO: 171262 - DNA, 17 bp, synthetic construct
  source 1..17: mol_type = other DNA
tgccatagaaccagtgg

SEQ ID NO: 171263 - DNA, 17 bp, synthetic construct
  source 1..17: mol_type = other DNA
ttgccatagaaccagtg

SEQ ID NO: 171264 - DNA, 17 bp, synthetic construct
  source 1..17: mol_type = other DNA
gttgccatagaaccagt

SEQ ID NO: 171265 - DNA, 17 bp, synthetic construct
  source 1..17: mol_type = other DNA
tgttgccatagaaccag

SEQ ID NO: 171266 - DNA, 17 bp, synthetic construct
  source 1..17: mol_type = other DNA
gtgttgccatagaacca

SEQ ID NO: 171267 - DNA, 17 bp, synthetic construct
  source 1..17: mol_type = other DNA
ggtgttgccatagaacc

SEQ ID NO: 171268 - DNA, 17 bp, synthetic construct
  source 1..17: mol_type = other DNA
gggtgttgccatagaac

SEQ ID NO: 171269 - DNA, 17 bp, synthetic construct
  source 1..17: mol_type = other DNA
agggtgttgccatagaa

SEQ ID NO: 171270 - DNA, 17 bp, synthetic construct
  source 1..17: mol_type = other DNA
gagggtgttgccataga

SEQ ID NO: 171271 - DNA, 17 bp, synthetic construct
  source 1..17: mol_type = other DNA
ggagggtgttgccatag

SEQ ID NO: 171272 - DNA, 17 bp, synthetic construct
  source 1..17: mol_type = other DNA
aggagggtgttgccata

SEQ ID NO: 171273 - DNA, 17 bp, synthetic construct
  source 1..17: mol_type = other DNA
gaggagggtgttgccat

SEQ ID NO: 171274 - DNA, 17 bp, synthetic construct
  source 1..17: mol_type = other DNA
agaggagggtgttgcca

SEQ ID NO: 171275 - DNA, 17 bp, synthetic construct
  source 1..17: mol_type = other DNA
tagaggagggtgttgcc

SEQ ID NO: 171276 - DNA, 17 bp, synthetic construct
  source 1..17: mol_type = other DNA
ctagaggagggtgttgc

SEQ ID NO: 171277 - DNA, 17 bp, synthetic construct
  source 1..17: mol_type = other DNA
gctagaggagggtgttg

SEQ ID NO: 171278 - DNA, 17 bp, synthetic construct
  source 1..17: mol_type = other DNA
tgctagaggagggtgtt

SEQ ID NO: 171279 - DNA, 17 bp, synthetic construct
  source 1..17: mol_type = other DNA
gtgctagaggagggtgt

SEQ ID NO: 171280 - DNA, 17 bp, synthetic construct
  source 1..17: mol_type = other DNA
tgtgctagaggagggtg

SEQ ID NO: 171281 - DNA, 17 bp, synthetic construct
  source 1..17: mol_type = other DNA
gtgtgctagaggagggt

SEQ ID NO: 171282 - DNA, 17 bp, synthetic construct
  source 1..17: mol_type = other DNA
tgtgtgctagaggaggg

SEQ ID NO: 171283 - DNA, 17 bp, synthetic construct
  source 1..17: mol_type = other DNA
ctgtgtgctagaggagg

SEQ ID NO: 171284 - DNA, 17 bp, synthetic construct
  source 1..17: mol_type = other DNA
tctgtgtgctagaggag

SEQ ID NO: 171285 - DNA, 17 bp, synthetic construct
  source 1..17: mol_type = other DNA
gtctgtgtgctagagga

SEQ ID NO: 171286 - DNA, 17 bp, synthetic construct
  source 1..17: mol_type = other DNA
ggtctgtgtgctagagg

SEQ ID NO: 171287 - DNA, 17 bp, synthetic construct
  source 1..17: mol_type = other DNA
tggtctgtgtgctagag

SEQ ID NO: 171288 - DNA, 17 bp, synthetic construct
  source 1..17: mol_type = other DNA
ctggtctgtgtgctaga

SEQ ID NO: 171289 - DNA, 17 bp, synthetic construct
  source 1..17: mol_type = other DNA
actggtctgtgtgctag

SEQ ID NO: 171290 - DNA, 17 bp, synthetic construct
  source 1..17: mol_type = other DNA
cactggtctgtgtgcta

SEQ ID NO: 171291 - DNA, 17 bp, synthetic construct
  source 1..17: mol_type = other DNA
ccactggtctgtgtgct

SEQ ID NO: 171292 - DNA, 17 bp, synthetic construct
  source 1..17: mol_type = other DNA
accactggtctgtgtgc

SEQ ID NO: 171293 - DNA, 17 bp, synthetic construct
  source 1..17: mol_type = other DNA
taccactggtctgtgtg

SEQ ID NO: 171294 - DNA, 17 bp, synthetic construct
  source 1..17: mol_type = other DNA
gtaccactggtctgtgt

SEQ ID NO: 171295 - DNA, 17 bp, synthetic construct
  source 1..17: mol_type = other DNA
agtaccactggtctgtg

SEQ ID NO: 171296 - DNA, 17 bp, synthetic construct
  source 1..17: mol_type = other DNA
gagtaccactggtctgt

SEQ ID NO: 171297 - DNA, 17 bp, synthetic construct
  source 1..17: mol_type = other DNA
ggagtaccactggtctg

SEQ ID NO: 171298 - DNA, 17 bp, synthetic construct
  source 1..17: mol_type = other DNA
gggagtaccactggtct

SEQ ID NO: 171299 - DNA, 17 bp, synthetic construct
  source 1..17: mol_type = other DNA
ggggagtaccactggtc

SEQ ID NO: 171300 - DNA, 17 bp, synthetic construct
  source 1..17: mol_type = other DNA
gggggagtaccactggt

SEQ ID NO: 171301 - DNA, 17 bp, synthetic construct
  source 1..17: mol_type = other DNA
tgggggagtaccactgg

SEQ ID NO: 171302 - DNA, 17 bp, synthetic construct
  source 1..17: mol_type = other DNA
atgggggagtaccactg

SEQ ID NO: 171303 - DNA, 17 bp, synthetic construct
  source 1..17: mol_type = other DNA
gatgggggagtaccact

SEQ ID NO: 171304 - DNA, 17 bp, synthetic construct
  source 1..17: mol_type = other DNA
tgatgggggagtaccac

SEQ ID NO: 171305 - DNA, 17 bp, synthetic construct
  source 1..17: mol_type = other DNA
gtgatgggggagtacca

SEQ ID NO: 171306 - DNA, 17 bp, synthetic construct
  source 1..17: mol_type = other DNA
agtgatgggggagtacc

SEQ ID NO: 171307 - DNA, 17 bp, synthetic construct
  source 1..17: mol_type = other DNA
cagtgatgggggagtac

SEQ ID NO: 171308 - DNA, 17 bp, synthetic construct
  source 1..17: mol_type = other DNA
tcagtgatgggggagta

SEQ ID NO: 171309 - DNA, 17 bp, synthetic construct
  source 1..17: mol_type = other DNA
gtcagtgatgggggagt

SEQ ID NO: 171310 - DNA, 17 bp, synthetic construct
  source 1..17: mol_type = other DNA
ggtcagtgatgggggag

SEQ ID NO: 171311 - DNA, 17 bp, synthetic construct
  source 1..17: mol_type = other DNA
tggtcagtgatggggga

SEQ ID NO: 171312 - DNA, 17 bp, synthetic construct
  source 1..17: mol_type = other DNA
gtggtcagtgatggggg

SEQ ID NO: 171313 - DNA, 17 bp, synthetic construct
  source 1..17: mol_type = other DNA
ggtggtcagtgatgggg

SEQ ID NO: 171314 - DNA, 17 bp, synthetic construct
  source 1..17: mol_type = other DNA
tggtggtcagtgatggg

SEQ ID NO: 171315 - DNA, 17 bp, synthetic construct
  source 1..17: mol_type = other DNA
gtggtggtcagtgatgg

SEQ ID NO: 171316 - DNA, 17 bp, synthetic construct
  source 1..17: mol_type = other DNA
cgtggtggtcagtgatg

SEQ ID NO: 171317 - DNA, 17 bp, synthetic construct
  source 1..17: mol_type = other DNA
ccgtggtggtcagtgat

SEQ ID NO: 171318 - DNA, 17 bp, synthetic construct
  source 1..17: mol_type = other DNA
gccgtggtggtcagtga

SEQ ID NO: 171319 - DNA, 17 bp, synthetic construct
  source 1..17: mol_type = other DNA
ggccgtggtggtcagtg

SEQ ID NO: 171320 - DNA, 17 bp, synthetic construct
  source 1..17: mol_type = other DNA
tggccgtggtggtcagt

SEQ ID NO: 171321 - DNA, 17 bp, synthetic construct
  source 1..17: mol_type = other DNA
gtggccgtggtggtcag

SEQ ID NO: 171322 - DNA, 17 bp, synthetic construct
  source 1..17: mol_type = other DNA
agtggccgtggtggtca

SEQ ID NO: 171323 - DNA, 17 bp, synthetic construct
  source 1..17: mol_type = other DNA
tagtggccgtggtggtc

SEQ ID NO: 171324 - DNA, 17 bp, synthetic construct
  source 1..17: mol_type = other DNA
gtagtggccgtggtggt

SEQ ID NO: 171325 - DNA, 17 bp, synthetic construct
  source 1..17: mol_type = other DNA
cgtagtggccgtggtgg

SEQ ID NO: 171326 - DNA, 17 bp, synthetic construct
  source 1..17: mol_type = other DNA
tcgtagtggccgtggtg

SEQ ID NO: 171327 - DNA, 17 bp, synthetic construct
  source 1..17: mol_type = other DNA
atcgtagtggccgtggt

SEQ ID NO: 171328 - DNA, 17 bp, synthetic construct
  source 1..17: mol_type = other DNA
gatcgtagtggccgtgg

SEQ ID NO: 171329 - DNA, 17 bp, synthetic construct
  source 1..17: mol_type = other DNA
tgatcgtagtggccgtg

SEQ ID NO: 171330 - DNA, 17 bp, synthetic construct
  source 1..17: mol_type = other DNA
gtgatcgtagtggccgt

SEQ ID NO: 171331 - DNA, 17 bp, synthetic construct
  source 1..17: mol_type = other DNA
tgtgatcgtagtggccg

SEQ ID NO: 171332 - DNA, 17 bp, synthetic construct
  source 1..17: mol_type = other DNA
ctgtgatcgtagtggcc

SEQ ID NO: 171333 - DNA, 17 bp, synthetic construct
  source 1..17: mol_type = other DNA
gctgtgatcgtagtggc

SEQ ID NO: 171334 - DNA, 17 bp, synthetic construct
  source 1..17: mol_type = other DNA
ggctgtgatcgtagtgg

SEQ ID NO: 171335 - DNA, 17 bp, synthetic construct
  source 1..17: mol_type = other DNA
tggctgtgatcgtagtg

SEQ ID NO: 171336 - DNA, 17 bp, synthetic construct
  source 1..17: mol_type = other DNA
gtggctgtgatcgtagt

SEQ ID NO: 171337 - DNA, 17 bp, synthetic construct
  source 1..17: mol_type = other DNA
ggtggctgtgatcgtag

SEQ ID NO: 171338 - DNA, 17 bp, synthetic construct
  source 1..17: mol_type = other DNA
cggtggctgtgatcgta

SEQ ID NO: 171339 - DNA, 17 bp, synthetic construct
  source 1..17: mol_type = other DNA
ccggtggctgtgatcgt

SEQ ID NO: 171340 - DNA, 17 bp, synthetic construct
  source 1..17: mol_type = other DNA
gccggtggctgtgatcg

SEQ ID NO: 171341 - DNA, 17 bp, synthetic construct
  source 1..17: mol_type = other DNA
agccggtggctgtgatc

SEQ ID NO: 171342 - DNA, 17 bp, synthetic construct
  source 1..17: mol_type = other DNA
gagccggtggctgtgat

SEQ ID NO: 171343 - DNA, 17 bp, synthetic construct
  source 1..17: mol_type = other DNA
ggagccggtggctgtga

SEQ ID NO: 171344 - DNA, 17 bp, synthetic construct
  source 1..17: mol_type = other DNA
tggagccggtggctgtg

SEQ ID NO: 171345 - DNA, 17 bp, synthetic construct
  source 1..17: mol_type = other DNA
gtggagccggtggctgt

SEQ ID NO: 171346 - DNA, 17 bp, synthetic construct
  source 1..17: mol_type = other DNA
ggtggagccggtggctg

SEQ ID NO: 171347 - DNA, 17 bp, synthetic construct
  source 1..17: mol_type = other DNA
tggtggagccggtggct

SEQ ID NO: 171348 - DNA, 17 bp, synthetic construct
  source 1..17: mol_type = other DNA
gtggtggagccggtggc

SEQ ID NO: 171349 - DNA, 17 bp, synthetic construct
  source 1..17: mol_type = other DNA
ggtggtggagccggtgg

SEQ ID NO: 171350 - DNA, 17 bp, synthetic construct
  source 1..17: mol_type = other DNA
tggtggtggagccggtg

SEQ ID NO: 171351 - DNA, 17 bp, synthetic construct
  source 1..17: mol_type = other DNA
ttggtggtggagccggt

SEQ ID NO: 171352 - DNA, 17 bp, synthetic construct
  source 1..17: mol_type = other DNA
gttggtggtggagccgg

SEQ ID NO: 171353 - DNA, 17 bp, synthetic construct
  source 1..17: mol_type = other DNA
ggttggtggtggagccg

SEQ ID NO: 171354 - DNA, 17 bp, synthetic construct
  source 1..17: mol_type = other DNA
gggttggtggtggagcc

SEQ ID NO: 171355 - DNA, 17 bp, synthetic construct
  source 1..17: mol_type = other DNA
ggggttggtggtggagc

SEQ ID NO: 171356 - DNA, 17 bp, synthetic construct
  source 1..17: mol_type = other DNA
aggggttggtggtggag

SEQ ID NO: 171357 - DNA, 17 bp, synthetic construct
  source 1..17: mol_type = other DNA
gaggggttggtggtgga

SEQ ID NO: 171358 - DNA, 17 bp, synthetic construct
  source 1..17: mol_type = other DNA
ggaggggttggtggtgg

SEQ ID NO: 171359 - DNA, 17 bp, synthetic construct
  source 1..17: mol_type = other DNA
aggaggggttggtggtg

SEQ ID NO: 171360 - DNA, 17 bp, synthetic construct
  source 1..17: mol_type = other DNA
gaggaggggttggtggt

SEQ ID NO: 171361 - DNA, 17 bp, synthetic construct
  source 1..17: mol_type = other DNA
tgaggaggggttggtgg

SEQ ID NO: 171362 - DNA, 17 bp, synthetic construct
  source 1..17: mol_type = other DNA
ttgaggaggggttggtg

SEQ ID NO: 171363 - DNA, 17 bp, synthetic construct
  source 1..17: mol_type = other DNA
gttgaggaggggttggt

SEQ ID NO: 171364 - DNA, 17 bp, synthetic construct
  source 1..17: mol_type = other DNA
agttgaggaggggttgg

SEQ ID NO: 171365 - DNA, 17 bp, synthetic construct
  source 1..17: mol_type = other DNA
gagttgaggaggggttg

SEQ ID NO: 171366 - DNA, 17 bp, synthetic construct
  source 1..17: mol_type = other DNA
ggagttgaggaggggtt

SEQ ID NO: 171367 - DNA, 17 bp, synthetic construct
  source 1..17: mol_type = other DNA
tggagttgaggaggggt

SEQ ID NO: 171368 - DNA, 17 bp, synthetic construct
  source 1..17: mol_type = other DNA
ctggagttgaggagggg

SEQ ID NO: 171369 - DNA, 17 bp, synthetic construct
  source 1..17: mol_type = other DNA
cctggagttgaggaggg

SEQ ID NO: 171370 - DNA, 17 bp, synthetic construct
  source 1..17: mol_type = other DNA
ccctggagttgaggagg

SEQ ID NO: 171371 - DNA, 17 bp, synthetic construct
  source 1..17: mol_type = other DNA
tccctggagttgaggag

SEQ ID NO: 171372 - DNA, 17 bp, synthetic construct
  source 1..17: mol_type = other DNA
gtccctggagttgagga

SEQ ID NO: 171373 - DNA, 17 bp, synthetic construct
  source 1..17: mol_type = other DNA
tgtccctggagttgagg

SEQ ID NO: 171374 - DNA, 17 bp, synthetic construct
  source 1..17: mol_type = other DNA
ttgtccctggagttgag

SEQ ID NO: 171375 - DNA, 17 bp, synthetic construct
  source 1..17: mol_type = other DNA
gttgtccctggagttga

SEQ ID NO: 171376 - DNA, 17 bp, synthetic construct
  source 1..17: mol_type = other DNA
agttgtccctggagttg

SEQ ID NO: 171377 - DNA, 17 bp, synthetic construct
  source 1..17: mol_type = other DNA
gagttgtccctggagtt

SEQ ID NO: 171378 - DNA, 17 bp, synthetic construct
  source 1..17: mol_type = other DNA
ggagttgtccctggagt

SEQ ID NO: 171379 - DNA, 17 bp, synthetic construct
  source 1..17: mol_type = other DNA
gggagttgtccctggag

SEQ ID NO: 171380 - DNA, 17 bp, synthetic construct
  source 1..17: mol_type = other DNA
tgggagttgtccctgga

SEQ ID NO: 171381 - DNA, 17 bp, synthetic construct
  source 1..17: mol_type = other DNA
atgggagttgtccctgg

SEQ ID NO: 171382 - DNA, 17 bp, synthetic construct
  source 1..17: mol_type = other DNA
gatgggagttgtccctg

SEQ ID NO: 171383 - DNA, 17 bp, synthetic construct
  source 1..17: mol_type = other DNA
ggatgggagttgtccct

SEQ ID NO: 171384 - DNA, 17 bp, synthetic construct
  source 1..17: mol_type = other DNA
gggatgggagttgtccc

SEQ ID NO: 171385 - DNA, 17 bp, synthetic construct
  source 1..17: mol_type = other DNA
ggggatgggagttgtcc

SEQ ID NO: 171386 - DNA, 17 bp, synthetic construct
  source 1..17: mol_type = other DNA
gggggatgggagttgtc

SEQ ID NO: 171387 - DNA, 17 bp, synthetic construct
  source 1..17: mol_type = other DNA
ggggggatgggagttgt

SEQ ID NO: 171388 - DNA, 17 bp, synthetic construct
  source 1..17: mol_type = other DNA
tggggggatgggagttg

SEQ ID NO: 171389 - DNA, 17 bp, synthetic construct
  source 1..17: mol_type = other DNA
ctggggggatgggagtt

SEQ ID NO: 171390 - DNA, 17 bp, synthetic construct
  source 1..17: mol_type = other DNA
actggggggatgggagt

SEQ ID NO: 171391 - DNA, 17 bp, synthetic construct
  source 1..17: mol_type = other DNA
cactggggggatgggag

SEQ ID NO: 171392 - DNA, 17 bp, synthetic construct
  source 1..17: mol_type = other DNA
gcactggggggatggga

SEQ ID NO: 171393 - DNA, 17 bp, synthetic construct
  source 1..17: mol_type = other DNA
agcactggggggatggg

SEQ ID NO: 171394 - DNA, 17 bp, synthetic construct
  source 1..17: mol_type = other DNA
cagcactggggggatgg

SEQ ID NO: 171395 - DNA, 17 bp, synthetic construct
  source 1..17: mol_type = other DNA
tcagcactggggggatg

SEQ ID NO: 171396 - DNA, 17 bp, synthetic construct
  source 1..17: mol_type = other DNA
gtcagcactggggggat

SEQ ID NO: 171397 - DNA, 17 bp, synthetic construct
  source 1..17: mol_type = other DNA
ggtcagcactgggggga

SEQ ID NO: 171398 - DNA, 17 bp, synthetic construct
  source 1..17: mol_type = other DNA
tggtcagcactgggggg

SEQ ID NO: 171399 - DNA, 17 bp, synthetic construct
  source 1..17: mol_type = other DNA
gtggtcagcactggggg

SEQ ID NO: 171400 - DNA, 17 bp, synthetic construct
  source 1..17: mol_type = other DNA
ggtggtcagcactgggg

SEQ ID NO: 171401 - DNA, 17 bp, synthetic construct
  source 1..17: mol_type = other DNA
tggtggtcagcactggg

SEQ ID NO: 171402 - DNA, 17 bp, synthetic construct
  source 1..17: mol_type = other DNA
gtggtggtcagcactgg

SEQ ID NO: 171403 - DNA, 17 bp, synthetic construct
  source 1..17: mol_type = other DNA
ggtggtggtcagcactg

SEQ ID NO: 171404 - DNA, 17 bp, synthetic construct
  source 1..17: mol_type = other DNA
cggtggtggtcagcact

SEQ ID NO: 171405 - DNA, 17 bp, synthetic construct
  source 1..17: mol_type = other DNA
gcggtggtggtcagcac

SEQ ID NO: 171406 - DNA, 17 bp, synthetic construct
  source 1..17: mol_type = other DNA
ggcggtggtggtcagca

SEQ ID NO: 171407 - DNA, 17 bp, synthetic construct
  source 1..17: mol_type = other DNA
tggcggtggtggtcagc

SEQ ID NO: 171408 - DNA, 17 bp, synthetic construct
  source 1..17: mol_type = other DNA
gtggcggtggtggtcag

SEQ ID NO: 171409 - DNA, 17 bp, synthetic construct
  source 1..17: mol_type = other DNA
ggtggcggtggtggtca

SEQ ID NO: 171410 - DNA, 17 bp, synthetic construct
  source 1..17: mol_type = other DNA
tggtggcggtggtggtc

SEQ ID NO: 171411 - DNA, 17 bp, synthetic construct
  source 1..17: mol_type = other DNA
gtggtggcggtggtggt

SEQ ID NO: 171412 - DNA, 17 bp, synthetic construct
  source 1..17: mol_type = other DNA
tgtggtggcggtggtgg

SEQ ID NO: 171413 - DNA, 17 bp, synthetic construct
  source 1..17: mol_type = other DNA
gtgtggtggcggtggtg

SEQ ID NO: 171414 - DNA, 17 bp, synthetic construct
  source 1..17: mol_type = other DNA
ggtgtggtggcggtggt

SEQ ID NO: 171415 - DNA, 17 bp, synthetic construct
  source 1..17: mol_type = other DNA
aggtgtggtggcggtgg

SEQ ID NO: 171416 - DNA, 17 bp, synthetic construct
  source 1..17: mol_type = other DNA
caggtgtggtggcggtg

SEQ ID NO: 171417 - DNA, 17 bp, synthetic construct
  source 1..17: mol_type = other DNA
gcaggtgtggtggcggt

SEQ ID NO: 171418 - DNA, 17 bp, synthetic construct
  source 1..17: mol_type = other DNA
tgcaggtgtggtggcgg

SEQ ID NO: 171419 - DNA, 17 bp, synthetic construct
  source 1..17: mol_type = other DNA
ctgcaggtgtggtggcg

SEQ ID NO: 171420 - DNA, 17 bp, synthetic construct
  source 1..17: mol_type = other DNA
gctgcaggtgtggtggc

SEQ ID NO: 171421 - DNA, 17 bp, synthetic construct
  source 1..17: mol_type = other DNA
ggctgcaggtgtggtgg

SEQ ID NO: 171422 - DNA, 17 bp, synthetic construct
  source 1..17: mol_type = other DNA
tggctgcaggtgtggtg

SEQ ID NO: 171423 - DNA, 17 bp, synthetic construct
  source 1..17: mol_type = other DNA
gtggctgcaggtgtggt

SEQ ID NO: 171424 - DNA, 17 bp, synthetic construct
  source 1..17: mol_type = other DNA
ggtggctgcaggtgtgg

SEQ ID NO: 171425 - DNA, 17 bp, synthetic construct
  source 1..17: mol_type = other DNA
tggtggctgcaggtgtg

SEQ ID NO: 171426 - DNA, 17 bp, synthetic construct
  source 1..17: mol_type = other DNA
ctggtggctgcaggtgt

SEQ ID NO: 171427 - DNA, 17 bp, synthetic construct
  source 1..17: mol_type = other DNA
gctggtggctgcaggtg

SEQ ID NO: 171428 - DNA, 17 bp, synthetic construct
  source 1..17: mol_type = other DNA
tgctggtggctgcaggt

SEQ ID NO: 171429 - DNA, 17 bp, synthetic construct
  source 1..17: mol_type = other DNA
ctgctggtggctgcagg

SEQ ID NO: 171430 - DNA, 17 bp, synthetic construct
  source 1..17: mol_type = other DNA
gctgctggtggctgcag

SEQ ID NO: 171431 - DNA, 17 bp, synthetic construct
  source 1..17: mol_type = other DNA
tgctgctggtggctgca

SEQ ID NO: 171432 - DNA, 17 bp, synthetic construct
  source 1..17: mol_type = other DNA
gtgctgctggtggctgc

SEQ ID NO: 171433 - DNA, 17 bp, synthetic construct
  source 1..17: mol_type = other DNA
tgtgctgctggtggctg

SEQ ID NO: 171434 - DNA, 17 bp, synthetic construct
  source 1..17: mol_type = other DNA
ctgtgctgctggtggct

SEQ ID NO: 171435 - DNA, 17 bp, synthetic construct
  source 1..17: mol_type = other DNA
actgtgctgctggtggc

SEQ ID NO: 171436 - DNA, 17 bp, synthetic construct
  source 1..17: mol_type = other DNA
cactgtgctgctggtgg

SEQ ID NO: 171437 - DNA, 17 bp, synthetic construct
  source 1..17: mol_type = other DNA
tcactgtgctgctggtg

SEQ ID NO: 171438 - DNA, 17 bp, synthetic construct
  source 1..17: mol_type = other DNA
gtcactgtgctgctggt

SEQ ID NO: 171439 - DNA, 17 bp, synthetic construct
  source 1..17: mol_type = other DNA
agtcactgtgctgctgg

SEQ ID NO: 171440 - DNA, 17 bp, synthetic construct
  source 1..17: mol_type = other DNA
gagtcactgtgctgctg

SEQ ID NO: 171441 - DNA, 17 bp, synthetic construct
  source 1..17: mol_type = other DNA
ggagtcactgtgctgct

SEQ ID NO: 171442 - DNA, 17 bp, synthetic construct
  source 1..17: mol_type = other DNA
gggagtcactgtgctgc

SEQ ID NO: 171443 - DNA, 17 bp, synthetic construct
  source 1..17: mol_type = other DNA
agggagtcactgtgctg

SEQ ID NO: 171444 - DNA, 17 bp, synthetic construct
  source 1..17: mol_type = other DNA
gagggagtcactgtgct

SEQ ID NO: 171445 - DNA, 17 bp, synthetic construct
  source 1..17: mol_type = other DNA
ggagggagtcactgtgc

SEQ ID NO: 171446 - DNA, 17 bp, synthetic construct
  source 1..17: mol_type = other DNA
aggagggagtcactgtg

SEQ ID NO: 171447 - DNA, 17 bp, synthetic construct
  source 1..17: mol_type = other DNA
gaggagggagtcactgt

SEQ ID NO: 171448 - DNA, 17 bp, synthetic construct
  source 1..17: mol_type = other DNA
agaggagggagtcactg

SEQ ID NO: 171449 - DNA, 17 bp, synthetic construct
  source 1..17: mol_type = other DNA
cagaggagggagtcact

SEQ ID NO: 171450 - DNA, 17 bp, synthetic construct
  source 1..17: mol_type = other DNA
gcagaggagggagtcac

SEQ ID NO: 171451 - DNA, 17 bp, synthetic construct
  source 1..17: mol_type = other DNA
ggcagaggagggagtca

SEQ ID NO: 171452 - DNA, 17 bp, synthetic construct
  source 1..17: mol_type = other DNA
gggcagaggagggagtc

SEQ ID NO: 171453 - DNA, 17 bp, synthetic construct
  source 1..17: mol_type = other DNA
agggcagaggagggagt

SEQ ID NO: 171454 - DNA, 17 bp, synthetic construct
  source 1..17: mol_type = other DNA
tagggcagaggagggag

SEQ ID NO: 171455 - DNA, 17 bp, synthetic construct
  source 1..17: mol_type = other DNA
ctagggcagaggaggga

SEQ ID NO: 171456 - DNA, 17 bp, synthetic construct
  source 1..17: mol_type = other DNA
cctagggcagaggaggg

SEQ ID NO: 171457 - DNA, 17 bp, synthetic construct
  source 1..17: mol_type = other DNA
ccctagggcagaggagg

SEQ ID NO: 171458 - DNA, 17 bp, synthetic construct
  source 1..17: mol_type = other DNA
tccctagggcagaggag

SEQ ID NO: 171459 - DNA, 17 bp, synthetic construct
  source 1..17: mol_type = other DNA
gtccctagggcagagga

SEQ ID NO: 171460 - DNA, 17 bp, synthetic construct
  source 1..17: mol_type = other DNA
ggtccctagggcagagg

SEQ ID NO: 171461 - DNA, 17 bp, synthetic construct
  source 1..17: mol_type = other DNA
tggtccctagggcagag

SEQ ID NO: 171462 - DNA, 17 bp, synthetic construct
  source 1..17: mol_type = other DNA
gtggtccctagggcaga

SEQ ID NO: 171463 - DNA, 17 bp, synthetic construct
  source 1..17: mol_type = other DNA
ggtggtccctagggcag

SEQ ID NO: 171464 - DNA, 17 bp, synthetic construct
  source 1..17: mol_type = other DNA
gggtggtccctagggca

SEQ ID NO: 171465 - DNA, 17 bp, synthetic construct
  source 1..17: mol_type = other DNA
tgggtggtccctagggc

SEQ ID NO: 171466 - DNA, 17 bp, synthetic construct
  source 1..17: mol_type = other DNA
gtgggtggtccctaggg

SEQ ID NO: 171467 - DNA, 17 bp, synthetic construct
  source 1..17: mol_type = other DNA
tgtgggtggtccctagg

SEQ ID NO: 171468 - DNA, 17 bp, synthetic construct
  source 1..17: mol_type = other DNA
gtgtgggtggtccctag

SEQ ID NO: 171469 - DNA, 17 bp, synthetic construct
  source 1..17: mol_type = other DNA
tgtgtgggtggtcccta

SEQ ID NO: 171470 - DNA, 17 bp, synthetic construct
  source 1..17: mol_type = other DNA
gtgtgtgggtggtccct

SEQ ID NO: 171471 - DNA, 17 bp, synthetic construct
  source 1..17: mol_type = other DNA
ggtgtgtgggtggtccc

SEQ ID NO: 171472 - DNA, 17 bp, synthetic construct
  source 1..17: mol_type = other DNA
gggtgtgtgggtggtcc

SEQ ID NO: 171473 - DNA, 17 bp, synthetic construct
  source 1..17: mol_type = other DNA
ggggtgtgtgggtggtc

SEQ ID NO: 171474 - DNA, 17 bp, synthetic construct
  source 1..17: mol_type = other DNA
gggggtgtgtgggtggt

SEQ ID NO: 171475 - DNA, 17 bp, synthetic construct
  source 1..17: mol_type = other DNA
tgggggtgtgtgggtgg

SEQ ID NO: 171476 - DNA, 17 bp, synthetic construct
  source 1..17: mol_type = other DNA
ctgggggtgtgtgggtg

SEQ ID NO: 171477 - DNA, 17 bp, synthetic construct
  source 1..17: mol_type = other DNA
actgggggtgtgtgggt

SEQ ID NO: 171478 - DNA, 17 bp, synthetic construct
  source 1..17: mol_type = other DNA
cactgggggtgtgtggg

SEQ ID NO: 171479 - DNA, 17 bp, synthetic construct
  source 1..17: mol_type = other DNA
gcactgggggtgtgtgg

SEQ ID NO: 171480 - DNA, 17 bp, synthetic construct
  source 1..17: mol_type = other DNA
ggcactgggggtgtgtg

SEQ ID NO: 171481 - DNA, 17 bp, synthetic construct
  source 1..17: mol_type = other DNA
cggcactgggggtgtgt

SEQ ID NO: 171482 - DNA, 17 bp, synthetic construct
  source 1..17: mol_type = other DNA
tcggcactgggggtgtg

SEQ ID NO: 171483 - DNA, 17 bp, synthetic construct
  source 1..17: mol_type = other DNA
ttcggcactgggggtgt

SEQ ID NO: 171484 - DNA, 17 bp, synthetic construct
  source 1..17: mol_type = other DNA
gttcggcactgggggtg

SEQ ID NO: 171485 - DNA, 17 bp, synthetic construct
  source 1..17: mol_type = other DNA
tgttcggcactgggggt

SEQ ID NO: 171486 - DNA, 17 bp, synthetic construct
  source 1..17: mol_type = other DNA
gtgttcggcactggggg

SEQ ID NO: 171487 - DNA, 17 bp, synthetic construct
  source 1..17: mol_type = other DNA
ggtgttcggcactgggg

SEQ ID NO: 171488 - DNA, 17 bp, synthetic construct
  source 1..17: mol_type = other DNA
tggtgttcggcactggg

SEQ ID NO: 171489 - DNA, 17 bp, synthetic construct
  source 1..17: mol_type = other DNA
gtggtgttcggcactgg

SEQ ID NO: 171490 - DNA, 17 bp, synthetic construct
  source 1..17: mol_type = other DNA
cgtggtgttcggcactg

SEQ ID NO: 171491 - DNA, 17 bp, synthetic construct
  source 1..17: mol_type = other DNA
ccgtggtgttcggcact

SEQ ID NO: 171492 - DNA, 17 bp, synthetic construct
  source 1..17: mol_type = other DNA
gccgtggtgttcggcac

SEQ ID NO: 171493 - DNA, 17 bp, synthetic construct
  source 1..17: mol_type = other DNA
ggccgtggtgttcggca

SEQ ID NO: 171494 - DNA, 17 bp, synthetic construct
  source 1..17: mol_type = other DNA
tggccgtggtgttcggc

SEQ ID NO: 171495 - DNA, 17 bp, synthetic construct
  source 1..17: mol_type = other DNA
gtggccgtggtgttcgg

SEQ ID NO: 171496 - DNA, 17 bp, synthetic construct
  source 1..17: mol_type = other DNA
ggtggccgtggtgttcg

SEQ ID NO: 171497 - DNA, 17 bp, synthetic construct
  source 1..17: mol_type = other DNA
tggtggccgtggtgttc

SEQ ID NO: 171498 - DNA, 17 bp, synthetic construct
  source 1..17: mol_type = other DNA
gtggtggccgtggtgtt

SEQ ID NO: 171499 - DNA, 17 bp, synthetic construct
  source 1..17: mol_type = other DNA
tgtggtggccgtggtgt

SEQ ID NO: 171500 - DNA, 17 bp, synthetic construct
  source 1..17: mol_type = other DNA
gtgtggtggccgtggtg

SEQ ID NO: 171501 - DNA, 17 bp, synthetic construct
  source 1..17: mol_type = other DNA
tgtgtggtggccgtggt

SEQ ID NO: 171502 - DNA, 17 bp, synthetic construct
  source 1..17: mol_type = other DNA
gtgtgtggtggccgtgg

SEQ ID NO: 171503 - DNA, 17 bp, synthetic construct
  source 1..17: mol_type = other DNA
cgtgtgtggtggccgtg

SEQ ID NO: 171504 - DNA, 17 bp, synthetic construct
  source 1..17: mol_type = other DNA
ccgtgtgtggtggccgt

SEQ ID NO: 171505 - DNA, 17 bp, synthetic construct
  source 1..17: mol_type = other DNA
cccgtgtgtggtggccg

SEQ ID NO: 171506 - DNA, 17 bp, synthetic construct
  source 1..17: mol_type = other DNA
gcccgtgtgtggtggcc

SEQ ID NO: 171507 - DNA, 17 bp, synthetic construct
  source 1..17: mol_type = other DNA
cgcccgtgtgtggtggc

SEQ ID NO: 171508 - DNA, 17 bp, synthetic construct
  source 1..17: mol_type = other DNA
ccgcccgtgtgtggtgg

SEQ ID NO: 171509 - DNA, 17 bp, synthetic construct
  source 1..17: mol_type = other DNA
accgcccgtgtgtggtg

SEQ ID NO: 171510 - DNA, 17 bp, synthetic construct
  source 1..17: mol_type = other DNA
gaccgcccgtgtgtggt

SEQ ID NO: 171511 - DNA, 17 bp, synthetic construct
  source 1..17: mol_type = other DNA
ggaccgcccgtgtgtgg

SEQ ID NO: 171512 - DNA, 17 bp, synthetic construct
  source 1..17: mol_type = other DNA
gggaccgcccgtgtgtg

SEQ ID NO: 171513 - DNA, 17 bp, synthetic construct
  source 1..17: mol_type = other DNA
agggaccgcccgtgtgt

SEQ ID NO: 171514 - DNA, 17 bp, synthetic construct
  source 1..17: mol_type = other DNA
cagggaccgcccgtgtg

SEQ ID NO: 171515 - DNA, 17 bp, synthetic construct
  source 1..17: mol_type = other DNA
gcagggaccgcccgtgt

SEQ ID NO: 171516 - DNA, 17 bp, synthetic construct
  source 1..17: mol_type = other DNA
ggcagggaccgcccgtg

SEQ ID NO: 171517 - DNA, 17 bp, synthetic construct
  source 1..17: mol_type = other DNA
gggcagggaccgcccgt

SEQ ID NO: 171518 - DNA, 17 bp, synthetic construct
  source 1..17: mol_type = other DNA
ggggcagggaccgcccg

SEQ ID NO: 171519 - DNA, 17 bp, synthetic construct
  source 1..17: mol_type = other DNA
gggggcagggaccgccc

SEQ ID NO: 171520 - DNA, 17 bp, synthetic construct
  source 1..17: mol_type = other DNA
ggggggcagggaccgcc

SEQ ID NO: 171521 - DNA, 17 bp, synthetic construct
  source 1..17: mol_type = other DNA
tggggggcagggaccgc

SEQ ID NO: 171522 - DNA, 17 bp, synthetic construct
  source 1..17: mol_type = other DNA
ctggggggcagggaccg

SEQ ID NO: 171523 - DNA, 17 bp, synthetic construct
  source 1..17: mol_type = other DNA
gctggggggcagggacc

SEQ ID NO: 171524 - DNA, 17 bp, synthetic construct
  source 1..17: mol_type = other DNA
tgctggggggcagggac

SEQ ID NO: 171525 - DNA, 17 bp, synthetic construct
  source 1..17: mol_type = other DNA
ctgctggggggcaggga

SEQ ID NO: 171526 - DNA, 17 bp, synthetic construct
  source 1..17: mol_type = other DNA
actgctggggggcaggg

SEQ ID NO: 171527 - DNA, 17 bp, synthetic construct
  source 1..17: mol_type = other DNA
gactgctggggggcagg

SEQ ID NO: 171528 - DNA, 17 bp, synthetic construct
  source 1..17: mol_type = other DNA
ggactgctggggggcag

SEQ ID NO: 171529 - DNA, 17 bp, synthetic construct
  source 1..17: mol_type = other DNA
gggactgctggggggca

SEQ ID NO: 171530 - DNA, 17 bp, synthetic construct
  source 1..17: mol_type = other DNA
ggggactgctggggggc

SEQ ID NO: 171531 - DNA, 17 bp, synthetic construct
  source 1..17: mol_type = other DNA
tggggactgctgggggg

SEQ ID NO: 171532 - DNA, 17 bp, synthetic construct
  source 1..17: mol_type = other DNA
gtggggactgctggggg

SEQ ID NO: 171533 - DNA, 17 bp, synthetic construct
  source 1..17: mol_type = other DNA
tgtggggactgctgggg

SEQ ID NO: 171534 - DNA, 17 bp, synthetic construct
  source 1..17: mol_type = other DNA
gtgtggggactgctggg

SEQ ID NO: 171535 - DNA, 17 bp, synthetic construct
  source 1..17: mol_type = other DNA
cgtgtggggactgctgg

SEQ ID NO: 171536 - DNA, 17 bp, synthetic construct
  source 1..17: mol_type = other DNA
ccgtgtggggactgctg

SEQ ID NO: 171537 - DNA, 17 bp, synthetic construct
  source 1..17: mol_type = other DNA
accgtgtggggactgct

SEQ ID NO: 171538 - DNA, 17 bp, synthetic construct
  source 1..17: mol_type = other DNA
caccgtgtggggactgc

SEQ ID NO: 171539 - DNA, 17 bp, synthetic construct
  source 1..17: mol_type = other DNA
gcaccgtgtggggactg

SEQ ID NO: 171540 - DNA, 17 bp, synthetic construct
  source 1..17: mol_type = other DNA
cgcaccgtgtggggact

SEQ ID NO: 171541 - DNA, 17 bp, synthetic construct
  source 1..17: mol_type = other DNA
gcgcaccgtgtggggac

SEQ ID NO: 171542 - DNA, 17 bp, synthetic construct
  source 1..17: mol_type = other DNA
tgcgcaccgtgtgggga

SEQ ID NO: 171543 - DNA, 17 bp, synthetic construct
  source 1..17: mol_type = other DNA
gtgcgcaccgtgtgggg

SEQ ID NO: 171544 - DNA, 17 bp, synthetic construct
  source 1..17: mol_type = other DNA
tgtgcgcaccgtgtggg

SEQ ID NO: 171545 - DNA, 17 bp, synthetic construct
  source 1..17: mol_type = other DNA
ctgtgcgcaccgtgtgg

SEQ ID NO: 171546 - DNA, 17 bp, synthetic construct
  source 1..17: mol_type = other DNA
gctgtgcgcaccgtgtg

SEQ ID NO: 171547 - DNA, 17 bp, synthetic construct
  source 1..17: mol_type = other DNA
ggctgtgcgcaccgtgt

SEQ ID NO: 171548 - DNA, 17 bp, synthetic construct
  source 1..17: mol_type = other DNA
aggctgtgcgcaccgtg

SEQ ID NO: 171549 - DNA, 17 bp, synthetic construct
  source 1..17: mol_type = other DNA
caggctgtgcgcaccgt

SEQ ID NO: 171550 - DNA, 17 bp, synthetic construct
  source 1..17: mol_type = other DNA
ccaggctgtgcgcaccg

SEQ ID NO: 171551 - DNA, 17 bp, synthetic construct
  source 1..17: mol_type = other DNA
tccaggctgtgcgcacc

SEQ ID NO: 171552 - DNA, 17 bp, synthetic construct
  source 1..17: mol_type = other DNA
gtccaggctgtgcgcac

SEQ ID NO: 171553 - DNA, 17 bp, synthetic construct
  source 1..17: mol_type = other DNA
agtccaggctgtgcgca

SEQ ID NO: 171554 - DNA, 17 bp, synthetic construct
  source 1..17: mol_type = other DNA
aagtccaggctgtgcgc

SEQ ID NO: 171555 - DNA, 17 bp, synthetic construct
  source 1..17: mol_type = other DNA
gaagtccaggctgtgcg

SEQ ID NO: 171556 - DNA, 17 bp, synthetic construct
  source 1..17: mol_type = other DNA
cgaagtccaggctgtgc

SEQ ID NO: 171557 - DNA, 17 bp, synthetic construct
  source 1..17: mol_type = other DNA
ccgaagtccaggctgtg

SEQ ID NO: 171558 - DNA, 17 bp, synthetic construct
  source 1..17: mol_type = other DNA
gccgaagtccaggctgt

SEQ ID NO: 171559 - DNA, 17 bp, synthetic construct
  source 1..17: mol_type = other DNA
ggccgaagtccaggctg

SEQ ID NO: 171560 - DNA, 17 bp, synthetic construct
  source 1..17: mol_type = other DNA
tggccgaagtccaggct

SEQ ID NO: 171561 - DNA, 17 bp, synthetic construct
  source 1..17: mol_type = other DNA
gtggccgaagtccaggc

SEQ ID NO: 171562 - DNA, 17 bp, synthetic construct
  source 1..17: mol_type = other DNA
ggtggccgaagtccagg

SEQ ID NO: 171563 - DNA, 17 bp, synthetic construct
  source 1..17: mol_type = other DNA
aggtggccgaagtccag

SEQ ID NO: 171564 - DNA, 17 bp, synthetic construct
  source 1..17: mol_type = other DNA
gaggtggccgaagtcca

SEQ ID NO: 171565 - DNA, 17 bp, synthetic construct
  source 1..17: mol_type = other DNA
cgaggtggccgaagtcc

SEQ ID NO: 171566 - DNA, 17 bp, synthetic construct
  source 1..17: mol_type = other DNA
ccgaggtggccgaagtc

SEQ ID NO: 171567 - DNA, 17 bp, synthetic construct
  source 1..17: mol_type = other DNA
cccgaggtggccgaagt

SEQ ID NO: 171568 - DNA, 17 bp, synthetic construct
  source 1..17: mol_type = other DNA
gcccgaggtggccgaag

SEQ ID NO: 171569 - DNA, 17 bp, synthetic construct
  source 1..17: mol_type = other DNA
tgcccgaggtggccgaa

SEQ ID NO: 171570 - DNA, 17 bp, synthetic construct
  source 1..17: mol_type = other DNA
atgcccgaggtggccga

SEQ ID NO: 171571 - DNA, 17 bp, synthetic construct
  source 1..17: mol_type = other DNA
gatgcccgaggtggccg

SEQ ID NO: 171572 - DNA, 17 bp, synthetic construct
  source 1..17: mol_type = other DNA
agatgcccgaggtggcc

SEQ ID NO: 171573 - DNA, 17 bp, synthetic construct
  source 1..17: mol_type = other DNA
aagatgcccgaggtggc

SEQ ID NO: 171574 - DNA, 17 bp, synthetic construct
  source 1..17: mol_type = other DNA
caagatgcccgaggtgg

SEQ ID NO: 171575 - DNA, 17 bp, synthetic construct
  source 1..17: mol_type = other DNA
ccaagatgcccgaggtg

SEQ ID NO: 171576 - DNA, 17 bp, synthetic construct
  source 1..17: mol_type = other DNA
cccaagatgcccgaggt

SEQ ID NO: 171577 - DNA, 17 bp, synthetic construct
  source 1..17: mol_type = other DNA
gcccaagatgcccgagg

SEQ ID NO: 171578 - DNA, 17 bp, synthetic construct
  source 1..17: mol_type = other DNA
tgcccaagatgcccgag

SEQ ID NO: 171579 - DNA, 17 bp, synthetic construct
  source 1..17: mol_type = other DNA
gtgcccaagatgcccga

SEQ ID NO: 171580 - DNA, 17 bp, synthetic construct
  source 1..17: mol_type = other DNA
ggtgcccaagatgcccg

SEQ ID NO: 171581 - DNA, 17 bp, synthetic construct
  source 1..17: mol_type = other DNA
tggtgcccaagatgccc

SEQ ID NO: 171582 - DNA, 17 bp, synthetic construct
  source 1..17: mol_type = other DNA
gtggtgcccaagatgcc

SEQ ID NO: 171583 - DNA, 17 bp, synthetic construct
  source 1..17: mol_type = other DNA
ggtggtgcccaagatgc

SEQ ID NO: 171584 - DNA, 17 bp, synthetic construct
  source 1..17: mol_type = other DNA
gggtggtgcccaagatg

SEQ ID NO: 171585 - DNA, 17 bp, synthetic construct
  source 1..17: mol_type = other DNA
tgggtggtgcccaagat

SEQ ID NO: 171586 - DNA, 17 bp, synthetic construct
  source 1..17: mol_type = other DNA
gtgggtggtgcccaaga

SEQ ID NO: 171587 - DNA, 17 bp, synthetic construct
  source 1..17: mol_type = other DNA
tgtgggtggtgcccaag

SEQ ID NO: 171588 - DNA, 17 bp, synthetic construct
  source 1..17: mol_type = other DNA
atgtgggtggtgcccaa

SEQ ID NO: 171589 - DNA, 17 bp, synthetic construct
  source 1..17: mol_type = other DNA
gatgtgggtggtgccca

SEQ ID NO: 171590 - DNA, 17 bp, synthetic construct
  source 1..17: mol_type = other DNA
tgatgtgggtggtgccc

SEQ ID NO: 171591 - DNA, 17 bp, synthetic construct
  source 1..17: mol_type = other DNA
gtgatgtgggtggtgcc

SEQ ID NO: 171592 - DNA, 17 bp, synthetic construct
  source 1..17: mol_type = other DNA
tgtgatgtgggtggtgc

SEQ ID NO: 171593 - DNA, 17 bp, synthetic construct
  source 1..17: mol_type = other DNA
ctgtgatgtgggtggtg

SEQ ID NO: 171594 - DNA, 17 bp, synthetic construct
  source 1..17: mol_type = other DNA
tctgtgatgtgggtggt

SEQ ID NO: 171595 - DNA, 17 bp, synthetic construct
  source 1..17: mol_type = other DNA
ctctgtgatgtgggtgg

SEQ ID NO: 171596 - DNA, 17 bp, synthetic construct
  source 1..17: mol_type = other DNA
gctctgtgatgtgggtg

SEQ ID NO: 171597 - DNA, 17 bp, synthetic construct
  source 1..17: mol_type = other DNA
ggctctgtgatgtgggt

SEQ ID NO: 171598 - DNA, 17 bp, synthetic construct
  source 1..17: mol_type = other DNA
aggctctgtgatgtggg

SEQ ID NO: 171599 - DNA, 17 bp, synthetic construct
  source 1..17: mol_type = other DNA
aaggctctgtgatgtgg

SEQ ID NO: 171600 - DNA, 17 bp, synthetic construct
  source 1..17: mol_type = other DNA
gaaggctctgtgatgtg

SEQ ID NO: 171601 - DNA, 17 bp, synthetic construct
  source 1..17: mol_type = other DNA
ggaaggctctgtgatgt

SEQ ID NO: 171602 - DNA, 17 bp, synthetic construct
  source 1..17: mol_type = other DNA
tggaaggctctgtgatg

SEQ ID NO: 171603 - DNA, 17 bp, synthetic construct
  source 1..17: mol_type = other DNA
gtggaaggctctgtgat

SEQ ID NO: 171604 - DNA, 17 bp, synthetic construct
  source 1..17: mol_type = other DNA
cgtggaaggctctgtga

SEQ ID NO: 171605 - DNA, 17 bp, synthetic construct
  source 1..17: mol_type = other DNA
ccgtggaaggctctgtg

SEQ ID NO: 171606 - DNA, 17 bp, synthetic construct
  source 1..17: mol_type = other DNA
accgtggaaggctctgt

SEQ ID NO: 171607 - DNA, 17 bp, synthetic construct
  source 1..17: mol_type = other DNA
caccgtggaaggctctg

SEQ ID NO: 171608 - DNA, 17 bp, synthetic construct
  source 1..17: mol_type = other DNA
tcaccgtggaaggctct

SEQ ID NO: 171609 - DNA, 17 bp, synthetic construct
  source 1..17: mol_type = other DNA
gtcaccgtggaaggctc

SEQ ID NO: 171610 - DNA, 17 bp, synthetic construct
  source 1..17: mol_type = other DNA
agtcaccgtggaaggct

SEQ ID NO: 171611 - DNA, 17 bp, synthetic construct
  source 1..17: mol_type = other DNA
aagtcaccgtggaaggc

SEQ ID NO: 171612 - DNA, 17 bp, synthetic construct
  source 1..17: mol_type = other DNA
gaagtcaccgtggaagg

SEQ ID NO: 171613 - DNA, 17 bp, synthetic construct
  source 1..17: mol_type = other DNA
ggaagtcaccgtggaag

SEQ ID NO: 171614 - DNA, 17 bp, synthetic construct
  source 1..17: mol_type = other DNA
gggaagtcaccgtggaa

SEQ ID NO: 171615 - DNA, 17 bp, synthetic construct
  source 1..17: mol_type = other DNA
tgggaagtcaccgtgga

SEQ ID NO: 171616 - DNA, 17 bp, synthetic construct
  source 1..17: mol_type = other DNA
gtgggaagtcaccgtgg

SEQ ID NO: 171617 - DNA, 17 bp, synthetic construct
  source 1..17: mol_type = other DNA
tgtgggaagtcaccgtg

SEQ ID NO: 171618 - DNA, 17 bp, synthetic construct
  source 1..17: mol_type = other DNA
gtgtgggaagtcaccgt

SEQ ID NO: 171619 - DNA, 17 bp, synthetic construct
  source 1..17: mol_type = other DNA
ggtgtgggaagtcaccg

SEQ ID NO: 171620 - DNA, 17 bp, synthetic construct
  source 1..17: mol_type = other DNA
gggtgtgggaagtcacc

SEQ ID NO: 171621 - DNA, 17 bp, synthetic construct
  source 1..17: mol_type = other DNA
ggggtgtgggaagtcac

SEQ ID NO: 171622 - DNA, 17 bp, synthetic construct
  source 1..17: mol_type = other DNA
tggggtgtgggaagtca

SEQ ID NO: 171623 - DNA, 17 bp, synthetic construct
  source 1..17: mol_type = other DNA
ctggggtgtgggaagtc

SEQ ID NO: 171624 - DNA, 17 bp, synthetic construct
  source 1..17: mol_type = other DNA
gctggggtgtgggaagt

SEQ ID NO: 171625 - DNA, 17 bp, synthetic construct
  source 1..17: mol_type = other DNA
tgctggggtgtgggaag

SEQ ID NO: 171626 - DNA, 17 bp, synthetic construct
  source 1..17: mol_type = other DNA
ctgctggggtgtgggaa

SEQ ID NO: 171627 - DNA, 17 bp, synthetic construct
  source 1..17: mol_type = other DNA
gctgctggggtgtggga

SEQ ID NO: 171628 - DNA, 17 bp, synthetic construct
  source 1..17: mol_type = other DNA
tgctgctggggtgtggg

SEQ ID NO: 171629 - DNA, 17 bp, synthetic construct
  source 1..17: mol_type = other DNA
ttgctgctggggtgtgg

SEQ ID NO: 171630 - DNA, 17 bp, synthetic construct
  source 1..17: mol_type = other DNA
gttgctgctggggtgtg

SEQ ID NO: 171631 - DNA, 17 bp, synthetic construct
  source 1..17: mol_type = other DNA
ggttgctgctggggtgt

SEQ ID NO: 171632 - DNA, 17 bp, synthetic construct
  source 1..17: mol_type = other DNA
tggttgctgctggggtg

SEQ ID NO: 171633 - DNA, 17 bp, synthetic construct
  source 1..17: mol_type = other DNA
gtggttgctgctggggt

SEQ ID NO: 171634 - DNA, 17 bp, synthetic construct
  source 1..17: mol_type = other DNA
ggtggttgctgctgggg

SEQ ID NO: 171635 - DNA, 17 bp, synthetic construct
  source 1..17: mol_type = other DNA
tggtggttgctgctggg

SEQ ID NO: 171636 - DNA, 17 bp, synthetic construct
  source 1..17: mol_type = other DNA
ctggtggttgctgctgg

SEQ ID NO: 171637 - DNA, 17 bp, synthetic construct
  source 1..17: mol_type = other DNA
actggtggttgctgctg

SEQ ID NO: 171638 - DNA, 17 bp, synthetic construct
  source 1..17: mol_type = other DNA
tactggtggttgctgct

SEQ ID NO: 171639 - DNA, 17 bp, synthetic construct
  source 1..17: mol_type = other DNA
gtactggtggttgctgc

SEQ ID NO: 171640 - DNA, 17 bp, synthetic construct
  source 1..17: mol_type = other DNA
ggtactggtggttgctg

SEQ ID NO: 171641 - DNA, 17 bp, synthetic construct
  source 1..17: mol_type = other DNA
tggtactggtggttgct

SEQ ID NO: 171642 - DNA, 17 bp, synthetic construct
  source 1..17: mol_type = other DNA
gtggtactggtggttgc

SEQ ID NO: 171643 - DNA, 17 bp, synthetic construct
  source 1..17: mol_type = other DNA
ggtggtactggtggttg

SEQ ID NO: 171644 - DNA, 17 bp, synthetic construct
  source 1..17: mol_type = other DNA
gggtggtactggtggtt

SEQ ID NO: 171645 - DNA, 17 bp, synthetic construct
  source 1..17: mol_type = other DNA
tgggtggtactggtggt

SEQ ID NO: 171646 - DNA, 17 bp, synthetic construct
  source 1..17: mol_type = other DNA
ctgggtggtactggtgg

SEQ ID NO: 171647 - DNA, 17 bp, synthetic construct
  source 1..17: mol_type = other DNA
gctgggtggtactggtg

SEQ ID NO: 171648 - DNA, 17 bp, synthetic construct
  source 1..17: mol_type = other DNA
tgctgggtggtactggt

SEQ ID NO: 171649 - DNA, 17 bp, synthetic construct
  source 1..17: mol_type = other DNA
gtgctgggtggtactgg

SEQ ID NO: 171650 - DNA, 17 bp, synthetic construct
  source 1..17: mol_type = other DNA
agtgctgggtggtactg

SEQ ID NO: 171651 - DNA, 17 bp, synthetic construct
  source 1..17: mol_type = other DNA
gagtgctgggtggtact

SEQ ID NO: 171652 - DNA, 17 bp, synthetic construct
  source 1..17: mol_type = other DNA
cgagtgctgggtggtac

SEQ ID NO: 171653 - DNA, 17 bp, synthetic construct
  source 1..17: mol_type = other DNA
tcgagtgctgggtggta

SEQ ID NO: 171654 - DNA, 17 bp, synthetic construct
  source 1..17: mol_type = other DNA
gtcgagtgctgggtggt

SEQ ID NO: 171655 - DNA, 17 bp, synthetic construct
  source 1..17: mol_type = other DNA
agtcgagtgctgggtgg

SEQ ID NO: 171656 - DNA, 17 bp, synthetic construct
  source 1..17: mol_type = other DNA
gagtcgagtgctgggtg

SEQ ID NO: 171657 - DNA, 17 bp, synthetic construct
  source 1..17: mol_type = other DNA
ggagtcgagtgctgggt

SEQ ID NO: 171658 - DNA, 17 bp, synthetic construct
  source 1..17: mol_type = other DNA
tggagtcgagtgctggg

SEQ ID NO: 171659 - DNA, 17 bp, synthetic construct
  source 1..17: mol_type = other DNA
ctggagtcgagtgctgg

SEQ ID NO: 171660 - DNA, 17 bp, synthetic construct
  source 1..17: mol_type = other DNA
gctggagtcgagtgctg

SEQ ID NO: 171661 - DNA, 17 bp, synthetic construct
  source 1..17: mol_type = other DNA
ggctggagtcgagtgct

SEQ ID NO: 171662 - DNA, 17 bp, synthetic construct
  source 1..17: mol_type = other DNA
gggctggagtcgagtgc

SEQ ID NO: 171663 - DNA, 17 bp, synthetic construct
  source 1..17: mol_type = other DNA
agggctggagtcgagtg

SEQ ID NO: 171664 - DNA, 17 bp, synthetic construct
  source 1..17: mol_type = other DNA
cagggctggagtcgagt

SEQ ID NO: 171665 - DNA, 17 bp, synthetic construct
  source 1..17: mol_type = other DNA
acagggctggagtcgag

SEQ ID NO: 171666 - DNA, 17 bp, synthetic construct
  source 1..17: mol_type = other DNA
gacagggctggagtcga

SEQ ID NO: 171667 - DNA, 17 bp, synthetic construct
  source 1..17: mol_type = other DNA
ggacagggctggagtcg

SEQ ID NO: 171668 - DNA, 17 bp, synthetic construct
  source 1..17: mol_type = other DNA
tggacagggctggagtc

SEQ ID NO: 171669 - DNA, 17 bp, synthetic construct
  source 1..17: mol_type = other DNA
ctggacagggctggagt

SEQ ID NO: 171670 - DNA, 17 bp, synthetic construct
  source 1..17: mol_type = other DNA
gctggacagggctggag

SEQ ID NO: 171671 - DNA, 17 bp, synthetic construct
  source 1..17: mol_type = other DNA
ggctggacagggctgga

SEQ ID NO: 171672 - DNA, 17 bp, synthetic construct
  source 1..17: mol_type = other DNA
gggctggacagggctgg

SEQ ID NO: 171673 - DNA, 17 bp, synthetic construct
  source 1..17: mol_type = other DNA
agggctggacagggctg

SEQ ID NO: 171674 - DNA, 17 bp, synthetic construct
  source 1..17: mol_type = other DNA
gagggctggacagggct

SEQ ID NO: 171675 - DNA, 17 bp, synthetic construct
  source 1..17: mol_type = other DNA
tgagggctggacagggc

SEQ ID NO: 171676 - DNA, 17 bp, synthetic construct
  source 1..17: mol_type = other DNA
gtgagggctggacaggg

SEQ ID NO: 171677 - DNA, 17 bp, synthetic construct
  source 1..17: mol_type = other DNA
ggtgagggctggacagg

SEQ ID NO: 171678 - DNA, 17 bp, synthetic construct
  source 1..17: mol_type = other DNA
gggtgagggctggacag

SEQ ID NO: 171679 - DNA, 17 bp, synthetic construct
  source 1..17: mol_type = other DNA
agggtgagggctggaca

SEQ ID NO: 171680 - DNA, 17 bp, synthetic construct
  source 1..17: mol_type = other DNA
tagggtgagggctggac

SEQ ID NO: 171681 - DNA, 17 bp, synthetic construct
  source 1..17: mol_type = other DNA
ctagggtgagggctgga

SEQ ID NO: 171682 - DNA, 17 bp, synthetic construct
  source 1..17: mol_type = other DNA
gctagggtgagggctgg

SEQ ID NO: 171683 - DNA, 17 bp, synthetic construct
  source 1..17: mol_type = other DNA
tgctagggtgagggctg

SEQ ID NO: 171684 - DNA, 17 bp, synthetic construct
  source 1..17: mol_type = other DNA
ctgctagggtgagggct

SEQ ID NO: 171685 - DNA, 17 bp, synthetic construct
  source 1..17: mol_type = other DNA
gctgctagggtgagggc

SEQ ID NO: 171686 - DNA, 17 bp, synthetic construct
  source 1..17: mol_type = other DNA
tgctgctagggtgaggg

SEQ ID NO: 171687 - DNA, 17 bp, synthetic construct
  source 1..17: mol_type = other DNA
ctgctgctagggtgagg

SEQ ID NO: 171688 - DNA, 17 bp, synthetic construct
  source 1..17: mol_type = other DNA
cctgctgctagggtgag

SEQ ID NO: 171689 - DNA, 17 bp, synthetic construct
  source 1..17: mol_type = other DNA
tcctgctgctagggtga

SEQ ID NO: 171690 - DNA, 17 bp, synthetic construct
  source 1..17: mol_type = other DNA
gtcctgctgctagggtg

SEQ ID NO: 171691 - DNA, 17 bp, synthetic construct
  source 1..17: mol_type = other DNA
ggtcctgctgctagggt

SEQ ID NO: 171692 - DNA, 17 bp, synthetic construct
  source 1..17: mol_type = other DNA
tggtcctgctgctaggg

SEQ ID NO: 171693 - DNA, 17 bp, synthetic construct
  source 1..17: mol_type = other DNA
gtggtcctgctgctagg

SEQ ID NO: 171694 - DNA, 17 bp, synthetic construct
  source 1..17: mol_type = other DNA
ggtggtcctgctgctag

SEQ ID NO: 171695 - DNA, 17 bp, synthetic construct
  source 1..17: mol_type = other DNA
cggtggtcctgctgcta

SEQ ID NO: 171696 - DNA, 17 bp, synthetic construct
  source 1..17: mol_type = other DNA
tcggtggtcctgctgct

SEQ ID NO: 171697 - DNA, 17 bp, synthetic construct
  source 1..17: mol_type = other DNA
ctcggtggtcctgctgc

SEQ ID NO: 171698 - DNA, 17 bp, synthetic construct
  source 1..17: mol_type = other DNA
actcggtggtcctgctg

SEQ ID NO: 171699 - DNA, 17 bp, synthetic construct
  source 1..17: mol_type = other DNA
gactcggtggtcctgct

SEQ ID NO: 171700 - DNA, 17 bp, synthetic construct
  source 1..17: mol_type = other DNA
tgactcggtggtcctgc

SEQ ID NO: 171701 - DNA, 17 bp, synthetic construct
  source 1..17: mol_type = other DNA
gtgactcggtggtcctg

SEQ ID NO: 171702 - DNA, 17 bp, synthetic construct
  source 1..17: mol_type = other DNA
ggtgactcggtggtcct

SEQ ID NO: 171703 - DNA, 17 bp, synthetic construct
  source 1..17: mol_type = other DNA
gggtgactcggtggtcc

SEQ ID NO: 171704 - DNA, 17 bp, synthetic construct
  source 1..17: mol_type = other DNA
ggggtgactcggtggtc

SEQ ID NO: 171705 - DNA, 17 bp, synthetic construct
  source 1..17: mol_type = other DNA
gggggtgactcggtggt

SEQ ID NO: 171706 - DNA, 17 bp, synthetic construct
  source 1..17: mol_type = other DNA
agggggtgactcggtgg

SEQ ID NO: 171707 - DNA, 17 bp, synthetic construct
  source 1..17: mol_type = other DNA
aagggggtgactcggtg

SEQ ID NO: 171708 - DNA, 17 bp, synthetic construct
  source 1..17: mol_type = other DNA
gaagggggtgactcggt

SEQ ID NO: 171709 - DNA, 17 bp, synthetic construct
  source 1..17: mol_type = other DNA
agaagggggtgactcgg

SEQ ID NO: 171710 - DNA, 17 bp, synthetic construct
  source 1..17: mol_type = other DNA
gagaagggggtgactcg

SEQ ID NO: 171711 - DNA, 17 bp, synthetic construct
  source 1..17: mol_type = other DNA
ggagaagggggtgactc

SEQ ID NO: 171712 - DNA, 17 bp, synthetic construct
  source 1..17: mol_type = other DNA
tggagaagggggtgact

SEQ ID NO: 171713 - DNA, 17 bp, synthetic construct
  source 1..17: mol_type = other DNA
ctggagaagggggtgac

SEQ ID NO: 171714 - DNA, 17 bp, synthetic construct
  source 1..17: mol_type = other DNA
cctggagaagggggtga

SEQ ID NO: 171715 - DNA, 17 bp, synthetic construct
  source 1..17: mol_type = other DNA
ccctggagaagggggtg

SEQ ID NO: 171716 - DNA, 17 bp, synthetic construct
  source 1..17: mol_type = other DNA
tccctggagaagggggt

SEQ ID NO: 171717 - DNA, 17 bp, synthetic construct
  source 1..17: mol_type = other DNA
gtccctggagaaggggg

SEQ ID NO: 171718 - DNA, 17 bp, synthetic construct
  source 1..17: mol_type = other DNA
cgtccctggagaagggg

SEQ ID NO: 171719 - DNA, 17 bp, synthetic construct
  source 1..17: mol_type = other DNA
tcgtccctggagaaggg

SEQ ID NO: 171720 - DNA, 17 bp, synthetic construct
  source 1..17: mol_type = other DNA
gtcgtccctggagaagg

SEQ ID NO: 171721 - DNA, 17 bp, synthetic construct
  source 1..17: mol_type = other DNA
ggtcgtccctggagaag

SEQ ID NO: 171722 - DNA, 17 bp, synthetic construct
  source 1..17: mol_type = other DNA
tggtcgtccctggagaa

SEQ ID NO: 171723 - DNA, 17 bp, synthetic construct
  source 1..17: mol_type = other DNA
gtggtcgtccctggaga

SEQ ID NO: 171724 - DNA, 17 bp, synthetic construct
  source 1..17: mol_type = other DNA
ggtggtcgtccctggag

SEQ ID NO: 171725 - DNA, 17 bp, synthetic construct
  source 1..17: mol_type = other DNA
gggtggtcgtccctgga

SEQ ID NO: 171726 - DNA, 17 bp, synthetic construct
  source 1..17: mol_type = other DNA
ggggtggtcgtccctgg

SEQ ID NO: 171727 - DNA, 17 bp, synthetic construct
  source 1..17: mol_type = other DNA
cggggtggtcgtccctg

SEQ ID NO: 171728 - DNA, 17 bp, synthetic construct
  source 1..17: mol_type = other DNA
ccggggtggtcgtccct

SEQ ID NO: 171729 - DNA, 17 bp, synthetic construct
  source 1..17: mol_type = other DNA
cccggggtggtcgtccc

SEQ ID NO: 171730 - DNA, 17 bp, synthetic construct
  source 1..17: mol_type = other DNA
gcccggggtggtcgtcc

SEQ ID NO: 171731 - DNA, 17 bp, synthetic construct
  source 1..17: mol_type = other DNA
ggcccggggtggtcgtc

SEQ ID NO: 171732 - DNA, 17 bp, synthetic construct
  source 1..17: mol_type = other DNA
tggcccggggtggtcgt

SEQ ID NO: 171733 - DNA, 17 bp, synthetic construct
  source 1..17: mol_type = other DNA
gtggcccggggtggtcg

SEQ ID NO: 171734 - DNA, 17 bp, synthetic construct
  source 1..17: mol_type = other DNA
tgtggcccggggtggtc

SEQ ID NO: 171735 - DNA, 17 bp, synthetic construct
  source 1..17: mol_type = other DNA
gtgtggcccggggtggt

SEQ ID NO: 171736 - DNA, 17 bp, synthetic construct
  source 1..17: mol_type = other DNA
ggtgtggcccggggtgg

SEQ ID NO: 171737 - DNA, 17 bp, synthetic construct
  source 1..17: mol_type = other DNA
tggtgtggcccggggtg

SEQ ID NO: 171738 - DNA, 17 bp, synthetic construct
  source 1..17: mol_type = other DNA
ctggtgtggcccggggt

SEQ ID NO: 171739 - DNA, 17 bp, synthetic construct
  source 1..17: mol_type = other DNA
cctggtgtggcccgggg

SEQ ID NO: 171740 - DNA, 17 bp, synthetic construct
  source 1..17: mol_type = other DNA
ccctggtgtggcccggg

SEQ ID NO: 171741 - DNA, 17 bp, synthetic construct
  source 1..17: mol_type = other DNA
cccctggtgtggcccgg

SEQ ID NO: 171742 - DNA, 17 bp, synthetic construct
  source 1..17: mol_type = other DNA
gcccctggtgtggcccg

SEQ ID NO: 171743 - DNA, 17 bp, synthetic construct
  source 1..17: mol_type = other DNA
tgcccctggtgtggccc

SEQ ID NO: 171744 - DNA, 17 bp, synthetic construct
  source 1..17: mol_type = other DNA
gtgcccctggtgtggcc

SEQ ID NO: 171745 - DNA, 17 bp, synthetic construct
  source 1..17: mol_type = other DNA
ggtgcccctggtgtggc

SEQ ID NO: 171746 - DNA, 17 bp, synthetic construct
  source 1..17: mol_type = other DNA
aggtgcccctggtgtgg

SEQ ID NO: 171747 - DNA, 17 bp, synthetic construct
  source 1..17: mol_type = other DNA
gaggtgcccctggtgtg

SEQ ID NO: 171748 - DNA, 17 bp, synthetic construct
  source 1..17: mol_type = other DNA
ggaggtgcccctggtgt

SEQ ID NO: 171749 - DNA, 17 bp, synthetic construct
  source 1..17: mol_type = other DNA
tggaggtgcccctggtg

SEQ ID NO: 171750 - DNA, 17 bp, synthetic construct
  source 1..17: mol_type = other DNA
ctggaggtgcccctggt

SEQ ID NO: 171751 - DNA, 17 bp, synthetic construct
  source 1..17: mol_type = other DNA
cctggaggtgcccctgg

SEQ ID NO: 171752 - DNA, 17 bp, synthetic construct
  source 1..17: mol_type = other DNA
tcctggaggtgcccctg

SEQ ID NO: 171753 - DNA, 17 bp, synthetic construct
  source 1..17: mol_type = other DNA
gtcctggaggtgcccct

SEQ ID NO: 171754 - DNA, 17 bp, synthetic construct
  source 1..17: mol_type = other DNA
ggtcctggaggtgcccc

SEQ ID NO: 171755 - DNA, 17 bp, synthetic construct
  source 1..17: mol_type = other DNA
tggtcctggaggtgccc

SEQ ID NO: 171756 - DNA, 17 bp, synthetic construct
  source 1..17: mol_type = other DNA
gtggtcctggaggtgcc

SEQ ID NO: 171757 - DNA, 17 bp, synthetic construct
  source 1..17: mol_type = other DNA
tgtggtcctggaggtgc

SEQ ID NO: 171758 - DNA, 17 bp, synthetic construct
  source 1..17: mol_type = other DNA
ctgtggtcctggaggtg

SEQ ID NO: 171759 - DNA, 17 bp, synthetic construct
  source 1..17: mol_type = other DNA
gctgtggtcctggaggt

SEQ ID NO: 171760 - DNA, 17 bp, synthetic construct
  source 1..17: mol_type = other DNA
ggctgtggtcctggagg

SEQ ID NO: 171761 - DNA, 17 bp, synthetic construct
  source 1..17: mol_type = other DNA
tggctgtggtcctggag

SEQ ID NO: 171762 - DNA, 17 bp, synthetic construct
  source 1..17: mol_type = other DNA
gtggctgtggtcctgga

SEQ ID NO: 171763 - DNA, 17 bp, synthetic construct
  source 1..17: mol_type = other DNA
tgtggctgtggtcctgg

SEQ ID NO: 171764 - DNA, 17 bp, synthetic construct
  source 1..17: mol_type = other DNA
ctgtggctgtggtcctg

SEQ ID NO: 171765 - DNA, 17 bp, synthetic construct
  source 1..17: mol_type = other DNA
gctgtggctgtggtcct

SEQ ID NO: 171766 - DNA, 17 bp, synthetic construct
  source 1..17: mol_type = other DNA
ggctgtggctgtggtcc

SEQ ID NO: 171767 - DNA, 17 bp, synthetic construct
  source 1..17: mol_type = other DNA
tggctgtggctgtggtc

SEQ ID NO: 171768 - DNA, 17 bp, synthetic construct
  source 1..17: mol_type = other DNA
gtggctgtggctgtggt

SEQ ID NO: 171769 - DNA, 17 bp, synthetic construct
  source 1..17: mol_type = other DNA
tgtggctgtggctgtgg

SEQ ID NO: 171770 - DNA, 17 bp, synthetic construct
  source 1..17: mol_type = other DNA
gtgtggctgtggctgtg

SEQ ID NO: 171771 - DNA, 17 bp, synthetic construct
  source 1..17: mol_type = other DNA
ggtgtggctgtggctgt

SEQ ID NO: 171772 - DNA, 17 bp, synthetic construct
  source 1..17: mol_type = other DNA
gggtgtggctgtggctg

SEQ ID NO: 171773 - DNA, 17 bp, synthetic construct
  source 1..17: mol_type = other DNA
tgggtgtggctgtggct

SEQ ID NO: 171774 - DNA, 17 bp, synthetic construct
  source 1..17: mol_type = other DNA
ctgggtgtggctgtggc

SEQ ID NO: 171775 - DNA, 17 bp, synthetic construct
  source 1..17: mol_type = other DNA
gctgggtgtggctgtgg

SEQ ID NO: 171776 - DNA, 17 bp, synthetic construct
  source 1..17: mol_type = other DNA
tgctgggtgtggctgtg

SEQ ID NO: 171777 - DNA, 17 bp, synthetic construct
  source 1..17: mol_type = other DNA
ttgctgggtgtggctgt

SEQ ID NO: 171778 - DNA, 17 bp, synthetic construct
  source 1..17: mol_type = other DNA
cttgctgggtgtggctg

SEQ ID NO: 171779 - DNA, 17 bp, synthetic construct
  source 1..17: mol_type = other DNA
tcttgctgggtgtggct

SEQ ID NO: 171780 - DNA, 17 bp, synthetic construct
  source 1..17: mol_type = other DNA
gtcttgctgggtgtggc

SEQ ID NO: 171781 - DNA, 17 bp, synthetic construct
  source 1..17: mol_type = other DNA
ggtcttgctgggtgtgg

SEQ ID NO: 171782 - DNA, 17 bp, synthetic construct
  source 1..17: mol_type = other DNA
gggtcttgctgggtgtg

SEQ ID NO: 171783 - DNA, 17 bp, synthetic construct
  source 1..17: mol_type = other DNA
cgggtcttgctgggtgt

SEQ ID NO: 171784 - DNA, 17 bp, synthetic construct
  source 1..17: mol_type = other DNA
gcgggtcttgctgggtg

SEQ ID NO: 171785 - DNA, 17 bp, synthetic construct
  source 1..17: mol_type = other DNA
tgcgggtcttgctgggt

SEQ ID NO: 171786 - DNA, 17 bp, synthetic construct
  source 1..17: mol_type = other DNA
gtgcgggtcttgctggg

SEQ ID NO: 171787 - DNA, 17 bp, synthetic construct
  source 1..17: mol_type = other DNA
ggtgcgggtcttgctgg

SEQ ID NO: 171788 - DNA, 17 bp, synthetic construct
  source 1..17: mol_type = other DNA
aggtgcgggtcttgctg

SEQ ID NO: 171789 - DNA, 17 bp, synthetic construct
  source 1..17: mol_type = other DNA
gaggtgcgggtcttgct

SEQ ID NO: 171790 - DNA, 17 bp, synthetic construct
  source 1..17: mol_type = other DNA
cgaggtgcgggtcttgc

SEQ ID NO: 171791 - DNA, 17 bp, synthetic construct
  source 1..17: mol_type = other DNA
tcgaggtgcgggtcttg

SEQ ID NO: 171792 - DNA, 17 bp, synthetic construct
  source 1..17: mol_type = other DNA
gtcgaggtgcgggtctt

SEQ ID NO: 171793 - DNA, 17 bp, synthetic construct
  source 1..17: mol_type = other DNA
ggtcgaggtgcgggtct

SEQ ID NO: 171794 - DNA, 17 bp, synthetic construct
  source 1..17: mol_type = other DNA
gggtcgaggtgcgggtc

SEQ ID NO: 171795 - DNA, 17 bp, synthetic construct
  source 1..17: mol_type = other DNA
agggtcgaggtgcgggt

SEQ ID NO: 171796 - DNA, 17 bp, synthetic construct
  source 1..17: mol_type = other DNA
cagggtcgaggtgcggg

SEQ ID NO: 171797 - DNA, 17 bp, synthetic construct
  source 1..17: mol_type = other DNA
gcagggtcgaggtgcgg

SEQ ID NO: 171798 - DNA, 17 bp, synthetic construct
  source 1..17: mol_type = other DNA
agcagggtcgaggtgcg

SEQ ID NO: 171799 - DNA, 17 bp, synthetic construct
  source 1..17: mol_type = other DNA
cagcagggtcgaggtgc

SEQ ID NO: 171800 - DNA, 17 bp, synthetic construct
  source 1..17: mol_type = other DNA
gcagcagggtcgaggtg

SEQ ID NO: 171801 - DNA, 17 bp, synthetic construct
  source 1..17: mol_type = other DNA
ggcagcagggtcgaggt

SEQ ID NO: 171802 - DNA, 17 bp, synthetic construct
  source 1..17: mol_type = other DNA
gggcagcagggtcgagg

SEQ ID NO: 171803 - DNA, 17 bp, synthetic construct
  source 1..17: mol_type = other DNA
tgggcagcagggtcgag

SEQ ID NO: 171804 - DNA, 17 bp, synthetic construct
  source 1..17: mol_type = other DNA
ctgggcagcagggtcga

SEQ ID NO: 171805 - DNA, 17 bp, synthetic construct
  source 1..17: mol_type = other DNA
gctgggcagcagggtcg

SEQ ID NO: 171806 - DNA, 17 bp, synthetic construct
  source 1..17: mol_type = other DNA
tgctgggcagcagggtc

SEQ ID NO: 171807 - DNA, 17 bp, synthetic construct
  source 1..17: mol_type = other DNA
ctgctgggcagcagggt

SEQ ID NO: 171808 - DNA, 17 bp, synthetic construct
  source 1..17: mol_type = other DNA
gctgctgggcagcaggg

SEQ ID NO: 171809 - DNA, 17 bp, synthetic construct
  source 1..17: mol_type = other DNA
ggctgctgggcagcagg

SEQ ID NO: 171810 - DNA, 17 bp, synthetic construct
  source 1..17: mol_type = other DNA
gggctgctgggcagcag

SEQ ID NO: 171811 - DNA, 17 bp, synthetic construct
  source 1..17: mol_type = other DNA
ggggctgctgggcagca

SEQ ID NO: 171812 - DNA, 17 bp, synthetic construct
  source 1..17: mol_type = other DNA
tggggctgctgggcagc

SEQ ID NO: 171813 - DNA, 17 bp, synthetic construct
  source 1..17: mol_type = other DNA
gtggggctgctgggcag

SEQ ID NO: 171814 - DNA, 17 bp, synthetic construct
  source 1..17: mol_type = other DNA
tgtggggctgctgggca

SEQ ID NO: 171815 - DNA, 17 bp, synthetic construct
  source 1..17: mol_type = other DNA
atgtggggctgctgggc

SEQ ID NO: 171816 - DNA, 17 bp, synthetic construct
  source 1..17: mol_type = other DNA
gatgtggggctgctggg

SEQ ID NO: 171817 - DNA, 17 bp, synthetic construct
  source 1..17: mol_type = other DNA
cgatgtggggctgctgg

SEQ ID NO: 171818 - DNA, 17 bp, synthetic construct
  source 1..17: mol_type = other DNA
ccgatgtggggctgctg

SEQ ID NO: 171819 - DNA, 17 bp, synthetic construct
  source 1..17: mol_type = other DNA
gccgatgtggggctgct

SEQ ID NO: 171820 - DNA, 17 bp, synthetic construct
  source 1..17: mol_type = other DNA
ggccgatgtggggctgc

SEQ ID NO: 171821 - DNA, 17 bp, synthetic construct
  source 1..17: mol_type = other DNA
gggccgatgtggggctg

SEQ ID NO: 171822 - DNA, 17 bp, synthetic construct
  source 1..17: mol_type = other DNA
ggggccgatgtggggct

SEQ ID NO: 171823 - DNA, 17 bp, synthetic construct
  source 1..17: mol_type = other DNA
gggggccgatgtggggc

SEQ ID NO: 171824 - DNA, 17 bp, synthetic construct
  source 1..17: mol_type = other DNA
tgggggccgatgtgggg

SEQ ID NO: 171825 - DNA, 17 bp, synthetic construct
  source 1..17: mol_type = other DNA
atgggggccgatgtggg

SEQ ID NO: 171826 - DNA, 17 bp, synthetic construct
  source 1..17: mol_type = other DNA
tatgggggccgatgtgg

SEQ ID NO: 171827 - DNA, 17 bp, synthetic construct
  source 1..17: mol_type = other DNA
ttatgggggccgatgtg

SEQ ID NO: 171828 - DNA, 17 bp, synthetic construct
  source 1..17: mol_type = other DNA
gttatgggggccgatgt

SEQ ID NO: 171829 - DNA, 17 bp, synthetic construct
  source 1..17: mol_type = other DNA
ggttatgggggccgatg

SEQ ID NO: 171830 - DNA, 17 bp, synthetic construct
  source 1..17: mol_type = other DNA
tggttatgggggccgat

SEQ ID NO: 171831 - DNA, 17 bp, synthetic construct
  source 1..17: mol_type = other DNA
gtggttatgggggccga

SEQ ID NO: 171832 - DNA, 17 bp, synthetic construct
  source 1..17: mol_type = other DNA
cgtggttatgggggccg

SEQ ID NO: 171833 - DNA, 17 bp, synthetic construct
  source 1..17: mol_type = other DNA
ccgtggttatgggggcc

SEQ ID NO: 171834 - DNA, 17 bp, synthetic construct
  source 1..17: mol_type = other DNA
accgtggttatgggggc

SEQ ID NO: 171835 - DNA, 17 bp, synthetic construct
  source 1..17: mol_type = other DNA
caccgtggttatggggg

SEQ ID NO: 171836 - DNA, 17 bp, synthetic construct
  source 1..17: mol_type = other DNA
ccaccgtggttatgggg

SEQ ID NO: 171837 - DNA, 17 bp, synthetic construct
  source 1..17: mol_type = other DNA
accaccgtggttatggg

SEQ ID NO: 171838 - DNA, 17 bp, synthetic construct
  source 1..17: mol_type = other DNA
caccaccgtggttatgg

SEQ ID NO: 171839 - DNA, 17 bp, synthetic construct
  source 1..17: mol_type = other DNA
tcaccaccgtggttatg

SEQ ID NO: 171840 - DNA, 17 bp, synthetic construct
  source 1..17: mol_type = other DNA
gtcaccaccgtggttat

SEQ ID NO: 171841 - DNA, 17 bp, synthetic construct
  source 1..17: mol_type = other DNA
ggtcaccaccgtggtta

SEQ ID NO: 171842 - DNA, 17 bp, synthetic construct
  source 1..17: mol_type = other DNA
tggtcaccaccgtggtt

SEQ ID NO: 171843 - DNA, 17 bp, synthetic construct
  source 1..17: mol_type = other DNA
gtggtcaccaccgtggt

SEQ ID NO: 171844 - DNA, 17 bp, synthetic construct
  source 1..17: mol_type = other DNA
cgtggtcaccaccgtgg

SEQ ID NO: 171845 - DNA, 17 bp, synthetic construct
  source 1..17: mol_type = other DNA
ccgtggtcaccaccgtg

SEQ ID NO: 171846 - DNA, 17 bp, synthetic construct
  source 1..17: mol_type = other DNA
cccgtggtcaccaccgt

SEQ ID NO: 171847 - DNA, 17 bp, synthetic construct
  source 1..17: mol_type = other DNA
gcccgtggtcaccaccg

SEQ ID NO: 171848 - DNA, 17 bp, synthetic construct
  source 1..17: mol_type = other DNA
agcccgtggtcaccacc

SEQ ID NO: 171849 - DNA, 17 bp, synthetic construct
  source 1..17: mol_type = other DNA
cagcccgtggtcaccac

SEQ ID NO: 171850 - DNA, 17 bp, synthetic construct
  source 1..17: mol_type = other DNA
acagcccgtggtcacca

SEQ ID NO: 171851 - DNA, 17 bp, synthetic construct
  source 1..17: mol_type = other DNA
cacagcccgtggtcacc

SEQ ID NO: 171852 - DNA, 17 bp, synthetic construct
  source 1..17: mol_type = other DNA
tcacagcccgtggtcac

SEQ ID NO: 171853 - DNA, 17 bp, synthetic construct
  source 1..17: mol_type = other DNA
ctcacagcccgtggtca

SEQ ID NO: 171854 - DNA, 17 bp, synthetic construct
  source 1..17: mol_type = other DNA
gctcacagcccgtggtc

SEQ ID NO: 171855 - DNA, 17 bp, synthetic construct
  source 1..17: mol_type = other DNA
ggctcacagcccgtggt

SEQ ID NO: 171856 - DNA, 17 bp, synthetic construct
  source 1..17: mol_type = other DNA
gggctcacagcccgtgg

SEQ ID NO: 171857 - DNA, 17 bp, synthetic construct
  source 1..17: mol_type = other DNA
ggggctcacagcccgtg

SEQ ID NO: 171858 - DNA, 17 bp, synthetic construct
  source 1..17: mol_type = other DNA
tggggctcacagcccgt

SEQ ID NO: 171859 - DNA, 17 bp, synthetic construct
  source 1..17: mol_type = other DNA
ctggggctcacagcccg

SEQ ID NO: 171860 - DNA, 17 bp, synthetic construct
  source 1..17: mol_type = other DNA
actggggctcacagccc

SEQ ID NO: 171861 - DNA, 17 bp, synthetic construct
  source 1..17: mol_type = other DNA
cactggggctcacagcc

SEQ ID NO: 171862 - DNA, 17 bp, synthetic construct
  source 1..17: mol_type = other DNA
acactggggctcacagc

SEQ ID NO: 171863 - DNA, 17 bp, synthetic construct
  source 1..17: mol_type = other DNA
cacactggggctcacag

SEQ ID NO: 171864 - DNA, 17 bp, synthetic construct
  source 1..17: mol_type = other DNA
gcacactggggctcaca

SEQ ID NO: 171865 - DNA, 17 bp, synthetic construct
  source 1..17: mol_type = other DNA
ggcacactggggctcac

SEQ ID NO: 171866 - DNA, 17 bp, synthetic construct
  source 1..17: mol_type = other DNA
aggcacactggggctca

SEQ ID NO: 171867 - DNA, 17 bp, synthetic construct
  source 1..17: mol_type = other DNA
caggcacactggggctc

SEQ ID NO: 171868 - DNA, 17 bp, synthetic construct
  source 1..17: mol_type = other DNA
ccaggcacactggggct

SEQ ID NO: 171869 - DNA, 17 bp, synthetic construct
  source 1..17: mol_type = other DNA
accaggcacactggggc

SEQ ID NO: 171870 - DNA, 17 bp, synthetic construct
  source 1..17: mol_type = other DNA
gaccaggcacactgggg

SEQ ID NO: 171871 - DNA, 17 bp, synthetic construct
  source 1..17: mol_type = other DNA
tgaccaggcacactggg

SEQ ID NO: 171872 - DNA, 17 bp, synthetic construct
  source 1..17: mol_type = other DNA
ctgaccaggcacactgg

SEQ ID NO: 171873 - DNA, 17 bp, synthetic construct
  source 1..17: mol_type = other DNA
tctgaccaggcacactg

SEQ ID NO: 171874 - DNA, 17 bp, synthetic construct
  source 1..17: mol_type = other DNA
ctctgaccaggcacact

SEQ ID NO: 171875 - DNA, 17 bp, synthetic construct
  source 1..17: mol_type = other DNA
actctgaccaggcacac

SEQ ID NO: 171876 - DNA, 17 bp, synthetic construct
  source 1..17: mol_type = other DNA
cactctgaccaggcaca

SEQ ID NO: 171877 - DNA, 17 bp, synthetic construct
  source 1..17: mol_type = other DNA
ccactctgaccaggcac

SEQ ID NO: 171878 - DNA, 17 bp, synthetic construct
  source 1..17: mol_type = other DNA
gccactctgaccaggca

SEQ ID NO: 171879 - DNA, 17 bp, synthetic construct
  source 1..17: mol_type = other DNA
agccactctgaccaggc

SEQ ID NO: 171880 - DNA, 17 bp, synthetic construct
  source 1..17: mol_type = other DNA
cagccactctgaccagg

SEQ ID NO: 171881 - DNA, 17 bp, synthetic construct
  source 1..17: mol_type = other DNA
ccagccactctgaccag

SEQ ID NO: 171882 - DNA, 17 bp, synthetic construct
  source 1..17: mol_type = other DNA
tccagccactctgacca

SEQ ID NO: 171883 - DNA, 17 bp, synthetic construct
  source 1..17: mol_type = other DNA
gtccagccactctgacc

SEQ ID NO: 171884 - DNA, 17 bp, synthetic construct
  source 1..17: mol_type = other DNA
agtccagccactctgac

SEQ ID NO: 171885 - DNA, 17 bp, synthetic construct
  source 1..17: mol_type = other DNA
tagtccagccactctga

SEQ ID NO: 171886 - DNA, 17 bp, synthetic construct
  source 1..17: mol_type = other DNA
gtagtccagccactctg

SEQ ID NO: 171887 - DNA, 17 bp, synthetic construct
  source 1..17: mol_type = other DNA
tgtagtccagccactct

SEQ ID NO: 171888 - DNA, 17 bp, synthetic construct
  source 1..17: mol_type = other DNA
ctgtagtccagccactc

SEQ ID NO: 171889 - DNA, 17 bp, synthetic construct
  source 1..17: mol_type = other DNA
gctgtagtccagccact

SEQ ID NO: 171890 - DNA, 17 bp, synthetic construct
  source 1..17: mol_type = other DNA
agctgtagtccagccac

SEQ ID NO: 171891 - DNA, 17 bp, synthetic construct
  source 1..17: mol_type = other DNA
tagctgtagtccagcca

SEQ ID NO: 171892 - DNA, 17 bp, synthetic construct
  source 1..17: mol_type = other DNA
gtagctgtagtccagcc

SEQ ID NO: 171893 - DNA, 17 bp, synthetic construct
  source 1..17: mol_type = other DNA
ggtagctgtagtccagc

SEQ ID NO: 171894 - DNA, 17 bp, synthetic construct
  source 1..17: mol_type = other DNA
gggtagctgtagtccag

SEQ ID NO: 171895 - DNA, 17 bp, synthetic construct
  source 1..17: mol_type = other DNA
ggggtagctgtagtcca

SEQ ID NO: 171896 - DNA, 17 bp, synthetic construct
  source 1..17: mol_type = other DNA
tggggtagctgtagtcc

SEQ ID NO: 171897 - DNA, 17 bp, synthetic construct
  source 1..17: mol_type = other DNA
atggggtagctgtagtc

SEQ ID NO: 171898 - DNA, 17 bp, synthetic construct
  source 1..17: mol_type = other DNA
catggggtagctgtagt

SEQ ID NO: 171899 - DNA, 17 bp, synthetic construct
  source 1..17: mol_type = other DNA
gcatggggtagctgtag

SEQ ID NO: 171900 - DNA, 17 bp, synthetic construct
  source 1..17: mol_type = other DNA
ggcatggggtagctgta

SEQ ID NO: 171901 - DNA, 17 bp, synthetic construct
  source 1..17: mol_type = other DNA
cggcatggggtagctgt

SEQ ID NO: 171902 - DNA, 17 bp, synthetic construct
  source 1..17: mol_type = other DNA
ccggcatggggtagctg

SEQ ID NO: 171903 - DNA, 17 bp, synthetic construct
  source 1..17: mol_type = other DNA
cccggcatggggtagct

SEQ ID NO: 171904 - DNA, 17 bp, synthetic construct
  source 1..17: mol_type = other DNA
ccccggcatggggtagc

SEQ ID NO: 171905 - DNA, 17 bp, synthetic construct
  source 1..17: mol_type = other DNA
gccccggcatggggtag

SEQ ID NO: 171906 - DNA, 17 bp, synthetic construct
  source 1..17: mol_type = other DNA
ggccccggcatggggta

SEQ ID NO: 171907 - DNA, 17 bp, synthetic construct
  source 1..17: mol_type = other DNA
gggccccggcatggggt

SEQ ID NO: 171908 - DNA, 17 bp, synthetic construct
  source 1..17: mol_type = other DNA
agggccccggcatgggg

SEQ ID NO: 171909 - DNA, 17 bp, synthetic construct
  source 1..17: mol_type = other DNA
gagggccccggcatggg

SEQ ID NO: 171910 - DNA, 17 bp, synthetic construct
  source 1..17: mol_type = other DNA
agagggccccggcatgg

SEQ ID NO: 171911 - DNA, 17 bp, synthetic construct
  source 1..17: mol_type = other DNA
cagagggccccggcatg

SEQ ID NO: 171912 - DNA, 17 bp, synthetic construct
  source 1..17: mol_type = other DNA
ccagagggccccggcat

SEQ ID NO: 171913 - DNA, 17 bp, synthetic construct
  source 1..17: mol_type = other DNA
gccagagggccccggca

SEQ ID NO: 171914 - DNA, 17 bp, synthetic construct
  source 1..17: mol_type = other DNA
cgccagagggccccggc

SEQ ID NO: 171915 - DNA, 17 bp, synthetic construct
  source 1..17: mol_type = other DNA
ccgccagagggccccgg

SEQ ID NO: 171916 - DNA, 17 bp, synthetic construct
  source 1..17: mol_type = other DNA
cccgccagagggccccg

SEQ ID NO: 171917 - DNA, 17 bp, synthetic construct
  source 1..17: mol_type = other DNA
ccccgccagagggcccc

SEQ ID NO: 171918 - DNA, 17 bp, synthetic construct
  source 1..17: mol_type = other DNA
tccccgccagagggccc

SEQ ID NO: 171919 - DNA, 17 bp, synthetic construct
  source 1..17: mol_type = other DNA
gtccccgccagagggcc

SEQ ID NO: 171920 - DNA, 17 bp, synthetic construct
  source 1..17: mol_type = other DNA
agtccccgccagagggc

SEQ ID NO: 171921 - DNA, 17 bp, synthetic construct
  source 1..17: mol_type = other DNA
aagtccccgccagaggg

SEQ ID NO: 171922 - DNA, 17 bp, synthetic construct
  source 1..17: mol_type = other DNA
aaagtccccgccagagg

SEQ ID NO: 171923 - DNA, 17 bp, synthetic construct
  source 1..17: mol_type = other DNA
caaagtccccgccagag

SEQ ID NO: 171924 - DNA, 17 bp, synthetic construct
  source 1..17: mol_type = other DNA
tcaaagtccccgccaga

SEQ ID NO: 171925 - DNA, 17 bp, synthetic construct
  source 1..17: mol_type = other DNA
gtcaaagtccccgccag

SEQ ID NO: 171926 - DNA, 17 bp, synthetic construct
  source 1..17: mol_type = other DNA
tgtcaaagtccccgcca

SEQ ID NO: 171927 - DNA, 17 bp, synthetic construct
  source 1..17: mol_type = other DNA
gtgtcaaagtccccgcc

SEQ ID NO: 171928 - DNA, 17 bp, synthetic construct
  source 1..17: mol_type = other DNA
ggtgtcaaagtccccgc

SEQ ID NO: 171929 - DNA, 17 bp, synthetic construct
  source 1..17: mol_type = other DNA
aggtgtcaaagtccccg

SEQ ID NO: 171930 - DNA, 17 bp, synthetic construct
  source 1..17: mol_type = other DNA
taggtgtcaaagtcccc

SEQ ID NO: 171931 - DNA, 17 bp, synthetic construct
  source 1..17: mol_type = other DNA
gtaggtgtcaaagtccc

SEQ ID NO: 171932 - DNA, 17 bp, synthetic construct
  source 1..17: mol_type = other DNA
agtaggtgtcaaagtcc

SEQ ID NO: 171933 - DNA, 17 bp, synthetic construct
  source 1..17: mol_type = other DNA
gagtaggtgtcaaagtc

SEQ ID NO: 171934 - DNA, 17 bp, synthetic construct
  source 1..17: mol_type = other DNA
ggagtaggtgtcaaagt

SEQ ID NO: 171935 - DNA, 17 bp, synthetic construct
  source 1..17: mol_type = other DNA
tggagtaggtgtcaaag

SEQ ID NO: 171936 - DNA, 17 bp, synthetic construct
  source 1..17: mol_type = other DNA
ttggagtaggtgtcaaa

SEQ ID NO: 171937 - DNA, 17 bp, synthetic construct
  source 1..17: mol_type = other DNA
gttggagtaggtgtcaa

SEQ ID NO: 171938 - DNA, 17 bp, synthetic construct
  source 1..17: mol_type = other DNA
tgttggagtaggtgtca

SEQ ID NO: 171939 - DNA, 17 bp, synthetic construct
  source 1..17: mol_type = other DNA
atgttggagtaggtgtc

SEQ ID NO: 171940 - DNA, 17 bp, synthetic construct
  source 1..17: mol_type = other DNA
gatgttggagtaggtgt

SEQ ID NO: 171941 - DNA, 17 bp, synthetic construct
  source 1..17: mol_type = other DNA
ggatgttggagtaggtg

SEQ ID NO: 171942 - DNA, 17 bp, synthetic construct
  source 1..17: mol_type = other DNA
cggatgttggagtaggt

SEQ ID NO: 171943 - DNA, 17 bp, synthetic construct
  source 1..17: mol_type = other DNA
acggatgttggagtagg

SEQ ID NO: 171944 - DNA, 17 bp, synthetic construct
  source 1..17: mol_type = other DNA
cacggatgttggagtag

SEQ ID NO: 171945 - DNA, 17 bp, synthetic construct
  source 1..17: mol_type = other DNA
gcacggatgttggagta

SEQ ID NO: 171946 - DNA, 17 bp, synthetic construct
  source 1..17: mol_type = other DNA
cgcacggatgttggagt

SEQ ID NO: 171947 - DNA, 17 bp, synthetic construct
  source 1..17: mol_type = other DNA
ccgcacggatgttggag

SEQ ID NO: 171948 - DNA, 17 bp, synthetic construct
  source 1..17: mol_type = other DNA
gccgcacggatgttgga

SEQ ID NO: 171949 - DNA, 17 bp, synthetic construct
  source 1..17: mol_type = other DNA
ggccgcacggatgttgg

SEQ ID NO: 171950 - DNA, 17 bp, synthetic construct
  source 1..17: mol_type = other DNA
cggccgcacggatgttg

SEQ ID NO: 171951 - DNA, 17 bp, synthetic construct
  source 1..17: mol_type = other DNA
ccggccgcacggatgtt

SEQ ID NO: 171952 - DNA, 17 bp, synthetic construct
  source 1..17: mol_type = other DNA
tccggccgcacggatgt

SEQ ID NO: 171953 - DNA, 17 bp, synthetic construct
  source 1..17: mol_type = other DNA
ctccggccgcacggatg

SEQ ID NO: 171954 - DNA, 17 bp, synthetic construct
  source 1..17: mol_type = other DNA
cctccggccgcacggat

SEQ ID NO: 171955 - DNA, 17 bp, synthetic construct
  source 1..17: mol_type = other DNA
ccctccggccgcacgga

SEQ ID NO: 171956 - DNA, 17 bp, synthetic construct
  source 1..17: mol_type = other DNA
cccctccggccgcacgg

SEQ ID NO: 171957 - DNA, 17 bp, synthetic construct
  source 1..17: mol_type = other DNA
gcccctccggccgcacg

SEQ ID NO: 171958 - DNA, 17 bp, synthetic construct
  source 1..17: mol_type = other DNA
tgcccctccggccgcac

SEQ ID NO: 171959 - DNA, 17 bp, synthetic construct
  source 1..17: mol_type = other DNA
ctgcccctccggccgca

SEQ ID NO: 171960 - DNA, 17 bp, synthetic construct
  source 1..17: mol_type = other DNA
actgcccctccggccgc

SEQ ID NO: 171961 - DNA, 17 bp, synthetic construct
  source 1..17: mol_type = other DNA
gactgcccctccggccg

SEQ ID NO: 171962 - DNA, 17 bp, synthetic construct
  source 1..17: mol_type = other DNA
agactgcccctccggcc

SEQ ID NO: 171963 - DNA, 17 bp, synthetic construct
  source 1..17: mol_type = other DNA
cagactgcccctccggc

SEQ ID NO: 171964 - DNA, 17 bp, synthetic construct
  source 1..17: mol_type = other DNA
acagactgcccctccgg

SEQ ID NO: 171965 - DNA, 17 bp, synthetic construct
  source 1..17: mol_type = other DNA
cacagactgcccctccg

SEQ ID NO: 171966 - DNA, 17 bp, synthetic construct
  source 1..17: mol_type = other DNA
tcacagactgcccctcc

SEQ ID NO: 171967 - DNA, 17 bp, synthetic construct
  source 1..17: mol_type = other DNA
ctcacagactgcccctc

SEQ ID NO: 171968 - DNA, 17 bp, synthetic construct
  source 1..17: mol_type = other DNA
gctcacagactgcccct

SEQ ID NO: 171969 - DNA, 17 bp, synthetic construct
  source 1..17: mol_type = other DNA
tgctcacagactgcccc

SEQ ID NO: 171970 - DNA, 17 bp, synthetic construct
  source 1..17: mol_type = other DNA
ctgctcacagactgccc

SEQ ID NO: 171971 - DNA, 17 bp, synthetic construct
  source 1..17: mol_type = other DNA
gctgctcacagactgcc

SEQ ID NO: 171972 - DNA, 17 bp, synthetic construct
  source 1..17: mol_type = other DNA
ggctgctcacagactgc

SEQ ID NO: 171973 - DNA, 17 bp, synthetic construct
  source 1..17: mol_type = other DNA
gggctgctcacagactg

SEQ ID NO: 171974 - DNA, 17 bp, synthetic construct
  source 1..17: mol_type = other DNA
ggggctgctcacagact

SEQ ID NO: 171975 - DNA, 17 bp, synthetic construct
  source 1..17: mol_type = other DNA
aggggctgctcacagac

SEQ ID NO: 171976 - DNA, 17 bp, synthetic construct
  source 1..17: mol_type = other DNA
caggggctgctcacaga

SEQ ID NO: 171977 - DNA, 17 bp, synthetic construct
  source 1..17: mol_type = other DNA
ccaggggctgctcacag

SEQ ID NO: 171978 - DNA, 17 bp, synthetic construct
  source 1..17: mol_type = other DNA
cccaggggctgctcaca

SEQ ID NO: 171979 - DNA, 17 bp, synthetic construct
  source 1..17: mol_type = other DNA
gcccaggggctgctcac

SEQ ID NO: 171980 - DNA, 17 bp, synthetic construct
  source 1..17: mol_type = other DNA
ggcccaggggctgctca

SEQ ID NO: 171981 - DNA, 17 bp, synthetic construct
  source 1..17: mol_type = other DNA
aggcccaggggctgctc

SEQ ID NO: 171982 - DNA, 17 bp, synthetic construct
  source 1..17: mol_type = other DNA
gaggcccaggggctgct

SEQ ID NO: 171983 - DNA, 17 bp, synthetic construct
  source 1..17: mol_type = other DNA
cgaggcccaggggctgc

SEQ ID NO: 171984 - DNA, 17 bp, synthetic construct
  source 1..17: mol_type = other DNA
tcgaggcccaggggctg

SEQ ID NO: 171985 - DNA, 17 bp, synthetic construct
  source 1..17: mol_type = other DNA
ctcgaggcccaggggct

SEQ ID NO: 171986 - DNA, 17 bp, synthetic construct
  source 1..17: mol_type = other DNA
actcgaggcccaggggc

SEQ ID NO: 171987 - DNA, 17 bp, synthetic construct
  source 1..17: mol_type = other DNA
cactcgaggcccagggg

SEQ ID NO: 171988 - DNA, 17 bp, synthetic construct
  source 1..17: mol_type = other DNA
gcactcgaggcccaggg

SEQ ID NO: 171989 - DNA, 17 bp, synthetic construct
  source 1..17: mol_type = other DNA
ggcactcgaggcccagg

SEQ ID NO: 171990 - DNA, 17 bp, synthetic construct
  source 1..17: mol_type = other DNA
cggcactcgaggcccag

SEQ ID NO: 171991 - DNA, 17 bp, synthetic construct
  source 1..17: mol_type = other DNA
acggcactcgaggccca

SEQ ID NO: 171992 - DNA, 17 bp, synthetic construct
  source 1..17: mol_type = other DNA
cacggcactcgaggccc

SEQ ID NO: 171993 - DNA, 17 bp, synthetic construct
  source 1..17: mol_type = other DNA
gcacggcactcgaggcc

SEQ ID NO: 171994 - DNA, 17 bp, synthetic construct
  source 1..17: mol_type = other DNA
ggcacggcactcgaggc

SEQ ID NO: 171995 - DNA, 17 bp, synthetic construct
  source 1..17: mol_type = other DNA
gggcacggcactcgagg

SEQ ID NO: 171996 - DNA, 17 bp, synthetic construct
  source 1..17: mol_type = other DNA
tgggcacggcactcgag

SEQ ID NO: 171997 - DNA, 17 bp, synthetic construct
  source 1..17: mol_type = other DNA
ctgggcacggcactcga

SEQ ID NO: 171998 - DNA, 17 bp, synthetic construct
  source 1..17: mol_type = other DNA
cctgggcacggcactcg

SEQ ID NO: 171999 - DNA, 17 bp, synthetic construct
  source 1..17: mol_type = other DNA
gcctgggcacggcactc

SEQ ID NO: 172000 - DNA, 17 bp, synthetic construct
  source 1..17: mol_type = other DNA
ggcctgggcacggcact

SEQ ID NO: 172001 - DNA, 17 bp, synthetic construct
  source 1..17: mol_type = other DNA
gggcctgggcacggcac

SEQ ID NO: 172002 - DNA, 17 bp, synthetic construct
  source 1..17: mol_type = other DNA
tgggcctgggcacggca

SEQ ID NO: 172003 - DNA, 17 bp, synthetic construct
  source 1..17: mol_type = other DNA
ctgggcctgggcacggc

SEQ ID NO: 172004 - DNA, 17 bp, synthetic construct
  source 1..17: mol_type = other DNA
gctgggcctgggcacgg

SEQ ID NO: 172005 - DNA, 17 bp, synthetic construct
  source 1..17: mol_type = other DNA
ggctgggcctgggcacg

SEQ ID NO: 172006 - DNA, 17 bp, synthetic construct
  source 1..17: mol_type = other DNA
aggctgggcctgggcac

SEQ ID NO: 172007 - DNA, 17 bp, synthetic construct
  source 1..17: mol_type = other DNA
caggctgggcctgggca

SEQ ID NO: 172008 - DNA, 17 bp, synthetic construct
  source 1..17: mol_type = other DNA
ccaggctgggcctgggc

SEQ ID NO: 172009 - DNA, 17 bp, synthetic construct
  source 1..17: mol_type = other DNA
accaggctgggcctggg

SEQ ID NO: 172010 - DNA, 17 bp, synthetic construct
  source 1..17: mol_type = other DNA
caccaggctgggcctgg

SEQ ID NO: 172011 - DNA, 17 bp, synthetic construct
  source 1..17: mol_type = other DNA
acaccaggctgggcctg

SEQ ID NO: 172012 - DNA, 17 bp, synthetic construct
  source 1..17: mol_type = other DNA
gacaccaggctgggcct

SEQ ID NO: 172013 - DNA, 17 bp, synthetic construct
  source 1..17: mol_type = other DNA
ggacaccaggctgggcc

SEQ ID NO: 172014 - DNA, 17 bp, synthetic construct
  source 1..17: mol_type = other DNA
gggacaccaggctgggc

SEQ ID NO: 172015 - DNA, 17 bp, synthetic construct
  source 1..17: mol_type = other DNA
ggggacaccaggctggg

SEQ ID NO: 172016 - DNA, 17 bp, synthetic construct
  source 1..17: mol_type = other DNA
gggggacaccaggctgg

SEQ ID NO: 172017 - DNA, 17 bp, synthetic construct
  source 1..17: mol_type = other DNA
agggggacaccaggctg

SEQ ID NO: 172018 - DNA, 17 bp, synthetic construct
  source 1..17: mol_type = other DNA
cagggggacaccaggct

SEQ ID NO: 172019 - DNA, 17 bp, synthetic construct
  source 1..17: mol_type = other DNA
gcagggggacaccaggc

SEQ ID NO: 172020 - DNA, 17 bp, synthetic construct
  source 1..17: mol_type = other DNA
cgcagggggacaccagg

SEQ ID NO: 172021 - DNA, 17 bp, synthetic construct
  source 1..17: mol_type = other DNA
ccgcagggggacaccag

SEQ ID NO: 172022 - DNA, 17 bp, synthetic construct
  source 1..17: mol_type = other DNA
cccgcagggggacacca

SEQ ID NO: 172023 - DNA, 17 bp, synthetic construct
  source 1..17: mol_type = other DNA
tcccgcagggggacacc

SEQ ID NO: 172024 - DNA, 17 bp, synthetic construct
  source 1..17: mol_type = other DNA
ctcccgcagggggacac

SEQ ID NO: 172025 - DNA, 17 bp, synthetic construct
  source 1..17: mol_type = other DNA
actcccgcagggggaca

SEQ ID NO: 172026 - DNA, 17 bp, synthetic construct
  source 1..17: mol_type = other DNA
aactcccgcagggggac

SEQ ID NO: 172027 - DNA, 17 bp, synthetic construct
  source 1..17: mol_type = other DNA
caactcccgcaggggga

SEQ ID NO: 172028 - DNA, 17 bp, synthetic construct
  source 1..17: mol_type = other DNA
ccaactcccgcaggggg

SEQ ID NO: 172029 - DNA, 17 bp, synthetic construct
  source 1..17: mol_type = other DNA
cccaactcccgcagggg

SEQ ID NO: 172030 - DNA, 17 bp, synthetic construct
  source 1..17: mol_type = other DNA
gcccaactcccgcaggg

SEQ ID NO: 172031 - DNA, 17 bp, synthetic construct
  source 1..17: mol_type = other DNA
ggcccaactcccgcagg

SEQ ID NO: 172032 - DNA, 17 bp, synthetic construct
  source 1..17: mol_type = other DNA
tggcccaactcccgcag

SEQ ID NO: 172033 - DNA, 17 bp, synthetic construct
  source 1..17: mol_type = other DNA
ctggcccaactcccgca

SEQ ID NO: 172034 - DNA, 17 bp, synthetic construct
  source 1..17: mol_type = other DNA
cctggcccaactcccgc

SEQ ID NO: 172035 - DNA, 17 bp, synthetic construct
  source 1..17: mol_type = other DNA
acctggcccaactcccg

SEQ ID NO: 172036 - DNA, 17 bp, synthetic construct
  source 1..17: mol_type = other DNA
gacctggcccaactccc

SEQ ID NO: 172037 - DNA, 17 bp, synthetic construct
  source 1..17: mol_type = other DNA
cgacctggcccaactcc

SEQ ID NO: 172038 - DNA, 17 bp, synthetic construct
  source 1..17: mol_type = other DNA
acgacctggcccaactc

SEQ ID NO: 172039 - DNA, 17 bp, synthetic construct
  source 1..17: mol_type = other DNA
cacgacctggcccaact

SEQ ID NO: 172040 - DNA, 17 bp, synthetic construct
  source 1..17: mol_type = other DNA
ccacgacctggcccaac

SEQ ID NO: 172041 - DNA, 17 bp, synthetic construct
  source 1..17: mol_type = other DNA
tccacgacctggcccaa

SEQ ID NO: 172042 - DNA, 17 bp, synthetic construct
  source 1..17: mol_type = other DNA
ttccacgacctggccca

SEQ ID NO: 172043 - DNA, 17 bp, synthetic construct
  source 1..17: mol_type = other DNA
attccacgacctggccc

SEQ ID NO: 172044 - DNA, 17 bp, synthetic construct
  source 1..17: mol_type = other DNA
cattccacgacctggcc

SEQ ID NO: 172045 - DNA, 17 bp, synthetic construct
  source 1..17: mol_type = other DNA
gcattccacgacctggc

SEQ ID NO: 172046 - DNA, 17 bp, synthetic construct
  source 1..17: mol_type = other DNA
tgcattccacgacctgg

SEQ ID NO: 172047 - DNA, 17 bp, synthetic construct
  source 1..17: mol_type = other DNA
ctgcattccacgacctg

SEQ ID NO: 172048 - DNA, 17 bp, synthetic construct
  source 1..17: mol_type = other DNA
gctgcattccacgacct

SEQ ID NO: 172049 - DNA, 17 bp, synthetic construct
  source 1..17: mol_type = other DNA
ggctgcattccacgacc

SEQ ID NO: 172050 - DNA, 17 bp, synthetic construct
  source 1..17: mol_type = other DNA
aggctgcattccacgac

SEQ ID NO: 172051 - DNA, 17 bp, synthetic construct
  source 1..17: mol_type = other DNA
caggctgcattccacga

SEQ ID NO: 172052 - DNA, 17 bp, synthetic construct
  source 1..17: mol_type = other DNA
ccaggctgcattccacg

SEQ ID NO: 172053 - DNA, 17 bp, synthetic construct
  source 1..17: mol_type = other DNA
tccaggctgcattccac

SEQ ID NO: 172054 - DNA, 17 bp, synthetic construct
  source 1..17: mol_type = other DNA
gtccaggctgcattcca

SEQ ID NO: 172055 - DNA, 17 bp, synthetic construct
  source 1..17: mol_type = other DNA
agtccaggctgcattcc

SEQ ID NO: 172056 - DNA, 17 bp, synthetic construct
  source 1..17: mol_type = other DNA
aagtccaggctgcattc

SEQ ID NO: 172057 - DNA, 17 bp, synthetic construct
  source 1..17: mol_type = other DNA
aaagtccaggctgcatt

SEQ ID NO: 172058 - DNA, 17 bp, synthetic construct
  source 1..17: mol_type = other DNA
caaagtccaggctgcat

SEQ ID NO: 172059 - DNA, 17 bp, synthetic construct
  source 1..17: mol_type = other DNA
ccaaagtccaggctgca

SEQ ID NO: 172060 - DNA, 17 bp, synthetic construct
  source 1..17: mol_type = other DNA
gccaaagtccaggctgc

SEQ ID NO: 172061 - DNA, 17 bp, synthetic construct
  source 1..17: mol_type = other DNA
ggccaaagtccaggctg

SEQ ID NO: 172062 - DNA, 17 bp, synthetic construct
  source 1..17: mol_type = other DNA
aggccaaagtccaggct

SEQ ID NO: 172063 - DNA, 17 bp, synthetic construct
  source 1..17: mol_type = other DNA
caggccaaagtccaggc

SEQ ID NO: 172064 - DNA, 17 bp, synthetic construct
  source 1..17: mol_type = other DNA
ccaggccaaagtccagg

SEQ ID NO: 172065 - DNA, 17 bp, synthetic construct
  source 1..17: mol_type = other DNA
accaggccaaagtccag

SEQ ID NO: 172066 - DNA, 17 bp, synthetic construct
  source 1..17: mol_type = other DNA
gaccaggccaaagtcca

SEQ ID NO: 172067 - DNA, 17 bp, synthetic construct
  source 1..17: mol_type = other DNA
agaccaggccaaagtcc

SEQ ID NO: 172068 - DNA, 17 bp, synthetic construct
  source 1..17: mol_type = other DNA
cagaccaggccaaagtc

SEQ ID NO: 172069 - DNA, 17 bp, synthetic construct
  source 1..17: mol_type = other DNA
gcagaccaggccaaagt

SEQ ID NO: 172070 - DNA, 17 bp, synthetic construct
  source 1..17: mol_type = other DNA
tgcagaccaggccaaag

SEQ ID NO: 172071 - DNA, 17 bp, synthetic construct
  source 1..17: mol_type = other DNA
ctgcagaccaggccaaa

SEQ ID NO: 172072 - DNA, 17 bp, synthetic construct
  source 1..17: mol_type = other DNA
cctgcagaccaggccaa

SEQ ID NO: 172073 - DNA, 17 bp, synthetic construct
  source 1..17: mol_type = other DNA
tcctgcagaccaggcca

SEQ ID NO: 172074 - DNA, 17 bp, synthetic construct
  source 1..17: mol_type = other DNA
ttcctgcagaccaggcc

SEQ ID NO: 172075 - DNA, 17 bp, synthetic construct
  source 1..17: mol_type = other DNA
gttcctgcagaccaggc

SEQ ID NO: 172076 - DNA, 17 bp, synthetic construct
  source 1..17: mol_type = other DNA
ggttcctgcagaccagg

SEQ ID NO: 172077 - DNA, 17 bp, synthetic construct
  source 1..17: mol_type = other DNA
cggttcctgcagaccag

SEQ ID NO: 172078 - DNA, 17 bp, synthetic construct
  source 1..17: mol_type = other DNA
acggttcctgcagacca

SEQ ID NO: 172079 - DNA, 17 bp, synthetic construct
  source 1..17: mol_type = other DNA
cacggttcctgcagacc

SEQ ID NO: 172080 - DNA, 17 bp, synthetic construct
  source 1..17: mol_type = other DNA
tcacggttcctgcagac

SEQ ID NO: 172081 - DNA, 17 bp, synthetic construct
  source 1..17: mol_type = other DNA
ctcacggttcctgcaga

SEQ ID NO: 172082 - DNA, 17 bp, synthetic construct
  source 1..17: mol_type = other DNA
gctcacggttcctgcag

SEQ ID NO: 172083 - DNA, 17 bp, synthetic construct
  source 1..17: mol_type = other DNA
tgctcacggttcctgca

SEQ ID NO: 172084 - DNA, 17 bp, synthetic construct
  source 1..17: mol_type = other DNA
ctgctcacggttcctgc

SEQ ID NO: 172085 - DNA, 17 bp, synthetic construct
  source 1..17: mol_type = other DNA
cctgctcacggttcctg

SEQ ID NO: 172086 - DNA, 17 bp, synthetic construct
  source 1..17: mol_type = other DNA
acctgctcacggttcct

SEQ ID NO: 172087 - DNA, 17 bp, synthetic construct
  source 1..17: mol_type = other DNA
cacctgctcacggttcc

SEQ ID NO: 172088 - DNA, 17 bp, synthetic construct
  source 1..17: mol_type = other DNA
ccacctgctcacggttc

SEQ ID NO: 172089 - DNA, 17 bp, synthetic construct
  source 1..17: mol_type = other DNA
cccacctgctcacggtt

SEQ ID NO: 172090 - DNA, 17 bp, synthetic construct
  source 1..17: mol_type = other DNA
ccccacctgctcacggt

SEQ ID NO: 172091 - DNA, 17 bp, synthetic construct
  source 1..17: mol_type = other DNA
tccccacctgctcacgg

SEQ ID NO: 172092 - DNA, 17 bp, synthetic construct
  source 1..17: mol_type = other DNA
ttccccacctgctcacg

SEQ ID NO: 172093 - DNA, 17 bp, synthetic construct
  source 1..17: mol_type = other DNA
cttccccacctgctcac

SEQ ID NO: 172094 - DNA, 17 bp, synthetic construct
  source 1..17: mol_type = other DNA
acttccccacctgctca

SEQ ID NO: 172095 - DNA, 17 bp, synthetic construct
  source 1..17: mol_type = other DNA
aacttccccacctgctc

SEQ ID NO: 172096 - DNA, 17 bp, synthetic construct
  source 1..17: mol_type = other DNA
gaacttccccacctgct

SEQ ID NO: 172097 - DNA, 17 bp, synthetic construct
  source 1..17: mol_type = other DNA
tgaacttccccacctgc

SEQ ID NO: 172098 - DNA, 17 bp, synthetic construct
  source 1..17: mol_type = other DNA
ttgaacttccccacctg

SEQ ID NO: 172099 - DNA, 17 bp, synthetic construct
  source 1..17: mol_type = other DNA
cttgaacttccccacct

SEQ ID NO: 172100 - DNA, 17 bp, synthetic construct
  source 1..17: mol_type = other DNA
tcttgaacttccccacc

SEQ ID NO: 172101 - DNA, 17 bp, synthetic construct
  source 1..17: mol_type = other DNA
atcttgaacttccccac

SEQ ID NO: 172102 - DNA, 17 bp, synthetic construct
  source 1..17: mol_type = other DNA
catcttgaacttcccca

SEQ ID NO: 172103 - DNA, 17 bp, synthetic construct
  source 1..17: mol_type = other DNA
acatcttgaacttcccc

SEQ ID NO: 172104 - DNA, 17 bp, synthetic construct
  source 1..17: mol_type = other DNA
cacatcttgaacttccc

SEQ ID NO: 172105 - DNA, 17 bp, synthetic construct
  source 1..17: mol_type = other DNA
gcacatcttgaacttcc

SEQ ID NO: 172106 - DNA, 17 bp, synthetic construct
  source 1..17: mol_type = other DNA
agcacatcttgaacttc

SEQ ID NO: 172107 - DNA, 17 bp, synthetic construct
  source 1..17: mol_type = other DNA
aagcacatcttgaactt

SEQ ID NO: 172108 - DNA, 17 bp, synthetic construct
  source 1..17: mol_type = other DNA
gaagcacatcttgaact

SEQ ID NO: 172109 - DNA, 17 bp, synthetic construct
  source 1..17: mol_type = other DNA
tgaagcacatcttgaac

SEQ ID NO: 172110 - DNA, 17 bp, synthetic construct
  source 1..17: mol_type = other DNA
ttgaagcacatcttgaa

SEQ ID NO: 172111 - DNA, 17 bp, synthetic construct
  source 1..17: mol_type = other DNA
gttgaagcacatcttga

SEQ ID NO: 172112 - DNA, 17 bp, synthetic construct
  source 1..17: mol_type = other DNA
agttgaagcacatcttg

SEQ ID NO: 172113 - DNA, 17 bp, synthetic construct
  source 1..17: mol_type = other DNA
tagttgaagcacatctt

SEQ ID NO: 172114 - DNA, 17 bp, synthetic construct
  source 1..17: mol_type = other DNA
atagttgaagcacatct

SEQ ID NO: 172115 - DNA, 17 bp, synthetic construct
  source 1..17: mol_type = other DNA
catagttgaagcacatc

SEQ ID NO: 172116 - DNA, 17 bp, synthetic construct
  source 1..17: mol_type = other DNA
tcatagttgaagcacat

SEQ ID NO: 172117 - DNA, 17 bp, synthetic construct
  source 1..17: mol_type = other DNA
ttcatagttgaagcaca

SEQ ID NO: 172118 - DNA, 17 bp, synthetic construct
  source 1..17: mol_type = other DNA
tttcatagttgaagcac

SEQ ID NO: 172119 - DNA, 17 bp, synthetic construct
  source 1..17: mol_type = other DNA
atttcatagttgaagca

SEQ ID NO: 172120 - DNA, 17 bp, synthetic construct
  source 1..17: mol_type = other DNA
gatttcatagttgaagc

SEQ ID NO: 172121 - DNA, 17 bp, synthetic construct
  source 1..17: mol_type = other DNA
ggatttcatagttgaag

SEQ ID NO: 172122 - DNA, 17 bp, synthetic construct
  source 1..17: mol_type = other DNA
cggatttcatagttgaa

SEQ ID NO: 172123 - DNA, 17 bp, synthetic construct
  source 1..17: mol_type = other DNA
acggatttcatagttga

SEQ ID NO: 172124 - DNA, 17 bp, synthetic construct
  source 1..17: mol_type = other DNA
cacggatttcatagttg

SEQ ID NO: 172125 - DNA, 17 bp, synthetic construct
  source 1..17: mol_type = other DNA
acacggatttcatagtt

SEQ ID NO: 172126 - DNA, 17 bp, synthetic construct
  source 1..17: mol_type = other DNA
cacacggatttcatagt

SEQ ID NO: 172127 - DNA, 17 bp, synthetic construct
  source 1..17: mol_type = other DNA
acacacggatttcatag

SEQ ID NO: 172128 - DNA, 17 bp, synthetic construct
  source 1..17: mol_type = other DNA
aacacacggatttcata

SEQ ID NO: 172129 - DNA, 17 bp, synthetic construct
  source 1..17: mol_type = other DNA
gaacacacggatttcat

SEQ ID NO: 172130 - DNA, 17 bp, synthetic construct
  source 1..17: mol_type = other DNA
agaacacacggatttca

SEQ ID NO: 172131 - DNA, 17 bp, synthetic construct
  source 1..17: mol_type = other DNA
cagaacacacggatttc

SEQ ID NO: 172132 - DNA, 17 bp, synthetic construct
  source 1..17: mol_type = other DNA
gcagaacacacggattt

SEQ ID NO: 172133 - DNA, 17 bp, synthetic construct
  source 1..17: mol_type = other DNA
agcagaacacacggatt

SEQ ID NO: 172134 - DNA, 17 bp, synthetic construct
  source 1..17: mol_type = other DNA
cagcagaacacacggat

SEQ ID NO: 172135 - DNA, 17 bp, synthetic construct
  source 1..17: mol_type = other DNA
gcagcagaacacacgga

SEQ ID NO: 172136 - DNA, 17 bp, synthetic construct
  source 1..17: mol_type = other DNA
tgcagcagaacacacgg

SEQ ID NO: 172137 - DNA, 17 bp, synthetic construct
  source 1..17: mol_type = other DNA
ttgcagcagaacacacg

SEQ ID NO: 172138 - DNA, 17 bp, synthetic construct
  source 1..17: mol_type = other DNA
gttgcagcagaacacac

SEQ ID NO: 172139 - DNA, 17 bp, synthetic construct
  source 1..17: mol_type = other DNA
agttgcagcagaacaca

SEQ ID NO: 172140 - DNA, 17 bp, synthetic construct
  source 1..17: mol_type = other DNA
tagttgcagcagaacac

SEQ ID NO: 172141 - DNA, 17 bp, synthetic construct
  source 1..17: mol_type = other DNA
gtagttgcagcagaaca

SEQ ID NO: 172142 - DNA, 17 bp, synthetic construct
  source 1..17: mol_type = other DNA
cgtagttgcagcagaac

SEQ ID NO: 172143 - DNA, 17 bp, synthetic construct
  source 1..17: mol_type = other DNA
ccgtagttgcagcagaa

SEQ ID NO: 172144 - DNA, 17 bp, synthetic construct
  source 1..17: mol_type = other DNA
gccgtagttgcagcaga

SEQ ID NO: 172145 - DNA, 17 bp, synthetic construct
  source 1..17: mol_type = other DNA
ggccgtagttgcagcag

SEQ ID NO: 172146 - DNA, 17 bp, synthetic construct
  source 1..17: mol_type = other DNA
tggccgtagttgcagca

SEQ ID NO: 172147 - DNA, 17 bp, synthetic construct
  source 1..17: mol_type = other DNA
gtggccgtagttgcagc

SEQ ID NO: 172148 - DNA, 17 bp, synthetic construct
  source 1..17: mol_type = other DNA
agtggccgtagttgcag

SEQ ID NO: 172149 - DNA, 17 bp, synthetic construct
  source 1..17: mol_type = other DNA
cagtggccgtagttgca

SEQ ID NO: 172150 - DNA, 17 bp, synthetic construct
  source 1..17: mol_type = other DNA
gcagtggccgtagttgc

SEQ ID NO: 172151 - DNA, 17 bp, synthetic construct
  source 1..17: mol_type = other DNA
ggcagtggccgtagttg

SEQ ID NO: 172152 - DNA, 17 bp, synthetic construct
  source 1..17: mol_type = other DNA
gggcagtggccgtagtt

SEQ ID NO: 172153 - DNA, 17 bp, synthetic construct
  source 1..17: mol_type = other DNA
ggggcagtggccgtagt

SEQ ID NO: 172154 - DNA, 17 bp, synthetic construct
  source 1..17: mol_type = other DNA
tggggcagtggccgtag

SEQ ID NO: 172155 - DNA, 17 bp, synthetic construct
  source 1..17: mol_type = other DNA
ctggggcagtggccgta

SEQ ID NO: 172156 - DNA, 17 bp, synthetic construct
  source 1..17: mol_type = other DNA
gctggggcagtggccgt

SEQ ID NO: 172157 - DNA, 17 bp, synthetic construct
  source 1..17: mol_type = other DNA
tgctggggcagtggccg

SEQ ID NO: 172158 - DNA, 17 bp, synthetic construct
  source 1..17: mol_type = other DNA
gtgctggggcagtggcc

SEQ ID NO: 172159 - DNA, 17 bp, synthetic construct
  source 1..17: mol_type = other DNA
ggtgctggggcagtggc

SEQ ID NO: 172160 - DNA, 17 bp, synthetic construct
  source 1..17: mol_type = other DNA
gggtgctggggcagtgg

SEQ ID NO: 172161 - DNA, 17 bp, synthetic construct
  source 1..17: mol_type = other DNA
ggggtgctggggcagtg

SEQ ID NO: 172162 - DNA, 17 bp, synthetic construct
  source 1..17: mol_type = other DNA
cggggtgctggggcagt

SEQ ID NO: 172163 - DNA, 17 bp, synthetic construct
  source 1..17: mol_type = other DNA
ccggggtgctggggcag

SEQ ID NO: 172164 - DNA, 17 bp, synthetic construct
  source 1..17: mol_type = other DNA
gccggggtgctggggca

SEQ ID NO: 172165 - DNA, 17 bp, synthetic construct
  source 1..17: mol_type = other DNA
ggccggggtgctggggc

SEQ ID NO: 172166 - DNA, 17 bp, synthetic construct
  source 1..17: mol_type = other DNA
tggccggggtgctgggg

SEQ ID NO: 172167 - DNA, 17 bp, synthetic construct
  source 1..17: mol_type = other DNA
gtggccggggtgctggg

SEQ ID NO: 172168 - DNA, 17 bp, synthetic construct
  source 1..17: mol_type = other DNA
ggtggccggggtgctgg

SEQ ID NO: 172169 - DNA, 17 bp, synthetic construct
  source 1..17: mol_type = other DNA
tggtggccggggtgctg

SEQ ID NO: 172170 - DNA, 17 bp, synthetic construct
  source 1..17: mol_type = other DNA
ctggtggccggggtgct

SEQ ID NO: 172171 - DNA, 17 bp, synthetic construct
  source 1..17: mol_type = other DNA
gctggtggccggggtgc

SEQ ID NO: 172172 - DNA, 17 bp, synthetic construct
  source 1..17: mol_type = other DNA
agctggtggccggggtg

SEQ ID NO: 172173 - DNA, 17 bp, synthetic construct
  source 1..17: mol_type = other DNA
gagctggtggccggggt

SEQ ID NO: 172174 - DNA, 17 bp, synthetic construct
  source 1..17: mol_type = other DNA
agagctggtggccgggg

SEQ ID NO: 172175 - DNA, 17 bp, synthetic construct
  source 1..17: mol_type = other DNA
tagagctggtggccggg

SEQ ID NO: 172176 - DNA, 17 bp, synthetic construct
  source 1..17: mol_type = other DNA
gtagagctggtggccgg

SEQ ID NO: 172177 - DNA, 17 bp, synthetic construct
  source 1..17: mol_type = other DNA
cgtagagctggtggccg

SEQ ID NO: 172178 - DNA, 17 bp, synthetic construct
  source 1..17: mol_type = other DNA
ccgtagagctggtggcc

SEQ ID NO: 172179 - DNA, 17 bp, synthetic construct
  source 1..17: mol_type = other DNA
gccgtagagctggtggc

SEQ ID NO: 172180 - DNA, 17 bp, synthetic construct
  source 1..17: mol_type = other DNA
ggccgtagagctggtgg

SEQ ID NO: 172181 - DNA, 17 bp, synthetic construct
  source 1..17: mol_type = other DNA
tggccgtagagctggtg

SEQ ID NO: 172182 - DNA, 17 bp, synthetic construct
  source 1..17: mol_type = other DNA
gtggccgtagagctggt

SEQ ID NO: 172183 - DNA, 17 bp, synthetic construct
  source 1..17: mol_type = other DNA
cgtggccgtagagctgg

SEQ ID NO: 172184 - DNA, 17 bp, synthetic construct
  source 1..17: mol_type = other DNA
gcgtggccgtagagctg

SEQ ID NO: 172185 - DNA, 17 bp, synthetic construct
  source 1..17: mol_type = other DNA
ggcgtggccgtagagct

SEQ ID NO: 172186 - DNA, 17 bp, synthetic construct
  source 1..17: mol_type = other DNA
gggcgtggccgtagagc

SEQ ID NO: 172187 - DNA, 17 bp, synthetic construct
  source 1..17: mol_type = other DNA
agggcgtggccgtagag

SEQ ID NO: 172188 - DNA, 17 bp, synthetic construct
  source 1..17: mol_type = other DNA
gagggcgtggccgtaga

SEQ ID NO: 172189 - DNA, 17 bp, synthetic construct
  source 1..17: mol_type = other DNA
ggagggcgtggccgtag

SEQ ID NO: 172190 - DNA, 17 bp, synthetic construct
  source 1..17: mol_type = other DNA
aggagggcgtggccgta

SEQ ID NO: 172191 - DNA, 17 bp, synthetic construct
  source 1..17: mol_type = other DNA
gaggagggcgtggccgt

SEQ ID NO: 172192 - DNA, 17 bp, synthetic construct
  source 1..17: mol_type = other DNA
tgaggagggcgtggccg

SEQ ID NO: 172193 - DNA, 17 bp, synthetic construct
  source 1..17: mol_type = other DNA
ttgaggagggcgtggcc

SEQ ID NO: 172194 - DNA, 17 bp, synthetic construct
  source 1..17: mol_type = other DNA
gttgaggagggcgtggc

SEQ ID NO: 172195 - DNA, 17 bp, synthetic construct
  source 1..17: mol_type = other DNA
agttgaggagggcgtgg

SEQ ID NO: 172196 - DNA, 17 bp, synthetic construct
  source 1..17: mol_type = other DNA
gagttgaggagggcgtg

SEQ ID NO: 172197 - DNA, 17 bp, synthetic construct
  source 1..17: mol_type = other DNA
ggagttgaggagggcgt

SEQ ID NO: 172198 - DNA, 17 bp, synthetic construct
  source 1..17: mol_type = other DNA
cggagttgaggagggcg

SEQ ID NO: 172199 - DNA, 17 bp, synthetic construct
  source 1..17: mol_type = other DNA
ccggagttgaggagggc

SEQ ID NO: 172200 - DNA, 17 bp, synthetic construct
  source 1..17: mol_type = other DNA
cccggagttgaggaggg

SEQ ID NO: 172201 - DNA, 17 bp, synthetic construct
  source 1..17: mol_type = other DNA
ccccggagttgaggagg

SEQ ID NO: 172202 - DNA, 17 bp, synthetic construct
  source 1..17: mol_type = other DNA
tccccggagttgaggag

SEQ ID NO: 172203 - DNA, 17 bp, synthetic construct
  source 1..17: mol_type = other DNA
gtccccggagttgagga

SEQ ID NO: 172204 - DNA, 17 bp, synthetic construct
  source 1..17: mol_type = other DNA
cgtccccggagttgagg

SEQ ID NO: 172205 - DNA, 17 bp, synthetic construct
  source 1..17: mol_type = other DNA
tcgtccccggagttgag

SEQ ID NO: 172206 - DNA, 17 bp, synthetic construct
  source 1..17: mol_type = other DNA
gtcgtccccggagttga

SEQ ID NO: 172207 - DNA, 17 bp, synthetic construct
  source 1..17: mol_type = other DNA
ggtcgtccccggagttg

SEQ ID NO: 172208 - DNA, 17 bp, synthetic construct
  source 1..17: mol_type = other DNA
aggtcgtccccggagtt

SEQ ID NO: 172209 - DNA, 17 bp, synthetic construct
  source 1..17: mol_type = other DNA
caggtcgtccccggagt

SEQ ID NO: 172210 - DNA, 17 bp, synthetic construct
  source 1..17: mol_type = other DNA
ccaggtcgtccccggag

SEQ ID NO: 172211 - DNA, 17 bp, synthetic construct
  source 1..17: mol_type = other DNA
tccaggtcgtccccgga

SEQ ID NO: 172212 - DNA, 17 bp, synthetic construct
  source 1..17: mol_type = other DNA
atccaggtcgtccccgg

SEQ ID NO: 172213 - DNA, 17 bp, synthetic construct
  source 1..17: mol_type = other DNA
gatccaggtcgtccccg

SEQ ID NO: 172214 - DNA, 17 bp, synthetic construct
  source 1..17: mol_type = other DNA
ggatccaggtcgtcccc

SEQ ID NO: 172215 - DNA, 17 bp, synthetic construct
  source 1..17: mol_type = other DNA
aggatccaggtcgtccc

SEQ ID NO: 172216 - DNA, 17 bp, synthetic construct
  source 1..17: mol_type = other DNA
gaggatccaggtcgtcc

SEQ ID NO: 172217 - DNA, 17 bp, synthetic construct
  source 1..17: mol_type = other DNA
tgaggatccaggtcgtc

SEQ ID NO: 172218 - DNA, 17 bp, synthetic construct
  source 1..17: mol_type = other DNA
gtgaggatccaggtcgt

SEQ ID NO: 172219 - DNA, 17 bp, synthetic construct
  source 1..17: mol_type = other DNA
tgtgaggatccaggtcg

SEQ ID NO: 172220 - DNA, 17 bp, synthetic construct
  source 1..17: mol_type = other DNA
ttgtgaggatccaggtc

SEQ ID NO: 172221 - DNA, 17 bp, synthetic construct
  source 1..17: mol_type = other DNA
tttgtgaggatccaggt

SEQ ID NO: 172222 - DNA, 17 bp, synthetic construct
  source 1..17: mol_type = other DNA
ctttgtgaggatccagg

SEQ ID NO: 172223 - DNA, 17 bp, synthetic construct
  source 1..17: mol_type = other DNA
gctttgtgaggatccag

SEQ ID NO: 172224 - DNA, 17 bp, synthetic construct
  source 1..17: mol_type = other DNA
agctttgtgaggatcca

SEQ ID NO: 172225 - DNA, 17 bp, synthetic construct
  source 1..17: mol_type = other DNA
cagctttgtgaggatcc

SEQ ID NO: 172226 - DNA, 17 bp, synthetic construct
  source 1..17: mol_type = other DNA
tcagctttgtgaggatc

SEQ ID NO: 172227 - DNA, 17 bp, synthetic construct
  source 1..17: mol_type = other DNA
gtcagctttgtgaggat

SEQ ID NO: 172228 - DNA, 17 bp, synthetic construct
  source 1..17: mol_type = other DNA
ggtcagctttgtgagga

SEQ ID NO: 172229 - DNA, 17 bp, synthetic construct
  source 1..17: mol_type = other DNA
tggtcagctttgtgagg

SEQ ID NO: 172230 - DNA, 17 bp, synthetic construct
  source 1..17: mol_type = other DNA
gtggtcagctttgtgag

SEQ ID NO: 172231 - DNA, 17 bp, synthetic construct
  source 1..17: mol_type = other DNA
tgtggtcagctttgtga

SEQ ID NO: 172232 - DNA, 17 bp, synthetic construct
  source 1..17: mol_type = other DNA
ttgtggtcagctttgtg

SEQ ID NO: 172233 - DNA, 17 bp, synthetic construct
  source 1..17: mol_type = other DNA
gttgtggtcagctttgt

SEQ ID NO: 172234 - DNA, 17 bp, synthetic construct
  source 1..17: mol_type = other DNA
tgttgtggtcagctttg

SEQ ID NO: 172235 - DNA, 17 bp, synthetic construct
  source 1..17: mol_type = other DNA
ctgttgtggtcagcttt

SEQ ID NO: 172236 - DNA, 17 bp, synthetic construct
  source 1..17: mol_type = other DNA
gctgttgtggtcagctt

SEQ ID NO: 172237 - DNA, 17 bp, synthetic construct
  source 1..17: mol_type = other DNA
ggctgttgtggtcagct

SEQ ID NO: 172238 - DNA, 17 bp, synthetic construct
  source 1..17: mol_type = other DNA
tggctgttgtggtcagc

SEQ ID NO: 172239 - DNA, 17 bp, synthetic construct
  source 1..17: mol_type = other DNA
gtggctgttgtggtcag

SEQ ID NO: 172240 - DNA, 17 bp, synthetic construct
  source 1..17: mol_type = other DNA
agtggctgttgtggtca

SEQ ID NO: 172241 - DNA, 17 bp, synthetic construct
  source 1..17: mol_type = other DNA
tagtggctgttgtggtc

SEQ ID NO: 172242 - DNA, 17 bp, synthetic construct
  source 1..17: mol_type = other DNA
gtagtggctgttgtggt

SEQ ID NO: 172243 - DNA, 17 bp, synthetic construct
  source 1..17: mol_type = other DNA
cgtagtggctgttgtgg

SEQ ID NO: 172244 - DNA, 17 bp, synthetic construct
  source 1..17: mol_type = other DNA
tcgtagtggctgttgtg

SEQ ID NO: 172245 - DNA, 17 bp, synthetic construct
  source 1..17: mol_type = other DNA
gtcgtagtggctgttgt

SEQ ID NO: 172246 - DNA, 17 bp, synthetic construct
  source 1..17: mol_type = other DNA
agtcgtagtggctgttg

SEQ ID NO: 172247 - DNA, 17 bp, synthetic construct
  source 1..17: mol_type = other DNA
cagtcgtagtggctgtt

SEQ ID NO: 172248 - DNA, 17 bp, synthetic construct
  source 1..17: mol_type = other DNA
tcagtcgtagtggctgt

SEQ ID NO: 172249 - DNA, 17 bp, synthetic construct
  source 1..17: mol_type = other DNA
ctcagtcgtagtggctg

SEQ ID NO: 172250 - DNA, 17 bp, synthetic construct
  source 1..17: mol_type = other DNA
actcagtcgtagtggct

SEQ ID NO: 172251 - DNA, 17 bp, synthetic construct
  source 1..17: mol_type = other DNA
gactcagtcgtagtggc

SEQ ID NO: 172252 - DNA, 17 bp, synthetic construct
  source 1..17: mol_type = other DNA
ggactcagtcgtagtgg

SEQ ID NO: 172253 - DNA, 17 bp, synthetic construct
  source 1..17: mol_type = other DNA
tggactcagtcgtagtg

SEQ ID NO: 172254 - DNA, 17 bp, synthetic construct
  source 1..17: mol_type = other DNA
gtggactcagtcgtagt

SEQ ID NO: 172255 - DNA, 17 bp, synthetic construct
  source 1..17: mol_type = other DNA
agtggactcagtcgtag

SEQ ID NO: 172256 - DNA, 17 bp, synthetic construct
  source 1..17: mol_type = other DNA
cagtggactcagtcgta

SEQ ID NO: 172257 - DNA, 17 bp, synthetic construct
  source 1..17: mol_type = other DNA
ccagtggactcagtcgt

SEQ ID NO: 172258 - DNA, 17 bp, synthetic construct
  source 1..17: mol_type = other DNA
tccagtggactcagtcg

SEQ ID NO: 172259 - DNA, 17 bp, synthetic construct
  source 1..17: mol_type = other DNA
atccagtggactcagtc

SEQ ID NO: 172260 - DNA, 17 bp, synthetic construct
  source 1..17: mol_type = other DNA
gatccagtggactcagt

SEQ ID NO: 172261 - DNA, 17 bp, synthetic construct
  source 1..17: mol_type = other DNA
ggatccagtggactcag

SEQ ID NO: 172262 - DNA, 17 bp, synthetic construct
  source 1..17: mol_type = other DNA
tggatccagtggactca

SEQ ID NO: 172263 - DNA, 17 bp, synthetic construct
  source 1..17: mol_type = other DNA
gtggatccagtggactc

SEQ ID NO: 172264 - DNA, 17 bp, synthetic construct
  source 1..17: mol_type = other DNA
cgtggatccagtggact

SEQ ID NO: 172265 - DNA, 17 bp, synthetic construct
  source 1..17: mol_type = other DNA
ccgtggatccagtggac

SEQ ID NO: 172266 - DNA, 17 bp, synthetic construct
  source 1..17: mol_type = other DNA
gccgtggatccagtgga

SEQ ID NO: 172267 - DNA, 17 bp, synthetic construct
  source 1..17: mol_type = other DNA
ggccgtggatccagtgg

SEQ ID NO: 172268 - DNA, 17 bp, synthetic construct
  source 1..17: mol_type = other DNA
tggccgtggatccagtg

SEQ ID NO: 172269 - DNA, 17 bp, synthetic construct
  source 1..17: mol_type = other DNA
gtggccgtggatccagt

SEQ ID NO: 172270 - DNA, 17 bp, synthetic construct
  source 1..17: mol_type = other DNA
ggtggccgtggatccag

SEQ ID NO: 172271 - DNA, 17 bp, synthetic construct
  source 1..17: mol_type = other DNA
gggtggccgtggatcca

SEQ ID NO: 172272 - DNA, 17 bp, synthetic construct
  source 1..17: mol_type = other DNA
ggggtggccgtggatcc

SEQ ID NO: 172273 - DNA, 17 bp, synthetic construct
  source 1..17: mol_type = other DNA
cggggtggccgtggatc

SEQ ID NO: 172274 - DNA, 17 bp, synthetic construct
  source 1..17: mol_type = other DNA
acggggtggccgtggat

SEQ ID NO: 172275 - DNA, 17 bp, synthetic construct
  source 1..17: mol_type = other DNA
gacggggtggccgtgga

SEQ ID NO: 172276 - DNA, 17 bp, synthetic construct
  source 1..17: mol_type = other DNA
ggacggggtggccgtgg

SEQ ID NO: 172277 - DNA, 17 bp, synthetic construct
  source 1..17: mol_type = other DNA
aggacggggtggccgtg

SEQ ID NO: 172278 - DNA, 17 bp, synthetic construct
  source 1..17: mol_type = other DNA
gaggacggggtggccgt

SEQ ID NO: 172279 - DNA, 17 bp, synthetic construct
  source 1..17: mol_type = other DNA
ggaggacggggtggccg

SEQ ID NO: 172280 - DNA, 17 bp, synthetic construct
  source 1..17: mol_type = other DNA
tggaggacggggtggcc

SEQ ID NO: 172281 - DNA, 17 bp, synthetic construct
  source 1..17: mol_type = other DNA
gtggaggacggggtggc

SEQ ID NO: 172282 - DNA, 17 bp, synthetic construct
  source 1..17: mol_type = other DNA
ggtggaggacggggtgg

SEQ ID NO: 172283 - DNA, 17 bp, synthetic construct
  source 1..17: mol_type = other DNA
gggtggaggacggggtg

SEQ ID NO: 172284 - DNA, 17 bp, synthetic construct
  source 1..17: mol_type = other DNA
ggggtggaggacggggt

SEQ ID NO: 172285 - DNA, 17 bp, synthetic construct
  source 1..17: mol_type = other DNA
tggggtggaggacgggg

SEQ ID NO: 172286 - DNA, 17 bp, synthetic construct
  source 1..17: mol_type = other DNA
ctggggtggaggacggg

SEQ ID NO: 172287 - DNA, 17 bp, synthetic construct
  source 1..17: mol_type = other DNA
cctggggtggaggacgg

SEQ ID NO: 172288 - DNA, 17 bp, synthetic construct
  source 1..17: mol_type = other DNA
ccctggggtggaggacg

SEQ ID NO: 172289 - DNA, 17 bp, synthetic construct
  source 1..17: mol_type = other DNA
tccctggggtggaggac

SEQ ID NO: 172290 - DNA, 17 bp, synthetic construct
  source 1..17: mol_type = other DNA
gtccctggggtggagga

SEQ ID NO: 172291 - DNA, 17 bp, synthetic construct
  source 1..17: mol_type = other DNA
ggtccctggggtggagg

SEQ ID NO: 172292 - DNA, 17 bp, synthetic construct
  source 1..17: mol_type = other DNA
tggtccctggggtggag

SEQ ID NO: 172293 - DNA, 17 bp, synthetic construct
  source 1..17: mol_type = other DNA
gtggtccctggggtgga

SEQ ID NO: 172294 - DNA, 17 bp, synthetic construct
  source 1..17: mol_type = other DNA
ggtggtccctggggtgg

SEQ ID NO: 172295 - DNA, 17 bp, synthetic construct
  source 1..17: mol_type = other DNA
aggtggtccctggggtg

SEQ ID NO: 172296 - DNA, 17 bp, synthetic construct
  source 1..17: mol_type = other DNA
caggtggtccctggggt

SEQ ID NO: 172297 - DNA, 17 bp, synthetic construct
  source 1..17: mol_type = other DNA
ccaggtggtccctgggg

SEQ ID NO: 172298 - DNA, 17 bp, synthetic construct
  source 1..17: mol_type = other DNA
tccaggtggtccctggg

SEQ ID NO: 172299 - DNA, 17 bp, synthetic construct
  source 1..17: mol_type = other DNA
atccaggtggtccctgg

SEQ ID NO: 172300 - DNA, 17 bp, synthetic construct
  source 1..17: mol_type = other DNA
gatccaggtggtccctg

SEQ ID NO: 172301 - DNA, 17 bp, synthetic construct
  source 1..17: mol_type = other DNA
ggatccaggtggtccct

SEQ ID NO: 172302 - DNA, 17 bp, synthetic construct
  source 1..17: mol_type = other DNA
aggatccaggtggtccc

SEQ ID NO: 172303 - DNA, 17 bp, synthetic construct
  source 1..17: mol_type = other DNA
gaggatccaggtggtcc

SEQ ID NO: 172304 - DNA, 17 bp, synthetic construct
  source 1..17: mol_type = other DNA
tgaggatccaggtggtc

SEQ ID NO: 172305 - DNA, 17 bp, synthetic construct
  source 1..17: mol_type = other DNA
gtgaggatccaggtggt

SEQ ID NO: 172306 - DNA, 17 bp, synthetic construct
  source 1..17: mol_type = other DNA
tgtgaggatccaggtgg

SEQ ID NO: 172307 - DNA, 17 bp, synthetic construct
  source 1..17: mol_type = other DNA
ctgtgaggatccaggtg

SEQ ID NO: 172308 - DNA, 17 bp, synthetic construct
  source 1..17: mol_type = other DNA
tctgtgaggatccaggt

SEQ ID NO: 172309 - DNA, 17 bp, synthetic construct
  source 1..17: mol_type = other DNA
ctctgtgaggatccagg

SEQ ID NO: 172310 - DNA, 17 bp, synthetic construct
  source 1..17: mol_type = other DNA
gctctgtgaggatccag

SEQ ID NO: 172311 - DNA, 17 bp, synthetic construct
  source 1..17: mol_type = other DNA
ggctctgtgaggatcca

SEQ ID NO: 172312 - DNA, 17 bp, synthetic construct
  source 1..17: mol_type = other DNA
cggctctgtgaggatcc

SEQ ID NO: 172313 - DNA, 17 bp, synthetic construct
  source 1..17: mol_type = other DNA
tcggctctgtgaggatc

SEQ ID NO: 172314 - DNA, 17 bp, synthetic construct
  source 1..17: mol_type = other DNA
ctcggctctgtgaggat

SEQ ID NO: 172315 - DNA, 17 bp, synthetic construct
  source 1..17: mol_type = other DNA
gctcggctctgtgagga

SEQ ID NO: 172316 - DNA, 17 bp, synthetic construct
  source 1..17: mol_type = other DNA
tgctcggctctgtgagg

SEQ ID NO: 172317 - DNA, 17 bp, synthetic construct
  source 1..17: mol_type = other DNA
gtgctcggctctgtgag

SEQ ID NO: 172318 - DNA, 17 bp, synthetic construct
  source 1..17: mol_type = other DNA
agtgctcggctctgtga

SEQ ID NO: 172319 - DNA, 17 bp, synthetic construct
  source 1..17: mol_type = other DNA
tagtgctcggctctgtg

SEQ ID NO: 172320 - DNA, 17 bp, synthetic construct
  source 1..17: mol_type = other DNA
gtagtgctcggctctgt

SEQ ID NO: 172321 - DNA, 17 bp, synthetic construct
  source 1..17: mol_type = other DNA
tgtagtgctcggctctg

SEQ ID NO: 172322 - DNA, 17 bp, synthetic construct
  source 1..17: mol_type = other DNA
ctgtagtgctcggctct

SEQ ID NO: 172323 - DNA, 17 bp, synthetic construct
  source 1..17: mol_type = other DNA
gctgtagtgctcggctc

SEQ ID NO: 172324 - DNA, 17 bp, synthetic construct
  source 1..17: mol_type = other DNA
ggctgtagtgctcggct

SEQ ID NO: 172325 - DNA, 17 bp, synthetic construct
  source 1..17: mol_type = other DNA
tggctgtagtgctcggc

SEQ ID NO: 172326 - DNA, 17 bp, synthetic construct
  source 1..17: mol_type = other DNA
gtggctgtagtgctcgg

SEQ ID NO: 172327 - DNA, 17 bp, synthetic construct
  source 1..17: mol_type = other DNA
ggtggctgtagtgctcg

SEQ ID NO: 172328 - DNA, 17 bp, synthetic construct
  source 1..17: mol_type = other DNA
cggtggctgtagtgctc

SEQ ID NO: 172329 - DNA, 17 bp, synthetic construct
  source 1..17: mol_type = other DNA
acggtggctgtagtgct

SEQ ID NO: 172330 - DNA, 17 bp, synthetic construct
  source 1..17: mol_type = other DNA
cacggtggctgtagtgc

SEQ ID NO: 172331 - DNA, 17 bp, synthetic construct
  source 1..17: mol_type = other DNA
tcacggtggctgtagtg

SEQ ID NO: 172332 - DNA, 17 bp, synthetic construct
  source 1..17: mol_type = other DNA
gtcacggtggctgtagt

SEQ ID NO: 172333 - DNA, 17 bp, synthetic construct
  source 1..17: mol_type = other DNA
cgtcacggtggctgtag

SEQ ID NO: 172334 - DNA, 17 bp, synthetic construct
  source 1..17: mol_type = other DNA
ccgtcacggtggctgta

SEQ ID NO: 172335 - DNA, 17 bp, synthetic construct
  source 1..17: mol_type = other DNA
accgtcacggtggctgt

SEQ ID NO: 172336 - DNA, 17 bp, synthetic construct
  source 1..17: mol_type = other DNA
caccgtcacggtggctg

SEQ ID NO: 172337 - DNA, 17 bp, synthetic construct
  source 1..17: mol_type = other DNA
gcaccgtcacggtggct

SEQ ID NO: 172338 - DNA, 17 bp, synthetic construct
  source 1..17: mol_type = other DNA
ggcaccgtcacggtggc

SEQ ID NO: 172339 - DNA, 17 bp, synthetic construct
  source 1..17: mol_type = other DNA
gggcaccgtcacggtgg

SEQ ID NO: 172340 - DNA, 17 bp, synthetic construct
  source 1..17: mol_type = other DNA
tgggcaccgtcacggtg

SEQ ID NO: 172341 - DNA, 17 bp, synthetic construct
  source 1..17: mol_type = other DNA
gtgggcaccgtcacggt

SEQ ID NO: 172342 - DNA, 17 bp, synthetic construct
  source 1..17: mol_type = other DNA
ggtgggcaccgtcacgg

SEQ ID NO: 172343 - DNA, 17 bp, synthetic construct
  source 1..17: mol_type = other DNA
cggtgggcaccgtcacg

SEQ ID NO: 172344 - DNA, 17 bp, synthetic construct
  source 1..17: mol_type = other DNA
ccggtgggcaccgtcac

SEQ ID NO: 172345 - DNA, 17 bp, synthetic construct
  source 1..17: mol_type = other DNA
tccggtgggcaccgtca

SEQ ID NO: 172346 - DNA, 17 bp, synthetic construct
  source 1..17: mol_type = other DNA
atccggtgggcaccgtc

SEQ ID NO: 172347 - DNA, 17 bp, synthetic construct
  source 1..17: mol_type = other DNA
gatccggtgggcaccgt

SEQ ID NO: 172348 - DNA, 17 bp, synthetic construct
  source 1..17: mol_type = other DNA
ggatccggtgggcaccg

SEQ ID NO: 172349 - DNA, 17 bp, synthetic construct
  source 1..17: mol_type = other DNA
tggatccggtgggcacc

SEQ ID NO: 172350 - DNA, 17 bp, synthetic construct
  source 1..17: mol_type = other DNA
gtggatccggtgggcac

SEQ ID NO: 172351 - DNA, 17 bp, synthetic construct
  source 1..17: mol_type = other DNA
cgtggatccggtgggca

SEQ ID NO: 172352 - DNA, 17 bp, synthetic construct
  source 1..17: mol_type = other DNA
ccgtggatccggtgggc

SEQ ID NO: 172353 - DNA, 17 bp, synthetic construct
  source 1..17: mol_type = other DNA
gccgtggatccggtggg

SEQ ID NO: 172354 - DNA, 17 bp, synthetic construct
  source 1..17: mol_type = other DNA
ggccgtggatccggtgg

SEQ ID NO: 172355 - DNA, 17 bp, synthetic construct
  source 1..17: mol_type = other DNA
tggccgtggatccggtg

SEQ ID NO: 172356 - DNA, 17 bp, synthetic construct
  source 1..17: mol_type = other DNA
gtggccgtggatccggt

SEQ ID NO: 172357 - DNA, 17 bp, synthetic construct
  source 1..17: mol_type = other DNA
ggtggccgtggatccgg

SEQ ID NO: 172358 - DNA, 17 bp, synthetic construct
  source 1..17: mol_type = other DNA
cggtggccgtggatccg

SEQ ID NO: 172359 - DNA, 17 bp, synthetic construct
  source 1..17: mol_type = other DNA
gcggtggccgtggatcc

SEQ ID NO: 172360 - DNA, 17 bp, synthetic construct
  source 1..17: mol_type = other DNA
ggcggtggccgtggatc

SEQ ID NO: 172361 - DNA, 17 bp, synthetic construct
  source 1..17: mol_type = other DNA
aggcggtggccgtggat

SEQ ID NO: 172362 - DNA, 17 bp, synthetic construct
  source 1..17: mol_type = other DNA
gaggcggtggccgtgga

SEQ ID NO: 172363 - DNA, 17 bp, synthetic construct
  source 1..17: mol_type = other DNA
ggaggcggtggccgtgg

SEQ ID NO: 172364 - DNA, 17 bp, synthetic construct
  source 1..17: mol_type = other DNA
aggaggcggtggccgtg

SEQ ID NO: 172365 - DNA, 17 bp, synthetic construct
  source 1..17: mol_type = other DNA
gaggaggcggtggccgt

SEQ ID NO: 172366 - DNA, 17 bp, synthetic construct
  source 1..17: mol_type = other DNA
ggaggaggcggtggccg

SEQ ID NO: 172367 - DNA, 17 bp, synthetic construct
  source 1..17: mol_type = other DNA
tggaggaggcggtggcc

SEQ ID NO: 172368 - DNA, 17 bp, synthetic construct
  source 1..17: mol_type = other DNA
gtggaggaggcggtggc

SEQ ID NO: 172369 - DNA, 17 bp, synthetic construct
  source 1..17: mol_type = other DNA
ggtggaggaggcggtgg

SEQ ID NO: 172370 - DNA, 17 bp, synthetic construct
  source 1..17: mol_type = other DNA
gggtggaggaggcggtg

SEQ ID NO: 172371 - DNA, 17 bp, synthetic construct
  source 1..17: mol_type = other DNA
tgggtggaggaggcggt

SEQ ID NO: 172372 - DNA, 17 bp, synthetic construct
  source 1..17: mol_type = other DNA
ctgggtggaggaggcgg

SEQ ID NO: 172373 - DNA, 17 bp, synthetic construct
  source 1..17: mol_type = other DNA
cctgggtggaggaggcg

SEQ ID NO: 172374 - DNA, 17 bp, synthetic construct
  source 1..17: mol_type = other DNA
gcctgggtggaggaggc

SEQ ID NO: 172375 - DNA, 17 bp, synthetic construct
  source 1..17: mol_type = other DNA
tgcctgggtggaggagg

SEQ ID NO: 172376 - DNA, 17 bp, synthetic construct
  source 1..17: mol_type = other DNA
ttgcctgggtggaggag

SEQ ID NO: 172377 - DNA, 17 bp, synthetic construct
  source 1..17: mol_type = other DNA
gttgcctgggtggagga

SEQ ID NO: 172378 - DNA, 17 bp, synthetic construct
  source 1..17: mol_type = other DNA
agttgcctgggtggagg

SEQ ID NO: 172379 - DNA, 17 bp, synthetic construct
  source 1..17: mol_type = other DNA
cagttgcctgggtggag

SEQ ID NO: 172380 - DNA, 17 bp, synthetic construct
  source 1..17: mol_type = other DNA
gcagttgcctgggtgga

SEQ ID NO: 172381 - DNA, 17 bp, synthetic construct
  source 1..17: mol_type = other DNA
agcagttgcctgggtgg

SEQ ID NO: 172382 - DNA, 17 bp, synthetic construct
  source 1..17: mol_type = other DNA
cagcagttgcctgggtg

SEQ ID NO: 172383 - DNA, 17 bp, synthetic construct
  source 1..17: mol_type = other DNA
ccagcagttgcctgggt

SEQ ID NO: 172384 - DNA, 17 bp, synthetic construct
  source 1..17: mol_type = other DNA
gccagcagttgcctggg

SEQ ID NO: 172385 - DNA, 17 bp, synthetic construct
  source 1..17: mol_type = other DNA
tgccagcagttgcctgg

SEQ ID NO: 172386 - DNA, 17 bp, synthetic construct
  source 1..17: mol_type = other DNA
gtgccagcagttgcctg

SEQ ID NO: 172387 - DNA, 17 bp, synthetic construct
  source 1..17: mol_type = other DNA
ggtgccagcagttgcct

SEQ ID NO: 172388 - DNA, 17 bp, synthetic construct
  source 1..17: mol_type = other DNA
gggtgccagcagttgcc

SEQ ID NO: 172389 - DNA, 17 bp, synthetic construct
  source 1..17: mol_type = other DNA
ggggtgccagcagttgc

SEQ ID NO: 172390 - DNA, 17 bp, synthetic construct
  source 1..17: mol_type = other DNA
tggggtgccagcagttg

SEQ ID NO: 172391 - DNA, 17 bp, synthetic construct
  source 1..17: mol_type = other DNA
gtggggtgccagcagtt

SEQ ID NO: 172392 - DNA, 17 bp, synthetic construct
  source 1..17: mol_type = other DNA
tgtggggtgccagcagt

SEQ ID NO: 172393 - DNA, 17 bp, synthetic construct
  source 1..17: mol_type = other DNA
atgtggggtgccagcag

SEQ ID NO: 172394 - DNA, 17 bp, synthetic construct
  source 1..17: mol_type = other DNA
catgtggggtgccagca

SEQ ID NO: 172395 - DNA, 17 bp, synthetic construct
  source 1..17: mol_type = other DNA
acatgtggggtgccagc

SEQ ID NO: 172396 - DNA, 17 bp, synthetic construct
  source 1..17: mol_type = other DNA
cacatgtggggtgccag

SEQ ID NO: 172397 - DNA, 17 bp, synthetic construct
  source 1..17: mol_type = other DNA
tcacatgtggggtgcca

SEQ ID NO: 172398 - DNA, 17 bp, synthetic construct
  source 1..17: mol_type = other DNA
ctcacatgtggggtgcc

SEQ ID NO: 172399 - DNA, 17 bp, synthetic construct
  source 1..17: mol_type = other DNA
gctcacatgtggggtgc

SEQ ID NO: 172400 - DNA, 17 bp, synthetic construct
  source 1..17: mol_type = other DNA
tgctcacatgtggggtg

SEQ ID NO: 172401 - DNA, 17 bp, synthetic construct
  source 1..17: mol_type = other DNA
gtgctcacatgtggggt

SEQ ID NO: 172402 - DNA, 17 bp, synthetic construct
  source 1..17: mol_type = other DNA
ggtgctcacatgtgggg

SEQ ID NO: 172403 - DNA, 17 bp, synthetic construct
  source 1..17: mol_type = other DNA
tggtgctcacatgtggg

SEQ ID NO: 172404 - DNA, 17 bp, synthetic construct
  source 1..17: mol_type = other DNA
gtggtgctcacatgtgg

SEQ ID NO: 172405 - DNA, 17 bp, synthetic construct
  source 1..17: mol_type = other DNA
cgtggtgctcacatgtg

SEQ ID NO: 172406 - DNA, 17 bp, synthetic construct
  source 1..17: mol_type = other DNA
ccgtggtgctcacatgt

SEQ ID NO: 172407 - DNA, 17 bp, synthetic construct
  source 1..17: mol_type = other DNA
gccgtggtgctcacatg

SEQ ID NO: 172408 - DNA, 17 bp, synthetic construct
  source 1..17: mol_type = other DNA
ggccgtggtgctcacat

SEQ ID NO: 172409 - DNA, 17 bp, synthetic construct
  source 1..17: mol_type = other DNA
tggccgtggtgctcaca

SEQ ID NO: 172410 - DNA, 17 bp, synthetic construct
  source 1..17: mol_type = other DNA
gtggccgtggtgctcac

SEQ ID NO: 172411 - DNA, 17 bp, synthetic construct
  source 1..17: mol_type = other DNA
cgtggccgtggtgctca

SEQ ID NO: 172412 - DNA, 17 bp, synthetic construct
  source 1..17: mol_type = other DNA
tcgtggccgtggtgctc

SEQ ID NO: 172413 - DNA, 17 bp, synthetic construct
  source 1..17: mol_type = other DNA
gtcgtggccgtggtgct

SEQ ID NO: 172414 - DNA, 17 bp, synthetic construct
  source 1..17: mol_type = other DNA
tgtcgtggccgtggtgc

SEQ ID NO: 172415 - DNA, 17 bp, synthetic construct
  source 1..17: mol_type = other DNA
gtgtcgtggccgtggtg

SEQ ID NO: 172416 - DNA, 17 bp, synthetic construct
  source 1..17: mol_type = other DNA
ggtgtcgtggccgtggt

SEQ ID NO: 172417 - DNA, 17 bp, synthetic construct
  source 1..17: mol_type = other DNA
gggtgtcgtggccgtgg

SEQ ID NO: 172418 - DNA, 17 bp, synthetic construct
  source 1..17: mol_type = other DNA
tgggtgtcgtggccgtg

SEQ ID NO: 172419 - DNA, 17 bp, synthetic construct
  source 1..17: mol_type = other DNA
gtgggtgtcgtggccgt

SEQ ID NO: 172420 - DNA, 17 bp, synthetic construct
  source 1..17: mol_type = other DNA
tgtgggtgtcgtggccg

SEQ ID NO: 172421 - DNA, 17 bp, synthetic construct
  source 1..17: mol_type = other DNA
ctgtgggtgtcgtggcc

SEQ ID NO: 172422 - DNA, 17 bp, synthetic construct
  source 1..17: mol_type = other DNA
actgtgggtgtcgtggc

SEQ ID NO: 172423 - DNA, 17 bp, synthetic construct
  source 1..17: mol_type = other DNA
gactgtgggtgtcgtgg

SEQ ID NO: 172424 - DNA, 17 bp, synthetic construct
  source 1..17: mol_type = other DNA
tgactgtgggtgtcgtg

SEQ ID NO: 172425 - DNA, 17 bp, synthetic construct
  source 1..17: mol_type = other DNA
gtgactgtgggtgtcgt

SEQ ID NO: 172426 - DNA, 17 bp, synthetic construct
  source 1..17: mol_type = other DNA
ggtgactgtgggtgtcg

SEQ ID NO: 172427 - DNA, 17 bp, synthetic construct
  source 1..17: mol_type = other DNA
tggtgactgtgggtgtc

SEQ ID NO: 172428 - DNA, 17 bp, synthetic construct
  source 1..17: mol_type = other DNA
ctggtgactgtgggtgt

SEQ ID NO: 172429 - DNA, 17 bp, synthetic construct
  source 1..17: mol_type = other DNA
gctggtgactgtgggtg

SEQ ID NO: 172430 - DNA, 17 bp, synthetic construct
  source 1..17: mol_type = other DNA
agctggtgactgtgggt

SEQ ID NO: 172431 - DNA, 17 bp, synthetic construct
  source 1..17: mol_type = other DNA
gagctggtgactgtggg

SEQ ID NO: 172432 - DNA, 17 bp, synthetic construct
  source 1..17: mol_type = other DNA
ggagctggtgactgtgg

SEQ ID NO: 172433 - DNA, 17 bp, synthetic construct
  source 1..17: mol_type = other DNA
tggagctggtgactgtg

SEQ ID NO: 172434 - DNA, 17 bp, synthetic construct
  source 1..17: mol_type = other DNA
ttggagctggtgactgt

SEQ ID NO: 172435 - DNA, 17 bp, synthetic construct
  source 1..17: mol_type = other DNA
tttggagctggtgactg

SEQ ID NO: 172436 - DNA, 17 bp, synthetic construct
  source 1..17: mol_type = other DNA
ctttggagctggtgact

SEQ ID NO: 172437 - DNA, 17 bp, synthetic construct
  source 1..17: mol_type = other DNA
gctttggagctggtgac

SEQ ID NO: 172438 - DNA, 17 bp, synthetic construct
  source 1..17: mol_type = other DNA
ggctttggagctggtga

SEQ ID NO: 172439 - DNA, 17 bp, synthetic construct
  source 1..17: mol_type = other DNA
tggctttggagctggtg

SEQ ID NO: 172440 - DNA, 17 bp, synthetic construct
  source 1..17: mol_type = other DNA
gtggctttggagctggt

SEQ ID NO: 172441 - DNA, 17 bp, synthetic construct
  source 1..17: mol_type = other DNA
agtggctttggagctgg

SEQ ID NO: 172442 - DNA, 17 bp, synthetic construct
  source 1..17: mol_type = other DNA
gagtggctttggagctg

SEQ ID NO: 172443 - DNA, 17 bp, synthetic construct
  source 1..17: mol_type = other DNA
ggagtggctttggagct

SEQ ID NO: 172444 - DNA, 17 bp, synthetic construct
  source 1..17: mol_type = other DNA
gggagtggctttggagc

SEQ ID NO: 172445 - DNA, 17 bp, synthetic construct
  source 1..17: mol_type = other DNA
agggagtggctttggag

SEQ ID NO: 172446 - DNA, 17 bp, synthetic construct
  source 1..17: mol_type = other DNA
aagggagtggctttgga

SEQ ID NO: 172447 - DNA, 17 bp, synthetic construct
  source 1..17: mol_type = other DNA
gaagggagtggctttgg

SEQ ID NO: 172448 - DNA, 17 bp, synthetic construct
  source 1..17: mol_type = other DNA
agaagggagtggctttg

SEQ ID NO: 172449 - DNA, 17 bp, synthetic construct
  source 1..17: mol_type = other DNA
gagaagggagtggcttt

SEQ ID NO: 172450 - DNA, 17 bp, synthetic construct
  source 1..17: mol_type = other DNA
ggagaagggagtggctt

SEQ ID NO: 172451 - DNA, 17 bp, synthetic construct
  source 1..17: mol_type = other DNA
tggagaagggagtggct

SEQ ID NO: 172452 - DNA, 17 bp, synthetic construct
  source 1..17: mol_type = other DNA
ctggagaagggagtggc

SEQ ID NO: 172453 - DNA, 17 bp, synthetic construct
  source 1..17: mol_type = other DNA
actggagaagggagtgg

SEQ ID NO: 172454 - DNA, 17 bp, synthetic construct
  source 1..17: mol_type = other DNA
gactggagaagggagtg

SEQ ID NO: 172455 - DNA, 17 bp, synthetic construct
  source 1..17: mol_type = other DNA
ggactggagaagggagt

SEQ ID NO: 172456 - DNA, 17 bp, synthetic construct
  source 1..17: mol_type = other DNA
tggactggagaagggag

SEQ ID NO: 172457 - DNA, 17 bp, synthetic construct
  source 1..17: mol_type = other DNA
ctggactggagaaggga

SEQ ID NO: 172458 - DNA, 17 bp, synthetic construct
  source 1..17: mol_type = other DNA
cctggactggagaaggg

SEQ ID NO: 172459 - DNA, 17 bp, synthetic construct
  source 1..17: mol_type = other DNA
ccctggactggagaagg

SEQ ID NO: 172460 - DNA, 17 bp, synthetic construct
  source 1..17: mol_type = other DNA
tccctggactggagaag

SEQ ID NO: 172461 - DNA, 17 bp, synthetic construct
  source 1..17: mol_type = other DNA
gtccctggactggagaa

SEQ ID NO: 172462 - DNA, 17 bp, synthetic construct
  source 1..17: mol_type = other DNA
agtccctggactggaga

SEQ ID NO: 172463 - DNA, 17 bp, synthetic construct
  source 1..17: mol_type = other DNA
cagtccctggactggag

SEQ ID NO: 172464 - DNA, 17 bp, synthetic construct
  source 1..17: mol_type = other DNA
gcagtccctggactgga

SEQ ID NO: 172465 - DNA, 17 bp, synthetic construct
  source 1..17: mol_type = other DNA
tgcagtccctggactgg

SEQ ID NO: 172466 - DNA, 17 bp, synthetic construct
  source 1..17: mol_type = other DNA
ttgcagtccctggactg

SEQ ID NO: 172467 - DNA, 17 bp, synthetic construct
  source 1..17: mol_type = other DNA
gttgcagtccctggact

SEQ ID NO: 172468 - DNA, 17 bp, synthetic construct
  source 1..17: mol_type = other DNA
ggttgcagtccctggac

SEQ ID NO: 172469 - DNA, 17 bp, synthetic construct
  source 1..17: mol_type = other DNA
cggttgcagtccctgga

SEQ ID NO: 172470 - DNA, 17 bp, synthetic construct
  source 1..17: mol_type = other DNA
gcggttgcagtccctgg

SEQ ID NO: 172471 - DNA, 17 bp, synthetic construct
  source 1..17: mol_type = other DNA
ggcggttgcagtccctg

SEQ ID NO: 172472 - DNA, 17 bp, synthetic construct
  source 1..17: mol_type = other DNA
gggcggttgcagtccct

SEQ ID NO: 172473 - DNA, 17 bp, synthetic construct
  source 1..17: mol_type = other DNA
agggcggttgcagtccc

SEQ ID NO: 172474 - DNA, 17 bp, synthetic construct
  source 1..17: mol_type = other DNA
aagggcggttgcagtcc

SEQ ID NO: 172475 - DNA, 17 bp, synthetic construct
  source 1..17: mol_type = other DNA
gaagggcggttgcagtc

SEQ ID NO: 172476 - DNA, 17 bp, synthetic construct
  source 1..17: mol_type = other DNA
ggaagggcggttgcagt

SEQ ID NO: 172477 - DNA, 17 bp, synthetic construct
  source 1..17: mol_type = other DNA
tggaagggcggttgcag

SEQ ID NO: 172478 - DNA, 17 bp, synthetic construct
  source 1..17: mol_type = other DNA
ctggaagggcggttgca

SEQ ID NO: 172479 - DNA, 17 bp, synthetic construct
  source 1..17: mol_type = other DNA
gctggaagggcggttgc

SEQ ID NO: 172480 - DNA, 17 bp, synthetic construct
  source 1..17: mol_type = other DNA
tgctggaagggcggttg

SEQ ID NO: 172481 - DNA, 17 bp, synthetic construct
  source 1..17: mol_type = other DNA
gtgctggaagggcggtt

SEQ ID NO: 172482 - DNA, 17 bp, synthetic construct
  source 1..17: mol_type = other DNA
agtgctggaagggcggt

SEQ ID NO: 172483 - DNA, 17 bp, synthetic construct
  source 1..17: mol_type = other DNA
cagtgctggaagggcgg

SEQ ID NO: 172484 - DNA, 17 bp, synthetic construct
  source 1..17: mol_type = other DNA
tcagtgctggaagggcg

SEQ ID NO: 172485 - DNA, 17 bp, synthetic construct
  source 1..17: mol_type = other DNA
ctcagtgctggaagggc

SEQ ID NO: 172486 - DNA, 17 bp, synthetic construct
  source 1..17: mol_type = other DNA
tctcagtgctggaaggg

SEQ ID NO: 172487 - DNA, 17 bp, synthetic construct
  source 1..17: mol_type = other DNA
ttctcagtgctggaagg

SEQ ID NO: 172488 - DNA, 17 bp, synthetic construct
  source 1..17: mol_type = other DNA
cttctcagtgctggaag

SEQ ID NO: 172489 - DNA, 17 bp, synthetic construct
  source 1..17: mol_type = other DNA
gcttctcagtgctggaa

SEQ ID NO: 172490 - DNA, 17 bp, synthetic construct
  source 1..17: mol_type = other DNA
tgcttctcagtgctgga

SEQ ID NO: 172491 - DNA, 17 bp, synthetic construct
  source 1..17: mol_type = other DNA
gtgcttctcagtgctgg

SEQ ID NO: 172492 - DNA, 17 bp, synthetic construct
  source 1..17: mol_type = other DNA
tgtgcttctcagtgctg

SEQ ID NO: 172493 - DNA, 17 bp, synthetic construct
  source 1..17: mol_type = other DNA
ctgtgcttctcagtgct

SEQ ID NO: 172494 - DNA, 17 bp, synthetic construct
  source 1..17: mol_type = other DNA
gctgtgcttctcagtgc

SEQ ID NO: 172495 - DNA, 17 bp, synthetic construct
  source 1..17: mol_type = other DNA
ggctgtgcttctcagtg

SEQ ID NO: 172496 - DNA, 17 bp, synthetic construct
  source 1..17: mol_type = other DNA
tggctgtgcttctcagt

SEQ ID NO: 172497 - DNA, 17 bp, synthetic construct
  source 1..17: mol_type = other DNA
gtggctgtgcttctcag

SEQ ID NO: 172498 - DNA, 17 bp, synthetic construct
  source 1..17: mol_type = other DNA
ggtggctgtgcttctca

SEQ ID NO: 172499 - DNA, 17 bp, synthetic construct
  source 1..17: mol_type = other DNA
tggtggctgtgcttctc

SEQ ID NO: 172500 - DNA, 17 bp, synthetic construct
  source 1..17: mol_type = other DNA
gtggtggctgtgcttct

SEQ ID NO: 172501 - DNA, 17 bp, synthetic construct
  source 1..17: mol_type = other DNA
tgtggtggctgtgcttc

SEQ ID NO: 172502 - DNA, 17 bp, synthetic construct
  source 1..17: mol_type = other DNA
gtgtggtggctgtgctt

SEQ ID NO: 172503 - DNA, 17 bp, synthetic construct
  source 1..17: mol_type = other DNA
ggtgtggtggctgtgct

SEQ ID NO: 172504 - DNA, 17 bp, synthetic construct
  source 1..17: mol_type = other DNA
gggtgtggtggctgtgc

SEQ ID NO: 172505 - DNA, 17 bp, synthetic construct
  source 1..17: mol_type = other DNA
tgggtgtggtggctgtg

SEQ ID NO: 172506 - DNA, 17 bp, synthetic construct
  source 1..17: mol_type = other DNA
gtgggtgtggtggctgt

SEQ ID NO: 172507 - DNA, 17 bp, synthetic construct
  source 1..17: mol_type = other DNA
tgtgggtgtggtggctg

SEQ ID NO: 172508 - DNA, 17 bp, synthetic construct
  source 1..17: mol_type = other DNA
ctgtgggtgtggtggct

SEQ ID NO: 172509 - DNA, 17 bp, synthetic construct
  source 1..17: mol_type = other DNA
gctgtgggtgtggtggc

SEQ ID NO: 172510 - DNA, 17 bp, synthetic construct
  source 1..17: mol_type = other DNA
agctgtgggtgtggtgg

SEQ ID NO: 172511 - DNA, 17 bp, synthetic construct
  source 1..17: mol_type = other DNA
tagctgtgggtgtggtg

SEQ ID NO: 172512 - DNA, 17 bp, synthetic construct
  source 1..17: mol_type = other DNA
gtagctgtgggtgtggt

SEQ ID NO: 172513 - DNA, 17 bp, synthetic construct
  source 1..17: mol_type = other DNA
ggtagctgtgggtgtgg

SEQ ID NO: 172514 - DNA, 17 bp, synthetic construct
  source 1..17: mol_type = other DNA
tggtagctgtgggtgtg

SEQ ID NO: 172515 - DNA, 17 bp, synthetic construct
  source 1..17: mol_type = other DNA
ctggtagctgtgggtgt

SEQ ID NO: 172516 - DNA, 17 bp, synthetic construct
  source 1..17: mol_type = other DNA
gctggtagctgtgggtg

SEQ ID NO: 172517 - DNA, 17 bp, synthetic construct
  source 1..17: mol_type = other DNA
agctggtagctgtgggt

SEQ ID NO: 172518 - DNA, 17 bp, synthetic construct
  source 1..17: mol_type = other DNA
aagctggtagctgtggg

SEQ ID NO: 172519 - DNA, 17 bp, synthetic construct
  source 1..17: mol_type = other DNA
aaagctggtagctgtgg

SEQ ID NO: 172520 - DNA, 17 bp, synthetic construct
  source 1..17: mol_type = other DNA
taaagctggtagctgtg

SEQ ID NO: 172521 - DNA, 17 bp, synthetic construct
  source 1..17: mol_type = other DNA
gtaaagctggtagctgt

SEQ ID NO: 172522 - DNA, 17 bp, synthetic construct
  source 1..17: mol_type = other DNA
tgtaaagctggtagctg

SEQ ID NO: 172523 - DNA, 17 bp, synthetic construct
  source 1..17: mol_type = other DNA
ctgtaaagctggtagct

SEQ ID NO: 172524 - DNA, 17 bp, synthetic construct
  source 1..17: mol_type = other DNA
gctgtaaagctggtagc

SEQ ID NO: 172525 - DNA, 17 bp, synthetic construct
  source 1..17: mol_type = other DNA
ggctgtaaagctggtag

SEQ ID NO: 172526 - DNA, 17 bp, synthetic construct
  source 1..17: mol_type = other DNA
tggctgtaaagctggta

SEQ ID NO: 172527 - DNA, 17 bp, synthetic construct
  source 1..17: mol_type = other DNA
atggctgtaaagctggt

SEQ ID NO: 172528 - DNA, 17 bp, synthetic construct
  source 1..17: mol_type = other DNA
gatggctgtaaagctgg

SEQ ID NO: 172529 - DNA, 17 bp, synthetic construct
  source 1..17: mol_type = other DNA
ggatggctgtaaagctg

SEQ ID NO: 172530 - DNA, 17 bp, synthetic construct
  source 1..17: mol_type = other DNA
gggatggctgtaaagct

SEQ ID NO: 172531 - DNA, 17 bp, synthetic construct
  source 1..17: mol_type = other DNA
ggggatggctgtaaagc

SEQ ID NO: 172532 - DNA, 17 bp, synthetic construct
  source 1..17: mol_type = other DNA
aggggatggctgtaaag

SEQ ID NO: 172533 - DNA, 17 bp, synthetic construct
  source 1..17: mol_type = other DNA
gaggggatggctgtaaa

SEQ ID NO: 172534 - DNA, 17 bp, synthetic construct
  source 1..17: mol_type = other DNA
ggaggggatggctgtaa

SEQ ID NO: 172535 - DNA, 17 bp, synthetic construct
  source 1..17: mol_type = other DNA
aggaggggatggctgta

SEQ ID NO: 172536 - DNA, 17 bp, synthetic construct
  source 1..17: mol_type = other DNA
gaggaggggatggctgt

SEQ ID NO: 172537 - DNA, 17 bp, synthetic construct
  source 1..17: mol_type = other DNA
ggaggaggggatggctg

SEQ ID NO: 172538 - DNA, 17 bp, synthetic construct
  source 1..17: mol_type = other DNA
aggaggaggggatggct

SEQ ID NO: 172539 - DNA, 17 bp, synthetic construct
  source 1..17: mol_type = other DNA
gaggaggaggggatggc

SEQ ID NO: 172540 - DNA, 17 bp, synthetic construct
  source 1..17: mol_type = other DNA
ggaggaggaggggatgg

SEQ ID NO: 172541 - DNA, 17 bp, synthetic construct
  source 1..17: mol_type = other DNA
gggaggaggaggggatg

SEQ ID NO: 172542 - DNA, 17 bp, synthetic construct
  source 1..17: mol_type = other DNA
agggaggaggaggggat

SEQ ID NO: 172543 - DNA, 17 bp, synthetic construct
  source 1..17: mol_type = other DNA
cagggaggaggagggga

SEQ ID NO: 172544 - DNA, 17 bp, synthetic construct
  source 1..17: mol_type = other DNA
ccagggaggaggagggg

SEQ ID NO: 172545 - DNA, 17 bp, synthetic construct
  source 1..17: mol_type = other DNA
cccagggaggaggaggg

SEQ ID NO: 172546 - DNA, 17 bp, synthetic construct
  source 1..17: mol_type = other DNA
gcccagggaggaggagg

SEQ ID NO: 172547 - DNA, 17 bp, synthetic construct
  source 1..17: mol_type = other DNA
tgcccagggaggaggag

SEQ ID NO: 172548 - DNA, 17 bp, synthetic construct
  source 1..17: mol_type = other DNA
gtgcccagggaggagga

SEQ ID NO: 172549 - DNA, 17 bp, synthetic construct
  source 1..17: mol_type = other DNA
ggtgcccagggaggagg

SEQ ID NO: 172550 - DNA, 17 bp, synthetic construct
  source 1..17: mol_type = other DNA
tggtgcccagggaggag

SEQ ID NO: 172551 - DNA, 17 bp, synthetic construct
  source 1..17: mol_type = other DNA
gtggtgcccagggagga

SEQ ID NO: 172552 - DNA, 17 bp, synthetic construct
  source 1..17: mol_type = other DNA
ggtggtgcccagggagg

SEQ ID NO: 172553 - DNA, 17 bp, synthetic construct
  source 1..17: mol_type = other DNA
aggtggtgcccagggag

SEQ ID NO: 172554 - DNA, 17 bp, synthetic construct
  source 1..17: mol_type = other DNA
caggtggtgcccaggga

SEQ ID NO: 172555 - DNA, 17 bp, synthetic construct
  source 1..17: mol_type = other DNA
ccaggtggtgcccaggg

SEQ ID NO: 172556 - DNA, 17 bp, synthetic construct
  source 1..17: mol_type = other DNA
tccaggtggtgcccagg

SEQ ID NO: 172557 - DNA, 17 bp, synthetic construct
  source 1..17: mol_type = other DNA
gtccaggtggtgcccag

SEQ ID NO: 172558 - DNA, 17 bp, synthetic construct
  source 1..17: mol_type = other DNA
ggtccaggtggtgccca

SEQ ID NO: 172559 - DNA, 17 bp, synthetic construct
  source 1..17: mol_type = other DNA
gggtccaggtggtgccc

SEQ ID NO: 172560 - DNA, 17 bp, synthetic construct
  source 1..17: mol_type = other DNA
cgggtccaggtggtgcc

SEQ ID NO: 172561 - DNA, 17 bp, synthetic construct
  source 1..17: mol_type = other DNA
gcgggtccaggtggtgc

SEQ ID NO: 172562 - DNA, 17 bp, synthetic construct
  source 1..17: mol_type = other DNA
ggcgggtccaggtggtg

SEQ ID NO: 172563 - DNA, 17 bp, synthetic construct
  source 1..17: mol_type = other DNA
aggcgggtccaggtggt

SEQ ID NO: 172564 - DNA, 17 bp, synthetic construct
  source 1..17: mol_type = other DNA
taggcgggtccaggtgg

SEQ ID NO: 172565 - DNA, 17 bp, synthetic construct
  source 1..17: mol_type = other DNA
ataggcgggtccaggtg

SEQ ID NO: 172566 - DNA, 17 bp, synthetic construct
  source 1..17: mol_type = other DNA
gataggcgggtccaggt

SEQ ID NO: 172567 - DNA, 17 bp, synthetic construct
  source 1..17: mol_type = other DNA
tgataggcgggtccagg

SEQ ID NO: 172568 - DNA, 17 bp, synthetic construct
  source 1..17: mol_type = other DNA
gtgataggcgggtccag

SEQ ID NO: 172569 - DNA, 17 bp, synthetic construct
  source 1..17: mol_type = other DNA
tgtgataggcgggtcca

SEQ ID NO: 172570 - DNA, 17 bp, synthetic construct
  source 1..17: mol_type = other DNA
ctgtgataggcgggtcc

SEQ ID NO: 172571 - DNA, 17 bp, synthetic construct
  source 1..17: mol_type = other DNA
tctgtgataggcgggtc

SEQ ID NO: 172572 - DNA, 17 bp, synthetic construct
  source 1..17: mol_type = other DNA
gtctgtgataggcgggt

SEQ ID NO: 172573 - DNA, 17 bp, synthetic construct
  source 1..17: mol_type = other DNA
ggtctgtgataggcggg

SEQ ID NO: 172574 - DNA, 17 bp, synthetic construct
  source 1..17: mol_type = other DNA
tggtctgtgataggcgg

SEQ ID NO: 172575 - DNA, 17 bp, synthetic construct
  source 1..17: mol_type = other DNA
gtggtctgtgataggcg

SEQ ID NO: 172576 - DNA, 17 bp, synthetic construct
  source 1..17: mol_type = other DNA
ggtggtctgtgataggc

SEQ ID NO: 172577 - DNA, 17 bp, synthetic construct
  source 1..17: mol_type = other DNA
tggtggtctgtgatagg

SEQ ID NO: 172578 - DNA, 17 bp, synthetic construct
  source 1..17: mol_type = other DNA
gtggtggtctgtgatag

SEQ ID NO: 172579 - DNA, 17 bp, synthetic construct
  source 1..17: mol_type = other DNA
tgtggtggtctgtgata

SEQ ID NO: 172580 - DNA, 17 bp, synthetic construct
  source 1..17: mol_type = other DNA
gtgtggtggtctgtgat

SEQ ID NO: 172581 - DNA, 17 bp, synthetic construct
  source 1..17: mol_type = other DNA
ggtgtggtggtctgtga

SEQ ID NO: 172582 - DNA, 17 bp, synthetic construct
  source 1..17: mol_type = other DNA
gggtgtggtggtctgtg

SEQ ID NO: 172583 - DNA, 17 bp, synthetic construct
  source 1..17: mol_type = other DNA
tgggtgtggtggtctgt

SEQ ID NO: 172584 - DNA, 17 bp, synthetic construct
  source 1..17: mol_type = other DNA
gtgggtgtggtggtctg

SEQ ID NO: 172585 - DNA, 17 bp, synthetic construct
  source 1..17: mol_type = other DNA
cgtgggtgtggtggtct

SEQ ID NO: 172586 - DNA, 17 bp, synthetic construct
  source 1..17: mol_type = other DNA
ccgtgggtgtggtggtc

SEQ ID NO: 172587 - DNA, 17 bp, synthetic construct
  source 1..17: mol_type = other DNA
gccgtgggtgtggtggt

SEQ ID NO: 172588 - DNA, 17 bp, synthetic construct
  source 1..17: mol_type = other DNA
ggccgtgggtgtggtgg

SEQ ID NO: 172589 - DNA, 17 bp, synthetic construct
  source 1..17: mol_type = other DNA
tggccgtgggtgtggtg

SEQ ID NO: 172590 - DNA, 17 bp, synthetic construct
  source 1..17: mol_type = other DNA
gtggccgtgggtgtggt

SEQ ID NO: 172591 - DNA, 17 bp, synthetic construct
  source 1..17: mol_type = other DNA
ggtggccgtgggtgtgg

SEQ ID NO: 172592 - DNA, 17 bp, synthetic construct
  source 1..17: mol_type = other DNA
tggtggccgtgggtgtg

SEQ ID NO: 172593 - DNA, 17 bp, synthetic construct
  source 1..17: mol_type = other DNA
atggtggccgtgggtgt

SEQ ID NO: 172594 - DNA, 17 bp, synthetic construct
  source 1..17: mol_type = other DNA
catggtggccgtgggtg

SEQ ID NO: 172595 - DNA, 17 bp, synthetic construct
  source 1..17: mol_type = other DNA
acatggtggccgtgggt

SEQ ID NO: 172596 - DNA, 17 bp, synthetic construct
  source 1..17: mol_type = other DNA
gacatggtggccgtggg

SEQ ID NO: 172597 - DNA, 17 bp, synthetic construct
  source 1..17: mol_type = other DNA
ggacatggtggccgtgg

SEQ ID NO: 172598 - DNA, 17 bp, synthetic construct
  source 1..17: mol_type = other DNA
tggacatggtggccgtg

SEQ ID NO: 172599 - DNA, 17 bp, synthetic construct
  source 1..17: mol_type = other DNA
gtggacatggtggccgt

SEQ ID NO: 172600 - DNA, 17 bp, synthetic construct
  source 1..17: mol_type = other DNA
tgtggacatggtggccg

SEQ ID NO: 172601 - DNA, 17 bp, synthetic construct
  source 1..17: mol_type = other DNA
ctgtggacatggtggcc

SEQ ID NO: 172602 - DNA, 17 bp, synthetic construct
  source 1..17: mol_type = other DNA
gctgtggacatggtggc

SEQ ID NO: 172603 - DNA, 17 bp, synthetic construct
  source 1..17: mol_type = other DNA
ggctgtggacatggtgg

SEQ ID NO: 172604 - DNA, 17 bp, synthetic construct
  source 1..17: mol_type = other DNA
tggctgtggacatggtg

SEQ ID NO: 172605 - DNA, 17 bp, synthetic construct
  source 1..17: mol_type = other DNA
gtggctgtggacatggt

SEQ ID NO: 172606 - DNA, 17 bp, synthetic construct
  source 1..17: mol_type = other DNA
tgtggctgtggacatgg

SEQ ID NO: 172607 - DNA, 17 bp, synthetic construct
  source 1..17: mol_type = other DNA
gtgtggctgtggacatg

SEQ ID NO: 172608 - DNA, 17 bp, synthetic construct
  source 1..17: mol_type = other DNA
ggtgtggctgtggacat

SEQ ID NO: 172609 - DNA, 17 bp, synthetic construct
  source 1..17: mol_type = other DNA
gggtgtggctgtggaca

SEQ ID NO: 172610 - DNA, 17 bp, synthetic construct
  source 1..17: mol_type = other DNA
agggtgtggctgtggac

SEQ ID NO: 172611 - DNA, 17 bp, synthetic construct
  source 1..17: mol_type = other DNA
gagggtgtggctgtgga

SEQ ID NO: 172612 - DNA, 17 bp, synthetic construct
  source 1..17: mol_type = other DNA
ggagggtgtggctgtgg

SEQ ID NO: 172613 - DNA, 17 bp, synthetic construct
  source 1..17: mol_type = other DNA
aggagggtgtggctgtg

SEQ ID NO: 172614 - DNA, 17 bp, synthetic construct
  source 1..17: mol_type = other DNA
gaggagggtgtggctgt

SEQ ID NO: 172615 - DNA, 17 bp, synthetic construct
  source 1..17: mol_type = other DNA
ggaggagggtgtggctg

SEQ ID NO: 172616 - DNA, 17 bp, synthetic construct
  source 1..17: mol_type = other DNA
tggaggagggtgtggct

SEQ ID NO: 172617 - DNA, 17 bp, synthetic construct
  source 1..17: mol_type = other DNA
gtggaggagggtgtggc

SEQ ID NO: 172618 - DNA, 17 bp, synthetic construct
  source 1..17: mol_type = other DNA
agtggaggagggtgtgg

SEQ ID NO: 172619 - DNA, 17 bp, synthetic construct
  source 1..17: mol_type = other DNA
gagtggaggagggtgtg

SEQ ID NO: 172620 - DNA, 17 bp, synthetic construct
  source 1..17: mol_type = other DNA
ggagtggaggagggtgt

SEQ ID NO: 172621 - DNA, 17 bp, synthetic construct
  source 1..17: mol_type = other DNA
tggagtggaggagggtg

SEQ ID NO: 172622 - DNA, 17 bp, synthetic construct
  source 1..17: mol_type = other DNA
ctggagtggaggagggt

SEQ ID NO: 172623 - DNA, 17 bp, synthetic construct
  source 1..17: mol_type = other DNA
tctggagtggaggaggg

SEQ ID NO: 172624 - DNA, 17 bp, synthetic construct
  source 1..17: mol_type = other DNA
ctctggagtggaggagg

SEQ ID NO: 172625 - DNA, 17 bp, synthetic construct
  source 1..17: mol_type = other DNA
tctctggagtggaggag

SEQ ID NO: 172626 - DNA, 17 bp, synthetic construct
  source 1..17: mol_type = other DNA
gtctctggagtggagga

SEQ ID NO: 172627 - DNA, 17 bp, synthetic construct
  source 1..17: mol_type = other DNA
agtctctggagtggagg

SEQ ID NO: 172628 - DNA, 17 bp, synthetic construct
  source 1..17: mol_type = other DNA
cagtctctggagtggag

SEQ ID NO: 172629 - DNA, 17 bp, synthetic construct
  source 1..17: mol_type = other DNA
gcagtctctggagtgga

SEQ ID NO: 172630 - DNA, 17 bp, synthetic construct
  source 1..17: mol_type = other DNA
ggcagtctctggagtgg

SEQ ID NO: 172631 - DNA, 17 bp, synthetic construct
  source 1..17: mol_type = other DNA
gggcagtctctggagtg

SEQ ID NO: 172632 - DNA, 17 bp, synthetic construct
  source 1..17: mol_type = other DNA
tgggcagtctctggagt

SEQ ID NO: 172633 - DNA, 17 bp, synthetic construct
  source 1..17: mol_type = other DNA
gtgggcagtctctggag

SEQ ID NO: 172634 - DNA, 17 bp, synthetic construct
  source 1..17: mol_type = other DNA
tgtgggcagtctctgga

SEQ ID NO: 172635 - DNA, 17 bp, synthetic construct
  source 1..17: mol_type = other DNA
gtgtgggcagtctctgg

SEQ ID NO: 172636 - DNA, 17 bp, synthetic construct
  source 1..17: mol_type = other DNA
ggtgtgggcagtctctg

SEQ ID NO: 172637 - DNA, 17 bp, synthetic construct
  source 1..17: mol_type = other DNA
aggtgtgggcagtctct

SEQ ID NO: 172638 - DNA, 17 bp, synthetic construct
  source 1..17: mol_type = other DNA
gaggtgtgggcagtctc

SEQ ID NO: 172639 - DNA, 17 bp, synthetic construct
  source 1..17: mol_type = other DNA
ggaggtgtgggcagtct

SEQ ID NO: 172640 - DNA, 17 bp, synthetic construct
  source 1..17: mol_type = other DNA
tggaggtgtgggcagtc

SEQ ID NO: 172641 - DNA, 17 bp, synthetic construct
  source 1..17: mol_type = other DNA
gtggaggtgtgggcagt

SEQ ID NO: 172642 - DNA, 17 bp, synthetic construct
  source 1..17: mol_type = other DNA
tgtggaggtgtgggcag

SEQ ID NO: 172643 - DNA, 17 bp, synthetic construct
  source 1..17: mol_type = other DNA
ctgtggaggtgtgggca

SEQ ID NO: 172644 - DNA, 17 bp, synthetic construct
  source 1..17: mol_type = other DNA
actgtggaggtgtgggc

SEQ ID NO: 172645 - DNA, 17 bp, synthetic construct
  source 1..17: mol_type = other DNA
cactgtggaggtgtggg

SEQ ID NO: 172646 - DNA, 17 bp, synthetic construct
  source 1..17: mol_type = other DNA
gcactgtggaggtgtgg

SEQ ID NO: 172647 - DNA, 17 bp, synthetic construct
  source 1..17: mol_type = other DNA
agcactgtggaggtgtg

SEQ ID NO: 172648 - DNA, 17 bp, synthetic construct
  source 1..17: mol_type = other DNA
aagcactgtggaggtgt

SEQ ID NO: 172649 - DNA, 17 bp, synthetic construct
  source 1..17: mol_type = other DNA
taagcactgtggaggtg

SEQ ID NO: 172650 - DNA, 17 bp, synthetic construct
  source 1..17: mol_type = other DNA
gtaagcactgtggaggt

SEQ ID NO: 172651 - DNA, 17 bp, synthetic construct
  source 1..17: mol_type = other DNA
ggtaagcactgtggagg

SEQ ID NO: 172652 - DNA, 17 bp, synthetic construct
  source 1..17: mol_type = other DNA
tggtaagcactgtggag

SEQ ID NO: 172653 - DNA, 17 bp, synthetic construct
  source 1..17: mol_type = other DNA
gtggtaagcactgtgga

SEQ ID NO: 172654 - DNA, 17 bp, synthetic construct
  source 1..17: mol_type = other DNA
ggtggtaagcactgtgg

SEQ ID NO: 172655 - DNA, 17 bp, synthetic construct
  source 1..17: mol_type = other DNA
tggtggtaagcactgtg

SEQ ID NO: 172656 - DNA, 17 bp, synthetic construct
  source 1..17: mol_type = other DNA
gtggtggtaagcactgt

SEQ ID NO: 172657 - DNA, 17 bp, synthetic construct
  source 1..17: mol_type = other DNA
cgtggtggtaagcactg

SEQ ID NO: 172658 - DNA, 17 bp, synthetic construct
  source 1..17: mol_type = other DNA
ccgtggtggtaagcact

SEQ ID NO: 172659 - DNA, 17 bp, synthetic construct
  source 1..17: mol_type = other DNA
gccgtggtggtaagcac

SEQ ID NO: 172660 - DNA, 17 bp, synthetic construct
  source 1..17: mol_type = other DNA
ggccgtggtggtaagca

SEQ ID NO: 172661 - DNA, 17 bp, synthetic construct
  source 1..17: mol_type = other DNA
tggccgtggtggtaagc

SEQ ID NO: 172662 - DNA, 17 bp, synthetic construct
  source 1..17: mol_type = other DNA
gtggccgtggtggtaag

SEQ ID NO: 172663 - DNA, 17 bp, synthetic construct
  source 1..17: mol_type = other DNA
ggtggccgtggtggtaa

SEQ ID NO: 172664 - DNA, 17 bp, synthetic construct
  source 1..17: mol_type = other DNA
tggtggccgtggtggta

SEQ ID NO: 172665 - DNA, 17 bp, synthetic construct
  source 1..17: mol_type = other DNA
gtggtggccgtggtggt

SEQ ID NO: 172666 - DNA, 17 bp, synthetic construct
  source 1..17: mol_type = other DNA
tgtggtggccgtggtgg

SEQ ID NO: 172667 - DNA, 17 bp, synthetic construct
  source 1..17: mol_type = other DNA
ttgtggtggccgtggtg

SEQ ID NO: 172668 - DNA, 17 bp, synthetic construct
  source 1..17: mol_type = other DNA
gttgtggtggccgtggt

SEQ ID NO: 172669 - DNA, 17 bp, synthetic construct
  source 1..17: mol_type = other DNA
ggttgtggtggccgtgg

SEQ ID NO: 172670 - DNA, 17 bp, synthetic construct
  source 1..17: mol_type = other DNA
tggttgtggtggccgtg

SEQ ID NO: 172671 - DNA, 17 bp, synthetic construct
  source 1..17: mol_type = other DNA
ctggttgtggtggccgt

SEQ ID NO: 172672 - DNA, 17 bp, synthetic construct
  source 1..17: mol_type = other DNA
cctggttgtggtggccg

SEQ ID NO: 172673 - DNA, 17 bp, synthetic construct
  source 1..17: mol_type = other DNA
ccctggttgtggtggcc

SEQ ID NO: 172674 - DNA, 17 bp, synthetic construct
  source 1..17: mol_type = other DNA
gccctggttgtggtggc

SEQ ID NO: 172675 - DNA, 17 bp, synthetic construct
  source 1..17: mol_type = other DNA
ggccctggttgtggtgg

SEQ ID NO: 172676 - DNA, 17 bp, synthetic construct
  source 1..17: mol_type = other DNA
tggccctggttgtggtg

SEQ ID NO: 172677 - DNA, 17 bp, synthetic construct
  source 1..17: mol_type = other DNA
gtggccctggttgtggt

SEQ ID NO: 172678 - DNA, 17 bp, synthetic construct
  source 1..17: mol_type = other DNA
ggtggccctggttgtgg

SEQ ID NO: 172679 - DNA, 17 bp, synthetic construct
  source 1..17: mol_type = other DNA
cggtggccctggttgtg

SEQ ID NO: 172680 - DNA, 17 bp, synthetic construct
  source 1..17: mol_type = other DNA
ccggtggccctggttgt

SEQ ID NO: 172681 - DNA, 17 bp, synthetic construct
  source 1..17: mol_type = other DNA
gccggtggccctggttg

SEQ ID NO: 172682 - DNA, 17 bp, synthetic construct
  source 1..17: mol_type = other DNA
agccggtggccctggtt

SEQ ID NO: 172683 - DNA, 17 bp, synthetic construct
  source 1..17: mol_type = other DNA
gagccggtggccctggt

SEQ ID NO: 172684 - DNA, 17 bp, synthetic construct
  source 1..17: mol_type = other DNA
agagccggtggccctgg

SEQ ID NO: 172685 - DNA, 17 bp, synthetic construct
  source 1..17: mol_type = other DNA
cagagccggtggccctg

SEQ ID NO: 172686 - DNA, 17 bp, synthetic construct
  source 1..17: mol_type = other DNA
acagagccggtggccct

SEQ ID NO: 172687 - DNA, 17 bp, synthetic construct
  source 1..17: mol_type = other DNA
cacagagccggtggccc

SEQ ID NO: 172688 - DNA, 17 bp, synthetic construct
  source 1..17: mol_type = other DNA
ccacagagccggtggcc

SEQ ID NO: 172689 - DNA, 17 bp, synthetic construct
  source 1..17: mol_type = other DNA
gccacagagccggtggc

SEQ ID NO: 172690 - DNA, 17 bp, synthetic construct
  source 1..17: mol_type = other DNA
ggccacagagccggtgg

SEQ ID NO: 172691 - DNA, 17 bp, synthetic construct
  source 1..17: mol_type = other DNA
tggccacagagccggtg

SEQ ID NO: 172692 - DNA, 17 bp, synthetic construct
  source 1..17: mol_type = other DNA
gtggccacagagccggt

SEQ ID NO: 172693 - DNA, 17 bp, synthetic construct
  source 1..17: mol_type = other DNA
ggtggccacagagccgg

SEQ ID NO: 172694 - DNA, 17 bp, synthetic construct
  source 1..17: mol_type = other DNA
gggtggccacagagccg

SEQ ID NO: 172695 - DNA, 17 bp, synthetic construct
  source 1..17: mol_type = other DNA
ggggtggccacagagcc

SEQ ID NO: 172696 - DNA, 17 bp, synthetic construct
  source 1..17: mol_type = other DNA
gggggtggccacagagc

SEQ ID NO: 172697 - DNA, 17 bp, synthetic construct
  source 1..17: mol_type = other DNA
agggggtggccacagag

SEQ ID NO: 172698 - DNA, 17 bp, synthetic construct
  source 1..17: mol_type = other DNA
gagggggtggccacaga

SEQ ID NO: 172699 - DNA, 17 bp, synthetic construct
  source 1..17: mol_type = other DNA
agagggggtggccacag

SEQ ID NO: 172700 - DNA, 17 bp, synthetic construct
  source 1..17: mol_type = other DNA
aagagggggtggccaca

SEQ ID NO: 172701 - DNA, 17 bp, synthetic construct
  source 1..17: mol_type = other DNA
gaagagggggtggccac

SEQ ID NO: 172702 - DNA, 17 bp, synthetic construct
  source 1..17: mol_type = other DNA
ggaagagggggtggcca

SEQ ID NO: 172703 - DNA, 17 bp, synthetic construct
  source 1..17: mol_type = other DNA
tggaagagggggtggcc

SEQ ID NO: 172704 - DNA, 17 bp, synthetic construct
  source 1..17: mol_type = other DNA
gtggaagagggggtggc

SEQ ID NO: 172705 - DNA, 17 bp, synthetic construct
  source 1..17: mol_type = other DNA
ggtggaagagggggtgg

SEQ ID NO: 172706 - DNA, 17 bp, synthetic construct
  source 1..17: mol_type = other DNA
gggtggaagagggggtg

SEQ ID NO: 172707 - DNA, 17 bp, synthetic construct
  source 1..17: mol_type = other DNA
ggggtggaagagggggt

SEQ ID NO: 172708 - DNA, 17 bp, synthetic construct
  source 1..17: mol_type = other DNA
tggggtggaagaggggg

SEQ ID NO: 172709 - DNA, 17 bp, synthetic construct
  source 1..17: mol_type = other DNA
ctggggtggaagagggg

SEQ ID NO: 172710 - DNA, 17 bp, synthetic construct
  source 1..17: mol_type = other DNA
cctggggtggaagaggg

SEQ ID NO: 172711 - DNA, 17 bp, synthetic construct
  source 1..17: mol_type = other DNA
tcctggggtggaagagg

SEQ ID NO: 172712 - DNA, 17 bp, synthetic construct
  source 1..17: mol_type = other DNA
ttcctggggtggaagag

SEQ ID NO: 172713 - DNA, 17 bp, synthetic construct
  source 1..17: mol_type = other DNA
gttcctggggtggaaga

SEQ ID NO: 172714 - DNA, 17 bp, synthetic construct
  source 1..17: mol_type = other DNA
tgttcctggggtggaag

SEQ ID NO: 172715 - DNA, 17 bp, synthetic construct
  source 1..17: mol_type = other DNA
ctgttcctggggtggaa

SEQ ID NO: 172716 - DNA, 17 bp, synthetic construct
  source 1..17: mol_type = other DNA
gctgttcctggggtgga

SEQ ID NO: 172717 - DNA, 17 bp, synthetic construct
  source 1..17: mol_type = other DNA
agctgttcctggggtgg

SEQ ID NO: 172718 - DNA, 17 bp, synthetic construct
  source 1..17: mol_type = other DNA
gagctgttcctggggtg

SEQ ID NO: 172719 - DNA, 17 bp, synthetic construct
  source 1..17: mol_type = other DNA
tgagctgttcctggggt

SEQ ID NO: 172720 - DNA, 17 bp, synthetic construct
  source 1..17: mol_type = other DNA
gtgagctgttcctgggg

SEQ ID NO: 172721 - DNA, 17 bp, synthetic construct
  source 1..17: mol_type = other DNA
tgtgagctgttcctggg

SEQ ID NO: 172722 - DNA, 17 bp, synthetic construct
  source 1..17: mol_type = other DNA
gtgtgagctgttcctgg

SEQ ID NO: 172723 - DNA, 17 bp, synthetic construct
  source 1..17: mol_type = other DNA
agtgtgagctgttcctg

SEQ ID NO: 172724 - DNA, 17 bp, synthetic construct
  source 1..17: mol_type = other DNA
tagtgtgagctgttcct

SEQ ID NO: 172725 - DNA, 17 bp, synthetic construct
  source 1..17: mol_type = other DNA
gtagtgtgagctgttcc

SEQ ID NO: 172726 - DNA, 17 bp, synthetic construct
  source 1..17: mol_type = other DNA
ggtagtgtgagctgttc

SEQ ID NO: 172727 - DNA, 17 bp, synthetic construct
  source 1..17: mol_type = other DNA
tggtagtgtgagctgtt

SEQ ID NO: 172728 - DNA, 17 bp, synthetic construct
  source 1..17: mol_type = other DNA
ttggtagtgtgagctgt

SEQ ID NO: 172729 - DNA, 17 bp, synthetic construct
  source 1..17: mol_type = other DNA
tttggtagtgtgagctg

SEQ ID NO: 172730 - DNA, 17 bp, synthetic construct
  source 1..17: mol_type = other DNA
ctttggtagtgtgagct

SEQ ID NO: 172731 - DNA, 17 bp, synthetic construct
  source 1..17: mol_type = other DNA
actttggtagtgtgagc

SEQ ID NO: 172732 - DNA, 17 bp, synthetic construct
  source 1..17: mol_type = other DNA
cactttggtagtgtgag

SEQ ID NO: 172733 - DNA, 17 bp, synthetic construct
  source 1..17: mol_type = other DNA
gcactttggtagtgtga

SEQ ID NO: 172734 - DNA, 17 bp, synthetic construct
  source 1..17: mol_type = other DNA
ggcactttggtagtgtg

SEQ ID NO: 172735 - DNA, 17 bp, synthetic construct
  source 1..17: mol_type = other DNA
cggcactttggtagtgt

SEQ ID NO: 172736 - DNA, 17 bp, synthetic construct
  source 1..17: mol_type = other DNA
tcggcactttggtagtg

SEQ ID NO: 172737 - DNA, 17 bp, synthetic construct
  source 1..17: mol_type = other DNA
gtcggcactttggtagt

SEQ ID NO: 172738 - DNA, 17 bp, synthetic construct
  source 1..17: mol_type = other DNA
agtcggcactttggtag

SEQ ID NO: 172739 - DNA, 17 bp, synthetic construct
  source 1..17: mol_type = other DNA
tagtcggcactttggta

SEQ ID NO: 172740 - DNA, 17 bp, synthetic construct
  source 1..17: mol_type = other DNA
gtagtcggcactttggt

SEQ ID NO: 172741 - DNA, 17 bp, synthetic construct
  source 1..17: mol_type = other DNA
ggtagtcggcactttgg

SEQ ID NO: 172742 - DNA, 17 bp, synthetic construct
  source 1..17: mol_type = other DNA
tggtagtcggcactttg

SEQ ID NO: 172743 - DNA, 17 bp, synthetic construct
  source 1..17: mol_type = other DNA
gtggtagtcggcacttt

SEQ ID NO: 172744 - DNA, 17 bp, synthetic construct
  source 1..17: mol_type = other DNA
tgtggtagtcggcactt

SEQ ID NO: 172745 - DNA, 17 bp, synthetic construct
  source 1..17: mol_type = other DNA
ttgtggtagtcggcact

SEQ ID NO: 172746 - DNA, 17 bp, synthetic construct
  source 1..17: mol_type = other DNA
gttgtggtagtcggcac

SEQ ID NO: 172747 - DNA, 17 bp, synthetic construct
  source 1..17: mol_type = other DNA
ggttgtggtagtcggca

SEQ ID NO: 172748 - DNA, 17 bp, synthetic construct
  source 1..17: mol_type = other DNA
tggttgtggtagtcggc

SEQ ID NO: 172749 - DNA, 17 bp, synthetic construct
  source 1..17: mol_type = other DNA
gtggttgtggtagtcgg

SEQ ID NO: 172750 - DNA, 17 bp, synthetic construct
  source 1..17: mol_type = other DNA
cgtggttgtggtagtcg

SEQ ID NO: 172751 - DNA, 17 bp, synthetic construct
  source 1..17: mol_type = other DNA
ccgtggttgtggtagtc

SEQ ID NO: 172752 - DNA, 17 bp, synthetic construct
  source 1..17: mol_type = other DNA
cccgtggttgtggtagt

SEQ ID NO: 172753 - DNA, 17 bp, synthetic construct
  source 1..17: mol_type = other DNA
gcccgtggttgtggtag

SEQ ID NO: 172754 - DNA, 17 bp, synthetic construct
  source 1..17: mol_type = other DNA
agcccgtggttgtggta

SEQ ID NO: 172755 - DNA, 17 bp, synthetic construct
  source 1..17: mol_type = other DNA
aagcccgtggttgtggt

SEQ ID NO: 172756 - DNA, 17 bp, synthetic construct
  source 1..17: mol_type = other DNA
gaagcccgtggttgtgg

SEQ ID NO: 172757 - DNA, 17 bp, synthetic construct
  source 1..17: mol_type = other DNA
tgaagcccgtggttgtg

SEQ ID NO: 172758 - DNA, 17 bp, synthetic construct
  source 1..17: mol_type = other DNA
gtgaagcccgtggttgt

SEQ ID NO: 172759 - DNA, 17 bp, synthetic construct
  source 1..17: mol_type = other DNA
tgtgaagcccgtggttg

SEQ ID NO: 172760 - DNA, 17 bp, synthetic construct
  source 1..17: mol_type = other DNA
ctgtgaagcccgtggtt

SEQ ID NO: 172761 - DNA, 17 bp, synthetic construct
  source 1..17: mol_type = other DNA
actgtgaagcccgtggt

SEQ ID NO: 172762 - DNA, 17 bp, synthetic construct
  source 1..17: mol_type = other DNA
gactgtgaagcccgtgg

SEQ ID NO: 172763 - DNA, 17 bp, synthetic construct
  source 1..17: mol_type = other DNA
tgactgtgaagcccgtg

SEQ ID NO: 172764 - DNA, 17 bp, synthetic construct
  source 1..17: mol_type = other DNA
gtgactgtgaagcccgt

SEQ ID NO: 172765 - DNA, 17 bp, synthetic construct
  source 1..17: mol_type = other DNA
ggtgactgtgaagcccg

SEQ ID NO: 172766 - DNA, 17 bp, synthetic construct
  source 1..17: mol_type = other DNA
gggtgactgtgaagccc

SEQ ID NO: 172767 - DNA, 17 bp, synthetic construct
  source 1..17: mol_type = other DNA
ggggtgactgtgaagcc

SEQ ID NO: 172768 - DNA, 17 bp, synthetic construct
  source 1..17: mol_type = other DNA
gggggtgactgtgaagc

SEQ ID NO: 172769 - DNA, 17 bp, synthetic construct
  source 1..17: mol_type = other DNA
agggggtgactgtgaag

SEQ ID NO: 172770 - DNA, 17 bp, synthetic construct
  source 1..17: mol_type = other DNA
gagggggtgactgtgaa

SEQ ID NO: 172771 - DNA, 17 bp, synthetic construct
  source 1..17: mol_type = other DNA
ggagggggtgactgtga

SEQ ID NO: 172772 - DNA, 17 bp, synthetic construct
  source 1..17: mol_type = other DNA
aggagggggtgactgtg

SEQ ID NO: 172773 - DNA, 17 bp, synthetic construct
  source 1..17: mol_type = other DNA
gaggagggggtgactgt

SEQ ID NO: 172774 - DNA, 17 bp, synthetic construct
  source 1..17: mol_type = other DNA
ggaggagggggtgactg

SEQ ID NO: 172775 - DNA, 17 bp, synthetic construct
  source 1..17: mol_type = other DNA
tggaggagggggtgact

SEQ ID NO: 172776 - DNA, 17 bp, synthetic construct
  source 1..17: mol_type = other DNA
ctggaggagggggtgac

SEQ ID NO: 172777 - DNA, 17 bp, synthetic construct
  source 1..17: mol_type = other DNA
gctggaggagggggtga

SEQ ID NO: 172778 - DNA, 17 bp, synthetic construct
  source 1..17: mol_type = other DNA
ggctggaggagggggtg

SEQ ID NO: 172779 - DNA, 17 bp, synthetic construct
  source 1..17: mol_type = other DNA
gggctggaggagggggt

SEQ ID NO: 172780 - DNA, 17 bp, synthetic construct
  source 1..17: mol_type = other DNA
tgggctggaggaggggg

SEQ ID NO: 172781 - DNA, 17 bp, synthetic construct
  source 1..17: mol_type = other DNA
ctgggctggaggagggg

SEQ ID NO: 172782 - DNA, 17 bp, synthetic construct
  source 1..17: mol_type = other DNA
cctgggctggaggaggg

SEQ ID NO: 172783 - DNA, 17 bp, synthetic construct
  source 1..17: mol_type = other DNA
ccctgggctggaggagg

SEQ ID NO: 172784 - DNA, 17 bp, synthetic construct
  source 1..17: mol_type = other DNA
tccctgggctggaggag

SEQ ID NO: 172785 - DNA, 17 bp, synthetic construct
  source 1..17: mol_type = other DNA
gtccctgggctggagga

SEQ ID NO: 172786 - DNA, 17 bp, synthetic construct
  source 1..17: mol_type = other DNA
cgtccctgggctggagg

SEQ ID NO: 172787 - DNA, 17 bp, synthetic construct
  source 1..17: mol_type = other DNA
ccgtccctgggctggag

SEQ ID NO: 172788 - DNA, 17 bp, synthetic construct
  source 1..17: mol_type = other DNA
gccgtccctgggctgga

SEQ ID NO: 172789 - DNA, 17 bp, synthetic construct
  source 1..17: mol_type = other DNA
tgccgtccctgggctgg

SEQ ID NO: 172790 - DNA, 17 bp, synthetic construct
  source 1..17: mol_type = other DNA
gtgccgtccctgggctg

SEQ ID NO: 172791 - DNA, 17 bp, synthetic construct
  source 1..17: mol_type = other DNA
cgtgccgtccctgggct

SEQ ID NO: 172792 - DNA, 17 bp, synthetic construct
  source 1..17: mol_type = other DNA
gcgtgccgtccctgggc

SEQ ID NO: 172793 - DNA, 17 bp, synthetic construct
  source 1..17: mol_type = other DNA
tgcgtgccgtccctggg

SEQ ID NO: 172794 - DNA, 17 bp, synthetic construct
  source 1..17: mol_type = other DNA
gtgcgtgccgtccctgg

SEQ ID NO: 172795 - DNA, 17 bp, synthetic construct
  source 1..17: mol_type = other DNA
cgtgcgtgccgtccctg

SEQ ID NO: 172796 - DNA, 17 bp, synthetic construct
  source 1..17: mol_type = other DNA
gcgtgcgtgccgtccct

SEQ ID NO: 172797 - DNA, 17 bp, synthetic construct
  source 1..17: mol_type = other DNA
ggcgtgcgtgccgtccc

SEQ ID NO: 172798 - DNA, 17 bp, synthetic construct
  source 1..17: mol_type = other DNA
aggcgtgcgtgccgtcc

SEQ ID NO: 172799 - DNA, 17 bp, synthetic construct
  source 1..17: mol_type = other DNA
gaggcgtgcgtgccgtc

SEQ ID NO: 172800 - DNA, 17 bp, synthetic construct
  source 1..17: mol_type = other DNA
ggaggcgtgcgtgccgt

SEQ ID NO: 172801 - DNA, 17 bp, synthetic construct
  source 1..17: mol_type = other DNA
tggaggcgtgcgtgccg

SEQ ID NO: 172802 - DNA, 17 bp, synthetic construct
  source 1..17: mol_type = other DNA
ctggaggcgtgcgtgcc

SEQ ID NO: 172803 - DNA, 17 bp, synthetic construct
  source 1..17: mol_type = other DNA
actggaggcgtgcgtgc

SEQ ID NO: 172804 - DNA, 17 bp, synthetic construct
  source 1..17: mol_type = other DNA
cactggaggcgtgcgtg

SEQ ID NO: 172805 - DNA, 17 bp, synthetic construct
  source 1..17: mol_type = other DNA
acactggaggcgtgcgt

SEQ ID NO: 172806 - DNA, 17 bp, synthetic construct
  source 1..17: mol_type = other DNA
cacactggaggcgtgcg

SEQ ID NO: 172807 - DNA, 17 bp, synthetic construct
  source 1..17: mol_type = other DNA
ccacactggaggcgtgc

SEQ ID NO: 172808 - DNA, 17 bp, synthetic construct
  source 1..17: mol_type = other DNA
tccacactggaggcgtg

SEQ ID NO: 172809 - DNA, 17 bp, synthetic construct
  source 1..17: mol_type = other DNA
atccacactggaggcgt

SEQ ID NO: 172810 - DNA, 17 bp, synthetic construct
  source 1..17: mol_type = other DNA
gatccacactggaggcg

SEQ ID NO: 172811 - DNA, 17 bp, synthetic construct
  source 1..17: mol_type = other DNA
tgatccacactggaggc

SEQ ID NO: 172812 - DNA, 17 bp, synthetic construct
  source 1..17: mol_type = other DNA
ctgatccacactggagg

SEQ ID NO: 172813 - DNA, 17 bp, synthetic construct
  source 1..17: mol_type = other DNA
gctgatccacactggag

SEQ ID NO: 172814 - DNA, 17 bp, synthetic construct
  source 1..17: mol_type = other DNA
tgctgatccacactgga

SEQ ID NO: 172815 - DNA, 17 bp, synthetic construct
  source 1..17: mol_type = other DNA
gtgctgatccacactgg

SEQ ID NO: 172816 - DNA, 17 bp, synthetic construct
  source 1..17: mol_type = other DNA
tgtgctgatccacactg

SEQ ID NO: 172817 - DNA, 17 bp, synthetic construct
  source 1..17: mol_type = other DNA
ttgtgctgatccacact

SEQ ID NO: 172818 - DNA, 17 bp, synthetic construct
  source 1..17: mol_type = other DNA
gttgtgctgatccacac

SEQ ID NO: 172819 - DNA, 17 bp, synthetic construct
  source 1..17: mol_type = other DNA
ggttgtgctgatccaca

SEQ ID NO: 172820 - DNA, 17 bp, synthetic construct
  source 1..17: mol_type = other DNA
tggttgtgctgatccac

SEQ ID NO: 172821 - DNA, 17 bp, synthetic construct
  source 1..17: mol_type = other DNA
gtggttgtgctgatcca

SEQ ID NO: 172822 - DNA, 17 bp, synthetic construct
  source 1..17: mol_type = other DNA
ggtggttgtgctgatcc

SEQ ID NO: 172823 - DNA, 17 bp, synthetic construct
  source 1..17: mol_type = other DNA
tggtggttgtgctgatc

SEQ ID NO: 172824 - DNA, 17 bp, synthetic construct
  source 1..17: mol_type = other DNA
gtggtggttgtgctgat

SEQ ID NO: 172825 - DNA, 17 bp, synthetic construct
  source 1..17: mol_type = other DNA
tgtggtggttgtgctga

SEQ ID NO: 172826 - DNA, 17 bp, synthetic construct
  source 1..17: mol_type = other DNA
gtgtggtggttgtgctg

SEQ ID NO: 172827 - DNA, 17 bp, synthetic construct
  source 1..17: mol_type = other DNA
ggtgtggtggttgtgct

SEQ ID NO: 172828 - DNA, 17 bp, synthetic construct
  source 1..17: mol_type = other DNA
gggtgtggtggttgtgc

SEQ ID NO: 172829 - DNA, 17 bp, synthetic construct
  source 1..17: mol_type = other DNA
tgggtgtggtggttgtg

SEQ ID NO: 172830 - DNA, 17 bp, synthetic construct
  source 1..17: mol_type = other DNA
gtgggtgtggtggttgt

SEQ ID NO: 172831 - DNA, 17 bp, synthetic construct
  source 1..17: mol_type = other DNA
tgtgggtgtggtggttg

SEQ ID NO: 172832 - DNA, 17 bp, synthetic construct
  source 1..17: mol_type = other DNA
ttgtgggtgtggtggtt

SEQ ID NO: 172833 - DNA, 17 bp, synthetic construct
  source 1..17: mol_type = other DNA
gttgtgggtgtggtggt

SEQ ID NO: 172834 - DNA, 17 bp, synthetic construct
  source 1..17: mol_type = other DNA
ggttgtgggtgtggtgg

SEQ ID NO: 172835 - DNA, 17 bp, synthetic construct
  source 1..17: mol_type = other DNA
tggttgtgggtgtggtg

SEQ ID NO: 172836 - DNA, 17 bp, synthetic construct
  source 1..17: mol_type = other DNA
ctggttgtgggtgtggt

SEQ ID NO: 172837 - DNA, 17 bp, synthetic construct
  source 1..17: mol_type = other DNA
actggttgtgggtgtgg

SEQ ID NO: 172838 - DNA, 17 bp, synthetic construct
  source 1..17: mol_type = other DNA
cactggttgtgggtgtg

SEQ ID NO: 172839 - DNA, 17 bp, synthetic construct
  source 1..17: mol_type = other DNA
ccactggttgtgggtgt

SEQ ID NO: 172840 - DNA, 17 bp, synthetic construct
  source 1..17: mol_type = other DNA
gccactggttgtgggtg

SEQ ID NO: 172841 - DNA, 17 bp, synthetic construct
  source 1..17: mol_type = other DNA
agccactggttgtgggt

SEQ ID NO: 172842 - DNA, 17 bp, synthetic construct
  source 1..17: mol_type = other DNA
gagccactggttgtggg

SEQ ID NO: 172843 - DNA, 17 bp, synthetic construct
  source 1..17: mol_type = other DNA
ggagccactggttgtgg

SEQ ID NO: 172844 - DNA, 17 bp, synthetic construct
  source 1..17: mol_type = other DNA
tggagccactggttgtg

SEQ ID NO: 172845 - DNA, 17 bp, synthetic construct
  source 1..17: mol_type = other DNA
gtggagccactggttgt

SEQ ID NO: 172846 - DNA, 17 bp, synthetic construct
  source 1..17: mol_type = other DNA
cgtggagccactggttg

SEQ ID NO: 172847 - DNA, 17 bp, synthetic construct
  source 1..17: mol_type = other DNA
ccgtggagccactggtt

SEQ ID NO: 172848 - DNA, 17 bp, synthetic construct
  source 1..17: mol_type = other DNA
accgtggagccactggt

SEQ ID NO: 172849 - DNA, 17 bp, synthetic construct
  source 1..17: mol_type = other DNA
caccgtggagccactgg

SEQ ID NO: 172850 - DNA, 17 bp, synthetic construct
  source 1..17: mol_type = other DNA
tcaccgtggagccactg

SEQ ID NO: 172851 - DNA, 17 bp, synthetic construct
  source 1..17: mol_type = other DNA
gtcaccgtggagccact

SEQ ID NO: 172852 - DNA, 17 bp, synthetic construct
  source 1..17: mol_type = other DNA
ggtcaccgtggagccac

SEQ ID NO: 172853 - DNA, 17 bp, synthetic construct
  source 1..17: mol_type = other DNA
gggtcaccgtggagcca

SEQ ID NO: 172854 - DNA, 17 bp, synthetic construct
  source 1..17: mol_type = other DNA
ggggtcaccgtggagcc

SEQ ID NO: 172855 - DNA, 17 bp, synthetic construct
  source 1..17: mol_type = other DNA
gggggtcaccgtggagc

SEQ ID NO: 172856 - DNA, 17 bp, synthetic construct
  source 1..17: mol_type = other DNA
agggggtcaccgtggag

SEQ ID NO: 172857 - DNA, 17 bp, synthetic construct
  source 1..17: mol_type = other DNA
gagggggtcaccgtgga

SEQ ID NO: 172858 - DNA, 17 bp, synthetic construct
  source 1..17: mol_type = other DNA
ggagggggtcaccgtgg

SEQ ID NO: 172859 - DNA, 17 bp, synthetic construct
  source 1..17: mol_type = other DNA
aggagggggtcaccgtg

SEQ ID NO: 172860 - DNA, 17 bp, synthetic construct
  source 1..17: mol_type = other DNA
gaggagggggtcaccgt

SEQ ID NO: 172861 - DNA, 17 bp, synthetic construct
  source 1..17: mol_type = other DNA
ggaggagggggtcaccg

SEQ ID NO: 172862 - DNA, 17 bp, synthetic construct
  source 1..17: mol_type = other DNA
cggaggagggggtcacc

SEQ ID NO: 172863 - DNA, 17 bp, synthetic construct
  source 1..17: mol_type = other DNA
acggaggagggggtcac

SEQ ID NO: 172864 - DNA, 17 bp, synthetic construct
  source 1..17: mol_type = other DNA
gacggaggagggggtca

SEQ ID NO: 172865 - DNA, 17 bp, synthetic construct
  source 1..17: mol_type = other DNA
ggacggaggagggggtc

SEQ ID NO: 172866 - DNA, 17 bp, synthetic construct
  source 1..17: mol_type = other DNA
gggacggaggagggggt

SEQ ID NO: 172867 - DNA, 17 bp, synthetic construct
  source 1..17: mol_type = other DNA
cgggacggaggaggggg

SEQ ID NO: 172868 - DNA, 17 bp, synthetic construct
  source 1..17: mol_type = other DNA
ccgggacggaggagggg

SEQ ID NO: 172869 - DNA, 17 bp, synthetic construct
  source 1..17: mol_type = other DNA
cccgggacggaggaggg

SEQ ID NO: 172870 - DNA, 17 bp, synthetic construct
  source 1..17: mol_type = other DNA
ccccgggacggaggagg

SEQ ID NO: 172871 - DNA, 17 bp, synthetic construct
  source 1..17: mol_type = other DNA
tccccgggacggaggag

SEQ ID NO: 172872 - DNA, 17 bp, synthetic construct
  source 1..17: mol_type = other DNA
gtccccgggacggagga

SEQ ID NO: 172873 - DNA, 17 bp, synthetic construct
  source 1..17: mol_type = other DNA
ggtccccgggacggagg

SEQ ID NO: 172874 - DNA, 17 bp, synthetic construct
  source 1..17: mol_type = other DNA
tggtccccgggacggag

SEQ ID NO: 172875 - DNA, 17 bp, synthetic construct
  source 1..17: mol_type = other DNA
gtggtccccgggacgga

SEQ ID NO: 172876 - DNA, 17 bp, synthetic construct
  source 1..17: mol_type = other DNA
ggtggtccccgggacgg

SEQ ID NO: 172877 - DNA, 17 bp, synthetic construct
  source 1..17: mol_type = other DNA
gggtggtccccgggacg

SEQ ID NO: 172878 - DNA, 17 bp, synthetic construct
  source 1..17: mol_type = other DNA
tgggtggtccccgggac

SEQ ID NO: 172879 - DNA, 17 bp, synthetic construct
  source 1..17: mol_type = other DNA
gtgggtggtccccggga

SEQ ID NO: 172880 - DNA, 17 bp, synthetic construct
  source 1..17: mol_type = other DNA
tgtgggtggtccccggg

SEQ ID NO: 172881 - DNA, 17 bp, synthetic construct
  source 1..17: mol_type = other DNA
gtgtgggtggtccccgg

SEQ ID NO: 172882 - DNA, 17 bp, synthetic construct
  source 1..17: mol_type = other DNA
ggtgtgggtggtccccg

SEQ ID NO: 172883 - DNA, 17 bp, synthetic construct
  source 1..17: mol_type = other DNA
gggtgtgggtggtcccc

SEQ ID NO: 172884 - DNA, 17 bp, synthetic construct
  source 1..17: mol_type = other DNA
ggggtgtgggtggtccc

SEQ ID NO: 172885 - DNA, 17 bp, synthetic construct
  source 1..17: mol_type = other DNA
gggggtgtgggtggtcc

SEQ ID NO: 172886 - DNA, 17 bp, synthetic construct
  source 1..17: mol_type = other DNA
tgggggtgtgggtggtc

SEQ ID NO: 172887 - DNA, 17 bp, synthetic construct
  source 1..17: mol_type = other DNA
gtgggggtgtgggtggt

SEQ ID NO: 172888 - DNA, 17 bp, synthetic construct
  source 1..17: mol_type = other DNA
tgtgggggtgtgggtgg

SEQ ID NO: 172889 - DNA, 17 bp, synthetic construct
  source 1..17: mol_type = other DNA
ctgtgggggtgtgggtg

SEQ ID NO: 172890 - DNA, 17 bp, synthetic construct
  source 1..17: mol_type = other DNA
actgtgggggtgtgggt

SEQ ID NO: 172891 - DNA, 17 bp, synthetic construct
  source 1..17: mol_type = other DNA
cactgtgggggtgtggg

SEQ ID NO: 172892 - DNA, 17 bp, synthetic construct
  source 1..17: mol_type = other DNA
gcactgtgggggtgtgg

SEQ ID NO: 172893 - DNA, 17 bp, synthetic construct
  source 1..17: mol_type = other DNA
agcactgtgggggtgtg

SEQ ID NO: 172894 - DNA, 17 bp, synthetic construct
  source 1..17: mol_type = other DNA
cagcactgtgggggtgt

SEQ ID NO: 172895 - DNA, 17 bp, synthetic construct
  source 1..17: mol_type = other DNA
tcagcactgtgggggtg

SEQ ID NO: 172896 - DNA, 17 bp, synthetic construct
  source 1..17: mol_type = other DNA
gtcagcactgtgggggt

SEQ ID NO: 172897 - DNA, 17 bp, synthetic construct
  source 1..17: mol_type = other DNA
ggtcagcactgtggggg

SEQ ID NO: 172898 - DNA, 17 bp, synthetic construct
  source 1..17: mol_type = other DNA
tggtcagcactgtgggg

SEQ ID NO: 172899 - DNA, 17 bp, synthetic construct
  source 1..17: mol_type = other DNA
gtggtcagcactgtggg

SEQ ID NO: 172900 - DNA, 17 bp, synthetic construct
  source 1..17: mol_type = other DNA
ggtggtcagcactgtgg

SEQ ID NO: 172901 - DNA, 17 bp, synthetic construct
  source 1..17: mol_type = other DNA
tggtggtcagcactgtg

SEQ ID NO: 172902 - DNA, 17 bp, synthetic construct
  source 1..17: mol_type = other DNA
gtggtggtcagcactgt

SEQ ID NO: 172903 - DNA, 17 bp, synthetic construct
  source 1..17: mol_type = other DNA
ggtggtggtcagcactg

SEQ ID NO: 172904 - DNA, 17 bp, synthetic construct
  source 1..17: mol_type = other DNA
tggtggtggtcagcact

SEQ ID NO: 172905 - DNA, 17 bp, synthetic construct
  source 1..17: mol_type = other DNA
gtggtggtggtcagcac

SEQ ID NO: 172906 - DNA, 17 bp, synthetic construct
  source 1..17: mol_type = other DNA
ggtggtggtggtcagca

SEQ ID NO: 172907 - DNA, 17 bp, synthetic construct
  source 1..17: mol_type = other DNA
tggtggtggtggtcagc

SEQ ID NO: 172908 - DNA, 17 bp, synthetic construct
  source 1..17: mol_type = other DNA
gtggtggtggtggtcag

SEQ ID NO: 172909 - DNA, 17 bp, synthetic construct
  source 1..17: mol_type = other DNA
tgtggtggtggtggtca

SEQ ID NO: 172910 - DNA, 17 bp, synthetic construct
  source 1..17: mol_type = other DNA
ttgtggtggtggtggtc

SEQ ID NO: 172911 - DNA, 17 bp, synthetic construct
  source 1..17: mol_type = other DNA
gttgtggtggtggtggt

SEQ ID NO: 172912 - DNA, 17 bp, synthetic construct
  source 1..17: mol_type = other DNA
agttgtggtggtggtgg

SEQ ID NO: 172913 - DNA, 17 bp, synthetic construct
  source 1..17: mol_type = other DNA
cagttgtggtggtggtg

SEQ ID NO: 172914 - DNA, 17 bp, synthetic construct
  source 1..17: mol_type = other DNA
acagttgtggtggtggt

SEQ ID NO: 172915 - DNA, 17 bp, synthetic construct
  source 1..17: mol_type = other DNA
cacagttgtggtggtgg

SEQ ID NO: 172916 - DNA, 17 bp, synthetic construct
  source 1..17: mol_type = other DNA
ccacagttgtggtggtg

SEQ ID NO: 172917 - DNA, 17 bp, synthetic construct
  source 1..17: mol_type = other DNA
gccacagttgtggtggt

SEQ ID NO: 172918 - DNA, 17 bp, synthetic construct
  source 1..17: mol_type = other DNA
ggccacagttgtggtgg

SEQ ID NO: 172919 - DNA, 17 bp, synthetic construct
  source 1..17: mol_type = other DNA
tggccacagttgtggtg

SEQ ID NO: 172920 - DNA, 17 bp, synthetic construct
  source 1..17: mol_type = other DNA
gtggccacagttgtggt

SEQ ID NO: 172921 - DNA, 17 bp, synthetic construct
  source 1..17: mol_type = other DNA
agtggccacagttgtgg

SEQ ID NO: 172922 - DNA, 17 bp, synthetic construct
  source 1..17: mol_type = other DNA
cagtggccacagttgtg

SEQ ID NO: 172923 - DNA, 17 bp, synthetic construct
  source 1..17: mol_type = other DNA
ccagtggccacagttgt

SEQ ID NO: 172924 - DNA, 17 bp, synthetic construct
  source 1..17: mol_type = other DNA
accagtggccacagttg

SEQ ID NO: 172925 - DNA, 17 bp, synthetic construct
  source 1..17: mol_type = other DNA
aaccagtggccacagtt

SEQ ID NO: 172926 - DNA, 17 bp, synthetic construct
  source 1..17: mol_type = other DNA
gaaccagtggccacagt

SEQ ID NO: 172927 - DNA, 17 bp, synthetic construct
  source 1..17: mol_type = other DNA
agaaccagtggccacag

SEQ ID NO: 172928 - DNA, 17 bp, synthetic construct
  source 1..17: mol_type = other DNA
tagaaccagtggccaca

SEQ ID NO: 172929 - DNA, 17 bp, synthetic construct
  source 1..17: mol_type = other DNA
atagaaccagtggccac

SEQ ID NO: 172930 - DNA, 17 bp, synthetic construct
  source 1..17: mol_type = other DNA
catagaaccagtggcca

SEQ ID NO: 172931 - DNA, 17 bp, synthetic construct
  source 1..17: mol_type = other DNA
ccatagaaccagtggcc

SEQ ID NO: 172932 - DNA, 17 bp, synthetic construct
  source 1..17: mol_type = other DNA
gccatagaaccagtggc

SEQ ID NO: 172933 - DNA, 17 bp, synthetic construct
  source 1..17: mol_type = other DNA
tgccatagaaccagtgg

SEQ ID NO: 172934 - DNA, 17 bp, synthetic construct
  source 1..17: mol_type = other DNA
ttgccatagaaccagtg

SEQ ID NO: 172935 - DNA, 17 bp, synthetic construct
  source 1..17: mol_type = other DNA
gttgccatagaaccagt

SEQ ID NO: 172936 - DNA, 17 bp, synthetic construct
  source 1..17: mol_type = other DNA
tgttgccatagaaccag

SEQ ID NO: 172937 - DNA, 17 bp, synthetic construct
  source 1..17: mol_type = other DNA
gtgttgccatagaacca

SEQ ID NO: 172938 - DNA, 17 bp, synthetic construct
  source 1..17: mol_type = other DNA
ggtgttgccatagaacc

SEQ ID NO: 172939 - DNA, 17 bp, synthetic construct
  source 1..17: mol_type = other DNA
gggtgttgccatagaac

SEQ ID NO: 172940 - DNA, 17 bp, synthetic construct
  source 1..17: mol_type = other DNA
agggtgttgccatagaa

SEQ ID NO: 172941 - DNA, 17 bp, synthetic construct
  source 1..17: mol_type = other DNA
gagggtgttgccataga

SEQ ID NO: 172942 - DNA, 17 bp, synthetic construct
  source 1..17: mol_type = other DNA
ggagggtgttgccatag

SEQ ID NO: 172943 - DNA, 17 bp, synthetic construct
  source 1..17: mol_type = other DNA
aggagggtgttgccata

SEQ ID NO: 172944 - DNA, 17 bp, synthetic construct
  source 1..17: mol_type = other DNA
gaggagggtgttgccat

SEQ ID NO: 172945 - DNA, 17 bp, synthetic construct
  source 1..17: mol_type = other DNA
agaggagggtgttgcca

SEQ ID NO: 172946 - DNA, 17 bp, synthetic construct
  source 1..17: mol_type = other DNA
tagaggagggtgttgcc

SEQ ID NO: 172947 - DNA, 17 bp, synthetic construct
  source 1..17: mol_type = other DNA
ctagaggagggtgttgc

SEQ ID NO: 172948 - DNA, 17 bp, synthetic construct
  source 1..17: mol_type = other DNA
gctagaggagggtgttg

SEQ ID NO: 172949 - DNA, 17 bp, synthetic construct
  source 1..17: mol_type = other DNA
tgctagaggagggtgtt

SEQ ID NO: 172950 - DNA, 17 bp, synthetic construct
  source 1..17: mol_type = other DNA
gtgctagaggagggtgt

SEQ ID NO: 172951 - DNA, 17 bp, synthetic construct
  source 1..17: mol_type = other DNA
tgtgctagaggagggtg

SEQ ID NO: 172952 - DNA, 17 bp, synthetic construct
  source 1..17: mol_type = other DNA
gtgtgctagaggagggt

SEQ ID NO: 172953 - DNA, 17 bp, synthetic construct
  source 1..17: mol_type = other DNA
tgtgtgctagaggaggg

SEQ ID NO: 172954 - DNA, 17 bp, synthetic construct
  source 1..17: mol_type = other DNA
ctgtgtgctagaggagg

SEQ ID NO: 172955 - DNA, 17 bp, synthetic construct
  source 1..17: mol_type = other DNA
tctgtgtgctagaggag

SEQ ID NO: 172956 - DNA, 17 bp, synthetic construct
  source 1..17: mol_type = other DNA
gtctgtgtgctagagga

SEQ ID NO: 172957 - DNA, 17 bp, synthetic construct
  source 1..17: mol_type = other DNA
ggtctgtgtgctagagg

SEQ ID NO: 172958 - DNA, 17 bp, synthetic construct
  source 1..17: mol_type = other DNA
tggtctgtgtgctagag

SEQ ID NO: 172959 - DNA, 17 bp, synthetic construct
  source 1..17: mol_type = other DNA
ctggtctgtgtgctaga

SEQ ID NO: 172960 - DNA, 17 bp, synthetic construct
  source 1..17: mol_type = other DNA
actggtctgtgtgctag

SEQ ID NO: 172961 - DNA, 17 bp, synthetic construct
  source 1..17: mol_type = other DNA
cactggtctgtgtgcta

SEQ ID NO: 172962 - DNA, 17 bp, synthetic construct
  source 1..17: mol_type = other DNA
ccactggtctgtgtgct

SEQ ID NO: 172963 - DNA, 17 bp, synthetic construct
  source 1..17: mol_type = other DNA
accactggtctgtgtgc

SEQ ID NO: 172964 - DNA, 17 bp, synthetic construct
  source 1..17: mol_type = other DNA
taccactggtctgtgtg

SEQ ID NO: 172965 - DNA, 17 bp, synthetic construct
  source 1..17: mol_type = other DNA
gtaccactggtctgtgt

SEQ ID NO: 172966 - DNA, 17 bp, synthetic construct
  source 1..17: mol_type = other DNA
agtaccactggtctgtg

SEQ ID NO: 172967 - DNA, 17 bp, synthetic construct
  source 1..17: mol_type = other DNA
gagtaccactggtctgt

SEQ ID NO: 172968 - DNA, 17 bp, synthetic construct
  source 1..17: mol_type = other DNA
ggagtaccactggtctg

SEQ ID NO: 172969 - DNA, 17 bp, synthetic construct
  source 1..17: mol_type = other DNA
gggagtaccactggtct

SEQ ID NO: 172970 - DNA, 17 bp, synthetic construct
  source 1..17: mol_type = other DNA
ggggagtaccactggtc

SEQ ID NO: 172971 - DNA, 17 bp, synthetic construct
  source 1..17: mol_type = other DNA
gggggagtaccactggt

SEQ ID NO: 172972 - DNA, 17 bp, synthetic construct
  source 1..17: mol_type = other DNA
tgggggagtaccactgg

SEQ ID NO: 172973 - DNA, 17 bp, synthetic construct
  source 1..17: mol_type = other DNA
atgggggagtaccactg

SEQ ID NO: 172974 - DNA, 17 bp, synthetic construct
  source 1..17: mol_type = other DNA
gatgggggagtaccact

SEQ ID NO: 172975 - DNA, 17 bp, synthetic construct
  source 1..17: mol_type = other DNA
tgatgggggagtaccac

SEQ ID NO: 172976 - DNA, 17 bp, synthetic construct
  source 1..17: mol_type = other DNA
gtgatgggggagtacca

SEQ ID NO: 172977 - DNA, 17 bp, synthetic construct
  source 1..17: mol_type = other DNA
agtgatgggggagtacc

SEQ ID NO: 172978 - DNA, 17 bp, synthetic construct
  source 1..17: mol_type = other DNA
cagtgatgggggagtac

SEQ ID NO: 172979 - DNA, 17 bp, synthetic construct
  source 1..17: mol_type = other DNA
tcagtgatgggggagta

SEQ ID NO: 172980 - DNA, 17 bp, synthetic construct
  source 1..17: mol_type = other DNA
atcagtgatgggggagt

SEQ ID NO: 172981 - DNA, 17 bp, synthetic construct
  source 1..17: mol_type = other DNA
gatcagtgatgggggag

SEQ ID NO: 172982 - DNA, 17 bp, synthetic construct
  source 1..17: mol_type = other DNA
tgatcagtgatggggga

SEQ ID NO: 172983 - DNA, 17 bp, synthetic construct
  source 1..17: mol_type = other DNA
gtgatcagtgatggggg

SEQ ID NO: 172984 - DNA, 17 bp, synthetic construct
  source 1..17: mol_type = other DNA
ggtgatcagtgatgggg

SEQ ID NO: 172985 - DNA, 17 bp, synthetic construct
  source 1..17: mol_type = other DNA
tggtgatcagtgatggg

SEQ ID NO: 172986 - DNA, 17 bp, synthetic construct
  source 1..17: mol_type = other DNA
gtggtgatcagtgatgg

SEQ ID NO: 172987 - DNA, 17 bp, synthetic construct
  source 1..17: mol_type = other DNA
cgtggtgatcagtgatg

SEQ ID NO: 172988 - DNA, 17 bp, synthetic construct
  source 1..17: mol_type = other DNA
ccgtggtgatcagtgat

SEQ ID NO: 172989 - DNA, 17 bp, synthetic construct
  source 1..17: mol_type = other DNA
gccgtggtgatcagtga

SEQ ID NO: 172990 - DNA, 17 bp, synthetic construct
  source 1..17: mol_type = other DNA
ggccgtggtgatcagtg

SEQ ID NO: 172991 - DNA, 17 bp, synthetic construct
  source 1..17: mol_type = other DNA
tggccgtggtgatcagt

SEQ ID NO: 172992 - DNA, 17 bp, synthetic construct
  source 1..17: mol_type = other DNA
gtggccgtggtgatcag

SEQ ID NO: 172993 - DNA, 17 bp, synthetic construct
  source 1..17: mol_type = other DNA
agtggccgtggtgatca

SEQ ID NO: 172994 - DNA, 17 bp, synthetic construct
  source 1..17: mol_type = other DNA
tagtggccgtggtgatc

SEQ ID NO: 172995 - DNA, 17 bp, synthetic construct
  source 1..17: mol_type = other DNA
gtagtggccgtggtgat

SEQ ID NO: 172996 - DNA, 17 bp, synthetic construct
  source 1..17: mol_type = other DNA
cgtagtggccgtggtga

SEQ ID NO: 172997 - DNA, 17 bp, synthetic construct
  source 1..17: mol_type = other DNA
tcgtagtggccgtggtg

SEQ ID NO: 172998 - DNA, 17 bp, synthetic construct
  source 1..17: mol_type = other DNA
atcgtagtggccgtggt

SEQ ID NO: 172999 - DNA, 17 bp, synthetic construct
  source 1..17: mol_type = other DNA
gatcgtagtggccgtgg

SEQ ID NO: 173000 - DNA, 17 bp, synthetic construct
  source 1..17: mol_type = other DNA
tgatcgtagtggccgtg

SEQ ID NO: 173001 - DNA, 17 bp, synthetic construct
  source 1..17: mol_type = other DNA
gtgatcgtagtggccgt

SEQ ID NO: 173002 - DNA, 17 bp, synthetic construct
  source 1..17: mol_type = other DNA
cgtgatcgtagtggccg

SEQ ID NO: 173003 - DNA, 17 bp, synthetic construct
  source 1..17: mol_type = other DNA
ccgtgatcgtagtggcc

SEQ ID NO: 173004 - DNA, 17 bp, synthetic construct
  source 1..17: mol_type = other DNA
gccgtgatcgtagtggc

SEQ ID NO: 173005 - DNA, 17 bp, synthetic construct
  source 1..17: mol_type = other DNA
ggccgtgatcgtagtgg

SEQ ID NO: 173006 - DNA, 17 bp, synthetic construct
  source 1..17: mol_type = other DNA
tggccgtgatcgtagtg

SEQ ID NO: 173007 - DNA, 17 bp, synthetic construct
  source 1..17: mol_type = other DNA
gtggccgtgatcgtagt

SEQ ID NO: 173008 - DNA, 17 bp, synthetic construct
  source 1..17: mol_type = other DNA
ggtggccgtgatcgtag

SEQ ID NO: 173009 - DNA, 17 bp, synthetic construct
  source 1..17: mol_type = other DNA
cggtggccgtgatcgta

SEQ ID NO: 173010 - DNA, 17 bp, synthetic construct
  source 1..17: mol_type = other DNA
ccggtggccgtgatcgt

SEQ ID NO: 173011 - DNA, 17 bp, synthetic construct
  source 1..17: mol_type = other DNA
gccggtggccgtgatcg

SEQ ID NO: 173012 - DNA, 17 bp, synthetic construct
  source 1..17: mol_type = other DNA
agccggtggccgtgatc

SEQ ID NO: 173013 - DNA, 17 bp, synthetic construct
  source 1..17: mol_type = other DNA
gagccggtggccgtgat

SEQ ID NO: 173014 - DNA, 17 bp, synthetic construct
  source 1..17: mol_type = other DNA
ggagccggtggccgtga

SEQ ID NO: 173015 - DNA, 17 bp, synthetic construct
  source 1..17: mol_type = other DNA
tggagccggtggccgtg

SEQ ID NO: 173016 - DNA, 17 bp, synthetic construct
  source 1..17: mol_type = other DNA
gtggagccggtggccgt

SEQ ID NO: 173017 - DNA, 17 bp, synthetic construct
  source 1..17: mol_type = other DNA
ggtggagccggtggccg

SEQ ID NO: 173018 - DNA, 17 bp, synthetic construct
  source 1..17: mol_type = other DNA
tggtggagccggtggcc

SEQ ID NO: 173019 - DNA, 17 bp, synthetic construct
  source 1..17: mol_type = other DNA
gtggtggagccggtggc

SEQ ID NO: 173020 - DNA, 17 bp, synthetic construct
  source 1..17: mol_type = other DNA
ggtggtggagccggtgg

SEQ ID NO: 173021 - DNA, 17 bp, synthetic construct
  source 1..17: mol_type = other DNA
tggtggtggagccggtg

SEQ ID NO: 173022 - DNA, 17 bp, synthetic construct
  source 1..17: mol_type = other DNA
ttggtggtggagccggt

SEQ ID NO: 173023 - DNA, 17 bp, synthetic construct
  source 1..17: mol_type = other DNA
gttggtggtggagccgg

SEQ ID NO: 173024 - DNA, 17 bp, synthetic construct
  source 1..17: mol_type = other DNA
ggttggtggtggagccg

SEQ ID NO: 173025 - DNA, 17 bp, synthetic construct
  source 1..17: mol_type = other DNA
gggttggtggtggagcc

SEQ ID NO: 173026 - DNA, 17 bp, synthetic construct
  source 1..17: mol_type = other DNA
ggggttggtggtggagc

SEQ ID NO: 173027 - DNA, 17 bp, synthetic construct
  source 1..17: mol_type = other DNA
aggggttggtggtggag

SEQ ID NO: 173028 - DNA, 17 bp, synthetic construct
  source 1..17: mol_type = other DNA
gaggggttggtggtgga

SEQ ID NO: 173029 - DNA, 17 bp, synthetic construct
  source 1..17: mol_type = other DNA
ggaggggttggtggtgg

SEQ ID NO: 173030 - DNA, 17 bp, synthetic construct
  source 1..17: mol_type = other DNA
aggaggggttggtggtg

SEQ ID NO: 173031 - DNA, 17 bp, synthetic construct
  source 1..17: mol_type = other DNA
gaggaggggttggtggt

SEQ ID NO: 173032 - DNA, 17 bp, synthetic construct
  source 1..17: mol_type = other DNA
tgaggaggggttggtgg

SEQ ID NO: 173033 - DNA, 17 bp, synthetic construct
  source 1..17: mol_type = other DNA
ttgaggaggggttggtg

SEQ ID NO: 173034 - DNA, 17 bp, synthetic construct
  source 1..17: mol_type = other DNA
gttgaggaggggttggt

SEQ ID NO: 173035 - DNA, 17 bp, synthetic construct
  source 1..17: mol_type = other DNA
agttgaggaggggttgg

SEQ ID NO: 173036 - DNA, 17 bp, synthetic construct
  source 1..17: mol_type = other DNA
gagttgaggaggggttg

SEQ ID NO: 173037 - DNA, 17 bp, synthetic construct
  source 1..17: mol_type = other DNA
ggagttgaggaggggtt

SEQ ID NO: 173038 - DNA, 17 bp, synthetic construct
  source 1..17: mol_type = other DNA
tggagttgaggaggggt

SEQ ID NO: 173039 - DNA, 17 bp, synthetic construct
  source 1..17: mol_type = other DNA
ctggagttgaggagggg

SEQ ID NO: 173040 - DNA, 17 bp, synthetic construct
  source 1..17: mol_type = other DNA
cctggagttgaggaggg

SEQ ID NO: 173041 - DNA, 17 bp, synthetic construct
  source 1..17: mol_type = other DNA
ccctggagttgaggagg

SEQ ID NO: 173042 - DNA, 17 bp, synthetic construct
  source 1..17: mol_type = other DNA
tccctggagttgaggag

SEQ ID NO: 173043 - DNA, 17 bp, synthetic construct
  source 1..17: mol_type = other DNA
gtccctggagttgagga

SEQ ID NO: 173044 - DNA, 17 bp, synthetic construct
  source 1..17: mol_type = other DNA
tgtccctggagttgagg

SEQ ID NO: 173045 - DNA, 17 bp, synthetic construct
  source 1..17: mol_type = other DNA
ttgtccctggagttgag

SEQ ID NO: 173046 - DNA, 17 bp, synthetic construct
  source 1..17: mol_type = other DNA
gttgtccctggagttga

SEQ ID NO: 173047 - DNA, 17 bp, synthetic construct
  source 1..17: mol_type = other DNA
tgttgtccctggagttg

SEQ ID NO: 173048 - DNA, 17 bp, synthetic construct
  source 1..17: mol_type = other DNA
gtgttgtccctggagtt

SEQ ID NO: 173049 - DNA, 17 bp, synthetic construct
  source 1..17: mol_type = other DNA
ggtgttgtccctggagt

SEQ ID NO: 173050 - DNA, 17 bp, synthetic construct
  source 1..17: mol_type = other DNA
aggtgttgtccctggag

SEQ ID NO: 173051 - DNA, 17 bp, synthetic construct
  source 1..17: mol_type = other DNA
taggtgttgtccctgga

SEQ ID NO: 173052 - DNA, 17 bp, synthetic construct
  source 1..17: mol_type = other DNA
ataggtgttgtccctgg

SEQ ID NO: 173053 - DNA, 17 bp, synthetic construct
  source 1..17: mol_type = other DNA
gataggtgttgtccctg

SEQ ID NO: 173054 - DNA, 17 bp, synthetic construct
  source 1..17: mol_type = other DNA
ggataggtgttgtccct

SEQ ID NO: 173055 - DNA, 17 bp, synthetic construct
  source 1..17: mol_type = other DNA
gggataggtgttgtccc

SEQ ID NO: 173056 - DNA, 17 bp, synthetic construct
  source 1..17: mol_type = other DNA
ggggataggtgttgtcc

SEQ ID NO: 173057 - DNA, 17 bp, synthetic construct
  source 1..17: mol_type = other DNA
gggggataggtgttgtc

SEQ ID NO: 173058 - DNA, 17 bp, synthetic construct
  source 1..17: mol_type = other DNA
ggggggataggtgttgt

SEQ ID NO: 173059 - DNA, 17 bp, synthetic construct
  source 1..17: mol_type = other DNA
tggggggataggtgttg

SEQ ID NO: 173060 - DNA, 17 bp, synthetic construct
  source 1..17: mol_type = other DNA
ctggggggataggtgtt

SEQ ID NO: 173061 - DNA, 17 bp, synthetic construct
  source 1..17: mol_type = other DNA
actggggggataggtgt

SEQ ID NO: 173062 - DNA, 17 bp, synthetic construct
  source 1..17: mol_type = other DNA
cactggggggataggtg

SEQ ID NO: 173063 - DNA, 17 bp, synthetic construct
  source 1..17: mol_type = other DNA
gcactggggggataggt

SEQ ID NO: 173064 - DNA, 17 bp, synthetic construct
  source 1..17: mol_type = other DNA
agcactggggggatagg

SEQ ID NO: 173065 - DNA, 17 bp, synthetic construct
  source 1..17: mol_type = other DNA
cagcactggggggatag

SEQ ID NO: 173066 - DNA, 17 bp, synthetic construct
  source 1..17: mol_type = other DNA
tcagcactggggggata

SEQ ID NO: 173067 - DNA, 17 bp, synthetic construct
  source 1..17: mol_type = other DNA
gtcagcactggggggat

SEQ ID NO: 173068 - DNA, 17 bp, synthetic construct
  source 1..17: mol_type = other DNA
ggtcagcactgggggga

SEQ ID NO: 173069 - DNA, 17 bp, synthetic construct
  source 1..17: mol_type = other DNA
tggtcagcactgggggg

SEQ ID NO: 173070 - DNA, 17 bp, synthetic construct
  source 1..17: mol_type = other DNA
gtggtcagcactggggg

SEQ ID NO: 173071 - DNA, 17 bp, synthetic construct
  source 1..17: mol_type = other DNA
ggtggtcagcactgggg

SEQ ID NO: 173072 - DNA, 17 bp, synthetic construct
  source 1..17: mol_type = other DNA
tggtggtcagcactggg

SEQ ID NO: 173073 - DNA, 17 bp, synthetic construct
  source 1..17: mol_type = other DNA
gtggtggtcagcactgg

SEQ ID NO: 173074 - DNA, 17 bp, synthetic construct
  source 1..17: mol_type = other DNA
ggtggtggtcagcactg

SEQ ID NO: 173075 - DNA, 17 bp, synthetic construct
  source 1..17: mol_type = other DNA
cggtggtggtcagcact

SEQ ID NO: 173076 - DNA, 17 bp, synthetic construct
  source 1..17: mol_type = other DNA
gcggtggtggtcagcac

SEQ ID NO: 173077 - DNA, 17 bp, synthetic construct
  source 1..17: mol_type = other DNA
ggcggtggtggtcagca

SEQ ID NO: 173078 - DNA, 17 bp, synthetic construct
  source 1..17: mol_type = other DNA
tggcggtggtggtcagc

SEQ ID NO: 173079 - DNA, 17 bp, synthetic construct
  source 1..17: mol_type = other DNA
gtggcggtggtggtcag

SEQ ID NO: 173080 - DNA, 17 bp, synthetic construct
  source 1..17: mol_type = other DNA
ggtggcggtggtggtca

SEQ ID NO: 173081 - DNA, 17 bp, synthetic construct
  source 1..17: mol_type = other DNA
tggtggcggtggtggtc

SEQ ID NO: 173082 - DNA, 17 bp, synthetic construct
  source 1..17: mol_type = other DNA
gtggtggcggtggtggt

SEQ ID NO: 173083 - DNA, 17 bp, synthetic construct
  source 1..17: mol_type = other DNA
tgtggtggcggtggtgg

SEQ ID NO: 173084 - DNA, 17 bp, synthetic construct
  source 1..17: mol_type = other DNA
gtgtggtggcggtggtg

SEQ ID NO: 173085 - DNA, 17 bp, synthetic construct
  source 1..17: mol_type = other DNA
ggtgtggtggcggtggt

SEQ ID NO: 173086 - DNA, 17 bp, synthetic construct
  source 1..17: mol_type = other DNA
aggtgtggtggcggtgg

SEQ ID NO: 173087 - DNA, 17 bp, synthetic construct
  source 1..17: mol_type = other DNA
caggtgtggtggcggtg

SEQ ID NO: 173088 - DNA, 17 bp, synthetic construct
  source 1..17: mol_type = other DNA
gcaggtgtggtggcggt

SEQ ID NO: 173089 - DNA, 17 bp, synthetic construct
  source 1..17: mol_type = other DNA
tgcaggtgtggtggcgg

SEQ ID NO: 173090 - DNA, 17 bp, synthetic construct
  source 1..17: mol_type = other DNA
ctgcaggtgtggtggcg

SEQ ID NO: 173091 - DNA, 17 bp, synthetic construct
  source 1..17: mol_type = other DNA
gctgcaggtgtggtggc

SEQ ID NO: 173092 - DNA, 17 bp, synthetic construct
  source 1..17: mol_type = other DNA
ggctgcaggtgtggtgg

SEQ ID NO: 173093 - DNA, 17 bp, synthetic construct
  source 1..17: mol_type = other DNA
tggctgcaggtgtggtg

SEQ ID NO: 173094 - DNA, 17 bp, synthetic construct
  source 1..17: mol_type = other DNA
gtggctgcaggtgtggt

SEQ ID NO: 173095 - DNA, 17 bp, synthetic construct
  source 1..17: mol_type = other DNA
ggtggctgcaggtgtgg

SEQ ID NO: 173096 - DNA, 17 bp, synthetic construct
  source 1..17: mol_type = other DNA
tggtggctgcaggtgtg

SEQ ID NO: 173097 - DNA, 17 bp, synthetic construct
  source 1..17: mol_type = other DNA
ctggtggctgcaggtgt

SEQ ID NO: 173098 - DNA, 17 bp, synthetic construct
  source 1..17: mol_type = other DNA
gctggtggctgcaggtg

SEQ ID NO: 173099 - DNA, 17 bp, synthetic construct
  source 1..17: mol_type = other DNA
tgctggtggctgcaggt

SEQ ID NO: 173100 - DNA, 17 bp, synthetic construct
  source 1..17: mol_type = other DNA
ctgctggtggctgcagg

SEQ ID NO: 173101 - DNA, 17 bp, synthetic construct
  source 1..17: mol_type = other DNA
gctgctggtggctgcag

SEQ ID NO: 173102 - DNA, 17 bp, synthetic construct
  source 1..17: mol_type = other DNA
tgctgctggtggctgca

SEQ ID NO: 173103 - DNA, 17 bp, synthetic construct
  source 1..17: mol_type = other DNA
gtgctgctggtggctgc

SEQ ID NO: 173104 - DNA, 17 bp, synthetic construct
  source 1..17: mol_type = other DNA
tgtgctgctggtggctg

SEQ ID NO: 173105 - DNA, 17 bp, synthetic construct
  source 1..17: mol_type = other DNA
ctgtgctgctggtggct

SEQ ID NO: 173106 - DNA, 17 bp, synthetic construct
  source 1..17: mol_type = other DNA
actgtgctgctggtggc

SEQ ID NO: 173107 - DNA, 17 bp, synthetic construct
  source 1..17: mol_type = other DNA
cactgtgctgctggtgg

SEQ ID NO: 173108 - DNA, 17 bp, synthetic construct
  source 1..17: mol_type = other DNA
tcactgtgctgctggtg

SEQ ID NO: 173109 - DNA, 17 bp, synthetic construct
  source 1..17: mol_type = other DNA
gtcactgtgctgctggt

SEQ ID NO: 173110 - DNA, 17 bp, synthetic construct
  source 1..17: mol_type = other DNA
agtcactgtgctgctgg

SEQ ID NO: 173111 - DNA, 17 bp, synthetic construct
  source 1..17: mol_type = other DNA
gagtcactgtgctgctg

SEQ ID NO: 173112 - DNA, 17 bp, synthetic construct
  source 1..17: mol_type = other DNA
ggagtcactgtgctgct

SEQ ID NO: 173113 - DNA, 17 bp, synthetic construct
  source 1..17: mol_type = other DNA
gggagtcactgtgctgc

SEQ ID NO: 173114 - DNA, 17 bp, synthetic construct
  source 1..17: mol_type = other DNA
agggagtcactgtgctg

SEQ ID NO: 173115 - DNA, 17 bp, synthetic construct
  source 1..17: mol_type = other DNA
gagggagtcactgtgct

SEQ ID NO: 173116 - DNA, 17 bp, synthetic construct
  source 1..17: mol_type = other DNA
ggagggagtcactgtgc

SEQ ID NO: 173117 - DNA, 17 bp, synthetic construct
  source 1..17: mol_type = other DNA
aggagggagtcactgtg

SEQ ID NO: 173118 - DNA, 17 bp, synthetic construct
  source 1..17: mol_type = other DNA
gaggagggagtcactgt

SEQ ID NO: 173119 - DNA, 17 bp, synthetic construct
  source 1..17: mol_type = other DNA
agaggagggagtcactg

SEQ ID NO: 173120 - DNA, 17 bp, synthetic construct
  source 1..17: mol_type = other DNA
cagaggagggagtcact

SEQ ID NO: 173121 - DNA, 17 bp, synthetic construct
  source 1..17: mol_type = other DNA
gcagaggagggagtcac

SEQ ID NO: 173122 - DNA, 17 bp, synthetic construct
  source 1..17: mol_type = other DNA
ggcagaggagggagtca

SEQ ID NO: 173123 - DNA, 17 bp, synthetic construct
  source 1..17: mol_type = other DNA
gggcagaggagggagtc

SEQ ID NO: 173124 - DNA, 17 bp, synthetic construct
  source 1..17: mol_type = other DNA
agggcagaggagggagt

SEQ ID NO: 173125 - DNA, 17 bp, synthetic construct
  source 1..17: mol_type = other DNA
tagggcagaggagggag

SEQ ID NO: 173126 - DNA, 17 bp, synthetic construct
  source 1..17: mol_type = other DNA
ctagggcagaggaggga

SEQ ID NO: 173127 - DNA, 17 bp, synthetic construct
  source 1..17: mol_type = other DNA
cctagggcagaggaggg

SEQ ID NO: 173128 - DNA, 17 bp, synthetic construct
  source 1..17: mol_type = other DNA
ccctagggcagaggagg

SEQ ID NO: 173129 - DNA, 17 bp, synthetic construct
  source 1..17: mol_type = other DNA
tccctagggcagaggag

SEQ ID NO: 173130 - DNA, 17 bp, synthetic construct
  source 1..17: mol_type = other DNA
gtccctagggcagagga

SEQ ID NO: 173131 - DNA, 17 bp, synthetic construct
  source 1..17: mol_type = other DNA
ggtccctagggcagagg

SEQ ID NO: 173132 - DNA, 17 bp, synthetic construct
  source 1..17: mol_type = other DNA
tggtccctagggcagag

SEQ ID NO: 173133 - DNA, 17 bp, synthetic construct
  source 1..17: mol_type = other DNA
gtggtccctagggcaga

SEQ ID NO: 173134 - DNA, 17 bp, synthetic construct
  source 1..17: mol_type = other DNA
ggtggtccctagggcag

SEQ ID NO: 173135 - DNA, 17 bp, synthetic construct
  source 1..17: mol_type = other DNA
gggtggtccctagggca

SEQ ID NO: 173136 - DNA, 17 bp, synthetic construct
  source 1..17: mol_type = other DNA
tgggtggtccctagggc

SEQ ID NO: 173137 - DNA, 17 bp, synthetic construct
  source 1..17: mol_type = other DNA
gtgggtggtccctaggg

SEQ ID NO: 173138 - DNA, 17 bp, synthetic construct
  source 1..17: mol_type = other DNA
tgtgggtggtccctagg

SEQ ID NO: 173139 - DNA, 17 bp, synthetic construct
  source 1..17: mol_type = other DNA
gtgtgggtggtccctag

SEQ ID NO: 173140 - DNA, 17 bp, synthetic construct
  source 1..17: mol_type = other DNA
tgtgtgggtggtcccta

SEQ ID NO: 173141 - DNA, 17 bp, synthetic construct
  source 1..17: mol_type = other DNA
gtgtgtgggtggtccct

SEQ ID NO: 173142 - DNA, 17 bp, synthetic construct
  source 1..17: mol_type = other DNA
ggtgtgtgggtggtccc

SEQ ID NO: 173143 - DNA, 17 bp, synthetic construct
  source 1..17: mol_type = other DNA
gggtgtgtgggtggtcc

SEQ ID NO: 173144 - DNA, 17 bp, synthetic construct
  source 1..17: mol_type = other DNA
ggggtgtgtgggtggtc

SEQ ID NO: 173145 - DNA, 17 bp, synthetic construct
  source 1..17: mol_type = other DNA
gggggtgtgtgggtggt

SEQ ID NO: 173146 - DNA, 17 bp, synthetic construct
  source 1..17: mol_type = other DNA
tgggggtgtgtgggtgg

SEQ ID NO: 173147 - DNA, 17 bp, synthetic construct
  source 1..17: mol_type = other DNA
ctgggggtgtgtgggtg

SEQ ID NO: 173148 - DNA, 17 bp, synthetic construct
  source 1..17: mol_type = other DNA
actgggggtgtgtgggt

SEQ ID NO: 173149 - DNA, 17 bp, synthetic construct
  source 1..17: mol_type = other DNA
cactgggggtgtgtggg

SEQ ID NO: 173150 - DNA, 17 bp, synthetic construct
  source 1..17: mol_type = other DNA
gcactgggggtgtgtgg

SEQ ID NO: 173151 - DNA, 17 bp, synthetic construct
  source 1..17: mol_type = other DNA
ggcactgggggtgtgtg

SEQ ID NO: 173152 - DNA, 17 bp, synthetic construct
  source 1..17: mol_type = other DNA
cggcactgggggtgtgt

SEQ ID NO: 173153 - DNA, 17 bp, synthetic construct
  source 1..17: mol_type = other DNA
tcggcactgggggtgtg

SEQ ID NO: 173154 - DNA, 17 bp, synthetic construct
  source 1..17: mol_type = other DNA
ttcggcactgggggtgt

SEQ ID NO: 173155 - DNA, 17 bp, synthetic construct
  source 1..17: mol_type = other DNA
gttcggcactgggggtg

SEQ ID NO: 173156 - DNA, 17 bp, synthetic construct
  source 1..17: mol_type = other DNA
tgttcggcactgggggt

SEQ ID NO: 173157 - DNA, 17 bp, synthetic construct
  source 1..17: mol_type = other DNA
gtgttcggcactggggg

SEQ ID NO: 173158 - DNA, 17 bp, synthetic construct
  source 1..17: mol_type = other DNA
ggtgttcggcactgggg

SEQ ID NO: 173159 - DNA, 17 bp, synthetic construct
  source 1..17: mol_type = other DNA
tggtgttcggcactggg

SEQ ID NO: 173160 - DNA, 17 bp, synthetic construct
  source 1..17: mol_type = other DNA
gtggtgttcggcactgg

SEQ ID NO: 173161 - DNA, 17 bp, synthetic construct
  source 1..17: mol_type = other DNA
cgtggtgttcggcactg

SEQ ID NO: 173162 - DNA, 17 bp, synthetic construct
  source 1..17: mol_type = other DNA
ccgtggtgttcggcact

SEQ ID NO: 173163 - DNA, 17 bp, synthetic construct
  source 1..17: mol_type = other DNA
gccgtggtgttcggcac

SEQ ID NO: 173164 - DNA, 17 bp, synthetic construct
  source 1..17: mol_type = other DNA
ggccgtggtgttcggca

SEQ ID NO: 173165 - DNA, 17 bp, synthetic construct
  source 1..17: mol_type = other DNA
tggccgtggtgttcggc

SEQ ID NO: 173166 - DNA, 17 bp, synthetic construct
  source 1..17: mol_type = other DNA
gtggccgtggtgttcgg

SEQ ID NO: 173167 - DNA, 17 bp, synthetic construct
  source 1..17: mol_type = other DNA
ggtggccgtggtgttcg

SEQ ID NO: 173168 - DNA, 17 bp, synthetic construct
  source 1..17: mol_type = other DNA
tggtggccgtggtgttc

SEQ ID NO: 173169 - DNA, 17 bp, synthetic construct
  source 1..17: mol_type = other DNA
gtggtggccgtggtgtt

SEQ ID NO: 173170 - DNA, 17 bp, synthetic construct
  source 1..17: mol_type = other DNA
tgtggtggccgtggtgt

SEQ ID NO: 173171 - DNA, 17 bp, synthetic construct
  source 1..17: mol_type = other DNA
gtgtggtggccgtggtg

SEQ ID NO: 173172 - DNA, 17 bp, synthetic construct
  source 1..17: mol_type = other DNA
tgtgtggtggccgtggt

SEQ ID NO: 173173 - DNA, 17 bp, synthetic construct
  source 1..17: mol_type = other DNA
gtgtgtggtggccgtgg

SEQ ID NO: 173174 - DNA, 17 bp, synthetic construct
  source 1..17: mol_type = other DNA
cgtgtgtggtggccgtg

SEQ ID NO: 173175 - DNA, 17 bp, synthetic construct
  source 1..17: mol_type = other DNA
ccgtgtgtggtggccgt

SEQ ID NO: 173176 - DNA, 17 bp, synthetic construct
  source 1..17: mol_type = other DNA
cccgtgtgtggtggccg

SEQ ID NO: 173177 - DNA, 17 bp, synthetic construct
  source 1..17: mol_type = other DNA
gcccgtgtgtggtggcc

SEQ ID NO: 173178 - DNA, 17 bp, synthetic construct
  source 1..17: mol_type = other DNA
cgcccgtgtgtggtggc

SEQ ID NO: 173179 - DNA, 17 bp, synthetic construct
  source 1..17: mol_type = other DNA
tcgcccgtgtgtggtgg

SEQ ID NO: 173180 - DNA, 17 bp, synthetic construct
  source 1..17: mol_type = other DNA
atcgcccgtgtgtggtg

SEQ ID NO: 173181 - DNA, 17 bp, synthetic construct
  source 1..17: mol_type = other DNA
gatcgcccgtgtgtggt

SEQ ID NO: 173182 - DNA, 17 bp, synthetic construct
  source 1..17: mol_type = other DNA
ggatcgcccgtgtgtgg

SEQ ID NO: 173183 - DNA, 17 bp, synthetic construct
  source 1..17: mol_type = other DNA
gggatcgcccgtgtgtg

SEQ ID NO: 173184 - DNA, 17 bp, synthetic construct
  source 1..17: mol_type = other DNA
agggatcgcccgtgtgt

SEQ ID NO: 173185 - DNA, 17 bp, synthetic construct
  source 1..17: mol_type = other DNA
cagggatcgcccgtgtg

SEQ ID NO: 173186 - DNA, 17 bp, synthetic construct
  source 1..17: mol_type = other DNA
acagggatcgcccgtgt

SEQ ID NO: 173187 - DNA, 17 bp, synthetic construct
  source 1..17: mol_type = other DNA
gacagggatcgcccgtg

SEQ ID NO: 173188 - DNA, 17 bp, synthetic construct
  source 1..17: mol_type = other DNA
ggacagggatcgcccgt

SEQ ID NO: 173189 - DNA, 17 bp, synthetic construct
  source 1..17: mol_type = other DNA
gggacagggatcgcccg

SEQ ID NO: 173190 - DNA, 17 bp, synthetic construct
  source 1..17: mol_type = other DNA
ggggacagggatcgccc

SEQ ID NO: 173191 - DNA, 17 bp, synthetic construct
  source 1..17: mol_type = other DNA
gggggacagggatcgcc

SEQ ID NO: 173192 - DNA, 17 bp, synthetic construct
  source 1..17: mol_type = other DNA
tgggggacagggatcgc

SEQ ID NO: 173193 - DNA, 17 bp, synthetic construct
  source 1..17: mol_type = other DNA
ctgggggacagggatcg

SEQ ID NO: 173194 - DNA, 17 bp, synthetic construct
  source 1..17: mol_type = other DNA
gctgggggacagggatc

SEQ ID NO: 173195 - DNA, 17 bp, synthetic construct
  source 1..17: mol_type = other DNA
tgctgggggacagggat

SEQ ID NO: 173196 - DNA, 17 bp, synthetic construct
  source 1..17: mol_type = other DNA
ctgctgggggacaggga

SEQ ID NO: 173197 - DNA, 17 bp, synthetic construct
  source 1..17: mol_type = other DNA
actgctgggggacaggg

SEQ ID NO: 173198 - DNA, 17 bp, synthetic construct
  source 1..17: mol_type = other DNA
gactgctgggggacagg

SEQ ID NO: 173199 - DNA, 17 bp, synthetic construct
  source 1..17: mol_type = other DNA
ggactgctgggggacag

SEQ ID NO: 173200 - DNA, 17 bp, synthetic construct
  source 1..17: mol_type = other DNA
gggactgctgggggaca

SEQ ID NO: 173201 - DNA, 17 bp, synthetic construct
  source 1..17: mol_type = other DNA
ggggactgctgggggac

SEQ ID NO: 173202 - DNA, 17 bp, synthetic construct
  source 1..17: mol_type = other DNA
tggggactgctggggga

SEQ ID NO: 173203 - DNA, 17 bp, synthetic construct
  source 1..17: mol_type = other DNA
gtggggactgctggggg

SEQ ID NO: 173204 - DNA, 17 bp, synthetic construct
  source 1..17: mol_type = other DNA
tgtggggactgctgggg

SEQ ID NO: 173205 - DNA, 17 bp, synthetic construct
  source 1..17: mol_type = other DNA
gtgtggggactgctggg

SEQ ID NO: 173206 - DNA, 17 bp, synthetic construct
  source 1..17: mol_type = other DNA
cgtgtggggactgctgg

SEQ ID NO: 173207 - DNA, 17 bp, synthetic construct
  source 1..17: mol_type = other DNA
ccgtgtggggactgctg

SEQ ID NO: 173208 - DNA, 17 bp, synthetic construct
  source 1..17: mol_type = other DNA
accgtgtggggactgct

SEQ ID NO: 173209 - DNA, 17 bp, synthetic construct
  source 1..17: mol_type = other DNA
caccgtgtggggactgc

SEQ ID NO: 173210 - DNA, 17 bp, synthetic construct
  source 1..17: mol_type = other DNA
gcaccgtgtggggactg

SEQ ID NO: 173211 - DNA, 17 bp, synthetic construct
  source 1..17: mol_type = other DNA
cgcaccgtgtggggact

SEQ ID NO: 173212 - DNA, 17 bp, synthetic construct
  source 1..17: mol_type = other DNA
gcgcaccgtgtggggac

SEQ ID NO: 173213 - DNA, 17 bp, synthetic construct
  source 1..17: mol_type = other DNA
tgcgcaccgtgtgggga

SEQ ID NO: 173214 - DNA, 17 bp, synthetic construct
  source 1..17: mol_type = other DNA
gtgcgcaccgtgtgggg

SEQ ID NO: 173215 - DNA, 17 bp, synthetic construct
  source 1..17: mol_type = other DNA
tgtgcgcaccgtgtggg

SEQ ID NO: 173216 - DNA, 17 bp, synthetic construct
  source 1..17: mol_type = other DNA
ctgtgcgcaccgtgtgg

SEQ ID NO: 173217 - DNA, 17 bp, synthetic construct
  source 1..17: mol_type = other DNA
gctgtgcgcaccgtgtg

SEQ ID NO: 173218 - DNA, 17 bp, synthetic construct
  source 1..17: mol_type = other DNA
ggctgtgcgcaccgtgt

SEQ ID NO: 173219 - DNA, 17 bp, synthetic construct
  source 1..17: mol_type = other DNA
aggctgtgcgcaccgtg

SEQ ID NO: 173220 - DNA, 17 bp, synthetic construct
  source 1..17: mol_type = other DNA
caggctgtgcgcaccgt

SEQ ID NO: 173221 - DNA, 17 bp, synthetic construct
  source 1..17: mol_type = other DNA
ccaggctgtgcgcaccg

SEQ ID NO: 173222 - DNA, 17 bp, synthetic construct
  source 1..17: mol_type = other DNA
tccaggctgtgcgcacc

SEQ ID NO: 173223 - DNA, 17 bp, synthetic construct
  source 1..17: mol_type = other DNA
gtccaggctgtgcgcac

SEQ ID NO: 173224 - DNA, 17 bp, synthetic construct
  source 1..17: mol_type = other DNA
agtccaggctgtgcgca

SEQ ID NO: 173225 - DNA, 17 bp, synthetic construct
  source 1..17: mol_type = other DNA
aagtccaggctgtgcgc

SEQ ID NO: 173226 - DNA, 17 bp, synthetic construct
  source 1..17: mol_type = other DNA
gaagtccaggctgtgcg

SEQ ID NO: 173227 - DNA, 17 bp, synthetic construct
  source 1..17: mol_type = other DNA
cgaagtccaggctgtgc

SEQ ID NO: 173228 - DNA, 17 bp, synthetic construct
  source 1..17: mol_type = other DNA
ccgaagtccaggctgtg

SEQ ID NO: 173229 - DNA, 17 bp, synthetic construct
  source 1..17: mol_type = other DNA
gccgaagtccaggctgt

SEQ ID NO: 173230 - DNA, 17 bp, synthetic construct
  source 1..17: mol_type = other DNA
ggccgaagtccaggctg

SEQ ID NO: 173231 - DNA, 17 bp, synthetic construct
  source 1..17: mol_type = other DNA
tggccgaagtccaggct

SEQ ID NO: 173232 - DNA, 17 bp, synthetic construct
  source 1..17: mol_type = other DNA
gtggccgaagtccaggc

SEQ ID NO: 173233 - DNA, 17 bp, synthetic construct
  source 1..17: mol_type = other DNA
ggtggccgaagtccagg

SEQ ID NO: 173234 - DNA, 17 bp, synthetic construct
  source 1..17: mol_type = other DNA
aggtggccgaagtccag

SEQ ID NO: 173235 - DNA, 17 bp, synthetic construct
  source 1..17: mol_type = other DNA
gaggtggccgaagtcca

SEQ ID NO: 173236 - DNA, 17 bp, synthetic construct
  source 1..17: mol_type = other DNA
tgaggtggccgaagtcc

SEQ ID NO: 173237 - DNA, 17 bp, synthetic construct
  source 1..17: mol_type = other DNA
ctgaggtggccgaagtc

SEQ ID NO: 173238 - DNA, 17 bp, synthetic construct
  source 1..17: mol_type = other DNA
cctgaggtggccgaagt

SEQ ID NO: 173239 - DNA, 17 bp, synthetic construct
  source 1..17: mol_type = other DNA
gcctgaggtggccgaag

SEQ ID NO: 173240 - DNA, 17 bp, synthetic construct
  source 1..17: mol_type = other DNA
tgcctgaggtggccgaa

SEQ ID NO: 173241 - DNA, 17 bp, synthetic construct
  source 1..17: mol_type = other DNA
gtgcctgaggtggccga

SEQ ID NO: 173242 - DNA, 17 bp, synthetic construct
  source 1..17: mol_type = other DNA
ggtgcctgaggtggccg

SEQ ID NO: 173243 - DNA, 17 bp, synthetic construct
  source 1..17: mol_type = other DNA
aggtgcctgaggtggcc

SEQ ID NO: 173244 - DNA, 17 bp, synthetic construct
  source 1..17: mol_type = other DNA
aaggtgcctgaggtggc

SEQ ID NO: 173245 - DNA, 17 bp, synthetic construct
  source 1..17: mol_type = other DNA
caaggtgcctgaggtgg

SEQ ID NO: 173246 - DNA, 17 bp, synthetic construct
  source 1..17: mol_type = other DNA
ccaaggtgcctgaggtg

SEQ ID NO: 173247 - DNA, 17 bp, synthetic construct
  source 1..17: mol_type = other DNA
cccaaggtgcctgaggt

SEQ ID NO: 173248 - DNA, 17 bp, synthetic construct
  source 1..17: mol_type = other DNA
gcccaaggtgcctgagg

SEQ ID NO: 173249 - DNA, 17 bp, synthetic construct
  source 1..17: mol_type = other DNA
tgcccaaggtgcctgag

SEQ ID NO: 173250 - DNA, 17 bp, synthetic construct
  source 1..17: mol_type = other DNA
gtgcccaaggtgcctga

SEQ ID NO: 173251 - DNA, 17 bp, synthetic construct
  source 1..17: mol_type = other DNA
ggtgcccaaggtgcctg

SEQ ID NO: 173252 - DNA, 17 bp, synthetic construct
  source 1..17: mol_type = other DNA
tggtgcccaaggtgcct

SEQ ID NO: 173253 - DNA, 17 bp, synthetic construct
  source 1..17: mol_type = other DNA
gtggtgcccaaggtgcc

SEQ ID NO: 173254 - DNA, 17 bp, synthetic construct
  source 1..17: mol_type = other DNA
ggtggtgcccaaggtgc

SEQ ID NO: 173255 - DNA, 17 bp, synthetic construct
  source 1..17: mol_type = other DNA
gggtggtgcccaaggtg

SEQ ID NO: 173256 - DNA, 17 bp, synthetic construct
  source 1..17: mol_type = other DNA
tgggtggtgcccaaggt

SEQ ID NO: 173257 - DNA, 17 bp, synthetic construct
  source 1..17: mol_type = other DNA
gtgggtggtgcccaagg

SEQ ID NO: 173258 - DNA, 17 bp, synthetic construct
  source 1..17: mol_type = other DNA
tgtgggtggtgcccaag

SEQ ID NO: 173259 - DNA, 17 bp, synthetic construct
  source 1..17: mol_type = other DNA
atgtgggtggtgcccaa

SEQ ID NO: 173260 - DNA, 17 bp, synthetic construct
  source 1..17: mol_type = other DNA
gatgtgggtggtgccca

SEQ ID NO: 173261 - DNA, 17 bp, synthetic construct
  source 1..17: mol_type = other DNA
tgatgtgggtggtgccc

SEQ ID NO: 173262 - DNA, 17 bp, synthetic construct
  source 1..17: mol_type = other DNA
gtgatgtgggtggtgcc

SEQ ID NO: 173263 - DNA, 17 bp, synthetic construct
  source 1..17: mol_type = other DNA
tgtgatgtgggtggtgc

SEQ ID NO: 173264 - DNA, 17 bp, synthetic construct
  source 1..17: mol_type = other DNA
ctgtgatgtgggtggtg

SEQ ID NO: 173265 - DNA, 17 bp, synthetic construct
  source 1..17: mol_type = other DNA
tctgtgatgtgggtggt

SEQ ID NO: 173266 - DNA, 17 bp, synthetic construct
  source 1..17: mol_type = other DNA
ctctgtgatgtgggtgg

SEQ ID NO: 173267 - DNA, 17 bp, synthetic construct
  source 1..17: mol_type = other DNA
gctctgtgatgtgggtg

SEQ ID NO: 173268 - DNA, 17 bp, synthetic construct
  source 1..17: mol_type = other DNA
ggctctgtgatgtgggt

SEQ ID NO: 173269 - DNA, 17 bp, synthetic construct
  source 1..17: mol_type = other DNA
aggctctgtgatgtggg

SEQ ID NO: 173270 - DNA, 17 bp, synthetic construct
  source 1..17: mol_type = other DNA
aaggctctgtgatgtgg

SEQ ID NO: 173271 - DNA, 17 bp, synthetic construct
  source 1..17: mol_type = other DNA
gaaggctctgtgatgtg

SEQ ID NO: 173272 - DNA, 17 bp, synthetic construct
  source 1..17: mol_type = other DNA
ggaaggctctgtgatgt

SEQ ID NO: 173273 - DNA, 17 bp, synthetic construct
  source 1..17: mol_type = other DNA
tggaaggctctgtgatg

SEQ ID NO: 173274 - DNA, 17 bp, synthetic construct
  source 1..17: mol_type = other DNA
gtggaaggctctgtgat

SEQ ID NO: 173275 - DNA, 17 bp, synthetic construct
  source 1..17: mol_type = other DNA
cgtggaaggctctgtga

SEQ ID NO: 173276 - DNA, 17 bp, synthetic construct
  source 1..17: mol_type = other DNA
ccgtggaaggctctgtg

SEQ ID NO: 173277 - DNA, 17 bp, synthetic construct
  source 1..17: mol_type = other DNA
cccgtggaaggctctgt

SEQ ID NO: 173278 - DNA, 17 bp, synthetic construct
  source 1..17: mol_type = other DNA
ccccgtggaaggctctg

SEQ ID NO: 173279 - DNA, 17 bp, synthetic construct
  source 1..17: mol_type = other DNA
tccccgtggaaggctct

SEQ ID NO: 173280 - DNA, 17 bp, synthetic construct
  source 1..17: mol_type = other DNA
gtccccgtggaaggctc

SEQ ID NO: 173281 - DNA, 17 bp, synthetic construct
  source 1..17: mol_type = other DNA
agtccccgtggaaggct

SEQ ID NO: 173282 - DNA, 17 bp, synthetic construct
  source 1..17: mol_type = other DNA
aagtccccgtggaaggc

SEQ ID NO: 173283 - DNA, 17 bp, synthetic construct
  source 1..17: mol_type = other DNA
gaagtccccgtggaagg

SEQ ID NO: 173284 - DNA, 17 bp, synthetic construct
  source 1..17: mol_type = other DNA
ggaagtccccgtggaag

SEQ ID NO: 173285 - DNA, 17 bp, synthetic construct
  source 1..17: mol_type = other DNA
gggaagtccccgtggaa

SEQ ID NO: 173286 - DNA, 17 bp, synthetic construct
  source 1..17: mol_type = other DNA
tgggaagtccccgtgga

SEQ ID NO: 173287 - DNA, 17 bp, synthetic construct
  source 1..17: mol_type = other DNA
gtgggaagtccccgtgg

SEQ ID NO: 173288 - DNA, 17 bp, synthetic construct
  source 1..17: mol_type = other DNA
tgtgggaagtccccgtg

SEQ ID NO: 173289 - DNA, 17 bp, synthetic construct
  source 1..17: mol_type = other DNA
gtgtgggaagtccccgt

SEQ ID NO: 173290 - DNA, 17 bp, synthetic construct
  source 1..17: mol_type = other DNA
ggtgtgggaagtccccg

SEQ ID NO: 173291 - DNA, 17 bp, synthetic construct
  source 1..17: mol_type = other DNA
gggtgtgggaagtcccc

SEQ ID NO: 173292 - DNA, 17 bp, synthetic construct
  source 1..17: mol_type = other DNA
ggggtgtgggaagtccc

SEQ ID NO: 173293 - DNA, 17 bp, synthetic construct
  source 1..17: mol_type = other DNA
tggggtgtgggaagtcc

SEQ ID NO: 173294 - DNA, 17 bp, synthetic construct
  source 1..17: mol_type = other DNA
ctggggtgtgggaagtc

SEQ ID NO: 173295 - DNA, 17 bp, synthetic construct
  source 1..17: mol_type = other DNA
gctggggtgtgggaagt

SEQ ID NO: 173296 - DNA, 17 bp, synthetic construct
  source 1..17: mol_type = other DNA
tgctggggtgtgggaag

SEQ ID NO: 173297 - DNA, 17 bp, synthetic construct
  source 1..17: mol_type = other DNA
ctgctggggtgtgggaa

SEQ ID NO: 173298 - DNA, 17 bp, synthetic construct
  source 1..17: mol_type = other DNA
gctgctggggtgtggga

SEQ ID NO: 173299 - DNA, 17 bp, synthetic construct
  source 1..17: mol_type = other DNA
tgctgctggggtgtggg

SEQ ID NO: 173300 - DNA, 17 bp, synthetic construct
  source 1..17: mol_type = other DNA
ttgctgctggggtgtgg

SEQ ID NO: 173301 - DNA, 17 bp, synthetic construct
  source 1..17: mol_type = other DNA
gttgctgctggggtgtg

SEQ ID NO: 173302 - DNA, 17 bp, synthetic construct
  source 1..17: mol_type = other DNA
ggttgctgctggggtgt

SEQ ID NO: 173303 - DNA, 17 bp, synthetic construct
  source 1..17: mol_type = other DNA
tggttgctgctggggtg

SEQ ID NO: 173304 - DNA, 17 bp, synthetic construct
  source 1..17: mol_type = other DNA
gtggttgctgctggggt

SEQ ID NO: 173305 - DNA, 17 bp, synthetic construct
  source 1..17: mol_type = other DNA
ggtggttgctgctgggg

SEQ ID NO: 173306 - DNA, 17 bp, synthetic construct
  source 1..17: mol_type = other DNA
cggtggttgctgctggg

SEQ ID NO: 173307 - DNA, 17 bp, synthetic construct
  source 1..17: mol_type = other DNA
ccggtggttgctgctgg

SEQ ID NO: 173308 - DNA, 17 bp, synthetic construct
  source 1..17: mol_type = other DNA
accggtggttgctgctg

SEQ ID NO: 173309 - DNA, 17 bp, synthetic construct
  source 1..17: mol_type = other DNA
taccggtggttgctgct

SEQ ID NO: 173310 - DNA, 17 bp, synthetic construct
  source 1..17: mol_type = other DNA
gtaccggtggttgctgc

SEQ ID NO: 173311 - DNA, 17 bp, synthetic construct
  source 1..17: mol_type = other DNA
ggtaccggtggttgctg

SEQ ID NO: 173312 - DNA, 17 bp, synthetic construct
  source 1..17: mol_type = other DNA
tggtaccggtggttgct

SEQ ID NO: 173313 - DNA, 17 bp, synthetic construct
  source 1..17: mol_type = other DNA
gtggtaccggtggttgc

SEQ ID NO: 173314 - DNA, 17 bp, synthetic construct
  source 1..17: mol_type = other DNA
ggtggtaccggtggttg

SEQ ID NO: 173315 - DNA, 17 bp, synthetic construct
  source 1..17: mol_type = other DNA
gggtggtaccggtggtt

SEQ ID NO: 173316 - DNA, 17 bp, synthetic construct
  source 1..17: mol_type = other DNA
tgggtggtaccggtggt

SEQ ID NO: 173317 - DNA, 17 bp, synthetic construct
  source 1..17: mol_type = other DNA
ctgggtggtaccggtgg

SEQ ID NO: 173318 - DNA, 17 bp, synthetic construct
  source 1..17: mol_type = other DNA
gctgggtggtaccggtg

SEQ ID NO: 173319 - DNA, 17 bp, synthetic construct
  source 1..17: mol_type = other DNA
tgctgggtggtaccggt

SEQ ID NO: 173320 - DNA, 17 bp, synthetic construct
  source 1..17: mol_type = other DNA
gtgctgggtggtaccgg

SEQ ID NO: 173321 - DNA, 17 bp, synthetic construct
  source 1..17: mol_type = other DNA
agtgctgggtggtaccg

SEQ ID NO: 173322 - DNA, 17 bp, synthetic construct
  source 1..17: mol_type = other DNA
gagtgctgggtggtacc

SEQ ID NO: 173323 - DNA, 17 bp, synthetic construct
  source 1..17: mol_type = other DNA
cgagtgctgggtggtac

SEQ ID NO: 173324 - DNA, 17 bp, synthetic construct
  source 1..17: mol_type = other DNA
tcgagtgctgggtggta

SEQ ID NO: 173325 - DNA, 17 bp, synthetic construct
  source 1..17: mol_type = other DNA
gtcgagtgctgggtggt

SEQ ID NO: 173326 - DNA, 17 bp, synthetic construct
  source 1..17: mol_type = other DNA
agtcgagtgctgggtgg

SEQ ID NO: 173327 - DNA, 17 bp, synthetic construct
  source 1..17: mol_type = other DNA
gagtcgagtgctgggtg

SEQ ID NO: 173328 - DNA, 17 bp, synthetic construct
  source 1..17: mol_type = other DNA
ggagtcgagtgctgggt

SEQ ID NO: 173329 - DNA, 17 bp, synthetic construct
  source 1..17: mol_type = other DNA
tggagtcgagtgctggg

SEQ ID NO: 173330 - DNA, 17 bp, synthetic construct
  source 1..17: mol_type = other DNA
ctggagtcgagtgctgg

SEQ ID NO: 173331 - DNA, 17 bp, synthetic construct
  source 1..17: mol_type = other DNA
gctggagtcgagtgctg

SEQ ID NO: 173332 - DNA, 17 bp, synthetic construct
  source 1..17: mol_type = other DNA
ggctggagtcgagtgct

SEQ ID NO: 173333 - DNA, 17 bp, synthetic construct
  source 1..17: mol_type = other DNA
gggctggagtcgagtgc

SEQ ID NO: 173334 - DNA, 17 bp, synthetic construct
  source 1..17: mol_type = other DNA
agggctggagtcgagtg

SEQ ID NO: 173335 - DNA, 17 bp, synthetic construct
  source 1..17: mol_type = other DNA
cagggctggagtcgagt

SEQ ID NO: 173336 - DNA, 17 bp, synthetic construct
  source 1..17: mol_type = other DNA
acagggctggagtcgag

SEQ ID NO: 173337 - DNA, 17 bp, synthetic construct
  source 1..17: mol_type = other DNA
gacagggctggagtcga

SEQ ID NO: 173338 - DNA, 17 bp, synthetic construct
  source 1..17: mol_type = other DNA
ggacagggctggagtcg

SEQ ID NO: 173339 - DNA, 17 bp, synthetic construct
  source 1..17: mol_type = other DNA
tggacagggctggagtc

SEQ ID NO: 173340 - DNA, 17 bp, synthetic construct
  source 1..17: mol_type = other DNA
ctggacagggctggagt

SEQ ID NO: 173341 - DNA, 17 bp, synthetic construct
  source 1..17: mol_type = other DNA
gctggacagggctggag

SEQ ID NO: 173342 - DNA, 17 bp, synthetic construct
  source 1..17: mol_type = other DNA
ggctggacagggctgga

SEQ ID NO: 173343 - DNA, 17 bp, synthetic construct
  source 1..17: mol_type = other DNA
gggctggacagggctgg

SEQ ID NO: 173344 - DNA, 17 bp, synthetic construct
  source 1..17: mol_type = other DNA
agggctggacagggctg

SEQ ID NO: 173345 - DNA, 17 bp, synthetic construct
  source 1..17: mol_type = other DNA
gagggctggacagggct

SEQ ID NO: 173346 - DNA, 17 bp, synthetic construct
  source 1..17: mol_type = other DNA
tgagggctggacagggc

SEQ ID NO: 173347 - DNA, 17 bp, synthetic construct
  source 1..17: mol_type = other DNA
gtgagggctggacaggg

SEQ ID NO: 173348 - DNA, 17 bp, synthetic construct
  source 1..17: mol_type = other DNA
ggtgagggctggacagg

SEQ ID NO: 173349 - DNA, 17 bp, synthetic construct
  source 1..17: mol_type = other DNA
gggtgagggctggacag

SEQ ID NO: 173350 - DNA, 17 bp, synthetic construct
  source 1..17: mol_type = other DNA
agggtgagggctggaca

SEQ ID NO: 173351 - DNA, 17 bp, synthetic construct
  source 1..17: mol_type = other DNA
tagggtgagggctggac

SEQ ID NO: 173352 - DNA, 17 bp, synthetic construct
  source 1..17: mol_type = other DNA
ctagggtgagggctgga

SEQ ID NO: 173353 - DNA, 17 bp, synthetic construct
  source 1..17: mol_type = other DNA
gctagggtgagggctgg

SEQ ID NO: 173354 - DNA, 17 bp, synthetic construct
  source 1..17: mol_type = other DNA
tgctagggtgagggctg

SEQ ID NO: 173355 - DNA, 17 bp, synthetic construct
  source 1..17: mol_type = other DNA
ctgctagggtgagggct

SEQ ID NO: 173356 - DNA, 17 bp, synthetic construct
  source 1..17: mol_type = other DNA
gctgctagggtgagggc

SEQ ID NO: 173357 - DNA, 17 bp, synthetic construct
  source 1..17: mol_type = other DNA
tgctgctagggtgaggg

SEQ ID NO: 173358 - DNA, 17 bp, synthetic construct
  source 1..17: mol_type = other DNA
ctgctgctagggtgagg

SEQ ID NO: 173359 - DNA, 17 bp, synthetic construct
  source 1..17: mol_type = other DNA
cctgctgctagggtgag

SEQ ID NO: 173360 - DNA, 17 bp, synthetic construct
  source 1..17: mol_type = other DNA
tcctgctgctagggtga

SEQ ID NO: 173361 - DNA, 17 bp, synthetic construct
  source 1..17: mol_type = other DNA
gtcctgctgctagggtg

SEQ ID NO: 173362 - DNA, 17 bp, synthetic construct
  source 1..17: mol_type = other DNA
ggtcctgctgctagggt

SEQ ID NO: 173363 - DNA, 17 bp, synthetic construct
  source 1..17: mol_type = other DNA
tggtcctgctgctaggg

SEQ ID NO: 173364 - DNA, 17 bp, synthetic construct
  source 1..17: mol_type = other DNA
gtggtcctgctgctagg

SEQ ID NO: 173365 - DNA, 17 bp, synthetic construct
  source 1..17: mol_type = other DNA
ggtggtcctgctgctag

SEQ ID NO: 173366 - DNA, 17 bp, synthetic construct
  source 1..17: mol_type = other DNA
cggtggtcctgctgcta

SEQ ID NO: 173367 - DNA, 17 bp, synthetic construct
  source 1..17: mol_type = other DNA
tcggtggtcctgctgct

SEQ ID NO: 173368 - DNA, 17 bp, synthetic construct
  source 1..17: mol_type = other DNA
ctcggtggtcctgctgc

SEQ ID NO: 173369 - DNA, 17 bp, synthetic construct
  source 1..17: mol_type = other DNA
actcggtggtcctgctg

SEQ ID NO: 173370 - DNA, 17 bp, synthetic construct
  source 1..17: mol_type = other DNA
gactcggtggtcctgct

SEQ ID NO: 173371 - DNA, 17 bp, synthetic construct
  source 1..17: mol_type = other DNA
tgactcggtggtcctgc

SEQ ID NO: 173372 - DNA, 17 bp, synthetic construct
  source 1..17: mol_type = other DNA
gtgactcggtggtcctg

SEQ ID NO: 173373 - DNA, 17 bp, synthetic construct
  source 1..17: mol_type = other DNA
ggtgactcggtggtcct

SEQ ID NO: 173374 - DNA, 17 bp, synthetic construct
  source 1..17: mol_type = other DNA
gggtgactcggtggtcc

SEQ ID NO: 173375 - DNA, 17 bp, synthetic construct
  source 1..17: mol_type = other DNA
ggggtgactcggtggtc

SEQ ID NO: 173376 - DNA, 17 bp, synthetic construct
  source 1..17: mol_type = other DNA
gggggtgactcggtggt

SEQ ID NO: 173377 - DNA, 17 bp, synthetic construct
  source 1..17: mol_type = other DNA
agggggtgactcggtgg

SEQ ID NO: 173378 - DNA, 17 bp, synthetic construct
  source 1..17: mol_type = other DNA
aagggggtgactcggtg

SEQ ID NO: 173379 - DNA, 17 bp, synthetic construct
  source 1..17: mol_type = other DNA
gaagggggtgactcggt

SEQ ID NO: 173380 - DNA, 17 bp, synthetic construct
  source 1..17: mol_type = other DNA
ggaagggggtgactcgg

SEQ ID NO: 173381 - DNA, 17 bp, synthetic construct
  source 1..17: mol_type = other DNA
gggaagggggtgactcg

SEQ ID NO: 173382 - DNA, 17 bp, synthetic construct
  source 1..17: mol_type = other DNA
ggggaagggggtgactc

SEQ ID NO: 173383 - DNA, 17 bp, synthetic construct
  source 1..17: mol_type = other DNA
tggggaagggggtgact

SEQ ID NO: 173384 - DNA, 17 bp, synthetic construct
  source 1..17: mol_type = other DNA
ctggggaagggggtgac

SEQ ID NO: 173385 - DNA, 17 bp, synthetic construct
  source 1..17: mol_type = other DNA
cctggggaagggggtga

SEQ ID NO: 173386 - DNA, 17 bp, synthetic construct
  source 1..17: mol_type = other DNA
ccctggggaagggggtg

SEQ ID NO: 173387 - DNA, 17 bp, synthetic construct
  source 1..17: mol_type = other DNA
tccctggggaagggggt

SEQ ID NO: 173388 - DNA, 17 bp, synthetic construct
  source 1..17: mol_type = other DNA
gtccctggggaaggggg

SEQ ID NO: 173389 - DNA, 17 bp, synthetic construct
  source 1..17: mol_type = other DNA
cgtccctggggaagggg

SEQ ID NO: 173390 - DNA, 17 bp, synthetic construct
  source 1..17: mol_type = other DNA
tcgtccctggggaaggg

SEQ ID NO: 173391 - DNA, 17 bp, synthetic construct
  source 1..17: mol_type = other DNA
gtcgtccctggggaagg

SEQ ID NO: 173392 - DNA, 17 bp, synthetic construct
  source 1..17: mol_type = other DNA
ggtcgtccctggggaag

SEQ ID NO: 173393 - DNA, 17 bp, synthetic construct
  source 1..17: mol_type = other DNA
tggtcgtccctggggaa

SEQ ID NO: 173394 - DNA, 17 bp, synthetic construct
  source 1..17: mol_type = other DNA
gtggtcgtccctgggga

SEQ ID NO: 173395 - DNA, 17 bp, synthetic construct
  source 1..17: mol_type = other DNA
ggtggtcgtccctgggg

SEQ ID NO: 173396 - DNA, 17 bp, synthetic construct
  source 1..17: mol_type = other DNA
gggtggtcgtccctggg

SEQ ID NO: 173397 - DNA, 17 bp, synthetic construct
  source 1..17: mol_type = other DNA
ggggtggtcgtccctgg

SEQ ID NO: 173398 - DNA, 17 bp, synthetic construct
  source 1..17: mol_type = other DNA
cggggtggtcgtccctg

SEQ ID NO: 173399 - DNA, 17 bp, synthetic construct
  source 1..17: mol_type = other DNA
ccggggtggtcgtccct

SEQ ID NO: 173400 - DNA, 17 bp, synthetic construct
  source 1..17: mol_type = other DNA
cccggggtggtcgtccc

SEQ ID NO: 173401 - DNA, 17 bp, synthetic construct
  source 1..17: mol_type = other DNA
gcccggggtggtcgtcc

SEQ ID NO: 173402 - DNA, 17 bp, synthetic construct
  source 1..17: mol_type = other DNA
ggcccggggtggtcgtc

SEQ ID NO: 173403 - DNA, 17 bp, synthetic construct
  source 1..17: mol_type = other DNA
tggcccggggtggtcgt

SEQ ID NO: 173404 - DNA, 17 bp, synthetic construct
  source 1..17: mol_type = other DNA
gtggcccggggtggtcg

SEQ ID NO: 173405 - DNA, 17 bp, synthetic construct
  source 1..17: mol_type = other DNA
tgtggcccggggtggtc

SEQ ID NO: 173406 - DNA, 17 bp, synthetic construct
  source 1..17: mol_type = other DNA
gtgtggcccggggtggt

SEQ ID NO: 173407 - DNA, 17 bp, synthetic construct
  source 1..17: mol_type = other DNA
ggtgtggcccggggtgg

SEQ ID NO: 173408 - DNA, 17 bp, synthetic construct
  source 1..17: mol_type = other DNA
tggtgtggcccggggtg

SEQ ID NO: 173409 - DNA, 17 bp, synthetic construct
  source 1..17: mol_type = other DNA
gtggtgtggcccggggt

SEQ ID NO: 173410 - DNA, 17 bp, synthetic construct
  source 1..17: mol_type = other DNA
cgtggtgtggcccgggg

SEQ ID NO: 173411 - DNA, 17 bp, synthetic construct
  source 1..17: mol_type = other DNA
ccgtggtgtggcccggg

SEQ ID NO: 173412 - DNA, 17 bp, synthetic construct
  source 1..17: mol_type = other DNA
gccgtggtgtggcccgg

SEQ ID NO: 173413 - DNA, 17 bp, synthetic construct
  source 1..17: mol_type = other DNA
ggccgtggtgtggcccg

SEQ ID NO: 173414 - DNA, 17 bp, synthetic construct
  source 1..17: mol_type = other DNA
tggccgtggtgtggccc

SEQ ID NO: 173415 - DNA, 17 bp, synthetic construct
  source 1..17: mol_type = other DNA
gtggccgtggtgtggcc

SEQ ID NO: 173416 - DNA, 17 bp, synthetic construct
  source 1..17: mol_type = other DNA
ggtggccgtggtgtggc

SEQ ID NO: 173417 - DNA, 17 bp, synthetic construct
  source 1..17: mol_type = other DNA
aggtggccgtggtgtgg

SEQ ID NO: 173418 - DNA, 17 bp, synthetic construct
  source 1..17: mol_type = other DNA
gaggtggccgtggtgtg

SEQ ID NO: 173419 - DNA, 17 bp, synthetic construct
  source 1..17: mol_type = other DNA
ggaggtggccgtggtgt

SEQ ID NO: 173420 - DNA, 17 bp, synthetic construct
  source 1..17: mol_type = other DNA
tggaggtggccgtggtg

SEQ ID NO: 173421 - DNA, 17 bp, synthetic construct
  source 1..17: mol_type = other DNA
ctggaggtggccgtggt

SEQ ID NO: 173422 - DNA, 17 bp, synthetic construct
  source 1..17: mol_type = other DNA
cctggaggtggccgtgg

SEQ ID NO: 173423 - DNA, 17 bp, synthetic construct
  source 1..17: mol_type = other DNA
tcctggaggtggccgtg

SEQ ID NO: 173424 - DNA, 17 bp, synthetic construct
  source 1..17: mol_type = other DNA
gtcctggaggtggccgt

SEQ ID NO: 173425 - DNA, 17 bp, synthetic construct
  source 1..17: mol_type = other DNA
ggtcctggaggtggccg

SEQ ID NO: 173426 - DNA, 17 bp, synthetic construct
  source 1..17: mol_type = other DNA
tggtcctggaggtggcc

SEQ ID NO: 173427 - DNA, 17 bp, synthetic construct
  source 1..17: mol_type = other DNA
gtggtcctggaggtggc

SEQ ID NO: 173428 - DNA, 17 bp, synthetic construct
  source 1..17: mol_type = other DNA
cgtggtcctggaggtgg

SEQ ID NO: 173429 - DNA, 17 bp, synthetic construct
  source 1..17: mol_type = other DNA
ccgtggtcctggaggtg

SEQ ID NO: 173430 - DNA, 17 bp, synthetic construct
  source 1..17: mol_type = other DNA
gccgtggtcctggaggt

SEQ ID NO: 173431 - DNA, 17 bp, synthetic construct
  source 1..17: mol_type = other DNA
ggccgtggtcctggagg

SEQ ID NO: 173432 - DNA, 17 bp, synthetic construct
  source 1..17: mol_type = other DNA
tggccgtggtcctggag

SEQ ID NO: 173433 - DNA, 17 bp, synthetic construct
  source 1..17: mol_type = other DNA
gtggccgtggtcctgga

SEQ ID NO: 173434 - DNA, 17 bp, synthetic construct
  source 1..17: mol_type = other DNA
cgtggccgtggtcctgg

SEQ ID NO: 173435 - DNA, 17 bp, synthetic construct
  source 1..17: mol_type = other DNA
ccgtggccgtggtcctg

SEQ ID NO: 173436 - DNA, 17 bp, synthetic construct
  source 1..17: mol_type = other DNA
gccgtggccgtggtcct

SEQ ID NO: 173437 - DNA, 17 bp, synthetic construct
  source 1..17: mol_type = other DNA
ggccgtggccgtggtcc

SEQ ID NO: 173438 - DNA, 17 bp, synthetic construct
  source 1..17: mol_type = other DNA
tggccgtggccgtggtc

SEQ ID NO: 173439 - DNA, 17 bp, synthetic construct
  source 1..17: mol_type = other DNA
gtggccgtggccgtggt

SEQ ID NO: 173440 - DNA, 17 bp, synthetic construct
  source 1..17: mol_type = other DNA
tgtggccgtggccgtgg

SEQ ID NO: 173441 - DNA, 17 bp, synthetic construct
  source 1..17: mol_type = other DNA
gtgtggccgtggccgtg

SEQ ID NO: 173442 - DNA, 17 bp, synthetic construct
  source 1..17: mol_type = other DNA
ggtgtggccgtggccgt

SEQ ID NO: 173443 - DNA, 17 bp, synthetic construct
  source 1..17: mol_type = other DNA
gggtgtggccgtggccg

SEQ ID NO: 173444 - DNA, 17 bp, synthetic construct
  source 1..17: mol_type = other DNA
tgggtgtggccgtggcc

SEQ ID NO: 173445 - DNA, 17 bp, synthetic construct
  source 1..17: mol_type = other DNA
ctgggtgtggccgtggc

SEQ ID NO: 173446 - DNA, 17 bp, synthetic construct
  source 1..17: mol_type = other DNA
gctgggtgtggccgtgg

SEQ ID NO: 173447 - DNA, 17 bp, synthetic construct
  source 1..17: mol_type = other DNA
tgctgggtgtggccgtg

SEQ ID NO: 173448 - DNA, 17 bp, synthetic construct
  source 1..17: mol_type = other DNA
ttgctgggtgtggccgt

SEQ ID NO: 173449 - DNA, 17 bp, synthetic construct
  source 1..17: mol_type = other DNA
cttgctgggtgtggccg

SEQ ID NO: 173450 - DNA, 17 bp, synthetic construct
  source 1..17: mol_type = other DNA
tcttgctgggtgtggcc

SEQ ID NO: 173451 - DNA, 17 bp, synthetic construct
  source 1..17: mol_type = other DNA
gtcttgctgggtgtggc

SEQ ID NO: 173452 - DNA, 17 bp, synthetic construct
  source 1..17: mol_type = other DNA
ggtcttgctgggtgtgg

SEQ ID NO: 173453 - DNA, 17 bp, synthetic construct
  source 1..17: mol_type = other DNA
gggtcttgctgggtgtg

SEQ ID NO: 173454 - DNA, 17 bp, synthetic construct
  source 1..17: mol_type = other DNA
cgggtcttgctgggtgt

SEQ ID NO: 173455 - DNA, 17 bp, synthetic construct
  source 1..17: mol_type = other DNA
gcgggtcttgctgggtg

SEQ ID NO: 173456 - DNA, 17 bp, synthetic construct
  source 1..17: mol_type = other DNA
tgcgggtcttgctgggt

SEQ ID NO: 173457 - DNA, 17 bp, synthetic construct
  source 1..17: mol_type = other DNA
gtgcgggtcttgctggg

SEQ ID NO: 173458 - DNA, 17 bp, synthetic construct
  source 1..17: mol_type = other DNA
ggtgcgggtcttgctgg

SEQ ID NO: 173459 - DNA, 17 bp, synthetic construct
  source 1..17: mol_type = other DNA
aggtgcgggtcttgctg

SEQ ID NO: 173460 - DNA, 17 bp, synthetic construct
  source 1..17: mol_type = other DNA
gaggtgcgggtcttgct

SEQ ID NO: 173461 - DNA, 17 bp, synthetic construct
  source 1..17: mol_type = other DNA
cgaggtgcgggtcttgc

SEQ ID NO: 173462 - DNA, 17 bp, synthetic construct
  source 1..17: mol_type = other DNA
tcgaggtgcgggtcttg

SEQ ID NO: 173463 - DNA, 17 bp, synthetic construct
  source 1..17: mol_type = other DNA
gtcgaggtgcgggtctt

SEQ ID NO: 173464 - DNA, 17 bp, synthetic construct
  source 1..17: mol_type = other DNA
ggtcgaggtgcgggtct

SEQ ID NO: 173465 - DNA, 17 bp, synthetic construct
  source 1..17: mol_type = other DNA
gggtcgaggtgcgggtc

SEQ ID NO: 173466 - DNA, 17 bp, synthetic construct
  source 1..17: mol_type = other DNA
agggtcgaggtgcgggt

SEQ ID NO: 173467 - DNA, 17 bp, synthetic construct
  source 1..17: mol_type = other DNA
cagggtcgaggtgcggg

SEQ ID NO: 173468 - DNA, 17 bp, synthetic construct
  source 1..17: mol_type = other DNA
gcagggtcgaggtgcgg

SEQ ID NO: 173469 - DNA, 17 bp, synthetic construct
  source 1..17: mol_type = other DNA
agcagggtcgaggtgcg

SEQ ID NO: 173470 - DNA, 17 bp, synthetic construct
  source 1..17: mol_type = other DNA
cagcagggtcgaggtgc

SEQ ID NO: 173471 - DNA, 17 bp, synthetic construct
  source 1..17: mol_type = other DNA
gcagcagggtcgaggtg

SEQ ID NO: 173472 - DNA, 17 bp, synthetic construct
  source 1..17: mol_type = other DNA
ggcagcagggtcgaggt

SEQ ID NO: 173473 - DNA, 17 bp, synthetic construct
  source 1..17: mol_type = other DNA
gggcagcagggtcgagg

SEQ ID NO: 173474 - DNA, 17 bp, synthetic construct
  source 1..17: mol_type = other DNA
tgggcagcagggtcgag

SEQ ID NO: 173475 - DNA, 17 bp, synthetic construct
  source 1..17: mol_type = other DNA
ctgggcagcagggtcga

SEQ ID NO: 173476 - DNA, 17 bp, synthetic construct
  source 1..17: mol_type = other DNA
gctgggcagcagggtcg

SEQ ID NO: 173477 - DNA, 17 bp, synthetic construct
  source 1..17: mol_type = other DNA
tgctgggcagcagggtc

SEQ ID NO: 173478 - DNA, 17 bp, synthetic construct
  source 1..17: mol_type = other DNA
ctgctgggcagcagggt

SEQ ID NO: 173479 - DNA, 17 bp, synthetic construct
  source 1..17: mol_type = other DNA
gctgctgggcagcaggg

SEQ ID NO: 173480 - DNA, 17 bp, synthetic construct
  source 1..17: mol_type = other DNA
ggctgctgggcagcagg

SEQ ID NO: 173481 - DNA, 17 bp, synthetic construct
  source 1..17: mol_type = other DNA
gggctgctgggcagcag

SEQ ID NO: 173482 - DNA, 17 bp, synthetic construct
  source 1..17: mol_type = other DNA
ggggctgctgggcagca

SEQ ID NO: 173483 - DNA, 17 bp, synthetic construct
  source 1..17: mol_type = other DNA
tggggctgctgggcagc

SEQ ID NO: 173484 - DNA, 17 bp, synthetic construct
  source 1..17: mol_type = other DNA
gtggggctgctgggcag

SEQ ID NO: 173485 - DNA, 17 bp, synthetic construct
  source 1..17: mol_type = other DNA
tgtggggctgctgggca

SEQ ID NO: 173486 - DNA, 17 bp, synthetic construct
  source 1..17: mol_type = other DNA
atgtggggctgctgggc

SEQ ID NO: 173487 - DNA, 17 bp, synthetic construct
  source 1..17: mol_type = other DNA
gatgtggggctgctggg

SEQ ID NO: 173488 - DNA, 17 bp, synthetic construct
  source 1..17: mol_type = other DNA
cgatgtggggctgctgg

SEQ ID NO: 173489 - DNA, 17 bp, synthetic construct
  source 1..17: mol_type = other DNA
ccgatgtggggctgctg

SEQ ID NO: 173490 - DNA, 17 bp, synthetic construct
  source 1..17: mol_type = other DNA
gccgatgtggggctgct

SEQ ID NO: 173491 - DNA, 17 bp, synthetic construct
  source 1..17: mol_type = other DNA
ggccgatgtggggctgc

SEQ ID NO: 173492 - DNA, 17 bp, synthetic construct
  source 1..17: mol_type = other DNA
gggccgatgtggggctg

SEQ ID NO: 173493 - DNA, 17 bp, synthetic construct
  source 1..17: mol_type = other DNA
ggggccgatgtggggct

SEQ ID NO: 173494 - DNA, 17 bp, synthetic construct
  source 1..17: mol_type = other DNA
gggggccgatgtggggc

SEQ ID NO: 173495 - DNA, 17 bp, synthetic construct
  source 1..17: mol_type = other DNA
tgggggccgatgtgggg

SEQ ID NO: 173496 - DNA, 17 bp, synthetic construct
  source 1..17: mol_type = other DNA
atgggggccgatgtggg

SEQ ID NO: 173497 - DNA, 17 bp, synthetic construct
  source 1..17: mol_type = other DNA
tatgggggccgatgtgg

SEQ ID NO: 173498 - DNA, 17 bp, synthetic construct
  source 1..17: mol_type = other DNA
ttatgggggccgatgtg

SEQ ID NO: 173499 - DNA, 17 bp, synthetic construct
  source 1..17: mol_type = other DNA
gttatgggggccgatgt

SEQ ID NO: 173500 - DNA, 17 bp, synthetic construct
  source 1..17: mol_type = other DNA
ggttatgggggccgatg

SEQ ID NO: 173501 - DNA, 17 bp, synthetic construct
  source 1..17: mol_type = other DNA
tggttatgggggccgat

SEQ ID NO: 173502 - DNA, 17 bp, synthetic construct
  source 1..17: mol_type = other DNA
gtggttatgggggccga

SEQ ID NO: 173503 - DNA, 17 bp, synthetic construct
  source 1..17: mol_type = other DNA
cgtggttatgggggccg

SEQ ID NO: 173504 - DNA, 17 bp, synthetic construct
  source 1..17: mol_type = other DNA
ccgtggttatgggggcc

SEQ ID NO: 173505 - DNA, 17 bp, synthetic construct
  source 1..17: mol_type = other DNA
accgtggttatgggggc

SEQ ID NO: 173506 - DNA, 17 bp, synthetic construct
  source 1..17: mol_type = other DNA
caccgtggttatggggg

SEQ ID NO: 173507 - DNA, 17 bp, synthetic construct
  source 1..17: mol_type = other DNA
ccaccgtggttatgggg

SEQ ID NO: 173508 - DNA, 17 bp, synthetic construct
  source 1..17: mol_type = other DNA
accaccgtggttatggg

SEQ ID NO: 173509 - DNA, 17 bp, synthetic construct
  source 1..17: mol_type = other DNA
caccaccgtggttatgg

SEQ ID NO: 173510 - DNA, 17 bp, synthetic construct
  source 1..17: mol_type = other DNA
tcaccaccgtggttatg

SEQ ID NO: 173511 - DNA, 17 bp, synthetic construct
  source 1..17: mol_type = other DNA
gtcaccaccgtggttat

SEQ ID NO: 173512 - DNA, 17 bp, synthetic construct
  source 1..17: mol_type = other DNA
ggtcaccaccgtggtta

SEQ ID NO: 173513 - DNA, 17 bp, synthetic construct
  source 1..17: mol_type = other DNA
tggtcaccaccgtggtt

SEQ ID NO: 173514 - DNA, 17 bp, synthetic construct
  source 1..17: mol_type = other DNA
gtggtcaccaccgtggt

SEQ ID NO: 173515 - DNA, 17 bp, synthetic construct
  source 1..17: mol_type = other DNA
cgtggtcaccaccgtgg

SEQ ID NO: 173516 - DNA, 17 bp, synthetic construct
  source 1..17: mol_type = other DNA
ccgtggtcaccaccgtg

SEQ ID NO: 173517 - DNA, 17 bp, synthetic construct
  source 1..17: mol_type = other DNA
cccgtggtcaccaccgt

SEQ ID NO: 173518 - DNA, 17 bp, synthetic construct
  source 1..17: mol_type = other DNA
gcccgtggtcaccaccg

SEQ ID NO: 173519 - DNA, 17 bp, synthetic construct
  source 1..17: mol_type = other DNA
agcccgtggtcaccacc

SEQ ID NO: 173520 - DNA, 17 bp, synthetic construct
  source 1..17: mol_type = other DNA
cagcccgtggtcaccac

SEQ ID NO: 173521 - DNA, 17 bp, synthetic construct
  source 1..17: mol_type = other DNA
acagcccgtggtcacca

SEQ ID NO: 173522 - DNA, 17 bp, synthetic construct
  source 1..17: mol_type = other DNA
cacagcccgtggtcacc

SEQ ID NO: 173523 - DNA, 17 bp, synthetic construct
  source 1..17: mol_type = other DNA
tcacagcccgtggtcac

SEQ ID NO: 173524 - DNA, 17 bp, synthetic construct
  source 1..17: mol_type = other DNA
ctcacagcccgtggtca

SEQ ID NO: 173525 - DNA, 17 bp, synthetic construct
  source 1..17: mol_type = other DNA
gctcacagcccgtggtc

SEQ ID NO: 173526 - DNA, 17 bp, synthetic construct
  source 1..17: mol_type = other DNA
ggctcacagcccgtggt

SEQ ID NO: 173527 - DNA, 17 bp, synthetic construct
  source 1..17: mol_type = other DNA
gggctcacagcccgtgg

SEQ ID NO: 173528 - DNA, 17 bp, synthetic construct
  source 1..17: mol_type = other DNA
ggggctcacagcccgtg

SEQ ID NO: 173529 - DNA, 17 bp, synthetic construct
  source 1..17: mol_type = other DNA
tggggctcacagcccgt

SEQ ID NO: 173530 - DNA, 17 bp, synthetic construct
  source 1..17: mol_type = other DNA
ctggggctcacagcccg

SEQ ID NO: 173531 - DNA, 17 bp, synthetic construct
  source 1..17: mol_type = other DNA
actggggctcacagccc

SEQ ID NO: 173532 - DNA, 17 bp, synthetic construct
  source 1..17: mol_type = other DNA
cactggggctcacagcc

SEQ ID NO: 173533 - DNA, 17 bp, synthetic construct
  source 1..17: mol_type = other DNA
acactggggctcacagc

SEQ ID NO: 173534 - DNA, 17 bp, synthetic construct
  source 1..17: mol_type = other DNA
cacactggggctcacag

SEQ ID NO: 173535 - DNA, 17 bp, synthetic construct
  source 1..17: mol_type = other DNA
gcacactggggctcaca

SEQ ID NO: 173536 - DNA, 17 bp, synthetic construct
  source 1..17: mol_type = other DNA
ggcacactggggctcac

SEQ ID NO: 173537 - DNA, 17 bp, synthetic construct
  source 1..17: mol_type = other DNA
aggcacactggggctca

SEQ ID NO: 173538 - DNA, 17 bp, synthetic construct
  source 1..17: mol_type = other DNA
caggcacactggggctc

SEQ ID NO: 173539 - DNA, 17 bp, synthetic construct
  source 1..17: mol_type = other DNA
ccaggcacactggggct

SEQ ID NO: 173540 - DNA, 17 bp, synthetic construct
  source 1..17: mol_type = other DNA
accaggcacactggggc

SEQ ID NO: 173541 - DNA, 17 bp, synthetic construct
  source 1..17: mol_type = other DNA
gaccaggcacactgggg

SEQ ID NO: 173542 - DNA, 17 bp, synthetic construct
  source 1..17: mol_type = other DNA
tgaccaggcacactggg

SEQ ID NO: 173543 - DNA, 17 bp, synthetic construct
  source 1..17: mol_type = other DNA
ctgaccaggcacactgg

SEQ ID NO: 173544 - DNA, 17 bp, synthetic construct
  source 1..17: mol_type = other DNA
tctgaccaggcacactg

SEQ ID NO: 173545 - DNA, 17 bp, synthetic construct
  source 1..17: mol_type = other DNA
ctctgaccaggcacact

SEQ ID NO: 173546 - DNA, 17 bp, synthetic construct
  source 1..17: mol_type = other DNA
actctgaccaggcacac

SEQ ID NO: 173547 - DNA, 17 bp, synthetic construct
  source 1..17: mol_type = other DNA
cactctgaccaggcaca

SEQ ID NO: 173548 - DNA, 17 bp, synthetic construct
  source 1..17: mol_type = other DNA
ccactctgaccaggcac

SEQ ID NO: 173549 - DNA, 17 bp, synthetic construct
  source 1..17: mol_type = other DNA
gccactctgaccaggca

SEQ ID NO: 173550 - DNA, 17 bp, synthetic construct
  source 1..17: mol_type = other DNA
agccactctgaccaggc

SEQ ID NO: 173551 - DNA, 17 bp, synthetic construct
  source 1..17: mol_type = other DNA
cagccactctgaccagg

SEQ ID NO: 173552 - DNA, 17 bp, synthetic construct
  source 1..17: mol_type = other DNA
ccagccactctgaccag

SEQ ID NO: 173553 - DNA, 17 bp, synthetic construct
  source 1..17: mol_type = other DNA
tccagccactctgacca

SEQ ID NO: 173554 - DNA, 17 bp, synthetic construct
  source 1..17: mol_type = other DNA
gtccagccactctgacc

SEQ ID NO: 173555 - DNA, 17 bp, synthetic construct
  source 1..17: mol_type = other DNA
agtccagccactctgac

SEQ ID NO: 173556 - DNA, 17 bp, synthetic construct
  source 1..17: mol_type = other DNA
tagtccagccactctga

SEQ ID NO: 173557 - DNA, 17 bp, synthetic construct
  source 1..17: mol_type = other DNA
gtagtccagccactctg

SEQ ID NO: 173558 - DNA, 17 bp, synthetic construct
  source 1..17: mol_type = other DNA
tgtagtccagccactct

SEQ ID NO: 173559 - DNA, 17 bp, synthetic construct
  source 1..17: mol_type = other DNA
ctgtagtccagccactc

SEQ ID NO: 173560 - DNA, 17 bp, synthetic construct
  source 1..17: mol_type = other DNA
gctgtagtccagccact

SEQ ID NO: 173561 - DNA, 17 bp, synthetic construct
  source 1..17: mol_type = other DNA
agctgtagtccagccac

SEQ ID NO: 173562 - DNA, 17 bp, synthetic construct
  source 1..17: mol_type = other DNA
tagctgtagtccagcca

SEQ ID NO: 173563 - DNA, 17 bp, synthetic construct
  source 1..17: mol_type = other DNA
gtagctgtagtccagcc

SEQ ID NO: 173564 - DNA, 17 bp, synthetic construct
  source 1..17: mol_type = other DNA
ggtagctgtagtccagc

SEQ ID NO: 173565 - DNA, 17 bp, synthetic construct
  source 1..17: mol_type = other DNA
gggtagctgtagtccag

SEQ ID NO: 173566 - DNA, 17 bp, synthetic construct
  source 1..17: mol_type = other DNA
ggggtagctgtagtcca

SEQ ID NO: 173567 - DNA, 17 bp, synthetic construct
  source 1..17: mol_type = other DNA
tggggtagctgtagtcc

SEQ ID NO: 173568 - DNA, 17 bp, synthetic construct
  source 1..17: mol_type = other DNA
atggggtagctgtagtc

SEQ ID NO: 173569 - DNA, 17 bp, synthetic construct
  source 1..17: mol_type = other DNA
catggggtagctgtagt

SEQ ID NO: 173570 - DNA, 17 bp, synthetic construct
  source 1..17: mol_type = other DNA
gcatggggtagctgtag

SEQ ID NO: 173571 - DNA, 17 bp, synthetic construct
  source 1..17: mol_type = other DNA
ggcatggggtagctgta

SEQ ID NO: 173572 - DNA, 17 bp, synthetic construct
  source 1..17: mol_type = other DNA
cggcatggggtagctgt

SEQ ID NO: 173573 - DNA, 17 bp, synthetic construct
  source 1..17: mol_type = other DNA
ccggcatggggtagctg

SEQ ID NO: 173574 - DNA, 17 bp, synthetic construct
  source 1..17: mol_type = other DNA
cccggcatggggtagct

SEQ ID NO: 173575 - DNA, 17 bp, synthetic construct
  source 1..17: mol_type = other DNA
ccccggcatggggtagc

SEQ ID NO: 173576 - DNA, 17 bp, synthetic construct
  source 1..17: mol_type = other DNA
gccccggcatggggtag

SEQ ID NO: 173577 - DNA, 17 bp, synthetic construct
  source 1..17: mol_type = other DNA
ggccccggcatggggta

SEQ ID NO: 173578 - DNA, 17 bp, synthetic construct
  source 1..17: mol_type = other DNA
gggccccggcatggggt

SEQ ID NO: 173579 - DNA, 17 bp, synthetic construct
  source 1..17: mol_type = other DNA
agggccccggcatgggg

SEQ ID NO: 173580 - DNA, 17 bp, synthetic construct
  source 1..17: mol_type = other DNA
gagggccccggcatggg

SEQ ID NO: 173581 - DNA, 17 bp, synthetic construct
  source 1..17: mol_type = other DNA
agagggccccggcatgg

SEQ ID NO: 173582 - DNA, 17 bp, synthetic construct
  source 1..17: mol_type = other DNA
cagagggccccggcatg

SEQ ID NO: 173583 - DNA, 17 bp, synthetic construct
  source 1..17: mol_type = other DNA
ccagagggccccggcat

SEQ ID NO: 173584 - DNA, 17 bp, synthetic construct
  source 1..17: mol_type = other DNA
gccagagggccccggca

SEQ ID NO: 173585 - DNA, 17 bp, synthetic construct
  source 1..17: mol_type = other DNA
cgccagagggccccggc

SEQ ID NO: 173586 - DNA, 17 bp, synthetic construct
  source 1..17: mol_type = other DNA
ccgccagagggccccgg

SEQ ID NO: 173587 - DNA, 17 bp, synthetic construct
  source 1..17: mol_type = other DNA
cccgccagagggccccg

SEQ ID NO: 173588 - DNA, 17 bp, synthetic construct
  source 1..17: mol_type = other DNA
ccccgccagagggcccc

SEQ ID NO: 173589 - DNA, 17 bp, synthetic construct
  source 1..17: mol_type = other DNA
tccccgccagagggccc

SEQ ID NO: 173590 - DNA, 17 bp, synthetic construct
  source 1..17: mol_type = other DNA
gtccccgccagagggcc

SEQ ID NO: 173591 - DNA, 17 bp, synthetic construct
  source 1..17: mol_type = other DNA
agtccccgccagagggc

SEQ ID NO: 173592 - DNA, 17 bp, synthetic construct
  source 1..17: mol_type = other DNA
aagtccccgccagaggg

SEQ ID NO: 173593 - DNA, 17 bp, synthetic construct
  source 1..17: mol_type = other DNA
aaagtccccgccagagg

SEQ ID NO: 173594 - DNA, 17 bp, synthetic construct
  source 1..17: mol_type = other DNA
caaagtccccgccagag

SEQ ID NO: 173595 - DNA, 17 bp, synthetic construct
  source 1..17: mol_type = other DNA
tcaaagtccccgccaga

SEQ ID NO: 173596 - DNA, 17 bp, synthetic construct
  source 1..17: mol_type = other DNA
gtcaaagtccccgccag

SEQ ID NO: 173597 - DNA, 17 bp, synthetic construct
  source 1..17: mol_type = other DNA
tgtcaaagtccccgcca

SEQ ID NO: 173598 - DNA, 17 bp, synthetic construct
  source 1..17: mol_type = other DNA
gtgtcaaagtccccgcc

SEQ ID NO: 173599 - DNA, 17 bp, synthetic construct
  source 1..17: mol_type = other DNA
ggtgtcaaagtccccgc

SEQ ID NO: 173600 - DNA, 17 bp, synthetic construct
  source 1..17: mol_type = other DNA
aggtgtcaaagtccccg

SEQ ID NO: 173601 - DNA, 17 bp, synthetic construct
  source 1..17: mol_type = other DNA
taggtgtcaaagtcccc

SEQ ID NO: 173602 - DNA, 17 bp, synthetic construct
  source 1..17: mol_type = other DNA
gtaggtgtcaaagtccc

SEQ ID NO: 173603 - DNA, 17 bp, synthetic construct
  source 1..17: mol_type = other DNA
agtaggtgtcaaagtcc

SEQ ID NO: 173604 - DNA, 17 bp, synthetic construct
  source 1..17: mol_type = other DNA
gagtaggtgtcaaagtc

SEQ ID NO: 173605 - DNA, 17 bp, synthetic construct
  source 1..17: mol_type = other DNA
ggagtaggtgtcaaagt

SEQ ID NO: 173606 - DNA, 17 bp, synthetic construct
  source 1..17: mol_type = other DNA
tggagtaggtgtcaaag

SEQ ID NO: 173607 - DNA, 17 bp, synthetic construct
  source 1..17: mol_type = other DNA
ttggagtaggtgtcaaa

SEQ ID NO: 173608 - DNA, 17 bp, synthetic construct
  source 1..17: mol_type = other DNA
gttggagtaggtgtcaa

SEQ ID NO: 173609 - DNA, 17 bp, synthetic construct
  source 1..17: mol_type = other DNA
tgttggagtaggtgtca

SEQ ID NO: 173610 - DNA, 17 bp, synthetic construct
  source 1..17: mol_type = other DNA
atgttggagtaggtgtc

SEQ ID NO: 173611 - DNA, 17 bp, synthetic construct
  source 1..17: mol_type = other DNA
gatgttggagtaggtgt

SEQ ID NO: 173612 - DNA, 17 bp, synthetic construct
  source 1..17: mol_type = other DNA
ggatgttggagtaggtg

SEQ ID NO: 173613 - DNA, 17 bp, synthetic construct
  source 1..17: mol_type = other DNA
cggatgttggagtaggt

SEQ ID NO: 173614 - DNA, 17 bp, synthetic construct
  source 1..17: mol_type = other DNA
acggatgttggagtagg

SEQ ID NO: 173615 - DNA, 17 bp, synthetic construct
  source 1..17: mol_type = other DNA
cacggatgttggagtag

SEQ ID NO: 173616 - DNA, 17 bp, synthetic construct
  source 1..17: mol_type = other DNA
gcacggatgttggagta

SEQ ID NO: 173617 - DNA, 17 bp, synthetic construct
  source 1..17: mol_type = other DNA
cgcacggatgttggagt

SEQ ID NO: 173618 - DNA, 17 bp, synthetic construct
  source 1..17: mol_type = other DNA
ccgcacggatgttggag

SEQ ID NO: 173619 - DNA, 17 bp, synthetic construct
  source 1..17: mol_type = other DNA
gccgcacggatgttgga

SEQ ID NO: 173620 - DNA, 17 bp, synthetic construct
  source 1..17: mol_type = other DNA
ggccgcacggatgttgg

SEQ ID NO: 173621 - DNA, 17 bp, synthetic construct
  source 1..17: mol_type = other DNA
cggccgcacggatgttg

SEQ ID NO: 173622 - DNA, 17 bp, synthetic construct
  source 1..17: mol_type = other DNA
ccggccgcacggatgtt

SEQ ID NO: 173623 - DNA, 17 bp, synthetic construct
  source 1..17: mol_type = other DNA
tccggccgcacggatgt

SEQ ID NO: 173624 - DNA, 17 bp, synthetic construct
  source 1..17: mol_type = other DNA
ctccggccgcacggatg

SEQ ID NO: 173625 - DNA, 17 bp, synthetic construct
  source 1..17: mol_type = other DNA
cctccggccgcacggat

SEQ ID NO: 173626 - DNA, 17 bp, synthetic construct
  source 1..17: mol_type = other DNA
ccctccggccgcacgga

SEQ ID NO: 173627 - DNA, 17 bp, synthetic construct
  source 1..17: mol_type = other DNA
cccctccggccgcacgg

SEQ ID NO: 173628 - DNA, 17 bp, synthetic construct
  source 1..17: mol_type = other DNA
gcccctccggccgcacg

SEQ ID NO: 173629 - DNA, 17 bp, synthetic construct
  source 1..17: mol_type = other DNA
ggcccctccggccgcac

SEQ ID NO: 173630 - DNA, 17 bp, synthetic construct
  source 1..17: mol_type = other DNA
cggcccctccggccgca

SEQ ID NO: 173631 - DNA, 17 bp, synthetic construct
  source 1..17: mol_type = other DNA
acggcccctccggccgc

SEQ ID NO: 173632 - DNA, 17 bp, synthetic construct
  source 1..17: mol_type = other DNA
gacggcccctccggccg

SEQ ID NO: 173633 - DNA, 17 bp, synthetic construct
  source 1..17: mol_type = other DNA
agacggcccctccggcc

SEQ ID NO: 173634 - DNA, 17 bp, synthetic construct
  source 1..17: mol_type = other DNA
cagacggcccctccggc

SEQ ID NO: 173635 - DNA, 17 bp, synthetic construct
  source 1..17: mol_type = other DNA
acagacggcccctccgg

SEQ ID NO: 173636 - DNA, 17 bp, synthetic construct
  source 1..17: mol_type = other DNA
cacagacggcccctccg

SEQ ID NO: 173637 - DNA, 17 bp, synthetic construct
  source 1..17: mol_type = other DNA
tcacagacggcccctcc

SEQ ID NO: 173638 - DNA, 17 bp, synthetic construct
  source 1..17: mol_type = other DNA
ctcacagacggcccctc

SEQ ID NO: 173639 - DNA, 17 bp, synthetic construct
  source 1..17: mol_type = other DNA
gctcacagacggcccct

SEQ ID NO: 173640 - DNA, 17 bp, synthetic construct
  source 1..17: mol_type = other DNA
tgctcacagacggcccc

SEQ ID NO: 173641 - DNA, 17 bp, synthetic construct
  source 1..17: mol_type = other DNA
ctgctcacagacggccc

SEQ ID NO: 173642 - DNA, 17 bp, synthetic construct
  source 1..17: mol_type = other DNA
gctgctcacagacggcc

SEQ ID NO: 173643 - DNA, 17 bp, synthetic construct
  source 1..17: mol_type = other DNA
ggctgctcacagacggc

SEQ ID NO: 173644 - DNA, 17 bp, synthetic construct
  source 1..17: mol_type = other DNA
gggctgctcacagacgg

SEQ ID NO: 173645 - DNA, 17 bp, synthetic construct
  source 1..17: mol_type = other DNA
ggggctgctcacagacg

SEQ ID NO: 173646 - DNA, 17 bp, synthetic construct
  source 1..17: mol_type = other DNA
aggggctgctcacagac

SEQ ID NO: 173647 - DNA, 17 bp, synthetic construct
  source 1..17: mol_type = other DNA
caggggctgctcacaga

SEQ ID NO: 173648 - DNA, 17 bp, synthetic construct
  source 1..17: mol_type = other DNA
ccaggggctgctcacag

SEQ ID NO: 173649 - DNA, 17 bp, synthetic construct
  source 1..17: mol_type = other DNA
cccaggggctgctcaca

SEQ ID NO: 173650 - DNA, 17 bp, synthetic construct
  source 1..17: mol_type = other DNA
gcccaggggctgctcac

SEQ ID NO: 173651 - DNA, 17 bp, synthetic construct
  source 1..17: mol_type = other DNA
ggcccaggggctgctca

SEQ ID NO: 173652 - DNA, 17 bp, synthetic construct
  source 1..17: mol_type = other DNA
aggcccaggggctgctc

SEQ ID NO: 173653 - DNA, 17 bp, synthetic construct
  source 1..17: mol_type = other DNA
gaggcccaggggctgct

SEQ ID NO: 173654 - DNA, 17 bp, synthetic construct
  source 1..17: mol_type = other DNA
cgaggcccaggggctgc

SEQ ID NO: 173655 - DNA, 17 bp, synthetic construct
  source 1..17: mol_type = other DNA
tcgaggcccaggggctg

SEQ ID NO: 173656 - DNA, 17 bp, synthetic construct
  source 1..17: mol_type = other DNA
ctcgaggcccaggggct

SEQ ID NO: 173657 - DNA, 17 bp, synthetic construct
  source 1..17: mol_type = other DNA
actcgaggcccaggggc

SEQ ID NO: 173658 - DNA, 17 bp, synthetic construct
  source 1..17: mol_type = other DNA
cactcgaggcccagggg

SEQ ID NO: 173659 - DNA, 17 bp, synthetic construct
  source 1..17: mol_type = other DNA
gcactcgaggcccaggg

SEQ ID NO: 173660 - DNA, 17 bp, synthetic construct
  source 1..17: mol_type = other DNA
ggcactcgaggcccagg

SEQ ID NO: 173661 - DNA, 17 bp, synthetic construct
  source 1..17: mol_type = other DNA
cggcactcgaggcccag

SEQ ID NO: 173662 - DNA, 17 bp, synthetic construct
  source 1..17: mol_type = other DNA
acggcactcgaggccca

SEQ ID NO: 173663 - DNA, 17 bp, synthetic construct
  source 1..17: mol_type = other DNA
cacggcactcgaggccc

SEQ ID NO: 173664 - DNA, 17 bp, synthetic construct
  source 1..17: mol_type = other DNA
gcacggcactcgaggcc

SEQ ID NO: 173665 - DNA, 17 bp, synthetic construct
  source 1..17: mol_type = other DNA
ggcacggcactcgaggc

SEQ ID NO: 173666 - DNA, 17 bp, synthetic construct
  source 1..17: mol_type = other DNA
gggcacggcactcgagg

SEQ ID NO: 173667 - DNA, 17 bp, synthetic construct
  source 1..17: mol_type = other DNA
tgggcacggcactcgag

SEQ ID NO: 173668 - DNA, 17 bp, synthetic construct
  source 1..17: mol_type = other DNA
ctgggcacggcactcga

SEQ ID NO: 173669 - DNA, 17 bp, synthetic construct
  source 1..17: mol_type = other DNA
cctgggcacggcactcg

SEQ ID NO: 173670 - DNA, 17 bp, synthetic construct
  source 1..17: mol_type = other DNA
gcctgggcacggcactc

SEQ ID NO: 173671 - DNA, 17 bp, synthetic construct
  source 1..17: mol_type = other DNA
ggcctgggcacggcact

SEQ ID NO: 173672 - DNA, 17 bp, synthetic construct
  source 1..17: mol_type = other DNA
gggcctgggcacggcac

SEQ ID NO: 173673 - DNA, 17 bp, synthetic construct
  source 1..17: mol_type = other DNA
tgggcctgggcacggca

SEQ ID NO: 173674 - DNA, 17 bp, synthetic construct
  source 1..17: mol_type = other DNA
ctgggcctgggcacggc

SEQ ID NO: 173675 - DNA, 17 bp, synthetic construct
  source 1..17: mol_type = other DNA
gctgggcctgggcacgg

SEQ ID NO: 173676 - DNA, 17 bp, synthetic construct
  source 1..17: mol_type = other DNA
ggctgggcctgggcacg

SEQ ID NO: 173677 - DNA, 17 bp, synthetic construct
  source 1..17: mol_type = other DNA
aggctgggcctgggcac

SEQ ID NO: 173678 - DNA, 17 bp, synthetic construct
  source 1..17: mol_type = other DNA
caggctgggcctgggca

SEQ ID NO: 173679 - DNA, 17 bp, synthetic construct
  source 1..17: mol_type = other DNA
ccaggctgggcctgggc

SEQ ID NO: 173680 - DNA, 17 bp, synthetic construct
  source 1..17: mol_type = other DNA
accaggctgggcctggg

SEQ ID NO: 173681 - DNA, 17 bp, synthetic construct
  source 1..17: mol_type = other DNA
caccaggctgggcctgg

SEQ ID NO: 173682 - DNA, 17 bp, synthetic construct
  source 1..17: mol_type = other DNA
acaccaggctgggcctg

SEQ ID NO: 173683 - DNA, 17 bp, synthetic construct
  source 1..17: mol_type = other DNA
gacaccaggctgggcct

SEQ ID NO: 173684 - DNA, 17 bp, synthetic construct
  source 1..17: mol_type = other DNA
ggacaccaggctgggcc

SEQ ID NO: 173685 - DNA, 17 bp, synthetic construct
  source 1..17: mol_type = other DNA
gggacaccaggctgggc

SEQ ID NO: 173686 - DNA, 17 bp, synthetic construct
  source 1..17: mol_type = other DNA
ggggacaccaggctggg

SEQ ID NO: 173687 - DNA, 17 bp, synthetic construct
  source 1..17: mol_type = other DNA
gggggacaccaggctgg

SEQ ID NO: 173688 - DNA, 17 bp, synthetic construct
  source 1..17: mol_type = other DNA
agggggacaccaggctg

SEQ ID NO: 173689 - DNA, 17 bp, synthetic construct
  source 1..17: mol_type = other DNA
cagggggacaccaggct

SEQ ID NO: 173690 - DNA, 17 bp, synthetic construct
  source 1..17: mol_type = other DNA
ccagggggacaccaggc

SEQ ID NO: 173691 - DNA, 17 bp, synthetic construct
  source 1..17: mol_type = other DNA
cccagggggacaccagg

SEQ ID NO: 173692 - DNA, 17 bp, synthetic construct
  source 1..17: mol_type = other DNA
ccccagggggacaccag

SEQ ID NO: 173693 - DNA, 17 bp, synthetic construct
  source 1..17: mol_type = other DNA
cccccagggggacacca

SEQ ID NO: 173694 - DNA, 17 bp, synthetic construct
  source 1..17: mol_type = other DNA
tcccccagggggacacc

SEQ ID NO: 173695 - DNA, 17 bp, synthetic construct
  source 1..17: mol_type = other DNA
ctcccccagggggacac

SEQ ID NO: 173696 - DNA, 17 bp, synthetic construct
  source 1..17: mol_type = other DNA
actcccccagggggaca

SEQ ID NO: 173697 - DNA, 17 bp, synthetic construct
  source 1..17: mol_type = other DNA
aactcccccagggggac

SEQ ID NO: 173698 - DNA, 17 bp, synthetic construct
  source 1..17: mol_type = other DNA
caactcccccaggggga

SEQ ID NO: 173699 - DNA, 17 bp, synthetic construct
  source 1..17: mol_type = other DNA
ccaactcccccaggggg

SEQ ID NO: 173700 - DNA, 17 bp, synthetic construct
  source 1..17: mol_type = other DNA
cccaactcccccagggg

SEQ ID NO: 173701 - DNA, 17 bp, synthetic construct
  source 1..17: mol_type = other DNA
gcccaactcccccaggg

SEQ ID NO: 173702 - DNA, 17 bp, synthetic construct
  source 1..17: mol_type = other DNA
ggcccaactcccccagg

SEQ ID NO: 173703 - DNA, 17 bp, synthetic construct
  source 1..17: mol_type = other DNA
tggcccaactcccccag

SEQ ID NO: 173704 - DNA, 17 bp, synthetic construct
  source 1..17: mol_type = other DNA
ctggcccaactccccca

SEQ ID NO: 173705 - DNA, 17 bp, synthetic construct
  source 1..17: mol_type = other DNA
cctggcccaactccccc

SEQ ID NO: 173706 - DNA, 17 bp, synthetic construct
  source 1..17: mol_type = other DNA
acctggcccaactcccc

SEQ ID NO: 173707 - DNA, 17 bp, synthetic construct
  source 1..17: mol_type = other DNA
gacctggcccaactccc

SEQ ID NO: 173708 - DNA, 17 bp, synthetic construct
  source 1..17: mol_type = other DNA
cgacctggcccaactcc

SEQ ID NO: 173709 - DNA, 17 bp, synthetic construct
  source 1..17: mol_type = other DNA
acgacctggcccaactc

SEQ ID NO: 173710 - DNA, 17 bp, synthetic construct
  source 1..17: mol_type = other DNA
cacgacctggcccaact

SEQ ID NO: 173711 - DNA, 17 bp, synthetic construct
  source 1..17: mol_type = other DNA
ccacgacctggcccaac

SEQ ID NO: 173712 - DNA, 17 bp, synthetic construct
  source 1..17: mol_type = other DNA
tccacgacctggcccaa

SEQ ID NO: 173713 - DNA, 17 bp, synthetic construct
  source 1..17: mol_type = other DNA
ttccacgacctggccca

SEQ ID NO: 173714 - DNA, 17 bp, synthetic construct
  source 1..17: mol_type = other DNA
attccacgacctggccc

SEQ ID NO: 173715 - DNA, 17 bp, synthetic construct
  source 1..17: mol_type = other DNA
cattccacgacctggcc

SEQ ID NO: 173716 - DNA, 17 bp, synthetic construct
  source 1..17: mol_type = other DNA
gcattccacgacctggc

SEQ ID NO: 173717 - DNA, 17 bp, synthetic construct
  source 1..17: mol_type = other DNA
tgcattccacgacctgg

SEQ ID NO: 173718 - DNA, 17 bp, synthetic construct
  source 1..17: mol_type = other DNA
ctgcattccacgacctg

SEQ ID NO: 173719 - DNA, 17 bp, synthetic construct
  source 1..17: mol_type = other DNA
gctgcattccacgacct

SEQ ID NO: 173720 - DNA, 17 bp, synthetic construct
  source 1..17: mol_type = other DNA
ggctgcattccacgacc

SEQ ID NO: 173721 - DNA, 17 bp, synthetic construct
  source 1..17: mol_type = other DNA
aggctgcattccacgac

SEQ ID NO: 173722 - DNA, 17 bp, synthetic construct
  source 1..17: mol_type = other DNA
caggctgcattccacga

SEQ ID NO: 173723 - DNA, 17 bp, synthetic construct
  source 1..17: mol_type = other DNA
ccaggctgcattccacg

SEQ ID NO: 173724 - DNA, 17 bp, synthetic construct
  source 1..17: mol_type = other DNA
tccaggctgcattccac

SEQ ID NO: 173725 - DNA, 17 bp, synthetic construct
  source 1..17: mol_type = other DNA
gtccaggctgcattcca

SEQ ID NO: 173726 - DNA, 17 bp, synthetic construct
  source 1..17: mol_type = other DNA
agtccaggctgcattcc

SEQ ID NO: 173727 - DNA, 17 bp, synthetic construct
  source 1..17: mol_type = other DNA
aagtccaggctgcattc

SEQ ID NO: 173728 - DNA, 17 bp, synthetic construct
  source 1..17: mol_type = other DNA
aaagtccaggctgcatt

SEQ ID NO: 173729 - DNA, 17 bp, synthetic construct
  source 1..17: mol_type = other DNA
caaagtccaggctgcat

SEQ ID NO: 173730 - DNA, 17 bp, synthetic construct
  source 1..17: mol_type = other DNA
ccaaagtccaggctgca

SEQ ID NO: 173731 - DNA, 17 bp, synthetic construct
  source 1..17: mol_type = other DNA
gccaaagtccaggctgc

SEQ ID NO: 173732 - DNA, 17 bp, synthetic construct
  source 1..17: mol_type = other DNA
ggccaaagtccaggctg

SEQ ID NO: 173733 - DNA, 17 bp, synthetic construct
  source 1..17: mol_type = other DNA
aggccaaagtccaggct

SEQ ID NO: 173734 - DNA, 17 bp, synthetic construct
  source 1..17: mol_type = other DNA
caggccaaagtccaggc

SEQ ID NO: 173735 - DNA, 17 bp, synthetic construct
  source 1..17: mol_type = other DNA
ccaggccaaagtccagg

SEQ ID NO: 173736 - DNA, 17 bp, synthetic construct
  source 1..17: mol_type = other DNA
accaggccaaagtccag

SEQ ID NO: 173737 - DNA, 17 bp, synthetic construct
  source 1..17: mol_type = other DNA
gaccaggccaaagtcca

SEQ ID NO: 173738 - DNA, 17 bp, synthetic construct
  source 1..17: mol_type = other DNA
agaccaggccaaagtcc

SEQ ID NO: 173739 - DNA, 17 bp, synthetic construct
  source 1..17: mol_type = other DNA
cagaccaggccaaagtc

SEQ ID NO: 173740 - DNA, 17 bp, synthetic construct
  source 1..17: mol_type = other DNA
gcagaccaggccaaagt

SEQ ID NO: 173741 - DNA, 17 bp, synthetic construct
  source 1..17: mol_type = other DNA
tgcagaccaggccaaag

SEQ ID NO: 173742 - DNA, 17 bp, synthetic construct
  source 1..17: mol_type = other DNA
ctgcagaccaggccaaa

SEQ ID NO: 173743 - DNA, 17 bp, synthetic construct
  source 1..17: mol_type = other DNA
cctgcagaccaggccaa

SEQ ID NO: 173744 - DNA, 17 bp, synthetic construct
  source 1..17: mol_type = other DNA
tcctgcagaccaggcca

SEQ ID NO: 173745 - DNA, 17 bp, synthetic construct
  source 1..17: mol_type = other DNA
ttcctgcagaccaggcc

SEQ ID NO: 173746 - DNA, 17 bp, synthetic construct
  source 1..17: mol_type = other DNA
gttcctgcagaccaggc

SEQ ID NO: 173747 - DNA, 17 bp, synthetic construct
  source 1..17: mol_type = other DNA
ggttcctgcagaccagg

SEQ ID NO: 173748 - DNA, 17 bp, synthetic construct
  source 1..17: mol_type = other DNA
cggttcctgcagaccag

SEQ ID NO: 173749 - DNA, 17 bp, synthetic construct
  source 1..17: mol_type = other DNA
acggttcctgcagacca

SEQ ID NO: 173750 - DNA, 17 bp, synthetic construct
  source 1..17: mol_type = other DNA
cacggttcctgcagacc

SEQ ID NO: 173751 - DNA, 17 bp, synthetic construct
  source 1..17: mol_type = other DNA
tcacggttcctgcagac

SEQ ID NO: 173752 - DNA, 17 bp, synthetic construct
  source 1..17: mol_type = other DNA
ctcacggttcctgcaga

SEQ ID NO: 173753 - DNA, 17 bp, synthetic construct
  source 1..17: mol_type = other DNA
gctcacggttcctgcag

SEQ ID NO: 173754 - DNA, 17 bp, synthetic construct
  source 1..17: mol_type = other DNA
tgctcacggttcctgca

SEQ ID NO: 173755 - DNA, 17 bp, synthetic construct
  source 1..17: mol_type = other DNA
ctgctcacggttcctgc

SEQ ID NO: 173756 - DNA, 17 bp, synthetic construct
  source 1..17: mol_type = other DNA
cctgctcacggttcctg

SEQ ID NO: 173757 - DNA, 17 bp, synthetic construct
  source 1..17: mol_type = other DNA
acctgctcacggttcct

SEQ ID NO: 173758 - DNA, 17 bp, synthetic construct
  source 1..17: mol_type = other DNA
cacctgctcacggttcc

SEQ ID NO: 173759 - DNA, 17 bp, synthetic construct
  source 1..17: mol_type = other DNA
ccacctgctcacggttc

SEQ ID NO: 173760 - DNA, 17 bp, synthetic construct
  source 1..17: mol_type = other DNA
cccacctgctcacggtt

SEQ ID NO: 173761 - DNA, 17 bp, synthetic construct
  source 1..17: mol_type = other DNA
ccccacctgctcacggt

SEQ ID NO: 173762 - DNA, 17 bp, synthetic construct
  source 1..17: mol_type = other DNA
tccccacctgctcacgg

SEQ ID NO: 173763 - DNA, 17 bp, synthetic construct
  source 1..17: mol_type = other DNA
ttccccacctgctcacg

SEQ ID NO: 173764 - DNA, 17 bp, synthetic construct
  source 1..17: mol_type = other DNA
cttccccacctgctcac

SEQ ID NO: 173765 - DNA, 17 bp, synthetic construct
  source 1..17: mol_type = other DNA
acttccccacctgctca

SEQ ID NO: 173766 - DNA, 17 bp, synthetic construct
  source 1..17: mol_type = other DNA
aacttccccacctgctc

SEQ ID NO: 173767 - DNA, 17 bp, synthetic construct
  source 1..17: mol_type = other DNA
gaacttccccacctgct

SEQ ID NO: 173768 - DNA, 17 bp, synthetic construct
  source 1..17: mol_type = other DNA
tgaacttccccacctgc

SEQ ID NO: 173769 - DNA, 17 bp, synthetic construct
  source 1..17: mol_type = other DNA
ttgaacttccccacctg

SEQ ID NO: 173770 - DNA, 17 bp, synthetic construct
  source 1..17: mol_type = other DNA
cttgaacttccccacct

SEQ ID NO: 173771 - DNA, 17 bp, synthetic construct
  source 1..17: mol_type = other DNA
tcttgaacttccccacc

SEQ ID NO: 173772 - DNA, 17 bp, synthetic construct
  source 1..17: mol_type = other DNA
atcttgaacttccccac

SEQ ID NO: 173773 - DNA, 17 bp, synthetic construct
  source 1..17: mol_type = other DNA
catcttgaacttcccca

SEQ ID NO: 173774 - DNA, 17 bp, synthetic construct
  source 1..17: mol_type = other DNA
acatcttgaacttcccc

SEQ ID NO: 173775 - DNA, 17 bp, synthetic construct
  source 1..17: mol_type = other DNA
cacatcttgaacttccc

SEQ ID NO: 173776 - DNA, 17 bp, synthetic construct
  source 1..17: mol_type = other DNA
gcacatcttgaacttcc

SEQ ID NO: 173777 - DNA, 17 bp, synthetic construct
  source 1..17: mol_type = other DNA
agcacatcttgaacttc

SEQ ID NO: 173778 - DNA, 17 bp, synthetic construct
  source 1..17: mol_type = other DNA
aagcacatcttgaactt

SEQ ID NO: 173779 - DNA, 17 bp, synthetic construct
  source 1..17: mol_type = other DNA
gaagcacatcttgaact

SEQ ID NO: 173780 - DNA, 17 bp, synthetic construct
  source 1..17: mol_type = other DNA
tgaagcacatcttgaac

SEQ ID NO: 173781 - DNA, 17 bp, synthetic construct
  source 1..17: mol_type = other DNA
ttgaagcacatcttgaa

SEQ ID NO: 173782 - DNA, 17 bp, synthetic construct
  source 1..17: mol_type = other DNA
gttgaagcacatcttga

SEQ ID NO: 173783 - DNA, 17 bp, synthetic construct
  source 1..17: mol_type = other DNA
agttgaagcacatcttg

SEQ ID NO: 173784 - DNA, 17 bp, synthetic construct
  source 1..17: mol_type = other DNA
tagttgaagcacatctt

SEQ ID NO: 173785 - DNA, 17 bp, synthetic construct
  source 1..17: mol_type = other DNA
atagttgaagcacatct

SEQ ID NO: 173786 - DNA, 17 bp, synthetic construct
  source 1..17: mol_type = other DNA
catagttgaagcacatc

SEQ ID NO: 173787 - DNA, 17 bp, synthetic construct
  source 1..17: mol_type = other DNA
tcatagttgaagcacat

SEQ ID NO: 173788 - DNA, 17 bp, synthetic construct
  source 1..17: mol_type = other DNA
ttcatagttgaagcaca

SEQ ID NO: 173789 - DNA, 17 bp, synthetic construct
  source 1..17: mol_type = other DNA
tttcatagttgaagcac

SEQ ID NO: 173790 - DNA, 17 bp, synthetic construct
  source 1..17: mol_type = other DNA
atttcatagttgaagca

SEQ ID NO: 173791 - DNA, 17 bp, synthetic construct
  source 1..17: mol_type = other DNA
gatttcatagttgaagc

SEQ ID NO: 173792 - DNA, 17 bp, synthetic construct
  source 1..17: mol_type = other DNA
ggatttcatagttgaag

SEQ ID NO: 173793 - DNA, 17 bp, synthetic construct
  source 1..17: mol_type = other DNA
cggatttcatagttgaa

SEQ ID NO: 173794 - DNA, 17 bp, synthetic construct
  source 1..17: mol_type = other DNA
acggatttcatagttga

SEQ ID NO: 173795 - DNA, 17 bp, synthetic construct
  source 1..17: mol_type = other DNA
cacggatttcatagttg

SEQ ID NO: 173796 - DNA, 17 bp, synthetic construct
  source 1..17: mol_type = other DNA
acacggatttcatagtt

SEQ ID NO: 173797 - DNA, 17 bp, synthetic construct
  source 1..17: mol_type = other DNA
cacacggatttcatagt

SEQ ID NO: 173798 - DNA, 17 bp, synthetic construct
  source 1..17: mol_type = other DNA
acacacggatttcatag

SEQ ID NO: 173799 - DNA, 17 bp, synthetic construct
  source 1..17: mol_type = other DNA
aacacacggatttcata

SEQ ID NO: 173800 - DNA, 17 bp, synthetic construct
  source 1..17: mol_type = other DNA
gaacacacggatttcat

SEQ ID NO: 173801 - DNA, 17 bp, synthetic construct
  source 1..17: mol_type = other DNA
agaacacacggatttca

SEQ ID NO: 173802 - DNA, 17 bp, synthetic construct
  source 1..17: mol_type = other DNA
cagaacacacggatttc

SEQ ID NO: 173803 - DNA, 17 bp, synthetic construct
  source 1..17: mol_type = other DNA
gcagaacacacggattt

SEQ ID NO: 173804 - DNA, 17 bp, synthetic construct
  source 1..17: mol_type = other DNA
agcagaacacacggatt

SEQ ID NO: 173805 - DNA, 17 bp, synthetic construct
  source 1..17: mol_type = other DNA
cagcagaacacacggat

SEQ ID NO: 173806 - DNA, 17 bp, synthetic construct
  source 1..17: mol_type = other DNA
gcagcagaacacacgga

SEQ ID NO: 173807 - DNA, 17 bp, synthetic construct
  source 1..17: mol_type = other DNA
tgcagcagaacacacgg

SEQ ID NO: 173808 - DNA, 17 bp, synthetic construct
  source 1..17: mol_type = other DNA
ttgcagcagaacacacg

SEQ ID NO: 173809 - DNA, 17 bp, synthetic construct
  source 1..17: mol_type = other DNA
gttgcagcagaacacac

SEQ ID NO: 173810 - DNA, 17 bp, synthetic construct
  source 1..17: mol_type = other DNA
agttgcagcagaacaca

SEQ ID NO: 173811 - DNA, 17 bp, synthetic construct
  source 1..17: mol_type = other DNA
tagttgcagcagaacac

SEQ ID NO: 173812 - DNA, 17 bp, synthetic construct
  source 1..17: mol_type = other DNA
gtagttgcagcagaaca

SEQ ID NO: 173813 - DNA, 17 bp, synthetic construct
  source 1..17: mol_type = other DNA
cgtagttgcagcagaac

SEQ ID NO: 173814 - DNA, 17 bp, synthetic construct
  source 1..17: mol_type = other DNA
ccgtagttgcagcagaa

SEQ ID NO: 173815 - DNA, 17 bp, synthetic construct
  source 1..17: mol_type = other DNA
gccgtagttgcagcaga

SEQ ID NO: 173816 - DNA, 17 bp, synthetic construct
  source 1..17: mol_type = other DNA
ggccgtagttgcagcag

SEQ ID NO: 173817 - DNA, 17 bp, synthetic construct
  source 1..17: mol_type = other DNA
tggccgtagttgcagca

SEQ ID NO: 173818 - DNA, 17 bp, synthetic construct
  source 1..17: mol_type = other DNA
gtggccgtagttgcagc

SEQ ID NO: 173819 - DNA, 17 bp, synthetic construct
  source 1..17: mol_type = other DNA
agtggccgtagttgcag

SEQ ID NO: 173820 - DNA, 17 bp, synthetic construct
  source 1..17: mol_type = other DNA
cagtggccgtagttgca

SEQ ID NO: 173821 - DNA, 17 bp, synthetic construct
  source 1..17: mol_type = other DNA
gcagtggccgtagttgc

SEQ ID NO: 173822 - DNA, 17 bp, synthetic construct
  source 1..17: mol_type = other DNA
ggcagtggccgtagttg

SEQ ID NO: 173823 - DNA, 17 bp, synthetic construct
  source 1..17: mol_type = other DNA
gggcagtggccgtagtt

SEQ ID NO: 173824 - DNA, 17 bp, synthetic construct
  source 1..17: mol_type = other DNA
ggggcagtggccgtagt

SEQ ID NO: 173825 - DNA, 17 bp, synthetic construct
  source 1..17: mol_type = other DNA
tggggcagtggccgtag

SEQ ID NO: 173826 - DNA, 17 bp, synthetic construct
  source 1..17: mol_type = other DNA
ctggggcagtggccgta

SEQ ID NO: 173827 - DNA, 17 bp, synthetic construct
  source 1..17: mol_type = other DNA
gctggggcagtggccgt

SEQ ID NO: 173828 - DNA, 17 bp, synthetic construct
  source 1..17: mol_type = other DNA
tgctggggcagtggccg

SEQ ID NO: 173829 - DNA, 17 bp, synthetic construct
  source 1..17: mol_type = other DNA
gtgctggggcagtggcc

SEQ ID NO: 173830 - DNA, 17 bp, synthetic construct
  source 1..17: mol_type = other DNA
ggtgctggggcagtggc

SEQ ID NO: 173831 - DNA, 17 bp, synthetic construct
  source 1..17: mol_type = other DNA
gggtgctggggcagtgg

SEQ ID NO: 173832 - DNA, 17 bp, synthetic construct
  source 1..17: mol_type = other DNA
ggggtgctggggcagtg

SEQ ID NO: 173833 - DNA, 17 bp, synthetic construct
  source 1..17: mol_type = other DNA
cggggtgctggggcagt

SEQ ID NO: 173834 - DNA, 17 bp, synthetic construct
  source 1..17: mol_type = other DNA
ccggggtgctggggcag

SEQ ID NO: 173835 - DNA, 17 bp, synthetic construct
  source 1..17: mol_type = other DNA
gccggggtgctggggca

SEQ ID NO: 173836 - DNA, 17 bp, synthetic construct
  source 1..17: mol_type = other DNA
ggccggggtgctggggc

SEQ ID NO: 173837 - DNA, 17 bp, synthetic construct
  source 1..17: mol_type = other DNA
tggccggggtgctgggg

SEQ ID NO: 173838 - DNA, 17 bp, synthetic construct
  source 1..17: mol_type = other DNA
gtggccggggtgctggg

SEQ ID NO: 173839 - DNA, 17 bp, synthetic construct
  source 1..17: mol_type = other DNA
ggtggccggggtgctgg

SEQ ID NO: 173840 - DNA, 17 bp, synthetic construct
  source 1..17: mol_type = other DNA
tggtggccggggtgctg

SEQ ID NO: 173841 - DNA, 17 bp, synthetic construct
  source 1..17: mol_type = other DNA
ctggtggccggggtgct

SEQ ID NO: 173842 - DNA, 17 bp, synthetic construct
  source 1..17: mol_type = other DNA
gctggtggccggggtgc

SEQ ID NO: 173843 - DNA, 17 bp, synthetic construct
  source 1..17: mol_type = other DNA
agctggtggccggggtg

SEQ ID NO: 173844 - DNA, 17 bp, synthetic construct
  source 1..17: mol_type = other DNA
gagctggtggccggggt

SEQ ID NO: 173845 - DNA, 17 bp, synthetic construct
  source 1..17: mol_type = other DNA
agagctggtggccgggg

SEQ ID NO: 173846 - DNA, 17 bp, synthetic construct
  source 1..17: mol_type = other DNA
tagagctggtggccggg

SEQ ID NO: 173847 - DNA, 17 bp, synthetic construct
  source 1..17: mol_type = other DNA
gtagagctggtggccgg

SEQ ID NO: 173848 - DNA, 17 bp, synthetic construct
  source 1..17: mol_type = other DNA
cgtagagctggtggccg

SEQ ID NO: 173849 - DNA, 17 bp, synthetic construct
  source 1..17: mol_type = other DNA
ccgtagagctggtggcc

SEQ ID NO: 173850 - DNA, 17 bp, synthetic construct
  source 1..17: mol_type = other DNA
gccgtagagctggtggc

SEQ ID NO: 173851 - DNA, 17 bp, synthetic construct
  source 1..17: mol_type = other DNA
ggccgtagagctggtgg

SEQ ID NO: 173852 - DNA, 17 bp, synthetic construct
  source 1..17: mol_type = other DNA
tggccgtagagctggtg

SEQ ID NO: 173853 - DNA, 17 bp, synthetic construct
  source 1..17: mol_type = other DNA
atggccgtagagctggt

SEQ ID NO: 173854 - DNA, 17 bp, synthetic construct
  source 1..17: mol_type = other DNA
catggccgtagagctgg

SEQ ID NO: 173855 - DNA, 17 bp, synthetic construct
  source 1..17: mol_type = other DNA
gcatggccgtagagctg

SEQ ID NO: 173856 - DNA, 17 bp, synthetic construct
  source 1..17: mol_type = other DNA
ggcatggccgtagagct

SEQ ID NO: 173857 - DNA, 17 bp, synthetic construct
  source 1..17: mol_type = other DNA
gggcatggccgtagagc

SEQ ID NO: 173858 - DNA, 17 bp, synthetic construct
  source 1..17: mol_type = other DNA
agggcatggccgtagag

SEQ ID NO: 173859 - DNA, 17 bp, synthetic construct
  source 1..17: mol_type = other DNA
gagggcatggccgtaga

SEQ ID NO: 173860 - DNA, 17 bp, synthetic construct
  source 1..17: mol_type = other DNA
ggagggcatggccgtag

SEQ ID NO: 173861 - DNA, 17 bp, synthetic construct
  source 1..17: mol_type = other DNA
aggagggcatggccgta

SEQ ID NO: 173862 - DNA, 17 bp, synthetic construct
  source 1..17: mol_type = other DNA
gaggagggcatggccgt

SEQ ID NO: 173863 - DNA, 17 bp, synthetic construct
  source 1..17: mol_type = other DNA
ggaggagggcatggccg

SEQ ID NO: 173864 - DNA, 17 bp, synthetic construct
  source 1..17: mol_type = other DNA
tggaggagggcatggcc

SEQ ID NO: 173865 - DNA, 17 bp, synthetic construct
  source 1..17: mol_type = other DNA
gtggaggagggcatggc

SEQ ID NO: 173866 - DNA, 17 bp, synthetic construct
  source 1..17: mol_type = other DNA
agtggaggagggcatgg

SEQ ID NO: 173867 - DNA, 17 bp, synthetic construct
  source 1..17: mol_type = other DNA
gagtggaggagggcatg

SEQ ID NO: 173868 - DNA, 17 bp, synthetic construct
  source 1..17: mol_type = other DNA
ggagtggaggagggcat

SEQ ID NO: 173869 - DNA, 17 bp, synthetic construct
  source 1..17: mol_type = other DNA
cggagtggaggagggca

SEQ ID NO: 173870 - DNA, 17 bp, synthetic construct
  source 1..17: mol_type = other DNA
ccggagtggaggagggc

SEQ ID NO: 173871 - DNA, 17 bp, synthetic construct
  source 1..17: mol_type = other DNA
cccggagtggaggaggg

SEQ ID NO: 173872 - DNA, 17 bp, synthetic construct
  source 1..17: mol_type = other DNA
ccccggagtggaggagg

SEQ ID NO: 173873 - DNA, 17 bp, synthetic construct
  source 1..17: mol_type = other DNA
tccccggagtggaggag

SEQ ID NO: 173874 - DNA, 17 bp, synthetic construct
  source 1..17: mol_type = other DNA
gtccccggagtggagga

SEQ ID NO: 173875 - DNA, 17 bp, synthetic construct
  source 1..17: mol_type = other DNA
cgtccccggagtggagg

SEQ ID NO: 173876 - DNA, 17 bp, synthetic construct
  source 1..17: mol_type = other DNA
tcgtccccggagtggag

SEQ ID NO: 173877 - DNA, 17 bp, synthetic construct
  source 1..17: mol_type = other DNA
gtcgtccccggagtgga

SEQ ID NO: 173878 - DNA, 17 bp, synthetic construct
  source 1..17: mol_type = other DNA
ggtcgtccccggagtgg

SEQ ID NO: 173879 - DNA, 17 bp, synthetic construct
  source 1..17: mol_type = other DNA
aggtcgtccccggagtg

SEQ ID NO: 173880 - DNA, 17 bp, synthetic construct
  source 1..17: mol_type = other DNA
caggtcgtccccggagt

SEQ ID NO: 173881 - DNA, 17 bp, synthetic construct
  source 1..17: mol_type = other DNA
ccaggtcgtccccggag

SEQ ID NO: 173882 - DNA, 17 bp, synthetic construct
  source 1..17: mol_type = other DNA
tccaggtcgtccccgga

SEQ ID NO: 173883 - DNA, 17 bp, synthetic construct
  source 1..17: mol_type = other DNA
atccaggtcgtccccgg

SEQ ID NO: 173884 - DNA, 17 bp, synthetic construct
  source 1..17: mol_type = other DNA
gatccaggtcgtccccg

SEQ ID NO: 173885 - DNA, 17 bp, synthetic construct
  source 1..17: mol_type = other DNA
ggatccaggtcgtcccc

SEQ ID NO: 173886 - DNA, 17 bp, synthetic construct
  source 1..17: mol_type = other DNA
aggatccaggtcgtccc

SEQ ID NO: 173887 - DNA, 17 bp, synthetic construct
  source 1..17: mol_type = other DNA
gaggatccaggtcgtcc

SEQ ID NO: 173888 - DNA, 17 bp, synthetic construct
  source 1..17: mol_type = other DNA
tgaggatccaggtcgtc

SEQ ID NO: 173889 - DNA, 17 bp, synthetic construct
  source 1..17: mol_type = other DNA
gtgaggatccaggtcgt

SEQ ID NO: 173890 - DNA, 17 bp, synthetic construct
  source 1..17: mol_type = other DNA
tgtgaggatccaggtcg

SEQ ID NO: 173891 - DNA, 17 bp, synthetic construct
  source 1..17: mol_type = other DNA
ctgtgaggatccaggtc

SEQ ID NO: 173892 - DNA, 17 bp, synthetic construct
  source 1..17: mol_type = other DNA
tctgtgaggatccaggt

SEQ ID NO: 173893 - DNA, 17 bp, synthetic construct
  source 1..17: mol_type = other DNA
ctctgtgaggatccagg

SEQ ID NO: 173894 - DNA, 17 bp, synthetic construct
  source 1..17: mol_type = other DNA
gctctgtgaggatccag

SEQ ID NO: 173895 - DNA, 17 bp, synthetic construct
  source 1..17: mol_type = other DNA
agctctgtgaggatcca

SEQ ID NO: 173896 - DNA, 17 bp, synthetic construct
  source 1..17: mol_type = other DNA
cagctctgtgaggatcc

SEQ ID NO: 173897 - DNA, 17 bp, synthetic construct
  source 1..17: mol_type = other DNA
tcagctctgtgaggatc

SEQ ID NO: 173898 - DNA, 17 bp, synthetic construct
  source 1..17: mol_type = other DNA
gtcagctctgtgaggat

SEQ ID NO: 173899 - DNA, 17 bp, synthetic construct
  source 1..17: mol_type = other DNA
ggtcagctctgtgagga

SEQ ID NO: 173900 - DNA, 17 bp, synthetic construct
  source 1..17: mol_type = other DNA
tggtcagctctgtgagg

SEQ ID NO: 173901 - DNA, 17 bp, synthetic construct
  source 1..17: mol_type = other DNA
gtggtcagctctgtgag

SEQ ID NO: 173902 - DNA, 17 bp, synthetic construct
  source 1..17: mol_type = other DNA
tgtggtcagctctgtga

SEQ ID NO: 173903 - DNA, 17 bp, synthetic construct
  source 1..17: mol_type = other DNA
ttgtggtcagctctgtg

SEQ ID NO: 173904 - DNA, 17 bp, synthetic construct
  source 1..17: mol_type = other DNA
gttgtggtcagctctgt

SEQ ID NO: 173905 - DNA, 17 bp, synthetic construct
  source 1..17: mol_type = other DNA
tgttgtggtcagctctg

SEQ ID NO: 173906 - DNA, 17 bp, synthetic construct
  source 1..17: mol_type = other DNA
ctgttgtggtcagctct

SEQ ID NO: 173907 - DNA, 17 bp, synthetic construct
  source 1..17: mol_type = other DNA
gctgttgtggtcagctc

SEQ ID NO: 173908 - DNA, 17 bp, synthetic construct
  source 1..17: mol_type = other DNA
ggctgttgtggtcagct

SEQ ID NO: 173909 - DNA, 17 bp, synthetic construct
  source 1..17: mol_type = other DNA
tggctgttgtggtcagc

SEQ ID NO: 173910 - DNA, 17 bp, synthetic construct
  source 1..17: mol_type = other DNA
gtggctgttgtggtcag

SEQ ID NO: 173911 - DNA, 17 bp, synthetic construct
  source 1..17: mol_type = other DNA
agtggctgttgtggtca

SEQ ID NO: 173912 - DNA, 17 bp, synthetic construct
  source 1..17: mol_type = other DNA
tagtggctgttgtggtc

SEQ ID NO: 173913 - DNA, 17 bp, synthetic construct
  source 1..17: mol_type = other DNA
gtagtggctgttgtggt

SEQ ID NO: 173914 - DNA, 17 bp, synthetic construct
  source 1..17: mol_type = other DNA
cgtagtggctgttgtgg

SEQ ID NO: 173915 - DNA, 17 bp, synthetic construct
  source 1..17: mol_type = other DNA
tcgtagtggctgttgtg

SEQ ID NO: 173916 - DNA, 17 bp, synthetic construct
  source 1..17: mol_type = other DNA
gtcgtagtggctgttgt

SEQ ID NO: 173917 - DNA, 17 bp, synthetic construct
  source 1..17: mol_type = other DNA
agtcgtagtggctgttg

SEQ ID NO: 173918 - DNA, 17 bp, synthetic construct
  source 1..17: mol_type = other DNA
cagtcgtagtggctgtt

SEQ ID NO: 173919 - DNA, 17 bp, synthetic construct
  source 1..17: mol_type = other DNA
gcagtcgtagtggctgt

SEQ ID NO: 173920 - DNA, 17 bp, synthetic construct
  source 1..17: mol_type = other DNA
tgcagtcgtagtggctg

SEQ ID NO: 173921 - DNA, 17 bp, synthetic construct
  source 1..17: mol_type = other DNA
atgcagtcgtagtggct

SEQ ID NO: 173922 - DNA, 17 bp, synthetic construct
  source 1..17: mol_type = other DNA
gatgcagtcgtagtggc

SEQ ID NO: 173923 - DNA, 17 bp, synthetic construct
  source 1..17: mol_type = other DNA
ggatgcagtcgtagtgg

SEQ ID NO: 173924 - DNA, 17 bp, synthetic construct
  source 1..17: mol_type = other DNA
tggatgcagtcgtagtg

SEQ ID NO: 173925 - DNA, 17 bp, synthetic construct
  source 1..17: mol_type = other DNA
gtggatgcagtcgtagt

SEQ ID NO: 173926 - DNA, 17 bp, synthetic construct
  source 1..17: mol_type = other DNA
agtggatgcagtcgtag

SEQ ID NO: 173927 - DNA, 17 bp, synthetic construct
  source 1..17: mol_type = other DNA
cagtggatgcagtcgta

SEQ ID NO: 173928 - DNA, 17 bp, synthetic construct
  source 1..17: mol_type = other DNA
ccagtggatgcagtcgt

SEQ ID NO: 173929 - DNA, 17 bp, synthetic construct
  source 1..17: mol_type = other DNA
tccagtggatgcagtcg

SEQ ID NO: 173930 - DNA, 17 bp, synthetic construct
  source 1..17: mol_type = other DNA
atccagtggatgcagtc

SEQ ID NO: 173931 - DNA, 17 bp, synthetic construct
  source 1..17: mol_type = other DNA
gatccagtggatgcagt

SEQ ID NO: 173932 - DNA, 17 bp, synthetic construct
  source 1..17: mol_type = other DNA
ggatccagtggatgcag

SEQ ID NO: 173933 - DNA, 17 bp, synthetic construct
  source 1..17: mol_type = other DNA
tggatccagtggatgca

SEQ ID NO: 173934 - DNA, 17 bp, synthetic construct
  source 1..17: mol_type = other DNA
gtggatccagtggatgc

SEQ ID NO: 173935 - DNA, 17 bp, synthetic construct
  source 1..17: mol_type = other DNA
cgtggatccagtggatg

SEQ ID NO: 173936 - DNA, 17 bp, synthetic construct
  source 1..17: mol_type = other DNA
ccgtggatccagtggat

SEQ ID NO: 173937 - DNA, 17 bp, synthetic construct
  source 1..17: mol_type = other DNA
gccgtggatccagtgga

SEQ ID NO: 173938 - DNA, 17 bp, synthetic construct
  source 1..17: mol_type = other DNA
ggccgtggatccagtgg

SEQ ID NO: 173939 - DNA, 17 bp, synthetic construct
  source 1..17: mol_type = other DNA
tggccgtggatccagtg

SEQ ID NO: 173940 - DNA, 17 bp, synthetic construct
  source 1..17: mol_type = other DNA
gtggccgtggatccagt

SEQ ID NO: 173941 - DNA, 17 bp, synthetic construct
  source 1..17: mol_type = other DNA
ggtggccgtggatccag

SEQ ID NO: 173942 - DNA, 17 bp, synthetic construct
  source 1..17: mol_type = other DNA
gggtggccgtggatcca

SEQ ID NO: 173943 - DNA, 17 bp, synthetic construct
  source 1..17: mol_type = other DNA
ggggtggccgtggatcc

SEQ ID NO: 173944 - DNA, 17 bp, synthetic construct
  source 1..17: mol_type = other DNA
cggggtggccgtggatc

SEQ ID NO: 173945 - DNA, 17 bp, synthetic construct
  source 1..17: mol_type = other DNA
acggggtggccgtggat

SEQ ID NO: 173946 - DNA, 17 bp, synthetic construct
  source 1..17: mol_type = other DNA
gacggggtggccgtgga

SEQ ID NO: 173947 - DNA, 17 bp, synthetic construct
  source 1..17: mol_type = other DNA
ggacggggtggccgtgg

SEQ ID NO: 173948 - DNA, 17 bp, synthetic construct
  source 1..17: mol_type = other DNA
aggacggggtggccgtg

SEQ ID NO: 173949 - DNA, 17 bp, synthetic construct
  source 1..17: mol_type = other DNA
gaggacggggtggccgt

SEQ ID NO: 173950 - DNA, 17 bp, synthetic construct
  source 1..17: mol_type = other DNA
ggaggacggggtggccg

SEQ ID NO: 173951 - DNA, 17 bp, synthetic construct
  source 1..17: mol_type = other DNA
tggaggacggggtggcc

SEQ ID NO: 173952 - DNA, 17 bp, synthetic construct
  source 1..17: mol_type = other DNA
gtggaggacggggtggc

SEQ ID NO: 173953 - DNA, 17 bp, synthetic construct
  source 1..17: mol_type = other DNA
ggtggaggacggggtgg

SEQ ID NO: 173954 - DNA, 17 bp, synthetic construct
  source 1..17: mol_type = other DNA
gggtggaggacggggtg

SEQ ID NO: 173955 - DNA, 17 bp, synthetic construct
  source 1..17: mol_type = other DNA
ggggtggaggacggggt

SEQ ID NO: 173956 - DNA, 17 bp, synthetic construct
  source 1..17: mol_type = other DNA
cggggtggaggacgggg

SEQ ID NO: 173957 - DNA, 17 bp, synthetic construct
  source 1..17: mol_type = other DNA
ccggggtggaggacggg

SEQ ID NO: 173958 - DNA, 17 bp, synthetic construct
  source 1..17: mol_type = other DNA
cccggggtggaggacgg

SEQ ID NO: 173959 - DNA, 17 bp, synthetic construct
  source 1..17: mol_type = other DNA
tcccggggtggaggacg

SEQ ID NO: 173960 - DNA, 17 bp, synthetic construct
  source 1..17: mol_type = other DNA
ttcccggggtggaggac

SEQ ID NO: 173961 - DNA, 17 bp, synthetic construct
  source 1..17: mol_type = other DNA
gttcccggggtggagga

SEQ ID NO: 173962 - DNA, 17 bp, synthetic construct
  source 1..17: mol_type = other DNA
tgttcccggggtggagg

SEQ ID NO: 173963 - DNA, 17 bp, synthetic construct
  source 1..17: mol_type = other DNA
ctgttcccggggtggag

SEQ ID NO: 173964 - DNA, 17 bp, synthetic construct
  source 1..17: mol_type = other DNA
gctgttcccggggtgga

SEQ ID NO: 173965 - DNA, 17 bp, synthetic construct
  source 1..17: mol_type = other DNA
agctgttcccggggtgg

SEQ ID NO: 173966 - DNA, 17 bp, synthetic construct
  source 1..17: mol_type = other DNA
gagctgttcccggggtg

SEQ ID NO: 173967 - DNA, 17 bp, synthetic construct
  source 1..17: mol_type = other DNA
ggagctgttcccggggt

SEQ ID NO: 173968 - DNA, 17 bp, synthetic construct
  source 1..17: mol_type = other DNA
gggagctgttcccgggg

SEQ ID NO: 173969 - DNA, 17 bp, synthetic construct
  source 1..17: mol_type = other DNA
ggggagctgttcccggg

SEQ ID NO: 173970 - DNA, 17 bp, synthetic construct
  source 1..17: mol_type = other DNA
gggggagctgttcccgg

SEQ ID NO: 173971 - DNA, 17 bp, synthetic construct
  source 1..17: mol_type = other DNA
agggggagctgttcccg

SEQ ID NO: 173972 - DNA, 17 bp, synthetic construct
  source 1..17: mol_type = other DNA
gagggggagctgttccc

SEQ ID NO: 173973 - DNA, 17 bp, synthetic construct
  source 1..17: mol_type = other DNA
ggagggggagctgttcc

SEQ ID NO: 173974 - DNA, 17 bp, synthetic construct
  source 1..17: mol_type = other DNA
gggagggggagctgttc

SEQ ID NO: 173975 - DNA, 17 bp, synthetic construct
  source 1..17: mol_type = other DNA
tgggagggggagctgtt

SEQ ID NO: 173976 - DNA, 17 bp, synthetic construct
  source 1..17: mol_type = other DNA
ttgggagggggagctgt

SEQ ID NO: 173977 - DNA, 17 bp, synthetic construct
  source 1..17: mol_type = other DNA
tttgggagggggagctg

SEQ ID NO: 173978 - DNA, 17 bp, synthetic construct
  source 1..17: mol_type = other DNA
ctttgggagggggagct

SEQ ID NO: 173979 - DNA, 17 bp, synthetic construct
  source 1..17: mol_type = other DNA
actttgggagggggagc

SEQ ID NO: 173980 - DNA, 17 bp, synthetic construct
  source 1..17: mol_type = other DNA
cactttgggagggggag

SEQ ID NO: 173981 - DNA, 17 bp, synthetic construct
  source 1..17: mol_type = other DNA
gcactttgggaggggga

SEQ ID NO: 173982 - DNA, 17 bp, synthetic construct
  source 1..17: mol_type = other DNA
agcactttgggaggggg

SEQ ID NO: 173983 - DNA, 17 bp, synthetic construct
  source 1..17: mol_type = other DNA
cagcactttgggagggg

SEQ ID NO: 173984 - DNA, 17 bp, synthetic construct
  source 1..17: mol_type = other DNA
tcagcactttgggaggg

SEQ ID NO: 173985 - DNA, 17 bp, synthetic construct
  source 1..17: mol_type = other DNA
gtcagcactttgggagg

SEQ ID NO: 173986 - DNA, 17 bp, synthetic construct
  source 1..17: mol_type = other DNA
ggtcagcactttgggag

SEQ ID NO: 173987 - DNA, 17 bp, synthetic construct
  source 1..17: mol_type = other DNA
tggtcagcactttggga

SEQ ID NO: 173988 - DNA, 17 bp, synthetic construct
  source 1..17: mol_type = other DNA
ctggtcagcactttggg

SEQ ID NO: 173989 - DNA, 17 bp, synthetic construct
  source 1..17: mol_type = other DNA
gctggtcagcactttgg

SEQ ID NO: 173990 - DNA, 17 bp, synthetic construct
  source 1..17: mol_type = other DNA
ggctggtcagcactttg

SEQ ID NO: 173991 - DNA, 17 bp, synthetic construct
  source 1..17: mol_type = other DNA
gggctggtcagcacttt

SEQ ID NO: 173992 - DNA, 17 bp, synthetic construct
  source 1..17: mol_type = other DNA
cgggctggtcagcactt

SEQ ID NO: 173993 - DNA, 17 bp, synthetic construct
  source 1..17: mol_type = other DNA
ccgggctggtcagcact

SEQ ID NO: 173994 - DNA, 17 bp, synthetic construct
  source 1..17: mol_type = other DNA
gccgggctggtcagcac

SEQ ID NO: 173995 - DNA, 17 bp, synthetic construct
  source 1..17: mol_type = other DNA
ggccgggctggtcagca

SEQ ID NO: 173996 - DNA, 17 bp, synthetic construct
  source 1..17: mol_type = other DNA
tggccgggctggtcagc

SEQ ID NO: 173997 - DNA, 17 bp, synthetic construct
  source 1..17: mol_type = other DNA
gtggccgggctggtcag

SEQ ID NO: 173998 - DNA, 17 bp, synthetic construct
  source 1..17: mol_type = other DNA
ggtggccgggctggtca

SEQ ID NO: 173999 - DNA, 17 bp, synthetic construct
  source 1..17: mol_type = other DNA
tggtggccgggctggtc

SEQ ID NO: 174000 - DNA, 17 bp, synthetic construct
  source 1..17: mol_type = other DNA
gtggtggccgggctggt

SEQ ID NO: 174001 - DNA, 17 bp, synthetic construct
  source 1..17: mol_type = other DNA
tgtggtggccgggctgg

SEQ ID NO: 174002 - DNA, 17 bp, synthetic construct
  source 1..17: mol_type = other DNA
gtgtggtggccgggctg

SEQ ID NO: 174003 - DNA, 17 bp, synthetic construct
  source 1..17: mol_type = other DNA
ggtgtggtggccgggct

SEQ ID NO: 174004 - DNA, 17 bp, synthetic construct
  source 1..17: mol_type = other DNA
gggtgtggtggccgggc

SEQ ID NO: 174005 - DNA, 17 bp, synthetic construct
  source 1..17: mol_type = other DNA
tgggtgtggtggccggg

SEQ ID NO: 174006 - DNA, 17 bp, synthetic construct
  source 1..17: mol_type = other DNA
gtgggtgtggtggccgg

SEQ ID NO: 174007 - DNA, 17 bp, synthetic construct
  source 1..17: mol_type = other DNA
tgtgggtgtggtggccg

SEQ ID NO: 174008 - DNA, 17 bp, synthetic construct
  source 1..17: mol_type = other DNA
ctgtgggtgtggtggcc

SEQ ID NO: 174009 - DNA, 17 bp, synthetic construct
  source 1..17: mol_type = other DNA
gctgtgggtgtggtggc

SEQ ID NO: 174010 - DNA, 17 bp, synthetic construct
  source 1..17: mol_type = other DNA
ggctgtgggtgtggtgg

SEQ ID NO: 174011 - DNA, 17 bp, synthetic construct
  source 1..17: mol_type = other DNA
tggctgtgggtgtggtg

SEQ ID NO: 174012 - DNA, 17 bp, synthetic construct
  source 1..17: mol_type = other DNA
gtggctgtgggtgtggt

SEQ ID NO: 174013 - DNA, 17 bp, synthetic construct
  source 1..17: mol_type = other DNA
ggtggctgtgggtgtgg

SEQ ID NO: 174014 - DNA, 17 bp, synthetic construct
  source 1..17: mol_type = other DNA
tggtggctgtgggtgtg

SEQ ID NO: 174015 - DNA, 17 bp, synthetic construct
  source 1..17: mol_type = other DNA
ctggtggctgtgggtgt

SEQ ID NO: 174016 - DNA, 17 bp, synthetic construct
  source 1..17: mol_type = other DNA
actggtggctgtgggtg

SEQ ID NO: 174017 - DNA, 17 bp, synthetic construct
  source 1..17: mol_type = other DNA
aactggtggctgtgggt

SEQ ID NO: 174018 - DNA, 17 bp, synthetic construct
  source 1..17: mol_type = other DNA
gaactggtggctgtggg

SEQ ID NO: 174019 - DNA, 17 bp, synthetic construct
  source 1..17: mol_type = other DNA
ggaactggtggctgtgg

SEQ ID NO: 174020 - DNA, 17 bp, synthetic construct
  source 1..17: mol_type = other DNA
tggaactggtggctgtg

SEQ ID NO: 174021 - DNA, 17 bp, synthetic construct
  source 1..17: mol_type = other DNA
ttggaactggtggctgt

SEQ ID NO: 174022 - DNA, 17 bp, synthetic construct
  source 1..17: mol_type = other DNA
tttggaactggtggctg

SEQ ID NO: 174023 - DNA, 17 bp, synthetic construct
  source 1..17: mol_type = other DNA
ctttggaactggtggct

SEQ ID NO: 174024 - DNA, 17 bp, synthetic construct
  source 1..17: mol_type = other DNA
gctttggaactggtggc

SEQ ID NO: 174025 - DNA, 17 bp, synthetic construct
  source 1..17: mol_type = other DNA
ggctttggaactggtgg

SEQ ID NO: 174026 - DNA, 17 bp, synthetic construct
  source 1..17: mol_type = other DNA
tggctttggaactggtg

SEQ ID NO: 174027 - DNA, 17 bp, synthetic construct
  source 1..17: mol_type = other DNA
gtggctttggaactggt

SEQ ID NO: 174028 - DNA, 17 bp, synthetic construct
  source 1..17: mol_type = other DNA
agtggctttggaactgg

SEQ ID NO: 174029 - DNA, 17 bp, synthetic construct
  source 1..17: mol_type = other DNA
aagtggctttggaactg

SEQ ID NO: 174030 - DNA, 17 bp, synthetic construct
  source 1..17: mol_type = other DNA
gaagtggctttggaact

SEQ ID NO: 174031 - DNA, 17 bp, synthetic construct
  source 1..17: mol_type = other DNA
ggaagtggctttggaac

SEQ ID NO: 174032 - DNA, 17 bp, synthetic construct
  source 1..17: mol_type = other DNA
aggaagtggctttggaa

SEQ ID NO: 174033 - DNA, 17 bp, synthetic construct
  source 1..17: mol_type = other DNA
gaggaagtggctttgga

SEQ ID NO: 174034 - DNA, 17 bp, synthetic construct
  source 1..17: mol_type = other DNA
ggaggaagtggctttgg

SEQ ID NO: 174035 - DNA, 17 bp, synthetic construct
  source 1..17: mol_type = other DNA
aggaggaagtggctttg

SEQ ID NO: 174036 - DNA, 17 bp, synthetic construct
  source 1..17: mol_type = other DNA
gaggaggaagtggcttt

SEQ ID NO: 174037 - DNA, 17 bp, synthetic construct
  source 1..17: mol_type = other DNA
ggaggaggaagtggctt

SEQ ID NO: 174038 - DNA, 17 bp, synthetic construct
  source 1..17: mol_type = other DNA
tggaggaggaagtggct

SEQ ID NO: 174039 - DNA, 17 bp, synthetic construct
  source 1..17: mol_type = other DNA
ctggaggaggaagtggc

SEQ ID NO: 174040 - DNA, 17 bp, synthetic construct
  source 1..17: mol_type = other DNA
actggaggaggaagtgg

SEQ ID NO: 174041 - DNA, 17 bp, synthetic construct
  source 1..17: mol_type = other DNA
gactggaggaggaagtg

SEQ ID NO: 174042 - DNA, 17 bp, synthetic construct
  source 1..17: mol_type = other DNA
ggactggaggaggaagt

SEQ ID NO: 174043 - DNA, 17 bp, synthetic construct
  source 1..17: mol_type = other DNA
tggactggaggaggaag

SEQ ID NO: 174044 - DNA, 17 bp, synthetic construct
  source 1..17: mol_type = other DNA
ttggactggaggaggaa

SEQ ID NO: 174045 - DNA, 17 bp, synthetic construct
  source 1..17: mol_type = other DNA
cttggactggaggagga

SEQ ID NO: 174046 - DNA, 17 bp, synthetic construct
  source 1..17: mol_type = other DNA
ccttggactggaggagg

SEQ ID NO: 174047 - DNA, 17 bp, synthetic construct
  source 1..17: mol_type = other DNA
tccttggactggaggag

SEQ ID NO: 174048 - DNA, 17 bp, synthetic construct
  source 1..17: mol_type = other DNA
gtccttggactggagga

SEQ ID NO: 174049 - DNA, 17 bp, synthetic construct
  source 1..17: mol_type = other DNA
agtccttggactggagg

SEQ ID NO: 174050 - DNA, 17 bp, synthetic construct
  source 1..17: mol_type = other DNA
cagtccttggactggag

SEQ ID NO: 174051 - DNA, 17 bp, synthetic construct
  source 1..17: mol_type = other DNA
gcagtccttggactgga

SEQ ID NO: 174052 - DNA, 17 bp, synthetic construct
  source 1..17: mol_type = other DNA
tgcagtccttggactgg

SEQ ID NO: 174053 - DNA, 17 bp, synthetic construct
  source 1..17: mol_type = other DNA
ttgcagtccttggactg

SEQ ID NO: 174054 - DNA, 17 bp, synthetic construct
  source 1..17: mol_type = other DNA
gttgcagtccttggact

SEQ ID NO: 174055 - DNA, 17 bp, synthetic construct
  source 1..17: mol_type = other DNA
ggttgcagtccttggac

SEQ ID NO: 174056 - DNA, 17 bp, synthetic construct
  source 1..17: mol_type = other DNA
tggttgcagtccttgga

SEQ ID NO: 174057 - DNA, 17 bp, synthetic construct
  source 1..17: mol_type = other DNA
gtggttgcagtccttgg

SEQ ID NO: 174058 - DNA, 17 bp, synthetic construct
  source 1..17: mol_type = other DNA
ggtggttgcagtccttg

SEQ ID NO: 174059 - DNA, 17 bp, synthetic construct
  source 1..17: mol_type = other DNA
gggtggttgcagtcctt

SEQ ID NO: 174060 - DNA, 17 bp, synthetic construct
  source 1..17: mol_type = other DNA
agggtggttgcagtcct

SEQ ID NO: 174061 - DNA, 17 bp, synthetic construct
  source 1..17: mol_type = other DNA
aagggtggttgcagtcc

SEQ ID NO: 174062 - DNA, 17 bp, synthetic construct
  source 1..17: mol_type = other DNA
gaagggtggttgcagtc

SEQ ID NO: 174063 - DNA, 17 bp, synthetic construct
  source 1..17: mol_type = other DNA
ggaagggtggttgcagt

SEQ ID NO: 174064 - DNA, 17 bp, synthetic construct
  source 1..17: mol_type = other DNA
tggaagggtggttgcag

SEQ ID NO: 174065 - DNA, 17 bp, synthetic construct
  source 1..17: mol_type = other DNA
ctggaagggtggttgca

SEQ ID NO: 174066 - DNA, 17 bp, synthetic construct
  source 1..17: mol_type = other DNA
actggaagggtggttgc

SEQ ID NO: 174067 - DNA, 17 bp, synthetic construct
  source 1..17: mol_type = other DNA
cactggaagggtggttg

SEQ ID NO: 174068 - DNA, 17 bp, synthetic construct
  source 1..17: mol_type = other DNA
gcactggaagggtggtt

SEQ ID NO: 174069 - DNA, 17 bp, synthetic construct
  source 1..17: mol_type = other DNA
agcactggaagggtggt

SEQ ID NO: 174070 - DNA, 17 bp, synthetic construct
  source 1..17: mol_type = other DNA
cagcactggaagggtgg

SEQ ID NO: 174071 - DNA, 17 bp, synthetic construct
  source 1..17: mol_type = other DNA
tcagcactggaagggtg

SEQ ID NO: 174072 - DNA, 17 bp, synthetic construct
  source 1..17: mol_type = other DNA
gtcagcactggaagggt

SEQ ID NO: 174073 - DNA, 17 bp, synthetic construct
  source 1..17: mol_type = other DNA
tgtcagcactggaaggg

SEQ ID NO: 174074 - DNA, 17 bp, synthetic construct
  source 1..17: mol_type = other DNA
ttgtcagcactggaagg

SEQ ID NO: 174075 - DNA, 17 bp, synthetic construct
  source 1..17: mol_type = other DNA
cttgtcagcactggaag

SEQ ID NO: 174076 - DNA, 17 bp, synthetic construct
  source 1..17: mol_type = other DNA
gcttgtcagcactggaa

SEQ ID NO: 174077 - DNA, 17 bp, synthetic construct
  source 1..17: mol_type = other DNA
tgcttgtcagcactgga

SEQ ID NO: 174078 - DNA, 17 bp, synthetic construct
  source 1..17: mol_type = other DNA
gtgcttgtcagcactgg

SEQ ID NO: 174079 - DNA, 17 bp, synthetic construct
  source 1..17: mol_type = other DNA
tgtgcttgtcagcactg

SEQ ID NO: 174080 - DNA, 17 bp, synthetic construct
  source 1..17: mol_type = other DNA
ctgtgcttgtcagcact

SEQ ID NO: 174081 - DNA, 17 bp, synthetic construct
  source 1..17: mol_type = other DNA
gctgtgcttgtcagcac

SEQ ID NO: 174082 - DNA, 17 bp, synthetic construct
  source 1..17: mol_type = other DNA
ggctgtgcttgtcagca

SEQ ID NO: 174083 - DNA, 17 bp, synthetic construct
  source 1..17: mol_type = other DNA
tggctgtgcttgtcagc

SEQ ID NO: 174084 - DNA, 17 bp, synthetic construct
  source 1..17: mol_type = other DNA
gtggctgtgcttgtcag

SEQ ID NO: 174085 - DNA, 17 bp, synthetic construct
  source 1..17: mol_type = other DNA
ggtggctgtgcttgtca

SEQ ID NO: 174086 - DNA, 17 bp, synthetic construct
  source 1..17: mol_type = other DNA
tggtggctgtgcttgtc

SEQ ID NO: 174087 - DNA, 17 bp, synthetic construct
  source 1..17: mol_type = other DNA
ttggtggctgtgcttgt

SEQ ID NO: 174088 - DNA, 17 bp, synthetic construct
  source 1..17: mol_type = other DNA
tttggtggctgtgcttg

SEQ ID NO: 174089 - DNA, 17 bp, synthetic construct
  source 1..17: mol_type = other DNA
atttggtggctgtgctt

SEQ ID NO: 174090 - DNA, 17 bp, synthetic construct
  source 1..17: mol_type = other DNA
gatttggtggctgtgct

SEQ ID NO: 174091 - DNA, 17 bp, synthetic construct
  source 1..17: mol_type = other DNA
ggatttggtggctgtgc

SEQ ID NO: 174092 - DNA, 17 bp, synthetic construct
  source 1..17: mol_type = other DNA
tggatttggtggctgtg

SEQ ID NO: 174093 - DNA, 17 bp, synthetic construct
  source 1..17: mol_type = other DNA
gtggatttggtggctgt

SEQ ID NO: 174094 - DNA, 17 bp, synthetic construct
  source 1..17: mol_type = other DNA
tgtggatttggtggctg

SEQ ID NO: 174095 - DNA, 17 bp, synthetic construct
  source 1..17: mol_type = other DNA
ctgtggatttggtggct

SEQ ID NO: 174096 - DNA, 17 bp, synthetic construct
  source 1..17: mol_type = other DNA
gctgtggatttggtggc

SEQ ID NO: 174097 - DNA, 17 bp, synthetic construct
  source 1..17: mol_type = other DNA
agctgtggatttggtgg

SEQ ID NO: 174098 - DNA, 17 bp, synthetic construct
  source 1..17: mol_type = other DNA
tagctgtggatttggtg

SEQ ID NO: 174099 - DNA, 17 bp, synthetic construct
  source 1..17: mol_type = other DNA
gtagctgtggatttggt

SEQ ID NO: 174100 - DNA, 17 bp, synthetic construct
  source 1..17: mol_type = other DNA
ggtagctgtggatttgg

SEQ ID NO: 174101 - DNA, 17 bp, synthetic construct
  source 1..17: mol_type = other DNA
tggtagctgtggatttg

SEQ ID NO: 174102 - DNA, 17 bp, synthetic construct
  source 1..17: mol_type = other DNA
ctggtagctgtggattt

SEQ ID NO: 174103 - DNA, 17 bp, synthetic construct
  source 1..17: mol_type = other DNA
gctggtagctgtggatt

SEQ ID NO: 174104 - DNA, 17 bp, synthetic construct
  source 1..17: mol_type = other DNA
cgctggtagctgtggat

SEQ ID NO: 174105 - DNA, 17 bp, synthetic construct
  source 1..17: mol_type = other DNA
acgctggtagctgtgga

SEQ ID NO: 174106 - DNA, 17 bp, synthetic construct
  source 1..17: mol_type = other DNA
aacgctggtagctgtgg

SEQ ID NO: 174107 - DNA, 17 bp, synthetic construct
  source 1..17: mol_type = other DNA
taacgctggtagctgtg

SEQ ID NO: 174108 - DNA, 17 bp, synthetic construct
  source 1..17: mol_type = other DNA
gtaacgctggtagctgt

SEQ ID NO: 174109 - DNA, 17 bp, synthetic construct
  source 1..17: mol_type = other DNA
tgtaacgctggtagctg

SEQ ID NO: 174110 - DNA, 17 bp, synthetic construct
  source 1..17: mol_type = other DNA
gtgtaacgctggtagct

SEQ ID NO: 174111 - DNA, 17 bp, synthetic construct
  source 1..17: mol_type = other DNA
ggtgtaacgctggtagc

SEQ ID NO: 174112 - DNA, 17 bp, synthetic construct
  source 1..17: mol_type = other DNA
gggtgtaacgctggtag

SEQ ID NO: 174113 - DNA, 17 bp, synthetic construct
  source 1..17: mol_type = other DNA
tgggtgtaacgctggta

SEQ ID NO: 174114 - DNA, 17 bp, synthetic construct
  source 1..17: mol_type = other DNA
atgggtgtaacgctggt

SEQ ID NO: 174115 - DNA, 17 bp, synthetic construct
  source 1..17: mol_type = other DNA
gatgggtgtaacgctgg

SEQ ID NO: 174116 - DNA, 17 bp, synthetic construct
  source 1..17: mol_type = other DNA
ggatgggtgtaacgctg

SEQ ID NO: 174117 - DNA, 17 bp, synthetic construct
  source 1..17: mol_type = other DNA
gggatgggtgtaacgct

SEQ ID NO: 174118 - DNA, 17 bp, synthetic construct
  source 1..17: mol_type = other DNA
ggggatgggtgtaacgc

SEQ ID NO: 174119 - DNA, 17 bp, synthetic construct
  source 1..17: mol_type = other DNA
aggggatgggtgtaacg

SEQ ID NO: 174120 - DNA, 17 bp, synthetic construct
  source 1..17: mol_type = other DNA
gaggggatgggtgtaac

SEQ ID NO: 174121 - DNA, 17 bp, synthetic construct
  source 1..17: mol_type = other DNA
ggaggggatgggtgtaa

SEQ ID NO: 174122 - DNA, 17 bp, synthetic construct
  source 1..17: mol_type = other DNA
aggaggggatgggtgta

SEQ ID NO: 174123 - DNA, 17 bp, synthetic construct
  source 1..17: mol_type = other DNA
gaggaggggatgggtgt

SEQ ID NO: 174124 - DNA, 17 bp, synthetic construct
  source 1..17: mol_type = other DNA
ggaggaggggatgggtg

SEQ ID NO: 174125 - DNA, 17 bp, synthetic construct
  source 1..17: mol_type = other DNA
tggaggaggggatgggt

SEQ ID NO: 174126 - DNA, 17 bp, synthetic construct
  source 1..17: mol_type = other DNA
gtggaggaggggatggg

SEQ ID NO: 174127 - DNA, 17 bp, synthetic construct
  source 1..17: mol_type = other DNA
ggtggaggaggggatgg

SEQ ID NO: 174128 - DNA, 17 bp, synthetic construct
  source 1..17: mol_type = other DNA
gggtggaggaggggatg

SEQ ID NO: 174129 - DNA, 17 bp, synthetic construct
  source 1..17: mol_type = other DNA
agggtggaggaggggat

SEQ ID NO: 174130 - DNA, 17 bp, synthetic construct
  source 1..17: mol_type = other DNA
aagggtggaggagggga

SEQ ID NO: 174131 - DNA, 17 bp, synthetic construct
  source 1..17: mol_type = other DNA
caagggtggaggagggg

SEQ ID NO: 174132 - DNA, 17 bp, synthetic construct
  source 1..17: mol_type = other DNA
ccaagggtggaggaggg

SEQ ID NO: 174133 - DNA, 17 bp, synthetic construct
  source 1..17: mol_type = other DNA
cccaagggtggaggagg

SEQ ID NO: 174134 - DNA, 17 bp, synthetic construct
  source 1..17: mol_type = other DNA
tcccaagggtggaggag

SEQ ID NO: 174135 - DNA, 17 bp, synthetic construct
  source 1..17: mol_type = other DNA
gtcccaagggtggagga

SEQ ID NO: 174136 - DNA, 17 bp, synthetic construct
  source 1..17: mol_type = other DNA
ggtcccaagggtggagg

SEQ ID NO: 174137 - DNA, 17 bp, synthetic construct
  source 1..17: mol_type = other DNA
tggtcccaagggtggag

SEQ ID NO: 174138 - DNA, 17 bp, synthetic construct
  source 1..17: mol_type = other DNA
gtggtcccaagggtgga

SEQ ID NO: 174139 - DNA, 17 bp, synthetic construct
  source 1..17: mol_type = other DNA
ggtggtcccaagggtgg

SEQ ID NO: 174140 - DNA, 17 bp, synthetic construct
  source 1..17: mol_type = other DNA
cggtggtcccaagggtg

SEQ ID NO: 174141 - DNA, 17 bp, synthetic construct
  source 1..17: mol_type = other DNA
ccggtggtcccaagggt

SEQ ID NO: 174142 - DNA, 17 bp, synthetic construct
  source 1..17: mol_type = other DNA
cccggtggtcccaaggg

SEQ ID NO: 174143 - DNA, 17 bp, synthetic construct
  source 1..17: mol_type = other DNA
tcccggtggtcccaagg

SEQ ID NO: 174144 - DNA, 17 bp, synthetic construct
  source 1..17: mol_type = other DNA
gtcccggtggtcccaag

SEQ ID NO: 174145 - DNA, 17 bp, synthetic construct
  source 1..17: mol_type = other DNA
ggtcccggtggtcccaa

SEQ ID NO: 174146 - DNA, 17 bp, synthetic construct
  source 1..17: mol_type = other DNA
gggtcccggtggtccca

SEQ ID NO: 174147 - DNA, 17 bp, synthetic construct
  source 1..17: mol_type = other DNA
agggtcccggtggtccc

SEQ ID NO: 174148 - DNA, 17 bp, synthetic construct
  source 1..17: mol_type = other DNA
gagggtcccggtggtcc

SEQ ID NO: 174149 - DNA, 17 bp, synthetic construct
  source 1..17: mol_type = other DNA
ggagggtcccggtggtc

SEQ ID NO: 174150 - DNA, 17 bp, synthetic construct
  source 1..17: mol_type = other DNA
gggagggtcccggtggt

SEQ ID NO: 174151 - DNA, 17 bp, synthetic construct
  source 1..17: mol_type = other DNA
tgggagggtcccggtgg

SEQ ID NO: 174152 - DNA, 17 bp, synthetic construct
  source 1..17: mol_type = other DNA
ctgggagggtcccggtg

SEQ ID NO: 174153 - DNA, 17 bp, synthetic construct
  source 1..17: mol_type = other DNA
tctgggagggtcccggt

SEQ ID NO: 174154 - DNA, 17 bp, synthetic construct
  source 1..17: mol_type = other DNA
ttctgggagggtcccgg

SEQ ID NO: 174155 - DNA, 17 bp, synthetic construct
  source 1..17: mol_type = other DNA
gttctgggagggtcccg

SEQ ID NO: 174156 - DNA, 17 bp, synthetic construct
  source 1..17: mol_type = other DNA
tgttctgggagggtccc

SEQ ID NO: 174157 - DNA, 17 bp, synthetic construct
  source 1..17: mol_type = other DNA
ctgttctgggagggtcc

SEQ ID NO: 174158 - DNA, 17 bp, synthetic construct
  source 1..17: mol_type = other DNA
tctgttctgggagggtc

SEQ ID NO: 174159 - DNA, 17 bp, synthetic construct
  source 1..17: mol_type = other DNA
gtctgttctgggagggt

SEQ ID NO: 174160 - DNA, 17 bp, synthetic construct
  source 1..17: mol_type = other DNA
ggtctgttctgggaggg

SEQ ID NO: 174161 - DNA, 17 bp, synthetic construct
  source 1..17: mol_type = other DNA
tggtctgttctgggagg

SEQ ID NO: 174162 - DNA, 17 bp, synthetic construct
  source 1..17: mol_type = other DNA
gtggtctgttctgggag

SEQ ID NO: 174163 - DNA, 17 bp, synthetic construct
  source 1..17: mol_type = other DNA
ggtggtctgttctggga

SEQ ID NO: 174164 - DNA, 17 bp, synthetic construct
  source 1..17: mol_type = other DNA
tggtggtctgttctggg

SEQ ID NO: 174165 - DNA, 17 bp, synthetic construct
  source 1..17: mol_type = other DNA
gtggtggtctgttctgg

SEQ ID NO: 174166 - DNA, 17 bp, synthetic construct
  source 1..17: mol_type = other DNA
tgtggtggtctgttctg

SEQ ID NO: 174167 - DNA, 17 bp, synthetic construct
  source 1..17: mol_type = other DNA
gtgtggtggtctgttct

SEQ ID NO: 174168 - DNA, 17 bp, synthetic construct
  source 1..17: mol_type = other DNA
ggtgtggtggtctgttc

SEQ ID NO: 174169 - DNA, 17 bp, synthetic construct
  source 1..17: mol_type = other DNA
gggtgtggtggtctgtt

SEQ ID NO: 174170 - DNA, 17 bp, synthetic construct
  source 1..17: mol_type = other DNA
cgggtgtggtggtctgt

SEQ ID NO: 174171 - DNA, 17 bp, synthetic construct
  source 1..17: mol_type = other DNA
acgggtgtggtggtctg

SEQ ID NO: 174172 - DNA, 17 bp, synthetic construct
  source 1..17: mol_type = other DNA
cacgggtgtggtggtct

SEQ ID NO: 174173 - DNA, 17 bp, synthetic construct
  source 1..17: mol_type = other DNA
ccacgggtgtggtggtc

SEQ ID NO: 174174 - DNA, 17 bp, synthetic construct
  source 1..17: mol_type = other DNA
gccacgggtgtggtggt

SEQ ID NO: 174175 - DNA, 17 bp, synthetic construct
  source 1..17: mol_type = other DNA
ggccacgggtgtggtgg

SEQ ID NO: 174176 - DNA, 17 bp, synthetic construct
  source 1..17: mol_type = other DNA
tggccacgggtgtggtg

SEQ ID NO: 174177 - DNA, 17 bp, synthetic construct
  source 1..17: mol_type = other DNA
gtggccacgggtgtggt

SEQ ID NO: 174178 - DNA, 17 bp, synthetic construct
  source 1..17: mol_type = other DNA
ggtggccacgggtgtgg

SEQ ID NO: 174179 - DNA, 17 bp, synthetic construct
  source 1..17: mol_type = other DNA
tggtggccacgggtgtg

SEQ ID NO: 174180 - DNA, 17 bp, synthetic construct
  source 1..17: mol_type = other DNA
atggtggccacgggtgt

SEQ ID NO: 174181 - DNA, 17 bp, synthetic construct
  source 1..17: mol_type = other DNA
catggtggccacgggtg

SEQ ID NO: 174182 - DNA, 17 bp, synthetic construct
  source 1..17: mol_type = other DNA
acatggtggccacgggt

SEQ ID NO: 174183 - DNA, 17 bp, synthetic construct
  source 1..17: mol_type = other DNA
gacatggtggccacggg

SEQ ID NO: 174184 - DNA, 17 bp, synthetic construct
  source 1..17: mol_type = other DNA
ggacatggtggccacgg

SEQ ID NO: 174185 - DNA, 17 bp, synthetic construct
  source 1..17: mol_type = other DNA
tggacatggtggccacg

SEQ ID NO: 174186 - DNA, 17 bp, synthetic construct
  source 1..17: mol_type = other DNA
gtggacatggtggccac

SEQ ID NO: 174187 - DNA, 17 bp, synthetic construct
  source 1..17: mol_type = other DNA
tgtggacatggtggcca

SEQ ID NO: 174188 - DNA, 17 bp, synthetic construct
  source 1..17: mol_type = other DNA
ttgtggacatggtggcc

SEQ ID NO: 174189 - DNA, 17 bp, synthetic construct
  source 1..17: mol_type = other DNA
attgtggacatggtggc

SEQ ID NO: 174190 - DNA, 17 bp, synthetic construct
  source 1..17: mol_type = other DNA
gattgtggacatggtgg

SEQ ID NO: 174191 - DNA, 17 bp, synthetic construct
  source 1..17: mol_type = other DNA
ggattgtggacatggtg

SEQ ID NO: 174192 - DNA, 17 bp, synthetic construct
  source 1..17: mol_type = other DNA
tggattgtggacatggt

SEQ ID NO: 174193 - DNA, 17 bp, synthetic construct
  source 1..17: mol_type = other DNA
gtggattgtggacatgg

SEQ ID NO: 174194 - DNA, 17 bp, synthetic construct
  source 1..17: mol_type = other DNA
ggtggattgtggacatg

SEQ ID NO: 174195 - DNA, 17 bp, synthetic construct
  source 1..17: mol_type = other DNA
gggtggattgtggacat

SEQ ID NO: 174196 - DNA, 17 bp, synthetic construct
  source 1..17: mol_type = other DNA
ggggtggattgtggaca

SEQ ID NO: 174197 - DNA, 17 bp, synthetic construct
  source 1..17: mol_type = other DNA
aggggtggattgtggac

SEQ ID NO: 174198 - DNA, 17 bp, synthetic construct
  source 1..17: mol_type = other DNA
gaggggtggattgtgga

SEQ ID NO: 174199 - DNA, 17 bp, synthetic construct
  source 1..17: mol_type = other DNA
ggaggggtggattgtgg

SEQ ID NO: 174200 - DNA, 17 bp, synthetic construct
  source 1..17: mol_type = other DNA
aggaggggtggattgtg

SEQ ID NO: 174201 - DNA, 17 bp, synthetic construct
  source 1..17: mol_type = other DNA
gaggaggggtggattgt

SEQ ID NO: 174202 - DNA, 17 bp, synthetic construct
  source 1..17: mol_type = other DNA
ggaggaggggtggattg

SEQ ID NO: 174203 - DNA, 17 bp, synthetic construct
  source 1..17: mol_type = other DNA
tggaggaggggtggatt

SEQ ID NO: 174204 - DNA, 17 bp, synthetic construct
  source 1..17: mol_type = other DNA
gtggaggaggggtggat

SEQ ID NO: 174205 - DNA, 17 bp, synthetic construct
  source 1..17: mol_type = other DNA
agtggaggaggggtgga

SEQ ID NO: 174206 - DNA, 17 bp, synthetic construct
  source 1..17: mol_type = other DNA
gagtggaggaggggtgg

SEQ ID NO: 174207 - DNA, 17 bp, synthetic construct
  source 1..17: mol_type = other DNA
ggagtggaggaggggtg

SEQ ID NO: 174208 - DNA, 17 bp, synthetic construct
  source 1..17: mol_type = other DNA
cggagtggaggaggggt

SEQ ID NO: 174209 - DNA, 17 bp, synthetic construct
  source 1..17: mol_type = other DNA
ccggagtggaggagggg

SEQ ID NO: 174210 - DNA, 17 bp, synthetic construct
  source 1..17: mol_type = other DNA
tccggagtggaggaggg

SEQ ID NO: 174211 - DNA, 17 bp, synthetic construct
  source 1..17: mol_type = other DNA
ctccggagtggaggagg

SEQ ID NO: 174212 - DNA, 17 bp, synthetic construct
  source 1..17: mol_type = other DNA
tctccggagtggaggag

SEQ ID NO: 174213 - DNA, 17 bp, synthetic construct
  source 1..17: mol_type = other DNA
gtctccggagtggagga

SEQ ID NO: 174214 - DNA, 17 bp, synthetic construct
  source 1..17: mol_type = other DNA
ggtctccggagtggagg

SEQ ID NO: 174215 - DNA, 17 bp, synthetic construct
  source 1..17: mol_type = other DNA
tggtctccggagtggag

SEQ ID NO: 174216 - DNA, 17 bp, synthetic construct
  source 1..17: mol_type = other DNA
gtggtctccggagtgga

SEQ ID NO: 174217 - DNA, 17 bp, synthetic construct
  source 1..17: mol_type = other DNA
ggtggtctccggagtgg

SEQ ID NO: 174218 - DNA, 17 bp, synthetic construct
  source 1..17: mol_type = other DNA
gggtggtctccggagtg

SEQ ID NO: 174219 - DNA, 17 bp, synthetic construct
  source 1..17: mol_type = other DNA
tgggtggtctccggagt

SEQ ID NO: 174220 - DNA, 17 bp, synthetic construct
  source 1..17: mol_type = other DNA
gtgggtggtctccggag

SEQ ID NO: 174221 - DNA, 17 bp, synthetic construct
  source 1..17: mol_type = other DNA
tgtgggtggtctccgga

SEQ ID NO: 174222 - DNA, 17 bp, synthetic construct
  source 1..17: mol_type = other DNA
gtgtgggtggtctccgg

SEQ ID NO: 174223 - DNA, 17 bp, synthetic construct
  source 1..17: mol_type = other DNA
ggtgtgggtggtctccg

SEQ ID NO: 174224 - DNA, 17 bp, synthetic construct
  source 1..17: mol_type = other DNA
aggtgtgggtggtctcc

SEQ ID NO: 174225 - DNA, 17 bp, synthetic construct
  source 1..17: mol_type = other DNA
gaggtgtgggtggtctc

SEQ ID NO: 174226 - DNA, 17 bp, synthetic construct
  source 1..17: mol_type = other DNA
ggaggtgtgggtggtct

SEQ ID NO: 174227 - DNA, 17 bp, synthetic construct
  source 1..17: mol_type = other DNA
tggaggtgtgggtggtc

SEQ ID NO: 174228 - DNA, 17 bp, synthetic construct
  source 1..17: mol_type = other DNA
gtggaggtgtgggtggt

SEQ ID NO: 174229 - DNA, 17 bp, synthetic construct
  source 1..17: mol_type = other DNA
tgtggaggtgtgggtgg

SEQ ID NO: 174230 - DNA, 17 bp, synthetic construct
  source 1..17: mol_type = other DNA
ctgtggaggtgtgggtg

SEQ ID NO: 174231 - DNA, 17 bp, synthetic construct
  source 1..17: mol_type = other DNA
actgtggaggtgtgggt

SEQ ID NO: 174232 - DNA, 17 bp, synthetic construct
  source 1..17: mol_type = other DNA
cactgtggaggtgtggg

SEQ ID NO: 174233 - DNA, 17 bp, synthetic construct
  source 1..17: mol_type = other DNA
gcactgtggaggtgtgg

SEQ ID NO: 174234 - DNA, 17 bp, synthetic construct
  source 1..17: mol_type = other DNA
agcactgtggaggtgtg

SEQ ID NO: 174235 - DNA, 17 bp, synthetic construct
  source 1..17: mol_type = other DNA
cagcactgtggaggtgt

SEQ ID NO: 174236 - DNA, 17 bp, synthetic construct
  source 1..17: mol_type = other DNA
tcagcactgtggaggtg

SEQ ID NO: 174237 - DNA, 17 bp, synthetic construct
  source 1..17: mol_type = other DNA
gtcagcactgtggaggt

SEQ ID NO: 174238 - DNA, 17 bp, synthetic construct
  source 1..17: mol_type = other DNA
ggtcagcactgtggagg

SEQ ID NO: 174239 - DNA, 17 bp, synthetic construct
  source 1..17: mol_type = other DNA
tggtcagcactgtggag

SEQ ID NO: 174240 - DNA, 17 bp, synthetic construct
  source 1..17: mol_type = other DNA
gtggtcagcactgtgga

SEQ ID NO: 174241 - DNA, 17 bp, synthetic construct
  source 1..17: mol_type = other DNA
cgtggtcagcactgtgg

SEQ ID NO: 174242 - DNA, 17 bp, synthetic construct
  source 1..17: mol_type = other DNA
tcgtggtcagcactgtg

SEQ ID NO: 174243 - DNA, 17 bp, synthetic construct
  source 1..17: mol_type = other DNA
ttcgtggtcagcactgt

SEQ ID NO: 174244 - DNA, 17 bp, synthetic construct
  source 1..17: mol_type = other DNA
cttcgtggtcagcactg

SEQ ID NO: 174245 - DNA, 17 bp, synthetic construct
  source 1..17: mol_type = other DNA
ccttcgtggtcagcact

SEQ ID NO: 174246 - DNA, 17 bp, synthetic construct
  source 1..17: mol_type = other DNA
gccttcgtggtcagcac

SEQ ID NO: 174247 - DNA, 17 bp, synthetic construct
  source 1..17: mol_type = other DNA
ggccttcgtggtcagca

SEQ ID NO: 174248 - DNA, 17 bp, synthetic construct
  source 1..17: mol_type = other DNA
tggccttcgtggtcagc

SEQ ID NO: 174249 - DNA, 17 bp, synthetic construct
  source 1..17: mol_type = other DNA
gtggccttcgtggtcag

SEQ ID NO: 174250 - DNA, 17 bp, synthetic construct
  source 1..17: mol_type = other DNA
ggtggccttcgtggtca

SEQ ID NO: 174251 - DNA, 17 bp, synthetic construct
  source 1..17: mol_type = other DNA
tggtggccttcgtggtc

SEQ ID NO: 174252 - DNA, 17 bp, synthetic construct
  source 1..17: mol_type = other DNA
gtggtggccttcgtggt

SEQ ID NO: 174253 - DNA, 17 bp, synthetic construct
  source 1..17: mol_type = other DNA
cgtggtggccttcgtgg

SEQ ID NO: 174254 - DNA, 17 bp, synthetic construct
  source 1..17: mol_type = other DNA
tcgtggtggccttcgtg

SEQ ID NO: 174255 - DNA, 17 bp, synthetic construct
  source 1..17: mol_type = other DNA
gtcgtggtggccttcgt

SEQ ID NO: 174256 - DNA, 17 bp, synthetic construct
  source 1..17: mol_type = other DNA
tgtcgtggtggccttcg

SEQ ID NO: 174257 - DNA, 17 bp, synthetic construct
  source 1..17: mol_type = other DNA
ttgtcgtggtggccttc

SEQ ID NO: 174258 - DNA, 17 bp, synthetic construct
  source 1..17: mol_type = other DNA
cttgtcgtggtggcctt

SEQ ID NO: 174259 - DNA, 17 bp, synthetic construct
  source 1..17: mol_type = other DNA
ccttgtcgtggtggcct

SEQ ID NO: 174260 - DNA, 17 bp, synthetic construct
  source 1..17: mol_type = other DNA
cccttgtcgtggtggcc

SEQ ID NO: 174261 - DNA, 17 bp, synthetic construct
  source 1..17: mol_type = other DNA
gcccttgtcgtggtggc

SEQ ID NO: 174262 - DNA, 17 bp, synthetic construct
  source 1..17: mol_type = other DNA
ggcccttgtcgtggtgg

SEQ ID NO: 174263 - DNA, 17 bp, synthetic construct
  source 1..17: mol_type = other DNA
tggcccttgtcgtggtg

SEQ ID NO: 174264 - DNA, 17 bp, synthetic construct
  source 1..17: mol_type = other DNA
gtggcccttgtcgtggt

SEQ ID NO: 174265 - DNA, 17 bp, synthetic construct
  source 1..17: mol_type = other DNA
ggtggcccttgtcgtgg

SEQ ID NO: 174266 - DNA, 17 bp, synthetic construct
  source 1..17: mol_type = other DNA
tggtggcccttgtcgtg

SEQ ID NO: 174267 - DNA, 17 bp, synthetic construct
  source 1..17: mol_type = other DNA
ctggtggcccttgtcgt

SEQ ID NO: 174268 - DNA, 17 bp, synthetic construct
  source 1..17: mol_type = other DNA
actggtggcccttgtcg

SEQ ID NO: 174269 - DNA, 17 bp, synthetic construct
  source 1..17: mol_type = other DNA
aactggtggcccttgtc

SEQ ID NO: 174270 - DNA, 17 bp, synthetic construct
  source 1..17: mol_type = other DNA
gaactggtggcccttgt

SEQ ID NO: 174271 - DNA, 17 bp, synthetic construct
  source 1..17: mol_type = other DNA
ggaactggtggcccttg

SEQ ID NO: 174272 - DNA, 17 bp, synthetic construct
  source 1..17: mol_type = other DNA
tggaactggtggccctt

SEQ ID NO: 174273 - DNA, 17 bp, synthetic construct
  source 1..17: mol_type = other DNA
gtggaactggtggccct

SEQ ID NO: 174274 - DNA, 17 bp, synthetic construct
  source 1..17: mol_type = other DNA
cgtggaactggtggccc

SEQ ID NO: 174275 - DNA, 17 bp, synthetic construct
  source 1..17: mol_type = other DNA
acgtggaactggtggcc

SEQ ID NO: 174276 - DNA, 17 bp, synthetic construct
  source 1..17: mol_type = other DNA
gacgtggaactggtggc

SEQ ID NO: 174277 - DNA, 17 bp, synthetic construct
  source 1..17: mol_type = other DNA
ggacgtggaactggtgg

SEQ ID NO: 174278 - DNA, 17 bp, synthetic construct
  source 1..17: mol_type = other DNA
tggacgtggaactggtg

SEQ ID NO: 174279 - DNA, 17 bp, synthetic construct
  source 1..17: mol_type = other DNA
gtggacgtggaactggt

SEQ ID NO: 174280 - DNA, 17 bp, synthetic construct
  source 1..17: mol_type = other DNA
ggtggacgtggaactgg

SEQ ID NO: 174281 - DNA, 17 bp, synthetic construct
  source 1..17: mol_type = other DNA
gggtggacgtggaactg

SEQ ID NO: 174282 - DNA, 17 bp, synthetic construct
  source 1..17: mol_type = other DNA
ggggtggacgtggaact

SEQ ID NO: 174283 - DNA, 17 bp, synthetic construct
  source 1..17: mol_type = other DNA
gggggtggacgtggaac

SEQ ID NO: 174284 - DNA, 17 bp, synthetic construct
  source 1..17: mol_type = other DNA
agggggtggacgtggaa

SEQ ID NO: 174285 - DNA, 17 bp, synthetic construct
  source 1..17: mol_type = other DNA
gagggggtggacgtgga

SEQ ID NO: 174286 - DNA, 17 bp, synthetic construct
  source 1..17: mol_type = other DNA
ggagggggtggacgtgg

SEQ ID NO: 174287 - DNA, 17 bp, synthetic construct
  source 1..17: mol_type = other DNA
aggagggggtggacgtg

SEQ ID NO: 174288 - DNA, 17 bp, synthetic construct
  source 1..17: mol_type = other DNA
gaggagggggtggacgt

SEQ ID NO: 174289 - DNA, 17 bp, synthetic construct
  source 1..17: mol_type = other DNA
ggaggagggggtggacg

SEQ ID NO: 174290 - DNA, 17 bp, synthetic construct
  source 1..17: mol_type = other DNA
tggaggagggggtggac

SEQ ID NO: 174291 - DNA, 17 bp, synthetic construct
  source 1..17: mol_type = other DNA
gtggaggagggggtgga

SEQ ID NO: 174292 - DNA, 17 bp, synthetic construct
  source 1..17: mol_type = other DNA
agtggaggagggggtgg

SEQ ID NO: 174293 - DNA, 17 bp, synthetic construct
  source 1..17: mol_type = other DNA
gagtggaggagggggtg

SEQ ID NO: 174294 - DNA, 17 bp, synthetic construct
  source 1..17: mol_type = other DNA
ggagtggaggagggggt

SEQ ID NO: 174295 - DNA, 17 bp, synthetic construct
  source 1..17: mol_type = other DNA
cggagtggaggaggggg

SEQ ID NO: 174296 - DNA, 17 bp, synthetic construct
  source 1..17: mol_type = other DNA
ccggagtggaggagggg

SEQ ID NO: 174297 - DNA, 17 bp, synthetic construct
  source 1..17: mol_type = other DNA
cccggagtggaggaggg

SEQ ID NO: 174298 - DNA, 17 bp, synthetic construct
  source 1..17: mol_type = other DNA
ccccggagtggaggagg

SEQ ID NO: 174299 - DNA, 17 bp, synthetic construct
  source 1..17: mol_type = other DNA
tccccggagtggaggag

SEQ ID NO: 174300 - DNA, 17 bp, synthetic construct
  source 1..17: mol_type = other DNA
gtccccggagtggagga

SEQ ID NO: 174301 - DNA, 17 bp, synthetic construct
  source 1..17: mol_type = other DNA
cgtccccggagtggagg

SEQ ID NO: 174302 - DNA, 17 bp, synthetic construct
  source 1..17: mol_type = other DNA
tcgtccccggagtggag

SEQ ID NO: 174303 - DNA, 17 bp, synthetic construct
  source 1..17: mol_type = other DNA
gtcgtccccggagtgga

SEQ ID NO: 174304 - DNA, 17 bp, synthetic construct
  source 1..17: mol_type = other DNA
ggtcgtccccggagtgg

SEQ ID NO: 174305 - DNA, 17 bp, synthetic construct
  source 1..17: mol_type = other DNA
aggtcgtccccggagtg

SEQ ID NO: 174306 - DNA, 17 bp, synthetic construct
  source 1..17: mol_type = other DNA
caggtcgtccccggagt

SEQ ID NO: 174307 - DNA, 17 bp, synthetic construct
  source 1..17: mol_type = other DNA
ccaggtcgtccccggag

SEQ ID NO: 174308 - DNA, 17 bp, synthetic construct
  source 1..17: mol_type = other DNA
tccaggtcgtccccgga

SEQ ID NO: 174309 - DNA, 17 bp, synthetic construct
  source 1..17: mol_type = other DNA
atccaggtcgtccccgg

SEQ ID NO: 174310 - DNA, 17 bp, synthetic construct
  source 1..17: mol_type = other DNA
gatccaggtcgtccccg

SEQ ID NO: 174311 - DNA, 17 bp, synthetic construct
  source 1..17: mol_type = other DNA
ggatccaggtcgtcccc

SEQ ID NO: 174312 - DNA, 17 bp, synthetic construct
  source 1..17: mol_type = other DNA
aggatccaggtcgtccc

SEQ ID NO: 174313 - DNA, 17 bp, synthetic construct
  source 1..17: mol_type = other DNA
gaggatccaggtcgtcc

SEQ ID NO: 174314 - DNA, 17 bp, synthetic construct
  source 1..17: mol_type = other DNA
tgaggatccaggtcgtc

SEQ ID NO: 174315 - DNA, 17 bp, synthetic construct
  source 1..17: mol_type = other DNA
gtgaggatccaggtcgt

SEQ ID NO: 174316 - DNA, 17 bp, synthetic construct
  source 1..17: mol_type = other DNA
tgtgaggatccaggtcg

SEQ ID NO: 174317 - DNA, 17 bp, synthetic construct
  source 1..17: mol_type = other DNA
ctgtgaggatccaggtc

SEQ ID NO: 174318 - DNA, 17 bp, synthetic construct
  source 1..17: mol_type = other DNA
tctgtgaggatccaggt

SEQ ID NO: 174319 - DNA, 17 bp, synthetic construct
  source 1..17: mol_type = other DNA
ctctgtgaggatccagg

SEQ ID NO: 174320 - DNA, 17 bp, synthetic construct
  source 1..17: mol_type = other DNA
gctctgtgaggatccag

SEQ ID NO: 174321 - DNA, 17 bp, synthetic construct
  source 1..17: mol_type = other DNA
agctctgtgaggatcca

SEQ ID NO: 174322 - DNA, 17 bp, synthetic construct
  source 1..17: mol_type = other DNA
cagctctgtgaggatcc

SEQ ID NO: 174323 - DNA, 17 bp, synthetic construct
  source 1..17: mol_type = other DNA
tcagctctgtgaggatc

SEQ ID NO: 174324 - DNA, 17 bp, synthetic construct
  source 1..17: mol_type = other DNA
gtcagctctgtgaggat

SEQ ID NO: 174325 - DNA, 17 bp, synthetic construct
  source 1..17: mol_type = other DNA
ggtcagctctgtgagga

SEQ ID NO: 174326 - DNA, 17 bp, synthetic construct
  source 1..17: mol_type = other DNA
tggtcagctctgtgagg

SEQ ID NO: 174327 - DNA, 17 bp, synthetic construct
  source 1..17: mol_type = other DNA
gtggtcagctctgtgag

SEQ ID NO: 174328 - DNA, 17 bp, synthetic construct
  source 1..17: mol_type = other DNA
tgtggtcagctctgtga

SEQ ID NO: 174329 - DNA, 17 bp, synthetic construct
  source 1..17: mol_type = other DNA
ctgtggtcagctctgtg

SEQ ID NO: 174330 - DNA, 17 bp, synthetic construct
  source 1..17: mol_type = other DNA
gctgtggtcagctctgt

SEQ ID NO: 174331 - DNA, 17 bp, synthetic construct
  source 1..17: mol_type = other DNA
tgctgtggtcagctctg

SEQ ID NO: 174332 - DNA, 17 bp, synthetic construct
  source 1..17: mol_type = other DNA
ctgctgtggtcagctct

SEQ ID NO: 174333 - DNA, 17 bp, synthetic construct
  source 1..17: mol_type = other DNA
gctgctgtggtcagctc

SEQ ID NO: 174334 - DNA, 17 bp, synthetic construct
  source 1..17: mol_type = other DNA
ggctgctgtggtcagct

SEQ ID NO: 174335 - DNA, 17 bp, synthetic construct
  source 1..17: mol_type = other DNA
tggctgctgtggtcagc

SEQ ID NO: 174336 - DNA, 17 bp, synthetic construct
  source 1..17: mol_type = other DNA
gtggctgctgtggtcag

SEQ ID NO: 174337 - DNA, 17 bp, synthetic construct
  source 1..17: mol_type = other DNA
agtggctgctgtggtca

SEQ ID NO: 174338 - DNA, 17 bp, synthetic construct
  source 1..17: mol_type = other DNA
tagtggctgctgtggtc

SEQ ID NO: 174339 - DNA, 17 bp, synthetic construct
  source 1..17: mol_type = other DNA
gtagtggctgctgtggt

SEQ ID NO: 174340 - DNA, 17 bp, synthetic construct
  source 1..17: mol_type = other DNA
tgtagtggctgctgtgg

SEQ ID NO: 174341 - DNA, 17 bp, synthetic construct
  source 1..17: mol_type = other DNA
ttgtagtggctgctgtg

SEQ ID NO: 174342 - DNA, 17 bp, synthetic construct
  source 1..17: mol_type = other DNA
gttgtagtggctgctgt

SEQ ID NO: 174343 - DNA, 17 bp, synthetic construct
  source 1..17: mol_type = other DNA
agttgtagtggctgctg

SEQ ID NO: 174344 - DNA, 17 bp, synthetic construct
  source 1..17: mol_type = other DNA
cagttgtagtggctgct

SEQ ID NO: 174345 - DNA, 17 bp, synthetic construct
  source 1..17: mol_type = other DNA
gcagttgtagtggctgc

SEQ ID NO: 174346 - DNA, 17 bp, synthetic construct
  source 1..17: mol_type = other DNA
tgcagttgtagtggctg

SEQ ID NO: 174347 - DNA, 17 bp, synthetic construct
  source 1..17: mol_type = other DNA
ctgcagttgtagtggct

SEQ ID NO: 174348 - DNA, 17 bp, synthetic construct
  source 1..17: mol_type = other DNA
gctgcagttgtagtggc

SEQ ID NO: 174349 - DNA, 17 bp, synthetic construct
  source 1..17: mol_type = other DNA
ggctgcagttgtagtgg

SEQ ID NO: 174350 - DNA, 17 bp, synthetic construct
  source 1..17: mol_type = other DNA
tggctgcagttgtagtg

SEQ ID NO: 174351 - DNA, 17 bp, synthetic construct
  source 1..17: mol_type = other DNA
gtggctgcagttgtagt

SEQ ID NO: 174352 - DNA, 17 bp, synthetic construct
  source 1..17: mol_type = other DNA
agtggctgcagttgtag

SEQ ID NO: 174353 - DNA, 17 bp, synthetic construct
  source 1..17: mol_type = other DNA
cagtggctgcagttgta

SEQ ID NO: 174354 - DNA, 17 bp, synthetic construct
  source 1..17: mol_type = other DNA
ccagtggctgcagttgt

SEQ ID NO: 174355 - DNA, 17 bp, synthetic construct
  source 1..17: mol_type = other DNA
gccagtggctgcagttg

SEQ ID NO: 174356 - DNA, 17 bp, synthetic construct
  source 1..17: mol_type = other DNA
ggccagtggctgcagtt

SEQ ID NO: 174357 - DNA, 17 bp, synthetic construct
  source 1..17: mol_type = other DNA
gggccagtggctgcagt

SEQ ID NO: 174358 - DNA, 17 bp, synthetic construct
  source 1..17: mol_type = other DNA
ggggccagtggctgcag

SEQ ID NO: 174359 - DNA, 17 bp, synthetic construct
  source 1..17: mol_type = other DNA
tggggccagtggctgca

SEQ ID NO: 174360 - DNA, 17 bp, synthetic construct
  source 1..17: mol_type = other DNA
gtggggccagtggctgc

SEQ ID NO: 174361 - DNA, 17 bp, synthetic construct
  source 1..17: mol_type = other DNA
cgtggggccagtggctg

SEQ ID NO: 174362 - DNA, 17 bp, synthetic construct
  source 1..17: mol_type = other DNA
ccgtggggccagtggct

SEQ ID NO: 174363 - DNA, 17 bp, synthetic construct
  source 1..17: mol_type = other DNA
gccgtggggccagtggc

SEQ ID NO: 174364 - DNA, 17 bp, synthetic construct
  source 1..17: mol_type = other DNA
ggccgtggggccagtgg

SEQ ID NO: 174365 - DNA, 17 bp, synthetic construct
  source 1..17: mol_type = other DNA
tggccgtggggccagtg

SEQ ID NO: 174366 - DNA, 17 bp, synthetic construct
  source 1..17: mol_type = other DNA
gtggccgtggggccagt

SEQ ID NO: 174367 - DNA, 17 bp, synthetic construct
  source 1..17: mol_type = other DNA
ggtggccgtggggccag

SEQ ID NO: 174368 - DNA, 17 bp, synthetic construct
  source 1..17: mol_type = other DNA
gggtggccgtggggcca

SEQ ID NO: 174369 - DNA, 17 bp, synthetic construct
  source 1..17: mol_type = other DNA
ggggtggccgtggggcc

SEQ ID NO: 174370 - DNA, 17 bp, synthetic construct
  source 1..17: mol_type = other DNA
cggggtggccgtggggc

SEQ ID NO: 174371 - DNA, 17 bp, synthetic construct
  source 1..17: mol_type = other DNA
acggggtggccgtgggg

SEQ ID NO: 174372 - DNA, 17 bp, synthetic construct
  source 1..17: mol_type = other DNA
gacggggtggccgtggg

SEQ ID NO: 174373 - DNA, 17 bp, synthetic construct
  source 1..17: mol_type = other DNA
ggacggggtggccgtgg

SEQ ID NO: 174374 - DNA, 17 bp, synthetic construct
  source 1..17: mol_type = other DNA
aggacggggtggccgtg

SEQ ID NO: 174375 - DNA, 17 bp, synthetic construct
  source 1..17: mol_type = other DNA
gaggacggggtggccgt

SEQ ID NO: 174376 - DNA, 17 bp, synthetic construct
  source 1..17: mol_type = other DNA
ggaggacggggtggccg

SEQ ID NO: 174377 - DNA, 17 bp, synthetic construct
  source 1..17: mol_type = other DNA
tggaggacggggtggcc

SEQ ID NO: 174378 - DNA, 17 bp, synthetic construct
  source 1..17: mol_type = other DNA
gtggaggacggggtggc

SEQ ID NO: 174379 - DNA, 17 bp, synthetic construct
  source 1..17: mol_type = other DNA
ggtggaggacggggtgg

SEQ ID NO: 174380 - DNA, 17 bp, synthetic construct
  source 1..17: mol_type = other DNA
gggtggaggacggggtg

SEQ ID NO: 174381 - DNA, 17 bp, synthetic construct
  source 1..17: mol_type = other DNA
ggggtggaggacggggt

SEQ ID NO: 174382 - DNA, 17 bp, synthetic construct
  source 1..17: mol_type = other DNA
tggggtggaggacgggg

SEQ ID NO: 174383 - DNA, 17 bp, synthetic construct
  source 1..17: mol_type = other DNA
ctggggtggaggacggg

SEQ ID NO: 174384 - DNA, 17 bp, synthetic construct
  source 1..17: mol_type = other DNA
cctggggtggaggacgg

SEQ ID NO: 174385 - DNA, 17 bp, synthetic construct
  source 1..17: mol_type = other DNA
ccctggggtggaggacg

SEQ ID NO: 174386 - DNA, 17 bp, synthetic construct
  source 1..17: mol_type = other DNA
tccctggggtggaggac

SEQ ID NO: 174387 - DNA, 17 bp, synthetic construct
  source 1..17: mol_type = other DNA
gtccctggggtggagga

SEQ ID NO: 174388 - DNA, 17 bp, synthetic construct
  source 1..17: mol_type = other DNA
ggtccctggggtggagg

SEQ ID NO: 174389 - DNA, 17 bp, synthetic construct
  source 1..17: mol_type = other DNA
tggtccctggggtggag

SEQ ID NO: 174390 - DNA, 17 bp, synthetic construct
  source 1..17: mol_type = other DNA
gtggtccctggggtgga

SEQ ID NO: 174391 - DNA, 17 bp, synthetic construct
  source 1..17: mol_type = other DNA
ggtggtccctggggtgg

SEQ ID NO: 174392 - DNA, 17 bp, synthetic construct
  source 1..17: mol_type = other DNA
aggtggtccctggggtg

SEQ ID NO: 174393 - DNA, 17 bp, synthetic construct
  source 1..17: mol_type = other DNA
caggtggtccctggggt

SEQ ID NO: 174394 - DNA, 17 bp, synthetic construct
  source 1..17: mol_type = other DNA
ccaggtggtccctgggg

SEQ ID NO: 174395 - DNA, 17 bp, synthetic construct
  source 1..17: mol_type = other DNA
tccaggtggtccctggg

SEQ ID NO: 174396 - DNA, 17 bp, synthetic construct
  source 1..17: mol_type = other DNA
atccaggtggtccctgg

SEQ ID NO: 174397 - DNA, 17 bp, synthetic construct
  source 1..17: mol_type = other DNA
gatccaggtggtccctg

SEQ ID NO: 174398 - DNA, 17 bp, synthetic construct
  source 1..17: mol_type = other DNA
ggatccaggtggtccct

SEQ ID NO: 174399 - DNA, 17 bp, synthetic construct
  source 1..17: mol_type = other DNA
aggatccaggtggtccc

SEQ ID NO: 174400 - DNA, 17 bp, synthetic construct
  source 1..17: mol_type = other DNA
gaggatccaggtggtcc

SEQ ID NO: 174401 - DNA, 17 bp, synthetic construct
  source 1..17: mol_type = other DNA
tgaggatccaggtggtc

SEQ ID NO: 174402 - DNA, 17 bp, synthetic construct
  source 1..17: mol_type = other DNA
gtgaggatccaggtggt

SEQ ID NO: 174403 - DNA, 17 bp, synthetic construct
  source 1..17: mol_type = other DNA
tgtgaggatccaggtgg

SEQ ID NO: 174404 - DNA, 17 bp, synthetic construct
  source 1..17: mol_type = other DNA
ctgtgaggatccaggtg

SEQ ID NO: 174405 - DNA, 17 bp, synthetic construct
  source 1..17: mol_type = other DNA
tctgtgaggatccaggt

SEQ ID NO: 174406 - DNA, 17 bp, synthetic construct
  source 1..17: mol_type = other DNA
ctctgtgaggatccagg

SEQ ID NO: 174407 - DNA, 17 bp, synthetic construct
  source 1..17: mol_type = other DNA
gctctgtgaggatccag

SEQ ID NO: 174408 - DNA, 17 bp, synthetic construct
  source 1..17: mol_type = other DNA
agctctgtgaggatcca

SEQ ID NO: 174409 - DNA, 17 bp, synthetic construct
  source 1..17: mol_type = other DNA
cagctctgtgaggatcc

SEQ ID NO: 174410 - DNA, 17 bp, synthetic construct
  source 1..17: mol_type = other DNA
tcagctctgtgaggatc

SEQ ID NO: 174411 - DNA, 17 bp, synthetic construct
  source 1..17: mol_type = other DNA
gtcagctctgtgaggat

SEQ ID NO: 174412 - DNA, 17 bp, synthetic construct
  source 1..17: mol_type = other DNA
ggtcagctctgtgagga

SEQ ID NO: 174413 - DNA, 17 bp, synthetic construct
  source 1..17: mol_type = other DNA
tggtcagctctgtgagg

SEQ ID NO: 174414 - DNA, 17 bp, synthetic construct
  source 1..17: mol_type = other DNA
gtggtcagctctgtgag

SEQ ID NO: 174415 - DNA, 17 bp, synthetic construct
  source 1..17: mol_type = other DNA
tgtggtcagctctgtga

SEQ ID NO: 174416 - DNA, 17 bp, synthetic construct
  source 1..17: mol_type = other DNA
ttgtggtcagctctgtg

SEQ ID NO: 174417 - DNA, 17 bp, synthetic construct
  source 1..17: mol_type = other DNA
gttgtggtcagctctgt

SEQ ID NO: 174418 - DNA, 17 bp, synthetic construct
  source 1..17: mol_type = other DNA
tgttgtggtcagctctg

SEQ ID NO: 174419 - DNA, 17 bp, synthetic construct
  source 1..17: mol_type = other DNA
ctgttgtggtcagctct

SEQ ID NO: 174420 - DNA, 17 bp, synthetic construct
  source 1..17: mol_type = other DNA
gctgttgtggtcagctc

SEQ ID NO: 174421 - DNA, 17 bp, synthetic construct
  source 1..17: mol_type = other DNA
ggctgttgtggtcagct

SEQ ID NO: 174422 - DNA, 17 bp, synthetic construct
  source 1..17: mol_type = other DNA
tggctgttgtggtcagc

SEQ ID NO: 174423 - DNA, 17 bp, synthetic construct
  source 1..17: mol_type = other DNA
gtggctgttgtggtcag

SEQ ID NO: 174424 - DNA, 17 bp, synthetic construct
  source 1..17: mol_type = other DNA
agtggctgttgtggtca

SEQ ID NO: 174425 - DNA, 17 bp, synthetic construct
  source 1..17: mol_type = other DNA
tagtggctgttgtggtc

SEQ ID NO: 174426 - DNA, 17 bp, synthetic construct
  source 1..17: mol_type = other DNA
gtagtggctgttgtggt

SEQ ID NO: 174427 - DNA, 17 bp, synthetic construct
  source 1..17: mol_type = other DNA
cgtagtggctgttgtgg

SEQ ID NO: 174428 - DNA, 17 bp, synthetic construct
  source 1..17: mol_type = other DNA
tcgtagtggctgttgtg

SEQ ID NO: 174429 - DNA, 17 bp, synthetic construct
  source 1..17: mol_type = other DNA
gtcgtagtggctgttgt

SEQ ID NO: 174430 - DNA, 17 bp, synthetic construct
  source 1..17: mol_type = other DNA
agtcgtagtggctgttg

SEQ ID NO: 174431 - DNA, 17 bp, synthetic construct
  source 1..17: mol_type = other DNA
cagtcgtagtggctgtt

SEQ ID NO: 174432 - DNA, 17 bp, synthetic construct
  source 1..17: mol_type = other DNA
gcagtcgtagtggctgt

SEQ ID NO: 174433 - DNA, 17 bp, synthetic construct
  source 1..17: mol_type = other DNA
cgcagtcgtagtggctg

SEQ ID NO: 174434 - DNA, 17 bp, synthetic construct
  source 1..17: mol_type = other DNA
acgcagtcgtagtggct

SEQ ID NO: 174435 - DNA, 17 bp, synthetic construct
  source 1..17: mol_type = other DNA
gacgcagtcgtagtggc

SEQ ID NO: 174436 - DNA, 17 bp, synthetic construct
  source 1..17: mol_type = other DNA
ggacgcagtcgtagtgg

SEQ ID NO: 174437 - DNA, 17 bp, synthetic construct
  source 1..17: mol_type = other DNA
tggacgcagtcgtagtg

SEQ ID NO: 174438 - DNA, 17 bp, synthetic construct
  source 1..17: mol_type = other DNA
gtggacgcagtcgtagt

SEQ ID NO: 174439 - DNA, 17 bp, synthetic construct
  source 1..17: mol_type = other DNA
agtggacgcagtcgtag

SEQ ID NO: 174440 - DNA, 17 bp, synthetic construct
  source 1..17: mol_type = other DNA
cagtggacgcagtcgta

SEQ ID NO: 174441 - DNA, 17 bp, synthetic construct
  source 1..17: mol_type = other DNA
ccagtggacgcagtcgt

SEQ ID NO: 174442 - DNA, 17 bp, synthetic construct
  source 1..17: mol_type = other DNA
tccagtggacgcagtcg

SEQ ID NO: 174443 - DNA, 17 bp, synthetic construct
  source 1..17: mol_type = other DNA
atccagtggacgcagtc

SEQ ID NO: 174444 - DNA, 17 bp, synthetic construct
  source 1..17: mol_type = other DNA
gatccagtggacgcagt

SEQ ID NO: 174445 - DNA, 17 bp, synthetic construct
  source 1..17: mol_type = other DNA
ggatccagtggacgcag

SEQ ID NO: 174446 - DNA, 17 bp, synthetic construct
  source 1..17: mol_type = other DNA
tggatccagtggacgca

SEQ ID NO: 174447 - DNA, 17 bp, synthetic construct
  source 1..17: mol_type = other DNA
gtggatccagtggacgc

SEQ ID NO: 174448 - DNA, 17 bp, synthetic construct
  source 1..17: mol_type = other DNA
cgtggatccagtggacg

SEQ ID NO: 174449 - DNA, 17 bp, synthetic construct
  source 1..17: mol_type = other DNA
ccgtggatccagtggac

SEQ ID NO: 174450 - DNA, 17 bp, synthetic construct
  source 1..17: mol_type = other DNA
gccgtggatccagtgga

SEQ ID NO: 174451 - DNA, 17 bp, synthetic construct
  source 1..17: mol_type = other DNA
ggccgtggatccagtgg

SEQ ID NO: 174452 - DNA, 17 bp, synthetic construct
  source 1..17: mol_type = other DNA
tggccgtggatccagtg

SEQ ID NO: 174453 - DNA, 17 bp, synthetic construct
  source 1..17: mol_type = other DNA
gtggccgtggatccagt

SEQ ID NO: 174454 - DNA, 17 bp, synthetic construct
  source 1..17: mol_type = other DNA
ggtggccgtggatccag

SEQ ID NO: 174455 - DNA, 17 bp, synthetic construct
  source 1..17: mol_type = other DNA
gggtggccgtggatcca

SEQ ID NO: 174456 - DNA, 17 bp, synthetic construct
  source 1..17: mol_type = other DNA
ggggtggccgtggatcc

SEQ ID NO: 174457 - DNA, 17 bp, synthetic construct
  source 1..17: mol_type = other DNA
cggggtggccgtggatc

SEQ ID NO: 174458 - DNA, 17 bp, synthetic construct
  source 1..17: mol_type = other DNA
acggggtggccgtggat

SEQ ID NO: 174459 - DNA, 17 bp, synthetic construct
  source 1..17: mol_type = other DNA
gacggggtggccgtgga

SEQ ID NO: 174460 - DNA, 17 bp, synthetic construct
  source 1..17: mol_type = other DNA
ggacggggtggccgtgg

SEQ ID NO: 174461 - DNA, 17 bp, synthetic construct
  source 1..17: mol_type = other DNA
aggacggggtggccgtg

SEQ ID NO: 174462 - DNA, 17 bp, synthetic construct
  source 1..17: mol_type = other DNA
gaggacggggtggccgt

SEQ ID NO: 174463 - DNA, 17 bp, synthetic construct
  source 1..17: mol_type = other DNA
ggaggacggggtggccg

SEQ ID NO: 174464 - DNA, 17 bp, synthetic construct
  source 1..17: mol_type = other DNA
tggaggacggggtggcc

SEQ ID NO: 174465 - DNA, 17 bp, synthetic construct
  source 1..17: mol_type = other DNA
gtggaggacggggtggc

SEQ ID NO: 174466 - DNA, 17 bp, synthetic construct
  source 1..17: mol_type = other DNA
ggtggaggacggggtgg

SEQ ID NO: 174467 - DNA, 17 bp, synthetic construct
  source 1..17: mol_type = other DNA
gggtggaggacggggtg

SEQ ID NO: 174468 - DNA, 17 bp, synthetic construct
  source 1..17: mol_type = other DNA
ggggtggaggacggggt

SEQ ID NO: 174469 - DNA, 17 bp, synthetic construct
  source 1..17: mol_type = other DNA
tggggtggaggacgggg

SEQ ID NO: 174470 - DNA, 17 bp, synthetic construct
  source 1..17: mol_type = other DNA
ctggggtggaggacggg

SEQ ID NO: 174471 - DNA, 17 bp, synthetic construct
  source 1..17: mol_type = other DNA
cctggggtggaggacgg

SEQ ID NO: 174472 - DNA, 17 bp, synthetic construct
  source 1..17: mol_type = other DNA
ccctggggtggaggacg

SEQ ID NO: 174473 - DNA, 17 bp, synthetic construct
  source 1..17: mol_type = other DNA
tccctggggtggaggac

SEQ ID NO: 174474 - DNA, 17 bp, synthetic construct
  source 1..17: mol_type = other DNA
gtccctggggtggagga

SEQ ID NO: 174475 - DNA, 17 bp, synthetic construct
  source 1..17: mol_type = other DNA
ggtccctggggtggagg

SEQ ID NO: 174476 - DNA, 17 bp, synthetic construct
  source 1..17: mol_type = other DNA
tggtccctggggtggag

SEQ ID NO: 174477 - DNA, 17 bp, synthetic construct
  source 1..17: mol_type = other DNA
gtggtccctggggtgga

SEQ ID NO: 174478 - DNA, 17 bp, synthetic construct
  source 1..17: mol_type = other DNA
ggtggtccctggggtgg

SEQ ID NO: 174479 - DNA, 17 bp, synthetic construct
  source 1..17: mol_type = other DNA
aggtggtccctggggtg

SEQ ID NO: 174480 - DNA, 17 bp, synthetic construct
  source 1..17: mol_type = other DNA
caggtggtccctggggt

SEQ ID NO: 174481 - DNA, 17 bp, synthetic construct
  source 1..17: mol_type = other DNA
ccaggtggtccctgggg

SEQ ID NO: 174482 - DNA, 17 bp, synthetic construct
  source 1..17: mol_type = other DNA
tccaggtggtccctggg

SEQ ID NO: 174483 - DNA, 17 bp, synthetic construct
  source 1..17: mol_type = other DNA
atccaggtggtccctgg

SEQ ID NO: 174484 - DNA, 17 bp, synthetic construct
  source 1..17: mol_type = other DNA
gatccaggtggtccctg

SEQ ID NO: 174485 - DNA, 17 bp, synthetic construct
  source 1..17: mol_type = other DNA
ggatccaggtggtccct

SEQ ID NO: 174486 - DNA, 17 bp, synthetic construct
  source 1..17: mol_type = other DNA
aggatccaggtggtccc

SEQ ID NO: 174487 - DNA, 17 bp, synthetic construct
  source 1..17: mol_type = other DNA
gaggatccaggtggtcc

SEQ ID NO: 174488 - DNA, 17 bp, synthetic construct
  source 1..17: mol_type = other DNA
tgaggatccaggtggtc

SEQ ID NO: 174489 - DNA, 17 bp, synthetic construct
  source 1..17: mol_type = other DNA
gtgaggatccaggtggt

SEQ ID NO: 174490 - DNA, 17 bp, synthetic construct
  source 1..17: mol_type = other DNA
tgtgaggatccaggtgg

SEQ ID NO: 174491 - DNA, 17 bp, synthetic construct
  source 1..17: mol_type = other DNA
ctgtgaggatccaggtg

SEQ ID NO: 174492 - DNA, 17 bp, synthetic construct
  source 1..17: mol_type = other DNA
tctgtgaggatccaggt

SEQ ID NO: 174493 - DNA, 17 bp, synthetic construct
  source 1..17: mol_type = other DNA
ctctgtgaggatccagg

SEQ ID NO: 174494 - DNA, 17 bp, synthetic construct
  source 1..17: mol_type = other DNA
gctctgtgaggatccag

SEQ ID NO: 174495 - DNA, 17 bp, synthetic construct
  source 1..17: mol_type = other DNA
ggctctgtgaggatcca

SEQ ID NO: 174496 - DNA, 17 bp, synthetic construct
  source 1..17: mol_type = other DNA
cggctctgtgaggatcc

SEQ ID NO: 174497 - DNA, 17 bp, synthetic construct
  source 1..17: mol_type = other DNA
tcggctctgtgaggatc

SEQ ID NO: 174498 - DNA, 17 bp, synthetic construct
  source 1..17: mol_type = other DNA
ctcggctctgtgaggat

SEQ ID NO: 174499 - DNA, 17 bp, synthetic construct
  source 1..17: mol_type = other DNA
gctcggctctgtgagga

SEQ ID NO: 174500 - DNA, 17 bp, synthetic construct
  source 1..17: mol_type = other DNA
tgctcggctctgtgagg

SEQ ID NO: 174501 - DNA, 17 bp, synthetic construct
  source 1..17: mol_type = other DNA
gtgctcggctctgtgag

SEQ ID NO: 174502 - DNA, 17 bp, synthetic construct
  source 1..17: mol_type = other DNA
agtgctcggctctgtga

SEQ ID NO: 174503 - DNA, 17 bp, synthetic construct
  source 1..17: mol_type = other DNA
tagtgctcggctctgtg

SEQ ID NO: 174504 - DNA, 17 bp, synthetic construct
  source 1..17: mol_type = other DNA
gtagtgctcggctctgt

SEQ ID NO: 174505 - DNA, 17 bp, synthetic construct
  source 1..17: mol_type = other DNA
tgtagtgctcggctctg

SEQ ID NO: 174506 - DNA, 17 bp, synthetic construct
  source 1..17: mol_type = other DNA
ctgtagtgctcggctct

SEQ ID NO: 174507 - DNA, 17 bp, synthetic construct
  source 1..17: mol_type = other DNA
gctgtagtgctcggctc

SEQ ID NO: 174508 - DNA, 17 bp, synthetic construct
  source 1..17: mol_type = other DNA
ggctgtagtgctcggct

SEQ ID NO: 174509 - DNA, 17 bp, synthetic construct
  source 1..17: mol_type = other DNA
tggctgtagtgctcggc

SEQ ID NO: 174510 - DNA, 17 bp, synthetic construct
  source 1..17: mol_type = other DNA
gtggctgtagtgctcgg

SEQ ID NO: 174511 - DNA, 17 bp, synthetic construct
  source 1..17: mol_type = other DNA
ggtggctgtagtgctcg

SEQ ID NO: 174512 - DNA, 17 bp, synthetic construct
  source 1..17: mol_type = other DNA
cggtggctgtagtgctc

SEQ ID NO: 174513 - DNA, 17 bp, synthetic construct
  source 1..17: mol_type = other DNA
acggtggctgtagtgct

SEQ ID NO: 174514 - DNA, 17 bp, synthetic construct
  source 1..17: mol_type = other DNA
cacggtggctgtagtgc

SEQ ID NO: 174515 - DNA, 17 bp, synthetic construct
  source 1..17: mol_type = other DNA
tcacggtggctgtagtg

SEQ ID NO: 174516 - DNA, 17 bp, synthetic construct
  source 1..17: mol_type = other DNA
gtcacggtggctgtagt

SEQ ID NO: 174517 - DNA, 17 bp, synthetic construct
  source 1..17: mol_type = other DNA
cgtcacggtggctgtag

SEQ ID NO: 174518 - DNA, 17 bp, synthetic construct
  source 1..17: mol_type = other DNA
ccgtcacggtggctgta

SEQ ID NO: 174519 - DNA, 17 bp, synthetic construct
  source 1..17: mol_type = other DNA
accgtcacggtggctgt

SEQ ID NO: 174520 - DNA, 17 bp, synthetic construct
  source 1..17: mol_type = other DNA
caccgtcacggtggctg

SEQ ID NO: 174521 - DNA, 17 bp, synthetic construct
  source 1..17: mol_type = other DNA
gcaccgtcacggtggct

SEQ ID NO: 174522 - DNA, 17 bp, synthetic construct
  source 1..17: mol_type = other DNA
ggcaccgtcacggtggc

SEQ ID NO: 174523 - DNA, 17 bp, synthetic construct
  source 1..17: mol_type = other DNA
gggcaccgtcacggtgg

SEQ ID NO: 174524 - DNA, 17 bp, synthetic construct
  source 1..17: mol_type = other DNA
tgggcaccgtcacggtg

SEQ ID NO: 174525 - DNA, 17 bp, synthetic construct
  source 1..17: mol_type = other DNA
gtgggcaccgtcacggt

SEQ ID NO: 174526 - DNA, 17 bp, synthetic construct
  source 1..17: mol_type = other DNA
ggtgggcaccgtcacgg

SEQ ID NO: 174527 - DNA, 17 bp, synthetic construct
  source 1..17: mol_type = other DNA
cggtgggcaccgtcacg

SEQ ID NO: 174528 - DNA, 17 bp, synthetic construct
  source 1..17: mol_type = other DNA
ccggtgggcaccgtcac

SEQ ID NO: 174529 - DNA, 17 bp, synthetic construct
  source 1..17: mol_type = other DNA
tccggtgggcaccgtca

SEQ ID NO: 174530 - DNA, 17 bp, synthetic construct
  source 1..17: mol_type = other DNA
atccggtgggcaccgtc

SEQ ID NO: 174531 - DNA, 17 bp, synthetic construct
  source 1..17: mol_type = other DNA
gatccggtgggcaccgt

SEQ ID NO: 174532 - DNA, 17 bp, synthetic construct
  source 1..17: mol_type = other DNA
ggatccggtgggcaccg

SEQ ID NO: 174533 - DNA, 17 bp, synthetic construct
  source 1..17: mol_type = other DNA
tggatccggtgggcacc

SEQ ID NO: 174534 - DNA, 17 bp, synthetic construct
  source 1..17: mol_type = other DNA
gtggatccggtgggcac

SEQ ID NO: 174535 - DNA, 17 bp, synthetic construct
  source 1..17: mol_type = other DNA
cgtggatccggtgggca

SEQ ID NO: 174536 - DNA, 17 bp, synthetic construct
  source 1..17: mol_type = other DNA
ccgtggatccggtgggc

SEQ ID NO: 174537 - DNA, 17 bp, synthetic construct
  source 1..17: mol_type = other DNA
gccgtggatccggtggg

SEQ ID NO: 174538 - DNA, 17 bp, synthetic construct
  source 1..17: mol_type = other DNA
ggccgtggatccggtgg

SEQ ID NO: 174539 - DNA, 17 bp, synthetic construct
  source 1..17: mol_type = other DNA
tggccgtggatccggtg

SEQ ID NO: 174540 - DNA, 17 bp, synthetic construct
  source 1..17: mol_type = other DNA
gtggccgtggatccggt

SEQ ID NO: 174541 - DNA, 17 bp, synthetic construct
  source 1..17: mol_type = other DNA
ggtggccgtggatccgg

SEQ ID NO: 174542 - DNA, 17 bp, synthetic construct
  source 1..17: mol_type = other DNA
cggtggccgtggatccg

SEQ ID NO: 174543 - DNA, 17 bp, synthetic construct
  source 1..17: mol_type = other DNA
gcggtggccgtggatcc

SEQ ID NO: 174544 - DNA, 17 bp, synthetic construct
  source 1..17: mol_type = other DNA
ggcggtggccgtggatc

SEQ ID NO: 174545 - DNA, 17 bp, synthetic construct
  source 1..17: mol_type = other DNA
aggcggtggccgtggat

SEQ ID NO: 174546 - DNA, 17 bp, synthetic construct
  source 1..17: mol_type = other DNA
gaggcggtggccgtgga

SEQ ID NO: 174547 - DNA, 17 bp, synthetic construct
  source 1..17: mol_type = other DNA
ggaggcggtggccgtgg

SEQ ID NO: 174548 - DNA, 17 bp, synthetic construct
  source 1..17: mol_type = other DNA
aggaggcggtggccgtg

SEQ ID NO: 174549 - DNA, 17 bp, synthetic construct
  source 1..17: mol_type = other DNA
gaggaggcggtggccgt

SEQ ID NO: 174550 - DNA, 17 bp, synthetic construct
  source 1..17: mol_type = other DNA
ggaggaggcggtggccg

SEQ ID NO: 174551 - DNA, 17 bp, synthetic construct
  source 1..17: mol_type = other DNA
tggaggaggcggtggcc

SEQ ID NO: 174552 - DNA, 17 bp, synthetic construct
  source 1..17: mol_type = other DNA
gtggaggaggcggtggc

SEQ ID NO: 174553 - DNA, 17 bp, synthetic construct
  source 1..17: mol_type = other DNA
ggtggaggaggcggtgg

SEQ ID NO: 174554 - DNA, 17 bp, synthetic construct
  source 1..17: mol_type = other DNA
gggtggaggaggcggtg

SEQ ID NO: 174555 - DNA, 17 bp, synthetic construct
  source 1..17: mol_type = other DNA
tgggtggaggaggcggt

SEQ ID NO: 174556 - DNA, 17 bp, synthetic construct
  source 1..17: mol_type = other DNA
ctgggtggaggaggcgg

SEQ ID NO: 174557 - DNA, 17 bp, synthetic construct
  source 1..17: mol_type = other DNA
cctgggtggaggaggcg

SEQ ID NO: 174558 - DNA, 17 bp, synthetic construct
  source 1..17: mol_type = other DNA
gcctgggtggaggaggc

SEQ ID NO: 174559 - DNA, 17 bp, synthetic construct
  source 1..17: mol_type = other DNA
tgcctgggtggaggagg

SEQ ID NO: 174560 - DNA, 17 bp, synthetic construct
  source 1..17: mol_type = other DNA
ttgcctgggtggaggag

SEQ ID NO: 174561 - DNA, 17 bp, synthetic construct
  source 1..17: mol_type = other DNA
gttgcctgggtggagga

SEQ ID NO: 174562 - DNA, 17 bp, synthetic construct
  source 1..17: mol_type = other DNA
agttgcctgggtggagg

SEQ ID NO: 174563 - DNA, 17 bp, synthetic construct
  source 1..17: mol_type = other DNA
cagttgcctgggtggag

SEQ ID NO: 174564 - DNA, 17 bp, synthetic construct
  source 1..17: mol_type = other DNA
gcagttgcctgggtgga

SEQ ID NO: 174565 - DNA, 17 bp, synthetic construct
  source 1..17: mol_type = other DNA
agcagttgcctgggtgg

SEQ ID NO: 174566 - DNA, 17 bp, synthetic construct
  source 1..17: mol_type = other DNA
cagcagttgcctgggtg

SEQ ID NO: 174567 - DNA, 17 bp, synthetic construct
  source 1..17: mol_type = other DNA
ccagcagttgcctgggt

SEQ ID NO: 174568 - DNA, 17 bp, synthetic construct
  source 1..17: mol_type = other DNA
gccagcagttgcctggg

SEQ ID NO: 174569 - DNA, 17 bp, synthetic construct
  source 1..17: mol_type = other DNA
tgccagcagttgcctgg

SEQ ID NO: 174570 - DNA, 17 bp, synthetic construct
  source 1..17: mol_type = other DNA
gtgccagcagttgcctg

SEQ ID NO: 174571 - DNA, 17 bp, synthetic construct
  source 1..17: mol_type = other DNA
ggtgccagcagttgcct

SEQ ID NO: 174572 - DNA, 17 bp, synthetic construct
  source 1..17: mol_type = other DNA
gggtgccagcagttgcc

SEQ ID NO: 174573 - DNA, 17 bp, synthetic construct
  source 1..17: mol_type = other DNA
ggggtgccagcagttgc

SEQ ID NO: 174574 - DNA, 17 bp, synthetic construct
  source 1..17: mol_type = other DNA
tggggtgccagcagttg

SEQ ID NO: 174575 - DNA, 17 bp, synthetic construct
  source 1..17: mol_type = other DNA
gtggggtgccagcagtt

SEQ ID NO: 174576 - DNA, 17 bp, synthetic construct
  source 1..17: mol_type = other DNA
tgtggggtgccagcagt

SEQ ID NO: 174577 - DNA, 17 bp, synthetic construct
  source 1..17: mol_type = other DNA
atgtggggtgccagcag

SEQ ID NO: 174578 - DNA, 17 bp, synthetic construct
  source 1..17: mol_type = other DNA
catgtggggtgccagca

SEQ ID NO: 174579 - DNA, 17 bp, synthetic construct
  source 1..17: mol_type = other DNA
acatgtggggtgccagc

SEQ ID NO: 174580 - DNA, 17 bp, synthetic construct
  source 1..17: mol_type = other DNA
cacatgtggggtgccag

SEQ ID NO: 174581 - DNA, 17 bp, synthetic construct
  source 1..17: mol_type = other DNA
tcacatgtggggtgcca

SEQ ID NO: 174582 - DNA, 17 bp, synthetic construct
  source 1..17: mol_type = other DNA
ctcacatgtggggtgcc

SEQ ID NO: 174583 - DNA, 17 bp, synthetic construct
  source 1..17: mol_type = other DNA
gctcacatgtggggtgc

SEQ ID NO: 174584 - DNA, 17 bp, synthetic construct
  source 1..17: mol_type = other DNA
tgctcacatgtggggtg

SEQ ID NO: 174585 - DNA, 17 bp, synthetic construct
  source 1..17: mol_type = other DNA
gtgctcacatgtggggt

SEQ ID NO: 174586 - DNA, 17 bp, synthetic construct
  source 1..17: mol_type = other DNA
ggtgctcacatgtgggg

SEQ ID NO: 174587 - DNA, 17 bp, synthetic construct
  source 1..17: mol_type = other DNA
tggtgctcacatgtggg

SEQ ID NO: 174588 - DNA, 17 bp, synthetic construct
  source 1..17: mol_type = other DNA
gtggtgctcacatgtgg

SEQ ID NO: 174589 - DNA, 17 bp, synthetic construct
  source 1..17: mol_type = other DNA
cgtggtgctcacatgtg

SEQ ID NO: 174590 - DNA, 17 bp, synthetic construct
  source 1..17: mol_type = other DNA
ccgtggtgctcacatgt

SEQ ID NO: 174591 - DNA, 17 bp, synthetic construct
  source 1..17: mol_type = other DNA
gccgtggtgctcacatg

SEQ ID NO: 174592 - DNA, 17 bp, synthetic construct
  source 1..17: mol_type = other DNA
ggccgtggtgctcacat

SEQ ID NO: 174593 - DNA, 17 bp, synthetic construct
  source 1..17: mol_type = other DNA
tggccgtggtgctcaca

SEQ ID NO: 174594 - DNA, 17 bp, synthetic construct
  source 1..17: mol_type = other DNA
gtggccgtggtgctcac

SEQ ID NO: 174595 - DNA, 17 bp, synthetic construct
  source 1..17: mol_type = other DNA
cgtggccgtggtgctca

SEQ ID NO: 174596 - DNA, 17 bp, synthetic construct
  source 1..17: mol_type = other DNA
tcgtggccgtggtgctc

SEQ ID NO: 174597 - DNA, 17 bp, synthetic construct
  source 1..17: mol_type = other DNA
gtcgtggccgtggtgct

SEQ ID NO: 174598 - DNA, 17 bp, synthetic construct
  source 1..17: mol_type = other DNA
tgtcgtggccgtggtgc

SEQ ID NO: 174599 - DNA, 17 bp, synthetic construct
  source 1..17: mol_type = other DNA
gtgtcgtggccgtggtg

SEQ ID NO: 174600 - DNA, 17 bp, synthetic construct
  source 1..17: mol_type = other DNA
ggtgtcgtggccgtggt

SEQ ID NO: 174601 - DNA, 17 bp, synthetic construct
  source 1..17: mol_type = other DNA
gggtgtcgtggccgtgg

SEQ ID NO: 174602 - DNA, 17 bp, synthetic construct
  source 1..17: mol_type = other DNA
tgggtgtcgtggccgtg

SEQ ID NO: 174603 - DNA, 17 bp, synthetic construct
  source 1..17: mol_type = other DNA
gtgggtgtcgtggccgt

SEQ ID NO: 174604 - DNA, 17 bp, synthetic construct
  source 1..17: mol_type = other DNA
tgtgggtgtcgtggccg

SEQ ID NO: 174605 - DNA, 17 bp, synthetic construct
  source 1..17: mol_type = other DNA
ctgtgggtgtcgtggcc

SEQ ID NO: 174606 - DNA, 17 bp, synthetic construct
  source 1..17: mol_type = other DNA
actgtgggtgtcgtggc

SEQ ID NO: 174607 - DNA, 17 bp, synthetic construct
  source 1..17: mol_type = other DNA
gactgtgggtgtcgtgg

SEQ ID NO: 174608 - DNA, 17 bp, synthetic construct
  source 1..17: mol_type = other DNA
tgactgtgggtgtcgtg

SEQ ID NO: 174609 - DNA, 17 bp, synthetic construct
  source 1..17: mol_type = other DNA
gtgactgtgggtgtcgt

SEQ ID NO: 174610 - DNA, 17 bp, synthetic construct
  source 1..17: mol_type = other DNA
ggtgactgtgggtgtcg

SEQ ID NO: 174611 - DNA, 17 bp, synthetic construct
  source 1..17: mol_type = other DNA
tggtgactgtgggtgtc

SEQ ID NO: 174612 - DNA, 17 bp, synthetic construct
  source 1..17: mol_type = other DNA
ctggtgactgtgggtgt

SEQ ID NO: 174613 - DNA, 17 bp, synthetic construct
  source 1..17: mol_type = other DNA
gctggtgactgtgggtg

SEQ ID NO: 174614 - DNA, 17 bp, synthetic construct
  source 1..17: mol_type = other DNA
agctggtgactgtgggt

SEQ ID NO: 174615 - DNA, 17 bp, synthetic construct
  source 1..17: mol_type = other DNA
gagctggtgactgtggg

SEQ ID NO: 174616 - DNA, 17 bp, synthetic construct
  source 1..17: mol_type = other DNA
ggagctggtgactgtgg

SEQ ID NO: 174617 - DNA, 17 bp, synthetic construct
  source 1..17: mol_type = other DNA
tggagctggtgactgtg

SEQ ID NO: 174618 - DNA, 17 bp, synthetic construct
  source 1..17: mol_type = other DNA
ttggagctggtgactgt

SEQ ID NO: 174619 - DNA, 17 bp, synthetic construct
  source 1..17: mol_type = other DNA
tttggagctggtgactg

SEQ ID NO: 174620 - DNA, 17 bp, synthetic construct
  source 1..17: mol_type = other DNA
ctttggagctggtgact

SEQ ID NO: 174621 - DNA, 17 bp, synthetic construct
  source 1..17: mol_type = other DNA
gctttggagctggtgac

SEQ ID NO: 174622 - DNA, 17 bp, synthetic construct
  source 1..17: mol_type = other DNA
ggctttggagctggtga

SEQ ID NO: 174623 - DNA, 17 bp, synthetic construct
  source 1..17: mol_type = other DNA
tggctttggagctggtg

SEQ ID NO: 174624 - DNA, 17 bp, synthetic construct
  source 1..17: mol_type = other DNA
gtggctttggagctggt

SEQ ID NO: 174625 - DNA, 17 bp, synthetic construct
  source 1..17: mol_type = other DNA
agtggctttggagctgg

SEQ ID NO: 174626 - DNA, 17 bp, synthetic construct
  source 1..17: mol_type = other DNA
gagtggctttggagctg

SEQ ID NO: 174627 - DNA, 17 bp, synthetic construct
  source 1..17: mol_type = other DNA
ggagtggctttggagct

SEQ ID NO: 174628 - DNA, 17 bp, synthetic construct
  source 1..17: mol_type = other DNA
gggagtggctttggagc

SEQ ID NO: 174629 - DNA, 17 bp, synthetic construct
  source 1..17: mol_type = other DNA
agggagtggctttggag

SEQ ID NO: 174630 - DNA, 17 bp, synthetic construct
  source 1..17: mol_type = other DNA
gagggagtggctttgga

SEQ ID NO: 174631 - DNA, 17 bp, synthetic construct
  source 1..17: mol_type = other DNA
ggagggagtggctttgg

SEQ ID NO: 174632 - DNA, 17 bp, synthetic construct
  source 1..17: mol_type = other DNA
aggagggagtggctttg

SEQ ID NO: 174633 - DNA, 17 bp, synthetic construct
  source 1..17: mol_type = other DNA
gaggagggagtggcttt

SEQ ID NO: 174634 - DNA, 17 bp, synthetic construct
  source 1..17: mol_type = other DNA
ggaggagggagtggctt

SEQ ID NO: 174635 - DNA, 17 bp, synthetic construct
  source 1..17: mol_type = other DNA
tggaggagggagtggct

SEQ ID NO: 174636 - DNA, 17 bp, synthetic construct
  source 1..17: mol_type = other DNA
ctggaggagggagtggc

SEQ ID NO: 174637 - DNA, 17 bp, synthetic construct
  source 1..17: mol_type = other DNA
actggaggagggagtgg

SEQ ID NO: 174638 - DNA, 17 bp, synthetic construct
  source 1..17: mol_type = other DNA
gactggaggagggagtg

SEQ ID NO: 174639 - DNA, 17 bp, synthetic construct
  source 1..17: mol_type = other DNA
ggactggaggagggagt

SEQ ID NO: 174640 - DNA, 17 bp, synthetic construct
  source 1..17: mol_type = other DNA
tggactggaggagggag

SEQ ID NO: 174641 - DNA, 17 bp, synthetic construct
  source 1..17: mol_type = other DNA
ctggactggaggaggga

SEQ ID NO: 174642 - DNA, 17 bp, synthetic construct
  source 1..17: mol_type = other DNA
cctggactggaggaggg

SEQ ID NO: 174643 - DNA, 17 bp, synthetic construct
  source 1..17: mol_type = other DNA
ccctggactggaggagg

SEQ ID NO: 174644 - DNA, 17 bp, synthetic construct
  source 1..17: mol_type = other DNA
tccctggactggaggag

SEQ ID NO: 174645 - DNA, 17 bp, synthetic construct
  source 1..17: mol_type = other DNA
gtccctggactggagga

SEQ ID NO: 174646 - DNA, 17 bp, synthetic construct
  source 1..17: mol_type = other DNA
agtccctggactggagg

SEQ ID NO: 174647 - DNA, 17 bp, synthetic construct
  source 1..17: mol_type = other DNA
cagtccctggactggag

SEQ ID NO: 174648 - DNA, 17 bp, synthetic construct
  source 1..17: mol_type = other DNA
gcagtccctggactgga

SEQ ID NO: 174649 - DNA, 17 bp, synthetic construct
  source 1..17: mol_type = other DNA
tgcagtccctggactgg

SEQ ID NO: 174650 - DNA, 17 bp, synthetic construct
  source 1..17: mol_type = other DNA
ttgcagtccctggactg

SEQ ID NO: 174651 - DNA, 17 bp, synthetic construct
  source 1..17: mol_type = other DNA
gttgcagtccctggact

SEQ ID NO: 174652 - DNA, 17 bp, synthetic construct
  source 1..17: mol_type = other DNA
agttgcagtccctggac

SEQ ID NO: 174653 - DNA, 17 bp, synthetic construct
  source 1..17: mol_type = other DNA
cagttgcagtccctgga

SEQ ID NO: 174654 - DNA, 17 bp, synthetic construct
  source 1..17: mol_type = other DNA
gcagttgcagtccctgg

SEQ ID NO: 174655 - DNA, 17 bp, synthetic construct
  source 1..17: mol_type = other DNA
ggcagttgcagtccctg

SEQ ID NO: 174656 - DNA, 17 bp, synthetic construct
  source 1..17: mol_type = other DNA
gggcagttgcagtccct

SEQ ID NO: 174657 - DNA, 17 bp, synthetic construct
  source 1..17: mol_type = other DNA
agggcagttgcagtccc

SEQ ID NO: 174658 - DNA, 17 bp, synthetic construct
  source 1..17: mol_type = other DNA
aagggcagttgcagtcc

SEQ ID NO: 174659 - DNA, 17 bp, synthetic construct
  source 1..17: mol_type = other DNA
gaagggcagttgcagtc

SEQ ID NO: 174660 - DNA, 17 bp, synthetic construct
  source 1..17: mol_type = other DNA
ggaagggcagttgcagt

SEQ ID NO: 174661 - DNA, 17 bp, synthetic construct
  source 1..17: mol_type = other DNA
tggaagggcagttgcag

SEQ ID NO: 174662 - DNA, 17 bp, synthetic construct
  source 1..17: mol_type = other DNA
ctggaagggcagttgca

SEQ ID NO: 174663 - DNA, 17 bp, synthetic construct
  source 1..17: mol_type = other DNA
gctggaagggcagttgc

SEQ ID NO: 174664 - DNA, 17 bp, synthetic construct
  source 1..17: mol_type = other DNA
tgctggaagggcagttg

SEQ ID NO: 174665 - DNA, 17 bp, synthetic construct
  source 1..17: mol_type = other DNA
gtgctggaagggcagtt

SEQ ID NO: 174666 - DNA, 17 bp, synthetic construct
  source 1..17: mol_type = other DNA
agtgctggaagggcagt

SEQ ID NO: 174667 - DNA, 17 bp, synthetic construct
  source 1..17: mol_type = other DNA
cagtgctggaagggcag

SEQ ID NO: 174668 - DNA, 17 bp, synthetic construct
  source 1..17: mol_type = other DNA
tcagtgctggaagggca

SEQ ID NO: 174669 - DNA, 17 bp, synthetic construct
  source 1..17: mol_type = other DNA
ctcagtgctggaagggc

SEQ ID NO: 174670 - DNA, 17 bp, synthetic construct
  source 1..17: mol_type = other DNA
tctcagtgctggaaggg

SEQ ID NO: 174671 - DNA, 17 bp, synthetic construct
  source 1..17: mol_type = other DNA
ttctcagtgctggaagg

SEQ ID NO: 174672 - DNA, 17 bp, synthetic construct
  source 1..17: mol_type = other DNA
cttctcagtgctggaag

SEQ ID NO: 174673 - DNA, 17 bp, synthetic construct
  source 1..17: mol_type = other DNA
gcttctcagtgctggaa

SEQ ID NO: 174674 - DNA, 17 bp, synthetic construct
  source 1..17: mol_type = other DNA
tgcttctcagtgctgga

SEQ ID NO: 174675 - DNA, 17 bp, synthetic construct
  source 1..17: mol_type = other DNA
gtgcttctcagtgctgg

SEQ ID NO: 174676 - DNA, 17 bp, synthetic construct
  source 1..17: mol_type = other DNA
tgtgcttctcagtgctg

SEQ ID NO: 174677 - DNA, 17 bp, synthetic construct
  source 1..17: mol_type = other DNA
ctgtgcttctcagtgct

SEQ ID NO: 174678 - DNA, 17 bp, synthetic construct
  source 1..17: mol_type = other DNA
gctgtgcttctcagtgc

SEQ ID NO: 174679 - DNA, 17 bp, synthetic construct
  source 1..17: mol_type = other DNA
ggctgtgcttctcagtg

SEQ ID NO: 174680 - DNA, 17 bp, synthetic construct
  source 1..17: mol_type = other DNA
tggctgtgcttctcagt

SEQ ID NO: 174681 - DNA, 17 bp, synthetic construct
  source 1..17: mol_type = other DNA
gtggctgtgcttctcag

SEQ ID NO: 174682 - DNA, 17 bp, synthetic construct
  source 1..17: mol_type = other DNA
ggtggctgtgcttctca

SEQ ID NO: 174683 - DNA, 17 bp, synthetic construct
  source 1..17: mol_type = other DNA
tggtggctgtgcttctc

SEQ ID NO: 174684 - DNA, 17 bp, synthetic construct
  source 1..17: mol_type = other DNA
gtggtggctgtgcttct

SEQ ID NO: 174685 - DNA, 17 bp, synthetic construct
  source 1..17: mol_type = other DNA
tgtggtggctgtgcttc

SEQ ID NO: 174686 - DNA, 17 bp, synthetic construct
  source 1..17: mol_type = other DNA
gtgtggtggctgtgctt

SEQ ID NO: 174687 - DNA, 17 bp, synthetic construct
  source 1..17: mol_type = other DNA
ggtgtggtggctgtgct

SEQ ID NO: 174688 - DNA, 17 bp, synthetic construct
  source 1..17: mol_type = other DNA
gggtgtggtggctgtgc

SEQ ID NO: 174689 - DNA, 17 bp, synthetic construct
  source 1..17: mol_type = other DNA
tgggtgtggtggctgtg

SEQ ID NO: 174690 - DNA, 17 bp, synthetic construct
  source 1..17: mol_type = other DNA
gtgggtgtggtggctgt

SEQ ID NO: 174691 - DNA, 17 bp, synthetic construct
  source 1..17: mol_type = other DNA
tgtgggtgtggtggctg

SEQ ID NO: 174692 - DNA, 17 bp, synthetic construct
  source 1..17: mol_type = other DNA
ctgtgggtgtggtggct

SEQ ID NO: 174693 - DNA, 17 bp, synthetic construct
  source 1..17: mol_type = other DNA
gctgtgggtgtggtggc

SEQ ID NO: 174694 - DNA, 17 bp, synthetic construct
  source 1..17: mol_type = other DNA
agctgtgggtgtggtgg

SEQ ID NO: 174695 - DNA, 17 bp, synthetic construct
  source 1..17: mol_type = other DNA
tagctgtgggtgtggtg

SEQ ID NO: 174696 - DNA, 17 bp, synthetic construct
  source 1..17: mol_type = other DNA
gtagctgtgggtgtggt

SEQ ID NO: 174697 - DNA, 17 bp, synthetic construct
  source 1..17: mol_type = other DNA
ggtagctgtgggtgtgg

SEQ ID NO: 174698 - DNA, 17 bp, synthetic construct
  source 1..17: mol_type = other DNA
tggtagctgtgggtgtg

SEQ ID NO: 174699 - DNA, 17 bp, synthetic construct
  source 1..17: mol_type = other DNA
ctggtagctgtgggtgt

SEQ ID NO: 174700 - DNA, 17 bp, synthetic construct
  source 1..17: mol_type = other DNA
gctggtagctgtgggtg

SEQ ID NO: 174701 - DNA, 17 bp, synthetic construct
  source 1..17: mol_type = other DNA
agctggtagctgtgggt

SEQ ID NO: 174702 - DNA, 17 bp, synthetic construct
  source 1..17: mol_type = other DNA
aagctggtagctgtggg

SEQ ID NO: 174703 - DNA, 17 bp, synthetic construct
  source 1..17: mol_type = other DNA
aaagctggtagctgtgg

SEQ ID NO: 174704 - DNA, 17 bp, synthetic construct
  source 1..17: mol_type = other DNA
taaagctggtagctgtg

SEQ ID NO: 174705 - DNA, 17 bp, synthetic construct
  source 1..17: mol_type = other DNA
gtaaagctggtagctgt

SEQ ID NO: 174706 - DNA, 17 bp, synthetic construct
  source 1..17: mol_type = other DNA
tgtaaagctggtagctg

SEQ ID NO: 174707 - DNA, 17 bp, synthetic construct
  source 1..17: mol_type = other DNA
ctgtaaagctggtagct

SEQ ID NO: 174708 - DNA, 17 bp, synthetic construct
  source 1..17: mol_type = other DNA
gctgtaaagctggtagc

SEQ ID NO: 174709 - DNA, 17 bp, synthetic construct
  source 1..17: mol_type = other DNA
ggctgtaaagctggtag

SEQ ID NO: 174710 - DNA, 17 bp, synthetic construct
  source 1..17: mol_type = other DNA
tggctgtaaagctggta

SEQ ID NO: 174711 - DNA, 17 bp, synthetic construct
  source 1..17: mol_type = other DNA
atggctgtaaagctggt

SEQ ID NO: 174712 - DNA, 17 bp, synthetic construct
  source 1..17: mol_type = other DNA
gatggctgtaaagctgg

SEQ ID NO: 174713 - DNA, 17 bp, synthetic construct
  source 1..17: mol_type = other DNA
ggatggctgtaaagctg

SEQ ID NO: 174714 - DNA, 17 bp, synthetic construct
  source 1..17: mol_type = other DNA
gggatggctgtaaagct

SEQ ID NO: 174715 - DNA, 17 bp, synthetic construct
  source 1..17: mol_type = other DNA
ggggatggctgtaaagc

SEQ ID NO: 174716 - DNA, 17 bp, synthetic construct
  source 1..17: mol_type = other DNA
aggggatggctgtaaag

SEQ ID NO: 174717 - DNA, 17 bp, synthetic construct
  source 1..17: mol_type = other DNA
gaggggatggctgtaaa

SEQ ID NO: 174718 - DNA, 17 bp, synthetic construct
  source 1..17: mol_type = other DNA
ggaggggatggctgtaa

SEQ ID NO: 174719 - DNA, 17 bp, synthetic construct
  source 1..17: mol_type = other DNA
aggaggggatggctgta

SEQ ID NO: 174720 - DNA, 17 bp, synthetic construct
  source 1..17: mol_type = other DNA
gaggaggggatggctgt

SEQ ID NO: 174721 - DNA, 17 bp, synthetic construct
  source 1..17: mol_type = other DNA
ggaggaggggatggctg

SEQ ID NO: 174722 - DNA, 17 bp, synthetic construct
  source 1..17: mol_type = other DNA
aggaggaggggatggct

SEQ ID NO: 174723 - DNA, 17 bp, synthetic construct
  source 1..17: mol_type = other DNA
gaggaggaggggatggc

SEQ ID NO: 174724 - DNA, 17 bp, synthetic construct
  source 1..17: mol_type = other DNA
ggaggaggaggggatgg

SEQ ID NO: 174725 - DNA, 17 bp, synthetic construct
  source 1..17: mol_type = other DNA
gggaggaggaggggatg

SEQ ID NO: 174726 - DNA, 17 bp, synthetic construct
  source 1..17: mol_type = other DNA
agggaggaggaggggat

SEQ ID NO: 174727 - DNA, 17 bp, synthetic construct
  source 1..17: mol_type = other DNA
cagggaggaggagggga

SEQ ID NO: 174728 - DNA, 17 bp, synthetic construct
  source 1..17: mol_type = other DNA
ccagggaggaggagggg

SEQ ID NO: 174729 - DNA, 17 bp, synthetic construct
  source 1..17: mol_type = other DNA
cccagggaggaggaggg

SEQ ID NO: 174730 - DNA, 17 bp, synthetic construct
  source 1..17: mol_type = other DNA
gcccagggaggaggagg

SEQ ID NO: 174731 - DNA, 17 bp, synthetic construct
  source 1..17: mol_type = other DNA
tgcccagggaggaggag

SEQ ID NO: 174732 - DNA, 17 bp, synthetic construct
  source 1..17: mol_type = other DNA
gtgcccagggaggagga

SEQ ID NO: 174733 - DNA, 17 bp, synthetic construct
  source 1..17: mol_type = other DNA
ggtgcccagggaggagg

SEQ ID NO: 174734 - DNA, 17 bp, synthetic construct
  source 1..17: mol_type = other DNA
tggtgcccagggaggag

SEQ ID NO: 174735 - DNA, 17 bp, synthetic construct
  source 1..17: mol_type = other DNA
gtggtgcccagggagga

SEQ ID NO: 174736 - DNA, 17 bp, synthetic construct
  source 1..17: mol_type = other DNA
ggtggtgcccagggagg

SEQ ID NO: 174737 - DNA, 17 bp, synthetic construct
  source 1..17: mol_type = other DNA
aggtggtgcccagggag

SEQ ID NO: 174738 - DNA, 17 bp, synthetic construct
  source 1..17: mol_type = other DNA
caggtggtgcccaggga

SEQ ID NO: 174739 - DNA, 17 bp, synthetic construct
  source 1..17: mol_type = other DNA
ccaggtggtgcccaggg

SEQ ID NO: 174740 - DNA, 17 bp, synthetic construct
  source 1..17: mol_type = other DNA
tccaggtggtgcccagg

SEQ ID NO: 174741 - DNA, 17 bp, synthetic construct
  source 1..17: mol_type = other DNA
gtccaggtggtgcccag

SEQ ID NO: 174742 - DNA, 17 bp, synthetic construct
  source 1..17: mol_type = other DNA
ggtccaggtggtgccca

SEQ ID NO: 174743 - DNA, 17 bp, synthetic construct
  source 1..17: mol_type = other DNA
gggtccaggtggtgccc

SEQ ID NO: 174744 - DNA, 17 bp, synthetic construct
  source 1..17: mol_type = other DNA
cgggtccaggtggtgcc

SEQ ID NO: 174745 - DNA, 17 bp, synthetic construct
  source 1..17: mol_type = other DNA
gcgggtccaggtggtgc

SEQ ID NO: 174746 - DNA, 17 bp, synthetic construct
  source 1..17: mol_type = other DNA
ggcgggtccaggtggtg

SEQ ID NO: 174747 - DNA, 17 bp, synthetic construct
  source 1..17: mol_type = other DNA
aggcgggtccaggtggt

SEQ ID NO: 174748 - DNA, 17 bp, synthetic construct
  source 1..17: mol_type = other DNA
taggcgggtccaggtgg

SEQ ID NO: 174749 - DNA, 17 bp, synthetic construct
  source 1..17: mol_type = other DNA
ataggcgggtccaggtg

SEQ ID NO: 174750 - DNA, 17 bp, synthetic construct
  source 1..17: mol_type = other DNA
gataggcgggtccaggt

SEQ ID NO: 174751 - DNA, 17 bp, synthetic construct
  source 1..17: mol_type = other DNA
tgataggcgggtccagg

SEQ ID NO: 174752 - DNA, 17 bp, synthetic construct
  source 1..17: mol_type = other DNA
gtgataggcgggtccag

SEQ ID NO: 174753 - DNA, 17 bp, synthetic construct
  source 1..17: mol_type = other DNA
tgtgataggcgggtcca

SEQ ID NO: 174754 - DNA, 17 bp, synthetic construct
  source 1..17: mol_type = other DNA
ctgtgataggcgggtcc

SEQ ID NO: 174755 - DNA, 17 bp, synthetic construct
  source 1..17: mol_type = other DNA
tctgtgataggcgggtc

SEQ ID NO: 174756 - DNA, 17 bp, synthetic construct
  source 1..17: mol_type = other DNA
gtctgtgataggcgggt

SEQ ID NO: 174757 - DNA, 17 bp, synthetic construct
  source 1..17: mol_type = other DNA
ggtctgtgataggcggg

SEQ ID NO: 174758 - DNA, 17 bp, synthetic construct
  source 1..17: mol_type = other DNA
tggtctgtgataggcgg

SEQ ID NO: 174759 - DNA, 17 bp, synthetic construct
  source 1..17: mol_type = other DNA
gtggtctgtgataggcg

SEQ ID NO: 174760 - DNA, 17 bp, synthetic construct
  source 1..17: mol_type = other DNA
ggtggtctgtgataggc

SEQ ID NO: 174761 - DNA, 17 bp, synthetic construct
  source 1..17: mol_type = other DNA
tggtggtctgtgatagg

SEQ ID NO: 174762 - DNA, 17 bp, synthetic construct
  source 1..17: mol_type = other DNA
gtggtggtctgtgatag

SEQ ID NO: 174763 - DNA, 17 bp, synthetic construct
  source 1..17: mol_type = other DNA
tgtggtggtctgtgata

SEQ ID NO: 174764 - DNA, 17 bp, synthetic construct
  source 1..17: mol_type = other DNA
gtgtggtggtctgtgat

SEQ ID NO: 174765 - DNA, 17 bp, synthetic construct
  source 1..17: mol_type = other DNA
ggtgtggtggtctgtga

SEQ ID NO: 174766 - DNA, 17 bp, synthetic construct
  source 1..17: mol_type = other DNA
gggtgtggtggtctgtg

SEQ ID NO: 174767 - DNA, 17 bp, synthetic construct
  source 1..17: mol_type = other DNA
tgggtgtggtggtctgt

SEQ ID NO: 174768 - DNA, 17 bp, synthetic construct
  source 1..17: mol_type = other DNA
gtgggtgtggtggtctg

SEQ ID NO: 174769 - DNA, 17 bp, synthetic construct
  source 1..17: mol_type = other DNA
cgtgggtgtggtggtct

SEQ ID NO: 174770 - DNA, 17 bp, synthetic construct
  source 1..17: mol_type = other DNA
ccgtgggtgtggtggtc

SEQ ID NO: 174771 - DNA, 17 bp, synthetic construct
  source 1..17: mol_type = other DNA
gccgtgggtgtggtggt

SEQ ID NO: 174772 - DNA, 17 bp, synthetic construct
  source 1..17: mol_type = other DNA
ggccgtgggtgtggtgg

SEQ ID NO: 174773 - DNA, 17 bp, synthetic construct
  source 1..17: mol_type = other DNA
tggccgtgggtgtggtg

SEQ ID NO: 174774 - DNA, 17 bp, synthetic construct
  source 1..17: mol_type = other DNA
gtggccgtgggtgtggt

SEQ ID NO: 174775 - DNA, 17 bp, synthetic construct
  source 1..17: mol_type = other DNA
ggtggccgtgggtgtgg

SEQ ID NO: 174776 - DNA, 17 bp, synthetic construct
  source 1..17: mol_type = other DNA
tggtggccgtgggtgtg

SEQ ID NO: 174777 - DNA, 17 bp, synthetic construct
  source 1..17: mol_type = other DNA
atggtggccgtgggtgt

SEQ ID NO: 174778 - DNA, 17 bp, synthetic construct
  source 1..17: mol_type = other DNA
catggtggccgtgggtg

SEQ ID NO: 174779 - DNA, 17 bp, synthetic construct
  source 1..17: mol_type = other DNA
acatggtggccgtgggt

SEQ ID NO: 174780 - DNA, 17 bp, synthetic construct
  source 1..17: mol_type = other DNA
gacatggtggccgtggg

SEQ ID NO: 174781 - DNA, 17 bp, synthetic construct
  source 1..17: mol_type = other DNA
ggacatggtggccgtgg

SEQ ID NO: 174782 - DNA, 17 bp, synthetic construct
  source 1..17: mol_type = other DNA
tggacatggtggccgtg

SEQ ID NO: 174783 - DNA, 17 bp, synthetic construct
  source 1..17: mol_type = other DNA
gtggacatggtggccgt

SEQ ID NO: 174784 - DNA, 17 bp, synthetic construct
  source 1..17: mol_type = other DNA
tgtggacatggtggccg

SEQ ID NO: 174785 - DNA, 17 bp, synthetic construct
  source 1..17: mol_type = other DNA
ctgtggacatggtggcc

SEQ ID NO: 174786 - DNA, 17 bp, synthetic construct
  source 1..17: mol_type = other DNA
gctgtggacatggtggc

SEQ ID NO: 174787 - DNA, 17 bp, synthetic construct
  source 1..17: mol_type = other DNA
ggctgtggacatggtgg

SEQ ID NO: 174788 - DNA, 17 bp, synthetic construct
  source 1..17: mol_type = other DNA
tggctgtggacatggtg

SEQ ID NO: 174789 - DNA, 17 bp, synthetic construct
  source 1..17: mol_type = other DNA
gtggctgtggacatggt

SEQ ID NO: 174790 - DNA, 17 bp, synthetic construct
  source 1..17: mol_type = other DNA
tgtggctgtggacatgg

SEQ ID NO: 174791 - DNA, 17 bp, synthetic construct
  source 1..17: mol_type = other DNA
gtgtggctgtggacatg

SEQ ID NO: 174792 - DNA, 17 bp, synthetic construct
  source 1..17: mol_type = other DNA
ggtgtggctgtggacat

SEQ ID NO: 174793 - DNA, 17 bp, synthetic construct
  source 1..17: mol_type = other DNA
gggtgtggctgtggaca

SEQ ID NO: 174794 - DNA, 17 bp, synthetic construct
  source 1..17: mol_type = other DNA
agggtgtggctgtggac

SEQ ID NO: 174795 - DNA, 17 bp, synthetic construct
  source 1..17: mol_type = other DNA
gagggtgtggctgtgga

SEQ ID NO: 174796 - DNA, 17 bp, synthetic construct
  source 1..17: mol_type = other DNA
ggagggtgtggctgtgg

SEQ ID NO: 174797 - DNA, 17 bp, synthetic construct
  source 1..17: mol_type = other DNA
aggagggtgtggctgtg

SEQ ID NO: 174798 - DNA, 17 bp, synthetic construct
  source 1..17: mol_type = other DNA
gaggagggtgtggctgt

SEQ ID NO: 174799 - DNA, 17 bp, synthetic construct
  source 1..17: mol_type = other DNA
ggaggagggtgtggctg

SEQ ID NO: 174800 - DNA, 17 bp, synthetic construct
  source 1..17: mol_type = other DNA
tggaggagggtgtggct

SEQ ID NO: 174801 - DNA, 17 bp, synthetic construct
  source 1..17: mol_type = other DNA
gtggaggagggtgtggc

SEQ ID NO: 174802 - DNA, 17 bp, synthetic construct
  source 1..17: mol_type = other DNA
agtggaggagggtgtgg

SEQ ID NO: 174803 - DNA, 17 bp, synthetic construct
  source 1..17: mol_type = other DNA
gagtggaggagggtgtg

SEQ ID NO: 174804 - DNA, 17 bp, synthetic construct
  source 1..17: mol_type = other DNA
ggagtggaggagggtgt

SEQ ID NO: 174805 - DNA, 17 bp, synthetic construct
  source 1..17: mol_type = other DNA
tggagtggaggagggtg

SEQ ID NO: 174806 - DNA, 17 bp, synthetic construct
  source 1..17: mol_type = other DNA
ctggagtggaggagggt

SEQ ID NO: 174807 - DNA, 17 bp, synthetic construct
  source 1..17: mol_type = other DNA
tctggagtggaggaggg

SEQ ID NO: 174808 - DNA, 17 bp, synthetic construct
  source 1..17: mol_type = other DNA
ctctggagtggaggagg

SEQ ID NO: 174809 - DNA, 17 bp, synthetic construct
  source 1..17: mol_type = other DNA
tctctggagtggaggag

SEQ ID NO: 174810 - DNA, 17 bp, synthetic construct
  source 1..17: mol_type = other DNA
gtctctggagtggagga

SEQ ID NO: 174811 - DNA, 17 bp, synthetic construct
  source 1..17: mol_type = other DNA
agtctctggagtggagg

SEQ ID NO: 174812 - DNA, 17 bp, synthetic construct
  source 1..17: mol_type = other DNA
cagtctctggagtggag

SEQ ID NO: 174813 - DNA, 17 bp, synthetic construct
  source 1..17: mol_type = other DNA
acagtctctggagtgga

SEQ ID NO: 174814 - DNA, 17 bp, synthetic construct
  source 1..17: mol_type = other DNA
gacagtctctggagtgg

SEQ ID NO: 174815 - DNA, 17 bp, synthetic construct
  source 1..17: mol_type = other DNA
ggacagtctctggagtg

SEQ ID NO: 174816 - DNA, 17 bp, synthetic construct
  source 1..17: mol_type = other DNA
tggacagtctctggagt

SEQ ID NO: 174817 - DNA, 17 bp, synthetic construct
  source 1..17: mol_type = other DNA
gtggacagtctctggag

SEQ ID NO: 174818 - DNA, 17 bp, synthetic construct
  source 1..17: mol_type = other DNA
tgtggacagtctctgga

SEQ ID NO: 174819 - DNA, 17 bp, synthetic construct
  source 1..17: mol_type = other DNA
gtgtggacagtctctgg

SEQ ID NO: 174820 - DNA, 17 bp, synthetic construct
  source 1..17: mol_type = other DNA
ggtgtggacagtctctg

SEQ ID NO: 174821 - DNA, 17 bp, synthetic construct
  source 1..17: mol_type = other DNA
aggtgtggacagtctct

SEQ ID NO: 174822 - DNA, 17 bp, synthetic construct
  source 1..17: mol_type = other DNA
gaggtgtggacagtctc

SEQ ID NO: 174823 - DNA, 17 bp, synthetic construct
  source 1..17: mol_type = other DNA
ggaggtgtggacagtct

SEQ ID NO: 174824 - DNA, 17 bp, synthetic construct
  source 1..17: mol_type = other DNA
tggaggtgtggacagtc

SEQ ID NO: 174825 - DNA, 17 bp, synthetic construct
  source 1..17: mol_type = other DNA
gtggaggtgtggacagt

SEQ ID NO: 174826 - DNA, 17 bp, synthetic construct
  source 1..17: mol_type = other DNA
tgtggaggtgtggacag

SEQ ID NO: 174827 - DNA, 17 bp, synthetic construct
  source 1..17: mol_type = other DNA
ctgtggaggtgtggaca

SEQ ID NO: 174828 - DNA, 17 bp, synthetic construct
  source 1..17: mol_type = other DNA
actgtggaggtgtggac

SEQ ID NO: 174829 - DNA, 17 bp, synthetic construct
  source 1..17: mol_type = other DNA
cactgtggaggtgtgga

SEQ ID NO: 174830 - DNA, 17 bp, synthetic construct
  source 1..17: mol_type = other DNA
gcactgtggaggtgtgg

SEQ ID NO: 174831 - DNA, 17 bp, synthetic construct
  source 1..17: mol_type = other DNA
agcactgtggaggtgtg

SEQ ID NO: 174832 - DNA, 17 bp, synthetic construct
  source 1..17: mol_type = other DNA
aagcactgtggaggtgt

SEQ ID NO: 174833 - DNA, 17 bp, synthetic construct
  source 1..17: mol_type = other DNA
taagcactgtggaggtg

SEQ ID NO: 174834 - DNA, 17 bp, synthetic construct
  source 1..17: mol_type = other DNA
gtaagcactgtggaggt

SEQ ID NO: 174835 - DNA, 17 bp, synthetic construct
  source 1..17: mol_type = other DNA
ggtaagcactgtggagg

SEQ ID NO: 174836 - DNA, 17 bp, synthetic construct
  source 1..17: mol_type = other DNA
cggtaagcactgtggag

SEQ ID NO: 174837 - DNA, 17 bp, synthetic construct
  source 1..17: mol_type = other DNA
gcggtaagcactgtgga

SEQ ID NO: 174838 - DNA, 17 bp, synthetic construct
  source 1..17: mol_type = other DNA
ggcggtaagcactgtgg

SEQ ID NO: 174839 - DNA, 17 bp, synthetic construct
  source 1..17: mol_type = other DNA
tggcggtaagcactgtg

SEQ ID NO: 174840 - DNA, 17 bp, synthetic construct
  source 1..17: mol_type = other DNA
gtggcggtaagcactgt

SEQ ID NO: 174841 - DNA, 17 bp, synthetic construct
  source 1..17: mol_type = other DNA
cgtggcggtaagcactg

SEQ ID NO: 174842 - DNA, 17 bp, synthetic construct
  source 1..17: mol_type = other DNA
ccgtggcggtaagcact

SEQ ID NO: 174843 - DNA, 17 bp, synthetic construct
  source 1..17: mol_type = other DNA
gccgtggcggtaagcac

SEQ ID NO: 174844 - DNA, 17 bp, synthetic construct
  source 1..17: mol_type = other DNA
ggccgtggcggtaagca

SEQ ID NO: 174845 - DNA, 17 bp, synthetic construct
  source 1..17: mol_type = other DNA
tggccgtggcggtaagc

SEQ ID NO: 174846 - DNA, 17 bp, synthetic construct
  source 1..17: mol_type = other DNA
gtggccgtggcggtaag

SEQ ID NO: 174847 - DNA, 17 bp, synthetic construct
  source 1..17: mol_type = other DNA
ggtggccgtggcggtaa

SEQ ID NO: 174848 - DNA, 17 bp, synthetic construct
  source 1..17: mol_type = other DNA
tggtggccgtggcggta

SEQ ID NO: 174849 - DNA, 17 bp, synthetic construct
  source 1..17: mol_type = other DNA
gtggtggccgtggcggt

SEQ ID NO: 174850 - DNA, 17 bp, synthetic construct
  source 1..17: mol_type = other DNA
tgtggtggccgtggcgg

SEQ ID NO: 174851 - DNA, 17 bp, synthetic construct
  source 1..17: mol_type = other DNA
ttgtggtggccgtggcg

SEQ ID NO: 174852 - DNA, 17 bp, synthetic construct
  source 1..17: mol_type = other DNA
gttgtggtggccgtggc

SEQ ID NO: 174853 - DNA, 17 bp, synthetic construct
  source 1..17: mol_type = other DNA
ggttgtggtggccgtgg

SEQ ID NO: 174854 - DNA, 17 bp, synthetic construct
  source 1..17: mol_type = other DNA
cggttgtggtggccgtg

SEQ ID NO: 174855 - DNA, 17 bp, synthetic construct
  source 1..17: mol_type = other DNA
ccggttgtggtggccgt

SEQ ID NO: 174856 - DNA, 17 bp, synthetic construct
  source 1..17: mol_type = other DNA
cccggttgtggtggccg

SEQ ID NO: 174857 - DNA, 17 bp, synthetic construct
  source 1..17: mol_type = other DNA
ccccggttgtggtggcc

SEQ ID NO: 174858 - DNA, 17 bp, synthetic construct
  source 1..17: mol_type = other DNA
gccccggttgtggtggc

SEQ ID NO: 174859 - DNA, 17 bp, synthetic construct
  source 1..17: mol_type = other DNA
ggccccggttgtggtgg

SEQ ID NO: 174860 - DNA, 17 bp, synthetic construct
  source 1..17: mol_type = other DNA
tggccccggttgtggtg

SEQ ID NO: 174861 - DNA, 17 bp, synthetic construct
  source 1..17: mol_type = other DNA
gtggccccggttgtggt

SEQ ID NO: 174862 - DNA, 17 bp, synthetic construct
  source 1..17: mol_type = other DNA
ggtggccccggttgtgg

SEQ ID NO: 174863 - DNA, 17 bp, synthetic construct
  source 1..17: mol_type = other DNA
cggtggccccggttgtg

SEQ ID NO: 174864 - DNA, 17 bp, synthetic construct
  source 1..17: mol_type = other DNA
ccggtggccccggttgt

SEQ ID NO: 174865 - DNA, 17 bp, synthetic construct
  source 1..17: mol_type = other DNA
gccggtggccccggttg

SEQ ID NO: 174866 - DNA, 17 bp, synthetic construct
  source 1..17: mol_type = other DNA
agccggtggccccggtt

SEQ ID NO: 174867 - DNA, 17 bp, synthetic construct
  source 1..17: mol_type = other DNA
gagccggtggccccggt

SEQ ID NO: 174868 - DNA, 17 bp, synthetic construct
  source 1..17: mol_type = other DNA
agagccggtggccccgg

SEQ ID NO: 174869 - DNA, 17 bp, synthetic construct
  source 1..17: mol_type = other DNA
cagagccggtggccccg

SEQ ID NO: 174870 - DNA, 17 bp, synthetic construct
  source 1..17: mol_type = other DNA
acagagccggtggcccc

SEQ ID NO: 174871 - DNA, 17 bp, synthetic construct
  source 1..17: mol_type = other DNA
cacagagccggtggccc

SEQ ID NO: 174872 - DNA, 17 bp, synthetic construct
  source 1..17: mol_type = other DNA
ccacagagccggtggcc

SEQ ID NO: 174873 - DNA, 17 bp, synthetic construct
  source 1..17: mol_type = other DNA
gccacagagccggtggc

SEQ ID NO: 174874 - DNA, 17 bp, synthetic construct
  source 1..17: mol_type = other DNA
ggccacagagccggtgg

SEQ ID NO: 174875 - DNA, 17 bp, synthetic construct
  source 1..17: mol_type = other DNA
tggccacagagccggtg

SEQ ID NO: 174876 - DNA, 17 bp, synthetic construct
  source 1..17: mol_type = other DNA
gtggccacagagccggt

SEQ ID NO: 174877 - DNA, 17 bp, synthetic construct
  source 1..17: mol_type = other DNA
ggtggccacagagccgg

SEQ ID NO: 174878 - DNA, 17 bp, synthetic construct
  source 1..17: mol_type = other DNA
gggtggccacagagccg

SEQ ID NO: 174879 - DNA, 17 bp, synthetic construct
  source 1..17: mol_type = other DNA
ggggtggccacagagcc

SEQ ID NO: 174880 - DNA, 17 bp, synthetic construct
  source 1..17: mol_type = other DNA
gggggtggccacagagc

SEQ ID NO: 174881 - DNA, 17 bp, synthetic construct
  source 1..17: mol_type = other DNA
agggggtggccacagag

SEQ ID NO: 174882 - DNA, 17 bp, synthetic construct
  source 1..17: mol_type = other DNA
gagggggtggccacaga

SEQ ID NO: 174883 - DNA, 17 bp, synthetic construct
  source 1..17: mol_type = other DNA
ggagggggtggccacag

SEQ ID NO: 174884 - DNA, 17 bp, synthetic construct
  source 1..17: mol_type = other DNA
aggagggggtggccaca

SEQ ID NO: 174885 - DNA, 17 bp, synthetic construct
  source 1..17: mol_type = other DNA
gaggagggggtggccac

SEQ ID NO: 174886 - DNA, 17 bp, synthetic construct
  source 1..17: mol_type = other DNA
ggaggagggggtggcca

SEQ ID NO: 174887 - DNA, 17 bp, synthetic construct
  source 1..17: mol_type = other DNA
tggaggagggggtggcc

SEQ ID NO: 174888 - DNA, 17 bp, synthetic construct
  source 1..17: mol_type = other DNA
gtggaggagggggtggc

SEQ ID NO: 174889 - DNA, 17 bp, synthetic construct
  source 1..17: mol_type = other DNA
ggtggaggagggggtgg

SEQ ID NO: 174890 - DNA, 17 bp, synthetic construct
  source 1..17: mol_type = other DNA
gggtggaggagggggtg

SEQ ID NO: 174891 - DNA, 17 bp, synthetic construct
  source 1..17: mol_type = other DNA
ggggtggaggagggggt

SEQ ID NO: 174892 - DNA, 17 bp, synthetic construct
  source 1..17: mol_type = other DNA
tggggtggaggaggggg

SEQ ID NO: 174893 - DNA, 17 bp, synthetic construct
  source 1..17: mol_type = other DNA
ctggggtggaggagggg

SEQ ID NO: 174894 - DNA, 17 bp, synthetic construct
  source 1..17: mol_type = other DNA
cctggggtggaggaggg

SEQ ID NO: 174895 - DNA, 17 bp, synthetic construct
  source 1..17: mol_type = other DNA
tcctggggtggaggagg

SEQ ID NO: 174896 - DNA, 17 bp, synthetic construct
  source 1..17: mol_type = other DNA
ttcctggggtggaggag

SEQ ID NO: 174897 - DNA, 17 bp, synthetic construct
  source 1..17: mol_type = other DNA
gttcctggggtggagga

SEQ ID NO: 174898 - DNA, 17 bp, synthetic construct
  source 1..17: mol_type = other DNA
tgttcctggggtggagg

SEQ ID NO: 174899 - DNA, 17 bp, synthetic construct
  source 1..17: mol_type = other DNA
ctgttcctggggtggag

SEQ ID NO: 174900 - DNA, 17 bp, synthetic construct
  source 1..17: mol_type = other DNA
gctgttcctggggtgga

SEQ ID NO: 174901 - DNA, 17 bp, synthetic construct
  source 1..17: mol_type = other DNA
agctgttcctggggtgg

SEQ ID NO: 174902 - DNA, 17 bp, synthetic construct
  source 1..17: mol_type = other DNA
gagctgttcctggggtg

SEQ ID NO: 174903 - DNA, 17 bp, synthetic construct
  source 1..17: mol_type = other DNA
tgagctgttcctggggt

SEQ ID NO: 174904 - DNA, 17 bp, synthetic construct
  source 1..17: mol_type = other DNA
gtgagctgttcctgggg

SEQ ID NO: 174905 - DNA, 17 bp, synthetic construct
  source 1..17: mol_type = other DNA
tgtgagctgttcctggg

SEQ ID NO: 174906 - DNA, 17 bp, synthetic construct
  source 1..17: mol_type = other DNA
gtgtgagctgttcctgg

SEQ ID NO: 174907 - DNA, 17 bp, synthetic construct
  source 1..17: mol_type = other DNA
agtgtgagctgttcctg

SEQ ID NO: 174908 - DNA, 17 bp, synthetic construct
  source 1..17: mol_type = other DNA
tagtgtgagctgttcct

SEQ ID NO: 174909 - DNA, 17 bp, synthetic construct
  source 1..17: mol_type = other DNA
gtagtgtgagctgttcc

SEQ ID NO: 174910 - DNA, 17 bp, synthetic construct
  source 1..17: mol_type = other DNA
ggtagtgtgagctgttc

SEQ ID NO: 174911 - DNA, 17 bp, synthetic construct
  source 1..17: mol_type = other DNA
tggtagtgtgagctgtt

SEQ ID NO: 174912 - DNA, 17 bp, synthetic construct
  source 1..17: mol_type = other DNA
ttggtagtgtgagctgt

SEQ ID NO: 174913 - DNA, 17 bp, synthetic construct
  source 1..17: mol_type = other DNA
tttggtagtgtgagctg

SEQ ID NO: 174914 - DNA, 17 bp, synthetic construct
  source 1..17: mol_type = other DNA
ctttggtagtgtgagct

SEQ ID NO: 174915 - DNA, 17 bp, synthetic construct
  source 1..17: mol_type = other DNA
actttggtagtgtgagc

SEQ ID NO: 174916 - DNA, 17 bp, synthetic construct
  source 1..17: mol_type = other DNA
cactttggtagtgtgag

SEQ ID NO: 174917 - DNA, 17 bp, synthetic construct
  source 1..17: mol_type = other DNA
gcactttggtagtgtga

SEQ ID NO: 174918 - DNA, 17 bp, synthetic construct
  source 1..17: mol_type = other DNA
ggcactttggtagtgtg

SEQ ID NO: 174919 - DNA, 17 bp, synthetic construct
  source 1..17: mol_type = other DNA
cggcactttggtagtgt

SEQ ID NO: 174920 - DNA, 17 bp, synthetic construct
  source 1..17: mol_type = other DNA
tcggcactttggtagtg

SEQ ID NO: 174921 - DNA, 17 bp, synthetic construct
  source 1..17: mol_type = other DNA
gtcggcactttggtagt

SEQ ID NO: 174922 - DNA, 17 bp, synthetic construct
  source 1..17: mol_type = other DNA
agtcggcactttggtag

SEQ ID NO: 174923 - DNA, 17 bp, synthetic construct
  source 1..17: mol_type = other DNA
tagtcggcactttggta

SEQ ID NO: 174924 - DNA, 17 bp, synthetic construct
  source 1..17: mol_type = other DNA
gtagtcggcactttggt

SEQ ID NO: 174925 - DNA, 17 bp, synthetic construct
  source 1..17: mol_type = other DNA
ggtagtcggcactttgg

SEQ ID NO: 174926 - DNA, 17 bp, synthetic construct
  source 1..17: mol_type = other DNA
tggtagtcggcactttg

SEQ ID NO: 174927 - DNA, 17 bp, synthetic construct
  source 1..17: mol_type = other DNA
gtggtagtcggcacttt

SEQ ID NO: 174928 - DNA, 17 bp, synthetic construct
  source 1..17: mol_type = other DNA
tgtggtagtcggcactt

SEQ ID NO: 174929 - DNA, 17 bp, synthetic construct
  source 1..17: mol_type = other DNA
ttgtggtagtcggcact

SEQ ID NO: 174930 - DNA, 17 bp, synthetic construct
  source 1..17: mol_type = other DNA
gttgtggtagtcggcac

SEQ ID NO: 174931 - DNA, 17 bp, synthetic construct
  source 1..17: mol_type = other DNA
ggttgtggtagtcggca

SEQ ID NO: 174932 - DNA, 17 bp, synthetic construct
  source 1..17: mol_type = other DNA
tggttgtggtagtcggc

SEQ ID NO: 174933 - DNA, 17 bp, synthetic construct
  source 1..17: mol_type = other DNA
gtggttgtggtagtcgg

SEQ ID NO: 174934 - DNA, 17 bp, synthetic construct
  source 1..17: mol_type = other DNA
cgtggttgtggtagtcg

SEQ ID NO: 174935 - DNA, 17 bp, synthetic construct
  source 1..17: mol_type = other DNA
ccgtggttgtggtagtc

SEQ ID NO: 174936 - DNA, 17 bp, synthetic construct
  source 1..17: mol_type = other DNA
cccgtggttgtggtagt

SEQ ID NO: 174937 - DNA, 17 bp, synthetic construct
  source 1..17: mol_type = other DNA
gcccgtggttgtggtag

SEQ ID NO: 174938 - DNA, 17 bp, synthetic construct
  source 1..17: mol_type = other DNA
agcccgtggttgtggta

SEQ ID NO: 174939 - DNA, 17 bp, synthetic construct
  source 1..17: mol_type = other DNA
aagcccgtggttgtggt

SEQ ID NO: 174940 - DNA, 17 bp, synthetic construct
  source 1..17: mol_type = other DNA
gaagcccgtggttgtgg

SEQ ID NO: 174941 - DNA, 17 bp, synthetic construct
  source 1..17: mol_type = other DNA
tgaagcccgtggttgtg

SEQ ID NO: 174942 - DNA, 17 bp, synthetic construct
  source 1..17: mol_type = other DNA
gtgaagcccgtggttgt

SEQ ID NO: 174943 - DNA, 17 bp, synthetic construct
  source 1..17: mol_type = other DNA
tgtgaagcccgtggttg

SEQ ID NO: 174944 - DNA, 17 bp, synthetic construct
  source 1..17: mol_type = other DNA
ctgtgaagcccgtggtt

SEQ ID NO: 174945 - DNA, 17 bp, synthetic construct
  source 1..17: mol_type = other DNA
gctgtgaagcccgtggt

SEQ ID NO: 174946 - DNA, 17 bp, synthetic construct
  source 1..17: mol_type = other DNA
ggctgtgaagcccgtgg

SEQ ID NO: 174947 - DNA, 17 bp, synthetic construct
  source 1..17: mol_type = other DNA
tggctgtgaagcccgtg

SEQ ID NO: 174948 - DNA, 17 bp, synthetic construct
  source 1..17: mol_type = other DNA
gtggctgtgaagcccgt

SEQ ID NO: 174949 - DNA, 17 bp, synthetic construct
  source 1..17: mol_type = other DNA
ggtggctgtgaagcccg

SEQ ID NO: 174950 - DNA, 17 bp, synthetic construct
  source 1..17: mol_type = other DNA
gggtggctgtgaagccc

SEQ ID NO: 174951 - DNA, 17 bp, synthetic construct
  source 1..17: mol_type = other DNA
ggggtggctgtgaagcc

SEQ ID NO: 174952 - DNA, 17 bp, synthetic construct
  source 1..17: mol_type = other DNA
gggggtggctgtgaagc

SEQ ID NO: 174953 - DNA, 17 bp, synthetic construct
  source 1..17: mol_type = other DNA
agggggtggctgtgaag

SEQ ID NO: 174954 - DNA, 17 bp, synthetic construct
  source 1..17: mol_type = other DNA
gagggggtggctgtgaa

SEQ ID NO: 174955 - DNA, 17 bp, synthetic construct
  source 1..17: mol_type = other DNA
ggagggggtggctgtga

SEQ ID NO: 174956 - DNA, 17 bp, synthetic construct
  source 1..17: mol_type = other DNA
aggagggggtggctgtg

SEQ ID NO: 174957 - DNA, 17 bp, synthetic construct
  source 1..17: mol_type = other DNA
gaggagggggtggctgt

SEQ ID NO: 174958 - DNA, 17 bp, synthetic construct
  source 1..17: mol_type = other DNA
ggaggagggggtggctg

SEQ ID NO: 174959 - DNA, 17 bp, synthetic construct
  source 1..17: mol_type = other DNA
tggaggagggggtggct

SEQ ID NO: 174960 - DNA, 17 bp, synthetic construct
  source 1..17: mol_type = other DNA
ctggaggagggggtggc

SEQ ID NO: 174961 - DNA, 17 bp, synthetic construct
  source 1..17: mol_type = other DNA
gctggaggagggggtgg

SEQ ID NO: 174962 - DNA, 17 bp, synthetic construct
  source 1..17: mol_type = other DNA
ggctggaggagggggtg

SEQ ID NO: 174963 - DNA, 17 bp, synthetic construct
  source 1..17: mol_type = other DNA
gggctggaggagggggt

SEQ ID NO: 174964 - DNA, 17 bp, synthetic construct
  source 1..17: mol_type = other DNA
tgggctggaggaggggg

SEQ ID NO: 174965 - DNA, 17 bp, synthetic construct
  source 1..17: mol_type = other DNA
ctgggctggaggagggg

SEQ ID NO: 174966 - DNA, 17 bp, synthetic construct
  source 1..17: mol_type = other DNA
cctgggctggaggaggg

SEQ ID NO: 174967 - DNA, 17 bp, synthetic construct
  source 1..17: mol_type = other DNA
ccctgggctggaggagg

SEQ ID NO: 174968 - DNA, 17 bp, synthetic construct
  source 1..17: mol_type = other DNA
tccctgggctggaggag

SEQ ID NO: 174969 - DNA, 17 bp, synthetic construct
  source 1..17: mol_type = other DNA
gtccctgggctggagga

SEQ ID NO: 174970 - DNA, 17 bp, synthetic construct
  source 1..17: mol_type = other DNA
cgtccctgggctggagg

SEQ ID NO: 174971 - DNA, 17 bp, synthetic construct
  source 1..17: mol_type = other DNA
ccgtccctgggctggag

SEQ ID NO: 174972 - DNA, 17 bp, synthetic construct
  source 1..17: mol_type = other DNA
gccgtccctgggctgga

SEQ ID NO: 174973 - DNA, 17 bp, synthetic construct
  source 1..17: mol_type = other DNA
tgccgtccctgggctgg

SEQ ID NO: 174974 - DNA, 17 bp, synthetic construct
  source 1..17: mol_type = other DNA
gtgccgtccctgggctg

SEQ ID NO: 174975 - DNA, 17 bp, synthetic construct
  source 1..17: mol_type = other DNA
agtgccgtccctgggct

SEQ ID NO: 174976 - DNA, 17 bp, synthetic construct
  source 1..17: mol_type = other DNA
gagtgccgtccctgggc

SEQ ID NO: 174977 - DNA, 17 bp, synthetic construct
  source 1..17: mol_type = other DNA
tgagtgccgtccctggg

SEQ ID NO: 174978 - DNA, 17 bp, synthetic construct
  source 1..17: mol_type = other DNA
gtgagtgccgtccctgg

SEQ ID NO: 174979 - DNA, 17 bp, synthetic construct
  source 1..17: mol_type = other DNA
cgtgagtgccgtccctg

SEQ ID NO: 174980 - DNA, 17 bp, synthetic construct
  source 1..17: mol_type = other DNA
gcgtgagtgccgtccct

SEQ ID NO: 174981 - DNA, 17 bp, synthetic construct
  source 1..17: mol_type = other DNA
ggcgtgagtgccgtccc

SEQ ID NO: 174982 - DNA, 17 bp, synthetic construct
  source 1..17: mol_type = other DNA
aggcgtgagtgccgtcc

SEQ ID NO: 174983 - DNA, 17 bp, synthetic construct
  source 1..17: mol_type = other DNA
gaggcgtgagtgccgtc

SEQ ID NO: 174984 - DNA, 17 bp, synthetic construct
  source 1..17: mol_type = other DNA
ggaggcgtgagtgccgt

SEQ ID NO: 174985 - DNA, 17 bp, synthetic construct
  source 1..17: mol_type = other DNA
tggaggcgtgagtgccg

SEQ ID NO: 174986 - DNA, 17 bp, synthetic construct
  source 1..17: mol_type = other DNA
ctggaggcgtgagtgcc

SEQ ID NO: 174987 - DNA, 17 bp, synthetic construct
  source 1..17: mol_type = other DNA
actggaggcgtgagtgc

SEQ ID NO: 174988 - DNA, 17 bp, synthetic construct
  source 1..17: mol_type = other DNA
cactggaggcgtgagtg

SEQ ID NO: 174989 - DNA, 17 bp, synthetic construct
  source 1..17: mol_type = other DNA
acactggaggcgtgagt

SEQ ID NO: 174990 - DNA, 17 bp, synthetic construct
  source 1..17: mol_type = other DNA
cacactggaggcgtgag

SEQ ID NO: 174991 - DNA, 17 bp, synthetic construct
  source 1..17: mol_type = other DNA
ccacactggaggcgtga

SEQ ID NO: 174992 - DNA, 17 bp, synthetic construct
  source 1..17: mol_type = other DNA
tccacactggaggcgtg

SEQ ID NO: 174993 - DNA, 17 bp, synthetic construct
  source 1..17: mol_type = other DNA
atccacactggaggcgt

SEQ ID NO: 174994 - DNA, 17 bp, synthetic construct
  source 1..17: mol_type = other DNA
gatccacactggaggcg

SEQ ID NO: 174995 - DNA, 17 bp, synthetic construct
  source 1..17: mol_type = other DNA
tgatccacactggaggc

SEQ ID NO: 174996 - DNA, 17 bp, synthetic construct
  source 1..17: mol_type = other DNA
ctgatccacactggagg

SEQ ID NO: 174997 - DNA, 17 bp, synthetic construct
  source 1..17: mol_type = other DNA
gctgatccacactggag

SEQ ID NO: 174998 - DNA, 17 bp, synthetic construct
  source 1..17: mol_type = other DNA
tgctgatccacactgga

SEQ ID NO: 174999 - DNA, 17 bp, synthetic construct
  source 1..17: mol_type = other DNA
gtgctgatccacactgg

SEQ ID NO: 175000 - DNA, 17 bp, synthetic construct
  source 1..17: mol_type = other DNA
tgtgctgatccacactg

SEQ ID NO: 175001 - DNA, 17 bp, synthetic construct
  source 1..17: mol_type = other DNA
ttgtgctgatccacact

SEQ ID NO: 175002 - DNA, 17 bp, synthetic construct
  source 1..17: mol_type = other DNA
gttgtgctgatccacac

SEQ ID NO: 175003 - DNA, 17 bp, synthetic construct
  source 1..17: mol_type = other DNA
ggttgtgctgatccaca

SEQ ID NO: 175004 - DNA, 17 bp, synthetic construct
  source 1..17: mol_type = other DNA
tggttgtgctgatccac

SEQ ID NO: 175005 - DNA, 17 bp, synthetic construct
  source 1..17: mol_type = other DNA
gtggttgtgctgatcca

SEQ ID NO: 175006 - DNA, 17 bp, synthetic construct
  source 1..17: mol_type = other DNA
ggtggttgtgctgatcc

SEQ ID NO: 175007 - DNA, 17 bp, synthetic construct
  source 1..17: mol_type = other DNA
tggtggttgtgctgatc

SEQ ID NO: 175008 - DNA, 17 bp, synthetic construct
  source 1..17: mol_type = other DNA
gtggtggttgtgctgat

SEQ ID NO: 175009 - DNA, 17 bp, synthetic construct
  source 1..17: mol_type = other DNA
tgtggtggttgtgctga

SEQ ID NO: 175010 - DNA, 17 bp, synthetic construct
  source 1..17: mol_type = other DNA
gtgtggtggttgtgctg

SEQ ID NO: 175011 - DNA, 17 bp, synthetic construct
  source 1..17: mol_type = other DNA
ggtgtggtggttgtgct

SEQ ID NO: 175012 - DNA, 17 bp, synthetic construct
  source 1..17: mol_type = other DNA
gggtgtggtggttgtgc

SEQ ID NO: 175013 - DNA, 17 bp, synthetic construct
  source 1..17: mol_type = other DNA
tgggtgtggtggttgtg

SEQ ID NO: 175014 - DNA, 17 bp, synthetic construct
  source 1..17: mol_type = other DNA
gtgggtgtggtggttgt

SEQ ID NO: 175015 - DNA, 17 bp, synthetic construct
  source 1..17: mol_type = other DNA
tgtgggtgtggtggttg

SEQ ID NO: 175016 - DNA, 17 bp, synthetic construct
  source 1..17: mol_type = other DNA
ttgtgggtgtggtggtt

SEQ ID NO: 175017 - DNA, 17 bp, synthetic construct
  source 1..17: mol_type = other DNA
gttgtgggtgtggtggt

SEQ ID NO: 175018 - DNA, 17 bp, synthetic construct
  source 1..17: mol_type = other DNA
ggttgtgggtgtggtgg

SEQ ID NO: 175019 - DNA, 17 bp, synthetic construct
  source 1..17: mol_type = other DNA
tggttgtgggtgtggtg

SEQ ID NO: 175020 - DNA, 17 bp, synthetic construct
  source 1..17: mol_type = other DNA
gtggttgtgggtgtggt

SEQ ID NO: 175021 - DNA, 17 bp, synthetic construct
  source 1..17: mol_type = other DNA
ggtggttgtgggtgtgg

SEQ ID NO: 175022 - DNA, 17 bp, synthetic construct
  source 1..17: mol_type = other DNA
tggtggttgtgggtgtg

SEQ ID NO: 175023 - DNA, 17 bp, synthetic construct
  source 1..17: mol_type = other DNA
gtggtggttgtgggtgt

SEQ ID NO: 175024 - DNA, 17 bp, synthetic construct
  source 1..17: mol_type = other DNA
tgtggtggttgtgggtg

SEQ ID NO: 175025 - DNA, 17 bp, synthetic construct
  source 1..17: mol_type = other DNA
gtgtggtggttgtgggt

SEQ ID NO: 175026 - DNA, 17 bp, synthetic construct
  source 1..17: mol_type = other DNA
ggtgtggtggttgtggg

SEQ ID NO: 175027 - DNA, 17 bp, synthetic construct
  source 1..17: mol_type = other DNA
gggtgtggtggttgtgg

SEQ ID NO: 175028 - DNA, 17 bp, synthetic construct
  source 1..17: mol_type = other DNA
tgggtgtggtggttgtg

SEQ ID NO: 175029 - DNA, 17 bp, synthetic construct
  source 1..17: mol_type = other DNA
gtgggtgtggtggttgt

SEQ ID NO: 175030 - DNA, 17 bp, synthetic construct
  source 1..17: mol_type = other DNA
tgtgggtgtggtggttg

SEQ ID NO: 175031 - DNA, 17 bp, synthetic construct
  source 1..17: mol_type = other DNA
ttgtgggtgtggtggtt

SEQ ID NO: 175032 - DNA, 17 bp, synthetic construct
  source 1..17: mol_type = other DNA
gttgtgggtgtggtggt

SEQ ID NO: 175033 - DNA, 17 bp, synthetic construct
  source 1..17: mol_type = other DNA
ggttgtgggtgtggtgg

SEQ ID NO: 175034 - DNA, 17 bp, synthetic construct
  source 1..17: mol_type = other DNA
tggttgtgggtgtggtg

SEQ ID NO: 175035 - DNA, 17 bp, synthetic construct
  source 1..17: mol_type = other DNA
ctggttgtgggtgtggt

SEQ ID NO: 175036 - DNA, 17 bp, synthetic construct
  source 1..17: mol_type = other DNA
actggttgtgggtgtgg

SEQ ID NO: 175037 - DNA, 17 bp, synthetic construct
  source 1..17: mol_type = other DNA
cactggttgtgggtgtg

SEQ ID NO: 175038 - DNA, 17 bp, synthetic construct
  source 1..17: mol_type = other DNA
ccactggttgtgggtgt

SEQ ID NO: 175039 - DNA, 17 bp, synthetic construct
  source 1..17: mol_type = other DNA
gccactggttgtgggtg

SEQ ID NO: 175040 - DNA, 17 bp, synthetic construct
  source 1..17: mol_type = other DNA
agccactggttgtgggt

SEQ ID NO: 175041 - DNA, 17 bp, synthetic construct
  source 1..17: mol_type = other DNA
gagccactggttgtggg

SEQ ID NO: 175042 - DNA, 17 bp, synthetic construct
  source 1..17: mol_type = other DNA
ggagccactggttgtgg

SEQ ID NO: 175043 - DNA, 17 bp, synthetic construct
  source 1..17: mol_type = other DNA
tggagccactggttgtg

SEQ ID NO: 175044 - DNA, 17 bp, synthetic construct
  source 1..17: mol_type = other DNA
gtggagccactggttgt

SEQ ID NO: 175045 - DNA, 17 bp, synthetic construct
  source 1..17: mol_type = other DNA
cgtggagccactggttg

SEQ ID NO: 175046 - DNA, 17 bp, synthetic construct
  source 1..17: mol_type = other DNA
ccgtggagccactggtt

SEQ ID NO: 175047 - DNA, 17 bp, synthetic construct
  source 1..17: mol_type = other DNA
accgtggagccactggt

SEQ ID NO: 175048 - DNA, 17 bp, synthetic construct
  source 1..17: mol_type = other DNA
caccgtggagccactgg

SEQ ID NO: 175049 - DNA, 17 bp, synthetic construct
  source 1..17: mol_type = other DNA
tcaccgtggagccactg

SEQ ID NO: 175050 - DNA, 17 bp, synthetic construct
  source 1..17: mol_type = other DNA
gtcaccgtggagccact

SEQ ID NO: 175051 - DNA, 17 bp, synthetic construct
  source 1..17: mol_type = other DNA
ggtcaccgtggagccac

SEQ ID NO: 175052 - DNA, 17 bp, synthetic construct
  source 1..17: mol_type = other DNA
gggtcaccgtggagcca

SEQ ID NO: 175053 - DNA, 17 bp, synthetic construct
  source 1..17: mol_type = other DNA
ggggtcaccgtggagcc

SEQ ID NO: 175054 - DNA, 17 bp, synthetic construct
  source 1..17: mol_type = other DNA
gggggtcaccgtggagc

SEQ ID NO: 175055 - DNA, 17 bp, synthetic construct
  source 1..17: mol_type = other DNA
agggggtcaccgtggag

SEQ ID NO: 175056 - DNA, 17 bp, synthetic construct
  source 1..17: mol_type = other DNA
gagggggtcaccgtgga

SEQ ID NO: 175057 - DNA, 17 bp, synthetic construct
  source 1..17: mol_type = other DNA
ggagggggtcaccgtgg

SEQ ID NO: 175058 - DNA, 17 bp, synthetic construct
  source 1..17: mol_type = other DNA
aggagggggtcaccgtg

SEQ ID NO: 175059 - DNA, 17 bp, synthetic construct
  source 1..17: mol_type = other DNA
gaggagggggtcaccgt

SEQ ID NO: 175060 - DNA, 17 bp, synthetic construct
  source 1..17: mol_type = other DNA
ggaggagggggtcaccg

SEQ ID NO: 175061 - DNA, 17 bp, synthetic construct
  source 1..17: mol_type = other DNA
tggaggagggggtcacc

SEQ ID NO: 175062 - DNA, 17 bp, synthetic construct
  source 1..17: mol_type = other DNA
atggaggagggggtcac

SEQ ID NO: 175063 - DNA, 17 bp, synthetic construct
  source 1..17: mol_type = other DNA
gatggaggagggggtca

SEQ ID NO: 175064 - DNA, 17 bp, synthetic construct
  source 1..17: mol_type = other DNA
ggatggaggagggggtc

SEQ ID NO: 175065 - DNA, 17 bp, synthetic construct
  source 1..17: mol_type = other DNA
gggatggaggagggggt

SEQ ID NO: 175066 - DNA, 17 bp, synthetic construct
  source 1..17: mol_type = other DNA
cgggatggaggaggggg

SEQ ID NO: 175067 - DNA, 17 bp, synthetic construct
  source 1..17: mol_type = other DNA
ccgggatggaggagggg

SEQ ID NO: 175068 - DNA, 17 bp, synthetic construct
  source 1..17: mol_type = other DNA
cccgggatggaggaggg

SEQ ID NO: 175069 - DNA, 17 bp, synthetic construct
  source 1..17: mol_type = other DNA
ccccgggatggaggagg

SEQ ID NO: 175070 - DNA, 17 bp, synthetic construct
  source 1..17: mol_type = other DNA
tccccgggatggaggag

SEQ ID NO: 175071 - DNA, 17 bp, synthetic construct
  source 1..17: mol_type = other DNA
gtccccgggatggagga

SEQ ID NO: 175072 - DNA, 17 bp, synthetic construct
  source 1..17: mol_type = other DNA
ggtccccgggatggagg

SEQ ID NO: 175073 - DNA, 17 bp, synthetic construct
  source 1..17: mol_type = other DNA
tggtccccgggatggag

SEQ ID NO: 175074 - DNA, 17 bp, synthetic construct
  source 1..17: mol_type = other DNA
gtggtccccgggatgga

SEQ ID NO: 175075 - DNA, 17 bp, synthetic construct
  source 1..17: mol_type = other DNA
ggtggtccccgggatgg

SEQ ID NO: 175076 - DNA, 17 bp, synthetic construct
  source 1..17: mol_type = other DNA
gggtggtccccgggatg

SEQ ID NO: 175077 - DNA, 17 bp, synthetic construct
  source 1..17: mol_type = other DNA
tgggtggtccccgggat

SEQ ID NO: 175078 - DNA, 17 bp, synthetic construct
  source 1..17: mol_type = other DNA
gtgggtggtccccggga

SEQ ID NO: 175079 - DNA, 17 bp, synthetic construct
  source 1..17: mol_type = other DNA
tgtgggtggtccccggg

SEQ ID NO: 175080 - DNA, 17 bp, synthetic construct
  source 1..17: mol_type = other DNA
gtgtgggtggtccccgg

SEQ ID NO: 175081 - DNA, 17 bp, synthetic construct
  source 1..17: mol_type = other DNA
ggtgtgggtggtccccg

SEQ ID NO: 175082 - DNA, 17 bp, synthetic construct
  source 1..17: mol_type = other DNA
cggtgtgggtggtcccc

SEQ ID NO: 175083 - DNA, 17 bp, synthetic construct
  source 1..17: mol_type = other DNA
gcggtgtgggtggtccc

SEQ ID NO: 175084 - DNA, 17 bp, synthetic construct
  source 1..17: mol_type = other DNA
ggcggtgtgggtggtcc

SEQ ID NO: 175085 - DNA, 17 bp, synthetic construct
  source 1..17: mol_type = other DNA
tggcggtgtgggtggtc

SEQ ID NO: 175086 - DNA, 17 bp, synthetic construct
  source 1..17: mol_type = other DNA
ctggcggtgtgggtggt

SEQ ID NO: 175087 - DNA, 17 bp, synthetic construct
  source 1..17: mol_type = other DNA
tctggcggtgtgggtgg

SEQ ID NO: 175088 - DNA, 17 bp, synthetic construct
  source 1..17: mol_type = other DNA
ctctggcggtgtgggtg

SEQ ID NO: 175089 - DNA, 17 bp, synthetic construct
  source 1..17: mol_type = other DNA
actctggcggtgtgggt

SEQ ID NO: 175090 - DNA, 17 bp, synthetic construct
  source 1..17: mol_type = other DNA
cactctggcggtgtggg

SEQ ID NO: 175091 - DNA, 17 bp, synthetic construct
  source 1..17: mol_type = other DNA
gcactctggcggtgtgg

SEQ ID NO: 175092 - DNA, 17 bp, synthetic construct
  source 1..17: mol_type = other DNA
agcactctggcggtgtg

SEQ ID NO: 175093 - DNA, 17 bp, synthetic construct
  source 1..17: mol_type = other DNA
cagcactctggcggtgt

SEQ ID NO: 175094 - DNA, 17 bp, synthetic construct
  source 1..17: mol_type = other DNA
tcagcactctggcggtg

SEQ ID NO: 175095 - DNA, 17 bp, synthetic construct
  source 1..17: mol_type = other DNA
gtcagcactctggcggt

SEQ ID NO: 175096 - DNA, 17 bp, synthetic construct
  source 1..17: mol_type = other DNA
ggtcagcactctggcgg

SEQ ID NO: 175097 - DNA, 17 bp, synthetic construct
  source 1..17: mol_type = other DNA
tggtcagcactctggcg

SEQ ID NO: 175098 - DNA, 17 bp, synthetic construct
  source 1..17: mol_type = other DNA
gtggtcagcactctggc

SEQ ID NO: 175099 - DNA, 17 bp, synthetic construct
  source 1..17: mol_type = other DNA
ggtggtcagcactctgg

SEQ ID NO: 175100 - DNA, 17 bp, synthetic construct
  source 1..17: mol_type = other DNA
tggtggtcagcactctg

SEQ ID NO: 175101 - DNA, 17 bp, synthetic construct
  source 1..17: mol_type = other DNA
gtggtggtcagcactct

SEQ ID NO: 175102 - DNA, 17 bp, synthetic construct
  source 1..17: mol_type = other DNA
ggtggtggtcagcactc

SEQ ID NO: 175103 - DNA, 17 bp, synthetic construct
  source 1..17: mol_type = other DNA
tggtggtggtcagcact

SEQ ID NO: 175104 - DNA, 17 bp, synthetic construct
  source 1..17: mol_type = other DNA
gtggtggtggtcagcac

SEQ ID NO: 175105 - DNA, 17 bp, synthetic construct
  source 1..17: mol_type = other DNA
ggtggtggtggtcagca

SEQ ID NO: 175106 - DNA, 17 bp, synthetic construct
  source 1..17: mol_type = other DNA
tggtggtggtggtcagc

SEQ ID NO: 175107 - DNA, 17 bp, synthetic construct
  source 1..17: mol_type = other DNA
gtggtggtggtggtcag

SEQ ID NO: 175108 - DNA, 17 bp, synthetic construct
  source 1..17: mol_type = other DNA
tgtggtggtggtggtca

SEQ ID NO: 175109 - DNA, 17 bp, synthetic construct
  source 1..17: mol_type = other DNA
ttgtggtggtggtggtc

SEQ ID NO: 175110 - DNA, 17 bp, synthetic construct
  source 1..17: mol_type = other DNA
gttgtggtggtggtggt

SEQ ID NO: 175111 - DNA, 17 bp, synthetic construct
  source 1..17: mol_type = other DNA
agttgtggtggtggtgg

SEQ ID NO: 175112 - DNA, 17 bp, synthetic construct
  source 1..17: mol_type = other DNA
cagttgtggtggtggtg

SEQ ID NO: 175113 - DNA, 17 bp, synthetic construct
  source 1..17: mol_type = other DNA
acagttgtggtggtggt

SEQ ID NO: 175114 - DNA, 17 bp, synthetic construct
  source 1..17: mol_type = other DNA
cacagttgtggtggtgg

SEQ ID NO: 175115 - DNA, 17 bp, synthetic construct
  source 1..17: mol_type = other DNA
ccacagttgtggtggtg

SEQ ID NO: 175116 - DNA, 17 bp, synthetic construct
  source 1..17: mol_type = other DNA
gccacagttgtggtggt

SEQ ID NO: 175117 - DNA, 17 bp, synthetic construct
  source 1..17: mol_type = other DNA
ggccacagttgtggtgg

SEQ ID NO: 175118 - DNA, 17 bp, synthetic construct
  source 1..17: mol_type = other DNA
tggccacagttgtggtg

SEQ ID NO: 175119 - DNA, 17 bp, synthetic construct
  source 1..17: mol_type = other DNA
gtggccacagttgtggt

SEQ ID NO: 175120 - DNA, 17 bp, synthetic construct
  source 1..17: mol_type = other DNA
agtggccacagttgtgg

SEQ ID NO: 175121 - DNA, 17 bp, synthetic construct
  source 1..17: mol_type = other DNA
cagtggccacagttgtg

SEQ ID NO: 175122 - DNA, 17 bp, synthetic construct
  source 1..17: mol_type = other DNA
ccagtggccacagttgt

SEQ ID NO: 175123 - DNA, 17 bp, synthetic construct
  source 1..17: mol_type = other DNA
accagtggccacagttg

SEQ ID NO: 175124 - DNA, 17 bp, synthetic construct
  source 1..17: mol_type = other DNA
aaccagtggccacagtt

SEQ ID NO: 175125 - DNA, 17 bp, synthetic construct
  source 1..17: mol_type = other DNA
gaaccagtggccacagt

SEQ ID NO: 175126 - DNA, 17 bp, synthetic construct
  source 1..17: mol_type = other DNA
agaaccagtggccacag

SEQ ID NO: 175127 - DNA, 17 bp, synthetic construct
  source 1..17: mol_type = other DNA
tagaaccagtggccaca

SEQ ID NO: 175128 - DNA, 17 bp, synthetic construct
  source 1..17: mol_type = other DNA
atagaaccagtggccac

SEQ ID NO: 175129 - DNA, 17 bp, synthetic construct
  source 1..17: mol_type = other DNA
catagaaccagtggcca

SEQ ID NO: 175130 - DNA, 17 bp, synthetic construct
  source 1..17: mol_type = other DNA
ccatagaaccagtggcc

SEQ ID NO: 175131 - DNA, 17 bp, synthetic construct
  source 1..17: mol_type = other DNA
gccatagaaccagtggc

SEQ ID NO: 175132 - DNA, 17 bp, synthetic construct
  source 1..17: mol_type = other DNA
tgccatagaaccagtgg

SEQ ID NO: 175133 - DNA, 17 bp, synthetic construct
  source 1..17: mol_type = other DNA
ttgccatagaaccagtg

SEQ ID NO: 175134 - DNA, 17 bp, synthetic construct
  source 1..17: mol_type = other DNA
gttgccatagaaccagt

SEQ ID NO: 175135 - DNA, 17 bp, synthetic construct
  source 1..17: mol_type = other DNA
tgttgccatagaaccag

SEQ ID NO: 175136 - DNA, 17 bp, synthetic construct
  source 1..17: mol_type = other DNA
gtgttgccatagaacca

SEQ ID NO: 175137 - DNA, 17 bp, synthetic construct
  source 1..17: mol_type = other DNA
ggtgttgccatagaacc

SEQ ID NO: 175138 - DNA, 17 bp, synthetic construct
  source 1..17: mol_type = other DNA
gggtgttgccatagaac

SEQ ID NO: 175139 - DNA, 17 bp, synthetic construct
  source 1..17: mol_type = other DNA
agggtgttgccatagaa

SEQ ID NO: 175140 - DNA, 17 bp, synthetic construct
  source 1..17: mol_type = other DNA
gagggtgttgccataga

SEQ ID NO: 175141 - DNA, 17 bp, synthetic construct
  source 1..17: mol_type = other DNA
ggagggtgttgccatag

SEQ ID NO: 175142 - DNA, 17 bp, synthetic construct
  source 1..17: mol_type = other DNA
aggagggtgttgccata

SEQ ID NO: 175143 - DNA, 17 bp, synthetic construct
  source 1..17: mol_type = other DNA
gaggagggtgttgccat

SEQ ID NO: 175144 - DNA, 17 bp, synthetic construct
  source 1..17: mol_type = other DNA
agaggagggtgttgcca

SEQ ID NO: 175145 - DNA, 17 bp, synthetic construct
  source 1..17: mol_type = other DNA
tagaggagggtgttgcc

SEQ ID NO: 175146 - DNA, 17 bp, synthetic construct
  source 1..17: mol_type = other DNA
ctagaggagggtgttgc

SEQ ID NO: 175147 - DNA, 17 bp, synthetic construct
  source 1..17: mol_type = other DNA
gctagaggagggtgttg

SEQ ID NO: 175148 - DNA, 17 bp, synthetic construct
  source 1..17: mol_type = other DNA
tgctagaggagggtgtt

SEQ ID NO: 175149 - DNA, 17 bp, synthetic construct
  source 1..17: mol_type = other DNA
gtgctagaggagggtgt

SEQ ID NO: 175150 - DNA, 17 bp, synthetic construct
  source 1..17: mol_type = other DNA
tgtgctagaggagggtg

SEQ ID NO: 175151 - DNA, 17 bp, synthetic construct
  source 1..17: mol_type = other DNA
gtgtgctagaggagggt

SEQ ID NO: 175152 - DNA, 17 bp, synthetic construct
  source 1..17: mol_type = other DNA
tgtgtgctagaggaggg

SEQ ID NO: 175153 - DNA, 17 bp, synthetic construct
  source 1..17: mol_type = other DNA
ctgtgtgctagaggagg

SEQ ID NO: 175154 - DNA, 17 bp, synthetic construct
  source 1..17: mol_type = other DNA
tctgtgtgctagaggag

SEQ ID NO: 175155 - DNA, 17 bp, synthetic construct
  source 1..17: mol_type = other DNA
gtctgtgtgctagagga

SEQ ID NO: 175156 - DNA, 17 bp, synthetic construct
  source 1..17: mol_type = other DNA
ggtctgtgtgctagagg

SEQ ID NO: 175157 - DNA, 17 bp, synthetic construct
  source 1..17: mol_type = other DNA
tggtctgtgtgctagag

SEQ ID NO: 175158 - DNA, 17 bp, synthetic construct
  source 1..17: mol_type = other DNA
ctggtctgtgtgctaga

SEQ ID NO: 175159 - DNA, 17 bp, synthetic construct
  source 1..17: mol_type = other DNA
actggtctgtgtgctag

SEQ ID NO: 175160 - DNA, 17 bp, synthetic construct
  source 1..17: mol_type = other DNA
cactggtctgtgtgcta

SEQ ID NO: 175161 - DNA, 17 bp, synthetic construct
  source 1..17: mol_type = other DNA
ccactggtctgtgtgct

SEQ ID NO: 175162 - DNA, 17 bp, synthetic construct
  source 1..17: mol_type = other DNA
accactggtctgtgtgc

SEQ ID NO: 175163 - DNA, 17 bp, synthetic construct
  source 1..17: mol_type = other DNA
taccactggtctgtgtg

SEQ ID NO: 175164 - DNA, 17 bp, synthetic construct
  source 1..17: mol_type = other DNA
gtaccactggtctgtgt

SEQ ID NO: 175165 - DNA, 17 bp, synthetic construct
  source 1..17: mol_type = other DNA
agtaccactggtctgtg

SEQ ID NO: 175166 - DNA, 17 bp, synthetic construct
  source 1..17: mol_type = other DNA
gagtaccactggtctgt

SEQ ID NO: 175167 - DNA, 17 bp, synthetic construct
  source 1..17: mol_type = other DNA
ggagtaccactggtctg

SEQ ID NO: 175168 - DNA, 17 bp, synthetic construct
  source 1..17: mol_type = other DNA
gggagtaccactggtct

SEQ ID NO: 175169 - DNA, 17 bp, synthetic construct
  source 1..17: mol_type = other DNA
ggggagtaccactggtc

SEQ ID NO: 175170 - DNA, 17 bp, synthetic construct
  source 1..17: mol_type = other DNA
gggggagtaccactggt

SEQ ID NO: 175171 - DNA, 17 bp, synthetic construct
  source 1..17: mol_type = other DNA
tgggggagtaccactgg

SEQ ID NO: 175172 - DNA, 17 bp, synthetic construct
  source 1..17: mol_type = other DNA
atgggggagtaccactg

SEQ ID NO: 175173 - DNA, 17 bp, synthetic construct
  source 1..17: mol_type = other DNA
gatgggggagtaccact

SEQ ID NO: 175174 - DNA, 17 bp, synthetic construct
  source 1..17: mol_type = other DNA
tgatgggggagtaccac

SEQ ID NO: 175175 - DNA, 17 bp, synthetic construct
  source 1..17: mol_type = other DNA
gtgatgggggagtacca

SEQ ID NO: 175176 - DNA, 17 bp, synthetic construct
  source 1..17: mol_type = other DNA
agtgatgggggagtacc

SEQ ID NO: 175177 - DNA, 17 bp, synthetic construct
  source 1..17: mol_type = other DNA
cagtgatgggggagtac

SEQ ID NO: 175178 - DNA, 17 bp, synthetic construct
  source 1..17: mol_type = other DNA
tcagtgatgggggagta

SEQ ID NO: 175179 - DNA, 17 bp, synthetic construct
  source 1..17: mol_type = other DNA
gtcagtgatgggggagt

SEQ ID NO: 175180 - DNA, 17 bp, synthetic construct
  source 1..17: mol_type = other DNA
ggtcagtgatgggggag

SEQ ID NO: 175181 - DNA, 17 bp, synthetic construct
  source 1..17: mol_type = other DNA
tggtcagtgatggggga

SEQ ID NO: 175182 - DNA, 17 bp, synthetic construct
  source 1..17: mol_type = other DNA
gtggtcagtgatggggg

SEQ ID NO: 175183 - DNA, 17 bp, synthetic construct
  source 1..17: mol_type = other DNA
ggtggtcagtgatgggg

SEQ ID NO: 175184 - DNA, 17 bp, synthetic construct
  source 1..17: mol_type = other DNA
tggtggtcagtgatggg

SEQ ID NO: 175185 - DNA, 17 bp, synthetic construct
  source 1..17: mol_type = other DNA
gtggtggtcagtgatgg

SEQ ID NO: 175186 - DNA, 17 bp, synthetic construct
  source 1..17: mol_type = other DNA
cgtggtggtcagtgatg

SEQ ID NO: 175187 - DNA, 17 bp, synthetic construct
  source 1..17: mol_type = other DNA
ccgtggtggtcagtgat

SEQ ID NO: 175188 - DNA, 17 bp, synthetic construct
  source 1..17: mol_type = other DNA
gccgtggtggtcagtga

SEQ ID NO: 175189 - DNA, 17 bp, synthetic construct
  source 1..17: mol_type = other DNA
ggccgtggtggtcagtg

SEQ ID NO: 175190 - DNA, 17 bp, synthetic construct
  source 1..17: mol_type = other DNA
tggccgtggtggtcagt

SEQ ID NO: 175191 - DNA, 17 bp, synthetic construct
  source 1..17: mol_type = other DNA
gtggccgtggtggtcag

SEQ ID NO: 175192 - DNA, 17 bp, synthetic construct
  source 1..17: mol_type = other DNA
agtggccgtggtggtca

SEQ ID NO: 175193 - DNA, 17 bp, synthetic construct
  source 1..17: mol_type = other DNA
tagtggccgtggtggtc

SEQ ID NO: 175194 - DNA, 17 bp, synthetic construct
  source 1..17: mol_type = other DNA
gtagtggccgtggtggt

SEQ ID NO: 175195 - DNA, 17 bp, synthetic construct
  source 1..17: mol_type = other DNA
cgtagtggccgtggtgg

SEQ ID NO: 175196 - DNA, 17 bp, synthetic construct
  source 1..17: mol_type = other DNA
tcgtagtggccgtggtg

SEQ ID NO: 175197 - DNA, 17 bp, synthetic construct
  source 1..17: mol_type = other DNA
atcgtagtggccgtggt

SEQ ID NO: 175198 - DNA, 17 bp, synthetic construct
  source 1..17: mol_type = other DNA
gatcgtagtggccgtgg

SEQ ID NO: 175199 - DNA, 17 bp, synthetic construct
  source 1..17: mol_type = other DNA
tgatcgtagtggccgtg

SEQ ID NO: 175200 - DNA, 17 bp, synthetic construct
  source 1..17: mol_type = other DNA
gtgatcgtagtggccgt

SEQ ID NO: 175201 - DNA, 17 bp, synthetic construct
  source 1..17: mol_type = other DNA
cgtgatcgtagtggccg

SEQ ID NO: 175202 - DNA, 17 bp, synthetic construct
  source 1..17: mol_type = other DNA
ccgtgatcgtagtggcc

SEQ ID NO: 175203 - DNA, 17 bp, synthetic construct
  source 1..17: mol_type = other DNA
gccgtgatcgtagtggc

SEQ ID NO: 175204 - DNA, 17 bp, synthetic construct
  source 1..17: mol_type = other DNA
ggccgtgatcgtagtgg

SEQ ID NO: 175205 - DNA, 17 bp, synthetic construct
  source 1..17: mol_type = other DNA
tggccgtgatcgtagtg

SEQ ID NO: 175206 - DNA, 17 bp, synthetic construct
  source 1..17: mol_type = other DNA
gtggccgtgatcgtagt

SEQ ID NO: 175207 - DNA, 17 bp, synthetic construct
  source 1..17: mol_type = other DNA
ggtggccgtgatcgtag

SEQ ID NO: 175208 - DNA, 17 bp, synthetic construct
  source 1..17: mol_type = other DNA
cggtggccgtgatcgta

SEQ ID NO: 175209 - DNA, 17 bp, synthetic construct
  source 1..17: mol_type = other DNA
ccggtggccgtgatcgt

SEQ ID NO: 175210 - DNA, 17 bp, synthetic construct
  source 1..17: mol_type = other DNA
gccggtggccgtgatcg

SEQ ID NO: 175211 - DNA, 17 bp, synthetic construct
  source 1..17: mol_type = other DNA
agccggtggccgtgatc

SEQ ID NO: 175212 - DNA, 17 bp, synthetic construct
  source 1..17: mol_type = other DNA
gagccggtggccgtgat

SEQ ID NO: 175213 - DNA, 17 bp, synthetic construct
  source 1..17: mol_type = other DNA
ggagccggtggccgtga

SEQ ID NO: 175214 - DNA, 17 bp, synthetic construct
  source 1..17: mol_type = other DNA
tggagccggtggccgtg

SEQ ID NO: 175215 - DNA, 17 bp, synthetic construct
  source 1..17: mol_type = other DNA
gtggagccggtggccgt

SEQ ID NO: 175216 - DNA, 17 bp, synthetic construct
  source 1..17: mol_type = other DNA
ggtggagccggtggccg

SEQ ID NO: 175217 - DNA, 17 bp, synthetic construct
  source 1..17: mol_type = other DNA
tggtggagccggtggcc

SEQ ID NO: 175218 - DNA, 17 bp, synthetic construct
  source 1..17: mol_type = other DNA
gtggtggagccggtggc

SEQ ID NO: 175219 - DNA, 17 bp, synthetic construct
  source 1..17: mol_type = other DNA
ggtggtggagccggtgg

SEQ ID NO: 175220 - DNA, 17 bp, synthetic construct
  source 1..17: mol_type = other DNA
tggtggtggagccggtg

SEQ ID NO: 175221 - DNA, 17 bp, synthetic construct
  source 1..17: mol_type = other DNA
ttggtggtggagccggt

SEQ ID NO: 175222 - DNA, 17 bp, synthetic construct
  source 1..17: mol_type = other DNA
gttggtggtggagccgg

SEQ ID NO: 175223 - DNA, 17 bp, synthetic construct
  source 1..17: mol_type = other DNA
ggttggtggtggagccg

SEQ ID NO: 175224 - DNA, 17 bp, synthetic construct
  source 1..17: mol_type = other DNA
gggttggtggtggagcc

SEQ ID NO: 175225 - DNA, 17 bp, synthetic construct
  source 1..17: mol_type = other DNA
ggggttggtggtggagc

SEQ ID NO: 175226 - DNA, 17 bp, synthetic construct
  source 1..17: mol_type = other DNA
aggggttggtggtggag

SEQ ID NO: 175227 - DNA, 17 bp, synthetic construct
  source 1..17: mol_type = other DNA
gaggggttggtggtgga

SEQ ID NO: 175228 - DNA, 17 bp, synthetic construct
  source 1..17: mol_type = other DNA
ggaggggttggtggtgg

SEQ ID NO: 175229 - DNA, 17 bp, synthetic construct
  source 1..17: mol_type = other DNA
aggaggggttggtggtg

SEQ ID NO: 175230 - DNA, 17 bp, synthetic construct
  source 1..17: mol_type = other DNA
gaggaggggttggtggt

SEQ ID NO: 175231 - DNA, 17 bp, synthetic construct
  source 1..17: mol_type = other DNA
tgaggaggggttggtgg

SEQ ID NO: 175232 - DNA, 17 bp, synthetic construct
  source 1..17: mol_type = other DNA
ttgaggaggggttggtg

SEQ ID NO: 175233 - DNA, 17 bp, synthetic construct
  source 1..17: mol_type = other DNA
gttgaggaggggttggt

SEQ ID NO: 175234 - DNA, 17 bp, synthetic construct
  source 1..17: mol_type = other DNA
agttgaggaggggttgg

SEQ ID NO: 175235 - DNA, 17 bp, synthetic construct
  source 1..17: mol_type = other DNA
gagttgaggaggggttg

SEQ ID NO: 175236 - DNA, 17 bp, synthetic construct
  source 1..17: mol_type = other DNA
ggagttgaggaggggtt

SEQ ID NO: 175237 - DNA, 17 bp, synthetic construct
  source 1..17: mol_type = other DNA
tggagttgaggaggggt

SEQ ID NO: 175238 - DNA, 17 bp, synthetic construct
  source 1..17: mol_type = other DNA
ctggagttgaggagggg

SEQ ID NO: 175239 - DNA, 17 bp, synthetic construct
  source 1..17: mol_type = other DNA
cctggagttgaggaggg

SEQ ID NO: 175240 - DNA, 17 bp, synthetic construct
  source 1..17: mol_type = other DNA
ccctggagttgaggagg

SEQ ID NO: 175241 - DNA, 17 bp, synthetic construct
  source 1..17: mol_type = other DNA
tccctggagttgaggag

SEQ ID NO: 175242 - DNA, 17 bp, synthetic construct
  source 1..17: mol_type = other DNA
gtccctggagttgagga

SEQ ID NO: 175243 - DNA, 17 bp, synthetic construct
  source 1..17: mol_type = other DNA
tgtccctggagttgagg

SEQ ID NO: 175244 - DNA, 17 bp, synthetic construct
  source 1..17: mol_type = other DNA
ttgtccctggagttgag

SEQ ID NO: 175245 - DNA, 17 bp, synthetic construct
  source 1..17: mol_type = other DNA
gttgtccctggagttga

SEQ ID NO: 175246 - DNA, 17 bp, synthetic construct
  source 1..17: mol_type = other DNA
tgttgtccctggagttg

SEQ ID NO: 175247 - DNA, 17 bp, synthetic construct
  source 1..17: mol_type = other DNA
gtgttgtccctggagtt

SEQ ID NO: 175248 - DNA, 17 bp, synthetic construct
  source 1..17: mol_type = other DNA
ggtgttgtccctggagt

SEQ ID NO: 175249 - DNA, 17 bp, synthetic construct
  source 1..17: mol_type = other DNA
gggtgttgtccctggag

SEQ ID NO: 175250 - DNA, 17 bp, synthetic construct
  source 1..17: mol_type = other DNA
tgggtgttgtccctgga

SEQ ID NO: 175251 - DNA, 17 bp, synthetic construct
  source 1..17: mol_type = other DNA
atgggtgttgtccctgg

SEQ ID NO: 175252 - DNA, 17 bp, synthetic construct
  source 1..17: mol_type = other DNA
gatgggtgttgtccctg

SEQ ID NO: 175253 - DNA, 17 bp, synthetic construct
  source 1..17: mol_type = other DNA
tgatgggtgttgtccct

SEQ ID NO: 175254 - DNA, 17 bp, synthetic construct
  source 1..17: mol_type = other DNA
gtgatgggtgttgtccc

SEQ ID NO: 175255 - DNA, 17 bp, synthetic construct
  source 1..17: mol_type = other DNA
ggtgatgggtgttgtcc

SEQ ID NO: 175256 - DNA, 17 bp, synthetic construct
  source 1..17: mol_type = other DNA
gggtgatgggtgttgtc

SEQ ID NO: 175257 - DNA, 17 bp, synthetic construct
  source 1..17: mol_type = other DNA
ggggtgatgggtgttgt

SEQ ID NO: 175258 - DNA, 17 bp, synthetic construct
  source 1..17: mol_type = other DNA
tggggtgatgggtgttg

SEQ ID NO: 175259 - DNA, 17 bp, synthetic construct
  source 1..17: mol_type = other DNA
ctggggtgatgggtgtt

SEQ ID NO: 175260 - DNA, 17 bp, synthetic construct
  source 1..17: mol_type = other DNA
actggggtgatgggtgt

SEQ ID NO: 175261 - DNA, 17 bp, synthetic construct
  source 1..17: mol_type = other DNA
cactggggtgatgggtg

SEQ ID NO: 175262 - DNA, 17 bp, synthetic construct
  source 1..17: mol_type = other DNA
gcactggggtgatgggt

SEQ ID NO: 175263 - DNA, 17 bp, synthetic construct
  source 1..17: mol_type = other DNA
agcactggggtgatggg

SEQ ID NO: 175264 - DNA, 17 bp, synthetic construct
  source 1..17: mol_type = other DNA
cagcactggggtgatgg

SEQ ID NO: 175265 - DNA, 17 bp, synthetic construct
  source 1..17: mol_type = other DNA
tcagcactggggtgatg

SEQ ID NO: 175266 - DNA, 17 bp, synthetic construct
  source 1..17: mol_type = other DNA
gtcagcactggggtgat

SEQ ID NO: 175267 - DNA, 17 bp, synthetic construct
  source 1..17: mol_type = other DNA
ggtcagcactggggtga

SEQ ID NO: 175268 - DNA, 17 bp, synthetic construct
  source 1..17: mol_type = other DNA
tggtcagcactggggtg

SEQ ID NO: 175269 - DNA, 17 bp, synthetic construct
  source 1..17: mol_type = other DNA
ctggtcagcactggggt

SEQ ID NO: 175270 - DNA, 17 bp, synthetic construct
  source 1..17: mol_type = other DNA
gctggtcagcactgggg

SEQ ID NO: 175271 - DNA, 17 bp, synthetic construct
  source 1..17: mol_type = other DNA
tgctggtcagcactggg

SEQ ID NO: 175272 - DNA, 17 bp, synthetic construct
  source 1..17: mol_type = other DNA
gtgctggtcagcactgg

SEQ ID NO: 175273 - DNA, 17 bp, synthetic construct
  source 1..17: mol_type = other DNA
cgtgctggtcagcactg

SEQ ID NO: 175274 - DNA, 17 bp, synthetic construct
  source 1..17: mol_type = other DNA
ccgtgctggtcagcact

SEQ ID NO: 175275 - DNA, 17 bp, synthetic construct
  source 1..17: mol_type = other DNA
gccgtgctggtcagcac

SEQ ID NO: 175276 - DNA, 17 bp, synthetic construct
  source 1..17: mol_type = other DNA
ggccgtgctggtcagca

SEQ ID NO: 175277 - DNA, 17 bp, synthetic construct
  source 1..17: mol_type = other DNA
tggccgtgctggtcagc

SEQ ID NO: 175278 - DNA, 17 bp, synthetic construct
  source 1..17: mol_type = other DNA
gtggccgtgctggtcag

SEQ ID NO: 175279 - DNA, 17 bp, synthetic construct
  source 1..17: mol_type = other DNA
ggtggccgtgctggtca

SEQ ID NO: 175280 - DNA, 17 bp, synthetic construct
  source 1..17: mol_type = other DNA
tggtggccgtgctggtc

SEQ ID NO: 175281 - DNA, 17 bp, synthetic construct
  source 1..17: mol_type = other DNA
gtggtggccgtgctggt

SEQ ID NO: 175282 - DNA, 17 bp, synthetic construct
  source 1..17: mol_type = other DNA
tgtggtggccgtgctgg

SEQ ID NO: 175283 - DNA, 17 bp, synthetic construct
  source 1..17: mol_type = other DNA
gtgtggtggccgtgctg

SEQ ID NO: 175284 - DNA, 17 bp, synthetic construct
  source 1..17: mol_type = other DNA
ggtgtggtggccgtgct

SEQ ID NO: 175285 - DNA, 17 bp, synthetic construct
  source 1..17: mol_type = other DNA
gggtgtggtggccgtgc

SEQ ID NO: 175286 - DNA, 17 bp, synthetic construct
  source 1..17: mol_type = other DNA
cgggtgtggtggccgtg

SEQ ID NO: 175287 - DNA, 17 bp, synthetic construct
  source 1..17: mol_type = other DNA
gcgggtgtggtggccgt

SEQ ID NO: 175288 - DNA, 17 bp, synthetic construct
  source 1..17: mol_type = other DNA
tgcgggtgtggtggccg

SEQ ID NO: 175289 - DNA, 17 bp, synthetic construct
  source 1..17: mol_type = other DNA
ctgcgggtgtggtggcc

SEQ ID NO: 175290 - DNA, 17 bp, synthetic construct
  source 1..17: mol_type = other DNA
gctgcgggtgtggtggc

SEQ ID NO: 175291 - DNA, 17 bp, synthetic construct
  source 1..17: mol_type = other DNA
ggctgcgggtgtggtgg

SEQ ID NO: 175292 - DNA, 17 bp, synthetic construct
  source 1..17: mol_type = other DNA
tggctgcgggtgtggtg

SEQ ID NO: 175293 - DNA, 17 bp, synthetic construct
  source 1..17: mol_type = other DNA
gtggctgcgggtgtggt

SEQ ID NO: 175294 - DNA, 17 bp, synthetic construct
  source 1..17: mol_type = other DNA
ggtggctgcgggtgtgg

SEQ ID NO: 175295 - DNA, 17 bp, synthetic construct
  source 1..17: mol_type = other DNA
tggtggctgcgggtgtg

SEQ ID NO: 175296 - DNA, 17 bp, synthetic construct
  source 1..17: mol_type = other DNA
ctggtggctgcgggtgt

SEQ ID NO: 175297 - DNA, 17 bp, synthetic construct
  source 1..17: mol_type = other DNA
gctggtggctgcgggtg

SEQ ID NO: 175298 - DNA, 17 bp, synthetic construct
  source 1..17: mol_type = other DNA
agctggtggctgcgggt

SEQ ID NO: 175299 - DNA, 17 bp, synthetic construct
  source 1..17: mol_type = other DNA
gagctggtggctgcggg

SEQ ID NO: 175300 - DNA, 17 bp, synthetic construct
  source 1..17: mol_type = other DNA
ggagctggtggctgcgg

SEQ ID NO: 175301 - DNA, 17 bp, synthetic construct
  source 1..17: mol_type = other DNA
tggagctggtggctgcg

SEQ ID NO: 175302 - DNA, 17 bp, synthetic construct
  source 1..17: mol_type = other DNA
ttggagctggtggctgc

SEQ ID NO: 175303 - DNA, 17 bp, synthetic construct
  source 1..17: mol_type = other DNA
tttggagctggtggctg

SEQ ID NO: 175304 - DNA, 17 bp, synthetic construct
  source 1..17: mol_type = other DNA
ctttggagctggtggct

SEQ ID NO: 175305 - DNA, 17 bp, synthetic construct
  source 1..17: mol_type = other DNA
gctttggagctggtggc

SEQ ID NO: 175306 - DNA, 17 bp, synthetic construct
  source 1..17: mol_type = other DNA
ggctttggagctggtgg

SEQ ID NO: 175307 - DNA, 17 bp, synthetic construct
  source 1..17: mol_type = other DNA
tggctttggagctggtg

SEQ ID NO: 175308 - DNA, 17 bp, synthetic construct
  source 1..17: mol_type = other DNA
gtggctttggagctggt

SEQ ID NO: 175309 - DNA, 17 bp, synthetic construct
  source 1..17: mol_type = other DNA
agtggctttggagctgg

SEQ ID NO: 175310 - DNA, 17 bp, synthetic construct
  source 1..17: mol_type = other DNA
aagtggctttggagctg

SEQ ID NO: 175311 - DNA, 17 bp, synthetic construct
  source 1..17: mol_type = other DNA
gaagtggctttggagct

SEQ ID NO: 175312 - DNA, 17 bp, synthetic construct
  source 1..17: mol_type = other DNA
ggaagtggctttggagc

SEQ ID NO: 175313 - DNA, 17 bp, synthetic construct
  source 1..17: mol_type = other DNA
aggaagtggctttggag

SEQ ID NO: 175314 - DNA, 17 bp, synthetic construct
  source 1..17: mol_type = other DNA
gaggaagtggctttgga

SEQ ID NO: 175315 - DNA, 17 bp, synthetic construct
  source 1..17: mol_type = other DNA
ggaggaagtggctttgg

SEQ ID NO: 175316 - DNA, 17 bp, synthetic construct
  source 1..17: mol_type = other DNA
aggaggaagtggctttg

SEQ ID NO: 175317 - DNA, 17 bp, synthetic construct
  source 1..17: mol_type = other DNA
gaggaggaagtggcttt

SEQ ID NO: 175318 - DNA, 17 bp, synthetic construct
  source 1..17: mol_type = other DNA
ggaggaggaagtggctt

SEQ ID NO: 175319 - DNA, 17 bp, synthetic construct
  source 1..17: mol_type = other DNA
tggaggaggaagtggct

SEQ ID NO: 175320 - DNA, 17 bp, synthetic construct
  source 1..17: mol_type = other DNA
ctggaggaggaagtggc

SEQ ID NO: 175321 - DNA, 17 bp, synthetic construct
  source 1..17: mol_type = other DNA
actggaggaggaagtgg

SEQ ID NO: 175322 - DNA, 17 bp, synthetic construct
  source 1..17: mol_type = other DNA
gactggaggaggaagtg

SEQ ID NO: 175323 - DNA, 17 bp, synthetic construct
  source 1..17: mol_type = other DNA
ggactggaggaggaagt

SEQ ID NO: 175324 - DNA, 17 bp, synthetic construct
  source 1..17: mol_type = other DNA
tggactggaggaggaag

SEQ ID NO: 175325 - DNA, 17 bp, synthetic construct
  source 1..17: mol_type = other DNA
ttggactggaggaggaa

SEQ ID NO: 175326 - DNA, 17 bp, synthetic construct
  source 1..17: mol_type = other DNA
cttggactggaggagga

SEQ ID NO: 175327 - DNA, 17 bp, synthetic construct
  source 1..17: mol_type = other DNA
ccttggactggaggagg

SEQ ID NO: 175328 - DNA, 17 bp, synthetic construct
  source 1..17: mol_type = other DNA
tccttggactggaggag

SEQ ID NO: 175329 - DNA, 17 bp, synthetic construct
  source 1..17: mol_type = other DNA
gtccttggactggagga

SEQ ID NO: 175330 - DNA, 17 bp, synthetic construct
  source 1..17: mol_type = other DNA
agtccttggactggagg

SEQ ID NO: 175331 - DNA, 17 bp, synthetic construct
  source 1..17: mol_type = other DNA
cagtccttggactggag

SEQ ID NO: 175332 - DNA, 17 bp, synthetic construct
  source 1..17: mol_type = other DNA
gcagtccttggactgga

SEQ ID NO: 175333 - DNA, 17 bp, synthetic construct
  source 1..17: mol_type = other DNA
tgcagtccttggactgg

SEQ ID NO: 175334 - DNA, 17 bp, synthetic construct
  source 1..17: mol_type = other DNA
ttgcagtccttggactg

SEQ ID NO: 175335 - DNA, 17 bp, synthetic construct
  source 1..17: mol_type = other DNA
gttgcagtccttggact

SEQ ID NO: 175336 - DNA, 17 bp, synthetic construct
  source 1..17: mol_type = other DNA
ggttgcagtccttggac

SEQ ID NO: 175337 - DNA, 17 bp, synthetic construct
  source 1..17: mol_type = other DNA
tggttgcagtccttgga

SEQ ID NO: 175338 - DNA, 17 bp, synthetic construct
  source 1..17: mol_type = other DNA
gtggttgcagtccttgg

SEQ ID NO: 175339 - DNA, 17 bp, synthetic construct
  source 1..17: mol_type = other DNA
ggtggttgcagtccttg

SEQ ID NO: 175340 - DNA, 17 bp, synthetic construct
  source 1..17: mol_type = other DNA
gggtggttgcagtcctt

SEQ ID NO: 175341 - DNA, 17 bp, synthetic construct
  source 1..17: mol_type = other DNA
agggtggttgcagtcct

SEQ ID NO: 175342 - DNA, 17 bp, synthetic construct
  source 1..17: mol_type = other DNA
aagggtggttgcagtcc

SEQ ID NO: 175343 - DNA, 17 bp, synthetic construct
  source 1..17: mol_type = other DNA
gaagggtggttgcagtc

SEQ ID NO: 175344 - DNA, 17 bp, synthetic construct
  source 1..17: mol_type = other DNA
ggaagggtggttgcagt

SEQ ID NO: 175345 - DNA, 17 bp, synthetic construct
  source 1..17: mol_type = other DNA
tggaagggtggttgcag

SEQ ID NO: 175346 - DNA, 17 bp, synthetic construct
  source 1..17: mol_type = other DNA
ctggaagggtggttgca

SEQ ID NO: 175347 - DNA, 17 bp, synthetic construct
  source 1..17: mol_type = other DNA
actggaagggtggttgc

SEQ ID NO: 175348 - DNA, 17 bp, synthetic construct
  source 1..17: mol_type = other DNA
cactggaagggtggttg

SEQ ID NO: 175349 - DNA, 17 bp, synthetic construct
  source 1..17: mol_type = other DNA
gcactggaagggtggtt

SEQ ID NO: 175350 - DNA, 17 bp, synthetic construct
  source 1..17: mol_type = other DNA
agcactggaagggtggt

SEQ ID NO: 175351 - DNA, 17 bp, synthetic construct
  source 1..17: mol_type = other DNA
cagcactggaagggtgg

SEQ ID NO: 175352 - DNA, 17 bp, synthetic construct
  source 1..17: mol_type = other DNA
tcagcactggaagggtg

SEQ ID NO: 175353 - DNA, 17 bp, synthetic construct
  source 1..17: mol_type = other DNA
gtcagcactggaagggt

SEQ ID NO: 175354 - DNA, 17 bp, synthetic construct
  source 1..17: mol_type = other DNA
tgtcagcactggaaggg

SEQ ID NO: 175355 - DNA, 17 bp, synthetic construct
  source 1..17: mol_type = other DNA
ttgtcagcactggaagg

SEQ ID NO: 175356 - DNA, 17 bp, synthetic construct
  source 1..17: mol_type = other DNA
cttgtcagcactggaag

SEQ ID NO: 175357 - DNA, 17 bp, synthetic construct
  source 1..17: mol_type = other DNA
gcttgtcagcactggaa

SEQ ID NO: 175358 - DNA, 17 bp, synthetic construct
  source 1..17: mol_type = other DNA
tgcttgtcagcactgga

SEQ ID NO: 175359 - DNA, 17 bp, synthetic construct
  source 1..17: mol_type = other DNA
gtgcttgtcagcactgg

SEQ ID NO: 175360 - DNA, 17 bp, synthetic construct
  source 1..17: mol_type = other DNA
tgtgcttgtcagcactg

SEQ ID NO: 175361 - DNA, 17 bp, synthetic construct
  source 1..17: mol_type = other DNA
ctgtgcttgtcagcact

SEQ ID NO: 175362 - DNA, 17 bp, synthetic construct
  source 1..17: mol_type = other DNA
gctgtgcttgtcagcac

SEQ ID NO: 175363 - DNA, 17 bp, synthetic construct
  source 1..17: mol_type = other DNA
ggctgtgcttgtcagca

SEQ ID NO: 175364 - DNA, 17 bp, synthetic construct
  source 1..17: mol_type = other DNA
tggctgtgcttgtcagc

SEQ ID NO: 175365 - DNA, 17 bp, synthetic construct
  source 1..17: mol_type = other DNA
gtggctgtgcttgtcag

SEQ ID NO: 175366 - DNA, 17 bp, synthetic construct
  source 1..17: mol_type = other DNA
tgtggctgtgcttgtca

SEQ ID NO: 175367 - DNA, 17 bp, synthetic construct
  source 1..17: mol_type = other DNA
ttgtggctgtgcttgtc

SEQ ID NO: 175368 - DNA, 17 bp, synthetic construct
  source 1..17: mol_type = other DNA
tttgtggctgtgcttgt

SEQ ID NO: 175369 - DNA, 17 bp, synthetic construct
  source 1..17: mol_type = other DNA
ttttgtggctgtgcttg

SEQ ID NO: 175370 - DNA, 17 bp, synthetic construct
  source 1..17: mol_type = other DNA
attttgtggctgtgctt

SEQ ID NO: 175371 - DNA, 17 bp, synthetic construct
  source 1..17: mol_type = other DNA
gattttgtggctgtgct

SEQ ID NO: 175372 - DNA, 17 bp, synthetic construct
  source 1..17: mol_type = other DNA
ggattttgtggctgtgc

SEQ ID NO: 175373 - DNA, 17 bp, synthetic construct
  source 1..17: mol_type = other DNA
tggattttgtggctgtg

SEQ ID NO: 175374 - DNA, 17 bp, synthetic construct
  source 1..17: mol_type = other DNA
gtggattttgtggctgt

SEQ ID NO: 175375 - DNA, 17 bp, synthetic construct
  source 1..17: mol_type = other DNA
tgtggattttgtggctg

SEQ ID NO: 175376 - DNA, 17 bp, synthetic construct
  source 1..17: mol_type = other DNA
ctgtggattttgtggct

SEQ ID NO: 175377 - DNA, 17 bp, synthetic construct
  source 1..17: mol_type = other DNA
gctgtggattttgtggc

SEQ ID NO: 175378 - DNA, 17 bp, synthetic construct
  source 1..17: mol_type = other DNA
agctgtggattttgtgg

SEQ ID NO: 175379 - DNA, 17 bp, synthetic construct
  source 1..17: mol_type = other DNA
tagctgtggattttgtg

SEQ ID NO: 175380 - DNA, 17 bp, synthetic construct
  source 1..17: mol_type = other DNA
gtagctgtggattttgt

SEQ ID NO: 175381 - DNA, 17 bp, synthetic construct
  source 1..17: mol_type = other DNA
ggtagctgtggattttg

SEQ ID NO: 175382 - DNA, 17 bp, synthetic construct
  source 1..17: mol_type = other DNA
tggtagctgtggatttt

SEQ ID NO: 175383 - DNA, 17 bp, synthetic construct
  source 1..17: mol_type = other DNA
ctggtagctgtggattt

SEQ ID NO: 175384 - DNA, 17 bp, synthetic construct
  source 1..17: mol_type = other DNA
gctggtagctgtggatt

SEQ ID NO: 175385 - DNA, 17 bp, synthetic construct
  source 1..17: mol_type = other DNA
agctggtagctgtggat

SEQ ID NO: 175386 - DNA, 17 bp, synthetic construct
  source 1..17: mol_type = other DNA
aagctggtagctgtgga

SEQ ID NO: 175387 - DNA, 17 bp, synthetic construct
  source 1..17: mol_type = other DNA
aaagctggtagctgtgg

SEQ ID NO: 175388 - DNA, 17 bp, synthetic construct
  source 1..17: mol_type = other DNA
taaagctggtagctgtg

SEQ ID NO: 175389 - DNA, 17 bp, synthetic construct
  source 1..17: mol_type = other DNA
gtaaagctggtagctgt

SEQ ID NO: 175390 - DNA, 17 bp, synthetic construct
  source 1..17: mol_type = other DNA
tgtaaagctggtagctg

SEQ ID NO: 175391 - DNA, 17 bp, synthetic construct
  source 1..17: mol_type = other DNA
gtgtaaagctggtagct

SEQ ID NO: 175392 - DNA, 17 bp, synthetic construct
  source 1..17: mol_type = other DNA
ggtgtaaagctggtagc

SEQ ID NO: 175393 - DNA, 17 bp, synthetic construct
  source 1..17: mol_type = other DNA
gggtgtaaagctggtag

SEQ ID NO: 175394 - DNA, 17 bp, synthetic construct
  source 1..17: mol_type = other DNA
tgggtgtaaagctggta

SEQ ID NO: 175395 - DNA, 17 bp, synthetic construct
  source 1..17: mol_type = other DNA
atgggtgtaaagctggt

SEQ ID NO: 175396 - DNA, 17 bp, synthetic construct
  source 1..17: mol_type = other DNA
gatgggtgtaaagctgg

SEQ ID NO: 175397 - DNA, 17 bp, synthetic construct
  source 1..17: mol_type = other DNA
ggatgggtgtaaagctg

SEQ ID NO: 175398 - DNA, 17 bp, synthetic construct
  source 1..17: mol_type = other DNA
gggatgggtgtaaagct

SEQ ID NO: 175399 - DNA, 17 bp, synthetic construct
  source 1..17: mol_type = other DNA
ggggatgggtgtaaagc

SEQ ID NO: 175400 - DNA, 17 bp, synthetic construct
  source 1..17: mol_type = other DNA
aggggatgggtgtaaag

SEQ ID NO: 175401 - DNA, 17 bp, synthetic construct
  source 1..17: mol_type = other DNA
gaggggatgggtgtaaa

SEQ ID NO: 175402 - DNA, 17 bp, synthetic construct
  source 1..17: mol_type = other DNA
ggaggggatgggtgtaa

SEQ ID NO: 175403 - DNA, 17 bp, synthetic construct
  source 1..17: mol_type = other DNA
aggaggggatgggtgta

SEQ ID NO: 175404 - DNA, 17 bp, synthetic construct
  source 1..17: mol_type = other DNA
gaggaggggatgggtgt

SEQ ID NO: 175405 - DNA, 17 bp, synthetic construct
  source 1..17: mol_type = other DNA
ggaggaggggatgggtg

SEQ ID NO: 175406 - DNA, 17 bp, synthetic construct
  source 1..17: mol_type = other DNA
tggaggaggggatgggt

SEQ ID NO: 175407 - DNA, 17 bp, synthetic construct
  source 1..17: mol_type = other DNA
gtggaggaggggatggg

SEQ ID NO: 175408 - DNA, 17 bp, synthetic construct
  source 1..17: mol_type = other DNA
ggtggaggaggggatgg

SEQ ID NO: 175409 - DNA, 17 bp, synthetic construct
  source 1..17: mol_type = other DNA
gggtggaggaggggatg

SEQ ID NO: 175410 - DNA, 17 bp, synthetic construct
  source 1..17: mol_type = other DNA
agggtggaggaggggat

SEQ ID NO: 175411 - DNA, 17 bp, synthetic construct
  source 1..17: mol_type = other DNA
cagggtggaggagggga

SEQ ID NO: 175412 - DNA, 17 bp, synthetic construct
  source 1..17: mol_type = other DNA
acagggtggaggagggg

SEQ ID NO: 175413 - DNA, 17 bp, synthetic construct
  source 1..17: mol_type = other DNA
cacagggtggaggaggg

SEQ ID NO: 175414 - DNA, 17 bp, synthetic construct
  source 1..17: mol_type = other DNA
ccacagggtggaggagg

SEQ ID NO: 175415 - DNA, 17 bp, synthetic construct
  source 1..17: mol_type = other DNA
tccacagggtggaggag

SEQ ID NO: 175416 - DNA, 17 bp, synthetic construct
  source 1..17: mol_type = other DNA
gtccacagggtggagga

SEQ ID NO: 175417 - DNA, 17 bp, synthetic construct
  source 1..17: mol_type = other DNA
ggtccacagggtggagg

SEQ ID NO: 175418 - DNA, 17 bp, synthetic construct
  source 1..17: mol_type = other DNA
tggtccacagggtggag

SEQ ID NO: 175419 - DNA, 17 bp, synthetic construct
  source 1..17: mol_type = other DNA
gtggtccacagggtgga

SEQ ID NO: 175420 - DNA, 17 bp, synthetic construct
  source 1..17: mol_type = other DNA
cgtggtccacagggtgg

SEQ ID NO: 175421 - DNA, 17 bp, synthetic construct
  source 1..17: mol_type = other DNA
acgtggtccacagggtg

SEQ ID NO: 175422 - DNA, 17 bp, synthetic construct
  source 1..17: mol_type = other DNA
cacgtggtccacagggt

SEQ ID NO: 175423 - DNA, 17 bp, synthetic construct
  source 1..17: mol_type = other DNA
ccacgtggtccacaggg

SEQ ID NO: 175424 - DNA, 17 bp, synthetic construct
  source 1..17: mol_type = other DNA
tccacgtggtccacagg

SEQ ID NO: 175425 - DNA, 17 bp, synthetic construct
  source 1..17: mol_type = other DNA
gtccacgtggtccacag

SEQ ID NO: 175426 - DNA, 17 bp, synthetic construct
  source 1..17: mol_type = other DNA
ggtccacgtggtccaca

SEQ ID NO: 175427 - DNA, 17 bp, synthetic construct
  source 1..17: mol_type = other DNA
cggtccacgtggtccac

SEQ ID NO: 175428 - DNA, 17 bp, synthetic construct
  source 1..17: mol_type = other DNA
acggtccacgtggtcca

SEQ ID NO: 175429 - DNA, 17 bp, synthetic construct
  source 1..17: mol_type = other DNA
gacggtccacgtggtcc

SEQ ID NO: 175430 - DNA, 17 bp, synthetic construct
  source 1..17: mol_type = other DNA
ggacggtccacgtggtc

SEQ ID NO: 175431 - DNA, 17 bp, synthetic construct
  source 1..17: mol_type = other DNA
gggacggtccacgtggt

SEQ ID NO: 175432 - DNA, 17 bp, synthetic construct
  source 1..17: mol_type = other DNA
tgggacggtccacgtgg

SEQ ID NO: 175433 - DNA, 17 bp, synthetic construct
  source 1..17: mol_type = other DNA
ctgggacggtccacgtg

SEQ ID NO: 175434 - DNA, 17 bp, synthetic construct
  source 1..17: mol_type = other DNA
gctgggacggtccacgt

SEQ ID NO: 175435 - DNA, 17 bp, synthetic construct
  source 1..17: mol_type = other DNA
tgctgggacggtccacg

SEQ ID NO: 175436 - DNA, 17 bp, synthetic construct
  source 1..17: mol_type = other DNA
gtgctgggacggtccac

SEQ ID NO: 175437 - DNA, 17 bp, synthetic construct
  source 1..17: mol_type = other DNA
tgtgctgggacggtcca

SEQ ID NO: 175438 - DNA, 17 bp, synthetic construct
  source 1..17: mol_type = other DNA
ctgtgctgggacggtcc

SEQ ID NO: 175439 - DNA, 17 bp, synthetic construct
  source 1..17: mol_type = other DNA
tctgtgctgggacggtc

SEQ ID NO: 175440 - DNA, 17 bp, synthetic construct
  source 1..17: mol_type = other DNA
gtctgtgctgggacggt

SEQ ID NO: 175441 - DNA, 17 bp, synthetic construct
  source 1..17: mol_type = other DNA
ggtctgtgctgggacgg

SEQ ID NO: 175442 - DNA, 17 bp, synthetic construct
  source 1..17: mol_type = other DNA
tggtctgtgctgggacg

SEQ ID NO: 175443 - DNA, 17 bp, synthetic construct
  source 1..17: mol_type = other DNA
gtggtctgtgctgggac

SEQ ID NO: 175444 - DNA, 17 bp, synthetic construct
  source 1..17: mol_type = other DNA
ggtggtctgtgctggga

SEQ ID NO: 175445 - DNA, 17 bp, synthetic construct
  source 1..17: mol_type = other DNA
tggtggtctgtgctggg

SEQ ID NO: 175446 - DNA, 17 bp, synthetic construct
  source 1..17: mol_type = other DNA
gtggtggtctgtgctgg

SEQ ID NO: 175447 - DNA, 17 bp, synthetic construct
  source 1..17: mol_type = other DNA
tgtggtggtctgtgctg

SEQ ID NO: 175448 - DNA, 17 bp, synthetic construct
  source 1..17: mol_type = other DNA
gtgtggtggtctgtgct

SEQ ID NO: 175449 - DNA, 17 bp, synthetic construct
  source 1..17: mol_type = other DNA
ggtgtggtggtctgtgc

SEQ ID NO: 175450 - DNA, 17 bp, synthetic construct
  source 1..17: mol_type = other DNA
gggtgtggtggtctgtg

SEQ ID NO: 175451 - DNA, 17 bp, synthetic construct
  source 1..17: mol_type = other DNA
tgggtgtggtggtctgt

SEQ ID NO: 175452 - DNA, 17 bp, synthetic construct
  source 1..17: mol_type = other DNA
atgggtgtggtggtctg

SEQ ID NO: 175453 - DNA, 17 bp, synthetic construct
  source 1..17: mol_type = other DNA
catgggtgtggtggtct

SEQ ID NO: 175454 - DNA, 17 bp, synthetic construct
  source 1..17: mol_type = other DNA
acatgggtgtggtggtc

SEQ ID NO: 175455 - DNA, 17 bp, synthetic construct
  source 1..17: mol_type = other DNA
gacatgggtgtggtggt

SEQ ID NO: 175456 - DNA, 17 bp, synthetic construct
  source 1..17: mol_type = other DNA
ggacatgggtgtggtgg

SEQ ID NO: 175457 - DNA, 17 bp, synthetic construct
  source 1..17: mol_type = other DNA
tggacatgggtgtggtg

SEQ ID NO: 175458 - DNA, 17 bp, synthetic construct
  source 1..17: mol_type = other DNA
gtggacatgggtgtggt

SEQ ID NO: 175459 - DNA, 17 bp, synthetic construct
  source 1..17: mol_type = other DNA
ggtggacatgggtgtgg

SEQ ID NO: 175460 - DNA, 17 bp, synthetic construct
  source 1..17: mol_type = other DNA
tggtggacatgggtgtg

SEQ ID NO: 175461 - DNA, 17 bp, synthetic construct
  source 1..17: mol_type = other DNA
atggtggacatgggtgt

SEQ ID NO: 175462 - DNA, 17 bp, synthetic construct
  source 1..17: mol_type = other DNA
catggtggacatgggtg

SEQ ID NO: 175463 - DNA, 17 bp, synthetic construct
  source 1..17: mol_type = other DNA
acatggtggacatgggt

SEQ ID NO: 175464 - DNA, 17 bp, synthetic construct
  source 1..17: mol_type = other DNA
gacatggtggacatggg

SEQ ID NO: 175465 - DNA, 17 bp, synthetic construct
  source 1..17: mol_type = other DNA
ggacatggtggacatgg

SEQ ID NO: 175466 - DNA, 17 bp, synthetic construct
  source 1..17: mol_type = other DNA
tggacatggtggacatg

SEQ ID NO: 175467 - DNA, 17 bp, synthetic construct
  source 1..17: mol_type = other DNA
gtggacatggtggacat

SEQ ID NO: 175468 - DNA, 17 bp, synthetic construct
  source 1..17: mol_type = other DNA
tgtggacatggtggaca

SEQ ID NO: 175469 - DNA, 17 bp, synthetic construct
  source 1..17: mol_type = other DNA
ttgtggacatggtggac

SEQ ID NO: 175470 - DNA, 17 bp, synthetic construct
  source 1..17: mol_type = other DNA
attgtggacatggtgga

SEQ ID NO: 175471 - DNA, 17 bp, synthetic construct
  source 1..17: mol_type = other DNA
gattgtggacatggtgg

SEQ ID NO: 175472 - DNA, 17 bp, synthetic construct
  source 1..17: mol_type = other DNA
ggattgtggacatggtg

SEQ ID NO: 175473 - DNA, 17 bp, synthetic construct
  source 1..17: mol_type = other DNA
tggattgtggacatggt

SEQ ID NO: 175474 - DNA, 17 bp, synthetic construct
  source 1..17: mol_type = other DNA
gtggattgtggacatgg

SEQ ID NO: 175475 - DNA, 17 bp, synthetic construct
  source 1..17: mol_type = other DNA
tgtggattgtggacatg

SEQ ID NO: 175476 - DNA, 17 bp, synthetic construct
  source 1..17: mol_type = other DNA
gtgtggattgtggacat

SEQ ID NO: 175477 - DNA, 17 bp, synthetic construct
  source 1..17: mol_type = other DNA
ggtgtggattgtggaca

SEQ ID NO: 175478 - DNA, 17 bp, synthetic construct
  source 1..17: mol_type = other DNA
aggtgtggattgtggac

SEQ ID NO: 175479 - DNA, 17 bp, synthetic construct
  source 1..17: mol_type = other DNA
gaggtgtggattgtgga

SEQ ID NO: 175480 - DNA, 17 bp, synthetic construct
  source 1..17: mol_type = other DNA
ggaggtgtggattgtgg

SEQ ID NO: 175481 - DNA, 17 bp, synthetic construct
  source 1..17: mol_type = other DNA
aggaggtgtggattgtg

SEQ ID NO: 175482 - DNA, 17 bp, synthetic construct
  source 1..17: mol_type = other DNA
gaggaggtgtggattgt

SEQ ID NO: 175483 - DNA, 17 bp, synthetic construct
  source 1..17: mol_type = other DNA
agaggaggtgtggattg

SEQ ID NO: 175484 - DNA, 17 bp, synthetic construct
  source 1..17: mol_type = other DNA
tagaggaggtgtggatt

SEQ ID NO: 175485 - DNA, 17 bp, synthetic construct
  source 1..17: mol_type = other DNA
gtagaggaggtgtggat

SEQ ID NO: 175486 - DNA, 17 bp, synthetic construct
  source 1..17: mol_type = other DNA
agtagaggaggtgtgga

SEQ ID NO: 175487 - DNA, 17 bp, synthetic construct
  source 1..17: mol_type = other DNA
gagtagaggaggtgtgg

SEQ ID NO: 175488 - DNA, 17 bp, synthetic construct
  source 1..17: mol_type = other DNA
ggagtagaggaggtgtg

SEQ ID NO: 175489 - DNA, 17 bp, synthetic construct
  source 1..17: mol_type = other DNA
tggagtagaggaggtgt

SEQ ID NO: 175490 - DNA, 17 bp, synthetic construct
  source 1..17: mol_type = other DNA
ctggagtagaggaggtg

SEQ ID NO: 175491 - DNA, 17 bp, synthetic construct
  source 1..17: mol_type = other DNA
tctggagtagaggaggt

SEQ ID NO: 175492 - DNA, 17 bp, synthetic construct
  source 1..17: mol_type = other DNA
ctctggagtagaggagg

SEQ ID NO: 175493 - DNA, 17 bp, synthetic construct
  source 1..17: mol_type = other DNA
tctctggagtagaggag

SEQ ID NO: 175494 - DNA, 17 bp, synthetic construct
  source 1..17: mol_type = other DNA
gtctctggagtagagga

SEQ ID NO: 175495 - DNA, 17 bp, synthetic construct
  source 1..17: mol_type = other DNA
ggtctctggagtagagg

SEQ ID NO: 175496 - DNA, 17 bp, synthetic construct
  source 1..17: mol_type = other DNA
tggtctctggagtagag

SEQ ID NO: 175497 - DNA, 17 bp, synthetic construct
  source 1..17: mol_type = other DNA
gtggtctctggagtaga

SEQ ID NO: 175498 - DNA, 17 bp, synthetic construct
  source 1..17: mol_type = other DNA
ggtggtctctggagtag

SEQ ID NO: 175499 - DNA, 17 bp, synthetic construct
  source 1..17: mol_type = other DNA
gggtggtctctggagta

SEQ ID NO: 175500 - DNA, 17 bp, synthetic construct
  source 1..17: mol_type = other DNA
tgggtggtctctggagt

SEQ ID NO: 175501 - DNA, 17 bp, synthetic construct
  source 1..17: mol_type = other DNA
gtgggtggtctctggag

SEQ ID NO: 175502 - DNA, 17 bp, synthetic construct
  source 1..17: mol_type = other DNA
tgtgggtggtctctgga

SEQ ID NO: 175503 - DNA, 17 bp, synthetic construct
  source 1..17: mol_type = other DNA
gtgtgggtggtctctgg

SEQ ID NO: 175504 - DNA, 17 bp, synthetic construct
  source 1..17: mol_type = other DNA
ggtgtgggtggtctctg

SEQ ID NO: 175505 - DNA, 17 bp, synthetic construct
  source 1..17: mol_type = other DNA
aggtgtgggtggtctct

SEQ ID NO: 175506 - DNA, 17 bp, synthetic construct
  source 1..17: mol_type = other DNA
gaggtgtgggtggtctc

SEQ ID NO: 175507 - DNA, 17 bp, synthetic construct
  source 1..17: mol_type = other DNA
ggaggtgtgggtggtct

SEQ ID NO: 175508 - DNA, 17 bp, synthetic construct
  source 1..17: mol_type = other DNA
tggaggtgtgggtggtc

SEQ ID NO: 175509 - DNA, 17 bp, synthetic construct
  source 1..17: mol_type = other DNA
gtggaggtgtgggtggt

SEQ ID NO: 175510 - DNA, 17 bp, synthetic construct
  source 1..17: mol_type = other DNA
tgtggaggtgtgggtgg

SEQ ID NO: 175511 - DNA, 17 bp, synthetic construct
  source 1..17: mol_type = other DNA
ctgtggaggtgtgggtg

SEQ ID NO: 175512 - DNA, 17 bp, synthetic construct
  source 1..17: mol_type = other DNA
actgtggaggtgtgggt

SEQ ID NO: 175513 - DNA, 17 bp, synthetic construct
  source 1..17: mol_type = other DNA
cactgtggaggtgtggg

SEQ ID NO: 175514 - DNA, 17 bp, synthetic construct
  source 1..17: mol_type = other DNA
gcactgtggaggtgtgg

SEQ ID NO: 175515 - DNA, 17 bp, synthetic construct
  source 1..17: mol_type = other DNA
agcactgtggaggtgtg

SEQ ID NO: 175516 - DNA, 17 bp, synthetic construct
  source 1..17: mol_type = other DNA
cagcactgtggaggtgt

SEQ ID NO: 175517 - DNA, 17 bp, synthetic construct
  source 1..17: mol_type = other DNA
tcagcactgtggaggtg

SEQ ID NO: 175518 - DNA, 17 bp, synthetic construct
  source 1..17: mol_type = other DNA
gtcagcactgtggaggt

SEQ ID NO: 175519 - DNA, 17 bp, synthetic construct
  source 1..17: mol_type = other DNA
ggtcagcactgtggagg

SEQ ID NO: 175520 - DNA, 17 bp, synthetic construct
  source 1..17: mol_type = other DNA
tggtcagcactgtggag

SEQ ID NO: 175521 - DNA, 17 bp, synthetic construct
  source 1..17: mol_type = other DNA
gtggtcagcactgtgga

SEQ ID NO: 175522 - DNA, 17 bp, synthetic construct
  source 1..17: mol_type = other DNA
ggtggtcagcactgtgg

SEQ ID NO: 175523 - DNA, 17 bp, synthetic construct
  source 1..17: mol_type = other DNA
tggtggtcagcactgtg

SEQ ID NO: 175524 - DNA, 17 bp, synthetic construct
  source 1..17: mol_type = other DNA
gtggtggtcagcactgt

SEQ ID NO: 175525 - DNA, 17 bp, synthetic construct
  source 1..17: mol_type = other DNA
tgtggtggtcagcactg

SEQ ID NO: 175526 - DNA, 17 bp, synthetic construct
  source 1..17: mol_type = other DNA
ctgtggtggtcagcact

SEQ ID NO: 175527 - DNA, 17 bp, synthetic construct
  source 1..17: mol_type = other DNA
gctgtggtggtcagcac

SEQ ID NO: 175528 - DNA, 17 bp, synthetic construct
  source 1..17: mol_type = other DNA
ggctgtggtggtcagca

SEQ ID NO: 175529 - DNA, 17 bp, synthetic construct
  source 1..17: mol_type = other DNA
tggctgtggtggtcagc

SEQ ID NO: 175530 - DNA, 17 bp, synthetic construct
  source 1..17: mol_type = other DNA
gtggctgtggtggtcag

SEQ ID NO: 175531 - DNA, 17 bp, synthetic construct
  source 1..17: mol_type = other DNA
ggtggctgtggtggtca

SEQ ID NO: 175532 - DNA, 17 bp, synthetic construct
  source 1..17: mol_type = other DNA
tggtggctgtggtggtc

SEQ ID NO: 175533 - DNA, 17 bp, synthetic construct
  source 1..17: mol_type = other DNA
atggtggctgtggtggt

SEQ ID NO: 175534 - DNA, 17 bp, synthetic construct
  source 1..17: mol_type = other DNA
catggtggctgtggtgg

SEQ ID NO: 175535 - DNA, 17 bp, synthetic construct
  source 1..17: mol_type = other DNA
tcatggtggctgtggtg

SEQ ID NO: 175536 - DNA, 17 bp, synthetic construct
  source 1..17: mol_type = other DNA
gtcatggtggctgtggt

SEQ ID NO: 175537 - DNA, 17 bp, synthetic construct
  source 1..17: mol_type = other DNA
tgtcatggtggctgtgg

SEQ ID NO: 175538 - DNA, 17 bp, synthetic construct
  source 1..17: mol_type = other DNA
ttgtcatggtggctgtg

SEQ ID NO: 175539 - DNA, 17 bp, synthetic construct
  source 1..17: mol_type = other DNA
cttgtcatggtggctgt

SEQ ID NO: 175540 - DNA, 17 bp, synthetic construct
  source 1..17: mol_type = other DNA
ccttgtcatggtggctg

SEQ ID NO: 175541 - DNA, 17 bp, synthetic construct
  source 1..17: mol_type = other DNA
cccttgtcatggtggct

SEQ ID NO: 175542 - DNA, 17 bp, synthetic construct
  source 1..17: mol_type = other DNA
gcccttgtcatggtggc

SEQ ID NO: 175543 - DNA, 17 bp, synthetic construct
  source 1..17: mol_type = other DNA
ggcccttgtcatggtgg

SEQ ID NO: 175544 - DNA, 17 bp, synthetic construct
  source 1..17: mol_type = other DNA
tggcccttgtcatggtg

SEQ ID NO: 175545 - DNA, 17 bp, synthetic construct
  source 1..17: mol_type = other DNA
gtggcccttgtcatggt

SEQ ID NO: 175546 - DNA, 17 bp, synthetic construct
  source 1..17: mol_type = other DNA
ggtggcccttgtcatgg

SEQ ID NO: 175547 - DNA, 17 bp, synthetic construct
  source 1..17: mol_type = other DNA
tggtggcccttgtcatg

SEQ ID NO: 175548 - DNA, 17 bp, synthetic construct
  source 1..17: mol_type = other DNA
ttggtggcccttgtcat

SEQ ID NO: 175549 - DNA, 17 bp, synthetic construct
  source 1..17: mol_type = other DNA
attggtggcccttgtca

SEQ ID NO: 175550 - DNA, 17 bp, synthetic construct
  source 1..17: mol_type = other DNA
aattggtggcccttgtc

SEQ ID NO: 175551 - DNA, 17 bp, synthetic construct
  source 1..17: mol_type = other DNA
gaattggtggcccttgt

SEQ ID NO: 175552 - DNA, 17 bp, synthetic construct
  source 1..17: mol_type = other DNA
ggaattggtggcccttg

SEQ ID NO: 175553 - DNA, 17 bp, synthetic construct
  source 1..17: mol_type = other DNA
tggaattggtggccctt

SEQ ID NO: 175554 - DNA, 17 bp, synthetic construct
  source 1..17: mol_type = other DNA
gtggaattggtggccct

SEQ ID NO: 175555 - DNA, 17 bp, synthetic construct
  source 1..17: mol_type = other DNA
cgtggaattggtggccc

SEQ ID NO: 175556 - DNA, 17 bp, synthetic construct
  source 1..17: mol_type = other DNA
ccgtggaattggtggcc

SEQ ID NO: 175557 - DNA, 17 bp, synthetic construct
  source 1..17: mol_type = other DNA
gccgtggaattggtggc

SEQ ID NO: 175558 - DNA, 17 bp, synthetic construct
  source 1..17: mol_type = other DNA
ggccgtggaattggtgg

SEQ ID NO: 175559 - DNA, 17 bp, synthetic construct
  source 1..17: mol_type = other DNA
tggccgtggaattggtg

SEQ ID NO: 175560 - DNA, 17 bp, synthetic construct
  source 1..17: mol_type = other DNA
gtggccgtggaattggt

SEQ ID NO: 175561 - DNA, 17 bp, synthetic construct
  source 1..17: mol_type = other DNA
tgtggccgtggaattgg

SEQ ID NO: 175562 - DNA, 17 bp, synthetic construct
  source 1..17: mol_type = other DNA
gtgtggccgtggaattg

SEQ ID NO: 175563 - DNA, 17 bp, synthetic construct
  source 1..17: mol_type = other DNA
ggtgtggccgtggaatt

SEQ ID NO: 175564 - DNA, 17 bp, synthetic construct
  source 1..17: mol_type = other DNA
gggtgtggccgtggaat

SEQ ID NO: 175565 - DNA, 17 bp, synthetic construct
  source 1..17: mol_type = other DNA
agggtgtggccgtggaa

SEQ ID NO: 175566 - DNA, 17 bp, synthetic construct
  source 1..17: mol_type = other DNA
gagggtgtggccgtgga

SEQ ID NO: 175567 - DNA, 17 bp, synthetic construct
  source 1..17: mol_type = other DNA
ggagggtgtggccgtgg

SEQ ID NO: 175568 - DNA, 17 bp, synthetic construct
  source 1..17: mol_type = other DNA
aggagggtgtggccgtg

SEQ ID NO: 175569 - DNA, 17 bp, synthetic construct
  source 1..17: mol_type = other DNA
gaggagggtgtggccgt

SEQ ID NO: 175570 - DNA, 17 bp, synthetic construct
  source 1..17: mol_type = other DNA
ggaggagggtgtggccg

SEQ ID NO: 175571 - DNA, 17 bp, synthetic construct
  source 1..17: mol_type = other DNA
tggaggagggtgtggcc

SEQ ID NO: 175572 - DNA, 17 bp, synthetic construct
  source 1..17: mol_type = other DNA
gtggaggagggtgtggc

SEQ ID NO: 175573 - DNA, 17 bp, synthetic construct
  source 1..17: mol_type = other DNA
agtggaggagggtgtgg

SEQ ID NO: 175574 - DNA, 17 bp, synthetic construct
  source 1..17: mol_type = other DNA
gagtggaggagggtgtg

SEQ ID NO: 175575 - DNA, 17 bp, synthetic construct
  source 1..17: mol_type = other DNA
agagtggaggagggtgt

SEQ ID NO: 175576 - DNA, 17 bp, synthetic construct
  source 1..17: mol_type = other DNA
cagagtggaggagggtg

SEQ ID NO: 175577 - DNA, 17 bp, synthetic construct
  source 1..17: mol_type = other DNA
ccagagtggaggagggt

SEQ ID NO: 175578 - DNA, 17 bp, synthetic construct
  source 1..17: mol_type = other DNA
cccagagtggaggaggg

SEQ ID NO: 175579 - DNA, 17 bp, synthetic construct
  source 1..17: mol_type = other DNA
ccccagagtggaggagg

SEQ ID NO: 175580 - DNA, 17 bp, synthetic construct
  source 1..17: mol_type = other DNA
tccccagagtggaggag

SEQ ID NO: 175581 - DNA, 17 bp, synthetic construct
  source 1..17: mol_type = other DNA
gtccccagagtggagga

SEQ ID NO: 175582 - DNA, 17 bp, synthetic construct
  source 1..17: mol_type = other DNA
cgtccccagagtggagg

SEQ ID NO: 175583 - DNA, 17 bp, synthetic construct
  source 1..17: mol_type = other DNA
tcgtccccagagtggag

SEQ ID NO: 175584 - DNA, 17 bp, synthetic construct
  source 1..17: mol_type = other DNA
gtcgtccccagagtgga

SEQ ID NO: 175585 - DNA, 17 bp, synthetic construct
  source 1..17: mol_type = other DNA
ggtcgtccccagagtgg

SEQ ID NO: 175586 - DNA, 17 bp, synthetic construct
  source 1..17: mol_type = other DNA
gggtcgtccccagagtg

SEQ ID NO: 175587 - DNA, 17 bp, synthetic construct
  source 1..17: mol_type = other DNA
cgggtcgtccccagagt

SEQ ID NO: 175588 - DNA, 17 bp, synthetic construct
  source 1..17: mol_type = other DNA
ccgggtcgtccccagag

SEQ ID NO: 175589 - DNA, 17 bp, synthetic construct
  source 1..17: mol_type = other DNA
tccgggtcgtccccaga

SEQ ID NO: 175590 - DNA, 17 bp, synthetic construct
  source 1..17: mol_type = other DNA
atccgggtcgtccccag

SEQ ID NO: 175591 - DNA, 17 bp, synthetic construct
  source 1..17: mol_type = other DNA
gatccgggtcgtcccca

SEQ ID NO: 175592 - DNA, 17 bp, synthetic construct
  source 1..17: mol_type = other DNA
ggatccgggtcgtcccc

SEQ ID NO: 175593 - DNA, 17 bp, synthetic construct
  source 1..17: mol_type = other DNA
aggatccgggtcgtccc

SEQ ID NO: 175594 - DNA, 17 bp, synthetic construct
  source 1..17: mol_type = other DNA
gaggatccgggtcgtcc

SEQ ID NO: 175595 - DNA, 17 bp, synthetic construct
  source 1..17: mol_type = other DNA
tgaggatccgggtcgtc

SEQ ID NO: 175596 - DNA, 17 bp, synthetic construct
  source 1..17: mol_type = other DNA
gtgaggatccgggtcgt

SEQ ID NO: 175597 - DNA, 17 bp, synthetic construct
  source 1..17: mol_type = other DNA
agtgaggatccgggtcg

SEQ ID NO: 175598 - DNA, 17 bp, synthetic construct
  source 1..17: mol_type = other DNA
cagtgaggatccgggtc

SEQ ID NO: 175599 - DNA, 17 bp, synthetic construct
  source 1..17: mol_type = other DNA
tcagtgaggatccgggt

SEQ ID NO: 175600 - DNA, 17 bp, synthetic construct
  source 1..17: mol_type = other DNA
ctcagtgaggatccggg

SEQ ID NO: 175601 - DNA, 17 bp, synthetic construct
  source 1..17: mol_type = other DNA
gctcagtgaggatccgg

SEQ ID NO: 175602 - DNA, 17 bp, synthetic construct
  source 1..17: mol_type = other DNA
agctcagtgaggatccg

SEQ ID NO: 175603 - DNA, 17 bp, synthetic construct
  source 1..17: mol_type = other DNA
cagctcagtgaggatcc

SEQ ID NO: 175604 - DNA, 17 bp, synthetic construct
  source 1..17: mol_type = other DNA
tcagctcagtgaggatc

SEQ ID NO: 175605 - DNA, 17 bp, synthetic construct
  source 1..17: mol_type = other DNA
gtcagctcagtgaggat

SEQ ID NO: 175606 - DNA, 17 bp, synthetic construct
  source 1..17: mol_type = other DNA
ggtcagctcagtgagga

SEQ ID NO: 175607 - DNA, 17 bp, synthetic construct
  source 1..17: mol_type = other DNA
tggtcagctcagtgagg

SEQ ID NO: 175608 - DNA, 17 bp, synthetic construct
  source 1..17: mol_type = other DNA
gtggtcagctcagtgag

SEQ ID NO: 175609 - DNA, 17 bp, synthetic construct
  source 1..17: mol_type = other DNA
tgtggtcagctcagtga

SEQ ID NO: 175610 - DNA, 17 bp, synthetic construct
  source 1..17: mol_type = other DNA
ttgtggtcagctcagtg

SEQ ID NO: 175611 - DNA, 17 bp, synthetic construct
  source 1..17: mol_type = other DNA
gttgtggtcagctcagt

SEQ ID NO: 175612 - DNA, 17 bp, synthetic construct
  source 1..17: mol_type = other DNA
tgttgtggtcagctcag

SEQ ID NO: 175613 - DNA, 17 bp, synthetic construct
  source 1..17: mol_type = other DNA
ctgttgtggtcagctca

SEQ ID NO: 175614 - DNA, 17 bp, synthetic construct
  source 1..17: mol_type = other DNA
gctgttgtggtcagctc

SEQ ID NO: 175615 - DNA, 17 bp, synthetic construct
  source 1..17: mol_type = other DNA
ggctgttgtggtcagct

SEQ ID NO: 175616 - DNA, 17 bp, synthetic construct
  source 1..17: mol_type = other DNA
tggctgttgtggtcagc

SEQ ID NO: 175617 - DNA, 17 bp, synthetic construct
  source 1..17: mol_type = other DNA
gtggctgttgtggtcag

SEQ ID NO: 175618 - DNA, 17 bp, synthetic construct
  source 1..17: mol_type = other DNA
agtggctgttgtggtca

SEQ ID NO: 175619 - DNA, 17 bp, synthetic construct
  source 1..17: mol_type = other DNA
tagtggctgttgtggtc

SEQ ID NO: 175620 - DNA, 17 bp, synthetic construct
  source 1..17: mol_type = other DNA
gtagtggctgttgtggt

SEQ ID NO: 175621 - DNA, 17 bp, synthetic construct
  source 1..17: mol_type = other DNA
tgtagtggctgttgtgg

SEQ ID NO: 175622 - DNA, 17 bp, synthetic construct
  source 1..17: mol_type = other DNA
ttgtagtggctgttgtg

SEQ ID NO: 175623 - DNA, 17 bp, synthetic construct
  source 1..17: mol_type = other DNA
gttgtagtggctgttgt

SEQ ID NO: 175624 - DNA, 17 bp, synthetic construct
  source 1..17: mol_type = other DNA
agttgtagtggctgttg

SEQ ID NO: 175625 - DNA, 17 bp, synthetic construct
  source 1..17: mol_type = other DNA
cagttgtagtggctgtt

SEQ ID NO: 175626 - DNA, 17 bp, synthetic construct
  source 1..17: mol_type = other DNA
gcagttgtagtggctgt

SEQ ID NO: 175627 - DNA, 17 bp, synthetic construct
  source 1..17: mol_type = other DNA
tgcagttgtagtggctg

SEQ ID NO: 175628 - DNA, 17 bp, synthetic construct
  source 1..17: mol_type = other DNA
ctgcagttgtagtggct

SEQ ID NO: 175629 - DNA, 17 bp, synthetic construct
  source 1..17: mol_type = other DNA
gctgcagttgtagtggc

SEQ ID NO: 175630 - DNA, 17 bp, synthetic construct
  source 1..17: mol_type = other DNA
ggctgcagttgtagtgg

SEQ ID NO: 175631 - DNA, 17 bp, synthetic construct
  source 1..17: mol_type = other DNA
tggctgcagttgtagtg

SEQ ID NO: 175632 - DNA, 17 bp, synthetic construct
  source 1..17: mol_type = other DNA
gtggctgcagttgtagt

SEQ ID NO: 175633 - DNA, 17 bp, synthetic construct
  source 1..17: mol_type = other DNA
agtggctgcagttgtag

SEQ ID NO: 175634 - DNA, 17 bp, synthetic construct
  source 1..17: mol_type = other DNA
cagtggctgcagttgta

SEQ ID NO: 175635 - DNA, 17 bp, synthetic construct
  source 1..17: mol_type = other DNA
ccagtggctgcagttgt

SEQ ID NO: 175636 - DNA, 17 bp, synthetic construct
  source 1..17: mol_type = other DNA
tccagtggctgcagttg

SEQ ID NO: 175637 - DNA, 17 bp, synthetic construct
  source 1..17: mol_type = other DNA
atccagtggctgcagtt

SEQ ID NO: 175638 - DNA, 17 bp, synthetic construct
  source 1..17: mol_type = other DNA
gatccagtggctgcagt

SEQ ID NO: 175639 - DNA, 17 bp, synthetic construct
  source 1..17: mol_type = other DNA
ggatccagtggctgcag

SEQ ID NO: 175640 - DNA, 17 bp, synthetic construct
  source 1..17: mol_type = other DNA
tggatccagtggctgca

SEQ ID NO: 175641 - DNA, 17 bp, synthetic construct
  source 1..17: mol_type = other DNA
gtggatccagtggctgc

SEQ ID NO: 175642 - DNA, 17 bp, synthetic construct
  source 1..17: mol_type = other DNA
cgtggatccagtggctg

SEQ ID NO: 175643 - DNA, 17 bp, synthetic construct
  source 1..17: mol_type = other DNA
ccgtggatccagtggct

SEQ ID NO: 175644 - DNA, 17 bp, synthetic construct
  source 1..17: mol_type = other DNA
gccgtggatccagtggc

SEQ ID NO: 175645 - DNA, 17 bp, synthetic construct
  source 1..17: mol_type = other DNA
ggccgtggatccagtgg

SEQ ID NO: 175646 - DNA, 17 bp, synthetic construct
  source 1..17: mol_type = other DNA
tggccgtggatccagtg

SEQ ID NO: 175647 - DNA, 17 bp, synthetic construct
  source 1..17: mol_type = other DNA
gtggccgtggatccagt

SEQ ID NO: 175648 - DNA, 17 bp, synthetic construct
  source 1..17: mol_type = other DNA
ggtggccgtggatccag

SEQ ID NO: 175649 - DNA, 17 bp, synthetic construct
  source 1..17: mol_type = other DNA
gggtggccgtggatcca

SEQ ID NO: 175650 - DNA, 17 bp, synthetic construct
  source 1..17: mol_type = other DNA
agggtggccgtggatcc

SEQ ID NO: 175651 - DNA, 17 bp, synthetic construct
  source 1..17: mol_type = other DNA
cagggtggccgtggatc

SEQ ID NO: 175652 - DNA, 17 bp, synthetic construct
  source 1..17: mol_type = other DNA
acagggtggccgtggat

SEQ ID NO: 175653 - DNA, 17 bp, synthetic construct
  source 1..17: mol_type = other DNA
gacagggtggccgtgga

SEQ ID NO: 175654 - DNA, 17 bp, synthetic construct
  source 1..17: mol_type = other DNA
ggacagggtggccgtgg

SEQ ID NO: 175655 - DNA, 17 bp, synthetic construct
  source 1..17: mol_type = other DNA
aggacagggtggccgtg

SEQ ID NO: 175656 - DNA, 17 bp, synthetic construct
  source 1..17: mol_type = other DNA
gaggacagggtggccgt

SEQ ID NO: 175657 - DNA, 17 bp, synthetic construct
  source 1..17: mol_type = other DNA
ggaggacagggtggccg

SEQ ID NO: 175658 - DNA, 17 bp, synthetic construct
  source 1..17: mol_type = other DNA
tggaggacagggtggcc

SEQ ID NO: 175659 - DNA, 17 bp, synthetic construct
  source 1..17: mol_type = other DNA
gtggaggacagggtggc

SEQ ID NO: 175660 - DNA, 17 bp, synthetic construct
  source 1..17: mol_type = other DNA
ggtggaggacagggtgg

SEQ ID NO: 175661 - DNA, 17 bp, synthetic construct
  source 1..17: mol_type = other DNA
gggtggaggacagggtg

SEQ ID NO: 175662 - DNA, 17 bp, synthetic construct
  source 1..17: mol_type = other DNA
ggggtggaggacagggt

SEQ ID NO: 175663 - DNA, 17 bp, synthetic construct
  source 1..17: mol_type = other DNA
tggggtggaggacaggg

SEQ ID NO: 175664 - DNA, 17 bp, synthetic construct
  source 1..17: mol_type = other DNA
ctggggtggaggacagg

SEQ ID NO: 175665 - DNA, 17 bp, synthetic construct
  source 1..17: mol_type = other DNA
cctggggtggaggacag

SEQ ID NO: 175666 - DNA, 17 bp, synthetic construct
  source 1..17: mol_type = other DNA
ccctggggtggaggaca

SEQ ID NO: 175667 - DNA, 17 bp, synthetic construct
  source 1..17: mol_type = other DNA
tccctggggtggaggac

SEQ ID NO: 175668 - DNA, 17 bp, synthetic construct
  source 1..17: mol_type = other DNA
gtccctggggtggagga

SEQ ID NO: 175669 - DNA, 17 bp, synthetic construct
  source 1..17: mol_type = other DNA
ggtccctggggtggagg

SEQ ID NO: 175670 - DNA, 17 bp, synthetic construct
  source 1..17: mol_type = other DNA
tggtccctggggtggag

SEQ ID NO: 175671 - DNA, 17 bp, synthetic construct
  source 1..17: mol_type = other DNA
gtggtccctggggtgga

SEQ ID NO: 175672 - DNA, 17 bp, synthetic construct
  source 1..17: mol_type = other DNA
ggtggtccctggggtgg

SEQ ID NO: 175673 - DNA, 17 bp, synthetic construct
  source 1..17: mol_type = other DNA
aggtggtccctggggtg

SEQ ID NO: 175674 - DNA, 17 bp, synthetic construct
  source 1..17: mol_type = other DNA
caggtggtccctggggt

SEQ ID NO: 175675 - DNA, 17 bp, synthetic construct
  source 1..17: mol_type = other DNA
ccaggtggtccctgggg

SEQ ID NO: 175676 - DNA, 17 bp, synthetic construct
  source 1..17: mol_type = other DNA
tccaggtggtccctggg

SEQ ID NO: 175677 - DNA, 17 bp, synthetic construct
  source 1..17: mol_type = other DNA
atccaggtggtccctgg

SEQ ID NO: 175678 - DNA, 17 bp, synthetic construct
  source 1..17: mol_type = other DNA
gatccaggtggtccctg

SEQ ID NO: 175679 - DNA, 17 bp, synthetic construct
  source 1..17: mol_type = other DNA
ggatccaggtggtccct

SEQ ID NO: 175680 - DNA, 17 bp, synthetic construct
  source 1..17: mol_type = other DNA
aggatccaggtggtccc

SEQ ID NO: 175681 - DNA, 17 bp, synthetic construct
  source 1..17: mol_type = other DNA
gaggatccaggtggtcc

SEQ ID NO: 175682 - DNA, 17 bp, synthetic construct
  source 1..17: mol_type = other DNA
tgaggatccaggtggtc

SEQ ID NO: 175683 - DNA, 17 bp, synthetic construct
  source 1..17: mol_type = other DNA
gtgaggatccaggtggt

SEQ ID NO: 175684 - DNA, 17 bp, synthetic construct
  source 1..17: mol_type = other DNA
tgtgaggatccaggtgg

SEQ ID NO: 175685 - DNA, 17 bp, synthetic construct
  source 1..17: mol_type = other DNA
ctgtgaggatccaggtg

SEQ ID NO: 175686 - DNA, 17 bp, synthetic construct
  source 1..17: mol_type = other DNA
tctgtgaggatccaggt

SEQ ID NO: 175687 - DNA, 17 bp, synthetic construct
  source 1..17: mol_type = other DNA
ctctgtgaggatccagg

SEQ ID NO: 175688 - DNA, 17 bp, synthetic construct
  source 1..17: mol_type = other DNA
gctctgtgaggatccag

SEQ ID NO: 175689 - DNA, 17 bp, synthetic construct
  source 1..17: mol_type = other DNA
ggctctgtgaggatcca

SEQ ID NO: 175690 - DNA, 17 bp, synthetic construct
  source 1..17: mol_type = other DNA
cggctctgtgaggatcc

SEQ ID NO: 175691 - DNA, 17 bp, synthetic construct
  source 1..17: mol_type = other DNA
tcggctctgtgaggatc

SEQ ID NO: 175692 - DNA, 17 bp, synthetic construct
  source 1..17: mol_type = other DNA
ctcggctctgtgaggat

SEQ ID NO: 175693 - DNA, 17 bp, synthetic construct
  source 1..17: mol_type = other DNA
gctcggctctgtgagga

SEQ ID NO: 175694 - DNA, 17 bp, synthetic construct
  source 1..17: mol_type = other DNA
tgctcggctctgtgagg

SEQ ID NO: 175695 - DNA, 17 bp, synthetic construct
  source 1..17: mol_type = other DNA
gtgctcggctctgtgag

SEQ ID NO: 175696 - DNA, 17 bp, synthetic construct
  source 1..17: mol_type = other DNA
agtgctcggctctgtga

SEQ ID NO: 175697 - DNA, 17 bp, synthetic construct
  source 1..17: mol_type = other DNA
tagtgctcggctctgtg

SEQ ID NO: 175698 - DNA, 17 bp, synthetic construct
  source 1..17: mol_type = other DNA
atagtgctcggctctgt

SEQ ID NO: 175699 - DNA, 17 bp, synthetic construct
  source 1..17: mol_type = other DNA
tatagtgctcggctctg

SEQ ID NO: 175700 - DNA, 17 bp, synthetic construct
  source 1..17: mol_type = other DNA
ctatagtgctcggctct

SEQ ID NO: 175701 - DNA, 17 bp, synthetic construct
  source 1..17: mol_type = other DNA
gctatagtgctcggctc

SEQ ID NO: 175702 - DNA, 17 bp, synthetic construct
  source 1..17: mol_type = other DNA
ggctatagtgctcggct

SEQ ID NO: 175703 - DNA, 17 bp, synthetic construct
  source 1..17: mol_type = other DNA
tggctatagtgctcggc

SEQ ID NO: 175704 - DNA, 17 bp, synthetic construct
  source 1..17: mol_type = other DNA
gtggctatagtgctcgg

SEQ ID NO: 175705 - DNA, 17 bp, synthetic construct
  source 1..17: mol_type = other DNA
ggtggctatagtgctcg

SEQ ID NO: 175706 - DNA, 17 bp, synthetic construct
  source 1..17: mol_type = other DNA
cggtggctatagtgctc

SEQ ID NO: 175707 - DNA, 17 bp, synthetic construct
  source 1..17: mol_type = other DNA
acggtggctatagtgct

SEQ ID NO: 175708 - DNA, 17 bp, synthetic construct
  source 1..17: mol_type = other DNA
cacggtggctatagtgc

SEQ ID NO: 175709 - DNA, 17 bp, synthetic construct
  source 1..17: mol_type = other DNA
tcacggtggctatagtg

SEQ ID NO: 175710 - DNA, 17 bp, synthetic construct
  source 1..17: mol_type = other DNA
atcacggtggctatagt

SEQ ID NO: 175711 - DNA, 17 bp, synthetic construct
  source 1..17: mol_type = other DNA
catcacggtggctatag

SEQ ID NO: 175712 - DNA, 17 bp, synthetic construct
  source 1..17: mol_type = other DNA
ccatcacggtggctata

SEQ ID NO: 175713 - DNA, 17 bp, synthetic construct
  source 1..17: mol_type = other DNA
accatcacggtggctat

SEQ ID NO: 175714 - DNA, 17 bp, synthetic construct
  source 1..17: mol_type = other DNA
caccatcacggtggcta

SEQ ID NO: 175715 - DNA, 17 bp, synthetic construct
  source 1..17: mol_type = other DNA
gcaccatcacggtggct

SEQ ID NO: 175716 - DNA, 17 bp, synthetic construct
  source 1..17: mol_type = other DNA
ggcaccatcacggtggc

SEQ ID NO: 175717 - DNA, 17 bp, synthetic construct
  source 1..17: mol_type = other DNA
gggcaccatcacggtgg

SEQ ID NO: 175718 - DNA, 17 bp, synthetic construct
  source 1..17: mol_type = other DNA
tgggcaccatcacggtg

SEQ ID NO: 175719 - DNA, 17 bp, synthetic construct
  source 1..17: mol_type = other DNA
gtgggcaccatcacggt

SEQ ID NO: 175720 - DNA, 17 bp, synthetic construct
  source 1..17: mol_type = other DNA
ggtgggcaccatcacgg

SEQ ID NO: 175721 - DNA, 17 bp, synthetic construct
  source 1..17: mol_type = other DNA
cggtgggcaccatcacg

SEQ ID NO: 175722 - DNA, 17 bp, synthetic construct
  source 1..17: mol_type = other DNA
ccggtgggcaccatcac

SEQ ID NO: 175723 - DNA, 17 bp, synthetic construct
  source 1..17: mol_type = other DNA
accggtgggcaccatca

SEQ ID NO: 175724 - DNA, 17 bp, synthetic construct
  source 1..17: mol_type = other DNA
aaccggtgggcaccatc

SEQ ID NO: 175725 - DNA, 17 bp, synthetic construct
  source 1..17: mol_type = other DNA
gaaccggtgggcaccat

SEQ ID NO: 175726 - DNA, 17 bp, synthetic construct
  source 1..17: mol_type = other DNA
ggaaccggtgggcacca

SEQ ID NO: 175727 - DNA, 17 bp, synthetic construct
  source 1..17: mol_type = other DNA
tggaaccggtgggcacc

SEQ ID NO: 175728 - DNA, 17 bp, synthetic construct
  source 1..17: mol_type = other DNA
gtggaaccggtgggcac

SEQ ID NO: 175729 - DNA, 17 bp, synthetic construct
  source 1..17: mol_type = other DNA
cgtggaaccggtgggca

SEQ ID NO: 175730 - DNA, 17 bp, synthetic construct
  source 1..17: mol_type = other DNA
ccgtggaaccggtgggc

SEQ ID NO: 175731 - DNA, 17 bp, synthetic construct
  source 1..17: mol_type = other DNA
gccgtggaaccggtggg

SEQ ID NO: 175732 - DNA, 17 bp, synthetic construct
  source 1..17: mol_type = other DNA
ggccgtggaaccggtgg

SEQ ID NO: 175733 - DNA, 17 bp, synthetic construct
  source 1..17: mol_type = other DNA
tggccgtggaaccggtg

SEQ ID NO: 175734 - DNA, 17 bp, synthetic construct
  source 1..17: mol_type = other DNA
gtggccgtggaaccggt

SEQ ID NO: 175735 - DNA, 17 bp, synthetic construct
  source 1..17: mol_type = other DNA
ggtggccgtggaaccgg

SEQ ID NO: 175736 - DNA, 17 bp, synthetic construct
  source 1..17: mol_type = other DNA
cggtggccgtggaaccg

SEQ ID NO: 175737 - DNA, 17 bp, synthetic construct
  source 1..17: mol_type = other DNA
gcggtggccgtggaacc

SEQ ID NO: 175738 - DNA, 17 bp, synthetic construct
  source 1..17: mol_type = other DNA
ggcggtggccgtggaac

SEQ ID NO: 175739 - DNA, 17 bp, synthetic construct
  source 1..17: mol_type = other DNA
aggcggtggccgtggaa

SEQ ID NO: 175740 - DNA, 17 bp, synthetic construct
  source 1..17: mol_type = other DNA
gaggcggtggccgtgga

SEQ ID NO: 175741 - DNA, 17 bp, synthetic construct
  source 1..17: mol_type = other DNA
ggaggcggtggccgtgg

SEQ ID NO: 175742 - DNA, 17 bp, synthetic construct
  source 1..17: mol_type = other DNA
aggaggcggtggccgtg

SEQ ID NO: 175743 - DNA, 17 bp, synthetic construct
  source 1..17: mol_type = other DNA
gaggaggcggtggccgt

SEQ ID NO: 175744 - DNA, 17 bp, synthetic construct
  source 1..17: mol_type = other DNA
ggaggaggcggtggccg

SEQ ID NO: 175745 - DNA, 17 bp, synthetic construct
  source 1..17: mol_type = other DNA
tggaggaggcggtggcc

SEQ ID NO: 175746 - DNA, 17 bp, synthetic construct
  source 1..17: mol_type = other DNA
gtggaggaggcggtggc

SEQ ID NO: 175747 - DNA, 17 bp, synthetic construct
  source 1..17: mol_type = other DNA
agtggaggaggcggtgg

SEQ ID NO: 175748 - DNA, 17 bp, synthetic construct
  source 1..17: mol_type = other DNA
gagtggaggaggcggtg

SEQ ID NO: 175749 - DNA, 17 bp, synthetic construct
  source 1..17: mol_type = other DNA
agagtggaggaggcggt

SEQ ID NO: 175750 - DNA, 17 bp, synthetic construct
  source 1..17: mol_type = other DNA
cagagtggaggaggcgg

SEQ ID NO: 175751 - DNA, 17 bp, synthetic construct
  source 1..17: mol_type = other DNA
ccagagtggaggaggcg

SEQ ID NO: 175752 - DNA, 17 bp, synthetic construct
  source 1..17: mol_type = other DNA
cccagagtggaggaggc

SEQ ID NO: 175753 - DNA, 17 bp, synthetic construct
  source 1..17: mol_type = other DNA
tcccagagtggaggagg

SEQ ID NO: 175754 - DNA, 17 bp, synthetic construct
  source 1..17: mol_type = other DNA
ttcccagagtggaggag

SEQ ID NO: 175755 - DNA, 17 bp, synthetic construct
  source 1..17: mol_type = other DNA
gttcccagagtggagga

SEQ ID NO: 175756 - DNA, 17 bp, synthetic construct
  source 1..17: mol_type = other DNA
tgttcccagagtggagg

SEQ ID NO: 175757 - DNA, 17 bp, synthetic construct
  source 1..17: mol_type = other DNA
ctgttcccagagtggag

SEQ ID NO: 175758 - DNA, 17 bp, synthetic construct
  source 1..17: mol_type = other DNA
gctgttcccagagtgga

SEQ ID NO: 175759 - DNA, 17 bp, synthetic construct
  source 1..17: mol_type = other DNA
agctgttcccagagtgg

SEQ ID NO: 175760 - DNA, 17 bp, synthetic construct
  source 1..17: mol_type = other DNA
gagctgttcccagagtg

SEQ ID NO: 175761 - DNA, 17 bp, synthetic construct
  source 1..17: mol_type = other DNA
tgagctgttcccagagt

SEQ ID NO: 175762 - DNA, 17 bp, synthetic construct
  source 1..17: mol_type = other DNA
gtgagctgttcccagag

SEQ ID NO: 175763 - DNA, 17 bp, synthetic construct
  source 1..17: mol_type = other DNA
tgtgagctgttcccaga

SEQ ID NO: 175764 - DNA, 17 bp, synthetic construct
  source 1..17: mol_type = other DNA
gtgtgagctgttcccag

SEQ ID NO: 175765 - DNA, 17 bp, synthetic construct
  source 1..17: mol_type = other DNA
ggtgtgagctgttccca

SEQ ID NO: 175766 - DNA, 17 bp, synthetic construct
  source 1..17: mol_type = other DNA
gggtgtgagctgttccc

SEQ ID NO: 175767 - DNA, 17 bp, synthetic construct
  source 1..17: mol_type = other DNA
ggggtgtgagctgttcc

SEQ ID NO: 175768 - DNA, 17 bp, synthetic construct
  source 1..17: mol_type = other DNA
gggggtgtgagctgttc

SEQ ID NO: 175769 - DNA, 17 bp, synthetic construct
  source 1..17: mol_type = other DNA
tgggggtgtgagctgtt

SEQ ID NO: 175770 - DNA, 17 bp, synthetic construct
  source 1..17: mol_type = other DNA
ttgggggtgtgagctgt

SEQ ID NO: 175771 - DNA, 17 bp, synthetic construct
  source 1..17: mol_type = other DNA
tttgggggtgtgagctg

SEQ ID NO: 175772 - DNA, 17 bp, synthetic construct
  source 1..17: mol_type = other DNA
ctttgggggtgtgagct

SEQ ID NO: 175773 - DNA, 17 bp, synthetic construct
  source 1..17: mol_type = other DNA
actttgggggtgtgagc

SEQ ID NO: 175774 - DNA, 17 bp, synthetic construct
  source 1..17: mol_type = other DNA
cactttgggggtgtgag

SEQ ID NO: 175775 - DNA, 17 bp, synthetic construct
  source 1..17: mol_type = other DNA
ccactttgggggtgtga

SEQ ID NO: 175776 - DNA, 17 bp, synthetic construct
  source 1..17: mol_type = other DNA
accactttgggggtgtg

SEQ ID NO: 175777 - DNA, 17 bp, synthetic construct
  source 1..17: mol_type = other DNA
caccactttgggggtgt

SEQ ID NO: 175778 - DNA, 17 bp, synthetic construct
  source 1..17: mol_type = other DNA
tcaccactttgggggtg

SEQ ID NO: 175779 - DNA, 17 bp, synthetic construct
  source 1..17: mol_type = other DNA
gtcaccactttgggggt

SEQ ID NO: 175780 - DNA, 17 bp, synthetic construct
  source 1..17: mol_type = other DNA
ggtcaccactttggggg

SEQ ID NO: 175781 - DNA, 17 bp, synthetic construct
  source 1..17: mol_type = other DNA
tggtcaccactttgggg

SEQ ID NO: 175782 - DNA, 17 bp, synthetic construct
  source 1..17: mol_type = other DNA
gtggtcaccactttggg

SEQ ID NO: 175783 - DNA, 17 bp, synthetic construct
  source 1..17: mol_type = other DNA
ggtggtcaccactttgg

SEQ ID NO: 175784 - DNA, 17 bp, synthetic construct
  source 1..17: mol_type = other DNA
tggtggtcaccactttg

SEQ ID NO: 175785 - DNA, 17 bp, synthetic construct
  source 1..17: mol_type = other DNA
atggtggtcaccacttt

SEQ ID NO: 175786 - DNA, 17 bp, synthetic construct
  source 1..17: mol_type = other DNA
catggtggtcaccactt

SEQ ID NO: 175787 - DNA, 17 bp, synthetic construct
  source 1..17: mol_type = other DNA
ccatggtggtcaccact

SEQ ID NO: 175788 - DNA, 17 bp, synthetic construct
  source 1..17: mol_type = other DNA
gccatggtggtcaccac

SEQ ID NO: 175789 - DNA, 17 bp, synthetic construct
  source 1..17: mol_type = other DNA
ggccatggtggtcacca

SEQ ID NO: 175790 - DNA, 17 bp, synthetic construct
  source 1..17: mol_type = other DNA
tggccatggtggtcacc

SEQ ID NO: 175791 - DNA, 17 bp, synthetic construct
  source 1..17: mol_type = other DNA
gtggccatggtggtcac

SEQ ID NO: 175792 - DNA, 17 bp, synthetic construct
  source 1..17: mol_type = other DNA
agtggccatggtggtca

SEQ ID NO: 175793 - DNA, 17 bp, synthetic construct
  source 1..17: mol_type = other DNA
tagtggccatggtggtc

SEQ ID NO: 175794 - DNA, 17 bp, synthetic construct
  source 1..17: mol_type = other DNA
atagtggccatggtggt

SEQ ID NO: 175795 - DNA, 17 bp, synthetic construct
  source 1..17: mol_type = other DNA
catagtggccatggtgg

SEQ ID NO: 175796 - DNA, 17 bp, synthetic construct
  source 1..17: mol_type = other DNA
gcatagtggccatggtg

SEQ ID NO: 175797 - DNA, 17 bp, synthetic construct
  source 1..17: mol_type = other DNA
ggcatagtggccatggt

SEQ ID NO: 175798 - DNA, 17 bp, synthetic construct
  source 1..17: mol_type = other DNA
gggcatagtggccatgg

SEQ ID NO: 175799 - DNA, 17 bp, synthetic construct
  source 1..17: mol_type = other DNA
tgggcatagtggccatg

SEQ ID NO: 175800 - DNA, 17 bp, synthetic construct
  source 1..17: mol_type = other DNA
gtgggcatagtggccat

SEQ ID NO: 175801 - DNA, 17 bp, synthetic construct
  source 1..17: mol_type = other DNA
tgtgggcatagtggcca

SEQ ID NO: 175802 - DNA, 17 bp, synthetic construct
  source 1..17: mol_type = other DNA
ctgtgggcatagtggcc

SEQ ID NO: 175803 - DNA, 17 bp, synthetic construct
  source 1..17: mol_type = other DNA
gctgtgggcatagtggc

SEQ ID NO: 175804 - DNA, 17 bp, synthetic construct
  source 1..17: mol_type = other DNA
ggctgtgggcatagtgg

SEQ ID NO: 175805 - DNA, 17 bp, synthetic construct
  source 1..17: mol_type = other DNA
tggctgtgggcatagtg

SEQ ID NO: 175806 - DNA, 17 bp, synthetic construct
  source 1..17: mol_type = other DNA
gtggctgtgggcatagt

SEQ ID NO: 175807 - DNA, 17 bp, synthetic construct
  source 1..17: mol_type = other DNA
agtggctgtgggcatag

SEQ ID NO: 175808 - DNA, 17 bp, synthetic construct
  source 1..17: mol_type = other DNA
cagtggctgtgggcata

SEQ ID NO: 175809 - DNA, 17 bp, synthetic construct
  source 1..17: mol_type = other DNA
gcagtggctgtgggcat

SEQ ID NO: 175810 - DNA, 17 bp, synthetic construct
  source 1..17: mol_type = other DNA
ggcagtggctgtgggca

SEQ ID NO: 175811 - DNA, 17 bp, synthetic construct
  source 1..17: mol_type = other DNA
aggcagtggctgtgggc

SEQ ID NO: 175812 - DNA, 17 bp, synthetic construct
  source 1..17: mol_type = other DNA
gaggcagtggctgtggg

SEQ ID NO: 175813 - DNA, 17 bp, synthetic construct
  source 1..17: mol_type = other DNA
ggaggcagtggctgtgg

SEQ ID NO: 175814 - DNA, 17 bp, synthetic construct
  source 1..17: mol_type = other DNA
tggaggcagtggctgtg

SEQ ID NO: 175815 - DNA, 17 bp, synthetic construct
  source 1..17: mol_type = other DNA
gtggaggcagtggctgt

SEQ ID NO: 175816 - DNA, 17 bp, synthetic construct
  source 1..17: mol_type = other DNA
cgtggaggcagtggctg

SEQ ID NO: 175817 - DNA, 17 bp, synthetic construct
  source 1..17: mol_type = other DNA
ccgtggaggcagtggct

SEQ ID NO: 175818 - DNA, 17 bp, synthetic construct
  source 1..17: mol_type = other DNA
accgtggaggcagtggc

SEQ ID NO: 175819 - DNA, 17 bp, synthetic construct
  source 1..17: mol_type = other DNA
aaccgtggaggcagtgg

SEQ ID NO: 175820 - DNA, 17 bp, synthetic construct
  source 1..17: mol_type = other DNA
gaaccgtggaggcagtg

SEQ ID NO: 175821 - DNA, 17 bp, synthetic construct
  source 1..17: mol_type = other DNA
ggaaccgtggaggcagt

SEQ ID NO: 175822 - DNA, 17 bp, synthetic construct
  source 1..17: mol_type = other DNA
gggaaccgtggaggcag

SEQ ID NO: 175823 - DNA, 17 bp, synthetic construct
  source 1..17: mol_type = other DNA
tgggaaccgtggaggca

SEQ ID NO: 175824 - DNA, 17 bp, synthetic construct
  source 1..17: mol_type = other DNA
ctgggaaccgtggaggc

SEQ ID NO: 175825 - DNA, 17 bp, synthetic construct
  source 1..17: mol_type = other DNA
gctgggaaccgtggagg

SEQ ID NO: 175826 - DNA, 17 bp, synthetic construct
  source 1..17: mol_type = other DNA
agctgggaaccgtggag

SEQ ID NO: 175827 - DNA, 17 bp, synthetic construct
  source 1..17: mol_type = other DNA
gagctgggaaccgtgga

SEQ ID NO: 175828 - DNA, 17 bp, synthetic construct
  source 1..17: mol_type = other DNA
cgagctgggaaccgtgg

SEQ ID NO: 175829 - DNA, 17 bp, synthetic construct
  source 1..17: mol_type = other DNA
acgagctgggaaccgtg

SEQ ID NO: 175830 - DNA, 17 bp, synthetic construct
  source 1..17: mol_type = other DNA
gacgagctgggaaccgt

SEQ ID NO: 175831 - DNA, 17 bp, synthetic construct
  source 1..17: mol_type = other DNA
ggacgagctgggaaccg

SEQ ID NO: 175832 - DNA, 17 bp, synthetic construct
  source 1..17: mol_type = other DNA
tggacgagctgggaacc

SEQ ID NO: 175833 - DNA, 17 bp, synthetic construct
  source 1..17: mol_type = other DNA
gtggacgagctgggaac

SEQ ID NO: 175834 - DNA, 17 bp, synthetic construct
  source 1..17: mol_type = other DNA
ggtggacgagctgggaa

SEQ ID NO: 175835 - DNA, 17 bp, synthetic construct
  source 1..17: mol_type = other DNA
cggtggacgagctggga

SEQ ID NO: 175836 - DNA, 17 bp, synthetic construct
  source 1..17: mol_type = other DNA
acggtggacgagctggg

SEQ ID NO: 175837 - DNA, 17 bp, synthetic construct
  source 1..17: mol_type = other DNA
cacggtggacgagctgg

SEQ ID NO: 175838 - DNA, 17 bp, synthetic construct
  source 1..17: mol_type = other DNA
ccacggtggacgagctg

SEQ ID NO: 175839 - DNA, 17 bp, synthetic construct
  source 1..17: mol_type = other DNA
cccacggtggacgagct

SEQ ID NO: 175840 - DNA, 17 bp, synthetic construct
  source 1..17: mol_type = other DNA
ccccacggtggacgagc

SEQ ID NO: 175841 - DNA, 17 bp, synthetic construct
  source 1..17: mol_type = other DNA
tccccacggtggacgag

SEQ ID NO: 175842 - DNA, 17 bp, synthetic construct
  source 1..17: mol_type = other DNA
gtccccacggtggacga

SEQ ID NO: 175843 - DNA, 17 bp, synthetic construct
  source 1..17: mol_type = other DNA
ggtccccacggtggacg

SEQ ID NO: 175844 - DNA, 17 bp, synthetic construct
  source 1..17: mol_type = other DNA
tggtccccacggtggac

SEQ ID NO: 175845 - DNA, 17 bp, synthetic construct
  source 1..17: mol_type = other DNA
gtggtccccacggtgga

SEQ ID NO: 175846 - DNA, 17 bp, synthetic construct
  source 1..17: mol_type = other DNA
ggtggtccccacggtgg

SEQ ID NO: 175847 - DNA, 17 bp, synthetic construct
  source 1..17: mol_type = other DNA
gggtggtccccacggtg

SEQ ID NO: 175848 - DNA, 17 bp, synthetic construct
  source 1..17: mol_type = other DNA
cgggtggtccccacggt

SEQ ID NO: 175849 - DNA, 17 bp, synthetic construct
  source 1..17: mol_type = other DNA
gcgggtggtccccacgg

SEQ ID NO: 175850 - DNA, 17 bp, synthetic construct
  source 1..17: mol_type = other DNA
tgcgggtggtccccacg

SEQ ID NO: 175851 - DNA, 17 bp, synthetic construct
  source 1..17: mol_type = other DNA
gtgcgggtggtccccac

SEQ ID NO: 175852 - DNA, 17 bp, synthetic construct
  source 1..17: mol_type = other DNA
ggtgcgggtggtcccca

SEQ ID NO: 175853 - DNA, 17 bp, synthetic construct
  source 1..17: mol_type = other DNA
gggtgcgggtggtcccc

SEQ ID NO: 175854 - DNA, 17 bp, synthetic construct
  source 1..17: mol_type = other DNA
ggggtgcgggtggtccc

SEQ ID NO: 175855 - DNA, 17 bp, synthetic construct
  source 1..17: mol_type = other DNA
aggggtgcgggtggtcc

SEQ ID NO: 175856 - DNA, 17 bp, synthetic construct
  source 1..17: mol_type = other DNA
caggggtgcgggtggtc

SEQ ID NO: 175857 - DNA, 17 bp, synthetic construct
  source 1..17: mol_type = other DNA
gcaggggtgcgggtggt

SEQ ID NO: 175858 - DNA, 17 bp, synthetic construct
  source 1..17: mol_type = other DNA
tgcaggggtgcgggtgg

SEQ ID NO: 175859 - DNA, 17 bp, synthetic construct
  source 1..17: mol_type = other DNA
ctgcaggggtgcgggtg

SEQ ID NO: 175860 - DNA, 17 bp, synthetic construct
  source 1..17: mol_type = other DNA
actgcaggggtgcgggt

SEQ ID NO: 175861 - DNA, 17 bp, synthetic construct
  source 1..17: mol_type = other DNA
cactgcaggggtgcggg

SEQ ID NO: 175862 - DNA, 17 bp, synthetic construct
  source 1..17: mol_type = other DNA
gcactgcaggggtgcgg

SEQ ID NO: 175863 - DNA, 17 bp, synthetic construct
  source 1..17: mol_type = other DNA
agcactgcaggggtgcg

SEQ ID NO: 175864 - DNA, 17 bp, synthetic construct
  source 1..17: mol_type = other DNA
gagcactgcaggggtgc

SEQ ID NO: 175865 - DNA, 17 bp, synthetic construct
  source 1..17: mol_type = other DNA
ggagcactgcaggggtg

SEQ ID NO: 175866 - DNA, 17 bp, synthetic construct
  source 1..17: mol_type = other DNA
gggagcactgcaggggt

SEQ ID NO: 175867 - DNA, 17 bp, synthetic construct
  source 1..17: mol_type = other DNA
ggggagcactgcagggg

SEQ ID NO: 175868 - DNA, 17 bp, synthetic construct
  source 1..17: mol_type = other DNA
tggggagcactgcaggg

SEQ ID NO: 175869 - DNA, 17 bp, synthetic construct
  source 1..17: mol_type = other DNA
ctggggagcactgcagg

SEQ ID NO: 175870 - DNA, 17 bp, synthetic construct
  source 1..17: mol_type = other DNA
gctggggagcactgcag

SEQ ID NO: 175871 - DNA, 17 bp, synthetic construct
  source 1..17: mol_type = other DNA
tgctggggagcactgca

SEQ ID NO: 175872 - DNA, 17 bp, synthetic construct
  source 1..17: mol_type = other DNA
ctgctggggagcactgc

SEQ ID NO: 175873 - DNA, 17 bp, synthetic construct
  source 1..17: mol_type = other DNA
gctgctggggagcactg

SEQ ID NO: 175874 - DNA, 17 bp, synthetic construct
  source 1..17: mol_type = other DNA
ggctgctggggagcact

SEQ ID NO: 175875 - DNA, 17 bp, synthetic construct
  source 1..17: mol_type = other DNA
aggctgctggggagcac

SEQ ID NO: 175876 - DNA, 17 bp, synthetic construct
  source 1..17: mol_type = other DNA
caggctgctggggagca

SEQ ID NO: 175877 - DNA, 17 bp, synthetic construct
  source 1..17: mol_type = other DNA
gcaggctgctggggagc

SEQ ID NO: 175878 - DNA, 17 bp, synthetic construct
  source 1..17: mol_type = other DNA
ggcaggctgctggggag

SEQ ID NO: 175879 - DNA, 17 bp, synthetic construct
  source 1..17: mol_type = other DNA
tggcaggctgctgggga

SEQ ID NO: 175880 - DNA, 17 bp, synthetic construct
  source 1..17: mol_type = other DNA
ttggcaggctgctgggg

SEQ ID NO: 175881 - DNA, 17 bp, synthetic construct
  source 1..17: mol_type = other DNA
gttggcaggctgctggg

SEQ ID NO: 175882 - DNA, 17 bp, synthetic construct
  source 1..17: mol_type = other DNA
ggttggcaggctgctgg

SEQ ID NO: 175883 - DNA, 17 bp, synthetic construct
  source 1..17: mol_type = other DNA
aggttggcaggctgctg

SEQ ID NO: 175884 - DNA, 17 bp, synthetic construct
  source 1..17: mol_type = other DNA
aaggttggcaggctgct

SEQ ID NO: 175885 - DNA, 17 bp, synthetic construct
  source 1..17: mol_type = other DNA
gaaggttggcaggctgc

SEQ ID NO: 175886 - DNA, 17 bp, synthetic construct
  source 1..17: mol_type = other DNA
tgaaggttggcaggctg

SEQ ID NO: 175887 - DNA, 17 bp, synthetic construct
  source 1..17: mol_type = other DNA
ctgaaggttggcaggct

SEQ ID NO: 175888 - DNA, 17 bp, synthetic construct
  source 1..17: mol_type = other DNA
gctgaaggttggcaggc

SEQ ID NO: 175889 - DNA, 17 bp, synthetic construct
  source 1..17: mol_type = other DNA
cgctgaaggttggcagg

SEQ ID NO: 175890 - DNA, 17 bp, synthetic construct
  source 1..17: mol_type = other DNA
acgctgaaggttggcag

SEQ ID NO: 175891 - DNA, 17 bp, synthetic construct
  source 1..17: mol_type = other DNA
cacgctgaaggttggca

SEQ ID NO: 175892 - DNA, 17 bp, synthetic construct
  source 1..17: mol_type = other DNA
acacgctgaaggttggc

SEQ ID NO: 175893 - DNA, 17 bp, synthetic construct
  source 1..17: mol_type = other DNA
gacacgctgaaggttgg

SEQ ID NO: 175894 - DNA, 17 bp, synthetic construct
  source 1..17: mol_type = other DNA
ggacacgctgaaggttg

SEQ ID NO: 175895 - DNA, 17 bp, synthetic construct
  source 1..17: mol_type = other DNA
tggacacgctgaaggtt

SEQ ID NO: 175896 - DNA, 17 bp, synthetic construct
  source 1..17: mol_type = other DNA
gtggacacgctgaaggt

SEQ ID NO: 175897 - DNA, 17 bp, synthetic construct
  source 1..17: mol_type = other DNA
agtggacacgctgaagg

SEQ ID NO: 175898 - DNA, 17 bp, synthetic construct
  source 1..17: mol_type = other DNA
cagtggacacgctgaag

SEQ ID NO: 175899 - DNA, 17 bp, synthetic construct
  source 1..17: mol_type = other DNA
acagtggacacgctgaa

SEQ ID NO: 175900 - DNA, 17 bp, synthetic construct
  source 1..17: mol_type = other DNA
cacagtggacacgctga

SEQ ID NO: 175901 - DNA, 17 bp, synthetic construct
  source 1..17: mol_type = other DNA
acacagtggacacgctg

SEQ ID NO: 175902 - DNA, 17 bp, synthetic construct
  source 1..17: mol_type = other DNA
gacacagtggacacgct

SEQ ID NO: 175903 - DNA, 17 bp, synthetic construct
  source 1..17: mol_type = other DNA
ggacacagtggacacgc

SEQ ID NO: 175904 - DNA, 17 bp, synthetic construct
  source 1..17: mol_type = other DNA
aggacacagtggacacg

SEQ ID NO: 175905 - DNA, 17 bp, synthetic construct
  source 1..17: mol_type = other DNA
gaggacacagtggacac

SEQ ID NO: 175906 - DNA, 17 bp, synthetic construct
  source 1..17: mol_type = other DNA
ggaggacacagtggaca

SEQ ID NO: 175907 - DNA, 17 bp, synthetic construct
  source 1..17: mol_type = other DNA
aggaggacacagtggac

SEQ ID NO: 175908 - DNA, 17 bp, synthetic construct
  source 1..17: mol_type = other DNA
gaggaggacacagtgga

SEQ ID NO: 175909 - DNA, 17 bp, synthetic construct
  source 1..17: mol_type = other DNA
tgaggaggacacagtgg

SEQ ID NO: 175910 - DNA, 17 bp, synthetic construct
  source 1..17: mol_type = other DNA
ctgaggaggacacagtg

SEQ ID NO: 175911 - DNA, 17 bp, synthetic construct
  source 1..17: mol_type = other DNA
actgaggaggacacagt

SEQ ID NO: 175912 - DNA, 17 bp, synthetic construct
  source 1..17: mol_type = other DNA
gactgaggaggacacag

SEQ ID NO: 175913 - DNA, 17 bp, synthetic construct
  source 1..17: mol_type = other DNA
ggactgaggaggacaca

SEQ ID NO: 175914 - DNA, 17 bp, synthetic construct
  source 1..17: mol_type = other DNA
aggactgaggaggacac

SEQ ID NO: 175915 - DNA, 17 bp, synthetic construct
  source 1..17: mol_type = other DNA
gaggactgaggaggaca

SEQ ID NO: 175916 - DNA, 17 bp, synthetic construct
  source 1..17: mol_type = other DNA
tgaggactgaggaggac

SEQ ID NO: 175917 - DNA, 17 bp, synthetic construct
  source 1..17: mol_type = other DNA
gtgaggactgaggagga

SEQ ID NO: 175918 - DNA, 17 bp, synthetic construct
  source 1..17: mol_type = other DNA
ggtgaggactgaggagg

SEQ ID NO: 175919 - DNA, 17 bp, synthetic construct
  source 1..17: mol_type = other DNA
tggtgaggactgaggag

SEQ ID NO: 175920 - DNA, 17 bp, synthetic construct
  source 1..17: mol_type = other DNA
gtggtgaggactgagga

SEQ ID NO: 175921 - DNA, 17 bp, synthetic construct
  source 1..17: mol_type = other DNA
ggtggtgaggactgagg

SEQ ID NO: 175922 - DNA, 17 bp, synthetic construct
  source 1..17: mol_type = other DNA
gggtggtgaggactgag

SEQ ID NO: 175923 - DNA, 17 bp, synthetic construct
  source 1..17: mol_type = other DNA
agggtggtgaggactga

SEQ ID NO: 175924 - DNA, 17 bp, synthetic construct
  source 1..17: mol_type = other DNA
cagggtggtgaggactg

SEQ ID NO: 175925 - DNA, 17 bp, synthetic construct
  source 1..17: mol_type = other DNA
tcagggtggtgaggact

SEQ ID NO: 175926 - DNA, 17 bp, synthetic construct
  source 1..17: mol_type = other DNA
ctcagggtggtgaggac

SEQ ID NO: 175927 - DNA, 17 bp, synthetic construct
  source 1..17: mol_type = other DNA
tctcagggtggtgagga

SEQ ID NO: 175928 - DNA, 17 bp, synthetic construct
  source 1..17: mol_type = other DNA
gtctcagggtggtgagg

SEQ ID NO: 175929 - DNA, 17 bp, synthetic construct
  source 1..17: mol_type = other DNA
ggtctcagggtggtgag

SEQ ID NO: 175930 - DNA, 17 bp, synthetic construct
  source 1..17: mol_type = other DNA
gggtctcagggtggtga

SEQ ID NO: 175931 - DNA, 17 bp, synthetic construct
  source 1..17: mol_type = other DNA
tgggtctcagggtggtg

SEQ ID NO: 175932 - DNA, 17 bp, synthetic construct
  source 1..17: mol_type = other DNA
gtgggtctcagggtggt

SEQ ID NO: 175933 - DNA, 17 bp, synthetic construct
  source 1..17: mol_type = other DNA
agtgggtctcagggtgg

SEQ ID NO: 175934 - DNA, 17 bp, synthetic construct
  source 1..17: mol_type = other DNA
cagtgggtctcagggtg

SEQ ID NO: 175935 - DNA, 17 bp, synthetic construct
  source 1..17: mol_type = other DNA
ccagtgggtctcagggt

SEQ ID NO: 175936 - DNA, 17 bp, synthetic construct
  source 1..17: mol_type = other DNA
gccagtgggtctcaggg

SEQ ID NO: 175937 - DNA, 17 bp, synthetic construct
  source 1..17: mol_type = other DNA
agccagtgggtctcagg

SEQ ID NO: 175938 - DNA, 17 bp, synthetic construct
  source 1..17: mol_type = other DNA
aagccagtgggtctcag

SEQ ID NO: 175939 - DNA, 17 bp, synthetic construct
  source 1..17: mol_type = other DNA
gaagccagtgggtctca

SEQ ID NO: 175940 - DNA, 17 bp, synthetic construct
  source 1..17: mol_type = other DNA
ggaagccagtgggtctc

SEQ ID NO: 175941 - DNA, 17 bp, synthetic construct
  source 1..17: mol_type = other DNA
gggaagccagtgggtct

SEQ ID NO: 175942 - DNA, 17 bp, synthetic construct
  source 1..17: mol_type = other DNA
ggggaagccagtgggtc

SEQ ID NO: 175943 - DNA, 17 bp, synthetic construct
  source 1..17: mol_type = other DNA
tggggaagccagtgggt

SEQ ID NO: 175944 - DNA, 17 bp, synthetic construct
  source 1..17: mol_type = other DNA
ctggggaagccagtggg

SEQ ID NO: 175945 - DNA, 17 bp, synthetic construct
  source 1..17: mol_type = other DNA
gctggggaagccagtgg

SEQ ID NO: 175946 - DNA, 17 bp, synthetic construct
  source 1..17: mol_type = other DNA
agctggggaagccagtg

SEQ ID NO: 175947 - DNA, 17 bp, synthetic construct
  source 1..17: mol_type = other DNA
gagctggggaagccagt

SEQ ID NO: 175948 - DNA, 17 bp, synthetic construct
  source 1..17: mol_type = other DNA
ggagctggggaagccag

SEQ ID NO: 175949 - DNA, 17 bp, synthetic construct
  source 1..17: mol_type = other DNA
gggagctggggaagcca

SEQ ID NO: 175950 - DNA, 17 bp, synthetic construct
  source 1..17: mol_type = other DNA
tgggagctggggaagcc

SEQ ID NO: 175951 - DNA, 17 bp, synthetic construct
  source 1..17: mol_type = other DNA
gtgggagctggggaagc

SEQ ID NO: 175952 - DNA, 17 bp, synthetic construct
  source 1..17: mol_type = other DNA
agtgggagctggggaag

SEQ ID NO: 175953 - DNA, 17 bp, synthetic construct
  source 1..17: mol_type = other DNA
aagtgggagctggggaa

SEQ ID NO: 175954 - DNA, 17 bp, synthetic construct
  source 1..17: mol_type = other DNA
gaagtgggagctgggga

SEQ ID NO: 175955 - DNA, 17 bp, synthetic construct
  source 1..17: mol_type = other DNA
agaagtgggagctgggg

SEQ ID NO: 175956 - DNA, 17 bp, synthetic construct
  source 1..17: mol_type = other DNA
gagaagtgggagctggg

SEQ ID NO: 175957 - DNA, 17 bp, synthetic construct
  source 1..17: mol_type = other DNA
agagaagtgggagctgg

SEQ ID NO: 175958 - DNA, 17 bp, synthetic construct
  source 1..17: mol_type = other DNA
tagagaagtgggagctg

SEQ ID NO: 175959 - DNA, 17 bp, synthetic construct
  source 1..17: mol_type = other DNA
gtagagaagtgggagct

SEQ ID NO: 175960 - DNA, 17 bp, synthetic construct
  source 1..17: mol_type = other DNA
agtagagaagtgggagc

SEQ ID NO: 175961 - DNA, 17 bp, synthetic construct
  source 1..17: mol_type = other DNA
gagtagagaagtgggag

SEQ ID NO: 175962 - DNA, 17 bp, synthetic construct
  source 1..17: mol_type = other DNA
ggagtagagaagtggga

SEQ ID NO: 175963 - DNA, 17 bp, synthetic construct
  source 1..17: mol_type = other DNA
gggagtagagaagtggg

SEQ ID NO: 175964 - DNA, 17 bp, synthetic construct
  source 1..17: mol_type = other DNA
agggagtagagaagtgg

SEQ ID NO: 175965 - DNA, 17 bp, synthetic construct
  source 1..17: mol_type = other DNA
cagggagtagagaagtg

SEQ ID NO: 175966 - DNA, 17 bp, synthetic construct
  source 1..17: mol_type = other DNA
gcagggagtagagaagt

SEQ ID NO: 175967 - DNA, 17 bp, synthetic construct
  source 1..17: mol_type = other DNA
agcagggagtagagaag

SEQ ID NO: 175968 - DNA, 17 bp, synthetic construct
  source 1..17: mol_type = other DNA
aagcagggagtagagaa

SEQ ID NO: 175969 - DNA, 17 bp, synthetic construct
  source 1..17: mol_type = other DNA
gaagcagggagtagaga

SEQ ID NO: 175970 - DNA, 17 bp, synthetic construct
  source 1..17: mol_type = other DNA
agaagcagggagtagag

SEQ ID NO: 175971 - DNA, 17 bp, synthetic construct
  source 1..17: mol_type = other DNA
cagaagcagggagtaga

SEQ ID NO: 175972 - DNA, 17 bp, synthetic construct
  source 1..17: mol_type = other DNA
gcagaagcagggagtag

SEQ ID NO: 175973 - DNA, 17 bp, synthetic construct
  source 1..17: mol_type = other DNA
tgcagaagcagggagta

SEQ ID NO: 175974 - DNA, 17 bp, synthetic construct
  source 1..17: mol_type = other DNA
ctgcagaagcagggagt

SEQ ID NO: 175975 - DNA, 17 bp, synthetic construct
  source 1..17: mol_type = other DNA
cctgcagaagcagggag

SEQ ID NO: 175976 - DNA, 17 bp, synthetic construct
  source 1..17: mol_type = other DNA
ccctgcagaagcaggga

SEQ ID NO: 175977 - DNA, 17 bp, synthetic construct
  source 1..17: mol_type = other DNA
gccctgcagaagcaggg

SEQ ID NO: 175978 - DNA, 17 bp, synthetic construct
  source 1..17: mol_type = other DNA
tgccctgcagaagcagg

SEQ ID NO: 175979 - DNA, 17 bp, synthetic construct
  source 1..17: mol_type = other DNA
atgccctgcagaagcag

SEQ ID NO: 175980 - DNA, 17 bp, synthetic construct
  source 1..17: mol_type = other DNA
aatgccctgcagaagca

SEQ ID NO: 175981 - DNA, 17 bp, synthetic construct
  source 1..17: mol_type = other DNA
aaatgccctgcagaagc

SEQ ID NO: 175982 - DNA, 17 bp, synthetic construct
  source 1..17: mol_type = other DNA
caaatgccctgcagaag

SEQ ID NO: 175983 - DNA, 17 bp, synthetic construct
  source 1..17: mol_type = other DNA
ccaaatgccctgcagaa

SEQ ID NO: 175984 - DNA, 17 bp, synthetic construct
  source 1..17: mol_type = other DNA
tccaaatgccctgcaga

SEQ ID NO: 175985 - DNA, 17 bp, synthetic construct
  source 1..17: mol_type = other DNA
gtccaaatgccctgcag

SEQ ID NO: 175986 - DNA, 17 bp, synthetic construct
  source 1..17: mol_type = other DNA
tgtccaaatgccctgca

SEQ ID NO: 175987 - DNA, 17 bp, synthetic construct
  source 1..17: mol_type = other DNA
ctgtccaaatgccctgc

SEQ ID NO: 175988 - DNA, 17 bp, synthetic construct
  source 1..17: mol_type = other DNA
actgtccaaatgccctg

SEQ ID NO: 175989 - DNA, 17 bp, synthetic construct
  source 1..17: mol_type = other DNA
aactgtccaaatgccct

SEQ ID NO: 175990 - DNA, 17 bp, synthetic construct
  source 1..17: mol_type = other DNA
aaactgtccaaatgccc

SEQ ID NO: 175991 - DNA, 17 bp, synthetic construct
  source 1..17: mol_type = other DNA
aaaactgtccaaatgcc

SEQ ID NO: 175992 - DNA, 17 bp, synthetic construct
  source 1..17: mol_type = other DNA
aaaaactgtccaaatgc

SEQ ID NO: 175993 - DNA, 17 bp, synthetic construct
  source 1..17: mol_type = other DNA
gaaaaactgtccaaatg

SEQ ID NO: 175994 - DNA, 17 bp, synthetic construct
  source 1..17: mol_type = other DNA
agaaaaactgtccaaat

SEQ ID NO: 175995 - DNA, 17 bp, synthetic construct
  source 1..17: mol_type = other DNA
gagaaaaactgtccaaa

SEQ ID NO: 175996 - DNA, 17 bp, synthetic construct
  source 1..17: mol_type = other DNA
cgagaaaaactgtccaa

SEQ ID NO: 175997 - DNA, 17 bp, synthetic construct
  source 1..17: mol_type = other DNA
gcgagaaaaactgtcca

SEQ ID NO: 175998 - DNA, 17 bp, synthetic construct
  source 1..17: mol_type = other DNA
ggcgagaaaaactgtcc

SEQ ID NO: 175999 - DNA, 17 bp, synthetic construct
  source 1..17: mol_type = other DNA
gggcgagaaaaactgtc

SEQ ID NO: 176000 - DNA, 17 bp, synthetic construct
  source 1..17: mol_type = other DNA
cgggcgagaaaaactgt

SEQ ID NO: 176001 - DNA, 17 bp, synthetic construct
  source 1..17: mol_type = other DNA
ccgggcgagaaaaactg

SEQ ID NO: 176002 - DNA, 17 bp, synthetic construct
  source 1..17: mol_type = other DNA
accgggcgagaaaaact

SEQ ID NO: 176003 - DNA, 17 bp, synthetic construct
  source 1..17: mol_type = other DNA
caccgggcgagaaaaac

SEQ ID NO: 176004 - DNA, 17 bp, synthetic construct
  source 1..17: mol_type = other DNA
tcaccgggcgagaaaaa

SEQ ID NO: 176005 - DNA, 17 bp, synthetic construct
  source 1..17: mol_type = other DNA
ctcaccgggcgagaaaa

SEQ ID NO: 176006 - DNA, 17 bp, synthetic construct
  source 1..17: mol_type = other DNA
actcaccgggcgagaaa

SEQ ID NO: 176007 - DNA, 17 bp, synthetic construct
  source 1..17: mol_type = other DNA
cactcaccgggcgagaa

SEQ ID NO: 176008 - DNA, 17 bp, synthetic construct
  source 1..17: mol_type = other DNA
gcactcaccgggcgaga

SEQ ID NO: 176009 - DNA, 17 bp, synthetic construct
  source 1..17: mol_type = other DNA
tgcactcaccgggcgag

SEQ ID NO: 176010 - DNA, 17 bp, synthetic construct
  source 1..17: mol_type = other DNA
atgcactcaccgggcga

SEQ ID NO: 176011 - DNA, 17 bp, synthetic construct
  source 1..17: mol_type = other DNA
catgcactcaccgggcg

SEQ ID NO: 176012 - DNA, 17 bp, synthetic construct
  source 1..17: mol_type = other DNA
acatgcactcaccgggc

SEQ ID NO: 176013 - DNA, 17 bp, synthetic construct
  source 1..17: mol_type = other DNA
cacatgcactcaccggg

SEQ ID NO: 176014 - DNA, 17 bp, synthetic construct
  source 1..17: mol_type = other DNA
ccacatgcactcaccgg

SEQ ID NO: 176015 - DNA, 17 bp, synthetic construct
  source 1..17: mol_type = other DNA
tccacatgcactcaccg

SEQ ID NO: 176016 - DNA, 17 bp, synthetic construct
  source 1..17: mol_type = other DNA
atccacatgcactcacc

SEQ ID NO: 176017 - DNA, 17 bp, synthetic construct
  source 1..17: mol_type = other DNA
tatccacatgcactcac

SEQ ID NO: 176018 - DNA, 17 bp, synthetic construct
  source 1..17: mol_type = other DNA
ttatccacatgcactca

SEQ ID NO: 176019 - DNA, 17 bp, synthetic construct
  source 1..17: mol_type = other DNA
gttatccacatgcactc

SEQ ID NO: 176020 - DNA, 17 bp, synthetic construct
  source 1..17: mol_type = other DNA
tgttatccacatgcact

SEQ ID NO: 176021 - DNA, 17 bp, synthetic construct
  source 1..17: mol_type = other DNA
gtgttatccacatgcac

SEQ ID NO: 176022 - DNA, 17 bp, synthetic construct
  source 1..17: mol_type = other DNA
agtgttatccacatgca

SEQ ID NO: 176023 - DNA, 17 bp, synthetic construct
  source 1..17: mol_type = other DNA
cagtgttatccacatgc

SEQ ID NO: 176024 - DNA, 17 bp, synthetic construct
  source 1..17: mol_type = other DNA
gcagtgttatccacatg

SEQ ID NO: 176025 - DNA, 17 bp, synthetic construct
  source 1..17: mol_type = other DNA
agcagtgttatccacat

SEQ ID NO: 176026 - DNA, 17 bp, synthetic construct
  source 1..17: mol_type = other DNA
cagcagtgttatccaca

SEQ ID NO: 176027 - DNA, 17 bp, synthetic construct
  source 1..17: mol_type = other DNA
acagcagtgttatccac

SEQ ID NO: 176028 - DNA, 17 bp, synthetic construct
  source 1..17: mol_type = other DNA
tacagcagtgttatcca

SEQ ID NO: 176029 - DNA, 17 bp, synthetic construct
  source 1..17: mol_type = other DNA
gtacagcagtgttatcc

SEQ ID NO: 176030 - DNA, 17 bp, synthetic construct
  source 1..17: mol_type = other DNA
ggtacagcagtgttatc

SEQ ID NO: 176031 - DNA, 17 bp, synthetic construct
  source 1..17: mol_type = other DNA
gggtacagcagtgttat

SEQ ID NO: 176032 - DNA, 17 bp, synthetic construct
  source 1..17: mol_type = other DNA
agggtacagcagtgtta

SEQ ID NO: 176033 - DNA, 17 bp, synthetic construct
  source 1..17: mol_type = other DNA
aagggtacagcagtgtt

SEQ ID NO: 176034 - DNA, 17 bp, synthetic construct
  source 1..17: mol_type = other DNA
aaagggtacagcagtgt

SEQ ID NO: 176035 - DNA, 17 bp, synthetic construct
  source 1..17: mol_type = other DNA
gaaagggtacagcagtg

SEQ ID NO: 176036 - DNA, 17 bp, synthetic construct
  source 1..17: mol_type = other DNA
ggaaagggtacagcagt

SEQ ID NO: 176037 - DNA, 17 bp, synthetic construct
  source 1..17: mol_type = other DNA
gggaaagggtacagcag

SEQ ID NO: 176038 - DNA, 17 bp, synthetic construct
  source 1..17: mol_type = other DNA
ggggaaagggtacagca

SEQ ID NO: 176039 - DNA, 17 bp, synthetic construct
  source 1..17: mol_type = other DNA
tggggaaagggtacagc

SEQ ID NO: 176040 - DNA, 17 bp, synthetic construct
  source 1..17: mol_type = other DNA
gtggggaaagggtacag

SEQ ID NO: 176041 - DNA, 17 bp, synthetic construct
  source 1..17: mol_type = other DNA
tgtggggaaagggtaca

SEQ ID NO: 176042 - DNA, 17 bp, synthetic construct
  source 1..17: mol_type = other DNA
atgtggggaaagggtac

SEQ ID NO: 176043 - DNA, 17 bp, synthetic construct
  source 1..17: mol_type = other DNA
catgtggggaaagggta

SEQ ID NO: 176044 - DNA, 17 bp, synthetic construct
  source 1..17: mol_type = other DNA
gcatgtggggaaagggt

SEQ ID NO: 176045 - DNA, 17 bp, synthetic construct
  source 1..17: mol_type = other DNA
agcatgtggggaaaggg

SEQ ID NO: 176046 - DNA, 17 bp, synthetic construct
  source 1..17: mol_type = other DNA
tagcatgtggggaaagg

SEQ ID NO: 176047 - DNA, 17 bp, synthetic construct
  source 1..17: mol_type = other DNA
atagcatgtggggaaag

SEQ ID NO: 176048 - DNA, 17 bp, synthetic construct
  source 1..17: mol_type = other DNA
catagcatgtggggaaa

SEQ ID NO: 176049 - DNA, 17 bp, synthetic construct
  source 1..17: mol_type = other DNA
gcatagcatgtggggaa

SEQ ID NO: 176050 - DNA, 17 bp, synthetic construct
  source 1..17: mol_type = other DNA
ggcatagcatgtgggga

SEQ ID NO: 176051 - DNA, 17 bp, synthetic construct
  source 1..17: mol_type = other DNA
tggcatagcatgtgggg

SEQ ID NO: 176052 - DNA, 17 bp, synthetic construct
  source 1..17: mol_type = other DNA
ttggcatagcatgtggg

SEQ ID NO: 176053 - DNA, 17 bp, synthetic construct
  source 1..17: mol_type = other DNA
gttggcatagcatgtgg

SEQ ID NO: 176054 - DNA, 17 bp, synthetic construct
  source 1..17: mol_type = other DNA
ggttggcatagcatgtg

SEQ ID NO: 176055 - DNA, 17 bp, synthetic construct
  source 1..17: mol_type = other DNA
aggttggcatagcatgt

SEQ ID NO: 176056 - DNA, 17 bp, synthetic construct
  source 1..17: mol_type = other DNA
caggttggcatagcatg

SEQ ID NO: 176057 - DNA, 17 bp, synthetic construct
  source 1..17: mol_type = other DNA
ccaggttggcatagcat

SEQ ID NO: 176058 - DNA, 17 bp, synthetic construct
  source 1..17: mol_type = other DNA
cccaggttggcatagca

SEQ ID NO: 176059 - DNA, 17 bp, synthetic construct
  source 1..17: mol_type = other DNA
acccaggttggcatagc

SEQ ID NO: 176060 - DNA, 17 bp, synthetic construct
  source 1..17: mol_type = other DNA
gacccaggttggcatag

SEQ ID NO: 176061 - DNA, 17 bp, synthetic construct
  source 1..17: mol_type = other DNA
agacccaggttggcata

SEQ ID NO: 176062 - DNA, 17 bp, synthetic construct
  source 1..17: mol_type = other DNA
cagacccaggttggcat

SEQ ID NO: 176063 - DNA, 17 bp, synthetic construct
  source 1..17: mol_type = other DNA
gcagacccaggttggca

SEQ ID NO: 176064 - DNA, 17 bp, synthetic construct
  source 1..17: mol_type = other DNA
ggcagacccaggttggc

SEQ ID NO: 176065 - DNA, 17 bp, synthetic construct
  source 1..17: mol_type = other DNA
aggcagacccaggttgg

SEQ ID NO: 176066 - DNA, 17 bp, synthetic construct
  source 1..17: mol_type = other DNA
caggcagacccaggttg

SEQ ID NO: 176067 - DNA, 17 bp, synthetic construct
  source 1..17: mol_type = other DNA
acaggcagacccaggtt

SEQ ID NO: 176068 - DNA, 17 bp, synthetic construct
  source 1..17: mol_type = other DNA
gacaggcagacccaggt

SEQ ID NO: 176069 - DNA, 17 bp, synthetic construct
  source 1..17: mol_type = other DNA
ggacaggcagacccagg

SEQ ID NO: 176070 - DNA, 17 bp, synthetic construct
  source 1..17: mol_type = other DNA
aggacaggcagacccag

SEQ ID NO: 176071 - DNA, 17 bp, synthetic construct
  source 1..17: mol_type = other DNA
caggacaggcagaccca

SEQ ID NO: 176072 - DNA, 17 bp, synthetic construct
  source 1..17: mol_type = other DNA
ccaggacaggcagaccc

SEQ ID NO: 176073 - DNA, 17 bp, synthetic construct
  source 1..17: mol_type = other DNA
cccaggacaggcagacc

SEQ ID NO: 176074 - DNA, 17 bp, synthetic construct
  source 1..17: mol_type = other DNA
tcccaggacaggcagac

SEQ ID NO: 176075 - DNA, 17 bp, synthetic construct
  source 1..17: mol_type = other DNA
ctcccaggacaggcaga

SEQ ID NO: 176076 - DNA, 17 bp, synthetic construct
  source 1..17: mol_type = other DNA
gctcccaggacaggcag

SEQ ID NO: 176077 - DNA, 17 bp, synthetic construct
  source 1..17: mol_type = other DNA
ggctcccaggacaggca

SEQ ID NO: 176078 - DNA, 17 bp, synthetic construct
  source 1..17: mol_type = other DNA
tggctcccaggacaggc

SEQ ID NO: 176079 - DNA, 17 bp, synthetic construct
  source 1..17: mol_type = other DNA
ctggctcccaggacagg

SEQ ID NO: 176080 - DNA, 17 bp, synthetic construct
  source 1..17: mol_type = other DNA
actggctcccaggacag

SEQ ID NO: 176081 - DNA, 17 bp, synthetic construct
  source 1..17: mol_type = other DNA
cactggctcccaggaca

SEQ ID NO: 176082 - DNA, 17 bp, synthetic construct
  source 1..17: mol_type = other DNA
ccactggctcccaggac

SEQ ID NO: 176083 - DNA, 17 bp, synthetic construct
  source 1..17: mol_type = other DNA
gccactggctcccagga

SEQ ID NO: 176084 - DNA, 17 bp, synthetic construct
  source 1..17: mol_type = other DNA
agccactggctcccagg

SEQ ID NO: 176085 - DNA, 17 bp, synthetic construct
  source 1..17: mol_type = other DNA
aagccactggctcccag

SEQ ID NO: 176086 - DNA, 17 bp, synthetic construct
  source 1..17: mol_type = other DNA
aaagccactggctccca

SEQ ID NO: 176087 - DNA, 17 bp, synthetic construct
  source 1..17: mol_type = other DNA
gaaagccactggctccc

SEQ ID NO: 176088 - DNA, 17 bp, synthetic construct
  source 1..17: mol_type = other DNA
agaaagccactggctcc

SEQ ID NO: 176089 - DNA, 17 bp, synthetic construct
  source 1..17: mol_type = other DNA
gagaaagccactggctc

SEQ ID NO: 176090 - DNA, 17 bp, synthetic construct
  source 1..17: mol_type = other DNA
ggagaaagccactggct

SEQ ID NO: 176091 - DNA, 17 bp, synthetic construct
  source 1..17: mol_type = other DNA
gggagaaagccactggc

SEQ ID NO: 176092 - DNA, 17 bp, synthetic construct
  source 1..17: mol_type = other DNA
agggagaaagccactgg

SEQ ID NO: 176093 - DNA, 17 bp, synthetic construct
  source 1..17: mol_type = other DNA
cagggagaaagccactg

SEQ ID NO: 176094 - DNA, 17 bp, synthetic construct
  source 1..17: mol_type = other DNA
gcagggagaaagccact

SEQ ID NO: 176095 - DNA, 17 bp, synthetic construct
  source 1..17: mol_type = other DNA
agcagggagaaagccac

SEQ ID NO: 176096 - DNA, 17 bp, synthetic construct
  source 1..17: mol_type = other DNA
cagcagggagaaagcca

SEQ ID NO: 176097 - DNA, 17 bp, synthetic construct
  source 1..17: mol_type = other DNA
ccagcagggagaaagcc

SEQ ID NO: 176098 - DNA, 17 bp, synthetic construct
  source 1..17: mol_type = other DNA
accagcagggagaaagc

SEQ ID NO: 176099 - DNA, 17 bp, synthetic construct
  source 1..17: mol_type = other DNA
gaccagcagggagaaag

SEQ ID NO: 176100 - DNA, 17 bp, synthetic construct
  source 1..17: mol_type = other DNA
tgaccagcagggagaaa

SEQ ID NO: 176101 - DNA, 17 bp, synthetic construct
  source 1..17: mol_type = other DNA
atgaccagcagggagaa

SEQ ID NO: 176102 - DNA, 17 bp, synthetic construct
  source 1..17: mol_type = other DNA
catgaccagcagggaga

SEQ ID NO: 176103 - DNA, 17 bp, synthetic construct
  source 1..17: mol_type = other DNA
acatgaccagcagggag

SEQ ID NO: 176104 - DNA, 17 bp, synthetic construct
  source 1..17: mol_type = other DNA
aacatgaccagcaggga

SEQ ID NO: 176105 - DNA, 17 bp, synthetic construct
  source 1..17: mol_type = other DNA
aaacatgaccagcaggg

SEQ ID NO: 176106 - DNA, 17 bp, synthetic construct
  source 1..17: mol_type = other DNA
caaacatgaccagcagg

SEQ ID NO: 176107 - DNA, 17 bp, synthetic construct
  source 1..17: mol_type = other DNA
acaaacatgaccagcag

SEQ ID NO: 176108 - DNA, 17 bp, synthetic construct
  source 1..17: mol_type = other DNA
aacaaacatgaccagca

SEQ ID NO: 176109 - DNA, 17 bp, synthetic construct
  source 1..17: mol_type = other DNA
gaacaaacatgaccagc

SEQ ID NO: 176110 - DNA, 17 bp, synthetic construct
  source 1..17: mol_type = other DNA
ggaacaaacatgaccag

SEQ ID NO: 176111 - DNA, 17 bp, synthetic construct
  source 1..17: mol_type = other DNA
gggaacaaacatgacca

SEQ ID NO: 176112 - DNA, 17 bp, synthetic construct
  source 1..17: mol_type = other DNA
ggggaacaaacatgacc

SEQ ID NO: 176113 - DNA, 17 bp, synthetic construct
  source 1..17: mol_type = other DNA
tggggaacaaacatgac

SEQ ID NO: 176114 - DNA, 17 bp, synthetic construct
  source 1..17: mol_type = other DNA
gtggggaacaaacatga

SEQ ID NO: 176115 - DNA, 17 bp, synthetic construct
  source 1..17: mol_type = other DNA
agtggggaacaaacatg

SEQ ID NO: 176116 - DNA, 17 bp, synthetic construct
  source 1..17: mol_type = other DNA
cagtggggaacaaacat

SEQ ID NO: 176117 - DNA, 17 bp, synthetic construct
  source 1..17: mol_type = other DNA
ccagtggggaacaaaca

SEQ ID NO: 176118 - DNA, 17 bp, synthetic construct
  source 1..17: mol_type = other DNA
gccagtggggaacaaac

SEQ ID NO: 176119 - DNA, 17 bp, synthetic construct
  source 1..17: mol_type = other DNA
ggccagtggggaacaaa

SEQ ID NO: 176120 - DNA, 17 bp, synthetic construct
  source 1..17: mol_type = other DNA
aggccagtggggaacaa

SEQ ID NO: 176121 - DNA, 17 bp, synthetic construct
  source 1..17: mol_type = other DNA
gaggccagtggggaaca

SEQ ID NO: 176122 - DNA, 17 bp, synthetic construct
  source 1..17: mol_type = other DNA
tgaggccagtggggaac

SEQ ID NO: 176123 - DNA, 17 bp, synthetic construct
  source 1..17: mol_type = other DNA
gtgaggccagtggggaa

SEQ ID NO: 176124 - DNA, 17 bp, synthetic construct
  source 1..17: mol_type = other DNA
agtgaggccagtgggga

SEQ ID NO: 176125 - DNA, 17 bp, synthetic construct
  source 1..17: mol_type = other DNA
aagtgaggccagtgggg

SEQ ID NO: 176126 - DNA, 17 bp, synthetic construct
  source 1..17: mol_type = other DNA
caagtgaggccagtggg

SEQ ID NO: 176127 - DNA, 17 bp, synthetic construct
  source 1..17: mol_type = other DNA
ccaagtgaggccagtgg

SEQ ID NO: 176128 - DNA, 17 bp, synthetic construct
  source 1..17: mol_type = other DNA
gccaagtgaggccagtg

SEQ ID NO: 176129 - DNA, 17 bp, synthetic construct
  source 1..17: mol_type = other DNA
ggccaagtgaggccagt

SEQ ID NO: 176130 - DNA, 17 bp, synthetic construct
  source 1..17: mol_type = other DNA
gggccaagtgaggccag

SEQ ID NO: 176131 - DNA, 17 bp, synthetic construct
  source 1..17: mol_type = other DNA
ggggccaagtgaggcca

SEQ ID NO: 176132 - DNA, 17 bp, synthetic construct
  source 1..17: mol_type = other DNA
aggggccaagtgaggcc

SEQ ID NO: 176133 - DNA, 17 bp, synthetic construct
  source 1..17: mol_type = other DNA
gaggggccaagtgaggc

SEQ ID NO: 176134 - DNA, 17 bp, synthetic construct
  source 1..17: mol_type = other DNA
ggaggggccaagtgagg

SEQ ID NO: 176135 - DNA, 17 bp, synthetic construct
  source 1..17: mol_type = other DNA
gggaggggccaagtgag

SEQ ID NO: 176136 - DNA, 17 bp, synthetic construct
  source 1..17: mol_type = other DNA
cgggaggggccaagtga

SEQ ID NO: 176137 - DNA, 17 bp, synthetic construct
  source 1..17: mol_type = other DNA
ccgggaggggccaagtg

SEQ ID NO: 176138 - DNA, 17 bp, synthetic construct
  source 1..17: mol_type = other DNA
gccgggaggggccaagt

SEQ ID NO: 176139 - DNA, 17 bp, synthetic construct
  source 1..17: mol_type = other DNA
ggccgggaggggccaag

SEQ ID NO: 176140 - DNA, 17 bp, synthetic construct
  source 1..17: mol_type = other DNA
tggccgggaggggccaa

SEQ ID NO: 176141 - DNA, 17 bp, synthetic construct
  source 1..17: mol_type = other DNA
gtggccgggaggggcca

SEQ ID NO: 176142 - DNA, 17 bp, synthetic construct
  source 1..17: mol_type = other DNA
tgtggccgggaggggcc

SEQ ID NO: 176143 - DNA, 17 bp, synthetic construct
  source 1..17: mol_type = other DNA
gtgtggccgggaggggc

SEQ ID NO: 176144 - DNA, 17 bp, synthetic construct
  source 1..17: mol_type = other DNA
agtgtggccgggagggg

SEQ ID NO: 176145 - DNA, 17 bp, synthetic construct
  source 1..17: mol_type = other DNA
cagtgtggccgggaggg

SEQ ID NO: 176146 - DNA, 17 bp, synthetic construct
  source 1..17: mol_type = other DNA
ccagtgtggccgggagg

SEQ ID NO: 176147 - DNA, 17 bp, synthetic construct
  source 1..17: mol_type = other DNA
cccagtgtggccgggag

SEQ ID NO: 176148 - DNA, 17 bp, synthetic construct
  source 1..17: mol_type = other DNA
acccagtgtggccggga

SEQ ID NO: 176149 - DNA, 17 bp, synthetic construct
  source 1..17: mol_type = other DNA
gacccagtgtggccggg

SEQ ID NO: 176150 - DNA, 17 bp, synthetic construct
  source 1..17: mol_type = other DNA
ggacccagtgtggccgg

SEQ ID NO: 176151 - DNA, 17 bp, synthetic construct
  source 1..17: mol_type = other DNA
gggacccagtgtggccg

SEQ ID NO: 176152 - DNA, 17 bp, synthetic construct
  source 1..17: mol_type = other DNA
ggggacccagtgtggcc

SEQ ID NO: 176153 - DNA, 17 bp, synthetic construct
  source 1..17: mol_type = other DNA
tggggacccagtgtggc

SEQ ID NO: 176154 - DNA, 17 bp, synthetic construct
  source 1..17: mol_type = other DNA
gtggggacccagtgtgg

SEQ ID NO: 176155 - DNA, 17 bp, synthetic construct
  source 1..17: mol_type = other DNA
agtggggacccagtgtg

SEQ ID NO: 176156 - DNA, 17 bp, synthetic construct
  source 1..17: mol_type = other DNA
cagtggggacccagtgt

SEQ ID NO: 176157 - DNA, 17 bp, synthetic construct
  source 1..17: mol_type = other DNA
ccagtggggacccagtg

SEQ ID NO: 176158 - DNA, 17 bp, synthetic construct
  source 1..17: mol_type = other DNA
gccagtggggacccagt

SEQ ID NO: 176159 - DNA, 17 bp, synthetic construct
  source 1..17: mol_type = other DNA
ggccagtggggacccag

SEQ ID NO: 176160 - DNA, 17 bp, synthetic construct
  source 1..17: mol_type = other DNA
tggccagtggggaccca

SEQ ID NO: 176161 - DNA, 17 bp, synthetic construct
  source 1..17: mol_type = other DNA
gtggccagtggggaccc

SEQ ID NO: 176162 - DNA, 17 bp, synthetic construct
  source 1..17: mol_type = other DNA
tgtggccagtggggacc

SEQ ID NO: 176163 - DNA, 17 bp, synthetic construct
  source 1..17: mol_type = other DNA
gtgtggccagtggggac

SEQ ID NO: 176164 - DNA, 17 bp, synthetic construct
  source 1..17: mol_type = other DNA
agtgtggccagtgggga

SEQ ID NO: 176165 - DNA, 17 bp, synthetic construct
  source 1..17: mol_type = other DNA
cagtgtggccagtgggg

SEQ ID NO: 176166 - DNA, 17 bp, synthetic construct
  source 1..17: mol_type = other DNA
ccagtgtggccagtggg

SEQ ID NO: 176167 - DNA, 17 bp, synthetic construct
  source 1..17: mol_type = other DNA
cccagtgtggccagtgg

SEQ ID NO: 176168 - DNA, 17 bp, synthetic construct
  source 1..17: mol_type = other DNA
acccagtgtggccagtg

SEQ ID NO: 176169 - DNA, 17 bp, synthetic construct
  source 1..17: mol_type = other DNA
gacccagtgtggccagt

SEQ ID NO: 176170 - DNA, 17 bp, synthetic construct
  source 1..17: mol_type = other DNA
agacccagtgtggccag

SEQ ID NO: 176171 - DNA, 17 bp, synthetic construct
  source 1..17: mol_type = other DNA
gagacccagtgtggcca

SEQ ID NO: 176172 - DNA, 17 bp, synthetic construct
  source 1..17: mol_type = other DNA
ggagacccagtgtggcc

SEQ ID NO: 176173 - DNA, 17 bp, synthetic construct
  source 1..17: mol_type = other DNA
aggagacccagtgtggc

SEQ ID NO: 176174 - DNA, 17 bp, synthetic construct
  source 1..17: mol_type = other DNA
gaggagacccagtgtgg

SEQ ID NO: 176175 - DNA, 17 bp, synthetic construct
  source 1..17: mol_type = other DNA
agaggagacccagtgtg

SEQ ID NO: 176176 - DNA, 17 bp, synthetic construct
  source 1..17: mol_type = other DNA
cagaggagacccagtgt

SEQ ID NO: 176177 - DNA, 17 bp, synthetic construct
  source 1..17: mol_type = other DNA
ccagaggagacccagtg

SEQ ID NO: 176178 - DNA, 17 bp, synthetic construct
  source 1..17: mol_type = other DNA
gccagaggagacccagt

SEQ ID NO: 176179 - DNA, 17 bp, synthetic construct
  source 1..17: mol_type = other DNA
ggccagaggagacccag

SEQ ID NO: 176180 - DNA, 17 bp, synthetic construct
  source 1..17: mol_type = other DNA
tggccagaggagaccca

SEQ ID NO: 176181 - DNA, 17 bp, synthetic construct
  source 1..17: mol_type = other DNA
gtggccagaggagaccc

SEQ ID NO: 176182 - DNA, 17 bp, synthetic construct
  source 1..17: mol_type = other DNA
tgtggccagaggagacc

SEQ ID NO: 176183 - DNA, 17 bp, synthetic construct
  source 1..17: mol_type = other DNA
ttgtggccagaggagac

SEQ ID NO: 176184 - DNA, 17 bp, synthetic construct
  source 1..17: mol_type = other DNA
attgtggccagaggaga

SEQ ID NO: 176185 - DNA, 17 bp, synthetic construct
  source 1..17: mol_type = other DNA
gattgtggccagaggag

SEQ ID NO: 176186 - DNA, 17 bp, synthetic construct
  source 1..17: mol_type = other DNA
ggattgtggccagagga

SEQ ID NO: 176187 - DNA, 17 bp, synthetic construct
  source 1..17: mol_type = other DNA
cggattgtggccagagg

SEQ ID NO: 176188 - DNA, 17 bp, synthetic construct
  source 1..17: mol_type = other DNA
acggattgtggccagag

SEQ ID NO: 176189 - DNA, 17 bp, synthetic construct
  source 1..17: mol_type = other DNA
gacggattgtggccaga

SEQ ID NO: 176190 - DNA, 17 bp, synthetic construct
  source 1..17: mol_type = other DNA
ggacggattgtggccag

SEQ ID NO: 176191 - DNA, 17 bp, synthetic construct
  source 1..17: mol_type = other DNA
cggacggattgtggcca

SEQ ID NO: 176192 - DNA, 17 bp, synthetic construct
  source 1..17: mol_type = other DNA
gcggacggattgtggcc

SEQ ID NO: 176193 - DNA, 17 bp, synthetic construct
  source 1..17: mol_type = other DNA
tgcggacggattgtggc

SEQ ID NO: 176194 - DNA, 17 bp, synthetic construct
  source 1..17: mol_type = other DNA
gtgcggacggattgtgg

SEQ ID NO: 176195 - DNA, 17 bp, synthetic construct
  source 1..17: mol_type = other DNA
agtgcggacggattgtg

SEQ ID NO: 176196 - DNA, 17 bp, synthetic construct
  source 1..17: mol_type = other DNA
cagtgcggacggattgt

SEQ ID NO: 176197 - DNA, 17 bp, synthetic construct
  source 1..17: mol_type = other DNA
ccagtgcggacggattg

SEQ ID NO: 176198 - DNA, 17 bp, synthetic construct
  source 1..17: mol_type = other DNA
gccagtgcggacggatt

SEQ ID NO: 176199 - DNA, 17 bp, synthetic construct
  source 1..17: mol_type = other DNA
ggccagtgcggacggat

SEQ ID NO: 176200 - DNA, 17 bp, synthetic construct
  source 1..17: mol_type = other DNA
tggccagtgcggacgga

SEQ ID NO: 176201 - DNA, 17 bp, synthetic construct
  source 1..17: mol_type = other DNA
gtggccagtgcggacgg

SEQ ID NO: 176202 - DNA, 17 bp, synthetic construct
  source 1..17: mol_type = other DNA
tgtggccagtgcggacg

SEQ ID NO: 176203 - DNA, 17 bp, synthetic construct
  source 1..17: mol_type = other DNA
ttgtggccagtgcggac

SEQ ID NO: 176204 - DNA, 17 bp, synthetic construct
  source 1..17: mol_type = other DNA
attgtggccagtgcgga

SEQ ID NO: 176205 - DNA, 17 bp, synthetic construct
  source 1..17: mol_type = other DNA
gattgtggccagtgcgg

SEQ ID NO: 176206 - DNA, 17 bp, synthetic construct
  source 1..17: mol_type = other DNA
tgattgtggccagtgcg

SEQ ID NO: 176207 - DNA, 17 bp, synthetic construct
  source 1..17: mol_type = other DNA
ctgattgtggccagtgc

SEQ ID NO: 176208 - DNA, 17 bp, synthetic construct
  source 1..17: mol_type = other DNA
actgattgtggccagtg

SEQ ID NO: 176209 - DNA, 17 bp, synthetic construct
  source 1..17: mol_type = other DNA
gactgattgtggccagt

SEQ ID NO: 176210 - DNA, 17 bp, synthetic construct
  source 1..17: mol_type = other DNA
ggactgattgtggccag

SEQ ID NO: 176211 - DNA, 17 bp, synthetic construct
  source 1..17: mol_type = other DNA
gggactgattgtggcca

SEQ ID NO: 176212 - DNA, 17 bp, synthetic construct
  source 1..17: mol_type = other DNA
ggggactgattgtggcc

SEQ ID NO: 176213 - DNA, 17 bp, synthetic construct
  source 1..17: mol_type = other DNA
tggggactgattgtggc

SEQ ID NO: 176214 - DNA, 17 bp, synthetic construct
  source 1..17: mol_type = other DNA
gtggggactgattgtgg

SEQ ID NO: 176215 - DNA, 17 bp, synthetic construct
  source 1..17: mol_type = other DNA
agtggggactgattgtg

SEQ ID NO: 176216 - DNA, 17 bp, synthetic construct
  source 1..17: mol_type = other DNA
cagtggggactgattgt

SEQ ID NO: 176217 - DNA, 17 bp, synthetic construct
  source 1..17: mol_type = other DNA
ccagtggggactgattg

SEQ ID NO: 176218 - DNA, 17 bp, synthetic construct
  source 1..17: mol_type = other DNA
gccagtggggactgatt

SEQ ID NO: 176219 - DNA, 17 bp, synthetic construct
  source 1..17: mol_type = other DNA
ggccagtggggactgat

SEQ ID NO: 176220 - DNA, 17 bp, synthetic construct
  source 1..17: mol_type = other DNA
tggccagtggggactga

SEQ ID NO: 176221 - DNA, 17 bp, synthetic construct
  source 1..17: mol_type = other DNA
gtggccagtggggactg

SEQ ID NO: 176222 - DNA, 17 bp, synthetic construct
  source 1..17: mol_type = other DNA
tgtggccagtggggact

SEQ ID NO: 176223 - DNA, 17 bp, synthetic construct
  source 1..17: mol_type = other DNA
gtgtggccagtggggac

SEQ ID NO: 176224 - DNA, 17 bp, synthetic construct
  source 1..17: mol_type = other DNA
agtgtggccagtgggga

SEQ ID NO: 176225 - DNA, 17 bp, synthetic construct
  source 1..17: mol_type = other DNA
aagtgtggccagtgggg

SEQ ID NO: 176226 - DNA, 17 bp, synthetic construct
  source 1..17: mol_type = other DNA
caagtgtggccagtggg

SEQ ID NO: 176227 - DNA, 17 bp, synthetic construct
  source 1..17: mol_type = other DNA
ccaagtgtggccagtgg

SEQ ID NO: 176228 - DNA, 17 bp, synthetic construct
  source 1..17: mol_type = other DNA
accaagtgtggccagtg

SEQ ID NO: 176229 - DNA, 17 bp, synthetic construct
  source 1..17: mol_type = other DNA
gaccaagtgtggccagt

SEQ ID NO: 176230 - DNA, 17 bp, synthetic construct
  source 1..17: mol_type = other DNA
ggaccaagtgtggccag

SEQ ID NO: 176231 - DNA, 17 bp, synthetic construct
  source 1..17: mol_type = other DNA
gggaccaagtgtggcca

SEQ ID NO: 176232 - DNA, 17 bp, synthetic construct
  source 1..17: mol_type = other DNA
ggggaccaagtgtggcc

SEQ ID NO: 176233 - DNA, 17 bp, synthetic construct
  source 1..17: mol_type = other DNA
tggggaccaagtgtggc

SEQ ID NO: 176234 - DNA, 17 bp, synthetic construct
  source 1..17: mol_type = other DNA
gtggggaccaagtgtgg

SEQ ID NO: 176235 - DNA, 17 bp, synthetic construct
  source 1..17: mol_type = other DNA
agtggggaccaagtgtg

SEQ ID NO: 176236 - DNA, 17 bp, synthetic construct
  source 1..17: mol_type = other DNA
cagtggggaccaagtgt

SEQ ID NO: 176237 - DNA, 17 bp, synthetic construct
  source 1..17: mol_type = other DNA
ccagtggggaccaagtg

SEQ ID NO: 176238 - DNA, 17 bp, synthetic construct
  source 1..17: mol_type = other DNA
gccagtggggaccaagt

SEQ ID NO: 176239 - DNA, 17 bp, synthetic construct
  source 1..17: mol_type = other DNA
ggccagtggggaccaag

SEQ ID NO: 176240 - DNA, 17 bp, synthetic construct
  source 1..17: mol_type = other DNA
tggccagtggggaccaa

SEQ ID NO: 176241 - DNA, 17 bp, synthetic construct
  source 1..17: mol_type = other DNA
gtggccagtggggacca

SEQ ID NO: 176242 - DNA, 17 bp, synthetic construct
  source 1..17: mol_type = other DNA
tgtggccagtggggacc

SEQ ID NO: 176243 - DNA, 17 bp, synthetic construct
  source 1..17: mol_type = other DNA
ttgtggccagtggggac

SEQ ID NO: 176244 - DNA, 17 bp, synthetic construct
  source 1..17: mol_type = other DNA
attgtggccagtgggga

SEQ ID NO: 176245 - DNA, 17 bp, synthetic construct
  source 1..17: mol_type = other DNA
cattgtggccagtgggg

SEQ ID NO: 176246 - DNA, 17 bp, synthetic construct
  source 1..17: mol_type = other DNA
gcattgtggccagtggg

SEQ ID NO: 176247 - DNA, 17 bp, synthetic construct
  source 1..17: mol_type = other DNA
cgcattgtggccagtgg

SEQ ID NO: 176248 - DNA, 17 bp, synthetic construct
  source 1..17: mol_type = other DNA
acgcattgtggccagtg

SEQ ID NO: 176249 - DNA, 17 bp, synthetic construct
  source 1..17: mol_type = other DNA
gacgcattgtggccagt

SEQ ID NO: 176250 - DNA, 17 bp, synthetic construct
  source 1..17: mol_type = other DNA
ggacgcattgtggccag

SEQ ID NO: 176251 - DNA, 17 bp, synthetic construct
  source 1..17: mol_type = other DNA
gggacgcattgtggcca

SEQ ID NO: 176252 - DNA, 17 bp, synthetic construct
  source 1..17: mol_type = other DNA
ggggacgcattgtggcc

SEQ ID NO: 176253 - DNA, 17 bp, synthetic construct
  source 1..17: mol_type = other DNA
gggggacgcattgtggc

SEQ ID NO: 176254 - DNA, 17 bp, synthetic construct
  source 1..17: mol_type = other DNA
agggggacgcattgtgg

SEQ ID NO: 176255 - DNA, 17 bp, synthetic construct
  source 1..17: mol_type = other DNA
aagggggacgcattgtg

SEQ ID NO: 176256 - DNA, 17 bp, synthetic construct
  source 1..17: mol_type = other DNA
caagggggacgcattgt

SEQ ID NO: 176257 - DNA, 17 bp, synthetic construct
  source 1..17: mol_type = other DNA
ccaagggggacgcattg

SEQ ID NO: 176258 - DNA, 17 bp, synthetic construct
  source 1..17: mol_type = other DNA
gccaagggggacgcatt

SEQ ID NO: 176259 - DNA, 17 bp, synthetic construct
  source 1..17: mol_type = other DNA
ggccaagggggacgcat

SEQ ID NO: 176260 - DNA, 17 bp, synthetic construct
  source 1..17: mol_type = other DNA
tggccaagggggacgca

SEQ ID NO: 176261 - DNA, 17 bp, synthetic construct
  source 1..17: mol_type = other DNA
gtggccaagggggacgc

SEQ ID NO: 176262 - DNA, 17 bp, synthetic construct
  source 1..17: mol_type = other DNA
tgtggccaagggggacg

SEQ ID NO: 176263 - DNA, 17 bp, synthetic construct
  source 1..17: mol_type = other DNA
atgtggccaagggggac

SEQ ID NO: 176264 - DNA, 17 bp, synthetic construct
  source 1..17: mol_type = other DNA
aatgtggccaaggggga

SEQ ID NO: 176265 - DNA, 17 bp, synthetic construct
  source 1..17: mol_type = other DNA
gaatgtggccaaggggg

SEQ ID NO: 176266 - DNA, 17 bp, synthetic construct
  source 1..17: mol_type = other DNA
cgaatgtggccaagggg

SEQ ID NO: 176267 - DNA, 17 bp, synthetic construct
  source 1..17: mol_type = other DNA
ccgaatgtggccaaggg

SEQ ID NO: 176268 - DNA, 17 bp, synthetic construct
  source 1..17: mol_type = other DNA
accgaatgtggccaagg

SEQ ID NO: 176269 - DNA, 17 bp, synthetic construct
  source 1..17: mol_type = other DNA
gaccgaatgtggccaag

SEQ ID NO: 176270 - DNA, 17 bp, synthetic construct
  source 1..17: mol_type = other DNA
agaccgaatgtggccaa

SEQ ID NO: 176271 - DNA, 17 bp, synthetic construct
  source 1..17: mol_type = other DNA
gagaccgaatgtggcca

SEQ ID NO: 176272 - DNA, 17 bp, synthetic construct
  source 1..17: mol_type = other DNA
ggagaccgaatgtggcc

SEQ ID NO: 176273 - DNA, 17 bp, synthetic construct
  source 1..17: mol_type = other DNA
gggagaccgaatgtggc

SEQ ID NO: 176274 - DNA, 17 bp, synthetic construct
  source 1..17: mol_type = other DNA
ggggagaccgaatgtgg

SEQ ID NO: 176275 - DNA, 17 bp, synthetic construct
  source 1..17: mol_type = other DNA
aggggagaccgaatgtg

SEQ ID NO: 176276 - DNA, 17 bp, synthetic construct
  source 1..17: mol_type = other DNA
caggggagaccgaatgt

SEQ ID NO: 176277 - DNA, 17 bp, synthetic construct
  source 1..17: mol_type = other DNA
ccaggggagaccgaatg

SEQ ID NO: 176278 - DNA, 17 bp, synthetic construct
  source 1..17: mol_type = other DNA
tccaggggagaccgaat

SEQ ID NO: 176279 - DNA, 17 bp, synthetic construct
  source 1..17: mol_type = other DNA
gtccaggggagaccgaa

SEQ ID NO: 176280 - DNA, 17 bp, synthetic construct
  source 1..17: mol_type = other DNA
tgtccaggggagaccga

SEQ ID NO: 176281 - DNA, 17 bp, synthetic construct
  source 1..17: mol_type = other DNA
gtgtccaggggagaccg

SEQ ID NO: 176282 - DNA, 17 bp, synthetic construct
  source 1..17: mol_type = other DNA
tgtgtccaggggagacc

SEQ ID NO: 176283 - DNA, 17 bp, synthetic construct
  source 1..17: mol_type = other DNA
ttgtgtccaggggagac

SEQ ID NO: 176284 - DNA, 17 bp, synthetic construct
  source 1..17: mol_type = other DNA
attgtgtccaggggaga

SEQ ID NO: 176285 - DNA, 17 bp, synthetic construct
  source 1..17: mol_type = other DNA
gattgtgtccaggggag

SEQ ID NO: 176286 - DNA, 17 bp, synthetic construct
  source 1..17: mol_type = other DNA
ggattgtgtccagggga

SEQ ID NO: 176287 - DNA, 17 bp, synthetic construct
  source 1..17: mol_type = other DNA
tggattgtgtccagggg

SEQ ID NO: 176288 - DNA, 17 bp, synthetic construct
  source 1..17: mol_type = other DNA
atggattgtgtccaggg

SEQ ID NO: 176289 - DNA, 17 bp, synthetic construct
  source 1..17: mol_type = other DNA
gatggattgtgtccagg

SEQ ID NO: 176290 - DNA, 17 bp, synthetic construct
  source 1..17: mol_type = other DNA
ggatggattgtgtccag

SEQ ID NO: 176291 - DNA, 17 bp, synthetic construct
  source 1..17: mol_type = other DNA
gggatggattgtgtcca

SEQ ID NO: 176292 - DNA, 17 bp, synthetic construct
  source 1..17: mol_type = other DNA
ggggatggattgtgtcc

SEQ ID NO: 176293 - DNA, 17 bp, synthetic construct
  source 1..17: mol_type = other DNA
tggggatggattgtgtc

SEQ ID NO: 176294 - DNA, 17 bp, synthetic construct
  source 1..17: mol_type = other DNA
gtggggatggattgtgt

SEQ ID NO: 176295 - DNA, 17 bp, synthetic construct
  source 1..17: mol_type = other DNA
agtggggatggattgtg

SEQ ID NO: 176296 - DNA, 17 bp, synthetic construct
  source 1..17: mol_type = other DNA
cagtggggatggattgt

SEQ ID NO: 176297 - DNA, 17 bp, synthetic construct
  source 1..17: mol_type = other DNA
ccagtggggatggattg

SEQ ID NO: 176298 - DNA, 17 bp, synthetic construct
  source 1..17: mol_type = other DNA
gccagtggggatggatt

SEQ ID NO: 176299 - DNA, 17 bp, synthetic construct
  source 1..17: mol_type = other DNA
ggccagtggggatggat

SEQ ID NO: 176300 - DNA, 17 bp, synthetic construct
  source 1..17: mol_type = other DNA
tggccagtggggatgga

SEQ ID NO: 176301 - DNA, 17 bp, synthetic construct
  source 1..17: mol_type = other DNA
gtggccagtggggatgg

SEQ ID NO: 176302 - DNA, 17 bp, synthetic construct
  source 1..17: mol_type = other DNA
tgtggccagtggggatg

SEQ ID NO: 176303 - DNA, 17 bp, synthetic construct
  source 1..17: mol_type = other DNA
gtgtggccagtggggat

SEQ ID NO: 176304 - DNA, 17 bp, synthetic construct
  source 1..17: mol_type = other DNA
agtgtggccagtgggga

SEQ ID NO: 176305 - DNA, 17 bp, synthetic construct
  source 1..17: mol_type = other DNA
cagtgtggccagtgggg

SEQ ID NO: 176306 - DNA, 17 bp, synthetic construct
  source 1..17: mol_type = other DNA
ccagtgtggccagtggg

SEQ ID NO: 176307 - DNA, 17 bp, synthetic construct
  source 1..17: mol_type = other DNA
cccagtgtggccagtgg

SEQ ID NO: 176308 - DNA, 17 bp, synthetic construct
  source 1..17: mol_type = other DNA
acccagtgtggccagtg

SEQ ID NO: 176309 - DNA, 17 bp, synthetic construct
  source 1..17: mol_type = other DNA
gacccagtgtggccagt

SEQ ID NO: 176310 - DNA, 17 bp, synthetic construct
  source 1..17: mol_type = other DNA
agacccagtgtggccag

SEQ ID NO: 176311 - DNA, 17 bp, synthetic construct
  source 1..17: mol_type = other DNA
gagacccagtgtggcca

SEQ ID NO: 176312 - DNA, 17 bp, synthetic construct
  source 1..17: mol_type = other DNA
ggagacccagtgtggcc

SEQ ID NO: 176313 - DNA, 17 bp, synthetic construct
  source 1..17: mol_type = other DNA
aggagacccagtgtggc

SEQ ID NO: 176314 - DNA, 17 bp, synthetic construct
  source 1..17: mol_type = other DNA
gaggagacccagtgtgg

SEQ ID NO: 176315 - DNA, 17 bp, synthetic construct
  source 1..17: mol_type = other DNA
agaggagacccagtgtg

SEQ ID NO: 176316 - DNA, 17 bp, synthetic construct
  source 1..17: mol_type = other DNA
cagaggagacccagtgt

SEQ ID NO: 176317 - DNA, 17 bp, synthetic construct
  source 1..17: mol_type = other DNA
ccagaggagacccagtg

SEQ ID NO: 176318 - DNA, 17 bp, synthetic construct
  source 1..17: mol_type = other DNA
gccagaggagacccagt

SEQ ID NO: 176319 - DNA, 17 bp, synthetic construct
  source 1..17: mol_type = other DNA
ggccagaggagacccag

SEQ ID NO: 176320 - DNA, 17 bp, synthetic construct
  source 1..17: mol_type = other DNA
tggccagaggagaccca

SEQ ID NO: 176321 - DNA, 17 bp, synthetic construct
  source 1..17: mol_type = other DNA
gtggccagaggagaccc

SEQ ID NO: 176322 - DNA, 17 bp, synthetic construct
  source 1..17: mol_type = other DNA
tgtggccagaggagacc

SEQ ID NO: 176323 - DNA, 17 bp, synthetic construct
  source 1..17: mol_type = other DNA
ttgtggccagaggagac

SEQ ID NO: 176324 - DNA, 17 bp, synthetic construct
  source 1..17: mol_type = other DNA
attgtggccagaggaga

SEQ ID NO: 176325 - DNA, 17 bp, synthetic construct
  source 1..17: mol_type = other DNA
gattgtggccagaggag

SEQ ID NO: 176326 - DNA, 17 bp, synthetic construct
  source 1..17: mol_type = other DNA
ggattgtggccagagga

SEQ ID NO: 176327 - DNA, 17 bp, synthetic construct
  source 1..17: mol_type = other DNA
cggattgtggccagagg

SEQ ID NO: 176328 - DNA, 17 bp, synthetic construct
  source 1..17: mol_type = other DNA
acggattgtggccagag

SEQ ID NO: 176329 - DNA, 17 bp, synthetic construct
  source 1..17: mol_type = other DNA
gacggattgtggccaga

SEQ ID NO: 176330 - DNA, 17 bp, synthetic construct
  source 1..17: mol_type = other DNA
ggacggattgtggccag

SEQ ID NO: 176331 - DNA, 17 bp, synthetic construct
  source 1..17: mol_type = other DNA
cggacggattgtggcca

SEQ ID NO: 176332 - DNA, 17 bp, synthetic construct
  source 1..17: mol_type = other DNA
gcggacggattgtggcc

SEQ ID NO: 176333 - DNA, 17 bp, synthetic construct
  source 1..17: mol_type = other DNA
tgcggacggattgtggc

SEQ ID NO: 176334 - DNA, 17 bp, synthetic construct
  source 1..17: mol_type = other DNA
gtgcggacggattgtgg

SEQ ID NO: 176335 - DNA, 17 bp, synthetic construct
  source 1..17: mol_type = other DNA
agtgcggacggattgtg

SEQ ID NO: 176336 - DNA, 17 bp, synthetic construct
  source 1..17: mol_type = other DNA
cagtgcggacggattgt

SEQ ID NO: 176337 - DNA, 17 bp, synthetic construct
  source 1..17: mol_type = other DNA
ccagtgcggacggattg

SEQ ID NO: 176338 - DNA, 17 bp, synthetic construct
  source 1..17: mol_type = other DNA
gccagtgcggacggatt

SEQ ID NO: 176339 - DNA, 17 bp, synthetic construct
  source 1..17: mol_type = other DNA
ggccagtgcggacggat

SEQ ID NO: 176340 - DNA, 17 bp, synthetic construct
  source 1..17: mol_type = other DNA
tggccagtgcggacgga

SEQ ID NO: 176341 - DNA, 17 bp, synthetic construct
  source 1..17: mol_type = other DNA
gtggccagtgcggacgg

SEQ ID NO: 176342 - DNA, 17 bp, synthetic construct
  source 1..17: mol_type = other DNA
tgtggccagtgcggacg

SEQ ID NO: 176343 - DNA, 17 bp, synthetic construct
  source 1..17: mol_type = other DNA
ttgtggccagtgcggac

SEQ ID NO: 176344 - DNA, 17 bp, synthetic construct
  source 1..17: mol_type = other DNA
attgtggccagtgcgga

SEQ ID NO: 176345 - DNA, 17 bp, synthetic construct
  source 1..17: mol_type = other DNA
gattgtggccagtgcgg

SEQ ID NO: 176346 - DNA, 17 bp, synthetic construct
  source 1..17: mol_type = other DNA
tgattgtggccagtgcg

SEQ ID NO: 176347 - DNA, 17 bp, synthetic construct
  source 1..17: mol_type = other DNA
ctgattgtggccagtgc

SEQ ID NO: 176348 - DNA, 17 bp, synthetic construct
  source 1..17: mol_type = other DNA
actgattgtggccagtg

SEQ ID NO: 176349 - DNA, 17 bp, synthetic construct
  source 1..17: mol_type = other DNA
gactgattgtggccagt

SEQ ID NO: 176350 - DNA, 17 bp, synthetic construct
  source 1..17: mol_type = other DNA
ggactgattgtggccag

SEQ ID NO: 176351 - DNA, 17 bp, synthetic construct
  source 1..17: mol_type = other DNA
gggactgattgtggcca

SEQ ID NO: 176352 - DNA, 17 bp, synthetic construct
  source 1..17: mol_type = other DNA
ggggactgattgtggcc

SEQ ID NO: 176353 - DNA, 17 bp, synthetic construct
  source 1..17: mol_type = other DNA
tggggactgattgtggc

SEQ ID NO: 176354 - DNA, 17 bp, synthetic construct
  source 1..17: mol_type = other DNA
gtggggactgattgtgg

SEQ ID NO: 176355 - DNA, 17 bp, synthetic construct
  source 1..17: mol_type = other DNA
agtggggactgattgtg

SEQ ID NO: 176356 - DNA, 17 bp, synthetic construct
  source 1..17: mol_type = other DNA
cagtggggactgattgt

SEQ ID NO: 176357 - DNA, 17 bp, synthetic construct
  source 1..17: mol_type = other DNA
ccagtggggactgattg

SEQ ID NO: 176358 - DNA, 17 bp, synthetic construct
  source 1..17: mol_type = other DNA
gccagtggggactgatt

SEQ ID NO: 176359 - DNA, 17 bp, synthetic construct
  source 1..17: mol_type = other DNA
ggccagtggggactgat

SEQ ID NO: 176360 - DNA, 17 bp, synthetic construct
  source 1..17: mol_type = other DNA
tggccagtggggactga

SEQ ID NO: 176361 - DNA, 17 bp, synthetic construct
  source 1..17: mol_type = other DNA
gtggccagtggggactg

SEQ ID NO: 176362 - DNA, 17 bp, synthetic construct
  source 1..17: mol_type = other DNA
tgtggccagtggggact

SEQ ID NO: 176363 - DNA, 17 bp, synthetic construct
  source 1..17: mol_type = other DNA
gtgtggccagtggggac

SEQ ID NO: 176364 - DNA, 17 bp, synthetic construct
  source 1..17: mol_type = other DNA
agtgtggccagtgggga

SEQ ID NO: 176365 - DNA, 17 bp, synthetic construct
  source 1..17: mol_type = other DNA
gagtgtggccagtgggg

SEQ ID NO: 176366 - DNA, 17 bp, synthetic construct
  source 1..17: mol_type = other DNA
cgagtgtggccagtggg

SEQ ID NO: 176367 - DNA, 17 bp, synthetic construct
  source 1..17: mol_type = other DNA
ccgagtgtggccagtgg

SEQ ID NO: 176368 - DNA, 17 bp, synthetic construct
  source 1..17: mol_type = other DNA
accgagtgtggccagtg

SEQ ID NO: 176369 - DNA, 17 bp, synthetic construct
  source 1..17: mol_type = other DNA
gaccgagtgtggccagt

SEQ ID NO: 176370 - DNA, 17 bp, synthetic construct
  source 1..17: mol_type = other DNA
ggaccgagtgtggccag

SEQ ID NO: 176371 - DNA, 17 bp, synthetic construct
  source 1..17: mol_type = other DNA
gggaccgagtgtggcca

SEQ ID NO: 176372 - DNA, 17 bp, synthetic construct
  source 1..17: mol_type = other DNA
ggggaccgagtgtggcc

SEQ ID NO: 176373 - DNA, 17 bp, synthetic construct
  source 1..17: mol_type = other DNA
tggggaccgagtgtggc

SEQ ID NO: 176374 - DNA, 17 bp, synthetic construct
  source 1..17: mol_type = other DNA
gtggggaccgagtgtgg

SEQ ID NO: 176375 - DNA, 17 bp, synthetic construct
  source 1..17: mol_type = other DNA
agtggggaccgagtgtg

SEQ ID NO: 176376 - DNA, 17 bp, synthetic construct
  source 1..17: mol_type = other DNA
cagtggggaccgagtgt

SEQ ID NO: 176377 - DNA, 17 bp, synthetic construct
  source 1..17: mol_type = other DNA
ccagtggggaccgagtg

SEQ ID NO: 176378 - DNA, 17 bp, synthetic construct
  source 1..17: mol_type = other DNA
gccagtggggaccgagt

SEQ ID NO: 176379 - DNA, 17 bp, synthetic construct
  source 1..17: mol_type = other DNA
ggccagtggggaccgag

SEQ ID NO: 176380 - DNA, 17 bp, synthetic construct
  source 1..17: mol_type = other DNA
tggccagtggggaccga

SEQ ID NO: 176381 - DNA, 17 bp, synthetic construct
  source 1..17: mol_type = other DNA
gtggccagtggggaccg

SEQ ID NO: 176382 - DNA, 17 bp, synthetic construct
  source 1..17: mol_type = other DNA
tgtggccagtggggacc

SEQ ID NO: 176383 - DNA, 17 bp, synthetic construct
  source 1..17: mol_type = other DNA
ttgtggccagtggggac

SEQ ID NO: 176384 - DNA, 17 bp, synthetic construct
  source 1..17: mol_type = other DNA
attgtggccagtgggga

SEQ ID NO: 176385 - DNA, 17 bp, synthetic construct
  source 1..17: mol_type = other DNA
gattgtggccagtgggg

SEQ ID NO: 176386 - DNA, 17 bp, synthetic construct
  source 1..17: mol_type = other DNA
ggattgtggccagtggg

SEQ ID NO: 176387 - DNA, 17 bp, synthetic construct
  source 1..17: mol_type = other DNA
tggattgtggccagtgg

SEQ ID NO: 176388 - DNA, 17 bp, synthetic construct
  source 1..17: mol_type = other DNA
atggattgtggccagtg

SEQ ID NO: 176389 - DNA, 17 bp, synthetic construct
  source 1..17: mol_type = other DNA
gatggattgtggccagt

SEQ ID NO: 176390 - DNA, 17 bp, synthetic construct
  source 1..17: mol_type = other DNA
ggatggattgtggccag

SEQ ID NO: 176391 - DNA, 17 bp, synthetic construct
  source 1..17: mol_type = other DNA
gggatggattgtggcca

SEQ ID NO: 176392 - DNA, 17 bp, synthetic construct
  source 1..17: mol_type = other DNA
ggggatggattgtggcc

SEQ ID NO: 176393 - DNA, 17 bp, synthetic construct
  source 1..17: mol_type = other DNA
tggggatggattgtggc

SEQ ID NO: 176394 - DNA, 17 bp, synthetic construct
  source 1..17: mol_type = other DNA
gtggggatggattgtgg

SEQ ID NO: 176395 - DNA, 17 bp, synthetic construct
  source 1..17: mol_type = other DNA
agtggggatggattgtg

SEQ ID NO: 176396 - DNA, 17 bp, synthetic construct
  source 1..17: mol_type = other DNA
cagtggggatggattgt

SEQ ID NO: 176397 - DNA, 17 bp, synthetic construct
  source 1..17: mol_type = other DNA
ccagtggggatggattg

SEQ ID NO: 176398 - DNA, 17 bp, synthetic construct
  source 1..17: mol_type = other DNA
gccagtggggatggatt

SEQ ID NO: 176399 - DNA, 17 bp, synthetic construct
  source 1..17: mol_type = other DNA
ggccagtggggatggat

SEQ ID NO: 176400 - DNA, 17 bp, synthetic construct
  source 1..17: mol_type = other DNA
tggccagtggggatgga

SEQ ID NO: 176401 - DNA, 17 bp, synthetic construct
  source 1..17: mol_type = other DNA
gtggccagtggggatgg

SEQ ID NO: 176402 - DNA, 17 bp, synthetic construct
  source 1..17: mol_type = other DNA
tgtggccagtggggatg

SEQ ID NO: 176403 - DNA, 17 bp, synthetic construct
  source 1..17: mol_type = other DNA
gtgtggccagtggggat

SEQ ID NO: 176404 - DNA, 17 bp, synthetic construct
  source 1..17: mol_type = other DNA
agtgtggccagtgggga

SEQ ID NO: 176405 - DNA, 17 bp, synthetic construct
  source 1..17: mol_type = other DNA
gagtgtggccagtgggg

SEQ ID NO: 176406 - DNA, 17 bp, synthetic construct
  source 1..17: mol_type = other DNA
cgagtgtggccagtggg

SEQ ID NO: 176407 - DNA, 17 bp, synthetic construct
  source 1..17: mol_type = other DNA
ccgagtgtggccagtgg

SEQ ID NO: 176408 - DNA, 17 bp, synthetic construct
  source 1..17: mol_type = other DNA
accgagtgtggccagtg

SEQ ID NO: 176409 - DNA, 17 bp, synthetic construct
  source 1..17: mol_type = other DNA
gaccgagtgtggccagt

SEQ ID NO: 176410 - DNA, 17 bp, synthetic construct
  source 1..17: mol_type = other DNA
ggaccgagtgtggccag

SEQ ID NO: 176411 - DNA, 17 bp, synthetic construct
  source 1..17: mol_type = other DNA
gggaccgagtgtggcca

SEQ ID NO: 176412 - DNA, 17 bp, synthetic construct
  source 1..17: mol_type = other DNA
ggggaccgagtgtggcc

SEQ ID NO: 176413 - DNA, 17 bp, synthetic construct
  source 1..17: mol_type = other DNA
tggggaccgagtgtggc

SEQ ID NO: 176414 - DNA, 17 bp, synthetic construct
  source 1..17: mol_type = other DNA
gtggggaccgagtgtgg

SEQ ID NO: 176415 - DNA, 17 bp, synthetic construct
  source 1..17: mol_type = other DNA
agtggggaccgagtgtg

SEQ ID NO: 176416 - DNA, 17 bp, synthetic construct
  source 1..17: mol_type = other DNA
cagtggggaccgagtgt

SEQ ID NO: 176417 - DNA, 17 bp, synthetic construct
  source 1..17: mol_type = other DNA
ccagtggggaccgagtg

SEQ ID NO: 176418 - DNA, 17 bp, synthetic construct
  source 1..17: mol_type = other DNA
accagtggggaccgagt

SEQ ID NO: 176419 - DNA, 17 bp, synthetic construct
  source 1..17: mol_type = other DNA
gaccagtggggaccgag

SEQ ID NO: 176420 - DNA, 17 bp, synthetic construct
  source 1..17: mol_type = other DNA
tgaccagtggggaccga

SEQ ID NO: 176421 - DNA, 17 bp, synthetic construct
  source 1..17: mol_type = other DNA
gtgaccagtggggaccg

SEQ ID NO: 176422 - DNA, 17 bp, synthetic construct
  source 1..17: mol_type = other DNA
tgtgaccagtggggacc

SEQ ID NO: 176423 - DNA, 17 bp, synthetic construct
  source 1..17: mol_type = other DNA
ttgtgaccagtggggac

SEQ ID NO: 176424 - DNA, 17 bp, synthetic construct
  source 1..17: mol_type = other DNA
attgtgaccagtgggga

SEQ ID NO: 176425 - DNA, 17 bp, synthetic construct
  source 1..17: mol_type = other DNA
gattgtgaccagtgggg

SEQ ID NO: 176426 - DNA, 17 bp, synthetic construct
  source 1..17: mol_type = other DNA
ggattgtgaccagtggg

SEQ ID NO: 176427 - DNA, 17 bp, synthetic construct
  source 1..17: mol_type = other DNA
cggattgtgaccagtgg

SEQ ID NO: 176428 - DNA, 17 bp, synthetic construct
  source 1..17: mol_type = other DNA
acggattgtgaccagtg

SEQ ID NO: 176429 - DNA, 17 bp, synthetic construct
  source 1..17: mol_type = other DNA
gacggattgtgaccagt

SEQ ID NO: 176430 - DNA, 17 bp, synthetic construct
  source 1..17: mol_type = other DNA
ggacggattgtgaccag

SEQ ID NO: 176431 - DNA, 17 bp, synthetic construct
  source 1..17: mol_type = other DNA
gggacggattgtgacca

SEQ ID NO: 176432 - DNA, 17 bp, synthetic construct
  source 1..17: mol_type = other DNA
ggggacggattgtgacc

SEQ ID NO: 176433 - DNA, 17 bp, synthetic construct
  source 1..17: mol_type = other DNA
tggggacggattgtgac

SEQ ID NO: 176434 - DNA, 17 bp, synthetic construct
  source 1..17: mol_type = other DNA
ctggggacggattgtga

SEQ ID NO: 176435 - DNA, 17 bp, synthetic construct
  source 1..17: mol_type = other DNA
actggggacggattgtg

SEQ ID NO: 176436 - DNA, 17 bp, synthetic construct
  source 1..17: mol_type = other DNA
cactggggacggattgt

SEQ ID NO: 176437 - DNA, 17 bp, synthetic construct
  source 1..17: mol_type = other DNA
ccactggggacggattg

SEQ ID NO: 176438 - DNA, 17 bp, synthetic construct
  source 1..17: mol_type = other DNA
gccactggggacggatt

SEQ ID NO: 176439 - DNA, 17 bp, synthetic construct
  source 1..17: mol_type = other DNA
ggccactggggacggat

SEQ ID NO: 176440 - DNA, 17 bp, synthetic construct
  source 1..17: mol_type = other DNA
tggccactggggacgga

SEQ ID NO: 176441 - DNA, 17 bp, synthetic construct
  source 1..17: mol_type = other DNA
gtggccactggggacgg

SEQ ID NO: 176442 - DNA, 17 bp, synthetic construct
  source 1..17: mol_type = other DNA
tgtggccactggggacg

SEQ ID NO: 176443 - DNA, 17 bp, synthetic construct
  source 1..17: mol_type = other DNA
gtgtggccactggggac

SEQ ID NO: 176444 - DNA, 17 bp, synthetic construct
  source 1..17: mol_type = other DNA
agtgtggccactgggga

SEQ ID NO: 176445 - DNA, 17 bp, synthetic construct
  source 1..17: mol_type = other DNA
aagtgtggccactgggg

SEQ ID NO: 176446 - DNA, 17 bp, synthetic construct
  source 1..17: mol_type = other DNA
caagtgtggccactggg

SEQ ID NO: 176447 - DNA, 17 bp, synthetic construct
  source 1..17: mol_type = other DNA
ccaagtgtggccactgg

SEQ ID NO: 176448 - DNA, 17 bp, synthetic construct
  source 1..17: mol_type = other DNA
accaagtgtggccactg

SEQ ID NO: 176449 - DNA, 17 bp, synthetic construct
  source 1..17: mol_type = other DNA
gaccaagtgtggccact

SEQ ID NO: 176450 - DNA, 17 bp, synthetic construct
  source 1..17: mol_type = other DNA
ggaccaagtgtggccac

SEQ ID NO: 176451 - DNA, 17 bp, synthetic construct
  source 1..17: mol_type = other DNA
gggaccaagtgtggcca

SEQ ID NO: 176452 - DNA, 17 bp, synthetic construct
  source 1..17: mol_type = other DNA
ggggaccaagtgtggcc

SEQ ID NO: 176453 - DNA, 17 bp, synthetic construct
  source 1..17: mol_type = other DNA
tggggaccaagtgtggc

SEQ ID NO: 176454 - DNA, 17 bp, synthetic construct
  source 1..17: mol_type = other DNA
gtggggaccaagtgtgg

SEQ ID NO: 176455 - DNA, 17 bp, synthetic construct
  source 1..17: mol_type = other DNA
agtggggaccaagtgtg

SEQ ID NO: 176456 - DNA, 17 bp, synthetic construct
  source 1..17: mol_type = other DNA
cagtggggaccaagtgt

SEQ ID NO: 176457 - DNA, 17 bp, synthetic construct
  source 1..17: mol_type = other DNA
ccagtggggaccaagtg

SEQ ID NO: 176458 - DNA, 17 bp, synthetic construct
  source 1..17: mol_type = other DNA
gccagtggggaccaagt

SEQ ID NO: 176459 - DNA, 17 bp, synthetic construct
  source 1..17: mol_type = other DNA
ggccagtggggaccaag

SEQ ID NO: 176460 - DNA, 17 bp, synthetic construct
  source 1..17: mol_type = other DNA
tggccagtggggaccaa

SEQ ID NO: 176461 - DNA, 17 bp, synthetic construct
  source 1..17: mol_type = other DNA
gtggccagtggggacca

SEQ ID NO: 176462 - DNA, 17 bp, synthetic construct
  source 1..17: mol_type = other DNA
tgtggccagtggggacc

SEQ ID NO: 176463 - DNA, 17 bp, synthetic construct
  source 1..17: mol_type = other DNA
gtgtggccagtggggac

SEQ ID NO: 176464 - DNA, 17 bp, synthetic construct
  source 1..17: mol_type = other DNA
agtgtggccagtgggga

SEQ ID NO: 176465 - DNA, 17 bp, synthetic construct
  source 1..17: mol_type = other DNA
gagtgtggccagtgggg

SEQ ID NO: 176466 - DNA, 17 bp, synthetic construct
  source 1..17: mol_type = other DNA
tgagtgtggccagtggg

SEQ ID NO: 176467 - DNA, 17 bp, synthetic construct
  source 1..17: mol_type = other DNA
ctgagtgtggccagtgg

SEQ ID NO: 176468 - DNA, 17 bp, synthetic construct
  source 1..17: mol_type = other DNA
gctgagtgtggccagtg

SEQ ID NO: 176469 - DNA, 17 bp, synthetic construct
  source 1..17: mol_type = other DNA
ggctgagtgtggccagt

SEQ ID NO: 176470 - DNA, 17 bp, synthetic construct
  source 1..17: mol_type = other DNA
aggctgagtgtggccag

SEQ ID NO: 176471 - DNA, 17 bp, synthetic construct
  source 1..17: mol_type = other DNA
gaggctgagtgtggcca

SEQ ID NO: 176472 - DNA, 17 bp, synthetic construct
  source 1..17: mol_type = other DNA
agaggctgagtgtggcc

SEQ ID NO: 176473 - DNA, 17 bp, synthetic construct
  source 1..17: mol_type = other DNA
cagaggctgagtgtggc

SEQ ID NO: 176474 - DNA, 17 bp, synthetic construct
  source 1..17: mol_type = other DNA
gcagaggctgagtgtgg

SEQ ID NO: 176475 - DNA, 17 bp, synthetic construct
  source 1..17: mol_type = other DNA
ggcagaggctgagtgtg

SEQ ID NO: 176476 - DNA, 17 bp, synthetic construct
  source 1..17: mol_type = other DNA
gggcagaggctgagtgt

SEQ ID NO: 176477 - DNA, 17 bp, synthetic construct
  source 1..17: mol_type = other DNA
agggcagaggctgagtg

SEQ ID NO: 176478 - DNA, 17 bp, synthetic construct
  source 1..17: mol_type = other DNA
gagggcagaggctgagt

SEQ ID NO: 176479 - DNA, 17 bp, synthetic construct
  source 1..17: mol_type = other DNA
agagggcagaggctgag

SEQ ID NO: 176480 - DNA, 17 bp, synthetic construct
  source 1..17: mol_type = other DNA
gagagggcagaggctga

SEQ ID NO: 176481 - DNA, 17 bp, synthetic construct
  source 1..17: mol_type = other DNA
ggagagggcagaggctg

SEQ ID NO: 176482 - DNA, 17 bp, synthetic construct
  source 1..17: mol_type = other DNA
tggagagggcagaggct

SEQ ID NO: 176483 - DNA, 17 bp, synthetic construct
  source 1..17: mol_type = other DNA
gtggagagggcagaggc

SEQ ID NO: 176484 - DNA, 17 bp, synthetic construct
  source 1..17: mol_type = other DNA
agtggagagggcagagg

SEQ ID NO: 176485 - DNA, 17 bp, synthetic construct
  source 1..17: mol_type = other DNA
gagtggagagggcagag

SEQ ID NO: 176486 - DNA, 17 bp, synthetic construct
  source 1..17: mol_type = other DNA
ggagtggagagggcaga

SEQ ID NO: 176487 - DNA, 17 bp, synthetic construct
  source 1..17: mol_type = other DNA
gggagtggagagggcag

SEQ ID NO: 176488 - DNA, 17 bp, synthetic construct
  source 1..17: mol_type = other DNA
agggagtggagagggca

SEQ ID NO: 176489 - DNA, 17 bp, synthetic construct
  source 1..17: mol_type = other DNA
aagggagtggagagggc

SEQ ID NO: 176490 - DNA, 17 bp, synthetic construct
  source 1..17: mol_type = other DNA
gaagggagtggagaggg

SEQ ID NO: 176491 - DNA, 17 bp, synthetic construct
  source 1..17: mol_type = other DNA
ggaagggagtggagagg

SEQ ID NO: 176492 - DNA, 17 bp, synthetic construct
  source 1..17: mol_type = other DNA
gggaagggagtggagag

SEQ ID NO: 176493 - DNA, 17 bp, synthetic construct
  source 1..17: mol_type = other DNA
agggaagggagtggaga

SEQ ID NO: 176494 - DNA, 17 bp, synthetic construct
  source 1..17: mol_type = other DNA
cagggaagggagtggag

SEQ ID NO: 176495 - DNA, 17 bp, synthetic construct
  source 1..17: mol_type = other DNA
ccagggaagggagtgga

SEQ ID NO: 176496 - DNA, 17 bp, synthetic construct
  source 1..17: mol_type = other DNA
tccagggaagggagtgg

SEQ ID NO: 176497 - DNA, 17 bp, synthetic construct
  source 1..17: mol_type = other DNA
ttccagggaagggagtg

SEQ ID NO: 176498 - DNA, 17 bp, synthetic construct
  source 1..17: mol_type = other DNA
gttccagggaagggagt

SEQ ID NO: 176499 - DNA, 17 bp, synthetic construct
  source 1..17: mol_type = other DNA
ggttccagggaagggag

SEQ ID NO: 176500 - DNA, 17 bp, synthetic construct
  source 1..17: mol_type = other DNA
cggttccagggaaggga

SEQ ID NO: 176501 - DNA, 17 bp, synthetic construct
  source 1..17: mol_type = other DNA
gcggttccagggaaggg

SEQ ID NO: 176502 - DNA, 17 bp, synthetic construct
  source 1..17: mol_type = other DNA
agcggttccagggaagg

SEQ ID NO: 176503 - DNA, 17 bp, synthetic construct
  source 1..17: mol_type = other DNA
cagcggttccagggaag

SEQ ID NO: 176504 - DNA, 17 bp, synthetic construct
  source 1..17: mol_type = other DNA
gcagcggttccagggaa

SEQ ID NO: 176505 - DNA, 17 bp, synthetic construct
  source 1..17: mol_type = other DNA
agcagcggttccaggga

SEQ ID NO: 176506 - DNA, 17 bp, synthetic construct
  source 1..17: mol_type = other DNA
gagcagcggttccaggg

SEQ ID NO: 176507 - DNA, 17 bp, synthetic construct
  source 1..17: mol_type = other DNA
ggagcagcggttccagg

SEQ ID NO: 176508 - DNA, 17 bp, synthetic construct
  source 1..17: mol_type = other DNA
gggagcagcggttccag

SEQ ID NO: 176509 - DNA, 17 bp, synthetic construct
  source 1..17: mol_type = other DNA
agggagcagcggttcca

SEQ ID NO: 176510 - DNA, 17 bp, synthetic construct
  source 1..17: mol_type = other DNA
gagggagcagcggttcc

SEQ ID NO: 176511 - DNA, 17 bp, synthetic construct
  source 1..17: mol_type = other DNA
ggagggagcagcggttc

SEQ ID NO: 176512 - DNA, 17 bp, synthetic construct
  source 1..17: mol_type = other DNA
aggagggagcagcggtt

SEQ ID NO: 176513 - DNA, 17 bp, synthetic construct
  source 1..17: mol_type = other DNA
caggagggagcagcggt

SEQ ID NO: 176514 - DNA, 17 bp, synthetic construct
  source 1..17: mol_type = other DNA
gcaggagggagcagcgg

SEQ ID NO: 176515 - DNA, 17 bp, synthetic construct
  source 1..17: mol_type = other DNA
cgcaggagggagcagcg

SEQ ID NO: 176516 - DNA, 17 bp, synthetic construct
  source 1..17: mol_type = other DNA
gcgcaggagggagcagc

SEQ ID NO: 176517 - DNA, 17 bp, synthetic construct
  source 1..17: mol_type = other DNA
agcgcaggagggagcag

SEQ ID NO: 176518 - DNA, 17 bp, synthetic construct
  source 1..17: mol_type = other DNA
cagcgcaggagggagca

SEQ ID NO: 176519 - DNA, 17 bp, synthetic construct
  source 1..17: mol_type = other DNA
tcagcgcaggagggagc

SEQ ID NO: 176520 - DNA, 17 bp, synthetic construct
  source 1..17: mol_type = other DNA
gtcagcgcaggagggag

SEQ ID NO: 176521 - DNA, 17 bp, synthetic construct
  source 1..17: mol_type = other DNA
ggtcagcgcaggaggga

SEQ ID NO: 176522 - DNA, 17 bp, synthetic construct
  source 1..17: mol_type = other DNA
aggtcagcgcaggaggg

SEQ ID NO: 176523 - DNA, 17 bp, synthetic construct
  source 1..17: mol_type = other DNA
gaggtcagcgcaggagg

SEQ ID NO: 176524 - DNA, 17 bp, synthetic construct
  source 1..17: mol_type = other DNA
agaggtcagcgcaggag

SEQ ID NO: 176525 - DNA, 17 bp, synthetic construct
  source 1..17: mol_type = other DNA
cagaggtcagcgcagga

SEQ ID NO: 176526 - DNA, 17 bp, synthetic construct
  source 1..17: mol_type = other DNA
gcagaggtcagcgcagg

SEQ ID NO: 176527 - DNA, 17 bp, synthetic construct
  source 1..17: mol_type = other DNA
ggcagaggtcagcgcag

SEQ ID NO: 176528 - DNA, 17 bp, synthetic construct
  source 1..17: mol_type = other DNA
aggcagaggtcagcgca

SEQ ID NO: 176529 - DNA, 17 bp, synthetic construct
  source 1..17: mol_type = other DNA
aaggcagaggtcagcgc

SEQ ID NO: 176530 - DNA, 17 bp, synthetic construct
  source 1..17: mol_type = other DNA
aaaggcagaggtcagcg

SEQ ID NO: 176531 - DNA, 17 bp, synthetic construct
  source 1..17: mol_type = other DNA
caaaggcagaggtcagc

SEQ ID NO: 176532 - DNA, 17 bp, synthetic construct
  source 1..17: mol_type = other DNA
gcaaaggcagaggtcag

SEQ ID NO: 176533 - DNA, 17 bp, synthetic construct
  source 1..17: mol_type = other DNA
agcaaaggcagaggtca

SEQ ID NO: 176534 - DNA, 17 bp, synthetic construct
  source 1..17: mol_type = other DNA
gagcaaaggcagaggtc

SEQ ID NO: 176535 - DNA, 17 bp, synthetic construct
  source 1..17: mol_type = other DNA
agagcaaaggcagaggt

SEQ ID NO: 176536 - DNA, 17 bp, synthetic construct
  source 1..17: mol_type = other DNA
gagagcaaaggcagagg

SEQ ID NO: 176537 - DNA, 17 bp, synthetic construct
  source 1..17: mol_type = other DNA
ggagagcaaaggcagag

SEQ ID NO: 176538 - DNA, 17 bp, synthetic construct
  source 1..17: mol_type = other DNA
gggagagcaaaggcaga

SEQ ID NO: 176539 - DNA, 17 bp, synthetic construct
  source 1..17: mol_type = other DNA
tgggagagcaaaggcag

SEQ ID NO: 176540 - DNA, 17 bp, synthetic construct
  source 1..17: mol_type = other DNA
ctgggagagcaaaggca

SEQ ID NO: 176541 - DNA, 17 bp, synthetic construct
  source 1..17: mol_type = other DNA
tctgggagagcaaaggc

SEQ ID NO: 176542 - DNA, 17 bp, synthetic construct
  source 1..17: mol_type = other DNA
ttctgggagagcaaagg

SEQ ID NO: 176543 - DNA, 17 bp, synthetic construct
  source 1..17: mol_type = other DNA
gttctgggagagcaaag

SEQ ID NO: 176544 - DNA, 17 bp, synthetic construct
  source 1..17: mol_type = other DNA
agttctgggagagcaaa

SEQ ID NO: 176545 - DNA, 17 bp, synthetic construct
  source 1..17: mol_type = other DNA
gagttctgggagagcaa

SEQ ID NO: 176546 - DNA, 17 bp, synthetic construct
  source 1..17: mol_type = other DNA
agagttctgggagagca

SEQ ID NO: 176547 - DNA, 17 bp, synthetic construct
  source 1..17: mol_type = other DNA
cagagttctgggagagc

SEQ ID NO: 176548 - DNA, 17 bp, synthetic construct
  source 1..17: mol_type = other DNA
ccagagttctgggagag

SEQ ID NO: 176549 - DNA, 17 bp, synthetic construct
  source 1..17: mol_type = other DNA
gccagagttctgggaga

SEQ ID NO: 176550 - DNA, 17 bp, synthetic construct
  source 1..17: mol_type = other DNA
agccagagttctgggag

SEQ ID NO: 176551 - DNA, 17 bp, synthetic construct
  source 1..17: mol_type = other DNA
aagccagagttctggga

SEQ ID NO: 176552 - DNA, 17 bp, synthetic construct
  source 1..17: mol_type = other DNA
taagccagagttctggg

SEQ ID NO: 176553 - DNA, 17 bp, synthetic construct
  source 1..17: mol_type = other DNA
gtaagccagagttctgg

SEQ ID NO: 176554 - DNA, 17 bp, synthetic construct
  source 1..17: mol_type = other DNA
ggtaagccagagttctg

SEQ ID NO: 176555 - DNA, 17 bp, synthetic construct
  source 1..17: mol_type = other DNA
gggtaagccagagttct

SEQ ID NO: 176556 - DNA, 17 bp, synthetic construct
  source 1..17: mol_type = other DNA
tgggtaagccagagttc

SEQ ID NO: 176557 - DNA, 17 bp, synthetic construct
  source 1..17: mol_type = other DNA
atgggtaagccagagtt

SEQ ID NO: 176558 - DNA, 17 bp, synthetic construct
  source 1..17: mol_type = other DNA
gatgggtaagccagagt

SEQ ID NO: 176559 - DNA, 17 bp, synthetic construct
  source 1..17: mol_type = other DNA
agatgggtaagccagag

SEQ ID NO: 176560 - DNA, 17 bp, synthetic construct
  source 1..17: mol_type = other DNA
gagatgggtaagccaga

SEQ ID NO: 176561 - DNA, 17 bp, synthetic construct
  source 1..17: mol_type = other DNA
agagatgggtaagccag

SEQ ID NO: 176562 - DNA, 17 bp, synthetic construct
  source 1..17: mol_type = other DNA
cagagatgggtaagcca

SEQ ID NO: 176563 - DNA, 17 bp, synthetic construct
  source 1..17: mol_type = other DNA
ccagagatgggtaagcc

SEQ ID NO: 176564 - DNA, 17 bp, synthetic construct
  source 1..17: mol_type = other DNA
cccagagatgggtaagc

SEQ ID NO: 176565 - DNA, 17 bp, synthetic construct
  source 1..17: mol_type = other DNA
tcccagagatgggtaag

SEQ ID NO: 176566 - DNA, 17 bp, synthetic construct
  source 1..17: mol_type = other DNA
ctcccagagatgggtaa

SEQ ID NO: 176567 - DNA, 17 bp, synthetic construct
  source 1..17: mol_type = other DNA
actcccagagatgggta

SEQ ID NO: 176568 - DNA, 17 bp, synthetic construct
  source 1..17: mol_type = other DNA
cactcccagagatgggt

SEQ ID NO: 176569 - DNA, 17 bp, synthetic construct
  source 1..17: mol_type = other DNA
ccactcccagagatggg

SEQ ID NO: 176570 - DNA, 17 bp, synthetic construct
  source 1..17: mol_type = other DNA
gccactcccagagatgg

SEQ ID NO: 176571 - DNA, 17 bp, synthetic construct
  source 1..17: mol_type = other DNA
agccactcccagagatg

SEQ ID NO: 176572 - DNA, 17 bp, synthetic construct
  source 1..17: mol_type = other DNA
aagccactcccagagat

SEQ ID NO: 176573 - DNA, 17 bp, synthetic construct
  source 1..17: mol_type = other DNA
taagccactcccagaga

SEQ ID NO: 176574 - DNA, 17 bp, synthetic construct
  source 1..17: mol_type = other DNA
ataagccactcccagag

SEQ ID NO: 176575 - DNA, 17 bp, synthetic construct
  source 1..17: mol_type = other DNA
gataagccactcccaga

SEQ ID NO: 176576 - DNA, 17 bp, synthetic construct
  source 1..17: mol_type = other DNA
agataagccactcccag

SEQ ID NO: 176577 - DNA, 17 bp, synthetic construct
  source 1..17: mol_type = other DNA
aagataagccactccca

SEQ ID NO: 176578 - DNA, 17 bp, synthetic construct
  source 1..17: mol_type = other DNA
aaagataagccactccc

SEQ ID NO: 176579 - DNA, 17 bp, synthetic construct
  source 1..17: mol_type = other DNA
gaaagataagccactcc

SEQ ID NO: 176580 - DNA, 17 bp, synthetic construct
  source 1..17: mol_type = other DNA
agaaagataagccactc

SEQ ID NO: 176581 - DNA, 17 bp, synthetic construct
  source 1..17: mol_type = other DNA
tagaaagataagccact

SEQ ID NO: 176582 - DNA, 17 bp, synthetic construct
  source 1..17: mol_type = other DNA
atagaaagataagccac

SEQ ID NO: 176583 - DNA, 17 bp, synthetic construct
  source 1..17: mol_type = other DNA
catagaaagataagcca

SEQ ID NO: 176584 - DNA, 17 bp, synthetic construct
  source 1..17: mol_type = other DNA
ccatagaaagataagcc

SEQ ID NO: 176585 - DNA, 17 bp, synthetic construct
  source 1..17: mol_type = other DNA
accatagaaagataagc

SEQ ID NO: 176586 - DNA, 17 bp, synthetic construct
  source 1..17: mol_type = other DNA
caccatagaaagataag

SEQ ID NO: 176587 - DNA, 17 bp, synthetic construct
  source 1..17: mol_type = other DNA
acaccatagaaagataa

SEQ ID NO: 176588 - DNA, 17 bp, synthetic construct
  source 1..17: mol_type = other DNA
aacaccatagaaagata

SEQ ID NO: 176589 - DNA, 17 bp, synthetic construct
  source 1..17: mol_type = other DNA
caacaccatagaaagat

SEQ ID NO: 176590 - DNA, 17 bp, synthetic construct
  source 1..17: mol_type = other DNA
acaacaccatagaaaga

SEQ ID NO: 176591 - DNA, 17 bp, synthetic construct
  source 1..17: mol_type = other DNA
aacaacaccatagaaag

SEQ ID NO: 176592 - DNA, 17 bp, synthetic construct
  source 1..17: mol_type = other DNA
gaacaacaccatagaaa

SEQ ID NO: 176593 - DNA, 17 bp, synthetic construct
  source 1..17: mol_type = other DNA
agaacaacaccatagaa

SEQ ID NO: 176594 - DNA, 17 bp, synthetic construct
  source 1..17: mol_type = other DNA
aagaacaacaccataga

SEQ ID NO: 176595 - DNA, 17 bp, synthetic construct
  source 1..17: mol_type = other DNA
gaagaacaacaccatag

SEQ ID NO: 176596 - DNA, 17 bp, synthetic construct
  source 1..17: mol_type = other DNA
tgaagaacaacaccata

SEQ ID NO: 176597 - DNA, 17 bp, synthetic construct
  source 1..17: mol_type = other DNA
gtgaagaacaacaccat

SEQ ID NO: 176598 - DNA, 17 bp, synthetic construct
  source 1..17: mol_type = other DNA
tgtgaagaacaacacca

SEQ ID NO: 176599 - DNA, 17 bp, synthetic construct
  source 1..17: mol_type = other DNA
ctgtgaagaacaacacc

SEQ ID NO: 176600 - DNA, 17 bp, synthetic construct
  source 1..17: mol_type = other DNA
cctgtgaagaacaacac

SEQ ID NO: 176601 - DNA, 17 bp, synthetic construct
  source 1..17: mol_type = other DNA
ccctgtgaagaacaaca

SEQ ID NO: 176602 - DNA, 17 bp, synthetic construct
  source 1..17: mol_type = other DNA
cccctgtgaagaacaac

SEQ ID NO: 176603 - DNA, 17 bp, synthetic construct
  source 1..17: mol_type = other DNA
tcccctgtgaagaacaa

SEQ ID NO: 176604 - DNA, 17 bp, synthetic construct
  source 1..17: mol_type = other DNA
ttcccctgtgaagaaca

SEQ ID NO: 176605 - DNA, 17 bp, synthetic construct
  source 1..17: mol_type = other DNA
cttcccctgtgaagaac

SEQ ID NO: 176606 - DNA, 17 bp, synthetic construct
  source 1..17: mol_type = other DNA
acttcccctgtgaagaa

SEQ ID NO: 176607 - DNA, 17 bp, synthetic construct
  source 1..17: mol_type = other DNA
gacttcccctgtgaaga

SEQ ID NO: 176608 - DNA, 17 bp, synthetic construct
  source 1..17: mol_type = other DNA
tgacttcccctgtgaag

SEQ ID NO: 176609 - DNA, 17 bp, synthetic construct
  source 1..17: mol_type = other DNA
atgacttcccctgtgaa

SEQ ID NO: 176610 - DNA, 17 bp, synthetic construct
  source 1..17: mol_type = other DNA
gatgacttcccctgtga

SEQ ID NO: 176611 - DNA, 17 bp, synthetic construct
  source 1..17: mol_type = other DNA
agatgacttcccctgtg

SEQ ID NO: 176612 - DNA, 17 bp, synthetic construct
  source 1..17: mol_type = other DNA
tagatgacttcccctgt

SEQ ID NO: 176613 - DNA, 17 bp, synthetic construct
  source 1..17: mol_type = other DNA
gtagatgacttcccctg

SEQ ID NO: 176614 - DNA, 17 bp, synthetic construct
  source 1..17: mol_type = other DNA
tgtagatgacttcccct

SEQ ID NO: 176615 - DNA, 17 bp, synthetic construct
  source 1..17: mol_type = other DNA
ttgtagatgacttcccc

SEQ ID NO: 176616 - DNA, 17 bp, synthetic construct
  source 1..17: mol_type = other DNA
attgtagatgacttccc

SEQ ID NO: 176617 - DNA, 17 bp, synthetic construct
  source 1..17: mol_type = other DNA
tattgtagatgacttcc

SEQ ID NO: 176618 - DNA, 17 bp, synthetic construct
  source 1..17: mol_type = other DNA
ttattgtagatgacttc

SEQ ID NO: 176619 - DNA, 17 bp, synthetic construct
  source 1..17: mol_type = other DNA
cttattgtagatgactt

SEQ ID NO: 176620 - DNA, 17 bp, synthetic construct
  source 1..17: mol_type = other DNA
tcttattgtagatgact

SEQ ID NO: 176621 - DNA, 17 bp, synthetic construct
  source 1..17: mol_type = other DNA
gtcttattgtagatgac

SEQ ID NO: 176622 - DNA, 17 bp, synthetic construct
  source 1..17: mol_type = other DNA
ggtcttattgtagatga

SEQ ID NO: 176623 - DNA, 17 bp, synthetic construct
  source 1..17: mol_type = other DNA
cggtcttattgtagatg

SEQ ID NO: 176624 - DNA, 17 bp, synthetic construct
  source 1..17: mol_type = other DNA
tcggtcttattgtagat

SEQ ID NO: 176625 - DNA, 17 bp, synthetic construct
  source 1..17: mol_type = other DNA
gtcggtcttattgtaga

SEQ ID NO: 176626 - DNA, 17 bp, synthetic construct
  source 1..17: mol_type = other DNA
ggtcggtcttattgtag

SEQ ID NO: 176627 - DNA, 17 bp, synthetic construct
  source 1..17: mol_type = other DNA
cggtcggtcttattgta

SEQ ID NO: 176628 - DNA, 17 bp, synthetic construct
  source 1..17: mol_type = other DNA
tcggtcggtcttattgt

SEQ ID NO: 176629 - DNA, 17 bp, synthetic construct
  source 1..17: mol_type = other DNA
ctcggtcggtcttattg

SEQ ID NO: 176630 - DNA, 17 bp, synthetic construct
  source 1..17: mol_type = other DNA
gctcggtcggtcttatt

SEQ ID NO: 176631 - DNA, 17 bp, synthetic construct
  source 1..17: mol_type = other DNA
ggctcggtcggtcttat

SEQ ID NO: 176632 - DNA, 17 bp, synthetic construct
  source 1..17: mol_type = other DNA
cggctcggtcggtctta

SEQ ID NO: 176633 - DNA, 17 bp, synthetic construct
  source 1..17: mol_type = other DNA
ccggctcggtcggtctt

SEQ ID NO: 176634 - DNA, 17 bp, synthetic construct
  source 1..17: mol_type = other DNA
gccggctcggtcggtct

SEQ ID NO: 176635 - DNA, 17 bp, synthetic construct
  source 1..17: mol_type = other DNA
agccggctcggtcggtc

SEQ ID NO: 176636 - DNA, 17 bp, synthetic construct
  source 1..17: mol_type = other DNA
cagccggctcggtcggt

SEQ ID NO: 176637 - DNA, 17 bp, synthetic construct
  source 1..17: mol_type = other DNA
gcagccggctcggtcgg

SEQ ID NO: 176638 - DNA, 17 bp, synthetic construct
  source 1..17: mol_type = other DNA
ggcagccggctcggtcg

SEQ ID NO: 176639 - DNA, 17 bp, synthetic construct
  source 1..17: mol_type = other DNA
tggcagccggctcggtc

SEQ ID NO: 176640 - DNA, 17 bp, synthetic construct
  source 1..17: mol_type = other DNA
atggcagccggctcggt

SEQ ID NO: 176641 - DNA, 17 bp, synthetic construct
  source 1..17: mol_type = other DNA
aatggcagccggctcgg

SEQ ID NO: 176642 - DNA, 17 bp, synthetic construct
  source 1..17: mol_type = other DNA
aaatggcagccggctcg

SEQ ID NO: 176643 - DNA, 17 bp, synthetic construct
  source 1..17: mol_type = other DNA
gaaatggcagccggctc

SEQ ID NO: 176644 - DNA, 17 bp, synthetic construct
  source 1..17: mol_type = other DNA
agaaatggcagccggct

SEQ ID NO: 176645 - DNA, 17 bp, synthetic construct
  source 1..17: mol_type = other DNA
tagaaatggcagccggc

SEQ ID NO: 176646 - DNA, 17 bp, synthetic construct
  source 1..17: mol_type = other DNA
gtagaaatggcagccgg

SEQ ID NO: 176647 - DNA, 17 bp, synthetic construct
  source 1..17: mol_type = other DNA
cgtagaaatggcagccg

SEQ ID NO: 176648 - DNA, 17 bp, synthetic construct
  source 1..17: mol_type = other DNA
gcgtagaaatggcagcc

SEQ ID NO: 176649 - DNA, 17 bp, synthetic construct
  source 1..17: mol_type = other DNA
tgcgtagaaatggcagc

SEQ ID NO: 176650 - DNA, 17 bp, synthetic construct
  source 1..17: mol_type = other DNA
ctgcgtagaaatggcag

SEQ ID NO: 176651 - DNA, 17 bp, synthetic construct
  source 1..17: mol_type = other DNA
actgcgtagaaatggca

SEQ ID NO: 176652 - DNA, 17 bp, synthetic construct
  source 1..17: mol_type = other DNA
cactgcgtagaaatggc

SEQ ID NO: 176653 - DNA, 17 bp, synthetic construct
  source 1..17: mol_type = other DNA
acactgcgtagaaatgg

SEQ ID NO: 176654 - DNA, 17 bp, synthetic construct
  source 1..17: mol_type = other DNA
cacactgcgtagaaatg

SEQ ID NO: 176655 - DNA, 17 bp, synthetic construct
  source 1..17: mol_type = other DNA
gcacactgcgtagaaat

SEQ ID NO: 176656 - DNA, 17 bp, synthetic construct
  source 1..17: mol_type = other DNA
tgcacactgcgtagaaa

SEQ ID NO: 176657 - DNA, 17 bp, synthetic construct
  source 1..17: mol_type = other DNA
ttgcacactgcgtagaa

SEQ ID NO: 176658 - DNA, 17 bp, synthetic construct
  source 1..17: mol_type = other DNA
attgcacactgcgtaga

SEQ ID NO: 176659 - DNA, 17 bp, synthetic construct
  source 1..17: mol_type = other DNA
gattgcacactgcgtag

SEQ ID NO: 176660 - DNA, 17 bp, synthetic construct
  source 1..17: mol_type = other DNA
tgattgcacactgcgta

SEQ ID NO: 176661 - DNA, 17 bp, synthetic construct
  source 1..17: mol_type = other DNA
ctgattgcacactgcgt

SEQ ID NO: 176662 - DNA, 17 bp, synthetic construct
  source 1..17: mol_type = other DNA
gctgattgcacactgcg

SEQ ID NO: 176663 - DNA, 17 bp, synthetic construct
  source 1..17: mol_type = other DNA
tgctgattgcacactgc

SEQ ID NO: 176664 - DNA, 17 bp, synthetic construct
  source 1..17: mol_type = other DNA
gtgctgattgcacactg

SEQ ID NO: 176665 - DNA, 17 bp, synthetic construct
  source 1..17: mol_type = other DNA
agtgctgattgcacact

SEQ ID NO: 176666 - DNA, 17 bp, synthetic construct
  source 1..17: mol_type = other DNA
cagtgctgattgcacac

SEQ ID NO: 176667 - DNA, 17 bp, synthetic construct
  source 1..17: mol_type = other DNA
acagtgctgattgcaca

SEQ ID NO: 176668 - DNA, 17 bp, synthetic construct
  source 1..17: mol_type = other DNA
cacagtgctgattgcac

SEQ ID NO: 176669 - DNA, 17 bp, synthetic construct
  source 1..17: mol_type = other DNA
tcacagtgctgattgca

SEQ ID NO: 176670 - DNA, 17 bp, synthetic construct
  source 1..17: mol_type = other DNA
gtcacagtgctgattgc

SEQ ID NO: 176671 - DNA, 17 bp, synthetic construct
  source 1..17: mol_type = other DNA
tgtcacagtgctgattg

SEQ ID NO: 176672 - DNA, 17 bp, synthetic construct
  source 1..17: mol_type = other DNA
atgtcacagtgctgatt

SEQ ID NO: 176673 - DNA, 17 bp, synthetic construct
  source 1..17: mol_type = other DNA
aatgtcacagtgctgat

SEQ ID NO: 176674 - DNA, 17 bp, synthetic construct
  source 1..17: mol_type = other DNA
caatgtcacagtgctga

SEQ ID NO: 176675 - DNA, 17 bp, synthetic construct
  source 1..17: mol_type = other DNA
tcaatgtcacagtgctg

SEQ ID NO: 176676 - DNA, 17 bp, synthetic construct
  source 1..17: mol_type = other DNA
gtcaatgtcacagtgct

SEQ ID NO: 176677 - DNA, 17 bp, synthetic construct
  source 1..17: mol_type = other DNA
ggtcaatgtcacagtgc

SEQ ID NO: 176678 - DNA, 17 bp, synthetic construct
  source 1..17: mol_type = other DNA
cggtcaatgtcacagtg

SEQ ID NO: 176679 - DNA, 17 bp, synthetic construct
  source 1..17: mol_type = other DNA
gcggtcaatgtcacagt

SEQ ID NO: 176680 - DNA, 17 bp, synthetic construct
  source 1..17: mol_type = other DNA
agcggtcaatgtcacag

SEQ ID NO: 176681 - DNA, 17 bp, synthetic construct
  source 1..17: mol_type = other DNA
aagcggtcaatgtcaca

SEQ ID NO: 176682 - DNA, 17 bp, synthetic construct
  source 1..17: mol_type = other DNA
gaagcggtcaatgtcac

SEQ ID NO: 176683 - DNA, 17 bp, synthetic construct
  source 1..17: mol_type = other DNA
ggaagcggtcaatgtca

SEQ ID NO: 176684 - DNA, 17 bp, synthetic construct
  source 1..17: mol_type = other DNA
tggaagcggtcaatgtc

SEQ ID NO: 176685 - DNA, 17 bp, synthetic construct
  source 1..17: mol_type = other DNA
ctggaagcggtcaatgt

SEQ ID NO: 176686 - DNA, 17 bp, synthetic construct
  source 1..17: mol_type = other DNA
cctggaagcggtcaatg

SEQ ID NO: 176687 - DNA, 17 bp, synthetic construct
  source 1..17: mol_type = other DNA
ccctggaagcggtcaat

SEQ ID NO: 176688 - DNA, 17 bp, synthetic construct
  source 1..17: mol_type = other DNA
gccctggaagcggtcaa

SEQ ID NO: 176689 - DNA, 17 bp, synthetic construct
  source 1..17: mol_type = other DNA
cgccctggaagcggtca

SEQ ID NO: 176690 - DNA, 17 bp, synthetic construct
  source 1..17: mol_type = other DNA
gcgccctggaagcggtc

SEQ ID NO: 176691 - DNA, 17 bp, synthetic construct
  source 1..17: mol_type = other DNA
ggcgccctggaagcggt

SEQ ID NO: 176692 - DNA, 17 bp, synthetic construct
  source 1..17: mol_type = other DNA
aggcgccctggaagcgg

SEQ ID NO: 176693 - DNA, 17 bp, synthetic construct
  source 1..17: mol_type = other DNA
caggcgccctggaagcg

SEQ ID NO: 176694 - DNA, 17 bp, synthetic construct
  source 1..17: mol_type = other DNA
acaggcgccctggaagc

SEQ ID NO: 176695 - DNA, 17 bp, synthetic construct
  source 1..17: mol_type = other DNA
gacaggcgccctggaag

SEQ ID NO: 176696 - DNA, 17 bp, synthetic construct
  source 1..17: mol_type = other DNA
ggacaggcgccctggaa

SEQ ID NO: 176697 - DNA, 17 bp, synthetic construct
  source 1..17: mol_type = other DNA
gggacaggcgccctgga

SEQ ID NO: 176698 - DNA, 17 bp, synthetic construct
  source 1..17: mol_type = other DNA
tgggacaggcgccctgg

SEQ ID NO: 176699 - DNA, 17 bp, synthetic construct
  source 1..17: mol_type = other DNA
gtgggacaggcgccctg

SEQ ID NO: 176700 - DNA, 17 bp, synthetic construct
  source 1..17: mol_type = other DNA
ggtgggacaggcgccct

SEQ ID NO: 176701 - DNA, 17 bp, synthetic construct
  source 1..17: mol_type = other DNA
aggtgggacaggcgccc

SEQ ID NO: 176702 - DNA, 17 bp, synthetic construct
  source 1..17: mol_type = other DNA
gaggtgggacaggcgcc

SEQ ID NO: 176703 - DNA, 17 bp, synthetic construct
  source 1..17: mol_type = other DNA
ggaggtgggacaggcgc

SEQ ID NO: 176704 - DNA, 17 bp, synthetic construct
  source 1..17: mol_type = other DNA
gggaggtgggacaggcg

SEQ ID NO: 176705 - DNA, 17 bp, synthetic construct
  source 1..17: mol_type = other DNA
ggggaggtgggacaggc

SEQ ID NO: 176706 - DNA, 17 bp, synthetic construct
  source 1..17: mol_type = other DNA
tggggaggtgggacagg

SEQ ID NO: 176707 - DNA, 17 bp, synthetic construct
  source 1..17: mol_type = other DNA
gtggggaggtgggacag

SEQ ID NO: 176708 - DNA, 17 bp, synthetic construct
  source 1..17: mol_type = other DNA
ggtggggaggtgggaca

SEQ ID NO: 176709 - DNA, 17 bp, synthetic construct
  source 1..17: mol_type = other DNA
cggtggggaggtgggac

SEQ ID NO: 176710 - DNA, 17 bp, synthetic construct
  source 1..17: mol_type = other DNA
gcggtggggaggtggga

SEQ ID NO: 176711 - DNA, 17 bp, synthetic construct
  source 1..17: mol_type = other DNA
ggcggtggggaggtggg

SEQ ID NO: 176712 - DNA, 17 bp, synthetic construct
  source 1..17: mol_type = other DNA
tggcggtggggaggtgg

SEQ ID NO: 176713 - DNA, 17 bp, synthetic construct
  source 1..17: mol_type = other DNA
ctggcggtggggaggtg

SEQ ID NO: 176714 - DNA, 17 bp, synthetic construct
  source 1..17: mol_type = other DNA
actggcggtggggaggt

SEQ ID NO: 176715 - DNA, 17 bp, synthetic construct
  source 1..17: mol_type = other DNA
cactggcggtggggagg

SEQ ID NO: 176716 - DNA, 17 bp, synthetic construct
  source 1..17: mol_type = other DNA
acactggcggtggggag

SEQ ID NO: 176717 - DNA, 17 bp, synthetic construct
  source 1..17: mol_type = other DNA
gacactggcggtgggga

SEQ ID NO: 176718 - DNA, 17 bp, synthetic construct
  source 1..17: mol_type = other DNA
ggacactggcggtgggg

SEQ ID NO: 176719 - DNA, 17 bp, synthetic construct
  source 1..17: mol_type = other DNA
aggacactggcggtggg

SEQ ID NO: 176720 - DNA, 17 bp, synthetic construct
  source 1..17: mol_type = other DNA
gaggacactggcggtgg

SEQ ID NO: 176721 - DNA, 17 bp, synthetic construct
  source 1..17: mol_type = other DNA
ggaggacactggcggtg

SEQ ID NO: 176722 - DNA, 17 bp, synthetic construct
  source 1..17: mol_type = other DNA
cggaggacactggcggt

SEQ ID NO: 176723 - DNA, 17 bp, synthetic construct
  source 1..17: mol_type = other DNA
gcggaggacactggcgg

SEQ ID NO: 176724 - DNA, 17 bp, synthetic construct
  source 1..17: mol_type = other DNA
ggcggaggacactggcg

SEQ ID NO: 176725 - DNA, 17 bp, synthetic construct
  source 1..17: mol_type = other DNA
gggcggaggacactggc

SEQ ID NO: 176726 - DNA, 17 bp, synthetic construct
  source 1..17: mol_type = other DNA
ggggcggaggacactgg

SEQ ID NO: 176727 - DNA, 17 bp, synthetic construct
  source 1..17: mol_type = other DNA
cggggcggaggacactg

SEQ ID NO: 176728 - DNA, 17 bp, synthetic construct
  source 1..17: mol_type = other DNA
gcggggcggaggacact

SEQ ID NO: 176729 - DNA, 17 bp, synthetic construct
  source 1..17: mol_type = other DNA
agcggggcggaggacac

SEQ ID NO: 176730 - DNA, 17 bp, synthetic construct
  source 1..17: mol_type = other DNA
cagcggggcggaggaca

SEQ ID NO: 176731 - DNA, 17 bp, synthetic construct
  source 1..17: mol_type = other DNA
acagcggggcggaggac

SEQ ID NO: 176732 - DNA, 17 bp, synthetic construct
  source 1..17: mol_type = other DNA
gacagcggggcggagga

SEQ ID NO: 176733 - DNA, 17 bp, synthetic construct
  source 1..17: mol_type = other DNA
ggacagcggggcggagg

SEQ ID NO: 176734 - DNA, 17 bp, synthetic construct
  source 1..17: mol_type = other DNA
aggacagcggggcggag

SEQ ID NO: 176735 - DNA, 17 bp, synthetic construct
  source 1..17: mol_type = other DNA
gaggacagcggggcgga

SEQ ID NO: 176736 - DNA, 17 bp, synthetic construct
  source 1..17: mol_type = other DNA
cgaggacagcggggcgg

SEQ ID NO: 176737 - DNA, 17 bp, synthetic construct
  source 1..17: mol_type = other DNA
gcgaggacagcggggcg

SEQ ID NO: 176738 - DNA, 17 bp, synthetic construct
  source 1..17: mol_type = other DNA
ggcgaggacagcggggc

SEQ ID NO: 176739 - DNA, 17 bp, synthetic construct
  source 1..17: mol_type = other DNA
gggcgaggacagcgggg

SEQ ID NO: 176740 - DNA, 17 bp, synthetic construct
  source 1..17: mol_type = other DNA
agggcgaggacagcggg

SEQ ID NO: 176741 - DNA, 17 bp, synthetic construct
  source 1..17: mol_type = other DNA
gagggcgaggacagcgg

SEQ ID NO: 176742 - DNA, 17 bp, synthetic construct
  source 1..17: mol_type = other DNA
ggagggcgaggacagcg

SEQ ID NO: 176743 - DNA, 17 bp, synthetic construct
  source 1..17: mol_type = other DNA
gggagggcgaggacagc

SEQ ID NO: 176744 - DNA, 17 bp, synthetic construct
  source 1..17: mol_type = other DNA
ggggagggcgaggacag

SEQ ID NO: 176745 - DNA, 17 bp, synthetic construct
  source 1..17: mol_type = other DNA
aggggagggcgaggaca

SEQ ID NO: 176746 - DNA, 17 bp, synthetic construct
  source 1..17: mol_type = other DNA
caggggagggcgaggac

SEQ ID NO: 176747 - DNA, 17 bp, synthetic construct
  source 1..17: mol_type = other DNA
gcaggggagggcgagga

SEQ ID NO: 176748 - DNA, 17 bp, synthetic construct
  source 1..17: mol_type = other DNA
ggcaggggagggcgagg

SEQ ID NO: 176749 - DNA, 17 bp, synthetic construct
  source 1..17: mol_type = other DNA
gggcaggggagggcgag

SEQ ID NO: 176750 - DNA, 17 bp, synthetic construct
  source 1..17: mol_type = other DNA
ggggcaggggagggcga

SEQ ID NO: 176751 - DNA, 17 bp, synthetic construct
  source 1..17: mol_type = other DNA
aggggcaggggagggcg

SEQ ID NO: 176752 - DNA, 17 bp, synthetic construct
  source 1..17: mol_type = other DNA
caggggcaggggagggc

SEQ ID NO: 176753 - DNA, 17 bp, synthetic construct
  source 1..17: mol_type = other DNA
ccaggggcaggggaggg

SEQ ID NO: 176754 - DNA, 17 bp, synthetic construct
  source 1..17: mol_type = other DNA
gccaggggcaggggagg

SEQ ID NO: 176755 - DNA, 17 bp, synthetic construct
  source 1..17: mol_type = other DNA
agccaggggcaggggag

SEQ ID NO: 176756 - DNA, 17 bp, synthetic construct
  source 1..17: mol_type = other DNA
cagccaggggcagggga

SEQ ID NO: 176757 - DNA, 17 bp, synthetic construct
  source 1..17: mol_type = other DNA
acagccaggggcagggg

SEQ ID NO: 176758 - DNA, 17 bp, synthetic construct
  source 1..17: mol_type = other DNA
cacagccaggggcaggg

SEQ ID NO: 176759 - DNA, 17 bp, synthetic construct
  source 1..17: mol_type = other DNA
tcacagccaggggcagg

SEQ ID NO: 176760 - DNA, 17 bp, synthetic construct
  source 1..17: mol_type = other DNA
gtcacagccaggggcag

SEQ ID NO: 176761 - DNA, 17 bp, synthetic construct
  source 1..17: mol_type = other DNA
tgtcacagccaggggca

SEQ ID NO: 176762 - DNA, 17 bp, synthetic construct
  source 1..17: mol_type = other DNA
ttgtcacagccaggggc

SEQ ID NO: 176763 - DNA, 17 bp, synthetic construct
  source 1..17: mol_type = other DNA
attgtcacagccagggg

SEQ ID NO: 176764 - DNA, 17 bp, synthetic construct
  source 1..17: mol_type = other DNA
cattgtcacagccaggg

SEQ ID NO: 176765 - DNA, 17 bp, synthetic construct
  source 1..17: mol_type = other DNA
gcattgtcacagccagg

SEQ ID NO: 176766 - DNA, 17 bp, synthetic construct
  source 1..17: mol_type = other DNA
ggcattgtcacagccag

SEQ ID NO: 176767 - DNA, 17 bp, synthetic construct
  source 1..17: mol_type = other DNA
tggcattgtcacagcca

SEQ ID NO: 176768 - DNA, 17 bp, synthetic construct
  source 1..17: mol_type = other DNA
atggcattgtcacagcc

SEQ ID NO: 176769 - DNA, 17 bp, synthetic construct
  source 1..17: mol_type = other DNA
gatggcattgtcacagc

SEQ ID NO: 176770 - DNA, 17 bp, synthetic construct
  source 1..17: mol_type = other DNA
ggatggcattgtcacag

SEQ ID NO: 176771 - DNA, 17 bp, synthetic construct
  source 1..17: mol_type = other DNA
gggatggcattgtcaca

SEQ ID NO: 176772 - DNA, 17 bp, synthetic construct
  source 1..17: mol_type = other DNA
agggatggcattgtcac

SEQ ID NO: 176773 - DNA, 17 bp, synthetic construct
  source 1..17: mol_type = other DNA
gagggatggcattgtca

SEQ ID NO: 176774 - DNA, 17 bp, synthetic construct
  source 1..17: mol_type = other DNA
agagggatggcattgtc

SEQ ID NO: 176775 - DNA, 17 bp, synthetic construct
  source 1..17: mol_type = other DNA
gagagggatggcattgt

SEQ ID NO: 176776 - DNA, 17 bp, synthetic construct
  source 1..17: mol_type = other DNA
ggagagggatggcattg

SEQ ID NO: 176777 - DNA, 17 bp, synthetic construct
  source 1..17: mol_type = other DNA
cggagagggatggcatt

SEQ ID NO: 176778 - DNA, 17 bp, synthetic construct
  source 1..17: mol_type = other DNA
ccggagagggatggcat

SEQ ID NO: 176779 - DNA, 17 bp, synthetic construct
  source 1..17: mol_type = other DNA
gccggagagggatggca

SEQ ID NO: 176780 - DNA, 17 bp, synthetic construct
  source 1..17: mol_type = other DNA
tgccggagagggatggc

SEQ ID NO: 176781 - DNA, 17 bp, synthetic construct
  source 1..17: mol_type = other DNA
ctgccggagagggatgg

SEQ ID NO: 176782 - DNA, 17 bp, synthetic construct
  source 1..17: mol_type = other DNA
cctgccggagagggatg

SEQ ID NO: 176783 - DNA, 17 bp, synthetic construct
  source 1..17: mol_type = other DNA
acctgccggagagggat

SEQ ID NO: 176784 - DNA, 17 bp, synthetic construct
  source 1..17: mol_type = other DNA
cacctgccggagaggga

SEQ ID NO: 176785 - DNA, 17 bp, synthetic construct
  source 1..17: mol_type = other DNA
ccacctgccggagaggg

SEQ ID NO: 176786 - DNA, 17 bp, synthetic construct
  source 1..17: mol_type = other DNA
cccacctgccggagagg

SEQ ID NO: 176787 - DNA, 17 bp, synthetic construct
  source 1..17: mol_type = other DNA
gcccacctgccggagag

SEQ ID NO: 176788 - DNA, 17 bp, synthetic construct
  source 1..17: mol_type = other DNA
ggcccacctgccggaga

SEQ ID NO: 176789 - DNA, 17 bp, synthetic construct
  source 1..17: mol_type = other DNA
gggcccacctgccggag

SEQ ID NO: 176790 - DNA, 17 bp, synthetic construct
  source 1..17: mol_type = other DNA
ggggcccacctgccgga

SEQ ID NO: 176791 - DNA, 17 bp, synthetic construct
  source 1..17: mol_type = other DNA
cggggcccacctgccgg

SEQ ID NO: 176792 - DNA, 17 bp, synthetic construct
  source 1..17: mol_type = other DNA
gcggggcccacctgccg

SEQ ID NO: 176793 - DNA, 17 bp, synthetic construct
  source 1..17: mol_type = other DNA
ggcggggcccacctgcc

SEQ ID NO: 176794 - DNA, 17 bp, synthetic construct
  source 1..17: mol_type = other DNA
aggcggggcccacctgc

SEQ ID NO: 176795 - DNA, 17 bp, synthetic construct
  source 1..17: mol_type = other DNA
caggcggggcccacctg

SEQ ID NO: 176796 - DNA, 17 bp, synthetic construct
  source 1..17: mol_type = other DNA
gcaggcggggcccacct

SEQ ID NO: 176797 - DNA, 17 bp, synthetic construct
  source 1..17: mol_type = other DNA
ggcaggcggggcccacc

SEQ ID NO: 176798 - DNA, 17 bp, synthetic construct
  source 1..17: mol_type = other DNA
gggcaggcggggcccac

SEQ ID NO: 176799 - DNA, 17 bp, synthetic construct
  source 1..17: mol_type = other DNA
agggcaggcggggccca

SEQ ID NO: 176800 - DNA, 17 bp, synthetic construct
  source 1..17: mol_type = other DNA
gagggcaggcggggccc

SEQ ID NO: 176801 - DNA, 17 bp, synthetic construct
  source 1..17: mol_type = other DNA
ggagggcaggcggggcc

SEQ ID NO: 176802 - DNA, 17 bp, synthetic construct
  source 1..17: mol_type = other DNA
tggagggcaggcggggc

SEQ ID NO: 176803 - DNA, 17 bp, synthetic construct
  source 1..17: mol_type = other DNA
gtggagggcaggcgggg

SEQ ID NO: 176804 - DNA, 17 bp, synthetic construct
  source 1..17: mol_type = other DNA
ggtggagggcaggcggg

SEQ ID NO: 176805 - DNA, 17 bp, synthetic construct
  source 1..17: mol_type = other DNA
aggtggagggcaggcgg

SEQ ID NO: 176806 - DNA, 17 bp, synthetic construct
  source 1..17: mol_type = other DNA
gaggtggagggcaggcg

SEQ ID NO: 176807 - DNA, 17 bp, synthetic construct
  source 1..17: mol_type = other DNA
ggaggtggagggcaggc

SEQ ID NO: 176808 - DNA, 17 bp, synthetic construct
  source 1..17: mol_type = other DNA
gggaggtggagggcagg

SEQ ID NO: 176809 - DNA, 17 bp, synthetic construct
  source 1..17: mol_type = other DNA
cgggaggtggagggcag

SEQ ID NO: 176810 - DNA, 17 bp, synthetic construct
  source 1..17: mol_type = other DNA
acgggaggtggagggca

SEQ ID NO: 176811 - DNA, 17 bp, synthetic construct
  source 1..17: mol_type = other DNA
cacgggaggtggagggc

SEQ ID NO: 176812 - DNA, 17 bp, synthetic construct
  source 1..17: mol_type = other DNA
gcacgggaggtggaggg

SEQ ID NO: 176813 - DNA, 17 bp, synthetic construct
  source 1..17: mol_type = other DNA
agcacgggaggtggagg

SEQ ID NO: 176814 - DNA, 17 bp, synthetic construct
  source 1..17: mol_type = other DNA
cagcacgggaggtggag

SEQ ID NO: 176815 - DNA, 17 bp, synthetic construct
  source 1..17: mol_type = other DNA
gcagcacgggaggtgga

SEQ ID NO: 176816 - DNA, 17 bp, synthetic construct
  source 1..17: mol_type = other DNA
cgcagcacgggaggtgg

SEQ ID NO: 176817 - DNA, 17 bp, synthetic construct
  source 1..17: mol_type = other DNA
acgcagcacgggaggtg

SEQ ID NO: 176818 - DNA, 17 bp, synthetic construct
  source 1..17: mol_type = other DNA
cacgcagcacgggaggt

SEQ ID NO: 176819 - DNA, 17 bp, synthetic construct
  source 1..17: mol_type = other DNA
gcacgcagcacgggagg

SEQ ID NO: 176820 - DNA, 17 bp, synthetic construct
  source 1..17: mol_type = other DNA
tgcacgcagcacgggag

SEQ ID NO: 176821 - DNA, 17 bp, synthetic construct
  source 1..17: mol_type = other DNA
gtgcacgcagcacggga

SEQ ID NO: 176822 - DNA, 17 bp, synthetic construct
  source 1..17: mol_type = other DNA
tgtgcacgcagcacggg

SEQ ID NO: 176823 - DNA, 17 bp, synthetic construct
  source 1..17: mol_type = other DNA
gtgtgcacgcagcacgg

SEQ ID NO: 176824 - DNA, 17 bp, synthetic construct
  source 1..17: mol_type = other DNA
cgtgtgcacgcagcacg

SEQ ID NO: 176825 - DNA, 17 bp, synthetic construct
  source 1..17: mol_type = other DNA
ccgtgtgcacgcagcac

SEQ ID NO: 176826 - DNA, 17 bp, synthetic construct
  source 1..17: mol_type = other DNA
accgtgtgcacgcagca

SEQ ID NO: 176827 - DNA, 17 bp, synthetic construct
  source 1..17: mol_type = other DNA
gaccgtgtgcacgcagc

SEQ ID NO: 176828 - DNA, 17 bp, synthetic construct
  source 1..17: mol_type = other DNA
agaccgtgtgcacgcag

SEQ ID NO: 176829 - DNA, 17 bp, synthetic construct
  source 1..17: mol_type = other DNA
cagaccgtgtgcacgca

SEQ ID NO: 176830 - DNA, 17 bp, synthetic construct
  source 1..17: mol_type = other DNA
ccagaccgtgtgcacgc

SEQ ID NO: 176831 - DNA, 17 bp, synthetic construct
  source 1..17: mol_type = other DNA
cccagaccgtgtgcacg

SEQ ID NO: 176832 - DNA, 17 bp, synthetic construct
  source 1..17: mol_type = other DNA
acccagaccgtgtgcac

SEQ ID NO: 176833 - DNA, 17 bp, synthetic construct
  source 1..17: mol_type = other DNA
aacccagaccgtgtgca

SEQ ID NO: 176834 - DNA, 17 bp, synthetic construct
  source 1..17: mol_type = other DNA
caacccagaccgtgtgc

SEQ ID NO: 176835 - DNA, 17 bp, synthetic construct
  source 1..17: mol_type = other DNA
ccaacccagaccgtgtg

SEQ ID NO: 176836 - DNA, 17 bp, synthetic construct
  source 1..17: mol_type = other DNA
gccaacccagaccgtgt

SEQ ID NO: 176837 - DNA, 17 bp, synthetic construct
  source 1..17: mol_type = other DNA
agccaacccagaccgtg

SEQ ID NO: 176838 - DNA, 17 bp, synthetic construct
  source 1..17: mol_type = other DNA
cagccaacccagaccgt

SEQ ID NO: 176839 - DNA, 17 bp, synthetic construct
  source 1..17: mol_type = other DNA
ccagccaacccagaccg

SEQ ID NO: 176840 - DNA, 17 bp, synthetic construct
  source 1..17: mol_type = other DNA
tccagccaacccagacc

SEQ ID NO: 176841 - DNA, 17 bp, synthetic construct
  source 1..17: mol_type = other DNA
ctccagccaacccagac

SEQ ID NO: 176842 - DNA, 17 bp, synthetic construct
  source 1..17: mol_type = other DNA
cctccagccaacccaga

SEQ ID NO: 176843 - DNA, 17 bp, synthetic construct
  source 1..17: mol_type = other DNA
gcctccagccaacccag

SEQ ID NO: 176844 - DNA, 17 bp, synthetic construct
  source 1..17: mol_type = other DNA
tgcctccagccaaccca

SEQ ID NO: 176845 - DNA, 17 bp, synthetic construct
  source 1..17: mol_type = other DNA
gtgcctccagccaaccc

SEQ ID NO: 176846 - DNA, 17 bp, synthetic construct
  source 1..17: mol_type = other DNA
tgtgcctccagccaacc

SEQ ID NO: 176847 - DNA, 17 bp, synthetic construct
  source 1..17: mol_type = other DNA
ctgtgcctccagccaac

SEQ ID NO: 176848 - DNA, 17 bp, synthetic construct
  source 1..17: mol_type = other DNA
gctgtgcctccagccaa

SEQ ID NO: 176849 - DNA, 17 bp, synthetic construct
  source 1..17: mol_type = other DNA
ggctgtgcctccagcca

SEQ ID NO: 176850 - DNA, 17 bp, synthetic construct
  source 1..17: mol_type = other DNA
tggctgtgcctccagcc

SEQ ID NO: 176851 - DNA, 17 bp, synthetic construct
  source 1..17: mol_type = other DNA
gtggctgtgcctccagc

SEQ ID NO: 176852 - DNA, 17 bp, synthetic construct
  source 1..17: mol_type = other DNA
tgtggctgtgcctccag

SEQ ID NO: 176853 - DNA, 17 bp, synthetic construct
  source 1..17: mol_type = other DNA
ctgtggctgtgcctcca

SEQ ID NO: 176854 - DNA, 17 bp, synthetic construct
  source 1..17: mol_type = other DNA
actgtggctgtgcctcc

SEQ ID NO: 176855 - DNA, 17 bp, synthetic construct
  source 1..17: mol_type = other DNA
gactgtggctgtgcctc

SEQ ID NO: 176856 - DNA, 17 bp, synthetic construct
  source 1..17: mol_type = other DNA
ggactgtggctgtgcct

SEQ ID NO: 176857 - DNA, 17 bp, synthetic construct
  source 1..17: mol_type = other DNA
tggactgtggctgtgcc

SEQ ID NO: 176858 - DNA, 17 bp, synthetic construct
  source 1..17: mol_type = other DNA
ctggactgtggctgtgc

SEQ ID NO: 176859 - DNA, 17 bp, synthetic construct
  source 1..17: mol_type = other DNA
gctggactgtggctgtg

SEQ ID NO: 176860 - DNA, 17 bp, synthetic construct
  source 1..17: mol_type = other DNA
agctggactgtggctgt

SEQ ID NO: 176861 - DNA, 17 bp, synthetic construct
  source 1..17: mol_type = other DNA
gagctggactgtggctg

SEQ ID NO: 176862 - DNA, 17 bp, synthetic construct
  source 1..17: mol_type = other DNA
ggagctggactgtggct

SEQ ID NO: 176863 - DNA, 17 bp, synthetic construct
  source 1..17: mol_type = other DNA
gggagctggactgtggc

SEQ ID NO: 176864 - DNA, 17 bp, synthetic construct
  source 1..17: mol_type = other DNA
cgggagctggactgtgg

SEQ ID NO: 176865 - DNA, 17 bp, synthetic construct
  source 1..17: mol_type = other DNA
tcgggagctggactgtg

SEQ ID NO: 176866 - DNA, 17 bp, synthetic construct
  source 1..17: mol_type = other DNA
ctcgggagctggactgt

SEQ ID NO: 176867 - DNA, 17 bp, synthetic construct
  source 1..17: mol_type = other DNA
cctcgggagctggactg

SEQ ID NO: 176868 - DNA, 17 bp, synthetic construct
  source 1..17: mol_type = other DNA
gcctcgggagctggact

SEQ ID NO: 176869 - DNA, 17 bp, synthetic construct
  source 1..17: mol_type = other DNA
ggcctcgggagctggac

SEQ ID NO: 176870 - DNA, 17 bp, synthetic construct
  source 1..17: mol_type = other DNA
gggcctcgggagctgga

SEQ ID NO: 176871 - DNA, 17 bp, synthetic construct
  source 1..17: mol_type = other DNA
cgggcctcgggagctgg

SEQ ID NO: 176872 - DNA, 17 bp, synthetic construct
  source 1..17: mol_type = other DNA
acgggcctcgggagctg

SEQ ID NO: 176873 - DNA, 17 bp, synthetic construct
  source 1..17: mol_type = other DNA
gacgggcctcgggagct

SEQ ID NO: 176874 - DNA, 17 bp, synthetic construct
  source 1..17: mol_type = other DNA
agacgggcctcgggagc

SEQ ID NO: 176875 - DNA, 17 bp, synthetic construct
  source 1..17: mol_type = other DNA
gagacgggcctcgggag

SEQ ID NO: 176876 - DNA, 17 bp, synthetic construct
  source 1..17: mol_type = other DNA
tgagacgggcctcggga

SEQ ID NO: 176877 - DNA, 17 bp, synthetic construct
  source 1..17: mol_type = other DNA
ctgagacgggcctcggg

SEQ ID NO: 176878 - DNA, 17 bp, synthetic construct
  source 1..17: mol_type = other DNA
actgagacgggcctcgg

SEQ ID NO: 176879 - DNA, 17 bp, synthetic construct
  source 1..17: mol_type = other DNA
cactgagacgggcctcg

SEQ ID NO: 176880 - DNA, 17 bp, synthetic construct
  source 1..17: mol_type = other DNA
tcactgagacgggcctc

SEQ ID NO: 176881 - DNA, 17 bp, synthetic construct
  source 1..17: mol_type = other DNA
gtcactgagacgggcct

SEQ ID NO: 176882 - DNA, 17 bp, synthetic construct
  source 1..17: mol_type = other DNA
ggtcactgagacgggcc

SEQ ID NO: 176883 - DNA, 17 bp, synthetic construct
  source 1..17: mol_type = other DNA
gggtcactgagacgggc

SEQ ID NO: 176884 - DNA, 17 bp, synthetic construct
  source 1..17: mol_type = other DNA
ggggtcactgagacggg

SEQ ID NO: 176885 - DNA, 17 bp, synthetic construct
  source 1..17: mol_type = other DNA
cggggtcactgagacgg

SEQ ID NO: 176886 - DNA, 17 bp, synthetic construct
  source 1..17: mol_type = other DNA
gcggggtcactgagacg

SEQ ID NO: 176887 - DNA, 17 bp, synthetic construct
  source 1..17: mol_type = other DNA
ggcggggtcactgagac

SEQ ID NO: 176888 - DNA, 17 bp, synthetic construct
  source 1..17: mol_type = other DNA
cggcggggtcactgaga

SEQ ID NO: 176889 - DNA, 17 bp, synthetic construct
  source 1..17: mol_type = other DNA
gcggcggggtcactgag

SEQ ID NO: 176890 - DNA, 17 bp, synthetic construct
  source 1..17: mol_type = other DNA
ggcggcggggtcactga

SEQ ID NO: 176891 - DNA, 17 bp, synthetic construct
  source 1..17: mol_type = other DNA
tggcggcggggtcactg

SEQ ID NO: 176892 - DNA, 17 bp, synthetic construct
  source 1..17: mol_type = other DNA
ctggcggcggggtcact

SEQ ID NO: 176893 - DNA, 17 bp, synthetic construct
  source 1..17: mol_type = other DNA
actggcggcggggtcac

SEQ ID NO: 176894 - DNA, 17 bp, synthetic construct
  source 1..17: mol_type = other DNA
tactggcggcggggtca

SEQ ID NO: 176895 - DNA, 17 bp, synthetic construct
  source 1..17: mol_type = other DNA
atactggcggcggggtc

SEQ ID NO: 176896 - DNA, 17 bp, synthetic construct
  source 1..17: mol_type = other DNA
gatactggcggcggggt

SEQ ID NO: 176897 - DNA, 17 bp, synthetic construct
  source 1..17: mol_type = other DNA
agatactggcggcgggg

SEQ ID NO: 176898 - DNA, 17 bp, synthetic construct
  source 1..17: mol_type = other DNA
gagatactggcggcggg

SEQ ID NO: 176899 - DNA, 17 bp, synthetic construct
  source 1..17: mol_type = other DNA
ggagatactggcggcgg

SEQ ID NO: 176900 - DNA, 17 bp, synthetic construct
  source 1..17: mol_type = other DNA
tggagatactggcggcg

SEQ ID NO: 176901 - DNA, 17 bp, synthetic construct
  source 1..17: mol_type = other DNA
ctggagatactggcggc

SEQ ID NO: 176902 - DNA, 17 bp, synthetic construct
  source 1..17: mol_type = other DNA
actggagatactggcgg

SEQ ID NO: 176903 - DNA, 17 bp, synthetic construct
  source 1..17: mol_type = other DNA
aactggagatactggcg

SEQ ID NO: 176904 - DNA, 17 bp, synthetic construct
  source 1..17: mol_type = other DNA
caactggagatactggc

SEQ ID NO: 176905 - DNA, 17 bp, synthetic construct
  source 1..17: mol_type = other DNA
ccaactggagatactgg

SEQ ID NO: 176906 - DNA, 17 bp, synthetic construct
  source 1..17: mol_type = other DNA
tccaactggagatactg

SEQ ID NO: 176907 - DNA, 17 bp, synthetic construct
  source 1..17: mol_type = other DNA
ctccaactggagatact

SEQ ID NO: 176908 - DNA, 17 bp, synthetic construct
  source 1..17: mol_type = other DNA
cctccaactggagatac

SEQ ID NO: 176909 - DNA, 17 bp, synthetic construct
  source 1..17: mol_type = other DNA
tcctccaactggagata

SEQ ID NO: 176910 - DNA, 17 bp, synthetic construct
  source 1..17: mol_type = other DNA
ctcctccaactggagat

SEQ ID NO: 176911 - DNA, 17 bp, synthetic construct
  source 1..17: mol_type = other DNA
cctcctccaactggaga

SEQ ID NO: 176912 - DNA, 17 bp, synthetic construct
  source 1..17: mol_type = other DNA
gcctcctccaactggag

SEQ ID NO: 176913 - DNA, 17 bp, synthetic construct
  source 1..17: mol_type = other DNA
tgcctcctccaactgga

SEQ ID NO: 176914 - DNA, 17 bp, synthetic construct
  source 1..17: mol_type = other DNA
gtgcctcctccaactgg

SEQ ID NO: 176915 - DNA, 17 bp, synthetic construct
  source 1..17: mol_type = other DNA
tgtgcctcctccaactg

SEQ ID NO: 176916 - DNA, 17 bp, synthetic construct
  source 1..17: mol_type = other DNA
gtgtgcctcctccaact

SEQ ID NO: 176917 - DNA, 17 bp, synthetic construct
  source 1..17: mol_type = other DNA
tgtgtgcctcctccaac

SEQ ID NO: 176918 - DNA, 17 bp, synthetic construct
  source 1..17: mol_type = other DNA
ctgtgtgcctcctccaa

SEQ ID NO: 176919 - DNA, 17 bp, synthetic construct
  source 1..17: mol_type = other DNA
cctgtgtgcctcctcca

SEQ ID NO: 176920 - DNA, 17 bp, synthetic construct
  source 1..17: mol_type = other DNA
ccctgtgtgcctcctcc

SEQ ID NO: 176921 - DNA, 17 bp, synthetic construct
  source 1..17: mol_type = other DNA
gccctgtgtgcctcctc

SEQ ID NO: 176922 - DNA, 17 bp, synthetic construct
  source 1..17: mol_type = other DNA
ggccctgtgtgcctcct

SEQ ID NO: 176923 - DNA, 17 bp, synthetic construct
  source 1..17: mol_type = other DNA
aggccctgtgtgcctcc

SEQ ID NO: 176924 - DNA, 17 bp, synthetic construct
  source 1..17: mol_type = other DNA
taggccctgtgtgcctc

SEQ ID NO: 176925 - DNA, 17 bp, synthetic construct
  source 1..17: mol_type = other DNA
ctaggccctgtgtgcct

SEQ ID NO: 176926 - DNA, 17 bp, synthetic construct
  source 1..17: mol_type = other DNA
cctaggccctgtgtgcc

SEQ ID NO: 176927 - DNA, 17 bp, synthetic construct
  source 1..17: mol_type = other DNA
ccctaggccctgtgtgc

SEQ ID NO: 176928 - DNA, 17 bp, synthetic construct
  source 1..17: mol_type = other DNA
cccctaggccctgtgtg

SEQ ID NO: 176929 - DNA, 17 bp, synthetic construct
  source 1..17: mol_type = other DNA
gcccctaggccctgtgt

SEQ ID NO: 176930 - DNA, 17 bp, synthetic construct
  source 1..17: mol_type = other DNA
ggcccctaggccctgtg

SEQ ID NO: 176931 - DNA, 17 bp, synthetic construct
  source 1..17: mol_type = other DNA
tggcccctaggccctgt

SEQ ID NO: 176932 - DNA, 17 bp, synthetic construct
  source 1..17: mol_type = other DNA
ctggcccctaggccctg

SEQ ID NO: 176933 - DNA, 17 bp, synthetic construct
  source 1..17: mol_type = other DNA
cctggcccctaggccct

SEQ ID NO: 176934 - DNA, 17 bp, synthetic construct
  source 1..17: mol_type = other DNA
gcctggcccctaggccc

SEQ ID NO: 176935 - DNA, 17 bp, synthetic construct
  source 1..17: mol_type = other DNA
agcctggcccctaggcc

SEQ ID NO: 176936 - DNA, 17 bp, synthetic construct
  source 1..17: mol_type = other DNA
tagcctggcccctaggc

SEQ ID NO: 176937 - DNA, 17 bp, synthetic construct
  source 1..17: mol_type = other DNA
ctagcctggcccctagg

SEQ ID NO: 176938 - DNA, 17 bp, synthetic construct
  source 1..17: mol_type = other DNA
gctagcctggcccctag

SEQ ID NO: 176939 - DNA, 17 bp, synthetic construct
  source 1..17: mol_type = other DNA
tgctagcctggccccta

SEQ ID NO: 176940 - DNA, 17 bp, synthetic construct
  source 1..17: mol_type = other DNA
atgctagcctggcccct

SEQ ID NO: 176941 - DNA, 17 bp, synthetic construct
  source 1..17: mol_type = other DNA
catgctagcctggcccc

SEQ ID NO: 176942 - DNA, 17 bp, synthetic construct
  source 1..17: mol_type = other DNA
ccatgctagcctggccc

SEQ ID NO: 176943 - DNA, 17 bp, synthetic construct
  source 1..17: mol_type = other DNA
cccatgctagcctggcc

SEQ ID NO: 176944 - DNA, 17 bp, synthetic construct
  source 1..17: mol_type = other DNA
ccccatgctagcctggc

SEQ ID NO: 176945 - DNA, 17 bp, synthetic construct
  source 1..17: mol_type = other DNA
cccccatgctagcctgg

SEQ ID NO: 176946 - DNA, 17 bp, synthetic construct
  source 1..17: mol_type = other DNA
gcccccatgctagcctg

SEQ ID NO: 176947 - DNA, 17 bp, synthetic construct
  source 1..17: mol_type = other DNA
ggcccccatgctagcct

SEQ ID NO: 176948 - DNA, 17 bp, synthetic construct
  source 1..17: mol_type = other DNA
cggcccccatgctagcc

SEQ ID NO: 176949 - DNA, 17 bp, synthetic construct
  source 1..17: mol_type = other DNA
gcggcccccatgctagc

SEQ ID NO: 176950 - DNA, 17 bp, synthetic construct
  source 1..17: mol_type = other DNA
ggcggcccccatgctag

SEQ ID NO: 176951 - DNA, 17 bp, synthetic construct
  source 1..17: mol_type = other DNA
gggcggcccccatgcta

SEQ ID NO: 176952 - DNA, 17 bp, synthetic construct
  source 1..17: mol_type = other DNA
agggcggcccccatgct

SEQ ID NO: 176953 - DNA, 17 bp, synthetic construct
  source 1..17: mol_type = other DNA
gagggcggcccccatgc

SEQ ID NO: 176954 - DNA, 17 bp, synthetic construct
  source 1..17: mol_type = other DNA
ggagggcggcccccatg

SEQ ID NO: 176955 - DNA, 17 bp, synthetic construct
  source 1..17: mol_type = other DNA
aggagggcggcccccat

SEQ ID NO: 176956 - DNA, 17 bp, synthetic construct
  source 1..17: mol_type = other DNA
gaggagggcggccccca

SEQ ID NO: 176957 - DNA, 17 bp, synthetic construct
  source 1..17: mol_type = other DNA
tgaggagggcggccccc

SEQ ID NO: 176958 - DNA, 17 bp, synthetic construct
  source 1..17: mol_type = other DNA
ctgaggagggcggcccc

SEQ ID NO: 176959 - DNA, 17 bp, synthetic construct
  source 1..17: mol_type = other DNA
cctgaggagggcggccc

SEQ ID NO: 176960 - DNA, 17 bp, synthetic construct
  source 1..17: mol_type = other DNA
gcctgaggagggcggcc

SEQ ID NO: 176961 - DNA, 17 bp, synthetic construct
  source 1..17: mol_type = other DNA
tgcctgaggagggcggc

SEQ ID NO: 176962 - DNA, 17 bp, synthetic construct
  source 1..17: mol_type = other DNA
ctgcctgaggagggcgg

SEQ ID NO: 176963 - DNA, 17 bp, synthetic construct
  source 1..17: mol_type = other DNA
cctgcctgaggagggcg

SEQ ID NO: 176964 - DNA, 17 bp, synthetic construct
  source 1..17: mol_type = other DNA
gcctgcctgaggagggc

SEQ ID NO: 176965 - DNA, 17 bp, synthetic construct
  source 1..17: mol_type = other DNA
agcctgcctgaggaggg

SEQ ID NO: 176966 - DNA, 17 bp, synthetic construct
  source 1..17: mol_type = other DNA
gagcctgcctgaggagg

SEQ ID NO: 176967 - DNA, 17 bp, synthetic construct
  source 1..17: mol_type = other DNA
agagcctgcctgaggag

SEQ ID NO: 176968 - DNA, 17 bp, synthetic construct
  source 1..17: mol_type = other DNA
aagagcctgcctgagga

SEQ ID NO: 176969 - DNA, 17 bp, synthetic construct
  source 1..17: mol_type = other DNA
caagagcctgcctgagg

SEQ ID NO: 176970 - DNA, 17 bp, synthetic construct
  source 1..17: mol_type = other DNA
acaagagcctgcctgag

SEQ ID NO: 176971 - DNA, 17 bp, synthetic construct
  source 1..17: mol_type = other DNA
cacaagagcctgcctga

SEQ ID NO: 176972 - DNA, 17 bp, synthetic construct
  source 1..17: mol_type = other DNA
ccacaagagcctgcctg

SEQ ID NO: 176973 - DNA, 17 bp, synthetic construct
  source 1..17: mol_type = other DNA
gccacaagagcctgcct

SEQ ID NO: 176974 - DNA, 17 bp, synthetic construct
  source 1..17: mol_type = other DNA
ggccacaagagcctgcc

SEQ ID NO: 176975 - DNA, 17 bp, synthetic construct
  source 1..17: mol_type = other DNA
tggccacaagagcctgc

SEQ ID NO: 176976 - DNA, 17 bp, synthetic construct
  source 1..17: mol_type = other DNA
gtggccacaagagcctg

SEQ ID NO: 176977 - DNA, 17 bp, synthetic construct
  source 1..17: mol_type = other DNA
ggtggccacaagagcct

SEQ ID NO: 176978 - DNA, 17 bp, synthetic construct
  source 1..17: mol_type = other DNA
gggtggccacaagagcc

SEQ ID NO: 176979 - DNA, 17 bp, synthetic construct
  source 1..17: mol_type = other DNA
cgggtggccacaagagc

SEQ ID NO: 176980 - DNA, 17 bp, synthetic construct
  source 1..17: mol_type = other DNA
ccgggtggccacaagag

SEQ ID NO: 176981 - DNA, 17 bp, synthetic construct
  source 1..17: mol_type = other DNA
cccgggtggccacaaga

SEQ ID NO: 176982 - DNA, 17 bp, synthetic construct
  source 1..17: mol_type = other DNA
ccccgggtggccacaag

SEQ ID NO: 176983 - DNA, 17 bp, synthetic construct
  source 1..17: mol_type = other DNA
gccccgggtggccacaa

SEQ ID NO: 176984 - DNA, 17 bp, synthetic construct
  source 1..17: mol_type = other DNA
agccccgggtggccaca

SEQ ID NO: 176985 - DNA, 17 bp, synthetic construct
  source 1..17: mol_type = other DNA
aagccccgggtggccac

SEQ ID NO: 176986 - DNA, 17 bp, synthetic construct
  source 1..17: mol_type = other DNA
aaagccccgggtggcca

SEQ ID NO: 176987 - DNA, 17 bp, synthetic construct
  source 1..17: mol_type = other DNA
caaagccccgggtggcc

SEQ ID NO: 176988 - DNA, 17 bp, synthetic construct
  source 1..17: mol_type = other DNA
ccaaagccccgggtggc

SEQ ID NO: 176989 - DNA, 17 bp, synthetic construct
  source 1..17: mol_type = other DNA
cccaaagccccgggtgg

SEQ ID NO: 176990 - DNA, 17 bp, synthetic construct
  source 1..17: mol_type = other DNA
gcccaaagccccgggtg

SEQ ID NO: 176991 - DNA, 17 bp, synthetic construct
  source 1..17: mol_type = other DNA
ggcccaaagccccgggt

SEQ ID NO: 176992 - DNA, 17 bp, synthetic construct
  source 1..17: mol_type = other DNA
tggcccaaagccccggg

SEQ ID NO: 176993 - DNA, 17 bp, synthetic construct
  source 1..17: mol_type = other DNA
atggcccaaagccccgg

SEQ ID NO: 176994 - DNA, 17 bp, synthetic construct
  source 1..17: mol_type = other DNA
catggcccaaagccccg

SEQ ID NO: 176995 - DNA, 17 bp, synthetic construct
  source 1..17: mol_type = other DNA
tcatggcccaaagcccc

SEQ ID NO: 176996 - DNA, 17 bp, synthetic construct
  source 1..17: mol_type = other DNA
ctcatggcccaaagccc

SEQ ID NO: 176997 - DNA, 17 bp, synthetic construct
  source 1..17: mol_type = other DNA
cctcatggcccaaagcc

SEQ ID NO: 176998 - DNA, 17 bp, synthetic construct
  source 1..17: mol_type = other DNA
ccctcatggcccaaagc

SEQ ID NO: 176999 - DNA, 17 bp, synthetic construct
  source 1..17: mol_type = other DNA
cccctcatggcccaaag

SEQ ID NO: 177000 - DNA, 17 bp, synthetic construct
  source 1..17: mol_type = other DNA
acccctcatggcccaaa

SEQ ID NO: 177001 - DNA, 17 bp, synthetic construct
  source 1..17: mol_type = other DNA
cacccctcatggcccaa

SEQ ID NO: 177002 - DNA, 17 bp, synthetic construct
  source 1..17: mol_type = other DNA
ccacccctcatggccca

SEQ ID NO: 177003 - DNA, 17 bp, synthetic construct
  source 1..17: mol_type = other DNA
cccacccctcatggccc

SEQ ID NO: 177004 - DNA, 17 bp, synthetic construct
  source 1..17: mol_type = other DNA
tcccacccctcatggcc

SEQ ID NO: 177005 - DNA, 17 bp, synthetic construct
  source 1..17: mol_type = other DNA
atcccacccctcatggc

SEQ ID NO: 177006 - DNA, 17 bp, synthetic construct
  source 1..17: mol_type = other DNA
catcccacccctcatgg

SEQ ID NO: 177007 - DNA, 17 bp, synthetic construct
  source 1..17: mol_type = other DNA
tcatcccacccctcatg

SEQ ID NO: 177008 - DNA, 17 bp, synthetic construct
  source 1..17: mol_type = other DNA
ctcatcccacccctcat

SEQ ID NO: 177009 - DNA, 17 bp, synthetic construct
  source 1..17: mol_type = other DNA
gctcatcccacccctca

SEQ ID NO: 177010 - DNA, 17 bp, synthetic construct
  source 1..17: mol_type = other DNA
ggctcatcccacccctc

SEQ ID NO: 177011 - DNA, 17 bp, synthetic construct
  source 1..17: mol_type = other DNA
cggctcatcccacccct

SEQ ID NO: 177012 - DNA, 17 bp, synthetic construct
  source 1..17: mol_type = other DNA
acggctcatcccacccc

SEQ ID NO: 177013 - DNA, 17 bp, synthetic construct
  source 1..17: mol_type = other DNA
cacggctcatcccaccc

SEQ ID NO: 177014 - DNA, 17 bp, synthetic construct
  source 1..17: mol_type = other DNA
ccacggctcatcccacc

SEQ ID NO: 177015 - DNA, 17 bp, synthetic construct
  source 1..17: mol_type = other DNA
tccacggctcatcccac

SEQ ID NO: 177016 - DNA, 17 bp, synthetic construct
  source 1..17: mol_type = other DNA
atccacggctcatccca

SEQ ID NO: 177017 - DNA, 17 bp, synthetic construct
  source 1..17: mol_type = other DNA
catccacggctcatccc

SEQ ID NO: 177018 - DNA, 17 bp, synthetic construct
  source 1..17: mol_type = other DNA
ccatccacggctcatcc

SEQ ID NO: 177019 - DNA, 17 bp, synthetic construct
  source 1..17: mol_type = other DNA
cccatccacggctcatc

SEQ ID NO: 177020 - DNA, 17 bp, synthetic construct
  source 1..17: mol_type = other DNA
acccatccacggctcat

SEQ ID NO: 177021 - DNA, 17 bp, synthetic construct
  source 1..17: mol_type = other DNA
gacccatccacggctca

SEQ ID NO: 177022 - DNA, 17 bp, synthetic construct
  source 1..17: mol_type = other DNA
ggacccatccacggctc

SEQ ID NO: 177023 - DNA, 17 bp, synthetic construct
  source 1..17: mol_type = other DNA
gggacccatccacggct

SEQ ID NO: 177024 - DNA, 17 bp, synthetic construct
  source 1..17: mol_type = other DNA
cgggacccatccacggc

SEQ ID NO: 177025 - DNA, 17 bp, synthetic construct
  source 1..17: mol_type = other DNA
acgggacccatccacgg

SEQ ID NO: 177026 - DNA, 17 bp, synthetic construct
  source 1..17: mol_type = other DNA
cacgggacccatccacg

SEQ ID NO: 177027 - DNA, 17 bp, synthetic construct
  source 1..17: mol_type = other DNA
tcacgggacccatccac

SEQ ID NO: 177028 - DNA, 17 bp, synthetic construct
  source 1..17: mol_type = other DNA
ctcacgggacccatcca

SEQ ID NO: 177029 - DNA, 17 bp, synthetic construct
  source 1..17: mol_type = other DNA
gctcacgggacccatcc

SEQ ID NO: 177030 - DNA, 17 bp, synthetic construct
  source 1..17: mol_type = other DNA
agctcacgggacccatc

SEQ ID NO: 177031 - DNA, 17 bp, synthetic construct
  source 1..17: mol_type = other DNA
cagctcacgggacccat

SEQ ID NO: 177032 - DNA, 17 bp, synthetic construct
  source 1..17: mol_type = other DNA
ccagctcacgggaccca

SEQ ID NO: 177033 - DNA, 17 bp, synthetic construct
  source 1..17: mol_type = other DNA
accagctcacgggaccc

SEQ ID NO: 177034 - DNA, 17 bp, synthetic construct
  source 1..17: mol_type = other DNA
gaccagctcacgggacc

SEQ ID NO: 177035 - DNA, 17 bp, synthetic construct
  source 1..17: mol_type = other DNA
ggaccagctcacgggac

SEQ ID NO: 177036 - DNA, 17 bp, synthetic construct
  source 1..17: mol_type = other DNA
tggaccagctcacggga

SEQ ID NO: 177037 - DNA, 17 bp, synthetic construct
  source 1..17: mol_type = other DNA
ctggaccagctcacggg

SEQ ID NO: 177038 - DNA, 17 bp, synthetic construct
  source 1..17: mol_type = other DNA
cctggaccagctcacgg

SEQ ID NO: 177039 - DNA, 17 bp, synthetic construct
  source 1..17: mol_type = other DNA
acctggaccagctcacg

SEQ ID NO: 177040 - DNA, 17 bp, synthetic construct
  source 1..17: mol_type = other DNA
cacctggaccagctcac

SEQ ID NO: 177041 - DNA, 17 bp, synthetic construct
  source 1..17: mol_type = other DNA
tcacctggaccagctca

SEQ ID NO: 177042 - DNA, 17 bp, synthetic construct
  source 1..17: mol_type = other DNA
ctcacctggaccagctc

SEQ ID NO: 177043 - DNA, 17 bp, synthetic construct
  source 1..17: mol_type = other DNA
cctcacctggaccagct

SEQ ID NO: 177044 - DNA, 17 bp, synthetic construct
  source 1..17: mol_type = other DNA
tcctcacctggaccagc

SEQ ID NO: 177045 - DNA, 17 bp, synthetic construct
  source 1..17: mol_type = other DNA
gtcctcacctggaccag

SEQ ID NO: 177046 - DNA, 17 bp, synthetic construct
  source 1..17: mol_type = other DNA
cgtcctcacctggacca

SEQ ID NO: 177047 - DNA, 17 bp, synthetic construct
  source 1..17: mol_type = other DNA
acgtcctcacctggacc

SEQ ID NO: 177048 - DNA, 17 bp, synthetic construct
  source 1..17: mol_type = other DNA
cacgtcctcacctggac

SEQ ID NO: 177049 - DNA, 17 bp, synthetic construct
  source 1..17: mol_type = other DNA
gcacgtcctcacctgga

SEQ ID NO: 177050 - DNA, 17 bp, synthetic construct
  source 1..17: mol_type = other DNA
tgcacgtcctcacctgg

SEQ ID NO: 177051 - DNA, 17 bp, synthetic construct
  source 1..17: mol_type = other DNA
atgcacgtcctcacctg

SEQ ID NO: 177052 - DNA, 17 bp, synthetic construct
  source 1..17: mol_type = other DNA
catgcacgtcctcacct

SEQ ID NO: 177053 - DNA, 17 bp, synthetic construct
  source 1..17: mol_type = other DNA
acatgcacgtcctcacc

SEQ ID NO: 177054 - DNA, 17 bp, synthetic construct
  source 1..17: mol_type = other DNA
aacatgcacgtcctcac

SEQ ID NO: 177055 - DNA, 17 bp, synthetic construct
  source 1..17: mol_type = other DNA
gaacatgcacgtcctca

SEQ ID NO: 177056 - DNA, 17 bp, synthetic construct
  source 1..17: mol_type = other DNA
ggaacatgcacgtcctc

SEQ ID NO: 177057 - DNA, 17 bp, synthetic construct
  source 1..17: mol_type = other DNA
gggaacatgcacgtcct

SEQ ID NO: 177058 - DNA, 17 bp, synthetic construct
  source 1..17: mol_type = other DNA
agggaacatgcacgtcc

SEQ ID NO: 177059 - DNA, 17 bp, synthetic construct
  source 1..17: mol_type = other DNA
cagggaacatgcacgtc

SEQ ID NO: 177060 - DNA, 17 bp, synthetic construct
  source 1..17: mol_type = other DNA
gcagggaacatgcacgt

SEQ ID NO: 177061 - DNA, 17 bp, synthetic construct
  source 1..17: mol_type = other DNA
ggcagggaacatgcacg

SEQ ID NO: 177062 - DNA, 17 bp, synthetic construct
  source 1..17: mol_type = other DNA
gggcagggaacatgcac

SEQ ID NO: 177063 - DNA, 17 bp, synthetic construct
  source 1..17: mol_type = other DNA
ggggcagggaacatgca

SEQ ID NO: 177064 - DNA, 17 bp, synthetic construct
  source 1..17: mol_type = other DNA
tggggcagggaacatgc

SEQ ID NO: 177065 - DNA, 17 bp, synthetic construct
  source 1..17: mol_type = other DNA
ctggggcagggaacatg

SEQ ID NO: 177066 - DNA, 17 bp, synthetic construct
  source 1..17: mol_type = other DNA
cctggggcagggaacat

SEQ ID NO: 177067 - DNA, 17 bp, synthetic construct
  source 1..17: mol_type = other DNA
acctggggcagggaaca

SEQ ID NO: 177068 - DNA, 17 bp, synthetic construct
  source 1..17: mol_type = other DNA
cacctggggcagggaac

SEQ ID NO: 177069 - DNA, 17 bp, synthetic construct
  source 1..17: mol_type = other DNA
tcacctggggcagggaa

SEQ ID NO: 177070 - DNA, 17 bp, synthetic construct
  source 1..17: mol_type = other DNA
ttcacctggggcaggga

SEQ ID NO: 177071 - DNA, 17 bp, synthetic construct
  source 1..17: mol_type = other DNA
attcacctggggcaggg

SEQ ID NO: 177072 - DNA, 17 bp, synthetic construct
  source 1..17: mol_type = other DNA
cattcacctggggcagg

SEQ ID NO: 177073 - DNA, 17 bp, synthetic construct
  source 1..17: mol_type = other DNA
tcattcacctggggcag

SEQ ID NO: 177074 - DNA, 17 bp, synthetic construct
  source 1..17: mol_type = other DNA
ctcattcacctggggca

SEQ ID NO: 177075 - DNA, 17 bp, synthetic construct
  source 1..17: mol_type = other DNA
tctcattcacctggggc

SEQ ID NO: 177076 - DNA, 17 bp, synthetic construct
  source 1..17: mol_type = other DNA
gtctcattcacctgggg

SEQ ID NO: 177077 - DNA, 17 bp, synthetic construct
  source 1..17: mol_type = other DNA
ggtctcattcacctggg

SEQ ID NO: 177078 - DNA, 17 bp, synthetic construct
  source 1..17: mol_type = other DNA
aggtctcattcacctgg

SEQ ID NO: 177079 - DNA, 17 bp, synthetic construct
  source 1..17: mol_type = other DNA
caggtctcattcacctg

SEQ ID NO: 177080 - DNA, 17 bp, synthetic construct
  source 1..17: mol_type = other DNA
ccaggtctcattcacct

SEQ ID NO: 177081 - DNA, 17 bp, synthetic construct
  source 1..17: mol_type = other DNA
tccaggtctcattcacc

SEQ ID NO: 177082 - DNA, 17 bp, synthetic construct
  source 1..17: mol_type = other DNA
gtccaggtctcattcac

SEQ ID NO: 177083 - DNA, 17 bp, synthetic construct
  source 1..17: mol_type = other DNA
ggtccaggtctcattca

SEQ ID NO: 177084 - DNA, 17 bp, synthetic construct
  source 1..17: mol_type = other DNA
gggtccaggtctcattc

SEQ ID NO: 177085 - DNA, 17 bp, synthetic construct
  source 1..17: mol_type = other DNA
agggtccaggtctcatt

SEQ ID NO: 177086 - DNA, 17 bp, synthetic construct
  source 1..17: mol_type = other DNA
cagggtccaggtctcat

SEQ ID NO: 177087 - DNA, 17 bp, synthetic construct
  source 1..17: mol_type = other DNA
ccagggtccaggtctca

SEQ ID NO: 177088 - DNA, 17 bp, synthetic construct
  source 1..17: mol_type = other DNA
tccagggtccaggtctc

SEQ ID NO: 177089 - DNA, 17 bp, synthetic construct
  source 1..17: mol_type = other DNA
ctccagggtccaggtct

SEQ ID NO: 177090 - DNA, 17 bp, synthetic construct
  source 1..17: mol_type = other DNA
tctccagggtccaggtc

SEQ ID NO: 177091 - DNA, 17 bp, synthetic construct
  source 1..17: mol_type = other DNA
ttctccagggtccaggt

SEQ ID NO: 177092 - DNA, 17 bp, synthetic construct
  source 1..17: mol_type = other DNA
gttctccagggtccagg

SEQ ID NO: 177093 - DNA, 17 bp, synthetic construct
  source 1..17: mol_type = other DNA
agttctccagggtccag

SEQ ID NO: 177094 - DNA, 17 bp, synthetic construct
  source 1..17: mol_type = other DNA
cagttctccagggtcca

SEQ ID NO: 177095 - DNA, 17 bp, synthetic construct
  source 1..17: mol_type = other DNA
gcagttctccagggtcc

SEQ ID NO: 177096 - DNA, 17 bp, synthetic construct
  source 1..17: mol_type = other DNA
tgcagttctccagggtc

SEQ ID NO: 177097 - DNA, 17 bp, synthetic construct
  source 1..17: mol_type = other DNA
gtgcagttctccagggt

SEQ ID NO: 177098 - DNA, 17 bp, synthetic construct
  source 1..17: mol_type = other DNA
cgtgcagttctccaggg

SEQ ID NO: 177099 - DNA, 17 bp, synthetic construct
  source 1..17: mol_type = other DNA
ccgtgcagttctccagg

SEQ ID NO: 177100 - DNA, 17 bp, synthetic construct
  source 1..17: mol_type = other DNA
accgtgcagttctccag

SEQ ID NO: 177101 - DNA, 17 bp, synthetic construct
  source 1..17: mol_type = other DNA
caccgtgcagttctcca

SEQ ID NO: 177102 - DNA, 17 bp, synthetic construct
  source 1..17: mol_type = other DNA
ccaccgtgcagttctcc

SEQ ID NO: 177103 - DNA, 17 bp, synthetic construct
  source 1..17: mol_type = other DNA
gccaccgtgcagttctc

SEQ ID NO: 177104 - DNA, 17 bp, synthetic construct
  source 1..17: mol_type = other DNA
ggccaccgtgcagttct

SEQ ID NO: 177105 - DNA, 17 bp, synthetic construct
  source 1..17: mol_type = other DNA
tggccaccgtgcagttc

SEQ ID NO: 177106 - DNA, 17 bp, synthetic construct
  source 1..17: mol_type = other DNA
ctggccaccgtgcagtt

SEQ ID NO: 177107 - DNA, 17 bp, synthetic construct
  source 1..17: mol_type = other DNA
cctggccaccgtgcagt

SEQ ID NO: 177108 - DNA, 17 bp, synthetic construct
  source 1..17: mol_type = other DNA
acctggccaccgtgcag

SEQ ID NO: 177109 - DNA, 17 bp, synthetic construct
  source 1..17: mol_type = other DNA
cacctggccaccgtgca

SEQ ID NO: 177110 - DNA, 17 bp, synthetic construct
  source 1..17: mol_type = other DNA
gcacctggccaccgtgc

SEQ ID NO: 177111 - DNA, 17 bp, synthetic construct
  source 1..17: mol_type = other DNA
cgcacctggccaccgtg

SEQ ID NO: 177112 - DNA, 17 bp, synthetic construct
  source 1..17: mol_type = other DNA
acgcacctggccaccgt

SEQ ID NO: 177113 - DNA, 17 bp, synthetic construct
  source 1..17: mol_type = other DNA
cacgcacctggccaccg

SEQ ID NO: 177114 - DNA, 17 bp, synthetic construct
  source 1..17: mol_type = other DNA
ccacgcacctggccacc

SEQ ID NO: 177115 - DNA, 17 bp, synthetic construct
  source 1..17: mol_type = other DNA
cccacgcacctggccac

SEQ ID NO: 177116 - DNA, 17 bp, synthetic construct
  source 1..17: mol_type = other DNA
acccacgcacctggcca

SEQ ID NO: 177117 - DNA, 17 bp, synthetic construct
  source 1..17: mol_type = other DNA
cacccacgcacctggcc

SEQ ID NO: 177118 - DNA, 17 bp, synthetic construct
  source 1..17: mol_type = other DNA
tcacccacgcacctggc

SEQ ID NO: 177119 - DNA, 17 bp, synthetic construct
  source 1..17: mol_type = other DNA
gtcacccacgcacctgg

SEQ ID NO: 177120 - DNA, 17 bp, synthetic construct
  source 1..17: mol_type = other DNA
tgtcacccacgcacctg

SEQ ID NO: 177121 - DNA, 17 bp, synthetic construct
  source 1..17: mol_type = other DNA
ttgtcacccacgcacct

SEQ ID NO: 177122 - DNA, 17 bp, synthetic construct
  source 1..17: mol_type = other DNA
gttgtcacccacgcacc

SEQ ID NO: 177123 - DNA, 17 bp, synthetic construct
  source 1..17: mol_type = other DNA
ggttgtcacccacgcac

SEQ ID NO: 177124 - DNA, 17 bp, synthetic construct
  source 1..17: mol_type = other DNA
cggttgtcacccacgca

SEQ ID NO: 177125 - DNA, 17 bp, synthetic construct
  source 1..17: mol_type = other DNA
acggttgtcacccacgc

SEQ ID NO: 177126 - DNA, 17 bp, synthetic construct
  source 1..17: mol_type = other DNA
cacggttgtcacccacg

SEQ ID NO: 177127 - DNA, 17 bp, synthetic construct
  source 1..17: mol_type = other DNA
acacggttgtcacccac

SEQ ID NO: 177128 - DNA, 17 bp, synthetic construct
  source 1..17: mol_type = other DNA
gacacggttgtcaccca

SEQ ID NO: 177129 - DNA, 17 bp, synthetic construct
  source 1..17: mol_type = other DNA
cgacacggttgtcaccc

SEQ ID NO: 177130 - DNA, 17 bp, synthetic construct
  source 1..17: mol_type = other DNA
acgacacggttgtcacc

SEQ ID NO: 177131 - DNA, 17 bp, synthetic construct
  source 1..17: mol_type = other DNA
gacgacacggttgtcac

SEQ ID NO: 177132 - DNA, 17 bp, synthetic construct
  source 1..17: mol_type = other DNA
ggacgacacggttgtca

SEQ ID NO: 177133 - DNA, 17 bp, synthetic construct
  source 1..17: mol_type = other DNA
aggacgacacggttgtc

SEQ ID NO: 177134 - DNA, 17 bp, synthetic construct
  source 1..17: mol_type = other DNA
caggacgacacggttgt

SEQ ID NO: 177135 - DNA, 17 bp, synthetic construct
  source 1..17: mol_type = other DNA
gcaggacgacacggttg

SEQ ID NO: 177136 - DNA, 17 bp, synthetic construct
  source 1..17: mol_type = other DNA
agcaggacgacacggtt

SEQ ID NO: 177137 - DNA, 17 bp, synthetic construct
  source 1..17: mol_type = other DNA
cagcaggacgacacggt

SEQ ID NO: 177138 - DNA, 17 bp, synthetic construct
  source 1..17: mol_type = other DNA
ccagcaggacgacacgg

SEQ ID NO: 177139 - DNA, 17 bp, synthetic construct
  source 1..17: mol_type = other DNA
tccagcaggacgacacg

SEQ ID NO: 177140 - DNA, 17 bp, synthetic construct
  source 1..17: mol_type = other DNA
gtccagcaggacgacac

SEQ ID NO: 177141 - DNA, 17 bp, synthetic construct
  source 1..17: mol_type = other DNA
ggtccagcaggacgaca

SEQ ID NO: 177142 - DNA, 17 bp, synthetic construct
  source 1..17: mol_type = other DNA
gggtccagcaggacgac

SEQ ID NO: 177143 - DNA, 17 bp, synthetic construct
  source 1..17: mol_type = other DNA
tgggtccagcaggacga

SEQ ID NO: 177144 - DNA, 17 bp, synthetic construct
  source 1..17: mol_type = other DNA
ttgggtccagcaggacg

SEQ ID NO: 177145 - DNA, 17 bp, synthetic construct
  source 1..17: mol_type = other DNA
tttgggtccagcaggac

SEQ ID NO: 177146 - DNA, 17 bp, synthetic construct
  source 1..17: mol_type = other DNA
ctttgggtccagcagga

SEQ ID NO: 177147 - DNA, 17 bp, synthetic construct
  source 1..17: mol_type = other DNA
gctttgggtccagcagg

SEQ ID NO: 177148 - DNA, 17 bp, synthetic construct
  source 1..17: mol_type = other DNA
ggctttgggtccagcag

SEQ ID NO: 177149 - DNA, 17 bp, synthetic construct
  source 1..17: mol_type = other DNA
aggctttgggtccagca

SEQ ID NO: 177150 - DNA, 17 bp, synthetic construct
  source 1..17: mol_type = other DNA
caggctttgggtccagc

SEQ ID NO: 177151 - DNA, 17 bp, synthetic construct
  source 1..17: mol_type = other DNA
acaggctttgggtccag

SEQ ID NO: 177152 - DNA, 17 bp, synthetic construct
  source 1..17: mol_type = other DNA
cacaggctttgggtcca

SEQ ID NO: 177153 - DNA, 17 bp, synthetic construct
  source 1..17: mol_type = other DNA
ccacaggctttgggtcc

SEQ ID NO: 177154 - DNA, 17 bp, synthetic construct
  source 1..17: mol_type = other DNA
gccacaggctttgggtc

SEQ ID NO: 177155 - DNA, 17 bp, synthetic construct
  source 1..17: mol_type = other DNA
ggccacaggctttgggt

SEQ ID NO: 177156 - DNA, 17 bp, synthetic construct
  source 1..17: mol_type = other DNA
tggccacaggctttggg

SEQ ID NO: 177157 - DNA, 17 bp, synthetic construct
  source 1..17: mol_type = other DNA
ttggccacaggctttgg

SEQ ID NO: 177158 - DNA, 17 bp, synthetic construct
  source 1..17: mol_type = other DNA
gttggccacaggctttg

SEQ ID NO: 177159 - DNA, 17 bp, synthetic construct
  source 1..17: mol_type = other DNA
cgttggccacaggcttt

SEQ ID NO: 177160 - DNA, 17 bp, synthetic construct
  source 1..17: mol_type = other DNA
acgttggccacaggctt

SEQ ID NO: 177161 - DNA, 17 bp, synthetic construct
  source 1..17: mol_type = other DNA
gacgttggccacaggct

SEQ ID NO: 177162 - DNA, 17 bp, synthetic construct
  source 1..17: mol_type = other DNA
tgacgttggccacaggc

SEQ ID NO: 177163 - DNA, 17 bp, synthetic construct
  source 1..17: mol_type = other DNA
gtgacgttggccacagg

SEQ ID NO: 177164 - DNA, 17 bp, synthetic construct
  source 1..17: mol_type = other DNA
ggtgacgttggccacag

SEQ ID NO: 177165 - DNA, 17 bp, synthetic construct
  source 1..17: mol_type = other DNA
aggtgacgttggccaca

SEQ ID NO: 177166 - DNA, 17 bp, synthetic construct
  source 1..17: mol_type = other DNA
caggtgacgttggccac

SEQ ID NO: 177167 - DNA, 17 bp, synthetic construct
  source 1..17: mol_type = other DNA
gcaggtgacgttggcca

SEQ ID NO: 177168 - DNA, 17 bp, synthetic construct
  source 1..17: mol_type = other DNA
cgcaggtgacgttggcc

SEQ ID NO: 177169 - DNA, 17 bp, synthetic construct
  source 1..17: mol_type = other DNA
acgcaggtgacgttggc

SEQ ID NO: 177170 - DNA, 17 bp, synthetic construct
  source 1..17: mol_type = other DNA
cacgcaggtgacgttgg

SEQ ID NO: 177171 - DNA, 17 bp, synthetic construct
  source 1..17: mol_type = other DNA
tcacgcaggtgacgttg

SEQ ID NO: 177172 - DNA, 17 bp, synthetic construct
  source 1..17: mol_type = other DNA
ttcacgcaggtgacgtt

SEQ ID NO: 177173 - DNA, 17 bp, synthetic construct
  source 1..17: mol_type = other DNA
gttcacgcaggtgacgt

SEQ ID NO: 177174 - DNA, 17 bp, synthetic construct
  source 1..17: mol_type = other DNA
tgttcacgcaggtgacg

SEQ ID NO: 177175 - DNA, 17 bp, synthetic construct
  source 1..17: mol_type = other DNA
ttgttcacgcaggtgac

SEQ ID NO: 177176 - DNA, 17 bp, synthetic construct
  source 1..17: mol_type = other DNA
cttgttcacgcaggtga

SEQ ID NO: 177177 - DNA, 17 bp, synthetic construct
  source 1..17: mol_type = other DNA
gcttgttcacgcaggtg

SEQ ID NO: 177178 - DNA, 17 bp, synthetic construct
  source 1..17: mol_type = other DNA
tgcttgttcacgcaggt

SEQ ID NO: 177179 - DNA, 17 bp, synthetic construct
  source 1..17: mol_type = other DNA
gtgcttgttcacgcagg

SEQ ID NO: 177180 - DNA, 17 bp, synthetic construct
  source 1..17: mol_type = other DNA
ggtgcttgttcacgcag

SEQ ID NO: 177181 - DNA, 17 bp, synthetic construct
  source 1..17: mol_type = other DNA
aggtgcttgttcacgca

SEQ ID NO: 177182 - DNA, 17 bp, synthetic construct
  source 1..17: mol_type = other DNA
caggtgcttgttcacgc

SEQ ID NO: 177183 - DNA, 17 bp, synthetic construct
  source 1..17: mol_type = other DNA
gcaggtgcttgttcacg

SEQ ID NO: 177184 - DNA, 17 bp, synthetic construct
  source 1..17: mol_type = other DNA
ggcaggtgcttgttcac

SEQ ID NO: 177185 - DNA, 17 bp, synthetic construct
  source 1..17: mol_type = other DNA
gggcaggtgcttgttca

SEQ ID NO: 177186 - DNA, 17 bp, synthetic construct
  source 1..17: mol_type = other DNA
tgggcaggtgcttgttc

SEQ ID NO: 177187 - DNA, 17 bp, synthetic construct
  source 1..17: mol_type = other DNA
atgggcaggtgcttgtt

SEQ ID NO: 177188 - DNA, 17 bp, synthetic construct
  source 1..17: mol_type = other DNA
gatgggcaggtgcttgt

SEQ ID NO: 177189 - DNA, 17 bp, synthetic construct
  source 1..17: mol_type = other DNA
tgatgggcaggtgcttg

SEQ ID NO: 177190 - DNA, 17 bp, synthetic construct
  source 1..17: mol_type = other DNA
ttgatgggcaggtgctt

SEQ ID NO: 177191 - DNA, 17 bp, synthetic construct
  source 1..17: mol_type = other DNA
tttgatgggcaggtgct

SEQ ID NO: 177192 - DNA, 17 bp, synthetic construct
  source 1..17: mol_type = other DNA
ctttgatgggcaggtgc

SEQ ID NO: 177193 - DNA, 17 bp, synthetic construct
  source 1..17: mol_type = other DNA
actttgatgggcaggtg

SEQ ID NO: 177194 - DNA, 17 bp, synthetic construct
  source 1..17: mol_type = other DNA
cactttgatgggcaggt

SEQ ID NO: 177195 - DNA, 17 bp, synthetic construct
  source 1..17: mol_type = other DNA
acactttgatgggcagg

SEQ ID NO: 177196 - DNA, 17 bp, synthetic construct
  source 1..17: mol_type = other DNA
gacactttgatgggcag

SEQ ID NO: 177197 - DNA, 17 bp, synthetic construct
  source 1..17: mol_type = other DNA
cgacactttgatgggca

SEQ ID NO: 177198 - DNA, 17 bp, synthetic construct
  source 1..17: mol_type = other DNA
ccgacactttgatgggc

SEQ ID NO: 177199 - DNA, 17 bp, synthetic construct
  source 1..17: mol_type = other DNA
tccgacactttgatggg

SEQ ID NO: 177200 - DNA, 17 bp, synthetic construct
  source 1..17: mol_type = other DNA
gtccgacactttgatgg

SEQ ID NO: 177201 - DNA, 17 bp, synthetic construct
  source 1..17: mol_type = other DNA
ggtccgacactttgatg

SEQ ID NO: 177202 - DNA, 17 bp, synthetic construct
  source 1..17: mol_type = other DNA
gggtccgacactttgat

SEQ ID NO: 177203 - DNA, 17 bp, synthetic construct
  source 1..17: mol_type = other DNA
cgggtccgacactttga

SEQ ID NO: 177204 - DNA, 17 bp, synthetic construct
  source 1..17: mol_type = other DNA
tcgggtccgacactttg

SEQ ID NO: 177205 - DNA, 17 bp, synthetic construct
  source 1..17: mol_type = other DNA
ctcgggtccgacacttt

SEQ ID NO: 177206 - DNA, 17 bp, synthetic construct
  source 1..17: mol_type = other DNA
gctcgggtccgacactt

SEQ ID NO: 177207 - DNA, 17 bp, synthetic construct
  source 1..17: mol_type = other DNA
ggctcgggtccgacact

SEQ ID NO: 177208 - DNA, 17 bp, synthetic construct
  source 1..17: mol_type = other DNA
tggctcgggtccgacac

SEQ ID NO: 177209 - DNA, 17 bp, synthetic construct
  source 1..17: mol_type = other DNA
ctggctcgggtccgaca

SEQ ID NO: 177210 - DNA, 17 bp, synthetic construct
  source 1..17: mol_type = other DNA
gctggctcgggtccgac

SEQ ID NO: 177211 - DNA, 17 bp, synthetic construct
  source 1..17: mol_type = other DNA
ggctggctcgggtccga

SEQ ID NO: 177212 - DNA, 17 bp, synthetic construct
  source 1..17: mol_type = other DNA
gggctggctcgggtccg

SEQ ID NO: 177213 - DNA, 17 bp, synthetic construct
  source 1..17: mol_type = other DNA
agggctggctcgggtcc

SEQ ID NO: 177214 - DNA, 17 bp, synthetic construct
  source 1..17: mol_type = other DNA
cagggctggctcgggtc

SEQ ID NO: 177215 - DNA, 17 bp, synthetic construct
  source 1..17: mol_type = other DNA
acagggctggctcgggt

SEQ ID NO: 177216 - DNA, 17 bp, synthetic construct
  source 1..17: mol_type = other DNA
cacagggctggctcggg

SEQ ID NO: 177217 - DNA, 17 bp, synthetic construct
  source 1..17: mol_type = other DNA
tcacagggctggctcgg

SEQ ID NO: 177218 - DNA, 17 bp, synthetic construct
  source 1..17: mol_type = other DNA
gtcacagggctggctcg

SEQ ID NO: 177219 - DNA, 17 bp, synthetic construct
  source 1..17: mol_type = other DNA
agtcacagggctggctc

SEQ ID NO: 177220 - DNA, 17 bp, synthetic construct
  source 1..17: mol_type = other DNA
aagtcacagggctggct

SEQ ID NO: 177221 - DNA, 17 bp, synthetic construct
  source 1..17: mol_type = other DNA
gaagtcacagggctggc

SEQ ID NO: 177222 - DNA, 17 bp, synthetic construct
  source 1..17: mol_type = other DNA
ggaagtcacagggctgg

SEQ ID NO: 177223 - DNA, 17 bp, synthetic construct
  source 1..17: mol_type = other DNA
tggaagtcacagggctg

SEQ ID NO: 177224 - DNA, 17 bp, synthetic construct
  source 1..17: mol_type = other DNA
gtggaagtcacagggct

SEQ ID NO: 177225 - DNA, 17 bp, synthetic construct
  source 1..17: mol_type = other DNA
agtggaagtcacagggc

SEQ ID NO: 177226 - DNA, 17 bp, synthetic construct
  source 1..17: mol_type = other DNA
tagtggaagtcacaggg

SEQ ID NO: 177227 - DNA, 17 bp, synthetic construct
  source 1..17: mol_type = other DNA
atagtggaagtcacagg

SEQ ID NO: 177228 - DNA, 17 bp, synthetic construct
  source 1..17: mol_type = other DNA
catagtggaagtcacag

SEQ ID NO: 177229 - DNA, 17 bp, synthetic construct
  source 1..17: mol_type = other DNA
tcatagtggaagtcaca

SEQ ID NO: 177230 - DNA, 17 bp, synthetic construct
  source 1..17: mol_type = other DNA
ctcatagtggaagtcac

SEQ ID NO: 177231 - DNA, 17 bp, synthetic construct
  source 1..17: mol_type = other DNA
actcatagtggaagtca

SEQ ID NO: 177232 - DNA, 17 bp, synthetic construct
  source 1..17: mol_type = other DNA
cactcatagtggaagtc

SEQ ID NO: 177233 - DNA, 17 bp, synthetic construct
  source 1..17: mol_type = other DNA
gcactcatagtggaagt

SEQ ID NO: 177234 - DNA, 17 bp, synthetic construct
  source 1..17: mol_type = other DNA
cgcactcatagtggaag

SEQ ID NO: 177235 - DNA, 17 bp, synthetic construct
  source 1..17: mol_type = other DNA
tcgcactcatagtggaa

SEQ ID NO: 177236 - DNA, 17 bp, synthetic construct
  source 1..17: mol_type = other DNA
ctcgcactcatagtgga

SEQ ID NO: 177237 - DNA, 17 bp, synthetic construct
  source 1..17: mol_type = other DNA
actcgcactcatagtgg

SEQ ID NO: 177238 - DNA, 17 bp, synthetic construct
  source 1..17: mol_type = other DNA
cactcgcactcatagtg

SEQ ID NO: 177239 - DNA, 17 bp, synthetic construct
  source 1..17: mol_type = other DNA
acactcgcactcatagt

SEQ ID NO: 177240 - DNA, 17 bp, synthetic construct
  source 1..17: mol_type = other DNA
cacactcgcactcatag

SEQ ID NO: 177241 - DNA, 17 bp, synthetic construct
  source 1..17: mol_type = other DNA
tcacactcgcactcata

SEQ ID NO: 177242 - DNA, 17 bp, synthetic construct
  source 1..17: mol_type = other DNA
ctcacactcgcactcat

SEQ ID NO: 177243 - DNA, 17 bp, synthetic construct
  source 1..17: mol_type = other DNA
actcacactcgcactca

SEQ ID NO: 177244 - DNA, 17 bp, synthetic construct
  source 1..17: mol_type = other DNA
cactcacactcgcactc

SEQ ID NO: 177245 - DNA, 17 bp, synthetic construct
  source 1..17: mol_type = other DNA
gcactcacactcgcact

SEQ ID NO: 177246 - DNA, 17 bp, synthetic construct
  source 1..17: mol_type = other DNA
cgcactcacactcgcac

SEQ ID NO: 177247 - DNA, 17 bp, synthetic construct
  source 1..17: mol_type = other DNA
acgcactcacactcgca

SEQ ID NO: 177248 - DNA, 17 bp, synthetic construct
  source 1..17: mol_type = other DNA
gacgcactcacactcgc

SEQ ID NO: 177249 - DNA, 17 bp, synthetic construct
  source 1..17: mol_type = other DNA
cgacgcactcacactcg

SEQ ID NO: 177250 - DNA, 17 bp, synthetic construct
  source 1..17: mol_type = other DNA
ccgacgcactcacactc

SEQ ID NO: 177251 - DNA, 17 bp, synthetic construct
  source 1..17: mol_type = other DNA
accgacgcactcacact

SEQ ID NO: 177252 - DNA, 17 bp, synthetic construct
  source 1..17: mol_type = other DNA
caccgacgcactcacac

SEQ ID NO: 177253 - DNA, 17 bp, synthetic construct
  source 1..17: mol_type = other DNA
ccaccgacgcactcaca

SEQ ID NO: 177254 - DNA, 17 bp, synthetic construct
  source 1..17: mol_type = other DNA
gccaccgacgcactcac

SEQ ID NO: 177255 - DNA, 17 bp, synthetic construct
  source 1..17: mol_type = other DNA
ggccaccgacgcactca

SEQ ID NO: 177256 - DNA, 17 bp, synthetic construct
  source 1..17: mol_type = other DNA
cggccaccgacgcactc

SEQ ID NO: 177257 - DNA, 17 bp, synthetic construct
  source 1..17: mol_type = other DNA
gcggccaccgacgcact

SEQ ID NO: 177258 - DNA, 17 bp, synthetic construct
  source 1..17: mol_type = other DNA
cgcggccaccgacgcac

SEQ ID NO: 177259 - DNA, 17 bp, synthetic construct
  source 1..17: mol_type = other DNA
ccgcggccaccgacgca

SEQ ID NO: 177260 - DNA, 17 bp, synthetic construct
  source 1..17: mol_type = other DNA
cccgcggccaccgacgc

SEQ ID NO: 177261 - DNA, 17 bp, synthetic construct
  source 1..17: mol_type = other DNA
tcccgcggccaccgacg

SEQ ID NO: 177262 - DNA, 17 bp, synthetic construct
  source 1..17: mol_type = other DNA
atcccgcggccaccgac

SEQ ID NO: 177263 - DNA, 17 bp, synthetic construct
  source 1..17: mol_type = other DNA
aatcccgcggccaccga

SEQ ID NO: 177264 - DNA, 17 bp, synthetic construct
  source 1..17: mol_type = other DNA
taatcccgcggccaccg

SEQ ID NO: 177265 - DNA, 17 bp, synthetic construct
  source 1..17: mol_type = other DNA
gtaatcccgcggccacc

SEQ ID NO: 177266 - DNA, 17 bp, synthetic construct
  source 1..17: mol_type = other DNA
ggtaatcccgcggccac

SEQ ID NO: 177267 - DNA, 17 bp, synthetic construct
  source 1..17: mol_type = other DNA
gggtaatcccgcggcca

SEQ ID NO: 177268 - DNA, 17 bp, synthetic construct
  source 1..17: mol_type = other DNA
ggggtaatcccgcggcc

SEQ ID NO: 177269 - DNA, 17 bp, synthetic construct
  source 1..17: mol_type = other DNA
cggggtaatcccgcggc

SEQ ID NO: 177270 - DNA, 17 bp, synthetic construct
  source 1..17: mol_type = other DNA
ccggggtaatcccgcgg

SEQ ID NO: 177271 - DNA, 17 bp, synthetic construct
  source 1..17: mol_type = other DNA
cccggggtaatcccgcg

SEQ ID NO: 177272 - DNA, 17 bp, synthetic construct
  source 1..17: mol_type = other DNA
ccccggggtaatcccgc

SEQ ID NO: 177273 - DNA, 17 bp, synthetic construct
  source 1..17: mol_type = other DNA
cccccggggtaatcccg

SEQ ID NO: 177274 - DNA, 17 bp, synthetic construct
  source 1..17: mol_type = other DNA
gcccccggggtaatccc

SEQ ID NO: 177275 - DNA, 17 bp, synthetic construct
  source 1..17: mol_type = other DNA
tgcccccggggtaatcc

SEQ ID NO: 177276 - DNA, 17 bp, synthetic construct
  source 1..17: mol_type = other DNA
ctgcccccggggtaatc

SEQ ID NO: 177277 - DNA, 17 bp, synthetic construct
  source 1..17: mol_type = other DNA
cctgcccccggggtaat

SEQ ID NO: 177278 - DNA, 17 bp, synthetic construct
  source 1..17: mol_type = other DNA
acctgcccccggggtaa

SEQ ID NO: 177279 - DNA, 17 bp, synthetic construct
  source 1..17: mol_type = other DNA
cacctgcccccggggta

SEQ ID NO: 177280 - DNA, 17 bp, synthetic construct
  source 1..17: mol_type = other DNA
ccacctgcccccggggt

SEQ ID NO: 177281 - DNA, 17 bp, synthetic construct
  source 1..17: mol_type = other DNA
tccacctgcccccgggg

SEQ ID NO: 177282 - DNA, 17 bp, synthetic construct
  source 1..17: mol_type = other DNA
ctccacctgcccccggg

SEQ ID NO: 177283 - DNA, 17 bp, synthetic construct
  source 1..17: mol_type = other DNA
gctccacctgcccccgg

SEQ ID NO: 177284 - DNA, 17 bp, synthetic construct
  source 1..17: mol_type = other DNA
tgctccacctgcccccg

SEQ ID NO: 177285 - DNA, 17 bp, synthetic construct
  source 1..17: mol_type = other DNA
ctgctccacctgccccc

SEQ ID NO: 177286 - DNA, 17 bp, synthetic construct
  source 1..17: mol_type = other DNA
tctgctccacctgcccc

SEQ ID NO: 177287 - DNA, 17 bp, synthetic construct
  source 1..17: mol_type = other DNA
ctctgctccacctgccc

SEQ ID NO: 177288 - DNA, 17 bp, synthetic construct
  source 1..17: mol_type = other DNA
actctgctccacctgcc

SEQ ID NO: 177289 - DNA, 17 bp, synthetic construct
  source 1..17: mol_type = other DNA
cactctgctccacctgc

SEQ ID NO: 177290 - DNA, 17 bp, synthetic construct
  source 1..17: mol_type = other DNA
gcactctgctccacctg

SEQ ID NO: 177291 - DNA, 17 bp, synthetic construct
  source 1..17: mol_type = other DNA
tgcactctgctccacct

SEQ ID NO: 177292 - DNA, 17 bp, synthetic construct
  source 1..17: mol_type = other DNA
gtgcactctgctccacc

SEQ ID NO: 177293 - DNA, 17 bp, synthetic construct
  source 1..17: mol_type = other DNA
ggtgcactctgctccac

SEQ ID NO: 177294 - DNA, 17 bp, synthetic construct
  source 1..17: mol_type = other DNA
cggtgcactctgctcca

SEQ ID NO: 177295 - DNA, 17 bp, synthetic construct
  source 1..17: mol_type = other DNA
acggtgcactctgctcc

SEQ ID NO: 177296 - DNA, 17 bp, synthetic construct
  source 1..17: mol_type = other DNA
gacggtgcactctgctc

SEQ ID NO: 177297 - DNA, 17 bp, synthetic construct
  source 1..17: mol_type = other DNA
cgacggtgcactctgct

SEQ ID NO: 177298 - DNA, 17 bp, synthetic construct
  source 1..17: mol_type = other DNA
ccgacggtgcactctgc

SEQ ID NO: 177299 - DNA, 17 bp, synthetic construct
  source 1..17: mol_type = other DNA
gccgacggtgcactctg

SEQ ID NO: 177300 - DNA, 17 bp, synthetic construct
  source 1..17: mol_type = other DNA
agccgacggtgcactct

SEQ ID NO: 177301 - DNA, 17 bp, synthetic construct
  source 1..17: mol_type = other DNA
tagccgacggtgcactc

SEQ ID NO: 177302 - DNA, 17 bp, synthetic construct
  source 1..17: mol_type = other DNA
ctagccgacggtgcact

SEQ ID NO: 177303 - DNA, 17 bp, synthetic construct
  source 1..17: mol_type = other DNA
cctagccgacggtgcac

SEQ ID NO: 177304 - DNA, 17 bp, synthetic construct
  source 1..17: mol_type = other DNA
gcctagccgacggtgca

SEQ ID NO: 177305 - DNA, 17 bp, synthetic construct
  source 1..17: mol_type = other DNA
agcctagccgacggtgc

SEQ ID NO: 177306 - DNA, 17 bp, synthetic construct
  source 1..17: mol_type = other DNA
cagcctagccgacggtg

SEQ ID NO: 177307 - DNA, 17 bp, synthetic construct
  source 1..17: mol_type = other DNA
ccagcctagccgacggt

SEQ ID NO: 177308 - DNA, 17 bp, synthetic construct
  source 1..17: mol_type = other DNA
gccagcctagccgacgg

SEQ ID NO: 177309 - DNA, 17 bp, synthetic construct
  source 1..17: mol_type = other DNA
tgccagcctagccgacg

SEQ ID NO: 177310 - DNA, 17 bp, synthetic construct
  source 1..17: mol_type = other DNA
ctgccagcctagccgac

SEQ ID NO: 177311 - DNA, 17 bp, synthetic construct
  source 1..17: mol_type = other DNA
tctgccagcctagccga

SEQ ID NO: 177312 - DNA, 17 bp, synthetic construct
  source 1..17: mol_type = other DNA
ttctgccagcctagccg

SEQ ID NO: 177313 - DNA, 17 bp, synthetic construct
  source 1..17: mol_type = other DNA
attctgccagcctagcc

SEQ ID NO: 177314 - DNA, 17 bp, synthetic construct
  source 1..17: mol_type = other DNA
cattctgccagcctagc

SEQ ID NO: 177315 - DNA, 17 bp, synthetic construct
  source 1..17: mol_type = other DNA
ccattctgccagcctag

SEQ ID NO: 177316 - DNA, 17 bp, synthetic construct
  source 1..17: mol_type = other DNA
cccattctgccagccta

SEQ ID NO: 177317 - DNA, 17 bp, synthetic construct
  source 1..17: mol_type = other DNA
ccccattctgccagcct

SEQ ID NO: 177318 - DNA, 17 bp, synthetic construct
  source 1..17: mol_type = other DNA
gccccattctgccagcc

SEQ ID NO: 177319 - DNA, 17 bp, synthetic construct
  source 1..17: mol_type = other DNA
tgccccattctgccagc

SEQ ID NO: 177320 - DNA, 17 bp, synthetic construct
  source 1..17: mol_type = other DNA
atgccccattctgccag

SEQ ID NO: 177321 - DNA, 17 bp, synthetic construct
  source 1..17: mol_type = other DNA
catgccccattctgcca

SEQ ID NO: 177322 - DNA, 17 bp, synthetic construct
  source 1..17: mol_type = other DNA
ccatgccccattctgcc

SEQ ID NO: 177323 - DNA, 17 bp, synthetic construct
  source 1..17: mol_type = other DNA
accatgccccattctgc

SEQ ID NO: 177324 - DNA, 17 bp, synthetic construct
  source 1..17: mol_type = other DNA
caccatgccccattctg

SEQ ID NO: 177325 - DNA, 17 bp, synthetic construct
  source 1..17: mol_type = other DNA
ccaccatgccccattct

SEQ ID NO: 177326 - DNA, 17 bp, synthetic construct
  source 1..17: mol_type = other DNA
cccaccatgccccattc

SEQ ID NO: 177327 - DNA, 17 bp, synthetic construct
  source 1..17: mol_type = other DNA
ccccaccatgccccatt

SEQ ID NO: 177328 - DNA, 17 bp, synthetic construct
  source 1..17: mol_type = other DNA
gccccaccatgccccat

SEQ ID NO: 177329 - DNA, 17 bp, synthetic construct
  source 1..17: mol_type = other DNA
tgccccaccatgcccca

SEQ ID NO: 177330 - DNA, 17 bp, synthetic construct
  source 1..17: mol_type = other DNA
gtgccccaccatgcccc

SEQ ID NO: 177331 - DNA, 17 bp, synthetic construct
  source 1..17: mol_type = other DNA
tgtgccccaccatgccc

SEQ ID NO: 177332 - DNA, 17 bp, synthetic construct
  source 1..17: mol_type = other DNA
ctgtgccccaccatgcc

SEQ ID NO: 177333 - DNA, 17 bp, synthetic construct
  source 1..17: mol_type = other DNA
actgtgccccaccatgc

SEQ ID NO: 177334 - DNA, 17 bp, synthetic construct
  source 1..17: mol_type = other DNA
cactgtgccccaccatg

SEQ ID NO: 177335 - DNA, 17 bp, synthetic construct
  source 1..17: mol_type = other DNA
ccactgtgccccaccat

SEQ ID NO: 177336 - DNA, 17 bp, synthetic construct
  source 1..17: mol_type = other DNA
cccactgtgccccacca

SEQ ID NO: 177337 - DNA, 17 bp, synthetic construct
  source 1..17: mol_type = other DNA
ccccactgtgccccacc

SEQ ID NO: 177338 - DNA, 17 bp, synthetic construct
  source 1..17: mol_type = other DNA
accccactgtgccccac

SEQ ID NO: 177339 - DNA, 17 bp, synthetic construct
  source 1..17: mol_type = other DNA
caccccactgtgcccca

SEQ ID NO: 177340 - DNA, 17 bp, synthetic construct
  source 1..17: mol_type = other DNA
gcaccccactgtgcccc

SEQ ID NO: 177341 - DNA, 17 bp, synthetic construct
  source 1..17: mol_type = other DNA
tgcaccccactgtgccc

SEQ ID NO: 177342 - DNA, 17 bp, synthetic construct
  source 1..17: mol_type = other DNA
ctgcaccccactgtgcc

SEQ ID NO: 177343 - DNA, 17 bp, synthetic construct
  source 1..17: mol_type = other DNA
actgcaccccactgtgc

SEQ ID NO: 177344 - DNA, 17 bp, synthetic construct
  source 1..17: mol_type = other DNA
cactgcaccccactgtg

SEQ ID NO: 177345 - DNA, 17 bp, synthetic construct
  source 1..17: mol_type = other DNA
ccactgcaccccactgt

SEQ ID NO: 177346 - DNA, 17 bp, synthetic construct
  source 1..17: mol_type = other DNA
cccactgcaccccactg

SEQ ID NO: 177347 - DNA, 17 bp, synthetic construct
  source 1..17: mol_type = other DNA
ccccactgcaccccact

SEQ ID NO: 177348 - DNA, 17 bp, synthetic construct
  source 1..17: mol_type = other DNA
tccccactgcaccccac

SEQ ID NO: 177349 - DNA, 17 bp, synthetic construct
  source 1..17: mol_type = other DNA
ttccccactgcacccca

SEQ ID NO: 177350 - DNA, 17 bp, synthetic construct
  source 1..17: mol_type = other DNA
attccccactgcacccc

SEQ ID NO: 177351 - DNA, 17 bp, synthetic construct
  source 1..17: mol_type = other DNA
cattccccactgcaccc

SEQ ID NO: 177352 - DNA, 17 bp, synthetic construct
  source 1..17: mol_type = other DNA
ccattccccactgcacc

SEQ ID NO: 177353 - DNA, 17 bp, synthetic construct
  source 1..17: mol_type = other DNA
accattccccactgcac

SEQ ID NO: 177354 - DNA, 17 bp, synthetic construct
  source 1..17: mol_type = other DNA
caccattccccactgca

SEQ ID NO: 177355 - DNA, 17 bp, synthetic construct
  source 1..17: mol_type = other DNA
ccaccattccccactgc

SEQ ID NO: 177356 - DNA, 17 bp, synthetic construct
  source 1..17: mol_type = other DNA
cccaccattccccactg

SEQ ID NO: 177357 - DNA, 17 bp, synthetic construct
  source 1..17: mol_type = other DNA
ccccaccattccccact

SEQ ID NO: 177358 - DNA, 17 bp, synthetic construct
  source 1..17: mol_type = other DNA
gccccaccattccccac

SEQ ID NO: 177359 - DNA, 17 bp, synthetic construct
  source 1..17: mol_type = other DNA
tgccccaccattcccca

SEQ ID NO: 177360 - DNA, 17 bp, synthetic construct
  source 1..17: mol_type = other DNA
atgccccaccattcccc

SEQ ID NO: 177361 - DNA, 17 bp, synthetic construct
  source 1..17: mol_type = other DNA
catgccccaccattccc

SEQ ID NO: 177362 - DNA, 17 bp, synthetic construct
  source 1..17: mol_type = other DNA
ccatgccccaccattcc

SEQ ID NO: 177363 - DNA, 17 bp, synthetic construct
  source 1..17: mol_type = other DNA
accatgccccaccattc

SEQ ID NO: 177364 - DNA, 17 bp, synthetic construct
  source 1..17: mol_type = other DNA
caccatgccccaccatt

SEQ ID NO: 177365 - DNA, 17 bp, synthetic construct
  source 1..17: mol_type = other DNA
ccaccatgccccaccat

SEQ ID NO: 177366 - DNA, 17 bp, synthetic construct
  source 1..17: mol_type = other DNA
cccaccatgccccacca

SEQ ID NO: 177367 - DNA, 17 bp, synthetic construct
  source 1..17: mol_type = other DNA
ccccaccatgccccacc

SEQ ID NO: 177368 - DNA, 17 bp, synthetic construct
  source 1..17: mol_type = other DNA
gccccaccatgccccac

SEQ ID NO: 177369 - DNA, 17 bp, synthetic construct
  source 1..17: mol_type = other DNA
tgccccaccatgcccca

SEQ ID NO: 177370 - DNA, 17 bp, synthetic construct
  source 1..17: mol_type = other DNA
atgccccaccatgcccc

SEQ ID NO: 177371 - DNA, 17 bp, synthetic construct
  source 1..17: mol_type = other DNA
catgccccaccatgccc

SEQ ID NO: 177372 - DNA, 17 bp, synthetic construct
  source 1..17: mol_type = other DNA
ccatgccccaccatgcc

SEQ ID NO: 177373 - DNA, 17 bp, synthetic construct
  source 1..17: mol_type = other DNA
accatgccccaccatgc

SEQ ID NO: 177374 - DNA, 17 bp, synthetic construct
  source 1..17: mol_type = other DNA
caccatgccccaccatg

SEQ ID NO: 177375 - DNA, 17 bp, synthetic construct
  source 1..17: mol_type = other DNA
ccaccatgccccaccat

SEQ ID NO: 177376 - DNA, 17 bp, synthetic construct
  source 1..17: mol_type = other DNA
cccaccatgccccacca

SEQ ID NO: 177377 - DNA, 17 bp, synthetic construct
  source 1..17: mol_type = other DNA
ccccaccatgccccacc

SEQ ID NO: 177378 - DNA, 17 bp, synthetic construct
  source 1..17: mol_type = other DNA
accccaccatgccccac

SEQ ID NO: 177379 - DNA, 17 bp, synthetic construct
  source 1..17: mol_type = other DNA
caccccaccatgcccca

SEQ ID NO: 177380 - DNA, 17 bp, synthetic construct
  source 1..17: mol_type = other DNA
gcaccccaccatgcccc

SEQ ID NO: 177381 - DNA, 17 bp, synthetic construct
  source 1..17: mol_type = other DNA
tgcaccccaccatgccc

SEQ ID NO: 177382 - DNA, 17 bp, synthetic construct
  source 1..17: mol_type = other DNA
ctgcaccccaccatgcc

SEQ ID NO: 177383 - DNA, 17 bp, synthetic construct
  source 1..17: mol_type = other DNA
actgcaccccaccatgc

SEQ ID NO: 177384 - DNA, 17 bp, synthetic construct
  source 1..17: mol_type = other DNA
cactgcaccccaccatg

SEQ ID NO: 177385 - DNA, 17 bp, synthetic construct
  source 1..17: mol_type = other DNA
ccactgcaccccaccat

SEQ ID NO: 177386 - DNA, 17 bp, synthetic construct
  source 1..17: mol_type = other DNA
cccactgcaccccacca

SEQ ID NO: 177387 - DNA, 17 bp, synthetic construct
  source 1..17: mol_type = other DNA
ccccactgcaccccacc

SEQ ID NO: 177388 - DNA, 17 bp, synthetic construct
  source 1..17: mol_type = other DNA
gccccactgcaccccac

SEQ ID NO: 177389 - DNA, 17 bp, synthetic construct
  source 1..17: mol_type = other DNA
tgccccactgcacccca

SEQ ID NO: 177390 - DNA, 17 bp, synthetic construct
  source 1..17: mol_type = other DNA
atgccccactgcacccc

SEQ ID NO: 177391 - DNA, 17 bp, synthetic construct
  source 1..17: mol_type = other DNA
catgccccactgcaccc

SEQ ID NO: 177392 - DNA, 17 bp, synthetic construct
  source 1..17: mol_type = other DNA
ccatgccccactgcacc

SEQ ID NO: 177393 - DNA, 17 bp, synthetic construct
  source 1..17: mol_type = other DNA
accatgccccactgcac

SEQ ID NO: 177394 - DNA, 17 bp, synthetic construct
  source 1..17: mol_type = other DNA
caccatgccccactgca

SEQ ID NO: 177395 - DNA, 17 bp, synthetic construct
  source 1..17: mol_type = other DNA
ccaccatgccccactgc

SEQ ID NO: 177396 - DNA, 17 bp, synthetic construct
  source 1..17: mol_type = other DNA
cccaccatgccccactg

SEQ ID NO: 177397 - DNA, 17 bp, synthetic construct
  source 1..17: mol_type = other DNA
ccccaccatgccccact

SEQ ID NO: 177398 - DNA, 17 bp, synthetic construct
  source 1..17: mol_type = other DNA
gccccaccatgccccac

SEQ ID NO: 177399 - DNA, 17 bp, synthetic construct
  source 1..17: mol_type = other DNA
tgccccaccatgcccca

SEQ ID NO: 177400 - DNA, 17 bp, synthetic construct
  source 1..17: mol_type = other DNA
atgccccaccatgcccc

SEQ ID NO: 177401 - DNA, 17 bp, synthetic construct
  source 1..17: mol_type = other DNA
catgccccaccatgccc

SEQ ID NO: 177402 - DNA, 17 bp, synthetic construct
  source 1..17: mol_type = other DNA
ccatgccccaccatgcc

SEQ ID NO: 177403 - DNA, 17 bp, synthetic construct
  source 1..17: mol_type = other DNA
accatgccccaccatgc

SEQ ID NO: 177404 - DNA, 17 bp, synthetic construct
  source 1..17: mol_type = other DNA
caccatgccccaccatg

SEQ ID NO: 177405 - DNA, 17 bp, synthetic construct
  source 1..17: mol_type = other DNA
ccaccatgccccaccat

SEQ ID NO: 177406 - DNA, 17 bp, synthetic construct
  source 1..17: mol_type = other DNA
cccaccatgccccacca

SEQ ID NO: 177407 - DNA, 17 bp, synthetic construct
  source 1..17: mol_type = other DNA
ccccaccatgccccacc

SEQ ID NO: 177408 - DNA, 17 bp, synthetic construct
  source 1..17: mol_type = other DNA
accccaccatgccccac

SEQ ID NO: 177409 - DNA, 17 bp, synthetic construct
  source 1..17: mol_type = other DNA
caccccaccatgcccca

SEQ ID NO: 177410 - DNA, 17 bp, synthetic construct
  source 1..17: mol_type = other DNA
acaccccaccatgcccc

SEQ ID NO: 177411 - DNA, 17 bp, synthetic construct
  source 1..17: mol_type = other DNA
cacaccccaccatgccc

SEQ ID NO: 177412 - DNA, 17 bp, synthetic construct
  source 1..17: mol_type = other DNA
ccacaccccaccatgcc

SEQ ID NO: 177413 - DNA, 17 bp, synthetic construct
  source 1..17: mol_type = other DNA
accacaccccaccatgc

SEQ ID NO: 177414 - DNA, 17 bp, synthetic construct
  source 1..17: mol_type = other DNA
caccacaccccaccatg

SEQ ID NO: 177415 - DNA, 17 bp, synthetic construct
  source 1..17: mol_type = other DNA
ccaccacaccccaccat

SEQ ID NO: 177416 - DNA, 17 bp, synthetic construct
  source 1..17: mol_type = other DNA
accaccacaccccacca

SEQ ID NO: 177417 - DNA, 17 bp, synthetic construct
  source 1..17: mol_type = other DNA
caccaccacaccccacc

SEQ ID NO: 177418 - DNA, 17 bp, synthetic construct
  source 1..17: mol_type = other DNA
ccaccaccacaccccac

SEQ ID NO: 177419 - DNA, 17 bp, synthetic construct
  source 1..17: mol_type = other DNA
accaccaccacacccca

SEQ ID NO: 177420 - DNA, 17 bp, synthetic construct
  source 1..17: mol_type = other DNA
caccaccaccacacccc

SEQ ID NO: 177421 - DNA, 17 bp, synthetic construct
  source 1..17: mol_type = other DNA
acaccaccaccacaccc

SEQ ID NO: 177422 - DNA, 17 bp, synthetic construct
  source 1..17: mol_type = other DNA
aacaccaccaccacacc

SEQ ID NO: 177423 - DNA, 17 bp, synthetic construct
  source 1..17: mol_type = other DNA
aaacaccaccaccacac

SEQ ID NO: 177424 - DNA, 17 bp, synthetic construct
  source 1..17: mol_type = other DNA
caaacaccaccaccaca

SEQ ID NO: 177425 - DNA, 17 bp, synthetic construct
  source 1..17: mol_type = other DNA
ccaaacaccaccaccac

SEQ ID NO: 177426 - DNA, 17 bp, synthetic construct
  source 1..17: mol_type = other DNA
cccaaacaccaccacca

SEQ ID NO: 177427 - DNA, 17 bp, synthetic construct
  source 1..17: mol_type = other DNA
tcccaaacaccaccacc

SEQ ID NO: 177428 - DNA, 17 bp, synthetic construct
  source 1..17: mol_type = other DNA
ctcccaaacaccaccac

SEQ ID NO: 177429 - DNA, 17 bp, synthetic construct
  source 1..17: mol_type = other DNA
tctcccaaacaccacca

SEQ ID NO: 177430 - DNA, 17 bp, synthetic construct
  source 1..17: mol_type = other DNA
atctcccaaacaccacc

SEQ ID NO: 177431 - DNA, 17 bp, synthetic construct
  source 1..17: mol_type = other DNA
gatctcccaaacaccac

SEQ ID NO: 177432 - DNA, 17 bp, synthetic construct
  source 1..17: mol_type = other DNA
cgatctcccaaacacca

SEQ ID NO: 177433 - DNA, 17 bp, synthetic construct
  source 1..17: mol_type = other DNA
gcgatctcccaaacacc

SEQ ID NO: 177434 - DNA, 17 bp, synthetic construct
  source 1..17: mol_type = other DNA
agcgatctcccaaacac

SEQ ID NO: 177435 - DNA, 17 bp, synthetic construct
  source 1..17: mol_type = other DNA
cagcgatctcccaaaca

SEQ ID NO: 177436 - DNA, 17 bp, synthetic construct
  source 1..17: mol_type = other DNA
ccagcgatctcccaaac

SEQ ID NO: 177437 - DNA, 17 bp, synthetic construct
  source 1..17: mol_type = other DNA
gccagcgatctcccaaa

SEQ ID NO: 177438 - DNA, 17 bp, synthetic construct
  source 1..17: mol_type = other DNA
tgccagcgatctcccaa

SEQ ID NO: 177439 - DNA, 17 bp, synthetic construct
  source 1..17: mol_type = other DNA
atgccagcgatctccca

SEQ ID NO: 177440 - DNA, 17 bp, synthetic construct
  source 1..17: mol_type = other DNA
gatgccagcgatctccc

SEQ ID NO: 177441 - DNA, 17 bp, synthetic construct
  source 1..17: mol_type = other DNA
ggatgccagcgatctcc

SEQ ID NO: 177442 - DNA, 17 bp, synthetic construct
  source 1..17: mol_type = other DNA
gggatgccagcgatctc

SEQ ID NO: 177443 - DNA, 17 bp, synthetic construct
  source 1..17: mol_type = other DNA
agggatgccagcgatct

SEQ ID NO: 177444 - DNA, 17 bp, synthetic construct
  source 1..17: mol_type = other DNA
aagggatgccagcgatc

SEQ ID NO: 177445 - DNA, 17 bp, synthetic construct
  source 1..17: mol_type = other DNA
gaagggatgccagcgat

SEQ ID NO: 177446 - DNA, 17 bp, synthetic construct
  source 1..17: mol_type = other DNA
tgaagggatgccagcga

SEQ ID NO: 177447 - DNA, 17 bp, synthetic construct
  source 1..17: mol_type = other DNA
ctgaagggatgccagcg

SEQ ID NO: 177448 - DNA, 17 bp, synthetic construct
  source 1..17: mol_type = other DNA
cctgaagggatgccagc

SEQ ID NO: 177449 - DNA, 17 bp, synthetic construct
  source 1..17: mol_type = other DNA
tcctgaagggatgccag

SEQ ID NO: 177450 - DNA, 17 bp, synthetic construct
  source 1..17: mol_type = other DNA
ttcctgaagggatgcca

SEQ ID NO: 177451 - DNA, 17 bp, synthetic construct
  source 1..17: mol_type = other DNA
tttcctgaagggatgcc

SEQ ID NO: 177452 - DNA, 17 bp, synthetic construct
  source 1..17: mol_type = other DNA
gtttcctgaagggatgc

SEQ ID NO: 177453 - DNA, 17 bp, synthetic construct
  source 1..17: mol_type = other DNA
ggtttcctgaagggatg

SEQ ID NO: 177454 - DNA, 17 bp, synthetic construct
  source 1..17: mol_type = other DNA
tggtttcctgaagggat

SEQ ID NO: 177455 - DNA, 17 bp, synthetic construct
  source 1..17: mol_type = other DNA
atggtttcctgaaggga

SEQ ID NO: 177456 - DNA, 17 bp, synthetic construct
  source 1..17: mol_type = other DNA
gatggtttcctgaaggg

SEQ ID NO: 177457 - DNA, 17 bp, synthetic construct
  source 1..17: mol_type = other DNA
tgatggtttcctgaagg

SEQ ID NO: 177458 - DNA, 17 bp, synthetic construct
  source 1..17: mol_type = other DNA
atgatggtttcctgaag

SEQ ID NO: 177459 - DNA, 17 bp, synthetic construct
  source 1..17: mol_type = other DNA
catgatggtttcctgaa

SEQ ID NO: 177460 - DNA, 17 bp, synthetic construct
  source 1..17: mol_type = other DNA
gcatgatggtttcctga

SEQ ID NO: 177461 - DNA, 17 bp, synthetic construct
  source 1..17: mol_type = other DNA
tgcatgatggtttcctg

SEQ ID NO: 177462 - DNA, 17 bp, synthetic construct
  source 1..17: mol_type = other DNA
gtgcatgatggtttcct

SEQ ID NO: 177463 - DNA, 17 bp, synthetic construct
  source 1..17: mol_type = other DNA
ggtgcatgatggtttcc

SEQ ID NO: 177464 - DNA, 17 bp, synthetic construct
  source 1..17: mol_type = other DNA
tggtgcatgatggtttc

SEQ ID NO: 177465 - DNA, 17 bp, synthetic construct
  source 1..17: mol_type = other DNA
atggtgcatgatggttt

SEQ ID NO: 177466 - DNA, 17 bp, synthetic construct
  source 1..17: mol_type = other DNA
catggtgcatgatggtt

SEQ ID NO: 177467 - DNA, 17 bp, synthetic construct
  source 1..17: mol_type = other DNA
gcatggtgcatgatggt

SEQ ID NO: 177468 - DNA, 17 bp, synthetic construct
  source 1..17: mol_type = other DNA
agcatggtgcatgatgg

SEQ ID NO: 177469 - DNA, 17 bp, synthetic construct
  source 1..17: mol_type = other DNA
cagcatggtgcatgatg

SEQ ID NO: 177470 - DNA, 17 bp, synthetic construct
  source 1..17: mol_type = other DNA
acagcatggtgcatgat

SEQ ID NO: 177471 - DNA, 17 bp, synthetic construct
  source 1..17: mol_type = other DNA
gacagcatggtgcatga

SEQ ID NO: 177472 - DNA, 17 bp, synthetic construct
  source 1..17: mol_type = other DNA
agacagcatggtgcatg

SEQ ID NO: 177473 - DNA, 17 bp, synthetic construct
  source 1..17: mol_type = other DNA
aagacagcatggtgcat

SEQ ID NO: 177474 - DNA, 17 bp, synthetic construct
  source 1..17: mol_type = other DNA
caagacagcatggtgca

SEQ ID NO: 177475 - DNA, 17 bp, synthetic construct
  source 1..17: mol_type = other DNA
ccaagacagcatggtgc

SEQ ID NO: 177476 - DNA, 17 bp, synthetic construct
  source 1..17: mol_type = other DNA
cccaagacagcatggtg

SEQ ID NO: 177477 - DNA, 17 bp, synthetic construct
  source 1..17: mol_type = other DNA
gcccaagacagcatggt

SEQ ID NO: 177478 - DNA, 17 bp, synthetic construct
  source 1..17: mol_type = other DNA
ggcccaagacagcatgg

SEQ ID NO: 177479 - DNA, 17 bp, synthetic construct
  source 1..17: mol_type = other DNA
aggcccaagacagcatg

SEQ ID NO: 177480 - DNA, 17 bp, synthetic construct
  source 1..17: mol_type = other DNA
gaggcccaagacagcat

SEQ ID NO: 177481 - DNA, 17 bp, synthetic construct
  source 1..17: mol_type = other DNA
tgaggcccaagacagca

SEQ ID NO: 177482 - DNA, 17 bp, synthetic construct
  source 1..17: mol_type = other DNA
ctgaggcccaagacagc

SEQ ID NO: 177483 - DNA, 17 bp, synthetic construct
  source 1..17: mol_type = other DNA
actgaggcccaagacag

SEQ ID NO: 177484 - DNA, 17 bp, synthetic construct
  source 1..17: mol_type = other DNA
cactgaggcccaagaca

SEQ ID NO: 177485 - DNA, 17 bp, synthetic construct
  source 1..17: mol_type = other DNA
ccactgaggcccaagac

SEQ ID NO: 177486 - DNA, 17 bp, synthetic construct
  source 1..17: mol_type = other DNA
accactgaggcccaaga

SEQ ID NO: 177487 - DNA, 17 bp, synthetic construct
  source 1..17: mol_type = other DNA
caccactgaggcccaag

SEQ ID NO: 177488 - DNA, 17 bp, synthetic construct
  source 1..17: mol_type = other DNA
gcaccactgaggcccaa

SEQ ID NO: 177489 - DNA, 17 bp, synthetic construct
  source 1..17: mol_type = other DNA
tgcaccactgaggccca

SEQ ID NO: 177490 - DNA, 17 bp, synthetic construct
  source 1..17: mol_type = other DNA
gtgcaccactgaggccc

SEQ ID NO: 177491 - DNA, 17 bp, synthetic construct
  source 1..17: mol_type = other DNA
cgtgcaccactgaggcc

SEQ ID NO: 177492 - DNA, 17 bp, synthetic construct
  source 1..17: mol_type = other DNA
acgtgcaccactgaggc

SEQ ID NO: 177493 - DNA, 17 bp, synthetic construct
  source 1..17: mol_type = other DNA
gacgtgcaccactgagg

SEQ ID NO: 177494 - DNA, 17 bp, synthetic construct
  source 1..17: mol_type = other DNA
cgacgtgcaccactgag

SEQ ID NO: 177495 - DNA, 17 bp, synthetic construct
  source 1..17: mol_type = other DNA
acgacgtgcaccactga

SEQ ID NO: 177496 - DNA, 17 bp, synthetic construct
  source 1..17: mol_type = other DNA
cacgacgtgcaccactg

SEQ ID NO: 177497 - DNA, 17 bp, synthetic construct
  source 1..17: mol_type = other DNA
tcacgacgtgcaccact

SEQ ID NO: 177498 - DNA, 17 bp, synthetic construct
  source 1..17: mol_type = other DNA
ctcacgacgtgcaccac

SEQ ID NO: 177499 - DNA, 17 bp, synthetic construct
  source 1..17: mol_type = other DNA
tctcacgacgtgcacca

SEQ ID NO: 177500 - DNA, 17 bp, synthetic construct
  source 1..17: mol_type = other DNA
ctctcacgacgtgcacc

SEQ ID NO: 177501 - DNA, 17 bp, synthetic construct
  source 1..17: mol_type = other DNA
gctctcacgacgtgcac

SEQ ID NO: 177502 - DNA, 17 bp, synthetic construct
  source 1..17: mol_type = other DNA
agctctcacgacgtgca

SEQ ID NO: 177503 - DNA, 17 bp, synthetic construct
  source 1..17: mol_type = other DNA
cagctctcacgacgtgc

SEQ ID NO: 177504 - DNA, 17 bp, synthetic construct
  source 1..17: mol_type = other DNA
acagctctcacgacgtg

SEQ ID NO: 177505 - DNA, 17 bp, synthetic construct
  source 1..17: mol_type = other DNA
aacagctctcacgacgt

SEQ ID NO: 177506 - DNA, 17 bp, synthetic construct
  source 1..17: mol_type = other DNA
taacagctctcacgacg

SEQ ID NO: 177507 - DNA, 17 bp, synthetic construct
  source 1..17: mol_type = other DNA
ctaacagctctcacgac

SEQ ID NO: 177508 - DNA, 17 bp, synthetic construct
  source 1..17: mol_type = other DNA
actaacagctctcacga

SEQ ID NO: 177509 - DNA, 17 bp, synthetic construct
  source 1..17: mol_type = other DNA
tactaacagctctcacg

SEQ ID NO: 177510 - DNA, 17 bp, synthetic construct
  source 1..17: mol_type = other DNA
atactaacagctctcac

SEQ ID NO: 177511 - DNA, 17 bp, synthetic construct
  source 1..17: mol_type = other DNA
catactaacagctctca

SEQ ID NO: 177512 - DNA, 17 bp, synthetic construct
  source 1..17: mol_type = other DNA
gcatactaacagctctc

SEQ ID NO: 177513 - DNA, 17 bp, synthetic construct
  source 1..17: mol_type = other DNA
tgcatactaacagctct

SEQ ID NO: 177514 - DNA, 17 bp, synthetic construct
  source 1..17: mol_type = other DNA
ctgcatactaacagctc

SEQ ID NO: 177515 - DNA, 17 bp, synthetic construct
  source 1..17: mol_type = other DNA
cctgcatactaacagct

SEQ ID NO: 177516 - DNA, 17 bp, synthetic construct
  source 1..17: mol_type = other DNA
gcctgcatactaacagc

SEQ ID NO: 177517 - DNA, 17 bp, synthetic construct
  source 1..17: mol_type = other DNA
agcctgcatactaacag

SEQ ID NO: 177518 - DNA, 17 bp, synthetic construct
  source 1..17: mol_type = other DNA
gagcctgcatactaaca

SEQ ID NO: 177519 - DNA, 17 bp, synthetic construct
  source 1..17: mol_type = other DNA
ggagcctgcatactaac

SEQ ID NO: 177520 - DNA, 17 bp, synthetic construct
  source 1..17: mol_type = other DNA
cggagcctgcatactaa

SEQ ID NO: 177521 - DNA, 17 bp, synthetic construct
  source 1..17: mol_type = other DNA
acggagcctgcatacta

SEQ ID NO: 177522 - DNA, 17 bp, synthetic construct
  source 1..17: mol_type = other DNA
cacggagcctgcatact

SEQ ID NO: 177523 - DNA, 17 bp, synthetic construct
  source 1..17: mol_type = other DNA
acacggagcctgcatac

SEQ ID NO: 177524 - DNA, 17 bp, synthetic construct
  source 1..17: mol_type = other DNA
gacacggagcctgcata

SEQ ID NO: 177525 - DNA, 17 bp, synthetic construct
  source 1..17: mol_type = other DNA
ggacacggagcctgcat

SEQ ID NO: 177526 - DNA, 17 bp, synthetic construct
  source 1..17: mol_type = other DNA
tggacacggagcctgca

SEQ ID NO: 177527 - DNA, 17 bp, synthetic construct
  source 1..17: mol_type = other DNA
gtggacacggagcctgc

SEQ ID NO: 177528 - DNA, 17 bp, synthetic construct
  source 1..17: mol_type = other DNA
tgtggacacggagcctg

SEQ ID NO: 177529 - DNA, 17 bp, synthetic construct
  source 1..17: mol_type = other DNA
ctgtggacacggagcct

SEQ ID NO: 177530 - DNA, 17 bp, synthetic construct
  source 1..17: mol_type = other DNA
cctgtggacacggagcc

SEQ ID NO: 177531 - DNA, 17 bp, synthetic construct
  source 1..17: mol_type = other DNA
ccctgtggacacggagc

SEQ ID NO: 177532 - DNA, 17 bp, synthetic construct
  source 1..17: mol_type = other DNA
gccctgtggacacggag

SEQ ID NO: 177533 - DNA, 17 bp, synthetic construct
  source 1..17: mol_type = other DNA
agccctgtggacacgga

SEQ ID NO: 177534 - DNA, 17 bp, synthetic construct
  source 1..17: mol_type = other DNA
cagccctgtggacacgg

SEQ ID NO: 177535 - DNA, 17 bp, synthetic construct
  source 1..17: mol_type = other DNA
tcagccctgtggacacg

SEQ ID NO: 177536 - DNA, 17 bp, synthetic construct
  source 1..17: mol_type = other DNA
ttcagccctgtggacac

SEQ ID NO: 177537 - DNA, 17 bp, synthetic construct
  source 1..17: mol_type = other DNA
tttcagccctgtggaca

SEQ ID NO: 177538 - DNA, 17 bp, synthetic construct
  source 1..17: mol_type = other DNA
ttttcagccctgtggac

SEQ ID NO: 177539 - DNA, 17 bp, synthetic construct
  source 1..17: mol_type = other DNA
attttcagccctgtgga

SEQ ID NO: 177540 - DNA, 17 bp, synthetic construct
  source 1..17: mol_type = other DNA
cattttcagccctgtgg

SEQ ID NO: 177541 - DNA, 17 bp, synthetic construct
  source 1..17: mol_type = other DNA
gcattttcagccctgtg

SEQ ID NO: 177542 - DNA, 17 bp, synthetic construct
  source 1..17: mol_type = other DNA
agcattttcagccctgt

SEQ ID NO: 177543 - DNA, 17 bp, synthetic construct
  source 1..17: mol_type = other DNA
cagcattttcagccctg

SEQ ID NO: 177544 - DNA, 17 bp, synthetic construct
  source 1..17: mol_type = other DNA
tcagcattttcagccct

SEQ ID NO: 177545 - DNA, 17 bp, synthetic construct
  source 1..17: mol_type = other DNA
gtcagcattttcagccc

SEQ ID NO: 177546 - DNA, 17 bp, synthetic construct
  source 1..17: mol_type = other DNA
tgtcagcattttcagcc

SEQ ID NO: 177547 - DNA, 17 bp, synthetic construct
  source 1..17: mol_type = other DNA
gtgtcagcattttcagc

SEQ ID NO: 177548 - DNA, 17 bp, synthetic construct
  source 1..17: mol_type = other DNA
tgtgtcagcattttcag

SEQ ID NO: 177549 - DNA, 17 bp, synthetic construct
  source 1..17: mol_type = other DNA
ctgtgtcagcattttca

SEQ ID NO: 177550 - DNA, 17 bp, synthetic construct
  source 1..17: mol_type = other DNA
gctgtgtcagcattttc

SEQ ID NO: 177551 - DNA, 17 bp, synthetic construct
  source 1..17: mol_type = other DNA
ggctgtgtcagcatttt

SEQ ID NO: 177552 - DNA, 17 bp, synthetic construct
  source 1..17: mol_type = other DNA
gggctgtgtcagcattt

SEQ ID NO: 177553 - DNA, 17 bp, synthetic construct
  source 1..17: mol_type = other DNA
tgggctgtgtcagcatt

SEQ ID NO: 177554 - DNA, 17 bp, synthetic construct
  source 1..17: mol_type = other DNA
ttgggctgtgtcagcat

SEQ ID NO: 177555 - DNA, 17 bp, synthetic construct
  source 1..17: mol_type = other DNA
cttgggctgtgtcagca

SEQ ID NO: 177556 - DNA, 17 bp, synthetic construct
  source 1..17: mol_type = other DNA
ccttgggctgtgtcagc

SEQ ID NO: 177557 - DNA, 17 bp, synthetic construct
  source 1..17: mol_type = other DNA
cccttgggctgtgtcag

SEQ ID NO: 177558 - DNA, 17 bp, synthetic construct
  source 1..17: mol_type = other DNA
tcccttgggctgtgtca

SEQ ID NO: 177559 - DNA, 17 bp, synthetic construct
  source 1..17: mol_type = other DNA
ctcccttgggctgtgtc

SEQ ID NO: 177560 - DNA, 17 bp, synthetic construct
  source 1..17: mol_type = other DNA
tctcccttgggctgtgt

SEQ ID NO: 177561 - DNA, 17 bp, synthetic construct
  source 1..17: mol_type = other DNA
ctctcccttgggctgtg

SEQ ID NO: 177562 - DNA, 17 bp, synthetic construct
  source 1..17: mol_type = other DNA
cctctcccttgggctgt

SEQ ID NO: 177563 - DNA, 17 bp, synthetic construct
  source 1..17: mol_type = other DNA
gcctctcccttgggctg

SEQ ID NO: 177564 - DNA, 17 bp, synthetic construct
  source 1..17: mol_type = other DNA
tgcctctcccttgggct

SEQ ID NO: 177565 - DNA, 17 bp, synthetic construct
  source 1..17: mol_type = other DNA
ctgcctctcccttgggc

SEQ ID NO: 177566 - DNA, 17 bp, synthetic construct
  source 1..17: mol_type = other DNA
gctgcctctcccttggg

SEQ ID NO: 177567 - DNA, 17 bp, synthetic construct
  source 1..17: mol_type = other DNA
tgctgcctctcccttgg

SEQ ID NO: 177568 - DNA, 17 bp, synthetic construct
  source 1..17: mol_type = other DNA
ctgctgcctctcccttg

SEQ ID NO: 177569 - DNA, 17 bp, synthetic construct
  source 1..17: mol_type = other DNA
tctgctgcctctccctt

SEQ ID NO: 177570 - DNA, 17 bp, synthetic construct
  source 1..17: mol_type = other DNA
ctctgctgcctctccct

SEQ ID NO: 177571 - DNA, 17 bp, synthetic construct
  source 1..17: mol_type = other DNA
cctctgctgcctctccc

SEQ ID NO: 177572 - DNA, 17 bp, synthetic construct
  source 1..17: mol_type = other DNA
gcctctgctgcctctcc

SEQ ID NO: 177573 - DNA, 17 bp, synthetic construct
  source 1..17: mol_type = other DNA
agcctctgctgcctctc

SEQ ID NO: 177574 - DNA, 17 bp, synthetic construct
  source 1..17: mol_type = other DNA
cagcctctgctgcctct

SEQ ID NO: 177575 - DNA, 17 bp, synthetic construct
  source 1..17: mol_type = other DNA
ccagcctctgctgcctc

SEQ ID NO: 177576 - DNA, 17 bp, synthetic construct
  source 1..17: mol_type = other DNA
accagcctctgctgcct

SEQ ID NO: 177577 - DNA, 17 bp, synthetic construct
  source 1..17: mol_type = other DNA
aaccagcctctgctgcc

SEQ ID NO: 177578 - DNA, 17 bp, synthetic construct
  source 1..17: mol_type = other DNA
aaaccagcctctgctgc

SEQ ID NO: 177579 - DNA, 17 bp, synthetic construct
  source 1..17: mol_type = other DNA
caaaccagcctctgctg

SEQ ID NO: 177580 - DNA, 17 bp, synthetic construct
  source 1..17: mol_type = other DNA
gcaaaccagcctctgct

SEQ ID NO: 177581 - DNA, 17 bp, synthetic construct
  source 1..17: mol_type = other DNA
agcaaaccagcctctgc

SEQ ID NO: 177582 - DNA, 17 bp, synthetic construct
  source 1..17: mol_type = other DNA
cagcaaaccagcctctg

SEQ ID NO: 177583 - DNA, 17 bp, synthetic construct
  source 1..17: mol_type = other DNA
tcagcaaaccagcctct

SEQ ID NO: 177584 - DNA, 17 bp, synthetic construct
  source 1..17: mol_type = other DNA
ctcagcaaaccagcctc

SEQ ID NO: 177585 - DNA, 17 bp, synthetic construct
  source 1..17: mol_type = other DNA
gctcagcaaaccagcct

SEQ ID NO: 177586 - DNA, 17 bp, synthetic construct
  source 1..17: mol_type = other DNA
agctcagcaaaccagcc

SEQ ID NO: 177587 - DNA, 17 bp, synthetic construct
  source 1..17: mol_type = other DNA
aagctcagcaaaccagc

SEQ ID NO: 177588 - DNA, 17 bp, synthetic construct
  source 1..17: mol_type = other DNA
gaagctcagcaaaccag

SEQ ID NO: 177589 - DNA, 17 bp, synthetic construct
  source 1..17: mol_type = other DNA
agaagctcagcaaacca

SEQ ID NO: 177590 - DNA, 17 bp, synthetic construct
  source 1..17: mol_type = other DNA
gagaagctcagcaaacc

SEQ ID NO: 177591 - DNA, 17 bp, synthetic construct
  source 1..17: mol_type = other DNA
agagaagctcagcaaac

SEQ ID NO: 177592 - DNA, 17 bp, synthetic construct
  source 1..17: mol_type = other DNA
cagagaagctcagcaaa

SEQ ID NO: 177593 - DNA, 17 bp, synthetic construct
  source 1..17: mol_type = other DNA
gcagagaagctcagcaa

SEQ ID NO: 177594 - DNA, 17 bp, synthetic construct
  source 1..17: mol_type = other DNA
tgcagagaagctcagca

SEQ ID NO: 177595 - DNA, 17 bp, synthetic construct
  source 1..17: mol_type = other DNA
gtgcagagaagctcagc

SEQ ID NO: 177596 - DNA, 17 bp, synthetic construct
  source 1..17: mol_type = other DNA
tgtgcagagaagctcag

SEQ ID NO: 177597 - DNA, 17 bp, synthetic construct
  source 1..17: mol_type = other DNA
atgtgcagagaagctca

SEQ ID NO: 177598 - DNA, 17 bp, synthetic construct
  source 1..17: mol_type = other DNA
gatgtgcagagaagctc

SEQ ID NO: 177599 - DNA, 17 bp, synthetic construct
  source 1..17: mol_type = other DNA
tgatgtgcagagaagct

SEQ ID NO: 177600 - DNA, 17 bp, synthetic construct
  source 1..17: mol_type = other DNA
ctgatgtgcagagaagc

SEQ ID NO: 177601 - DNA, 17 bp, synthetic construct
  source 1..17: mol_type = other DNA
gctgatgtgcagagaag

SEQ ID NO: 177602 - DNA, 17 bp, synthetic construct
  source 1..17: mol_type = other DNA
ggctgatgtgcagagaa

SEQ ID NO: 177603 - DNA, 17 bp, synthetic construct
  source 1..17: mol_type = other DNA
aggctgatgtgcagaga

SEQ ID NO: 177604 - DNA, 17 bp, synthetic construct
  source 1..17: mol_type = other DNA
caggctgatgtgcagag

SEQ ID NO: 177605 - DNA, 17 bp, synthetic construct
  source 1..17: mol_type = other DNA
acaggctgatgtgcaga

SEQ ID NO: 177606 - DNA, 17 bp, synthetic construct
  source 1..17: mol_type = other DNA
cacaggctgatgtgcag

SEQ ID NO: 177607 - DNA, 17 bp, synthetic construct
  source 1..17: mol_type = other DNA
acacaggctgatgtgca

SEQ ID NO: 177608 - DNA, 17 bp, synthetic construct
  source 1..17: mol_type = other DNA
cacacaggctgatgtgc

SEQ ID NO: 177609 - DNA, 17 bp, synthetic construct
  source 1..17: mol_type = other DNA
ccacacaggctgatgtg

SEQ ID NO: 177610 - DNA, 17 bp, synthetic construct
  source 1..17: mol_type = other DNA
accacacaggctgatgt

SEQ ID NO: 177611 - DNA, 17 bp, synthetic construct
  source 1..17: mol_type = other DNA
aaccacacaggctgatg

SEQ ID NO: 177612 - DNA, 17 bp, synthetic construct
  source 1..17: mol_type = other DNA
aaaccacacaggctgat

SEQ ID NO: 177613 - DNA, 17 bp, synthetic construct
  source 1..17: mol_type = other DNA
caaaccacacaggctga

SEQ ID NO: 177614 - DNA, 17 bp, synthetic construct
  source 1..17: mol_type = other DNA
tcaaaccacacaggctg

SEQ ID NO: 177615 - DNA, 17 bp, synthetic construct
  source 1..17: mol_type = other DNA
ttcaaaccacacaggct

SEQ ID NO: 177616 - DNA, 17 bp, synthetic construct
  source 1..17: mol_type = other DNA
tttcaaaccacacaggc

SEQ ID NO: 177617 - DNA, 17 bp, synthetic construct
  source 1..17: mol_type = other DNA
ctttcaaaccacacagg

SEQ ID NO: 177618 - DNA, 17 bp, synthetic construct
  source 1..17: mol_type = other DNA
cctttcaaaccacacag

SEQ ID NO: 177619 - DNA, 17 bp, synthetic construct
  source 1..17: mol_type = other DNA
ccctttcaaaccacaca

SEQ ID NO: 177620 - DNA, 17 bp, synthetic construct
  source 1..17: mol_type = other DNA
tccctttcaaaccacac

SEQ ID NO: 177621 - DNA, 17 bp, synthetic construct
  source 1..17: mol_type = other DNA
gtccctttcaaaccaca

SEQ ID NO: 177622 - DNA, 17 bp, synthetic construct
  source 1..17: mol_type = other DNA
ggtccctttcaaaccac

SEQ ID NO: 177623 - DNA, 17 bp, synthetic construct
  source 1..17: mol_type = other DNA
gggtccctttcaaacca

SEQ ID NO: 177624 - DNA, 17 bp, synthetic construct
  source 1..17: mol_type = other DNA
agggtccctttcaaacc

SEQ ID NO: 177625 - DNA, 17 bp, synthetic construct
  source 1..17: mol_type = other DNA
cagggtccctttcaaac

SEQ ID NO: 177626 - DNA, 17 bp, synthetic construct
  source 1..17: mol_type = other DNA
gcagggtccctttcaaa

SEQ ID NO: 177627 - DNA, 17 bp, synthetic construct
  source 1..17: mol_type = other DNA
ggcagggtccctttcaa

SEQ ID NO: 177628 - DNA, 17 bp, synthetic construct
  source 1..17: mol_type = other DNA
gggcagggtccctttca

SEQ ID NO: 177629 - DNA, 17 bp, synthetic construct
  source 1..17: mol_type = other DNA
tgggcagggtccctttc

SEQ ID NO: 177630 - DNA, 17 bp, synthetic construct
  source 1..17: mol_type = other DNA
ctgggcagggtcccttt

SEQ ID NO: 177631 - DNA, 17 bp, synthetic construct
  source 1..17: mol_type = other DNA
cctgggcagggtccctt

SEQ ID NO: 177632 - DNA, 17 bp, synthetic construct
  source 1..17: mol_type = other DNA
ccctgggcagggtccct

SEQ ID NO: 177633 - DNA, 17 bp, synthetic construct
  source 1..17: mol_type = other DNA
cccctgggcagggtccc

SEQ ID NO: 177634 - DNA, 17 bp, synthetic construct
  source 1..17: mol_type = other DNA
gcccctgggcagggtcc

SEQ ID NO: 177635 - DNA, 17 bp, synthetic construct
  source 1..17: mol_type = other DNA
agcccctgggcagggtc

SEQ ID NO: 177636 - DNA, 17 bp, synthetic construct
  source 1..17: mol_type = other DNA
aagcccctgggcagggt

SEQ ID NO: 177637 - DNA, 17 bp, synthetic construct
  source 1..17: mol_type = other DNA
gaagcccctgggcaggg

SEQ ID NO: 177638 - DNA, 17 bp, synthetic construct
  source 1..17: mol_type = other DNA
agaagcccctgggcagg

SEQ ID NO: 177639 - DNA, 17 bp, synthetic construct
  source 1..17: mol_type = other DNA
cagaagcccctgggcag

SEQ ID NO: 177640 - DNA, 17 bp, synthetic construct
  source 1..17: mol_type = other DNA
ccagaagcccctgggca

SEQ ID NO: 177641 - DNA, 17 bp, synthetic construct
  source 1..17: mol_type = other DNA
cccagaagcccctgggc

SEQ ID NO: 177642 - DNA, 17 bp, synthetic construct
  source 1..17: mol_type = other DNA
ccccagaagcccctggg

SEQ ID NO: 177643 - DNA, 17 bp, synthetic construct
  source 1..17: mol_type = other DNA
gccccagaagcccctgg

SEQ ID NO: 177644 - DNA, 17 bp, synthetic construct
  source 1..17: mol_type = other DNA
ggccccagaagcccctg

SEQ ID NO: 177645 - DNA, 17 bp, synthetic construct
  source 1..17: mol_type = other DNA
tggccccagaagcccct

SEQ ID NO: 177646 - DNA, 17 bp, synthetic construct
  source 1..17: mol_type = other DNA
ctggccccagaagcccc

SEQ ID NO: 177647 - DNA, 17 bp, synthetic construct
  source 1..17: mol_type = other DNA
cctggccccagaagccc

SEQ ID NO: 177648 - DNA, 17 bp, synthetic construct
  source 1..17: mol_type = other DNA
tcctggccccagaagcc

SEQ ID NO: 177649 - DNA, 17 bp, synthetic construct
  source 1..17: mol_type = other DNA
ctcctggccccagaagc

SEQ ID NO: 177650 - DNA, 17 bp, synthetic construct
  source 1..17: mol_type = other DNA
tctcctggccccagaag

SEQ ID NO: 177651 - DNA, 17 bp, synthetic construct
  source 1..17: mol_type = other DNA
ttctcctggccccagaa

SEQ ID NO: 177652 - DNA, 17 bp, synthetic construct
  source 1..17: mol_type = other DNA
cttctcctggccccaga

SEQ ID NO: 177653 - DNA, 17 bp, synthetic construct
  source 1..17: mol_type = other DNA
gcttctcctggccccag

SEQ ID NO: 177654 - DNA, 17 bp, synthetic construct
  source 1..17: mol_type = other DNA
agcttctcctggcccca

SEQ ID NO: 177655 - DNA, 17 bp, synthetic construct
  source 1..17: mol_type = other DNA
gagcttctcctggcccc

SEQ ID NO: 177656 - DNA, 17 bp, synthetic construct
  source 1..17: mol_type = other DNA
tgagcttctcctggccc

SEQ ID NO: 177657 - DNA, 17 bp, synthetic construct
  source 1..17: mol_type = other DNA
ctgagcttctcctggcc

SEQ ID NO: 177658 - DNA, 17 bp, synthetic construct
  source 1..17: mol_type = other DNA
cctgagcttctcctggc

SEQ ID NO: 177659 - DNA, 17 bp, synthetic construct
  source 1..17: mol_type = other DNA
tcctgagcttctcctgg

SEQ ID NO: 177660 - DNA, 17 bp, synthetic construct
  source 1..17: mol_type = other DNA
atcctgagcttctcctg

SEQ ID NO: 177661 - DNA, 17 bp, synthetic construct
  source 1..17: mol_type = other DNA
catcctgagcttctcct

SEQ ID NO: 177662 - DNA, 17 bp, synthetic construct
  source 1..17: mol_type = other DNA
ccatcctgagcttctcc

SEQ ID NO: 177663 - DNA, 17 bp, synthetic construct
  source 1..17: mol_type = other DNA
tccatcctgagcttctc

SEQ ID NO: 177664 - DNA, 17 bp, synthetic construct
  source 1..17: mol_type = other DNA
ttccatcctgagcttct

SEQ ID NO: 177665 - DNA, 17 bp, synthetic construct
  source 1..17: mol_type = other DNA
cttccatcctgagcttc

SEQ ID NO: 177666 - DNA, 17 bp, synthetic construct
  source 1..17: mol_type = other DNA
gcttccatcctgagctt

SEQ ID NO: 177667 - DNA, 17 bp, synthetic construct
  source 1..17: mol_type = other DNA
cgcttccatcctgagct

SEQ ID NO: 177668 - DNA, 17 bp, synthetic construct
  source 1..17: mol_type = other DNA
ccgcttccatcctgagc

SEQ ID NO: 177669 - DNA, 17 bp, synthetic construct
  source 1..17: mol_type = other DNA
cccgcttccatcctgag

SEQ ID NO: 177670 - DNA, 17 bp, synthetic construct
  source 1..17: mol_type = other DNA
tcccgcttccatcctga

SEQ ID NO: 177671 - DNA, 17 bp, synthetic construct
  source 1..17: mol_type = other DNA
ctcccgcttccatcctg

SEQ ID NO: 177672 - DNA, 17 bp, synthetic construct
  source 1..17: mol_type = other DNA
gctcccgcttccatcct

SEQ ID NO: 177673 - DNA, 17 bp, synthetic construct
  source 1..17: mol_type = other DNA
ggctcccgcttccatcc

SEQ ID NO: 177674 - DNA, 17 bp, synthetic construct
  source 1..17: mol_type = other DNA
gggctcccgcttccatc

SEQ ID NO: 177675 - DNA, 17 bp, synthetic construct
  source 1..17: mol_type = other DNA
tgggctcccgcttccat

SEQ ID NO: 177676 - DNA, 17 bp, synthetic construct
  source 1..17: mol_type = other DNA
ctgggctcccgcttcca

SEQ ID NO: 177677 - DNA, 17 bp, synthetic construct
  source 1..17: mol_type = other DNA
tctgggctcccgcttcc

SEQ ID NO: 177678 - DNA, 17 bp, synthetic construct
  source 1..17: mol_type = other DNA
ctctgggctcccgcttc

SEQ ID NO: 177679 - DNA, 17 bp, synthetic construct
  source 1..17: mol_type = other DNA
cctctgggctcccgctt

SEQ ID NO: 177680 - DNA, 17 bp, synthetic construct
  source 1..17: mol_type = other DNA
tcctctgggctcccgct

SEQ ID NO: 177681 - DNA, 17 bp, synthetic construct
  source 1..17: mol_type = other DNA
ctcctctgggctcccgc

SEQ ID NO: 177682 - DNA, 17 bp, synthetic construct
  source 1..17: mol_type = other DNA
gctcctctgggctcccg

SEQ ID NO: 177683 - DNA, 17 bp, synthetic construct
  source 1..17: mol_type = other DNA
agctcctctgggctccc

SEQ ID NO: 177684 - DNA, 17 bp, synthetic construct
  source 1..17: mol_type = other DNA
aagctcctctgggctcc

SEQ ID NO: 177685 - DNA, 17 bp, synthetic construct
  source 1..17: mol_type = other DNA
aaagctcctctgggctc

SEQ ID NO: 177686 - DNA, 17 bp, synthetic construct
  source 1..17: mol_type = other DNA
aaaagctcctctgggct

SEQ ID NO: 177687 - DNA, 17 bp, synthetic construct
  source 1..17: mol_type = other DNA
caaaagctcctctgggc

SEQ ID NO: 177688 - DNA, 17 bp, synthetic construct
  source 1..17: mol_type = other DNA
acaaaagctcctctggg

SEQ ID NO: 177689 - DNA, 17 bp, synthetic construct
  source 1..17: mol_type = other DNA
gacaaaagctcctctgg

SEQ ID NO: 177690 - DNA, 17 bp, synthetic construct
  source 1..17: mol_type = other DNA
agacaaaagctcctctg

SEQ ID NO: 177691 - DNA, 17 bp, synthetic construct
  source 1..17: mol_type = other DNA
gagacaaaagctcctct

SEQ ID NO: 177692 - DNA, 17 bp, synthetic construct
  source 1..17: mol_type = other DNA
ggagacaaaagctcctc

SEQ ID NO: 177693 - DNA, 17 bp, synthetic construct
  source 1..17: mol_type = other DNA
aggagacaaaagctcct

SEQ ID NO: 177694 - DNA, 17 bp, synthetic construct
  source 1..17: mol_type = other DNA
caggagacaaaagctcc

SEQ ID NO: 177695 - DNA, 17 bp, synthetic construct
  source 1..17: mol_type = other DNA
ccaggagacaaaagctc

SEQ ID NO: 177696 - DNA, 17 bp, synthetic construct
  source 1..17: mol_type = other DNA
cccaggagacaaaagct

SEQ ID NO: 177697 - DNA, 17 bp, synthetic construct
  source 1..17: mol_type = other DNA
acccaggagacaaaagc

SEQ ID NO: 177698 - DNA, 17 bp, synthetic construct
  source 1..17: mol_type = other DNA
gacccaggagacaaaag

SEQ ID NO: 177699 - DNA, 17 bp, synthetic construct
  source 1..17: mol_type = other DNA
ggacccaggagacaaaa

SEQ ID NO: 177700 - DNA, 17 bp, synthetic construct
  source 1..17: mol_type = other DNA
aggacccaggagacaaa

SEQ ID NO: 177701 - DNA, 17 bp, synthetic construct
  source 1..17: mol_type = other DNA
taggacccaggagacaa

SEQ ID NO: 177702 - DNA, 17 bp, synthetic construct
  source 1..17: mol_type = other DNA
ttaggacccaggagaca

SEQ ID NO: 177703 - DNA, 17 bp, synthetic construct
  source 1..17: mol_type = other DNA
gttaggacccaggagac

SEQ ID NO: 177704 - DNA, 17 bp, synthetic construct
  source 1..17: mol_type = other DNA
tgttaggacccaggaga

SEQ ID NO: 177705 - DNA, 17 bp, synthetic construct
  source 1..17: mol_type = other DNA
ctgttaggacccaggag

SEQ ID NO: 177706 - DNA, 17 bp, synthetic construct
  source 1..17: mol_type = other DNA
gctgttaggacccagga

SEQ ID NO: 177707 - DNA, 17 bp, synthetic construct
  source 1..17: mol_type = other DNA
cgctgttaggacccagg

SEQ ID NO: 177708 - DNA, 17 bp, synthetic construct
  source 1..17: mol_type = other DNA
ccgctgttaggacccag

SEQ ID NO: 177709 - DNA, 17 bp, synthetic construct
  source 1..17: mol_type = other DNA
gccgctgttaggaccca

SEQ ID NO: 177710 - DNA, 17 bp, synthetic construct
  source 1..17: mol_type = other DNA
agccgctgttaggaccc

SEQ ID NO: 177711 - DNA, 17 bp, synthetic construct
  source 1..17: mol_type = other DNA
aagccgctgttaggacc

SEQ ID NO: 177712 - DNA, 17 bp, synthetic construct
  source 1..17: mol_type = other DNA
gaagccgctgttaggac

SEQ ID NO: 177713 - DNA, 17 bp, synthetic construct
  source 1..17: mol_type = other DNA
ggaagccgctgttagga

SEQ ID NO: 177714 - DNA, 17 bp, synthetic construct
  source 1..17: mol_type = other DNA
tggaagccgctgttagg

SEQ ID NO: 177715 - DNA, 17 bp, synthetic construct
  source 1..17: mol_type = other DNA
atggaagccgctgttag

SEQ ID NO: 177716 - DNA, 17 bp, synthetic construct
  source 1..17: mol_type = other DNA
gatggaagccgctgtta

SEQ ID NO: 177717 - DNA, 17 bp, synthetic construct
  source 1..17: mol_type = other DNA
tgatggaagccgctgtt

SEQ ID NO: 177718 - DNA, 17 bp, synthetic construct
  source 1..17: mol_type = other DNA
gtgatggaagccgctgt

SEQ ID NO: 177719 - DNA, 17 bp, synthetic construct
  source 1..17: mol_type = other DNA
ggtgatggaagccgctg

SEQ ID NO: 177720 - DNA, 17 bp, synthetic construct
  source 1..17: mol_type = other DNA
cggtgatggaagccgct

SEQ ID NO: 177721 - DNA, 17 bp, synthetic construct
  source 1..17: mol_type = other DNA
acggtgatggaagccgc

SEQ ID NO: 177722 - DNA, 17 bp, synthetic construct
  source 1..17: mol_type = other DNA
cacggtgatggaagccg

SEQ ID NO: 177723 - DNA, 17 bp, synthetic construct
  source 1..17: mol_type = other DNA
gcacggtgatggaagcc

SEQ ID NO: 177724 - DNA, 17 bp, synthetic construct
  source 1..17: mol_type = other DNA
cgcacggtgatggaagc

SEQ ID NO: 177725 - DNA, 17 bp, synthetic construct
  source 1..17: mol_type = other DNA
ccgcacggtgatggaag

SEQ ID NO: 177726 - DNA, 17 bp, synthetic construct
  source 1..17: mol_type = other DNA
cccgcacggtgatggaa

SEQ ID NO: 177727 - DNA, 17 bp, synthetic construct
  source 1..17: mol_type = other DNA
tcccgcacggtgatgga

SEQ ID NO: 177728 - DNA, 17 bp, synthetic construct
  source 1..17: mol_type = other DNA
gtcccgcacggtgatgg

SEQ ID NO: 177729 - DNA, 17 bp, synthetic construct
  source 1..17: mol_type = other DNA
ggtcccgcacggtgatg

SEQ ID NO: 177730 - DNA, 17 bp, synthetic construct
  source 1..17: mol_type = other DNA
gggtcccgcacggtgat

SEQ ID NO: 177731 - DNA, 17 bp, synthetic construct
  source 1..17: mol_type = other DNA
tgggtcccgcacggtga

SEQ ID NO: 177732 - DNA, 17 bp, synthetic construct
  source 1..17: mol_type = other DNA
gtgggtcccgcacggtg

SEQ ID NO: 177733 - DNA, 17 bp, synthetic construct
  source 1..17: mol_type = other DNA
ggtgggtcccgcacggt

SEQ ID NO: 177734 - DNA, 17 bp, synthetic construct
  source 1..17: mol_type = other DNA
cggtgggtcccgcacgg

SEQ ID NO: 177735 - DNA, 17 bp, synthetic construct
  source 1..17: mol_type = other DNA
gcggtgggtcccgcacg

SEQ ID NO: 177736 - DNA, 17 bp, synthetic construct
  source 1..17: mol_type = other DNA
agcggtgggtcccgcac

SEQ ID NO: 177737 - DNA, 17 bp, synthetic construct
  source 1..17: mol_type = other DNA
tagcggtgggtcccgca

SEQ ID NO: 177738 - DNA, 17 bp, synthetic construct
  source 1..17: mol_type = other DNA
ttagcggtgggtcccgc

SEQ ID NO: 177739 - DNA, 17 bp, synthetic construct
  source 1..17: mol_type = other DNA
cttagcggtgggtcccg

SEQ ID NO: 177740 - DNA, 17 bp, synthetic construct
  source 1..17: mol_type = other DNA
tcttagcggtgggtccc

SEQ ID NO: 177741 - DNA, 17 bp, synthetic construct
  source 1..17: mol_type = other DNA
ctcttagcggtgggtcc

SEQ ID NO: 177742 - DNA, 17 bp, synthetic construct
  source 1..17: mol_type = other DNA
cctcttagcggtgggtc

SEQ ID NO: 177743 - DNA, 17 bp, synthetic construct
  source 1..17: mol_type = other DNA
acctcttagcggtgggt

SEQ ID NO: 177744 - DNA, 17 bp, synthetic construct
  source 1..17: mol_type = other DNA
gacctcttagcggtggg

SEQ ID NO: 177745 - DNA, 17 bp, synthetic construct
  source 1..17: mol_type = other DNA
tgacctcttagcggtgg

SEQ ID NO: 177746 - DNA, 17 bp, synthetic construct
  source 1..17: mol_type = other DNA
gtgacctcttagcggtg

SEQ ID NO: 177747 - DNA, 17 bp, synthetic construct
  source 1..17: mol_type = other DNA
cgtgacctcttagcggt

SEQ ID NO: 177748 - DNA, 17 bp, synthetic construct
  source 1..17: mol_type = other DNA
ccgtgacctcttagcgg

SEQ ID NO: 177749 - DNA, 17 bp, synthetic construct
  source 1..17: mol_type = other DNA
gccgtgacctcttagcg

SEQ ID NO: 177750 - DNA, 17 bp, synthetic construct
  source 1..17: mol_type = other DNA
cgccgtgacctcttagc

SEQ ID NO: 177751 - DNA, 17 bp, synthetic construct
  source 1..17: mol_type = other DNA
acgccgtgacctcttag

SEQ ID NO: 177752 - DNA, 17 bp, synthetic construct
  source 1..17: mol_type = other DNA
aacgccgtgacctctta

SEQ ID NO: 177753 - DNA, 17 bp, synthetic construct
  source 1..17: mol_type = other DNA
gaacgccgtgacctctt

SEQ ID NO: 177754 - DNA, 17 bp, synthetic construct
  source 1..17: mol_type = other DNA
agaacgccgtgacctct

SEQ ID NO: 177755 - DNA, 17 bp, synthetic construct
  source 1..17: mol_type = other DNA
gagaacgccgtgacctc

SEQ ID NO: 177756 - DNA, 17 bp, synthetic construct
  source 1..17: mol_type = other DNA
tgagaacgccgtgacct

SEQ ID NO: 177757 - DNA, 17 bp, synthetic construct
  source 1..17: mol_type = other DNA
gtgagaacgccgtgacc

SEQ ID NO: 177758 - DNA, 17 bp, synthetic construct
  source 1..17: mol_type = other DNA
agtgagaacgccgtgac

SEQ ID NO: 177759 - DNA, 17 bp, synthetic construct
  source 1..17: mol_type = other DNA
gagtgagaacgccgtga

SEQ ID NO: 177760 - DNA, 17 bp, synthetic construct
  source 1..17: mol_type = other DNA
ggagtgagaacgccgtg

SEQ ID NO: 177761 - DNA, 17 bp, synthetic construct
  source 1..17: mol_type = other DNA
aggagtgagaacgccgt

SEQ ID NO: 177762 - DNA, 17 bp, synthetic construct
  source 1..17: mol_type = other DNA
gaggagtgagaacgccg

SEQ ID NO: 177763 - DNA, 17 bp, synthetic construct
  source 1..17: mol_type = other DNA
ggaggagtgagaacgcc

SEQ ID NO: 177764 - DNA, 17 bp, synthetic construct
  source 1..17: mol_type = other DNA
gggaggagtgagaacgc

SEQ ID NO: 177765 - DNA, 17 bp, synthetic construct
  source 1..17: mol_type = other DNA
ggggaggagtgagaacg

SEQ ID NO: 177766 - DNA, 17 bp, synthetic construct
  source 1..17: mol_type = other DNA
tggggaggagtgagaac

SEQ ID NO: 177767 - DNA, 17 bp, synthetic construct
  source 1..17: mol_type = other DNA
atggggaggagtgagaa

SEQ ID NO: 177768 - DNA, 17 bp, synthetic construct
  source 1..17: mol_type = other DNA
catggggaggagtgaga

SEQ ID NO: 177769 - DNA, 17 bp, synthetic construct
  source 1..17: mol_type = other DNA
acatggggaggagtgag

SEQ ID NO: 177770 - DNA, 17 bp, synthetic construct
  source 1..17: mol_type = other DNA
gacatggggaggagtga

SEQ ID NO: 177771 - DNA, 17 bp, synthetic construct
  source 1..17: mol_type = other DNA
ggacatggggaggagtg

SEQ ID NO: 177772 - DNA, 17 bp, synthetic construct
  source 1..17: mol_type = other DNA
aggacatggggaggagt

SEQ ID NO: 177773 - DNA, 17 bp, synthetic construct
  source 1..17: mol_type = other DNA
aaggacatggggaggag

SEQ ID NO: 177774 - DNA, 17 bp, synthetic construct
  source 1..17: mol_type = other DNA
caaggacatggggagga

SEQ ID NO: 177775 - DNA, 17 bp, synthetic construct
  source 1..17: mol_type = other DNA
ccaaggacatggggagg

SEQ ID NO: 177776 - DNA, 17 bp, synthetic construct
  source 1..17: mol_type = other DNA
gccaaggacatggggag

SEQ ID NO: 177777 - DNA, 17 bp, synthetic construct
  source 1..17: mol_type = other DNA
ggccaaggacatgggga

SEQ ID NO: 177778 - DNA, 17 bp, synthetic construct
  source 1..17: mol_type = other DNA
gggccaaggacatgggg

SEQ ID NO: 177779 - DNA, 17 bp, synthetic construct
  source 1..17: mol_type = other DNA
tgggccaaggacatggg

SEQ ID NO: 177780 - DNA, 17 bp, synthetic construct
  source 1..17: mol_type = other DNA
ctgggccaaggacatgg

SEQ ID NO: 177781 - DNA, 17 bp, synthetic construct
  source 1..17: mol_type = other DNA
cctgggccaaggacatg

SEQ ID NO: 177782 - DNA, 17 bp, synthetic construct
  source 1..17: mol_type = other DNA
ccctgggccaaggacat

SEQ ID NO: 177783 - DNA, 17 bp, synthetic construct
  source 1..17: mol_type = other DNA
gccctgggccaaggaca

SEQ ID NO: 177784 - DNA, 17 bp, synthetic construct
  source 1..17: mol_type = other DNA
agccctgggccaaggac

SEQ ID NO: 177785 - DNA, 17 bp, synthetic construct
  source 1..17: mol_type = other DNA
cagccctgggccaagga

SEQ ID NO: 177786 - DNA, 17 bp, synthetic construct
  source 1..17: mol_type = other DNA
gcagccctgggccaagg

SEQ ID NO: 177787 - DNA, 17 bp, synthetic construct
  source 1..17: mol_type = other DNA
agcagccctgggccaag

SEQ ID NO: 177788 - DNA, 17 bp, synthetic construct
  source 1..17: mol_type = other DNA
cagcagccctgggccaa

SEQ ID NO: 177789 - DNA, 17 bp, synthetic construct
  source 1..17: mol_type = other DNA
acagcagccctgggcca

SEQ ID NO: 177790 - DNA, 17 bp, synthetic construct
  source 1..17: mol_type = other DNA
aacagcagccctgggcc

SEQ ID NO: 177791 - DNA, 17 bp, synthetic construct
  source 1..17: mol_type = other DNA
gaacagcagccctgggc

SEQ ID NO: 177792 - DNA, 17 bp, synthetic construct
  source 1..17: mol_type = other DNA
ggaacagcagccctggg

SEQ ID NO: 177793 - DNA, 17 bp, synthetic construct
  source 1..17: mol_type = other DNA
tggaacagcagccctgg

SEQ ID NO: 177794 - DNA, 17 bp, synthetic construct
  source 1..17: mol_type = other DNA
ttggaacagcagccctg

SEQ ID NO: 177795 - DNA, 17 bp, synthetic construct
  source 1..17: mol_type = other DNA
tttggaacagcagccct

SEQ ID NO: 177796 - DNA, 17 bp, synthetic construct
  source 1..17: mol_type = other DNA
gtttggaacagcagccc

SEQ ID NO: 177797 - DNA, 17 bp, synthetic construct
  source 1..17: mol_type = other DNA
ggtttggaacagcagcc

SEQ ID NO: 177798 - DNA, 17 bp, synthetic construct
  source 1..17: mol_type = other DNA
cggtttggaacagcagc

SEQ ID NO: 177799 - DNA, 17 bp, synthetic construct
  source 1..17: mol_type = other DNA
gcggtttggaacagcag

SEQ ID NO: 177800 - DNA, 17 bp, synthetic construct
  source 1..17: mol_type = other DNA
ggcggtttggaacagca

SEQ ID NO: 177801 - DNA, 17 bp, synthetic construct
  source 1..17: mol_type = other DNA
tggcggtttggaacagc

SEQ ID NO: 177802 - DNA, 17 bp, synthetic construct
  source 1..17: mol_type = other DNA
gtggcggtttggaacag

SEQ ID NO: 177803 - DNA, 17 bp, synthetic construct
  source 1..17: mol_type = other DNA
tgtggcggtttggaaca

SEQ ID NO: 177804 - DNA, 17 bp, synthetic construct
  source 1..17: mol_type = other DNA
ttgtggcggtttggaac

SEQ ID NO: 177805 - DNA, 17 bp, synthetic construct
  source 1..17: mol_type = other DNA
cttgtggcggtttggaa

SEQ ID NO: 177806 - DNA, 17 bp, synthetic construct
  source 1..17: mol_type = other DNA
gcttgtggcggtttgga

SEQ ID NO: 177807 - DNA, 17 bp, synthetic construct
  source 1..17: mol_type = other DNA
agcttgtggcggtttgg

SEQ ID NO: 177808 - DNA, 17 bp, synthetic construct
  source 1..17: mol_type = other DNA
cagcttgtggcggtttg

SEQ ID NO: 177809 - DNA, 17 bp, synthetic construct
  source 1..17: mol_type = other DNA
ccagcttgtggcggttt

SEQ ID NO: 177810 - DNA, 17 bp, synthetic construct
  source 1..17: mol_type = other DNA
cccagcttgtggcggtt

SEQ ID NO: 177811 - DNA, 17 bp, synthetic construct
  source 1..17: mol_type = other DNA
ccccagcttgtggcggt

SEQ ID NO: 177812 - DNA, 17 bp, synthetic construct
  source 1..17: mol_type = other DNA
tccccagcttgtggcgg

SEQ ID NO: 177813 - DNA, 17 bp, synthetic construct
  source 1..17: mol_type = other DNA
ctccccagcttgtggcg

SEQ ID NO: 177814 - DNA, 17 bp, synthetic construct
  source 1..17: mol_type = other DNA
gctccccagcttgtggc

SEQ ID NO: 177815 - DNA, 17 bp, synthetic construct
  source 1..17: mol_type = other DNA
agctccccagcttgtgg

SEQ ID NO: 177816 - DNA, 17 bp, synthetic construct
  source 1..17: mol_type = other DNA
aagctccccagcttgtg

SEQ ID NO: 177817 - DNA, 17 bp, synthetic construct
  source 1..17: mol_type = other DNA
taagctccccagcttgt

SEQ ID NO: 177818 - DNA, 17 bp, synthetic construct
  source 1..17: mol_type = other DNA
ataagctccccagcttg

SEQ ID NO: 177819 - DNA, 17 bp, synthetic construct
  source 1..17: mol_type = other DNA
tataagctccccagctt

SEQ ID NO: 177820 - DNA, 17 bp, synthetic construct
  source 1..17: mol_type = other DNA
gtataagctccccagct

SEQ ID NO: 177821 - DNA, 17 bp, synthetic construct
  source 1..17: mol_type = other DNA
tgtataagctccccagc

SEQ ID NO: 177822 - DNA, 17 bp, synthetic construct
  source 1..17: mol_type = other DNA
ttgtataagctccccag

SEQ ID NO: 177823 - DNA, 17 bp, synthetic construct
  source 1..17: mol_type = other DNA
gttgtataagctcccca

SEQ ID NO: 177824 - DNA, 17 bp, synthetic construct
  source 1..17: mol_type = other DNA
tgttgtataagctcccc

SEQ ID NO: 177825 - DNA, 17 bp, synthetic construct
  source 1..17: mol_type = other DNA
ctgttgtataagctccc

SEQ ID NO: 177826 - DNA, 17 bp, synthetic construct
  source 1..17: mol_type = other DNA
tctgttgtataagctcc

SEQ ID NO: 177827 - DNA, 17 bp, synthetic construct
  source 1..17: mol_type = other DNA
ttctgttgtataagctc

SEQ ID NO: 177828 - DNA, 17 bp, synthetic construct
  source 1..17: mol_type = other DNA
tttctgttgtataagct

SEQ ID NO: 177829 - DNA, 17 bp, synthetic construct
  source 1..17: mol_type = other DNA
gtttctgttgtataagc

SEQ ID NO: 177830 - DNA, 17 bp, synthetic construct
  source 1..17: mol_type = other DNA
ggtttctgttgtataag

SEQ ID NO: 177831 - DNA, 17 bp, synthetic construct
  source 1..17: mol_type = other DNA
gggtttctgttgtataa

SEQ ID NO: 177832 - DNA, 17 bp, synthetic construct
  source 1..17: mol_type = other DNA
tgggtttctgttgtata

SEQ ID NO: 177833 - DNA, 17 bp, synthetic construct
  source 1..17: mol_type = other DNA
gtgggtttctgttgtat

SEQ ID NO: 177834 - DNA, 17 bp, synthetic construct
  source 1..17: mol_type = other DNA
agtgggtttctgttgta

SEQ ID NO: 177835 - DNA, 17 bp, synthetic construct
  source 1..17: mol_type = other DNA
gagtgggtttctgttgt

SEQ ID NO: 177836 - DNA, 17 bp, synthetic construct
  source 1..17: mol_type = other DNA
agagtgggtttctgttg

SEQ ID NO: 177837 - DNA, 17 bp, synthetic construct
  source 1..17: mol_type = other DNA
gagagtgggtttctgtt

SEQ ID NO: 177838 - DNA, 17 bp, synthetic construct
  source 1..17: mol_type = other DNA
ggagagtgggtttctgt

SEQ ID NO: 177839 - DNA, 17 bp, synthetic construct
  source 1..17: mol_type = other DNA
cggagagtgggtttctg

SEQ ID NO: 177840 - DNA, 17 bp, synthetic construct
  source 1..17: mol_type = other DNA
acggagagtgggtttct

SEQ ID NO: 177841 - DNA, 17 bp, synthetic construct
  source 1..17: mol_type = other DNA
gacggagagtgggtttc

SEQ ID NO: 177842 - DNA, 17 bp, synthetic construct
  source 1..17: mol_type = other DNA
ggacggagagtgggttt

SEQ ID NO: 177843 - DNA, 17 bp, synthetic construct
  source 1..17: mol_type = other DNA
aggacggagagtgggtt

SEQ ID NO: 177844 - DNA, 17 bp, synthetic construct
  source 1..17: mol_type = other DNA
caggacggagagtgggt

SEQ ID NO: 177845 - DNA, 17 bp, synthetic construct
  source 1..17: mol_type = other DNA
ccaggacggagagtggg

SEQ ID NO: 177846 - DNA, 17 bp, synthetic construct
  source 1..17: mol_type = other DNA
tccaggacggagagtgg

SEQ ID NO: 177847 - DNA, 17 bp, synthetic construct
  source 1..17: mol_type = other DNA
ctccaggacggagagtg

SEQ ID NO: 177848 - DNA, 17 bp, synthetic construct
  source 1..17: mol_type = other DNA
gctccaggacggagagt

SEQ ID NO: 177849 - DNA, 17 bp, synthetic construct
  source 1..17: mol_type = other DNA
agctccaggacggagag

SEQ ID NO: 177850 - DNA, 17 bp, synthetic construct
  source 1..17: mol_type = other DNA
cagctccaggacggaga

SEQ ID NO: 177851 - DNA, 17 bp, synthetic construct
  source 1..17: mol_type = other DNA
ccagctccaggacggag

SEQ ID NO: 177852 - DNA, 17 bp, synthetic construct
  source 1..17: mol_type = other DNA
tccagctccaggacgga

SEQ ID NO: 177853 - DNA, 17 bp, synthetic construct
  source 1..17: mol_type = other DNA
ttccagctccaggacgg

SEQ ID NO: 177854 - DNA, 17 bp, synthetic construct
  source 1..17: mol_type = other DNA
cttccagctccaggacg

SEQ ID NO: 177855 - DNA, 17 bp, synthetic construct
  source 1..17: mol_type = other DNA
acttccagctccaggac

SEQ ID NO: 177856 - DNA, 17 bp, synthetic construct
  source 1..17: mol_type = other DNA
gacttccagctccagga

SEQ ID NO: 177857 - DNA, 17 bp, synthetic construct
  source 1..17: mol_type = other DNA
agacttccagctccagg

SEQ ID NO: 177858 - DNA, 17 bp, synthetic construct
  source 1..17: mol_type = other DNA
cagacttccagctccag

SEQ ID NO: 177859 - DNA, 17 bp, synthetic construct
  source 1..17: mol_type = other DNA
tcagacttccagctcca

SEQ ID NO: 177860 - DNA, 17 bp, synthetic construct
  source 1..17: mol_type = other DNA
ctcagacttccagctcc

SEQ ID NO: 177861 - DNA, 17 bp, synthetic construct
  source 1..17: mol_type = other DNA
tctcagacttccagctc

SEQ ID NO: 177862 - DNA, 17 bp, synthetic construct
  source 1..17: mol_type = other DNA
atctcagacttccagct

SEQ ID NO: 177863 - DNA, 17 bp, synthetic construct
  source 1..17: mol_type = other DNA
gatctcagacttccagc

SEQ ID NO: 177864 - DNA, 17 bp, synthetic construct
  source 1..17: mol_type = other DNA
ggatctcagacttccag

SEQ ID NO: 177865 - DNA, 17 bp, synthetic construct
  source 1..17: mol_type = other DNA
tggatctcagacttcca

SEQ ID NO: 177866 - DNA, 17 bp, synthetic construct
  source 1..17: mol_type = other DNA
ctggatctcagacttcc

SEQ ID NO: 177867 - DNA, 17 bp, synthetic construct
  source 1..17: mol_type = other DNA
cctggatctcagacttc

SEQ ID NO: 177868 - DNA, 17 bp, synthetic construct
  source 1..17: mol_type = other DNA
gcctggatctcagactt

SEQ ID NO: 177869 - DNA, 17 bp, synthetic construct
  source 1..17: mol_type = other DNA
cgcctggatctcagact

SEQ ID NO: 177870 - DNA, 17 bp, synthetic construct
  source 1..17: mol_type = other DNA
ccgcctggatctcagac

SEQ ID NO: 177871 - DNA, 17 bp, synthetic construct
  source 1..17: mol_type = other DNA
cccgcctggatctcaga

SEQ ID NO: 177872 - DNA, 17 bp, synthetic construct
  source 1..17: mol_type = other DNA
gcccgcctggatctcag

SEQ ID NO: 177873 - DNA, 17 bp, synthetic construct
  source 1..17: mol_type = other DNA
tgcccgcctggatctca

SEQ ID NO: 177874 - DNA, 17 bp, synthetic construct
  source 1..17: mol_type = other DNA
ctgcccgcctggatctc

SEQ ID NO: 177875 - DNA, 17 bp, synthetic construct
  source 1..17: mol_type = other DNA
cctgcccgcctggatct

SEQ ID NO: 177876 - DNA, 17 bp, synthetic construct
  source 1..17: mol_type = other DNA
ccctgcccgcctggatc

SEQ ID NO: 177877 - DNA, 17 bp, synthetic construct
  source 1..17: mol_type = other DNA
cccctgcccgcctggat

SEQ ID NO: 177878 - DNA, 17 bp, synthetic construct
  source 1..17: mol_type = other DNA
tcccctgcccgcctgga

SEQ ID NO: 177879 - DNA, 17 bp, synthetic construct
  source 1..17: mol_type = other DNA
atcccctgcccgcctgg

SEQ ID NO: 177880 - DNA, 17 bp, synthetic construct
  source 1..17: mol_type = other DNA
tatcccctgcccgcctg

SEQ ID NO: 177881 - DNA, 17 bp, synthetic construct
  source 1..17: mol_type = other DNA
ctatcccctgcccgcct

SEQ ID NO: 177882 - DNA, 17 bp, synthetic construct
  source 1..17: mol_type = other DNA
tctatcccctgcccgcc

SEQ ID NO: 177883 - DNA, 17 bp, synthetic construct
  source 1..17: mol_type = other DNA
gtctatcccctgcccgc

SEQ ID NO: 177884 - DNA, 17 bp, synthetic construct
  source 1..17: mol_type = other DNA
agtctatcccctgcccg

SEQ ID NO: 177885 - DNA, 17 bp, synthetic construct
  source 1..17: mol_type = other DNA
gagtctatcccctgccc

SEQ ID NO: 177886 - DNA, 17 bp, synthetic construct
  source 1..17: mol_type = other DNA
ggagtctatcccctgcc

SEQ ID NO: 177887 - DNA, 17 bp, synthetic construct
  source 1..17: mol_type = other DNA
gggagtctatcccctgc

SEQ ID NO: 177888 - DNA, 17 bp, synthetic construct
  source 1..17: mol_type = other DNA
agggagtctatcccctg

SEQ ID NO: 177889 - DNA, 17 bp, synthetic construct
  source 1..17: mol_type = other DNA
cagggagtctatcccct

SEQ ID NO: 177890 - DNA, 17 bp, synthetic construct
  source 1..17: mol_type = other DNA
gcagggagtctatcccc

SEQ ID NO: 177891 - DNA, 17 bp, synthetic construct
  source 1..17: mol_type = other DNA
agcagggagtctatccc

SEQ ID NO: 177892 - DNA, 17 bp, synthetic construct
  source 1..17: mol_type = other DNA
cagcagggagtctatcc

SEQ ID NO: 177893 - DNA, 17 bp, synthetic construct
  source 1..17: mol_type = other DNA
tcagcagggagtctatc

SEQ ID NO: 177894 - DNA, 17 bp, synthetic construct
  source 1..17: mol_type = other DNA
ctcagcagggagtctat

SEQ ID NO: 177895 - DNA, 17 bp, synthetic construct
  source 1..17: mol_type = other DNA
cctcagcagggagtcta

SEQ ID NO: 177896 - DNA, 17 bp, synthetic construct
  source 1..17: mol_type = other DNA
ccctcagcagggagtct

SEQ ID NO: 177897 - DNA, 17 bp, synthetic construct
  source 1..17: mol_type = other DNA
accctcagcagggagtc

SEQ ID NO: 177898 - DNA, 17 bp, synthetic construct
  source 1..17: mol_type = other DNA
gaccctcagcagggagt

SEQ ID NO: 177899 - DNA, 17 bp, synthetic construct
  source 1..17: mol_type = other DNA
agaccctcagcagggag

SEQ ID NO: 177900 - DNA, 17 bp, synthetic construct
  source 1..17: mol_type = other DNA
cagaccctcagcaggga

SEQ ID NO: 177901 - DNA, 17 bp, synthetic construct
  source 1..17: mol_type = other DNA
ccagaccctcagcaggg

SEQ ID NO: 177902 - DNA, 17 bp, synthetic construct
  source 1..17: mol_type = other DNA
cccagaccctcagcagg

SEQ ID NO: 177903 - DNA, 17 bp, synthetic construct
  source 1..17: mol_type = other DNA
ccccagaccctcagcag

SEQ ID NO: 177904 - DNA, 17 bp, synthetic construct
  source 1..17: mol_type = other DNA
tccccagaccctcagca

SEQ ID NO: 177905 - DNA, 17 bp, synthetic construct
  source 1..17: mol_type = other DNA
ctccccagaccctcagc

SEQ ID NO: 177906 - DNA, 17 bp, synthetic construct
  source 1..17: mol_type = other DNA
cctccccagaccctcag

SEQ ID NO: 177907 - DNA, 17 bp, synthetic construct
  source 1..17: mol_type = other DNA
acctccccagaccctca

SEQ ID NO: 177908 - DNA, 17 bp, synthetic construct
  source 1..17: mol_type = other DNA
gacctccccagaccctc

SEQ ID NO: 177909 - DNA, 17 bp, synthetic construct
  source 1..17: mol_type = other DNA
ggacctccccagaccct

SEQ ID NO: 177910 - DNA, 17 bp, synthetic construct
  source 1..17: mol_type = other DNA
aggacctccccagaccc

SEQ ID NO: 177911 - DNA, 17 bp, synthetic construct
  source 1..17: mol_type = other DNA
aaggacctccccagacc

SEQ ID NO: 177912 - DNA, 17 bp, synthetic construct
  source 1..17: mol_type = other DNA
gaaggacctccccagac

SEQ ID NO: 177913 - DNA, 17 bp, synthetic construct
  source 1..17: mol_type = other DNA
ggaaggacctccccaga

SEQ ID NO: 177914 - DNA, 17 bp, synthetic construct
  source 1..17: mol_type = other DNA
aggaaggacctccccag

SEQ ID NO: 177915 - DNA, 17 bp, synthetic construct
  source 1..17: mol_type = other DNA
caggaaggacctcccca

SEQ ID NO: 177916 - DNA, 17 bp, synthetic construct
  source 1..17: mol_type = other DNA
gcaggaaggacctcccc

SEQ ID NO: 177917 - DNA, 17 bp, synthetic construct
  source 1..17: mol_type = other DNA
ggcaggaaggacctccc

SEQ ID NO: 177918 - DNA, 17 bp, synthetic construct
  source 1..17: mol_type = other DNA
aggcaggaaggacctcc

SEQ ID NO: 177919 - DNA, 17 bp, synthetic construct
  source 1..17: mol_type = other DNA
gaggcaggaaggacctc

SEQ ID NO: 177920 - DNA, 17 bp, synthetic construct
  source 1..17: mol_type = other DNA
agaggcaggaaggacct

SEQ ID NO: 177921 - DNA, 17 bp, synthetic construct
  source 1..17: mol_type = other DNA
gagaggcaggaaggacc

SEQ ID NO: 177922 - DNA, 17 bp, synthetic construct
  source 1..17: mol_type = other DNA
ggagaggcaggaaggac

SEQ ID NO: 177923 - DNA, 17 bp, synthetic construct
  source 1..17: mol_type = other DNA
gggagaggcaggaagga

SEQ ID NO: 177924 - DNA, 17 bp, synthetic construct
  source 1..17: mol_type = other DNA
tgggagaggcaggaagg

SEQ ID NO: 177925 - DNA, 17 bp, synthetic construct
  source 1..17: mol_type = other DNA
ctgggagaggcaggaag

SEQ ID NO: 177926 - DNA, 17 bp, synthetic construct
  source 1..17: mol_type = other DNA
gctgggagaggcaggaa

SEQ ID NO: 177927 - DNA, 17 bp, synthetic construct
  source 1..17: mol_type = other DNA
agctgggagaggcagga

SEQ ID NO: 177928 - DNA, 17 bp, synthetic construct
  source 1..17: mol_type = other DNA
aagctgggagaggcagg

SEQ ID NO: 177929 - DNA, 17 bp, synthetic construct
  source 1..17: mol_type = other DNA
aaagctgggagaggcag

SEQ ID NO: 177930 - DNA, 17 bp, synthetic construct
  source 1..17: mol_type = other DNA
caaagctgggagaggca

SEQ ID NO: 177931 - DNA, 17 bp, synthetic construct
  source 1..17: mol_type = other DNA
ccaaagctgggagaggc

SEQ ID NO: 177932 - DNA, 17 bp, synthetic construct
  source 1..17: mol_type = other DNA
cccaaagctgggagagg

SEQ ID NO: 177933 - DNA, 17 bp, synthetic construct
  source 1..17: mol_type = other DNA
ccccaaagctgggagag

SEQ ID NO: 177934 - DNA, 17 bp, synthetic construct
  source 1..17: mol_type = other DNA
tccccaaagctgggaga

SEQ ID NO: 177935 - DNA, 17 bp, synthetic construct
  source 1..17: mol_type = other DNA
gtccccaaagctgggag

SEQ ID NO: 177936 - DNA, 17 bp, synthetic construct
  source 1..17: mol_type = other DNA
agtccccaaagctggga

SEQ ID NO: 177937 - DNA, 17 bp, synthetic construct
  source 1..17: mol_type = other DNA
gagtccccaaagctggg

SEQ ID NO: 177938 - DNA, 17 bp, synthetic construct
  source 1..17: mol_type = other DNA
ggagtccccaaagctgg

SEQ ID NO: 177939 - DNA, 17 bp, synthetic construct
  source 1..17: mol_type = other DNA
tggagtccccaaagctg

SEQ ID NO: 177940 - DNA, 17 bp, synthetic construct
  source 1..17: mol_type = other DNA
ctggagtccccaaagct

SEQ ID NO: 177941 - DNA, 17 bp, synthetic construct
  source 1..17: mol_type = other DNA
cctggagtccccaaagc

SEQ ID NO: 177942 - DNA, 17 bp, synthetic construct
  source 1..17: mol_type = other DNA
acctggagtccccaaag

SEQ ID NO: 177943 - DNA, 17 bp, synthetic construct
  source 1..17: mol_type = other DNA
cacctggagtccccaaa

SEQ ID NO: 177944 - DNA, 17 bp, synthetic construct
  source 1..17: mol_type = other DNA
acacctggagtccccaa

SEQ ID NO: 177945 - DNA, 17 bp, synthetic construct
  source 1..17: mol_type = other DNA
gacacctggagtcccca

SEQ ID NO: 177946 - DNA, 17 bp, synthetic construct
  source 1..17: mol_type = other DNA
ggacacctggagtcccc

SEQ ID NO: 177947 - DNA, 17 bp, synthetic construct
  source 1..17: mol_type = other DNA
aggacacctggagtccc

SEQ ID NO: 177948 - DNA, 17 bp, synthetic construct
  source 1..17: mol_type = other DNA
aaggacacctggagtcc

SEQ ID NO: 177949 - DNA, 17 bp, synthetic construct
  source 1..17: mol_type = other DNA
aaaggacacctggagtc

SEQ ID NO: 177950 - DNA, 17 bp, synthetic construct
  source 1..17: mol_type = other DNA
caaaggacacctggagt

SEQ ID NO: 177951 - DNA, 17 bp, synthetic construct
  source 1..17: mol_type = other DNA
ccaaaggacacctggag

SEQ ID NO: 177952 - DNA, 17 bp, synthetic construct
  source 1..17: mol_type = other DNA
gccaaaggacacctgga

SEQ ID NO: 177953 - DNA, 17 bp, synthetic construct
  source 1..17: mol_type = other DNA
agccaaaggacacctgg

SEQ ID NO: 177954 - DNA, 17 bp, synthetic construct
  source 1..17: mol_type = other DNA
cagccaaaggacacctg

SEQ ID NO: 177955 - DNA, 17 bp, synthetic construct
  source 1..17: mol_type = other DNA
acagccaaaggacacct

SEQ ID NO: 177956 - DNA, 17 bp, synthetic construct
  source 1..17: mol_type = other DNA
cacagccaaaggacacc

SEQ ID NO: 177957 - DNA, 17 bp, synthetic construct
  source 1..17: mol_type = other DNA
ccacagccaaaggacac

SEQ ID NO: 177958 - DNA, 17 bp, synthetic construct
  source 1..17: mol_type = other DNA
gccacagccaaaggaca

SEQ ID NO: 177959 - DNA, 17 bp, synthetic construct
  source 1..17: mol_type = other DNA
agccacagccaaaggac

SEQ ID NO: 177960 - DNA, 17 bp, synthetic construct
  source 1..17: mol_type = other DNA
cagccacagccaaagga

SEQ ID NO: 177961 - DNA, 17 bp, synthetic construct
  source 1..17: mol_type = other DNA
gcagccacagccaaagg

SEQ ID NO: 177962 - DNA, 17 bp, synthetic construct
  source 1..17: mol_type = other DNA
tgcagccacagccaaag

SEQ ID NO: 177963 - DNA, 17 bp, synthetic construct
  source 1..17: mol_type = other DNA
atgcagccacagccaaa

SEQ ID NO: 177964 - DNA, 17 bp, synthetic construct
  source 1..17: mol_type = other DNA
gatgcagccacagccaa

SEQ ID NO: 177965 - DNA, 17 bp, synthetic construct
  source 1..17: mol_type = other DNA
ggatgcagccacagcca

SEQ ID NO: 177966 - DNA, 17 bp, synthetic construct
  source 1..17: mol_type = other DNA
gggatgcagccacagcc

SEQ ID NO: 177967 - DNA, 17 bp, synthetic construct
  source 1..17: mol_type = other DNA
agggatgcagccacagc

SEQ ID NO: 177968 - DNA, 17 bp, synthetic construct
  source 1..17: mol_type = other DNA
gagggatgcagccacag

SEQ ID NO: 177969 - DNA, 17 bp, synthetic construct
  source 1..17: mol_type = other DNA
ggagggatgcagccaca

SEQ ID NO: 177970 - DNA, 17 bp, synthetic construct
  source 1..17: mol_type = other DNA
cggagggatgcagccac

SEQ ID NO: 177971 - DNA, 17 bp, synthetic construct
  source 1..17: mol_type = other DNA
tcggagggatgcagcca

SEQ ID NO: 177972 - DNA, 17 bp, synthetic construct
  source 1..17: mol_type = other DNA
atcggagggatgcagcc

SEQ ID NO: 177973 - DNA, 17 bp, synthetic construct
  source 1..17: mol_type = other DNA
gatcggagggatgcagc

SEQ ID NO: 177974 - DNA, 17 bp, synthetic construct
  source 1..17: mol_type = other DNA
agatcggagggatgcag

SEQ ID NO: 177975 - DNA, 17 bp, synthetic construct
  source 1..17: mol_type = other DNA
gagatcggagggatgca

SEQ ID NO: 177976 - DNA, 17 bp, synthetic construct
  source 1..17: mol_type = other DNA
agagatcggagggatgc

SEQ ID NO: 177977 - DNA, 17 bp, synthetic construct
  source 1..17: mol_type = other DNA
cagagatcggagggatg

SEQ ID NO: 177978 - DNA, 17 bp, synthetic construct
  source 1..17: mol_type = other DNA
gcagagatcggagggat

SEQ ID NO: 177979 - DNA, 17 bp, synthetic construct
  source 1..17: mol_type = other DNA
ggcagagatcggaggga

SEQ ID NO: 177980 - DNA, 17 bp, synthetic construct
  source 1..17: mol_type = other DNA
aggcagagatcggaggg

SEQ ID NO: 177981 - DNA, 17 bp, synthetic construct
  source 1..17: mol_type = other DNA
gaggcagagatcggagg

SEQ ID NO: 177982 - DNA, 17 bp, synthetic construct
  source 1..17: mol_type = other DNA
agaggcagagatcggag

SEQ ID NO: 177983 - DNA, 17 bp, synthetic construct
  source 1..17: mol_type = other DNA
cagaggcagagatcgga

SEQ ID NO: 177984 - DNA, 17 bp, synthetic construct
  source 1..17: mol_type = other DNA
gcagaggcagagatcgg

SEQ ID NO: 177985 - DNA, 17 bp, synthetic construct
  source 1..17: mol_type = other DNA
ggcagaggcagagatcg

SEQ ID NO: 177986 - DNA, 17 bp, synthetic construct
  source 1..17: mol_type = other DNA
aggcagaggcagagatc

SEQ ID NO: 177987 - DNA, 17 bp, synthetic construct
  source 1..17: mol_type = other DNA
gaggcagaggcagagat

SEQ ID NO: 177988 - DNA, 17 bp, synthetic construct
  source 1..17: mol_type = other DNA
agaggcagaggcagaga

SEQ ID NO: 177989 - DNA, 17 bp, synthetic construct
  source 1..17: mol_type = other DNA
gagaggcagaggcagag

SEQ ID NO: 177990 - DNA, 17 bp, synthetic construct
  source 1..17: mol_type = other DNA
agagaggcagaggcaga

SEQ ID NO: 177991 - DNA, 17 bp, synthetic construct
  source 1..17: mol_type = other DNA
cagagaggcagaggcag

SEQ ID NO: 177992 - DNA, 17 bp, synthetic construct
  source 1..17: mol_type = other DNA
acagagaggcagaggca

SEQ ID NO: 177993 - DNA, 17 bp, synthetic construct
  source 1..17: mol_type = other DNA
cacagagaggcagaggc

SEQ ID NO: 177994 - DNA, 17 bp, synthetic construct
  source 1..17: mol_type = other DNA
ccacagagaggcagagg

SEQ ID NO: 177995 - DNA, 17 bp, synthetic construct
  source 1..17: mol_type = other DNA
gccacagagaggcagag

SEQ ID NO: 177996 - DNA, 17 bp, synthetic construct
  source 1..17: mol_type = other DNA
ggccacagagaggcaga

SEQ ID NO: 177997 - DNA, 17 bp, synthetic construct
  source 1..17: mol_type = other DNA
aggccacagagaggcag

SEQ ID NO: 177998 - DNA, 17 bp, synthetic construct
  source 1..17: mol_type = other DNA
gaggccacagagaggca

SEQ ID NO: 177999 - DNA, 17 bp, synthetic construct
  source 1..17: mol_type = other DNA
ggaggccacagagaggc

SEQ ID NO: 178000 - DNA, 17 bp, synthetic construct
  source 1..17: mol_type = other DNA
gggaggccacagagagg

SEQ ID NO: 178001 - DNA, 17 bp, synthetic construct
  source 1..17: mol_type = other DNA
ggggaggccacagagag

SEQ ID NO: 178002 - DNA, 17 bp, synthetic construct
  source 1..17: mol_type = other DNA
aggggaggccacagaga

SEQ ID NO: 178003 - DNA, 17 bp, synthetic construct
  source 1..17: mol_type = other DNA
gaggggaggccacagag

SEQ ID NO: 178004 - DNA, 17 bp, synthetic construct
  source 1..17: mol_type = other DNA
agaggggaggccacaga

SEQ ID NO: 178005 - DNA, 17 bp, synthetic construct
  source 1..17: mol_type = other DNA
gagaggggaggccacag

SEQ ID NO: 178006 - DNA, 17 bp, synthetic construct
  source 1..17: mol_type = other DNA
agagaggggaggccaca

SEQ ID NO: 178007 - DNA, 17 bp, synthetic construct
  source 1..17: mol_type = other DNA
cagagaggggaggccac

SEQ ID NO: 178008 - DNA, 17 bp, synthetic construct
  source 1..17: mol_type = other DNA
acagagaggggaggcca

SEQ ID NO: 178009 - DNA, 17 bp, synthetic construct
  source 1..17: mol_type = other DNA
cacagagaggggaggcc

SEQ ID NO: 178010 - DNA, 17 bp, synthetic construct
  source 1..17: mol_type = other DNA
acacagagaggggaggc

SEQ ID NO: 178011 - DNA, 17 bp, synthetic construct
  source 1..17: mol_type = other DNA
gacacagagaggggagg

SEQ ID NO: 178012 - DNA, 17 bp, synthetic construct
  source 1..17: mol_type = other DNA
agacacagagaggggag

SEQ ID NO: 178013 - DNA, 17 bp, synthetic construct
  source 1..17: mol_type = other DNA
cagacacagagagggga

SEQ ID NO: 178014 - DNA, 17 bp, synthetic construct
  source 1..17: mol_type = other DNA
acagacacagagagggg

SEQ ID NO: 178015 - DNA, 17 bp, synthetic construct
  source 1..17: mol_type = other DNA
cacagacacagagaggg

SEQ ID NO: 178016 - DNA, 17 bp, synthetic construct
  source 1..17: mol_type = other DNA
acacagacacagagagg

SEQ ID NO: 178017 - DNA, 17 bp, synthetic construct
  source 1..17: mol_type = other DNA
gacacagacacagagag

SEQ ID NO: 178018 - DNA, 17 bp, synthetic construct
  source 1..17: mol_type = other DNA
agacacagacacagaga

SEQ ID NO: 178019 - DNA, 17 bp, synthetic construct
  source 1..17: mol_type = other DNA
gagacacagacacagag

SEQ ID NO: 178020 - DNA, 17 bp, synthetic construct
  source 1..17: mol_type = other DNA
agagacacagacacaga

SEQ ID NO: 178021 - DNA, 17 bp, synthetic construct
  source 1..17: mol_type = other DNA
aagagacacagacacag

SEQ ID NO: 178022 - DNA, 17 bp, synthetic construct
  source 1..17: mol_type = other DNA
gaagagacacagacaca

SEQ ID NO: 178023 - DNA, 17 bp, synthetic construct
  source 1..17: mol_type = other DNA
agaagagacacagacac

SEQ ID NO: 178024 - DNA, 17 bp, synthetic construct
  source 1..17: mol_type = other DNA
cagaagagacacagaca

SEQ ID NO: 178025 - DNA, 17 bp, synthetic construct
  source 1..17: mol_type = other DNA
acagaagagacacagac

SEQ ID NO: 178026 - DNA, 17 bp, synthetic construct
  source 1..17: mol_type = other DNA
gacagaagagacacaga

SEQ ID NO: 178027 - DNA, 17 bp, synthetic construct
  source 1..17: mol_type = other DNA
agacagaagagacacag

SEQ ID NO: 178028 - DNA, 17 bp, synthetic construct
  source 1..17: mol_type = other DNA
gagacagaagagacaca

SEQ ID NO: 178029 - DNA, 17 bp, synthetic construct
  source 1..17: mol_type = other DNA
ggagacagaagagacac

SEQ ID NO: 178030 - DNA, 17 bp, synthetic construct
  source 1..17: mol_type = other DNA
gggagacagaagagaca

SEQ ID NO: 178031 - DNA, 17 bp, synthetic construct
  source 1..17: mol_type = other DNA
cgggagacagaagagac

SEQ ID NO: 178032 - DNA, 17 bp, synthetic construct
  source 1..17: mol_type = other DNA
acgggagacagaagaga

SEQ ID NO: 178033 - DNA, 17 bp, synthetic construct
  source 1..17: mol_type = other DNA
tacgggagacagaagag

SEQ ID NO: 178034 - DNA, 17 bp, synthetic construct
  source 1..17: mol_type = other DNA
ttacgggagacagaaga

SEQ ID NO: 178035 - DNA, 17 bp, synthetic construct
  source 1..17: mol_type = other DNA
cttacgggagacagaag

SEQ ID NO: 178036 - DNA, 17 bp, synthetic construct
  source 1..17: mol_type = other DNA
ccttacgggagacagaa

SEQ ID NO: 178037 - DNA, 17 bp, synthetic construct
  source 1..17: mol_type = other DNA
tccttacgggagacaga

SEQ ID NO: 178038 - DNA, 17 bp, synthetic construct
  source 1..17: mol_type = other DNA
gtccttacgggagacag

SEQ ID NO: 178039 - DNA, 17 bp, synthetic construct
  source 1..17: mol_type = other DNA
tgtccttacgggagaca

SEQ ID NO: 178040 - DNA, 17 bp, synthetic construct
  source 1..17: mol_type = other DNA
gtgtccttacgggagac

SEQ ID NO: 178041 - DNA, 17 bp, synthetic construct
  source 1..17: mol_type = other DNA
agtgtccttacgggaga

SEQ ID NO: 178042 - DNA, 17 bp, synthetic construct
  source 1..17: mol_type = other DNA
cagtgtccttacgggag

SEQ ID NO: 178043 - DNA, 17 bp, synthetic construct
  source 1..17: mol_type = other DNA
ccagtgtccttacggga

SEQ ID NO: 178044 - DNA, 17 bp, synthetic construct
  source 1..17: mol_type = other DNA
accagtgtccttacggg

SEQ ID NO: 178045 - DNA, 17 bp, synthetic construct
  source 1..17: mol_type = other DNA
gaccagtgtccttacgg

SEQ ID NO: 178046 - DNA, 17 bp, synthetic construct
  source 1..17: mol_type = other DNA
tgaccagtgtccttacg

SEQ ID NO: 178047 - DNA, 17 bp, synthetic construct
  source 1..17: mol_type = other DNA
atgaccagtgtccttac

SEQ ID NO: 178048 - DNA, 17 bp, synthetic construct
  source 1..17: mol_type = other DNA
aatgaccagtgtcctta

SEQ ID NO: 178049 - DNA, 17 bp, synthetic construct
  source 1..17: mol_type = other DNA
caatgaccagtgtcctt

SEQ ID NO: 178050 - DNA, 17 bp, synthetic construct
  source 1..17: mol_type = other DNA
ccaatgaccagtgtcct

SEQ ID NO: 178051 - DNA, 17 bp, synthetic construct
  source 1..17: mol_type = other DNA
tccaatgaccagtgtcc

SEQ ID NO: 178052 - DNA, 17 bp, synthetic construct
  source 1..17: mol_type = other DNA
atccaatgaccagtgtc

SEQ ID NO: 178053 - DNA, 17 bp, synthetic construct
  source 1..17: mol_type = other DNA
aatccaatgaccagtgt

SEQ ID NO: 178054 - DNA, 17 bp, synthetic construct
  source 1..17: mol_type = other DNA
caatccaatgaccagtg

SEQ ID NO: 178055 - DNA, 17 bp, synthetic construct
  source 1..17: mol_type = other DNA
tcaatccaatgaccagt

SEQ ID NO: 178056 - DNA, 17 bp, synthetic construct
  source 1..17: mol_type = other DNA
ctcaatccaatgaccag

SEQ ID NO: 178057 - DNA, 17 bp, synthetic construct
  source 1..17: mol_type = other DNA
cctcaatccaatgacca

SEQ ID NO: 178058 - DNA, 17 bp, synthetic construct
  source 1..17: mol_type = other DNA
ccctcaatccaatgacc

SEQ ID NO: 178059 - DNA, 17 bp, synthetic construct
  source 1..17: mol_type = other DNA
gccctcaatccaatgac

SEQ ID NO: 178060 - DNA, 17 bp, synthetic construct
  source 1..17: mol_type = other DNA
ggccctcaatccaatga

SEQ ID NO: 178061 - DNA, 17 bp, synthetic construct
  source 1..17: mol_type = other DNA
gggccctcaatccaatg

SEQ ID NO: 178062 - DNA, 17 bp, synthetic construct
  source 1..17: mol_type = other DNA
tgggccctcaatccaat

SEQ ID NO: 178063 - DNA, 17 bp, synthetic construct
  source 1..17: mol_type = other DNA
gtgggccctcaatccaa

SEQ ID NO: 178064 - DNA, 17 bp, synthetic construct
  source 1..17: mol_type = other DNA
ggtgggccctcaatcca

SEQ ID NO: 178065 - DNA, 17 bp, synthetic construct
  source 1..17: mol_type = other DNA
gggtgggccctcaatcc

SEQ ID NO: 178066 - DNA, 17 bp, synthetic construct
  source 1..17: mol_type = other DNA
tgggtgggccctcaatc

SEQ ID NO: 178067 - DNA, 17 bp, synthetic construct
  source 1..17: mol_type = other DNA
ctgggtgggccctcaat

SEQ ID NO: 178068 - DNA, 17 bp, synthetic construct
  source 1..17: mol_type = other DNA
gctgggtgggccctcaa

SEQ ID NO: 178069 - DNA, 17 bp, synthetic construct
  source 1..17: mol_type = other DNA
agctgggtgggccctca

SEQ ID NO: 178070 - DNA, 17 bp, synthetic construct
  source 1..17: mol_type = other DNA
tagctgggtgggccctc

SEQ ID NO: 178071 - DNA, 17 bp, synthetic construct
  source 1..17: mol_type = other DNA
ctagctgggtgggccct

SEQ ID NO: 178072 - DNA, 17 bp, synthetic construct
  source 1..17: mol_type = other DNA
actagctgggtgggccc

SEQ ID NO: 178073 - DNA, 17 bp, synthetic construct
  source 1..17: mol_type = other DNA
gactagctgggtgggcc

SEQ ID NO: 178074 - DNA, 17 bp, synthetic construct
  source 1..17: mol_type = other DNA
ggactagctgggtgggc

SEQ ID NO: 178075 - DNA, 17 bp, synthetic construct
  source 1..17: mol_type = other DNA
tggactagctgggtggg

SEQ ID NO: 178076 - DNA, 17 bp, synthetic construct
  source 1..17: mol_type = other DNA
gtggactagctgggtgg

SEQ ID NO: 178077 - DNA, 17 bp, synthetic construct
  source 1..17: mol_type = other DNA
cgtggactagctgggtg

SEQ ID NO: 178078 - DNA, 17 bp, synthetic construct
  source 1..17: mol_type = other DNA
tcgtggactagctgggt

SEQ ID NO: 178079 - DNA, 17 bp, synthetic construct
  source 1..17: mol_type = other DNA
atcgtggactagctggg

SEQ ID NO: 178080 - DNA, 17 bp, synthetic construct
  source 1..17: mol_type = other DNA
catcgtggactagctgg

SEQ ID NO: 178081 - DNA, 17 bp, synthetic construct
  source 1..17: mol_type = other DNA
tcatcgtggactagctg

SEQ ID NO: 178082 - DNA, 17 bp, synthetic construct
  source 1..17: mol_type = other DNA
atcatcgtggactagct

SEQ ID NO: 178083 - DNA, 17 bp, synthetic construct
  source 1..17: mol_type = other DNA
catcatcgtggactagc

SEQ ID NO: 178084 - DNA, 17 bp, synthetic construct
  source 1..17: mol_type = other DNA
acatcatcgtggactag

SEQ ID NO: 178085 - DNA, 17 bp, synthetic construct
  source 1..17: mol_type = other DNA
gacatcatcgtggacta

SEQ ID NO: 178086 - DNA, 17 bp, synthetic construct
  source 1..17: mol_type = other DNA
tgacatcatcgtggact

SEQ ID NO: 178087 - DNA, 17 bp, synthetic construct
  source 1..17: mol_type = other DNA
atgacatcatcgtggac

SEQ ID NO: 178088 - DNA, 17 bp, synthetic construct
  source 1..17: mol_type = other DNA
aatgacatcatcgtgga

SEQ ID NO: 178089 - DNA, 17 bp, synthetic construct
  source 1..17: mol_type = other DNA
aaatgacatcatcgtgg

SEQ ID NO: 178090 - DNA, 17 bp, synthetic construct
  source 1..17: mol_type = other DNA
gaaatgacatcatcgtg

SEQ ID NO: 178091 - DNA, 17 bp, synthetic construct
  source 1..17: mol_type = other DNA
tgaaatgacatcatcgt

SEQ ID NO: 178092 - DNA, 17 bp, synthetic construct
  source 1..17: mol_type = other DNA
ttgaaatgacatcatcg

SEQ ID NO: 178093 - DNA, 17 bp, synthetic construct
  source 1..17: mol_type = other DNA
cttgaaatgacatcatc

SEQ ID NO: 178094 - DNA, 17 bp, synthetic construct
  source 1..17: mol_type = other DNA
tcttgaaatgacatcat

SEQ ID NO: 178095 - DNA, 17 bp, synthetic construct
  source 1..17: mol_type = other DNA
atcttgaaatgacatca

SEQ ID NO: 178096 - DNA, 17 bp, synthetic construct
  source 1..17: mol_type = other DNA
catcttgaaatgacatc

SEQ ID NO: 178097 - DNA, 17 bp, synthetic construct
  source 1..17: mol_type = other DNA
gcatcttgaaatgacat

SEQ ID NO: 178098 - DNA, 17 bp, synthetic construct
  source 1..17: mol_type = other DNA
agcatcttgaaatgaca

SEQ ID NO: 178099 - DNA, 17 bp, synthetic construct
  source 1..17: mol_type = other DNA
aagcatcttgaaatgac

SEQ ID NO: 178100 - DNA, 17 bp, synthetic construct
  source 1..17: mol_type = other DNA
gaagcatcttgaaatga

SEQ ID NO: 178101 - DNA, 17 bp, synthetic construct
  source 1..17: mol_type = other DNA
ggaagcatcttgaaatg

SEQ ID NO: 178102 - DNA, 17 bp, synthetic construct
  source 1..17: mol_type = other DNA
gggaagcatcttgaaat

SEQ ID NO: 178103 - DNA, 17 bp, synthetic construct
  source 1..17: mol_type = other DNA
agggaagcatcttgaaa

SEQ ID NO: 178104 - DNA, 17 bp, synthetic construct
  source 1..17: mol_type = other DNA
aagggaagcatcttgaa

SEQ ID NO: 178105 - DNA, 17 bp, synthetic construct
  source 1..17: mol_type = other DNA
taagggaagcatcttga

SEQ ID NO: 178106 - DNA, 17 bp, synthetic construct
  source 1..17: mol_type = other DNA
ttaagggaagcatcttg

SEQ ID NO: 178107 - DNA, 17 bp, synthetic construct
  source 1..17: mol_type = other DNA
attaagggaagcatctt

SEQ ID NO: 178108 - DNA, 17 bp, synthetic construct
  source 1..17: mol_type = other DNA
gattaagggaagcatct

SEQ ID NO: 178109 - DNA, 17 bp, synthetic construct
  source 1..17: mol_type = other DNA
ggattaagggaagcatc

SEQ ID NO: 178110 - DNA, 17 bp, synthetic construct
  source 1..17: mol_type = other DNA
gggattaagggaagcat

SEQ ID NO: 178111 - DNA, 17 bp, synthetic construct
  source 1..17: mol_type = other DNA
tgggattaagggaagca

SEQ ID NO: 178112 - DNA, 17 bp, synthetic construct
  source 1..17: mol_type = other DNA
atgggattaagggaagc

SEQ ID NO: 178113 - DNA, 17 bp, synthetic construct
  source 1..17: mol_type = other DNA
gatgggattaagggaag

SEQ ID NO: 178114 - DNA, 17 bp, synthetic construct
  source 1..17: mol_type = other DNA
agatgggattaagggaa

SEQ ID NO: 178115 - DNA, 17 bp, synthetic construct
  source 1..17: mol_type = other DNA
cagatgggattaaggga

SEQ ID NO: 178116 - DNA, 17 bp, synthetic construct
  source 1..17: mol_type = other DNA
gcagatgggattaaggg

SEQ ID NO: 178117 - DNA, 17 bp, synthetic construct
  source 1..17: mol_type = other DNA
tgcagatgggattaagg

SEQ ID NO: 178118 - DNA, 17 bp, synthetic construct
  source 1..17: mol_type = other DNA
ttgcagatgggattaag

SEQ ID NO: 178119 - DNA, 17 bp, synthetic construct
  source 1..17: mol_type = other DNA
tttgcagatgggattaa

SEQ ID NO: 178120 - DNA, 17 bp, synthetic construct
  source 1..17: mol_type = other DNA
ctttgcagatgggatta

SEQ ID NO: 178121 - DNA, 17 bp, synthetic construct
  source 1..17: mol_type = other DNA
tctttgcagatgggatt

SEQ ID NO: 178122 - DNA, 17 bp, synthetic construct
  source 1..17: mol_type = other DNA
gtctttgcagatgggat

SEQ ID NO: 178123 - DNA, 17 bp, synthetic construct
  source 1..17: mol_type = other DNA
tgtctttgcagatggga

SEQ ID NO: 178124 - DNA, 17 bp, synthetic construct
  source 1..17: mol_type = other DNA
gtgtctttgcagatggg

SEQ ID NO: 178125 - DNA, 17 bp, synthetic construct
  source 1..17: mol_type = other DNA
agtgtctttgcagatgg

SEQ ID NO: 178126 - DNA, 17 bp, synthetic construct
  source 1..17: mol_type = other DNA
aagtgtctttgcagatg

SEQ ID NO: 178127 - DNA, 17 bp, synthetic construct
  source 1..17: mol_type = other DNA
aaagtgtctttgcagat

SEQ ID NO: 178128 - DNA, 17 bp, synthetic construct
  source 1..17: mol_type = other DNA
gaaagtgtctttgcaga

SEQ ID NO: 178129 - DNA, 17 bp, synthetic construct
  source 1..17: mol_type = other DNA
agaaagtgtctttgcag

SEQ ID NO: 178130 - DNA, 17 bp, synthetic construct
  source 1..17: mol_type = other DNA
gagaaagtgtctttgca

SEQ ID NO: 178131 - DNA, 17 bp, synthetic construct
  source 1..17: mol_type = other DNA
ggagaaagtgtctttgc

SEQ ID NO: 178132 - DNA, 17 bp, synthetic construct
  source 1..17: mol_type = other DNA
gggagaaagtgtctttg

SEQ ID NO: 178133 - DNA, 17 bp, synthetic construct
  source 1..17: mol_type = other DNA
cgggagaaagtgtcttt

SEQ ID NO: 178134 - DNA, 17 bp, synthetic construct
  source 1..17: mol_type = other DNA
ccgggagaaagtgtctt

SEQ ID NO: 178135 - DNA, 17 bp, synthetic construct
  source 1..17: mol_type = other DNA
gccgggagaaagtgtct

SEQ ID NO: 178136 - DNA, 17 bp, synthetic construct
  source 1..17: mol_type = other DNA
tgccgggagaaagtgtc

SEQ ID NO: 178137 - DNA, 17 bp, synthetic construct
  source 1..17: mol_type = other DNA
ttgccgggagaaagtgt

SEQ ID NO: 178138 - DNA, 17 bp, synthetic construct
  source 1..17: mol_type = other DNA
tttgccgggagaaagtg

SEQ ID NO: 178139 - DNA, 17 bp, synthetic construct
  source 1..17: mol_type = other DNA
ctttgccgggagaaagt

SEQ ID NO: 178140 - DNA, 17 bp, synthetic construct
  source 1..17: mol_type = other DNA
gctttgccgggagaaag

SEQ ID NO: 178141 - DNA, 17 bp, synthetic construct
  source 1..17: mol_type = other DNA
ggctttgccgggagaaa

SEQ ID NO: 178142 - DNA, 17 bp, synthetic construct
  source 1..17: mol_type = other DNA
tggctttgccgggagaa

SEQ ID NO: 178143 - DNA, 17 bp, synthetic construct
  source 1..17: mol_type = other DNA
gtggctttgccgggaga

SEQ ID NO: 178144 - DNA, 17 bp, synthetic construct
  source 1..17: mol_type = other DNA
tgtggctttgccgggag

SEQ ID NO: 178145 - DNA, 17 bp, synthetic construct
  source 1..17: mol_type = other DNA
atgtggctttgccggga

SEQ ID NO: 178146 - DNA, 17 bp, synthetic construct
  source 1..17: mol_type = other DNA
catgtggctttgccggg

SEQ ID NO: 178147 - DNA, 17 bp, synthetic construct
  source 1..17: mol_type = other DNA
gcatgtggctttgccgg

SEQ ID NO: 178148 - DNA, 17 bp, synthetic construct
  source 1..17: mol_type = other DNA
cgcatgtggctttgccg

SEQ ID NO: 178149 - DNA, 17 bp, synthetic construct
  source 1..17: mol_type = other DNA
ccgcatgtggctttgcc

SEQ ID NO: 178150 - DNA, 17 bp, synthetic construct
  source 1..17: mol_type = other DNA
tccgcatgtggctttgc

SEQ ID NO: 178151 - DNA, 17 bp, synthetic construct
  source 1..17: mol_type = other DNA
ctccgcatgtggctttg

SEQ ID NO: 178152 - DNA, 17 bp, synthetic construct
  source 1..17: mol_type = other DNA
cctccgcatgtggcttt

SEQ ID NO: 178153 - DNA, 17 bp, synthetic construct
  source 1..17: mol_type = other DNA
acctccgcatgtggctt

SEQ ID NO: 178154 - DNA, 17 bp, synthetic construct
  source 1..17: mol_type = other DNA
aacctccgcatgtggct

SEQ ID NO: 178155 - DNA, 17 bp, synthetic construct
  source 1..17: mol_type = other DNA
gaacctccgcatgtggc

SEQ ID NO: 178156 - DNA, 17 bp, synthetic construct
  source 1..17: mol_type = other DNA
agaacctccgcatgtgg

SEQ ID NO: 178157 - DNA, 17 bp, synthetic construct
  source 1..17: mol_type = other DNA
cagaacctccgcatgtg

SEQ ID NO: 178158 - DNA, 17 bp, synthetic construct
  source 1..17: mol_type = other DNA
ccagaacctccgcatgt

SEQ ID NO: 178159 - DNA, 17 bp, synthetic construct
  source 1..17: mol_type = other DNA
cccagaacctccgcatg

SEQ ID NO: 178160 - DNA, 17 bp, synthetic construct
  source 1..17: mol_type = other DNA
tcccagaacctccgcat

SEQ ID NO: 178161 - DNA, 17 bp, synthetic construct
  source 1..17: mol_type = other DNA
atcccagaacctccgca

SEQ ID NO: 178162 - DNA, 17 bp, synthetic construct
  source 1..17: mol_type = other DNA
tatcccagaacctccgc

SEQ ID NO: 178163 - DNA, 17 bp, synthetic construct
  source 1..17: mol_type = other DNA
ctatcccagaacctccg

SEQ ID NO: 178164 - DNA, 17 bp, synthetic construct
  source 1..17: mol_type = other DNA
gctatcccagaacctcc

SEQ ID NO: 178165 - DNA, 17 bp, synthetic construct
  source 1..17: mol_type = other DNA
ggctatcccagaacctc

SEQ ID NO: 178166 - DNA, 17 bp, synthetic construct
  source 1..17: mol_type = other DNA
tggctatcccagaacct

SEQ ID NO: 178167 - DNA, 17 bp, synthetic construct
  source 1..17: mol_type = other DNA
atggctatcccagaacc

SEQ ID NO: 178168 - DNA, 17 bp, synthetic construct
  source 1..17: mol_type = other DNA
tatggctatcccagaac

SEQ ID NO: 178169 - DNA, 17 bp, synthetic construct
  source 1..17: mol_type = other DNA
ctatggctatcccagaa

SEQ ID NO: 178170 - DNA, 17 bp, synthetic construct
  source 1..17: mol_type = other DNA
tctatggctatcccaga

SEQ ID NO: 178171 - DNA, 17 bp, synthetic construct
  source 1..17: mol_type = other DNA
atctatggctatcccag

SEQ ID NO: 178172 - DNA, 17 bp, synthetic construct
  source 1..17: mol_type = other DNA
aatctatggctatccca

SEQ ID NO: 178173 - DNA, 17 bp, synthetic construct
  source 1..17: mol_type = other DNA
aaatctatggctatccc

SEQ ID NO: 178174 - DNA, 17 bp, synthetic construct
  source 1..17: mol_type = other DNA
aaaatctatggctatcc

SEQ ID NO: 178175 - DNA, 17 bp, synthetic construct
  source 1..17: mol_type = other DNA
caaaatctatggctatc

SEQ ID NO: 178176 - DNA, 17 bp, synthetic construct
  source 1..17: mol_type = other DNA
ccaaaatctatggctat

SEQ ID NO: 178177 - DNA, 17 bp, synthetic construct
  source 1..17: mol_type = other DNA
cccaaaatctatggcta

SEQ ID NO: 178178 - DNA, 17 bp, synthetic construct
  source 1..17: mol_type = other DNA
ccccaaaatctatggct

SEQ ID NO: 178179 - DNA, 17 bp, synthetic construct
  source 1..17: mol_type = other DNA
cccccaaaatctatggc

SEQ ID NO: 178180 - DNA, 17 bp, synthetic construct
  source 1..17: mol_type = other DNA
tcccccaaaatctatgg

SEQ ID NO: 178181 - DNA, 17 bp, synthetic construct
  source 1..17: mol_type = other DNA
gtcccccaaaatctatg

SEQ ID NO: 178182 - DNA, 17 bp, synthetic construct
  source 1..17: mol_type = other DNA
ggtcccccaaaatctat

SEQ ID NO: 178183 - DNA, 17 bp, synthetic construct
  source 1..17: mol_type = other DNA
gggtcccccaaaatcta

SEQ ID NO: 178184 - DNA, 17 bp, synthetic construct
  source 1..17: mol_type = other DNA
ggggtcccccaaaatct

SEQ ID NO: 178185 - DNA, 17 bp, synthetic construct
  source 1..17: mol_type = other DNA
tggggtcccccaaaatc

SEQ ID NO: 178186 - DNA, 17 bp, synthetic construct
  source 1..17: mol_type = other DNA
atggggtcccccaaaat

SEQ ID NO: 178187 - DNA, 17 bp, synthetic construct
  source 1..17: mol_type = other DNA
aatggggtcccccaaaa

SEQ ID NO: 178188 - DNA, 17 bp, synthetic construct
  source 1..17: mol_type = other DNA
gaatggggtcccccaaa

SEQ ID NO: 178189 - DNA, 17 bp, synthetic construct
  source 1..17: mol_type = other DNA
agaatggggtcccccaa

SEQ ID NO: 178190 - DNA, 17 bp, synthetic construct
  source 1..17: mol_type = other DNA
tagaatggggtccccca

SEQ ID NO: 178191 - DNA, 17 bp, synthetic construct
  source 1..17: mol_type = other DNA
gtagaatggggtccccc

SEQ ID NO: 178192 - DNA, 17 bp, synthetic construct
  source 1..17: mol_type = other DNA
tgtagaatggggtcccc

SEQ ID NO: 178193 - DNA, 17 bp, synthetic construct
  source 1..17: mol_type = other DNA
gtgtagaatggggtccc

SEQ ID NO: 178194 - DNA, 17 bp, synthetic construct
  source 1..17: mol_type = other DNA
tgtgtagaatggggtcc

SEQ ID NO: 178195 - DNA, 17 bp, synthetic construct
  source 1..17: mol_type = other DNA
gtgtgtagaatggggtc

SEQ ID NO: 178196 - DNA, 17 bp, synthetic construct
  source 1..17: mol_type = other DNA
agtgtgtagaatggggt

SEQ ID NO: 178197 - DNA, 17 bp, synthetic construct
  source 1..17: mol_type = other DNA
cagtgtgtagaatgggg

SEQ ID NO: 178198 - DNA, 17 bp, synthetic construct
  source 1..17: mol_type = other DNA
ccagtgtgtagaatggg

SEQ ID NO: 178199 - DNA, 17 bp, synthetic construct
  source 1..17: mol_type = other DNA
tccagtgtgtagaatgg

SEQ ID NO: 178200 - DNA, 17 bp, synthetic construct
  source 1..17: mol_type = other DNA
gtccagtgtgtagaatg

SEQ ID NO: 178201 - DNA, 17 bp, synthetic construct
  source 1..17: mol_type = other DNA
ggtccagtgtgtagaat

SEQ ID NO: 178202 - DNA, 17 bp, synthetic construct
  source 1..17: mol_type = other DNA
gggtccagtgtgtagaa

SEQ ID NO: 178203 - DNA, 17 bp, synthetic construct
  source 1..17: mol_type = other DNA
tgggtccagtgtgtaga

SEQ ID NO: 178204 - DNA, 17 bp, synthetic construct
  source 1..17: mol_type = other DNA
atgggtccagtgtgtag

SEQ ID NO: 178205 - DNA, 17 bp, synthetic construct
  source 1..17: mol_type = other DNA
aatgggtccagtgtgta

SEQ ID NO: 178206 - DNA, 17 bp, synthetic construct
  source 1..17: mol_type = other DNA
aaatgggtccagtgtgt

SEQ ID NO: 178207 - DNA, 17 bp, synthetic construct
  source 1..17: mol_type = other DNA
aaaatgggtccagtgtg

SEQ ID NO: 178208 - DNA, 17 bp, synthetic construct
  source 1..17: mol_type = other DNA
aaaaatgggtccagtgt

SEQ ID NO: 178209 - DNA, 17 bp, synthetic construct
  source 1..17: mol_type = other DNA
taaaaatgggtccagtg

SEQ ID NO: 178210 - DNA, 17 bp, synthetic construct
  source 1..17: mol_type = other DNA
ataaaaatgggtccagt

SEQ ID NO: 178211 - DNA, 17 bp, synthetic construct
  source 1..17: mol_type = other DNA
tataaaaatgggtccag

SEQ ID NO: 178212 - DNA, 17 bp, synthetic construct
  source 1..17: mol_type = other DNA
ctataaaaatgggtcca

SEQ ID NO: 178213 - DNA, 17 bp, synthetic construct
  source 1..17: mol_type = other DNA
tctataaaaatgggtcc

SEQ ID NO: 178214 - DNA, 17 bp, synthetic construct
  source 1..17: mol_type = other DNA
gtctataaaaatgggtc

SEQ ID NO: 178215 - DNA, 17 bp, synthetic construct
  source 1..17: mol_type = other DNA
cgtctataaaaatgggt

SEQ ID NO: 178216 - DNA, 17 bp, synthetic construct
  source 1..17: mol_type = other DNA
tcgtctataaaaatggg

SEQ ID NO: 178217 - DNA, 17 bp, synthetic construct
  source 1..17: mol_type = other DNA
ctcgtctataaaaatgg

SEQ ID NO: 178218 - DNA, 17 bp, synthetic construct
  source 1..17: mol_type = other DNA
cctcgtctataaaaatg

SEQ ID NO: 178219 - DNA, 17 bp, synthetic construct
  source 1..17: mol_type = other DNA
gcctcgtctataaaaat

SEQ ID NO: 178220 - DNA, 17 bp, synthetic construct
  source 1..17: mol_type = other DNA
tgcctcgtctataaaaa

SEQ ID NO: 178221 - DNA, 17 bp, synthetic construct
  source 1..17: mol_type = other DNA
ctgcctcgtctataaaa

SEQ ID NO: 178222 - DNA, 17 bp, synthetic construct
  source 1..17: mol_type = other DNA
gctgcctcgtctataaa

SEQ ID NO: 178223 - DNA, 17 bp, synthetic construct
  source 1..17: mol_type = other DNA
agctgcctcgtctataa

SEQ ID NO: 178224 - DNA, 17 bp, synthetic construct
  source 1..17: mol_type = other DNA
cagctgcctcgtctata

SEQ ID NO: 178225 - DNA, 17 bp, synthetic construct
  source 1..17: mol_type = other DNA
tcagctgcctcgtctat

SEQ ID NO: 178226 - DNA, 17 bp, synthetic construct
  source 1..17: mol_type = other DNA
ctcagctgcctcgtcta

SEQ ID NO: 178227 - DNA, 17 bp, synthetic construct
  source 1..17: mol_type = other DNA
cctcagctgcctcgtct

SEQ ID NO: 178228 - DNA, 17 bp, synthetic construct
  source 1..17: mol_type = other DNA
gcctcagctgcctcgtc

SEQ ID NO: 178229 - DNA, 17 bp, synthetic construct
  source 1..17: mol_type = other DNA
ggcctcagctgcctcgt

SEQ ID NO: 178230 - DNA, 17 bp, synthetic construct
  source 1..17: mol_type = other DNA
gggcctcagctgcctcg

SEQ ID NO: 178231 - DNA, 17 bp, synthetic construct
  source 1..17: mol_type = other DNA
ggggcctcagctgcctc

SEQ ID NO: 178232 - DNA, 17 bp, synthetic construct
  source 1..17: mol_type = other DNA
tggggcctcagctgcct

SEQ ID NO: 178233 - DNA, 17 bp, synthetic construct
  source 1..17: mol_type = other DNA
ctggggcctcagctgcc
